United States Patent Application Publication US 2007/0042381 A1 - sequence listing, part 15

SEQ ID NO: 633078 - RNA, 22 nt, Human
uugaacagcuguuacauuguua

SEQ ID NO: 633079 - RNA, 22 nt, Human
ugagcuuccucccugcauccau

SEQ ID NO: 633080 - RNA, 22 nt, Human
agaaaauaauuucuuggcuggu

SEQ ID NO: 633081 - RNA, 22 nt, Human
uggccucaagucugagggccuu

SEQ ID NO: 633082 - RNA, 22 nt, Human
uuuggcucggcugcugauggug

SEQ ID NO: 633083 - RNA, 22 nt, Human
uguggcugcuccugggugguca

SEQ ID NO: 633084 - RNA, 20 nt, Human
aggcucagcugagcucuugg

SEQ ID NO: 633085 - RNA, 22 nt, Human
cugagaacaucauucagauauu

SEQ ID NO: 633086 - RNA, 22 nt, Human
ucaguaauauucuuuaaaauac

SEQ ID NO: 633087 - RNA, 22 nt, Human
uauguuucuuccuuuucauaca

SEQ ID NO: 633088 - RNA, 22 nt, Human
agugggugggugucugacaguu

SEQ ID NO: 633089 - RNA, 22 nt, Human
uggaaugugcuagggcuguggc

SEQ ID NO: 633090 - RNA, 22 nt, Human
gugcccugaguggguaggagag

SEQ ID NO: 633091 - RNA, 22 nt, Human
uaauuuauuucaacugccaagg

SEQ ID NO: 633092 - RNA, 22 nt, Human
cagaacauuccaugugcccugc

SEQ ID NO: 633093 - RNA, 22 nt, Human
uauaaagagucucaaagaaguu

SEQ ID NO: 633094 - RNA, 22 nt, Human
aacucuauuuacccuacuaaac

SEQ ID NO: 633095 - RNA, 22 nt, Human
aaugggaggauuuucucucuug

SEQ ID NO: 633096 - RNA, 22 nt, Human
gggauggggucgggacccugcu

SEQ ID NO: 633097 - RNA, 20 nt, Human
aguagcagugugacauugac

SEQ ID NO: 633098 - RNA, 22 nt, Human
aacauugaguucuacuuccauu

SEQ ID NO: 633099 - RNA, 22 nt, Human
uaacuucacuggacucagcagc

SEQ ID NO: 633100 - RNA, 17 nt, Human
acaagcaguggccaugg

SEQ ID NO: 633101 - RNA, 22 nt, Human
cugcuuuaaguauucaacaaag

SEQ ID NO: 633102 - RNA, 22 nt, Human
ggccccaggaccuccacggucc

SEQ ID NO: 633103 - RNA, 22 nt, Human
uugcucagcacuggagccagcu

SEQ ID NO: 633104 - RNA, 22 nt, Human
gugcgcuucuuccugagccagg

SEQ ID NO: 633105 - RNA, 22 nt, Human
ugugauuuccagccauuaaaaa

SEQ ID NO: 633106 - RNA, 22 nt, Human
cagccccuuccuggcaucugga

SEQ ID NO: 633107 - RNA, 18 nt, Human
agggcucucugcuggguu

SEQ ID NO: 633108 - RNA, 22 nt, Human
gauauucaacuaaagugaauua

SEQ ID NO: 633109 - RNA, 22 nt, Human
gcaguggcuaagcucgcaugca

SEQ ID NO: 633110 - RNA, 22 nt, Human
uacugccaaauugcagcaaugu

SEQ ID NO: 633111 - RNA, 22 nt, Human
uaaaggguagguuuuacuguaa

SEQ ID NO: 633112 - RNA, 22 nt, Human
guuucucaacaugcuuucuaac

SEQ ID NO: 633113 - RNA, 22 nt, Human
agcuuucguuccuuagacacau

SEQ ID NO: 633114 - RNA, 22 nt, Human
uguaauuuuacgugacacaguu

SEQ ID NO: 633115 - RNA, 22 nt, Human
auggcaggaugagacaacaauu

SEQ ID NO: 633116 - RNA, 22 nt, Human
gcccaggcuagcguagagugca

SEQ ID NO: 633117 - RNA, 22 nt, Human
uuuaucuucugcaguucuggcu

SEQ ID NO: 633118 - RNA, 22 nt, Human
ccucaccuuuucucugauugcu

SEQ ID NO: 633119 - RNA, 22 nt, Human
cucagucaguuuuugugagaga

SEQ ID NO: 633120 - RNA, 22 nt, Human
aacacaggccagccugugcagu

SEQ ID NO: 633121 - RNA, 22 nt, Human
aagaugguaaggcagcuggcag

SEQ ID NO: 633122 - RNA, 22 nt, Human
cggcagcuccgcgccguaggac

SEQ ID NO: 633123 - RNA, 22 nt, Human
cacugccuccccaggcuccaca

SEQ ID NO: 633124 - RNA, 23 nt, Human
ccugccuguucuaacuccauuuc

SEQ ID NO: 633125 - RNA, 22 nt, Human
acuccccagacugccaugcugg

SEQ ID NO: 633126 - RNA, 22 nt, Human
uccaggcaugucugaguccuuc

SEQ ID NO: 633127 - RNA, 22 nt, Human
aaaggacaugucaauaucaggc

SEQ ID NO: 633128 - RNA, 22 nt, Human
agcagggaggcccagggcacug

SEQ ID NO: 633129 - RNA, 22 nt, Human
cugaggcaggggcagcuggaga

SEQ ID NO: 633130 - RNA, 22 nt, Human
aagcauuuuucacagcaacagc

SEQ ID NO: 633131 - RNA, 22 nt, Human
accagcuccaggccccugcugg

SEQ ID NO: 633132 - RNA, 21 nt, Human
gggcacugaaagggaauagca

SEQ ID NO: 633133 - RNA, 22 nt, Human
cauagcgguauuccacgugguu

SEQ ID NO: 633134 - RNA, 22 nt, Human
ucuaacuuguauguauaguuuu

SEQ ID NO: 633135 - RNA, 22 nt, Human
auaugaagucagacaaacuggg

SEQ ID NO: 633136 - RNA, 22 nt, Human
cagcuauuuucucauuaaggau

SEQ ID NO: 633137 - RNA, 22 nt, Human
agucuggaguagagccuagaaa

SEQ ID NO: 633138 - RNA, 22 nt, Human
ugucuggaugucuggagcaucg

SEQ ID NO: 633139 - RNA, 22 nt, Human
ugguaaagaaaugucagggcag

SEQ ID NO: 633140 - RNA, 22 nt, Human
gagcagcucagaggacuagugu

SEQ ID NO: 633141 - RNA, 22 nt, Human
gagcagaucucaggccuucugu

SEQ ID NO: 633142 - RNA, 22 nt, Human
agugcugaagacuggcuaggga

SEQ ID NO: 633143 - RNA, 22 nt, Human
ugccuuuaacaagaucuccaga

SEQ ID NO: 633144 - RNA, 22 nt, Human
gaauuuccucuaaaccccugag

SEQ ID NO: 633145 - RNA, 22 nt, Human
uuguuugaggucacugauauuu

SEQ ID NO: 633146 - RNA, 22 nt, Human
uuggugagugcuauguaccaca

SEQ ID NO: 633147 - RNA, 22 nt, Human
ucucuaaaucugguucacuugc

SEQ ID NO: 633148 - RNA, 22 nt, Human
acagacauuuuaagacacuuua

SEQ ID NO: 633149 - RNA, 22 nt, Human
agaaggcucacuaagagugacu

SEQ ID NO: 633150 - RNA, 22 nt, Human
uguauauguuuguauguacaca

SEQ ID NO: 633151 - RNA, 22 nt, Human
aaagcuaguaauauuuuaaucc

SEQ ID NO: 633152 - RNA, 22 nt, Human
cuggcccuaggcaaacacagau

SEQ ID NO: 633153 - RNA, 22 nt, Human
cacagcugucagcugaccuagg

SEQ ID NO: 633154 - RNA, 22 nt, Human
cugugaguaaugaccugucuug

SEQ ID NO: 633155 - RNA, 23 nt, Human
ucagugcaaaaauaggauuuugg

SEQ ID NO: 633156 - RNA, 22 nt, Human
cccagcagaccgcugugauggc

SEQ ID NO: 633157 - RNA, 18 nt, Human
guccacagcccucacagc

SEQ ID NO: 633158 - RNA, 22 nt, Human
cagcagggaagcugugcuguuu

SEQ ID NO: 633159 - RNA, 22 nt, Human
aacauguaaauaucauuguacu

SEQ ID NO: 633160 - RNA, 22 nt, Human
uaauuagagucacaaguaacca

SEQ ID NO: 633161 - RNA, 22 nt, Human
ggcucaggagaggggcuaaaag

SEQ ID NO: 633162 - RNA, 22 nt, Human
ucacacaugaguaaauacaggg

SEQ ID NO: 633163 - RNA, 22 nt, Human
cagcugccccgcuggcugacca

SEQ ID NO: 633164 - RNA, 21 nt, Human
gcagcagaggcuugacagaca

SEQ ID NO: 633165 - RNA, 22 nt, Human
uggguuaagccucauucauagc

SEQ ID NO: 633166 - RNA, 22 nt, Human
uggagagcacugucucauuuug

SEQ ID NO: 633167 - RNA, 22 nt, Human
agagcuguagcuuccuagagcc

SEQ ID NO: 633168 - RNA, 22 nt, Human
uggcuuccagaacugagcaaca

SEQ ID NO: 633169 - RNA, 22 nt, Human
cugugacuggaaucuggcucuu

SEQ ID NO: 633170 - RNA, 23 nt, Human
gcucagagguuuuucucuggaug

SEQ ID NO: 633171 - RNA, 16 nt, Human
ucccugggaguggugg

SEQ ID NO: 633172 - RNA, 19 nt, Human
agugugagacuccaucuca

SEQ ID NO: 633173 - RNA, 19 nt, Human
gguguccuagagauaagag

SEQ ID NO: 633174 - RNA, 22 nt, Human
ugcuggaggccagaagucugag

SEQ ID NO: 633175 - RNA, 22 nt, Human
ugcagagguuuccaggcaaguu

SEQ ID NO: 633176 - RNA, 22 nt, Human
aggcauuuccuaugggcagaga

SEQ ID NO: 633177 - RNA, 22 nt, Human
aaaagagcuugguugauuuugc

SEQ ID NO: 633178 - RNA, 22 nt, Human
aucuggcucccuuggaauccgu

SEQ ID NO: 633179 - RNA, 22 nt, Human
ugccaggcucaggaugucccug

SEQ ID NO: 633180 - RNA, 20 nt, Human
ucagagagagggugccacuu

SEQ ID NO: 633181 - RNA, 22 nt, Human
ucagauuuauguggcuaggcuc

SEQ ID NO: 633182 - RNA, 22 nt, Human
caggaagcugccggugagcgag

SEQ ID NO: 633183 - RNA, 19 nt, Human
augcaacaaaaguguaaga

SEQ ID NO: 633184 - RNA, 22 nt, Human
gguuugaacagcuuuggagaag

SEQ ID NO: 633185 - RNA, 22 nt, Human
uaacuacuaauugaugauaaug

SEQ ID NO: 633186 - RNA, 22 nt, Human
ggaaaagaaagggacugauugg

SEQ ID NO: 633187 - RNA, 23 nt, Human
aucuguucaucugacacagauuc

SEQ ID NO: 633188 - RNA, 22 nt, Human
gcaggaguggagaccaugggga

SEQ ID NO: 633189 - RNA, 22 nt, Human
uaggccuaagagauacuacugu

SEQ ID NO: 633190 - RNA, 22 nt, Human
ucugaauucugacaauuugaau

SEQ ID NO: 633191 - RNA, 22 nt, Human
gggcagccccagcgcguuggcu

SEQ ID NO: 633192 - RNA, 22 nt, Human
gugggcagccccuucaaggcca

SEQ ID NO: 633193 - RNA, 23 nt, Human
acauuacacgcaguaauugcccc

SEQ ID NO: 633194 - RNA, 22 nt, Human
aaggccugggaguacugggaca

SEQ ID NO: 633195 - RNA, 22 nt, Human
aggagcacuaauuccugcagag

SEQ ID NO: 633196 - RNA, 22 nt, Human
accaggaacaagccauggagga

SEQ ID NO: 633197 - RNA, 22 nt, Human
gggaauuauagcugucacaggc

SEQ ID NO: 633198 - RNA, 22 nt, Human
cuguccugcccacccugcaggg

SEQ ID NO: 633199 - RNA, 22 nt, Human
acucugagaaucccuggacuuu

SEQ ID NO: 633200 - RNA, 22 nt, Human
uucugauaacaaacaccaauuu

SEQ ID NO: 633201 - RNA, 22 nt, Human
ucagucuuucgaauucagccag

SEQ ID NO: 633202 - RNA, 22 nt, Human
agcuccuguaguacauauuauu

SEQ ID NO: 633203 - RNA, 22 nt, Human
uugagagugccaagcauccucc

SEQ ID NO: 633204 - RNA, 22 nt, Human
agagaucaguuaaaaucuuuuu

SEQ ID NO: 633205 - RNA, 22 nt, Human
uggaaaaugugacuauucuaaa

SEQ ID NO: 633206 - RNA, 22 nt, Human
agggugcaggggaagcugcccu

SEQ ID NO: 633207 - RNA, 22 nt, Human
uaugugauauaggcuauuugau

SEQ ID NO: 633208 - RNA, 22 nt, Human
ucccacagaccaugaguggaag

SEQ ID NO: 633209 - RNA, 22 nt, Human
ccugaagaugagggacagcuaa

SEQ ID NO: 633210 - RNA, 22 nt, Human
uacaguauuaugagugauugaa

SEQ ID NO: 633211 - RNA, 22 nt, Human
gacauuuaaauugcaggcagcc

SEQ ID NO: 633212 - RNA, 22 nt, Human
uggcuggcugucaaggaaagcc

SEQ ID NO: 633213 - RNA, 22 nt, Human
cccacuucaugggcaggaagga

SEQ ID NO: 633214 - RNA, 22 nt, Human
agugucuggucucugaacuaaa

SEQ ID NO: 633215 - RNA, 22 nt, Human
accuccaggaagcucuugguac

SEQ ID NO: 633216 - RNA, 22 nt, Human
accuucuggucugccugacagc

SEQ ID NO: 633217 - RNA, 22 nt, Human
ucuucuuaaaguauguucucuu

SEQ ID NO: 633218 - RNA, 22 nt, Human
gauuucuucauuuguggugaau

SEQ ID NO: 633219 - RNA, 22 nt, Human
cucccacuccuggcucaccaca

SEQ ID NO: 633220 - RNA, 22 nt, Human
gcagcugcuggaaguuccugcc

SEQ ID NO: 633221 - RNA, 22 nt, Human
cagaggcagccgggggagaacg

SEQ ID NO: 633222 - RNA, 22 nt, Human
aagaaauacaugguuuuugagu

SEQ ID NO: 633223 - RNA, 22 nt, Human
gggcaggugauuuuggcuccau

SEQ ID NO: 633224 - RNA, 22 nt, Human
ccuggagcacagcccaguccca

SEQ ID NO: 633225 - RNA, 22 nt, Human
ugaaaaaccucaguccgcuuua

SEQ ID NO: 633226 - RNA, 22 nt, Human
ccagcuuuagguugccugccag

SEQ ID NO: 633227 - RNA, 22 nt, Human
gcauggcauuugaagguagaag

SEQ ID NO: 633228 - RNA, 22 nt, Human
uuuacaagaaaucaugaugcua

SEQ ID NO: 633229 - RNA, 22 nt, Human
cacuugaauggcauuguuccuu

SEQ ID NO: 633230 - RNA, 22 nt, Human
cauacauauguggaugucauau

SEQ ID NO: 633231 - RNA, 22 nt, Human
gcuuggccagcagccgggaugc

SEQ ID NO: 633232 - RNA, 22 nt, Human
gcuuccagaccccagucccuca

SEQ ID NO: 633233 - RNA, 22 nt, Human
cacagggcagugcugcccacuc

SEQ ID NO: 633234 - RNA, 22 nt, Human
ggcuccugggcagcugcucccu

SEQ ID NO: 633235 - RNA, 22 nt, Human
gagggggcgugcaaggcuccgc

SEQ ID NO: 633236 - RNA, 22 nt, Human
ggccccagggauuaggccaacc

SEQ ID NO: 633237 - RNA, 22 nt, Human
ggaggccaaggcaggcggauca

SEQ ID NO: 633238 - RNA, 22 nt, Human
ccuucuccccucugcagggugu

SEQ ID NO: 633239 - RNA, 22 nt, Human
gagcuccuggauugcuccuagg

SEQ ID NO: 633240 - RNA, 22 nt, Human
gacugggguaaggugaggaggu

SEQ ID NO: 633241 - RNA, 22 nt, Human
aaaaccacaaaaguggcuuggu

SEQ ID NO: 633242 - RNA, 22 nt, Human
uaaaguauauuuuuucucaaua

SEQ ID NO: 633243 - RNA, 18 nt, Human
aggcacagagcauacaua

SEQ ID NO: 633244 - RNA, 22 nt, Human
guucaaauggcugcaguuacca

SEQ ID NO: 633245 - RNA, 22 nt, Human
ucugcacaaaacugucgcagaa

SEQ ID NO: 633246 - RNA, 22 nt, Human
acagggccagccugggaccugg

SEQ ID NO: 633247 - RNA, 22 nt, Human
ucagugcuuuugucacaugguc

SEQ ID NO: 633248 - RNA, 22 nt, Human
cugaaagaauaagauguuuaca

SEQ ID NO: 633249 - RNA, 22 nt, Human
uuauucuguuguucaggguugg

SEQ ID NO: 633250 - RNA, 22 nt, Human
cauuaugcaaagaacacuugag

SEQ ID NO: 633251 - RNA, 22 nt, Human
cugcagggguguccuguauugg

SEQ ID NO: 633252 - RNA, 22 nt, Human
accugggaacgcuuuguggagg

SEQ ID NO: 633253 - RNA, 22 nt, Human
gaacacugggguaucauugagc

SEQ ID NO: 633254 - RNA, 22 nt, Human
guccauuuuauucagagacuuu

SEQ ID NO: 633255 - RNA, 22 nt, Human
gugcugaguagaaugaaugccu

SEQ ID NO: 633256 - RNA, 20 nt, Human
cuaggaacuauggucuggcu

SEQ ID NO: 633257 - RNA, 22 nt, Human
ugagcccaggaguaugaggcug

SEQ ID NO: 633258 - RNA, 22 nt, Human
auuuugaaauacuugaaggaaa

SEQ ID NO: 633259 - RNA, 22 nt, Human
gagguggcacugugaggagcac

SEQ ID NO: 633260 - RNA, 22 nt, Human
ucuguacuuuuauuuuggcacu

SEQ ID NO: 633261 - RNA, 22 nt, Human
uagucuuuuuaauaaauaaugc

SEQ ID NO: 633262 - RNA, 22 nt, Human
caggauggagggagggcuguua

SEQ ID NO: 633263 - RNA, 22 nt, Human
uugcuacaugguuucaaagcug

SEQ ID NO: 633264 - RNA, 22 nt, Human
gauauuuuuaggugaugcaggc

SEQ ID NO: 633265 - RNA, 22 nt, Human
augaugaaauuuucuaucaugu

SEQ ID NO: 633266 - RNA, 22 nt, Human
ggcggcgcguagccggagacuu

SEQ ID NO: 633267 - RNA, 22 nt, Human
gucucccaaccccugugcccag

SEQ ID NO: 633268 - RNA, 22 nt, Human
uggagcccagggugagaaggag

SEQ ID NO: 633269 - RNA, 22 nt, Human
ucacagaagcccucgcaaacua

SEQ ID NO: 633270 - RNA, 22 nt, Human
cagcucuuccauuuccuucagc

SEQ ID NO: 633271 - RNA, 22 nt, Human
ggagcucuuccagcuuguugcu

SEQ ID NO: 633272 - RNA, 22 nt, Human
agugcuccuauggaucaguugu

SEQ ID NO: 633273 - RNA, 22 nt, Human
uggguagacauuccugaaacuc

SEQ ID NO: 633274 - RNA, 22 nt, Human
uaaaggcaguaauuccugaguu

SEQ ID NO: 633275 - RNA, 22 nt, Human
uuaguugaucauucaacauggg

SEQ ID NO: 633276 - RNA, 22 nt, Human
acuuucucccacccacccgucu

SEQ ID NO: 633277 - RNA, 22 nt, Human
auuuagacauguaucugauagc

SEQ ID NO: 633278 - RNA, 22 nt, Human
uuucugaagauacagcuuugcu

SEQ ID NO: 633279 - RNA, 22 nt, Human
gguggagcgcagggugcuggcg

SEQ ID NO: 633280 - RNA, 22 nt, Human
aaccugaaacuacauucuugau

SEQ ID NO: 633281 - RNA, 22 nt, Human
caggccaccagauacaugcccc

SEQ ID NO: 633282 - RNA, 19 nt, Human
acacauuugcacaauccac

SEQ ID NO: 633283 - RNA, 22 nt, Human
ggaagaaagguggacaacaggu

SEQ ID NO: 633284 - RNA, 22 nt, Human
uuucacucagcucucauugucu

SEQ ID NO: 633285 - RNA, 21 nt, Human
gauuuauaagccuuaagccua

SEQ ID NO: 633286 - RNA, 22 nt, Human
auuuucaguugaaaaaguuggu

SEQ ID NO: 633287 - RNA, 22 nt, Human
acuacagucccucauauguugg

SEQ ID NO: 633288 - RNA, 22 nt, Human
acuucagcccagaggaagggau

SEQ ID NO: 633289 - RNA, 17 nt, Human
uccaggcauaucuccua

SEQ ID NO: 633290 - RNA, 22 nt, Human
ucaguggauuguagaaggcuua

SEQ ID NO: 633291 - RNA, 22 nt, Human
uaguuuaugauuuuuuggaagg

SEQ ID NO: 633292 - RNA, 22 nt, Human
cugggucuggcuacugcuuccu

SEQ ID NO: 633293 - RNA, 22 nt, Human
uucagagaugacaccugguguu

SEQ ID NO: 633294 - RNA, 22 nt, Human
cugcagcugucucuacugggca

SEQ ID NO: 633295 - RNA, 22 nt, Human
aggcugggcaccguuuugaucc

SEQ ID NO: 633296 - RNA, 22 nt, Human
ugaggcucugcuucuguggcuc

SEQ ID NO: 633297 - RNA, 22 nt, Human
ggguuggcagcaccagaggagg

SEQ ID NO: 633298 - RNA, 19 nt, Human
gccucugcuggggacaggc

SEQ ID NO: 633299 - RNA, 17 nt, Human
caagagagaugacugga

SEQ ID NO: 633300 - RNA, 18 nt, Human
uacuucaacucccagggc

SEQ ID NO: 633301 - RNA, 22 nt, Human
ggcacacucaccacguggaggg

SEQ ID NO: 633302 - RNA, 22 nt, Human
acccagagcacugggugugggc

SEQ ID NO: 633303 - RNA, 22 nt, Human
aaaggaggccacauggcuagga

SEQ ID NO: 633304 - RNA, 22 nt, Human
uugacagcuauuuugcuuugau

SEQ ID NO: 633305 - RNA, 22 nt, Human
ggcccaggcuggagugcggugg

SEQ ID NO: 633306 - RNA, 22 nt, Human
cugauuccaaagccaaagcuau

SEQ ID NO: 633307 - RNA, 22 nt, Human
guacacauuaugcuucucuaaa

SEQ ID NO: 633308 - RNA, 22 nt, Human
ggcuucacucauaauuagguuc

SEQ ID NO: 633309 - RNA, 20 nt, Human
ccagucucuaucagaaauaa

SEQ ID NO: 633310 - RNA, 22 nt, Human
cacucuaaccuccaucuuccau

SEQ ID NO: 633311 - RNA, 21 nt, Human
ugcuguccuagaaccagggcc

SEQ ID NO: 633312 - RNA, 22 nt, Human
ucaugcuuauugcauauuugga

SEQ ID NO: 633313 - RNA, 22 nt, Human
caguccugcuagugugaaaagc

SEQ ID NO: 633314 - RNA, 22 nt, Human
agaggcugugcagagggagugc

SEQ ID NO: 633315 - RNA, 22 nt, Human
gccuggcaaggcccuguugacu

SEQ ID NO: 633316 - RNA, 22 nt, Human
ccuguucacccuccaugcacag

SEQ ID NO: 633317 - RNA, 22 nt, Human
uucugugucuucuuguucugug

SEQ ID NO: 633318 - RNA, 22 nt, Human
gaaguuauaaacuuuuccuccc

SEQ ID NO: 633319 - RNA, 22 nt, Human
cagguaaagcuucaaaucacuu

SEQ ID NO: 633320 - RNA, 22 nt, Human
uaaaguucuuagaacaaggccu

SEQ ID NO: 633321 - RNA, 22 nt, Human
aguccugucucucccagggcca

SEQ ID NO: 633322 - RNA, 22 nt, Human
aaggaccuauauugucagagga

SEQ ID NO: 633323 - RNA, 22 nt, Human
aaagaucaaguaggcauggccu

SEQ ID NO: 633324 - RNA, 18 nt, Human
uguuuccuccuggaggcu

SEQ ID NO: 633325 - RNA, 22 nt, Human
uagaaagcaaaauccuaccaag

SEQ ID NO: 633326 - RNA, 22 nt, Human
ccaggaagccucagaugcugag

SEQ ID NO: 633327 - RNA, 22 nt, Human
cuggaaggggcagucuuugggc

SEQ ID NO: 633328 - RNA, 22 nt, Human
cauuucuguucucuuccuguac

SEQ ID NO: 633329 - RNA, 22 nt, Human
cccaggcugccacgauuacugc

SEQ ID NO: 633330 - RNA, 22 nt, Human
uuuguuuaucaaggucuagcau

SEQ ID NO: 633331 - RNA, 22 nt, Human
gaaagugccagaauaggaggcc

SEQ ID NO: 633332 - RNA, 22 nt, Human
cuucugcaggcccugucugacc

SEQ ID NO: 633333 - RNA, 22 nt, Human
auggcagcauaguggcaaguua

SEQ ID NO: 633334 - RNA, 22 nt, Human
aaugcuuuugcugucauugcuu

SEQ ID NO: 633335 - RNA, 22 nt, Human
uaagacauaaauaggcuuuuua

SEQ ID NO: 633336 - RNA, 22 nt, Human
acucugcuguuuacucucuaua

SEQ ID NO: 633337 - RNA, 22 nt, Human
acauuugacucuguucauauua

SEQ ID NO: 633338 - RNA, 22 nt, Human
uauugaaaugaaugacagugau

SEQ ID NO: 633339 - RNA, 21 nt, Human
guggccagugacuacuuauug

SEQ ID NO: 633340 - RNA, 22 nt, Human
uugucuggucaaaucacuugua

SEQ ID NO: 633341 - RNA, 22 nt, Human
ucuccaggggcagggucuggag

SEQ ID NO: 633342 - RNA, 22 nt, Human
auuauuagauucuuaauuguaa

SEQ ID NO: 633343 - RNA, 22 nt, Human
aguuucuaccgguacauucagg

SEQ ID NO: 633344 - RNA, 22 nt, Human
acaugacagugcuuagcaaacu

SEQ ID NO: 633345 - RNA, 22 nt, Human
ucaguucuaagugcuuuacaug

SEQ ID NO: 633346 - RNA, 22 nt, Human
gaggccucuucuuuguuaaccu

SEQ ID NO: 633347 - RNA, 22 nt, Human
aauggcagaggcaaagauggua

SEQ ID NO: 633348 - RNA, 22 nt, Human
acugggaggcaucuggagcuga

SEQ ID NO: 633349 - RNA, 23 nt, Human
ggguccagagaagccauuagggc

SEQ ID NO: 633350 - RNA, 22 nt, Human
ucuugacaacuauacuacuuac

SEQ ID NO: 633351 - RNA, 21 nt, Human
ugucuuuggccucauucccag

SEQ ID NO: 633352 - RNA, 22 nt, Human
aucuagaaguggcaugaauuac

SEQ ID NO: 633353 - RNA, 22 nt, Human
ccuucaugucauuggacaccuu

SEQ ID NO: 633354 - RNA, 22 nt, Human
ggcagcugagaucaugcuguug

SEQ ID NO: 633355 - RNA, 22 nt, Human
ccuggagugggguccgugcaug

SEQ ID NO: 633356 - RNA, 22 nt, Human
augcaugcuucuuauaguacuu

SEQ ID NO: 633357 - RNA, 22 nt, Human
uuggcagaggccgaggugaaga

SEQ ID NO: 633358 - RNA, 22 nt, Human
uaccuggauccugguagacauc

SEQ ID NO: 633359 - RNA, 22 nt, Human
uccucuccagcaaacuggcuau

SEQ ID NO: 633360 - RNA, 19 nt, Human
ggcagccugcacgggcugc

SEQ ID NO: 633361 - RNA, 22 nt, Human
aauccagguggcggagguugug

SEQ ID NO: 633362 - RNA, 22 nt, Human
ugucagcaggacauuaaaagcu

SEQ ID NO: 633363 - RNA, 18 nt, Human
uaucuuuuccagugguau

SEQ ID NO: 633364 - RNA, 22 nt, Human
cuucagagaguccagggacugc

SEQ ID NO: 633365 - RNA, 22 nt, Human
uugacuucagaauguugauggu

SEQ ID NO: 633366 - RNA, 22 nt, Human
auugugaauagugccgcaguaa

SEQ ID NO: 633367 - RNA, 22 nt, Human
aucauaaaauugcaccauuucu

SEQ ID NO: 633368 - RNA, 22 nt, Human
augcagaaagcggcaaacaggu

SEQ ID NO: 633369 - RNA, 22 nt, Human
gcucuagaaagaaggauguggg

SEQ ID NO: 633370 - RNA, 21 nt, Human
ugaaugaugccccagaguugu

SEQ ID NO: 633371 - RNA, 22 nt, Human
gcuccagggucagcucagaacu

SEQ ID NO: 633372 - RNA, 22 nt, Human
uucagccaauuagaagccccac

SEQ ID NO: 633373 - RNA, 22 nt, Human
auguauguaugcugugcuugca

SEQ ID NO: 633374 - RNA, 22 nt, Human
agagaucucugaagcugcugcu

SEQ ID NO: 633375 - RNA, 22 nt, Human
ugugagagagugcauuugcaua

SEQ ID NO: 633376 - RNA, 23 nt, Human
aggcugcuuacugguaucagagc

SEQ ID NO: 633377 - RNA, 22 nt, Human
ugcuugugacagaacugugucc

SEQ ID NO: 633378 - RNA, 22 nt, Human
gccagcaguggccaccaccagg

SEQ ID NO: 633379 - RNA, 22 nt, Human
agaaguauuuggcuaaaagaca

SEQ ID NO: 633380 - RNA, 23 nt, Human
gcauccagagcucaguccccuuu

SEQ ID NO: 633381 - RNA, 22 nt, Human
uuuagacagaugugaggugggu

SEQ ID NO: 633382 - RNA, 22 nt, Human
uuuaaaccuaucuaagaaauag

SEQ ID NO: 633383 - RNA, 22 nt, Human
gcugcccacagcggguguuucg

SEQ ID NO: 633384 - RNA, 22 nt, Human
gauuuauuggucuuucauuggu

SEQ ID NO: 633385 - RNA, 19 nt, Human
ugcagagagaggcaaagaa

SEQ ID NO: 633386 - RNA, 22 nt, Human
aagggcccggcugugggcagag

SEQ ID NO: 633387 - RNA, 22 nt, Human
ucuggagcgaggucccugucug

SEQ ID NO: 633388 - RNA, 23 nt, Human
uggagccugggauacaauagaug

SEQ ID NO: 633389 - RNA, 22 nt, Human
gauuucuucaggagcagaggag

SEQ ID NO: 633390 - RNA, 19 nt, Human
auccuggguccuccagcug

SEQ ID NO: 633391 - RNA, 22 nt, Human
uacaaucacccaaaaguggcuc

SEQ ID NO: 633392 - RNA, 22 nt, Human
ucacagacacuggguuauugca

SEQ ID NO: 633393 - RNA, 22 nt, Human
agcagggcagugaucagaaagg

SEQ ID NO: 633394 - RNA, 18 nt, Human
ggagcugggccugguucc

SEQ ID NO: 633395 - RNA, 22 nt, Human
caaacauugcuaccagagguuu

SEQ ID NO: 633396 - RNA, 22 nt, Human
gaugaucugagguacaugaaac

SEQ ID NO: 633397 - RNA, 21 nt, Human
accuuuggaaagacccuggga

SEQ ID NO: 633398 - RNA, 18 nt, Human
cugagggcaacagaggcu

SEQ ID NO: 633399 - RNA, 22 nt, Human
agacagcagcagaggggcuccc

SEQ ID NO: 633400 - RNA, 22 nt, Human
aaguucuugcugugugucagau

SEQ ID NO: 633401 - RNA, 22 nt, Human
ccaguguauuuuugggaccugc

SEQ ID NO: 633402 - RNA, 22 nt, Human
ugcauacugaacagcaugcuaa

SEQ ID NO: 633403 - RNA, 22 nt, Human
acaggacagguaggauucgcag

SEQ ID NO: 633404 - RNA, 17 nt, Human
ucugggcuucagugguc

SEQ ID NO: 633405 - RNA, 22 nt, Human
cugggucuuuuucuuccauuga

SEQ ID NO: 633406 - RNA, 22 nt, Human
uauuagauuaacuuuaaugucu

SEQ ID NO: 633407 - RNA, 22 nt, Human
ucuggagccacaaaccucagcu

SEQ ID NO: 633408 - RNA, 22 nt, Human
uaguaaaaguuuaguugaaagu

SEQ ID NO: 633409 - RNA, 20 nt, Human
uucuagcauacuuacaagga

SEQ ID NO: 633410 - RNA, 22 nt, Human
cagaaacauguauaaaguugua

SEQ ID NO: 633411 - RNA, 21 nt, Human
cuacacagcuuucuauaggaa

SEQ ID NO: 633412 - RNA, 22 nt, Human
gggcugacaaccaucugacaag

SEQ ID NO: 633413 - RNA, 22 nt, Human
ugaagacagaccaaggagaaug

SEQ ID NO: 633414 - RNA, 22 nt, Human
caggucagagguagaugagaug

SEQ ID NO: 633415 - RNA, 22 nt, Human
uuuauuugucuugccauuuagu

SEQ ID NO: 633416 - RNA, 22 nt, Human
cugggccagggaggugucugua

SEQ ID NO: 633417 - RNA, 22 nt, Human
aaagaaugucugaacagcuggc

SEQ ID NO: 633418 - RNA, 22 nt, Human
agggacuuguguccuauguaug

SEQ ID NO: 633419 - RNA, 22 nt, Human
ggucuggggcaggcaucugaca

SEQ ID NO: 633420 - RNA, 22 nt, Human
caaauagacaagauggcaggaa

SEQ ID NO: 633421 - RNA, 22 nt, Human
ugaagguguaugcuguggguca

SEQ ID NO: 633422 - RNA, 22 nt, Human
ggcuuaaaacuuugaaaguguu

SEQ ID NO: 633423 - RNA, 22 nt, Human
uggguaaaaugaguuaggagaa

SEQ ID NO: 633424 - RNA, 23 nt, Human
gccucugcucugcguuggggacu

SEQ ID NO: 633425 - RNA, 22 nt, Human
cucugugggaagcuggguguga

SEQ ID NO: 633426 - RNA, 22 nt, Human
ugaaaaugcccucuaugucuca

SEQ ID NO: 633427 - RNA, 22 nt, Human
uguccugggaggcgggguccag

SEQ ID NO: 633428 - RNA, 22 nt, Human
ggccacagcagaugcuucagau

SEQ ID NO: 633429 - RNA, 22 nt, Human
auggcagauggcuggagcaggu

SEQ ID NO: 633430 - RNA, 22 nt, Human
acuuuggggaacuuuucuccuc

SEQ ID NO: 633431 - RNA, 22 nt, Human
agggcagagaucugagugggca

SEQ ID NO: 633432 - RNA, 22 nt, Human
caggaaccuaaagagacauuac

SEQ ID NO: 633433 - RNA, 22 nt, Human
gcuacuuugcagcuagcuagga

SEQ ID NO: 633434 - RNA, 22 nt, Human
guauaugagaaccauggaggug

SEQ ID NO: 633435 - RNA, 20 nt, Human
agugcaagaaagcacagcug

SEQ ID NO: 633436 - RNA, 22 nt, Human
uacauggauguuauccuuacug

SEQ ID NO: 633437 - RNA, 22 nt, Human
uuuuguaugagaagugcuuuac

SEQ ID NO: 633438 - RNA, 22 nt, Human
auacuuacuuuucuucagacua

SEQ ID NO: 633439 - RNA, 21 nt, Human
auguggcucccuuccucagga

SEQ ID NO: 633440 - RNA, 22 nt, Human
acacauuucucccagucuccau

SEQ ID NO: 633441 - RNA, 18 nt, Human
ucucuccaucuauuuguu

SEQ ID NO: 633442 - RNA, 22 nt, Human
agagccuguaacaucuuucuua

SEQ ID NO: 633443 - RNA, 22 nt, Human
ucagcugaguucuagagcacuc

SEQ ID NO: 633444 - RNA, 22 nt, Human
uuuaauguagcgugaaaugauu

SEQ ID NO: 633445 - RNA, 22 nt, Human
ccucccugggugcugggauugc

SEQ ID NO: 633446 - RNA, 22 nt, Human
ggaggcccagagaggugaagug

SEQ ID NO: 633447 - RNA, 18 nt, Human
gacuuuaaaacacugcuc

SEQ ID NO: 633448 - RNA, 22 nt, Human
ggagccugguuacuagagccug

SEQ ID NO: 633449 - RNA, 22 nt, Human
guucauauuacuuugagugcag

SEQ ID NO: 633450 - RNA, 18 nt, Human
ugaacacaguacaauucc

SEQ ID NO: 633451 - RNA, 22 nt, Human
aacacuguaucagucuucaaua

SEQ ID NO: 633452 - RNA, 22 nt, Human
cuuuacauaaggauaaaccugg

SEQ ID NO: 633453 - RNA, 22 nt, Human
uuaucugaaaaccucaaaauau

SEQ ID NO: 633454 - RNA, 22 nt, Human
acaagguauccacauuaaaugu

SEQ ID NO: 633455 - RNA, 22 nt, Human
ucuuucugaauauuugaccuca

SEQ ID NO: 633456 - RNA, 22 nt, Human
gagcuuuaagggcacuggucuu

SEQ ID NO: 633457 - RNA, 22 nt, Human
guaguaauuguuuuaagccacc

SEQ ID NO: 633458 - RNA, 18 nt, Human
ggucaagaaaguaaggca

SEQ ID NO: 633459 - RNA, 22 nt, Human
cagauauguggauucuauuagc

SEQ ID NO: 633460 - RNA, 22 nt, Human
acaguaaauaaugcauguugau

SEQ ID NO: 633461 - RNA, 22 nt, Human
uugaacaguuuugucagguuca

SEQ ID NO: 633462 - RNA, 22 nt, Human
acaguacugaguacugaguugg

SEQ ID NO: 633463 - RNA, 22 nt, Human
cuccaggacaugacuuucuugc

SEQ ID NO: 633464 - RNA, 22 nt, Human
gggguggagcuaaaugucuacu

SEQ ID NO: 633465 - RNA, 22 nt, Human
uuacaacuggugaauuuuaugg

SEQ ID NO: 633466 - RNA, 20 nt, Human
uuuagcaaaagggacugcuc

SEQ ID NO: 633467 - RNA, 22 nt, Human
ugcugcccacuguauuucucca

SEQ ID NO: 633468 - RNA, 22 nt, Human
uuucuggaacaguaauugaaga

SEQ ID NO: 633469 - RNA, 22 nt, Human
cauaaucccccauuugugacau

SEQ ID NO: 633470 - RNA, 22 nt, Human
ccagucuguacuuugcucuguu

SEQ ID NO: 633471 - RNA, 22 nt, Human
aauaauaguugcaaaguguuua

SEQ ID NO: 633472 - RNA, 22 nt, Human
acauauuggcaaacuggaggca

SEQ ID NO: 633473 - RNA, 22 nt, Human
gggcagguacaagaugcuucuu

SEQ ID NO: 633474 - RNA, 22 nt, Human
ccuguguuucaccaaaagaguc

SEQ ID NO: 633475 - RNA, 22 nt, Human
ggaagaaaguagaaaaccgugg

SEQ ID NO: 633476 - RNA, 22 nt, Human
cccuggagaucgggagaggaag

SEQ ID NO: 633477 - RNA, 22 nt, Human
ugcauuguaggauguuuagcag

SEQ ID NO: 633478 - RNA, 21 nt, Human
acuuuaauauacaugaggagg

SEQ ID NO: 633479 - RNA, 22 nt, Human
auauuauucuagcucuugugug

SEQ ID NO: 633480 - RNA, 22 nt, Human
ucaaucaaugugucaguuccca

SEQ ID NO: 633481 - RNA, 22 nt, Human
guucacagcuucuuaggucaua

SEQ ID NO: 633482 - RNA, 22 nt, Human
cccaggcagcggggucuccuug

SEQ ID NO: 633483 - RNA, 22 nt, Human
cagcuuguuaccgagggagggu

SEQ ID NO: 633484 - RNA, 22 nt, Human
uucucccaucucagucuuacau

SEQ ID NO: 633485 - RNA, 21 nt, Human
cugaggcaugcaggccugggc

SEQ ID NO: 633486 - RNA, 22 nt, Human
ugccugaauucaauuccuggcu

SEQ ID NO: 633487 - RNA, 22 nt, Human
agcaaagcaucacuccaaucug

SEQ ID NO: 633488 - RNA, 22 nt, Human
caucacugacgcugagauucca

SEQ ID NO: 633489 - RNA, 22 nt, Human
ugaagcacagaccugggcauca

SEQ ID NO: 633490 - RNA, 22 nt, Human
uccuugagccguggccagggcc

SEQ ID NO: 633491 - RNA, 20 nt, Human
agauggugggcuggaacacc

SEQ ID NO: 633492 - RNA, 22 nt, Human
augcuuccucccuuccacucaa

SEQ ID NO: 633493 - RNA, 22 nt, Human
cacugaagguaggaccaaggcu

SEQ ID NO: 633494 - RNA, 22 nt, Human
uacauucagcaaaagaaugguu

SEQ ID NO: 633495 - RNA, 20 nt, Human
uuucacaucugucccuuuaa

SEQ ID NO: 633496 - RNA, 22 nt, Human
cagcuaguacaaugggagagca

SEQ ID NO: 633497 - RNA, 22 nt, Human
aggccugggacgggagccguga

SEQ ID NO: 633498 - RNA, 22 nt, Human
uuuccaagagcuuauuucugaa

SEQ ID NO: 633499 - RNA, 22 nt, Human
ucucuuuuauguacacccugac

SEQ ID NO: 633500 - RNA, 22 nt, Human
uccuguguuacccuugcaguga

SEQ ID NO: 633501 - RNA, 22 nt, Human
uccugucuaaagaccugcaggc

SEQ ID NO: 633502 - RNA, 22 nt, Human
aagaucaccuugacaugaaaag

SEQ ID NO: 633503 - RNA, 23 nt, Human
ugcuccagguacagaacuccagg

SEQ ID NO: 633504 - RNA, 22 nt, Human
gcguguuugcccagugaguggc

SEQ ID NO: 633505 - RNA, 22 nt, Human
guccugaggcaggauggguuuc

SEQ ID NO: 633506 - RNA, 22 nt, Human
gccuguuggugacuuucuguug

SEQ ID NO: 633507 - RNA, 22 nt, Human
aagaacaguguccugggacucg

SEQ ID NO: 633508 - RNA, 22 nt, Human
agacacuucauguaaguggaau

SEQ ID NO: 633509 - RNA, 22 nt, Human
uggaaagaugaagauguuuaag

SEQ ID NO: 633510 - RNA, 17 nt, Human
uaggagacuggcugucc

SEQ ID NO: 633511 - RNA, 22 nt, Human
auggcccucaguccuuccuugg

SEQ ID NO: 633512 - RNA, 17 nt, Human
cagguacauugcuacug

SEQ ID NO: 633513 - RNA, 22 nt, Human
ucucugcucugugccucaguuu

SEQ ID NO: 633514 - RNA, 22 nt, Human
aagacaauccuggacagucagc

SEQ ID NO: 633515 - RNA, 22 nt, Human
gacagacacagggccaugauug

SEQ ID NO: 633516 - RNA, 20 nt, Human
uuggaagguggagaagagga

SEQ ID NO: 633517 - RNA, 22 nt, Human
ugaggcaggaauggggaaaagu

SEQ ID NO: 633518 - RNA, 22 nt, Human
augucuuuauuaauaucaugcc

SEQ ID NO: 633519 - RNA, 22 nt, Human
ucuuuaauauaaaggaaugaau

SEQ ID NO: 633520 - RNA, 22 nt, Human
gcaguggcccagcuugcaggcu

SEQ ID NO: 633521 - RNA, 22 nt, Human
uauacacauccuccaaagauag

SEQ ID NO: 633522 - RNA, 22 nt, Human
auuauggguauaacacaguuau

SEQ ID NO: 633523 - RNA, 22 nt, Human
cagcagccuagaagcucuacca

SEQ ID NO: 633524 - RNA, 22 nt, Human
ugaggccucugaggccuaggcu

SEQ ID NO: 633525 - RNA, 22 nt, Human
acucaggcuguuuuuuccuugu

SEQ ID NO: 633526 - RNA, 21 nt, Human
cagcaaaucauugggcagacu

SEQ ID NO: 633527 - RNA, 22 nt, Human
auuucauugaaguuaauucuuc

SEQ ID NO: 633528 - RNA, 22 nt, Human
cugagaguuaagagauggggcu

SEQ ID NO: 633529 - RNA, 22 nt, Human
ccugcuggccacugcuccaccu

SEQ ID NO: 633530 - RNA, 22 nt, Human
cucuuaaaauuaccuuugcaaa

SEQ ID NO: 633531 - RNA, 22 nt, Human
ugggaugccggcaggaggcaau

SEQ ID NO: 633532 - RNA, 22 nt, Human
ucaggauguuaauauagcauua

SEQ ID NO: 633533 - RNA, 22 nt, Human
uuuaucugugggaguuguuugg

SEQ ID NO: 633534 - RNA, 22 nt, Human
ugcuaggugcuccucccuaauu

SEQ ID NO: 633535 - RNA, 22 nt, Human
ggccuggcauggggacuaaggg

SEQ ID NO: 633536 - RNA, 22 nt, Human
gggcagugguccaggcuacagc

SEQ ID NO: 633537 - RNA, 22 nt, Human
cagugcugcaucuccaugccag

SEQ ID NO: 633538 - RNA, 22 nt, Human
ccacagggccuuuccugcuggc

SEQ ID NO: 633539 - RNA, 22 nt, Human
cuguuucccuccagggggugga

SEQ ID NO: 633540 - RNA, 22 nt, Human
cugggccauggaagucucugcc

SEQ ID NO: 633541 - RNA, 22 nt, Human
ucagggaaauagcagggcugaa

SEQ ID NO: 633542 - RNA, 22 nt, Human
ucaguaaaagggugcuuuacuc

SEQ ID NO: 633543 - RNA, 22 nt, Human
caaaauucugcauuucuaauaa

SEQ ID NO: 633544 - RNA, 22 nt, Human
aaugcacaaaaauuguauguaa

SEQ ID NO: 633545 - RNA, 22 nt, Human
gucaggggaugugcugguggcc

SEQ ID NO: 633546 - RNA, 23 nt, Human
caucuagcauccagugaguagug

SEQ ID NO: 633547 - RNA, 22 nt, Human
cuggcuccaaggaagagguuuu

SEQ ID NO: 633548 - RNA, 18 nt, Human
agcugcagaccaggaggu

SEQ ID NO: 633549 - RNA, 22 nt, Human
ucugggagagggaaagaagacu

SEQ ID NO: 633550 - RNA, 19 nt, Human
ucugagcugauaugacauu

SEQ ID NO: 633551 - RNA, 22 nt, Human
gaaggaaaucugugauuuaugc

SEQ ID NO: 633552 - RNA, 22 nt, Human
cagugguugucagcaacaauau

SEQ ID NO: 633553 - RNA, 22 nt, Human
ucuucaaacugaaaauuuagaa

SEQ ID NO: 633554 - RNA, 22 nt, Human
agggauguggugggagagaaag

SEQ ID NO: 633555 - RNA, 22 nt, Human
acaauauuguacccagaaguuu

SEQ ID NO: 633556 - RNA, 22 nt, Human
agaaaugcagucucgucaaaag

SEQ ID NO: 633557 - RNA, 20 nt, Human
acacuucauuugcagcagcu

SEQ ID NO: 633558 - RNA, 22 nt, Human
ggugcagaucuuucucuucagg

SEQ ID NO: 633559 - RNA, 22 nt, Human
ugggcaaggcuggagccugcag

SEQ ID NO: 633560 - RNA, 21 nt, Human
gccaaggggguagcuauuccu

SEQ ID NO: 633561 - RNA, 21 nt, Human
gcucuggccuacuguucccuc

SEQ ID NO: 633562 - RNA, 22 nt, Human
gcauucaugccugugugagcuc

SEQ ID NO: 633563 - RNA, 22 nt, Human
cuuuacagaaagagaacucugg

SEQ ID NO: 633564 - RNA, 22 nt, Human
gggugcagcuuugaaagcaugu

SEQ ID NO: 633565 - RNA, 22 nt, Human
cagggacucccaggguagcucc

SEQ ID NO: 633566 - RNA, 22 nt, Human
uagacacauccguggaagcuuc

SEQ ID NO: 633567 - RNA, 22 nt, Human
gcaguguuguuaaaagauuaga

SEQ ID NO: 633568 - RNA, 22 nt, Human
ugaucacaagucugaagaauga

SEQ ID NO: 633569 - RNA, 18 nt, Human
acauuucuccuucugacc

SEQ ID NO: 633570 - RNA, 22 nt, Human
ugacacaggcagcucccagcac

SEQ ID NO: 633571 - RNA, 22 nt, Human
ugcccccugguggccagagccg

SEQ ID NO: 633572 - RNA, 22 nt, Human
ggagccuggucagguuggcucc

SEQ ID NO: 633573 - RNA, 22 nt, Human
gcccugugcgacucuagagguu

SEQ ID NO: 633574 - RNA, 22 nt, Human
ucaguucuugggcugcuaggac

SEQ ID NO: 633575 - RNA, 22 nt, Human
caggcucaagcccugcuuauau

SEQ ID NO: 633576 - RNA, 22 nt, Human
aaaugaguagcgaugcacauua

SEQ ID NO: 633577 - RNA, 22 nt, Human
uuggcagaaugggcagcuugag

SEQ ID NO: 633578 - RNA, 22 nt, Human
uuguaauggagcaaacagguug

SEQ ID NO: 633579 - RNA, 22 nt, Human
gcugcuggcacuggagugagcc

SEQ ID NO: 633580 - RNA, 22 nt, Human
ugcugccaugcagagcaacaga

SEQ ID NO: 633581 - RNA, 21 nt, Human
gggccuggcugcgcaggacgg

SEQ ID NO: 633582 - RNA, 22 nt, Human
gugaaggaccaauaugacucau

SEQ ID NO: 633583 - RNA, 22 nt, Human
gcuggagccuucugcucuguug

SEQ ID NO: 633584 - RNA, 22 nt, Human
gaggaggucccccgacaugccu

SEQ ID NO: 633585 - RNA, 22 nt, Human
uggggcagccacauagacaaca

SEQ ID NO: 633586 - RNA, 22 nt, Human
ucuucagaggaagucagucuuu

SEQ ID NO: 633587 - RNA, 20 nt, Human
ucucaggcccccuccuugcu

SEQ ID NO: 633588 - RNA, 22 nt, Human
agggccagggaagcuguauuuu

SEQ ID NO: 633589 - RNA, 22 nt, Human
ucucucagaggaagaggcagug

SEQ ID NO: 633590 - RNA, 22 nt, Human
aaaccggggccuuuccacaaug

SEQ ID NO: 633591 - RNA, 22 nt, Human
ggguacagaaacugaggcuuag

SEQ ID NO: 633592 - RNA, 22 nt, Human
cugccaggacugacgucuucag

SEQ ID NO: 633593 - RNA, 22 nt, Human
ccaaggcuguggggcugugcag

SEQ ID NO: 633594 - RNA, 19 nt, Human
agggauauuuaaaaagcuc

SEQ ID NO: 633595 - RNA, 22 nt, Human
acuggcacuauguuggagaaau

SEQ ID NO: 633596 - RNA, 22 nt, Human
cuccugcccacgugcuacuucu

SEQ ID NO: 633597 - RNA, 22 nt, Human
auuguaacaggaucccuguggc

SEQ ID NO: 633598 - RNA, 22 nt, Human
gccagccccuuagggcucuccc

SEQ ID NO: 633599 - RNA, 22 nt, Human
gcugcuggccccacaugcucca

SEQ ID NO: 633600 - RNA, 22 nt, Human
ugucauaaaacacaagcuguug

SEQ ID NO: 633601 - RNA, 22 nt, Human
guaagagcacugucuccugcug

SEQ ID NO: 633602 - RNA, 22 nt, Human
agucugggugugaaugaacuug

SEQ ID NO: 633603 - RNA, 22 nt, Human
uaacugugaaguaauuguggau

SEQ ID NO: 633604 - RNA, 22 nt, Human
aacauaauguggccaaagucac

SEQ ID NO: 633605 - RNA, 20 nt, Human
uccaguuuuggagacauucu

SEQ ID NO: 633606 - RNA, 22 nt, Human
ccaugccuuccuuucccuggaa

SEQ ID NO: 633607 - RNA, 22 nt, Human
uccugagauguggagcuccaug

SEQ ID NO: 633608 - RNA, 22 nt, Human
uuuguuuagagaauugaagcag

SEQ ID NO: 633609 - RNA, 22 nt, Human
uggagcagaggaagaaggcuuu

SEQ ID NO: 633610 - RNA, 22 nt, Human
cacauauuugaugaagcuuugu

SEQ ID NO: 633611 - RNA, 22 nt, Human
auuuccauagagcgucucacag

SEQ ID NO: 633612 - RNA, 22 nt, Human
gugggcuuguuuugaugagauc

SEQ ID NO: 633613 - RNA, 22 nt, Human
aauuuguuacacagcaauauaa

SEQ ID NO: 633614 - RNA, 22 nt, Human
aguggucaaagacuagauuuca

SEQ ID NO: 633615 - RNA, 22 nt, Human
uaggcucccagaucguuugcug

SEQ ID NO: 633616 - RNA, 22 nt, Human
aagcagcaugauuguaauacua

SEQ ID NO: 633617 - RNA, 22 nt, Human
cuggcccaggagagcaggcauu

SEQ ID NO: 633618 - RNA, 20 nt, Human
cuggggagccucgcgguggc

SEQ ID NO: 633619 - RNA, 22 nt, Human
caagggcuucaaguggccaaga

SEQ ID NO: 633620 - RNA, 22 nt, Human
uagggucccagauaggagccag

SEQ ID NO: 633621 - RNA, 22 nt, Human
acaggcaacuucaaaucucacu

SEQ ID NO: 633622 - RNA, 22 nt, Human
auguacaggauggugcucaucu

SEQ ID NO: 633623 - RNA, 22 nt, Human
ucacauguguggcagugcaagu

SEQ ID NO: 633624 - RNA, 20 nt, Human
agcuggccuguccuaggccu

SEQ ID NO: 633625 - RNA, 20 nt, Human
gacaggagaguuagguaggu

SEQ ID NO: 633626 - RNA, 22 nt, Human
uauagaagagacaugugcauag

SEQ ID NO: 633627 - RNA, 22 nt, Human
agugcauucaguauucauaggc

SEQ ID NO: 633628 - RNA, 22 nt, Human
aagccaguaaguuuuugucauu

SEQ ID NO: 633629 - RNA, 22 nt, Human
gcugugugaccugggcaagucu

SEQ ID NO: 633630 - RNA, 22 nt, Human
ucucagagggaaaggccaauuu

SEQ ID NO: 633631 - RNA, 23 nt, Human
agcuggguggccugcgugaagcu

SEQ ID NO: 633632 - RNA, 22 nt, Human
uaacuuguguuacauuacucuu

SEQ ID NO: 633633 - RNA, 22 nt, Human
uggaauuuuguauuagcuuuga

SEQ ID NO: 633634 - RNA, 22 nt, Human
cagggauggcugucaggaugua

SEQ ID NO: 633635 - RNA, 22 nt, Human
acacaucuaucucuacacaagg

SEQ ID NO: 633636 - RNA, 20 nt, Human
auccaugagagucuggauuc

SEQ ID NO: 633637 - RNA, 22 nt, Human
cagaugugcaugaugggaaggg

SEQ ID NO: 633638 - RNA, 22 nt, Human
ucccugugggcagaggcugccu

SEQ ID NO: 633639 - RNA, 22 nt, Human
augucuguauguggagaggggu

SEQ ID NO: 633640 - RNA, 22 nt, Human
guggccagaagacugcaaugcu

SEQ ID NO: 633641 - RNA, 22 nt, Human
acagccugauuuauggagcagu

SEQ ID NO: 633642 - RNA, 20 nt, Human
ugagugauggaggcggguca

SEQ ID NO: 633643 - RNA, 17 nt, Human
gcuguuucuccagaagu

SEQ ID NO: 633644 - RNA, 21 nt, Human
ucucugguuggaguugugcca

SEQ ID NO: 633645 - RNA, 22 nt, Human
gagaaggauguggcucauagcu

SEQ ID NO: 633646 - RNA, 22 nt, Human
uccucagauauaaaugagggug

SEQ ID NO: 633647 - RNA, 21 nt, Human
uauucaguccauugauguuua

SEQ ID NO: 633648 - RNA, 18 nt, Human
agcagagcccaugcauuc

SEQ ID NO: 633649 - RNA, 19 nt, Human
uucuugaacauguuucuca

SEQ ID NO: 633650 - RNA, 22 nt, Human
aggcccagagcaggaaaggguu

SEQ ID NO: 633651 - RNA, 22 nt, Human
gggcugugccucaggugggguc

SEQ ID NO: 633652 - RNA, 22 nt, Human
aauuucagcucaaacuuguguu

SEQ ID NO: 633653 - RNA, 22 nt, Human
gcugcagcuuuaggauccagug

SEQ ID NO: 633654 - RNA, 22 nt, Human
cauuuacacuucuaaccacaag

SEQ ID NO: 633655 - RNA, 21 nt, Human
ucugucugguuuuagaguggc

SEQ ID NO: 633656 - RNA, 22 nt, Human
ucuucauggucugguucuccag

SEQ ID NO: 633657 - RNA, 21 nt, Human
uuguuucccagagcucgcucc

SEQ ID NO: 633658 - RNA, 22 nt, Human
uccucagcuuuuauuucacuug

SEQ ID NO: 633659 - RNA, 22 nt, Human
auguggcuccuuacucaucagc

SEQ ID NO: 633660 - RNA, 22 nt, Human
cuguuggaugguuuccaaaaga

SEQ ID NO: 633661 - RNA, 22 nt, Human
agggcaugaaaugggcagaagc

SEQ ID NO: 633662 - RNA, 22 nt, Human
ucuggaaauaaaauuauaguug

SEQ ID NO: 633663 - RNA, 22 nt, Human
uaacaauggaguuuugagaaag

SEQ ID NO: 633664 - RNA, 22 nt, Human
auuuggaagaaaucugucacag

SEQ ID NO: 633665 - RNA, 22 nt, Human
aauguguagggugccuguuuuu

SEQ ID NO: 633666 - RNA, 22 nt, Human
agcugguggaagggagcccaaa

SEQ ID NO: 633667 - RNA, 22 nt, Human
uccauacacauugaauuuuagu

SEQ ID NO: 633668 - RNA, 22 nt, Human
aaauucaauuaacuuucaugcu

SEQ ID NO: 633669 - RNA, 22 nt, Human
ucuguccauucagccauccauc

SEQ ID NO: 633670 - RNA, 22 nt, Human
uuaggaagaaggaggcaguauu

SEQ ID NO: 633671 - RNA, 22 nt, Human
ucacagugaggaguuacaguuu

SEQ ID NO: 633672 - RNA, 23 nt, Human
agggcugaugccauugcagcucu

SEQ ID NO: 633673 - RNA, 22 nt, Human
ugcagcagacauaauguggauu

SEQ ID NO: 633674 - RNA, 22 nt, Human
gccaggcauguccucugcagaa

SEQ ID NO: 633675 - RNA, 22 nt, Human
ucagaucauggaucuauuacuu

SEQ ID NO: 633676 - RNA, 22 nt, Human
cucuguccacagguuugucccu

SEQ ID NO: 633677 - RNA, 22 nt, Human
uguguucaugucacuggaaucc

SEQ ID NO: 633678 - RNA, 22 nt, Human
caaaccugcugcuauuuuaucc

SEQ ID NO: 633679 - RNA, 22 nt, Human
gcuuccauguugcugcugguca

SEQ ID NO: 633680 - RNA, 22 nt, Human
cuacauuuugugauuaugaaau

SEQ ID NO: 633681 - RNA, 22 nt, Human
uaaagugcuggauuugaguaaa

SEQ ID NO: 633682 - RNA, 22 nt, Human
gcaguggggaaugcuggggaga

SEQ ID NO: 633683 - RNA, 22 nt, Human
uaacaguauauuuaccaaaccu

SEQ ID NO: 633684 - RNA, 22 nt, Human
gcacuuggaggugcccacacag

SEQ ID NO: 633685 - RNA, 22 nt, Human
uuuguuuacaaaaauaagcagu

SEQ ID NO: 633686 - RNA, 22 nt, Human
agagcccugacggggacagaug

SEQ ID NO: 633687 - RNA, 21 nt, Human
aaggccugcuuacugcuaguu

SEQ ID NO: 633688 - RNA, 22 nt, Human
gaggaggcagccuaucccuuag

SEQ ID NO: 633689 - RNA, 22 nt, Human
gaucaugugauuugaaguaaug

SEQ ID NO: 633690 - RNA, 22 nt, Human
gaggcucacgacgggacgaacu

SEQ ID NO: 633691 - RNA, 22 nt, Human
gaugcuccaaacagcaauucuu

SEQ ID NO: 633692 - RNA, 23 nt, Human
gcugcagcuguggauguucucag

SEQ ID NO: 633693 - RNA, 20 nt, Human
aaucagaaagugugagcucu

SEQ ID NO: 633694 - RNA, 22 nt, Human
agugucaaugcucuguuaaaaa

SEQ ID NO: 633695 - RNA, 22 nt, Human
cuccugagcucugaggaagcuu

SEQ ID NO: 633696 - RNA, 22 nt, Human
augucucucagguuuaacuuua

SEQ ID NO: 633697 - RNA, 22 nt, Human
cagaagcauugacuccuugcuc

SEQ ID NO: 633698 - RNA, 22 nt, Human
ggaugcugcugcacauccugca

SEQ ID NO: 633699 - RNA, 22 nt, Human
gaucauuugacuuuauaaggcu

SEQ ID NO: 633700 - RNA, 22 nt, Human
ucauccauuguccucacauuag

SEQ ID NO: 633701 - RNA, 22 nt, Human
auuuccaccggcucaggaaguu

SEQ ID NO: 633702 - RNA, 22 nt, Human
cucacugugccuuuucccaaac

SEQ ID NO: 633703 - RNA, 22 nt, Human
cugagcagaagggugcacgugc

SEQ ID NO: 633704 - RNA, 22 nt, Human
aagcaucuccucaucauuuggg

SEQ ID NO: 633705 - RNA, 22 nt, Human
ggcaggugcucugugggccugg

SEQ ID NO: 633706 - RNA, 22 nt, Human
cugcaggggaccaaagucugac

SEQ ID NO: 633707 - RNA, 22 nt, Human
aguagauuuuugaauguaaguu

SEQ ID NO: 633708 - RNA, 22 nt, Human
agggggcaucagguccuggcuc

SEQ ID NO: 633709 - RNA, 22 nt, Human
ucagcucacucugcuuccuggg

SEQ ID NO: 633710 - RNA, 22 nt, Human
aagggaaaauaguugaugacca

SEQ ID NO: 633711 - RNA, 22 nt, Human
gugaggaagucugagagccaca

SEQ ID NO: 633712 - RNA, 22 nt, Human
aguucuguggcugugcccugua

SEQ ID NO: 633713 - RNA, 22 nt, Human
gugagcaggauuucauggugua

SEQ ID NO: 633714 - RNA, 19 nt, Human
gcuccugggccucacucau

SEQ ID NO: 633715 - RNA, 22 nt, Human
aaaucacuguuauugaucuuaa

SEQ ID NO: 633716 - RNA, 22 nt, Human
ugugaggaccucagcagagucu

SEQ ID NO: 633717 - RNA, 22 nt, Human
guccuauuagcauauugaauac

SEQ ID NO: 633718 - RNA, 22 nt, Human
aaaugcacacaccaggaaacua

SEQ ID NO: 633719 - RNA, 22 nt, Human
uaucuagauauuuggauaaaug

SEQ ID NO: 633720 - RNA, 22 nt, Human
gccugggugaauuugauccuaa

SEQ ID NO: 633721 - RNA, 22 nt, Human
ggcuggccagggcccucgcugg

SEQ ID NO: 633722 - RNA, 22 nt, Human
aacaguuuguggauagcuugua

SEQ ID NO: 633723 - RNA, 22 nt, Human
cagaaugcauugcuucugaugg

SEQ ID NO: 633724 - RNA, 18 nt, Human
agccuggaggguugaagu

SEQ ID NO: 633725 - RNA, 22 nt, Human
cacugggagucguaagacacgg

SEQ ID NO: 633726 - RNA, 22 nt, Human
agucacaugagcacuaauuagg

SEQ ID NO: 633727 - RNA, 22 nt, Human
uaagcaaaguuuauaaggcucu

SEQ ID NO: 633728 - RNA, 22 nt, Human
gauauuuauuaagugguuggua

SEQ ID NO: 633729 - RNA, 23 nt, Human
uccuucaaguuaggaagugaaca

SEQ ID NO: 633730 - RNA, 22 nt, Human
ugaagggggagauauaugugug

SEQ ID NO: 633731 - RNA, 21 nt, Human
auguggccauuguaguccacg

SEQ ID NO: 633732 - RNA, 22 nt, Human
aggcuucauuacagugguucaa

SEQ ID NO: 633733 - RNA, 23 nt, Human
ugcagcaggguggucuacuucuc

SEQ ID NO: 633734 - RNA, 22 nt, Human
uucugagggcuaauguacugua

SEQ ID NO: 633735 - RNA, 22 nt, Human
ucagacuuccacuuugugcacu

SEQ ID NO: 633736 - RNA, 18 nt, Human
cugaggccaacuacacug

SEQ ID NO: 633737 - RNA, 22 nt, Human
cagcaaaguaagcugacaugua

SEQ ID NO: 633738 - RNA, 20 nt, Human
ggccucaguguccuuguuug

SEQ ID NO: 633739 - RNA, 22 nt, Human
cacacagcaacaagaauagcca

SEQ ID NO: 633740 - RNA, 22 nt, Human
uccauuugaaaugaaagugaua

SEQ ID NO: 633741 - RNA, 22 nt, Human
guccuggugccaccugcgggau

SEQ ID NO: 633742 - RNA, 22 nt, Human
uuacagcacagugcuuuuacug

SEQ ID NO: 633743 - RNA, 22 nt, Human
cagaggcuaagaguguccaaag

SEQ ID NO: 633744 - RNA, 22 nt, Human
uggaaccuggccugagcuacca

SEQ ID NO: 633745 - RNA, 22 nt, Human
cacaaugauuugguucaaaaau

SEQ ID NO: 633746 - RNA, 22 nt, Human
aaguccauaguuugcauuaggg

SEQ ID NO: 633747 - RNA, 22 nt, Human
agggauggaucuuggcccugga

SEQ ID NO: 633748 - RNA, 21 nt, Human
agaaacaugaucaaaggaacc

SEQ ID NO: 633749 - RNA, 22 nt, Human
ccaaggcagaagauggcucuug

SEQ ID NO: 633750 - RNA, 22 nt, Human
uggcuguggacucagauggcuc

SEQ ID NO: 633751 - RNA, 19 nt, Human
agcagagcccugaagaucc

SEQ ID NO: 633752 - RNA, 22 nt, Human
ugcaggcuggcagauaucucau

SEQ ID NO: 633753 - RNA, 22 nt, Human
acccuggagcaauaaucccugg

SEQ ID NO: 633754 - RNA, 22 nt, Human
agcagaaccugcagaccugucu

SEQ ID NO: 633755 - RNA, 22 nt, Human
uuucacagaaagacaacagaua

SEQ ID NO: 633756 - RNA, 22 nt, Human
gaggcccaaugcuucccuccuu

SEQ ID NO: 633757 - RNA, 22 nt, Human
auaacagacuuagaguuacaag

SEQ ID NO: 633758 - RNA, 22 nt, Human
gggaagugugguuucuuuacag

SEQ ID NO: 633759 - RNA, 22 nt, Human
ucuggagggguuuagagggaca

SEQ ID NO: 633760 - RNA, 22 nt, Human
uagaggcucuucauugcaguag

SEQ ID NO: 633761 - RNA, 22 nt, Human
ucauuguuucugcuuuucauga

SEQ ID NO: 633762 - RNA, 22 nt, Human
ucuuucaaaguaacaaccacga

SEQ ID NO: 633763 - RNA, 22 nt, Human
acaucuguaaucuagucaaccc

SEQ ID NO: 633764 - RNA, 18 nt, Human
ugaggccucugcugggcc

SEQ ID NO: 633765 - RNA, 22 nt, Human
augaagggugucccugugagca

SEQ ID NO: 633766 - RNA, 22 nt, Human
ugcccagccaguuuaugguaau

SEQ ID NO: 633767 - RNA, 22 nt, Human
gggcagguuauuggaguaggga

SEQ ID NO: 633768 - RNA, 22 nt, Human
aggacuggcccugaggggaggc

SEQ ID NO: 633769 - RNA, 22 nt, Human
gucuguguuuucaggccuuugu

SEQ ID NO: 633770 - RNA, 22 nt, Human
caguucuuauuuggccaguguc

SEQ ID NO: 633771 - RNA, 22 nt, Human
auuuugcugugguacauuagga

SEQ ID NO: 633772 - RNA, 22 nt, Human
uaucugauacaacagaauaaca

SEQ ID NO: 633773 - RNA, 22 nt, Human
acuggauugggaaaguacuuca

SEQ ID NO: 633774 - RNA, 22 nt, Human
aucugccugcaguggagguggg

SEQ ID NO: 633775 - RNA, 22 nt, Human
cuggagccagccagggcccucu

SEQ ID NO: 633776 - RNA, 22 nt, Human
gaaauucugugucccagagugc

SEQ ID NO: 633777 - RNA, 22 nt, Human
cuguggagguaggagcaggaca

SEQ ID NO: 633778 - RNA, 22 nt, Human
cucaggaaaauauugaagaagu

SEQ ID NO: 633779 - RNA, 22 nt, Human
aucagaagcaggaggaaugaag

SEQ ID NO: 633780 - RNA, 22 nt, Human
uucacaaaaugguuuguugaug

SEQ ID NO: 633781 - RNA, 22 nt, Human
gucugcugcagucguggcucua

SEQ ID NO: 633782 - RNA, 22 nt, Human
uuauuagagugcuuugagaaag

SEQ ID NO: 633783 - RNA, 22 nt, Human
auuagcaugccaagcuuuuaga

SEQ ID NO: 633784 - RNA, 19 nt, Human
gcugugccucucuccugcu

SEQ ID NO: 633785 - RNA, 22 nt, Human
gucuucuguaagaugagguccc

SEQ ID NO: 633786 - RNA, 22 nt, Human
gaauguuuuuaggaauguuaug

SEQ ID NO: 633787 - RNA, 22 nt, Human
ccacauuuggagaagauacuuu

SEQ ID NO: 633788 - RNA, 22 nt, Human
aguauugugacucaaguauucu

SEQ ID NO: 633789 - RNA, 22 nt, Human
cagaaacacuguauuuagggaa

SEQ ID NO: 633790 - RNA, 22 nt, Human
uuugcucuuaugaacaaggugg

SEQ ID NO: 633791 - RNA, 19 nt, Human
agcuguggaugugggauuu

SEQ ID NO: 633792 - RNA, 22 nt, Human
uacaaagagguaauugcauaua

SEQ ID NO: 633793 - RNA, 22 nt, Human
uuccuucugaagccuuuguguu

SEQ ID NO: 633794 - RNA, 22 nt, Human
uggucucugcaggccaggcuca

SEQ ID NO: 633795 - RNA, 22 nt, Human
ugcuggaaauuccuaggaggua

SEQ ID NO: 633796 - RNA, 22 nt, Human
ugguauuacagcauuccauauu

SEQ ID NO: 633797 - RNA, 22 nt, Human
aggcaguguucuucuaagggca

SEQ ID NO: 633798 - RNA, 22 nt, Human
ucucuuugacccuuuagcucca

SEQ ID NO: 633799 - RNA, 22 nt, Human
gcaugcauuuccauucucacau

SEQ ID NO: 633800 - RNA, 22 nt, Human
cucuuauagacacucuucuaua

SEQ ID NO: 633801 - RNA, 22 nt, Human
cagggaugggauggagucaguu

SEQ ID NO: 633802 - RNA, 18 nt, Human
agaauuauucuuguccuc

SEQ ID NO: 633803 - RNA, 22 nt, Human
gagaagggauaugccacucucg

SEQ ID NO: 633804 - RNA, 22 nt, Human
agggcuggcaucucuaaugcug

SEQ ID NO: 633805 - RNA, 22 nt, Human
agggcugaaguuauggcugagc

SEQ ID NO: 633806 - RNA, 21 nt, Human
aaagaaaucucccauugguag

SEQ ID NO: 633807 - RNA, 22 nt, Human
agagcccugagucaguucugga

SEQ ID NO: 633808 - RNA, 22 nt, Human
cuccugugcaugcaucucccua

SEQ ID NO: 633809 - RNA, 22 nt, Human
augaggcucucaggggagcugu

SEQ ID NO: 633810 - RNA, 22 nt, Human
agcugcucgaagccgguggccc

SEQ ID NO: 633811 - RNA, 22 nt, Human
auauucugcuuuugaugcauuc

SEQ ID NO: 633812 - RNA, 22 nt, Human
caagaaaugggauuugacugcc

SEQ ID NO: 633813 - RNA, 23 nt, Human
ggcuccaggccugacgggcgcgg

SEQ ID NO: 633814 - RNA, 22 nt, Human
aaaaucugcuuccuuuuacaga

SEQ ID NO: 633815 - RNA, 22 nt, Human
ugcuucuuuaugauguaugauu

SEQ ID NO: 633816 - RNA, 22 nt, Human
ccagaggaggggggucuuucug

SEQ ID NO: 633817 - RNA, 22 nt, Human
agcugguucauucauucauggu

SEQ ID NO: 633818 - RNA, 22 nt, Human
acuuugcaaauaaacucucuaa

SEQ ID NO: 633819 - RNA, 22 nt, Human
aaagccaucuguauuaagugaa

SEQ ID NO: 633820 - RNA, 22 nt, Human
cuucuucacacuggucugaagc

SEQ ID NO: 633821 - RNA, 16 nt, Human
augggcagugaggaag

SEQ ID NO: 633822 - RNA, 22 nt, Human
ggcagggguucauuuugucuua

SEQ ID NO: 633823 - RNA, 22 nt, Human
aaauuccauuaugauaauuucg

SEQ ID NO: 633824 - RNA, 22 nt, Human
uccaaagccgacugacaucuga

SEQ ID NO: 633825 - RNA, 22 nt, Human
gcagaggcucuuuaaugcuuag

SEQ ID NO: 633826 - RNA, 22 nt, Human
cccugcccaccacaugcuggga

SEQ ID NO: 633827 - RNA, 22 nt, Human
acacagaugcuauuuagucucu

SEQ ID NO: 633828 - RNA, 22 nt, Human
cugcaaaucaaguucuuauaau

SEQ ID NO: 633829 - RNA, 22 nt, Human
gugucacaggcccagcucuuca

SEQ ID NO: 633830 - RNA, 22 nt, Human
gcagaggccuagguggaaggcc

SEQ ID NO: 633831 - RNA, 22 nt, Human
agauaaaaugauuuucuggauc

SEQ ID NO: 633832 - RNA, 22 nt, Human
uggugucugcacucccuggcgu

SEQ ID NO: 633833 - RNA, 22 nt, Human
ugguggcagcugagugucaggu

SEQ ID NO: 633834 - RNA, 22 nt, Human
aggcccucacagucuauuguga

SEQ ID NO: 633835 - RNA, 22 nt, Human
acuuguuucaacuguacucuca

SEQ ID NO: 633836 - RNA, 22 nt, Human
cuagucacgucuuucaguuacc

SEQ ID NO: 633837 - RNA, 22 nt, Human
gaggcugggggcugccuuccuc

SEQ ID NO: 633838 - RNA, 18 nt, Human
auauguuaauuagguagg

SEQ ID NO: 633839 - RNA, 22 nt, Human
caugggaggucugcaaggugcu

SEQ ID NO: 633840 - RNA, 22 nt, Human
guggcgcagaggguggcagaga

SEQ ID NO: 633841 - RNA, 22 nt, Human
ucacaggguuuggaagccuccu

SEQ ID NO: 633842 - RNA, 22 nt, Human
ccagauagaaaagaaggcagga

SEQ ID NO: 633843 - RNA, 22 nt, Human
ucuggcugaagcuuuugcagcu

SEQ ID NO: 633844 - RNA, 22 nt, Human
aguuuucaguaaauauuaguga

SEQ ID NO: 633845 - RNA, 22 nt, Human
acaauagaaggaaacugacaua

SEQ ID NO: 633846 - RNA, 22 nt, Human
gugccugccccacuccucagca

SEQ ID NO: 633847 - RNA, 22 nt, Human
uaggaaaagucuagauugauga

SEQ ID NO: 633848 - RNA, 22 nt, Human
gagaggaaagaaccaaugaccc

SEQ ID NO: 633849 - RNA, 22 nt, Human
aucugucuuuuauucaugagcu

SEQ ID NO: 633850 - RNA, 22 nt, Human
ucauggauuaaauuauuaaguu

SEQ ID NO: 633851 - RNA, 22 nt, Human
aaguuugcauagauuaagcauu

SEQ ID NO: 633852 - RNA, 23 nt, Human
augugugggaggucagagagcca

SEQ ID NO: 633853 - RNA, 22 nt, Human
aggcuggcagccaccucagcag

SEQ ID NO: 633854 - RNA, 22 nt, Human
cccagagaugggaggugaucgg

SEQ ID NO: 633855 - RNA, 22 nt, Human
agcagggcucacauuaguggau

SEQ ID NO: 633856 - RNA, 22 nt, Human
uuuucuguguauccaggcuucc

SEQ ID NO: 633857 - RNA, 22 nt, Human
gagguacaugaggauacacagg

SEQ ID NO: 633858 - RNA, 22 nt, Human
aggcccugcugaggccucccuc

SEQ ID NO: 633859 - RNA, 22 nt, Human
uucacauuagugguucuauaua

SEQ ID NO: 633860 - RNA, 22 nt, Human
uauagcacacaguuuauaaaag

SEQ ID NO: 633861 - RNA, 22 nt, Human
accagcucucuagcccuggucc

SEQ ID NO: 633862 - RNA, 19 nt, Human
cucagcuguagcucaugug

SEQ ID NO: 633863 - RNA, 22 nt, Human
cauacauugcucauucaguauc

SEQ ID NO: 633864 - RNA, 19 nt, Human
gggcuuuacuccaaguggg

SEQ ID NO: 633865 - RNA, 22 nt, Human
cacuuuauaugcauuaccucau

SEQ ID NO: 633866 - RNA, 22 nt, Human
acagauguugcuugucauucuc

SEQ ID NO: 633867 - RNA, 22 nt, Human
uaaaguauccaguuauucuucu

SEQ ID NO: 633868 - RNA, 22 nt, Human
uuucaggagagaccagaaauga

SEQ ID NO: 633869 - RNA, 22 nt, Human
gugcccugagcuuaugcauucu

SEQ ID NO: 633870 - RNA, 22 nt, Human
ugggagagcuucaugccuucag

SEQ ID NO: 633871 - RNA, 18 nt, Human
guguggcugagaugaggc

SEQ ID NO: 633872 - RNA, 22 nt, Human
guuuccucugcugguuuucauu

SEQ ID NO: 633873 - RNA, 22 nt, Human
aaaagaggagugguuuaugaca

SEQ ID NO: 633874 - RNA, 22 nt, Human
uggaucaugugaugucaggagu

SEQ ID NO: 633875 - RNA, 21 nt, Human
ugacauuuggauucauaguaa

SEQ ID NO: 633876 - RNA, 22 nt, Human
agaggcacccgcgcgcggccau

SEQ ID NO: 633877 - RNA, 22 nt, Human
uauagugucucuagaucaaaga

SEQ ID NO: 633878 - RNA, 22 nt, Human
cugcacagccugucugggggcc

SEQ ID NO: 633879 - RNA, 22 nt, Human
acugucaucugguagaugaugg

SEQ ID NO: 633880 - RNA, 22 nt, Human
cagggucuuauaaggccaauuu

SEQ ID NO: 633881 - RNA, 22 nt, Human
ggagagcuuggagugcgauuuu

SEQ ID NO: 633882 - RNA, 22 nt, Human
ccugagagugagugccuccuua

SEQ ID NO: 633883 - RNA, 22 nt, Human
uagaaagacaaugggaagugcu

SEQ ID NO: 633884 - RNA, 22 nt, Human
uggcaaaggggaccauguugaa

SEQ ID NO: 633885 - RNA, 22 nt, Human
ugugccuuucaucaugcuuuug

SEQ ID NO: 633886 - RNA, 22 nt, Human
uucauucuucagagcugcgcuu

SEQ ID NO: 633887 - RNA, 23 nt, Human
aguguugguugggaagccaagca

SEQ ID NO: 633888 - RNA, 22 nt, Human
aaagcagccacagagagagcgu

SEQ ID NO: 633889 - RNA, 22 nt, Human
aagagcuggcccaaucugagca

SEQ ID NO: 633890 - RNA, 22 nt, Human
aucuuuggugcaugauacuuug

SEQ ID NO: 633891 - RNA, 22 nt, Human
cagcagcagccccaggaagguu

SEQ ID NO: 633892 - RNA, 22 nt, Human
aagauggcugcagcaauuccaa

SEQ ID NO: 633893 - RNA, 22 nt, Human
uucaggaaaugucugccuacca

SEQ ID NO: 633894 - RNA, 23 nt, Human
cauuucuagguguguuuggccau

SEQ ID NO: 633895 - RNA, 22 nt, Human
auuuuucagcuucauugaggca

SEQ ID NO: 633896 - RNA, 22 nt, Human
uucuguuacaagugaaaaaaug

SEQ ID NO: 633897 - RNA, 17 nt, Human
cagacagauauccuggg

SEQ ID NO: 633898 - RNA, 22 nt, Human
gacaguaguaaagcuaggacca

SEQ ID NO: 633899 - RNA, 22 nt, Human
uaaagugcugggauuauaggcc

SEQ ID NO: 633900 - RNA, 22 nt, Human
ugcaggugccucuugagcuugu

SEQ ID NO: 633901 - RNA, 22 nt, Human
cuggcuguaagcguguuuccua

SEQ ID NO: 633902 - RNA, 22 nt, Human
gaccuggaagaacugaggccuu

SEQ ID NO: 633903 - RNA, 22 nt, Human
ucuggaagaacggggcaugcug

SEQ ID NO: 633904 - RNA, 22 nt, Human
cagaggaaaguauuucuggaag

SEQ ID NO: 633905 - RNA, 22 nt, Human
ugccaauuugccccuuugcuga

SEQ ID NO: 633906 - RNA, 22 nt, Human
agcacagguacggagaugcuac

SEQ ID NO: 633907 - RNA, 18 nt, Human
cuuuaugugcagagcuuu

SEQ ID NO: 633908 - RNA, 22 nt, Human
aggcucugcagaccccagcugu

SEQ ID NO: 633909 - RNA, 21 nt, Human
aguuuuuacucuuaacugugg

SEQ ID NO: 633910 - RNA, 22 nt, Human
cugucccaggagcuguaagaca

SEQ ID NO: 633911 - RNA, 22 nt, Human
aaagaugucauacacauuaaga

SEQ ID NO: 633912 - RNA, 23 nt, Human
cauccaggagcugagucugacug

SEQ ID NO: 633913 - RNA, 22 nt, Human
uccaugggaagauuuugagugg

SEQ ID NO: 633914 - RNA, 22 nt, Human
uugauucuggugacugauggaa

SEQ ID NO: 633915 - RNA, 22 nt, Human
ucaaugucuucucaagucuuuu

SEQ ID NO: 633916 - RNA, 22 nt, Human
gaagggugugugugagggacac

SEQ ID NO: 633917 - RNA, 22 nt, Human
cauuacauuucaaaauguuucc

SEQ ID NO: 633918 - RNA, 22 nt, Human
aucacgucaugguuugaucugg

SEQ ID NO: 633919 - RNA, 23 nt, Human
auauuagggagauuagcccucua

SEQ ID NO: 633920 - RNA, 22 nt, Human
uuucauguuuauggaaaaugag

SEQ ID NO: 633921 - RNA, 22 nt, Human
ggcccugggcagaggagugggc

SEQ ID NO: 633922 - RNA, 22 nt, Human
ugaguggagaacagaggcucuc

SEQ ID NO: 633923 - RNA, 22 nt, Human
aguguuucaccguauguucuca

SEQ ID NO: 633924 - RNA, 21 nt, Human
auuuauguuugggguggaaug

SEQ ID NO: 633925 - RNA, 22 nt, Human
uaacacagacagccacuaguaa

SEQ ID NO: 633926 - RNA, 22 nt, Human
agacaauauauaauuuuaguug

SEQ ID NO: 633927 - RNA, 22 nt, Human
gcccuuggcaaauucuccuuua

SEQ ID NO: 633928 - RNA, 22 nt, Human
acauuuacccuggaacauugga

SEQ ID NO: 633929 - RNA, 22 nt, Human
uuuuauucaaauaguucacacu

SEQ ID NO: 633930 - RNA, 22 nt, Human
cugaggacauugaugaggcaau

SEQ ID NO: 633931 - RNA, 21 nt, Human
aguggucuuuuucacccagug

SEQ ID NO: 633932 - RNA, 22 nt, Human
uagcaaggcguggcacucaaau

SEQ ID NO: 633933 - RNA, 22 nt, Human
aggccagagaggggaccagccu

SEQ ID NO: 633934 - RNA, 22 nt, Human
uucaagaucuuccaaaggauac

SEQ ID NO: 633935 - RNA, 22 nt, Human
uucauuuggccucugcuuaaaa

SEQ ID NO: 633936 - RNA, 23 nt, Human
guguguggaaagugcaugggccu

SEQ ID NO: 633937 - RNA, 19 nt, Human
cugaaaaacauucucagga

SEQ ID NO: 633938 - RNA, 18 nt, Human
cauaauuuucuuucuuua

SEQ ID NO: 633939 - RNA, 22 nt, Human
ggacccugggcucugggccuau

SEQ ID NO: 633940 - RNA, 22 nt, Human
ugugugaacucucugauguaca

SEQ ID NO: 633941 - RNA, 23 nt, Human
agcuggaaauggccgagcucugc

SEQ ID NO: 633942 - RNA, 22 nt, Human
gagacacuugcugugaggucgc

SEQ ID NO: 633943 - RNA, 22 nt, Human
ggggcaggagguguucucuuuu

SEQ ID NO: 633944 - RNA, 19 nt, Human
uuccugugcugcugugucc

SEQ ID NO: 633945 - RNA, 21 nt, Human
ccugcagcaccagaaggagau

SEQ ID NO: 633946 - RNA, 22 nt, Human
uucuggaaacccucagccagug

SEQ ID NO: 633947 - RNA, 21 nt, Human
ucagagaacccggcaggcaag

SEQ ID NO: 633948 - RNA, 22 nt, Human
uuuaugcagcacuuuacauuug

SEQ ID NO: 633949 - RNA, 22 nt, Human
cuguccagcuuggcuccugggg

SEQ ID NO: 633950 - RNA, 22 nt, Human
cugugccaggcccagcugacuu

SEQ ID NO: 633951 - RNA, 18 nt, Human
gaaaccugaggaagaaag

SEQ ID NO: 633952 - RNA, 16 nt, Human
aucuaagaauguagag

SEQ ID NO: 633953 - RNA, 22 nt, Human
aaugaugagaacuggaguaauu

SEQ ID NO: 633954 - RNA, 22 nt, Human
aggccacauugugauucccgca

SEQ ID NO: 633955 - RNA, 22 nt, Human
aaguucaagucugcaucuuuuu

SEQ ID NO: 633956 - RNA, 22 nt, Human
uggucugaaugacuuguuaguu

SEQ ID NO: 633957 - RNA, 22 nt, Human
ccugucagaugaaguaauugug

SEQ ID NO: 633958 - RNA, 22 nt, Human
cuugggaaguguuuaaagcuga

SEQ ID NO: 633959 - RNA, 22 nt, Human
uacaggugguaaaaauauuguu

SEQ ID NO: 633960 - RNA, 22 nt, Human
gccuagagaaaaagccucugca

SEQ ID NO: 633961 - RNA, 22 nt, Human
agggcuggagccacagcuggga

SEQ ID NO: 633962 - RNA, 22 nt, Human
gacuucagauauuuuuuaaguu

SEQ ID NO: 633963 - RNA, 18 nt, Human
cccacuguccccacaggc

SEQ ID NO: 633964 - RNA, 22 nt, Human
gcugggcaccggagagacccca

SEQ ID NO: 633965 - RNA, 22 nt, Human
gcugccguuggcucuucaggcc

SEQ ID NO: 633966 - RNA, 22 nt, Human
ugcucuggguccugggccuccu

SEQ ID NO: 633967 - RNA, 15 nt, Human
gcucuggguauuuga

SEQ ID NO: 633968 - RNA, 22 nt, Human
ucacaacucuuuccauuuaaua

SEQ ID NO: 633969 - RNA, 22 nt, Human
aaagcuauagggucaagcauuu

SEQ ID NO: 633970 - RNA, 22 nt, Human
cugaggcuggggaagggaagug

SEQ ID NO: 633971 - RNA, 22 nt, Human
acacuuuaucaauauucaaaaa

SEQ ID NO: 633972 - RNA, 22 nt, Human
aaagagcuggcauuuauagucu

SEQ ID NO: 633973 - RNA, 22 nt, Human
uguuuuuccaugugcagaacaa

SEQ ID NO: 633974 - RNA, 23 nt, Human
acaaccagcacuggagggcacca

SEQ ID NO: 633975 - RNA, 22 nt, Human
ccagcaucuaacgcuccuggga

SEQ ID NO: 633976 - RNA, 22 nt, Human
gucagcaaaaaauuuaugugag

SEQ ID NO: 633977 - RNA, 22 nt, Human
uuguuuaaugccucauacaucu

SEQ ID NO: 633978 - RNA, 22 nt, Human
uuggcaguagugguaguacauu

SEQ ID NO: 633979 - RNA, 22 nt, Human
cugugucuuuccuacuuugugg

SEQ ID NO: 633980 - RNA, 22 nt, Human
agaaguuaauuccugaaauucu

SEQ ID NO: 633981 - RNA, 22 nt, Human
aggaggccuguuuucuccugga

SEQ ID NO: 633982 - RNA, 22 nt, Human
ugacacaguaucaaacaugauu

SEQ ID NO: 633983 - RNA, 22 nt, Human
uuuccucugcugccauugcccc

SEQ ID NO: 633984 - RNA, 22 nt, Human
ucuacacauuuguaaaggcauu

SEQ ID NO: 633985 - RNA, 22 nt, Human
aauagcaugcauccugcauaga

SEQ ID NO: 633986 - RNA, 19 nt, Human
ucauggaagaaaugugaua

SEQ ID NO: 633987 - RNA, 22 nt, Human
cuuacacacuagaugguaggug

SEQ ID NO: 633988 - RNA, 22 nt, Human
uccuguggcguuaucaugugau

SEQ ID NO: 633989 - RNA, 22 nt, Human
gagguugggaaguccaagcugg

SEQ ID NO: 633990 - RNA, 22 nt, Human
agcacaggaccaaggaagcugu

SEQ ID NO: 633991 - RNA, 22 nt, Human
uuucauguauuucccaaagcuu

SEQ ID NO: 633992 - RNA, 22 nt, Human
uuuggucucugugcauccuccu

SEQ ID NO: 633993 - RNA, 22 nt, Human
aggggagcaaggccguggugua

SEQ ID NO: 633994 - RNA, 22 nt, Human
ucucuuucuauugcaccaugcu

SEQ ID NO: 633995 - RNA, 22 nt, Human
auuuauugaagcuuauuacguu

SEQ ID NO: 633996 - RNA, 22 nt, Human
ugugacuugauguuugcaccag

SEQ ID NO: 633997 - RNA, 22 nt, Human
auaauaaaccaggaugggucug

SEQ ID NO: 633998 - RNA, 22 nt, Human
aggcagaaaauagucauccaaa

SEQ ID NO: 633999 - RNA, 21 nt, Human
acuguuauucccauuuucacc

SEQ ID NO: 634000 - RNA, 22 nt, Human
gggaucagcaagccacugcacc

SEQ ID NO: 634001 - RNA, 20 nt, Human
acaguggguggggagcacug

SEQ ID NO: 634002 - RNA, 22 nt, Human
gcaugggaggacagucugggcu

SEQ ID NO: 634003 - RNA, 22 nt, Human
uaccauuucaguaaaaacuuag

SEQ ID NO: 634004 - RNA, 22 nt, Human
cugcaggggcaguccacuuccu

SEQ ID NO: 634005 - RNA, 22 nt, Human
ggggugagaucaaggaagcccu

SEQ ID NO: 634006 - RNA, 22 nt, Human
ucucuccuuaucauuguguuua

SEQ ID NO: 634007 - RNA, 22 nt, Human
gguaugaaaugauuccauguua

SEQ ID NO: 634008 - RNA, 22 nt, Human
aucuccagauugugaucaucag

SEQ ID NO: 634009 - RNA, 22 nt, Human
ucauugcaggcauuccccugcc

SEQ ID NO: 634010 - RNA, 22 nt, Human
cagaggucugacacugaauggu

SEQ ID NO: 634011 - RNA, 21 nt, Human
augggcagaggcagagaggcu

SEQ ID NO: 634012 - RNA, 20 nt, Human
ugcuuuaugcuauacuuugu

SEQ ID NO: 634013 - RNA, 18 nt, Human
cucuguguuggugugaag

SEQ ID NO: 634014 - RNA, 22 nt, Human
ugauauaagaaguaguauggau

SEQ ID NO: 634015 - RNA, 21 nt, Human
uuacagcaauguuagcaggaa

SEQ ID NO: 634016 - RNA, 22 nt, Human
ugcugcucaaugagaugccauc

SEQ ID NO: 634017 - RNA, 23 nt, Human
augcaggguuacagggcugacuu

SEQ ID NO: 634018 - RNA, 22 nt, Human
augugcuucauucuacaugaca

SEQ ID NO: 634019 - RNA, 22 nt, Human
gugggcaggagugagcaacagg

SEQ ID NO: 634020 - RNA, 23 nt, Human
ucugucuguguaugugcagaaag

SEQ ID NO: 634021 - RNA, 22 nt, Human
cugccuggaugaauggcgccuu

SEQ ID NO: 634022 - RNA, 22 nt, Human
cucagagcacaguuuaugacag

SEQ ID NO: 634023 - RNA, 22 nt, Human
cuccagguugacuucagucaau

SEQ ID NO: 634024 - RNA, 22 nt, Human
auggguagacugacaaagucaa

SEQ ID NO: 634025 - RNA, 22 nt, Human
uuaucugaaacuuuugggacca

SEQ ID NO: 634026 - RNA, 22 nt, Human
agcccagguggagugugugggg

SEQ ID NO: 634027 - RNA, 22 nt, Human
ucacauuuuaucuauuuuaagu

SEQ ID NO: 634028 - RNA, 22 nt, Human
acccagggagugcuccuguucu

SEQ ID NO: 634029 - RNA, 22 nt, Human
caacuguuauaaaucaacagag

SEQ ID NO: 634030 - RNA, 22 nt, Human
ucacuguauuugcugaugcaua

SEQ ID NO: 634031 - RNA, 22 nt, Human
agggccagcccauaaugccaaa

SEQ ID NO: 634032 - RNA, 22 nt, Human
gcccugagggguggugucugua

SEQ ID NO: 634033 - RNA, 22 nt, Human
aaaucaguucacguucugaggu

SEQ ID NO: 634034 - RNA, 17 nt, Human
caguggcagaucuucuc

SEQ ID NO: 634035 - RNA, 22 nt, Human
cucuucuuuaguccagaccauc

SEQ ID NO: 634036 - RNA, 22 nt, Human
cucugcuuuuuagggagccuag

SEQ ID NO: 634037 - RNA, 22 nt, Human
gaguuggcuguucgaagguagc

SEQ ID NO: 634038 - RNA, 22 nt, Human
ccauuggagccaagaguuuuac

SEQ ID NO: 634039 - RNA, 22 nt, Human
cucuuuaacucccauucugucc

SEQ ID NO: 634040 - RNA, 22 nt, Human
aggaacaagggagccuuuucuc

SEQ ID NO: 634041 - RNA, 22 nt, Human
ugcugcagcggcauggucuuug

SEQ ID NO: 634042 - RNA, 22 nt, Human
ucugaacagaaaagaugcacaa

SEQ ID NO: 634043 - RNA, 22 nt, Human
ucuuuauuuaagucuguuguaa

SEQ ID NO: 634044 - RNA, 22 nt, Human
ugcuuaaaaacaguaugguagu

SEQ ID NO: 634045 - RNA, 22 nt, Human
augcaguuagguaauagucuca

SEQ ID NO: 634046 - RNA, 22 nt, Human
caguaaaagauggaaauagaau

SEQ ID NO: 634047 - RNA, 22 nt, Human
cuaaaugacuuccagugguuau

SEQ ID NO: 634048 - RNA, 22 nt, Human
gcauggccucugugcuuguugc

SEQ ID NO: 634049 - RNA, 22 nt, Human
gccagagcugagugagguucuu

SEQ ID NO: 634050 - RNA, 22 nt, Human
uugaggagcaggaugggaggcu

SEQ ID NO: 634051 - RNA, 22 nt, Human
ucugagcacaauuacuuacauc

SEQ ID NO: 634052 - RNA, 22 nt, Human
ucucagagaccugaacucccug

SEQ ID NO: 634053 - RNA, 22 nt, Human
uauuuguccuuauuaagaucug

SEQ ID NO: 634054 - RNA, 22 nt, Human
gaagcugacccaggagcgugug

SEQ ID NO: 634055 - RNA, 22 nt, Human
cuugggccaccuggagggacug

SEQ ID NO: 634056 - RNA, 22 nt, Human
ucucugugagaugccuuccuga

SEQ ID NO: 634057 - RNA, 22 nt, Human
uguuuaagccuguggugucauc

SEQ ID NO: 634058 - RNA, 22 nt, Human
agaucugaguggcugcauguaa

SEQ ID NO: 634059 - RNA, 22 nt, Human
cucuccagccacagaagcugcu

SEQ ID NO: 634060 - RNA, 22 nt, Human
agcugaggacgugaagggcggc

SEQ ID NO: 634061 - RNA, 22 nt, Human
cccuuuaaguagaauauauuau

SEQ ID NO: 634062 - RNA, 22 nt, Human
uaaaugagauguacauaacuca

SEQ ID NO: 634063 - RNA, 22 nt, Human
gcugggaggaauuuggggaaua

SEQ ID NO: 634064 - RNA, 22 nt, Human
cugugcuggcagaccuggaguu

SEQ ID NO: 634065 - RNA, 22 nt, Human
uuuccagugauugcugcucuca

SEQ ID NO: 634066 - RNA, 22 nt, Human
cugccaaaaggugcaccugcug

SEQ ID NO: 634067 - RNA, 22 nt, Human
agucugcaggcugugauuuuuu

SEQ ID NO: 634068 - RNA, 22 nt, Human
uggguggcacuucuggggucca

SEQ ID NO: 634069 - RNA, 23 nt, Human
gaggccuggcccugccacaucuc

SEQ ID NO: 634070 - RNA, 22 nt, Human
uccauacucagaaaguauugca

SEQ ID NO: 634071 - RNA, 22 nt, Human
aagcccuggauuaaagaugcca

SEQ ID NO: 634072 - RNA, 22 nt, Human
caggcacaaugagcgccaucuu

SEQ ID NO: 634073 - RNA, 23 nt, Human
cuccuggaggguccggcccugcc

SEQ ID NO: 634074 - RNA, 22 nt, Human
ggcacagccacuuuggagaacu

SEQ ID NO: 634075 - RNA, 22 nt, Human
gucuguccagcaacacaggagu

SEQ ID NO: 634076 - RNA, 22 nt, Human
uguaggcugaagaugaagugga

SEQ ID NO: 634077 - RNA, 22 nt, Human
aagggacauagacuguacaucu

SEQ ID NO: 634078 - RNA, 22 nt, Human
gcccaucaucacuguggaggcu

SEQ ID NO: 634079 - RNA, 22 nt, Human
uucuguuaucauuaagcauuau

SEQ ID NO: 634080 - RNA, 22 nt, Human
aagacagagggaagcaaugaug

SEQ ID NO: 634081 - RNA, 22 nt, Human
uugaaggacaucuuguuucuag

SEQ ID NO: 634082 - RNA, 22 nt, Human
cuugccaaugguacaaacgauu

SEQ ID NO: 634083 - RNA, 22 nt, Human
agguggccccaggccucugcca

SEQ ID NO: 634084 - RNA, 22 nt, Human
gagccugcagcuuucacagcau

SEQ ID NO: 634085 - RNA, 22 nt, Human
caggcacugugcaagggucucg

SEQ ID NO: 634086 - RNA, 20 nt, Human
accuaguacaaucuguuucu

SEQ ID NO: 634087 - RNA, 22 nt, Human
ccagccuuugcaucccccaucu

SEQ ID NO: 634088 - RNA, 22 nt, Human
ccagagcuucggggcggcugua

SEQ ID NO: 634089 - RNA, 22 nt, Human
uuuccuuaaaucuguuucuagu

SEQ ID NO: 634090 - RNA, 22 nt, Human
ugauuuaugcauuauacuguug

SEQ ID NO: 634091 - RNA, 22 nt, Human
aggcacuguggaagacaugguu

SEQ ID NO: 634092 - RNA, 22 nt, Human
ucacagcagaauuuaggaggca

SEQ ID NO: 634093 - RNA, 22 nt, Human
cagaaggcaaacaaaaggauuu

SEQ ID NO: 634094 - RNA, 22 nt, Human
agugaaaacacuaguucuugcc

SEQ ID NO: 634095 - RNA, 22 nt, Human
ggcugguguugagugccuguag

SEQ ID NO: 634096 - RNA, 22 nt, Human
gagaaagauuguccuucagggg

SEQ ID NO: 634097 - RNA, 22 nt, Human
aacacuuaaggagagaucaaau

SEQ ID NO: 634098 - RNA, 22 nt, Human
cugcagugaaaucaggaagcaa

SEQ ID NO: 634099 - RNA, 22 nt, Human
uggcuucacacaggcacuuccg

SEQ ID NO: 634100 - RNA, 22 nt, Human
accaaggcuaaaauaacauguu

SEQ ID NO: 634101 - RNA, 18 nt, Human
aggucuguggucaccagg

SEQ ID NO: 634102 - RNA, 22 nt, Human
aggcuaauauggcacaugaaca

SEQ ID NO: 634103 - RNA, 22 nt, Human
cacaggaggaggccagagcgua

SEQ ID NO: 634104 - RNA, 22 nt, Human
agcuuugggauucaggcaggaa

SEQ ID NO: 634105 - RNA, 22 nt, Human
agucucugcaugccugcugugc

SEQ ID NO: 634106 - RNA, 17 nt, Human
cugaagauaauggcaac

SEQ ID NO: 634107 - RNA, 22 nt, Human
gaccacuggcgcugcgagaccc

SEQ ID NO: 634108 - RNA, 22 nt, Human
uaccugaguuauauuaauaauu

SEQ ID NO: 634109 - RNA, 18 nt, Human
cagcugcaggcucaggac

SEQ ID NO: 634110 - RNA, 22 nt, Human
cccugagaacaacuuagggguc

SEQ ID NO: 634111 - RNA, 22 nt, Human
aacuagagcuuccagcuucuug

SEQ ID NO: 634112 - RNA, 18 nt, Human
uguggcaggggugggaga

SEQ ID NO: 634113 - RNA, 22 nt, Human
uauauaauuuucugccauaucc

SEQ ID NO: 634114 - RNA, 22 nt, Human
aaggugucggcagagccgcuuc

SEQ ID NO: 634115 - RNA, 22 nt, Human
accagcugccuggucuaucugc

SEQ ID NO: 634116 - RNA, 23 nt, Human
gcugccucuguuggucuucaguu

SEQ ID NO: 634117 - RNA, 22 nt, Human
agggugguggcgaugaggacau

SEQ ID NO: 634118 - RNA, 22 nt, Human
gaugggaggaaccugggucccu

SEQ ID NO: 634119 - RNA, 22 nt, Human
gugugugugcaucucuuuuauu

SEQ ID NO: 634120 - RNA, 22 nt, Human
gagcugagaucauguacacuag

SEQ ID NO: 634121 - RNA, 21 nt, Human
aggcccagagucuugggggga

SEQ ID NO: 634122 - RNA, 22 nt, Human
agagcuggcagcagcuucuccu

SEQ ID NO: 634123 - RNA, 22 nt, Human
uaaggccagccagcaaaucugu

SEQ ID NO: 634124 - RNA, 22 nt, Human
aucagcaagcauuuauugagug

SEQ ID NO: 634125 - RNA, 22 nt, Human
agccccuugugggcgcacagca

SEQ ID NO: 634126 - RNA, 22 nt, Human
gcugccucacuccagcccaaua

SEQ ID NO: 634127 - RNA, 22 nt, Human
cacacaguaggcacucauuaau

SEQ ID NO: 634128 - RNA, 22 nt, Human
uuugaauauacuucaaacaaag

SEQ ID NO: 634129 - RNA, 22 nt, Human
cacagguauauguguauauacu

SEQ ID NO: 634130 - RNA, 22 nt, Human
ucuccaggcacuuggcugcuac

SEQ ID NO: 634131 - RNA, 22 nt, Human
gagauacaguuggcugcaggcu

SEQ ID NO: 634132 - RNA, 18 nt, Human
gguggcuggggacggaca

SEQ ID NO: 634133 - RNA, 22 nt, Human
acaggcauugggauggagguug

SEQ ID NO: 634134 - RNA, 22 nt, Human
cucauugauucagugcugcucu

SEQ ID NO: 634135 - RNA, 22 nt, Human
aacugcaauuacuuuugcacua

SEQ ID NO: 634136 - RNA, 20 nt, Human
ggcaguuaaggcacagucau

SEQ ID NO: 634137 - RNA, 22 nt, Human
caucuaaauuugacuccaagga

SEQ ID NO: 634138 - RNA, 22 nt, Human
ucuacagugucaaugugucuug

SEQ ID NO: 634139 - RNA, 22 nt, Human
gccucccuguagaggccagccu

SEQ ID NO: 634140 - RNA, 22 nt, Human
aggugcaccugagggugucauc

SEQ ID NO: 634141 - RNA, 19 nt, Human
aacagcaacuuccuaguca

SEQ ID NO: 634142 - RNA, 22 nt, Human
uggaacacaggacuaucagcug

SEQ ID NO: 634143 - RNA, 22 nt, Human
aaccuggaccuuuuggguauug

SEQ ID NO: 634144 - RNA, 22 nt, Human
cugugcuuucgagaugugaucu

SEQ ID NO: 634145 - RNA, 22 nt, Human
agcagcuccucuaggaacggau

SEQ ID NO: 634146 - RNA, 22 nt, Human
cccagaggaggaucucggcccg

SEQ ID NO: 634147 - RNA, 22 nt, Human
cuguggcugcagccuugguccu

SEQ ID NO: 634148 - RNA, 22 nt, Human
aaagacagauggcaaggaugau

SEQ ID NO: 634149 - RNA, 22 nt, Human
cagccugcccuggaagcccagc

SEQ ID NO: 634150 - RNA, 22 nt, Human
gaguucaguguuucuaguagug

SEQ ID NO: 634151 - RNA, 22 nt, Human
uaguggaggggaugcaaagcuu

SEQ ID NO: 634152 - RNA, 21 nt, Human
ucugagaacuucugcugcagc

SEQ ID NO: 634153 - RNA, 22 nt, Human
ggcugccugcuccuccugcacg

SEQ ID NO: 634154 - RNA, 22 nt, Human
uuguccagcagcucagucuacg

SEQ ID NO: 634155 - RNA, 22 nt, Human
uucagcaggcgguagcugccac

SEQ ID NO: 634156 - RNA, 22 nt, Human
gcagaggguccugugccagcag

SEQ ID NO: 634157 - RNA, 22 nt, Human
uauuuccaagcugaauccaaug

SEQ ID NO: 634158 - RNA, 23 nt, Human
augaaugaauaaggcaggaaagc

SEQ ID NO: 634159 - RNA, 22 nt, Human
accugccucagugcagcuggau

SEQ ID NO: 634160 - RNA, 22 nt, Human
agcuccaguuacuuaccuagag

SEQ ID NO: 634161 - RNA, 22 nt, Human
ugagccacagugagagcuccug

SEQ ID NO: 634162 - RNA, 22 nt, Human
caggauauuaguuuucuuguua

SEQ ID NO: 634163 - RNA, 22 nt, Human
gaagcagcaaguauaggacagg

SEQ ID NO: 634164 - RNA, 18 nt, Human
cugagggcagccccuggg

SEQ ID NO: 634165 - RNA, 22 nt, Human
ugcccugggaguuggagcugcu

SEQ ID NO: 634166 - RNA, 22 nt, Human
gcaugcagacagucugagacca

SEQ ID NO: 634167 - RNA, 22 nt, Human
caguguuucugugcccaguggg

SEQ ID NO: 634168 - RNA, 22 nt, Human
uucugcauuucuaauaaguucc

SEQ ID NO: 634169 - RNA, 22 nt, Human
ugcaccauuuugucaggcuacu

SEQ ID NO: 634170 - RNA, 22 nt, Human
uggaaugacagagagucugaau

SEQ ID NO: 634171 - RNA, 18 nt, Human
ucagauuuaacuguaucc

SEQ ID NO: 634172 - RNA, 22 nt, Human
ucacugacguggggcuacuuga

SEQ ID NO: 634173 - RNA, 22 nt, Human
uuucacauacaguguauaguag

SEQ ID NO: 634174 - RNA, 17 nt, Human
uauguaguacuuauaaa

SEQ ID NO: 634175 - RNA, 22 nt, Human
cuauacagcagcuuacuaguua

SEQ ID NO: 634176 - RNA, 22 nt, Human
caucaguguggcaguucacugu

SEQ ID NO: 634177 - RNA, 22 nt, Human
cuccagauccagcugagcugca

SEQ ID NO: 634178 - RNA, 22 nt, Human
uuuucuaucuccuagaacugcc

SEQ ID NO: 634179 - RNA, 22 nt, Human
gcucugggugaauggcagauug

SEQ ID NO: 634180 - RNA, 22 nt, Human
accaagcuucguggaggaaguu

SEQ ID NO: 634181 - RNA, 22 nt, Human
accuguuuucagaaaaugcaga

SEQ ID NO: 634182 - RNA, 22 nt, Human
ugccaaaauggccaaaagcuag

SEQ ID NO: 634183 - RNA, 22 nt, Human
ugcucaguagcagugugcugcu

SEQ ID NO: 634184 - RNA, 22 nt, Human
cacuaguggccccaugugguug

SEQ ID NO: 634185 - RNA, 22 nt, Human
cuuauuuuaagucaguuugggu

SEQ ID NO: 634186 - RNA, 22 nt, Human
gcugucugucucugucccacca

SEQ ID NO: 634187 - RNA, 22 nt, Human
ugggacacccucacgccugcac

SEQ ID NO: 634188 - RNA, 22 nt, Human
ucucuccugcacugaauuaugu

SEQ ID NO: 634189 - RNA, 22 nt, Human
agggugcguucuaugagaaucu

SEQ ID NO: 634190 - RNA, 22 nt, Human
uucugggccaaucucuuaaucu

SEQ ID NO: 634191 - RNA, 22 nt, Human
gucaggaagcaagguugggcau

SEQ ID NO: 634192 - RNA, 22 nt, Human
gaaugugugacucuauugagca

SEQ ID NO: 634193 - RNA, 22 nt, Human
cauggccagcccccaguuccuc

SEQ ID NO: 634194 - RNA, 22 nt, Human
cuuugaaaacacacgaauagac

SEQ ID NO: 634195 - RNA, 22 nt, Human
caggccugggcuggguaucagg

SEQ ID NO: 634196 - RNA, 22 nt, Human
acacagcuuucagucauuaucu

SEQ ID NO: 634197 - RNA, 20 nt, Human
guggcagugguggcagcagu

SEQ ID NO: 634198 - RNA, 22 nt, Human
ugcucuggcuggagcaaugacu

SEQ ID NO: 634199 - RNA, 19 nt, Human
cugggcugaggucugccuu

SEQ ID NO: 634200 - RNA, 22 nt, Human
gcuuccauguaugcucuugaca

SEQ ID NO: 634201 - RNA, 22 nt, Human
ucaauguccgggccccauucca

SEQ ID NO: 634202 - RNA, 22 nt, Human
ucagcuucucaaaauggcuuag

SEQ ID NO: 634203 - RNA, 22 nt, Human
uuuaaauguuuauagagaguac

SEQ ID NO: 634204 - RNA, 22 nt, Human
cagcaucuguuuuucugaccca

SEQ ID NO: 634205 - RNA, 22 nt, Human
agaauucagaaugcauuucuaa

SEQ ID NO: 634206 - RNA, 22 nt, Human
ugagaaugaaucuuuugcuuuc

SEQ ID NO: 634207 - RNA, 22 nt, Human
cuucucuacuuccuggaagggg

SEQ ID NO: 634208 - RNA, 22 nt, Human
gcccucaguggauucuuauugu

SEQ ID NO: 634209 - RNA, 22 nt, Human
ccuuuucuauguaccagcagug

SEQ ID NO: 634210 - RNA, 22 nt, Human
ccagggugagaaaaggcuggau

SEQ ID NO: 634211 - RNA, 22 nt, Human
gaggcacaccagggagucuugu

SEQ ID NO: 634212 - RNA, 17 nt, Human
ccaggucuccuugcuuu

SEQ ID NO: 634213 - RNA, 18 nt, Human
ucugggcuucccgaggcu

SEQ ID NO: 634214 - RNA, 22 nt, Human
uuuguucaaaaauuauaagaua

SEQ ID NO: 634215 - RNA, 22 nt, Human
ucuccagaggucccuugucucu

SEQ ID NO: 634216 - RNA, 22 nt, Human
ugcuccugcugcaugcaucucc

SEQ ID NO: 634217 - RNA, 22 nt, Human
agucuuuaacauuuggagauug

SEQ ID NO: 634218 - RNA, 22 nt, Human
uacccagcuccucagaagacca

SEQ ID NO: 634219 - RNA, 22 nt, Human
aaucuacaugcaauauuuuuag

SEQ ID NO: 634220 - RNA, 22 nt, Human
ugucucaggggcauugaaauaa

SEQ ID NO: 634221 - RNA, 22 nt, Human
uccaugagcuagcuuuccaaag

SEQ ID NO: 634222 - RNA, 22 nt, Human
aggguccugggugcaguugcuu

SEQ ID NO: 634223 - RNA, 22 nt, Human
ucagcaggcacaccaaaaacug

SEQ ID NO: 634224 - RNA, 19 nt, Human
uaaugcacuuaacacaugg

SEQ ID NO: 634225 - RNA, 20 nt, Human
accaggagauggaggcaggg

SEQ ID NO: 634226 - RNA, 22 nt, Human
aggagcagaccguaguccugca

SEQ ID NO: 634227 - RNA, 23 nt, Human
agucacaucuuagcagccagguc

SEQ ID NO: 634228 - RNA, 23 nt, Human
ggccacugaauuuucugcaucuu

SEQ ID NO: 634229 - RNA, 22 nt, Human
aggcccuggcccccagagauuc

SEQ ID NO: 634230 - RNA, 22 nt, Human
agcaggacaauaugggaucagg

SEQ ID NO: 634231 - RNA, 22 nt, Human
gcuucuccucccgcucccaggc

SEQ ID NO: 634232 - RNA, 22 nt, Human
uaguuaggggaaaaacgacagg

SEQ ID NO: 634233 - RNA, 22 nt, Human
ucauggaagaaagguuuguuuc

SEQ ID NO: 634234 - RNA, 22 nt, Human
uauguacaauuuguuguauguc

SEQ ID NO: 634235 - RNA, 23 nt, Human
uucaugaguuggacaagacuggg

SEQ ID NO: 634236 - RNA, 17 nt, Human
cagcucugcaucuuccu

SEQ ID NO: 634237 - RNA, 19 nt, Human
ugacagagagcaggguggu

SEQ ID NO: 634238 - RNA, 22 nt, Human
cuccuggcccugagcucccagg

SEQ ID NO: 634239 - RNA, 22 nt, Human
acuccgacucugagucuacauu

SEQ ID NO: 634240 - RNA, 22 nt, Human
agggaagugaaugacagauauc

SEQ ID NO: 634241 - RNA, 22 nt, Human
aagugugagacacacaaaauua

SEQ ID NO: 634242 - RNA, 22 nt, Human
acagagucugacagguaggcgc

SEQ ID NO: 634243 - RNA, 22 nt, Human
cagcaauaagguaagcuucucc

SEQ ID NO: 634244 - RNA, 22 nt, Human
ucuuugaugugguuaauuauga

SEQ ID NO: 634245 - RNA, 17 nt, Human
agcuucugcccuuucuu

SEQ ID NO: 634246 - RNA, 22 nt, Human
ucucagggagggcgagucagcg

SEQ ID NO: 634247 - RNA, 22 nt, Human
ccacugggcguuucuguccaau

SEQ ID NO: 634248 - RNA, 22 nt, Human
ucacaggaggaaccuggccugg

SEQ ID NO: 634249 - RNA, 22 nt, Human
ucucuuccaguggcuuugauuu

SEQ ID NO: 634250 - RNA, 20 nt, Human
cauuugaaucuccauucugc

SEQ ID NO: 634251 - RNA, 23 nt, Human
uggcuaaaggcucuaguccugcu

SEQ ID NO: 634252 - RNA, 22 nt, Human
uuccucagccagcacuuagggg

SEQ ID NO: 634253 - RNA, 22 nt, Human
cagcuucuguccuagaaacugg

SEQ ID NO: 634254 - RNA, 22 nt, Human
ggaggcuccuaagcugacuuga

SEQ ID NO: 634255 - RNA, 21 nt, Human
acugugggguucaacuggcag

SEQ ID NO: 634256 - RNA, 22 nt, Human
gcaaacaaggacauacauccug

SEQ ID NO: 634257 - RNA, 20 nt, Human
uucucuggauagccagaugu

SEQ ID NO: 634258 - RNA, 22 nt, Human
ugugaauaccuugaauucauca

SEQ ID NO: 634259 - RNA, 22 nt, Human
uggggagcacgguagggaaaug

SEQ ID NO: 634260 - RNA, 22 nt, Human
ggaagaggcugguagugcccgu

SEQ ID NO: 634261 - RNA, 22 nt, Human
agaaaauuagauuuuacugugu

SEQ ID NO: 634262 - RNA, 22 nt, Human
aauuagggagccaucauaaggu

SEQ ID NO: 634263 - RNA, 22 nt, Human
ggagguggagcuggaaguucca

SEQ ID NO: 634264 - RNA, 22 nt, Human
uagacaacuggagauagucuga

SEQ ID NO: 634265 - RNA, 22 nt, Human
acauagaguucaauuuucaguc

SEQ ID NO: 634266 - RNA, 22 nt, Human
gcucccuuaggccuugccggga

SEQ ID NO: 634267 - RNA, 22 nt, Human
aagccaggauaaaguuguuuua

SEQ ID NO: 634268 - RNA, 22 nt, Human
augugucuuggaguuuuaaugu

SEQ ID NO: 634269 - RNA, 20 nt, Human
aggggugaucgggugacacu

SEQ ID NO: 634270 - RNA, 22 nt, Human
uggcagccuucucugagaaggu

SEQ ID NO: 634271 - RNA, 22 nt, Human
uugcagggccuuggcuucuucc

SEQ ID NO: 634272 - RNA, 22 nt, Human
gguggcugcuuccucaagagga

SEQ ID NO: 634273 - RNA, 21 nt, Human
cuauuggaaaagaaaauauuu

SEQ ID NO: 634274 - RNA, 22 nt, Human
uacagagaugccgaagagugaa

SEQ ID NO: 634275 - RNA, 22 nt, Human
uccucaugccgggucucacgcu

SEQ ID NO: 634276 - RNA, 22 nt, Human
gccaagaguuuccagcugcaag

SEQ ID NO: 634277 - RNA, 22 nt, Human
gggcuacugagcuggaacuggg

SEQ ID NO: 634278 - RNA, 22 nt, Human
uuaugccuccgaaaccuggagu

SEQ ID NO: 634279 - RNA, 22 nt, Human
cuuuccuaguaguuacagaaug

SEQ ID NO: 634280 - RNA, 22 nt, Human
uggacaggcuccuagggguucc

SEQ ID NO: 634281 - RNA, 22 nt, Human
caggcugugaaacugagaugcg

SEQ ID NO: 634282 - RNA, 22 nt, Human
gagcaucuggcuagaggaguga

SEQ ID NO: 634283 - RNA, 22 nt, Human
agcccaggaaguugaggcuugc

SEQ ID NO: 634284 - RNA, 22 nt, Human
uugauucuaugagguaagcuau

SEQ ID NO: 634285 - RNA, 22 nt, Human
guccugugucccagagaaagag

SEQ ID NO: 634286 - RNA, 22 nt, Human
aucagaaauagucauguuacuu

SEQ ID NO: 634287 - RNA, 22 nt, Human
cccaguaccucuguucccugcu

SEQ ID NO: 634288 - RNA, 22 nt, Human
ugcagcugcucauucucucagu

SEQ ID NO: 634289 - RNA, 22 nt, Human
uguguuaaguauuugauacacu

SEQ ID NO: 634290 - RNA, 22 nt, Human
gcccacuuucugccagcucacc

SEQ ID NO: 634291 - RNA, 20 nt, Human
auuuguuucuacucucugac

SEQ ID NO: 634292 - RNA, 22 nt, Human
auucaucuaugacucuaaugug

SEQ ID NO: 634293 - RNA, 22 nt, Human
uaaaguguaugccaucucucau

SEQ ID NO: 634294 - RNA, 22 nt, Human
uucucugcucucacauacagaa

SEQ ID NO: 634295 - RNA, 22 nt, Human
gguuuucaguuugugagcucug

SEQ ID NO: 634296 - RNA, 22 nt, Human
gcagcuuugaagacuuauuugc

SEQ ID NO: 634297 - RNA, 22 nt, Human
ugacccugagagcugaauggcu

SEQ ID NO: 634298 - RNA, 22 nt, Human
uagguacuuaagaucucagcua

SEQ ID NO: 634299 - RNA, 21 nt, Human
cggagcugggcagggcauccc

SEQ ID NO: 634300 - RNA, 22 nt, Human
gccaccugcgggccguggugga

SEQ ID NO: 634301 - RNA, 22 nt, Human
caaggaggaagaugcaggggac

SEQ ID NO: 634302 - RNA, 22 nt, Human
ucacugcuauauuggauacuga

SEQ ID NO: 634303 - RNA, 22 nt, Human
aggacagcauaugggaaccagu

SEQ ID NO: 634304 - RNA, 22 nt, Human
acagccagaggugguccugggu

SEQ ID NO: 634305 - RNA, 22 nt, Human
auagaaacagaugcacuucucu

SEQ ID NO: 634306 - RNA, 22 nt, Human
agggagguccaucccugcagag

SEQ ID NO: 634307 - RNA, 22 nt, Human
ggcaggugaggcaugugccugg

SEQ ID NO: 634308 - RNA, 22 nt, Human
uggaguucucaggugagggcuu

SEQ ID NO: 634309 - RNA, 22 nt, Human
gugugccuuucacacacuggga

SEQ ID NO: 634310 - RNA, 22 nt, Human
uacacauuuugcggguacaugu

SEQ ID NO: 634311 - RNA, 22 nt, Human
uccagaggcuccaaagggagau

SEQ ID NO: 634312 - RNA, 22 nt, Human
cugcagagcuaggcugagugaa

SEQ ID NO: 634313 - RNA, 22 nt, Human
uagagcauuaugacaaccccau

SEQ ID NO: 634314 - RNA, 22 nt, Human
gaagcccuauccucuccuggga

SEQ ID NO: 634315 - RNA, 22 nt, Human
guguccugggcugguagagcug

SEQ ID NO: 634316 - RNA, 22 nt, Human
augaacaaaaacaaggccuguu

SEQ ID NO: 634317 - RNA, 22 nt, Human
cagcccugggaguuggggccga

SEQ ID NO: 634318 - RNA, 22 nt, Human
ugaucuuugggccauuaauaaa

SEQ ID NO: 634319 - RNA, 22 nt, Human
aucuuuacaguguaagugcaga

SEQ ID NO: 634320 - RNA, 22 nt, Human
cagaugcugcucaccugauuau

SEQ ID NO: 634321 - RNA, 22 nt, Human
uguaacaguaagccugugagcu

SEQ ID NO: 634322 - RNA, 17 nt, Human
agccagguacaagucca

SEQ ID NO: 634323 - RNA, 22 nt, Human
aguuuaauauccuucaacuuuc

SEQ ID NO: 634324 - RNA, 22 nt, Human
ucagaguuccucauagauccag

SEQ ID NO: 634325 - RNA, 21 nt, Human
aaugugugcuauuuaucuuuu

SEQ ID NO: 634326 - RNA, 22 nt, Human
uuuccucuuugugacacagcug

SEQ ID NO: 634327 - RNA, 22 nt, Human
gugcugacaggagccuggcggu

SEQ ID NO: 634328 - RNA, 22 nt, Human
gcuguacaaauuccacaagaga

SEQ ID NO: 634329 - RNA, 22 nt, Human
caugauacuugacauuugcgau

SEQ ID NO: 634330 - RNA, 22 nt, Human
uuuucaggccagaagauagacc

SEQ ID NO: 634331 - RNA, 22 nt, Human
ucccuugagaguuggccaauug

SEQ ID NO: 634332 - RNA, 22 nt, Human
cucugcccgugccuuucccagu

SEQ ID NO: 634333 - RNA, 22 nt, Human
agccacagagguugaugugguu

SEQ ID NO: 634334 - RNA, 22 nt, Human
gagucuucuacgcucacacaaa

SEQ ID NO: 634335 - RNA, 22 nt, Human
aaacugaggaacaaggaaggau

SEQ ID NO: 634336 - RNA, 22 nt, Human
acauugaacauggcaggacauu

SEQ ID NO: 634337 - RNA, 21 nt, Human
aaagauguuucaucugagaaa

SEQ ID NO: 634338 - RNA, 22 nt, Human
agcccucaggcuuugcugggcc

SEQ ID NO: 634339 - RNA, 22 nt, Human
agaaggaguguacaggucaugc

SEQ ID NO: 634340 - RNA, 22 nt, Human
aacagugucaggauuacagaua

SEQ ID NO: 634341 - RNA, 22 nt, Human
accuuuuuucagaacucuaaag

SEQ ID NO: 634342 - RNA, 22 nt, Human
aggcuggcauacauuuguucuu

SEQ ID NO: 634343 - RNA, 22 nt, Human
agagguauuagauuugcauagg

SEQ ID NO: 634344 - RNA, 22 nt, Human
uaagaaacuuaacugggaacua

SEQ ID NO: 634345 - RNA, 22 nt, Human
uacaaagauaaaaucucaccau

SEQ ID NO: 634346 - RNA, 22 nt, Human
cagaggccuucaauacucauuu

SEQ ID NO: 634347 - RNA, 22 nt, Human
ucaaaacaaucauuggaugugc

SEQ ID NO: 634348 - RNA, 22 nt, Human
cuauucugauuaccagauauug

SEQ ID NO: 634349 - RNA, 22 nt, Human
gcagaaccauaaauucagguaa

SEQ ID NO: 634350 - RNA, 22 nt, Human
aagaacaugggugugggcauuc

SEQ ID NO: 634351 - RNA, 22 nt, Human
gagguuucuuaucaagaaagcu

SEQ ID NO: 634352 - RNA, 22 nt, Human
aucucuggguccauagaagaga

SEQ ID NO: 634353 - RNA, 22 nt, Human
gugucaaugagguuuauuuuug

SEQ ID NO: 634354 - RNA, 22 nt, Human
aucuggagaauaaauguccaag

SEQ ID NO: 634355 - RNA, 22 nt, Human
ggccaauuccaggagccggcgg

SEQ ID NO: 634356 - RNA, 22 nt, Human
ucuuuggaguguuaucaguaau

SEQ ID NO: 634357 - RNA, 22 nt, Human
uacuuugguugaauauguaaug

SEQ ID NO: 634358 - RNA, 22 nt, Human
cuuccugguuugaagcucgccg

SEQ ID NO: 634359 - RNA, 22 nt, Human
uauagacaagcguaacaagaag

SEQ ID NO: 634360 - RNA, 22 nt, Human
auggccagccacuccugauggc

SEQ ID NO: 634361 - RNA, 22 nt, Human
ucagaagguggagguugcagug

SEQ ID NO: 634362 - RNA, 22 nt, Human
aaaaguuauugaugcaggacaa

SEQ ID NO: 634363 - RNA, 22 nt, Human
gucuguggucccugcuggggac

SEQ ID NO: 634364 - RNA, 22 nt, Human
uggugggcugagucucaucgga

SEQ ID NO: 634365 - RNA, 22 nt, Human
aauagacaauucuagccaacau

SEQ ID NO: 634366 - RNA, 22 nt, Human
gauuauauaauggaagcucuug

SEQ ID NO: 634367 - RNA, 22 nt, Human
ugagagaugaaguuaguuguuc

SEQ ID NO: 634368 - RNA, 22 nt, Human
ggucccagaauugguuagcaca

SEQ ID NO: 634369 - RNA, 19 nt, Human
gcauuucaggcauguuugc

SEQ ID NO: 634370 - RNA, 22 nt, Human
agccucugggggagcugggagc

SEQ ID NO: 634371 - RNA, 22 nt, Human
ccugcagaagaguccagcucau

SEQ ID NO: 634372 - RNA, 22 nt, Human
uggcccugggcaucuuucguga

SEQ ID NO: 634373 - RNA, 22 nt, Human
ggcugcugguagggguaggaag

SEQ ID NO: 634374 - RNA, 19 nt, Human
agccacagaacuugcagga

SEQ ID NO: 634375 - RNA, 19 nt, Human
accuuuccuuucucagaug

SEQ ID NO: 634376 - RNA, 22 nt, Human
agaauugcuaacucuccuccug

SEQ ID NO: 634377 - RNA, 23 nt, Human
acagccaguucaccucuccuugg

SEQ ID NO: 634378 - RNA, 21 nt, Human
acuuugggaggugugaggggc

SEQ ID NO: 634379 - RNA, 22 nt, Human
ucccagaagagaugccacuuga

SEQ ID NO: 634380 - RNA, 22 nt, Human
ccaugggaauugggagguccca

SEQ ID NO: 634381 - RNA, 22 nt, Human
ugggccagggcacccaguccag

SEQ ID NO: 634382 - RNA, 20 nt, Human
ggccacagggugcuggugga

SEQ ID NO: 634383 - RNA, 23 nt, Human
acagagaucuugacuuguaugga

SEQ ID NO: 634384 - RNA, 22 nt, Human
guuauaaaugacugcaaaaguu

SEQ ID NO: 634385 - RNA, 22 nt, Human
aggcccuggcuggguuucuuua

SEQ ID NO: 634386 - RNA, 22 nt, Human
gugcaauagacugugguauuaa

SEQ ID NO: 634387 - RNA, 22 nt, Human
uuauaaagauccuuccagaguu

SEQ ID NO: 634388 - RNA, 22 nt, Human
ggaagagccuggggugucaggc

SEQ ID NO: 634389 - RNA, 22 nt, Human
uaaggguucagaaugcaguggu

SEQ ID NO: 634390 - RNA, 22 nt, Human
gcccuggaugcucauggcauca

SEQ ID NO: 634391 - RNA, 22 nt, Human
ucugcucuaguugcuuccugcc

SEQ ID NO: 634392 - RNA, 22 nt, Human
aggccuugccaaugagagaacu

SEQ ID NO: 634393 - RNA, 22 nt, Human
cugaaauuauuguuuaaucaaa

SEQ ID NO: 634394 - RNA, 22 nt, Human
augugggccgugcggguguccu

SEQ ID NO: 634395 - RNA, 22 nt, Human
cccuccuggaggcggaugccca

SEQ ID NO: 634396 - RNA, 22 nt, Human
ugaaagcacaaguucuaacagg

SEQ ID NO: 634397 - RNA, 22 nt, Human
aagaaaacaaugacuugccagc

SEQ ID NO: 634398 - RNA, 22 nt, Human
ugaaauggcaaggcagagcuuu

SEQ ID NO: 634399 - RNA, 20 nt, Human
aggaggcaauguagauaagc

SEQ ID NO: 634400 - RNA, 22 nt, Human
gcugcaggcuguggcaggggag

SEQ ID NO: 634401 - RNA, 22 nt, Human
auuugguuacucaguugucuga

SEQ ID NO: 634402 - RNA, 19 nt, Human
cacagaugauugacacaua

SEQ ID NO: 634403 - RNA, 22 nt, Human
agcuagcuuagccugugaggua

SEQ ID NO: 634404 - RNA, 22 nt, Human
uuaaguacaggguuagugacgg

SEQ ID NO: 634405 - RNA, 22 nt, Human
auuuggaacaaauauuaguaaa

SEQ ID NO: 634406 - RNA, 22 nt, Human
gcugugggugcuggcuccaccc

SEQ ID NO: 634407 - RNA, 22 nt, Human
ggcaaagcccugccugguucaa

SEQ ID NO: 634408 - RNA, 22 nt, Human
gacuccccugggccccauccag

SEQ ID NO: 634409 - RNA, 22 nt, Human
aauaagccagcccaugugaccc

SEQ ID NO: 634410 - RNA, 22 nt, Human
acuuucucaaaucagacuuuaa

SEQ ID NO: 634411 - RNA, 19 nt, Human
agaggcaaggguggaagua

SEQ ID NO: 634412 - RNA, 22 nt, Human
cccauucauccucgcuuccuuc

SEQ ID NO: 634413 - RNA, 22 nt, Human
gcagcauugcacuuuuguucuu

SEQ ID NO: 634414 - RNA, 22 nt, Human
cccacugaggguuaaugccugc

SEQ ID NO: 634415 - RNA, 22 nt, Human
caucacaccacaggcauuuucu

SEQ ID NO: 634416 - RNA, 22 nt, Human
ccggcgggcagcggcagugagc

SEQ ID NO: 634417 - RNA, 22 nt, Human
cugcuucauagcccuggucucu

SEQ ID NO: 634418 - RNA, 22 nt, Human
acacuuguguugaaagcuguua

SEQ ID NO: 634419 - RNA, 22 nt, Human
auacaugcacauuuuuauacau

SEQ ID NO: 634420 - RNA, 21 nt, Human
uuucuaagugcuugguuuggg

SEQ ID NO: 634421 - RNA, 22 nt, Human
acccugggaacuggaaacugga

SEQ ID NO: 634422 - RNA, 22 nt, Human
uggcuucaaaaucuaguggucu

SEQ ID NO: 634423 - RNA, 22 nt, Human
gugcagagaaggagcaguaguu

SEQ ID NO: 634424 - RNA, 22 nt, Human
guguguggggccuucggguccu

SEQ ID NO: 634425 - RNA, 22 nt, Human
cacagauaccuagugaaacaua

SEQ ID NO: 634426 - RNA, 22 nt, Human
cucugagaagaguucaaguaaa

SEQ ID NO: 634427 - RNA, 22 nt, Human
ccuuuggucuugaugaacuguu

SEQ ID NO: 634428 - RNA, 22 nt, Human
ucugaggcauacccaggccccc

SEQ ID NO: 634429 - RNA, 22 nt, Human
ucccugaggaagggguguggug

SEQ ID NO: 634430 - RNA, 22 nt, Human
auguuucagauacagaucaaau

SEQ ID NO: 634431 - RNA, 22 nt, Human
ucagccaguuuguuuauuccgg

SEQ ID NO: 634432 - RNA, 23 nt, Human
uugcacauuggagcuggucuucu

SEQ ID NO: 634433 - RNA, 22 nt, Human
cuuggggcagcccaggcugagc

SEQ ID NO: 634434 - RNA, 22 nt, Human
gcugaagcugacacauagugcu

SEQ ID NO: 634435 - RNA, 22 nt, Human
uaccauuugagagagaacauaa

SEQ ID NO: 634436 - RNA, 22 nt, Human
uauuacacagugaaagcaugga

SEQ ID NO: 634437 - RNA, 22 nt, Human
ucaucagcucaucugcuccuag

SEQ ID NO: 634438 - RNA, 22 nt, Human
ugccuggccagacccuauagag

SEQ ID NO: 634439 - RNA, 22 nt, Human
ugguuuacucuguaaaccagga

SEQ ID NO: 634440 - RNA, 22 nt, Human
augcugagauaaggcuuuaguc

SEQ ID NO: 634441 - RNA, 22 nt, Human
aguuuucuucauuuuguggcca

SEQ ID NO: 634442 - RNA, 22 nt, Human
uguuuuuguucaaugcuagguc

SEQ ID NO: 634443 - RNA, 22 nt, Human
cucucuuuuucgugugccgaag

SEQ ID NO: 634444 - RNA, 22 nt, Human
caguggcauacuuggcugauau

SEQ ID NO: 634445 - RNA, 22 nt, Human
aauugauggacagagaugaaga

SEQ ID NO: 634446 - RNA, 22 nt, Human
uccgggcaacugaagggagguu

SEQ ID NO: 634447 - RNA, 22 nt, Human
ucucaggaaauaggauuugagu

SEQ ID NO: 634448 - RNA, 22 nt, Human
uucugcuuuuauugccagaguu

SEQ ID NO: 634449 - RNA, 22 nt, Human
auguuuaaaggguugagaaaua

SEQ ID NO: 634450 - RNA, 22 nt, Human
gucucagaguccuacuuauucc

SEQ ID NO: 634451 - RNA, 22 nt, Human
ucugccucgcuaacagcagcca

SEQ ID NO: 634452 - RNA, 22 nt, Human
cuguguccugucuccuaaggug

SEQ ID NO: 634453 - RNA, 22 nt, Human
gcugcagggagcuggaaggcuc

SEQ ID NO: 634454 - RNA, 22 nt, Human
uaauagaaagguauuuuuugca

SEQ ID NO: 634455 - RNA, 22 nt, Human
cugcuggggucagagcacuggg

SEQ ID NO: 634456 - RNA, 22 nt, Human
cauggaaggcaaaagacacaga

SEQ ID NO: 634457 - RNA, 18 nt, Human
aggcuugggcccagcagc

SEQ ID NO: 634458 - RNA, 22 nt, Human
gcacugaaaauguuggauucca

SEQ ID NO: 634459 - RNA, 22 nt, Human
ugaucagucccaugaucuucca

SEQ ID NO: 634460 - RNA, 22 nt, Human
caccagcuacucggguuuccug

SEQ ID NO: 634461 - RNA, 22 nt, Human
caauguuuuuccuuccuuaaua

SEQ ID NO: 634462 - RNA, 22 nt, Human
gcagaggcuguagggaagguug

SEQ ID NO: 634463 - RNA, 22 nt, Human
gaagaucugcagccucaggcga

SEQ ID NO: 634464 - RNA, 22 nt, Human
auguguaggugaaucgaggcug

SEQ ID NO: 634465 - RNA, 22 nt, Human
uucuuuucuuuaggcauugugu

SEQ ID NO: 634466 - RNA, 22 nt, Human
aguuuaauccuccagcccaacu

SEQ ID NO: 634467 - RNA, 22 nt, Human
aucaggauguuuggcugucaua

SEQ ID NO: 634468 - RNA, 22 nt, Human
aaggaacacuacaaggcuggga

SEQ ID NO: 634469 - RNA, 22 nt, Human
uguggagguuuaaguaauggga

SEQ ID NO: 634470 - RNA, 22 nt, Human
ccauccuaucugaccuacuugu

SEQ ID NO: 634471 - RNA, 22 nt, Human
cuagggcacuaggacucaugug

SEQ ID NO: 634472 - RNA, 20 nt, Human
aagagucuuuacugagcuaa

SEQ ID NO: 634473 - RNA, 22 nt, Human
auugaaagauuuugggcucaug

SEQ ID NO: 634474 - RNA, 22 nt, Human
uccucaguggggcauucauuau

SEQ ID NO: 634475 - RNA, 22 nt, Human
acagcaggcccauacuggaagg

SEQ ID NO: 634476 - RNA, 22 nt, Human
gcacagugauaggcaguugugc

SEQ ID NO: 634477 - RNA, 22 nt, Human
gggcucagacaucccuccugga

SEQ ID NO: 634478 - RNA, 22 nt, Human
auauauacaacuagauuaaaag

SEQ ID NO: 634479 - RNA, 22 nt, Human
ugccaaggguaugggcaagaua

SEQ ID NO: 634480 - RNA, 22 nt, Human
agcaaggaguagaacaagagug

SEQ ID NO: 634481 - RNA, 22 nt, Human
uauguuucaucaggcauggagu

SEQ ID NO: 634482 - RNA, 22 nt, Human
aucucugguuguuuugcuccca

SEQ ID NO: 634483 - RNA, 22 nt, Human
gcaggcuccaacuggaggaguu

SEQ ID NO: 634484 - RNA, 22 nt, Human
aaaugcaaggauuuuguuaggc

SEQ ID NO: 634485 - RNA, 22 nt, Human
gugugcaguagagaaagagcag

SEQ ID NO: 634486 - RNA, 22 nt, Human
acaguguuccuuuguugugacu

SEQ ID NO: 634487 - RNA, 23 nt, Human
acagcaagaggaccagaugugag

SEQ ID NO: 634488 - RNA, 22 nt, Human
uccuucagcuuguuagagugac

SEQ ID NO: 634489 - RNA, 22 nt, Human
agcagacauaucucaugucaca

SEQ ID NO: 634490 - RNA, 22 nt, Human
gggaacagggccugagcugggg

SEQ ID NO: 634491 - RNA, 22 nt, Human
acaaauguggacauggauaaug

SEQ ID NO: 634492 - RNA, 22 nt, Human
caggcagaggaggccuucuccu

SEQ ID NO: 634493 - RNA, 22 nt, Human
gcaaagacccaggugucuaucc

SEQ ID NO: 634494 - RNA, 22 nt, Human
aucuucaguuuucagugagcca

SEQ ID NO: 634495 - RNA, 21 nt, Human
cacaggugggucagugaggcc

SEQ ID NO: 634496 - RNA, 16 nt, Human
gccuggaguggcaggg

SEQ ID NO: 634497 - RNA, 22 nt, Human
ucucucuccuaguuuuuagugg

SEQ ID NO: 634498 - RNA, 22 nt, Human
ccagagccucgcccggagccuc

SEQ ID NO: 634499 - RNA, 22 nt, Human
acucugcucuuauaguguuaua

SEQ ID NO: 634500 - RNA, 22 nt, Human
ugcaggaaaaccaacacgccuu

SEQ ID NO: 634501 - RNA, 22 nt, Human
uaaggccagcaugaaugcagca

SEQ ID NO: 634502 - RNA, 22 nt, Human
uaugucuucgucaccuaucuca

SEQ ID NO: 634503 - RNA, 22 nt, Human
accacuguaucuccagcacauu

SEQ ID NO: 634504 - RNA, 22 nt, Human
caauagugucugcuuguuucua

SEQ ID NO: 634505 - RNA, 22 nt, Human
cauauuuauucuucugccagug

SEQ ID NO: 634506 - RNA, 22 nt, Human
uccucccuucucacugggaagg

SEQ ID NO: 634507 - RNA, 19 nt, Human
uccaccccagccagcucug

SEQ ID NO: 634508 - RNA, 22 nt, Human
ugagcagagcaauaggacucuc

SEQ ID NO: 634509 - RNA, 22 nt, Human
ugcagcccuuccuuccucuggg

SEQ ID NO: 634510 - RNA, 23 nt, Human
uuuaugcagcauguagaacaugg

SEQ ID NO: 634511 - RNA, 22 nt, Human
aacauucuacuguacugcauug

SEQ ID NO: 634512 - RNA, 19 nt, Human
uuugagaaguuauuaucua

SEQ ID NO: 634513 - RNA, 22 nt, Human
auuugugggacuauaaugcagg

SEQ ID NO: 634514 - RNA, 22 nt, Human
ggagaauucuuuauuagcuuuu

SEQ ID NO: 634515 - RNA, 22 nt, Human
cauggauauauuguacaguagc

SEQ ID NO: 634516 - RNA, 22 nt, Human
uuguagcauuuuaaaugagcau

SEQ ID NO: 634517 - RNA, 19 nt, Human
cccucaggucugagcaguc

SEQ ID NO: 634518 - RNA, 22 nt, Human
acauuguaguuguucugcagca

SEQ ID NO: 634519 - RNA, 22 nt, Human
ucagcuggugaguggauagaca

SEQ ID NO: 634520 - RNA, 22 nt, Human
acauuugggacccucucuucac

SEQ ID NO: 634521 - RNA, 22 nt, Human
acccaggaggcagagguugcag

SEQ ID NO: 634522 - RNA, 22 nt, Human
uucugggaggccuuugugucug

SEQ ID NO: 634523 - RNA, 22 nt, Human
agaaagggcuauuuugagguag

SEQ ID NO: 634524 - RNA, 22 nt, Human
ccaugcucuggggaggucaagc

SEQ ID NO: 634525 - RNA, 22 nt, Human
agcucccaauugacuugaacua

SEQ ID NO: 634526 - RNA, 22 nt, Human
gagcuggugaucagcuggagga

SEQ ID NO: 634527 - RNA, 22 nt, Human
gaggggcagagguagagaacaa

SEQ ID NO: 634528 - RNA, 22 nt, Human
ugcacacauuaaggauacacag

SEQ ID NO: 634529 - RNA, 22 nt, Human
uggaacuucaugagauuaugga

SEQ ID NO: 634530 - RNA, 22 nt, Human
gagguucgauacagcguauuua

SEQ ID NO: 634531 - RNA, 22 nt, Human
gcacagaacccuaucuuucgga

SEQ ID NO: 634532 - RNA, 22 nt, Human
ccauccaugcgccagacagauu

SEQ ID NO: 634533 - RNA, 22 nt, Human
cuagugaaauuugcaaguaauu

SEQ ID NO: 634534 - RNA, 22 nt, Human
ugcacagaauaauauauguucu

SEQ ID NO: 634535 - RNA, 22 nt, Human
agcuuacugggcaguaaagauu

SEQ ID NO: 634536 - RNA, 22 nt, Human
auccaggcugcuaugaggauga

SEQ ID NO: 634537 - RNA, 22 nt, Human
aguggucuccccaguagaauaa

SEQ ID NO: 634538 - RNA, 22 nt, Human
cacagcauuaacugggacagcu

SEQ ID NO: 634539 - RNA, 22 nt, Human
aaaaguaauugcaguuuuguca

SEQ ID NO: 634540 - RNA, 22 nt, Human
cuccagucauagccucuugagu

SEQ ID NO: 634541 - RNA, 22 nt, Human
guguguguucaauaaauuuaag

SEQ ID NO: 634542 - RNA, 22 nt, Human
ggccgggcaggucucagccagc

SEQ ID NO: 634543 - RNA, 22 nt, Human
gcuugcaagauagguuacuuaa

SEQ ID NO: 634544 - RNA, 22 nt, Human
auguuuaauuaucuggguuuug

SEQ ID NO: 634545 - RNA, 22 nt, Human
gggagggacacaaagaguuccc

SEQ ID NO: 634546 - RNA, 22 nt, Human
cuggaaggucuguccccacugc

SEQ ID NO: 634547 - RNA, 22 nt, Human
ggccaggugcgguggcucacac

SEQ ID NO: 634548 - RNA, 22 nt, Human
acaugacuauaauuacuuaaau

SEQ ID NO: 634549 - RNA, 21 nt, Human
aagaggaagcauuauggcaua

SEQ ID NO: 634550 - RNA, 22 nt, Human
ugucagcagaucuccugcagcc

SEQ ID NO: 634551 - RNA, 22 nt, Human
cccagagccgguggugcucaca

SEQ ID NO: 634552 - RNA, 21 nt, Human
guccuucauuaucaagucaaa

SEQ ID NO: 634553 - RNA, 22 nt, Human
ggcuucaggggcccagucagca

SEQ ID NO: 634554 - RNA, 22 nt, Human
cagaggccuggcuuggacaccu

SEQ ID NO: 634555 - RNA, 22 nt, Human
cccucucugacuucugaacuug

SEQ ID NO: 634556 - RNA, 22 nt, Human
cucagaggguugaaggugcucu

SEQ ID NO: 634557 - RNA, 22 nt, Human
uucuaacuaauuggaaauggaa

SEQ ID NO: 634558 - RNA, 22 nt, Human
uuguaugcuguaggcaugcauu

SEQ ID NO: 634559 - RNA, 22 nt, Human
gcugugcaaaucgauuuguugg

SEQ ID NO: 634560 - RNA, 22 nt, Human
ggugaagggccuuaggagacag

SEQ ID NO: 634561 - RNA, 22 nt, Human
ggcucuggaaaguguccuugau

SEQ ID NO: 634562 - RNA, 22 nt, Human
cccacagaaugccaaugagacc

SEQ ID NO: 634563 - RNA, 22 nt, Human
uaugaaggauacaccucugauu

SEQ ID NO: 634564 - RNA, 20 nt, Human
agagccuggaaaaagacauc

SEQ ID NO: 634565 - RNA, 22 nt, Human
gacagaaucaucuccugggacu

SEQ ID NO: 634566 - RNA, 22 nt, Human
uuuacaguuccaugugauaggc

SEQ ID NO: 634567 - RNA, 23 nt, Human
gccuggagaaaagcugcaguuca

SEQ ID NO: 634568 - RNA, 22 nt, Human
ugacagugagcuugggguacuu

SEQ ID NO: 634569 - RNA, 22 nt, Human
ggaaggagccauaucauaucca

SEQ ID NO: 634570 - RNA, 21 nt, Human
ucuuggccuaaguucacugaa

SEQ ID NO: 634571 - RNA, 22 nt, Human
cacuaggcaucugugaggguag

SEQ ID NO: 634572 - RNA, 22 nt, Human
ugcagcugaccagcaaguccug

SEQ ID NO: 634573 - RNA, 22 nt, Human
uguggccuccuguuccugggua

SEQ ID NO: 634574 - RNA, 22 nt, Human
cagcccugcugguuuugggcaa

SEQ ID NO: 634575 - RNA, 22 nt, Human
augcacccagugucuggacuau

SEQ ID NO: 634576 - RNA, 22 nt, Human
uuuucaugucauguccuugagg

SEQ ID NO: 634577 - RNA, 22 nt, Human
ggccagcuguggggccgagccu

SEQ ID NO: 634578 - RNA, 22 nt, Human
uccucugcucagcauuccucac

SEQ ID NO: 634579 - RNA, 22 nt, Human
cugucugucaaguucaucucca

SEQ ID NO: 634580 - RNA, 22 nt, Human
acagagcaauaacagggagagg

SEQ ID NO: 634581 - RNA, 22 nt, Human
uggcagcuguguccagguagaa

SEQ ID NO: 634582 - RNA, 22 nt, Human
ucccugaugccuugauccgugg

SEQ ID NO: 634583 - RNA, 22 nt, Human
agugggcugguggcagggagaa

SEQ ID NO: 634584 - RNA, 22 nt, Human
acucaggaauggggcugggacu

SEQ ID NO: 634585 - RNA, 22 nt, Human
ucaguuuuuaaaugauauaauu

SEQ ID NO: 634586 - RNA, 23 nt, Human
ggacuaggcaacagaugggacag

SEQ ID NO: 634587 - RNA, 22 nt, Human
aauggcagaaugggccagaagc

SEQ ID NO: 634588 - RNA, 22 nt, Human
uguggcugggcuaauaggcaaa

SEQ ID NO: 634589 - RNA, 22 nt, Human
ggcuccacccugcuuccagaag

SEQ ID NO: 634590 - RNA, 22 nt, Human
ugcuaucaccaacucugcuaag

SEQ ID NO: 634591 - RNA, 22 nt, Human
aggcagaggaaggguggauuug

SEQ ID NO: 634592 - RNA, 22 nt, Human
acauugaacaguacaaaugauc

SEQ ID NO: 634593 - RNA, 22 nt, Human
uggacaggauagugcaguacgc

SEQ ID NO: 634594 - RNA, 19 nt, Human
cuugcugggugguuucugc

SEQ ID NO: 634595 - RNA, 22 nt, Human
cagaagccuaaauagugcacca

SEQ ID NO: 634596 - RNA, 22 nt, Human
uacaacaguucaugaaaugaaa

SEQ ID NO: 634597 - RNA, 16 nt, Human
agcagggcgggaagga

SEQ ID NO: 634598 - RNA, 21 nt, Human
agcugcuguggccagaaucca

SEQ ID NO: 634599 - RNA, 22 nt, Human
aguucucauugcaugagacaga

SEQ ID NO: 634600 - RNA, 22 nt, Human
ugucuggcauaguugcucccug

SEQ ID NO: 634601 - RNA, 22 nt, Human
uacagguagagucucuaguuua

SEQ ID NO: 634602 - RNA, 22 nt, Human
ccugucuguucugacuggucag

SEQ ID NO: 634603 - RNA, 22 nt, Human
aaaugucuguaugagaaagaga

SEQ ID NO: 634604 - RNA, 18 nt, Human
aaugcacacauuuacucc

SEQ ID NO: 634605 - RNA, 22 nt, Human
ugggauauaccuauccuagaag

SEQ ID NO: 634606 - RNA, 22 nt, Human
aggcucagugauguaaaauaua

SEQ ID NO: 634607 - RNA, 22 nt, Human
gcacugugcuaaacauguauca

SEQ ID NO: 634608 - RNA, 19 nt, Human
cagaccuguccagccugug

SEQ ID NO: 634609 - RNA, 22 nt, Human
gccuucaggugucccugugggc

SEQ ID NO: 634610 - RNA, 22 nt, Human
agagcaccccgggaagagcaag

SEQ ID NO: 634611 - RNA, 21 nt, Human
ucagcaggcaccagaaggcug

SEQ ID NO: 634612 - RNA, 22 nt, Human
agcugccccucauuuucaccac

SEQ ID NO: 634613 - RNA, 22 nt, Human
caaaugauccuugcaagcugug

SEQ ID NO: 634614 - RNA, 22 nt, Human
agcgggcagaaguggggucugc

SEQ ID NO: 634615 - RNA, 22 nt, Human
uugaaaugagcaaacugucagc

SEQ ID NO: 634616 - RNA, 22 nt, Human
guuuaaagucuuggaaggagga

SEQ ID NO: 634617 - RNA, 22 nt, Human
aaauacuguugaaugaaguaag

SEQ ID NO: 634618 - RNA, 22 nt, Human
uuggagagaggcugcucaggcu

SEQ ID NO: 634619 - RNA, 22 nt, Human
guggcagauugcucaccauggu

SEQ ID NO: 634620 - RNA, 22 nt, Human
cagcaggucccacugagggccc

SEQ ID NO: 634621 - RNA, 22 nt, Human
cugggcucugcaguugauguuu

SEQ ID NO: 634622 - RNA, 22 nt, Human
ucccugccaaugauuggagcaa

SEQ ID NO: 634623 - RNA, 22 nt, Human
uccagagagccacggacagggg

SEQ ID NO: 634624 - RNA, 17 nt, Human
aguguguaacuugugua

SEQ ID NO: 634625 - RNA, 22 nt, Human
cacuggcugggccagcacuccu

SEQ ID NO: 634626 - RNA, 22 nt, Human
agucaggagcugcugcauugua

SEQ ID NO: 634627 - RNA, 22 nt, Human
uucagcaaaauaucucagauag

SEQ ID NO: 634628 - RNA, 22 nt, Human
uggcugccuagugucugagcag

SEQ ID NO: 634629 - RNA, 22 nt, Human
aagugagugaaaaugcagaaua

SEQ ID NO: 634630 - RNA, 22 nt, Human
cuggaggagagucugaaugaca

SEQ ID NO: 634631 - RNA, 22 nt, Human
ucuuuucuucuuaaugguuaau

SEQ ID NO: 634632 - RNA, 22 nt, Human
ucuguuauacagucuguggcac

SEQ ID NO: 634633 - RNA, 22 nt, Human
gggcugagcuguucugaguuua

SEQ ID NO: 634634 - RNA, 22 nt, Human
gucaggaugacaagugcuuuca

SEQ ID NO: 634635 - RNA, 22 nt, Human
uggaaaaacugagacuuagaca

SEQ ID NO: 634636 - RNA, 22 nt, Human
ggcgccgcacucggugcagccg

SEQ ID NO: 634637 - RNA, 22 nt, Human
auguaugagagauucuuuuauu

SEQ ID NO: 634638 - RNA, 22 nt, Human
ugaggcagccugcauuaaagag

SEQ ID NO: 634639 - RNA, 22 nt, Human
gggaguguugagcgcccugcca

SEQ ID NO: 634640 - RNA, 22 nt, Human
uuacuugauagggggauggggu

SEQ ID NO: 634641 - RNA, 22 nt, Human
aaauaucauuuauaacuuuuaa

SEQ ID NO: 634642 - RNA, 22 nt, Human
ucaggaggccugaguagcucua

SEQ ID NO: 634643 - RNA, 22 nt, Human
ugugcuucagguugucgccacg

SEQ ID NO: 634644 - RNA, 22 nt, Human
ugugcucugaagagugcauguc

SEQ ID NO: 634645 - RNA, 22 nt, Human
uuugcugacuggaugcaguugg

SEQ ID NO: 634646 - RNA, 22 nt, Human
cuggcucaauaaauauuagcug

SEQ ID NO: 634647 - RNA, 17 nt, Human
uuccuccucaccauguu

SEQ ID NO: 634648 - RNA, 22 nt, Human
acuguuaugauuuacacagucc

SEQ ID NO: 634649 - RNA, 22 nt, Human
aaauuuuaaggcuggaacuuaa

SEQ ID NO: 634650 - RNA, 22 nt, Human
aagcacagcagagccuugcuug

SEQ ID NO: 634651 - RNA, 22 nt, Human
aaugcauaaugguuugugacaa

SEQ ID NO: 634652 - RNA, 22 nt, Human
agccuggguggggguucggaga

SEQ ID NO: 634653 - RNA, 22 nt, Human
aagaauggugguggggccagca

SEQ ID NO: 634654 - RNA, 20 nt, Human
gucaucgccggcagcaaaga

SEQ ID NO: 634655 - RNA, 22 nt, Human
cacagcuagauggauagauaga

SEQ ID NO: 634656 - RNA, 22 nt, Human
acuuccuggcugggugaccugg

SEQ ID NO: 634657 - RNA, 22 nt, Human
auuguuucugcuuuauuuaggg

SEQ ID NO: 634658 - RNA, 22 nt, Human
acagaaggacuugagaaagaca

SEQ ID NO: 634659 - RNA, 22 nt, Human
uagaggcauuaaugaauaaaca

SEQ ID NO: 634660 - RNA, 23 nt, Human
gggaccugguaggaggugauugg

SEQ ID NO: 634661 - RNA, 22 nt, Human
guacaugugcacaacaugcaug

SEQ ID NO: 634662 - RNA, 23 nt, Human
gccugugccuaugcccagcucug

SEQ ID NO: 634663 - RNA, 22 nt, Human
agucagaggaaugggccaggcu

SEQ ID NO: 634664 - RNA, 22 nt, Human
uaaaugccauucguuucauaca

SEQ ID NO: 634665 - RNA, 22 nt, Human
ucuuuugagggccagaggaaga

SEQ ID NO: 634666 - RNA, 22 nt, Human
ucuaccacuuugaccucucugu

SEQ ID NO: 634667 - RNA, 22 nt, Human
gcuuacaagaucgugcuccagu

SEQ ID NO: 634668 - RNA, 22 nt, Human
cauuccagagcugccucugcua

SEQ ID NO: 634669 - RNA, 22 nt, Human
cacaacuuuaggaaccacauuc

SEQ ID NO: 634670 - RNA, 21 nt, Human
guauucuuuaugaagugaaaa

SEQ ID NO: 634671 - RNA, 21 nt, Human
gcaggcuggucaaaccucagu

SEQ ID NO: 634672 - RNA, 22 nt, Human
agaaccuuucuuuagaaauuca

SEQ ID NO: 634673 - RNA, 21 nt, Human
uuugaauagaaauagugcuua

SEQ ID NO: 634674 - RNA, 22 nt, Human
agagucagcuuaugacacaguc

SEQ ID NO: 634675 - RNA, 22 nt, Human
uuagcauuucauuucaagagga

SEQ ID NO: 634676 - RNA, 22 nt, Human
aggcuccacggcaggaugcugu

SEQ ID NO: 634677 - RNA, 22 nt, Human
ggucagggcuggguaugaagag

SEQ ID NO: 634678 - RNA, 22 nt, Human
auugauuucugcuuacucacug

SEQ ID NO: 634679 - RNA, 22 nt, Human
ucauccaugugcaaacuuuggu

SEQ ID NO: 634680 - RNA, 22 nt, Human
ugacuucucuggccuggugcag

SEQ ID NO: 634681 - RNA, 22 nt, Human
gaggcucccaaggggcuaggcc

SEQ ID NO: 634682 - RNA, 20 nt, Human
ucuguacacucaucuucugc

SEQ ID NO: 634683 - RNA, 22 nt, Human
uucuucaugcuguugcugcuug

SEQ ID NO: 634684 - RNA, 22 nt, Human
agaaucauuauauuuauuaagc

SEQ ID NO: 634685 - RNA, 22 nt, Human
guuaacacaugcaauugcacuu

SEQ ID NO: 634686 - RNA, 22 nt, Human
uggaggccgaauuagagcguug

SEQ ID NO: 634687 - RNA, 22 nt, Human
cucugcccagugcccacaggag

SEQ ID NO: 634688 - RNA, 22 nt, Human
acuuccagaggguguggaaaua

SEQ ID NO: 634689 - RNA, 22 nt, Human
cccuuccuccucgccugucaga

SEQ ID NO: 634690 - RNA, 22 nt, Human
ggcagauggagaagcagcaggu

SEQ ID NO: 634691 - RNA, 22 nt, Human
ugugucuggauagguaauggau

SEQ ID NO: 634692 - RNA, 22 nt, Human
uggaaugccgggccaggcuccg

SEQ ID NO: 634693 - RNA, 22 nt, Human
ggggcugggauuugaacccagg

SEQ ID NO: 634694 - RNA, 17 nt, Human
uccuuggcaaccaguuc

SEQ ID NO: 634695 - RNA, 22 nt, Human
gucuaaacuuuacagagucaag

SEQ ID NO: 634696 - RNA, 22 nt, Human
uuuuuaagcuccuuugauguca

SEQ ID NO: 634697 - RNA, 22 nt, Human
uuauauauauguagaggucacg

SEQ ID NO: 634698 - RNA, 22 nt, Human
aaggccuucucuugugucugug

SEQ ID NO: 634699 - RNA, 22 nt, Human
uaacagcaguccucuucucaug

SEQ ID NO: 634700 - RNA, 22 nt, Human
caugaggugauaaagcugggau

SEQ ID NO: 634701 - RNA, 22 nt, Human
uuucuaguauauaacuagaucu

SEQ ID NO: 634702 - RNA, 22 nt, Human
ggcagcauauauucagugggca

SEQ ID NO: 634703 - RNA, 22 nt, Human
uucucugcagcuccuggcuggg

SEQ ID NO: 634704 - RNA, 22 nt, Human
gcaggcaggaaggacuaaguaa

SEQ ID NO: 634705 - RNA, 22 nt, Human
agcaggugguaggcagucagca

SEQ ID NO: 634706 - RNA, 22 nt, Human
uacuuucuuguuccuuucauaa

SEQ ID NO: 634707 - RNA, 22 nt, Human
cuggguggagccuggucaucug

SEQ ID NO: 634708 - RNA, 22 nt, Human
cagacggguggucugcgaggcc

SEQ ID NO: 634709 - RNA, 22 nt, Human
guggcugcagagccagcaagcu

SEQ ID NO: 634710 - RNA, 22 nt, Human
ucagagcugcccaugcaagggg

SEQ ID NO: 634711 - RNA, 20 nt, Human
uuuauagugaucaauuuaua

SEQ ID NO: 634712 - RNA, 22 nt, Human
ccuuuacacguaaggcuguuga

SEQ ID NO: 634713 - RNA, 22 nt, Human
agcuacaguggacaagugaacu

SEQ ID NO: 634714 - RNA, 23 nt, Human
acuuugcagagccccuugaaaca

SEQ ID NO: 634715 - RNA, 22 nt, Human
agguccagagguugaacggugg

SEQ ID NO: 634716 - RNA, 22 nt, Human
auuaugcuuaggaaaauaugaa

SEQ ID NO: 634717 - RNA, 22 nt, Human
uguccuuuucuuuagugcagcu

SEQ ID NO: 634718 - RNA, 22 nt, Human
gggcucaggucagggcaucagc

SEQ ID NO: 634719 - RNA, 22 nt, Human
gaugguggcaagagccaagucu

SEQ ID NO: 634720 - RNA, 22 nt, Human
aggagcugacuuguaaagcauu

SEQ ID NO: 634721 - RNA, 22 nt, Human
ugucagcaguaucucuaucuca

SEQ ID NO: 634722 - RNA, 22 nt, Human
uuggcuguauguacaucuguua

SEQ ID NO: 634723 - RNA, 22 nt, Human
ucaggagcaacaucuuugaauc

SEQ ID NO: 634724 - RNA, 22 nt, Human
ggccuguggcuuuggcgucuaa

SEQ ID NO: 634725 - RNA, 22 nt, Human
aauacuauguugugacacauga

SEQ ID NO: 634726 - RNA, 22 nt, Human
ucaccaggcaacuauguacucc

SEQ ID NO: 634727 - RNA, 22 nt, Human
augugcuugcagaugagccuca

SEQ ID NO: 634728 - RNA, 22 nt, Human
uagccaggcugcagcugauccg

SEQ ID NO: 634729 - RNA, 22 nt, Human
uccugggaguaauugagucaug

SEQ ID NO: 634730 - RNA, 22 nt, Human
cagccugacaccagcuuugggc

SEQ ID NO: 634731 - RNA, 22 nt, Human
ccagcugcaggggagcagugga

SEQ ID NO: 634732 - RNA, 22 nt, Human
aggauacauguuuuuuaucaau

SEQ ID NO: 634733 - RNA, 22 nt, Human
ugggccaggggccucuucugau

SEQ ID NO: 634734 - RNA, 22 nt, Human
aagugaaauugccauucuuaua

SEQ ID NO: 634735 - RNA, 22 nt, Human
cccagcccaucucaaaggucua

SEQ ID NO: 634736 - RNA, 22 nt, Human
cuccagggcagcauggcagugg

SEQ ID NO: 634737 - RNA, 22 nt, Human
aucuggguagugcaagacauga

SEQ ID NO: 634738 - RNA, 22 nt, Human
agccucagugucaccaucuacc

SEQ ID NO: 634739 - RNA, 20 nt, Human
aaagucuguuuaucucugga

SEQ ID NO: 634740 - RNA, 22 nt, Human
gaaagcaguaaaugggucccau

SEQ ID NO: 634741 - RNA, 22 nt, Human
auacagaaaaguggauagccag

SEQ ID NO: 634742 - RNA, 22 nt, Human
aaggcuggaccuggaugaaucu

SEQ ID NO: 634743 - RNA, 19 nt, Human
gcauuucucuuuacagcca

SEQ ID NO: 634744 - RNA, 22 nt, Human
ugucagcaccauggguagugau

SEQ ID NO: 634745 - RNA, 22 nt, Human
uguuuaagcugaugagguaucg

SEQ ID NO: 634746 - RNA, 22 nt, Human
cuggcagcuucaggacacucgg

SEQ ID NO: 634747 - RNA, 17 nt, Human
aagaacacucaauagca

SEQ ID NO: 634748 - RNA, 22 nt, Human
gcugcugcgcuugucuacuguu

SEQ ID NO: 634749 - RNA, 22 nt, Human
uggaaggaagccaaggaagguu

SEQ ID NO: 634750 - RNA, 22 nt, Human
ccagagcugaggagaugggcuu

SEQ ID NO: 634751 - RNA, 20 nt, Human
aacuuguuuuguuuucuaau

SEQ ID NO: 634752 - RNA, 22 nt, Human
aucugaaauagucuuaucugag

SEQ ID NO: 634753 - RNA, 22 nt, Human
auggcugagaugggcuccaggc

SEQ ID NO: 634754 - RNA, 20 nt, Human
ccuaggcaugcugagucucc

SEQ ID NO: 634755 - RNA, 22 nt, Human
uuaagugcaaaaaugaaaguau

SEQ ID NO: 634756 - RNA, 22 nt, Human
agggccaggcucccaugucagg

SEQ ID NO: 634757 - RNA, 22 nt, Human
ucuuuccuacuuuauugugaac

SEQ ID NO: 634758 - RNA, 22 nt, Human
uccaggcacagaguuggucagu

SEQ ID NO: 634759 - RNA, 22 nt, Human
aggcaggagcaagcccuacaag

SEQ ID NO: 634760 - RNA, 22 nt, Human
cccugcugaaucccauggaguc

SEQ ID NO: 634761 - RNA, 22 nt, Human
aaagggcagaguucacuagaaa

SEQ ID NO: 634762 - RNA, 22 nt, Human
caugcauuuucuauucacucag

SEQ ID NO: 634763 - RNA, 22 nt, Human
cuugcuuggagaagagaucagu

SEQ ID NO: 634764 - RNA, 22 nt, Human
agggccucuaccauccaagguu

SEQ ID NO: 634765 - RNA, 20 nt, Human
ccuggccaaugagauaggaa

SEQ ID NO: 634766 - RNA, 22 nt, Human
caaagcaggaagaauauugaaa

SEQ ID NO: 634767 - RNA, 22 nt, Human
uagcaucuaacaucuuaggacu

SEQ ID NO: 634768 - RNA, 22 nt, Human
uuaggaaaggguuuucuaacag

SEQ ID NO: 634769 - RNA, 22 nt, Human
cuaguucuagaucccugaggaa

SEQ ID NO: 634770 - RNA, 23 nt, Human
cagggcccugcucaauuucucca

SEQ ID NO: 634771 - RNA, 22 nt, Human
uguguagcuuucuucugugggg

SEQ ID NO: 634772 - RNA, 22 nt, Human
gaugaucaucuguaaaguuaga

SEQ ID NO: 634773 - RNA, 22 nt, Human
acagcucuucuucaagccuggc

SEQ ID NO: 634774 - RNA, 22 nt, Human
cugcagcuaaggaaugugguug

SEQ ID NO: 634775 - RNA, 22 nt, Human
uaagauaauaaguaugucuaug

SEQ ID NO: 634776 - RNA, 22 nt, Human
cagggacaaagugagaaaggaa

SEQ ID NO: 634777 - RNA, 21 nt, Human
auguuauucuguuccuccagc

SEQ ID NO: 634778 - RNA, 22 nt, Human
cacuacuugaaagaauuacaga

SEQ ID NO: 634779 - RNA, 22 nt, Human
acacaugcagguauacauguuc

SEQ ID NO: 634780 - RNA, 20 nt, Human
uggccuuggggagcucacac

SEQ ID NO: 634781 - RNA, 22 nt, Human
aucaggaagaucuagcgaaugu

SEQ ID NO: 634782 - RNA, 23 nt, Human
cuggaacauaguagauggucaga

SEQ ID NO: 634783 - RNA, 22 nt, Human
aagcuggcaauuaucaaaacug

SEQ ID NO: 634784 - RNA, 20 nt, Human
ggccuuggccucuuugcagc

SEQ ID NO: 634785 - RNA, 22 nt, Human
aacugcaaaauaaucaaguugu

SEQ ID NO: 634786 - RNA, 22 nt, Human
ggaaaggggccuggaucuuuug

SEQ ID NO: 634787 - RNA, 22 nt, Human
uguagaaaauuggagcauucau

SEQ ID NO: 634788 - RNA, 22 nt, Human
uccaucucaccugcacucugcg

SEQ ID NO: 634789 - RNA, 22 nt, Human
acauacacacauacuuucuccu

SEQ ID NO: 634790 - RNA, 20 nt, Human
uuaagaaaagcacauccugc

SEQ ID NO: 634791 - RNA, 22 nt, Human
ugggccucaccuucuuggcagc

SEQ ID NO: 634792 - RNA, 22 nt, Human
guaaguuuuguauaggcauggg

SEQ ID NO: 634793 - RNA, 22 nt, Human
uuaaagcauccugucagucugu

SEQ ID NO: 634794 - RNA, 22 nt, Human
aaaguucuccuggauugugcug

SEQ ID NO: 634795 - RNA, 22 nt, Human
gcugcgucgagacagccuggca

SEQ ID NO: 634796 - RNA, 22 nt, Human
ucugcugucuaugcaaguccuu

SEQ ID NO: 634797 - RNA, 22 nt, Human
aggcaccugagguggccagccu

SEQ ID NO: 634798 - RNA, 22 nt, Human
acagaauauugguuacuguugc

SEQ ID NO: 634799 - RNA, 22 nt, Human
uaguaaaucucagaaaaagauc

SEQ ID NO: 634800 - RNA, 22 nt, Human
uuuucaccauagacacuggucc

SEQ ID NO: 634801 - RNA, 22 nt, Human
gcugcccucugugacccggccc

SEQ ID NO: 634802 - RNA, 22 nt, Human
ugcucaggucguucugccccuu

SEQ ID NO: 634803 - RNA, 22 nt, Human
cagcugcuuucagcaggaggga

SEQ ID NO: 634804 - RNA, 22 nt, Human
uaauugcuccaaggagaacuaa

SEQ ID NO: 634805 - RNA, 22 nt, Human
aaauaauugaguuggucaauau

SEQ ID NO: 634806 - RNA, 22 nt, Human
cagggcccaagacacaaugagg

SEQ ID NO: 634807 - RNA, 22 nt, Human
uccuccaggcaccucacuggcu

SEQ ID NO: 634808 - RNA, 22 nt, Human
ggaggugcuggcggccagcucu

SEQ ID NO: 634809 - RNA, 23 nt, Human
uugcauagacauccucauagauu

SEQ ID NO: 634810 - RNA, 22 nt, Human
ugaugaggcauaugcuacacau

SEQ ID NO: 634811 - RNA, 22 nt, Human
aucugaggguuugggcaucagc

SEQ ID NO: 634812 - RNA, 22 nt, Human
uucuuucucagugggcagauac

SEQ ID NO: 634813 - RNA, 20 nt, Human
uccaguauguuauuuggugu

SEQ ID NO: 634814 - RNA, 22 nt, Human
auaaggcacacauagauagggu

SEQ ID NO: 634815 - RNA, 22 nt, Human
uaccagcuuccuucaagaugug

SEQ ID NO: 634816 - RNA, 22 nt, Human
ccuguuguuuagcacuuagaac

SEQ ID NO: 634817 - RNA, 22 nt, Human
aaagcaaugcccguucauuauc

SEQ ID NO: 634818 - RNA, 22 nt, Human
agagcugggaccgucuggaagu

SEQ ID NO: 634819 - RNA, 22 nt, Human
accuuuggucauuuacuuuuca

SEQ ID NO: 634820 - RNA, 22 nt, Human
cugugucuugaguaauucggug

SEQ ID NO: 634821 - RNA, 22 nt, Human
gcagaaaccacagugucuuuua

SEQ ID NO: 634822 - RNA, 22 nt, Human
gcugggccuuccgauucucaag

SEQ ID NO: 634823 - RNA, 22 nt, Human
ucacagcugaguuuccauuucu

SEQ ID NO: 634824 - RNA, 22 nt, Human
ucagcagggccuccuugugcag

SEQ ID NO: 634825 - RNA, 22 nt, Human
augccagcuauagacuuguuau

SEQ ID NO: 634826 - RNA, 22 nt, Human
augcaucuaugacuuagacauu

SEQ ID NO: 634827 - RNA, 22 nt, Human
aggcuucaguagggagcauguc

SEQ ID NO: 634828 - RNA, 22 nt, Human
gcaggaagcauagaagaaugcc

SEQ ID NO: 634829 - RNA, 22 nt, Human
cagugccuggccggcuuccauu

SEQ ID NO: 634830 - RNA, 22 nt, Human
gccaguggucacugaggaagaa

SEQ ID NO: 634831 - RNA, 22 nt, Human
cuggagcugggcuaggguagga

SEQ ID NO: 634832 - RNA, 22 nt, Human
uaaaccagguaaagaagcucuc

SEQ ID NO: 634833 - RNA, 22 nt, Human
uaggugucugcucuuauuuaac

SEQ ID NO: 634834 - RNA, 22 nt, Human
uugugcuagaaccaguacagaa

SEQ ID NO: 634835 - RNA, 22 nt, Human
auacaguauuaccuguucagga

SEQ ID NO: 634836 - RNA, 22 nt, Human
gcugaaugaauguauuuuaaaa

SEQ ID NO: 634837 - RNA, 22 nt, Human
uuauggaaaugaaauuuuauug

SEQ ID NO: 634838 - RNA, 22 nt, Human
uguaugaaccuuuaauauagug

SEQ ID NO: 634839 - RNA, 22 nt, Human
uauccugcuuuguuccucuuga

SEQ ID NO: 634840 - RNA, 22 nt, Human
cccaugagaccugguuuaaggc

SEQ ID NO: 634841 - RNA, 22 nt, Human
aaugcugcaagaggugaaaaga

SEQ ID NO: 634842 - RNA, 22 nt, Human
cagacagacagccguggccacc

SEQ ID NO: 634843 - RNA, 20 nt, Human
aaaauauguauaacucuucu

SEQ ID NO: 634844 - RNA, 22 nt, Human
aagcaucuucuaucaguuagac

SEQ ID NO: 634845 - RNA, 19 nt, Human
uguuuacauguuucuucag

SEQ ID NO: 634846 - RNA, 22 nt, Human
cucacuguuuaauagcuggauc

SEQ ID NO: 634847 - RNA, 22 nt, Human
ucagaaagcugauucuugauac

SEQ ID NO: 634848 - RNA, 22 nt, Human
uacaggaaagaaauuugaacuc

SEQ ID NO: 634849 - RNA, 17 nt, Human
cccaggccgccgggagc

SEQ ID NO: 634850 - RNA, 22 nt, Human
cagaugcuuuugauucuggggu

SEQ ID NO: 634851 - RNA, 20 nt, Human
aaaauugcucugcagucccc

SEQ ID NO: 634852 - RNA, 22 nt, Human
auccccuugugggcuggcagca

SEQ ID NO: 634853 - RNA, 22 nt, Human
agcagccaagguaaccugugcu

SEQ ID NO: 634854 - RNA, 22 nt, Human
ggccucucgaagcuucagucca

SEQ ID NO: 634855 - RNA, 22 nt, Human
uguuucuuauccaaguggucug

SEQ ID NO: 634856 - RNA, 22 nt, Human
ccaggucuuguuugacaucaau

SEQ ID NO: 634857 - RNA, 22 nt, Human
aguguagacauaggucuggucu

SEQ ID NO: 634858 - RNA, 22 nt, Human
cgcaggaagacaaggguggaaa

SEQ ID NO: 634859 - RNA, 22 nt, Human
cugugucuguggaauagcgaau

SEQ ID NO: 634860 - RNA, 22 nt, Human
uagcaaggugaaguauggguga

SEQ ID NO: 634861 - RNA, 22 nt, Human
gguggguuuggaagagcaggcu

SEQ ID NO: 634862 - RNA, 22 nt, Human
uagcagcauuuuuguagaguau

SEQ ID NO: 634863 - RNA, 22 nt, Human
uaauaccuugaucucucuuguc

SEQ ID NO: 634864 - RNA, 22 nt, Human
auaccugaucaaggcaaaaaug

SEQ ID NO: 634865 - RNA, 22 nt, Human
uaguuugagaauugaaauagaa

SEQ ID NO: 634866 - RNA, 22 nt, Human
auguuucaccaguuuuauaaga

SEQ ID NO: 634867 - RNA, 22 nt, Human
aaugcuuucuuauaaccacugc

SEQ ID NO: 634868 - RNA, 22 nt, Human
cacuuaagcaguuaauuuaucu

SEQ ID NO: 634869 - RNA, 22 nt, Human
gaggaaaucuuaggccccaacc

SEQ ID NO: 634870 - RNA, 22 nt, Human
uuccuugagaugacugucuugu

SEQ ID NO: 634871 - RNA, 22 nt, Human
gaggccacagucaguguucauc

SEQ ID NO: 634872 - RNA, 22 nt, Human
ugggcugaaaugcuguggacua

SEQ ID NO: 634873 - RNA, 22 nt, Human
cucugccaucuuggagcucaag

SEQ ID NO: 634874 - RNA, 18 nt, Human
cuccagggaacucaguca

SEQ ID NO: 634875 - RNA, 22 nt, Human
ccugaccacccuuggacaaggu

SEQ ID NO: 634876 - RNA, 22 nt, Human
auauuuuggggugaugugcauc

SEQ ID NO: 634877 - RNA, 22 nt, Human
ugccucugccuccauuguuagu

SEQ ID NO: 634878 - RNA, 20 nt, Human
ucuuuguuaauuuuaucucc

SEQ ID NO: 634879 - RNA, 22 nt, Human
ucaggcugagaaaaucuggacc

SEQ ID NO: 634880 - RNA, 22 nt, Human
cuccagauuccugcuggcagaa

SEQ ID NO: 634881 - RNA, 22 nt, Human
gggagaacuggguggagcaucu

SEQ ID NO: 634882 - RNA, 22 nt, Human
gcugaggcggaaggauugcuag

SEQ ID NO: 634883 - RNA, 22 nt, Human
uauguuuaguauccauuuucag

SEQ ID NO: 634884 - RNA, 22 nt, Human
uaacucugcuuguucucugagu

SEQ ID NO: 634885 - RNA, 22 nt, Human
gucaacuuuaagaugaucuuuu

SEQ ID NO: 634886 - RNA, 22 nt, Human
uccaugagggacacuggaugcu

SEQ ID NO: 634887 - RNA, 22 nt, Human
aagccaggcaugcuuggacagu

SEQ ID NO: 634888 - RNA, 22 nt, Human
cucagagguggaugccuugugg

SEQ ID NO: 634889 - RNA, 22 nt, Human
aaaaguacuauuuuaacaaagu

SEQ ID NO: 634890 - RNA, 22 nt, Human
ucauuuggagccuuccuguuuu

SEQ ID NO: 634891 - RNA, 22 nt, Human
aacacugucagccuuugaugga

SEQ ID NO: 634892 - RNA, 22 nt, Human
aacaacagugagugcugggagg

SEQ ID NO: 634893 - RNA, 22 nt, Human
acagaggaagcauauagcacaa

SEQ ID NO: 634894 - RNA, 22 nt, Human
aucucugggcuuugaguuuguu

SEQ ID NO: 634895 - RNA, 22 nt, Human
aacacauaggcagagcaugaca

SEQ ID NO: 634896 - RNA, 22 nt, Human
aacaucagaauauccauguugg

SEQ ID NO: 634897 - RNA, 22 nt, Human
ggacaaaucucauuauuucuga

SEQ ID NO: 634898 - RNA, 22 nt, Human
auuuaagggauuuggagaccaa

SEQ ID NO: 634899 - RNA, 17 nt, Human
ggcaccagacggagagu

SEQ ID NO: 634900 - RNA, 22 nt, Human
ugccaagaccacaauugcuuuu

SEQ ID NO: 634901 - RNA, 22 nt, Human
ccagagaaagcucacaggcagu

SEQ ID NO: 634902 - RNA, 22 nt, Human
uaaaccauucagacugaaccac

SEQ ID NO: 634903 - RNA, 22 nt, Human
agcugccucagucacucauggc

SEQ ID NO: 634904 - RNA, 22 nt, Human
gaagccaguacugugcucugca

SEQ ID NO: 634905 - RNA, 22 nt, Human
ccccagagaaagucagcagcau

SEQ ID NO: 634906 - RNA, 22 nt, Human
uuacagaaugugccauuugguc

SEQ ID NO: 634907 - RNA, 22 nt, Human
gagagugaugaaugguuaaaca

SEQ ID NO: 634908 - RNA, 22 nt, Human
uucccacacuccauauaauuca

SEQ ID NO: 634909 - RNA, 20 nt, Human
aucaaaauccuauugagguu

SEQ ID NO: 634910 - RNA, 22 nt, Human
ugcucuguaaggucagaaaagg

SEQ ID NO: 634911 - RNA, 22 nt, Human
ucaggccaagguagacaugacu

SEQ ID NO: 634912 - RNA, 22 nt, Human
cuccuguauguugggcuucaca

SEQ ID NO: 634913 - RNA, 22 nt, Human
aagagaggacauggugaaccug

SEQ ID NO: 634914 - RNA, 22 nt, Human
uuauauaucuugauuuguucca

SEQ ID NO: 634915 - RNA, 22 nt, Human
augcuuccccucucauuucagc

SEQ ID NO: 634916 - RNA, 22 nt, Human
uuuuggucagguuggucucgaa

SEQ ID NO: 634917 - RNA, 22 nt, Human
auucuggacaaggcaagcuccu

SEQ ID NO: 634918 - RNA, 22 nt, Human
gagccagguuggaggcugcagu

SEQ ID NO: 634919 - RNA, 22 nt, Human
gagacacaagaagacaugcaca

SEQ ID NO: 634920 - RNA, 22 nt, Human
agccagaaaaacaccaagagga

SEQ ID NO: 634921 - RNA, 22 nt, Human
cccagcagugacccagugauac

SEQ ID NO: 634922 - RNA, 22 nt, Human
uuggcagauggauucaacauua

SEQ ID NO: 634923 - RNA, 22 nt, Human
aggccauguggccccagagucu

SEQ ID NO: 634924 - RNA, 23 nt, Human
ucugucuuguuuaggccacuguu

SEQ ID NO: 634925 - RNA, 22 nt, Human
aauuacaaauguagacucucau

SEQ ID NO: 634926 - RNA, 22 nt, Human
uggcccgaccucugcucaugca

SEQ ID NO: 634927 - RNA, 22 nt, Human
cuguguuccccugcugcugagg

SEQ ID NO: 634928 - RNA, 22 nt, Human
aggaucagugaauacucagggu

SEQ ID NO: 634929 - RNA, 20 nt, Human
agccugccagcuggcccaga

SEQ ID NO: 634930 - RNA, 23 nt, Human
aggcuccacaugggcacuuugca

SEQ ID NO: 634931 - RNA, 22 nt, Human
agcagggcccacuaggggagau

SEQ ID NO: 634932 - RNA, 22 nt, Human
cuucuuccugcugcagccucca

SEQ ID NO: 634933 - RNA, 22 nt, Human
ucucuggggauggaccugggag

SEQ ID NO: 634934 - RNA, 22 nt, Human
aauaaaaugaacugguagaguu

SEQ ID NO: 634935 - RNA, 22 nt, Human
ucagaggagcaaaagaggggau

SEQ ID NO: 634936 - RNA, 22 nt, Human
ucucagagggaaacaugaguga

SEQ ID NO: 634937 - RNA, 22 nt, Human
gagaggcugguaaagucugaac

SEQ ID NO: 634938 - RNA, 22 nt, Human
uggaggaugagugugggcucug

SEQ ID NO: 634939 - RNA, 22 nt, Human
aagggagaaaacuuguggcuua

SEQ ID NO: 634940 - RNA, 22 nt, Human
aaagcagggaugaggcuagagg

SEQ ID NO: 634941 - RNA, 22 nt, Human
guuauuguccagcacaguuggg

SEQ ID NO: 634942 - RNA, 22 nt, Human
caggggcuguuugccucaggcc

SEQ ID NO: 634943 - RNA, 22 nt, Human
auuuccaaaaccacuuauugcc

SEQ ID NO: 634944 - RNA, 22 nt, Human
uccucaggugacuagguaucuu

SEQ ID NO: 634945 - RNA, 22 nt, Human
ggagccagagcacuggggagcc

SEQ ID NO: 634946 - RNA, 22 nt, Human
aacagcuugagacuggauaugc

SEQ ID NO: 634947 - RNA, 18 nt, Human
cuaucccuggagcuuggg

SEQ ID NO: 634948 - RNA, 22 nt, Human
ucaaggugcugugcugugcuag

SEQ ID NO: 634949 - RNA, 18 nt, Human
gggagcugggaagcuggu

SEQ ID NO: 634950 - RNA, 22 nt, Human
ccugggucaccaggcccaggca

SEQ ID NO: 634951 - RNA, 22 nt, Human
ugauugacuuuagaauagcacu

SEQ ID NO: 634952 - RNA, 22 nt, Human
ucaauacuuaagcuuaauucua

SEQ ID NO: 634953 - RNA, 22 nt, Human
gacacuucaccuuucccagccu

SEQ ID NO: 634954 - RNA, 22 nt, Human
agcccuggauucugagguccaa

SEQ ID NO: 634955 - RNA, 22 nt, Human
ccuuagcauuagaagcuguggg

SEQ ID NO: 634956 - RNA, 22 nt, Human
ggaacauuuuuuaaggcagaaa

SEQ ID NO: 634957 - RNA, 22 nt, Human
cccagcacuuugaauaugucac

SEQ ID NO: 634958 - RNA, 22 nt, Human
ggucagcucuuugggcuggugg

SEQ ID NO: 634959 - RNA, 21 nt, Human
agugucauuugaucauuguua

SEQ ID NO: 634960 - RNA, 22 nt, Human
agugaccaacaaugcugagaag

SEQ ID NO: 634961 - RNA, 22 nt, Human
uugacaauugggagauauaaag

SEQ ID NO: 634962 - RNA, 22 nt, Human
ccaaauuaaaucauacagacag

SEQ ID NO: 634963 - RNA, 22 nt, Human
gagggcucugucuggaagggaa

SEQ ID NO: 634964 - RNA, 22 nt, Human
auuguaaauagugccacaauaa

SEQ ID NO: 634965 - RNA, 20 nt, Human
uucagagucagcaaaugcag

SEQ ID NO: 634966 - RNA, 22 nt, Human
gcagaaguuaaucgaaggccau

SEQ ID NO: 634967 - RNA, 22 nt, Human
aucuugcugcuacaaagugccc

SEQ ID NO: 634968 - RNA, 23 nt, Human
ccagcucccaggucugaggacug

SEQ ID NO: 634969 - RNA, 22 nt, Human
ccaggcucuaucccuccuucuu

SEQ ID NO: 634970 - RNA, 22 nt, Human
aagacacuggguuaggcacgug

SEQ ID NO: 634971 - RNA, 22 nt, Human
uucucuauguguguuguaguuu

SEQ ID NO: 634972 - RNA, 22 nt, Human
agugcuccuuucauugcugccc

SEQ ID NO: 634973 - RNA, 22 nt, Human
gcugaagcugcagcaggaggaa

SEQ ID NO: 634974 - RNA, 22 nt, Human
ucacaaaucauuuuaucugugu

SEQ ID NO: 634975 - RNA, 22 nt, Human
cucuuauuccuacaguaacagg

SEQ ID NO: 634976 - RNA, 22 nt, Human
cacaauacuauuuuuaggucuu

SEQ ID NO: 634977 - RNA, 22 nt, Human
agacaacaccaaaugcuagugu

SEQ ID NO: 634978 - RNA, 22 nt, Human
ucagagaacuccacaccuuagg

SEQ ID NO: 634979 - RNA, 22 nt, Human
aaggaccugauuuugagcaucu

SEQ ID NO: 634980 - RNA, 22 nt, Human
uggggaccagauuagaccaugg

SEQ ID NO: 634981 - RNA, 22 nt, Human
gaucacaugaguuaucuaacuu

SEQ ID NO: 634982 - RNA, 22 nt, Human
acucuggcuugaggaccagguc

SEQ ID NO: 634983 - RNA, 22 nt, Human
uccuggagcugacuccguuuga

SEQ ID NO: 634984 - RNA, 22 nt, Human
cugaggugcuagggucccugcu

SEQ ID NO: 634985 - RNA, 22 nt, Human
cugaggcugggcauggggucca

SEQ ID NO: 634986 - RNA, 22 nt, Human
acaggaagaaagugcaguagau

SEQ ID NO: 634987 - RNA, 22 nt, Human
gcugcugucagugguggcaguu

SEQ ID NO: 634988 - RNA, 22 nt, Human
cuggccagcugacagcagggcu

SEQ ID NO: 634989 - RNA, 19 nt, Human
acugagaccacagacaagu

SEQ ID NO: 634990 - RNA, 20 nt, Human
uucgcugggaguggccaggc

SEQ ID NO: 634991 - RNA, 22 nt, Human
uuauuuauggcacuguuggugg

SEQ ID NO: 634992 - RNA, 19 nt, Human
uuccaggugcuguggggag

SEQ ID NO: 634993 - RNA, 22 nt, Human
guuggccauuaauuggaggaca

SEQ ID NO: 634994 - RNA, 22 nt, Human
uaaaugcaagugcuccugggag

SEQ ID NO: 634995 - RNA, 22 nt, Human
cucugggucuaccuguggccag

SEQ ID NO: 634996 - RNA, 22 nt, Human
cugcucugugguccaugagaca

SEQ ID NO: 634997 - RNA, 22 nt, Human
aaagguuuauugcuaugguugu

SEQ ID NO: 634998 - RNA, 22 nt, Human
gaaccuguccugagugaggagu

SEQ ID NO: 634999 - RNA, 22 nt, Human
gcgcaagccacacagccugggg

SEQ ID NO: 635000 - RNA, 22 nt, Human
uacaguaagaugaaauagcaau

SEQ ID NO: 635001 - RNA, 20 nt, Human
gcuucauuugcaagucuagu

SEQ ID NO: 635002 - RNA, 22 nt, Human
caguccugggagacuuacccag

SEQ ID NO: 635003 - RNA, 19 nt, Human
aaagaucugggauugagac

SEQ ID NO: 635004 - RNA, 22 nt, Human
augcuaaacuaugaucauuuuc

SEQ ID NO: 635005 - RNA, 22 nt, Human
uuugacagcuuguuacaaaguu

SEQ ID NO: 635006 - RNA, 22 nt, Human
ugguuuauuucucugaaagguu

SEQ ID NO: 635007 - RNA, 22 nt, Human
gccugcucuggaauccauguaa

SEQ ID NO: 635008 - RNA, 22 nt, Human
gaagaacaagcagugcuuuccu

SEQ ID NO: 635009 - RNA, 22 nt, Human
gaauagauauccuugagggucu

SEQ ID NO: 635010 - RNA, 22 nt, Human
uauuucaacguaugaaaagcug

SEQ ID NO: 635011 - RNA, 22 nt, Human
aggagcuggaaugguccuuuug

SEQ ID NO: 635012 - RNA, 22 nt, Human
cuuccagguccuucuugagaag

SEQ ID NO: 635013 - RNA, 22 nt, Human
uucagauaagucaaguuaguau

SEQ ID NO: 635014 - RNA, 22 nt, Human
agagaucccuucugccugggga

SEQ ID NO: 635015 - RNA, 22 nt, Human
cccucccagaugggcuugaggu

SEQ ID NO: 635016 - RNA, 22 nt, Human
agaggcuguuacacucccagau

SEQ ID NO: 635017 - RNA, 22 nt, Human
uuucacagguacaaacacuccu

SEQ ID NO: 635018 - RNA, 22 nt, Human
cagacauggcgccaagugcuag

SEQ ID NO: 635019 - RNA, 22 nt, Human
uuguacaacacauauucuacag

SEQ ID NO: 635020 - RNA, 22 nt, Human
uaacugauauugaaaaacauca

SEQ ID NO: 635021 - RNA, 22 nt, Human
uagcuuuagugaaaaauaucag

SEQ ID NO: 635022 - RNA, 22 nt, Human
ccacccuggacaggccucugag

SEQ ID NO: 635023 - RNA, 23 nt, Human
ucccugggcccgugccagcggug

SEQ ID NO: 635024 - RNA, 22 nt, Human
caauuaaagaagaccugccuca

SEQ ID NO: 635025 - RNA, 22 nt, Human
uuagcuuuagagccauuacugg

SEQ ID NO: 635026 - RNA, 22 nt, Human
aagccaaaggcuccagugaccu

SEQ ID NO: 635027 - RNA, 22 nt, Human
aaacauguagugcaugaggauc

SEQ ID NO: 635028 - RNA, 22 nt, Human
cugcacauguucaucaugacaa

SEQ ID NO: 635029 - RNA, 19 nt, Human
agaaggcuccuguuggaga

SEQ ID NO: 635030 - RNA, 20 nt, Human
agcuaggagaaagcauggag

SEQ ID NO: 635031 - RNA, 22 nt, Human
uguguacaaacuaacaacauau

SEQ ID NO: 635032 - RNA, 22 nt, Human
gcccacaguguagcagguacuc

SEQ ID NO: 635033 - RNA, 22 nt, Human
agcuccaggauaagacaggugc

SEQ ID NO: 635034 - RNA, 22 nt, Human
caggcccaucugcucccaggcu

SEQ ID NO: 635035 - RNA, 15 nt, Human
ggugucugcagugug

SEQ ID NO: 635036 - RNA, 22 nt, Human
agugugucugaucacuugugag

SEQ ID NO: 635037 - RNA, 18 nt, Human
cucucuggucuggauccc

SEQ ID NO: 635038 - RNA, 22 nt, Human
uguggaagaaacaagacacuuu

SEQ ID NO: 635039 - RNA, 22 nt, Human
ccugggaagagcugacaggagg

SEQ ID NO: 635040 - RNA, 23 nt, Human
acucucagguucuuuccagcagg

SEQ ID NO: 635041 - RNA, 23 nt, Human
cuuuccuuucuuugacacccagc

SEQ ID NO: 635042 - RNA, 22 nt, Human
acuagcagggauauuauauaag

SEQ ID NO: 635043 - RNA, 22 nt, Human
guuccacaaaauguacccaguu

SEQ ID NO: 635044 - RNA, 22 nt, Human
auccuaaagcagacagcagguu

SEQ ID NO: 635045 - RNA, 22 nt, Human
augaccagccgagauaaacaga

SEQ ID NO: 635046 - RNA, 22 nt, Human
auguuaccaucuuuuaucuaca

SEQ ID NO: 635047 - RNA, 22 nt, Human
ugaaugaugcauuuguuuccca

SEQ ID NO: 635048 - RNA, 22 nt, Human
auguaggauugagugauagagg

SEQ ID NO: 635049 - RNA, 22 nt, Human
auaguuccagcaucuuugguaa

SEQ ID NO: 635050 - RNA, 22 nt, Human
guucugggucuggacacacaga

SEQ ID NO: 635051 - RNA, 19 nt, Human
uuugaaagaguuuuauugg

SEQ ID NO: 635052 - RNA, 21 nt, Human
caccuuauagauaaaauuaga

SEQ ID NO: 635053 - RNA, 22 nt, Human
gcaccaggaggcccuucucauc

SEQ ID NO: 635054 - RNA, 19 nt, Human
cccuggcaggcaagccugg

SEQ ID NO: 635055 - RNA, 22 nt, Human
gagcaggucuuucauggugcau

SEQ ID NO: 635056 - RNA, 19 nt, Human
acaauaacucauugauugc

SEQ ID NO: 635057 - RNA, 22 nt, Human
agcucagagauaaucaagagac

SEQ ID NO: 635058 - RNA, 22 nt, Human
agccuucacugggaccuuggau

SEQ ID NO: 635059 - RNA, 22 nt, Human
caggucugcagacagggccaug

SEQ ID NO: 635060 - RNA, 22 nt, Human
caauagaaaacucaauacuuaa

SEQ ID NO: 635061 - RNA, 23 nt, Human
uggaaacuuaagggggagauguc

SEQ ID NO: 635062 - RNA, 22 nt, Human
ugaguuaucuaaaauagucaaa

SEQ ID NO: 635063 - RNA, 22 nt, Human
gcuagcagaaagcaggcugcuc

SEQ ID NO: 635064 - RNA, 22 nt, Human
uagauuucuaacagugugcuug

SEQ ID NO: 635065 - RNA, 23 nt, Human
uugauucuuucagggaccuagau

SEQ ID NO: 635066 - RNA, 22 nt, Human
ugaagcaacuggacaaguuggc

SEQ ID NO: 635067 - RNA, 22 nt, Human
cccuuccuggaguacccucugu

SEQ ID NO: 635068 - RNA, 22 nt, Human
uuccuuaguguuagauucugug

SEQ ID NO: 635069 - RNA, 22 nt, Human
agccccugggaguagcugcugc

SEQ ID NO: 635070 - RNA, 22 nt, Human
uuucuccuccagagagacacag

SEQ ID NO: 635071 - RNA, 22 nt, Human
gagcagagacaguacaacuggc

SEQ ID NO: 635072 - RNA, 23 nt, Human
uuuggcuccauggguggcucauu

SEQ ID NO: 635073 - RNA, 22 nt, Human
aaagugcuaaauaagcccugaa

SEQ ID NO: 635074 - RNA, 22 nt, Human
agccuccaucucccaucuguga

SEQ ID NO: 635075 - RNA, 22 nt, Human
cuuuccaagaaugcagauaccu

SEQ ID NO: 635076 - RNA, 22 nt, Human
cucugcugucucagaugggcca

SEQ ID NO: 635077 - RNA, 22 nt, Human
ggugacagugguuaaaauuugu

SEQ ID NO: 635078 - RNA, 22 nt, Human
aguguuaagagaaaauucugcu

SEQ ID NO: 635079 - RNA, 22 nt, Human
cgaggccacaccugcuucuggg

SEQ ID NO: 635080 - RNA, 22 nt, Human
gagccagacugccugaagcuca

SEQ ID NO: 635081 - RNA, 22 nt, Human
ugaggcuggaugggaugccucc

SEQ ID NO: 635082 - RNA, 22 nt, Human
ggcucugcuucucaccuguucc

SEQ ID NO: 635083 - RNA, 22 nt, Human
uagaaagcguuaaaucuacaga

SEQ ID NO: 635084 - RNA, 22 nt, Human
aggcuuuaauuaucuacaggag

SEQ ID NO: 635085 - RNA, 22 nt, Human
ucugccaucaagaugcucuggc

SEQ ID NO: 635086 - RNA, 22 nt, Human
acagcaggaagcuggagggaaa

SEQ ID NO: 635087 - RNA, 20 nt, Human
aauuagcuuaagucaaucag

SEQ ID NO: 635088 - RNA, 22 nt, Human
uggagagcgugcuuagcacucu

SEQ ID NO: 635089 - RNA, 22 nt, Human
ggcacagcaccuuuucacauug

SEQ ID NO: 635090 - RNA, 22 nt, Human
accugagggagauuaggccuga

SEQ ID NO: 635091 - RNA, 22 nt, Human
ccacugccucuccagggccauc

SEQ ID NO: 635092 - RNA, 22 nt, Human
gaccaggaaagagugugacuaa

SEQ ID NO: 635093 - RNA, 22 nt, Human
cuggagaagcauucaaauaauu

SEQ ID NO: 635094 - RNA, 22 nt, Human
aaccagcacugcuggggccugc

SEQ ID NO: 635095 - RNA, 18 nt, Human
uuggaggauguccaugaa

SEQ ID NO: 635096 - RNA, 22 nt, Human
ugcuggagaugaaagggcccug

SEQ ID NO: 635097 - RNA, 22 nt, Human
cagagggcucggcggccgcucc

SEQ ID NO: 635098 - RNA, 22 nt, Human
aacaguacaacuccacaagacu

SEQ ID NO: 635099 - RNA, 22 nt, Human
guggugagauugcuggaucaaa

SEQ ID NO: 635100 - RNA, 22 nt, Human
gaacauuugaugaugacauugg

SEQ ID NO: 635101 - RNA, 22 nt, Human
guuaauacaaccaugaucuucu

SEQ ID NO: 635102 - RNA, 22 nt, Human
uuguuuaauaucgugaaguacu

SEQ ID NO: 635103 - RNA, 22 nt, Human
guacaaauguacacuuguauaa

SEQ ID NO: 635104 - RNA, 22 nt, Human
aacacagaguauuugaagcauu

SEQ ID NO: 635105 - RNA, 22 nt, Human
aauuucacagugaacuuugagg

SEQ ID NO: 635106 - RNA, 22 nt, Human
uauauuaacacccacuugccuc

SEQ ID NO: 635107 - RNA, 22 nt, Human
cugggacacccaaggaaagagc

SEQ ID NO: 635108 - RNA, 22 nt, Human
uugagcaggauggcuaugcaca

SEQ ID NO: 635109 - RNA, 22 nt, Human
ugauuucuuccuugucauuaga

SEQ ID NO: 635110 - RNA, 19 nt, Human
acagugcaugggaccuggu

SEQ ID NO: 635111 - RNA, 22 nt, Human
agaaguuauccaccuuagaugc

SEQ ID NO: 635112 - RNA, 22 nt, Human
ccaccuccuaggccuggagaag

SEQ ID NO: 635113 - RNA, 22 nt, Human
auccucugaccgcugcagggag

SEQ ID NO: 635114 - RNA, 22 nt, Human
ucuggagaggaggauguggaca

SEQ ID NO: 635115 - RNA, 22 nt, Human
gauagcaacauagaacagaauu

SEQ ID NO: 635116 - RNA, 22 nt, Human
aaauaguccugggaauaguacu

SEQ ID NO: 635117 - RNA, 22 nt, Human
agugcaggccccaggccaggcc

SEQ ID NO: 635118 - RNA, 22 nt, Human
ugcugcauuugcaguccuuuaa

SEQ ID NO: 635119 - RNA, 22 nt, Human
cagucugaacacugggcuacuc

SEQ ID NO: 635120 - RNA, 23 nt, Human
aacacuugcaugaacagcuacac

SEQ ID NO: 635121 - RNA, 22 nt, Human
cucuggaggccguuggcccuua

SEQ ID NO: 635122 - RNA, 22 nt, Human
caggaaugaucugcugagugau

SEQ ID NO: 635123 - RNA, 22 nt, Human
ggcuguguccccaccugagcag

SEQ ID NO: 635124 - RNA, 22 nt, Human
agcaacuguuacaagaacaaca

SEQ ID NO: 635125 - RNA, 22 nt, Human
gcaggcagguggcaucuuguga

SEQ ID NO: 635126 - RNA, 23 nt, Human
gaggccacauuccccugcuugag

SEQ ID NO: 635127 - RNA, 22 nt, Human
uccagcucuuguugcccacugc

SEQ ID NO: 635128 - RNA, 22 nt, Human
auaugugugugugagaaaagcu

SEQ ID NO: 635129 - RNA, 22 nt, Human
aggaagagcaucuuugggucug

SEQ ID NO: 635130 - RNA, 22 nt, Human
cauucccacguguucuuugcuu

SEQ ID NO: 635131 - RNA, 22 nt, Human
acuaagaccuagauacuagggg

SEQ ID NO: 635132 - RNA, 22 nt, Human
auucacaaguucuagggauuag

SEQ ID NO: 635133 - RNA, 22 nt, Human
cuguagccagaagcagaaggcc

SEQ ID NO: 635134 - RNA, 22 nt, Human
uuuagacauggcuugcucacuu

SEQ ID NO: 635135 - RNA, 22 nt, Human
augugaaauagcuggauaugaa

SEQ ID NO: 635136 - RNA, 22 nt, Human
ucucugggagcaauuguuugcu

SEQ ID NO: 635137 - RNA, 22 nt, Human
cuuucccuuagccccauucuau

SEQ ID NO: 635138 - RNA, 22 nt, Human
auucagcugacuuugauucauu

SEQ ID NO: 635139 - RNA, 22 nt, Human
auauucuuauccuuuucucugu

SEQ ID NO: 635140 - RNA, 22 nt, Human
aaaccucugugcuaugacaccc

SEQ ID NO: 635141 - RNA, 22 nt, Human
guuaacuugguagucuaagugu

SEQ ID NO: 635142 - RNA, 22 nt, Human
gcaggcaccacggcucaggucu

SEQ ID NO: 635143 - RNA, 22 nt, Human
cagcccagugcacgcccguuuc

SEQ ID NO: 635144 - RNA, 22 nt, Human
ccuugagccagggagcuggcag

SEQ ID NO: 635145 - RNA, 22 nt, Human
ugcagcaccuauggacacuugu

SEQ ID NO: 635146 - RNA, 22 nt, Human
aucaguuuauacuuauaaaucu

SEQ ID NO: 635147 - RNA, 22 nt, Human
ucuccagguucagucgauggaa

SEQ ID NO: 635148 - RNA, 22 nt, Human
aguuuccucaucuguaaaauga

SEQ ID NO: 635149 - RNA, 22 nt, Human
uuucaguucaucugugaagauu

SEQ ID NO: 635150 - RNA, 20 nt, Human
aggcuguugacggcugccuc

SEQ ID NO: 635151 - RNA, 22 nt, Human
guggaaaugcccccaaauagug

SEQ ID NO: 635152 - RNA, 22 nt, Human
caguuauaagacuaagcuauuc

SEQ ID NO: 635153 - RNA, 22 nt, Human
aggggagccccugguccuggug

SEQ ID NO: 635154 - RNA, 22 nt, Human
agugugaguaauucagggaggg

SEQ ID NO: 635155 - RNA, 22 nt, Human
cgggguggcacucuaaauagaa

SEQ ID NO: 635156 - RNA, 22 nt, Human
auuacaacaagaaaaggguaag

SEQ ID NO: 635157 - RNA, 22 nt, Human
cucagugcugaggaaaguugaa

SEQ ID NO: 635158 - RNA, 22 nt, Human
guuugauuugauccggagagau

SEQ ID NO: 635159 - RNA, 22 nt, Human
acauccacuauccuugcuuguu

SEQ ID NO: 635160 - RNA, 19 nt, Human
acagugcuucugagugagg

SEQ ID NO: 635161 - RNA, 19 nt, Human
agguuucuaacuauucaag

SEQ ID NO: 635162 - RNA, 22 nt, Human
acaguuaucuuugaaauagaga

SEQ ID NO: 635163 - RNA, 22 nt, Human
ugggcccaagagagucuccaac

SEQ ID NO: 635164 - RNA, 22 nt, Human
auugauucucauaggaccaucu

SEQ ID NO: 635165 - RNA, 20 nt, Human
uuauaucauaaugugccaau

SEQ ID NO: 635166 - RNA, 22 nt, Human
gaagcacauggcuauagcuauu

SEQ ID NO: 635167 - RNA, 22 nt, Human
uaauguuuagaagcagacagcu

SEQ ID NO: 635168 - RNA, 22 nt, Human
aaaggccagguuggcugguauu

SEQ ID NO: 635169 - RNA, 22 nt, Human
cuccuggaugcaggcugucugc

SEQ ID NO: 635170 - RNA, 23 nt, Human
acuuccaguuauaggaacucuuc

SEQ ID NO: 635171 - RNA, 22 nt, Human
cuuccucuauguucagguagaa

SEQ ID NO: 635172 - RNA, 20 nt, Human
aaguauauguccguguacuu

SEQ ID NO: 635173 - RNA, 22 nt, Human
cagcacaggaauaugguggaca

SEQ ID NO: 635174 - RNA, 22 nt, Human
cugagcucaagugaucugccca

SEQ ID NO: 635175 - RNA, 22 nt, Human
acacacugcucgcucagauuaa

SEQ ID NO: 635176 - RNA, 22 nt, Human
auaaaguagcuuucagugccaa

SEQ ID NO: 635177 - RNA, 22 nt, Human
gcccuguggacccaggaacucu

SEQ ID NO: 635178 - RNA, 22 nt, Human
cugaggccucucuccugggcuu

SEQ ID NO: 635179 - RNA, 22 nt, Human
auguuaugucugggaaggggua

SEQ ID NO: 635180 - RNA, 21 nt, Human
cagaggcagguccugggacgg

SEQ ID NO: 635181 - RNA, 22 nt, Human
uuggaagggaacaccauuugac

SEQ ID NO: 635182 - RNA, 22 nt, Human
guuagggaagcgcuguguucuu

SEQ ID NO: 635183 - RNA, 22 nt, Human
uuaaggaaagccaaaaugaauu

SEQ ID NO: 635184 - RNA, 22 nt, Human
cuguccuguggaccugaggacg

SEQ ID NO: 635185 - RNA, 22 nt, Human
agucuccacaacagcccugaua

SEQ ID NO: 635186 - RNA, 22 nt, Human
uugauacaugcucuagaguuga

SEQ ID NO: 635187 - RNA, 22 nt, Human
ucaagucauuugacuguguguu

SEQ ID NO: 635188 - RNA, 22 nt, Human
uguugggaucgaaugguggaac

SEQ ID NO: 635189 - RNA, 22 nt, Human
aguguguguuugggcgguuuau

SEQ ID NO: 635190 - RNA, 22 nt, Human
gcccucuguuauugcauccuua

SEQ ID NO: 635191 - RNA, 22 nt, Human
auguagaaauuaggaugauagu

SEQ ID NO: 635192 - RNA, 22 nt, Human
ggucaggguuccagguaucuuc

SEQ ID NO: 635193 - RNA, 22 nt, Human
cauccugaaagaaacauuuccu

SEQ ID NO: 635194 - RNA, 22 nt, Human
agaggccucuagggccccucag

SEQ ID NO: 635195 - RNA, 22 nt, Human
gucauauuggcuccacuuccuc

SEQ ID NO: 635196 - RNA, 22 nt, Human
acagcagaccacuacuaguagg

SEQ ID NO: 635197 - RNA, 22 nt, Human
acuguaacacucauacugaagu

SEQ ID NO: 635198 - RNA, 22 nt, Human
uaguuuaugcugcugcagugag

SEQ ID NO: 635199 - RNA, 22 nt, Human
guuagggagucagguggcucuu

SEQ ID NO: 635200 - RNA, 22 nt, Human
cugggccuuaugaguaccugga

SEQ ID NO: 635201 - RNA, 22 nt, Human
gguucacagguccugggagcag

SEQ ID NO: 635202 - RNA, 22 nt, Human
gccagcagcugugggguggcca

SEQ ID NO: 635203 - RNA, 22 nt, Human
aagugcauaauaacucccaagu

SEQ ID NO: 635204 - RNA, 22 nt, Human
agugugggggcuuuggugucac

SEQ ID NO: 635205 - RNA, 23 nt, Human
agggagcuaaaaggcuggagcag

SEQ ID NO: 635206 - RNA, 22 nt, Human
uuauguacucugcaauguuuga

SEQ ID NO: 635207 - RNA, 22 nt, Human
aaagccagaguguguuagagac

SEQ ID NO: 635208 - RNA, 22 nt, Human
uguuuaauuucacaaaguugac

SEQ ID NO: 635209 - RNA, 19 nt, Human
ggccuuucaccuggaugcu

SEQ ID NO: 635210 - RNA, 22 nt, Human
ucacugcuucuuggagaauguc

SEQ ID NO: 635211 - RNA, 22 nt, Human
aacuacaggggguggcaggcgg

SEQ ID NO: 635212 - RNA, 22 nt, Human
ggugagugucaaugguuagagu

SEQ ID NO: 635213 - RNA, 22 nt, Human
gcagacacuuuuauucugcaua

SEQ ID NO: 635214 - RNA, 22 nt, Human
ugagccagucucucagaacccu

SEQ ID NO: 635215 - RNA, 19 nt, Human
uguggucucuguucucagg

SEQ ID NO: 635216 - RNA, 22 nt, Human
aaguaaaacacacaguccaccg

SEQ ID NO: 635217 - RNA, 22 nt, Human
cugcccccaggcugcauggcug

SEQ ID NO: 635218 - RNA, 22 nt, Human
aucucguuuugagaacuguguu

SEQ ID NO: 635219 - RNA, 22 nt, Human
ggcuauggcaaagaacucagau

SEQ ID NO: 635220 - RNA, 22 nt, Human
ucagaggacgcacuaggguugu

SEQ ID NO: 635221 - RNA, 22 nt, Human
aucagcaagauguaauuucuau

SEQ ID NO: 635222 - RNA, 22 nt, Human
aaauguccugagauucaacuua

SEQ ID NO: 635223 - RNA, 22 nt, Human
aauuuggcagugucuugaagua

SEQ ID NO: 635224 - RNA, 22 nt, Human
aauuccuuuggaucuucuggag

SEQ ID NO: 635225 - RNA, 22 nt, Human
cugugcugagugaugugacuua

SEQ ID NO: 635226 - RNA, 19 nt, Human
ugguccagcuucuucuccu

SEQ ID NO: 635227 - RNA, 22 nt, Human
augcaacaauguauuuauguau

SEQ ID NO: 635228 - RNA, 18 nt, Human
ggacacagauagguacag

SEQ ID NO: 635229 - RNA, 22 nt, Human
uuuaccacagaaaaaaguaacu

SEQ ID NO: 635230 - RNA, 22 nt, Human
cacaaugugguuugucaucuuu

SEQ ID NO: 635231 - RNA, 22 nt, Human
caguuucuguuuuaaauagcag

SEQ ID NO: 635232 - RNA, 22 nt, Human
uaaaugcuuagauucauagaaa

SEQ ID NO: 635233 - RNA, 22 nt, Human
ggagagcaggguccugagauac

SEQ ID NO: 635234 - RNA, 16 nt, Human
ucaguguuccagaaua

SEQ ID NO: 635235 - RNA, 22 nt, Human
uuuacagcauugcugaaaguuc

SEQ ID NO: 635236 - RNA, 22 nt, Human
uugcaagauguuaccauuguua

SEQ ID NO: 635237 - RNA, 22 nt, Human
uagaggugagaggaacuuugga

SEQ ID NO: 635238 - RNA, 22 nt, Human
ccaggcaggcgauggugcagug

SEQ ID NO: 635239 - RNA, 22 nt, Human
aagcgcagacacagagagugga

SEQ ID NO: 635240 - RNA, 19 nt, Human
uagacuuuuccagcaggca

SEQ ID NO: 635241 - RNA, 22 nt, Human
auguaguuuggggcuagauuua

SEQ ID NO: 635242 - RNA, 22 nt, Human
accacuuaucaucacuaucuca

SEQ ID NO: 635243 - RNA, 22 nt, Human
cuugaaagucacaugcagcccu

SEQ ID NO: 635244 - RNA, 22 nt, Human
cugggcaauaugcugggccugg

SEQ ID NO: 635245 - RNA, 22 nt, Human
uauacagauaucuaagauguaa

SEQ ID NO: 635246 - RNA, 22 nt, Human
ccagcugguaagugauggagcc

SEQ ID NO: 635247 - RNA, 22 nt, Human
gaccuggauucaaauucagacu

SEQ ID NO: 635248 - RNA, 22 nt, Human
guacacacuauuuaaaguguuu

SEQ ID NO: 635249 - RNA, 22 nt, Human
cagugaggcucugcugagcggu

SEQ ID NO: 635250 - RNA, 22 nt, Human
guuacaaaggucauaaaagugu

SEQ ID NO: 635251 - RNA, 22 nt, Human
uucggcuucuuagaggcgcucc

SEQ ID NO: 635252 - RNA, 22 nt, Human
gcaggcagagguggaggagaca

SEQ ID NO: 635253 - RNA, 22 nt, Human
acagguggucuuugcuccuuuu

SEQ ID NO: 635254 - RNA, 22 nt, Human
auguuacaauccaacaaaauua

SEQ ID NO: 635255 - RNA, 22 nt, Human
uggcacagugcuggauggugcu

SEQ ID NO: 635256 - RNA, 22 nt, Human
cugauucccuggugccuccguu

SEQ ID NO: 635257 - RNA, 22 nt, Human
uuucaccucagucuuuuuauau

SEQ ID NO: 635258 - RNA, 22 nt, Human
uaugagaaaggagaaugacuuu

SEQ ID NO: 635259 - RNA, 22 nt, Human
ugauuuugagguuucaggucuu

SEQ ID NO: 635260 - RNA, 22 nt, Human
uaauuuuaacugugcuguuugg

SEQ ID NO: 635261 - RNA, 22 nt, Human
gccuggggggcaugucauaaua

SEQ ID NO: 635262 - RNA, 22 nt, Human
ccagguguaggacaccaaggga

SEQ ID NO: 635263 - RNA, 22 nt, Human
uagcuagcugcacaggcccugg

SEQ ID NO: 635264 - RNA, 22 nt, Human
gcucugggguuggaaagugauc

SEQ ID NO: 635265 - RNA, 22 nt, Human
ugguuucacggagugccuugcu

SEQ ID NO: 635266 - RNA, 22 nt, Human
gcccaugcacuuucugugaugg

SEQ ID NO: 635267 - RNA, 22 nt, Human
ucacauucuagaauguuaucgu

SEQ ID NO: 635268 - RNA, 22 nt, Human
auacaugugucccugauuuauu

SEQ ID NO: 635269 - RNA, 21 nt, Human
uucaggacaggaaaaacaggg

SEQ ID NO: 635270 - RNA, 22 nt, Human
acacagagugguuuguagaaua

SEQ ID NO: 635271 - RNA, 22 nt, Human
uggaaagugagacauauuuaua

SEQ ID NO: 635272 - RNA, 22 nt, Human
uucagggcagagaguucaggga

SEQ ID NO: 635273 - RNA, 22 nt, Human
aucauucuauuguugagcugcc

SEQ ID NO: 635274 - RNA, 22 nt, Human
gcccauggacacccaagugcca

SEQ ID NO: 635275 - RNA, 22 nt, Human
aaguuacagucagagguuaaca

SEQ ID NO: 635276 - RNA, 22 nt, Human
aguguauuaugcagcggagguc

SEQ ID NO: 635277 - RNA, 22 nt, Human
caggcucaaggcugacuuccau

SEQ ID NO: 635278 - RNA, 22 nt, Human
aguguuuagugaugaaagagaa

SEQ ID NO: 635279 - RNA, 22 nt, Human
uacaaugugugcuucuugucac

SEQ ID NO: 635280 - RNA, 22 nt, Human
ucagccuuguggcccugcucca

SEQ ID NO: 635281 - RNA, 22 nt, Human
uuauguuaugaauggaugaucu

SEQ ID NO: 635282 - RNA, 22 nt, Human
agauuuaaagcaguauucgcaa

SEQ ID NO: 635283 - RNA, 22 nt, Human
uacaagagacaccagggaggcu

SEQ ID NO: 635284 - RNA, 22 nt, Human
uggugcaguagagcugucuggg

SEQ ID NO: 635285 - RNA, 16 nt, Human
ccaccugcagcucuca

SEQ ID NO: 635286 - RNA, 22 nt, Human
aaugucauugguaaagauuagg

SEQ ID NO: 635287 - RNA, 23 nt, Human
ucugcuucuguauuuuuucccau

SEQ ID NO: 635288 - RNA, 22 nt, Human
ugggaggucucuugcggccuag

SEQ ID NO: 635289 - RNA, 22 nt, Human
agcucugagaaaguuagaaagu

SEQ ID NO: 635290 - RNA, 22 nt, Human
uuuaguuugauguucuacuccu

SEQ ID NO: 635291 - RNA, 22 nt, Human
auggauaagucaaagaguaucc

SEQ ID NO: 635292 - RNA, 20 nt, Human
agcugaggcaccugagguua

SEQ ID NO: 635293 - RNA, 22 nt, Human
ugggaagacuccucaggaggcg

SEQ ID NO: 635294 - RNA, 22 nt, Human
gacaaaacugagaucacacugu

SEQ ID NO: 635295 - RNA, 22 nt, Human
ucucacagugagccugaggucg

SEQ ID NO: 635296 - RNA, 22 nt, Human
agucccagcuacucaagaggcu

SEQ ID NO: 635297 - RNA, 22 nt, Human
aaaacauucugugaacucucaa

SEQ ID NO: 635298 - RNA, 22 nt, Human
ugcugcagaucagcugaguccu

SEQ ID NO: 635299 - RNA, 22 nt, Human
guuucacaugaaacuuggggaa

SEQ ID NO: 635300 - RNA, 22 nt, Human
auaaagaccaguaucuuauguu

SEQ ID NO: 635301 - RNA, 22 nt, Human
acuggaaaugagaugauaucag

SEQ ID NO: 635302 - RNA, 22 nt, Human
ggcugugcuugguguccuugga

SEQ ID NO: 635303 - RNA, 22 nt, Human
ggaggagggguuuacauuggaa

SEQ ID NO: 635304 - RNA, 22 nt, Human
augggcugggaucugaguguca

SEQ ID NO: 635305 - RNA, 21 nt, Human
gcacucagucacuacucaaga

SEQ ID NO: 635306 - RNA, 22 nt, Human
aaaucucaguguucuaagcauu

SEQ ID NO: 635307 - RNA, 22 nt, Human
ccuaggagagggaaaaucuagg

SEQ ID NO: 635308 - RNA, 22 nt, Human
gggcacugggucuucuccacgc

SEQ ID NO: 635309 - RNA, 22 nt, Human
ucuggaggcucugagggugagu

SEQ ID NO: 635310 - RNA, 22 nt, Human
ggucacugucuucugggcucug

SEQ ID NO: 635311 - RNA, 22 nt, Human
caggaagggggauccuuggaag

SEQ ID NO: 635312 - RNA, 22 nt, Human
ggacuggguaggagcccagggc

SEQ ID NO: 635313 - RNA, 22 nt, Human
uguggcagagagagcuuccuug

SEQ ID NO: 635314 - RNA, 22 nt, Human
uaacacugugguguucuuuguc

SEQ ID NO: 635315 - RNA, 22 nt, Human
uuggaggaggcauuggaggauu

SEQ ID NO: 635316 - RNA, 22 nt, Human
gugaaaaaucaucaugacuuga

SEQ ID NO: 635317 - RNA, 20 nt, Human
acaugcacguguguauauau

SEQ ID NO: 635318 - RNA, 18 nt, Human
agcugcuugcaggccuuc

SEQ ID NO: 635319 - RNA, 22 nt, Human
caggcucuuuugguggcaagga

SEQ ID NO: 635320 - RNA, 22 nt, Human
uggugccuccagcugcuucucc

SEQ ID NO: 635321 - RNA, 22 nt, Human
uucuagggaaugggaugaggau

SEQ ID NO: 635322 - RNA, 22 nt, Human
uacagggacucccgcagagaua

SEQ ID NO: 635323 - RNA, 22 nt, Human
cacaggagagguuaaugggggc

SEQ ID NO: 635324 - RNA, 22 nt, Human
uuccagcuaacucacaucccuu

SEQ ID NO: 635325 - RNA, 22 nt, Human
ucccuccacaccugcugguacc

SEQ ID NO: 635326 - RNA, 22 nt, Human
cugaggcacugguaaugggcau

SEQ ID NO: 635327 - RNA, 22 nt, Human
ggagggacccacucuagaggug

SEQ ID NO: 635328 - RNA, 22 nt, Human
augaaucaaacuguacacugag

SEQ ID NO: 635329 - RNA, 23 nt, Human
aaagaugugaguauucauauggc

SEQ ID NO: 635330 - RNA, 22 nt, Human
cacaggaaaugauucugcagca

SEQ ID NO: 635331 - RNA, 22 nt, Human
caguaguguugcugagugucag

SEQ ID NO: 635332 - RNA, 22 nt, Human
agggagaacaguugcagcagac

SEQ ID NO: 635333 - RNA, 22 nt, Human
ucugggggaggaggcauggccc

SEQ ID NO: 635334 - RNA, 22 nt, Human
cuggggcaucugacagauaaau

SEQ ID NO: 635335 - RNA, 22 nt, Human
gcugcugucuggucugagggcu

SEQ ID NO: 635336 - RNA, 22 nt, Human
aggggcugccuggcuuggcacu

SEQ ID NO: 635337 - RNA, 22 nt, Human
cuggugucugcucccucacagc

SEQ ID NO: 635338 - RNA, 22 nt, Human
ggaagaagcagggcauuugaau

SEQ ID NO: 635339 - RNA, 22 nt, Human
cucugugucagcugggugugca

SEQ ID NO: 635340 - RNA, 22 nt, Human
ugucaccaugccagcuucugcc

SEQ ID NO: 635341 - RNA, 22 nt, Human
ugggcacagaauagauggccca

SEQ ID NO: 635342 - RNA, 22 nt, Human
agagcuggggcucuggguuuaa

SEQ ID NO: 635343 - RNA, 22 nt, Human
agcagguguuagggauccaaug

SEQ ID NO: 635344 - RNA, 22 nt, Human
ucauaauacaaagaguucugca

SEQ ID NO: 635345 - RNA, 23 nt, Human
ugucauugugacuacagaaccag

SEQ ID NO: 635346 - RNA, 22 nt, Human
uggagucaguggcuauugggca

SEQ ID NO: 635347 - RNA, 22 nt, Human
caaugcaugauggaauugccuu

SEQ ID NO: 635348 - RNA, 22 nt, Human
augaggcaucuaacauugcaaa

SEQ ID NO: 635349 - RNA, 22 nt, Human
ugaagaacgugagauccagaaa

SEQ ID NO: 635350 - RNA, 22 nt, Human
gggcaggaacaaaucaaaugau

SEQ ID NO: 635351 - RNA, 20 nt, Human
uggagguggucugcuguccu

SEQ ID NO: 635352 - RNA, 22 nt, Human
guauacaacuauuguuggguaa

SEQ ID NO: 635353 - RNA, 22 nt, Human
ucuuuccauggccacacagucu

SEQ ID NO: 635354 - RNA, 22 nt, Human
ucuggaucucccucauccuggg

SEQ ID NO: 635355 - RNA, 22 nt, Human
ugggccugggucuuugcugcca

SEQ ID NO: 635356 - RNA, 22 nt, Human
gagaggcuuaagggcugugaag

SEQ ID NO: 635357 - RNA, 22 nt, Human
cucuucuugucucugguuagaa

SEQ ID NO: 635358 - RNA, 22 nt, Human
uucuguauuucaaugucuuuau

SEQ ID NO: 635359 - RNA, 22 nt, Human
uggaaccaucaaagagauccug

SEQ ID NO: 635360 - RNA, 22 nt, Human
accagggcaaauguuuguacuc

SEQ ID NO: 635361 - RNA, 20 nt, Human
ucaagacagacauggaguuu

SEQ ID NO: 635362 - RNA, 22 nt, Human
uugcuuuaggauuuaaguggca

SEQ ID NO: 635363 - RNA, 22 nt, Human
agagccugugggagaugcagcu

SEQ ID NO: 635364 - RNA, 22 nt, Human
guugaaagaugucuugguuccc

SEQ ID NO: 635365 - RNA, 22 nt, Human
ggccucgcggcuucugguggcu

SEQ ID NO: 635366 - RNA, 22 nt, Human
agcugcccccagggcugugcuu

SEQ ID NO: 635367 - RNA, 22 nt, Human
aacccuggcccuggaauaggca

SEQ ID NO: 635368 - RNA, 22 nt, Human
cugaacuucucugagccucagu

SEQ ID NO: 635369 - RNA, 22 nt, Human
agagacuggcuucuaaaauggc

SEQ ID NO: 635370 - RNA, 22 nt, Human
accugaggaagggcgagaagcu

SEQ ID NO: 635371 - RNA, 20 nt, Human
aucugggcaucaauuuugug

SEQ ID NO: 635372 - RNA, 22 nt, Human
ccccucuugugggcucagguca

SEQ ID NO: 635373 - RNA, 22 nt, Human
cgcuuuggagucccugcuuuac

SEQ ID NO: 635374 - RNA, 22 nt, Human
cucugcuuuuuaaaaggagucc

SEQ ID NO: 635375 - RNA, 22 nt, Human
acaggaaccaggcaggucgauu

SEQ ID NO: 635376 - RNA, 21 nt, Human
caaucacuuuugcaccaagcu

SEQ ID NO: 635377 - RNA, 22 nt, Human
agguuacagucaucucagaauc

SEQ ID NO: 635378 - RNA, 22 nt, Human
guacauuuaggauucauugaaa

SEQ ID NO: 635379 - RNA, 22 nt, Human
gugggcaguuggugauucucgu

SEQ ID NO: 635380 - RNA, 22 nt, Human
ggucccaggaagugcggcggcg

SEQ ID NO: 635381 - RNA, 22 nt, Human
uaacuuuucuaggugugauaau

SEQ ID NO: 635382 - RNA, 22 nt, Human
cuucagcccagccuccgccucc

SEQ ID NO: 635383 - RNA, 22 nt, Human
ugagccaggaguuugaggcugu

SEQ ID NO: 635384 - RNA, 22 nt, Human
gugagguccaguaacuugucca

SEQ ID NO: 635385 - RNA, 22 nt, Human
uauguauucugaguacaaguuc

SEQ ID NO: 635386 - RNA, 19 nt, Human
uacaggaggccugcaaucu

SEQ ID NO: 635387 - RNA, 20 nt, Human
ucaggcuggugggcuuuccc

SEQ ID NO: 635388 - RNA, 22 nt, Human
agcccugccauucucuggagcu

SEQ ID NO: 635389 - RNA, 21 nt, Human
aaauacagaugcaaaucuguu

SEQ ID NO: 635390 - RNA, 22 nt, Human
uucuucaaacaaaaguggcaug

SEQ ID NO: 635391 - RNA, 22 nt, Human
caggccucuauggucagcugag

SEQ ID NO: 635392 - RNA, 22 nt, Human
gaacuagaauguucugauggag

SEQ ID NO: 635393 - RNA, 22 nt, Human
cugggcucuguguuucaguuuc

SEQ ID NO: 635394 - RNA, 22 nt, Human
ugugcgugguucccggggccau

SEQ ID NO: 635395 - RNA, 22 nt, Human
agagccuuuggagcugcuauua

SEQ ID NO: 635396 - RNA, 21 nt, Human
ugcuggugagcucauguggcu

SEQ ID NO: 635397 - RNA, 22 nt, Human
ucaguggagagcuuccaggauu

SEQ ID NO: 635398 - RNA, 22 nt, Human
auugucuuguacguuugccugu

SEQ ID NO: 635399 - RNA, 22 nt, Human
uccuguggucauucuucugccc

SEQ ID NO: 635400 - RNA, 17 nt, Human
uguuuucauucauugcu

SEQ ID NO: 635401 - RNA, 22 nt, Human
uuugucaaucccuugaaaaccu

SEQ ID NO: 635402 - RNA, 23 nt, Human
guuguaauggauaaugcaaauug

SEQ ID NO: 635403 - RNA, 22 nt, Human
ucauucuggaugacuuucuaga

SEQ ID NO: 635404 - RNA, 22 nt, Human
gggaaguuugugggaggaauau

SEQ ID NO: 635405 - RNA, 20 nt, Human
agggucagagagcgugagug

SEQ ID NO: 635406 - RNA, 22 nt, Human
accuggagauccauggugucga

SEQ ID NO: 635407 - RNA, 22 nt, Human
uuuauccagaaucaggauuuuu

SEQ ID NO: 635408 - RNA, 22 nt, Human
gcccucagaguuccccacagug

SEQ ID NO: 635409 - RNA, 22 nt, Human
gauucacaacugcccugaaggg

SEQ ID NO: 635410 - RNA, 22 nt, Human
guuucagaacaccccauuuggg

SEQ ID NO: 635411 - RNA, 22 nt, Human
gugagaaauggaacuucauacg

SEQ ID NO: 635412 - RNA, 22 nt, Human
gggccuggugcuucugacuccu

SEQ ID NO: 635413 - RNA, 22 nt, Human
ucucccaggucauacacagaga

SEQ ID NO: 635414 - RNA, 22 nt, Human
cauuuggaaagagacuagagaa

SEQ ID NO: 635415 - RNA, 22 nt, Human
acagaguacagacaaaggucag

SEQ ID NO: 635416 - RNA, 22 nt, Human
caugcacaagggaugaugaaau

SEQ ID NO: 635417 - RNA, 22 nt, Human
uuucucuuugacaggaaucaga

SEQ ID NO: 635418 - RNA, 22 nt, Human
uugaaggaggcgaaaauugguc

SEQ ID NO: 635419 - RNA, 22 nt, Human
caggcagagccaaucguggggu

SEQ ID NO: 635420 - RNA, 22 nt, Human
aaagucugaaagauaagaguga

SEQ ID NO: 635421 - RNA, 22 nt, Human
aaugucuuaaagucguguuaca

SEQ ID NO: 635422 - RNA, 22 nt, Human
cgcuuaauuuucuauagaaaag

SEQ ID NO: 635423 - RNA, 22 nt, Human
cuacauggagaagaaaauucuu

SEQ ID NO: 635424 - RNA, 22 nt, Human
cugcacaguggacagugaagau

SEQ ID NO: 635425 - RNA, 22 nt, Human
auguacauguuuaagugaagga

SEQ ID NO: 635426 - RNA, 22 nt, Human
accaggcaguauggugcugcaa

SEQ ID NO: 635427 - RNA, 22 nt, Human
acuucucuucauagguggcaau

SEQ ID NO: 635428 - RNA, 22 nt, Human
cugucccaggauccugacucca

SEQ ID NO: 635429 - RNA, 20 nt, Human
ugggccugagccugugggcu

SEQ ID NO: 635430 - RNA, 22 nt, Human
ccacaggaggauguucagacaa

SEQ ID NO: 635431 - RNA, 22 nt, Human
ucugcuguaaagaauuucugcc

SEQ ID NO: 635432 - RNA, 22 nt, Human
gggggcaggucuggaacuuuga

SEQ ID NO: 635433 - RNA, 22 nt, Human
auuaacaugaguuggagauagg

SEQ ID NO: 635434 - RNA, 22 nt, Human
caggcauggugagaacucagcc

SEQ ID NO: 635435 - RNA, 22 nt, Human
aaaucuagaaguuuaaaaggau

SEQ ID NO: 635436 - RNA, 22 nt, Human
aagccaaugauacgggugaucu

SEQ ID NO: 635437 - RNA, 22 nt, Human
uauagcaucuaggaugauugca

SEQ ID NO: 635438 - RNA, 22 nt, Human
uuacaguaugaucaacuuuuca

SEQ ID NO: 635439 - RNA, 23 nt, Human
uugcacaguuucggaaacugagg

SEQ ID NO: 635440 - RNA, 22 nt, Human
ugagaccuuggggagcccuguu

SEQ ID NO: 635441 - RNA, 22 nt, Human
cuccugucaauaggcuccuggc

SEQ ID NO: 635442 - RNA, 22 nt, Human
uuuguauaagaacauucuagca

SEQ ID NO: 635443 - RNA, 22 nt, Human
cucuuaaagcuuccaguuucaa

SEQ ID NO: 635444 - RNA, 19 nt, Human
auguuuacacucaggggcu

SEQ ID NO: 635445 - RNA, 22 nt, Human
uacuuccuguuuccaugucugu

SEQ ID NO: 635446 - RNA, 22 nt, Human
cuaaucaucuuucucuuaaagc

SEQ ID NO: 635447 - RNA, 22 nt, Human
auggcagccuguggacagucaa

SEQ ID NO: 635448 - RNA, 22 nt, Human
guuuuucuaggaccaugugauu

SEQ ID NO: 635449 - RNA, 22 nt, Human
uggcaaggaagagccuggugca

SEQ ID NO: 635450 - RNA, 22 nt, Human
auuuaugacguguucggucaau

SEQ ID NO: 635451 - RNA, 22 nt, Human
gggggcaguaaggauauggaaa

SEQ ID NO: 635452 - RNA, 22 nt, Human
aacagucuaaauuauacccuuu

SEQ ID NO: 635453 - RNA, 22 nt, Human
cuucugauuagcaaguuuguau

SEQ ID NO: 635454 - RNA, 22 nt, Human
gaucauuugcaggaaacauuaa

SEQ ID NO: 635455 - RNA, 22 nt, Human
uuccaugugaguacacugugau

SEQ ID NO: 635456 - RNA, 22 nt, Human
aggcuagggccauggcugguga

SEQ ID NO: 635457 - RNA, 22 nt, Human
cagcuguugaucucuuaagccu

SEQ ID NO: 635458 - RNA, 22 nt, Human
augcuauaaacucuaggucauu

SEQ ID NO: 635459 - RNA, 22 nt, Human
uagacagaauccagcccacgcc

SEQ ID NO: 635460 - RNA, 22 nt, Human
uuggaaauacagcaguuacuuu

SEQ ID NO: 635461 - RNA, 22 nt, Human
cccaggaguuugaguucagcau

SEQ ID NO: 635462 - RNA, 22 nt, Human
acagaggguuucuaaggauuug

SEQ ID NO: 635463 - RNA, 22 nt, Human
uagaaguucaugcgaauuauuu

SEQ ID NO: 635464 - RNA, 22 nt, Human
aaaaccuucuagacuuuauauu

SEQ ID NO: 635465 - RNA, 22 nt, Human
ugcaugcaugcuacugggaggu

SEQ ID NO: 635466 - RNA, 22 nt, Human
cuggaucuguuugugcuugugg

SEQ ID NO: 635467 - RNA, 22 nt, Human
aaugaacuccgaacauuuacau

SEQ ID NO: 635468 - RNA, 22 nt, Human
ggccagcucaggguccuugggc

SEQ ID NO: 635469 - RNA, 22 nt, Human
ugucuccaaaacaaucucagau

SEQ ID NO: 635470 - RNA, 22 nt, Human
agcaggcugcuggcguugaagu

SEQ ID NO: 635471 - RNA, 22 nt, Human
ucucugggaaugggccugggua

SEQ ID NO: 635472 - RNA, 22 nt, Human
uaugguuauguaaucaguuguu

SEQ ID NO: 635473 - RNA, 22 nt, Human
gggcagugucuggcccccaggc

SEQ ID NO: 635474 - RNA, 22 nt, Human
guuaaugucacuuuauguggcu

SEQ ID NO: 635475 - RNA, 22 nt, Human
caggcucccuucucggaauucu

SEQ ID NO: 635476 - RNA, 22 nt, Human
uccucacagggcaggaaggagg

SEQ ID NO: 635477 - RNA, 22 nt, Human
caagagcuuuagaaaugcucau

SEQ ID NO: 635478 - RNA, 23 nt, Human
ugaagcauggauaacucacaccu

SEQ ID NO: 635479 - RNA, 18 nt, Human
cauuaugugguuauagaa

SEQ ID NO: 635480 - RNA, 22 nt, Human
uccugccuucauacugcuguau

SEQ ID NO: 635481 - RNA, 22 nt, Human
uaaggacauuagaaaugaugcu

SEQ ID NO: 635482 - RNA, 22 nt, Human
agccuuagauuugggcaagaac

SEQ ID NO: 635483 - RNA, 22 nt, Human
gaagauuucaguuaaguaucua

SEQ ID NO: 635484 - RNA, 20 nt, Human
acaguccugcacugguguuu

SEQ ID NO: 635485 - RNA, 20 nt, Human
uuucacuguggugcuggaga

SEQ ID NO: 635486 - RNA, 23 nt, Human
aaucagcaugcucuguggcuggc

SEQ ID NO: 635487 - RNA, 22 nt, Human
gagaauguggagccugugguug

SEQ ID NO: 635488 - RNA, 22 nt, Human
auuauuuauccucuuggucuau

SEQ ID NO: 635489 - RNA, 20 nt, Human
agguccuguuccuugucucc

SEQ ID NO: 635490 - RNA, 22 nt, Human
cuacagaaucuaccucaagcca

SEQ ID NO: 635491 - RNA, 22 nt, Human
cauggcaauuucauaaacaggu

SEQ ID NO: 635492 - RNA, 22 nt, Human
uacuuuauuguaaaugcugaug

SEQ ID NO: 635493 - RNA, 22 nt, Human
uaaguucaagucuuggauauaa

SEQ ID NO: 635494 - RNA, 22 nt, Human
acauucucauuuggugaucauu

SEQ ID NO: 635495 - RNA, 22 nt, Human
uggcugccugaaugcaagacag

SEQ ID NO: 635496 - RNA, 22 nt, Human
ucagagaauguccuucuucauu

SEQ ID NO: 635497 - RNA, 22 nt, Human
cugucuuuaguacaaaaaaugu

SEQ ID NO: 635498 - RNA, 22 nt, Human
uucaacauuugaaaugaaugaa

SEQ ID NO: 635499 - RNA, 22 nt, Human
ucacagccuggacaguugccug

SEQ ID NO: 635500 - RNA, 22 nt, Human
gaggggcugcccuggugucagg

SEQ ID NO: 635501 - RNA, 19 nt, Human
ugugguuucccggcggccu

SEQ ID NO: 635502 - RNA, 22 nt, Human
aggugaguugguaggaaguuug

SEQ ID NO: 635503 - RNA, 20 nt, Human
aagagcccgcagggcagugc

SEQ ID NO: 635504 - RNA, 22 nt, Human
gaaugauaaauggaagcagcau

SEQ ID NO: 635505 - RNA, 22 nt, Human
acugagguagggcacaccuagg

SEQ ID NO: 635506 - RNA, 22 nt, Human
uuucaagagcaggaaaaagguc

SEQ ID NO: 635507 - RNA, 22 nt, Human
cagggccuucguaaguguccgg

SEQ ID NO: 635508 - RNA, 22 nt, Human
aaugccaucagagaaaacucuu

SEQ ID NO: 635509 - RNA, 22 nt, Human
gcucugcuaauauuguaguacc

SEQ ID NO: 635510 - RNA, 23 nt, Human
agagggagauguuuuucucaaga

SEQ ID NO: 635511 - RNA, 22 nt, Human
cuuuauucugcaaauugccuug

SEQ ID NO: 635512 - RNA, 18 nt, Human
cagagcagagguggagcg

SEQ ID NO: 635513 - RNA, 22 nt, Human
agugucugcuagguucaucaac

SEQ ID NO: 635514 - RNA, 22 nt, Human
ucuagacaucuuggcugcaauu

SEQ ID NO: 635515 - RNA, 22 nt, Human
ugaguggguuaucaggaaaggu

SEQ ID NO: 635516 - RNA, 22 nt, Human
aggcagccuauggggagcucag

SEQ ID NO: 635517 - RNA, 20 nt, Human
agucucuguagugccugaga

SEQ ID NO: 635518 - RNA, 21 nt, Human
auuucagaaauauugguggga

SEQ ID NO: 635519 - RNA, 22 nt, Human
agggaggaccaaugugugguua

SEQ ID NO: 635520 - RNA, 22 nt, Human
accugaauuugaaauguuuauu

SEQ ID NO: 635521 - RNA, 22 nt, Human
uauucccagccucuuucuaucu

SEQ ID NO: 635522 - RNA, 22 nt, Human
uuauugcaaccuuuucuggugu

SEQ ID NO: 635523 - RNA, 21 nt, Human
uccugcagggcagcagagugg

SEQ ID NO: 635524 - RNA, 22 nt, Human
aaguaaaccacagagaagccac

SEQ ID NO: 635525 - RNA, 22 nt, Human
gaaagaccagcaugaggcuuua

SEQ ID NO: 635526 - RNA, 22 nt, Human
aagcacagggacucaggaccgg

SEQ ID NO: 635527 - RNA, 22 nt, Human
uggacucagaaguguucuuuua

SEQ ID NO: 635528 - RNA, 22 nt, Human
acaaacagcuaacauauguuaa

SEQ ID NO: 635529 - RNA, 22 nt, Human
aaucauaauuuugugaauguag

SEQ ID NO: 635530 - RNA, 22 nt, Human
auaauggcaugacaguuauaua

SEQ ID NO: 635531 - RNA, 18 nt, Human
ugaauguuuucuggaccc

SEQ ID NO: 635532 - RNA, 22 nt, Human
aggaacaauugauaaacucaca

SEQ ID NO: 635533 - RNA, 22 nt, Human
aggaggccgcugaugggcuccc

SEQ ID NO: 635534 - RNA, 22 nt, Human
gggggagcuaguccagcugagg

SEQ ID NO: 635535 - RNA, 20 nt, Human
acagauauuugauuuucagu

SEQ ID NO: 635536 - RNA, 22 nt, Human
cuccuggaguccuuuccuauuc

SEQ ID NO: 635537 - RNA, 22 nt, Human
cagauuuaccuaacuccaaguu

SEQ ID NO: 635538 - RNA, 20 nt, Human
acagaauaugcugguugugg

SEQ ID NO: 635539 - RNA, 22 nt, Human
augcaauauagggaagauagau

SEQ ID NO: 635540 - RNA, 22 nt, Human
gaggcaagaaaggacuuucuag

SEQ ID NO: 635541 - RNA, 22 nt, Human
aucacaauguacguuaaaaugu

SEQ ID NO: 635542 - RNA, 22 nt, Human
uagauuuccucuuccucauucc

SEQ ID NO: 635543 - RNA, 22 nt, Human
ccagcccuacaguaucaccugu

SEQ ID NO: 635544 - RNA, 22 nt, Human
aggcugugaugagccucaugga

SEQ ID NO: 635545 - RNA, 22 nt, Human
aguagaaauguaagaaggauua

SEQ ID NO: 635546 - RNA, 22 nt, Human
uggcuccaaaucaacugcuguu

SEQ ID NO: 635547 - RNA, 22 nt, Human
acauuguuccagcgauagagaa

SEQ ID NO: 635548 - RNA, 22 nt, Human
ucuuguccuaagagcuggauuc

SEQ ID NO: 635549 - RNA, 21 nt, Human
cccgcacagcgguaggccgcc

SEQ ID NO: 635550 - RNA, 22 nt, Human
ugcagaaacagaguuuugccau

SEQ ID NO: 635551 - RNA, 22 nt, Human
gaccuggguaaggggcugacaa

SEQ ID NO: 635552 - RNA, 22 nt, Human
uccugaaaauaauuucacaaga

SEQ ID NO: 635553 - RNA, 22 nt, Human
gaggauguaaaauagacaaaau

SEQ ID NO: 635554 - RNA, 22 nt, Human
aaauggaucuguggaauacauu

SEQ ID NO: 635555 - RNA, 22 nt, Human
uuucucuuucaaucugcaguac

SEQ ID NO: 635556 - RNA, 22 nt, Human
gacacauagaucuaucucacuc

SEQ ID NO: 635557 - RNA, 22 nt, Human
ggcaccaggaucagucugucau

SEQ ID NO: 635558 - RNA, 22 nt, Human
uguuuucacaaugaugucagau

SEQ ID NO: 635559 - RNA, 22 nt, Human
cagguggcugagcugaccuuug

SEQ ID NO: 635560 - RNA, 22 nt, Human
cacagggcuaaaugaaggguug

SEQ ID NO: 635561 - RNA, 22 nt, Human
caguggagaggcaugcuuggca

SEQ ID NO: 635562 - RNA, 22 nt, Human
ucagcuuucucaaagaagcugg

SEQ ID NO: 635563 - RNA, 22 nt, Human
augggaguuuucucugaugcuc

SEQ ID NO: 635564 - RNA, 22 nt, Human
gcugaagagagaugcguccagc

SEQ ID NO: 635565 - RNA, 22 nt, Human
aaggccugcucagcugucugug

SEQ ID NO: 635566 - RNA, 22 nt, Human
cuguggcauugugaggacugca

SEQ ID NO: 635567 - RNA, 22 nt, Human
uaucuuggcuugaaagaugcuu

SEQ ID NO: 635568 - RNA, 22 nt, Human
uucuggggccaauugccacugc

SEQ ID NO: 635569 - RNA, 22 nt, Human
agauccaugugauuuggaguuc

SEQ ID NO: 635570 - RNA, 22 nt, Human
agaaacagaagggaaagcuuuu

SEQ ID NO: 635571 - RNA, 22 nt, Human
uugacuguacaaccuuuuguag

SEQ ID NO: 635572 - RNA, 18 nt, Human
uucagagucuggugagga

SEQ ID NO: 635573 - RNA, 22 nt, Human
gaguggggcuuuaaaggcucag

SEQ ID NO: 635574 - RNA, 22 nt, Human
aggaggaggugggacacaguga

SEQ ID NO: 635575 - RNA, 22 nt, Human
ugcccucugcaggccgccaugg

SEQ ID NO: 635576 - RNA, 17 nt, Human
ugagaaguaggcaucau

SEQ ID NO: 635577 - RNA, 22 nt, Human
guuuccaucuccaggacauaau

SEQ ID NO: 635578 - RNA, 21 nt, Human
uggcucgauuuauagcauuuc

SEQ ID NO: 635579 - RNA, 22 nt, Human
uugcuuuacaaaaauugauggu

SEQ ID NO: 635580 - RNA, 22 nt, Human
agguuucugcuguccuccuucu

SEQ ID NO: 635581 - RNA, 22 nt, Human
cugagccaaggggacagugaca

SEQ ID NO: 635582 - RNA, 17 nt, Human
ucuguucaagugagagg

SEQ ID NO: 635583 - RNA, 21 nt, Human
agacagcagucuccaaacccc

SEQ ID NO: 635584 - RNA, 22 nt, Human
caaagcaccacaaaccagguga

SEQ ID NO: 635585 - RNA, 22 nt, Human
ugcuacacucaaucagugcuau

SEQ ID NO: 635586 - RNA, 22 nt, Human
agagcagucaggcuaggacacu

SEQ ID NO: 635587 - RNA, 22 nt, Human
uagcauuucacugaucuucacu

SEQ ID NO: 635588 - RNA, 22 nt, Human
auugacaagacaauggcucuua

SEQ ID NO: 635589 - RNA, 22 nt, Human
gcucugccucuuugcugcguca

SEQ ID NO: 635590 - RNA, 22 nt, Human
gcauuagaaacuauugcugcaa

SEQ ID NO: 635591 - RNA, 22 nt, Human
uauuccuggucccuaccacaga

SEQ ID NO: 635592 - RNA, 22 nt, Human
aagauugacggcuuugagugcu

SEQ ID NO: 635593 - RNA, 23 nt, Human
ggcuggcccggggcugcuccuga

SEQ ID NO: 635594 - RNA, 22 nt, Human
auuuagucaucacucauguguu

SEQ ID NO: 635595 - RNA, 22 nt, Human
uggcaggcugaguuggccuggu

SEQ ID NO: 635596 - RNA, 22 nt, Human
aagcacaucuccugugcagaac

SEQ ID NO: 635597 - RNA, 22 nt, Human
uauguagaagcugcucaaagaa

SEQ ID NO: 635598 - RNA, 22 nt, Human
ugccccucuugcuggcccuguc

SEQ ID NO: 635599 - RNA, 22 nt, Human
aacuacaguauguccaaagaau

SEQ ID NO: 635600 - RNA, 22 nt, Human
aagaggcuggaggauacugcgc

SEQ ID NO: 635601 - RNA, 22 nt, Human
ucucagaguuuuuuuccaggac

SEQ ID NO: 635602 - RNA, 22 nt, Human
ggguggaggagaacaggcccca

SEQ ID NO: 635603 - RNA, 22 nt, Human
cuccagagguucucaucuggga

SEQ ID NO: 635604 - RNA, 22 nt, Human
auggaagggacagaagggcaag

SEQ ID NO: 635605 - RNA, 22 nt, Human
cauagaauguaauaaagaguag

SEQ ID NO: 635606 - RNA, 22 nt, Human
cagcagacuggaguaggcagug

SEQ ID NO: 635607 - RNA, 22 nt, Human
ccaggaacucagcucugcacuu

SEQ ID NO: 635608 - RNA, 22 nt, Human
aggauggcgauucgagcaccuc

SEQ ID NO: 635609 - RNA, 22 nt, Human
uauguacuacacuagaacauuu

SEQ ID NO: 635610 - RNA, 22 nt, Human
auguggauggaagucagauagc

SEQ ID NO: 635611 - RNA, 22 nt, Human
acauacaugggauuaaaaaauu

SEQ ID NO: 635612 - RNA, 22 nt, Human
ucucuguacaguacaugccgug

SEQ ID NO: 635613 - RNA, 22 nt, Human
uugcuucaguagcucuuuaaag

SEQ ID NO: 635614 - RNA, 22 nt, Human
ugucucugaacagcuuacuaaa

SEQ ID NO: 635615 - RNA, 22 nt, Human
acaucaugagagacuuaaauug

SEQ ID NO: 635616 - RNA, 19 nt, Human
ugcauugagggcugucuca

SEQ ID NO: 635617 - RNA, 22 nt, Human
cacuuuauuauaaauuugagag

SEQ ID NO: 635618 - RNA, 22 nt, Human
caguuuauauauaagcacauug

SEQ ID NO: 635619 - RNA, 22 nt, Human
cucagugguugagagccugggc

SEQ ID NO: 635620 - RNA, 22 nt, Human
aggaagaaacugagcucugaca

SEQ ID NO: 635621 - RNA, 22 nt, Human
cagcagcucagucucucaguag

SEQ ID NO: 635622 - RNA, 22 nt, Human
gucccugggucuaaggcaguaa

SEQ ID NO: 635623 - RNA, 22 nt, Human
ugggaaggcagucacuguccua

SEQ ID NO: 635624 - RNA, 22 nt, Human
uaaaucaagaauaucagcuugu

SEQ ID NO: 635625 - RNA, 22 nt, Human
ucugccuguucaagucuucuag

SEQ ID NO: 635626 - RNA, 22 nt, Human
uuucuucuuucccagugauggg

SEQ ID NO: 635627 - RNA, 22 nt, Human
ugucugaauucaagaaauucaa

SEQ ID NO: 635628 - RNA, 20 nt, Human
uuccacaucuuugcacaugc

SEQ ID NO: 635629 - RNA, 22 nt, Human
ccucugugccucguguccucug

SEQ ID NO: 635630 - RNA, 17 nt, Human
ugcuuaauuuugacugg

SEQ ID NO: 635631 - RNA, 22 nt, Human
auaauaacaccugaauaggaaa

SEQ ID NO: 635632 - RNA, 20 nt, Human
agaagcugauacugauggaa

SEQ ID NO: 635633 - RNA, 22 nt, Human
uauuccaacuucacuauugucu

SEQ ID NO: 635634 - RNA, 20 nt, Human
uacuugaauguugcagcagu

SEQ ID NO: 635635 - RNA, 22 nt, Human
agaacugucacgagugacaaag

SEQ ID NO: 635636 - RNA, 21 nt, Human
ugaacucuggucaucuucauu

SEQ ID NO: 635637 - RNA, 17 nt, Human
ugccaagaagagcagag

SEQ ID NO: 635638 - RNA, 22 nt, Human
ugugaaagcaagucuaguucuc

SEQ ID NO: 635639 - RNA, 22 nt, Human
gugcacagauuuaauuuuauuc

SEQ ID NO: 635640 - RNA, 22 nt, Human
uauggcaagaugacauguucuc

SEQ ID NO: 635641 - RNA, 22 nt, Human
uggggccugugacggguccaga

SEQ ID NO: 635642 - RNA, 22 nt, Human
uuaaauuucuacgugauccagg

SEQ ID NO: 635643 - RNA, 22 nt, Human
accguggauuuguagucauuuc

SEQ ID NO: 635644 - RNA, 22 nt, Human
cugggucccggcuucuauccac

SEQ ID NO: 635645 - RNA, 22 nt, Human
aguagauucucauugaucuggu

SEQ ID NO: 635646 - RNA, 22 nt, Human
guguacaguuagccaccaaauu

SEQ ID NO: 635647 - RNA, 22 nt, Human
uccugcaggccagaggggugag

SEQ ID NO: 635648 - RNA, 22 nt, Human
cuacuuuaacauggaggcacuu

SEQ ID NO: 635649 - RNA, 22 nt, Human
cagaggauucccuagugaccug

SEQ ID NO: 635650 - RNA, 22 nt, Human
gucccucaagguccagucaugg

SEQ ID NO: 635651 - RNA, 22 nt, Human
aacugcauuugcauaaguccau

SEQ ID NO: 635652 - RNA, 22 nt, Human
ggcugaagaacugggagucuca

SEQ ID NO: 635653 - RNA, 22 nt, Human
uaggaaaugcuccauugcauaa

SEQ ID NO: 635654 - RNA, 22 nt, Human
agccaggccuuuucucaagguu

SEQ ID NO: 635655 - RNA, 22 nt, Human
aaggcacugagccagccgucuc

SEQ ID NO: 635656 - RNA, 22 nt, Human
acaaagcuagagaagagaauug

SEQ ID NO: 635657 - RNA, 22 nt, Human
caggggcugaaauguugggguu

SEQ ID NO: 635658 - RNA, 22 nt, Human
agggcugccauuucuggcccaa

SEQ ID NO: 635659 - RNA, 22 nt, Human
aggcugugagcaagaacaccua

SEQ ID NO: 635660 - RNA, 22 nt, Human
auguguauauuuggugucaaua

SEQ ID NO: 635661 - RNA, 22 nt, Human
uuuugccugugaauacuaucuu

SEQ ID NO: 635662 - RNA, 22 nt, Human
aggcucagccugggccuagagc

SEQ ID NO: 635663 - RNA, 22 nt, Human
agggggcucagugacugaagug

SEQ ID NO: 635664 - RNA, 23 nt, Human
gggcuccagucucugcucaguug

SEQ ID NO: 635665 - RNA, 21 nt, Human
cuggaagaagcagcaggauuc

SEQ ID NO: 635666 - RNA, 22 nt, Human
ucagggagggaccugaggcugg

SEQ ID NO: 635667 - RNA, 22 nt, Human
cacauaaucaccaaguccuuuc

SEQ ID NO: 635668 - RNA, 22 nt, Human
auuuccuaauuuaugcaggagu

SEQ ID NO: 635669 - RNA, 22 nt, Human
uuucuguagggauuucacaguu

SEQ ID NO: 635670 - RNA, 22 nt, Human
uaaggcaguagugucuguaggg

SEQ ID NO: 635671 - RNA, 22 nt, Human
uugucugugaaauggaaauagu

SEQ ID NO: 635672 - RNA, 22 nt, Human
ucagaaauagucuuuaaaauga

SEQ ID NO: 635673 - RNA, 22 nt, Human
cagaaacuguuuguuaauauuu

SEQ ID NO: 635674 - RNA, 22 nt, Human
gagggagcuggagcagacgccg

SEQ ID NO: 635675 - RNA, 22 nt, Human
uucugcaucucacagccagugc

SEQ ID NO: 635676 - RNA, 18 nt, Human
gcuuucugugcagcggag

SEQ ID NO: 635677 - RNA, 22 nt, Human
ugaaacaaugugaaguugcuga

SEQ ID NO: 635678 - RNA, 22 nt, Human
cagcugagcaucacuagucugg

SEQ ID NO: 635679 - RNA, 22 nt, Human
uuaaagcaaaaacuaggaugga

SEQ ID NO: 635680 - RNA, 22 nt, Human
ggggagcaggcugggcugucug

SEQ ID NO: 635681 - RNA, 22 nt, Human
uuucacauagaaagugauuuac

SEQ ID NO: 635682 - RNA, 22 nt, Human
aaugcauuagcuacauaugucu

SEQ ID NO: 635683 - RNA, 22 nt, Human
agaugguguuuccccaggugga

SEQ ID NO: 635684 - RNA, 19 nt, Human
ccaccccuuugcugggccc

SEQ ID NO: 635685 - RNA, 22 nt, Human
gagcugccggcccacaguacua

SEQ ID NO: 635686 - RNA, 19 nt, Human
gggcagaauggcaucucag

SEQ ID NO: 635687 - RNA, 22 nt, Human
uccaggccuggcuccauucagu

SEQ ID NO: 635688 - RNA, 22 nt, Human
uaggaagaugaguaucaacuug

SEQ ID NO: 635689 - RNA, 22 nt, Human
ccugcaguuuguugugaccccg

SEQ ID NO: 635690 - RNA, 22 nt, Human
gggucccuggaauuacuugaca

SEQ ID NO: 635691 - RNA, 22 nt, Human
uagccaggccuuugaucccggc

SEQ ID NO: 635692 - RNA, 22 nt, Human
gaauguaaaauugccuacaaga

SEQ ID NO: 635693 - RNA, 22 nt, Human
uuuguaaaaggaggaagcaugg

SEQ ID NO: 635694 - RNA, 22 nt, Human
ucucuggcagcuugugcuguug

SEQ ID NO: 635695 - RNA, 19 nt, Human
aggcugugaggggaaggaa

SEQ ID NO: 635696 - RNA, 22 nt, Human
agggcuccgggccaccggccug

SEQ ID NO: 635697 - RNA, 22 nt, Human
uccagggcaccagcgucccccu

SEQ ID NO: 635698 - RNA, 22 nt, Human
acccagagucauggcacuuagc

SEQ ID NO: 635699 - RNA, 22 nt, Human
aaauuccauuaggaaacuucca

SEQ ID NO: 635700 - RNA, 22 nt, Human
ugguugugcugaguuuagugca

SEQ ID NO: 635701 - RNA, 22 nt, Human
cuacuguccauaaaguauaacu

SEQ ID NO: 635702 - RNA, 22 nt, Human
guuuggcacuaugaugaggcua

SEQ ID NO: 635703 - RNA, 22 nt, Human
aaauauagugacacuuauaguc

SEQ ID NO: 635704 - RNA, 22 nt, Human
ucucuggggaugcuuauucuug

SEQ ID NO: 635705 - RNA, 22 nt, Human
ucacagaaguguagugaggaaa

SEQ ID NO: 635706 - RNA, 22 nt, Human
ucugccagaagccagggucugg

SEQ ID NO: 635707 - RNA, 22 nt, Human
acagucugcagggugaacaugu

SEQ ID NO: 635708 - RNA, 22 nt, Human
ccuggcagcuguuuggcuuggc

SEQ ID NO: 635709 - RNA, 22 nt, Human
auguuguguuugacuguuaccc

SEQ ID NO: 635710 - RNA, 22 nt, Human
ccagcuuuccaggguugacugg

SEQ ID NO: 635711 - RNA, 22 nt, Human
uggacaucuuagucaugucaau

SEQ ID NO: 635712 - RNA, 22 nt, Human
cagguauaacgugcauguugua

SEQ ID NO: 635713 - RNA, 22 nt, Human
caugaagcucuugcaccucuag

SEQ ID NO: 635714 - RNA, 21 nt, Human
uccaacaugccugauggugcc

SEQ ID NO: 635715 - RNA, 22 nt, Human
cucaguccuuauuugccucuac

SEQ ID NO: 635716 - RNA, 22 nt, Human
gccgagcacagugcagcugccu

SEQ ID NO: 635717 - RNA, 22 nt, Human
aagcugcagaugugccugugga

SEQ ID NO: 635718 - RNA, 22 nt, Human
acagaauuuuuacacaggguaa

SEQ ID NO: 635719 - RNA, 22 nt, Human
aguauacaaauaaauguguaau

SEQ ID NO: 635720 - RNA, 22 nt, Human
cugcuuuagagcugagccucag

SEQ ID NO: 635721 - RNA, 22 nt, Human
gcccaggagguggaggugcagu

SEQ ID NO: 635722 - RNA, 22 nt, Human
uuucaguguaucuuccaaaagc

SEQ ID NO: 635723 - RNA, 23 nt, Human
uuucacauuaauguuuagcagga

SEQ ID NO: 635724 - RNA, 22 nt, Human
gcaggacaaaauuuccagggug

SEQ ID NO: 635725 - RNA, 22 nt, Human
ugagggggguaaucacuggguu

SEQ ID NO: 635726 - RNA, 22 nt, Human
uuuuuccuaagcaguggagcug

SEQ ID NO: 635727 - RNA, 22 nt, Human
acaggcucgugcgcgcacgugu

SEQ ID NO: 635728 - RNA, 22 nt, Human
agauacauauagaaaacaucaa

SEQ ID NO: 635729 - RNA, 20 nt, Human
uccuaacuauaaaguggcuc

SEQ ID NO: 635730 - RNA, 22 nt, Human
aggccugaggaccuucuggagg

SEQ ID NO: 635731 - RNA, 22 nt, Human
uuucagcugguaaaggaguagc

SEQ ID NO: 635732 - RNA, 22 nt, Human
auaguaaauuaucguggagaga

SEQ ID NO: 635733 - RNA, 22 nt, Human
uuagggacagcucuguagguga

SEQ ID NO: 635734 - RNA, 22 nt, Human
aaagccaggcuggccugggguu

SEQ ID NO: 635735 - RNA, 19 nt, Human
aauauuuuagccucuuccu

SEQ ID NO: 635736 - RNA, 22 nt, Human
acaagaauuuacauguagugga

SEQ ID NO: 635737 - RNA, 22 nt, Human
gaaccugauccaauauuuacuc

SEQ ID NO: 635738 - RNA, 22 nt, Human
uuauuguaggccuauuguagaa

SEQ ID NO: 635739 - RNA, 19 nt, Human
ccugugacuaucuuuguaa

SEQ ID NO: 635740 - RNA, 22 nt, Human
gcccagggcuucaaagagagaa

SEQ ID NO: 635741 - RNA, 17 nt, Human
ugaggccugcaucagug

SEQ ID NO: 635742 - RNA, 22 nt, Human
uuuaugacaagcauuacugauu

SEQ ID NO: 635743 - RNA, 22 nt, Human
uccucagcauggaaucuggacu

SEQ ID NO: 635744 - RNA, 22 nt, Human
aaauuuuguauucuaguucuag

SEQ ID NO: 635745 - RNA, 22 nt, Human
cuggcacauaguaggugcacag

SEQ ID NO: 635746 - RNA, 22 nt, Human
ucacaagauacaguuagaagca

SEQ ID NO: 635747 - RNA, 22 nt, Human
aggcagcagaaaacaaaugguu

SEQ ID NO: 635748 - RNA, 22 nt, Human
aucuuagagagucguguuuugu

SEQ ID NO: 635749 - RNA, 18 nt, Human
cuccuuucccuacaccuc

SEQ ID NO: 635750 - RNA, 22 nt, Human
auggcucagcccauggaagaaa

SEQ ID NO: 635751 - RNA, 22 nt, Human
uuuaugcagcguuucaccaccc

SEQ ID NO: 635752 - RNA, 22 nt, Human
uugaagaccuuuagugcuaugu

SEQ ID NO: 635753 - RNA, 22 nt, Human
cucucaguaaauuucugcccca

SEQ ID NO: 635754 - RNA, 22 nt, Human
ccacauggagcaggaggugggg

SEQ ID NO: 635755 - RNA, 22 nt, Human
uccaagcacuguuaauuaaacu

SEQ ID NO: 635756 - RNA, 22 nt, Human
gcuccuggcuucacugacauca

SEQ ID NO: 635757 - RNA, 22 nt, Human
agacaugccaagaaacccagug

SEQ ID NO: 635758 - RNA, 22 nt, Human
uaaaggcuuuuagugaugguaa

SEQ ID NO: 635759 - RNA, 22 nt, Human
ccugggcucuauccugacccag

SEQ ID NO: 635760 - RNA, 22 nt, Human
uccugggacucugccucaggcu

SEQ ID NO: 635761 - RNA, 22 nt, Human
auuuccuucaucagccuauccu

SEQ ID NO: 635762 - RNA, 22 nt, Human
ugcaggaaauuccaggguggcc

SEQ ID NO: 635763 - RNA, 22 nt, Human
gcccucagaggacagcugacuu

SEQ ID NO: 635764 - RNA, 22 nt, Human
acuagccaaguuuuacgacuaa

SEQ ID NO: 635765 - RNA, 22 nt, Human
gaaagcagcuaagucuuaugau

SEQ ID NO: 635766 - RNA, 22 nt, Human
uaucuguuguaguacagaugau

SEQ ID NO: 635767 - RNA, 22 nt, Human
agaggcaccaucuggaacagcc

SEQ ID NO: 635768 - RNA, 22 nt, Human
gguggcucacgccuguaagccc

SEQ ID NO: 635769 - RNA, 22 nt, Human
cagccuggagccacagcccagg

SEQ ID NO: 635770 - RNA, 17 nt, Human
cagcccugccguuccca

SEQ ID NO: 635771 - RNA, 22 nt, Human
cuacagaaaaucagccacaggc

SEQ ID NO: 635772 - RNA, 22 nt, Human
aggccagccuuguaaaugccuc

SEQ ID NO: 635773 - RNA, 22 nt, Human
auucuggggcugguuauuuuga

SEQ ID NO: 635774 - RNA, 22 nt, Human
aacauucaaguucugguuuaug

SEQ ID NO: 635775 - RNA, 22 nt, Human
agcuugaguuuuggaugaagug

SEQ ID NO: 635776 - RNA, 23 nt, Human
agggccacugggaaggauuacug

SEQ ID NO: 635777 - RNA, 22 nt, Human
cagcagucaggcaaaugggagg

SEQ ID NO: 635778 - RNA, 22 nt, Human
agguuggccaagcugcuggccc

SEQ ID NO: 635779 - RNA, 22 nt, Human
gcugagagaucaaggcaggauu

SEQ ID NO: 635780 - RNA, 22 nt, Human
cagaugugauucuucccucagc

SEQ ID NO: 635781 - RNA, 22 nt, Human
cagauacauuaaaaugaugauu

SEQ ID NO: 635782 - RNA, 22 nt, Human
ggaaggggccuugagcaaacug

SEQ ID NO: 635783 - RNA, 22 nt, Human
aggcuaagggaugacuggagug

SEQ ID NO: 635784 - RNA, 22 nt, Human
aaagaacaauguggaaucuccu

SEQ ID NO: 635785 - RNA, 22 nt, Human
uuucacaguuagcaugaggacu

SEQ ID NO: 635786 - RNA, 22 nt, Human
aaggguggauuucugagcucua

SEQ ID NO: 635787 - RNA, 22 nt, Human
ggugaggcagguggcugcugag

SEQ ID NO: 635788 - RNA, 22 nt, Human
ucaguauagcuucuaaacuaac

SEQ ID NO: 635789 - RNA, 22 nt, Human
gcauuuuagaauauuggagcaa

SEQ ID NO: 635790 - RNA, 22 nt, Human
auuugcuggugaaauagugaca

SEQ ID NO: 635791 - RNA, 22 nt, Human
uucaauaucauuguuuagucuc

SEQ ID NO: 635792 - RNA, 22 nt, Human
uucucaggugaggcugaggcug

SEQ ID NO: 635793 - RNA, 22 nt, Human
auguaugaagcuuuguuuggga

SEQ ID NO: 635794 - RNA, 22 nt, Human
uuccugguaaauuauguccagg

SEQ ID NO: 635795 - RNA, 22 nt, Human
gcuggagggguaauaggauggg

SEQ ID NO: 635796 - RNA, 22 nt, Human
ucuggacuuucggugcaagagu

SEQ ID NO: 635797 - RNA, 22 nt, Human
acaccuuugccccaagucauag

SEQ ID NO: 635798 - RNA, 22 nt, Human
auauuaaugagcaaguaaguga

SEQ ID NO: 635799 - RNA, 22 nt, Human
aggauuuacaaugauucuaggu

SEQ ID NO: 635800 - RNA, 22 nt, Human
cagcaucucauucauucauguu

SEQ ID NO: 635801 - RNA, 22 nt, Human
aggguauguuuuuaucuacugu

SEQ ID NO: 635802 - RNA, 22 nt, Human
uuccuucuggagcccggggagc

SEQ ID NO: 635803 - RNA, 22 nt, Human
gcacuugacccccagagcuggu

SEQ ID NO: 635804 - RNA, 22 nt, Human
cauugcacgggcgucugucugu

SEQ ID NO: 635805 - RNA, 22 nt, Human
uaccugcagcgggaauccauua

SEQ ID NO: 635806 - RNA, 22 nt, Human
ggcagggaguggagacucccua

SEQ ID NO: 635807 - RNA, 22 nt, Human
agcccaaggcuucccugcuggc

SEQ ID NO: 635808 - RNA, 22 nt, Human
uagguaguuacacagcaaugua

SEQ ID NO: 635809 - RNA, 22 nt, Human
cccugaggggcuuacuuugccc

SEQ ID NO: 635810 - RNA, 22 nt, Human
ugcagguggcuccagggacugc

SEQ ID NO: 635811 - RNA, 22 nt, Human
uuuggagagaugaaguucugug

SEQ ID NO: 635812 - RNA, 22 nt, Human
aacugagauuacaagagacauu

SEQ ID NO: 635813 - RNA, 22 nt, Human
gacuguggacucucaugauaga

SEQ ID NO: 635814 - RNA, 23 nt, Human
aggaaguuaugaagggagaauag

SEQ ID NO: 635815 - RNA, 22 nt, Human
cuggagggcugcagcgaggcug

SEQ ID NO: 635816 - RNA, 22 nt, Human
auguguucgcuagauugcuguu

SEQ ID NO: 635817 - RNA, 22 nt, Human
acaaauaugguacucggagaaa

SEQ ID NO: 635818 - RNA, 22 nt, Human
cuucuucucuacauccuuugau

SEQ ID NO: 635819 - RNA, 22 nt, Human
uggucauugcuauuguuucuca

SEQ ID NO: 635820 - RNA, 22 nt, Human
aaagcaagacaggaguuucaga

SEQ ID NO: 635821 - RNA, 22 nt, Human
aaaucugagaaauauuguccag

SEQ ID NO: 635822 - RNA, 22 nt, Human
agacuggguuugagacuuagca

SEQ ID NO: 635823 - RNA, 22 nt, Human
gcaaggauguacugcaauagga

SEQ ID NO: 635824 - RNA, 23 nt, Human
ggugggagauuauccagaauuau

SEQ ID NO: 635825 - RNA, 22 nt, Human
gggagcaggagccugccugcca

SEQ ID NO: 635826 - RNA, 21 nt, Human
uuagaaagcucacuacaguua

SEQ ID NO: 635827 - RNA, 22 nt, Human
guccucugaaagaugaaccaug

SEQ ID NO: 635828 - RNA, 22 nt, Human
gcuccuggguguggcugccccu

SEQ ID NO: 635829 - RNA, 22 nt, Human
ucuuucuuuaucaccugauaug

SEQ ID NO: 635830 - RNA, 21 nt, Human
ggguggguggaauuaggagug

SEQ ID NO: 635831 - RNA, 22 nt, Human
auccuuuaguccuacaacucga

SEQ ID NO: 635832 - RNA, 23 nt, Human
uggcauagugaggggcacagaga

SEQ ID NO: 635833 - RNA, 22 nt, Human
guuuucuuccugcaauuggcau

SEQ ID NO: 635834 - RNA, 22 nt, Human
uauauuguaggugcuauuugaa

SEQ ID NO: 635835 - RNA, 23 nt, Human
ugcaggggaggcuuaaagcaggu

SEQ ID NO: 635836 - RNA, 22 nt, Human
ggcaagugguagaacaucugag

SEQ ID NO: 635837 - RNA, 22 nt, Human
gggcuggaagacaggaaaugcu

SEQ ID NO: 635838 - RNA, 22 nt, Human
agaggcacggaggcugcaugga

SEQ ID NO: 635839 - RNA, 22 nt, Human
gaggcuggcagaaaagcacagg

SEQ ID NO: 635840 - RNA, 22 nt, Human
ggccuuggcuccugcagggagu

SEQ ID NO: 635841 - RNA, 19 nt, Human
ucccaggaagcaaauguca

SEQ ID NO: 635842 - RNA, 22 nt, Human
uaugaacugcucuuguguuuug

SEQ ID NO: 635843 - RNA, 22 nt, Human
ugccagaagugcuuuauaagug

SEQ ID NO: 635844 - RNA, 22 nt, Human
aaaggcaggcuuucacaucuca

SEQ ID NO: 635845 - RNA, 22 nt, Human
augagcaguagguucauggcug

SEQ ID NO: 635846 - RNA, 22 nt, Human
ucacccuuaguguacuaucaug

SEQ ID NO: 635847 - RNA, 22 nt, Human
gcuuggggucaugaggcugcug

SEQ ID NO: 635848 - RNA, 22 nt, Human
uuugcaaauuucgucuccucag

SEQ ID NO: 635849 - RNA, 22 nt, Human
aacauuuuuaagaccaagugcu

SEQ ID NO: 635850 - RNA, 22 nt, Human
cuugaaugggccauaagacggu

SEQ ID NO: 635851 - RNA, 22 nt, Human
caugcuggucagccaguggaug

SEQ ID NO: 635852 - RNA, 22 nt, Human
ugcuggaggccugacuguguuu

SEQ ID NO: 635853 - RNA, 22 nt, Human
ucugucuucuguagcuaauaau

SEQ ID NO: 635854 - RNA, 22 nt, Human
gaaguggguggugauaucacug

SEQ ID NO: 635855 - RNA, 19 nt, Human
aggggcacugucucuagag

SEQ ID NO: 635856 - RNA, 22 nt, Human
cugcugucaucuggcgcugugc

SEQ ID NO: 635857 - RNA, 21 nt, Human
uuaaagcuaugguagugggcu

SEQ ID NO: 635858 - RNA, 16 nt, Human
ucucuggguugcacag

SEQ ID NO: 635859 - RNA, 22 nt, Human
uuucuguggauuuuccauucaa

SEQ ID NO: 635860 - RNA, 20 nt, Human
gggcuccagcugugauucuu

SEQ ID NO: 635861 - RNA, 22 nt, Human
uuuguaacuuuagaauugaucc

SEQ ID NO: 635862 - RNA, 22 nt, Human
ucaaaaauaagauauucuggac

SEQ ID NO: 635863 - RNA, 22 nt, Human
acaggcagggaccuuggcuaag

SEQ ID NO: 635864 - RNA, 22 nt, Human
auuagcaauugugcaucuagua

SEQ ID NO: 635865 - RNA, 22 nt, Human
aaccagcuuugauacgcauuau

SEQ ID NO: 635866 - RNA, 22 nt, Human
acugggcuucacuuggcacauc

SEQ ID NO: 635867 - RNA, 22 nt, Human
agugaaauacugucguuuuuag

SEQ ID NO: 635868 - RNA, 22 nt, Human
cuggagauaaguaaagaggcaa

SEQ ID NO: 635869 - RNA, 22 nt, Human
acagccaaggaauuaggaaggg

SEQ ID NO: 635870 - RNA, 19 nt, Human
aucacagacgugccucauc

SEQ ID NO: 635871 - RNA, 22 nt, Human
agcuccaggcagcauuaauaaa

SEQ ID NO: 635872 - RNA, 22 nt, Human
aggagagggguaggauuaauuu

SEQ ID NO: 635873 - RNA, 22 nt, Human
uugauugaauuuugaaaaucua

SEQ ID NO: 635874 - RNA, 21 nt, Human
ccugagaucuggaguggcuuu

SEQ ID NO: 635875 - RNA, 22 nt, Human
ucucauuauccaucacugcacu

SEQ ID NO: 635876 - RNA, 22 nt, Human
uguuugugcugccuggugggca

SEQ ID NO: 635877 - RNA, 22 nt, Human
cucccccuuagcucuugucuuu

SEQ ID NO: 635878 - RNA, 22 nt, Human
ugcugcuuggcacccucagagu

SEQ ID NO: 635879 - RNA, 22 nt, Human
cugcugccggcgagccucccuu

SEQ ID NO: 635880 - RNA, 22 nt, Human
cugcuuuguguggucccuccag

SEQ ID NO: 635881 - RNA, 22 nt, Human
gggugguggccagcagugggca

SEQ ID NO: 635882 - RNA, 23 nt, Human
cccugcccauugagcaggacguc

SEQ ID NO: 635883 - RNA, 22 nt, Human
gaccagcuggugaaaaccaauu

SEQ ID NO: 635884 - RNA, 22 nt, Human
caagcagagacuagauagcugu

SEQ ID NO: 635885 - RNA, 23 nt, Human
gccuggguuguaacuagugcauc

SEQ ID NO: 635886 - RNA, 22 nt, Human
aaagagaugugccaaauagccu

SEQ ID NO: 635887 - RNA, 23 nt, Human
ugagcaagugaccaacugucugu

SEQ ID NO: 635888 - RNA, 22 nt, Human
ccuuuagaugaucucuuggaca

SEQ ID NO: 635889 - RNA, 22 nt, Human
auuugucucugcacuuuacuca

SEQ ID NO: 635890 - RNA, 22 nt, Human
ccaggucuuuggccuuggcacu

SEQ ID NO: 635891 - RNA, 22 nt, Human
ucugggccgcugcguuccauga

SEQ ID NO: 635892 - RNA, 22 nt, Human
uuuaagacucuuguaguacaca

SEQ ID NO: 635893 - RNA, 22 nt, Human
cagcucugaggaacacuccuuu

SEQ ID NO: 635894 - RNA, 22 nt, Human
ucugcugccucgguguggguac

SEQ ID NO: 635895 - RNA, 22 nt, Human
uauguucuuagaagaggcagca

SEQ ID NO: 635896 - RNA, 22 nt, Human
ucaggucccacugcuaguaagu

SEQ ID NO: 635897 - RNA, 22 nt, Human
uuuagacaggggcaaaauaagg

SEQ ID NO: 635898 - RNA, 20 nt, Human
auaauuuacccugcaccacu

SEQ ID NO: 635899 - RNA, 22 nt, Human
cuggaagaggacacacgaauca

SEQ ID NO: 635900 - RNA, 22 nt, Human
cugggcugcuugcugaaggggu

SEQ ID NO: 635901 - RNA, 22 nt, Human
agccccacacucucucugagaa

SEQ ID NO: 635902 - RNA, 22 nt, Human
gaaagggagugaagaugguaua

SEQ ID NO: 635903 - RNA, 22 nt, Human
ggcagcccuguggagaggccca

SEQ ID NO: 635904 - RNA, 22 nt, Human
cagguccucacgccucacccuu

SEQ ID NO: 635905 - RNA, 22 nt, Human
augagguaguauuagaaggaga

SEQ ID NO: 635906 - RNA, 22 nt, Human
ugcucugcaagcaggagcaaga

SEQ ID NO: 635907 - RNA, 22 nt, Human
acaggugauucaggcucuggga

SEQ ID NO: 635908 - RNA, 22 nt, Human
gucuccugcuagcaagcaccac

SEQ ID NO: 635909 - RNA, 22 nt, Human
ggggccugcgagguucaacuuc

SEQ ID NO: 635910 - RNA, 22 nt, Human
ucccuggagauaacuucuggga

SEQ ID NO: 635911 - RNA, 23 nt, Human
gcucagccucagcaggcccagga

SEQ ID NO: 635912 - RNA, 22 nt, Human
ugcagaaacagucauuaaugua

SEQ ID NO: 635913 - RNA, 23 nt, Human
uaggaagacagcaaaagaaugga

SEQ ID NO: 635914 - RNA, 20 nt, Human
ggaacaugaaugugaguggc

SEQ ID NO: 635915 - RNA, 22 nt, Human
ucaggcucaaagggccggauga

SEQ ID NO: 635916 - RNA, 22 nt, Human
cuuuaucauggagguaaauaug

SEQ ID NO: 635917 - RNA, 22 nt, Human
uucucagggucuggauggccug

SEQ ID NO: 635918 - RNA, 22 nt, Human
ucuggggagugccuaaguggaa

SEQ ID NO: 635919 - RNA, 22 nt, Human
ucugggagguggcagggugcau

SEQ ID NO: 635920 - RNA, 22 nt, Human
ccuggagauuucuucaagcuuu

SEQ ID NO: 635921 - RNA, 21 nt, Human
cuucagcaaauacuuggcagg

SEQ ID NO: 635922 - RNA, 22 nt, Human
auagauguacguauguaaauca

SEQ ID NO: 635923 - RNA, 22 nt, Human
cacauuuuuacugccaacuuaa

SEQ ID NO: 635924 - RNA, 22 nt, Human
aucagaccauccagcguggaug

SEQ ID NO: 635925 - RNA, 22 nt, Human
gugccuggcaugcgccggugcu

SEQ ID NO: 635926 - RNA, 20 nt, Human
cagauucuccacuaacauau

SEQ ID NO: 635927 - RNA, 22 nt, Human
cagagcaggcccacugcccucc

SEQ ID NO: 635928 - RNA, 19 nt, Human
uggcagacacaccuucuuc

SEQ ID NO: 635929 - RNA, 22 nt, Human
guuuucauuacugcugugauuu

SEQ ID NO: 635930 - RNA, 22 nt, Human
ucaaaugaggcugaugaaugug

SEQ ID NO: 635931 - RNA, 22 nt, Human
augcugugucaccuuaggauuu

SEQ ID NO: 635932 - RNA, 22 nt, Human
gcugcggucacugcgggggcug

SEQ ID NO: 635933 - RNA, 22 nt, Human
ugguccugcuacaggggauuag

SEQ ID NO: 635934 - RNA, 22 nt, Human
uuguacaaagauuucacagcuc

SEQ ID NO: 635935 - RNA, 22 nt, Human
gcagccaguauccucugagauu

SEQ ID NO: 635936 - RNA, 23 nt, Human
ugagaagccaggggagcgugagg

SEQ ID NO: 635937 - RNA, 22 nt, Human
uaacacuucagaugauuuuguu

SEQ ID NO: 635938 - RNA, 22 nt, Human
cuguagcaguguuccagcauug

SEQ ID NO: 635939 - RNA, 22 nt, Human
ugugugucugcacauguauaau

SEQ ID NO: 635940 - RNA, 22 nt, Human
ucccauucugccaaggacauug

SEQ ID NO: 635941 - RNA, 20 nt, Human
ccacccacgcgggcucugcc

SEQ ID NO: 635942 - RNA, 22 nt, Human
cagagggaaaaggggaguaaua

SEQ ID NO: 635943 - RNA, 22 nt, Human
uuuuauacuuaagacagaguuu

SEQ ID NO: 635944 - RNA, 17 nt, Human
uuuguacaacauuuuaa

SEQ ID NO: 635945 - RNA, 22 nt, Human
uggcacagccacugaaucggga

SEQ ID NO: 635946 - RNA, 22 nt, Human
cacagagaggcuugucuccaag

SEQ ID NO: 635947 - RNA, 22 nt, Human
aaaugaguuugccucuagauag

SEQ ID NO: 635948 - RNA, 22 nt, Human
ugcugcuuuuaguuggauagaa

SEQ ID NO: 635949 - RNA, 22 nt, Human
gaggaccacagaugagccugca

SEQ ID NO: 635950 - RNA, 22 nt, Human
aggagacauacuauaggaauau

SEQ ID NO: 635951 - RNA, 22 nt, Human
ucuucaaaaauacagguuuuca

SEQ ID NO: 635952 - RNA, 22 nt, Human
ggccagaggaccucucauagcc

SEQ ID NO: 635953 - RNA, 22 nt, Human
aaucaguuguccaaaguucaca

SEQ ID NO: 635954 - RNA, 22 nt, Human
gagcaucuaugugcuggguacu

SEQ ID NO: 635955 - RNA, 22 nt, Human
gcccugagcacacaguagcaaa

SEQ ID NO: 635956 - RNA, 22 nt, Human
uuguaacuuaaguuuugcauau

SEQ ID NO: 635957 - RNA, 22 nt, Human
aagcugccaccagcccagggca

SEQ ID NO: 635958 - RNA, 20 nt, Human
agaaaauguuuucagcugga

SEQ ID NO: 635959 - RNA, 22 nt, Human
acaugauuuuuaaagagauaau

SEQ ID NO: 635960 - RNA, 22 nt, Human
gagaaacacuguuaguuuauua

SEQ ID NO: 635961 - RNA, 21 nt, Human
uucucuggucaagcacacaua

SEQ ID NO: 635962 - RNA, 21 nt, Human
aggccucccuguugacagggc

SEQ ID NO: 635963 - RNA, 22 nt, Human
ucccagcagggccgaccagccu

SEQ ID NO: 635964 - RNA, 22 nt, Human
cuuaaggaaaagucucuuuuaa

SEQ ID NO: 635965 - RNA, 22 nt, Human
guacagagaagguuacauauga

SEQ ID NO: 635966 - RNA, 21 nt, Human
caguuauucuugaugugugug

SEQ ID NO: 635967 - RNA, 22 nt, Human
aggcagggugaugauaaugauu

SEQ ID NO: 635968 - RNA, 17 nt, Human
uccuucagggccucaca

SEQ ID NO: 635969 - RNA, 22 nt, Human
uggcucaggauaauuuucccaa

SEQ ID NO: 635970 - RNA, 22 nt, Human
auguucagcauucuauaaauau

SEQ ID NO: 635971 - RNA, 20 nt, Human
aacugagaguucaggaggag

SEQ ID NO: 635972 - RNA, 22 nt, Human
caggaaauucuuuuuaacagaa

SEQ ID NO: 635973 - RNA, 22 nt, Human
uccuagaacuccaggacagucc

SEQ ID NO: 635974 - RNA, 22 nt, Human
uucagagugguaugaagugaug

SEQ ID NO: 635975 - RNA, 22 nt, Human
cuggcagcguguuuaugaacau

SEQ ID NO: 635976 - RNA, 22 nt, Human
ucauccagccucaucaggagcu

SEQ ID NO: 635977 - RNA, 22 nt, Human
aaaaaugcugugguagcugugu

SEQ ID NO: 635978 - RNA, 22 nt, Human
uggcaacauggacaggucugcc

SEQ ID NO: 635979 - RNA, 22 nt, Human
caucaagagucuuacuaucagu

SEQ ID NO: 635980 - RNA, 22 nt, Human
cuggagaggcugggaacagguu

SEQ ID NO: 635981 - RNA, 22 nt, Human
agaaaguuguuggaggaaauga

SEQ ID NO: 635982 - RNA, 18 nt, Human
aagccaggucaagauaag

SEQ ID NO: 635983 - RNA, 22 nt, Human
acauucauggguuuuacauuau

SEQ ID NO: 635984 - RNA, 21 nt, Human
uuguagcuuguuagaccaugu

SEQ ID NO: 635985 - RNA, 22 nt, Human
aaaugcagcugggcaugagagg

SEQ ID NO: 635986 - RNA, 22 nt, Human
gugagggagguagauuucauca

SEQ ID NO: 635987 - RNA, 22 nt, Human
guagcauucugaguucgcagag

SEQ ID NO: 635988 - RNA, 23 nt, Human
cuggcucauccugguugcagugg

SEQ ID NO: 635989 - RNA, 23 nt, Human
gcccagagaggcucaccaggaau

SEQ ID NO: 635990 - RNA, 22 nt, Human
uaaggccaaacuauuauaguuc

SEQ ID NO: 635991 - RNA, 22 nt, Human
auguacaugugaauuuaggcaa

SEQ ID NO: 635992 - RNA, 20 nt, Human
ucuggccccuuccuguccug

SEQ ID NO: 635993 - RNA, 22 nt, Human
gaggcacugaauacuugagggu

SEQ ID NO: 635994 - RNA, 22 nt, Human
ggccucucuagcauccagccug

SEQ ID NO: 635995 - RNA, 23 nt, Human
gcagaggagcaagcuggacacca

SEQ ID NO: 635996 - RNA, 20 nt, Human
ugugucuuccuuucuuuaug

SEQ ID NO: 635997 - RNA, 22 nt, Human
uucuaacucaaagcuucuuuca

SEQ ID NO: 635998 - RNA, 22 nt, Human
auucauuggcuugaacuccacc

SEQ ID NO: 635999 - RNA, 17 nt, Human
agugugugaaauggugg

SEQ ID NO: 636000 - RNA, 22 nt, Human
caggacauugauccauuggcac

SEQ ID NO: 636001 - RNA, 22 nt, Human
uauaacaguuuaggugguguca

SEQ ID NO: 636002 - RNA, 22 nt, Human
aagaugcagcuuccacuuuugc

SEQ ID NO: 636003 - RNA, 22 nt, Human
uucugcuguaguugcaucuguu

SEQ ID NO: 636004 - RNA, 22 nt, Human
agcagggcucugccaugggccc

SEQ ID NO: 636005 - RNA, 22 nt, Human
augggcugcuuggcuuccaccc

SEQ ID NO: 636006 - RNA, 23 nt, Human
cuggucagaggcugcuggaaggg

SEQ ID NO: 636007 - RNA, 22 nt, Human
uccugcucugauggguucuccu

SEQ ID NO: 636008 - RNA, 22 nt, Human
uggggcuaaacacgccuggccu

SEQ ID NO: 636009 - RNA, 22 nt, Human
aaggcagcacagcaacugcuca

SEQ ID NO: 636010 - RNA, 22 nt, Human
gauaaagcaaggaugacugaag

SEQ ID NO: 636011 - RNA, 22 nt, Human
uaaggaaggggaaagacauguc

SEQ ID NO: 636012 - RNA, 22 nt, Human
uucacaauuucccuucaucagg

SEQ ID NO: 636013 - RNA, 22 nt, Human
guucuacuuucugugucuuuga

SEQ ID NO: 636014 - RNA, 22 nt, Human
acccuggggguggccagugcca

SEQ ID NO: 636015 - RNA, 22 nt, Human
cugucuccuccacugcauggga

SEQ ID NO: 636016 - RNA, 19 nt, Human
cugaggcccauguaccaug

SEQ ID NO: 636017 - RNA, 19 nt, Human
uuucccagcccuugcugug

SEQ ID NO: 636018 - RNA, 22 nt, Human
uugagaauguguuuugcuaagu

SEQ ID NO: 636019 - RNA, 21 nt, Human
ggaaaauucagagugcaauuu

SEQ ID NO: 636020 - RNA, 22 nt, Human
guccugaggaugcagagauaaa

SEQ ID NO: 636021 - RNA, 19 nt, Human
aucugaaguaggugcagcu

SEQ ID NO: 636022 - RNA, 22 nt, Human
guagcagcagagcagguccucc

SEQ ID NO: 636023 - RNA, 22 nt, Human
ccaggguggggcaggcccacug

SEQ ID NO: 636024 - RNA, 22 nt, Human
accaggaaacugugcccacgac

SEQ ID NO: 636025 - RNA, 22 nt, Human
ccugcuguccccugagccugga

SEQ ID NO: 636026 - RNA, 22 nt, Human
aaaggccaugguuggaguguuu

SEQ ID NO: 636027 - RNA, 23 nt, Human
agaagcugggagccuggggaugg

SEQ ID NO: 636028 - RNA, 22 nt, Human
uugcuuuagguauagaauccau

SEQ ID NO: 636029 - RNA, 22 nt, Human
uuucuaacguagacagggaggu

SEQ ID NO: 636030 - RNA, 22 nt, Human
acacaguaccccaaggcugggc

SEQ ID NO: 636031 - RNA, 22 nt, Human
ugccuggcuaauuuuuguaucc

SEQ ID NO: 636032 - RNA, 22 nt, Human
gcagauguaauggcuggagguc

SEQ ID NO: 636033 - RNA, 22 nt, Human
gacauugaaguauuuuugucga

SEQ ID NO: 636034 - RNA, 20 nt, Human
gccugagcuauugccaggau

SEQ ID NO: 636035 - RNA, 22 nt, Human
cuguggcuccagugaaccaaug

SEQ ID NO: 636036 - RNA, 22 nt, Human
gaaggccugugguagugagacg

SEQ ID NO: 636037 - RNA, 22 nt, Human
aacauucaaaacccaguucagu

SEQ ID NO: 636038 - RNA, 19 nt, Human
aaggcugguaccauagguu

SEQ ID NO: 636039 - RNA, 22 nt, Human
ucagccagugugcaccuggagu

SEQ ID NO: 636040 - RNA, 22 nt, Human
cuccgaacaguggcuccaaggc

SEQ ID NO: 636041 - RNA, 22 nt, Human
aggaauuacucaucugugguau

SEQ ID NO: 636042 - RNA, 22 nt, Human
uugcuaauagaagauuugggaa

SEQ ID NO: 636043 - RNA, 22 nt, Human
uauucacaugaaaacaaauuuu

SEQ ID NO: 636044 - RNA, 22 nt, Human
auauuaauuauuuacacaugag

SEQ ID NO: 636045 - RNA, 22 nt, Human
cguggccaguuucaagcuacca

SEQ ID NO: 636046 - RNA, 22 nt, Human
acacggcacuuuaggaaggggc

SEQ ID NO: 636047 - RNA, 22 nt, Human
uucaguaaaacacugcaauguc

SEQ ID NO: 636048 - RNA, 22 nt, Human
ccaggucugcgggcggcaggca

SEQ ID NO: 636049 - RNA, 22 nt, Human
uuccauccauaucuuguugagg

SEQ ID NO: 636050 - RNA, 22 nt, Human
acuuuguucuaauaguaucucu

SEQ ID NO: 636051 - RNA, 22 nt, Human
ucuguuccuguccuaagggcca

SEQ ID NO: 636052 - RNA, 22 nt, Human
ccaggaaggcguuguuccucuc

SEQ ID NO: 636053 - RNA, 22 nt, Human
gaaucucauucuaacuaguagg

SEQ ID NO: 636054 - RNA, 22 nt, Human
uggcagcaaaaccagaaucaga

SEQ ID NO: 636055 - RNA, 22 nt, Human
uuuauccauaucauuaaaaucu

SEQ ID NO: 636056 - RNA, 19 nt, Human
uucucugugcuagacucug

SEQ ID NO: 636057 - RNA, 17 nt, Human
cccuggcaaagaauggc

SEQ ID NO: 636058 - RNA, 21 nt, Human
agagcugggacuugccugaga

SEQ ID NO: 636059 - RNA, 22 nt, Human
uaucuacaguuaauaugucauc

SEQ ID NO: 636060 - RNA, 22 nt, Human
acagauggcacuuuuuaggacu

SEQ ID NO: 636061 - RNA, 22 nt, Human
gcagcaguggucuguagaagga

SEQ ID NO: 636062 - RNA, 22 nt, Human
ggagguggccugaaaauguggc

SEQ ID NO: 636063 - RNA, 22 nt, Human
agugucugcuuaucaguucuug

SEQ ID NO: 636064 - RNA, 21 nt, Human
ugcgugugcauggccuucggg

SEQ ID NO: 636065 - RNA, 22 nt, Human
cacagggaggcggucacuggcu

SEQ ID NO: 636066 - RNA, 22 nt, Human
uccugagcccuggggucagugu

SEQ ID NO: 636067 - RNA, 22 nt, Human
cucuggcuuguuaaugcauauu

SEQ ID NO: 636068 - RNA, 21 nt, Human
gcuggcuuuauucugcguuug

SEQ ID NO: 636069 - RNA, 22 nt, Human
aaucaucccaacugagaauccc

SEQ ID NO: 636070 - RNA, 22 nt, Human
uuucuauaacuggacuggauug

SEQ ID NO: 636071 - RNA, 22 nt, Human
aauaauugucaacuaugcuaca

SEQ ID NO: 636072 - RNA, 22 nt, Human
agcccuggaagccacaguccua

SEQ ID NO: 636073 - RNA, 22 nt, Human
agggggcuccuuggugugcaga

SEQ ID NO: 636074 - RNA, 22 nt, Human
gcuggccauauauuuugcuguu

SEQ ID NO: 636075 - RNA, 22 nt, Human
aguggucugggcuaaaugaggu

SEQ ID NO: 636076 - RNA, 22 nt, Human
cagaaauaucaccuggacucua

SEQ ID NO: 636077 - RNA, 19 nt, Human
uaugucccuuucccccauu

SEQ ID NO: 636078 - RNA, 22 nt, Human
uggagcagaggcugagguuggg

SEQ ID NO: 636079 - RNA, 22 nt, Human
uuuguaugugauaagacuauuc

SEQ ID NO: 636080 - RNA, 22 nt, Human
auggcaaaaacugcaguuaccu

SEQ ID NO: 636081 - RNA, 22 nt, Human
gucuucuggaagagagccagcu

SEQ ID NO: 636082 - RNA, 23 nt, Human
ucagagaacucgggcagaugacc

SEQ ID NO: 636083 - RNA, 20 nt, Human
ccucaggaugagggugagca

SEQ ID NO: 636084 - RNA, 22 nt, Human
uccucuuucucaacauuaguua

SEQ ID NO: 636085 - RNA, 22 nt, Human
cuuuaguuguuauuucuucaca

SEQ ID NO: 636086 - RNA, 22 nt, Human
ccagggaaggcugcuggcugug

SEQ ID NO: 636087 - RNA, 22 nt, Human
auuuuuuauauaccaagguggg

SEQ ID NO: 636088 - RNA, 22 nt, Human
uaugagaacgggggcguguggg

SEQ ID NO: 636089 - RNA, 22 nt, Human
aggaacuggggcuauucacccu

SEQ ID NO: 636090 - RNA, 22 nt, Human
auguuauuuauuauccucgguu

SEQ ID NO: 636091 - RNA, 22 nt, Human
ugaucagacaguuaugugcaug

SEQ ID NO: 636092 - RNA, 22 nt, Human
ugcaggcugcucaagacuuagu

SEQ ID NO: 636093 - RNA, 20 nt, Human
uucucuuuggguccagagaa

SEQ ID NO: 636094 - RNA, 21 nt, Human
gcagcaguguucuagaauacu

SEQ ID NO: 636095 - RNA, 22 nt, Human
gcacugggaaugagggcagcuu

SEQ ID NO: 636096 - RNA, 21 nt, Human
uguaacaaaauacugcagauu

SEQ ID NO: 636097 - RNA, 22 nt, Human
cugggcuuagcagcuccugguc

SEQ ID NO: 636098 - RNA, 22 nt, Human
ccucugggcuggaaaauuaaug

SEQ ID NO: 636099 - RNA, 22 nt, Human
uccgccaggacugagggcccau

SEQ ID NO: 636100 - RNA, 22 nt, Human
uaugugcacauuagagagaugg

SEQ ID NO: 636101 - RNA, 21 nt, Human
ugucugccugcuucuucacuc

SEQ ID NO: 636102 - RNA, 22 nt, Human
agcugcccuggcggagcugcuc

SEQ ID NO: 636103 - RNA, 22 nt, Human
uggaagugccuugcuggcugug

SEQ ID NO: 636104 - RNA, 22 nt, Human
aaaaggaggcaaacagccuaga

SEQ ID NO: 636105 - RNA, 22 nt, Human
agggucugugcaagaacacgcc

SEQ ID NO: 636106 - RNA, 22 nt, Human
gcugagccuagcugucuccugu

SEQ ID NO: 636107 - RNA, 19 nt, Human
gagguggguccccgcagcc

SEQ ID NO: 636108 - RNA, 22 nt, Human
agacuacaggagaaacucacuc

SEQ ID NO: 636109 - RNA, 22 nt, Human
gccuuuggugacaggcaugugu

SEQ ID NO: 636110 - RNA, 22 nt, Human
cauuucuccgccgagaucacug

SEQ ID NO: 636111 - RNA, 22 nt, Human
uaagacauccuggauguucaaa

SEQ ID NO: 636112 - RNA, 22 nt, Human
uuacacagaaacacuguucaga

SEQ ID NO: 636113 - RNA, 22 nt, Human
uugaaauuuuaggccuugcaau

SEQ ID NO: 636114 - RNA, 22 nt, Human
uuuuuuaguuaggucagaaugu

SEQ ID NO: 636115 - RNA, 22 nt, Human
uaggaaauaaauacuuaugguu

SEQ ID NO: 636116 - RNA, 20 nt, Human
ggcaggugcucgcuuggucu

SEQ ID NO: 636117 - RNA, 22 nt, Human
aguuuucuuucgcaaagguaca

SEQ ID NO: 636118 - RNA, 22 nt, Human
auccaugaucaauuuauuacua

SEQ ID NO: 636119 - RNA, 22 nt, Human
aggcggguacccuggcucgaaa

SEQ ID NO: 636120 - RNA, 22 nt, Human
gaaugcauuccacgguagugau

SEQ ID NO: 636121 - RNA, 22 nt, Human
cagacuggcugaaggccgagug

SEQ ID NO: 636122 - RNA, 22 nt, Human
agacccacacuuugaguagcaa

SEQ ID NO: 636123 - RNA, 22 nt, Human
agggaaggcuuuugacauuucc

SEQ ID NO: 636124 - RNA, 22 nt, Human
ccuggagggacccuggcccugu

SEQ ID NO: 636125 - RNA, 22 nt, Human
guccucaggaaagcagauaaca

SEQ ID NO: 636126 - RNA, 22 nt, Human
aaucuuggaaguguccacuggu

SEQ ID NO: 636127 - RNA, 22 nt, Human
uggagaaggggcagggucucca

SEQ ID NO: 636128 - RNA, 19 nt, Human
ucagcuggcaggccuccuc

SEQ ID NO: 636129 - RNA, 22 nt, Human
accugguuccuccucacugcug

SEQ ID NO: 636130 - RNA, 22 nt, Human
agccaggccuuagggagaggca

SEQ ID NO: 636131 - RNA, 22 nt, Human
gggcacugagaauuuuccacuu

SEQ ID NO: 636132 - RNA, 22 nt, Human
gcuggcuggcugugcaaaggca

SEQ ID NO: 636133 - RNA, 22 nt, Human
aggucaaguuuagauagaguua

SEQ ID NO: 636134 - RNA, 22 nt, Human
gagggccagaucccaggaggaa

SEQ ID NO: 636135 - RNA, 22 nt, Human
uccuuggcuuucuggagcuucu

SEQ ID NO: 636136 - RNA, 22 nt, Human
ucuacauuuucuuuauguacau

SEQ ID NO: 636137 - RNA, 22 nt, Human
aagauauagauggugguauaaa

SEQ ID NO: 636138 - RNA, 22 nt, Human
gagccagcuacauggucugcaa

SEQ ID NO: 636139 - RNA, 22 nt, Human
gaggaagaugguugaguggucc

SEQ ID NO: 636140 - RNA, 22 nt, Human
ggcaguggguggaucucaggga

SEQ ID NO: 636141 - RNA, 22 nt, Human
ccacugaaggucaacauagagc

SEQ ID NO: 636142 - RNA, 22 nt, Human
ugugucauagagagcacaaauc

SEQ ID NO: 636143 - RNA, 22 nt, Human
agcuucucucuuugcacucaca

SEQ ID NO: 636144 - RNA, 22 nt, Human
uuuuccagauuggacuuagucc

SEQ ID NO: 636145 - RNA, 22 nt, Human
uugggugcugucauggggcacg

SEQ ID NO: 636146 - RNA, 22 nt, Human
ggucagguagcucugacaggcc

SEQ ID NO: 636147 - RNA, 22 nt, Human
ucuucuuccucauuuauacaua

SEQ ID NO: 636148 - RNA, 22 nt, Human
agccaagggucagcugcacaga

SEQ ID NO: 636149 - RNA, 23 nt, Human
ggauaaaucucagcuucuuccau

SEQ ID NO: 636150 - RNA, 22 nt, Human
ccugucaccuagguacugagca

SEQ ID NO: 636151 - RNA, 22 nt, Human
aauuuguuauaacuugggcuga

SEQ ID NO: 636152 - RNA, 22 nt, Human
acauguaaaagauaaauuaaca

SEQ ID NO: 636153 - RNA, 22 nt, Human
ucaauucugguccucaggaacu

SEQ ID NO: 636154 - RNA, 22 nt, Human
gcauugauucugaagugaaaug

SEQ ID NO: 636155 - RNA, 22 nt, Human
cuggcugguccucggggacagc

SEQ ID NO: 636156 - RNA, 22 nt, Human
uccagcucccacucucacugcu

SEQ ID NO: 636157 - RNA, 23 nt, Human
ucccagccucuucucuugcauac

SEQ ID NO: 636158 - RNA, 22 nt, Human
ggagagucugcuggccacagug

SEQ ID NO: 636159 - RNA, 22 nt, Human
ggccucagaggaggugugaguc

SEQ ID NO: 636160 - RNA, 22 nt, Human
uaucaguagauaaacggauugc

SEQ ID NO: 636161 - RNA, 22 nt, Human
ccuggccucuccgaguaaccug

SEQ ID NO: 636162 - RNA, 22 nt, Human
agauuucaauggauauugcaag

SEQ ID NO: 636163 - RNA, 22 nt, Human
aggcccuguaagguguggagau

SEQ ID NO: 636164 - RNA, 22 nt, Human
ugcaaggcuauucacauguauu

SEQ ID NO: 636165 - RNA, 22 nt, Human
ggugcugacauucagagucugg

SEQ ID NO: 636166 - RNA, 22 nt, Human
augggcaggcaagguggcgagu

SEQ ID NO: 636167 - RNA, 20 nt, Human
ugccccaggccugcaccugc

SEQ ID NO: 636168 - RNA, 22 nt, Human
gaaaaugagccucagcuacauu

SEQ ID NO: 636169 - RNA, 23 nt, Human
aggagaagagauuuccacaugca

SEQ ID NO: 636170 - RNA, 22 nt, Human
auagcaaaaggcaccagaguga

SEQ ID NO: 636171 - RNA, 22 nt, Human
auuguacaaaaaaguagaccuu

SEQ ID NO: 636172 - RNA, 22 nt, Human
ugccuccauguuucagcaucua

SEQ ID NO: 636173 - RNA, 22 nt, Human
uacuguaaugagauuagcuucc

SEQ ID NO: 636174 - RNA, 22 nt, Human
ugguugccucucagagauuccg

SEQ ID NO: 636175 - RNA, 22 nt, Human
gaugggcaucaaacaugacgug

SEQ ID NO: 636176 - RNA, 22 nt, Human
ucgcuuuaauggucuucacagc

SEQ ID NO: 636177 - RNA, 22 nt, Human
gcccucagcuccuggacacaug

SEQ ID NO: 636178 - RNA, 22 nt, Human
caucaaauaggaauauuuggca

SEQ ID NO: 636179 - RNA, 22 nt, Human
agcucccagggcugggcaaguu

SEQ ID NO: 636180 - RNA, 22 nt, Human
cacuguggaauuagaauaaccu

SEQ ID NO: 636181 - RNA, 22 nt, Human
gcucugcucuugacuuaccagg

SEQ ID NO: 636182 - RNA, 22 nt, Human
ucuuuacuggaauggaacuuuc

SEQ ID NO: 636183 - RNA, 17 nt, Human
ugagacagggcaggccc

SEQ ID NO: 636184 - RNA, 22 nt, Human
aaacucugccauuuuuggccug

SEQ ID NO: 636185 - RNA, 22 nt, Human
ucaagcaaaguuuagcugguua

SEQ ID NO: 636186 - RNA, 22 nt, Human
agagaacagccuccuagagaaa

SEQ ID NO: 636187 - RNA, 22 nt, Human
cagcugugcugauugcucagua

SEQ ID NO: 636188 - RNA, 22 nt, Human
cuauuauuagcaaaagguggau

SEQ ID NO: 636189 - RNA, 22 nt, Human
augaauggauggggucaagaua

SEQ ID NO: 636190 - RNA, 22 nt, Human
gaacaaacagucaggacagucu

SEQ ID NO: 636191 - RNA, 22 nt, Human
agggcugccugcucugcauuga

SEQ ID NO: 636192 - RNA, 22 nt, Human
ggcagauggggugacaagagag

SEQ ID NO: 636193 - RNA, 22 nt, Human
ucaggagguguaacgaauacag

SEQ ID NO: 636194 - RNA, 22 nt, Human
ggugucugauuccaaggccaca

SEQ ID NO: 636195 - RNA, 22 nt, Human
acaaggaucuguguaggcaggc

SEQ ID NO: 636196 - RNA, 22 nt, Human
agcuaaugggagacccuuucac

SEQ ID NO: 636197 - RNA, 21 nt, Human
caauaaacugcacauugagac

SEQ ID NO: 636198 - RNA, 22 nt, Human
uauuugcuuugcuuuauagaga

SEQ ID NO: 636199 - RNA, 22 nt, Human
ccucaggcagugguauggaugg

SEQ ID NO: 636200 - RNA, 22 nt, Human
aucuaacagcaacaccagaaua

SEQ ID NO: 636201 - RNA, 22 nt, Human
ugauuccacucugaggaucgua

SEQ ID NO: 636202 - RNA, 22 nt, Human
uuucuuaugggguaguccuuua

SEQ ID NO: 636203 - RNA, 22 nt, Human
ucagagagcuggugggcagagg

SEQ ID NO: 636204 - RNA, 22 nt, Human
ccaggcugcuguugguguccgc

SEQ ID NO: 636205 - RNA, 22 nt, Human
cagggcauuacuucagguccuu

SEQ ID NO: 636206 - RNA, 22 nt, Human
guccugggaggggcugguccug

SEQ ID NO: 636207 - RNA, 22 nt, Human
aguguuuacucaaaggguucca

SEQ ID NO: 636208 - RNA, 22 nt, Human
cuggcugugugcccccggcacc

SEQ ID NO: 636209 - RNA, 21 nt, Human
ggcuggucgcgugcaugucuc

SEQ ID NO: 636210 - RNA, 22 nt, Human
uggaaguggcagaggaaguggu

SEQ ID NO: 636211 - RNA, 22 nt, Human
agccagcuggagaccacuguuu

SEQ ID NO: 636212 - RNA, 19 nt, Human
aggacccuuauccuggcuu

SEQ ID NO: 636213 - RNA, 22 nt, Human
gcuggagagauaggcauggggu

SEQ ID NO: 636214 - RNA, 22 nt, Human
caaggccuucgucuccuagcuu

SEQ ID NO: 636215 - RNA, 23 nt, Human
acugggcugaaauuuuucauggc

SEQ ID NO: 636216 - RNA, 22 nt, Human
uuuuggaaucauuuacagagca

SEQ ID NO: 636217 - RNA, 22 nt, Human
guuucuaauuggaacuuugagg

SEQ ID NO: 636218 - RNA, 22 nt, Human
uucagugugaagcuucugaaag

SEQ ID NO: 636219 - RNA, 22 nt, Human
cagagcuuucugucacauuagu

SEQ ID NO: 636220 - RNA, 22 nt, Human
cuccagguuacuuagccuagcu

SEQ ID NO: 636221 - RNA, 23 nt, Human
aauuacaaccaagaacuggaagg

SEQ ID NO: 636222 - RNA, 22 nt, Human
ucaugcaguuucuuaucugcca

SEQ ID NO: 636223 - RNA, 22 nt, Human
cccagguccccaccugucugcu

SEQ ID NO: 636224 - RNA, 22 nt, Human
agcaccuugaucuuggacuucc

SEQ ID NO: 636225 - RNA, 22 nt, Human
uucuaacucuacacuagcuuug

SEQ ID NO: 636226 - RNA, 22 nt, Human
gaggugugguccucagccccca

SEQ ID NO: 636227 - RNA, 22 nt, Human
gccccagcucugccacaacuag

SEQ ID NO: 636228 - RNA, 17 nt, Human
cacuugcuggucuaccu

SEQ ID NO: 636229 - RNA, 22 nt, Human
caggccaagccuccccagcucc

SEQ ID NO: 636230 - RNA, 22 nt, Human
cuggugaucuugggcaagucac

SEQ ID NO: 636231 - RNA, 22 nt, Human
auaugucgcuacaucauuagau

SEQ ID NO: 636232 - RNA, 22 nt, Human
uucaguaugauuccuccaguag

SEQ ID NO: 636233 - RNA, 22 nt, Human
cuacuuguucacuguaggucgc

SEQ ID NO: 636234 - RNA, 22 nt, Human
aagauacaucauucaggaguga

SEQ ID NO: 636235 - RNA, 22 nt, Human
uguccccuuucuuuccuucgua

SEQ ID NO: 636236 - RNA, 22 nt, Human
gagcucugggaaacaaagugua

SEQ ID NO: 636237 - RNA, 22 nt, Human
auugaaacaaguugcuuucuau

SEQ ID NO: 636238 - RNA, 22 nt, Human
aucuuuccuguuuucagacagc

SEQ ID NO: 636239 - RNA, 22 nt, Human
aggcugguguguccugaagccu

SEQ ID NO: 636240 - RNA, 22 nt, Human
aucuuccaagcucccuggugua

SEQ ID NO: 636241 - RNA, 22 nt, Human
ucugaaaugaccuuuccccacu

SEQ ID NO: 636242 - RNA, 22 nt, Human
uaacauugaguccacuaaacag

SEQ ID NO: 636243 - RNA, 22 nt, Human
gucagagagggcacgugcacac

SEQ ID NO: 636244 - RNA, 22 nt, Human
accaggccuagcaaguacauua

SEQ ID NO: 636245 - RNA, 22 nt, Human
ucccucaggugguucuuguuuc

SEQ ID NO: 636246 - RNA, 22 nt, Human
agacagguagcaggacagauau

SEQ ID NO: 636247 - RNA, 22 nt, Human
agcaccaggcaguauaucaaag

SEQ ID NO: 636248 - RNA, 22 nt, Human
uggcuggcuuucuuguauuuac

SEQ ID NO: 636249 - RNA, 22 nt, Human
gucuauuugggaucaugauaug

SEQ ID NO: 636250 - RNA, 22 nt, Human
ccagugcuucuuugcuagcugg

SEQ ID NO: 636251 - RNA, 22 nt, Human
cucuuuucaaaccuguuuaugg

SEQ ID NO: 636252 - RNA, 22 nt, Human
agccauuuuccugaaauauaac

SEQ ID NO: 636253 - RNA, 22 nt, Human
ugcauaaacuucucugguguga

SEQ ID NO: 636254 - RNA, 22 nt, Human
cuucaguuaugugccaaggaca

SEQ ID NO: 636255 - RNA, 22 nt, Human
caguguguccucagaauauaua

SEQ ID NO: 636256 - RNA, 22 nt, Human
cagcugagagacaaugagucau

SEQ ID NO: 636257 - RNA, 22 nt, Human
acugaggucucagguggggaag

SEQ ID NO: 636258 - RNA, 22 nt, Human
ugucaugcuuauguuacauacu

SEQ ID NO: 636259 - RNA, 22 nt, Human
cacuugaaaaucagaggaaauu

SEQ ID NO: 636260 - RNA, 22 nt, Human
agagggagaaaagaaucaguug

SEQ ID NO: 636261 - RNA, 22 nt, Human
cuguuuaucauguacauuucca

SEQ ID NO: 636262 - RNA, 22 nt, Human
uaggcuccaagagcgaacucag

SEQ ID NO: 636263 - RNA, 22 nt, Human
ugggcaagucacuucugucuuu

SEQ ID NO: 636264 - RNA, 22 nt, Human
caguacacaagcuuucauguau

SEQ ID NO: 636265 - RNA, 22 nt, Human
gaaggcaguaaauggcuguuuu

SEQ ID NO: 636266 - RNA, 22 nt, Human
aagauacagugaaagggcauug

SEQ ID NO: 636267 - RNA, 22 nt, Human
uuuucugaaguuuaagacauuu

SEQ ID NO: 636268 - RNA, 22 nt, Human
agagaaauuucccugccuucug

SEQ ID NO: 636269 - RNA, 19 nt, Human
ccaguagagacagcugcag

SEQ ID NO: 636270 - RNA, 22 nt, Human
gcacaaacugcaauuacuuuug

SEQ ID NO: 636271 - RNA, 22 nt, Human
acaucaguaauuaagucucaag

SEQ ID NO: 636272 - RNA, 22 nt, Human
uuaauuuauguccaaaccagau

SEQ ID NO: 636273 - RNA, 22 nt, Human
gccuccccaggggugucaugag

SEQ ID NO: 636274 - RNA, 22 nt, Human
agguccuggucuugagucuuaa

SEQ ID NO: 636275 - RNA, 22 nt, Human
uuguacaaaugcauauuccugg

SEQ ID NO: 636276 - RNA, 22 nt, Human
uacccagcaaucccuagagguu

SEQ ID NO: 636277 - RNA, 22 nt, Human
ucucugggaaauggagaauuuu

SEQ ID NO: 636278 - RNA, 22 nt, Human
auauaugcgcaggcacccagcu

SEQ ID NO: 636279 - RNA, 22 nt, Human
uuacaagugucagguacuggca

SEQ ID NO: 636280 - RNA, 22 nt, Human
aggcugaggugugcugugaucg

SEQ ID NO: 636281 - RNA, 22 nt, Human
gcuuccucgcugggcagaggca

SEQ ID NO: 636282 - RNA, 22 nt, Human
auuucuguuauaccuuucucag

SEQ ID NO: 636283 - RNA, 22 nt, Human
uucugacaauucaguaacagca

SEQ ID NO: 636284 - RNA, 22 nt, Human
ggcugugcuuugcccaaagggc

SEQ ID NO: 636285 - RNA, 22 nt, Human
aucauuuaaaacaagucucuau

SEQ ID NO: 636286 - RNA, 22 nt, Human
ucugcaaauauuagcuuagaca

SEQ ID NO: 636287 - RNA, 22 nt, Human
agaggucagaggucgccagguc

SEQ ID NO: 636288 - RNA, 21 nt, Human
ugagagaguagcaggacauau

SEQ ID NO: 636289 - RNA, 22 nt, Human
ucugaugucugaaaugcucuug

SEQ ID NO: 636290 - RNA, 22 nt, Human
gggugcugaggaagacagcagg

SEQ ID NO: 636291 - RNA, 22 nt, Human
gccuucagcccugacuggccag

SEQ ID NO: 636292 - RNA, 22 nt, Human
ugaccucuugucggagcuccag

SEQ ID NO: 636293 - RNA, 22 nt, Human
augaaugcauacauuugucaag

SEQ ID NO: 636294 - RNA, 19 nt, Human
uguguaaagucugugguca

SEQ ID NO: 636295 - RNA, 22 nt, Human
cauuuccacucugggagucaga

SEQ ID NO: 636296 - RNA, 22 nt, Human
caaagugagagaauggcagaaa

SEQ ID NO: 636297 - RNA, 22 nt, Human
ggcaggcaggagcgugcuuggg

SEQ ID NO: 636298 - RNA, 22 nt, Human
ugaacacagggccaaacuugag

SEQ ID NO: 636299 - RNA, 22 nt, Human
uauaccaaaauaucagaaaggg

SEQ ID NO: 636300 - RNA, 22 nt, Human
aguucugguugcccaugacauc

SEQ ID NO: 636301 - RNA, 22 nt, Human
uuuucuccuaagacccuucacc

SEQ ID NO: 636302 - RNA, 22 nt, Human
ugcacugauguuuugccaagga

SEQ ID NO: 636303 - RNA, 22 nt, Human
gagcucauccccaugguccguc

SEQ ID NO: 636304 - RNA, 22 nt, Human
uuuauuuggcaucucugccaag

SEQ ID NO: 636305 - RNA, 22 nt, Human
uuauucacucugaagccauccu

SEQ ID NO: 636306 - RNA, 22 nt, Human
ccuggcucuagaggccacuccu

SEQ ID NO: 636307 - RNA, 23 nt, Human
agggaagggggcuuauuccacag

SEQ ID NO: 636308 - RNA, 21 nt, Human
gaauaguucuguggcagcagu

SEQ ID NO: 636309 - RNA, 22 nt, Human
uauggcuuuaaacaacuuaggu

SEQ ID NO: 636310 - RNA, 22 nt, Human
cuccuuccugccccagugauaa

SEQ ID NO: 636311 - RNA, 22 nt, Human
uucagacuuaaaagaucccagc

SEQ ID NO: 636312 - RNA, 22 nt, Human
aaugccuucaaguaucugagga

SEQ ID NO: 636313 - RNA, 22 nt, Human
uuguggcuucuacgcccacagg

SEQ ID NO: 636314 - RNA, 22 nt, Human
ugggaggcagaaguugacugga

SEQ ID NO: 636315 - RNA, 22 nt, Human
cuugaaagaagggucuuuuaau

SEQ ID NO: 636316 - RNA, 22 nt, Human
gcccccagcucucaagcucaaa

SEQ ID NO: 636317 - RNA, 22 nt, Human
caggagaucuuaggaauucuua

SEQ ID NO: 636318 - RNA, 18 nt, Human
acagugcugucacugcuu

SEQ ID NO: 636319 - RNA, 22 nt, Human
agaguccaaaugugcaguuaug

SEQ ID NO: 636320 - RNA, 22 nt, Human
gcucugugcaguucagggacac

SEQ ID NO: 636321 - RNA, 22 nt, Human
aauacaguagguaauaguucau

SEQ ID NO: 636322 - RNA, 22 nt, Human
cuccgugcuauuuuaguaucgc

SEQ ID NO: 636323 - RNA, 22 nt, Human
auaucauucugauguauaucuu

SEQ ID NO: 636324 - RNA, 22 nt, Human
caccaggugcuggaggacauca

SEQ ID NO: 636325 - RNA, 18 nt, Human
agguggccugggagcuuu

SEQ ID NO: 636326 - RNA, 22 nt, Human
uuuauaugaaagugaccagugg

SEQ ID NO: 636327 - RNA, 22 nt, Human
auuugcagaagggagggggacc

SEQ ID NO: 636328 - RNA, 22 nt, Human
uuugaacuaccucuccuuagca

SEQ ID NO: 636329 - RNA, 22 nt, Human
cugugacuagaccugcaggaga

SEQ ID NO: 636330 - RNA, 22 nt, Human
agaccuggaaguucaagagaaa

SEQ ID NO: 636331 - RNA, 22 nt, Human
ggcuccaugcuccgcuucuugu

SEQ ID NO: 636332 - RNA, 22 nt, Human
aguuuauucucuggucuuagua

SEQ ID NO: 636333 - RNA, 22 nt, Human
gagucccaugaugauagccaca

SEQ ID NO: 636334 - RNA, 22 nt, Human
uucuuugggcaauugcuggccc

SEQ ID NO: 636335 - RNA, 22 nt, Human
guccagagguccaggaucaagg

SEQ ID NO: 636336 - RNA, 22 nt, Human
cagauuuaagagauaaacagug

SEQ ID NO: 636337 - RNA, 22 nt, Human
gcacccagccagcaucucagag

SEQ ID NO: 636338 - RNA, 22 nt, Human
gggaucuguguugcgauggauu

SEQ ID NO: 636339 - RNA, 19 nt, Human
uuuagaaguugaaacucug

SEQ ID NO: 636340 - RNA, 22 nt, Human
accugguuugucucaucaccac

SEQ ID NO: 636341 - RNA, 22 nt, Human
uuuaacuggucuccugcugcuu

SEQ ID NO: 636342 - RNA, 22 nt, Human
gccaggcuccccggaucccugg

SEQ ID NO: 636343 - RNA, 22 nt, Human
guuagaaacacauucuuauuga

SEQ ID NO: 636344 - RNA, 22 nt, Human
ccagcugcugacaugggcaggu

SEQ ID NO: 636345 - RNA, 22 nt, Human
ucaaguguaguggugucagguc

SEQ ID NO: 636346 - RNA, 22 nt, Human
uaaaagacccucuagaguccca

SEQ ID NO: 636347 - RNA, 22 nt, Human
cagccccucccucaggcaggug

SEQ ID NO: 636348 - RNA, 22 nt, Human
gagaggaagccaggggguguug

SEQ ID NO: 636349 - RNA, 22 nt, Human
uggaugugucgcccuggcucuc

SEQ ID NO: 636350 - RNA, 22 nt, Human
ugacuauuacggccacgaauuu

SEQ ID NO: 636351 - RNA, 20 nt, Human
agcugguuaucuuaauucuu

SEQ ID NO: 636352 - RNA, 22 nt, Human
aacucacagcuguuuggauuag

SEQ ID NO: 636353 - RNA, 22 nt, Human
cuaggcucagucucuggucugu

SEQ ID NO: 636354 - RNA, 22 nt, Human
ucacuagcauuguugaaggacu

SEQ ID NO: 636355 - RNA, 22 nt, Human
cucaguuugugugauauugucu

SEQ ID NO: 636356 - RNA, 22 nt, Human
aaagugcaguccaugaaauuaa

SEQ ID NO: 636357 - RNA, 22 nt, Human
cagcauuuaaugcagugcuucc

SEQ ID NO: 636358 - RNA, 22 nt, Human
uugagcaaaucagauuguaauu

SEQ ID NO: 636359 - RNA, 18 nt, Human
cucaggccuuucccugug

SEQ ID NO: 636360 - RNA, 22 nt, Human
aggcuggagugcaauggcguga

SEQ ID NO: 636361 - RNA, 22 nt, Human
cauuuaaagguuguggguaaaa

SEQ ID NO: 636362 - RNA, 22 nt, Human
agguaggauagauaggaagacc

SEQ ID NO: 636363 - RNA, 22 nt, Human
gcagcuggauuucaagagggag

SEQ ID NO: 636364 - RNA, 22 nt, Human
gacacaggggggcgcuagaaga

SEQ ID NO: 636365 - RNA, 22 nt, Human
ugcucuggguucuugcuguuac

SEQ ID NO: 636366 - RNA, 23 nt, Human
gccagcuuuggucugucuccuag

SEQ ID NO: 636367 - RNA, 22 nt, Human
cugccaugcaguuagucccuca

SEQ ID NO: 636368 - RNA, 22 nt, Human
ugucucuuacuuugauucuugg

SEQ ID NO: 636369 - RNA, 20 nt, Human
ugacaacaugccuuuugcuu

SEQ ID NO: 636370 - RNA, 22 nt, Human
caagaggcaaauugucuagaag

SEQ ID NO: 636371 - RNA, 22 nt, Human
gggcuccagccagcuccuugug

SEQ ID NO: 636372 - RNA, 22 nt, Human
auucuucauacagacaaguccu

SEQ ID NO: 636373 - RNA, 20 nt, Human
acaucugagaaacacuuaaa

SEQ ID NO: 636374 - RNA, 22 nt, Human
gguccugucugacaucacugcu

SEQ ID NO: 636375 - RNA, 22 nt, Human
aaucuaagccaccaguaguuuc

SEQ ID NO: 636376 - RNA, 23 nt, Human
ggccucuguguucugcccacaug

SEQ ID NO: 636377 - RNA, 22 nt, Human
acagggagucugaggggauagu

SEQ ID NO: 636378 - RNA, 22 nt, Human
gcaucauuuucuucuuccugca

SEQ ID NO: 636379 - RNA, 22 nt, Human
aaauaagugugggccagucaaa

SEQ ID NO: 636380 - RNA, 22 nt, Human
ccaggacacugcuucacagcag

SEQ ID NO: 636381 - RNA, 22 nt, Human
caggauuaaggugaggggagua

SEQ ID NO: 636382 - RNA, 22 nt, Human
uccagggccccccaguugcacg

SEQ ID NO: 636383 - RNA, 22 nt, Human
ucacagugaggcaguucuugua

SEQ ID NO: 636384 - RNA, 22 nt, Human
uuucucaguucucugcaaggag

SEQ ID NO: 636385 - RNA, 23 nt, Human
uccagcagccaagaaggguagaa

SEQ ID NO: 636386 - RNA, 22 nt, Human
ugucacagucucgugagcaucu

SEQ ID NO: 636387 - RNA, 22 nt, Human
acagagagaaacaaucagcagc

SEQ ID NO: 636388 - RNA, 22 nt, Human
aaggcuccagugaaugcuggca

SEQ ID NO: 636389 - RNA, 22 nt, Human
cccaguggggagcugagguuca

SEQ ID NO: 636390 - RNA, 22 nt, Human
uucuuucucuccacaaggcuug

SEQ ID NO: 636391 - RNA, 22 nt, Human
cacagaggauuuuuagggcagu

SEQ ID NO: 636392 - RNA, 22 nt, Human
caauugcuuuuccaagggcaga

SEQ ID NO: 636393 - RNA, 22 nt, Human
ugauucugaucaucaucauggu

SEQ ID NO: 636394 - RNA, 22 nt, Human
ugacagugaaugacaagguucu

SEQ ID NO: 636395 - RNA, 20 nt, Human
ugcuccuaccacuucugccc

SEQ ID NO: 636396 - RNA, 22 nt, Human
agagcuggcugugggugacuuu

SEQ ID NO: 636397 - RNA, 22 nt, Human
uguguauuaccauuuuacagcu

SEQ ID NO: 636398 - RNA, 22 nt, Human
uuuucugugcccugcuagcugg

SEQ ID NO: 636399 - RNA, 21 nt, Human
ugguuaguuauuggcagugcc

SEQ ID NO: 636400 - RNA, 22 nt, Human
cuuuaagacuaaauuagaguuu

SEQ ID NO: 636401 - RNA, 22 nt, Human
aggaaguuggcauuuuguuuca

SEQ ID NO: 636402 - RNA, 22 nt, Human
gcuuuuggaccucugauguuuc

SEQ ID NO: 636403 - RNA, 22 nt, Human
auccaucuugauguaauagcca

SEQ ID NO: 636404 - RNA, 22 nt, Human
uuccaaggcaacagccuaggcu

SEQ ID NO: 636405 - RNA, 22 nt, Human
aggcugagaaagugggaagaug

SEQ ID NO: 636406 - RNA, 22 nt, Human
ccuuugugagguccuguggggg

SEQ ID NO: 636407 - RNA, 22 nt, Human
uggggagaguuacaaggaaucu

SEQ ID NO: 636408 - RNA, 22 nt, Human
aagcuucacauugaacuugggu

SEQ ID NO: 636409 - RNA, 22 nt, Human
aguuucacagucugucauuguu

SEQ ID NO: 636410 - RNA, 22 nt, Human
cauggcuucgucacagagggca

SEQ ID NO: 636411 - RNA, 18 nt, Human
gacaaaaguacagacaga

SEQ ID NO: 636412 - RNA, 22 nt, Human
acccuuuagaaggcaucucagu

SEQ ID NO: 636413 - RNA, 22 nt, Human
ucuauugauuggcuuccuggau

SEQ ID NO: 636414 - RNA, 22 nt, Human
cacagaggaaaggcaguuggua

SEQ ID NO: 636415 - RNA, 22 nt, Human
caaggacacugagcuuuguaaa

SEQ ID NO: 636416 - RNA, 22 nt, Human
aggugucugggcuuuggaguca

SEQ ID NO: 636417 - RNA, 22 nt, Human
agcugcuggggagggcagacac

SEQ ID NO: 636418 - RNA, 22 nt, Human
guguucauggaugucaauuuga

SEQ ID NO: 636419 - RNA, 22 nt, Human
guggagggaaugaaucuucucu

SEQ ID NO: 636420 - RNA, 19 nt, Human
uccuggcacaguggaacca

SEQ ID NO: 636421 - RNA, 22 nt, Human
cucugggccaugcuacugcucu

SEQ ID NO: 636422 - RNA, 22 nt, Human
ugggacagggaaucugaucccc

SEQ ID NO: 636423 - RNA, 22 nt, Human
uaauauaccaaacuguaauuuu

SEQ ID NO: 636424 - RNA, 22 nt, Human
gccagcucaguuucaaaguagg

SEQ ID NO: 636425 - RNA, 22 nt, Human
aagccagguuccauggaggagc

SEQ ID NO: 636426 - RNA, 22 nt, Human
gaagauuaaacauauuuagugu

SEQ ID NO: 636427 - RNA, 22 nt, Human
guaaaaccugcuuuucaacacc

SEQ ID NO: 636428 - RNA, 22 nt, Human
ggugggguuuuaggcugcugca

SEQ ID NO: 636429 - RNA, 22 nt, Human
augcuauuaauauccagucuga

SEQ ID NO: 636430 - RNA, 22 nt, Human
cucagaaagcaaucuggugagg

SEQ ID NO: 636431 - RNA, 22 nt, Human
uuucugccaaccauuuaaacuc

SEQ ID NO: 636432 - RNA, 22 nt, Human
gugucugcuuggucaucuuuca

SEQ ID NO: 636433 - RNA, 22 nt, Human
agcugugggagaaucucugggu

SEQ ID NO: 636434 - RNA, 22 nt, Human
uagacacaaaucucagugacac

SEQ ID NO: 636435 - RNA, 22 nt, Human
gaggcacucucgacaagggugg

SEQ ID NO: 636436 - RNA, 22 nt, Human
cugauuuucaaaauguguuaaa

SEQ ID NO: 636437 - RNA, 22 nt, Human
uacuugcuuggauuucaccaga

SEQ ID NO: 636438 - RNA, 22 nt, Human
gaacacauuagucugaguuggc

SEQ ID NO: 636439 - RNA, 22 nt, Human
caaggaaguuuuaggagaggaa

SEQ ID NO: 636440 - RNA, 22 nt, Human
aggcagcugaggucuggcgccc

SEQ ID NO: 636441 - RNA, 17 nt, Human
agccugcugaucucaca

SEQ ID NO: 636442 - RNA, 19 nt, Human
aagcguuucccacuugcuu

SEQ ID NO: 636443 - RNA, 20 nt, Human
agcauuugaaauaugacuau

SEQ ID NO: 636444 - RNA, 22 nt, Human
ccuggagggcagcccauucugg

SEQ ID NO: 636445 - RNA, 22 nt, Human
uccuaaaggcugcuuuuauauu

SEQ ID NO: 636446 - RNA, 22 nt, Human
uuaugggagcaauuggggaggu

SEQ ID NO: 636447 - RNA, 22 nt, Human
aacugaacagcaggcuucuacc

SEQ ID NO: 636448 - RNA, 22 nt, Human
aggucaggagguuaagagucuu

SEQ ID NO: 636449 - RNA, 22 nt, Human
gcuuccaccuacuaaaugccac

SEQ ID NO: 636450 - RNA, 20 nt, Human
gugcagcacuuggggguagg

SEQ ID NO: 636451 - RNA, 22 nt, Human
guauagaaggaucuggugaauu

SEQ ID NO: 636452 - RNA, 22 nt, Human
agaguuugugggcuuuuccucc

SEQ ID NO: 636453 - RNA, 20 nt, Human
auucucugcucaaguggcac

SEQ ID NO: 636454 - RNA, 22 nt, Human
ggacaaaggucuggggaaccug

SEQ ID NO: 636455 - RNA, 22 nt, Human
uguuaucacuuguaaaagcaau

SEQ ID NO: 636456 - RNA, 22 nt, Human
aaggcacacaguuagauagagc

SEQ ID NO: 636457 - RNA, 22 nt, Human
ucaggcaggaagccccugcaca

SEQ ID NO: 636458 - RNA, 22 nt, Human
gcagauguuguugcugggaguu

SEQ ID NO: 636459 - RNA, 22 nt, Human
agcagcuggugagcaagcucag

SEQ ID NO: 636460 - RNA, 22 nt, Human
aaggccauuguaauguaaauau

SEQ ID NO: 636461 - RNA, 22 nt, Human
gagugaugucuguagugaagaa

SEQ ID NO: 636462 - RNA, 22 nt, Human
uucuguuuauaauuugcaguug

SEQ ID NO: 636463 - RNA, 22 nt, Human
gcgggcagggcacugguccccu

SEQ ID NO: 636464 - RNA, 22 nt, Human
uguaccuuuuucugugcaugcu

SEQ ID NO: 636465 - RNA, 22 nt, Human
uugugcuccuaugagaaucuaa

SEQ ID NO: 636466 - RNA, 22 nt, Human
gcaguguucuuguugcuuuuau

SEQ ID NO: 636467 - RNA, 22 nt, Human
aguuuauguagaauuggcaaua

SEQ ID NO: 636468 - RNA, 22 nt, Human
agcuuccuguugagagagggag

SEQ ID NO: 636469 - RNA, 22 nt, Human
uccagagaucucucuucccugu

SEQ ID NO: 636470 - RNA, 22 nt, Human
augaauaugagacugagagccu

SEQ ID NO: 636471 - RNA, 22 nt, Human
cucuuccucucaugcggucaua

SEQ ID NO: 636472 - RNA, 22 nt, Human
aggucugagucuauauacauug

SEQ ID NO: 636473 - RNA, 22 nt, Human
acuuucuguuagaugaauggau

SEQ ID NO: 636474 - RNA, 18 nt, Human
ccugcagcccaggaggcc

SEQ ID NO: 636475 - RNA, 22 nt, Human
aggggaagauuauacuuuugaa

SEQ ID NO: 636476 - RNA, 22 nt, Human
ugcuuagggcuccuccaauaga

SEQ ID NO: 636477 - RNA, 22 nt, Human
auucauguuagcccacauguag

SEQ ID NO: 636478 - RNA, 22 nt, Human
uauuguaucuuaccacauguau

SEQ ID NO: 636479 - RNA, 22 nt, Human
gggccagugagucgggagagcu

SEQ ID NO: 636480 - RNA, 22 nt, Human
guucuauucuccaguuacauau

SEQ ID NO: 636481 - RNA, 22 nt, Human
gguccaguccugcucaccacuu

SEQ ID NO: 636482 - RNA, 22 nt, Human
uuugaaagagcugauacaugaa

SEQ ID NO: 636483 - RNA, 22 nt, Human
ucuacuuuauaaguauauaagu

SEQ ID NO: 636484 - RNA, 18 nt, Human
uccugguggagaaguggu

SEQ ID NO: 636485 - RNA, 22 nt, Human
gagcuucccucugcagucccug

SEQ ID NO: 636486 - RNA, 22 nt, Human
cccugucucauugaucacuugu

SEQ ID NO: 636487 - RNA, 22 nt, Human
acauuaguuucucagaucauuu

SEQ ID NO: 636488 - RNA, 22 nt, Human
ucccaggaaugucugaaaguga

SEQ ID NO: 636489 - RNA, 22 nt, Human
aagaaguuagguguaacaauau

SEQ ID NO: 636490 - RNA, 22 nt, Human
cagaaacacuuguagagaaguu

SEQ ID NO: 636491 - RNA, 22 nt, Human
ugcccugugugugcaagcacug

SEQ ID NO: 636492 - RNA, 22 nt, Human
gucucuggcuuuaugcugguuu

SEQ ID NO: 636493 - RNA, 22 nt, Human
ucugcaacagugcccuguaaau

SEQ ID NO: 636494 - RNA, 22 nt, Human
ccagagcaauucucacagaacu

SEQ ID NO: 636495 - RNA, 22 nt, Human
gucugagggacagaguccuggc

SEQ ID NO: 636496 - RNA, 17 nt, Human
gcucagaguacacgugu

SEQ ID NO: 636497 - RNA, 22 nt, Human
cuugggggccauuaaggggccu

SEQ ID NO: 636498 - RNA, 22 nt, Human
aguguuuuauuagaacacagcc

SEQ ID NO: 636499 - RNA, 22 nt, Human
uucaguguggcccaugaagagg

SEQ ID NO: 636500 - RNA, 22 nt, Human
ccucggaggcggaggcugcagu

SEQ ID NO: 636501 - RNA, 22 nt, Human
uucagagacauguucuagauca

SEQ ID NO: 636502 - RNA, 22 nt, Human
aacacugaccucuacccucagu

SEQ ID NO: 636503 - RNA, 22 nt, Human
cuuuaaauaauacaagguccag

SEQ ID NO: 636504 - RNA, 22 nt, Human
gcugccuucccggaaugucauc

SEQ ID NO: 636505 - RNA, 20 nt, Human
cucucuccaucucaguggcc

SEQ ID NO: 636506 - RNA, 19 nt, Human
agguggccauguccagccu

SEQ ID NO: 636507 - RNA, 22 nt, Human
cucagugucuuauuguacacau

SEQ ID NO: 636508 - RNA, 22 nt, Human
cugacuccuuaccauaugcuuu

SEQ ID NO: 636509 - RNA, 22 nt, Human
augcagcuucaggauuaugaug

SEQ ID NO: 636510 - RNA, 22 nt, Human
gccauaaauugcuggucaaaau

SEQ ID NO: 636511 - RNA, 20 nt, Human
agucugccugcuccuucucc

SEQ ID NO: 636512 - RNA, 22 nt, Human
aggguagggccguagggccaug

SEQ ID NO: 636513 - RNA, 22 nt, Human
caagggaccugagauggucucu

SEQ ID NO: 636514 - RNA, 22 nt, Human
acuuugcagagccagaagagaa

SEQ ID NO: 636515 - RNA, 22 nt, Human
cucugggaccauggcaagugcg

SEQ ID NO: 636516 - RNA, 22 nt, Human
caauuagcugguacugacagga

SEQ ID NO: 636517 - RNA, 23 nt, Human
ugcaaauaacaaggaguuuaagg

SEQ ID NO: 636518 - RNA, 22 nt, Human
ggaaccacagcccccagcaggc

SEQ ID NO: 636519 - RNA, 22 nt, Human
uggucuggggaccgaggguuac

SEQ ID NO: 636520 - RNA, 22 nt, Human
ucucagugcuauccauauucca

SEQ ID NO: 636521 - RNA, 18 nt, Human
cugcuuacaaaaauaccc

SEQ ID NO: 636522 - RNA, 20 nt, Human
ucuggguugaaaucaagauc

SEQ ID NO: 636523 - RNA, 21 nt, Human
uggcagguucaaaggccuauc

SEQ ID NO: 636524 - RNA, 20 nt, Human
aggcucugccugcaggccca

SEQ ID NO: 636525 - RNA, 22 nt, Human
gauccuguuagaaauguagacu

SEQ ID NO: 636526 - RNA, 22 nt, Human
cagcucagcuuccugggugugu

SEQ ID NO: 636527 - RNA, 22 nt, Human
uucuacacugaguuuuuucccu

SEQ ID NO: 636528 - RNA, 22 nt, Human
agcagcaggcugggaugagucu

SEQ ID NO: 636529 - RNA, 22 nt, Human
guggcagcggugugcaaggagg

SEQ ID NO: 636530 - RNA, 22 nt, Human
uguuaucugguugucugauuac

SEQ ID NO: 636531 - RNA, 22 nt, Human
uggcacugccuggcagggcccc

SEQ ID NO: 636532 - RNA, 22 nt, Human
ugcccagcagggagcuaccugg

SEQ ID NO: 636533 - RNA, 22 nt, Human
uuuacagcugcuggcaagcuug

SEQ ID NO: 636534 - RNA, 22 nt, Human
caauaguaaauuacggaggaga

SEQ ID NO: 636535 - RNA, 22 nt, Human
ucagaggacuaccuucuccagu

SEQ ID NO: 636536 - RNA, 22 nt, Human
ugaaaggugacauuucuuggau

SEQ ID NO: 636537 - RNA, 22 nt, Human
gugcucugaguuugcaugucag

SEQ ID NO: 636538 - RNA, 22 nt, Human
ugugccuuaugaauucuuucug

SEQ ID NO: 636539 - RNA, 22 nt, Human
gaggagccuggccccacaucca

SEQ ID NO: 636540 - RNA, 22 nt, Human
ugaugauguuuaucuugguauu

SEQ ID NO: 636541 - RNA, 22 nt, Human
gaagccucaacaucucugcguc

SEQ ID NO: 636542 - RNA, 22 nt, Human
aucaggaucugcaucauaagaa

SEQ ID NO: 636543 - RNA, 22 nt, Human
aagagguaaugacugcuugagu

SEQ ID NO: 636544 - RNA, 22 nt, Human
cuugucuuuauuucauauucca

SEQ ID NO: 636545 - RNA, 22 nt, Human
ugcagaaguauuccaggcccca

SEQ ID NO: 636546 - RNA, 22 nt, Human
ccuuguccucugguuuccuguu

SEQ ID NO: 636547 - RNA, 22 nt, Human
uacaaugucucucaccugacuu

SEQ ID NO: 636548 - RNA, 22 nt, Human
ccagaaagacuuuuuagguacg

SEQ ID NO: 636549 - RNA, 22 nt, Human
gcuguggcuugcagcuggggcu

SEQ ID NO: 636550 - RNA, 22 nt, Human
guggaugcuuaggcagccuggg

SEQ ID NO: 636551 - RNA, 22 nt, Human
gcacaugugagaguagaggccu

SEQ ID NO: 636552 - RNA, 17 nt, Human
gguacaaacccauuuuu

SEQ ID NO: 636553 - RNA, 22 nt, Human
uccagaggcucugagggagagu

SEQ ID NO: 636554 - RNA, 22 nt, Human
aggagccuggcuggcccacagg

SEQ ID NO: 636555 - RNA, 22 nt, Human
uuuaaauguucaugauacugaa

SEQ ID NO: 636556 - RNA, 22 nt, Human
gcugucagugaggugagacaug

SEQ ID NO: 636557 - RNA, 22 nt, Human
agacagugaggcagagcuuccg

SEQ ID NO: 636558 - RNA, 22 nt, Human
agcuucuucuuggucuuuccca

SEQ ID NO: 636559 - RNA, 22 nt, Human
acaguaggaauagauguagaua

SEQ ID NO: 636560 - RNA, 22 nt, Human
uugaggaggccuuucagggcuu

SEQ ID NO: 636561 - RNA, 22 nt, Human
uuugcauuuugauaagaucacu

SEQ ID NO: 636562 - RNA, 21 nt, Human
ugcagaggcacaaacaagccc

SEQ ID NO: 636563 - RNA, 22 nt, Human
cucuggagagguucccauggga

SEQ ID NO: 636564 - RNA, 22 nt, Human
uaggccauucuuggagcuuacu

SEQ ID NO: 636565 - RNA, 22 nt, Human
aauacagagaauguuauuugga

SEQ ID NO: 636566 - RNA, 22 nt, Human
acugggcuaccccaccauuacc

SEQ ID NO: 636567 - RNA, 22 nt, Human
ucugccagaaguucugagagua

SEQ ID NO: 636568 - RNA, 22 nt, Human
gaagagagccgcgggacaucag

SEQ ID NO: 636569 - RNA, 23 nt, Human
gcccugcuccuggcugggaggga

SEQ ID NO: 636570 - RNA, 22 nt, Human
ugcagagagauccucaggguuu

SEQ ID NO: 636571 - RNA, 22 nt, Human
aauuucucaauuguuacaggug

SEQ ID NO: 636572 - RNA, 17 nt, Human
aagcauuuaauuugcua

SEQ ID NO: 636573 - RNA, 22 nt, Human
uacaaguagcucagguuuucug

SEQ ID NO: 636574 - RNA, 21 nt, Human
ugugugcauaugcauguacau

SEQ ID NO: 636575 - RNA, 22 nt, Human
uuggccacacucacuagagccc

SEQ ID NO: 636576 - RNA, 22 nt, Human
cccucugcucaggugcauaggc

SEQ ID NO: 636577 - RNA, 22 nt, Human
gaagcagcgaaguggaagggac

SEQ ID NO: 636578 - RNA, 22 nt, Human
cauguauagacacucauacagu

SEQ ID NO: 636579 - RNA, 22 nt, Human
uuccaggaccaggaagagggga

SEQ ID NO: 636580 - RNA, 22 nt, Human
uaucacuacaccuggcuaauua

SEQ ID NO: 636581 - RNA, 22 nt, Human
ccugggagguggagguugcagu

SEQ ID NO: 636582 - RNA, 22 nt, Human
uuguaugaguaugguguauagg

SEQ ID NO: 636583 - RNA, 22 nt, Human
cugccaggccuggggugcuguc

SEQ ID NO: 636584 - RNA, 22 nt, Human
aagccaguauucaauggggcua

SEQ ID NO: 636585 - RNA, 22 nt, Human
auaacuuauuagauuggagcug

SEQ ID NO: 636586 - RNA, 22 nt, Human
gauccuugcaacucugugaggu

SEQ ID NO: 636587 - RNA, 22 nt, Human
ucuaucagaguagaaggcaacg

SEQ ID NO: 636588 - RNA, 22 nt, Human
cagggcuuggaucuguggucag

SEQ ID NO: 636589 - RNA, 22 nt, Human
cugugccuuggcgcugugccac

SEQ ID NO: 636590 - RNA, 22 nt, Human
uaaagucagauaucuggguuga

SEQ ID NO: 636591 - RNA, 22 nt, Human
agaggucuuaaguuccuugaug

SEQ ID NO: 636592 - RNA, 22 nt, Human
uuccuccuuguccuaguuacug

SEQ ID NO: 636593 - RNA, 22 nt, Human
augggcugacuaaugguaaacu

SEQ ID NO: 636594 - RNA, 22 nt, Human
ugccuggaugugcuggccucac

SEQ ID NO: 636595 - RNA, 22 nt, Human
gauuucccuauaguuuucucuu

SEQ ID NO: 636596 - RNA, 22 nt, Human
gagcuuccucagccuuucucac

SEQ ID NO: 636597 - RNA, 23 nt, Human
ucuuuacauacugaugaguucuc

SEQ ID NO: 636598 - RNA, 22 nt, Human
auugucucugaauuuucagcug

SEQ ID NO: 636599 - RNA, 22 nt, Human
uugacaagaaucguugccuugg

SEQ ID NO: 636600 - RNA, 22 nt, Human
accagcuggucagggcuuuucu

SEQ ID NO: 636601 - RNA, 22 nt, Human
aaucauuguaaaugguuuuguu

SEQ ID NO: 636602 - RNA, 22 nt, Human
uugugucuggaaugcguggagc

SEQ ID NO: 636603 - RNA, 22 nt, Human
gggcuggcucccagguguugaa

SEQ ID NO: 636604 - RNA, 22 nt, Human
gccagcaaagcaaguugucagc

SEQ ID NO: 636605 - RNA, 22 nt, Human
cccacacacauuuaugauagga

SEQ ID NO: 636606 - RNA, 22 nt, Human
uuuaugacauuacaauaucaag

SEQ ID NO: 636607 - RNA, 22 nt, Human
uacauauuugucuuuguacugu

SEQ ID NO: 636608 - RNA, 22 nt, Human
ugaaaucauguaguuauugcaa

SEQ ID NO: 636609 - RNA, 18 nt, Human
ggaagauuggcuaugugc

SEQ ID NO: 636610 - RNA, 22 nt, Human
auagcaaagccuggcacaauga

SEQ ID NO: 636611 - RNA, 22 nt, Human
ucacaauaugggugugggaacu

SEQ ID NO: 636612 - RNA, 22 nt, Human
ugaugaggcuucuuggugaaca

SEQ ID NO: 636613 - RNA, 22 nt, Human
uaauuacaaagcaagcacaggg

SEQ ID NO: 636614 - RNA, 22 nt, Human
auuguaaaguacuguguacaau

SEQ ID NO: 636615 - RNA, 22 nt, Human
ucugucauaagugcugaaguau

SEQ ID NO: 636616 - RNA, 22 nt, Human
aaggucaacacugauuuuaguc

SEQ ID NO: 636617 - RNA, 22 nt, Human
gcaaagcagaacccucucuauc

SEQ ID NO: 636618 - RNA, 22 nt, Human
caaugugguggcagaugucagu

SEQ ID NO: 636619 - RNA, 22 nt, Human
acagcaagccagcuugucacug

SEQ ID NO: 636620 - RNA, 22 nt, Human
ucugauuccagaaggggcauac

SEQ ID NO: 636621 - RNA, 22 nt, Human
ggaaagaacccuggauggcugg

SEQ ID NO: 636622 - RNA, 22 nt, Human
uguggguggagugauauuagcu

SEQ ID NO: 636623 - RNA, 18 nt, Human
uggcagggaggaaauaua

SEQ ID NO: 636624 - RNA, 22 nt, Human
uagauucuggagagacagcagu

SEQ ID NO: 636625 - RNA, 17 nt, Human
cuggucccaccaagccc

SEQ ID NO: 636626 - RNA, 21 nt, Human
ugcauucuagcagcucugagg

SEQ ID NO: 636627 - RNA, 22 nt, Human
auggcccaaaaccuccucccuc

SEQ ID NO: 636628 - RNA, 22 nt, Human
gcuuuacagggcacaaagggag

SEQ ID NO: 636629 - RNA, 22 nt, Human
aaggcaguagguguuucaaacu

SEQ ID NO: 636630 - RNA, 22 nt, Human
ugugaaauguggauguuaauag

SEQ ID NO: 636631 - RNA, 22 nt, Human
auuggcaguuagugacgaggcu

SEQ ID NO: 636632 - RNA, 22 nt, Human
ggcugugcgucauccggcugca

SEQ ID NO: 636633 - RNA, 22 nt, Human
aucaguuucugugaagaacaca

SEQ ID NO: 636634 - RNA, 22 nt, Human
aaacucagauguggugaagacc

SEQ ID NO: 636635 - RNA, 18 nt, Human
augaacacugagcugaau

SEQ ID NO: 636636 - RNA, 22 nt, Human
accacauuucugaauagcauaa

SEQ ID NO: 636637 - RNA, 22 nt, Human
cuccaggguuccccgauccacu

SEQ ID NO: 636638 - RNA, 22 nt, Human
agaagugucagugcaggcagcu

SEQ ID NO: 636639 - RNA, 22 nt, Human
cccagaggugaaggagguggga

SEQ ID NO: 636640 - RNA, 21 nt, Human
agcagagugcuuugacuuugu

SEQ ID NO: 636641 - RNA, 22 nt, Human
aaggcuuugugggcugcaggca

SEQ ID NO: 636642 - RNA, 22 nt, Human
auuuacagacccucccacuaag

SEQ ID NO: 636643 - RNA, 22 nt, Human
aaagcucaucauuaggaggcua

SEQ ID NO: 636644 - RNA, 22 nt, Human
agcaagcagaauucuguccucu

SEQ ID NO: 636645 - RNA, 20 nt, Human
gcaccugaaugcaucuugga

SEQ ID NO: 636646 - RNA, 22 nt, Human
ccuggcacgaagggcugagguu

SEQ ID NO: 636647 - RNA, 22 nt, Human
gcugcugucacggugcuaaggg

SEQ ID NO: 636648 - RNA, 22 nt, Human
uaguuuaggaucuuuuuugugc

SEQ ID NO: 636649 - RNA, 22 nt, Human
cagcagcugguuauaccugugg

SEQ ID NO: 636650 - RNA, 22 nt, Human
uacuuuucuguguggcagucac

SEQ ID NO: 636651 - RNA, 22 nt, Human
guagaagugaugucauguuaua

SEQ ID NO: 636652 - RNA, 22 nt, Human
cacaucagggcugcuugggggu

SEQ ID NO: 636653 - RNA, 22 nt, Human
uauuucacagcagcucauuuaa

SEQ ID NO: 636654 - RNA, 22 nt, Human
cugucuguagacauuuuugguu

SEQ ID NO: 636655 - RNA, 21 nt, Human
ucccugaguucucugagcauc

SEQ ID NO: 636656 - RNA, 22 nt, Human
ucuagcaucuaauuauggaauc

SEQ ID NO: 636657 - RNA, 22 nt, Human
ucugucacucccugaugaugaa

SEQ ID NO: 636658 - RNA, 22 nt, Human
uuggaagggauauuggcauaug

SEQ ID NO: 636659 - RNA, 22 nt, Human
uuugagaagauguaauguuaag

SEQ ID NO: 636660 - RNA, 22 nt, Human
uggaagggagcuggaauuugga

SEQ ID NO: 636661 - RNA, 22 nt, Human
gugaagaaggcaauacaaagaa

SEQ ID NO: 636662 - RNA, 17 nt, Human
auccccagcaucuagaa

SEQ ID NO: 636663 - RNA, 22 nt, Human
cuuagggaauugggaggaugcc

SEQ ID NO: 636664 - RNA, 22 nt, Human
aaaucugggagcagcucggcca

SEQ ID NO: 636665 - RNA, 22 nt, Human
uuaguuuauaauucauuucugu

SEQ ID NO: 636666 - RNA, 22 nt, Human
acaauguaggaguaugacagua

SEQ ID NO: 636667 - RNA, 22 nt, Human
cuuuacagugaacuugcuuguc

SEQ ID NO: 636668 - RNA, 17 nt, Human
ccagguggaaucgugga

SEQ ID NO: 636669 - RNA, 22 nt, Human
cuuaugcugagaaugaaagaau

SEQ ID NO: 636670 - RNA, 22 nt, Human
uuuacaauagggucugaaugaa

SEQ ID NO: 636671 - RNA, 22 nt, Human
ccucccuucaguagagcccaau

SEQ ID NO: 636672 - RNA, 22 nt, Human
uggcucucaauggcuguacuau

SEQ ID NO: 636673 - RNA, 22 nt, Human
ucugggaacacuuugugagcuc

SEQ ID NO: 636674 - RNA, 22 nt, Human
ggccaagguguucugauaugcc

SEQ ID NO: 636675 - RNA, 22 nt, Human
ugcaggagagcuggucuggccc

SEQ ID NO: 636676 - RNA, 22 nt, Human
ugagcacagcucgcaccagcuu

SEQ ID NO: 636677 - RNA, 22 nt, Human
augugugcaucaaugauagauc

SEQ ID NO: 636678 - RNA, 22 nt, Human
cagcuggguuuaguggggugug

SEQ ID NO: 636679 - RNA, 22 nt, Human
uuaguuagaauaauacaaguaa

SEQ ID NO: 636680 - RNA, 22 nt, Human
agauccguggauuauaauuuag

SEQ ID NO: 636681 - RNA, 23 nt, Human
cccagcagauuguaaagugucca

SEQ ID NO: 636682 - RNA, 22 nt, Human
uuggcagugucugcaaaaugga

SEQ ID NO: 636683 - RNA, 22 nt, Human
aaauagcuguauuuacccugua

SEQ ID NO: 636684 - RNA, 22 nt, Human
uucagcucagcacugacaagau

SEQ ID NO: 636685 - RNA, 22 nt, Human
ggguugaggcggaugucggcgg

SEQ ID NO: 636686 - RNA, 22 nt, Human
gccugggaagacuaagugggag

SEQ ID NO: 636687 - RNA, 22 nt, Human
aaagauuaagguauuguuagcu

SEQ ID NO: 636688 - RNA, 20 nt, Human
guucucacugaucugcaggg

SEQ ID NO: 636689 - RNA, 22 nt, Human
uuugagaagcugucuugggcuc

SEQ ID NO: 636690 - RNA, 22 nt, Human
gagacugguguuugcugggcug

SEQ ID NO: 636691 - RNA, 22 nt, Human
uggaaagacauucagccgcugg

SEQ ID NO: 636692 - RNA, 20 nt, Human
uugaaugaaugucuggcuca

SEQ ID NO: 636693 - RNA, 22 nt, Human
aagccaggagcgaggccucggc

SEQ ID NO: 636694 - RNA, 22 nt, Human
aaagcaauuuaauggaccauga

SEQ ID NO: 636695 - RNA, 19 nt, Human
ggcugcugaagagaauuac

SEQ ID NO: 636696 - RNA, 22 nt, Human
cagcugccaugacauguccugc

SEQ ID NO: 636697 - RNA, 22 nt, Human
uuaaaccaccagaagccauuau

SEQ ID NO: 636698 - RNA, 22 nt, Human
cauuagaaccuauaaaaagcau

SEQ ID NO: 636699 - RNA, 23 nt, Human
cagaaaugacaguaagcacccug

SEQ ID NO: 636700 - RNA, 22 nt, Human
aaacauguaaguucagaucacc

SEQ ID NO: 636701 - RNA, 22 nt, Human
cuggcuuugcuggacugggagu

SEQ ID NO: 636702 - RNA, 22 nt, Human
aggccaggcaacauucugaagu

SEQ ID NO: 636703 - RNA, 22 nt, Human
cuuucuaauucucccauagucu

SEQ ID NO: 636704 - RNA, 22 nt, Human
ucccacagaugcuguccagagu

SEQ ID NO: 636705 - RNA, 22 nt, Human
uccugggugaaagaacaggcag

SEQ ID NO: 636706 - RNA, 22 nt, Human
ugccuguguaugugcaugcaca

SEQ ID NO: 636707 - RNA, 22 nt, Human
uucauuugggaugagucagaag

SEQ ID NO: 636708 - RNA, 22 nt, Human
ccaggcacuuguuugccaggca

SEQ ID NO: 636709 - RNA, 22 nt, Human
uuuauaaaauagacugggucua

SEQ ID NO: 636710 - RNA, 22 nt, Human
uuuugccugagagugaaaauaa

SEQ ID NO: 636711 - RNA, 22 nt, Human
gggucuccauguuaacaucacu

SEQ ID NO: 636712 - RNA, 22 nt, Human
uggcuggaggcaugcaagcucc

SEQ ID NO: 636713 - RNA, 22 nt, Human
cuucaauaggaacugcauggca

SEQ ID NO: 636714 - RNA, 22 nt, Human
aagaaucucugaucaggcuuua

SEQ ID NO: 636715 - RNA, 22 nt, Human
gaggagagggcugcgggcccac

SEQ ID NO: 636716 - RNA, 22 nt, Human
ccacaaauuagguuuugcuugu

SEQ ID NO: 636717 - RNA, 22 nt, Human
caaugacaucucccugcucuaa

SEQ ID NO: 636718 - RNA, 22 nt, Human
guggugcaggccagcaggggcg

SEQ ID NO: 636719 - RNA, 22 nt, Human
ugaucuucaccuuguucuuugg

SEQ ID NO: 636720 - RNA, 18 nt, Human
uacaugcauaaaugaagc

SEQ ID NO: 636721 - RNA, 22 nt, Human
ugcagggauuguuggcauccau

SEQ ID NO: 636722 - RNA, 22 nt, Human
cauugcacuccagcuugggcaa

SEQ ID NO: 636723 - RNA, 22 nt, Human
ucagccaguauuugagugcuca

SEQ ID NO: 636724 - RNA, 22 nt, Human
guuauuaguaagacucgcacau

SEQ ID NO: 636725 - RNA, 22 nt, Human
uugacacagaucaauauucaac

SEQ ID NO: 636726 - RNA, 22 nt, Human
uacaaaaaauugauacugacga

SEQ ID NO: 636727 - RNA, 22 nt, Human
uuugucuucccccuuuaaucag

SEQ ID NO: 636728 - RNA, 22 nt, Human
agauguaagaccuucaugaggg

SEQ ID NO: 636729 - RNA, 22 nt, Human
acaugauauaugggaaaugcuu

SEQ ID NO: 636730 - RNA, 22 nt, Human
cugggaaauugacacugauaaa

SEQ ID NO: 636731 - RNA, 22 nt, Human
augaugaagcaugguuacacug

SEQ ID NO: 636732 - RNA, 22 nt, Human
cagagcuggagggaacccuggc

SEQ ID NO: 636733 - RNA, 19 nt, Human
ccagaagggcagcuaugga

SEQ ID NO: 636734 - RNA, 22 nt, Human
uucuaaacggcuucacaggaau

SEQ ID NO: 636735 - RNA, 21 nt, Human
cauuccucggcucauagagga

SEQ ID NO: 636736 - RNA, 22 nt, Human
gagcagugggaaggaacagggu

SEQ ID NO: 636737 - RNA, 22 nt, Human
cagcccuggcuagggcgagggc

SEQ ID NO: 636738 - RNA, 22 nt, Human
augcccugggagugcuguacca

SEQ ID NO: 636739 - RNA, 22 nt, Human
ugucucaggcccaagccaguaa

SEQ ID NO: 636740 - RNA, 22 nt, Human
ucaggaaaauacugcuuaucca

SEQ ID NO: 636741 - RNA, 22 nt, Human
cuucucuuccuuugucaacuga

SEQ ID NO: 636742 - RNA, 22 nt, Human
cuagcccaggaaugccguggcc

SEQ ID NO: 636743 - RNA, 22 nt, Human
aaguuucuguucauaucucuga

SEQ ID NO: 636744 - RNA, 22 nt, Human
ggcugaaaggugggaggauggc

SEQ ID NO: 636745 - RNA, 22 nt, Human
uguuuucauggagaugguggcg

SEQ ID NO: 636746 - RNA, 22 nt, Human
gcucccagggcagcgcagaaga

SEQ ID NO: 636747 - RNA, 22 nt, Human
gggugggaaggcuaagggauug

SEQ ID NO: 636748 - RNA, 22 nt, Human
ucauugcacuccagccugggca

SEQ ID NO: 636749 - RNA, 22 nt, Human
gagacacagagaggcuguguga

SEQ ID NO: 636750 - RNA, 22 nt, Human
cacacagguaagccucuuucaa

SEQ ID NO: 636751 - RNA, 22 nt, Human
gucuccagagguuacauccugu

SEQ ID NO: 636752 - RNA, 22 nt, Human
uuuuacuuaauucuuggucaug

SEQ ID NO: 636753 - RNA, 18 nt, Human
guccugagcucugcugua

SEQ ID NO: 636754 - RNA, 22 nt, Human
ggaagacaagcaguggcugagc

SEQ ID NO: 636755 - RNA, 22 nt, Human
cucugagagcggucuguggcuu

SEQ ID NO: 636756 - RNA, 22 nt, Human
ugcagagagccagcucucucgg

SEQ ID NO: 636757 - RNA, 19 nt, Human
ucuuuguacaagucucugc

SEQ ID NO: 636758 - RNA, 22 nt, Human
ugcuuuaucugacuuggcgcug

SEQ ID NO: 636759 - RNA, 22 nt, Human
uuuugaaagaguccugcuacag

SEQ ID NO: 636760 - RNA, 22 nt, Human
aaaauugucagaaguugaucuu

SEQ ID NO: 636761 - RNA, 22 nt, Human
auguuuccauguucaauuuacu

SEQ ID NO: 636762 - RNA, 22 nt, Human
cuccuggcaggcugagugaaau

SEQ ID NO: 636763 - RNA, 20 nt, Human
gcaagcaugaagaguagaga

SEQ ID NO: 636764 - RNA, 22 nt, Human
aaaguguagagacuuuggaacc

SEQ ID NO: 636765 - RNA, 22 nt, Human
ucugccuccugcuugucccgac

SEQ ID NO: 636766 - RNA, 21 nt, Human
cugcaucucauagaacauguc

SEQ ID NO: 636767 - RNA, 22 nt, Human
cugccgaguacagccauagaaa

SEQ ID NO: 636768 - RNA, 22 nt, Human
gaugauuucuccauucccuucu

SEQ ID NO: 636769 - RNA, 22 nt, Human
ggcuuguggcaaguguuuuaag

SEQ ID NO: 636770 - RNA, 22 nt, Human
aaacuagaugaaacgaguaaag

SEQ ID NO: 636771 - RNA, 22 nt, Human
ucaggaugguccuuuaugagaa

SEQ ID NO: 636772 - RNA, 22 nt, Human
caucaaugugcagagaugaacg

SEQ ID NO: 636773 - RNA, 22 nt, Human
agaauacaucaaucuauuuucu

SEQ ID NO: 636774 - RNA, 22 nt, Human
gcaagcaaguaucuggcaggga

SEQ ID NO: 636775 - RNA, 22 nt, Human
aauuagaagcuguuagcaaaau

SEQ ID NO: 636776 - RNA, 22 nt, Human
cuggguggcuguccagccagcc

SEQ ID NO: 636777 - RNA, 22 nt, Human
uauuuugacgauuuuaugcaaa

SEQ ID NO: 636778 - RNA, 22 nt, Human
ugcaggcuguuugguggaucuc

SEQ ID NO: 636779 - RNA, 18 nt, Human
cucagggcaucagucugg

SEQ ID NO: 636780 - RNA, 22 nt, Human
uuuugccuaagaaucucucuga

SEQ ID NO: 636781 - RNA, 22 nt, Human
aucagcuuaauucucaacaggu

SEQ ID NO: 636782 - RNA, 22 nt, Human
ucaauagcauagcaauuaaugu

SEQ ID NO: 636783 - RNA, 22 nt, Human
cagagcauuuggaagccacgug

SEQ ID NO: 636784 - RNA, 22 nt, Human
gggaaaaauaaugcacagauau

SEQ ID NO: 636785 - RNA, 22 nt, Human
ggaaaauuggcgcguggggcug

SEQ ID NO: 636786 - RNA, 22 nt, Human
aacaugcaaagcuaugauguau

SEQ ID NO: 636787 - RNA, 22 nt, Human
cugggugaguugaugaaggaga

SEQ ID NO: 636788 - RNA, 22 nt, Human
cugggacuggaccucugccugg

SEQ ID NO: 636789 - RNA, 22 nt, Human
caguguauaaacuuuaacauag

SEQ ID NO: 636790 - RNA, 21 nt, Human
ucacauuucucauggguaaau

SEQ ID NO: 636791 - RNA, 22 nt, Human
agucagaauucgaucccagguc

SEQ ID NO: 636792 - RNA, 21 nt, Human
uuagaagcuaaugcagcuggu

SEQ ID NO: 636793 - RNA, 22 nt, Human
ucagaaaagacucaggggcuga

SEQ ID NO: 636794 - RNA, 22 nt, Human
uacacugaauacuaguuuuccu

SEQ ID NO: 636795 - RNA, 23 nt, Human
ugucugguuucuuuuauuuagca

SEQ ID NO: 636796 - RNA, 18 nt, Human
ugcaugcuuuuguuucca

SEQ ID NO: 636797 - RNA, 22 nt, Human
aaucuguuccugaggcaccaga

SEQ ID NO: 636798 - RNA, 23 nt, Human
gggaucuguaaaccuggagaacc

SEQ ID NO: 636799 - RNA, 22 nt, Human
gugcagcaaaguuugagauaua

SEQ ID NO: 636800 - RNA, 22 nt, Human
gcugggccccaucccucgagca

SEQ ID NO: 636801 - RNA, 22 nt, Human
ucuccucaccaccagcagcaga

SEQ ID NO: 636802 - RNA, 19 nt, Human
ucagcaucaauuugguccu

SEQ ID NO: 636803 - RNA, 22 nt, Human
agaagccauguuuaguaggaug

SEQ ID NO: 636804 - RNA, 22 nt, Human
uaggaaauucucuugcuaaguu

SEQ ID NO: 636805 - RNA, 22 nt, Human
ucugggaguggguccaaggaau

SEQ ID NO: 636806 - RNA, 22 nt, Human
ccagcuuuuccucucauugcuu

SEQ ID NO: 636807 - RNA, 22 nt, Human
ugaaugcuuuggagccuucuaa

SEQ ID NO: 636808 - RNA, 22 nt, Human
acuucucucauucagacauagc

SEQ ID NO: 636809 - RNA, 21 nt, Human
agaggccuuacaggauagacc

SEQ ID NO: 636810 - RNA, 22 nt, Human
ucccuguccugggcaaucccag

SEQ ID NO: 636811 - RNA, 22 nt, Human
aucaguuucacuugcuugcaaa

SEQ ID NO: 636812 - RNA, 22 nt, Human
ucucaagaucucaagauggccc

SEQ ID NO: 636813 - RNA, 22 nt, Human
gguggcugugagcauuauguga

SEQ ID NO: 636814 - RNA, 22 nt, Human
agggccacuggcugacggcugc

SEQ ID NO: 636815 - RNA, 22 nt, Human
aacaggcuauuucuuuacaaac

SEQ ID NO: 636816 - RNA, 22 nt, Human
auccuaaaauuguucaauuucu

SEQ ID NO: 636817 - RNA, 22 nt, Human
auuuauucuccagauggcgaga

SEQ ID NO: 636818 - RNA, 22 nt, Human
cuacaaauauguuaagguguuu

SEQ ID NO: 636819 - RNA, 22 nt, Human
ccucagggacuccaugcugcag

SEQ ID NO: 636820 - RNA, 22 nt, Human
acaacuguuggaggaacacagg

SEQ ID NO: 636821 - RNA, 22 nt, Human
aacagcaugcuggguaacauug

SEQ ID NO: 636822 - RNA, 22 nt, Human
gucccugguuugcccaggacca

SEQ ID NO: 636823 - RNA, 23 nt, Human
uuugacagcgugguuucuguggg

SEQ ID NO: 636824 - RNA, 22 nt, Human
gucuggagccugggucccugcu

SEQ ID NO: 636825 - RNA, 22 nt, Human
uguguacaggccuugcuagacu

SEQ ID NO: 636826 - RNA, 20 nt, Human
accuggcuuccucuuggcau

SEQ ID NO: 636827 - RNA, 22 nt, Human
agaggcaaugaaagcagucucu

SEQ ID NO: 636828 - RNA, 22 nt, Human
ccacguccagcuaauuuucgua

SEQ ID NO: 636829 - RNA, 22 nt, Human
uucuggagucccacagccaggg

SEQ ID NO: 636830 - RNA, 22 nt, Human
uugaaagaaggugguagagaau

SEQ ID NO: 636831 - RNA, 22 nt, Human
ucucagugggaagggcacaguu

SEQ ID NO: 636832 - RNA, 22 nt, Human
uugacuucagccuguacuugua

SEQ ID NO: 636833 - RNA, 22 nt, Human
gaggggaguaaagucauguuac

SEQ ID NO: 636834 - RNA, 22 nt, Human
uuuccagguauuaauacuguau

SEQ ID NO: 636835 - RNA, 22 nt, Human
ucauauagagggcauacaaaug

SEQ ID NO: 636836 - RNA, 22 nt, Human
cagagccuuaguucuccuagaa

SEQ ID NO: 636837 - RNA, 22 nt, Human
gggaccugggccagaggacagu

SEQ ID NO: 636838 - RNA, 22 nt, Human
uguggacucgcauggcugaggc

SEQ ID NO: 636839 - RNA, 22 nt, Human
gauuauggauggacaguggagc

SEQ ID NO: 636840 - RNA, 22 nt, Human
uagcuauuugagcauauuccag

SEQ ID NO: 636841 - RNA, 22 nt, Human
ccuggagggcgccgcacagucc

SEQ ID NO: 636842 - RNA, 22 nt, Human
cagccagaaccuaggaugagcu

SEQ ID NO: 636843 - RNA, 22 nt, Human
agcuggagaugcccagcaccgg

SEQ ID NO: 636844 - RNA, 22 nt, Human
agcuggcagagcauuuguggcc

SEQ ID NO: 636845 - RNA, 22 nt, Human
gacuggguccucugcuuauggu

SEQ ID NO: 636846 - RNA, 22 nt, Human
ggaagaugcccaacccagcuuu

SEQ ID NO: 636847 - RNA, 22 nt, Human
uuuacuacuucauugacuuacg

SEQ ID NO: 636848 - RNA, 22 nt, Human
agguccaggagauuuggcaauu

SEQ ID NO: 636849 - RNA, 22 nt, Human
accaggcagagcugggccuuaa

SEQ ID NO: 636850 - RNA, 22 nt, Human
ccuggcagcuccguggccuucc

SEQ ID NO: 636851 - RNA, 22 nt, Human
uuaugcuaagugcaacaagcca

SEQ ID NO: 636852 - RNA, 22 nt, Human
gcucagagaaguuaaggaauuu

SEQ ID NO: 636853 - RNA, 22 nt, Human
gcaggcugcccucuuguguuga

SEQ ID NO: 636854 - RNA, 21 nt, Human
aagcaggacauaugaugcccu

SEQ ID NO: 636855 - RNA, 22 nt, Human
cgugucuguguaugcaggccgu

SEQ ID NO: 636856 - RNA, 22 nt, Human
caguuucccugcuugaaaacgu

SEQ ID NO: 636857 - RNA, 22 nt, Human
aggacugggugcagagggcauc

SEQ ID NO: 636858 - RNA, 22 nt, Human
aaggagucugggccauucagag

SEQ ID NO: 636859 - RNA, 22 nt, Human
ggaggccaggaaggcucggaga

SEQ ID NO: 636860 - RNA, 22 nt, Human
aacacugagaacuguugguggu

SEQ ID NO: 636861 - RNA, 22 nt, Human
gcaugcauuuucugagagucag

SEQ ID NO: 636862 - RNA, 22 nt, Human
uggaacacugaucauugccuuu

SEQ ID NO: 636863 - RNA, 22 nt, Human
augcacuuuguaaucuguucaa

SEQ ID NO: 636864 - RNA, 22 nt, Human
gcugggcccagaucccaggauc

SEQ ID NO: 636865 - RNA, 22 nt, Human
uggucuguucaagguggcugau

SEQ ID NO: 636866 - RNA, 22 nt, Human
caggaggcccacaggccccugc

SEQ ID NO: 636867 - RNA, 18 nt, Human
auccugggccagucuuuc

SEQ ID NO: 636868 - RNA, 22 nt, Human
cagcacagcacagcggugacuc

SEQ ID NO: 636869 - RNA, 22 nt, Human
ugugaggauguaaccagaaguc

SEQ ID NO: 636870 - RNA, 22 nt, Human
agcaaagauguccggggcaagc

SEQ ID NO: 636871 - RNA, 22 nt, Human
uuaagagaagaguaucuagaac

SEQ ID NO: 636872 - RNA, 22 nt, Human
gcugugauugucagucuucaau

SEQ ID NO: 636873 - RNA, 22 nt, Human
aaacaugaauagauauuaaaca

SEQ ID NO: 636874 - RNA, 22 nt, Human
uuacauuagacccacuuucaug

SEQ ID NO: 636875 - RNA, 22 nt, Human
aguuuuguaauucucaaaaaua

SEQ ID NO: 636876 - RNA, 22 nt, Human
gagauauguuagaaagcuauug

SEQ ID NO: 636877 - RNA, 22 nt, Human
cagggucuuggcgccaucaccc

SEQ ID NO: 636878 - RNA, 19 nt, Human
caugugcaugagcacagga

SEQ ID NO: 636879 - RNA, 22 nt, Human
aaagggaggggcgauaagccgg

SEQ ID NO: 636880 - RNA, 22 nt, Human
ugucuagggagcugcucaggcu

SEQ ID NO: 636881 - RNA, 22 nt, Human
ggaauaaaaauuguuuacugua

SEQ ID NO: 636882 - RNA, 21 nt, Human
agagagaaggccauauggucc

SEQ ID NO: 636883 - RNA, 22 nt, Human
aucuggcugcugugcuuaagcu

SEQ ID NO: 636884 - RNA, 22 nt, Human
acagaauacuacagacugguua

SEQ ID NO: 636885 - RNA, 22 nt, Human
gaucugaaccuugccuguuggg

SEQ ID NO: 636886 - RNA, 19 nt, Human
uauguguguguauuuacau

SEQ ID NO: 636887 - RNA, 22 nt, Human
gguucucuaacuuugacuggag

SEQ ID NO: 636888 - RNA, 22 nt, Human
gauggguggucucagacuugcc

SEQ ID NO: 636889 - RNA, 22 nt, Human
agcugaaucuugacuaggaaga

SEQ ID NO: 636890 - RNA, 22 nt, Human
ccccagcagcaccuggggcagu

SEQ ID NO: 636891 - RNA, 19 nt, Human
ggccugaggccacagaucc

SEQ ID NO: 636892 - RNA, 22 nt, Human
uucuccuaggaucagggguccu

SEQ ID NO: 636893 - RNA, 22 nt, Human
ugggaaggacagaacauaauug

SEQ ID NO: 636894 - RNA, 22 nt, Human
agaagccauagucugggaggca

SEQ ID NO: 636895 - RNA, 22 nt, Human
ccugcuggccaguggagggcug

SEQ ID NO: 636896 - RNA, 22 nt, Human
cucauccacccucacuaggaaa

SEQ ID NO: 636897 - RNA, 22 nt, Human
augcccugagcaggccuucaag

SEQ ID NO: 636898 - RNA, 22 nt, Human
guggguggaggcgucgagggca

SEQ ID NO: 636899 - RNA, 22 nt, Human
gagccacagugguggcccacgu

SEQ ID NO: 636900 - RNA, 21 nt, Human
uccaaaccugucucuggcucu

SEQ ID NO: 636901 - RNA, 22 nt, Human
ucauuuguucaucugcucuucu

SEQ ID NO: 636902 - RNA, 22 nt, Human
gguggacaguguuagcucuggg

SEQ ID NO: 636903 - RNA, 22 nt, Human
uguauuuauauuagaaugguug

SEQ ID NO: 636904 - RNA, 22 nt, Human
aacaaugccacauuaaguguau

SEQ ID NO: 636905 - RNA, 22 nt, Human
agcuuuauauguuguuucucca

SEQ ID NO: 636906 - RNA, 22 nt, Human
gcagcaggucugucaaugucau

SEQ ID NO: 636907 - RNA, 23 nt, Human
acaaugucuguucauaaaauacc

SEQ ID NO: 636908 - RNA, 22 nt, Human
uucuuucuuggggaacacacuc

SEQ ID NO: 636909 - RNA, 22 nt, Human
agcagcaggugcuucuggaucu

SEQ ID NO: 636910 - RNA, 19 nt, Human
ggucacaaggaguugugaa

SEQ ID NO: 636911 - RNA, 22 nt, Human
accuuauuuggaaauauaauua

SEQ ID NO: 636912 - RNA, 22 nt, Human
gcagggguagagauugcuggug

SEQ ID NO: 636913 - RNA, 22 nt, Human
ugggcugaguguggaacuaguu

SEQ ID NO: 636914 - RNA, 22 nt, Human
ugauggaacagccuuugccaaa

SEQ ID NO: 636915 - RNA, 22 nt, Human
agcaggcaggaaggcagcacug

SEQ ID NO: 636916 - RNA, 22 nt, Human
uaugcuacuagaaauaaaaugg

SEQ ID NO: 636917 - RNA, 22 nt, Human
aagcugggacuuagcgcagaua

SEQ ID NO: 636918 - RNA, 22 nt, Human
ccuugacugccuucaggcuggg

SEQ ID NO: 636919 - RNA, 22 nt, Human
aggauuucugugccuggaaaau

SEQ ID NO: 636920 - RNA, 22 nt, Human
aggcucauccccacaaagcaaa

SEQ ID NO: 636921 - RNA, 22 nt, Human
auuuuuuagccaagacucugca

SEQ ID NO: 636922 - RNA, 22 nt, Human
cuagcaucagaugagaagcugu

SEQ ID NO: 636923 - RNA, 22 nt, Human
ugcuuucacuucucugcagcca

SEQ ID NO: 636924 - RNA, 22 nt, Human
aaagaaucuauauaucaccacc

SEQ ID NO: 636925 - RNA, 22 nt, Human
caaaugcuaacuucuuuccaaa

SEQ ID NO: 636926 - RNA, 22 nt, Human
gcuggcuugacagaggccuggg

SEQ ID NO: 636927 - RNA, 22 nt, Human
acaaggaggucuggggggcccu

SEQ ID NO: 636928 - RNA, 22 nt, Human
ugggcucugugccagguuggug

SEQ ID NO: 636929 - RNA, 22 nt, Human
uuacacacagagcugggccugg

SEQ ID NO: 636930 - RNA, 22 nt, Human
cacaauaaauguuugcugauga

SEQ ID NO: 636931 - RNA, 22 nt, Human
aaaauguaaagcuugaguguag

SEQ ID NO: 636932 - RNA, 22 nt, Human
gggagggaggugcugguucacg

SEQ ID NO: 636933 - RNA, 22 nt, Human
uaaaugcagcaguuucuguucu

SEQ ID NO: 636934 - RNA, 22 nt, Human
ggcuuugcauuuugauggaggu

SEQ ID NO: 636935 - RNA, 21 nt, Human
uuugagaauuggucagagugc

SEQ ID NO: 636936 - RNA, 22 nt, Human
uguggccuugcagccuggaggu

SEQ ID NO: 636937 - RNA, 22 nt, Human
ugucaauaacauuuacuucuau

SEQ ID NO: 636938 - RNA, 22 nt, Human
gagacaggcagcuaguggguca

SEQ ID NO: 636939 - RNA, 22 nt, Human
ggaacagggauuuggccugguu

SEQ ID NO: 636940 - RNA, 22 nt, Human
aauauaguucuagaaauauuuu

SEQ ID NO: 636941 - RNA, 22 nt, Human
gcacaggcucucuuggggacac

SEQ ID NO: 636942 - RNA, 22 nt, Human
gacuccagguguccaggccucc

SEQ ID NO: 636943 - RNA, 22 nt, Human
caauuucauuaauagauauaga

SEQ ID NO: 636944 - RNA, 22 nt, Human
uuugauacuuugugcaauuucu

SEQ ID NO: 636945 - RNA, 22 nt, Human
ugcuuauuaaacaugcauauuc

SEQ ID NO: 636946 - RNA, 22 nt, Human
aggccagugccuuuccagggcu

SEQ ID NO: 636947 - RNA, 22 nt, Human
uuuacagaauguugaauuuggg

SEQ ID NO: 636948 - RNA, 22 nt, Human
ucaauagaaaugcagagucuca

SEQ ID NO: 636949 - RNA, 22 nt, Human
ggacagugaaucuggagguaua

SEQ ID NO: 636950 - RNA, 22 nt, Human
ccaggaggugcuggaagaaagc

SEQ ID NO: 636951 - RNA, 22 nt, Human
uuguccaaggucccacaguuag

SEQ ID NO: 636952 - RNA, 22 nt, Human
gguaacaguauguagaguaaga

SEQ ID NO: 636953 - RNA, 22 nt, Human
ggucacaucuaaauggagcauu

SEQ ID NO: 636954 - RNA, 22 nt, Human
uuucacauguauauaggcauua

SEQ ID NO: 636955 - RNA, 22 nt, Human
ccugggucccugagagaugauu

SEQ ID NO: 636956 - RNA, 22 nt, Human
gauaaaauauguggccuuuagu

SEQ ID NO: 636957 - RNA, 23 nt, Human
auaaggcauaaagguacauugga

SEQ ID NO: 636958 - RNA, 20 nt, Human
uccugguggauacugcuuaa

SEQ ID NO: 636959 - RNA, 22 nt, Human
gaaucaaugguagauuaaguaa

SEQ ID NO: 636960 - RNA, 22 nt, Human
acuuuggggaucuacggcugga

SEQ ID NO: 636961 - RNA, 22 nt, Human
gggaugcagucagagccccugu

SEQ ID NO: 636962 - RNA, 22 nt, Human
ccagagagcuacaaggcauaaa

SEQ ID NO: 636963 - RNA, 22 nt, Human
agccaaaggcaccagagacacu

SEQ ID NO: 636964 - RNA, 22 nt, Human
aaaaugauauccugacuuuuau

SEQ ID NO: 636965 - RNA, 22 nt, Human
aggucugagcuccuuccucuga

SEQ ID NO: 636966 - RNA, 20 nt, Human
cacccuacggccucaccucc

SEQ ID NO: 636967 - RNA, 22 nt, Human
cacaaagucugcagcugcugua

SEQ ID NO: 636968 - RNA, 22 nt, Human
acaugcacucucacugugcucu

SEQ ID NO: 636969 - RNA, 22 nt, Human
cucuucuuggaaugcugacugu

SEQ ID NO: 636970 - RNA, 22 nt, Human
uccugagcucccaugaacaggc

SEQ ID NO: 636971 - RNA, 22 nt, Human
uauguaguacuuagugcauaca

SEQ ID NO: 636972 - RNA, 21 nt, Human
acagaguaguugaaacagaga

SEQ ID NO: 636973 - RNA, 22 nt, Human
ucccaccuuccguggaacccgu

SEQ ID NO: 636974 - RNA, 22 nt, Human
gcagggcaucccugagcgggug

SEQ ID NO: 636975 - RNA, 22 nt, Human
uguacauauauguauguacgca

SEQ ID NO: 636976 - RNA, 22 nt, Human
cguuuacuguguaccaggcacu

SEQ ID NO: 636977 - RNA, 22 nt, Human
cccuccucaacucuggcuucca

SEQ ID NO: 636978 - RNA, 22 nt, Human
gcacuucacaugccuuuuccug

SEQ ID NO: 636979 - RNA, 22 nt, Human
agagcucaagacgcucacagua

SEQ ID NO: 636980 - RNA, 22 nt, Human
auucugcuuaagggaggcuguc

SEQ ID NO: 636981 - RNA, 22 nt, Human
agucugaaaguauguuguaaug

SEQ ID NO: 636982 - RNA, 22 nt, Human
uccuccuccucacagucaccug

SEQ ID NO: 636983 - RNA, 22 nt, Human
ucuucacauuuuaagaaguucu

SEQ ID NO: 636984 - RNA, 22 nt, Human
ccuccaaggugagagaggaugg

SEQ ID NO: 636985 - RNA, 22 nt, Human
cagcugcaggaacaaaaaugug

SEQ ID NO: 636986 - RNA, 22 nt, Human
uguccauggggaaggggaagug

SEQ ID NO: 636987 - RNA, 22 nt, Human
uggcuuccugcacagugucugc

SEQ ID NO: 636988 - RNA, 22 nt, Human
uuaaaccacugaguggagacua

SEQ ID NO: 636989 - RNA, 22 nt, Human
uagccaguuucuuuaacagcaa

SEQ ID NO: 636990 - RNA, 22 nt, Human
gcuacauaguaacccacaaauc

SEQ ID NO: 636991 - RNA, 22 nt, Human
caaagcaaggcucaguuugaac

SEQ ID NO: 636992 - RNA, 22 nt, Human
cacaugugggaaauggugcuua

SEQ ID NO: 636993 - RNA, 22 nt, Human
gccugccuguuggcugaggugc

SEQ ID NO: 636994 - RNA, 22 nt, Human
ucaugacaucuguuuaucucaa

SEQ ID NO: 636995 - RNA, 23 nt, Human
ugcaugugaauucauacuuguuu

SEQ ID NO: 636996 - RNA, 22 nt, Human
accugcaggcacaggugugcgc

SEQ ID NO: 636997 - RNA, 22 nt, Human
aggcagugguguuugcuggugg

SEQ ID NO: 636998 - RNA, 22 nt, Human
uggcagcacggcauccacucuc

SEQ ID NO: 636999 - RNA, 22 nt, Human
cuauuucauguuccuauggccg

SEQ ID NO: 637000 - RNA, 22 nt, Human
cacccagcagcacuuaagacua

SEQ ID NO: 637001 - RNA, 22 nt, Human
cauucaaagcaggaaaggccuu

SEQ ID NO: 637002 - RNA, 22 nt, Human
gucucugugccuucuccccacc

SEQ ID NO: 637003 - RNA, 18 nt, Human
ucauuuguuuugcaugaa

SEQ ID NO: 637004 - RNA, 22 nt, Human
gcagggcacacaagaaugauaa

SEQ ID NO: 637005 - RNA, 22 nt, Human
ugcagaaauaacucauauugca

SEQ ID NO: 637006 - RNA, 22 nt, Human
caagucacuuaugugcagauau

SEQ ID NO: 637007 - RNA, 22 nt, Human
uuuaacuccuaguguguauuag

SEQ ID NO: 637008 - RNA, 22 nt, Human
ugaguaucaauuacauaguugu

SEQ ID NO: 637009 - RNA, 22 nt, Human
gcccuccccucuggguggugag

SEQ ID NO: 637010 - RNA, 22 nt, Human
aucuaagaggaugguuggaaau

SEQ ID NO: 637011 - RNA, 22 nt, Human
agcuguguguuugucaugggcg

SEQ ID NO: 637012 - RNA, 22 nt, Human
uugccaggcucugguuccagcc

SEQ ID NO: 637013 - RNA, 22 nt, Human
aaacucaaagucagaucagaga

SEQ ID NO: 637014 - RNA, 22 nt, Human
caggguagggcaagggaaccug

SEQ ID NO: 637015 - RNA, 22 nt, Human
gugcuaugauuggacagaauag

SEQ ID NO: 637016 - RNA, 22 nt, Human
cucccuggugacucccaaagcu

SEQ ID NO: 637017 - RNA, 22 nt, Human
gauucugcuuaccauuugaucu

SEQ ID NO: 637018 - RNA, 22 nt, Human
aggaauugagauccuagguuuu

SEQ ID NO: 637019 - RNA, 22 nt, Human
caguaucuccacauguaaagug

SEQ ID NO: 637020 - RNA, 22 nt, Human
gcugaaaugaaaacacaggucg

SEQ ID NO: 637021 - RNA, 20 nt, Human
guuuauacagaagaccccaa

SEQ ID NO: 637022 - RNA, 22 nt, Human
ugccacuggggcuaggacuguu

SEQ ID NO: 637023 - RNA, 22 nt, Human
ucuagcuguggucgagugagga

SEQ ID NO: 637024 - RNA, 22 nt, Human
aaucauuguucuucagauuuga

SEQ ID NO: 637025 - RNA, 22 nt, Human
agccaacuaggagauuaaggua

SEQ ID NO: 637026 - RNA, 22 nt, Human
aggucacccguuugacuaucca

SEQ ID NO: 637027 - RNA, 22 nt, Human
agagaugagaacaugcuuggau

SEQ ID NO: 637028 - RNA, 22 nt, Human
augaagucuauuuaccuaagcu

SEQ ID NO: 637029 - RNA, 20 nt, Human
gaaaugugaccucuucugug

SEQ ID NO: 637030 - RNA, 19 nt, Human
ugaguucugugguucucaa

SEQ ID NO: 637031 - RNA, 22 nt, Human
ugucacauugaauaugauuuau

SEQ ID NO: 637032 - RNA, 22 nt, Human
caggauccccaggucgccgucc

SEQ ID NO: 637033 - RNA, 22 nt, Human
ugcugggcucaaccuccagagc

SEQ ID NO: 637034 - RNA, 22 nt, Human
uuacacaauauaugguacuugg

SEQ ID NO: 637035 - RNA, 22 nt, Human
caggcagugucccaggaagcca

SEQ ID NO: 637036 - RNA, 22 nt, Human
gcuggccugggcagccugucgg

SEQ ID NO: 637037 - RNA, 22 nt, Human
uuuacaacauaggccccaagaa

SEQ ID NO: 637038 - RNA, 22 nt, Human
uuccaauggaaucaugucuuga

SEQ ID NO: 637039 - RNA, 22 nt, Human
gagcagcugagcuggaaugaga

SEQ ID NO: 637040 - RNA, 22 nt, Human
uccaguccuagaaacuggagag

SEQ ID NO: 637041 - RNA, 22 nt, Human
ucugcaggaggcuggcugcagg

SEQ ID NO: 637042 - RNA, 22 nt, Human
cugcucugcaaggcacagugau

SEQ ID NO: 637043 - RNA, 21 nt, Human
uggcucugcucagagcagucc

SEQ ID NO: 637044 - RNA, 22 nt, Human
gaccauuuguugaaaagauuau

SEQ ID NO: 637045 - RNA, 22 nt, Human
cacagugaccucuuuaaaaggg

SEQ ID NO: 637046 - RNA, 22 nt, Human
gaagccaagugcaaaugccuua

SEQ ID NO: 637047 - RNA, 22 nt, Human
cagcucuggccagaucuauccu

SEQ ID NO: 637048 - RNA, 20 nt, Human
ucuaggcaggcaggcucgug

SEQ ID NO: 637049 - RNA, 22 nt, Human
ucaaugcaaccuccaccucccg

SEQ ID NO: 637050 - RNA, 22 nt, Human
ucauuacagagauauaaucuac

SEQ ID NO: 637051 - RNA, 22 nt, Human
aagcauuguaagcagaagaugc

SEQ ID NO: 637052 - RNA, 22 nt, Human
ugcaugcaugugagcaugcaua

SEQ ID NO: 637053 - RNA, 22 nt, Human
uuugaaaggagcuuuauccaga

SEQ ID NO: 637054 - RNA, 22 nt, Human
aagcaguguucccagcuggccc

SEQ ID NO: 637055 - RNA, 22 nt, Human
uuggaacuggauuucauguagc

SEQ ID NO: 637056 - RNA, 22 nt, Human
cuguucucuggcgguggcuguu

SEQ ID NO: 637057 - RNA, 22 nt, Human
aaauuaucaugggggagaaaca

SEQ ID NO: 637058 - RNA, 19 nt, Human
agggaguuuauauuugcac

SEQ ID NO: 637059 - RNA, 22 nt, Human
acagcaggagccuucauaugcu

SEQ ID NO: 637060 - RNA, 22 nt, Human
cuucauguucugccuguggaag

SEQ ID NO: 637061 - RNA, 22 nt, Human
uuauuaugugcuagagaaugua

SEQ ID NO: 637062 - RNA, 22 nt, Human
ggagcugaugguagaagaauga

SEQ ID NO: 637063 - RNA, 22 nt, Human
agggugucagccacggaauggg

SEQ ID NO: 637064 - RNA, 22 nt, Human
cuuuggaggaaaauugagguca

SEQ ID NO: 637065 - RNA, 22 nt, Human
acugaaggaaacuuuuguguuu

SEQ ID NO: 637066 - RNA, 22 nt, Human
gcccuccaccagagcccuucuc

SEQ ID NO: 637067 - RNA, 22 nt, Human
uacuacauuaauaaaacauuca

SEQ ID NO: 637068 - RNA, 22 nt, Human
agaguaguucuuugcagagugg

SEQ ID NO: 637069 - RNA, 22 nt, Human
auugcagggacucaauaagaau

SEQ ID NO: 637070 - RNA, 22 nt, Human
uuugaagacauauuguuacaua

SEQ ID NO: 637071 - RNA, 22 nt, Human
uacagauauguaugcacuuuuu

SEQ ID NO: 637072 - RNA, 22 nt, Human
gcagguggagcaguagucuggu

SEQ ID NO: 637073 - RNA, 22 nt, Human
gcccaggccggagagcagugcu

SEQ ID NO: 637074 - RNA, 22 nt, Human
aaucuguuuaacagauuucugu

SEQ ID NO: 637075 - RNA, 22 nt, Human
cuugagucauauaaagacagag

SEQ ID NO: 637076 - RNA, 22 nt, Human
gagaggagguggcuaugacagc

SEQ ID NO: 637077 - RNA, 22 nt, Human
gaagcccacguuuggugaugua

SEQ ID NO: 637078 - RNA, 22 nt, Human
ugggucuguagggcuguccaau

SEQ ID NO: 637079 - RNA, 22 nt, Human
ggcugggccagggccuguggac

SEQ ID NO: 637080 - RNA, 19 nt, Human
acacugaucagaucagcag

SEQ ID NO: 637081 - RNA, 22 nt, Human
auaacagaauaagucauuaccg

SEQ ID NO: 637082 - RNA, 22 nt, Human
gcugcuggaugcgcuugauggu

SEQ ID NO: 637083 - RNA, 20 nt, Human
ucuguagucuaugaggcuua

SEQ ID NO: 637084 - RNA, 22 nt, Human
ucccacacuugaaacaaggcug

SEQ ID NO: 637085 - RNA, 22 nt, Human
agagacuguguccaucgugccu

SEQ ID NO: 637086 - RNA, 22 nt, Human
uaguuaggaauagcagcgacuc

SEQ ID NO: 637087 - RNA, 22 nt, Human
ucucuguguugcaggaaaaucu

SEQ ID NO: 637088 - RNA, 22 nt, Human
aauucaaucuguagauugugau

SEQ ID NO: 637089 - RNA, 22 nt, Human
ggggcucaguucggacagccug

SEQ ID NO: 637090 - RNA, 22 nt, Human
uguacagucaugcuuucuguuc

SEQ ID NO: 637091 - RNA, 22 nt, Human
uggcagcagggaggccaguguu

SEQ ID NO: 637092 - RNA, 22 nt, Human
aaugaucuggcucaggauauca

SEQ ID NO: 637093 - RNA, 22 nt, Human
cccauuuuugugugaguaauga

SEQ ID NO: 637094 - RNA, 22 nt, Human
uccaggcucucaggugucagca

SEQ ID NO: 637095 - RNA, 22 nt, Human
augauucuggugagaaugagga

SEQ ID NO: 637096 - RNA, 22 nt, Human
guuauacacauuccuggugagg

SEQ ID NO: 637097 - RNA, 22 nt, Human
cacaauguguuggguuaaguuu

SEQ ID NO: 637098 - RNA, 20 nt, Human
cugcuugggccccucuggcc

SEQ ID NO: 637099 - RNA, 22 nt, Human
ccaggacucaaugaccacaggg

SEQ ID NO: 637100 - RNA, 22 nt, Human
acaaaugauuaucacagaggag

SEQ ID NO: 637101 - RNA, 22 nt, Human
aguaaaaucuuaagcacagugg

SEQ ID NO: 637102 - RNA, 22 nt, Human
gggcucuggauggagccugcag

SEQ ID NO: 637103 - RNA, 22 nt, Human
uaaucuguaauuuuugcaauag

SEQ ID NO: 637104 - RNA, 22 nt, Human
ucauuucaaguucugacagcua

SEQ ID NO: 637105 - RNA, 22 nt, Human
aaauggcaggcucuuugcuagu

SEQ ID NO: 637106 - RNA, 22 nt, Human
ggccagcaguauauagcuaauu

SEQ ID NO: 637107 - RNA, 17 nt, Human
agcauuuguguuaacag

SEQ ID NO: 637108 - RNA, 22 nt, Human
uuuuggaacacagacauuagaa

SEQ ID NO: 637109 - RNA, 22 nt, Human
ugugcagcuaguccuggacuug

SEQ ID NO: 637110 - RNA, 22 nt, Human
ugggggugacuaucucgggaau

SEQ ID NO: 637111 - RNA, 22 nt, Human
cuuuacaccaagcagaucuuuc

SEQ ID NO: 637112 - RNA, 22 nt, Human
gaauuauaggcaaagcagucau

SEQ ID NO: 637113 - RNA, 22 nt, Human
acagaugauuuuuaugaaaaca

SEQ ID NO: 637114 - RNA, 19 nt, Human
uuuuccuucuauauguuuc

SEQ ID NO: 637115 - RNA, 22 nt, Human
cagagugauaaauauagaaauu

SEQ ID NO: 637116 - RNA, 22 nt, Human
cugggucagucugucccuaggg

SEQ ID NO: 637117 - RNA, 21 nt, Human
ucacaugcccauuacuggagc

SEQ ID NO: 637118 - RNA, 22 nt, Human
cugcugcucuugugcauuagug

SEQ ID NO: 637119 - RNA, 22 nt, Human
uugaagaugcugucucuuccag

SEQ ID NO: 637120 - RNA, 22 nt, Human
auuuggcaacauuaauugaauc

SEQ ID NO: 637121 - RNA, 22 nt, Human
guuggcucauuuuauagacagc

SEQ ID NO: 637122 - RNA, 22 nt, Human
ccaguguuugaugggauuuuca

SEQ ID NO: 637123 - RNA, 22 nt, Human
ugaagacagggucuuuaacgag

SEQ ID NO: 637124 - RNA, 22 nt, Human
ugagacgaagucuugcucuguu

SEQ ID NO: 637125 - RNA, 22 nt, Human
ggugugugguccucucacuuag

SEQ ID NO: 637126 - RNA, 22 nt, Human
ccaaggcaaugugcagcuggug

SEQ ID NO: 637127 - RNA, 22 nt, Human
aagacacagcgaaauguuccug

SEQ ID NO: 637128 - RNA, 22 nt, Human
uuggaacaaucacauccuugcu

SEQ ID NO: 637129 - RNA, 20 nt, Human
gaaucuuacuacauucucuc

SEQ ID NO: 637130 - RNA, 22 nt, Human
auuccuucuuugagaauaagca

SEQ ID NO: 637131 - RNA, 22 nt, Human
caucauuguuagggacucuaac

SEQ ID NO: 637132 - RNA, 22 nt, Human
gcugggaaugauuuuggagagg

SEQ ID NO: 637133 - RNA, 22 nt, Human
ggacuugccuuuaguuaaaaua

SEQ ID NO: 637134 - RNA, 22 nt, Human
gaagugcaaaaccacaugguaa

SEQ ID NO: 637135 - RNA, 22 nt, Human
aguggcaguggggcagggcccu

SEQ ID NO: 637136 - RNA, 22 nt, Human
ggaagaugagaaguggggcucc

SEQ ID NO: 637137 - RNA, 22 nt, Human
gauugaaauauaaauauguguu

SEQ ID NO: 637138 - RNA, 22 nt, Human
gugauaaaauucaaauagcucu

SEQ ID NO: 637139 - RNA, 22 nt, Human
gauggguagaaguggaagaggu

SEQ ID NO: 637140 - RNA, 22 nt, Human
gauguucagugguugaccauaa

SEQ ID NO: 637141 - RNA, 22 nt, Human
agagcuuugggacauuugcuag

SEQ ID NO: 637142 - RNA, 23 nt, Human
auccaugugagaauagacuagca

SEQ ID NO: 637143 - RNA, 22 nt, Human
caauaaguaauaggcaucuaau

SEQ ID NO: 637144 - RNA, 22 nt, Human
caaagcaguuuuaaucaaguag

SEQ ID NO: 637145 - RNA, 22 nt, Human
auacacuggccuuugcagagcc

SEQ ID NO: 637146 - RNA, 22 nt, Human
cucugggaaguggagacuucag

SEQ ID NO: 637147 - RNA, 22 nt, Human
uggguccuugcuggcuucaaag

SEQ ID NO: 637148 - RNA, 22 nt, Human
cucaccccuguaauuccagcac

SEQ ID NO: 637149 - RNA, 22 nt, Human
gacaauaaaaugaucuuacagu

SEQ ID NO: 637150 - RNA, 22 nt, Human
ggcucccacccauagggcgagu

SEQ ID NO: 637151 - RNA, 22 nt, Human
ccucaggugugggccagcuguc

SEQ ID NO: 637152 - RNA, 23 nt, Human
gccaggaguggguagacuaaugc

SEQ ID NO: 637153 - RNA, 22 nt, Human
aucaaauuaugugcuacaagaa

SEQ ID NO: 637154 - RNA, 22 nt, Human
uauauuaaagugcuuugcagug

SEQ ID NO: 637155 - RNA, 22 nt, Human
uacuuacagaaggaagcaauug

SEQ ID NO: 637156 - RNA, 22 nt, Human
gagcaguuuuauuucaugagac

SEQ ID NO: 637157 - RNA, 22 nt, Human
ugaaaagugaucauggauuagg

SEQ ID NO: 637158 - RNA, 22 nt, Human
auucuacaaucauguagauccu

SEQ ID NO: 637159 - RNA, 22 nt, Human
caaacauugggggcuucaacac

SEQ ID NO: 637160 - RNA, 22 nt, Human
ugaagcaaacgcuucuguuccu

SEQ ID NO: 637161 - RNA, 19 nt, Human
cugcucccuccuucuggca

SEQ ID NO: 637162 - RNA, 22 nt, Human
agcugugcugccaaguugcuga

SEQ ID NO: 637163 - RNA, 19 nt, Human
ggcugccuggagcgagggc

SEQ ID NO: 637164 - RNA, 22 nt, Human
gauuucagaagcaagaggaggu

SEQ ID NO: 637165 - RNA, 22 nt, Human
auuuguugcuagcagcacugau

SEQ ID NO: 637166 - RNA, 20 nt, Human
ugcugccuguuuuugugaau

SEQ ID NO: 637167 - RNA, 22 nt, Human
uccaggagucuagccucaggcc

SEQ ID NO: 637168 - RNA, 22 nt, Human
uaggccaaaugacuugauguuu

SEQ ID NO: 637169 - RNA, 23 nt, Human
gcugacugugaaauucuggagcu

SEQ ID NO: 637170 - RNA, 22 nt, Human
auggcccucuccuuaggucagc

SEQ ID NO: 637171 - RNA, 22 nt, Human
uguguguguuccuccucagcua

SEQ ID NO: 637172 - RNA, 19 nt, Human
ucauucaggaccaguggau

SEQ ID NO: 637173 - RNA, 22 nt, Human
ugaggcagugauguuuaagcac

SEQ ID NO: 637174 - RNA, 22 nt, Human
caggcucccugccagggccggc

SEQ ID NO: 637175 - RNA, 22 nt, Human
gaggcacugcugggccccugua

SEQ ID NO: 637176 - RNA, 22 nt, Human
cauacuuuuuagaucugccuuc

SEQ ID NO: 637177 - RNA, 22 nt, Human
aaagcuuuuguuuucguaacug

SEQ ID NO: 637178 - RNA, 22 nt, Human
gagcugagaagcagcgcuugau

SEQ ID NO: 637179 - RNA, 22 nt, Human
agaagcaguuauuuuuugcaca

SEQ ID NO: 637180 - RNA, 22 nt, Human
uuaacaguaaagaauugugcaa

SEQ ID NO: 637181 - RNA, 19 nt, Human
aggugugggggcugcagac

SEQ ID NO: 637182 - RNA, 22 nt, Human
caggggcuuaagugacagaagg

SEQ ID NO: 637183 - RNA, 22 nt, Human
guuuagaacacggaaauacuga

SEQ ID NO: 637184 - RNA, 22 nt, Human
gcucagguguuaccuccucuag

SEQ ID NO: 637185 - RNA, 22 nt, Human
gcuggcugugauuuugccaaca

SEQ ID NO: 637186 - RNA, 22 nt, Human
augcaauaguaauucuagucug

SEQ ID NO: 637187 - RNA, 22 nt, Human
ugagcaagagaaacugacugua

SEQ ID NO: 637188 - RNA, 21 nt, Human
aaagauguuucuuuuccucac

SEQ ID NO: 637189 - RNA, 22 nt, Human
cuucccuuccuggggcaauuua

SEQ ID NO: 637190 - RNA, 22 nt, Human
uaaggcacgcauaagagggggc

SEQ ID NO: 637191 - RNA, 22 nt, Human
ucagggcaucaucaugaauaua

SEQ ID NO: 637192 - RNA, 22 nt, Human
cucacagaugcugugggucagg

SEQ ID NO: 637193 - RNA, 22 nt, Human
agccucucuuuauucccagcua

SEQ ID NO: 637194 - RNA, 21 nt, Human
gggcagcacgucauuccugug

SEQ ID NO: 637195 - RNA, 22 nt, Human
uggaauucuuauucugacuuca

SEQ ID NO: 637196 - RNA, 22 nt, Human
aaguaaaauguuuccuuuauua

SEQ ID NO: 637197 - RNA, 22 nt, Human
ugcuggaggcaguggaggugcc

SEQ ID NO: 637198 - RNA, 22 nt, Human
acuccagguuuuuucacugaag

SEQ ID NO: 637199 - RNA, 22 nt, Human
ugagacagggucuugcucuguu

SEQ ID NO: 637200 - RNA, 22 nt, Human
ugggggagauugugcaucucua

SEQ ID NO: 637201 - RNA, 22 nt, Human
gaaggcaacaccaggaugcacu

SEQ ID NO: 637202 - RNA, 22 nt, Human
uaucagaagacuuacaguaucg

SEQ ID NO: 637203 - RNA, 22 nt, Human
acagagucucagggaugaaagc

SEQ ID NO: 637204 - RNA, 18 nt, Human
cugaggcuggcaggagcc

SEQ ID NO: 637205 - RNA, 22 nt, Human
uagcagcccaguuucuggccaa

SEQ ID NO: 637206 - RNA, 22 nt, Human
cugggagcgcagcaggcacaac

SEQ ID NO: 637207 - RNA, 22 nt, Human
agcaggcaggcugccagugaau

SEQ ID NO: 637208 - RNA, 22 nt, Human
ggcugaaaccguuauccacuga

SEQ ID NO: 637209 - RNA, 22 nt, Human
guuauuuaacuuuguagcaugg

SEQ ID NO: 637210 - RNA, 22 nt, Human
uuucugcagucucucagaagcc

SEQ ID NO: 637211 - RNA, 22 nt, Human
ggcagucuuucccuugagcucu

SEQ ID NO: 637212 - RNA, 22 nt, Human
ggagcugcauuuagggagccuu

SEQ ID NO: 637213 - RNA, 22 nt, Human
cccugggcucagagcagguagc

SEQ ID NO: 637214 - RNA, 22 nt, Human
ugcagagggacagccacagcuc

SEQ ID NO: 637215 - RNA, 22 nt, Human
aguuauucauuuauucuguaca

SEQ ID NO: 637216 - RNA, 22 nt, Human
ugccagcucccuuuucuccucc

SEQ ID NO: 637217 - RNA, 22 nt, Human
agggacccauagagagaccagu

SEQ ID NO: 637218 - RNA, 21 nt, Human
uccucuccaugaucuguuugu

SEQ ID NO: 637219 - RNA, 22 nt, Human
gguuuaagacaggcuucacagu

SEQ ID NO: 637220 - RNA, 22 nt, Human
ucccugcuugcucucagcccuu

SEQ ID NO: 637221 - RNA, 22 nt, Human
ccagagaggccaaggucguggu

SEQ ID NO: 637222 - RNA, 22 nt, Human
auagaucauguuaaaagcucca

SEQ ID NO: 637223 - RNA, 22 nt, Human
ugcauguauuuaaaguugcaau

SEQ ID NO: 637224 - RNA, 22 nt, Human
gccuugccgcucagcagugggg

SEQ ID NO: 637225 - RNA, 22 nt, Human
aucagugcugagagacuaucaa

SEQ ID NO: 637226 - RNA, 22 nt, Human
agucagagucuauugcuguggu

SEQ ID NO: 637227 - RNA, 22 nt, Human
uaaaugcuccauacauacacca

SEQ ID NO: 637228 - RNA, 22 nt, Human
caaggaaaagaaguauuucaga

SEQ ID NO: 637229 - RNA, 22 nt, Human
uagaagcacugacagaguuuga

SEQ ID NO: 637230 - RNA, 22 nt, Human
uagaggcaaccaguguugagaa

SEQ ID NO: 637231 - RNA, 22 nt, Human
cacagcagauccagggguugug

SEQ ID NO: 637232 - RNA, 22 nt, Human
acccucaguaaucgugcaguuu

SEQ ID NO: 637233 - RNA, 22 nt, Human
agggggugucucugauuggguu

SEQ ID NO: 637234 - RNA, 22 nt, Human
uucugggacaucuggacaguuu

SEQ ID NO: 637235 - RNA, 22 nt, Human
ggugacaguuccggagguacag

SEQ ID NO: 637236 - RNA, 22 nt, Human
auucaguuauucagagaaggga

SEQ ID NO: 637237 - RNA, 22 nt, Human
aguggcagggacuucauauaaa

SEQ ID NO: 637238 - RNA, 22 nt, Human
caggcacacaggcucccugggc

SEQ ID NO: 637239 - RNA, 22 nt, Human
cucuaauacugaccaagucacc

SEQ ID NO: 637240 - RNA, 22 nt, Human
caggaaauguauaauuuuauaa

SEQ ID NO: 637241 - RNA, 22 nt, Human
uggcagagaacacacaugauuc

SEQ ID NO: 637242 - RNA, 17 nt, Human
cuccuggccaccccucu

SEQ ID NO: 637243 - RNA, 22 nt, Human
gacuugggagucuucugagaug

SEQ ID NO: 637244 - RNA, 22 nt, Human
ucugugaaacagcucuggcaug

SEQ ID NO: 637245 - RNA, 23 nt, Human
cggacaaccauuguuuuaguauc

SEQ ID NO: 637246 - RNA, 20 nt, Human
ucccucaguuuccagcccug

SEQ ID NO: 637247 - RNA, 22 nt, Human
gaaaggucaguuccacuuccau

SEQ ID NO: 637248 - RNA, 22 nt, Human
cuggcaggcggagguugcagug

SEQ ID NO: 637249 - RNA, 22 nt, Human
agggggagacauguguguguuu

SEQ ID NO: 637250 - RNA, 22 nt, Human
ucauauaaguuuaaaacuaucu

SEQ ID NO: 637251 - RNA, 22 nt, Human
auuuccacauaagggaaauaag

SEQ ID NO: 637252 - RNA, 22 nt, Human
guuucaaaaugaugcuguaacu

SEQ ID NO: 637253 - RNA, 23 nt, Human
ugggccacuauagaaaucucuca

SEQ ID NO: 637254 - RNA, 22 nt, Human
uuuauacuccacucugcaagcg

SEQ ID NO: 637255 - RNA, 22 nt, Human
uucauucauucaugaauguuaa

SEQ ID NO: 637256 - RNA, 20 nt, Human
aggggcaccugcgacggggc

SEQ ID NO: 637257 - RNA, 22 nt, Human
augaaugacugucuacuuuggg

SEQ ID NO: 637258 - RNA, 22 nt, Human
aucuauuuuaaauggcaguaaa

SEQ ID NO: 637259 - RNA, 22 nt, Human
cccugggaaguauuccagcuau

SEQ ID NO: 637260 - RNA, 22 nt, Human
aguguguaaugccaggggcugc

SEQ ID NO: 637261 - RNA, 22 nt, Human
gucuauguaaacgucuacauua

SEQ ID NO: 637262 - RNA, 22 nt, Human
aacacugaguaucagaguuggg

SEQ ID NO: 637263 - RNA, 22 nt, Human
guacauuucaguuuccuuaaga

SEQ ID NO: 637264 - RNA, 22 nt, Human
uauuaggguaaauuugacaugc

SEQ ID NO: 637265 - RNA, 22 nt, Human
cugucccauacuaucuggguga

SEQ ID NO: 637266 - RNA, 22 nt, Human
gcagcucugacaaugccuggaa

SEQ ID NO: 637267 - RNA, 22 nt, Human
uucuaucauacuugaauacauu

SEQ ID NO: 637268 - RNA, 22 nt, Human
aagcuuuaugacuuggagacag

SEQ ID NO: 637269 - RNA, 22 nt, Human
caggcaaggaggcacugaggga

SEQ ID NO: 637270 - RNA, 22 nt, Human
auguuaugugcaagauacauaa

SEQ ID NO: 637271 - RNA, 22 nt, Human
gugagcaguggccaggguccua

SEQ ID NO: 637272 - RNA, 22 nt, Human
uuuuccuuugaaaggugagggc

SEQ ID NO: 637273 - RNA, 22 nt, Human
uagaggauuuugcauuucauau

SEQ ID NO: 637274 - RNA, 20 nt, Human
cuaagaggaggacuagguuu

SEQ ID NO: 637275 - RNA, 22 nt, Human
gacagaguuguugauguaugcu

SEQ ID NO: 637276 - RNA, 22 nt, Human
auuuagugaaacccauaaagca

SEQ ID NO: 637277 - RNA, 22 nt, Human
gacagcuucuaugugacgagca

SEQ ID NO: 637278 - RNA, 22 nt, Human
agcaugcugguguucauggcag

SEQ ID NO: 637279 - RNA, 22 nt, Human
ugggaggaucucuugaggccag

SEQ ID NO: 637280 - RNA, 22 nt, Human
agauggcugggccccaccccag

SEQ ID NO: 637281 - RNA, 20 nt, Human
acuccagguggcaugaggac

SEQ ID NO: 637282 - RNA, 22 nt, Human
ugugaauagugccgcaauaaac

SEQ ID NO: 637283 - RNA, 22 nt, Human
cauggccaaagaauuauauuuu

SEQ ID NO: 637284 - RNA, 22 nt, Human
ugguuuuaaaaacaugcugcau

SEQ ID NO: 637285 - RNA, 22 nt, Human
agugugggcccccagguuagcc

SEQ ID NO: 637286 - RNA, 22 nt, Human
aacaaaugauuguugguuggag

SEQ ID NO: 637287 - RNA, 20 nt, Human
cagaacagucugagaggcca

SEQ ID NO: 637288 - RNA, 22 nt, Human
cagauaaaggcuuacuaguagu

SEQ ID NO: 637289 - RNA, 22 nt, Human
uuccaguucuggcuuugccacu

SEQ ID NO: 637290 - RNA, 22 nt, Human
acagcuggcaggggggcaugaa

SEQ ID NO: 637291 - RNA, 22 nt, Human
aggagcagaacuguuguggagg

SEQ ID NO: 637292 - RNA, 22 nt, Human
agaaagaacguugguuaucuua

SEQ ID NO: 637293 - RNA, 22 nt, Human
uucaagucugcccagagucagc

SEQ ID NO: 637294 - RNA, 22 nt, Human
cccagccugucuuucccaauga

SEQ ID NO: 637295 - RNA, 22 nt, Human
ccaggcuguaagagugauguug

SEQ ID NO: 637296 - RNA, 22 nt, Human
ccaggcucugcaaaaucaggcu

SEQ ID NO: 637297 - RNA, 22 nt, Human
uuucacaucagagguagauuag

SEQ ID NO: 637298 - RNA, 20 nt, Human
gcucccagccugcagucccc

SEQ ID NO: 637299 - RNA, 21 nt, Human
uggcugccuggcucugugguu

SEQ ID NO: 637300 - RNA, 22 nt, Human
ucccagccaggcucuaccacuu

SEQ ID NO: 637301 - RNA, 22 nt, Human
gaggaaaugguuguucaggugg

SEQ ID NO: 637302 - RNA, 22 nt, Human
ggcccugagcugaaguacugug

SEQ ID NO: 637303 - RNA, 18 nt, Human
aacaguuuccagauucuc

SEQ ID NO: 637304 - RNA, 22 nt, Human
uagggcucagcucuagcuccug

SEQ ID NO: 637305 - RNA, 22 nt, Human
uuguuuccagcaaauaguccau

SEQ ID NO: 637306 - RNA, 22 nt, Human
uucuaaucugggcuucugcagu

SEQ ID NO: 637307 - RNA, 22 nt, Human
accagcaggccaggggcacugc

SEQ ID NO: 637308 - RNA, 22 nt, Human
aagggugcauugcgcggggcug

SEQ ID NO: 637309 - RNA, 22 nt, Human
uagcuucuggaguguuugaaaa

SEQ ID NO: 637310 - RNA, 22 nt, Human
uguacagauaaagacuguaaau

SEQ ID NO: 637311 - RNA, 22 nt, Human
uggcacugggaugcuacuguua

SEQ ID NO: 637312 - RNA, 22 nt, Human
aggcuggagggcaauggcaaga

SEQ ID NO: 637313 - RNA, 22 nt, Human
agagacugcuuuauauuguacu

SEQ ID NO: 637314 - RNA, 22 nt, Human
ugaggcucagugagcccugcag

SEQ ID NO: 637315 - RNA, 22 nt, Human
auugcuuaucuaucuuuaaguc

SEQ ID NO: 637316 - RNA, 22 nt, Human
cagccagugguugaagaugcag

SEQ ID NO: 637317 - RNA, 22 nt, Human
aauuaagaaaauguuuuaugau

SEQ ID NO: 637318 - RNA, 22 nt, Human
gcccacacaccagcucaggagg

SEQ ID NO: 637319 - RNA, 22 nt, Human
ggcauguaugugcauuuuugua

SEQ ID NO: 637320 - RNA, 22 nt, Human
ggaggugggcuaaggacucucu

SEQ ID NO: 637321 - RNA, 22 nt, Human
agggcuacugccugccuucagg

SEQ ID NO: 637322 - RNA, 22 nt, Human
aacagaguggagccaaacuuug

SEQ ID NO: 637323 - RNA, 22 nt, Human
agcaggaggagagccuggcggu

SEQ ID NO: 637324 - RNA, 22 nt, Human
gcccaggaagugacucagaugu

SEQ ID NO: 637325 - RNA, 18 nt, Human
gugggguguugugaggau

SEQ ID NO: 637326 - RNA, 22 nt, Human
aagaggaagucuccauggagag

SEQ ID NO: 637327 - RNA, 23 nt, Human
ucuugaaaagccuacagcaguuc

SEQ ID NO: 637328 - RNA, 22 nt, Human
aggcuggcuggggaugcgucuu

SEQ ID NO: 637329 - RNA, 20 nt, Human
cccaggaguuugcucuuacu

SEQ ID NO: 637330 - RNA, 20 nt, Human
accccacagaguccauugca

SEQ ID NO: 637331 - RNA, 21 nt, Human
ccagacuugaguguauguugu

SEQ ID NO: 637332 - RNA, 22 nt, Human
ucauggaagagguauuuuuugu

SEQ ID NO: 637333 - RNA, 22 nt, Human
cagucucucuuguagugcagcu

SEQ ID NO: 637334 - RNA, 22 nt, Human
gaugaagcuauuugguuggcac

SEQ ID NO: 637335 - RNA, 22 nt, Human
uuuugcuugagugcacaaaaug

SEQ ID NO: 637336 - RNA, 22 nt, Human
gccuggagcucuccacuugggg

SEQ ID NO: 637337 - RNA, 22 nt, Human
caaguucacguugcuuuuugag

SEQ ID NO: 637338 - RNA, 22 nt, Human
aauugucuucuccuuccuggca

SEQ ID NO: 637339 - RNA, 22 nt, Human
ucuucagucaauccagauguuu

SEQ ID NO: 637340 - RNA, 22 nt, Human
uuguuucccuggaucuagagcu

SEQ ID NO: 637341 - RNA, 19 nt, Human
uuuucucagcuucuagcgg

SEQ ID NO: 637342 - RNA, 22 nt, Human
agcaccugucacaagcagaagg

SEQ ID NO: 637343 - RNA, 22 nt, Human
auaugugugccauuucagcagu

SEQ ID NO: 637344 - RNA, 18 nt, Human
cagacacucugcucugca

SEQ ID NO: 637345 - RNA, 23 nt, Human
ucuuuccucagcacacaccaaga

SEQ ID NO: 637346 - RNA, 22 nt, Human
acaacuuuguagcaauuccacg

SEQ ID NO: 637347 - RNA, 22 nt, Human
ucuuauuggauaaaaggaaacc

SEQ ID NO: 637348 - RNA, 19 nt, Human
cagccucaaucccucgggc

SEQ ID NO: 637349 - RNA, 22 nt, Human
aggcuggcaaggcagaugugug

SEQ ID NO: 637350 - RNA, 22 nt, Human
gcugcuuuuuggauuuggcaca

SEQ ID NO: 637351 - RNA, 22 nt, Human
caccacuguaucccuagcacuu

SEQ ID NO: 637352 - RNA, 22 nt, Human
uaacacuugaagccauuuuugc

SEQ ID NO: 637353 - RNA, 22 nt, Human
aaggcagccagauccuuugggu

SEQ ID NO: 637354 - RNA, 20 nt, Human
uggcuucucuucacuccugu

SEQ ID NO: 637355 - RNA, 23 nt, Human
ggucagugaguucguuucucugg

SEQ ID NO: 637356 - RNA, 22 nt, Human
ugguaaaauauuacaaggcacu

SEQ ID NO: 637357 - RNA, 22 nt, Human
augucuucucuguagguaaauu

SEQ ID NO: 637358 - RNA, 22 nt, Human
agugucugugaugaggucagga

SEQ ID NO: 637359 - RNA, 18 nt, Human
uucaagaguuucucuagg

SEQ ID NO: 637360 - RNA, 22 nt, Human
agauuuuauagauaauuuccca

SEQ ID NO: 637361 - RNA, 17 nt, Human
accaccucucaccagca

SEQ ID NO: 637362 - RNA, 20 nt, Human
uacugggcaagcccacagac

SEQ ID NO: 637363 - RNA, 22 nt, Human
agcccagaggguagcagaagaa

SEQ ID NO: 637364 - RNA, 22 nt, Human
gcaugcaguaaaauucagcaac

SEQ ID NO: 637365 - RNA, 22 nt, Human
gugaaacuucacauuuugauag

SEQ ID NO: 637366 - RNA, 22 nt, Human
gaagagcugacagugucauccu

SEQ ID NO: 637367 - RNA, 20 nt, Human
ucagugcucaggcaccaggu

SEQ ID NO: 637368 - RNA, 22 nt, Human
aacaugcauuugugggauggaa

SEQ ID NO: 637369 - RNA, 22 nt, Human
uuggcucagcugggacuguuga

SEQ ID NO: 637370 - RNA, 22 nt, Human
cugguggguagagggcaucagg

SEQ ID NO: 637371 - RNA, 20 nt, Human
ucagauuuuucuaacuuuga

SEQ ID NO: 637372 - RNA, 22 nt, Human
ccaggccugugcaaggagggag

SEQ ID NO: 637373 - RNA, 22 nt, Human
cugggccuccagcucugccagc

SEQ ID NO: 637374 - RNA, 20 nt, Human
agagguucagucuggagaag

SEQ ID NO: 637375 - RNA, 23 nt, Human
gcucagguggcucagggacugau

SEQ ID NO: 637376 - RNA, 22 nt, Human
guacaaauugauacagauuuga

SEQ ID NO: 637377 - RNA, 20 nt, Human
gcauugaguauagacagaug

SEQ ID NO: 637378 - RNA, 22 nt, Human
cauggcuuuguucauauaauuu

SEQ ID NO: 637379 - RNA, 23 nt, Human
acaaugcacuuuaaaugguuccc

SEQ ID NO: 637380 - RNA, 22 nt, Human
ucugugccuuuaagaagcucau

SEQ ID NO: 637381 - RNA, 22 nt, Human
uauuuucaccuucucuggauau

SEQ ID NO: 637382 - RNA, 22 nt, Human
augacaaaaugaaugcagcuag

SEQ ID NO: 637383 - RNA, 22 nt, Human
acugagaugaauagauggcaag

SEQ ID NO: 637384 - RNA, 22 nt, Human
agagggggaaaauagagguguu

SEQ ID NO: 637385 - RNA, 22 nt, Human
ccucuucugagugagacucccu

SEQ ID NO: 637386 - RNA, 22 nt, Human
aauguauuccucaugcaagagu

SEQ ID NO: 637387 - RNA, 22 nt, Human
gcucaguguguucaagggcuca

SEQ ID NO: 637388 - RNA, 22 nt, Human
aagaguuugggcaagucauaaa

SEQ ID NO: 637389 - RNA, 22 nt, Human
gauguccugcagaaacaugaga

SEQ ID NO: 637390 - RNA, 22 nt, Human
ggaguauuguagcuuccaguuc

SEQ ID NO: 637391 - RNA, 22 nt, Human
acccagucauccuggugugaga

SEQ ID NO: 637392 - RNA, 22 nt, Human
ugcagggcacacgcacgggugu

SEQ ID NO: 637393 - RNA, 22 nt, Human
auguuauaaauagagacacugg

SEQ ID NO: 637394 - RNA, 22 nt, Human
ugcugggcagugugcccucgag

SEQ ID NO: 637395 - RNA, 22 nt, Human
guuauucugcgaugcaauccug

SEQ ID NO: 637396 - RNA, 22 nt, Human
gauaaaauucuuauuuuacccg

SEQ ID NO: 637397 - RNA, 22 nt, Human
cagcuuccaucuccacugcccu

SEQ ID NO: 637398 - RNA, 21 nt, Human
ggcuuuaugcucacccagccu

SEQ ID NO: 637399 - RNA, 22 nt, Human
gaggggcaagaaguuggccucu

SEQ ID NO: 637400 - RNA, 22 nt, Human
cugcgugucucugucucauggc

SEQ ID NO: 637401 - RNA, 22 nt, Human
uuacagauguaggaacugaagu

SEQ ID NO: 637402 - RNA, 22 nt, Human
uucuccgcuaaguucucugcag

SEQ ID NO: 637403 - RNA, 19 nt, Human
ugaagcaauaccauuuuug

SEQ ID NO: 637404 - RNA, 22 nt, Human
gccuggggccagcuugggcuga

SEQ ID NO: 637405 - RNA, 22 nt, Human
augggaaguguuagaagauuuu

SEQ ID NO: 637406 - RNA, 22 nt, Human
ucuucacauuuuagugguuugu

SEQ ID NO: 637407 - RNA, 18 nt, Human
ucccuccugccugcuucc

SEQ ID NO: 637408 - RNA, 22 nt, Human
uucugauacagucccaacacaa

SEQ ID NO: 637409 - RNA, 22 nt, Human
gcugugugaaaacugggccugg

SEQ ID NO: 637410 - RNA, 22 nt, Human
uucucuggcgcgcugugcuaug

SEQ ID NO: 637411 - RNA, 22 nt, Human
cuugcacaggaucugaaguggg

SEQ ID NO: 637412 - RNA, 22 nt, Human
uccuggaucagcgggggcaggc

SEQ ID NO: 637413 - RNA, 22 nt, Human
gggcugggauggcuugaagauu

SEQ ID NO: 637414 - RNA, 22 nt, Human
cugucaucacaguugagcagcc

SEQ ID NO: 637415 - RNA, 22 nt, Human
auguaacuuccucagggauggu

SEQ ID NO: 637416 - RNA, 22 nt, Human
aaauacauuuacagucguggcu

SEQ ID NO: 637417 - RNA, 22 nt, Human
guguauguucuacuuaauauua

SEQ ID NO: 637418 - RNA, 22 nt, Human
uuuucaguuugcacugcagugc

SEQ ID NO: 637419 - RNA, 22 nt, Human
uaaacacucacuucauagccau

SEQ ID NO: 637420 - RNA, 22 nt, Human
ugugacaagcauuguauauugg

SEQ ID NO: 637421 - RNA, 22 nt, Human
acugaucuguuuucagauucug

SEQ ID NO: 637422 - RNA, 22 nt, Human
gcugcgccggaucccacguucc

SEQ ID NO: 637423 - RNA, 22 nt, Human
cacagagacagaucuauuuugc

SEQ ID NO: 637424 - RNA, 22 nt, Human
aggcacaggaacaggaaaagag

SEQ ID NO: 637425 - RNA, 22 nt, Human
agccagggacgcugcaggcuac

SEQ ID NO: 637426 - RNA, 22 nt, Human
gaauuaaaauaguuuuggucga

SEQ ID NO: 637427 - RNA, 22 nt, Human
augauauacuuccuagaacagu

SEQ ID NO: 637428 - RNA, 22 nt, Human
guccucuggccuuucccaggac

SEQ ID NO: 637429 - RNA, 22 nt, Human
aguaaaugaaagcaauuuuaga

SEQ ID NO: 637430 - RNA, 18 nt, Human
cccggcuaauuuuuggua

SEQ ID NO: 637431 - RNA, 21 nt, Human
gacaggugauucagagcaggg

SEQ ID NO: 637432 - RNA, 22 nt, Human
ccaggcuuucuccugacucaca

SEQ ID NO: 637433 - RNA, 22 nt, Human
ggaggccaguccuggccgggcu

SEQ ID NO: 637434 - RNA, 22 nt, Human
cagcauuuggaggagaggcuuu

SEQ ID NO: 637435 - RNA, 19 nt, Human
ccuggcccugcugcgcggg

SEQ ID NO: 637436 - RNA, 20 nt, Human
auuccauaguuggcacuuuu

SEQ ID NO: 637437 - RNA, 22 nt, Human
cucccuggcagccgcacuccug

SEQ ID NO: 637438 - RNA, 22 nt, Human
guagggcucaguaaauacuuug

SEQ ID NO: 637439 - RNA, 22 nt, Human
uccuagaauaaucuuugacugc

SEQ ID NO: 637440 - RNA, 22 nt, Human
uucaaguccuuuggaaggccug

SEQ ID NO: 637441 - RNA, 22 nt, Human
uuaauuacaaaacacauagguu

SEQ ID NO: 637442 - RNA, 22 nt, Human
aagcaugggaggccuggaggag

SEQ ID NO: 637443 - RNA, 22 nt, Human
aggcacaguuucauccccgggc

SEQ ID NO: 637444 - RNA, 22 nt, Human
guccuuggagcuccccucugua

SEQ ID NO: 637445 - RNA, 22 nt, Human
cagaggcuagacugugcuuccu

SEQ ID NO: 637446 - RNA, 22 nt, Human
acacauguuuccaaaagcaccc

SEQ ID NO: 637447 - RNA, 22 nt, Human
aagcuuuaagugucagucagcc

SEQ ID NO: 637448 - RNA, 22 nt, Human
agucagucaccauuuaagaaca

SEQ ID NO: 637449 - RNA, 22 nt, Human
caggcacugugcuagauccuug

SEQ ID NO: 637450 - RNA, 22 nt, Human
uauguacaagcacacaugugac

SEQ ID NO: 637451 - RNA, 22 nt, Human
uguggcugacuccuggucccca

SEQ ID NO: 637452 - RNA, 22 nt, Human
agugucugcuuugagucaggug

SEQ ID NO: 637453 - RNA, 22 nt, Human
uugcaacauuguaaguuuauau

SEQ ID NO: 637454 - RNA, 22 nt, Human
ugggauaguagcugagagacaa

SEQ ID NO: 637455 - RNA, 22 nt, Human
uucuuuuagaauuuccuaaggu

SEQ ID NO: 637456 - RNA, 22 nt, Human
cugcucugacccuuucaccuuc

SEQ ID NO: 637457 - RNA, 22 nt, Human
gcucuggagauggagccuugag

SEQ ID NO: 637458 - RNA, 22 nt, Human
cacuguggugugagggcugaug

SEQ ID NO: 637459 - RNA, 22 nt, Human
agucuucugaauaagaaucacu

SEQ ID NO: 637460 - RNA, 22 nt, Human
gugggguguccagcagcgagcu

SEQ ID NO: 637461 - RNA, 22 nt, Human
gcacugaaugcuuuuacuguaa

SEQ ID NO: 637462 - RNA, 22 nt, Human
cugcagaugucucaauuuuauu

SEQ ID NO: 637463 - RNA, 19 nt, Human
ucucuacacuacauuucua

SEQ ID NO: 637464 - RNA, 22 nt, Human
gcuucagacugugcuucuguug

SEQ ID NO: 637465 - RNA, 22 nt, Human
ucacuccauagcuuaacucuuu

SEQ ID NO: 637466 - RNA, 22 nt, Human
auuccagaugaauugcauaguu

SEQ ID NO: 637467 - RNA, 22 nt, Human
ugcuccauucucuagccagugc

SEQ ID NO: 637468 - RNA, 22 nt, Human
gagucagaauuguauuuuaaac

SEQ ID NO: 637469 - RNA, 22 nt, Human
gaggagaggccaucguuguuau

SEQ ID NO: 637470 - RNA, 22 nt, Human
ugguuugagagugugagcuuuu

SEQ ID NO: 637471 - RNA, 22 nt, Human
gaagacaucauggagaggauag

SEQ ID NO: 637472 - RNA, 22 nt, Human
aagauucuuauuagguaauuuu

SEQ ID NO: 637473 - RNA, 22 nt, Human
agugcuuuaccuagauaauguu

SEQ ID NO: 637474 - RNA, 22 nt, Human
aagaaugucguugguauuuuaa

SEQ ID NO: 637475 - RNA, 22 nt, Human
ucacccaggauauugaagucag

SEQ ID NO: 637476 - RNA, 22 nt, Human
acugugcaaugaguaauaaacu

SEQ ID NO: 637477 - RNA, 22 nt, Human
agagcugucagcguuuuggcca

SEQ ID NO: 637478 - RNA, 20 nt, Human
uaaacaguauuuacuaggag

SEQ ID NO: 637479 - RNA, 22 nt, Human
uuuaaaaguuaucaucugucca

SEQ ID NO: 637480 - RNA, 22 nt, Human
acaaaugucuccucuuuuguua

SEQ ID NO: 637481 - RNA, 22 nt, Human
acuuaaaguaguuuuacugugg

SEQ ID NO: 637482 - RNA, 22 nt, Human
uagcaucuguacugacauaauc

SEQ ID NO: 637483 - RNA, 22 nt, Human
agccacuccuucagcgucugcu

SEQ ID NO: 637484 - RNA, 22 nt, Human
ucaucuuuguaucccuaacaca

SEQ ID NO: 637485 - RNA, 22 nt, Human
caggcucccugcaggccaguga

SEQ ID NO: 637486 - RNA, 22 nt, Human
ugcuuguccgaggugaguacuu

SEQ ID NO: 637487 - RNA, 21 nt, Human
ggcauggcaccucugggcagg

SEQ ID NO: 637488 - RNA, 22 nt, Human
agacaacaucacuaaagcugag

SEQ ID NO: 637489 - RNA, 22 nt, Human
cucuggggaaauggauauguac

SEQ ID NO: 637490 - RNA, 22 nt, Human
gucuauaagcaggggaaaacuu

SEQ ID NO: 637491 - RNA, 17 nt, Human
cuuuuaauuuacuuccc

SEQ ID NO: 637492 - RNA, 22 nt, Human
ugauuaauaucaccaccauugg

SEQ ID NO: 637493 - RNA, 22 nt, Human
uucuacuugccaaaugacacau

SEQ ID NO: 637494 - RNA, 22 nt, Human
aagcagaucugauagggcccug

SEQ ID NO: 637495 - RNA, 22 nt, Human
cugaagauucgccuuuguuuau

SEQ ID NO: 637496 - RNA, 22 nt, Human
accuuccucuaagacauuuagc

SEQ ID NO: 637497 - RNA, 22 nt, Human
ggggcucaggggaaguguccag

SEQ ID NO: 637498 - RNA, 22 nt, Human
aaauaucauucuggugcacaga

SEQ ID NO: 637499 - RNA, 22 nt, Human
ucccacaggaaaguagacauug

SEQ ID NO: 637500 - RNA, 22 nt, Human
guuccucaaaaaggagagcccc

SEQ ID NO: 637501 - RNA, 19 nt, Human
uugagaacaccaaguacug

SEQ ID NO: 637502 - RNA, 22 nt, Human
guacacacaaucucuggucagu

SEQ ID NO: 637503 - RNA, 22 nt, Human
ggcauagcggcucagcguccag

SEQ ID NO: 637504 - RNA, 22 nt, Human
ucuuuagugacaguugugcaag

SEQ ID NO: 637505 - RNA, 22 nt, Human
uuacagaagaguaacuuggcaa

SEQ ID NO: 637506 - RNA, 22 nt, Human
uccacagguaugaggccccacc

SEQ ID NO: 637507 - RNA, 22 nt, Human
cucacagcauggaauuuucugg

SEQ ID NO: 637508 - RNA, 22 nt, Human
gaggagcugggacccugucauc

SEQ ID NO: 637509 - RNA, 20 nt, Human
cagauggcacgucagggcau

SEQ ID NO: 637510 - RNA, 22 nt, Human
agaaagacaaaaugcaguggcu

SEQ ID NO: 637511 - RNA, 22 nt, Human
ucgcugugguuucuguacaugg

SEQ ID NO: 637512 - RNA, 22 nt, Human
uuuaccaagaguugucacuguu

SEQ ID NO: 637513 - RNA, 22 nt, Human
aaaguagucucuuucaucuuuu

SEQ ID NO: 637514 - RNA, 22 nt, Human
ucugagcuacgaugccugucac

SEQ ID NO: 637515 - RNA, 22 nt, Human
cauucugcauuuggaaggggca

SEQ ID NO: 637516 - RNA, 22 nt, Human
gugcaaaagcaguugugguuuu

SEQ ID NO: 637517 - RNA, 22 nt, Human
agagcacaugguuccugugucc

SEQ ID NO: 637518 - RNA, 22 nt, Human
auggauggaacucugcuguggu

SEQ ID NO: 637519 - RNA, 22 nt, Human
ccagcuggaagagugcagaacu

SEQ ID NO: 637520 - RNA, 22 nt, Human
ucagauuucuagcguuuggcca

SEQ ID NO: 637521 - RNA, 20 nt, Human
ggcauggguggggcucccag

SEQ ID NO: 637522 - RNA, 22 nt, Human
uccaggccacgaccuccuggau

SEQ ID NO: 637523 - RNA, 21 nt, Human
agguggcugcauccucagaag

SEQ ID NO: 637524 - RNA, 22 nt, Human
gaagccacaacuuuuucuuagc

SEQ ID NO: 637525 - RNA, 22 nt, Human
gggagagcgggaggugccacag

SEQ ID NO: 637526 - RNA, 22 nt, Human
cucuuaguuuaucuuugacaaa

SEQ ID NO: 637527 - RNA, 22 nt, Human
ucaggcaaggcccuuagagugu

SEQ ID NO: 637528 - RNA, 22 nt, Human
gcugugcagauguagggagugg

SEQ ID NO: 637529 - RNA, 22 nt, Human
acugauacgguuuuagagucca

SEQ ID NO: 637530 - RNA, 22 nt, Human
ucacuguaccuuccauuucauu

SEQ ID NO: 637531 - RNA, 22 nt, Human
agcaaagcacuuugcauacaua

SEQ ID NO: 637532 - RNA, 22 nt, Human
agcugacugaugaagaggccuu

SEQ ID NO: 637533 - RNA, 22 nt, Human
uacaaagugaaauaauucugag

SEQ ID NO: 637534 - RNA, 22 nt, Human
guggcccagcccuacagaggac

SEQ ID NO: 637535 - RNA, 22 nt, Human
ucagaacagcaggguguggcug

SEQ ID NO: 637536 - RNA, 22 nt, Human
ucacucaauaucccaguggggc

SEQ ID NO: 637537 - RNA, 22 nt, Human
ugaacucuccaggcaaaugauc

SEQ ID NO: 637538 - RNA, 22 nt, Human
cuucugugacguaugugaggac

SEQ ID NO: 637539 - RNA, 22 nt, Human
ucuucaugcaccucacagcuag

SEQ ID NO: 637540 - RNA, 22 nt, Human
cagaguuugcaagggcagaagc

SEQ ID NO: 637541 - RNA, 23 nt, Human
ugaaagcaaugggucuauaguau

SEQ ID NO: 637542 - RNA, 22 nt, Human
uagugcuuggcccuaccagaua

SEQ ID NO: 637543 - RNA, 22 nt, Human
aggcuaagauguggucugagca

SEQ ID NO: 637544 - RNA, 22 nt, Human
agagauggccuuaggugggaau

SEQ ID NO: 637545 - RNA, 22 nt, Human
aggcaguggaugucaggaaugg

SEQ ID NO: 637546 - RNA, 22 nt, Human
agaaaacacugcccccucucuc

SEQ ID NO: 637547 - RNA, 22 nt, Human
uuugaaauguaucaguauaggu

SEQ ID NO: 637548 - RNA, 22 nt, Human
uguaugcuuugguuguuucucu

SEQ ID NO: 637549 - RNA, 22 nt, Human
auucugagcuacuaauuaggca

SEQ ID NO: 637550 - RNA, 22 nt, Human
ugagagcugaagauauguuaac

SEQ ID NO: 637551 - RNA, 22 nt, Human
ugguccagcuugauucucuucu

SEQ ID NO: 637552 - RNA, 22 nt, Human
aaguaacuaaagauauccauuu

SEQ ID NO: 637553 - RNA, 22 nt, Human
aacagugcuucauucacacauu

SEQ ID NO: 637554 - RNA, 22 nt, Human
cuggcaguguccagcucgugau

SEQ ID NO: 637555 - RNA, 22 nt, Human
cuuggggacacagagcccaggg

SEQ ID NO: 637556 - RNA, 22 nt, Human
cacaguacuuaauucucuaaau

SEQ ID NO: 637557 - RNA, 22 nt, Human
aaagaagcauaggcuagacuuc

SEQ ID NO: 637558 - RNA, 22 nt, Human
uggagagaagaggcagugugcu

SEQ ID NO: 637559 - RNA, 22 nt, Human
cggagggguuugaacagaggag

SEQ ID NO: 637560 - RNA, 22 nt, Human
cauugcacugcagcccgggcaa

SEQ ID NO: 637561 - RNA, 22 nt, Human
auaaccugguaguauuaaaugu

SEQ ID NO: 637562 - RNA, 22 nt, Human
cauauuuauagaucuggcauuu

SEQ ID NO: 637563 - RNA, 22 nt, Human
uucuaguuaauguagcaucuug

SEQ ID NO: 637564 - RNA, 22 nt, Human
gggagccaugcuggucuucuuu

SEQ ID NO: 637565 - RNA, 19 nt, Human
ccucuuccucugacacuau

SEQ ID NO: 637566 - RNA, 22 nt, Human
uggcagaauuuuaaagacagau

SEQ ID NO: 637567 - RNA, 22 nt, Human
aagcaauagcaacaacuuuaca

SEQ ID NO: 637568 - RNA, 22 nt, Human
uuacaaguucagauuuucucau

SEQ ID NO: 637569 - RNA, 22 nt, Human
uucaagauggcugcaaauacuu

SEQ ID NO: 637570 - RNA, 22 nt, Human
cagcuucucgggagcgcaugug

SEQ ID NO: 637571 - RNA, 19 nt, Human
cucuccagcuccaguagcu

SEQ ID NO: 637572 - RNA, 22 nt, Human
gagcuucuuguuucuucaucug

SEQ ID NO: 637573 - RNA, 22 nt, Human
cugaggccccucucuugagcuu

SEQ ID NO: 637574 - RNA, 22 nt, Human
uggguuaauagaaucauuaacu

SEQ ID NO: 637575 - RNA, 22 nt, Human
uuguuuacuaagaaccugguca

SEQ ID NO: 637576 - RNA, 22 nt, Human
augcuuuauuggagacagucau

SEQ ID NO: 637577 - RNA, 22 nt, Human
ucugaaauucacaguugaguca

SEQ ID NO: 637578 - RNA, 19 nt, Human
aaacacagauuucuuacca

SEQ ID NO: 637579 - RNA, 22 nt, Human
agcauaaaggucaacguuuuag

SEQ ID NO: 637580 - RNA, 19 nt, Human
aggcccagcgcugggggcu

SEQ ID NO: 637581 - RNA, 22 nt, Human
caguggaggccuugggaccuuu

SEQ ID NO: 637582 - RNA, 22 nt, Human
acagucuacaaagugaugugug

SEQ ID NO: 637583 - RNA, 21 nt, Human
gcugcugugggccagggaggc

SEQ ID NO: 637584 - RNA, 22 nt, Human
ccuaggaagcugagauugcagu

SEQ ID NO: 637585 - RNA, 22 nt, Human
gcacccagaggucagcagugcu

SEQ ID NO: 637586 - RNA, 23 nt, Human
ucuauacauacugcagccucugg

SEQ ID NO: 637587 - RNA, 22 nt, Human
cuggugucuacuacaugguuga

SEQ ID NO: 637588 - RNA, 22 nt, Human
ggaggcugcugccucacguggg

SEQ ID NO: 637589 - RNA, 22 nt, Human
auucucaaacaagugguuugau

SEQ ID NO: 637590 - RNA, 22 nt, Human
auucagcaguuccugcuucagu

SEQ ID NO: 637591 - RNA, 22 nt, Human
gcugcaggaugaggcucugcuc

SEQ ID NO: 637592 - RNA, 22 nt, Human
cuggagagaaaugacaaagcua

SEQ ID NO: 637593 - RNA, 22 nt, Human
cuggguccuggugcugaguucu

SEQ ID NO: 637594 - RNA, 22 nt, Human
ucaggagagagaaauuggggcu

SEQ ID NO: 637595 - RNA, 22 nt, Human
guuucuuagacagacauuaucu

SEQ ID NO: 637596 - RNA, 20 nt, Human
augugucuuagagcaucagg

SEQ ID NO: 637597 - RNA, 22 nt, Human
ucauucagagagaauguuccag

SEQ ID NO: 637598 - RNA, 22 nt, Human
uuguaauuugcaaauguauugu

SEQ ID NO: 637599 - RNA, 23 nt, Human
uuugugaaaguguugagaggaga

SEQ ID NO: 637600 - RNA, 22 nt, Human
uugauucuuagcuggugauaau

SEQ ID NO: 637601 - RNA, 22 nt, Human
cuguugugaauuuaguuaccaa

SEQ ID NO: 637602 - RNA, 22 nt, Human
ccuuaaagaauaagucuuaucu

SEQ ID NO: 637603 - RNA, 23 nt, Human
cauguacagaguuugauaaagug

SEQ ID NO: 637604 - RNA, 22 nt, Human
ccagccagaaguccgggcuucu

SEQ ID NO: 637605 - RNA, 22 nt, Human
ucaagcaaguugcauauugcua

SEQ ID NO: 637606 - RNA, 22 nt, Human
cagcaaaacagccguugccugg

SEQ ID NO: 637607 - RNA, 22 nt, Human
acugcucacgcauuacuugagc

SEQ ID NO: 637608 - RNA, 22 nt, Human
ucauaguuuuacuuaguggugu

SEQ ID NO: 637609 - RNA, 22 nt, Human
ucucuggguucucacucagcac

SEQ ID NO: 637610 - RNA, 22 nt, Human
ggcagccaugcuccaggugcag

SEQ ID NO: 637611 - RNA, 22 nt, Human
aguuuuucugggaggcacugcu

SEQ ID NO: 637612 - RNA, 20 nt, Human
uggccaccacuguauaucaa

SEQ ID NO: 637613 - RNA, 22 nt, Human
ucagggaggugucugccagaga

SEQ ID NO: 637614 - RNA, 22 nt, Human
cucuguugagcauuuuuccccu

SEQ ID NO: 637615 - RNA, 22 nt, Human
ugccaccuugugcagcaggagg

SEQ ID NO: 637616 - RNA, 22 nt, Human
cuugcagaggcuguuccagaug

SEQ ID NO: 637617 - RNA, 22 nt, Human
agguaaugcauauaaagugcuu

SEQ ID NO: 637618 - RNA, 22 nt, Human
uaucuguucuuagcuauagaug

SEQ ID NO: 637619 - RNA, 22 nt, Human
ggcaggcaggagcucugucucc

SEQ ID NO: 637620 - RNA, 22 nt, Human
auuaaauuggacgcugggggaa

SEQ ID NO: 637621 - RNA, 22 nt, Human
ucugccuguggauacaugcucu

SEQ ID NO: 637622 - RNA, 23 nt, Human
ccaggaagaggccauccacaguc

SEQ ID NO: 637623 - RNA, 22 nt, Human
gcuggguccaugguccucgggu

SEQ ID NO: 637624 - RNA, 22 nt, Human
gcaggaagccuuaccaagccca

SEQ ID NO: 637625 - RNA, 22 nt, Human
ugcagggccagacuggguugga

SEQ ID NO: 637626 - RNA, 22 nt, Human
uacaaaugccugacacacagau

SEQ ID NO: 637627 - RNA, 22 nt, Human
guucacaguuaggacaacugcu

SEQ ID NO: 637628 - RNA, 22 nt, Human
caauaaagaagauuuuugcaau

SEQ ID NO: 637629 - RNA, 22 nt, Human
uuggccuccacauuuuccaggu

SEQ ID NO: 637630 - RNA, 19 nt, Human
uuuuuacaaguagguguga

SEQ ID NO: 637631 - RNA, 22 nt, Human
aguuagugagcucuugggaccu

SEQ ID NO: 637632 - RNA, 22 nt, Human
gcaggugaaagugaguagugag

SEQ ID NO: 637633 - RNA, 23 nt, Human
guuaacaugguccauggaagagc

SEQ ID NO: 637634 - RNA, 22 nt, Human
gaaaguuucuucauuaagaugu

SEQ ID NO: 637635 - RNA, 22 nt, Human
cagcuccacuugaguggggccu

SEQ ID NO: 637636 - RNA, 22 nt, Human
ucaucucuagacaggaggcugg

SEQ ID NO: 637637 - RNA, 22 nt, Human
augcaggguucugggcuagaga

SEQ ID NO: 637638 - RNA, 22 nt, Human
agucagagaauaaagaaugcau

SEQ ID NO: 637639 - RNA, 22 nt, Human
cacagaacauuuuuagaugcag

SEQ ID NO: 637640 - RNA, 22 nt, Human
ccacagaggacaacugccuggc

SEQ ID NO: 637641 - RNA, 17 nt, Human
aucugcugacauucugu

SEQ ID NO: 637642 - RNA, 21 nt, Human
aggcucagagagaaacucuug

SEQ ID NO: 637643 - RNA, 22 nt, Human
gggacaugccccucagugggug

SEQ ID NO: 637644 - RNA, 22 nt, Human
augcacaguauguagggucuau

SEQ ID NO: 637645 - RNA, 22 nt, Human
gcacucugccaggucuccugau

SEQ ID NO: 637646 - RNA, 22 nt, Human
ucugccuguugcuagaauguca

SEQ ID NO: 637647 - RNA, 22 nt, Human
aucccacaccccuacaacauau

SEQ ID NO: 637648 - RNA, 22 nt, Human
ugcagggcagauaugacuguag

SEQ ID NO: 637649 - RNA, 19 nt, Human
cugaggcaaguggugguca

SEQ ID NO: 637650 - RNA, 22 nt, Human
ugucauuuuagugcaucacuca

SEQ ID NO: 637651 - RNA, 22 nt, Human
auuacaacuguucccacugucu

SEQ ID NO: 637652 - RNA, 22 nt, Human
aggaggcuuuugcaggugccac

SEQ ID NO: 637653 - RNA, 22 nt, Human
uuguaugaucaaaagaaaugua

SEQ ID NO: 637654 - RNA, 22 nt, Human
agaagcacuagaggguauggaa

SEQ ID NO: 637655 - RNA, 23 nt, Human
ggccaggugcaccuuagagagcc

SEQ ID NO: 637656 - RNA, 22 nt, Human
aauaaguugcuucagcuuggug

SEQ ID NO: 637657 - RNA, 19 nt, Human
uuggaaggagccagagugg

SEQ ID NO: 637658 - RNA, 22 nt, Human
aaaucacuuaaauggcuuauuu

SEQ ID NO: 637659 - RNA, 22 nt, Human
gcaguggauggccagcaggggc

SEQ ID NO: 637660 - RNA, 22 nt, Human
caaugcaaugcaaugcaaugca

SEQ ID NO: 637661 - RNA, 22 nt, Human
cagggcuguuagcugcugcucu

SEQ ID NO: 637662 - RNA, 22 nt, Human
gcagauggugggggaggaguac

SEQ ID NO: 637663 - RNA, 22 nt, Human
auuaaggaagccuauucucucc

SEQ ID NO: 637664 - RNA, 22 nt, Human
cuggugccauucuguggccuag

SEQ ID NO: 637665 - RNA, 22 nt, Human
ucacugaagacugggcucuaaa

SEQ ID NO: 637666 - RNA, 22 nt, Human
gggacuguccggcagaagguac

SEQ ID NO: 637667 - RNA, 22 nt, Human
uccuuacaacuuguuauuuuuc

SEQ ID NO: 637668 - RNA, 22 nt, Human
ucucucuaggcaucuauuuuca

SEQ ID NO: 637669 - RNA, 22 nt, Human
aaguuacaguuacagaauggag

SEQ ID NO: 637670 - RNA, 22 nt, Human
augcugugccuucucugugcca

SEQ ID NO: 637671 - RNA, 22 nt, Human
ugucagcacaucuguaaucaca

SEQ ID NO: 637672 - RNA, 22 nt, Human
acugacuguggauggcagcagc

SEQ ID NO: 637673 - RNA, 22 nt, Human
cauggcaggaggcugcuggcag

SEQ ID NO: 637674 - RNA, 23 nt, Human
caggcaggaugaggacuacacuc

SEQ ID NO: 637675 - RNA, 22 nt, Human
ucaggagcucuucccuggugug

SEQ ID NO: 637676 - RNA, 21 nt, Human
ggagcuggggagcuggcccca

SEQ ID NO: 637677 - RNA, 22 nt, Human
acugcucucugcaaguagaugg

SEQ ID NO: 637678 - RNA, 22 nt, Human
aagcacauuuggaaaacaugga

SEQ ID NO: 637679 - RNA, 22 nt, Human
guccucuguagggcugggccac

SEQ ID NO: 637680 - RNA, 22 nt, Human
uccacagguauuucuccuugcu

SEQ ID NO: 637681 - RNA, 22 nt, Human
cuuuccaacucuagugaaauuu

SEQ ID NO: 637682 - RNA, 22 nt, Human
cagggcagaacauauagauagu

SEQ ID NO: 637683 - RNA, 22 nt, Human
auccauuugacauaauuucagc

SEQ ID NO: 637684 - RNA, 17 nt, Human
aucaguagcauaucaga

SEQ ID NO: 637685 - RNA, 22 nt, Human
ucagugcauuguucauuguagg

SEQ ID NO: 637686 - RNA, 22 nt, Human
caggucuggguugauggccugg

SEQ ID NO: 637687 - RNA, 22 nt, Human
caugcacacugcaacaaggacu

SEQ ID NO: 637688 - RNA, 22 nt, Human
ugggccugaaauucccauuuua

SEQ ID NO: 637689 - RNA, 22 nt, Human
accaggccaacagcuaaguuaa

SEQ ID NO: 637690 - RNA, 22 nt, Human
aggugggggcuguguccuugac

SEQ ID NO: 637691 - RNA, 22 nt, Human
ccuugcaggggaacaggcagug

SEQ ID NO: 637692 - RNA, 22 nt, Human
uuucaaucaccauaaagcaacu

SEQ ID NO: 637693 - RNA, 22 nt, Human
gaagccaggggccugacaggca

SEQ ID NO: 637694 - RNA, 22 nt, Human
cuuauacacgaacacaaggugu

SEQ ID NO: 637695 - RNA, 21 nt, Human
aggugcaggccucaagcccca

SEQ ID NO: 637696 - RNA, 22 nt, Human
ggguuaaagagcccaauguaug

SEQ ID NO: 637697 - RNA, 22 nt, Human
ugggagcaagcuggugcuggag

SEQ ID NO: 637698 - RNA, 22 nt, Human
gcuguggccgucagggaaaugg

SEQ ID NO: 637699 - RNA, 22 nt, Human
uccaggccaauguagcaggccc

SEQ ID NO: 637700 - RNA, 22 nt, Human
gguaacuuagcucauggcugug

SEQ ID NO: 637701 - RNA, 22 nt, Human
guuaaacauugcuccacggguu

SEQ ID NO: 637702 - RNA, 22 nt, Human
uuugauuccuggggcagggcug

SEQ ID NO: 637703 - RNA, 22 nt, Human
ugcugagaggaaggugcacugg

SEQ ID NO: 637704 - RNA, 22 nt, Human
uuuucucuccagguggggugau

SEQ ID NO: 637705 - RNA, 22 nt, Human
ggcaucaggguaggaagguauc

SEQ ID NO: 637706 - RNA, 22 nt, Human
cagcaaggguuauaucaaagau

SEQ ID NO: 637707 - RNA, 22 nt, Human
uccagcuugacaaaugauuuua

SEQ ID NO: 637708 - RNA, 22 nt, Human
gugcuggggagauaggaagaga

SEQ ID NO: 637709 - RNA, 22 nt, Human
ugagccagaggaggcugugugg

SEQ ID NO: 637710 - RNA, 22 nt, Human
aguuuccaaauauuguuuuagc

SEQ ID NO: 637711 - RNA, 18 nt, Human
gcagagcaucaaggguua

SEQ ID NO: 637712 - RNA, 22 nt, Human
gaguuauagauggacuauuauu

SEQ ID NO: 637713 - RNA, 22 nt, Human
auguuucaguucuaaaguuaga

SEQ ID NO: 637714 - RNA, 22 nt, Human
ucagaaagcuauaugguguguc

SEQ ID NO: 637715 - RNA, 22 nt, Human
auggagccauuccugaagacuu

SEQ ID NO: 637716 - RNA, 22 nt, Human
aauuuuacuucccucaguguag

SEQ ID NO: 637717 - RNA, 22 nt, Human
cugcccuguuuggacagcccgg

SEQ ID NO: 637718 - RNA, 22 nt, Human
uagcauucagaacugagagcaa

SEQ ID NO: 637719 - RNA, 22 nt, Human
ggcuuggaaaugguaaugagcu

SEQ ID NO: 637720 - RNA, 22 nt, Human
gcugaauaggacugucaucucu

SEQ ID NO: 637721 - RNA, 20 nt, Human
cucuuaauugcucacauuag

SEQ ID NO: 637722 - RNA, 22 nt, Human
gcccagcaccucucucaggguu

SEQ ID NO: 637723 - RNA, 22 nt, Human
caacuuuaauuugggugucaga

SEQ ID NO: 637724 - RNA, 22 nt, Human
uagcuuuaagaugagaugugga

SEQ ID NO: 637725 - RNA, 22 nt, Human
ccugguguugugaaguagccgu

SEQ ID NO: 637726 - RNA, 22 nt, Human
agcaggcugagcacccaggggg

SEQ ID NO: 637727 - RNA, 22 nt, Human
aguccuucacguccugcuuauu

SEQ ID NO: 637728 - RNA, 22 nt, Human
caggguuucuguugagaagucc

SEQ ID NO: 637729 - RNA, 22 nt, Human
caaggcauucuugcagguaggg

SEQ ID NO: 637730 - RNA, 22 nt, Human
cagagcaguaaaucuggggcac

SEQ ID NO: 637731 - RNA, 22 nt, Human
gagaagccgagucagcugagcc

SEQ ID NO: 637732 - RNA, 22 nt, Human
guccugggccugcugaggcuga

SEQ ID NO: 637733 - RNA, 22 nt, Human
agcuguguuauuagaaaccugc

SEQ ID NO: 637734 - RNA, 22 nt, Human
acaugcuuccaaauuauguugg

SEQ ID NO: 637735 - RNA, 22 nt, Human
auaaauagugugucauaaaguc

SEQ ID NO: 637736 - RNA, 22 nt, Human
cagaauuuaaguggauuauucu

SEQ ID NO: 637737 - RNA, 22 nt, Human
cagagaacuccaguggcuggcg

SEQ ID NO: 637738 - RNA, 22 nt, Human
ccagagaguaucauggagagua

SEQ ID NO: 637739 - RNA, 22 nt, Human
ugggagcaguucagguguggcu

SEQ ID NO: 637740 - RNA, 17 nt, Human
gcaguuaaauuaagaug

SEQ ID NO: 637741 - RNA, 22 nt, Human
cagggccauuggcguggcuguc

SEQ ID NO: 637742 - RNA, 22 nt, Human
gguggccuagggcccagccugu

SEQ ID NO: 637743 - RNA, 22 nt, Human
aaaugucuuugaguuuuuauaa

SEQ ID NO: 637744 - RNA, 22 nt, Human
ugcuucuguauugaaauuguua

SEQ ID NO: 637745 - RNA, 22 nt, Human
ggaaaggagaugaauaggauua

SEQ ID NO: 637746 - RNA, 22 nt, Human
ccuuuggucaccuccacucuua

SEQ ID NO: 637747 - RNA, 22 nt, Human
cucugggccaccgcugguguau

SEQ ID NO: 637748 - RNA, 18 nt, Human
ccaaggccccugcugggg

SEQ ID NO: 637749 - RNA, 22 nt, Human
cacauuccuggugcucagcagc

SEQ ID NO: 637750 - RNA, 22 nt, Human
cccugccugugggcaucaacau

SEQ ID NO: 637751 - RNA, 22 nt, Human
ucuguuuugcauaauguucuuu

SEQ ID NO: 637752 - RNA, 20 nt, Human
ccuuuauuauuuguaugaug

SEQ ID NO: 637753 - RNA, 22 nt, Human
cccugccucugaagcugcucag

SEQ ID NO: 637754 - RNA, 22 nt, Human
uucccucugcgcauugaauuuc

SEQ ID NO: 637755 - RNA, 22 nt, Human
uauagugugugagagagugaaa

SEQ ID NO: 637756 - RNA, 22 nt, Human
gaggaggaaguucucuguaggc

SEQ ID NO: 637757 - RNA, 22 nt, Human
aacugcaauaacuugugcacca

SEQ ID NO: 637758 - RNA, 19 nt, Human
augucuguugaauuucaua

SEQ ID NO: 637759 - RNA, 22 nt, Human
aacauauucagaugccaagucc

SEQ ID NO: 637760 - RNA, 22 nt, Human
caguggcacccacgggcugggc

SEQ ID NO: 637761 - RNA, 22 nt, Human
gcugucuuuccccugcuccaga

SEQ ID NO: 637762 - RNA, 22 nt, Human
uagcaagcagauuagaagaucc

SEQ ID NO: 637763 - RNA, 22 nt, Human
uauuaugauucggacguggcag

SEQ ID NO: 637764 - RNA, 22 nt, Human
ugccaggaggaggugggacaga

SEQ ID NO: 637765 - RNA, 22 nt, Human
gcuuagcacagaaugagaguuc

SEQ ID NO: 637766 - RNA, 18 nt, Human
cauuccaaguucuaccuc

SEQ ID NO: 637767 - RNA, 22 nt, Human
augucuguuaaucgacccuaau

SEQ ID NO: 637768 - RNA, 22 nt, Human
gaucuguuugccuagagauuua

SEQ ID NO: 637769 - RNA, 22 nt, Human
aaugguuugauggacaaaauga

SEQ ID NO: 637770 - RNA, 22 nt, Human
ccaggcucugucuggucagaag

SEQ ID NO: 637771 - RNA, 22 nt, Human
accauacuugaaauggauagga

SEQ ID NO: 637772 - RNA, 22 nt, Human
gacugagaaacaguacauuacc

SEQ ID NO: 637773 - RNA, 22 nt, Human
gccuuuggcucugucugaccug

SEQ ID NO: 637774 - RNA, 22 nt, Human
cuuuauauauucccaggcugcc

SEQ ID NO: 637775 - RNA, 22 nt, Human
aaggccuugccgaaggaugcca

SEQ ID NO: 637776 - RNA, 22 nt, Human
aguggcuaugcaugacuggaau

SEQ ID NO: 637777 - RNA, 22 nt, Human
uccagcuuugagauuuuaugga

SEQ ID NO: 637778 - RNA, 22 nt, Human
ucugauuagagcauucuugagu

SEQ ID NO: 637779 - RNA, 22 nt, Human
uuggcuucuggcagucuggacg

SEQ ID NO: 637780 - RNA, 22 nt, Human
ccuggaaggacaauagauagug

SEQ ID NO: 637781 - RNA, 22 nt, Human
gcaccagagggggcucugcagg

SEQ ID NO: 637782 - RNA, 22 nt, Human
ugcuucuguuacauaccagaac

SEQ ID NO: 637783 - RNA, 22 nt, Human
gggcgcgggaaggagcccgaga

SEQ ID NO: 637784 - RNA, 22 nt, Human
ggcuuggaccagucacaguggu

SEQ ID NO: 637785 - RNA, 22 nt, Human
gcccuuccuuagacagcaggau

SEQ ID NO: 637786 - RNA, 22 nt, Human
auauccaagaaacaauuaauuc

SEQ ID NO: 637787 - RNA, 20 nt, Human
cuggguggcaagcaaggggg

SEQ ID NO: 637788 - RNA, 22 nt, Human
cugcagagcaugaggaggucug

SEQ ID NO: 637789 - RNA, 22 nt, Human
cagagucaugggccgucaggca

SEQ ID NO: 637790 - RNA, 22 nt, Human
cccacccugggcuacacaucca

SEQ ID NO: 637791 - RNA, 22 nt, Human
ucccagagaaagucaaggucuu

SEQ ID NO: 637792 - RNA, 22 nt, Human
uagggcagagcuuguacacgau

SEQ ID NO: 637793 - RNA, 22 nt, Human
cauuagacacagauguauaaau

SEQ ID NO: 637794 - RNA, 22 nt, Human
auccugggcaguuuugagugcu

SEQ ID NO: 637795 - RNA, 22 nt, Human
cuccugaggggacaggacucau

SEQ ID NO: 637796 - RNA, 22 nt, Human
gcccaugcucucaggcgggccu

SEQ ID NO: 637797 - RNA, 22 nt, Human
uggcucucccaauaccuuucug

SEQ ID NO: 637798 - RNA, 22 nt, Human
ccacagggugucaucagcuuga

SEQ ID NO: 637799 - RNA, 22 nt, Human
acagccccccgcucaguuucca

SEQ ID NO: 637800 - RNA, 22 nt, Human
uuucccuacuuguaacuggaaa

SEQ ID NO: 637801 - RNA, 19 nt, Human
aaugcauggaaguuggaga

SEQ ID NO: 637802 - RNA, 23 nt, Human
gugcaugugucuuuacaguagca

SEQ ID NO: 637803 - RNA, 18 nt, Human
acagaggcagacauguau

SEQ ID NO: 637804 - RNA, 22 nt, Human
gacacagagacuugcaguugua

SEQ ID NO: 637805 - RNA, 22 nt, Human
caguaauaaagcuaaguauuuc

SEQ ID NO: 637806 - RNA, 22 nt, Human
agagaauuacagaagaauguca

SEQ ID NO: 637807 - RNA, 22 nt, Human
guuuggauagugagagauacuu

SEQ ID NO: 637808 - RNA, 22 nt, Human
uccuccugucuaccaguuccug

SEQ ID NO: 637809 - RNA, 22 nt, Human
ugaaucaguauaaauucucaaa

SEQ ID NO: 637810 - RNA, 22 nt, Human
uccagguaauuuggaugcuagu

SEQ ID NO: 637811 - RNA, 22 nt, Human
uugcuguagcucauuucacucu

SEQ ID NO: 637812 - RNA, 22 nt, Human
agagacaggauaucugcucaug

SEQ ID NO: 637813 - RNA, 22 nt, Human
gcacauggcggccagcagguga

SEQ ID NO: 637814 - RNA, 22 nt, Human
uugacuuuucuuggucacauga

SEQ ID NO: 637815 - RNA, 22 nt, Human
ucaguccugaugacaggcccaa

SEQ ID NO: 637816 - RNA, 22 nt, Human
cucagggacguuagaggacagg

SEQ ID NO: 637817 - RNA, 22 nt, Human
uuaauacaacuguugucacugg

SEQ ID NO: 637818 - RNA, 22 nt, Human
gagggcagagacagugauucac

SEQ ID NO: 637819 - RNA, 22 nt, Human
uuugaaacccgucacuuugagu

SEQ ID NO: 637820 - RNA, 22 nt, Human
auggcccugcuaccacuuuucu

SEQ ID NO: 637821 - RNA, 22 nt, Human
uuggggcaccuccccagcauuu

SEQ ID NO: 637822 - RNA, 22 nt, Human
auuugcuuuuacuauguuaaaa

SEQ ID NO: 637823 - RNA, 22 nt, Human
ccuggcuucagcauugcccucu

SEQ ID NO: 637824 - RNA, 22 nt, Human
cacaguuauauguucacaagga

SEQ ID NO: 637825 - RNA, 22 nt, Human
aguccaagguucauggcacaga

SEQ ID NO: 637826 - RNA, 22 nt, Human
guugggguaccuugaggcuggg

SEQ ID NO: 637827 - RNA, 19 nt, Human
cuguggccuccaggaggga

SEQ ID NO: 637828 - RNA, 22 nt, Human
ugauucaauaggaauugaguag

SEQ ID NO: 637829 - RNA, 18 nt, Human
uguuuauuuuucucuuac

SEQ ID NO: 637830 - RNA, 22 nt, Human
uuacagugacaguugcuaugau

SEQ ID NO: 637831 - RNA, 22 nt, Human
auuguucacugugaaucuugau

SEQ ID NO: 637832 - RNA, 22 nt, Human
acuggggaauggaacugggaau

SEQ ID NO: 637833 - RNA, 22 nt, Human
auauuuuuccaugugggacucu

SEQ ID NO: 637834 - RNA, 22 nt, Human
aggagauuguacugucaucacu

SEQ ID NO: 637835 - RNA, 22 nt, Human
augaagcaggcacagcuucagg

SEQ ID NO: 637836 - RNA, 22 nt, Human
auggagggugucagagagcgaa

SEQ ID NO: 637837 - RNA, 22 nt, Human
agcaccugcacaguggaggaaa

SEQ ID NO: 637838 - RNA, 22 nt, Human
gcagacaggcccaguggaggga

SEQ ID NO: 637839 - RNA, 19 nt, Human
uacccucagggccucauuu

SEQ ID NO: 637840 - RNA, 22 nt, Human
uaaggaaacaacuuguauuuuu

SEQ ID NO: 637841 - RNA, 22 nt, Human
acauggaaaguacuccacaauu

SEQ ID NO: 637842 - RNA, 22 nt, Human
agcuccuccugugccaggccag

SEQ ID NO: 637843 - RNA, 22 nt, Human
cacaauguauauguauaucaaa

SEQ ID NO: 637844 - RNA, 22 nt, Human
gagagugucgggggccccagga

SEQ ID NO: 637845 - RNA, 23 nt, Human
ggaaagagaggaguugugcauag

SEQ ID NO: 637846 - RNA, 21 nt, Human
agccugggaggcggagguugc

SEQ ID NO: 637847 - RNA, 19 nt, Human
aagggcugggcaccucacu

SEQ ID NO: 637848 - RNA, 21 nt, Human
acaugucuggucauuuuuagc

SEQ ID NO: 637849 - RNA, 22 nt, Human
uggggcuguccuuagucugaga

SEQ ID NO: 637850 - RNA, 22 nt, Human
ugcagagccccagauuggagag

SEQ ID NO: 637851 - RNA, 22 nt, Human
cugagcugucaggaauggaaag

SEQ ID NO: 637852 - RNA, 22 nt, Human
uggcuggcuguccagcugggca

SEQ ID NO: 637853 - RNA, 22 nt, Human
gccuccuggguucaugccauuc

SEQ ID NO: 637854 - RNA, 22 nt, Human
auguaagacuuuaagaaccuaa

SEQ ID NO: 637855 - RNA, 22 nt, Human
uccagggcauccacgcgugggg

SEQ ID NO: 637856 - RNA, 21 nt, Human
ucucaggcgagaauucuuuua

SEQ ID NO: 637857 - RNA, 22 nt, Human
ucauuucuauugcuacugucug

SEQ ID NO: 637858 - RNA, 20 nt, Human
ccucuguguccugugucaua

SEQ ID NO: 637859 - RNA, 22 nt, Human
ccagaagagaucacaguucuug

SEQ ID NO: 637860 - RNA, 22 nt, Human
augugaggaagaaagagguaag

SEQ ID NO: 637861 - RNA, 22 nt, Human
aguuauaaaaggagcacugauu

SEQ ID NO: 637862 - RNA, 22 nt, Human
ggaggaggcaaguaccagaugc

SEQ ID NO: 637863 - RNA, 21 nt, Human
ugaggccugccagucucagaa

SEQ ID NO: 637864 - RNA, 22 nt, Human
ugagcuagguccugugucagcu

SEQ ID NO: 637865 - RNA, 22 nt, Human
caaggcagugggcuaggaaccu

SEQ ID NO: 637866 - RNA, 22 nt, Human
agcaaugcuuauugcugacuau

SEQ ID NO: 637867 - RNA, 22 nt, Human
uauccauauuaagaugccucug

SEQ ID NO: 637868 - RNA, 22 nt, Human
ucuuucaaugugaaaccaugua

SEQ ID NO: 637869 - RNA, 22 nt, Human
cugcuguguuccuccugcaucu

SEQ ID NO: 637870 - RNA, 22 nt, Human
aaaaaguuucaacugccaacuc

SEQ ID NO: 637871 - RNA, 22 nt, Human
cagaguggcaugaaugaagccu

SEQ ID NO: 637872 - RNA, 22 nt, Human
caggaggcuuugggauccaagu

SEQ ID NO: 637873 - RNA, 23 nt, Human
uguaccaggaguuucagcagacu

SEQ ID NO: 637874 - RNA, 21 nt, Human
uucugggccaugcugcuucuc

SEQ ID NO: 637875 - RNA, 17 nt, Human
agagggaaaaugcgguu

SEQ ID NO: 637876 - RNA, 19 nt, Human
uaucuguuuccugcuuguc

SEQ ID NO: 637877 - RNA, 22 nt, Human
cccucuacagggaagcgcuuuc

SEQ ID NO: 637878 - RNA, 20 nt, Human
ugagggaguauugauuuccc

SEQ ID NO: 637879 - RNA, 22 nt, Human
guacccagaggcaugaucccag

SEQ ID NO: 637880 - RNA, 22 nt, Human
gggaaagacccugagucuuauu

SEQ ID NO: 637881 - RNA, 22 nt, Human
aacauaucuacggauacgauua

SEQ ID NO: 637882 - RNA, 22 nt, Human
aucauaauugcuccagugauau

SEQ ID NO: 637883 - RNA, 22 nt, Human
uauuugucuaagaggcugacag

SEQ ID NO: 637884 - RNA, 22 nt, Human
gcugcaacuguugcucucugca

SEQ ID NO: 637885 - RNA, 22 nt, Human
caggaaaaggagacuuuagcac

SEQ ID NO: 637886 - RNA, 22 nt, Human
cugcagggcauuguaacucuuu

SEQ ID NO: 637887 - RNA, 22 nt, Human
ucugggcuggcuuuaugcugac

SEQ ID NO: 637888 - RNA, 22 nt, Human
ccaaaagcagcugucugugaau

SEQ ID NO: 637889 - RNA, 22 nt, Human
aauguauaaaguguuaauaacu

SEQ ID NO: 637890 - RNA, 22 nt, Human
cagcuuggauuuuggcacgugu

SEQ ID NO: 637891 - RNA, 22 nt, Human
gggaagcugaagcuagagaaaa

SEQ ID NO: 637892 - RNA, 21 nt, Human
ucaggcagugcaaauacaugg

SEQ ID NO: 637893 - RNA, 20 nt, Human
ccucucugcccugcaaggcc

SEQ ID NO: 637894 - RNA, 22 nt, Human
cagggacuacagccagcccucc

SEQ ID NO: 637895 - RNA, 22 nt, Human
gcacugggaaugcugaugggcu

SEQ ID NO: 637896 - RNA, 22 nt, Human
ccagcugacgaugccuggucuc

SEQ ID NO: 637897 - RNA, 22 nt, Human
ugucccagacauaaguggacau

SEQ ID NO: 637898 - RNA, 22 nt, Human
aaauggaucuuuuuauaaugca

SEQ ID NO: 637899 - RNA, 22 nt, Human
aucauuagaccaaacuagagcu

SEQ ID NO: 637900 - RNA, 22 nt, Human
uuuuaaaggcuguaugaccaag

SEQ ID NO: 637901 - RNA, 22 nt, Human
ccuuucagaugggcauggaccg

SEQ ID NO: 637902 - RNA, 22 nt, Human
cucagugcagcuaggcaugaga

SEQ ID NO: 637903 - RNA, 22 nt, Human
cuuacauugugugcaugagggg

SEQ ID NO: 637904 - RNA, 22 nt, Human
gugucugcacauaggaucucaa

SEQ ID NO: 637905 - RNA, 22 nt, Human
caccuagggcaucccugcccca

SEQ ID NO: 637906 - RNA, 22 nt, Human
caggucccgccccgggcugacc

SEQ ID NO: 637907 - RNA, 22 nt, Human
cagagccaggucuaggagucuc

SEQ ID NO: 637908 - RNA, 22 nt, Human
uagaugcugaaacauggaggcg

SEQ ID NO: 637909 - RNA, 22 nt, Human
gcucccagaaccaaggcugggg

SEQ ID NO: 637910 - RNA, 22 nt, Human
aggaggcccuagagcucuagag

SEQ ID NO: 637911 - RNA, 22 nt, Human
cugugcaguggggcucuggguu

SEQ ID NO: 637912 - RNA, 22 nt, Human
aauagcaaaguuaucaaauuaa

SEQ ID NO: 637913 - RNA, 22 nt, Human
uucacagucacccuucuccaug

SEQ ID NO: 637914 - RNA, 19 nt, Human
ucugguucauuucugcugu

SEQ ID NO: 637915 - RNA, 22 nt, Human
uauucagugcgggaacucagcc

SEQ ID NO: 637916 - RNA, 22 nt, Human
aucacaucgaggagcaaucaga

SEQ ID NO: 637917 - RNA, 22 nt, Human
ugagagucucagaccuccuggu

SEQ ID NO: 637918 - RNA, 22 nt, Human
uugagucucugccaaaacacaa

SEQ ID NO: 637919 - RNA, 22 nt, Human
uguuuaaucuauaaaauggaga

SEQ ID NO: 637920 - RNA, 22 nt, Human
gguggccaggccagcucuggcc

SEQ ID NO: 637921 - RNA, 22 nt, Human
gcuucauagcauucauugccug

SEQ ID NO: 637922 - RNA, 22 nt, Human
uggcuuccuaaacugauuucca

SEQ ID NO: 637923 - RNA, 22 nt, Human
gaaggaggucugcauucuacag

SEQ ID NO: 637924 - RNA, 21 nt, Human
ggugggguaccuaagguagcu

SEQ ID NO: 637925 - RNA, 22 nt, Human
gaguuuaguggaauuuccuucu

SEQ ID NO: 637926 - RNA, 22 nt, Human
aagccacuguuuuggagugcuu

SEQ ID NO: 637927 - RNA, 22 nt, Human
guggcagggcaaugcucccucu

SEQ ID NO: 637928 - RNA, 22 nt, Human
uguggugguaaugagccagaug

SEQ ID NO: 637929 - RNA, 22 nt, Human
aguucagcuucccaggucacug

SEQ ID NO: 637930 - RNA, 22 nt, Human
gagagagacauguaaacgcggu

SEQ ID NO: 637931 - RNA, 22 nt, Human
uccauuuuucaugacuccucaa

SEQ ID NO: 637932 - RNA, 22 nt, Human
uuggaaagauuauuauuaugaa

SEQ ID NO: 637933 - RNA, 22 nt, Human
agauaauuugaguaaauuaauu

SEQ ID NO: 637934 - RNA, 22 nt, Human
aaaccuuaaaccaagcucuuga

SEQ ID NO: 637935 - RNA, 22 nt, Human
cagaguuuuaucauacguggau

SEQ ID NO: 637936 - RNA, 20 nt, Human
uugucacagcuuuccaucag

SEQ ID NO: 637937 - RNA, 22 nt, Human
gccaggcauuuauugauugaau

SEQ ID NO: 637938 - RNA, 22 nt, Human
aaugucugcucuacucaggagg

SEQ ID NO: 637939 - RNA, 22 nt, Human
agaaacaacuuguuucucuugc

SEQ ID NO: 637940 - RNA, 22 nt, Human
agggaccugcucacugccuggc

SEQ ID NO: 637941 - RNA, 19 nt, Human
uggauggagccugugguug

SEQ ID NO: 637942 - RNA, 22 nt, Human
cuggcccucggaguccagcugc

SEQ ID NO: 637943 - RNA, 22 nt, Human
uugaaauacugcauuguucagu

SEQ ID NO: 637944 - RNA, 22 nt, Human
auaaucuuguauuuccuaaagu

SEQ ID NO: 637945 - RNA, 22 nt, Human
gcacaagaaaucauggacugaa

SEQ ID NO: 637946 - RNA, 22 nt, Human
ccuuuugaggcuugggcucaga

SEQ ID NO: 637947 - RNA, 21 nt, Human
aggugggagaccauguagguc

SEQ ID NO: 637948 - RNA, 22 nt, Human
uaacaggcugaucauauauccu

SEQ ID NO: 637949 - RNA, 22 nt, Human
aaacaauuuccaccucuccuga

SEQ ID NO: 637950 - RNA, 22 nt, Human
ugagcccuaccugcucaucucc

SEQ ID NO: 637951 - RNA, 22 nt, Human
ugaguuauggagaauaaaguca

SEQ ID NO: 637952 - RNA, 22 nt, Human
uugcuuccuggaugugacuuug

SEQ ID NO: 637953 - RNA, 18 nt, Human
gcuucauggaaggguugu

SEQ ID NO: 637954 - RNA, 22 nt, Human
agccagagacugugucuguaau

SEQ ID NO: 637955 - RNA, 22 nt, Human
aaggaaagacaggacggaauuc

SEQ ID NO: 637956 - RNA, 22 nt, Human
cacuugaacuguuugaaugaga

SEQ ID NO: 637957 - RNA, 22 nt, Human
ccccaggaagccucagauuugc

SEQ ID NO: 637958 - RNA, 22 nt, Human
aaagcagcagcacguggaagag

SEQ ID NO: 637959 - RNA, 22 nt, Human
ggcuucauuucuguccuugauu

SEQ ID NO: 637960 - RNA, 22 nt, Human
uaaggcaggaacuggcuguuuu

SEQ ID NO: 637961 - RNA, 22 nt, Human
uucuugaaaauagccauguaca

SEQ ID NO: 637962 - RNA, 22 nt, Human
cauguaaaacacucagaacagu

SEQ ID NO: 637963 - RNA, 22 nt, Human
caggauguucaagggaccuaug

SEQ ID NO: 637964 - RNA, 22 nt, Human
acuuggagagauaaucccauau

SEQ ID NO: 637965 - RNA, 22 nt, Human
gacauuggcuguucauugggau

SEQ ID NO: 637966 - RNA, 22 nt, Human
agaggccgggugccugcucaga

SEQ ID NO: 637967 - RNA, 22 nt, Human
aggcccugcaggaguggggaca

SEQ ID NO: 637968 - RNA, 22 nt, Human
aggccagaaaugucagggagug

SEQ ID NO: 637969 - RNA, 22 nt, Human
ccaacaccaucugagcuccagc

SEQ ID NO: 637970 - RNA, 22 nt, Human
ccucuucugcuucaggagcacu

SEQ ID NO: 637971 - RNA, 21 nt, Human
ucuguacaucauugagucccc

SEQ ID NO: 637972 - RNA, 22 nt, Human
ugcaggaacuugguuuuacuca

SEQ ID NO: 637973 - RNA, 22 nt, Human
gagcugcuucugugugccgggu

SEQ ID NO: 637974 - RNA, 22 nt, Human
auacauguaacugcauuguaau

SEQ ID NO: 637975 - RNA, 22 nt, Human
ccagccaccgcuuguuugcacu

SEQ ID NO: 637976 - RNA, 22 nt, Human
agggcugaggcgagggagaugc

SEQ ID NO: 637977 - RNA, 22 nt, Human
uaguuuagcauacaucuucagg

SEQ ID NO: 637978 - RNA, 22 nt, Human
auggaaaucagguucauccaag

SEQ ID NO: 637979 - RNA, 18 nt, Human
cagcugccagcucaugga

SEQ ID NO: 637980 - RNA, 22 nt, Human
uaucacaauuccuauaguuugu

SEQ ID NO: 637981 - RNA, 22 nt, Human
uuuuuugucuugaagaaauggu

SEQ ID NO: 637982 - RNA, 20 nt, Human
gcagcagugcaaguccucuu

SEQ ID NO: 637983 - RNA, 22 nt, Human
agaggaucaucuaguuugacuc

SEQ ID NO: 637984 - RNA, 22 nt, Human
gugagacacccaagagucagau

SEQ ID NO: 637985 - RNA, 19 nt, Human
augagcaauaguuuuaauc

SEQ ID NO: 637986 - RNA, 22 nt, Human
uggcuccacaggccagggugug

SEQ ID NO: 637987 - RNA, 22 nt, Human
uguauacauuuaacuagauaga

SEQ ID NO: 637988 - RNA, 22 nt, Human
cacugcuuuuuuggcuauguac

SEQ ID NO: 637989 - RNA, 22 nt, Human
acuggauggugucaugagcagc

SEQ ID NO: 637990 - RNA, 22 nt, Human
agugauguugacuagcuauaag

SEQ ID NO: 637991 - RNA, 22 nt, Human
acugggcauuuugaacguucuu

SEQ ID NO: 637992 - RNA, 22 nt, Human
aagguaaucagccuuuccacaa

SEQ ID NO: 637993 - RNA, 22 nt, Human
gagggaaaauaaaauugcagua

SEQ ID NO: 637994 - RNA, 22 nt, Human
aaagucaaugauuucuccugga

SEQ ID NO: 637995 - RNA, 22 nt, Human
aguuuacaugacguguauuuca

SEQ ID NO: 637996 - RNA, 22 nt, Human
guucagcccacagagggggccg

SEQ ID NO: 637997 - RNA, 22 nt, Human
aacacuggacaggaggcuaggu

SEQ ID NO: 637998 - RNA, 22 nt, Human
acugucacuugcaacugugagg

SEQ ID NO: 637999 - RNA, 22 nt, Human
gggaacagcauaucugaagggu

SEQ ID NO: 638000 - RNA, 22 nt, Human
auucagcacaauuuggccaaua

SEQ ID NO: 638001 - RNA, 22 nt, Human
uuugcaaauauguguuucuauu

SEQ ID NO: 638002 - RNA, 22 nt, Human
ccucagucuugaauuagccaga

SEQ ID NO: 638003 - RNA, 22 nt, Human
cagaggucaagaucugaaguga

SEQ ID NO: 638004 - RNA, 22 nt, Human
ccaggagggaccgcggcauccc

SEQ ID NO: 638005 - RNA, 22 nt, Human
cccugugauguagcuagaguag

SEQ ID NO: 638006 - RNA, 22 nt, Human
cugaggcaugaaugugggcuuu

SEQ ID NO: 638007 - RNA, 22 nt, Human
uaaggcagagguaccacuaggc

SEQ ID NO: 638008 - RNA, 22 nt, Human
ccuggcuuccuucaugaccugg

SEQ ID NO: 638009 - RNA, 22 nt, Human
ggcugcuggcauugagguaggu

SEQ ID NO: 638010 - RNA, 22 nt, Human
gaguucugaacugugaaaugca

SEQ ID NO: 638011 - RNA, 22 nt, Human
ccaagcuacuuaggagucugag

SEQ ID NO: 638012 - RNA, 22 nt, Human
ucuugggcauguguuugauuuc

SEQ ID NO: 638013 - RNA, 18 nt, Human
uggcagguccagcugugg

SEQ ID NO: 638014 - RNA, 22 nt, Human
cucagcaucaugguaucugggg

SEQ ID NO: 638015 - RNA, 22 nt, Human
uucaagauggccccagugagcc

SEQ ID NO: 638016 - RNA, 22 nt, Human
ucugaggccugaagcagcagag

SEQ ID NO: 638017 - RNA, 23 nt, Human
auacauacagucuuacugacuuu

SEQ ID NO: 638018 - RNA, 22 nt, Human
auccaguuuaugucauauucuu

SEQ ID NO: 638019 - RNA, 22 nt, Human
ucuccugauaucugcagaccua

SEQ ID NO: 638020 - RNA, 22 nt, Human
uauaaaugcacuuuugaaauau

SEQ ID NO: 638021 - RNA, 22 nt, Human
agugugcugcuuaaacaguugu

SEQ ID NO: 638022 - RNA, 22 nt, Human
cggcagcaaaggaagccagguc

SEQ ID NO: 638023 - RNA, 22 nt, Human
agaaugaauuaaucaacuggaa

SEQ ID NO: 638024 - RNA, 22 nt, Human
ucaaugauaucagcaggaugug

SEQ ID NO: 638025 - RNA, 22 nt, Human
ccauggcuuacagauggagcau

SEQ ID NO: 638026 - RNA, 22 nt, Human
augcaguuuuaaaucauuucag

SEQ ID NO: 638027 - RNA, 23 nt, Human
ugugacagggucauugaaaaggg

SEQ ID NO: 638028 - RNA, 17 nt, Human
gaacaguguaagacacu

SEQ ID NO: 638029 - RNA, 22 nt, Human
uuucccuucuuuccugaguaau

SEQ ID NO: 638030 - RNA, 22 nt, Human
auaauggcuucugaguauuagg

SEQ ID NO: 638031 - RNA, 22 nt, Human
gaagucugacucuuuguaagcu

SEQ ID NO: 638032 - RNA, 22 nt, Human
ugcagcagucagucaggccugg

SEQ ID NO: 638033 - RNA, 20 nt, Human
ugacaaaugaucugauuuuc

SEQ ID NO: 638034 - RNA, 22 nt, Human
agaaaggacaucucccuuuaag

SEQ ID NO: 638035 - RNA, 22 nt, Human
gacauucauugaugucuuccuc

SEQ ID NO: 638036 - RNA, 22 nt, Human
guuagaaagugucugcuugggu

SEQ ID NO: 638037 - RNA, 22 nt, Human
cacagaauuaagggagaaauau

SEQ ID NO: 638038 - RNA, 22 nt, Human
ucucagagugacaaugagaauu

SEQ ID NO: 638039 - RNA, 22 nt, Human
uaugagaaaauaaauaucuguu

SEQ ID NO: 638040 - RNA, 22 nt, Human
ucugggauagggccagaacaug

SEQ ID NO: 638041 - RNA, 22 nt, Human
guccaugauucugugacacccu

SEQ ID NO: 638042 - RNA, 18 nt, Human
ucuucaucuccugagcug

SEQ ID NO: 638043 - RNA, 22 nt, Human
ucagggcauccauugccuguug

SEQ ID NO: 638044 - RNA, 22 nt, Human
ugucacauaauuuaucuguagg

SEQ ID NO: 638045 - RNA, 22 nt, Human
gcucagugaagggugccaagua

SEQ ID NO: 638046 - RNA, 22 nt, Human
aggcaaaucugagacauuuaaa

SEQ ID NO: 638047 - RNA, 19 nt, Human
cuucugcagggugacagug

SEQ ID NO: 638048 - RNA, 22 nt, Human
cucuggagaacuccuugugucu

SEQ ID NO: 638049 - RNA, 22 nt, Human
gugcaggagcuucuggccugac

SEQ ID NO: 638050 - RNA, 22 nt, Human
aggcagcuggcagcacccaggg

SEQ ID NO: 638051 - RNA, 22 nt, Human
aguccaauaaccucuuuccuuc

SEQ ID NO: 638052 - RNA, 22 nt, Human
ccagcucuuuuggcugagugag

SEQ ID NO: 638053 - RNA, 22 nt, Human
uagcagcugugaguaaaagcca

SEQ ID NO: 638054 - RNA, 22 nt, Human
cuggauccaucgggucccgagu

SEQ ID NO: 638055 - RNA, 22 nt, Human
gaaaggagaggguuaaggagcu

SEQ ID NO: 638056 - RNA, 22 nt, Human
uacauuaaggauauggacauga

SEQ ID NO: 638057 - RNA, 22 nt, Human
cagcaggcggcccgcgggcccg

SEQ ID NO: 638058 - RNA, 22 nt, Human
agaauauucaucuguauucuua

SEQ ID NO: 638059 - RNA, 22 nt, Human
ugcaggcauaaccgauguugau

SEQ ID NO: 638060 - RNA, 22 nt, Human
ucagacagugugaucagucucu

SEQ ID NO: 638061 - RNA, 22 nt, Human
uuuuacaaaugaggagcuggag

SEQ ID NO: 638062 - RNA, 22 nt, Human
uagaugaagggguucagcaugg

SEQ ID NO: 638063 - RNA, 22 nt, Human
ccucuaaauuguuugaaguugg

SEQ ID NO: 638064 - RNA, 22 nt, Human
agggagacacaugaggaaguca

SEQ ID NO: 638065 - RNA, 22 nt, Human
gcagggcuaggucuucuagggc

SEQ ID NO: 638066 - RNA, 22 nt, Human
gauauacagagcauucuuugau

SEQ ID NO: 638067 - RNA, 22 nt, Human
aaugaaaauuggacccuagaac

SEQ ID NO: 638068 - RNA, 21 nt, Human
caucacauuacucaaaguccu

SEQ ID NO: 638069 - RNA, 22 nt, Human
aacugcaacuuguuugauucuu

SEQ ID NO: 638070 - RNA, 22 nt, Human
uaaaguguuuguaugcagauaa

SEQ ID NO: 638071 - RNA, 22 nt, Human
ggguggcaaaggcgcugaaagg

SEQ ID NO: 638072 - RNA, 22 nt, Human
uuugaauaaacgguuaauguuc

SEQ ID NO: 638073 - RNA, 20 nt, Human
ucagguagaucuuugagguc

SEQ ID NO: 638074 - RNA, 22 nt, Human
gggcagguggcagggucucugg

SEQ ID NO: 638075 - RNA, 22 nt, Human
ucuggcucccuggagcuccaca

SEQ ID NO: 638076 - RNA, 22 nt, Human
uuucaaaugcaugucuuuccuc

SEQ ID NO: 638077 - RNA, 22 nt, Human
ggagccuguuaguugagugcuc

SEQ ID NO: 638078 - RNA, 22 nt, Human
ugacaggugauugugaacuaag

SEQ ID NO: 638079 - RNA, 22 nt, Human
uguaacuggacaagauauucau

SEQ ID NO: 638080 - RNA, 22 nt, Human
uuauuugguugcugacuuggaa

SEQ ID NO: 638081 - RNA, 22 nt, Human
gcucaggaaaacagucuaguaa

SEQ ID NO: 638082 - RNA, 22 nt, Human
uacuuucuguccuucuguuaaa

SEQ ID NO: 638083 - RNA, 22 nt, Human
auagcaacaccccaauuuucua

SEQ ID NO: 638084 - RNA, 22 nt, Human
uaugaagaagacaaaugacacu

SEQ ID NO: 638085 - RNA, 22 nt, Human
uaaaucuuguggcaaugcuucu

SEQ ID NO: 638086 - RNA, 22 nt, Human
guggagggugagcucauguuug

SEQ ID NO: 638087 - RNA, 22 nt, Human
acaguuuaugguguuuuauaua

SEQ ID NO: 638088 - RNA, 22 nt, Human
acaacuuugacccuuguucuua

SEQ ID NO: 638089 - RNA, 22 nt, Human
ucagaaucugaaaagcgcuugg

SEQ ID NO: 638090 - RNA, 22 nt, Human
acuguuaacgguaugaugcucg

SEQ ID NO: 638091 - RNA, 22 nt, Human
uacaaaaguaauuacgguuuuu

SEQ ID NO: 638092 - RNA, 22 nt, Human
agaagcaggccucacagaucug

SEQ ID NO: 638093 - RNA, 22 nt, Human
uuuuaauuuuagcccuucuggu

SEQ ID NO: 638094 - RNA, 22 nt, Human
uucuacauuuaaaaggaaaauc

SEQ ID NO: 638095 - RNA, 22 nt, Human
accacaucgggcggacacuggg

SEQ ID NO: 638096 - RNA, 22 nt, Human
ucaguguuucaguuuggaaaug

SEQ ID NO: 638097 - RNA, 22 nt, Human
uuugacaucaauacccuagaau

SEQ ID NO: 638098 - RNA, 22 nt, Human
uguaucuucaguuugucuuucc

SEQ ID NO: 638099 - RNA, 22 nt, Human
cacagaggucugggcccagcag

SEQ ID NO: 638100 - RNA, 22 nt, Human
ccuggcuggcaagaucgugaag

SEQ ID NO: 638101 - RNA, 20 nt, Human
uuaguugaguagcuccugaa

SEQ ID NO: 638102 - RNA, 22 nt, Human
gcccaggauggcuggaggugcu

SEQ ID NO: 638103 - RNA, 22 nt, Human
uuaacacuugaacucuacaugu

SEQ ID NO: 638104 - RNA, 22 nt, Human
acaugauucuugauaggcauug

SEQ ID NO: 638105 - RNA, 22 nt, Human
gcacuuggauauacaaaugaag

SEQ ID NO: 638106 - RNA, 22 nt, Human
augucucugcugugguuagcuu

SEQ ID NO: 638107 - RNA, 22 nt, Human
aagauaacaggaggaguuugua

SEQ ID NO: 638108 - RNA, 23 nt, Human
ucugagaagguuucagccagacu

SEQ ID NO: 638109 - RNA, 22 nt, Human
cacagguguccaauaccugcuu

SEQ ID NO: 638110 - RNA, 22 nt, Human
gcaguccuccugccucagccuc

SEQ ID NO: 638111 - RNA, 22 nt, Human
acagugagcgguagugauugcu

SEQ ID NO: 638112 - RNA, 22 nt, Human
uggcaguguccuacugguuggu

SEQ ID NO: 638113 - RNA, 22 nt, Human
cuccucuggaaauuccucugcc

SEQ ID NO: 638114 - RNA, 22 nt, Human
acaguguuuucuuaaggagaaa

SEQ ID NO: 638115 - RNA, 22 nt, Human
auggggaagagccagugagcug

SEQ ID NO: 638116 - RNA, 17 nt, Human
aggugcagaggcagagc

SEQ ID NO: 638117 - RNA, 22 nt, Human
ugucagaggcucagggucucag

SEQ ID NO: 638118 - RNA, 22 nt, Human
gccccaccugcuaccuuccagc

SEQ ID NO: 638119 - RNA, 22 nt, Human
cagagccagaacuagaccuugu

SEQ ID NO: 638120 - RNA, 22 nt, Human
agggcuaggaauggaacuggag

SEQ ID NO: 638121 - RNA, 22 nt, Human
cacuguaaagcgucacagggac

SEQ ID NO: 638122 - RNA, 22 nt, Human
aguaaaaauugaggugcaaaau

SEQ ID NO: 638123 - RNA, 22 nt, Human
agcuaaugauacaugcuccaca

SEQ ID NO: 638124 - RNA, 22 nt, Human
ucagaggucccuagcaggagug

SEQ ID NO: 638125 - RNA, 18 nt, Human
cuagaugagcuuggcaag

SEQ ID NO: 638126 - RNA, 22 nt, Human
aaguauucuacaaagaaauuga

SEQ ID NO: 638127 - RNA, 22 nt, Human
aaaguauguuguggcuuuuaaa

SEQ ID NO: 638128 - RNA, 22 nt, Human
gauugcuuauacacaagaugaa

SEQ ID NO: 638129 - RNA, 19 nt, Human
acugagaaccugacccagg

SEQ ID NO: 638130 - RNA, 18 nt, Human
uacagcuugaguugacug

SEQ ID NO: 638131 - RNA, 22 nt, Human
ccaugccccaccaggacgcugc

SEQ ID NO: 638132 - RNA, 22 nt, Human
acugggaaaagcuauggcaaau

SEQ ID NO: 638133 - RNA, 22 nt, Human
ucucugagcccagugucccccu

SEQ ID NO: 638134 - RNA, 22 nt, Human
uaaagcagccagggucuaagcc

SEQ ID NO: 638135 - RNA, 22 nt, Human
augaaugauuaaagaguacagu

SEQ ID NO: 638136 - RNA, 22 nt, Human
ccgcggggcgugggcucuuacc

SEQ ID NO: 638137 - RNA, 22 nt, Human
caguuaaacagauugaguguua

SEQ ID NO: 638138 - RNA, 22 nt, Human
ccacaugcucaccaagucccug

SEQ ID NO: 638139 - RNA, 22 nt, Human
ggaggccuaagguacaguuugc

SEQ ID NO: 638140 - RNA, 22 nt, Human
ccaggugucaugcgugugaccc

SEQ ID NO: 638141 - RNA, 22 nt, Human
ugggccacauuccaaaccagcu

SEQ ID NO: 638142 - RNA, 22 nt, Human
uagcaucugcguuggguuggac

SEQ ID NO: 638143 - RNA, 22 nt, Human
gaauugcucugccuggccagcc

SEQ ID NO: 638144 - RNA, 22 nt, Human
uacugucuggaguugccaaagg

SEQ ID NO: 638145 - RNA, 22 nt, Human
uguguccaucugacaggagagg

SEQ ID NO: 638146 - RNA, 22 nt, Human
gaggaaggcuaaggggcuuaga

SEQ ID NO: 638147 - RNA, 22 nt, Human
agaaguggucugucuuccagau

SEQ ID NO: 638148 - RNA, 22 nt, Human
gagaaggcugauccuuggaguu

SEQ ID NO: 638149 - RNA, 22 nt, Human
ccuagggagccugagagcagug

SEQ ID NO: 638150 - RNA, 23 nt, Human
acaggcucuuaaucagugcuccu

SEQ ID NO: 638151 - RNA, 20 nt, Human
caucaucacaugagccaauu

SEQ ID NO: 638152 - RNA, 18 nt, Human
aggcuucuuggcucaguc

SEQ ID NO: 638153 - RNA, 22 nt, Human
caguuuucuaaagucucuuuaa

SEQ ID NO: 638154 - RNA, 22 nt, Human
uacuucaauuauaugccaguua

SEQ ID NO: 638155 - RNA, 22 nt, Human
cuggcaugccuugggugccucu

SEQ ID NO: 638156 - RNA, 22 nt, Human
uccugagggcugcagucauagg

SEQ ID NO: 638157 - RNA, 22 nt, Human
caugaagcuugaagcaguccac

SEQ ID NO: 638158 - RNA, 22 nt, Human
acucugggccccagguggagcu

SEQ ID NO: 638159 - RNA, 22 nt, Human
cugccaggcacugggcucugca

SEQ ID NO: 638160 - RNA, 17 nt, Human
gcuccuucuaacuucca

SEQ ID NO: 638161 - RNA, 22 nt, Human
uucuaacuuucaagguccuuuc

SEQ ID NO: 638162 - RNA, 22 nt, Human
gcaggcguguuucacgugccag

SEQ ID NO: 638163 - RNA, 22 nt, Human
acaaauuucauaggcaaauuuu

SEQ ID NO: 638164 - RNA, 20 nt, Human
ugggagaugaucuccuugcu

SEQ ID NO: 638165 - RNA, 20 nt, Human
ggugcgaggccagagcagac

SEQ ID NO: 638166 - RNA, 20 nt, Human
guauuaggagguaaauguaa

SEQ ID NO: 638167 - RNA, 21 nt, Human
gccuguguaaauugaguuucc

SEQ ID NO: 638168 - RNA, 22 nt, Human
gugcucuguguauuaggauguc

SEQ ID NO: 638169 - RNA, 22 nt, Human
cauagagugauguaagguaugu

SEQ ID NO: 638170 - RNA, 22 nt, Human
acuuccuguaaauagaauucca

SEQ ID NO: 638171 - RNA, 22 nt, Human
aucagacucagaaaugacgugg

SEQ ID NO: 638172 - RNA, 22 nt, Human
aggacuggcagugugagggguc

SEQ ID NO: 638173 - RNA, 22 nt, Human
ccucuggcaacuucacagccca

SEQ ID NO: 638174 - RNA, 22 nt, Human
ccacagucuaugcaacaagguc

SEQ ID NO: 638175 - RNA, 22 nt, Human
gaggucugggcuugggccuggu

SEQ ID NO: 638176 - RNA, 22 nt, Human
uggcuucacaauuucauaacua

SEQ ID NO: 638177 - RNA, 22 nt, Human
acuuagcaaaucuuuuggauuc

SEQ ID NO: 638178 - RNA, 22 nt, Human
gacagcugaaggaugauucagg

SEQ ID NO: 638179 - RNA, 22 nt, Human
cagaggcugggaccucaggcau

SEQ ID NO: 638180 - RNA, 22 nt, Human
uacaacaguaaucaagguuuuu

SEQ ID NO: 638181 - RNA, 22 nt, Human
uccuggccuuagcgaggcgguc

SEQ ID NO: 638182 - RNA, 22 nt, Human
gaagcacugcauuucaagauca

SEQ ID NO: 638183 - RNA, 22 nt, Human
agguuuucagcuguauccugag

SEQ ID NO: 638184 - RNA, 22 nt, Human
uauuuauuggacaguguugcug

SEQ ID NO: 638185 - RNA, 22 nt, Human
uaguuuguaaugaggagaagua

SEQ ID NO: 638186 - RNA, 22 nt, Human
uaggacaggugaggggcugugg

SEQ ID NO: 638187 - RNA, 22 nt, Human
uccuggaguuuguggugauaug

SEQ ID NO: 638188 - RNA, 22 nt, Human
aggucugauuuuuuauucccag

SEQ ID NO: 638189 - RNA, 22 nt, Human
cugggccaucagaggggcugga

SEQ ID NO: 638190 - RNA, 22 nt, Human
uuguccuggagguuaauagagu

SEQ ID NO: 638191 - RNA, 22 nt, Human
cagaguaucccuuuagaauuaa

SEQ ID NO: 638192 - RNA, 22 nt, Human
uuucuucucaucccugaaauca

SEQ ID NO: 638193 - RNA, 17 nt, Human
cccguucucuucgcugg

SEQ ID NO: 638194 - RNA, 22 nt, Human
gaucucuggguccuguuggccu

SEQ ID NO: 638195 - RNA, 22 nt, Human
aggcuggcccaccucuugucuu

SEQ ID NO: 638196 - RNA, 22 nt, Human
agcccagagccccggccauguu

SEQ ID NO: 638197 - RNA, 22 nt, Human
ucugggaugagaucagagacac

SEQ ID NO: 638198 - RNA, 22 nt, Human
acauucucuuccuaaauauacu

SEQ ID NO: 638199 - RNA, 22 nt, Human
cuucuacacaucccucuugcuu

SEQ ID NO: 638200 - RNA, 22 nt, Human
ucaaaggguagcccagggaaga

SEQ ID NO: 638201 - RNA, 22 nt, Human
auggaacaggcucagagaugcu

SEQ ID NO: 638202 - RNA, 22 nt, Human
cucugagaaagcugugagcuaa

SEQ ID NO: 638203 - RNA, 22 nt, Human
ccaggcugcuuagccuuaucuu

SEQ ID NO: 638204 - RNA, 19 nt, Human
ggcaccuuggcuaugccug

SEQ ID NO: 638205 - RNA, 22 nt, Human
cccaggaggguggccucugccc

SEQ ID NO: 638206 - RNA, 22 nt, Human
guauaguuugcgauuugugguu

SEQ ID NO: 638207 - RNA, 22 nt, Human
gggcagccgcgugaccugccag

SEQ ID NO: 638208 - RNA, 22 nt, Human
aguguugcaugaggcaguacca

SEQ ID NO: 638209 - RNA, 17 nt, Human
cuagagagaaagagcua

SEQ ID NO: 638210 - RNA, 22 nt, Human
ggcagcaaguaggauucuuauu

SEQ ID NO: 638211 - RNA, 22 nt, Human
cagggcugaagaaauucaaaag

SEQ ID NO: 638212 - RNA, 22 nt, Human
cugcucuucccacucacuccca

SEQ ID NO: 638213 - RNA, 21 nt, Human
ccagaagcugcuugcaggcua

SEQ ID NO: 638214 - RNA, 22 nt, Human
gcagaggccugaagguggcggg

SEQ ID NO: 638215 - RNA, 22 nt, Human
cagcuuucaucagugacacuca

SEQ ID NO: 638216 - RNA, 22 nt, Human
cacauggcagaaucaugcaucu

SEQ ID NO: 638217 - RNA, 22 nt, Human
gagauaaauuuuugauaaauau

SEQ ID NO: 638218 - RNA, 21 nt, Human
acucugucuugagccaucugu

SEQ ID NO: 638219 - RNA, 22 nt, Human
cauuuucucaaugaacccucuu

SEQ ID NO: 638220 - RNA, 22 nt, Human
uggcuuccaguaaucaggauuu

SEQ ID NO: 638221 - RNA, 22 nt, Human
gccuuccaggcagggggagcag

SEQ ID NO: 638222 - RNA, 22 nt, Human
uucucuuauucuggauaugcag

SEQ ID NO: 638223 - RNA, 22 nt, Human
uuaaucacagcucugccaugag

SEQ ID NO: 638224 - RNA, 22 nt, Human
gagguggccucaagcagucuuc

SEQ ID NO: 638225 - RNA, 19 nt, Human
agguuuauggggaggguga

SEQ ID NO: 638226 - RNA, 22 nt, Human
ggaagacugcauggcauaguga

SEQ ID NO: 638227 - RNA, 19 nt, Human
ugcugcaggaugcugcugg

SEQ ID NO: 638228 - RNA, 22 nt, Human
auucaguaggucuagaauaaga

SEQ ID NO: 638229 - RNA, 22 nt, Human
aauuaaaggucauguuaaaggg

SEQ ID NO: 638230 - RNA, 22 nt, Human
auuaaaccccaguucucuuacu

SEQ ID NO: 638231 - RNA, 21 nt, Human
acaguuuauuagaguaagugc

SEQ ID NO: 638232 - RNA, 22 nt, Human
guccucugggcuuugagcaguc

SEQ ID NO: 638233 - RNA, 22 nt, Human
aagaaauggcuucaucugagua

SEQ ID NO: 638234 - RNA, 21 nt, Human
uagcaaauggagaguaagaga

SEQ ID NO: 638235 - RNA, 22 nt, Human
ugcucuggcugggaugagugca

SEQ ID NO: 638236 - RNA, 22 nt, Human
gcuugcucaacccccgucucuc

SEQ ID NO: 638237 - RNA, 17 nt, Human
agacacugagccaagua

SEQ ID NO: 638238 - RNA, 22 nt, Human
gcuucucuggccugcagggcau

SEQ ID NO: 638239 - RNA, 22 nt, Human
cucagcuacgcuuucaccagcu

SEQ ID NO: 638240 - RNA, 22 nt, Human
acuaauuguauaguugauguaa

SEQ ID NO: 638241 - RNA, 22 nt, Human
ugcuccaggcugcugaagaucu

SEQ ID NO: 638242 - RNA, 22 nt, Human
gcagcugccuauucagggcuug

SEQ ID NO: 638243 - RNA, 22 nt, Human
cugugagauguuucugguuaga

SEQ ID NO: 638244 - RNA, 22 nt, Human
aauuauguagccauaugaaaca

SEQ ID NO: 638245 - RNA, 22 nt, Human
accucuaaaaaauuagaagccu

SEQ ID NO: 638246 - RNA, 22 nt, Human
uuucucuccuccaaaccaaaga

SEQ ID NO: 638247 - RNA, 22 nt, Human
ucucucuugaaguauuagcuag

SEQ ID NO: 638248 - RNA, 22 nt, Human
cuuccugcccacuuccugcugg

SEQ ID NO: 638249 - RNA, 22 nt, Human
uaugaggcacuucauuagcugg

SEQ ID NO: 638250 - RNA, 22 nt, Human
auaguacauggguguccucaca

SEQ ID NO: 638251 - RNA, 22 nt, Human
ugggccagcacugggugcucau

SEQ ID NO: 638252 - RNA, 22 nt, Human
ccagacuggggcuccuugaggg

SEQ ID NO: 638253 - RNA, 22 nt, Human
aguuuccuuggauucaauuugg

SEQ ID NO: 638254 - RNA, 22 nt, Human
gaaagcacaguucugaccaugu

SEQ ID NO: 638255 - RNA, 22 nt, Human
acuucauuguaauauuauagca

SEQ ID NO: 638256 - RNA, 22 nt, Human
uuacuuuagaaauagucaucaa

SEQ ID NO: 638257 - RNA, 22 nt, Human
uucuggaaguuuucuccugugg

SEQ ID NO: 638258 - RNA, 20 nt, Human
uccucccccaccuuugcagc

SEQ ID NO: 638259 - RNA, 22 nt, Human
aacaaacauuaccuggugcugg

SEQ ID NO: 638260 - RNA, 22 nt, Human
uggcugagaaaaaagagcuaua

SEQ ID NO: 638261 - RNA, 21 nt, Human
uggaagggaagucuugguugu

SEQ ID NO: 638262 - RNA, 22 nt, Human
gcucugacuuccugcgcuccag

SEQ ID NO: 638263 - RNA, 22 nt, Human
ucaggaaguuuugaaucaacug

SEQ ID NO: 638264 - RNA, 22 nt, Human
aaguccagguccucauuccauc

SEQ ID NO: 638265 - RNA, 22 nt, Human
caggaacagaguggcauugucu

SEQ ID NO: 638266 - RNA, 22 nt, Human
ugggccuccuccgacagccggg

SEQ ID NO: 638267 - RNA, 22 nt, Human
ggcuucccuuuccgagaggaga

SEQ ID NO: 638268 - RNA, 22 nt, Human
agcaggguuuggggauuggcac

SEQ ID NO: 638269 - RNA, 22 nt, Human
uugagguauauucacauauauc

SEQ ID NO: 638270 - RNA, 22 nt, Human
ugggauaguggccaggaccccc

SEQ ID NO: 638271 - RNA, 22 nt, Human
ucaggaggcgucucgcuggggc

SEQ ID NO: 638272 - RNA, 22 nt, Human
cuggcugguaauggaacgacag

SEQ ID NO: 638273 - RNA, 22 nt, Human
cagcuguggagggaggaaaugc

SEQ ID NO: 638274 - RNA, 21 nt, Human
gcagccacugccuucaacaau

SEQ ID NO: 638275 - RNA, 22 nt, Human
ucaccaggcuccuguuaagaug

SEQ ID NO: 638276 - RNA, 22 nt, Human
ucugagccauaagaguacagga

SEQ ID NO: 638277 - RNA, 22 nt, Human
uugaaaaccgugggaggcugaa

SEQ ID NO: 638278 - RNA, 22 nt, Human
caggcuccuucccagggauggu

SEQ ID NO: 638279 - RNA, 22 nt, Human
ucuuauuuuuuaaugacagaga

SEQ ID NO: 638280 - RNA, 22 nt, Human
ggcuacagacugcauaagggca

SEQ ID NO: 638281 - RNA, 22 nt, Human
uaggcugggaagaaagauucuc

SEQ ID NO: 638282 - RNA, 21 nt, Human
acccaggggaagcagaaacug

SEQ ID NO: 638283 - RNA, 22 nt, Human
ucucuguguguuggcuguauau

SEQ ID NO: 638284 - RNA, 22 nt, Human
gggaaggacacagccaugacug

SEQ ID NO: 638285 - RNA, 22 nt, Human
ugcagggcuccuggcuccaauc

SEQ ID NO: 638286 - RNA, 22 nt, Human
ugagccaagcagcuucccaggg

SEQ ID NO: 638287 - RNA, 22 nt, Human
uccagcccugugucugggagag

SEQ ID NO: 638288 - RNA, 22 nt, Human
aauguauaauauuuaaugcuuu

SEQ ID NO: 638289 - RNA, 22 nt, Human
cugggcagccucacacaauguu

SEQ ID NO: 638290 - RNA, 22 nt, Human
uggguaggggacguggaagaaa

SEQ ID NO: 638291 - RNA, 22 nt, Human
uuccuucaguucagggaacccu

SEQ ID NO: 638292 - RNA, 22 nt, Human
uucuucaaaacaacacuggccu

SEQ ID NO: 638293 - RNA, 22 nt, Human
ugcagcagcagggaggaggcuc

SEQ ID NO: 638294 - RNA, 22 nt, Human
uugggccaaauagcuauuuacu

SEQ ID NO: 638295 - RNA, 22 nt, Human
ucccagauucuucugugugggc

SEQ ID NO: 638296 - RNA, 22 nt, Human
agguccugucuaucacccucgc

SEQ ID NO: 638297 - RNA, 22 nt, Human
ugaauucuggcccucucacuua

SEQ ID NO: 638298 - RNA, 22 nt, Human
aguaugaauggaaacuaccuau

SEQ ID NO: 638299 - RNA, 22 nt, Human
uauugacacuuuuuguguagcc

SEQ ID NO: 638300 - RNA, 22 nt, Human
auguguguacacacgugacucu

SEQ ID NO: 638301 - RNA, 22 nt, Human
ugggcugcuucuauuggugguc

SEQ ID NO: 638302 - RNA, 22 nt, Human
gggccagagcacagaggauguu

SEQ ID NO: 638303 - RNA, 18 nt, Human
gcaggcccuguuucuggg

SEQ ID NO: 638304 - RNA, 22 nt, Human
uaacagcuggcguuauaggaau

SEQ ID NO: 638305 - RNA, 22 nt, Human
cuaguaaagcuaugauucugcc

SEQ ID NO: 638306 - RNA, 22 nt, Human
gggagucagagagguaauggga

SEQ ID NO: 638307 - RNA, 20 nt, Human
ucagcucugugccugggaug

SEQ ID NO: 638308 - RNA, 22 nt, Human
aagauguuagaggucaugcaga

SEQ ID NO: 638309 - RNA, 22 nt, Human
caagagagaugcagcucacuca

SEQ ID NO: 638310 - RNA, 22 nt, Human
auauguuuugugcuucauuggu

SEQ ID NO: 638311 - RNA, 22 nt, Human
agagaugucgccuugcccaggg

SEQ ID NO: 638312 - RNA, 22 nt, Human
acagugcacauccugagugauu

SEQ ID NO: 638313 - RNA, 22 nt, Human
ucugugcugccauccuguggcc

SEQ ID NO: 638314 - RNA, 22 nt, Human
uuccugagucgccgagucuaug

SEQ ID NO: 638315 - RNA, 22 nt, Human
augcccugccaagcaggcuaaa

SEQ ID NO: 638316 - RNA, 22 nt, Human
guuuauuauucaacuucauguu

SEQ ID NO: 638317 - RNA, 22 nt, Human
acugggcccagugguguggcug

SEQ ID NO: 638318 - RNA, 22 nt, Human
uagacaaugccaucuugugguu

SEQ ID NO: 638319 - RNA, 22 nt, Human
uccuggcucugcugccuccuag

SEQ ID NO: 638320 - RNA, 17 nt, Human
ucugcagaggcaaaccu

SEQ ID NO: 638321 - RNA, 22 nt, Human
ccccucuuggcauugagugcca

SEQ ID NO: 638322 - RNA, 22 nt, Human
ccuaaggaaagccaaagaggcc

SEQ ID NO: 638323 - RNA, 22 nt, Human
guucgcaucuugaucauggacu

SEQ ID NO: 638324 - RNA, 22 nt, Human
gcccagcacagcuggaagaguc

SEQ ID NO: 638325 - RNA, 22 nt, Human
ccuucuccugccuuggguucau

SEQ ID NO: 638326 - RNA, 22 nt, Human
auuugugaauuaagcaugucaa

SEQ ID NO: 638327 - RNA, 20 nt, Human
ccaagagcaugcaugaggaa

SEQ ID NO: 638328 - RNA, 22 nt, Human
aaacaguauuaucaauauauuu

SEQ ID NO: 638329 - RNA, 22 nt, Human
gagcuuggcuggaccucacgga

SEQ ID NO: 638330 - RNA, 22 nt, Human
agucaguguucuccggagaggc

SEQ ID NO: 638331 - RNA, 22 nt, Human
ccaaggagcaaggcucaacaag

SEQ ID NO: 638332 - RNA, 21 nt, Human
cccucaggaaacagaaugcac

SEQ ID NO: 638333 - RNA, 21 nt, Human
uacagucuccccuguugucca

SEQ ID NO: 638334 - RNA, 22 nt, Human
agacagcagggagcaggauuca

SEQ ID NO: 638335 - RNA, 22 nt, Human
gugcaggagcaggagccauguc

SEQ ID NO: 638336 - RNA, 22 nt, Human
guggaggguuugcaaugugcag

SEQ ID NO: 638337 - RNA, 22 nt, Human
acuuagugcccuggcccuuaca

SEQ ID NO: 638338 - RNA, 22 nt, Human
uaaggagagaauuuagagguuu

SEQ ID NO: 638339 - RNA, 22 nt, Human
ccacucuugaaucaagagcuca

SEQ ID NO: 638340 - RNA, 21 nt, Human
uuacaaagcaagugcuguguc

SEQ ID NO: 638341 - RNA, 21 nt, Human
aagcuucccugcucuccaggg

SEQ ID NO: 638342 - RNA, 22 nt, Human
auuugcuuguccuggugacugu

SEQ ID NO: 638343 - RNA, 22 nt, Human
aggcuguggugcugaaggaggg

SEQ ID NO: 638344 - RNA, 22 nt, Human
ggaaaaacagucuuuauuauuu

SEQ ID NO: 638345 - RNA, 22 nt, Human
ugggccaguuauuucaccucug

SEQ ID NO: 638346 - RNA, 22 nt, Human
gacagguggggaaacuaaggua

SEQ ID NO: 638347 - RNA, 21 nt, Human
uuucccagcagagauagcugg

SEQ ID NO: 638348 - RNA, 22 nt, Human
uccaucauggcagcagcaguga

SEQ ID NO: 638349 - RNA, 22 nt, Human
uaaugcuuauguuaugcaauuu

SEQ ID NO: 638350 - RNA, 22 nt, Human
uggggcagcagaccuuucuugg

SEQ ID NO: 638351 - RNA, 22 nt, Human
aggaaagaaaggaggugcauuu

SEQ ID NO: 638352 - RNA, 22 nt, Human
ccagggugggguccaggaacca

SEQ ID NO: 638353 - RNA, 23 nt, Human
acugccagauugaagguuucuua

SEQ ID NO: 638354 - RNA, 22 nt, Human
ugugaaggcagcagcucugucc

SEQ ID NO: 638355 - RNA, 20 nt, Human
auugaaauuuuucugagauu

SEQ ID NO: 638356 - RNA, 22 nt, Human
accacuuuacagaaauggaaag

SEQ ID NO: 638357 - RNA, 22 nt, Human
ugcuggagagcuaguucugcag

SEQ ID NO: 638358 - RNA, 22 nt, Human
agccccuugcugcccucuagag

SEQ ID NO: 638359 - RNA, 22 nt, Human
cacaugaacaugcuggaaaagc

SEQ ID NO: 638360 - RNA, 22 nt, Human
ucaucugggagcuuguuagaaa

SEQ ID NO: 638361 - RNA, 22 nt, Human
uuucaguucaguuuauuauauc

SEQ ID NO: 638362 - RNA, 22 nt, Human
cagcuucauguccagguacugu

SEQ ID NO: 638363 - RNA, 22 nt, Human
cauggcagagccugcagguggg

SEQ ID NO: 638364 - RNA, 22 nt, Human
guguucaugccccagugcagga

SEQ ID NO: 638365 - RNA, 22 nt, Human
ccuccucugugcagcugugggu

SEQ ID NO: 638366 - RNA, 22 nt, Human
aucacagauugugaauaacuau

SEQ ID NO: 638367 - RNA, 19 nt, Human
gcugggcuuggguuuguag

SEQ ID NO: 638368 - RNA, 22 nt, Human
uuccucugaaauggcuuggaaa

SEQ ID NO: 638369 - RNA, 22 nt, Human
cuggauaagaguuuuacuuccu

SEQ ID NO: 638370 - RNA, 22 nt, Human
auuucccaacacauuagaaaau

SEQ ID NO: 638371 - RNA, 22 nt, Human
ucugggaagcaaauauguaaga

SEQ ID NO: 638372 - RNA, 20 nt, Human
aguaggggaaugcaagagca

SEQ ID NO: 638373 - RNA, 22 nt, Human
gucaaaaaguagucauuucugu

SEQ ID NO: 638374 - RNA, 22 nt, Human
gagagugagauaauuucacaua

SEQ ID NO: 638375 - RNA, 22 nt, Human
ggcuuugcuuuggcuguuucag

SEQ ID NO: 638376 - RNA, 20 nt, Human
aguguaugaaucuggauggg

SEQ ID NO: 638377 - RNA, 22 nt, Human
auguccaggaucuauccccaga

SEQ ID NO: 638378 - RNA, 22 nt, Human
acuuuguugaugaaauaguuuu

SEQ ID NO: 638379 - RNA, 22 nt, Human
gggucucuccuccccagcugug

SEQ ID NO: 638380 - RNA, 22 nt, Human
aagggcuggaucucucugagca

SEQ ID NO: 638381 - RNA, 22 nt, Human
cagggccugccugguuccugga

SEQ ID NO: 638382 - RNA, 22 nt, Human
acauagaucugugauucauucu

SEQ ID NO: 638383 - RNA, 22 nt, Human
uacaaugaugauacuuuacugg

SEQ ID NO: 638384 - RNA, 22 nt, Human
cugcagcuggagcaucuucuca

SEQ ID NO: 638385 - RNA, 22 nt, Human
auccaguuccaaagaucauuua

SEQ ID NO: 638386 - RNA, 22 nt, Human
agcuguguccugaagacacugc

SEQ ID NO: 638387 - RNA, 22 nt, Human
auccaaaauuuacuguagcauu

SEQ ID NO: 638388 - RNA, 22 nt, Human
acucuugaacugauuaagaaug

SEQ ID NO: 638389 - RNA, 22 nt, Human
ugaaggaaaugacggcagaaga

SEQ ID NO: 638390 - RNA, 22 nt, Human
ugcugugcaaaggugaugugag

SEQ ID NO: 638391 - RNA, 22 nt, Human
ggggauggaauguaguagugau

SEQ ID NO: 638392 - RNA, 22 nt, Human
uuccaguucacuccauuucugg

SEQ ID NO: 638393 - RNA, 22 nt, Human
uuugcauuugcaaauaaugaaa

SEQ ID NO: 638394 - RNA, 22 nt, Human
acaagauuuaaugcaacccaag

SEQ ID NO: 638395 - RNA, 22 nt, Human
cugccagagaucugggcagagu

SEQ ID NO: 638396 - RNA, 22 nt, Human
ugagggguaaguaaaggaauug

SEQ ID NO: 638397 - RNA, 22 nt, Human
ugcaggaaacagaggcucaaau

SEQ ID NO: 638398 - RNA, 23 nt, Human
uacugccuggggccagagagcgg

SEQ ID NO: 638399 - RNA, 22 nt, Human
cuugaggcugcacuccagggcc

SEQ ID NO: 638400 - RNA, 22 nt, Human
gagaggauccacaaaccaggaa

SEQ ID NO: 638401 - RNA, 22 nt, Human
uuuuaaaggcagauuauggcuu

SEQ ID NO: 638402 - RNA, 22 nt, Human
ugauguuuaauacuaugcuuuu

SEQ ID NO: 638403 - RNA, 22 nt, Human
aacuuuaaaaaauaugucuguu

SEQ ID NO: 638404 - RNA, 22 nt, Human
uaguguuccagaagcaaacaag

SEQ ID NO: 638405 - RNA, 20 nt, Human
ucacagaugaaaguucaaga

SEQ ID NO: 638406 - RNA, 22 nt, Human
caggagcccugguggguggaca

SEQ ID NO: 638407 - RNA, 22 nt, Human
uaauggaaguuaaauaugguau

SEQ ID NO: 638408 - RNA, 21 nt, Human
ccauaccuaccucaccugguu

SEQ ID NO: 638409 - RNA, 22 nt, Human
aaagccacaguucuaugucugc

SEQ ID NO: 638410 - RNA, 23 nt, Human
uaaccugagauugcaagggagcu

SEQ ID NO: 638411 - RNA, 22 nt, Human
aaagaaggaugggagaaauccu

SEQ ID NO: 638412 - RNA, 22 nt, Human
ccagccucaucgccugccuguc

SEQ ID NO: 638413 - RNA, 22 nt, Human
agucaaauaagagagagauguu

SEQ ID NO: 638414 - RNA, 23 nt, Human
ugacagagcacagugggggagau

SEQ ID NO: 638415 - RNA, 22 nt, Human
ggaccagagaagugagcaccug

SEQ ID NO: 638416 - RNA, 22 nt, Human
cuggagcuggcuuccuuccacu

SEQ ID NO: 638417 - RNA, 22 nt, Human
augucaaaucaguuuuaucaga

SEQ ID NO: 638418 - RNA, 22 nt, Human
aagacugauguccagucccaug

SEQ ID NO: 638419 - RNA, 22 nt, Human
agguggaaauggcuuuccuagg

SEQ ID NO: 638420 - RNA, 22 nt, Human
uucccaguauuaccuucaggaa

SEQ ID NO: 638421 - RNA, 22 nt, Human
cugaaccaucucuguucuguau

SEQ ID NO: 638422 - RNA, 22 nt, Human
ggaaagagaaguugggaggaau

SEQ ID NO: 638423 - RNA, 22 nt, Human
gugugugccaacuuuaugugca

SEQ ID NO: 638424 - RNA, 22 nt, Human
ugucaugccaccguuucccaga

SEQ ID NO: 638425 - RNA, 22 nt, Human
cuaguuaguucugggucauccu

SEQ ID NO: 638426 - RNA, 22 nt, Human
cuuucagucuuuacaagguugc

SEQ ID NO: 638427 - RNA, 22 nt, Human
ugggccuguugggguugaguua

SEQ ID NO: 638428 - RNA, 22 nt, Human
cuggcccauggugagcucuggg

SEQ ID NO: 638429 - RNA, 23 nt, Human
ucauggaacugggcaaucuugaa

SEQ ID NO: 638430 - RNA, 22 nt, Human
uauuuggaaacaauucacaugc

SEQ ID NO: 638431 - RNA, 23 nt, Human
uaaugccagcccugcaguuaagc

SEQ ID NO: 638432 - RNA, 22 nt, Human
cacauccuucauacucagcucu

SEQ ID NO: 638433 - RNA, 22 nt, Human
ugcugcuguaucaugccuucau

SEQ ID NO: 638434 - RNA, 22 nt, Human
ccagggcucaggcucccagugg

SEQ ID NO: 638435 - RNA, 22 nt, Human
auguucuuugaaauauuuuaga

SEQ ID NO: 638436 - RNA, 22 nt, Human
aaaauaguuaacguucagagua

SEQ ID NO: 638437 - RNA, 22 nt, Human
uuacaagauuaauuauuggagu

SEQ ID NO: 638438 - RNA, 22 nt, Human
aaggaauucaaauuuucucugg

SEQ ID NO: 638439 - RNA, 21 nt, Human
ugaguuaaaauggagagucuu

SEQ ID NO: 638440 - RNA, 22 nt, Human
gccuggcugucuggcaagguuc

SEQ ID NO: 638441 - RNA, 22 nt, Human
cagcugcuuacuagcuguguga

SEQ ID NO: 638442 - RNA, 22 nt, Human
ucuuuagacauccaguuucucu

SEQ ID NO: 638443 - RNA, 22 nt, Human
cagccucuugcacuuugaaggc

SEQ ID NO: 638444 - RNA, 18 nt, Human
gaccccgggaucugucga

SEQ ID NO: 638445 - RNA, 22 nt, Human
cagauucuucauugccccauuc

SEQ ID NO: 638446 - RNA, 22 nt, Human
ucgaauggcaaggaaagaggcu

SEQ ID NO: 638447 - RNA, 22 nt, Human
auucucugugcagauuuaagac

SEQ ID NO: 638448 - RNA, 22 nt, Human
agagcugcaauuucauguggug

SEQ ID NO: 638449 - RNA, 22 nt, Human
ucccuucuggcagcagugugag

SEQ ID NO: 638450 - RNA, 17 nt, Human
ggugaguguccaggugg

SEQ ID NO: 638451 - RNA, 23 nt, Human
ccuggggagcuguauccagagug

SEQ ID NO: 638452 - RNA, 22 nt, Human
ccagaaaauauggcuaagguga

SEQ ID NO: 638453 - RNA, 22 nt, Human
gcuguacauucuguggguuugg

SEQ ID NO: 638454 - RNA, 22 nt, Human
uucucuuuucaccaguugcuaa

SEQ ID NO: 638455 - RNA, 22 nt, Human
acaguauauauagucuaaaagc

SEQ ID NO: 638456 - RNA, 22 nt, Human
ccugccagucacuaugucaccu

SEQ ID NO: 638457 - RNA, 22 nt, Human
uugcugauucaugauuugagaa

SEQ ID NO: 638458 - RNA, 22 nt, Human
ucuggcuccacucugugcaugc

SEQ ID NO: 638459 - RNA, 22 nt, Human
aaacugcacaugaggcuggugc

SEQ ID NO: 638460 - RNA, 22 nt, Human
cucagccaugcaacaugcuggg

SEQ ID NO: 638461 - RNA, 22 nt, Human
agggagaguuugauguuuccuc

SEQ ID NO: 638462 - RNA, 22 nt, Human
agcugccagaugacagugcuau

SEQ ID NO: 638463 - RNA, 22 nt, Human
ggagcaucugaacagggagaag

SEQ ID NO: 638464 - RNA, 19 nt, Human
caagugaagccugggaugg

SEQ ID NO: 638465 - RNA, 22 nt, Human
aggcugagucaaguuaggguga

SEQ ID NO: 638466 - RNA, 23 nt, Human
uucuggcuguggguggcgucucu

SEQ ID NO: 638467 - RNA, 22 nt, Human
auuagaagauagugauuucugc

SEQ ID NO: 638468 - RNA, 22 nt, Human
aggcagugagaaauagcaagau

SEQ ID NO: 638469 - RNA, 22 nt, Human
acugggagggucuugaagaggg

SEQ ID NO: 638470 - RNA, 22 nt, Human
aguuauuuggcuauagauggua

SEQ ID NO: 638471 - RNA, 22 nt, Human
gcuugcuggugccugcaggcuc

SEQ ID NO: 638472 - RNA, 22 nt, Human
ucagagaugcagugccaccuac

SEQ ID NO: 638473 - RNA, 22 nt, Human
cagaggcagaauggagauuugg

SEQ ID NO: 638474 - RNA, 22 nt, Human
gagcucauucauucauugccug

SEQ ID NO: 638475 - RNA, 22 nt, Human
ggagaggugcaggucaguggca

SEQ ID NO: 638476 - RNA, 22 nt, Human
cagccugagccuucuguagcaa

SEQ ID NO: 638477 - RNA, 22 nt, Human
uacagcacaaagggccuuuacc

SEQ ID NO: 638478 - RNA, 22 nt, Human
cuucuugucaauuugccauugu

SEQ ID NO: 638479 - RNA, 22 nt, Human
ccugcucaacgaauauggcgau

SEQ ID NO: 638480 - RNA, 22 nt, Human
aagugauuucugccugcauguu

SEQ ID NO: 638481 - RNA, 22 nt, Human
uaacuugauaaguauucucugc

SEQ ID NO: 638482 - RNA, 22 nt, Human
ugugacuggaguccagcccacu

SEQ ID NO: 638483 - RNA, 22 nt, Human
auuauuagacuuauaugguagu

SEQ ID NO: 638484 - RNA, 22 nt, Human
uuggaaagaccgaauuccuguu

SEQ ID NO: 638485 - RNA, 22 nt, Human
ucaguguguucaauuggauagg

SEQ ID NO: 638486 - RNA, 22 nt, Human
agaaaacugcagaguagccuca

SEQ ID NO: 638487 - RNA, 22 nt, Human
ggcccucuggcuuccgcauggg

SEQ ID NO: 638488 - RNA, 22 nt, Human
ugagcccagagaucugagcuau

SEQ ID NO: 638489 - RNA, 22 nt, Human
gcaaauauuucuaauuccugaa

SEQ ID NO: 638490 - RNA, 22 nt, Human
uauuuaauuagugauuguagag

SEQ ID NO: 638491 - RNA, 22 nt, Human
uugugccuggcuuguauucaca

SEQ ID NO: 638492 - RNA, 18 nt, Human
cugccacuuaauguggug

SEQ ID NO: 638493 - RNA, 22 nt, Human
gguggcaguuacaggggcaaau

SEQ ID NO: 638494 - RNA, 22 nt, Human
aagauacaaaugucaauauugg

SEQ ID NO: 638495 - RNA, 22 nt, Human
auuaugaaguugagggacccug

SEQ ID NO: 638496 - RNA, 22 nt, Human
ugggaccugcccuggccccauc

SEQ ID NO: 638497 - RNA, 22 nt, Human
uggcuuccacugugugcccccu

SEQ ID NO: 638498 - RNA, 23 nt, Human
uguguacauacauauguacacac

SEQ ID NO: 638499 - RNA, 22 nt, Human
guuauguauugggaaauccaag

SEQ ID NO: 638500 - RNA, 22 nt, Human
ggcagugggaaauaagugagaa

SEQ ID NO: 638501 - RNA, 19 nt, Human
ugggaacuuguuagacaug

SEQ ID NO: 638502 - RNA, 22 nt, Human
ucagaggugagcuucuugcuaa

SEQ ID NO: 638503 - RNA, 22 nt, Human
gaaaugaaauagcaccaagguu

SEQ ID NO: 638504 - RNA, 22 nt, Human
aucuguguaugugaccuuaucu

SEQ ID NO: 638505 - RNA, 22 nt, Human
gucugccugcaauccagagacu

SEQ ID NO: 638506 - RNA, 22 nt, Human
agcaaggcagcuuucacugcuu

SEQ ID NO: 638507 - RNA, 22 nt, Human
aacuuucagaauccuaugcauu

SEQ ID NO: 638508 - RNA, 22 nt, Human
cagaggaugaucuggccucucu

SEQ ID NO: 638509 - RNA, 19 nt, Human
ugagaaauuccacaggaug

SEQ ID NO: 638510 - RNA, 22 nt, Human
uccaugagcuagggauucauca

SEQ ID NO: 638511 - RNA, 22 nt, Human
guacaaaguggaccugauagua

SEQ ID NO: 638512 - RNA, 23 nt, Human
cuggcuucuggggccucuguuuc

SEQ ID NO: 638513 - RNA, 22 nt, Human
uugcacuaggaaaaggcagcca

SEQ ID NO: 638514 - RNA, 22 nt, Human
ggcaggcuggcuuuguuccagg

SEQ ID NO: 638515 - RNA, 22 nt, Human
uguuauucuaguggaucacguc

SEQ ID NO: 638516 - RNA, 22 nt, Human
agggcucaauggugggcaugua

SEQ ID NO: 638517 - RNA, 22 nt, Human
uggcagagaugaagaguuguuu

SEQ ID NO: 638518 - RNA, 22 nt, Human
auuucacauuaauuugaugcuc

SEQ ID NO: 638519 - RNA, 22 nt, Human
aaaugguggcucuuuuaaauug

SEQ ID NO: 638520 - RNA, 22 nt, Human
agagugggccucugagucccag

SEQ ID NO: 638521 - RNA, 22 nt, Human
augaagauauucuuguuuucug

SEQ ID NO: 638522 - RNA, 22 nt, Human
uggcugaacuaaugugcuguuu

SEQ ID NO: 638523 - RNA, 22 nt, Human
gacauguauuaguacauauggu

SEQ ID NO: 638524 - RNA, 19 nt, Human
auuugcuugucugcucugc

SEQ ID NO: 638525 - RNA, 23 nt, Human
aaauauucuuuuuuaguaagugc

SEQ ID NO: 638526 - RNA, 22 nt, Human
acuggcaguuugagaaugcauu

SEQ ID NO: 638527 - RNA, 22 nt, Human
uucuaguuuucaguccaccagg

SEQ ID NO: 638528 - RNA, 22 nt, Human
gggccacggaaggaccaguggg

SEQ ID NO: 638529 - RNA, 22 nt, Human
cugaaugauauaagaucuuucu

SEQ ID NO: 638530 - RNA, 22 nt, Human
uuguaugcugaucaaaagcuuc

SEQ ID NO: 638531 - RNA, 22 nt, Human
uuucucggcagagaugaugggc

SEQ ID NO: 638532 - RNA, 22 nt, Human
ugagucacauccauuuuugugu

SEQ ID NO: 638533 - RNA, 22 nt, Human
aggagguguagauuuccuguca

SEQ ID NO: 638534 - RNA, 22 nt, Human
agcuucucagaagaguccugua

SEQ ID NO: 638535 - RNA, 22 nt, Human
ucuggcucuguguccccaccca

SEQ ID NO: 638536 - RNA, 22 nt, Human
aggcucaagcacugauauuuuu

SEQ ID NO: 638537 - RNA, 22 nt, Human
gaguuauuucagaaggaaagau

SEQ ID NO: 638538 - RNA, 22 nt, Human
agcaacagcccuguuucauuag

SEQ ID NO: 638539 - RNA, 22 nt, Human
cugccaaguaaugccugggcuc

SEQ ID NO: 638540 - RNA, 22 nt, Human
uguaccaagacaaaucagaaac

SEQ ID NO: 638541 - RNA, 22 nt, Human
uuccugaucccccaggacaaag

SEQ ID NO: 638542 - RNA, 22 nt, Human
aaauguccauugaauggaugag

SEQ ID NO: 638543 - RNA, 22 nt, Human
gcagcauccccaggcagcaggg

SEQ ID NO: 638544 - RNA, 22 nt, Human
acauauauuacuaguaaagaca

SEQ ID NO: 638545 - RNA, 22 nt, Human
uuguggggcaacagcaggugaa

SEQ ID NO: 638546 - RNA, 22 nt, Human
agagcuguuaauuuugcacugg

SEQ ID NO: 638547 - RNA, 22 nt, Human
auuuccagugcacugaauagaa

SEQ ID NO: 638548 - RNA, 22 nt, Human
aauaagaauugccagauuugaa

SEQ ID NO: 638549 - RNA, 22 nt, Human
agccccugcuggguguagcuca

SEQ ID NO: 638550 - RNA, 19 nt, Human
agucucugaggccuaaguu

SEQ ID NO: 638551 - RNA, 22 nt, Human
gcacagcucuccccaagacgaa

SEQ ID NO: 638552 - RNA, 22 nt, Human
ugcuguguucuccugacucacc

SEQ ID NO: 638553 - RNA, 22 nt, Human
cucagcaccccgacaggacauu

SEQ ID NO: 638554 - RNA, 22 nt, Human
ugcaggcugccuucacagagcc

SEQ ID NO: 638555 - RNA, 22 nt, Human
ugcugggcugcacccccagagu

SEQ ID NO: 638556 - RNA, 22 nt, Human
cuucuuaaauuggauugcuauu

SEQ ID NO: 638557 - RNA, 18 nt, Human
auacaagcucuguuacuu

SEQ ID NO: 638558 - RNA, 22 nt, Human
gcuuccaguccucagaggcugg

SEQ ID NO: 638559 - RNA, 22 nt, Human
uggcuuuacuuaaacugaauca

SEQ ID NO: 638560 - RNA, 22 nt, Human
aggcuugguuaauucuguguga

SEQ ID NO: 638561 - RNA, 22 nt, Human
augcaacagcugggaauaugua

SEQ ID NO: 638562 - RNA, 22 nt, Human
ggaaggaggaugcucuggccuu

SEQ ID NO: 638563 - RNA, 22 nt, Human
ugacccauggucugaucauagg

SEQ ID NO: 638564 - RNA, 15 nt, Human
uacauucauuuccac

SEQ ID NO: 638565 - RNA, 22 nt, Human
uagggcagccacccaggcugcu

SEQ ID NO: 638566 - RNA, 22 nt, Human
cucuggagcgcugcuucccgcg

SEQ ID NO: 638567 - RNA, 22 nt, Human
uucuuaagucaguaagaugcaa

SEQ ID NO: 638568 - RNA, 22 nt, Human
ggacugaaggacaaucugguuc

SEQ ID NO: 638569 - RNA, 22 nt, Human
aaacaguacucgauuuuuguag

SEQ ID NO: 638570 - RNA, 22 nt, Human
gaggcuaaggugccagacgaau

SEQ ID NO: 638571 - RNA, 22 nt, Human
ugcaaacaauuuccuauaaagu

SEQ ID NO: 638572 - RNA, 22 nt, Human
guaaaguucuauuugaauuuag

SEQ ID NO: 638573 - RNA, 20 nt, Human
aguggcugauggaaagaagc

SEQ ID NO: 638574 - RNA, 22 nt, Human
uggaggucucugucugggcagg

SEQ ID NO: 638575 - RNA, 22 nt, Human
uagugauuuucauauuacauua

SEQ ID NO: 638576 - RNA, 22 nt, Human
gggccagcucugugauguaggg

SEQ ID NO: 638577 - RNA, 19 nt, Human
uagauaaggcauuuaaucu

SEQ ID NO: 638578 - RNA, 22 nt, Human
ucuggaaugauuuccuuccccu

SEQ ID NO: 638579 - RNA, 22 nt, Human
agggucagagucaggugcagua

SEQ ID NO: 638580 - RNA, 22 nt, Human
ugaugaggacccaucaccuggu

SEQ ID NO: 638581 - RNA, 22 nt, Human
gaauaaacuccucagcuuccuu

SEQ ID NO: 638582 - RNA, 22 nt, Human
ugcaagggugacagguugcucu

SEQ ID NO: 638583 - RNA, 22 nt, Human
cuccuggcaguuccccuuguca

SEQ ID NO: 638584 - RNA, 22 nt, Human
agucauauuuagcuuguggaau

SEQ ID NO: 638585 - RNA, 20 nt, Human
ggagcugcccugggcuggag

SEQ ID NO: 638586 - RNA, 22 nt, Human
aggaaacugauguuuuuuacaa

SEQ ID NO: 638587 - RNA, 22 nt, Human
acccaggcuggaaugcaguggc

SEQ ID NO: 638588 - RNA, 22 nt, Human
acccaggcuggagugcagugac

SEQ ID NO: 638589 - RNA, 22 nt, Human
ucagccaggccaccuucagcuu

SEQ ID NO: 638590 - RNA, 17 nt, Human
uggaugugggaucugga

SEQ ID NO: 638591 - RNA, 22 nt, Human
ucagugcaguagaacuuuaguu

SEQ ID NO: 638592 - RNA, 22 nt, Human
acagauguacacucauauauaa

SEQ ID NO: 638593 - RNA, 22 nt, Human
cuggcaggaaguuagaugguaa

SEQ ID NO: 638594 - RNA, 22 nt, Human
ugugcaaauuaaguagauuuuc

SEQ ID NO: 638595 - RNA, 22 nt, Human
gaggccugaggcugccuggagc

SEQ ID NO: 638596 - RNA, 22 nt, Human
uuagaggggcugcugaauggga

SEQ ID NO: 638597 - RNA, 22 nt, Human
auuugcucuagcugcagugaau

SEQ ID NO: 638598 - RNA, 22 nt, Human
ucuaaccuuguggucugcuggu

SEQ ID NO: 638599 - RNA, 22 nt, Human
ucuuuagauguuuagaggaaga

SEQ ID NO: 638600 - RNA, 22 nt, Human
uggauggagacugauaugggua

SEQ ID NO: 638601 - RNA, 21 nt, Human
caugucuuccacacuguagua

SEQ ID NO: 638602 - RNA, 19 nt, Human
uaaaucuguauucuucaaa

SEQ ID NO: 638603 - RNA, 22 nt, Human
cccagccagccucuucccauau

SEQ ID NO: 638604 - RNA, 22 nt, Human
cagcaggacccaggaauccugc

SEQ ID NO: 638605 - RNA, 22 nt, Human
uuccaggaaaacaguuggaagu

SEQ ID NO: 638606 - RNA, 22 nt, Human
uuuacaugaguagcagauguuc

SEQ ID NO: 638607 - RNA, 22 nt, Human
uuuuccuauaugcaaagaaugc

SEQ ID NO: 638608 - RNA, 22 nt, Human
ucacagcaacacuggggcagac

SEQ ID NO: 638609 - RNA, 22 nt, Human
aaacaaguguaaacuagucugu

SEQ ID NO: 638610 - RNA, 22 nt, Human
aaagcacauaguagaaggauuu

SEQ ID NO: 638611 - RNA, 22 nt, Human
uaaagcaagacacacccauagc

SEQ ID NO: 638612 - RNA, 22 nt, Human
ucagggcaggcgagcagcugcu

SEQ ID NO: 638613 - RNA, 17 nt, Human
cccugcacccuacucuc

SEQ ID NO: 638614 - RNA, 22 nt, Human
ggcagccuccagggcacuggug

SEQ ID NO: 638615 - RNA, 22 nt, Human
uaguccuugcugggcacagagu

SEQ ID NO: 638616 - RNA, 18 nt, Human
cccacccuggcucuuagu

SEQ ID NO: 638617 - RNA, 22 nt, Human
agcuagacuuucccuuuccaug

SEQ ID NO: 638618 - RNA, 22 nt, Human
agaggccaccuucucuugagaa

SEQ ID NO: 638619 - RNA, 22 nt, Human
aggccacaagaacuaccccauc

SEQ ID NO: 638620 - RNA, 22 nt, Human
gagccugcaggccucggccuca

SEQ ID NO: 638621 - RNA, 22 nt, Human
uugagacugccuugucgucugc

SEQ ID NO: 638622 - RNA, 22 nt, Human
ccuggguccaauucuggcuugu

SEQ ID NO: 638623 - RNA, 22 nt, Human
cagcaucuggggaacauucaag

SEQ ID NO: 638624 - RNA, 22 nt, Human
gucuccagccauucucugauca

SEQ ID NO: 638625 - RNA, 22 nt, Human
cuuuuacugugaaaagaaacug

SEQ ID NO: 638626 - RNA, 21 nt, Human
aauacagugaagaauuucuuu

SEQ ID NO: 638627 - RNA, 23 nt, Human
cugagguggagagugagguaagu

SEQ ID NO: 638628 - RNA, 22 nt, Human
ccucagagaaagguauggcuga

SEQ ID NO: 638629 - RNA, 22 nt, Human
augaauguuuggugaucagaua

SEQ ID NO: 638630 - RNA, 22 nt, Human
ucccuccuggugaugaugcaaa

SEQ ID NO: 638631 - RNA, 22 nt, Human
gcagccuuccguggaccuggac

SEQ ID NO: 638632 - RNA, 22 nt, Human
uucacuuaacaucauaucauga

SEQ ID NO: 638633 - RNA, 20 nt, Human
uggcucucacccugugcgau

SEQ ID NO: 638634 - RNA, 19 nt, Human
uuuucucgugcuugucugc

SEQ ID NO: 638635 - RNA, 22 nt, Human
aauaaagacaaacaggggagcc

SEQ ID NO: 638636 - RNA, 22 nt, Human
uuugaauagaggccccucagaa

SEQ ID NO: 638637 - RNA, 22 nt, Human
cacaguuuuaucuuauacugau

SEQ ID NO: 638638 - RNA, 22 nt, Human
gcagggccagugcagagaggaa

SEQ ID NO: 638639 - RNA, 19 nt, Human
gaucagagugucagcuugu

SEQ ID NO: 638640 - RNA, 22 nt, Human
gagacugcauagauggccacaa

SEQ ID NO: 638641 - RNA, 22 nt, Human
uuugacagaaaguuauuauuuu

SEQ ID NO: 638642 - RNA, 22 nt, Human
agcuggguguucuugggccuaa

SEQ ID NO: 638643 - RNA, 22 nt, Human
ucaaaauuuuauuucucaagga

SEQ ID NO: 638644 - RNA, 22 nt, Human
agcucuguguucacagcacuaa

SEQ ID NO: 638645 - RNA, 22 nt, Human
guguggcaaggugagaaguggg

SEQ ID NO: 638646 - RNA, 22 nt, Human
ucagggaaaagucacacugggu

SEQ ID NO: 638647 - RNA, 22 nt, Human
aagggagacaguugugugagga

SEQ ID NO: 638648 - RNA, 22 nt, Human
uucaagucauguuaacugcuuc

SEQ ID NO: 638649 - RNA, 22 nt, Human
agccucucaaagaaacccugua

SEQ ID NO: 638650 - RNA, 22 nt, Human
gccagcuggcugcaggucccag

SEQ ID NO: 638651 - RNA, 22 nt, Human
uggcugaggcacagcugccgcc

SEQ ID NO: 638652 - RNA, 22 nt, Human
auccaaaggugacacagaauac

SEQ ID NO: 638653 - RNA, 21 nt, Human
ccugggcugugguuuggagac

SEQ ID NO: 638654 - RNA, 22 nt, Human
ccucagaguaggucucagcugu

SEQ ID NO: 638655 - RNA, 22 nt, Human
caugcagugguaaaaagucagg

SEQ ID NO: 638656 - RNA, 22 nt, Human
uacaaugcuguuuguuucuacu

SEQ ID NO: 638657 - RNA, 23 nt, Human
uccagggauuaaugaagucaguc

SEQ ID NO: 638658 - RNA, 22 nt, Human
agacagaaauaggagaaaccag

SEQ ID NO: 638659 - RNA, 22 nt, Human
ucuuuuguugccuacuuauuaa

SEQ ID NO: 638660 - RNA, 22 nt, Human
ugcuauuugggggcuacaugau

SEQ ID NO: 638661 - RNA, 22 nt, Human
aagaaagagaucacuccuccau

SEQ ID NO: 638662 - RNA, 22 nt, Human
agcugggugcccgaagccacgu

SEQ ID NO: 638663 - RNA, 22 nt, Human
cugagcagaggucaagauacuu

SEQ ID NO: 638664 - RNA, 22 nt, Human
gccccaggggaggugcccugca

SEQ ID NO: 638665 - RNA, 22 nt, Human
uugaagacaagggcagggguuc

SEQ ID NO: 638666 - RNA, 22 nt, Human
uucauaaugagguccuagaggc

SEQ ID NO: 638667 - RNA, 22 nt, Human
uacaauguucgcauucucucug

SEQ ID NO: 638668 - RNA, 22 nt, Human
auugggcuggccuucuggagag

SEQ ID NO: 638669 - RNA, 22 nt, Human
gcaugugggagggucuucccac

SEQ ID NO: 638670 - RNA, 22 nt, Human
uuaaggaaagauuagcauuugu

SEQ ID NO: 638671 - RNA, 22 nt, Human
agacugugagggagauacaggg

SEQ ID NO: 638672 - RNA, 22 nt, Human
ugggcaggugcuauuuuccaug

SEQ ID NO: 638673 - RNA, 22 nt, Human
ggucuggacccuccuggagugg

SEQ ID NO: 638674 - RNA, 22 nt, Human
aacauuucauuggaagcuaugu

SEQ ID NO: 638675 - RNA, 22 nt, Human
uugcaaauugcaagaguuggau

SEQ ID NO: 638676 - RNA, 22 nt, Human
ucugggaauacacacugauuua

SEQ ID NO: 638677 - RNA, 22 nt, Human
gucaacauaggccucagugagg

SEQ ID NO: 638678 - RNA, 22 nt, Human
ugaagccacuuuccagaaucac

SEQ ID NO: 638679 - RNA, 22 nt, Human
uccaguccagggaauggcugau

SEQ ID NO: 638680 - RNA, 18 nt, Human
ugcccagaaaagcaggga

SEQ ID NO: 638681 - RNA, 22 nt, Human
cucccaggacuggcucuaacug

SEQ ID NO: 638682 - RNA, 22 nt, Human
ugugccugcuagaugguugucg

SEQ ID NO: 638683 - RNA, 22 nt, Human
ggaucauuaagaauagcuacua

SEQ ID NO: 638684 - RNA, 22 nt, Human
cucucugguuucagcgaagggg

SEQ ID NO: 638685 - RNA, 22 nt, Human
ucacuuugacggccaacuucua

SEQ ID NO: 638686 - RNA, 22 nt, Human
aggggagcuugaggcauggccu

SEQ ID NO: 638687 - RNA, 22 nt, Human
augaguucaauuguuucaguca

SEQ ID NO: 638688 - RNA, 20 nt, Human
uguccccaccaaaauuucau

SEQ ID NO: 638689 - RNA, 22 nt, Human
ucugucugcgcuugcccuggug

SEQ ID NO: 638690 - RNA, 22 nt, Human
ucagaacagguuguacuauguc

SEQ ID NO: 638691 - RNA, 22 nt, Human
ugacuaaaauaggacauuaacu

SEQ ID NO: 638692 - RNA, 22 nt, Human
gguaaauuuuaugugaugaaac

SEQ ID NO: 638693 - RNA, 22 nt, Human
aaggcuccacccucauggaugc

SEQ ID NO: 638694 - RNA, 22 nt, Human
acuucauugcuaagaacaaggu

SEQ ID NO: 638695 - RNA, 22 nt, Human
ugcuggccggccaggugcugag

SEQ ID NO: 638696 - RNA, 20 nt, Human
uccugggguaagccaugguc

SEQ ID NO: 638697 - RNA, 22 nt, Human
uuagauaaaaguguucaauaaa

SEQ ID NO: 638698 - RNA, 22 nt, Human
cugaugccucucuucuuggcuu

SEQ ID NO: 638699 - RNA, 22 nt, Human
auuuguuucagggccuugguau

SEQ ID NO: 638700 - RNA, 22 nt, Human
aguuauuucaguaacauaauag

SEQ ID NO: 638701 - RNA, 22 nt, Human
cuccaagggcucccagacgucu

SEQ ID NO: 638702 - RNA, 22 nt, Human
gaaacguuaaaccauauguaau

SEQ ID NO: 638703 - RNA, 22 nt, Human
ucuuccucuucugcugagaagu

SEQ ID NO: 638704 - RNA, 19 nt, Human
ucuccagcuuugggcuuuu

SEQ ID NO: 638705 - RNA, 22 nt, Human
cuggcagcgguuugcagccugg

SEQ ID NO: 638706 - RNA, 22 nt, Human
ucuaaagacacuuuuuacaggg

SEQ ID NO: 638707 - RNA, 22 nt, Human
acaagguugauucuggcaucug

SEQ ID NO: 638708 - RNA, 22 nt, Human
auaacagaugcuucagcauaaa

SEQ ID NO: 638709 - RNA, 22 nt, Human
gguggccugcccugaucccugg

SEQ ID NO: 638710 - RNA, 22 nt, Human
auacacaugcacacaugugugu

SEQ ID NO: 638711 - RNA, 22 nt, Human
cagugucuuauuuguagcucag

SEQ ID NO: 638712 - RNA, 22 nt, Human
ugaucuuuacugcuguuuauaa

SEQ ID NO: 638713 - RNA, 22 nt, Human
acccugauauagguccaagagc

SEQ ID NO: 638714 - RNA, 22 nt, Human
ugcacaccucuccaccacucuc

SEQ ID NO: 638715 - RNA, 22 nt, Human
agacucaugacacuuccuauga

SEQ ID NO: 638716 - RNA, 22 nt, Human
gcuccagcaccuagagcagguc

SEQ ID NO: 638717 - RNA, 22 nt, Human
ggugcaaagggccuagagagug

SEQ ID NO: 638718 - RNA, 22 nt, Human
aagaaauaagacuucucugucc

SEQ ID NO: 638719 - RNA, 22 nt, Human
ccagccccgggccuuaccgugc

SEQ ID NO: 638720 - RNA, 22 nt, Human
cuccaguaucuguaggaaaagg

SEQ ID NO: 638721 - RNA, 18 nt, Human
uggaucuuuaugaggcug

SEQ ID NO: 638722 - RNA, 23 nt, Human
aaacaugcagcacaugaaugcua

SEQ ID NO: 638723 - RNA, 22 nt, Human
gggaagugaggagccccucugc

SEQ ID NO: 638724 - RNA, 22 nt, Human
guugcuuuuuugauagguggaa

SEQ ID NO: 638725 - RNA, 22 nt, Human
gccagggcugugcagguuuguu

SEQ ID NO: 638726 - RNA, 22 nt, Human
cuggcacucauaggccaguuca

SEQ ID NO: 638727 - RNA, 22 nt, Human
uguucucucuggcugccaguac

SEQ ID NO: 638728 - RNA, 22 nt, Human
caaauuuagguaacagucugua

SEQ ID NO: 638729 - RNA, 18 nt, Human
gaguguggcacugggccc

SEQ ID NO: 638730 - RNA, 22 nt, Human
ugacucuuaaauauacuguuga

SEQ ID NO: 638731 - RNA, 22 nt, Human
ugaaacacaagccugguuagug

SEQ ID NO: 638732 - RNA, 22 nt, Human
aucauucagccuaagcaaguac

SEQ ID NO: 638733 - RNA, 22 nt, Human
uuuuguuuguguccacugcagu

SEQ ID NO: 638734 - RNA, 22 nt, Human
cauaucuucugacaugaucagg

SEQ ID NO: 638735 - RNA, 22 nt, Human
gccucugcacuguggcacacca

SEQ ID NO: 638736 - RNA, 22 nt, Human
aauuagggaggacaaagguaca

SEQ ID NO: 638737 - RNA, 22 nt, Human
auuuagcaagcaggcaaauuca

SEQ ID NO: 638738 - RNA, 22 nt, Human
auccuuccuucauuugacaggu

SEQ ID NO: 638739 - RNA, 21 nt, Human
aacauuucaggauccaaauug

SEQ ID NO: 638740 - RNA, 22 nt, Human
ugaggucugcagggcugugcau

SEQ ID NO: 638741 - RNA, 22 nt, Human
uucugcaggagcccuaguguau

SEQ ID NO: 638742 - RNA, 22 nt, Human
gaggagggccuggugucccuuc

SEQ ID NO: 638743 - RNA, 22 nt, Human
ugaagccaccgaaccagaagag

SEQ ID NO: 638744 - RNA, 22 nt, Human
acagcagcgucaacuuaaaauu

SEQ ID NO: 638745 - RNA, 22 nt, Human
ugcuagaauaccuaccuggagg

SEQ ID NO: 638746 - RNA, 22 nt, Human
cugaggccggagcacugaagag

SEQ ID NO: 638747 - RNA, 21 nt, Human
cuggagucauuuucugaguag

SEQ ID NO: 638748 - RNA, 22 nt, Human
ggucuggaauaagguccaggaa

SEQ ID NO: 638749 - RNA, 22 nt, Human
aaagugcacucucagugcugcu

SEQ ID NO: 638750 - RNA, 21 nt, Human
aaccugagacccacgggacua

SEQ ID NO: 638751 - RNA, 22 nt, Human
uucuucuuucccccugugguac

SEQ ID NO: 638752 - RNA, 22 nt, Human
ucucuucuaauuuucccgagua

SEQ ID NO: 638753 - RNA, 23 nt, Human
uuucuucucgaagagggagcuua

SEQ ID NO: 638754 - RNA, 22 nt, Human
gaucaaugguguaacuuguccu

SEQ ID NO: 638755 - RNA, 22 nt, Human
ccagucccaggcagaaauccag

SEQ ID NO: 638756 - RNA, 22 nt, Human
aguuagaagugugucaucugug

SEQ ID NO: 638757 - RNA, 22 nt, Human
augggcagagcuggugggaggc

SEQ ID NO: 638758 - RNA, 22 nt, Human
gaaucucaaggcuugugaggau

SEQ ID NO: 638759 - RNA, 22 nt, Human
cucugggcaggacgccaggccu

SEQ ID NO: 638760 - RNA, 22 nt, Human
cagggugcgccacucagaugua

SEQ ID NO: 638761 - RNA, 22 nt, Human
aggcagugaugagucaugaaua

SEQ ID NO: 638762 - RNA, 22 nt, Human
ucuguccuguuuccuccugaca

SEQ ID NO: 638763 - RNA, 23 nt, Human
uggaggaaacacaucagaagacc

SEQ ID NO: 638764 - RNA, 23 nt, Human
aaagugacuuuuauaccacuaac

SEQ ID NO: 638765 - RNA, 22 nt, Human
uugcauguguaauuuuucuaaa

SEQ ID NO: 638766 - RNA, 22 nt, Human
cucaaauguuuccacuucugcu

SEQ ID NO: 638767 - RNA, 22 nt, Human
gccaggcagcagcgaggauggu

SEQ ID NO: 638768 - RNA, 22 nt, Human
agcucccaggcagucaugagga

SEQ ID NO: 638769 - RNA, 22 nt, Human
acuaggaaggcauaugggcaga

SEQ ID NO: 638770 - RNA, 22 nt, Human
accugagccuagggagguugag

SEQ ID NO: 638771 - RNA, 22 nt, Human
ccagcagagggucuuggccauu

SEQ ID NO: 638772 - RNA, 22 nt, Human
aaccauggauuucaguucaccu

SEQ ID NO: 638773 - RNA, 16 nt, Human
agcaccagaucauauc

SEQ ID NO: 638774 - RNA, 22 nt, Human
cuaggcaguccugacgguacua

SEQ ID NO: 638775 - RNA, 22 nt, Human
gaaagcacaggcucaggaacag

SEQ ID NO: 638776 - RNA, 20 nt, Human
gggcccugggauucagagca

SEQ ID NO: 638777 - RNA, 22 nt, Human
ucccagggcuuuucucaugcuu

SEQ ID NO: 638778 - RNA, 22 nt, Human
ucuggguggcuucagaggccac

SEQ ID NO: 638779 - RNA, 22 nt, Human
aggccccaaagcagugcaagua

SEQ ID NO: 638780 - RNA, 22 nt, Human
guguccaucagcagccacugug

SEQ ID NO: 638781 - RNA, 22 nt, Human
uauuuggaggccacuguugagu

SEQ ID NO: 638782 - RNA, 20 nt, Human
uuucugugaggacuguacug

SEQ ID NO: 638783 - RNA, 22 nt, Human
ucaccccuaccaaggagcacug

SEQ ID NO: 638784 - RNA, 22 nt, Human
agacuccaaaugaaagaggggg

SEQ ID NO: 638785 - RNA, 20 nt, Human
uaggcaauuaguagauaaca

SEQ ID NO: 638786 - RNA, 20 nt, Human
aagagcauaguacaggaaga

SEQ ID NO: 638787 - RNA, 22 nt, Human
uucaaucauuagaaucucaggc

SEQ ID NO: 638788 - RNA, 22 nt, Human
agguggaguuaagugugaacug

SEQ ID NO: 638789 - RNA, 23 nt, Human
ugaaauauucuuuugcaugagcu

SEQ ID NO: 638790 - RNA, 22 nt, Human
guuccaggcaguggcaacagcu

SEQ ID NO: 638791 - RNA, 22 nt, Human
cucuggaauguuuacaugcccu

SEQ ID NO: 638792 - RNA, 22 nt, Human
auauuaggugcucaauacaugc

SEQ ID NO: 638793 - RNA, 22 nt, Human
cuuccuuuccccaaucauaucg

SEQ ID NO: 638794 - RNA, 22 nt, Human
gcagggauugugcagggggcua

SEQ ID NO: 638795 - RNA, 22 nt, Human
ggccaccuggguucgacugggc

SEQ ID NO: 638796 - RNA, 22 nt, Human
gagcagcuguccccaaagcuuc

SEQ ID NO: 638797 - RNA, 22 nt, Human
uguguucuuaaaagcagugaua

SEQ ID NO: 638798 - RNA, 22 nt, Human
gcaucauucuggcucuuuccau

SEQ ID NO: 638799 - RNA, 22 nt, Human
uuucuuccccacugcaggcucu

SEQ ID NO: 638800 - RNA, 22 nt, Human
caguggcaugguugacugcagu

SEQ ID NO: 638801 - RNA, 22 nt, Human
aucaucauucuuggauaaagca

SEQ ID NO: 638802 - RNA, 22 nt, Human
acauucuauagcaagcugaucu

SEQ ID NO: 638803 - RNA, 22 nt, Human
ugaggcugaaacuggcgauaga

SEQ ID NO: 638804 - RNA, 22 nt, Human
ugaggccauggaacuagcuugg

SEQ ID NO: 638805 - RNA, 22 nt, Human
caggaaaugaggcugaagggug

SEQ ID NO: 638806 - RNA, 22 nt, Human
aucacauuuauaguggcacgca

SEQ ID NO: 638807 - RNA, 22 nt, Human
uuuuuguauaugcuucgaggau

SEQ ID NO: 638808 - RNA, 22 nt, Human
cuguccugaaagggagauuggg

SEQ ID NO: 638809 - RNA, 22 nt, Human
aucuaagauguauugagcacuu

SEQ ID NO: 638810 - RNA, 22 nt, Human
caauuacauuuauugagcauuc

SEQ ID NO: 638811 - RNA, 22 nt, Human
caacuuuagaccccaaguagcu

SEQ ID NO: 638812 - RNA, 22 nt, Human
ugacuucugggugagccagcau

SEQ ID NO: 638813 - RNA, 22 nt, Human
aaaugucugagacuucugaacu

SEQ ID NO: 638814 - RNA, 22 nt, Human
ugacacaaacaagauauuugcc

SEQ ID NO: 638815 - RNA, 19 nt, Human
gggcuccuugggccucucu

SEQ ID NO: 638816 - RNA, 22 nt, Human
cagagcagucuggagauccagc

SEQ ID NO: 638817 - RNA, 22 nt, Human
uuucagaauagcaaagcaagcu

SEQ ID NO: 638818 - RNA, 22 nt, Human
gauggcccgcuagcuggccucu

SEQ ID NO: 638819 - RNA, 22 nt, Human
gcggggcccccggccgagcucu

SEQ ID NO: 638820 - RNA, 22 nt, Human
gaagaaggugcuacacagggca

SEQ ID NO: 638821 - RNA, 22 nt, Human
aucuugaucaaggcuaucauga

SEQ ID NO: 638822 - RNA, 22 nt, Human
acuauuuguaaagagcaaacgg

SEQ ID NO: 638823 - RNA, 22 nt, Human
ccuggggaccugccucagcccu

SEQ ID NO: 638824 - RNA, 22 nt, Human
gguugacagaagaaggaugaca

SEQ ID NO: 638825 - RNA, 19 nt, Human
cuguugcuggggcucucuu

SEQ ID NO: 638826 - RNA, 18 nt, Human
uccuaacuuagauacucc

SEQ ID NO: 638827 - RNA, 22 nt, Human
aggugcuggagucugggcagga

SEQ ID NO: 638828 - RNA, 21 nt, Human
uaggggcuggggcuccagcug

SEQ ID NO: 638829 - RNA, 21 nt, Human
gucuuuuuaauugcgauuucc

SEQ ID NO: 638830 - RNA, 22 nt, Human
cugaacuuauugagugcuugcu

SEQ ID NO: 638831 - RNA, 22 nt, Human
uagcaggguccaaugugaggca

SEQ ID NO: 638832 - RNA, 22 nt, Human
gcauguguugguuuaugcaugu

SEQ ID NO: 638833 - RNA, 22 nt, Human
ugaggcucacaaaucugcauuu

SEQ ID NO: 638834 - RNA, 22 nt, Human
uggcuggagugggagaaguuua

SEQ ID NO: 638835 - RNA, 22 nt, Human
uauugcugaggauugaggcuug

SEQ ID NO: 638836 - RNA, 18 nt, Human
uccagcucacagaugggc

SEQ ID NO: 638837 - RNA, 22 nt, Human
aguguuuacagaguaguggaaa

SEQ ID NO: 638838 - RNA, 20 nt, Human
ugggguccuggaggggaucc

SEQ ID NO: 638839 - RNA, 22 nt, Human
cauuuugugcacacguggaguu

SEQ ID NO: 638840 - RNA, 22 nt, Human
caggugguuaugaggaagguga

SEQ ID NO: 638841 - RNA, 21 nt, Human
gcugggcuccagucugccgcu

SEQ ID NO: 638842 - RNA, 22 nt, Human
uauauucaacaggcuaauguca

SEQ ID NO: 638843 - RNA, 22 nt, Human
cuuuggcugacgaggaggaggc

SEQ ID NO: 638844 - RNA, 22 nt, Human
guggagaggagcagcuaccuca

SEQ ID NO: 638845 - RNA, 22 nt, Human
gugacaaaugcaaauugggcug

SEQ ID NO: 638846 - RNA, 22 nt, Human
ugauucugcccuuucuucugac

SEQ ID NO: 638847 - RNA, 22 nt, Human
gugugccuguaucaugguaacc

SEQ ID NO: 638848 - RNA, 22 nt, Human
agggcugaaacauaauccuucu

SEQ ID NO: 638849 - RNA, 22 nt, Human
gaguuacauuuggugacacuuc

SEQ ID NO: 638850 - RNA, 22 nt, Human
caggacaguauaggcuuuagga

SEQ ID NO: 638851 - RNA, 22 nt, Human
cugggcagugcagcuauagaac

SEQ ID NO: 638852 - RNA, 20 nt, Human
ccugcugggaacccucugaa

SEQ ID NO: 638853 - RNA, 19 nt, Human
ucagaauucugucucuuga

SEQ ID NO: 638854 - RNA, 22 nt, Human
cuucacaaucaccuuuucggaa

SEQ ID NO: 638855 - RNA, 22 nt, Human
aucaauaucagaucagacagga

SEQ ID NO: 638856 - RNA, 22 nt, Human
gggcauggugagggauaugaag

SEQ ID NO: 638857 - RNA, 17 nt, Human
uauguguguguuuauac

SEQ ID NO: 638858 - RNA, 22 nt, Human
uauggcuugacuugcaccggca

SEQ ID NO: 638859 - RNA, 22 nt, Human
uauguaaaaauucaucaggcug

SEQ ID NO: 638860 - RNA, 22 nt, Human
aggagcucccgugaggagacca

SEQ ID NO: 638861 - RNA, 22 nt, Human
aaggauguggcauuuuucauau

SEQ ID NO: 638862 - RNA, 22 nt, Human
uccugacuaggagggcuaaggu

SEQ ID NO: 638863 - RNA, 22 nt, Human
caggguccggcugccuggcugu

SEQ ID NO: 638864 - RNA, 21 nt, Human
ccagcugccugcacuuuggac

SEQ ID NO: 638865 - RNA, 22 nt, Human
agcagaccaggagugcacaggu

SEQ ID NO: 638866 - RNA, 22 nt, Human
gacuuugagggauacaaacauu

SEQ ID NO: 638867 - RNA, 23 nt, Human
uggguagagcugcaaggacacug

SEQ ID NO: 638868 - RNA, 22 nt, Human
agcauggggcaaugcaugugcu

SEQ ID NO: 638869 - RNA, 22 nt, Human
gccuggguccacugaucaugcu

SEQ ID NO: 638870 - RNA, 22 nt, Human
uugucugucccagcuugugcau

SEQ ID NO: 638871 - RNA, 22 nt, Human
guaaauauucccucgguuccua

SEQ ID NO: 638872 - RNA, 23 nt, Human
aucugaaaagcauuugcaguuug

SEQ ID NO: 638873 - RNA, 22 nt, Human
cuggcccagguggucguugagg

SEQ ID NO: 638874 - RNA, 22 nt, Human
gugugccaggaacuggcugcug

SEQ ID NO: 638875 - RNA, 22 nt, Human
ucuggucccugcucacuucuug

SEQ ID NO: 638876 - RNA, 22 nt, Human
ucccuccuggugagcaggggcu

SEQ ID NO: 638877 - RNA, 22 nt, Human
aagucagcacuccaggaagcca

SEQ ID NO: 638878 - RNA, 22 nt, Human
uggauaugggccauggaaaaaa

SEQ ID NO: 638879 - RNA, 22 nt, Human
gaggguggaaaggguguaccug

SEQ ID NO: 638880 - RNA, 22 nt, Human
gcuguguccaggugggggugac

SEQ ID NO: 638881 - RNA, 22 nt, Human
ccagcugggucccugcuggggc

SEQ ID NO: 638882 - RNA, 22 nt, Human
cugggagauugcuagagaugca

SEQ ID NO: 638883 - RNA, 22 nt, Human
uuuggcauuuaauaggugauca

SEQ ID NO: 638884 - RNA, 22 nt, Human
uggcagcagggccccuggagga

SEQ ID NO: 638885 - RNA, 22 nt, Human
aagcugcuggugacugggcuga

SEQ ID NO: 638886 - RNA, 22 nt, Human
ccugugccauccugagcauccc

SEQ ID NO: 638887 - RNA, 22 nt, Human
ucuuuuaaccuaacuagcuugg

SEQ ID NO: 638888 - RNA, 22 nt, Human
uucaaaccuaucuaagaaauag

SEQ ID NO: 638889 - RNA, 22 nt, Human
cuccaaggguugugggugguca

SEQ ID NO: 638890 - RNA, 22 nt, Human
acagcaucuaguacagucuagu

SEQ ID NO: 638891 - RNA, 22 nt, Human
uucacccugagccccaccucug

SEQ ID NO: 638892 - RNA, 22 nt, Human
agccaguggaauucccaggggu

SEQ ID NO: 638893 - RNA, 22 nt, Human
cucugguucagggcucccuggc

SEQ ID NO: 638894 - RNA, 22 nt, Human
agggagcuuucagguagcuuaa

SEQ ID NO: 638895 - RNA, 22 nt, Human
agugugaccuuauuuggaaaca

SEQ ID NO: 638896 - RNA, 22 nt, Human
auuauuucucacucacauaaua

SEQ ID NO: 638897 - RNA, 22 nt, Human
uuagccauauagaaaaagagcu

SEQ ID NO: 638898 - RNA, 22 nt, Human
aagcagcuuucuuuccugugaa

SEQ ID NO: 638899 - RNA, 22 nt, Human
gcuggcagagagcuggugagga

SEQ ID NO: 638900 - RNA, 22 nt, Human
ggccugagggugggcucucagu

SEQ ID NO: 638901 - RNA, 22 nt, Human
guuccuuggaagaacuugaggu

SEQ ID NO: 638902 - RNA, 22 nt, Human
aacuguuucagaaauauuguug

SEQ ID NO: 638903 - RNA, 19 nt, Human
ucagggaguuuacagcaug

SEQ ID NO: 638904 - RNA, 17 nt, Human
uggcuucccugggccac

SEQ ID NO: 638905 - RNA, 22 nt, Human
gaaaucaucugaguaauaaucu

SEQ ID NO: 638906 - RNA, 22 nt, Human
uccuucaacuuuuuacuugccc

SEQ ID NO: 638907 - RNA, 22 nt, Human
cuggagcugcuguccuugggug

SEQ ID NO: 638908 - RNA, 22 nt, Human
acagagauggcuuuucagaggc

SEQ ID NO: 638909 - RNA, 22 nt, Human
ugugaggguuuuaagggaauga

SEQ ID NO: 638910 - RNA, 22 nt, Human
cucaagacugaucgcaguggaa

SEQ ID NO: 638911 - RNA, 22 nt, Human
uuauuucauugauuucuaagac

SEQ ID NO: 638912 - RNA, 22 nt, Human
gaacuacagugcauuuucuuaa

SEQ ID NO: 638913 - RNA, 22 nt, Human
ucaggcugggagacaaucacug

SEQ ID NO: 638914 - RNA, 22 nt, Human
uaggcagaauugugggcucuaa

SEQ ID NO: 638915 - RNA, 22 nt, Human
uucccuucuaguuuugagagac

SEQ ID NO: 638916 - RNA, 22 nt, Human
ggcuguagguuggugcuggaca

SEQ ID NO: 638917 - RNA, 22 nt, Human
ccuuccagaguucagucugccc

SEQ ID NO: 638918 - RNA, 22 nt, Human
aggccugucuggggcucagcca

SEQ ID NO: 638919 - RNA, 22 nt, Human
uuguuuucagggugucauucac

SEQ ID NO: 638920 - RNA, 22 nt, Human
uauuucuugagacucgucuucc

SEQ ID NO: 638921 - RNA, 22 nt, Human
acauuuuuauucaucaaagcag

SEQ ID NO: 638922 - RNA, 18 nt, Human
ggcaggagcaagaauagg

SEQ ID NO: 638923 - RNA, 22 nt, Human
uccagcucuaacaugcugggcc

SEQ ID NO: 638924 - RNA, 22 nt, Human
gagcugugugccuggauggucu

SEQ ID NO: 638925 - RNA, 22 nt, Human
uucaaggaagaaguggcuuuga

SEQ ID NO: 638926 - RNA, 22 nt, Human
ucagaacauggcauguuccauc

SEQ ID NO: 638927 - RNA, 22 nt, Human
uuuaaaugcagacguugauuca

SEQ ID NO: 638928 - RNA, 22 nt, Human
cuucuguuacuguuagcugaag

SEQ ID NO: 638929 - RNA, 22 nt, Human
cagauucuucuguauuuuugcu

SEQ ID NO: 638930 - RNA, 22 nt, Human
aucugggccagccccaagagac

SEQ ID NO: 638931 - RNA, 22 nt, Human
aaaguucacugaccagcacugg

SEQ ID NO: 638932 - RNA, 22 nt, Human
uuguccuuuaauguuuaguauu

SEQ ID NO: 638933 - RNA, 22 nt, Human
auauucaaauuacauuuacuaa

SEQ ID NO: 638934 - RNA, 22 nt, Human
ugauucugaggacccugugacg

SEQ ID NO: 638935 - RNA, 22 nt, Human
cuggugaauauuggaggcauug

SEQ ID NO: 638936 - RNA, 22 nt, Human
uuugaucaugaagaggauaaac

SEQ ID NO: 638937 - RNA, 22 nt, Human
ucaaauaaggagucaugaccau

SEQ ID NO: 638938 - RNA, 22 nt, Human
uaaaugcaagggaaaggcaaga

SEQ ID NO: 638939 - RNA, 22 nt, Human
ucauauaccagagaguuuauau

SEQ ID NO: 638940 - RNA, 22 nt, Human
ggcugugcuuuguuagguuguc

SEQ ID NO: 638941 - RNA, 22 nt, Human
ugcagguacuugacaacuuggg

SEQ ID NO: 638942 - RNA, 22 nt, Human
aucucagggcuggagcccugga

SEQ ID NO: 638943 - RNA, 19 nt, Human
ccacuuugcuucucugggu

SEQ ID NO: 638944 - RNA, 22 nt, Human
gcagcccaggucucucucacuc

SEQ ID NO: 638945 - RNA, 22 nt, Human
ggagcugcacgcucugaagccu

SEQ ID NO: 638946 - RNA, 22 nt, Human
gaaaauguuagcuucauaguca

SEQ ID NO: 638947 - RNA, 22 nt, Human
acaaggacaugcaauuuggauu

SEQ ID NO: 638948 - RNA, 20 nt, Human
agaaaucagcauguccucug

SEQ ID NO: 638949 - RNA, 22 nt, Human
ccagccuucaccugcucugguc

SEQ ID NO: 638950 - RNA, 22 nt, Human
ccagucgugacaaccaaaaaua

SEQ ID NO: 638951 - RNA, 23 nt, Human
gcugccuccuacaaaagcccagc

SEQ ID NO: 638952 - RNA, 22 nt, Human
uccucaggauguggaguagaau

SEQ ID NO: 638953 - RNA, 22 nt, Human
ugucugugaccucuuaggcaag

SEQ ID NO: 638954 - RNA, 23 nt, Human
uccaggagcaugcuggcuggcga

SEQ ID NO: 638955 - RNA, 22 nt, Human
gcauggcuauucuaacucacau

SEQ ID NO: 638956 - RNA, 17 nt, Human
gcuuccucaugcaguuc

SEQ ID NO: 638957 - RNA, 22 nt, Human
ccaggccagagugcaguggcac

SEQ ID NO: 638958 - RNA, 21 nt, Human
aucucacagcccagagaagcc

SEQ ID NO: 638959 - RNA, 22 nt, Human
auggcucugagaaccugagcua

SEQ ID NO: 638960 - RNA, 22 nt, Human
gucaggauuggggucaugaguc

SEQ ID NO: 638961 - RNA, 22 nt, Human
augcacuugcguguuugcaaau

SEQ ID NO: 638962 - RNA, 22 nt, Human
guguauugcacauccuguagcc

SEQ ID NO: 638963 - RNA, 20 nt, Human
accccagccccucuaucuga

SEQ ID NO: 638964 - RNA, 19 nt, Human
ugaagcagcaaacucucag

SEQ ID NO: 638965 - RNA, 22 nt, Human
auuuuccuccaugugagcaguu

SEQ ID NO: 638966 - RNA, 22 nt, Human
auaguuugaaggcuguucuacu

SEQ ID NO: 638967 - RNA, 22 nt, Human
ucccugccuccuggcagugcca

SEQ ID NO: 638968 - RNA, 22 nt, Human
aguuaacuaaauuaagagacaa

SEQ ID NO: 638969 - RNA, 22 nt, Human
uuuccuuccaaaugcccgggag

SEQ ID NO: 638970 - RNA, 22 nt, Human
cauuacaaaguuauaaacaguu

SEQ ID NO: 638971 - RNA, 22 nt, Human
acuaguauugccuacuguacau

SEQ ID NO: 638972 - RNA, 22 nt, Human
cuauggugauagaaaucagaau

SEQ ID NO: 638973 - RNA, 22 nt, Human
acuacaucuugcauaucuauaa

SEQ ID NO: 638974 - RNA, 22 nt, Human
ggucuugaaggacauccagucc

SEQ ID NO: 638975 - RNA, 22 nt, Human
uguguguuggcuggagagggcu

SEQ ID NO: 638976 - RNA, 22 nt, Human
ggucagagaaaaguaggguguu

SEQ ID NO: 638977 - RNA, 22 nt, Human
caguacuuaacuuauaggagag

SEQ ID NO: 638978 - RNA, 22 nt, Human
gcuggacccggccccucaccuc

SEQ ID NO: 638979 - RNA, 22 nt, Human
ucuuggcugcugccaauuuacu

SEQ ID NO: 638980 - RNA, 21 nt, Human
uggaaggcugcucugccaggg

SEQ ID NO: 638981 - RNA, 22 nt, Human
gguugccggggcaggacuggaa

SEQ ID NO: 638982 - RNA, 22 nt, Human
gcaggagagucugugccagguu

SEQ ID NO: 638983 - RNA, 22 nt, Human
gaucugguacaggccugcagcc

SEQ ID NO: 638984 - RNA, 22 nt, Human
ugcauuaagaauuucugaggau

SEQ ID NO: 638985 - RNA, 17 nt, Human
ggacugggcggggcagg

SEQ ID NO: 638986 - RNA, 22 nt, Human
ugcaugaugguuuagauggggu

SEQ ID NO: 638987 - RNA, 22 nt, Human
uuagagaauuccaaaugacuac

SEQ ID NO: 638988 - RNA, 18 nt, Human
gucacagcagagaacugc

SEQ ID NO: 638989 - RNA, 22 nt, Human
caucuuaauaaaucuccucccu

SEQ ID NO: 638990 - RNA, 22 nt, Human
gacggggcagccagcugguggc

SEQ ID NO: 638991 - RNA, 22 nt, Human
aauuucucgguuuugauauugu

SEQ ID NO: 638992 - RNA, 17 nt, Human
gagacagcaggagcccc

SEQ ID NO: 638993 - RNA, 23 nt, Human
uaaccugaguuuuuuagaugcaa

SEQ ID NO: 638994 - RNA, 22 nt, Human
uagaguauagcuaacuguauua

SEQ ID NO: 638995 - RNA, 22 nt, Human
agagcucugcagcuggccucag

SEQ ID NO: 638996 - RNA, 22 nt, Human
aagccuucaguccguugcagag

SEQ ID NO: 638997 - RNA, 22 nt, Human
gagccuguguuuccuguagcca

SEQ ID NO: 638998 - RNA, 19 nt, Human
aggcugcccagucucugcc

SEQ ID NO: 638999 - RNA, 22 nt, Human
gggaaugugaaacaguaaggga

SEQ ID NO: 639000 - RNA, 22 nt, Human
ucagaggagcugcagaacgcug

SEQ ID NO: 639001 - RNA, 22 nt, Human
uuaacauuugugaagcauuuag

SEQ ID NO: 639002 - RNA, 22 nt, Human
agugucuucaugauguggcagc

SEQ ID NO: 639003 - RNA, 22 nt, Human
gcaguauauccauuacuucaua

SEQ ID NO: 639004 - RNA, 22 nt, Human
uguggccaaaauaaaaugaggu

SEQ ID NO: 639005 - RNA, 19 nt, Human
agcccccagacagcaggcc

SEQ ID NO: 639006 - RNA, 22 nt, Human
guugcucaggcaggaguacagu

SEQ ID NO: 639007 - RNA, 22 nt, Human
acacagaggaaagugugaaggg

SEQ ID NO: 639008 - RNA, 22 nt, Human
ucuugggcaauuucucuagagg

SEQ ID NO: 639009 - RNA, 21 nt, Human
ccaggcugggagggcaguucc

SEQ ID NO: 639010 - RNA, 22 nt, Human
gugcaugugcauccauguguac

SEQ ID NO: 639011 - RNA, 22 nt, Human
guucaaccaugauuaggaacug

SEQ ID NO: 639012 - RNA, 22 nt, Human
cauggcuuuuagcccuacauga

SEQ ID NO: 639013 - RNA, 22 nt, Human
gaucugggcuggagacugagaa

SEQ ID NO: 639014 - RNA, 22 nt, Human
auccuuuaaguuaauaaaauuc

SEQ ID NO: 639015 - RNA, 22 nt, Human
cugaaauaaaguugcuaaaauu

SEQ ID NO: 639016 - RNA, 17 nt, Human
gggacucaagauggggu

SEQ ID NO: 639017 - RNA, 22 nt, Human
ugccugccucuggcagcccugc

SEQ ID NO: 639018 - RNA, 22 nt, Human
uuguacaacguuuuaaauuuga

SEQ ID NO: 639019 - RNA, 22 nt, Human
ucuuugcauggacauguguuuu

SEQ ID NO: 639020 - RNA, 22 nt, Human
uccuugggaaacaucauguaau

SEQ ID NO: 639021 - RNA, 22 nt, Human
ccugcagagggacuggcaggaa

SEQ ID NO: 639022 - RNA, 18 nt, Human
gcuuucaauuucuuuccu

SEQ ID NO: 639023 - RNA, 22 nt, Human
uuucagaaggggagaaagguca

SEQ ID NO: 639024 - RNA, 22 nt, Human
cugaggccguuggugggccuua

SEQ ID NO: 639025 - RNA, 22 nt, Human
gcccuucauuuauaguuggaau

SEQ ID NO: 639026 - RNA, 21 nt, Human
cauugucgacauuuuccccuc

SEQ ID NO: 639027 - RNA, 22 nt, Human
ucagcagggagaggagaaugca

SEQ ID NO: 639028 - RNA, 22 nt, Human
ggggcugcugguauuuccaguu

SEQ ID NO: 639029 - RNA, 19 nt, Human
agguccugaucagcaagga

SEQ ID NO: 639030 - RNA, 22 nt, Human
aagcaaaacgugcucuaggagg

SEQ ID NO: 639031 - RNA, 23 nt, Human
uuaggcacuuaguagggccagag

SEQ ID NO: 639032 - RNA, 22 nt, Human
acuugcauuauauuuaucacaa

SEQ ID NO: 639033 - RNA, 22 nt, Human
gaagccaguguuugaagaauuu

SEQ ID NO: 639034 - RNA, 22 nt, Human
cuguagcagugugcucuuuuuc

SEQ ID NO: 639035 - RNA, 22 nt, Human
cuccccauugugaccucaucca

SEQ ID NO: 639036 - RNA, 22 nt, Human
ccacuugugaaauaaucaaaua

SEQ ID NO: 639037 - RNA, 22 nt, Human
ucuggcucucucaucacccaau

SEQ ID NO: 639038 - RNA, 22 nt, Human
aaauguguuccuuugcuacaga

SEQ ID NO: 639039 - RNA, 22 nt, Human
agaagauuauuagagacuuugu

SEQ ID NO: 639040 - RNA, 22 nt, Human
uuaaauagcucuuguagaagaa

SEQ ID NO: 639041 - RNA, 22 nt, Human
gagcuccuauggucgguggcuc

SEQ ID NO: 639042 - RNA, 22 nt, Human
gaaagcugugaaauagugcucu

SEQ ID NO: 639043 - RNA, 22 nt, Human
agaggcugcacuugcucaugau

SEQ ID NO: 639044 - RNA, 22 nt, Human
uucuagcacaagauaugaaagu

SEQ ID NO: 639045 - RNA, 22 nt, Human
gugcugucauuagcaucuagag

SEQ ID NO: 639046 - RNA, 22 nt, Human
gcucuggcuuggggcacucguc

SEQ ID NO: 639047 - RNA, 22 nt, Human
aggaggcacucacucucagggu

SEQ ID NO: 639048 - RNA, 23 nt, Human
uuucaguuccagaaaaggggagc

SEQ ID NO: 639049 - RNA, 22 nt, Human
caaggcuucacguccccagugc

SEQ ID NO: 639050 - RNA, 23 nt, Human
cauaugaauuuuagaggcaguuu

SEQ ID NO: 639051 - RNA, 22 nt, Human
gauucuggaguuaaggaugccu

SEQ ID NO: 639052 - RNA, 22 nt, Human
aucaaugacaguugaauucuac

SEQ ID NO: 639053 - RNA, 22 nt, Human
auuauuugacuugagaacaggu

SEQ ID NO: 639054 - RNA, 22 nt, Human
agaggggaaggaugugauguga

SEQ ID NO: 639055 - RNA, 18 nt, Human
uggcagagugucuguucu

SEQ ID NO: 639056 - RNA, 22 nt, Human
uuacacuucuaaaaaaagcagg

SEQ ID NO: 639057 - RNA, 22 nt, Human
caaaaguaauugcgguuuuugc

SEQ ID NO: 639058 - RNA, 22 nt, Human
cuauauucuggaauguccauuu

SEQ ID NO: 639059 - RNA, 22 nt, Human
caaauguaauugcgguuuuugc

SEQ ID NO: 639060 - RNA, 20 nt, Human
aaagucuuaugguuaauuuu

SEQ ID NO: 639061 - RNA, 22 nt, Human
ugcaggcucugugugugccugg

SEQ ID NO: 639062 - RNA, 23 nt, Human
agcagcagcaauuaaguggauau

SEQ ID NO: 639063 - RNA, 22 nt, Human
ccauggaacucaguaaauuaua

SEQ ID NO: 639064 - RNA, 22 nt, Human
ugucuucuucauaaggagagug

SEQ ID NO: 639065 - RNA, 22 nt, Human
gacuuuaaagccugacauuuua

SEQ ID NO: 639066 - RNA, 22 nt, Human
guugaauauuuuaagaguuuug

SEQ ID NO: 639067 - RNA, 23 nt, Human
agccaggggaucuugggcccugg

SEQ ID NO: 639068 - RNA, 22 nt, Human
gggacuggccaggguuuggaau

SEQ ID NO: 639069 - RNA, 22 nt, Human
agagucagaaccaagaugaggc

SEQ ID NO: 639070 - RNA, 22 nt, Human
uggccagguguggguucucaga

SEQ ID NO: 639071 - RNA, 19 nt, Human
uaguacacacucuaauucc

SEQ ID NO: 639072 - RNA, 22 nt, Human
caguccucucacucaggccuuu

SEQ ID NO: 639073 - RNA, 22 nt, Human
cagaagcuuugcucauaaccau

SEQ ID NO: 639074 - RNA, 18 nt, Human
cugcuccagucuggccag

SEQ ID NO: 639075 - RNA, 22 nt, Human
gugggccuugcagggugcaggg

SEQ ID NO: 639076 - RNA, 22 nt, Human
gacuuuggcaucuagacauugu

SEQ ID NO: 639077 - RNA, 22 nt, Human
auuauuaaaauguguuucucuu

SEQ ID NO: 639078 - RNA, 22 nt, Human
ugcacauuaguguuugagaugc

SEQ ID NO: 639079 - RNA, 22 nt, Human
uguguauuucuggaacagacua

SEQ ID NO: 639080 - RNA, 22 nt, Human
aggcugggaagguaaaguugua

SEQ ID NO: 639081 - RNA, 22 nt, Human
cagcccugaaacaaccuccucu

SEQ ID NO: 639082 - RNA, 22 nt, Human
cagaagggcagcacugggaagg

SEQ ID NO: 639083 - RNA, 22 nt, Human
uucuucugaaacagugacagac

SEQ ID NO: 639084 - RNA, 20 nt, Human
gugggcagcaggcauacugg

SEQ ID NO: 639085 - RNA, 22 nt, Human
uauguacacacacaugcaugua

SEQ ID NO: 639086 - RNA, 22 nt, Human
ugcccuugaaauacgcuugggg

SEQ ID NO: 639087 - RNA, 22 nt, Human
ggccaggagcaagccaggcucu

SEQ ID NO: 639088 - RNA, 22 nt, Human
uuggaaaaugaggcacagagag

SEQ ID NO: 639089 - RNA, 22 nt, Human
uuuggacuuagccugcagaauu

SEQ ID NO: 639090 - RNA, 20 nt, Human
aagggcagagggaacagacu

SEQ ID NO: 639091 - RNA, 22 nt, Human
auaaaugauucagcaggaaaua

SEQ ID NO: 639092 - RNA, 22 nt, Human
uagagaugaauucugcagucuu

SEQ ID NO: 639093 - RNA, 22 nt, Human
gaauuuaaaggccagaccugag

SEQ ID NO: 639094 - RNA, 22 nt, Human
cucugugcuuaugcuccauggg

SEQ ID NO: 639095 - RNA, 22 nt, Human
ugagcgugcaguaguguuggua

SEQ ID NO: 639096 - RNA, 22 nt, Human
uggcucaugcaucuuuucuaca

SEQ ID NO: 639097 - RNA, 22 nt, Human
uuucuaguaaaagcuaauuacc

SEQ ID NO: 639098 - RNA, 22 nt, Human
auauaauacaaccugcuaagug

SEQ ID NO: 639099 - RNA, 22 nt, Human
uaacagaaauagaaaugagagu

SEQ ID NO: 639100 - RNA, 22 nt, Human
ccaugccucgggaagagucugu

SEQ ID NO: 639101 - RNA, 20 nt, Human
ucugaagaaagacagggacu

SEQ ID NO: 639102 - RNA, 19 nt, Human
uggccagguacugucugcu

SEQ ID NO: 639103 - RNA, 22 nt, Human
ucucuccaacaugguggugcug

SEQ ID NO: 639104 - RNA, 22 nt, Human
caguaacagugaucaccugugg

SEQ ID NO: 639105 - RNA, 22 nt, Human
aauuagggaaaacauuugcuuu

SEQ ID NO: 639106 - RNA, 22 nt, Human
ucccagggacugggcuaggcuu

SEQ ID NO: 639107 - RNA, 22 nt, Human
gggcuccaccuagggacacugg

SEQ ID NO: 639108 - RNA, 22 nt, Human
acugggccggugcagaguaguu

SEQ ID NO: 639109 - RNA, 22 nt, Human
ggcugcagaggcgaucugaggu

SEQ ID NO: 639110 - RNA, 22 nt, Human
uuuauauaacagagacugcuau

SEQ ID NO: 639111 - RNA, 22 nt, Human
auuauacaaggcuggugccuaa

SEQ ID NO: 639112 - RNA, 22 nt, Human
uuucuuaggcucuaaaaugacu

SEQ ID NO: 639113 - RNA, 22 nt, Human
ucuuuaguauugaguuauggua

SEQ ID NO: 639114 - RNA, 22 nt, Human
gccagcagguugucaaggagcu

SEQ ID NO: 639115 - RNA, 22 nt, Human
uaugaaaauuuagcugaagcau

SEQ ID NO: 639116 - RNA, 22 nt, Human
cugaagcuugauaaacuauaaa

SEQ ID NO: 639117 - RNA, 22 nt, Human
uuacacaugcucacuuauuugu

SEQ ID NO: 639118 - RNA, 22 nt, Human
cagacacacacccuggccuagc

SEQ ID NO: 639119 - RNA, 22 nt, Human
aguuuauguuguuuauaagcca

SEQ ID NO: 639120 - RNA, 22 nt, Human
acucacaagugaugugaauggc

SEQ ID NO: 639121 - RNA, 17 nt, Human
ugcauguccuuuguucc

SEQ ID NO: 639122 - RNA, 22 nt, Human
aagaguuuccaguuguggcuca

SEQ ID NO: 639123 - RNA, 19 nt, Human
guagggacagugguucuga

SEQ ID NO: 639124 - RNA, 22 nt, Human
cucuggcuggcauugcuggacu

SEQ ID NO: 639125 - RNA, 22 nt, Human
uaaguggguuuguaaugugccu

SEQ ID NO: 639126 - RNA, 22 nt, Human
uaaacaugugagugugcauaua

SEQ ID NO: 639127 - RNA, 22 nt, Human
auggcuggaggccgggcuuccu

SEQ ID NO: 639128 - RNA, 22 nt, Human
cacucucucaggcuuuccuugu

SEQ ID NO: 639129 - RNA, 22 nt, Human
aguuagugaagcucaucacagc

SEQ ID NO: 639130 - RNA, 22 nt, Human
gggcugagauuggugcccuguc

SEQ ID NO: 639131 - RNA, 22 nt, Human
gugaacucugacucucaugccu

SEQ ID NO: 639132 - RNA, 21 nt, Human
ucaggagagcccaucuacaaa

SEQ ID NO: 639133 - RNA, 22 nt, Human
uggucagacaaaggagaauguu

SEQ ID NO: 639134 - RNA, 22 nt, Human
agaaauacuuuguaaaucucac

SEQ ID NO: 639135 - RNA, 22 nt, Human
cuguggaccugcucuuagagac

SEQ ID NO: 639136 - RNA, 22 nt, Human
ggaaucagaauuaggauuugaa

SEQ ID NO: 639137 - RNA, 22 nt, Human
agagccuggucugagauaggac

SEQ ID NO: 639138 - RNA, 22 nt, Human
aauauuuccaaggccugucagg

SEQ ID NO: 639139 - RNA, 22 nt, Human
uuucaguuaaguggcuaguccc

SEQ ID NO: 639140 - RNA, 22 nt, Human
agagagaagcaaucaguggcca

SEQ ID NO: 639141 - RNA, 21 nt, Human
gagugcagcaagguagagucu

SEQ ID NO: 639142 - RNA, 22 nt, Human
gccugcagccccucugcaguag

SEQ ID NO: 639143 - RNA, 22 nt, Human
uauuccugggccccauuccaga

SEQ ID NO: 639144 - RNA, 22 nt, Human
guuuccuggaaacauuaggaga

SEQ ID NO: 639145 - RNA, 23 nt, Human
ugcaauaugucagugcaaagugg

SEQ ID NO: 639146 - RNA, 22 nt, Human
uauugcuuaaaaaauaugugag

SEQ ID NO: 639147 - RNA, 22 nt, Human
ggcugcugcccaccccugcaug

SEQ ID NO: 639148 - RNA, 22 nt, Human
gauuguaaaacagaucauuauc

SEQ ID NO: 639149 - RNA, 22 nt, Human
uauuucugagaaccaacuuacc

SEQ ID NO: 639150 - RNA, 22 nt, Human
agcuuuaaagcauauuucuaag

SEQ ID NO: 639151 - RNA, 22 nt, Human
cuguauuagccaggugcacaag

SEQ ID NO: 639152 - RNA, 22 nt, Human
uggauggaucucaagggaauua

SEQ ID NO: 639153 - RNA, 22 nt, Human
ucccucuguucuguuccaagug

SEQ ID NO: 639154 - RNA, 22 nt, Human
ugcuugucuucaggauuauggu

SEQ ID NO: 639155 - RNA, 22 nt, Human
aggcauggguagaagagaagcc

SEQ ID NO: 639156 - RNA, 22 nt, Human
ccaggagggaggaguuccugag

SEQ ID NO: 639157 - RNA, 22 nt, Human
uugcauuguaggauguuagaag

SEQ ID NO: 639158 - RNA, 23 nt, Human
gaggcacucaggaaaugugagug

SEQ ID NO: 639159 - RNA, 22 nt, Human
uacuuauaaggaggcacacaaa

SEQ ID NO: 639160 - RNA, 22 nt, Human
aaagucauuguaauauaugcua

SEQ ID NO: 639161 - RNA, 22 nt, Human
uuacacuuuggcaagcuauuaa

SEQ ID NO: 639162 - RNA, 22 nt, Human
ucaggaagcuacugccagcagc

SEQ ID NO: 639163 - RNA, 22 nt, Human
aggaacugggcucagcaaacau

SEQ ID NO: 639164 - RNA, 22 nt, Human
uuauaacaucaaucagaguuaa

SEQ ID NO: 639165 - RNA, 22 nt, Human
caggggcaggugugagaucauc

SEQ ID NO: 639166 - RNA, 22 nt, Human
guauaucuucagaaauuauagg

SEQ ID NO: 639167 - RNA, 22 nt, Human
agcagcaccuguccucgcugcu

SEQ ID NO: 639168 - RNA, 22 nt, Human
uaguuuaguaagaggagagcug

SEQ ID NO: 639169 - RNA, 22 nt, Human
gcuuccuccuggaggucacuca

SEQ ID NO: 639170 - RNA, 22 nt, Human
ucacccagcagcugcuucugcu

SEQ ID NO: 639171 - RNA, 22 nt, Human
augcaguggcuucagugucagu

SEQ ID NO: 639172 - RNA, 22 nt, Human
uucauugaguuacugccugggc

SEQ ID NO: 639173 - RNA, 22 nt, Human
uuucaacaggaugauaauaggc

SEQ ID NO: 639174 - RNA, 22 nt, Human
ucugaggccccagcccugcaca

SEQ ID NO: 639175 - RNA, 22 nt, Human
cagagaaagggugaauuccuuc

SEQ ID NO: 639176 - RNA, 22 nt, Human
cuggcugggagcgagcugcuca

SEQ ID NO: 639177 - RNA, 22 nt, Human
uaaaucacccaucuccuaaucu

SEQ ID NO: 639178 - RNA, 22 nt, Human
ggcucacacaugacugggcucu

SEQ ID NO: 639179 - RNA, 22 nt, Human
caagggcugaacacagguuuca

SEQ ID NO: 639180 - RNA, 22 nt, Human
cugggccucauccucagaguuu

SEQ ID NO: 639181 - RNA, 22 nt, Human
aacauugaauuuaaaauacagu

SEQ ID NO: 639182 - RNA, 22 nt, Human
auggaagacagauaaggcagaa

SEQ ID NO: 639183 - RNA, 21 nt, Human
cuugaaagguagagucuacag

SEQ ID NO: 639184 - RNA, 22 nt, Human
aaaugcuuagagguguucaaau

SEQ ID NO: 639185 - RNA, 17 nt, Human
ugaggccauggcaccau

SEQ ID NO: 639186 - RNA, 22 nt, Human
uaaggcaggacuggauagcuau

SEQ ID NO: 639187 - RNA, 22 nt, Human
uuauuauugugguugcauuauc

SEQ ID NO: 639188 - RNA, 22 nt, Human
aggaaggguucuuucuguuuau

SEQ ID NO: 639189 - RNA, 22 nt, Human
gggcuacauugugagagaaguu

SEQ ID NO: 639190 - RNA, 22 nt, Human
ccuguauuagguagacaacuau

SEQ ID NO: 639191 - RNA, 22 nt, Human
uagcacugaaucacaugcugcu

SEQ ID NO: 639192 - RNA, 22 nt, Human
cagcaugaugagugcaguuugg

SEQ ID NO: 639193 - RNA, 18 nt, Human
gauucugauucuggaggc

SEQ ID NO: 639194 - RNA, 22 nt, Human
uuuaagaugguauuuuauaaag

SEQ ID NO: 639195 - RNA, 20 nt, Human
agcuucuucugucuaauuuu

SEQ ID NO: 639196 - RNA, 22 nt, Human
cccaggaaagaaaguauauggu

SEQ ID NO: 639197 - RNA, 22 nt, Human
caguuuaguccugccaccaugg

SEQ ID NO: 639198 - RNA, 22 nt, Human
uucuaaguccuaccugaaagca

SEQ ID NO: 639199 - RNA, 22 nt, Human
uuccgcuguuuaguugaaguuu

SEQ ID NO: 639200 - RNA, 22 nt, Human
cuuaguuuuugcccuggaguuu

SEQ ID NO: 639201 - RNA, 22 nt, Human
uacauugaaaucaauggaugug

SEQ ID NO: 639202 - RNA, 22 nt, Human
gaaaucuuuucaucucauuuga

SEQ ID NO: 639203 - RNA, 22 nt, Human
uccagggauguccuguagcacu

SEQ ID NO: 639204 - RNA, 22 nt, Human
uaagaaacuauggagaagaacu

SEQ ID NO: 639205 - RNA, 22 nt, Human
ggggcagaaguagugccccuga

SEQ ID NO: 639206 - RNA, 22 nt, Human
auuuccuugcaaguuucuguaa

SEQ ID NO: 639207 - RNA, 22 nt, Human
cugggcucuagaaaggaaagaa

SEQ ID NO: 639208 - RNA, 22 nt, Human
ucuugggauugcccugcaguuc

SEQ ID NO: 639209 - RNA, 22 nt, Human
auacauauccacaggagauaaa

SEQ ID NO: 639210 - RNA, 22 nt, Human
cugccuuccaaccccagacucc

SEQ ID NO: 639211 - RNA, 22 nt, Human
guggccaggagagggugggaca

SEQ ID NO: 639212 - RNA, 22 nt, Human
ugaaggugaaugucuaugggga

SEQ ID NO: 639213 - RNA, 22 nt, Human
uucuccuugaaaagcugcaucu

SEQ ID NO: 639214 - RNA, 22 nt, Human
uaaaucacuguucauuccacac

SEQ ID NO: 639215 - RNA, 22 nt, Human
uuccuucuuugugguagaaagu

SEQ ID NO: 639216 - RNA, 22 nt, Human
ugcacacaguggacaagucuug

SEQ ID NO: 639217 - RNA, 22 nt, Human
acauuucugucuuagggacugu

SEQ ID NO: 639218 - RNA, 22 nt, Human
ggagaaaggcauagcagaaccu

SEQ ID NO: 639219 - RNA, 22 nt, Human
uacaaguauggaaugauucuca

SEQ ID NO: 639220 - RNA, 22 nt, Human
gcugcagcccggcgcgccugag

SEQ ID NO: 639221 - RNA, 22 nt, Human
uggcucaggccuacgacgccuu

SEQ ID NO: 639222 - RNA, 22 nt, Human
uaugauuuguagacauuugauu

SEQ ID NO: 639223 - RNA, 22 nt, Human
uggcagcugccauguccacgug

SEQ ID NO: 639224 - RNA, 22 nt, Human
ucuggguccccgaggaaggaga

SEQ ID NO: 639225 - RNA, 22 nt, Human
gucagacugcacucaaggacag

SEQ ID NO: 639226 - RNA, 22 nt, Human
gagcuucagagaccacuuaacu

SEQ ID NO: 639227 - RNA, 22 nt, Human
aucuguaaaugcaaauguagcu

SEQ ID NO: 639228 - RNA, 22 nt, Human
uugauucuauggcuccgggagu

SEQ ID NO: 639229 - RNA, 22 nt, Human
gcagagccaggagcccaggauc

SEQ ID NO: 639230 - RNA, 22 nt, Human
gcauagucaguaggauucucaa

SEQ ID NO: 639231 - RNA, 22 nt, Human
acugccuuauaugcugugugug

SEQ ID NO: 639232 - RNA, 22 nt, Human
ugcaaagcaauguaggucagcu

SEQ ID NO: 639233 - RNA, 22 nt, Human
cugucuguacaaauguggggcc

SEQ ID NO: 639234 - RNA, 22 nt, Human
uggccacccagcugacgccuuc

SEQ ID NO: 639235 - RNA, 22 nt, Human
aagcuggagaguuucacagaug

SEQ ID NO: 639236 - RNA, 22 nt, Human
gcagaugaaguuuacaggaaac

SEQ ID NO: 639237 - RNA, 22 nt, Human
ugugacugaagugucuagaccu

SEQ ID NO: 639238 - RNA, 22 nt, Human
cauucacaauaguugaaaggug

SEQ ID NO: 639239 - RNA, 22 nt, Human
uacauguaggugacauuuuaau

SEQ ID NO: 639240 - RNA, 20 nt, Human
aagagaagaagucuuugaaa

SEQ ID NO: 639241 - RNA, 22 nt, Human
gaggcaggcagauugcuugagg

SEQ ID NO: 639242 - RNA, 22 nt, Human
ugucagagcaaugagguucagc

SEQ ID NO: 639243 - RNA, 22 nt, Human
ugcuuuguguuugaauagauaa

SEQ ID NO: 639244 - RNA, 22 nt, Human
aucuuauuuaacacagcaaaac

SEQ ID NO: 639245 - RNA, 21 nt, Human
ucucguuguauggucuugggg

SEQ ID NO: 639246 - RNA, 22 nt, Human
gccugcagaggugcugcuagcu

SEQ ID NO: 639247 - RNA, 22 nt, Human
gucagcugucuccccagagugg

SEQ ID NO: 639248 - RNA, 22 nt, Human
ucuuauaaaaggacucccauuu

SEQ ID NO: 639249 - RNA, 22 nt, Human
ucacugggagagcugacaagga

SEQ ID NO: 639250 - RNA, 22 nt, Human
cuuaagaugaggucaugcuaua

SEQ ID NO: 639251 - RNA, 22 nt, Human
acagaaacccagaaaaccucuc

SEQ ID NO: 639252 - RNA, 22 nt, Human
acacacuggcccccaguacuga

SEQ ID NO: 639253 - RNA, 22 nt, Human
gauuaugguagaaacaagaagu

SEQ ID NO: 639254 - RNA, 22 nt, Human
aauuuauuuccugccaguacac

SEQ ID NO: 639255 - RNA, 22 nt, Human
ucugucuccucugaggugccag

SEQ ID NO: 639256 - RNA, 22 nt, Human
uggcagugguaccggcucucag

SEQ ID NO: 639257 - RNA, 22 nt, Human
uccaugcagagaacugaaguac

SEQ ID NO: 639258 - RNA, 22 nt, Human
ggacugggauucuggaucugcu

SEQ ID NO: 639259 - RNA, 22 nt, Human
uagcuguucccagcucugugua

SEQ ID NO: 639260 - RNA, 22 nt, Human
gcagccagggcuaagcugggga

SEQ ID NO: 639261 - RNA, 21 nt, Human
uuuguccaccuguguucacca

SEQ ID NO: 639262 - RNA, 22 nt, Human
uccaggaggcagggcugugccc

SEQ ID NO: 639263 - RNA, 22 nt, Human
aagaacaugguaggauaacaaa

SEQ ID NO: 639264 - RNA, 20 nt, Human
uucaugggagcaaagaggcc

SEQ ID NO: 639265 - RNA, 22 nt, Human
ugcacagagagaugagacacgu

SEQ ID NO: 639266 - RNA, 22 nt, Human
uucuuaaaauucaagcuagguu

SEQ ID NO: 639267 - RNA, 22 nt, Human
agaccaagaaaggaugaggauc

SEQ ID NO: 639268 - RNA, 22 nt, Human
cauuucaguguuauucuaauuu

SEQ ID NO: 639269 - RNA, 22 nt, Human
gcuggagcuugagaggacaggg

SEQ ID NO: 639270 - RNA, 22 nt, Human
ucugucauuagccuugacugua

SEQ ID NO: 639271 - RNA, 20 nt, Human
ccagacagcaccugccuggu

SEQ ID NO: 639272 - RNA, 18 nt, Human
augaucuuagcaaauauu

SEQ ID NO: 639273 - RNA, 22 nt, Human
cacugauuaagucugcuagagg

SEQ ID NO: 639274 - RNA, 22 nt, Human
gguggccauggucagguagcgg

SEQ ID NO: 639275 - RNA, 22 nt, Human
agcuuccugucuucugcacaaa

SEQ ID NO: 639276 - RNA, 22 nt, Human
acaggcagauuaaggguaggca

SEQ ID NO: 639277 - RNA, 22 nt, Human
ugcuucuggcuuaucucgugcc

SEQ ID NO: 639278 - RNA, 17 nt, Human
cucugcagugcauggcu

SEQ ID NO: 639279 - RNA, 20 nt, Human
uacagccuauucaccacaua

SEQ ID NO: 639280 - RNA, 22 nt, Human
guugagcaaggccagagaagcc

SEQ ID NO: 639281 - RNA, 22 nt, Human
gcugucaggccaugugggccuu

SEQ ID NO: 639282 - RNA, 22 nt, Human
gaaacugugaggaucuuaacuu

SEQ ID NO: 639283 - RNA, 22 nt, Human
gcaggcuggaggcuguucuggg

SEQ ID NO: 639284 - RNA, 20 nt, Human
cugugccuccugcuaguccu

SEQ ID NO: 639285 - RNA, 22 nt, Human
caaguguccaugauagucuuag

SEQ ID NO: 639286 - RNA, 22 nt, Human
uggagcagugguccuggagaug

SEQ ID NO: 639287 - RNA, 22 nt, Human
uguaucaaggguuuauguaagc

SEQ ID NO: 639288 - RNA, 22 nt, Human
ggcugguccuuucucuguccua

SEQ ID NO: 639289 - RNA, 22 nt, Human
cccugccuacaggguuuucuuu

SEQ ID NO: 639290 - RNA, 22 nt, Human
ucagugcagcggcagcagcucu

SEQ ID NO: 639291 - RNA, 21 nt, Human
ccuuggcuggcaucuagcacc

SEQ ID NO: 639292 - RNA, 22 nt, Human
agugugagggguucuuugauau

SEQ ID NO: 639293 - RNA, 22 nt, Human
cuauaucuacauuugcuguuug

SEQ ID NO: 639294 - RNA, 22 nt, Human
cucuggccuggggccugcuccc

SEQ ID NO: 639295 - RNA, 22 nt, Human
agggcaugaagcaguggacagc

SEQ ID NO: 639296 - RNA, 22 nt, Human
uuuucuuaggugcuccaaguag

SEQ ID NO: 639297 - RNA, 22 nt, Human
ugugaaaaaaguucuagaagga

SEQ ID NO: 639298 - RNA, 22 nt, Human
cucagggaguagcacaugugga

SEQ ID NO: 639299 - RNA, 18 nt, Human
ccagaggcccgggcaggc

SEQ ID NO: 639300 - RNA, 18 nt, Human
uguacaguuaugagcauu

SEQ ID NO: 639301 - RNA, 22 nt, Human
gacacagagauaggccuguguu

SEQ ID NO: 639302 - RNA, 21 nt, Human
agccugccugaacucuguggc

SEQ ID NO: 639303 - RNA, 22 nt, Human
cauuguucaacacugacuugca

SEQ ID NO: 639304 - RNA, 22 nt, Human
agaaagcuccccaugagaugau

SEQ ID NO: 639305 - RNA, 22 nt, Human
cagcucuggcagagcccaaccc

SEQ ID NO: 639306 - RNA, 22 nt, Human
acauacauguaaaggaaauuau

SEQ ID NO: 639307 - RNA, 21 nt, Human
uggcccuggccacggcugcca

SEQ ID NO: 639308 - RNA, 21 nt, Human
ccauucuuagucaagugucuc

SEQ ID NO: 639309 - RNA, 22 nt, Human
guggaggacaaaagaagccuuu

SEQ ID NO: 639310 - RNA, 22 nt, Human
uagagaugugauauagcagagu

SEQ ID NO: 639311 - RNA, 22 nt, Human
uagcuaggguaagacuuggacc

SEQ ID NO: 639312 - RNA, 22 nt, Human
agguaaagaaagguguaacauu

SEQ ID NO: 639313 - RNA, 22 nt, Human
aggcaaggugcuacagacagug

SEQ ID NO: 639314 - RNA, 22 nt, Human
acaggcugcugagccauuugcu

SEQ ID NO: 639315 - RNA, 22 nt, Human
gcaaggcugagcacauuugcau

SEQ ID NO: 639316 - RNA, 22 nt, Human
gagggugggcuuuguuccucca

SEQ ID NO: 639317 - RNA, 22 nt, Human
gugauuucaaauauagagugag

SEQ ID NO: 639318 - RNA, 22 nt, Human
ugccugagugauguggcagcca

SEQ ID NO: 639319 - RNA, 22 nt, Human
acaguggaagaagcacugaacu

SEQ ID NO: 639320 - RNA, 22 nt, Human
aacaguuuauguaaauguccag

SEQ ID NO: 639321 - RNA, 22 nt, Human
ugccauggaaucaccuccagcu

SEQ ID NO: 639322 - RNA, 22 nt, Human
ugguuaguguauauuuggacug

SEQ ID NO: 639323 - RNA, 22 nt, Human
ggguaggcucugcaggcugggu

SEQ ID NO: 639324 - RNA, 21 nt, Human
ccugagugagaccuggcccgu

SEQ ID NO: 639325 - RNA, 22 nt, Human
aggggagcaucugugaugguua

SEQ ID NO: 639326 - RNA, 22 nt, Human
uuccucagcucagcgagagaga

SEQ ID NO: 639327 - RNA, 22 nt, Human
ugggccaggcaugugaucagca

SEQ ID NO: 639328 - RNA, 22 nt, Human
auguuucccagagcaaaucugg

SEQ ID NO: 639329 - RNA, 21 nt, Human
uccccacauuucuaaacagac

SEQ ID NO: 639330 - RNA, 22 nt, Human
uucuccagcucaucagggaggg

SEQ ID NO: 639331 - RNA, 22 nt, Human
gaaaggcaguacagcugagccu

SEQ ID NO: 639332 - RNA, 22 nt, Human
cugcguucauuuugagugcugu

SEQ ID NO: 639333 - RNA, 22 nt, Human
ucuggaaucaguggcuuacccu

SEQ ID NO: 639334 - RNA, 22 nt, Human
ucuuucaaagcaaaaugaggcu

SEQ ID NO: 639335 - RNA, 21 nt, Human
agaccucuucccuucaugcac

SEQ ID NO: 639336 - RNA, 22 nt, Human
ggcaugaguaacgugagugagg

SEQ ID NO: 639337 - RNA, 22 nt, Human
agaacaucuaaauaucugagac

SEQ ID NO: 639338 - RNA, 22 nt, Human
ucagcagguggugggcagguga

SEQ ID NO: 639339 - RNA, 22 nt, Human
aguauauuuugauuguaugugu

SEQ ID NO: 639340 - RNA, 22 nt, Human
cggauccucagucgugcgggag

SEQ ID NO: 639341 - RNA, 22 nt, Human
uucagucagugacuaagcaguu

SEQ ID NO: 639342 - RNA, 22 nt, Human
augugaaugcaguuaucuauaa

SEQ ID NO: 639343 - RNA, 22 nt, Human
gcagcuggggaggucgugggga

SEQ ID NO: 639344 - RNA, 22 nt, Human
accaucagucacauguagagaa

SEQ ID NO: 639345 - RNA, 22 nt, Human
uauguucucugcucuaggaugu

SEQ ID NO: 639346 - RNA, 22 nt, Human
aggagccaugagcaggaggcaa

SEQ ID NO: 639347 - RNA, 22 nt, Human
cagggccuuuuagcaucuucuc

SEQ ID NO: 639348 - RNA, 22 nt, Human
caccaggaugggcagguagguc

SEQ ID NO: 639349 - RNA, 22 nt, Human
cuuagcaagaaucagcugcugg

SEQ ID NO: 639350 - RNA, 22 nt, Human
cuuccucucuugcccauaagag

SEQ ID NO: 639351 - RNA, 19 nt, Human
aucauugaucuucaccccu

SEQ ID NO: 639352 - RNA, 22 nt, Human
cugagaggugacagcgugcugg

SEQ ID NO: 639353 - RNA, 22 nt, Human
cuuuucacaggaggauaagccc

SEQ ID NO: 639354 - RNA, 22 nt, Human
cuggcagcuuccuuugcaucug

SEQ ID NO: 639355 - RNA, 22 nt, Human
ccuuccuggagcccaugcagau

SEQ ID NO: 639356 - RNA, 22 nt, Human
uagaucauggaguaaaauggaa

SEQ ID NO: 639357 - RNA, 22 nt, Human
caguuuaaguagaacugagaau

SEQ ID NO: 639358 - RNA, 22 nt, Human
uuuaaccaguuuacaaagaauu

SEQ ID NO: 639359 - RNA, 22 nt, Human
aaugaaacuauauuuagagagg

SEQ ID NO: 639360 - RNA, 22 nt, Human
aagacugugucuauggcuacuc

SEQ ID NO: 639361 - RNA, 22 nt, Human
ugcagugugcuagauuuggacu

SEQ ID NO: 639362 - RNA, 22 nt, Human
uggcuaggcuccaagagcugga

SEQ ID NO: 639363 - RNA, 22 nt, Human
uauugcauccccauugugcccc

SEQ ID NO: 639364 - RNA, 22 nt, Human
acagacaguaaauaguguggcu

SEQ ID NO: 639365 - RNA, 22 nt, Human
cagcuuuauugagguauaauug

SEQ ID NO: 639366 - RNA, 22 nt, Human
aucacaggugguaggaaaagaa

SEQ ID NO: 639367 - RNA, 20 nt, Human
gcuuuuucuaauagcagucc

SEQ ID NO: 639368 - RNA, 22 nt, Human
uuccaaagcacuugauguaaag

SEQ ID NO: 639369 - RNA, 22 nt, Human
ugccauuugcugguuuucugau

SEQ ID NO: 639370 - RNA, 19 nt, Human
ucuccaaaaccaaucacua

SEQ ID NO: 639371 - RNA, 22 nt, Human
caucuguuuuugucaauuacau

SEQ ID NO: 639372 - RNA, 22 nt, Human
uaagacaugguugaucuagugu

SEQ ID NO: 639373 - RNA, 22 nt, Human
cacuauaucuguucuuguuuau

SEQ ID NO: 639374 - RNA, 22 nt, Human
ucacaauugagauccucccacc

SEQ ID NO: 639375 - RNA, 22 nt, Human
uccuggagaauggacaaugcac

SEQ ID NO: 639376 - RNA, 22 nt, Human
cacaguaugaucuaaaguaagu

SEQ ID NO: 639377 - RNA, 22 nt, Human
cagagccugcucacgucucugu

SEQ ID NO: 639378 - RNA, 22 nt, Human
uccugccuuagagcaaggaaaa

SEQ ID NO: 639379 - RNA, 22 nt, Human
cuccagcucuuaacugcggaag

SEQ ID NO: 639380 - RNA, 22 nt, Human
gccuccugcccagaugagugau

SEQ ID NO: 639381 - RNA, 23 nt, Human
uccucccugacuucuacagcaca

SEQ ID NO: 639382 - RNA, 22 nt, Human
uguacaguauauuucaaagcca

SEQ ID NO: 639383 - RNA, 22 nt, Human
ucuccuggagcaggaagguggg

SEQ ID NO: 639384 - RNA, 22 nt, Human
cugcaggguucggagaguuccc

SEQ ID NO: 639385 - RNA, 20 nt, Human
uggaguuguucugcuagguc

SEQ ID NO: 639386 - RNA, 22 nt, Human
gcagaggucucuucaaaauaau

SEQ ID NO: 639387 - RNA, 22 nt, Human
cugcagccuaggugcagcuggg

SEQ ID NO: 639388 - RNA, 22 nt, Human
guaugucaccucuccuaagcac

SEQ ID NO: 639389 - RNA, 22 nt, Human
ucuggggauggucuacuuucug

SEQ ID NO: 639390 - RNA, 22 nt, Human
ugagccguggucucugagggug

SEQ ID NO: 639391 - RNA, 22 nt, Human
gaaggaaaacagaucugccuga

SEQ ID NO: 639392 - RNA, 22 nt, Human
gaggccaugccuccugaucagu

SEQ ID NO: 639393 - RNA, 22 nt, Human
cccaggcuggaauuccaggccu

SEQ ID NO: 639394 - RNA, 22 nt, Human
uuucuaagacauuugucaucuu

SEQ ID NO: 639395 - RNA, 22 nt, Human
ugguucauagccucacaggaua

SEQ ID NO: 639396 - RNA, 22 nt, Human
aaggaucugacagacuauagaa

SEQ ID NO: 639397 - RNA, 22 nt, Human
aaggggauuuaagguaagaaga

SEQ ID NO: 639398 - RNA, 22 nt, Human
uacaacugugugaaggaaucug

SEQ ID NO: 639399 - RNA, 23 nt, Human
ucccucaggccuuaucuccaucu

SEQ ID NO: 639400 - RNA, 22 nt, Human
cugggcugucccaaccccaucc

SEQ ID NO: 639401 - RNA, 22 nt, Human
gaaguagcauguugcugccaga

SEQ ID NO: 639402 - RNA, 20 nt, Human
ugccugccccugcuuuuucc

SEQ ID NO: 639403 - RNA, 22 nt, Human
cuggcuggaggugagucacuga

SEQ ID NO: 639404 - RNA, 22 nt, Human
uguccaguccuuggggugcugu

SEQ ID NO: 639405 - RNA, 22 nt, Human
uccucuucugcccaucagaggc

SEQ ID NO: 639406 - RNA, 22 nt, Human
cagcugccccuccagggcuggg

SEQ ID NO: 639407 - RNA, 21 nt, Human
uuaaggucacuucugagccua

SEQ ID NO: 639408 - RNA, 22 nt, Human
ggcuggcuggaugaauggauua

SEQ ID NO: 639409 - RNA, 22 nt, Human
cauuuauucagcucagucgguu

SEQ ID NO: 639410 - RNA, 22 nt, Human
cucagcaguauacucugaagau

SEQ ID NO: 639411 - RNA, 22 nt, Human
auuauuuacagugugcucgaag

SEQ ID NO: 639412 - RNA, 22 nt, Human
gagaaugggaaugaaaguagca

SEQ ID NO: 639413 - RNA, 22 nt, Human
aggugauguccacagcuugcag

SEQ ID NO: 639414 - RNA, 22 nt, Human
aggcuggcugaaaaacacccuu

SEQ ID NO: 639415 - RNA, 22 nt, Human
uucauugaaccacuuuauucuu

SEQ ID NO: 639416 - RNA, 20 nt, Human
cucagcuaaacaacacugac

SEQ ID NO: 639417 - RNA, 22 nt, Human
uacauuguucaugcaugagaaa

SEQ ID NO: 639418 - RNA, 22 nt, Human
cugaggccagaacccgacccug

SEQ ID NO: 639419 - RNA, 22 nt, Human
uuauccaaacuggugaaucauu

SEQ ID NO: 639420 - RNA, 22 nt, Human
uuggccagacacuaccccccuu

SEQ ID NO: 639421 - RNA, 22 nt, Human
ugugcagaguaaggcagcuguu

SEQ ID NO: 639422 - RNA, 22 nt, Human
augucuucuguggagacaggua

SEQ ID NO: 639423 - RNA, 20 nt, Human
gggcuggcucaacuggaucc

SEQ ID NO: 639424 - RNA, 22 nt, Human
caugcuuugggucagaaaugcc

SEQ ID NO: 639425 - RNA, 23 nt, Human
caggcucccggaccaggauccgc

SEQ ID NO: 639426 - RNA, 22 nt, Human
cuucaagagaaugcagggaugu

SEQ ID NO: 639427 - RNA, 22 nt, Human
ucagaagguacagaagggaggu

SEQ ID NO: 639428 - RNA, 22 nt, Human
cuggagcagcagguggccaggg

SEQ ID NO: 639429 - RNA, 22 nt, Human
gcugccccccggacucggcggg

SEQ ID NO: 639430 - RNA, 19 nt, Human
uucuccaggcugcagaggg

SEQ ID NO: 639431 - RNA, 22 nt, Human
acagcaguggugcacugagcca

SEQ ID NO: 639432 - RNA, 22 nt, Human
gacccugaggauucccugcuga

SEQ ID NO: 639433 - RNA, 18 nt, Human
gcagagugcgucucugug

SEQ ID NO: 639434 - RNA, 22 nt, Human
accacccaccucacagcauagu

SEQ ID NO: 639435 - RNA, 22 nt, Human
cugcagagaugaagaagguggc

SEQ ID NO: 639436 - RNA, 22 nt, Human
gucuuuauauuuacuaaagaau

SEQ ID NO: 639437 - RNA, 22 nt, Human
ggguggcugagaacaggacccc

SEQ ID NO: 639438 - RNA, 22 nt, Human
gccuggaguggacuuggccccu

SEQ ID NO: 639439 - RNA, 22 nt, Human
cuuaaaggucauucuguugaua

SEQ ID NO: 639440 - RNA, 22 nt, Human
aucugacaaguuguguguauag

SEQ ID NO: 639441 - RNA, 22 nt, Human
uuuauucacucauucagccagu

SEQ ID NO: 639442 - RNA, 22 nt, Human
cacagaguggaggcuuggccug

SEQ ID NO: 639443 - RNA, 22 nt, Human
uccaggcaaagggacuagcagg

SEQ ID NO: 639444 - RNA, 22 nt, Human
ccaggcuguaaacaccuucaaa

SEQ ID NO: 639445 - RNA, 22 nt, Human
gcagaggugaguuucucagcug

SEQ ID NO: 639446 - RNA, 22 nt, Human
aaugaugguuucaucacuugaa

SEQ ID NO: 639447 - RNA, 22 nt, Human
cucucagcaggaaagcaugcaa

SEQ ID NO: 639448 - RNA, 22 nt, Human
cauagaggcuaaaauuauuugg

SEQ ID NO: 639449 - RNA, 22 nt, Human
gucccaggaacauucuggcuag

SEQ ID NO: 639450 - RNA, 22 nt, Human
aauacugaauuaguugagacaa

SEQ ID NO: 639451 - RNA, 22 nt, Human
uuuucaaagacuggaggcugau

SEQ ID NO: 639452 - RNA, 22 nt, Human
auagauccagaaaauuuauuau

SEQ ID NO: 639453 - RNA, 22 nt, Human
cuggcugcuggccugaggaugc

SEQ ID NO: 639454 - RNA, 16 nt, Human
gaucuguucuauuuca

SEQ ID NO: 639455 - RNA, 20 nt, Human
caccuggcugacugucucca

SEQ ID NO: 639456 - RNA, 22 nt, Human
gggcuucagcuggggauggagc

SEQ ID NO: 639457 - RNA, 22 nt, Human
caaaucuccuuaaagguaaaau

SEQ ID NO: 639458 - RNA, 22 nt, Human
cugagaucccaggcaggguggc

SEQ ID NO: 639459 - RNA, 22 nt, Human
ccugguucagucuuucuaugcu

SEQ ID NO: 639460 - RNA, 22 nt, Human
cuaaacaagggauuauaauuga

SEQ ID NO: 639461 - RNA, 22 nt, Human
acaguaauaaguguuggugagg

SEQ ID NO: 639462 - RNA, 22 nt, Human
aagacaauaauuuuugggcagg

SEQ ID NO: 639463 - RNA, 23 nt, Human
ugggagacuuuucauuuuguucu

SEQ ID NO: 639464 - RNA, 22 nt, Human
uugucccaggacuugcauagau

SEQ ID NO: 639465 - RNA, 22 nt, Human
ccuguuuaucuaucuagagaug

SEQ ID NO: 639466 - RNA, 22 nt, Human
cagaaugaguagcaucuucacc

SEQ ID NO: 639467 - RNA, 22 nt, Human
uguuuacauggagguuuucagc

SEQ ID NO: 639468 - RNA, 22 nt, Human
agcugcugaaugacacugcaag

SEQ ID NO: 639469 - RNA, 22 nt, Human
agcuccugcucuuugucccuaa

SEQ ID NO: 639470 - RNA, 22 nt, Human
cuuuagaauuugauauaaucaa

SEQ ID NO: 639471 - RNA, 22 nt, Human
acaacuuucuggguuaucugau

SEQ ID NO: 639472 - RNA, 22 nt, Human
cugaggcacagugaacuucucc

SEQ ID NO: 639473 - RNA, 22 nt, Human
gugcugagugcagagugcagag

SEQ ID NO: 639474 - RNA, 22 nt, Human
uugcuuuguuacugcaguuucc

SEQ ID NO: 639475 - RNA, 22 nt, Human
aaauagcagaagcagagggggu

SEQ ID NO: 639476 - RNA, 22 nt, Human
caguaugugaugcaacggaaua

SEQ ID NO: 639477 - RNA, 22 nt, Human
cugccuagauuugaauccuggc

SEQ ID NO: 639478 - RNA, 22 nt, Human
cuucuuggcugcaagucucugu

SEQ ID NO: 639479 - RNA, 22 nt, Human
agagaaugcagggcuucggaca

SEQ ID NO: 639480 - RNA, 22 nt, Human
uccaguccauggccucagucuu

SEQ ID NO: 639481 - RNA, 22 nt, Human
cuucaggauuaauuuggggccu

SEQ ID NO: 639482 - RNA, 22 nt, Human
uuggccucauggacagcucauc

SEQ ID NO: 639483 - RNA, 22 nt, Human
guuuagacuccuuggucuucug

SEQ ID NO: 639484 - RNA, 22 nt, Human
uccaggaguggggcagaggucu

SEQ ID NO: 639485 - RNA, 22 nt, Human
gccuuuaucaguuucauggcuu

SEQ ID NO: 639486 - RNA, 22 nt, Human
ugcuagaauuagguuaaacaaa

SEQ ID NO: 639487 - RNA, 22 nt, Human
aggcucaggaggagcugccgga

SEQ ID NO: 639488 - RNA, 22 nt, Human
uaaauaaguucuucauuguuug

SEQ ID NO: 639489 - RNA, 22 nt, Human
ugucacagagcaacuauuucuu

SEQ ID NO: 639490 - RNA, 22 nt, Human
caugcagcggcguuugguuuaa

SEQ ID NO: 639491 - RNA, 20 nt, Human
acacaugcauucaugugggc

SEQ ID NO: 639492 - RNA, 22 nt, Human
uucugcuguuuguaguaaugua

SEQ ID NO: 639493 - RNA, 22 nt, Human
ucaguuaagaggccacggcagu

SEQ ID NO: 639494 - RNA, 19 nt, Human
ggcaggcuggauagagagg

SEQ ID NO: 639495 - RNA, 22 nt, Human
aaagcacaggagaguucaguaa

SEQ ID NO: 639496 - RNA, 22 nt, Human
aggcuucaccugcaccugagcu

SEQ ID NO: 639497 - RNA, 22 nt, Human
aacaugauggggaagaacaaga

SEQ ID NO: 639498 - RNA, 17 nt, Human
ugcaugcgucugugaua

SEQ ID NO: 639499 - RNA, 22 nt, Human
ggaggaggcggcagaaguuccu

SEQ ID NO: 639500 - RNA, 22 nt, Human
aagcucagcaugucuccuagaa

SEQ ID NO: 639501 - RNA, 22 nt, Human
gagugcagaugaacagaagauu

SEQ ID NO: 639502 - RNA, 22 nt, Human
cuucacagaauaaacucauuau

SEQ ID NO: 639503 - RNA, 22 nt, Human
agugucuguugcuuuugcagug

SEQ ID NO: 639504 - RNA, 22 nt, Human
aucacauucuuucaaagcaguc

SEQ ID NO: 639505 - RNA, 22 nt, Human
ucucugggaauuuuuuggacau

SEQ ID NO: 639506 - RNA, 22 nt, Human
gaauaacauuggaacccugaag

SEQ ID NO: 639507 - RNA, 22 nt, Human
caaugcauacuucgaaauuuca

SEQ ID NO: 639508 - RNA, 22 nt, Human
gagcuugguguuauuucugugg

SEQ ID NO: 639509 - RNA, 22 nt, Human
ucuggagaaggaagagucuuug

SEQ ID NO: 639510 - RNA, 22 nt, Human
ugucucaguacacuccgauguu

SEQ ID NO: 639511 - RNA, 22 nt, Human
gguggccucugcaggccucgac

SEQ ID NO: 639512 - RNA, 22 nt, Human
ucucugugacugcagcuuugca

SEQ ID NO: 639513 - RNA, 22 nt, Human
acuacaaaagcacuggguauua

SEQ ID NO: 639514 - RNA, 22 nt, Human
cauggcagcuuugggaggagga

SEQ ID NO: 639515 - RNA, 22 nt, Human
ucacuuauaaaaugcaagaucu

SEQ ID NO: 639516 - RNA, 22 nt, Human
gaggaggcacuaguuagugaca

SEQ ID NO: 639517 - RNA, 22 nt, Human
aguuauuuacuccuuugucucu

SEQ ID NO: 639518 - RNA, 22 nt, Human
ggucuccauuccuucaucucac

SEQ ID NO: 639519 - RNA, 22 nt, Human
gcuccugucaucaaacaauccu

SEQ ID NO: 639520 - RNA, 22 nt, Human
gcauguggcccaaggaggcugu

SEQ ID NO: 639521 - RNA, 22 nt, Human
caguggccuugaugccucauuc

SEQ ID NO: 639522 - RNA, 22 nt, Human
uacugaaagaauacauaauuuc

SEQ ID NO: 639523 - RNA, 22 nt, Human
uggagcugauacagcuggcuuu

SEQ ID NO: 639524 - RNA, 22 nt, Human
ucauauaagagcuuuagaguca

SEQ ID NO: 639525 - RNA, 22 nt, Human
accaggaggccuggagcacaaa

SEQ ID NO: 639526 - RNA, 22 nt, Human
ggccagcucuuguccacggagg

SEQ ID NO: 639527 - RNA, 22 nt, Human
gccacuggcgcugugcagagug

SEQ ID NO: 639528 - RNA, 22 nt, Human
ucucugucccuaggagccuugc

SEQ ID NO: 639529 - RNA, 22 nt, Human
agccauuuugguaaugauaaca

SEQ ID NO: 639530 - RNA, 22 nt, Human
ccuggguagacuuugaagcauu

SEQ ID NO: 639531 - RNA, 22 nt, Human
agcacguucuucauuacuucac

SEQ ID NO: 639532 - RNA, 22 nt, Human
uacaaugcagugaccuccuuua

SEQ ID NO: 639533 - RNA, 22 nt, Human
agggcccaguggagagcugagc

SEQ ID NO: 639534 - RNA, 22 nt, Human
augaggccacaguuauagauuu

SEQ ID NO: 639535 - RNA, 22 nt, Human
uucucaggccuuugggauggga

SEQ ID NO: 639536 - RNA, 22 nt, Human
uggggcagcuccaucuauucca

SEQ ID NO: 639537 - RNA, 22 nt, Human
aaggcuuggaccagcuacagug

SEQ ID NO: 639538 - RNA, 22 nt, Human
uuaauauacaauuuuacgggcu

SEQ ID NO: 639539 - RNA, 22 nt, Human
gggggcgcacagucaccacaaa

SEQ ID NO: 639540 - RNA, 22 nt, Human
uuacuugaaaaccaccaguauu

SEQ ID NO: 639541 - RNA, 22 nt, Human
gaaauucaggacaaagacucuu

SEQ ID NO: 639542 - RNA, 22 nt, Human
cucucucuaugcguuguuccua

SEQ ID NO: 639543 - RNA, 22 nt, Human
gcagccacacuguuacagaaug

SEQ ID NO: 639544 - RNA, 22 nt, Human
ugcucugggcuaucugagaaag

SEQ ID NO: 639545 - RNA, 23 nt, Human
aggcgagcucuucuccagcacgu

SEQ ID NO: 639546 - RNA, 20 nt, Human
ugcaauguccauguuccagg

SEQ ID NO: 639547 - RNA, 22 nt, Human
uauugcuugggguacaagguau

SEQ ID NO: 639548 - RNA, 22 nt, Human
uuggccagguguccagcccagg

SEQ ID NO: 639549 - RNA, 22 nt, Human
gacauggauacuugauaagggg

SEQ ID NO: 639550 - RNA, 22 nt, Human
aguugucaccucuauucaaauc

SEQ ID NO: 639551 - RNA, 22 nt, Human
cucagaaguucagccuagagua

SEQ ID NO: 639552 - RNA, 19 nt, Human
acauugaauuuucuucuuu

SEQ ID NO: 639553 - RNA, 22 nt, Human
uauuagcagacaagcugcugga

SEQ ID NO: 639554 - RNA, 22 nt, Human
acauuuaguaugagucucugua

SEQ ID NO: 639555 - RNA, 22 nt, Human
cagucucuuuucagcuccaucc

SEQ ID NO: 639556 - RNA, 22 nt, Human
agcaauaacagaaaacuuuccu

SEQ ID NO: 639557 - RNA, 21 nt, Human
aguguccuuuuacugugaaua

SEQ ID NO: 639558 - RNA, 21 nt, Human
agagggagaguggcccuucca

SEQ ID NO: 639559 - RNA, 22 nt, Human
ugccugcccugaaaacugccca

SEQ ID NO: 639560 - RNA, 22 nt, Human
ggugcccagcgaaguggcugug

SEQ ID NO: 639561 - RNA, 22 nt, Human
ccucccacauugaggacaugcu

SEQ ID NO: 639562 - RNA, 22 nt, Human
auggcugugcagagauugggaa

SEQ ID NO: 639563 - RNA, 17 nt, Human
caaaccaguaagacugc

SEQ ID NO: 639564 - RNA, 22 nt, Human
aagaaccuauaugcugaugaau

SEQ ID NO: 639565 - RNA, 22 nt, Human
agaaaugcauuagcacauauag

SEQ ID NO: 639566 - RNA, 22 nt, Human
uccuggagcuuccuucauggua

SEQ ID NO: 639567 - RNA, 22 nt, Human
aggagcacugagccagcauggg

SEQ ID NO: 639568 - RNA, 22 nt, Human
uagaaaugugauaauagcuuaa

SEQ ID NO: 639569 - RNA, 22 nt, Human
uacugcauguguuugaugaugg

SEQ ID NO: 639570 - RNA, 22 nt, Human
ugccccucuaggcccuguucua

SEQ ID NO: 639571 - RNA, 22 nt, Human
uugacucuaaauuuacuuuucc

SEQ ID NO: 639572 - RNA, 22 nt, Human
ucaggaggccaccaggaccugu

SEQ ID NO: 639573 - RNA, 22 nt, Human
uauugcuuugugucauaagcaa

SEQ ID NO: 639574 - RNA, 21 nt, Human
acaggagaccgccuggcaguc

SEQ ID NO: 639575 - RNA, 22 nt, Human
agucucuuuguggacucugccu

SEQ ID NO: 639576 - RNA, 22 nt, Human
cugagaaaugcauuuuuccagc

SEQ ID NO: 639577 - RNA, 22 nt, Human
uccagcauuuuucaauagaauu

SEQ ID NO: 639578 - RNA, 22 nt, Human
ugggaccugaagcagguuggca

SEQ ID NO: 639579 - RNA, 22 nt, Human
uguggcaggaugcggaagaugc

SEQ ID NO: 639580 - RNA, 22 nt, Human
cucugcagaggcccaaggcuga

SEQ ID NO: 639581 - RNA, 19 nt, Human
agcaaauauaauaguguuc

SEQ ID NO: 639582 - RNA, 19 nt, Human
uagcucugucuuauuccaa

SEQ ID NO: 639583 - RNA, 22 nt, Human
aaacugcaauuacuuuugcagc

SEQ ID NO: 639584 - RNA, 22 nt, Human
agggaggagaauggacuccuuc

SEQ ID NO: 639585 - RNA, 22 nt, Human
caguaaaugguacguauauuuu

SEQ ID NO: 639586 - RNA, 21 nt, Human
gcucuccagggccagcccagg

SEQ ID NO: 639587 - RNA, 22 nt, Human
ugcagguggcagcggggcacca

SEQ ID NO: 639588 - RNA, 22 nt, Human
aaccauuugccauuaucuuaag

SEQ ID NO: 639589 - RNA, 20 nt, Human
agccagaagaaggcuggaga

SEQ ID NO: 639590 - RNA, 22 nt, Human
ggccacucggccaccccugccg

SEQ ID NO: 639591 - RNA, 22 nt, Human
gcuggccaggugcuuugguucu

SEQ ID NO: 639592 - RNA, 22 nt, Human
cuuuccugccuuauucauucau

SEQ ID NO: 639593 - RNA, 22 nt, Human
ggaggugaggccguagggugug

SEQ ID NO: 639594 - RNA, 22 nt, Human
uuggaagguucuggucaugguu

SEQ ID NO: 639595 - RNA, 22 nt, Human
ucugggagccugaaagugaaug

SEQ ID NO: 639596 - RNA, 22 nt, Human
ccguguguaugguggaacugcu

SEQ ID NO: 639597 - RNA, 22 nt, Human
cagggcccagucccugcuguca

SEQ ID NO: 639598 - RNA, 22 nt, Human
aaacaguuucauuuucaugacc

SEQ ID NO: 639599 - RNA, 19 nt, Human
cuuuucaagccaucaguuu

SEQ ID NO: 639600 - RNA, 22 nt, Human
acugcuuacccggccugacuuc

SEQ ID NO: 639601 - RNA, 22 nt, Human
cugggccuggacgggcagaucu

SEQ ID NO: 639602 - RNA, 22 nt, Human
uuugcaguguucaucaguauuu

SEQ ID NO: 639603 - RNA, 22 nt, Human
ccguuaaucccauaauauggau

SEQ ID NO: 639604 - RNA, 22 nt, Human
cauacuuacuguguaccaggug

SEQ ID NO: 639605 - RNA, 22 nt, Human
cugaaagcauuaacuccacuuc

SEQ ID NO: 639606 - RNA, 22 nt, Human
ugcacacauguauguauaugug

SEQ ID NO: 639607 - RNA, 22 nt, Human
gauaaacuggaaccauugccuc

SEQ ID NO: 639608 - RNA, 21 nt, Human
agcagccauggaugguaugua

SEQ ID NO: 639609 - RNA, 22 nt, Human
cacagugucugugcuucagugu

SEQ ID NO: 639610 - RNA, 22 nt, Human
acuuuguuuccauauuuguagc

SEQ ID NO: 639611 - RNA, 22 nt, Human
ggcaggugaccuggccucccag

SEQ ID NO: 639612 - RNA, 22 nt, Human
gcuucuggugaggccucaggaa

SEQ ID NO: 639613 - RNA, 22 nt, Human
uuucuguagugugguauguagg

SEQ ID NO: 639614 - RNA, 15 nt, Human
agcugccugggugcu

SEQ ID NO: 639615 - RNA, 18 nt, Human
ugagaggcuauuuuuugc

SEQ ID NO: 639616 - RNA, 16 nt, Human
uggcugagagaggguu

SEQ ID NO: 639617 - RNA, 22 nt, Human
uuuucuaaaauauccaggacag

SEQ ID NO: 639618 - RNA, 22 nt, Human
gaaucuuauuuuuaaaucuucc

SEQ ID NO: 639619 - RNA, 22 nt, Human
cagccucuuuccacaucaggca

SEQ ID NO: 639620 - RNA, 22 nt, Human
uauaaacuccucuugcauuccu

SEQ ID NO: 639621 - RNA, 22 nt, Human
ggccugcuauuggugggcagac

SEQ ID NO: 639622 - RNA, 22 nt, Human
ucagucuauccagcucagaucc

SEQ ID NO: 639623 - RNA, 22 nt, Human
uagcuuuaggaugguucucuug

SEQ ID NO: 639624 - RNA, 22 nt, Human
gaucgaguuguuuguucugggg

SEQ ID NO: 639625 - RNA, 22 nt, Human
uauuucacucaguauaccauag

SEQ ID NO: 639626 - RNA, 22 nt, Human
aagaugguuauuucaucaccua

SEQ ID NO: 639627 - RNA, 22 nt, Human
aggugcacugucuaauuagguc

SEQ ID NO: 639628 - RNA, 22 nt, Human
cagcagugugcaggugugcugg

SEQ ID NO: 639629 - RNA, 23 nt, Human
cacaccaggagccgucugggcca

SEQ ID NO: 639630 - RNA, 22 nt, Human
ucuuuguacuuucuggcugucc

SEQ ID NO: 639631 - RNA, 22 nt, Human
agauuggaucaagcagcaguug

SEQ ID NO: 639632 - RNA, 22 nt, Human
ugcauauacccgcauuuacaua

SEQ ID NO: 639633 - RNA, 22 nt, Human
uaggaaauuagaacuuggaaac

SEQ ID NO: 639634 - RNA, 22 nt, Human
agugcuuuagagaaauggugcu

SEQ ID NO: 639635 - RNA, 22 nt, Human
uguggcugcaaaggaaggcugc

SEQ ID NO: 639636 - RNA, 22 nt, Human
auuauucaaauucccacuauac

SEQ ID NO: 639637 - RNA, 22 nt, Human
gcugccuuccaaagaguuuuau

SEQ ID NO: 639638 - RNA, 22 nt, Human
aaacuucuggcuacaagcaaua

SEQ ID NO: 639639 - RNA, 22 nt, Human
gcugggcaaugccagagaggag

SEQ ID NO: 639640 - RNA, 22 nt, Human
cauggcccucuucuggagcaau

SEQ ID NO: 639641 - RNA, 22 nt, Human
uaaggccaggcuguggucggca

SEQ ID NO: 639642 - RNA, 22 nt, Human
agcccugcaggaugagggaggu

SEQ ID NO: 639643 - RNA, 22 nt, Human
ccauaagguugaaaacuguaca

SEQ ID NO: 639644 - RNA, 22 nt, Human
agagaguucuuucuaguugaag

SEQ ID NO: 639645 - RNA, 22 nt, Human
gugugagaagggaauguaaagc

SEQ ID NO: 639646 - RNA, 22 nt, Human
gcuggcccagcgcccagggcag

SEQ ID NO: 639647 - RNA, 22 nt, Human
aguguguaauucagugcccagc

SEQ ID NO: 639648 - RNA, 22 nt, Human
aggccuuccucggagacaggga

SEQ ID NO: 639649 - RNA, 22 nt, Human
gguuugcauucugaaaggcuca

SEQ ID NO: 639650 - RNA, 22 nt, Human
aacuuuacacugcuuuacauga

SEQ ID NO: 639651 - RNA, 22 nt, Human
ggagccagaggcugcugcugug

SEQ ID NO: 639652 - RNA, 22 nt, Human
acaacuguuagacacuucuaag

SEQ ID NO: 639653 - RNA, 22 nt, Human
caaggccaugagcagcgagugu

SEQ ID NO: 639654 - RNA, 22 nt, Human
uuggccaaaggaaagacuacug

SEQ ID NO: 639655 - RNA, 23 nt, Human
agcauggaauaggaaagaggcag

SEQ ID NO: 639656 - RNA, 22 nt, Human
cucagcucugacaggaggcauc

SEQ ID NO: 639657 - RNA, 22 nt, Human
cagugcccaagaugugccaugc

SEQ ID NO: 639658 - RNA, 22 nt, Human
uuggaacuuaacccugauaggu

SEQ ID NO: 639659 - RNA, 22 nt, Human
agcuccagcccuaguacagcug

SEQ ID NO: 639660 - RNA, 22 nt, Human
gugggcagacagugcuuugcag

SEQ ID NO: 639661 - RNA, 22 nt, Human
aguacacuaugguaacuggagu

SEQ ID NO: 639662 - RNA, 22 nt, Human
gggauggcucaaaggagucagg

SEQ ID NO: 639663 - RNA, 22 nt, Human
agaguccaugaagacagcugag

SEQ ID NO: 639664 - RNA, 22 nt, Human
agagacuguacguggcaaguau

SEQ ID NO: 639665 - RNA, 22 nt, Human
agcagggcucuguggagggugg

SEQ ID NO: 639666 - RNA, 22 nt, Human
uggaagaauauggggguacaga

SEQ ID NO: 639667 - RNA, 22 nt, Human
aacugcuuguagugacuugccu

SEQ ID NO: 639668 - RNA, 22 nt, Human
auggcuuuguguucagagcuga

SEQ ID NO: 639669 - RNA, 22 nt, Human
uagcaucucaaccuccugaaag

SEQ ID NO: 639670 - RNA, 22 nt, Human
cacagcagaacuuaauuucaaa

SEQ ID NO: 639671 - RNA, 22 nt, Human
ucagggcagguuaacuugggug

SEQ ID NO: 639672 - RNA, 22 nt, Human
uucuuugaaauacuguuuugcc

SEQ ID NO: 639673 - RNA, 22 nt, Human
cuaucaaacagccauuaauaua

SEQ ID NO: 639674 - RNA, 22 nt, Human
gaacaaacacaucccagcagug

SEQ ID NO: 639675 - RNA, 22 nt, Human
guggagugcaacgguuggaguu

SEQ ID NO: 639676 - RNA, 22 nt, Human
uucauuugucugcuauagaucc

SEQ ID NO: 639677 - RNA, 23 nt, Human
guuccuucauguggucauugguu

SEQ ID NO: 639678 - RNA, 22 nt, Human
guggcccugucccaggccuccu

SEQ ID NO: 639679 - RNA, 22 nt, Human
cagcaauaagccagguuagaca

SEQ ID NO: 639680 - RNA, 22 nt, Human
agagcacaggcucuggagucua

SEQ ID NO: 639681 - RNA, 21 nt, Human
uuacuuuugcaccaaccuaau

SEQ ID NO: 639682 - RNA, 22 nt, Human
aacuccagguccuuugaaucug

SEQ ID NO: 639683 - RNA, 22 nt, Human
ugguuuugcuccaguauaaaua

SEQ ID NO: 639684 - RNA, 22 nt, Human
gucagaggaggcugaguaggaa

SEQ ID NO: 639685 - RNA, 22 nt, Human
acaugaaacccagccguggucc

SEQ ID NO: 639686 - RNA, 22 nt, Human
caguaacaugucuguuaagaaa

SEQ ID NO: 639687 - RNA, 23 nt, Human
ucaaaggaggcaucguucugcag

SEQ ID NO: 639688 - RNA, 22 nt, Human
uguggagaugugagcaagggga

SEQ ID NO: 639689 - RNA, 22 nt, Human
agaaaacauuacauaggugugu

SEQ ID NO: 639690 - RNA, 22 nt, Human
gcuaggaggcccugcacgcuua

SEQ ID NO: 639691 - RNA, 22 nt, Human
auuugcugagcucaaagaaaag

SEQ ID NO: 639692 - RNA, 22 nt, Human
gggcuggaucuccugcaggcag

SEQ ID NO: 639693 - RNA, 22 nt, Human
cagguccugccuugguuacccu

SEQ ID NO: 639694 - RNA, 22 nt, Human
gcucagaggaugcuccuuuaug

SEQ ID NO: 639695 - RNA, 22 nt, Human
ggcugccucuggaagcuggaga

SEQ ID NO: 639696 - RNA, 22 nt, Human
uuuuaguuacugcaguagcaaa

SEQ ID NO: 639697 - RNA, 22 nt, Human
cuggcuuuucaaacuguucagu

SEQ ID NO: 639698 - RNA, 22 nt, Human
gggugggguguaucggauccua

SEQ ID NO: 639699 - RNA, 22 nt, Human
caccugaagauuuagagauuga

SEQ ID NO: 639700 - RNA, 22 nt, Human
aaauagaauuggaagcagaguu

SEQ ID NO: 639701 - RNA, 22 nt, Human
gccugagggcuccuagcaggcu

SEQ ID NO: 639702 - RNA, 22 nt, Human
uagaaagaacuucauguaaaac

SEQ ID NO: 639703 - RNA, 22 nt, Human
ucaauuacuaaccaaauaaugu

SEQ ID NO: 639704 - RNA, 22 nt, Human
ggcugcagagcuggugcccugg

SEQ ID NO: 639705 - RNA, 22 nt, Human
aagaggaggauugaugugggag

SEQ ID NO: 639706 - RNA, 22 nt, Human
auaagcagggucaaaugccuac

SEQ ID NO: 639707 - RNA, 22 nt, Human
ucccugugggaugaggacucug

SEQ ID NO: 639708 - RNA, 22 nt, Human
cugggccuagcaacagaggagu

SEQ ID NO: 639709 - RNA, 22 nt, Human
cagggacccuacuagcucacac

SEQ ID NO: 639710 - RNA, 22 nt, Human
augcuguggaugccuugcccca

SEQ ID NO: 639711 - RNA, 22 nt, Human
aacucacacaaguauugccugc

SEQ ID NO: 639712 - RNA, 22 nt, Human
agguggagaucagggacuaagg

SEQ ID NO: 639713 - RNA, 22 nt, Human
acagaaauuagcagugaguuua

SEQ ID NO: 639714 - RNA, 22 nt, Human
guuucuuaaauguagcaggacc

SEQ ID NO: 639715 - RNA, 20 nt, Human
ggaccagcugucugaggggc

SEQ ID NO: 639716 - RNA, 22 nt, Human
accaggaggccuugguucugag

SEQ ID NO: 639717 - RNA, 22 nt, Human
agcugaggaggaaugaugggua

SEQ ID NO: 639718 - RNA, 22 nt, Human
aaggaagagcaaagaauuaugu

SEQ ID NO: 639719 - RNA, 22 nt, Human
caacauauuuuccaagagugaa

SEQ ID NO: 639720 - RNA, 22 nt, Human
gcuucuggaagcauaugcaaga

SEQ ID NO: 639721 - RNA, 22 nt, Human
aggaguguugcuucagggaagc

SEQ ID NO: 639722 - RNA, 22 nt, Human
ugaggccagaguuuuuaauucc

SEQ ID NO: 639723 - RNA, 22 nt, Human
ugggccuccugcccuggccuag

SEQ ID NO: 639724 - RNA, 22 nt, Human
agcuuugggcagaagaggauuc

SEQ ID NO: 639725 - RNA, 22 nt, Human
aaaggagagugagucagaugcc

SEQ ID NO: 639726 - RNA, 19 nt, Human
ucaguggagaaaggggaag

SEQ ID NO: 639727 - RNA, 22 nt, Human
ggagguagucugagucauaggc

SEQ ID NO: 639728 - RNA, 22 nt, Human
aggcuccaugcuaagcgauaug

SEQ ID NO: 639729 - RNA, 22 nt, Human
uuugcaaacuuuccucuggacc

SEQ ID NO: 639730 - RNA, 22 nt, Human
gaggaggguuggccuuagguag

SEQ ID NO: 639731 - RNA, 18 nt, Human
ggccagcuccugaggcag

SEQ ID NO: 639732 - RNA, 22 nt, Human
ucagcagaguggaacauuguca

SEQ ID NO: 639733 - RNA, 22 nt, Human
gcugcuguccuucaagucugcg

SEQ ID NO: 639734 - RNA, 22 nt, Human
acuguaaccaguguggugagag

SEQ ID NO: 639735 - RNA, 22 nt, Human
uaauuauaacaguuacaucuua

SEQ ID NO: 639736 - RNA, 22 nt, Human
ccuggcucugagguaugccugg

SEQ ID NO: 639737 - RNA, 22 nt, Human
ggagccugacagugcccagcau

SEQ ID NO: 639738 - RNA, 22 nt, Human
auggagcuaaauuguaaucaua

SEQ ID NO: 639739 - RNA, 22 nt, Human
uacaguucuuugaaggaucuag

SEQ ID NO: 639740 - RNA, 22 nt, Human
uucucaggccccugccuggacu

SEQ ID NO: 639741 - RNA, 22 nt, Human
aaaucguuauaauguuaagccu

SEQ ID NO: 639742 - RNA, 22 nt, Human
uggcauguggcuuugagucauc

SEQ ID NO: 639743 - RNA, 22 nt, Human
uaacuguauuuuaggucucauu

SEQ ID NO: 639744 - RNA, 23 nt, Human
ggggacagagggcagcccgcauc

SEQ ID NO: 639745 - RNA, 22 nt, Human
cugcagcaucgccaccugccuc

SEQ ID NO: 639746 - RNA, 22 nt, Human
uagaguguccaacacauaggag

SEQ ID NO: 639747 - RNA, 22 nt, Human
uauuucucuucaaaauugaugu

SEQ ID NO: 639748 - RNA, 22 nt, Human
ugcaauaucagauucaacacau

SEQ ID NO: 639749 - RNA, 22 nt, Human
acaguguguccuaaaggucugg

SEQ ID NO: 639750 - RNA, 22 nt, Human
gcuuccccuccaagcacugccu

SEQ ID NO: 639751 - RNA, 22 nt, Human
uggagagaugucuguucaaggu

SEQ ID NO: 639752 - RNA, 21 nt, Human
ugguggagugugcugagcaug

SEQ ID NO: 639753 - RNA, 22 nt, Human
ugcuucaaguugaaauauucuu

SEQ ID NO: 639754 - RNA, 22 nt, Human
cugccugcgccaccaccacguc

SEQ ID NO: 639755 - RNA, 22 nt, Human
guggaaggugaaggagcagcga

SEQ ID NO: 639756 - RNA, 22 nt, Human
gccacagcccgagcaccaugag

SEQ ID NO: 639757 - RNA, 22 nt, Human
aaucauguccaucuuaacuuuc

SEQ ID NO: 639758 - RNA, 22 nt, Human
ugagcaucuuuuuacagguuua

SEQ ID NO: 639759 - RNA, 22 nt, Human
ccagcuaggcuugcacucuugu

SEQ ID NO: 639760 - RNA, 22 nt, Human
uuacacauuaacaggcagcuaa

SEQ ID NO: 639761 - RNA, 22 nt, Human
caggcucccuaagucagcagcc

SEQ ID NO: 639762 - RNA, 22 nt, Human
agagccacugggagacagagca

SEQ ID NO: 639763 - RNA, 22 nt, Human
acacauuagugcucugucucau

SEQ ID NO: 639764 - RNA, 22 nt, Human
uagauaaaagggcaaagggcau

SEQ ID NO: 639765 - RNA, 22 nt, Human
uggaucugcucuaugaacugcu

SEQ ID NO: 639766 - RNA, 22 nt, Human
gcagucaucaguccuuuaauua

SEQ ID NO: 639767 - RNA, 21 nt, Human
aacugcaaaugaugcuggaga

SEQ ID NO: 639768 - RNA, 22 nt, Human
ucuggguuugaaguagagccca

SEQ ID NO: 639769 - RNA, 22 nt, Human
acaaaacaguguuccugccccu

SEQ ID NO: 639770 - RNA, 22 nt, Human
ucuaggagaaccaucagggagg

SEQ ID NO: 639771 - RNA, 22 nt, Human
agaagcugacagaugcagcagg

SEQ ID NO: 639772 - RNA, 20 nt, Human
aguuauaguaucuagccaug

SEQ ID NO: 639773 - RNA, 22 nt, Human
agucccagugagaugaaccagg

SEQ ID NO: 639774 - RNA, 22 nt, Human
uccacaugaccauugugcuccu

SEQ ID NO: 639775 - RNA, 22 nt, Human
gcuccaguggacugggggaggc

SEQ ID NO: 639776 - RNA, 22 nt, Human
ugaguucucacccauucuucuu

SEQ ID NO: 639777 - RNA, 22 nt, Human
ugcuguguggaugugaagaauc

SEQ ID NO: 639778 - RNA, 22 nt, Human
auuugcaauuacucaugucauu

SEQ ID NO: 639779 - RNA, 22 nt, Human
ggcugcugaguuggccaggaga

SEQ ID NO: 639780 - RNA, 22 nt, Human
acauucauugagcaacaacaau

SEQ ID NO: 639781 - RNA, 17 nt, Human
aggaaacauuuucuuuc

SEQ ID NO: 639782 - RNA, 21 nt, Human
aaaugaaugugguagugcaag

SEQ ID NO: 639783 - RNA, 22 nt, Human
accugggaggcagagguugcag

SEQ ID NO: 639784 - RNA, 22 nt, Human
uuugucauguuuuguaaugucu

SEQ ID NO: 639785 - RNA, 19 nt, Human
uucagcauuauauucuagc

SEQ ID NO: 639786 - RNA, 22 nt, Human
aggccugaggaccagauaaaug

SEQ ID NO: 639787 - RNA, 22 nt, Human
ugcaacauuauuaaacuaagca

SEQ ID NO: 639788 - RNA, 22 nt, Human
ugaagcagagugaaggugaauu

SEQ ID NO: 639789 - RNA, 22 nt, Human
gaggcagcucuucugaaugggg

SEQ ID NO: 639790 - RNA, 23 nt, Human
acuugauuauuguugauagauuc

SEQ ID NO: 639791 - RNA, 22 nt, Human
ucaggcagaccaccgugggcag

SEQ ID NO: 639792 - RNA, 22 nt, Human
caaggugaacuugcuguacagc

SEQ ID NO: 639793 - RNA, 22 nt, Human
caggccaggcugcauuugcccc

SEQ ID NO: 639794 - RNA, 22 nt, Human
aauuccaggguuagcucauuug

SEQ ID NO: 639795 - RNA, 22 nt, Human
agccagcuguguggucaggcaa

SEQ ID NO: 639796 - RNA, 22 nt, Human
ugcuuuauggagcccaucucau

SEQ ID NO: 639797 - RNA, 18 nt, Human
uaugagaagauuagcaau

SEQ ID NO: 639798 - RNA, 22 nt, Human
gcugaggagcgagaacucugcu

SEQ ID NO: 639799 - RNA, 22 nt, Human
agcuguggaagacugucagggu

SEQ ID NO: 639800 - RNA, 22 nt, Human
cuacucugaauugaagugauau

SEQ ID NO: 639801 - RNA, 22 nt, Human
augcuguguuuuaaauggaaau

SEQ ID NO: 639802 - RNA, 22 nt, Human
cgcuggggcuuuuugcuugaga

SEQ ID NO: 639803 - RNA, 23 nt, Human
uauuuggaaagagggaagaagac

SEQ ID NO: 639804 - RNA, 22 nt, Human
uuccaaagugcuggaauuacau

SEQ ID NO: 639805 - RNA, 18 nt, Human
ugagagugugugcucuug

SEQ ID NO: 639806 - RNA, 22 nt, Human
cccaggcuccugacucauucua

SEQ ID NO: 639807 - RNA, 22 nt, Human
augaaaugauugaaaucuuuac

SEQ ID NO: 639808 - RNA, 22 nt, Human
cauauuuaguguuuggagaucg

SEQ ID NO: 639809 - RNA, 22 nt, Human
uaauguuuuucucaacauugcu

SEQ ID NO: 639810 - RNA, 22 nt, Human
cagacuguagaguuugagaagu

SEQ ID NO: 639811 - RNA, 22 nt, Human
agcugcccuguggggaggguug

SEQ ID NO: 639812 - RNA, 22 nt, Human
caucacaggcauuuugaguguc

SEQ ID NO: 639813 - RNA, 22 nt, Human
aaggcaugauguaaucaaugau

SEQ ID NO: 639814 - RNA, 22 nt, Human
ugauuuuauuggugaggaaauu

SEQ ID NO: 639815 - RNA, 22 nt, Human
guacacauacuauucaaagaga

SEQ ID NO: 639816 - RNA, 19 nt, Human
uacuuauuagaaauauggg

SEQ ID NO: 639817 - RNA, 22 nt, Human
acagaauugauggaaaucucag

SEQ ID NO: 639818 - RNA, 22 nt, Human
aguaaauuucugcauguguacu

SEQ ID NO: 639819 - RNA, 22 nt, Human
aucacauuacaaaggacuccag

SEQ ID NO: 639820 - RNA, 22 nt, Human
cugggcacacucugcuccagcu

SEQ ID NO: 639821 - RNA, 22 nt, Human
gggaucugcuccagagggaaaa

SEQ ID NO: 639822 - RNA, 22 nt, Human
agacauauauugcaauucacug

SEQ ID NO: 639823 - RNA, 22 nt, Human
agcugugggauuugggugugcc

SEQ ID NO: 639824 - RNA, 19 nt, Human
agugaaauggaguauucaa

SEQ ID NO: 639825 - RNA, 22 nt, Human
ucagagccaaucauggugcauu

SEQ ID NO: 639826 - RNA, 22 nt, Human
uuuaauuguuguggguacauag

SEQ ID NO: 639827 - RNA, 22 nt, Human
uguugauuaguguuuagacuua

SEQ ID NO: 639828 - RNA, 22 nt, Human
auguuucugaguguauauacau

SEQ ID NO: 639829 - RNA, 22 nt, Human
gauccagcuucuacacagagcu

SEQ ID NO: 639830 - RNA, 22 nt, Human
aacuccucucuggugguucguc

SEQ ID NO: 639831 - RNA, 22 nt, Human
ggaaagggaguuuugcuuauga

SEQ ID NO: 639832 - RNA, 21 nt, Human
acugggcuagccugacuucug

SEQ ID NO: 639833 - RNA, 22 nt, Human
ucaugcuuaaaagacacuugag

SEQ ID NO: 639834 - RNA, 22 nt, Human
ucugggaguaaggccuaggcau

SEQ ID NO: 639835 - RNA, 22 nt, Human
ucugagccccuagaacugagcg

SEQ ID NO: 639836 - RNA, 22 nt, Human
aagaguuucugggucaaggauu

SEQ ID NO: 639837 - RNA, 22 nt, Human
uuauuccaaaucaugguugcau

SEQ ID NO: 639838 - RNA, 20 nt, Human
ucucaguuucuagagucagg

SEQ ID NO: 639839 - RNA, 22 nt, Human
ucuuucuguaagcuccauggaa

SEQ ID NO: 639840 - RNA, 22 nt, Human
gugggagcccucagggaggugc

SEQ ID NO: 639841 - RNA, 20 nt, Human
auucugcuuucugauagagc

SEQ ID NO: 639842 - RNA, 22 nt, Human
gagaggaauaucauuauauuag

SEQ ID NO: 639843 - RNA, 22 nt, Human
uuuguacauauaaaucuuguau

SEQ ID NO: 639844 - RNA, 22 nt, Human
guggggcugaguggagccagaa

SEQ ID NO: 639845 - RNA, 22 nt, Human
ggaggugacgaaaagaaauugu

SEQ ID NO: 639846 - RNA, 22 nt, Human
acagcagcugccuucaggcucu

SEQ ID NO: 639847 - RNA, 22 nt, Human
aaauguauccuacuuccugagu

SEQ ID NO: 639848 - RNA, 22 nt, Human
gcagcccucggguacucacgug

SEQ ID NO: 639849 - RNA, 22 nt, Human
ugucccagauacuggacauaga

SEQ ID NO: 639850 - RNA, 22 nt, Human
cuugcugggguaagucugugcu

SEQ ID NO: 639851 - RNA, 22 nt, Human
uggcucuuuucacguccccucu

SEQ ID NO: 639852 - RNA, 22 nt, Human
ucucucuucaacccuuaacuag

SEQ ID NO: 639853 - RNA, 22 nt, Human
aagacaauuuauguuaggguca

SEQ ID NO: 639854 - RNA, 22 nt, Human
ucagcaguagagggggcacagu

SEQ ID NO: 639855 - RNA, 22 nt, Human
caggaacuggaacccuggccga

SEQ ID NO: 639856 - RNA, 22 nt, Human
aaguggaagagaaguuaucuua

SEQ ID NO: 639857 - RNA, 22 nt, Human
uucucacaggauuucuuuuagu

SEQ ID NO: 639858 - RNA, 22 nt, Human
ucacugucuuuuaaggugguua

SEQ ID NO: 639859 - RNA, 22 nt, Human
gcugugcagucuuuggugugcc

SEQ ID NO: 639860 - RNA, 22 nt, Human
uccagucacuucauuuuacaga

SEQ ID NO: 639861 - RNA, 22 nt, Human
uggauaaacucacuguaaguug

SEQ ID NO: 639862 - RNA, 22 nt, Human
uacaaagcaaaucaucuaagag

SEQ ID NO: 639863 - RNA, 22 nt, Human
ugaugcuguuccaguuauauug

SEQ ID NO: 639864 - RNA, 22 nt, Human
ugcacacacggagauaggcuuu

SEQ ID NO: 639865 - RNA, 22 nt, Human
gcagcacauauaaacaaagaga

SEQ ID NO: 639866 - RNA, 22 nt, Human
ggcucuggaauguguagucagg

SEQ ID NO: 639867 - RNA, 19 nt, Human
ggacacagaaagcugcauu

SEQ ID NO: 639868 - RNA, 21 nt, Human
uagagccagugguguucugac

SEQ ID NO: 639869 - RNA, 22 nt, Human
gaagagcugcaguuuccugggc

SEQ ID NO: 639870 - RNA, 22 nt, Human
augugucuugagggggauggag

SEQ ID NO: 639871 - RNA, 22 nt, Human
auuagaagaggcugacgaaugu

SEQ ID NO: 639872 - RNA, 22 nt, Human
caaaagucuguccuuuaacuuc

SEQ ID NO: 639873 - RNA, 22 nt, Human
cagaggcuuauaccugauuagg

SEQ ID NO: 639874 - RNA, 22 nt, Human
ugccuagaacuuuauucuuuau

SEQ ID NO: 639875 - RNA, 22 nt, Human
acuccuggguugcaguccucaa

SEQ ID NO: 639876 - RNA, 22 nt, Human
guggcuuggaccagucacagug

SEQ ID NO: 639877 - RNA, 22 nt, Human
agcccuccaaagguugggggag

SEQ ID NO: 639878 - RNA, 22 nt, Human
cccaaguauuccuccucugccc

SEQ ID NO: 639879 - RNA, 22 nt, Human
augcacaagaggcuagaaaaga

SEQ ID NO: 639880 - RNA, 22 nt, Human
gcaggcaguuauuuaguagaau

SEQ ID NO: 639881 - RNA, 22 nt, Human
acugagcaaugcagugggagcg

SEQ ID NO: 639882 - RNA, 22 nt, Human
aacccauuaauccuugcaagca

SEQ ID NO: 639883 - RNA, 22 nt, Human
augucuguggcauuauauguuu

SEQ ID NO: 639884 - RNA, 22 nt, Human
aggaaagaaguacauucucaug

SEQ ID NO: 639885 - RNA, 21 nt, Human
ccagggauguugaacugaaag

SEQ ID NO: 639886 - RNA, 22 nt, Human
gccuaauaacuagcuguguaac

SEQ ID NO: 639887 - RNA, 23 nt, Human
auuuacagcugugugagcaaguu

SEQ ID NO: 639888 - RNA, 23 nt, Human
uuucagcauucuaguucagguuc

SEQ ID NO: 639889 - RNA, 22 nt, Human
uagaacuaaagaacaacuuuga

SEQ ID NO: 639890 - RNA, 21 nt, Human
uuucagaccuaucuuugaagg

SEQ ID NO: 639891 - RNA, 22 nt, Human
cacagaggcaugacccugcccu

SEQ ID NO: 639892 - RNA, 22 nt, Human
ucacaugcucaccuaagccaca

SEQ ID NO: 639893 - RNA, 22 nt, Human
aggucaagaguaaauuugggua

SEQ ID NO: 639894 - RNA, 22 nt, Human
caucuaauaccucauuuaaucu

SEQ ID NO: 639895 - RNA, 22 nt, Human
gcuuugcacagugcuguguuaa

SEQ ID NO: 639896 - RNA, 22 nt, Human
cgcgcugcagacagcggaggcc

SEQ ID NO: 639897 - RNA, 22 nt, Human
acucuucaugcuaugcucaacu

SEQ ID NO: 639898 - RNA, 22 nt, Human
uucugcucuuggcuuugcuggu

SEQ ID NO: 639899 - RNA, 22 nt, Human
agggucucugggaguagggcac

SEQ ID NO: 639900 - RNA, 22 nt, Human
ucuguguauaggguugugcgcu

SEQ ID NO: 639901 - RNA, 22 nt, Human
agaggccuuucuguugagugaa

SEQ ID NO: 639902 - RNA, 22 nt, Human
ggaagaagggucauuggcagcc

SEQ ID NO: 639903 - RNA, 22 nt, Human
caguuaccagaucgcaggaggu

SEQ ID NO: 639904 - RNA, 22 nt, Human
aucaugacauacuuuugagaag

SEQ ID NO: 639905 - RNA, 22 nt, Human
cagcaauaaugucuacaaaucu

SEQ ID NO: 639906 - RNA, 22 nt, Human
caacagaagguguacuacugaa

SEQ ID NO: 639907 - RNA, 22 nt, Human
cauuuacauaacaguaacgcug

SEQ ID NO: 639908 - RNA, 19 nt, Human
ucagucuaggaaugagcua

SEQ ID NO: 639909 - RNA, 22 nt, Human
cuacaaugacagaauugaguag

SEQ ID NO: 639910 - RNA, 22 nt, Human
aggagccaaacauauugagaga

SEQ ID NO: 639911 - RNA, 22 nt, Human
cuucauuaacuauuggaaugca

SEQ ID NO: 639912 - RNA, 22 nt, Human
aaaucaacuugugacguuaggu

SEQ ID NO: 639913 - RNA, 22 nt, Human
agcugccuguaaaaugugugau

SEQ ID NO: 639914 - RNA, 22 nt, Human
ucugagaagcgggagccuguga

SEQ ID NO: 639915 - RNA, 22 nt, Human
ggcuguggcagcuggaaguggu

SEQ ID NO: 639916 - RNA, 22 nt, Human
aaaugcaauuguauguacucca

SEQ ID NO: 639917 - RNA, 22 nt, Human
ccagagcuaaacacacaggcug

SEQ ID NO: 639918 - RNA, 22 nt, Human
gacacagcuuucugaagagcau

SEQ ID NO: 639919 - RNA, 22 nt, Human
ucccaagcaaugagucagggcc

SEQ ID NO: 639920 - RNA, 22 nt, Human
gaguagcauucuagaguaugcu

SEQ ID NO: 639921 - RNA, 22 nt, Human
uacacauauguguguauaugug

SEQ ID NO: 639922 - RNA, 22 nt, Human
uaggaaguagauagguuguucu

SEQ ID NO: 639923 - RNA, 22 nt, Human
caggucucccauccccucuguu

SEQ ID NO: 639924 - RNA, 22 nt, Human
gcacuucaccacuguccugguu

SEQ ID NO: 639925 - RNA, 22 nt, Human
ugacuccaaacagaaaacgaau

SEQ ID NO: 639926 - RNA, 22 nt, Human
aagaaaaucaguucuggucagu

SEQ ID NO: 639927 - RNA, 22 nt, Human
auguagcugcagaugauaaugc

SEQ ID NO: 639928 - RNA, 22 nt, Human
agcacagaaugagguggaagug

SEQ ID NO: 639929 - RNA, 22 nt, Human
aucaagagaaggggaagaugaa

SEQ ID NO: 639930 - RNA, 22 nt, Human
ucugggagaagcugaugugaag

SEQ ID NO: 639931 - RNA, 22 nt, Human
acuuguguuaccaagguuuggu

SEQ ID NO: 639932 - RNA, 22 nt, Human
uuucacauguggaaugccaggu

SEQ ID NO: 639933 - RNA, 22 nt, Human
uagcacaaguaucugcuuuucc

SEQ ID NO: 639934 - RNA, 22 nt, Human
agggccugucuguagaacugaa

SEQ ID NO: 639935 - RNA, 22 nt, Human
uggcagagguauauugggagga

SEQ ID NO: 639936 - RNA, 22 nt, Human
ugaacaguuucaagaaaacuuu

SEQ ID NO: 639937 - RNA, 22 nt, Human
ucacucucuaagcaugacagac

SEQ ID NO: 639938 - RNA, 22 nt, Human
aagcagcauccugggcagaccu

SEQ ID NO: 639939 - RNA, 22 nt, Human
gucugcuuuuguuuuacuggua

SEQ ID NO: 639940 - RNA, 22 nt, Human
auguuaaauaaucccuuaaagc

SEQ ID NO: 639941 - RNA, 22 nt, Human
gagcuggccucaggcacaggag

SEQ ID NO: 639942 - RNA, 22 nt, Human
cuccaggcuggggugcagguug

SEQ ID NO: 639943 - RNA, 23 nt, Human
uugauuucaaaugcagagaacac

SEQ ID NO: 639944 - RNA, 22 nt, Human
aagcagcacagcaaugacucua

SEQ ID NO: 639945 - RNA, 22 nt, Human
ggcauccaaauaccaagaugua

SEQ ID NO: 639946 - RNA, 22 nt, Human
uucauugauuccaggcucuucu

SEQ ID NO: 639947 - RNA, 22 nt, Human
cugccuggggaaugugaggauu

SEQ ID NO: 639948 - RNA, 22 nt, Human
ucagaggucacacagcaaguuu

SEQ ID NO: 639949 - RNA, 22 nt, Human
ggccccagguagaagauauaga

SEQ ID NO: 639950 - RNA, 21 nt, Human
uagguauuucuaucaugucuc

SEQ ID NO: 639951 - RNA, 17 nt, Human
aagacccuagucuaccc

SEQ ID NO: 639952 - RNA, 22 nt, Human
ggucuucaggucuaguugguau

SEQ ID NO: 639953 - RNA, 22 nt, Human
cagcuugaaauauuaggagaug

SEQ ID NO: 639954 - RNA, 22 nt, Human
gaggagacauauuuuugaagca

SEQ ID NO: 639955 - RNA, 22 nt, Human
cugaagaaauaugauugcuuaa

SEQ ID NO: 639956 - RNA, 23 nt, Human
uccuucagagccucccuccaagc

SEQ ID NO: 639957 - RNA, 22 nt, Human
cuuccuggcaugggucucauga

SEQ ID NO: 639958 - RNA, 22 nt, Human
cuuuacacaaugauuuucuuua

SEQ ID NO: 639959 - RNA, 22 nt, Human
ucagaaaccccaacaauggaga

SEQ ID NO: 639960 - RNA, 22 nt, Human
gucuggagccacugcugcugcu

SEQ ID NO: 639961 - RNA, 22 nt, Human
uggcuucugucccugcuacauu

SEQ ID NO: 639962 - RNA, 22 nt, Human
gcuguaugugaggccacaguga

SEQ ID NO: 639963 - RNA, 22 nt, Human
aaacucuaguuaugaaguuugu

SEQ ID NO: 639964 - RNA, 22 nt, Human
ugggccacgucaucucccacaa

SEQ ID NO: 639965 - RNA, 23 nt, Human
auuucuaggggauuuucuggugc

SEQ ID NO: 639966 - RNA, 22 nt, Human
guuagaccauagaaagagcauc

SEQ ID NO: 639967 - RNA, 22 nt, Human
cugagguccuugacugcuugcc

SEQ ID NO: 639968 - RNA, 22 nt, Human
uccugaauuucccagcaugaac

SEQ ID NO: 639969 - RNA, 18 nt, Human
guccacagauucuucacu

SEQ ID NO: 639970 - RNA, 22 nt, Human
ggaagaaagacauuuauuuuga

SEQ ID NO: 639971 - RNA, 22 nt, Human
acauuucuggaguuucucaaca

SEQ ID NO: 639972 - RNA, 17 nt, Human
caucuuuaaaauccuga

SEQ ID NO: 639973 - RNA, 22 nt, Human
uucaaugcauauagauauagaa

SEQ ID NO: 639974 - RNA, 22 nt, Human
cacaggcucuucucacuugauu

SEQ ID NO: 639975 - RNA, 22 nt, Human
caggcagcguccugcuuccugu

SEQ ID NO: 639976 - RNA, 22 nt, Human
ggaaacugcuuacacuagaggg

SEQ ID NO: 639977 - RNA, 22 nt, Human
ggcuggcauccagggaaaucca

SEQ ID NO: 639978 - RNA, 22 nt, Human
augaucagggcagaagcagaag

SEQ ID NO: 639979 - RNA, 22 nt, Human
cuccuucaaaagucauaguaaa

SEQ ID NO: 639980 - RNA, 22 nt, Human
gcagccucagggcacucagaug

SEQ ID NO: 639981 - RNA, 22 nt, Human
uuucagaccugcugugcuaucu

SEQ ID NO: 639982 - RNA, 22 nt, Human
ggcucuggguaaggcguuugac

SEQ ID NO: 639983 - RNA, 22 nt, Human
agauccaggguuggauuugcau

SEQ ID NO: 639984 - RNA, 22 nt, Human
gagcucaguguagucauggcuu

SEQ ID NO: 639985 - RNA, 22 nt, Human
aaaacacaagaagcaggguaca

SEQ ID NO: 639986 - RNA, 22 nt, Human
cugcuaaaccucucugagagcu

SEQ ID NO: 639987 - RNA, 22 nt, Human
uuaagagggugaugcuagcauu

SEQ ID NO: 639988 - RNA, 22 nt, Human
cagcagcuaaggcauguuccug

SEQ ID NO: 639989 - RNA, 22 nt, Human
ugaaacugaaagguauuuauag

SEQ ID NO: 639990 - RNA, 22 nt, Human
uccaucaggcucgugggcucuc

SEQ ID NO: 639991 - RNA, 22 nt, Human
ccuucagucccauguuucucuu

SEQ ID NO: 639992 - RNA, 22 nt, Human
ucuagggaacaugggucaagcu

SEQ ID NO: 639993 - RNA, 22 nt, Human
agcagggccucuggcacugguc

SEQ ID NO: 639994 - RNA, 22 nt, Human
uucaggaagguccuauagcaga

SEQ ID NO: 639995 - RNA, 22 nt, Human
agaggccacaccagccucccgu

SEQ ID NO: 639996 - RNA, 22 nt, Human
gacuguuagaauguaaaauaua

SEQ ID NO: 639997 - RNA, 22 nt, Human
cagugacguaaacugcaugugc

SEQ ID NO: 639998 - RNA, 22 nt, Human
uugcaaaaacugcaauuacuuu

SEQ ID NO: 639999 - RNA, 22 nt, Human
aagcucucuguccccuggacug

SEQ ID NO: 640000 - RNA, 22 nt, Human
uuccuggggcgacuguaucuga

SEQ ID NO: 640001 - RNA, 22 nt, Human
gcugaggaggugugguuaggug

SEQ ID NO: 640002 - RNA, 22 nt, Human
acuuggaaagaugcaacacagu

SEQ ID NO: 640003 - RNA, 17 nt, Human
uguucucuucagaaauc

SEQ ID NO: 640004 - RNA, 22 nt, Human
cacaguggaaguccaggauccc

SEQ ID NO: 640005 - RNA, 21 nt, Human
uccugccuuaguccagagcag

SEQ ID NO: 640006 - RNA, 22 nt, Human
ggaaggcagugaaggggcugau

SEQ ID NO: 640007 - RNA, 22 nt, Human
augaggcagcugcuggagaacg

SEQ ID NO: 640008 - RNA, 22 nt, Human
aaauugcuggauccuacuccca

SEQ ID NO: 640009 - RNA, 22 nt, Human
gaggcugcaggcaaugcugccc

SEQ ID NO: 640010 - RNA, 22 nt, Human
cuggggcugcgguggaggagcc

SEQ ID NO: 640011 - RNA, 22 nt, Human
cuuucuuuguccaccaacaaug

SEQ ID NO: 640012 - RNA, 19 nt, Human
ucucacaucagcuccuagc

SEQ ID NO: 640013 - RNA, 20 nt, Human
ccuucagaacuuacauagua

SEQ ID NO: 640014 - RNA, 22 nt, Human
auacuuuuaauuccuucugagu

SEQ ID NO: 640015 - RNA, 22 nt, Human
aggcuaggaaucaagccuuucu

SEQ ID NO: 640016 - RNA, 23 nt, Human
ugcaggacuacucgagcacugcu

SEQ ID NO: 640017 - RNA, 22 nt, Human
cacaugaucacuucuugaaaau

SEQ ID NO: 640018 - RNA, 22 nt, Human
gccaguguuuauagcagugagg

SEQ ID NO: 640019 - RNA, 22 nt, Human
ccuuuacaguaugguuguauca

SEQ ID NO: 640020 - RNA, 22 nt, Human
uccucuucaaaaggauuuccuu

SEQ ID NO: 640021 - RNA, 19 nt, Human
aacauggaacuggagaggg

SEQ ID NO: 640022 - RNA, 21 nt, Human
uggcacugcuuagcagguucc

SEQ ID NO: 640023 - RNA, 22 nt, Human
agaucacagagccaagauucca

SEQ ID NO: 640024 - RNA, 22 nt, Human
auuuggaacuuauaauaaguuu

SEQ ID NO: 640025 - RNA, 22 nt, Human
ccagcucucaaggcucccuggg

SEQ ID NO: 640026 - RNA, 22 nt, Human
gggaagaguaacuagcccaugu

SEQ ID NO: 640027 - RNA, 22 nt, Human
ggucccaggauugguugcgcag

SEQ ID NO: 640028 - RNA, 22 nt, Human
auuuguacaaauuuauguuagu

SEQ ID NO: 640029 - RNA, 22 nt, Human
uaaccugcaacagaucugucuu

SEQ ID NO: 640030 - RNA, 22 nt, Human
uuuugugagaugcguaugaaug

SEQ ID NO: 640031 - RNA, 22 nt, Human
uacaugcuuccaacugccccau

SEQ ID NO: 640032 - RNA, 22 nt, Human
gacagcuggcaguggaaaggug

SEQ ID NO: 640033 - RNA, 22 nt, Human
acaguggggucuuaauagaaca

SEQ ID NO: 640034 - RNA, 22 nt, Human
uugcagaacuuaaagacagagu

SEQ ID NO: 640035 - RNA, 20 nt, Human
cccaggcagagcuagcggca

SEQ ID NO: 640036 - RNA, 22 nt, Human
cugggcugcaucaaagaggcau

SEQ ID NO: 640037 - RNA, 22 nt, Human
aggcgcugcgcuggggccagaa

SEQ ID NO: 640038 - RNA, 21 nt, Human
uggcagagugcagucuauaca

SEQ ID NO: 640039 - RNA, 22 nt, Human
cugacccauauaagaguggagg

SEQ ID NO: 640040 - RNA, 22 nt, Human
gagucuuugguaaagucugcug

SEQ ID NO: 640041 - RNA, 22 nt, Human
agaauacaucuagugcugcaug

SEQ ID NO: 640042 - RNA, 22 nt, Human
ucucacagcaucauugcucaug

SEQ ID NO: 640043 - RNA, 22 nt, Human
ggggcucacaccucccuaaggg

SEQ ID NO: 640044 - RNA, 22 nt, Human
cuaauuuaaugaaugagucuua

SEQ ID NO: 640045 - RNA, 22 nt, Human
uaugacauugcuuuuuagaacu

SEQ ID NO: 640046 - RNA, 22 nt, Human
ucacacacauggauaguauuuu

SEQ ID NO: 640047 - RNA, 22 nt, Human
ugcuucugaaguggaugggugc

SEQ ID NO: 640048 - RNA, 22 nt, Human
ucccuggggcaguggcucggag

SEQ ID NO: 640049 - RNA, 20 nt, Human
cguccccuugagcagguccc

SEQ ID NO: 640050 - RNA, 22 nt, Human
gagcaacaguuuaugguuuuuc

SEQ ID NO: 640051 - RNA, 22 nt, Human
ugggacagugugccuugcuccu

SEQ ID NO: 640052 - RNA, 22 nt, Human
uggcaacaccuggaagacaugg

SEQ ID NO: 640053 - RNA, 22 nt, Human
gucugccuggaggcagcugcug

SEQ ID NO: 640054 - RNA, 22 nt, Human
ggacacaagcuccggggcugca

SEQ ID NO: 640055 - RNA, 20 nt, Human
cuacuuuaggcacugagaau

SEQ ID NO: 640056 - RNA, 22 nt, Human
agucuucacucuucacuacuau

SEQ ID NO: 640057 - RNA, 22 nt, Human
ucccucugguccucgguggaga

SEQ ID NO: 640058 - RNA, 22 nt, Human
uaguggggccugggaggguucc

SEQ ID NO: 640059 - RNA, 23 nt, Human
aacugcaagguugcugggaagua

SEQ ID NO: 640060 - RNA, 22 nt, Human
cagauauaguggcuugccuggg

SEQ ID NO: 640061 - RNA, 22 nt, Human
aggacuaauuucaggggauaua

SEQ ID NO: 640062 - RNA, 23 nt, Human
auucagaauuguguguuuguaua

SEQ ID NO: 640063 - RNA, 22 nt, Human
cuggcagcuggaggcuagaggc

SEQ ID NO: 640064 - RNA, 22 nt, Human
ugcuuucaaaggcuuucuagau

SEQ ID NO: 640065 - RNA, 22 nt, Human
uguguguuaacuuauuuaaugu

SEQ ID NO: 640066 - RNA, 22 nt, Human
uuuauugaguaucuacuaugug

SEQ ID NO: 640067 - RNA, 17 nt, Human
ccuguguuugcuccuuc

SEQ ID NO: 640068 - RNA, 22 nt, Human
uucuggaaccaacaugccaguu

SEQ ID NO: 640069 - RNA, 22 nt, Human
agccagggcugcgagcagacag

SEQ ID NO: 640070 - RNA, 22 nt, Human
uaaagcauguuucaguaagguu

SEQ ID NO: 640071 - RNA, 23 nt, Human
cagaaagcccuuuccccacagua

SEQ ID NO: 640072 - RNA, 22 nt, Human
aaaagagucuuaggcagucaua

SEQ ID NO: 640073 - RNA, 22 nt, Human
uggcauguucucuuagcagcuc

SEQ ID NO: 640074 - RNA, 21 nt, Human
ccugagggugguugugaagau

SEQ ID NO: 640075 - RNA, 22 nt, Human
uuacaguaauguauuauuuaac

SEQ ID NO: 640076 - RNA, 22 nt, Human
aucaguuuaaaugggcuguugg

SEQ ID NO: 640077 - RNA, 22 nt, Human
ccuggacuuucaggacuacugu

SEQ ID NO: 640078 - RNA, 22 nt, Human
uucaguuggccauaccccuaga

SEQ ID NO: 640079 - RNA, 22 nt, Human
cuuuuacacucaucugggaggg

SEQ ID NO: 640080 - RNA, 22 nt, Human
uugaggucuugaguacugggga

SEQ ID NO: 640081 - RNA, 22 nt, Human
cugcugggggacacagguccgg

SEQ ID NO: 640082 - RNA, 22 nt, Human
caggcugaggguuaggccuuag

SEQ ID NO: 640083 - RNA, 22 nt, Human
gcccaggacucagggugucgcg

SEQ ID NO: 640084 - RNA, 17 nt, Human
cagggcugucugccuag

SEQ ID NO: 640085 - RNA, 22 nt, Human
uuacuguuuugguaccucauug

SEQ ID NO: 640086 - RNA, 22 nt, Human
agauggagaaugacaauuaagg

SEQ ID NO: 640087 - RNA, 22 nt, Human
uuuacuguucaacuugcaagua

SEQ ID NO: 640088 - RNA, 22 nt, Human
uaauacacugcuuuuuguaacu

SEQ ID NO: 640089 - RNA, 22 nt, Human
guucacauccuugugaggauuu

SEQ ID NO: 640090 - RNA, 22 nt, Human
gaaguagauucguugcaucuug

SEQ ID NO: 640091 - RNA, 22 nt, Human
aggcucagcugguggugaucgc

SEQ ID NO: 640092 - RNA, 22 nt, Human
agagacugauggaucaccaaau

SEQ ID NO: 640093 - RNA, 22 nt, Human
auccugggaagcugacauugaa

SEQ ID NO: 640094 - RNA, 22 nt, Human
uccauguggccagacacuggca

SEQ ID NO: 640095 - RNA, 22 nt, Human
cacagagauuagaauuagacua

SEQ ID NO: 640096 - RNA, 22 nt, Human
uggcucagcgguggcagcagac

SEQ ID NO: 640097 - RNA, 22 nt, Human
ggccaugccaggcugccuggga

SEQ ID NO: 640098 - RNA, 22 nt, Human
aggcuagauagagggucaucuu

SEQ ID NO: 640099 - RNA, 23 nt, Human
uuauggagugccagacauuuggc

SEQ ID NO: 640100 - RNA, 22 nt, Human
uuuauuagauuaucaaagaggu

SEQ ID NO: 640101 - RNA, 22 nt, Human
acacagagcaaaucaugacaga

SEQ ID NO: 640102 - RNA, 16 nt, Human
uggcagagguucagcc

SEQ ID NO: 640103 - RNA, 22 nt, Human
cagacagagucuucccaucagu

SEQ ID NO: 640104 - RNA, 22 nt, Human
acagucucuccacacugcaggg

SEQ ID NO: 640105 - RNA, 22 nt, Human
agacagugagaaugaguugaaa

SEQ ID NO: 640106 - RNA, 20 nt, Human
cacugaagacuucuugcuca

SEQ ID NO: 640107 - RNA, 22 nt, Human
gggggcgggagacagcagugac

SEQ ID NO: 640108 - RNA, 21 nt, Human
acagaacuguauagugauaaa

SEQ ID NO: 640109 - RNA, 17 nt, Human
uggucauuuuaauuuua

SEQ ID NO: 640110 - RNA, 19 nt, Human
ggagccagcuguggaaggc

SEQ ID NO: 640111 - RNA, 22 nt, Human
aguacaaguagaaugcuacaag

SEQ ID NO: 640112 - RNA, 22 nt, Human
gcuccccauugaucugcaggcu

SEQ ID NO: 640113 - RNA, 19 nt, Human
agucucuucggaggagguu

SEQ ID NO: 640114 - RNA, 22 nt, Human
acguagcacugagagaugcagg

SEQ ID NO: 640115 - RNA, 22 nt, Human
uggcugagagaagacggggaag

SEQ ID NO: 640116 - RNA, 22 nt, Human
uagcagcaggggaaacagcugu

SEQ ID NO: 640117 - RNA, 22 nt, Human
auggaaagcuaagccauuuacc

SEQ ID NO: 640118 - RNA, 22 nt, Human
gggagaguagcuggaagguucu

SEQ ID NO: 640119 - RNA, 22 nt, Human
ccuuugguaacauuccaaccuu

SEQ ID NO: 640120 - RNA, 22 nt, Human
aucagagaccggucaagucaug

SEQ ID NO: 640121 - RNA, 23 nt, Human
aaacuucaguagugucaucagcc

SEQ ID NO: 640122 - RNA, 19 nt, Human
cagaacaggaccaggggcc

SEQ ID NO: 640123 - RNA, 22 nt, Human
cuguuuauucucaucuaaaaug

SEQ ID NO: 640124 - RNA, 22 nt, Human
uguauuuaguccagucucucau

SEQ ID NO: 640125 - RNA, 22 nt, Human
aagacugucuuuucugagugac

SEQ ID NO: 640126 - RNA, 22 nt, Human
acagcagcaauagcagugacau

SEQ ID NO: 640127 - RNA, 22 nt, Human
uuucaugagauuccuccacauc

SEQ ID NO: 640128 - RNA, 22 nt, Human
ggaggccaggugggagucaucu

SEQ ID NO: 640129 - RNA, 22 nt, Human
ccuggcagguggcgcccucggc

SEQ ID NO: 640130 - RNA, 22 nt, Human
agaggcaaguucagagcuagga

SEQ ID NO: 640131 - RNA, 22 nt, Human
ucaauagauaaagcuacauaaa

SEQ ID NO: 640132 - RNA, 22 nt, Human
gcagcuuuguaaaguaugaagc

SEQ ID NO: 640133 - RNA, 22 nt, Human
acucugagccaccagaucccca

SEQ ID NO: 640134 - RNA, 21 nt, Human
uagcaaagccagauguauauu

SEQ ID NO: 640135 - RNA, 22 nt, Human
uccuucagcugcuaggaaauga

SEQ ID NO: 640136 - RNA, 22 nt, Human
agagcuucacuggagagcacau

SEQ ID NO: 640137 - RNA, 22 nt, Human
guuccugaagggacuggugcag

SEQ ID NO: 640138 - RNA, 22 nt, Human
gaccauuuuuacagagcauuca

SEQ ID NO: 640139 - RNA, 22 nt, Human
uggguccuugccaucuuggagu

SEQ ID NO: 640140 - RNA, 22 nt, Human
gcccagcuccauucuuggugag

SEQ ID NO: 640141 - RNA, 22 nt, Human
ucugggugacccugggcaaggc

SEQ ID NO: 640142 - RNA, 22 nt, Human
cuuuuuguuguauaagcccuuu

SEQ ID NO: 640143 - RNA, 22 nt, Human
cagccaggcccagaucaugcug

SEQ ID NO: 640144 - RNA, 22 nt, Human
gccuaacuuggcuuuguucacc

SEQ ID NO: 640145 - RNA, 22 nt, Human
cagcaucaccgccauuucugau

SEQ ID NO: 640146 - RNA, 22 nt, Human
ccugggcugaagucaagugugg

SEQ ID NO: 640147 - RNA, 22 nt, Human
cccaagggguguugauggagga

SEQ ID NO: 640148 - RNA, 22 nt, Human
uuuucucuuguuaauguacuga

SEQ ID NO: 640149 - RNA, 22 nt, Human
ccucucuguagcagcccccagu

SEQ ID NO: 640150 - RNA, 22 nt, Human
agaugagaauuuuuagagugcu

SEQ ID NO: 640151 - RNA, 22 nt, Human
accaagcuagaacauuacaggc

SEQ ID NO: 640152 - RNA, 22 nt, Human
ugcacagaucugguggcaagga

SEQ ID NO: 640153 - RNA, 22 nt, Human
cacuggugccagagaacagaau

SEQ ID NO: 640154 - RNA, 22 nt, Human
augaccugaggccuuacucuag

SEQ ID NO: 640155 - RNA, 22 nt, Human
uauggcuuucaaaggaacucgg

SEQ ID NO: 640156 - RNA, 22 nt, Human
uuuaaaaucagaugggaguugg

SEQ ID NO: 640157 - RNA, 19 nt, Human
aauaagcuuggguaaaacu

SEQ ID NO: 640158 - RNA, 22 nt, Human
ugaaaugauaucugauaacaaa

SEQ ID NO: 640159 - RNA, 22 nt, Human
aagcauuugguucugaagacuc

SEQ ID NO: 640160 - RNA, 22 nt, Human
uuugggaaacuuaggggucaga

SEQ ID NO: 640161 - RNA, 22 nt, Human
agggccagcugcagaauuagca

SEQ ID NO: 640162 - RNA, 22 nt, Human
ugaugaaugucauacauaauga

SEQ ID NO: 640163 - RNA, 22 nt, Human
ucuggcccugcugcugugagca

SEQ ID NO: 640164 - RNA, 22 nt, Human
gcugcccugccucagacuccuc

SEQ ID NO: 640165 - RNA, 22 nt, Human
agagaaggguagcccauucucc

SEQ ID NO: 640166 - RNA, 22 nt, Human
cauaauuaaauucugggcaaga

SEQ ID NO: 640167 - RNA, 22 nt, Human
uaaccuacaugagaacuuuaaa

SEQ ID NO: 640168 - RNA, 22 nt, Human
ugaaaugauguacaagaaggca

SEQ ID NO: 640169 - RNA, 22 nt, Human
ucugggauaagaccacagauuu

SEQ ID NO: 640170 - RNA, 22 nt, Human
cugccauguuaccugcacaggu

SEQ ID NO: 640171 - RNA, 22 nt, Human
uuucucccuuuauaagacugua

SEQ ID NO: 640172 - RNA, 22 nt, Human
ucccagaaucuuuggaagagca

SEQ ID NO: 640173 - RNA, 22 nt, Human
uagcaucagccacaccuuguac

SEQ ID NO: 640174 - RNA, 22 nt, Human
acaucauuucuaguuccuguca

SEQ ID NO: 640175 - RNA, 22 nt, Human
agucacaguuccuacccaguaa

SEQ ID NO: 640176 - RNA, 22 nt, Human
ccagggcugagacuguauuggg

SEQ ID NO: 640177 - RNA, 22 nt, Human
agcagcagauuauggucuacau

SEQ ID NO: 640178 - RNA, 22 nt, Human
agagccaggcucccauggggca

SEQ ID NO: 640179 - RNA, 22 nt, Human
agugcuggaaagggacggagga

SEQ ID NO: 640180 - RNA, 22 nt, Human
uaauuuuaauaguauguggcau

SEQ ID NO: 640181 - RNA, 17 nt, Human
auuucacuuagcaugag

SEQ ID NO: 640182 - RNA, 22 nt, Human
aggcucagcccaagguggagag

SEQ ID NO: 640183 - RNA, 22 nt, Human
agaguguuucagucuuccuaga

SEQ ID NO: 640184 - RNA, 22 nt, Human
gacuuuaaaaguuugugcuugg

SEQ ID NO: 640185 - RNA, 20 nt, Human
aacauugcuucaauguaacc

SEQ ID NO: 640186 - RNA, 22 nt, Human
cuggagcagguuuaggaguccc

SEQ ID NO: 640187 - RNA, 22 nt, Human
uguuuugguuuucaccgagucc

SEQ ID NO: 640188 - RNA, 22 nt, Human
uuuauagucgucucaguaauaa

SEQ ID NO: 640189 - RNA, 22 nt, Human
cugggccagaccuuguggucuu

SEQ ID NO: 640190 - RNA, 22 nt, Human
uggcagcaguggagguagaaag

SEQ ID NO: 640191 - RNA, 22 nt, Human
acaggccuacgaagucaggugc

SEQ ID NO: 640192 - RNA, 22 nt, Human
agaugaauccacacauggcaaa

SEQ ID NO: 640193 - RNA, 22 nt, Human
augauucucugcuacucuaaau

SEQ ID NO: 640194 - RNA, 19 nt, Human
cagaguuacauggcugugg

SEQ ID NO: 640195 - RNA, 22 nt, Human
ugaagaaucccagggaauuugg

SEQ ID NO: 640196 - RNA, 19 nt, Human
ggacauuugaguuguuuau

SEQ ID NO: 640197 - RNA, 19 nt, Human
ugugugcccucaccacaua

SEQ ID NO: 640198 - RNA, 23 nt, Human
gcccauggagucuggaucuggcc

SEQ ID NO: 640199 - RNA, 22 nt, Human
ucccaguggugggugcacauuu

SEQ ID NO: 640200 - RNA, 22 nt, Human
agaucagaaagccaauaucaua

SEQ ID NO: 640201 - RNA, 22 nt, Human
aguuucucucaguauagaauag

SEQ ID NO: 640202 - RNA, 17 nt, Human
agcaccuguccaguccc

SEQ ID NO: 640203 - RNA, 22 nt, Human
auaugcuuccaaguuauuccac

SEQ ID NO: 640204 - RNA, 22 nt, Human
gagacaucauaaugaaguuucc

SEQ ID NO: 640205 - RNA, 18 nt, Human
agcugcuuuuggcuuaaa

SEQ ID NO: 640206 - RNA, 22 nt, Human
gggggagcuguuauuggcaggg

SEQ ID NO: 640207 - RNA, 22 nt, Human
uaugcauaauuggauaaguaga

SEQ ID NO: 640208 - RNA, 22 nt, Human
gcuguggcccuuggcaucugcg

SEQ ID NO: 640209 - RNA, 22 nt, Human
auaacagaguugggaagugaaa

SEQ ID NO: 640210 - RNA, 22 nt, Human
cuuuggcaacacaugugggaca

SEQ ID NO: 640211 - RNA, 21 nt, Human
ucauauuucucuugcuauugu

SEQ ID NO: 640212 - RNA, 22 nt, Human
ggcaaaguuuucaucucauaac

SEQ ID NO: 640213 - RNA, 22 nt, Human
gcuucccaaacuuguggauaga

SEQ ID NO: 640214 - RNA, 22 nt, Human
aggcuucauguagaugguuccc

SEQ ID NO: 640215 - RNA, 22 nt, Human
uguucaaaaauaucuucugcaa

SEQ ID NO: 640216 - RNA, 18 nt, Human
ucucaaaaauaauggcuu

SEQ ID NO: 640217 - RNA, 22 nt, Human
uuacaaugaugggauucagcca

SEQ ID NO: 640218 - RNA, 22 nt, Human
uagauugauugcaaagacaggc

SEQ ID NO: 640219 - RNA, 22 nt, Human
gaccaccagagguccgugggua

SEQ ID NO: 640220 - RNA, 20 nt, Human
uccaggcagacagcuauggg

SEQ ID NO: 640221 - RNA, 22 nt, Human
agcuggccggccuccaggugga

SEQ ID NO: 640222 - RNA, 22 nt, Human
ucugauauaaaagugacauuca

SEQ ID NO: 640223 - RNA, 22 nt, Human
uucuguggcaguuugggaggug

SEQ ID NO: 640224 - RNA, 22 nt, Human
caugcaucgaugaaugcguggg

SEQ ID NO: 640225 - RNA, 22 nt, Human
cagugcagguggcagaggacag

SEQ ID NO: 640226 - RNA, 22 nt, Human
aauagcauuuuuaagggaauca

SEQ ID NO: 640227 - RNA, 22 nt, Human
uuucacaggccuuuuguagccc

SEQ ID NO: 640228 - RNA, 22 nt, Human
uugucugaagucacacagaugc

SEQ ID NO: 640229 - RNA, 22 nt, Human
guccaaauuuuucacauguaga

SEQ ID NO: 640230 - RNA, 23 nt, Human
auauucacgccgccagagguccc

SEQ ID NO: 640231 - RNA, 22 nt, Human
ggcacugagcgggcucugagcg

SEQ ID NO: 640232 - RNA, 18 nt, Human
acagaacucaggggcacc

SEQ ID NO: 640233 - RNA, 22 nt, Human
agugcuggcccauagcugcugg

SEQ ID NO: 640234 - RNA, 22 nt, Human
ugcaauaacccaguaucuguga

SEQ ID NO: 640235 - RNA, 22 nt, Human
gaggcucaccuagggagcacug

SEQ ID NO: 640236 - RNA, 23 nt, Human
ucucagaaaggagaaguaauuug

SEQ ID NO: 640237 - RNA, 18 nt, Human
ggagagugacagagucgu

SEQ ID NO: 640238 - RNA, 22 nt, Human
gaggcugguaggaaaggaaaca

SEQ ID NO: 640239 - RNA, 21 nt, Human
uccuccuucaaguccuggccu

SEQ ID NO: 640240 - RNA, 22 nt, Human
uguuuauagauggccacaauga

SEQ ID NO: 640241 - RNA, 22 nt, Human
gagagugagauccuccugggga

SEQ ID NO: 640242 - RNA, 22 nt, Human
ucuuucuuauuaugcucaaugu

SEQ ID NO: 640243 - RNA, 17 nt, Human
ugugcauagaauaauga

SEQ ID NO: 640244 - RNA, 20 nt, Human
ucuuggagaggguggacuua

SEQ ID NO: 640245 - RNA, 22 nt, Human
uauccauaguuuauagaucaag

SEQ ID NO: 640246 - RNA, 22 nt, Human
ugcucagacuuaagaagaucag

SEQ ID NO: 640247 - RNA, 22 nt, Human
ugcacugauccugaccagugaa

SEQ ID NO: 640248 - RNA, 22 nt, Human
cagaugaacucuauccuguggc

SEQ ID NO: 640249 - RNA, 22 nt, Human
gcaguagugucaguacagcaaa

SEQ ID NO: 640250 - RNA, 22 nt, Human
agggacgccgugcgggaccgug

SEQ ID NO: 640251 - RNA, 22 nt, Human
gcuauuuauuaaaauagugaag

SEQ ID NO: 640252 - RNA, 22 nt, Human
ggccagcccagugguccucucu

SEQ ID NO: 640253 - RNA, 22 nt, Human
uugaaugaauaaaagaguaagg

SEQ ID NO: 640254 - RNA, 22 nt, Human
uaagcaaaggauuuugaucuuu

SEQ ID NO: 640255 - RNA, 23 nt, Human
acuuuagauaaauuaugugcaca

SEQ ID NO: 640256 - RNA, 21 nt, Human
ucucuguauccauggguucca

SEQ ID NO: 640257 - RNA, 22 nt, Human
augaaauuugcugcuaaguucc

SEQ ID NO: 640258 - RNA, 22 nt, Human
uaaggcagcugagcuucuaaca

SEQ ID NO: 640259 - RNA, 22 nt, Human
ccugggagccgacugacugugc

SEQ ID NO: 640260 - RNA, 17 nt, Human
ugcuccuguggcagccu

SEQ ID NO: 640261 - RNA, 22 nt, Human
ccucuguguccuggucauugaa

SEQ ID NO: 640262 - RNA, 22 nt, Human
cagcacuucagcauucagauuu

SEQ ID NO: 640263 - RNA, 22 nt, Human
uccugaauuguugagaagcagc

SEQ ID NO: 640264 - RNA, 22 nt, Human
agauuuguugugagcaggaaua

SEQ ID NO: 640265 - RNA, 22 nt, Human
uaaggcagguaugguaccaggc

SEQ ID NO: 640266 - RNA, 22 nt, Human
cuccaggagggcuuccugugau

SEQ ID NO: 640267 - RNA, 22 nt, Human
agaauacaauuguucaguaaua

SEQ ID NO: 640268 - RNA, 22 nt, Human
cugagaggcggagcuugcagug

SEQ ID NO: 640269 - RNA, 22 nt, Human
auugugaauugagaguacuucu

SEQ ID NO: 640270 - RNA, 22 nt, Human
ccaggccagcaggcacaccugc

SEQ ID NO: 640271 - RNA, 19 nt, Human
aucuuuggguccugaaggg

SEQ ID NO: 640272 - RNA, 22 nt, Human
cuggucaugccagguuugcugc

SEQ ID NO: 640273 - RNA, 22 nt, Human
cagcaggagcagucagacuccu

SEQ ID NO: 640274 - RNA, 22 nt, Human
gcugcagcuguaggacacaauu

SEQ ID NO: 640275 - RNA, 22 nt, Human
cugcaaaagucauugugguuuu

SEQ ID NO: 640276 - RNA, 22 nt, Human
uucuuuucaagaggggcaagga

SEQ ID NO: 640277 - RNA, 22 nt, Human
uaacaauaguguuugcuaguca

SEQ ID NO: 640278 - RNA, 22 nt, Human
ugcaguuuuggccauugaaggc

SEQ ID NO: 640279 - RNA, 22 nt, Human
auucaguguaguuauuaucuuu

SEQ ID NO: 640280 - RNA, 22 nt, Human
uucucuggcgguguguuuuccu

SEQ ID NO: 640281 - RNA, 22 nt, Human
cugucauuuucuuccaauauaa

SEQ ID NO: 640282 - RNA, 22 nt, Human
agucucagggccacccggggaa

SEQ ID NO: 640283 - RNA, 22 nt, Human
ccagugugcaaucucuggcuua

SEQ ID NO: 640284 - RNA, 22 nt, Human
uccugggagcccuugcuccacc

SEQ ID NO: 640285 - RNA, 22 nt, Human
agugauggcauauauagaugug

SEQ ID NO: 640286 - RNA, 22 nt, Human
aggaccugacauuguguuuucu

SEQ ID NO: 640287 - RNA, 22 nt, Human
agcaggcacaagaaagggaggu

SEQ ID NO: 640288 - RNA, 22 nt, Human
uuguacauuuguucaguucuga

SEQ ID NO: 640289 - RNA, 22 nt, Human
ugcacacacaggagucuccucc

SEQ ID NO: 640290 - RNA, 22 nt, Human
gcucaggccuggcuauccauug

SEQ ID NO: 640291 - RNA, 22 nt, Human
ugcaugcucaaguuaguuguga

SEQ ID NO: 640292 - RNA, 19 nt, Human
ccacagagcaugcugaggc

SEQ ID NO: 640293 - RNA, 22 nt, Human
gcaggucuagaagcugccucug

SEQ ID NO: 640294 - RNA, 22 nt, Human
cugccugcacugccuggcucca

SEQ ID NO: 640295 - RNA, 22 nt, Human
uaaaaagcagcugagauuuucu

SEQ ID NO: 640296 - RNA, 22 nt, Human
cuucuuuacuuucuagaaauaa

SEQ ID NO: 640297 - RNA, 22 nt, Human
acaacuuuaauggguuucagcu

SEQ ID NO: 640298 - RNA, 22 nt, Human
gagggggucuaugagguagagc

SEQ ID NO: 640299 - RNA, 22 nt, Human
auacauucaaaggaaggauaga

SEQ ID NO: 640300 - RNA, 22 nt, Human
aguuuuauguucacagaaggau

SEQ ID NO: 640301 - RNA, 22 nt, Human
uaacacugguuaucccugugca

SEQ ID NO: 640302 - RNA, 19 nt, Human
cugggccagaaucagcuca

SEQ ID NO: 640303 - RNA, 22 nt, Human
caguucugagcuuucccagaag

SEQ ID NO: 640304 - RNA, 22 nt, Human
aguguuucuggaaucaguguuu

SEQ ID NO: 640305 - RNA, 22 nt, Human
cauggcuuagaaguuccagccc

SEQ ID NO: 640306 - RNA, 22 nt, Human
auuuccaucaucauuaggccua

SEQ ID NO: 640307 - RNA, 22 nt, Human
uccagcugcugacccaguagcc

SEQ ID NO: 640308 - RNA, 22 nt, Human
guaggcagucucucaggugauc

SEQ ID NO: 640309 - RNA, 22 nt, Human
gacaggauguauuggcaagagg

SEQ ID NO: 640310 - RNA, 22 nt, Human
agucagugaaaacuagaauguu

SEQ ID NO: 640311 - RNA, 19 nt, Human
guucuuuucaccucugugc

SEQ ID NO: 640312 - RNA, 22 nt, Human
uggcccugacuuggaggccuga

SEQ ID NO: 640313 - RNA, 22 nt, Human
uuacaaagcguugagacaagua

SEQ ID NO: 640314 - RNA, 22 nt, Human
cggcuggaagcuggacaggccg

SEQ ID NO: 640315 - RNA, 22 nt, Human
ggcagcucaccucugguccagg

SEQ ID NO: 640316 - RNA, 22 nt, Human
agucagcuuggcuccucccaug

SEQ ID NO: 640317 - RNA, 21 nt, Human
aaccagagccaggcucucagc

SEQ ID NO: 640318 - RNA, 19 nt, Human
gcgaggaagucacuguggu

SEQ ID NO: 640319 - RNA, 22 nt, Human
ucauccaguaugacuggugucu

SEQ ID NO: 640320 - RNA, 22 nt, Human
ugguucauaauuugcacuacug

SEQ ID NO: 640321 - RNA, 23 nt, Human
acacaauagaguacuauucagcc

SEQ ID NO: 640322 - RNA, 21 nt, Human
auuuuguacauagaauuuguc

SEQ ID NO: 640323 - RNA, 22 nt, Human
acauccauguuguaauguuccu

SEQ ID NO: 640324 - RNA, 18 nt, Human
cauugacaguauaucuuu

SEQ ID NO: 640325 - RNA, 22 nt, Human
agcuuuauucaugauuucaggg

SEQ ID NO: 640326 - RNA, 22 nt, Human
caugaaauauuaguaacuguuu

SEQ ID NO: 640327 - RNA, 22 nt, Human
cccugccuucuuggccuuuaaa

SEQ ID NO: 640328 - RNA, 22 nt, Human
guauuacauuuaguaauuaggc

SEQ ID NO: 640329 - RNA, 21 nt, Human
uaucugcuuuuuaaggcucac

SEQ ID NO: 640330 - RNA, 22 nt, Human
accagcauugcuuuggguuaua

SEQ ID NO: 640331 - RNA, 22 nt, Human
aagcauucugcauuuucaaaga

SEQ ID NO: 640332 - RNA, 22 nt, Human
uacaagauaagaauuggcaagg

SEQ ID NO: 640333 - RNA, 22 nt, Human
uugauucuauguuguugucuca

SEQ ID NO: 640334 - RNA, 22 nt, Human
cagcccagcagucuuagccugc

SEQ ID NO: 640335 - RNA, 22 nt, Human
auuguaagagguuuggcugugu

SEQ ID NO: 640336 - RNA, 22 nt, Human
ugggcuggugagggaucauuua

SEQ ID NO: 640337 - RNA, 22 nt, Human
acaugaauauaugaaguucaac

SEQ ID NO: 640338 - RNA, 22 nt, Human
ucugaaggugcuagagaaagcu

SEQ ID NO: 640339 - RNA, 22 nt, Human
gcuuucugguuugugcuacagg

SEQ ID NO: 640340 - RNA, 22 nt, Human
ccaggcaauucugaaagcauuu

SEQ ID NO: 640341 - RNA, 22 nt, Human
auuucagacuguguuggaaaau

SEQ ID NO: 640342 - RNA, 22 nt, Human
ggcaggugcuugucgaaggccu

SEQ ID NO: 640343 - RNA, 22 nt, Human
gcuaggcucggaagcagcaggg

SEQ ID NO: 640344 - RNA, 22 nt, Human
auguuuacagaggaagugccuc

SEQ ID NO: 640345 - RNA, 22 nt, Human
gaagacauguuuuuaauaugua

SEQ ID NO: 640346 - RNA, 22 nt, Human
cuguggcugccucaccuacagg

SEQ ID NO: 640347 - RNA, 22 nt, Human
guaaauuauuucaagaucaucu

SEQ ID NO: 640348 - RNA, 22 nt, Human
uccuugaagagugggcggucga

SEQ ID NO: 640349 - RNA, 22 nt, Human
auucagaagcuauucuuaguuc

SEQ ID NO: 640350 - RNA, 22 nt, Human
uacguuuuaaacacggagccag

SEQ ID NO: 640351 - RNA, 22 nt, Human
auuuuguuuccuuuggaguaga

SEQ ID NO: 640352 - RNA, 22 nt, Human
guacaugugcacaaugugcagg

SEQ ID NO: 640353 - RNA, 21 nt, Human
uggcagggguaguaguacagc

SEQ ID NO: 640354 - RNA, 22 nt, Human
caugaagucacuggagcuuuca

SEQ ID NO: 640355 - RNA, 19 nt, Human
acuaaaaaugauguuugag

SEQ ID NO: 640356 - RNA, 22 nt, Human
ccugaacaaauggcauagccaa

SEQ ID NO: 640357 - RNA, 22 nt, Human
aacaacugaaaagcuuuuucug

SEQ ID NO: 640358 - RNA, 22 nt, Human
ccuuuagaaagucaguaguugc

SEQ ID NO: 640359 - RNA, 22 nt, Human
acuugcaaagugagggaguguu

SEQ ID NO: 640360 - RNA, 21 nt, Human
uagcaaauugcuauuaaggca

SEQ ID NO: 640361 - RNA, 19 nt, Human
ucaaaggcaaggaggaacu

SEQ ID NO: 640362 - RNA, 22 nt, Human
agauauucuagaaccuaguaga

SEQ ID NO: 640363 - RNA, 22 nt, Human
cucccagggccaucgagucacu

SEQ ID NO: 640364 - RNA, 22 nt, Human
gcaggagugugucuaauacuca

SEQ ID NO: 640365 - RNA, 22 nt, Human
aacuauguuaauaaguuucauu

SEQ ID NO: 640366 - RNA, 22 nt, Human
uucaaguaaugcuacuccuaug

SEQ ID NO: 640367 - RNA, 22 nt, Human
gcugggacaggcuuggcccugu

SEQ ID NO: 640368 - RNA, 22 nt, Human
caguagcaggcaggugcuuuug

SEQ ID NO: 640369 - RNA, 22 nt, Human
gcaaggcugcugccacccaucu

SEQ ID NO: 640370 - RNA, 22 nt, Human
ugggccugaguuugggaacugg

SEQ ID NO: 640371 - RNA, 22 nt, Human
aucaaugcuugccaaauggaag

SEQ ID NO: 640372 - RNA, 22 nt, Human
cccaggaagagugaguggcauu

SEQ ID NO: 640373 - RNA, 22 nt, Human
uuaacugagaggaucugaguag

SEQ ID NO: 640374 - RNA, 22 nt, Human
ucugucucaaguucuugcacuc

SEQ ID NO: 640375 - RNA, 14 nt, Human
acacuguguuuaga

SEQ ID NO: 640376 - RNA, 22 nt, Human
agaaacauauucagugaguaau

SEQ ID NO: 640377 - RNA, 22 nt, Human
auuugcuuuaagguauaaaagg

SEQ ID NO: 640378 - RNA, 22 nt, Human
ugguccuucuugaagagugagu

SEQ ID NO: 640379 - RNA, 22 nt, Human
ucugcauauuuaucaugagucu

SEQ ID NO: 640380 - RNA, 22 nt, Human
ggcuuccaugugaaauucuuug

SEQ ID NO: 640381 - RNA, 22 nt, Human
uauaucuuauaugugcagguac

SEQ ID NO: 640382 - RNA, 22 nt, Human
uccaaauacauuuacuguauuu

SEQ ID NO: 640383 - RNA, 22 nt, Human
agccagggucucucgcucuguu

SEQ ID NO: 640384 - RNA, 22 nt, Human
ucuuuguuugccuuuaucaaga

SEQ ID NO: 640385 - RNA, 22 nt, Human
acccacugucaucucugaccac

SEQ ID NO: 640386 - RNA, 22 nt, Human
ugccugcucuuaccacucuccc

SEQ ID NO: 640387 - RNA, 22 nt, Human
ggagcucugugucucuccugcc

SEQ ID NO: 640388 - RNA, 22 nt, Human
gguggccauucuaccgccuucu

SEQ ID NO: 640389 - RNA, 22 nt, Human
gagauggaaucuguguggaggg

SEQ ID NO: 640390 - RNA, 22 nt, Human
aucaggaaagaguggaacucug

SEQ ID NO: 640391 - RNA, 22 nt, Human
aggucugacuucaagccugugg

SEQ ID NO: 640392 - RNA, 22 nt, Human
ccucucuguaagggucccuccc

SEQ ID NO: 640393 - RNA, 22 nt, Human
gauaaguuauguaacuugcuca

SEQ ID NO: 640394 - RNA, 22 nt, Human
caggaaauuuugugaucuguuc

SEQ ID NO: 640395 - RNA, 22 nt, Human
gagcacuguacucauuugcacu

SEQ ID NO: 640396 - RNA, 22 nt, Human
ucuggaaaagcgauaaaccauu

SEQ ID NO: 640397 - RNA, 22 nt, Human
aaguuuugaaauacugaagugu

SEQ ID NO: 640398 - RNA, 22 nt, Human
cauguguuuugucauuucaaua

SEQ ID NO: 640399 - RNA, 22 nt, Human
uuccuggggcuccagcuaccag

SEQ ID NO: 640400 - RNA, 22 nt, Human
gcccgcagagaucuuuaacaaa

SEQ ID NO: 640401 - RNA, 22 nt, Human
gcauggaauucccuuaugggcc

SEQ ID NO: 640402 - RNA, 22 nt, Human
cuucacaggcaagucuguuuuu

SEQ ID NO: 640403 - RNA, 22 nt, Human
ggacccugggcuugcuccuggg

SEQ ID NO: 640404 - RNA, 22 nt, Human
aaaaggaggucacuuuauuccu

SEQ ID NO: 640405 - RNA, 22 nt, Human
cacauaauugaacgugaugagu

SEQ ID NO: 640406 - RNA, 22 nt, Human
aacugcuuguaaauaauguuga

SEQ ID NO: 640407 - RNA, 22 nt, Human
cucagggccaaggaugcuguug

SEQ ID NO: 640408 - RNA, 22 nt, Human
agggcucuuccuuugccucuca

SEQ ID NO: 640409 - RNA, 21 nt, Human
uguggcagauguugggaggca

SEQ ID NO: 640410 - RNA, 20 nt, Human
gcagcugcccccagucccug

SEQ ID NO: 640411 - RNA, 22 nt, Human
cugcugccccugagcucagccu

SEQ ID NO: 640412 - RNA, 22 nt, Human
ccuuucucuaucgacccaucgc

SEQ ID NO: 640413 - RNA, 22 nt, Human
ugugugucuggaagcucaggga

SEQ ID NO: 640414 - RNA, 22 nt, Human
ccuuccaggcuggaggcuuggg

SEQ ID NO: 640415 - RNA, 22 nt, Human
gcugugcccagcuccagcucug

SEQ ID NO: 640416 - RNA, 22 nt, Human
gagggugcucugagcccuuuug

SEQ ID NO: 640417 - RNA, 22 nt, Human
caccagguuccgggcagagcug

SEQ ID NO: 640418 - RNA, 22 nt, Human
agccucagggcucugcgcagac

SEQ ID NO: 640419 - RNA, 19 nt, Human
acaaagugcgugcucuuuu

SEQ ID NO: 640420 - RNA, 20 nt, Human
agggcagagggauuacaggc

SEQ ID NO: 640421 - RNA, 22 nt, Human
ucagaggaugcuguucuuuaau

SEQ ID NO: 640422 - RNA, 22 nt, Human
ccaguccacgucaagaagaggu

SEQ ID NO: 640423 - RNA, 22 nt, Human
ugguccuggccuugaccccagg

SEQ ID NO: 640424 - RNA, 22 nt, Human
uagugucuauugaccggaaaga

SEQ ID NO: 640425 - RNA, 22 nt, Human
uaaugaacacagaauuucacuu

SEQ ID NO: 640426 - RNA, 22 nt, Human
ucugauguugaugcuucugccu

SEQ ID NO: 640427 - RNA, 22 nt, Human
uauaauuuggggaaaguggugu

SEQ ID NO: 640428 - RNA, 22 nt, Human
agugacaucaugucagcaaagu

SEQ ID NO: 640429 - RNA, 22 nt, Human
agugagcauucguuuggaaccc

SEQ ID NO: 640430 - RNA, 22 nt, Human
uucuaaugaaaucuguacagua

SEQ ID NO: 640431 - RNA, 22 nt, Human
cuucccuuuuuaugucuucagc

SEQ ID NO: 640432 - RNA, 22 nt, Human
uacauggugguggcacuugacu

SEQ ID NO: 640433 - RNA, 18 nt, Human
caguggcauaguugagua

SEQ ID NO: 640434 - RNA, 22 nt, Human
uuccaggcugaugggccacagg

SEQ ID NO: 640435 - RNA, 22 nt, Human
uuuccucugucaugacagcuga

SEQ ID NO: 640436 - RNA, 22 nt, Human
uacaagauuaaaacuuauacca

SEQ ID NO: 640437 - RNA, 21 nt, Human
agcaccaguuuuaugccaggc

SEQ ID NO: 640438 - RNA, 22 nt, Human
cauaugaaauaugaguugaaca

SEQ ID NO: 640439 - RNA, 22 nt, Human
acagucaaaugucuaucuucuu

SEQ ID NO: 640440 - RNA, 22 nt, Human
gaacuuuaccauuuagguaacu

SEQ ID NO: 640441 - RNA, 22 nt, Human
caggcuccauuaaucauccugc

SEQ ID NO: 640442 - RNA, 22 nt, Human
cagcagaggcacgucugugaau

SEQ ID NO: 640443 - RNA, 22 nt, Human
aagugacuauuugaguacauca

SEQ ID NO: 640444 - RNA, 22 nt, Human
gcuguacaucacaauuugcugu

SEQ ID NO: 640445 - RNA, 21 nt, Human
uccaggccaugguggggaggc

SEQ ID NO: 640446 - RNA, 22 nt, Human
uaaugcacauagaaguacuuag

SEQ ID NO: 640447 - RNA, 22 nt, Human
cuuccugcaacaccuguguugc

SEQ ID NO: 640448 - RNA, 22 nt, Human
ggcaaaaaccacaauuacuuuu

SEQ ID NO: 640449 - RNA, 22 nt, Human
aggcucuccuccccaggaccau

SEQ ID NO: 640450 - RNA, 22 nt, Human
agugaagaggaaguggggcaca

SEQ ID NO: 640451 - RNA, 22 nt, Human
ucuaaggacauuggcuuuggag

SEQ ID NO: 640452 - RNA, 18 nt, Human
uauaaccuguuuugaugg

SEQ ID NO: 640453 - RNA, 22 nt, Human
cccaggcugguccugaacuccu

SEQ ID NO: 640454 - RNA, 22 nt, Human
uaaagacaaacccacuaggguu

SEQ ID NO: 640455 - RNA, 22 nt, Human
auguggcuggugacugccguac

SEQ ID NO: 640456 - RNA, 22 nt, Human
guugaaagaucauguggcugcc

SEQ ID NO: 640457 - RNA, 22 nt, Human
cugaggaagacagcagcugugu

SEQ ID NO: 640458 - RNA, 22 nt, Human
agccagagaacagcaggaaaug

SEQ ID NO: 640459 - RNA, 22 nt, Human
agccucugacugucagcaaggu

SEQ ID NO: 640460 - RNA, 22 nt, Human
acaggaugauaaaggauggcca

SEQ ID NO: 640461 - RNA, 22 nt, Human
acacugaaucagaaauuguugg

SEQ ID NO: 640462 - RNA, 22 nt, Human
uuuaagauucaguaaggcaaac

SEQ ID NO: 640463 - RNA, 22 nt, Human
gauucaggccugcaucucagca

SEQ ID NO: 640464 - RNA, 22 nt, Human
aagcagaauuuaauagaaaggu

SEQ ID NO: 640465 - RNA, 22 nt, Human
aauucacauguugaaguccuaa

SEQ ID NO: 640466 - RNA, 22 nt, Human
uccuuuuuauaguuagagaaac

SEQ ID NO: 640467 - RNA, 22 nt, Human
guacacucccccugugaaguug

SEQ ID NO: 640468 - RNA, 22 nt, Human
aauggcaaaaggauaacaagga

SEQ ID NO: 640469 - RNA, 22 nt, Human
uugccccuggucagaggaggcu

SEQ ID NO: 640470 - RNA, 22 nt, Human
acuuuaaaaagagccuucuaac

SEQ ID NO: 640471 - RNA, 22 nt, Human
auggacagguacugcagugggu

SEQ ID NO: 640472 - RNA, 18 nt, Human
uuucacaaccuccagagg

SEQ ID NO: 640473 - RNA, 22 nt, Human
cuugcaggauuuugcugcugua

SEQ ID NO: 640474 - RNA, 22 nt, Human
aaaggaagugccacucuucuuc

SEQ ID NO: 640475 - RNA, 18 nt, Human
acacuuccugguggugug

SEQ ID NO: 640476 - RNA, 22 nt, Human
uauuucucucacgguugccugg

SEQ ID NO: 640477 - RNA, 22 nt, Human
cuucuugagcauggguaguacu

SEQ ID NO: 640478 - RNA, 22 nt, Human
uugauuacaaaguagauacauu

SEQ ID NO: 640479 - RNA, 22 nt, Human
accaggcagucaccguccagga

SEQ ID NO: 640480 - RNA, 22 nt, Human
uucauugacugguucguuaagu

SEQ ID NO: 640481 - RNA, 22 nt, Human
agugaguggguuacagauggga

SEQ ID NO: 640482 - RNA, 22 nt, Human
gagauucuuuccagaacuuuga

SEQ ID NO: 640483 - RNA, 16 nt, Human
uggggaagcucgugag

SEQ ID NO: 640484 - RNA, 22 nt, Human
auguacacacacaucuuugcgu

SEQ ID NO: 640485 - RNA, 22 nt, Human
uguuaacauaguggcgcaucug

SEQ ID NO: 640486 - RNA, 22 nt, Human
caggaaguggggucauggagua

SEQ ID NO: 640487 - RNA, 22 nt, Human
acagcagcauaaacugacuaag

SEQ ID NO: 640488 - RNA, 22 nt, Human
uucucaggguuugugcaggcuu

SEQ ID NO: 640489 - RNA, 22 nt, Human
uuuuccucugcagagcaguuag

SEQ ID NO: 640490 - RNA, 22 nt, Human
guaacauuuacaguuccuagag

SEQ ID NO: 640491 - RNA, 22 nt, Human
agcugccucugcugguuuagaa

SEQ ID NO: 640492 - RNA, 22 nt, Human
auucuucugccuacuuucaucc

SEQ ID NO: 640493 - RNA, 22 nt, Human
uuucaaagaguuguaaauuacu

SEQ ID NO: 640494 - RNA, 22 nt, Human
caugcuuauauggaaaggaaga

SEQ ID NO: 640495 - RNA, 22 nt, Human
augcaaagcacacacagaaucc

SEQ ID NO: 640496 - RNA, 22 nt, Human
aauauuucuccuucguuauagc

SEQ ID NO: 640497 - RNA, 22 nt, Human
uccaggcucagcacuugcuacu

SEQ ID NO: 640498 - RNA, 22 nt, Human
cagagcugggcauggugaaagg

SEQ ID NO: 640499 - RNA, 21 nt, Human
agguuccugagucaugccuua

SEQ ID NO: 640500 - RNA, 22 nt, Human
cagcagcaacaauagcggucac

SEQ ID NO: 640501 - RNA, 21 nt, Human
acuggccaccacuggcagggg

SEQ ID NO: 640502 - RNA, 22 nt, Human
aaguuuguagcuggaugucugu

SEQ ID NO: 640503 - RNA, 23 nt, Human
agaguggccuacucacacucauu

SEQ ID NO: 640504 - RNA, 22 nt, Human
ucacagaguuaaaaguuucuuu

SEQ ID NO: 640505 - RNA, 22 nt, Human
agauuugcggcuuuacuuugca

SEQ ID NO: 640506 - RNA, 22 nt, Human
ugaggcucagagcaccugcucc

SEQ ID NO: 640507 - RNA, 22 nt, Human
ucuggcuguguaauauguguag

SEQ ID NO: 640508 - RNA, 22 nt, Human
ucugcugccaccuuguggugag

SEQ ID NO: 640509 - RNA, 22 nt, Human
cacagcuagacuaauugcuggg

SEQ ID NO: 640510 - RNA, 22 nt, Human
aaaggucagcugccaucguucu

SEQ ID NO: 640511 - RNA, 22 nt, Human
gagcuggugcucuugucaagac

SEQ ID NO: 640512 - RNA, 22 nt, Human
gacuguacuugagagaggaacu

SEQ ID NO: 640513 - RNA, 22 nt, Human
agccagggauggcagugcccag

SEQ ID NO: 640514 - RNA, 22 nt, Human
gucugagacuuuuucugugugg

SEQ ID NO: 640515 - RNA, 22 nt, Human
acuccccaaaacuaaccaugca

SEQ ID NO: 640516 - RNA, 22 nt, Human
aucagaaaaaugagaagagcug

SEQ ID NO: 640517 - RNA, 22 nt, Human
uuucaaacugggagugagggga

SEQ ID NO: 640518 - RNA, 22 nt, Human
ucugcugugaaaggugaauauu

SEQ ID NO: 640519 - RNA, 22 nt, Human
agucuuuccugcuugacuguuc

SEQ ID NO: 640520 - RNA, 22 nt, Human
acaguggagcucagaugaaaau

SEQ ID NO: 640521 - RNA, 22 nt, Human
ucuacauuuuaacaagaugccc

SEQ ID NO: 640522 - RNA, 22 nt, Human
ugugcaguuucuauguugucca

SEQ ID NO: 640523 - RNA, 22 nt, Human
uaaggccaaggggccauagucu

SEQ ID NO: 640524 - RNA, 22 nt, Human
auggcuuuuuagacuuugguac

SEQ ID NO: 640525 - RNA, 22 nt, Human
acuguaacgccagcuuuaaaug

SEQ ID NO: 640526 - RNA, 22 nt, Human
cacagaacugguuaauagcaga

SEQ ID NO: 640527 - RNA, 22 nt, Human
cuugagcuaggaaggcugaggc

SEQ ID NO: 640528 - RNA, 22 nt, Human
aauucaucauuuuauagcuagu

SEQ ID NO: 640529 - RNA, 22 nt, Human
cugcuuuauagggcuuccaugu

SEQ ID NO: 640530 - RNA, 21 nt, Human
uaaagaagaugaaugugauca

SEQ ID NO: 640531 - RNA, 22 nt, Human
cauggcuucaugaggguuuugc

SEQ ID NO: 640532 - RNA, 22 nt, Human
cucugccugccacuguucaggc

SEQ ID NO: 640533 - RNA, 22 nt, Human
ugaggauggaaugcugugcaag

SEQ ID NO: 640534 - RNA, 22 nt, Human
uaagauaugguaggaaguuugg

SEQ ID NO: 640535 - RNA, 17 nt, Human
ggccuguguggcugcag

SEQ ID NO: 640536 - RNA, 23 nt, Human
ugagcucuauggaggacugaacc

SEQ ID NO: 640537 - RNA, 18 nt, Human
agcaagcaguuuucaugu

SEQ ID NO: 640538 - RNA, 22 nt, Human
acaggagccaaacacaugccag

SEQ ID NO: 640539 - RNA, 22 nt, Human
uacugcauagacacugggauau

SEQ ID NO: 640540 - RNA, 22 nt, Human
aauccuggcugcguuggccagc

SEQ ID NO: 640541 - RNA, 22 nt, Human
cuuggacccacucccagaauug

SEQ ID NO: 640542 - RNA, 22 nt, Human
cuucacaucucccuaaaacagc

SEQ ID NO: 640543 - RNA, 22 nt, Human
uugaaugauccuaucuagcaca

SEQ ID NO: 640544 - RNA, 22 nt, Human
cugucaaauucauaacacuuau

SEQ ID NO: 640545 - RNA, 22 nt, Human
ucaguuuuguauguuguaaguc

SEQ ID NO: 640546 - RNA, 22 nt, Human
guagggacuuguuuuacuagua

SEQ ID NO: 640547 - RNA, 22 nt, Human
gugggcuggauuugcuugcaga

SEQ ID NO: 640548 - RNA, 22 nt, Human
agaccaggucuuuauggcucca

SEQ ID NO: 640549 - RNA, 22 nt, Human
ucacacuucaaaggguuagauc

SEQ ID NO: 640550 - RNA, 22 nt, Human
acugugaaucacuacuaguaga

SEQ ID NO: 640551 - RNA, 22 nt, Human
uauggguaggccugccgccugu

SEQ ID NO: 640552 - RNA, 22 nt, Human
gcaagcaguuacccaggauucg

SEQ ID NO: 640553 - RNA, 22 nt, Human
caggcccagggagggagaccaa

SEQ ID NO: 640554 - RNA, 22 nt, Human
guauagguuuggcucucuccag

SEQ ID NO: 640555 - RNA, 23 nt, Human
ggccacuuugugucaguaugugc

SEQ ID NO: 640556 - RNA, 22 nt, Human
uggccaggcagguagaacggcc

SEQ ID NO: 640557 - RNA, 22 nt, Human
agccaggauuggcugagccuua

SEQ ID NO: 640558 - RNA, 22 nt, Human
uggcauguguguguaggauaca

SEQ ID NO: 640559 - RNA, 22 nt, Human
aagugguugcuugugagucccc

SEQ ID NO: 640560 - RNA, 22 nt, Human
acugcaggagacacagcugcug

SEQ ID NO: 640561 - RNA, 22 nt, Human
aagauuucagaguuugggggaa

SEQ ID NO: 640562 - RNA, 22 nt, Human
uucaaagcugcagacuccuggg

SEQ ID NO: 640563 - RNA, 22 nt, Human
ugccaagagggcagagggcagu

SEQ ID NO: 640564 - RNA, 22 nt, Human
uugcauugggagugaggagacc

SEQ ID NO: 640565 - RNA, 22 nt, Human
auuuucaucgcuagguuggccu

SEQ ID NO: 640566 - RNA, 22 nt, Human
cugccuggucucaggcaugggg

SEQ ID NO: 640567 - RNA, 22 nt, Human
uuccaggaggcauucuuaguuu

SEQ ID NO: 640568 - RNA, 22 nt, Human
uccugcugagcgucugucauuu

SEQ ID NO: 640569 - RNA, 22 nt, Human
ugcagagugggagaggugcggg

SEQ ID NO: 640570 - RNA, 22 nt, Human
gcaggugggggucggugcaucu

SEQ ID NO: 640571 - RNA, 22 nt, Human
agucugcacucagguggagguc

SEQ ID NO: 640572 - RNA, 22 nt, Human
guggcucaguuaacuuccaugu

SEQ ID NO: 640573 - RNA, 22 nt, Human
cagggugagugggaagcagcgu

SEQ ID NO: 640574 - RNA, 22 nt, Human
aucagagaaguuucacuggcau

SEQ ID NO: 640575 - RNA, 22 nt, Human
uccaggaguuugagacugcagu

SEQ ID NO: 640576 - RNA, 22 nt, Human
aaacugcaaugacagguaggag

SEQ ID NO: 640577 - RNA, 22 nt, Human
aaaagguuuugaguacaaauau

SEQ ID NO: 640578 - RNA, 22 nt, Human
auggcaguagaaugggggaaaa

SEQ ID NO: 640579 - RNA, 22 nt, Human
cagggaaacuaggaaauaagcu

SEQ ID NO: 640580 - RNA, 22 nt, Human
ucuguuauauagauaaugugug

SEQ ID NO: 640581 - RNA, 22 nt, Human
gcagaagaccaugguggaaaga

SEQ ID NO: 640582 - RNA, 22 nt, Human
guccugggcggagggcugcugu

SEQ ID NO: 640583 - RNA, 22 nt, Human
ggaggucaaauggagggcuggg

SEQ ID NO: 640584 - RNA, 22 nt, Human
gcaaaaauuccagggacgacuc

SEQ ID NO: 640585 - RNA, 22 nt, Human
aggcucaguucuguggugagcc

SEQ ID NO: 640586 - RNA, 22 nt, Human
aacauugaaauauuugcaauag

SEQ ID NO: 640587 - RNA, 22 nt, Human
cacagaauuuucucuuuacaau

SEQ ID NO: 640588 - RNA, 22 nt, Human
uaggaagcuaugggagauguga

SEQ ID NO: 640589 - RNA, 22 nt, Human
gcuucucuuguccaagggcagg

SEQ ID NO: 640590 - RNA, 22 nt, Human
uuuauuauagugguggggacug

SEQ ID NO: 640591 - RNA, 22 nt, Human
gacuggcucacuccacuccuau

SEQ ID NO: 640592 - RNA, 19 nt, Human
ggcugccuuuccuuaccag

SEQ ID NO: 640593 - RNA, 22 nt, Human
cauauauuauggacugcagaau

SEQ ID NO: 640594 - RNA, 22 nt, Human
auucagaauggcaaacuucuag

SEQ ID NO: 640595 - RNA, 22 nt, Human
caaaaagcuuagguaacaagcc

SEQ ID NO: 640596 - RNA, 22 nt, Human
gcucacaggucuguggcuauug

SEQ ID NO: 640597 - RNA, 22 nt, Human
gggcagguacuggguggugagc

SEQ ID NO: 640598 - RNA, 22 nt, Human
gugugcugagugacugucauca

SEQ ID NO: 640599 - RNA, 22 nt, Human
cuggcuccaucacugggugaug

SEQ ID NO: 640600 - RNA, 22 nt, Human
cagcaacuccuauauugaaagc

SEQ ID NO: 640601 - RNA, 22 nt, Human
gaagcccagggcguggccgggc

SEQ ID NO: 640602 - RNA, 22 nt, Human
gguguggcugugaguuuuugau

SEQ ID NO: 640603 - RNA, 22 nt, Human
aagcaaagagauaaccuuuugg

SEQ ID NO: 640604 - RNA, 22 nt, Human
ugcuggaacucagugaaucauu

SEQ ID NO: 640605 - RNA, 22 nt, Human
aguguggucgggagcgcggggc

SEQ ID NO: 640606 - RNA, 22 nt, Human
agacacuggcacuggggaagcc

SEQ ID NO: 640607 - RNA, 22 nt, Human
uuuguacaugaaugugcaccca

SEQ ID NO: 640608 - RNA, 22 nt, Human
ucaggaagcugcucuggguggu

SEQ ID NO: 640609 - RNA, 22 nt, Human
acaucccacagaaacauacaua

SEQ ID NO: 640610 - RNA, 19 nt, Human
gcuucuguuugggcuuaga

SEQ ID NO: 640611 - RNA, 22 nt, Human
uuucuucucuaaucucaaugau

SEQ ID NO: 640612 - RNA, 22 nt, Human
gcucugcucuaacauuccugac

SEQ ID NO: 640613 - RNA, 22 nt, Human
caccagggacaaugcuaggggu

SEQ ID NO: 640614 - RNA, 22 nt, Human
ugcagaguggauucuguauacc

SEQ ID NO: 640615 - RNA, 22 nt, Human
aguucacaccaaaguuagguag

SEQ ID NO: 640616 - RNA, 22 nt, Human
cuucagaagccugcagccuuug

SEQ ID NO: 640617 - RNA, 22 nt, Human
gugagcaguuguauaaagacuu

SEQ ID NO: 640618 - RNA, 22 nt, Human
gggcuggcaucaguugccgaga

SEQ ID NO: 640619 - RNA, 22 nt, Human
ccugggcuuccacgagcagagg

SEQ ID NO: 640620 - RNA, 22 nt, Human
aggguauguuuuaggcugaguu

SEQ ID NO: 640621 - RNA, 22 nt, Human
cccaggagguuggggcuacagu

SEQ ID NO: 640622 - RNA, 20 nt, Human
ucugaacacaauauaucccc

SEQ ID NO: 640623 - RNA, 22 nt, Human
uaagauuauacuuaaagagaaa

SEQ ID NO: 640624 - RNA, 22 nt, Human
aaaagucugcucucauuucaga

SEQ ID NO: 640625 - RNA, 22 nt, Human
caccccugggcugggcacacag

SEQ ID NO: 640626 - RNA, 18 nt, Human
cucaccauucugcccaau

SEQ ID NO: 640627 - RNA, 23 nt, Human
aggauccugguacaggagcagag

SEQ ID NO: 640628 - RNA, 22 nt, Human
cccaaggccuucaagccagcuc

SEQ ID NO: 640629 - RNA, 23 nt, Human
guuaccuuacuucugugaucuuc

SEQ ID NO: 640630 - RNA, 22 nt, Human
agccaggcgggucuuugcuccu

SEQ ID NO: 640631 - RNA, 22 nt, Human
acugaagcacauuugccaugaa

SEQ ID NO: 640632 - RNA, 22 nt, Human
acacaugaaucacugguggaag

SEQ ID NO: 640633 - RNA, 22 nt, Human
cagcagguuaacagaggcuggu

SEQ ID NO: 640634 - RNA, 22 nt, Human
gcucugcuggagggaaagagaa

SEQ ID NO: 640635 - RNA, 22 nt, Human
ugccugcccacgacuacagcag

SEQ ID NO: 640636 - RNA, 22 nt, Human
ugaaguuuaagguuagauaagu

SEQ ID NO: 640637 - RNA, 22 nt, Human
uggccuggugucugcgaggccu

SEQ ID NO: 640638 - RNA, 22 nt, Human
uguccaaugcccuuuccacaug

SEQ ID NO: 640639 - RNA, 22 nt, Human
cugcccuggucccauggcugau

SEQ ID NO: 640640 - RNA, 19 nt, Human
cugcucuccuugacuugga

SEQ ID NO: 640641 - RNA, 22 nt, Human
gcagcccugcagcuccacaccg

SEQ ID NO: 640642 - RNA, 22 nt, Human
gcuguggcuguacagagaccau

SEQ ID NO: 640643 - RNA, 22 nt, Human
ucucagaaaaacuuugagggua

SEQ ID NO: 640644 - RNA, 21 nt, Human
ucuccucccggggagaggccg

SEQ ID NO: 640645 - RNA, 22 nt, Human
ugaaagauaaguuauuauguac

SEQ ID NO: 640646 - RNA, 21 nt, Human
acaguacuugagaucuuuuga

SEQ ID NO: 640647 - RNA, 22 nt, Human
uuauugcugcuaacauuuuaug

SEQ ID NO: 640648 - RNA, 23 nt, Human
augagguaaagaucagcuuuaaa

SEQ ID NO: 640649 - RNA, 22 nt, Human
uccagggcauggggagagagug

SEQ ID NO: 640650 - RNA, 22 nt, Human
caucaaaucugacuuuucuucc

SEQ ID NO: 640651 - RNA, 22 nt, Human
ccugucugcaugagugagcaua

SEQ ID NO: 640652 - RNA, 22 nt, Human
ccugcccuaugaccagcuucac

SEQ ID NO: 640653 - RNA, 18 nt, Human
aagcacagguguuucagg

SEQ ID NO: 640654 - RNA, 22 nt, Human
cugaaauuccauuucagccaca

SEQ ID NO: 640655 - RNA, 22 nt, Human
gugcggaucgguguccuccaaa

SEQ ID NO: 640656 - RNA, 22 nt, Human
ccaggcaggcagcguucucagg

SEQ ID NO: 640657 - RNA, 22 nt, Human
aagaauaucuguuuuauuuagg

SEQ ID NO: 640658 - RNA, 22 nt, Human
aauggcuuugaguauuuucugg

SEQ ID NO: 640659 - RNA, 22 nt, Human
acacaugagaaacaucaguugu

SEQ ID NO: 640660 - RNA, 21 nt, Human
ggcacagccugaaaugccuca

SEQ ID NO: 640661 - RNA, 22 nt, Human
auaugcacauacauacauaggu

SEQ ID NO: 640662 - RNA, 22 nt, Human
gcacacaugcguguauaugggu

SEQ ID NO: 640663 - RNA, 22 nt, Human
agaauuacauaaauacaugaau

SEQ ID NO: 640664 - RNA, 22 nt, Human
gccagacacuccccugggcagg

SEQ ID NO: 640665 - RNA, 22 nt, Human
cauuccaaggccaagucuaaga

SEQ ID NO: 640666 - RNA, 22 nt, Human
aaguaaauaucuguagucuuua

SEQ ID NO: 640667 - RNA, 22 nt, Human
gcucugaacuuccaccuuuuca

SEQ ID NO: 640668 - RNA, 22 nt, Human
ugggggaacuguugcgcgcggg

SEQ ID NO: 640669 - RNA, 20 nt, Human
uuguuuaaaggugaagaggc

SEQ ID NO: 640670 - RNA, 22 nt, Human
auauggaagagccugggaauuu

SEQ ID NO: 640671 - RNA, 22 nt, Human
uccaggugugcucugugcccug

SEQ ID NO: 640672 - RNA, 22 nt, Human
guuuauugauaaaagcuggaca

SEQ ID NO: 640673 - RNA, 22 nt, Human
acaauucaagaugagauucagg

SEQ ID NO: 640674 - RNA, 21 nt, Human
aaaguguguggggaagaagga

SEQ ID NO: 640675 - RNA, 22 nt, Human
aaccacagagcccccucagaug

SEQ ID NO: 640676 - RNA, 22 nt, Human
cuuaaccagaaaaugcacuugu

SEQ ID NO: 640677 - RNA, 22 nt, Human
ugguggccaauucacagggcuc

SEQ ID NO: 640678 - RNA, 22 nt, Human
ucagcaggcucugguugaccau

SEQ ID NO: 640679 - RNA, 22 nt, Human
augcaaauaagugcaggcgugg

SEQ ID NO: 640680 - RNA, 22 nt, Human
uguggguguucucacuuagaua

SEQ ID NO: 640681 - RNA, 22 nt, Human
ugugacugagcugcagaguguc

SEQ ID NO: 640682 - RNA, 22 nt, Human
gcaggugauucacccugggccu

SEQ ID NO: 640683 - RNA, 22 nt, Human
guuaagugaaugucaugucagg

SEQ ID NO: 640684 - RNA, 22 nt, Human
cacacacucuuccuggcaccua

SEQ ID NO: 640685 - RNA, 22 nt, Human
gaugcacuuucuuuucaacagu

SEQ ID NO: 640686 - RNA, 19 nt, Human
guacaauguguuguuggua

SEQ ID NO: 640687 - RNA, 22 nt, Human
ucagggaagacuucuuagagga

SEQ ID NO: 640688 - RNA, 23 nt, Human
aaauaugucugagggcaaagaau

SEQ ID NO: 640689 - RNA, 22 nt, Human
gcauuuauuaucugccaggcac

SEQ ID NO: 640690 - RNA, 18 nt, Human
cugaaggauccaggugua

SEQ ID NO: 640691 - RNA, 22 nt, Human
cagcuucuccauucuucuggcu

SEQ ID NO: 640692 - RNA, 19 nt, Human
gucuucugaauguggcugc

SEQ ID NO: 640693 - RNA, 23 nt, Human
uuuauucucagauacauaggucu

SEQ ID NO: 640694 - RNA, 22 nt, Human
agagugaaguuuuugaaaguga

SEQ ID NO: 640695 - RNA, 22 nt, Human
uccauuuagcuggcaaacaaug

SEQ ID NO: 640696 - RNA, 22 nt, Human
gccaaagcagucuugccucugc

SEQ ID NO: 640697 - RNA, 22 nt, Human
caggaggcagaggaugcccagu

SEQ ID NO: 640698 - RNA, 22 nt, Human
acagggcaccugagguaggaag

SEQ ID NO: 640699 - RNA, 22 nt, Human
uccagcuguacuuuguccuggc

SEQ ID NO: 640700 - RNA, 22 nt, Human
gcugaggauuacuugaagucag

SEQ ID NO: 640701 - RNA, 22 nt, Human
augugagcagggagaugcugcc

SEQ ID NO: 640702 - RNA, 22 nt, Human
gcucugugaaggguguugcuca

SEQ ID NO: 640703 - RNA, 19 nt, Human
augucuggguaacagcugc

SEQ ID NO: 640704 - RNA, 23 nt, Human
aggacaguggaauuuagggauug

SEQ ID NO: 640705 - RNA, 22 nt, Human
uaggccacucuccuuugucuca

SEQ ID NO: 640706 - RNA, 22 nt, Human
uggcuggcuuguucacugacug

SEQ ID NO: 640707 - RNA, 22 nt, Human
gcacagcucgagcucaggaggg

SEQ ID NO: 640708 - RNA, 19 nt, Human
ugcauauaucuaugaaaga

SEQ ID NO: 640709 - RNA, 22 nt, Human
cacuguuuggcuccuguacuua

SEQ ID NO: 640710 - RNA, 22 nt, Human
ugacagugucaguuuccuaaua

SEQ ID NO: 640711 - RNA, 22 nt, Human
caaaauuguugaugcugcuuug

SEQ ID NO: 640712 - RNA, 21 nt, Human
caaggacagguugcagggcaa

SEQ ID NO: 640713 - RNA, 22 nt, Human
uguauauucacugagcaagggg

SEQ ID NO: 640714 - RNA, 22 nt, Human
agcagcaaggaagcgaggaugg

SEQ ID NO: 640715 - RNA, 22 nt, Human
uauuugcuuugguccuccaagc

SEQ ID NO: 640716 - RNA, 22 nt, Human
cuuggcagcuacacagguaaga

SEQ ID NO: 640717 - RNA, 22 nt, Human
gacaggacuucacuguguugcc

SEQ ID NO: 640718 - RNA, 22 nt, Human
aaggaaaugaagcugauguugg

SEQ ID NO: 640719 - RNA, 22 nt, Human
gucuucugucugucuggcaugu

SEQ ID NO: 640720 - RNA, 23 nt, Human
cuggggcucauugcaguagccau

SEQ ID NO: 640721 - RNA, 22 nt, Human
uguauuagagcaguagaauuau

SEQ ID NO: 640722 - RNA, 22 nt, Human
uaggugcuggauaaagaauggu

SEQ ID NO: 640723 - RNA, 22 nt, Human
cuuccucccggcccaugcucug

SEQ ID NO: 640724 - RNA, 22 nt, Human
ugucuccucaacucaugcucga

SEQ ID NO: 640725 - RNA, 22 nt, Human
gcacacaguauaugcucauuaa

SEQ ID NO: 640726 - RNA, 22 nt, Human
auucccaccugaaaaagguagg

SEQ ID NO: 640727 - RNA, 22 nt, Human
ugcuucuuacucauaugcugau

SEQ ID NO: 640728 - RNA, 22 nt, Human
cauuucugugacacuuccaucu

SEQ ID NO: 640729 - RNA, 22 nt, Human
uuuagcaaguauuuacugacua

SEQ ID NO: 640730 - RNA, 22 nt, Human
uaauucagcugaacaacugugu

SEQ ID NO: 640731 - RNA, 22 nt, Human
ugacagaacuuuuucacaucuc

SEQ ID NO: 640732 - RNA, 22 nt, Human
ccuucugugugcccacguuuau

SEQ ID NO: 640733 - RNA, 22 nt, Human
gccucugcaccaguacugugcc

SEQ ID NO: 640734 - RNA, 16 nt, Human
ccuuuucucaucucua

SEQ ID NO: 640735 - RNA, 22 nt, Human
aaaucaaaagacauguguuuua

SEQ ID NO: 640736 - RNA, 22 nt, Human
gguacaaggagugaagguuugg

SEQ ID NO: 640737 - RNA, 22 nt, Human
gugacauugcuaggaacagauu

SEQ ID NO: 640738 - RNA, 22 nt, Human
cacaugaagauucaacuggaug

SEQ ID NO: 640739 - RNA, 22 nt, Human
ugaaagaagugucacauugcca

SEQ ID NO: 640740 - RNA, 22 nt, Human
ggagucaggagcaggcugggcu

SEQ ID NO: 640741 - RNA, 22 nt, Human
uuacugcacgugggacauauau

SEQ ID NO: 640742 - RNA, 22 nt, Human
agcaucuaaacuaucaguuuga

SEQ ID NO: 640743 - RNA, 22 nt, Human
uuccaaauuccaauccccugaa

SEQ ID NO: 640744 - RNA, 22 nt, Human
ugcuggccucggcgcugggccu

SEQ ID NO: 640745 - RNA, 22 nt, Human
uuaacuggggaagcauuucaug

SEQ ID NO: 640746 - RNA, 22 nt, Human
ucuucugaagguaggaagcauu

SEQ ID NO: 640747 - RNA, 22 nt, Human
agcagcauguugggaugugaaa

SEQ ID NO: 640748 - RNA, 22 nt, Human
uauuugcugugcuuauuccauu

SEQ ID NO: 640749 - RNA, 22 nt, Human
aaucagaaagaggucauguugc

SEQ ID NO: 640750 - RNA, 22 nt, Human
agcacaguugguaaaauuguua

SEQ ID NO: 640751 - RNA, 22 nt, Human
aaagaaucacauccuucagcaa

SEQ ID NO: 640752 - RNA, 22 nt, Human
ucuggccucuugggaugcuccc

SEQ ID NO: 640753 - RNA, 22 nt, Human
cuguagccaguuuggccucacc

SEQ ID NO: 640754 - RNA, 22 nt, Human
cagaggcugauggcuguagcca

SEQ ID NO: 640755 - RNA, 22 nt, Human
cuaaauguuuuaucuuccuggc

SEQ ID NO: 640756 - RNA, 22 nt, Human
uucuaaguuacuguuauggucu

SEQ ID NO: 640757 - RNA, 22 nt, Human
cucuggaggucagguguggugg

SEQ ID NO: 640758 - RNA, 22 nt, Human
agagccugugauugucaucacc

SEQ ID NO: 640759 - RNA, 22 nt, Human
ggagggagucagcugauuagaa

SEQ ID NO: 640760 - RNA, 23 nt, Human
gcucugagggcuuaucccuccca

SEQ ID NO: 640761 - RNA, 22 nt, Human
aggcugaggaucccuguguucu

SEQ ID NO: 640762 - RNA, 22 nt, Human
cagagggaguuucugagguugc

SEQ ID NO: 640763 - RNA, 18 nt, Human
ugaggcucagagacggug

SEQ ID NO: 640764 - RNA, 22 nt, Human
aaugaaauguagcuuauccaua

SEQ ID NO: 640765 - RNA, 16 nt, Human
gagggcagaggcggaa

SEQ ID NO: 640766 - RNA, 22 nt, Human
ccucaccucagucugggccuca

SEQ ID NO: 640767 - RNA, 22 nt, Human
agagaaggaaagcugacauggg

SEQ ID NO: 640768 - RNA, 22 nt, Human
guucugucugagcaccacagga

SEQ ID NO: 640769 - RNA, 22 nt, Human
aggauuuggggaagaaaacacu

SEQ ID NO: 640770 - RNA, 22 nt, Human
cccugugcugucaugcugggcg

SEQ ID NO: 640771 - RNA, 22 nt, Human
caguccuguguuaaacaagagc

SEQ ID NO: 640772 - RNA, 22 nt, Human
agggcaucuaguucccucucuu

SEQ ID NO: 640773 - RNA, 22 nt, Human
uggagggcauagcuguucuuuc

SEQ ID NO: 640774 - RNA, 22 nt, Human
ucugcuggaaaaccagggaauu

SEQ ID NO: 640775 - RNA, 22 nt, Human
agugcauauaugaagaguauga

SEQ ID NO: 640776 - RNA, 22 nt, Human
gcaggcugugguauguugggca

SEQ ID NO: 640777 - RNA, 22 nt, Human
uggaaagguaggauuucaagac

SEQ ID NO: 640778 - RNA, 22 nt, Human
caggcaccaacuuccuggggag

SEQ ID NO: 640779 - RNA, 22 nt, Human
aaaguccuugcaguuuccucuu

SEQ ID NO: 640780 - RNA, 20 nt, Human
gcucaggugacagucaggag

SEQ ID NO: 640781 - RNA, 20 nt, Human
uuuuccucguguuuguucua

SEQ ID NO: 640782 - RNA, 20 nt, Human
ucacaacuccaucauuuccc

SEQ ID NO: 640783 - RNA, 22 nt, Human
guucaugugguuuuuaaaggau

SEQ ID NO: 640784 - RNA, 22 nt, Human
cggcuggugucgggcacagcaa

SEQ ID NO: 640785 - RNA, 22 nt, Human
gcugauguauauagugauugag

SEQ ID NO: 640786 - RNA, 22 nt, Human
caacugugaauuuuaugauacc

SEQ ID NO: 640787 - RNA, 22 nt, Human
ugcuauugugaacagugccaca

SEQ ID NO: 640788 - RNA, 22 nt, Human
cagcucuuccuacccuaguugg

SEQ ID NO: 640789 - RNA, 22 nt, Human
uucugaaauuucaacuuuacua

SEQ ID NO: 640790 - RNA, 22 nt, Human
uucaggaugcagagguuguagu

SEQ ID NO: 640791 - RNA, 22 nt, Human
cagugcugugcuggaagcuguu

SEQ ID NO: 640792 - RNA, 20 nt, Human
agacaaugagugacagaguu

SEQ ID NO: 640793 - RNA, 22 nt, Human
uacauacaagcauucaauuuua

SEQ ID NO: 640794 - RNA, 22 nt, Human
agacacagauuuuggaaaagau

SEQ ID NO: 640795 - RNA, 22 nt, Human
ucuacuauguuucuuaaauaga

SEQ ID NO: 640796 - RNA, 20 nt, Human
ugccugcccagguccugcac

SEQ ID NO: 640797 - RNA, 22 nt, Human
agcaaagaagacacaggcuuca

SEQ ID NO: 640798 - RNA, 22 nt, Human
ucagaccucugaccuugccaaa

SEQ ID NO: 640799 - RNA, 22 nt, Human
uccagccugaacuuuguccaga

SEQ ID NO: 640800 - RNA, 22 nt, Human
caggaaagaaaugagaacacca

SEQ ID NO: 640801 - RNA, 22 nt, Human
cuguauuuuuuaagugaucugg

SEQ ID NO: 640802 - RNA, 22 nt, Human
uuauuuccuaaaucucuuuguu

SEQ ID NO: 640803 - RNA, 21 nt, Human
acugcaaacagcagagacuga

SEQ ID NO: 640804 - RNA, 22 nt, Human
ucuccaaauaguuauauuuaga

SEQ ID NO: 640805 - RNA, 22 nt, Human
uugcuuccucgaggccagcgug

SEQ ID NO: 640806 - RNA, 22 nt, Human
uccuuucaccaaaaaguguugu

SEQ ID NO: 640807 - RNA, 18 nt, Human
cccagugcucacugccuc

SEQ ID NO: 640808 - RNA, 22 nt, Human
aaguuuaguauuagggaaaagu

SEQ ID NO: 640809 - RNA, 22 nt, Human
agcuacuucccuguaggaaaca

SEQ ID NO: 640810 - RNA, 22 nt, Human
aacugcaaaaaugguagucuua

SEQ ID NO: 640811 - RNA, 23 nt, Human
cuuugccacccagagccugacag

SEQ ID NO: 640812 - RNA, 22 nt, Human
ucuggcuuguguccuuccuugc

SEQ ID NO: 640813 - RNA, 22 nt, Human
uccaagcauguggucaggagcc

SEQ ID NO: 640814 - RNA, 22 nt, Human
uagguagcuuuggcguuucuug

SEQ ID NO: 640815 - RNA, 22 nt, Human
gacacagcuugaugagggcuuu

SEQ ID NO: 640816 - RNA, 22 nt, Human
uuagaaaucaccucugaagauc

SEQ ID NO: 640817 - RNA, 22 nt, Human
ggaaguuugggagcugguaauc

SEQ ID NO: 640818 - RNA, 22 nt, Human
aucagcaaguccuguuaauucu

SEQ ID NO: 640819 - RNA, 22 nt, Human
uacauguguucuguuucaaguu

SEQ ID NO: 640820 - RNA, 22 nt, Human
auguuagaaggaauguuaaaag

SEQ ID NO: 640821 - RNA, 22 nt, Human
ucugggagguguuuugagaacu

SEQ ID NO: 640822 - RNA, 22 nt, Human
accugcccacuucccaugacau

SEQ ID NO: 640823 - RNA, 22 nt, Human
ucauagaaauggaaaguauauu

SEQ ID NO: 640824 - RNA, 23 nt, Human
gggggcugguugacucucugcag

SEQ ID NO: 640825 - RNA, 23 nt, Human
gugugccuuuaucuucuguacuc

SEQ ID NO: 640826 - RNA, 22 nt, Human
agugacagccaaauccauccau

SEQ ID NO: 640827 - RNA, 22 nt, Human
cugguggaggugccaggauuug

SEQ ID NO: 640828 - RNA, 22 nt, Human
gcugcccuacccgaggcacucu

SEQ ID NO: 640829 - RNA, 22 nt, Human
gggaaugagagucagcccagga

SEQ ID NO: 640830 - RNA, 22 nt, Human
aguggggccgcgguccugcccu

SEQ ID NO: 640831 - RNA, 22 nt, Human
ugggcaaguaucggacucugag

SEQ ID NO: 640832 - RNA, 22 nt, Human
uucuuuacaguggguuuugaau

SEQ ID NO: 640833 - RNA, 22 nt, Human
ucaacaaugggucuguaaugga

SEQ ID NO: 640834 - RNA, 22 nt, Human
auucaguucuaaggucagugcc

SEQ ID NO: 640835 - RNA, 22 nt, Human
uuuuccuucuagagcagauuuc

SEQ ID NO: 640836 - RNA, 22 nt, Human
aguaaacauguaauuguucauu

SEQ ID NO: 640837 - RNA, 22 nt, Human
aguggacauucugcacuuggag

SEQ ID NO: 640838 - RNA, 22 nt, Human
uuagugcucacguguuagaaag

SEQ ID NO: 640839 - RNA, 22 nt, Human
cacagacuugagaagcaccuua

SEQ ID NO: 640840 - RNA, 22 nt, Human
auguuaaauagccauuuguuug

SEQ ID NO: 640841 - RNA, 22 nt, Human
ggaggugggauuaggaccuaaa

SEQ ID NO: 640842 - RNA, 22 nt, Human
ugcagcugauuaaagggcagac

SEQ ID NO: 640843 - RNA, 23 nt, Human
ugggcgaggcaggaguggagcac

SEQ ID NO: 640844 - RNA, 22 nt, Human
ugcuggccugggcugcaccuug

SEQ ID NO: 640845 - RNA, 18 nt, Human
agacccucuaagggcagu

SEQ ID NO: 640846 - RNA, 22 nt, Human
uguccuguaggaggcagaacaa

SEQ ID NO: 640847 - RNA, 22 nt, Human
ucuucuguauuguuaacucagg

SEQ ID NO: 640848 - RNA, 22 nt, Human
uaguuuauaguuagcgagcacg

SEQ ID NO: 640849 - RNA, 22 nt, Human
gggcugccuuucuucugggagc

SEQ ID NO: 640850 - RNA, 22 nt, Human
ucccacaccugucuauuccuag

SEQ ID NO: 640851 - RNA, 22 nt, Human
cagggcuucgcuccuggugcac

SEQ ID NO: 640852 - RNA, 22 nt, Human
gagaugcuuuguguauagacaa

SEQ ID NO: 640853 - RNA, 22 nt, Human
uagauaacuugcaccuacagga

SEQ ID NO: 640854 - RNA, 18 nt, Human
ucuacccucucagagucu

SEQ ID NO: 640855 - RNA, 22 nt, Human
agcuccagagccacauccauca

SEQ ID NO: 640856 - RNA, 22 nt, Human
gagaugaaucauuccaugguca

SEQ ID NO: 640857 - RNA, 22 nt, Human
cagcagcuuuugcauucucauu

SEQ ID NO: 640858 - RNA, 22 nt, Human
cccagcuccgagcuccgagccg

SEQ ID NO: 640859 - RNA, 21 nt, Human
uugcugcccucccuuuccuca

SEQ ID NO: 640860 - RNA, 22 nt, Human
cucagagaguuaagugaauuac

SEQ ID NO: 640861 - RNA, 22 nt, Human
auacaguagacaaucucaugaa

SEQ ID NO: 640862 - RNA, 22 nt, Human
gcuuuccuggcccugucccugc

SEQ ID NO: 640863 - RNA, 22 nt, Human
uuuggucuuggauuuaucagug

SEQ ID NO: 640864 - RNA, 21 nt, Human
ggaaaauuccauacacccacg

SEQ ID NO: 640865 - RNA, 22 nt, Human
ccauccugcaggaccuccauau

SEQ ID NO: 640866 - RNA, 22 nt, Human
cacccaggacaggccagaugug

SEQ ID NO: 640867 - RNA, 22 nt, Human
guuucacagaugguguucauau

SEQ ID NO: 640868 - RNA, 22 nt, Human
aacagcuucaucacauggcaua

SEQ ID NO: 640869 - RNA, 22 nt, Human
cccucccugaagaaguuacucu

SEQ ID NO: 640870 - RNA, 22 nt, Human
gaggguggguacaccagcccuc

SEQ ID NO: 640871 - RNA, 22 nt, Human
aaugcacauaaauauggucuua

SEQ ID NO: 640872 - RNA, 22 nt, Human
agaagugccgaaaggaagacag

SEQ ID NO: 640873 - RNA, 22 nt, Human
gaagguuuugauuccacugaau

SEQ ID NO: 640874 - RNA, 20 nt, Human
gaacauggcagguggagggg

SEQ ID NO: 640875 - RNA, 22 nt, Human
uugagucugugcccuaugcugu

SEQ ID NO: 640876 - RNA, 22 nt, Human
auagugaaaaugcugucagcau

SEQ ID NO: 640877 - RNA, 22 nt, Human
aaguuccucuucucugcaggga

SEQ ID NO: 640878 - RNA, 22 nt, Human
agcugaaguccucgcggugcua

SEQ ID NO: 640879 - RNA, 22 nt, Human
ccucuggcaagugauuuaucau

SEQ ID NO: 640880 - RNA, 22 nt, Human
guucaaggaagggaggaaagcc

SEQ ID NO: 640881 - RNA, 22 nt, Human
aauaaaauggucaguuuucuca

SEQ ID NO: 640882 - RNA, 21 nt, Human
ggucaguggcuuucuugcacc

SEQ ID NO: 640883 - RNA, 23 nt, Human
uccaggagaaccccugucugucc

SEQ ID NO: 640884 - RNA, 22 nt, Human
agcagugaguaacacagaccag

SEQ ID NO: 640885 - RNA, 22 nt, Human
agguccugaagauuuuacuaga

SEQ ID NO: 640886 - RNA, 22 nt, Human
aagucauugguagcuugauagg

SEQ ID NO: 640887 - RNA, 20 nt, Human
cccugugauuggcaaguguc

SEQ ID NO: 640888 - RNA, 22 nt, Human
ucagagagguuggugauaagaa

SEQ ID NO: 640889 - RNA, 22 nt, Human
auucagagauuguuauucagac

SEQ ID NO: 640890 - RNA, 22 nt, Human
gcuauucauggagcauguacug

SEQ ID NO: 640891 - RNA, 22 nt, Human
cucacugacugcaagucaaguu

SEQ ID NO: 640892 - RNA, 22 nt, Human
uacacuguuugaacuguggucg

SEQ ID NO: 640893 - RNA, 22 nt, Human
uauucaaagugcgaggucaggg

SEQ ID NO: 640894 - RNA, 19 nt, Human
ccagcagacacagcugccc

SEQ ID NO: 640895 - RNA, 22 nt, Human
aggggccuggacauggacgcgc

SEQ ID NO: 640896 - RNA, 22 nt, Human
aaauaugacuagaaugccaggu

SEQ ID NO: 640897 - RNA, 20 nt, Human
uguacacaguacuuuacaau

SEQ ID NO: 640898 - RNA, 22 nt, Human
uacagauagaauuagugaguua

SEQ ID NO: 640899 - RNA, 22 nt, Human
uucaauucugaugaaggcaaua

SEQ ID NO: 640900 - RNA, 22 nt, Human
uccuggcagagagcaugaggcc

SEQ ID NO: 640901 - RNA, 22 nt, Human
aggagaggcaucaagaaaaucg

SEQ ID NO: 640902 - RNA, 22 nt, Human
ccacaaggccuguggggcugcu

SEQ ID NO: 640903 - RNA, 22 nt, Human
cugcucuccccaggccagucug

SEQ ID NO: 640904 - RNA, 22 nt, Human
uuucaccaagguaaccuuugau

SEQ ID NO: 640905 - RNA, 22 nt, Human
agauacaaaggccuacagagca

SEQ ID NO: 640906 - RNA, 19 nt, Human
gcucaggcugugugugggg

SEQ ID NO: 640907 - RNA, 22 nt, Human
aggcagcagacuguuaaucaga

SEQ ID NO: 640908 - RNA, 22 nt, Human
aauacagauauucagugguacu

SEQ ID NO: 640909 - RNA, 22 nt, Human
aaacugcaauuauguuugcaga

SEQ ID NO: 640910 - RNA, 22 nt, Human
aggagcugcaaauauuaguaau

SEQ ID NO: 640911 - RNA, 22 nt, Human
cugcaggguuuuucaaggacaa

SEQ ID NO: 640912 - RNA, 22 nt, Human
uaauugcuaauccugccuucua

SEQ ID NO: 640913 - RNA, 22 nt, Human
uugugugguagcuucauugaac

SEQ ID NO: 640914 - RNA, 17 nt, Human
aaucucaguggcuuaag

SEQ ID NO: 640915 - RNA, 22 nt, Human
cauagaaucauagcacauuuga

SEQ ID NO: 640916 - RNA, 22 nt, Human
aguucacuuucuguaguggaag

SEQ ID NO: 640917 - RNA, 22 nt, Human
aauaauacugcauguaaggugc

SEQ ID NO: 640918 - RNA, 22 nt, Human
ugaauaaaguauguccugggaa

SEQ ID NO: 640919 - RNA, 22 nt, Human
agcaguuuggaaaauacuagaa

SEQ ID NO: 640920 - RNA, 22 nt, Human
uuuuaauuuugcaaaucuggug

SEQ ID NO: 640921 - RNA, 22 nt, Human
gcucucagguacaaagcugugu

SEQ ID NO: 640922 - RNA, 22 nt, Human
caaagcaguauuggauucuuua

SEQ ID NO: 640923 - RNA, 23 nt, Human
ggggccugcaccggucugcgcgg

SEQ ID NO: 640924 - RNA, 22 nt, Human
acagacauauuuggcccauagc

SEQ ID NO: 640925 - RNA, 22 nt, Human
gacacucuccuccaguggauag

SEQ ID NO: 640926 - RNA, 22 nt, Human
uugcaauugcuauggagagcgu

SEQ ID NO: 640927 - RNA, 22 nt, Human
aggaagaugggagagcucugga

SEQ ID NO: 640928 - RNA, 19 nt, Human
uugguggugguuuugguuc

SEQ ID NO: 640929 - RNA, 22 nt, Human
ugccuauucaauauaugcauuu

SEQ ID NO: 640930 - RNA, 22 nt, Human
cuggcagguuuggugucuggug

SEQ ID NO: 640931 - RNA, 22 nt, Human
ucugacuuggcgcucuugucuu

SEQ ID NO: 640932 - RNA, 22 nt, Human
gcugagaggcagccagacccuc

SEQ ID NO: 640933 - RNA, 22 nt, Human
aagauuuucucaacuguauuug

SEQ ID NO: 640934 - RNA, 22 nt, Human
acucugggaucuugaaaagagu

SEQ ID NO: 640935 - RNA, 22 nt, Human
acuccauacaauggcaggcugu

SEQ ID NO: 640936 - RNA, 22 nt, Human
cagagacaaugucucugcuugu

SEQ ID NO: 640937 - RNA, 20 nt, Human
agacccucuggacugggccc

SEQ ID NO: 640938 - RNA, 22 nt, Human
gauguguguuuauacauauauu

SEQ ID NO: 640939 - RNA, 22 nt, Human
aaagaucuaugggcauuuagcu

SEQ ID NO: 640940 - RNA, 22 nt, Human
ugcauacacaugugcacauacg

SEQ ID NO: 640941 - RNA, 22 nt, Human
cucuccagaucugcugagccag

SEQ ID NO: 640942 - RNA, 22 nt, Human
cucagcuggcaauucuggcucc

SEQ ID NO: 640943 - RNA, 22 nt, Human
cucuccuccaggaacucacagu

SEQ ID NO: 640944 - RNA, 22 nt, Human
cuuggucauuuggggcugcuau

SEQ ID NO: 640945 - RNA, 22 nt, Human
agcauccuccuucccagagaug

SEQ ID NO: 640946 - RNA, 22 nt, Human
uuuaucuguccuuugccaguga

SEQ ID NO: 640947 - RNA, 22 nt, Human
uccaggagaccagauguaggcc

SEQ ID NO: 640948 - RNA, 22 nt, Human
aucuggcuauuucuggucgggg

SEQ ID NO: 640949 - RNA, 22 nt, Human
ggugcagugguguggcaaaggg

SEQ ID NO: 640950 - RNA, 20 nt, Human
uuuaccaaaggaguuaugau

SEQ ID NO: 640951 - RNA, 22 nt, Human
ugaguauuuuaaguucucaauc

SEQ ID NO: 640952 - RNA, 22 nt, Human
uguauuuuuagaccuuuagacc

SEQ ID NO: 640953 - RNA, 22 nt, Human
cccagggaagccauuucugacu

SEQ ID NO: 640954 - RNA, 22 nt, Human
cugugaugacaggcagggccaa

SEQ ID NO: 640955 - RNA, 17 nt, Human
accuggagaccaagucc

SEQ ID NO: 640956 - RNA, 22 nt, Human
guuuaauuuuagguugucaagc

SEQ ID NO: 640957 - RNA, 22 nt, Human
ugaggcaugguccugagggagc

SEQ ID NO: 640958 - RNA, 22 nt, Human
ugcucaguuaagcagaggaaau

SEQ ID NO: 640959 - RNA, 22 nt, Human
ucuauuuuuauaguugaagugc

SEQ ID NO: 640960 - RNA, 22 nt, Human
gccaggaaaaaggguggccaau

SEQ ID NO: 640961 - RNA, 22 nt, Human
aucuggggucagacagcccugg

SEQ ID NO: 640962 - RNA, 22 nt, Human
acguuugcuuucuuuggccugg

SEQ ID NO: 640963 - RNA, 22 nt, Human
uuuguucugaaaacucaagucc

SEQ ID NO: 640964 - RNA, 22 nt, Human
acagggcucccagcaggucugu

SEQ ID NO: 640965 - RNA, 22 nt, Human
gccaccuggacagcugugcccu

SEQ ID NO: 640966 - RNA, 22 nt, Human
cuccagggggcauccacacagc

SEQ ID NO: 640967 - RNA, 22 nt, Human
gagaguucuaccucugaaggcg

SEQ ID NO: 640968 - RNA, 22 nt, Human
cugggcugcggugguagguugu

SEQ ID NO: 640969 - RNA, 22 nt, Human
ugauugaauucaaaugcaaucu

SEQ ID NO: 640970 - RNA, 23 nt, Human
cauuugauccucacaauaaaugg

SEQ ID NO: 640971 - RNA, 22 nt, Human
cuggcaggcaaauuggugggag

SEQ ID NO: 640972 - RNA, 22 nt, Human
uuuacacuugaggaaacugagg

SEQ ID NO: 640973 - RNA, 22 nt, Human
uucagagguagagaggaucuug

SEQ ID NO: 640974 - RNA, 22 nt, Human
acacauuuauuacaugcaugug

SEQ ID NO: 640975 - RNA, 22 nt, Human
uucucugggacaggaacaguuu

SEQ ID NO: 640976 - RNA, 22 nt, Human
aguacacagaauucuacuuguu

SEQ ID NO: 640977 - RNA, 21 nt, Human
aucagaaucucuagauuugga

SEQ ID NO: 640978 - RNA, 22 nt, Human
aaaaauguuaucuacuguccga

SEQ ID NO: 640979 - RNA, 22 nt, Human
aaccucucccuuugugucccug

SEQ ID NO: 640980 - RNA, 22 nt, Human
ucugauaaaugccaucuuuuug

SEQ ID NO: 640981 - RNA, 22 nt, Human
uacauugugauaggaagucacc

SEQ ID NO: 640982 - RNA, 22 nt, Human
uccugcagcugaagcucaugug

SEQ ID NO: 640983 - RNA, 22 nt, Human
acaggccagccugggguaaggu

SEQ ID NO: 640984 - RNA, 17 nt, Human
gccugcaggcccgcaga

SEQ ID NO: 640985 - RNA, 22 nt, Human
ucaguguuuguggcaaauguua

SEQ ID NO: 640986 - RNA, 22 nt, Human
uagcagcagugguguauuuaga

SEQ ID NO: 640987 - RNA, 22 nt, Human
ccuugcucaagcuagugacggg

SEQ ID NO: 640988 - RNA, 22 nt, Human
ucuauuagauuauucucaagga

SEQ ID NO: 640989 - RNA, 22 nt, Human
aacaugauuuaguauaaugcag

SEQ ID NO: 640990 - RNA, 22 nt, Human
ucauugucuugauaugauuguc

SEQ ID NO: 640991 - RNA, 22 nt, Human
augcacaggacagccucuacuc

SEQ ID NO: 640992 - RNA, 22 nt, Human
ucaguauaauugcuggcacuga

SEQ ID NO: 640993 - RNA, 22 nt, Human
uuucugugguggguaguucaga

SEQ ID NO: 640994 - RNA, 22 nt, Human
aggucuggaggcggagucagga

SEQ ID NO: 640995 - RNA, 22 nt, Human
gcuccucuauuccccacauuuu

SEQ ID NO: 640996 - RNA, 22 nt, Human
aagagcagccuccaggggugga

SEQ ID NO: 640997 - RNA, 22 nt, Human
ugacuccacaauuugacuuaua

SEQ ID NO: 640998 - RNA, 22 nt, Human
aguauuuagcauagugguuagu

SEQ ID NO: 640999 - RNA, 22 nt, Human
gucuggcauaugcaaagugcau

SEQ ID NO: 641000 - RNA, 22 nt, Human
uggcagaaguucacuaguagcu

SEQ ID NO: 641001 - RNA, 22 nt, Human
cuauagaaacaaccucucuuuc

SEQ ID NO: 641002 - RNA, 22 nt, Human
uguauuuucuucuggaagcuua

SEQ ID NO: 641003 - RNA, 22 nt, Human
aacuuucugucugagcugcaga

SEQ ID NO: 641004 - RNA, 22 nt, Human
ggcuccugggaugggacugagc

SEQ ID NO: 641005 - RNA, 22 nt, Human
ucugagguggggcuggagcauu

SEQ ID NO: 641006 - RNA, 22 nt, Human
ucaggggcccuucccucagcag

SEQ ID NO: 641007 - RNA, 22 nt, Human
uucaguccucacaaccucacua

SEQ ID NO: 641008 - RNA, 22 nt, Human
cuggcagcgcagcaugaagucg

SEQ ID NO: 641009 - RNA, 22 nt, Human
ggcugccugcucaggugcggcg

SEQ ID NO: 641010 - RNA, 22 nt, Human
uguccugugaccuggcaccaca

SEQ ID NO: 641011 - RNA, 22 nt, Human
uccacaggaaagcaccucccau

SEQ ID NO: 641012 - RNA, 22 nt, Human
cuucagaaauaacaacaauuac

SEQ ID NO: 641013 - RNA, 22 nt, Human
cuccuggagggccaaagaaaua

SEQ ID NO: 641014 - RNA, 22 nt, Human
aaagccauaagccuaauacuaa

SEQ ID NO: 641015 - RNA, 22 nt, Human
gcugcagagggaggggcucgca

SEQ ID NO: 641016 - RNA, 22 nt, Human
gcagggcagaccuccagccuau

SEQ ID NO: 641017 - RNA, 22 nt, Human
ucaagucccagcucuucacuua

SEQ ID NO: 641018 - RNA, 22 nt, Human
ccucccagugccuccagagcag

SEQ ID NO: 641019 - RNA, 22 nt, Human
aggaggguggggucugccuguc

SEQ ID NO: 641020 - RNA, 22 nt, Human
gacaguggaaugacccuuugag

SEQ ID NO: 641021 - RNA, 22 nt, Human
gugugccaccagucaaggugaa

SEQ ID NO: 641022 - RNA, 19 nt, Human
cuguuauugucagagcucc

SEQ ID NO: 641023 - RNA, 22 nt, Human
aauagcugauuagccuacaaua

SEQ ID NO: 641024 - RNA, 22 nt, Human
gagcugccuguugcauagcaac

SEQ ID NO: 641025 - RNA, 22 nt, Human
guuuaugcacuugguuuguguc

SEQ ID NO: 641026 - RNA, 22 nt, Human
acaguguuuuagaaaagcuuga

SEQ ID NO: 641027 - RNA, 19 nt, Human
accugcaguaauaauuccu

SEQ ID NO: 641028 - RNA, 22 nt, Human
aaugucuuuugcaguucaagau

SEQ ID NO: 641029 - RNA, 22 nt, Human
uuguccugucaggcugggggcu

SEQ ID NO: 641030 - RNA, 22 nt, Human
ugugacuguggacuuuuguggg

SEQ ID NO: 641031 - RNA, 22 nt, Human
aagccacugagauuucacugca

SEQ ID NO: 641032 - RNA, 22 nt, Human
ucuuugaaagcuguucuagagu

SEQ ID NO: 641033 - RNA, 22 nt, Human
ucugcuggugaugaccucauaa

SEQ ID NO: 641034 - RNA, 22 nt, Human
agcuccuccugagugucuggga

SEQ ID NO: 641035 - RNA, 19 nt, Human
accaggcuuauggucagug

SEQ ID NO: 641036 - RNA, 22 nt, Human
uugaggucuguguaggcagcaa

SEQ ID NO: 641037 - RNA, 22 nt, Human
agagccaggcggcugggcaccu

SEQ ID NO: 641038 - RNA, 22 nt, Human
agugucugaacugggugcugac

SEQ ID NO: 641039 - RNA, 22 nt, Human
caugcucucuggcaacuugugu

SEQ ID NO: 641040 - RNA, 22 nt, Human
ggccagcuuauuagcucagagg

SEQ ID NO: 641041 - RNA, 22 nt, Human
uguacuuauuuuaugucagcac

SEQ ID NO: 641042 - RNA, 22 nt, Human
caguucuggaguuucauucuuu

SEQ ID NO: 641043 - RNA, 22 nt, Human
aagcccugcagucucugccaca

SEQ ID NO: 641044 - RNA, 23 nt, Human
acagugucugcugcaagauaucu

SEQ ID NO: 641045 - RNA, 22 nt, Human
aacacagacauagugauuacag

SEQ ID NO: 641046 - RNA, 22 nt, Human
aacugugggagaaggcgaugug

SEQ ID NO: 641047 - RNA, 22 nt, Human
aucuuuaaagacaugugaacuu

SEQ ID NO: 641048 - RNA, 22 nt, Human
auuccaaagguuaaugcccauu

SEQ ID NO: 641049 - RNA, 19 nt, Human
uggcagcauugguaccuug

SEQ ID NO: 641050 - RNA, 22 nt, Human
gaugaaggggcuggugcccucu

SEQ ID NO: 641051 - RNA, 22 nt, Human
gcacagaaccagacaugaggca

SEQ ID NO: 641052 - RNA, 22 nt, Human
auaauccauuaauuaaugacca

SEQ ID NO: 641053 - RNA, 22 nt, Human
caguuuuaggacauguggaugu

SEQ ID NO: 641054 - RNA, 22 nt, Human
ucucucuggagcuggggcauga

SEQ ID NO: 641055 - RNA, 22 nt, Human
cuuccucuguguccugggcuug

SEQ ID NO: 641056 - RNA, 22 nt, Human
acagcccagcucuuucucugca

SEQ ID NO: 641057 - RNA, 23 nt, Human
uagagcaguagaucaccauggga

SEQ ID NO: 641058 - RNA, 22 nt, Human
gucucuguuauuuccaggguca

SEQ ID NO: 641059 - RNA, 22 nt, Human
uagaauaugauuaauuuucuua

SEQ ID NO: 641060 - RNA, 22 nt, Human
cccugugcacacacuucacucu

SEQ ID NO: 641061 - RNA, 18 nt, Human
gccuuuggacugcuccca

SEQ ID NO: 641062 - RNA, 22 nt, Human
gaaggcuugcagcucuguggca

SEQ ID NO: 641063 - RNA, 22 nt, Human
aagaacauaaacagaaggacag

SEQ ID NO: 641064 - RNA, 22 nt, Human
caggacaguuggcaucugcugc

SEQ ID NO: 641065 - RNA, 22 nt, Human
ugagcacagcuuucacuagaaa

SEQ ID NO: 641066 - RNA, 22 nt, Human
aagacagugaucucugagagau

SEQ ID NO: 641067 - RNA, 22 nt, Human
agcuggaacccgggugggcagc

SEQ ID NO: 641068 - RNA, 22 nt, Human
gugcagcugugugagagcucca

SEQ ID NO: 641069 - RNA, 22 nt, Human
agaaggcucauuugacugcauu

SEQ ID NO: 641070 - RNA, 22 nt, Human
guuuuccugaaacugauggugu

SEQ ID NO: 641071 - RNA, 22 nt, Human
ggaccuuccuggcuccuggggu

SEQ ID NO: 641072 - RNA, 22 nt, Human
caggauauaucucuaguguugg

SEQ ID NO: 641073 - RNA, 22 nt, Human
aagaagcagagcuguggguguu

SEQ ID NO: 641074 - RNA, 22 nt, Human
ugaggcaggagguugagaacug

SEQ ID NO: 641075 - RNA, 22 nt, Human
gggcaccagcggccgcacugcc

SEQ ID NO: 641076 - RNA, 22 nt, Human
uguaaagagaaugguauaugga

SEQ ID NO: 641077 - RNA, 22 nt, Human
acaggguggggauggugagcuu

SEQ ID NO: 641078 - RNA, 22 nt, Human
agcuggucagaguggggauaga

SEQ ID NO: 641079 - RNA, 22 nt, Human
aggcugaggaucguacuuucca

SEQ ID NO: 641080 - RNA, 22 nt, Human
uaguggggaaggaggacaagaa

SEQ ID NO: 641081 - RNA, 22 nt, Human
uucucugguuugcuguuucuga

SEQ ID NO: 641082 - RNA, 22 nt, Human
uucuuucuuuguaguccugaac

SEQ ID NO: 641083 - RNA, 22 nt, Human
auugaggagcagagauggggua

SEQ ID NO: 641084 - RNA, 22 nt, Human
ucaggcugguccccacagugga

SEQ ID NO: 641085 - RNA, 22 nt, Human
uuauuauuuuguguacagcaaa

SEQ ID NO: 641086 - RNA, 22 nt, Human
gauuucaaaaguagauccauca

SEQ ID NO: 641087 - RNA, 22 nt, Human
ucuggcuccugaguccaugcuc

SEQ ID NO: 641088 - RNA, 22 nt, Human
gauugcuucuggaaagcaguuu

SEQ ID NO: 641089 - RNA, 22 nt, Human
ugccugagguggucugcaaaug

SEQ ID NO: 641090 - RNA, 22 nt, Human
gggccuccggggugagcugugg

SEQ ID NO: 641091 - RNA, 22 nt, Human
agucauuucuguagucauguuu

SEQ ID NO: 641092 - RNA, 22 nt, Human
uaaagguuaguagcagggaaac

SEQ ID NO: 641093 - RNA, 22 nt, Human
cuaucauuuuacaugguuggug

SEQ ID NO: 641094 - RNA, 22 nt, Human
gcucugcucccucaaaugacau

SEQ ID NO: 641095 - RNA, 22 nt, Human
acaauuuuccccauagguuauc

SEQ ID NO: 641096 - RNA, 22 nt, Human
uggguaggccaggaagcagugu

SEQ ID NO: 641097 - RNA, 22 nt, Human
uucugagacaauugagagucua

SEQ ID NO: 641098 - RNA, 22 nt, Human
agcaagauuuuucagguuagua

SEQ ID NO: 641099 - RNA, 22 nt, Human
uccaggagguaugaguggcccc

SEQ ID NO: 641100 - RNA, 22 nt, Human
uccagagccuuuccacccacuu

SEQ ID NO: 641101 - RNA, 22 nt, Human
cuccuggacauggagcggagga

SEQ ID NO: 641102 - RNA, 22 nt, Human
uaggaauuuugcaugggaauuu

SEQ ID NO: 641103 - RNA, 22 nt, Human
gcucugugcuagaacuaagaau

SEQ ID NO: 641104 - RNA, 22 nt, Human
agaaggaaggaagcauucuguu

SEQ ID NO: 641105 - RNA, 20 nt, Human
agcuccugaggguuacuuuc

SEQ ID NO: 641106 - RNA, 17 nt, Human
ccucuuccucucagcug

SEQ ID NO: 641107 - RNA, 22 nt, Human
agggcugguauguccaugaaag

SEQ ID NO: 641108 - RNA, 22 nt, Human
ucuuauuauuguuguaaaagca

SEQ ID NO: 641109 - RNA, 22 nt, Human
agaaaauuuaaagagacacaca

SEQ ID NO: 641110 - RNA, 22 nt, Human
ccaggugcuagcaaucacuguc

SEQ ID NO: 641111 - RNA, 22 nt, Human
acaggauggagauaauagaaaa

SEQ ID NO: 641112 - RNA, 22 nt, Human
uguucuuaacuuuuguguauau

SEQ ID NO: 641113 - RNA, 22 nt, Human
gaggugggguuuuguucuugaa

SEQ ID NO: 641114 - RNA, 22 nt, Human
ugucaccagcugcuccucagga

SEQ ID NO: 641115 - RNA, 22 nt, Human
ugggguugccucccgcccugga

SEQ ID NO: 641116 - RNA, 18 nt, Human
gccagagggcccaagguc

SEQ ID NO: 641117 - RNA, 22 nt, Human
ccacagaaaauaaagcacgauu

SEQ ID NO: 641118 - RNA, 22 nt, Human
uggcccugccgccacgacgucu

SEQ ID NO: 641119 - RNA, 22 nt, Human
cugugugcauaguugugcucaa

SEQ ID NO: 641120 - RNA, 22 nt, Human
ugggcagggucucuguuaucag

SEQ ID NO: 641121 - RNA, 22 nt, Human
uccagaggugaacacccaggca

SEQ ID NO: 641122 - RNA, 22 nt, Human
gccuggugauaagcagugaccu

SEQ ID NO: 641123 - RNA, 22 nt, Human
gaagaacugaaaguugaugcac

SEQ ID NO: 641124 - RNA, 22 nt, Human
ucaugcaguuacuguuaugcaa

SEQ ID NO: 641125 - RNA, 22 nt, Human
uuuuuccuagugcuuucuggua

SEQ ID NO: 641126 - RNA, 22 nt, Human
aggucauuccuugucuucuugc

SEQ ID NO: 641127 - RNA, 18 nt, Human
ucuguggagagggcaguu

SEQ ID NO: 641128 - RNA, 22 nt, Human
guggccuuggcuucuacccuga

SEQ ID NO: 641129 - RNA, 22 nt, Human
gggcugacagcacgccuucugu

SEQ ID NO: 641130 - RNA, 20 nt, Human
caaauggcuuuuauuuccuu

SEQ ID NO: 641131 - RNA, 22 nt, Human
cauacaagcguucaauagaugu

SEQ ID NO: 641132 - RNA, 22 nt, Human
cuuauauuuuaggaacagacaa

SEQ ID NO: 641133 - RNA, 22 nt, Human
gccugcagccucaagggcugag

SEQ ID NO: 641134 - RNA, 22 nt, Human
caguaccagucaccacauugau

SEQ ID NO: 641135 - RNA, 22 nt, Human
aaguccuuuccaguccugugau

SEQ ID NO: 641136 - RNA, 22 nt, Human
uuaauuugaccauaaauaucuu

SEQ ID NO: 641137 - RNA, 22 nt, Human
ucacuguuuugccugcacuucc

SEQ ID NO: 641138 - RNA, 22 nt, Human
agcaggcuuucaagagucuucu

SEQ ID NO: 641139 - RNA, 20 nt, Human
agggaacaauggacgcuguc

SEQ ID NO: 641140 - RNA, 22 nt, Human
acaggggcuccgaaggugaggg

SEQ ID NO: 641141 - RNA, 22 nt, Human
auucaaacacuuugagaaguuc

SEQ ID NO: 641142 - RNA, 22 nt, Human
guucuaauaggagaaaagacag

SEQ ID NO: 641143 - RNA, 21 nt, Human
uggagcugccacuuguccucc

SEQ ID NO: 641144 - RNA, 22 nt, Human
uugccguccuuacuccagcgga

SEQ ID NO: 641145 - RNA, 22 nt, Human
agcccagcagaaaguccagccu

SEQ ID NO: 641146 - RNA, 22 nt, Human
gggacugggagauccuccuggc

SEQ ID NO: 641147 - RNA, 17 nt, Human
aaguccagccugcagcu

SEQ ID NO: 641148 - RNA, 17 nt, Human
caacuucacaaacuguc

SEQ ID NO: 641149 - RNA, 22 nt, Human
uauuuaaaauaagccccagugg

SEQ ID NO: 641150 - RNA, 22 nt, Human
uaucauucuucucaccuuugaa

SEQ ID NO: 641151 - RNA, 22 nt, Human
uuucuucugagaucagggagaa

SEQ ID NO: 641152 - RNA, 18 nt, Human
uccaggucccaggggaag

SEQ ID NO: 641153 - RNA, 22 nt, Human
uaaucauauggguaauccaaug

SEQ ID NO: 641154 - RNA, 22 nt, Human
ccuagccuucggccuacccauc

SEQ ID NO: 641155 - RNA, 22 nt, Human
auaagagcuagucuuuuccuug

SEQ ID NO: 641156 - RNA, 22 nt, Human
uucaaugaggauagaacuggau

SEQ ID NO: 641157 - RNA, 22 nt, Human
aagccaaggagaauggccucag

SEQ ID NO: 641158 - RNA, 22 nt, Human
ugcauugggagucagugcugaa

SEQ ID NO: 641159 - RNA, 22 nt, Human
aauuugauuuucuuaaaccaua

SEQ ID NO: 641160 - RNA, 22 nt, Human
cagagggcucaguccugcugga

SEQ ID NO: 641161 - RNA, 22 nt, Human
uacaguaguaagaaugccuuau

SEQ ID NO: 641162 - RNA, 22 nt, Human
ugucuuuaagcaaacaguguuu

SEQ ID NO: 641163 - RNA, 22 nt, Human
uggcaugcaagaggaggcuccc

SEQ ID NO: 641164 - RNA, 22 nt, Human
cuuacaacuuguaugugauugu

SEQ ID NO: 641165 - RNA, 18 nt, Human
uacaggaagggguucucg

SEQ ID NO: 641166 - RNA, 22 nt, Human
gagaaaggcauuccuaugcaaa

SEQ ID NO: 641167 - RNA, 22 nt, Human
acaugggacagagaaagaggcc

SEQ ID NO: 641168 - RNA, 22 nt, Human
uugucucuacagagaguaguag

SEQ ID NO: 641169 - RNA, 22 nt, Human
aaaccuuugccuggaagggagu

SEQ ID NO: 641170 - RNA, 22 nt, Human
uucuuucucacucuuuaggaag

SEQ ID NO: 641171 - RNA, 22 nt, Human
uacagaggcacaugcaauuuuc

SEQ ID NO: 641172 - RNA, 22 nt, Human
aagcagcauaugacagcaucca

SEQ ID NO: 641173 - RNA, 19 nt, Human
ccagucccauacaggagau

SEQ ID NO: 641174 - RNA, 22 nt, Human
uccagaggcagcugcggucagg

SEQ ID NO: 641175 - RNA, 22 nt, Human
acaguggaagcaugaugcuauc

SEQ ID NO: 641176 - RNA, 22 nt, Human
uagagcuggccgggacagcugg

SEQ ID NO: 641177 - RNA, 22 nt, Human
acagcagguuuuaacuuugaag

SEQ ID NO: 641178 - RNA, 21 nt, Human
agucugagguggggccuagga

SEQ ID NO: 641179 - RNA, 22 nt, Human
acaaguuaccaaaaaagauuca

SEQ ID NO: 641180 - RNA, 22 nt, Human
uaucucuugcaugcuuuuuaga

SEQ ID NO: 641181 - RNA, 22 nt, Human
cuuggacuuuagucucucucca

SEQ ID NO: 641182 - RNA, 22 nt, Human
agggucuguuguuuguucugga

SEQ ID NO: 641183 - RNA, 22 nt, Human
caguuuuaaauuguuagauaau

SEQ ID NO: 641184 - RNA, 22 nt, Human
ucagacagauuuugacacuugc

SEQ ID NO: 641185 - RNA, 22 nt, Human
guucacaucacuucacugaacc

SEQ ID NO: 641186 - RNA, 22 nt, Human
uuacagagggcuucucugaacu

SEQ ID NO: 641187 - RNA, 22 nt, Human
ggcugcugaaguguggcaaucu

SEQ ID NO: 641188 - RNA, 22 nt, Human
ccagcuggugacauccccaacc

SEQ ID NO: 641189 - RNA, 20 nt, Human
ugagaaaguagagacucagg

SEQ ID NO: 641190 - RNA, 22 nt, Human
gaggcagcagggcugguuccuu

SEQ ID NO: 641191 - RNA, 22 nt, Human
gucuggagagcugagcagaguu

SEQ ID NO: 641192 - RNA, 22 nt, Human
cacacauuccaaaaucaagggu

SEQ ID NO: 641193 - RNA, 22 nt, Human
cuguuacuguauuuaaucaucu

SEQ ID NO: 641194 - RNA, 22 nt, Human
ggcuggcagaagugugcuggcu

SEQ ID NO: 641195 - RNA, 22 nt, Human
aggaaugucugagaaagaggca

SEQ ID NO: 641196 - RNA, 22 nt, Human
ugcugugucuuucugugaaaag

SEQ ID NO: 641197 - RNA, 20 nt, Human
aaucacaguuaacucuuucu

SEQ ID NO: 641198 - RNA, 22 nt, Human
acacauauaugugcguguauau

SEQ ID NO: 641199 - RNA, 22 nt, Human
uggcagcuccggguaggggcug

SEQ ID NO: 641200 - RNA, 22 nt, Human
gucugcccugcagacaugccuc

SEQ ID NO: 641201 - RNA, 22 nt, Human
cuaauaauagagguggcauuug

SEQ ID NO: 641202 - RNA, 22 nt, Human
aggaagcugccugggaugggaa

SEQ ID NO: 641203 - RNA, 22 nt, Human
aauugcacuuuagcaaugguga

SEQ ID NO: 641204 - RNA, 22 nt, Human
gccaccuggacucagagccagg

SEQ ID NO: 641205 - RNA, 22 nt, Human
aaacugcacacgaugugccuga

SEQ ID NO: 641206 - RNA, 22 nt, Human
gaugccugcauuucaggagagu

SEQ ID NO: 641207 - RNA, 22 nt, Human
ccaagcauuucuagccagucac

SEQ ID NO: 641208 - RNA, 22 nt, Human
cgauggagagguccugauaguu

SEQ ID NO: 641209 - RNA, 18 nt, Human
uuugcaaaggaaguaugg

SEQ ID NO: 641210 - RNA, 22 nt, Human
uuccaugacaccgagggaaguc

SEQ ID NO: 641211 - RNA, 22 nt, Human
ugacagaaauaguucuuaauuu

SEQ ID NO: 641212 - RNA, 22 nt, Human
cucccucacaaagcauucucuu

SEQ ID NO: 641213 - RNA, 22 nt, Human
cccucugaccuccugccacagu

SEQ ID NO: 641214 - RNA, 22 nt, Human
caggacccaucagccaggcacu

SEQ ID NO: 641215 - RNA, 22 nt, Human
cucucccuugggugggcuuugg

SEQ ID NO: 641216 - RNA, 22 nt, Human
aggcucaggucucaggucuggc

SEQ ID NO: 641217 - RNA, 22 nt, Human
cgcaggcacagaguggacagcg

SEQ ID NO: 641218 - RNA, 20 nt, Human
accauuaauguaagcuuugu

SEQ ID NO: 641219 - RNA, 22 nt, Human
auuuuagcuguccaguggauug

SEQ ID NO: 641220 - RNA, 22 nt, Human
ugcuugggaauguggagucaga

SEQ ID NO: 641221 - RNA, 22 nt, Human
caauacaucaggucaaaaugug

SEQ ID NO: 641222 - RNA, 20 nt, Human
ucugcccaccccggcuccca

SEQ ID NO: 641223 - RNA, 22 nt, Human
gcauccagguagagcuugcggg

SEQ ID NO: 641224 - RNA, 22 nt, Human
aagagaaggugaggaagccggu

SEQ ID NO: 641225 - RNA, 22 nt, Human
auucugagaggcacaaugugga

SEQ ID NO: 641226 - RNA, 22 nt, Human
ccagcauucacacugguuccuu

SEQ ID NO: 641227 - RNA, 19 nt, Human
uauuuucguggaggccuau

SEQ ID NO: 641228 - RNA, 22 nt, Human
gacagggcauggugcagaguuc

SEQ ID NO: 641229 - RNA, 22 nt, Human
uggaacaagacagcauagagcu

SEQ ID NO: 641230 - RNA, 22 nt, Human
uuguagaaaauucucuuggaua

SEQ ID NO: 641231 - RNA, 21 nt, Human
cugauaauuguuaaauuauuu

SEQ ID NO: 641232 - RNA, 22 nt, Human
ugcacaaauuuguguaugcuca

SEQ ID NO: 641233 - RNA, 20 nt, Human
uacaaagaaugagguucagg

SEQ ID NO: 641234 - RNA, 22 nt, Human
ggaggccuugccugcaggcaca

SEQ ID NO: 641235 - RNA, 22 nt, Human
acauaacacucuucucuaguga

SEQ ID NO: 641236 - RNA, 21 nt, Human
gccagcugcagggcuuccuug

SEQ ID NO: 641237 - RNA, 22 nt, Human
gugcacagauucagagguuuug

SEQ ID NO: 641238 - RNA, 22 nt, Human
cagcuccaaagccccacugucc

SEQ ID NO: 641239 - RNA, 22 nt, Human
augagagucucagagucucuuc

SEQ ID NO: 641240 - RNA, 22 nt, Human
uuugagaaacugauuauuaugg

SEQ ID NO: 641241 - RNA, 22 nt, Human
cccauggcagucagagauaaga

SEQ ID NO: 641242 - RNA, 22 nt, Human
aucaucuugaaagucuauguuu

SEQ ID NO: 641243 - RNA, 22 nt, Human
uguguuaaggugcaucuagugc

SEQ ID NO: 641244 - RNA, 22 nt, Human
gaggcagagacuccaccuucag

SEQ ID NO: 641245 - RNA, 22 nt, Human
gggcuccuccucugacuguggc

SEQ ID NO: 641246 - RNA, 23 nt, Human
uaucauuucagcucucugccugg

SEQ ID NO: 641247 - RNA, 22 nt, Human
ucucaguggacgugucugucuu

SEQ ID NO: 641248 - RNA, 22 nt, Human
uguuucaggaccuaucuuuuag

SEQ ID NO: 641249 - RNA, 21 nt, Human
aggagaccggcuuguuugugc

SEQ ID NO: 641250 - RNA, 22 nt, Human
ugggcuccguugccuggggcag

SEQ ID NO: 641251 - RNA, 22 nt, Human
ucaaugucugucuaucuauuua

SEQ ID NO: 641252 - RNA, 22 nt, Human
agcgauucacacacugggcugu

SEQ ID NO: 641253 - RNA, 19 nt, Human
caccccaguccucuuuccc

SEQ ID NO: 641254 - RNA, 22 nt, Human
uuugaaagacagaauauuuuug

SEQ ID NO: 641255 - RNA, 22 nt, Human
aggagcugugaaugggaggggu

SEQ ID NO: 641256 - RNA, 22 nt, Human
aagcgacugcagguuaaaacaa

SEQ ID NO: 641257 - RNA, 22 nt, Human
cugccaggggccucacaggcca

SEQ ID NO: 641258 - RNA, 22 nt, Human
agucccuucucaaagugugcgg

SEQ ID NO: 641259 - RNA, 22 nt, Human
ccagggcuucagagguuuuggc

SEQ ID NO: 641260 - RNA, 19 nt, Human
gaggggaggaauugacaag

SEQ ID NO: 641261 - RNA, 22 nt, Human
ugagcuguaaggcugucacuga

SEQ ID NO: 641262 - RNA, 23 nt, Human
aaaugacuaaauguucuuauaga

SEQ ID NO: 641263 - RNA, 22 nt, Human
gagcugcuggauauguggccug

SEQ ID NO: 641264 - RNA, 21 nt, Human
aggaguugcuguggccugguu

SEQ ID NO: 641265 - RNA, 21 nt, Human
ggacuuggaugguggcaguag

SEQ ID NO: 641266 - RNA, 22 nt, Human
acucugccuuucagcagaugaa

SEQ ID NO: 641267 - RNA, 22 nt, Human
aaauugcugggucccacccaag

SEQ ID NO: 641268 - RNA, 22 nt, Human
aagugacaccucuucccuuucc

SEQ ID NO: 641269 - RNA, 21 nt, Human
ugcagcuggguucugguuugc

SEQ ID NO: 641270 - RNA, 22 nt, Human
uggcuacaguggcauaucaaau

SEQ ID NO: 641271 - RNA, 22 nt, Human
gaagcacugugcugcuaaguug

SEQ ID NO: 641272 - RNA, 22 nt, Human
ucauuuacaugucuuucucuga

SEQ ID NO: 641273 - RNA, 22 nt, Human
gcugucacaaauauuucucagc

SEQ ID NO: 641274 - RNA, 22 nt, Human
acucugggauuguuucugguau

SEQ ID NO: 641275 - RNA, 22 nt, Human
uagacagugagcuaugaguggu

SEQ ID NO: 641276 - RNA, 22 nt, Human
acuguuucucaaauuauguggu

SEQ ID NO: 641277 - RNA, 22 nt, Human
gcugucugcugggucgcucagg

SEQ ID NO: 641278 - RNA, 22 nt, Human
acuuuucugcagaugaucucuu

SEQ ID NO: 641279 - RNA, 22 nt, Human
gcugucaguuuuacccacagac

SEQ ID NO: 641280 - RNA, 22 nt, Human
gaagagcuuaguuguccuagaa

SEQ ID NO: 641281 - RNA, 22 nt, Human
uuuccacacaggcucuacuacu

SEQ ID NO: 641282 - RNA, 20 nt, Human
ggaacacuguucauucugua

SEQ ID NO: 641283 - RNA, 22 nt, Human
gucuccugcccccggugcuugg

SEQ ID NO: 641284 - RNA, 22 nt, Human
caaaugcuggcccugcuacuua

SEQ ID NO: 641285 - RNA, 18 nt, Human
cuggcuuucuuauccauc

SEQ ID NO: 641286 - RNA, 22 nt, Human
gagcuagaguuuguaggguaga

SEQ ID NO: 641287 - RNA, 22 nt, Human
ugcaggcugcaccccugcccug

SEQ ID NO: 641288 - RNA, 19 nt, Human
gggcccagcauggaggguu

SEQ ID NO: 641289 - RNA, 22 nt, Human
uguggagaagaaggccacugca

SEQ ID NO: 641290 - RNA, 22 nt, Human
gggauggccuagacuagcuugg

SEQ ID NO: 641291 - RNA, 22 nt, Human
agcccuccucacaucagcgucc

SEQ ID NO: 641292 - RNA, 22 nt, Human
uagcuuuuauccacugcuuuug

SEQ ID NO: 641293 - RNA, 22 nt, Human
agcagcugcagagggcuccccc

SEQ ID NO: 641294 - RNA, 22 nt, Human
ucucacccaacgugcaaugagu

SEQ ID NO: 641295 - RNA, 22 nt, Human
ugcagggccuuguugaugugcu

SEQ ID NO: 641296 - RNA, 22 nt, Human
ucacacaggguucuggucucau

SEQ ID NO: 641297 - RNA, 22 nt, Human
aaacauuugcaacucgguuugg

SEQ ID NO: 641298 - RNA, 22 nt, Human
cauggccacaucuagcugcaag

SEQ ID NO: 641299 - RNA, 22 nt, Human
gaccucuugcacccuggcucuu

SEQ ID NO: 641300 - RNA, 22 nt, Human
uuaaagcccagcauauacuagg

SEQ ID NO: 641301 - RNA, 22 nt, Human
acuccuggggcugccaucacag

SEQ ID NO: 641302 - RNA, 22 nt, Human
ccugucuacauaacugugugaa

SEQ ID NO: 641303 - RNA, 19 nt, Human
gcuuuucuccuucaagcca

SEQ ID NO: 641304 - RNA, 22 nt, Human
aucagcucauuuugauggaaau

SEQ ID NO: 641305 - RNA, 22 nt, Human
gaaauuuauuaucuacaucauu

SEQ ID NO: 641306 - RNA, 22 nt, Human
uggguaaacugggucuggagag

SEQ ID NO: 641307 - RNA, 22 nt, Human
ucauccugucucacuuuuugcu

SEQ ID NO: 641308 - RNA, 22 nt, Human
ugggucaguuugggggccagcc

SEQ ID NO: 641309 - RNA, 22 nt, Human
uuugacaggacuaacauauggc

SEQ ID NO: 641310 - RNA, 22 nt, Human
uguguucauuucucucugcugu

SEQ ID NO: 641311 - RNA, 22 nt, Human
gauccccaggacuagggggugg

SEQ ID NO: 641312 - RNA, 22 nt, Human
auggcuugucuaugagugcucu

SEQ ID NO: 641313 - RNA, 22 nt, Human
accugcuuuauuccuccugccu

SEQ ID NO: 641314 - RNA, 22 nt, Human
ucaggcuuggugcuccagugcc

SEQ ID NO: 641315 - RNA, 22 nt, Human
uugaagagugccuuccagacau

SEQ ID NO: 641316 - RNA, 22 nt, Human
gaaggccacaaaaaaugucaua

SEQ ID NO: 641317 - RNA, 22 nt, Human
ucauguuauugacucauaauau

SEQ ID NO: 641318 - RNA, 22 nt, Human
gggcugagggguaucucauggg

SEQ ID NO: 641319 - RNA, 20 nt, Human
agaagucagcucagaaguga

SEQ ID NO: 641320 - RNA, 22 nt, Human
cagaagugaaugugauaaacca

SEQ ID NO: 641321 - RNA, 22 nt, Human
cauuuacagugagaguuuuuac

SEQ ID NO: 641322 - RNA, 22 nt, Human
aagauucuagaggaacuucuua

SEQ ID NO: 641323 - RNA, 22 nt, Human
gaacacagugugaucguauguc

SEQ ID NO: 641324 - RNA, 22 nt, Human
uccucagaauggauggcagggg

SEQ ID NO: 641325 - RNA, 22 nt, Human
ccucgaccuccccaggcucagg

SEQ ID NO: 641326 - RNA, 22 nt, Human
uggagguggcaucugacagcug

SEQ ID NO: 641327 - RNA, 22 nt, Human
aaaggucuugucuugacagagu

SEQ ID NO: 641328 - RNA, 22 nt, Human
ucucagugauggcccauuugga

SEQ ID NO: 641329 - RNA, 22 nt, Human
gcauuucugugcauacacauga

SEQ ID NO: 641330 - RNA, 22 nt, Human
uauguacucaucaacuauugaa

SEQ ID NO: 641331 - RNA, 23 nt, Human
ccagucucacguauacaggauuu

SEQ ID NO: 641332 - RNA, 22 nt, Human
gauuaacaaauuucauauccaa

SEQ ID NO: 641333 - RNA, 22 nt, Human
ggggccuuggaucugugccccg

SEQ ID NO: 641334 - RNA, 22 nt, Human
augggcugacccagucguggca

SEQ ID NO: 641335 - RNA, 22 nt, Human
aggaagccuggggcugcccucg

SEQ ID NO: 641336 - RNA, 20 nt, Human
ggcaagcaacugagggagga

SEQ ID NO: 641337 - RNA, 20 nt, Human
cugaaagacguaacagugca

SEQ ID NO: 641338 - RNA, 22 nt, Human
aguggcagagucaggguuugga

SEQ ID NO: 641339 - RNA, 22 nt, Human
auguacauuuuccuaauguuuu

SEQ ID NO: 641340 - RNA, 22 nt, Human
acugcuucuccaaugaauuaga

SEQ ID NO: 641341 - RNA, 22 nt, Human
ggaccugcucucccaguucucu

SEQ ID NO: 641342 - RNA, 17 nt, Human
gcugccugcaacugacu

SEQ ID NO: 641343 - RNA, 22 nt, Human
auucccaucgucaacuucacug

SEQ ID NO: 641344 - RNA, 22 nt, Human
auaaaugugaauuagagcuuug

SEQ ID NO: 641345 - RNA, 22 nt, Human
ccacccuguguuuuugccauug

SEQ ID NO: 641346 - RNA, 22 nt, Human
auuuauugagacuuaacaaccc

SEQ ID NO: 641347 - RNA, 22 nt, Human
uaucacauaguguuuaguaaau

SEQ ID NO: 641348 - RNA, 18 nt, Human
gcagggacacagggucac

SEQ ID NO: 641349 - RNA, 22 nt, Human
guuauuuuaucucugagagguu

SEQ ID NO: 641350 - RNA, 22 nt, Human
gggagggaggugaugcuuggcu

SEQ ID NO: 641351 - RNA, 22 nt, Human
uugaaacaguagcucauagacc

SEQ ID NO: 641352 - RNA, 22 nt, Human
uggcccaggugcaagagacaga

SEQ ID NO: 641353 - RNA, 22 nt, Human
gccacaugucaugugcucagua

SEQ ID NO: 641354 - RNA, 22 nt, Human
aggguauaaagagcaagcagaa

SEQ ID NO: 641355 - RNA, 22 nt, Human
uaacaaugcaaaaugaauuuag

SEQ ID NO: 641356 - RNA, 22 nt, Human
aggccugcagcaggagcaaacc

SEQ ID NO: 641357 - RNA, 22 nt, Human
ugcaggcucacccuggagcuga

SEQ ID NO: 641358 - RNA, 22 nt, Human
ggcuccagaggccuuaccugca

SEQ ID NO: 641359 - RNA, 21 nt, Human
cagacaugagucucagcuuug

SEQ ID NO: 641360 - RNA, 22 nt, Human
cugcaguagcagagcugaguag

SEQ ID NO: 641361 - RNA, 22 nt, Human
ugaagccagggacugacacuuc

SEQ ID NO: 641362 - RNA, 22 nt, Human
caugucacaauucuuaauggga

SEQ ID NO: 641363 - RNA, 22 nt, Human
caaugucugggagaccugugau

SEQ ID NO: 641364 - RNA, 22 nt, Human
cugggccugucagggcuuuuug

SEQ ID NO: 641365 - RNA, 19 nt, Human
ucagcccaggcugggaagc

SEQ ID NO: 641366 - RNA, 22 nt, Human
aucauucaaaugauuuggaggu

SEQ ID NO: 641367 - RNA, 22 nt, Human
uucagacacagcgcugggaaau

SEQ ID NO: 641368 - RNA, 22 nt, Human
aauaagaacaacuaagguuuau

SEQ ID NO: 641369 - RNA, 22 nt, Human
ucugaggugucacaaggccagg

SEQ ID NO: 641370 - RNA, 22 nt, Human
ugcuccguucuucugcuucuug

SEQ ID NO: 641371 - RNA, 23 nt, Human
gggaagugaggagccccucagcc

SEQ ID NO: 641372 - RNA, 22 nt, Human
ggagacagugguagggccuaag

SEQ ID NO: 641373 - RNA, 22 nt, Human
cccuggcugccagucaccagac

SEQ ID NO: 641374 - RNA, 22 nt, Human
uucaaaugcaaguuacuacuuu

SEQ ID NO: 641375 - RNA, 22 nt, Human
ucuuuuaagccucuggcauagg

SEQ ID NO: 641376 - RNA, 22 nt, Human
aacagcagggacuugaauggaa

SEQ ID NO: 641377 - RNA, 22 nt, Human
auuucaacguuagauguaauag

SEQ ID NO: 641378 - RNA, 22 nt, Human
gcugcucagugggccugagccu

SEQ ID NO: 641379 - RNA, 22 nt, Human
agaaaaacuaagaguggguggu

SEQ ID NO: 641380 - RNA, 22 nt, Human
gugagcagaauaaggguugaga

SEQ ID NO: 641381 - RNA, 21 nt, Human
acacaacaggcagucauuuuc

SEQ ID NO: 641382 - RNA, 22 nt, Human
uucacaaaaaugcugaacaguu

SEQ ID NO: 641383 - RNA, 22 nt, Human
uuaugcaaagaaauagacuaau

SEQ ID NO: 641384 - RNA, 22 nt, Human
ugcugcucucagccaccaggaa

SEQ ID NO: 641385 - RNA, 22 nt, Human
uaguucuugguucuuaguucuu

SEQ ID NO: 641386 - RNA, 22 nt, Human
ucucugggcccagaccuuccuu

SEQ ID NO: 641387 - RNA, 22 nt, Human
caggcagacauuuuugacauag

SEQ ID NO: 641388 - RNA, 22 nt, Human
uuuugugacagaaagauuaagu

SEQ ID NO: 641389 - RNA, 17 nt, Human
aggugcuggagcaucag

SEQ ID NO: 641390 - RNA, 21 nt, Human
agaggccaagucaucauuucc

SEQ ID NO: 641391 - RNA, 22 nt, Human
gcucaguguucaucuguaugca

SEQ ID NO: 641392 - RNA, 22 nt, Human
augggcagggcaguguauaaga

SEQ ID NO: 641393 - RNA, 22 nt, Human
ccagauucauagaaacucauag

SEQ ID NO: 641394 - RNA, 22 nt, Human
ucccugggcaucacguugcuuc

SEQ ID NO: 641395 - RNA, 22 nt, Human
cuucuuguaaacgguuccccga

SEQ ID NO: 641396 - RNA, 22 nt, Human
ugcugcuuugauguguaaauca

SEQ ID NO: 641397 - RNA, 22 nt, Human
uuucugaacuugguacuggagc

SEQ ID NO: 641398 - RNA, 22 nt, Human
cuggcugcuuguuuugaugggu

SEQ ID NO: 641399 - RNA, 22 nt, Human
acagccuggccugaguuaaggc

SEQ ID NO: 641400 - RNA, 22 nt, Human
gaaaggccauuucugaggguuu

SEQ ID NO: 641401 - RNA, 22 nt, Human
cuggcccagagcucuggccuuu

SEQ ID NO: 641402 - RNA, 22 nt, Human
cauugucucuugucauuuagua

SEQ ID NO: 641403 - RNA, 22 nt, Human
uuauugaagcaagcuuuucuga

SEQ ID NO: 641404 - RNA, 22 nt, Human
uucauauuucuuuaaggacuuu

SEQ ID NO: 641405 - RNA, 22 nt, Human
aaucgaaagcugagggagcauu

SEQ ID NO: 641406 - RNA, 22 nt, Human
uuggcugguaagccaaaugaaa

SEQ ID NO: 641407 - RNA, 22 nt, Human
ggcuucucgugccgaagcaaga

SEQ ID NO: 641408 - RNA, 22 nt, Human
ggcugagcacuuuaggcaggag

SEQ ID NO: 641409 - RNA, 22 nt, Human
ugcuggcuguguaccaucucaa

SEQ ID NO: 641410 - RNA, 22 nt, Human
gggaguggggcuuaccuugaag

SEQ ID NO: 641411 - RNA, 22 nt, Human
gcugaggcuuagcuaaaaauuu

SEQ ID NO: 641412 - RNA, 22 nt, Human
acuuuggcacagaacuuccauu

SEQ ID NO: 641413 - RNA, 22 nt, Human
uggagaugaacauggugauguu

SEQ ID NO: 641414 - RNA, 22 nt, Human
uuuccuggaccaacugagauug

SEQ ID NO: 641415 - RNA, 22 nt, Human
ucagugccaugggcagacaggc

SEQ ID NO: 641416 - RNA, 22 nt, Human
uucucugagauagacuaagugg

SEQ ID NO: 641417 - RNA, 22 nt, Human
ugaaggaaugaguauacuguuu

SEQ ID NO: 641418 - RNA, 22 nt, Human
gugaacaggagaaagugaugga

SEQ ID NO: 641419 - RNA, 20 nt, Human
accaggccccgggcccugca

SEQ ID NO: 641420 - RNA, 22 nt, Human
ccugcacuaccuggggcugcug

SEQ ID NO: 641421 - RNA, 22 nt, Human
gaaauaaccucaugcaccauga

SEQ ID NO: 641422 - RNA, 22 nt, Human
uauuccuuggcaaaaaauauau

SEQ ID NO: 641423 - RNA, 22 nt, Human
gcagcguggggacaggagcuca

SEQ ID NO: 641424 - RNA, 23 nt, Human
gcccucaguagaaaauguuagaa

SEQ ID NO: 641425 - RNA, 22 nt, Human
cugggccacaaaaaacuccugu

SEQ ID NO: 641426 - RNA, 22 nt, Human
accuggaugcuggccuugccuu

SEQ ID NO: 641427 - RNA, 21 nt, Human
uaagaacauuaucuucuuccu

SEQ ID NO: 641428 - RNA, 22 nt, Human
caugcagauuugcugagauaau

SEQ ID NO: 641429 - RNA, 22 nt, Human
caggcagaaauuuuguuucauu

SEQ ID NO: 641430 - RNA, 22 nt, Human
agaugugggcaauggaauggag

SEQ ID NO: 641431 - RNA, 22 nt, Human
ugacaaagacaaagauaugucc

SEQ ID NO: 641432 - RNA, 22 nt, Human
aagaugugcuaucaacuggaga

SEQ ID NO: 641433 - RNA, 22 nt, Human
ucugucugccuugugagggcac

SEQ ID NO: 641434 - RNA, 22 nt, Human
aaagugcaaggauuacaggcau

SEQ ID NO: 641435 - RNA, 22 nt, Human
cuccugggcuaugucugcuugg

SEQ ID NO: 641436 - RNA, 22 nt, Human
ucuggcuuuccuggagcaagaa

SEQ ID NO: 641437 - RNA, 22 nt, Human
augggcaguguauuggaaggaa

SEQ ID NO: 641438 - RNA, 22 nt, Human
auauuuguuuggcagaguucag

SEQ ID NO: 641439 - RNA, 22 nt, Human
auuauuaaagcuuaggucuuau

SEQ ID NO: 641440 - RNA, 22 nt, Human
guggcagucgcugacagauaca

SEQ ID NO: 641441 - RNA, 22 nt, Human
ucaccaauaauaacuugagaau

SEQ ID NO: 641442 - RNA, 22 nt, Human
aagucugagagaaacucucuca

SEQ ID NO: 641443 - RNA, 22 nt, Human
ucaaggaaggucuguugcucca

SEQ ID NO: 641444 - RNA, 21 nt, Human
aucuggaaauucugccagaga

SEQ ID NO: 641445 - RNA, 22 nt, Human
cugauggaugcuacguaagagg

SEQ ID NO: 641446 - RNA, 22 nt, Human
ggcugggcagcagcuguuaagc

SEQ ID NO: 641447 - RNA, 22 nt, Human
ggcuuugcccuggacugaggca

SEQ ID NO: 641448 - RNA, 22 nt, Human
aacaauuagacugacgguauua

SEQ ID NO: 641449 - RNA, 22 nt, Human
ggcucagacucccaggcccucu

SEQ ID NO: 641450 - RNA, 22 nt, Human
cuuccagcuuguggcgcuuucc

SEQ ID NO: 641451 - RNA, 22 nt, Human
uucagggacuuagugucaguuu

SEQ ID NO: 641452 - RNA, 22 nt, Human
ggaagggaguaguuggaaugca

SEQ ID NO: 641453 - RNA, 22 nt, Human
cccugauguuuucucugccuuu

SEQ ID NO: 641454 - RNA, 22 nt, Human
gcagaaguaccucguucuaguu

SEQ ID NO: 641455 - RNA, 21 nt, Human
ucagcagaaggaccacuaggg

SEQ ID NO: 641456 - RNA, 22 nt, Human
gggcugaucgcuugagcucagg

SEQ ID NO: 641457 - RNA, 22 nt, Human
agccacaaaggcuugccucgga

SEQ ID NO: 641458 - RNA, 22 nt, Human
agccucucuuucugguggcuaa

SEQ ID NO: 641459 - RNA, 22 nt, Human
gaauccaggguuguuugagcua

SEQ ID NO: 641460 - RNA, 22 nt, Human
gagcacaguccuuuuguuaaaa

SEQ ID NO: 641461 - RNA, 22 nt, Human
agggaauucacuggaacgcccu

SEQ ID NO: 641462 - RNA, 22 nt, Human
gugggcugcccuugaggucagc

SEQ ID NO: 641463 - RNA, 22 nt, Human
caguccuggagcccuucuuggc

SEQ ID NO: 641464 - RNA, 22 nt, Human
uuaauccauggcaguuauuaaa

SEQ ID NO: 641465 - RNA, 22 nt, Human
ccugcugcuuaggccauauuuc

SEQ ID NO: 641466 - RNA, 16 nt, Human
gaggcuggcagauguc

SEQ ID NO: 641467 - RNA, 23 nt, Human
uucaucaguugcuguugcagaac

SEQ ID NO: 641468 - RNA, 22 nt, Human
aauagcauaagaugucaaauag

SEQ ID NO: 641469 - RNA, 22 nt, Human
ucugcagagguaauuuacagau

SEQ ID NO: 641470 - RNA, 22 nt, Human
ccucuggguaucuguggaagua

SEQ ID NO: 641471 - RNA, 22 nt, Human
uucacauggcaauagagaggga

SEQ ID NO: 641472 - RNA, 22 nt, Human
auuaacacuuuggagucugcuc

SEQ ID NO: 641473 - RNA, 22 nt, Human
uuagaaucagaagagagguauu

SEQ ID NO: 641474 - RNA, 22 nt, Human
ugccaucacugaacuucugaaa

SEQ ID NO: 641475 - RNA, 22 nt, Human
uuugcaaaaugaggugaagagu

SEQ ID NO: 641476 - RNA, 22 nt, Human
uacacuuguucaaacagcaaaa

SEQ ID NO: 641477 - RNA, 22 nt, Human
acaauauuugggggcaguuugu

SEQ ID NO: 641478 - RNA, 22 nt, Human
acagacuguuugguucaugucu

SEQ ID NO: 641479 - RNA, 23 nt, Human
gcuggcuggcaguaaagguuguu

SEQ ID NO: 641480 - RNA, 22 nt, Human
agaugaaagauuuuuauagaga

SEQ ID NO: 641481 - RNA, 22 nt, Human
gucugaauucuguguaacucua

SEQ ID NO: 641482 - RNA, 22 nt, Human
ccagagagauugcuucuaaaga

SEQ ID NO: 641483 - RNA, 23 nt, Human
auauggcuguuguguguuaacau

SEQ ID NO: 641484 - RNA, 22 nt, Human
uuccaggaugggcuguccuacu

SEQ ID NO: 641485 - RNA, 22 nt, Human
aaugaucaccugguaaagagag

SEQ ID NO: 641486 - RNA, 22 nt, Human
aagggcuggccacauucugggu

SEQ ID NO: 641487 - RNA, 22 nt, Human
ggcucccuggaaaucccgaggc

SEQ ID NO: 641488 - RNA, 22 nt, Human
auuucugauaaacguaagcugc

SEQ ID NO: 641489 - RNA, 22 nt, Human
agaggcugaaugaugucaucau

SEQ ID NO: 641490 - RNA, 22 nt, Human
acuagggaaaguuauguucaca

SEQ ID NO: 641491 - RNA, 22 nt, Human
uugcuuuacauguucugguaaa

SEQ ID NO: 641492 - RNA, 22 nt, Human
ucuacugugguccuuguaacca

SEQ ID NO: 641493 - RNA, 22 nt, Human
ccuggagccccucuggccagcc

SEQ ID NO: 641494 - RNA, 22 nt, Human
augcaggagagcauguuuaaga

SEQ ID NO: 641495 - RNA, 22 nt, Human
agggagcuauuucaggguuauu

SEQ ID NO: 641496 - RNA, 22 nt, Human
gccaugaggcuccgagaaguca

SEQ ID NO: 641497 - RNA, 22 nt, Human
cauggccaggcacgcgcauagc

SEQ ID NO: 641498 - RNA, 22 nt, Human
aauugcuuguuuucggucauaa

SEQ ID NO: 641499 - RNA, 22 nt, Human
ugggccacacacagaagaauca

SEQ ID NO: 641500 - RNA, 22 nt, Human
cacccacauuccaucacucugc

SEQ ID NO: 641501 - RNA, 22 nt, Human
acacuggaccauuuaaacuuga

SEQ ID NO: 641502 - RNA, 22 nt, Human
auauucuugugauuauaaagua

SEQ ID NO: 641503 - RNA, 22 nt, Human
cccugggaguccacugauguca

SEQ ID NO: 641504 - RNA, 22 nt, Human
uguggccugggaaaugaguguu

SEQ ID NO: 641505 - RNA, 22 nt, Human
agacauaggauuccacauagca

SEQ ID NO: 641506 - RNA, 22 nt, Human
ggaauauagccaguaacaguca

SEQ ID NO: 641507 - RNA, 22 nt, Human
ucuguuuaaugggaaugauacu

SEQ ID NO: 641508 - RNA, 22 nt, Human
uaaugucuccaggguugaccua

SEQ ID NO: 641509 - RNA, 22 nt, Human
uuggcccuccaccuggcugugc

SEQ ID NO: 641510 - RNA, 22 nt, Human
cagagcugcgcuuuuuccuggu

SEQ ID NO: 641511 - RNA, 22 nt, Human
uuucugcaucucuacaguuguu

SEQ ID NO: 641512 - RNA, 23 nt, Human
ucugugcuacaaaucgcgucugu

SEQ ID NO: 641513 - RNA, 20 nt, Human
cucaguguggccugaguguu

SEQ ID NO: 641514 - RNA, 22 nt, Human
uacagcugcaaggguuucuggg

SEQ ID NO: 641515 - RNA, 22 nt, Human
cuuccucuagccuaguaaugcc

SEQ ID NO: 641516 - RNA, 23 nt, Human
agcacacuuguacaaugcccuag

SEQ ID NO: 641517 - RNA, 22 nt, Human
ugagguaauaaguguuuguuuu

SEQ ID NO: 641518 - RNA, 19 nt, Human
uuccccuccccagggauag

SEQ ID NO: 641519 - RNA, 22 nt, Human
uucaguuccuuaucauaggguu

SEQ ID NO: 641520 - RNA, 22 nt, Human
cguucacaucguauuauuggga

SEQ ID NO: 641521 - RNA, 20 nt, Human
agagccuugaggaagaugau

SEQ ID NO: 641522 - RNA, 22 nt, Human
gcuuccagagacugagcucuuc

SEQ ID NO: 641523 - RNA, 22 nt, Human
uguggggcugugguguucuucu

SEQ ID NO: 641524 - RNA, 22 nt, Human
acagaaauauagaagguaggaa

SEQ ID NO: 641525 - RNA, 23 nt, Human
gaccuggcuuugaaucuugacuc

SEQ ID NO: 641526 - RNA, 21 nt, Human
cgggcuggccgggcccucacc

SEQ ID NO: 641527 - RNA, 22 nt, Human
uuauuaagugccuacaauaaag

SEQ ID NO: 641528 - RNA, 22 nt, Human
cugccuguuuccucuugcuccc

SEQ ID NO: 641529 - RNA, 22 nt, Human
auaauccaugucuagaguaaag

SEQ ID NO: 641530 - RNA, 22 nt, Human
cugucuucuaccuucaaccucc

SEQ ID NO: 641531 - RNA, 22 nt, Human
ccuugucuugcacagaugcagc

SEQ ID NO: 641532 - RNA, 22 nt, Human
guucuuccucauugcuuugaag

SEQ ID NO: 641533 - RNA, 22 nt, Human
aagaaauauugggccuuauaaa

SEQ ID NO: 641534 - RNA, 22 nt, Human
ucagcaguuuuauaugcagcuu

SEQ ID NO: 641535 - RNA, 22 nt, Human
acugggcaccaucaugagaugg

SEQ ID NO: 641536 - RNA, 22 nt, Human
ucccuggaacagagagacaacg

SEQ ID NO: 641537 - RNA, 22 nt, Human
uuuuggaaugaggaacauccag

SEQ ID NO: 641538 - RNA, 21 nt, Human
cuuugguuucugacuugcaua

SEQ ID NO: 641539 - RNA, 22 nt, Human
uuuucucaggugcuuaucuaag

SEQ ID NO: 641540 - RNA, 22 nt, Human
acaggcucuggggcaggauggc

SEQ ID NO: 641541 - RNA, 22 nt, Human
uuucugaagggcagcagacucu

SEQ ID NO: 641542 - RNA, 22 nt, Human
aaggugucggguuagcucagcc

SEQ ID NO: 641543 - RNA, 22 nt, Human
ucugucagccccucagcuguca

SEQ ID NO: 641544 - RNA, 22 nt, Human
uggaagaauaggauagaagaac

SEQ ID NO: 641545 - RNA, 22 nt, Human
gcccacacagcagauccuuugg

SEQ ID NO: 641546 - RNA, 22 nt, Human
aagugucugcaaaaugacagag

SEQ ID NO: 641547 - RNA, 22 nt, Human
augaggcaggagugcaguggca

SEQ ID NO: 641548 - RNA, 22 nt, Human
ugggcugcuucucaaaugucuc

SEQ ID NO: 641549 - RNA, 18 nt, Human
cagcucuucuccaguaac

SEQ ID NO: 641550 - RNA, 22 nt, Human
accuuuaucgccaucauugugc

SEQ ID NO: 641551 - RNA, 22 nt, Human
gcugcucuccauggccgugagu

SEQ ID NO: 641552 - RNA, 22 nt, Human
aaaugaacaguugcauucucug

SEQ ID NO: 641553 - RNA, 22 nt, Human
ugggagcaccuugagggcagaa

SEQ ID NO: 641554 - RNA, 22 nt, Human
gaaacagcuuuaagugauacug

SEQ ID NO: 641555 - RNA, 18 nt, Human
gacaggugggugagacca

SEQ ID NO: 641556 - RNA, 22 nt, Human
uccagguauuacuaaguguuaa

SEQ ID NO: 641557 - RNA, 22 nt, Human
cauagaauaugugugauuguua

SEQ ID NO: 641558 - RNA, 18 nt, Human
uugcuucuuuucucuagg

SEQ ID NO: 641559 - RNA, 22 nt, Human
uuuuaagaacuguucugugcuu

SEQ ID NO: 641560 - RNA, 22 nt, Human
uugcaaaggggaauaaagcaau

SEQ ID NO: 641561 - RNA, 22 nt, Human
ccuuugggugaauuccucucuu

SEQ ID NO: 641562 - RNA, 22 nt, Human
cagggcaguuugugccuaugag

SEQ ID NO: 641563 - RNA, 22 nt, Human
uccugagcccuguaggacccug

SEQ ID NO: 641564 - RNA, 22 nt, Human
ggccagaaaguuaagcuguggc

SEQ ID NO: 641565 - RNA, 22 nt, Human
auucucucuucugcugcccgug

SEQ ID NO: 641566 - RNA, 22 nt, Human
aggcuccaugguucucccucag

SEQ ID NO: 641567 - RNA, 22 nt, Human
gagagugaggccugggaaucua

SEQ ID NO: 641568 - RNA, 22 nt, Human
ucacaugaggcauccccgggca

SEQ ID NO: 641569 - RNA, 22 nt, Human
gggaaggaaaguuauuagcaga

SEQ ID NO: 641570 - RNA, 22 nt, Human
cccaggccuggucugggccagu

SEQ ID NO: 641571 - RNA, 22 nt, Human
gacagcagggacauguaggaag

SEQ ID NO: 641572 - RNA, 22 nt, Human
acaaaggcaggauugacuuagu

SEQ ID NO: 641573 - RNA, 22 nt, Human
gagacacaggugguuccuguca

SEQ ID NO: 641574 - RNA, 22 nt, Human
ucauaaaaguacucauguucau

SEQ ID NO: 641575 - RNA, 22 nt, Human
aaagccuuggucaucugguucc

SEQ ID NO: 641576 - RNA, 22 nt, Human
acaucugacaugaucuucagua

SEQ ID NO: 641577 - RNA, 22 nt, Human
caccagaacaagacaggagaau

SEQ ID NO: 641578 - RNA, 22 nt, Human
cugcagaggguuugagcauccu

SEQ ID NO: 641579 - RNA, 22 nt, Human
gccaguggcccucuggagaagg

SEQ ID NO: 641580 - RNA, 19 nt, Human
gcugucugaugcugagguc

SEQ ID NO: 641581 - RNA, 22 nt, Human
ugggucagacagccagugggcc

SEQ ID NO: 641582 - RNA, 22 nt, Human
ucucuuuacuuucaccaauuug

SEQ ID NO: 641583 - RNA, 22 nt, Human
ugcuuaauaggaguugaacauu

SEQ ID NO: 641584 - RNA, 22 nt, Human
auguguaucuaagguguucuau

SEQ ID NO: 641585 - RNA, 22 nt, Human
uuuuuaucuuguaugugucucu

SEQ ID NO: 641586 - RNA, 22 nt, Human
uguucacaaggugaugcuuuga

SEQ ID NO: 641587 - RNA, 22 nt, Human
agcugcagcguucauuuuucca

SEQ ID NO: 641588 - RNA, 22 nt, Human
agcagguguuggcugggccauc

SEQ ID NO: 641589 - RNA, 22 nt, Human
gauauauuuggaccagagcauu

SEQ ID NO: 641590 - RNA, 18 nt, Human
agugcaugcuaggggaag

SEQ ID NO: 641591 - RNA, 22 nt, Human
gaggagagagggacugucugca

SEQ ID NO: 641592 - RNA, 22 nt, Human
agccagagauccaucccuagga

SEQ ID NO: 641593 - RNA, 22 nt, Human
uggcagcuugaaugcagucuuu

SEQ ID NO: 641594 - RNA, 22 nt, Human
gcuacaggggucaguccuuugc

SEQ ID NO: 641595 - RNA, 22 nt, Human
cuguggggaagauagaaccgac

SEQ ID NO: 641596 - RNA, 22 nt, Human
cucuacucuuaacacagcuagg

SEQ ID NO: 641597 - RNA, 22 nt, Human
auauacaguuuuacaggguuuc

SEQ ID NO: 641598 - RNA, 22 nt, Human
cuggguaaguuccuaaggcuca

SEQ ID NO: 641599 - RNA, 22 nt, Human
uuucccuuugcacucuacaauu

SEQ ID NO: 641600 - RNA, 22 nt, Human
caaugaaaaugaggacuccugu

SEQ ID NO: 641601 - RNA, 22 nt, Human
cuuggaggaaaggcagggagac

SEQ ID NO: 641602 - RNA, 22 nt, Human
agguggggaggagugucucuuu

SEQ ID NO: 641603 - RNA, 21 nt, Human
augaagucuaugcuucugugu

SEQ ID NO: 641604 - RNA, 22 nt, Human
cugcuucacguugugccuuguu

SEQ ID NO: 641605 - RNA, 21 nt, Human
gauuuuaaagagacugccaca

SEQ ID NO: 641606 - RNA, 22 nt, Human
gaagcccaggcuuccuuggcuu

SEQ ID NO: 641607 - RNA, 22 nt, Human
ucuuccaagguugcacacuauc

SEQ ID NO: 641608 - RNA, 22 nt, Human
agaaucaauucacugcugcagc

SEQ ID NO: 641609 - RNA, 22 nt, Human
ccucacucuuguccuggcaggu

SEQ ID NO: 641610 - RNA, 22 nt, Human
ccaguguguucccugccucacu

SEQ ID NO: 641611 - RNA, 22 nt, Human
acauuuggcaagaaagagaaac

SEQ ID NO: 641612 - RNA, 22 nt, Human
cuaggcuggagugcauuggcgu

SEQ ID NO: 641613 - RNA, 22 nt, Human
cuuagcuagaggcaauuauguu

SEQ ID NO: 641614 - RNA, 22 nt, Human
aguguuuaucagacaagcccug

SEQ ID NO: 641615 - RNA, 22 nt, Human
ggugguugcauaggccagcagc

SEQ ID NO: 641616 - RNA, 22 nt, Human
ccagaggcggagguuugcagug

SEQ ID NO: 641617 - RNA, 22 nt, Human
agagugguacuucuuuuucuuc

SEQ ID NO: 641618 - RNA, 22 nt, Human
aaugucauagcaaagagaguga

SEQ ID NO: 641619 - RNA, 22 nt, Human
ucagaacauugacauucuuauu

SEQ ID NO: 641620 - RNA, 23 nt, Human
agggaaauacugcaauuuuugga

SEQ ID NO: 641621 - RNA, 22 nt, Human
ggccuagggaguggccaugccu

SEQ ID NO: 641622 - RNA, 19 nt, Human
agagucugugcucuuccua

SEQ ID NO: 641623 - RNA, 22 nt, Human
aggcugucuuccucccucuugg

SEQ ID NO: 641624 - RNA, 22 nt, Human
cuggggggagcugcguccagca

SEQ ID NO: 641625 - RNA, 22 nt, Human
uccuggagaacugauucgcggg

SEQ ID NO: 641626 - RNA, 22 nt, Human
augcuggggccucagaccagaa

SEQ ID NO: 641627 - RNA, 22 nt, Human
gcaaauauucaagacuuuucca

SEQ ID NO: 641628 - RNA, 23 nt, Human
ugacaaagcgagacuccagcuca

SEQ ID NO: 641629 - RNA, 22 nt, Human
aacuaucacaaacagagugucu

SEQ ID NO: 641630 - RNA, 22 nt, Human
aauguggccacuuuuuucuggg

SEQ ID NO: 641631 - RNA, 21 nt, Human
caaaaggauaggaaauuaggg

SEQ ID NO: 641632 - RNA, 22 nt, Human
cugagcccuugcuuaugcuucc

SEQ ID NO: 641633 - RNA, 22 nt, Human
ggcagcaugagccuggugaauu

SEQ ID NO: 641634 - RNA, 20 nt, Human
agggcccaggaagagaguua

SEQ ID NO: 641635 - RNA, 19 nt, Human
uugcauuguaguuggacug

SEQ ID NO: 641636 - RNA, 22 nt, Human
ucugaccugcaggcacagcaau

SEQ ID NO: 641637 - RNA, 22 nt, Human
agcuagccuaggcagagugcau

SEQ ID NO: 641638 - RNA, 22 nt, Human
gcccugcccuguugaaacuaga

SEQ ID NO: 641639 - RNA, 22 nt, Human
ucaggcccagagucacggaucc

SEQ ID NO: 641640 - RNA, 22 nt, Human
uacaguuuuggugaugaugaug

SEQ ID NO: 641641 - RNA, 22 nt, Human
caugcagucuggagccuucugu

SEQ ID NO: 641642 - RNA, 22 nt, Human
ggugguggagccagcugggagu

SEQ ID NO: 641643 - RNA, 22 nt, Human
caaugucaugauuuuccauuag

SEQ ID NO: 641644 - RNA, 22 nt, Human
acaaggcugaacagugaagccg

SEQ ID NO: 641645 - RNA, 22 nt, Human
cuccuggaggauagugacuggg

SEQ ID NO: 641646 - RNA, 22 nt, Human
cuccagcuagggcuggcuuacu

SEQ ID NO: 641647 - RNA, 19 nt, Human
ggggagaacuagagacagc

SEQ ID NO: 641648 - RNA, 22 nt, Human
uuacaugggcuugugaguccuu

SEQ ID NO: 641649 - RNA, 22 nt, Human
guccagggggcuuaagcaaacu

SEQ ID NO: 641650 - RNA, 22 nt, Human
uguacaauguguuuguuggcuu

SEQ ID NO: 641651 - RNA, 22 nt, Human
cagccagguaugggcgugcggg

SEQ ID NO: 641652 - RNA, 22 nt, Human
uacaucauuuuggagaugagca

SEQ ID NO: 641653 - RNA, 22 nt, Human
ucugacauuuugagaaugacau

SEQ ID NO: 641654 - RNA, 22 nt, Human
ugaugcauugccgacuuacugg

SEQ ID NO: 641655 - RNA, 19 nt, Human
acuuugcaugugugucuaa

SEQ ID NO: 641656 - RNA, 20 nt, Human
cugcugugauucccuccucc

SEQ ID NO: 641657 - RNA, 22 nt, Human
agcuggcauacuuugcuaggaa

SEQ ID NO: 641658 - RNA, 22 nt, Human
ugcagcugacccacuccagucc

SEQ ID NO: 641659 - RNA, 22 nt, Human
caugccugccuggugggcgugg

SEQ ID NO: 641660 - RNA, 22 nt, Human
acagcuugggaugcuuuauuuc

SEQ ID NO: 641661 - RNA, 22 nt, Human
cauguguauuauucuuguggaa

SEQ ID NO: 641662 - RNA, 22 nt, Human
uuucuaggacaugauaggauau

SEQ ID NO: 641663 - RNA, 22 nt, Human
uuacuacauuguaacacaguac

SEQ ID NO: 641664 - RNA, 22 nt, Human
ccagagggccuuuggaguuauc

SEQ ID NO: 641665 - RNA, 22 nt, Human
ucucagagcuucagaaagcacc

SEQ ID NO: 641666 - RNA, 22 nt, Human
agugcuuugagcguuugaaaag

SEQ ID NO: 641667 - RNA, 22 nt, Human
ucugagcuuuuauuaucaaccu

SEQ ID NO: 641668 - RNA, 22 nt, Human
caugcacagugauaucugaaga

SEQ ID NO: 641669 - RNA, 22 nt, Human
uuguugaauggauaaauaaauu

SEQ ID NO: 641670 - RNA, 22 nt, Human
ggucacaagguacuguaagaaa

SEQ ID NO: 641671 - RNA, 22 nt, Human
ugcuucucccaaccagggccug

SEQ ID NO: 641672 - RNA, 22 nt, Human
uguucucuuuuccugcugagcc

SEQ ID NO: 641673 - RNA, 22 nt, Human
aguguguacauaauuguacgcc

SEQ ID NO: 641674 - RNA, 22 nt, Human
uaugagaagaacaggugacuuu

SEQ ID NO: 641675 - RNA, 22 nt, Human
caguuucagaaucaaaacauca

SEQ ID NO: 641676 - RNA, 22 nt, Human
ccacugauccugacuuuggagc

SEQ ID NO: 641677 - RNA, 20 nt, Human
cuguuugcuaucaugagcug

SEQ ID NO: 641678 - RNA, 22 nt, Human
agaggaaggaugcauauccaaa

SEQ ID NO: 641679 - RNA, 22 nt, Human
auuuauugagagggaggggaau

SEQ ID NO: 641680 - RNA, 22 nt, Human
aauguguauaugaacauacagg

SEQ ID NO: 641681 - RNA, 22 nt, Human
uacaggaggauuaucaaaggau

SEQ ID NO: 641682 - RNA, 22 nt, Human
acacagcuaugggguaggaaac

SEQ ID NO: 641683 - RNA, 22 nt, Human
ucuuugcuccacacucuagaga

SEQ ID NO: 641684 - RNA, 22 nt, Human
acuguauaaggcauagguaagc

SEQ ID NO: 641685 - RNA, 22 nt, Human
caggcagccaggggaccugucc

SEQ ID NO: 641686 - RNA, 22 nt, Human
aggacugaugauggugcugaca

SEQ ID NO: 641687 - RNA, 22 nt, Human
augaggcagcugacagcuguuc

SEQ ID NO: 641688 - RNA, 22 nt, Human
uugcagcuucaagcagguugac

SEQ ID NO: 641689 - RNA, 22 nt, Human
agacaaaugaacaaauauguga

SEQ ID NO: 641690 - RNA, 22 nt, Human
cugagguguuuaguaggggcgg

SEQ ID NO: 641691 - RNA, 22 nt, Human
aggcuuuauuugaucuauaugc

SEQ ID NO: 641692 - RNA, 22 nt, Human
ggcuggccucaggguccucgcu

SEQ ID NO: 641693 - RNA, 22 nt, Human
ucccaggcuaggccucugcguu

SEQ ID NO: 641694 - RNA, 22 nt, Human
caugcacauguggcuauguaau

SEQ ID NO: 641695 - RNA, 23 nt, Human
ccuggcacacaguugacauggaa

SEQ ID NO: 641696 - RNA, 22 nt, Human
cuguacaauguuaccuauuuau

SEQ ID NO: 641697 - RNA, 22 nt, Human
agugucugagccagaauuagaa

SEQ ID NO: 641698 - RNA, 22 nt, Human
gccuggagggcucuagagaggc

SEQ ID NO: 641699 - RNA, 22 nt, Human
uucaguguuaaucuugggagaa

SEQ ID NO: 641700 - RNA, 18 nt, Human
aaguggcacaggagugca

SEQ ID NO: 641701 - RNA, 22 nt, Human
uuugccucucagagucuacaca

SEQ ID NO: 641702 - RNA, 22 nt, Human
acugacucuuguuaacuucagc

SEQ ID NO: 641703 - RNA, 22 nt, Human
cuucacauaaacaaagggccau

SEQ ID NO: 641704 - RNA, 22 nt, Human
uuggccagagaccagagcaggg

SEQ ID NO: 641705 - RNA, 22 nt, Human
uucuuucucaacaugaauguuu

SEQ ID NO: 641706 - RNA, 22 nt, Human
uggcugcuuguuuuagugaggc

SEQ ID NO: 641707 - RNA, 22 nt, Human
gucugcccggccuuccuccacc

SEQ ID NO: 641708 - RNA, 22 nt, Human
uggccacccacccuaaucuuuc

SEQ ID NO: 641709 - RNA, 21 nt, Human
cauugagauaggagagauugu

SEQ ID NO: 641710 - RNA, 22 nt, Human
uugugagcauguuuacuugauu

SEQ ID NO: 641711 - RNA, 22 nt, Human
uucuggagggcaugcugcugcc

SEQ ID NO: 641712 - RNA, 22 nt, Human
uagggguggagcuaagaguccc

SEQ ID NO: 641713 - RNA, 22 nt, Human
uagcacaucuucuuggccugca

SEQ ID NO: 641714 - RNA, 23 nt, Human
uguaaaaugggguaguguuacca

SEQ ID NO: 641715 - RNA, 22 nt, Human
uacauuccuguuagcaucuaag

SEQ ID NO: 641716 - RNA, 22 nt, Human
ucuguuuugugucucucuggug

SEQ ID NO: 641717 - RNA, 22 nt, Human
acagagagggagugauaaaucc

SEQ ID NO: 641718 - RNA, 22 nt, Human
uucaagaugccagggacgcggc

SEQ ID NO: 641719 - RNA, 22 nt, Human
gagcuugggugccaugcugagc

SEQ ID NO: 641720 - RNA, 22 nt, Human
cagugauuaaaacaugacagcc

SEQ ID NO: 641721 - RNA, 22 nt, Human
acugcccuuguccuggcacacc

SEQ ID NO: 641722 - RNA, 22 nt, Human
uagauacaggcucucugagccu

SEQ ID NO: 641723 - RNA, 22 nt, Human
ccauucuuucagugucucaugu

SEQ ID NO: 641724 - RNA, 22 nt, Human
ucagagaaguaggcuaauggug

SEQ ID NO: 641725 - RNA, 23 nt, Human
cugcuccaggacagcauggaggu

SEQ ID NO: 641726 - RNA, 22 nt, Human
cuggacuucucuucaaagacag

SEQ ID NO: 641727 - RNA, 22 nt, Human
cacauccuaucagucacgguuu

SEQ ID NO: 641728 - RNA, 22 nt, Human
gcaagcaguucgcagcccgccu

SEQ ID NO: 641729 - RNA, 22 nt, Human
uguuacacccacaaaaaauucc

SEQ ID NO: 641730 - RNA, 22 nt, Human
gaaacccaaacuaagacaguag

SEQ ID NO: 641731 - RNA, 22 nt, Human
ccagagggcuugguuugggcca

SEQ ID NO: 641732 - RNA, 23 nt, Human
acugauucuugaaguugacaagu

SEQ ID NO: 641733 - RNA, 22 nt, Human
aaguggcacgcuuuuuggaguu

SEQ ID NO: 641734 - RNA, 22 nt, Human
agaggcaccgucugcagcgugc

SEQ ID NO: 641735 - RNA, 22 nt, Human
ccugcugugaccggggagcagg

SEQ ID NO: 641736 - RNA, 22 nt, Human
aagugugagccagcccuuugca

SEQ ID NO: 641737 - RNA, 22 nt, Human
ugcucuucggggccacugcuug

SEQ ID NO: 641738 - RNA, 22 nt, Human
cuucuggguaauucuucuucau

SEQ ID NO: 641739 - RNA, 22 nt, Human
uuacacaucuagacccauuuuu

SEQ ID NO: 641740 - RNA, 22 nt, Human
guucugggaagguggaccuguu

SEQ ID NO: 641741 - RNA, 21 nt, Human
gaauggcaccauuagcauaua

SEQ ID NO: 641742 - RNA, 22 nt, Human
gucuguggaguugcuugcugga

SEQ ID NO: 641743 - RNA, 22 nt, Human
cagugguugcuugcauggcucc

SEQ ID NO: 641744 - RNA, 22 nt, Human
cagaauggcuuuuauggcucag

SEQ ID NO: 641745 - RNA, 22 nt, Human
ucuuuauugcuacugguuuguc

SEQ ID NO: 641746 - RNA, 22 nt, Human
agccuggaggaggaguugagca

SEQ ID NO: 641747 - RNA, 20 nt, Human
aaguuuggagucaggagacc

SEQ ID NO: 641748 - RNA, 22 nt, Human
ugagggucuggaaucugggcuu

SEQ ID NO: 641749 - RNA, 23 nt, Human
ucagcuucauugucuucuauggc

SEQ ID NO: 641750 - RNA, 22 nt, Human
cagcugugacagccaguugaug

SEQ ID NO: 641751 - RNA, 22 nt, Human
acaugcaggaaaaugcacagau

SEQ ID NO: 641752 - RNA, 19 nt, Human
ugagagugaggaaggcuuc

SEQ ID NO: 641753 - RNA, 22 nt, Human
guucauuuuucccuaaugagua

SEQ ID NO: 641754 - RNA, 22 nt, Human
agcuggagcuucaagcagguaa

SEQ ID NO: 641755 - RNA, 22 nt, Human
ccugggccugaaaacauuucuc

SEQ ID NO: 641756 - RNA, 21 nt, Human
gcagccaggacuuugggcugg

SEQ ID NO: 641757 - RNA, 23 nt, Human
agccuggcaccugcagaucggag

SEQ ID NO: 641758 - RNA, 22 nt, Human
uugaccauaccuccaggcaguu

SEQ ID NO: 641759 - RNA, 22 nt, Human
gcagagguccuagccaggaguc

SEQ ID NO: 641760 - RNA, 22 nt, Human
acaggcugcccgcuccccaccu

SEQ ID NO: 641761 - RNA, 23 nt, Human
gccagccuugcucuccugcagcc

SEQ ID NO: 641762 - RNA, 22 nt, Human
ccugccaggcuuugggcuucug

SEQ ID NO: 641763 - RNA, 22 nt, Human
aauuucaaacuaauaggaacca

SEQ ID NO: 641764 - RNA, 22 nt, Human
uccaggaggccucauuuccugu

SEQ ID NO: 641765 - RNA, 19 nt, Human
uuugugaagaaaaugaugc

SEQ ID NO: 641766 - RNA, 22 nt, Human
auguuauuuuggaaaauacaaa

SEQ ID NO: 641767 - RNA, 22 nt, Human
gagccuggccuccugccucagc

SEQ ID NO: 641768 - RNA, 23 nt, Human
agcuucauugaccuccgcagggg

SEQ ID NO: 641769 - RNA, 22 nt, Human
uaugagaaucugcaguaugcuu

SEQ ID NO: 641770 - RNA, 20 nt, Human
acaugaaaggaaacaggaaa

SEQ ID NO: 641771 - RNA, 22 nt, Human
acuccagggugacucugucuga

SEQ ID NO: 641772 - RNA, 18 nt, Human
uaaauugcuucaccugag

SEQ ID NO: 641773 - RNA, 23 nt, Human
gagugcagaauagacaugcagug

SEQ ID NO: 641774 - RNA, 22 nt, Human
aaaguccagggaaagagcgucu

SEQ ID NO: 641775 - RNA, 22 nt, Human
cacaguaagaaaugaagaggua

SEQ ID NO: 641776 - RNA, 22 nt, Human
ccugaaaaucaagguaguuugg

SEQ ID NO: 641777 - RNA, 22 nt, Human
uucuguguggguagcuccuguu

SEQ ID NO: 641778 - RNA, 22 nt, Human
gcagcauugugagguccugccc

SEQ ID NO: 641779 - RNA, 22 nt, Human
cacaugugcaaauacugaggcu

SEQ ID NO: 641780 - RNA, 22 nt, Human
gaagggagaagguugggugacg

SEQ ID NO: 641781 - RNA, 22 nt, Human
uuucaaacauagaucugaauau

SEQ ID NO: 641782 - RNA, 22 nt, Human
ugggcagagucguggggaauag

SEQ ID NO: 641783 - RNA, 19 nt, Human
ucucagaauuaagagugcu

SEQ ID NO: 641784 - RNA, 19 nt, Human
gaaaggcugcugcuaccug

SEQ ID NO: 641785 - RNA, 21 nt, Human
ggcugcagggagcccuggggu

SEQ ID NO: 641786 - RNA, 22 nt, Human
uuccagagaggcucauguuccc

SEQ ID NO: 641787 - RNA, 18 nt, Human
ggagcccacggcguccca

SEQ ID NO: 641788 - RNA, 22 nt, Human
uccacagggccuuucuggugug

SEQ ID NO: 641789 - RNA, 22 nt, Human
gcuggccugaccagccacaggc

SEQ ID NO: 641790 - RNA, 22 nt, Human
cugagccccucugaccucagag

SEQ ID NO: 641791 - RNA, 22 nt, Human
cucacagcugcuucaggaucca

SEQ ID NO: 641792 - RNA, 22 nt, Human
acuuagcaccuauggcauuuuu

SEQ ID NO: 641793 - RNA, 22 nt, Human
gagcauuuuugucugcauuuua

SEQ ID NO: 641794 - RNA, 22 nt, Human
aaggccagcuuguagggcuggu

SEQ ID NO: 641795 - RNA, 22 nt, Human
ugucauggggaaaauaacagac

SEQ ID NO: 641796 - RNA, 22 nt, Human
agcugagguuaguauaaaugug

SEQ ID NO: 641797 - RNA, 21 nt, Human
uauacagaggggaacaggaga

SEQ ID NO: 641798 - RNA, 22 nt, Human
aggucagcaugcuccucucugu

SEQ ID NO: 641799 - RNA, 22 nt, Human
cagcucuuccucccaccggaca

SEQ ID NO: 641800 - RNA, 22 nt, Human
aacuugaaacuguuccagaaaa

SEQ ID NO: 641801 - RNA, 22 nt, Human
caaugguugaacccugucauga

SEQ ID NO: 641802 - RNA, 22 nt, Human
ugcaguggaagagguggagauc

SEQ ID NO: 641803 - RNA, 22 nt, Human
uguuacaguacuacaauucugc

SEQ ID NO: 641804 - RNA, 22 nt, Human
gaugcaaacugugacauagagu

SEQ ID NO: 641805 - RNA, 22 nt, Human
ccuguuuauccaugccaauccu

SEQ ID NO: 641806 - RNA, 22 nt, Human
gcagcccaaaaaagagguagau

SEQ ID NO: 641807 - RNA, 22 nt, Human
gugccuggcagggucagcugcu

SEQ ID NO: 641808 - RNA, 22 nt, Human
gagcuuccauggacgccaucug

SEQ ID NO: 641809 - RNA, 20 nt, Human
accuugaacccgccagccau

SEQ ID NO: 641810 - RNA, 22 nt, Human
ugaacacaguucugaugagcuu

SEQ ID NO: 641811 - RNA, 22 nt, Human
gagcuguguucaugaggagaaa

SEQ ID NO: 641812 - RNA, 22 nt, Human
agugggcuuacugagggagugu

SEQ ID NO: 641813 - RNA, 22 nt, Human
ucagcacugucuauuagugaga

SEQ ID NO: 641814 - RNA, 23 nt, Human
cuccaaggcccaacugucuaggc

SEQ ID NO: 641815 - RNA, 18 nt, Human
ucucuuuuccccucauug

SEQ ID NO: 641816 - RNA, 22 nt, Human
auggaacagauuaaagugaggg

SEQ ID NO: 641817 - RNA, 22 nt, Human
ugacaauggguggacaagauag

SEQ ID NO: 641818 - RNA, 22 nt, Human
gggcuggaggagauccagaggc

SEQ ID NO: 641819 - RNA, 22 nt, Human
ggcucuugcccgcccaggcugg

SEQ ID NO: 641820 - RNA, 22 nt, Human
uuguucuugccaagacaugaag

SEQ ID NO: 641821 - RNA, 22 nt, Human
ugccuucuucucccuggcucag

SEQ ID NO: 641822 - RNA, 22 nt, Human
uuggucagucagagaauggagu

SEQ ID NO: 641823 - RNA, 17 nt, Human
cagugaucauuacauua

SEQ ID NO: 641824 - RNA, 23 nt, Human
uauguguaaggagaaggagugag

SEQ ID NO: 641825 - RNA, 22 nt, Human
aguauaauuagauaucaaaagu

SEQ ID NO: 641826 - RNA, 22 nt, Human
uggcucacuguagccuugaccu

SEQ ID NO: 641827 - RNA, 22 nt, Human
guggccuuaagaaacaaacaac

SEQ ID NO: 641828 - RNA, 22 nt, Human
gaaaaagugaccuugguagcua

SEQ ID NO: 641829 - RNA, 22 nt, Human
ucugaggacagugcugugccug

SEQ ID NO: 641830 - RNA, 17 nt, Human
aggaagggcaaguuucu

SEQ ID NO: 641831 - RNA, 21 nt, Human
gcuguugcccgccgccucuuc

SEQ ID NO: 641832 - RNA, 22 nt, Human
agagacaggguuuugccauguu

SEQ ID NO: 641833 - RNA, 22 nt, Human
gcaggucuggagggcacugggg

SEQ ID NO: 641834 - RNA, 21 nt, Human
gcagaggaaugguauacauaa

SEQ ID NO: 641835 - RNA, 22 nt, Human
gacagcaggaugugaggggaug

SEQ ID NO: 641836 - RNA, 22 nt, Human
ccccugcuggccugcugguuuc

SEQ ID NO: 641837 - RNA, 22 nt, Human
acugugauguucucuaucuugg

SEQ ID NO: 641838 - RNA, 22 nt, Human
ucagggugaaccaggcaggaau

SEQ ID NO: 641839 - RNA, 22 nt, Human
agcaagcauugcugguuagguc

SEQ ID NO: 641840 - RNA, 22 nt, Human
auacaugaggaggcuggaaaca

SEQ ID NO: 641841 - RNA, 22 nt, Human
uauggcuuuucuuuccuagugu

SEQ ID NO: 641842 - RNA, 22 nt, Human
aacaucaguauucucaucugua

SEQ ID NO: 641843 - RNA, 22 nt, Human
uagccauguguggaacacagcc

SEQ ID NO: 641844 - RNA, 19 nt, Human
cccaggagcaguauugaug

SEQ ID NO: 641845 - RNA, 22 nt, Human
cccagcuggccagguggcuuug

SEQ ID NO: 641846 - RNA, 22 nt, Human
guccaaauuccacagauuucuc

SEQ ID NO: 641847 - RNA, 22 nt, Human
agggacccugaugacugaggag

SEQ ID NO: 641848 - RNA, 23 nt, Human
uucuuucaagaaguucacagugc

SEQ ID NO: 641849 - RNA, 22 nt, Human
uccugaggacccugucaggggc

SEQ ID NO: 641850 - RNA, 22 nt, Human
cuggcccugguaaggacaccca

SEQ ID NO: 641851 - RNA, 22 nt, Human
aagucagugcuagcuaauggcu

SEQ ID NO: 641852 - RNA, 22 nt, Human
uggcucagugaagagauaacuu

SEQ ID NO: 641853 - RNA, 22 nt, Human
ucucuacacaggauucacauga

SEQ ID NO: 641854 - RNA, 22 nt, Human
ucuuucuugugggugcccuuuu

SEQ ID NO: 641855 - RNA, 20 nt, Human
uucaucagcaaagcacagca

SEQ ID NO: 641856 - RNA, 23 nt, Human
gguuggcuguacccaggcucccu

SEQ ID NO: 641857 - RNA, 22 nt, Human
aaguccagacuccuuugcgugg

SEQ ID NO: 641858 - RNA, 22 nt, Human
uugucucugggacaugguauua

SEQ ID NO: 641859 - RNA, 19 nt, Human
ggcagacacaguugacaug

SEQ ID NO: 641860 - RNA, 22 nt, Human
uagcuuuaaaaaucaucaaagc

SEQ ID NO: 641861 - RNA, 22 nt, Human
ucagaggccuugguuaugguau

SEQ ID NO: 641862 - RNA, 22 nt, Human
uccaggacuagcauuucugaua

SEQ ID NO: 641863 - RNA, 22 nt, Human
agucugucuuuggcuucaccac

SEQ ID NO: 641864 - RNA, 22 nt, Human
cugccuguuagucuagcaguua

SEQ ID NO: 641865 - RNA, 22 nt, Human
agaaaguuuggggcugggcacg

SEQ ID NO: 641866 - RNA, 22 nt, Human
uaugcacauuaucuaauccauu

SEQ ID NO: 641867 - RNA, 22 nt, Human
ucuuuucaucauuuaauaggua

SEQ ID NO: 641868 - RNA, 22 nt, Human
cuggccugagaaugcuacccuu

SEQ ID NO: 641869 - RNA, 19 nt, Human
uccaggaggcugccauuga

SEQ ID NO: 641870 - RNA, 22 nt, Human
guucaaagcuccugguacagua

SEQ ID NO: 641871 - RNA, 22 nt, Human
acuguacuguguauuguagaau

SEQ ID NO: 641872 - RNA, 22 nt, Human
uguguucaucaugauaucaggu

SEQ ID NO: 641873 - RNA, 22 nt, Human
gaggcugcugccaucauuaggu

SEQ ID NO: 641874 - RNA, 20 nt, Human
gcagccucaacaggcacagc

SEQ ID NO: 641875 - RNA, 22 nt, Human
acugcagacucuacaguuauaa

SEQ ID NO: 641876 - RNA, 22 nt, Human
ggcuguggucugggugcucccc

SEQ ID NO: 641877 - RNA, 22 nt, Human
caagguuuugcuuguaagggaa

SEQ ID NO: 641878 - RNA, 22 nt, Human
cugcccagaaucacucacucga

SEQ ID NO: 641879 - RNA, 22 nt, Human
gagauggggucagcugggacau

SEQ ID NO: 641880 - RNA, 20 nt, Human
gugcccugugggcuauuuuc

SEQ ID NO: 641881 - RNA, 20 nt, Human
uguguauaaauauauguuuc

SEQ ID NO: 641882 - RNA, 22 nt, Human
acugggccaggggcuuuggagc

SEQ ID NO: 641883 - RNA, 22 nt, Human
cuguccauauucaagggguagg

SEQ ID NO: 641884 - RNA, 19 nt, Human
acauuggacauggaucuug

SEQ ID NO: 641885 - RNA, 22 nt, Human
acaguuacauuaaacaaaagga

SEQ ID NO: 641886 - RNA, 22 nt, Human
cucacaauuuuucagugacuau

SEQ ID NO: 641887 - RNA, 22 nt, Human
gcugugaguggaguucugugcu

SEQ ID NO: 641888 - RNA, 19 nt, Human
ugucaccuucugucaguuu

SEQ ID NO: 641889 - RNA, 21 nt, Human
auggcuucucaggugcacuga

SEQ ID NO: 641890 - RNA, 22 nt, Human
ucucuacagacacuguugacuu

SEQ ID NO: 641891 - RNA, 22 nt, Human
gcauccucccggugcugcuggc

SEQ ID NO: 641892 - RNA, 22 nt, Human
aguaacuuaggagauacauggg

SEQ ID NO: 641893 - RNA, 22 nt, Human
ccagagcugaugggcccagggu

SEQ ID NO: 641894 - RNA, 22 nt, Human
uggcuccagaucugucuccugu

SEQ ID NO: 641895 - RNA, 22 nt, Human
gcuguuucuaagcugguuccua

SEQ ID NO: 641896 - RNA, 22 nt, Human
acaugcauacacguacauaccu

SEQ ID NO: 641897 - RNA, 17 nt, Human
ucuggguuuaaauccca

SEQ ID NO: 641898 - RNA, 22 nt, Human
aaaaccaggcguuuccuauuau

SEQ ID NO: 641899 - RNA, 22 nt, Human
augcaugaugaacuugcuuuca

SEQ ID NO: 641900 - RNA, 22 nt, Human
cugagacccagacaccugagga

SEQ ID NO: 641901 - RNA, 22 nt, Human
cacagugacauuagugagaaaa

SEQ ID NO: 641902 - RNA, 22 nt, Human
guguggucgaaguucucccgga

SEQ ID NO: 641903 - RNA, 20 nt, Human
agaauucuuacccuuugaug

SEQ ID NO: 641904 - RNA, 22 nt, Human
guauuuuaagugacuacuaggu

SEQ ID NO: 641905 - RNA, 22 nt, Human
cagcuagggaguggcagagcuu

SEQ ID NO: 641906 - RNA, 22 nt, Human
acauauauuuucacacaugguu

SEQ ID NO: 641907 - RNA, 22 nt, Human
ucugaguugaggaaaugcauuu

SEQ ID NO: 641908 - RNA, 22 nt, Human
aaugcugagggaugagagaggc

SEQ ID NO: 641909 - RNA, 22 nt, Human
augagaaagaguuguaucuaga

SEQ ID NO: 641910 - RNA, 22 nt, Human
aagggcucugcugucucucccc

SEQ ID NO: 641911 - RNA, 22 nt, Human
agccuggagguaaugaggaaac

SEQ ID NO: 641912 - RNA, 22 nt, Human
gcugcccauuccacuggauggu

SEQ ID NO: 641913 - RNA, 22 nt, Human
ccuggugcccccaagccagcug

SEQ ID NO: 641914 - RNA, 19 nt, Human
acagugucuguauauaaau

SEQ ID NO: 641915 - RNA, 22 nt, Human
agcugcuacugcucugccagag

SEQ ID NO: 641916 - RNA, 22 nt, Human
cuggagagaauguucauugcag

SEQ ID NO: 641917 - RNA, 22 nt, Human
cgcagggccgcgagcgggacca

SEQ ID NO: 641918 - RNA, 22 nt, Human
ugcuggggcucugaccacucca

SEQ ID NO: 641919 - RNA, 20 nt, Human
aggaaaaauggaaacuggag

SEQ ID NO: 641920 - RNA, 22 nt, Human
ugcugccaggucuugcugucca

SEQ ID NO: 641921 - RNA, 22 nt, Human
ggguuggauuacuuagggagaa

SEQ ID NO: 641922 - RNA, 22 nt, Human
uggagaugcacgagcaggugga

SEQ ID NO: 641923 - RNA, 22 nt, Human
ucacucuggaguccgcuaccag

SEQ ID NO: 641924 - RNA, 22 nt, Human
augaaacuaaacuacauaaguu

SEQ ID NO: 641925 - RNA, 22 nt, Human
uuucucaaaagacagaagugaa

SEQ ID NO: 641926 - RNA, 22 nt, Human
ccaggugugcucugcaguggau

SEQ ID NO: 641927 - RNA, 22 nt, Human
ucuucugugagaauucaagcaa

SEQ ID NO: 641928 - RNA, 22 nt, Human
cacugagagaugugucacagca

SEQ ID NO: 641929 - RNA, 22 nt, Human
gugucgugcuugccauggguac

SEQ ID NO: 641930 - RNA, 22 nt, Human
gcuccagguggcuuauuuguau

SEQ ID NO: 641931 - RNA, 22 nt, Human
uaaauuguuuucuagaaguugu

SEQ ID NO: 641932 - RNA, 22 nt, Human
ugcauuaucuuuaauguucuca

SEQ ID NO: 641933 - RNA, 22 nt, Human
gagagugauucccucccauaga

SEQ ID NO: 641934 - RNA, 22 nt, Human
gacccaggguggucaccugaaa

SEQ ID NO: 641935 - RNA, 22 nt, Human
uucucuuacauuuucucagccu

SEQ ID NO: 641936 - RNA, 22 nt, Human
agcuucuugggcuuuacacaaa

SEQ ID NO: 641937 - RNA, 22 nt, Human
ugcuucuggcacuugagggggu

SEQ ID NO: 641938 - RNA, 22 nt, Human
cuugcugugugguguucucaga

SEQ ID NO: 641939 - RNA, 22 nt, Human
caugaaaaauuuacuguuaaca

SEQ ID NO: 641940 - RNA, 22 nt, Human
ugccauuuguuacuaucaggac

SEQ ID NO: 641941 - RNA, 22 nt, Human
uccagggcaggugcugggcucu

SEQ ID NO: 641942 - RNA, 22 nt, Human
aggccagaaauuuggaguaugu

SEQ ID NO: 641943 - RNA, 22 nt, Human
uccuggccucugagucaagaac

SEQ ID NO: 641944 - RNA, 19 nt, Human
cagaacagaggucauggcc

SEQ ID NO: 641945 - RNA, 22 nt, Human
uuuuuaagagucuggaaauagu

SEQ ID NO: 641946 - RNA, 22 nt, Human
ucacaaagcuuugauaagcaga

SEQ ID NO: 641947 - RNA, 22 nt, Human
uaugcaaacaguucaggugaca

SEQ ID NO: 641948 - RNA, 22 nt, Human
ugcucuguauucuauggcaguu

SEQ ID NO: 641949 - RNA, 22 nt, Human
uucugaauccucgaaacauagc

SEQ ID NO: 641950 - RNA, 22 nt, Human
gccagcugagcaaauuccagcu

SEQ ID NO: 641951 - RNA, 22 nt, Human
gaagagcuuagacagaaucaaa

SEQ ID NO: 641952 - RNA, 22 nt, Human
aauguugcagagugauugucca

SEQ ID NO: 641953 - RNA, 22 nt, Human
auguguauuuuguacuauuggg

SEQ ID NO: 641954 - RNA, 22 nt, Human
gcuguggcucucacaagcaaau

SEQ ID NO: 641955 - RNA, 22 nt, Human
uggaaguugaaucucagucaug

SEQ ID NO: 641956 - RNA, 22 nt, Human
agccagaggaacuugaugacug

SEQ ID NO: 641957 - RNA, 22 nt, Human
acaaacacgagacgccacugug

SEQ ID NO: 641958 - RNA, 22 nt, Human
agcaggaguguccccuggcugu

SEQ ID NO: 641959 - RNA, 22 nt, Human
uuuaaacuaacaguacacguug

SEQ ID NO: 641960 - RNA, 22 nt, Human
uccaguugcccaucucucuucu

SEQ ID NO: 641961 - RNA, 22 nt, Human
cauuuguacauguugucuucuu

SEQ ID NO: 641962 - RNA, 22 nt, Human
aacaguaucuuuuaucagaaau

SEQ ID NO: 641963 - RNA, 22 nt, Human
acuagaaauuacucagaauaaa

SEQ ID NO: 641964 - RNA, 22 nt, Human
uuuguugaguuacagagaugaa

SEQ ID NO: 641965 - RNA, 22 nt, Human
cuugcucauuaaguagcucaca

SEQ ID NO: 641966 - RNA, 22 nt, Human
uucaugaacgaacauauguaua

SEQ ID NO: 641967 - RNA, 22 nt, Human
gaggagcccagcaccaucacuu

SEQ ID NO: 641968 - RNA, 22 nt, Human
aagucacagcuaaauagcuaag

SEQ ID NO: 641969 - RNA, 22 nt, Human
ugcuucaaggacacugacuuuu

SEQ ID NO: 641970 - RNA, 22 nt, Human
gacagggcgcccagccuguuuc

SEQ ID NO: 641971 - RNA, 22 nt, Human
ggaggccaggaagagccgcccu

SEQ ID NO: 641972 - RNA, 22 nt, Human
uggacucaccuugaguuagcca

SEQ ID NO: 641973 - RNA, 23 nt, Human
ucuacccacacugcucuagaagg

SEQ ID NO: 641974 - RNA, 22 nt, Human
aguuacaugugaauagaaagua

SEQ ID NO: 641975 - RNA, 22 nt, Human
ucugugacucauaucuguagau

SEQ ID NO: 641976 - RNA, 22 nt, Human
uggaccugcuggaugggcaggu

SEQ ID NO: 641977 - RNA, 22 nt, Human
ugucuucaaauauugaaauccu

SEQ ID NO: 641978 - RNA, 22 nt, Human
uuuccugugcuuaacaaauauu

SEQ ID NO: 641979 - RNA, 22 nt, Human
ugucauuuaaagcuuuccagau

SEQ ID NO: 641980 - RNA, 21 nt, Human
ugcaggaguguaaugugaccc

SEQ ID NO: 641981 - RNA, 22 nt, Human
cugccuccuggcugauggguag

SEQ ID NO: 641982 - RNA, 22 nt, Human
uggccagauucaugcauguauc

SEQ ID NO: 641983 - RNA, 22 nt, Human
agcaauuauuguauaagaacaa

SEQ ID NO: 641984 - RNA, 22 nt, Human
aaggcagcaggauuuggugacu

SEQ ID NO: 641985 - RNA, 22 nt, Human
gagggcuccucacauucucuau

SEQ ID NO: 641986 - RNA, 22 nt, Human
cucagcugcagccuggcuggca

SEQ ID NO: 641987 - RNA, 22 nt, Human
agaggaagccauugcuuacuga

SEQ ID NO: 641988 - RNA, 22 nt, Human
cugcugugcuuguggccacccg

SEQ ID NO: 641989 - RNA, 18 nt, Human
ccuggcacacuggcucau

SEQ ID NO: 641990 - RNA, 22 nt, Human
auaaguguguaaggcauucugu

SEQ ID NO: 641991 - RNA, 22 nt, Human
gaguguggaucccagaagcaga

SEQ ID NO: 641992 - RNA, 22 nt, Human
ugccaggcucagccccuaucuu

SEQ ID NO: 641993 - RNA, 22 nt, Human
agacauuuugcaauggguagcu

SEQ ID NO: 641994 - RNA, 22 nt, Human
uaaagccaacacuuuacugcuc

SEQ ID NO: 641995 - RNA, 22 nt, Human
uuucuuggagcucuuagggucg

SEQ ID NO: 641996 - RNA, 22 nt, Human
uggcaguggcuuugcuggugga

SEQ ID NO: 641997 - RNA, 22 nt, Human
gcagcuggacccacacggcuua

SEQ ID NO: 641998 - RNA, 22 nt, Human
ccugguggagaggggcggagcg

SEQ ID NO: 641999 - RNA, 22 nt, Human
ccugccuggcugucagcagagc

SEQ ID NO: 642000 - RNA, 22 nt, Human
ggcugagaggacgucgggcuca

SEQ ID NO: 642001 - RNA, 22 nt, Human
aaugagggggaugggaaagugu

SEQ ID NO: 642002 - RNA, 22 nt, Human
cucucagugccacacagccauu

SEQ ID NO: 642003 - RNA, 20 nt, Human
gccaacgcgcuggggcugcc

SEQ ID NO: 642004 - RNA, 22 nt, Human
ccucagacucagugcguuguga

SEQ ID NO: 642005 - RNA, 22 nt, Human
aagucagaaaacagagcaauua

SEQ ID NO: 642006 - RNA, 22 nt, Human
aggugugggaaacgggugaccu

SEQ ID NO: 642007 - RNA, 22 nt, Human
uuuacugaacugcuaguacagg

SEQ ID NO: 642008 - RNA, 22 nt, Human
uugauuaaucccaugugaguag

SEQ ID NO: 642009 - RNA, 19 nt, Human
cccucauucacuuauucuc

SEQ ID NO: 642010 - RNA, 22 nt, Human
uggcuucugcuuucaguggagg

SEQ ID NO: 642011 - RNA, 22 nt, Human
ucauaaaugcagugucauaaau

SEQ ID NO: 642012 - RNA, 22 nt, Human
gcuggaggauggacuggaagaa

SEQ ID NO: 642013 - RNA, 22 nt, Human
gggcagcaugucacuagcaugg

SEQ ID NO: 642014 - RNA, 22 nt, Human
gcagcaucagguucacugcgug

SEQ ID NO: 642015 - RNA, 22 nt, Human
aaagcucacaguaauacaaggc

SEQ ID NO: 642016 - RNA, 22 nt, Human
gcucucugcaagucagcagccu

SEQ ID NO: 642017 - RNA, 22 nt, Human
gaagccacccuccuuccagccc

SEQ ID NO: 642018 - RNA, 22 nt, Human
ucccuggggauguuggccugcc

SEQ ID NO: 642019 - RNA, 22 nt, Human
acuccagggcuccaucccuugu

SEQ ID NO: 642020 - RNA, 22 nt, Human
gaacuccagaugacucaggaac

SEQ ID NO: 642021 - RNA, 22 nt, Human
ucuaugaagugcgaagaggcac

SEQ ID NO: 642022 - RNA, 22 nt, Human
uucagaggcuguaugacuagau

SEQ ID NO: 642023 - RNA, 22 nt, Human
aagugcauauuuuuguuguaga

SEQ ID NO: 642024 - RNA, 22 nt, Human
caucuuaauuucuaacaggcac

SEQ ID NO: 642025 - RNA, 22 nt, Human
uauuccugguguuggcuggguc

SEQ ID NO: 642026 - RNA, 22 nt, Human
gcugcagagaugggugcccuuu

SEQ ID NO: 642027 - RNA, 22 nt, Human
auaguacaaucaguuaauuagu

SEQ ID NO: 642028 - RNA, 22 nt, Human
agccagagcagggaauuggaca

SEQ ID NO: 642029 - RNA, 22 nt, Human
ucauggauaaaauauugguuaa

SEQ ID NO: 642030 - RNA, 22 nt, Human
cugaggaaugagugaggagcca

SEQ ID NO: 642031 - RNA, 22 nt, Human
ugcaauuuucagaaauuccaaa

SEQ ID NO: 642032 - RNA, 22 nt, Human
cccagccugugacagccguccu

SEQ ID NO: 642033 - RNA, 22 nt, Human
uggaagauaagagauugggaag

SEQ ID NO: 642034 - RNA, 22 nt, Human
cucagagaaaugucacaacaau

SEQ ID NO: 642035 - RNA, 22 nt, Human
uccucuccaggugagccgaaau

SEQ ID NO: 642036 - RNA, 22 nt, Human
uuuuauugguaaugauaaaagu

SEQ ID NO: 642037 - RNA, 22 nt, Human
gaauuagguaauagaacuagua

SEQ ID NO: 642038 - RNA, 22 nt, Human
guguccagggccguguugucuu

SEQ ID NO: 642039 - RNA, 22 nt, Human
uggcagagaacacggcugaucu

SEQ ID NO: 642040 - RNA, 22 nt, Human
ccaggaccuggagcucuaugaa

SEQ ID NO: 642041 - RNA, 17 nt, Human
uccagagcacagagcuc

SEQ ID NO: 642042 - RNA, 22 nt, Human
uggguccugucuccuuguucug

SEQ ID NO: 642043 - RNA, 22 nt, Human
uuagccaggggagcagcuuguc

SEQ ID NO: 642044 - RNA, 19 nt, Human
ccuuugaaucaggacacuu

SEQ ID NO: 642045 - RNA, 22 nt, Human
cugaggcacuaacaaggacaag

SEQ ID NO: 642046 - RNA, 22 nt, Human
ccagcugucagugugaaaauaa

SEQ ID NO: 642047 - RNA, 22 nt, Human
cuguguuugaugagaagccacc

SEQ ID NO: 642048 - RNA, 22 nt, Human
gcaaagucucaagacccaagug

SEQ ID NO: 642049 - RNA, 22 nt, Human
caauucaauggcaaaguauugu

SEQ ID NO: 642050 - RNA, 22 nt, Human
gagcagugguugaacagaggca

SEQ ID NO: 642051 - RNA, 22 nt, Human
cuggagccaugucuugacugcu

SEQ ID NO: 642052 - RNA, 22 nt, Human
caugcuuuuugacaacaagcug

SEQ ID NO: 642053 - RNA, 22 nt, Human
ucuaaacacuaagucuugaugc

SEQ ID NO: 642054 - RNA, 22 nt, Human
uugcauuacauuugcucagucu

SEQ ID NO: 642055 - RNA, 22 nt, Human
ugcuuggagaaucagucccagc

SEQ ID NO: 642056 - RNA, 22 nt, Human
gcagccauugagcgaaaaaauc

SEQ ID NO: 642057 - RNA, 22 nt, Human
uccagaaaauuuuacagugccu

SEQ ID NO: 642058 - RNA, 22 nt, Human
uucuucucucauagauuaaggu

SEQ ID NO: 642059 - RNA, 22 nt, Human
aaggcagucaguuguuuugaaa

SEQ ID NO: 642060 - RNA, 22 nt, Human
uggauaaaaugacauuaccuga

SEQ ID NO: 642061 - RNA, 22 nt, Human
aaugaagcaguuuucaucaagu

SEQ ID NO: 642062 - RNA, 22 nt, Human
aagaguuugucagaucugcacg

SEQ ID NO: 642063 - RNA, 22 nt, Human
ugcuuuauuaagagagaaauuu

SEQ ID NO: 642064 - RNA, 19 nt, Human
uuucuuccaaagacuaugg

SEQ ID NO: 642065 - RNA, 22 nt, Human
ccugagguggcugcagcacugc

SEQ ID NO: 642066 - RNA, 22 nt, Human
uuuaacagauaguuucuucugu

SEQ ID NO: 642067 - RNA, 22 nt, Human
uaugucugcuugguuuuggaau

SEQ ID NO: 642068 - RNA, 22 nt, Human
uuauuuggcaaugcuucaccau

SEQ ID NO: 642069 - RNA, 22 nt, Human
caggggcuagcacuuaauguuu

SEQ ID NO: 642070 - RNA, 22 nt, Human
guacagaaggauuucuaguagu

SEQ ID NO: 642071 - RNA, 22 nt, Human
gugugcguuccuaguaaacgug

SEQ ID NO: 642072 - RNA, 22 nt, Human
acugaauaaggugaaugcucug

SEQ ID NO: 642073 - RNA, 22 nt, Human
ggcaugggguguauguggcacg

SEQ ID NO: 642074 - RNA, 22 nt, Human
gcucugcugggugggcaguuau

SEQ ID NO: 642075 - RNA, 22 nt, Human
cugggcagcuguaucagggagu

SEQ ID NO: 642076 - RNA, 22 nt, Human
agggcaucucuaacagucuccu

SEQ ID NO: 642077 - RNA, 22 nt, Human
agagagcauugaggaaaucuuc

SEQ ID NO: 642078 - RNA, 22 nt, Human
ccuccuggaggcucuaagggag

SEQ ID NO: 642079 - RNA, 22 nt, Human
gccuggagcucggcugagggcg

SEQ ID NO: 642080 - RNA, 19 nt, Human
acagaaauuaguuauuuuc

SEQ ID NO: 642081 - RNA, 22 nt, Human
cugggccucacccuagaccaau

SEQ ID NO: 642082 - RNA, 22 nt, Human
ucucccagugucuggcagucag

SEQ ID NO: 642083 - RNA, 22 nt, Human
uaggaaaaagaggcuggcaagg

SEQ ID NO: 642084 - RNA, 22 nt, Human
uuuaaggcagugaaacuauucu

SEQ ID NO: 642085 - RNA, 22 nt, Human
guuauucuuuuauagcaauaca

SEQ ID NO: 642086 - RNA, 22 nt, Human
aggaaagguagcgugccagcag

SEQ ID NO: 642087 - RNA, 22 nt, Human
aaacuucauggauaauauaaag

SEQ ID NO: 642088 - RNA, 23 nt, Human
uacagaaggaguagucacuaaga

SEQ ID NO: 642089 - RNA, 22 nt, Human
gccagcuuggccaguggccagu

SEQ ID NO: 642090 - RNA, 22 nt, Human
ucauguuuggaguuugcucacu

SEQ ID NO: 642091 - RNA, 22 nt, Human
acucccucucuaguccuugcaa

SEQ ID NO: 642092 - RNA, 22 nt, Human
gacccguggcaggcugccugcu

SEQ ID NO: 642093 - RNA, 22 nt, Human
gggcuccaguuuggccaggaag

SEQ ID NO: 642094 - RNA, 18 nt, Human
cccacggugcuguagggc

SEQ ID NO: 642095 - RNA, 22 nt, Human
uggugagcucuuuagacuggga

SEQ ID NO: 642096 - RNA, 22 nt, Human
gcucccugccuacacggaccuu

SEQ ID NO: 642097 - RNA, 22 nt, Human
ugucacuucaguuuugaaacaa

SEQ ID NO: 642098 - RNA, 22 nt, Human
gcuggcugguccagcaggggcu

SEQ ID NO: 642099 - RNA, 22 nt, Human
ucugucuucaucagcaugugau

SEQ ID NO: 642100 - RNA, 22 nt, Human
uauguacaaucagcaguucaua

SEQ ID NO: 642101 - RNA, 22 nt, Human
ccauugaauuagaaggggaagg

SEQ ID NO: 642102 - RNA, 22 nt, Human
uuuuuguagucauuagaagagg

SEQ ID NO: 642103 - RNA, 22 nt, Human
ucugcagaacuuuaugagcaaa

SEQ ID NO: 642104 - RNA, 22 nt, Human
cauccguuaauaaaaagacagu

SEQ ID NO: 642105 - RNA, 23 nt, Human
ugaaugauggugcuccucaucuu

SEQ ID NO: 642106 - RNA, 22 nt, Human
uucuuucagaacacaagugauu

SEQ ID NO: 642107 - RNA, 22 nt, Human
auggcuguagucaucugaaggc

SEQ ID NO: 642108 - RNA, 22 nt, Human
aucuaagaguuaacaucaagaa

SEQ ID NO: 642109 - RNA, 22 nt, Human
uuugggaacucuaucauggaaa

SEQ ID NO: 642110 - RNA, 22 nt, Human
cuuagcaugugguguccuugua

SEQ ID NO: 642111 - RNA, 22 nt, Human
uggcaggggaggugcuugcuua

SEQ ID NO: 642112 - RNA, 17 nt, Human
uggcuucagauguacau

SEQ ID NO: 642113 - RNA, 22 nt, Human
cagggcuugaucugcauccugc

SEQ ID NO: 642114 - RNA, 18 nt, Human
cuaagaggucguuucuca

SEQ ID NO: 642115 - RNA, 22 nt, Human
uugcuguaggcugauugcugaa

SEQ ID NO: 642116 - RNA, 22 nt, Human
uuccuuucacguuuuaaugcac

SEQ ID NO: 642117 - RNA, 22 nt, Human
gcgugggcuggacugggaugaa

SEQ ID NO: 642118 - RNA, 22 nt, Human
cacucugcagcugaagggcugg

SEQ ID NO: 642119 - RNA, 22 nt, Human
ugggcucucgucccugcagaag

SEQ ID NO: 642120 - RNA, 22 nt, Human
cuuuccugaaaucucuucugca

SEQ ID NO: 642121 - RNA, 22 nt, Human
uucauccauaugcagagagcuu

SEQ ID NO: 642122 - RNA, 23 nt, Human
ugugaauugaggacaucaaaagc

SEQ ID NO: 642123 - RNA, 22 nt, Human
uuguacuugccauagaacaaca

SEQ ID NO: 642124 - RNA, 22 nt, Human
aguugaaauuaagagagaguuu

SEQ ID NO: 642125 - RNA, 22 nt, Human
acuucucuuccccggaacucua

SEQ ID NO: 642126 - RNA, 22 nt, Human
uagcuucuauacaacuucagca

SEQ ID NO: 642127 - RNA, 22 nt, Human
auaaaaccaaagcagcaguguu

SEQ ID NO: 642128 - RNA, 22 nt, Human
ggauacaacuagaagauggcag

SEQ ID NO: 642129 - RNA, 22 nt, Human
acaagaauuauuucuaguuaac

SEQ ID NO: 642130 - RNA, 22 nt, Human
gccaggcacaguucuaggugcu

SEQ ID NO: 642131 - RNA, 22 nt, Human
ggggugagugcucagccccgga

SEQ ID NO: 642132 - RNA, 22 nt, Human
cugguggagaugccuggccccu

SEQ ID NO: 642133 - RNA, 22 nt, Human
uguacauuuagagcucaauaga

SEQ ID NO: 642134 - RNA, 22 nt, Human
agcuguggggaggaggcuagca

SEQ ID NO: 642135 - RNA, 22 nt, Human
cucucagacacccauuuggaaa

SEQ ID NO: 642136 - RNA, 22 nt, Human
cagagggagcccuccaggagca

SEQ ID NO: 642137 - RNA, 22 nt, Human
augggccaggcuugggaugaca

SEQ ID NO: 642138 - RNA, 22 nt, Human
uguggcuccacuccacauuaau

SEQ ID NO: 642139 - RNA, 22 nt, Human
uguggcucggccagcugcugaa

SEQ ID NO: 642140 - RNA, 22 nt, Human
gaguccaggcuguugcucaucu

SEQ ID NO: 642141 - RNA, 22 nt, Human
ugcccaggaucuggcgaugcuc

SEQ ID NO: 642142 - RNA, 22 nt, Human
agcggcugcuccgcaggcuggc

SEQ ID NO: 642143 - RNA, 22 nt, Human
agcagagcuauucuugugcaau

SEQ ID NO: 642144 - RNA, 22 nt, Human
agucccuuuagucuggagagcu

SEQ ID NO: 642145 - RNA, 22 nt, Human
aggcacaaaagcagggugacca

SEQ ID NO: 642146 - RNA, 20 nt, Human
aucuggcucagauccugcag

SEQ ID NO: 642147 - RNA, 22 nt, Human
cuuucacagcacaagccugccu

SEQ ID NO: 642148 - RNA, 22 nt, Human
ggcagacacaaaaacauaaggu

SEQ ID NO: 642149 - RNA, 22 nt, Human
aacaugaaacccaaacagaaua

SEQ ID NO: 642150 - RNA, 22 nt, Human
uggucucugugcucgggcaugg

SEQ ID NO: 642151 - RNA, 22 nt, Human
uuuaguauucucuauuuccauc

SEQ ID NO: 642152 - RNA, 22 nt, Human
ggaaugaagaaauagauggugu

SEQ ID NO: 642153 - RNA, 22 nt, Human
cugggaggugcagcaaaaauca

SEQ ID NO: 642154 - RNA, 19 nt, Human
ucuccaggugccccaaaca

SEQ ID NO: 642155 - RNA, 22 nt, Human
aguaucaucuccauuucacuga

SEQ ID NO: 642156 - RNA, 22 nt, Human
aaaaagacagaggaugaggcag

SEQ ID NO: 642157 - RNA, 22 nt, Human
auuacaugagagaauguaaaua

SEQ ID NO: 642158 - RNA, 22 nt, Human
cacaauuuggugcuaaagaaag

SEQ ID NO: 642159 - RNA, 22 nt, Human
cuuggcuguugggcauugagaa

SEQ ID NO: 642160 - RNA, 22 nt, Human
ugggccaggauuucaagacccu

SEQ ID NO: 642161 - RNA, 22 nt, Human
ccuguggcugccacuuggguga

SEQ ID NO: 642162 - RNA, 22 nt, Human
uuacaacacuacuuauccuuga

SEQ ID NO: 642163 - RNA, 21 nt, Human
ggcugcuggggguuggcacag

SEQ ID NO: 642164 - RNA, 22 nt, Human
uuauacacguuuauggagcuac

SEQ ID NO: 642165 - RNA, 23 nt, Human
ucucagugccgauugcauacaca

SEQ ID NO: 642166 - RNA, 22 nt, Human
caaaggcaugugaguauaugug

SEQ ID NO: 642167 - RNA, 22 nt, Human
cuggccaggcggccccugcaug

SEQ ID NO: 642168 - RNA, 22 nt, Human
aucuuuucuguuugcuaugucu

SEQ ID NO: 642169 - RNA, 22 nt, Human
uugugcauuucucugagugugu

SEQ ID NO: 642170 - RNA, 22 nt, Human
uccauuuucuaaguaucacuua

SEQ ID NO: 642171 - RNA, 22 nt, Human
auucugcuaguuaauaucucuc

SEQ ID NO: 642172 - RNA, 22 nt, Human
aagucucuuuaccucuccaggc

SEQ ID NO: 642173 - RNA, 22 nt, Human
aacauucugguucuaaaaaccu

SEQ ID NO: 642174 - RNA, 22 nt, Human
ggugcugauaguaacaauaaua

SEQ ID NO: 642175 - RNA, 22 nt, Human
uuacauguacugguuugacuua

SEQ ID NO: 642176 - RNA, 22 nt, Human
uuucuauuggcgucacuguugu

SEQ ID NO: 642177 - RNA, 22 nt, Human
ggcccuugcagcaggcgcuggc

SEQ ID NO: 642178 - RNA, 22 nt, Human
cucaugugucugguaggagcuu

SEQ ID NO: 642179 - RNA, 22 nt, Human
uucucuggacuauuugcacucc

SEQ ID NO: 642180 - RNA, 22 nt, Human
uugcauuuaaguagauguuaca

SEQ ID NO: 642181 - RNA, 22 nt, Human
gcccuggauggcaggagccauc

SEQ ID NO: 642182 - RNA, 21 nt, Human
ucccagagugcuugggacugc

SEQ ID NO: 642183 - RNA, 22 nt, Human
acaggucaacgagagcaggcaa

SEQ ID NO: 642184 - RNA, 22 nt, Human
gagggaccuuuacacagacauu

SEQ ID NO: 642185 - RNA, 22 nt, Human
caggcucagcucuggccagugc

SEQ ID NO: 642186 - RNA, 22 nt, Human
ucuccuaauuaaaugcucuuau

SEQ ID NO: 642187 - RNA, 22 nt, Human
uaccugaauuaccaaaagcuuu

SEQ ID NO: 642188 - RNA, 22 nt, Human
gcccugagugccuguguaagaa

SEQ ID NO: 642189 - RNA, 22 nt, Human
uugugucuggauuucagcuuuc

SEQ ID NO: 642190 - RNA, 22 nt, Human
aaugcuuugagggaagaugaaa

SEQ ID NO: 642191 - RNA, 22 nt, Human
uacagaguggugagaucuuuug

SEQ ID NO: 642192 - RNA, 23 nt, Human
acagagguccaaacaguauaagc

SEQ ID NO: 642193 - RNA, 22 nt, Human
cucucuggacuugaguaucagc

SEQ ID NO: 642194 - RNA, 22 nt, Human
agcagguggccuccugucuguc

SEQ ID NO: 642195 - RNA, 22 nt, Human
guggaggagaggcgccuugcgg

SEQ ID NO: 642196 - RNA, 22 nt, Human
ucacauucucagcaucuauaca

SEQ ID NO: 642197 - RNA, 22 nt, Human
ccuucagagguguagauugcgu

SEQ ID NO: 642198 - RNA, 22 nt, Human
aacuauauaaucugaaagugaa

SEQ ID NO: 642199 - RNA, 22 nt, Human
aacuacaauauguauguaugua

SEQ ID NO: 642200 - RNA, 22 nt, Human
ucuggccugaaaguccaugcuu

SEQ ID NO: 642201 - RNA, 21 nt, Human
ugauucugcauuucuaacagg

SEQ ID NO: 642202 - RNA, 22 nt, Human
ugggugagugggaaaagcccag

SEQ ID NO: 642203 - RNA, 22 nt, Human
gaugccuccaaaugagggcaga

SEQ ID NO: 642204 - RNA, 22 nt, Human
cucuguccuaugcuugauagaa

SEQ ID NO: 642205 - RNA, 22 nt, Human
agugcaauguguacagaaaaau

SEQ ID NO: 642206 - RNA, 22 nt, Human
aaguuuacauaagugaugauga

SEQ ID NO: 642207 - RNA, 22 nt, Human
uacaaagaggcagcuccauuuu

SEQ ID NO: 642208 - RNA, 20 nt, Human
agaaaugugaaaggcugagu

SEQ ID NO: 642209 - RNA, 22 nt, Human
uccacagggaugccugcggcuu

SEQ ID NO: 642210 - RNA, 22 nt, Human
aaagauuagauaagauagauuu

SEQ ID NO: 642211 - RNA, 22 nt, Human
uuaacucucccuccuuacaucc

SEQ ID NO: 642212 - RNA, 22 nt, Human
uuccuucucuguggggaaggca

SEQ ID NO: 642213 - RNA, 22 nt, Human
auucuuaauugccaugcuguau

SEQ ID NO: 642214 - RNA, 22 nt, Human
aacuggaaccuuuuauucaguc

SEQ ID NO: 642215 - RNA, 22 nt, Human
gagcugggccucagaacacagu

SEQ ID NO: 642216 - RNA, 22 nt, Human
aaucuggacacaguucucaugc

SEQ ID NO: 642217 - RNA, 22 nt, Human
aguggcugauuacaaacugagu

SEQ ID NO: 642218 - RNA, 22 nt, Human
uucauugaaauuaagcccaacu

SEQ ID NO: 642219 - RNA, 22 nt, Human
agaucuggcccucagcuugauu

SEQ ID NO: 642220 - RNA, 22 nt, Human
cuucaaguugggcggcgggcag

SEQ ID NO: 642221 - RNA, 18 nt, Human
caggccucuugaucuucc

SEQ ID NO: 642222 - RNA, 18 nt, Human
aaaugcuaggcuacauga

SEQ ID NO: 642223 - RNA, 22 nt, Human
aaagcagccugcucauccugga

SEQ ID NO: 642224 - RNA, 22 nt, Human
agguuucuccuuuaaagcaugg

SEQ ID NO: 642225 - RNA, 22 nt, Human
ugcuugucacauacaggagcau

SEQ ID NO: 642226 - RNA, 16 nt, Human
uggaggcaucuggccc

SEQ ID NO: 642227 - RNA, 22 nt, Human
ugugugcagccucugucuuugg

SEQ ID NO: 642228 - RNA, 22 nt, Human
cacagauagaccuuaugagauu

SEQ ID NO: 642229 - RNA, 22 nt, Human
gcauccaaaccauucaucagcc

SEQ ID NO: 642230 - RNA, 22 nt, Human
cagcuucagcgugacaccagug

SEQ ID NO: 642231 - RNA, 22 nt, Human
cuccagguauuacuguuuuccc

SEQ ID NO: 642232 - RNA, 22 nt, Human
gucccugggaugcccuucuggg

SEQ ID NO: 642233 - RNA, 22 nt, Human
ucccucagcaggaacuggccug

SEQ ID NO: 642234 - RNA, 22 nt, Human
uguuacaauauuaucaacugag

SEQ ID NO: 642235 - RNA, 22 nt, Human
uggugcaaaacuaauugcgguu

SEQ ID NO: 642236 - RNA, 22 nt, Human
auuuugcuuuauguaaauaugu

SEQ ID NO: 642237 - RNA, 22 nt, Human
cugagcuuccaguuccuccagg

SEQ ID NO: 642238 - RNA, 22 nt, Human
auagaauuacaguguguuugga

SEQ ID NO: 642239 - RNA, 22 nt, Human
cuuuaucuaggguaagaaaacc

SEQ ID NO: 642240 - RNA, 21 nt, Human
uggccaaacuggagcauuuga

SEQ ID NO: 642241 - RNA, 23 nt, Human
agagcaucaugaugcuaagucug

SEQ ID NO: 642242 - RNA, 22 nt, Human
ucaaaacacuauuaccuuuaau

SEQ ID NO: 642243 - RNA, 22 nt, Human
uugggaggucauaaaucuguuc

SEQ ID NO: 642244 - RNA, 22 nt, Human
cagcuccaucuugcuuauacca

SEQ ID NO: 642245 - RNA, 22 nt, Human
aagcaaagaguuuaguggguga

SEQ ID NO: 642246 - RNA, 22 nt, Human
gggccugugcacaguucuguua

SEQ ID NO: 642247 - RNA, 22 nt, Human
auuccuuuggacuccuccuugc

SEQ ID NO: 642248 - RNA, 22 nt, Human
cugucgccugguccucucugga

SEQ ID NO: 642249 - RNA, 22 nt, Human
gaauugauugauauguacugua

SEQ ID NO: 642250 - RNA, 22 nt, Human
ccagagaggccuuggcaagaca

SEQ ID NO: 642251 - RNA, 23 nt, Human
ucagaacaguucuuggugcauag

SEQ ID NO: 642252 - RNA, 22 nt, Human
agacacugaauguuuggugguc

SEQ ID NO: 642253 - RNA, 22 nt, Human
gucccaggcagagucaggaggg

SEQ ID NO: 642254 - RNA, 22 nt, Human
ggcuggucacaccacugcaggg

SEQ ID NO: 642255 - RNA, 22 nt, Human
ugcagguggacacgggagacgg

SEQ ID NO: 642256 - RNA, 21 nt, Human
gaguggaacgcucuucacacc

SEQ ID NO: 642257 - RNA, 22 nt, Human
caagcagccccaacaugaggau

SEQ ID NO: 642258 - RNA, 23 nt, Human
ucucugggugggcugugucuaua

SEQ ID NO: 642259 - RNA, 22 nt, Human
ugggacacacaaggucagcucu

SEQ ID NO: 642260 - RNA, 22 nt, Human
uuugugacuugcuucucagaau

SEQ ID NO: 642261 - RNA, 22 nt, Human
gaaguucucaaggaucacagaa

SEQ ID NO: 642262 - RNA, 22 nt, Human
cuuauuauaaaauccuguuuga

SEQ ID NO: 642263 - RNA, 22 nt, Human
gcucagcugcaccuggagagcc

SEQ ID NO: 642264 - RNA, 22 nt, Human
ucucuugugguuuuguaguuga

SEQ ID NO: 642265 - RNA, 22 nt, Human
agccagugcagcuggaaauuca

SEQ ID NO: 642266 - RNA, 22 nt, Human
aaugcaaacuucuuguuacuug

SEQ ID NO: 642267 - RNA, 22 nt, Human
aaaaugugcaguuuuuaagcug

SEQ ID NO: 642268 - RNA, 20 nt, Human
aucugcugagaaugaaaggc

SEQ ID NO: 642269 - RNA, 22 nt, Human
uucuuucaauagcuggcauaug

SEQ ID NO: 642270 - RNA, 22 nt, Human
augguuuauuagcugcacaggc

SEQ ID NO: 642271 - RNA, 22 nt, Human
gcucucugcagccuccuuggag

SEQ ID NO: 642272 - RNA, 19 nt, Human
gugaggucuuuccuuuugu

SEQ ID NO: 642273 - RNA, 22 nt, Human
acuguaaauuacauaagaacag

SEQ ID NO: 642274 - RNA, 22 nt, Human
aauccagcacauggacacaguc

SEQ ID NO: 642275 - RNA, 22 nt, Human
uggcuucuagagcccauccuuc

SEQ ID NO: 642276 - RNA, 22 nt, Human
cacauuucucuaccucacacaa

SEQ ID NO: 642277 - RNA, 22 nt, Human
ugggguugaagaaaggaucuag

SEQ ID NO: 642278 - RNA, 22 nt, Human
uguguauguuuugagguugcua

SEQ ID NO: 642279 - RNA, 19 nt, Human
ugcauaaauuauauacuuu

SEQ ID NO: 642280 - RNA, 22 nt, Human
uggagagcugguucaaagcaga

SEQ ID NO: 642281 - RNA, 22 nt, Human
ucaugcuuuguuaauguggcac

SEQ ID NO: 642282 - RNA, 22 nt, Human
aguggcuuauguuuagaaucau

SEQ ID NO: 642283 - RNA, 22 nt, Human
uuucauaauauccagagauuuu

SEQ ID NO: 642284 - RNA, 22 nt, Human
gaagagaugacaaaggagcaug

SEQ ID NO: 642285 - RNA, 22 nt, Human
ugcaguguuccuguggguuuau

SEQ ID NO: 642286 - RNA, 22 nt, Human
ucuuuugugauucuucaguuac

SEQ ID NO: 642287 - RNA, 22 nt, Human
ccacccugugcaggcgugggua

SEQ ID NO: 642288 - RNA, 22 nt, Human
cccagaugcagguucaagagua

SEQ ID NO: 642289 - RNA, 22 nt, Human
acaugcagaauucuuagagagc

SEQ ID NO: 642290 - RNA, 22 nt, Human
ucagcuuuuaaaaacaagaagu

SEQ ID NO: 642291 - RNA, 22 nt, Human
cuguccauuuugaauuuucagu

SEQ ID NO: 642292 - RNA, 22 nt, Human
uaucuaaauggaauauuccaga

SEQ ID NO: 642293 - RNA, 22 nt, Human
agcagcaucucuuauugcagug

SEQ ID NO: 642294 - RNA, 22 nt, Human
ucacuccucaggcuagcaucau

SEQ ID NO: 642295 - RNA, 22 nt, Human
ggcucugccauuuccuagcugc

SEQ ID NO: 642296 - RNA, 22 nt, Human
agcagcuucagaggcgggcgca

SEQ ID NO: 642297 - RNA, 22 nt, Human
gagguucauucagcucugucac

SEQ ID NO: 642298 - RNA, 22 nt, Human
uaguauuuccuguaagcuauag

SEQ ID NO: 642299 - RNA, 22 nt, Human
ucugggagacguguguugucag

SEQ ID NO: 642300 - RNA, 21 nt, Human
ugacugaaauagaauuuagcu

SEQ ID NO: 642301 - RNA, 22 nt, Human
aaacuguauuccauccucauca

SEQ ID NO: 642302 - RNA, 23 nt, Human
ugucuccaucucauuacuugggg

SEQ ID NO: 642303 - RNA, 22 nt, Human
aagcccuguccggggggaagaa

SEQ ID NO: 642304 - RNA, 22 nt, Human
agcuuuaugggagcuuagauaa

SEQ ID NO: 642305 - RNA, 22 nt, Human
uuagcaaacucuguuagauucu

SEQ ID NO: 642306 - RNA, 22 nt, Human
acuccugugggcauggcacccc

SEQ ID NO: 642307 - RNA, 22 nt, Human
acuucaugaacuaagggaucgg

SEQ ID NO: 642308 - RNA, 22 nt, Human
ccuggaaaacaugggaaucaca

SEQ ID NO: 642309 - RNA, 22 nt, Human
cucuuuacucuguguuauuguu

SEQ ID NO: 642310 - RNA, 22 nt, Human
cagaggcaggaagaugggcagu

SEQ ID NO: 642311 - RNA, 22 nt, Human
aaggaagaugaggugcugcuua

SEQ ID NO: 642312 - RNA, 22 nt, Human
uuggccuuguuaaggaggcccu

SEQ ID NO: 642313 - RNA, 22 nt, Human
uaucuauuccaaauaucagcgu

SEQ ID NO: 642314 - RNA, 22 nt, Human
agagggcugccucagucagcua

SEQ ID NO: 642315 - RNA, 22 nt, Human
agccagccaguucacuaggaaa

SEQ ID NO: 642316 - RNA, 22 nt, Human
uguggcccagaugagugugcua

SEQ ID NO: 642317 - RNA, 22 nt, Human
uugauucaguaaagcuaaauuu

SEQ ID NO: 642318 - RNA, 22 nt, Human
ugugaaauauuuauauacucaa

SEQ ID NO: 642319 - RNA, 22 nt, Human
auggggggaugaaggaguccaa

SEQ ID NO: 642320 - RNA, 18 nt, Human
uguagaaaagauaggaau

SEQ ID NO: 642321 - RNA, 22 nt, Human
uacuuguuuuguguuccuaaac

SEQ ID NO: 642322 - RNA, 22 nt, Human
aggcuaggguaacagauguggc

SEQ ID NO: 642323 - RNA, 22 nt, Human
uccagcucaaauucagcuucca

SEQ ID NO: 642324 - RNA, 22 nt, Human
aauaauccugcccgucucuccg

SEQ ID NO: 642325 - RNA, 22 nt, Human
uaaccuuuggugaaauauuaac

SEQ ID NO: 642326 - RNA, 22 nt, Human
gccccuuccaucaugugaggac

SEQ ID NO: 642327 - RNA, 22 nt, Human
gccagcugggccuuagggcugg

SEQ ID NO: 642328 - RNA, 21 nt, Human
aggaaugcugaggcucacuuu

SEQ ID NO: 642329 - RNA, 18 nt, Human
cuccagagcugugagaca

SEQ ID NO: 642330 - RNA, 22 nt, Human
uccaaagaacauugcugagacc

SEQ ID NO: 642331 - RNA, 22 nt, Human
ucuaaaugugguagucauaaga

SEQ ID NO: 642332 - RNA, 22 nt, Human
ccucccacuucuugcugagguc

SEQ ID NO: 642333 - RNA, 22 nt, Human
guguacauauugagucugcuga

SEQ ID NO: 642334 - RNA, 22 nt, Human
ccuccaggccuugcagguuaac

SEQ ID NO: 642335 - RNA, 22 nt, Human
aaaucagaaaauauggagagga

SEQ ID NO: 642336 - RNA, 20 nt, Human
cugcugugugugccucagcc

SEQ ID NO: 642337 - RNA, 22 nt, Human
acaugaaaaauguuugcaguuu

SEQ ID NO: 642338 - RNA, 22 nt, Human
guguuaaccagcuaaacuuugc

SEQ ID NO: 642339 - RNA, 22 nt, Human
cagaugaaggccugaaugucua

SEQ ID NO: 642340 - RNA, 20 nt, Human
agcaggcugcagggugaaau

SEQ ID NO: 642341 - RNA, 22 nt, Human
cugcagagaguaacugaaauau

SEQ ID NO: 642342 - RNA, 22 nt, Human
auagugggaauuacgauauacu

SEQ ID NO: 642343 - RNA, 22 nt, Human
aaagucucaggcaaaccaggac

SEQ ID NO: 642344 - RNA, 22 nt, Human
gugccagagcaaucaggcucug

SEQ ID NO: 642345 - RNA, 22 nt, Human
aaauaagaaauucuucuuugca

SEQ ID NO: 642346 - RNA, 17 nt, Human
uuaucuugcuguuucua

SEQ ID NO: 642347 - RNA, 22 nt, Human
ugccuugcagguuuuaaauaca

SEQ ID NO: 642348 - RNA, 22 nt, Human
uuagauaacaguagaauaucaa

SEQ ID NO: 642349 - RNA, 22 nt, Human
auuuucaaaacaucugcugugu

SEQ ID NO: 642350 - RNA, 22 nt, Human
agagcuguuugucuagagagug

SEQ ID NO: 642351 - RNA, 22 nt, Human
cccagacauaacagcagagagg

SEQ ID NO: 642352 - RNA, 22 nt, Human
agugcagggccugcccagcagg

SEQ ID NO: 642353 - RNA, 22 nt, Human
acaggaacuguuaucucagaug

SEQ ID NO: 642354 - RNA, 22 nt, Human
acauugugauccgacugauuaa

SEQ ID NO: 642355 - RNA, 22 nt, Human
cacaugaagagagucuaguaau

SEQ ID NO: 642356 - RNA, 22 nt, Human
uuuggaaaguugucacuuuaga

SEQ ID NO: 642357 - RNA, 20 nt, Human
caacacugcccauuguuugc

SEQ ID NO: 642358 - RNA, 22 nt, Human
ugccaggcagugucagauugag

SEQ ID NO: 642359 - RNA, 22 nt, Human
cucaguacuuuauguauaugau

SEQ ID NO: 642360 - RNA, 22 nt, Human
cccuccagccauggacccaggu

SEQ ID NO: 642361 - RNA, 20 nt, Human
ucuggacucuaagguauauu

SEQ ID NO: 642362 - RNA, 22 nt, Human
aaagagaacuuuuacccaagaa

SEQ ID NO: 642363 - RNA, 22 nt, Human
aacaugcucuuccuggcuaguc

SEQ ID NO: 642364 - RNA, 18 nt, Human
ugcagccuguagucuugu

SEQ ID NO: 642365 - RNA, 22 nt, Human
cagcucagacgcaggucgagca

SEQ ID NO: 642366 - RNA, 22 nt, Human
agccugccugugaggcuuugag

SEQ ID NO: 642367 - RNA, 22 nt, Human
gcagggaaacaggugcuaagga

SEQ ID NO: 642368 - RNA, 22 nt, Human
aguucucagaauugcaccucaa

SEQ ID NO: 642369 - RNA, 17 nt, Human
ggugagaccucccacuc

SEQ ID NO: 642370 - RNA, 22 nt, Human
gcucucagggugauggcauacu

SEQ ID NO: 642371 - RNA, 22 nt, Human
ggcuggucucagugcuggguuc

SEQ ID NO: 642372 - RNA, 22 nt, Human
gcuccaggguggaugacaauuc

SEQ ID NO: 642373 - RNA, 20 nt, Human
agaaggcaggagacaaaagg

SEQ ID NO: 642374 - RNA, 22 nt, Human
aggucaaggcugcagugagcug

SEQ ID NO: 642375 - RNA, 22 nt, Human
caggaggggguggaguuucgcc

SEQ ID NO: 642376 - RNA, 22 nt, Human
gucugagacugggcacauaccu

SEQ ID NO: 642377 - RNA, 22 nt, Human
ggugcagcugcagccugggagc

SEQ ID NO: 642378 - RNA, 22 nt, Human
cauuuacuguugaaucccuagc

SEQ ID NO: 642379 - RNA, 22 nt, Human
uucauacucacuccaauaacug

SEQ ID NO: 642380 - RNA, 22 nt, Human
aauugcuuguuucuuuaacuga

SEQ ID NO: 642381 - RNA, 22 nt, Human
cgucugccuaaggacugccuuc

SEQ ID NO: 642382 - RNA, 22 nt, Human
acucaucugccauuccuguacc

SEQ ID NO: 642383 - RNA, 22 nt, Human
ccaggucuggcacuggccaguc

SEQ ID NO: 642384 - RNA, 22 nt, Human
aaggaguuuggguagucauaca

SEQ ID NO: 642385 - RNA, 22 nt, Human
ugugcucuaccucagugucauu

SEQ ID NO: 642386 - RNA, 22 nt, Human
aagcuuuaaggaauuuuaugga

SEQ ID NO: 642387 - RNA, 22 nt, Human
agcaccauuuaucaucuaggua

SEQ ID NO: 642388 - RNA, 23 nt, Human
aguccccuacauaguuccugggg

SEQ ID NO: 642389 - RNA, 22 nt, Human
gcugucacacauggccccagcu

SEQ ID NO: 642390 - RNA, 22 nt, Human
cucuccaggcgagguccuacug

SEQ ID NO: 642391 - RNA, 22 nt, Human
gucucucugacugguccacacc

SEQ ID NO: 642392 - RNA, 22 nt, Human
ugucaggagccaccagcacucc

SEQ ID NO: 642393 - RNA, 22 nt, Human
cuaaugaagcugcuuucuauga

SEQ ID NO: 642394 - RNA, 22 nt, Human
aggacccaagcacaguuccugg

SEQ ID NO: 642395 - RNA, 22 nt, Human
aaagcaagucucuacaaaguac

SEQ ID NO: 642396 - RNA, 22 nt, Human
uuucaauguaacauuuccaggc

SEQ ID NO: 642397 - RNA, 20 nt, Human
caggcacacucauuccugcu

SEQ ID NO: 642398 - RNA, 22 nt, Human
cuuuuaaugggagcaguauuug

SEQ ID NO: 642399 - RNA, 22 nt, Human
cauucugggucuggcucaggga

SEQ ID NO: 642400 - RNA, 21 nt, Human
gcuuugaugcugccuugcucc

SEQ ID NO: 642401 - RNA, 22 nt, Human
aaacucucuuuucuucaguagg

SEQ ID NO: 642402 - RNA, 22 nt, Human
uucuuugugcugaagaagcccu

SEQ ID NO: 642403 - RNA, 22 nt, Human
ggcaggugcgcauguugcauua

SEQ ID NO: 642404 - RNA, 22 nt, Human
auaauguguucaucuuacaauu

SEQ ID NO: 642405 - RNA, 21 nt, Human
agcaggaggcagucacagcuc

SEQ ID NO: 642406 - RNA, 22 nt, Human
aauauuauacagucaaccucuu

SEQ ID NO: 642407 - RNA, 22 nt, Human
ucaggaacccuggucuccugcu

SEQ ID NO: 642408 - RNA, 22 nt, Human
caggcacccagcccagucgcac

SEQ ID NO: 642409 - RNA, 17 nt, Human
ucaaauccucugucugg

SEQ ID NO: 642410 - RNA, 22 nt, Human
aucaaaguaucucaauauggua

SEQ ID NO: 642411 - RNA, 22 nt, Human
ucagggcaagucucagaagguu

SEQ ID NO: 642412 - RNA, 22 nt, Human
cacugcuugcaguaugagugga

SEQ ID NO: 642413 - RNA, 22 nt, Human
gcaaugcauaacagagugggcc

SEQ ID NO: 642414 - RNA, 22 nt, Human
agugucugaugcacaguugucc

SEQ ID NO: 642415 - RNA, 22 nt, Human
ugccaauuagagacauccaucu

SEQ ID NO: 642416 - RNA, 22 nt, Human
ucucugugaguggaaggcaccc

SEQ ID NO: 642417 - RNA, 22 nt, Human
gcagggcugaaggucccaggcc

SEQ ID NO: 642418 - RNA, 22 nt, Human
caggguccccgggucuccugug

SEQ ID NO: 642419 - RNA, 22 nt, Human
ucccagagacaucauuucuccg

SEQ ID NO: 642420 - RNA, 22 nt, Human
ccuccagcgcgauccacuccgg

SEQ ID NO: 642421 - RNA, 22 nt, Human
cauagacauucagcacucacua

SEQ ID NO: 642422 - RNA, 16 nt, Human
aaauggcuuaggcuua

SEQ ID NO: 642423 - RNA, 22 nt, Human
gcucugggugaacuuggagcaa

SEQ ID NO: 642424 - RNA, 22 nt, Human
gagccugcccagcccuguccac

SEQ ID NO: 642425 - RNA, 22 nt, Human
gccagcccagcuccaggggaaa

SEQ ID NO: 642426 - RNA, 23 nt, Human
cuucaucaaaaguuaacacuagu

SEQ ID NO: 642427 - RNA, 22 nt, Human
accugggagucacaccugagaa

SEQ ID NO: 642428 - RNA, 22 nt, Human
ucccucuacagggaagcgcuuu

SEQ ID NO: 642429 - RNA, 22 nt, Human
gcuggccacauugugccguccu

SEQ ID NO: 642430 - RNA, 22 nt, Human
ugcuucuccauugaugcuaagu

SEQ ID NO: 642431 - RNA, 22 nt, Human
gaucacaugaauggaauagaag

SEQ ID NO: 642432 - RNA, 22 nt, Human
cugccugcugauuaguauuguc

SEQ ID NO: 642433 - RNA, 22 nt, Human
caaauagauuguucaauccuga

SEQ ID NO: 642434 - RNA, 22 nt, Human
aggcacugaagaacucuuuuug

SEQ ID NO: 642435 - RNA, 22 nt, Human
agcugaagcaacaacaggaugg

SEQ ID NO: 642436 - RNA, 22 nt, Human
auugaacuauaauuaugauuug

SEQ ID NO: 642437 - RNA, 22 nt, Human
cucugggcacauuuuccaggac

SEQ ID NO: 642438 - RNA, 22 nt, Human
ucugggaaugaggcccagcgau

SEQ ID NO: 642439 - RNA, 18 nt, Human
gcucugcccaggcugccc

SEQ ID NO: 642440 - RNA, 22 nt, Human
gagccauacaaccuauaaagug

SEQ ID NO: 642441 - RNA, 22 nt, Human
uagcucuggagucuucucagaa

SEQ ID NO: 642442 - RNA, 22 nt, Human
uuguucaucuggaacccagagc

SEQ ID NO: 642443 - RNA, 22 nt, Human
uggggauguaaaugaggugaua

SEQ ID NO: 642444 - RNA, 22 nt, Human
aaauauuagggagaacagggac

SEQ ID NO: 642445 - RNA, 22 nt, Human
uagggcagccuuauagcuccca

SEQ ID NO: 642446 - RNA, 20 nt, Human
accaauguuagcuuaguacu

SEQ ID NO: 642447 - RNA, 22 nt, Human
gggaacagaggaggguguugcu

SEQ ID NO: 642448 - RNA, 22 nt, Human
aguaagugagucacugugcugg

SEQ ID NO: 642449 - RNA, 22 nt, Human
auucacaguucauuagcuguaa

SEQ ID NO: 642450 - RNA, 22 nt, Human
acacagugguguuuacaaaauu

SEQ ID NO: 642451 - RNA, 22 nt, Human
acagcaguggguugccaguggg

SEQ ID NO: 642452 - RNA, 22 nt, Human
uacuuguucuuucaagagauag

SEQ ID NO: 642453 - RNA, 22 nt, Human
aggagccugaaucagaggguga

SEQ ID NO: 642454 - RNA, 22 nt, Human
agucagggguuggacggggcca

SEQ ID NO: 642455 - RNA, 22 nt, Human
aagugacacauggcacuucuau

SEQ ID NO: 642456 - RNA, 22 nt, Human
agugaggaaauccauuaucaag

SEQ ID NO: 642457 - RNA, 19 nt, Human
auguuuuaugcugauggga

SEQ ID NO: 642458 - RNA, 22 nt, Human
auccagggauaaaaguaagguu

SEQ ID NO: 642459 - RNA, 22 nt, Human
uagaggcuccuguguguagguu

SEQ ID NO: 642460 - RNA, 22 nt, Human
agugcacagcgugauguauugg

SEQ ID NO: 642461 - RNA, 22 nt, Human
uaucugugaaauguguuuguau

SEQ ID NO: 642462 - RNA, 22 nt, Human
gcagggcaggauuugaacccag

SEQ ID NO: 642463 - RNA, 22 nt, Human
cuguuauuuggaggaugcuugg

SEQ ID NO: 642464 - RNA, 22 nt, Human
cuggaggcuggcuuccccuggc

SEQ ID NO: 642465 - RNA, 22 nt, Human
gcaaggaagagcagguggugcu

SEQ ID NO: 642466 - RNA, 18 nt, Human
uuugcuuuccuucuucag

SEQ ID NO: 642467 - RNA, 22 nt, Human
ugcugccucugcugauauggcc

SEQ ID NO: 642468 - RNA, 22 nt, Human
uggggagcccacucaccucccc

SEQ ID NO: 642469 - RNA, 22 nt, Human
agaaaguucacugguauauuuu

SEQ ID NO: 642470 - RNA, 23 nt, Human
uguauacacccugugcaucuggg

SEQ ID NO: 642471 - RNA, 22 nt, Human
uguaagauauucagcuuauuga

SEQ ID NO: 642472 - RNA, 20 nt, Human
uacaguucuguagaaguaga

SEQ ID NO: 642473 - RNA, 22 nt, Human
ugguccugcuugcugcuuaaga

SEQ ID NO: 642474 - RNA, 22 nt, Human
gagucugaggggagagcugggu

SEQ ID NO: 642475 - RNA, 22 nt, Human
ggggaaauuguggcugacagug

SEQ ID NO: 642476 - RNA, 22 nt, Human
uuacacagaugguuaguagagg

SEQ ID NO: 642477 - RNA, 22 nt, Human
ugacaauugugggcaguuugug

SEQ ID NO: 642478 - RNA, 22 nt, Human
gggugggccacugagcagcgug

SEQ ID NO: 642479 - RNA, 22 nt, Human
uccuggcugccgucguccugcg

SEQ ID NO: 642480 - RNA, 22 nt, Human
ucagggaaugaugcacacaguu

SEQ ID NO: 642481 - RNA, 22 nt, Human
guuccucauccagucaugacua

SEQ ID NO: 642482 - RNA, 22 nt, Human
aagggagguaaagcuauuuaaa

SEQ ID NO: 642483 - RNA, 22 nt, Human
caggaacauuuaaccacagggu

SEQ ID NO: 642484 - RNA, 22 nt, Human
uaucuguuaugggcugaauugc

SEQ ID NO: 642485 - RNA, 22 nt, Human
uccaggucugguuggacagguu

SEQ ID NO: 642486 - RNA, 22 nt, Human
auucauaucauagaguuauuga

SEQ ID NO: 642487 - RNA, 22 nt, Human
uuucuguaaguggcaaauaaug

SEQ ID NO: 642488 - RNA, 22 nt, Human
ugugccagaaaauaugcugagg

SEQ ID NO: 642489 - RNA, 17 nt, Human
ggcagagcugacagggc

SEQ ID NO: 642490 - RNA, 22 nt, Human
auuugcuuucagguauaaaagg

SEQ ID NO: 642491 - RNA, 22 nt, Human
ccgggagacuuugagcaccaug

SEQ ID NO: 642492 - RNA, 17 nt, Human
gagauggguggaucacc

SEQ ID NO: 642493 - RNA, 22 nt, Human
cuccucucaaaaguagguugac

SEQ ID NO: 642494 - RNA, 22 nt, Human
cucacagauauuugcuucaggu

SEQ ID NO: 642495 - RNA, 22 nt, Human
cucucugguacauagaguuugg

SEQ ID NO: 642496 - RNA, 22 nt, Human
cagauagcaauuugggcagggg

SEQ ID NO: 642497 - RNA, 22 nt, Human
ugagacagcccuucugcacagg

SEQ ID NO: 642498 - RNA, 22 nt, Human
uacagaaacagcgugguuagaa

SEQ ID NO: 642499 - RNA, 22 nt, Human
uccucccugcacucagugaagu

SEQ ID NO: 642500 - RNA, 22 nt, Human
aaaggaguuacucauaaagcuu

SEQ ID NO: 642501 - RNA, 22 nt, Human
uggcaugaagucagcagcuggg

SEQ ID NO: 642502 - RNA, 23 nt, Human
ucacaucugccguaguguauucu

SEQ ID NO: 642503 - RNA, 22 nt, Human
uuggcucugaaacccaagcucu

SEQ ID NO: 642504 - RNA, 22 nt, Human
cugugccacugccccaggccuc

SEQ ID NO: 642505 - RNA, 22 nt, Human
gacaacaauaauguggagcuga

SEQ ID NO: 642506 - RNA, 22 nt, Human
gcagagugccgagauggaagcg

SEQ ID NO: 642507 - RNA, 22 nt, Human
ugggcccugacuucaagcaucc

SEQ ID NO: 642508 - RNA, 22 nt, Human
gaauaaucauaucgucucacau

SEQ ID NO: 642509 - RNA, 23 nt, Human
cugaagagccaacaaaaagcuug

SEQ ID NO: 642510 - RNA, 22 nt, Human
guuuccagucaacuugugugug

SEQ ID NO: 642511 - RNA, 19 nt, Human
uggcauugguccagauaaa

SEQ ID NO: 642512 - RNA, 22 nt, Human
gaccucagauuuucccaggcca

SEQ ID NO: 642513 - RNA, 22 nt, Human
gugugggacgggugaguggcca

SEQ ID NO: 642514 - RNA, 23 nt, Human
agagaaucauggaaacucuuucu

SEQ ID NO: 642515 - RNA, 20 nt, Human
acagucgccuaucaaccagg

SEQ ID NO: 642516 - RNA, 22 nt, Human
acaaaaguguaggaauuccuua

SEQ ID NO: 642517 - RNA, 22 nt, Human
auuguugggucucacuccuaga

SEQ ID NO: 642518 - RNA, 22 nt, Human
gggcugagcuaagcuggguuga

SEQ ID NO: 642519 - RNA, 22 nt, Human
aaaguagaguuguggaauuacu

SEQ ID NO: 642520 - RNA, 21 nt, Human
aagaaagauaauuaaggaccc

SEQ ID NO: 642521 - RNA, 22 nt, Human
gcaggcuugcccggccuccuuc

SEQ ID NO: 642522 - RNA, 22 nt, Human
gucccaggugcccagugggcag

SEQ ID NO: 642523 - RNA, 22 nt, Human
agccuggcugggaagagccucu

SEQ ID NO: 642524 - RNA, 22 nt, Human
aaccaugucuuguuuuccuagu

SEQ ID NO: 642525 - RNA, 22 nt, Human
guuuagaauucuaacuuuaagg

SEQ ID NO: 642526 - RNA, 22 nt, Human
gggggaugcucaggaggcugcu

SEQ ID NO: 642527 - RNA, 22 nt, Human
aaaucccugauaauguaggucu

SEQ ID NO: 642528 - RNA, 19 nt, Human
ggcugucuggcguguggau

SEQ ID NO: 642529 - RNA, 22 nt, Human
auauucucugcugcuuuugugu

SEQ ID NO: 642530 - RNA, 22 nt, Human
gugugacccaaggacacucucu

SEQ ID NO: 642531 - RNA, 22 nt, Human
uaagauguaagaucagagcuug

SEQ ID NO: 642532 - RNA, 22 nt, Human
ugccgccugguuucuccgcccc

SEQ ID NO: 642533 - RNA, 22 nt, Human
uguagcucuccagccagcaagg

SEQ ID NO: 642534 - RNA, 22 nt, Human
uuuuaacuuaaaauacauagau

SEQ ID NO: 642535 - RNA, 22 nt, Human
uuugcaaagugcuugcagagua

SEQ ID NO: 642536 - RNA, 22 nt, Human
gcaugugucuccccaguggagg

SEQ ID NO: 642537 - RNA, 22 nt, Human
acacauuaggcagugcuuaaau

SEQ ID NO: 642538 - RNA, 22 nt, Human
gaagcaagugcaaggaagaggc

SEQ ID NO: 642539 - RNA, 22 nt, Human
augcuaaaugcuggggguacau

SEQ ID NO: 642540 - RNA, 22 nt, Human
gagauauuuauucauacuguca

SEQ ID NO: 642541 - RNA, 22 nt, Human
auuuucuguaacuauuucuaua

SEQ ID NO: 642542 - RNA, 22 nt, Human
ugagaaaacucaaagacagauc

SEQ ID NO: 642543 - RNA, 22 nt, Human
uuuaauuauaucugggcaguua

SEQ ID NO: 642544 - RNA, 22 nt, Human
cugcugccuuccaaaggccagg

SEQ ID NO: 642545 - RNA, 21 nt, Human
gcugcccaacccugcaucucc

SEQ ID NO: 642546 - RNA, 22 nt, Human
aguucucaggucagcugagucu

SEQ ID NO: 642547 - RNA, 22 nt, Human
acagugaggacagggacugugu

SEQ ID NO: 642548 - RNA, 22 nt, Human
cccuggagggcagacagaugcc

SEQ ID NO: 642549 - RNA, 22 nt, Human
ucugguccccauuccagguggg

SEQ ID NO: 642550 - RNA, 22 nt, Human
uuucagaguuauguaagaaaau

SEQ ID NO: 642551 - RNA, 22 nt, Human
uaauuuacucagauguucaauc

SEQ ID NO: 642552 - RNA, 21 nt, Human
agacugccaucuuugggccac

SEQ ID NO: 642553 - RNA, 22 nt, Human
ugugggagaaggaagcaagcug

SEQ ID NO: 642554 - RNA, 22 nt, Human
gugugcugcccaacucgcagau

SEQ ID NO: 642555 - RNA, 19 nt, Human
caaggguugggucugucau

SEQ ID NO: 642556 - RNA, 22 nt, Human
uuuuaucuaccuaugcucauuu

SEQ ID NO: 642557 - RNA, 22 nt, Human
ugagcagaagauuggaacuuac

SEQ ID NO: 642558 - RNA, 22 nt, Human
ugaugaaaaccagaacucucau

SEQ ID NO: 642559 - RNA, 22 nt, Human
cucaucagaaauaccugacaaa

SEQ ID NO: 642560 - RNA, 22 nt, Human
uugaaaguagcagcugcauaug

SEQ ID NO: 642561 - RNA, 22 nt, Human
cuagcaggucaaaccagcugau

SEQ ID NO: 642562 - RNA, 22 nt, Human
aagccuggcacauuggagucug

SEQ ID NO: 642563 - RNA, 22 nt, Human
ggcuccaggcuccuauuucacu

SEQ ID NO: 642564 - RNA, 22 nt, Human
ggccccagcagacccuccucug

SEQ ID NO: 642565 - RNA, 22 nt, Human
augcaguauaaaucauuucugg

SEQ ID NO: 642566 - RNA, 18 nt, Human
aggcccuggccucgaaca

SEQ ID NO: 642567 - RNA, 21 nt, Human
uaggccacauggguuggagau

SEQ ID NO: 642568 - RNA, 22 nt, Human
ugagaaaacaguuuguaauaau

SEQ ID NO: 642569 - RNA, 17 nt, Human
aggaagcgagcuggccu

SEQ ID NO: 642570 - RNA, 22 nt, Human
acagugcaggucucaacaauua

SEQ ID NO: 642571 - RNA, 22 nt, Human
uucacaggcuuggagguggggg

SEQ ID NO: 642572 - RNA, 22 nt, Human
ucagucaccuugacuauagcug

SEQ ID NO: 642573 - RNA, 22 nt, Human
ucugucugcucauuuaccucag

SEQ ID NO: 642574 - RNA, 22 nt, Human
agacaucagcuugugugcaggg

SEQ ID NO: 642575 - RNA, 22 nt, Human
caaauguugcuguaauguuugu

SEQ ID NO: 642576 - RNA, 22 nt, Human
cagcuccagccugacaccaaga

SEQ ID NO: 642577 - RNA, 22 nt, Human
gcaggacacagaugcaaggcca

SEQ ID NO: 642578 - RNA, 22 nt, Human
ccacagccauuccagggaggcu

SEQ ID NO: 642579 - RNA, 22 nt, Human
ugagcuguacuccuccccaggg

SEQ ID NO: 642580 - RNA, 22 nt, Human
ucugaaaucuaaugcucugugg

SEQ ID NO: 642581 - RNA, 22 nt, Human
ugagaugguucacagagaaggc

SEQ ID NO: 642582 - RNA, 22 nt, Human
ugcaggaacagaacucacuccc

SEQ ID NO: 642583 - RNA, 22 nt, Human
cauacauaugcauguguguaua

SEQ ID NO: 642584 - RNA, 23 nt, Human
aaugcuggaaauucaggcaugau

SEQ ID NO: 642585 - RNA, 23 nt, Human
ccagcuccgugagccucgggcuc

SEQ ID NO: 642586 - RNA, 22 nt, Human
aagggcucuguugccauuucag

SEQ ID NO: 642587 - RNA, 22 nt, Human
uauaguaaaauuuucauuuaug

SEQ ID NO: 642588 - RNA, 22 nt, Human
acaacugucaguaaagaauauu

SEQ ID NO: 642589 - RNA, 22 nt, Human
uuaauugggugcaacagcugaa

SEQ ID NO: 642590 - RNA, 22 nt, Human
cuuuuccucaggaggagacgcg

SEQ ID NO: 642591 - RNA, 22 nt, Human
auaaucuggucuuuguaugagu

SEQ ID NO: 642592 - RNA, 22 nt, Human
ggacagagggcaggagcccaga

SEQ ID NO: 642593 - RNA, 22 nt, Human
gaggagaagcuauuggaaggac

SEQ ID NO: 642594 - RNA, 22 nt, Human
agaggccagaaaguaugccacc

SEQ ID NO: 642595 - RNA, 22 nt, Human
agggcagagggugccucaccug

SEQ ID NO: 642596 - RNA, 19 nt, Human
gcucucccucucaguugag

SEQ ID NO: 642597 - RNA, 22 nt, Human
gucugcuuugucuuucaugaua

SEQ ID NO: 642598 - RNA, 17 nt, Human
agguucagguuacauuc

SEQ ID NO: 642599 - RNA, 22 nt, Human
auagacagcgcauuaaaaaugu

SEQ ID NO: 642600 - RNA, 22 nt, Human
cagcacugcuucgcagccaggg

SEQ ID NO: 642601 - RNA, 22 nt, Human
agucaaagaugaccgaguuccu

SEQ ID NO: 642602 - RNA, 22 nt, Human
guccaucuguaggagggacaca

SEQ ID NO: 642603 - RNA, 22 nt, Human
ucauguuuuugccauaugacuc

SEQ ID NO: 642604 - RNA, 22 nt, Human
uuccggaagguucucuagaauu

SEQ ID NO: 642605 - RNA, 22 nt, Human
gucugcccuuccucuccacgau

SEQ ID NO: 642606 - RNA, 22 nt, Human
uuucucaguaauguccuggaau

SEQ ID NO: 642607 - RNA, 22 nt, Human
cgaggaagaaguuugagucaag

SEQ ID NO: 642608 - RNA, 22 nt, Human
agcagcaggugaccucgaugcc

SEQ ID NO: 642609 - RNA, 22 nt, Human
agcacaaauauaaaaaugucug

SEQ ID NO: 642610 - RNA, 22 nt, Human
cacugaaccguaaaugauuuag

SEQ ID NO: 642611 - RNA, 22 nt, Human
ugggcaggcaagugaauaccuu

SEQ ID NO: 642612 - RNA, 22 nt, Human
gccagcugugcuuuuccuaaaa

SEQ ID NO: 642613 - RNA, 22 nt, Human
guccaugauucuguguaguaga

SEQ ID NO: 642614 - RNA, 22 nt, Human
ccuugcucaucccccagugccu

SEQ ID NO: 642615 - RNA, 22 nt, Human
gugauuaaugccaaugggccuu

SEQ ID NO: 642616 - RNA, 22 nt, Human
ggaggaagggcccaggcuuuau

SEQ ID NO: 642617 - RNA, 22 nt, Human
ugacaacauugaguuaugugca

SEQ ID NO: 642618 - RNA, 22 nt, Human
gugcccugcaugccccggguau

SEQ ID NO: 642619 - RNA, 22 nt, Human
uauugucacgucuuaauucuag

SEQ ID NO: 642620 - RNA, 22 nt, Human
uucggcuuuccaguuugucucg

SEQ ID NO: 642621 - RNA, 22 nt, Human
aaacuucagacuccccacuucu

SEQ ID NO: 642622 - RNA, 19 nt, Human
auucuuugguguccauuuc

SEQ ID NO: 642623 - RNA, 22 nt, Human
gcagaaagcuuagaggguuugc

SEQ ID NO: 642624 - RNA, 22 nt, Human
uuacaagaugggaaagggaagu

SEQ ID NO: 642625 - RNA, 20 nt, Human
ucagccagcuaacaugggga

SEQ ID NO: 642626 - RNA, 22 nt, Human
ugcaggaaguuuccugaacuuu

SEQ ID NO: 642627 - RNA, 22 nt, Human
ucucaggggauucacuggcacc

SEQ ID NO: 642628 - RNA, 22 nt, Human
ugccaaguggagcucaggaauc

SEQ ID NO: 642629 - RNA, 22 nt, Human
ucuuuaucuggcucagagacac

SEQ ID NO: 642630 - RNA, 22 nt, Human
caggccagcagggccuccgugg

SEQ ID NO: 642631 - RNA, 19 nt, Human
cuccuucccugguuucugu

SEQ ID NO: 642632 - RNA, 22 nt, Human
uguucagaaaacagauaacuaa

SEQ ID NO: 642633 - RNA, 22 nt, Human
cagcucugccucuggggcugag

SEQ ID NO: 642634 - RNA, 19 nt, Human
cugcuccaggagcugggga

SEQ ID NO: 642635 - RNA, 22 nt, Human
uguggcugugccgucacacgug

SEQ ID NO: 642636 - RNA, 16 nt, Human
gggcaggaaucagggu

SEQ ID NO: 642637 - RNA, 22 nt, Human
acucucucugauggaacuuuag

SEQ ID NO: 642638 - RNA, 22 nt, Human
cuuguccccagcagguugguuu

SEQ ID NO: 642639 - RNA, 22 nt, Human
gccagcugguaggcaccuagcc

SEQ ID NO: 642640 - RNA, 22 nt, Human
uuucuguauuuaaaagaucugg

SEQ ID NO: 642641 - RNA, 22 nt, Human
ccuucuagcaaaucaacauaaa

SEQ ID NO: 642642 - RNA, 22 nt, Human
auuuggaaaagcgguaacuugc

SEQ ID NO: 642643 - RNA, 22 nt, Human
acacacuggagguaaauggggu

SEQ ID NO: 642644 - RNA, 23 nt, Human
uuucuguuggguauauauccaag

SEQ ID NO: 642645 - RNA, 22 nt, Human
uuuuccuguuaaaucugggcac

SEQ ID NO: 642646 - RNA, 20 nt, Human
ccugggguacacuggcaugu

SEQ ID NO: 642647 - RNA, 22 nt, Human
uugcuuuauuccuagcccuugu

SEQ ID NO: 642648 - RNA, 22 nt, Human
uuauucuguuggcccucucauc

SEQ ID NO: 642649 - RNA, 22 nt, Human
ugguccagacuuugaccucuca

SEQ ID NO: 642650 - RNA, 22 nt, Human
agaaaagugcucuagugagagc

SEQ ID NO: 642651 - RNA, 22 nt, Human
ggguaauuggggccuugcagug

SEQ ID NO: 642652 - RNA, 22 nt, Human
uguuuauaaauuuucuugccau

SEQ ID NO: 642653 - RNA, 22 nt, Human
aaacuguaaacacagcaguaca

SEQ ID NO: 642654 - RNA, 22 nt, Human
gaggcagcagaacauggaagag

SEQ ID NO: 642655 - RNA, 22 nt, Human
augcaucuuaucaaaaauuaua

SEQ ID NO: 642656 - RNA, 22 nt, Human
gcucccuggaauguuggcugcc

SEQ ID NO: 642657 - RNA, 20 nt, Human
ucuuacaaucguuacaucca

SEQ ID NO: 642658 - RNA, 22 nt, Human
uccauccauggauggaaaugug

SEQ ID NO: 642659 - RNA, 22 nt, Human
ugcauuuuuaacaaggcuaauu

SEQ ID NO: 642660 - RNA, 22 nt, Human
auguuucugaaguuuacagaua

SEQ ID NO: 642661 - RNA, 22 nt, Human
ggcucagagaccugcgaucuga

SEQ ID NO: 642662 - RNA, 22 nt, Human
cuucugcugcuguucaugguug

SEQ ID NO: 642663 - RNA, 22 nt, Human
acacaugcucauaaauaaauag

SEQ ID NO: 642664 - RNA, 22 nt, Human
acuggagcugagagcaugggua

SEQ ID NO: 642665 - RNA, 22 nt, Human
gaggaaccacucugagaagcca

SEQ ID NO: 642666 - RNA, 22 nt, Human
aggcuucuaggaaacuuucugg

SEQ ID NO: 642667 - RNA, 22 nt, Human
aagcuuccugcaugggacugcu

SEQ ID NO: 642668 - RNA, 22 nt, Human
aggcuguccucucuugcucagu

SEQ ID NO: 642669 - RNA, 22 nt, Human
caagcagggauacugcagggag

SEQ ID NO: 642670 - RNA, 22 nt, Human
cagugcugagagccuggccagg

SEQ ID NO: 642671 - RNA, 20 nt, Human
uucaugguguauuucuuucu

SEQ ID NO: 642672 - RNA, 22 nt, Human
uagaggcacagucuauguagag

SEQ ID NO: 642673 - RNA, 22 nt, Human
gugacucacacaggccugggcu

SEQ ID NO: 642674 - RNA, 22 nt, Human
ugccugaaugaucagucagauu

SEQ ID NO: 642675 - RNA, 22 nt, Human
agugugugcuguuccccggagg

SEQ ID NO: 642676 - RNA, 22 nt, Human
guauucagaaggaugaucuagu

SEQ ID NO: 642677 - RNA, 22 nt, Human
auucaucuguacuucaauaucu

SEQ ID NO: 642678 - RNA, 22 nt, Human
acagcuccuacugaagccaugu

SEQ ID NO: 642679 - RNA, 22 nt, Human
ccaggacagugaacauguaaga

SEQ ID NO: 642680 - RNA, 22 nt, Human
ucaaggcuaaacuuucagagua

SEQ ID NO: 642681 - RNA, 22 nt, Human
aaguuuaucccucucacaguua

SEQ ID NO: 642682 - RNA, 22 nt, Human
augcuucagugcuaccuucaaa

SEQ ID NO: 642683 - RNA, 23 nt, Human
ugcaacaaugaggaaagcuacug

SEQ ID NO: 642684 - RNA, 22 nt, Human
aagauuuuuuuccacagacuca

SEQ ID NO: 642685 - RNA, 23 nt, Human
auguauuuaaauuucagugauga

SEQ ID NO: 642686 - RNA, 22 nt, Human
cauuuguuuagaagucuuuaua

SEQ ID NO: 642687 - RNA, 22 nt, Human
ugaaacaagggaccguccuuuc

SEQ ID NO: 642688 - RNA, 22 nt, Human
gugcuuuacuggcagugaugua

SEQ ID NO: 642689 - RNA, 22 nt, Human
uuguuacauggacaacuguaug

SEQ ID NO: 642690 - RNA, 17 nt, Human
uugcagacuuuuuauua

SEQ ID NO: 642691 - RNA, 23 nt, Human
uggcuggcgccugccucacccug

SEQ ID NO: 642692 - RNA, 22 nt, Human
uuguuacagcagugauuucaga

SEQ ID NO: 642693 - RNA, 22 nt, Human
uaacuuuuacuuaccaucugag

SEQ ID NO: 642694 - RNA, 22 nt, Human
agcuuuaucccuugcccaucga

SEQ ID NO: 642695 - RNA, 20 nt, Human
ccagaagguaggauggaaca

SEQ ID NO: 642696 - RNA, 22 nt, Human
auguaucaugcaggguccauga

SEQ ID NO: 642697 - RNA, 22 nt, Human
acuuaaaaccagacagcgucau

SEQ ID NO: 642698 - RNA, 15 nt, Human
auuauuugugcucag

SEQ ID NO: 642699 - RNA, 22 nt, Human
accaaaaauuguggggcugaau

SEQ ID NO: 642700 - RNA, 22 nt, Human
caaauaauuacuauccucacuu

SEQ ID NO: 642701 - RNA, 22 nt, Human
uauuugauagagauaaaugaua

SEQ ID NO: 642702 - RNA, 21 nt, Human
acucugcugcgggcuuggccu

SEQ ID NO: 642703 - RNA, 22 nt, Human
ugcugccuguuguggggccacg

SEQ ID NO: 642704 - RNA, 22 nt, Human
cagaggcagugggguugcuccu

SEQ ID NO: 642705 - RNA, 22 nt, Human
cacauuuaaagguugaagcuga

SEQ ID NO: 642706 - RNA, 22 nt, Human
uugucuuucccagcuucuagag

SEQ ID NO: 642707 - RNA, 22 nt, Human
gcugccugguuucucagcugca

SEQ ID NO: 642708 - RNA, 22 nt, Human
acagauacucagcucuaugcuu

SEQ ID NO: 642709 - RNA, 22 nt, Human
ucccagcacuguaauucuuugg

SEQ ID NO: 642710 - RNA, 22 nt, Human
aauugugcuaugauuaugaaag

SEQ ID NO: 642711 - RNA, 22 nt, Human
uggucugaaggacuucugaggg

SEQ ID NO: 642712 - RNA, 22 nt, Human
uuggccaauuuagaacguguug

SEQ ID NO: 642713 - RNA, 22 nt, Human
cuuuagcaacgaugaugauauu

SEQ ID NO: 642714 - RNA, 22 nt, Human
gcuuccaaugcuucuaucacau

SEQ ID NO: 642715 - RNA, 22 nt, Human
agcuagaauauugaucugaaau

SEQ ID NO: 642716 - RNA, 22 nt, Human
ugcccugcagugagugcgucug

SEQ ID NO: 642717 - RNA, 22 nt, Human
aaaguuugcaauuuauguuaau

SEQ ID NO: 642718 - RNA, 22 nt, Human
cagacacuaggugacagagugc

SEQ ID NO: 642719 - RNA, 22 nt, Human
gggcuucaguucugaccaucuu

SEQ ID NO: 642720 - RNA, 22 nt, Human
uccuugggaaaucacuagcacu

SEQ ID NO: 642721 - RNA, 22 nt, Human
agaacauuugucgaucaauuug

SEQ ID NO: 642722 - RNA, 22 nt, Human
acaguuaauaaguaguaaguca

SEQ ID NO: 642723 - RNA, 22 nt, Human
acaauaugggauauacauuuua

SEQ ID NO: 642724 - RNA, 22 nt, Human
agauggaguuguagcagugacu

SEQ ID NO: 642725 - RNA, 22 nt, Human
cagggcauaagaugaggcugua

SEQ ID NO: 642726 - RNA, 22 nt, Human
uaaaucacaucgaaaucugggu

SEQ ID NO: 642727 - RNA, 22 nt, Human
aaaucaugguggaagaaacaga

SEQ ID NO: 642728 - RNA, 22 nt, Human
agcagccauuuaaaaugaauug

SEQ ID NO: 642729 - RNA, 23 nt, Human
ugcugaaguguuggcccugccca

SEQ ID NO: 642730 - RNA, 22 nt, Human
aauguuaauucacagccaaaua

SEQ ID NO: 642731 - RNA, 22 nt, Human
uuccaggcaugucagacauagg

SEQ ID NO: 642732 - RNA, 22 nt, Human
gucuccagauauccuacacaac

SEQ ID NO: 642733 - RNA, 19 nt, Human
gagguucacgcgcuggaug

SEQ ID NO: 642734 - RNA, 22 nt, Human
ggccuuccuggcggcucagggu

SEQ ID NO: 642735 - RNA, 22 nt, Human
ccugucuuagggaaagacugga

SEQ ID NO: 642736 - RNA, 22 nt, Human
aggugcccaucaccucacaguc

SEQ ID NO: 642737 - RNA, 22 nt, Human
caugcaaaauguauuuuauuag

SEQ ID NO: 642738 - RNA, 22 nt, Human
uccuugaaaagaaugucuccau

SEQ ID NO: 642739 - RNA, 18 nt, Human
augggaggggccaagaga

SEQ ID NO: 642740 - RNA, 22 nt, Human
ucuuugcaaauguuauuaucuu

SEQ ID NO: 642741 - RNA, 22 nt, Human
cagagucaauguccaagaagcu

SEQ ID NO: 642742 - RNA, 22 nt, Human
ucucuccuccacaccgggugcu

SEQ ID NO: 642743 - RNA, 22 nt, Human
uuacacagaaauuuuauugccu

SEQ ID NO: 642744 - RNA, 22 nt, Human
gguuucaaugagaagugcuugu

SEQ ID NO: 642745 - RNA, 18 nt, Human
auaucagcuacuucaugg

SEQ ID NO: 642746 - RNA, 22 nt, Human
gagcugaguguccuaggcaugg

SEQ ID NO: 642747 - RNA, 22 nt, Human
gccuugcuuugcuucuggacag

SEQ ID NO: 642748 - RNA, 18 nt, Human
uauaaccucuguuacuca

SEQ ID NO: 642749 - RNA, 22 nt, Human
ggcaugcauguuguuuuaggug

SEQ ID NO: 642750 - RNA, 22 nt, Human
aaugugaacuuugucauguaac

SEQ ID NO: 642751 - RNA, 22 nt, Human
caguagugaaaagcagcccagc

SEQ ID NO: 642752 - RNA, 22 nt, Human
aaacugcuuuccacaguggcua

SEQ ID NO: 642753 - RNA, 22 nt, Human
gggcugcugccaaucacagccu

SEQ ID NO: 642754 - RNA, 19 nt, Human
gggcacagccuccccccag

SEQ ID NO: 642755 - RNA, 22 nt, Human
agcauuuucugagaguauagau

SEQ ID NO: 642756 - RNA, 22 nt, Human
uagcacaguguucacaacagug

SEQ ID NO: 642757 - RNA, 22 nt, Human
auuagcauauuaaauagucauu

SEQ ID NO: 642758 - RNA, 22 nt, Human
uccugggcccaggcugccaggg

SEQ ID NO: 642759 - RNA, 22 nt, Human
uaguuuuagucccauuuuacag

SEQ ID NO: 642760 - RNA, 22 nt, Human
uguguaaauuuauuuacauaaa

SEQ ID NO: 642761 - RNA, 22 nt, Human
accugcccaugaaaauggggag

SEQ ID NO: 642762 - RNA, 22 nt, Human
ucaucacuguaucauugauaga

SEQ ID NO: 642763 - RNA, 22 nt, Human
ccugcugggccugagcaaugag

SEQ ID NO: 642764 - RNA, 22 nt, Human
ucaguguucagcggugugugca

SEQ ID NO: 642765 - RNA, 22 nt, Human
ccaucccuucucuggccagcag

SEQ ID NO: 642766 - RNA, 21 nt, Human
uucaagucucuaggacuucuc

SEQ ID NO: 642767 - RNA, 22 nt, Human
auggagcugugugaauauucau

SEQ ID NO: 642768 - RNA, 22 nt, Human
aagcaggagagccugggugagc

SEQ ID NO: 642769 - RNA, 22 nt, Human
ugucuuuagccagcagucuucu

SEQ ID NO: 642770 - RNA, 22 nt, Human
cuggugguucaggagaauggcu

SEQ ID NO: 642771 - RNA, 22 nt, Human
gcucagaggccacuguuggaaa

SEQ ID NO: 642772 - RNA, 22 nt, Human
uuaaaaauauguagggcccgau

SEQ ID NO: 642773 - RNA, 22 nt, Human
cuguuauuucugccaggugagu

SEQ ID NO: 642774 - RNA, 22 nt, Human
ucugcugucacucauuugcuuc

SEQ ID NO: 642775 - RNA, 22 nt, Human
aaauauuguuuugguaagcuuc

SEQ ID NO: 642776 - RNA, 22 nt, Human
cagcugaggucaaagaagcagg

SEQ ID NO: 642777 - RNA, 22 nt, Human
aaaagcaaggcagucugucuga

SEQ ID NO: 642778 - RNA, 22 nt, Human
ccaggaagacacaugcucaucc

SEQ ID NO: 642779 - RNA, 22 nt, Human
aucugucuauguggcuauguau

SEQ ID NO: 642780 - RNA, 22 nt, Human
ugucucuggcccaugagcagag

SEQ ID NO: 642781 - RNA, 22 nt, Human
ugcauggaacggucuccugguc

SEQ ID NO: 642782 - RNA, 22 nt, Human
agugucugggcucccuuggagc

SEQ ID NO: 642783 - RNA, 22 nt, Human
cucaggcuaagaaggccaagug

SEQ ID NO: 642784 - RNA, 22 nt, Human
cucugugcucccaugcuaguaa

SEQ ID NO: 642785 - RNA, 22 nt, Human
ggcuccuguccuccuggagcuc

SEQ ID NO: 642786 - RNA, 22 nt, Human
caguguuuugagaagggcacgu

SEQ ID NO: 642787 - RNA, 22 nt, Human
aauaucaguauauuguaucagu

SEQ ID NO: 642788 - RNA, 22 nt, Human
ugacagacuuuacuucuccuau

SEQ ID NO: 642789 - RNA, 22 nt, Human
ggagaggagcuauugggggcuc

SEQ ID NO: 642790 - RNA, 22 nt, Human
uaagaacauuuucggaaagaua

SEQ ID NO: 642791 - RNA, 22 nt, Human
cuucucaacugcacuugccagg

SEQ ID NO: 642792 - RNA, 22 nt, Human
uauagcaaaauaguuuccacac

SEQ ID NO: 642793 - RNA, 22 nt, Human
uuaauccaauaacaagguucaa

SEQ ID NO: 642794 - RNA, 22 nt, Human
cagaggcuuugcccuggaaacc

SEQ ID NO: 642795 - RNA, 22 nt, Human
uggaauggaaacaaacugagga

SEQ ID NO: 642796 - RNA, 22 nt, Human
caacuuuaugauugguuuguca

SEQ ID NO: 642797 - RNA, 22 nt, Human
uuuaucuuuaggacuuugcaga

SEQ ID NO: 642798 - RNA, 17 nt, Human
uacaaugugauucaauc

SEQ ID NO: 642799 - RNA, 22 nt, Human
ugguguggggauaagcacucug

SEQ ID NO: 642800 - RNA, 22 nt, Human
cucuccccacacccucugcaug

SEQ ID NO: 642801 - RNA, 22 nt, Human
uauuucuugaguggucaguuuc

SEQ ID NO: 642802 - RNA, 22 nt, Human
uauuguaucuucuguuuagaag

SEQ ID NO: 642803 - RNA, 19 nt, Human
agugcauuuuauguuucaa

SEQ ID NO: 642804 - RNA, 20 nt, Human
cuggccagaacgccuacaca

SEQ ID NO: 642805 - RNA, 22 nt, Human
uccucagggcggccuccgucuu

SEQ ID NO: 642806 - RNA, 23 nt, Human
aggagccagcccuguucucagua

SEQ ID NO: 642807 - RNA, 22 nt, Human
ugcaggguguccggaggaucac

SEQ ID NO: 642808 - RNA, 19 nt, Human
ccugugugggguagagauc

SEQ ID NO: 642809 - RNA, 22 nt, Human
uauauuccaguucaucucuuga

SEQ ID NO: 642810 - RNA, 22 nt, Human
caagugucuauaucagugcuug

SEQ ID NO: 642811 - RNA, 22 nt, Human
auguuaacugaagccauucucg

SEQ ID NO: 642812 - RNA, 22 nt, Human
cagaggcacagugcgggccacu

SEQ ID NO: 642813 - RNA, 22 nt, Human
ugcucccaaacgaccuacugug

SEQ ID NO: 642814 - RNA, 22 nt, Human
ugggaaaguguagccugcaggc

SEQ ID NO: 642815 - RNA, 22 nt, Human
auucuuuuaagccccagggauu

SEQ ID NO: 642816 - RNA, 22 nt, Human
caagggggcaggaucacacuug

SEQ ID NO: 642817 - RNA, 22 nt, Human
acaaugaugcagaugaguaaga

SEQ ID NO: 642818 - RNA, 23 nt, Human
uuacaaguucugaaauuuccuuc

SEQ ID NO: 642819 - RNA, 22 nt, Human
gaggcagcgggucaggaccgug

SEQ ID NO: 642820 - RNA, 22 nt, Human
aauuuucugccuagcaaaaacu

SEQ ID NO: 642821 - RNA, 22 nt, Human
uacuauuuauggagugguuauu

SEQ ID NO: 642822 - RNA, 22 nt, Human
cucuuucaguucugauagucuc

SEQ ID NO: 642823 - RNA, 22 nt, Human
cugcacaguguuggaagcugcc

SEQ ID NO: 642824 - RNA, 20 nt, Human
ucaggcaguggggaaaggca

SEQ ID NO: 642825 - RNA, 22 nt, Human
cacuauuuucucuucagauggc

SEQ ID NO: 642826 - RNA, 22 nt, Human
ugcuucucuguucuaacccuug

SEQ ID NO: 642827 - RNA, 22 nt, Human
caagucugaccucugggugaag

SEQ ID NO: 642828 - RNA, 19 nt, Human
cuggaccuggaggcccgga

SEQ ID NO: 642829 - RNA, 22 nt, Human
gccacagcggggccgcuagagc

SEQ ID NO: 642830 - RNA, 22 nt, Human
gagcagcagguggggcuggcuu

SEQ ID NO: 642831 - RNA, 23 nt, Human
uguguacacaauagaugagguuu

SEQ ID NO: 642832 - RNA, 22 nt, Human
uucuuucugaauacaguugagu

SEQ ID NO: 642833 - RNA, 22 nt, Human
uaggguggagacuggaagcagg

SEQ ID NO: 642834 - RNA, 22 nt, Human
uuugaugaaccuauauaauuug

SEQ ID NO: 642835 - RNA, 22 nt, Human
gggauaggaaacuuagguacac

SEQ ID NO: 642836 - RNA, 22 nt, Human
aucucuguaaaccauaaauuga

SEQ ID NO: 642837 - RNA, 22 nt, Human
uguauaugagucugaguguaca

SEQ ID NO: 642838 - RNA, 22 nt, Human
gugccugcagcaauccauggca

SEQ ID NO: 642839 - RNA, 22 nt, Human
uucuagucuauggcuagauagu

SEQ ID NO: 642840 - RNA, 19 nt, Human
ucuugcagccccagcaggc

SEQ ID NO: 642841 - RNA, 22 nt, Human
cacaggaagcugacugcuggca

SEQ ID NO: 642842 - RNA, 22 nt, Human
cgagaguuagcuaggagucaca

SEQ ID NO: 642843 - RNA, 20 nt, Human
ugguggacuuuggcauggcu

SEQ ID NO: 642844 - RNA, 20 nt, Human
uguucugucgucuuucuuca

SEQ ID NO: 642845 - RNA, 22 nt, Human
gcccaaggucccauggcagcac

SEQ ID NO: 642846 - RNA, 22 nt, Human
gucugcuguagguaggacagca

SEQ ID NO: 642847 - RNA, 22 nt, Human
cacuaaguugguguuaauuagu

SEQ ID NO: 642848 - RNA, 22 nt, Human
agcugccauccgaggugucaga

SEQ ID NO: 642849 - RNA, 22 nt, Human
cugcuuccauggucuggagacu

SEQ ID NO: 642850 - RNA, 22 nt, Human
acaaaaaccguggauucagcau

SEQ ID NO: 642851 - RNA, 22 nt, Human
auauucugccucacuacaguug

SEQ ID NO: 642852 - RNA, 22 nt, Human
uuugucuaauugcaaggcaagu

SEQ ID NO: 642853 - RNA, 22 nt, Human
aaagaucacgucccaggacucg

SEQ ID NO: 642854 - RNA, 20 nt, Human
acacauauagcagcauaaac

SEQ ID NO: 642855 - RNA, 19 nt, Human
ggcaccuuggucuuggacu

SEQ ID NO: 642856 - RNA, 22 nt, Human
uacauuugcuuugauuuucagc

SEQ ID NO: 642857 - RNA, 22 nt, Human
agcugccagggacugggcaugg

SEQ ID NO: 642858 - RNA, 22 nt, Human
uccaugcagaggagcugguggc

SEQ ID NO: 642859 - RNA, 22 nt, Human
ucugagcuauguaagacuugga

SEQ ID NO: 642860 - RNA, 22 nt, Human
ggcuuuugcuguguuuuccaga

SEQ ID NO: 642861 - RNA, 22 nt, Human
ucuuaaagagcgcaauuugagg

SEQ ID NO: 642862 - RNA, 22 nt, Human
gacuuuugaauaagguaggaua

SEQ ID NO: 642863 - RNA, 22 nt, Human
gagcuggcacagaaggaucuua

SEQ ID NO: 642864 - RNA, 22 nt, Human
acacugguaggaagagauggcu

SEQ ID NO: 642865 - RNA, 22 nt, Human
caccugagacuccucaccauga

SEQ ID NO: 642866 - RNA, 22 nt, Human
ugccagagaagacccagucacu

SEQ ID NO: 642867 - RNA, 22 nt, Human
gcugcugggcacccccugagcu

SEQ ID NO: 642868 - RNA, 22 nt, Human
cuagcacuuagggauuguuaug

SEQ ID NO: 642869 - RNA, 22 nt, Human
auuugcuucuugcuuccagcac

SEQ ID NO: 642870 - RNA, 22 nt, Human
cugugaaaucaaccuugagccc

SEQ ID NO: 642871 - RNA, 22 nt, Human
uuuuugcuaauccccagccacu

SEQ ID NO: 642872 - RNA, 22 nt, Human
uuucacauaucaacucuauccu

SEQ ID NO: 642873 - RNA, 22 nt, Human
ccuaauuugauuuuaaauagcc

SEQ ID NO: 642874 - RNA, 22 nt, Human
acagugggacagugacggggga

SEQ ID NO: 642875 - RNA, 19 nt, Human
acauuuagaauguacuugc

SEQ ID NO: 642876 - RNA, 22 nt, Human
ugcaauuuggggaagaaagaga

SEQ ID NO: 642877 - RNA, 22 nt, Human
ugcagggccuugggaugugucc

SEQ ID NO: 642878 - RNA, 22 nt, Human
gcugggcugcccaaccucugac

SEQ ID NO: 642879 - RNA, 22 nt, Human
agucccagugagaugagccacg

SEQ ID NO: 642880 - RNA, 16 nt, Human
aucuaagaugugcauu

SEQ ID NO: 642881 - RNA, 22 nt, Human
agaccugggugcccugugcuuu

SEQ ID NO: 642882 - RNA, 22 nt, Human
gccucugcaucaucacuccagc

SEQ ID NO: 642883 - RNA, 22 nt, Human
guugaaugaaucauucuaugua

SEQ ID NO: 642884 - RNA, 22 nt, Human
cucagcauucaauguccagucc

SEQ ID NO: 642885 - RNA, 22 nt, Human
auuaucuugauaaaauggcagu

SEQ ID NO: 642886 - RNA, 22 nt, Human
cacugugucagaguaugaugau

SEQ ID NO: 642887 - RNA, 22 nt, Human
uuguagcuuaucaaggcuguuu

SEQ ID NO: 642888 - RNA, 22 nt, Human
gcacagggaggcuggccuggcc

SEQ ID NO: 642889 - RNA, 21 nt, Human
uaacuuuugugccuaucuugu

SEQ ID NO: 642890 - RNA, 18 nt, Human
gagcccugagucugcaca

SEQ ID NO: 642891 - RNA, 22 nt, Human
gugacucuuaaagcaaaucuug

SEQ ID NO: 642892 - RNA, 22 nt, Human
cuguggaguguagaugcugggu

SEQ ID NO: 642893 - RNA, 22 nt, Human
uggugagauaacuuucggcaag

SEQ ID NO: 642894 - RNA, 22 nt, Human
aaauguacugauacuuauuuua

SEQ ID NO: 642895 - RNA, 22 nt, Human
auuuccaugucgguauuuuaua

SEQ ID NO: 642896 - RNA, 22 nt, Human
uggacuggaaugcugauccucu

SEQ ID NO: 642897 - RNA, 22 nt, Human
ggcaggcugggagucaucagag

SEQ ID NO: 642898 - RNA, 22 nt, Human
gucagagcugugcaaggcugag

SEQ ID NO: 642899 - RNA, 22 nt, Human
ggaggaagcacacggcuuguau

SEQ ID NO: 642900 - RNA, 22 nt, Human
acugcaugauaauaauagcaga

SEQ ID NO: 642901 - RNA, 22 nt, Human
agugggggcagagccucucucg

SEQ ID NO: 642902 - RNA, 23 nt, Human
uccuccugacacagccugaguga

SEQ ID NO: 642903 - RNA, 22 nt, Human
auuuaaauuuucugauggagag

SEQ ID NO: 642904 - RNA, 22 nt, Human
uguuucaagcaauagcauuuca

SEQ ID NO: 642905 - RNA, 22 nt, Human
uaagcacuuuauaugcuuuauc

SEQ ID NO: 642906 - RNA, 22 nt, Human
aacacaugaaaguuggugagua

SEQ ID NO: 642907 - RNA, 22 nt, Human
cagcagcuacuuggagcagcag

SEQ ID NO: 642908 - RNA, 22 nt, Human
ugagauaagcaaggauaaaggu

SEQ ID NO: 642909 - RNA, 22 nt, Human
ugccucagagaccugacaguac

SEQ ID NO: 642910 - RNA, 22 nt, Human
gcagauggagauaaauggaacu

SEQ ID NO: 642911 - RNA, 22 nt, Human
guggcagguuauaagcaucuca

SEQ ID NO: 642912 - RNA, 22 nt, Human
uuucagucuuauuuuguugaua

SEQ ID NO: 642913 - RNA, 22 nt, Human
acaguccuagcugcaaagaagu

SEQ ID NO: 642914 - RNA, 22 nt, Human
aguccaaggagagacagcauuu

SEQ ID NO: 642915 - RNA, 22 nt, Human
acagagccacuuuggugccuac

SEQ ID NO: 642916 - RNA, 22 nt, Human
auuggucagaguaaauuuauuu

SEQ ID NO: 642917 - RNA, 22 nt, Human
gaguuacauggacauucucucc

SEQ ID NO: 642918 - RNA, 22 nt, Human
ccugucugcagauaucucaggu

SEQ ID NO: 642919 - RNA, 22 nt, Human
uugcuuauuugauuaaaugucu

SEQ ID NO: 642920 - RNA, 22 nt, Human
cuccuucagucugcguggcugu

SEQ ID NO: 642921 - RNA, 22 nt, Human
gcugugcuauaucucugagugu

SEQ ID NO: 642922 - RNA, 22 nt, Human
cccuuggaggaagcucuaggcu

SEQ ID NO: 642923 - RNA, 22 nt, Human
guggaagggucacagccccuac

SEQ ID NO: 642924 - RNA, 22 nt, Human
ucaacaaauacuuaaagcagag

SEQ ID NO: 642925 - RNA, 22 nt, Human
gcaggcugagaguccaagaagg

SEQ ID NO: 642926 - RNA, 22 nt, Human
uugcacagaguggauauucagu

SEQ ID NO: 642927 - RNA, 22 nt, Human
cagcaaauacuacuaguuuuua

SEQ ID NO: 642928 - RNA, 22 nt, Human
uugugcagagaaaucuuucuug

SEQ ID NO: 642929 - RNA, 22 nt, Human
ugcuugucuucaggaaugcuga

SEQ ID NO: 642930 - RNA, 22 nt, Human
ccugaguugucaguugcuguag

SEQ ID NO: 642931 - RNA, 22 nt, Human
uuggagagauuuaggucucagu

SEQ ID NO: 642932 - RNA, 22 nt, Human
auucccacagcugguauaaaua

SEQ ID NO: 642933 - RNA, 22 nt, Human
guguggcugauugacaugguca

SEQ ID NO: 642934 - RNA, 22 nt, Human
gggagcugucaucaguguuguc

SEQ ID NO: 642935 - RNA, 22 nt, Human
uaggaauuaugaugcuaucaag

SEQ ID NO: 642936 - RNA, 22 nt, Human
aacaugcauauagguaaaugga

SEQ ID NO: 642937 - RNA, 22 nt, Human
agaaaugucaggaaagaagucc

SEQ ID NO: 642938 - RNA, 22 nt, Human
cugcuguccaaccugcacucgc

SEQ ID NO: 642939 - RNA, 22 nt, Human
ugcuuccaauucaaaucugugg

SEQ ID NO: 642940 - RNA, 20 nt, Human
gcaggcagggaaugggggug

SEQ ID NO: 642941 - RNA, 22 nt, Human
ccccagcugagauuugaggaga

SEQ ID NO: 642942 - RNA, 22 nt, Human
uucucucuggaccugggaugcg

SEQ ID NO: 642943 - RNA, 22 nt, Human
ccucaggaaaugaauaaauggc

SEQ ID NO: 642944 - RNA, 22 nt, Human
gccuuggcugccaagcugcuga

SEQ ID NO: 642945 - RNA, 22 nt, Human
cagaauaagcuguguugucaag

SEQ ID NO: 642946 - RNA, 22 nt, Human
auauagcacuuguuuugcaugu

SEQ ID NO: 642947 - RNA, 22 nt, Human
uuguaugaucccauuuagugaa

SEQ ID NO: 642948 - RNA, 22 nt, Human
ugcagaggugugcauucuuaag

SEQ ID NO: 642949 - RNA, 22 nt, Human
augaaucaagugagaacagcau

SEQ ID NO: 642950 - RNA, 22 nt, Human
ugagacacucucgggcacauuu

SEQ ID NO: 642951 - RNA, 22 nt, Human
guuggcuaugagagcuuuagug

SEQ ID NO: 642952 - RNA, 22 nt, Human
acuguauuuccaacagacaaau

SEQ ID NO: 642953 - RNA, 22 nt, Human
ucucuguucauggcacuauguc

SEQ ID NO: 642954 - RNA, 22 nt, Human
gggaccaggucagggcucugac

SEQ ID NO: 642955 - RNA, 22 nt, Human
cccucugccucugaguaggaca

SEQ ID NO: 642956 - RNA, 22 nt, Human
uuucaaauaccauaaaccuaau

SEQ ID NO: 642957 - RNA, 22 nt, Human
aagcaaggcaaccuauguccag

SEQ ID NO: 642958 - RNA, 22 nt, Human
gcucuggcccaaacccuuucua

SEQ ID NO: 642959 - RNA, 22 nt, Human
ccucugugauuucugagccaau

SEQ ID NO: 642960 - RNA, 22 nt, Human
ugcacaaaggcucccugcugag

SEQ ID NO: 642961 - RNA, 22 nt, Human
aaagcaauagguuaggucaaga

SEQ ID NO: 642962 - RNA, 22 nt, Human
agaguuccacguacagcuuuug

SEQ ID NO: 642963 - RNA, 22 nt, Human
cagcaguggaacuacccaggga

SEQ ID NO: 642964 - RNA, 22 nt, Human
cuccaaggauucuggacccuug

SEQ ID NO: 642965 - RNA, 22 nt, Human
ugagucagucugcccuggcuuc

SEQ ID NO: 642966 - RNA, 22 nt, Human
gagucagguuucugccuauaga

SEQ ID NO: 642967 - RNA, 22 nt, Human
aaggaggcccucuccuucugga

SEQ ID NO: 642968 - RNA, 22 nt, Human
cucuccuuucacuaaauauucu

SEQ ID NO: 642969 - RNA, 22 nt, Human
augcaacagucaguacauccgg

SEQ ID NO: 642970 - RNA, 22 nt, Human
gagggguguggagccaucaguu

SEQ ID NO: 642971 - RNA, 22 nt, Human
aaacugcacuuuauuuugucaa

SEQ ID NO: 642972 - RNA, 22 nt, Human
uggcuacaaguguguuuaguuu

SEQ ID NO: 642973 - RNA, 22 nt, Human
aaacagagagauguauguggag

SEQ ID NO: 642974 - RNA, 22 nt, Human
cugcucuguucccccaucaucu

SEQ ID NO: 642975 - RNA, 22 nt, Human
uguagcagugucuaccacauua

SEQ ID NO: 642976 - RNA, 22 nt, Human
ggcuaggccucaggccugccug

SEQ ID NO: 642977 - RNA, 22 nt, Human
ucagacagaaggacuauuugaa

SEQ ID NO: 642978 - RNA, 22 nt, Human
gagguuagaggucagugcaguc

SEQ ID NO: 642979 - RNA, 22 nt, Human
aaguuugugguuauacuugauu

SEQ ID NO: 642980 - RNA, 23 nt, Human
cagcagcugccugguuuuuuggu

SEQ ID NO: 642981 - RNA, 22 nt, Human
gucaaaacacuggggaauguug

SEQ ID NO: 642982 - RNA, 22 nt, Human
gcugcccuguccggcucuccug

SEQ ID NO: 642983 - RNA, 22 nt, Human
uuguauuugauugucauaucgu

SEQ ID NO: 642984 - RNA, 22 nt, Human
cugugaggcggaaaggacucuc

SEQ ID NO: 642985 - RNA, 22 nt, Human
cuuccagguaggccuaaggcag

SEQ ID NO: 642986 - RNA, 22 nt, Human
ugucucuccacacagccagugc

SEQ ID NO: 642987 - RNA, 22 nt, Human
cugggucuaaaaauucucagau

SEQ ID NO: 642988 - RNA, 22 nt, Human
auggaaauaucuuuagagcuua

SEQ ID NO: 642989 - RNA, 22 nt, Human
uguggcaggaagagcuucugag

SEQ ID NO: 642990 - RNA, 22 nt, Human
caguccuuucugaaauccuaua

SEQ ID NO: 642991 - RNA, 22 nt, Human
uucacacagcaacuguaugaau

SEQ ID NO: 642992 - RNA, 19 nt, Human
cucuuacagaauagacaca

SEQ ID NO: 642993 - RNA, 22 nt, Human
agucaagguggaccagaaaaau

SEQ ID NO: 642994 - RNA, 22 nt, Human
uguagggagaagagaggcaccu

SEQ ID NO: 642995 - RNA, 21 nt, Human
ucgugcagcagcugaggcuug

SEQ ID NO: 642996 - RNA, 22 nt, Human
acaggagggacaccuuccugcu

SEQ ID NO: 642997 - RNA, 22 nt, Human
uuuaaaauuuagaccucuccac

SEQ ID NO: 642998 - RNA, 20 nt, Human
aaguuucaugcucuggggau

SEQ ID NO: 642999 - RNA, 22 nt, Human
cagggauggagagacuacuggc

SEQ ID NO: 643000 - RNA, 22 nt, Human
ugggcugccagcucuccagaug

SEQ ID NO: 643001 - RNA, 22 nt, Human
guuaaugccauuaggaaauuua

SEQ ID NO: 643002 - RNA, 22 nt, Human
gcugucacauuuggagcacugg

SEQ ID NO: 643003 - RNA, 22 nt, Human
ugaaauucaaaacacauuuguc

SEQ ID NO: 643004 - RNA, 21 nt, Human
auggcugaugauauugaacau

SEQ ID NO: 643005 - RNA, 22 nt, Human
uccaugugcuuccucaggggaa

SEQ ID NO: 643006 - RNA, 18 nt, Human
uccuccuuuggccuuuuc

SEQ ID NO: 643007 - RNA, 20 nt, Human
auccuggaauccaaauggag

SEQ ID NO: 643008 - RNA, 22 nt, Human
cucuuuaagcuccuaacagcca

SEQ ID NO: 643009 - RNA, 22 nt, Human
ugaucuagguuggcuucaacug

SEQ ID NO: 643010 - RNA, 22 nt, Human
ggucucagcuggaguccuuggu

SEQ ID NO: 643011 - RNA, 22 nt, Human
auuuacagguagaauuuuaagu

SEQ ID NO: 643012 - RNA, 19 nt, Human
uggcuucuucgguguuccc

SEQ ID NO: 643013 - RNA, 22 nt, Human
ugucccaggcugaaguacagug

SEQ ID NO: 643014 - RNA, 22 nt, Human
acacaagaaguuaaugggcaaa

SEQ ID NO: 643015 - RNA, 22 nt, Human
acugcagagguggggugcagag

SEQ ID NO: 643016 - RNA, 22 nt, Human
uugcaaauaaacaaguauacau

SEQ ID NO: 643017 - RNA, 22 nt, Human
ugcuggccgugagcucucggga

SEQ ID NO: 643018 - RNA, 23 nt, Human
uggcacagaggaccaugcuuugc

SEQ ID NO: 643019 - RNA, 22 nt, Human
cuugccagggacucagucaggg

SEQ ID NO: 643020 - RNA, 22 nt, Human
gacugggaggguucagcugggu

SEQ ID NO: 643021 - RNA, 22 nt, Human
auagaaucuuuguaaaacacuu

SEQ ID NO: 643022 - RNA, 22 nt, Human
guggccagugggaaugggcuca

SEQ ID NO: 643023 - RNA, 22 nt, Human
uuuuuauaccaccucucacuua

SEQ ID NO: 643024 - RNA, 22 nt, Human
caggcuguguuccuggaacccc

SEQ ID NO: 643025 - RNA, 21 nt, Human
cucuggagucaagagcuucca

SEQ ID NO: 643026 - RNA, 22 nt, Human
cugugucugaauaacucugugu

SEQ ID NO: 643027 - RNA, 22 nt, Human
uugcauuuuuagaugcuucugu

SEQ ID NO: 643028 - RNA, 22 nt, Human
uagcaaccuauggauagagaag

SEQ ID NO: 643029 - RNA, 23 nt, Human
auguuauuauuagcagucuugcc

SEQ ID NO: 643030 - RNA, 23 nt, Human
ugggcucagcuuccaguggggag

SEQ ID NO: 643031 - RNA, 22 nt, Human
aguguuuauuagauuucccuuu

SEQ ID NO: 643032 - RNA, 22 nt, Human
uagaaggaggacuggcaguguu

SEQ ID NO: 643033 - RNA, 22 nt, Human
cugggggcaagcagacagcugu

SEQ ID NO: 643034 - RNA, 19 nt, Human
caguaucauugcacauagu

SEQ ID NO: 643035 - RNA, 21 nt, Human
ucuugugugggaaacaauuug

SEQ ID NO: 643036 - RNA, 23 nt, Human
agucuucauuguauuuccagacc

SEQ ID NO: 643037 - RNA, 22 nt, Human
uggccaugaaggaggcagcaga

SEQ ID NO: 643038 - RNA, 22 nt, Human
ucauguuuuagcugcaaaauga

SEQ ID NO: 643039 - RNA, 22 nt, Human
guucagcaagaauguuucuauu

SEQ ID NO: 643040 - RNA, 22 nt, Human
gcacagaggaugaggcagcucu

SEQ ID NO: 643041 - RNA, 22 nt, Human
auucugagaaaugcauugucag

SEQ ID NO: 643042 - RNA, 22 nt, Human
ucucagcaaggaaagaggcagg

SEQ ID NO: 643043 - RNA, 22 nt, Human
agaggcuggauugagcauagac

SEQ ID NO: 643044 - RNA, 22 nt, Human
accucugcaguagggcugugcc

SEQ ID NO: 643045 - RNA, 22 nt, Human
ccagugugguuuaggauaggga

SEQ ID NO: 643046 - RNA, 22 nt, Human
gcccacagcucguuccucuccu

SEQ ID NO: 643047 - RNA, 22 nt, Human
auuggcaaggcugcggugucug

SEQ ID NO: 643048 - RNA, 22 nt, Human
uagauucucugcuggcugacau

SEQ ID NO: 643049 - RNA, 22 nt, Human
aagauuuacuagcauaauagcu

SEQ ID NO: 643050 - RNA, 22 nt, Human
aaucacuuagaacccaggaagu

SEQ ID NO: 643051 - RNA, 22 nt, Human
ggggcuguugaaguuaguugag

SEQ ID NO: 643052 - RNA, 22 nt, Human
aggcuggcuuugguagcauggu

SEQ ID NO: 643053 - RNA, 22 nt, Human
uucucacaggaaguaggacuuu

SEQ ID NO: 643054 - RNA, 22 nt, Human
gaguguaguucauuccguccua

SEQ ID NO: 643055 - RNA, 22 nt, Human
aauagcauguaaguuuaaaaga

SEQ ID NO: 643056 - RNA, 22 nt, Human
gccacagccucugggaaaacuc

SEQ ID NO: 643057 - RNA, 22 nt, Human
caggacccaaccucccugcucu

SEQ ID NO: 643058 - RNA, 22 nt, Human
ggcagccauacucagaccuggg

SEQ ID NO: 643059 - RNA, 22 nt, Human
ggaggcgcggcucggcugugcc

SEQ ID NO: 643060 - RNA, 22 nt, Human
uuauuccauugucuuuugacuu

SEQ ID NO: 643061 - RNA, 22 nt, Human
ugcugagguuucgucugcuugc

SEQ ID NO: 643062 - RNA, 22 nt, Human
ugcuauuucucugcuguaaaau

SEQ ID NO: 643063 - RNA, 18 nt, Human
ggaaguaggaagaggaag

SEQ ID NO: 643064 - RNA, 22 nt, Human
agugcuggguacuguucccauu

SEQ ID NO: 643065 - RNA, 22 nt, Human
gcucugugaccuuaggcaaguu

SEQ ID NO: 643066 - RNA, 22 nt, Human
aaacaacuucugcacuaugggu

SEQ ID NO: 643067 - RNA, 22 nt, Human
cacaggcugcccgcagcuggga

SEQ ID NO: 643068 - RNA, 22 nt, Human
caccugagcacuggggccgccc

SEQ ID NO: 643069 - RNA, 22 nt, Human
aguacacucaagaaaccgguaa

SEQ ID NO: 643070 - RNA, 17 nt, Human
acaggcagaucaccuga

SEQ ID NO: 643071 - RNA, 22 nt, Human
aagaaugagcucaaagaucuua

SEQ ID NO: 643072 - RNA, 22 nt, Human
auauuauuuucccuggaguugu

SEQ ID NO: 643073 - RNA, 18 nt, Human
gcucagcuaugggagguu

SEQ ID NO: 643074 - RNA, 22 nt, Human
aagcaucucauucuugccuguc

SEQ ID NO: 643075 - RNA, 22 nt, Human
gggaucagaaacauagcccuga

SEQ ID NO: 643076 - RNA, 22 nt, Human
uugggacagaaaaggagaagau

SEQ ID NO: 643077 - RNA, 22 nt, Human
gaacaggguuugagaggcuuag

SEQ ID NO: 643078 - RNA, 22 nt, Human
cuguggcaggaagggacuagca

SEQ ID NO: 643079 - RNA, 23 nt, Human
aacaccaaggcucagagagauaa

SEQ ID NO: 643080 - RNA, 22 nt, Human
ugucagcauugcgucacugagc

SEQ ID NO: 643081 - RNA, 22 nt, Human
gaggggcguccugagugggccu

SEQ ID NO: 643082 - RNA, 22 nt, Human
cauucaaaugugccacuguccu

SEQ ID NO: 643083 - RNA, 22 nt, Human
caaggcuauaauguugcuggaa

SEQ ID NO: 643084 - RNA, 22 nt, Human
ucguuuuagguggacauugugu

SEQ ID NO: 643085 - RNA, 22 nt, Human
ucuucagacuguuguucuuuug

SEQ ID NO: 643086 - RNA, 22 nt, Human
gaaggcuggggccuucucaucu

SEQ ID NO: 643087 - RNA, 22 nt, Human
gucagcgugcucagccuauuau

SEQ ID NO: 643088 - RNA, 22 nt, Human
auucuggauauuacuuaucuau

SEQ ID NO: 643089 - RNA, 22 nt, Human
cuggagugaggucugggagccu

SEQ ID NO: 643090 - RNA, 23 nt, Human
uuuugacaggaggaagguguuga

SEQ ID NO: 643091 - RNA, 22 nt, Human
guuggcacuucauaauaugaaa

SEQ ID NO: 643092 - RNA, 22 nt, Human
augcccaaugucacaauuuuug

SEQ ID NO: 643093 - RNA, 22 nt, Human
gugcagugaaaaaagaaugucc

SEQ ID NO: 643094 - RNA, 22 nt, Human
gcaaaauuaaacuuagcaucau

SEQ ID NO: 643095 - RNA, 22 nt, Human
gacauuuaugaaggagauaugc

SEQ ID NO: 643096 - RNA, 22 nt, Human
gaccaggcccaggugcaaggga

SEQ ID NO: 643097 - RNA, 22 nt, Human
ugccuugggauauauggacacu

SEQ ID NO: 643098 - RNA, 23 nt, Human
uugucugugcuuuuccaguugcu

SEQ ID NO: 643099 - RNA, 22 nt, Human
cacaggaguuaacauaauuaag

SEQ ID NO: 643100 - RNA, 22 nt, Human
aaaguuccuuuuauagacauga

SEQ ID NO: 643101 - RNA, 22 nt, Human
cuucaugaugaccaacugccau

SEQ ID NO: 643102 - RNA, 22 nt, Human
uccuagaacagcccaccuggaa

SEQ ID NO: 643103 - RNA, 22 nt, Human
aaacaccaagagcuagcuauua

SEQ ID NO: 643104 - RNA, 22 nt, Human
agcccugguagccugcugccau

SEQ ID NO: 643105 - RNA, 19 nt, Human
acacagggaucagaggguu

SEQ ID NO: 643106 - RNA, 22 nt, Human
ucccucucuagccuguucagua

SEQ ID NO: 643107 - RNA, 22 nt, Human
aagguuaguaaguaucuuaugu

SEQ ID NO: 643108 - RNA, 22 nt, Human
aaggagugauauaugggugcua

SEQ ID NO: 643109 - RNA, 22 nt, Human
aaauguacacuuugcaucuuga

SEQ ID NO: 643110 - RNA, 22 nt, Human
ugcaacaguggggcaugcugaa

SEQ ID NO: 643111 - RNA, 23 nt, Human
aacagcaggaugauagaggaggu

SEQ ID NO: 643112 - RNA, 22 nt, Human
auucuaaauguaauuuagaauu

SEQ ID NO: 643113 - RNA, 22 nt, Human
acuuucugucaucuagacaagu

SEQ ID NO: 643114 - RNA, 22 nt, Human
uccaggaccaaagacacaugua

SEQ ID NO: 643115 - RNA, 22 nt, Human
cagagccuaaaacgacuccacu

SEQ ID NO: 643116 - RNA, 22 nt, Human
agauuuuaguguagaggacuug

SEQ ID NO: 643117 - RNA, 22 nt, Human
auggcuguuccugggaguucua

SEQ ID NO: 643118 - RNA, 22 nt, Human
gcagcugagagaagaacagggc

SEQ ID NO: 643119 - RNA, 22 nt, Human
uucugcucaguaguaagagugc

SEQ ID NO: 643120 - RNA, 22 nt, Human
acagucuuuaauuucuuugugg

SEQ ID NO: 643121 - RNA, 22 nt, Human
auaacaauagugguagugcugg

SEQ ID NO: 643122 - RNA, 22 nt, Human
auuucagcagcccauguuugga

SEQ ID NO: 643123 - RNA, 22 nt, Human
ggagaggugaauggcugcucua

SEQ ID NO: 643124 - RNA, 22 nt, Human
uccuucaguucaauuaguccgu

SEQ ID NO: 643125 - RNA, 22 nt, Human
gaagccaacauuccaaguagaa

SEQ ID NO: 643126 - RNA, 22 nt, Human
gagaaggagcucaaauauggcu

SEQ ID NO: 643127 - RNA, 22 nt, Human
ccccacuugcucagcaugucca

SEQ ID NO: 643128 - RNA, 22 nt, Human
ucauccgugaagccaaagaaau

SEQ ID NO: 643129 - RNA, 22 nt, Human
cagguggcauugucccgccagc

SEQ ID NO: 643130 - RNA, 22 nt, Human
auaagaaacauuauucuuucca

SEQ ID NO: 643131 - RNA, 22 nt, Human
uugcuguuucucugugucuggu

SEQ ID NO: 643132 - RNA, 18 nt, Human
agagaugggaguuggaaa

SEQ ID NO: 643133 - RNA, 22 nt, Human
ggagcccuuggcaccuaguagg

SEQ ID NO: 643134 - RNA, 22 nt, Human
gcuucugguagaauucaauaga

SEQ ID NO: 643135 - RNA, 22 nt, Human
ccugugguuuacaugacaguua

SEQ ID NO: 643136 - RNA, 22 nt, Human
gaggcugggaaguccaauauca

SEQ ID NO: 643137 - RNA, 22 nt, Human
caucuugaugcuuugacagguu

SEQ ID NO: 643138 - RNA, 23 nt, Human
auuuuaaccuugacuaacaugca

SEQ ID NO: 643139 - RNA, 22 nt, Human
guguagcuuuggagugggaggc

SEQ ID NO: 643140 - RNA, 22 nt, Human
ucacaugcuugaggaaagaaaa

SEQ ID NO: 643141 - RNA, 18 nt, Human
cucugcuaaugggcagcu

SEQ ID NO: 643142 - RNA, 22 nt, Human
auacuucucaugggcucugagc

SEQ ID NO: 643143 - RNA, 22 nt, Human
acaugcauaggagaagucuuua

SEQ ID NO: 643144 - RNA, 22 nt, Human
caggcacacagcacauggccug

SEQ ID NO: 643145 - RNA, 22 nt, Human
agcaauauuuaaagguuugcaa

SEQ ID NO: 643146 - RNA, 22 nt, Human
ggcucccugccuguccucaguc

SEQ ID NO: 643147 - RNA, 22 nt, Human
agcagcuaaguagcgcaguuaa

SEQ ID NO: 643148 - RNA, 23 nt, Human
gggcugcuccaggccaaggcugg

SEQ ID NO: 643149 - RNA, 22 nt, Human
acuguacaacugcugagcagaa

SEQ ID NO: 643150 - RNA, 22 nt, Human
gcugggcuucacagagccuuua

SEQ ID NO: 643151 - RNA, 22 nt, Human
ucacuggggagcacugacaugu

SEQ ID NO: 643152 - RNA, 17 nt, Human
cagugcagauaagugag

SEQ ID NO: 643153 - RNA, 22 nt, Human
uauuuuacuuuaaagcgagaga

SEQ ID NO: 643154 - RNA, 22 nt, Human
uccuaacugcccugggcaaggu

SEQ ID NO: 643155 - RNA, 22 nt, Human
uuuuugcaccaaccuaauagaa

SEQ ID NO: 643156 - RNA, 22 nt, Human
ucacuggaaaugcacagcugua

SEQ ID NO: 643157 - RNA, 22 nt, Human
agcugugugcccaugguggagg

SEQ ID NO: 643158 - RNA, 22 nt, Human
auucuucaaagagugucaaagu

SEQ ID NO: 643159 - RNA, 22 nt, Human
acaguccuuguguggaacauua

SEQ ID NO: 643160 - RNA, 22 nt, Human
uggcaucauagccaaggugcuu

SEQ ID NO: 643161 - RNA, 22 nt, Human
uuacagauacuuuguaggcaag

SEQ ID NO: 643162 - RNA, 22 nt, Human
gugaaguuuuaguauauguaga

SEQ ID NO: 643163 - RNA, 22 nt, Human
acucaggcuucaggcacagcug

SEQ ID NO: 643164 - RNA, 22 nt, Human
cugaggagauccccccagaagu

SEQ ID NO: 643165 - RNA, 22 nt, Human
uuaucuguuguuuuaguacaau

SEQ ID NO: 643166 - RNA, 22 nt, Human
auguggcuaguccaauuaauga

SEQ ID NO: 643167 - RNA, 22 nt, Human
ucugaagauuaccagcuaaaug

SEQ ID NO: 643168 - RNA, 22 nt, Human
aggagcugcaaaaccggccgcu

SEQ ID NO: 643169 - RNA, 22 nt, Human
aguuauauuccauagauucaga

SEQ ID NO: 643170 - RNA, 22 nt, Human
ccccagcugcauacuugccaag

SEQ ID NO: 643171 - RNA, 22 nt, Human
uaacaguauagccuaacauuuc

SEQ ID NO: 643172 - RNA, 22 nt, Human
uccucugguuauacuugcaccc

SEQ ID NO: 643173 - RNA, 23 nt, Human
cauauucaaaacuggaccacucu

SEQ ID NO: 643174 - RNA, 22 nt, Human
accauuuaauaaguauuuccau

SEQ ID NO: 643175 - RNA, 22 nt, Human
gccccuccgggcgcgucauagc

SEQ ID NO: 643176 - RNA, 20 nt, Human
gcucagggaauucaggaagc

SEQ ID NO: 643177 - RNA, 22 nt, Human
cagaagcagauucuaaagcaag

SEQ ID NO: 643178 - RNA, 22 nt, Human
agugucugugaggggaauuccu

SEQ ID NO: 643179 - RNA, 22 nt, Human
caauugcuuucuuaccaagaga

SEQ ID NO: 643180 - RNA, 22 nt, Human
ugccucagucagcuucccuggg

SEQ ID NO: 643181 - RNA, 22 nt, Human
uuuucucaagauccaaugcacu

SEQ ID NO: 643182 - RNA, 22 nt, Human
ucaacccuuccuccauauuucc

SEQ ID NO: 643183 - RNA, 22 nt, Human
ucagccagggcagagcagguga

SEQ ID NO: 643184 - RNA, 22 nt, Human
ggcaggcagaggcugagacagg

SEQ ID NO: 643185 - RNA, 22 nt, Human
uuggcugaagguuaagugcugg

SEQ ID NO: 643186 - RNA, 22 nt, Human
auaugcuggaguacaggaaaua

SEQ ID NO: 643187 - RNA, 22 nt, Human
gccugagagaacugaccaagag

SEQ ID NO: 643188 - RNA, 22 nt, Human
caucucauccugcccuaaaaca

SEQ ID NO: 643189 - RNA, 22 nt, Human
gcaaggcucccgcagcccaggg

SEQ ID NO: 643190 - RNA, 22 nt, Human
uuuagauaaugcucaagcaauu

SEQ ID NO: 643191 - RNA, 22 nt, Human
caggugaagaggauaaaaaguu

SEQ ID NO: 643192 - RNA, 19 nt, Human
ggccaccucucuucccagg

SEQ ID NO: 643193 - RNA, 22 nt, Human
agcugcucuuugaaggacacuu

SEQ ID NO: 643194 - RNA, 22 nt, Human
uuggggcucugaaaaagaugua

SEQ ID NO: 643195 - RNA, 22 nt, Human
ccagggcugccuggccgugugu

SEQ ID NO: 643196 - RNA, 21 nt, Human
ccagcuccaggaccuuggauc

SEQ ID NO: 643197 - RNA, 18 nt, Human
uugagaaauaagcacuaa

SEQ ID NO: 643198 - RNA, 22 nt, Human
gugaagaccagggaacgcuggc

SEQ ID NO: 643199 - RNA, 22 nt, Human
ugggcucugcugcguaccaguu

SEQ ID NO: 643200 - RNA, 21 nt, Human
ugaucacaugaaaaccaugca

SEQ ID NO: 643201 - RNA, 22 nt, Human
cccacugcugcucuccauggca

SEQ ID NO: 643202 - RNA, 22 nt, Human
gcccaagguauaucagagacag

SEQ ID NO: 643203 - RNA, 22 nt, Human
uagugauuuagaauucaaaugu

SEQ ID NO: 643204 - RNA, 22 nt, Human
uguacacaaccuacagucugcu

SEQ ID NO: 643205 - RNA, 22 nt, Human
ugccauauugaugugcuguacc

SEQ ID NO: 643206 - RNA, 22 nt, Human
cagguaagagacggauuggccc

SEQ ID NO: 643207 - RNA, 22 nt, Human
gggagagagaaaacguggcgca

SEQ ID NO: 643208 - RNA, 22 nt, Human
auguucuuggauguuguguaua

SEQ ID NO: 643209 - RNA, 22 nt, Human
acaugccagcccauuuaaaugg

SEQ ID NO: 643210 - RNA, 22 nt, Human
gggcacuguacacugugcaugg

SEQ ID NO: 643211 - RNA, 22 nt, Human
gacagugagagucuacacccuc

SEQ ID NO: 643212 - RNA, 22 nt, Human
ggcugugggaugcauaggagcu

SEQ ID NO: 643213 - RNA, 22 nt, Human
ucaggcagcauuaaacuucagc

SEQ ID NO: 643214 - RNA, 22 nt, Human
gagcagcuaaaauucucaugca

SEQ ID NO: 643215 - RNA, 22 nt, Human
gccagguggcugagcagcugca

SEQ ID NO: 643216 - RNA, 22 nt, Human
uggcagggccuaccccaauauc

SEQ ID NO: 643217 - RNA, 22 nt, Human
gccagcucucauuguauaggcu

SEQ ID NO: 643218 - RNA, 22 nt, Human
caguuuuagcuagagcaaacca

SEQ ID NO: 643219 - RNA, 17 nt, Human
aacaguaagcccuguuu

SEQ ID NO: 643220 - RNA, 22 nt, Human
auacaaguuaaugagaaugaca

SEQ ID NO: 643221 - RNA, 22 nt, Human
uugagcaaagcagccauucauu

SEQ ID NO: 643222 - RNA, 22 nt, Human
cuuugugauaguguuaagacca

SEQ ID NO: 643223 - RNA, 22 nt, Human
uaauuccuagaaauuauucuca

SEQ ID NO: 643224 - RNA, 22 nt, Human
gaggcugacggcaccaucuucu

SEQ ID NO: 643225 - RNA, 18 nt, Human
cugcuugggagacgucag

SEQ ID NO: 643226 - RNA, 22 nt, Human
ugcuauaagcuccacgcuguag

SEQ ID NO: 643227 - RNA, 22 nt, Human
aguuucuucauccaaaaaaugg

SEQ ID NO: 643228 - RNA, 22 nt, Human
cugugaauguuauaucucaaug

SEQ ID NO: 643229 - RNA, 22 nt, Human
ccauccagaaacuuccaucccc

SEQ ID NO: 643230 - RNA, 22 nt, Human
agcugcaguaaagcucuccagg

SEQ ID NO: 643231 - RNA, 22 nt, Human
cucaggcugugaugugauggca

SEQ ID NO: 643232 - RNA, 23 nt, Human
ccacugaagaauccagggaguuu

SEQ ID NO: 643233 - RNA, 22 nt, Human
cccagggagguagcaggagaaa

SEQ ID NO: 643234 - RNA, 22 nt, Human
cucugagaauaugagcucuuug

SEQ ID NO: 643235 - RNA, 22 nt, Human
uuauuuauguuaacagucgaga

SEQ ID NO: 643236 - RNA, 22 nt, Human
uugggccaaggcagaucuccaa

SEQ ID NO: 643237 - RNA, 22 nt, Human
ugcaggaauuuuuugcagaaag

SEQ ID NO: 643238 - RNA, 22 nt, Human
uccugccuguuuaccuguacuu

SEQ ID NO: 643239 - RNA, 22 nt, Human
agucagagagcucucagcauag

SEQ ID NO: 643240 - RNA, 22 nt, Human
aacaggcucuucauuuccagag

SEQ ID NO: 643241 - RNA, 22 nt, Human
augguccuuauggccgugauau

SEQ ID NO: 643242 - RNA, 22 nt, Human
ggaagggccucgggcgugggac

SEQ ID NO: 643243 - RNA, 22 nt, Human
caggucagaggcgcagccccca

SEQ ID NO: 643244 - RNA, 22 nt, Human
augcauguauucaugugugaca

SEQ ID NO: 643245 - RNA, 22 nt, Human
uggccugcuuucauuugaugcu

SEQ ID NO: 643246 - RNA, 22 nt, Human
uccagcccucuggcccgcggug

SEQ ID NO: 643247 - RNA, 22 nt, Human
uggcccaggcgaggugggcaga

SEQ ID NO: 643248 - RNA, 22 nt, Human
ccugauucaguggugcccagag

SEQ ID NO: 643249 - RNA, 22 nt, Human
cacacugauaggcuugacaggc

SEQ ID NO: 643250 - RNA, 22 nt, Human
ugaggcaguauuuuagugacuu

SEQ ID NO: 643251 - RNA, 22 nt, Human
auaguugagaucagauucaacu

SEQ ID NO: 643252 - RNA, 22 nt, Human
gaccaggcuguuccagucuaac

SEQ ID NO: 643253 - RNA, 22 nt, Human
cuuaaagaaauugaggagagga

SEQ ID NO: 643254 - RNA, 21 nt, Human
ggagucagggucuggcugggg

SEQ ID NO: 643255 - RNA, 22 nt, Human
aauuuuauuaacuggauguagc

SEQ ID NO: 643256 - RNA, 22 nt, Human
cagcaucuaaucuucaugccgg

SEQ ID NO: 643257 - RNA, 22 nt, Human
gcaggaguaucuauacauuaaa

SEQ ID NO: 643258 - RNA, 22 nt, Human
gaagagguagcauuggcaggug

SEQ ID NO: 643259 - RNA, 22 nt, Human
ugcucagggacaauggagaggg

SEQ ID NO: 643260 - RNA, 22 nt, Human
aggagccuccuucucaugugca

SEQ ID NO: 643261 - RNA, 22 nt, Human
ucagaggguggcugggagcauc

SEQ ID NO: 643262 - RNA, 22 nt, Human
aacaaugaccacacaauguacu

SEQ ID NO: 643263 - RNA, 22 nt, Human
gugcuuuaaaccacugugcugu

SEQ ID NO: 643264 - RNA, 22 nt, Human
ccacuguuuccuuucugcuggc

SEQ ID NO: 643265 - RNA, 23 nt, Human
uaggccagggugaccuggggaga

SEQ ID NO: 643266 - RNA, 22 nt, Human
caacuuuugacacgugugcuaa

SEQ ID NO: 643267 - RNA, 22 nt, Human
aucacauggaaugauuuuagac

SEQ ID NO: 643268 - RNA, 22 nt, Human
uaccugcaaaguuccuuuugcc

SEQ ID NO: 643269 - RNA, 22 nt, Human
aggcauccucucugccuugagg

SEQ ID NO: 643270 - RNA, 22 nt, Human
ugccuugcuucaaucaaaccgu

SEQ ID NO: 643271 - RNA, 22 nt, Human
auuuacagaagcauguaauagc

SEQ ID NO: 643272 - RNA, 22 nt, Human
gacuguggucuguucuccaggu

SEQ ID NO: 643273 - RNA, 22 nt, Human
agcuggugcugaagcucuugag

SEQ ID NO: 643274 - RNA, 22 nt, Human
caaggaaacaugaaaugcauug

SEQ ID NO: 643275 - RNA, 22 nt, Human
cagggaggaugggcuguuuugc

SEQ ID NO: 643276 - RNA, 22 nt, Human
uccuuacaugcuuccuuauaca

SEQ ID NO: 643277 - RNA, 19 nt, Human
acuucugaggaacugcaca

SEQ ID NO: 643278 - RNA, 22 nt, Human
uccagccccggcuuccuuacag

SEQ ID NO: 643279 - RNA, 22 nt, Human
gccaaaguaccuagcccucugc

SEQ ID NO: 643280 - RNA, 22 nt, Human
ugugaggcuggcaggggccagg

SEQ ID NO: 643281 - RNA, 22 nt, Human
auggaaguuggaaccauucaua

SEQ ID NO: 643282 - RNA, 22 nt, Human
gcaggucuggcauagagccugc

SEQ ID NO: 643283 - RNA, 22 nt, Human
uuagauguggacuuauguuauu

SEQ ID NO: 643284 - RNA, 22 nt, Human
uccucuucuguggauucccuga

SEQ ID NO: 643285 - RNA, 22 nt, Human
uuacaugaugauuucauaaaca

SEQ ID NO: 643286 - RNA, 22 nt, Human
ccugagaauaauucuccauagc

SEQ ID NO: 643287 - RNA, 22 nt, Human
ucuggcaucacucgcaagagca

SEQ ID NO: 643288 - RNA, 22 nt, Human
caagaugggcaccccagcaccu

SEQ ID NO: 643289 - RNA, 22 nt, Human
ucagcacaggucuugcaaaaca

SEQ ID NO: 643290 - RNA, 22 nt, Human
aggcagccaucugcaggaagga

SEQ ID NO: 643291 - RNA, 22 nt, Human
ucuggcucaucucuccagguaa

SEQ ID NO: 643292 - RNA, 22 nt, Human
ucucucagggggaaggcugaag

SEQ ID NO: 643293 - RNA, 22 nt, Human
aagcuauauuauauuuguguuu

SEQ ID NO: 643294 - RNA, 22 nt, Human
aaaugcucucuaauguaauaca

SEQ ID NO: 643295 - RNA, 22 nt, Human
ugcacagcgggugucugucagg

SEQ ID NO: 643296 - RNA, 22 nt, Human
accaaaugcuuggcugcuguga

SEQ ID NO: 643297 - RNA, 22 nt, Human
gcucauucagccagggcccggu

SEQ ID NO: 643298 - RNA, 22 nt, Human
uaguauaugucuaugguuguag

SEQ ID NO: 643299 - RNA, 22 nt, Human
gaacagagaagcuuuacuaaag

SEQ ID NO: 643300 - RNA, 22 nt, Human
acucagaaugucacugagggac

SEQ ID NO: 643301 - RNA, 23 nt, Human
uucaaaacuggaaaaucagaugc

SEQ ID NO: 643302 - RNA, 22 nt, Human
gucagugcuugaagggcagaga

SEQ ID NO: 643303 - RNA, 22 nt, Human
gcagcaggugugcuuuuaauga

SEQ ID NO: 643304 - RNA, 22 nt, Human
uuggcuucuugugaaaucugag

SEQ ID NO: 643305 - RNA, 22 nt, Human
ggcugaaggaugaaagcugcag

SEQ ID NO: 643306 - RNA, 22 nt, Human
cugaggagggaaguccccaaag

SEQ ID NO: 643307 - RNA, 22 nt, Human
gcuguggaaaugccuaacauga

SEQ ID NO: 643308 - RNA, 22 nt, Human
ucaggcagaauuaucaaaagau

SEQ ID NO: 643309 - RNA, 22 nt, Human
ucaggaaauggaauucuugugu

SEQ ID NO: 643310 - RNA, 22 nt, Human
ugcuggaguggcacuguguggc

SEQ ID NO: 643311 - RNA, 22 nt, Human
cucucugaggcaggccuguggg

SEQ ID NO: 643312 - RNA, 22 nt, Human
gcacugaaugccaaaguguagg

SEQ ID NO: 643313 - RNA, 22 nt, Human
agcccugcgugccaggggacug

SEQ ID NO: 643314 - RNA, 22 nt, Human
ucaaaucucauugccuaaaacu

SEQ ID NO: 643315 - RNA, 22 nt, Human
cgccccagaugcaagacaaaga

SEQ ID NO: 643316 - RNA, 22 nt, Human
uccugggcuguggccccgggca

SEQ ID NO: 643317 - RNA, 22 nt, Human
ugccaggccacguagcuucaag

SEQ ID NO: 643318 - RNA, 22 nt, Human
aucaugacagagucugccaucc

SEQ ID NO: 643319 - RNA, 22 nt, Human
ugucccagacacaguaugcgcu

SEQ ID NO: 643320 - RNA, 21 nt, Human
acuuaaauuccuugauauuua

SEQ ID NO: 643321 - RNA, 22 nt, Human
agcugaacgugcuucugcagca

SEQ ID NO: 643322 - RNA, 22 nt, Human
uuccuucuagagcuuguuuagg

SEQ ID NO: 643323 - RNA, 22 nt, Human
cucacuggcaagacuacaggug

SEQ ID NO: 643324 - RNA, 22 nt, Human
gcagcugcagguggucccaugc

SEQ ID NO: 643325 - RNA, 22 nt, Human
aaggaguggggcauaucacaga

SEQ ID NO: 643326 - RNA, 22 nt, Human
caaaggcugccacuguggcugu

SEQ ID NO: 643327 - RNA, 22 nt, Human
aaucagacuauuaaagucucuu

SEQ ID NO: 643328 - RNA, 22 nt, Human
uacuggagauggaaugcuuuug

SEQ ID NO: 643329 - RNA, 22 nt, Human
aaguuugguccuucuaagaaga

SEQ ID NO: 643330 - RNA, 22 nt, Human
ucuucaugauacccuaagccac

SEQ ID NO: 643331 - RNA, 22 nt, Human
gccagcuguaagcagugauucu

SEQ ID NO: 643332 - RNA, 22 nt, Human
uuucuaucuaggguuagaguga

SEQ ID NO: 643333 - RNA, 22 nt, Human
uuuauauugggagucguuuuga

SEQ ID NO: 643334 - RNA, 22 nt, Human
uauauaacuacuauuuugcuca

SEQ ID NO: 643335 - RNA, 22 nt, Human
acuguggaugccaaaggggagg

SEQ ID NO: 643336 - RNA, 22 nt, Human
gagaggccugagaggcugcgga

SEQ ID NO: 643337 - RNA, 22 nt, Human
ggggaggcugaugugggcaaag

SEQ ID NO: 643338 - RNA, 22 nt, Human
aggcuuuggggcauucuguguu

SEQ ID NO: 643339 - RNA, 22 nt, Human
aguggcuggucuaaggucacag

SEQ ID NO: 643340 - RNA, 22 nt, Human
cuuguauuccccuaucucuaaa

SEQ ID NO: 643341 - RNA, 22 nt, Human
uucugugcucaaaacuuuccaa

SEQ ID NO: 643342 - RNA, 22 nt, Human
aaauguccuuagagaaaaguca

SEQ ID NO: 643343 - RNA, 21 nt, Human
acagcagcaaucugucuuucc

SEQ ID NO: 643344 - RNA, 22 nt, Human
gcccuggagggccagcgacugg

SEQ ID NO: 643345 - RNA, 22 nt, Human
augcauuggauaagaaccccau

SEQ ID NO: 643346 - RNA, 23 nt, Human
uguacaaguacgaccucucccuc

SEQ ID NO: 643347 - RNA, 22 nt, Human
cuugcuuguuuaguucacagau

SEQ ID NO: 643348 - RNA, 22 nt, Human
uagcaaagaccaaagcuaguug

SEQ ID NO: 643349 - RNA, 22 nt, Human
uaaaugugcacagguuagaagg

SEQ ID NO: 643350 - RNA, 22 nt, Human
accaaggaguuugguauuuuag

SEQ ID NO: 643351 - RNA, 22 nt, Human
auacaaguugugauaauguaaa

SEQ ID NO: 643352 - RNA, 22 nt, Human
aaccagcuccucaccccauugu

SEQ ID NO: 643353 - RNA, 22 nt, Human
uccugggguguguuuugcugcu

SEQ ID NO: 643354 - RNA, 19 nt, Human
acaggggccuuuccagggu

SEQ ID NO: 643355 - RNA, 22 nt, Human
agccaacaacucugagcccagu

SEQ ID NO: 643356 - RNA, 22 nt, Human
gaggagcaagaaauagugccca

SEQ ID NO: 643357 - RNA, 22 nt, Human
gagcugaaucagagauauuauu

SEQ ID NO: 643358 - RNA, 19 nt, Human
cacaguccuauguuuauca

SEQ ID NO: 643359 - RNA, 22 nt, Human
uccugaaauuuguuuuaauucu

SEQ ID NO: 643360 - RNA, 22 nt, Human
cagcagccacuagagggcucac

SEQ ID NO: 643361 - RNA, 22 nt, Human
ucagcaggcaggaggcaugcca

SEQ ID NO: 643362 - RNA, 22 nt, Human
auuguuaacuauagcaucuggu

SEQ ID NO: 643363 - RNA, 22 nt, Human
cauucauucuguaaguaacuau

SEQ ID NO: 643364 - RNA, 22 nt, Human
uccaggaggacugagggggcug

SEQ ID NO: 643365 - RNA, 22 nt, Human
gggcagugggaccaggcaccag

SEQ ID NO: 643366 - RNA, 22 nt, Human
agguuaggaagauacagaaugu

SEQ ID NO: 643367 - RNA, 22 nt, Human
gugggcagaacauuuguaggcu

SEQ ID NO: 643368 - RNA, 22 nt, Human
agagcagguggcaacucuggga

SEQ ID NO: 643369 - RNA, 22 nt, Human
gcuggcagguaaagccccgggg

SEQ ID NO: 643370 - RNA, 22 nt, Human
ucacaggacagccuuccacccg

SEQ ID NO: 643371 - RNA, 22 nt, Human
ggagagagaccuccaugcccag

SEQ ID NO: 643372 - RNA, 22 nt, Human
aauucagugguuucugcaacaa

SEQ ID NO: 643373 - RNA, 22 nt, Human
ugguaaggauuguagaaacgaa

SEQ ID NO: 643374 - RNA, 22 nt, Human
gugcagacuuacagauuauccc

SEQ ID NO: 643375 - RNA, 22 nt, Human
cucccgugauccuggaggagag

SEQ ID NO: 643376 - RNA, 22 nt, Human
uuggcaccucccuaggaagaag

SEQ ID NO: 643377 - RNA, 20 nt, Human
gagcaucugucugcugugca

SEQ ID NO: 643378 - RNA, 22 nt, Human
aggggcuuauguuucuccaggc

SEQ ID NO: 643379 - RNA, 22 nt, Human
aacugcaguuaccuuugcacca

SEQ ID NO: 643380 - RNA, 22 nt, Human
gagcucagaggauucuggggag

SEQ ID NO: 643381 - RNA, 22 nt, Human
uuucaaguuaaauggggucuuu

SEQ ID NO: 643382 - RNA, 22 nt, Human
ccaagaggcagaaugcagagaa

SEQ ID NO: 643383 - RNA, 22 nt, Human
cacuggaccaaggaaacucuuc

SEQ ID NO: 643384 - RNA, 22 nt, Human
uaagaacagugacagccaacau

SEQ ID NO: 643385 - RNA, 22 nt, Human
gccaagcuuauaugaugcuuga

SEQ ID NO: 643386 - RNA, 22 nt, Human
ccaugcauauaauagugccugg

SEQ ID NO: 643387 - RNA, 22 nt, Human
cccaggcuggagugcaauggug

SEQ ID NO: 643388 - RNA, 22 nt, Human
gaaaccagauaagggaggcuga

SEQ ID NO: 643389 - RNA, 18 nt, Human
ccuacaucauugugagag

SEQ ID NO: 643390 - RNA, 22 nt, Human
uuacacaaaaauaagauauggc

SEQ ID NO: 643391 - RNA, 22 nt, Human
uauuuugcaaaccugaguuuga

SEQ ID NO: 643392 - RNA, 22 nt, Human
uccagcugugcuccaggaggug

SEQ ID NO: 643393 - RNA, 22 nt, Human
augcuuguacuaaaaaaauauu

SEQ ID NO: 643394 - RNA, 22 nt, Human
aaguggcuuugagcuucugcca

SEQ ID NO: 643395 - RNA, 22 nt, Human
gggacaggcugagacuugagcu

SEQ ID NO: 643396 - RNA, 22 nt, Human
cugcuuuaucugagacaaguca

SEQ ID NO: 643397 - RNA, 22 nt, Human
ugcuggagacucacucaggugc

SEQ ID NO: 643398 - RNA, 22 nt, Human
ucugcauugucccagaagugac

SEQ ID NO: 643399 - RNA, 22 nt, Human
cuguacauauacauuuuuuucc

SEQ ID NO: 643400 - RNA, 23 nt, Human
cccuggagcuagucugagcagag

SEQ ID NO: 643401 - RNA, 21 nt, Human
ucaggaggcucagacuccugc

SEQ ID NO: 643402 - RNA, 22 nt, Human
gacacaggaaucaccuuggaug

SEQ ID NO: 643403 - RNA, 22 nt, Human
cuuagcuuuguccuaggucucu

SEQ ID NO: 643404 - RNA, 22 nt, Human
uucugugugucucagcaagcug

SEQ ID NO: 643405 - RNA, 22 nt, Human
uagacacuagggauuuaguacu

SEQ ID NO: 643406 - RNA, 22 nt, Human
cgugugcgugcauaugcacaag

SEQ ID NO: 643407 - RNA, 18 nt, Human
guguuacaggagugcagc

SEQ ID NO: 643408 - RNA, 22 nt, Human
uccacagcuuuuaaaugucuag

SEQ ID NO: 643409 - RNA, 22 nt, Human
gauacauugaggguggaggacc

SEQ ID NO: 643410 - RNA, 22 nt, Human
ucaccgccuugcccggccgggc

SEQ ID NO: 643411 - RNA, 22 nt, Human
ccaggcuggaaucaauauucug

SEQ ID NO: 643412 - RNA, 20 nt, Human
uccagcccagcagccugaca

SEQ ID NO: 643413 - RNA, 21 nt, Human
gcuugccuuccuaucuuuggc

SEQ ID NO: 643414 - RNA, 22 nt, Human
uaaaguuauaaauuaccuguca

SEQ ID NO: 643415 - RNA, 22 nt, Human
ugauuacacagcaguaauuuca

SEQ ID NO: 643416 - RNA, 22 nt, Human
uggcagcagcuaacuuaggcag

SEQ ID NO: 643417 - RNA, 20 nt, Human
acagugcauggggggacagc

SEQ ID NO: 643418 - RNA, 22 nt, Human
ucccugccugacagcacccacc

SEQ ID NO: 643419 - RNA, 22 nt, Human
uuuugugagcugagaaauguau

SEQ ID NO: 643420 - RNA, 22 nt, Human
uaacuucuuugguuuaaagaga

SEQ ID NO: 643421 - RNA, 22 nt, Human
gcucccagcuggagccucaaca

SEQ ID NO: 643422 - RNA, 22 nt, Human
gagggaugugccugaaggcagg

SEQ ID NO: 643423 - RNA, 22 nt, Human
cucagccccaauuugcccucuu

SEQ ID NO: 643424 - RNA, 22 nt, Human
cacugcuuauaaauucuaggca

SEQ ID NO: 643425 - RNA, 22 nt, Human
uguggccuuauuuguauggggg

SEQ ID NO: 643426 - RNA, 22 nt, Human
cuagggaccucagcuccuggag

SEQ ID NO: 643427 - RNA, 22 nt, Human
ggugccuuccugccagccgcaa

SEQ ID NO: 643428 - RNA, 22 nt, Human
uaaccuggaugugccaacguga

SEQ ID NO: 643429 - RNA, 22 nt, Human
ugagaagcugcugacuuagccu

SEQ ID NO: 643430 - RNA, 22 nt, Human
aaaggucuuuuuucuaacacca

SEQ ID NO: 643431 - RNA, 22 nt, Human
gggcuucuauucaagucuguuu

SEQ ID NO: 643432 - RNA, 22 nt, Human
gcccauggcagaacugugagca

SEQ ID NO: 643433 - RNA, 22 nt, Human
ggcuucagugacuggugcccuc

SEQ ID NO: 643434 - RNA, 22 nt, Human
uauguacuaacuuucauucuag

SEQ ID NO: 643435 - RNA, 22 nt, Human
ccaggacugcagggggcgagga

SEQ ID NO: 643436 - RNA, 22 nt, Human
augaggcuaugaauggggagau

SEQ ID NO: 643437 - RNA, 22 nt, Human
ggguuagguucuagaggcacaa

SEQ ID NO: 643438 - RNA, 22 nt, Human
ccugccucccagagguccucua

SEQ ID NO: 643439 - RNA, 22 nt, Human
ucaaaauuucagcacuagcccu

SEQ ID NO: 643440 - RNA, 22 nt, Human
augaaggacaacaggggagcag

SEQ ID NO: 643441 - RNA, 22 nt, Human
gcugugcugauucauucccugc

SEQ ID NO: 643442 - RNA, 22 nt, Human
ggcucuguaaagugacaccugc

SEQ ID NO: 643443 - RNA, 22 nt, Human
uagaaguggcaacacucagaaa

SEQ ID NO: 643444 - RNA, 22 nt, Human
ugcagacaagucgugggaucuu

SEQ ID NO: 643445 - RNA, 20 nt, Human
ucauuccaaauaguucagca

SEQ ID NO: 643446 - RNA, 22 nt, Human
ugggagcucacaggccuggcuc

SEQ ID NO: 643447 - RNA, 23 nt, Human
cagaagcaccuguugacugcugc

SEQ ID NO: 643448 - RNA, 22 nt, Human
cuagggaacaagaugcccaggg

SEQ ID NO: 643449 - RNA, 22 nt, Human
ucacaaagugaagugugucaug

SEQ ID NO: 643450 - RNA, 22 nt, Human
caggaaaucacucugauuuugg

SEQ ID NO: 643451 - RNA, 22 nt, Human
gaguccuggagaaacgcaggug

SEQ ID NO: 643452 - RNA, 22 nt, Human
cauaguuauaaggcaacacugu

SEQ ID NO: 643453 - RNA, 22 nt, Human
caaaguccuagaacagugcuug

SEQ ID NO: 643454 - RNA, 22 nt, Human
acagagcaacuuuauuucaugg

SEQ ID NO: 643455 - RNA, 22 nt, Human
auaaaguggagguaguauucau

SEQ ID NO: 643456 - RNA, 22 nt, Human
gaggcgagaagcuggagauggu

SEQ ID NO: 643457 - RNA, 22 nt, Human
caguggguaggaaaggcucuuc

SEQ ID NO: 643458 - RNA, 22 nt, Human
auguaugcauguauguaucgcu

SEQ ID NO: 643459 - RNA, 22 nt, Human
aguggggacuuaugccagcauu

SEQ ID NO: 643460 - RNA, 22 nt, Human
uggaaaacaaagcucucauuau

SEQ ID NO: 643461 - RNA, 22 nt, Human
auacacuggacaucauugcauu

SEQ ID NO: 643462 - RNA, 22 nt, Human
ggucccugcccaaagcccuugg

SEQ ID NO: 643463 - RNA, 22 nt, Human
cuggcagggcucuuugggugcu

SEQ ID NO: 643464 - RNA, 22 nt, Human
cugucuuuuuagagaguaggau

SEQ ID NO: 643465 - RNA, 21 nt, Human
ccagagguucugggccucccu

SEQ ID NO: 643466 - RNA, 22 nt, Human
aagacauuacuggaaucugacu

SEQ ID NO: 643467 - RNA, 22 nt, Human
agcagagugugaaggcagggcu

SEQ ID NO: 643468 - RNA, 22 nt, Human
uaugcauagguaucuauacuca

SEQ ID NO: 643469 - RNA, 22 nt, Human
gagugucugugacagcucauga

SEQ ID NO: 643470 - RNA, 22 nt, Human
auuuggaaacaauuauauucuu

SEQ ID NO: 643471 - RNA, 18 nt, Human
agagaaagaccaaagcau

SEQ ID NO: 643472 - RNA, 20 nt, Human
auuccucagccccagccuca

SEQ ID NO: 643473 - RNA, 17 nt, Human
gcugagaaggggaagag

SEQ ID NO: 643474 - RNA, 22 nt, Human
gagcccagcucuaccucagacu

SEQ ID NO: 643475 - RNA, 22 nt, Human
aaauacauacacuguacguggc

SEQ ID NO: 643476 - RNA, 22 nt, Human
acuuucuauucccacagagaua

SEQ ID NO: 643477 - RNA, 21 nt, Human
gcucccugcucagcuccuggg

SEQ ID NO: 643478 - RNA, 22 nt, Human
aagcagagccugagacagggau

SEQ ID NO: 643479 - RNA, 22 nt, Human
augccuccucaaaucugccaca

SEQ ID NO: 643480 - RNA, 22 nt, Human
ugggacaguuguccuccacucu

SEQ ID NO: 643481 - RNA, 22 nt, Human
acuguucuccuuuggcuauauc

SEQ ID NO: 643482 - RNA, 22 nt, Human
ugauuguuuccuauguacaccu

SEQ ID NO: 643483 - RNA, 22 nt, Human
uaagagaugguuaucaaaagca

SEQ ID NO: 643484 - RNA, 22 nt, Human
gaccagagaaaggcacuggaag

SEQ ID NO: 643485 - RNA, 22 nt, Human
aaugcuuccuccucaccucagg

SEQ ID NO: 643486 - RNA, 22 nt, Human
uaguucaggaagagaaacaaca

SEQ ID NO: 643487 - RNA, 22 nt, Human
uaugugaagagauuaaaaaaua

SEQ ID NO: 643488 - RNA, 22 nt, Human
gagucagaagaaacuauuuaca

SEQ ID NO: 643489 - RNA, 22 nt, Human
ggggcggggcucugagaagcau

SEQ ID NO: 643490 - RNA, 22 nt, Human
ucuuggaauaccccgaagguca

SEQ ID NO: 643491 - RNA, 22 nt, Human
gaggguggaagagcugcugaga

SEQ ID NO: 643492 - RNA, 22 nt, Human
uuugacaugugcuuauaacuuu

SEQ ID NO: 643493 - RNA, 22 nt, Human
uggucagcuucagaguguucca

SEQ ID NO: 643494 - RNA, 23 nt, Human
aguuuguaaagaaauauuugcac

SEQ ID NO: 643495 - RNA, 22 nt, Human
gacuguggcuaaugguguuagg

SEQ ID NO: 643496 - RNA, 22 nt, Human
gaggccagcgcgcagcacuuuu

SEQ ID NO: 643497 - RNA, 22 nt, Human
gagaaguuucugguuugcauag

SEQ ID NO: 643498 - RNA, 22 nt, Human
uugucugagaaagugaguugcu

SEQ ID NO: 643499 - RNA, 20 nt, Human
cugcaaaaugacauuaggaa

SEQ ID NO: 643500 - RNA, 22 nt, Human
ugcauugcauuugucaugaaga

SEQ ID NO: 643501 - RNA, 22 nt, Human
ucccagggccgcaaacgaguuu

SEQ ID NO: 643502 - RNA, 22 nt, Human
cagcuguuacucugaguaaaug

SEQ ID NO: 643503 - RNA, 19 nt, Human
ggcagagcuccugcuuucu

SEQ ID NO: 643504 - RNA, 22 nt, Human
caggagguacauagauucagau

SEQ ID NO: 643505 - RNA, 22 nt, Human
uuagaaaauuugcuucuuugga

SEQ ID NO: 643506 - RNA, 22 nt, Human
cagacacagcaauucuguguug

SEQ ID NO: 643507 - RNA, 21 nt, Human
cucuugugucagagccagagg

SEQ ID NO: 643508 - RNA, 22 nt, Human
aguucacagaauggccagaacu

SEQ ID NO: 643509 - RNA, 22 nt, Human
acagcagacacaggcacgcugu

SEQ ID NO: 643510 - RNA, 22 nt, Human
cugagcacugggcacauagcug

SEQ ID NO: 643511 - RNA, 22 nt, Human
caucauugaacacuucuuccug

SEQ ID NO: 643512 - RNA, 22 nt, Human
uucauuccugagcccauauuua

SEQ ID NO: 643513 - RNA, 22 nt, Human
gcucacagucugcugagugcag

SEQ ID NO: 643514 - RNA, 22 nt, Human
uuuagugccugggccaguucca

SEQ ID NO: 643515 - RNA, 22 nt, Human
uccagcucugcugugcgccggu

SEQ ID NO: 643516 - RNA, 22 nt, Human
ucccccucauuaccucauucaa

SEQ ID NO: 643517 - RNA, 22 nt, Human
accaaauaggcuuccuggguug

SEQ ID NO: 643518 - RNA, 23 nt, Human
cccagguguggaggcgguggcag

SEQ ID NO: 643519 - RNA, 22 nt, Human
ugaaguuucuugaaucuuggag

SEQ ID NO: 643520 - RNA, 22 nt, Human
cccaggaccgcgcggcugagcg

SEQ ID NO: 643521 - RNA, 23 nt, Human
cagguggcuccacgagggguggg

SEQ ID NO: 643522 - RNA, 22 nt, Human
aaauuauaggugccaccuugga

SEQ ID NO: 643523 - RNA, 22 nt, Human
aauuggcaagcaaguuauccag

SEQ ID NO: 643524 - RNA, 22 nt, Human
guccagagaagggaggggacuc

SEQ ID NO: 643525 - RNA, 22 nt, Human
agauacauggaacgucaaaccu

SEQ ID NO: 643526 - RNA, 22 nt, Human
aacacauagacguuugauauca

SEQ ID NO: 643527 - RNA, 22 nt, Human
uacaauagggagguuuagggga

SEQ ID NO: 643528 - RNA, 22 nt, Human
ugucugggauguaauuccugcc

SEQ ID NO: 643529 - RNA, 22 nt, Human
auucaguuagccacagcuauuc

SEQ ID NO: 643530 - RNA, 22 nt, Human
uuugaaaaaggccuuugguaug

SEQ ID NO: 643531 - RNA, 22 nt, Human
ucuccaggagaaauaugaagga

SEQ ID NO: 643532 - RNA, 20 nt, Human
cugaagaguggccugaucug

SEQ ID NO: 643533 - RNA, 22 nt, Human
gaaaucugcccagugcacuggu

SEQ ID NO: 643534 - RNA, 22 nt, Human
gaggaaggucccaucagaauuu

SEQ ID NO: 643535 - RNA, 22 nt, Human
cugggguggagauuggcaaucu

SEQ ID NO: 643536 - RNA, 22 nt, Human
aguuuacaacaguagcuaugga

SEQ ID NO: 643537 - RNA, 21 nt, Human
ccaggggcaaauugucguuuc

SEQ ID NO: 643538 - RNA, 22 nt, Human
cugggugacagagugagauggu

SEQ ID NO: 643539 - RNA, 22 nt, Human
cuggacagcccucacugugugc

SEQ ID NO: 643540 - RNA, 20 nt, Human
ugacucugcaaccgucucuc

SEQ ID NO: 643541 - RNA, 17 nt, Human
ucagggaaugagguugu

SEQ ID NO: 643542 - RNA, 22 nt, Human
cugcaucugcauaaucaacuuc

SEQ ID NO: 643543 - RNA, 22 nt, Human
ccugggugaaauaguccucaag

SEQ ID NO: 643544 - RNA, 22 nt, Human
uuguguauuuccugaagguaag

SEQ ID NO: 643545 - RNA, 22 nt, Human
uuggagguuucccaacuguggg

SEQ ID NO: 643546 - RNA, 22 nt, Human
caggcagccuucucgucucaca

SEQ ID NO: 643547 - RNA, 22 nt, Human
cuagccaugggcauuaaaggua

SEQ ID NO: 643548 - RNA, 22 nt, Human
ggcauuaacucuguuucaauuu

SEQ ID NO: 643549 - RNA, 22 nt, Human
gccacaggcuccagcaucagua

SEQ ID NO: 643550 - RNA, 22 nt, Human
uuuugugagcccauaaaugcca

SEQ ID NO: 643551 - RNA, 22 nt, Human
uuccacagguuucagacuguuc

SEQ ID NO: 643552 - RNA, 22 nt, Human
agcauuuagucuuuauugcagc

SEQ ID NO: 643553 - RNA, 22 nt, Human
ggagugcuuugaagccuucauu

SEQ ID NO: 643554 - RNA, 22 nt, Human
ccaggagcagggcuggcugcac

SEQ ID NO: 643555 - RNA, 22 nt, Human
ucucugugagauuuguauuaag

SEQ ID NO: 643556 - RNA, 22 nt, Human
gaggaaaauauucagggagguu

SEQ ID NO: 643557 - RNA, 22 nt, Human
gcaguguuaaacaacugcugcu

SEQ ID NO: 643558 - RNA, 22 nt, Human
gcacagccggaccgaggaaaag

SEQ ID NO: 643559 - RNA, 22 nt, Human
guguccauucacugcaacacuu

SEQ ID NO: 643560 - RNA, 22 nt, Human
gauuuccuugcauauugguaau

SEQ ID NO: 643561 - RNA, 22 nt, Human
uuucuagcugacaaaaauguuu

SEQ ID NO: 643562 - RNA, 22 nt, Human
gguaacaacccuacaaauccac

SEQ ID NO: 643563 - RNA, 18 nt, Human
uggcuccugccuccugca

SEQ ID NO: 643564 - RNA, 22 nt, Human
uucuuacaucuauaaaguuggg

SEQ ID NO: 643565 - RNA, 20 nt, Human
auauaccaucccacaacagg

SEQ ID NO: 643566 - RNA, 22 nt, Human
gacagccuggcuuaaucugucu

SEQ ID NO: 643567 - RNA, 18 nt, Human
aagcugcccucaggcagg

SEQ ID NO: 643568 - RNA, 22 nt, Human
acccagagugucugucucaguc

SEQ ID NO: 643569 - RNA, 22 nt, Human
ccucacugucaucaguaguuau

SEQ ID NO: 643570 - RNA, 22 nt, Human
cagaaugcaaauuuuauaauau

SEQ ID NO: 643571 - RNA, 22 nt, Human
aacacugagaggggaguggcac

SEQ ID NO: 643572 - RNA, 22 nt, Human
aaagccagagcaagcugucaca

SEQ ID NO: 643573 - RNA, 22 nt, Human
caggggcaagaaugcugucagc

SEQ ID NO: 643574 - RNA, 22 nt, Human
aguggcaguagaugagcugguu

SEQ ID NO: 643575 - RNA, 22 nt, Human
gauuucaagcccccagagauuc

SEQ ID NO: 643576 - RNA, 22 nt, Human
uguuaggacuccccagaagcug

SEQ ID NO: 643577 - RNA, 23 nt, Human
uguagcugucugagcagacacug

SEQ ID NO: 643578 - RNA, 22 nt, Human
ccagguggaggugugagguccu

SEQ ID NO: 643579 - RNA, 22 nt, Human
aggaacugucauguauugcuca

SEQ ID NO: 643580 - RNA, 22 nt, Human
agaggccagaaggcgcaccccg

SEQ ID NO: 643581 - RNA, 21 nt, Human
gccagggaagagaguuggcug

SEQ ID NO: 643582 - RNA, 16 nt, Human
augcugcuauuagagg

SEQ ID NO: 643583 - RNA, 22 nt, Human
cacugucuauuaauauaacuua

SEQ ID NO: 643584 - RNA, 18 nt, Human
aguugcuuauucugugca

SEQ ID NO: 643585 - RNA, 22 nt, Human
cuccugggcucauaucauucag

SEQ ID NO: 643586 - RNA, 20 nt, Human
gcagggcaucuuggccccca

SEQ ID NO: 643587 - RNA, 22 nt, Human
ggacauggagcauguagagaaa

SEQ ID NO: 643588 - RNA, 22 nt, Human
acauucuuucgaugucugauuu

SEQ ID NO: 643589 - RNA, 22 nt, Human
aaaucaugaggacauuaugcca

SEQ ID NO: 643590 - RNA, 22 nt, Human
guuccaggacccuggccucuga

SEQ ID NO: 643591 - RNA, 22 nt, Human
uugugaauggugccgcaauaaa

SEQ ID NO: 643592 - RNA, 22 nt, Human
uggcucaugccuguaaucuuag

SEQ ID NO: 643593 - RNA, 22 nt, Human
caggcaaguucauuuccaggca

SEQ ID NO: 643594 - RNA, 22 nt, Human
aaagcaaugucucugccugguu

SEQ ID NO: 643595 - RNA, 22 nt, Human
ugcagcuucuuguccugugauu

SEQ ID NO: 643596 - RNA, 18 nt, Human
gagagcugcuaccuagcu

SEQ ID NO: 643597 - RNA, 22 nt, Human
ucucucauaagaugaguacuua

SEQ ID NO: 643598 - RNA, 22 nt, Human
gaagagcugcacacuggggacu

SEQ ID NO: 643599 - RNA, 22 nt, Human
uucuacacaccucugaggacau

SEQ ID NO: 643600 - RNA, 22 nt, Human
cugcuggcaagcccaguuggag

SEQ ID NO: 643601 - RNA, 22 nt, Human
acaugggaucaaugaggcaggc

SEQ ID NO: 643602 - RNA, 22 nt, Human
uuccuucuggaggcuccagggg

SEQ ID NO: 643603 - RNA, 22 nt, Human
cuuacaagaccaaagaaaggau

SEQ ID NO: 643604 - RNA, 22 nt, Human
auaaggcaagcugucaguuugu

SEQ ID NO: 643605 - RNA, 22 nt, Human
agguaguuuugacuucauggcu

SEQ ID NO: 643606 - RNA, 22 nt, Human
uuguuacaucuuauguaagugg

SEQ ID NO: 643607 - RNA, 22 nt, Human
auuuagaaccccuuccaaccug

SEQ ID NO: 643608 - RNA, 22 nt, Human
ggcaguggugggaggcucgcuc

SEQ ID NO: 643609 - RNA, 22 nt, Human
uucucaugaaacucgcuuccuc

SEQ ID NO: 643610 - RNA, 22 nt, Human
uaugugugcuuuuuccaugcau

SEQ ID NO: 643611 - RNA, 22 nt, Human
uagugucugauccguaguuaca

SEQ ID NO: 643612 - RNA, 22 nt, Human
uuggcuucauugaucucacuuu

SEQ ID NO: 643613 - RNA, 22 nt, Human
ccuccccugcucagaacucugg

SEQ ID NO: 643614 - RNA, 21 nt, Human
gcugcucgagauccagugcuu

SEQ ID NO: 643615 - RNA, 22 nt, Human
gagccaggggucagcuccgagg

SEQ ID NO: 643616 - RNA, 22 nt, Human
ugagcuaaguacucucaucaag

SEQ ID NO: 643617 - RNA, 22 nt, Human
aggcaggugcuuaugacuugcu

SEQ ID NO: 643618 - RNA, 22 nt, Human
ccugggugaaaucucuccugca

SEQ ID NO: 643619 - RNA, 22 nt, Human
aaggcacugcuuugcugcgccc

SEQ ID NO: 643620 - RNA, 22 nt, Human
ggucugaauuccagccccucug

SEQ ID NO: 643621 - RNA, 22 nt, Human
uugaauaauauguucaggagga

SEQ ID NO: 643622 - RNA, 22 nt, Human
uuuucugccugcguguuuagga

SEQ ID NO: 643623 - RNA, 22 nt, Human
agagaauuaacauuccauggcu

SEQ ID NO: 643624 - RNA, 22 nt, Human
gcuugggauaugcugauguaaa

SEQ ID NO: 643625 - RNA, 22 nt, Human
uugcauuuguggcauggguguu

SEQ ID NO: 643626 - RNA, 22 nt, Human
uugcaaaaucauuucucaggau

SEQ ID NO: 643627 - RNA, 22 nt, Human
cacagcugcccccucucuaacu

SEQ ID NO: 643628 - RNA, 22 nt, Human
gcaugaaaugagcgaauauaau

SEQ ID NO: 643629 - RNA, 22 nt, Human
gauguggaugaucuuagauggu

SEQ ID NO: 643630 - RNA, 22 nt, Human
ccugcagagccacgugccagcg

SEQ ID NO: 643631 - RNA, 22 nt, Human
gcugagagugagcacuggauau

SEQ ID NO: 643632 - RNA, 22 nt, Human
ggccugagcagacagcaugaug

SEQ ID NO: 643633 - RNA, 22 nt, Human
aucauucugauggucaaugcua

SEQ ID NO: 643634 - RNA, 22 nt, Human
uuaauuggccucuuagagguua

SEQ ID NO: 643635 - RNA, 22 nt, Human
guaagcauucauugucuguaua

SEQ ID NO: 643636 - RNA, 21 nt, Human
acuguuaagacguagcugggg

SEQ ID NO: 643637 - RNA, 22 nt, Human
uugcaucacaguaucucuguaa

SEQ ID NO: 643638 - RNA, 22 nt, Human
aggcaggaaaaucgcuugaacc

SEQ ID NO: 643639 - RNA, 19 nt, Human
gucccuucacuccugcugg

SEQ ID NO: 643640 - RNA, 22 nt, Human
uugugugugagccuucaccaca

SEQ ID NO: 643641 - RNA, 22 nt, Human
uaaguguugguaauuacaauga

SEQ ID NO: 643642 - RNA, 19 nt, Human
cuggagauagggccuuuaa

SEQ ID NO: 643643 - RNA, 22 nt, Human
ucagaaguuaauacgaggagaa

SEQ ID NO: 643644 - RNA, 22 nt, Human
ugucaaugaagauaugaauaau

SEQ ID NO: 643645 - RNA, 22 nt, Human
ugcucuggaauaguccuaggca

SEQ ID NO: 643646 - RNA, 22 nt, Human
cgcugggggaacuucagccaau

SEQ ID NO: 643647 - RNA, 22 nt, Human
uucuagaugauaaaccagcagc

SEQ ID NO: 643648 - RNA, 22 nt, Human
uccagcagguguuugccaacuu

SEQ ID NO: 643649 - RNA, 22 nt, Human
uguuacuuaucucacgugaugc

SEQ ID NO: 643650 - RNA, 22 nt, Human
aauugcuucauuaacauuuagg

SEQ ID NO: 643651 - RNA, 22 nt, Human
ugcccccagacagaauccaguu

SEQ ID NO: 643652 - RNA, 22 nt, Human
cuagaaacauuacauguguuaa

SEQ ID NO: 643653 - RNA, 22 nt, Human
ugggucaggcugggaguccuga

SEQ ID NO: 643654 - RNA, 22 nt, Human
cuaaggaagugacagugggauu

SEQ ID NO: 643655 - RNA, 22 nt, Human
gcugaggccccagggugauggg

SEQ ID NO: 643656 - RNA, 22 nt, Human
auuaggcauauaugcuuuuaau

SEQ ID NO: 643657 - RNA, 22 nt, Human
uauaaaacagaaagcacuaccu

SEQ ID NO: 643658 - RNA, 22 nt, Human
uaugcacauugguuuccucauu

SEQ ID NO: 643659 - RNA, 22 nt, Human
uuuucagagagcuuuuaugucc

SEQ ID NO: 643660 - RNA, 20 nt, Human
aaagucccuuagugggagca

SEQ ID NO: 643661 - RNA, 22 nt, Human
cccugugggccaugugucuaca

SEQ ID NO: 643662 - RNA, 22 nt, Human
uggccacaucugaaaugagugu

SEQ ID NO: 643663 - RNA, 22 nt, Human
ugaggucauggcugauauuucc

SEQ ID NO: 643664 - RNA, 22 nt, Human
cagcauggacagggguggcguu

SEQ ID NO: 643665 - RNA, 21 nt, Human
uggcugcaagcagcugccucc

SEQ ID NO: 643666 - RNA, 22 nt, Human
cugcagccucaaccuccugagc

SEQ ID NO: 643667 - RNA, 19 nt, Human
uacauuccacacaaucucu

SEQ ID NO: 643668 - RNA, 22 nt, Human
ucauaagugguuuauaugcuug

SEQ ID NO: 643669 - RNA, 22 nt, Human
gacaggugaaacagcaagguaa

SEQ ID NO: 643670 - RNA, 22 nt, Human
aagaugcacaauguggcaauua

SEQ ID NO: 643671 - RNA, 22 nt, Human
aaggaggguucccagguccugg

SEQ ID NO: 643672 - RNA, 22 nt, Human
gcauggcaagaucaggagacca

SEQ ID NO: 643673 - RNA, 22 nt, Human
ucuuuaacaggaauuauuacag

SEQ ID NO: 643674 - RNA, 22 nt, Human
ccaggauacugcucucugcugc

SEQ ID NO: 643675 - RNA, 22 nt, Human
uuuggagaaaaguugagaccau

SEQ ID NO: 643676 - RNA, 22 nt, Human
guggacguuaggauuguguaga

SEQ ID NO: 643677 - RNA, 22 nt, Human
uacuuuggguuuagaauaaacu

SEQ ID NO: 643678 - RNA, 23 nt, Human
cucaccaagcgccgccgcugugu

SEQ ID NO: 643679 - RNA, 22 nt, Human
uucuuuaccacuacucuuccaa

SEQ ID NO: 643680 - RNA, 22 nt, Human
uaggagccugcucugcagggac

SEQ ID NO: 643681 - RNA, 22 nt, Human
aguuuuugagaauuuacuaugu

SEQ ID NO: 643682 - RNA, 22 nt, Human
uuauaagacuguagugaguauu

SEQ ID NO: 643683 - RNA, 22 nt, Human
ccaguccugcucccugaccacc

SEQ ID NO: 643684 - RNA, 21 nt, Human
agcagcagaucuggugagggc

SEQ ID NO: 643685 - RNA, 22 nt, Human
caauguuugaguaggagcauaa

SEQ ID NO: 643686 - RNA, 22 nt, Human
aguggggaguuuccagaugugu

SEQ ID NO: 643687 - RNA, 22 nt, Human
ugucucugucucccagguugug

SEQ ID NO: 643688 - RNA, 22 nt, Human
cuuauuagaaagaaaagacaug

SEQ ID NO: 643689 - RNA, 22 nt, Human
uuacaguagauacaaugaguaa

SEQ ID NO: 643690 - RNA, 22 nt, Human
ucucuccucuagucaggguggu

SEQ ID NO: 643691 - RNA, 17 nt, Human
agcugccuugcuugagc

SEQ ID NO: 643692 - RNA, 22 nt, Human
ccuggggauucugacacggagu

SEQ ID NO: 643693 - RNA, 22 nt, Human
auggagguggaagaaugaguua

SEQ ID NO: 643694 - RNA, 22 nt, Human
acuggagcccguggaggcgcag

SEQ ID NO: 643695 - RNA, 22 nt, Human
aaagcaauugugguuuuuguca

SEQ ID NO: 643696 - RNA, 22 nt, Human
uaagugcaugauugaacuuggc

SEQ ID NO: 643697 - RNA, 22 nt, Human
cuguccaugcauguugucugcu

SEQ ID NO: 643698 - RNA, 22 nt, Human
cugcucaguaauaguccuaucu

SEQ ID NO: 643699 - RNA, 22 nt, Human
aucuccaguccugguuuccugg

SEQ ID NO: 643700 - RNA, 22 nt, Human
aacauuuauugagcaccuacug

SEQ ID NO: 643701 - RNA, 22 nt, Human
cuccaggcucguccaagaucga

SEQ ID NO: 643702 - RNA, 22 nt, Human
aggaucuucauugugcugcaaa

SEQ ID NO: 643703 - RNA, 21 nt, Human
uuuauucucagauacagggag

SEQ ID NO: 643704 - RNA, 22 nt, Human
uguuucauguggacauaguugu

SEQ ID NO: 643705 - RNA, 22 nt, Human
ugagcaguaggucugaauagug

SEQ ID NO: 643706 - RNA, 22 nt, Human
uccugaagcaguuagcaugagc

SEQ ID NO: 643707 - RNA, 22 nt, Human
cugcuuuaaucccugccuggaa

SEQ ID NO: 643708 - RNA, 22 nt, Human
cauauguauuucucauaauuag

SEQ ID NO: 643709 - RNA, 22 nt, Human
uagaaagcagaaaccaucagag

SEQ ID NO: 643710 - RNA, 22 nt, Human
agacaggagagggaacugccgg

SEQ ID NO: 643711 - RNA, 22 nt, Human
auuacaaucgagagaaacaaau

SEQ ID NO: 643712 - RNA, 22 nt, Human
agauuauuuaagacaggaacca

SEQ ID NO: 643713 - RNA, 22 nt, Human
gagggcugaaguguuuuaugag

SEQ ID NO: 643714 - RNA, 22 nt, Human
ccagcccuucccaacuggccag

SEQ ID NO: 643715 - RNA, 22 nt, Human
uggagaauaggggccacuggug

SEQ ID NO: 643716 - RNA, 19 nt, Human
uaaaaugucuguggucagu

SEQ ID NO: 643717 - RNA, 22 nt, Human
ugaaaugacaaagguuuuucuu

SEQ ID NO: 643718 - RNA, 22 nt, Human
ugcucucucaggccuggcccac

SEQ ID NO: 643719 - RNA, 18 nt, Human
ccucccucauuuucccag

SEQ ID NO: 643720 - RNA, 22 nt, Human
cagggcuugcaggagaaaguuu

SEQ ID NO: 643721 - RNA, 22 nt, Human
cauggcugaaauucuucgcuug

SEQ ID NO: 643722 - RNA, 22 nt, Human
agguggcagaugggggugcucg

SEQ ID NO: 643723 - RNA, 22 nt, Human
gcaggaagaugagcucagguaa

SEQ ID NO: 643724 - RNA, 22 nt, Human
cagaggaggccaccgcauaggc

SEQ ID NO: 643725 - RNA, 22 nt, Human
ucucuaguugaggacugagcag

SEQ ID NO: 643726 - RNA, 23 nt, Human
acagugaaacacgcaguaagagu

SEQ ID NO: 643727 - RNA, 22 nt, Human
agacagcugccuccaccacagc

SEQ ID NO: 643728 - RNA, 22 nt, Human
agggcagcuggaagguggcuuc

SEQ ID NO: 643729 - RNA, 22 nt, Human
auauuacucugauuuaguaaau

SEQ ID NO: 643730 - RNA, 22 nt, Human
ccaaggcuggagugcaguggcg

SEQ ID NO: 643731 - RNA, 22 nt, Human
ccacccugccuugggccaguga

SEQ ID NO: 643732 - RNA, 22 nt, Human
uuagaaagaacuuuagauauca

SEQ ID NO: 643733 - RNA, 22 nt, Human
guuacaaaugccaaagcugaga

SEQ ID NO: 643734 - RNA, 22 nt, Human
ugcagcagggaccucuauguga

SEQ ID NO: 643735 - RNA, 22 nt, Human
ggcaggugcugggagcaucuca

SEQ ID NO: 643736 - RNA, 22 nt, Human
ucuggagcugggggcuuaguau

SEQ ID NO: 643737 - RNA, 22 nt, Human
gaagacuacuguugcacucaua

SEQ ID NO: 643738 - RNA, 22 nt, Human
cuccaagucggcugcagcugga

SEQ ID NO: 643739 - RNA, 22 nt, Human
ugagcaggggagagcgaaugug

SEQ ID NO: 643740 - RNA, 22 nt, Human
agaagcagaaaagggcacuuuu

SEQ ID NO: 643741 - RNA, 22 nt, Human
ggcagaagguugaaguaauuug

SEQ ID NO: 643742 - RNA, 22 nt, Human
gcaaauacauguugagcaccua

SEQ ID NO: 643743 - RNA, 22 nt, Human
uucauugauuuccuuggaauaa

SEQ ID NO: 643744 - RNA, 22 nt, Human
uuuauucuaacuugcugcucua

SEQ ID NO: 643745 - RNA, 22 nt, Human
ccagggcugcucauuggcuggu

SEQ ID NO: 643746 - RNA, 22 nt, Human
caaaugcaugagaaauaagagg

SEQ ID NO: 643747 - RNA, 22 nt, Human
agagaguuguaccacacucaua

SEQ ID NO: 643748 - RNA, 22 nt, Human
auuuuguggcagaugcagaacc

SEQ ID NO: 643749 - RNA, 22 nt, Human
uuucagucaugaguuguuuuca

SEQ ID NO: 643750 - RNA, 22 nt, Human
agugcccugucacuggaacuga

SEQ ID NO: 643751 - RNA, 22 nt, Human
aaauaguuacuucugcugucuu

SEQ ID NO: 643752 - RNA, 22 nt, Human
uagggcucagaguccaguuucu

SEQ ID NO: 643753 - RNA, 22 nt, Human
uccugcaggccuguucccagua

SEQ ID NO: 643754 - RNA, 22 nt, Human
guuacauggagcaaugaugcau

SEQ ID NO: 643755 - RNA, 22 nt, Human
uccugccucaggcucuggagua

SEQ ID NO: 643756 - RNA, 22 nt, Human
ugggcccugcccuugucugucc

SEQ ID NO: 643757 - RNA, 22 nt, Human
ccucaaauugucaaauaagaau

SEQ ID NO: 643758 - RNA, 22 nt, Human
ugggcagugagaaaggucaggu

SEQ ID NO: 643759 - RNA, 22 nt, Human
agcuccagaagccugcaaggua

SEQ ID NO: 643760 - RNA, 22 nt, Human
uggagguugggaugcuugugau

SEQ ID NO: 643761 - RNA, 22 nt, Human
gugucacaugguuuacugcagc

SEQ ID NO: 643762 - RNA, 22 nt, Human
ugggcuccuugggagcaaguga

SEQ ID NO: 643763 - RNA, 22 nt, Human
auacauagcaggguaguagauc

SEQ ID NO: 643764 - RNA, 22 nt, Human
auucaacauauucugaguaaaa

SEQ ID NO: 643765 - RNA, 22 nt, Human
aaugugcugguaacugcuuugc

SEQ ID NO: 643766 - RNA, 22 nt, Human
agaaugcaucuaaaagcagaga

SEQ ID NO: 643767 - RNA, 20 nt, Human
cagugcaacugaagaacuga

SEQ ID NO: 643768 - RNA, 22 nt, Human
cucuuccuacagucugcuaugc

SEQ ID NO: 643769 - RNA, 22 nt, Human
auucuagcugaguaucagcccc

SEQ ID NO: 643770 - RNA, 22 nt, Human
agccucuggcccuagacugcuu

SEQ ID NO: 643771 - RNA, 22 nt, Human
gggacccucaacaucugcuucu

SEQ ID NO: 643772 - RNA, 22 nt, Human
accaggagacaugaccaaugag

SEQ ID NO: 643773 - RNA, 22 nt, Human
aacauugcagcuuaauugcagg

SEQ ID NO: 643774 - RNA, 20 nt, Human
uacaauauucccacuuugcu

SEQ ID NO: 643775 - RNA, 22 nt, Human
agagcuaagaaacagaauugcu

SEQ ID NO: 643776 - RNA, 22 nt, Human
caagguuuuggaagauuuucgu

SEQ ID NO: 643777 - RNA, 22 nt, Human
uacaggaacugggcaggacauu

SEQ ID NO: 643778 - RNA, 22 nt, Human
ccacagcugaccgcaggugagc

SEQ ID NO: 643779 - RNA, 22 nt, Human
gcucagugugguccucagaugu

SEQ ID NO: 643780 - RNA, 22 nt, Human
ggcccugcgauuagguggcagg

SEQ ID NO: 643781 - RNA, 22 nt, Human
ucccaggauuuuaggcucucag

SEQ ID NO: 643782 - RNA, 22 nt, Human
uuccucaucugugcaccucacu

SEQ ID NO: 643783 - RNA, 22 nt, Human
cuguggcuaugguguacauacu

SEQ ID NO: 643784 - RNA, 22 nt, Human
uagccccagcuacucggaagcu

SEQ ID NO: 643785 - RNA, 22 nt, Human
aggggcuggcuuaucugagagu

SEQ ID NO: 643786 - RNA, 22 nt, Human
ccugaauaggcucugcucaaaa

SEQ ID NO: 643787 - RNA, 22 nt, Human
ucccaggacaggccacauggaa

SEQ ID NO: 643788 - RNA, 22 nt, Human
uucucuccagacugcagugggu

SEQ ID NO: 643789 - RNA, 22 nt, Human
agcugccuuaaauuacuuugug

SEQ ID NO: 643790 - RNA, 22 nt, Human
cacaguguuugauuuaggggcc

SEQ ID NO: 643791 - RNA, 22 nt, Human
aaacacugaagaccuaucuggu

SEQ ID NO: 643792 - RNA, 22 nt, Human
uuguucuuuugcuuagacagau

SEQ ID NO: 643793 - RNA, 22 nt, Human
gagacugcugguaaagauggga

SEQ ID NO: 643794 - RNA, 22 nt, Human
uucuuguucugguucuguuagc

SEQ ID NO: 643795 - RNA, 20 nt, Human
gauggguauugaagucaccu

SEQ ID NO: 643796 - RNA, 22 nt, Human
uuacauguuuaugugguacaug

SEQ ID NO: 643797 - RNA, 22 nt, Human
ugaacacauaaggcuuuccugu

SEQ ID NO: 643798 - RNA, 22 nt, Human
ucccuucacagaugcgauguuu

SEQ ID NO: 643799 - RNA, 22 nt, Human
uuggcuaacacgcguuuuguuc

SEQ ID NO: 643800 - RNA, 22 nt, Human
agaggcugugcccaccaggcaa

SEQ ID NO: 643801 - RNA, 22 nt, Human
gccuggugucuccccaaggaag

SEQ ID NO: 643802 - RNA, 19 nt, Human
cccagaggaaugccuggaa

SEQ ID NO: 643803 - RNA, 22 nt, Human
uguuuacuccagcugauggaac

SEQ ID NO: 643804 - RNA, 22 nt, Human
ucagcugagcuccagcucauag

SEQ ID NO: 643805 - RNA, 22 nt, Human
ucuggccuacuggaguccauga

SEQ ID NO: 643806 - RNA, 22 nt, Human
aaaguauuugugauuuuuacca

SEQ ID NO: 643807 - RNA, 22 nt, Human
uuagaaagaguauaccagaaac

SEQ ID NO: 643808 - RNA, 22 nt, Human
aacaguauugguugaacucaag

SEQ ID NO: 643809 - RNA, 22 nt, Human
uuucagacagauucuucucagu

SEQ ID NO: 643810 - RNA, 22 nt, Human
uggaggcauugugacugcugaa

SEQ ID NO: 643811 - RNA, 19 nt, Human
ggugggugaccuccccacc

SEQ ID NO: 643812 - RNA, 22 nt, Human
ccucagagguguggcaucucug

SEQ ID NO: 643813 - RNA, 22 nt, Human
cuggcuguggucacagguaacu

SEQ ID NO: 643814 - RNA, 22 nt, Human
gaguguggugaacaggagcacc

SEQ ID NO: 643815 - RNA, 22 nt, Human
uuccuuguggaaacuauggacg

SEQ ID NO: 643816 - RNA, 22 nt, Human
guucacaauuuuuacugauugg

SEQ ID NO: 643817 - RNA, 22 nt, Human
aggugcugccccgagaaggaug

SEQ ID NO: 643818 - RNA, 22 nt, Human
ucagcuuccucugugguuccag

SEQ ID NO: 643819 - RNA, 22 nt, Human
cacuucaaucucugccuccauc

SEQ ID NO: 643820 - RNA, 22 nt, Human
agggagcugcucugcuuccgug

SEQ ID NO: 643821 - RNA, 22 nt, Human
uuugacauugccaauuugcuca

SEQ ID NO: 643822 - RNA, 22 nt, Human
acaggguuguggccuuaaaggc

SEQ ID NO: 643823 - RNA, 22 nt, Human
aauaguuugaauuuaucagaug

SEQ ID NO: 643824 - RNA, 22 nt, Human
caugcauuguaauuuuuagucu

SEQ ID NO: 643825 - RNA, 22 nt, Human
ucucuuaauaaguaaauacuga

SEQ ID NO: 643826 - RNA, 22 nt, Human
ccagcuuuuggggugacaauuu

SEQ ID NO: 643827 - RNA, 22 nt, Human
acaguauacauugauuaggacc

SEQ ID NO: 643828 - RNA, 22 nt, Human
guacacauauuuccaaggguaa

SEQ ID NO: 643829 - RNA, 22 nt, Human
uauuacaagaaagggcaugaau

SEQ ID NO: 643830 - RNA, 22 nt, Human
ugcugagcgcauccggcggccg

SEQ ID NO: 643831 - RNA, 22 nt, Human
cagggagcuuugucuucucauu

SEQ ID NO: 643832 - RNA, 22 nt, Human
agaggacaaaaugagaagugcu

SEQ ID NO: 643833 - RNA, 22 nt, Human
ggagcuguugauuguuugagga

SEQ ID NO: 643834 - RNA, 22 nt, Human
cagccugccgucagccagguag

SEQ ID NO: 643835 - RNA, 22 nt, Human
uaggaagggcucagggcucggu

SEQ ID NO: 643836 - RNA, 22 nt, Human
cagcaucucccaggcauuugcc

SEQ ID NO: 643837 - RNA, 22 nt, Human
aaggugaacugguaaugacaga

SEQ ID NO: 643838 - RNA, 22 nt, Human
ggcuuaaguccugaauuuaugc

SEQ ID NO: 643839 - RNA, 22 nt, Human
acauaucuuucccucuccugaa

SEQ ID NO: 643840 - RNA, 21 nt, Human
gugcccuguucccacaugccc

SEQ ID NO: 643841 - RNA, 22 nt, Human
ccucuucucaacuccagccaga

SEQ ID NO: 643842 - RNA, 22 nt, Human
gauguagagggaagauuuuaaa

SEQ ID NO: 643843 - RNA, 22 nt, Human
ccugucacauauuugcuguuca

SEQ ID NO: 643844 - RNA, 22 nt, Human
uccagaggcaaaaagguaugga

SEQ ID NO: 643845 - RNA, 22 nt, Human
gggcagaggggcgcuucccucu

SEQ ID NO: 643846 - RNA, 22 nt, Human
agguaaagacugcaaggagaau

SEQ ID NO: 643847 - RNA, 22 nt, Human
ucacagacgccuccccucgccu

SEQ ID NO: 643848 - RNA, 22 nt, Human
acaggaggagcagcugugugcc

SEQ ID NO: 643849 - RNA, 20 nt, Human
gcuccaagccccuuuagagg

SEQ ID NO: 643850 - RNA, 22 nt, Human
guccuugcuugagacaggcagu

SEQ ID NO: 643851 - RNA, 22 nt, Human
gggacgagaucuuggcagugug

SEQ ID NO: 643852 - RNA, 22 nt, Human
ucugaaagucugaaacaguguc

SEQ ID NO: 643853 - RNA, 22 nt, Human
aggcagcaugggcccagagucc

SEQ ID NO: 643854 - RNA, 22 nt, Human
uggccacccccaaugucaguag

SEQ ID NO: 643855 - RNA, 22 nt, Human
uuauacaguuuauacuuagaau

SEQ ID NO: 643856 - RNA, 22 nt, Human
ugaggugaccgcagaugggaag

SEQ ID NO: 643857 - RNA, 21 nt, Human
cuguggccuggcuagcaccgu

SEQ ID NO: 643858 - RNA, 22 nt, Human
aaugcauuguugauuuggagug

SEQ ID NO: 643859 - RNA, 22 nt, Human
aucucuggcaaugcagcaucgu

SEQ ID NO: 643860 - RNA, 22 nt, Human
cccaggccccagggcuugucag

SEQ ID NO: 643861 - RNA, 17 nt, Human
gcagcagagagacccuc

SEQ ID NO: 643862 - RNA, 22 nt, Human
caugcacaacauacucaagagg

SEQ ID NO: 643863 - RNA, 22 nt, Human
agcagcagggugauagugccca

SEQ ID NO: 643864 - RNA, 22 nt, Human
ugggaguagaugaggagugggc

SEQ ID NO: 643865 - RNA, 23 nt, Human
agacauuuuaauaaggacuuuuu

SEQ ID NO: 643866 - RNA, 22 nt, Human
caccugggcuaaacuaugcagg

SEQ ID NO: 643867 - RNA, 22 nt, Human
gccccacagccugcggucucag

SEQ ID NO: 643868 - RNA, 22 nt, Human
ugucaaccagguauuuuggucu

SEQ ID NO: 643869 - RNA, 22 nt, Human
cucacaggguucuaucgaagag

SEQ ID NO: 643870 - RNA, 22 nt, Human
cuggaaggguacauaggaaacu

SEQ ID NO: 643871 - RNA, 22 nt, Human
uguuaaaugagauuggaauuug

SEQ ID NO: 643872 - RNA, 22 nt, Human
ugccucugaggaagauuguguu

SEQ ID NO: 643873 - RNA, 22 nt, Human
cacaguguagacuaauaauaga

SEQ ID NO: 643874 - RNA, 22 nt, Human
guggcacagugggagagcccca

SEQ ID NO: 643875 - RNA, 22 nt, Human
agucauuuucugccuguaaucu

SEQ ID NO: 643876 - RNA, 22 nt, Human
uggcaaagaugguucucaccau

SEQ ID NO: 643877 - RNA, 22 nt, Human
agcuggagauucuggggacagu

SEQ ID NO: 643878 - RNA, 22 nt, Human
uuacaguaaucgaguguugugg

SEQ ID NO: 643879 - RNA, 22 nt, Human
cuggcuguaugcuggccucaga

SEQ ID NO: 643880 - RNA, 22 nt, Human
uggcacagaccuuaucuucucu

SEQ ID NO: 643881 - RNA, 22 nt, Human
cugcucuguuaauuaaacuuug

SEQ ID NO: 643882 - RNA, 22 nt, Human
uuccaggacuucauggcucuga

SEQ ID NO: 643883 - RNA, 22 nt, Human
auugaagauucugacaucagaa

SEQ ID NO: 643884 - RNA, 22 nt, Human
ugucaccaaguugaugaaugca

SEQ ID NO: 643885 - RNA, 22 nt, Human
ucuuccagagccuccaucccua

SEQ ID NO: 643886 - RNA, 22 nt, Human
cuggaaggcggagguuguagug

SEQ ID NO: 643887 - RNA, 21 nt, Human
aaggcuccuccucuaggccuc

SEQ ID NO: 643888 - RNA, 22 nt, Human
gcagcaucuagggcacuggccu

SEQ ID NO: 643889 - RNA, 22 nt, Human
ccaggaggucugaguguggaca

SEQ ID NO: 643890 - RNA, 22 nt, Human
ccagcucugcuugcccagucag

SEQ ID NO: 643891 - RNA, 22 nt, Human
aaacugucauuggaugcauuug

SEQ ID NO: 643892 - RNA, 22 nt, Human
aggcaguggagaagguuuguga

SEQ ID NO: 643893 - RNA, 17 nt, Human
gucaacaggauuucuuu

SEQ ID NO: 643894 - RNA, 22 nt, Human
ucacaccaguuuccuuucaauu

SEQ ID NO: 643895 - RNA, 20 nt, Human
augucugaaguaauccauuu

SEQ ID NO: 643896 - RNA, 22 nt, Human
cacaguguuccagagcaguggu

SEQ ID NO: 643897 - RNA, 21 nt, Human
agagacugucacugcaguacc

SEQ ID NO: 643898 - RNA, 22 nt, Human
aggcaguguauugcuagcggcu

SEQ ID NO: 643899 - RNA, 22 nt, Human
aauguuguuggcucuucaugau

SEQ ID NO: 643900 - RNA, 22 nt, Human
ugaaagcacucacuucugcucu

SEQ ID NO: 643901 - RNA, 22 nt, Human
cugggccugugggcacacggac

SEQ ID NO: 643902 - RNA, 22 nt, Human
uuuuuguauagaaaugaacuaa

SEQ ID NO: 643903 - RNA, 22 nt, Human
gugaggccgcacgccccggagu

SEQ ID NO: 643904 - RNA, 22 nt, Human
gccagccaagauugagaaggua

SEQ ID NO: 643905 - RNA, 22 nt, Human
gcugcuguuccuccaguggauc

SEQ ID NO: 643906 - RNA, 22 nt, Human
gagauucugagaaguuaagucc

SEQ ID NO: 643907 - RNA, 22 nt, Human
caguggcugugaccagggaccu

SEQ ID NO: 643908 - RNA, 22 nt, Human
uggagcagcaucacuuugagcu

SEQ ID NO: 643909 - RNA, 22 nt, Human
gaggagacggggugccuggagc

SEQ ID NO: 643910 - RNA, 22 nt, Human
uuuaaauuuagaagaaacacug

SEQ ID NO: 643911 - RNA, 22 nt, Human
uccacagacuauuaagugaucu

SEQ ID NO: 643912 - RNA, 22 nt, Human
uuugugaucuccucccucuaga

SEQ ID NO: 643913 - RNA, 22 nt, Human
ggaacauuggcauuuuaaggcu

SEQ ID NO: 643914 - RNA, 22 nt, Human
ggcugcucugcacaggggcugg

SEQ ID NO: 643915 - RNA, 22 nt, Human
agucucugugagcucccaaugg

SEQ ID NO: 643916 - RNA, 22 nt, Human
caggcacagacgcaaacuucuu

SEQ ID NO: 643917 - RNA, 18 nt, Human
cauucuuggcagcuuuug

SEQ ID NO: 643918 - RNA, 20 nt, Human
uauuugaaauggccaagugu

SEQ ID NO: 643919 - RNA, 22 nt, Human
ccugggaggcuguuuccagccu

SEQ ID NO: 643920 - RNA, 22 nt, Human
ggcagucauuuaaucccugcau

SEQ ID NO: 643921 - RNA, 22 nt, Human
agcugccugggcuuguacaccu

SEQ ID NO: 643922 - RNA, 19 nt, Human
uagcccuggccaucaugag

SEQ ID NO: 643923 - RNA, 22 nt, Human
aaggggagaugucaugggcccu

SEQ ID NO: 643924 - RNA, 22 nt, Human
aggguaggguaaaugaugcauc

SEQ ID NO: 643925 - RNA, 22 nt, Human
aacauuucauaacuugacuuuu

SEQ ID NO: 643926 - RNA, 22 nt, Human
uuuuccuuagcuucucugcgag

SEQ ID NO: 643927 - RNA, 22 nt, Human
uccucugggccuauuuguucac

SEQ ID NO: 643928 - RNA, 22 nt, Human
uggcuaugaggagcgcaggugu

SEQ ID NO: 643929 - RNA, 22 nt, Human
ugcaggcuggcagugcugaaau

SEQ ID NO: 643930 - RNA, 22 nt, Human
gaguuaaaggaaaauaacuuua

SEQ ID NO: 643931 - RNA, 17 nt, Human
ugaguggccgggggaca

SEQ ID NO: 643932 - RNA, 22 nt, Human
ugaaugugggagagcuggcaau

SEQ ID NO: 643933 - RNA, 22 nt, Human
gcucaggucuuacccaugccug

SEQ ID NO: 643934 - RNA, 22 nt, Human
uauuuccuugagacggagucuc

SEQ ID NO: 643935 - RNA, 18 nt, Human
ccugccagucuggagcag

SEQ ID NO: 643936 - RNA, 22 nt, Human
ccuagcagggaagcagugagga

SEQ ID NO: 643937 - RNA, 22 nt, Human
gaggagagaugguagauugggu

SEQ ID NO: 643938 - RNA, 22 nt, Human
agcagguggauuuagacgggag

SEQ ID NO: 643939 - RNA, 22 nt, Human
uggggcucaccuaggcuggaag

SEQ ID NO: 643940 - RNA, 22 nt, Human
gagacacaaacacauuuagagg

SEQ ID NO: 643941 - RNA, 21 nt, Human
acacauuaugagcauagacuc

SEQ ID NO: 643942 - RNA, 22 nt, Human
ggagcaagucccaggcacuagu

SEQ ID NO: 643943 - RNA, 22 nt, Human
guuguuuuuguucucuauagcu

SEQ ID NO: 643944 - RNA, 22 nt, Human
aggucaagggcaagagugaggu

SEQ ID NO: 643945 - RNA, 22 nt, Human
gaaagccauagcccagcuuuac

SEQ ID NO: 643946 - RNA, 22 nt, Human
ugcugcuuggaaauggggcuga

SEQ ID NO: 643947 - RNA, 22 nt, Human
uggcacccaguggagcugugcu

SEQ ID NO: 643948 - RNA, 22 nt, Human
uggccaguagauaggcaggcaa

SEQ ID NO: 643949 - RNA, 22 nt, Human
ucaggcauggcucuuccucagg

SEQ ID NO: 643950 - RNA, 21 nt, Human
ugucagcacgcaugaggccag

SEQ ID NO: 643951 - RNA, 22 nt, Human
uuuuuauaacucuuuugugaca

SEQ ID NO: 643952 - RNA, 22 nt, Human
caagguuucgaguucccaacca

SEQ ID NO: 643953 - RNA, 22 nt, Human
agcagcucuuaacaaagcaugg

SEQ ID NO: 643954 - RNA, 22 nt, Human
ugugaccauaauuuguaaauaa

SEQ ID NO: 643955 - RNA, 22 nt, Human
gcacaaguuucuucauuguuca

SEQ ID NO: 643956 - RNA, 22 nt, Human
cuagccagauuuaaagagagac

SEQ ID NO: 643957 - RNA, 22 nt, Human
ucagggacuaggugcugccuga

SEQ ID NO: 643958 - RNA, 20 nt, Human
gcacugaagguuccagggga

SEQ ID NO: 643959 - RNA, 22 nt, Human
ucuccuuugaaaguuaggacug

SEQ ID NO: 643960 - RNA, 22 nt, Human
auugaacauacauauccacacc

SEQ ID NO: 643961 - RNA, 19 nt, Human
ccugggagucagcugaagg

SEQ ID NO: 643962 - RNA, 22 nt, Human
uagugucuagugaguuugaugc

SEQ ID NO: 643963 - RNA, 22 nt, Human
cuuggggcuuuguguguaggau

SEQ ID NO: 643964 - RNA, 22 nt, Human
aauaucuguuguucuaagccac

SEQ ID NO: 643965 - RNA, 23 nt, Human
aaguuaguuucaauaaagcaauu

SEQ ID NO: 643966 - RNA, 22 nt, Human
acuguguaugauauguacuggg

SEQ ID NO: 643967 - RNA, 22 nt, Human
acuugcuugggccaucucgcuu

SEQ ID NO: 643968 - RNA, 22 nt, Human
ccuaggaguucgaagcugcagu

SEQ ID NO: 643969 - RNA, 22 nt, Human
ucuuuccuuagaauaauucuuu

SEQ ID NO: 643970 - RNA, 22 nt, Human
ucucagagagcuguguuuuccu

SEQ ID NO: 643971 - RNA, 22 nt, Human
aggcacagagagguuaaaugca

SEQ ID NO: 643972 - RNA, 22 nt, Human
uggcugccuagucccucagccu

SEQ ID NO: 643973 - RNA, 22 nt, Human
uugagguccccaguacccacug

SEQ ID NO: 643974 - RNA, 22 nt, Human
agaaauguaauugcaacugucu

SEQ ID NO: 643975 - RNA, 22 nt, Human
acccuuucuuacucacacgcuc

SEQ ID NO: 643976 - RNA, 22 nt, Human
auucacaaagaagggaaguaca

SEQ ID NO: 643977 - RNA, 22 nt, Human
gggcaugagagggcagcuggca

SEQ ID NO: 643978 - RNA, 22 nt, Human
uagggcuccacucccagagauu

SEQ ID NO: 643979 - RNA, 22 nt, Human
aaccuagaaguuagaguaucau

SEQ ID NO: 643980 - RNA, 20 nt, Human
aggaacuggaagggaggaaa

SEQ ID NO: 643981 - RNA, 22 nt, Human
ggcaggcauugcaacauguaca

SEQ ID NO: 643982 - RNA, 22 nt, Human
caaagauuuuagaauuugcaau

SEQ ID NO: 643983 - RNA, 22 nt, Human
guguggggagcugcagccacau

SEQ ID NO: 643984 - RNA, 22 nt, Human
uaggcuaggcugaagguuuugg

SEQ ID NO: 643985 - RNA, 19 nt, Human
acaauagaaaagucuuuug

SEQ ID NO: 643986 - RNA, 22 nt, Human
aagucuuuuugaaucuauaacu

SEQ ID NO: 643987 - RNA, 22 nt, Human
uaaagacaugcaaagucuaauu

SEQ ID NO: 643988 - RNA, 22 nt, Human
ugccugccucaggccgagugcu

SEQ ID NO: 643989 - RNA, 21 nt, Human
ugcagaaagcggcuugaagca

SEQ ID NO: 643990 - RNA, 22 nt, Human
agacucugagacaugaaccauc

SEQ ID NO: 643991 - RNA, 22 nt, Human
gugcaggguagcgacggcagga

SEQ ID NO: 643992 - RNA, 22 nt, Human
uuuggcucugugucuucaccca

SEQ ID NO: 643993 - RNA, 22 nt, Human
ugaggcccuagggcaugggaga

SEQ ID NO: 643994 - RNA, 22 nt, Human
caugaugucacagagaagcaca

SEQ ID NO: 643995 - RNA, 22 nt, Human
ccuggcagguuacaaccaguua

SEQ ID NO: 643996 - RNA, 22 nt, Human
gguacaauucugggguaugcuc

SEQ ID NO: 643997 - RNA, 22 nt, Human
ucaguuucuucaucucccuaac

SEQ ID NO: 643998 - RNA, 22 nt, Human
cuguacaaaguagcugcuggga

SEQ ID NO: 643999 - RNA, 22 nt, Human
ccagagaggggaagggcuugcc

SEQ ID NO: 644000 - RNA, 22 nt, Human
uuguagaacaugcagcacaaug

SEQ ID NO: 644001 - RNA, 22 nt, Human
augugcauuaaaugucaauguu

SEQ ID NO: 644002 - RNA, 22 nt, Human
uacagaauauagaagcuggaag

SEQ ID NO: 644003 - RNA, 17 nt, Human
cuggagaagccugugga

SEQ ID NO: 644004 - RNA, 22 nt, Human
cagaguccaauugcucagagcg

SEQ ID NO: 644005 - RNA, 22 nt, Human
ugguuucugcccucagagcuca

SEQ ID NO: 644006 - RNA, 22 nt, Human
uucagccagucaucagucuugu

SEQ ID NO: 644007 - RNA, 22 nt, Human
agucacauggacucaggaugac

SEQ ID NO: 644008 - RNA, 22 nt, Human
guuuucagccaggagcacauuu

SEQ ID NO: 644009 - RNA, 22 nt, Human
uugcuuuucccugucucugauu

SEQ ID NO: 644010 - RNA, 22 nt, Human
aauguagaugagauauuuuuug

SEQ ID NO: 644011 - RNA, 22 nt, Human
gcccugagacugaagaacuguc

SEQ ID NO: 644012 - RNA, 22 nt, Human
caaauagacuuaagcaucugua

SEQ ID NO: 644013 - RNA, 20 nt, Human
ggcuucuuuacaucuguguu

SEQ ID NO: 644014 - RNA, 22 nt, Human
ucauacaacuaagaguuucaga

SEQ ID NO: 644015 - RNA, 22 nt, Human
aagcuucuuagaaugcaugugc

SEQ ID NO: 644016 - RNA, 22 nt, Human
gaaaauaggcugcaucuccuuc

SEQ ID NO: 644017 - RNA, 22 nt, Human
ggagucugugucuugaagcagu

SEQ ID NO: 644018 - RNA, 22 nt, Human
gggaaggcaccaugguguucca

SEQ ID NO: 644019 - RNA, 22 nt, Human
uaggaagguccaugucuuaucu

SEQ ID NO: 644020 - RNA, 22 nt, Human
gaucuuuacuacugccuucucu

SEQ ID NO: 644021 - RNA, 22 nt, Human
agugcuuuguaguuucauugug

SEQ ID NO: 644022 - RNA, 22 nt, Human
ugcuucuguauuuugggcuuga

SEQ ID NO: 644023 - RNA, 22 nt, Human
aagggcugagaaguggggcugg

SEQ ID NO: 644024 - RNA, 22 nt, Human
gggagaagaaugugucaauugu

SEQ ID NO: 644025 - RNA, 22 nt, Human
uggcuccagauuuccugcugca

SEQ ID NO: 644026 - RNA, 22 nt, Human
agggccagucguguauuacugu

SEQ ID NO: 644027 - RNA, 22 nt, Human
uccugggagcaugaagagggau

SEQ ID NO: 644028 - RNA, 22 nt, Human
cugggaguacugggggauguca

SEQ ID NO: 644029 - RNA, 22 nt, Human
agaggccuaauugcuacccuuu

SEQ ID NO: 644030 - RNA, 22 nt, Human
ucucagaauaaauuccuaacuu

SEQ ID NO: 644031 - RNA, 22 nt, Human
uuuguccuugaaucaauucaca

SEQ ID NO: 644032 - RNA, 22 nt, Human
uucugcucuaauguacaccagc

SEQ ID NO: 644033 - RNA, 22 nt, Human
gagcaagacucacugcaucuug

SEQ ID NO: 644034 - RNA, 22 nt, Human
uagggcucacugagaugaauau

SEQ ID NO: 644035 - RNA, 22 nt, Human
gaaauagaucucugggaugcaa

SEQ ID NO: 644036 - RNA, 23 nt, Human
aaacugcuuccaauuccugccau

SEQ ID NO: 644037 - RNA, 22 nt, Human
uuucauugucaauaaacuguau

SEQ ID NO: 644038 - RNA, 22 nt, Human
ccugugcauccgguggucauug

SEQ ID NO: 644039 - RNA, 22 nt, Human
uuccgcuggggccgccuggcgg

SEQ ID NO: 644040 - RNA, 22 nt, Human
aauaaagaauggaugagaucgu

SEQ ID NO: 644041 - RNA, 22 nt, Human
uucccaaaauauaacaguuaac

SEQ ID NO: 644042 - RNA, 15 nt, Human
cauaucacugggaau

SEQ ID NO: 644043 - RNA, 22 nt, Human
aaagccaugaauguuauagagg

SEQ ID NO: 644044 - RNA, 22 nt, Human
gggaagagaccguacccuggcc

SEQ ID NO: 644045 - RNA, 22 nt, Human
cugugaggccuuuggccagaua

SEQ ID NO: 644046 - RNA, 22 nt, Human
gugaaggcuacaagagaucaag

SEQ ID NO: 644047 - RNA, 22 nt, Human
ucaucauaauauggaaucuugu

SEQ ID NO: 644048 - RNA, 22 nt, Human
ucucacagcaggggccaggucu

SEQ ID NO: 644049 - RNA, 22 nt, Human
uccaggggacacuguuucucca

SEQ ID NO: 644050 - RNA, 22 nt, Human
ucccacuggacgucugugcugg

SEQ ID NO: 644051 - RNA, 22 nt, Human
aaucaaaaccuacagagguaau

SEQ ID NO: 644052 - RNA, 22 nt, Human
aaucagagucccaagaucugua

SEQ ID NO: 644053 - RNA, 22 nt, Human
uaaauagaaucuaaacugcuca

SEQ ID NO: 644054 - RNA, 22 nt, Human
cuuggagaaaggaaagggcuug

SEQ ID NO: 644055 - RNA, 22 nt, Human
uccuggagccaggacccuuccc

SEQ ID NO: 644056 - RNA, 22 nt, Human
aguaaucugauuuuauagcuau

SEQ ID NO: 644057 - RNA, 22 nt, Human
auugucgcuuauuuaggugcuu

SEQ ID NO: 644058 - RNA, 22 nt, Human
auuuagacaccagcuuguaagg

SEQ ID NO: 644059 - RNA, 22 nt, Human
gcuuuagaaaugaguaaauuag

SEQ ID NO: 644060 - RNA, 23 nt, Human
accaggagccaagaucucccugg

SEQ ID NO: 644061 - RNA, 22 nt, Human
uuuggcaacggagaacuuacuc

SEQ ID NO: 644062 - RNA, 22 nt, Human
ccagggugugggcgucggcacg

SEQ ID NO: 644063 - RNA, 22 nt, Human
ggaacugaaugucucgguauaa

SEQ ID NO: 644064 - RNA, 22 nt, Human
acuuuacaauauccugugacuu

SEQ ID NO: 644065 - RNA, 22 nt, Human
aaaggcuaugagauagaagaua

SEQ ID NO: 644066 - RNA, 22 nt, Human
agccaggccagacucacacccu

SEQ ID NO: 644067 - RNA, 22 nt, Human
uacaauguacuuccuugcacag

SEQ ID NO: 644068 - RNA, 22 nt, Human
cugaucuuaaguaacauuauuu

SEQ ID NO: 644069 - RNA, 22 nt, Human
cuuaaaguauugguuuaaccaa

SEQ ID NO: 644070 - RNA, 22 nt, Human
uuucccacacaguccacugcag

SEQ ID NO: 644071 - RNA, 22 nt, Human
acaggugcaugcuaccaugucu

SEQ ID NO: 644072 - RNA, 22 nt, Human
uagagaauggccuugaaguagu

SEQ ID NO: 644073 - RNA, 22 nt, Human
aaacagcugcacugcugauguc

SEQ ID NO: 644074 - RNA, 22 nt, Human
gucagcauugcagauauauggc

SEQ ID NO: 644075 - RNA, 22 nt, Human
ccaggcucugagaggaauguga

SEQ ID NO: 644076 - RNA, 22 nt, Human
aggcucuggcuacuacagagcu

SEQ ID NO: 644077 - RNA, 22 nt, Human
caugaaggaauuaagguaagga

SEQ ID NO: 644078 - RNA, 19 nt, Human
ugugugcaugcgcacgugu

SEQ ID NO: 644079 - RNA, 22 nt, Human
cagcagaggaaagcaaaucuaa

SEQ ID NO: 644080 - RNA, 22 nt, Human
cucuucauuaguuccuguccca

SEQ ID NO: 644081 - RNA, 22 nt, Human
cauguguuaaucuuucugcaaa

SEQ ID NO: 644082 - RNA, 22 nt, Human
ucagaacaauugggaaccauua

SEQ ID NO: 644083 - RNA, 22 nt, Human
agcgcgcugucagacuggcucg

SEQ ID NO: 644084 - RNA, 22 nt, Human
aauugacagaaaguuuacgagg

SEQ ID NO: 644085 - RNA, 22 nt, Human
cauggcaggaaggacaugcacu

SEQ ID NO: 644086 - RNA, 22 nt, Human
ucugagggugggagaaggagcu

SEQ ID NO: 644087 - RNA, 22 nt, Human
agccaucauuucugucacuggc

SEQ ID NO: 644088 - RNA, 22 nt, Human
ggccuggaaugcuuuccuacca

SEQ ID NO: 644089 - RNA, 22 nt, Human
cugaagcucuccaguuuguuuc

SEQ ID NO: 644090 - RNA, 22 nt, Human
uaguagcaggggguaccucuca

SEQ ID NO: 644091 - RNA, 22 nt, Human
uggccagguugggcuuugcagc

SEQ ID NO: 644092 - RNA, 22 nt, Human
ccagggcacguugggacaguac

SEQ ID NO: 644093 - RNA, 22 nt, Human
uauaaagaauccagaagagaca

SEQ ID NO: 644094 - RNA, 22 nt, Human
augcugaagaaucacagggacu

SEQ ID NO: 644095 - RNA, 22 nt, Human
accaggccaaaaucauauuuac

SEQ ID NO: 644096 - RNA, 22 nt, Human
cuguggcuaggauuauuccuga

SEQ ID NO: 644097 - RNA, 22 nt, Human
ggggggcagcuguccuggccau

SEQ ID NO: 644098 - RNA, 22 nt, Human
augcaugcacacacugcauugc

SEQ ID NO: 644099 - RNA, 22 nt, Human
gcagggaccuaugacgauggaa

SEQ ID NO: 644100 - RNA, 22 nt, Human
uuuucacauugucccagcacua

SEQ ID NO: 644101 - RNA, 22 nt, Human
ggcccugggcccucuagcuugu

SEQ ID NO: 644102 - RNA, 17 nt, Human
aaucuguuuacagucag

SEQ ID NO: 644103 - RNA, 23 nt, Human
gugauuucagggaacagaaucag

SEQ ID NO: 644104 - RNA, 22 nt, Human
ucucuacaaaaauuagcaugca

SEQ ID NO: 644105 - RNA, 22 nt, Human
uccucucugcacuggcccugcc

SEQ ID NO: 644106 - RNA, 19 nt, Human
agcagcagcuaccacuugu

SEQ ID NO: 644107 - RNA, 22 nt, Human
caguccuuagucuggauggcuu

SEQ ID NO: 644108 - RNA, 22 nt, Human
uuagaguuaggauuugucuuua

SEQ ID NO: 644109 - RNA, 22 nt, Human
ggaaguguuugugcagauggcc

SEQ ID NO: 644110 - RNA, 20 nt, Human
gugucugcauauagcaggug

SEQ ID NO: 644111 - RNA, 22 nt, Human
uuauaugauugagcaucuuggu

SEQ ID NO: 644112 - RNA, 21 nt, Human
ccaggcagagcugugaguucu

SEQ ID NO: 644113 - RNA, 22 nt, Human
ggucucgagccaggcagcugca

SEQ ID NO: 644114 - RNA, 22 nt, Human
ccaguggacuucucccuguggu

SEQ ID NO: 644115 - RNA, 22 nt, Human
ucuuucccgccagagcaugagu

SEQ ID NO: 644116 - RNA, 22 nt, Human
acuguaaauuuugguugcaggu

SEQ ID NO: 644117 - RNA, 22 nt, Human
uuugcacacacaauaacaaaug

SEQ ID NO: 644118 - RNA, 22 nt, Human
aauagcugggaccugaauuagc

SEQ ID NO: 644119 - RNA, 22 nt, Human
acugcucucuuugcaggggcua

SEQ ID NO: 644120 - RNA, 22 nt, Human
cacagcugcccuaacuguacuc

SEQ ID NO: 644121 - RNA, 22 nt, Human
acucuggcacuggguaccucag

SEQ ID NO: 644122 - RNA, 22 nt, Human
cagaugaggggcauauaacaau

SEQ ID NO: 644123 - RNA, 22 nt, Human
cuggcagcaggucacacgcaga

SEQ ID NO: 644124 - RNA, 22 nt, Human
gguugcaaacuccugggaucaa

SEQ ID NO: 644125 - RNA, 22 nt, Human
aagccauucaucuaauguccug

SEQ ID NO: 644126 - RNA, 22 nt, Human
aaagggagcauggcugcaggga

SEQ ID NO: 644127 - RNA, 21 nt, Human
agagagggagaugaaacaucc

SEQ ID NO: 644128 - RNA, 22 nt, Human
ggaaaucaaggggacaaauugu

SEQ ID NO: 644129 - RNA, 22 nt, Human
aggaugagauuccagggucaau

SEQ ID NO: 644130 - RNA, 22 nt, Human
agcaggaacgaguucaugggga

SEQ ID NO: 644131 - RNA, 22 nt, Human
acagcacagagugguauggcug

SEQ ID NO: 644132 - RNA, 22 nt, Human
uccccaggaaggcccuuccugg

SEQ ID NO: 644133 - RNA, 22 nt, Human
cucucucuuguguugcugcaga

SEQ ID NO: 644134 - RNA, 22 nt, Human
gucuccugccacacucaguccc

SEQ ID NO: 644135 - RNA, 22 nt, Human
gcaguguuccuucuacuggggc

SEQ ID NO: 644136 - RNA, 22 nt, Human
auguuuuuggcuucaaguuucu

SEQ ID NO: 644137 - RNA, 20 nt, Human
aaacaagguugcucugagga

SEQ ID NO: 644138 - RNA, 22 nt, Human
ugcugcuguuuccuacaucuca

SEQ ID NO: 644139 - RNA, 22 nt, Human
aucacagagcucccuuccacug

SEQ ID NO: 644140 - RNA, 22 nt, Human
gaggcugcuuugaugacaggag

SEQ ID NO: 644141 - RNA, 22 nt, Human
ugcuggcaccagaaugacugca

SEQ ID NO: 644142 - RNA, 22 nt, Human
ugagugggaccugcguguguca

SEQ ID NO: 644143 - RNA, 22 nt, Human
ucacagcauugaguguacuaga

SEQ ID NO: 644144 - RNA, 22 nt, Human
cccaggcagucuggcucuaaag

SEQ ID NO: 644145 - RNA, 22 nt, Human
acaugcuuugauguauuuugca

SEQ ID NO: 644146 - RNA, 22 nt, Human
aggaacauucucauuuccugcc

SEQ ID NO: 644147 - RNA, 22 nt, Human
ccaaaggaugucccuguguuuu

SEQ ID NO: 644148 - RNA, 22 nt, Human
guggcagagccgugcagguagg

SEQ ID NO: 644149 - RNA, 22 nt, Human
uccuuaaaugaacucugcauga

SEQ ID NO: 644150 - RNA, 22 nt, Human
cagcugcuguaacagaauacuu

SEQ ID NO: 644151 - RNA, 19 nt, Human
ggagcuugguggcuguggc

SEQ ID NO: 644152 - RNA, 22 nt, Human
agaucagagaugcuaaaagagc

SEQ ID NO: 644153 - RNA, 19 nt, Human
uucauuuguaucugcucac

SEQ ID NO: 644154 - RNA, 22 nt, Human
agagcuguucaacguagcaaug

SEQ ID NO: 644155 - RNA, 22 nt, Human
uggugaggccaaagccaugaca

SEQ ID NO: 644156 - RNA, 22 nt, Human
caaagccauagaguagauaaga

SEQ ID NO: 644157 - RNA, 22 nt, Human
ugaggaggcccagguuggggcu

SEQ ID NO: 644158 - RNA, 22 nt, Human
gaagcugggucgcugggauccu

SEQ ID NO: 644159 - RNA, 21 nt, Human
ugcaggcuacuucugacucua

SEQ ID NO: 644160 - RNA, 22 nt, Human
cuccucagucaggucuaggguc

SEQ ID NO: 644161 - RNA, 22 nt, Human
gcaguguuuuacagaccagcau

SEQ ID NO: 644162 - RNA, 21 nt, Human
cauuucaugauuauagaaaug

SEQ ID NO: 644163 - RNA, 22 nt, Human
uagaaaguaaaucaguuuuauu

SEQ ID NO: 644164 - RNA, 22 nt, Human
agcagacuccauugagugaguc

SEQ ID NO: 644165 - RNA, 22 nt, Human
auaucacaaacaagucuguacu

SEQ ID NO: 644166 - RNA, 22 nt, Human
aauaggaagucacaucaaggga

SEQ ID NO: 644167 - RNA, 22 nt, Human
cuaaaugcccuacaaugacugg

SEQ ID NO: 644168 - RNA, 22 nt, Human
aaggaaagcugugguucugaga

SEQ ID NO: 644169 - RNA, 21 nt, Human
guuaagccuugaggugauugu

SEQ ID NO: 644170 - RNA, 22 nt, Human
agaaccugccuuuacucuccuu

SEQ ID NO: 644171 - RNA, 22 nt, Human
aaaguagaggcauugaucaggu

SEQ ID NO: 644172 - RNA, 22 nt, Human
auauggaaugguaaucuacaau

SEQ ID NO: 644173 - RNA, 22 nt, Human
auucaauaaauaugcuacaugg

SEQ ID NO: 644174 - RNA, 22 nt, Human
gcuguggccuggcgcagagcug

SEQ ID NO: 644175 - RNA, 19 nt, Human
acaguccagcuguuuguac

SEQ ID NO: 644176 - RNA, 22 nt, Human
ucugagcuguggccauucuucc

SEQ ID NO: 644177 - RNA, 22 nt, Human
cacaaaaguaggaggcaggcgg

SEQ ID NO: 644178 - RNA, 22 nt, Human
augcaaaaguaauugcaauuuu

SEQ ID NO: 644179 - RNA, 22 nt, Human
aauuuccagaucagaugacuca

SEQ ID NO: 644180 - RNA, 22 nt, Human
gucauuucuguuucuucagugc

SEQ ID NO: 644181 - RNA, 22 nt, Human
uagacauuagguagguucaugg

SEQ ID NO: 644182 - RNA, 18 nt, Human
uaaauauauuucccccuu

SEQ ID NO: 644183 - RNA, 22 nt, Human
uccguugacuuggaagcccuga

SEQ ID NO: 644184 - RNA, 22 nt, Human
ccugaggagauuguggcugggg

SEQ ID NO: 644185 - RNA, 22 nt, Human
uuugaaguccaucuggcccagu

SEQ ID NO: 644186 - RNA, 20 nt, Human
acuuaguuuuucucacagga

SEQ ID NO: 644187 - RNA, 22 nt, Human
gagccagugaucagacagggag

SEQ ID NO: 644188 - RNA, 22 nt, Human
cugagccagggccacacaugga

SEQ ID NO: 644189 - RNA, 22 nt, Human
uucuccuuuguaauucucaucc

SEQ ID NO: 644190 - RNA, 22 nt, Human
cucuggcuuuaaggaugccaca

SEQ ID NO: 644191 - RNA, 22 nt, Human
aggggcuccucucugagaguag

SEQ ID NO: 644192 - RNA, 19 nt, Human
gcucagagggcccugugcu

SEQ ID NO: 644193 - RNA, 23 nt, Human
uuguacagcccagauuccucuuc

SEQ ID NO: 644194 - RNA, 22 nt, Human
cuguggcauuuagagguugcgu

SEQ ID NO: 644195 - RNA, 22 nt, Human
auguuaccuuguucuccaaaaa

SEQ ID NO: 644196 - RNA, 22 nt, Human
uggcagaguucgcugugccuuu

SEQ ID NO: 644197 - RNA, 22 nt, Human
acaugcaagcagccgugcagau

SEQ ID NO: 644198 - RNA, 22 nt, Human
ccugaggucuagagucagggug

SEQ ID NO: 644199 - RNA, 23 nt, Human
gccugggacucaggaggagcuca

SEQ ID NO: 644200 - RNA, 22 nt, Human
uaugaaauuuaaacacagauca

SEQ ID NO: 644201 - RNA, 22 nt, Human
uacaugcuccuuaugagaaucu

SEQ ID NO: 644202 - RNA, 22 nt, Human
gcagcugcuggagggaggcagg

SEQ ID NO: 644203 - RNA, 22 nt, Human
acaguaacaccuacucuguccc

SEQ ID NO: 644204 - RNA, 22 nt, Human
ugaagacaguuuuacucaugag

SEQ ID NO: 644205 - RNA, 22 nt, Human
aguaacagagcauggguucaga

SEQ ID NO: 644206 - RNA, 21 nt, Human
gugaagacuuugccuuuaaga

SEQ ID NO: 644207 - RNA, 22 nt, Human
uagcaagaggugaagguuucau

SEQ ID NO: 644208 - RNA, 22 nt, Human
gcagcugcuguggcaucaagcu

SEQ ID NO: 644209 - RNA, 22 nt, Human
ugagggaggccuccaucugcca

SEQ ID NO: 644210 - RNA, 22 nt, Human
ugcugagguuguggagugcauu

SEQ ID NO: 644211 - RNA, 22 nt, Human
ugggccuggcccuguggaggag

SEQ ID NO: 644212 - RNA, 22 nt, Human
uucugcugguaacuauguuuca

SEQ ID NO: 644213 - RNA, 22 nt, Human
acuuguuuacaagcaguucuga

SEQ ID NO: 644214 - RNA, 22 nt, Human
auggcauugaguaaagucagua

SEQ ID NO: 644215 - RNA, 22 nt, Human
uacauaaugagcuaguuaaguu

SEQ ID NO: 644216 - RNA, 22 nt, Human
aagcaucucaccugcccccacg

SEQ ID NO: 644217 - RNA, 22 nt, Human
gaggcuccucauucaguaugcu

SEQ ID NO: 644218 - RNA, 22 nt, Human
ucuaauuccauuaaauugaugu

SEQ ID NO: 644219 - RNA, 22 nt, Human
auuauuauauagggaaaguccc

SEQ ID NO: 644220 - RNA, 22 nt, Human
ccuaggcuuguuuucaucagcu

SEQ ID NO: 644221 - RNA, 22 nt, Human
ugaauuguggcuuuuuccaauu

SEQ ID NO: 644222 - RNA, 22 nt, Human
auuaucucaagggauagcagau

SEQ ID NO: 644223 - RNA, 22 nt, Human
ugacaguuguauuacaugggaa

SEQ ID NO: 644224 - RNA, 22 nt, Human
gagggcucuacucaccacccug

SEQ ID NO: 644225 - RNA, 22 nt, Human
aaagacauggaacuagagaugg

SEQ ID NO: 644226 - RNA, 22 nt, Human
cccauuuaucccaagguuacuc

SEQ ID NO: 644227 - RNA, 22 nt, Human
ucaagagagugcugcuuggggu

SEQ ID NO: 644228 - RNA, 22 nt, Human
gugaccauuugacauauccuug

SEQ ID NO: 644229 - RNA, 22 nt, Human
uacagacauucaauuuugaccc

SEQ ID NO: 644230 - RNA, 22 nt, Human
agagucugaggaggaccaacag

SEQ ID NO: 644231 - RNA, 22 nt, Human
aggaaaggauuggcuucucugu

SEQ ID NO: 644232 - RNA, 17 nt, Human
ucuggaugucauggaag

SEQ ID NO: 644233 - RNA, 21 nt, Human
acuuggcagaacgcagaaggc

SEQ ID NO: 644234 - RNA, 22 nt, Human
uuucacauggacuuuuuguucu

SEQ ID NO: 644235 - RNA, 19 nt, Human
gcugcugcuccucccucgc

SEQ ID NO: 644236 - RNA, 22 nt, Human
caacauuugugaugagcaaacu

SEQ ID NO: 644237 - RNA, 22 nt, Human
uagugugguaucuucuauggaa

SEQ ID NO: 644238 - RNA, 22 nt, Human
agggugcagaacaaauuaagac

SEQ ID NO: 644239 - RNA, 19 nt, Human
cugucugguucauguguuc

SEQ ID NO: 644240 - RNA, 22 nt, Human
cagggccuguacaagucccacc

SEQ ID NO: 644241 - RNA, 22 nt, Human
cagcccgucacacgcuagcauc

SEQ ID NO: 644242 - RNA, 21 nt, Human
ucuuuacauuugccucuugca

SEQ ID NO: 644243 - RNA, 22 nt, Human
gaguuaaauauuuucugaaguu

SEQ ID NO: 644244 - RNA, 22 nt, Human
aguuuuauguagacaauucauu

SEQ ID NO: 644245 - RNA, 22 nt, Human
gugcagagugucuguggacuga

SEQ ID NO: 644246 - RNA, 22 nt, Human
agcagccacagcagaucugagu

SEQ ID NO: 644247 - RNA, 22 nt, Human
aaaugcacgcuacccagcuaga

SEQ ID NO: 644248 - RNA, 20 nt, Human
cugacagaaaauauuucauc

SEQ ID NO: 644249 - RNA, 22 nt, Human
agcuuuaugcuuccuacaagcu

SEQ ID NO: 644250 - RNA, 22 nt, Human
gacaugucggauagaaugaguu

SEQ ID NO: 644251 - RNA, 22 nt, Human
agcagaugaaucccagauaaag

SEQ ID NO: 644252 - RNA, 22 nt, Human
cugccagggcauccuguggugg

SEQ ID NO: 644253 - RNA, 22 nt, Human
gggcucuguggaugugagagcu

SEQ ID NO: 644254 - RNA, 22 nt, Human
ggggcugcucccaccccugagg

SEQ ID NO: 644255 - RNA, 22 nt, Human
gaaacuuacuuacucacauuuc

SEQ ID NO: 644256 - RNA, 22 nt, Human
aggucgaguuucggggcuacuu

SEQ ID NO: 644257 - RNA, 21 nt, Human
ggcaagaaacacaaucaagua

SEQ ID NO: 644258 - RNA, 22 nt, Human
gaaaggucuuccggucuuccag

SEQ ID NO: 644259 - RNA, 22 nt, Human
augaagaaacuguucugggugg

SEQ ID NO: 644260 - RNA, 22 nt, Human
acccucaggcagaauguauucu

SEQ ID NO: 644261 - RNA, 21 nt, Human
agccugcaauguagguaccgg

SEQ ID NO: 644262 - RNA, 22 nt, Human
cacagugauugauuuuuacuuu

SEQ ID NO: 644263 - RNA, 22 nt, Human
aggacaugaagaaagggcaagg

SEQ ID NO: 644264 - RNA, 23 nt, Human
ccuguggcaaguagaugagauga

SEQ ID NO: 644265 - RNA, 22 nt, Human
gcagagcucaugccugcaccuc

SEQ ID NO: 644266 - RNA, 22 nt, Human
guuuccuagaucaguguucuua

SEQ ID NO: 644267 - RNA, 22 nt, Human
aauaaauguuaagauugucuca

SEQ ID NO: 644268 - RNA, 22 nt, Human
ucuccuccuuuuuucaacauag

SEQ ID NO: 644269 - RNA, 22 nt, Human
acuguauucuagucauguuugu

SEQ ID NO: 644270 - RNA, 22 nt, Human
gacaaagcagacaagauaauuc

SEQ ID NO: 644271 - RNA, 22 nt, Human
aggaaagcucccaguagggcuc

SEQ ID NO: 644272 - RNA, 22 nt, Human
agggccagcagcuuggccaacc

SEQ ID NO: 644273 - RNA, 22 nt, Human
augauggaugucacagucugua

SEQ ID NO: 644274 - RNA, 20 nt, Human
cagcugccuggcucugggau

SEQ ID NO: 644275 - RNA, 22 nt, Human
ugcucugguccucccucggcgc

SEQ ID NO: 644276 - RNA, 22 nt, Human
gcucaggcaggagugcaguggc

SEQ ID NO: 644277 - RNA, 17 nt, Human
agaaacugaggcucagu

SEQ ID NO: 644278 - RNA, 22 nt, Human
guacaaaugagaguucuguuuu

SEQ ID NO: 644279 - RNA, 19 nt, Human
ugagacagagaccaguucu

SEQ ID NO: 644280 - RNA, 22 nt, Human
aaggcuuuuaacuacuguuuua

SEQ ID NO: 644281 - RNA, 22 nt, Human
gcuucagagauuucacuaguuu

SEQ ID NO: 644282 - RNA, 22 nt, Human
cccaggccagaacuugguugcu

SEQ ID NO: 644283 - RNA, 22 nt, Human
cagcccagugcauuuguguacu

SEQ ID NO: 644284 - RNA, 22 nt, Human
uagaggugagccaucaaggggc

SEQ ID NO: 644285 - RNA, 22 nt, Human
aaacaggcaucacucagcaaag

SEQ ID NO: 644286 - RNA, 22 nt, Human
aagggcagggaguuugugucua

SEQ ID NO: 644287 - RNA, 22 nt, Human
gcagaggucaaauaccucauuu

SEQ ID NO: 644288 - RNA, 22 nt, Human
guggcugagcagcagagagcug

SEQ ID NO: 644289 - RNA, 22 nt, Human
cagggcacuuaaauugccucgu

SEQ ID NO: 644290 - RNA, 22 nt, Human
cuggucaggggauggggcucag

SEQ ID NO: 644291 - RNA, 22 nt, Human
gguugguaacucccugugcagu

SEQ ID NO: 644292 - RNA, 22 nt, Human
guggagacgggacagaagcuaa

SEQ ID NO: 644293 - RNA, 22 nt, Human
gcccagugcccuagaaugcacu

SEQ ID NO: 644294 - RNA, 22 nt, Human
acacccagcuuuugaaugcccu

SEQ ID NO: 644295 - RNA, 22 nt, Human
aauucugcucuuaacauaaugu

SEQ ID NO: 644296 - RNA, 22 nt, Human
aagccaggaagggagcuguccc

SEQ ID NO: 644297 - RNA, 22 nt, Human
ugcauuuauuugaauugaucua

SEQ ID NO: 644298 - RNA, 22 nt, Human
gucuaaacaaaaaugcaccuuu

SEQ ID NO: 644299 - RNA, 22 nt, Human
uugcccaccuuagucuucagac

SEQ ID NO: 644300 - RNA, 22 nt, Human
ugauugaacugagcuucaagau

SEQ ID NO: 644301 - RNA, 22 nt, Human
acccaggaugauaauguucaca

SEQ ID NO: 644302 - RNA, 22 nt, Human
caggcacaagaagcaaauguua

SEQ ID NO: 644303 - RNA, 22 nt, Human
uuaaaucaggcaucauuucagu

SEQ ID NO: 644304 - RNA, 22 nt, Human
ucuggcagcagcaucaguggcu

SEQ ID NO: 644305 - RNA, 22 nt, Human
acauuucugcauguaggguaau

SEQ ID NO: 644306 - RNA, 22 nt, Human
aagcuggacacugacccacugu

SEQ ID NO: 644307 - RNA, 22 nt, Human
uuugaaugagaauuauugucau

SEQ ID NO: 644308 - RNA, 22 nt, Human
uggcugggccgggccuugugcc

SEQ ID NO: 644309 - RNA, 22 nt, Human
ugcccugcugugccuggagcca

SEQ ID NO: 644310 - RNA, 22 nt, Human
acacagaguuugacacauggga

SEQ ID NO: 644311 - RNA, 22 nt, Human
gcaguuauguauguguuugaga

SEQ ID NO: 644312 - RNA, 22 nt, Human
aaucugucuucuuuugugguuu

SEQ ID NO: 644313 - RNA, 22 nt, Human
uagggcaauauuucccagaaaa

SEQ ID NO: 644314 - RNA, 22 nt, Human
ugcuccaggagcaaccuuugag

SEQ ID NO: 644315 - RNA, 22 nt, Human
cgggagcacgggaggcggagcu

SEQ ID NO: 644316 - RNA, 22 nt, Human
cucagggggaaucaggucacag

SEQ ID NO: 644317 - RNA, 22 nt, Human
aaaccuuuucagcugaauggag

SEQ ID NO: 644318 - RNA, 22 nt, Human
cauuuaauccauagaggaaugu

SEQ ID NO: 644319 - RNA, 22 nt, Human
uuucacagcagaauuucugagg

SEQ ID NO: 644320 - RNA, 22 nt, Human
cagcacaguguuagguaauuug

SEQ ID NO: 644321 - RNA, 22 nt, Human
uugacacaaacagugauguagu

SEQ ID NO: 644322 - RNA, 22 nt, Human
ugauuuuuggaucugagcugca

SEQ ID NO: 644323 - RNA, 22 nt, Human
ucugggcuuuacacugugcuua

SEQ ID NO: 644324 - RNA, 22 nt, Human
auuuguaucuucuaauauuauc

SEQ ID NO: 644325 - RNA, 22 nt, Human
ugugugccccagaugaguagcu

SEQ ID NO: 644326 - RNA, 22 nt, Human
cagcuauagauggacugaagag

SEQ ID NO: 644327 - RNA, 22 nt, Human
ucugcacagagacccuugccag

SEQ ID NO: 644328 - RNA, 22 nt, Human
uuuucauuguuacuaugagcua

SEQ ID NO: 644329 - RNA, 19 nt, Human
uucucuauuaugucuucuc

SEQ ID NO: 644330 - RNA, 22 nt, Human
ucugcuuucuugcgcagaugug

SEQ ID NO: 644331 - RNA, 22 nt, Human
gccuucaguaguauccucauga

SEQ ID NO: 644332 - RNA, 22 nt, Human
gucagugugaguugauuccaua

SEQ ID NO: 644333 - RNA, 22 nt, Human
agacccuugcagucugguuguc

SEQ ID NO: 644334 - RNA, 18 nt, Human
uggguggcuagggaguuu

SEQ ID NO: 644335 - RNA, 22 nt, Human
ucagaacagcucucagauaucc

SEQ ID NO: 644336 - RNA, 22 nt, Human
aguucaaagcugcaguaaugga

SEQ ID NO: 644337 - RNA, 17 nt, Human
accaaugucagacaaag

SEQ ID NO: 644338 - RNA, 20 nt, Human
cagagcuguuauggaugaug

SEQ ID NO: 644339 - RNA, 22 nt, Human
ucagcugcucaaauuuauguca

SEQ ID NO: 644340 - RNA, 22 nt, Human
ggcuguggggccggguacagug

SEQ ID NO: 644341 - RNA, 22 nt, Human
cacaccagauggcagcguggga

SEQ ID NO: 644342 - RNA, 22 nt, Human
uugggggguugaggaguagaua

SEQ ID NO: 644343 - RNA, 22 nt, Human
ccauugaaccccucuaggccac

SEQ ID NO: 644344 - RNA, 22 nt, Human
ugauucuguaagucauauuguu

SEQ ID NO: 644345 - RNA, 18 nt, Human
acuggcuuuagcaucaga

SEQ ID NO: 644346 - RNA, 22 nt, Human
cagggccccagggaugucugcu

SEQ ID NO: 644347 - RNA, 22 nt, Human
guuaucuucuauuucucauacu

SEQ ID NO: 644348 - RNA, 22 nt, Human
accucuuugaaccucaguguga

SEQ ID NO: 644349 - RNA, 22 nt, Human
aucugcuguguguaauggaaug

SEQ ID NO: 644350 - RNA, 22 nt, Human
ucauugcagaaauaaaggugaa

SEQ ID NO: 644351 - RNA, 22 nt, Human
uuuaaucuucaaaauagucuua

SEQ ID NO: 644352 - RNA, 17 nt, Human
gcagccagugcagcagg

SEQ ID NO: 644353 - RNA, 22 nt, Human
ugcuccagggcugccagacccu

SEQ ID NO: 644354 - RNA, 22 nt, Human
aacacagaagugccaagagcca

SEQ ID NO: 644355 - RNA, 22 nt, Human
cuccugagggaugcuuaggcuu

SEQ ID NO: 644356 - RNA, 22 nt, Human
uaugugcauuauuaccagugga

SEQ ID NO: 644357 - RNA, 22 nt, Human
agaagacagagucuacauucua

SEQ ID NO: 644358 - RNA, 22 nt, Human
guugggaagcagauggaugagc

SEQ ID NO: 644359 - RNA, 22 nt, Human
agcuccugcuugacagaagagg

SEQ ID NO: 644360 - RNA, 22 nt, Human
aagauuuucagugccuaaaaca

SEQ ID NO: 644361 - RNA, 22 nt, Human
acaguguuuggcaaugcaugca

SEQ ID NO: 644362 - RNA, 22 nt, Human
uguauuccaaaaugcugaggau

SEQ ID NO: 644363 - RNA, 22 nt, Human
auuauaaauauuuucuaggggu

SEQ ID NO: 644364 - RNA, 22 nt, Human
uuucucugaggcuggccucccu

SEQ ID NO: 644365 - RNA, 22 nt, Human
cagccagcuggcacugugagua

SEQ ID NO: 644366 - RNA, 19 nt, Human
caagauuuguucacacaug

SEQ ID NO: 644367 - RNA, 22 nt, Human
aggugcagcugguggagucugg

SEQ ID NO: 644368 - RNA, 22 nt, Human
augcagauguuccuacuguguu

SEQ ID NO: 644369 - RNA, 22 nt, Human
aggcaggucacaugcuuggcga

SEQ ID NO: 644370 - RNA, 22 nt, Human
ggcccagccggcgagucucgcg

SEQ ID NO: 644371 - RNA, 22 nt, Human
ucagguaaguguaauauauaga

SEQ ID NO: 644372 - RNA, 22 nt, Human
guccugagcccucagcacagca

SEQ ID NO: 644373 - RNA, 22 nt, Human
gcuggccugagggccgaggcuc

SEQ ID NO: 644374 - RNA, 22 nt, Human
ggagcagccuguguagacgggg

SEQ ID NO: 644375 - RNA, 23 nt, Human
cauguacacacagcuguacagug

SEQ ID NO: 644376 - RNA, 22 nt, Human
gaagaacugacaaacuagauca

SEQ ID NO: 644377 - RNA, 22 nt, Human
acagggcuuguugaaagcggag

SEQ ID NO: 644378 - RNA, 22 nt, Human
ggcuggcuuucucuccgcaccu

SEQ ID NO: 644379 - RNA, 22 nt, Human
ugccuguguccccuucuuggca

SEQ ID NO: 644380 - RNA, 22 nt, Human
gcuccuccaauauggacuccuc

SEQ ID NO: 644381 - RNA, 19 nt, Human
agacacaucacauuucucc

SEQ ID NO: 644382 - RNA, 20 nt, Human
uauuacacacaaugagcagu

SEQ ID NO: 644383 - RNA, 22 nt, Human
agugcacuggcaccaucucagc

SEQ ID NO: 644384 - RNA, 22 nt, Human
ucugggucuuuacccauggaau

SEQ ID NO: 644385 - RNA, 22 nt, Human
aggcagugccuggaccccagcu

SEQ ID NO: 644386 - RNA, 19 nt, Human
ucuagcaacccacugcaug

SEQ ID NO: 644387 - RNA, 22 nt, Human
ggacaggccgccucgguggggg

SEQ ID NO: 644388 - RNA, 22 nt, Human
cagggcaggaugcugugauuau

SEQ ID NO: 644389 - RNA, 22 nt, Human
uguguaaaagauuaguuuacua

SEQ ID NO: 644390 - RNA, 22 nt, Human
cucccaggggagucaucugcuu

SEQ ID NO: 644391 - RNA, 22 nt, Human
agagcugcccacacagcagauu

SEQ ID NO: 644392 - RNA, 20 nt, Human
ugggcagcacugcuggcugg

SEQ ID NO: 644393 - RNA, 22 nt, Human
guagggcaacaugggcacuagg

SEQ ID NO: 644394 - RNA, 22 nt, Human
ugagccagccuugcagcugugc

SEQ ID NO: 644395 - RNA, 19 nt, Human
cagugcuguucauucagug

SEQ ID NO: 644396 - RNA, 22 nt, Human
gcagggcuguaauuugagccug

SEQ ID NO: 644397 - RNA, 22 nt, Human
gcuucaugcuugcuccaaagcu

SEQ ID NO: 644398 - RNA, 23 nt, Human
cauggaaaacugaaagcugaccu

SEQ ID NO: 644399 - RNA, 22 nt, Human
gcuuuaugcaaaccugguacuu

SEQ ID NO: 644400 - RNA, 22 nt, Human
agccggccauguggucuugugc

SEQ ID NO: 644401 - RNA, 22 nt, Human
cucucccuggccagcugugcag

SEQ ID NO: 644402 - RNA, 22 nt, Human
accaugccaguggcagccagac

SEQ ID NO: 644403 - RNA, 22 nt, Human
agcugggacagacaacuauguu

SEQ ID NO: 644404 - RNA, 22 nt, Human
cuauucuguguauuuacuggcu

SEQ ID NO: 644405 - RNA, 22 nt, Human
uuucagauggagguuuaggaca

SEQ ID NO: 644406 - RNA, 22 nt, Human
ggugggguauuugguacuugua

SEQ ID NO: 644407 - RNA, 22 nt, Human
uuaaaugagauguucagauauu

SEQ ID NO: 644408 - RNA, 22 nt, Human
ggucuggccucgggcaccccca

SEQ ID NO: 644409 - RNA, 22 nt, Human
uuguauucauugcuuacccaau

SEQ ID NO: 644410 - RNA, 22 nt, Human
guucacagcaaaccuaugaacu

SEQ ID NO: 644411 - RNA, 22 nt, Human
cuucacacccacuaaaaugaug

SEQ ID NO: 644412 - RNA, 22 nt, Human
aaugacuuugaaauauuugagu

SEQ ID NO: 644413 - RNA, 22 nt, Human
uugguuuguucaccaucaagca

SEQ ID NO: 644414 - RNA, 22 nt, Human
aaaggaauauucaaaacaguca

SEQ ID NO: 644415 - RNA, 22 nt, Human
gagagggagccagccaggaacc

SEQ ID NO: 644416 - RNA, 21 nt, Human
auccuauuucugaaaaccugc

SEQ ID NO: 644417 - RNA, 22 nt, Human
aaugucaaaggcuauacauuca

SEQ ID NO: 644418 - RNA, 22 nt, Human
gagcuagguugagacucacuua

SEQ ID NO: 644419 - RNA, 22 nt, Human
uuaguagaauguuauagcaauu

SEQ ID NO: 644420 - RNA, 20 nt, Human
uucaaguugggucucuggcu

SEQ ID NO: 644421 - RNA, 22 nt, Human
guucuucaucauuaacacucug

SEQ ID NO: 644422 - RNA, 22 nt, Human
gggucagaguucaggucgaggg

SEQ ID NO: 644423 - RNA, 22 nt, Human
uccagugguuugaaaggggugu

SEQ ID NO: 644424 - RNA, 22 nt, Human
aagugguuuuaagagguuccuu

SEQ ID NO: 644425 - RNA, 22 nt, Human
gcuuaaaguuguaaauuagaga

SEQ ID NO: 644426 - RNA, 22 nt, Human
gccuccugacuuacacugagcu

SEQ ID NO: 644427 - RNA, 22 nt, Human
caagagcuacccugugccauau

SEQ ID NO: 644428 - RNA, 22 nt, Human
aguucacauaucuguuuuauuu

SEQ ID NO: 644429 - RNA, 22 nt, Human
augacacauaaaacaaggacug

SEQ ID NO: 644430 - RNA, 22 nt, Human
acauucuucagcuuugucaggc

SEQ ID NO: 644431 - RNA, 22 nt, Human
gggaaggcagugggaggaacug

SEQ ID NO: 644432 - RNA, 22 nt, Human
uacugaagcaccauuaaagaca

SEQ ID NO: 644433 - RNA, 22 nt, Human
gcuguggggagagaacacacaa

SEQ ID NO: 644434 - RNA, 22 nt, Human
agcccagcacugggggcccagc

SEQ ID NO: 644435 - RNA, 22 nt, Human
uuagccauuaaauuacaaggug

SEQ ID NO: 644436 - RNA, 22 nt, Human
uauuugaaggcauacauuuuga

SEQ ID NO: 644437 - RNA, 22 nt, Human
ccucagcucccaugagaucugc

SEQ ID NO: 644438 - RNA, 22 nt, Human
aaguugauuuaaacuacuaguc

SEQ ID NO: 644439 - RNA, 22 nt, Human
ugggaagauaugagugaccaac

SEQ ID NO: 644440 - RNA, 22 nt, Human
aggcuggaaagggaccagagug

SEQ ID NO: 644441 - RNA, 23 nt, Human
uuuggcauguuaacuucacuuac

SEQ ID NO: 644442 - RNA, 22 nt, Human
auuuccaagaaagcuuuaggau

SEQ ID NO: 644443 - RNA, 21 nt, Human
caguauuuuaagcagugaguu

SEQ ID NO: 644444 - RNA, 22 nt, Human
gugugggcagggccgugcuccc

SEQ ID NO: 644445 - RNA, 22 nt, Human
uacuucaaacaaugguacaaac

SEQ ID NO: 644446 - RNA, 22 nt, Human
gagagaagggggauaugagccu

SEQ ID NO: 644447 - RNA, 22 nt, Human
agcccaggagguggagguugca

SEQ ID NO: 644448 - RNA, 22 nt, Human
ggcugggccgcggcuacccaga

SEQ ID NO: 644449 - RNA, 22 nt, Human
caggccugaguguggaagucuu

SEQ ID NO: 644450 - RNA, 22 nt, Human
acagugacacucaggugggaug

SEQ ID NO: 644451 - RNA, 21 nt, Human
aaaugcuuuguauauaucugu

SEQ ID NO: 644452 - RNA, 22 nt, Human
uucuggcuuuaggcuuuucaag

SEQ ID NO: 644453 - RNA, 22 nt, Human
uagaaacugauagucuugugcu

SEQ ID NO: 644454 - RNA, 22 nt, Human
uucacaggauauaugugcaggg

SEQ ID NO: 644455 - RNA, 22 nt, Human
ugccucauaacacuccuggagu

SEQ ID NO: 644456 - RNA, 22 nt, Human
cagggcucaucugugugaccag

SEQ ID NO: 644457 - RNA, 22 nt, Human
ugggaagagggguauaaagaag

SEQ ID NO: 644458 - RNA, 22 nt, Human
ucaugucaguuucuucuauaaa

SEQ ID NO: 644459 - RNA, 22 nt, Human
cauaaaguaggcaagcauucca

SEQ ID NO: 644460 - RNA, 22 nt, Human
uccugagggcucggggcucaug

SEQ ID NO: 644461 - RNA, 22 nt, Human
ugucagggauuuaaagacacaa

SEQ ID NO: 644462 - RNA, 22 nt, Human
aaacugaaguagauucugaaau

SEQ ID NO: 644463 - RNA, 22 nt, Human
uucuucugaaacauaaucaaua

SEQ ID NO: 644464 - RNA, 22 nt, Human
agaugauauacuacauggcuuc

SEQ ID NO: 644465 - RNA, 22 nt, Human
agagccuugcucuaaauuucuc

SEQ ID NO: 644466 - RNA, 20 nt, Human
gcccaggaauuugcauuucu

SEQ ID NO: 644467 - RNA, 23 nt, Human
cucuccaccuucccacccaggga

SEQ ID NO: 644468 - RNA, 22 nt, Human
acaguguucuuggcgcugagug

SEQ ID NO: 644469 - RNA, 22 nt, Human
cccucuggcucuucucaggccg

SEQ ID NO: 644470 - RNA, 22 nt, Human
augauuuuucagcagaggaucu

SEQ ID NO: 644471 - RNA, 22 nt, Human
uggucugauagucugaaaauga

SEQ ID NO: 644472 - RNA, 22 nt, Human
acccaggaggcaagguugcagu

SEQ ID NO: 644473 - RNA, 22 nt, Human
gcggagggcgagcccgcggagc

SEQ ID NO: 644474 - RNA, 22 nt, Human
aauuuccaaauuucugucacac

SEQ ID NO: 644475 - RNA, 22 nt, Human
guggaaugaauagauuugcauu

SEQ ID NO: 644476 - RNA, 22 nt, Human
uucucucugagagcaucuggaa

SEQ ID NO: 644477 - RNA, 19 nt, Human
agaaucaucuugaagugau

SEQ ID NO: 644478 - RNA, 22 nt, Human
ugauuguaugauugaaauauuu

SEQ ID NO: 644479 - RNA, 22 nt, Human
acucuuauuuugaaguaauaau

SEQ ID NO: 644480 - RNA, 22 nt, Human
caugcuaagucauaaaagagua

SEQ ID NO: 644481 - RNA, 22 nt, Human
augcuaaauccagaagcaguca

SEQ ID NO: 644482 - RNA, 22 nt, Human
uucugugugccagaguugugcu

SEQ ID NO: 644483 - RNA, 22 nt, Human
cuuugcuuacuggugucugcau

SEQ ID NO: 644484 - RNA, 22 nt, Human
ccauggcauuuuaugugucuua

SEQ ID NO: 644485 - RNA, 22 nt, Human
uguggcagggauacugaggcag

SEQ ID NO: 644486 - RNA, 22 nt, Human
cugcaggggccucgagcacagg

SEQ ID NO: 644487 - RNA, 22 nt, Human
cugggaguguucuaggucacau

SEQ ID NO: 644488 - RNA, 22 nt, Human
agcucugggcugacaugcuccc

SEQ ID NO: 644489 - RNA, 22 nt, Human
uuuagggaauagaagaucugaa

SEQ ID NO: 644490 - RNA, 23 nt, Human
uaauucacauauacauugcuuca

SEQ ID NO: 644491 - RNA, 22 nt, Human
aagacacugggggcugcagcca

SEQ ID NO: 644492 - RNA, 22 nt, Human
gcagcuuggugaaaggugaugg

SEQ ID NO: 644493 - RNA, 22 nt, Human
agggugcagaaggagccuagga

SEQ ID NO: 644494 - RNA, 20 nt, Human
auacacauauucuugcaacu

SEQ ID NO: 644495 - RNA, 22 nt, Human
uccuucagaaccugugauggaa

SEQ ID NO: 644496 - RNA, 22 nt, Human
gcugggcuggaaggccaaggca

SEQ ID NO: 644497 - RNA, 22 nt, Human
ccucuguggucugucuaaugca

SEQ ID NO: 644498 - RNA, 22 nt, Human
ugucacaugaagccaacauagc

SEQ ID NO: 644499 - RNA, 18 nt, Human
gggaucaggcugccuagg

SEQ ID NO: 644500 - RNA, 22 nt, Human
aaccugagauacuggucuuuau

SEQ ID NO: 644501 - RNA, 22 nt, Human
gagggccagccugccaagggcc

SEQ ID NO: 644502 - RNA, 22 nt, Human
agugggccaaauggaggcaagu

SEQ ID NO: 644503 - RNA, 22 nt, Human
cauuuuacugacucuugaauua

SEQ ID NO: 644504 - RNA, 22 nt, Human
guacacacuguuugaucauuuc

SEQ ID NO: 644505 - RNA, 22 nt, Human
gcacugggaagaaugagccugu

SEQ ID NO: 644506 - RNA, 22 nt, Human
gaaugacauugagccauaacau

SEQ ID NO: 644507 - RNA, 22 nt, Human
gccaccaggagcccaguccaaa

SEQ ID NO: 644508 - RNA, 22 nt, Human
guauuucaucuugaaaaccagu

SEQ ID NO: 644509 - RNA, 22 nt, Human
gucugaggaagaugcaggggga

SEQ ID NO: 644510 - RNA, 22 nt, Human
uccagggcuugacagggugccu

SEQ ID NO: 644511 - RNA, 22 nt, Human
auagcaaaggacaauagucagu

SEQ ID NO: 644512 - RNA, 22 nt, Human
cagaaaccugucuggaguggga

SEQ ID NO: 644513 - RNA, 22 nt, Human
uggucugacuugcuuuggacag

SEQ ID NO: 644514 - RNA, 22 nt, Human
ccucucuuuccuacaccuugga

SEQ ID NO: 644515 - RNA, 22 nt, Human
acucaggaagaaagcagcuggu

SEQ ID NO: 644516 - RNA, 22 nt, Human
agcagagccaggucucucugua

SEQ ID NO: 644517 - RNA, 22 nt, Human
gaaguacaaaggacauggaaac

SEQ ID NO: 644518 - RNA, 18 nt, Human
ggagccagucugucucug

SEQ ID NO: 644519 - RNA, 22 nt, Human
gcccagggugaagugcaguugu

SEQ ID NO: 644520 - RNA, 22 nt, Human
agcucuuacauuuaggucuaug

SEQ ID NO: 644521 - RNA, 19 nt, Human
gcaggguggcagagcucuu

SEQ ID NO: 644522 - RNA, 22 nt, Human
cuuccuugcggccccugccuag

SEQ ID NO: 644523 - RNA, 22 nt, Human
uccaaaggcaaaacuguggugu

SEQ ID NO: 644524 - RNA, 20 nt, Human
cuuugguggggguagcccag

SEQ ID NO: 644525 - RNA, 22 nt, Human
uggcaggauuugcccggaagga

SEQ ID NO: 644526 - RNA, 22 nt, Human
agcaguggccuggggcucugug

SEQ ID NO: 644527 - RNA, 22 nt, Human
agcagcaugaugacagagucuc

SEQ ID NO: 644528 - RNA, 22 nt, Human
aauauaaugcuguuuuaugcca

SEQ ID NO: 644529 - RNA, 22 nt, Human
ugcauuuauaaaauguucgugg

SEQ ID NO: 644530 - RNA, 20 nt, Human
cucuuuucacucucaguggu

SEQ ID NO: 644531 - RNA, 22 nt, Human
uaagaaacauuuuuaugacagu

SEQ ID NO: 644532 - RNA, 22 nt, Human
uuauuucccugaggguugcagg

SEQ ID NO: 644533 - RNA, 22 nt, Human
uuugccugggaauucuagugua

SEQ ID NO: 644534 - RNA, 22 nt, Human
aaggccaggccagaugacaguc

SEQ ID NO: 644535 - RNA, 22 nt, Human
gucuguaauuauuaaagaaagg

SEQ ID NO: 644536 - RNA, 22 nt, Human
uggacagcaaacauggagagaa

SEQ ID NO: 644537 - RNA, 22 nt, Human
gcugucccgcugacuuccagcu

SEQ ID NO: 644538 - RNA, 22 nt, Human
uagcuucagggaaaccacugcu

SEQ ID NO: 644539 - RNA, 22 nt, Human
uguacacaaugauaaauuauua

SEQ ID NO: 644540 - RNA, 22 nt, Human
augggcugagaaucaagaauau

SEQ ID NO: 644541 - RNA, 22 nt, Human
gcucucugccuuucucaaugac

SEQ ID NO: 644542 - RNA, 22 nt, Human
cccaucacagacacuggguuau

SEQ ID NO: 644543 - RNA, 22 nt, Human
uagaaaugaauguuuaaaaguc

SEQ ID NO: 644544 - RNA, 22 nt, Human
gugcccuccguguucauagagc

SEQ ID NO: 644545 - RNA, 22 nt, Human
aacauugcaaauaagcuugcag

SEQ ID NO: 644546 - RNA, 22 nt, Human
uccguauuugacuauugcaccg

SEQ ID NO: 644547 - RNA, 22 nt, Human
auucucagggaguauuuucuau

SEQ ID NO: 644548 - RNA, 22 nt, Human
ugcuggaaauauauuuguuuau

SEQ ID NO: 644549 - RNA, 22 nt, Human
cuucccagacgggguggcagcc

SEQ ID NO: 644550 - RNA, 22 nt, Human
cuucuagauuuuuguaauuguu

SEQ ID NO: 644551 - RNA, 22 nt, Human
auggacagggcacaggcgcaga

SEQ ID NO: 644552 - RNA, 22 nt, Human
ccagaggcuggguucaccucag

SEQ ID NO: 644553 - RNA, 22 nt, Human
ggguagcaugugucagaguuug

SEQ ID NO: 644554 - RNA, 22 nt, Human
gcaccagcugccuucugugccc

SEQ ID NO: 644555 - RNA, 22 nt, Human
cuguauuucuuggacaguugcu

SEQ ID NO: 644556 - RNA, 22 nt, Human
aggaauguuaagaaggucuacc

SEQ ID NO: 644557 - RNA, 23 nt, Human
ucugggcugcuuaaggaucaagg

SEQ ID NO: 644558 - RNA, 22 nt, Human
uggaagcggugcuggcccaugg

SEQ ID NO: 644559 - RNA, 17 nt, Human
gcccucagcuuuaacca

SEQ ID NO: 644560 - RNA, 22 nt, Human
agcucaggucauuccagggaug

SEQ ID NO: 644561 - RNA, 22 nt, Human
agaagcagcuuucaaggugauu

SEQ ID NO: 644562 - RNA, 22 nt, Human
ccagccuggggaggcagcuucu

SEQ ID NO: 644563 - RNA, 22 nt, Human
aguucuaagaugcuccacagag

SEQ ID NO: 644564 - RNA, 22 nt, Human
aagccaguguggucugcccauu

SEQ ID NO: 644565 - RNA, 22 nt, Human
uccuucagggcugaccacaggc

SEQ ID NO: 644566 - RNA, 17 nt, Human
aagagaggcugagcugg

SEQ ID NO: 644567 - RNA, 22 nt, Human
aauagcagaagacuaguagaca

SEQ ID NO: 644568 - RNA, 20 nt, Human
uacuucugaggcacucugaa

SEQ ID NO: 644569 - RNA, 22 nt, Human
caggcaggugcagauuccucuu

SEQ ID NO: 644570 - RNA, 23 nt, Human
ucagcagcagaagugcugggaug

SEQ ID NO: 644571 - RNA, 22 nt, Human
ggagguggagguugcaaugagc

SEQ ID NO: 644572 - RNA, 22 nt, Human
gccuggcaggccugggccagca

SEQ ID NO: 644573 - RNA, 22 nt, Human
cccacagggcugcugauggcag

SEQ ID NO: 644574 - RNA, 22 nt, Human
aaugcauucuuucauggaccug

SEQ ID NO: 644575 - RNA, 22 nt, Human
agcagggcuccugaaagccgcg

SEQ ID NO: 644576 - RNA, 22 nt, Human
ggacaagccugugaguggguuu

SEQ ID NO: 644577 - RNA, 22 nt, Human
cuuguuuucuaaaacaucauuu

SEQ ID NO: 644578 - RNA, 22 nt, Human
augaagaugugaaggcuggauu

SEQ ID NO: 644579 - RNA, 22 nt, Human
agcaccauugcaaauauggcag

SEQ ID NO: 644580 - RNA, 22 nt, Human
auauacacagagcuuaugguga

SEQ ID NO: 644581 - RNA, 22 nt, Human
ccugccugcggcccgcggggag

SEQ ID NO: 644582 - RNA, 20 nt, Human
auguaugcaaaugucuucca

SEQ ID NO: 644583 - RNA, 22 nt, Human
gaaggaaaggucucaugccuuu

SEQ ID NO: 644584 - RNA, 22 nt, Human
uguguuuuaaauggaaauuuga

SEQ ID NO: 644585 - RNA, 22 nt, Human
agcaguuuuuauaacacuggaa

SEQ ID NO: 644586 - RNA, 22 nt, Human
uggcccuggcugaguuagauuu

SEQ ID NO: 644587 - RNA, 22 nt, Human
ugcaaauauuccaugcuguuca

SEQ ID NO: 644588 - RNA, 18 nt, Human
gcagcugacacuggaguu

SEQ ID NO: 644589 - RNA, 22 nt, Human
cuccagcuucccucagcugugg

SEQ ID NO: 644590 - RNA, 22 nt, Human
uaguaaacagcucugccacaau

SEQ ID NO: 644591 - RNA, 22 nt, Human
ugagcagagaugacugggcauu

SEQ ID NO: 644592 - RNA, 22 nt, Human
aaggcagccucugccagccggg

SEQ ID NO: 644593 - RNA, 22 nt, Human
gcauuuggaacuugguugagau

SEQ ID NO: 644594 - RNA, 20 nt, Human
gccaugaggggaggugacug

SEQ ID NO: 644595 - RNA, 22 nt, Human
guagugcuuucaucuggagugu

SEQ ID NO: 644596 - RNA, 22 nt, Human
ggcugagaguggaucccaggga

SEQ ID NO: 644597 - RNA, 22 nt, Human
gcugggaagaacaggagagaau

SEQ ID NO: 644598 - RNA, 22 nt, Human
uaccuuuugcuuauuaugacac

SEQ ID NO: 644599 - RNA, 22 nt, Human
gagguagccacagauagagacu

SEQ ID NO: 644600 - RNA, 22 nt, Human
gcacaacaccaagggagguauc

SEQ ID NO: 644601 - RNA, 22 nt, Human
uccugcagguggaugauucucu

SEQ ID NO: 644602 - RNA, 18 nt, Human
ucucuugcaucuucugua

SEQ ID NO: 644603 - RNA, 22 nt, Human
ugucucugaaauauguggcucc

SEQ ID NO: 644604 - RNA, 19 nt, Human
ccuggccagacuucugccc

SEQ ID NO: 644605 - RNA, 22 nt, Human
acuuccagcaccucaagcggaa

SEQ ID NO: 644606 - RNA, 22 nt, Human
acuucagagaaagagggaauuc

SEQ ID NO: 644607 - RNA, 22 nt, Human
ucuuuguaagaaauucuuccgu

SEQ ID NO: 644608 - RNA, 22 nt, Human
aagagcuggaugaagaaaucaa

SEQ ID NO: 644609 - RNA, 22 nt, Human
gggcugggaauggcuaaguaug

SEQ ID NO: 644610 - RNA, 17 nt, Human
uagcugccccgaaugcu

SEQ ID NO: 644611 - RNA, 22 nt, Human
uccacaugacuucuaauaacug

SEQ ID NO: 644612 - RNA, 22 nt, Human
cuuacauuuaaucaugugucau

SEQ ID NO: 644613 - RNA, 22 nt, Human
cuggaggggcuggcaugguagc

SEQ ID NO: 644614 - RNA, 22 nt, Human
acaguaaggguaaauaagaaca

SEQ ID NO: 644615 - RNA, 22 nt, Human
ggcugaguucucuugcugaauc

SEQ ID NO: 644616 - RNA, 22 nt, Human
acucugaagaagacuuccagac

SEQ ID NO: 644617 - RNA, 22 nt, Human
cugccccacaggcuugguaggg

SEQ ID NO: 644618 - RNA, 22 nt, Human
gaggagcuugaggcuaggagcc

SEQ ID NO: 644619 - RNA, 22 nt, Human
aaagugcaccugcuucuucuug

SEQ ID NO: 644620 - RNA, 22 nt, Human
uaggagacauugaucccaagaa

SEQ ID NO: 644621 - RNA, 22 nt, Human
uucaagacugcgacuaaugccc

SEQ ID NO: 644622 - RNA, 21 nt, Human
acuuugggcacuuuccugccc

SEQ ID NO: 644623 - RNA, 22 nt, Human
caacauauauaaggauuuacua

SEQ ID NO: 644624 - RNA, 22 nt, Human
cugugccagccugucccaggag

SEQ ID NO: 644625 - RNA, 22 nt, Human
ucugauaucgcacuaaacucug

SEQ ID NO: 644626 - RNA, 22 nt, Human
cugggcacaaguggcccuggau

SEQ ID NO: 644627 - RNA, 22 nt, Human
auucugcuaguaacagaugaag

SEQ ID NO: 644628 - RNA, 22 nt, Human
ugauuagacaaaggaaucaugc

SEQ ID NO: 644629 - RNA, 22 nt, Human
aggcugugcaauuaggguaaga

SEQ ID NO: 644630 - RNA, 22 nt, Human
ggaggcauuauggggaagacuu

SEQ ID NO: 644631 - RNA, 23 nt, Human
uggcaaagcauucuuauaacagu

SEQ ID NO: 644632 - RNA, 22 nt, Human
uuuaucaguagcaaaguuuuaa

SEQ ID NO: 644633 - RNA, 22 nt, Human
gagcagaacuacucacauaucg

SEQ ID NO: 644634 - RNA, 22 nt, Human
agaaauaaucagcuuaggggca

SEQ ID NO: 644635 - RNA, 22 nt, Human
aacauuuaugguagucauugca

SEQ ID NO: 644636 - RNA, 22 nt, Human
auacuuugcuaguaucagugug

SEQ ID NO: 644637 - RNA, 22 nt, Human
ucaucugaagauugcuguucaa

SEQ ID NO: 644638 - RNA, 22 nt, Human
acugaauaauggucugugaucu

SEQ ID NO: 644639 - RNA, 22 nt, Human
ugacugugccuguugaaugaau

SEQ ID NO: 644640 - RNA, 22 nt, Human
uacaaucaggcucuagcuucuc

SEQ ID NO: 644641 - RNA, 22 nt, Human
acccaugugcucuuuuguaccc

SEQ ID NO: 644642 - RNA, 22 nt, Human
ugagggagcugaccuuucugug

SEQ ID NO: 644643 - RNA, 23 nt, Human
gugagcagcaccaugaggcuaga

SEQ ID NO: 644644 - RNA, 16 nt, Human
auucacaaggcaucgg

SEQ ID NO: 644645 - RNA, 18 nt, Human
cuccuccacagccccugc

SEQ ID NO: 644646 - RNA, 22 nt, Human
uuuccuugcacauugguuucca

SEQ ID NO: 644647 - RNA, 22 nt, Human
uuucugccagguuucuggauga

SEQ ID NO: 644648 - RNA, 22 nt, Human
auggccagucaagccucuggcu

SEQ ID NO: 644649 - RNA, 22 nt, Human
guuuccuguuucucagcagccc

SEQ ID NO: 644650 - RNA, 22 nt, Human
agcuggccagaugucccaaaga

SEQ ID NO: 644651 - RNA, 22 nt, Human
ggcacucagagauucaggcugu

SEQ ID NO: 644652 - RNA, 22 nt, Human
ucaggagaaggcaauguggaaa

SEQ ID NO: 644653 - RNA, 22 nt, Human
ucuggaaguuagaggaggaaag

SEQ ID NO: 644654 - RNA, 23 nt, Human
aucugaaaaggcauuuucuuccc

SEQ ID NO: 644655 - RNA, 22 nt, Human
aacuuuucacaggcuagcucuu

SEQ ID NO: 644656 - RNA, 22 nt, Human
ucagcccuagccucaguccagg

SEQ ID NO: 644657 - RNA, 22 nt, Human
augcauauauacauacacaguc

SEQ ID NO: 644658 - RNA, 22 nt, Human
cugggucuccggcagccucggg

SEQ ID NO: 644659 - RNA, 22 nt, Human
acuguagcugccacuggaugca

SEQ ID NO: 644660 - RNA, 22 nt, Human
aggcuggugcuuccuagggcag

SEQ ID NO: 644661 - RNA, 22 nt, Human
aggucugaguagagaaaaggca

SEQ ID NO: 644662 - RNA, 22 nt, Human
agugccuggcacauggaaggug

SEQ ID NO: 644663 - RNA, 22 nt, Human
aaauuagaagugcucaggaaua

SEQ ID NO: 644664 - RNA, 22 nt, Human
cuucccugagcuuucucaggcu

SEQ ID NO: 644665 - RNA, 22 nt, Human
aaugaacaagaaagacuuugag

SEQ ID NO: 644666 - RNA, 22 nt, Human
uaucaguagaacaauggacauu

SEQ ID NO: 644667 - RNA, 20 nt, Human
auauaauaaauuuugguuac

SEQ ID NO: 644668 - RNA, 22 nt, Human
cacuggcagauuugggaucugg

SEQ ID NO: 644669 - RNA, 22 nt, Human
ugaacuuagugggaauaucucu

SEQ ID NO: 644670 - RNA, 18 nt, Human
gauauauaggaggaaagu

SEQ ID NO: 644671 - RNA, 22 nt, Human
ucugccugaaccacucuuggag

SEQ ID NO: 644672 - RNA, 22 nt, Human
gcagggaaggggcaugcuggag

SEQ ID NO: 644673 - RNA, 22 nt, Human
uuggagagcaguaaaccacacu

SEQ ID NO: 644674 - RNA, 22 nt, Human
gcuuucugaagcaguguuucuc

SEQ ID NO: 644675 - RNA, 22 nt, Human
agaauaaucacugaaguucaaa

SEQ ID NO: 644676 - RNA, 22 nt, Human
augaaugcuuauuaaauugaaa

SEQ ID NO: 644677 - RNA, 22 nt, Human
ccugggcaaaugccagagacaa

SEQ ID NO: 644678 - RNA, 20 nt, Human
cuggaguguagcaguggcug

SEQ ID NO: 644679 - RNA, 22 nt, Human
ugaaugcacugcucuccuagga

SEQ ID NO: 644680 - RNA, 22 nt, Human
uggaugagucugagauugggca

SEQ ID NO: 644681 - RNA, 22 nt, Human
uacaaaguuuucuuggauugag

SEQ ID NO: 644682 - RNA, 22 nt, Human
gacacagacaguuagagguaau

SEQ ID NO: 644683 - RNA, 22 nt, Human
uaugagugguugaaugguaaac

SEQ ID NO: 644684 - RNA, 22 nt, Human
aaagagaaacuuagaagccuga

SEQ ID NO: 644685 - RNA, 22 nt, Human
aaacaaagcaucuugcuaugca

SEQ ID NO: 644686 - RNA, 19 nt, Human
ucaaggcucccugagggau

SEQ ID NO: 644687 - RNA, 22 nt, Human
gcugcucuguuaauugcuguaa

SEQ ID NO: 644688 - RNA, 22 nt, Human
cucaguuugagggguagguguu

SEQ ID NO: 644689 - RNA, 22 nt, Human
ccugggugguuccggcaaggag

SEQ ID NO: 644690 - RNA, 22 nt, Human
gggagcuuaagacaguuccaau

SEQ ID NO: 644691 - RNA, 22 nt, Human
uggcacgacaauuggcaccaau

SEQ ID NO: 644692 - RNA, 22 nt, Human
ccagggcuggugggagaugcug

SEQ ID NO: 644693 - RNA, 22 nt, Human
ugcugagagauuuaaagggcca

SEQ ID NO: 644694 - RNA, 22 nt, Human
uuacaaaguuuaagguggcacu

SEQ ID NO: 644695 - RNA, 22 nt, Human
uacauauuguccauaguugcuu

SEQ ID NO: 644696 - RNA, 22 nt, Human
auuuaguguguauugcuauuau

SEQ ID NO: 644697 - RNA, 22 nt, Human
guuuaaguuucagaagcuaaga

SEQ ID NO: 644698 - RNA, 22 nt, Human
cuaaagaauuuugcuugaccag

SEQ ID NO: 644699 - RNA, 22 nt, Human
guggcucacgucugucaucuca

SEQ ID NO: 644700 - RNA, 22 nt, Human
guccucuggaagaugaguucuu

SEQ ID NO: 644701 - RNA, 20 nt, Human
gcugggggugugcugaguga

SEQ ID NO: 644702 - RNA, 22 nt, Human
gggcgggguggcucaugccugu

SEQ ID NO: 644703 - RNA, 22 nt, Human
uuguguauuuuuugauacuaac

SEQ ID NO: 644704 - RNA, 22 nt, Human
ggaaucagagcagaggcuguua

SEQ ID NO: 644705 - RNA, 22 nt, Human
uuugugugaaaauauuuaaguu

SEQ ID NO: 644706 - RNA, 22 nt, Human
uagagagagcugugguggcucu

SEQ ID NO: 644707 - RNA, 22 nt, Human
guccuccauggucuugaaguaa

SEQ ID NO: 644708 - RNA, 22 nt, Human
uauguuucauucuuuucuggua

SEQ ID NO: 644709 - RNA, 22 nt, Human
ugacucuguaccugucugccuu

SEQ ID NO: 644710 - RNA, 22 nt, Human
uaucauuuuacugugacauuuu

SEQ ID NO: 644711 - RNA, 22 nt, Human
uuccuucuuguaaugaucugcc

SEQ ID NO: 644712 - RNA, 22 nt, Human
uuacacaugucucaguggaaau

SEQ ID NO: 644713 - RNA, 21 nt, Human
gccugcaguuuugaagcccuu

SEQ ID NO: 644714 - RNA, 22 nt, Human
agggccaguaaauguuuccuca

SEQ ID NO: 644715 - RNA, 22 nt, Human
ucauccauacuauugagaggca

SEQ ID NO: 644716 - RNA, 22 nt, Human
gauucuggcaaaauccuggcuu

SEQ ID NO: 644717 - RNA, 22 nt, Human
caagcuuuccauuacacacauu

SEQ ID NO: 644718 - RNA, 22 nt, Human
ugucaccuuuacccuuuuauag

SEQ ID NO: 644719 - RNA, 22 nt, Human
auugaacuaaauaagcagucau

SEQ ID NO: 644720 - RNA, 22 nt, Human
aauccugugugacucuggggag

SEQ ID NO: 644721 - RNA, 22 nt, Human
cacaggaagaucucccagaggu

SEQ ID NO: 644722 - RNA, 22 nt, Human
ucucaucucaaauuguaauccc

SEQ ID NO: 644723 - RNA, 22 nt, Human
aggauggggucugcagccuggu

SEQ ID NO: 644724 - RNA, 22 nt, Human
gcauuuguuccgcuuugucauc

SEQ ID NO: 644725 - RNA, 22 nt, Human
ggccugugcugucagcccuagu

SEQ ID NO: 644726 - RNA, 22 nt, Human
uuacagauucaagcucuuugaa

SEQ ID NO: 644727 - RNA, 22 nt, Human
aaugucaaacagagcagagcua

SEQ ID NO: 644728 - RNA, 19 nt, Human
ucauaaggagagaggaaau

SEQ ID NO: 644729 - RNA, 14 nt, Human
uccagagcuuuccg

SEQ ID NO: 644730 - RNA, 22 nt, Human
gggcuccaguuguccccaggau

SEQ ID NO: 644731 - RNA, 22 nt, Human
ucagcucuacacacaccugugu

SEQ ID NO: 644732 - RNA, 22 nt, Human
aaauugauguucccaguugaaa

SEQ ID NO: 644733 - RNA, 23 nt, Human
ucuuuucaaugguucuuuaugug

SEQ ID NO: 644734 - RNA, 22 nt, Human
guauacaugugguaaaaugcac

SEQ ID NO: 644735 - RNA, 22 nt, Human
aaccacaacacuaaaugcuggu

SEQ ID NO: 644736 - RNA, 22 nt, Human
uggcucagcugucacagccugg

SEQ ID NO: 644737 - RNA, 22 nt, Human
ucugcugcuacagacucucuag

SEQ ID NO: 644738 - RNA, 22 nt, Human
gcaaacauucaggaguacagga

SEQ ID NO: 644739 - RNA, 22 nt, Human
ugggccuugcugagcuauggag

SEQ ID NO: 644740 - RNA, 22 nt, Human
agaagucagccacagugggaga

SEQ ID NO: 644741 - RNA, 22 nt, Human
caagguuucuaugcucaaagga

SEQ ID NO: 644742 - RNA, 20 nt, Human
gcccuggacguggccucggc

SEQ ID NO: 644743 - RNA, 22 nt, Human
uaaaucacuccuaauaaucagu

SEQ ID NO: 644744 - RNA, 22 nt, Human
uucuaagucacucagauuuugg

SEQ ID NO: 644745 - RNA, 22 nt, Human
cgcaggcuuuagaaucugcuac

SEQ ID NO: 644746 - RNA, 22 nt, Human
acucugcccuaggccucugggg

SEQ ID NO: 644747 - RNA, 20 nt, Human
cacuguggcacauugguuua

SEQ ID NO: 644748 - RNA, 22 nt, Human
aggacaauugagaguuuguuga

SEQ ID NO: 644749 - RNA, 22 nt, Human
ucauuuacuggauccauaagca

SEQ ID NO: 644750 - RNA, 22 nt, Human
ggagggugcuuaaguuguguuu

SEQ ID NO: 644751 - RNA, 22 nt, Human
cccucucuuagaagaaacacag

SEQ ID NO: 644752 - RNA, 22 nt, Human
gucagaggggacaagacacaga

SEQ ID NO: 644753 - RNA, 23 nt, Human
uggagcugggcagcugggaaagu

SEQ ID NO: 644754 - RNA, 23 nt, Human
uuuauauuccuaaugucuugagc

SEQ ID NO: 644755 - RNA, 22 nt, Human
accugcaguggccacuccuaau

SEQ ID NO: 644756 - RNA, 21 nt, Human
ugcuccagggcagcuuccagc

SEQ ID NO: 644757 - RNA, 21 nt, Human
cacaagacacauaggguguuu

SEQ ID NO: 644758 - RNA, 22 nt, Human
uggaggaaguggcuggccagaa

SEQ ID NO: 644759 - RNA, 22 nt, Human
uucacauuugcccuuaugugug

SEQ ID NO: 644760 - RNA, 19 nt, Human
aguaugucuaugagucuuu

SEQ ID NO: 644761 - RNA, 22 nt, Human
uccugaaaugugcacaugacau

SEQ ID NO: 644762 - RNA, 22 nt, Human
ugcuucugaugugagcagcccc

SEQ ID NO: 644763 - RNA, 22 nt, Human
uccugggcaaagaggggcagug

SEQ ID NO: 644764 - RNA, 22 nt, Human
uuuaauuuuccugguaggccug

SEQ ID NO: 644765 - RNA, 21 nt, Human
ugggaugggucugggaccagc

SEQ ID NO: 644766 - RNA, 18 nt, Human
caggaauggaugggauuu

SEQ ID NO: 644767 - RNA, 19 nt, Human
agauaagaguugacugugg

SEQ ID NO: 644768 - RNA, 22 nt, Human
aaagucuuaauguaaguuuagu

SEQ ID NO: 644769 - RNA, 18 nt, Human
uuggcuucuuuccuuccu

SEQ ID NO: 644770 - RNA, 22 nt, Human
uuuagagagaauuuucaaagug

SEQ ID NO: 644771 - RNA, 22 nt, Human
ccucagugaguguuuccuucuu

SEQ ID NO: 644772 - RNA, 22 nt, Human
ggcugugaacccuggcagugug

SEQ ID NO: 644773 - RNA, 22 nt, Human
gaagcuaaaccacagcuaagaa

SEQ ID NO: 644774 - RNA, 22 nt, Human
uaagucaucccauaacagugcu

SEQ ID NO: 644775 - RNA, 22 nt, Human
cacaugaucgucaugugaaagu

SEQ ID NO: 644776 - RNA, 22 nt, Human
augcagcuauuugagcauguca

SEQ ID NO: 644777 - RNA, 22 nt, Human
agcuguggcagcacuuuggagu

SEQ ID NO: 644778 - RNA, 19 nt, Human
gcuggauggauccuggagu

SEQ ID NO: 644779 - RNA, 22 nt, Human
aggcugugaacucuaugcugaa

SEQ ID NO: 644780 - RNA, 22 nt, Human
guucacaaauaugcacuuacga

SEQ ID NO: 644781 - RNA, 22 nt, Human
ugggcagauguccucugaagug

SEQ ID NO: 644782 - RNA, 22 nt, Human
uaaagugcccagggaaagcggg

SEQ ID NO: 644783 - RNA, 22 nt, Human
uaggccacgaaggagaugauag

SEQ ID NO: 644784 - RNA, 22 nt, Human
agagacuggaguuacgaguuca

SEQ ID NO: 644785 - RNA, 23 nt, Human
ggaagcucacguaguccugcacu

SEQ ID NO: 644786 - RNA, 22 nt, Human
ugcuggagcuccgggcuguagg

SEQ ID NO: 644787 - RNA, 22 nt, Human
gugucccaggagaggagacaau

SEQ ID NO: 644788 - RNA, 22 nt, Human
aggaauuuagacagggcauaaa

SEQ ID NO: 644789 - RNA, 19 nt, Human
uggggcuguguuuugaccc

SEQ ID NO: 644790 - RNA, 22 nt, Human
gugcucacugugagacguccug

SEQ ID NO: 644791 - RNA, 22 nt, Human
uuuacccauucagacucacuug

SEQ ID NO: 644792 - RNA, 18 nt, Human
gccagagcauaucuccag

SEQ ID NO: 644793 - RNA, 22 nt, Human
agagaacagcauugcagcuuug

SEQ ID NO: 644794 - RNA, 22 nt, Human
agaagccaugguaugcaacuac

SEQ ID NO: 644795 - RNA, 22 nt, Human
augacagaggagugcaggugau

SEQ ID NO: 644796 - RNA, 22 nt, Human
gcacagguugcaaaaguucaca

SEQ ID NO: 644797 - RNA, 22 nt, Human
uugcuuuacggcaaggccccag

SEQ ID NO: 644798 - RNA, 22 nt, Human
acacuccagggagggagggaau

SEQ ID NO: 644799 - RNA, 22 nt, Human
uccucaggucaaagcaggagaa

SEQ ID NO: 644800 - RNA, 22 nt, Human
agucacugucaaagccacacac

SEQ ID NO: 644801 - RNA, 22 nt, Human
cagugccaugucugagccccua

SEQ ID NO: 644802 - RNA, 22 nt, Human
acugaugaaaacuaauaaauua

SEQ ID NO: 644803 - RNA, 22 nt, Human
cugaaaauguuacacaggaaga

SEQ ID NO: 644804 - RNA, 19 nt, Human
aaaucagaaucugcauuuu

SEQ ID NO: 644805 - RNA, 22 nt, Human
gcugguccacauccugguacgu

SEQ ID NO: 644806 - RNA, 22 nt, Human
ggguaggcagugcguccugccu

SEQ ID NO: 644807 - RNA, 20 nt, Human
gcagaugagacucacagagg

SEQ ID NO: 644808 - RNA, 22 nt, Human
ccuggggaaucuugcaggggaa

SEQ ID NO: 644809 - RNA, 22 nt, Human
uagaagaucuuaaaagcugacu

SEQ ID NO: 644810 - RNA, 22 nt, Human
ccuccauguaaagguccccuca

SEQ ID NO: 644811 - RNA, 22 nt, Human
auuauucaauguuauuucagug

SEQ ID NO: 644812 - RNA, 22 nt, Human
ucauggaugggcccagcucugu

SEQ ID NO: 644813 - RNA, 22 nt, Human
aaauaguucagccacggugacu

SEQ ID NO: 644814 - RNA, 17 nt, Human
auuuccucagggcugag

SEQ ID NO: 644815 - RNA, 23 nt, Human
aaggccagaauuucaauggugcc

SEQ ID NO: 644816 - RNA, 22 nt, Human
cuccuguugcacuaguuccuga

SEQ ID NO: 644817 - RNA, 22 nt, Human
ucuucauguauacucaugguac

SEQ ID NO: 644818 - RNA, 22 nt, Human
augucugcaaauaucugccagu

SEQ ID NO: 644819 - RNA, 22 nt, Human
uuacacaacaucuguauuauua

SEQ ID NO: 644820 - RNA, 19 nt, Human
ccaggccaucccaguuccc

SEQ ID NO: 644821 - RNA, 22 nt, Human
cacugcuaugaugaugauauuu

SEQ ID NO: 644822 - RNA, 22 nt, Human
caggguggcaggcaccauggcc

SEQ ID NO: 644823 - RNA, 22 nt, Human
ugaagagaagaaaauuaucuuu

SEQ ID NO: 644824 - RNA, 22 nt, Human
gaaagcacugugagaucuuguu

SEQ ID NO: 644825 - RNA, 22 nt, Human
aaauguuccauuauuguguaau

SEQ ID NO: 644826 - RNA, 22 nt, Human
ugggcuguccagcaccugggcu

SEQ ID NO: 644827 - RNA, 22 nt, Human
uagaggggaaucugccuccucu

SEQ ID NO: 644828 - RNA, 22 nt, Human
ggcaggcuccaagcauccuaug

SEQ ID NO: 644829 - RNA, 22 nt, Human
aggcuggagagugcaguggcgu

SEQ ID NO: 644830 - RNA, 22 nt, Human
aaccuuugaggggagcucuuuc

SEQ ID NO: 644831 - RNA, 22 nt, Human
uacauguaguucacugguggca

SEQ ID NO: 644832 - RNA, 22 nt, Human
augcugagguguguuuaauuua

SEQ ID NO: 644833 - RNA, 22 nt, Human
ucuucaauuuagaauggauuua

SEQ ID NO: 644834 - RNA, 22 nt, Human
uacauaguauucacauuguuuu

SEQ ID NO: 644835 - RNA, 22 nt, Human
uuccaugaaagugaaauggagc

SEQ ID NO: 644836 - RNA, 22 nt, Human
agcuggagaucaugcugauacu

SEQ ID NO: 644837 - RNA, 23 nt, Human
agaucacauaguuaucagaugac

SEQ ID NO: 644838 - RNA, 22 nt, Human
uggggugacagugcagugguca

SEQ ID NO: 644839 - RNA, 22 nt, Human
uuacagcaaagugcgcagaccu

SEQ ID NO: 644840 - RNA, 22 nt, Human
ggagggugggucauucuuacau

SEQ ID NO: 644841 - RNA, 22 nt, Human
agguggcucugacagcucuggu

SEQ ID NO: 644842 - RNA, 22 nt, Human
agcccaugguguacucuguggc

SEQ ID NO: 644843 - RNA, 22 nt, Human
ucacagaauugacaugggaauc

SEQ ID NO: 644844 - RNA, 17 nt, Human
ucugucuugacugucac

SEQ ID NO: 644845 - RNA, 22 nt, Human
gccaggcagacaggucaucagg

SEQ ID NO: 644846 - RNA, 22 nt, Human
cccaggguccggauaacccugg

SEQ ID NO: 644847 - RNA, 22 nt, Human
uggcuaaacccuaguaaauuaa

SEQ ID NO: 644848 - RNA, 22 nt, Human
uaaaucacaaauuuucucauuu

SEQ ID NO: 644849 - RNA, 22 nt, Human
cucuugaagcaggggccaguuc

SEQ ID NO: 644850 - RNA, 22 nt, Human
augggcaguaacaguggcaguc

SEQ ID NO: 644851 - RNA, 22 nt, Human
caggaagucgcagagcuggggg

SEQ ID NO: 644852 - RNA, 22 nt, Human
guuucucagcaugucaguacaa

SEQ ID NO: 644853 - RNA, 22 nt, Human
guaaccugggauguagcacaga

SEQ ID NO: 644854 - RNA, 22 nt, Human
uguugcgaugaagagcuucacg

SEQ ID NO: 644855 - RNA, 22 nt, Human
uggagagcuccuauuugcuguc

SEQ ID NO: 644856 - RNA, 22 nt, Human
uucaccuggcacaugugagccu

SEQ ID NO: 644857 - RNA, 22 nt, Human
uguguuucagaaccuucuuuca

SEQ ID NO: 644858 - RNA, 22 nt, Human
ccugggcaucaacaagcagaga

SEQ ID NO: 644859 - RNA, 22 nt, Human
cagagggcucuuggcugccugc

SEQ ID NO: 644860 - RNA, 22 nt, Human
cucaggauuaaggaaucuaaau

SEQ ID NO: 644861 - RNA, 22 nt, Human
cagcuuuuuagaaucuagggca

SEQ ID NO: 644862 - RNA, 22 nt, Human
acacugagauuuuccugacacc

SEQ ID NO: 644863 - RNA, 22 nt, Human
ugugcagaaacugggaaggaag

SEQ ID NO: 644864 - RNA, 22 nt, Human
caaauugcuaacugucagacua

SEQ ID NO: 644865 - RNA, 22 nt, Human
ucucccucuguaagaucagggg

SEQ ID NO: 644866 - RNA, 18 nt, Human
gcccagaggucugggccc

SEQ ID NO: 644867 - RNA, 22 nt, Human
uuguggcagaccaugagucuaa

SEQ ID NO: 644868 - RNA, 22 nt, Human
aaaacuguaggaauugggugcc

SEQ ID NO: 644869 - RNA, 22 nt, Human
cauucauauuugcaguauaccu

SEQ ID NO: 644870 - RNA, 22 nt, Human
aucuggaacaaagcuuaggaau

SEQ ID NO: 644871 - RNA, 22 nt, Human
caggcacuguguuaggcacugu

SEQ ID NO: 644872 - RNA, 22 nt, Human
agcauuuaggagaauuugagaa

SEQ ID NO: 644873 - RNA, 22 nt, Human
acagccaggagccaugggcagg

SEQ ID NO: 644874 - RNA, 22 nt, Human
gcccaggaggcagagguugugg

SEQ ID NO: 644875 - RNA, 22 nt, Human
ugaggcucaagaaagauuuguu

SEQ ID NO: 644876 - RNA, 22 nt, Human
uucagacaggcagcugggcugg

SEQ ID NO: 644877 - RNA, 22 nt, Human
ucuaauugcaauucucagagau

SEQ ID NO: 644878 - RNA, 22 nt, Human
aucuggcucucucauuuacaaa

SEQ ID NO: 644879 - RNA, 22 nt, Human
uaccuggaaaaguuauaugugu

SEQ ID NO: 644880 - RNA, 22 nt, Human
uccucagcuuugguuuacucau

SEQ ID NO: 644881 - RNA, 22 nt, Human
uauuuuguuaauaauccagucc

SEQ ID NO: 644882 - RNA, 22 nt, Human
ugccagggccauagggagucua

SEQ ID NO: 644883 - RNA, 22 nt, Human
gauauaaauuaaucaagugcaa

SEQ ID NO: 644884 - RNA, 22 nt, Human
cguuaguggaguuugaagcugu

SEQ ID NO: 644885 - RNA, 22 nt, Human
agauuucaaugugagcauuagu

SEQ ID NO: 644886 - RNA, 18 nt, Human
uugagggaggggcagagu

SEQ ID NO: 644887 - RNA, 22 nt, Human
gugcaggaucucagaacaagug

SEQ ID NO: 644888 - RNA, 22 nt, Human
accauccaaacugcuuucugug

SEQ ID NO: 644889 - RNA, 22 nt, Human
cauggggaugaggcugagacuu

SEQ ID NO: 644890 - RNA, 22 nt, Human
auguugcacaaaguccauccau

SEQ ID NO: 644891 - RNA, 22 nt, Human
caggagauguaagacuucuguu

SEQ ID NO: 644892 - RNA, 19 nt, Human
ucaaugcaugaaaucagcc

SEQ ID NO: 644893 - RNA, 23 nt, Human
agaggcaggaguggcuugcccgg

SEQ ID NO: 644894 - RNA, 22 nt, Human
cuguugucccugggagcucagc

SEQ ID NO: 644895 - RNA, 22 nt, Human
cuccccauggcaacaguuaugg

SEQ ID NO: 644896 - RNA, 22 nt, Human
ccucacugcuauguguuugcuc

SEQ ID NO: 644897 - RNA, 22 nt, Human
ugagccuggagucguggagggg

SEQ ID NO: 644898 - RNA, 22 nt, Human
guauuccugcaaauagcaguga

SEQ ID NO: 644899 - RNA, 22 nt, Human
aaguuccugggccaaguccagg

SEQ ID NO: 644900 - RNA, 22 nt, Human
ugugcuuugguuuuacaggaug

SEQ ID NO: 644901 - RNA, 22 nt, Human
aucacaguggcagggauuuggg

SEQ ID NO: 644902 - RNA, 18 nt, Human
gagaggagccagaauuuu

SEQ ID NO: 644903 - RNA, 19 nt, Human
uuucagacauuucaaauuu

SEQ ID NO: 644904 - RNA, 21 nt, Human
uccagccaguaaaugcucagc

SEQ ID NO: 644905 - RNA, 22 nt, Human
aaauagcauaaaauaggaagcu

SEQ ID NO: 644906 - RNA, 22 nt, Human
ggcuccuggcaucuggugggua

SEQ ID NO: 644907 - RNA, 22 nt, Human
ucagcacuuuuuaaagcagcau

SEQ ID NO: 644908 - RNA, 23 nt, Human
ugugggcgcauuguaaggguagc

SEQ ID NO: 644909 - RNA, 22 nt, Human
ccccaggacguggcccucauag

SEQ ID NO: 644910 - RNA, 19 nt, Human
ccugucugucuucagcuag

SEQ ID NO: 644911 - RNA, 22 nt, Human
uagaaaugauugguugagcucu

SEQ ID NO: 644912 - RNA, 22 nt, Human
gcuccugucuuggggcacuggc

SEQ ID NO: 644913 - RNA, 22 nt, Human
uguaaguaguaauggaaggaca

SEQ ID NO: 644914 - RNA, 22 nt, Human
acccagagauggaccuggcugc

SEQ ID NO: 644915 - RNA, 22 nt, Human
agaagcugcguuuauuuaaauc

SEQ ID NO: 644916 - RNA, 22 nt, Human
augugucuggcauggcucuauu

SEQ ID NO: 644917 - RNA, 22 nt, Human
augggaggaagagaagaugucu

SEQ ID NO: 644918 - RNA, 17 nt, Human
ugcagcaaaugggggac

SEQ ID NO: 644919 - RNA, 22 nt, Human
ucacccagggacugugauggaa

SEQ ID NO: 644920 - RNA, 22 nt, Human
cagagagagucaaaucuuugcu

SEQ ID NO: 644921 - RNA, 22 nt, Human
agaaugugaagauuuugaauua

SEQ ID NO: 644922 - RNA, 22 nt, Human
augauguaauggaaagaacaga

SEQ ID NO: 644923 - RNA, 22 nt, Human
uccagggaucuuuagagucuuu

SEQ ID NO: 644924 - RNA, 22 nt, Human
ugaaggcccuaucuccauauac

SEQ ID NO: 644925 - RNA, 22 nt, Human
gaacuucuucaacauaauggac

SEQ ID NO: 644926 - RNA, 22 nt, Human
gcugccucugcacagcucacuc

SEQ ID NO: 644927 - RNA, 22 nt, Human
uucccaggacucugggugucuu

SEQ ID NO: 644928 - RNA, 22 nt, Human
aguuuacagaugcuacaggagc

SEQ ID NO: 644929 - RNA, 22 nt, Human
ccacuggcuuuuccuaggucuc

SEQ ID NO: 644930 - RNA, 22 nt, Human
gaacagacuuggaggagugauc

SEQ ID NO: 644931 - RNA, 22 nt, Human
gucuucuuguguugccugucuu

SEQ ID NO: 644932 - RNA, 22 nt, Human
uccuguuuaggcuguggucugg

SEQ ID NO: 644933 - RNA, 22 nt, Human
uuagcaagaaagauugcagcac

SEQ ID NO: 644934 - RNA, 19 nt, Human
auaaggcaauuggauuugg

SEQ ID NO: 644935 - RNA, 22 nt, Human
gcaugcaggaaguuuuuuggga

SEQ ID NO: 644936 - RNA, 22 nt, Human
uuggcccacaguaccaugcugu

SEQ ID NO: 644937 - RNA, 22 nt, Human
uuaggaaauuccaccuguauuc

SEQ ID NO: 644938 - RNA, 19 nt, Human
aaaguguuuucuuuucugu

SEQ ID NO: 644939 - RNA, 22 nt, Human
uaguuacagcaggcaggauaua

SEQ ID NO: 644940 - RNA, 22 nt, Human
aaaaauaggucaaccguguaug

SEQ ID NO: 644941 - RNA, 22 nt, Human
auguuuaugcaaacaugugagu

SEQ ID NO: 644942 - RNA, 22 nt, Human
uacuccugcugauccugccagc

SEQ ID NO: 644943 - RNA, 22 nt, Human
ggacugggccagggguuggacu

SEQ ID NO: 644944 - RNA, 22 nt, Human
gagccuggauugucaccgacuu

SEQ ID NO: 644945 - RNA, 22 nt, Human
auguguucacgugcacaugugc

SEQ ID NO: 644946 - RNA, 22 nt, Human
cugccaggccucaucccagcca

SEQ ID NO: 644947 - RNA, 22 nt, Human
caggaagggaaaauaguucggg

SEQ ID NO: 644948 - RNA, 22 nt, Human
agcugucugugaacacagcauu

SEQ ID NO: 644949 - RNA, 22 nt, Human
cagauaaaauuaauauuaccaa

SEQ ID NO: 644950 - RNA, 22 nt, Human
uagggcuuugcgauggcuauuc

SEQ ID NO: 644951 - RNA, 22 nt, Human
auguaacuucugugaaucugac

SEQ ID NO: 644952 - RNA, 22 nt, Human
agugcaaauuauuuaccugauu

SEQ ID NO: 644953 - RNA, 22 nt, Human
cuggugccuccucccugugcuu

SEQ ID NO: 644954 - RNA, 22 nt, Human
aauaguccucuccuuggaauuu

SEQ ID NO: 644955 - RNA, 22 nt, Human
uuagcacuggauuucaucagaa

SEQ ID NO: 644956 - RNA, 22 nt, Human
acagugcagugugaugaguauu

SEQ ID NO: 644957 - RNA, 22 nt, Human
agaguucacacucagugcaccc

SEQ ID NO: 644958 - RNA, 22 nt, Human
ggcagugagucccggagaggcc

SEQ ID NO: 644959 - RNA, 22 nt, Human
acuccagggcuccaccccagau

SEQ ID NO: 644960 - RNA, 22 nt, Human
gcugcuuccuuuccugcugacc

SEQ ID NO: 644961 - RNA, 22 nt, Human
augcaggauuagaaaguugccu

SEQ ID NO: 644962 - RNA, 22 nt, Human
augaacaauaaucaugucuaug

SEQ ID NO: 644963 - RNA, 22 nt, Human
auuucucaguaaucucagcaau

SEQ ID NO: 644964 - RNA, 22 nt, Human
uccaggccucuagcccucucuu

SEQ ID NO: 644965 - RNA, 22 nt, Human
agcagcagauccaaaaaaugug

SEQ ID NO: 644966 - RNA, 22 nt, Human
agucuguggggucccuggggca

SEQ ID NO: 644967 - RNA, 22 nt, Human
ucuucauguugcuuauucuggg

SEQ ID NO: 644968 - RNA, 22 nt, Human
aagugauacguguuuauuucca

SEQ ID NO: 644969 - RNA, 22 nt, Human
uauuuaaaauagugcuccagca

SEQ ID NO: 644970 - RNA, 22 nt, Human
acucagaguagaaaauagguuc

SEQ ID NO: 644971 - RNA, 20 nt, Human
ggugcugauaagaaagaagu

SEQ ID NO: 644972 - RNA, 22 nt, Human
aucgagggugaguacagcggac

SEQ ID NO: 644973 - RNA, 22 nt, Human
aguuuaacuuuguaaacgugag

SEQ ID NO: 644974 - RNA, 21 nt, Human
ggaaagaaggcaaggcucagg

SEQ ID NO: 644975 - RNA, 22 nt, Human
gagagguguguuucagauaaga

SEQ ID NO: 644976 - RNA, 22 nt, Human
gcauccagucuuggcuccugga

SEQ ID NO: 644977 - RNA, 23 nt, Human
gggaccagcuagggcugugaccu

SEQ ID NO: 644978 - RNA, 22 nt, Human
uguaaucauuacaguacaugga

SEQ ID NO: 644979 - RNA, 22 nt, Human
cuagagaacaacauucauaugg

SEQ ID NO: 644980 - RNA, 22 nt, Human
agugcauucuggcagaacaggu

SEQ ID NO: 644981 - RNA, 22 nt, Human
uggcuucagucucaucuuggaa

SEQ ID NO: 644982 - RNA, 22 nt, Human
gagcacagauugauuuaaaaua

SEQ ID NO: 644983 - RNA, 22 nt, Human
uggagauggccucaggcccuca

SEQ ID NO: 644984 - RNA, 22 nt, Human
gcucagguagaugggguugucc

SEQ ID NO: 644985 - RNA, 22 nt, Human
aagauucucagagugaaagaau

SEQ ID NO: 644986 - RNA, 22 nt, Human
agauuucccacuccauguauug

SEQ ID NO: 644987 - RNA, 22 nt, Human
uuugcauuaucucacuuauaua

SEQ ID NO: 644988 - RNA, 22 nt, Human
ucuauuuguucucaggaucauc

SEQ ID NO: 644989 - RNA, 23 nt, Human
uuucacagaaggauuguagggcc

SEQ ID NO: 644990 - RNA, 22 nt, Human
ugacugaggccugauaacaguu

SEQ ID NO: 644991 - RNA, 22 nt, Human
aagcaggugugagccagugggc

SEQ ID NO: 644992 - RNA, 22 nt, Human
ugagaugaauaacuccugcuaa

SEQ ID NO: 644993 - RNA, 22 nt, Human
aguacaaacuguuucaaaguag

SEQ ID NO: 644994 - RNA, 22 nt, Human
auccuucaauuagaaccaauug

SEQ ID NO: 644995 - RNA, 22 nt, Human
uguugguaaauagcuuagcaau

SEQ ID NO: 644996 - RNA, 20 nt, Human
uucuuuguuccuuacauuug

SEQ ID NO: 644997 - RNA, 22 nt, Human
gccuucugcgcucgugucuccg

SEQ ID NO: 644998 - RNA, 22 nt, Human
guggcugcucgggcuccggccc

SEQ ID NO: 644999 - RNA, 15 nt, Human
aucucucuagcugcu

SEQ ID NO: 645000 - RNA, 22 nt, Human
auuuauugaacacugacuaugu

SEQ ID NO: 645001 - RNA, 22 nt, Human
cccaggcugcguauccacaaua

SEQ ID NO: 645002 - RNA, 20 nt, Human
ugggaguacaaucaugagca

SEQ ID NO: 645003 - RNA, 22 nt, Human
ucucuucuuuggggugggcuca

SEQ ID NO: 645004 - RNA, 22 nt, Human
uugugucccccuuugagagcca

SEQ ID NO: 645005 - RNA, 18 nt, Human
uuuguuggguugccuuua

SEQ ID NO: 645006 - RNA, 22 nt, Human
ugccuuuuccaguuucuagggg

SEQ ID NO: 645007 - RNA, 16 nt, Human
gaggggagcaguaggc

SEQ ID NO: 645008 - RNA, 20 nt, Human
uucuggaggcuacaagucug

SEQ ID NO: 645009 - RNA, 22 nt, Human
aggcacuggucuaccccuuagu

SEQ ID NO: 645010 - RNA, 22 nt, Human
gcccagcugagaagcgcggggc

SEQ ID NO: 645011 - RNA, 22 nt, Human
ucacaugcagucacugagcagg

SEQ ID NO: 645012 - RNA, 22 nt, Human
uuaaugcagcucuaccacacag

SEQ ID NO: 645013 - RNA, 22 nt, Human
aucaagaacuuauuuuggaaau

SEQ ID NO: 645014 - RNA, 22 nt, Human
ggccacugaccuacaucugggg

SEQ ID NO: 645015 - RNA, 22 nt, Human
ccacagaguugaugcaauaaga

SEQ ID NO: 645016 - RNA, 22 nt, Human
uauuucaucuggaacaagguaa

SEQ ID NO: 645017 - RNA, 22 nt, Human
uaggauuuaauaaaagaauaga

SEQ ID NO: 645018 - RNA, 22 nt, Human
acagguguccucacagggggug

SEQ ID NO: 645019 - RNA, 22 nt, Human
cugucugcuaugcuuguuguca

SEQ ID NO: 645020 - RNA, 22 nt, Human
gaacuguuucuggugaaagagu

SEQ ID NO: 645021 - RNA, 22 nt, Human
cauuucacaguaaagugauuuc

SEQ ID NO: 645022 - RNA, 17 nt, Human
ugcuucaucccgauccu

SEQ ID NO: 645023 - RNA, 22 nt, Human
ccacccuuccauucuuccucuu

SEQ ID NO: 645024 - RNA, 22 nt, Human
uuauuuggguuugaguguggca

SEQ ID NO: 645025 - RNA, 22 nt, Human
uggagcuggaagacagugauau

SEQ ID NO: 645026 - RNA, 22 nt, Human
uaggaaauuggaaacucuucac

SEQ ID NO: 645027 - RNA, 22 nt, Human
cagggugcagugucgcugcuag

SEQ ID NO: 645028 - RNA, 22 nt, Human
ucuccuucgaggcccagcuccc

SEQ ID NO: 645029 - RNA, 22 nt, Human
acuuacaagcuagggaagcuug

SEQ ID NO: 645030 - RNA, 22 nt, Human
agcuggcugccuucuccuuagg

SEQ ID NO: 645031 - RNA, 22 nt, Human
cagggcugagucauauagccuu

SEQ ID NO: 645032 - RNA, 20 nt, Human
ugaaaggugggaauuguggg

SEQ ID NO: 645033 - RNA, 22 nt, Human
ucucuggcacucccuuauggcu

SEQ ID NO: 645034 - RNA, 22 nt, Human
gccagccagagaggcaugguua

SEQ ID NO: 645035 - RNA, 22 nt, Human
gugcccugucucuugucuccag

SEQ ID NO: 645036 - RNA, 22 nt, Human
gcucucugucguuaugcuucau

SEQ ID NO: 645037 - RNA, 22 nt, Human
auuuuugagcugugaacauagc

SEQ ID NO: 645038 - RNA, 22 nt, Human
ugggaagaggagcacuggaaug

SEQ ID NO: 645039 - RNA, 22 nt, Human
guauuaggugguggaauuguag

SEQ ID NO: 645040 - RNA, 19 nt, Human
agagaggcugugugaggga

SEQ ID NO: 645041 - RNA, 20 nt, Human
gacaucauguacacauugcc

SEQ ID NO: 645042 - RNA, 22 nt, Human
ggugaaggaggaagcugaugga

SEQ ID NO: 645043 - RNA, 22 nt, Human
ugcugcuuuuguauaucagaga

SEQ ID NO: 645044 - RNA, 22 nt, Human
ccugcuuaacauugccaugaca

SEQ ID NO: 645045 - RNA, 22 nt, Human
acaggcugggcgcuuccugcgg

SEQ ID NO: 645046 - RNA, 22 nt, Human
uaccucuggacauuguggagca

SEQ ID NO: 645047 - RNA, 22 nt, Human
cuucccuucugcagaucuuugg

SEQ ID NO: 645048 - RNA, 22 nt, Human
uauguauaaucacagaguguca

SEQ ID NO: 645049 - RNA, 22 nt, Human
gagauguacaauguguauuaau

SEQ ID NO: 645050 - RNA, 22 nt, Human
aacuuauacccagggcagaaau

SEQ ID NO: 645051 - RNA, 22 nt, Human
gaaugaaucuguaagugacaag

SEQ ID NO: 645052 - RNA, 19 nt, Human
ugcucaggccaaggagccc

SEQ ID NO: 645053 - RNA, 22 nt, Human
agcauuucuuggcccauuguag

SEQ ID NO: 645054 - RNA, 22 nt, Human
ggcagugaugucaaacagugaa

SEQ ID NO: 645055 - RNA, 22 nt, Human
uuuuggaugagcccagauuucu

SEQ ID NO: 645056 - RNA, 19 nt, Human
uucuggucuggaaucaagg

SEQ ID NO: 645057 - RNA, 22 nt, Human
agaugcuuuccugauauuuaug

SEQ ID NO: 645058 - RNA, 22 nt, Human
ggccuugggaggagggucagaa

SEQ ID NO: 645059 - RNA, 22 nt, Human
cuugaaagauuuggccucugug

SEQ ID NO: 645060 - RNA, 22 nt, Human
uucccacaggaugagagcugag

SEQ ID NO: 645061 - RNA, 22 nt, Human
aggggagccagggcugcgaguu

SEQ ID NO: 645062 - RNA, 22 nt, Human
cccaggagguggagguugcagu

SEQ ID NO: 645063 - RNA, 22 nt, Human
cccugcucuuagugccugugug

SEQ ID NO: 645064 - RNA, 20 nt, Human
aacacugagggcuacucuuc

SEQ ID NO: 645065 - RNA, 22 nt, Human
auaugaaaauguuuuagcugua

SEQ ID NO: 645066 - RNA, 19 nt, Human
agaaaaacugguacugcug

SEQ ID NO: 645067 - RNA, 22 nt, Human
cagcuguccaaacacauuaacu

SEQ ID NO: 645068 - RNA, 22 nt, Human
gucugcuuuucugaauugccug

SEQ ID NO: 645069 - RNA, 22 nt, Human
ggucucugagugaggaccuggg

SEQ ID NO: 645070 - RNA, 22 nt, Human
uuaauguuuuaaguuauagaga

SEQ ID NO: 645071 - RNA, 22 nt, Human
ggagccaguuuagaccucaguu

SEQ ID NO: 645072 - RNA, 22 nt, Human
cuccagaaauucaacagcaaau

SEQ ID NO: 645073 - RNA, 22 nt, Human
ggaucgcggucccggcccgcgc

SEQ ID NO: 645074 - RNA, 22 nt, Human
ucugggcugucuacagguuggc

SEQ ID NO: 645075 - RNA, 22 nt, Human
cagagguacaagcuaaguuggg

SEQ ID NO: 645076 - RNA, 22 nt, Human
uuuuacuuuggauacaguacuu

SEQ ID NO: 645077 - RNA, 22 nt, Human
ugacagagagguaaguuaugaa

SEQ ID NO: 645078 - RNA, 22 nt, Human
ugguccugcccacgcccaucug

SEQ ID NO: 645079 - RNA, 22 nt, Human
aggagggugauccgggcugguc

SEQ ID NO: 645080 - RNA, 22 nt, Human
cacuuaaagucuuagcuuacag

SEQ ID NO: 645081 - RNA, 22 nt, Human
cuuuccuggcuggcaguugugg

SEQ ID NO: 645082 - RNA, 22 nt, Human
guggccuugcucacauguccag

SEQ ID NO: 645083 - RNA, 18 nt, Human
aagauucugcuucucucu

SEQ ID NO: 645084 - RNA, 22 nt, Human
ccagagguccccugccaggagg

SEQ ID NO: 645085 - RNA, 21 nt, Human
uuguucuuccagaagcaaagu

SEQ ID NO: 645086 - RNA, 22 nt, Human
cuguccucuguccucagcagga

SEQ ID NO: 645087 - RNA, 23 nt, Human
cccacaugucugagucagugcca

SEQ ID NO: 645088 - RNA, 22 nt, Human
acacaucuuagacugaaauaug

SEQ ID NO: 645089 - RNA, 22 nt, Human
uucuuguacuggagauacauga

SEQ ID NO: 645090 - RNA, 17 nt, Human
acacaguacuuuuuugc

SEQ ID NO: 645091 - RNA, 22 nt, Human
acaguacauagaucucuacccu

SEQ ID NO: 645092 - RNA, 22 nt, Human
gcaaagacugcaauuacuuuug

SEQ ID NO: 645093 - RNA, 22 nt, Human
ggaaggaauuccaagacuaaag

SEQ ID NO: 645094 - RNA, 22 nt, Human
uuaaugcagaaaucaaacugac

SEQ ID NO: 645095 - RNA, 22 nt, Human
ugacacaguagaaagaugauga

SEQ ID NO: 645096 - RNA, 22 nt, Human
ucuggcucuaacuaggcaucag

SEQ ID NO: 645097 - RNA, 22 nt, Human
auuccuuggcauucuggacuug

SEQ ID NO: 645098 - RNA, 22 nt, Human
caggaggcgucuucaguuuguu

SEQ ID NO: 645099 - RNA, 22 nt, Human
agcgcgcucgaugguuuccgcg

SEQ ID NO: 645100 - RNA, 22 nt, Human
ugcauuguugaugaguugaaua

SEQ ID NO: 645101 - RNA, 19 nt, Human
uaauaagcaauauggaagu

SEQ ID NO: 645102 - RNA, 22 nt, Human
gacucagagaucccuggagguc

SEQ ID NO: 645103 - RNA, 22 nt, Human
ucugcuauuuucuaucugugug

SEQ ID NO: 645104 - RNA, 22 nt, Human
uuggcaaugucuaaacacauuu

SEQ ID NO: 645105 - RNA, 22 nt, Human
gcagagaacccagcagauuggc

SEQ ID NO: 645106 - RNA, 22 nt, Human
uucuguacuucaggggcucugu

SEQ ID NO: 645107 - RNA, 22 nt, Human
uuuuuggguccaggcuguaucu

SEQ ID NO: 645108 - RNA, 22 nt, Human
cagagccaaaccucagggcccg

SEQ ID NO: 645109 - RNA, 22 nt, Human
augaggcaggauuaagcuauca

SEQ ID NO: 645110 - RNA, 22 nt, Human
agggcgugguggugcuggagca

SEQ ID NO: 645111 - RNA, 22 nt, Human
uucaagucugaagaggacuaau

SEQ ID NO: 645112 - RNA, 22 nt, Human
ccucagagacaguaacuggaau

SEQ ID NO: 645113 - RNA, 22 nt, Human
acuggcugcguuccugugagac

SEQ ID NO: 645114 - RNA, 22 nt, Human
acacuauacuuccauugcuggu

SEQ ID NO: 645115 - RNA, 22 nt, Human
ggagagcugacaucaugauguu

SEQ ID NO: 645116 - RNA, 20 nt, Human
cccuaggaacgcagcaggag

SEQ ID NO: 645117 - RNA, 21 nt, Human
ugauuuccaucuuaaaauaaa

SEQ ID NO: 645118 - RNA, 22 nt, Human
aggaaacugaagcccagagagg

SEQ ID NO: 645119 - RNA, 22 nt, Human
uuagacauguuugcuaaaauga

SEQ ID NO: 645120 - RNA, 22 nt, Human
gcuccaagguauccaccagggu

SEQ ID NO: 645121 - RNA, 22 nt, Human
gcagaggacucaaucaagguau

SEQ ID NO: 645122 - RNA, 22 nt, Human
auuauggacaucaaauaacucu

SEQ ID NO: 645123 - RNA, 22 nt, Human
caggauauuaccuaauauuuga

SEQ ID NO: 645124 - RNA, 22 nt, Human
gcugccagcuuuccuuggcuga

SEQ ID NO: 645125 - RNA, 22 nt, Human
gaggcuuugguuauaaaagauc

SEQ ID NO: 645126 - RNA, 22 nt, Human
gaaaccugguucugcgugaggg

SEQ ID NO: 645127 - RNA, 22 nt, Human
aagccacugcagcaggagcugc

SEQ ID NO: 645128 - RNA, 22 nt, Human
cuagccugggauuugaacuuau

SEQ ID NO: 645129 - RNA, 22 nt, Human
agacacaguuugggauggguug

SEQ ID NO: 645130 - RNA, 23 nt, Human
uaaagcaaagucaagugcacucc

SEQ ID NO: 645131 - RNA, 22 nt, Human
gugcauauuuugcacacagaug

SEQ ID NO: 645132 - RNA, 22 nt, Human
uggugcugccucagaugccuua

SEQ ID NO: 645133 - RNA, 23 nt, Human
uuggagagggugaguagugucag

SEQ ID NO: 645134 - RNA, 22 nt, Human
acagcauugcuccaucucaaga

SEQ ID NO: 645135 - RNA, 22 nt, Human
ccuguacauggccaucuuuacc

SEQ ID NO: 645136 - RNA, 22 nt, Human
gagcccugcgugucugggggca

SEQ ID NO: 645137 - RNA, 22 nt, Human
aaguggcccuaggccaagggga

SEQ ID NO: 645138 - RNA, 22 nt, Human
ucauuuaugucuuugccaucca

SEQ ID NO: 645139 - RNA, 22 nt, Human
cuguggaaucaucaggucuuac

SEQ ID NO: 645140 - RNA, 17 nt, Human
gcauccaguaacaugcc

SEQ ID NO: 645141 - RNA, 22 nt, Human
ggugggaguggaacguggaaga

SEQ ID NO: 645142 - RNA, 22 nt, Human
ccugugugccuggccgcgggag

SEQ ID NO: 645143 - RNA, 22 nt, Human
uuggaaaagugaaacuagaugc

SEQ ID NO: 645144 - RNA, 23 nt, Human
uccuuccuuugagaggcuccauc

SEQ ID NO: 645145 - RNA, 21 nt, Human
uccacaaguuagaaggaaauu

SEQ ID NO: 645146 - RNA, 22 nt, Human
ugacauaaaucuaaaggaaagg

SEQ ID NO: 645147 - RNA, 22 nt, Human
aucaguuuggugcuuucaguga

SEQ ID NO: 645148 - RNA, 22 nt, Human
gagacacaggcacagaagaggc

SEQ ID NO: 645149 - RNA, 22 nt, Human
gcuccucucccagagcugcagg

SEQ ID NO: 645150 - RNA, 22 nt, Human
ugccaggcuuagagcaggggcu

SEQ ID NO: 645151 - RNA, 22 nt, Human
agaagccagaauauucauggau

SEQ ID NO: 645152 - RNA, 22 nt, Human
ggucacugagcuguaauucugu

SEQ ID NO: 645153 - RNA, 22 nt, Human
aaggcugccucugccagaggag

SEQ ID NO: 645154 - RNA, 22 nt, Human
cacagugcucaaacacaagugc

SEQ ID NO: 645155 - RNA, 22 nt, Human
cuacaggucaguaagaccuaga

SEQ ID NO: 645156 - RNA, 22 nt, Human
ucucaggcuaguaaaagauggg

SEQ ID NO: 645157 - RNA, 22 nt, Human
aguauguagugcaaucagucag

SEQ ID NO: 645158 - RNA, 22 nt, Human
ggccacagcaaugcugugaugu

SEQ ID NO: 645159 - RNA, 22 nt, Human
ugaaaucuuuaguuucuguccc

SEQ ID NO: 645160 - RNA, 22 nt, Human
agcuggguacagccugugccua

SEQ ID NO: 645161 - RNA, 22 nt, Human
gcuauugugacagcuuuucgcc

SEQ ID NO: 645162 - RNA, 22 nt, Human
agcaguccaacugagguggcau

SEQ ID NO: 645163 - RNA, 22 nt, Human
aggaagaguguuaccuaugggu

SEQ ID NO: 645164 - RNA, 22 nt, Human
gcugccucuccugaguugacag

SEQ ID NO: 645165 - RNA, 22 nt, Human
auuuccuauagauauggugagu

SEQ ID NO: 645166 - RNA, 22 nt, Human
ucccaaagaacugaauaguaau

SEQ ID NO: 645167 - RNA, 22 nt, Human
acuuggcuuuuccaucucugca

SEQ ID NO: 645168 - RNA, 22 nt, Human
acagggccucagccagggcaga

SEQ ID NO: 645169 - RNA, 19 nt, Human
uaucacugggcacugagga

SEQ ID NO: 645170 - RNA, 22 nt, Human
uucucagauauuuguauggaac

SEQ ID NO: 645171 - RNA, 22 nt, Human
agccagcaggaacgucuagguu

SEQ ID NO: 645172 - RNA, 22 nt, Human
ucauggaagauguagggucagg

SEQ ID NO: 645173 - RNA, 22 nt, Human
uagcagcuuccagagagggcag

SEQ ID NO: 645174 - RNA, 22 nt, Human
cgguccuggcacuugcggcucc

SEQ ID NO: 645175 - RNA, 22 nt, Human
guccugguauaauuguuuaaaa

SEQ ID NO: 645176 - RNA, 22 nt, Human
ucuggcagagugauaggauaag

SEQ ID NO: 645177 - RNA, 22 nt, Human
uguuuauucauggcuaaugaaa

SEQ ID NO: 645178 - RNA, 22 nt, Human
cccugacccuaucagagggcca

SEQ ID NO: 645179 - RNA, 22 nt, Human
aaggcagcaacuaauggaucuc

SEQ ID NO: 645180 - RNA, 22 nt, Human
uguccuugugacauucuggcuu

SEQ ID NO: 645181 - RNA, 22 nt, Human
gcucugcccaaagcuguggcug

SEQ ID NO: 645182 - RNA, 20 nt, Human
gcuguggcaaagcuuugugu

SEQ ID NO: 645183 - RNA, 22 nt, Human
gcagccucugaugauggccgua

SEQ ID NO: 645184 - RNA, 22 nt, Human
uauuuguugaguuguuaugucu

SEQ ID NO: 645185 - RNA, 22 nt, Human
aacagcuauuagaacuucaugg

SEQ ID NO: 645186 - RNA, 22 nt, Human
ugagcccucggcuggggcagag

SEQ ID NO: 645187 - RNA, 22 nt, Human
cguguaugauaaauguuaauaa

SEQ ID NO: 645188 - RNA, 22 nt, Human
agccacagugcaagagagaaaa

SEQ ID NO: 645189 - RNA, 22 nt, Human
agaggaauuucuggaaggaggc

SEQ ID NO: 645190 - RNA, 22 nt, Human
ugaauaaucuuggguauuaaua

SEQ ID NO: 645191 - RNA, 22 nt, Human
ggcugcucuccaucccaggccu

SEQ ID NO: 645192 - RNA, 22 nt, Human
uucucuaagaguuauaugaauu

SEQ ID NO: 645193 - RNA, 22 nt, Human
gcagcaccaaccagggccuguu

SEQ ID NO: 645194 - RNA, 22 nt, Human
ccuggucagagcagucaggauc

SEQ ID NO: 645195 - RNA, 22 nt, Human
gccucagcucccagcccaggcu

SEQ ID NO: 645196 - RNA, 22 nt, Human
gccagagguucaacaacugucu

SEQ ID NO: 645197 - RNA, 22 nt, Human
cccagagaaucuuucagaaagg

SEQ ID NO: 645198 - RNA, 22 nt, Human
uuagaacuuaagaauacugucu

SEQ ID NO: 645199 - RNA, 22 nt, Human
agaaauagcagagucaggcggg

SEQ ID NO: 645200 - RNA, 22 nt, Human
agcaacagguuuauuaucuuau

SEQ ID NO: 645201 - RNA, 22 nt, Human
agaaggcaccguggccaauauu

SEQ ID NO: 645202 - RNA, 22 nt, Human
gacucucaagcacaaguccacc

SEQ ID NO: 645203 - RNA, 17 nt, Human
uaaguuauagcagaaga

SEQ ID NO: 645204 - RNA, 22 nt, Human
aacagcagguccuggcaugggu

SEQ ID NO: 645205 - RNA, 22 nt, Human
aaggcaagguucaccgugcuau

SEQ ID NO: 645206 - RNA, 22 nt, Human
cauuuuaccuagaagcugaaag

SEQ ID NO: 645207 - RNA, 22 nt, Human
gggugggacugaagucugaggg

SEQ ID NO: 645208 - RNA, 22 nt, Human
ucuggacuaacagcagccucag

SEQ ID NO: 645209 - RNA, 22 nt, Human
ucagcaguguaguuuaucauuc

SEQ ID NO: 645210 - RNA, 20 nt, Human
ggcuccuucuuucauggccc

SEQ ID NO: 645211 - RNA, 22 nt, Human
uaacuucaagucuguggaucag

SEQ ID NO: 645212 - RNA, 22 nt, Human
acagaauuugcuugggcaaugg

SEQ ID NO: 645213 - RNA, 17 nt, Human
ccauacugacauauuga

SEQ ID NO: 645214 - RNA, 22 nt, Human
uugugagcaggcugcacaaacc

SEQ ID NO: 645215 - RNA, 22 nt, Human
uucugcuuucaguucuucuggg

SEQ ID NO: 645216 - RNA, 22 nt, Human
ugaguauucugaauuucaaacu

SEQ ID NO: 645217 - RNA, 22 nt, Human
augcccugcugccaucuggccg

SEQ ID NO: 645218 - RNA, 22 nt, Human
uacauucuauaucuguuacauc

SEQ ID NO: 645219 - RNA, 22 nt, Human
auguguguaugugccuauaucu

SEQ ID NO: 645220 - RNA, 22 nt, Human
cuccugggcugggaacucagcc

SEQ ID NO: 645221 - RNA, 22 nt, Human
cagauguaaucugacagcugga

SEQ ID NO: 645222 - RNA, 22 nt, Human
agggaagcaauauuagauauca

SEQ ID NO: 645223 - RNA, 22 nt, Human
uccuucagcuacucaguuucca

SEQ ID NO: 645224 - RNA, 19 nt, Human
gccuaugucuucaaaucau

SEQ ID NO: 645225 - RNA, 22 nt, Human
cccugguucagguuucucugaa

SEQ ID NO: 645226 - RNA, 22 nt, Human
gcagggggucauucacgcuggc

SEQ ID NO: 645227 - RNA, 22 nt, Human
agaaaccugugugcugugauga

SEQ ID NO: 645228 - RNA, 22 nt, Human
auuaguugaacaaguuaaguaa

SEQ ID NO: 645229 - RNA, 22 nt, Human
cccaguggcuuuugcccagguu

SEQ ID NO: 645230 - RNA, 22 nt, Human
ccucuggccaucccccauuaag

SEQ ID NO: 645231 - RNA, 22 nt, Human
agccaggcagggcucucgcucu

SEQ ID NO: 645232 - RNA, 22 nt, Human
guguccugccacccugggcuuu

SEQ ID NO: 645233 - RNA, 22 nt, Human
ucauccuuuugcaugggaaggc

SEQ ID NO: 645234 - RNA, 22 nt, Human
uggcugggagcuggaacugggc

SEQ ID NO: 645235 - RNA, 22 nt, Human
ccuuggggaacuggacgugcug

SEQ ID NO: 645236 - RNA, 22 nt, Human
ugaggcucuaugugguagauua

SEQ ID NO: 645237 - RNA, 22 nt, Human
agaggcuccuucacucuggcac

SEQ ID NO: 645238 - RNA, 22 nt, Human
cuggucugaaaaggaggcaugc

SEQ ID NO: 645239 - RNA, 22 nt, Human
cagcagcuccaaagaauagcca

SEQ ID NO: 645240 - RNA, 22 nt, Human
uagaaaggauauugagaugaau

SEQ ID NO: 645241 - RNA, 22 nt, Human
caugccuguaaucccagcucuu

SEQ ID NO: 645242 - RNA, 22 nt, Human
uguauuuugugaggaucacucu

SEQ ID NO: 645243 - RNA, 22 nt, Human
aaaguaugauuggggauuauuu

SEQ ID NO: 645244 - RNA, 22 nt, Human
acuucucugcuaccugcaaaga

SEQ ID NO: 645245 - RNA, 22 nt, Human
uugcuuuauguguaugacuuga

SEQ ID NO: 645246 - RNA, 22 nt, Human
cuuauuagaguuguguucuguu

SEQ ID NO: 645247 - RNA, 22 nt, Human
cuagggacagaaagaggguaga

SEQ ID NO: 645248 - RNA, 22 nt, Human
ugcaguuagccuaggauugagc

SEQ ID NO: 645249 - RNA, 22 nt, Human
aggauauaaaaagacuauuugg

SEQ ID NO: 645250 - RNA, 17 nt, Human
ggccuugggcugcucuu

SEQ ID NO: 645251 - RNA, 22 nt, Human
auucucucucuaugaaaacuga

SEQ ID NO: 645252 - RNA, 22 nt, Human
gaucauagcgucuucuugcagc

SEQ ID NO: 645253 - RNA, 22 nt, Human
cugggagguggagguugcauug

SEQ ID NO: 645254 - RNA, 22 nt, Human
uaaagccacgcuggaaaucagg

SEQ ID NO: 645255 - RNA, 17 nt, Human
gcaaggccuguuuguuc

SEQ ID NO: 645256 - RNA, 22 nt, Human
cuccaggacccaguggcuccag

SEQ ID NO: 645257 - RNA, 19 nt, Human
ucaguuuuagucaucaguu

SEQ ID NO: 645258 - RNA, 22 nt, Human
ucucacugcaaauauuauguau

SEQ ID NO: 645259 - RNA, 22 nt, Human
ugcuggguuaccuaagccuaaa

SEQ ID NO: 645260 - RNA, 22 nt, Human
uggccccuggcacacggaggau

SEQ ID NO: 645261 - RNA, 19 nt, Human
cuuccuugcuccccaugug

SEQ ID NO: 645262 - RNA, 22 nt, Human
gaauuaguguugaaaucagggc

SEQ ID NO: 645263 - RNA, 22 nt, Human
ucccaaagucaagcugugucuu

SEQ ID NO: 645264 - RNA, 22 nt, Human
uguuuauagggucugucacuug

SEQ ID NO: 645265 - RNA, 22 nt, Human
uaaguuuucuggaauaacuugg

SEQ ID NO: 645266 - RNA, 22 nt, Human
caaggccaaagggccacuguca

SEQ ID NO: 645267 - RNA, 22 nt, Human
uggggccagggaggaccagaca

SEQ ID NO: 645268 - RNA, 21 nt, Human
ugccagcauguaggcuaguug

SEQ ID NO: 645269 - RNA, 22 nt, Human
cugagggagcugcuggccuugg

SEQ ID NO: 645270 - RNA, 22 nt, Human
uucuggaauucuugcagccacu

SEQ ID NO: 645271 - RNA, 22 nt, Human
gagcucagacucgggccugggg

SEQ ID NO: 645272 - RNA, 22 nt, Human
auuuccuaauuuagggauagac

SEQ ID NO: 645273 - RNA, 22 nt, Human
aaugucuucaguucuguauugu

SEQ ID NO: 645274 - RNA, 22 nt, Human
ucaaaugcacguagagaaaaua

SEQ ID NO: 645275 - RNA, 23 nt, Human
ucaaacauauugugagacacagg

SEQ ID NO: 645276 - RNA, 18 nt, Human
gccagugcccuggcucac

SEQ ID NO: 645277 - RNA, 22 nt, Human
cccuugcacauuugucuuuaau

SEQ ID NO: 645278 - RNA, 22 nt, Human
ugccugggaaccaauccuggcu

SEQ ID NO: 645279 - RNA, 22 nt, Human
ucaguguuuuaacugucuuuua

SEQ ID NO: 645280 - RNA, 22 nt, Human
gaggucucacuauguugcccag

SEQ ID NO: 645281 - RNA, 22 nt, Human
ugguuccacuaaccugagagcc

SEQ ID NO: 645282 - RNA, 22 nt, Human
cccuguggcaggaggaggagca

SEQ ID NO: 645283 - RNA, 22 nt, Human
cccuguggaggcagcauccugc

SEQ ID NO: 645284 - RNA, 22 nt, Human
agcagauguucccuggucccuu

SEQ ID NO: 645285 - RNA, 22 nt, Human
aauaggaaaauauuuaacaaga

SEQ ID NO: 645286 - RNA, 22 nt, Human
gaacagcagcucguucucgaug

SEQ ID NO: 645287 - RNA, 22 nt, Human
ugggugaggagaggcugucuaa

SEQ ID NO: 645288 - RNA, 22 nt, Human
gaaugcaugugaagcaaagaau

SEQ ID NO: 645289 - RNA, 22 nt, Human
cuaacuacaagcggggcauccu

SEQ ID NO: 645290 - RNA, 22 nt, Human
gaugacaaaagaguaaguaaug

SEQ ID NO: 645291 - RNA, 22 nt, Human
ucacaguauagaguuauuuugg

SEQ ID NO: 645292 - RNA, 22 nt, Human
aaguuguaugucuuagaaagua

SEQ ID NO: 645293 - RNA, 22 nt, Human
ugucucugccagcuagcagaau

SEQ ID NO: 645294 - RNA, 22 nt, Human
aaaugcaugagaaaguauucug

SEQ ID NO: 645295 - RNA, 22 nt, Human
ugggccugcuggggcauuuuca

SEQ ID NO: 645296 - RNA, 22 nt, Human
ugaaguacccguuuuuauugca

SEQ ID NO: 645297 - RNA, 22 nt, Human
auugucuuagucagcucggacu

SEQ ID NO: 645298 - RNA, 22 nt, Human
acuggcagagacccugauggcc

SEQ ID NO: 645299 - RNA, 22 nt, Human
aacuuuggcaagucagacuucu

SEQ ID NO: 645300 - RNA, 22 nt, Human
gagcgauugcgggggucagagg

SEQ ID NO: 645301 - RNA, 22 nt, Human
ccaggcacugcucgaggugcua

SEQ ID NO: 645302 - RNA, 22 nt, Human
cccuggcaaaacacucucuuga

SEQ ID NO: 645303 - RNA, 22 nt, Human
uccuuuggcaagcucugcucuu

SEQ ID NO: 645304 - RNA, 22 nt, Human
ggguggagccugagaauuugca

SEQ ID NO: 645305 - RNA, 22 nt, Human
uauaaauuaaugugcccaugag

SEQ ID NO: 645306 - RNA, 22 nt, Human
agacaggacacaagcugcauaa

SEQ ID NO: 645307 - RNA, 22 nt, Human
aaacagucuugugggcuuggag

SEQ ID NO: 645308 - RNA, 22 nt, Human
cugccuggcccagggaugggcc

SEQ ID NO: 645309 - RNA, 22 nt, Human
ugcgccucuaaucucgggcguc

SEQ ID NO: 645310 - RNA, 22 nt, Human
gcacagaacagagaaauagcca

SEQ ID NO: 645311 - RNA, 22 nt, Human
aaccuguuuugguugcauuuca

SEQ ID NO: 645312 - RNA, 22 nt, Human
aagggcuccacuugaaucacac

SEQ ID NO: 645313 - RNA, 22 nt, Human
ucauccaugaagagugacagaa

SEQ ID NO: 645314 - RNA, 22 nt, Human
ugcaaaauaaugaacgauuuuu

SEQ ID NO: 645315 - RNA, 22 nt, Human
gugcucugggcugccugacaug

SEQ ID NO: 645316 - RNA, 22 nt, Human
cuggggucucaauucuagcggg

SEQ ID NO: 645317 - RNA, 22 nt, Human
ccucugugucagggaagagacu

SEQ ID NO: 645318 - RNA, 22 nt, Human
ugacaacaucauuuuugugugg

SEQ ID NO: 645319 - RNA, 22 nt, Human
ccugcugucucugggcaggcag

SEQ ID NO: 645320 - RNA, 20 nt, Human
uugaggcaugucuagaagua

SEQ ID NO: 645321 - RNA, 22 nt, Human
cugcagggauugcuucuguaua

SEQ ID NO: 645322 - RNA, 22 nt, Human
agcaaagcaguggcuaagcuga

SEQ ID NO: 645323 - RNA, 22 nt, Human
agggcucaagggcaugcuacgu

SEQ ID NO: 645324 - RNA, 22 nt, Human
aauuaugguggaucccaguggg

SEQ ID NO: 645325 - RNA, 23 nt, Human
uugcaaaaugagucuugagugaa

SEQ ID NO: 645326 - RNA, 22 nt, Human
auacagaugggucagauuucau

SEQ ID NO: 645327 - RNA, 22 nt, Human
uagauuucaggcuggcuugcgg

SEQ ID NO: 645328 - RNA, 22 nt, Human
aggcccuggggucuguuaaauu

SEQ ID NO: 645329 - RNA, 22 nt, Human
ucgauaauaucuuacaugugcu

SEQ ID NO: 645330 - RNA, 22 nt, Human
auguggccuuagguucuagugg

SEQ ID NO: 645331 - RNA, 22 nt, Human
ccacacugaaccucagugucuu

SEQ ID NO: 645332 - RNA, 22 nt, Human
auggaaauccaagucaccguag

SEQ ID NO: 645333 - RNA, 23 nt, Human
ucugucacuuucugcuguggagu

SEQ ID NO: 645334 - RNA, 22 nt, Human
cucugagacucaagugaguggg

SEQ ID NO: 645335 - RNA, 22 nt, Human
caugugugugagggaaacaugu

SEQ ID NO: 645336 - RNA, 22 nt, Human
uauauuaaaugaccaguuuuaa

SEQ ID NO: 645337 - RNA, 22 nt, Human
ccuuagcauggcugugcugugu

SEQ ID NO: 645338 - RNA, 22 nt, Human
cuccagaauuguccauuggaaa

SEQ ID NO: 645339 - RNA, 22 nt, Human
ccagagccugcugagccccauu

SEQ ID NO: 645340 - RNA, 22 nt, Human
cugcucuaacugcauuaguuuu

SEQ ID NO: 645341 - RNA, 22 nt, Human
uucuguuacuguuggucauaac

SEQ ID NO: 645342 - RNA, 22 nt, Human
ucugaaagcuagaaaaugcucu

SEQ ID NO: 645343 - RNA, 22 nt, Human
agcacaggcuuuggugugaggg

SEQ ID NO: 645344 - RNA, 22 nt, Human
aggguggcuggaggaaucagaa

SEQ ID NO: 645345 - RNA, 22 nt, Human
gucacacacauuucuuuggugc

SEQ ID NO: 645346 - RNA, 19 nt, Human
uagucucugaugaggcuuu

SEQ ID NO: 645347 - RNA, 22 nt, Human
aacucugguuucagacucacuu

SEQ ID NO: 645348 - RNA, 22 nt, Human
uucagucuccucauuuuacaaa

SEQ ID NO: 645349 - RNA, 22 nt, Human
gcacugcaucuacuggcaagua

SEQ ID NO: 645350 - RNA, 22 nt, Human
accaggaguuuugaccaggggc

SEQ ID NO: 645351 - RNA, 22 nt, Human
gauaucaugggaagguguacuu

SEQ ID NO: 645352 - RNA, 22 nt, Human
caccagguggaaaugucacagc

SEQ ID NO: 645353 - RNA, 22 nt, Human
agaaggguaguuguaagaguga

SEQ ID NO: 645354 - RNA, 22 nt, Human
gauuucuucucucccaagagga

SEQ ID NO: 645355 - RNA, 22 nt, Human
uucagcagcuuuuaguacauug

SEQ ID NO: 645356 - RNA, 22 nt, Human
aagcaacuccuaggaggaaagg

SEQ ID NO: 645357 - RNA, 22 nt, Human
ucugccuggauuccauucucca

SEQ ID NO: 645358 - RNA, 22 nt, Human
uaugugcauuaucuaguucauu

SEQ ID NO: 645359 - RNA, 22 nt, Human
uggcugggcccccaccugccuc

SEQ ID NO: 645360 - RNA, 22 nt, Human
ucuuuccuguaacugcuguuca

SEQ ID NO: 645361 - RNA, 19 nt, Human
ggugaccaccuggucagug

SEQ ID NO: 645362 - RNA, 22 nt, Human
aacaaugcacuaucguaagugg

SEQ ID NO: 645363 - RNA, 22 nt, Human
cuguguaguauuuguacacaua

SEQ ID NO: 645364 - RNA, 22 nt, Human
uguaugcuuguguauaauauaa

SEQ ID NO: 645365 - RNA, 22 nt, Human
ccauucauagcaagcuacaucu

SEQ ID NO: 645366 - RNA, 22 nt, Human
ccaggcugaauauguuccaggg

SEQ ID NO: 645367 - RNA, 22 nt, Human
uuuguguuuaauacaaggaccu

SEQ ID NO: 645368 - RNA, 22 nt, Human
guggccagccagggugcugaug

SEQ ID NO: 645369 - RNA, 22 nt, Human
ugcugagguaaccauauccugc

SEQ ID NO: 645370 - RNA, 22 nt, Human
aaagccaucaguaaaaugauuu

SEQ ID NO: 645371 - RNA, 22 nt, Human
gcuucuguuaacuuauguuccc

SEQ ID NO: 645372 - RNA, 22 nt, Human
cccauuuagauaacaguucaaa

SEQ ID NO: 645373 - RNA, 22 nt, Human
cuggagggacaagguaugcauu

SEQ ID NO: 645374 - RNA, 22 nt, Human
aaaugucaaagacguguuuuug

SEQ ID NO: 645375 - RNA, 22 nt, Human
uaagugggugaagaggaaauau

SEQ ID NO: 645376 - RNA, 22 nt, Human
ucagagugaggcgucaacauga

SEQ ID NO: 645377 - RNA, 22 nt, Human
caauuuuacucuuccucuucca

SEQ ID NO: 645378 - RNA, 22 nt, Human
ccaugagccaggcugaggaagc

SEQ ID NO: 645379 - RNA, 22 nt, Human
ugcuuuuagcuaguaacuagua

SEQ ID NO: 645380 - RNA, 22 nt, Human
uucauacuaaaguguaagaugu

SEQ ID NO: 645381 - RNA, 22 nt, Human
gacaugauggaaaaaaaugcuc

SEQ ID NO: 645382 - RNA, 22 nt, Human
cagagcugguguuacaagucca

SEQ ID NO: 645383 - RNA, 22 nt, Human
gaacagaagaggcuggugccac

SEQ ID NO: 645384 - RNA, 22 nt, Human
acagguguacaaugcaugacag

SEQ ID NO: 645385 - RNA, 22 nt, Human
cagaggguggaggccaggcucu

SEQ ID NO: 645386 - RNA, 22 nt, Human
uagggcuggcgugcucagggaa

SEQ ID NO: 645387 - RNA, 16 nt, Human
aggcagcauguuagug

SEQ ID NO: 645388 - RNA, 22 nt, Human
aguuaucagguguuuucaugga

SEQ ID NO: 645389 - RNA, 22 nt, Human
cucucugcuguauccuuaggcu

SEQ ID NO: 645390 - RNA, 20 nt, Human
ggccauggguugccugaggu

SEQ ID NO: 645391 - RNA, 22 nt, Human
acacagagcuggaacugcuuca

SEQ ID NO: 645392 - RNA, 22 nt, Human
uccauuaaugauuauuucugug

SEQ ID NO: 645393 - RNA, 22 nt, Human
uuuaucuguuguaccugcauug

SEQ ID NO: 645394 - RNA, 22 nt, Human
uagcugccuagacagcuauagc

SEQ ID NO: 645395 - RNA, 22 nt, Human
acugggaagacaagaaagauag

SEQ ID NO: 645396 - RNA, 22 nt, Human
augauggugagguugagcacag

SEQ ID NO: 645397 - RNA, 22 nt, Human
caaggcaggcaguucacuugag

SEQ ID NO: 645398 - RNA, 22 nt, Human
gugcagcugccgaucagauagg

SEQ ID NO: 645399 - RNA, 22 nt, Human
cugccacucugggugggccugg

SEQ ID NO: 645400 - RNA, 22 nt, Human
uuugcauuuauaaguuggugga

SEQ ID NO: 645401 - RNA, 22 nt, Human
uccuuggagguguucaucugcc

SEQ ID NO: 645402 - RNA, 22 nt, Human
uuacaaguacugaauaugauuu

SEQ ID NO: 645403 - RNA, 22 nt, Human
gucugucucccugugacugaga

SEQ ID NO: 645404 - RNA, 22 nt, Human
aacacuuuguugccuaugaacg

SEQ ID NO: 645405 - RNA, 22 nt, Human
cuguggcuucuagguccccgau

SEQ ID NO: 645406 - RNA, 22 nt, Human
uaugcgugccucugucugucug

SEQ ID NO: 645407 - RNA, 22 nt, Human
acccuggagcuuuucuggcccu

SEQ ID NO: 645408 - RNA, 18 nt, Human
uucaguuucuaguuccuu

SEQ ID NO: 645409 - RNA, 22 nt, Human
aagagcugauuaagucaugagg

SEQ ID NO: 645410 - RNA, 22 nt, Human
uggcugcagaucugugggacac

SEQ ID NO: 645411 - RNA, 22 nt, Human
cucccuucaggagaggcucaca

SEQ ID NO: 645412 - RNA, 19 nt, Human
gggcuuggggcugaagccu

SEQ ID NO: 645413 - RNA, 22 nt, Human
ccucaggauccgcaggugcagu

SEQ ID NO: 645414 - RNA, 22 nt, Human
uuuugaagaagaugggaauuua

SEQ ID NO: 645415 - RNA, 22 nt, Human
cauucuuauauuuacucauuca

SEQ ID NO: 645416 - RNA, 16 nt, Human
agggguacaguucauc

SEQ ID NO: 645417 - RNA, 23 nt, Human
uucugucuugcugucagcuuucu

SEQ ID NO: 645418 - RNA, 22 nt, Human
acuucuggugucauacugcauu

SEQ ID NO: 645419 - RNA, 22 nt, Human
auuuucagugaucauagcacac

SEQ ID NO: 645420 - RNA, 22 nt, Human
gcaccccucagcuuguuuacua

SEQ ID NO: 645421 - RNA, 22 nt, Human
ccuuucuguguugcccuauuug

SEQ ID NO: 645422 - RNA, 22 nt, Human
cuggggacucauucagagcaua

SEQ ID NO: 645423 - RNA, 19 nt, Human
cacagggcaggucucaugu

SEQ ID NO: 645424 - RNA, 22 nt, Human
cagaccagcucuaugaacccaa

SEQ ID NO: 645425 - RNA, 22 nt, Human
uuauuacacugaaagaauugcg

SEQ ID NO: 645426 - RNA, 22 nt, Human
ccucacucugcacccugcagca

SEQ ID NO: 645427 - RNA, 22 nt, Human
cuggcugguuacuauuucuggu

SEQ ID NO: 645428 - RNA, 22 nt, Human
cuugaaagcacuccuuugacug

SEQ ID NO: 645429 - RNA, 23 nt, Human
uggcucugagagguucagaugcu

SEQ ID NO: 645430 - RNA, 22 nt, Human
aaugaauaacaauccucuggag

SEQ ID NO: 645431 - RNA, 22 nt, Human
gggcacugacagggucccaacu

SEQ ID NO: 645432 - RNA, 20 nt, Human
uauuuguauuugggaaaguu

SEQ ID NO: 645433 - RNA, 22 nt, Human
gagucuccuacuggcuguccuu

SEQ ID NO: 645434 - RNA, 22 nt, Human
uggagaugaauauguguaccug

SEQ ID NO: 645435 - RNA, 22 nt, Human
aauuaucagauauaaaacugca

SEQ ID NO: 645436 - RNA, 22 nt, Human
guaggcagaauaauuccuccuu

SEQ ID NO: 645437 - RNA, 22 nt, Human
cucacaccagcuuacaagacuu

SEQ ID NO: 645438 - RNA, 22 nt, Human
uugaaagaagaagcugcgaugu

SEQ ID NO: 645439 - RNA, 22 nt, Human
cugccuugaaaaugaagcuuua

SEQ ID NO: 645440 - RNA, 22 nt, Human
agagcacaaauuaguuggucuu

SEQ ID NO: 645441 - RNA, 22 nt, Human
uuuugguacaugcaauagcaau

SEQ ID NO: 645442 - RNA, 22 nt, Human
uaaucacugugagucuguuuuc

SEQ ID NO: 645443 - RNA, 22 nt, Human
guuugucaggagguugaaguca

SEQ ID NO: 645444 - RNA, 22 nt, Human
gccuggcuucccuuggagcauu

SEQ ID NO: 645445 - RNA, 22 nt, Human
agcaguuugaaucaauggccag

SEQ ID NO: 645446 - RNA, 22 nt, Human
ucuuagcaaauacuacuuagaa

SEQ ID NO: 645447 - RNA, 22 nt, Human
ucaggagagaguuggguaggcu

SEQ ID NO: 645448 - RNA, 23 nt, Human
ccguguguauacucuguaauaga

SEQ ID NO: 645449 - RNA, 18 nt, Human
aaagcuguuauuccagaa

SEQ ID NO: 645450 - RNA, 22 nt, Human
aggucugaaagccucagucaca

SEQ ID NO: 645451 - RNA, 22 nt, Human
uggaugccugggccuccuucca

SEQ ID NO: 645452 - RNA, 18 nt, Human
aaaggcagauuacuggga

SEQ ID NO: 645453 - RNA, 22 nt, Human
cccucccuuugcagcagugcau

SEQ ID NO: 645454 - RNA, 22 nt, Human
agcgggucugcaagccuucccu

SEQ ID NO: 645455 - RNA, 22 nt, Human
uucucaguuucacugauaacag

SEQ ID NO: 645456 - RNA, 22 nt, Human
uauguucuuuacaucugugcaa

SEQ ID NO: 645457 - RNA, 23 nt, Human
uucauacagaaacaucacuucau

SEQ ID NO: 645458 - RNA, 22 nt, Human
ccaaugauggugcccacgauga

SEQ ID NO: 645459 - RNA, 22 nt, Human
ccuggcaccuucacagacuacu

SEQ ID NO: 645460 - RNA, 22 nt, Human
uggucugauauuuuuucuuacc

SEQ ID NO: 645461 - RNA, 23 nt, Human
ucagcugcuuccuccugccugcc

SEQ ID NO: 645462 - RNA, 22 nt, Human
auucuaggcuugaaacaugaag

SEQ ID NO: 645463 - RNA, 22 nt, Human
agugaggcaaagugagaggcag

SEQ ID NO: 645464 - RNA, 22 nt, Human
gagauaacucuaggucuucgag

SEQ ID NO: 645465 - RNA, 22 nt, Human
aagcugcuuugucaggaauaug

SEQ ID NO: 645466 - RNA, 22 nt, Human
ugaggcccaucugagauuuuga

SEQ ID NO: 645467 - RNA, 22 nt, Human
uauugaaauucuucauguccuc

SEQ ID NO: 645468 - RNA, 22 nt, Human
gacugaggagguaagguuugaa

SEQ ID NO: 645469 - RNA, 22 nt, Human
agaggggaggcgaaccagaguc

SEQ ID NO: 645470 - RNA, 22 nt, Human
accaguccgcggagcuccgggg

SEQ ID NO: 645471 - RNA, 22 nt, Human
ccucuuugugccugcaggcugc

SEQ ID NO: 645472 - RNA, 22 nt, Human
cuuuaguuaguagauaauggca

SEQ ID NO: 645473 - RNA, 22 nt, Human
cacccaggcuggaaugcaaugg

SEQ ID NO: 645474 - RNA, 22 nt, Human
uuucauaauagugcaguuuguu

SEQ ID NO: 645475 - RNA, 22 nt, Human
uuccacaggacuaaaugucauc

SEQ ID NO: 645476 - RNA, 22 nt, Human
uucuaccucaguuucccacuua

SEQ ID NO: 645477 - RNA, 23 nt, Human
aagcugccagucugaagccuggg

SEQ ID NO: 645478 - RNA, 22 nt, Human
agguggugaugacagaagacag

SEQ ID NO: 645479 - RNA, 22 nt, Human
gaucuggaaucugaaggcugag

SEQ ID NO: 645480 - RNA, 22 nt, Human
gcauguggaaucucuccauggu

SEQ ID NO: 645481 - RNA, 22 nt, Human
cuggagccccaggcugugcaga

SEQ ID NO: 645482 - RNA, 22 nt, Human
ccagugauggugaucagauguu

SEQ ID NO: 645483 - RNA, 22 nt, Human
aaaaccugugaauaguuaacuc

SEQ ID NO: 645484 - RNA, 22 nt, Human
ugaaaauuaagcagaugaauga

SEQ ID NO: 645485 - RNA, 22 nt, Human
aaaguugcacaacuuuguauac

SEQ ID NO: 645486 - RNA, 22 nt, Human
uuccuucuuccagaggcugccc

SEQ ID NO: 645487 - RNA, 22 nt, Human
aggcugaggcagguggaucauu

SEQ ID NO: 645488 - RNA, 22 nt, Human
cacuguacuggguugaaggacg

SEQ ID NO: 645489 - RNA, 22 nt, Human
uuauauuaguuagacuugcugu

SEQ ID NO: 645490 - RNA, 22 nt, Human
uucagagccacuucaagucuaa

SEQ ID NO: 645491 - RNA, 22 nt, Human
aucagagucagaggcuagagcu

SEQ ID NO: 645492 - RNA, 22 nt, Human
caaagaugucauugguaagaca

SEQ ID NO: 645493 - RNA, 22 nt, Human
ucuggccccggucuucacagcu

SEQ ID NO: 645494 - RNA, 22 nt, Human
uguuuuaagggucaacugucac

SEQ ID NO: 645495 - RNA, 21 nt, Human
uuucaauuugccuugagucau

SEQ ID NO: 645496 - RNA, 22 nt, Human
agggcucaucugagacugacau

SEQ ID NO: 645497 - RNA, 22 nt, Human
ggcucugcugguaagaugccuc

SEQ ID NO: 645498 - RNA, 22 nt, Human
ugcaggccggcccuaggccuca

SEQ ID NO: 645499 - RNA, 21 nt, Human
ccagcagcucaaggaucucuu

SEQ ID NO: 645500 - RNA, 22 nt, Human
gagcuuuacuucugacuggugc

SEQ ID NO: 645501 - RNA, 22 nt, Human
aguggcuggagccccaggcugg

SEQ ID NO: 645502 - RNA, 23 nt, Human
ugcagaggcaugaucacugcuca

SEQ ID NO: 645503 - RNA, 22 nt, Human
acuucacauuugcaagucuugg

SEQ ID NO: 645504 - RNA, 22 nt, Human
augcaaauaaacagucuaguug

SEQ ID NO: 645505 - RNA, 22 nt, Human
gggcucugaaucccaggucugc

SEQ ID NO: 645506 - RNA, 22 nt, Human
cugccugcuuuucugggagccg

SEQ ID NO: 645507 - RNA, 22 nt, Human
gacccuggagccgucugaggca

SEQ ID NO: 645508 - RNA, 22 nt, Human
gcugugcuugggaagaaucucu

SEQ ID NO: 645509 - RNA, 22 nt, Human
acagcuggaggggcugcagagg

SEQ ID NO: 645510 - RNA, 22 nt, Human
agucccagaucuccauucgguc

SEQ ID NO: 645511 - RNA, 22 nt, Human
aggugccagcucucaggcagga

SEQ ID NO: 645512 - RNA, 22 nt, Human
ccccaaggugcucacugucugg

SEQ ID NO: 645513 - RNA, 22 nt, Human
aaaucagaggucagcuguacca

SEQ ID NO: 645514 - RNA, 22 nt, Human
aacaaaugaccugauuucuucc

SEQ ID NO: 645515 - RNA, 22 nt, Human
cccagguagugagaaauggagg

SEQ ID NO: 645516 - RNA, 22 nt, Human
cugagcugguguuucaggguca

SEQ ID NO: 645517 - RNA, 18 nt, Human
agcagguggcgucugcag

SEQ ID NO: 645518 - RNA, 19 nt, Human
cagugauuaauucaucuua

SEQ ID NO: 645519 - RNA, 22 nt, Human
ucacaaauagcuauauuaagga

SEQ ID NO: 645520 - RNA, 22 nt, Human
gggccacacagaaccuccuggu

SEQ ID NO: 645521 - RNA, 22 nt, Human
cagagucagagcaccugggauu

SEQ ID NO: 645522 - RNA, 22 nt, Human
gaacacaguacuuuuccugaug

SEQ ID NO: 645523 - RNA, 22 nt, Human
uugaaaggugcugugugcugau

SEQ ID NO: 645524 - RNA, 20 nt, Human
ucucuguaaaucuucuuuua

SEQ ID NO: 645525 - RNA, 22 nt, Human
ugacauuuaucuucuacaauga

SEQ ID NO: 645526 - RNA, 22 nt, Human
agguuccaucaccugcagugga

SEQ ID NO: 645527 - RNA, 22 nt, Human
ugaaugauacagaauuauguag

SEQ ID NO: 645528 - RNA, 22 nt, Human
gugaggcagaaguucccuuuua

SEQ ID NO: 645529 - RNA, 22 nt, Human
ugguuauaaauugcuaugcaga

SEQ ID NO: 645530 - RNA, 22 nt, Human
cacucugggcucuuguuucaga

SEQ ID NO: 645531 - RNA, 22 nt, Human
uggacacacauguaugucagag

SEQ ID NO: 645532 - RNA, 22 nt, Human
agagggcccauguugggcugcu

SEQ ID NO: 645533 - RNA, 22 nt, Human
gacacugaagucacuaagcagg

SEQ ID NO: 645534 - RNA, 22 nt, Human
gccuccugaagugcugggauua

SEQ ID NO: 645535 - RNA, 22 nt, Human
ugggcuucuggaguggggcaga

SEQ ID NO: 645536 - RNA, 22 nt, Human
uagggcuguuuaaaagugaggu

SEQ ID NO: 645537 - RNA, 22 nt, Human
uucaugaaacuuaacuguuggg

SEQ ID NO: 645538 - RNA, 22 nt, Human
gcacugggugugaggcagcguc

SEQ ID NO: 645539 - RNA, 22 nt, Human
gcugggcagcaggcucuccggg

SEQ ID NO: 645540 - RNA, 22 nt, Human
acugucuuccaggucuggaggu

SEQ ID NO: 645541 - RNA, 22 nt, Human
ucugaaauguucucuuguuuug

SEQ ID NO: 645542 - RNA, 22 nt, Human
ucccucagacagauguguuccu

SEQ ID NO: 645543 - RNA, 22 nt, Human
agacucuggaggggcugguccu

SEQ ID NO: 645544 - RNA, 22 nt, Human
agaaaauauucauugagaggcu

SEQ ID NO: 645545 - RNA, 22 nt, Human
uaucuuuaaugcuuggagguua

SEQ ID NO: 645546 - RNA, 20 nt, Human
agccuggcaaacacccccag

SEQ ID NO: 645547 - RNA, 22 nt, Human
uuguguguuuguagaaaaucca

SEQ ID NO: 645548 - RNA, 22 nt, Human
gcacuuaugcucaccuuguucu

SEQ ID NO: 645549 - RNA, 22 nt, Human
gcucagggccuggcugcggacu

SEQ ID NO: 645550 - RNA, 21 nt, Human
uggagagcccuugccugaguc

SEQ ID NO: 645551 - RNA, 22 nt, Human
acacauuaugagcaguugucuu

SEQ ID NO: 645552 - RNA, 22 nt, Human
ccugugcaugccaggguacacc

SEQ ID NO: 645553 - RNA, 22 nt, Human
ucagccucauuuucugcucugu

SEQ ID NO: 645554 - RNA, 22 nt, Human
gaggcugaugcugccucacaga

SEQ ID NO: 645555 - RNA, 20 nt, Human
cugcccacuagaacuaccug

SEQ ID NO: 645556 - RNA, 22 nt, Human
gucagaggaauggaugagugau

SEQ ID NO: 645557 - RNA, 22 nt, Human
cucuggguguuaaugucagugu

SEQ ID NO: 645558 - RNA, 22 nt, Human
acugaaaaaguaugauucacug

SEQ ID NO: 645559 - RNA, 22 nt, Human
accuuuauagcugauuaugaca

SEQ ID NO: 645560 - RNA, 22 nt, Human
uaguuuuuaaguguacaauuuc

SEQ ID NO: 645561 - RNA, 22 nt, Human
uucuaacaaguggcuuguuagu

SEQ ID NO: 645562 - RNA, 22 nt, Human
acugccucuuggugcugagaga

SEQ ID NO: 645563 - RNA, 22 nt, Human
gguuuuauuaacuuuaacauca

SEQ ID NO: 645564 - RNA, 22 nt, Human
ccuguguguaggccaggggagu

SEQ ID NO: 645565 - RNA, 22 nt, Human
auuaggauuuuguccaaguagc

SEQ ID NO: 645566 - RNA, 22 nt, Human
uuauguuuuauggcuauaucau

SEQ ID NO: 645567 - RNA, 22 nt, Human
gggugacauuaggaagauagac

SEQ ID NO: 645568 - RNA, 22 nt, Human
uuugaaagcuacuuucggguca

SEQ ID NO: 645569 - RNA, 21 nt, Human
accaggccaggaggcuggcac

SEQ ID NO: 645570 - RNA, 23 nt, Human
acuaaauggggcuuugcuuaaag

SEQ ID NO: 645571 - RNA, 22 nt, Human
ucaggcugcaucuguaagggug

SEQ ID NO: 645572 - RNA, 23 nt, Human
augaaaguucuuaaaaugucaug

SEQ ID NO: 645573 - RNA, 22 nt, Human
gccucugcaacuccgccuuggu

SEQ ID NO: 645574 - RNA, 23 nt, Human
agggaacaagcaagcugcuaguc

SEQ ID NO: 645575 - RNA, 22 nt, Human
uagaacagaggguugcccagau

SEQ ID NO: 645576 - RNA, 20 nt, Human
ugcuggggacauacagggug

SEQ ID NO: 645577 - RNA, 22 nt, Human
agggcugaagggaggugcucau

SEQ ID NO: 645578 - RNA, 22 nt, Human
aagaaaucauaucauuucuugg

SEQ ID NO: 645579 - RNA, 22 nt, Human
agcugcccagauaggaggaggc

SEQ ID NO: 645580 - RNA, 23 nt, Human
uaguuacauuauugucagagcug

SEQ ID NO: 645581 - RNA, 15 nt, Human
auacacaugagggag

SEQ ID NO: 645582 - RNA, 22 nt, Human
ugacauaaaccagugagcaaaa

SEQ ID NO: 645583 - RNA, 22 nt, Human
gcuucgggguccaagcgcgugu

SEQ ID NO: 645584 - RNA, 22 nt, Human
agucacagggggccccugcaac

SEQ ID NO: 645585 - RNA, 22 nt, Human
ggucagaggaggaauaggacau

SEQ ID NO: 645586 - RNA, 19 nt, Human
gauaaguuuccagguaacu

SEQ ID NO: 645587 - RNA, 19 nt, Human
aggcagcacccaguccuug

SEQ ID NO: 645588 - RNA, 22 nt, Human
agagauucauguuuacuguagg

SEQ ID NO: 645589 - RNA, 22 nt, Human
ucugggcuuuugcacuggccau

SEQ ID NO: 645590 - RNA, 22 nt, Human
acacuucagcuccacaaacauu

SEQ ID NO: 645591 - RNA, 22 nt, Human
agggcugagcccaggcauguag

SEQ ID NO: 645592 - RNA, 22 nt, Human
cagagcuggcggugagaagaca

SEQ ID NO: 645593 - RNA, 22 nt, Human
gcaguaaauaauuuuguguaua

SEQ ID NO: 645594 - RNA, 22 nt, Human
aguaacaguaacaucuuccuag

SEQ ID NO: 645595 - RNA, 22 nt, Human
ccaggcagaugggccggcuuca

SEQ ID NO: 645596 - RNA, 22 nt, Human
acaggcugacuuccugccaugu

SEQ ID NO: 645597 - RNA, 22 nt, Human
aaaaugaacagaacaaugggga

SEQ ID NO: 645598 - RNA, 22 nt, Human
accauagacuggaggaucuccu

SEQ ID NO: 645599 - RNA, 22 nt, Human
cuugcacacauguacaugugua

SEQ ID NO: 645600 - RNA, 22 nt, Human
ucuaagaaaucagaugaugagg

SEQ ID NO: 645601 - RNA, 23 nt, Human
ccagccucugggucuucauccag

SEQ ID NO: 645602 - RNA, 22 nt, Human
acuagcagggauguuauuacuu

SEQ ID NO: 645603 - RNA, 20 nt, Human
uggagcugugguaaggagca

SEQ ID NO: 645604 - RNA, 22 nt, Human
agcugggcagugcuuggauuca

SEQ ID NO: 645605 - RNA, 22 nt, Human
aagcaauucacaguucacuuaa

SEQ ID NO: 645606 - RNA, 22 nt, Human
caggacagagcccagacugugu

SEQ ID NO: 645607 - RNA, 22 nt, Human
gcagcugggccccagccucucc

SEQ ID NO: 645608 - RNA, 22 nt, Human
acuggacagaggaaauauggag

SEQ ID NO: 645609 - RNA, 22 nt, Human
uucugcucugacuugcaaggaa

SEQ ID NO: 645610 - RNA, 22 nt, Human
ugcaaucucggcacuuugggag

SEQ ID NO: 645611 - RNA, 22 nt, Human
ugucucuuggauugcuugcucu

SEQ ID NO: 645612 - RNA, 22 nt, Human
ugcugaaagucccaaaucucau

SEQ ID NO: 645613 - RNA, 22 nt, Human
gugcuuggcuuggugugaccug

SEQ ID NO: 645614 - RNA, 22 nt, Human
cugagcagucugacucaagcua

SEQ ID NO: 645615 - RNA, 22 nt, Human
cuccucccucuuugccacacau

SEQ ID NO: 645616 - RNA, 22 nt, Human
uacagaaauacugggggguucu

SEQ ID NO: 645617 - RNA, 22 nt, Human
acauggaucaaccuauuuucuu

SEQ ID NO: 645618 - RNA, 21 nt, Human
gauugaaaccauggcagugag

SEQ ID NO: 645619 - RNA, 22 nt, Human
gcaagauguuaacauagggaga

SEQ ID NO: 645620 - RNA, 22 nt, Human
uaaauguuaugcccaucaucca

SEQ ID NO: 645621 - RNA, 22 nt, Human
ccagcacugcucucagacugag

SEQ ID NO: 645622 - RNA, 22 nt, Human
uuuaccacaauuuuaaacaaug

SEQ ID NO: 645623 - RNA, 22 nt, Human
gcucagaguuaauuggaugggu

SEQ ID NO: 645624 - RNA, 20 nt, Human
aguuuucagcagaacaccca

SEQ ID NO: 645625 - RNA, 22 nt, Human
uuccuggcaccaccacuucuag

SEQ ID NO: 645626 - RNA, 22 nt, Human
uguguacauauacacaaauaca

SEQ ID NO: 645627 - RNA, 22 nt, Human
cuguagaacgauccaggcauuu

SEQ ID NO: 645628 - RNA, 22 nt, Human
gaaaucuuuuccaauuguuuag

SEQ ID NO: 645629 - RNA, 22 nt, Human
aaacauuagacaccauaugcuc

SEQ ID NO: 645630 - RNA, 22 nt, Human
uuugacucuugucucuuguuag

SEQ ID NO: 645631 - RNA, 22 nt, Human
aaugcuuauggguuccauaaua

SEQ ID NO: 645632 - RNA, 22 nt, Human
uucucagacuuccagcaccagc

SEQ ID NO: 645633 - RNA, 21 nt, Human
uggaucugugaucuggggcac

SEQ ID NO: 645634 - RNA, 22 nt, Human
cucgggcuugaggcuguuuacc

SEQ ID NO: 645635 - RNA, 22 nt, Human
cacugggcaauucugagccuaa

SEQ ID NO: 645636 - RNA, 22 nt, Human
cagauuaguugugcuauggccu

SEQ ID NO: 645637 - RNA, 19 nt, Human
acaggcagaauugggugug

SEQ ID NO: 645638 - RNA, 22 nt, Human
uggucccugaucuaaugucuca

SEQ ID NO: 645639 - RNA, 22 nt, Human
gaacacuguuucuucgugaaca

SEQ ID NO: 645640 - RNA, 22 nt, Human
ugagcugggaguggugaugagg

SEQ ID NO: 645641 - RNA, 22 nt, Human
uggaaaacauugagauaccaag

SEQ ID NO: 645642 - RNA, 22 nt, Human
auuauagaggguuacaguuaau

SEQ ID NO: 645643 - RNA, 20 nt, Human
cuucuucauuaacccuacug

SEQ ID NO: 645644 - RNA, 22 nt, Human
cugaggucaggaguucaagcug

SEQ ID NO: 645645 - RNA, 19 nt, Human
gcaggugagccguggcucc

SEQ ID NO: 645646 - RNA, 22 nt, Human
ggccugugcaagacagcacccc

SEQ ID NO: 645647 - RNA, 22 nt, Human
agcucuggaacucccggcugcu

SEQ ID NO: 645648 - RNA, 22 nt, Human
ccuggcuccugcacagaucuuu

SEQ ID NO: 645649 - RNA, 22 nt, Human
aagaacauugacuaagaggggc

SEQ ID NO: 645650 - RNA, 22 nt, Human
uuuucuguauuauugugcuuca

SEQ ID NO: 645651 - RNA, 22 nt, Human
gaaagagaaccugggccuagau

SEQ ID NO: 645652 - RNA, 22 nt, Human
uuacaagacacagugcugaagg

SEQ ID NO: 645653 - RNA, 22 nt, Human
ugccagggcugcuacuggcuga

SEQ ID NO: 645654 - RNA, 22 nt, Human
uggauuuaguucuucacaggcc

SEQ ID NO: 645655 - RNA, 22 nt, Human
cagggucaggcugcuagaagcu

SEQ ID NO: 645656 - RNA, 22 nt, Human
guucuuuugguagagugugcau

SEQ ID NO: 645657 - RNA, 22 nt, Human
uguauauugccugagucuuucc

SEQ ID NO: 645658 - RNA, 22 nt, Human
acauguucaugcaugcacaggu

SEQ ID NO: 645659 - RNA, 22 nt, Human
gcugccugccuaguuccacagu

SEQ ID NO: 645660 - RNA, 22 nt, Human
uagcacaguucacuaugauaca

SEQ ID NO: 645661 - RNA, 22 nt, Human
gagaggccaccugacgagcagu

SEQ ID NO: 645662 - RNA, 22 nt, Human
cacuggggaaaacaggcuucuu

SEQ ID NO: 645663 - RNA, 22 nt, Human
uuagaaaggagcuuauuucuuu

SEQ ID NO: 645664 - RNA, 22 nt, Human
uuguggcugucgagaauugagg

SEQ ID NO: 645665 - RNA, 22 nt, Human
gcagagcacccugcagugguau

SEQ ID NO: 645666 - RNA, 22 nt, Human
ggcccaaacggguccagugaaa

SEQ ID NO: 645667 - RNA, 22 nt, Human
auaauuaauuucaguaaucucc

SEQ ID NO: 645668 - RNA, 21 nt, Human
gugcucugggcagcagagggc

SEQ ID NO: 645669 - RNA, 23 nt, Human
ggcacugaagcuacaauggugag

SEQ ID NO: 645670 - RNA, 22 nt, Human
agagccuucagagauuauuuua

SEQ ID NO: 645671 - RNA, 22 nt, Human
gcuuccuguccaggccccacau

SEQ ID NO: 645672 - RNA, 22 nt, Human
agaggagugggaagcagugcaa

SEQ ID NO: 645673 - RNA, 22 nt, Human
acccaggauagagugcugcagu

SEQ ID NO: 645674 - RNA, 22 nt, Human
uuggaucaaauuucaugcuguc

SEQ ID NO: 645675 - RNA, 22 nt, Human
uuccagccuuuauccauccaga

SEQ ID NO: 645676 - RNA, 22 nt, Human
ugcuuuuaggagauuaaaauua

SEQ ID NO: 645677 - RNA, 22 nt, Human
aaguagugugcuccagcgguga

SEQ ID NO: 645678 - RNA, 19 nt, Human
gucagcaccauggacaggg

SEQ ID NO: 645679 - RNA, 18 nt, Human
uugcagguaccucuaucu

SEQ ID NO: 645680 - RNA, 22 nt, Human
acggcuucuugacuguggguug

SEQ ID NO: 645681 - RNA, 22 nt, Human
ucugcuguauuagguugaacug

SEQ ID NO: 645682 - RNA, 22 nt, Human
gaggcacagucccgaggcaagg

SEQ ID NO: 645683 - RNA, 19 nt, Human
ucagacugaaaguuuagau

SEQ ID NO: 645684 - RNA, 19 nt, Human
uggcaguguggcuuccaga

SEQ ID NO: 645685 - RNA, 22 nt, Human
uucuccagaccuugugacuaug

SEQ ID NO: 645686 - RNA, 22 nt, Human
agcagggcuucugugccugugc

SEQ ID NO: 645687 - RNA, 22 nt, Human
caagugaucagacacugaaguc

SEQ ID NO: 645688 - RNA, 22 nt, Human
agagugcagaggucaaagaaca

SEQ ID NO: 645689 - RNA, 22 nt, Human
gucuggagccacccuaagcauu

SEQ ID NO: 645690 - RNA, 22 nt, Human
cagagcugguaagugguagagg

SEQ ID NO: 645691 - RNA, 22 nt, Human
cuuugaagagauuacugugcuc

SEQ ID NO: 645692 - RNA, 22 nt, Human
uuugacagcagauaaaauaaaa

SEQ ID NO: 645693 - RNA, 22 nt, Human
cugccugcaugcugccauagcu

SEQ ID NO: 645694 - RNA, 22 nt, Human
gacaucugaauuuagcaguuuu

SEQ ID NO: 645695 - RNA, 22 nt, Human
ccaaaaaguacauuuaggugug

SEQ ID NO: 645696 - RNA, 22 nt, Human
ugaggccaaaaugacucaaaug

SEQ ID NO: 645697 - RNA, 22 nt, Human
acuggcucagaguuccuagaga

SEQ ID NO: 645698 - RNA, 22 nt, Human
aaacauugcuaaauaaugcugc

SEQ ID NO: 645699 - RNA, 18 nt, Human
ucucuucuuggcagucaa

SEQ ID NO: 645700 - RNA, 22 nt, Human
ugugucccuuggaaccucagcu

SEQ ID NO: 645701 - RNA, 22 nt, Human
ccaugagcuucaacugacacag

SEQ ID NO: 645702 - RNA, 22 nt, Human
aggccuguuggcgugggcucua

SEQ ID NO: 645703 - RNA, 22 nt, Human
cccagagaaccuucugugccac

SEQ ID NO: 645704 - RNA, 22 nt, Human
aaguuugaugaguuucuggagg

SEQ ID NO: 645705 - RNA, 22 nt, Human
gaggcacagaguaggugcacac

SEQ ID NO: 645706 - RNA, 22 nt, Human
ccucccauggagcucuguccau

SEQ ID NO: 645707 - RNA, 23 nt, Human
ugcuuaauuccucugcuucaccu

SEQ ID NO: 645708 - RNA, 22 nt, Human
caggcagcucuaauggaaagug

SEQ ID NO: 645709 - RNA, 22 nt, Human
ugagaaaugggucugcugaaga

SEQ ID NO: 645710 - RNA, 22 nt, Human
agugaaaugauucugagcaaga

SEQ ID NO: 645711 - RNA, 22 nt, Human
accuucaggugagcacacagau

SEQ ID NO: 645712 - RNA, 19 nt, Human
gaacaauuuguuagcucuc

SEQ ID NO: 645713 - RNA, 18 nt, Human
ccagagggugcgucagcu

SEQ ID NO: 645714 - RNA, 22 nt, Human
gccagggggucagcaggcacuu

SEQ ID NO: 645715 - RNA, 20 nt, Human
uagggagauaugcucuuuuc

SEQ ID NO: 645716 - RNA, 22 nt, Human
uucauuaauucauucagugacu

SEQ ID NO: 645717 - RNA, 22 nt, Human
ugggccaguuucucauugaaau

SEQ ID NO: 645718 - RNA, 23 nt, Human
cuuguauucacucauuugggaac

SEQ ID NO: 645719 - RNA, 19 nt, Human
uggagaggaaaugcugcuc

SEQ ID NO: 645720 - RNA, 22 nt, Human
agcuccugucucaagggagccu

SEQ ID NO: 645721 - RNA, 22 nt, Human
agagcccaucaguggcagugga

SEQ ID NO: 645722 - RNA, 20 nt, Human
gcagcugaaaguaugacacc

SEQ ID NO: 645723 - RNA, 22 nt, Human
cugcuccaggauuucaggccag

SEQ ID NO: 645724 - RNA, 22 nt, Human
gggcagcaguugcccuaaucaa

SEQ ID NO: 645725 - RNA, 22 nt, Human
gacaggcuucaugauggcagga

SEQ ID NO: 645726 - RNA, 22 nt, Human
cagcugaagaaagagugguuag

SEQ ID NO: 645727 - RNA, 22 nt, Human
ucccuucaucagugagcaagcc

SEQ ID NO: 645728 - RNA, 22 nt, Human
aaggacagaaacagauugcugg

SEQ ID NO: 645729 - RNA, 22 nt, Human
auggauaagaacaaauaucuga

SEQ ID NO: 645730 - RNA, 22 nt, Human
agaaagggaacuggcaaagcca

SEQ ID NO: 645731 - RNA, 22 nt, Human
gcccugagugguaccugugggu

SEQ ID NO: 645732 - RNA, 22 nt, Human
uaagauaaguggguugagaugg

SEQ ID NO: 645733 - RNA, 22 nt, Human
cuggcucaauuuguacugcugu

SEQ ID NO: 645734 - RNA, 22 nt, Human
uucaacacaggaacaugauaua

SEQ ID NO: 645735 - RNA, 22 nt, Human
aacuuucuuggaugucucaaca

SEQ ID NO: 645736 - RNA, 22 nt, Human
caaggacagcgucaggugcaac

SEQ ID NO: 645737 - RNA, 17 nt, Human
gacaagacagaauucau

SEQ ID NO: 645738 - RNA, 22 nt, Human
acacacuucacccuugagcuaa

SEQ ID NO: 645739 - RNA, 20 nt, Human
caccagucaugagucaauac

SEQ ID NO: 645740 - RNA, 22 nt, Human
cagauugagucugggaaaaggc

SEQ ID NO: 645741 - RNA, 22 nt, Human
gggcaccuugggucucaggcaa

SEQ ID NO: 645742 - RNA, 22 nt, Human
cuguccagaaagggggcaacaa

SEQ ID NO: 645743 - RNA, 22 nt, Human
auugaaagagaauguagcucuu

SEQ ID NO: 645744 - RNA, 22 nt, Human
agaggagcuuuuggaaaaggcc

SEQ ID NO: 645745 - RNA, 22 nt, Human
acaacugggggcauuacuggca

SEQ ID NO: 645746 - RNA, 23 nt, Human
ugggccucuccacccuuuucugu

SEQ ID NO: 645747 - RNA, 19 nt, Human
ggcagcaagcucugaaggc

SEQ ID NO: 645748 - RNA, 22 nt, Human
gauuuucaugauaaacuuguga

SEQ ID NO: 645749 - RNA, 22 nt, Human
cagaacaugauauaaacagaag

SEQ ID NO: 645750 - RNA, 22 nt, Human
gguaggaguauuuugcagcagu

SEQ ID NO: 645751 - RNA, 22 nt, Human
ucugaggcugcaucuaugugac

SEQ ID NO: 645752 - RNA, 22 nt, Human
agccaugggcucccaguccuuu

SEQ ID NO: 645753 - RNA, 22 nt, Human
acagacaguaugguggggcuga

SEQ ID NO: 645754 - RNA, 22 nt, Human
cuguugcugggaacgcauguca

SEQ ID NO: 645755 - RNA, 22 nt, Human
ccacagucuagcuagaaggcau

SEQ ID NO: 645756 - RNA, 22 nt, Human
ggaagauuucccguagcugugc

SEQ ID NO: 645757 - RNA, 19 nt, Human
agcuccaggccuggaugcu

SEQ ID NO: 645758 - RNA, 22 nt, Human
ugccugcuuguuuaccuacucc

SEQ ID NO: 645759 - RNA, 22 nt, Human
gcccuguccuccugacugagug

SEQ ID NO: 645760 - RNA, 22 nt, Human
ucuugaaacauaugaguaagug

SEQ ID NO: 645761 - RNA, 22 nt, Human
cauaggaaaagcauucuucuug

SEQ ID NO: 645762 - RNA, 22 nt, Human
acuguauuccuacuagaaucua

SEQ ID NO: 645763 - RNA, 20 nt, Human
uggggaguugagcacgagca

SEQ ID NO: 645764 - RNA, 22 nt, Human
aaagcuuuguaaauaaacaggu

SEQ ID NO: 645765 - RNA, 22 nt, Human
uucaggauccccaccgcguuua

SEQ ID NO: 645766 - RNA, 22 nt, Human
ucuuagcauuuguuaauaccca

SEQ ID NO: 645767 - RNA, 22 nt, Human
acagaguaggugcucaguaaau

SEQ ID NO: 645768 - RNA, 22 nt, Human
uccaggcucagucaagcacuuc

SEQ ID NO: 645769 - RNA, 22 nt, Human
uuuaucugaaaaaacucuugga

SEQ ID NO: 645770 - RNA, 22 nt, Human
aauuccaaauguuuucaaucca

SEQ ID NO: 645771 - RNA, 22 nt, Human
caugcuaauuaauuccaccugc

SEQ ID NO: 645772 - RNA, 22 nt, Human
cuggcuuugguccccugugccu

SEQ ID NO: 645773 - RNA, 22 nt, Human
gggagcugccuuagaccggagg

SEQ ID NO: 645774 - RNA, 22 nt, Human
guuccucaugaguaccccuuaa

SEQ ID NO: 645775 - RNA, 22 nt, Human
ucucaggacuccucuggccaua

SEQ ID NO: 645776 - RNA, 20 nt, Human
auggaggaagggcaagagaa

SEQ ID NO: 645777 - RNA, 18 nt, Human
cugccauguccuacuguc

SEQ ID NO: 645778 - RNA, 22 nt, Human
uauucacaaaaugagguccuca

SEQ ID NO: 645779 - RNA, 22 nt, Human
aaggaagacacagaugaaguga

SEQ ID NO: 645780 - RNA, 22 nt, Human
gaggaagugcguuaugccuuuu

SEQ ID NO: 645781 - RNA, 22 nt, Human
agcuucucuggucuucugccaa

SEQ ID NO: 645782 - RNA, 22 nt, Human
ucaacagaagugauagcuauua

SEQ ID NO: 645783 - RNA, 22 nt, Human
aguuucagaauuuaugcagaca

SEQ ID NO: 645784 - RNA, 22 nt, Human
augugugguuuaagaauugaau

SEQ ID NO: 645785 - RNA, 22 nt, Human
ucccucucuugggcguggcuca

SEQ ID NO: 645786 - RNA, 19 nt, Human
uuuggacagaguguccagg

SEQ ID NO: 645787 - RNA, 19 nt, Human
cagcaauaaugccagaugg

SEQ ID NO: 645788 - RNA, 22 nt, Human
ucucaaauuuguuagauaaaau

SEQ ID NO: 645789 - RNA, 22 nt, Human
gaauugcuaggcugcauguguc

SEQ ID NO: 645790 - RNA, 22 nt, Human
uggaagggguuacgcagcagga

SEQ ID NO: 645791 - RNA, 22 nt, Human
aaucacaugugggucuuguagc

SEQ ID NO: 645792 - RNA, 22 nt, Human
agagaccuuucuccugccuuuc

SEQ ID NO: 645793 - RNA, 22 nt, Human
gcagggagggccuuucaugaca

SEQ ID NO: 645794 - RNA, 22 nt, Human
gauuaauucaggaucaggaaau

SEQ ID NO: 645795 - RNA, 22 nt, Human
gcagccagguuugaggaccacu

SEQ ID NO: 645796 - RNA, 22 nt, Human
gaggggcgcugucgggucaccu

SEQ ID NO: 645797 - RNA, 22 nt, Human
uuugagaagcaucugguccacu

SEQ ID NO: 645798 - RNA, 22 nt, Human
cagaauuuuucgaauguacugu

SEQ ID NO: 645799 - RNA, 22 nt, Human
augcuuccucuacggccucuga

SEQ ID NO: 645800 - RNA, 22 nt, Human
gcaggaagggaaagguugacuc

SEQ ID NO: 645801 - RNA, 22 nt, Human
agcccugggcagccaaggaagc

SEQ ID NO: 645802 - RNA, 22 nt, Human
gacagguugaaguaucaaaggu

SEQ ID NO: 645803 - RNA, 22 nt, Human
uccuggcuuuucuuggcucauc

SEQ ID NO: 645804 - RNA, 22 nt, Human
ucugggaugaagccagaaacuu

SEQ ID NO: 645805 - RNA, 18 nt, Human
acaaucugaaaccuguca

SEQ ID NO: 645806 - RNA, 22 nt, Human
cugccccauggucccugguggg

SEQ ID NO: 645807 - RNA, 22 nt, Human
cuuuuuauagcuauguccuaug

SEQ ID NO: 645808 - RNA, 22 nt, Human
uaauuucuagggacuaaggugc

SEQ ID NO: 645809 - RNA, 22 nt, Human
cagccaucaguaaagacagcuu

SEQ ID NO: 645810 - RNA, 22 nt, Human
aucaguaggccaagcagcuggc

SEQ ID NO: 645811 - RNA, 22 nt, Human
agugucuuugacacauucaaag

SEQ ID NO: 645812 - RNA, 22 nt, Human
ucaggaagaaauucuguaucuu

SEQ ID NO: 645813 - RNA, 21 nt, Human
uagcagagaguuaacuucucc

SEQ ID NO: 645814 - RNA, 22 nt, Human
ugcagcaguuuaaugcaggguu

SEQ ID NO: 645815 - RNA, 22 nt, Human
cucagugcuucuagcuugauga

SEQ ID NO: 645816 - RNA, 22 nt, Human
aucccagauagugacccucagg

SEQ ID NO: 645817 - RNA, 22 nt, Human
agcccagcccgggcugcgcuuu

SEQ ID NO: 645818 - RNA, 19 nt, Human
ugcucacucucagucccuc

SEQ ID NO: 645819 - RNA, 22 nt, Human
ccuuucccgcuuugagggcaag

SEQ ID NO: 645820 - RNA, 22 nt, Human
uaacugaauguauuacaacaga

SEQ ID NO: 645821 - RNA, 22 nt, Human
cacagcagggaugaauggagug

SEQ ID NO: 645822 - RNA, 22 nt, Human
aguguccuuaguuagcuuuggg

SEQ ID NO: 645823 - RNA, 21 nt, Human
agcaggugcuguuggaggaaa

SEQ ID NO: 645824 - RNA, 20 nt, Human
agcauucuacuagacuuuuc

SEQ ID NO: 645825 - RNA, 22 nt, Human
ugcuccagcaccaagagcucca

SEQ ID NO: 645826 - RNA, 22 nt, Human
gugcaugcaguaaguguuuuaa

SEQ ID NO: 645827 - RNA, 21 nt, Human
acauucacaggauauuaucau

SEQ ID NO: 645828 - RNA, 22 nt, Human
gcacacagaauugauucacugu

SEQ ID NO: 645829 - RNA, 22 nt, Human
uuauuacaaugcagaaaauaga

SEQ ID NO: 645830 - RNA, 23 nt, Human
aaugugcuguauucauuucugga

SEQ ID NO: 645831 - RNA, 22 nt, Human
uucagcaaacacgaugcuuguu

SEQ ID NO: 645832 - RNA, 22 nt, Human
agugaaaaccuaaucaugcagu

SEQ ID NO: 645833 - RNA, 22 nt, Human
cuauuuugccugccuagaaauc

SEQ ID NO: 645834 - RNA, 22 nt, Human
aaacucuggauuggaguccagc

SEQ ID NO: 645835 - RNA, 22 nt, Human
cuucuuccaguuauaagagcuu

SEQ ID NO: 645836 - RNA, 22 nt, Human
cucaggcucuguacucccuuug

SEQ ID NO: 645837 - RNA, 21 nt, Human
uguguuuuaaugauauucugu

SEQ ID NO: 645838 - RNA, 22 nt, Human
ccagugugguagguccacaggu

SEQ ID NO: 645839 - RNA, 22 nt, Human
ugcauuuaguuuuaauaaagga

SEQ ID NO: 645840 - RNA, 22 nt, Human
agcaaauaaagacaauuauguc

SEQ ID NO: 645841 - RNA, 22 nt, Human
ugcagcucugggguaaggggug

SEQ ID NO: 645842 - RNA, 23 nt, Human
agcaauaagaagggauacaugug

SEQ ID NO: 645843 - RNA, 22 nt, Human
cagcagaaaaugugggugauuu

SEQ ID NO: 645844 - RNA, 22 nt, Human
gucaaagaaacgcaccuuacau

SEQ ID NO: 645845 - RNA, 22 nt, Human
gcacugugcuagguaucaggga

SEQ ID NO: 645846 - RNA, 22 nt, Human
gguccucaaucccaacaaggca

SEQ ID NO: 645847 - RNA, 22 nt, Human
uuucucuucacugugugccuca

SEQ ID NO: 645848 - RNA, 22 nt, Human
uaugcuauuuuaaugaagaugu

SEQ ID NO: 645849 - RNA, 22 nt, Human
gggugagggaugagccuucuuc

SEQ ID NO: 645850 - RNA, 22 nt, Human
cugucugcuagaacaucuauac

SEQ ID NO: 645851 - RNA, 22 nt, Human
uucaacauuuuugaguuuaggu

SEQ ID NO: 645852 - RNA, 22 nt, Human
ucucugugcccaguaguucucu

SEQ ID NO: 645853 - RNA, 22 nt, Human
caggauggugugagugugagga

SEQ ID NO: 645854 - RNA, 22 nt, Human
cucacauuccacuugugccaac

SEQ ID NO: 645855 - RNA, 22 nt, Human
aauugcuaguuuguagcauuug

SEQ ID NO: 645856 - RNA, 23 nt, Human
cuucucugagcuaggaaugcucu

SEQ ID NO: 645857 - RNA, 22 nt, Human
uaaggaaugcuugaauguuccu

SEQ ID NO: 645858 - RNA, 22 nt, Human
aaagugcauagaguagugccua

SEQ ID NO: 645859 - RNA, 22 nt, Human
ccagagagaaauggauuugagu

SEQ ID NO: 645860 - RNA, 22 nt, Human
uagaguauauaggccuuugugu

SEQ ID NO: 645861 - RNA, 22 nt, Human
uauuuggagaugggaucuucaa

SEQ ID NO: 645862 - RNA, 22 nt, Human
caggcgggacgugggaggauca

SEQ ID NO: 645863 - RNA, 22 nt, Human
ugccagcacaaguuaagagauc

SEQ ID NO: 645864 - RNA, 22 nt, Human
agggcaaggguugaagauaaga

SEQ ID NO: 645865 - RNA, 22 nt, Human
agacacugaaucagagggacau

SEQ ID NO: 645866 - RNA, 22 nt, Human
acaggaaauuggcauaucaguu

SEQ ID NO: 645867 - RNA, 22 nt, Human
acauccagaggcguggaaggcu

SEQ ID NO: 645868 - RNA, 22 nt, Human
uuggcucagugugagggagaug

SEQ ID NO: 645869 - RNA, 22 nt, Human
cacauucacuucucuguccacc

SEQ ID NO: 645870 - RNA, 21 nt, Human
ugagugccaccugcuggccaa

SEQ ID NO: 645871 - RNA, 22 nt, Human
gcucucagaagagccaggcuac

SEQ ID NO: 645872 - RNA, 22 nt, Human
auuggcuauugagugugugcug

SEQ ID NO: 645873 - RNA, 22 nt, Human
ucucacagccauuucucccucu

SEQ ID NO: 645874 - RNA, 17 nt, Human
uucucuuccuggauagu

SEQ ID NO: 645875 - RNA, 22 nt, Human
auuucacagcugcuguucaggu

SEQ ID NO: 645876 - RNA, 22 nt, Human
agcucccagaagccagagucgg

SEQ ID NO: 645877 - RNA, 22 nt, Human
ugauguucuguauaucauauag

SEQ ID NO: 645878 - RNA, 22 nt, Human
ugguuucacacugcauggugua

SEQ ID NO: 645879 - RNA, 22 nt, Human
aaaugccucugcuguacacaau

SEQ ID NO: 645880 - RNA, 22 nt, Human
gcucuugggggacagauggagu

SEQ ID NO: 645881 - RNA, 22 nt, Human
acaaaguuaacaguuggauagu

SEQ ID NO: 645882 - RNA, 22 nt, Human
uauauuaacuugugauccugga

SEQ ID NO: 645883 - RNA, 22 nt, Human
uuacaaagcgcuuuaccucuga

SEQ ID NO: 645884 - RNA, 22 nt, Human
acccuguauacgcuacauuuuu

SEQ ID NO: 645885 - RNA, 22 nt, Human
agugucucagccccaacuagag

SEQ ID NO: 645886 - RNA, 22 nt, Human
agccacagggggugagggacaa

SEQ ID NO: 645887 - RNA, 22 nt, Human
uaagcauggugguaaaagaggu

SEQ ID NO: 645888 - RNA, 22 nt, Human
uccagcagagucucugaggggg

SEQ ID NO: 645889 - RNA, 22 nt, Human
guacaauagcaguuuucccuuu

SEQ ID NO: 645890 - RNA, 22 nt, Human
cugugucucauccgccucuggc

SEQ ID NO: 645891 - RNA, 22 nt, Human
aagcagccucauuugugguaag

SEQ ID NO: 645892 - RNA, 22 nt, Human
gagggcaccuucaguaauagcu

SEQ ID NO: 645893 - RNA, 21 nt, Human
gccacguuucagucuucucag

SEQ ID NO: 645894 - RNA, 22 nt, Human
aaauccaguggguccucaugag

SEQ ID NO: 645895 - RNA, 22 nt, Human
ccugcccagggucaccacagag

SEQ ID NO: 645896 - RNA, 22 nt, Human
uaccucaugcuguacagcacgu

SEQ ID NO: 645897 - RNA, 22 nt, Human
uaauaccuggccuugauacagu

SEQ ID NO: 645898 - RNA, 22 nt, Human
auguacauucuucucaccgaag

SEQ ID NO: 645899 - RNA, 22 nt, Human
caguuuaaguguguugaaggua

SEQ ID NO: 645900 - RNA, 22 nt, Human
gucauugcaguggcaaaucaca

SEQ ID NO: 645901 - RNA, 22 nt, Human
agcagcugucccuuaacaucag

SEQ ID NO: 645902 - RNA, 18 nt, Human
augcagcaaucagaaaua

SEQ ID NO: 645903 - RNA, 22 nt, Human
cccaggcuggccuccgcagugc

SEQ ID NO: 645904 - RNA, 22 nt, Human
auaaggcagugacuucaucuau

SEQ ID NO: 645905 - RNA, 22 nt, Human
acagucaaucagaacagcaugu

SEQ ID NO: 645906 - RNA, 22 nt, Human
ucugccagcccugugagucuug

SEQ ID NO: 645907 - RNA, 22 nt, Human
aaagacaugacacauuggagag

SEQ ID NO: 645908 - RNA, 22 nt, Human
accucccuccaucuggacacua

SEQ ID NO: 645909 - RNA, 22 nt, Human
uuuagcagaucuauguauguga

SEQ ID NO: 645910 - RNA, 22 nt, Human
acacauguacagauuaguauuu

SEQ ID NO: 645911 - RNA, 22 nt, Human
agcuucaggaacaggcagccug

SEQ ID NO: 645912 - RNA, 22 nt, Human
gccaagaagguggggacaugca

SEQ ID NO: 645913 - RNA, 22 nt, Human
ugcucuggaccaugacuaugug

SEQ ID NO: 645914 - RNA, 22 nt, Human
cacauuuacuuuuaucccuugg

SEQ ID NO: 645915 - RNA, 22 nt, Human
agggcugcuccuccuucaggcc

SEQ ID NO: 645916 - RNA, 19 nt, Human
uauguguauauguaucugu

SEQ ID NO: 645917 - RNA, 22 nt, Human
gaaagaaucaacuaugucucug

SEQ ID NO: 645918 - RNA, 22 nt, Human
uggcucaggaucuaagcagaau

SEQ ID NO: 645919 - RNA, 22 nt, Human
uuccuagcuauaaagcucuucc

SEQ ID NO: 645920 - RNA, 22 nt, Human
agcugcuguccuaggcacugua

SEQ ID NO: 645921 - RNA, 23 nt, Human
aguggcugagaguguuucauaug

SEQ ID NO: 645922 - RNA, 22 nt, Human
ugggcugcuuccucagcugaga

SEQ ID NO: 645923 - RNA, 22 nt, Human
uccugaggucugaaaaaggagc

SEQ ID NO: 645924 - RNA, 22 nt, Human
gcuguauuccugcacuguauag

SEQ ID NO: 645925 - RNA, 22 nt, Human
cagaggucccuguucuuaagga

SEQ ID NO: 645926 - RNA, 22 nt, Human
ugauaauguucgagaaugaaga

SEQ ID NO: 645927 - RNA, 22 nt, Human
aagaugcuaauuguggaaguug

SEQ ID NO: 645928 - RNA, 22 nt, Human
cugggaagaauccaagggcccu

SEQ ID NO: 645929 - RNA, 22 nt, Human
aauccauuaaaaacaagcgcau

SEQ ID NO: 645930 - RNA, 22 nt, Human
ugggaaauauucuaaaagucuu

SEQ ID NO: 645931 - RNA, 22 nt, Human
ucagggacaggaugggcauuuc

SEQ ID NO: 645932 - RNA, 22 nt, Human
gaacuuuauuccagaagaaagc

SEQ ID NO: 645933 - RNA, 22 nt, Human
uagaaucuggaaggggcuauuc

SEQ ID NO: 645934 - RNA, 22 nt, Human
ccaaggccaucagguagguccu

SEQ ID NO: 645935 - RNA, 21 nt, Human
uguccuuaaugcaauguccuu

SEQ ID NO: 645936 - RNA, 19 nt, Human
ugaggauugagguccagua

SEQ ID NO: 645937 - RNA, 22 nt, Human
gcuuuuggccagauggggaaac

SEQ ID NO: 645938 - RNA, 19 nt, Human
ggaccagguccugggcagc

SEQ ID NO: 645939 - RNA, 22 nt, Human
ggucccaguugcccaggucagg

SEQ ID NO: 645940 - RNA, 22 nt, Human
ucagcuauugaggguggugagu

SEQ ID NO: 645941 - RNA, 22 nt, Human
uuuguacaauuagcagaggcua

SEQ ID NO: 645942 - RNA, 22 nt, Human
augaggcaaggcuggccguguu

SEQ ID NO: 645943 - RNA, 23 nt, Human
ugggccuggaaagccuuagagag

SEQ ID NO: 645944 - RNA, 23 nt, Human
agcaaauaaucugcuugcuuuuu

SEQ ID NO: 645945 - RNA, 22 nt, Human
uuucugaagucuucuaacagau

SEQ ID NO: 645946 - RNA, 20 nt, Human
aauagcugagggcaagagua

SEQ ID NO: 645947 - RNA, 22 nt, Human
uucagugugugauaccugcugu

SEQ ID NO: 645948 - RNA, 22 nt, Human
auuauguagcuaaaaauugugu

SEQ ID NO: 645949 - RNA, 22 nt, Human
uaaacaagcuggacugauaagu

SEQ ID NO: 645950 - RNA, 22 nt, Human
acauccacauuuauucagucau

SEQ ID NO: 645951 - RNA, 22 nt, Human
uacagauaacugaaugcagacu

SEQ ID NO: 645952 - RNA, 22 nt, Human
aaggcagccgugugacugcaug

SEQ ID NO: 645953 - RNA, 22 nt, Human
aacuuagucuuucaauuugaua

SEQ ID NO: 645954 - RNA, 22 nt, Human
agcuggccagcaccuccagguc

SEQ ID NO: 645955 - RNA, 22 nt, Human
acacagguuaaaauaauuggga

SEQ ID NO: 645956 - RNA, 23 nt, Human
ugccacccuucucuucccagcuu

SEQ ID NO: 645957 - RNA, 22 nt, Human
gcugagugauucauacgcugcu

SEQ ID NO: 645958 - RNA, 22 nt, Human
ccaggcagucaggguugugugu

SEQ ID NO: 645959 - RNA, 22 nt, Human
gauuuuauauggcauacugugg

SEQ ID NO: 645960 - RNA, 22 nt, Human
cuucucuugguaguucuuguug

SEQ ID NO: 645961 - RNA, 22 nt, Human
aaagccacguggccuggggagc

SEQ ID NO: 645962 - RNA, 22 nt, Human
auuuucagagacaucuggacuu

SEQ ID NO: 645963 - RNA, 22 nt, Human
ugugaugcuggagugcgaauau

SEQ ID NO: 645964 - RNA, 22 nt, Human
ccaguguuacggcuugaacuau

SEQ ID NO: 645965 - RNA, 22 nt, Human
gccaggcuggcaaaaggaaacc

SEQ ID NO: 645966 - RNA, 22 nt, Human
caguuuuucaaaauuacaugau

SEQ ID NO: 645967 - RNA, 22 nt, Human
cucuccugguguggaggacagg

SEQ ID NO: 645968 - RNA, 19 nt, Human
agacaguggcuaggacuua

SEQ ID NO: 645969 - RNA, 22 nt, Human
uuaucuguuuucugugcguuuc

SEQ ID NO: 645970 - RNA, 22 nt, Human
accagggcuuacagcaguagcu

SEQ ID NO: 645971 - RNA, 22 nt, Human
ggcugugguggcaucccugagc

SEQ ID NO: 645972 - RNA, 22 nt, Human
ucugcagcuugcacaggcaggc

SEQ ID NO: 645973 - RNA, 22 nt, Human
guggucagcagcagugggagug

SEQ ID NO: 645974 - RNA, 22 nt, Human
gaaacauuguguucuacagauu

SEQ ID NO: 645975 - RNA, 22 nt, Human
gucauuuaucaucagaagucau

SEQ ID NO: 645976 - RNA, 22 nt, Human
agacccaggauuggggcugccg

SEQ ID NO: 645977 - RNA, 23 nt, Human
acuucauggcacugucuuagagg

SEQ ID NO: 645978 - RNA, 22 nt, Human
uccagugcuggaccagagcacc

SEQ ID NO: 645979 - RNA, 19 nt, Human
cccugaggcaaaagccuuu

SEQ ID NO: 645980 - RNA, 22 nt, Human
gaaccccaacuuauaagacaga

SEQ ID NO: 645981 - RNA, 22 nt, Human
gucugcuuucugggaacucuuu

SEQ ID NO: 645982 - RNA, 22 nt, Human
ugcugggcacugucuagguacu

SEQ ID NO: 645983 - RNA, 22 nt, Human
gcagggacaccuuugugaagcu

SEQ ID NO: 645984 - RNA, 22 nt, Human
acaggauggccagcugauauug

SEQ ID NO: 645985 - RNA, 22 nt, Human
cucagaguccauaguuuacagu

SEQ ID NO: 645986 - RNA, 22 nt, Human
cagguggccuugccaucuccug

SEQ ID NO: 645987 - RNA, 22 nt, Human
uaagacacauugagaaacacaa

SEQ ID NO: 645988 - RNA, 22 nt, Human
gccugucaauuuuguguacaau

SEQ ID NO: 645989 - RNA, 22 nt, Human
aacuauacauauuuacauagac

SEQ ID NO: 645990 - RNA, 22 nt, Human
gcuggagaugcuaugcagaggg

SEQ ID NO: 645991 - RNA, 22 nt, Human
acaguucugagcuauaauugcu

SEQ ID NO: 645992 - RNA, 22 nt, Human
uuagaaaacauaagugguaaag

SEQ ID NO: 645993 - RNA, 22 nt, Human
cagcugaguuacucugaggucu

SEQ ID NO: 645994 - RNA, 22 nt, Human
ggagacacccacauugcugggu

SEQ ID NO: 645995 - RNA, 22 nt, Human
ccucaggcuucgucuuccaccc

SEQ ID NO: 645996 - RNA, 22 nt, Human
guccuggcuuaguucgcuguaa

SEQ ID NO: 645997 - RNA, 22 nt, Human
aacugagccccugcacuuguga

SEQ ID NO: 645998 - RNA, 22 nt, Human
acauguguacauauauaugugc

SEQ ID NO: 645999 - RNA, 22 nt, Human
cagagcuguauuuaucuuucca

SEQ ID NO: 646000 - RNA, 22 nt, Human
ucccacagcuucgugcuucccc

SEQ ID NO: 646001 - RNA, 22 nt, Human
uaaaagauaucuuagggauuug

SEQ ID NO: 646002 - RNA, 22 nt, Human
gguguagaaaagggaaggguuu

SEQ ID NO: 646003 - RNA, 22 nt, Human
aauuaguaaccuaauuccaucu

SEQ ID NO: 646004 - RNA, 22 nt, Human
ucaaaugcaggucuggucuugg

SEQ ID NO: 646005 - RNA, 19 nt, Human
uucugggcauucauauuua

SEQ ID NO: 646006 - RNA, 22 nt, Human
ucagcagggaggcucugugccc

SEQ ID NO: 646007 - RNA, 22 nt, Human
gcucuggcuacuguggcuaccg

SEQ ID NO: 646008 - RNA, 22 nt, Human
caugcugugcaucuugaugacc

SEQ ID NO: 646009 - RNA, 22 nt, Human
aacagucuacugaauaucugcg

SEQ ID NO: 646010 - RNA, 22 nt, Human
aucuuucagggccauuuguauu

SEQ ID NO: 646011 - RNA, 22 nt, Human
gacaagcucuuguuucaugguu

SEQ ID NO: 646012 - RNA, 22 nt, Human
ccagggcuugguggcuuguauc

SEQ ID NO: 646013 - RNA, 22 nt, Human
cucaacauuuaacagugaaaaa

SEQ ID NO: 646014 - RNA, 22 nt, Human
uuuuauugucucccaguucugg

SEQ ID NO: 646015 - RNA, 19 nt, Human
gggagacagcucugggcug

SEQ ID NO: 646016 - RNA, 21 nt, Human
agcuuuucuguuuuauaucua

SEQ ID NO: 646017 - RNA, 22 nt, Human
uucuuauugggagaccuuuucu

SEQ ID NO: 646018 - RNA, 22 nt, Human
acagguccucaagucagcuggg

SEQ ID NO: 646019 - RNA, 22 nt, Human
cuuuggcagccucugcuauuga

SEQ ID NO: 646020 - RNA, 22 nt, Human
ccagaaggcggagauugcagug

SEQ ID NO: 646021 - RNA, 22 nt, Human
ucagcacugauagaagucaaua

SEQ ID NO: 646022 - RNA, 18 nt, Human
uucucagacuuuggaagu

SEQ ID NO: 646023 - RNA, 22 nt, Human
cauggccagggagagagaaugu

SEQ ID NO: 646024 - RNA, 22 nt, Human
cuguggcuggaauaauaaaugu

SEQ ID NO: 646025 - RNA, 22 nt, Human
gacacuguuauggugagguaag

SEQ ID NO: 646026 - RNA, 22 nt, Human
cuccacucaggugcuuaaguug

SEQ ID NO: 646027 - RNA, 22 nt, Human
gggagauggcucagaggccgcg

SEQ ID NO: 646028 - RNA, 22 nt, Human
agucugcauucacagcaauuau

SEQ ID NO: 646029 - RNA, 22 nt, Human
uugguuuucaggggcaggauaa

SEQ ID NO: 646030 - RNA, 19 nt, Human
ugagaggcuuaaggcagcu

SEQ ID NO: 646031 - RNA, 22 nt, Human
gugaauggggcaggaaggaugg

SEQ ID NO: 646032 - RNA, 22 nt, Human
uuuagcauauccuauaaaacua

SEQ ID NO: 646033 - RNA, 22 nt, Human
auuugcuucugcuaaacaacuu

SEQ ID NO: 646034 - RNA, 22 nt, Human
gcccugagcacugcugcugggg

SEQ ID NO: 646035 - RNA, 22 nt, Human
agcuggaagugcauuucucacu

SEQ ID NO: 646036 - RNA, 22 nt, Human
accacugguuuugcagaggcgc

SEQ ID NO: 646037 - RNA, 22 nt, Human
uuccucuccucacaugagucac

SEQ ID NO: 646038 - RNA, 22 nt, Human
accaggcuugauaccaagaaau

SEQ ID NO: 646039 - RNA, 22 nt, Human
gccugucugcgucacgcuuauu

SEQ ID NO: 646040 - RNA, 22 nt, Human
uuacacaguugguaggggcaga

SEQ ID NO: 646041 - RNA, 22 nt, Human
acaaugucugcuauuuggcucu

SEQ ID NO: 646042 - RNA, 22 nt, Human
gccccucccagucaggagcacu

SEQ ID NO: 646043 - RNA, 22 nt, Human
cauuucugcagaauugcucuuc

SEQ ID NO: 646044 - RNA, 22 nt, Human
guccagcugcagcugggcagaa

SEQ ID NO: 646045 - RNA, 22 nt, Human
caggguuucaccauguuagcag

SEQ ID NO: 646046 - RNA, 22 nt, Human
gaacaucagucauaauuuaacg

SEQ ID NO: 646047 - RNA, 22 nt, Human
ccagagcccagcacacggugcu

SEQ ID NO: 646048 - RNA, 22 nt, Human
uuucaggaaacauuuaauggca

SEQ ID NO: 646049 - RNA, 22 nt, Human
agcuuauuaauuuuucugcaug

SEQ ID NO: 646050 - RNA, 22 nt, Human
ccuacacaucucaccucacagg

SEQ ID NO: 646051 - RNA, 22 nt, Human
uacacauccauguuuugacuuu

SEQ ID NO: 646052 - RNA, 22 nt, Human
ccagcuggagccaagguggacu

SEQ ID NO: 646053 - RNA, 22 nt, Human
gauuuuaauuauaggagguccu

SEQ ID NO: 646054 - RNA, 20 nt, Human
ccugccuguguuugugauga

SEQ ID NO: 646055 - RNA, 22 nt, Human
aggcuguggcaucacaucagga

SEQ ID NO: 646056 - RNA, 22 nt, Human
ugggcagcauccuccacaguca

SEQ ID NO: 646057 - RNA, 22 nt, Human
gacacuugugcuguuucugagc

SEQ ID NO: 646058 - RNA, 22 nt, Human
ugcagcucuuacggagggcggg

SEQ ID NO: 646059 - RNA, 22 nt, Human
uacauacaugguggaaugguua

SEQ ID NO: 646060 - RNA, 22 nt, Human
caaaugcaggucauaaccugag

SEQ ID NO: 646061 - RNA, 22 nt, Human
ucuccuggaagaauaccacacu

SEQ ID NO: 646062 - RNA, 21 nt, Human
ugcagcugacacccuuuggga

SEQ ID NO: 646063 - RNA, 22 nt, Human
ccugggcagggcuggacucuca

SEQ ID NO: 646064 - RNA, 21 nt, Human
aaguuuuauguugccauuugu

SEQ ID NO: 646065 - RNA, 22 nt, Human
uugaagacuaauuuagauaaug

SEQ ID NO: 646066 - RNA, 22 nt, Human
acuuggagagcauugcugggga

SEQ ID NO: 646067 - RNA, 22 nt, Human
gugcuuccucaguguuuaagga

SEQ ID NO: 646068 - RNA, 22 nt, Human
aagcaggcaggguggagaguuu

SEQ ID NO: 646069 - RNA, 22 nt, Human
ggagggugcauuuuacccugug

SEQ ID NO: 646070 - RNA, 22 nt, Human
cagugggauaugggggcagcau

SEQ ID NO: 646071 - RNA, 19 nt, Human
ucccucccuguaaucucac

SEQ ID NO: 646072 - RNA, 22 nt, Human
cuggggccacaacggcgcacgc

SEQ ID NO: 646073 - RNA, 20 nt, Human
ugaggcaggagaauggcaug

SEQ ID NO: 646074 - RNA, 22 nt, Human
ugcugcugaggcuaaaguauag

SEQ ID NO: 646075 - RNA, 22 nt, Human
uucugggggccaggacaguggu

SEQ ID NO: 646076 - RNA, 22 nt, Human
aggucucaaacuggcacccugu

SEQ ID NO: 646077 - RNA, 22 nt, Human
acuuagaaagggauucuagauu

SEQ ID NO: 646078 - RNA, 22 nt, Human
ugaguguauaugaagguuguaa

SEQ ID NO: 646079 - RNA, 21 nt, Human
gaggccacuaauaggggcaga

SEQ ID NO: 646080 - RNA, 22 nt, Human
gagcaaaauaaauucugacaaa

SEQ ID NO: 646081 - RNA, 18 nt, Human
cuccccuguuuucccugc

SEQ ID NO: 646082 - RNA, 22 nt, Human
uacccagggcuuuucugaugca

SEQ ID NO: 646083 - RNA, 22 nt, Human
cauagaaacuugcagcaagcac

SEQ ID NO: 646084 - RNA, 22 nt, Human
ggagagucugccgagccagccc

SEQ ID NO: 646085 - RNA, 22 nt, Human
auucauaaguaaaugauuaccu

SEQ ID NO: 646086 - RNA, 22 nt, Human
guuuccuauaacucaggcacca

SEQ ID NO: 646087 - RNA, 22 nt, Human
ugucccagcagcuggguucucu

SEQ ID NO: 646088 - RNA, 22 nt, Human
aggccagcugccacccgguccg

SEQ ID NO: 646089 - RNA, 18 nt, Human
uauuccugauucaucuuu

SEQ ID NO: 646090 - RNA, 22 nt, Human
aaucaucacgaacacaacagcg

SEQ ID NO: 646091 - RNA, 22 nt, Human
aucugggagacccuugcgggaa

SEQ ID NO: 646092 - RNA, 22 nt, Human
uuacagaggcuuccagggccca

SEQ ID NO: 646093 - RNA, 22 nt, Human
gcuggccauagaagccaaagag

SEQ ID NO: 646094 - RNA, 22 nt, Human
cuguuuccuaccguuuuucauu

SEQ ID NO: 646095 - RNA, 22 nt, Human
aagcccaguaccuucagugagg

SEQ ID NO: 646096 - RNA, 22 nt, Human
ucuucucuccugcuuggcagaa

SEQ ID NO: 646097 - RNA, 22 nt, Human
cuuuauuguccuucuuaggugg

SEQ ID NO: 646098 - RNA, 22 nt, Human
gagggaagauuccccauauggg

SEQ ID NO: 646099 - RNA, 22 nt, Human
ugcagggaaugcuugcagcaug

SEQ ID NO: 646100 - RNA, 20 nt, Human
ccagaagagaugaucaucca

SEQ ID NO: 646101 - RNA, 22 nt, Human
ucuagauuuggggcaugaaguu

SEQ ID NO: 646102 - RNA, 22 nt, Human
gccaccugguggcaucuucugg

SEQ ID NO: 646103 - RNA, 22 nt, Human
agaauucuggaguugggaggaa

SEQ ID NO: 646104 - RNA, 22 nt, Human
uucccacaacagaucuguauua

SEQ ID NO: 646105 - RNA, 22 nt, Human
agcugggcugggcugagcugag

SEQ ID NO: 646106 - RNA, 22 nt, Human
uaggguccaagccuuauaauua

SEQ ID NO: 646107 - RNA, 22 nt, Human
gaggcagugucgguggcaggau

SEQ ID NO: 646108 - RNA, 22 nt, Human
augaggccagaccacucugcau

SEQ ID NO: 646109 - RNA, 22 nt, Human
aauaacuggcacauaucacaua

SEQ ID NO: 646110 - RNA, 22 nt, Human
aggaagcaaaaggcagggucua

SEQ ID NO: 646111 - RNA, 22 nt, Human
ucaaaggauaacugagggcagu

SEQ ID NO: 646112 - RNA, 22 nt, Human
uagcagcucugauucugggccc

SEQ ID NO: 646113 - RNA, 22 nt, Human
aaagugcugagauuacaagcgu

SEQ ID NO: 646114 - RNA, 17 nt, Human
agugaggagauuggaag

SEQ ID NO: 646115 - RNA, 22 nt, Human
gcaaaugcuaaaguguagagac

SEQ ID NO: 646116 - RNA, 22 nt, Human
guuagugcuuauuaaauaguau

SEQ ID NO: 646117 - RNA, 22 nt, Human
ugauuccuaggcacucuucucc

SEQ ID NO: 646118 - RNA, 22 nt, Human
agagauaauuagguuaaaugag

SEQ ID NO: 646119 - RNA, 22 nt, Human
acuggaaaaccacugaaaugag

SEQ ID NO: 646120 - RNA, 22 nt, Human
uuucuacauucaaaaacuacca

SEQ ID NO: 646121 - RNA, 22 nt, Human
uguggcagcuggagguggagaa

SEQ ID NO: 646122 - RNA, 22 nt, Human
cugccacaagcuggcccugugu

SEQ ID NO: 646123 - RNA, 22 nt, Human
uuauuauugauucgcucucaaa

SEQ ID NO: 646124 - RNA, 22 nt, Human
ugcuggaggagaagguugcuca

SEQ ID NO: 646125 - RNA, 22 nt, Human
uauucacauucucaggccuggu

SEQ ID NO: 646126 - RNA, 22 nt, Human
ugugacagaucuuuaaauaaug

SEQ ID NO: 646127 - RNA, 22 nt, Human
cugggagucccuggaauagcuc

SEQ ID NO: 646128 - RNA, 22 nt, Human
ugggggagagugcaagcaugaa

SEQ ID NO: 646129 - RNA, 22 nt, Human
acugggcucccaggcuugucau

SEQ ID NO: 646130 - RNA, 22 nt, Human
cccagaggucugaaaagguuga

SEQ ID NO: 646131 - RNA, 22 nt, Human
ugaagccauuacuguguuaggg

SEQ ID NO: 646132 - RNA, 22 nt, Human
caggaaacaaagccuugcucau

SEQ ID NO: 646133 - RNA, 22 nt, Human
agagagggcauagaaaaaggga

SEQ ID NO: 646134 - RNA, 22 nt, Human
auguuacaguugaguaaauuaa

SEQ ID NO: 646135 - RNA, 22 nt, Human
agucauaauuauaaacaucagu

SEQ ID NO: 646136 - RNA, 22 nt, Human
guaagggauuugaacauagguu

SEQ ID NO: 646137 - RNA, 22 nt, Human
uaagucaucacauugcagagau

SEQ ID NO: 646138 - RNA, 22 nt, Human
ugcucuggacgcugagugguuu

SEQ ID NO: 646139 - RNA, 22 nt, Human
aggcugcugccuuggagagugu

SEQ ID NO: 646140 - RNA, 22 nt, Human
ugucugcugaugucacauagcc

SEQ ID NO: 646141 - RNA, 22 nt, Human
aacuguacgauaauaaauuugu

SEQ ID NO: 646142 - RNA, 22 nt, Human
gcagagaggauauuauugucca

SEQ ID NO: 646143 - RNA, 22 nt, Human
ccaggacaggaguuggcuucgc

SEQ ID NO: 646144 - RNA, 22 nt, Human
aguuuaauuggaggcguggcuc

SEQ ID NO: 646145 - RNA, 22 nt, Human
cccagcugauuuuugcagagau

SEQ ID NO: 646146 - RNA, 22 nt, Human
guuuguuuauacaaaagauccu

SEQ ID NO: 646147 - RNA, 22 nt, Human
ucaggaguacuggugucuacag

SEQ ID NO: 646148 - RNA, 22 nt, Human
agaugguuuugucuuuaugauu

SEQ ID NO: 646149 - RNA, 22 nt, Human
uuucuguuguacuuaaacuagg

SEQ ID NO: 646150 - RNA, 22 nt, Human
gggcgcugggugucgagacuca

SEQ ID NO: 646151 - RNA, 22 nt, Human
cauguggcuuuggcaugugccc

SEQ ID NO: 646152 - RNA, 22 nt, Human
uuaaaugaugcauaucauuuag

SEQ ID NO: 646153 - RNA, 22 nt, Human
cugccucuugacagaucguggc

SEQ ID NO: 646154 - RNA, 22 nt, Human
cugucuggauauaccuuggcca

SEQ ID NO: 646155 - RNA, 22 nt, Human
uugcaaaagcaauugcaguuuu

SEQ ID NO: 646156 - RNA, 21 nt, Human
gacucuggggucagcucaacc

SEQ ID NO: 646157 - RNA, 23 nt, Human
ggcagagagcauggcuggggccc

SEQ ID NO: 646158 - RNA, 22 nt, Human
ucagcaggugccucagauucuu

SEQ ID NO: 646159 - RNA, 22 nt, Human
cuuaaauuggaugaguuaaguu

SEQ ID NO: 646160 - RNA, 22 nt, Human
gagcugagacacacuuuggcaa

SEQ ID NO: 646161 - RNA, 22 nt, Human
cagggacagcacuaaacucuug

SEQ ID NO: 646162 - RNA, 22 nt, Human
acaggccucaaauagggugccu

SEQ ID NO: 646163 - RNA, 22 nt, Human
gaaguuauugccugugaugaaa

SEQ ID NO: 646164 - RNA, 22 nt, Human
gaauucuaggguaaauauccua

SEQ ID NO: 646165 - RNA, 22 nt, Human
aagagccuggcugcuaggcuca

SEQ ID NO: 646166 - RNA, 19 nt, Human
ugacugccucaggggugga

SEQ ID NO: 646167 - RNA, 22 nt, Human
aggaaauugggacacagagaaa

SEQ ID NO: 646168 - RNA, 22 nt, Human
agcagaaacagccagucuggac

SEQ ID NO: 646169 - RNA, 22 nt, Human
auggauggccugagcacagcug

SEQ ID NO: 646170 - RNA, 22 nt, Human
aggcaccucagcugagccuggg

SEQ ID NO: 646171 - RNA, 22 nt, Human
aaaguuacuaucacaaugaaau

SEQ ID NO: 646172 - RNA, 22 nt, Human
gccugucugcagggcugucauu

SEQ ID NO: 646173 - RNA, 22 nt, Human
aggcacuuguaauugcagucau

SEQ ID NO: 646174 - RNA, 21 nt, Human
caggaugaugggaagguggug

SEQ ID NO: 646175 - RNA, 22 nt, Human
aggaauuuuacaagcugguugc

SEQ ID NO: 646176 - RNA, 22 nt, Human
ucuucugaugccaguaaccaug

SEQ ID NO: 646177 - RNA, 22 nt, Human
uucacagcuaagagcuaaguaa

SEQ ID NO: 646178 - RNA, 22 nt, Human
gagggccuggcacagggaggcu

SEQ ID NO: 646179 - RNA, 22 nt, Human
agacauuuggagccaacuuucc

SEQ ID NO: 646180 - RNA, 22 nt, Human
aaaugucaaggugauagaugca

SEQ ID NO: 646181 - RNA, 22 nt, Human
uaaugucuguguuucagugcag

SEQ ID NO: 646182 - RNA, 22 nt, Human
aggccuccagcugaguuuugcu

SEQ ID NO: 646183 - RNA, 22 nt, Human
ugaaucauggauaaauagcuua

SEQ ID NO: 646184 - RNA, 22 nt, Human
uuaaggaacuugucuuucucuu

SEQ ID NO: 646185 - RNA, 22 nt, Human
aagugaauguagcaaacuugaa

SEQ ID NO: 646186 - RNA, 22 nt, Human
ggcuuggcccaggccucacucc

SEQ ID NO: 646187 - RNA, 22 nt, Human
caugugugguuaccuacuugac

SEQ ID NO: 646188 - RNA, 22 nt, Human
cugagggcaccgacagagugga

SEQ ID NO: 646189 - RNA, 17 nt, Human
aauguccuuggaccaca

SEQ ID NO: 646190 - RNA, 22 nt, Human
agagucaaaauuuaccagaaug

SEQ ID NO: 646191 - RNA, 22 nt, Human
agacauuuccuagacaucaaug

SEQ ID NO: 646192 - RNA, 16 nt, Human
ccucugggauguuugc

SEQ ID NO: 646193 - RNA, 22 nt, Human
uuuuuccaggguuagauguuua

SEQ ID NO: 646194 - RNA, 22 nt, Human
agacaggcugcugucugcuagg

SEQ ID NO: 646195 - RNA, 22 nt, Human
ucagcaguggcucucaugcagu

SEQ ID NO: 646196 - RNA, 22 nt, Human
cucucagugccugcccuaggcu

SEQ ID NO: 646197 - RNA, 22 nt, Human
ucuacaaagaagaauuaauguc

SEQ ID NO: 646198 - RNA, 22 nt, Human
auacacauguguaugugcaugc

SEQ ID NO: 646199 - RNA, 22 nt, Human
ugaucuuugguaaucuggcaca

SEQ ID NO: 646200 - RNA, 22 nt, Human
uuacagcuagccaauuauuuag

SEQ ID NO: 646201 - RNA, 22 nt, Human
caggaagagguggggcuaaagu

SEQ ID NO: 646202 - RNA, 22 nt, Human
cagagccaugguaugggcuugu

SEQ ID NO: 646203 - RNA, 22 nt, Human
ucaguccuacacgcucagggac

SEQ ID NO: 646204 - RNA, 22 nt, Human
cugcacagaggucggucugcca

SEQ ID NO: 646205 - RNA, 22 nt, Human
aaggauugucuggcuauuuaug

SEQ ID NO: 646206 - RNA, 22 nt, Human
ccagggcuccauugcucauccu

SEQ ID NO: 646207 - RNA, 22 nt, Human
gagucucugaccagggugccaa

SEQ ID NO: 646208 - RNA, 17 nt, Human
ucugaggccucuaggag

SEQ ID NO: 646209 - RNA, 22 nt, Human
uugucaucauccucuuuggggu

SEQ ID NO: 646210 - RNA, 22 nt, Human
ugcagauacaguauguggaagc

SEQ ID NO: 646211 - RNA, 22 nt, Human
uggagagcccgagacauccugu

SEQ ID NO: 646212 - RNA, 19 nt, Human
cacugugguccuucacugc

SEQ ID NO: 646213 - RNA, 22 nt, Human
aggaggcugcaacccugaggcc

SEQ ID NO: 646214 - RNA, 22 nt, Human
caugggggcugaggcugcugua

SEQ ID NO: 646215 - RNA, 22 nt, Human
ucaggcugaccagguuuugcuc

SEQ ID NO: 646216 - RNA, 22 nt, Human
gcuuuacauuuuggaaagguga

SEQ ID NO: 646217 - RNA, 20 nt, Human
ucuccuggucugguccgugc

SEQ ID NO: 646218 - RNA, 22 nt, Human
ucacuuauugcucaucucaugc

SEQ ID NO: 646219 - RNA, 22 nt, Human
auugcuuuuccuuaacacaugc

SEQ ID NO: 646220 - RNA, 20 nt, Human
uugauaggcagcuugucagg

SEQ ID NO: 646221 - RNA, 22 nt, Human
gacaguggauucaucuagucaa

SEQ ID NO: 646222 - RNA, 22 nt, Human
augcuuccuaaccauggccgug

SEQ ID NO: 646223 - RNA, 19 nt, Human
acaaacugaguacacuugu

SEQ ID NO: 646224 - RNA, 22 nt, Human
acagaaaugauguuuggcaaua

SEQ ID NO: 646225 - RNA, 23 nt, Human
aucuuagcauagacuugaguccc

SEQ ID NO: 646226 - RNA, 22 nt, Human
cauguuauuuauccauuaaaca

SEQ ID NO: 646227 - RNA, 22 nt, Human
guugcuuuucuccaucacaugg

SEQ ID NO: 646228 - RNA, 22 nt, Human
uuugccuucucugaaccuauuu

SEQ ID NO: 646229 - RNA, 22 nt, Human
agcaacuuuucuagacaugguc

SEQ ID NO: 646230 - RNA, 22 nt, Human
cuuuccagcauuuccuugugaa

SEQ ID NO: 646231 - RNA, 22 nt, Human
aggcagaucaguacaggguuaa

SEQ ID NO: 646232 - RNA, 18 nt, Human
cuucucccaucuuggcca

SEQ ID NO: 646233 - RNA, 22 nt, Human
gacagacaggagcucacaggca

SEQ ID NO: 646234 - RNA, 22 nt, Human
aggucauuaaaguuaaaugagg

SEQ ID NO: 646235 - RNA, 22 nt, Human
ggggcccagggcagcagugcag

SEQ ID NO: 646236 - RNA, 19 nt, Human
cuuuagacacaccuggaca

SEQ ID NO: 646237 - RNA, 22 nt, Human
cagagccugcugccuucugaag

SEQ ID NO: 646238 - RNA, 22 nt, Human
cagccagcugucccaagugccu

SEQ ID NO: 646239 - RNA, 21 nt, Human
auacuacauuucucugacuuu

SEQ ID NO: 646240 - RNA, 22 nt, Human
ggguuccaaacauagucuuccu

SEQ ID NO: 646241 - RNA, 22 nt, Human
cccagcuccagagccagaaaca

SEQ ID NO: 646242 - RNA, 22 nt, Human
cucuccagggguagaugccuuc

SEQ ID NO: 646243 - RNA, 22 nt, Human
ugcuggaguaacaagacacuca

SEQ ID NO: 646244 - RNA, 22 nt, Human
uuacauuuggcuauguccucua

SEQ ID NO: 646245 - RNA, 22 nt, Human
aauggcugccagggcaggaggu

SEQ ID NO: 646246 - RNA, 22 nt, Human
uauaugcuugugcaugucuuug

SEQ ID NO: 646247 - RNA, 22 nt, Human
agccccaggaugggccgcagga

SEQ ID NO: 646248 - RNA, 22 nt, Human
auaaucaaaguccuaugacauc

SEQ ID NO: 646249 - RNA, 22 nt, Human
ggacaaaggguggagccucuga

SEQ ID NO: 646250 - RNA, 22 nt, Human
ucccagcagucagagcuaugug

SEQ ID NO: 646251 - RNA, 22 nt, Human
uccuuucuccgggggacuguug

SEQ ID NO: 646252 - RNA, 22 nt, Human
cuuucacacacauacauuugga

SEQ ID NO: 646253 - RNA, 21 nt, Human
uggcucugaaagagugcugca

SEQ ID NO: 646254 - RNA, 22 nt, Human
aaaagggcaaaaccaucaugga

SEQ ID NO: 646255 - RNA, 22 nt, Human
gagaacacgaggaggcccagcg

SEQ ID NO: 646256 - RNA, 21 nt, Human
aggcucagcagguguauaaag

SEQ ID NO: 646257 - RNA, 22 nt, Human
augugcaugcacuuacaugugu

SEQ ID NO: 646258 - RNA, 22 nt, Human
uggcuucuagcaguguugauuu

SEQ ID NO: 646259 - RNA, 22 nt, Human
ggagcugagguaacagugagug

SEQ ID NO: 646260 - RNA, 22 nt, Human
auuauauaggacuugcccuucc

SEQ ID NO: 646261 - RNA, 22 nt, Human
uccugguggcuuucccugccuu

SEQ ID NO: 646262 - RNA, 22 nt, Human
uugaggucugagacugugcagg

SEQ ID NO: 646263 - RNA, 22 nt, Human
uguuuucugauucucguguggu

SEQ ID NO: 646264 - RNA, 22 nt, Human
ugagaggcuagaucagcucugu

SEQ ID NO: 646265 - RNA, 22 nt, Human
guauuuccauuagugugugcac

SEQ ID NO: 646266 - RNA, 22 nt, Human
cuaggcugugcauugcaugaca

SEQ ID NO: 646267 - RNA, 22 nt, Human
ugggaaggaacugccuuuagcu

SEQ ID NO: 646268 - RNA, 22 nt, Human
aggaaacaacuuggcaugagcc

SEQ ID NO: 646269 - RNA, 22 nt, Human
uggggagagaccggaauguuuc

SEQ ID NO: 646270 - RNA, 22 nt, Human
ugauuuccuaggucuggagaag

SEQ ID NO: 646271 - RNA, 22 nt, Human
gggcccuggggauguggacgcg

SEQ ID NO: 646272 - RNA, 22 nt, Human
gaacauucacagacucaccauu

SEQ ID NO: 646273 - RNA, 22 nt, Human
guuuauaugaacuucauaccca

SEQ ID NO: 646274 - RNA, 22 nt, Human
gcugggcuccaggccaggguga

SEQ ID NO: 646275 - RNA, 22 nt, Human
ggucucuggccuuggagauuga

SEQ ID NO: 646276 - RNA, 18 nt, Human
ugucugaagccacuuuuu

SEQ ID NO: 646277 - RNA, 22 nt, Human
gcaccagcugcuggguucuaga

SEQ ID NO: 646278 - RNA, 22 nt, Human
aagccagauagaagaacucauu

SEQ ID NO: 646279 - RNA, 22 nt, Human
aauucaguugacagcuaaugcc

SEQ ID NO: 646280 - RNA, 22 nt, Human
acucacucuuaaucagacuccc

SEQ ID NO: 646281 - RNA, 22 nt, Human
auauacaguauguacugugguu

SEQ ID NO: 646282 - RNA, 22 nt, Human
acucucccacguucgacucuaa

SEQ ID NO: 646283 - RNA, 22 nt, Human
ccgggcgggggcucucgucacc

SEQ ID NO: 646284 - RNA, 22 nt, Human
aaugauaugcaaauuaucauca

SEQ ID NO: 646285 - RNA, 22 nt, Human
gacaccagaagacauaagcaga

SEQ ID NO: 646286 - RNA, 22 nt, Human
auuccuaaaguaauacacuaga

SEQ ID NO: 646287 - RNA, 22 nt, Human
cagggcucccuugcaaggaggg

SEQ ID NO: 646288 - RNA, 22 nt, Human
ugguugugguccuccacaucgc

SEQ ID NO: 646289 - RNA, 22 nt, Human
uacuggaaggcuggaagucagg

SEQ ID NO: 646290 - RNA, 20 nt, Human
acuguguaaacaugauucau

SEQ ID NO: 646291 - RNA, 22 nt, Human
uacuguguggugagcugucucc

SEQ ID NO: 646292 - RNA, 22 nt, Human
uaaagacauaggaucagggaga

SEQ ID NO: 646293 - RNA, 22 nt, Human
auggcuguuggcaggaggccuc

SEQ ID NO: 646294 - RNA, 22 nt, Human
uuagcauucucugugugcauaa

SEQ ID NO: 646295 - RNA, 22 nt, Human
cugagaguguggcuuccaggcc

SEQ ID NO: 646296 - RNA, 21 nt, Human
gcagccagacgggauucaguu

SEQ ID NO: 646297 - RNA, 22 nt, Human
ugccugcccuuuccacacagcc

SEQ ID NO: 646298 - RNA, 22 nt, Human
aguguccugugucccagacugu

SEQ ID NO: 646299 - RNA, 22 nt, Human
aggagagcuggugucuggaauc

SEQ ID NO: 646300 - RNA, 22 nt, Human
uauuauggcagcauucaguaug

SEQ ID NO: 646301 - RNA, 22 nt, Human
cacccuuugcugcucuuccucc

SEQ ID NO: 646302 - RNA, 22 nt, Human
gguggcugguuuuauaagaggu

SEQ ID NO: 646303 - RNA, 22 nt, Human
cagcuauuggcaagaaguggug

SEQ ID NO: 646304 - RNA, 22 nt, Human
uggguggaauaaaucaguucug

SEQ ID NO: 646305 - RNA, 22 nt, Human
ucagccuggcaggauggccugg

SEQ ID NO: 646306 - RNA, 22 nt, Human
gccuggaguugaaacuauuauu

SEQ ID NO: 646307 - RNA, 19 nt, Human
ccugccugaccccggcuac

SEQ ID NO: 646308 - RNA, 22 nt, Human
gguccucucccaagagcgcauc

SEQ ID NO: 646309 - RNA, 22 nt, Human
acagucuggaggcugcuucauu

SEQ ID NO: 646310 - RNA, 22 nt, Human
auauacuuggagacuaucauug

SEQ ID NO: 646311 - RNA, 22 nt, Human
auaauacaugguuaaccucuuu

SEQ ID NO: 646312 - RNA, 21 nt, Human
gagugggacaugggagugguu

SEQ ID NO: 646313 - RNA, 22 nt, Human
ccagcaggaaagugacguuuga

SEQ ID NO: 646314 - RNA, 22 nt, Human
accccaggcccagggaagaggc

SEQ ID NO: 646315 - RNA, 22 nt, Human
aaacacagguacugcagaagug

SEQ ID NO: 646316 - RNA, 22 nt, Human
cagcaucuuauuuucuauggaa

SEQ ID NO: 646317 - RNA, 22 nt, Human
aucuuucacuuuuuguggauga

SEQ ID NO: 646318 - RNA, 22 nt, Human
ccagccaggcuggcuguggagg

SEQ ID NO: 646319 - RNA, 22 nt, Human
ggcuuucagccaaaggacaacc

SEQ ID NO: 646320 - RNA, 23 nt, Human
cuuuaaugaaauucucugugaag

SEQ ID NO: 646321 - RNA, 22 nt, Human
ccagcucugccaagcgucagcu

SEQ ID NO: 646322 - RNA, 22 nt, Human
aagccaguguccagaaugggca

SEQ ID NO: 646323 - RNA, 22 nt, Human
cuaacuuuuacagucauguugc

SEQ ID NO: 646324 - RNA, 22 nt, Human
agugucugaguaaauuucucau

SEQ ID NO: 646325 - RNA, 19 nt, Human
uguuuuguuaaagcagucc

SEQ ID NO: 646326 - RNA, 22 nt, Human
ggagugagcaaauagagauuug

SEQ ID NO: 646327 - RNA, 22 nt, Human
aaagguucuacuuuuaaagaau

SEQ ID NO: 646328 - RNA, 22 nt, Human
gucauugacuagaauuccaaag

SEQ ID NO: 646329 - RNA, 22 nt, Human
uugugaucuguguugauggccu

SEQ ID NO: 646330 - RNA, 19 nt, Human
gcugggagcagacccuccc

SEQ ID NO: 646331 - RNA, 21 nt, Human
gcugucucuggcuccugggaa

SEQ ID NO: 646332 - RNA, 22 nt, Human
agcagcagaucaaacaggcuug

SEQ ID NO: 646333 - RNA, 22 nt, Human
ggggaccugggcuucaaggguu

SEQ ID NO: 646334 - RNA, 22 nt, Human
acccacagaaccugugacaaca

SEQ ID NO: 646335 - RNA, 22 nt, Human
agggcugcaccggggcuucgcg

SEQ ID NO: 646336 - RNA, 22 nt, Human
gucuggcuguuccugccuguga

SEQ ID NO: 646337 - RNA, 22 nt, Human
ucugcuguucucaugcugauuu

SEQ ID NO: 646338 - RNA, 22 nt, Human
acgcccggucuccauaguuuuu

SEQ ID NO: 646339 - RNA, 22 nt, Human
augaggucuggcaaucagaaac

SEQ ID NO: 646340 - RNA, 22 nt, Human
gcugcuggggccuucccucggg

SEQ ID NO: 646341 - RNA, 20 nt, Human
uuaaaaagagucacaggaga

SEQ ID NO: 646342 - RNA, 22 nt, Human
ccagggcucuaugaggguggag

SEQ ID NO: 646343 - RNA, 22 nt, Human
uuggcauuuuuccucagcugga

SEQ ID NO: 646344 - RNA, 22 nt, Human
aaaggcuggaaacugaagauaa

SEQ ID NO: 646345 - RNA, 22 nt, Human
gcuggcuuccuucugcagcuag

SEQ ID NO: 646346 - RNA, 22 nt, Human
ugucuauuaauuccacauaaaa

SEQ ID NO: 646347 - RNA, 22 nt, Human
uuucucugggcuguuggcagcc

SEQ ID NO: 646348 - RNA, 21 nt, Human
cugguguagcacucaggugcu

SEQ ID NO: 646349 - RNA, 22 nt, Human
ggcaguggguuccccaaggcac

SEQ ID NO: 646350 - RNA, 22 nt, Human
aggaaggacuccaugguccguc

SEQ ID NO: 646351 - RNA, 22 nt, Human
cccagagccucauucuguuggg

SEQ ID NO: 646352 - RNA, 22 nt, Human
guggcaguucugugucucuugu

SEQ ID NO: 646353 - RNA, 22 nt, Human
gcaguggggcgcugggaguugg

SEQ ID NO: 646354 - RNA, 22 nt, Human
guggccuggaugagcuucgaca

SEQ ID NO: 646355 - RNA, 22 nt, Human
cagaggaguucaguacacagcc

SEQ ID NO: 646356 - RNA, 22 nt, Human
ucccaggcgccugguggggagc

SEQ ID NO: 646357 - RNA, 22 nt, Human
gugggggcagugggcuucgagc

SEQ ID NO: 646358 - RNA, 20 nt, Human
augugaaagaucaguugucu

SEQ ID NO: 646359 - RNA, 22 nt, Human
uccauccauguaggaagauggu

SEQ ID NO: 646360 - RNA, 22 nt, Human
auccuucaggaaaccauccuca

SEQ ID NO: 646361 - RNA, 22 nt, Human
uggucugaggaacaccagcacu

SEQ ID NO: 646362 - RNA, 22 nt, Human
agugucuuuagcaaguuuaguc

SEQ ID NO: 646363 - RNA, 22 nt, Human
auucaguuaguagauuugguca

SEQ ID NO: 646364 - RNA, 22 nt, Human
uaaaguguguggguucuaaauu

SEQ ID NO: 646365 - RNA, 22 nt, Human
ggcaggccugagaggcagggcu

SEQ ID NO: 646366 - RNA, 22 nt, Human
uacaguagaaugcggugccagu

SEQ ID NO: 646367 - RNA, 22 nt, Human
cuucacauugggcuugauauga

SEQ ID NO: 646368 - RNA, 22 nt, Human
gcacacagagaggugguauguc

SEQ ID NO: 646369 - RNA, 22 nt, Human
acauacacaagcguacaugaac

SEQ ID NO: 646370 - RNA, 22 nt, Human
ugugcccaucucccagcuugac

SEQ ID NO: 646371 - RNA, 19 nt, Human
cccagcuguucuuccacca

SEQ ID NO: 646372 - RNA, 22 nt, Human
cugcagcuccccugagaucaag

SEQ ID NO: 646373 - RNA, 22 nt, Human
uucauucauguauugucuaugg

SEQ ID NO: 646374 - RNA, 22 nt, Human
ccugggcaggccggacgcuggg

SEQ ID NO: 646375 - RNA, 22 nt, Human
cacuuuaacucacauuucagcu

SEQ ID NO: 646376 - RNA, 22 nt, Human
cuccucuggguccugguggcca

SEQ ID NO: 646377 - RNA, 21 nt, Human
auuuacaaaacagucccuucc

SEQ ID NO: 646378 - RNA, 22 nt, Human
uuccaggaauucagcucucagu

SEQ ID NO: 646379 - RNA, 20 nt, Human
uggcugcacaccaggacagg

SEQ ID NO: 646380 - RNA, 22 nt, Human
agaacagggacuggaggcuuca

SEQ ID NO: 646381 - RNA, 22 nt, Human
gccacaggaaagcacccuggag

SEQ ID NO: 646382 - RNA, 23 nt, Human
aggugccaacugagagcugagag

SEQ ID NO: 646383 - RNA, 21 nt, Human
acagacagggccagugucccc

SEQ ID NO: 646384 - RNA, 22 nt, Human
aauugcuuuacaagccguuuaa

SEQ ID NO: 646385 - RNA, 22 nt, Human
cccagcucucugcucuuagccu

SEQ ID NO: 646386 - RNA, 22 nt, Human
aggaaggagggcagauauuaag

SEQ ID NO: 646387 - RNA, 19 nt, Human
aggaaagguggccuuagca

SEQ ID NO: 646388 - RNA, 22 nt, Human
aguuauaaucugcuacugauau

SEQ ID NO: 646389 - RNA, 17 nt, Human
agcugccagggagugug

SEQ ID NO: 646390 - RNA, 22 nt, Human
auuuuccaaaauaauuguuacu

SEQ ID NO: 646391 - RNA, 22 nt, Human
auucaaaugucaaauccaccag

SEQ ID NO: 646392 - RNA, 22 nt, Human
ugcuugauuaagccuuguuugc

SEQ ID NO: 646393 - RNA, 22 nt, Human
aucuauaucaugggguaaggua

SEQ ID NO: 646394 - RNA, 22 nt, Human
uuccucuccucccaccagguga

SEQ ID NO: 646395 - RNA, 20 nt, Human
ucuggcacacugagaagcuc

SEQ ID NO: 646396 - RNA, 22 nt, Human
ugcugggcuguuccuguccaug

SEQ ID NO: 646397 - RNA, 22 nt, Human
auggcuggucucccauggaaaa

SEQ ID NO: 646398 - RNA, 22 nt, Human
cccaggaggacauuccauaccc

SEQ ID NO: 646399 - RNA, 22 nt, Human
agcccacuguuuucauuucucu

SEQ ID NO: 646400 - RNA, 22 nt, Human
agggcuuucggcacucugaggg

SEQ ID NO: 646401 - RNA, 19 nt, Human
guguccauggagcauggag

SEQ ID NO: 646402 - RNA, 22 nt, Human
caccugcucccucaguuccagc

SEQ ID NO: 646403 - RNA, 22 nt, Human
ggccuggaguuuggggaauaga

SEQ ID NO: 646404 - RNA, 22 nt, Human
agagcagcuggcugcaucuaga

SEQ ID NO: 646405 - RNA, 22 nt, Human
ucucuguggguuucaccagcgc

SEQ ID NO: 646406 - RNA, 22 nt, Human
cugggcaggagggcucuaugga

SEQ ID NO: 646407 - RNA, 22 nt, Human
aagccaggguuuguggaucuau

SEQ ID NO: 646408 - RNA, 22 nt, Human
gugugaaaguuccuaagacuau

SEQ ID NO: 646409 - RNA, 22 nt, Human
cauuugaaaccuggaaucuacc

SEQ ID NO: 646410 - RNA, 22 nt, Human
ugcagggauccuagcugaagag

SEQ ID NO: 646411 - RNA, 22 nt, Human
acugccauuggucaaaugagug

SEQ ID NO: 646412 - RNA, 22 nt, Human
acagaacuuccugcuggagugg

SEQ ID NO: 646413 - RNA, 22 nt, Human
augaguaagaccauaauuuuug

SEQ ID NO: 646414 - RNA, 22 nt, Human
cagagcugcaaaugccccuccg

SEQ ID NO: 646415 - RNA, 22 nt, Human
uuggaacucaauaauucuucuu

SEQ ID NO: 646416 - RNA, 22 nt, Human
uugugggaucucccuguugcuc

SEQ ID NO: 646417 - RNA, 22 nt, Human
ugaggcuuagagaagaugggau

SEQ ID NO: 646418 - RNA, 22 nt, Human
cagaggcugagcagucaguuug

SEQ ID NO: 646419 - RNA, 19 nt, Human
cccaaggcccugggcaggc

SEQ ID NO: 646420 - RNA, 22 nt, Human
uggccuggcccugaggcccugu

SEQ ID NO: 646421 - RNA, 22 nt, Human
uggcuucuuagaccaguggccu

SEQ ID NO: 646422 - RNA, 22 nt, Human
uuuccuaaggcucauuuuaaaa

SEQ ID NO: 646423 - RNA, 22 nt, Human
ugaaggcaaccucugugguccu

SEQ ID NO: 646424 - RNA, 19 nt, Human
uugaauaugcaaacugaag

SEQ ID NO: 646425 - RNA, 22 nt, Human
aguaacaaauagcugccuuuaa

SEQ ID NO: 646426 - RNA, 22 nt, Human
gcccauccauggggucauggcc

SEQ ID NO: 646427 - RNA, 22 nt, Human
aucuuccuuugccaugggauag

SEQ ID NO: 646428 - RNA, 22 nt, Human
uggcccaggaggccagagggca

SEQ ID NO: 646429 - RNA, 22 nt, Human
ugguggcuguugcagaacugag

SEQ ID NO: 646430 - RNA, 22 nt, Human
aggggcuggaguucgagguuac

SEQ ID NO: 646431 - RNA, 22 nt, Human
uucuacauugugaaguucuuua

SEQ ID NO: 646432 - RNA, 22 nt, Human
gggcccuggcuuuccuguucuu

SEQ ID NO: 646433 - RNA, 22 nt, Human
aagcugugaaauagauuacaca

SEQ ID NO: 646434 - RNA, 22 nt, Human
ugggggcugaguaagaugagau

SEQ ID NO: 646435 - RNA, 22 nt, Human
acuguucuucccauuuauauug

SEQ ID NO: 646436 - RNA, 22 nt, Human
gcccugugcgcugaguucaggg

SEQ ID NO: 646437 - RNA, 22 nt, Human
acuccagggaggugagugugcg

SEQ ID NO: 646438 - RNA, 22 nt, Human
agagauugugcuacucacccaa

SEQ ID NO: 646439 - RNA, 22 nt, Human
cucccucugaggcuuugagccu

SEQ ID NO: 646440 - RNA, 22 nt, Human
cagcuucuuugggauucuuuau

SEQ ID NO: 646441 - RNA, 22 nt, Human
aucugccuggucuuugaugcag

SEQ ID NO: 646442 - RNA, 22 nt, Human
ucaggccacggcucacugagac

SEQ ID NO: 646443 - RNA, 22 nt, Human
uuucuuguaagauguuuauuaa

SEQ ID NO: 646444 - RNA, 22 nt, Human
caaggcagcuuaauagaauuug

SEQ ID NO: 646445 - RNA, 22 nt, Human
uccauggguagcccugguugag

SEQ ID NO: 646446 - RNA, 22 nt, Human
acuugaauaggaaagccacaaa

SEQ ID NO: 646447 - RNA, 22 nt, Human
auucucuguuuccaagaugaaa

SEQ ID NO: 646448 - RNA, 22 nt, Human
gcuguucagaugcgauucagga

SEQ ID NO: 646449 - RNA, 22 nt, Human
agguucuggagaacuuggaggu

SEQ ID NO: 646450 - RNA, 22 nt, Human
aagcaucuaggugacugacaua

SEQ ID NO: 646451 - RNA, 22 nt, Human
agaaguuugguccuauaaacuc

SEQ ID NO: 646452 - RNA, 22 nt, Human
caugcaugucagggauccugga

SEQ ID NO: 646453 - RNA, 22 nt, Human
aaagcagcaaguauuuguuacu

SEQ ID NO: 646454 - RNA, 22 nt, Human
aacagucagcuucucgggacau

SEQ ID NO: 646455 - RNA, 22 nt, Human
gucaggcugccagucuuuauug

SEQ ID NO: 646456 - RNA, 22 nt, Human
acacugugcagauucccuguga

SEQ ID NO: 646457 - RNA, 22 nt, Human
uucugcauucaaauuaugugag

SEQ ID NO: 646458 - RNA, 22 nt, Human
aucuuaugagacccauaaagau

SEQ ID NO: 646459 - RNA, 22 nt, Human
cacuguggauacagaaauuagu

SEQ ID NO: 646460 - RNA, 22 nt, Human
uucuguggguaauaccucauac

SEQ ID NO: 646461 - RNA, 22 nt, Human
augucacuuuugagacuagguu

SEQ ID NO: 646462 - RNA, 22 nt, Human
caggggccuguccuggcuucug

SEQ ID NO: 646463 - RNA, 22 nt, Human
ugcucugggggaagccagcugu

SEQ ID NO: 646464 - RNA, 22 nt, Human
aguaaacuguggguacagaugu

SEQ ID NO: 646465 - RNA, 20 nt, Human
aaauuuaggaaauuuuacgc

SEQ ID NO: 646466 - RNA, 22 nt, Human
aucugaaagcuaggaguucuca

SEQ ID NO: 646467 - RNA, 22 nt, Human
ugccuggauucgguuguuguca

SEQ ID NO: 646468 - RNA, 20 nt, Human
gaagauggguagaggcacag

SEQ ID NO: 646469 - RNA, 19 nt, Human
ccuggaggugaagguucuc

SEQ ID NO: 646470 - RNA, 19 nt, Human
cagagcugcuggccucguc

SEQ ID NO: 646471 - RNA, 22 nt, Human
cucgccugccugugucucuccc

SEQ ID NO: 646472 - RNA, 22 nt, Human
aacaggaaaacagcacaauagc

SEQ ID NO: 646473 - RNA, 22 nt, Human
uugcucugauuagguggaaaca

SEQ ID NO: 646474 - RNA, 22 nt, Human
uaguuucuagucaaucuucuuu

SEQ ID NO: 646475 - RNA, 22 nt, Human
uagguucagagaacugaaaaua

SEQ ID NO: 646476 - RNA, 19 nt, Human
ucaggacugacuugaaguc

SEQ ID NO: 646477 - RNA, 22 nt, Human
cuauuucaaggcccagauauga

SEQ ID NO: 646478 - RNA, 22 nt, Human
cuugaaguugcaaaacauuaau

SEQ ID NO: 646479 - RNA, 22 nt, Human
ucugugcuggacugauuucaua

SEQ ID NO: 646480 - RNA, 19 nt, Human
agacacacuugauaugugu

SEQ ID NO: 646481 - RNA, 23 nt, Human
uaggaggagaccgcaguguuacc

SEQ ID NO: 646482 - RNA, 18 nt, Human
ugcuuuaugcuuauauaa

SEQ ID NO: 646483 - RNA, 22 nt, Human
uuucaaacuuuacucuugaauc

SEQ ID NO: 646484 - RNA, 22 nt, Human
gagcugaauuacggugagucau

SEQ ID NO: 646485 - RNA, 22 nt, Human
guguggaaagaguggccucuca

SEQ ID NO: 646486 - RNA, 22 nt, Human
gcacugugacagcaagagugag

SEQ ID NO: 646487 - RNA, 22 nt, Human
uucuuauuaugugcucugugaa

SEQ ID NO: 646488 - RNA, 22 nt, Human
uucuuuuaauugugggggagug

SEQ ID NO: 646489 - RNA, 22 nt, Human
gcagagcagggauuuugccaua

SEQ ID NO: 646490 - RNA, 22 nt, Human
auucgcgggccuggaggguggg

SEQ ID NO: 646491 - RNA, 22 nt, Human
ugaaacuugcuaauugcacgua

SEQ ID NO: 646492 - RNA, 22 nt, Human
uucuuaaaacuuauggacaggu

SEQ ID NO: 646493 - RNA, 22 nt, Human
agcacacaggccaccuccacuu

SEQ ID NO: 646494 - RNA, 22 nt, Human
aggcaacaaggguagucaguga

SEQ ID NO: 646495 - RNA, 22 nt, Human
ugugaaauucuugaaaugcaca

SEQ ID NO: 646496 - RNA, 22 nt, Human
ggcuuugguagacacagauuga

SEQ ID NO: 646497 - RNA, 22 nt, Human
ucaggggcagccggggaagcca

SEQ ID NO: 646498 - RNA, 22 nt, Human
acuauaacccauggaauauaag

SEQ ID NO: 646499 - RNA, 22 nt, Human
agcugccaucugaagaacugca

SEQ ID NO: 646500 - RNA, 22 nt, Human
cuggcuuuccuugucugcaucc

SEQ ID NO: 646501 - RNA, 22 nt, Human
ugagccugggagauggaggcug

SEQ ID NO: 646502 - RNA, 23 nt, Human
gaauucuuaaggucacuaaaguc

SEQ ID NO: 646503 - RNA, 22 nt, Human
guaaaugagucaaaugggggaa

SEQ ID NO: 646504 - RNA, 22 nt, Human
ucaaaugcuguauuguaguaau

SEQ ID NO: 646505 - RNA, 22 nt, Human
aagcagauauugugggaguggg

SEQ ID NO: 646506 - RNA, 22 nt, Human
cacaggcuccggccuugcagcc

SEQ ID NO: 646507 - RNA, 22 nt, Human
augaggccaccuucuacauuuc

SEQ ID NO: 646508 - RNA, 22 nt, Human
uaggggcucagaacauguccuu

SEQ ID NO: 646509 - RNA, 22 nt, Human
gggaccuggacaugugugugcu

SEQ ID NO: 646510 - RNA, 21 nt, Human
ucuugaaaauuguagcaguuu

SEQ ID NO: 646511 - RNA, 22 nt, Human
acugucugcuggccccugguua

SEQ ID NO: 646512 - RNA, 22 nt, Human
uaaaauugcggugaauauuucc

SEQ ID NO: 646513 - RNA, 17 nt, Human
uggacccuugggccucc

SEQ ID NO: 646514 - RNA, 22 nt, Human
cucucaggcuugggucguggca

SEQ ID NO: 646515 - RNA, 22 nt, Human
uuacaauaguuccuucuuuugu

SEQ ID NO: 646516 - RNA, 22 nt, Human
cagaguguauucugcaguugca

SEQ ID NO: 646517 - RNA, 21 nt, Human
ucucuggcgguguuuggcucc

SEQ ID NO: 646518 - RNA, 22 nt, Human
uagaaauccccagucucauagu

SEQ ID NO: 646519 - RNA, 22 nt, Human
ccugagcaucagcgccuccuua

SEQ ID NO: 646520 - RNA, 21 nt, Human
gccuuugguuucuuguccugc

SEQ ID NO: 646521 - RNA, 22 nt, Human
gaggggggcgcccugcagugca

SEQ ID NO: 646522 - RNA, 22 nt, Human
accuuuggaggacuagggucau

SEQ ID NO: 646523 - RNA, 22 nt, Human
uuucaaacauaucuucauuacu

SEQ ID NO: 646524 - RNA, 22 nt, Human
gcagccacccucaaggcugaau

SEQ ID NO: 646525 - RNA, 22 nt, Human
cagugcacacaauccucugccg

SEQ ID NO: 646526 - RNA, 22 nt, Human
agagucuuccaggcagccugag

SEQ ID NO: 646527 - RNA, 22 nt, Human
agcagcacacgggagaaagaca

SEQ ID NO: 646528 - RNA, 22 nt, Human
ucugaggaaaagaggagguagc

SEQ ID NO: 646529 - RNA, 22 nt, Human
gaggcccaguccugcaagcacg

SEQ ID NO: 646530 - RNA, 22 nt, Human
auuuagaagcuaauuuuucaga

SEQ ID NO: 646531 - RNA, 22 nt, Human
cugcauaucaaauuacuccugg

SEQ ID NO: 646532 - RNA, 20 nt, Human
ucccacugggccucaguuuc

SEQ ID NO: 646533 - RNA, 21 nt, Human
agcuguuugaagcuauauugg

SEQ ID NO: 646534 - RNA, 22 nt, Human
cucucugugcucacaagggcag

SEQ ID NO: 646535 - RNA, 22 nt, Human
gggcagcagcaggaggucucug

SEQ ID NO: 646536 - RNA, 22 nt, Human
uggccucugaggcaccuuugcc

SEQ ID NO: 646537 - RNA, 22 nt, Human
cagagcuuugugucagggcugu

SEQ ID NO: 646538 - RNA, 22 nt, Human
uuacacagugguuaagucuggg

SEQ ID NO: 646539 - RNA, 22 nt, Human
aagcagaaguugaucuaccaua

SEQ ID NO: 646540 - RNA, 22 nt, Human
uguggcaguaaaauugggcaac

SEQ ID NO: 646541 - RNA, 22 nt, Human
uggcucauauugagugauuucu

SEQ ID NO: 646542 - RNA, 22 nt, Human
ugggcagacuaaggucaaagcu

SEQ ID NO: 646543 - RNA, 22 nt, Human
gugcuguaacaacagagugucu

SEQ ID NO: 646544 - RNA, 18 nt, Human
aggaaagacgaagagggc

SEQ ID NO: 646545 - RNA, 22 nt, Human
ugugggaagagcaguggcagca

SEQ ID NO: 646546 - RNA, 22 nt, Human
cucugcucaccagccaugugau

SEQ ID NO: 646547 - RNA, 20 nt, Human
ugcugggcaugcaguggaaa

SEQ ID NO: 646548 - RNA, 20 nt, Human
auuguugcugcugcuguuga

SEQ ID NO: 646549 - RNA, 22 nt, Human
caggaaaucagaacucaagugg

SEQ ID NO: 646550 - RNA, 19 nt, Human
cucugaggauuagcugugg

SEQ ID NO: 646551 - RNA, 22 nt, Human
ccuuuaugucacucuggagagc

SEQ ID NO: 646552 - RNA, 22 nt, Human
ggcacugggagaggugagacgg

SEQ ID NO: 646553 - RNA, 18 nt, Human
uguuuauucuccugacag

SEQ ID NO: 646554 - RNA, 22 nt, Human
caagucauuacugaaaugucac

SEQ ID NO: 646555 - RNA, 22 nt, Human
uuugaaugcaggacauacagaa

SEQ ID NO: 646556 - RNA, 22 nt, Human
aauagcaccugagguaguuugu

SEQ ID NO: 646557 - RNA, 22 nt, Human
aggaagaaccuaagaaagucuc

SEQ ID NO: 646558 - RNA, 21 nt, Human
guuauuuuaagugagcuuugc

SEQ ID NO: 646559 - RNA, 22 nt, Human
uuugacucagcaaauucacagg

SEQ ID NO: 646560 - RNA, 22 nt, Human
cccagcccccgagugucuggaa

SEQ ID NO: 646561 - RNA, 22 nt, Human
ugcccuggcuggagugcagugg

SEQ ID NO: 646562 - RNA, 22 nt, Human
auauagaucaaaugaugcuaau

SEQ ID NO: 646563 - RNA, 22 nt, Human
gcucucucuuggggauucagca

SEQ ID NO: 646564 - RNA, 22 nt, Human
cagcagagcuuauuaacuaaaa

SEQ ID NO: 646565 - RNA, 22 nt, Human
cgaggugggcagaucacagagu

SEQ ID NO: 646566 - RNA, 22 nt, Human
ccagagguggugggugcuacag

SEQ ID NO: 646567 - RNA, 17 nt, Human
ugcauuguaggcuagcc

SEQ ID NO: 646568 - RNA, 22 nt, Human
cuacaggaaggaucuugcucaa

SEQ ID NO: 646569 - RNA, 22 nt, Human
cagaguccuggacacagagaca

SEQ ID NO: 646570 - RNA, 22 nt, Human
auuguacaaugccuggaacauu

SEQ ID NO: 646571 - RNA, 20 nt, Human
gucuuuauguuuuaugaccu

SEQ ID NO: 646572 - RNA, 22 nt, Human
ucuggcuuggcuggcaucucug

SEQ ID NO: 646573 - RNA, 22 nt, Human
uggaggagaccauuccacucag

SEQ ID NO: 646574 - RNA, 22 nt, Human
ccaaagucagugcucagucguc

SEQ ID NO: 646575 - RNA, 22 nt, Human
auugaguacuuagugucauaua

SEQ ID NO: 646576 - RNA, 16 nt, Human
acccucagaaacugcu

SEQ ID NO: 646577 - RNA, 22 nt, Human
ugccucagcugaggccgcucca

SEQ ID NO: 646578 - RNA, 16 nt, Human
uaaacagcagacaguu

SEQ ID NO: 646579 - RNA, 22 nt, Human
acccaggguuccugggucccag

SEQ ID NO: 646580 - RNA, 22 nt, Human
aagagauuucuguaaaauguaa

SEQ ID NO: 646581 - RNA, 20 nt, Human
augccucuaauuuugcaaac

SEQ ID NO: 646582 - RNA, 22 nt, Human
caguguuucugaguuccagcuc

SEQ ID NO: 646583 - RNA, 22 nt, Human
uuccuggggacuuaccgucauu

SEQ ID NO: 646584 - RNA, 20 nt, Human
cuuccacacaagaagcacag

SEQ ID NO: 646585 - RNA, 22 nt, Human
aaugcaaagcucuuuaauccuu

SEQ ID NO: 646586 - RNA, 22 nt, Human
ccaggaaaauaccaagcuuuaa

SEQ ID NO: 646587 - RNA, 22 nt, Human
aaugucuacauucugaauucgu

SEQ ID NO: 646588 - RNA, 22 nt, Human
agucccaggcagccgagccggu

SEQ ID NO: 646589 - RNA, 22 nt, Human
uguauuugugauaacgaccuga

SEQ ID NO: 646590 - RNA, 22 nt, Human
auguuuuauuaccaacuuguac

SEQ ID NO: 646591 - RNA, 22 nt, Human
aguguguccaggaagcagaugg

SEQ ID NO: 646592 - RNA, 22 nt, Human
uggcagagucaucacaucugga

SEQ ID NO: 646593 - RNA, 22 nt, Human
gcagggcuguucaggagggugg

SEQ ID NO: 646594 - RNA, 22 nt, Human
uagccaggcgaggucagugucg

SEQ ID NO: 646595 - RNA, 22 nt, Human
ucagaucuaauuggauuauuau

SEQ ID NO: 646596 - RNA, 22 nt, Human
ggcucagauuccgaguggcccu

SEQ ID NO: 646597 - RNA, 22 nt, Human
gcacagaauaacacucugggcu

SEQ ID NO: 646598 - RNA, 22 nt, Human
ggcugcagcggauuggggauug

SEQ ID NO: 646599 - RNA, 22 nt, Human
aaguauaagcuauucuucauga

SEQ ID NO: 646600 - RNA, 22 nt, Human
gcaaacauuccacagaaggaag

SEQ ID NO: 646601 - RNA, 19 nt, Human
cugaaacacagagagggcu

SEQ ID NO: 646602 - RNA, 22 nt, Human
aaagcagcacauggauaucagu

SEQ ID NO: 646603 - RNA, 22 nt, Human
guguaauguugucagcaucauc

SEQ ID NO: 646604 - RNA, 22 nt, Human
ugccacaggguccucaggccag

SEQ ID NO: 646605 - RNA, 22 nt, Human
agguucuggcauugcucaguaa

SEQ ID NO: 646606 - RNA, 22 nt, Human
ucccacaugugaauccucaggu

SEQ ID NO: 646607 - RNA, 22 nt, Human
cagagguuugaucgaguagguc

SEQ ID NO: 646608 - RNA, 22 nt, Human
cacccugcccacuagcaaucug

SEQ ID NO: 646609 - RNA, 20 nt, Human
aucagcaacugccacucagu

SEQ ID NO: 646610 - RNA, 22 nt, Human
ugaaguuuuacauccucuccaa

SEQ ID NO: 646611 - RNA, 19 nt, Human
gggaccugacuaauuggca

SEQ ID NO: 646612 - RNA, 22 nt, Human
gggcuucuggcuacuguaugag

SEQ ID NO: 646613 - RNA, 20 nt, Human
ucuuggaaaaaguucagaau

SEQ ID NO: 646614 - RNA, 22 nt, Human
acauuguacucuuagcguuguu

SEQ ID NO: 646615 - RNA, 23 nt, Human
uggaccugaaccagugccucugu

SEQ ID NO: 646616 - RNA, 22 nt, Human
auggcagggcacagcucuaguu

SEQ ID NO: 646617 - RNA, 22 nt, Human
ucugccagugguuuggcccuga

SEQ ID NO: 646618 - RNA, 19 nt, Human
gugcuuuuuaagagcucag

SEQ ID NO: 646619 - RNA, 23 nt, Human
auggaagucacuguuuucuuguc

SEQ ID NO: 646620 - RNA, 22 nt, Human
gagcucagcacuaaaaucaugu

SEQ ID NO: 646621 - RNA, 22 nt, Human
acucucccuuggagccucaggc

SEQ ID NO: 646622 - RNA, 22 nt, Human
acagcccaagucaccugcagga

SEQ ID NO: 646623 - RNA, 20 nt, Human
aauacaugagcacacuuuca

SEQ ID NO: 646624 - RNA, 22 nt, Human
cccuggagggacagcugcucua

SEQ ID NO: 646625 - RNA, 22 nt, Human
ugguggcaacauugcuggagug

SEQ ID NO: 646626 - RNA, 17 nt, Human
gcagaaaagucaaggga

SEQ ID NO: 646627 - RNA, 21 nt, Human
gggcucuccugaggccaugaa

SEQ ID NO: 646628 - RNA, 20 nt, Human
gggaggcauuggucccucac

SEQ ID NO: 646629 - RNA, 22 nt, Human
gucagaagcauuuguggcugaa

SEQ ID NO: 646630 - RNA, 22 nt, Human
agucugaagacucaugucugaa

SEQ ID NO: 646631 - RNA, 22 nt, Human
agcagcagaagggagacccagg

SEQ ID NO: 646632 - RNA, 22 nt, Human
uuuguaaauagcaguacucaug

SEQ ID NO: 646633 - RNA, 22 nt, Human
ugagcugugaucuaugauaaau

SEQ ID NO: 646634 - RNA, 22 nt, Human
agagaagcauucuucucagggc

SEQ ID NO: 646635 - RNA, 22 nt, Human
uuaauuguaaaguuugccuguu

SEQ ID NO: 646636 - RNA, 22 nt, Human
gcuuuuaauuaguugcuuccau

SEQ ID NO: 646637 - RNA, 17 nt, Human
ugucuacucugacuaaa

SEQ ID NO: 646638 - RNA, 22 nt, Human
gugggcaggaggcccugcccug

SEQ ID NO: 646639 - RNA, 22 nt, Human
cauuacaucuuugaugcaguau

SEQ ID NO: 646640 - RNA, 18 nt, Human
cuccaaggucucuggcuu

SEQ ID NO: 646641 - RNA, 22 nt, Human
aaggcacaugaccuaggccugg

SEQ ID NO: 646642 - RNA, 22 nt, Human
auaugaagaaucuaggauaggc

SEQ ID NO: 646643 - RNA, 22 nt, Human
aaggcacaacacaagaggguga

SEQ ID NO: 646644 - RNA, 22 nt, Human
ugagaggugaggcaugaggcau

SEQ ID NO: 646645 - RNA, 21 nt, Human
gaauugugccccuugguguug

SEQ ID NO: 646646 - RNA, 20 nt, Human
acuaaggugguagcagcagg

SEQ ID NO: 646647 - RNA, 22 nt, Human
guguggccucaacgggaugcaa

SEQ ID NO: 646648 - RNA, 20 nt, Human
uuucugugcccaggucuguu

SEQ ID NO: 646649 - RNA, 22 nt, Human
aauaugcauguauacaugugua

SEQ ID NO: 646650 - RNA, 22 nt, Human
ugugugcuuauagucuaguagu

SEQ ID NO: 646651 - RNA, 22 nt, Human
cccagcucucgcacuuacuagc

SEQ ID NO: 646652 - RNA, 20 nt, Human
ccucaggccaguuuuaaagu

SEQ ID NO: 646653 - RNA, 22 nt, Human
uuggccuucugguguucauuuu

SEQ ID NO: 646654 - RNA, 22 nt, Human
ggaggaaggguagcauaaugua

SEQ ID NO: 646655 - RNA, 22 nt, Human
aaaugugaguuauagcaauaga

SEQ ID NO: 646656 - RNA, 22 nt, Human
gagaaggcuucuuuuccucuga

SEQ ID NO: 646657 - RNA, 22 nt, Human
uggcuuuagguugcauguuucu

SEQ ID NO: 646658 - RNA, 22 nt, Human
cagcccucaucccgccugcguu

SEQ ID NO: 646659 - RNA, 22 nt, Human
uauggcauuuagaaaugucaga

SEQ ID NO: 646660 - RNA, 22 nt, Human
acaacacauguguauaugugug

SEQ ID NO: 646661 - RNA, 22 nt, Human
agcaugaaaggcgugccaacuu

SEQ ID NO: 646662 - RNA, 22 nt, Human
gugguuuugccauuacaaguaa

SEQ ID NO: 646663 - RNA, 17 nt, Human
aguuaguguagcagugc

SEQ ID NO: 646664 - RNA, 22 nt, Human
augggaugaacuugaucugcuu

SEQ ID NO: 646665 - RNA, 22 nt, Human
auccaaaccuggacaugagugg

SEQ ID NO: 646666 - RNA, 22 nt, Human
ccugggaggcagagguugcagu

SEQ ID NO: 646667 - RNA, 22 nt, Human
agcuccagguagugccuuaucg

SEQ ID NO: 646668 - RNA, 22 nt, Human
ucuggcagugauuucugugauc

SEQ ID NO: 646669 - RNA, 22 nt, Human
ucuggcagggucagggcccagg

SEQ ID NO: 646670 - RNA, 22 nt, Human
gagaggcuggguuggagaucga

SEQ ID NO: 646671 - RNA, 22 nt, Human
ccugggauuugcgccagaccuu

SEQ ID NO: 646672 - RNA, 19 nt, Human
augaagauugguaaauuca

SEQ ID NO: 646673 - RNA, 22 nt, Human
agauugauagauguuucuaaaa

SEQ ID NO: 646674 - RNA, 22 nt, Human
aggucugagagccgcuuucccc

SEQ ID NO: 646675 - RNA, 22 nt, Human
aagaacuaucucuggcuguagg

SEQ ID NO: 646676 - RNA, 22 nt, Human
gaggcaccagacauggccucau

SEQ ID NO: 646677 - RNA, 22 nt, Human
uccuucucuacaaauccaggca

SEQ ID NO: 646678 - RNA, 22 nt, Human
cuugagaaaggaacaggaagcu

SEQ ID NO: 646679 - RNA, 22 nt, Human
cugucuuuucauacuuucccuc

SEQ ID NO: 646680 - RNA, 22 nt, Human
auauuuagcucauuuccagugc

SEQ ID NO: 646681 - RNA, 22 nt, Human
ccaaggcugagguuuccaguug

SEQ ID NO: 646682 - RNA, 22 nt, Human
guggcacagagauggggcauga

SEQ ID NO: 646683 - RNA, 22 nt, Human
cuggggagugaaauucuuaaau

SEQ ID NO: 646684 - RNA, 22 nt, Human
aucuacacuauaacagaaugcu

SEQ ID NO: 646685 - RNA, 22 nt, Human
aaugcaaagaguugcuuaucaa

SEQ ID NO: 646686 - RNA, 22 nt, Human
ucucuggccgagagucccuggg

SEQ ID NO: 646687 - RNA, 22 nt, Human
cagagccagcccacuguucccg

SEQ ID NO: 646688 - RNA, 22 nt, Human
caguuaaaggcccaauaucugg

SEQ ID NO: 646689 - RNA, 22 nt, Human
aguccauaacuucagaguguca

SEQ ID NO: 646690 - RNA, 22 nt, Human
cagagccagucagucagaaacu

SEQ ID NO: 646691 - RNA, 22 nt, Human
uuguauuuccuauaaccuuucu

SEQ ID NO: 646692 - RNA, 22 nt, Human
caugagcauuuuggucuaguuu

SEQ ID NO: 646693 - RNA, 22 nt, Human
ccaggcccuugcaagucccacc

SEQ ID NO: 646694 - RNA, 22 nt, Human
gacagacaggaggccaccugcu

SEQ ID NO: 646695 - RNA, 22 nt, Human
ucauuuuuuuccgguaggaaua

SEQ ID NO: 646696 - RNA, 22 nt, Human
acccuguuaugguguaacauuu

SEQ ID NO: 646697 - RNA, 22 nt, Human
uuauuugguuauuguaauuggg

SEQ ID NO: 646698 - RNA, 22 nt, Human
ucuuagaaaugaaguucuuucu

SEQ ID NO: 646699 - RNA, 22 nt, Human
aaagacauuagcuuagauguca

SEQ ID NO: 646700 - RNA, 22 nt, Human
acagcucugguccuuuagagag

SEQ ID NO: 646701 - RNA, 22 nt, Human
cagcuggccugaucccuguggc

SEQ ID NO: 646702 - RNA, 22 nt, Human
agucaccagguuuuagagaccu

SEQ ID NO: 646703 - RNA, 22 nt, Human
gggagguguucugccaacgcgg

SEQ ID NO: 646704 - RNA, 22 nt, Human
uauaugcaugcccauguauaca

SEQ ID NO: 646705 - RNA, 22 nt, Human
uauaaaauucucaguuuggggu

SEQ ID NO: 646706 - RNA, 22 nt, Human
caacagagagaccagaaacagg

SEQ ID NO: 646707 - RNA, 22 nt, Human
acaggacauguaccaggugguc

SEQ ID NO: 646708 - RNA, 22 nt, Human
cuucuucuuuuaauaaaugucu

SEQ ID NO: 646709 - RNA, 22 nt, Human
aggcaccuugagagcaggagcu

SEQ ID NO: 646710 - RNA, 22 nt, Human
guggcugcuacagagcuggagg

SEQ ID NO: 646711 - RNA, 22 nt, Human
guaguuuucugaaaauuacuuu

SEQ ID NO: 646712 - RNA, 22 nt, Human
ugaguuuaauuggagccugaau

SEQ ID NO: 646713 - RNA, 22 nt, Human
uucauauucaaauacucugcuu

SEQ ID NO: 646714 - RNA, 19 nt, Human
ucccuggcgccucucgggc

SEQ ID NO: 646715 - RNA, 22 nt, Human
cugguucauccccuuccaggaa

SEQ ID NO: 646716 - RNA, 22 nt, Human
caggaaauucuuuuguuugugc

SEQ ID NO: 646717 - RNA, 21 nt, Human
guccuucagcaaguuaguggc

SEQ ID NO: 646718 - RNA, 22 nt, Human
acucugcuggcugcagggcagc

SEQ ID NO: 646719 - RNA, 22 nt, Human
gggcuggaccgcucgccucccu

SEQ ID NO: 646720 - RNA, 22 nt, Human
acuccugguuuguguccuggcu

SEQ ID NO: 646721 - RNA, 23 nt, Human
gccaauuuuugacugucaguagg

SEQ ID NO: 646722 - RNA, 22 nt, Human
aaccaggauuuaagauucuaga

SEQ ID NO: 646723 - RNA, 22 nt, Human
gcugccuccaaucugugccccg

SEQ ID NO: 646724 - RNA, 22 nt, Human
ugcuuuauagacaaggaaguag

SEQ ID NO: 646725 - RNA, 22 nt, Human
agugcuuuccuucuugugacau

SEQ ID NO: 646726 - RNA, 22 nt, Human
aaacuuuaagacaguccucaag

SEQ ID NO: 646727 - RNA, 22 nt, Human
aaguuuauguugguaagauauc

SEQ ID NO: 646728 - RNA, 22 nt, Human
ccucagcauccuccugcucagu

SEQ ID NO: 646729 - RNA, 22 nt, Human
gaugucuuacuaacuagccuuu

SEQ ID NO: 646730 - RNA, 22 nt, Human
caaagccaggcuuucuaaugua

SEQ ID NO: 646731 - RNA, 22 nt, Human
aaaucugguucaguaaguccuc

SEQ ID NO: 646732 - RNA, 20 nt, Human
gcuuccaccugaagcgcacc

SEQ ID NO: 646733 - RNA, 22 nt, Human
acacacaauuaguuuuaugcuu

SEQ ID NO: 646734 - RNA, 22 nt, Human
aggccacagucagugggugcug

SEQ ID NO: 646735 - RNA, 22 nt, Human
uaguguguaugguaaugaugaa

SEQ ID NO: 646736 - RNA, 22 nt, Human
agucagugggcuuggcacagaa

SEQ ID NO: 646737 - RNA, 22 nt, Human
ccuuaaauucuccauuugaaag

SEQ ID NO: 646738 - RNA, 22 nt, Human
aacagcaggcauuucuuagcuc

SEQ ID NO: 646739 - RNA, 22 nt, Human
ugggaacucucugggaggcauc

SEQ ID NO: 646740 - RNA, 17 nt, Human
accagccucuccugggg

SEQ ID NO: 646741 - RNA, 22 nt, Human
auuuggggcucaccagggcuga

SEQ ID NO: 646742 - RNA, 21 nt, Human
uauugauucaauuucuugagu

SEQ ID NO: 646743 - RNA, 22 nt, Human
ccaccuccucggccaugugacg

SEQ ID NO: 646744 - RNA, 21 nt, Human
aucucgggcuucucgcccagc

SEQ ID NO: 646745 - RNA, 23 nt, Human
augcccuguagaggcugcugacc

SEQ ID NO: 646746 - RNA, 22 nt, Human
uuuacugaccuccaaucccacu

SEQ ID NO: 646747 - RNA, 22 nt, Human
aaagaggaaccaagagcacgug

SEQ ID NO: 646748 - RNA, 22 nt, Human
gcaggaugaacuaacaccugca

SEQ ID NO: 646749 - RNA, 22 nt, Human
cuccagugcccuccuugggggc

SEQ ID NO: 646750 - RNA, 22 nt, Human
ucugccucuuucaggccuggca

SEQ ID NO: 646751 - RNA, 22 nt, Human
gccuuuauauuuuucugguguu

SEQ ID NO: 646752 - RNA, 22 nt, Human
gcuucugcaggguccucgcugu

SEQ ID NO: 646753 - RNA, 22 nt, Human
guggcacucaccuguaguuuca

SEQ ID NO: 646754 - RNA, 20 nt, Human
agcacagcgcgguguuccuu

SEQ ID NO: 646755 - RNA, 22 nt, Human
aggcagucuaguccccaggcaa

SEQ ID NO: 646756 - RNA, 22 nt, Human
uacaaccauagacauauacuag

SEQ ID NO: 646757 - RNA, 22 nt, Human
uccagggccugagguugaagug

SEQ ID NO: 646758 - RNA, 22 nt, Human
cugccccagccuggggccuucu

SEQ ID NO: 646759 - RNA, 22 nt, Human
uccagggccacagaggaugcua

SEQ ID NO: 646760 - RNA, 22 nt, Human
ucugggaagacggauggacccu

SEQ ID NO: 646761 - RNA, 22 nt, Human
agcccugggauacaguaaaagc

SEQ ID NO: 646762 - RNA, 21 nt, Human
aaaguucaugcuuuaauauuc

SEQ ID NO: 646763 - RNA, 22 nt, Human
gaaaguugcaaucauggcuuuu

SEQ ID NO: 646764 - RNA, 22 nt, Human
uuuuccuggggcuucuggacuc

SEQ ID NO: 646765 - RNA, 20 nt, Human
uccugagaggcucuuggaga

SEQ ID NO: 646766 - RNA, 21 nt, Human
gaguccuuccaauguccucag

SEQ ID NO: 646767 - RNA, 22 nt, Human
uucugcugaaaacagccaugua

SEQ ID NO: 646768 - RNA, 19 nt, Human
gccagcagaaugaugaggc

SEQ ID NO: 646769 - RNA, 18 nt, Human
uaguuucuaauggccuuu

SEQ ID NO: 646770 - RNA, 22 nt, Human
ucccagggugcgccugcccucg

SEQ ID NO: 646771 - RNA, 22 nt, Human
gggugggagucuggcccucaaa

SEQ ID NO: 646772 - RNA, 22 nt, Human
uaaugcuuaacagcuggcuuuu

SEQ ID NO: 646773 - RNA, 22 nt, Human
ggaagggcggauaguauaaguu

SEQ ID NO: 646774 - RNA, 22 nt, Human
uggcagaggaggcucagauuga

SEQ ID NO: 646775 - RNA, 22 nt, Human
uuucuucuccauggcagguccu

SEQ ID NO: 646776 - RNA, 17 nt, Human
auggcuuccauugacca

SEQ ID NO: 646777 - RNA, 22 nt, Human
ugggccuggggcagcccaaauc

SEQ ID NO: 646778 - RNA, 22 nt, Human
guuuacaacaucuuguccuuca

SEQ ID NO: 646779 - RNA, 22 nt, Human
ggcugcuguacugaugucaguu

SEQ ID NO: 646780 - RNA, 22 nt, Human
gcuguauuuauaugaaggcaug

SEQ ID NO: 646781 - RNA, 22 nt, Human
uggugacugggacuggauauga

SEQ ID NO: 646782 - RNA, 22 nt, Human
ugugaaaggagccauagacagu

SEQ ID NO: 646783 - RNA, 22 nt, Human
ucugggcucugucagcaccucu

SEQ ID NO: 646784 - RNA, 22 nt, Human
ugaaauguuuggguccagaagu

SEQ ID NO: 646785 - RNA, 20 nt, Human
aauccugggacagaggcagg

SEQ ID NO: 646786 - RNA, 22 nt, Human
gggagcugaaguagggguaaau

SEQ ID NO: 646787 - RNA, 22 nt, Human
ucuucacaguccuggucagugg

SEQ ID NO: 646788 - RNA, 22 nt, Human
uggcagaaugaagacuggggcc

SEQ ID NO: 646789 - RNA, 22 nt, Human
guacagaaauggggccccaggu

SEQ ID NO: 646790 - RNA, 22 nt, Human
gcaguguguagaguuuaggaaa

SEQ ID NO: 646791 - RNA, 22 nt, Human
ccagagcagauguggccuuggu

SEQ ID NO: 646792 - RNA, 22 nt, Human
guagaggggugauucugugaga

SEQ ID NO: 646793 - RNA, 22 nt, Human
cauggcuuucccucaagagcaa

SEQ ID NO: 646794 - RNA, 22 nt, Human
ccuuccaguauguuaagauggu

SEQ ID NO: 646795 - RNA, 22 nt, Human
cugcuuuaaaacccucagcugg

SEQ ID NO: 646796 - RNA, 22 nt, Human
uccuguccacagcccugaccuc

SEQ ID NO: 646797 - RNA, 22 nt, Human
accagcacuuccagaggucagg

SEQ ID NO: 646798 - RNA, 22 nt, Human
uguauguggcuacuuuucuugc

SEQ ID NO: 646799 - RNA, 22 nt, Human
aaaaugagacacaugugacucc

SEQ ID NO: 646800 - RNA, 22 nt, Human
ucuuccuugcuccuugucacuu

SEQ ID NO: 646801 - RNA, 22 nt, Human
aaaguccuguuugaaggaccug

SEQ ID NO: 646802 - RNA, 22 nt, Human
cuuaacaagcccaacuuucauu

SEQ ID NO: 646803 - RNA, 22 nt, Human
uguuuauuacaguucuuggaau

SEQ ID NO: 646804 - RNA, 19 nt, Human
ggauucugcaguuuucaca

SEQ ID NO: 646805 - RNA, 21 nt, Human
agagacagagaaaguaacauu

SEQ ID NO: 646806 - RNA, 22 nt, Human
agugugagauuaaaccgaauca

SEQ ID NO: 646807 - RNA, 22 nt, Human
agagccugcuaccucauuccag

SEQ ID NO: 646808 - RNA, 22 nt, Human
agacugugccacacaugggagu

SEQ ID NO: 646809 - RNA, 17 nt, Human
uuucugcaugauuggac

SEQ ID NO: 646810 - RNA, 22 nt, Human
caggaagaggacaggcuucccc

SEQ ID NO: 646811 - RNA, 22 nt, Human
aggcggcuucugaggaggcugc

SEQ ID NO: 646812 - RNA, 22 nt, Human
uacuccaggacuccauuugaaa

SEQ ID NO: 646813 - RNA, 22 nt, Human
uacagcauugugucuucacuca

SEQ ID NO: 646814 - RNA, 22 nt, Human
ggagucuguuuuacaugcagga

SEQ ID NO: 646815 - RNA, 22 nt, Human
gcuauacaaguguagaauagag

SEQ ID NO: 646816 - RNA, 22 nt, Human
accagcuguguccuggcugcag

SEQ ID NO: 646817 - RNA, 22 nt, Human
acugggcuccagaugugauacg

SEQ ID NO: 646818 - RNA, 18 nt, Human
cucugggagaggcauaca

SEQ ID NO: 646819 - RNA, 22 nt, Human
ugcaggaagcaaccagguccaa

SEQ ID NO: 646820 - RNA, 21 nt, Human
acucaaguggagaugccaggu

SEQ ID NO: 646821 - RNA, 22 nt, Human
auuuguugaauaaauuaguauu

SEQ ID NO: 646822 - RNA, 22 nt, Human
uuguagaaaauuagaugcaugg

SEQ ID NO: 646823 - RNA, 22 nt, Human
gacauuuaauaguauuguggga

SEQ ID NO: 646824 - RNA, 18 nt, Human
gccaggaagaggaaugug

SEQ ID NO: 646825 - RNA, 22 nt, Human
cgugucugggauagcagaagua

SEQ ID NO: 646826 - RNA, 22 nt, Human
cagaaauguucuaaugauucag

SEQ ID NO: 646827 - RNA, 22 nt, Human
auuuccucaugaucauaaugca

SEQ ID NO: 646828 - RNA, 22 nt, Human
aagauuucuuacuuauugaugc

SEQ ID NO: 646829 - RNA, 22 nt, Human
aaauugcugugaggugguagua

SEQ ID NO: 646830 - RNA, 22 nt, Human
cuggagaggccccaagauauuu

SEQ ID NO: 646831 - RNA, 22 nt, Human
gcugagacuggcagcaggaagu

SEQ ID NO: 646832 - RNA, 22 nt, Human
gccuggaggggccaggguggua

SEQ ID NO: 646833 - RNA, 19 nt, Human
uccuggugcuugacacuga

SEQ ID NO: 646834 - RNA, 22 nt, Human
gagcugccugugugccaugaug

SEQ ID NO: 646835 - RNA, 22 nt, Human
augaaauuugaccaauuauuua

SEQ ID NO: 646836 - RNA, 23 nt, Human
guacacauaguguaguuauauuu

SEQ ID NO: 646837 - RNA, 22 nt, Human
uuaauugagccagaaaguaucu

SEQ ID NO: 646838 - RNA, 22 nt, Human
aaugaauucgagugaaggaaag

SEQ ID NO: 646839 - RNA, 22 nt, Human
gugcagugagcagugcagcacc

SEQ ID NO: 646840 - RNA, 22 nt, Human
uaugaaauuucuaguucugcuu

SEQ ID NO: 646841 - RNA, 22 nt, Human
ccugagcuagggaaggaagacc

SEQ ID NO: 646842 - RNA, 22 nt, Human
uguccucaaggagcuucagucu

SEQ ID NO: 646843 - RNA, 22 nt, Human
cucugaaaaugugguggggaaa

SEQ ID NO: 646844 - RNA, 22 nt, Human
aaguuugacagaaguuucuaau

SEQ ID NO: 646845 - RNA, 22 nt, Human
agcccagggcuaauaggaacca

SEQ ID NO: 646846 - RNA, 22 nt, Human
uacaguagcuacucaauaacua

SEQ ID NO: 646847 - RNA, 22 nt, Human
gcugccugucccaggaugagga

SEQ ID NO: 646848 - RNA, 22 nt, Human
uugugcccucaaagggugcguc

SEQ ID NO: 646849 - RNA, 22 nt, Human
cagcugggagcuccauuagaua

SEQ ID NO: 646850 - RNA, 22 nt, Human
guuagacaugcagaaucucagg

SEQ ID NO: 646851 - RNA, 22 nt, Human
cuucuucauaggcaguccuguu

SEQ ID NO: 646852 - RNA, 19 nt, Human
ggcagcucuugucuucugc

SEQ ID NO: 646853 - RNA, 22 nt, Human
ugcacacacgcggcacaucugu

SEQ ID NO: 646854 - RNA, 22 nt, Human
aaggcagagauuagcagaauga

SEQ ID NO: 646855 - RNA, 17 nt, Human
ugucugucaucaguucc

SEQ ID NO: 646856 - RNA, 22 nt, Human
acauacuaugaauacauguguc

SEQ ID NO: 646857 - RNA, 19 nt, Human
cacuucacauggugaaagc

SEQ ID NO: 646858 - RNA, 22 nt, Human
ugggaaauuguauuucuauuuc

SEQ ID NO: 646859 - RNA, 22 nt, Human
cagagggguguagagaucacug

SEQ ID NO: 646860 - RNA, 22 nt, Human
acuuuucuaagcaauggucuug

SEQ ID NO: 646861 - RNA, 22 nt, Human
acagaggcagugugagauacug

SEQ ID NO: 646862 - RNA, 22 nt, Human
uacuuagagcgauaauuuauac

SEQ ID NO: 646863 - RNA, 17 nt, Human
uuaguguaucuguuuug

SEQ ID NO: 646864 - RNA, 22 nt, Human
aaugcuuauuauuaauagaaug

SEQ ID NO: 646865 - RNA, 22 nt, Human
ucuucagcagagaauuaugaug

SEQ ID NO: 646866 - RNA, 22 nt, Human
aauggcuuugacauuuucaaau

SEQ ID NO: 646867 - RNA, 20 nt, Human
uggcaggaggcagcagugga

SEQ ID NO: 646868 - RNA, 22 nt, Human
cugagguggaacagaggugaag

SEQ ID NO: 646869 - RNA, 22 nt, Human
gauagagacuauaaugcucuuu

SEQ ID NO: 646870 - RNA, 22 nt, Human
gggguggccaaggacucugacc

SEQ ID NO: 646871 - RNA, 22 nt, Human
ugcacuuguguuuucagaaucu

SEQ ID NO: 646872 - RNA, 22 nt, Human
ucacagcuuugagcagagacca

SEQ ID NO: 646873 - RNA, 22 nt, Human
uccuuucccuuuccauccuggc

SEQ ID NO: 646874 - RNA, 22 nt, Human
aaggggugcuguuggaaaccca

SEQ ID NO: 646875 - RNA, 22 nt, Human
agggaagcaaugauuauuauuc

SEQ ID NO: 646876 - RNA, 22 nt, Human
auuugcuuccuaauacucauau

SEQ ID NO: 646877 - RNA, 22 nt, Human
gaguuacagagaggauuauggu

SEQ ID NO: 646878 - RNA, 22 nt, Human
ccugugcccugccaggcuggug

SEQ ID NO: 646879 - RNA, 22 nt, Human
uuucuccuaacucaaauuuaag

SEQ ID NO: 646880 - RNA, 20 nt, Human
uggagcuccagcguccaugu

SEQ ID NO: 646881 - RNA, 21 nt, Human
ccacaggggcuccccugucag

SEQ ID NO: 646882 - RNA, 22 nt, Human
acccagaguaacagauggauuc

SEQ ID NO: 646883 - RNA, 22 nt, Human
uggcucagccuggcccuuucau

SEQ ID NO: 646884 - RNA, 22 nt, Human
uuuguguuuguacaaugcacua

SEQ ID NO: 646885 - RNA, 22 nt, Human
uggagcugggaguccugggcug

SEQ ID NO: 646886 - RNA, 22 nt, Human
ggugggcaggucacucugccuc

SEQ ID NO: 646887 - RNA, 22 nt, Human
auguguuuugguaauuucugcu

SEQ ID NO: 646888 - RNA, 22 nt, Human
cuggugcacguggcugcagucg

SEQ ID NO: 646889 - RNA, 22 nt, Human
gcugaggacauacacauugugc

SEQ ID NO: 646890 - RNA, 22 nt, Human
agcugaagaaaugggaagcauu

SEQ ID NO: 646891 - RNA, 22 nt, Human
ugcaggagcccuugggcucugg

SEQ ID NO: 646892 - RNA, 22 nt, Human
gaggaggucuccuccgcagggg

SEQ ID NO: 646893 - RNA, 18 nt, Human
gggugcaggcacugacug

SEQ ID NO: 646894 - RNA, 22 nt, Human
aggagcugaugauucuuugauc

SEQ ID NO: 646895 - RNA, 22 nt, Human
ggcagcaguggcugcuauuguc

SEQ ID NO: 646896 - RNA, 22 nt, Human
ccugccugucccucaguccaca

SEQ ID NO: 646897 - RNA, 20 nt, Human
uggcuuguuucuaugggcag

SEQ ID NO: 646898 - RNA, 22 nt, Human
caggagauguaccuguuuuuga

SEQ ID NO: 646899 - RNA, 22 nt, Human
ggucagagcuggagagauaggg

SEQ ID NO: 646900 - RNA, 22 nt, Human
acagcagaguaguuuuccaacu

SEQ ID NO: 646901 - RNA, 22 nt, Human
gcagccacagaggagggaugca

SEQ ID NO: 646902 - RNA, 16 nt, Human
cuuuuucuccccucuu

SEQ ID NO: 646903 - RNA, 21 nt, Human
uucaagauauuuaaaaggugg

SEQ ID NO: 646904 - RNA, 22 nt, Human
uccuucuccuccuugagugaca

SEQ ID NO: 646905 - RNA, 22 nt, Human
gauggcagucaaccaggugagg

SEQ ID NO: 646906 - RNA, 22 nt, Human
uaagaaacuauugucucugaac

SEQ ID NO: 646907 - RNA, 22 nt, Human
aauuaugguauguucaacaacu

SEQ ID NO: 646908 - RNA, 22 nt, Human
uuccuggccccaccccuggaga

SEQ ID NO: 646909 - RNA, 22 nt, Human
uggaggcaugacagugucugga

SEQ ID NO: 646910 - RNA, 22 nt, Human
cauugcacuucugcuuuuccuc

SEQ ID NO: 646911 - RNA, 22 nt, Human
uuacaguguuacuugaugucca

SEQ ID NO: 646912 - RNA, 22 nt, Human
ugguccuggggugcaggcugac

SEQ ID NO: 646913 - RNA, 22 nt, Human
cuacugaugauguugguugugg

SEQ ID NO: 646914 - RNA, 22 nt, Human
agcucugggccaggaacccuaa

SEQ ID NO: 646915 - RNA, 23 nt, Human
cauggcugauuucaagcuaccac

SEQ ID NO: 646916 - RNA, 22 nt, Human
gcugagguccagcauucgccua

SEQ ID NO: 646917 - RNA, 22 nt, Human
auuggcacugcacaugauugcu

SEQ ID NO: 646918 - RNA, 22 nt, Human
aaggcccuuccaccaguccucg

SEQ ID NO: 646919 - RNA, 22 nt, Human
aucucuuagcagucuagugacc

SEQ ID NO: 646920 - RNA, 22 nt, Human
ucugagcagagcaucauuucag

SEQ ID NO: 646921 - RNA, 22 nt, Human
agccccuguacccugagugcuu

SEQ ID NO: 646922 - RNA, 22 nt, Human
aaguuuggggagaauuucauuu

SEQ ID NO: 646923 - RNA, 22 nt, Human
acaguguucugcuuuuuaaucc

SEQ ID NO: 646924 - RNA, 21 nt, Human
aggacacagagacaccuauug

SEQ ID NO: 646925 - RNA, 22 nt, Human
gugauuccuauuaguacaugca

SEQ ID NO: 646926 - RNA, 22 nt, Human
cccuggcagcaaucacuggugu

SEQ ID NO: 646927 - RNA, 22 nt, Human
aaaagcagaucuccaaagucua

SEQ ID NO: 646928 - RNA, 22 nt, Human
caucucaggucugugguucacu

SEQ ID NO: 646929 - RNA, 22 nt, Human
cguagguggcucagcaccuggg

SEQ ID NO: 646930 - RNA, 22 nt, Human
auuuagaaguuggagggcaaga

SEQ ID NO: 646931 - RNA, 22 nt, Human
aauguguucaguuaaaugaacu

SEQ ID NO: 646932 - RNA, 22 nt, Human
agauccacucgaauccaggaau

SEQ ID NO: 646933 - RNA, 22 nt, Human
ccccagcucagugcagggacau

SEQ ID NO: 646934 - RNA, 22 nt, Human
gcucugggaacugacugccuuc

SEQ ID NO: 646935 - RNA, 22 nt, Human
acugccuugaaagauuguugag

SEQ ID NO: 646936 - RNA, 20 nt, Human
aguguuuagaauacuauuau

SEQ ID NO: 646937 - RNA, 22 nt, Human
ucuggagauaagacagacagau

SEQ ID NO: 646938 - RNA, 22 nt, Human
augcuuuaaacuauaaauccac

SEQ ID NO: 646939 - RNA, 22 nt, Human
cuggcuuuaaugucaucuuucu

SEQ ID NO: 646940 - RNA, 22 nt, Human
aggacuuagaacauuauguacu

SEQ ID NO: 646941 - RNA, 22 nt, Human
uacuguuauauauagcagcagu

SEQ ID NO: 646942 - RNA, 23 nt, Human
gcaugaagugcuacgucuacagc

SEQ ID NO: 646943 - RNA, 22 nt, Human
uccuuagguauuuagcaugaau

SEQ ID NO: 646944 - RNA, 22 nt, Human
gaacagcuucuugggagcuggg

SEQ ID NO: 646945 - RNA, 22 nt, Human
uccaagcuuuccaugcccucac

SEQ ID NO: 646946 - RNA, 22 nt, Human
uaauacagacaacuugccaaau

SEQ ID NO: 646947 - RNA, 22 nt, Human
ggcugcaguugugugaaggccg

SEQ ID NO: 646948 - RNA, 22 nt, Human
auuugcaagcaugcacaaaagc

SEQ ID NO: 646949 - RNA, 22 nt, Human
aagcaauguuagaggccuuagg

SEQ ID NO: 646950 - RNA, 22 nt, Human
aucacugucgucaucugagauu

SEQ ID NO: 646951 - RNA, 22 nt, Human
gggucuggagauccgggugaag

SEQ ID NO: 646952 - RNA, 17 nt, Human
ggagacagggucuuuaa

SEQ ID NO: 646953 - RNA, 22 nt, Human
cguccugggucugggaaggcau

SEQ ID NO: 646954 - RNA, 22 nt, Human
ccagcuccagguagaugggcag

SEQ ID NO: 646955 - RNA, 22 nt, Human
cugggagagccuuuccugaguc

SEQ ID NO: 646956 - RNA, 22 nt, Human
gagcugaauugaagcaaggagc

SEQ ID NO: 646957 - RNA, 22 nt, Human
ucacugcaaggaggcuucucaa

SEQ ID NO: 646958 - RNA, 22 nt, Human
gggcuccagggcccgagucguc

SEQ ID NO: 646959 - RNA, 22 nt, Human
uagauucuacugucacuuaguu

SEQ ID NO: 646960 - RNA, 16 nt, Human
ggcuuuaauuuauccc

SEQ ID NO: 646961 - RNA, 22 nt, Human
aguucuagaagacuuuuccauu

SEQ ID NO: 646962 - RNA, 22 nt, Human
ccagcccuccuccaucagagga

SEQ ID NO: 646963 - RNA, 21 nt, Human
uggggaggggaccugauuaug

SEQ ID NO: 646964 - RNA, 22 nt, Human
uacacuaugggcuuuguguaau

SEQ ID NO: 646965 - RNA, 22 nt, Human
cuggguugcaaagcgcuggcug

SEQ ID NO: 646966 - RNA, 22 nt, Human
aaauagcuuuucauaauucuca

SEQ ID NO: 646967 - RNA, 22 nt, Human
gguuuauugaaggccaccccac

SEQ ID NO: 646968 - RNA, 22 nt, Human
ugggaaggggagcuggaaagga

SEQ ID NO: 646969 - RNA, 22 nt, Human
acaauauacacauccuaauggg

SEQ ID NO: 646970 - RNA, 22 nt, Human
uccugaacauuaugcaagcuuc

SEQ ID NO: 646971 - RNA, 22 nt, Human
gggcagcugccaagugcaucgc

SEQ ID NO: 646972 - RNA, 22 nt, Human
aauugcauguuaaugacuaagu

SEQ ID NO: 646973 - RNA, 22 nt, Human
uccuccuguuucucaggccugg

SEQ ID NO: 646974 - RNA, 22 nt, Human
uugucucuguguggcuucccua

SEQ ID NO: 646975 - RNA, 22 nt, Human
agucugggcugucugcaggagu

SEQ ID NO: 646976 - RNA, 22 nt, Human
cuggccagacuacacaugugug

SEQ ID NO: 646977 - RNA, 22 nt, Human
cugugugcaggugcuggguacc

SEQ ID NO: 646978 - RNA, 22 nt, Human
aaagaaggggucuacauccaau

SEQ ID NO: 646979 - RNA, 17 nt, Human
uucaagauauugaaaug

SEQ ID NO: 646980 - RNA, 22 nt, Human
ucucagugguggcauuccagac

SEQ ID NO: 646981 - RNA, 22 nt, Human
cuggggucagggaucagagagc

SEQ ID NO: 646982 - RNA, 22 nt, Human
augugcuugagggaaaucaguu

SEQ ID NO: 646983 - RNA, 22 nt, Human
aggaguuucaaagcuuccaugu

SEQ ID NO: 646984 - RNA, 22 nt, Human
uagguucaggagauauugcaca

SEQ ID NO: 646985 - RNA, 20 nt, Human
accuggagacagcacucugg

SEQ ID NO: 646986 - RNA, 21 nt, Human
aggcaggauucaaacacagag

SEQ ID NO: 646987 - RNA, 22 nt, Human
auuaaauguuggcauauuuugu

SEQ ID NO: 646988 - RNA, 22 nt, Human
ccacugccgugggccuugggga

SEQ ID NO: 646989 - RNA, 20 nt, Human
aagaggugauaacaggugag

SEQ ID NO: 646990 - RNA, 19 nt, Human
uaaagcacauagcaaaagu

SEQ ID NO: 646991 - RNA, 22 nt, Human
gacauugacaguccuccuuaua

SEQ ID NO: 646992 - RNA, 22 nt, Human
ugugucuguuuugcucaccauu

SEQ ID NO: 646993 - RNA, 20 nt, Human
acaggggcagcacaauaaug

SEQ ID NO: 646994 - RNA, 22 nt, Human
ucccaauuaacagguaucaggc

SEQ ID NO: 646995 - RNA, 22 nt, Human
ucaauaacuuuguuuagcauug

SEQ ID NO: 646996 - RNA, 22 nt, Human
aguuuucugccucuggaugcgu

SEQ ID NO: 646997 - RNA, 22 nt, Human
agccucugcuggcccuggcacu

SEQ ID NO: 646998 - RNA, 22 nt, Human
gcugggcagccccuacagagag

SEQ ID NO: 646999 - RNA, 22 nt, Human
uagagggccagcuggacagcga

SEQ ID NO: 647000 - RNA, 21 nt, Human
cuaacuuugaguccuggcccc

SEQ ID NO: 647001 - RNA, 22 nt, Human
ucuggcuggcagugauggugug

SEQ ID NO: 647002 - RNA, 22 nt, Human
gucuccagggacacacuagccg

SEQ ID NO: 647003 - RNA, 22 nt, Human
auuguacuacaccauaguacug

SEQ ID NO: 647004 - RNA, 22 nt, Human
ccugucugcaugaucccugcca

SEQ ID NO: 647005 - RNA, 22 nt, Human
caucuguucuauccacguugcu

SEQ ID NO: 647006 - RNA, 22 nt, Human
gcacagagguggaggacaaaua

SEQ ID NO: 647007 - RNA, 22 nt, Human
cugcccucccaguugguccgug

SEQ ID NO: 647008 - RNA, 19 nt, Human
cuccacagggauugugauu

SEQ ID NO: 647009 - RNA, 22 nt, Human
gagagcuggauucuggauaggu

SEQ ID NO: 647010 - RNA, 17 nt, Human
cguuagugauuccugcc

SEQ ID NO: 647011 - RNA, 22 nt, Human
gggcuagcagauucuaccuaau

SEQ ID NO: 647012 - RNA, 18 nt, Human
gaggaaacaggcucugug

SEQ ID NO: 647013 - RNA, 22 nt, Human
uuacagcauuuaaugagaucug

SEQ ID NO: 647014 - RNA, 22 nt, Human
agcacaugacuuuuagucgagu

SEQ ID NO: 647015 - RNA, 22 nt, Human
ugcucccaggcucuguggucug

SEQ ID NO: 647016 - RNA, 22 nt, Human
uuaaaugaggcugauguagauu

SEQ ID NO: 647017 - RNA, 22 nt, Human
gcagagguggcaucugggcucu

SEQ ID NO: 647018 - RNA, 22 nt, Human
ugcucugggcaacagccucccu

SEQ ID NO: 647019 - RNA, 22 nt, Human
agcugagcuaguaguuccagug

SEQ ID NO: 647020 - RNA, 22 nt, Human
cauuaauauuguucuucuuuag

SEQ ID NO: 647021 - RNA, 18 nt, Human
ugagagcauucgaggcaa

SEQ ID NO: 647022 - RNA, 23 nt, Human
ggacacagagauaagugagacaa

SEQ ID NO: 647023 - RNA, 22 nt, Human
acuuugauaguuuaaucuagga

SEQ ID NO: 647024 - RNA, 22 nt, Human
cuguuuaaugcaaugaaaugag

SEQ ID NO: 647025 - RNA, 21 nt, Human
agcagguaggcauucauacug

SEQ ID NO: 647026 - RNA, 22 nt, Human
cuggcacaggauccgagaccuu

SEQ ID NO: 647027 - RNA, 22 nt, Human
cuuuauguuggggugucuuagu

SEQ ID NO: 647028 - RNA, 22 nt, Human
ucucuuggugauagucuuucuu

SEQ ID NO: 647029 - RNA, 22 nt, Human
gacugagguauuaagauggcuu

SEQ ID NO: 647030 - RNA, 22 nt, Human
uaaguuuaaauguacaugaagc

SEQ ID NO: 647031 - RNA, 22 nt, Human
ucuuucaaugagcauucuuucc

SEQ ID NO: 647032 - RNA, 20 nt, Human
ugcacagacaaugagcccag

SEQ ID NO: 647033 - RNA, 22 nt, Human
cugugacaguuucucagaauuu

SEQ ID NO: 647034 - RNA, 22 nt, Human
aggcuggagugugcaguggcgc

SEQ ID NO: 647035 - RNA, 22 nt, Human
cuguuaagcaacaugaguaagu

SEQ ID NO: 647036 - RNA, 22 nt, Human
uuugagaaggugacaaauucua

SEQ ID NO: 647037 - RNA, 22 nt, Human
ugaguucaaagacagguauagg

SEQ ID NO: 647038 - RNA, 22 nt, Human
uaaaauagcaugugcagugaaa

SEQ ID NO: 647039 - RNA, 20 nt, Human
ggccucugaggacaaggaga

SEQ ID NO: 647040 - RNA, 22 nt, Human
cagcucugcugggaggaugcag

SEQ ID NO: 647041 - RNA, 22 nt, Human
guggccaaggcagagaaagagc

SEQ ID NO: 647042 - RNA, 22 nt, Human
ucacaucacaugagugcaagga

SEQ ID NO: 647043 - RNA, 22 nt, Human
aucauuagcaauuuucaauaag

SEQ ID NO: 647044 - RNA, 19 nt, Human
gaguacaggugcagaaaug

SEQ ID NO: 647045 - RNA, 22 nt, Human
cugucucugucuuaacucccag

SEQ ID NO: 647046 - RNA, 22 nt, Human
uccuggagaauccugccaccug

SEQ ID NO: 647047 - RNA, 22 nt, Human
ggccaccuaggagccacaguga

SEQ ID NO: 647048 - RNA, 22 nt, Human
agaaggcagguuuuaaaauguc

SEQ ID NO: 647049 - RNA, 22 nt, Human
uuggcucugugucuccacucaa

SEQ ID NO: 647050 - RNA, 22 nt, Human
agagggagaagcuaaaauaacu

SEQ ID NO: 647051 - RNA, 22 nt, Human
uuucuaaguaucuugcaguuuu

SEQ ID NO: 647052 - RNA, 22 nt, Human
aguguugucaaacggcucagca

SEQ ID NO: 647053 - RNA, 22 nt, Human
acuccagguguguuggacucua

SEQ ID NO: 647054 - RNA, 22 nt, Human
ugauuuccacgugcacccaggu

SEQ ID NO: 647055 - RNA, 22 nt, Human
agcuucagcuugcagcugugau

SEQ ID NO: 647056 - RNA, 22 nt, Human
uacacuuuuuacuacagauucu

SEQ ID NO: 647057 - RNA, 22 nt, Human
ucaggcgaggcuuaauccaagg

SEQ ID NO: 647058 - RNA, 22 nt, Human
cagugcccaaaggaacagaaag

SEQ ID NO: 647059 - RNA, 22 nt, Human
cugaaugagggauucugagggc

SEQ ID NO: 647060 - RNA, 22 nt, Human
uuccuggugagauuucguucug

SEQ ID NO: 647061 - RNA, 22 nt, Human
cuagcuuuuuaugacaaucuug

SEQ ID NO: 647062 - RNA, 22 nt, Human
uuccaguucaaauuggccaaua

SEQ ID NO: 647063 - RNA, 22 nt, Human
uccagagaacgaugaaagcugg

SEQ ID NO: 647064 - RNA, 22 nt, Human
gccaccagguucuggguuaagc

SEQ ID NO: 647065 - RNA, 22 nt, Human
cuggcuccauccuugagcucug

SEQ ID NO: 647066 - RNA, 22 nt, Human
gggcccugaucugugagcgcag

SEQ ID NO: 647067 - RNA, 22 nt, Human
cacagguguaugaauaugucca

SEQ ID NO: 647068 - RNA, 22 nt, Human
gcucaggcaaauuucuggugaa

SEQ ID NO: 647069 - RNA, 22 nt, Human
uggaacaacucccucggagccu

SEQ ID NO: 647070 - RNA, 22 nt, Human
uguccagguggccucugcugcu

SEQ ID NO: 647071 - RNA, 18 nt, Human
ucugcugcugcguccugc

SEQ ID NO: 647072 - RNA, 22 nt, Human
ccagcuccauugcuuaguguaa

SEQ ID NO: 647073 - RNA, 22 nt, Human
uaguucaggguuauuucaaggu

SEQ ID NO: 647074 - RNA, 22 nt, Human
aaggcacucagccuugggacag

SEQ ID NO: 647075 - RNA, 22 nt, Human
gggcuggacaucuaagguagcu

SEQ ID NO: 647076 - RNA, 22 nt, Human
cagcuuucuuccuucugucugu

SEQ ID NO: 647077 - RNA, 22 nt, Human
cuggccagccucccagguaccc

SEQ ID NO: 647078 - RNA, 22 nt, Human
aauguuauuucugcauaguagu

SEQ ID NO: 647079 - RNA, 21 nt, Human
gcucucugcaugguggcucag

SEQ ID NO: 647080 - RNA, 22 nt, Human
agguuccaagaaaucaucagug

SEQ ID NO: 647081 - RNA, 22 nt, Human
uuaccaguuuugccauuugcua

SEQ ID NO: 647082 - RNA, 22 nt, Human
gagacagagagguacucaacau

SEQ ID NO: 647083 - RNA, 22 nt, Human
agggccugagcuggcugaccuc

SEQ ID NO: 647084 - RNA, 22 nt, Human
aagguacaaaguuauacagcgu

SEQ ID NO: 647085 - RNA, 22 nt, Human
ucucaaauaggccuugguccug

SEQ ID NO: 647086 - RNA, 16 nt, Human
ugugcauguucugugu

SEQ ID NO: 647087 - RNA, 22 nt, Human
cccacucccugcacgccugccg

SEQ ID NO: 647088 - RNA, 22 nt, Human
uggccucaaccguccuaagcac

SEQ ID NO: 647089 - RNA, 22 nt, Human
acagcuaugacagauggauaau

SEQ ID NO: 647090 - RNA, 22 nt, Human
gcagggguuuucugacuugagu

SEQ ID NO: 647091 - RNA, 23 nt, Human
ugacacauuuccuuuccacugca

SEQ ID NO: 647092 - RNA, 22 nt, Human
ucaggcagaguuaauuugcucc

SEQ ID NO: 647093 - RNA, 22 nt, Human
uucucugcagcuuaggcccagu

SEQ ID NO: 647094 - RNA, 22 nt, Human
ggcuguauauacuguauacagu

SEQ ID NO: 647095 - RNA, 22 nt, Human
ucacauguguuuucucaccaac

SEQ ID NO: 647096 - RNA, 22 nt, Human
cacgugagaccuugcagaggug

SEQ ID NO: 647097 - RNA, 22 nt, Human
uagcccagaugauugaaccaug

SEQ ID NO: 647098 - RNA, 22 nt, Human
aaguguauuaagcaacguuauu

SEQ ID NO: 647099 - RNA, 17 nt, Human
ugaaguuaggcugcaga

SEQ ID NO: 647100 - RNA, 19 nt, Human
uuuugaaguaugagacagg

SEQ ID NO: 647101 - RNA, 22 nt, Human
gugcugagcacaaggcccagag

SEQ ID NO: 647102 - RNA, 20 nt, Human
uuggaaucaccuggagaggu

SEQ ID NO: 647103 - RNA, 22 nt, Human
agcacagagaagauuucaauua

SEQ ID NO: 647104 - RNA, 22 nt, Human
caagagcuagacuuugucagga

SEQ ID NO: 647105 - RNA, 22 nt, Human
gcagagguguagcccccuccau

SEQ ID NO: 647106 - RNA, 22 nt, Human
gccaggcuguggggaacuugaa

SEQ ID NO: 647107 - RNA, 22 nt, Human
auguucauuagucaacauuucu

SEQ ID NO: 647108 - RNA, 22 nt, Human
ugcuggagaccugcuugcacca

SEQ ID NO: 647109 - RNA, 22 nt, Human
augugaacucuguacucucuga

SEQ ID NO: 647110 - RNA, 22 nt, Human
guccucugacucagccuuggga

SEQ ID NO: 647111 - RNA, 22 nt, Human
cccaagggugcccagcagagga

SEQ ID NO: 647112 - RNA, 22 nt, Human
ggugagggacaucacucagcca

SEQ ID NO: 647113 - RNA, 22 nt, Human
aggauggauucuguauguggga

SEQ ID NO: 647114 - RNA, 22 nt, Human
aagcagaugggacuccaaggca

SEQ ID NO: 647115 - RNA, 22 nt, Human
ugagcuugcuacauagaucaga

SEQ ID NO: 647116 - RNA, 22 nt, Human
gugagagggcugggcucaugau

SEQ ID NO: 647117 - RNA, 20 nt, Human
gcugaccauaaaucacacug

SEQ ID NO: 647118 - RNA, 22 nt, Human
ccacuacuuuguuuuuggugcu

SEQ ID NO: 647119 - RNA, 22 nt, Human
cacagguguucuugcagugaaa

SEQ ID NO: 647120 - RNA, 22 nt, Human
ucugcugugauuugcuaccugu

SEQ ID NO: 647121 - RNA, 22 nt, Human
uggaagcacugaagagacaacc

SEQ ID NO: 647122 - RNA, 22 nt, Human
auucugcugguaacucuauaaa

SEQ ID NO: 647123 - RNA, 22 nt, Human
uuguaugaggauagcaagaagc

SEQ ID NO: 647124 - RNA, 22 nt, Human
caggaagugccuggugagagga

SEQ ID NO: 647125 - RNA, 22 nt, Human
aggucugaguauggccugagaa

SEQ ID NO: 647126 - RNA, 22 nt, Human
uauuucuuguucccuccaaguu

SEQ ID NO: 647127 - RNA, 22 nt, Human
ugagaaugaggggguagaaggu

SEQ ID NO: 647128 - RNA, 22 nt, Human
gaauguuuaaggaaggcguggc

SEQ ID NO: 647129 - RNA, 22 nt, Human
ugaggccaaugacccugggcag

SEQ ID NO: 647130 - RNA, 22 nt, Human
aguacauauaguaauuuagcca

SEQ ID NO: 647131 - RNA, 22 nt, Human
cucugggugucuuaggagcuca

SEQ ID NO: 647132 - RNA, 22 nt, Human
caaauacuuacugaaccugugc

SEQ ID NO: 647133 - RNA, 22 nt, Human
augugaaacgcaaugggaucau

SEQ ID NO: 647134 - RNA, 22 nt, Human
uggcugugucaucauagcugug

SEQ ID NO: 647135 - RNA, 22 nt, Human
auuccaguuggguucuaauaca

SEQ ID NO: 647136 - RNA, 22 nt, Human
ugagcagcuuguuccgaguguu

SEQ ID NO: 647137 - RNA, 22 nt, Human
uauucuuacucucgacugcauu

SEQ ID NO: 647138 - RNA, 22 nt, Human
uccaggagauacacugcaccag

SEQ ID NO: 647139 - RNA, 22 nt, Human
cagcugccuguauuguccucau

SEQ ID NO: 647140 - RNA, 22 nt, Human
uuugaagggcacgacaauaguu

SEQ ID NO: 647141 - RNA, 22 nt, Human
aauggcuucaugucuguggaaa

SEQ ID NO: 647142 - RNA, 23 nt, Human
cgugcuuccaggcccagcugagc

SEQ ID NO: 647143 - RNA, 22 nt, Human
uguguaaauuauuuuuaaugau

SEQ ID NO: 647144 - RNA, 22 nt, Human
uuauugccauccuggaaccuag

SEQ ID NO: 647145 - RNA, 22 nt, Human
agcucagagaauagggcuugag

SEQ ID NO: 647146 - RNA, 22 nt, Human
aguuuacacuaugaaaagacua

SEQ ID NO: 647147 - RNA, 22 nt, Human
uguuuuaaucucccauugcucu

SEQ ID NO: 647148 - RNA, 22 nt, Human
gcucagggaacuuuuugcaggc

SEQ ID NO: 647149 - RNA, 22 nt, Human
agcuaacauggaggaaaaaguu

SEQ ID NO: 647150 - RNA, 22 nt, Human
uauggcuggaauacugaaaggc

SEQ ID NO: 647151 - RNA, 22 nt, Human
uccagggccaguccuugucugu

SEQ ID NO: 647152 - RNA, 17 nt, Human
gcuugccuugucuuccu

SEQ ID NO: 647153 - RNA, 22 nt, Human
aacaaugugauugaagcuagaa

SEQ ID NO: 647154 - RNA, 22 nt, Human
gcuguccauccacuucccagcg

SEQ ID NO: 647155 - RNA, 22 nt, Human
uggucaacaggcagggaugaaa

SEQ ID NO: 647156 - RNA, 16 nt, Human
aaggcugauuuucccu

SEQ ID NO: 647157 - RNA, 22 nt, Human
uccaggcuagguuuacaggaca

SEQ ID NO: 647158 - RNA, 21 nt, Human
ugaaagaggauguggucauuc

SEQ ID NO: 647159 - RNA, 22 nt, Human
uugaccacugaaugguucugaa

SEQ ID NO: 647160 - RNA, 22 nt, Human
agcaagauuuuccuugaauguu

SEQ ID NO: 647161 - RNA, 22 nt, Human
cugcaggauuucaugggcugac

SEQ ID NO: 647162 - RNA, 22 nt, Human
guuuucugccgguggugggcuc

SEQ ID NO: 647163 - RNA, 22 nt, Human
aguuauugaguaucuauaaugu

SEQ ID NO: 647164 - RNA, 23 nt, Human
aucaaacuggugagaaugucagu

SEQ ID NO: 647165 - RNA, 21 nt, Human
agcucuaugacuuggccaggu

SEQ ID NO: 647166 - RNA, 22 nt, Human
cucuggagguggagguugcagu

SEQ ID NO: 647167 - RNA, 17 nt, Human
agaugcuggccacaugu

SEQ ID NO: 647168 - RNA, 22 nt, Human
agcagcagucaugccuaugcuc

SEQ ID NO: 647169 - RNA, 22 nt, Human
caggagcucucaucgucagggc

SEQ ID NO: 647170 - RNA, 22 nt, Human
caucacagauguuguguggagu

SEQ ID NO: 647171 - RNA, 22 nt, Human
auuuagaaauuccaaaaguauu

SEQ ID NO: 647172 - RNA, 22 nt, Human
ugggcaguggcugggccucucu

SEQ ID NO: 647173 - RNA, 22 nt, Human
ggaucauuaacacauccaucac

SEQ ID NO: 647174 - RNA, 22 nt, Human
aggcugaggcuuuccuuggaga

SEQ ID NO: 647175 - RNA, 22 nt, Human
ggcugugcgggcagccguggga

SEQ ID NO: 647176 - RNA, 17 nt, Human
gggaaguggagaaagcu

SEQ ID NO: 647177 - RNA, 22 nt, Human
aagcagccuggcaugaugcuuu

SEQ ID NO: 647178 - RNA, 22 nt, Human
uauucacauguacauaugcuca

SEQ ID NO: 647179 - RNA, 22 nt, Human
cgaggcagacaaaaguuggaag

SEQ ID NO: 647180 - RNA, 22 nt, Human
cugcacagagcggcaguucuua

SEQ ID NO: 647181 - RNA, 22 nt, Human
cuccagcuuuuucccaguuggc

SEQ ID NO: 647182 - RNA, 22 nt, Human
acuggggaguugaagcacuuuc

SEQ ID NO: 647183 - RNA, 22 nt, Human
cagagcaggaauaggguguuga

SEQ ID NO: 647184 - RNA, 22 nt, Human
acauugaacuacuuguaaugag

SEQ ID NO: 647185 - RNA, 22 nt, Human
cagaugcuauagugcugccaua

SEQ ID NO: 647186 - RNA, 22 nt, Human
uccaaaguaauuucacuucugu

SEQ ID NO: 647187 - RNA, 22 nt, Human
ggcacagagaggcccuggaagg

SEQ ID NO: 647188 - RNA, 21 nt, Human
caagccagaccaauagcagcc

SEQ ID NO: 647189 - RNA, 22 nt, Human
cugggugcuuacuuugugcuag

SEQ ID NO: 647190 - RNA, 22 nt, Human
acaugcaagccccugaacacau

SEQ ID NO: 647191 - RNA, 22 nt, Human
cagaauguauaugaucuaaggu

SEQ ID NO: 647192 - RNA, 22 nt, Human
aggauacaagucucagaaugcu

SEQ ID NO: 647193 - RNA, 22 nt, Human
agcacauuuuauuuaagaaaau

SEQ ID NO: 647194 - RNA, 22 nt, Human
uuggagagauuaucagaccagc

SEQ ID NO: 647195 - RNA, 22 nt, Human
caaguuugcugauccuuguuuu

SEQ ID NO: 647196 - RNA, 22 nt, Human
uguuaaaccaguuuugcaucau

SEQ ID NO: 647197 - RNA, 22 nt, Human
gcuucuggcagugcagccacca

SEQ ID NO: 647198 - RNA, 22 nt, Human
cucucugagugagggacaagcu

SEQ ID NO: 647199 - RNA, 22 nt, Human
ucucugagcaugccauauugcu

SEQ ID NO: 647200 - RNA, 22 nt, Human
acaucugaaagggauugcagaa

SEQ ID NO: 647201 - RNA, 22 nt, Human
acauuucugcaucucagagcua

SEQ ID NO: 647202 - RNA, 22 nt, Human
ucacaguuauagucuguagaau

SEQ ID NO: 647203 - RNA, 22 nt, Human
uugaaacugaguguguuugggg

SEQ ID NO: 647204 - RNA, 22 nt, Human
uuagaagugaaauagcuguaca

SEQ ID NO: 647205 - RNA, 22 nt, Human
aauugaacuugaucuuuagcua

SEQ ID NO: 647206 - RNA, 22 nt, Human
ucagucuccuuuccucuagaca

SEQ ID NO: 647207 - RNA, 22 nt, Human
gagguagcaugcuggaagggac

SEQ ID NO: 647208 - RNA, 22 nt, Human
cucucuagaggcccaccuugag

SEQ ID NO: 647209 - RNA, 22 nt, Human
ccagucacucugugagagcuac

SEQ ID NO: 647210 - RNA, 22 nt, Human
cccaaccagaaauugacagaca

SEQ ID NO: 647211 - RNA, 22 nt, Human
cagagagcacauaggauacuuu

SEQ ID NO: 647212 - RNA, 23 nt, Human
uucugaaaauagauaguggcucc

SEQ ID NO: 647213 - RNA, 22 nt, Human
uaucauuuaacagaaucauugc

SEQ ID NO: 647214 - RNA, 22 nt, Human
acacauguucaagaauguucag

SEQ ID NO: 647215 - RNA, 22 nt, Human
gaggucaauaauaugugcuuua

SEQ ID NO: 647216 - RNA, 22 nt, Human
ucugagaguccaucuccaagcc

SEQ ID NO: 647217 - RNA, 20 nt, Human
uggacacagcccuguugagu

SEQ ID NO: 647218 - RNA, 22 nt, Human
ugcugacuccuggcugugacac

SEQ ID NO: 647219 - RNA, 22 nt, Human
aaacaaauuucaagcugugaca

SEQ ID NO: 647220 - RNA, 22 nt, Human
gucucagugcccaaugccauaa

SEQ ID NO: 647221 - RNA, 22 nt, Human
ccuggcccuggaauagggcagg

SEQ ID NO: 647222 - RNA, 22 nt, Human
acccaggccugagagacaggag

SEQ ID NO: 647223 - RNA, 22 nt, Human
acagggccauuggaggauuaua

SEQ ID NO: 647224 - RNA, 22 nt, Human
ugcaggcugggaagagggacaa

SEQ ID NO: 647225 - RNA, 22 nt, Human
gcuggaaaaggaggcaaaauau

SEQ ID NO: 647226 - RNA, 19 nt, Human
uguuggugcggauguggag

SEQ ID NO: 647227 - RNA, 22 nt, Human
uuauucagugccuuugaaagaa

SEQ ID NO: 647228 - RNA, 22 nt, Human
gugcaaaaguaauugugguuuu

SEQ ID NO: 647229 - RNA, 23 nt, Human
ucccagggaaggugagcgaggcu

SEQ ID NO: 647230 - RNA, 18 nt, Human
gcugagcaaauuccuccc

SEQ ID NO: 647231 - RNA, 22 nt, Human
ccagggccaagagaccucgagg

SEQ ID NO: 647232 - RNA, 22 nt, Human
aaauguaagucuuuguuucuua

SEQ ID NO: 647233 - RNA, 22 nt, Human
augcaagucuuaauaguuuagg

SEQ ID NO: 647234 - RNA, 22 nt, Human
uaugaaaugauggggaaaauag

SEQ ID NO: 647235 - RNA, 22 nt, Human
uauuugagcgaagcaguguuuu

SEQ ID NO: 647236 - RNA, 22 nt, Human
ggucugaaauuaugucacugcu

SEQ ID NO: 647237 - RNA, 22 nt, Human
uugcuucacuacuucuaggcuc

SEQ ID NO: 647238 - RNA, 22 nt, Human
uuugaaaauuuaagugcuacac

SEQ ID NO: 647239 - RNA, 22 nt, Human
caucaucaacuggcagguaagu

SEQ ID NO: 647240 - RNA, 22 nt, Human
acagaagaaguucaaggugaag

SEQ ID NO: 647241 - RNA, 22 nt, Human
agagugaucagauaucaggugu

SEQ ID NO: 647242 - RNA, 22 nt, Human
uagggcucugcucaucaguugu

SEQ ID NO: 647243 - RNA, 22 nt, Human
gagcugaggcucaggcuggcgu

SEQ ID NO: 647244 - RNA, 22 nt, Human
uuaccaaaugaaauagagauuu

SEQ ID NO: 647245 - RNA, 22 nt, Human
cugcagggcagggccuccuggc

SEQ ID NO: 647246 - RNA, 22 nt, Human
uagaaacauucaguugcagucc

SEQ ID NO: 647247 - RNA, 22 nt, Human
ugggaacaccugcugcccagug

SEQ ID NO: 647248 - RNA, 22 nt, Human
uucucuaauacauuuugacaaa

SEQ ID NO: 647249 - RNA, 22 nt, Human
ugggaagaguuagagacagcug

SEQ ID NO: 647250 - RNA, 22 nt, Human
uugagacucgagucucucagac

SEQ ID NO: 647251 - RNA, 22 nt, Human
uugcugauuuguuucuauucca

SEQ ID NO: 647252 - RNA, 22 nt, Human
aauagcauagaguuaaaaugca

SEQ ID NO: 647253 - RNA, 22 nt, Human
cucagcaacagcgacuuaaggg

SEQ ID NO: 647254 - RNA, 22 nt, Human
guuuagaagccaagauuugggu

SEQ ID NO: 647255 - RNA, 22 nt, Human
uuccugaauauaaagacacuag

SEQ ID NO: 647256 - RNA, 22 nt, Human
augacaguacuggugacaauac

SEQ ID NO: 647257 - RNA, 22 nt, Human
ugcagagagaccccugggccag

SEQ ID NO: 647258 - RNA, 22 nt, Human
cugggcagguauacaaaaaaug

SEQ ID NO: 647259 - RNA, 22 nt, Human
aggagaggguggcauuaaguuu

SEQ ID NO: 647260 - RNA, 22 nt, Human
caacauauaauauuugaguucu

SEQ ID NO: 647261 - RNA, 22 nt, Human
cgaggccaauguguuuuaugaa

SEQ ID NO: 647262 - RNA, 22 nt, Human
gaaugcacuuccaacaucuauu

SEQ ID NO: 647263 - RNA, 19 nt, Human
ccucucccaugcuuaccuc

SEQ ID NO: 647264 - RNA, 19 nt, Human
cccagguguuugaggcugc

SEQ ID NO: 647265 - RNA, 22 nt, Human
gcaauaaauaacauggaagaca

SEQ ID NO: 647266 - RNA, 22 nt, Human
uacaacauuguguugcuucaua

SEQ ID NO: 647267 - RNA, 19 nt, Human
aggccugggguuuugcacu

SEQ ID NO: 647268 - RNA, 22 nt, Human
uaaaacugcuugguauggucua

SEQ ID NO: 647269 - RNA, 22 nt, Human
auaaggcagaaauagggaaagu

SEQ ID NO: 647270 - RNA, 22 nt, Human
ccagcugguuuauauuccccac

SEQ ID NO: 647271 - RNA, 22 nt, Human
uaagacagggucuauucuuagu

SEQ ID NO: 647272 - RNA, 22 nt, Human
ugcccagguuugagugcccaag

SEQ ID NO: 647273 - RNA, 22 nt, Human
ugcaaauauugggacagucuag

SEQ ID NO: 647274 - RNA, 22 nt, Human
caaggccacguucugcaugcgg

SEQ ID NO: 647275 - RNA, 22 nt, Human
agcucucccaccuucuucuuac

SEQ ID NO: 647276 - RNA, 22 nt, Human
cugggacuuuacccuguggccc

SEQ ID NO: 647277 - RNA, 22 nt, Human
ucagaaagcuuagugucuugca

SEQ ID NO: 647278 - RNA, 22 nt, Human
gaacuuuaucaaaaguuguuua

SEQ ID NO: 647279 - RNA, 22 nt, Human
cauacauuaccuaacuuaaugc

SEQ ID NO: 647280 - RNA, 22 nt, Human
cugcagcuggcucaugggauau

SEQ ID NO: 647281 - RNA, 22 nt, Human
uuuuuuguuggguagaacggaa

SEQ ID NO: 647282 - RNA, 22 nt, Human
auuacaacuggaauggugcugg

SEQ ID NO: 647283 - RNA, 22 nt, Human
gacuuucugauguaaacauuua

SEQ ID NO: 647284 - RNA, 22 nt, Human
aaaugggccuggaaagaggaug

SEQ ID NO: 647285 - RNA, 22 nt, Human
cgcuggucaccauggcguccug

SEQ ID NO: 647286 - RNA, 16 nt, Human
uccuaacuggcaguuc

SEQ ID NO: 647287 - RNA, 19 nt, Human
cacuuuauuucuguuuugu

SEQ ID NO: 647288 - RNA, 21 nt, Human
uucugagacucauuugaacuc

SEQ ID NO: 647289 - RNA, 17 nt, Human
ugugcgcuugugugagg

SEQ ID NO: 647290 - RNA, 22 nt, Human
acuguaauaugguucuuuugau

SEQ ID NO: 647291 - RNA, 22 nt, Human
uccucccugaguggggacagcu

SEQ ID NO: 647292 - RNA, 22 nt, Human
aagggagacccaccguccugga

SEQ ID NO: 647293 - RNA, 22 nt, Human
aaggcaaguuuuaguuuucugg

SEQ ID NO: 647294 - RNA, 22 nt, Human
aacaucucuguauuuuauagac

SEQ ID NO: 647295 - RNA, 22 nt, Human
uggugcugacaguucugagugc

SEQ ID NO: 647296 - RNA, 22 nt, Human
guaggcagaccaguggaugggu

SEQ ID NO: 647297 - RNA, 22 nt, Human
ccagccaguauauuccaaagcc

SEQ ID NO: 647298 - RNA, 22 nt, Human
uaugcuuugaaaaugugcugaa

SEQ ID NO: 647299 - RNA, 22 nt, Human
aaugacuguagucauauuaagg

SEQ ID NO: 647300 - RNA, 17 nt, Human
cugaggcccagggccca

SEQ ID NO: 647301 - RNA, 22 nt, Human
augaugugugcugaucaagcuu

SEQ ID NO: 647302 - RNA, 22 nt, Human
gagccugcgagggaguaaggca

SEQ ID NO: 647303 - RNA, 22 nt, Human
acuguuaaaguaauuaauuguc

SEQ ID NO: 647304 - RNA, 22 nt, Human
acagaagccuuuggccauuuga

SEQ ID NO: 647305 - RNA, 22 nt, Human
aucacaggcuauguggguuuug

SEQ ID NO: 647306 - RNA, 22 nt, Human
agaagccagauuguagugggac

SEQ ID NO: 647307 - RNA, 22 nt, Human
caguccuuccuugccccuuggg

SEQ ID NO: 647308 - RNA, 22 nt, Human
uccagaccuagggcaccccagu

SEQ ID NO: 647309 - RNA, 22 nt, Human
gccagccacaagggaggcuugu

SEQ ID NO: 647310 - RNA, 22 nt, Human
gaccuggaagaugguccucacc

SEQ ID NO: 647311 - RNA, 22 nt, Human
uggccaggaggcugcuucugac

SEQ ID NO: 647312 - RNA, 22 nt, Human
ucugcagacuugccuaagugug

SEQ ID NO: 647313 - RNA, 22 nt, Human
ucugcaucauuuuucagagccg

SEQ ID NO: 647314 - RNA, 23 nt, Human
cuguggcugaguccuguuggagu

SEQ ID NO: 647315 - RNA, 22 nt, Human
uuaucuugguguuuuaguaauu

SEQ ID NO: 647316 - RNA, 22 nt, Human
cacauuauucuaaagagguacu

SEQ ID NO: 647317 - RNA, 22 nt, Human
cugugagacugauagggaagag

SEQ ID NO: 647318 - RNA, 22 nt, Human
uuaaauucauuccaacuuuuga

SEQ ID NO: 647319 - RNA, 22 nt, Human
aaggcugaggcagugaggcaga

SEQ ID NO: 647320 - RNA, 22 nt, Human
uauuagguagauuuuacugauu

SEQ ID NO: 647321 - RNA, 22 nt, Human
uaacacuauccagauaugauaa

SEQ ID NO: 647322 - RNA, 20 nt, Human
guuuuaaggcacaggccuuu

SEQ ID NO: 647323 - RNA, 22 nt, Human
augauccaaagccacaggggca

SEQ ID NO: 647324 - RNA, 23 nt, Human
uggcccugugcaugcugcuuccc

SEQ ID NO: 647325 - RNA, 22 nt, Human
gcugagcaggguggggaaaggc

SEQ ID NO: 647326 - RNA, 22 nt, Human
acuaggaauucaaguagacaga

SEQ ID NO: 647327 - RNA, 22 nt, Human
caugcaguuucucuaugcguag

SEQ ID NO: 647328 - RNA, 22 nt, Human
gucaaauauacuaagagguaaa

SEQ ID NO: 647329 - RNA, 22 nt, Human
agaccacuuggauaagaaacag

SEQ ID NO: 647330 - RNA, 22 nt, Human
cugacuucagggauaaaaagua

SEQ ID NO: 647331 - RNA, 23 nt, Human
aauguauguuaguaucuuagaga

SEQ ID NO: 647332 - RNA, 22 nt, Human
uuuuugauacucaagaggggua

SEQ ID NO: 647333 - RNA, 22 nt, Human
ucuggggugcagccuggacaua

SEQ ID NO: 647334 - RNA, 22 nt, Human
ucacaagauauuucaguccuuu

SEQ ID NO: 647335 - RNA, 21 nt, Human
ucagcagcuuuugcagucccu

SEQ ID NO: 647336 - RNA, 22 nt, Human
gacacauaugcguauaguuuag

SEQ ID NO: 647337 - RNA, 22 nt, Human
gaaggggguugcagucuagggu

SEQ ID NO: 647338 - RNA, 22 nt, Human
cuuccugcaggacagccaucug

SEQ ID NO: 647339 - RNA, 20 nt, Human
aggcugggguguuuugccca

SEQ ID NO: 647340 - RNA, 22 nt, Human
gccuggcacauugcaguggauu

SEQ ID NO: 647341 - RNA, 22 nt, Human
uucuucagcccauaucuuccag

SEQ ID NO: 647342 - RNA, 22 nt, Human
gaggccagacugccuuuuauga

SEQ ID NO: 647343 - RNA, 22 nt, Human
auaaauguuuguugaaugaaua

SEQ ID NO: 647344 - RNA, 22 nt, Human
agucucuuauucccuauugcug

SEQ ID NO: 647345 - RNA, 22 nt, Human
ugaaaguuacaggaaaacagau

SEQ ID NO: 647346 - RNA, 22 nt, Human
gagcaacaggugauggggcugu

SEQ ID NO: 647347 - RNA, 22 nt, Human
agggcugcaggcaagauauggc

SEQ ID NO: 647348 - RNA, 22 nt, Human
ucaaccagaguuuuucuuaaua

SEQ ID NO: 647349 - RNA, 22 nt, Human
uagauucucagaauuuuagaaa

SEQ ID NO: 647350 - RNA, 22 nt, Human
ucagcaucuacagcuuugcuau

SEQ ID NO: 647351 - RNA, 22 nt, Human
uucuguguugugacauucuaga

SEQ ID NO: 647352 - RNA, 20 nt, Human
auguuucucugucgugauuu

SEQ ID NO: 647353 - RNA, 22 nt, Human
ugucccugguggaggcuggcag

SEQ ID NO: 647354 - RNA, 22 nt, Human
ggcucuggagacauguggagag

SEQ ID NO: 647355 - RNA, 22 nt, Human
ucaguuuagaguuauuuaaucu

SEQ ID NO: 647356 - RNA, 22 nt, Human
uggaagaaaauucaaucgaguu

SEQ ID NO: 647357 - RNA, 22 nt, Human
cuccaggauaccuguuccuaua

SEQ ID NO: 647358 - RNA, 20 nt, Human
aauuuacucacagaaugaau

SEQ ID NO: 647359 - RNA, 22 nt, Human
gagguucacuuccuggauccuu

SEQ ID NO: 647360 - RNA, 22 nt, Human
agagcagauggccagggggccu

SEQ ID NO: 647361 - RNA, 23 nt, Human
caaaccuguuucucucaccuguc

SEQ ID NO: 647362 - RNA, 22 nt, Human
acaaggcaguacaaugaugaca

SEQ ID NO: 647363 - RNA, 22 nt, Human
aauuccaaaucaacuagucuag

SEQ ID NO: 647364 - RNA, 22 nt, Human
uccuaguucucugccagucgcu

SEQ ID NO: 647365 - RNA, 22 nt, Human
augcaggagcccucuugagggc

SEQ ID NO: 647366 - RNA, 22 nt, Human
aguaaagcauugucuucagagu

SEQ ID NO: 647367 - RNA, 22 nt, Human
aauuggaaaaagacuuaauugc

SEQ ID NO: 647368 - RNA, 22 nt, Human
gccuuccugcagcucugagcgu

SEQ ID NO: 647369 - RNA, 22 nt, Human
gguuugacagcuuggggcuguc

SEQ ID NO: 647370 - RNA, 22 nt, Human
agagauuugucaaugauuucca

SEQ ID NO: 647371 - RNA, 22 nt, Human
gcaggccugguuuacaugguag

SEQ ID NO: 647372 - RNA, 22 nt, Human
acagacugugaguaugcauagu

SEQ ID NO: 647373 - RNA, 22 nt, Human
caggccaggugcucuagaauca

SEQ ID NO: 647374 - RNA, 22 nt, Human
auuaaagugaaguucucagaug

SEQ ID NO: 647375 - RNA, 22 nt, Human
cuucagaaugggacuguguuug

SEQ ID NO: 647376 - RNA, 22 nt, Human
acaguauuugcgauacugauga

SEQ ID NO: 647377 - RNA, 18 nt, Human
gugagcagagagcaucac

SEQ ID NO: 647378 - RNA, 22 nt, Human
uggugagaugcagcaacagaca

SEQ ID NO: 647379 - RNA, 23 nt, Human
ugugccauugaggcugaggcuca

SEQ ID NO: 647380 - RNA, 18 nt, Human
ggugggaagccagggccu

SEQ ID NO: 647381 - RNA, 17 nt, Human
gacaucaguacuuacag

SEQ ID NO: 647382 - RNA, 22 nt, Human
ugucuuuggggcuguaccuguu

SEQ ID NO: 647383 - RNA, 22 nt, Human
uuacaugacucaauagaagggc

SEQ ID NO: 647384 - RNA, 22 nt, Human
uuuucuguggucagagcuugag

SEQ ID NO: 647385 - RNA, 22 nt, Human
uuucagagcucagcagcuagag

SEQ ID NO: 647386 - RNA, 20 nt, Human
aggaagccaaaggcugucuu

SEQ ID NO: 647387 - RNA, 22 nt, Human
caggcacccucugaggggaagc

SEQ ID NO: 647388 - RNA, 22 nt, Human
ugagguggguggcuucuguuau

SEQ ID NO: 647389 - RNA, 22 nt, Human
ggaguggcuauuugugcugguu

SEQ ID NO: 647390 - RNA, 22 nt, Human
aguucacaagcguaggugcuga

SEQ ID NO: 647391 - RNA, 22 nt, Human
ccuguggcacaugcagggauuc

SEQ ID NO: 647392 - RNA, 22 nt, Human
ugacuuuggauaagaaaaugag

SEQ ID NO: 647393 - RNA, 19 nt, Human
agcacagacaagaccagca

SEQ ID NO: 647394 - RNA, 22 nt, Human
uaaagguuauugcacuggaguu

SEQ ID NO: 647395 - RNA, 22 nt, Human
gucagaaaccagucaaacaaga

SEQ ID NO: 647396 - RNA, 22 nt, Human
ggcagggguccugguguugacu

SEQ ID NO: 647397 - RNA, 22 nt, Human
auucucauaggagcgugaaccu

SEQ ID NO: 647398 - RNA, 22 nt, Human
uucuauaaaugaauguguauau

SEQ ID NO: 647399 - RNA, 22 nt, Human
agccuccuguagcccucaccca

SEQ ID NO: 647400 - RNA, 22 nt, Human
uagaagaacaugucaaacuaua

SEQ ID NO: 647401 - RNA, 22 nt, Human
gcccaggagguugggcugugca

SEQ ID NO: 647402 - RNA, 22 nt, Human
augaucugauaaucauccacua

SEQ ID NO: 647403 - RNA, 22 nt, Human
acauucaaccaauguuugcuau

SEQ ID NO: 647404 - RNA, 22 nt, Human
aagauauagauaaaacuaugca

SEQ ID NO: 647405 - RNA, 22 nt, Human
ggugaagcguauuuguggagcu

SEQ ID NO: 647406 - RNA, 22 nt, Human
ccaggccagggcugcagcgagc

SEQ ID NO: 647407 - RNA, 22 nt, Human
guugaauaucccguaucuuaaa

SEQ ID NO: 647408 - RNA, 20 nt, Human
acagagacugagacacuugc

SEQ ID NO: 647409 - RNA, 22 nt, Human
acaguacaggacgaguuuuccu

SEQ ID NO: 647410 - RNA, 22 nt, Human
acaggcucaguucacuggauuu

SEQ ID NO: 647411 - RNA, 22 nt, Human
gugcaggagguaacauagcaaa

SEQ ID NO: 647412 - RNA, 20 nt, Human
auuugcuuaccuuguuucua

SEQ ID NO: 647413 - RNA, 22 nt, Human
gcagaagcugggcagcgaggug

SEQ ID NO: 647414 - RNA, 22 nt, Human
ugaggcaguucuuacuuguauu

SEQ ID NO: 647415 - RNA, 19 nt, Human
gggagcaggaaagcugugg

SEQ ID NO: 647416 - RNA, 20 nt, Human
uguuugugccagcuuuguca

SEQ ID NO: 647417 - RNA, 22 nt, Human
augggaugaucaccugagcuca

SEQ ID NO: 647418 - RNA, 22 nt, Human
caucaucucucccccaggccug

SEQ ID NO: 647419 - RNA, 22 nt, Human
cuccccacgccuggacuaagag

SEQ ID NO: 647420 - RNA, 22 nt, Human
uggcucugguaacauuggguag

SEQ ID NO: 647421 - RNA, 22 nt, Human
auuccaguucuccucucuaaag

SEQ ID NO: 647422 - RNA, 22 nt, Human
aguggcagaguugaauaauuga

SEQ ID NO: 647423 - RNA, 22 nt, Human
agcugcccuuuaugaugcugaa

SEQ ID NO: 647424 - RNA, 22 nt, Human
cuuggccucuucucaggguggg

SEQ ID NO: 647425 - RNA, 22 nt, Human
agcaggaaggucugugugaguc

SEQ ID NO: 647426 - RNA, 22 nt, Human
ggcuccaguuuccccuuggggc

SEQ ID NO: 647427 - RNA, 22 nt, Human
ugugcauguauugauuuguacc

SEQ ID NO: 647428 - RNA, 22 nt, Human
gcaugggcaagaggacuggggg

SEQ ID NO: 647429 - RNA, 22 nt, Human
aucuugaaauacuuucuagaau

SEQ ID NO: 647430 - RNA, 22 nt, Human
aggucugggaguucauucccug

SEQ ID NO: 647431 - RNA, 21 nt, Human
ugcaugcuauguuuuuauuuc

SEQ ID NO: 647432 - RNA, 19 nt, Human
agugagcauccagagaggu

SEQ ID NO: 647433 - RNA, 22 nt, Human
ccucugcaaagaauuugucucc

SEQ ID NO: 647434 - RNA, 22 nt, Human
ucccucuggucuggacgccaua

SEQ ID NO: 647435 - RNA, 22 nt, Human
cugugaacaauagcagcaucuu

SEQ ID NO: 647436 - RNA, 22 nt, Human
gaggccacagcuaucagggaca

SEQ ID NO: 647437 - RNA, 22 nt, Human
gcaccuugggaagcgccaguug

SEQ ID NO: 647438 - RNA, 22 nt, Human
uggaaaaucaggggacauugau

SEQ ID NO: 647439 - RNA, 22 nt, Human
agggaaaguaagcauuucauua

SEQ ID NO: 647440 - RNA, 22 nt, Human
cuguuaaaugagaaagcagacu

SEQ ID NO: 647441 - RNA, 18 nt, Human
gcccaugguaaaugcugu

SEQ ID NO: 647442 - RNA, 22 nt, Human
cuugcuguugugggagacuggg

SEQ ID NO: 647443 - RNA, 19 nt, Human
agggcuuugugugcugcuc

SEQ ID NO: 647444 - RNA, 22 nt, Human
uugggggcagagggagcaucug

SEQ ID NO: 647445 - RNA, 22 nt, Human
cccaggaaaguggaggcggcug

SEQ ID NO: 647446 - RNA, 22 nt, Human
caaaguuaucaacugcaacauu

SEQ ID NO: 647447 - RNA, 22 nt, Human
uugacaaaaaccucauuucacc

SEQ ID NO: 647448 - RNA, 21 nt, Human
cuuuagugaaaaggggcuaac

SEQ ID NO: 647449 - RNA, 22 nt, Human
uacacuaauagccacacuaaug

SEQ ID NO: 647450 - RNA, 22 nt, Human
acugaacauccauaagauuuuu

SEQ ID NO: 647451 - RNA, 22 nt, Human
ucagagaauucucagaugacuc

SEQ ID NO: 647452 - RNA, 22 nt, Human
uucuacacucacccagcuguaa

SEQ ID NO: 647453 - RNA, 22 nt, Human
cugagggcuggagcugaggccu

SEQ ID NO: 647454 - RNA, 23 nt, Human
ugggaagauauguauguucaagg

SEQ ID NO: 647455 - RNA, 22 nt, Human
cuggggcccugggucugcccuc

SEQ ID NO: 647456 - RNA, 22 nt, Human
ccucaaaggccuggcaccagaa

SEQ ID NO: 647457 - RNA, 22 nt, Human
accagcucagaagccagaaaga

SEQ ID NO: 647458 - RNA, 18 nt, Human
uagcaaagauguggauug

SEQ ID NO: 647459 - RNA, 22 nt, Human
ucaucaaagucaaagaaugacu

SEQ ID NO: 647460 - RNA, 22 nt, Human
ugaauacaggaaaauauacuga

SEQ ID NO: 647461 - RNA, 22 nt, Human
cugagcuguuuaaucccagaua

SEQ ID NO: 647462 - RNA, 22 nt, Human
uauucaugagauaggcaguuuu

SEQ ID NO: 647463 - RNA, 22 nt, Human
uggguaggugcuggggauucag

SEQ ID NO: 647464 - RNA, 22 nt, Human
ggguaugagauauaggugaaua

SEQ ID NO: 647465 - RNA, 22 nt, Human
caccagcuugcagucuuaaccc

SEQ ID NO: 647466 - RNA, 23 nt, Human
ugcuccagccucuuugauagugu

SEQ ID NO: 647467 - RNA, 22 nt, Human
acauguaacauauauguagcau

SEQ ID NO: 647468 - RNA, 22 nt, Human
auguggcuagugcaacugagaa

SEQ ID NO: 647469 - RNA, 22 nt, Human
agcagcaggcuuaaggaaaagu

SEQ ID NO: 647470 - RNA, 22 nt, Human
gagggaaacagauggguugugg

SEQ ID NO: 647471 - RNA, 22 nt, Human
ccuucaaaguacacaucuuuau

SEQ ID NO: 647472 - RNA, 22 nt, Human
uagagcuauuuagagcauuuua

SEQ ID NO: 647473 - RNA, 22 nt, Human
cuuuaguguuguugugaggauu

SEQ ID NO: 647474 - RNA, 22 nt, Human
uggcagccaucugagggugggg

SEQ ID NO: 647475 - RNA, 22 nt, Human
gagguaucuuagagaguguaga

SEQ ID NO: 647476 - RNA, 22 nt, Human
ggagccuugggcgcucucccau

SEQ ID NO: 647477 - RNA, 23 nt, Human
ucccaggaaucugcauuuuuaac

SEQ ID NO: 647478 - RNA, 22 nt, Human
auuuguaagcuagagccaugau

SEQ ID NO: 647479 - RNA, 22 nt, Human
aaacaucucaaagagguauuug

SEQ ID NO: 647480 - RNA, 22 nt, Human
ggggaugguagaccggugacgu

SEQ ID NO: 647481 - RNA, 22 nt, Human
ucugcugcagagcugcgggugc

SEQ ID NO: 647482 - RNA, 22 nt, Human
uuauucaggucauggacuguca

SEQ ID NO: 647483 - RNA, 22 nt, Human
cgagcaugaugacggcuguggc

SEQ ID NO: 647484 - RNA, 19 nt, Human
ggccucugcaggccgcccc

SEQ ID NO: 647485 - RNA, 22 nt, Human
ggaggccaaggaggagcuugcc

SEQ ID NO: 647486 - RNA, 22 nt, Human
acagucuugcuguauggucagg

SEQ ID NO: 647487 - RNA, 22 nt, Human
ccaggcaggcuagaauguaaau

SEQ ID NO: 647488 - RNA, 22 nt, Human
caggggcggguaaaaggccucc

SEQ ID NO: 647489 - RNA, 22 nt, Human
caguucacacugugcuaucugc

SEQ ID NO: 647490 - RNA, 22 nt, Human
gccacagguggaauuaagaaau

SEQ ID NO: 647491 - RNA, 22 nt, Human
uuugcaaaugcucugcagagcu

SEQ ID NO: 647492 - RNA, 22 nt, Human
cagcucugggagucccaccccu

SEQ ID NO: 647493 - RNA, 22 nt, Human
auccagagagguuaggugacau

SEQ ID NO: 647494 - RNA, 22 nt, Human
uggcugccuuucaccucaucuc

SEQ ID NO: 647495 - RNA, 22 nt, Human
uggccuuggagaggcacggccc

SEQ ID NO: 647496 - RNA, 22 nt, Human
gcuguggcaauguuuauaauua

SEQ ID NO: 647497 - RNA, 22 nt, Human
uggguagagacacagucugggg

SEQ ID NO: 647498 - RNA, 22 nt, Human
uagagauggggucuugcuauga

SEQ ID NO: 647499 - RNA, 22 nt, Human
aggacaguauaggcuuuaggag

SEQ ID NO: 647500 - RNA, 22 nt, Human
uccagcugacaguucaaaauga

SEQ ID NO: 647501 - RNA, 22 nt, Human
agggaugauuucagugucugcc

SEQ ID NO: 647502 - RNA, 22 nt, Human
ggcugucuugggagcucccccg

SEQ ID NO: 647503 - RNA, 22 nt, Human
agggccugggucuguacuccuc

SEQ ID NO: 647504 - RNA, 22 nt, Human
cugaacauucuugaacaucugu

SEQ ID NO: 647505 - RNA, 22 nt, Human
ggcuuuacuauaugguacauuu

SEQ ID NO: 647506 - RNA, 22 nt, Human
gagcuggucgaaaugggcugac

SEQ ID NO: 647507 - RNA, 22 nt, Human
auaccuuuaggcauuuugcauc

SEQ ID NO: 647508 - RNA, 22 nt, Human
uguggggaccuggcugccaccc

SEQ ID NO: 647509 - RNA, 22 nt, Human
agagcuguguuaagaacaggcc

SEQ ID NO: 647510 - RNA, 22 nt, Human
ggaggccagccugaggcugagg

SEQ ID NO: 647511 - RNA, 22 nt, Human
ucucagggccccaaaggcuagu

SEQ ID NO: 647512 - RNA, 22 nt, Human
uccugcuuccuugucuuuagac

SEQ ID NO: 647513 - RNA, 22 nt, Human
agcuccuguucugagagcagga

SEQ ID NO: 647514 - RNA, 22 nt, Human
ccuccuuccugggacagagcug

SEQ ID NO: 647515 - RNA, 22 nt, Human
aaaagccaugcauaccuaagag

SEQ ID NO: 647516 - RNA, 22 nt, Human
guauuuaauuccauuaaguuag

SEQ ID NO: 647517 - RNA, 22 nt, Human
aauaaaguguauucuuugucau

SEQ ID NO: 647518 - RNA, 22 nt, Human
ugcagcugcugguggcugaaag

SEQ ID NO: 647519 - RNA, 22 nt, Human
uacaguagucgucuuauuuuga

SEQ ID NO: 647520 - RNA, 17 nt, Human
guguaacuaugagccau

SEQ ID NO: 647521 - RNA, 22 nt, Human
uccuugaacagagggccugggu

SEQ ID NO: 647522 - RNA, 22 nt, Human
uacacagaaccugguguacagu

SEQ ID NO: 647523 - RNA, 22 nt, Human
aggagcucugggcagggccucc

SEQ ID NO: 647524 - RNA, 22 nt, Human
agguccagguuccguuucugcg

SEQ ID NO: 647525 - RNA, 22 nt, Human
gacauguuaucucuggcuucaa

SEQ ID NO: 647526 - RNA, 22 nt, Human
ugcugccuuagaaauggcuaua

SEQ ID NO: 647527 - RNA, 22 nt, Human
agcuuuccacuaucuuaggggu

SEQ ID NO: 647528 - RNA, 22 nt, Human
ugccaggagagugcaugcaggg

SEQ ID NO: 647529 - RNA, 22 nt, Human
gcucugguaccagcuacuccua

SEQ ID NO: 647530 - RNA, 22 nt, Human
agcagagucugugugcacuuua

SEQ ID NO: 647531 - RNA, 22 nt, Human
agguaggaguugauggauguuc

SEQ ID NO: 647532 - RNA, 22 nt, Human
gaugaagcuuugaagucuaauc

SEQ ID NO: 647533 - RNA, 19 nt, Human
aguguuucaugugcuuuua

SEQ ID NO: 647534 - RNA, 22 nt, Human
aaauuagaaauacuuucaaagc

SEQ ID NO: 647535 - RNA, 22 nt, Human
aaugccuugccugcuacaacuu

SEQ ID NO: 647536 - RNA, 22 nt, Human
ugaauuuaccuugccuauauuu

SEQ ID NO: 647537 - RNA, 22 nt, Human
cugcugugcagacagacucucu

SEQ ID NO: 647538 - RNA, 22 nt, Human
auuuggaugcacuaaauaaaau

SEQ ID NO: 647539 - RNA, 21 nt, Human
uguguguaugcacacacaugc

SEQ ID NO: 647540 - RNA, 22 nt, Human
gcugagccaugaggccucuugc

SEQ ID NO: 647541 - RNA, 22 nt, Human
agugcauuugggguaguggaag

SEQ ID NO: 647542 - RNA, 22 nt, Human
gaagaaguauuuuuguccuguu

SEQ ID NO: 647543 - RNA, 22 nt, Human
caaggauucucacuagacuaga

SEQ ID NO: 647544 - RNA, 22 nt, Human
acauccauuuuguucaaaagca

SEQ ID NO: 647545 - RNA, 22 nt, Human
acagcagcuugcgugucugguc

SEQ ID NO: 647546 - RNA, 22 nt, Human
ggaagugaggaaauauuuuguu

SEQ ID NO: 647547 - RNA, 22 nt, Human
acacaugaggaaggccucaccc

SEQ ID NO: 647548 - RNA, 22 nt, Human
agagcacagaaguuauauguua

SEQ ID NO: 647549 - RNA, 22 nt, Human
aacacuuuggaauagagauagg

SEQ ID NO: 647550 - RNA, 22 nt, Human
cuuaaucucaccugcaaagucc

SEQ ID NO: 647551 - RNA, 22 nt, Human
uugugggauggcucuucccaaa

SEQ ID NO: 647552 - RNA, 22 nt, Human
cugugcugucuugggagccuua

SEQ ID NO: 647553 - RNA, 22 nt, Human
gagucagauugcagacagggcu

SEQ ID NO: 647554 - RNA, 22 nt, Human
uuucaucuuccuuggcauaggu

SEQ ID NO: 647555 - RNA, 22 nt, Human
aggcucuccagagagcugcuuu

SEQ ID NO: 647556 - RNA, 22 nt, Human
uguuuuuacugugauccagaaa

SEQ ID NO: 647557 - RNA, 22 nt, Human
ugcugaagggaaggucuugaau

SEQ ID NO: 647558 - RNA, 22 nt, Human
ucugaaauaacugaugccagau

SEQ ID NO: 647559 - RNA, 22 nt, Human
agggagaggagcguuucacauc

SEQ ID NO: 647560 - RNA, 22 nt, Human
ggagauaauccagggagggacu

SEQ ID NO: 647561 - RNA, 22 nt, Human
ggcuggacucugggccucucca

SEQ ID NO: 647562 - RNA, 22 nt, Human
ucuuuagaaacuuuucuucaug

SEQ ID NO: 647563 - RNA, 22 nt, Human
gguguggaucaucugaggucag

SEQ ID NO: 647564 - RNA, 22 nt, Human
gcccugcagugcggagguggca

SEQ ID NO: 647565 - RNA, 22 nt, Human
gaaggaagcugucuggaugugu

SEQ ID NO: 647566 - RNA, 22 nt, Human
uccuggccaggaugaccuaaca

SEQ ID NO: 647567 - RNA, 22 nt, Human
ggugugccacuucacugagcag

SEQ ID NO: 647568 - RNA, 22 nt, Human
uggcagguagaguucugagaug

SEQ ID NO: 647569 - RNA, 22 nt, Human
acauuucuugaugccucuguga

SEQ ID NO: 647570 - RNA, 22 nt, Human
auacacuugaccuggagugaag

SEQ ID NO: 647571 - RNA, 22 nt, Human
aagauuuagggccaguuuacau

SEQ ID NO: 647572 - RNA, 22 nt, Human
gacaaggcaaccagggaggcuu

SEQ ID NO: 647573 - RNA, 22 nt, Human
ccugccagacgcaccagggggc

SEQ ID NO: 647574 - RNA, 22 nt, Human
ggcucuggcgagcuuuaguaca

SEQ ID NO: 647575 - RNA, 22 nt, Human
acaggagacccugcugguucug

SEQ ID NO: 647576 - RNA, 22 nt, Human
acaguuagggacuauaaucauu

SEQ ID NO: 647577 - RNA, 20 nt, Human
ucugggcuucccccagcucc

SEQ ID NO: 647578 - RNA, 22 nt, Human
cuucaagauccauagauauugc

SEQ ID NO: 647579 - RNA, 22 nt, Human
gccuggcacucacugaagaggc

SEQ ID NO: 647580 - RNA, 22 nt, Human
uuggcugaccagaaccugcccc

SEQ ID NO: 647581 - RNA, 22 nt, Human
ggcuuuaugcagggauagaaau

SEQ ID NO: 647582 - RNA, 22 nt, Human
gucaggcauuuaggaugaguuc

SEQ ID NO: 647583 - RNA, 22 nt, Human
gcugccuguccugaggaguccg

SEQ ID NO: 647584 - RNA, 22 nt, Human
cuuuuaaugagcauugcugucu

SEQ ID NO: 647585 - RNA, 22 nt, Human
ccccagaaguuugcacaagaga

SEQ ID NO: 647586 - RNA, 22 nt, Human
augcuuccaaggcuaagacaag

SEQ ID NO: 647587 - RNA, 22 nt, Human
uuugucagucaugucugcuuuu

SEQ ID NO: 647588 - RNA, 16 nt, Human
uguaugaacgucucca

SEQ ID NO: 647589 - RNA, 22 nt, Human
acauuaucccuggcacaacugc

SEQ ID NO: 647590 - RNA, 22 nt, Human
cacuggaaccauccacauagug

SEQ ID NO: 647591 - RNA, 22 nt, Human
gcagggccagguacaagaagca

SEQ ID NO: 647592 - RNA, 22 nt, Human
acagacaucaucaacaucuucc

SEQ ID NO: 647593 - RNA, 22 nt, Human
gggagggaagguaccuguguga

SEQ ID NO: 647594 - RNA, 22 nt, Human
agauaacauguugcagauucug

SEQ ID NO: 647595 - RNA, 22 nt, Human
aacacuggaagggacaucaagu

SEQ ID NO: 647596 - RNA, 22 nt, Human
uuauuucuugucuauguagcca

SEQ ID NO: 647597 - RNA, 22 nt, Human
aggcuaagugggugucagggcc

SEQ ID NO: 647598 - RNA, 22 nt, Human
ucauugagcgguucuuaaccca

SEQ ID NO: 647599 - RNA, 22 nt, Human
ggcucccaggagggccuggagg

SEQ ID NO: 647600 - RNA, 22 nt, Human
gaaggaggcguuagcccuagga

SEQ ID NO: 647601 - RNA, 20 nt, Human
uaacagaaguagaagugggu

SEQ ID NO: 647602 - RNA, 22 nt, Human
acucugggcuuugauuuguuac

SEQ ID NO: 647603 - RNA, 22 nt, Human
agguuaguaugacacgguuaua

SEQ ID NO: 647604 - RNA, 19 nt, Human
ugcugacugggccucaccg

SEQ ID NO: 647605 - RNA, 22 nt, Human
aauucacaauguguagucaugc

SEQ ID NO: 647606 - RNA, 22 nt, Human
guguaugcuuagccagagauuu

SEQ ID NO: 647607 - RNA, 20 nt, Human
gacuucaauuucuaucuuuu

SEQ ID NO: 647608 - RNA, 22 nt, Human
uccacccaguguuucuacaggu

SEQ ID NO: 647609 - RNA, 22 nt, Human
guugggaaggcaagaaguagaa

SEQ ID NO: 647610 - RNA, 22 nt, Human
uauuauugacuauucagaaugu

SEQ ID NO: 647611 - RNA, 22 nt, Human
auuugcaaagguuaacagcagu

SEQ ID NO: 647612 - RNA, 22 nt, Human
ucugaaauacugcagguucucu

SEQ ID NO: 647613 - RNA, 22 nt, Human
cuggcuuuguauaguucccuga

SEQ ID NO: 647614 - RNA, 22 nt, Human
uuauuccauucaguucaacaag

SEQ ID NO: 647615 - RNA, 22 nt, Human
uacaucucaucugugcucuccg

SEQ ID NO: 647616 - RNA, 22 nt, Human
cuuaacagauacaucugugguu

SEQ ID NO: 647617 - RNA, 22 nt, Human
aucuucucaagcagcauccugu

SEQ ID NO: 647618 - RNA, 22 nt, Human
acccuuccaaaugagcuuauua

SEQ ID NO: 647619 - RNA, 23 nt, Human
agcagcaggagguauugauaagg

SEQ ID NO: 647620 - RNA, 17 nt, Human
acagagcuacauauucu

SEQ ID NO: 647621 - RNA, 22 nt, Human
aguaugaauugcuuugccugua

SEQ ID NO: 647622 - RNA, 22 nt, Human
ugcugggcacacaguaggugcu

SEQ ID NO: 647623 - RNA, 21 nt, Human
cucuuuguggcaauguauuuu

SEQ ID NO: 647624 - RNA, 18 nt, Human
ggugagggagcuggaagc

SEQ ID NO: 647625 - RNA, 22 nt, Human
uucagaacugucuguccuuuuc

SEQ ID NO: 647626 - RNA, 22 nt, Human
gcugcugcaagagccagcucuu

SEQ ID NO: 647627 - RNA, 22 nt, Human
caugcaggaggaaaaagcagcu

SEQ ID NO: 647628 - RNA, 22 nt, Human
uggagcaggucggcaccauuug

SEQ ID NO: 647629 - RNA, 22 nt, Human
uacagagagauaaguguaaaag

SEQ ID NO: 647630 - RNA, 23 nt, Human
uagaacaucggugucuuggagca

SEQ ID NO: 647631 - RNA, 22 nt, Human
gacaguaagucagagacuuggu

SEQ ID NO: 647632 - RNA, 22 nt, Human
aagugagguuucugcuuucaga

SEQ ID NO: 647633 - RNA, 22 nt, Human
uuucuagaugcggggcuugugc

SEQ ID NO: 647634 - RNA, 22 nt, Human
guguggggaggagagagcccuu

SEQ ID NO: 647635 - RNA, 22 nt, Human
caaagucagccagcuaguaggu

SEQ ID NO: 647636 - RNA, 22 nt, Human
cuguuguagcugcgcugcuuca

SEQ ID NO: 647637 - RNA, 22 nt, Human
acaaaguagucaaaguagauga

SEQ ID NO: 647638 - RNA, 22 nt, Human
aguuuucucacaucaaaaauga

SEQ ID NO: 647639 - RNA, 22 nt, Human
cugcaugagcugucaguggagg

SEQ ID NO: 647640 - RNA, 22 nt, Human
aaaguuguuguucacagguuau

SEQ ID NO: 647641 - RNA, 22 nt, Human
agaaacuaaagccaagggcucu

SEQ ID NO: 647642 - RNA, 22 nt, Human
aggcuguagaucuagacaugua

SEQ ID NO: 647643 - RNA, 22 nt, Human
accacuuugguauuucaauuuu

SEQ ID NO: 647644 - RNA, 22 nt, Human
agacacagaacacaaaagcaua

SEQ ID NO: 647645 - RNA, 22 nt, Human
cuucagccagcuggggaugcgg

SEQ ID NO: 647646 - RNA, 22 nt, Human
cuggagcucuucugagugugcu

SEQ ID NO: 647647 - RNA, 22 nt, Human
ucacaauggcauaguauaaaau

SEQ ID NO: 647648 - RNA, 22 nt, Human
aagauacagacagagccaaaau

SEQ ID NO: 647649 - RNA, 19 nt, Human
ugcagaggguaggaaggcc

SEQ ID NO: 647650 - RNA, 22 nt, Human
agaggacagguuuuccaugggc

SEQ ID NO: 647651 - RNA, 22 nt, Human
uucuuugcccuuaaugaaauaa

SEQ ID NO: 647652 - RNA, 22 nt, Human
uggaaugaauauguuuuaagga

SEQ ID NO: 647653 - RNA, 22 nt, Human
cuagaauuuuaauuggguauau

SEQ ID NO: 647654 - RNA, 22 nt, Human
caaaagucuuccuauucucuua

SEQ ID NO: 647655 - RNA, 22 nt, Human
caggcaccugugugucucaggg

SEQ ID NO: 647656 - RNA, 22 nt, Human
acaagauagcuuagaagauuca

SEQ ID NO: 647657 - RNA, 22 nt, Human
aaaugguagguuuucuuaagaa

SEQ ID NO: 647658 - RNA, 22 nt, Human
cuuucuuucgaagacgugauua

SEQ ID NO: 647659 - RNA, 22 nt, Human
gagguccauuuucacauaugau

SEQ ID NO: 647660 - RNA, 22 nt, Human
aauggcuuuuaaaaauagcauu

SEQ ID NO: 647661 - RNA, 22 nt, Human
uaacucucacagugcaacauga

SEQ ID NO: 647662 - RNA, 22 nt, Human
gaagcugagcugaggcauguug

SEQ ID NO: 647663 - RNA, 22 nt, Human
acauucaagaugcauucacuua

SEQ ID NO: 647664 - RNA, 22 nt, Human
gagauuuagcugcuuaacuccu

SEQ ID NO: 647665 - RNA, 22 nt, Human
ucugcucacauggcuccaugca

SEQ ID NO: 647666 - RNA, 22 nt, Human
agaggcugggcaggacccacag

SEQ ID NO: 647667 - RNA, 22 nt, Human
aucauucucugcuugagcacuc

SEQ ID NO: 647668 - RNA, 22 nt, Human
ccagcagggcagugcccuggac

SEQ ID NO: 647669 - RNA, 19 nt, Human
cugaagucuuuucagcugg

SEQ ID NO: 647670 - RNA, 22 nt, Human
ggauguucugggguucucuugu

SEQ ID NO: 647671 - RNA, 22 nt, Human
uacaauaugugaacuuuggugu

SEQ ID NO: 647672 - RNA, 22 nt, Human
cuggaauguauguaucuuaaga

SEQ ID NO: 647673 - RNA, 22 nt, Human
gagcugugccaaucugucuggg

SEQ ID NO: 647674 - RNA, 22 nt, Human
gacuugggggcuuuggauaggc

SEQ ID NO: 647675 - RNA, 22 nt, Human
uuggcuuccaggggcuuuuaca

SEQ ID NO: 647676 - RNA, 22 nt, Human
gcguggugcugcccugcacaca

SEQ ID NO: 647677 - RNA, 22 nt, Human
cuuuaugagccuugugaaggag

SEQ ID NO: 647678 - RNA, 22 nt, Human
uacuuucuuucugauccuuaug

SEQ ID NO: 647679 - RNA, 22 nt, Human
cgccuggagaggaggcgacgcg

SEQ ID NO: 647680 - RNA, 22 nt, Human
uccuucuggaggcucuaagggg

SEQ ID NO: 647681 - RNA, 19 nt, Human
uagcagcugccaaaggaga

SEQ ID NO: 647682 - RNA, 22 nt, Human
gggcagagaaauggacaguugg

SEQ ID NO: 647683 - RNA, 23 nt, Human
gucucccauagcgcucccaggcu

SEQ ID NO: 647684 - RNA, 22 nt, Human
auuccaaagccugaauaaugga

SEQ ID NO: 647685 - RNA, 22 nt, Human
uuucagacugcccauguuugcc

SEQ ID NO: 647686 - RNA, 22 nt, Human
uauuagaaaggcuauugcauag

SEQ ID NO: 647687 - RNA, 22 nt, Human
ugaggaguuuuucuagagcuaa

SEQ ID NO: 647688 - RNA, 22 nt, Human
acugagaagcucgcagugaugc

SEQ ID NO: 647689 - RNA, 22 nt, Human
accuggcugagaacgugcagcu

SEQ ID NO: 647690 - RNA, 21 nt, Human
cuuuucucuccgcaggacauu

SEQ ID NO: 647691 - RNA, 22 nt, Human
uggcagcagccauggaaggccc

SEQ ID NO: 647692 - RNA, 22 nt, Human
acaauguguuuuuauacauuug

SEQ ID NO: 647693 - RNA, 22 nt, Human
aggcucuguuauucuagagggc

SEQ ID NO: 647694 - RNA, 22 nt, Human
uggaggagaacucccuggcuac

SEQ ID NO: 647695 - RNA, 22 nt, Human
agucaccaacaugguucccagg

SEQ ID NO: 647696 - RNA, 22 nt, Human
cacuguccaauagauacauaau

SEQ ID NO: 647697 - RNA, 22 nt, Human
ccuccccacgggcagccggcgc

SEQ ID NO: 647698 - RNA, 21 nt, Human
aggcugcaugcaugagugugg

SEQ ID NO: 647699 - RNA, 22 nt, Human
cagaccuggaaaacaggcuugc

SEQ ID NO: 647700 - RNA, 22 nt, Human
aaguuuggaggucacuggucuu

SEQ ID NO: 647701 - RNA, 22 nt, Human
acuugggaugguggccagagcg

SEQ ID NO: 647702 - RNA, 22 nt, Human
cuaaauuaucaugagaauuaug

SEQ ID NO: 647703 - RNA, 22 nt, Human
uccuguggagaggacuggaggu

SEQ ID NO: 647704 - RNA, 22 nt, Human
auuaaggugucaauguauuugg

SEQ ID NO: 647705 - RNA, 22 nt, Human
caauuauucagugacuuaagag

SEQ ID NO: 647706 - RNA, 22 nt, Human
uggcagcuuccugcucauagga

SEQ ID NO: 647707 - RNA, 20 nt, Human
caccuucaaauuuccuggca

SEQ ID NO: 647708 - RNA, 21 nt, Human
uuuauuaacaacuguggacgu

SEQ ID NO: 647709 - RNA, 22 nt, Human
gaccacaguccagucaucaugg

SEQ ID NO: 647710 - RNA, 22 nt, Human
accaggcuggagugcaguggcg

SEQ ID NO: 647711 - RNA, 22 nt, Human
aaggccaacuaggaugagcuag

SEQ ID NO: 647712 - RNA, 22 nt, Human
augcaguuuaaggcacaauuag

SEQ ID NO: 647713 - RNA, 22 nt, Human
gcauucuuugaaugcuucuaau

SEQ ID NO: 647714 - RNA, 22 nt, Human
aaugccuucccauuuauacuuu

SEQ ID NO: 647715 - RNA, 22 nt, Human
cagaucuuguacucauuauuga

SEQ ID NO: 647716 - RNA, 22 nt, Human
aaugccuuauaggcugaaaauu

SEQ ID NO: 647717 - RNA, 22 nt, Human
uacauguaauuuucauaguaag

SEQ ID NO: 647718 - RNA, 22 nt, Human
acuggaaaacacuacuacaugc

SEQ ID NO: 647719 - RNA, 22 nt, Human
gcugcugggaaugaacaguguu

SEQ ID NO: 647720 - RNA, 22 nt, Human
aacaugcugccuuucuacgagu

SEQ ID NO: 647721 - RNA, 20 nt, Human
aacagucaaauguugauugc

SEQ ID NO: 647722 - RNA, 22 nt, Human
aggcugugggacaguuaggaga

SEQ ID NO: 647723 - RNA, 22 nt, Human
ucaacacucuuuggcacaguua

SEQ ID NO: 647724 - RNA, 22 nt, Human
aaucagaauuuauugaaucuuu

SEQ ID NO: 647725 - RNA, 22 nt, Human
uguaggacauguacuuguaaca

SEQ ID NO: 647726 - RNA, 20 nt, Human
gggcagcuccccucauucug

SEQ ID NO: 647727 - RNA, 23 nt, Human
cccuggaguaaauucuuggaagg

SEQ ID NO: 647728 - RNA, 22 nt, Human
gcugcucucauagauggcuuca

SEQ ID NO: 647729 - RNA, 22 nt, Human
ccaggccuagccccugagggua

SEQ ID NO: 647730 - RNA, 22 nt, Human
cagcuccuauuagacacugaau

SEQ ID NO: 647731 - RNA, 23 nt, Human
cccagcagagaugaggagggguc

SEQ ID NO: 647732 - RNA, 22 nt, Human
gcugggaguuugauuugacugg

SEQ ID NO: 647733 - RNA, 22 nt, Human
cugggagcuuuuagaaaugcag

SEQ ID NO: 647734 - RNA, 22 nt, Human
uggagagcuauuuggaccucca

SEQ ID NO: 647735 - RNA, 22 nt, Human
cuucuucucaaggggcaggugg

SEQ ID NO: 647736 - RNA, 22 nt, Human
acuuugcaaugggcagaaccca

SEQ ID NO: 647737 - RNA, 22 nt, Human
cucacagguaccagcacccucc

SEQ ID NO: 647738 - RNA, 22 nt, Human
ccagagaguaggaggcauuauu

SEQ ID NO: 647739 - RNA, 22 nt, Human
cacauuuaucucucuccgguga

SEQ ID NO: 647740 - RNA, 22 nt, Human
cugggaguggugacagcucucg

SEQ ID NO: 647741 - RNA, 22 nt, Human
gcacugagucugucaugcugca

SEQ ID NO: 647742 - RNA, 22 nt, Human
uagugcauaacauuuaaagguc

SEQ ID NO: 647743 - RNA, 22 nt, Human
caagaagcaaggucagggccca

SEQ ID NO: 647744 - RNA, 22 nt, Human
uaaaaaguagugagaauggcgc

SEQ ID NO: 647745 - RNA, 21 nt, Human
acaguucaugauaacuccauc

SEQ ID NO: 647746 - RNA, 22 nt, Human
uucaguguggugcacaguuuug

SEQ ID NO: 647747 - RNA, 22 nt, Human
ucuuuauuucugaaucccccau

SEQ ID NO: 647748 - RNA, 22 nt, Human
agcuggcaucugaagucagggc

SEQ ID NO: 647749 - RNA, 21 nt, Human
cugcaaauaccuaguuaucug

SEQ ID NO: 647750 - RNA, 22 nt, Human
gggugagacagaaagagcaaaa

SEQ ID NO: 647751 - RNA, 23 nt, Human
cagaaaacccagagcucaguccc

SEQ ID NO: 647752 - RNA, 22 nt, Human
gauucaagaccuagcucagcca

SEQ ID NO: 647753 - RNA, 22 nt, Human
cugcugcccagugugcauuggg

SEQ ID NO: 647754 - RNA, 22 nt, Human
ugcuuuacaagccugcuuccuc

SEQ ID NO: 647755 - RNA, 17 nt, Human
ugcccugugccuggugu

SEQ ID NO: 647756 - RNA, 22 nt, Human
auuugacaacuucugguggcau

SEQ ID NO: 647757 - RNA, 22 nt, Human
gaggaagaagggauuagaacuc

SEQ ID NO: 647758 - RNA, 22 nt, Human
uagauucuguaaauaaucaagg

SEQ ID NO: 647759 - RNA, 22 nt, Human
ggaggugguggcagugacaauu

SEQ ID NO: 647760 - RNA, 22 nt, Human
ucacaucuauacccaauaauuu

SEQ ID NO: 647761 - RNA, 22 nt, Human
aguuuauucugcuuggcccucc

SEQ ID NO: 647762 - RNA, 22 nt, Human
cagcuguugucaccucacaucc

SEQ ID NO: 647763 - RNA, 22 nt, Human
gcuaaucaauguuaaggcugug

SEQ ID NO: 647764 - RNA, 22 nt, Human
cuuauucagaccuuggauucuu

SEQ ID NO: 647765 - RNA, 22 nt, Human
cugucauggucagauugucauc

SEQ ID NO: 647766 - RNA, 22 nt, Human
ggcagguggccaagugucuaag

SEQ ID NO: 647767 - RNA, 22 nt, Human
gcaauagauuaugaucuacagu

SEQ ID NO: 647768 - RNA, 22 nt, Human
aucauccaagcguaguucuucu

SEQ ID NO: 647769 - RNA, 22 nt, Human
caggagcugggucuggaagcag

SEQ ID NO: 647770 - RNA, 22 nt, Human
gccaggaggcuuaacuggacag

SEQ ID NO: 647771 - RNA, 22 nt, Human
uggcagagcccagaacugagca

SEQ ID NO: 647772 - RNA, 22 nt, Human
agagggugagcagguacacaug

SEQ ID NO: 647773 - RNA, 22 nt, Human
aacaguuuaugagauaugcuau

SEQ ID NO: 647774 - RNA, 22 nt, Human
acuaaauggaaugauuacuaua

SEQ ID NO: 647775 - RNA, 22 nt, Human
aacuggaaagaucaguaggaag

SEQ ID NO: 647776 - RNA, 22 nt, Human
gggagggaaggaggcgccgugu

SEQ ID NO: 647777 - RNA, 22 nt, Human
cccccauccaugucaggagagg

SEQ ID NO: 647778 - RNA, 19 nt, Human
ugcugaggaugcaagaucc

SEQ ID NO: 647779 - RNA, 22 nt, Human
aacuguggcauguugaauuugu

SEQ ID NO: 647780 - RNA, 22 nt, Human
uuccuucuagcccaaguauugg

SEQ ID NO: 647781 - RNA, 22 nt, Human
auacaagaucacuccagaaaau

SEQ ID NO: 647782 - RNA, 22 nt, Human
agcaggcuuguuaugucugaga

SEQ ID NO: 647783 - RNA, 22 nt, Human
ccugagcagcucugaggggcga

SEQ ID NO: 647784 - RNA, 22 nt, Human
augcuuggccccuuuauagccu

SEQ ID NO: 647785 - RNA, 22 nt, Human
gaguuauauccugagucauauu

SEQ ID NO: 647786 - RNA, 22 nt, Human
gauugcuugauacccagucaau

SEQ ID NO: 647787 - RNA, 22 nt, Human
cacuguggagcaaauuuauuua

SEQ ID NO: 647788 - RNA, 22 nt, Human
auucucugccauugcgguggau

SEQ ID NO: 647789 - RNA, 22 nt, Human
uuccaaagaaauugaccaagac

SEQ ID NO: 647790 - RNA, 22 nt, Human
gcuaggagauugagcucugaag

SEQ ID NO: 647791 - RNA, 22 nt, Human
acacaguugguggcucagucug

SEQ ID NO: 647792 - RNA, 22 nt, Human
ugcccuggggagcccagccagg

SEQ ID NO: 647793 - RNA, 21 nt, Human
agcgucaauaucgucaacagg

SEQ ID NO: 647794 - RNA, 22 nt, Human
gcuggugauugccucaggaggc

SEQ ID NO: 647795 - RNA, 22 nt, Human
gggagcaggacauaauagcaau

SEQ ID NO: 647796 - RNA, 22 nt, Human
ugaguccaagagccagugggaa

SEQ ID NO: 647797 - RNA, 22 nt, Human
ugggagaggcugccaucuugca

SEQ ID NO: 647798 - RNA, 22 nt, Human
uaaagcuguucagugcagaaag

SEQ ID NO: 647799 - RNA, 22 nt, Human
cacaugaagaccuaauuggauu

SEQ ID NO: 647800 - RNA, 22 nt, Human
gcagcauccugggccacagucc

SEQ ID NO: 647801 - RNA, 22 nt, Human
auugaaagguuuugagcagaua

SEQ ID NO: 647802 - RNA, 19 nt, Human
uggcugggugccaauggcc

SEQ ID NO: 647803 - RNA, 22 nt, Human
gaugcugagagguggagggaac

SEQ ID NO: 647804 - RNA, 22 nt, Human
cagguggaucucuaaggacuga

SEQ ID NO: 647805 - RNA, 22 nt, Human
aguuuuauuccaaugugcagca

SEQ ID NO: 647806 - RNA, 22 nt, Human
cacugcuugguugcaacauugc

SEQ ID NO: 647807 - RNA, 23 nt, Human
uucaagauacgguuuccaggcug

SEQ ID NO: 647808 - RNA, 22 nt, Human
cggcccuggcggaggcgggaga

SEQ ID NO: 647809 - RNA, 22 nt, Human
acaggcuuggggcucagacaga

SEQ ID NO: 647810 - RNA, 22 nt, Human
cccuccaggcacugcccucuuc

SEQ ID NO: 647811 - RNA, 22 nt, Human
ucauaaaguuguuuuaauggga

SEQ ID NO: 647812 - RNA, 22 nt, Human
aauuggcuauauuauuuagccu

SEQ ID NO: 647813 - RNA, 22 nt, Human
ugucugccugucucugugcaaa

SEQ ID NO: 647814 - RNA, 22 nt, Human
uggagcagcucuagcgggcgcc

SEQ ID NO: 647815 - RNA, 22 nt, Human
gcugccaguuccuucuuacucc

SEQ ID NO: 647816 - RNA, 22 nt, Human
gcugucuuggguagaaagaggu

SEQ ID NO: 647817 - RNA, 22 nt, Human
aggaaggcugaucacugcuugu

SEQ ID NO: 647818 - RNA, 19 nt, Human
ugugagaggcuagcugccc

SEQ ID NO: 647819 - RNA, 22 nt, Human
uccuuccuggggucucugcugc

SEQ ID NO: 647820 - RNA, 22 nt, Human
agcaaggcucuuaaugcccaaa

SEQ ID NO: 647821 - RNA, 22 nt, Human
uccuucuuugacaaguggcaga

SEQ ID NO: 647822 - RNA, 22 nt, Human
gucucagagagcuacucucuua

SEQ ID NO: 647823 - RNA, 22 nt, Human
uguuuacagggugauuuuaccu

SEQ ID NO: 647824 - RNA, 22 nt, Human
gaaguauuucugaguugcccag

SEQ ID NO: 647825 - RNA, 22 nt, Human
ucauuguugcguuaaugucuuc

SEQ ID NO: 647826 - RNA, 22 nt, Human
cuggagcucuguguguuccuga

SEQ ID NO: 647827 - RNA, 22 nt, Human
caggaaggcgcggcugugccug

SEQ ID NO: 647828 - RNA, 22 nt, Human
uauaagucuggcauauguaugc

SEQ ID NO: 647829 - RNA, 22 nt, Human
ggccuggagcagagacuaggga

SEQ ID NO: 647830 - RNA, 19 nt, Human
aucagcaagguaggaugug

SEQ ID NO: 647831 - RNA, 22 nt, Human
augcugguugcuaagcagcgau

SEQ ID NO: 647832 - RNA, 22 nt, Human
ugcuguauauauuuugaaguga

SEQ ID NO: 647833 - RNA, 22 nt, Human
cucugcugggauguaaagucuu

SEQ ID NO: 647834 - RNA, 22 nt, Human
aucuggcuugacuuugcgacuu

SEQ ID NO: 647835 - RNA, 17 nt, Human
uucugcuguuuccccuu

SEQ ID NO: 647836 - RNA, 22 nt, Human
ggcagcagggucuagauugaug

SEQ ID NO: 647837 - RNA, 22 nt, Human
cagcagguggacacacucaccu

SEQ ID NO: 647838 - RNA, 22 nt, Human
gcugccuccacuggcucccagu

SEQ ID NO: 647839 - RNA, 22 nt, Human
ucagucacacucacugagguag

SEQ ID NO: 647840 - RNA, 19 nt, Human
gggcuggagggauagagcc

SEQ ID NO: 647841 - RNA, 22 nt, Human
aaauucagauggcuuucuuuuc

SEQ ID NO: 647842 - RNA, 22 nt, Human
uccacagaccaguaucugcagc

SEQ ID NO: 647843 - RNA, 22 nt, Human
ggagauccaggcugagucuuuc

SEQ ID NO: 647844 - RNA, 22 nt, Human
uuugagugcccauguuucccag

SEQ ID NO: 647845 - RNA, 22 nt, Human
agacccucuccaugcccacugc

SEQ ID NO: 647846 - RNA, 22 nt, Human
gagagguagcaguaagaacagg

SEQ ID NO: 647847 - RNA, 22 nt, Human
uggcauuuggcuuacuuauguu

SEQ ID NO: 647848 - RNA, 22 nt, Human
gugagguccauguuaauggguu

SEQ ID NO: 647849 - RNA, 22 nt, Human
cuuaaauuuucaucuacaagaa

SEQ ID NO: 647850 - RNA, 22 nt, Human
uaggacaggaucaugaugcugg

SEQ ID NO: 647851 - RNA, 23 nt, Human
uugaaaaauauagucccauuguc

SEQ ID NO: 647852 - RNA, 22 nt, Human
ggcugaggcggcgaugcccuug

SEQ ID NO: 647853 - RNA, 22 nt, Human
uggcucugaccagguagaggag

SEQ ID NO: 647854 - RNA, 22 nt, Human
aggacaauuagacucuuuguuu

SEQ ID NO: 647855 - RNA, 22 nt, Human
guacaauuaagugcacaaauag

SEQ ID NO: 647856 - RNA, 22 nt, Human
ucuuuucauugagaacacacug

SEQ ID NO: 647857 - RNA, 22 nt, Human
cugaaguucuacaagccucagg

SEQ ID NO: 647858 - RNA, 22 nt, Human
gggcuguguaaugugcucuuuu

SEQ ID NO: 647859 - RNA, 22 nt, Human
aaucaguuaaauauugaguaca

SEQ ID NO: 647860 - RNA, 22 nt, Human
ucucaugcuguagugcacuaac

SEQ ID NO: 647861 - RNA, 19 nt, Human
gagcaggccacacaugugu

SEQ ID NO: 647862 - RNA, 22 nt, Human
ccugucauacuaacguaguggg

SEQ ID NO: 647863 - RNA, 17 nt, Human
cagacaggcugucaccc

SEQ ID NO: 647864 - RNA, 22 nt, Human
gagagaacccuaaaugagauau

SEQ ID NO: 647865 - RNA, 22 nt, Human
auuauuagugauguuguuacug

SEQ ID NO: 647866 - RNA, 22 nt, Human
gauacuuuccauccaaaugcau

SEQ ID NO: 647867 - RNA, 22 nt, Human
ucuuaucuuauaccuaacagcc

SEQ ID NO: 647868 - RNA, 22 nt, Human
auuacaacuaugugcucugcaa

SEQ ID NO: 647869 - RNA, 21 nt, Human
gacaggggaagaagcaaggag

SEQ ID NO: 647870 - RNA, 17 nt, Human
aggcaggcagagcggga

SEQ ID NO: 647871 - RNA, 22 nt, Human
gugggcagacaugauagaagga

SEQ ID NO: 647872 - RNA, 22 nt, Human
gacuuucugagucaaagaaagg

SEQ ID NO: 647873 - RNA, 19 nt, Human
acugugcucgggaaccacu

SEQ ID NO: 647874 - RNA, 22 nt, Human
cccugcagagagugcuuuugug

SEQ ID NO: 647875 - RNA, 22 nt, Human
agaacugugaaguaugugaaau

SEQ ID NO: 647876 - RNA, 22 nt, Human
ugcagcuucuccaucuccuugu

SEQ ID NO: 647877 - RNA, 22 nt, Human
ucaucaaaagccuucuggguua

SEQ ID NO: 647878 - RNA, 18 nt, Human
ucugaggaauggaagagc

SEQ ID NO: 647879 - RNA, 22 nt, Human
uuggagagggcuuggaucacac

SEQ ID NO: 647880 - RNA, 22 nt, Human
caaaugcuaugauuuugaguuu

SEQ ID NO: 647881 - RNA, 22 nt, Human
ggcacugaauuucuuggcaucu

SEQ ID NO: 647882 - RNA, 22 nt, Human
agcuuccacaucugucuucagu

SEQ ID NO: 647883 - RNA, 22 nt, Human
aauaauguaggaugauaaauga

SEQ ID NO: 647884 - RNA, 22 nt, Human
cuccugggaauuuaguugugag

SEQ ID NO: 647885 - RNA, 22 nt, Human
aagagacuggaaacuaggguca

SEQ ID NO: 647886 - RNA, 22 nt, Human
gcucugggaaguccuuuaccau

SEQ ID NO: 647887 - RNA, 22 nt, Human
acucagcucaggagcuggcugg

SEQ ID NO: 647888 - RNA, 22 nt, Human
uccauauuaacuaaaacuagaa

SEQ ID NO: 647889 - RNA, 22 nt, Human
ugggccagaaguaugcauguuu

SEQ ID NO: 647890 - RNA, 22 nt, Human
agcugguggagaagcagaccuc

SEQ ID NO: 647891 - RNA, 22 nt, Human
ccaaaaauuagauacacauaua

SEQ ID NO: 647892 - RNA, 22 nt, Human
gcugccucccagagcccugcag

SEQ ID NO: 647893 - RNA, 22 nt, Human
accugagagcuauaagguuuua

SEQ ID NO: 647894 - RNA, 22 nt, Human
cuggggcuggugaggcaggcuc

SEQ ID NO: 647895 - RNA, 22 nt, Human
guacacauagguuacugauuaa

SEQ ID NO: 647896 - RNA, 22 nt, Human
agguagcuauccagacgcugaa

SEQ ID NO: 647897 - RNA, 22 nt, Human
cugcccaccacaccugcuccug

SEQ ID NO: 647898 - RNA, 22 nt, Human
gcugauguaagacuuuugguuu

SEQ ID NO: 647899 - RNA, 22 nt, Human
uucuggaaagaaggcuaagguc

SEQ ID NO: 647900 - RNA, 22 nt, Human
cugagcuuggccaggaaugaau

SEQ ID NO: 647901 - RNA, 22 nt, Human
uuagagagaaccaucaggaucu

SEQ ID NO: 647902 - RNA, 22 nt, Human
cuggaugcuuccucucugcuag

SEQ ID NO: 647903 - RNA, 22 nt, Human
ucucccaggcuggagugcagug

SEQ ID NO: 647904 - RNA, 22 nt, Human
augcaugucagcugugcccaug

SEQ ID NO: 647905 - RNA, 22 nt, Human
cuucucaaaguugugaaucagg

SEQ ID NO: 647906 - RNA, 22 nt, Human
auccuguguugcuacuggagga

SEQ ID NO: 647907 - RNA, 22 nt, Human
aguuugauuugucuaucuucau

SEQ ID NO: 647908 - RNA, 22 nt, Human
gaggaguguauuccacaccacu

SEQ ID NO: 647909 - RNA, 22 nt, Human
acagaugaggaaacagggucag

SEQ ID NO: 647910 - RNA, 22 nt, Human
acacacagaguuuauacaggca

SEQ ID NO: 647911 - RNA, 19 nt, Human
cagaguccuugaccagucc

SEQ ID NO: 647912 - RNA, 22 nt, Human
augcuuuauuguuaggucaugu

SEQ ID NO: 647913 - RNA, 22 nt, Human
ucagauuuuccagccuuucucu

SEQ ID NO: 647914 - RNA, 22 nt, Human
caugcacaugcaauagugcuuu

SEQ ID NO: 647915 - RNA, 22 nt, Human
gaggcagcaaaauauaucauaa

SEQ ID NO: 647916 - RNA, 22 nt, Human
uccaggagcucauccacgucaa

SEQ ID NO: 647917 - RNA, 22 nt, Human
auguuuccauuuucuuguauca

SEQ ID NO: 647918 - RNA, 22 nt, Human
uaauccugugcuguguaaguac

SEQ ID NO: 647919 - RNA, 22 nt, Human
ccccauccuauucauguuucug

SEQ ID NO: 647920 - RNA, 22 nt, Human
ucuggguuggguuccuggaauu

SEQ ID NO: 647921 - RNA, 22 nt, Human
auuagagguuguuuuguaaaga

SEQ ID NO: 647922 - RNA, 22 nt, Human
ugcaagagcccagggccaggaa

SEQ ID NO: 647923 - RNA, 22 nt, Human
ugggcucauguuucuuugagga

SEQ ID NO: 647924 - RNA, 22 nt, Human
agcagcagggucauugcucuuu

SEQ ID NO: 647925 - RNA, 22 nt, Human
acaaugaauaucaugaaguacu

SEQ ID NO: 647926 - RNA, 22 nt, Human
ucuccuugcuacccaguauguc

SEQ ID NO: 647927 - RNA, 22 nt, Human
acuggacagguucaugguuuua

SEQ ID NO: 647928 - RNA, 21 nt, Human
agaagggauugugguaaagau

SEQ ID NO: 647929 - RNA, 22 nt, Human
aaugauacauauguaucguuag

SEQ ID NO: 647930 - RNA, 22 nt, Human
gcagggcugggacuuacuggua

SEQ ID NO: 647931 - RNA, 22 nt, Human
ucuccaggaaagacacuggacu

SEQ ID NO: 647932 - RNA, 22 nt, Human
gagucagaauguccuccugcgg

SEQ ID NO: 647933 - RNA, 22 nt, Human
caagcaugucuucuuaagcaau

SEQ ID NO: 647934 - RNA, 22 nt, Human
agaggcucuggugcagcaugca

SEQ ID NO: 647935 - RNA, 22 nt, Human
uaaaggcucguauuguugugug

SEQ ID NO: 647936 - RNA, 22 nt, Human
aaugcauauguaggcaagcagu

SEQ ID NO: 647937 - RNA, 22 nt, Human
uggaacacuggcuuuccacugu

SEQ ID NO: 647938 - RNA, 22 nt, Human
ugcaggugcagcgauacuguga

SEQ ID NO: 647939 - RNA, 22 nt, Human
uuucauuggcucccugaugaau

SEQ ID NO: 647940 - RNA, 22 nt, Human
gcccagcuuuucacuuccacac

SEQ ID NO: 647941 - RNA, 22 nt, Human
aauauagcauuguaugacugug

SEQ ID NO: 647942 - RNA, 19 nt, Human
cugguccugacugaggggu

SEQ ID NO: 647943 - RNA, 22 nt, Human
uggcacagaaaaaugcuccauu

SEQ ID NO: 647944 - RNA, 22 nt, Human
gcacccucugagcuccgcuccg

SEQ ID NO: 647945 - RNA, 22 nt, Human
uguuuccuaagugucucugaag

SEQ ID NO: 647946 - RNA, 22 nt, Human
agaggcaagggaccuuucuggg

SEQ ID NO: 647947 - RNA, 22 nt, Human
auucuggaagcaagcuuuuaaa

SEQ ID NO: 647948 - RNA, 22 nt, Human
auuucuguaguccacauucuuu

SEQ ID NO: 647949 - RNA, 22 nt, Human
augcccuucaacgugaggauuu

SEQ ID NO: 647950 - RNA, 22 nt, Human
gggcugacgaaggccaugugug

SEQ ID NO: 647951 - RNA, 22 nt, Human
cuggagccauguauagccuaug

SEQ ID NO: 647952 - RNA, 22 nt, Human
aagcugaagccggaucaaaaag

SEQ ID NO: 647953 - RNA, 22 nt, Human
aagaaauuaaugugccauuacu

SEQ ID NO: 647954 - RNA, 22 nt, Human
ucuggucccuuuuccugcaguc

SEQ ID NO: 647955 - RNA, 22 nt, Human
aucaagaauguucauucuucua

SEQ ID NO: 647956 - RNA, 22 nt, Human
cuggcuugcagcucaucauaaa

SEQ ID NO: 647957 - RNA, 22 nt, Human
uugauuucuuacucuuccaagg

SEQ ID NO: 647958 - RNA, 22 nt, Human
uuugaaagggacaaagucacug

SEQ ID NO: 647959 - RNA, 22 nt, Human
uuugucugccuugcuggacugu

SEQ ID NO: 647960 - RNA, 22 nt, Human
uggcacagggcuuggucgcuca

SEQ ID NO: 647961 - RNA, 22 nt, Human
acugggccgcgcugcagagggc

SEQ ID NO: 647962 - RNA, 22 nt, Human
ccuagaggcugcaaggagaggc

SEQ ID NO: 647963 - RNA, 22 nt, Human
augcauguuuauagggugcuuc

SEQ ID NO: 647964 - RNA, 22 nt, Human
aucaagcauauauaaaacugca

SEQ ID NO: 647965 - RNA, 17 nt, Human
ggcaguggaggaagaga

SEQ ID NO: 647966 - RNA, 20 nt, Human
gcaauuaauuuuugguuaca

SEQ ID NO: 647967 - RNA, 22 nt, Human
aaacuugggugacccugagcaa

SEQ ID NO: 647968 - RNA, 22 nt, Human
acagggcaaccucugggagacu

SEQ ID NO: 647969 - RNA, 22 nt, Human
ggcuggguacagggcagugugc

SEQ ID NO: 647970 - RNA, 22 nt, Human
cagaugugccuccagggcuuug

SEQ ID NO: 647971 - RNA, 22 nt, Human
ccagcuuuauagcuucaaagga

SEQ ID NO: 647972 - RNA, 21 nt, Human
agcuggugucagagcucuggg

SEQ ID NO: 647973 - RNA, 22 nt, Human
cacaucuacugauauuccagga

SEQ ID NO: 647974 - RNA, 20 nt, Human
guuaaaagaguaauuugagg

SEQ ID NO: 647975 - RNA, 22 nt, Human
auggccaguguuucccucaguu

SEQ ID NO: 647976 - RNA, 22 nt, Human
ggugacuggagggacccaggcc

SEQ ID NO: 647977 - RNA, 19 nt, Human
cugugggugugcaagggug

SEQ ID NO: 647978 - RNA, 22 nt, Human
acugugugacuguuauuacugu

SEQ ID NO: 647979 - RNA, 22 nt, Human
agcuaucaccuuaauaaacuga

SEQ ID NO: 647980 - RNA, 22 nt, Human
gagugaaaaaggaagggccaua

SEQ ID NO: 647981 - RNA, 22 nt, Human
auuauauuugaaagguuggaag

SEQ ID NO: 647982 - RNA, 22 nt, Human
caaacauuuguuggaaccccug

SEQ ID NO: 647983 - RNA, 22 nt, Human
accaguuaaagggaaauugaaa

SEQ ID NO: 647984 - RNA, 20 nt, Human
ugugggccuucggcgugcuc

SEQ ID NO: 647985 - RNA, 20 nt, Human
uggguccugcuucuuccuga

SEQ ID NO: 647986 - RNA, 22 nt, Human
ucugcucuccauacuuccgcac

SEQ ID NO: 647987 - RNA, 21 nt, Human
ucuguacuuugcuuccaugcu

SEQ ID NO: 647988 - RNA, 23 nt, Human
ucagggcucacacguuuucuggc

SEQ ID NO: 647989 - RNA, 22 nt, Human
acagagcaauucuuggguguuu

SEQ ID NO: 647990 - RNA, 22 nt, Human
gcuccaggcagagccucuuucg

SEQ ID NO: 647991 - RNA, 22 nt, Human
ucucagaaucaggaccuacuuc

SEQ ID NO: 647992 - RNA, 22 nt, Human
aggaauguguuucuaggcuguu

SEQ ID NO: 647993 - RNA, 18 nt, Human
gagcucugccucccaguc

SEQ ID NO: 647994 - RNA, 22 nt, Human
acugggcagggaaggagaccga

SEQ ID NO: 647995 - RNA, 22 nt, Human
uugccaggagacaucuggagcc

SEQ ID NO: 647996 - RNA, 22 nt, Human
ccuggcaggccccuccuggauu

SEQ ID NO: 647997 - RNA, 22 nt, Human
ugaguuaagcagguagcaagcu

SEQ ID NO: 647998 - RNA, 22 nt, Human
ugcuccagaaaaacuugagacu

SEQ ID NO: 647999 - RNA, 22 nt, Human
aauuucacuggaaaagauaauu

SEQ ID NO: 648000 - RNA, 22 nt, Human
agaguuugaaguuaucuuugac

SEQ ID NO: 648001 - RNA, 22 nt, Human
aaauagauugcugaggcauuac

SEQ ID NO: 648002 - RNA, 22 nt, Human
gaauuacaugacccugaguaga

SEQ ID NO: 648003 - RNA, 20 nt, Human
uccagcugucuuucagagac

SEQ ID NO: 648004 - RNA, 22 nt, Human
aaucuguuuccauguuuuauug

SEQ ID NO: 648005 - RNA, 22 nt, Human
uauuaggguuuugaagguuugu

SEQ ID NO: 648006 - RNA, 22 nt, Human
guggguguggaacugugagacc

SEQ ID NO: 648007 - RNA, 22 nt, Human
uauuauggggggaacaucacuc

SEQ ID NO: 648008 - RNA, 22 nt, Human
aaagguuaagguguucaagaaa

SEQ ID NO: 648009 - RNA, 22 nt, Human
agguucaggcugcacaccugag

SEQ ID NO: 648010 - RNA, 19 nt, Human
aggcuggaugcccaucuua

SEQ ID NO: 648011 - RNA, 22 nt, Human
ucuguauuuuaagaugcuguuu

SEQ ID NO: 648012 - RNA, 22 nt, Human
auauaaagagcuuaguauagug

SEQ ID NO: 648013 - RNA, 18 nt, Human
acccaguuugaaggaaag

SEQ ID NO: 648014 - RNA, 22 nt, Human
caagauuuggcaacuuugucau

SEQ ID NO: 648015 - RNA, 22 nt, Human
agucagugaaggcauugcucaa

SEQ ID NO: 648016 - RNA, 22 nt, Human
aauaauacaugagauuaauguu

SEQ ID NO: 648017 - RNA, 22 nt, Human
cuaauuguaagcuccuugaggg

SEQ ID NO: 648018 - RNA, 22 nt, Human
ucagcuggcaguucagaggcug

SEQ ID NO: 648019 - RNA, 22 nt, Human
ugaagcuugagugucaguuccu

SEQ ID NO: 648020 - RNA, 22 nt, Human
ugucacuuuuuauagguguuga

SEQ ID NO: 648021 - RNA, 22 nt, Human
agugcauguaucuacagucaca

SEQ ID NO: 648022 - RNA, 22 nt, Human
cuggaagaccccccaggacuca

SEQ ID NO: 648023 - RNA, 23 nt, Human
ucaguccuguaggggcuccaggu

SEQ ID NO: 648024 - RNA, 22 nt, Human
acuguuaaguaugaaguaaggc

SEQ ID NO: 648025 - RNA, 22 nt, Human
uccauccaggccagcaguaauc

SEQ ID NO: 648026 - RNA, 21 nt, Human
ggggucaagugaaugguguug

SEQ ID NO: 648027 - RNA, 22 nt, Human
agccagcugugggcucaggcgg

SEQ ID NO: 648028 - RNA, 22 nt, Human
auuccacagcucagccucucuu

SEQ ID NO: 648029 - RNA, 22 nt, Human
cagauucugcagucaacuugcu

SEQ ID NO: 648030 - RNA, 22 nt, Human
caaagauaaucacagaauaccc

SEQ ID NO: 648031 - RNA, 22 nt, Human
uuugacaguccccugauguuug

SEQ ID NO: 648032 - RNA, 22 nt, Human
uuugugcagauguauauuugug

SEQ ID NO: 648033 - RNA, 22 nt, Human
gaggcugcugagagcccuguuu

SEQ ID NO: 648034 - RNA, 22 nt, Human
agcuggcaaguugaagguggcu

SEQ ID NO: 648035 - RNA, 22 nt, Human
aaugaaguguuauuuaguuuca

SEQ ID NO: 648036 - RNA, 22 nt, Human
aaauaacuugguuucaucagag

SEQ ID NO: 648037 - RNA, 22 nt, Human
gcagccagcccuagucccacuu

SEQ ID NO: 648038 - RNA, 22 nt, Human
gcccugcugcuggcagaggcgc

SEQ ID NO: 648039 - RNA, 22 nt, Human
uguuuauaccuugguauaacca

SEQ ID NO: 648040 - RNA, 22 nt, Human
cauuggaagacauaucaugcua

SEQ ID NO: 648041 - RNA, 22 nt, Human
acaagauuuuaugacucuuuuu

SEQ ID NO: 648042 - RNA, 22 nt, Human
ccucugggcagguagcagcagc

SEQ ID NO: 648043 - RNA, 22 nt, Human
acauagcuuaaaugagaagaua

SEQ ID NO: 648044 - RNA, 22 nt, Human
aaaugcagaucccugaaucuca

SEQ ID NO: 648045 - RNA, 19 nt, Human
ggacagucucagccucaug

SEQ ID NO: 648046 - RNA, 22 nt, Human
gagcacauucccaggagcugcu

SEQ ID NO: 648047 - RNA, 22 nt, Human
acuuguuaguuuuaucugcaug

SEQ ID NO: 648048 - RNA, 22 nt, Human
ucuggacuauaggcugccaagu

SEQ ID NO: 648049 - RNA, 22 nt, Human
ggcguggggccuucugcccgcu

SEQ ID NO: 648050 - RNA, 22 nt, Human
gcagcaggcauggccgcccugg

SEQ ID NO: 648051 - RNA, 22 nt, Human
acaaaugaacauauaagcuuga

SEQ ID NO: 648052 - RNA, 23 nt, Human
gccaggcuccggucuguggccac

SEQ ID NO: 648053 - RNA, 22 nt, Human
acaugagaggcuguggaguaca

SEQ ID NO: 648054 - RNA, 22 nt, Human
acauuucaguaaguguuaauuu

SEQ ID NO: 648055 - RNA, 22 nt, Human
cccgagccucgguuucuuuucu

SEQ ID NO: 648056 - RNA, 22 nt, Human
gaggcucuggaguagguacaca

SEQ ID NO: 648057 - RNA, 22 nt, Human
cucucuggcccauccuguugcc

SEQ ID NO: 648058 - RNA, 22 nt, Human
uaccugagcccagugcagcaua

SEQ ID NO: 648059 - RNA, 22 nt, Human
aggcacagagaaugcccuccau

SEQ ID NO: 648060 - RNA, 21 nt, Human
auauuucucauaagguuaugg

SEQ ID NO: 648061 - RNA, 22 nt, Human
uguacaugaauaaaagaucuug

SEQ ID NO: 648062 - RNA, 22 nt, Human
gcugcucuuuucagagaugaga

SEQ ID NO: 648063 - RNA, 22 nt, Human
ggaggagcccacucaaagggga

SEQ ID NO: 648064 - RNA, 22 nt, Human
auacacuacuaagcacagauug

SEQ ID NO: 648065 - RNA, 22 nt, Human
caccagcuucccaucgcggguc

SEQ ID NO: 648066 - RNA, 22 nt, Human
uuaucagaguccccaaaagaaa

SEQ ID NO: 648067 - RNA, 22 nt, Human
ugaaagggguugaguuacagcu

SEQ ID NO: 648068 - RNA, 22 nt, Human
agugcuccacauugcacuauuc

SEQ ID NO: 648069 - RNA, 22 nt, Human
uuccaaagucauguugcugaua

SEQ ID NO: 648070 - RNA, 18 nt, Human
aaggcuucaaagaguaga

SEQ ID NO: 648071 - RNA, 21 nt, Human
cgcagagcgaacuugcggcgc

SEQ ID NO: 648072 - RNA, 22 nt, Human
accccagcgcauauggucugcg

SEQ ID NO: 648073 - RNA, 22 nt, Human
aggaaacuaaagcccagagagg

SEQ ID NO: 648074 - RNA, 22 nt, Human
aacuguggagauucggaaggua

SEQ ID NO: 648075 - RNA, 22 nt, Human
uauuuaaccaguuaaauuucca

SEQ ID NO: 648076 - RNA, 22 nt, Human
ugccaaggagcuggaucagggc

SEQ ID NO: 648077 - RNA, 22 nt, Human
ucaguacaaaggugcucucaag

SEQ ID NO: 648078 - RNA, 22 nt, Human
uacagaggcuggguuuucaggg

SEQ ID NO: 648079 - RNA, 22 nt, Human
ucaggggcuugaggugcauguc

SEQ ID NO: 648080 - RNA, 22 nt, Human
uggaccagggucccagaguaug

SEQ ID NO: 648081 - RNA, 22 nt, Human
ucaggcugggcuccucucccca

SEQ ID NO: 648082 - RNA, 22 nt, Human
cagggcuccccagagagccucu

SEQ ID NO: 648083 - RNA, 22 nt, Human
agaacagcagcacgucaagcug

SEQ ID NO: 648084 - RNA, 17 nt, Human
aucuggcugcuucuaga

SEQ ID NO: 648085 - RNA, 22 nt, Human
ccuaggcccauuaauuccccuu

SEQ ID NO: 648086 - RNA, 22 nt, Human
gagggaggugauacugaacgua

SEQ ID NO: 648087 - RNA, 22 nt, Human
gagaagaacuugggcaaaguca

SEQ ID NO: 648088 - RNA, 22 nt, Human
ggcauggccuguaagacggaga

SEQ ID NO: 648089 - RNA, 22 nt, Human
ccacagagacagagcccagggu

SEQ ID NO: 648090 - RNA, 22 nt, Human
ccuccuggcccugggccuggaa

SEQ ID NO: 648091 - RNA, 22 nt, Human
cacauccuucagcugagcccag

SEQ ID NO: 648092 - RNA, 22 nt, Human
cagaggucccuauuucuuuguu

SEQ ID NO: 648093 - RNA, 22 nt, Human
ccagcagaggggcggagugcag

SEQ ID NO: 648094 - RNA, 22 nt, Human
augcuacaggaagacgucaggc

SEQ ID NO: 648095 - RNA, 22 nt, Human
uaucagcaacucagagcagucu

SEQ ID NO: 648096 - RNA, 22 nt, Human
cagcugaaagaaggaaguguca

SEQ ID NO: 648097 - RNA, 22 nt, Human
augaaaugcugagaggugcuuc

SEQ ID NO: 648098 - RNA, 22 nt, Human
cauggcuugcaagcauaggaga

SEQ ID NO: 648099 - RNA, 22 nt, Human
gugugccugacaugaugguuaa

SEQ ID NO: 648100 - RNA, 22 nt, Human
agauacaaaagauaagauuuag

SEQ ID NO: 648101 - RNA, 22 nt, Human
uuacacaauuuuauugaccuaa

SEQ ID NO: 648102 - RNA, 22 nt, Human
uauucugcuaagugauuucuac

SEQ ID NO: 648103 - RNA, 22 nt, Human
uuuccauguuaucuugcagacu

SEQ ID NO: 648104 - RNA, 22 nt, Human
gaagcagcagcuggggacaguu

SEQ ID NO: 648105 - RNA, 22 nt, Human
ucugugcuaauuuauccuuccu

SEQ ID NO: 648106 - RNA, 22 nt, Human
agaaaguacagaugagacacuu

SEQ ID NO: 648107 - RNA, 22 nt, Human
uaagaauuguguugaauagagu

SEQ ID NO: 648108 - RNA, 22 nt, Human
agcaggagauggggcgugaugu

SEQ ID NO: 648109 - RNA, 22 nt, Human
cuacauguagguuuccuuaauu

SEQ ID NO: 648110 - RNA, 22 nt, Human
agcaggugggaucaagcuggca

SEQ ID NO: 648111 - RNA, 22 nt, Human
acagaguaucuaucaggaguau

SEQ ID NO: 648112 - RNA, 22 nt, Human
cagcaaggucugucaauagugg

SEQ ID NO: 648113 - RNA, 22 nt, Human
cccaggacuaaugagcucuacg

SEQ ID NO: 648114 - RNA, 22 nt, Human
agaggccaagccagacugugca

SEQ ID NO: 648115 - RNA, 18 nt, Human
ugaacuuuuccugcugcu

SEQ ID NO: 648116 - RNA, 22 nt, Human
uuaacacauauuuaucaauugc

SEQ ID NO: 648117 - RNA, 21 nt, Human
auuugcauuaaaauauuacgc

SEQ ID NO: 648118 - RNA, 21 nt, Human
gaugguagccucauagaagua

SEQ ID NO: 648119 - RNA, 22 nt, Human
acagcagcgugaaguguguuau

SEQ ID NO: 648120 - RNA, 22 nt, Human
acacagaguaucuuuugccuag

SEQ ID NO: 648121 - RNA, 21 nt, Human
aaagagcccgcugagagguuc

SEQ ID NO: 648122 - RNA, 22 nt, Human
ucuggccuauuucugucagauc

SEQ ID NO: 648123 - RNA, 22 nt, Human
uucucccacuccgugcuucagu

SEQ ID NO: 648124 - RNA, 22 nt, Human
auucugggagguagaacugaaa

SEQ ID NO: 648125 - RNA, 22 nt, Human
cugggcagaauuuuaggauggc

SEQ ID NO: 648126 - RNA, 22 nt, Human
ugaacacagcauauuuuguuac

SEQ ID NO: 648127 - RNA, 22 nt, Human
ggguggaagccagagaggucau

SEQ ID NO: 648128 - RNA, 22 nt, Human
ugacugccccuuccauuccugc

SEQ ID NO: 648129 - RNA, 22 nt, Human
agacuucuuugugagcauuuuc

SEQ ID NO: 648130 - RNA, 23 nt, Human
acuuaaaugguucuuuaucucag

SEQ ID NO: 648131 - RNA, 22 nt, Human
augguuuuauuucucuauagcu

SEQ ID NO: 648132 - RNA, 18 nt, Human
ggcagcaagaagggaggg

SEQ ID NO: 648133 - RNA, 22 nt, Human
auguauuuugccagacugucuc

SEQ ID NO: 648134 - RNA, 22 nt, Human
gggcggggcuuccguccuccac

SEQ ID NO: 648135 - RNA, 22 nt, Human
uguuuaagauccgucagucacu

SEQ ID NO: 648136 - RNA, 23 nt, Human
gagcucugcacuaggcccuggga

SEQ ID NO: 648137 - RNA, 22 nt, Human
ugacuuaagcuguucuuuagau

SEQ ID NO: 648138 - RNA, 22 nt, Human
uuccuggugaccucacugguag

SEQ ID NO: 648139 - RNA, 22 nt, Human
augccaaagcccaaguucauca

SEQ ID NO: 648140 - RNA, 22 nt, Human
aggagcugauaaaaggggguca

SEQ ID NO: 648141 - RNA, 23 nt, Human
aggguccagggaucaccaggugu

SEQ ID NO: 648142 - RNA, 21 nt, Human
uuaauuuauucaugauagcua

SEQ ID NO: 648143 - RNA, 22 nt, Human
guucauguggaaauuuaaaaca

SEQ ID NO: 648144 - RNA, 22 nt, Human
aaacuguaaugcaggaucaaga

SEQ ID NO: 648145 - RNA, 22 nt, Human
cugagguauugaaguaucuucu

SEQ ID NO: 648146 - RNA, 22 nt, Human
ucacaaaugucuccuguccugu

SEQ ID NO: 648147 - RNA, 22 nt, Human
aggcccaguagucgacggcgcu

SEQ ID NO: 648148 - RNA, 20 nt, Human
aaucucaguauccuaugcaa

SEQ ID NO: 648149 - RNA, 22 nt, Human
auacccuuuacaggaacagcaa

SEQ ID NO: 648150 - RNA, 22 nt, Human
auugaucaugcagaugcuucac

SEQ ID NO: 648151 - RNA, 22 nt, Human
aaaucaguuaagaugaggccau

SEQ ID NO: 648152 - RNA, 22 nt, Human
auacagagaagggaggcaaaau

SEQ ID NO: 648153 - RNA, 22 nt, Human
caggaaaugcguaguugaacuu

SEQ ID NO: 648154 - RNA, 22 nt, Human
aauuuguguuauaccugcuccu

SEQ ID NO: 648155 - RNA, 22 nt, Human
gcuuccucccugcugcucacua

SEQ ID NO: 648156 - RNA, 22 nt, Human
cacuugaacccgggaggcugag

SEQ ID NO: 648157 - RNA, 20 nt, Human
cuguggaauuuuaccaugcg

SEQ ID NO: 648158 - RNA, 21 nt, Human
gcagagccugagguucuugag

SEQ ID NO: 648159 - RNA, 22 nt, Human
uuccaggguuaauuuauauggu

SEQ ID NO: 648160 - RNA, 22 nt, Human
auggccaccaucucuaaaacac

SEQ ID NO: 648161 - RNA, 22 nt, Human
aagggcucuucuauuuauggcc

SEQ ID NO: 648162 - RNA, 22 nt, Human
accugucaucccggcugcaccg

SEQ ID NO: 648163 - RNA, 22 nt, Human
ggcagcgcccgaguccgcagcu

SEQ ID NO: 648164 - RNA, 19 nt, Human
gcaggacucccagcuccuc

SEQ ID NO: 648165 - RNA, 22 nt, Human
gggcuucuagaauuucugauau

SEQ ID NO: 648166 - RNA, 19 nt, Human
cacaaaugaugaggaccug

SEQ ID NO: 648167 - RNA, 22 nt, Human
ucuccuggcucuaaaaggcugu

SEQ ID NO: 648168 - RNA, 21 nt, Human
agaagucaauugaacugaaau

SEQ ID NO: 648169 - RNA, 22 nt, Human
cagcuggccccacaguagaggc

SEQ ID NO: 648170 - RNA, 22 nt, Human
cgaggaaauauuuacaacugau

SEQ ID NO: 648171 - RNA, 22 nt, Human
ggcuggauguacuuuggggcug

SEQ ID NO: 648172 - RNA, 22 nt, Human
aaggggaauagaguggguugug

SEQ ID NO: 648173 - RNA, 22 nt, Human
gacauuaaaugucuuaguugcc

SEQ ID NO: 648174 - RNA, 22 nt, Human
uucauuugccaucaguguaaug

SEQ ID NO: 648175 - RNA, 22 nt, Human
ugguggcaugauagugugaaug

SEQ ID NO: 648176 - RNA, 22 nt, Human
acacagauggguagaaaacaga

SEQ ID NO: 648177 - RNA, 22 nt, Human
gaagcugugcugggggaucugu

SEQ ID NO: 648178 - RNA, 22 nt, Human
ggaagaaaaugggcaacaggug

SEQ ID NO: 648179 - RNA, 22 nt, Human
aaguuucuuuauuagcuugucc

SEQ ID NO: 648180 - RNA, 22 nt, Human
uaacagaaaggggacagaaaua

SEQ ID NO: 648181 - RNA, 22 nt, Human
uugucugcuugaugccaagcau

SEQ ID NO: 648182 - RNA, 18 nt, Human
cugucaccgccaccacac

SEQ ID NO: 648183 - RNA, 22 nt, Human
guucugaguggcccaagcccug

SEQ ID NO: 648184 - RNA, 22 nt, Human
uauucagaguauuccaugaggu

SEQ ID NO: 648185 - RNA, 22 nt, Human
caggcagcugaggacuuugcua

SEQ ID NO: 648186 - RNA, 22 nt, Human
ucuuuggcugccugaagcccaa

SEQ ID NO: 648187 - RNA, 18 nt, Human
cccagccucuccuuucua

SEQ ID NO: 648188 - RNA, 22 nt, Human
aaugagaagccuagguguacug

SEQ ID NO: 648189 - RNA, 22 nt, Human
ggggagcaauaguugaggugug

SEQ ID NO: 648190 - RNA, 22 nt, Human
agugucugcagugaugucucuu

SEQ ID NO: 648191 - RNA, 22 nt, Human
cugugccuccagucucgcuucu

SEQ ID NO: 648192 - RNA, 22 nt, Human
cugaggagagguggccuguguu

SEQ ID NO: 648193 - RNA, 22 nt, Human
guguggguguacuguucuagau

SEQ ID NO: 648194 - RNA, 23 nt, Human
cauaugaaaguagacacuuucca

SEQ ID NO: 648195 - RNA, 22 nt, Human
agcuucuuuaauucagcaugau

SEQ ID NO: 648196 - RNA, 22 nt, Human
ccagagagucgaugggggacac

SEQ ID NO: 648197 - RNA, 22 nt, Human
uuuuccuuaacagagggagaaa

SEQ ID NO: 648198 - RNA, 22 nt, Human
guccaguguguuuaucuuggau

SEQ ID NO: 648199 - RNA, 22 nt, Human
caggcagaaggaaguaccaggc

SEQ ID NO: 648200 - RNA, 22 nt, Human
aggcagccauccaggaggcuca

SEQ ID NO: 648201 - RNA, 22 nt, Human
cuucacagagucccugauuguu

SEQ ID NO: 648202 - RNA, 21 nt, Human
uaggaacuguucugagugguc

SEQ ID NO: 648203 - RNA, 22 nt, Human
caggccuggggcuggcuuccag

SEQ ID NO: 648204 - RNA, 19 nt, Human
aggcagcauucuggggcuu

SEQ ID NO: 648205 - RNA, 22 nt, Human
aaagcuggcuuuuacaggggcu

SEQ ID NO: 648206 - RNA, 22 nt, Human
cugaaggcugaggcuguguugu

SEQ ID NO: 648207 - RNA, 20 nt, Human
ggaagcagagaacuguuuuc

SEQ ID NO: 648208 - RNA, 22 nt, Human
ccuguacaucugcucucauugc

SEQ ID NO: 648209 - RNA, 22 nt, Human
gugggacagcggggugggacag

SEQ ID NO: 648210 - RNA, 22 nt, Human
gcucugugaguauuggcccugg

SEQ ID NO: 648211 - RNA, 21 nt, Human
agcaggugaaccuccaguaca

SEQ ID NO: 648212 - RNA, 22 nt, Human
ugcauauugugaaaauguagau

SEQ ID NO: 648213 - RNA, 22 nt, Human
ucaaguauaucuagucauuagg

SEQ ID NO: 648214 - RNA, 22 nt, Human
gucugaaaguagggcugaucua

SEQ ID NO: 648215 - RNA, 22 nt, Human
gguacaauggaccauaaaagcu

SEQ ID NO: 648216 - RNA, 22 nt, Human
caagcagaaaucuagaacucca

SEQ ID NO: 648217 - RNA, 18 nt, Human
cccucuccugcuaguggg

SEQ ID NO: 648218 - RNA, 22 nt, Human
ucucuaaauacagaugucaugg

SEQ ID NO: 648219 - RNA, 22 nt, Human
uuuacaagucagggacuguucu

SEQ ID NO: 648220 - RNA, 22 nt, Human
cagggcacaguuauggaggugg

SEQ ID NO: 648221 - RNA, 22 nt, Human
ugaggcagaaaauagcaguuca

SEQ ID NO: 648222 - RNA, 22 nt, Human
uauugucuguccgggucaaagc

SEQ ID NO: 648223 - RNA, 22 nt, Human
ugugccauugagagguuucaga

SEQ ID NO: 648224 - RNA, 22 nt, Human
gagcuuccauccuuacugugug

SEQ ID NO: 648225 - RNA, 22 nt, Human
ugauggcuaucccuggaagggc

SEQ ID NO: 648226 - RNA, 22 nt, Human
ggcuuaagaaaugucuaguuuu

SEQ ID NO: 648227 - RNA, 22 nt, Human
cuggaaagacagagggcauggg

SEQ ID NO: 648228 - RNA, 22 nt, Human
augacuucguuuucucucugca

SEQ ID NO: 648229 - RNA, 22 nt, Human
ggcucugucaccuaugagcuga

SEQ ID NO: 648230 - RNA, 22 nt, Human
ggcuucacagccccauuagugc

SEQ ID NO: 648231 - RNA, 22 nt, Human
gaggcccaggguacaggccgcu

SEQ ID NO: 648232 - RNA, 22 nt, Human
aauaucuguggccauacaauuu

SEQ ID NO: 648233 - RNA, 22 nt, Human
cagcuccucuggccagcccugc

SEQ ID NO: 648234 - RNA, 22 nt, Human
cuuuaugacugaguugucaauu

SEQ ID NO: 648235 - RNA, 22 nt, Human
aucuuucaguuucauaccaauu

SEQ ID NO: 648236 - RNA, 22 nt, Human
guggcucagcggagcucugcac

SEQ ID NO: 648237 - RNA, 22 nt, Human
cagaagcacauguuuacaugua

SEQ ID NO: 648238 - RNA, 22 nt, Human
agugaccauuuucagcuagagg

SEQ ID NO: 648239 - RNA, 22 nt, Human
cacaggagcuguggggcagugu

SEQ ID NO: 648240 - RNA, 19 nt, Human
ugaucuggaaggaaccagg

SEQ ID NO: 648241 - RNA, 22 nt, Human
cccagggaaugacucuggccuu

SEQ ID NO: 648242 - RNA, 22 nt, Human
acuuuaucaggaaucacacagc

SEQ ID NO: 648243 - RNA, 22 nt, Human
acaagcagagauuaaauguuuu

SEQ ID NO: 648244 - RNA, 22 nt, Human
cuucuuccugaaagcuggcucu

SEQ ID NO: 648245 - RNA, 19 nt, Human
cacagcuggcgcugaccgc

SEQ ID NO: 648246 - RNA, 19 nt, Human
gauauaaagagauggugaa

SEQ ID NO: 648247 - RNA, 22 nt, Human
uccacagaauguaagauccaca

SEQ ID NO: 648248 - RNA, 20 nt, Human
aagcuggaagaccagcauug

SEQ ID NO: 648249 - RNA, 21 nt, Human
uccaaaucccauucuguaguc

SEQ ID NO: 648250 - RNA, 22 nt, Human
uaacagaauccuguuauugcca

SEQ ID NO: 648251 - RNA, 22 nt, Human
ucacuauguucggagaacucug

SEQ ID NO: 648252 - RNA, 17 nt, Human
ccuggcugggaaucuga

SEQ ID NO: 648253 - RNA, 22 nt, Human
cacugggcuuuguaguuagcau

SEQ ID NO: 648254 - RNA, 22 nt, Human
aaugaagccagguagaagagaa

SEQ ID NO: 648255 - RNA, 22 nt, Human
cucugagguuuccucacaagcu

SEQ ID NO: 648256 - RNA, 23 nt, Human
acucagugagggccuugggcugc

SEQ ID NO: 648257 - RNA, 22 nt, Human
ucuauucauucaauuuagcucu

SEQ ID NO: 648258 - RNA, 22 nt, Human
aaaagucuugucaagguuccca

SEQ ID NO: 648259 - RNA, 22 nt, Human
agggcacaggcuccggguccag

SEQ ID NO: 648260 - RNA, 18 nt, Human
gguggccuugacuucucu

SEQ ID NO: 648261 - RNA, 22 nt, Human
uuuuaaagagaugcugugcaua

SEQ ID NO: 648262 - RNA, 22 nt, Human
uuucagagccuuuaucucucua

SEQ ID NO: 648263 - RNA, 22 nt, Human
aggauugugccuccagucagaa

SEQ ID NO: 648264 - RNA, 22 nt, Human
uucccagaggagauuugcuuau

SEQ ID NO: 648265 - RNA, 22 nt, Human
ccuggagaggagaaagggccca

SEQ ID NO: 648266 - RNA, 22 nt, Human
aguaaucaauuuuucgguggau

SEQ ID NO: 648267 - RNA, 22 nt, Human
gggcuucucuuuagugagcuga

SEQ ID NO: 648268 - RNA, 20 nt, Human
uggaauaaguuaaguuguuu

SEQ ID NO: 648269 - RNA, 18 nt, Human
cacuggaccucaugagag

SEQ ID NO: 648270 - RNA, 22 nt, Human
acaaugcaauaggagcuagaaa

SEQ ID NO: 648271 - RNA, 23 nt, Human
uaugagaacccauacgcugucuu

SEQ ID NO: 648272 - RNA, 23 nt, Human
agauccaugugggcuggaaacug

SEQ ID NO: 648273 - RNA, 22 nt, Human
guguccuuuccgggccuggagg

SEQ ID NO: 648274 - RNA, 22 nt, Human
auccacagaaggaacuugaaag

SEQ ID NO: 648275 - RNA, 22 nt, Human
uaagcauaguaccguagcagcu

SEQ ID NO: 648276 - RNA, 22 nt, Human
caucuuuguuuuggauauaauc

SEQ ID NO: 648277 - RNA, 22 nt, Human
aggaaacaugaaucugccuuga

SEQ ID NO: 648278 - RNA, 22 nt, Human
cacaagucuguggucuccaaca

SEQ ID NO: 648279 - RNA, 22 nt, Human
uccaggguguguuuacuggggu

SEQ ID NO: 648280 - RNA, 22 nt, Human
gaaagagaggggcugagaugca

SEQ ID NO: 648281 - RNA, 18 nt, Human
auguacauuugcuaaagc

SEQ ID NO: 648282 - RNA, 22 nt, Human
acagagguaggacaugagauau

SEQ ID NO: 648283 - RNA, 22 nt, Human
acacucuugcauuaccugaaua

SEQ ID NO: 648284 - RNA, 22 nt, Human
agcgagguuuugcagauacagc

SEQ ID NO: 648285 - RNA, 20 nt, Human
agucuggcaccuauuccugu

SEQ ID NO: 648286 - RNA, 22 nt, Human
agcacaguaaagcagugucaca

SEQ ID NO: 648287 - RNA, 23 nt, Human
agaggccagccuuuggagacacc

SEQ ID NO: 648288 - RNA, 22 nt, Human
ggagagguguauucaguggguc

SEQ ID NO: 648289 - RNA, 22 nt, Human
auauucauugaacaccuacuac

SEQ ID NO: 648290 - RNA, 22 nt, Human
cagacacuauuguguauaaauc

SEQ ID NO: 648291 - RNA, 22 nt, Human
aggacaguguggaagagggugc

SEQ ID NO: 648292 - RNA, 22 nt, Human
agcagggaggcggugugcuggc

SEQ ID NO: 648293 - RNA, 22 nt, Human
gcugaaaaauagugucguguuu

SEQ ID NO: 648294 - RNA, 22 nt, Human
gccugggugucgaucacuagug

SEQ ID NO: 648295 - RNA, 22 nt, Human
ucagugucaucacuuaauauaa

SEQ ID NO: 648296 - RNA, 22 nt, Human
ucagagugcagggaguagcagc

SEQ ID NO: 648297 - RNA, 22 nt, Human
aagagggcugcaaucuuauugc

SEQ ID NO: 648298 - RNA, 22 nt, Human
ccacuugacaauaaacugagcu

SEQ ID NO: 648299 - RNA, 22 nt, Human
uagggaggcuacuucuuguagg

SEQ ID NO: 648300 - RNA, 22 nt, Human
ggccuugguaaagggaugcaug

SEQ ID NO: 648301 - RNA, 22 nt, Human
uauugaagauuuugugguugcu

SEQ ID NO: 648302 - RNA, 22 nt, Human
uucugaggcauagaggaugaga

SEQ ID NO: 648303 - RNA, 23 nt, Human
acugggaaguuuggagagacgca

SEQ ID NO: 648304 - RNA, 22 nt, Human
gcugacaguuacugcuguaaca

SEQ ID NO: 648305 - RNA, 22 nt, Human
uuuucuauuaacucauuuugca

SEQ ID NO: 648306 - RNA, 22 nt, Human
ccuggagagcucgggccaggca

SEQ ID NO: 648307 - RNA, 22 nt, Human
gacaauacagaaagggacaugc

SEQ ID NO: 648308 - RNA, 22 nt, Human
cuacuucuaaguacauggugau

SEQ ID NO: 648309 - RNA, 20 nt, Human
gggcuggcgcauggggaaag

SEQ ID NO: 648310 - RNA, 22 nt, Human
agcugugauuauccacuggaau

SEQ ID NO: 648311 - RNA, 22 nt, Human
uugccagggaacagggagaggc

SEQ ID NO: 648312 - RNA, 22 nt, Human
uauccaaagagauucauguucu

SEQ ID NO: 648313 - RNA, 22 nt, Human
cugugggagcacuggggaccga

SEQ ID NO: 648314 - RNA, 22 nt, Human
ucagugugcacucugugaccca

SEQ ID NO: 648315 - RNA, 22 nt, Human
auggaguucuuuaaauucacag

SEQ ID NO: 648316 - RNA, 22 nt, Human
uugcagagccaugaggcuggcu

SEQ ID NO: 648317 - RNA, 22 nt, Human
auguucuuugugauucugagcu

SEQ ID NO: 648318 - RNA, 22 nt, Human
aggcugugaagguuaaagacga

SEQ ID NO: 648319 - RNA, 21 nt, Human
uugaauuguaugauuaaacug

SEQ ID NO: 648320 - RNA, 23 nt, Human
cagugggaggacugagauaaaac

SEQ ID NO: 648321 - RNA, 22 nt, Human
cuccugcuccugcuugcaagga

SEQ ID NO: 648322 - RNA, 22 nt, Human
ccucacuuuccuuucuccuggg

SEQ ID NO: 648323 - RNA, 22 nt, Human
acucaagucauaggcuucuuuc

SEQ ID NO: 648324 - RNA, 22 nt, Human
gcugcucuacccaugcaucugu

SEQ ID NO: 648325 - RNA, 22 nt, Human
uacaaguauguuuuaaaauguu

SEQ ID NO: 648326 - RNA, 22 nt, Human
acauucaggccacaguggaguc

SEQ ID NO: 648327 - RNA, 22 nt, Human
uuugacucaagccuuucuuuag

SEQ ID NO: 648328 - RNA, 22 nt, Human
uaauugaaaucauuucaauuca

SEQ ID NO: 648329 - RNA, 22 nt, Human
gagcagaugugugccaggaugc

SEQ ID NO: 648330 - RNA, 22 nt, Human
ggcucuggugcccuggcuccca

SEQ ID NO: 648331 - RNA, 22 nt, Human
auuuuuuguuaacucaggauag

SEQ ID NO: 648332 - RNA, 23 nt, Human
acugagccagggccugggucagc

SEQ ID NO: 648333 - RNA, 22 nt, Human
ggcaugcaaaacaacucagaga

SEQ ID NO: 648334 - RNA, 22 nt, Human
cacaggaaaaauggguccuuua

SEQ ID NO: 648335 - RNA, 22 nt, Human
uauuggaccacagacuuuaagg

SEQ ID NO: 648336 - RNA, 22 nt, Human
ggccucugcaacuggcuguggc

SEQ ID NO: 648337 - RNA, 20 nt, Human
gagauggacagaugaagggg

SEQ ID NO: 648338 - RNA, 22 nt, Human
aaagcacuugaaaucuggcagu

SEQ ID NO: 648339 - RNA, 22 nt, Human
gaggaugcugcagugcaggaca

SEQ ID NO: 648340 - RNA, 22 nt, Human
aaauugcagguaggugggugau

SEQ ID NO: 648341 - RNA, 22 nt, Human
auuuaugacuggugaauagaac

SEQ ID NO: 648342 - RNA, 22 nt, Human
auuguagcaauuucucuuaauu

SEQ ID NO: 648343 - RNA, 22 nt, Human
ggcagcugagcauggcuaccuu

SEQ ID NO: 648344 - RNA, 20 nt, Human
cuggggagcugcucccacga

SEQ ID NO: 648345 - RNA, 22 nt, Human
uaugaacuguaacccucaccgc

SEQ ID NO: 648346 - RNA, 22 nt, Human
uucaaguaacacaaaugcaccc

SEQ ID NO: 648347 - RNA, 22 nt, Human
uagagcuagcuucaaaaugcga

SEQ ID NO: 648348 - RNA, 22 nt, Human
ggacagaaaccauaugagugua

SEQ ID NO: 648349 - RNA, 22 nt, Human
gaguccagcagaaugagccaag

SEQ ID NO: 648350 - RNA, 22 nt, Human
aguggcuggcauaggaacagac

SEQ ID NO: 648351 - RNA, 17 nt, Human
gcuuccugugcugggga

SEQ ID NO: 648352 - RNA, 22 nt, Human
uggcacauagcagguacucagu

SEQ ID NO: 648353 - RNA, 22 nt, Human
gggcuuuaggggccagugacca

SEQ ID NO: 648354 - RNA, 22 nt, Human
ugaaauguguccauguuauuuc

SEQ ID NO: 648355 - RNA, 22 nt, Human
gaggcugagaguuuguucuacu

SEQ ID NO: 648356 - RNA, 22 nt, Human
aguuccaccauuuaggaucugu

SEQ ID NO: 648357 - RNA, 22 nt, Human
gccugccccuuccugggcaggg

SEQ ID NO: 648358 - RNA, 21 nt, Human
ugagaaguaugucuucagcca

SEQ ID NO: 648359 - RNA, 22 nt, Human
cugggcacaguggcucacgccu

SEQ ID NO: 648360 - RNA, 22 nt, Human
ugcuuuggccacuagaauucag

SEQ ID NO: 648361 - RNA, 22 nt, Human
uauucuccccggaucagggcaa

SEQ ID NO: 648362 - RNA, 22 nt, Human
cuguauaugugcauacacacac

SEQ ID NO: 648363 - RNA, 22 nt, Human
cccugaggcccuccuggggucu

SEQ ID NO: 648364 - RNA, 22 nt, Human
acagagucaugguagucaaagg

SEQ ID NO: 648365 - RNA, 21 nt, Human
ggccaacauggucucaucucu

SEQ ID NO: 648366 - RNA, 22 nt, Human
uucacaguauagguuuccagcg

SEQ ID NO: 648367 - RNA, 22 nt, Human
ggggcagagagaaggaagcuug

SEQ ID NO: 648368 - RNA, 22 nt, Human
uuacagaaaagggcuuuaagag

SEQ ID NO: 648369 - RNA, 22 nt, Human
aguagcagaaggucuugaaggg

SEQ ID NO: 648370 - RNA, 22 nt, Human
uccacuguggucccuugcugcc

SEQ ID NO: 648371 - RNA, 22 nt, Human
ggcagggucuggacugaaagcu

SEQ ID NO: 648372 - RNA, 18 nt, Human
ggcugagguugacuagaa

SEQ ID NO: 648373 - RNA, 22 nt, Human
uggcaguggugucugcacaggc

SEQ ID NO: 648374 - RNA, 22 nt, Human
gaucauugaacaggcacuggag

SEQ ID NO: 648375 - RNA, 22 nt, Human
ugagcccugaggaucuguucgg

SEQ ID NO: 648376 - RNA, 22 nt, Human
uacacauauguccauuaaucag

SEQ ID NO: 648377 - RNA, 22 nt, Human
gcuuuuauuucuucacaaaagu

SEQ ID NO: 648378 - RNA, 22 nt, Human
uuuagcaauuucuaaaaguguu

SEQ ID NO: 648379 - RNA, 22 nt, Human
agacugggauucucccugauca

SEQ ID NO: 648380 - RNA, 22 nt, Human
uagauguuuugauauuugcuga

SEQ ID NO: 648381 - RNA, 21 nt, Human
ugcugggcugcaggggaugca

SEQ ID NO: 648382 - RNA, 22 nt, Human
ucuaaugagggugaaggcccag

SEQ ID NO: 648383 - RNA, 22 nt, Human
cauuauggaagugaagagcucu

SEQ ID NO: 648384 - RNA, 20 nt, Human
uggacagaauuagacacuuu

SEQ ID NO: 648385 - RNA, 22 nt, Human
augggaagcugaccugcaugga

SEQ ID NO: 648386 - RNA, 22 nt, Human
ugaaacaaauuuggaaaaucua

SEQ ID NO: 648387 - RNA, 22 nt, Human
uucuucuccuaaggagaguccu

SEQ ID NO: 648388 - RNA, 22 nt, Human
ggcuguggggaccaacaggacu

SEQ ID NO: 648389 - RNA, 22 nt, Human
auucuacacaaagcaagaagac

SEQ ID NO: 648390 - RNA, 22 nt, Human
gagccugccccuccaccaggau

SEQ ID NO: 648391 - RNA, 22 nt, Human
aaagcauagaauuagaguuagg

SEQ ID NO: 648392 - RNA, 22 nt, Human
agcagcugaucaaagcacuuau

SEQ ID NO: 648393 - RNA, 22 nt, Human
auauacaaagggcaaccucgcu

SEQ ID NO: 648394 - RNA, 22 nt, Human
gcauguguuagagugugcaugc

SEQ ID NO: 648395 - RNA, 22 nt, Human
gccucagggggagaggccagcu

SEQ ID NO: 648396 - RNA, 22 nt, Human
auagcauggccugugacacuuu

SEQ ID NO: 648397 - RNA, 22 nt, Human
uucgacucugugccugaagagc

SEQ ID NO: 648398 - RNA, 22 nt, Human
gggguggcuggcaccuccuggu

SEQ ID NO: 648399 - RNA, 18 nt, Human
aguggaaaacaaauacac

SEQ ID NO: 648400 - RNA, 22 nt, Human
cagggccaugaggcacaggguc

SEQ ID NO: 648401 - RNA, 22 nt, Human
uuaaaugugauccugguaugca

SEQ ID NO: 648402 - RNA, 22 nt, Human
aagaguaugcaugcauguuugu

SEQ ID NO: 648403 - RNA, 22 nt, Human
gggucuggacggcugcaggaag

SEQ ID NO: 648404 - RNA, 21 nt, Human
ggggcagagcuaggcccugca

SEQ ID NO: 648405 - RNA, 22 nt, Human
aaauugcacaauauagacauga

SEQ ID NO: 648406 - RNA, 22 nt, Human
cccugaggaaaggguggagggc

SEQ ID NO: 648407 - RNA, 22 nt, Human
gcuguggucugugagcuccaaa

SEQ ID NO: 648408 - RNA, 17 nt, Human
aguggcaggcagauggg

SEQ ID NO: 648409 - RNA, 22 nt, Human
ucaagauguccagugccuauaa

SEQ ID NO: 648410 - RNA, 22 nt, Human
cagacaggagacuggaucaugg

SEQ ID NO: 648411 - RNA, 22 nt, Human
uagaaagcaugcaaguuugaug

SEQ ID NO: 648412 - RNA, 22 nt, Human
aaagcauuauucuguggaaaaa

SEQ ID NO: 648413 - RNA, 22 nt, Human
cugggcuggguuuacccucuuc

SEQ ID NO: 648414 - RNA, 22 nt, Human
gugaggucuuugggaggugauu

SEQ ID NO: 648415 - RNA, 21 nt, Human
uucuguuuuuuguaccagggc

SEQ ID NO: 648416 - RNA, 22 nt, Human
ugucuauuaacacaagaaagga

SEQ ID NO: 648417 - RNA, 19 nt, Human
uugaggggccaggggagau

SEQ ID NO: 648418 - RNA, 22 nt, Human
augcuuuuaugucacaugguca

SEQ ID NO: 648419 - RNA, 22 nt, Human
gcuuugcaggaaaccagugcau

SEQ ID NO: 648420 - RNA, 21 nt, Human
cacugaggucagggguagggu

SEQ ID NO: 648421 - RNA, 22 nt, Human
ucacuugacuuuccagucuugg

SEQ ID NO: 648422 - RNA, 22 nt, Human
gcagggugccgacuucagggau

SEQ ID NO: 648423 - RNA, 22 nt, Human
ucccagagucuucuccuguaau

SEQ ID NO: 648424 - RNA, 22 nt, Human
ggccaggccaagaggguuggaa

SEQ ID NO: 648425 - RNA, 22 nt, Human
auucucugugucugcuuuccca

SEQ ID NO: 648426 - RNA, 22 nt, Human
ugucuuuuuaccugugaugagu

SEQ ID NO: 648427 - RNA, 22 nt, Human
agcgcugugggcgugcgaggag

SEQ ID NO: 648428 - RNA, 20 nt, Human
uucagaguuuacucaaacug

SEQ ID NO: 648429 - RNA, 22 nt, Human
uccccucugguugacccaggag

SEQ ID NO: 648430 - RNA, 22 nt, Human
acugaaggcuuucccaagguca

SEQ ID NO: 648431 - RNA, 21 nt, Human
ugcacagggcccaggagagcc

SEQ ID NO: 648432 - RNA, 22 nt, Human
uaaguucaguuggucgaaguag

SEQ ID NO: 648433 - RNA, 22 nt, Human
uauuuauguggaccauaagccu

SEQ ID NO: 648434 - RNA, 22 nt, Human
guuuagaccaaucauaauuuau

SEQ ID NO: 648435 - RNA, 22 nt, Human
cagauaacugaaauaucauacc

SEQ ID NO: 648436 - RNA, 22 nt, Human
uuacgaauguuagauugcaucu

SEQ ID NO: 648437 - RNA, 22 nt, Human
aaggcaaauguguucuuuuagu

SEQ ID NO: 648438 - RNA, 22 nt, Human
gagugucuauguuuagucuuuc

SEQ ID NO: 648439 - RNA, 22 nt, Human
gggcgccgugggaaacagccgg

SEQ ID NO: 648440 - RNA, 22 nt, Human
auguauguuuucaguuguauua

SEQ ID NO: 648441 - RNA, 22 nt, Human
auuugucauauauaauacucuu

SEQ ID NO: 648442 - RNA, 22 nt, Human
cacaaaugguuguagacauuaa

SEQ ID NO: 648443 - RNA, 22 nt, Human
augaaauugaucuugaacuuuu

SEQ ID NO: 648444 - RNA, 19 nt, Human
aaacucugaaggccacugg

SEQ ID NO: 648445 - RNA, 22 nt, Human
cucugggucaggacacaaaagu

SEQ ID NO: 648446 - RNA, 22 nt, Human
cauuucugauuacagaauacua

SEQ ID NO: 648447 - RNA, 23 nt, Human
aggugcccagggcagguuuacug

SEQ ID NO: 648448 - RNA, 20 nt, Human
uuuuccagaaaguaucauug

SEQ ID NO: 648449 - RNA, 19 nt, Human
cgcaggcuucgggucgcuc

SEQ ID NO: 648450 - RNA, 22 nt, Human
ggucugcccuggguggaggcgc

SEQ ID NO: 648451 - RNA, 22 nt, Human
aguguggcaggaaugacuagaa

SEQ ID NO: 648452 - RNA, 22 nt, Human
aauaauuacccaucuuuuugua

SEQ ID NO: 648453 - RNA, 22 nt, Human
caaaguaugaaccaguuucucu

SEQ ID NO: 648454 - RNA, 22 nt, Human
aaauuuuccugguaaagaugga

SEQ ID NO: 648455 - RNA, 22 nt, Human
caugcuccaaaaacaagagaau

SEQ ID NO: 648456 - RNA, 22 nt, Human
guuuacacuccaggcuggggug

SEQ ID NO: 648457 - RNA, 22 nt, Human
ucugaagaacugaguaaacaug

SEQ ID NO: 648458 - RNA, 22 nt, Human
gacacagggggauguguggacg

SEQ ID NO: 648459 - RNA, 22 nt, Human
agacaugcuuggaggagaagga

SEQ ID NO: 648460 - RNA, 22 nt, Human
ccaaggcuucccagagaugcuc

SEQ ID NO: 648461 - RNA, 22 nt, Human
gguuaaacacuuuggaaguggc

SEQ ID NO: 648462 - RNA, 22 nt, Human
uuacaguauuggucacguuugu

SEQ ID NO: 648463 - RNA, 22 nt, Human
gccuguggggcugaggcugccu

SEQ ID NO: 648464 - RNA, 22 nt, Human
gggcauggcgugugcuggauuc

SEQ ID NO: 648465 - RNA, 22 nt, Human
aagcagaaggggaauaauauuu

SEQ ID NO: 648466 - RNA, 22 nt, Human
aggaaaagugugaaguauggag

SEQ ID NO: 648467 - RNA, 22 nt, Human
aaaaacuguaauuacuuuugca

SEQ ID NO: 648468 - RNA, 22 nt, Human
guucacaaaguacuguaugcau

SEQ ID NO: 648469 - RNA, 22 nt, Human
aguccccuggcaggagggacgu

SEQ ID NO: 648470 - RNA, 22 nt, Human
cagccacugacaggaauggucc

SEQ ID NO: 648471 - RNA, 22 nt, Human
uacuuucuaagacauacaacuu

SEQ ID NO: 648472 - RNA, 22 nt, Human
uagugucuguccaucaguaacu

SEQ ID NO: 648473 - RNA, 22 nt, Human
agaauauaguuaccaaauucug

SEQ ID NO: 648474 - RNA, 22 nt, Human
gcugcucugugacagccuccgg

SEQ ID NO: 648475 - RNA, 22 nt, Human
uuguuuuggagaugagcuaaaa

SEQ ID NO: 648476 - RNA, 22 nt, Human
gaugaagucauuauccuuuugg

SEQ ID NO: 648477 - RNA, 22 nt, Human
gaauugaauucauuuacucaaa

SEQ ID NO: 648478 - RNA, 22 nt, Human
uucuaacucuguuauguguuuc

SEQ ID NO: 648479 - RNA, 22 nt, Human
aagcuggaacaucuugaggaag

SEQ ID NO: 648480 - RNA, 22 nt, Human
aaaugcacaauaaaguaaaggc

SEQ ID NO: 648481 - RNA, 22 nt, Human
gccauggggagggcagcgccug

SEQ ID NO: 648482 - RNA, 20 nt, Human
auuagugcaucuggacaugc

SEQ ID NO: 648483 - RNA, 22 nt, Human
ggccagagaagucagacccuug

SEQ ID NO: 648484 - RNA, 22 nt, Human
ucugggaagcugcgugccuguu

SEQ ID NO: 648485 - RNA, 22 nt, Human
gcaguguuuggauccauagcga

SEQ ID NO: 648486 - RNA, 22 nt, Human
gucuuuuuauuauagaguggag

SEQ ID NO: 648487 - RNA, 22 nt, Human
acaguggagaaggcaugaggcu

SEQ ID NO: 648488 - RNA, 22 nt, Human
gggaagaagacauggugaaggc

SEQ ID NO: 648489 - RNA, 22 nt, Human
agggccagaguggcaaaagccu

SEQ ID NO: 648490 - RNA, 22 nt, Human
gcaguguuaccucuucaguggg

SEQ ID NO: 648491 - RNA, 22 nt, Human
acccagggucaccccguagggu

SEQ ID NO: 648492 - RNA, 22 nt, Human
agucauuacggacuaguacuac

SEQ ID NO: 648493 - RNA, 22 nt, Human
augcaauuuacuguacauaaau

SEQ ID NO: 648494 - RNA, 21 nt, Human
ugaaagaaggugcagucugaa

SEQ ID NO: 648495 - RNA, 20 nt, Human
cuccagggaacagacuggag

SEQ ID NO: 648496 - RNA, 22 nt, Human
ugcugaggagguggcugugcuu

SEQ ID NO: 648497 - RNA, 22 nt, Human
gacuuuaugaagagaugaccaa

SEQ ID NO: 648498 - RNA, 22 nt, Human
ggcaggguccacaccugggaaa

SEQ ID NO: 648499 - RNA, 22 nt, Human
agacuuugagcucuuagagaag

SEQ ID NO: 648500 - RNA, 19 nt, Human
cacaucagcagggcugugg

SEQ ID NO: 648501 - RNA, 22 nt, Human
cucugcagaauuugagcugcuc

SEQ ID NO: 648502 - RNA, 22 nt, Human
agcuccuugcagguugccuugg

SEQ ID NO: 648503 - RNA, 22 nt, Human
gugggggcaggcagugcuagga

SEQ ID NO: 648504 - RNA, 22 nt, Human
cagggcacagaucggggcgcac

SEQ ID NO: 648505 - RNA, 22 nt, Human
ugcagccaggaaauauuugcug

SEQ ID NO: 648506 - RNA, 22 nt, Human
guuucucacaaggcugcaaucc

SEQ ID NO: 648507 - RNA, 22 nt, Human
cugugccuuaguauucucauuu

SEQ ID NO: 648508 - RNA, 22 nt, Human
agauacuauggaauuuuaugag

SEQ ID NO: 648509 - RNA, 21 nt, Human
ccuacagauggauauauauuc

SEQ ID NO: 648510 - RNA, 22 nt, Human
gcuggcaggagccuuucccuuu

SEQ ID NO: 648511 - RNA, 21 nt, Human
uccagaggaggacagacucag

SEQ ID NO: 648512 - RNA, 22 nt, Human
aaucacauuaagcccuguucag

SEQ ID NO: 648513 - RNA, 22 nt, Human
ugcuggcuuagauaucacugcc

SEQ ID NO: 648514 - RNA, 22 nt, Human
ugaggaggugggcacacagagu

SEQ ID NO: 648515 - RNA, 22 nt, Human
gauggcuucagucuccuugggu

SEQ ID NO: 648516 - RNA, 22 nt, Human
auagaaaggucuuuggcagaca

SEQ ID NO: 648517 - RNA, 19 nt, Human
ggugugugcuggggccugu

SEQ ID NO: 648518 - RNA, 22 nt, Human
ucucccacagccgugcuucaag

SEQ ID NO: 648519 - RNA, 22 nt, Human
aaagaugugccuguuucauagu

SEQ ID NO: 648520 - RNA, 22 nt, Human
acagcuuuuuacuaauagauug

SEQ ID NO: 648521 - RNA, 23 nt, Human
ccuggcagcaaacgaggagguua

SEQ ID NO: 648522 - RNA, 22 nt, Human
acaucugggccuaaggcuauau

SEQ ID NO: 648523 - RNA, 22 nt, Human
uggucucugacucugaagaccc

SEQ ID NO: 648524 - RNA, 22 nt, Human
uggcucagcauucacuggucuu

SEQ ID NO: 648525 - RNA, 22 nt, Human
cuccagauuccguuuauucagg

SEQ ID NO: 648526 - RNA, 22 nt, Human
ggcccagugucccggucguggc

SEQ ID NO: 648527 - RNA, 22 nt, Human
ugcacaugugccuguggcacau

SEQ ID NO: 648528 - RNA, 22 nt, Human
agaggcccucucucuccugaug

SEQ ID NO: 648529 - RNA, 22 nt, Human
uugcagcuucgagucuaucugu

SEQ ID NO: 648530 - RNA, 22 nt, Human
cauuggaaugaucguuuugcug

SEQ ID NO: 648531 - RNA, 22 nt, Human
ugauuacacaccacagugcucc

SEQ ID NO: 648532 - RNA, 19 nt, Human
uggggaugcugaugaccaa

SEQ ID NO: 648533 - RNA, 22 nt, Human
agaaguguuuauuucagcaaca

SEQ ID NO: 648534 - RNA, 23 nt, Human
acagaauaccauugacuaggugu

SEQ ID NO: 648535 - RNA, 23 nt, Human
ugccuauucagcagagugauagc

SEQ ID NO: 648536 - RNA, 23 nt, Human
cccagcuggaaguuagaggacca

SEQ ID NO: 648537 - RNA, 21 nt, Human
aaaucacuguccaaucuuggu

SEQ ID NO: 648538 - RNA, 22 nt, Human
gcagaugcuuggcacugacagu

SEQ ID NO: 648539 - RNA, 22 nt, Human
ggccagcagucacagggucaga

SEQ ID NO: 648540 - RNA, 22 nt, Human
uuucaaagucaagaaggauacu

SEQ ID NO: 648541 - RNA, 22 nt, Human
ucucuggagggcuccaggcggg

SEQ ID NO: 648542 - RNA, 22 nt, Human
uuagaaccauaaugaaucaaug

SEQ ID NO: 648543 - RNA, 19 nt, Human
acagaugcuuuugcugccc

SEQ ID NO: 648544 - RNA, 22 nt, Human
uuucucaucuggaaacagugcu

SEQ ID NO: 648545 - RNA, 19 nt, Human
aacaccagagucaggaguc

SEQ ID NO: 648546 - RNA, 22 nt, Human
aggaagaacagauaauggacgc

SEQ ID NO: 648547 - RNA, 22 nt, Human
aaaguguugaagaaaauguuca

SEQ ID NO: 648548 - RNA, 22 nt, Human
cucugaaauuggcccucagcag

SEQ ID NO: 648549 - RNA, 22 nt, Human
gguagcacauugcauuaggaga

SEQ ID NO: 648550 - RNA, 22 nt, Human
aggcagcagucaugaggaaaga

SEQ ID NO: 648551 - RNA, 22 nt, Human
ggacaggguuggggcauauaaa

SEQ ID NO: 648552 - RNA, 22 nt, Human
acuguacacgugucauuuacag

SEQ ID NO: 648553 - RNA, 22 nt, Human
uuuacagggaauauuuuggcuu

SEQ ID NO: 648554 - RNA, 22 nt, Human
ucuaacuugaacucaugacugu

SEQ ID NO: 648555 - RNA, 23 nt, Human
gauacacucccugcugggcacug

SEQ ID NO: 648556 - RNA, 22 nt, Human
cagcaucucugcacccuccccc

SEQ ID NO: 648557 - RNA, 22 nt, Human
uuauuagguuuacauaaagguu

SEQ ID NO: 648558 - RNA, 22 nt, Human
uacugaaagacugaauauuuag

SEQ ID NO: 648559 - RNA, 22 nt, Human
uuuacacuccuggaaaugauau

SEQ ID NO: 648560 - RNA, 22 nt, Human
agcacuuguagacuagaauuuu

SEQ ID NO: 648561 - RNA, 22 nt, Human
uugauuugauugaugaacuaag

SEQ ID NO: 648562 - RNA, 22 nt, Human
gugucugcugcacccucacacc

SEQ ID NO: 648563 - RNA, 20 nt, Human
ucaggagccuaggacaugau

SEQ ID NO: 648564 - RNA, 22 nt, Human
auggauucauuaaugacuucuc

SEQ ID NO: 648565 - RNA, 22 nt, Human
gcugcugugccuggcguccugu

SEQ ID NO: 648566 - RNA, 22 nt, Human
agcaacagcaacgacauuucuc

SEQ ID NO: 648567 - RNA, 22 nt, Human
ccucagcauccucaugcucagu

SEQ ID NO: 648568 - RNA, 22 nt, Human
agguauauauucugguccuuau

SEQ ID NO: 648569 - RNA, 22 nt, Human
caaaugaugcauggcuagugag

SEQ ID NO: 648570 - RNA, 22 nt, Human
gccuguuuacuuugccgcagga

SEQ ID NO: 648571 - RNA, 22 nt, Human
ucugggccaacccuuccauggg

SEQ ID NO: 648572 - RNA, 22 nt, Human
gacaguauuuaacuaguucauu

SEQ ID NO: 648573 - RNA, 22 nt, Human
aagagugugagguugugcuuuu

SEQ ID NO: 648574 - RNA, 22 nt, Human
uuuaugauuaauccaauucugu

SEQ ID NO: 648575 - RNA, 23 nt, Human
cucccugaacaugacacaccaga

SEQ ID NO: 648576 - RNA, 22 nt, Human
aaugauauagcagacauagccu

SEQ ID NO: 648577 - RNA, 22 nt, Human
ccaggagcuggcauguggagag

SEQ ID NO: 648578 - RNA, 19 nt, Human
acaguucuaauuucugugg

SEQ ID NO: 648579 - RNA, 22 nt, Human
uuuauucacuucagugccaaag

SEQ ID NO: 648580 - RNA, 22 nt, Human
aagggcugcauuugauguguca

SEQ ID NO: 648581 - RNA, 22 nt, Human
uaggucccuucuguccuggucu

SEQ ID NO: 648582 - RNA, 22 nt, Human
aagaauaaauuaagauacuuag

SEQ ID NO: 648583 - RNA, 22 nt, Human
uucacagacuuuccauagauug

SEQ ID NO: 648584 - RNA, 22 nt, Human
gcauucuuguuuuuccuacccu

SEQ ID NO: 648585 - RNA, 22 nt, Human
uucuucagacucccucuuuaag

SEQ ID NO: 648586 - RNA, 22 nt, Human
auagugucagaaaaucauaaga

SEQ ID NO: 648587 - RNA, 22 nt, Human
uguuucuaucuggaucaauaga

SEQ ID NO: 648588 - RNA, 22 nt, Human
acugggcuuaugcuguggagua

SEQ ID NO: 648589 - RNA, 22 nt, Human
accagcagaguugaggaggaca

SEQ ID NO: 648590 - RNA, 22 nt, Human
cccaggacucugacacccccaa

SEQ ID NO: 648591 - RNA, 22 nt, Human
aagaggccacagcugacagcac

SEQ ID NO: 648592 - RNA, 20 nt, Human
uggccucugagaugccacgg

SEQ ID NO: 648593 - RNA, 17 nt, Human
gcaccgugggcacacuc

SEQ ID NO: 648594 - RNA, 22 nt, Human
gagcauggauagaaggugggau

SEQ ID NO: 648595 - RNA, 22 nt, Human
gcucugagauugagccuuuggu

SEQ ID NO: 648596 - RNA, 22 nt, Human
gcccuggaaucucuccauggga

SEQ ID NO: 648597 - RNA, 22 nt, Human
uuuacagagguguccugcauug

SEQ ID NO: 648598 - RNA, 22 nt, Human
ugagaucauugacuuguuccug

SEQ ID NO: 648599 - RNA, 22 nt, Human
uugggaguuccuacugcgguuu

SEQ ID NO: 648600 - RNA, 22 nt, Human
gcacauggacaauggaggugca

SEQ ID NO: 648601 - RNA, 22 nt, Human
uuuccaagacuccaguucuccc

SEQ ID NO: 648602 - RNA, 22 nt, Human
uaggcugggcugagcuggacgg

SEQ ID NO: 648603 - RNA, 22 nt, Human
gcugucugcaagccaggaaaug

SEQ ID NO: 648604 - RNA, 22 nt, Human
cagguccccuccccuaccaggc

SEQ ID NO: 648605 - RNA, 20 nt, Human
aaaaagacaaaacgaguugg

SEQ ID NO: 648606 - RNA, 22 nt, Human
uccacccugcuuucuuaucucc

SEQ ID NO: 648607 - RNA, 22 nt, Human
uuugcagagugcagaagcaucu

SEQ ID NO: 648608 - RNA, 22 nt, Human
ucuuggcuguaccauugacuag

SEQ ID NO: 648609 - RNA, 22 nt, Human
gagagaaaggcuugcaggcugu

SEQ ID NO: 648610 - RNA, 22 nt, Human
uuucaaaauuuugcagugguaa

SEQ ID NO: 648611 - RNA, 22 nt, Human
agcccaggucucaaaguacagg

SEQ ID NO: 648612 - RNA, 22 nt, Human
ucugggaaaugggcagcuucgc

SEQ ID NO: 648613 - RNA, 19 nt, Human
cuggugcuugagugaguca

SEQ ID NO: 648614 - RNA, 22 nt, Human
uuugcuuugggagguugucugg

SEQ ID NO: 648615 - RNA, 22 nt, Human
aggcacagcacaccuggccccc

SEQ ID NO: 648616 - RNA, 21 nt, Human
gaggaaaugcucugguguuca

SEQ ID NO: 648617 - RNA, 22 nt, Human
gguaccaccaauucagcugcca

SEQ ID NO: 648618 - RNA, 22 nt, Human
gcagccacuuugcaaccaagag

SEQ ID NO: 648619 - RNA, 22 nt, Human
uuugcauuucuaaugagcuccg

SEQ ID NO: 648620 - RNA, 22 nt, Human
cauugacaguucuuuaaguugc

SEQ ID NO: 648621 - RNA, 22 nt, Human
cuggcagcucugagucccuucu

SEQ ID NO: 648622 - RNA, 20 nt, Human
uccaggaaugguagaggacu

SEQ ID NO: 648623 - RNA, 21 nt, Human
aguguguucuuggcauuaccu

SEQ ID NO: 648624 - RNA, 22 nt, Human
uagugucuguugcuuuuguuca

SEQ ID NO: 648625 - RNA, 22 nt, Human
guggucaucauuaguauuauua

SEQ ID NO: 648626 - RNA, 22 nt, Human
agugcucuaacagucaaaaaag

SEQ ID NO: 648627 - RNA, 22 nt, Human
acaacuagcagguauuaauuuu

SEQ ID NO: 648628 - RNA, 22 nt, Human
cucagagaaccuaagcggagga

SEQ ID NO: 648629 - RNA, 22 nt, Human
ucacuguuuccuguacuggaca

SEQ ID NO: 648630 - RNA, 20 nt, Human
cagugcccguggaaaagaug

SEQ ID NO: 648631 - RNA, 22 nt, Human
cagguggcagaggucucuggaa

SEQ ID NO: 648632 - RNA, 22 nt, Human
agcucacauucucaucagaugu

SEQ ID NO: 648633 - RNA, 22 nt, Human
ccacagaaccucagcuuugagc

SEQ ID NO: 648634 - RNA, 22 nt, Human
ccucaggguucggaugagaaca

SEQ ID NO: 648635 - RNA, 22 nt, Human
ccaggcucagcgcgcacgucug

SEQ ID NO: 648636 - RNA, 22 nt, Human
uggacagccaugcaaaugagcu

SEQ ID NO: 648637 - RNA, 22 nt, Human
aaaccuagguuuccucauucag

SEQ ID NO: 648638 - RNA, 23 nt, Human
uggagaauucuuccuuccacugu

SEQ ID NO: 648639 - RNA, 22 nt, Human
cagcugaacauguagagcaucu

SEQ ID NO: 648640 - RNA, 22 nt, Human
uucagggcugacaagccuauug

SEQ ID NO: 648641 - RNA, 22 nt, Human
auguguguaaacaaguauaauu

SEQ ID NO: 648642 - RNA, 22 nt, Human
ucaacaguugcacuggagaggu

SEQ ID NO: 648643 - RNA, 22 nt, Human
aaaauggguuucuucaaccuca

SEQ ID NO: 648644 - RNA, 23 nt, Human
caaauguaguguguccaccccug

SEQ ID NO: 648645 - RNA, 22 nt, Human
uggucuuuaagguagcugucau

SEQ ID NO: 648646 - RNA, 22 nt, Human
cacacauggucaguggcuacuc

SEQ ID NO: 648647 - RNA, 22 nt, Human
agggggugaucaaggugcggcg

SEQ ID NO: 648648 - RNA, 22 nt, Human
ggcagaggagcuggaaacaugg

SEQ ID NO: 648649 - RNA, 22 nt, Human
aaagaccugaaauauaaucuag

SEQ ID NO: 648650 - RNA, 22 nt, Human
ccuuggaguucuguuuggcuua

SEQ ID NO: 648651 - RNA, 22 nt, Human
uccagguaugacauggcuguuu

SEQ ID NO: 648652 - RNA, 22 nt, Human
ucuccuggauagauacuaucca

SEQ ID NO: 648653 - RNA, 22 nt, Human
aacugcagagaacaucuggguu

SEQ ID NO: 648654 - RNA, 22 nt, Human
uagcucaaagguuaagugugga

SEQ ID NO: 648655 - RNA, 22 nt, Human
ccuugcauuuaaaggcguaggg

SEQ ID NO: 648656 - RNA, 17 nt, Human
gccuggcccagccuggc

SEQ ID NO: 648657 - RNA, 22 nt, Human
gaggccacaguccugaggcauc

SEQ ID NO: 648658 - RNA, 22 nt, Human
gcaugcaacucccaguucugcc

SEQ ID NO: 648659 - RNA, 22 nt, Human
auggaaggcuuuaugacucaaa

SEQ ID NO: 648660 - RNA, 20 nt, Human
ccauggccacaucugugcug

SEQ ID NO: 648661 - RNA, 22 nt, Human
agugcagugguuaggagccagg

SEQ ID NO: 648662 - RNA, 22 nt, Human
uaagaauauugggaauggaugg

SEQ ID NO: 648663 - RNA, 22 nt, Human
aauccauagaauaaaauugcag

SEQ ID NO: 648664 - RNA, 22 nt, Human
agccaggguaagguacuuagua

SEQ ID NO: 648665 - RNA, 18 nt, Human
agucuuguucuguugccc

SEQ ID NO: 648666 - RNA, 22 nt, Human
uucauguaggcugcaaugcaca

SEQ ID NO: 648667 - RNA, 22 nt, Human
ucugucacaaguaauccuuuuc

SEQ ID NO: 648668 - RNA, 22 nt, Human
ugcaguccaagagucuccuggu

SEQ ID NO: 648669 - RNA, 22 nt, Human
ucccugggcaaguuuacucuuc

SEQ ID NO: 648670 - RNA, 22 nt, Human
auccacuugccacuguauaguu

SEQ ID NO: 648671 - RNA, 22 nt, Human
ccugagccuggcucaugcacuc

SEQ ID NO: 648672 - RNA, 22 nt, Human
ucagggacgugagcucagaguc

SEQ ID NO: 648673 - RNA, 22 nt, Human
guacaaguucuacucuauaaau

SEQ ID NO: 648674 - RNA, 22 nt, Human
uuagaaagggugucugaaucug

SEQ ID NO: 648675 - RNA, 22 nt, Human
gcuucagaccugaaaggaaaaa

SEQ ID NO: 648676 - RNA, 22 nt, Human
uucucugaucuugcuagacuga

SEQ ID NO: 648677 - RNA, 22 nt, Human
cugagggcaugaacauuccaua

SEQ ID NO: 648678 - RNA, 22 nt, Human
uagcugccauugcuccaggaag

SEQ ID NO: 648679 - RNA, 18 nt, Human
uucuuuaauucaguuuga

SEQ ID NO: 648680 - RNA, 22 nt, Human
cagcuuccgaccgggggcugca

SEQ ID NO: 648681 - RNA, 22 nt, Human
cccuggaggcaaagguugcagu

SEQ ID NO: 648682 - RNA, 22 nt, Human
uaagaacaguagaacaguaggu

SEQ ID NO: 648683 - RNA, 19 nt, Human
gaaagucauagagcuuguc

SEQ ID NO: 648684 - RNA, 22 nt, Human
ugggcccaagugcaaugcagug

SEQ ID NO: 648685 - RNA, 19 nt, Human
gggaaauucacuugcuucc

SEQ ID NO: 648686 - RNA, 22 nt, Human
ucucuuaaaagaguaauagaga

SEQ ID NO: 648687 - RNA, 22 nt, Human
uuuacacaaaagauagcacacc

SEQ ID NO: 648688 - RNA, 22 nt, Human
ugugccugugacagcgaccugg

SEQ ID NO: 648689 - RNA, 23 nt, Human
ggauacaaagauuaauaguagag

SEQ ID NO: 648690 - RNA, 22 nt, Human
uugaaaggugaacaugaugcac

SEQ ID NO: 648691 - RNA, 23 nt, Human
gaagcagaugucugaguaggcag

SEQ ID NO: 648692 - RNA, 22 nt, Human
aguggcagaagccaagucugca

SEQ ID NO: 648693 - RNA, 20 nt, Human
aucugcuugccuguccucgg

SEQ ID NO: 648694 - RNA, 22 nt, Human
cuccagggagcugcgggagcca

SEQ ID NO: 648695 - RNA, 22 nt, Human
ucagaaccugcaagucuaaccu

SEQ ID NO: 648696 - RNA, 22 nt, Human
gagcucagguggucaaaacaau

SEQ ID NO: 648697 - RNA, 22 nt, Human
aguuucaguguugacagauggu

SEQ ID NO: 648698 - RNA, 17 nt, Human
aaggcacagggcacugg

SEQ ID NO: 648699 - RNA, 21 nt, Human
ccuguggauuuuaaaauugga

SEQ ID NO: 648700 - RNA, 22 nt, Human
agguacuaccagggauuuucag

SEQ ID NO: 648701 - RNA, 22 nt, Human
agcagagaagacacaggcuuca

SEQ ID NO: 648702 - RNA, 22 nt, Human
cagaaacagagaaauauuggcu

SEQ ID NO: 648703 - RNA, 22 nt, Human
gauacacacccuugauaggacu

SEQ ID NO: 648704 - RNA, 20 nt, Human
cagagccaggguuuuguuuu

SEQ ID NO: 648705 - RNA, 22 nt, Human
gcuggucacucugggagcugcu

SEQ ID NO: 648706 - RNA, 22 nt, Human
cuuuguaucuaaauaucuugaa

SEQ ID NO: 648707 - RNA, 22 nt, Human
agugggcagugcgcucggaugc

SEQ ID NO: 648708 - RNA, 22 nt, Human
gugggcugcuuccuccuuccac

SEQ ID NO: 648709 - RNA, 22 nt, Human
agcuuccuuggcgcugaggccu

SEQ ID NO: 648710 - RNA, 22 nt, Human
cugcccaggcugaaggaacauc

SEQ ID NO: 648711 - RNA, 22 nt, Human
aaaauucuaacaugcagccaag

SEQ ID NO: 648712 - RNA, 22 nt, Human
ucccuagguccuagucacagua

SEQ ID NO: 648713 - RNA, 22 nt, Human
uggcucagugacauuccuccca

SEQ ID NO: 648714 - RNA, 22 nt, Human
gguaggcacuggugggaagaga

SEQ ID NO: 648715 - RNA, 22 nt, Human
uacuaucucuucuaacuucaga

SEQ ID NO: 648716 - RNA, 22 nt, Human
uauguacauggagagcaauuga

SEQ ID NO: 648717 - RNA, 21 nt, Human
cucuucaguggugagcucuuc

SEQ ID NO: 648718 - RNA, 22 nt, Human
ucauugcaguugaguuguguua

SEQ ID NO: 648719 - RNA, 22 nt, Human
cagaaaucuccaugucagacau

SEQ ID NO: 648720 - RNA, 22 nt, Human
uccagcagguccgagacaaguu

SEQ ID NO: 648721 - RNA, 22 nt, Human
uagcuuuacaaagugcugcacc

SEQ ID NO: 648722 - RNA, 22 nt, Human
aggcuuccgaguagcugggacu

SEQ ID NO: 648723 - RNA, 22 nt, Human
agagaaacugauguccuuugaa

SEQ ID NO: 648724 - RNA, 18 nt, Human
augcauauuuuaaguugu

SEQ ID NO: 648725 - RNA, 22 nt, Human
caggaggcaguuucagaaguca

SEQ ID NO: 648726 - RNA, 22 nt, Human
ucuggaauuuuauugaucaaaa

SEQ ID NO: 648727 - RNA, 19 nt, Human
ucucaggcugggcggcugc

SEQ ID NO: 648728 - RNA, 22 nt, Human
uuccuuguucuacaucccugcc

SEQ ID NO: 648729 - RNA, 22 nt, Human
ugcuuauauuuauugggcuuag

SEQ ID NO: 648730 - RNA, 22 nt, Human
uugaguuccaggaugguuguua

SEQ ID NO: 648731 - RNA, 22 nt, Human
uuccuaacacaguguaagcaag

SEQ ID NO: 648732 - RNA, 22 nt, Human
uggcuugucauguaucugaggc

SEQ ID NO: 648733 - RNA, 18 nt, Human
ugauucaaguugcccucc

SEQ ID NO: 648734 - RNA, 22 nt, Human
cugcucugugcacuuguucagg

SEQ ID NO: 648735 - RNA, 20 nt, Human
guauuacaggcuuagaacca

SEQ ID NO: 648736 - RNA, 21 nt, Human
uuguuuccucccaaaaugcca

SEQ ID NO: 648737 - RNA, 22 nt, Human
agagaggcugcuggacuauaug

SEQ ID NO: 648738 - RNA, 22 nt, Human
uaguuuaauggucaacuaauga

SEQ ID NO: 648739 - RNA, 22 nt, Human
cccaggcuggcacugcugaagu

SEQ ID NO: 648740 - RNA, 22 nt, Human
auguguauauuuauuguaguuu

SEQ ID NO: 648741 - RNA, 22 nt, Human
ggcagaaggccucccagcuccu

SEQ ID NO: 648742 - RNA, 18 nt, Human
agcuguuguugacucugu

SEQ ID NO: 648743 - RNA, 23 nt, Human
ucugagagaacaaugccuccuau

SEQ ID NO: 648744 - RNA, 22 nt, Human
auuugcuuggucuucucuccgu

SEQ ID NO: 648745 - RNA, 22 nt, Human
uagauauaagguccuuagaaca

SEQ ID NO: 648746 - RNA, 22 nt, Human
agcuguguuuccagaugguagc

SEQ ID NO: 648747 - RNA, 22 nt, Human
uggcuuccuccagagcaggagg

SEQ ID NO: 648748 - RNA, 20 nt, Human
ugcagggcucugcuucucuc

SEQ ID NO: 648749 - RNA, 22 nt, Human
uuuuagcacacuuucuuuagcg

SEQ ID NO: 648750 - RNA, 22 nt, Human
aagaggacuugugaagauguac

SEQ ID NO: 648751 - RNA, 22 nt, Human
acaggacaaaaaucuggauggc

SEQ ID NO: 648752 - RNA, 22 nt, Human
agugccagcuccacacagcagc

SEQ ID NO: 648753 - RNA, 22 nt, Human
agaaucuaaguacacagacaga

SEQ ID NO: 648754 - RNA, 22 nt, Human
cugaggcucccucgggucugcu

SEQ ID NO: 648755 - RNA, 22 nt, Human
uguuggcacuaucucauguuuu

SEQ ID NO: 648756 - RNA, 20 nt, Human
uccaggcccacucagcugaa

SEQ ID NO: 648757 - RNA, 22 nt, Human
gauuugucuauauucaaauaug

SEQ ID NO: 648758 - RNA, 22 nt, Human
uguacaguaggaacuuguuauu

SEQ ID NO: 648759 - RNA, 22 nt, Human
gggcugagccacagcuuuuguu

SEQ ID NO: 648760 - RNA, 22 nt, Human
cucuugguaagacauuagaggu

SEQ ID NO: 648761 - RNA, 20 nt, Human
aaaaucucccagaaacuuau

SEQ ID NO: 648762 - RNA, 22 nt, Human
aggcucagucuguucaugcacu

SEQ ID NO: 648763 - RNA, 22 nt, Human
aaguugaaucaguaacacaguu

SEQ ID NO: 648764 - RNA, 22 nt, Human
auggagcaaauggggcugcagg

SEQ ID NO: 648765 - RNA, 22 nt, Human
aagaauugguuuccucugucau

SEQ ID NO: 648766 - RNA, 22 nt, Human
auuagaagcgugaauccuuuca

SEQ ID NO: 648767 - RNA, 22 nt, Human
augguggauuugugauucagcu

SEQ ID NO: 648768 - RNA, 22 nt, Human
ucagaaccagcccagcagauga

SEQ ID NO: 648769 - RNA, 22 nt, Human
acacagaggcuccagagauaga

SEQ ID NO: 648770 - RNA, 22 nt, Human
gugggggaugcugaguuggaaa

SEQ ID NO: 648771 - RNA, 22 nt, Human
augauuuccaguuguugcuaag

SEQ ID NO: 648772 - RNA, 20 nt, Human
agcuccaugaaguagucacu

SEQ ID NO: 648773 - RNA, 22 nt, Human
aggggcucaagcaguguggucu

SEQ ID NO: 648774 - RNA, 18 nt, Human
ggccagccccaggccagc

SEQ ID NO: 648775 - RNA, 22 nt, Human
cuacagaguucacaggauuuua

SEQ ID NO: 648776 - RNA, 22 nt, Human
gcccaggaaguugaggcugccg

SEQ ID NO: 648777 - RNA, 22 nt, Human
agcaguuuuagggagacacauu

SEQ ID NO: 648778 - RNA, 22 nt, Human
aucuguggcuggugagaggcag

SEQ ID NO: 648779 - RNA, 22 nt, Human
gagcuaggauaucaugagggua

SEQ ID NO: 648780 - RNA, 22 nt, Human
aacacuaaugggagaacaaccc

SEQ ID NO: 648781 - RNA, 22 nt, Human
cuuaucaaacuggagcaggcuu

SEQ ID NO: 648782 - RNA, 22 nt, Human
accugcccuuaacacugugugc

SEQ ID NO: 648783 - RNA, 22 nt, Human
gucuacaaagcuucaagucucu

SEQ ID NO: 648784 - RNA, 22 nt, Human
gcccaguaguucaagguugcag

SEQ ID NO: 648785 - RNA, 22 nt, Human
ucaagacaucacugugcauuuu

SEQ ID NO: 648786 - RNA, 22 nt, Human
auuugagaugguaaauaacuuu

SEQ ID NO: 648787 - RNA, 22 nt, Human
aggagcaaaugaugagacagca

SEQ ID NO: 648788 - RNA, 22 nt, Human
gccaagcucuuuaaaggccaaa

SEQ ID NO: 648789 - RNA, 22 nt, Human
gcagucauggaaaaauguauac

SEQ ID NO: 648790 - RNA, 22 nt, Human
ugagaccauuugacauacagug

SEQ ID NO: 648791 - RNA, 22 nt, Human
aaacucuauaggcagaagcaau

SEQ ID NO: 648792 - RNA, 22 nt, Human
gggaagggacuuguuuaagguc

SEQ ID NO: 648793 - RNA, 22 nt, Human
uggccaagccacugcugggucu

SEQ ID NO: 648794 - RNA, 22 nt, Human
agcaccuggagggcugggaccu

SEQ ID NO: 648795 - RNA, 22 nt, Human
ucuggcuuuauuccuucacuga

SEQ ID NO: 648796 - RNA, 22 nt, Human
ugcauccuguucuagguuuggg

SEQ ID NO: 648797 - RNA, 22 nt, Human
aaacaauguacacaugaauguu

SEQ ID NO: 648798 - RNA, 22 nt, Human
gacagccaucagcacacgcugc

SEQ ID NO: 648799 - RNA, 23 nt, Human
agguuaugauuauagagcgagga

SEQ ID NO: 648800 - RNA, 22 nt, Human
auuuuuaugacaaaccauccuc

SEQ ID NO: 648801 - RNA, 19 nt, Human
agauggcuuggacugaaaa

SEQ ID NO: 648802 - RNA, 22 nt, Human
auuuauauuuugggagcuccug

SEQ ID NO: 648803 - RNA, 20 nt, Human
cucucccagcacagcuuccu

SEQ ID NO: 648804 - RNA, 18 nt, Human
gcugcugguggagggagc

SEQ ID NO: 648805 - RNA, 22 nt, Human
cacaggaauauaaguuugaguu

SEQ ID NO: 648806 - RNA, 21 nt, Human
cuggccuucaacugauuggau

SEQ ID NO: 648807 - RNA, 22 nt, Human
cuccccagguucaggagguggg

SEQ ID NO: 648808 - RNA, 22 nt, Human
ggccugugucugugccuguccu

SEQ ID NO: 648809 - RNA, 22 nt, Human
aggcagcuggcaaauucuagag

SEQ ID NO: 648810 - RNA, 22 nt, Human
caucacagggggcuagaagucu

SEQ ID NO: 648811 - RNA, 22 nt, Human
caggccugcaggaaaggcuccc

SEQ ID NO: 648812 - RNA, 21 nt, Human
ucauucgauuuccucuaucuc

SEQ ID NO: 648813 - RNA, 22 nt, Human
cagggaugaccagagggaugug

SEQ ID NO: 648814 - RNA, 22 nt, Human
agggccugguucuguguaggga

SEQ ID NO: 648815 - RNA, 22 nt, Human
cagagcagcagagcuuccaugg

SEQ ID NO: 648816 - RNA, 22 nt, Human
ugguggacauucuggaugugcu

SEQ ID NO: 648817 - RNA, 22 nt, Human
aguaacaugaguuuuucuaaug

SEQ ID NO: 648818 - RNA, 22 nt, Human
uccuagagaugcaauuugauuu

SEQ ID NO: 648819 - RNA, 22 nt, Human
auucaagagcccauguuuccug

SEQ ID NO: 648820 - RNA, 22 nt, Human
auacaaaggaacacaggcaugu

SEQ ID NO: 648821 - RNA, 22 nt, Human
acaugcaaaugugcaugcaugu

SEQ ID NO: 648822 - RNA, 22 nt, Human
gcggggggcaggcaguacguug

SEQ ID NO: 648823 - RNA, 22 nt, Human
cuggguggcagagccugcagug

SEQ ID NO: 648824 - RNA, 22 nt, Human
cugcugagcaucagggcugccc

SEQ ID NO: 648825 - RNA, 22 nt, Human
aagagggaaauuguuggcugcu

SEQ ID NO: 648826 - RNA, 22 nt, Human
uccugaggcuaaagugcagugg

SEQ ID NO: 648827 - RNA, 22 nt, Human
ugaggccauggucuucccaguc

SEQ ID NO: 648828 - RNA, 22 nt, Human
agcuccuggggguuccaagcag

SEQ ID NO: 648829 - RNA, 22 nt, Human
ugagcaguaacagcucacaggg

SEQ ID NO: 648830 - RNA, 22 nt, Human
gaacaaugaaagacauaaacuc

SEQ ID NO: 648831 - RNA, 22 nt, Human
ccagcuggugggucuuucucug

SEQ ID NO: 648832 - RNA, 22 nt, Human
gcaugcaugugugcagacaguc

SEQ ID NO: 648833 - RNA, 17 nt, Human
ccugucuuguuucugcc

SEQ ID NO: 648834 - RNA, 22 nt, Human
agaguuuguacuuuacccugag

SEQ ID NO: 648835 - RNA, 22 nt, Human
agguaaugcaacuacuuugcua

SEQ ID NO: 648836 - RNA, 22 nt, Human
uagcaauguguugacuugguca

SEQ ID NO: 648837 - RNA, 19 nt, Human
aaaauugcguauuuugagg

SEQ ID NO: 648838 - RNA, 22 nt, Human
cggcacagccgggcaaggcugg

SEQ ID NO: 648839 - RNA, 22 nt, Human
gugaggcagggaaagaggauaa

SEQ ID NO: 648840 - RNA, 22 nt, Human
uucagugccgugcugggucgcu

SEQ ID NO: 648841 - RNA, 22 nt, Human
acaggaagugggaagaaacagg

SEQ ID NO: 648842 - RNA, 20 nt, Human
ucugucucugagcuagacuu

SEQ ID NO: 648843 - RNA, 22 nt, Human
guggggucucucuguaccuccc

SEQ ID NO: 648844 - RNA, 22 nt, Human
gcugucccuugucccaccuugc

SEQ ID NO: 648845 - RNA, 23 nt, Human
agaaaaacaggauuguguuccua

SEQ ID NO: 648846 - RNA, 20 nt, Human
cagaggaguacauauguuca

SEQ ID NO: 648847 - RNA, 22 nt, Human
ucaggcuguuccuguccaaaau

SEQ ID NO: 648848 - RNA, 22 nt, Human
cucugggaccacgugacucugc

SEQ ID NO: 648849 - RNA, 22 nt, Human
guccaaaagagccagccgggcg

SEQ ID NO: 648850 - RNA, 22 nt, Human
cagagaagagucuggccucucu

SEQ ID NO: 648851 - RNA, 21 nt, Human
ggugcucgcugaugaggagug

SEQ ID NO: 648852 - RNA, 22 nt, Human
cuauuuggccauagugcaguua

SEQ ID NO: 648853 - RNA, 22 nt, Human
uagaacaugggauagaguuuuu

SEQ ID NO: 648854 - RNA, 22 nt, Human
ugggcaguugcuccucagaccc

SEQ ID NO: 648855 - RNA, 22 nt, Human
agcagcucccuccucagccacc

SEQ ID NO: 648856 - RNA, 22 nt, Human
aauguaaagcucaggucaggag

SEQ ID NO: 648857 - RNA, 22 nt, Human
gcgaggcugggcccugcaggcg

SEQ ID NO: 648858 - RNA, 22 nt, Human
gugugccucgccaagcugucgg

SEQ ID NO: 648859 - RNA, 22 nt, Human
gcagccagaagacucagaacaa

SEQ ID NO: 648860 - RNA, 22 nt, Human
cccaaguuaaaauucagugcuc

SEQ ID NO: 648861 - RNA, 22 nt, Human
ucuccugugcacccucccugug

SEQ ID NO: 648862 - RNA, 22 nt, Human
guuaaaugcagauucugacuca

SEQ ID NO: 648863 - RNA, 22 nt, Human
ccuaagauugcaaacucucucc

SEQ ID NO: 648864 - RNA, 22 nt, Human
acaucuuuuuggaaacggcuga

SEQ ID NO: 648865 - RNA, 22 nt, Human
uguguuuguuagacuaauguua

SEQ ID NO: 648866 - RNA, 22 nt, Human
cagggugcagagcuaggguagu

SEQ ID NO: 648867 - RNA, 22 nt, Human
agccaaggacacggagccuccu

SEQ ID NO: 648868 - RNA, 22 nt, Human
ucugcccucauugcugccugga

SEQ ID NO: 648869 - RNA, 22 nt, Human
acugggcuggggcucauucucc

SEQ ID NO: 648870 - RNA, 21 nt, Human
cagaucuguagguacuaccau

SEQ ID NO: 648871 - RNA, 22 nt, Human
caaggacacugauguucauccu

SEQ ID NO: 648872 - RNA, 22 nt, Human
ugggaagcauuaaugauagggg

SEQ ID NO: 648873 - RNA, 22 nt, Human
ucccacccauccugcaucucuu

SEQ ID NO: 648874 - RNA, 22 nt, Human
uucacauugugguucaugugaa

SEQ ID NO: 648875 - RNA, 22 nt, Human
caggaucugccaauauucaacc

SEQ ID NO: 648876 - RNA, 22 nt, Human
uccaggccgcaggggcagcccc

SEQ ID NO: 648877 - RNA, 22 nt, Human
agcugcaggccucuccugggga

SEQ ID NO: 648878 - RNA, 22 nt, Human
uuucacagcuuccacuuaagga

SEQ ID NO: 648879 - RNA, 22 nt, Human
aggugcuguuugucagcaguuu

SEQ ID NO: 648880 - RNA, 22 nt, Human
gugcugaacuauaaaaagcuuu

SEQ ID NO: 648881 - RNA, 22 nt, Human
ugggcucaagugaugcuccugu

SEQ ID NO: 648882 - RNA, 22 nt, Human
uaaagcaggcaucucucuccuc

SEQ ID NO: 648883 - RNA, 21 nt, Human
ccucuggcuugugcugugccc

SEQ ID NO: 648884 - RNA, 22 nt, Human
cagcaggccaugcugcuuuuca

SEQ ID NO: 648885 - RNA, 22 nt, Human
ucaauauucuucuuuaguagga

SEQ ID NO: 648886 - RNA, 22 nt, Human
caggcacaugggagcucaucau

SEQ ID NO: 648887 - RNA, 22 nt, Human
uggaggaugccuggggaggccu

SEQ ID NO: 648888 - RNA, 22 nt, Human
aacuuucaggcaaugaauauuu

SEQ ID NO: 648889 - RNA, 23 nt, Human
aacucuggcuagcauagaauaga

SEQ ID NO: 648890 - RNA, 22 nt, Human
cacauuuaauccuuuauaagua

SEQ ID NO: 648891 - RNA, 22 nt, Human
ucucagagaaaugugucaccau

SEQ ID NO: 648892 - RNA, 22 nt, Human
agggcuguguuugcacccucug

SEQ ID NO: 648893 - RNA, 22 nt, Human
guacacacuauguauuguacac

SEQ ID NO: 648894 - RNA, 22 nt, Human
aaaggcagugugauacuguggu

SEQ ID NO: 648895 - RNA, 22 nt, Human
ucagcagggcauacugagccua

SEQ ID NO: 648896 - RNA, 22 nt, Human
cagucaggggugggaucaaggc

SEQ ID NO: 648897 - RNA, 22 nt, Human
aauucugcuucaucagcucuuu

SEQ ID NO: 648898 - RNA, 23 nt, Human
gcccucccucccagguggguguu

SEQ ID NO: 648899 - RNA, 22 nt, Human
ggccugucucacccccgggugc

SEQ ID NO: 648900 - RNA, 22 nt, Human
ggucccaggcucccucuugucc

SEQ ID NO: 648901 - RNA, 22 nt, Human
gcuggagucuggaggugugcca

SEQ ID NO: 648902 - RNA, 22 nt, Human
ucuucacauggaacaugaagcu

SEQ ID NO: 648903 - RNA, 20 nt, Human
ugcugaggccugaggccugg

SEQ ID NO: 648904 - RNA, 22 nt, Human
ucaugcagaggaaggcuaguuu

SEQ ID NO: 648905 - RNA, 22 nt, Human
ccuaccaguaggaggccagaga

SEQ ID NO: 648906 - RNA, 22 nt, Human
gccaagaaugcgacagccguca

SEQ ID NO: 648907 - RNA, 22 nt, Human
ugccaggcuaaguggaggacuu

SEQ ID NO: 648908 - RNA, 22 nt, Human
uguuuuuuuauauaccugaagu

SEQ ID NO: 648909 - RNA, 22 nt, Human
cuggagcuggcccaggcuggcc

SEQ ID NO: 648910 - RNA, 22 nt, Human
acacugacugggcaguauaguc

SEQ ID NO: 648911 - RNA, 22 nt, Human
aggagauggagcucagugggca

SEQ ID NO: 648912 - RNA, 22 nt, Human
gcuggagccaagcugcucuugg

SEQ ID NO: 648913 - RNA, 22 nt, Human
uccaggcaugucccaagccgga

SEQ ID NO: 648914 - RNA, 19 nt, Human
cuggcugcaaugccagggu

SEQ ID NO: 648915 - RNA, 22 nt, Human
aaaugagguuaauacagugcuu

SEQ ID NO: 648916 - RNA, 22 nt, Human
ugaaacauuaggaaaucauuau

SEQ ID NO: 648917 - RNA, 22 nt, Human
uuuugugauggcauuacauuua

SEQ ID NO: 648918 - RNA, 22 nt, Human
agcccugguuugcagcauuugc

SEQ ID NO: 648919 - RNA, 22 nt, Human
agaguuuacagaaauaagcugu

SEQ ID NO: 648920 - RNA, 22 nt, Human
gggccacacagggcagcucccu

SEQ ID NO: 648921 - RNA, 22 nt, Human
uggaaggcaugggaacuguucu

SEQ ID NO: 648922 - RNA, 22 nt, Human
acagugagauccaagggcaggc

SEQ ID NO: 648923 - RNA, 22 nt, Human
agccuggagcuugaguuaugag

SEQ ID NO: 648924 - RNA, 22 nt, Human
aacagauggccaagugcauggg

SEQ ID NO: 648925 - RNA, 22 nt, Human
ucauugaaagugccuccucgga

SEQ ID NO: 648926 - RNA, 22 nt, Human
agagccaggcucuaccuggguu

SEQ ID NO: 648927 - RNA, 22 nt, Human
aaaguuacccaaucucuaugaa

SEQ ID NO: 648928 - RNA, 22 nt, Human
acuggccaggcagcaguagcuu

SEQ ID NO: 648929 - RNA, 21 nt, Human
ucugucagaaaagcugaggcu

SEQ ID NO: 648930 - RNA, 22 nt, Human
caagacuucaccgcucugugcu

SEQ ID NO: 648931 - RNA, 22 nt, Human
gagcaguggucacagggaggga

SEQ ID NO: 648932 - RNA, 22 nt, Human
augcauaucagugauuguuugc

SEQ ID NO: 648933 - RNA, 22 nt, Human
cauaacauccuugcuacuuuga

SEQ ID NO: 648934 - RNA, 22 nt, Human
gcuuucugaugagcuuaagaaa

SEQ ID NO: 648935 - RNA, 22 nt, Human
uuaaggaaacauuuuuccauag

SEQ ID NO: 648936 - RNA, 22 nt, Human
gauggcuuguuuucuggcugaa

SEQ ID NO: 648937 - RNA, 22 nt, Human
uauggcuuuucauuccuaugug

SEQ ID NO: 648938 - RNA, 22 nt, Human
cucagggucugguccuuagauu

SEQ ID NO: 648939 - RNA, 22 nt, Human
ucacccaagaccaucggaagug

SEQ ID NO: 648940 - RNA, 22 nt, Human
agacagugcaagaagagcaggc

SEQ ID NO: 648941 - RNA, 22 nt, Human
cccgggagguggagacugcagu

SEQ ID NO: 648942 - RNA, 22 nt, Human
gacagggcaagacucugucuaa

SEQ ID NO: 648943 - RNA, 22 nt, Human
aaccagugaaacaccaggcaag

SEQ ID NO: 648944 - RNA, 22 nt, Human
aacaugucuuuagagaaacauu

SEQ ID NO: 648945 - RNA, 22 nt, Human
cucugggugagacagaccuggu

SEQ ID NO: 648946 - RNA, 22 nt, Human
aggcugugcgaggucucagagu

SEQ ID NO: 648947 - RNA, 22 nt, Human
uucagagggacauucaagggaa

SEQ ID NO: 648948 - RNA, 22 nt, Human
caguggagagacuuuuacucuu

SEQ ID NO: 648949 - RNA, 17 nt, Human
ugggggcgccagggucu

SEQ ID NO: 648950 - RNA, 22 nt, Human
ugaauaugauugcaaauuuggc

SEQ ID NO: 648951 - RNA, 22 nt, Human
acagggaacaggaauauacaaa

SEQ ID NO: 648952 - RNA, 20 nt, Human
ugcagcugcaggaggguggg

SEQ ID NO: 648953 - RNA, 22 nt, Human
ccaggcucagggcagacuuuca

SEQ ID NO: 648954 - RNA, 22 nt, Human
guaagcaaacagcaaaugauuu

SEQ ID NO: 648955 - RNA, 22 nt, Human
uaagauuuuuaaaauguccuca

SEQ ID NO: 648956 - RNA, 22 nt, Human
cugcuagcccaggaugcaggga

SEQ ID NO: 648957 - RNA, 22 nt, Human
agaaggaaacagcugugcuuug

SEQ ID NO: 648958 - RNA, 22 nt, Human
agccacagguguuggccagugu

SEQ ID NO: 648959 - RNA, 22 nt, Human
ucugagcccucuuuugcagccc

SEQ ID NO: 648960 - RNA, 21 nt, Human
ugagcaggugcagggaagugg

SEQ ID NO: 648961 - RNA, 22 nt, Human
agggaagcccuggcugagaccc

SEQ ID NO: 648962 - RNA, 22 nt, Human
gcccugcuccuccgucccacga

SEQ ID NO: 648963 - RNA, 22 nt, Human
aggagggugggaagcaguuuua

SEQ ID NO: 648964 - RNA, 22 nt, Human
uggcccuggguggaauguccca

SEQ ID NO: 648965 - RNA, 22 nt, Human
caaaacugucuagagagagaag

SEQ ID NO: 648966 - RNA, 22 nt, Human
gggaggugauggcaagcagcgg

SEQ ID NO: 648967 - RNA, 23 nt, Human
cuggccuccgacacuggccaaga

SEQ ID NO: 648968 - RNA, 22 nt, Human
augcuaaauaacugguuugacu

SEQ ID NO: 648969 - RNA, 22 nt, Human
acagucuaaucuuguguucugu

SEQ ID NO: 648970 - RNA, 22 nt, Human
caaagguauaaguuaauauaca

SEQ ID NO: 648971 - RNA, 22 nt, Human
uugagguaguucuauugugagu

SEQ ID NO: 648972 - RNA, 19 nt, Human
uguguguauuucaguucuu

SEQ ID NO: 648973 - RNA, 22 nt, Human
ugaucccaaucuuuccugcucc

SEQ ID NO: 648974 - RNA, 22 nt, Human
gugcugagcugcagaugcgcuc

SEQ ID NO: 648975 - RNA, 22 nt, Human
ccugcccccgucagaggugaug

SEQ ID NO: 648976 - RNA, 22 nt, Human
ugaacaacagauguccauuguu

SEQ ID NO: 648977 - RNA, 22 nt, Human
augcugugcuggcuaaccaugg

SEQ ID NO: 648978 - RNA, 22 nt, Human
aacagcuuugugcucagauuug

SEQ ID NO: 648979 - RNA, 22 nt, Human
cagucuggcacagcacacugaa

SEQ ID NO: 648980 - RNA, 22 nt, Human
ggagaggagauuguggcauuuu

SEQ ID NO: 648981 - RNA, 22 nt, Human
cauguuucugagaaaaguagga

SEQ ID NO: 648982 - RNA, 22 nt, Human
ugugugcucuaaugccuaguac

SEQ ID NO: 648983 - RNA, 22 nt, Human
ccuuuuuucuaugccaacucug

SEQ ID NO: 648984 - RNA, 22 nt, Human
aacaugcuggguguuuuugaug

SEQ ID NO: 648985 - RNA, 23 nt, Human
gaacuguugaugaauagaauaua

SEQ ID NO: 648986 - RNA, 22 nt, Human
ugccuggcaagaggggcuggcu

SEQ ID NO: 648987 - RNA, 22 nt, Human
cugcagggccauggguucuaua

SEQ ID NO: 648988 - RNA, 22 nt, Human
uuuucauugagcaccugaguaa

SEQ ID NO: 648989 - RNA, 22 nt, Human
cauucccugucucuucaauccu

SEQ ID NO: 648990 - RNA, 22 nt, Human
aaagucauuggaauauuaauga

SEQ ID NO: 648991 - RNA, 22 nt, Human
acuucucuuuaguacuaaaugu

SEQ ID NO: 648992 - RNA, 22 nt, Human
aucuuucagagcuccaucaggg

SEQ ID NO: 648993 - RNA, 22 nt, Human
auuucacucauucauguuacuu

SEQ ID NO: 648994 - RNA, 22 nt, Human
cccaucaggaacccaggagccc

SEQ ID NO: 648995 - RNA, 22 nt, Human
cucuguacaggagacaucucua

SEQ ID NO: 648996 - RNA, 23 nt, Human
ucuuuuuaagagaucuagugacg

SEQ ID NO: 648997 - RNA, 22 nt, Human
gcaaaguauuaaccaacaggau

SEQ ID NO: 648998 - RNA, 22 nt, Human
uuacauguaaucuaaaauaauu

SEQ ID NO: 648999 - RNA, 17 nt, Human
aaacuggggucaggagc

SEQ ID NO: 649000 - RNA, 22 nt, Human
ucuguucaugaaauaucuuuuu

SEQ ID NO: 649001 - RNA, 22 nt, Human
cuuguggcccauggcuuccugc

SEQ ID NO: 649002 - RNA, 22 nt, Human
caagaaauucuguucagauagc

SEQ ID NO: 649003 - RNA, 22 nt, Human
ugacaacaaggauccugccugg

SEQ ID NO: 649004 - RNA, 22 nt, Human
guuuuguuuugagucaacucca

SEQ ID NO: 649005 - RNA, 22 nt, Human
gggcaguagcuucguaggcauc

SEQ ID NO: 649006 - RNA, 22 nt, Human
uuucaguugccaagcuaauucu

SEQ ID NO: 649007 - RNA, 23 nt, Human
ucucagugaaucucagaauucgc

SEQ ID NO: 649008 - RNA, 22 nt, Human
ucugggaaccagugcggcuggg

SEQ ID NO: 649009 - RNA, 22 nt, Human
aaacaugcuggauuuagaauau

SEQ ID NO: 649010 - RNA, 22 nt, Human
agagccagcaagugaauaguga

SEQ ID NO: 649011 - RNA, 22 nt, Human
gaacacagcagggauaaccacu

SEQ ID NO: 649012 - RNA, 22 nt, Human
auucccaccaagcaggccaugc

SEQ ID NO: 649013 - RNA, 22 nt, Human
ugagccagguuaagacaggagc

SEQ ID NO: 649014 - RNA, 23 nt, Human
acccaucucuccugucaugcaga

SEQ ID NO: 649015 - RNA, 22 nt, Human
ccugaauaauuugugaaaagau

SEQ ID NO: 649016 - RNA, 19 nt, Human
ccuccccuuggaccagcaa

SEQ ID NO: 649017 - RNA, 22 nt, Human
ggucucuuugcuucagcuacag

SEQ ID NO: 649018 - RNA, 22 nt, Human
uuaggaaauuaugguuucagau

SEQ ID NO: 649019 - RNA, 20 nt, Human
ucucuuuuagcuuacagcug

SEQ ID NO: 649020 - RNA, 22 nt, Human
gcuauguguguuuugcugcagc

SEQ ID NO: 649021 - RNA, 22 nt, Human
uaugucuggaccacugcagccc

SEQ ID NO: 649022 - RNA, 23 nt, Human
aggucaaccacaagcugacaaac

SEQ ID NO: 649023 - RNA, 20 nt, Human
cuguuuauuagaaguggauu

SEQ ID NO: 649024 - RNA, 22 nt, Human
cuaggaaagacacagagaguuu

SEQ ID NO: 649025 - RNA, 22 nt, Human
uuucucaaguucagauauuuga

SEQ ID NO: 649026 - RNA, 22 nt, Human
acuuagcacgaacauuuacuuu

SEQ ID NO: 649027 - RNA, 22 nt, Human
uuuuagaaguucaugugggauu

SEQ ID NO: 649028 - RNA, 22 nt, Human
cccugcaggggaccugcagccu

SEQ ID NO: 649029 - RNA, 22 nt, Human
aggaccaacauagcagcagugg

SEQ ID NO: 649030 - RNA, 16 nt, Human
acagugugcuaagcau

SEQ ID NO: 649031 - RNA, 20 nt, Human
ccacaugagcucuuucugac

SEQ ID NO: 649032 - RNA, 22 nt, Human
gggcuucuugcaggggcaacau

SEQ ID NO: 649033 - RNA, 22 nt, Human
cugcacaguggguggggcguca

SEQ ID NO: 649034 - RNA, 18 nt, Human
aggccaaacuuguaagca

SEQ ID NO: 649035 - RNA, 22 nt, Human
caaugucuucuauaguuacuca

SEQ ID NO: 649036 - RNA, 20 nt, Human
gccacugugcuuacacugcu

SEQ ID NO: 649037 - RNA, 22 nt, Human
auguucauuuucuuaaugugcc

SEQ ID NO: 649038 - RNA, 22 nt, Human
uuggcauuggagaugcaagaac

SEQ ID NO: 649039 - RNA, 22 nt, Human
agccagggaggauuacacccca

SEQ ID NO: 649040 - RNA, 22 nt, Human
aaaaccagacacuguuucuggg

SEQ ID NO: 649041 - RNA, 22 nt, Human
agugcccugggccuuccaggac

SEQ ID NO: 649042 - RNA, 22 nt, Human
cagggcuuuuuauuagcugccu

SEQ ID NO: 649043 - RNA, 22 nt, Human
cauuuuaagaugaccugguuuc

SEQ ID NO: 649044 - RNA, 22 nt, Human
gugauguggggaccguccuggc

SEQ ID NO: 649045 - RNA, 22 nt, Human
aggcaggccgugucccuccuca

SEQ ID NO: 649046 - RNA, 22 nt, Human
uguuuauaccugcaaccuguca

SEQ ID NO: 649047 - RNA, 21 nt, Human
uccagcacagaugaccucccc

SEQ ID NO: 649048 - RNA, 22 nt, Human
cugucccacaagcagugugcac

SEQ ID NO: 649049 - RNA, 22 nt, Human
cacaauuuuccuuuaaguguau

SEQ ID NO: 649050 - RNA, 22 nt, Human
cugaaaauguuagugauacgaa

SEQ ID NO: 649051 - RNA, 22 nt, Human
gugugugucuccgcggccguag

SEQ ID NO: 649052 - RNA, 22 nt, Human
aggcuccacccuacagagcucc

SEQ ID NO: 649053 - RNA, 22 nt, Human
uucugggcaggacuggggaccc

SEQ ID NO: 649054 - RNA, 22 nt, Human
gugcaaaaguaauuacaguuuu

SEQ ID NO: 649055 - RNA, 21 nt, Human
augcauguuccauaaaguggg

SEQ ID NO: 649056 - RNA, 22 nt, Human
cuuccugaagagguuggucagg

SEQ ID NO: 649057 - RNA, 22 nt, Human
ugaguguggggaaugucaugag

SEQ ID NO: 649058 - RNA, 22 nt, Human
acaagagacaagagguucuucu

SEQ ID NO: 649059 - RNA, 22 nt, Human
ccagggcaaaugagaucauagc

SEQ ID NO: 649060 - RNA, 18 nt, Human
uaacauguuuucauuaag

SEQ ID NO: 649061 - RNA, 22 nt, Human
uguuuguggaauauucuuuaag

SEQ ID NO: 649062 - RNA, 22 nt, Human
ccaguggcuacagggggguuga

SEQ ID NO: 649063 - RNA, 22 nt, Human
aagguauaucugauccaugagg

SEQ ID NO: 649064 - RNA, 22 nt, Human
ugccugcucugugccacaguug

SEQ ID NO: 649065 - RNA, 19 nt, Human
ugcaaauucuaaaaacuga

SEQ ID NO: 649066 - RNA, 17 nt, Human
cucuccuuccucugagg

SEQ ID NO: 649067 - RNA, 21 nt, Human
uuacuuuugcagcaaccuaau

SEQ ID NO: 649068 - RNA, 22 nt, Human
ugccucaguuucuccauaugaa

SEQ ID NO: 649069 - RNA, 22 nt, Human
gcugggagcaaguacucaucuu

SEQ ID NO: 649070 - RNA, 22 nt, Human
cauuuguuaaccaguguggauu

SEQ ID NO: 649071 - RNA, 22 nt, Human
agcaguuuuccugagcuccuca

SEQ ID NO: 649072 - RNA, 22 nt, Human
cucugggcacuguauggguucu

SEQ ID NO: 649073 - RNA, 22 nt, Human
cucaguuugaaugcugacacug

SEQ ID NO: 649074 - RNA, 22 nt, Human
cauguugaauggccuugauuuu

SEQ ID NO: 649075 - RNA, 22 nt, Human
uucggucuggcuguuauacgcu

SEQ ID NO: 649076 - RNA, 22 nt, Human
auauauaagcugaugagccaca

SEQ ID NO: 649077 - RNA, 22 nt, Human
ugcugaggucauuuccaaguga

SEQ ID NO: 649078 - RNA, 22 nt, Human
ucaguccuccucucauagagag

SEQ ID NO: 649079 - RNA, 20 nt, Human
aggcuggcacuccuggccag

SEQ ID NO: 649080 - RNA, 22 nt, Human
ggacauggaaguauggagugga

SEQ ID NO: 649081 - RNA, 19 nt, Human
gcccucaggcagcuccauc

SEQ ID NO: 649082 - RNA, 22 nt, Human
cacagcuuaugccacugauugg

SEQ ID NO: 649083 - RNA, 20 nt, Human
agcaggaaugaugcuuucau

SEQ ID NO: 649084 - RNA, 22 nt, Human
ggccuugggcagacacgucaca

SEQ ID NO: 649085 - RNA, 22 nt, Human
cucacagcacuugugucauugg

SEQ ID NO: 649086 - RNA, 22 nt, Human
uauuggcagcaugagcuccugg

SEQ ID NO: 649087 - RNA, 22 nt, Human
agggcagcaaugcagcugcugc

SEQ ID NO: 649088 - RNA, 22 nt, Human
ccugaguccccucauucacucu

SEQ ID NO: 649089 - RNA, 22 nt, Human
agcugcuuuuagggccgggcuc

SEQ ID NO: 649090 - RNA, 22 nt, Human
ggcacagcccucucuguggaca

SEQ ID NO: 649091 - RNA, 22 nt, Human
guuaacuuccccaugucugcau

SEQ ID NO: 649092 - RNA, 22 nt, Human
gcaguaggagaagaggaugcuu

SEQ ID NO: 649093 - RNA, 22 nt, Human
gauuuccuagacauggggcaga

SEQ ID NO: 649094 - RNA, 22 nt, Human
cauucauaagacuuugcucuug

SEQ ID NO: 649095 - RNA, 22 nt, Human
ugaucugguccuacugugggca

SEQ ID NO: 649096 - RNA, 22 nt, Human
gagccaaggguugccauggaga

SEQ ID NO: 649097 - RNA, 19 nt, Human
ucucucuguacauuagaua

SEQ ID NO: 649098 - RNA, 22 nt, Human
cccacuguguugcagucuagug

SEQ ID NO: 649099 - RNA, 22 nt, Human
uucaaacucugaguaguucugc

SEQ ID NO: 649100 - RNA, 21 nt, Human
aauccuuaaugaggaguuggu

SEQ ID NO: 649101 - RNA, 22 nt, Human
cuuacagugaucaacacaaaga

SEQ ID NO: 649102 - RNA, 22 nt, Human
cagcagagcuuauguuggguca

SEQ ID NO: 649103 - RNA, 22 nt, Human
acucuacuguaguaugggcacu

SEQ ID NO: 649104 - RNA, 22 nt, Human
cucagggaugggcagauguuaa

SEQ ID NO: 649105 - RNA, 22 nt, Human
aagagaauacaagcaggcagga

SEQ ID NO: 649106 - RNA, 22 nt, Human
uuggaaauggcuguaguuauga

SEQ ID NO: 649107 - RNA, 22 nt, Human
caugcuucaugcaaaauucuga

SEQ ID NO: 649108 - RNA, 22 nt, Human
gagggagugccagagggccagc

SEQ ID NO: 649109 - RNA, 22 nt, Human
gagagacccagacaccaugcau

SEQ ID NO: 649110 - RNA, 22 nt, Human
aggcauggauguagcagugacc

SEQ ID NO: 649111 - RNA, 22 nt, Human
caggguugguuucuccucaggc

SEQ ID NO: 649112 - RNA, 18 nt, Human
aaaaugcaggcgacaugg

SEQ ID NO: 649113 - RNA, 22 nt, Human
aaacucuagcuacuaggauaac

SEQ ID NO: 649114 - RNA, 22 nt, Human
gugcugcucaagggacaggaca

SEQ ID NO: 649115 - RNA, 22 nt, Human
ucucaucuuuaaaugaaaauuu

SEQ ID NO: 649116 - RNA, 20 nt, Human
ucuugagaacaauuucuggc

SEQ ID NO: 649117 - RNA, 22 nt, Human
caguaugucuacuggacaaagu

SEQ ID NO: 649118 - RNA, 22 nt, Human
gaaggcauuuuaugccuuauag

SEQ ID NO: 649119 - RNA, 22 nt, Human
agcaaggcugggucuaaugggg

SEQ ID NO: 649120 - RNA, 22 nt, Human
uguccugggaacucacagucca

SEQ ID NO: 649121 - RNA, 22 nt, Human
auccuuggcagcucagaccuac

SEQ ID NO: 649122 - RNA, 20 nt, Human
cugcacugaacaugucugag

SEQ ID NO: 649123 - RNA, 22 nt, Human
ggucugugugcuuugggaagug

SEQ ID NO: 649124 - RNA, 22 nt, Human
guggagaccuccuaggaugugu

SEQ ID NO: 649125 - RNA, 22 nt, Human
cucuguguuaaauuggguuuuu

SEQ ID NO: 649126 - RNA, 22 nt, Human
agcacagauucugaagaguccu

SEQ ID NO: 649127 - RNA, 22 nt, Human
auccuuccagaguuauucucaa

SEQ ID NO: 649128 - RNA, 22 nt, Human
uugcacagaugagggugaugcu

SEQ ID NO: 649129 - RNA, 23 nt, Human
ucucugcauguccugagcacauc

SEQ ID NO: 649130 - RNA, 22 nt, Human
ggcuucugcucagccugcacgc

SEQ ID NO: 649131 - RNA, 22 nt, Human
ucccugugucuuccucuugccc

SEQ ID NO: 649132 - RNA, 22 nt, Human
ugugugauugcacuuauaugag

SEQ ID NO: 649133 - RNA, 22 nt, Human
aggcacugcuucuaaguaggaa

SEQ ID NO: 649134 - RNA, 22 nt, Human
cagcugcccugccuugcccuua

SEQ ID NO: 649135 - RNA, 22 nt, Human
auuucucaguaggugcacagug

SEQ ID NO: 649136 - RNA, 22 nt, Human
cugaggugugaaaugguggcaa

SEQ ID NO: 649137 - RNA, 22 nt, Human
aguugugagaaacagaaugagc

SEQ ID NO: 649138 - RNA, 22 nt, Human
agacuaaaagaaggaagcuacc

SEQ ID NO: 649139 - RNA, 22 nt, Human
gugcccugaucgcuaggcuccc

SEQ ID NO: 649140 - RNA, 22 nt, Human
aaauuuuagaccaggcaaaacu

SEQ ID NO: 649141 - RNA, 22 nt, Human
gucccacaccuugaggggucuu

SEQ ID NO: 649142 - RNA, 22 nt, Human
cuggguagggcaaggaacuggc

SEQ ID NO: 649143 - RNA, 22 nt, Human
caggcuaaagcuuugagcaugu

SEQ ID NO: 649144 - RNA, 22 nt, Human
ggcugcagguugguuggcagcu

SEQ ID NO: 649145 - RNA, 22 nt, Human
ugagcagaaguuauaaauaaga

SEQ ID NO: 649146 - RNA, 22 nt, Human
gcugugcaguaguagguacagu

SEQ ID NO: 649147 - RNA, 20 nt, Human
ugucaugcauuagaugaaga

SEQ ID NO: 649148 - RNA, 22 nt, Human
auacuucuagaaauacuaugca

SEQ ID NO: 649149 - RNA, 22 nt, Human
aucucugcaucccucaagguug

SEQ ID NO: 649150 - RNA, 22 nt, Human
aagugcuuuacaaaugucuguu

SEQ ID NO: 649151 - RNA, 22 nt, Human
gcugccucugcgacucugggcg

SEQ ID NO: 649152 - RNA, 22 nt, Human
gaggaaagcugguuuaaaguau

SEQ ID NO: 649153 - RNA, 22 nt, Human
aucacauauuuaagaaacaugu

SEQ ID NO: 649154 - RNA, 22 nt, Human
gcagagauccuugcuggaugac

SEQ ID NO: 649155 - RNA, 22 nt, Human
ugguccugaucaccgcugggca

SEQ ID NO: 649156 - RNA, 20 nt, Human
ccagcacccucucagcugaa

SEQ ID NO: 649157 - RNA, 22 nt, Human
gugagccaguucgacuguuucu

SEQ ID NO: 649158 - RNA, 22 nt, Human
ugguauuuaagacuucacuccu

SEQ ID NO: 649159 - RNA, 22 nt, Human
ucuuucugaugggaagggucaa

SEQ ID NO: 649160 - RNA, 22 nt, Human
uacuuuuugucucuuugaaugu

SEQ ID NO: 649161 - RNA, 18 nt, Human
uuucacagauucaugacu

SEQ ID NO: 649162 - RNA, 22 nt, Human
cuucuccucugaguccugggag

SEQ ID NO: 649163 - RNA, 22 nt, Human
uguuuuauuucuccaagaggga

SEQ ID NO: 649164 - RNA, 22 nt, Human
ggagcccuagcugugcaucaga

SEQ ID NO: 649165 - RNA, 22 nt, Human
aucagaauggagcccacauggu

SEQ ID NO: 649166 - RNA, 22 nt, Human
aucuguguccuuauaagagaca

SEQ ID NO: 649167 - RNA, 22 nt, Human
ugggcagggagcuggaaccaca

SEQ ID NO: 649168 - RNA, 22 nt, Human
ccugaucaaguuuucuggcucc

SEQ ID NO: 649169 - RNA, 22 nt, Human
augcauucauucauucuuucua

SEQ ID NO: 649170 - RNA, 22 nt, Human
gacaggggucccucugggcugu

SEQ ID NO: 649171 - RNA, 22 nt, Human
ucccugggguaucgcugaggca

SEQ ID NO: 649172 - RNA, 20 nt, Human
agaaguggcugcagacacua

SEQ ID NO: 649173 - RNA, 22 nt, Human
cuaaauaaucccucuggucuua

SEQ ID NO: 649174 - RNA, 23 nt, Human
ucuguguccuccuggaccacaga

SEQ ID NO: 649175 - RNA, 22 nt, Human
ccagcuggcacuguggcugccc

SEQ ID NO: 649176 - RNA, 22 nt, Human
agcuguggucuucaaguugccu

SEQ ID NO: 649177 - RNA, 22 nt, Human
augcuuuauuauuuugcaggga

SEQ ID NO: 649178 - RNA, 23 nt, Human
acuacagauacuccugcuguuug

SEQ ID NO: 649179 - RNA, 22 nt, Human
caggagacaaguuagcagcuga

SEQ ID NO: 649180 - RNA, 22 nt, Human
uacaaaguagaaauucaguaaa

SEQ ID NO: 649181 - RNA, 22 nt, Human
gcuuguuugugauuucuccaga

SEQ ID NO: 649182 - RNA, 22 nt, Human
ccccaccauguagaaacugaga

SEQ ID NO: 649183 - RNA, 22 nt, Human
cugggacaugauagaaacagau

SEQ ID NO: 649184 - RNA, 22 nt, Human
gacagcagacaaaccauguuuu

SEQ ID NO: 649185 - RNA, 22 nt, Human
uguuaacauacugcuuucuaau

SEQ ID NO: 649186 - RNA, 22 nt, Human
gcauggcagccaguacauggug

SEQ ID NO: 649187 - RNA, 22 nt, Human
gaguaaaaguuggauuacaaag

SEQ ID NO: 649188 - RNA, 22 nt, Human
gcuggucagagagaaaggaggc

SEQ ID NO: 649189 - RNA, 22 nt, Human
ggaaaacuguauuugaauaacu

SEQ ID NO: 649190 - RNA, 22 nt, Human
agaaagggucacugaaagagga

SEQ ID NO: 649191 - RNA, 22 nt, Human
uguaacagcucuccaugugggg

SEQ ID NO: 649192 - RNA, 22 nt, Human
cauauuagacacuuauguccac

SEQ ID NO: 649193 - RNA, 22 nt, Human
uucauuuuauaaacccugcuga

SEQ ID NO: 649194 - RNA, 22 nt, Human
auucugaguccaugggggcagg

SEQ ID NO: 649195 - RNA, 22 nt, Human
ggggcacuuuacugccucaucu

SEQ ID NO: 649196 - RNA, 22 nt, Human
cugcagcagugugucucauuuu

SEQ ID NO: 649197 - RNA, 22 nt, Human
uuugucaaguuugcaaauacgu

SEQ ID NO: 649198 - RNA, 19 nt, Human
gacuaaauaauaauagcag

SEQ ID NO: 649199 - RNA, 22 nt, Human
ggacugucuccuugcugguagg

SEQ ID NO: 649200 - RNA, 22 nt, Human
uuacaaaguucugaguucaaac

SEQ ID NO: 649201 - RNA, 22 nt, Human
ccuuuacaucugacuucuuuca

SEQ ID NO: 649202 - RNA, 22 nt, Human
ccuggaggagcgcugaccagcu

SEQ ID NO: 649203 - RNA, 22 nt, Human
gcagcuguacuggcagcauugu

SEQ ID NO: 649204 - RNA, 22 nt, Human
cagcugucugcugaaggaagcu

SEQ ID NO: 649205 - RNA, 22 nt, Human
cuccuucagcugaaucccugcu

SEQ ID NO: 649206 - RNA, 22 nt, Human
agcuucucucaggguaucuuuc

SEQ ID NO: 649207 - RNA, 19 nt, Human
acccagcccaggaguggca

SEQ ID NO: 649208 - RNA, 22 nt, Human
gcugggagccguaccugucacg

SEQ ID NO: 649209 - RNA, 22 nt, Human
cacaggccugggguugagcggg

SEQ ID NO: 649210 - RNA, 22 nt, Human
aagugaaucuccuuucuuuauu

SEQ ID NO: 649211 - RNA, 21 nt, Human
auucugagucuuggggucuca

SEQ ID NO: 649212 - RNA, 22 nt, Human
ccugggcucaagcgaucuuguc

SEQ ID NO: 649213 - RNA, 22 nt, Human
ccacaggggcccacgagccgcu

SEQ ID NO: 649214 - RNA, 22 nt, Human
cucucuguauguguauauuuau

SEQ ID NO: 649215 - RNA, 22 nt, Human
uaaagguaugucuuaaucaaac

SEQ ID NO: 649216 - RNA, 22 nt, Human
uagcuaauggugaagauucaga

SEQ ID NO: 649217 - RNA, 22 nt, Human
ccugggagccaagccucugugu

SEQ ID NO: 649218 - RNA, 22 nt, Human
cacacugacuggaaucaaggau

SEQ ID NO: 649219 - RNA, 22 nt, Human
guauuagaagaaauuauaggua

SEQ ID NO: 649220 - RNA, 22 nt, Human
uuguuucauggggauguuuauu

SEQ ID NO: 649221 - RNA, 23 nt, Human
caguacuuaguguagcguuaauu

SEQ ID NO: 649222 - RNA, 22 nt, Human
aaacaaacauagguuugaaagu

SEQ ID NO: 649223 - RNA, 22 nt, Human
ugcaggagagugagucaguagg

SEQ ID NO: 649224 - RNA, 22 nt, Human
aacuuuucauugaaucauguca

SEQ ID NO: 649225 - RNA, 22 nt, Human
acucagcacagcacugggaacc

SEQ ID NO: 649226 - RNA, 22 nt, Human
aagcugccuugcugaggagaaa

SEQ ID NO: 649227 - RNA, 19 nt, Human
uuuuaagugcccuuucuuc

SEQ ID NO: 649228 - RNA, 22 nt, Human
augaagaaaaauccagcugucc

SEQ ID NO: 649229 - RNA, 22 nt, Human
gcaauacugagauuauuguacu

SEQ ID NO: 649230 - RNA, 22 nt, Human
ccugcagaccacacucaguccu

SEQ ID NO: 649231 - RNA, 22 nt, Human
aaggcucaauuaacuaagaagu

SEQ ID NO: 649232 - RNA, 22 nt, Human
auuuccuaggguagaugucaca

SEQ ID NO: 649233 - RNA, 22 nt, Human
uuugcaaacacuuaagaagaga

SEQ ID NO: 649234 - RNA, 22 nt, Human
ugugugauugcaggagaugugg

SEQ ID NO: 649235 - RNA, 17 nt, Human
cucagagcaggacagaa

SEQ ID NO: 649236 - RNA, 21 nt, Human
ggccuuccccugcagucuccg

SEQ ID NO: 649237 - RNA, 22 nt, Human
uauuuggaaauagggcuuugua

SEQ ID NO: 649238 - RNA, 22 nt, Human
uugcuuccuuuacagaugggca

SEQ ID NO: 649239 - RNA, 22 nt, Human
aagucuguuugagugucacacu

SEQ ID NO: 649240 - RNA, 22 nt, Human
guccagagggcugcaggaugcu

SEQ ID NO: 649241 - RNA, 22 nt, Human
gagagguggugaggacuugucu

SEQ ID NO: 649242 - RNA, 22 nt, Human
uugcaaaucuuugccagaaggc

SEQ ID NO: 649243 - RNA, 22 nt, Human
ugcuuuauucagucucugccau

SEQ ID NO: 649244 - RNA, 18 nt, Human
ucaaaauauuucugugga

SEQ ID NO: 649245 - RNA, 22 nt, Human
agccauugaauuuagugccuuu

SEQ ID NO: 649246 - RNA, 22 nt, Human
ucgaaggaaccucaauuuucgu

SEQ ID NO: 649247 - RNA, 23 nt, Human
ucaguuuuggcuguucaguguug

SEQ ID NO: 649248 - RNA, 22 nt, Human
agcugggaggugggcagugaga

SEQ ID NO: 649249 - RNA, 22 nt, Human
ucggagcuguagaugaaacccu

SEQ ID NO: 649250 - RNA, 23 nt, Human
ugagaagccgccgggcagccugg

SEQ ID NO: 649251 - RNA, 19 nt, Human
uccccagcaccucugaguc

SEQ ID NO: 649252 - RNA, 22 nt, Human
agccucucuguuagucacuggg

SEQ ID NO: 649253 - RNA, 19 nt, Human
gcugcagaggugaagaaga

SEQ ID NO: 649254 - RNA, 22 nt, Human
cugcagggcccaaggucaacgg

SEQ ID NO: 649255 - RNA, 22 nt, Human
aagccagguguugugguaagag

SEQ ID NO: 649256 - RNA, 22 nt, Human
ucagcaguggguccugagggug

SEQ ID NO: 649257 - RNA, 22 nt, Human
cacagaaguuucauagucucga

SEQ ID NO: 649258 - RNA, 22 nt, Human
guuauugcaguauagaggucua

SEQ ID NO: 649259 - RNA, 22 nt, Human
aacaucaucaugaacaacuaau

SEQ ID NO: 649260 - RNA, 22 nt, Human
gaguuuaaagcauacauauuuu

SEQ ID NO: 649261 - RNA, 22 nt, Human
gguucacuccgaucucugccuc

SEQ ID NO: 649262 - RNA, 22 nt, Human
caggugcccagcuccugcugug

SEQ ID NO: 649263 - RNA, 22 nt, Human
agaugauuaugauagcacuguu

SEQ ID NO: 649264 - RNA, 22 nt, Human
ggcuccuucaaagcaccuggcu

SEQ ID NO: 649265 - RNA, 22 nt, Human
agugaaauagcauuuaugaagc

SEQ ID NO: 649266 - RNA, 23 nt, Human
agcugaggcugugggugucagag

SEQ ID NO: 649267 - RNA, 22 nt, Human
ccugcguccacggcugggagac

SEQ ID NO: 649268 - RNA, 22 nt, Human
uuccagaggggagguggcagcc

SEQ ID NO: 649269 - RNA, 22 nt, Human
aagaacuguaucaagauguagu

SEQ ID NO: 649270 - RNA, 22 nt, Human
gagaugcuauggcuauuccccu

SEQ ID NO: 649271 - RNA, 22 nt, Human
uuuacagaugaggauacugagg

SEQ ID NO: 649272 - RNA, 22 nt, Human
gagcccugauuugcagcauuug

SEQ ID NO: 649273 - RNA, 22 nt, Human
agcacagaaaguauugacugaa

SEQ ID NO: 649274 - RNA, 22 nt, Human
gcugugcagguccccacugccu

SEQ ID NO: 649275 - RNA, 21 nt, Human
ugcuuaccgccccagggcucc

SEQ ID NO: 649276 - RNA, 22 nt, Human
agauauauuuaagguaauaagu

SEQ ID NO: 649277 - RNA, 19 nt, Human
auagcuugucagcugcucc

SEQ ID NO: 649278 - RNA, 22 nt, Human
gccagagccggcuucacaggau

SEQ ID NO: 649279 - RNA, 22 nt, Human
auacacagccauuaugaauuag

SEQ ID NO: 649280 - RNA, 22 nt, Human
cagcaggaggugaguagcaggu

SEQ ID NO: 649281 - RNA, 21 nt, Human
ggucccauugugaggcuugaa

SEQ ID NO: 649282 - RNA, 22 nt, Human
aggaauguggcaaucuucaagu

SEQ ID NO: 649283 - RNA, 22 nt, Human
agaaacugcagcucagagaagu

SEQ ID NO: 649284 - RNA, 17 nt, Human
cuuugcagcagacaugu

SEQ ID NO: 649285 - RNA, 22 nt, Human
gccuggaguagcauggcaagcc

SEQ ID NO: 649286 - RNA, 22 nt, Human
cuucacaaagcucucuuuaugu

SEQ ID NO: 649287 - RNA, 22 nt, Human
cuucuugucagugauuucuucc

SEQ ID NO: 649288 - RNA, 22 nt, Human
auaaacuugagucucagaguau

SEQ ID NO: 649289 - RNA, 22 nt, Human
agcaacaggcauaauguguuga

SEQ ID NO: 649290 - RNA, 22 nt, Human
uacagcccaagaaguuuauacg

SEQ ID NO: 649291 - RNA, 22 nt, Human
uucauucagguguauuuauggg

SEQ ID NO: 649292 - RNA, 22 nt, Human
ucagacaugggauaugaagcuc

SEQ ID NO: 649293 - RNA, 22 nt, Human
aagggaggaggauuuauuguac

SEQ ID NO: 649294 - RNA, 22 nt, Human
cuggcuguuucaaauguauaga

SEQ ID NO: 649295 - RNA, 22 nt, Human
gugaggcaggcauucuccuuuc

SEQ ID NO: 649296 - RNA, 22 nt, Human
ggagauggcuggcagguagaug

SEQ ID NO: 649297 - RNA, 22 nt, Human
caggaugugaggaggccauuug

SEQ ID NO: 649298 - RNA, 22 nt, Human
uccuugggucagugagugaggu

SEQ ID NO: 649299 - RNA, 22 nt, Human
aagauuguuuuggaugcuaacu

SEQ ID NO: 649300 - RNA, 22 nt, Human
ucugaguuacacaagcaagggu

SEQ ID NO: 649301 - RNA, 22 nt, Human
gugggcagauuauagaugaugc

SEQ ID NO: 649302 - RNA, 22 nt, Human
uucuaaaauaaguuuaucuggu

SEQ ID NO: 649303 - RNA, 22 nt, Human
uuuccaggcagaggaguuguga

SEQ ID NO: 649304 - RNA, 22 nt, Human
uucucuggguuaggggaacuau

SEQ ID NO: 649305 - RNA, 22 nt, Human
uccacgcugugugaccuugggc

SEQ ID NO: 649306 - RNA, 22 nt, Human
ucagagaaucucuccuuaguuu

SEQ ID NO: 649307 - RNA, 22 nt, Human
gcuaccugagcaagagcuucaa

SEQ ID NO: 649308 - RNA, 20 nt, Human
gauuacaaaaugaaaugcau

SEQ ID NO: 649309 - RNA, 22 nt, Human
caguacuuauuucuauuuaggg

SEQ ID NO: 649310 - RNA, 22 nt, Human
ugcuggccuguccacgggcugu

SEQ ID NO: 649311 - RNA, 22 nt, Human
aauaaacaaaucuuuccugugg

SEQ ID NO: 649312 - RNA, 22 nt, Human
cagcucuuuuucacacaacaug

SEQ ID NO: 649313 - RNA, 22 nt, Human
uggucagcguuugucagagcag

SEQ ID NO: 649314 - RNA, 22 nt, Human
caugcuuuucaaucuaucuuaa

SEQ ID NO: 649315 - RNA, 22 nt, Human
aggcugaugcuggcugaggcug

SEQ ID NO: 649316 - RNA, 22 nt, Human
guuuauuaacugucaagugauu

SEQ ID NO: 649317 - RNA, 22 nt, Human
ccaggcagaaugaaaccccugu

SEQ ID NO: 649318 - RNA, 22 nt, Human
cugggguggaggagcuccccug

SEQ ID NO: 649319 - RNA, 22 nt, Human
cauggaggccaggaaacagccu

SEQ ID NO: 649320 - RNA, 22 nt, Human
ugacauaaguugguagaaagga

SEQ ID NO: 649321 - RNA, 20 nt, Human
ggcugcugugggcagagagg

SEQ ID NO: 649322 - RNA, 22 nt, Human
ggaaaguggugguggaaagagg

SEQ ID NO: 649323 - RNA, 19 nt, Human
auuucaagagguuuauugg

SEQ ID NO: 649324 - RNA, 22 nt, Human
acagcaggcaugaagaaauguu

SEQ ID NO: 649325 - RNA, 21 nt, Human
ggaacuuucaugaaucuagca

SEQ ID NO: 649326 - RNA, 22 nt, Human
augauugcagcccuacagcugu

SEQ ID NO: 649327 - RNA, 21 nt, Human
uagagaugacgagcucuagca

SEQ ID NO: 649328 - RNA, 22 nt, Human
uccacccagcacacugugguag

SEQ ID NO: 649329 - RNA, 22 nt, Human
gagcaggaaggccagaaggguc

SEQ ID NO: 649330 - RNA, 22 nt, Human
acagaugagaagcugcauucaa

SEQ ID NO: 649331 - RNA, 22 nt, Human
uguccaggugugucuaaagaga

SEQ ID NO: 649332 - RNA, 22 nt, Human
caggaugggugucggccagcac

SEQ ID NO: 649333 - RNA, 22 nt, Human
aaguuucuguaugcucuucugu

SEQ ID NO: 649334 - RNA, 22 nt, Human
caggaaggcccaccuguccugu

SEQ ID NO: 649335 - RNA, 22 nt, Human
ggccucugcuuaugcugaugac

SEQ ID NO: 649336 - RNA, 22 nt, Human
auccuuaaaggaauucugauuu

SEQ ID NO: 649337 - RNA, 22 nt, Human
caagagcuggagaggcagucua

SEQ ID NO: 649338 - RNA, 21 nt, Human
uaaacauaaccuuguauggcu

SEQ ID NO: 649339 - RNA, 23 nt, Human
uccauacucuaaacauguuauuu

SEQ ID NO: 649340 - RNA, 22 nt, Human
ggacgcagccgagggagcaggg

SEQ ID NO: 649341 - RNA, 21 nt, Human
acauacauuaucuuuuuaaaa

SEQ ID NO: 649342 - RNA, 22 nt, Human
uggcccugaggggcugugcccc

SEQ ID NO: 649343 - RNA, 22 nt, Human
ggccucuggucaagacaagcau

SEQ ID NO: 649344 - RNA, 22 nt, Human
aaagcauuucaugucuagaaag

SEQ ID NO: 649345 - RNA, 22 nt, Human
gauggaggagauggcagggugc

SEQ ID NO: 649346 - RNA, 22 nt, Human
agcagacagguaggaggauaaa

SEQ ID NO: 649347 - RNA, 22 nt, Human
uccuauugguagacauuucugu

SEQ ID NO: 649348 - RNA, 22 nt, Human
gcacccacuuaggccagucaau

SEQ ID NO: 649349 - RNA, 22 nt, Human
aggauaaaugaucuagauuuuc

SEQ ID NO: 649350 - RNA, 22 nt, Human
uccacacuugcugucugcugag

SEQ ID NO: 649351 - RNA, 17 nt, Human
ucagagggaugagcagg

SEQ ID NO: 649352 - RNA, 22 nt, Human
cagcuggcaaguggagcagggu

SEQ ID NO: 649353 - RNA, 22 nt, Human
uuuacacggcauuaucuucaug

SEQ ID NO: 649354 - RNA, 22 nt, Human
ucuuucuggucucgccuuauuc

SEQ ID NO: 649355 - RNA, 20 nt, Human
gggcuagaccagggcagagg

SEQ ID NO: 649356 - RNA, 23 nt, Human
uucugcauguuucagagcuggga

SEQ ID NO: 649357 - RNA, 22 nt, Human
cccaggucucccugcagcccug

SEQ ID NO: 649358 - RNA, 22 nt, Human
aaacuacaucucauggaugagg

SEQ ID NO: 649359 - RNA, 22 nt, Human
aaucuuggcaaauguagcuucc

SEQ ID NO: 649360 - RNA, 22 nt, Human
uguguagugauuuucuuccaac

SEQ ID NO: 649361 - RNA, 22 nt, Human
ucacauuguucuuaguuuaccu

SEQ ID NO: 649362 - RNA, 22 nt, Human
cgggcgcacuccgggcagcugu

SEQ ID NO: 649363 - RNA, 22 nt, Human
uccagagcuguaugauuuuuuu

SEQ ID NO: 649364 - RNA, 23 nt, Human
ugagcugggccugcaggggucuc

SEQ ID NO: 649365 - RNA, 22 nt, Human
gaaauauuucucuugagccccu

SEQ ID NO: 649366 - RNA, 22 nt, Human
uucaaucauugcaaaguaaugg

SEQ ID NO: 649367 - RNA, 22 nt, Human
gggaacagagugccagacugac

SEQ ID NO: 649368 - RNA, 22 nt, Human
cuccuuugaucccaaaugaccc

SEQ ID NO: 649369 - RNA, 22 nt, Human
uucugggcaccaccacagacuu

SEQ ID NO: 649370 - RNA, 22 nt, Human
uagguucagugucuuguucugc

SEQ ID NO: 649371 - RNA, 22 nt, Human
gaagcagcaaaucugcaguauc

SEQ ID NO: 649372 - RNA, 22 nt, Human
aggaugugccaccagcuuugca

SEQ ID NO: 649373 - RNA, 22 nt, Human
aagacuugaccagguugaaggc

SEQ ID NO: 649374 - RNA, 22 nt, Human
uaucaugaucagcaacuaauca

SEQ ID NO: 649375 - RNA, 22 nt, Human
acagucucuguugcugcuguuu

SEQ ID NO: 649376 - RNA, 22 nt, Human
uggcauguugauaauggagaag

SEQ ID NO: 649377 - RNA, 22 nt, Human
aaauaugugaucagugaauaaa

SEQ ID NO: 649378 - RNA, 22 nt, Human
aggaugagaagauuggaaucuu

SEQ ID NO: 649379 - RNA, 22 nt, Human
ugugcuauuuuugcauaugugu

SEQ ID NO: 649380 - RNA, 22 nt, Human
agaaaucugacugcugugcaca

SEQ ID NO: 649381 - RNA, 22 nt, Human
guggcacauugguagggucugu

SEQ ID NO: 649382 - RNA, 22 nt, Human
ugaaaugaaacagaacauauca

SEQ ID NO: 649383 - RNA, 22 nt, Human
cagaaagcagagcugagccuuu

SEQ ID NO: 649384 - RNA, 22 nt, Human
caauguuugugaucuacugacu

SEQ ID NO: 649385 - RNA, 22 nt, Human
uguucuguaccuguccuggggc

SEQ ID NO: 649386 - RNA, 22 nt, Human
auggaauauagucuuauaucuc

SEQ ID NO: 649387 - RNA, 22 nt, Human
ucauaggaguagcagugagagg

SEQ ID NO: 649388 - RNA, 22 nt, Human
cagcuggcuuguuuguucuuga

SEQ ID NO: 649389 - RNA, 22 nt, Human
cugggucucuuuagggugccgu

SEQ ID NO: 649390 - RNA, 20 nt, Human
gcucugugguuugagucucc

SEQ ID NO: 649391 - RNA, 22 nt, Human
uccccacaucucugcaucaggc

SEQ ID NO: 649392 - RNA, 22 nt, Human
agugggugauaagaccaaggag

SEQ ID NO: 649393 - RNA, 19 nt, Human
agucaucucacugugccca

SEQ ID NO: 649394 - RNA, 22 nt, Human
cuaaggaaaggaaauacaguaa

SEQ ID NO: 649395 - RNA, 22 nt, Human
ggcugcaggcaggguauccacu

SEQ ID NO: 649396 - RNA, 22 nt, Human
gaaauguugucucugcagcaau

SEQ ID NO: 649397 - RNA, 22 nt, Human
uuggaaggggcagaguggcugc

SEQ ID NO: 649398 - RNA, 22 nt, Human
ucaacugauuuagucugugcca

SEQ ID NO: 649399 - RNA, 22 nt, Human
guauuagacugagaaauggagu

SEQ ID NO: 649400 - RNA, 19 nt, Human
gcacacccugcaccaccau

SEQ ID NO: 649401 - RNA, 22 nt, Human
ccagauaucacugccguguugu

SEQ ID NO: 649402 - RNA, 22 nt, Human
ggcugggagccccacagaguca

SEQ ID NO: 649403 - RNA, 22 nt, Human
cauggcuuuugcuuuugcccau

SEQ ID NO: 649404 - RNA, 19 nt, Human
ccuagagcaguaccuggua

SEQ ID NO: 649405 - RNA, 22 nt, Human
uggcagggucuugcuguguugc

SEQ ID NO: 649406 - RNA, 22 nt, Human
acguuuucuagagaauaugcag

SEQ ID NO: 649407 - RNA, 22 nt, Human
gcagccaggggcugugaccugu

SEQ ID NO: 649408 - RNA, 22 nt, Human
cucccucagaggagcaccuguu

SEQ ID NO: 649409 - RNA, 22 nt, Human
auguagggaacuaaauucacug

SEQ ID NO: 649410 - RNA, 22 nt, Human
uucuuuggggucuccagcauag

SEQ ID NO: 649411 - RNA, 22 nt, Human
ugcccugugccagacuuccugg

SEQ ID NO: 649412 - RNA, 22 nt, Human
gcagggcagcugaagcuaggug

SEQ ID NO: 649413 - RNA, 19 nt, Human
uuuucccacccuuuagaau

SEQ ID NO: 649414 - RNA, 22 nt, Human
gaaggaaaaauacucuguaagg

SEQ ID NO: 649415 - RNA, 21 nt, Human
aguccuugaaacucuuucuug

SEQ ID NO: 649416 - RNA, 22 nt, Human
cucccucaggccuuagcccugc

SEQ ID NO: 649417 - RNA, 22 nt, Human
caagaaggcuauaugggccagg

SEQ ID NO: 649418 - RNA, 22 nt, Human
aaaugucuguuagucauaucau

SEQ ID NO: 649419 - RNA, 22 nt, Human
aucauggaagccuaucuugaga

SEQ ID NO: 649420 - RNA, 22 nt, Human
gcugugggccauggccaaguga

SEQ ID NO: 649421 - RNA, 22 nt, Human
cugaauaauuuucuguuguaug

SEQ ID NO: 649422 - RNA, 22 nt, Human
augugugugaugggcgccgcca

SEQ ID NO: 649423 - RNA, 22 nt, Human
uggcuucucaguuucauaauga

SEQ ID NO: 649424 - RNA, 22 nt, Human
uuuuauucucagcuccagagag

SEQ ID NO: 649425 - RNA, 22 nt, Human
gcaaugucuagucugagggcuu

SEQ ID NO: 649426 - RNA, 21 nt, Human
gauuugcagaaacuagacagg

SEQ ID NO: 649427 - RNA, 17 nt, Human
cuauuuuggagauuaaa

SEQ ID NO: 649428 - RNA, 22 nt, Human
cauaaguugcagagggugcauu

SEQ ID NO: 649429 - RNA, 22 nt, Human
gacaggcccgaguagcugauga

SEQ ID NO: 649430 - RNA, 22 nt, Human
aacacugagcuauuacggugga

SEQ ID NO: 649431 - RNA, 20 nt, Human
augcccuguccucuucuguu

SEQ ID NO: 649432 - RNA, 22 nt, Human
gaggacgggcuucauggggccu

SEQ ID NO: 649433 - RNA, 22 nt, Human
guuuuuauuguguaaauguggg

SEQ ID NO: 649434 - RNA, 22 nt, Human
aggcagagcugauguucuguga

SEQ ID NO: 649435 - RNA, 22 nt, Human
aaaucucacuguagucaaagug

SEQ ID NO: 649436 - RNA, 22 nt, Human
auagcauauaaguuauaaaacu

SEQ ID NO: 649437 - RNA, 22 nt, Human
uguaucuguuuagcacccagcc

SEQ ID NO: 649438 - RNA, 22 nt, Human
ggccaccucugcccuacugagu

SEQ ID NO: 649439 - RNA, 22 nt, Human
caggcagcgcucguggccuggc

SEQ ID NO: 649440 - RNA, 22 nt, Human
uaauucuuguucagagguagua

SEQ ID NO: 649441 - RNA, 22 nt, Human
caagaccucaaaaugagagggg

SEQ ID NO: 649442 - RNA, 22 nt, Human
ucccagggauuaggacauggau

SEQ ID NO: 649443 - RNA, 18 nt, Human
ugggcugccuggccucug

SEQ ID NO: 649444 - RNA, 22 nt, Human
cccugcuuucaaccuucuagcu

SEQ ID NO: 649445 - RNA, 22 nt, Human
uauauauaugcacacacaccua

SEQ ID NO: 649446 - RNA, 22 nt, Human
auuauauugaguauaaccagag

SEQ ID NO: 649447 - RNA, 22 nt, Human
ggaaggcugugcaguguuugca

SEQ ID NO: 649448 - RNA, 22 nt, Human
ucucuuggagguucuuccuguu

SEQ ID NO: 649449 - RNA, 22 nt, Human
uaugauauucuaaauugacacc

SEQ ID NO: 649450 - RNA, 22 nt, Human
uggaaagagguagaggaucugg

SEQ ID NO: 649451 - RNA, 22 nt, Human
aggcucagagagcuguguccau

SEQ ID NO: 649452 - RNA, 22 nt, Human
gaaccugagcccagguggcauu

SEQ ID NO: 649453 - RNA, 22 nt, Human
ccugagguuauccaucuaccug

SEQ ID NO: 649454 - RNA, 22 nt, Human
auuuuguuauaggagcugaaau

SEQ ID NO: 649455 - RNA, 22 nt, Human
aacuuguaaugaaaggcaauag

SEQ ID NO: 649456 - RNA, 17 nt, Human
uaguaaaugaguagagc

SEQ ID NO: 649457 - RNA, 19 nt, Human
aggucuaaucauaagacaa

SEQ ID NO: 649458 - RNA, 22 nt, Human
gcagaggcaaucagguaugugg

SEQ ID NO: 649459 - RNA, 22 nt, Human
agacaggccacucuggucuggu

SEQ ID NO: 649460 - RNA, 22 nt, Human
caaagugcugagauuacaggua

SEQ ID NO: 649461 - RNA, 22 nt, Human
ugggaagcuacucaugcaggca

SEQ ID NO: 649462 - RNA, 17 nt, Human
gcucugccucucccacc

SEQ ID NO: 649463 - RNA, 22 nt, Human
ucucagcugccugcccugcucc

SEQ ID NO: 649464 - RNA, 22 nt, Human
cuucucuggcagaugugugucc

SEQ ID NO: 649465 - RNA, 22 nt, Human
agcuggaacuggguuuguugga

SEQ ID NO: 649466 - RNA, 22 nt, Human
ugggggagauuagagcuucuua

SEQ ID NO: 649467 - RNA, 22 nt, Human
uucuaacuggcuugacaguuuc

SEQ ID NO: 649468 - RNA, 22 nt, Human
aauuuagauugauaaacaugga

SEQ ID NO: 649469 - RNA, 22 nt, Human
uuccaaaguuauucaagcagua

SEQ ID NO: 649470 - RNA, 22 nt, Human
ugggcucugcaucagugcccau

SEQ ID NO: 649471 - RNA, 22 nt, Human
caaguccucgcuucuagcugug

SEQ ID NO: 649472 - RNA, 22 nt, Human
uaaauacuuaguuuugugucua

SEQ ID NO: 649473 - RNA, 18 nt, Human
agcagagagugaauggga

SEQ ID NO: 649474 - RNA, 22 nt, Human
cccccuggcaggcuggccucuc

SEQ ID NO: 649475 - RNA, 22 nt, Human
cccagcucucucaguucugcuu

SEQ ID NO: 649476 - RNA, 22 nt, Human
cagcucugcuuccuuguacagg

SEQ ID NO: 649477 - RNA, 22 nt, Human
augaacucuucugguuauuuuu

SEQ ID NO: 649478 - RNA, 18 nt, Human
agcccagcggagugaauc

SEQ ID NO: 649479 - RNA, 22 nt, Human
gcaggcuugggacgagcuggag

SEQ ID NO: 649480 - RNA, 22 nt, Human
acaguggaugugauguccaggu

SEQ ID NO: 649481 - RNA, 22 nt, Human
ccauuguaaagaguauacuuug

SEQ ID NO: 649482 - RNA, 22 nt, Human
gaugugggguugagggaccagc

SEQ ID NO: 649483 - RNA, 22 nt, Human
ugugaauggacaauuaaaucua

SEQ ID NO: 649484 - RNA, 22 nt, Human
gacagcugaacaggugggauaa

SEQ ID NO: 649485 - RNA, 22 nt, Human
caucauuuguuugcaugcagga

SEQ ID NO: 649486 - RNA, 22 nt, Human
gugcaaaaguaauugcaguuuu

SEQ ID NO: 649487 - RNA, 22 nt, Human
agaaacugaacacaagagucgg

SEQ ID NO: 649488 - RNA, 22 nt, Human
aucucugauuuacagcaucucu

SEQ ID NO: 649489 - RNA, 22 nt, Human
uuuuuacacuuagcauugagcg

SEQ ID NO: 649490 - RNA, 22 nt, Human
agggaggaaggaacuccuucua

SEQ ID NO: 649491 - RNA, 22 nt, Human
ugacaaagugaggucuucagua

SEQ ID NO: 649492 - RNA, 22 nt, Human
aaagagaaaaagaucccggcuc

SEQ ID NO: 649493 - RNA, 22 nt, Human
aguccagucucacucuuggcag

SEQ ID NO: 649494 - RNA, 22 nt, Human
caucacaucagugugaacaguu

SEQ ID NO: 649495 - RNA, 22 nt, Human
uguaauggaagugggauugcau

SEQ ID NO: 649496 - RNA, 22 nt, Human
agguuggcugcucuuuuccuaa

SEQ ID NO: 649497 - RNA, 23 nt, Human
cacugcagcguggucuggcagga

SEQ ID NO: 649498 - RNA, 22 nt, Human
aaggcaggaugcggacccaucu

SEQ ID NO: 649499 - RNA, 19 nt, Human
ggcuucaguuuagcaggcu

SEQ ID NO: 649500 - RNA, 21 nt, Human
agguacaggucuugugagucu

SEQ ID NO: 649501 - RNA, 22 nt, Human
gcuguggguacaaauacacaau

SEQ ID NO: 649502 - RNA, 20 nt, Human
agcacauuaaacauacuccu

SEQ ID NO: 649503 - RNA, 22 nt, Human
ucacugcuuucaaaaauuauug

SEQ ID NO: 649504 - RNA, 22 nt, Human
uugcuuuaacuaguaaaugggg

SEQ ID NO: 649505 - RNA, 22 nt, Human
aguuuuauuaaauccacagaag

SEQ ID NO: 649506 - RNA, 22 nt, Human
acagaugguuauugucauuucu

SEQ ID NO: 649507 - RNA, 22 nt, Human
ccuuggugaucugggcuggaag

SEQ ID NO: 649508 - RNA, 22 nt, Human
guuuucucaucuccucaauggu

SEQ ID NO: 649509 - RNA, 22 nt, Human
cagcaucucacuucccagaagg

SEQ ID NO: 649510 - RNA, 22 nt, Human
agaaagugaacguguucaguuu

SEQ ID NO: 649511 - RNA, 22 nt, Human
ucagaaaugaucguuauucauu

SEQ ID NO: 649512 - RNA, 22 nt, Human
aucaaagugauuuguaaacagg

SEQ ID NO: 649513 - RNA, 22 nt, Human
aggauaaaggucauuauuccca

SEQ ID NO: 649514 - RNA, 22 nt, Human
uugaggcauuacuguaaugaga

SEQ ID NO: 649515 - RNA, 22 nt, Human
uuucuuuaggcuguguugccaa

SEQ ID NO: 649516 - RNA, 22 nt, Human
ucacacauucuagguauguuga

SEQ ID NO: 649517 - RNA, 22 nt, Human
aacaggcuuuuggaaaguuaca

SEQ ID NO: 649518 - RNA, 22 nt, Human
cccagggcuugagucauccaug

SEQ ID NO: 649519 - RNA, 22 nt, Human
cuggccugaucucaugcugucc

SEQ ID NO: 649520 - RNA, 22 nt, Human
ggaugugaaucugggcugagac

SEQ ID NO: 649521 - RNA, 22 nt, Human
agggagcucuaaguagagggac

SEQ ID NO: 649522 - RNA, 22 nt, Human
ccagggcuccccagaaguaccc

SEQ ID NO: 649523 - RNA, 22 nt, Human
ccaggacuucgaggcuacagug

SEQ ID NO: 649524 - RNA, 20 nt, Human
aauaaacuacugagagaugu

SEQ ID NO: 649525 - RNA, 22 nt, Human
augaaugaugccaguugaaaug

SEQ ID NO: 649526 - RNA, 22 nt, Human
gauauuuuuaguauuucugccu

SEQ ID NO: 649527 - RNA, 22 nt, Human
gugcagggcuggcaccggaggc

SEQ ID NO: 649528 - RNA, 22 nt, Human
gcugagguaggagguugcagug

SEQ ID NO: 649529 - RNA, 22 nt, Human
ucuggcuugaacaauuagguaa

SEQ ID NO: 649530 - RNA, 22 nt, Human
ugggaggaucgcuugagcccag

SEQ ID NO: 649531 - RNA, 18 nt, Human
auguguggcuuggggucc

SEQ ID NO: 649532 - RNA, 22 nt, Human
agggaugacucuuggcugauuc

SEQ ID NO: 649533 - RNA, 20 nt, Human
ucugcaaacaaguuuuagac

SEQ ID NO: 649534 - RNA, 22 nt, Human
guguuuagugugcagacaugca

SEQ ID NO: 649535 - RNA, 22 nt, Human
caguggcugagaguggacacug

SEQ ID NO: 649536 - RNA, 22 nt, Human
aguguggauuggcuggagcuau

SEQ ID NO: 649537 - RNA, 22 nt, Human
aguuuacauaaaaaggcagagg

SEQ ID NO: 649538 - RNA, 22 nt, Human
uacauucccccaauuaccaaug

SEQ ID NO: 649539 - RNA, 22 nt, Human
cagaggaacguuuggauugauu

SEQ ID NO: 649540 - RNA, 22 nt, Human
gagguugggaugagggauacag

SEQ ID NO: 649541 - RNA, 21 nt, Human
ugaaugagcaucuggacuuuu

SEQ ID NO: 649542 - RNA, 22 nt, Human
uccuucagccaugggcucucca

SEQ ID NO: 649543 - RNA, 22 nt, Human
aggucauuacaauuaucauuuu

SEQ ID NO: 649544 - RNA, 22 nt, Human
acauguauacaauguguaauga

SEQ ID NO: 649545 - RNA, 22 nt, Human
guggggcucccaucuccuggcu

SEQ ID NO: 649546 - RNA, 22 nt, Human
gagaagcaaucaguggccaccc

SEQ ID NO: 649547 - RNA, 22 nt, Human
ucuggcagagucagugcacaca

SEQ ID NO: 649548 - RNA, 22 nt, Human
gaauacaccaaggaaucagaau

SEQ ID NO: 649549 - RNA, 22 nt, Human
aguaugcauauuucaaaguaag

SEQ ID NO: 649550 - RNA, 22 nt, Human
aaaggcacuagaaguuaccuuu

SEQ ID NO: 649551 - RNA, 22 nt, Human
acccucaagauggaagcaguuu

SEQ ID NO: 649552 - RNA, 22 nt, Human
cagagcagagugauuguucugg

SEQ ID NO: 649553 - RNA, 22 nt, Human
ugcaggagcugcuguccugcuc

SEQ ID NO: 649554 - RNA, 22 nt, Human
uucuuuugggaauuacguaugc

SEQ ID NO: 649555 - RNA, 22 nt, Human
ugcagccucucugcuucaggaa

SEQ ID NO: 649556 - RNA, 22 nt, Human
uaucuuaaaugcaugauagaca

SEQ ID NO: 649557 - RNA, 22 nt, Human
uaagaacaguguuucaucucua

SEQ ID NO: 649558 - RNA, 22 nt, Human
auugcaaucuggugaaaacagu

SEQ ID NO: 649559 - RNA, 22 nt, Human
aauuucagaacccaaauuagcg

SEQ ID NO: 649560 - RNA, 22 nt, Human
uccaggccuaggccaagugauu

SEQ ID NO: 649561 - RNA, 22 nt, Human
ccgggggacuacugggaaacug

SEQ ID NO: 649562 - RNA, 23 nt, Human
aaccagauaaauggcuccagggc

SEQ ID NO: 649563 - RNA, 22 nt, Human
acacauauauacauauuugugc

SEQ ID NO: 649564 - RNA, 23 nt, Human
ucauuucacagugagcuuccuag

SEQ ID NO: 649565 - RNA, 22 nt, Human
aaaaccaaguuuuccuuagucu

SEQ ID NO: 649566 - RNA, 22 nt, Human
acucagaagauauaaugacuca

SEQ ID NO: 649567 - RNA, 21 nt, Human
cugcuuccucucuucauggca

SEQ ID NO: 649568 - RNA, 20 nt, Human
ugcuggaggcgccggcgcuc

SEQ ID NO: 649569 - RNA, 22 nt, Human
aagagggcagcacagguggguc

SEQ ID NO: 649570 - RNA, 22 nt, Human
uaucuuuauuaugucuaucugc

SEQ ID NO: 649571 - RNA, 22 nt, Human
ucccaggaaggauucggcauuu

SEQ ID NO: 649572 - RNA, 22 nt, Human
ccaaaccauccaucuccaggcu

SEQ ID NO: 649573 - RNA, 22 nt, Human
ugccucaggcaccuggcagguu

SEQ ID NO: 649574 - RNA, 22 nt, Human
cugugaguucauugugccaccu

SEQ ID NO: 649575 - RNA, 22 nt, Human
uuacuacagagagagcuccagu

SEQ ID NO: 649576 - RNA, 22 nt, Human
uguuacagugacuaauguuuua

SEQ ID NO: 649577 - RNA, 22 nt, Human
gagcugagcuuaacuccuugaa

SEQ ID NO: 649578 - RNA, 22 nt, Human
uucacacuuuggaauuccaccu

SEQ ID NO: 649579 - RNA, 22 nt, Human
auguuauugaugccugaggcuu

SEQ ID NO: 649580 - RNA, 23 nt, Human
cugugugugccgaggguggccac

SEQ ID NO: 649581 - RNA, 22 nt, Human
acacaguucuuucacuguuggu

SEQ ID NO: 649582 - RNA, 22 nt, Human
ggguguccagggcgugucugga

SEQ ID NO: 649583 - RNA, 22 nt, Human
gcaacagcauucucauugacau

SEQ ID NO: 649584 - RNA, 22 nt, Human
uacagacaaagagcaugcggua

SEQ ID NO: 649585 - RNA, 22 nt, Human
aaccuguuuugauuaacaagua

SEQ ID NO: 649586 - RNA, 22 nt, Human
auccugugcaaugacugcaucu

SEQ ID NO: 649587 - RNA, 22 nt, Human
uuauucugucaaacuuauacau

SEQ ID NO: 649588 - RNA, 22 nt, Human
ccccagggucaguguguggagg

SEQ ID NO: 649589 - RNA, 22 nt, Human
gggcuggaggaccggccucgga

SEQ ID NO: 649590 - RNA, 22 nt, Human
uguguacuugaaagggcagguc

SEQ ID NO: 649591 - RNA, 22 nt, Human
guggccaggacauugccaggca

SEQ ID NO: 649592 - RNA, 22 nt, Human
aaccccgcucaggcugggugag

SEQ ID NO: 649593 - RNA, 22 nt, Human
uuauaguauuagguacucaaca

SEQ ID NO: 649594 - RNA, 22 nt, Human
aaacuacacuuugggaccagca

SEQ ID NO: 649595 - RNA, 22 nt, Human
ggcagcaguuacaaaugugcag

SEQ ID NO: 649596 - RNA, 22 nt, Human
cugggcaccuuugcagcaggcu

SEQ ID NO: 649597 - RNA, 22 nt, Human
agagcagcacguuguccccaca

SEQ ID NO: 649598 - RNA, 22 nt, Human
cucaggacuuucaaauagaaau

SEQ ID NO: 649599 - RNA, 21 nt, Human
uacaaugcacaggagagccuc

SEQ ID NO: 649600 - RNA, 22 nt, Human
agugaggucauacuggagaggg

SEQ ID NO: 649601 - RNA, 22 nt, Human
auaauauaauccuacuucccau

SEQ ID NO: 649602 - RNA, 22 nt, Human
uuguaugagcuccaggaacuca

SEQ ID NO: 649603 - RNA, 22 nt, Human
cagguccaacuauuuaucugug

SEQ ID NO: 649604 - RNA, 22 nt, Human
agcacagagaaacuaagacauu

SEQ ID NO: 649605 - RNA, 20 nt, Human
cagaggcauuuucagacucu

SEQ ID NO: 649606 - RNA, 22 nt, Human
uuccagcaggguacuuguaauu

SEQ ID NO: 649607 - RNA, 22 nt, Human
uguguauaagugagaaugcugu

SEQ ID NO: 649608 - RNA, 22 nt, Human
auucucauuuuuauagaugaga

SEQ ID NO: 649609 - RNA, 22 nt, Human
ggggaggaagcucucaguucca

SEQ ID NO: 649610 - RNA, 22 nt, Human
caggagugaguuggggucuaca

SEQ ID NO: 649611 - RNA, 22 nt, Human
aacugucuaaggagaauaugaa

SEQ ID NO: 649612 - RNA, 22 nt, Human
ugcagggcuuccucuuggaguu

SEQ ID NO: 649613 - RNA, 22 nt, Human
acuuauauuugcuuuaugcuuc

SEQ ID NO: 649614 - RNA, 22 nt, Human
uggcauggaccuuggaagaauu

SEQ ID NO: 649615 - RNA, 20 nt, Human
ugcuggcacggguggacucc

SEQ ID NO: 649616 - RNA, 22 nt, Human
gaggcucagagugguuaaauaa

SEQ ID NO: 649617 - RNA, 22 nt, Human
agccucccuaugcaccuucagg

SEQ ID NO: 649618 - RNA, 22 nt, Human
ccaccucugagcccaaacccug

SEQ ID NO: 649619 - RNA, 22 nt, Human
ugcauaguucuccuuccuccuc

SEQ ID NO: 649620 - RNA, 22 nt, Human
caagauaucaaugacauaguau

SEQ ID NO: 649621 - RNA, 19 nt, Human
augcauuguuugaaguuga

SEQ ID NO: 649622 - RNA, 22 nt, Human
auuaaaagcuucccaagaguua

SEQ ID NO: 649623 - RNA, 22 nt, Human
gcacugugaauauacuagcaaa

SEQ ID NO: 649624 - RNA, 22 nt, Human
aggaauuuggaauuuuuccugu

SEQ ID NO: 649625 - RNA, 20 nt, Human
caccacagaauuggggacag

SEQ ID NO: 649626 - RNA, 22 nt, Human
guuaauuugcagcuuucgagcu

SEQ ID NO: 649627 - RNA, 19 nt, Human
ucucuggcaguucagagca

SEQ ID NO: 649628 - RNA, 22 nt, Human
cauucuuacacaauauuuuaau

SEQ ID NO: 649629 - RNA, 22 nt, Human
gagaggcucugaggacuggggu

SEQ ID NO: 649630 - RNA, 22 nt, Human
aggaagaugugcaaaguuggaa

SEQ ID NO: 649631 - RNA, 22 nt, Human
gagacacaguuaucaggcauac

SEQ ID NO: 649632 - RNA, 22 nt, Human
gaucugaagagcaaugaaauau

SEQ ID NO: 649633 - RNA, 22 nt, Human
cugucacugaugggcucaccag

SEQ ID NO: 649634 - RNA, 22 nt, Human
aagucugacuagaaucucuccc

SEQ ID NO: 649635 - RNA, 22 nt, Human
cucagcaggcacugugccuuac

SEQ ID NO: 649636 - RNA, 22 nt, Human
augaacaucggaaaugagacug

SEQ ID NO: 649637 - RNA, 22 nt, Human
ugaguggagacuguguguagag

SEQ ID NO: 649638 - RNA, 22 nt, Human
ucaaacauaucugauuuuccau

SEQ ID NO: 649639 - RNA, 22 nt, Human
aagucagaccuuguugauagcu

SEQ ID NO: 649640 - RNA, 22 nt, Human
uuauguuugaguauaugacuca

SEQ ID NO: 649641 - RNA, 22 nt, Human
aucuuuuacuacaaaucaggug

SEQ ID NO: 649642 - RNA, 22 nt, Human
uaaggcaaagugauuucuuaaa

SEQ ID NO: 649643 - RNA, 22 nt, Human
auuuccagcagcauauuugucu

SEQ ID NO: 649644 - RNA, 22 nt, Human
uuaaaaucacagucacccagua

SEQ ID NO: 649645 - RNA, 22 nt, Human
ccuuggcaaaccagggcagcug

SEQ ID NO: 649646 - RNA, 22 nt, Human
gcacauaaagggcaugggaggu

SEQ ID NO: 649647 - RNA, 22 nt, Human
gccucuguaggagugagagcau

SEQ ID NO: 649648 - RNA, 22 nt, Human
ucuuagcagugcugagaagaau

SEQ ID NO: 649649 - RNA, 22 nt, Human
ugucacaauuuauuucucuuga

SEQ ID NO: 649650 - RNA, 22 nt, Human
uugcuuuugggaaaacaugccu

SEQ ID NO: 649651 - RNA, 22 nt, Human
aaacaguuuauaacaugauacu

SEQ ID NO: 649652 - RNA, 22 nt, Human
agcagauggugucaugggaugg

SEQ ID NO: 649653 - RNA, 22 nt, Human
aagaagaugguuaacuuucagu

SEQ ID NO: 649654 - RNA, 22 nt, Human
ucugugugugccuguuaauauu

SEQ ID NO: 649655 - RNA, 22 nt, Human
auauauuuugaauagccucugu

SEQ ID NO: 649656 - RNA, 22 nt, Human
uauauucaaugauuaguaucag

SEQ ID NO: 649657 - RNA, 22 nt, Human
gacaauaaagugauacauggga

SEQ ID NO: 649658 - RNA, 22 nt, Human
cuucaaggcuuauuccaguugu

SEQ ID NO: 649659 - RNA, 22 nt, Human
aguauguauuuuauacuuacag

SEQ ID NO: 649660 - RNA, 22 nt, Human
uaaacuaucuguguuugaaguu

SEQ ID NO: 649661 - RNA, 22 nt, Human
cagagcaucgcgcagagagccu

SEQ ID NO: 649662 - RNA, 22 nt, Human
gcaguggcaccgcuggcucugg

SEQ ID NO: 649663 - RNA, 23 nt, Human
guuuuacaggugagaaaauggag

SEQ ID NO: 649664 - RNA, 22 nt, Human
gugcaaaaguaacugugguuuu

SEQ ID NO: 649665 - RNA, 22 nt, Human
ggcugcccucgucuacugccca

SEQ ID NO: 649666 - RNA, 22 nt, Human
guguggcuguuuagugacuuuc

SEQ ID NO: 649667 - RNA, 22 nt, Human
gaggcugcacuggcuaaaggcu

SEQ ID NO: 649668 - RNA, 22 nt, Human
aagccagcauuuucccauuccu

SEQ ID NO: 649669 - RNA, 22 nt, Human
uuaaguacuucccuguuggaca

SEQ ID NO: 649670 - RNA, 22 nt, Human
uggcagagugcggcauccccug

SEQ ID NO: 649671 - RNA, 22 nt, Human
uauugagacuuccaguauauga

SEQ ID NO: 649672 - RNA, 19 nt, Human
ucucccagcugagaagggc

SEQ ID NO: 649673 - RNA, 22 nt, Human
ggcccugugguuuugcaaaguc

SEQ ID NO: 649674 - RNA, 22 nt, Human
ccugauggcugucugggccuga

SEQ ID NO: 649675 - RNA, 22 nt, Human
cagggcuucgauggauggaugg

SEQ ID NO: 649676 - RNA, 22 nt, Human
cagcuuccccccgggcuugaga

SEQ ID NO: 649677 - RNA, 22 nt, Human
caaaugugacuuuugggcuucu

SEQ ID NO: 649678 - RNA, 22 nt, Human
gcuuucaaauccuaauuccaac

SEQ ID NO: 649679 - RNA, 22 nt, Human
ggcgggaggcugaggaguuggu

SEQ ID NO: 649680 - RNA, 22 nt, Human
ugcuuaaacccugaucaugugu

SEQ ID NO: 649681 - RNA, 22 nt, Human
auccuugagccaaugacugauu

SEQ ID NO: 649682 - RNA, 22 nt, Human
gaaaagcuaggccaguucagcu

SEQ ID NO: 649683 - RNA, 22 nt, Human
ugcaaagccacaaugaaaucag

SEQ ID NO: 649684 - RNA, 22 nt, Human
cagcccugcuuccccgcuaguu

SEQ ID NO: 649685 - RNA, 22 nt, Human
ugaggauggggagauggugucu

SEQ ID NO: 649686 - RNA, 22 nt, Human
ucaguuucuccaucgcuccagu

SEQ ID NO: 649687 - RNA, 22 nt, Human
ucagaagaagagacuccacagc

SEQ ID NO: 649688 - RNA, 22 nt, Human
augcuguagaucuuagccucua

SEQ ID NO: 649689 - RNA, 20 nt, Human
gagugggccauggagugaga

SEQ ID NO: 649690 - RNA, 22 nt, Human
ccaagagguugaggcugcagug

SEQ ID NO: 649691 - RNA, 22 nt, Human
ugguccugcaguaauagacauc

SEQ ID NO: 649692 - RNA, 22 nt, Human
uguuugaaguucuucugugacu

SEQ ID NO: 649693 - RNA, 22 nt, Human
ucagugcuucggcgagcaccua

SEQ ID NO: 649694 - RNA, 22 nt, Human
gggugcagcagagcuccucugu

SEQ ID NO: 649695 - RNA, 22 nt, Human
auugaaaggcaaaguaggaagc

SEQ ID NO: 649696 - RNA, 22 nt, Human
gugugaaaugguucucuuuguu

SEQ ID NO: 649697 - RNA, 22 nt, Human
ccuguuuaccacugaggggcag

SEQ ID NO: 649698 - RNA, 22 nt, Human
uagacacuuuagaaguaagggu

SEQ ID NO: 649699 - RNA, 22 nt, Human
gagaggaguagacacuuugguu

SEQ ID NO: 649700 - RNA, 22 nt, Human
gagggccaauggauuucaacug

SEQ ID NO: 649701 - RNA, 22 nt, Human
ucucuucuuguguuuuccugcc

SEQ ID NO: 649702 - RNA, 22 nt, Human
ucaguaacccugcuguucagag

SEQ ID NO: 649703 - RNA, 22 nt, Human
aggguggccaugagggagagau

SEQ ID NO: 649704 - RNA, 22 nt, Human
caaggcuugaauucugaugggu

SEQ ID NO: 649705 - RNA, 22 nt, Human
ccagaggugcucuuuggaagug

SEQ ID NO: 649706 - RNA, 22 nt, Human
accuggaccugccaccuaugag

SEQ ID NO: 649707 - RNA, 22 nt, Human
auucaguuucauggcacagcua

SEQ ID NO: 649708 - RNA, 22 nt, Human
auauuauucuaguaacagugau

SEQ ID NO: 649709 - RNA, 22 nt, Human
uuuggcucugcgucuucaccca

SEQ ID NO: 649710 - RNA, 22 nt, Human
caacauuucaaggucuuuagga

SEQ ID NO: 649711 - RNA, 22 nt, Human
acuccaggauguagaaucagag

SEQ ID NO: 649712 - RNA, 22 nt, Human
cuggucagcugaagccccacac

SEQ ID NO: 649713 - RNA, 20 nt, Human
aagcauggucaaaacuuaug

SEQ ID NO: 649714 - RNA, 22 nt, Human
gaaaucugaaucuucuguuggu

SEQ ID NO: 649715 - RNA, 22 nt, Human
ugguuuaccccuguccuauauc

SEQ ID NO: 649716 - RNA, 22 nt, Human
ucugaggaaucuugacacauuu

SEQ ID NO: 649717 - RNA, 22 nt, Human
acaauguucucugaguugugug

SEQ ID NO: 649718 - RNA, 18 nt, Human
aguuucagggcaggaaac

SEQ ID NO: 649719 - RNA, 22 nt, Human
guauuuuacuuacgcaugacuu

SEQ ID NO: 649720 - RNA, 22 nt, Human
aggccuccagccacaugccagu

SEQ ID NO: 649721 - RNA, 22 nt, Human
gagcacagaaggagaaauaugg

SEQ ID NO: 649722 - RNA, 22 nt, Human
auuuuaaggcuuauuuaaaggc

SEQ ID NO: 649723 - RNA, 22 nt, Human
ucugauaagacagcugauuuga

SEQ ID NO: 649724 - RNA, 22 nt, Human
uaaugaacaugcaucgugugua

SEQ ID NO: 649725 - RNA, 22 nt, Human
uuaacacuccuaacuacagucu

SEQ ID NO: 649726 - RNA, 22 nt, Human
uggcccugcuaugauccugcaa

SEQ ID NO: 649727 - RNA, 22 nt, Human
aggaaacaguugguaaugcaua

SEQ ID NO: 649728 - RNA, 22 nt, Human
agagagcccgggccagggcaca

SEQ ID NO: 649729 - RNA, 22 nt, Human
ugugaguaauaaagucauuuuu

SEQ ID NO: 649730 - RNA, 22 nt, Human
uauuauugcaaguauauaaagu

SEQ ID NO: 649731 - RNA, 22 nt, Human
ugagccagauaagggcucacgc

SEQ ID NO: 649732 - RNA, 17 nt, Human
ggcuuacaggugccagc

SEQ ID NO: 649733 - RNA, 22 nt, Human
uagauuaagaugccaguuuuga

SEQ ID NO: 649734 - RNA, 22 nt, Human
gggcagugucugcaaaugaaca

SEQ ID NO: 649735 - RNA, 22 nt, Human
caauugcugauaugcagaagac

SEQ ID NO: 649736 - RNA, 22 nt, Human
uaacacauauuucaagaguagu

SEQ ID NO: 649737 - RNA, 22 nt, Human
ggacacaguggaagacagcuug

SEQ ID NO: 649738 - RNA, 21 nt, Human
cugagggccgcagcugggcuc

SEQ ID NO: 649739 - RNA, 22 nt, Human
uccagcagccacaccucuggac

SEQ ID NO: 649740 - RNA, 22 nt, Human
gcagcaaucuucacagugucau

SEQ ID NO: 649741 - RNA, 22 nt, Human
ggagugacucacagcugggaca

SEQ ID NO: 649742 - RNA, 22 nt, Human
gccacccuugcgucacugacau

SEQ ID NO: 649743 - RNA, 22 nt, Human
cacuuuaaaacugacagcccuu

SEQ ID NO: 649744 - RNA, 22 nt, Human
caaggccacugcucagguuucc

SEQ ID NO: 649745 - RNA, 17 nt, Human
ucauuugggccucacaa

SEQ ID NO: 649746 - RNA, 22 nt, Human
cccuggcaugcaugucccuggc

SEQ ID NO: 649747 - RNA, 22 nt, Human
caagggcauugcuugggaccuu

SEQ ID NO: 649748 - RNA, 22 nt, Human
cccugagcgugaggaggaagua

SEQ ID NO: 649749 - RNA, 22 nt, Human
ucugccugcaguguggcagggc

SEQ ID NO: 649750 - RNA, 22 nt, Human
guauuuucaagagcaguaguau

SEQ ID NO: 649751 - RNA, 21 nt, Human
aucuuuauuacgcagagaaga

SEQ ID NO: 649752 - RNA, 20 nt, Human
gcagccguggagacuaggag

SEQ ID NO: 649753 - RNA, 22 nt, Human
ggcuuucuagaucuagcucugu

SEQ ID NO: 649754 - RNA, 22 nt, Human
auaaaauuugcuacuguuaaau

SEQ ID NO: 649755 - RNA, 22 nt, Human
gcaggaauauaguauuucgagg

SEQ ID NO: 649756 - RNA, 22 nt, Human
aaaugacaauaaaaguccaugc

SEQ ID NO: 649757 - RNA, 22 nt, Human
ucauuauaaacauaugcuaaag

SEQ ID NO: 649758 - RNA, 22 nt, Human
ucagggaaauucaagggagauu

SEQ ID NO: 649759 - RNA, 22 nt, Human
caaagguauucucauuuuggaa

SEQ ID NO: 649760 - RNA, 22 nt, Human
acacagaagaucucuuaaugcu

SEQ ID NO: 649761 - RNA, 22 nt, Human
ugugagaagggugaggcuuuua

SEQ ID NO: 649762 - RNA, 22 nt, Human
agcugagaaucuuccccagugu

SEQ ID NO: 649763 - RNA, 22 nt, Human
gaagaauauauaaugauuuugu

SEQ ID NO: 649764 - RNA, 20 nt, Human
aacaaucuagaagcuauucu

SEQ ID NO: 649765 - RNA, 22 nt, Human
ucagagcuuuggagaccaggaa

SEQ ID NO: 649766 - RNA, 22 nt, Human
ugcagcugagucacccagccau

SEQ ID NO: 649767 - RNA, 22 nt, Human
aggcugagcggggucccagagc

SEQ ID NO: 649768 - RNA, 22 nt, Human
ucauuuugggguuugucaucuu

SEQ ID NO: 649769 - RNA, 22 nt, Human
auauguauagccagucuuuagg

SEQ ID NO: 649770 - RNA, 22 nt, Human
aaaauagauaaugccaggguca

SEQ ID NO: 649771 - RNA, 22 nt, Human
uacauucauggugacuuguaug

SEQ ID NO: 649772 - RNA, 19 nt, Human
acccugagaggugguccgg

SEQ ID NO: 649773 - RNA, 22 nt, Human
agcagagccugggcuaggggug

SEQ ID NO: 649774 - RNA, 22 nt, Human
ucucaggcuuccuggugcugug

SEQ ID NO: 649775 - RNA, 22 nt, Human
aaggucuguucuaggugagggu

SEQ ID NO: 649776 - RNA, 21 nt, Human
cuggagcuuggugagaagugu

SEQ ID NO: 649777 - RNA, 22 nt, Human
auccauuuuugcaaaguuguuc

SEQ ID NO: 649778 - RNA, 22 nt, Human
cugcuguguuucugcuagaaaa

SEQ ID NO: 649779 - RNA, 22 nt, Human
aaaggucuuaagguuaagcagg

SEQ ID NO: 649780 - RNA, 23 nt, Human
uaucuuaccucccuucuuuccug

SEQ ID NO: 649781 - RNA, 22 nt, Human
uaacacugugucugccauaucc

SEQ ID NO: 649782 - RNA, 22 nt, Human
ucuguauugauucuguuaggca

SEQ ID NO: 649783 - RNA, 22 nt, Human
acauguuuaaguuuguuauaug

SEQ ID NO: 649784 - RNA, 22 nt, Human
uucucugugagggugcuggauu

SEQ ID NO: 649785 - RNA, 22 nt, Human
ucaugaguuuaagguuuaggcu

SEQ ID NO: 649786 - RNA, 22 nt, Human
ucugggccagugauuuuuccag

SEQ ID NO: 649787 - RNA, 22 nt, Human
uauuuuguuuuguauccacugu

SEQ ID NO: 649788 - RNA, 22 nt, Human
aaagacagacggaaaccugagg

SEQ ID NO: 649789 - RNA, 22 nt, Human
uagauuucgcugcaucucaauc

SEQ ID NO: 649790 - RNA, 22 nt, Human
ugacacugccgaaacuguagag

SEQ ID NO: 649791 - RNA, 22 nt, Human
gagggcugaugcuuacuuauuu

SEQ ID NO: 649792 - RNA, 22 nt, Human
ugguuccuucugcauuuucagc

SEQ ID NO: 649793 - RNA, 22 nt, Human
uuuaucacagaauaagaaguca

SEQ ID NO: 649794 - RNA, 21 nt, Human
agguggagugcuuagcaucca

SEQ ID NO: 649795 - RNA, 22 nt, Human
ccauccaggcugugggugagcu

SEQ ID NO: 649796 - RNA, 22 nt, Human
ucuguuucuauaaagacaagag

SEQ ID NO: 649797 - RNA, 22 nt, Human
ucaugaaaaauuuuccauguca

SEQ ID NO: 649798 - RNA, 22 nt, Human
acagucaagaaauggcagagcc

SEQ ID NO: 649799 - RNA, 22 nt, Human
acauucuagaagagcuucacuu

SEQ ID NO: 649800 - RNA, 22 nt, Human
cacaauuuggggugcccacugu

SEQ ID NO: 649801 - RNA, 22 nt, Human
guuuugaaaugaaagaaccaag

SEQ ID NO: 649802 - RNA, 22 nt, Human
acagggccuuauauccagaagg

SEQ ID NO: 649803 - RNA, 22 nt, Human
agcccugauuaaccuuggcuuu

SEQ ID NO: 649804 - RNA, 19 nt, Human
agguaggcaguggcaugga

SEQ ID NO: 649805 - RNA, 22 nt, Human
cagcaacucuccugugcucaaa

SEQ ID NO: 649806 - RNA, 22 nt, Human
uuggcuaugcuuguguucaguu

SEQ ID NO: 649807 - RNA, 22 nt, Human
aggagccaagaugcugucuggc

SEQ ID NO: 649808 - RNA, 19 nt, Human
cugagaauccuacuuauuu

SEQ ID NO: 649809 - RNA, 22 nt, Human
agccuggcuuaauccuccuuuu

SEQ ID NO: 649810 - RNA, 22 nt, Human
cagagcuggguuugggaaaccu

SEQ ID NO: 649811 - RNA, 22 nt, Human
ucauaaagcuugccugcagugu

SEQ ID NO: 649812 - RNA, 22 nt, Human
agaucauaugcaguaaugaacu

SEQ ID NO: 649813 - RNA, 22 nt, Human
acuugguuggucucacccuguu

SEQ ID NO: 649814 - RNA, 22 nt, Human
uuauggaauuugcaaaagguua

SEQ ID NO: 649815 - RNA, 22 nt, Human
caucccugguuccuguguuuaa

SEQ ID NO: 649816 - RNA, 22 nt, Human
gcuggcuuugaucuucccaucu

SEQ ID NO: 649817 - RNA, 20 nt, Human
ggcugcaggacucauuggcu

SEQ ID NO: 649818 - RNA, 22 nt, Human
uuccugagcuuuuaaccuaguc

SEQ ID NO: 649819 - RNA, 22 nt, Human
auuauucucuggaggaaagauu

SEQ ID NO: 649820 - RNA, 19 nt, Human
ucccugaguuccagcccag

SEQ ID NO: 649821 - RNA, 22 nt, Human
uaggccaguaaaauguuucagu

SEQ ID NO: 649822 - RNA, 18 nt, Human
gggcauggaugcagcauc

SEQ ID NO: 649823 - RNA, 22 nt, Human
uaccacagucugccauuagaug

SEQ ID NO: 649824 - RNA, 22 nt, Human
aaaggaaaauaaguaguuccau

SEQ ID NO: 649825 - RNA, 22 nt, Human
uggcugcccucaugggccugau

SEQ ID NO: 649826 - RNA, 22 nt, Human
gaguggggcgaagucggcgagu

SEQ ID NO: 649827 - RNA, 22 nt, Human
cucugcaugccacaugagugac

SEQ ID NO: 649828 - RNA, 22 nt, Human
cucagccccaauucuccccauu

SEQ ID NO: 649829 - RNA, 22 nt, Human
aagagcuggagcugcuacagga

SEQ ID NO: 649830 - RNA, 22 nt, Human
gcacaggcacagagggccacug

SEQ ID NO: 649831 - RNA, 22 nt, Human
gggcagcuagcccucuagccca

SEQ ID NO: 649832 - RNA, 22 nt, Human
caugcuggguaaagguggugaa

SEQ ID NO: 649833 - RNA, 22 nt, Human
gggaaauugugugagaucuuug

SEQ ID NO: 649834 - RNA, 22 nt, Human
gggcccugccuaaggaacacac

SEQ ID NO: 649835 - RNA, 21 nt, Human
cagugagguccccagccuagg

SEQ ID NO: 649836 - RNA, 22 nt, Human
ucuuuagagccuuuccucccga

SEQ ID NO: 649837 - RNA, 22 nt, Human
agugggagccagcagcuugggg

SEQ ID NO: 649838 - RNA, 22 nt, Human
cugauuaggcuaagcaagaggg

SEQ ID NO: 649839 - RNA, 22 nt, Human
augcuuuauguucuggcauuuu

SEQ ID NO: 649840 - RNA, 23 nt, Human
auuagaaaggcuuucuggugaaa

SEQ ID NO: 649841 - RNA, 22 nt, Human
acagagcuaaauuucaauccca

SEQ ID NO: 649842 - RNA, 21 nt, Human
gaccacagggaaggucuugca

SEQ ID NO: 649843 - RNA, 19 nt, Human
ugcugcuguccuugcaggg

SEQ ID NO: 649844 - RNA, 22 nt, Human
ccugggaaggucuuagcaucua

SEQ ID NO: 649845 - RNA, 22 nt, Human
agccaaaacaugugaguuuuga

SEQ ID NO: 649846 - RNA, 22 nt, Human
auggacagugugucuguuucca

SEQ ID NO: 649847 - RNA, 22 nt, Human
augaccaguuuccccacugucc

SEQ ID NO: 649848 - RNA, 22 nt, Human
aacagaaaagguagguggcuuu

SEQ ID NO: 649849 - RNA, 22 nt, Human
aaugaaugugauuaacuucaag

SEQ ID NO: 649850 - RNA, 22 nt, Human
guaaaucccauccuuucucugg

SEQ ID NO: 649851 - RNA, 22 nt, Human
cucugagcugaaacaugagcau

SEQ ID NO: 649852 - RNA, 22 nt, Human
uagugcuuuauuguuccugaaa

SEQ ID NO: 649853 - RNA, 22 nt, Human
uagauacauuuuucuuuccugu

SEQ ID NO: 649854 - RNA, 18 nt, Human
uuggcuuugagaacuggu

SEQ ID NO: 649855 - RNA, 22 nt, Human
uacuuuacaguauuagauaauu

SEQ ID NO: 649856 - RNA, 22 nt, Human
cauuucaaaagaauugccagaa

SEQ ID NO: 649857 - RNA, 22 nt, Human
uuacagagguauguaugucucu

SEQ ID NO: 649858 - RNA, 22 nt, Human
ccaggaagcucugcuccacggg

SEQ ID NO: 649859 - RNA, 22 nt, Human
agggaggucuggcugcccugag

SEQ ID NO: 649860 - RNA, 22 nt, Human
guaacagaggguuugcagauau

SEQ ID NO: 649861 - RNA, 22 nt, Human
agguguggcuugaagucucuau

SEQ ID NO: 649862 - RNA, 19 nt, Human
ucccucagucugccaggcc

SEQ ID NO: 649863 - RNA, 20 nt, Human
aggauggcaagcaagugcau

SEQ ID NO: 649864 - RNA, 22 nt, Human
gccucacauauucaugguuacu

SEQ ID NO: 649865 - RNA, 22 nt, Human
guguguguacucuguauauaaa

SEQ ID NO: 649866 - RNA, 22 nt, Human
guucauuguguguggucuucuu

SEQ ID NO: 649867 - RNA, 22 nt, Human
ucccaggaauugaagccagugu

SEQ ID NO: 649868 - RNA, 22 nt, Human
cuagaaauauuuuacagucaag

SEQ ID NO: 649869 - RNA, 22 nt, Human
aguggcauuuuaauggauguca

SEQ ID NO: 649870 - RNA, 22 nt, Human
uuuucuuaugugcagcuauaug

SEQ ID NO: 649871 - RNA, 22 nt, Human
acagcagaggaaaagucugaua

SEQ ID NO: 649872 - RNA, 22 nt, Human
cugccaggauucugugaacccc

SEQ ID NO: 649873 - RNA, 22 nt, Human
cacaccugugagucucggcuug

SEQ ID NO: 649874 - RNA, 19 nt, Human
gcucaacagcucggguccu

SEQ ID NO: 649875 - RNA, 22 nt, Human
gugcucuggcuggucucccggu

SEQ ID NO: 649876 - RNA, 23 nt, Human
ggcucugugcugggccugcagga

SEQ ID NO: 649877 - RNA, 20 nt, Human
auggagugaagagugaaagc

SEQ ID NO: 649878 - RNA, 22 nt, Human
gcaugguggagucugagcaggg

SEQ ID NO: 649879 - RNA, 22 nt, Human
agaggaugguugaggaagaccu

SEQ ID NO: 649880 - RNA, 22 nt, Human
gaggcuaagguucugccagaag

SEQ ID NO: 649881 - RNA, 22 nt, Human
caugcuuaauuggagcauucau

SEQ ID NO: 649882 - RNA, 22 nt, Human
gcaggagagccagcaggcuucc

SEQ ID NO: 649883 - RNA, 23 nt, Human
ucaguuuguauaauccauaugca

SEQ ID NO: 649884 - RNA, 18 nt, Human
aggccacacuccagaaca

SEQ ID NO: 649885 - RNA, 22 nt, Human
aucuugggaauuuuccaggagu

SEQ ID NO: 649886 - RNA, 22 nt, Human
uuucuacaguacugauuucaua

SEQ ID NO: 649887 - RNA, 22 nt, Human
cagagccuuccuagcagacucu

SEQ ID NO: 649888 - RNA, 22 nt, Human
agggccaguucuaccucugaau

SEQ ID NO: 649889 - RNA, 22 nt, Human
ugcagcaguguuccuuggcuug

SEQ ID NO: 649890 - RNA, 22 nt, Human
auuuugcuacaguugguggaaa

SEQ ID NO: 649891 - RNA, 22 nt, Human
aucugcugucacauguuugaag

SEQ ID NO: 649892 - RNA, 22 nt, Human
augucacaugguucuggggccu

SEQ ID NO: 649893 - RNA, 22 nt, Human
gacaaugguggauacaugucau

SEQ ID NO: 649894 - RNA, 22 nt, Human
uucuggcuacccuccuaauguu

SEQ ID NO: 649895 - RNA, 22 nt, Human
ucuguguuuuaaacaguagaaa

SEQ ID NO: 649896 - RNA, 21 nt, Human
ugacccuucuagcagaacaca

SEQ ID NO: 649897 - RNA, 22 nt, Human
caguagccacuagacacaugua

SEQ ID NO: 649898 - RNA, 22 nt, Human
aaauucuucagguaauuuugau

SEQ ID NO: 649899 - RNA, 22 nt, Human
uuuaaucaggcaaagcauaaua

SEQ ID NO: 649900 - RNA, 22 nt, Human
uuguuaaauggaugcagaauaa

SEQ ID NO: 649901 - RNA, 22 nt, Human
ucagucuucuaaagggaugcaa

SEQ ID NO: 649902 - RNA, 20 nt, Human
agguggcuccugcugggggu

SEQ ID NO: 649903 - RNA, 22 nt, Human
ggcuccaugcugagcuuugaau

SEQ ID NO: 649904 - RNA, 22 nt, Human
cacuggugucugagcaggguga

SEQ ID NO: 649905 - RNA, 22 nt, Human
uccagucccuugccuccacagc

SEQ ID NO: 649906 - RNA, 22 nt, Human
aaauggcuccaguugacuuuuu

SEQ ID NO: 649907 - RNA, 22 nt, Human
cuccuggaccagggcuauuggg

SEQ ID NO: 649908 - RNA, 22 nt, Human
ugaggggcauguguuuacacau

SEQ ID NO: 649909 - RNA, 22 nt, Human
cucagaggaggcagggugugcc

SEQ ID NO: 649910 - RNA, 22 nt, Human
cacugcuuuuucuccucacugg

SEQ ID NO: 649911 - RNA, 22 nt, Human
ugcucacagcccagaacauaau

SEQ ID NO: 649912 - RNA, 22 nt, Human
ucccugcagcaggugaucaaug

SEQ ID NO: 649913 - RNA, 22 nt, Human
ugaaggccucugguacaugcca

SEQ ID NO: 649914 - RNA, 19 nt, Human
guguggcagagagugacca

SEQ ID NO: 649915 - RNA, 22 nt, Human
gaaauaacagcucuggaagagu

SEQ ID NO: 649916 - RNA, 22 nt, Human
cuuauucaaugcuggaaauguu

SEQ ID NO: 649917 - RNA, 22 nt, Human
ucagcagaaguauagaggccau

SEQ ID NO: 649918 - RNA, 22 nt, Human
auuugcuucauagaucugugga

SEQ ID NO: 649919 - RNA, 22 nt, Human
uguggggcucccuggcagccug

SEQ ID NO: 649920 - RNA, 22 nt, Human
ugucuaauggcaauuucaugug

SEQ ID NO: 649921 - RNA, 22 nt, Human
aguuuacaguucucaucgcaac

SEQ ID NO: 649922 - RNA, 22 nt, Human
cagaggacaauagaauggaaag

SEQ ID NO: 649923 - RNA, 21 nt, Human
ugagcaggagucaugggaaug

SEQ ID NO: 649924 - RNA, 22 nt, Human
uccuugaaugaagagaggugac

SEQ ID NO: 649925 - RNA, 22 nt, Human
cauuuucaugaguuucuguuca

SEQ ID NO: 649926 - RNA, 23 nt, Human
cccaagccugugcccucugacuc

SEQ ID NO: 649927 - RNA, 22 nt, Human
gaggcucagagggacuuucaag

SEQ ID NO: 649928 - RNA, 18 nt, Human
ggccagagggaggguccc

SEQ ID NO: 649929 - RNA, 22 nt, Human
ugaaauuccaggagaguuaaaa

SEQ ID NO: 649930 - RNA, 22 nt, Human
acugggcagcagcucgagccgc

SEQ ID NO: 649931 - RNA, 22 nt, Human
ucacucagguucaugucuuugu

SEQ ID NO: 649932 - RNA, 22 nt, Human
uggcaaggcugugggggcagag

SEQ ID NO: 649933 - RNA, 22 nt, Human
caaauagacucuagaauuuauu

SEQ ID NO: 649934 - RNA, 22 nt, Human
uagguaagauguuaacagcuga

SEQ ID NO: 649935 - RNA, 22 nt, Human
acagaguuaauggauaggcagg

SEQ ID NO: 649936 - RNA, 22 nt, Human
caugggagguuggcuuggcaug

SEQ ID NO: 649937 - RNA, 22 nt, Human
ccaggaagcggugagggcugcc

SEQ ID NO: 649938 - RNA, 22 nt, Human
uacuuugaccaccaucugauua

SEQ ID NO: 649939 - RNA, 22 nt, Human
ugagcccuaauuuacaacaucu

SEQ ID NO: 649940 - RNA, 22 nt, Human
agcagcugcagggagggucugc

SEQ ID NO: 649941 - RNA, 23 nt, Human
uaggcucuguagguagagauggg

SEQ ID NO: 649942 - RNA, 22 nt, Human
gcaccuggacagugacccuagc

SEQ ID NO: 649943 - RNA, 18 nt, Human
cagggcuguggggucacu

SEQ ID NO: 649944 - RNA, 20 nt, Human
uccugaauuuccuuucugcu

SEQ ID NO: 649945 - RNA, 22 nt, Human
cagcuucuauuuaucuuugugu

SEQ ID NO: 649946 - RNA, 23 nt, Human
aucuaauuucuccaaaucucuac

SEQ ID NO: 649947 - RNA, 22 nt, Human
gacuagaagggcaagagucccu

SEQ ID NO: 649948 - RNA, 22 nt, Human
acuccagacacagacacuauga

SEQ ID NO: 649949 - RNA, 22 nt, Human
aggcagcaagauuauuuaaucc

SEQ ID NO: 649950 - RNA, 21 nt, Human
uucuucuuggacuguuuuggc

SEQ ID NO: 649951 - RNA, 22 nt, Human
aaccucuuugugaaugucauga

SEQ ID NO: 649952 - RNA, 22 nt, Human
agccuccaucccaugcacaaag

SEQ ID NO: 649953 - RNA, 23 nt, Human
uggcugagguccagguaguuuca

SEQ ID NO: 649954 - RNA, 22 nt, Human
cagcagcagagauacugguuuc

SEQ ID NO: 649955 - RNA, 22 nt, Human
ucuucacauucacguaacauag

SEQ ID NO: 649956 - RNA, 19 nt, Human
ccccaggguaggcuagggg

SEQ ID NO: 649957 - RNA, 22 nt, Human
auauuacauaaacaugagugaa

SEQ ID NO: 649958 - RNA, 22 nt, Human
ugauucaagcuacuguuacugg

SEQ ID NO: 649959 - RNA, 22 nt, Human
uuacaaguuucuggcuucaucc

SEQ ID NO: 649960 - RNA, 22 nt, Human
cagguggguacaucacagagac

SEQ ID NO: 649961 - RNA, 22 nt, Human
acagcagaucuggcuacagguu

SEQ ID NO: 649962 - RNA, 22 nt, Human
uuccugggauuauugucaagca

SEQ ID NO: 649963 - RNA, 21 nt, Human
ucaggcugaugucgauguuag

SEQ ID NO: 649964 - RNA, 22 nt, Human
gcuucuguucaaggauauaagg

SEQ ID NO: 649965 - RNA, 22 nt, Human
auuggaaauacaguagaaaaau

SEQ ID NO: 649966 - RNA, 22 nt, Human
ugaucaaaacauuacuccacca

SEQ ID NO: 649967 - RNA, 22 nt, Human
cacaugaugguggaagccauag

SEQ ID NO: 649968 - RNA, 22 nt, Human
ggugugggcccugaugucagca

SEQ ID NO: 649969 - RNA, 22 nt, Human
uaaaauagcuuaugucuuuuga

SEQ ID NO: 649970 - RNA, 22 nt, Human
agcaaggccuacagagaggggc

SEQ ID NO: 649971 - RNA, 22 nt, Human
gcucccagggaccgcagggcag

SEQ ID NO: 649972 - RNA, 22 nt, Human
gccuggcuccuaaggacuggcu

SEQ ID NO: 649973 - RNA, 20 nt, Human
ucuuuagauuuaucuuaugu

SEQ ID NO: 649974 - RNA, 22 nt, Human
uccaagaaucacugacacagcu

SEQ ID NO: 649975 - RNA, 20 nt, Human
uguuuacucuagaggguaga

SEQ ID NO: 649976 - RNA, 22 nt, Human
uuaacaggaguaacucuagaaa

SEQ ID NO: 649977 - RNA, 22 nt, Human
gcagccccaggagacgcccagg

SEQ ID NO: 649978 - RNA, 22 nt, Human
cuuccagcugauuacaggcuau

SEQ ID NO: 649979 - RNA, 22 nt, Human
uccccugcagcgccugcuucua

SEQ ID NO: 649980 - RNA, 22 nt, Human
caauaugcaagcuauuaaguau

SEQ ID NO: 649981 - RNA, 22 nt, Human
gcugagcagguuugaugcuuuu

SEQ ID NO: 649982 - RNA, 22 nt, Human
acaguguucugaaaguugaggg

SEQ ID NO: 649983 - RNA, 22 nt, Human
accugggaguaugcagugguga

SEQ ID NO: 649984 - RNA, 22 nt, Human
uuagcaaaaauaucucauauua

SEQ ID NO: 649985 - RNA, 22 nt, Human
agcucagaaaugccaguaggua

SEQ ID NO: 649986 - RNA, 22 nt, Human
ucgugucagaucagagguuccu

SEQ ID NO: 649987 - RNA, 22 nt, Human
ucuuuacacaagacaagaauaa

SEQ ID NO: 649988 - RNA, 18 nt, Human
caagagcugcuccuggcc

SEQ ID NO: 649989 - RNA, 22 nt, Human
aaaguaaccuaguaauaguguc

SEQ ID NO: 649990 - RNA, 22 nt, Human
cacaauuagcagcucuuuauuu

SEQ ID NO: 649991 - RNA, 22 nt, Human
gugcuuccuguauugauuccau

SEQ ID NO: 649992 - RNA, 22 nt, Human
agcuuaggaggaugaugaacau

SEQ ID NO: 649993 - RNA, 22 nt, Human
ccuuggcuuaccuucugugugg

SEQ ID NO: 649994 - RNA, 21 nt, Human
ugaacaaaguucuuaucguga

SEQ ID NO: 649995 - RNA, 22 nt, Human
caucuuugcacccucaaaaccu

SEQ ID NO: 649996 - RNA, 22 nt, Human
aaagugcugggauuaccggcau

SEQ ID NO: 649997 - RNA, 20 nt, Human
aggcccugccagggacggag

SEQ ID NO: 649998 - RNA, 22 nt, Human
uaagugaauuguccgaggacac

SEQ ID NO: 649999 - RNA, 22 nt, Human
gauuuacagcuauacccaaugg

SEQ ID NO: 650000 - RNA, 22 nt, Human
ucagaagacuacuaggacacau

SEQ ID NO: 650001 - RNA, 22 nt, Human
ugccaggccucaggagucucca

SEQ ID NO: 650002 - RNA, 22 nt, Human
cacacaugucucuccaugcucu

SEQ ID NO: 650003 - RNA, 22 nt, Human
gcagcagggagcagggguguca

SEQ ID NO: 650004 - RNA, 22 nt, Human
gaauagcuuccuuuuuuccaaa

SEQ ID NO: 650005 - RNA, 17 nt, Human
agcugccucucccacca

SEQ ID NO: 650006 - RNA, 22 nt, Human
gcagcgacaggcacuggucagg

SEQ ID NO: 650007 - RNA, 22 nt, Human
cucccugcccugugaguuggcc

SEQ ID NO: 650008 - RNA, 22 nt, Human
uaggacaggcuaaaagggauaa

SEQ ID NO: 650009 - RNA, 22 nt, Human
cagggcucaccacugggauccu

SEQ ID NO: 650010 - RNA, 22 nt, Human
cugucagguuggucucagagcu

SEQ ID NO: 650011 - RNA, 22 nt, Human
ccuccugggagagcacggaggg

SEQ ID NO: 650012 - RNA, 22 nt, Human
uaagacuucauuaguaauaugg

SEQ ID NO: 650013 - RNA, 22 nt, Human
gaaauacaguugggaggaggua

SEQ ID NO: 650014 - RNA, 22 nt, Human
uaaugcuuccuauauagcacuc

SEQ ID NO: 650015 - RNA, 21 nt, Human
aggaaaggaaguccccagggu

SEQ ID NO: 650016 - RNA, 22 nt, Human
ucucuugacugcuaaaauuaga

SEQ ID NO: 650017 - RNA, 18 nt, Human
uggaggaaucacaauggc

SEQ ID NO: 650018 - RNA, 22 nt, Human
gaguagaaaguaaaguacgaau

SEQ ID NO: 650019 - RNA, 22 nt, Human
gcuuuuuuagguaagacccagg

SEQ ID NO: 650020 - RNA, 21 nt, Human
caauuacagauggcucagggg

SEQ ID NO: 650021 - RNA, 22 nt, Human
ccucugcccuuuuccuguauca

SEQ ID NO: 650022 - RNA, 22 nt, Human
gccaagcuuugcaggaguguug

SEQ ID NO: 650023 - RNA, 22 nt, Human
ccugcaggggagagacuucuag

SEQ ID NO: 650024 - RNA, 22 nt, Human
uuccugugaagccgguggucuc

SEQ ID NO: 650025 - RNA, 22 nt, Human
gcuggggaggcagcagagaaca

SEQ ID NO: 650026 - RNA, 22 nt, Human
gcaccccuggacgguagggcca

SEQ ID NO: 650027 - RNA, 22 nt, Human
gugaggggccaagaguagggca

SEQ ID NO: 650028 - RNA, 22 nt, Human
aaauacagaguugcuuaaaagc

SEQ ID NO: 650029 - RNA, 22 nt, Human
uuagaaaaauguucaguaguuu

SEQ ID NO: 650030 - RNA, 19 nt, Human
ccucuucucuggcagcaga

SEQ ID NO: 650031 - RNA, 22 nt, Human
uaucacacauaacuaagcugca

SEQ ID NO: 650032 - RNA, 22 nt, Human
uucugcugcgacccaggaguua

SEQ ID NO: 650033 - RNA, 22 nt, Human
gaggagcuggcagcgucuccgc

SEQ ID NO: 650034 - RNA, 22 nt, Human
ugauagaaaggaaauuaauugg

SEQ ID NO: 650035 - RNA, 22 nt, Human
gaggaaaauggaguguaauuaa

SEQ ID NO: 650036 - RNA, 22 nt, Human
acagcuccuaacaaaggcucuc

SEQ ID NO: 650037 - RNA, 19 nt, Human
cagaggcaccagguauaga

SEQ ID NO: 650038 - RNA, 22 nt, Human
cagcaggugucuagcaaggguc

SEQ ID NO: 650039 - RNA, 22 nt, Human
gcccuggagcuagacuaggaca

SEQ ID NO: 650040 - RNA, 22 nt, Human
agcagcaaagccaggggauggg

SEQ ID NO: 650041 - RNA, 21 nt, Human
aucugcuuagguuuguucaga

SEQ ID NO: 650042 - RNA, 21 nt, Human
ucauuucucuauguauuucac

SEQ ID NO: 650043 - RNA, 22 nt, Human
cccaggagcuucucucugccuc

SEQ ID NO: 650044 - RNA, 22 nt, Human
gagugcugaaugcgagaacaga

SEQ ID NO: 650045 - RNA, 22 nt, Human
gccuggcugccggccuuggcaa

SEQ ID NO: 650046 - RNA, 22 nt, Human
gaggcaagagaagccagcuuuc

SEQ ID NO: 650047 - RNA, 22 nt, Human
cugcugcucagugucaucaugu

SEQ ID NO: 650048 - RNA, 23 nt, Human
gggagccaggaccucgcgcccca

SEQ ID NO: 650049 - RNA, 22 nt, Human
guuucuuauuugcagguugcuu

SEQ ID NO: 650050 - RNA, 22 nt, Human
uccagcccgggggcaggugacc

SEQ ID NO: 650051 - RNA, 22 nt, Human
aguuacaagcuauuuuacuuaa

SEQ ID NO: 650052 - RNA, 22 nt, Human
ucccagagaagagcuggaugga

SEQ ID NO: 650053 - RNA, 22 nt, Human
ugagcugugucuuggugagagu

SEQ ID NO: 650054 - RNA, 22 nt, Human
ucuagggagcucuagcaguggu

SEQ ID NO: 650055 - RNA, 22 nt, Human
auuucuagacuuagaacucuua

SEQ ID NO: 650056 - RNA, 22 nt, Human
aggggagguguccccaaaucuc

SEQ ID NO: 650057 - RNA, 22 nt, Human
gacaauguguugaaagggaaaa

SEQ ID NO: 650058 - RNA, 22 nt, Human
acuggggagugguuuugggaag

SEQ ID NO: 650059 - RNA, 22 nt, Human
acacaggaggaggauggugguc

SEQ ID NO: 650060 - RNA, 22 nt, Human
cuuggcaguuucggaaggauga

SEQ ID NO: 650061 - RNA, 22 nt, Human
uggcucugggcaccguguccac

SEQ ID NO: 650062 - RNA, 22 nt, Human
aaaguuuuauaugcugcagcga

SEQ ID NO: 650063 - RNA, 22 nt, Human
ucuaggccguaggauacagagc

SEQ ID NO: 650064 - RNA, 22 nt, Human
acccucccauuuccauguagca

SEQ ID NO: 650065 - RNA, 22 nt, Human
uccugucugcucacagagcugg

SEQ ID NO: 650066 - RNA, 22 nt, Human
uauuccaaaauaguuaagcacu

SEQ ID NO: 650067 - RNA, 22 nt, Human
ucucugugguaugucauagcaa

SEQ ID NO: 650068 - RNA, 22 nt, Human
cagagagggagcaguagucucu

SEQ ID NO: 650069 - RNA, 22 nt, Human
aaguguagauuauggagugucu

SEQ ID NO: 650070 - RNA, 22 nt, Human
gauuucuugauaauucaaaucc

SEQ ID NO: 650071 - RNA, 22 nt, Human
auaaaggcagaguagggaggaa

SEQ ID NO: 650072 - RNA, 22 nt, Human
gcccuccaugagacacagugua

SEQ ID NO: 650073 - RNA, 22 nt, Human
agguagaggccuccaggcagca

SEQ ID NO: 650074 - RNA, 23 nt, Human
uacauucuguauuuuuauagagu

SEQ ID NO: 650075 - RNA, 22 nt, Human
cugggaguugacgaggcuugua

SEQ ID NO: 650076 - RNA, 22 nt, Human
uucuggaauauuugacacaauu

SEQ ID NO: 650077 - RNA, 22 nt, Human
auuugacauugacacaccuaug

SEQ ID NO: 650078 - RNA, 22 nt, Human
gucccuggggaaucagcuggag

SEQ ID NO: 650079 - RNA, 22 nt, Human
gcuuaugauguuuacauaaaag

SEQ ID NO: 650080 - RNA, 22 nt, Human
uuuaguaaguucacugcaaagc

SEQ ID NO: 650081 - RNA, 22 nt, Human
gggggccuuguuaguggaugga

SEQ ID NO: 650082 - RNA, 22 nt, Human
uuucuccaauguaucagcacac

SEQ ID NO: 650083 - RNA, 22 nt, Human
uauguucuagacuuuugcugug

SEQ ID NO: 650084 - RNA, 22 nt, Human
aaggccaggagacuuggaguca

SEQ ID NO: 650085 - RNA, 22 nt, Human
cagggcuucgugucucagugcu

SEQ ID NO: 650086 - RNA, 22 nt, Human
aggcuucuggggcaccgagcga

SEQ ID NO: 650087 - RNA, 22 nt, Human
caagcagauauuuuagucaaga

SEQ ID NO: 650088 - RNA, 20 nt, Human
uuugagaccagucugcccaa

SEQ ID NO: 650089 - RNA, 22 nt, Human
ugcccugcagacccugcagugu

SEQ ID NO: 650090 - RNA, 22 nt, Human
auucugaguacaacaagauguu

SEQ ID NO: 650091 - RNA, 22 nt, Human
agguagaaggaccagaauuuau

SEQ ID NO: 650092 - RNA, 22 nt, Human
gcagaggauagcauaugaaccu

SEQ ID NO: 650093 - RNA, 22 nt, Human
uugcuuuauucacaucuauauu

SEQ ID NO: 650094 - RNA, 22 nt, Human
uggcagggaguucguucacaac

SEQ ID NO: 650095 - RNA, 22 nt, Human
ggaggggaugguuugacccugg

SEQ ID NO: 650096 - RNA, 22 nt, Human
cugccagcucaaagcgcagcua

SEQ ID NO: 650097 - RNA, 22 nt, Human
ggugagcagcugucuguaugga

SEQ ID NO: 650098 - RNA, 20 nt, Human
cuaagagguccuuccacauc

SEQ ID NO: 650099 - RNA, 22 nt, Human
guauugcaauuacucuucuucu

SEQ ID NO: 650100 - RNA, 22 nt, Human
auuuuaguaccucaaguaucca

SEQ ID NO: 650101 - RNA, 23 nt, Human
ggucccugacagcgggcaaguug

SEQ ID NO: 650102 - RNA, 22 nt, Human
gcguuuguuuugcuggcgccag

SEQ ID NO: 650103 - RNA, 22 nt, Human
uuucagaaauggcacugaaauc

SEQ ID NO: 650104 - RNA, 22 nt, Human
cugugcuggugaaacccacaga

SEQ ID NO: 650105 - RNA, 22 nt, Human
uuugugaauucuuggaagauug

SEQ ID NO: 650106 - RNA, 22 nt, Human
cuggguucuuggcacagcagga

SEQ ID NO: 650107 - RNA, 22 nt, Human
cuggaaaucacuacuagucaau

SEQ ID NO: 650108 - RNA, 22 nt, Human
uuuuauuaguggcuagaugggg

SEQ ID NO: 650109 - RNA, 22 nt, Human
ugggagcucugagccugcugug

SEQ ID NO: 650110 - RNA, 22 nt, Human
gagcuuggacaagcucugaagg

SEQ ID NO: 650111 - RNA, 22 nt, Human
caggcccaggggucuggcccac

SEQ ID NO: 650112 - RNA, 22 nt, Human
agucuuagaacuacagugccua

SEQ ID NO: 650113 - RNA, 22 nt, Human
cccaggcugaguuagagguguc

SEQ ID NO: 650114 - RNA, 22 nt, Human
agcugccuggagccagaguuga

SEQ ID NO: 650115 - RNA, 22 nt, Human
auguauuugcguauggacauac

SEQ ID NO: 650116 - RNA, 22 nt, Human
aucauccauggcugaucauaaa

SEQ ID NO: 650117 - RNA, 22 nt, Human
uuauggaauacuuaugcugcag

SEQ ID NO: 650118 - RNA, 22 nt, Human
guuuuuaucuaauagcaguuau

SEQ ID NO: 650119 - RNA, 22 nt, Human
aagauguugcaagggacucuuc

SEQ ID NO: 650120 - RNA, 23 nt, Human
agcaggauaauuuuauuaugccc

SEQ ID NO: 650121 - RNA, 23 nt, Human
aguguguaagguacuuugcugcu

SEQ ID NO: 650122 - RNA, 22 nt, Human
cccuaaggacaccugcugucca

SEQ ID NO: 650123 - RNA, 22 nt, Human
cacugcuauuauuagacaaugu

SEQ ID NO: 650124 - RNA, 22 nt, Human
ucauuuuugucuccgguuugug

SEQ ID NO: 650125 - RNA, 22 nt, Human
gaggcccucuugccacaaugaa

SEQ ID NO: 650126 - RNA, 22 nt, Human
cuuucauucuuagauauuagug

SEQ ID NO: 650127 - RNA, 22 nt, Human
uuucuuuguaguagcauaauca

SEQ ID NO: 650128 - RNA, 22 nt, Human
ugugcgugggcacacacauaug

SEQ ID NO: 650129 - RNA, 17 nt, Human
agaaaagagaccagcag

SEQ ID NO: 650130 - RNA, 22 nt, Human
ucucucagcuuugagaccugcu

SEQ ID NO: 650131 - RNA, 22 nt, Human
agcaggcagccuaggaagugaa

SEQ ID NO: 650132 - RNA, 22 nt, Human
cuuaggcaagcagagcccaucc

SEQ ID NO: 650133 - RNA, 17 nt, Human
cagucacaggucuuuuc

SEQ ID NO: 650134 - RNA, 22 nt, Human
uccagccccuccugagccaagc

SEQ ID NO: 650135 - RNA, 22 nt, Human
aaauucuuucauggcuaauaag

SEQ ID NO: 650136 - RNA, 22 nt, Human
uacacaaaggcacucuguuguu

SEQ ID NO: 650137 - RNA, 23 nt, Human
gaggagggucugacaaguguagc

SEQ ID NO: 650138 - RNA, 22 nt, Human
cagcccuggugagguuggcuau

SEQ ID NO: 650139 - RNA, 22 nt, Human
agccuaggggguccugggccac

SEQ ID NO: 650140 - RNA, 20 nt, Human
acaaaauagguacuggguag

SEQ ID NO: 650141 - RNA, 22 nt, Human
gcacagacuuugauugcaguca

SEQ ID NO: 650142 - RNA, 22 nt, Human
aggcacugacucaagggagcca

SEQ ID NO: 650143 - RNA, 22 nt, Human
aggcugagagcaacgugucaga

SEQ ID NO: 650144 - RNA, 22 nt, Human
uuaaaggcugaucuuaauauua

SEQ ID NO: 650145 - RNA, 22 nt, Human
aagaaagauaagguuugcuugg

SEQ ID NO: 650146 - RNA, 22 nt, Human
gaagaaggguaaggaguguuga

SEQ ID NO: 650147 - RNA, 19 nt, Human
agcaggcagguggcccagg

SEQ ID NO: 650148 - RNA, 22 nt, Human
caacaauaugccagacucaauu

SEQ ID NO: 650149 - RNA, 22 nt, Human
cccagaguggagggugcagaau

SEQ ID NO: 650150 - RNA, 22 nt, Human
uacugaaggacuugaggguuuc

SEQ ID NO: 650151 - RNA, 22 nt, Human
gagaggugaauguggaugccac

SEQ ID NO: 650152 - RNA, 22 nt, Human
aauugaaauucuuuguggucca

SEQ ID NO: 650153 - RNA, 19 nt, Human
cugagucaaagguuguggg

SEQ ID NO: 650154 - RNA, 22 nt, Human
gaaauauacauugcaggaagag

SEQ ID NO: 650155 - RNA, 22 nt, Human
guuggaauuugcucauccauuu

SEQ ID NO: 650156 - RNA, 22 nt, Human
uucaggagaauuccaagaagua

SEQ ID NO: 650157 - RNA, 22 nt, Human
cccaugagugcugcucagaggc

SEQ ID NO: 650158 - RNA, 18 nt, Human
cacaauuuacagaugaca

SEQ ID NO: 650159 - RNA, 22 nt, Human
ugacagacagcuucucauuuua

SEQ ID NO: 650160 - RNA, 22 nt, Human
cagcuccccucuguggggcagu

SEQ ID NO: 650161 - RNA, 22 nt, Human
uccuccagcuucucuuuugggg

SEQ ID NO: 650162 - RNA, 22 nt, Human
gcugugcagagcacaggguccc

SEQ ID NO: 650163 - RNA, 22 nt, Human
cagcgccuccuggaccuccucu

SEQ ID NO: 650164 - RNA, 22 nt, Human
cuugggcacaucccugguauuu

SEQ ID NO: 650165 - RNA, 22 nt, Human
aggcucagauccuuguguccug

SEQ ID NO: 650166 - RNA, 22 nt, Human
ucacuuuggauuauguaauuuc

SEQ ID NO: 650167 - RNA, 22 nt, Human
acacaguauugugacuauaacu

SEQ ID NO: 650168 - RNA, 18 nt, Human
cuuguucuucucuuggcg

SEQ ID NO: 650169 - RNA, 22 nt, Human
ugagggucauuuggaaguggaa

SEQ ID NO: 650170 - RNA, 22 nt, Human
gggagcugaacugcugaaguug

SEQ ID NO: 650171 - RNA, 22 nt, Human
aaagucauuuagccuuaucucc

SEQ ID NO: 650172 - RNA, 19 nt, Human
uaacucuuuccuuuucccc

SEQ ID NO: 650173 - RNA, 21 nt, Human
uccaagccuucaacacauuca

SEQ ID NO: 650174 - RNA, 22 nt, Human
guuugcauggaagacagugagu

SEQ ID NO: 650175 - RNA, 22 nt, Human
cucuggaguucucaugaggaac

SEQ ID NO: 650176 - RNA, 22 nt, Human
cugcuuuaccaaacucuuggau

SEQ ID NO: 650177 - RNA, 21 nt, Human
agaagccauuuguuaggacuu

SEQ ID NO: 650178 - RNA, 22 nt, Human
uucuuccuugguuuccuggaua

SEQ ID NO: 650179 - RNA, 20 nt, Human
ggcuuucugugauccucagu

SEQ ID NO: 650180 - RNA, 22 nt, Human
augcauaucuccuaucuccuca

SEQ ID NO: 650181 - RNA, 22 nt, Human
uguauuucgcuagguacucccu

SEQ ID NO: 650182 - RNA, 22 nt, Human
auucugcucaugagcucccggg

SEQ ID NO: 650183 - RNA, 22 nt, Human
augagaaugcauucauguuuug

SEQ ID NO: 650184 - RNA, 22 nt, Human
gaagcaaucuggcucccagcca

SEQ ID NO: 650185 - RNA, 22 nt, Human
cccucugaaccugguagcagaa

SEQ ID NO: 650186 - RNA, 22 nt, Human
uauacagucuuuugcuauauuc

SEQ ID NO: 650187 - RNA, 22 nt, Human
gaaguucuuugcuccccaguac

SEQ ID NO: 650188 - RNA, 22 nt, Human
gugugcagggcugccugugccg

SEQ ID NO: 650189 - RNA, 17 nt, Human
ucaauacacugcuuuua

SEQ ID NO: 650190 - RNA, 22 nt, Human
uggggacacagagguucguugg

SEQ ID NO: 650191 - RNA, 22 nt, Human
gccugaagaacagcugugagga

SEQ ID NO: 650192 - RNA, 22 nt, Human
uccccaggaguuuuacuuugca

SEQ ID NO: 650193 - RNA, 22 nt, Human
uucaguuucagucuugcaaaaa

SEQ ID NO: 650194 - RNA, 22 nt, Human
caggggcugugggcggagccuc

SEQ ID NO: 650195 - RNA, 22 nt, Human
cuauacacuuuuugaaaauaga

SEQ ID NO: 650196 - RNA, 22 nt, Human
acagggcccuugccagcacaag

SEQ ID NO: 650197 - RNA, 22 nt, Human
uuauucugucuuuggucucaau

SEQ ID NO: 650198 - RNA, 22 nt, Human
cugugaauugaauaugacuaug

SEQ ID NO: 650199 - RNA, 22 nt, Human
uuuacccauauuagcaucaagu

SEQ ID NO: 650200 - RNA, 22 nt, Human
aggauuugcacugguguuugag

SEQ ID NO: 650201 - RNA, 21 nt, Human
cuugucuugcuuagaauagac

SEQ ID NO: 650202 - RNA, 22 nt, Human
ucauucuugaucacuaguuagu

SEQ ID NO: 650203 - RNA, 22 nt, Human
aacuuucugaaaagcuugauca

SEQ ID NO: 650204 - RNA, 20 nt, Human
ggaagccagcauccuugagg

SEQ ID NO: 650205 - RNA, 22 nt, Human
agagcccuguggacugucaagu

SEQ ID NO: 650206 - RNA, 22 nt, Human
caaagaugcugauguuggauca

SEQ ID NO: 650207 - RNA, 22 nt, Human
ugucaccuggaaaucacucuaa

SEQ ID NO: 650208 - RNA, 22 nt, Human
auguccaguacuucuaaauggu

SEQ ID NO: 650209 - RNA, 22 nt, Human
aauuaggaaauucagccauuuu

SEQ ID NO: 650210 - RNA, 22 nt, Human
cugccauccucaccagagcagc

SEQ ID NO: 650211 - RNA, 22 nt, Human
gagucauugcacacuagcucag

SEQ ID NO: 650212 - RNA, 21 nt, Human
ccacauucucauucugacugc

SEQ ID NO: 650213 - RNA, 22 nt, Human
aguagggagaccggaggccgcc

SEQ ID NO: 650214 - RNA, 22 nt, Human
aggaagagcuggaccagaggac

SEQ ID NO: 650215 - RNA, 22 nt, Human
cugggacagagcagcagugggg

SEQ ID NO: 650216 - RNA, 22 nt, Human
agacacuuauuuagugggaguu

SEQ ID NO: 650217 - RNA, 22 nt, Human
gccagccccagacauccuaucg

SEQ ID NO: 650218 - RNA, 23 nt, Human
uuacaguaggaguuggaaaacca

SEQ ID NO: 650219 - RNA, 22 nt, Human
aagaggugccagggguuuugua

SEQ ID NO: 650220 - RNA, 22 nt, Human
guccugugagauucaugcucaa

SEQ ID NO: 650221 - RNA, 22 nt, Human
cagguccugcagggagaguaaa

SEQ ID NO: 650222 - RNA, 22 nt, Human
ugggaagguguagaaagaacaa

SEQ ID NO: 650223 - RNA, 22 nt, Human
aauuggacugugcugcucaaaa

SEQ ID NO: 650224 - RNA, 22 nt, Human
auaugacagcggauucacauau

SEQ ID NO: 650225 - RNA, 22 nt, Human
augagcuugguccagcaggcuu

SEQ ID NO: 650226 - RNA, 22 nt, Human
aaagguuuauugauucugcucu

SEQ ID NO: 650227 - RNA, 22 nt, Human
gcauguggccuucaggcuggaa

SEQ ID NO: 650228 - RNA, 20 nt, Human
cugccuggaggccucuaccu

SEQ ID NO: 650229 - RNA, 22 nt, Human
agacagggagggagcgcggcug

SEQ ID NO: 650230 - RNA, 22 nt, Human
acagcuuuaucucagggaucag

SEQ ID NO: 650231 - RNA, 22 nt, Human
uuaacaaaaauaucaggcauca

SEQ ID NO: 650232 - RNA, 22 nt, Human
ggcagucacaggggagacuggg

SEQ ID NO: 650233 - RNA, 22 nt, Human
ugccaccccucugcacccucag

SEQ ID NO: 650234 - RNA, 22 nt, Human
acucaugucauguguucuuuac

SEQ ID NO: 650235 - RNA, 22 nt, Human
gggcagcuguaucugagcuuau

SEQ ID NO: 650236 - RNA, 22 nt, Human
aaguauauacuaaauguuaauc

SEQ ID NO: 650237 - RNA, 22 nt, Human
cagucucuggcagcugcuggcc

SEQ ID NO: 650238 - RNA, 22 nt, Human
ccucugcagcagagagccagag

SEQ ID NO: 650239 - RNA, 22 nt, Human
aaagccuugagauccuauaguu

SEQ ID NO: 650240 - RNA, 22 nt, Human
agaguauugugaccauuuguca

SEQ ID NO: 650241 - RNA, 22 nt, Human
agaugguucucagaaacucaac

SEQ ID NO: 650242 - RNA, 20 nt, Human
uccagcauauaaacuccucu

SEQ ID NO: 650243 - RNA, 22 nt, Human
aggacagguguagugggcucug

SEQ ID NO: 650244 - RNA, 22 nt, Human
gcagaggugucaccuuccagga

SEQ ID NO: 650245 - RNA, 22 nt, Human
gugcuucuccguucugcagcac

SEQ ID NO: 650246 - RNA, 23 nt, Human
uaugucaugagcauauugaaugu

SEQ ID NO: 650247 - RNA, 22 nt, Human
aaaaccaggcuugcugugcucg

SEQ ID NO: 650248 - RNA, 22 nt, Human
auucuaauggcagagacuccug

SEQ ID NO: 650249 - RNA, 22 nt, Human
agacuguagggauagaggucuu

SEQ ID NO: 650250 - RNA, 22 nt, Human
agggaggucuuugaggggcuua

SEQ ID NO: 650251 - RNA, 22 nt, Human
acagcugggaacucacacagca

SEQ ID NO: 650252 - RNA, 22 nt, Human
gggcugagugggccucuuacuu

SEQ ID NO: 650253 - RNA, 22 nt, Human
uguuccugaggcaugugucaau

SEQ ID NO: 650254 - RNA, 22 nt, Human
ucaggcaggacaauuauuuagg

SEQ ID NO: 650255 - RNA, 22 nt, Human
cuuuagacaucucauuguguaa

SEQ ID NO: 650256 - RNA, 22 nt, Human
ugucaccuugaugauggccuag

SEQ ID NO: 650257 - RNA, 22 nt, Human
cugaggccucuccuuggcuugu

SEQ ID NO: 650258 - RNA, 22 nt, Human
ggugcagaguccacagaaagcu

SEQ ID NO: 650259 - RNA, 22 nt, Human
uggcuccagcucaaguauggca

SEQ ID NO: 650260 - RNA, 22 nt, Human
ucucuuccaguaagagucuuua

SEQ ID NO: 650261 - RNA, 20 nt, Human
cagcucugggcaggucgagg

SEQ ID NO: 650262 - RNA, 22 nt, Human
cuggguuuuauuacagugagcu

SEQ ID NO: 650263 - RNA, 22 nt, Human
cugugugcagggcacaauggaa

SEQ ID NO: 650264 - RNA, 16 nt, Human
aacaaugccaauccag

SEQ ID NO: 650265 - RNA, 22 nt, Human
gaggaggcuaucagcaaucagg

SEQ ID NO: 650266 - RNA, 22 nt, Human
gcccugugauggagacuagagg

SEQ ID NO: 650267 - RNA, 19 nt, Human
cucucagccugucuccuug

SEQ ID NO: 650268 - RNA, 22 nt, Human
uagaaagacuguccagauuuca

SEQ ID NO: 650269 - RNA, 22 nt, Human
aaccaggacaauuuugaaagua

SEQ ID NO: 650270 - RNA, 22 nt, Human
agaguacauucagagcuaccua

SEQ ID NO: 650271 - RNA, 22 nt, Human
guuacaaauguaaauucugggg

SEQ ID NO: 650272 - RNA, 22 nt, Human
agacauauuggcuugcuuuaau

SEQ ID NO: 650273 - RNA, 22 nt, Human
ucuggggacggggcccagcaau

SEQ ID NO: 650274 - RNA, 22 nt, Human
caaagggcucuagacucagcag

SEQ ID NO: 650275 - RNA, 22 nt, Human
aggcagccauuaccaagggcau

SEQ ID NO: 650276 - RNA, 22 nt, Human
cucugcaucaggcauuauggau

SEQ ID NO: 650277 - RNA, 21 nt, Human
gaaccugagugaagacuuggg

SEQ ID NO: 650278 - RNA, 22 nt, Human
cugugccaguguauuccuguga

SEQ ID NO: 650279 - RNA, 22 nt, Human
uggccacaugcgucugugaggc

SEQ ID NO: 650280 - RNA, 22 nt, Human
aaccuguuuucuucucaucuag

SEQ ID NO: 650281 - RNA, 20 nt, Human
cagaggcaaggagacuugga

SEQ ID NO: 650282 - RNA, 22 nt, Human
aggaggguugaggaggauacuu

SEQ ID NO: 650283 - RNA, 22 nt, Human
uauagagguggaaacugagguu

SEQ ID NO: 650284 - RNA, 22 nt, Human
agagaucuagcaccugcugguc

SEQ ID NO: 650285 - RNA, 20 nt, Human
uuugucuguuaaguguuucu

SEQ ID NO: 650286 - RNA, 22 nt, Human
gguacaaugucuuacagaccca

SEQ ID NO: 650287 - RNA, 22 nt, Human
uugcuauaaauggucuaucuuu

SEQ ID NO: 650288 - RNA, 22 nt, Human
aguguauugauuggaacagccu

SEQ ID NO: 650289 - RNA, 21 nt, Human
aauggaaguuuaaagguaucc

SEQ ID NO: 650290 - RNA, 22 nt, Human
uuagacaggauguaugaaagcu

SEQ ID NO: 650291 - RNA, 20 nt, Human
gggagcuggaauugucuuag

SEQ ID NO: 650292 - RNA, 22 nt, Human
ugagccaggcucaagugauccu

SEQ ID NO: 650293 - RNA, 22 nt, Human
guggcaaggagcaugaaaaguc

SEQ ID NO: 650294 - RNA, 22 nt, Human
uccauucuaugcuuacauuuau

SEQ ID NO: 650295 - RNA, 22 nt, Human
agauguggccuuugggagauua

SEQ ID NO: 650296 - RNA, 22 nt, Human
uaaaaugaucucucauguucuu

SEQ ID NO: 650297 - RNA, 22 nt, Human
uaaacauggcuguuucaguuau

SEQ ID NO: 650298 - RNA, 22 nt, Human
cuggacacacuggagucuggca

SEQ ID NO: 650299 - RNA, 22 nt, Human
cagggcuagugacaccccaguc

SEQ ID NO: 650300 - RNA, 22 nt, Human
uugcagggcaggaccauggaca

SEQ ID NO: 650301 - RNA, 22 nt, Human
cacacucauuagucauuucucu

SEQ ID NO: 650302 - RNA, 22 nt, Human
ggucccuggaagucccucuucu

SEQ ID NO: 650303 - RNA, 22 nt, Human
gguacaauccacuguggguuag

SEQ ID NO: 650304 - RNA, 22 nt, Human
ugagagccuguguucaaaugcc

SEQ ID NO: 650305 - RNA, 22 nt, Human
uaacaauucucaaaagagggga

SEQ ID NO: 650306 - RNA, 22 nt, Human
uuuagaauguuagcguuaaagg

SEQ ID NO: 650307 - RNA, 22 nt, Human
uauuucuggcuuugagggugau

SEQ ID NO: 650308 - RNA, 22 nt, Human
ccagcagagugggguuuagagu

SEQ ID NO: 650309 - RNA, 22 nt, Human
aacuacauuguccuuucugaag

SEQ ID NO: 650310 - RNA, 22 nt, Human
ucccuccaggcagcuggguacu

SEQ ID NO: 650311 - RNA, 22 nt, Human
gguggggucacgacagagggaa

SEQ ID NO: 650312 - RNA, 22 nt, Human
agucacugguucuguaauuaau

SEQ ID NO: 650313 - RNA, 19 nt, Human
agguagcucagacucaaag

SEQ ID NO: 650314 - RNA, 22 nt, Human
cuggccugaggccgccuucaga

SEQ ID NO: 650315 - RNA, 22 nt, Human
cuccagaagacccauccucaug

SEQ ID NO: 650316 - RNA, 22 nt, Human
uccuccagagauuugaguuauu

SEQ ID NO: 650317 - RNA, 22 nt, Human
cugucucagcaggaagucauca

SEQ ID NO: 650318 - RNA, 22 nt, Human
ucugagguguagcugggcuuca

SEQ ID NO: 650319 - RNA, 22 nt, Human
aaauaguucagcuuguaaaccc

SEQ ID NO: 650320 - RNA, 22 nt, Human
ggcccuuccugcucucuuagcu

SEQ ID NO: 650321 - RNA, 22 nt, Human
uggcugcaggggugucugacau

SEQ ID NO: 650322 - RNA, 22 nt, Human
acauuugaaauucugaacagau

SEQ ID NO: 650323 - RNA, 20 nt, Human
uguagguguacaguaaggag

SEQ ID NO: 650324 - RNA, 22 nt, Human
gaggacagugugaucugccagc

SEQ ID NO: 650325 - RNA, 22 nt, Human
aagucccuuuaaucagugccuu

SEQ ID NO: 650326 - RNA, 22 nt, Human
gcauccaaauguuucauuucuu

SEQ ID NO: 650327 - RNA, 22 nt, Human
caggagcccagaguccucagcu

SEQ ID NO: 650328 - RNA, 22 nt, Human
uuucucuggccucaguuuaaca

SEQ ID NO: 650329 - RNA, 22 nt, Human
uugcgcgcggcuaggucucggu

SEQ ID NO: 650330 - RNA, 21 nt, Human
agcggcagacccugcauuuga

SEQ ID NO: 650331 - RNA, 22 nt, Human
uccagagguauguagagaguau

SEQ ID NO: 650332 - RNA, 22 nt, Human
gccaggguugccaaugggggca

SEQ ID NO: 650333 - RNA, 22 nt, Human
ggcuccagggucucuccuugug

SEQ ID NO: 650334 - RNA, 22 nt, Human
cucaguuucuuacucuguauaa

SEQ ID NO: 650335 - RNA, 22 nt, Human
gugaaauuguauuuggcauuga

SEQ ID NO: 650336 - RNA, 22 nt, Human
agcccagguugaggcugcagug

SEQ ID NO: 650337 - RNA, 22 nt, Human
agcuuagaauguguuaggaaag

SEQ ID NO: 650338 - RNA, 22 nt, Human
uucacagggcagcagcugagcc

SEQ ID NO: 650339 - RNA, 22 nt, Human
uagaggcacccuggaggagacu

SEQ ID NO: 650340 - RNA, 22 nt, Human
uauauugacuuuaaagaagcaa

SEQ ID NO: 650341 - RNA, 22 nt, Human
cccagcaggcauguugggagga

SEQ ID NO: 650342 - RNA, 22 nt, Human
agcugugguguuuucaagcccu

SEQ ID NO: 650343 - RNA, 22 nt, Human
cugggagcuggaaugggagaag

SEQ ID NO: 650344 - RNA, 22 nt, Human
guucugcuguaauaucucugcu

SEQ ID NO: 650345 - RNA, 22 nt, Human
cauaauuucuguaucagcacca

SEQ ID NO: 650346 - RNA, 22 nt, Human
cccugugggaacuccugaguug

SEQ ID NO: 650347 - RNA, 23 nt, Human
uuuaacuuuccaauaauucauug

SEQ ID NO: 650348 - RNA, 16 nt, Human
gcugggagggagaggu

SEQ ID NO: 650349 - RNA, 22 nt, Human
gcagauggacuguaugaccuga

SEQ ID NO: 650350 - RNA, 22 nt, Human
auggagagugaaagucucucua

SEQ ID NO: 650351 - RNA, 19 nt, Human
uguuucuuccuccaucuga

SEQ ID NO: 650352 - RNA, 22 nt, Human
cagggaguguacaccaugugua

SEQ ID NO: 650353 - RNA, 22 nt, Human
uagauuuaagacccugaauuug

SEQ ID NO: 650354 - RNA, 22 nt, Human
ucuuuucuguaacucagugucu

SEQ ID NO: 650355 - RNA, 22 nt, Human
aggcgcagaaggccaggggccu

SEQ ID NO: 650356 - RNA, 22 nt, Human
auuucccacucaggccgcggcg

SEQ ID NO: 650357 - RNA, 22 nt, Human
uuacagaaucuacucgugguga

SEQ ID NO: 650358 - RNA, 22 nt, Human
gcuccuggcauccugcuuuuaa

SEQ ID NO: 650359 - RNA, 22 nt, Human
aagggcuggcccugggaagagu

SEQ ID NO: 650360 - RNA, 22 nt, Human
agcugcagcuguuuucugagug

SEQ ID NO: 650361 - RNA, 22 nt, Human
uuaauccaauauccuggcuauu

SEQ ID NO: 650362 - RNA, 22 nt, Human
auugaacugucuuugaagaaau

SEQ ID NO: 650363 - RNA, 22 nt, Human
aggccacauagcuugcauguag

SEQ ID NO: 650364 - RNA, 23 nt, Human
acugagcauuaguauuuuuauaa

SEQ ID NO: 650365 - RNA, 23 nt, Human
uuucaacaaugcuuagagaaaac

SEQ ID NO: 650366 - RNA, 22 nt, Human
augcaacauacauucugaagcu

SEQ ID NO: 650367 - RNA, 22 nt, Human
guggggguggaaaggcaaguug

SEQ ID NO: 650368 - RNA, 22 nt, Human
ucagagaguuggaaagaauuaa

SEQ ID NO: 650369 - RNA, 22 nt, Human
cucagggaagcuauggugaggg

SEQ ID NO: 650370 - RNA, 18 nt, Human
agaagcacaagaugucuu

SEQ ID NO: 650371 - RNA, 22 nt, Human
auucucauuugcuggcuauaug

SEQ ID NO: 650372 - RNA, 20 nt, Human
ugcauaguugcugcaguuga

SEQ ID NO: 650373 - RNA, 22 nt, Human
cugagaguauuggcaggcuugg

SEQ ID NO: 650374 - RNA, 22 nt, Human
guaaagcaaaauguagagauug

SEQ ID NO: 650375 - RNA, 22 nt, Human
uucacaaagcuggagcauuucc

SEQ ID NO: 650376 - RNA, 22 nt, Human
acacuuuaugucuagaucuggg

SEQ ID NO: 650377 - RNA, 22 nt, Human
uacccaggggcugagcagaggu

SEQ ID NO: 650378 - RNA, 22 nt, Human
aaucaguauugguauagaauga

SEQ ID NO: 650379 - RNA, 22 nt, Human
acauuuuuggguugaugucuga

SEQ ID NO: 650380 - RNA, 22 nt, Human
aacuuuuaaaauacacagacaa

SEQ ID NO: 650381 - RNA, 21 nt, Human
gccugagcaugucuucagguc

SEQ ID NO: 650382 - RNA, 22 nt, Human
ccucagggucugaggagaccgu

SEQ ID NO: 650383 - RNA, 22 nt, Human
acucugaggcaggucagggcag

SEQ ID NO: 650384 - RNA, 22 nt, Human
ucaagagaagugcuccacagua

SEQ ID NO: 650385 - RNA, 22 nt, Human
gcuggccauucucuuugagaug

SEQ ID NO: 650386 - RNA, 22 nt, Human
auauucacuccuggugagacua

SEQ ID NO: 650387 - RNA, 22 nt, Human
uccgauaagcaauucuugugcu

SEQ ID NO: 650388 - RNA, 22 nt, Human
ccagaaaaugcagaacauagaa

SEQ ID NO: 650389 - RNA, 20 nt, Human
ccagagaguagguuagugau

SEQ ID NO: 650390 - RNA, 22 nt, Human
cccagggucccugcucucugug

SEQ ID NO: 650391 - RNA, 22 nt, Human
gcaguccuuaggagaggaagua

SEQ ID NO: 650392 - RNA, 22 nt, Human
agccaggaagaaggucacacca

SEQ ID NO: 650393 - RNA, 22 nt, Human
uaguucaccccucuuuauuuuc

SEQ ID NO: 650394 - RNA, 22 nt, Human
gacacauacagcaguaagucua

SEQ ID NO: 650395 - RNA, 22 nt, Human
aaguccagugcuuuagauucca

SEQ ID NO: 650396 - RNA, 22 nt, Human
ccugggccuauccuagaaccaa

SEQ ID NO: 650397 - RNA, 22 nt, Human
aagccaggcugcacuugcuggg

SEQ ID NO: 650398 - RNA, 22 nt, Human
aucaguuuaacugucaagagcc

SEQ ID NO: 650399 - RNA, 22 nt, Human
gaaugcuuggaaccugaaguuc

SEQ ID NO: 650400 - RNA, 22 nt, Human
ggucagcagugcagggcagagc

SEQ ID NO: 650401 - RNA, 22 nt, Human
caucagucugaaagccagggag

SEQ ID NO: 650402 - RNA, 22 nt, Human
cagcagcuguuuacggaacacc

SEQ ID NO: 650403 - RNA, 17 nt, Human
uccagccuccucugcug

SEQ ID NO: 650404 - RNA, 22 nt, Human
uuuaguguggcacugauguuca

SEQ ID NO: 650405 - RNA, 22 nt, Human
auagggccuaaaaaguauugcu

SEQ ID NO: 650406 - RNA, 22 nt, Human
uaucucuguaaaagaaaucaca

SEQ ID NO: 650407 - RNA, 22 nt, Human
gcagccaccucccauggcgggg

SEQ ID NO: 650408 - RNA, 22 nt, Human
uggcacaggaauuuagaugcag

SEQ ID NO: 650409 - RNA, 22 nt, Human
cuccugggcuucgaaggcuccc

SEQ ID NO: 650410 - RNA, 22 nt, Human
uuuaugagcaaugcugagggga

SEQ ID NO: 650411 - RNA, 22 nt, Human
uuccuaacaagucuaucuuuga

SEQ ID NO: 650412 - RNA, 22 nt, Human
ccagguguagcacugcucacag

SEQ ID NO: 650413 - RNA, 18 nt, Human
ccuaagcuccagccccag

SEQ ID NO: 650414 - RNA, 22 nt, Human
uuccugaugcacacagucauuu

SEQ ID NO: 650415 - RNA, 22 nt, Human
guccagagaggcaggaggcuac

SEQ ID NO: 650416 - RNA, 22 nt, Human
ucagcagacaguuagcuauauu

SEQ ID NO: 650417 - RNA, 22 nt, Human
uucugauaccuugcaggauccu

SEQ ID NO: 650418 - RNA, 21 nt, Human
cccuguguuccacagcagaca

SEQ ID NO: 650419 - RNA, 22 nt, Human
uguggccuccccacuucugggg

SEQ ID NO: 650420 - RNA, 23 nt, Human
agaagcagcuucuggaguaucgg

SEQ ID NO: 650421 - RNA, 22 nt, Human
ucagucuugcuucucuuggguc

SEQ ID NO: 650422 - RNA, 22 nt, Human
ccagugggagggagcuaggcca

SEQ ID NO: 650423 - RNA, 22 nt, Human
gcuguguuugacaguagcagac

SEQ ID NO: 650424 - RNA, 22 nt, Human
ucaggugaccugagccacuaug

SEQ ID NO: 650425 - RNA, 22 nt, Human
ucaguguuuuccagggucuacu

SEQ ID NO: 650426 - RNA, 22 nt, Human
ucaggcaggaucccagggaagg

SEQ ID NO: 650427 - RNA, 22 nt, Human
cccacaggcccugcugccuuga

SEQ ID NO: 650428 - RNA, 22 nt, Human
gugcugaauugugcucuuuaca

SEQ ID NO: 650429 - RNA, 22 nt, Human
auucugcauugcucacaaagau

SEQ ID NO: 650430 - RNA, 22 nt, Human
cuaacauuuggaaggcuuauga

SEQ ID NO: 650431 - RNA, 22 nt, Human
ccagccaugcacaaaccaugag

SEQ ID NO: 650432 - RNA, 22 nt, Human
auccucagaccucagcaaagcc

SEQ ID NO: 650433 - RNA, 22 nt, Human
gagagcuaggccacuggggcuu

SEQ ID NO: 650434 - RNA, 22 nt, Human
cugcuguucugaagcaacaagc

SEQ ID NO: 650435 - RNA, 19 nt, Human
aggucauugauagugcagg

SEQ ID NO: 650436 - RNA, 22 nt, Human
ucagaaacagaaacuaagaacc

SEQ ID NO: 650437 - RNA, 17 nt, Human
uccuguuuaucauugau

SEQ ID NO: 650438 - RNA, 21 nt, Human
ggcagcugaccgcgcggugca

SEQ ID NO: 650439 - RNA, 18 nt, Human
auguggcuagugcaacug

SEQ ID NO: 650440 - RNA, 22 nt, Human
accagcaguuaugaggccagga

SEQ ID NO: 650441 - RNA, 22 nt, Human
agcagagaccugguuuuguuga

SEQ ID NO: 650442 - RNA, 22 nt, Human
cugugucccccucagccaggug

SEQ ID NO: 650443 - RNA, 22 nt, Human
ucugcacauagguaggcuggaa

SEQ ID NO: 650444 - RNA, 18 nt, Human
cucucuuuccacucuuug

SEQ ID NO: 650445 - RNA, 19 nt, Human
ggccccucucacaggaguu

SEQ ID NO: 650446 - RNA, 22 nt, Human
gcuguucugcgucccaggcugg

SEQ ID NO: 650447 - RNA, 22 nt, Human
aaguucuaauuuugcauucagg

SEQ ID NO: 650448 - RNA, 22 nt, Human
gucugcuggugccuggccugcg

SEQ ID NO: 650449 - RNA, 22 nt, Human
ccccacagcuuguggagagaau

SEQ ID NO: 650450 - RNA, 22 nt, Human
uaggcagcgcuuggcugugcuu

SEQ ID NO: 650451 - RNA, 22 nt, Human
agagcacaaauuuuaaggaggc

SEQ ID NO: 650452 - RNA, 22 nt, Human
gagcagcugugggguugaccau

SEQ ID NO: 650453 - RNA, 22 nt, Human
uggcaaccgcauggccugcuuc

SEQ ID NO: 650454 - RNA, 22 nt, Human
ccaggacucaguggggaaaggg

SEQ ID NO: 650455 - RNA, 22 nt, Human
caaaauugaugaauguaugauu

SEQ ID NO: 650456 - RNA, 22 nt, Human
cugcuguggguuaagacacugu

SEQ ID NO: 650457 - RNA, 22 nt, Human
ucagggcuccggaaguggccuc

SEQ ID NO: 650458 - RNA, 22 nt, Human
cacacauggcugccagggaggu

SEQ ID NO: 650459 - RNA, 22 nt, Human
cugagguccucagagggaaagg

SEQ ID NO: 650460 - RNA, 22 nt, Human
agagccugagaggauaaugggg

SEQ ID NO: 650461 - RNA, 22 nt, Human
agucaguuaaccucacagcauc

SEQ ID NO: 650462 - RNA, 22 nt, Human
uaagacacaguccgcacucucu

SEQ ID NO: 650463 - RNA, 22 nt, Human
agccagagacuuuaccugugca

SEQ ID NO: 650464 - RNA, 22 nt, Human
cugccccuggcuggugaagcag

SEQ ID NO: 650465 - RNA, 22 nt, Human
aacccgggagguggagguuaug

SEQ ID NO: 650466 - RNA, 22 nt, Human
cauuucacaaauggccacauca

SEQ ID NO: 650467 - RNA, 22 nt, Human
caugggcccgugagaggcaggg

SEQ ID NO: 650468 - RNA, 19 nt, Human
agucccaggcccgaaagag

SEQ ID NO: 650469 - RNA, 22 nt, Human
uuguuucucuggucuugaguga

SEQ ID NO: 650470 - RNA, 22 nt, Human
aaggccaugcuugaguugaagg

SEQ ID NO: 650471 - RNA, 22 nt, Human
uaauacaaggcaggaagcagua

SEQ ID NO: 650472 - RNA, 22 nt, Human
uagcuguuaauauacaaauggu

SEQ ID NO: 650473 - RNA, 21 nt, Human
ucaccuggcuucugaccuggc

SEQ ID NO: 650474 - RNA, 22 nt, Human
aguuuagaagaggaacuuguua

SEQ ID NO: 650475 - RNA, 22 nt, Human
uaggacagaguucccugauggc

SEQ ID NO: 650476 - RNA, 22 nt, Human
acagggucauuuuaugaucugu

SEQ ID NO: 650477 - RNA, 22 nt, Human
ugugcaguuuuaaguggucuaa

SEQ ID NO: 650478 - RNA, 23 nt, Human
ccucagggucuagcagagagaag

SEQ ID NO: 650479 - RNA, 22 nt, Human
acacuagcuaaaugcugauuaa

SEQ ID NO: 650480 - RNA, 22 nt, Human
uuuaauuagcaagccagagagc

SEQ ID NO: 650481 - RNA, 22 nt, Human
gguccaggggguagauauguga

SEQ ID NO: 650482 - RNA, 22 nt, Human
gagggggcucugccaaccuguc

SEQ ID NO: 650483 - RNA, 22 nt, Human
auuaauauugguucauuagcug

SEQ ID NO: 650484 - RNA, 22 nt, Human
ucuguacaacaaagggaugaga

SEQ ID NO: 650485 - RNA, 22 nt, Human
cccucgggucgcggacugcgcu

SEQ ID NO: 650486 - RNA, 22 nt, Human
ggccaccuuccaguugccugca

SEQ ID NO: 650487 - RNA, 22 nt, Human
ugcuguccuguuuuggaguaau

SEQ ID NO: 650488 - RNA, 22 nt, Human
cuuuauuccuacaagauuuucu

SEQ ID NO: 650489 - RNA, 22 nt, Human
cagggcagagccaggauuucaa

SEQ ID NO: 650490 - RNA, 19 nt, Human
gugaggauacugcucagag

SEQ ID NO: 650491 - RNA, 22 nt, Human
agcuccuguggcagcucuucug

SEQ ID NO: 650492 - RNA, 22 nt, Human
uauuucugggaguucagaaauu

SEQ ID NO: 650493 - RNA, 22 nt, Human
acagucugcauaugaccuguag

SEQ ID NO: 650494 - RNA, 22 nt, Human
uugagcaauuaggaaauaaaga

SEQ ID NO: 650495 - RNA, 22 nt, Human
aucauucaucuuauugccaguc

SEQ ID NO: 650496 - RNA, 22 nt, Human
cugggcacugcagcaggcauca

SEQ ID NO: 650497 - RNA, 22 nt, Human
gcagagugggagcccagggcug

SEQ ID NO: 650498 - RNA, 22 nt, Human
ccucugugugugcaugcaugcg

SEQ ID NO: 650499 - RNA, 22 nt, Human
guaugugagguugguuuccagg

SEQ ID NO: 650500 - RNA, 22 nt, Human
uaguaaucagagguaaacuuua

SEQ ID NO: 650501 - RNA, 22 nt, Human
uaacacaugguuaguacacaau

SEQ ID NO: 650502 - RNA, 22 nt, Human
aagagaauucugguuuuccuau

SEQ ID NO: 650503 - RNA, 22 nt, Human
auuccaaacagugcugcagacu

SEQ ID NO: 650504 - RNA, 18 nt, Human
acugugguuuauguguag

SEQ ID NO: 650505 - RNA, 21 nt, Human
uuggauguauuuauguuuuag

SEQ ID NO: 650506 - RNA, 22 nt, Human
ccugagagcauuccacacugaa

SEQ ID NO: 650507 - RNA, 22 nt, Human
guggauggugguccaguaucau

SEQ ID NO: 650508 - RNA, 22 nt, Human
gaauuucaagcagugcaauguu

SEQ ID NO: 650509 - RNA, 22 nt, Human
gguuucaacuucaaccucucca

SEQ ID NO: 650510 - RNA, 22 nt, Human
ucuccaaggcccuacucuauuu

SEQ ID NO: 650511 - RNA, 22 nt, Human
uaucuaaaggauuuaauuuagu

SEQ ID NO: 650512 - RNA, 22 nt, Human
aagugaaugaugugaaguguaa

SEQ ID NO: 650513 - RNA, 22 nt, Human
gaggcccacagggaguaccaag

SEQ ID NO: 650514 - RNA, 22 nt, Human
uaaggcacacaguugcugcaug

SEQ ID NO: 650515 - RNA, 18 nt, Human
aagcaggguccauugugc

SEQ ID NO: 650516 - RNA, 22 nt, Human
ugcccagcgcccacauucuguc

SEQ ID NO: 650517 - RNA, 22 nt, Human
gcuuccgcgauguccuaggugg

SEQ ID NO: 650518 - RNA, 19 nt, Human
aagcuccagcagauccuuu

SEQ ID NO: 650519 - RNA, 22 nt, Human
ucagaaaucuugucaaggcauc

SEQ ID NO: 650520 - RNA, 22 nt, Human
ccagggauguggcagcaccaua

SEQ ID NO: 650521 - RNA, 22 nt, Human
agaagaugacuuuggaguugga

SEQ ID NO: 650522 - RNA, 22 nt, Human
uacugucuggguucccaagcaa

SEQ ID NO: 650523 - RNA, 22 nt, Human
ggugcaggaaucugcaauugaa

SEQ ID NO: 650524 - RNA, 22 nt, Human
acuuuguagguuucagugaaac

SEQ ID NO: 650525 - RNA, 22 nt, Human
gcucccuggcuuuuacagugua

SEQ ID NO: 650526 - RNA, 22 nt, Human
uugaacucuggacccaugccag

SEQ ID NO: 650527 - RNA, 22 nt, Human
ccaggcaccaaaguaugcuuua

SEQ ID NO: 650528 - RNA, 19 nt, Human
ugggcagugccagggcuua

SEQ ID NO: 650529 - RNA, 22 nt, Human
acuugaauucaaagcgaaagca

SEQ ID NO: 650530 - RNA, 17 nt, Human
cagucgaggaggaccug

SEQ ID NO: 650531 - RNA, 22 nt, Human
uugcuuuaccugugguauauuu

SEQ ID NO: 650532 - RNA, 22 nt, Human
uuuaugugaugcaucccagaaa

SEQ ID NO: 650533 - RNA, 22 nt, Human
ccuguacuagggucucauugcc

SEQ ID NO: 650534 - RNA, 22 nt, Human
agagacugucacauaacagagg

SEQ ID NO: 650535 - RNA, 22 nt, Human
cuucucuggcuccucagcgccc

SEQ ID NO: 650536 - RNA, 22 nt, Human
gcccugaaauauuuccacggcc

SEQ ID NO: 650537 - RNA, 22 nt, Human
ugguuuaugcuguugcagcucu

SEQ ID NO: 650538 - RNA, 22 nt, Human
ggugacugguuuaucuggcagu

SEQ ID NO: 650539 - RNA, 20 nt, Human
augugcugggcaauauguua

SEQ ID NO: 650540 - RNA, 22 nt, Human
uaggguaguaccaugcugccag

SEQ ID NO: 650541 - RNA, 22 nt, Human
ucugggaacacacgucacuuca

SEQ ID NO: 650542 - RNA, 22 nt, Human
ccucugaggucauggacuuggc

SEQ ID NO: 650543 - RNA, 22 nt, Human
gauuuuauagucaggaaaaaga

SEQ ID NO: 650544 - RNA, 22 nt, Human
ccuggcagaauauuaaagugca

SEQ ID NO: 650545 - RNA, 22 nt, Human
gcccucuggcagccuuggcugg

SEQ ID NO: 650546 - RNA, 22 nt, Human
ggcuggaggagaauggguguga

SEQ ID NO: 650547 - RNA, 22 nt, Human
gcagcucuccucugugaggaac

SEQ ID NO: 650548 - RNA, 22 nt, Human
agaaaucauucccaaacccaua

SEQ ID NO: 650549 - RNA, 22 nt, Human
aauacagaggcuuccaguaaaa

SEQ ID NO: 650550 - RNA, 20 nt, Human
ugguggccagugcugcaggc

SEQ ID NO: 650551 - RNA, 22 nt, Human
aggcauaaccuuuuaucuggau

SEQ ID NO: 650552 - RNA, 22 nt, Human
agaagcaaggucugucaguaua

SEQ ID NO: 650553 - RNA, 22 nt, Human
aucaacagguauggaugagauu

SEQ ID NO: 650554 - RNA, 22 nt, Human
ggcaggcuagcacugauguccu

SEQ ID NO: 650555 - RNA, 22 nt, Human
uauugcugccauuuuccaaugu

SEQ ID NO: 650556 - RNA, 22 nt, Human
cuccuaggacgccgcugcuccu

SEQ ID NO: 650557 - RNA, 22 nt, Human
ugcaaauuucuuuaguacauaa

SEQ ID NO: 650558 - RNA, 22 nt, Human
cuuuaguuuaagaacaugauga

SEQ ID NO: 650559 - RNA, 21 nt, Human
caaugucugcucucugccuag

SEQ ID NO: 650560 - RNA, 22 nt, Human
uuuacgaaaagugacuaauagg

SEQ ID NO: 650561 - RNA, 23 nt, Human
cagcccuggagaugugggaggca

SEQ ID NO: 650562 - RNA, 22 nt, Human
gcugagagcacauagaaggggc

SEQ ID NO: 650563 - RNA, 22 nt, Human
agugcacaccuuaguacaaagu

SEQ ID NO: 650564 - RNA, 22 nt, Human
cuggacaggcuggggacugcaa

SEQ ID NO: 650565 - RNA, 22 nt, Human
auacagaaaaugaugcagaguu

SEQ ID NO: 650566 - RNA, 22 nt, Human
augggccagcaccauguuaagc

SEQ ID NO: 650567 - RNA, 22 nt, Human
cugcuuggaggccugggugcua

SEQ ID NO: 650568 - RNA, 22 nt, Human
caggcagagugagaagcccuug

SEQ ID NO: 650569 - RNA, 22 nt, Human
ugcuucuuuaaaugauagucaa

SEQ ID NO: 650570 - RNA, 22 nt, Human
agacagggccacucauccucac

SEQ ID NO: 650571 - RNA, 22 nt, Human
uggucccugccugccaagugcu

SEQ ID NO: 650572 - RNA, 18 nt, Human
caguaacuauguuguuac

SEQ ID NO: 650573 - RNA, 22 nt, Human
uguaggauuuucaccagaccuu

SEQ ID NO: 650574 - RNA, 22 nt, Human
gggggcuguccugugcauugua

SEQ ID NO: 650575 - RNA, 22 nt, Human
aggccagccucaggcagggacc

SEQ ID NO: 650576 - RNA, 22 nt, Human
cucggaauggaacaacagcggu

SEQ ID NO: 650577 - RNA, 22 nt, Human
cugugagauuuuuaaauaacuu

SEQ ID NO: 650578 - RNA, 22 nt, Human
guuuugcagagugcaauaaauc

SEQ ID NO: 650579 - RNA, 22 nt, Human
uccaggcaagggaggagcaugg

SEQ ID NO: 650580 - RNA, 21 nt, Human
gggagcuggaaacugggugac

SEQ ID NO: 650581 - RNA, 22 nt, Human
ggaggggauuuaguagaugcua

SEQ ID NO: 650582 - RNA, 22 nt, Human
gccaggcccugggcacuucgug

SEQ ID NO: 650583 - RNA, 22 nt, Human
gcacagcagacuugguggggcu

SEQ ID NO: 650584 - RNA, 19 nt, Human
aguggcagaucuggaagua

SEQ ID NO: 650585 - RNA, 22 nt, Human
aaaaacacaacugucuuucucu

SEQ ID NO: 650586 - RNA, 21 nt, Human
uuggcagucagaaaugugagg

SEQ ID NO: 650587 - RNA, 22 nt, Human
caacaguguugcaaucugaaaa

SEQ ID NO: 650588 - RNA, 22 nt, Human
uguacauugucacucaucaagu

SEQ ID NO: 650589 - RNA, 22 nt, Human
ugucucaguucccuucucugga

SEQ ID NO: 650590 - RNA, 22 nt, Human
acagcuaucugacuuugacuca

SEQ ID NO: 650591 - RNA, 22 nt, Human
cugaguucugcccaaggucugg

SEQ ID NO: 650592 - RNA, 22 nt, Human
ccacugcccaccccgacgucua

SEQ ID NO: 650593 - RNA, 22 nt, Human
ccugcugaggucagccacccaa

SEQ ID NO: 650594 - RNA, 22 nt, Human
aagugauacaucuagucuauaa

SEQ ID NO: 650595 - RNA, 22 nt, Human
auuauacauuuuguguagagau

SEQ ID NO: 650596 - RNA, 22 nt, Human
ccuggcacauaauaguggcuca

SEQ ID NO: 650597 - RNA, 22 nt, Human
gggacucugagagccugagggu

SEQ ID NO: 650598 - RNA, 22 nt, Human
uagacuagaggaucagcaaggg

SEQ ID NO: 650599 - RNA, 22 nt, Human
agacagcaugauacaugaugcu

SEQ ID NO: 650600 - RNA, 22 nt, Human
ucugcugugggucuauauuuua

SEQ ID NO: 650601 - RNA, 22 nt, Human
auccuucagcugcccuguuacc

SEQ ID NO: 650602 - RNA, 22 nt, Human
ggcucuggggccuccucccuug

SEQ ID NO: 650603 - RNA, 22 nt, Human
ggccugcuccgggggcugagcu

SEQ ID NO: 650604 - RNA, 22 nt, Human
uccacaggcaagucucuuggca

SEQ ID NO: 650605 - RNA, 22 nt, Human
ggcagcaggguagccauuucuc

SEQ ID NO: 650606 - RNA, 22 nt, Human
uuuuaugcaaguuaugauuaaa

SEQ ID NO: 650607 - RNA, 22 nt, Human
uagcagagcugcaauauagacc

SEQ ID NO: 650608 - RNA, 22 nt, Human
gagcacugauuuauuuuugucu

SEQ ID NO: 650609 - RNA, 22 nt, Human
uccaauuuguuugaugauggaa

SEQ ID NO: 650610 - RNA, 22 nt, Human
auguaacugaaggaaaugcaug

SEQ ID NO: 650611 - RNA, 23 nt, Human
uucugggcuguggaagccucggg

SEQ ID NO: 650612 - RNA, 22 nt, Human
cucaggaggugguagaggcccu

SEQ ID NO: 650613 - RNA, 22 nt, Human
uggcugagaaguucugguggga

SEQ ID NO: 650614 - RNA, 22 nt, Human
gugccuggggguaauguaggau

SEQ ID NO: 650615 - RNA, 22 nt, Human
uuucuauuguaagucuccuaua

SEQ ID NO: 650616 - RNA, 22 nt, Human
caugagaaguggccuucaaaaa

SEQ ID NO: 650617 - RNA, 22 nt, Human
ugcacauugaaugagcaaacug

SEQ ID NO: 650618 - RNA, 22 nt, Human
gaacagaugccugauucauagg

SEQ ID NO: 650619 - RNA, 22 nt, Human
cacaaggagguccugaggaagc

SEQ ID NO: 650620 - RNA, 22 nt, Human
gcugccugugcacuuucucgua

SEQ ID NO: 650621 - RNA, 22 nt, Human
uuacauacaaaggcuggguuau

SEQ ID NO: 650622 - RNA, 22 nt, Human
cccuggggcugagggauggccg

SEQ ID NO: 650623 - RNA, 19 nt, Human
cucuuuacucccuugccuu

SEQ ID NO: 650624 - RNA, 22 nt, Human
aaaugcagguaguauuuauuuu

SEQ ID NO: 650625 - RNA, 22 nt, Human
cauugucacccaaagcucauag

SEQ ID NO: 650626 - RNA, 22 nt, Human
gaugugugcugcauaguauauu

SEQ ID NO: 650627 - RNA, 22 nt, Human
accagugcuuccugcuggagcu

SEQ ID NO: 650628 - RNA, 22 nt, Human
guauuuccuauagugagggccu

SEQ ID NO: 650629 - RNA, 22 nt, Human
ggucagccuuggauuugguagc

SEQ ID NO: 650630 - RNA, 22 nt, Human
uguggucuccccagugccagcu

SEQ ID NO: 650631 - RNA, 22 nt, Human
uaaagugcuuccuaacccagag

SEQ ID NO: 650632 - RNA, 22 nt, Human
cuucuuaacuguauauacuaug

SEQ ID NO: 650633 - RNA, 22 nt, Human
agcagguguaucggucaccuac

SEQ ID NO: 650634 - RNA, 22 nt, Human
acacagggauauuucagguggu

SEQ ID NO: 650635 - RNA, 18 nt, Human
ucagcuuccagcauguuu

SEQ ID NO: 650636 - RNA, 22 nt, Human
uauaaagaaguguaaacaggaa

SEQ ID NO: 650637 - RNA, 22 nt, Human
acaacauuauacauagaaagcu

SEQ ID NO: 650638 - RNA, 22 nt, Human
aauaggaagcaccaaauucucc

SEQ ID NO: 650639 - RNA, 22 nt, Human
gggauggacugacgguagcgcg

SEQ ID NO: 650640 - RNA, 22 nt, Human
agucucaggcagaggaaggcua

SEQ ID NO: 650641 - RNA, 17 nt, Human
cugucugcgcaugaggu

SEQ ID NO: 650642 - RNA, 19 nt, Human
uacuuuuucaggacagagu

SEQ ID NO: 650643 - RNA, 22 nt, Human
cuucugugauuugguuaggaua

SEQ ID NO: 650644 - RNA, 22 nt, Human
uaaacaagaaacauuuucuguu

SEQ ID NO: 650645 - RNA, 22 nt, Human
caccccuugucuuuggggucgu

SEQ ID NO: 650646 - RNA, 22 nt, Human
uucuggaaaucagcagagggug

SEQ ID NO: 650647 - RNA, 23 nt, Human
auccugcugauggcccuccagga

SEQ ID NO: 650648 - RNA, 22 nt, Human
cagaauaaagguacaauugagu

SEQ ID NO: 650649 - RNA, 23 nt, Human
aaucuggcugauguuuuuucucu

SEQ ID NO: 650650 - RNA, 19 nt, Human
ccugaggaaaagaugauug

SEQ ID NO: 650651 - RNA, 22 nt, Human
auugugcaaauauuaucuguag

SEQ ID NO: 650652 - RNA, 22 nt, Human
cagaagcugcagugaucuggga

SEQ ID NO: 650653 - RNA, 22 nt, Human
ggcucugcagugacuugagggg

SEQ ID NO: 650654 - RNA, 18 nt, Human
auuuaugcuaaugggaua

SEQ ID NO: 650655 - RNA, 21 nt, Human
ugacagcauagagcagggagg

SEQ ID NO: 650656 - RNA, 20 nt, Human
cuguccauauuugaaaaugc

SEQ ID NO: 650657 - RNA, 22 nt, Human
ugucuucaucuccaugcacaga

SEQ ID NO: 650658 - RNA, 22 nt, Human
aaguuuuauuggaacauagcca

SEQ ID NO: 650659 - RNA, 22 nt, Human
uucuuucucuacuagcagagcu

SEQ ID NO: 650660 - RNA, 22 nt, Human
cuauauacuuuucacagauguu

SEQ ID NO: 650661 - RNA, 22 nt, Human
uggucuggaacuccuggcuuca

SEQ ID NO: 650662 - RNA, 20 nt, Human
uuauuucaguugcuagauug

SEQ ID NO: 650663 - RNA, 22 nt, Human
uauguagcaauagcaucauacu

SEQ ID NO: 650664 - RNA, 22 nt, Human
cugucugggucuacauccucug

SEQ ID NO: 650665 - RNA, 22 nt, Human
ucuguuauucugucuauugcca

SEQ ID NO: 650666 - RNA, 19 nt, Human
guggccucggagcgcgcgg

SEQ ID NO: 650667 - RNA, 22 nt, Human
ucauacauucagcagauauuug

SEQ ID NO: 650668 - RNA, 22 nt, Human
gacaggcuagguugcuguccuc

SEQ ID NO: 650669 - RNA, 22 nt, Human
gauuucuaaguuuuaccacaaa

SEQ ID NO: 650670 - RNA, 22 nt, Human
uaguuuagaauguugcaauaca

SEQ ID NO: 650671 - RNA, 22 nt, Human
guuauguaugggggccuuauga

SEQ ID NO: 650672 - RNA, 23 nt, Human
gugcaaagauauaccacauggcu

SEQ ID NO: 650673 - RNA, 19 nt, Human
cccagcucucguggugugc

SEQ ID NO: 650674 - RNA, 19 nt, Human
ggcauccagaacuaccagu

SEQ ID NO: 650675 - RNA, 22 nt, Human
aaggugggcagaucacaagguc

SEQ ID NO: 650676 - RNA, 22 nt, Human
cccuggccagcucaugucugag

SEQ ID NO: 650677 - RNA, 22 nt, Human
uuaguugauagccaaaauuuau

SEQ ID NO: 650678 - RNA, 22 nt, Human
cacaugcccagaacuucucauu

SEQ ID NO: 650679 - RNA, 22 nt, Human
aauaacagagucuucaagauag

SEQ ID NO: 650680 - RNA, 22 nt, Human
cucucugggguuccagacgugg

SEQ ID NO: 650681 - RNA, 22 nt, Human
cuccaggagcugugucuuucuu

SEQ ID NO: 650682 - RNA, 22 nt, Human
uauaaagugugaacugugagua

SEQ ID NO: 650683 - RNA, 20 nt, Human
cugcaucugugacuugcaaa

SEQ ID NO: 650684 - RNA, 22 nt, Human
gcugaaaugggcacugaaggcc

SEQ ID NO: 650685 - RNA, 22 nt, Human
cuaccuucaaguuccucccucu

SEQ ID NO: 650686 - RNA, 22 nt, Human
ggcugccaggagggaggccagu

SEQ ID NO: 650687 - RNA, 22 nt, Human
agugcccugcuggggcaggaga

SEQ ID NO: 650688 - RNA, 22 nt, Human
cagcuccagcucugggcgccuc

SEQ ID NO: 650689 - RNA, 22 nt, Human
acugagugggagguuuguguga

SEQ ID NO: 650690 - RNA, 22 nt, Human
acaccagggauaugaggaagga

SEQ ID NO: 650691 - RNA, 22 nt, Human
accugcccuggaggaagauauu

SEQ ID NO: 650692 - RNA, 22 nt, Human
uuugguccuaagcugcucucua

SEQ ID NO: 650693 - RNA, 22 nt, Human
caguuaaacgggccaugugagu

SEQ ID NO: 650694 - RNA, 22 nt, Human
cugcccugaccugccucagagu

SEQ ID NO: 650695 - RNA, 20 nt, Human
uggauucuggagcugcccuc

SEQ ID NO: 650696 - RNA, 20 nt, Human
aucuuugucucuguaguugu

SEQ ID NO: 650697 - RNA, 22 nt, Human
ccuggcagacugugagggcagg

SEQ ID NO: 650698 - RNA, 22 nt, Human
aacaugcaugaagaaguuauau

SEQ ID NO: 650699 - RNA, 22 nt, Human
cagacagagcucacaagucuuu

SEQ ID NO: 650700 - RNA, 22 nt, Human
cugcgugcauuaauauuuccuu

SEQ ID NO: 650701 - RNA, 22 nt, Human
cuugaacucaaugugaggaaga

SEQ ID NO: 650702 - RNA, 22 nt, Human
gagaaaugagugauucacuuuu

SEQ ID NO: 650703 - RNA, 22 nt, Human
ugcagaaagucacauucccuuu

SEQ ID NO: 650704 - RNA, 22 nt, Human
caauauagagagaaaauuaugu

SEQ ID NO: 650705 - RNA, 22 nt, Human
acagaucuacauugucugaccc

SEQ ID NO: 650706 - RNA, 22 nt, Human
uguguguggggaggcagcagau

SEQ ID NO: 650707 - RNA, 20 nt, Human
caaaucacagguaauugcaa

SEQ ID NO: 650708 - RNA, 22 nt, Human
aggcccagcccguccucgugcu

SEQ ID NO: 650709 - RNA, 22 nt, Human
gcacccaguuugucucaggguu

SEQ ID NO: 650710 - RNA, 22 nt, Human
cugguaggggugacuguuaucg

SEQ ID NO: 650711 - RNA, 22 nt, Human
auaccuguguauccacaagcgu

SEQ ID NO: 650712 - RNA, 22 nt, Human
gacccuccuacuacccuggaaa

SEQ ID NO: 650713 - RNA, 23 nt, Human
ccuggcugaccugaagguguagu

SEQ ID NO: 650714 - RNA, 22 nt, Human
gagcucugcuuggguucuuagg

SEQ ID NO: 650715 - RNA, 22 nt, Human
gaguaauuuucuugauuucuua

SEQ ID NO: 650716 - RNA, 22 nt, Human
aggaacagaagagcaaugcagg

SEQ ID NO: 650717 - RNA, 22 nt, Human
cagggcggggucugccggcccu

SEQ ID NO: 650718 - RNA, 22 nt, Human
uugacaaaacaacacagauuuc

SEQ ID NO: 650719 - RNA, 22 nt, Human
ucuuccugcuuggugugucugg

SEQ ID NO: 650720 - RNA, 22 nt, Human
uacaggcauguagcauggugau

SEQ ID NO: 650721 - RNA, 22 nt, Human
aguccaggccuccucuuuuccu

SEQ ID NO: 650722 - RNA, 22 nt, Human
cagaaauguuuguuaauauugu

SEQ ID NO: 650723 - RNA, 22 nt, Human
gggacacagccaucuguguuuu

SEQ ID NO: 650724 - RNA, 22 nt, Human
ugcagggaacuuggacagcuag

SEQ ID NO: 650725 - RNA, 22 nt, Human
ugugagaauuccugaucacagg

SEQ ID NO: 650726 - RNA, 22 nt, Human
uucagacaaauuugaggaagcu

SEQ ID NO: 650727 - RNA, 22 nt, Human
ucaagaagauaaugucuagggu

SEQ ID NO: 650728 - RNA, 21 nt, Human
aggauauuaggugauuugggu

SEQ ID NO: 650729 - RNA, 22 nt, Human
gcagcuuggggacaugaaaaga

SEQ ID NO: 650730 - RNA, 22 nt, Human
agagguauuagguaauucagua

SEQ ID NO: 650731 - RNA, 22 nt, Human
cugggcucccucaugugucugc

SEQ ID NO: 650732 - RNA, 22 nt, Human
agggcacaggcuggcaggaucu

SEQ ID NO: 650733 - RNA, 22 nt, Human
aggccagggccagauuagccac

SEQ ID NO: 650734 - RNA, 22 nt, Human
ggcaaauugcugcaauuacuua

SEQ ID NO: 650735 - RNA, 22 nt, Human
ggaggugggagccuccaguggu

SEQ ID NO: 650736 - RNA, 22 nt, Human
caaggccuccugggcccagaga

SEQ ID NO: 650737 - RNA, 22 nt, Human
aagauaaacucuugauuucuga

SEQ ID NO: 650738 - RNA, 22 nt, Human
guccaggccaugguggacacag

SEQ ID NO: 650739 - RNA, 22 nt, Human
uuauuagcugggcuucagggug

SEQ ID NO: 650740 - RNA, 22 nt, Human
caaaugcuacuaauaggcaagu

SEQ ID NO: 650741 - RNA, 22 nt, Human
gggcagugguuacacagcugag

SEQ ID NO: 650742 - RNA, 22 nt, Human
ccaggcucugcgcuggacaugg

SEQ ID NO: 650743 - RNA, 22 nt, Human
aaaaagauguccugaaguuuag

SEQ ID NO: 650744 - RNA, 23 nt, Human
gccucugcagccuaguuaguguc

SEQ ID NO: 650745 - RNA, 22 nt, Human
uguguacacacagauauauaca

SEQ ID NO: 650746 - RNA, 22 nt, Human
uggcuggagcauuccuugucuu

SEQ ID NO: 650747 - RNA, 22 nt, Human
aggcuucaaggaccugagggaa

SEQ ID NO: 650748 - RNA, 22 nt, Human
ugcagguguagaguugggcucc

SEQ ID NO: 650749 - RNA, 22 nt, Human
ugaggaaacugaggcacagaug

SEQ ID NO: 650750 - RNA, 22 nt, Human
uuuggcugagaaguugugcuuu

SEQ ID NO: 650751 - RNA, 22 nt, Human
cagcuuugauucuuucugccau

SEQ ID NO: 650752 - RNA, 22 nt, Human
aaaaguguucaggaagaauaau

SEQ ID NO: 650753 - RNA, 17 nt, Human
aggagucucagaugagc

SEQ ID NO: 650754 - RNA, 22 nt, Human
gucugcccagaagacauccccu

SEQ ID NO: 650755 - RNA, 22 nt, Human
aaauagagcuggguuaaacuuu

SEQ ID NO: 650756 - RNA, 22 nt, Human
agcaggcuuuccacagaaggag

SEQ ID NO: 650757 - RNA, 22 nt, Human
ucaccacucacucaggcaaguc

SEQ ID NO: 650758 - RNA, 22 nt, Human
ucugggucaugacucagcguga

SEQ ID NO: 650759 - RNA, 22 nt, Human
ugcaaacaggcauuucacaaac

SEQ ID NO: 650760 - RNA, 22 nt, Human
auuuaagaggcugcuagaguau

SEQ ID NO: 650761 - RNA, 22 nt, Human
aucauugaaauguaguuucauc

SEQ ID NO: 650762 - RNA, 22 nt, Human
uuagcaguuuccauuuugguca

SEQ ID NO: 650763 - RNA, 22 nt, Human
aggcugccucgugagcucgcug

SEQ ID NO: 650764 - RNA, 22 nt, Human
aucuggcuuaccuagggugccu

SEQ ID NO: 650765 - RNA, 22 nt, Human
caaagguuucacaguagcccau

SEQ ID NO: 650766 - RNA, 20 nt, Human
ucuguagucuguggcaagac

SEQ ID NO: 650767 - RNA, 22 nt, Human
agaaauaugcugauuagaugaa

SEQ ID NO: 650768 - RNA, 22 nt, Human
cugcucagaggaaggaaugucu

SEQ ID NO: 650769 - RNA, 22 nt, Human
gauucagugggcuuugggacag

SEQ ID NO: 650770 - RNA, 19 nt, Human
gacaggaaggcuaccagua

SEQ ID NO: 650771 - RNA, 22 nt, Human
agcugcccuuaauaggcauuca

SEQ ID NO: 650772 - RNA, 22 nt, Human
gcaauacaguaagaguacugua

SEQ ID NO: 650773 - RNA, 21 nt, Human
acacacuacacauuccuaguu

SEQ ID NO: 650774 - RNA, 22 nt, Human
gagaauuagggcguaauucaga

SEQ ID NO: 650775 - RNA, 22 nt, Human
cacaggagguuaggaagugguc

SEQ ID NO: 650776 - RNA, 22 nt, Human
uucaacauguucuacauaaggg

SEQ ID NO: 650777 - RNA, 22 nt, Human
ucaggguauguucuagaucuga

SEQ ID NO: 650778 - RNA, 22 nt, Human
augccaggaacaaacaguggug

SEQ ID NO: 650779 - RNA, 22 nt, Human
cccugggagcugccuggcugac

SEQ ID NO: 650780 - RNA, 22 nt, Human
ggugaggaaagauggugacagu

SEQ ID NO: 650781 - RNA, 22 nt, Human
caauuucugggccucacacaag

SEQ ID NO: 650782 - RNA, 22 nt, Human
gcccugagacugagcauggguu

SEQ ID NO: 650783 - RNA, 22 nt, Human
uaaaugugggggccacgggcuu

SEQ ID NO: 650784 - RNA, 22 nt, Human
aaaaugaggucaauauccuuuu

SEQ ID NO: 650785 - RNA, 22 nt, Human
ggcugucugugguggagcguug

SEQ ID NO: 650786 - RNA, 22 nt, Human
agaugggcgcccuggacugagg

SEQ ID NO: 650787 - RNA, 22 nt, Human
uucaaaguugcaugacagcuua

SEQ ID NO: 650788 - RNA, 22 nt, Human
auugcuuuucagacaaugaggc

SEQ ID NO: 650789 - RNA, 22 nt, Human
acugaacaccauuuauaacauu

SEQ ID NO: 650790 - RNA, 22 nt, Human
cugcuguguuucacaccucugg

SEQ ID NO: 650791 - RNA, 22 nt, Human
uucacaggugagcauuaggccg

SEQ ID NO: 650792 - RNA, 22 nt, Human
cugccucuauucacugaggcag

SEQ ID NO: 650793 - RNA, 22 nt, Human
ucaggcagugguaaaugaguua

SEQ ID NO: 650794 - RNA, 22 nt, Human
cagcucuguguauuuuccccac

SEQ ID NO: 650795 - RNA, 22 nt, Human
auucugugauaguugauccuua

SEQ ID NO: 650796 - RNA, 22 nt, Human
gaguagaacugguuaucuaaua

SEQ ID NO: 650797 - RNA, 22 nt, Human
acagcaguggauuagaggaugg

SEQ ID NO: 650798 - RNA, 22 nt, Human
uauauucauauuguugucucuc

SEQ ID NO: 650799 - RNA, 22 nt, Human
uggaagacaauguacaugcagu

SEQ ID NO: 650800 - RNA, 22 nt, Human
aauuucaguugcuaauaaguuc

SEQ ID NO: 650801 - RNA, 22 nt, Human
caucccugcccucaugccuaua

SEQ ID NO: 650802 - RNA, 22 nt, Human
gaguaauuuucuuaaaacauca

SEQ ID NO: 650803 - RNA, 22 nt, Human
gagaugcugucaggcuaucugu

SEQ ID NO: 650804 - RNA, 22 nt, Human
ccuguaggaacgccuucauuug

SEQ ID NO: 650805 - RNA, 22 nt, Human
caggcaagauccagaggcugcu

SEQ ID NO: 650806 - RNA, 22 nt, Human
agcuugggcaacacagcaagac

SEQ ID NO: 650807 - RNA, 22 nt, Human
aaggcuuucagcuaacuugauu

SEQ ID NO: 650808 - RNA, 22 nt, Human
aguagacagacagaacacagcc

SEQ ID NO: 650809 - RNA, 22 nt, Human
gugcaaaagucauugugguuuu

SEQ ID NO: 650810 - RNA, 22 nt, Human
cucuggaguccuguaucacucc

SEQ ID NO: 650811 - RNA, 22 nt, Human
uuacaguuagaaucugaugaaa

SEQ ID NO: 650812 - RNA, 22 nt, Human
acaggacaggcugggcuagacu

SEQ ID NO: 650813 - RNA, 22 nt, Human
ccuccaggcugaauaucuagaa

SEQ ID NO: 650814 - RNA, 22 nt, Human
agguggcagagcuggcccagcg

SEQ ID NO: 650815 - RNA, 22 nt, Human
caguuuaaggcaggacauggga

SEQ ID NO: 650816 - RNA, 21 nt, Human
aguuuccucaacugcagaagg

SEQ ID NO: 650817 - RNA, 18 nt, Human
gccagagguacuacugau

SEQ ID NO: 650818 - RNA, 22 nt, Human
uauuguuucuggcuguggcagc

SEQ ID NO: 650819 - RNA, 22 nt, Human
ucauugauggcuucuuucuugc

SEQ ID NO: 650820 - RNA, 22 nt, Human
ccugaaauccauaguuuacacu

SEQ ID NO: 650821 - RNA, 22 nt, Human
ccuuuuauauggcucaucacag

SEQ ID NO: 650822 - RNA, 22 nt, Human
aguacaugugguccuggccaga

SEQ ID NO: 650823 - RNA, 22 nt, Human
gcauccucugagagcucuagau

SEQ ID NO: 650824 - RNA, 22 nt, Human
gcaguguuuguguucucacaug

SEQ ID NO: 650825 - RNA, 22 nt, Human
agcugcuccuuuccugcaggcg

SEQ ID NO: 650826 - RNA, 23 nt, Human
acacauuuuucccguucugaggu

SEQ ID NO: 650827 - RNA, 22 nt, Human
gucuauauauugcuugaauaau

SEQ ID NO: 650828 - RNA, 22 nt, Human
uccagggagagccgcugcucca

SEQ ID NO: 650829 - RNA, 22 nt, Human
ugaggcagcaauuguauuguau

SEQ ID NO: 650830 - RNA, 22 nt, Human
agucucaucaggcauguaguca

SEQ ID NO: 650831 - RNA, 22 nt, Human
ggcagcaugggugccuuuguga

SEQ ID NO: 650832 - RNA, 22 nt, Human
aagaaagggagaaggauggugu

SEQ ID NO: 650833 - RNA, 22 nt, Human
agcaugcaggaaccacauggca

SEQ ID NO: 650834 - RNA, 22 nt, Human
auuagggaaacugacuugucuc

SEQ ID NO: 650835 - RNA, 17 nt, Human
guccugggaggagagag

SEQ ID NO: 650836 - RNA, 22 nt, Human
uaggaagcucuuuguuuuguga

SEQ ID NO: 650837 - RNA, 22 nt, Human
ggggucggggcauagccacuua

SEQ ID NO: 650838 - RNA, 22 nt, Human
uuucuaauaucacuuccagcug

SEQ ID NO: 650839 - RNA, 22 nt, Human
aaagucaugaugaaccaccgua

SEQ ID NO: 650840 - RNA, 22 nt, Human
ucugcagagggagugcuggguc

SEQ ID NO: 650841 - RNA, 22 nt, Human
aguugucccggucuagccacuu

SEQ ID NO: 650842 - RNA, 22 nt, Human
caguauaagagugaggaagggc

SEQ ID NO: 650843 - RNA, 22 nt, Human
guggcccuauuugaggacccca

SEQ ID NO: 650844 - RNA, 22 nt, Human
ggagggcugccagguggagcgg

SEQ ID NO: 650845 - RNA, 22 nt, Human
cuguccccgcgaguccagagcu

SEQ ID NO: 650846 - RNA, 22 nt, Human
gagcagcucugugccuggagac

SEQ ID NO: 650847 - RNA, 22 nt, Human
uuccaguccagggcuguuucca

SEQ ID NO: 650848 - RNA, 22 nt, Human
ugggaaggauacguuacaagau

SEQ ID NO: 650849 - RNA, 22 nt, Human
cgcugcagaugggagcugguug

SEQ ID NO: 650850 - RNA, 22 nt, Human
cucuccaggagcucagagucua

SEQ ID NO: 650851 - RNA, 22 nt, Human
agcccuccuggggccacgcugg

SEQ ID NO: 650852 - RNA, 18 nt, Human
gcugucugaggucugagg

SEQ ID NO: 650853 - RNA, 22 nt, Human
ccagcugccuaagcaauccaua

SEQ ID NO: 650854 - RNA, 22 nt, Human
auacacaggcaugcuucugauu

SEQ ID NO: 650855 - RNA, 22 nt, Human
caggccugggcuucggggcuga

SEQ ID NO: 650856 - RNA, 22 nt, Human
auggcagcaaaugucuggcugg

SEQ ID NO: 650857 - RNA, 22 nt, Human
cuggacucagggugcuccagcg

SEQ ID NO: 650858 - RNA, 22 nt, Human
caaagaaugagugaguacauaa

SEQ ID NO: 650859 - RNA, 22 nt, Human
ugggugugccauauuccauuuc

SEQ ID NO: 650860 - RNA, 22 nt, Human
uuucugcuuucagagugagaca

SEQ ID NO: 650861 - RNA, 22 nt, Human
ugcaaauaggggacaacucuuu

SEQ ID NO: 650862 - RNA, 22 nt, Human
caggguccaucuuucaucacug

SEQ ID NO: 650863 - RNA, 23 nt, Human
uucccacaucuuccacagcuaug

SEQ ID NO: 650864 - RNA, 22 nt, Human
uacaaaguaauguauaauaucg

SEQ ID NO: 650865 - RNA, 22 nt, Human
uaggggagcucgggugcaaucg

SEQ ID NO: 650866 - RNA, 22 nt, Human
cuguacaucccgagagccagua

SEQ ID NO: 650867 - RNA, 22 nt, Human
uccuucuggaggcuguaaagga

SEQ ID NO: 650868 - RNA, 22 nt, Human
auuauccagcaccaaugucaga

SEQ ID NO: 650869 - RNA, 22 nt, Human
cuuucuuaauuuuuaaggacac

SEQ ID NO: 650870 - RNA, 22 nt, Human
cugucauuggcagggagugugu

SEQ ID NO: 650871 - RNA, 22 nt, Human
cgagcagaauggagggugccga

SEQ ID NO: 650872 - RNA, 22 nt, Human
aacacucuacgugcagcuccua

SEQ ID NO: 650873 - RNA, 22 nt, Human
augacagauagucuucauuugc

SEQ ID NO: 650874 - RNA, 22 nt, Human
ucccuuccucauaggcagaagg

SEQ ID NO: 650875 - RNA, 22 nt, Human
cucuucuuauggccguggcuga

SEQ ID NO: 650876 - RNA, 22 nt, Human
agaaguuuguuauguaaacaaa

SEQ ID NO: 650877 - RNA, 22 nt, Human
cucggcagguggagguuguagu

SEQ ID NO: 650878 - RNA, 22 nt, Human
uucugcagaucaacuugacugc

SEQ ID NO: 650879 - RNA, 22 nt, Human
ccacugugagcaugaacaggac

SEQ ID NO: 650880 - RNA, 23 nt, Human
gccuuggagaagucacucaggga

SEQ ID NO: 650881 - RNA, 22 nt, Human
cugggccuccacgggccaucac

SEQ ID NO: 650882 - RNA, 22 nt, Human
uuugcaaauacagaggucuugc

SEQ ID NO: 650883 - RNA, 22 nt, Human
cuucacauggguacugcugauc

SEQ ID NO: 650884 - RNA, 22 nt, Human
cacaggaaauauuaggagggau

SEQ ID NO: 650885 - RNA, 22 nt, Human
ugguguguuagagcucagggca

SEQ ID NO: 650886 - RNA, 22 nt, Human
cugggcuugaguuccugcucgu

SEQ ID NO: 650887 - RNA, 22 nt, Human
ugugaauguauaguuuguauau

SEQ ID NO: 650888 - RNA, 22 nt, Human
gcuguggccgggcccaggccgc

SEQ ID NO: 650889 - RNA, 23 nt, Human
ucuccagugucucuucauugagu

SEQ ID NO: 650890 - RNA, 22 nt, Human
aaucuucagugucuaaaaagca

SEQ ID NO: 650891 - RNA, 22 nt, Human
aggaauuugcuggaacacagau

SEQ ID NO: 650892 - RNA, 22 nt, Human
agagauuacagcaggguccagc

SEQ ID NO: 650893 - RNA, 22 nt, Human
auaguuuaccuuccagauggcu

SEQ ID NO: 650894 - RNA, 22 nt, Human
auacaccaccuuggaucuuuca

SEQ ID NO: 650895 - RNA, 22 nt, Human
cugcugcauuccucuuuaugag

SEQ ID NO: 650896 - RNA, 22 nt, Human
gcgggccaccuuggagagcgcu

SEQ ID NO: 650897 - RNA, 22 nt, Human
ccacacugaccagcugugagac

SEQ ID NO: 650898 - RNA, 22 nt, Human
uucuuuaaaauagugagaaaga

SEQ ID NO: 650899 - RNA, 23 nt, Human
augugcacaucuccuuguccacc

SEQ ID NO: 650900 - RNA, 22 nt, Human
agagcccuaaacccugccuugg

SEQ ID NO: 650901 - RNA, 22 nt, Human
uuaaaaaccaucuuccuuuccu

SEQ ID NO: 650902 - RNA, 22 nt, Human
ggugccauauuauauacaguuu

SEQ ID NO: 650903 - RNA, 22 nt, Human
cuguggaaauaaacaaugcuaa

SEQ ID NO: 650904 - RNA, 18 nt, Human
aggcagcagcaucuucuc

SEQ ID NO: 650905 - RNA, 22 nt, Human
caggacaggcccuguggggucu

SEQ ID NO: 650906 - RNA, 21 nt, Human
agaggcccucggacugggcgu

SEQ ID NO: 650907 - RNA, 20 nt, Human
ccaaggacacuggcuccugg

SEQ ID NO: 650908 - RNA, 22 nt, Human
guauuaggaaauaugaagaaag

SEQ ID NO: 650909 - RNA, 22 nt, Human
gagauuggauuuaauggccaaa

SEQ ID NO: 650910 - RNA, 22 nt, Human
uagcuuuccuuguugccugugc

SEQ ID NO: 650911 - RNA, 22 nt, Human
cagccagcuucagauccaagcc

SEQ ID NO: 650912 - RNA, 20 nt, Human
acaaaguauugaggacaagu

SEQ ID NO: 650913 - RNA, 22 nt, Human
gcagccagggagagaaccaggg

SEQ ID NO: 650914 - RNA, 22 nt, Human
agacggauuaccugaggucagg

SEQ ID NO: 650915 - RNA, 23 nt, Human
ccugggcauuggcugcagcuucu

SEQ ID NO: 650916 - RNA, 18 nt, Human
ucauggcuugcagauggu

SEQ ID NO: 650917 - RNA, 22 nt, Human
cagcuuucugucucaugacuga

SEQ ID NO: 650918 - RNA, 22 nt, Human
gcagggaugcugaggcucagug

SEQ ID NO: 650919 - RNA, 22 nt, Human
accagagggcaaaccccagugu

SEQ ID NO: 650920 - RNA, 22 nt, Human
uaccagcaauguaugaguguuu

SEQ ID NO: 650921 - RNA, 22 nt, Human
aaagugcugaaauuacaggugu

SEQ ID NO: 650922 - RNA, 22 nt, Human
ucuuacaagucacccgcuuucu

SEQ ID NO: 650923 - RNA, 22 nt, Human
agcaauuuucccuuagucuuug

SEQ ID NO: 650924 - RNA, 22 nt, Human
ugggcagaggacagggaagauc

SEQ ID NO: 650925 - RNA, 22 nt, Human
ucuggcuucuccuagagcaaug

SEQ ID NO: 650926 - RNA, 22 nt, Human
ucacagaauaaauugagaagac

SEQ ID NO: 650927 - RNA, 22 nt, Human
aggccucaggaagguaaagaag

SEQ ID NO: 650928 - RNA, 22 nt, Human
cugagugaggggagcuugaugg

SEQ ID NO: 650929 - RNA, 22 nt, Human
agaggaggccaggcccacaccu

SEQ ID NO: 650930 - RNA, 22 nt, Human
gcacauacccacugucaagcac

SEQ ID NO: 650931 - RNA, 22 nt, Human
gcugaauacagcaugccuuaug

SEQ ID NO: 650932 - RNA, 22 nt, Human
agucaggauuuuggauuauucg

SEQ ID NO: 650933 - RNA, 22 nt, Human
uucaguaugacagacgcauugg

SEQ ID NO: 650934 - RNA, 22 nt, Human
gccacguugccacccgggugac

SEQ ID NO: 650935 - RNA, 22 nt, Human
cugcugugggcaggguagcugg

SEQ ID NO: 650936 - RNA, 22 nt, Human
uacaguuacugcauuucuaaua

SEQ ID NO: 650937 - RNA, 22 nt, Human
aauuucuaauugaaucucucuu

SEQ ID NO: 650938 - RNA, 22 nt, Human
cacagggccuugugugacugca

SEQ ID NO: 650939 - RNA, 22 nt, Human
agguuucaugggagacaacuca

SEQ ID NO: 650940 - RNA, 22 nt, Human
aggagugcaaauaguccagaga

SEQ ID NO: 650941 - RNA, 22 nt, Human
gggcagcuccuguggaauccac

SEQ ID NO: 650942 - RNA, 22 nt, Human
acaaagcacgagugccauggac

SEQ ID NO: 650943 - RNA, 22 nt, Human
uggagccuguguuucugcccag

SEQ ID NO: 650944 - RNA, 21 nt, Human
ucugggcuuucuuauaaggca

SEQ ID NO: 650945 - RNA, 22 nt, Human
gagagcugcauucucagacaca

SEQ ID NO: 650946 - RNA, 22 nt, Human
uacaaaucagaucaugaguuua

SEQ ID NO: 650947 - RNA, 22 nt, Human
gagcugaggcugaggccucacu

SEQ ID NO: 650948 - RNA, 22 nt, Human
caaaaguaauugcaguuuuugc

SEQ ID NO: 650949 - RNA, 20 nt, Human
cuuuuucuccagcucugagc

SEQ ID NO: 650950 - RNA, 22 nt, Human
uggagucaucuuaaucuaggca

SEQ ID NO: 650951 - RNA, 23 nt, Human
caggaaaugaauccaggaggaug

SEQ ID NO: 650952 - RNA, 22 nt, Human
cucugcuggcagcccccgggcc

SEQ ID NO: 650953 - RNA, 22 nt, Human
cacaguuugcauaggaaaaaca

SEQ ID NO: 650954 - RNA, 22 nt, Human
ugccagcuccugcagcuccugu

SEQ ID NO: 650955 - RNA, 22 nt, Human
gaauacaagccaggcacaaggc

SEQ ID NO: 650956 - RNA, 20 nt, Human
ucuccuggugacaguaccca

SEQ ID NO: 650957 - RNA, 22 nt, Human
ugcagcaggagccaggccuggu

SEQ ID NO: 650958 - RNA, 22 nt, Human
uguacaaauucaguucuagggu

SEQ ID NO: 650959 - RNA, 19 nt, Human
uggcuaauuuuauagaggc

SEQ ID NO: 650960 - RNA, 22 nt, Human
agcaggugacccaagcaggcug

SEQ ID NO: 650961 - RNA, 22 nt, Human
cucaagucugaguacuggcucu

SEQ ID NO: 650962 - RNA, 20 nt, Human
cuucuucaguaguuuguucu

SEQ ID NO: 650963 - RNA, 17 nt, Human
ugcuccugggacaagga

SEQ ID NO: 650964 - RNA, 21 nt, Human
aagcuuccaaacugcuggacu

SEQ ID NO: 650965 - RNA, 22 nt, Human
uucuuuuuaaaguguguaugca

SEQ ID NO: 650966 - RNA, 22 nt, Human
uccagagcugagcagucauucu

SEQ ID NO: 650967 - RNA, 22 nt, Human
aucucuccuucagcugaggccc

SEQ ID NO: 650968 - RNA, 22 nt, Human
cacacaugugugcagcuuagaa

SEQ ID NO: 650969 - RNA, 22 nt, Human
ucaguucuaacaguuuagaaca

SEQ ID NO: 650970 - RNA, 22 nt, Human
cugaguggaacauaggaugaua

SEQ ID NO: 650971 - RNA, 22 nt, Human
ugcauuuccagauuucuggagu

SEQ ID NO: 650972 - RNA, 22 nt, Human
agggcugacagugaggagucaa

SEQ ID NO: 650973 - RNA, 22 nt, Human
ucaggcugaaucauccuagcuu

SEQ ID NO: 650974 - RNA, 22 nt, Human
uuggaaaugcauuuguuauuau

SEQ ID NO: 650975 - RNA, 22 nt, Human
uccugagauaggaguugaaggc

SEQ ID NO: 650976 - RNA, 22 nt, Human
cagagggcacaugguuuccuca

SEQ ID NO: 650977 - RNA, 22 nt, Human
agaacagaggccuuauguuuca

SEQ ID NO: 650978 - RNA, 22 nt, Human
uauugaguuacagaaaauacuu

SEQ ID NO: 650979 - RNA, 22 nt, Human
ucagcaggcaccggaaguguuu

SEQ ID NO: 650980 - RNA, 22 nt, Human
cugguggagagugggcucugga

SEQ ID NO: 650981 - RNA, 22 nt, Human
cagcugcuguuacugcuuauua

SEQ ID NO: 650982 - RNA, 22 nt, Human
gugcccacgaggccaggcuggu

SEQ ID NO: 650983 - RNA, 22 nt, Human
ugaacaaauggaaauaaccagu

SEQ ID NO: 650984 - RNA, 22 nt, Human
ucccugggccuaucuuagcucc

SEQ ID NO: 650985 - RNA, 22 nt, Human
uucuuauguucacauaauucca

SEQ ID NO: 650986 - RNA, 22 nt, Human
auacaugacacugggcuacagg

SEQ ID NO: 650987 - RNA, 22 nt, Human
ucugaaauauugguaauacuuu

SEQ ID NO: 650988 - RNA, 22 nt, Human
ucugugccaccucuccaguguc

SEQ ID NO: 650989 - RNA, 21 nt, Human
ucagacuugagcucuucuaca

SEQ ID NO: 650990 - RNA, 22 nt, Human
auuagauacacagauuuccacu

SEQ ID NO: 650991 - RNA, 22 nt, Human
aacugcuugagauauguuuguc

SEQ ID NO: 650992 - RNA, 18 nt, Human
acugugugaauuagcucc

SEQ ID NO: 650993 - RNA, 22 nt, Human
gccucccuguuuccugcuccaa

SEQ ID NO: 650994 - RNA, 22 nt, Human
gcuccgugggcauugcuaggug

SEQ ID NO: 650995 - RNA, 22 nt, Human
uuaaggaaggagucuuaaaugg

SEQ ID NO: 650996 - RNA, 18 nt, Human
uccagggcuuccuccucu

SEQ ID NO: 650997 - RNA, 22 nt, Human
cucuuuacugcuacuacaaaga

SEQ ID NO: 650998 - RNA, 22 nt, Human
agccccuccaguggcauaaaau

SEQ ID NO: 650999 - RNA, 22 nt, Human
cuccaguggugauggggaagaa

SEQ ID NO: 651000 - RNA, 22 nt, Human
agcugucuccagauacaggauu

SEQ ID NO: 651001 - RNA, 22 nt, Human
uaacagaaguuguucauugugg

SEQ ID NO: 651002 - RNA, 22 nt, Human
cuuaaacugggcauucagagaa

SEQ ID NO: 651003 - RNA, 22 nt, Human
ucuaacagaaauucugacaaaa

SEQ ID NO: 651004 - RNA, 22 nt, Human
uggcuggaauggagcugagccu

SEQ ID NO: 651005 - RNA, 22 nt, Human
auugaauagcugcuuguuguau

SEQ ID NO: 651006 - RNA, 22 nt, Human
augaguuaguuucuugucuaga

SEQ ID NO: 651007 - RNA, 22 nt, Human
uacacaucacuguaucuuucag

SEQ ID NO: 651008 - RNA, 22 nt, Human
uuucaucuuauuugucuacauc

SEQ ID NO: 651009 - RNA, 22 nt, Human
aggcugaguuucucauucucgc

SEQ ID NO: 651010 - RNA, 22 nt, Human
ugggcugcuguuacaggggcug

SEQ ID NO: 651011 - RNA, 22 nt, Human
uaguuaaagauucuguuaagag

SEQ ID NO: 651012 - RNA, 22 nt, Human
gaauugucuuggccagugagaa

SEQ ID NO: 651013 - RNA, 22 nt, Human
auucagcauaaucaguagcuug

SEQ ID NO: 651014 - RNA, 22 nt, Human
auucuuuagccagcagguauau

SEQ ID NO: 651015 - RNA, 22 nt, Human
gauggcuuacagacaguuagga

SEQ ID NO: 651016 - RNA, 22 nt, Human
cagcaaggccauuggaugcagu

SEQ ID NO: 651017 - RNA, 22 nt, Human
acaggacaaggggaagaagaua

SEQ ID NO: 651018 - RNA, 22 nt, Human
uacaucauggugagcaggaggc

SEQ ID NO: 651019 - RNA, 22 nt, Human
caggcucggaagugcuggcuuu

SEQ ID NO: 651020 - RNA, 22 nt, Human
aaagaugaguccggcagacaua

SEQ ID NO: 651021 - RNA, 22 nt, Human
aguuucauauuaccaugucacc

SEQ ID NO: 651022 - RNA, 22 nt, Human
uuuuaucaaucauuaagacauu

SEQ ID NO: 651023 - RNA, 22 nt, Human
agcuuuggcccuggagguuacu

SEQ ID NO: 651024 - RNA, 19 nt, Human
gucacauuugucucccagg

SEQ ID NO: 651025 - RNA, 22 nt, Human
aaggccaggacaccaggggacu

SEQ ID NO: 651026 - RNA, 22 nt, Human
aguguucauuuauucauucacu

SEQ ID NO: 651027 - RNA, 22 nt, Human
agggaggaucugcuccuugucu

SEQ ID NO: 651028 - RNA, 22 nt, Human
cccugaggcaguaggagcuuuu

SEQ ID NO: 651029 - RNA, 22 nt, Human
uucaagguaugguagcugguca

SEQ ID NO: 651030 - RNA, 22 nt, Human
caagaggagcaggcaggugugc

SEQ ID NO: 651031 - RNA, 22 nt, Human
gcgagccucuggaguccucugg

SEQ ID NO: 651032 - RNA, 22 nt, Human
agggcuccaggggcugggugac

SEQ ID NO: 651033 - RNA, 22 nt, Human
acagggcucgucgggcccucgg

SEQ ID NO: 651034 - RNA, 22 nt, Human
ucagaggacaagcucccuggug

SEQ ID NO: 651035 - RNA, 22 nt, Human
gccugcuggcuguccauugcag

SEQ ID NO: 651036 - RNA, 22 nt, Human
cuuagcagaagcuucagcuuca

SEQ ID NO: 651037 - RNA, 22 nt, Human
aaacagcuuguuucaggaaagu

SEQ ID NO: 651038 - RNA, 22 nt, Human
aggcuguggcccuggucuagca

SEQ ID NO: 651039 - RNA, 22 nt, Human
gcaaacaugcugagaaauaaga

SEQ ID NO: 651040 - RNA, 22 nt, Human
aauucuagcauugugaaaauau

SEQ ID NO: 651041 - RNA, 22 nt, Human
ccuggguuggagagcaauggug

SEQ ID NO: 651042 - RNA, 22 nt, Human
aacacugagaacaauacagagu

SEQ ID NO: 651043 - RNA, 20 nt, Human
cugggccauccuuuuacaau

SEQ ID NO: 651044 - RNA, 22 nt, Human
uagagaggccgcggguccccuc

SEQ ID NO: 651045 - RNA, 22 nt, Human
gcagggacagggcagggccuuu

SEQ ID NO: 651046 - RNA, 22 nt, Human
aggcaggcucuggguaugugca

SEQ ID NO: 651047 - RNA, 22 nt, Human
uguggccugggagcugaggucu

SEQ ID NO: 651048 - RNA, 22 nt, Human
uagaaacauguucuguucuguu

SEQ ID NO: 651049 - RNA, 22 nt, Human
gcaagaguuuuuucucucuuga

SEQ ID NO: 651050 - RNA, 22 nt, Human
aguguguagcauuuggcaggca

SEQ ID NO: 651051 - RNA, 17 nt, Human
gcaagggaugggagauu

SEQ ID NO: 651052 - RNA, 22 nt, Human
gccagagcaugcacugccugca

SEQ ID NO: 651053 - RNA, 22 nt, Human
auaauguugaugauugucuuug

SEQ ID NO: 651054 - RNA, 22 nt, Human
uacaugaaccuuuaugugugau

SEQ ID NO: 651055 - RNA, 22 nt, Human
caugaccccccaaggccugcag

SEQ ID NO: 651056 - RNA, 22 nt, Human
aaagacacaugucucuuagauu

SEQ ID NO: 651057 - RNA, 22 nt, Human
uccuaacuaauuuguagcaaaa

SEQ ID NO: 651058 - RNA, 22 nt, Human
uuucagaaagcaucaucaaagu

SEQ ID NO: 651059 - RNA, 22 nt, Human
agcacccuccaacuucccugua

SEQ ID NO: 651060 - RNA, 22 nt, Human
cugggcucagaaccuuguuaag

SEQ ID NO: 651061 - RNA, 22 nt, Human
uugcuggcuugaagauagagga

SEQ ID NO: 651062 - RNA, 22 nt, Human
gcagcguggggcugagucagcu

SEQ ID NO: 651063 - RNA, 22 nt, Human
ggcuacaguggcacugggcuuu

SEQ ID NO: 651064 - RNA, 22 nt, Human
acuguauuuuggguguauuuuc

SEQ ID NO: 651065 - RNA, 15 nt, Human
aacaucacuauuuug

SEQ ID NO: 651066 - RNA, 22 nt, Human
gggaccaggugggugcauuccg

SEQ ID NO: 651067 - RNA, 20 nt, Human
ucccagucagccagagugag

SEQ ID NO: 651068 - RNA, 22 nt, Human
agcugcucuugggugacuucaa

SEQ ID NO: 651069 - RNA, 22 nt, Human
gucaggaaaacccggguugacu

SEQ ID NO: 651070 - RNA, 22 nt, Human
uggcuuuauccaucaucgccaa

SEQ ID NO: 651071 - RNA, 22 nt, Human
acaauguaggcugaaaaagcuu

SEQ ID NO: 651072 - RNA, 22 nt, Human
ucaguguuuauugcggugugua

SEQ ID NO: 651073 - RNA, 22 nt, Human
ccuggcagcgccgaagcuggcc

SEQ ID NO: 651074 - RNA, 22 nt, Human
agaaauuaugcaguaguuuuau

SEQ ID NO: 651075 - RNA, 22 nt, Human
agccugggcaacuccauucacu

SEQ ID NO: 651076 - RNA, 22 nt, Human
uaguuuagacuucaacccuuug

SEQ ID NO: 651077 - RNA, 22 nt, Human
ccagcaucuguccuuucccuca

SEQ ID NO: 651078 - RNA, 22 nt, Human
ggagacacuggaaaguauuaca

SEQ ID NO: 651079 - RNA, 22 nt, Human
uguggccaggaaaaggagaugg

SEQ ID NO: 651080 - RNA, 22 nt, Human
ucuaacauuguuuuucacagau

SEQ ID NO: 651081 - RNA, 22 nt, Human
cucuguggcuacacaaaccucc

SEQ ID NO: 651082 - RNA, 22 nt, Human
uuauuuaggagaaggaacccug

SEQ ID NO: 651083 - RNA, 22 nt, Human
cuggcucugucacccuuucucc

SEQ ID NO: 651084 - RNA, 22 nt, Human
uggcagcaugucccggccucag

SEQ ID NO: 651085 - RNA, 22 nt, Human
uuugcaaauucuugucuagccu

SEQ ID NO: 651086 - RNA, 22 nt, Human
gauggcaggugauagccgaguc

SEQ ID NO: 651087 - RNA, 22 nt, Human
caugucuugcccugauuaguag

SEQ ID NO: 651088 - RNA, 22 nt, Human
aguuagaauagucagauuguag

SEQ ID NO: 651089 - RNA, 22 nt, Human
aggagccacuuaggugagauaa

SEQ ID NO: 651090 - RNA, 22 nt, Human
uucagacuggcuacauuuucau

SEQ ID NO: 651091 - RNA, 22 nt, Human
cuuagcuagugcucagcuguca

SEQ ID NO: 651092 - RNA, 22 nt, Human
auccacucuaagaucuguggug

SEQ ID NO: 651093 - RNA, 22 nt, Human
uaaauaucaccuggaauuguua

SEQ ID NO: 651094 - RNA, 19 nt, Human
auuaacaucaguguuggcc

SEQ ID NO: 651095 - RNA, 22 nt, Human
ucauccaguaccauggaaggca

SEQ ID NO: 651096 - RNA, 22 nt, Human
cugagguaaaauuucuauuuug

SEQ ID NO: 651097 - RNA, 22 nt, Human
agguccuggugaccauggaguu

SEQ ID NO: 651098 - RNA, 22 nt, Human
caguauguccuuccucguuggc

SEQ ID NO: 651099 - RNA, 22 nt, Human
ucagaauuaagcucuuggucag

SEQ ID NO: 651100 - RNA, 21 nt, Human
uuuuaugcauaggaaauauau

SEQ ID NO: 651101 - RNA, 22 nt, Human
agguaauuacuagaguuauuua

SEQ ID NO: 651102 - RNA, 22 nt, Human
uaagcaaaagucgagugugagc

SEQ ID NO: 651103 - RNA, 22 nt, Human
ggcugugacccccacaggggug

SEQ ID NO: 651104 - RNA, 22 nt, Human
ucccagugcuacagacagggca

SEQ ID NO: 651105 - RNA, 22 nt, Human
acccaggguagaaccucagagc

SEQ ID NO: 651106 - RNA, 22 nt, Human
cuucuagagcuggagcaaaugu

SEQ ID NO: 651107 - RNA, 22 nt, Human
ccagcagcgauagggugagugc

SEQ ID NO: 651108 - RNA, 22 nt, Human
uucauaugcagauuaacaaaua

SEQ ID NO: 651109 - RNA, 22 nt, Human
ggcuggccuguguggccgccac

SEQ ID NO: 651110 - RNA, 22 nt, Human
acagcugggugucccacuucug

SEQ ID NO: 651111 - RNA, 22 nt, Human
aucaucuucgaaaaaagucaga

SEQ ID NO: 651112 - RNA, 21 nt, Human
guucaauagcucuuugaaugc

SEQ ID NO: 651113 - RNA, 22 nt, Human
augaggagaccaaggccugaug

SEQ ID NO: 651114 - RNA, 22 nt, Human
acagccaggacuuggcccucuu

SEQ ID NO: 651115 - RNA, 22 nt, Human
auggaugaaggcgaggaugagg

SEQ ID NO: 651116 - RNA, 22 nt, Human
agcuuuaaaaauccaauaucca

SEQ ID NO: 651117 - RNA, 22 nt, Human
aauuagaaccagaagccauauu

SEQ ID NO: 651118 - RNA, 22 nt, Human
aaguccaaggcugggugcagug

SEQ ID NO: 651119 - RNA, 22 nt, Human
ggagaagggaacugaguuuuug

SEQ ID NO: 651120 - RNA, 22 nt, Human
guaggcagugcuugauuuucca

SEQ ID NO: 651121 - RNA, 22 nt, Human
aaauguacaacauccauauaua

SEQ ID NO: 651122 - RNA, 22 nt, Human
uuucaugauuaacuuagugaau

SEQ ID NO: 651123 - RNA, 22 nt, Human
guccagagauggacgagcagau

SEQ ID NO: 651124 - RNA, 22 nt, Human
ccagggugaccagcuggccuag

SEQ ID NO: 651125 - RNA, 22 nt, Human
uaaaggcuucugcagggacuga

SEQ ID NO: 651126 - RNA, 22 nt, Human
aaucaguuguucacucugaaaa

SEQ ID NO: 651127 - RNA, 22 nt, Human
augaggucauucuuggauuaca

SEQ ID NO: 651128 - RNA, 22 nt, Human
gagaacacuuauggauuauucu

SEQ ID NO: 651129 - RNA, 22 nt, Human
ugucagugaguuggguccugag

SEQ ID NO: 651130 - RNA, 22 nt, Human
uugaauaguguuuucaguauac

SEQ ID NO: 651131 - RNA, 22 nt, Human
uggggaugaaacccaggcaucu

SEQ ID NO: 651132 - RNA, 22 nt, Human
cagaacaggucaugcuugcugu

SEQ ID NO: 651133 - RNA, 22 nt, Human
cucugcugccaccagaaccacu

SEQ ID NO: 651134 - RNA, 22 nt, Human
aaugugagccaaugcccguggg

SEQ ID NO: 651135 - RNA, 22 nt, Human
ucaauuucuugguuugauaaua

SEQ ID NO: 651136 - RNA, 22 nt, Human
cucucccagucaggcucaggau

SEQ ID NO: 651137 - RNA, 22 nt, Human
uugaaucuauaauuucaguauu

SEQ ID NO: 651138 - RNA, 22 nt, Human
uaauugaacuaacaugcaaaca

SEQ ID NO: 651139 - RNA, 20 nt, Human
agaaauacaugcaugcauga

SEQ ID NO: 651140 - RNA, 22 nt, Human
uugaagcacaaugucuuuuauc

SEQ ID NO: 651141 - RNA, 20 nt, Human
uccuuuccuccuucuaaaug

SEQ ID NO: 651142 - RNA, 22 nt, Human
acacagccccacggugagcaaa

SEQ ID NO: 651143 - RNA, 22 nt, Human
acuguauacuucuguauacaau

SEQ ID NO: 651144 - RNA, 22 nt, Human
ugaggcagaguaagauacauga

SEQ ID NO: 651145 - RNA, 22 nt, Human
guccagcugaucuugacccagc

SEQ ID NO: 651146 - RNA, 22 nt, Human
uugaggucuucauucuugggca

SEQ ID NO: 651147 - RNA, 22 nt, Human
cauuuaauagaugcuguuucag

SEQ ID NO: 651148 - RNA, 22 nt, Human
gaaucauuuagcucugcaugga

SEQ ID NO: 651149 - RNA, 22 nt, Human
caggcuggagugcaauggcaca

SEQ ID NO: 651150 - RNA, 22 nt, Human
gaaaguuuucauauauaccaaa

SEQ ID NO: 651151 - RNA, 22 nt, Human
ugcagaggcgccgugggugggg

SEQ ID NO: 651152 - RNA, 22 nt, Human
gaaggcugcgaggggagugccg

SEQ ID NO: 651153 - RNA, 22 nt, Human
gcugaggcugggagcagccugu

SEQ ID NO: 651154 - RNA, 22 nt, Human
gggcuccagaguccauguucuu

SEQ ID NO: 651155 - RNA, 22 nt, Human
ucugaaauaaaugcacuguuag

SEQ ID NO: 651156 - RNA, 22 nt, Human
ggcggggccucgcgaacggccu

SEQ ID NO: 651157 - RNA, 22 nt, Human
cagggagcuggcuggcugugcc

SEQ ID NO: 651158 - RNA, 22 nt, Human
guugcagauguggaacucgugc

SEQ ID NO: 651159 - RNA, 22 nt, Human
gauucuggguccugugucuugc

SEQ ID NO: 651160 - RNA, 22 nt, Human
uucacaguuuaauggcaaggau

SEQ ID NO: 651161 - RNA, 21 nt, Human
cagagcuguccaaacccugac

SEQ ID NO: 651162 - RNA, 22 nt, Human
uguggggcagcuagccggccug

SEQ ID NO: 651163 - RNA, 23 nt, Human
agcuggaggcugucuacucccaa

SEQ ID NO: 651164 - RNA, 22 nt, Human
uccccagcucugugcuuccacu

SEQ ID NO: 651165 - RNA, 22 nt, Human
auuucacagcgugguugacugc

SEQ ID NO: 651166 - RNA, 20 nt, Human
ccagcuuucccugcagcauc

SEQ ID NO: 651167 - RNA, 22 nt, Human
agucuggaauuuggccugagca

SEQ ID NO: 651168 - RNA, 22 nt, Human
gcacagagaggcugugagcgcc

SEQ ID NO: 651169 - RNA, 22 nt, Human
cuauuugucacaacugguguuu

SEQ ID NO: 651170 - RNA, 22 nt, Human
ccauuaaaauugugacauagga

SEQ ID NO: 651171 - RNA, 22 nt, Human
acuuuaaaacugaucaucagag

SEQ ID NO: 651172 - RNA, 18 nt, Human
gcucagguauagacaggg

SEQ ID NO: 651173 - RNA, 22 nt, Human
uuguguuugaugcugacacgca

SEQ ID NO: 651174 - RNA, 22 nt, Human
acaugucucuucugaaagacaa

SEQ ID NO: 651175 - RNA, 22 nt, Human
gugauuuucuccuccuagaagu

SEQ ID NO: 651176 - RNA, 22 nt, Human
ugugugcacguacauacuguau

SEQ ID NO: 651177 - RNA, 21 nt, Human
aaagcaucacgaacauuuggg

SEQ ID NO: 651178 - RNA, 22 nt, Human
cuccagggagcuuggaaagacc

SEQ ID NO: 651179 - RNA, 22 nt, Human
aggucaaaagcaaggccagguu

SEQ ID NO: 651180 - RNA, 21 nt, Human
caggaaagaaaacguacauau

SEQ ID NO: 651181 - RNA, 22 nt, Human
ccuuuuucccuggagggacagc

SEQ ID NO: 651182 - RNA, 21 nt, Human
ccaguauuauuucucuaugua

SEQ ID NO: 651183 - RNA, 22 nt, Human
uuaauauguugaaauuuauuag

SEQ ID NO: 651184 - RNA, 22 nt, Human
cugugcaguggcagcguguggg

SEQ ID NO: 651185 - RNA, 18 nt, Human
ccucacagacuuccaugu

SEQ ID NO: 651186 - RNA, 22 nt, Human
ucccauggucuauauagaggca

SEQ ID NO: 651187 - RNA, 20 nt, Human
augcuuucuugugugcugcu

SEQ ID NO: 651188 - RNA, 22 nt, Human
acaggcagguugagaaacauuu

SEQ ID NO: 651189 - RNA, 22 nt, Human
agucagagucgccgacagucaa

SEQ ID NO: 651190 - RNA, 22 nt, Human
ucuccaggaagcccucccugac

SEQ ID NO: 651191 - RNA, 21 nt, Human
ucaaauccugcuguuaccacu

SEQ ID NO: 651192 - RNA, 22 nt, Human
aaagcacaugaguaguguagua

SEQ ID NO: 651193 - RNA, 22 nt, Human
agacacugaaauguauugaaga

SEQ ID NO: 651194 - RNA, 22 nt, Human
aaucauggcguguuuagcuuaa

SEQ ID NO: 651195 - RNA, 22 nt, Human
ugccugcugccuuucaucccaa

SEQ ID NO: 651196 - RNA, 22 nt, Human
aaguuauuuccucgugacugaa

SEQ ID NO: 651197 - RNA, 22 nt, Human
auguuuaaauuuauagacagug

SEQ ID NO: 651198 - RNA, 22 nt, Human
uuccucaguuagugccugaggc

SEQ ID NO: 651199 - RNA, 22 nt, Human
cagugugaggaauuagugucca

SEQ ID NO: 651200 - RNA, 22 nt, Human
uaaggcuuauauacuuagacau

SEQ ID NO: 651201 - RNA, 22 nt, Human
uagugcacacgcauguagcagu

SEQ ID NO: 651202 - RNA, 22 nt, Human
gcagagauggcugccucugagu

SEQ ID NO: 651203 - RNA, 22 nt, Human
gaaucagaaucucuaagguggg

SEQ ID NO: 651204 - RNA, 22 nt, Human
gcucuagguuccuagccaaguc

SEQ ID NO: 651205 - RNA, 22 nt, Human
uggccagccuugucaucgcuuu

SEQ ID NO: 651206 - RNA, 22 nt, Human
guaagaagaugaauccaggcug

SEQ ID NO: 651207 - RNA, 22 nt, Human
ucugcccugccauucacuggaa

SEQ ID NO: 651208 - RNA, 22 nt, Human
aaagaguuuccauugacauuuc

SEQ ID NO: 651209 - RNA, 22 nt, Human
cagaaagcccuauguacagugg

SEQ ID NO: 651210 - RNA, 22 nt, Human
cuggaaagugcauguaaugagg

SEQ ID NO: 651211 - RNA, 22 nt, Human
ugcagucuuccagcugcacaaa

SEQ ID NO: 651212 - RNA, 23 nt, Human
uuuguucacuccugggaaagaca

SEQ ID NO: 651213 - RNA, 21 nt, Human
cagaggccucaugcucugugc

SEQ ID NO: 651214 - RNA, 22 nt, Human
gcuuaguguaggaccuggaaua

SEQ ID NO: 651215 - RNA, 22 nt, Human
cccaggaagggaugccaaggaa

SEQ ID NO: 651216 - RNA, 22 nt, Human
ggggcuggcucacuaagagacu

SEQ ID NO: 651217 - RNA, 22 nt, Human
cacauucacauuuuucccucua

SEQ ID NO: 651218 - RNA, 19 nt, Human
auggcuguguuccaguaaa

SEQ ID NO: 651219 - RNA, 22 nt, Human
ucaguuuucucaucuguaauuu

SEQ ID NO: 651220 - RNA, 22 nt, Human
gggaaauuaaugacugguugga

SEQ ID NO: 651221 - RNA, 22 nt, Human
auaauacaugguugaucuuuuc

SEQ ID NO: 651222 - RNA, 22 nt, Human
uauuugcucaauaauaguuuua

SEQ ID NO: 651223 - RNA, 19 nt, Human
agacaaugggguuggcagu

SEQ ID NO: 651224 - RNA, 22 nt, Human
aagcuggggacucagaccccau

SEQ ID NO: 651225 - RNA, 22 nt, Human
auuagugcccaggcugccucuu

SEQ ID NO: 651226 - RNA, 22 nt, Human
uccucccuugacuccugcuuuu

SEQ ID NO: 651227 - RNA, 22 nt, Human
cagagugaacagugggaugugc

SEQ ID NO: 651228 - RNA, 22 nt, Human
ucucugucugcacccaaucaau

SEQ ID NO: 651229 - RNA, 22 nt, Human
cccaggcuagaaaggccaacaa

SEQ ID NO: 651230 - RNA, 22 nt, Human
gccacagcuuagaucacagccu

SEQ ID NO: 651231 - RNA, 22 nt, Human
gccuggagaggaagccggugga

SEQ ID NO: 651232 - RNA, 20 nt, Human
uggaaggucccagaggaauu

SEQ ID NO: 651233 - RNA, 22 nt, Human
cuuauguacacacauauauugu

SEQ ID NO: 651234 - RNA, 22 nt, Human
acuugggagggugugggcagcu

SEQ ID NO: 651235 - RNA, 22 nt, Human
uggcacaggcgguaagggugug

SEQ ID NO: 651236 - RNA, 22 nt, Human
ucacacauuucucaaguguagg

SEQ ID NO: 651237 - RNA, 22 nt, Human
aggcccugcccagugccacaag

SEQ ID NO: 651238 - RNA, 22 nt, Human
ugugacguuccugcuggcgacc

SEQ ID NO: 651239 - RNA, 23 nt, Human
caacuuuuggcuacaugcuuagc

SEQ ID NO: 651240 - RNA, 22 nt, Human
uccucucagugugguuguggga

SEQ ID NO: 651241 - RNA, 22 nt, Human
ugcagcugccuagggcuggcuu

SEQ ID NO: 651242 - RNA, 22 nt, Human
ugcuggcuguauaugugagagu

SEQ ID NO: 651243 - RNA, 22 nt, Human
aggugggcaccaggcuuguggu

SEQ ID NO: 651244 - RNA, 22 nt, Human
ugcugaggaaagaggauaaaag

SEQ ID NO: 651245 - RNA, 17 nt, Human
augugucugaguguccu

SEQ ID NO: 651246 - RNA, 22 nt, Human
uggaaugugaacauacaaggua

SEQ ID NO: 651247 - RNA, 22 nt, Human
ucuccaggacugagcuccagcc

SEQ ID NO: 651248 - RNA, 22 nt, Human
cagugcugggcagaggagagcg

SEQ ID NO: 651249 - RNA, 22 nt, Human
cauaagaagguaacauccuuaa

SEQ ID NO: 651250 - RNA, 22 nt, Human
ucugagguuuucauguuuucug

SEQ ID NO: 651251 - RNA, 22 nt, Human
cagaagcauuccagcaaauagu

SEQ ID NO: 651252 - RNA, 22 nt, Human
cauuugaaccuggauguucuua

SEQ ID NO: 651253 - RNA, 22 nt, Human
ucaggaagcucuugcugauucu

SEQ ID NO: 651254 - RNA, 22 nt, Human
guucauccugacuuggauuagu

SEQ ID NO: 651255 - RNA, 22 nt, Human
ccuucagccaguuuucuuuguu

SEQ ID NO: 651256 - RNA, 22 nt, Human
cucuccagccuuuagcccacgc

SEQ ID NO: 651257 - RNA, 18 nt, Human
cuggucucccuucgcuuu

SEQ ID NO: 651258 - RNA, 22 nt, Human
ucacagcaaaugcugcuucuca

SEQ ID NO: 651259 - RNA, 21 nt, Human
uccucugcucucauaccacaa

SEQ ID NO: 651260 - RNA, 22 nt, Human
cagacuugacggcagcugcuuu

SEQ ID NO: 651261 - RNA, 22 nt, Human
ugcccacaccugggggaggcug

SEQ ID NO: 651262 - RNA, 22 nt, Human
uuccacucuguccccuguggga

SEQ ID NO: 651263 - RNA, 22 nt, Human
augcugugguagacagcauucc

SEQ ID NO: 651264 - RNA, 22 nt, Human
acaggcuuagggcuugggcccg

SEQ ID NO: 651265 - RNA, 22 nt, Human
ugucagagcaaggccaggccag

SEQ ID NO: 651266 - RNA, 22 nt, Human
agcaacagggggauggccacug

SEQ ID NO: 651267 - RNA, 22 nt, Human
gaggcuguuggcugaucugagu

SEQ ID NO: 651268 - RNA, 22 nt, Human
ggcuccuuaucucuccuaugcc

SEQ ID NO: 651269 - RNA, 22 nt, Human
caggggcuguggcacauggugu

SEQ ID NO: 651270 - RNA, 22 nt, Human
gagugugucggucagcguggcg

SEQ ID NO: 651271 - RNA, 22 nt, Human
ugaaggaagaauaggcaguguu

SEQ ID NO: 651272 - RNA, 22 nt, Human
uguaugaagguuuaccugcugu

SEQ ID NO: 651273 - RNA, 22 nt, Human
ugaguucaaguccaaguugcug

SEQ ID NO: 651274 - RNA, 22 nt, Human
auagacaacacuuauuauuccu

SEQ ID NO: 651275 - RNA, 22 nt, Human
uuucugcuuaggacucugugga

SEQ ID NO: 651276 - RNA, 22 nt, Human
cagucccaggguugguucagcu

SEQ ID NO: 651277 - RNA, 22 nt, Human
uuggguaggagaaagaacagau

SEQ ID NO: 651278 - RNA, 22 nt, Human
uaagauguuuugguuugauaag

SEQ ID NO: 651279 - RNA, 22 nt, Human
cuucuggaggcuccagggaggu

SEQ ID NO: 651280 - RNA, 22 nt, Human
gggcugugggacccggcacuuu

SEQ ID NO: 651281 - RNA, 22 nt, Human
accagcugccuuuucuuaguag

SEQ ID NO: 651282 - RNA, 22 nt, Human
uuccauauuguacucuuuggag

SEQ ID NO: 651283 - RNA, 22 nt, Human
uccugaaggcagauggggauca

SEQ ID NO: 651284 - RNA, 22 nt, Human
ggccaggcgaugaccccuccac

SEQ ID NO: 651285 - RNA, 22 nt, Human
gaagaugugcaauacaaagaaa

SEQ ID NO: 651286 - RNA, 22 nt, Human
cacccucccgucagccccuggg

SEQ ID NO: 651287 - RNA, 22 nt, Human
gagcaggacagcagcuuccugg

SEQ ID NO: 651288 - RNA, 22 nt, Human
cauucacaaaaccacaugccau

SEQ ID NO: 651289 - RNA, 22 nt, Human
gaaaggugccccauaggcagga

SEQ ID NO: 651290 - RNA, 22 nt, Human
uuuguguuguuuuaagccacua

SEQ ID NO: 651291 - RNA, 22 nt, Human
uugcaccaaaugaguuaaaauu

SEQ ID NO: 651292 - RNA, 22 nt, Human
uauggaauggcuauuuucuagg

SEQ ID NO: 651293 - RNA, 22 nt, Human
ugcccuggugaagugcucuccu

SEQ ID NO: 651294 - RNA, 22 nt, Human
uuucaguguguaaauugaaaua

SEQ ID NO: 651295 - RNA, 22 nt, Human
ccaggcugggcuacaaguugag

SEQ ID NO: 651296 - RNA, 22 nt, Human
cuuucucuucacugucaugauc

SEQ ID NO: 651297 - RNA, 22 nt, Human
gcccugaggcaaaagaacaguc

SEQ ID NO: 651298 - RNA, 22 nt, Human
ucugucacuauuggccagaaca

SEQ ID NO: 651299 - RNA, 22 nt, Human
uuagaacaaagccaccagguga

SEQ ID NO: 651300 - RNA, 22 nt, Human
cuguuaaguguagauaaugugg

SEQ ID NO: 651301 - RNA, 22 nt, Human
gucaugugaauaaguguggggu

SEQ ID NO: 651302 - RNA, 22 nt, Human
ugcucuguccagugcaccauca

SEQ ID NO: 651303 - RNA, 22 nt, Human
gcaggagucccagaagguuuug

SEQ ID NO: 651304 - RNA, 22 nt, Human
ggaggguggcagcguccugggc

SEQ ID NO: 651305 - RNA, 20 nt, Human
ugcuguaagauuagagagcu

SEQ ID NO: 651306 - RNA, 22 nt, Human
agauguggccggcuagggagag

SEQ ID NO: 651307 - RNA, 22 nt, Human
agguaaauauaaaucuuacucu

SEQ ID NO: 651308 - RNA, 22 nt, Human
ggcugcagaaguacuuccggau

SEQ ID NO: 651309 - RNA, 22 nt, Human
ccuccaucuccagcuucugccu

SEQ ID NO: 651310 - RNA, 22 nt, Human
aauucacagcauuugcccaucu

SEQ ID NO: 651311 - RNA, 22 nt, Human
ugaaugauuaaaacccggacua

SEQ ID NO: 651312 - RNA, 22 nt, Human
gcagaugaggaagcuaaugcug

SEQ ID NO: 651313 - RNA, 22 nt, Human
agggcagagauuaauuaagaca

SEQ ID NO: 651314 - RNA, 22 nt, Human
ggcuccagaaacuucaguccau

SEQ ID NO: 651315 - RNA, 22 nt, Human
ucagagagguuaaauaucuugu

SEQ ID NO: 651316 - RNA, 22 nt, Human
ugucugugugagcaaaugacuu

SEQ ID NO: 651317 - RNA, 17 nt, Human
aggagcuggggguggug

SEQ ID NO: 651318 - RNA, 22 nt, Human
uggcccugaaggccuugagcau

SEQ ID NO: 651319 - RNA, 22 nt, Human
caggugggaccaugauagggca

SEQ ID NO: 651320 - RNA, 22 nt, Human
cuguuuuucagaagguaaggga

SEQ ID NO: 651321 - RNA, 22 nt, Human
uuguaacaggcacucugugcca

SEQ ID NO: 651322 - RNA, 22 nt, Human
uucugggcaguuggaaauuuca

SEQ ID NO: 651323 - RNA, 22 nt, Human
acacuucuuugucaccugcuuc

SEQ ID NO: 651324 - RNA, 22 nt, Human
uagcacagagcuuuuaaacuuc

SEQ ID NO: 651325 - RNA, 22 nt, Human
agcugccugugcugggagccca

SEQ ID NO: 651326 - RNA, 22 nt, Human
aagcacaauuuaggacugaaau

SEQ ID NO: 651327 - RNA, 21 nt, Human
gugcugcuagcgggacgggag

SEQ ID NO: 651328 - RNA, 22 nt, Human
acaaacugggauaggauccugu

SEQ ID NO: 651329 - RNA, 22 nt, Human
acaaaugagaauguagacagag

SEQ ID NO: 651330 - RNA, 22 nt, Human
uccacaucucucgccaaccaau

SEQ ID NO: 651331 - RNA, 22 nt, Human
caggaguccugaaaucugauga

SEQ ID NO: 651332 - RNA, 22 nt, Human
ugagccaugggacuccaaggga

SEQ ID NO: 651333 - RNA, 22 nt, Human
aggucacacuuggaucauagaa

SEQ ID NO: 651334 - RNA, 22 nt, Human
cugccuucuuucaaggguaagc

SEQ ID NO: 651335 - RNA, 22 nt, Human
uuuagcuugaaucuuguuuaaa

SEQ ID NO: 651336 - RNA, 22 nt, Human
aaauagcagcuuugacagcaca

SEQ ID NO: 651337 - RNA, 22 nt, Human
uguacacaugguguacacuccc

SEQ ID NO: 651338 - RNA, 22 nt, Human
aaagaucuccccuucaaagagu

SEQ ID NO: 651339 - RNA, 18 nt, Human
caggaugagugaugggga

SEQ ID NO: 651340 - RNA, 22 nt, Human
uccugaaggccugaguuccacc

SEQ ID NO: 651341 - RNA, 21 nt, Human
ugaaacuaccuacaagcuacc

SEQ ID NO: 651342 - RNA, 22 nt, Human
agagagcugacuuuggagucag

SEQ ID NO: 651343 - RNA, 21 nt, Human
ugcaauuuagacuugaacauu

SEQ ID NO: 651344 - RNA, 22 nt, Human
uaaaucagggagucaucugcga

SEQ ID NO: 651345 - RNA, 20 nt, Human
agucccuuuggucagguauu

SEQ ID NO: 651346 - RNA, 22 nt, Human
cccaggcagggacgugcucugg

SEQ ID NO: 651347 - RNA, 22 nt, Human
ugaggucccagggguagugugc

SEQ ID NO: 651348 - RNA, 22 nt, Human
cacuuagauacuagaucacaaa

SEQ ID NO: 651349 - RNA, 22 nt, Human
caguucuuuguggggaguucuc

SEQ ID NO: 651350 - RNA, 22 nt, Human
aggcuggcgucaggggcuguac

SEQ ID NO: 651351 - RNA, 19 nt, Human
ucugcagaggaauucuuca

SEQ ID NO: 651352 - RNA, 22 nt, Human
cugugcccaccuggcucugagg

SEQ ID NO: 651353 - RNA, 22 nt, Human
agacaguugauauacuauaaaa

SEQ ID NO: 651354 - RNA, 22 nt, Human
ccagccaggcauugcaaacuga

SEQ ID NO: 651355 - RNA, 22 nt, Human
uucugucuucccacugaggagc

SEQ ID NO: 651356 - RNA, 22 nt, Human
gccagguacauuuaagaagccu

SEQ ID NO: 651357 - RNA, 22 nt, Human
agucuuagauaagugaccaaug

SEQ ID NO: 651358 - RNA, 22 nt, Human
ugugaauaaugccgcaauaaac

SEQ ID NO: 651359 - RNA, 22 nt, Human
uuucuucuuaauacuggcugcu

SEQ ID NO: 651360 - RNA, 22 nt, Human
ugucuccacaggugucagcuca

SEQ ID NO: 651361 - RNA, 22 nt, Human
acacuguucuuugcacugagaa

SEQ ID NO: 651362 - RNA, 22 nt, Human
ugaggccaacuagggagaugga

SEQ ID NO: 651363 - RNA, 22 nt, Human
gaagcaugcuaaggauucucag

SEQ ID NO: 651364 - RNA, 22 nt, Human
ucagugcauuaauaauaucagu

SEQ ID NO: 651365 - RNA, 20 nt, Human
uguauauuuucugguguaaa

SEQ ID NO: 651366 - RNA, 22 nt, Human
accauccugaaaccuucaugcu

SEQ ID NO: 651367 - RNA, 22 nt, Human
ugugauuauauuguaguacauu

SEQ ID NO: 651368 - RNA, 22 nt, Human
gauccguuugugugggaguauu

SEQ ID NO: 651369 - RNA, 20 nt, Human
gaggaaaagcugccaggccu

SEQ ID NO: 651370 - RNA, 22 nt, Human
cacacaugaaguugcugagcua

SEQ ID NO: 651371 - RNA, 22 nt, Human
ggaacugaggaacgaacuggga

SEQ ID NO: 651372 - RNA, 22 nt, Human
ugaugugugauucauucucaaa

SEQ ID NO: 651373 - RNA, 22 nt, Human
ucaaggaggugcuuggcuucac

SEQ ID NO: 651374 - RNA, 22 nt, Human
ccagacccugcucuggggcucu

SEQ ID NO: 651375 - RNA, 22 nt, Human
gcagaacauggaaagagaacua

SEQ ID NO: 651376 - RNA, 22 nt, Human
agcauagaaaagauucccagag

SEQ ID NO: 651377 - RNA, 22 nt, Human
gaaugcuaagcaugugggaguu

SEQ ID NO: 651378 - RNA, 20 nt, Human
uauuuacaacuuagagccuc

SEQ ID NO: 651379 - RNA, 22 nt, Human
ccagaggcuggggaaggauaca

SEQ ID NO: 651380 - RNA, 19 nt, Human
cucuggcuuccaaagcauc

SEQ ID NO: 651381 - RNA, 22 nt, Human
ugggaagaggaugaggcauaug

SEQ ID NO: 651382 - RNA, 20 nt, Human
gcuuggaccuucugcucugu

SEQ ID NO: 651383 - RNA, 22 nt, Human
aucuuuaggcaaguuacuuaac

SEQ ID NO: 651384 - RNA, 23 nt, Human
auggggcucaacacuuaguagcu

SEQ ID NO: 651385 - RNA, 22 nt, Human
agcugcugcggaaagaugccac

SEQ ID NO: 651386 - RNA, 22 nt, Human
acaguuauucuuuaugcaacca

SEQ ID NO: 651387 - RNA, 22 nt, Human
ucuggagcuuccucauuuacag

SEQ ID NO: 651388 - RNA, 22 nt, Human
ucuggcucuccagugcucuuag

SEQ ID NO: 651389 - RNA, 22 nt, Human
agugucuguugaguuucaaaag

SEQ ID NO: 651390 - RNA, 22 nt, Human
agugaaauuuguuuagauaggu

SEQ ID NO: 651391 - RNA, 22 nt, Human
gacagcugcucccguuucugcu

SEQ ID NO: 651392 - RNA, 19 nt, Human
uggcagugugggguaugaa

SEQ ID NO: 651393 - RNA, 22 nt, Human
aaggcaauguaaauuacagcuu

SEQ ID NO: 651394 - RNA, 22 nt, Human
gucuccugagacugcagucacc

SEQ ID NO: 651395 - RNA, 22 nt, Human
ucuuggcuucuguauuuccugu

SEQ ID NO: 651396 - RNA, 22 nt, Human
acaauuguggcaauuuguaugu

SEQ ID NO: 651397 - RNA, 22 nt, Human
ccaaagcaagucacaugaucaa

SEQ ID NO: 651398 - RNA, 22 nt, Human
ucacccagccuuggcggguuug

SEQ ID NO: 651399 - RNA, 22 nt, Human
caauaacuuugauauuuugcgg

SEQ ID NO: 651400 - RNA, 22 nt, Human
gcauuuguuugggcuaaucuua

SEQ ID NO: 651401 - RNA, 22 nt, Human
augaggcaaagguggagguggg

SEQ ID NO: 651402 - RNA, 22 nt, Human
ccagcauggcaccugagaugag

SEQ ID NO: 651403 - RNA, 22 nt, Human
caggcauggaaaagcccagagg

SEQ ID NO: 651404 - RNA, 21 nt, Human
ucccucagacagggugccuau

SEQ ID NO: 651405 - RNA, 22 nt, Human
uuuacuguguccaucugugacu

SEQ ID NO: 651406 - RNA, 22 nt, Human
agagggcauaaaauagagcacg

SEQ ID NO: 651407 - RNA, 22 nt, Human
auugaaaauaaggccagaaaca

SEQ ID NO: 651408 - RNA, 22 nt, Human
ucucugguuauuaacuaacucc

SEQ ID NO: 651409 - RNA, 22 nt, Human
uggcugagaaugggaugaugcc

SEQ ID NO: 651410 - RNA, 22 nt, Human
guaaaauugcaauuacuuuugc

SEQ ID NO: 651411 - RNA, 22 nt, Human
uggggauggaugaaucuuugcu

SEQ ID NO: 651412 - RNA, 22 nt, Human
aacuguggccagggacuggagu

SEQ ID NO: 651413 - RNA, 18 nt, Human
ucuuccaacacugacacc

SEQ ID NO: 651414 - RNA, 22 nt, Human
uccagaguuugagucuccuucc

SEQ ID NO: 651415 - RNA, 22 nt, Human
gccacccugacgccgcagaccc

SEQ ID NO: 651416 - RNA, 22 nt, Human
agaaagggagcguggaucaauu

SEQ ID NO: 651417 - RNA, 22 nt, Human
gcagugugcauggcuuuuggcc

SEQ ID NO: 651418 - RNA, 22 nt, Human
cuauaaaucuacccagcauugg

SEQ ID NO: 651419 - RNA, 22 nt, Human
agucugaagauauucuugcagg

SEQ ID NO: 651420 - RNA, 22 nt, Human
agcuccagggaaagaguggauc

SEQ ID NO: 651421 - RNA, 22 nt, Human
cuaggaauagcaaaguaggaca

SEQ ID NO: 651422 - RNA, 22 nt, Human
ugcugcuuccugguagauagga

SEQ ID NO: 651423 - RNA, 22 nt, Human
auuuccauguccaaaaauuagu

SEQ ID NO: 651424 - RNA, 22 nt, Human
ucagggcauguauguuucuuua

SEQ ID NO: 651425 - RNA, 22 nt, Human
ggcagagccuucuggagcucgc

SEQ ID NO: 651426 - RNA, 22 nt, Human
acuugaaacccugagaugauaa

SEQ ID NO: 651427 - RNA, 22 nt, Human
ugaggugguccaaagacuguuu

SEQ ID NO: 651428 - RNA, 22 nt, Human
auuauuacuccugauuguacug

SEQ ID NO: 651429 - RNA, 22 nt, Human
guagaaauauuuaucucugaga

SEQ ID NO: 651430 - RNA, 22 nt, Human
ucacuguuaauaaauagcaaag

SEQ ID NO: 651431 - RNA, 22 nt, Human
uggcagcagcaaauggcauauc

SEQ ID NO: 651432 - RNA, 22 nt, Human
aguagcagugacagcugaggua

SEQ ID NO: 651433 - RNA, 22 nt, Human
ugucaucuguguuuugcuggag

SEQ ID NO: 651434 - RNA, 22 nt, Human
gacauaauccuccucaccuacu

SEQ ID NO: 651435 - RNA, 21 nt, Human
uuggccugauaucuuggagca

SEQ ID NO: 651436 - RNA, 22 nt, Human
auucacacacauuuagagcaga

SEQ ID NO: 651437 - RNA, 22 nt, Human
uucccaguuagucauuuuuaca

SEQ ID NO: 651438 - RNA, 22 nt, Human
gaggcagcugaaggagugacag

SEQ ID NO: 651439 - RNA, 22 nt, Human
cccagugucauucuaagggagg

SEQ ID NO: 651440 - RNA, 22 nt, Human
uucagaaggauuuuaacacaug

SEQ ID NO: 651441 - RNA, 22 nt, Human
uccaugagaacccuuggagaua

SEQ ID NO: 651442 - RNA, 22 nt, Human
ucugcaacgcacugcaaaaccu

SEQ ID NO: 651443 - RNA, 22 nt, Human
agagaauucuggugcuaacaag

SEQ ID NO: 651444 - RNA, 22 nt, Human
aguaacaucuuugacauuuguu

SEQ ID NO: 651445 - RNA, 22 nt, Human
aauauguuccacuuaaagcugg

SEQ ID NO: 651446 - RNA, 22 nt, Human
cuuccuucaauauaauuuuuac

SEQ ID NO: 651447 - RNA, 22 nt, Human
cagugucuuucagacucagaaa

SEQ ID NO: 651448 - RNA, 22 nt, Human
ccugaagaugcuguggccuggu

SEQ ID NO: 651449 - RNA, 22 nt, Human
aguuauaccuuauacacauaug

SEQ ID NO: 651450 - RNA, 22 nt, Human
cacaccagagguuaccugcaaa

SEQ ID NO: 651451 - RNA, 22 nt, Human
guccugagagaggcuccuugcc

SEQ ID NO: 651452 - RNA, 22 nt, Human
gccagcugcaaaguauguugaa

SEQ ID NO: 651453 - RNA, 22 nt, Human
uucaaacacugcuuugagaggg

SEQ ID NO: 651454 - RNA, 22 nt, Human
cagacccuuuucugagaggacc

SEQ ID NO: 651455 - RNA, 22 nt, Human
gccuagggguaagaguacuggc

SEQ ID NO: 651456 - RNA, 22 nt, Human
caagagcugcaaauagcgugac

SEQ ID NO: 651457 - RNA, 22 nt, Human
aaguaacacauguuacuucugc

SEQ ID NO: 651458 - RNA, 22 nt, Human
ugccacauggugcauuuccuag

SEQ ID NO: 651459 - RNA, 22 nt, Human
gcacagaacuucucuuaguagg

SEQ ID NO: 651460 - RNA, 22 nt, Human
gagaggggcccaagccacauag

SEQ ID NO: 651461 - RNA, 22 nt, Human
acccagauaaaugacagggcuu

SEQ ID NO: 651462 - RNA, 22 nt, Human
ccaggccuccugugaguggacc

SEQ ID NO: 651463 - RNA, 22 nt, Human
aggccaagauuuuggaucagcu

SEQ ID NO: 651464 - RNA, 22 nt, Human
cuacagcagagaccagccacau

SEQ ID NO: 651465 - RNA, 22 nt, Human
acagucuugagcaucagccaga

SEQ ID NO: 651466 - RNA, 22 nt, Human
uguccugggccggcgacugguc

SEQ ID NO: 651467 - RNA, 22 nt, Human
uagaaaagauaacauucugugc

SEQ ID NO: 651468 - RNA, 22 nt, Human
aagcccagcaucccugcaccag

SEQ ID NO: 651469 - RNA, 22 nt, Human
acccaggcuggagugcaguggu

SEQ ID NO: 651470 - RNA, 22 nt, Human
augcggagccccaagcuugaag

SEQ ID NO: 651471 - RNA, 22 nt, Human
ucugcucuguggcuucagcuaa

SEQ ID NO: 651472 - RNA, 22 nt, Human
uugugagcauuuuggugagcuu

SEQ ID NO: 651473 - RNA, 22 nt, Human
uucuauuuccaguccuucagag

SEQ ID NO: 651474 - RNA, 22 nt, Human
gcaaacagaaaugcaggacgcu

SEQ ID NO: 651475 - RNA, 22 nt, Human
acucagugaauuuucaucaaau

SEQ ID NO: 651476 - RNA, 19 nt, Human
uacauccucuuccucuuug

SEQ ID NO: 651477 - RNA, 22 nt, Human
acugcacaaggccuggacacac

SEQ ID NO: 651478 - RNA, 22 nt, Human
gcugaauaagagucuacuuugc

SEQ ID NO: 651479 - RNA, 22 nt, Human
aauuggaaaaugcuacauauca

SEQ ID NO: 651480 - RNA, 18 nt, Human
ugaccugcgcuucacggu

SEQ ID NO: 651481 - RNA, 22 nt, Human
agcuaaugaugagauacagaua

SEQ ID NO: 651482 - RNA, 22 nt, Human
agugcucauaaaaaugugaaac

SEQ ID NO: 651483 - RNA, 22 nt, Human
uucuuugaguuaguacagucca

SEQ ID NO: 651484 - RNA, 17 nt, Human
ucaugcccaacuauuac

SEQ ID NO: 651485 - RNA, 22 nt, Human
aguuuucugaccccugcucuau

SEQ ID NO: 651486 - RNA, 20 nt, Human
ggcugccuccuuccuuuccu

SEQ ID NO: 651487 - RNA, 22 nt, Human
ucacaugucagucuuaaacaga

SEQ ID NO: 651488 - RNA, 22 nt, Human
uuugcauugcagugguuuacag

SEQ ID NO: 651489 - RNA, 22 nt, Human
ggcugagggccagggcuagucu

SEQ ID NO: 651490 - RNA, 22 nt, Human
agcucugguauuucuuuaaucc

SEQ ID NO: 651491 - RNA, 22 nt, Human
cucugggucucccugaggcuaa

SEQ ID NO: 651492 - RNA, 22 nt, Human
ggcuuccuaucccaucugagug

SEQ ID NO: 651493 - RNA, 22 nt, Human
aacagcagcugaggagcugggc

SEQ ID NO: 651494 - RNA, 22 nt, Human
cauuaaacaaccuugaaucaau

SEQ ID NO: 651495 - RNA, 22 nt, Human
cucacugcaaguuccaccuacc

SEQ ID NO: 651496 - RNA, 22 nt, Human
uggccuuggacagagcgcuccu

SEQ ID NO: 651497 - RNA, 22 nt, Human
uacagugucugcaacugcacac

SEQ ID NO: 651498 - RNA, 22 nt, Human
aaacuucaguaggagccaaccu

SEQ ID NO: 651499 - RNA, 22 nt, Human
ugaguccaauaggggccuggaa

SEQ ID NO: 651500 - RNA, 22 nt, Human
uuuacaguauaguaggacucau

SEQ ID NO: 651501 - RNA, 22 nt, Human
augauucagcaauuuuauaucu

SEQ ID NO: 651502 - RNA, 22 nt, Human
gcaaaggcuucuuuuauucucc

SEQ ID NO: 651503 - RNA, 17 nt, Human
ucacugggccugcuccc

SEQ ID NO: 651504 - RNA, 22 nt, Human
uguacaaagccagaacucccaa

SEQ ID NO: 651505 - RNA, 22 nt, Human
agacccuguuaguuccagucuu

SEQ ID NO: 651506 - RNA, 19 nt, Human
aguuaaugagcuuuugauc

SEQ ID NO: 651507 - RNA, 21 nt, Human
gcccucaggggaggauggccu

SEQ ID NO: 651508 - RNA, 22 nt, Human
aggcagugcugugcccugaacc

SEQ ID NO: 651509 - RNA, 20 nt, Human
ucccucaggucauugggcug

SEQ ID NO: 651510 - RNA, 22 nt, Human
uugagauagaucucaucuuccc

SEQ ID NO: 651511 - RNA, 19 nt, Human
uucugggaggggcugacug

SEQ ID NO: 651512 - RNA, 22 nt, Human
ccuccuagaggaaccccagggc

SEQ ID NO: 651513 - RNA, 23 nt, Human
auguuuuaugucucuagcugcca

SEQ ID NO: 651514 - RNA, 22 nt, Human
ucuccugccacugcuucccauu

SEQ ID NO: 651515 - RNA, 21 nt, Human
uuacaaagcuacagauguugc

SEQ ID NO: 651516 - RNA, 23 nt, Human
cuguccuuggucuuggcugagug

SEQ ID NO: 651517 - RNA, 22 nt, Human
gcauaugaucacgugugucggu

SEQ ID NO: 651518 - RNA, 22 nt, Human
ucugaccacagacaaccugcua

SEQ ID NO: 651519 - RNA, 21 nt, Human
ucugagcugaguccucuaggu

SEQ ID NO: 651520 - RNA, 22 nt, Human
ugccauggugacugcaggaggu

SEQ ID NO: 651521 - RNA, 22 nt, Human
ugggcagaggcagcagaaaccu

SEQ ID NO: 651522 - RNA, 23 nt, Human
augcccugugcagaaauguggaa

SEQ ID NO: 651523 - RNA, 22 nt, Human
ucagaauugauuuucaaaacag

SEQ ID NO: 651524 - RNA, 22 nt, Human
uacagucuuuggaaagagauag

SEQ ID NO: 651525 - RNA, 19 nt, Human
ggcuggagaaaggaaucag

SEQ ID NO: 651526 - RNA, 18 nt, Human
cucugucauaagugucau

SEQ ID NO: 651527 - RNA, 22 nt, Human
acucucccugcuauccacuucc

SEQ ID NO: 651528 - RNA, 22 nt, Human
cugagagcagggacuugagcca

SEQ ID NO: 651529 - RNA, 22 nt, Human
augauucuggcaaauuuauuau

SEQ ID NO: 651530 - RNA, 22 nt, Human
aacaaaguagcugcuguucuua

SEQ ID NO: 651531 - RNA, 22 nt, Human
agaacaaugcguauuuuacucc

SEQ ID NO: 651532 - RNA, 20 nt, Human
guguggccaggagcugcgcu

SEQ ID NO: 651533 - RNA, 23 nt, Human
ucucaggcaaaccaggacaaguu

SEQ ID NO: 651534 - RNA, 22 nt, Human
agagucuggugcaugauaagca

SEQ ID NO: 651535 - RNA, 21 nt, Human
ggaguuuuucuggaagggacu

SEQ ID NO: 651536 - RNA, 22 nt, Human
gagaggccaaaaucccugcccc

SEQ ID NO: 651537 - RNA, 22 nt, Human
uccuucagauuccugcuucugg

SEQ ID NO: 651538 - RNA, 22 nt, Human
gagggauggugugagaggcuca

SEQ ID NO: 651539 - RNA, 22 nt, Human
ccagacuguggaguuccuggug

SEQ ID NO: 651540 - RNA, 22 nt, Human
auuguauaagucuauuuacaau

SEQ ID NO: 651541 - RNA, 22 nt, Human
cuguguuugacaggcggucucc

SEQ ID NO: 651542 - RNA, 22 nt, Human
cugcaugguucaaaugagcuaa

SEQ ID NO: 651543 - RNA, 21 nt, Human
cacaccaggcaugucuugagc

SEQ ID NO: 651544 - RNA, 22 nt, Human
gaugauuugaggauuucaugag

SEQ ID NO: 651545 - RNA, 22 nt, Human
agaacauuugucaaaaagccaa

SEQ ID NO: 651546 - RNA, 22 nt, Human
agcagcucgggcuacagagggg

SEQ ID NO: 651547 - RNA, 22 nt, Human
cucacaugauggccuuuuucau

SEQ ID NO: 651548 - RNA, 22 nt, Human
aaucuuagguuuggcuucaucu

SEQ ID NO: 651549 - RNA, 22 nt, Human
cuguuacugcuggagccauuga

SEQ ID NO: 651550 - RNA, 20 nt, Human
ugauauuucuggaaguggag

SEQ ID NO: 651551 - RNA, 22 nt, Human
gggaucugaugcacugcugaaa

SEQ ID NO: 651552 - RNA, 22 nt, Human
gcuucccacagcuggacugggg

SEQ ID NO: 651553 - RNA, 22 nt, Human
uaauaccacugugcucauuaua

SEQ ID NO: 651554 - RNA, 22 nt, Human
aaggacagguuggggcuucagg

SEQ ID NO: 651555 - RNA, 22 nt, Human
aucaggaucugggagccugaaa

SEQ ID NO: 651556 - RNA, 22 nt, Human
uugaaucucaucccaauguugu

SEQ ID NO: 651557 - RNA, 22 nt, Human
gcagggcugggugggagacaga

SEQ ID NO: 651558 - RNA, 22 nt, Human
aaccugagauaauaggagagua

SEQ ID NO: 651559 - RNA, 22 nt, Human
ccugugggagcccaggcagaua

SEQ ID NO: 651560 - RNA, 22 nt, Human
agauacauuaguaguuacuugu

SEQ ID NO: 651561 - RNA, 22 nt, Human
gagaggaguaggcugauggugc

SEQ ID NO: 651562 - RNA, 22 nt, Human
cauacuuucuuuuucacgcaua

SEQ ID NO: 651563 - RNA, 18 nt, Human
aagugggaaaagcaagca

SEQ ID NO: 651564 - RNA, 22 nt, Human
agguggcaggaggucagagaaa

SEQ ID NO: 651565 - RNA, 19 nt, Human
aaacuaaggggaaauguuu

SEQ ID NO: 651566 - RNA, 22 nt, Human
uauguuuacgcugguagaauua

SEQ ID NO: 651567 - RNA, 22 nt, Human
gggcuccagccacuggcugagg

SEQ ID NO: 651568 - RNA, 22 nt, Human
aguuucacacaacauuugcaug

SEQ ID NO: 651569 - RNA, 22 nt, Human
ugccuggcacagagcagguggc

SEQ ID NO: 651570 - RNA, 17 nt, Human
ucuccuggcucuaucag

SEQ ID NO: 651571 - RNA, 22 nt, Human
acagaccugggcacagaaagga

SEQ ID NO: 651572 - RNA, 22 nt, Human
cucugcuuguaucacauuugcu

SEQ ID NO: 651573 - RNA, 22 nt, Human
gcugagggauagcugcucacug

SEQ ID NO: 651574 - RNA, 22 nt, Human
auaaugaaugcagaguuauuuu

SEQ ID NO: 651575 - RNA, 22 nt, Human
ggccucucagggcagagacccu

SEQ ID NO: 651576 - RNA, 22 nt, Human
gaagcauauagguacugaacua

SEQ ID NO: 651577 - RNA, 22 nt, Human
uucuuugaauagauguucccag

SEQ ID NO: 651578 - RNA, 22 nt, Human
cuggugauuacaaugaugacaa

SEQ ID NO: 651579 - RNA, 22 nt, Human
aggcagcauccagaggagaaug

SEQ ID NO: 651580 - RNA, 22 nt, Human
ccuacauucucugaguuuuccu

SEQ ID NO: 651581 - RNA, 22 nt, Human
ugcuggcaggcaccuccugggg

SEQ ID NO: 651582 - RNA, 22 nt, Human
gaaauacaaaugccuagauccu

SEQ ID NO: 651583 - RNA, 22 nt, Human
acauuucucuuagaguuggacu

SEQ ID NO: 651584 - RNA, 22 nt, Human
guggcaggaucacggcucacug

SEQ ID NO: 651585 - RNA, 22 nt, Human
uuacauuguccagaaauuauug

SEQ ID NO: 651586 - RNA, 22 nt, Human
augugucuuauuugauuccaca

SEQ ID NO: 651587 - RNA, 22 nt, Human
augcuggucucauuggguuagg

SEQ ID NO: 651588 - RNA, 22 nt, Human
guguaaguaucuuuguaucuuu

SEQ ID NO: 651589 - RNA, 22 nt, Human
ugaggcagcuuuuucugugugu

SEQ ID NO: 651590 - RNA, 22 nt, Human
aaggcaccauugucaacgguaa

SEQ ID NO: 651591 - RNA, 22 nt, Human
cugggcaguucgcuuucguuuu

SEQ ID NO: 651592 - RNA, 20 nt, Human
aucaaaggcugauucagucc

SEQ ID NO: 651593 - RNA, 22 nt, Human
gaccaaggcccucagugggagg

SEQ ID NO: 651594 - RNA, 22 nt, Human
gcaguggcaugaugugggcuca

SEQ ID NO: 651595 - RNA, 22 nt, Human
ccagcucagggucacauggcac

SEQ ID NO: 651596 - RNA, 22 nt, Human
gaugggcugucugagcgcugug

SEQ ID NO: 651597 - RNA, 22 nt, Human
cagugcaguugguggcaggggu

SEQ ID NO: 651598 - RNA, 22 nt, Human
cucaguguuaaauauaagguau

SEQ ID NO: 651599 - RNA, 22 nt, Human
uaugacaaaugauauauuuggc

SEQ ID NO: 651600 - RNA, 22 nt, Human
aguccaugguuguaguucucuc

SEQ ID NO: 651601 - RNA, 22 nt, Human
gcucccaacucaggccuccucc

SEQ ID NO: 651602 - RNA, 22 nt, Human
ucccuggacagccuugccuggg

SEQ ID NO: 651603 - RNA, 22 nt, Human
gaauguuugacuaaagguagcu

SEQ ID NO: 651604 - RNA, 19 nt, Human
ggcucucuuaaagcuguuu

SEQ ID NO: 651605 - RNA, 22 nt, Human
caccuggcccagcuccagugcu

SEQ ID NO: 651606 - RNA, 22 nt, Human
ucacaguguuggaaucagagcu

SEQ ID NO: 651607 - RNA, 22 nt, Human
uagguucaugaaauuuucagga

SEQ ID NO: 651608 - RNA, 22 nt, Human
auuuuauccccacuggauuaca

SEQ ID NO: 651609 - RNA, 22 nt, Human
ugucuggacauugacaaucaug

SEQ ID NO: 651610 - RNA, 22 nt, Human
ugcuccaggccgccuggggcug

SEQ ID NO: 651611 - RNA, 22 nt, Human
ugaaucugauuucccuggaggc

SEQ ID NO: 651612 - RNA, 22 nt, Human
gaaucuuaaaucggaaucuuaa

SEQ ID NO: 651613 - RNA, 22 nt, Human
gccagagccacuuuugggugau

SEQ ID NO: 651614 - RNA, 22 nt, Human
cccugccagaugugcuucaguu

SEQ ID NO: 651615 - RNA, 22 nt, Human
ugcagcauucuuggccacuacu

SEQ ID NO: 651616 - RNA, 22 nt, Human
cugggcucaagaagucuucccu

SEQ ID NO: 651617 - RNA, 22 nt, Human
agagaacagacagaugcaauga

SEQ ID NO: 651618 - RNA, 22 nt, Human
uggcacaggaucucagcggcca

SEQ ID NO: 651619 - RNA, 22 nt, Human
uuggcccuuuaugggaugggca

SEQ ID NO: 651620 - RNA, 22 nt, Human
ugggagaagcagcagccaagug

SEQ ID NO: 651621 - RNA, 22 nt, Human
auuccucagcaggccuuuuguu

SEQ ID NO: 651622 - RNA, 22 nt, Human
ugaaagcagugccaugauuaug

SEQ ID NO: 651623 - RNA, 22 nt, Human
uaauuuuguauugccauuguag

SEQ ID NO: 651624 - RNA, 20 nt, Human
gcagggcaagggauaugaaa

SEQ ID NO: 651625 - RNA, 22 nt, Human
gcacaggccaugggaggacagc

SEQ ID NO: 651626 - RNA, 22 nt, Human
cauuucuguacauguuuuggug

SEQ ID NO: 651627 - RNA, 19 nt, Human
uuucaauggcuuagagaaa

SEQ ID NO: 651628 - RNA, 23 nt, Human
aaauaccugaauuagauauuauc

SEQ ID NO: 651629 - RNA, 22 nt, Human
gaugucuuaagcccagaaguuc

SEQ ID NO: 651630 - RNA, 22 nt, Human
aucccgaaccucuacuucuuuc

SEQ ID NO: 651631 - RNA, 17 nt, Human
agugagaaugucaugua

SEQ ID NO: 651632 - RNA, 22 nt, Human
gaacugaguuuucugccuggac

SEQ ID NO: 651633 - RNA, 22 nt, Human
uugagaaugaugagauucuucc

SEQ ID NO: 651634 - RNA, 22 nt, Human
gccuggcuugccagcccuggcg

SEQ ID NO: 651635 - RNA, 22 nt, Human
ugcuuucugcucuuguccacac

SEQ ID NO: 651636 - RNA, 22 nt, Human
gucuggaggagggcucugcggc

SEQ ID NO: 651637 - RNA, 22 nt, Human
agagggagugaaauggaauaga

SEQ ID NO: 651638 - RNA, 22 nt, Human
aggaagccaugguggacgucua

SEQ ID NO: 651639 - RNA, 22 nt, Human
cuggcccuguaggaugugaguu

SEQ ID NO: 651640 - RNA, 22 nt, Human
uuucacuagaacguucuuguuu

SEQ ID NO: 651641 - RNA, 22 nt, Human
aaaguccuagcgauccacagaa

SEQ ID NO: 651642 - RNA, 22 nt, Human
agcugaccaaaugccuacaguu

SEQ ID NO: 651643 - RNA, 22 nt, Human
aguaggcauuuaauaaacauga

SEQ ID NO: 651644 - RNA, 22 nt, Human
uucacauuacaaggccauauuu

SEQ ID NO: 651645 - RNA, 22 nt, Human
ugugggaggaauuagaauggga

SEQ ID NO: 651646 - RNA, 22 nt, Human
aaaggccucuguccuagugccu

SEQ ID NO: 651647 - RNA, 20 nt, Human
ccagggcuggcuccugggau

SEQ ID NO: 651648 - RNA, 22 nt, Human
gucauuuuugacuuugaaguga

SEQ ID NO: 651649 - RNA, 21 nt, Human
gagaaucaggaaggauugaug

SEQ ID NO: 651650 - RNA, 22 nt, Human
acagaggguguggaggaagacg

SEQ ID NO: 651651 - RNA, 21 nt, Human
ugagucucucagcuucaggua

SEQ ID NO: 651652 - RNA, 22 nt, Human
caugggguggugggcaaccuca

SEQ ID NO: 651653 - RNA, 22 nt, Human
cuucugagauguuguuuuacag

SEQ ID NO: 651654 - RNA, 22 nt, Human
ggccugcugacccaaguccugu

SEQ ID NO: 651655 - RNA, 22 nt, Human
guguaaaaacauacuauuucua

SEQ ID NO: 651656 - RNA, 22 nt, Human
cagagcuggacuuaaauauauu

SEQ ID NO: 651657 - RNA, 22 nt, Human
gggucaagccguugcccaaggc

SEQ ID NO: 651658 - RNA, 22 nt, Human
uuagagauacauuuguagcuug

SEQ ID NO: 651659 - RNA, 22 nt, Human
uuugugaauaagagaaugacag

SEQ ID NO: 651660 - RNA, 22 nt, Human
ggcagcucgucaggcugcggcg

SEQ ID NO: 651661 - RNA, 22 nt, Human
ccugcucuagacucugggaagg

SEQ ID NO: 651662 - RNA, 22 nt, Human
cuucagcccugagugccagcag

SEQ ID NO: 651663 - RNA, 19 nt, Human
ggcuucgaggcuggggaag

SEQ ID NO: 651664 - RNA, 22 nt, Human
auucuguaauugaacuguguug

SEQ ID NO: 651665 - RNA, 22 nt, Human
uuuugcuuuaagauggagagga

SEQ ID NO: 651666 - RNA, 22 nt, Human
agagcuggauggucaagauggc

SEQ ID NO: 651667 - RNA, 22 nt, Human
uuagacauuaaaugccauuuaa

SEQ ID NO: 651668 - RNA, 22 nt, Human
cccugcagaucagugagaacuu

SEQ ID NO: 651669 - RNA, 18 nt, Human
acaguaaagaaaggaauu

SEQ ID NO: 651670 - RNA, 22 nt, Human
ucagaaugaaauuucuuucaga

SEQ ID NO: 651671 - RNA, 19 nt, Human
augauacaggugaaaauug

SEQ ID NO: 651672 - RNA, 22 nt, Human
aaaagcuuuguuaauagguuug

SEQ ID NO: 651673 - RNA, 22 nt, Human
cagaaugagauaacccagauug

SEQ ID NO: 651674 - RNA, 22 nt, Human
ggcuuugcaggcagcaucaagg

SEQ ID NO: 651675 - RNA, 22 nt, Human
cuucagaacuauaaaaaguacu

SEQ ID NO: 651676 - RNA, 22 nt, Human
ugcuucugcucagcuuccuacu

SEQ ID NO: 651677 - RNA, 22 nt, Human
acugggccagaucagagcaacu

SEQ ID NO: 651678 - RNA, 22 nt, Human
aaggcaaugcuaagagguuugg

SEQ ID NO: 651679 - RNA, 22 nt, Human
ugcuugucacccugccugagug

SEQ ID NO: 651680 - RNA, 22 nt, Human
ggagacucaccccgcauucuag

SEQ ID NO: 651681 - RNA, 22 nt, Human
agucacauaguguuuuggaauc

SEQ ID NO: 651682 - RNA, 19 nt, Human
cucagucuggcucugccug

SEQ ID NO: 651683 - RNA, 21 nt, Human
agcuggaaucuggcugugcuu

SEQ ID NO: 651684 - RNA, 22 nt, Human
uggcugaggucuggggcuucug

SEQ ID NO: 651685 - RNA, 21 nt, Human
uagaaaucagcuggugccucu

SEQ ID NO: 651686 - RNA, 22 nt, Human
aauucauacucuauauugcuuu

SEQ ID NO: 651687 - RNA, 22 nt, Human
gccucugcgccucagccgaccu

SEQ ID NO: 651688 - RNA, 22 nt, Human
uacugaauggggcaguaagaaa

SEQ ID NO: 651689 - RNA, 22 nt, Human
uaggaaacaaaccugccucuuc

SEQ ID NO: 651690 - RNA, 22 nt, Human
ucagaggaacuggacuaaagcc

SEQ ID NO: 651691 - RNA, 22 nt, Human
agcugccaaguuucucaguuua

SEQ ID NO: 651692 - RNA, 22 nt, Human
uucuccucagcaaggcagcuuu

SEQ ID NO: 651693 - RNA, 22 nt, Human
cuccacucaccgaggcagagca

SEQ ID NO: 651694 - RNA, 17 nt, Human
agagagagcaugccacc

SEQ ID NO: 651695 - RNA, 22 nt, Human
uagugaaacaguuaucaaucug

SEQ ID NO: 651696 - RNA, 22 nt, Human
aggagcuggccuagaaaggaga

SEQ ID NO: 651697 - RNA, 22 nt, Human
auuagggcuggaugcaaggaaa

SEQ ID NO: 651698 - RNA, 21 nt, Human
ugcuugucaugaaugggccag

SEQ ID NO: 651699 - RNA, 22 nt, Human
uuuggaagggaaagaaaguacu

SEQ ID NO: 651700 - RNA, 22 nt, Human
uccugggagcacaugguccugc

SEQ ID NO: 651701 - RNA, 23 nt, Human
uugcuucugugcaauucaguacu

SEQ ID NO: 651702 - RNA, 22 nt, Human
ucucaggccccugaguuucucu

SEQ ID NO: 651703 - RNA, 22 nt, Human
uaucuucucaguauaugggaug

SEQ ID NO: 651704 - RNA, 22 nt, Human
ggagggcucaauugacuccuga

SEQ ID NO: 651705 - RNA, 20 nt, Human
cacagaacaaauugcaggac

SEQ ID NO: 651706 - RNA, 22 nt, Human
cuuaguuucucuguauguuuac

SEQ ID NO: 651707 - RNA, 22 nt, Human
gucugggucuccacagucagca

SEQ ID NO: 651708 - RNA, 22 nt, Human
ccacagcugacaauggauagac

SEQ ID NO: 651709 - RNA, 22 nt, Human
auucagcagccauggcuucuga

SEQ ID NO: 651710 - RNA, 22 nt, Human
cgcaggcugcagccaagaagag

SEQ ID NO: 651711 - RNA, 19 nt, Human
uuaacagucaccaaggaga

SEQ ID NO: 651712 - RNA, 20 nt, Human
guuuuucucucuugccacua

SEQ ID NO: 651713 - RNA, 22 nt, Human
auguuuccagcucagcugcagg

SEQ ID NO: 651714 - RNA, 22 nt, Human
uccuuccucggggacccagauc

SEQ ID NO: 651715 - RNA, 22 nt, Human
aauuaaauugguuuagagagga

SEQ ID NO: 651716 - RNA, 20 nt, Human
uuccuggcucuaggaccuug

SEQ ID NO: 651717 - RNA, 22 nt, Human
auucagcacaucuuuguacagc

SEQ ID NO: 651718 - RNA, 20 nt, Human
gcuguggcaagugcucacug

SEQ ID NO: 651719 - RNA, 22 nt, Human
aacacuguacuggaagauggac

SEQ ID NO: 651720 - RNA, 22 nt, Human
uuuuucucuucuguaaaguggu

SEQ ID NO: 651721 - RNA, 22 nt, Human
acagcugugagggucacuugua

SEQ ID NO: 651722 - RNA, 22 nt, Human
aguggcuguucauuuuacacaa

SEQ ID NO: 651723 - RNA, 22 nt, Human
aaguuuuacugaggacacaugu

SEQ ID NO: 651724 - RNA, 22 nt, Human
guggcagugccguuugguucag

SEQ ID NO: 651725 - RNA, 22 nt, Human
auucuggccuuggcucugucac

SEQ ID NO: 651726 - RNA, 22 nt, Human
cagugucugaaauaacaccgga

SEQ ID NO: 651727 - RNA, 22 nt, Human
uuccaguugguagaauguaagg

SEQ ID NO: 651728 - RNA, 22 nt, Human
auguuuaaaggagucagagacu

SEQ ID NO: 651729 - RNA, 22 nt, Human
augucuguccaacccugcaggg

SEQ ID NO: 651730 - RNA, 22 nt, Human
ggggaagaaaucuggguucuuc

SEQ ID NO: 651731 - RNA, 22 nt, Human
gcgagggcacgcgguugaaggc

SEQ ID NO: 651732 - RNA, 22 nt, Human
uugaagcaugguacuuguucaa

SEQ ID NO: 651733 - RNA, 20 nt, Human
ugcagggcugccucccagcu

SEQ ID NO: 651734 - RNA, 22 nt, Human
ucucccaggcugcccuguggac

SEQ ID NO: 651735 - RNA, 22 nt, Human
auauaaguguguggcuguuagu

SEQ ID NO: 651736 - RNA, 22 nt, Human
ugggggcuccaggcuccaggga

SEQ ID NO: 651737 - RNA, 22 nt, Human
gcuguccagguuguggagcaac

SEQ ID NO: 651738 - RNA, 22 nt, Human
cagcucagucuugaagcacugg

SEQ ID NO: 651739 - RNA, 22 nt, Human
ccaggagucuggaugagguguc

SEQ ID NO: 651740 - RNA, 22 nt, Human
gcucuuugcacagcucugcccu

SEQ ID NO: 651741 - RNA, 21 nt, Human
uggagcugaauuuuuggcauc

SEQ ID NO: 651742 - RNA, 22 nt, Human
ucauuuaauaauuuuugaguag

SEQ ID NO: 651743 - RNA, 20 nt, Human
agucccagaucaaauuucug

SEQ ID NO: 651744 - RNA, 22 nt, Human
cucaguuuccccggccugggcg

SEQ ID NO: 651745 - RNA, 22 nt, Human
gccugugccucagccugcagcc

SEQ ID NO: 651746 - RNA, 22 nt, Human
gacagcagccacagggagaggg

SEQ ID NO: 651747 - RNA, 22 nt, Human
cacagcuggugacagagcccag

SEQ ID NO: 651748 - RNA, 22 nt, Human
gugucaauaaauagcggugugg

SEQ ID NO: 651749 - RNA, 22 nt, Human
guggagcuggacccaggccucu

SEQ ID NO: 651750 - RNA, 21 nt, Human
ggguggucugcugaagaggga

SEQ ID NO: 651751 - RNA, 22 nt, Human
cugauaauguccugcaguaaau

SEQ ID NO: 651752 - RNA, 22 nt, Human
ucuaugaaugacacagauaaua

SEQ ID NO: 651753 - RNA, 22 nt, Human
gcucagagcccgaggcuugcau

SEQ ID NO: 651754 - RNA, 22 nt, Human
acagcaggaauuaacauauaag

SEQ ID NO: 651755 - RNA, 22 nt, Human
cagacuguggcuucuuggaggg

SEQ ID NO: 651756 - RNA, 22 nt, Human
ggcacagagcccagcuuccuag

SEQ ID NO: 651757 - RNA, 22 nt, Human
ggcagugaacagaaaugcagaa

SEQ ID NO: 651758 - RNA, 22 nt, Human
gccagagcacaggcugguagua

SEQ ID NO: 651759 - RNA, 22 nt, Human
gcaauguuuuuccuuccauauu

SEQ ID NO: 651760 - RNA, 22 nt, Human
gcagcauggaguuguggaauga

SEQ ID NO: 651761 - RNA, 22 nt, Human
aacauucagcuggguggagcag

SEQ ID NO: 651762 - RNA, 22 nt, Human
ucaccccuacauuucccuugcu

SEQ ID NO: 651763 - RNA, 22 nt, Human
ucuguaaucaagauauuugaga

SEQ ID NO: 651764 - RNA, 22 nt, Human
auuuagucucccuuaucaagga

SEQ ID NO: 651765 - RNA, 22 nt, Human
guuuggaaguuaagugcagcag

SEQ ID NO: 651766 - RNA, 22 nt, Human
cuuccuguugucacagucugcg

SEQ ID NO: 651767 - RNA, 22 nt, Human
gggaggacgguccagggcaaag

SEQ ID NO: 651768 - RNA, 22 nt, Human
cggagaggaccugcaacucgcu

SEQ ID NO: 651769 - RNA, 22 nt, Human
ucaguucuuauuuucaugaaua

SEQ ID NO: 651770 - RNA, 22 nt, Human
aagguacaccaaaguucaaguu

SEQ ID NO: 651771 - RNA, 22 nt, Human
caaccugagacuccaggcaccu

SEQ ID NO: 651772 - RNA, 22 nt, Human
gcccaggagaggccagggcuga

SEQ ID NO: 651773 - RNA, 22 nt, Human
acaauuccacauggcaugcagg

SEQ ID NO: 651774 - RNA, 22 nt, Human
uauuuucuggggagagugaacc

SEQ ID NO: 651775 - RNA, 22 nt, Human
cuuucugaaagacauuuuaacu

SEQ ID NO: 651776 - RNA, 22 nt, Human
uggaacaaauuacaauuaacuu

SEQ ID NO: 651777 - RNA, 22 nt, Human
augugagcuccggcagguggaa

SEQ ID NO: 651778 - RNA, 22 nt, Human
cuggaaaguacagugugucaca

SEQ ID NO: 651779 - RNA, 22 nt, Human
cauaauuuuccaugguuugcua

SEQ ID NO: 651780 - RNA, 22 nt, Human
gugaacuuccagaugauaaaca

SEQ ID NO: 651781 - RNA, 22 nt, Human
agcccagcaaagggagguucag

SEQ ID NO: 651782 - RNA, 22 nt, Human
cucugcaaucugagcacuugua

SEQ ID NO: 651783 - RNA, 22 nt, Human
gucacuguauccagguuccagc

SEQ ID NO: 651784 - RNA, 22 nt, Human
gcuaguccacagccauccaggc

SEQ ID NO: 651785 - RNA, 22 nt, Human
uucuccuggggccgugauguga

SEQ ID NO: 651786 - RNA, 23 nt, Human
uucauuugucuacuucacuuguu

SEQ ID NO: 651787 - RNA, 22 nt, Human
ggucccaggaaucuguguucua

SEQ ID NO: 651788 - RNA, 22 nt, Human
uggaggagggcuggugucugua

SEQ ID NO: 651789 - RNA, 22 nt, Human
aggaaaacacaguauugaugga

SEQ ID NO: 651790 - RNA, 17 nt, Human
acaaugcagucucuagu

SEQ ID NO: 651791 - RNA, 22 nt, Human
uuagaggaaagugacuccgaug

SEQ ID NO: 651792 - RNA, 22 nt, Human
agguucaggcacuugcccaaca

SEQ ID NO: 651793 - RNA, 22 nt, Human
uagauucuguaugucugcucuc

SEQ ID NO: 651794 - RNA, 22 nt, Human
agugccuggaccccaugacaua

SEQ ID NO: 651795 - RNA, 22 nt, Human
cacccagcuuuugcauccuccg

SEQ ID NO: 651796 - RNA, 22 nt, Human
ucucuuggaacacuugcucuua

SEQ ID NO: 651797 - RNA, 22 nt, Human
agaggcuggguacgggccaccu

SEQ ID NO: 651798 - RNA, 22 nt, Human
cuuuggaauauuuuauugagaa

SEQ ID NO: 651799 - RNA, 22 nt, Human
gcccagcagaucucagugucuc

SEQ ID NO: 651800 - RNA, 22 nt, Human
caucaaauggcaagugaaagcu

SEQ ID NO: 651801 - RNA, 22 nt, Human
ucuuuaaucauaaccaagaugg

SEQ ID NO: 651802 - RNA, 22 nt, Human
gggacuguccuacauggagagg

SEQ ID NO: 651803 - RNA, 22 nt, Human
cagaaagccgacuuacaaugga

SEQ ID NO: 651804 - RNA, 22 nt, Human
caguuuuauugguugaaaucug

SEQ ID NO: 651805 - RNA, 22 nt, Human
uaauugcugaacuacuaucccu

SEQ ID NO: 651806 - RNA, 22 nt, Human
cuuucacaagauuugagaugcu

SEQ ID NO: 651807 - RNA, 22 nt, Human
guccuucaagaguccccuacug

SEQ ID NO: 651808 - RNA, 22 nt, Human
agggcagccucucagccuaggu

SEQ ID NO: 651809 - RNA, 22 nt, Human
auacaucuagagucauaaaaac

SEQ ID NO: 651810 - RNA, 22 nt, Human
cagcccagcgcaaacaacuggc

SEQ ID NO: 651811 - RNA, 22 nt, Human
cuaaacaugcaagagcuucugg

SEQ ID NO: 651812 - RNA, 22 nt, Human
agcagcaguccuuuguguaauu

SEQ ID NO: 651813 - RNA, 22 nt, Human
ugaauacacuaaaaaucacuuu

SEQ ID NO: 651814 - RNA, 22 nt, Human
caggagaugacagggaagaacc

SEQ ID NO: 651815 - RNA, 22 nt, Human
ugcaggugcguuuucaagccuc

SEQ ID NO: 651816 - RNA, 22 nt, Human
agcugggguugcacacauuuug

SEQ ID NO: 651817 - RNA, 21 nt, Human
uauaggcuuccauaugaaggg

SEQ ID NO: 651818 - RNA, 22 nt, Human
aagccaagugcuggccaugggc

SEQ ID NO: 651819 - RNA, 20 nt, Human
uggagagccucuggacugug

SEQ ID NO: 651820 - RNA, 22 nt, Human
gccccacuguggaaccuaaguc

SEQ ID NO: 651821 - RNA, 19 nt, Human
uuuuccugccucauuguuu

SEQ ID NO: 651822 - RNA, 22 nt, Human
uagauuuuacuucugucauuac

SEQ ID NO: 651823 - RNA, 19 nt, Human
guuucauuaagauaggaaa

SEQ ID NO: 651824 - RNA, 22 nt, Human
cagggggugcaggcccugugac

SEQ ID NO: 651825 - RNA, 22 nt, Human
ccagcuggcaggagagucaggg

SEQ ID NO: 651826 - RNA, 22 nt, Human
ggcugagcccccucugcguagg

SEQ ID NO: 651827 - RNA, 22 nt, Human
uuuuacaccuguuaacucuaag

SEQ ID NO: 651828 - RNA, 22 nt, Human
ucauaaauugauuaugugcuuu

SEQ ID NO: 651829 - RNA, 22 nt, Human
gaaggcauuucagagaucucug

SEQ ID NO: 651830 - RNA, 22 nt, Human
uuucacacuagucagaauacca

SEQ ID NO: 651831 - RNA, 22 nt, Human
uugcccugccucccugagguga

SEQ ID NO: 651832 - RNA, 22 nt, Human
uccagggaaggugugaggcugg

SEQ ID NO: 651833 - RNA, 22 nt, Human
uaugcaugugguauaugcuuau

SEQ ID NO: 651834 - RNA, 18 nt, Human
ugagaauguaagaaaugg

SEQ ID NO: 651835 - RNA, 22 nt, Human
guuuuccugagcccagagaugc

SEQ ID NO: 651836 - RNA, 18 nt, Human
ugagccgguagauggggu

SEQ ID NO: 651837 - RNA, 22 nt, Human
auaugguaagaguauauuuacu

SEQ ID NO: 651838 - RNA, 22 nt, Human
gcccaaggucacacacaggaag

SEQ ID NO: 651839 - RNA, 22 nt, Human
uggcagcauuuuuuccagaaca

SEQ ID NO: 651840 - RNA, 22 nt, Human
gagaagggcuugggagucaaca

SEQ ID NO: 651841 - RNA, 22 nt, Human
ggcgggagcagcagcucugagc

SEQ ID NO: 651842 - RNA, 22 nt, Human
uuccaucugcuagguaaaugaa

SEQ ID NO: 651843 - RNA, 22 nt, Human
cccagccuuugcuuccugguuc

SEQ ID NO: 651844 - RNA, 22 nt, Human
cuagggugugcagauuuugccu

SEQ ID NO: 651845 - RNA, 22 nt, Human
uccaguaugacugauguccuuc

SEQ ID NO: 651846 - RNA, 22 nt, Human
gggaguggauuauguggaccca

SEQ ID NO: 651847 - RNA, 19 nt, Human
agcaggcuaggcugccucu

SEQ ID NO: 651848 - RNA, 22 nt, Human
cuggugcaggaaggagcuggca

SEQ ID NO: 651849 - RNA, 22 nt, Human
caguuucuuagugacacaaauc

SEQ ID NO: 651850 - RNA, 19 nt, Human
uuucuuuuccccucagcac

SEQ ID NO: 651851 - RNA, 22 nt, Human
caccagcagaagacugagggug

SEQ ID NO: 651852 - RNA, 22 nt, Human
cuguggaaggacuuagcgauac

SEQ ID NO: 651853 - RNA, 22 nt, Human
aaaggcaugccuccauuucuau

SEQ ID NO: 651854 - RNA, 22 nt, Human
gacaggcaggccagggcugugg

SEQ ID NO: 651855 - RNA, 22 nt, Human
acacuacagggccgggauggaa

SEQ ID NO: 651856 - RNA, 22 nt, Human
ucccagacaaucauuggccacc

SEQ ID NO: 651857 - RNA, 22 nt, Human
ucagcagauggguuguguuggc

SEQ ID NO: 651858 - RNA, 22 nt, Human
aauuagaaucuuauuuggggaa

SEQ ID NO: 651859 - RNA, 22 nt, Human
ucauuauccuaguaucuugaau

SEQ ID NO: 651860 - RNA, 22 nt, Human
agcugguucaguuucugggccu

SEQ ID NO: 651861 - RNA, 22 nt, Human
gugagucugccuagcacaucac

SEQ ID NO: 651862 - RNA, 22 nt, Human
aauuacagucggagcagcacug

SEQ ID NO: 651863 - RNA, 23 nt, Human
uccugcagauaagcugguugaca

SEQ ID NO: 651864 - RNA, 22 nt, Human
uagaggugagauuguggugcug

SEQ ID NO: 651865 - RNA, 22 nt, Human
agcuggcaguaugacuggugac

SEQ ID NO: 651866 - RNA, 22 nt, Human
aguaaacauuucagauuuauuu

SEQ ID NO: 651867 - RNA, 22 nt, Human
uacuguacucaacaugugaguu

SEQ ID NO: 651868 - RNA, 22 nt, Human
ugcuccacuaagccaucccauu

SEQ ID NO: 651869 - RNA, 22 nt, Human
guauaaaguauaagcuuguuuu

SEQ ID NO: 651870 - RNA, 22 nt, Human
ugcuuucauauugccuaugacu

SEQ ID NO: 651871 - RNA, 22 nt, Human
cagggagggaggaaaauuugcu

SEQ ID NO: 651872 - RNA, 22 nt, Human
ccauuacugaaauaaagagaau

SEQ ID NO: 651873 - RNA, 22 nt, Human
ggaguggccucuccugugcagg

SEQ ID NO: 651874 - RNA, 22 nt, Human
uucugguguguucucucuaggc

SEQ ID NO: 651875 - RNA, 22 nt, Human
ucugaguucauaccaggcuacc

SEQ ID NO: 651876 - RNA, 22 nt, Human
gaaauaauucugugucugaaca

SEQ ID NO: 651877 - RNA, 22 nt, Human
ugcagcaauuugcaguaauuua

SEQ ID NO: 651878 - RNA, 21 nt, Human
ugggcucagccccagcccugc

SEQ ID NO: 651879 - RNA, 22 nt, Human
cuccaggagggggauggcugua

SEQ ID NO: 651880 - RNA, 22 nt, Human
cuccagauaggagggggucccc

SEQ ID NO: 651881 - RNA, 22 nt, Human
gugcagccauuugcaugcuucc

SEQ ID NO: 651882 - RNA, 22 nt, Human
gggcugaaaggccgccucagau

SEQ ID NO: 651883 - RNA, 22 nt, Human
ggugcugagugagcuagaggcu

SEQ ID NO: 651884 - RNA, 22 nt, Human
caugugucuuuauggagccaca

SEQ ID NO: 651885 - RNA, 22 nt, Human
aagaaauguagagccuaguaaa

SEQ ID NO: 651886 - RNA, 22 nt, Human
gcucuggacccuggaguggcug

SEQ ID NO: 651887 - RNA, 22 nt, Human
caaggcagucccuacucccugc

SEQ ID NO: 651888 - RNA, 22 nt, Human
gggagguccuaaaggggaccag

SEQ ID NO: 651889 - RNA, 22 nt, Human
aagggugggcaccgccagguca

SEQ ID NO: 651890 - RNA, 22 nt, Human
agggcucaguugccuggagccc

SEQ ID NO: 651891 - RNA, 22 nt, Human
ugugccaucugauauaagagcc

SEQ ID NO: 651892 - RNA, 22 nt, Human
gggucaggcuagcccagacuuc

SEQ ID NO: 651893 - RNA, 22 nt, Human
guggugaagccccaucucugcu

SEQ ID NO: 651894 - RNA, 18 nt, Human
gaaaggagagacaguagg

SEQ ID NO: 651895 - RNA, 22 nt, Human
uccaggcucuaggcugcucucc

SEQ ID NO: 651896 - RNA, 22 nt, Human
ggucaucugccuccaaagcacu

SEQ ID NO: 651897 - RNA, 22 nt, Human
aacuuucuauagguugggauuu

SEQ ID NO: 651898 - RNA, 22 nt, Human
cuggccacaugugugcugagca

SEQ ID NO: 651899 - RNA, 22 nt, Human
caggacagaaauaaggaauaua

SEQ ID NO: 651900 - RNA, 22 nt, Human
ccaggcuuuucucauggaguca

SEQ ID NO: 651901 - RNA, 22 nt, Human
gccuguggccacugcgucugca

SEQ ID NO: 651902 - RNA, 22 nt, Human
caagggugguauugggagcaua

SEQ ID NO: 651903 - RNA, 22 nt, Human
ugcagagauccuggacugagcg

SEQ ID NO: 651904 - RNA, 22 nt, Human
uucauguaccguguaccaggca

SEQ ID NO: 651905 - RNA, 22 nt, Human
uacauagaggguaauagcauca

SEQ ID NO: 651906 - RNA, 22 nt, Human
ccuucccuaaagcgucgcuuag

SEQ ID NO: 651907 - RNA, 22 nt, Human
uuccaggacaagauguuucagg

SEQ ID NO: 651908 - RNA, 20 nt, Human
ucaugcaagauucauaaagg

SEQ ID NO: 651909 - RNA, 22 nt, Human
gcuguuucuuuggcaaacugau

SEQ ID NO: 651910 - RNA, 22 nt, Human
ggcguugcucuccccaggcuca

SEQ ID NO: 651911 - RNA, 22 nt, Human
ucaggaggcggugcugccuuug

SEQ ID NO: 651912 - RNA, 22 nt, Human
gagggcucuaccaaguaacucu

SEQ ID NO: 651913 - RNA, 22 nt, Human
ugucaguguauacauacaguau

SEQ ID NO: 651914 - RNA, 22 nt, Human
ccccaggacacauggaccaagu

SEQ ID NO: 651915 - RNA, 22 nt, Human
agacaacaucuaguuuggugga

SEQ ID NO: 651916 - RNA, 22 nt, Human
accuuuuuccaaagcuucuuac

SEQ ID NO: 651917 - RNA, 22 nt, Human
accagcugugugaccugaggca

SEQ ID NO: 651918 - RNA, 17 nt, Human
uagcccauggcugccag

SEQ ID NO: 651919 - RNA, 22 nt, Human
cgggcucaggaggaaacaggag

SEQ ID NO: 651920 - RNA, 22 nt, Human
aagaggucauaccagauaaggg

SEQ ID NO: 651921 - RNA, 22 nt, Human
agcgggugcugugucagcccuc

SEQ ID NO: 651922 - RNA, 22 nt, Human
gacagaggguuccaaaauugau

SEQ ID NO: 651923 - RNA, 22 nt, Human
uccuggaggaauaaguuuucca

SEQ ID NO: 651924 - RNA, 22 nt, Human
ucuuuguuauugcuuuaucuau

SEQ ID NO: 651925 - RNA, 22 nt, Human
ccaugcccuaaaggacuggcag

SEQ ID NO: 651926 - RNA, 22 nt, Human
gacagcugugcaggagaagggg

SEQ ID NO: 651927 - RNA, 22 nt, Human
gcaguguuucagugcuuuuucu

SEQ ID NO: 651928 - RNA, 22 nt, Human
ggcuuuauaggguagaggauca

SEQ ID NO: 651929 - RNA, 21 nt, Human
uggcacagaaaggaaaguuca

SEQ ID NO: 651930 - RNA, 22 nt, Human
cagcaacuuggacagcagucuu

SEQ ID NO: 651931 - RNA, 22 nt, Human
agaaugcagcuugccaguaucu

SEQ ID NO: 651932 - RNA, 20 nt, Human
cagaccugcacccacuucga

SEQ ID NO: 651933 - RNA, 22 nt, Human
uccaauuugaaaugguauaugu

SEQ ID NO: 651934 - RNA, 23 nt, Human
ugccaaaguuuaccuaacacugg

SEQ ID NO: 651935 - RNA, 22 nt, Human
ggguacaaagauuucauaagau

SEQ ID NO: 651936 - RNA, 22 nt, Human
ggcucuguuuacuuucagaggc

SEQ ID NO: 651937 - RNA, 22 nt, Human
ugagugaaauucugguaaagga

SEQ ID NO: 651938 - RNA, 22 nt, Human
auggguaggauuuacucagaug

SEQ ID NO: 651939 - RNA, 22 nt, Human
uucugggcccacuguagcaucc

SEQ ID NO: 651940 - RNA, 22 nt, Human
ucucaggcaucuguguggcaca

SEQ ID NO: 651941 - RNA, 22 nt, Human
uggccucuuacgacauagccuu

SEQ ID NO: 651942 - RNA, 22 nt, Human
cuccuucacgcaggcugccaug

SEQ ID NO: 651943 - RNA, 22 nt, Human
ccagacaguuccuugagguuca

SEQ ID NO: 651944 - RNA, 22 nt, Human
uggcugagguaacuaugaauaa

SEQ ID NO: 651945 - RNA, 22 nt, Human
aaguauuucuggccugugaaag

SEQ ID NO: 651946 - RNA, 20 nt, Human
gauggcuuuagaagcuggua

SEQ ID NO: 651947 - RNA, 22 nt, Human
gcccacaguacgaggcucaggc

SEQ ID NO: 651948 - RNA, 22 nt, Human
uccauaggaucugcuucauacu

SEQ ID NO: 651949 - RNA, 21 nt, Human
ccugugugucugacugggcua

SEQ ID NO: 651950 - RNA, 22 nt, Human
ggaaccuguacguuguccuuga

SEQ ID NO: 651951 - RNA, 22 nt, Human
cagugcuggaggggugcuugca

SEQ ID NO: 651952 - RNA, 22 nt, Human
gucaggauuugaacucaggucu

SEQ ID NO: 651953 - RNA, 22 nt, Human
ucugaggucucaugacuugcau

SEQ ID NO: 651954 - RNA, 22 nt, Human
cuggagcuguuuuuucaggaaa

SEQ ID NO: 651955 - RNA, 22 nt, Human
aagauguuauugucuuccuugc

SEQ ID NO: 651956 - RNA, 22 nt, Human
ucuauuuuauacucaaaucuuc

SEQ ID NO: 651957 - RNA, 22 nt, Human
cagaucaaacaaaauggguuag

SEQ ID NO: 651958 - RNA, 19 nt, Human
cugagccucaguuuccuag

SEQ ID NO: 651959 - RNA, 19 nt, Human
agaugucuauuugacuauc

SEQ ID NO: 651960 - RNA, 22 nt, Human
uagaaagucaugaauuacacca

SEQ ID NO: 651961 - RNA, 22 nt, Human
acaaagucucuaauaaucuucu

SEQ ID NO: 651962 - RNA, 22 nt, Human
gguggccucgguggugcacagg

SEQ ID NO: 651963 - RNA, 22 nt, Human
uggucauuuuuauuucaguugc

SEQ ID NO: 651964 - RNA, 22 nt, Human
ggcagagaaucuggcuguuuac

SEQ ID NO: 651965 - RNA, 22 nt, Human
uuagaguagagccauuucuguu

SEQ ID NO: 651966 - RNA, 22 nt, Human
ucaguguuuccugugguacagc

SEQ ID NO: 651967 - RNA, 22 nt, Human
ccauccagaccaguccaugggu

SEQ ID NO: 651968 - RNA, 21 nt, Human
gcagugcagcuuggaggguag

SEQ ID NO: 651969 - RNA, 22 nt, Human
uguaaauaaugcauguaaauca

SEQ ID NO: 651970 - RNA, 22 nt, Human
uaaagguuauaaagguuagggg

SEQ ID NO: 651971 - RNA, 22 nt, Human
agaaaucuuugaaguguaaugu

SEQ ID NO: 651972 - RNA, 22 nt, Human
uugccagggcuuugguggcauc

SEQ ID NO: 651973 - RNA, 22 nt, Human
caaaggcuucaucucagagcag

SEQ ID NO: 651974 - RNA, 22 nt, Human
ggcauccucuagaagcuggaaa

SEQ ID NO: 651975 - RNA, 22 nt, Human
auggaaauguuccauauauuga

SEQ ID NO: 651976 - RNA, 22 nt, Human
uaauacagggcacuuugaguga

SEQ ID NO: 651977 - RNA, 22 nt, Human
guguguaaaccuccaaucuggg

SEQ ID NO: 651978 - RNA, 22 nt, Human
auacagccuauucuuaccauug

SEQ ID NO: 651979 - RNA, 22 nt, Human
gcagaggcugggugucccaguc

SEQ ID NO: 651980 - RNA, 22 nt, Human
agcaccugcuaugugucaggga

SEQ ID NO: 651981 - RNA, 22 nt, Human
gcuuugcuggcuugaaaugcug

SEQ ID NO: 651982 - RNA, 22 nt, Human
ucagggcaaaagggaaaccauu

SEQ ID NO: 651983 - RNA, 22 nt, Human
uugaaaaaauugguagaggaug

SEQ ID NO: 651984 - RNA, 22 nt, Human
cuggagggaguuaggacccgga

SEQ ID NO: 651985 - RNA, 21 nt, Human
uccuucagucuagaugauugu

SEQ ID NO: 651986 - RNA, 22 nt, Human
ccacagaguuacaaaacaguca

SEQ ID NO: 651987 - RNA, 23 nt, Human
auuagacacuuuggguugucuuc

SEQ ID NO: 651988 - RNA, 22 nt, Human
ucugugaacaucacauugacag

SEQ ID NO: 651989 - RNA, 22 nt, Human
ugagugaggaagcgguggagga

SEQ ID NO: 651990 - RNA, 22 nt, Human
ucuccuggguaaaaggguugau

SEQ ID NO: 651991 - RNA, 22 nt, Human
gcucuggggaugcuucugccgu

SEQ ID NO: 651992 - RNA, 22 nt, Human
gggacagaaggaagugagcaca

SEQ ID NO: 651993 - RNA, 22 nt, Human
gaagagagaacauuacauaaac

SEQ ID NO: 651994 - RNA, 22 nt, Human
uaaauaagucacugaccauuua

SEQ ID NO: 651995 - RNA, 22 nt, Human
ugccaaauugcccuauaaauga

SEQ ID NO: 651996 - RNA, 19 nt, Human
uggaggccucaggaaaaga

SEQ ID NO: 651997 - RNA, 22 nt, Human
cuauuuguaagagccccacacc

SEQ ID NO: 651998 - RNA, 22 nt, Human
ggggaucuaggcuuaugagggc

SEQ ID NO: 651999 - RNA, 22 nt, Human
aggagcugcauggauaccuggu

SEQ ID NO: 652000 - RNA, 22 nt, Human
gcacagcaugaagagaggaagc

SEQ ID NO: 652001 - RNA, 22 nt, Human
uugcugaucugaaacguuacug

SEQ ID NO: 652002 - RNA, 22 nt, Human
gauuucaggcuaucuaugcaga

SEQ ID NO: 652003 - RNA, 22 nt, Human
aaugaagccagcugggaugcga

SEQ ID NO: 652004 - RNA, 22 nt, Human
gacccauauaggacccuccaaa

SEQ ID NO: 652005 - RNA, 22 nt, Human
ucagggcugugguuccuuuucu

SEQ ID NO: 652006 - RNA, 22 nt, Human
uggagaguucuguagauaucua

SEQ ID NO: 652007 - RNA, 22 nt, Human
auucucuggucauugagcauau

SEQ ID NO: 652008 - RNA, 22 nt, Human
cugagaggaugcugcaguggag

SEQ ID NO: 652009 - RNA, 22 nt, Human
cacauggggcgcugcauuggcc

SEQ ID NO: 652010 - RNA, 22 nt, Human
uuugaagacauuugaauacuuu

SEQ ID NO: 652011 - RNA, 21 nt, Human
guccucagcugaugggagcug

SEQ ID NO: 652012 - RNA, 17 nt, Human
ugaaacaccaagacugu

SEQ ID NO: 652013 - RNA, 22 nt, Human
gaaccuggaauguggcgcccaa

SEQ ID NO: 652014 - RNA, 22 nt, Human
ggacauuuagaacagaguauuu

SEQ ID NO: 652015 - RNA, 22 nt, Human
caccaucuagcauuuauuugga

SEQ ID NO: 652016 - RNA, 22 nt, Human
cugccuggggcaucagucaagg

SEQ ID NO: 652017 - RNA, 22 nt, Human
uggagucagaaugcgacaggcc

SEQ ID NO: 652018 - RNA, 22 nt, Human
auguuuacugguuuauagaaua

SEQ ID NO: 652019 - RNA, 22 nt, Human
uucuuuccccauggaguucgga

SEQ ID NO: 652020 - RNA, 22 nt, Human
gcagcugugggccucggagagc

SEQ ID NO: 652021 - RNA, 22 nt, Human
cugagagaugguguguuuauaa

SEQ ID NO: 652022 - RNA, 22 nt, Human
acugugggccuuuccuuugacc

SEQ ID NO: 652023 - RNA, 22 nt, Human
ugcugccuucuaggcgugcccu

SEQ ID NO: 652024 - RNA, 18 nt, Human
cugcugugucgucugggc

SEQ ID NO: 652025 - RNA, 22 nt, Human
ucuaaagccuuccauauaacgc

SEQ ID NO: 652026 - RNA, 22 nt, Human
uuuccagagggugcucagggcg

SEQ ID NO: 652027 - RNA, 22 nt, Human
uauuaauuuaaucuccauggua

SEQ ID NO: 652028 - RNA, 22 nt, Human
auggcugcuuucccuuagcacc

SEQ ID NO: 652029 - RNA, 22 nt, Human
ccauaaucuggcuuugagagag

SEQ ID NO: 652030 - RNA, 22 nt, Human
ucaggguaaaccuucacuguga

SEQ ID NO: 652031 - RNA, 22 nt, Human
caaccaguagcugaguucaaaa

SEQ ID NO: 652032 - RNA, 23 nt, Human
cagcucagcacauaggagguacu

SEQ ID NO: 652033 - RNA, 22 nt, Human
acaugcauggcugcuuaaauua

SEQ ID NO: 652034 - RNA, 23 nt, Human
gcuguccccaugcuccaucccug

SEQ ID NO: 652035 - RNA, 22 nt, Human
uuuggaauuggcauucuauucu

SEQ ID NO: 652036 - RNA, 22 nt, Human
gcuguggccuccagcacucccc

SEQ ID NO: 652037 - RNA, 22 nt, Human
ugaagccuuguguggccucucu

SEQ ID NO: 652038 - RNA, 22 nt, Human
ugucugcugguugggagcuuaa

SEQ ID NO: 652039 - RNA, 22 nt, Human
aagcccagaugggagcauuuca

SEQ ID NO: 652040 - RNA, 22 nt, Human
aaccugaaaguaguaaaagcug

SEQ ID NO: 652041 - RNA, 22 nt, Human
cugugucuucugcuuacagucu

SEQ ID NO: 652042 - RNA, 22 nt, Human
uuggcagagaguaugcugaaga

SEQ ID NO: 652043 - RNA, 22 nt, Human
aggcuguggugggcuuugagcc

SEQ ID NO: 652044 - RNA, 22 nt, Human
gcugaaaugucuuuagcagugu

SEQ ID NO: 652045 - RNA, 22 nt, Human
uccugccucuccaugcuaacua

SEQ ID NO: 652046 - RNA, 22 nt, Human
gggcaucugguggagccucagg

SEQ ID NO: 652047 - RNA, 19 nt, Human
uucacaagugaugucucuc

SEQ ID NO: 652048 - RNA, 22 nt, Human
uuugacaacguuguugugagga

SEQ ID NO: 652049 - RNA, 22 nt, Human
aggcagguuggugagaagacug

SEQ ID NO: 652050 - RNA, 22 nt, Human
uuccuggagaguuuucccaaag

SEQ ID NO: 652051 - RNA, 22 nt, Human
ucuuucccaguagcucucccag

SEQ ID NO: 652052 - RNA, 22 nt, Human
aucuacuccugaauauaucuag

SEQ ID NO: 652053 - RNA, 22 nt, Human
ccccaggagaaaucuuaaacua

SEQ ID NO: 652054 - RNA, 22 nt, Human
caaguaugagaaagcuauuacc

SEQ ID NO: 652055 - RNA, 22 nt, Human
ucccugaaacauaauagaugcc

SEQ ID NO: 652056 - RNA, 22 nt, Human
cuucuauucacuggucacaguu

SEQ ID NO: 652057 - RNA, 22 nt, Human
ggccagagguguccucaguucu

SEQ ID NO: 652058 - RNA, 22 nt, Human
uuuuucagccaugaauuacacu

SEQ ID NO: 652059 - RNA, 22 nt, Human
ccaggggcugcagauccauggu

SEQ ID NO: 652060 - RNA, 22 nt, Human
uagugaaauuuaugcacagcua

SEQ ID NO: 652061 - RNA, 22 nt, Human
uggcaccaucaaggcugagaac

SEQ ID NO: 652062 - RNA, 22 nt, Human
uguggcagggcgugacauuugg

SEQ ID NO: 652063 - RNA, 22 nt, Human
acaaagucacaauaauuaaccu

SEQ ID NO: 652064 - RNA, 21 nt, Human
uccccucacuugucuucugag

SEQ ID NO: 652065 - RNA, 22 nt, Human
gcacccaggcacuuuccuuucu

SEQ ID NO: 652066 - RNA, 22 nt, Human
ucauuucaguccucugugugag

SEQ ID NO: 652067 - RNA, 22 nt, Human
cuggggcucacuuuggucaggc

SEQ ID NO: 652068 - RNA, 22 nt, Human
ugggcuggcugaacuucaaccu

SEQ ID NO: 652069 - RNA, 22 nt, Human
uuucacaggauucugauguagu

SEQ ID NO: 652070 - RNA, 20 nt, Human
agggucugcuggguaggaca

SEQ ID NO: 652071 - RNA, 22 nt, Human
guacauuuuacuuuguuugaau

SEQ ID NO: 652072 - RNA, 22 nt, Human
uacagccucgaacuccugcauu

SEQ ID NO: 652073 - RNA, 22 nt, Human
agagaggauuuguuuuucuccu

SEQ ID NO: 652074 - RNA, 22 nt, Human
agcagcaguguucuggaauucu

SEQ ID NO: 652075 - RNA, 22 nt, Human
auagcaaauucuuuaggugcuu

SEQ ID NO: 652076 - RNA, 22 nt, Human
cuguggagugcuuggcucagug

SEQ ID NO: 652077 - RNA, 22 nt, Human
ucaaagccuguggauaguuugg

SEQ ID NO: 652078 - RNA, 22 nt, Human
cccucagcuccacccucagcag

SEQ ID NO: 652079 - RNA, 22 nt, Human
acaggcaggcuucggccagagc

SEQ ID NO: 652080 - RNA, 22 nt, Human
cuggucacuggucucauccagc

SEQ ID NO: 652081 - RNA, 22 nt, Human
aggcacuggguaauuaguagcu

SEQ ID NO: 652082 - RNA, 19 nt, Human
uuaucuguguugcaguggu

SEQ ID NO: 652083 - RNA, 22 nt, Human
aaacuguuucccuccauaaccu

SEQ ID NO: 652084 - RNA, 22 nt, Human
cacuucucugauaaucucaguu

SEQ ID NO: 652085 - RNA, 22 nt, Human
uaggagggggaacaaggcauac

SEQ ID NO: 652086 - RNA, 22 nt, Human
uacugaaaaagaauccagaccu

SEQ ID NO: 652087 - RNA, 22 nt, Human
acagugugguuguuucugguua

SEQ ID NO: 652088 - RNA, 22 nt, Human
aguguguccagaaaucuguauu

SEQ ID NO: 652089 - RNA, 22 nt, Human
uguuacagaaauauugcuucuu

SEQ ID NO: 652090 - RNA, 22 nt, Human
uuucuauuuacagugcuaggua

SEQ ID NO: 652091 - RNA, 22 nt, Human
gcugcugucucaugcgaugcgg

SEQ ID NO: 652092 - RNA, 22 nt, Human
gcuuuauagcccuauuacauga

SEQ ID NO: 652093 - RNA, 22 nt, Human
cagcugagcucccaggccauca

SEQ ID NO: 652094 - RNA, 22 nt, Human
ccaggagcagauauggacauaa

SEQ ID NO: 652095 - RNA, 22 nt, Human
ugcauucaaaucuccaggcuca

SEQ ID NO: 652096 - RNA, 22 nt, Human
uggcagugucuuaucaggagug

SEQ ID NO: 652097 - RNA, 22 nt, Human
aagccacuuggggaaagaugga

SEQ ID NO: 652098 - RNA, 22 nt, Human
ugaagggguucagcaugggggu

SEQ ID NO: 652099 - RNA, 18 nt, Human
ugagacagcuaccacuug

SEQ ID NO: 652100 - RNA, 22 nt, Human
ggcugaugggcaugagcuguca

SEQ ID NO: 652101 - RNA, 22 nt, Human
uaugagaacugacagagugcca

SEQ ID NO: 652102 - RNA, 21 nt, Human
uauugucaaucugcuuucaga

SEQ ID NO: 652103 - RNA, 22 nt, Human
cacauuuaagcagauguggacc

SEQ ID NO: 652104 - RNA, 19 nt, Human
uacaggcaguuucuacaau

SEQ ID NO: 652105 - RNA, 22 nt, Human
ccagaccacccuggccaugcac

SEQ ID NO: 652106 - RNA, 22 nt, Human
cuggcgugaagguggccaugag

SEQ ID NO: 652107 - RNA, 22 nt, Human
aggaggugcuagagaagauguu

SEQ ID NO: 652108 - RNA, 22 nt, Human
uaccaaaagcuuguuucauaca

SEQ ID NO: 652109 - RNA, 22 nt, Human
agcuccugaaaagcgcuugcuu

SEQ ID NO: 652110 - RNA, 22 nt, Human
agaggccaggcugcagagggau

SEQ ID NO: 652111 - RNA, 22 nt, Human
ggaggccaaggagggcggauca

SEQ ID NO: 652112 - RNA, 22 nt, Human
cauguccuucucauugccucau

SEQ ID NO: 652113 - RNA, 22 nt, Human
aguucuucauaaccuuacugug

SEQ ID NO: 652114 - RNA, 22 nt, Human
acuucaugcagaagagagcugu

SEQ ID NO: 652115 - RNA, 22 nt, Human
cccugcagagaccacugaccuu

SEQ ID NO: 652116 - RNA, 22 nt, Human
gugcuuccaucuagagggucac

SEQ ID NO: 652117 - RNA, 22 nt, Human
gugcugucguggaacugggcug

SEQ ID NO: 652118 - RNA, 22 nt, Human
uggcugagccuuuggggcuuuc

SEQ ID NO: 652119 - RNA, 22 nt, Human
ucucuacagauccuauauagaa

SEQ ID NO: 652120 - RNA, 22 nt, Human
ccccaugcugggaucugacacc

SEQ ID NO: 652121 - RNA, 22 nt, Human
aggccuguuccaggccccuuuu

SEQ ID NO: 652122 - RNA, 22 nt, Human
guggcccucugauagggucagg

SEQ ID NO: 652123 - RNA, 22 nt, Human
aagggcuuaggauuuugcugug

SEQ ID NO: 652124 - RNA, 22 nt, Human
agcugcagugaacuguuuuguc

SEQ ID NO: 652125 - RNA, 22 nt, Human
auauuaaaacuaugguuuucag

SEQ ID NO: 652126 - RNA, 22 nt, Human
aacuaacagucauuaaaagaac

SEQ ID NO: 652127 - RNA, 22 nt, Human
agaauccgcuugacuuugaagu

SEQ ID NO: 652128 - RNA, 22 nt, Human
ugcuccagaaccugaccaugcu

SEQ ID NO: 652129 - RNA, 22 nt, Human
uuaaaugcucacauaaagguag

SEQ ID NO: 652130 - RNA, 18 nt, Human
ucuugccugcacccucuc

SEQ ID NO: 652131 - RNA, 22 nt, Human
ucuuaacugacaguuuaauggg

SEQ ID NO: 652132 - RNA, 18 nt, Human
ucuuuguuuccuucuugc

SEQ ID NO: 652133 - RNA, 22 nt, Human
ugcauucaauacaguaagaaua

SEQ ID NO: 652134 - RNA, 22 nt, Human
aaacagcagcuguuuaauuugc

SEQ ID NO: 652135 - RNA, 22 nt, Human
augagaugugucuaauggaacc

SEQ ID NO: 652136 - RNA, 18 nt, Human
acccuuuccaaacugcag

SEQ ID NO: 652137 - RNA, 22 nt, Human
ucucugggauaaacugggccag

SEQ ID NO: 652138 - RNA, 22 nt, Human
ucaaaugcuucuacuccuaaga

SEQ ID NO: 652139 - RNA, 22 nt, Human
cuugcuucauuagugucuuagu

SEQ ID NO: 652140 - RNA, 21 nt, Human
uggccagcugcucgucuccuc

SEQ ID NO: 652141 - RNA, 22 nt, Human
ggcuugggagcaggcaugugac

SEQ ID NO: 652142 - RNA, 22 nt, Human
agucccagaucuacaggaggga

SEQ ID NO: 652143 - RNA, 22 nt, Human
aauacagcagauggagacaaau

SEQ ID NO: 652144 - RNA, 22 nt, Human
cugcccgcugcuagagaggccg

SEQ ID NO: 652145 - RNA, 22 nt, Human
aucauuggaggcacugugcagu

SEQ ID NO: 652146 - RNA, 22 nt, Human
cugguucugauguucuuggcuu

SEQ ID NO: 652147 - RNA, 22 nt, Human
auaaacugguaggaaaacagua

SEQ ID NO: 652148 - RNA, 22 nt, Human
aguuucaguucugucauuuaua

SEQ ID NO: 652149 - RNA, 22 nt, Human
cccauucccuuuacuguugcau

SEQ ID NO: 652150 - RNA, 22 nt, Human
ugcugggccaaagcaggguuuu

SEQ ID NO: 652151 - RNA, 22 nt, Human
uggcauccagauacccugaggg

SEQ ID NO: 652152 - RNA, 21 nt, Human
gcucaaagggcuugccaugcu

SEQ ID NO: 652153 - RNA, 22 nt, Human
uacugucugcuucuuauagcuu

SEQ ID NO: 652154 - RNA, 22 nt, Human
uaaagguaacaugaacugcuuu

SEQ ID NO: 652155 - RNA, 22 nt, Human
cccucagcucaagccccugugc

SEQ ID NO: 652156 - RNA, 22 nt, Human
accagcuggucaccugggcacu

SEQ ID NO: 652157 - RNA, 22 nt, Human
guuuuucuagacugggaguuug

SEQ ID NO: 652158 - RNA, 17 nt, Human
uuccaaggagcauuuga

SEQ ID NO: 652159 - RNA, 22 nt, Human
uuaacacuaucugucauaauua

SEQ ID NO: 652160 - RNA, 22 nt, Human
uggagaaaagguugaauccauc

SEQ ID NO: 652161 - RNA, 22 nt, Human
agggcgacaauggagagcguuu

SEQ ID NO: 652162 - RNA, 22 nt, Human
uggagcaggugggaugucguga

SEQ ID NO: 652163 - RNA, 22 nt, Human
ucucaggcacugggugccaacu

SEQ ID NO: 652164 - RNA, 22 nt, Human
augggagaaacaucaugaggca

SEQ ID NO: 652165 - RNA, 21 nt, Human
ugcagcagauuugggggaaga

SEQ ID NO: 652166 - RNA, 22 nt, Human
caagagcuggguggcaagcuag

SEQ ID NO: 652167 - RNA, 22 nt, Human
acugugcuugccaaaccauuga

SEQ ID NO: 652168 - RNA, 22 nt, Human
uccauaguagaaaaugggacag

SEQ ID NO: 652169 - RNA, 22 nt, Human
aagugcugagacuacaggcaug

SEQ ID NO: 652170 - RNA, 22 nt, Human
aguuucucuuugacaccaaaau

SEQ ID NO: 652171 - RNA, 22 nt, Human
ccuucaaaacacuaguuuuuga

SEQ ID NO: 652172 - RNA, 22 nt, Human
ugcagggaaaacccaggaugcu

SEQ ID NO: 652173 - RNA, 22 nt, Human
augggcuggggaagcucacucc

SEQ ID NO: 652174 - RNA, 20 nt, Human
uccuggagcugcuugaauuc

SEQ ID NO: 652175 - RNA, 20 nt, Human
uguccuaauagacaagcaga

SEQ ID NO: 652176 - RNA, 22 nt, Human
uucaugauaguauuuuuuguga

SEQ ID NO: 652177 - RNA, 22 nt, Human
caggacacuuguucuucucugc

SEQ ID NO: 652178 - RNA, 22 nt, Human
uuccaugccucuauuuagaauu

SEQ ID NO: 652179 - RNA, 22 nt, Human
ccuuuucuaaucuuaagaaugu

SEQ ID NO: 652180 - RNA, 22 nt, Human
uucugagaaggcuguggacaca

SEQ ID NO: 652181 - RNA, 22 nt, Human
ugcuuccaggaauccaucuggc

SEQ ID NO: 652182 - RNA, 22 nt, Human
aagaacaugaagucacaaaugc

SEQ ID NO: 652183 - RNA, 22 nt, Human
ccacaugagcuggcaaugcccu

SEQ ID NO: 652184 - RNA, 22 nt, Human
agagaagggaagggauucaccc

SEQ ID NO: 652185 - RNA, 22 nt, Human
gcucagugagauauugacucca

SEQ ID NO: 652186 - RNA, 22 nt, Human
caguaggaaggaugcagaaaaa

SEQ ID NO: 652187 - RNA, 22 nt, Human
cuauuucugccuaaugaccugu

SEQ ID NO: 652188 - RNA, 22 nt, Human
cuucaugagacuccacugccau

SEQ ID NO: 652189 - RNA, 23 nt, Human
cagcuucuuugggauucuuuaua

SEQ ID NO: 652190 - RNA, 22 nt, Human
uuuuucaagacaaccugcaugu

SEQ ID NO: 652191 - RNA, 23 nt, Human
gugcagcagugucugcagucaug

SEQ ID NO: 652192 - RNA, 20 nt, Human
cacaguauucuuccuuaaaa

SEQ ID NO: 652193 - RNA, 22 nt, Human
aaagccaguucuuagagaaagc

SEQ ID NO: 652194 - RNA, 22 nt, Human
acaguguacuagguacauguuc

SEQ ID NO: 652195 - RNA, 22 nt, Human
gagucauuguuggucccucccc

SEQ ID NO: 652196 - RNA, 20 nt, Human
uuucugugagaaacacuguu

SEQ ID NO: 652197 - RNA, 22 nt, Human
cuuuguucaugacaucugcuuc

SEQ ID NO: 652198 - RNA, 22 nt, Human
uuucaugauccauuuacaaaau

SEQ ID NO: 652199 - RNA, 22 nt, Human
uuaucaguuguguguauacacg

SEQ ID NO: 652200 - RNA, 22 nt, Human
uuuaucaucuuguuuuuaaagc

SEQ ID NO: 652201 - RNA, 22 nt, Human
ugacaacuuuacaaaauucuuc

SEQ ID NO: 652202 - RNA, 22 nt, Human
gucuggguuucaugggcacugg

SEQ ID NO: 652203 - RNA, 22 nt, Human
auuucuuaugaauauugacugu

SEQ ID NO: 652204 - RNA, 22 nt, Human
aauguauucugggaaaauguua

SEQ ID NO: 652205 - RNA, 22 nt, Human
ucauuucucccggccaaaaacu

SEQ ID NO: 652206 - RNA, 22 nt, Human
ugcauucaguuggucagcuuuu

SEQ ID NO: 652207 - RNA, 22 nt, Human
agacugaauaacaagcaaauaa

SEQ ID NO: 652208 - RNA, 22 nt, Human
aaagugggaacaauggagagug

SEQ ID NO: 652209 - RNA, 21 nt, Human
agaaacugacuccuagaggca

SEQ ID NO: 652210 - RNA, 22 nt, Human
ugugugaauucugagcaguuua

SEQ ID NO: 652211 - RNA, 22 nt, Human
gccucuccuggagaaggcaggg

SEQ ID NO: 652212 - RNA, 22 nt, Human
cagcucccagagugaccagcag

SEQ ID NO: 652213 - RNA, 22 nt, Human
ugaggaagccaaacagcuacac

SEQ ID NO: 652214 - RNA, 18 nt, Human
cuuucaguaauuucagcc

SEQ ID NO: 652215 - RNA, 20 nt, Human
ugaauaugaccuuauuugga

SEQ ID NO: 652216 - RNA, 17 nt, Human
caggucccagggucucu

SEQ ID NO: 652217 - RNA, 22 nt, Human
cuguaucugucagcuggucucg

SEQ ID NO: 652218 - RNA, 22 nt, Human
uugcugaaaucuaugacauccu

SEQ ID NO: 652219 - RNA, 22 nt, Human
aaauuucaguuggaaugagcuc

SEQ ID NO: 652220 - RNA, 22 nt, Human
ggccuugguucugucacagccg

SEQ ID NO: 652221 - RNA, 22 nt, Human
uauuagguaaaggacuugcagg

SEQ ID NO: 652222 - RNA, 22 nt, Human
uaggaauuuuuguaaugguacu

SEQ ID NO: 652223 - RNA, 22 nt, Human
caaucuuagagagauucuuuua

SEQ ID NO: 652224 - RNA, 22 nt, Human
ugggccucccaugucuuaggga

SEQ ID NO: 652225 - RNA, 22 nt, Human
cccaguggaaggaguagaagac

SEQ ID NO: 652226 - RNA, 22 nt, Human
cugcuagcccgccggccagcga

SEQ ID NO: 652227 - RNA, 22 nt, Human
gcugcccugacuccagcagccu

SEQ ID NO: 652228 - RNA, 22 nt, Human
cuguaucuguguuggaugaguu

SEQ ID NO: 652229 - RNA, 22 nt, Human
auucuucaguauguguggauug

SEQ ID NO: 652230 - RNA, 22 nt, Human
cacugugggucccagacuggag

SEQ ID NO: 652231 - RNA, 22 nt, Human
cccugucuguaccgugaugagc

SEQ ID NO: 652232 - RNA, 22 nt, Human
augcuucccuuugcuccacaug

SEQ ID NO: 652233 - RNA, 20 nt, Human
uggcaggaauagggccagag

SEQ ID NO: 652234 - RNA, 22 nt, Human
aauaugugggugcuaaucaaaa

SEQ ID NO: 652235 - RNA, 22 nt, Human
ugucuguaauagucacuaugug

SEQ ID NO: 652236 - RNA, 17 nt, Human
aagauuucauuagcuga

SEQ ID NO: 652237 - RNA, 22 nt, Human
cuucaguguugccagggccuag

SEQ ID NO: 652238 - RNA, 19 nt, Human
ucuauguggcagugauggc

SEQ ID NO: 652239 - RNA, 18 nt, Human
acuggagcauuagcagcu

SEQ ID NO: 652240 - RNA, 22 nt, Human
uucucacaggcuggaaugauga

SEQ ID NO: 652241 - RNA, 23 nt, Human
ccucugacaaugaugucaccugc

SEQ ID NO: 652242 - RNA, 22 nt, Human
gagcccucucuguaggcaagua

SEQ ID NO: 652243 - RNA, 22 nt, Human
gggcaagcuuugaacaucagca

SEQ ID NO: 652244 - RNA, 22 nt, Human
gccacccugagcugggccaggg

SEQ ID NO: 652245 - RNA, 22 nt, Human
ucaucuguucauacacaugcgu

SEQ ID NO: 652246 - RNA, 22 nt, Human
cauggccagauucuuucuucuc

SEQ ID NO: 652247 - RNA, 22 nt, Human
augcccuggggcuaccucugag

SEQ ID NO: 652248 - RNA, 22 nt, Human
acucaggaaaugaagacugguu

SEQ ID NO: 652249 - RNA, 20 nt, Human
auaaaacucuaaucuggccu

SEQ ID NO: 652250 - RNA, 22 nt, Human
ugucuuuacuuagaaguucagg

SEQ ID NO: 652251 - RNA, 21 nt, Human
aaauuagcuucaaguucugca

SEQ ID NO: 652252 - RNA, 22 nt, Human
gagagugucuggaggaagcuaa

SEQ ID NO: 652253 - RNA, 20 nt, Human
gggugugggcccggccaggc

SEQ ID NO: 652254 - RNA, 22 nt, Human
ugucugccauuagcccagucca

SEQ ID NO: 652255 - RNA, 22 nt, Human
aagccagugggcauagcaguug

SEQ ID NO: 652256 - RNA, 22 nt, Human
agguccugaggguucgucugca

SEQ ID NO: 652257 - RNA, 22 nt, Human
ucacugcugcugccaugaugga

SEQ ID NO: 652258 - RNA, 22 nt, Human
acucacagacugcagguuuauu

SEQ ID NO: 652259 - RNA, 20 nt, Human
agaaaaaguguggaaauuuc

SEQ ID NO: 652260 - RNA, 22 nt, Human
caugucugccaauuuggaagga

SEQ ID NO: 652261 - RNA, 22 nt, Human
cacaaggcuuucaucuggcaua

SEQ ID NO: 652262 - RNA, 22 nt, Human
uggagaguuuagccuacuggaa

SEQ ID NO: 652263 - RNA, 22 nt, Human
uuugaucuaugcgugguuuccc

SEQ ID NO: 652264 - RNA, 22 nt, Human
agagguggagcucuuggcauca

SEQ ID NO: 652265 - RNA, 22 nt, Human
cacagcagccagaacauuuuug

SEQ ID NO: 652266 - RNA, 22 nt, Human
cucagggcuggaaagccaggaa

SEQ ID NO: 652267 - RNA, 22 nt, Human
agugaauaugcagcaagaaguu

SEQ ID NO: 652268 - RNA, 22 nt, Human
acaguaccugcucucaagcaaa

SEQ ID NO: 652269 - RNA, 22 nt, Human
auugacaauuagcccuuaggug

SEQ ID NO: 652270 - RNA, 18 nt, Human
uaaaccugagaagcgugu

SEQ ID NO: 652271 - RNA, 17 nt, Human
ccaggagcgugggucuc

SEQ ID NO: 652272 - RNA, 22 nt, Human
uggggaagaauaauguauguac

SEQ ID NO: 652273 - RNA, 22 nt, Human
aaugaagaaauggacaucuuua

SEQ ID NO: 652274 - RNA, 22 nt, Human
ucuucacaucauguuuuuuaau

SEQ ID NO: 652275 - RNA, 22 nt, Human
ggcucaccauuuucacucucug

SEQ ID NO: 652276 - RNA, 22 nt, Human
caaugcuaggcagauccugcgu

SEQ ID NO: 652277 - RNA, 22 nt, Human
uuauuuguaaagguccauagua

SEQ ID NO: 652278 - RNA, 23 nt, Human
agccacagccagagcuaucucca

SEQ ID NO: 652279 - RNA, 22 nt, Human
uuuucauuuuuguagaugcaag

SEQ ID NO: 652280 - RNA, 19 nt, Human
agugucaucagcuacucag

SEQ ID NO: 652281 - RNA, 22 nt, Human
ggccucucauguccugggcuuc

SEQ ID NO: 652282 - RNA, 22 nt, Human
agcuagagcugagaagcacuug

SEQ ID NO: 652283 - RNA, 22 nt, Human
ggccuggagucagggaaagcaa

SEQ ID NO: 652284 - RNA, 22 nt, Human
aagcauaacuugcugcacauag

SEQ ID NO: 652285 - RNA, 22 nt, Human
acugaaggaaagccuuugcaug

SEQ ID NO: 652286 - RNA, 22 nt, Human
uaguuuuaugaauugguauaau

SEQ ID NO: 652287 - RNA, 22 nt, Human
caaauccagaucccagucguag

SEQ ID NO: 652288 - RNA, 18 nt, Human
ggcugugcguggaggcug

SEQ ID NO: 652289 - RNA, 20 nt, Human
cugggcugggcuacaggguc

SEQ ID NO: 652290 - RNA, 22 nt, Human
aguggagaagaggauggucucc

SEQ ID NO: 652291 - RNA, 18 nt, Human
augugucuuucuuguuug

SEQ ID NO: 652292 - RNA, 22 nt, Human
cugggggcagcaagaagccaug

SEQ ID NO: 652293 - RNA, 22 nt, Human
uaccugucaaaagacauggaga

SEQ ID NO: 652294 - RNA, 22 nt, Human
uaaagcauaaugaauaucuaga

SEQ ID NO: 652295 - RNA, 22 nt, Human
ucacacagcuaguaagggccga

SEQ ID NO: 652296 - RNA, 22 nt, Human
uuggcccacucucagaaugugg

SEQ ID NO: 652297 - RNA, 22 nt, Human
acaugcuacagugaaggaggaa

SEQ ID NO: 652298 - RNA, 23 nt, Human
ucuauuacuuauuguacucugga

SEQ ID NO: 652299 - RNA, 22 nt, Human
guggcacagccaagccucacuc

SEQ ID NO: 652300 - RNA, 22 nt, Human
cuggcucaggaaaguugcugcu

SEQ ID NO: 652301 - RNA, 22 nt, Human
cugaggcaggagaauugcugga

SEQ ID NO: 652302 - RNA, 22 nt, Human
uacagaaaaacaucuggagccg

SEQ ID NO: 652303 - RNA, 22 nt, Human
ccaucagcaugggagcaugggc

SEQ ID NO: 652304 - RNA, 22 nt, Human
uugaaugaaauugcuguguuau

SEQ ID NO: 652305 - RNA, 22 nt, Human
ucucagugagcuuuucuauguu

SEQ ID NO: 652306 - RNA, 22 nt, Human
gacaguauccagguggugaaga

SEQ ID NO: 652307 - RNA, 22 nt, Human
ugggaggcagguaggugaugau

SEQ ID NO: 652308 - RNA, 22 nt, Human
uccagcccgacugggccugccg

SEQ ID NO: 652309 - RNA, 22 nt, Human
augucuuuggcuuugacauggc

SEQ ID NO: 652310 - RNA, 22 nt, Human
aaaguccagagggcacacugaa

SEQ ID NO: 652311 - RNA, 22 nt, Human
ggaacauuuaaauucuuauuug

SEQ ID NO: 652312 - RNA, 22 nt, Human
cuugccuacuugucaaccagca

SEQ ID NO: 652313 - RNA, 22 nt, Human
cucuccuauugugugguaagga

SEQ ID NO: 652314 - RNA, 22 nt, Human
aagggcuuuuaagauuuauccu

SEQ ID NO: 652315 - RNA, 22 nt, Human
uuguguuucccuugcauauucc

SEQ ID NO: 652316 - RNA, 22 nt, Human
cuuccucaugugcaaugcaagc

SEQ ID NO: 652317 - RNA, 17 nt, Human
uagcacagugccuggua

SEQ ID NO: 652318 - RNA, 22 nt, Human
auacuacauuauuagagccugg

SEQ ID NO: 652319 - RNA, 22 nt, Human
uagguacagcuaaaaauuaucu

SEQ ID NO: 652320 - RNA, 22 nt, Human
cagcacaucugauuauaugacu

SEQ ID NO: 652321 - RNA, 22 nt, Human
acagauaaaaguuguuuaaaau

SEQ ID NO: 652322 - RNA, 22 nt, Human
uuucugucauaguuaucuuugu

SEQ ID NO: 652323 - RNA, 22 nt, Human
ugggcagaguagcucagaagaa

SEQ ID NO: 652324 - RNA, 18 nt, Human
aacuucaacuacaaugga

SEQ ID NO: 652325 - RNA, 20 nt, Human
ucuguguuucagcugcuuga

SEQ ID NO: 652326 - RNA, 22 nt, Human
caggcccucguggugagcuggg

SEQ ID NO: 652327 - RNA, 22 nt, Human
cuagaggaacaguuucagguuu

SEQ ID NO: 652328 - RNA, 22 nt, Human
gcuucugcagagccguccugag

SEQ ID NO: 652329 - RNA, 22 nt, Human
cugcagugccugccacugagcc

SEQ ID NO: 652330 - RNA, 22 nt, Human
ugcugcuggguuugacagucac

SEQ ID NO: 652331 - RNA, 22 nt, Human
acagauauguuggguucuuguu

SEQ ID NO: 652332 - RNA, 22 nt, Human
ccugugggcgcagcuggaguca

SEQ ID NO: 652333 - RNA, 22 nt, Human
uccuccagcaggacugaggccc

SEQ ID NO: 652334 - RNA, 22 nt, Human
cuaaaugucagaguagcuugca

SEQ ID NO: 652335 - RNA, 22 nt, Human
ugaauggucacugagcaucugu

SEQ ID NO: 652336 - RNA, 17 nt, Human
uggcuucaggcugagca

SEQ ID NO: 652337 - RNA, 22 nt, Human
caagcaacgacuuucaagcugu

SEQ ID NO: 652338 - RNA, 22 nt, Human
gaggggccuggcgaggacaugu

SEQ ID NO: 652339 - RNA, 22 nt, Human
uucauaaggguggccauauaaa

SEQ ID NO: 652340 - RNA, 22 nt, Human
uggaaugcauggcucugugacg

SEQ ID NO: 652341 - RNA, 22 nt, Human
auggcagaagucaagaugaguu

SEQ ID NO: 652342 - RNA, 22 nt, Human
gcuuggcuccuggcucacaggu

SEQ ID NO: 652343 - RNA, 22 nt, Human
auagauauuugaguuguuucca

SEQ ID NO: 652344 - RNA, 22 nt, Human
caaccugacaagacuaugagua

SEQ ID NO: 652345 - RNA, 22 nt, Human
uccaccugaguuucaguuauuu

SEQ ID NO: 652346 - RNA, 22 nt, Human
uuccagcaggcagacaggagau

SEQ ID NO: 652347 - RNA, 22 nt, Human
acaauuuuucaaagaagcuuau

SEQ ID NO: 652348 - RNA, 22 nt, Human
acuaaaguauggaagugaauaa

SEQ ID NO: 652349 - RNA, 22 nt, Human
caggcagcagaggaguguggga

SEQ ID NO: 652350 - RNA, 17 nt, Human
aggagggaaauagcuug

SEQ ID NO: 652351 - RNA, 22 nt, Human
aaaggcaucuagccaaguugag

SEQ ID NO: 652352 - RNA, 22 nt, Human
gaugaggucauguuuuacauau

SEQ ID NO: 652353 - RNA, 21 nt, Human
uucucagaucgaguagugaga

SEQ ID NO: 652354 - RNA, 18 nt, Human
ugaauuaguuugugguuu

SEQ ID NO: 652355 - RNA, 22 nt, Human
acugcucaaggaucugguaggg

SEQ ID NO: 652356 - RNA, 22 nt, Human
uaugaaauugccauuuuuaugg

SEQ ID NO: 652357 - RNA, 18 nt, Human
uggcuggcagugggcagc

SEQ ID NO: 652358 - RNA, 22 nt, Human
uggcucugugcuucuaguaucu

SEQ ID NO: 652359 - RNA, 22 nt, Human
auucacagggcuuuccgcaugg

SEQ ID NO: 652360 - RNA, 22 nt, Human
uucagacuagacacauuucaag

SEQ ID NO: 652361 - RNA, 18 nt, Human
auauggaaugccuggcua

SEQ ID NO: 652362 - RNA, 22 nt, Human
cuacucuuuugagucuucagau

SEQ ID NO: 652363 - RNA, 22 nt, Human
auuggcuugcacuguauuuuaa

SEQ ID NO: 652364 - RNA, 22 nt, Human
gugcagaccuuaguucaagcca

SEQ ID NO: 652365 - RNA, 22 nt, Human
uccagcagugcucuagagcgug

SEQ ID NO: 652366 - RNA, 22 nt, Human
aaccuaagugcuguugaacguu

SEQ ID NO: 652367 - RNA, 22 nt, Human
cuauuuucauucuuacauuguc

SEQ ID NO: 652368 - RNA, 22 nt, Human
gccaggcauuuguuaggugcug

SEQ ID NO: 652369 - RNA, 22 nt, Human
gggugggaucuguggagccuca

SEQ ID NO: 652370 - RNA, 19 nt, Human
aaugacugaguacauuguc

SEQ ID NO: 652371 - RNA, 22 nt, Human
aaugaaauaguuggcuguagag

SEQ ID NO: 652372 - RNA, 22 nt, Human
cgggcagaucacacagggcuug

SEQ ID NO: 652373 - RNA, 22 nt, Human
augucuguacgaguuacaaugg

SEQ ID NO: 652374 - RNA, 22 nt, Human
ucacagcuuucagauuguuccc

SEQ ID NO: 652375 - RNA, 22 nt, Human
uuguguguagacucagccauug

SEQ ID NO: 652376 - RNA, 22 nt, Human
gaccaaggaagaggggagccag

SEQ ID NO: 652377 - RNA, 22 nt, Human
uuacaugggccauuuagacaug

SEQ ID NO: 652378 - RNA, 22 nt, Human
ccaguguucaguaugcauuaag

SEQ ID NO: 652379 - RNA, 22 nt, Human
cuagaaaugcucaagagaaagu

SEQ ID NO: 652380 - RNA, 22 nt, Human
aucauuucccuuuagaucacaa

SEQ ID NO: 652381 - RNA, 22 nt, Human
acaagugcauggaaucagcugu

SEQ ID NO: 652382 - RNA, 20 nt, Human
ccuggagccuggaaggaguc

SEQ ID NO: 652383 - RNA, 22 nt, Human
uuaugauuuagaaagauucacu

SEQ ID NO: 652384 - RNA, 22 nt, Human
uagcaacaagugacuaucuaua

SEQ ID NO: 652385 - RNA, 22 nt, Human
aguccauacauugagaauaaca

SEQ ID NO: 652386 - RNA, 22 nt, Human
caaggccauaagagauacaaaa

SEQ ID NO: 652387 - RNA, 22 nt, Human
agaagaauuucucucaugauuu

SEQ ID NO: 652388 - RNA, 22 nt, Human
cauacugugaagcuuacuauuu

SEQ ID NO: 652389 - RNA, 22 nt, Human
acaaagguggaccauguggcuu

SEQ ID NO: 652390 - RNA, 22 nt, Human
ucagugucuucucuuuccuacc

SEQ ID NO: 652391 - RNA, 22 nt, Human
cagaguggagauguguguggaa

SEQ ID NO: 652392 - RNA, 22 nt, Human
auucugggcgccuauggcugca

SEQ ID NO: 652393 - RNA, 22 nt, Human
cauuaugaagcaucaucuuauu

SEQ ID NO: 652394 - RNA, 22 nt, Human
uacuguauaugcuuguaucuga

SEQ ID NO: 652395 - RNA, 22 nt, Human
gacuuugguuugagcaagucag

SEQ ID NO: 652396 - RNA, 22 nt, Human
agcugcucugagcccugauucu

SEQ ID NO: 652397 - RNA, 22 nt, Human
uucauguauuuaucauguaaau

SEQ ID NO: 652398 - RNA, 22 nt, Human
ggaggagucaguugggcugcuu

SEQ ID NO: 652399 - RNA, 22 nt, Human
aggcucagaggugagcaucugc

SEQ ID NO: 652400 - RNA, 22 nt, Human
cagcuccucacgagucuugaaa

SEQ ID NO: 652401 - RNA, 22 nt, Human
ccugcucagagcgucuugugug

SEQ ID NO: 652402 - RNA, 22 nt, Human
gucugcccugcugaucucaccc

SEQ ID NO: 652403 - RNA, 22 nt, Human
augucuuucuugugucccaaga

SEQ ID NO: 652404 - RNA, 22 nt, Human
cuagggaguggcagagcuggga

SEQ ID NO: 652405 - RNA, 22 nt, Human
ccuuuucuugccacugacucgg

SEQ ID NO: 652406 - RNA, 22 nt, Human
gcucugagcacugugcggcugg

SEQ ID NO: 652407 - RNA, 18 nt, Human
uccagucccaaggccagc

SEQ ID NO: 652408 - RNA, 17 nt, Human
guggcugcacacacaug

SEQ ID NO: 652409 - RNA, 22 nt, Human
agggcuccuaugaugcucugcc

SEQ ID NO: 652410 - RNA, 22 nt, Human
ggcucaagcagucugccugccu

SEQ ID NO: 652411 - RNA, 22 nt, Human
uagcagagcagggaucagagcc

SEQ ID NO: 652412 - RNA, 22 nt, Human
auaggucugaaaguguauccug

SEQ ID NO: 652413 - RNA, 22 nt, Human
ccacuguuuuucaguuaacuuu

SEQ ID NO: 652414 - RNA, 22 nt, Human
agcaaagucaguggaaccaucc

SEQ ID NO: 652415 - RNA, 22 nt, Human
cuggcugucuuggaggaaggag

SEQ ID NO: 652416 - RNA, 22 nt, Human
gggaaagaagaucuagauacug

SEQ ID NO: 652417 - RNA, 22 nt, Human
uccucagggggccaacccagcc

SEQ ID NO: 652418 - RNA, 22 nt, Human
uaagugucucucgaauuaugcu

SEQ ID NO: 652419 - RNA, 22 nt, Human
ugcgagaguggaaaggaagccu

SEQ ID NO: 652420 - RNA, 22 nt, Human
uuacagaauguucuuccaacag

SEQ ID NO: 652421 - RNA, 22 nt, Human
uuguuaaaaugcauauucuggu

SEQ ID NO: 652422 - RNA, 22 nt, Human
guaaauaacugguaauuggggu

SEQ ID NO: 652423 - RNA, 22 nt, Human
ggucagagccauggagcaacug

SEQ ID NO: 652424 - RNA, 20 nt, Human
gagguagggcuuaaggcaag

SEQ ID NO: 652425 - RNA, 22 nt, Human
ggggaugguggcauuuguaaaa

SEQ ID NO: 652426 - RNA, 22 nt, Human
gcuguguucauuuugcauaugu

SEQ ID NO: 652427 - RNA, 22 nt, Human
aaaugauaguauggaacuagga

SEQ ID NO: 652428 - RNA, 22 nt, Human
uggcugagggggcucugcucag

SEQ ID NO: 652429 - RNA, 22 nt, Human
ugggcacaaacaucugccuguu

SEQ ID NO: 652430 - RNA, 22 nt, Human
uggccccugaggagcaucagcc

SEQ ID NO: 652431 - RNA, 22 nt, Human
aaucagaacuccuaccacagag

SEQ ID NO: 652432 - RNA, 21 nt, Human
aaugcauuaacauaaagcuga

SEQ ID NO: 652433 - RNA, 22 nt, Human
uacagcuuugggaaggccccau

SEQ ID NO: 652434 - RNA, 22 nt, Human
ugggggugcccuaugaggaagc

SEQ ID NO: 652435 - RNA, 22 nt, Human
gagcugaggauacaucagugaa

SEQ ID NO: 652436 - RNA, 22 nt, Human
ggaggcacaccucagacuggga

SEQ ID NO: 652437 - RNA, 22 nt, Human
guccagagccggaagagugaca

SEQ ID NO: 652438 - RNA, 22 nt, Human
gcuuucugguucucaaagcacu

SEQ ID NO: 652439 - RNA, 22 nt, Human
ggcacaauugcagcaauaaaca

SEQ ID NO: 652440 - RNA, 22 nt, Human
aaagucauugcuguuaucaaug

SEQ ID NO: 652441 - RNA, 22 nt, Human
ggcuggagguagaagaacacuu

SEQ ID NO: 652442 - RNA, 17 nt, Human
uuucaagguuacguucc

SEQ ID NO: 652443 - RNA, 17 nt, Human
cucuggggacaguucua

SEQ ID NO: 652444 - RNA, 22 nt, Human
gagggcuguggggcaugaccag

SEQ ID NO: 652445 - RNA, 22 nt, Human
uuucaacagcucucaaaugauc

SEQ ID NO: 652446 - RNA, 22 nt, Human
uggcuccagaagggagggcgcc

SEQ ID NO: 652447 - RNA, 22 nt, Human
cccuugggugccagccacaagu

SEQ ID NO: 652448 - RNA, 22 nt, Human
guggguggacggugcuuuuguu

SEQ ID NO: 652449 - RNA, 22 nt, Human
ccaggggccugugaaggugccc

SEQ ID NO: 652450 - RNA, 22 nt, Human
auguagaauuccuucuacuuug

SEQ ID NO: 652451 - RNA, 22 nt, Human
auuuaacaagacagagaacugg

SEQ ID NO: 652452 - RNA, 22 nt, Human
cuggccccaggcagccugcugg

SEQ ID NO: 652453 - RNA, 22 nt, Human
ugauucugcuuauggguggauu

SEQ ID NO: 652454 - RNA, 22 nt, Human
agaauaaaugcuaccuaucaca

SEQ ID NO: 652455 - RNA, 22 nt, Human
aacuguagcaaagaacagcucu

SEQ ID NO: 652456 - RNA, 22 nt, Human
aacaggaaauacuuaugaggua

SEQ ID NO: 652457 - RNA, 22 nt, Human
uacacaucccagacucccagga

SEQ ID NO: 652458 - RNA, 22 nt, Human
ucucauucauccaaggauuuau

SEQ ID NO: 652459 - RNA, 22 nt, Human
cagcuuugagaguugcauuuua

SEQ ID NO: 652460 - RNA, 22 nt, Human
ccccaaagcugaguucccgccu

SEQ ID NO: 652461 - RNA, 22 nt, Human
gugcacagaaauugguaagacu

SEQ ID NO: 652462 - RNA, 22 nt, Human
ucugaaggucugagaaccagga

SEQ ID NO: 652463 - RNA, 22 nt, Human
aaggcuggaguacagugcagug

SEQ ID NO: 652464 - RNA, 22 nt, Human
gcagcaggacugccguuaaagu

SEQ ID NO: 652465 - RNA, 22 nt, Human
cagccaagaaccacagacccag

SEQ ID NO: 652466 - RNA, 22 nt, Human
guguagagugacaaggugggaa

SEQ ID NO: 652467 - RNA, 22 nt, Human
uuugacauuggcuuauucuguu

SEQ ID NO: 652468 - RNA, 22 nt, Human
cacccuguacaaauggacaucu

SEQ ID NO: 652469 - RNA, 22 nt, Human
acaucacagagcccagauaaag

SEQ ID NO: 652470 - RNA, 22 nt, Human
guaaacaauagcauugccugau

SEQ ID NO: 652471 - RNA, 22 nt, Human
aggagcugcacugggaguuuuu

SEQ ID NO: 652472 - RNA, 22 nt, Human
cagagcccagggccuacguccc

SEQ ID NO: 652473 - RNA, 22 nt, Human
cuggagccggaccagggacggu

SEQ ID NO: 652474 - RNA, 22 nt, Human
uggacucagaguugguggcagu

SEQ ID NO: 652475 - RNA, 22 nt, Human
ucagagaaaugcugagcucaug

SEQ ID NO: 652476 - RNA, 22 nt, Human
gagcuaagagucuagaaaggcu

SEQ ID NO: 652477 - RNA, 22 nt, Human
acaggcagcacuaaucucuggu

SEQ ID NO: 652478 - RNA, 22 nt, Human
cuccuggaccaccuuguggcca

SEQ ID NO: 652479 - RNA, 22 nt, Human
cuggagggauguaggguguauu

SEQ ID NO: 652480 - RNA, 22 nt, Human
uccugaggcacaauccuagaau

SEQ ID NO: 652481 - RNA, 22 nt, Human
aagcagagccaccagcuuugga

SEQ ID NO: 652482 - RNA, 21 nt, Human
uuguaugcauacauacacaca

SEQ ID NO: 652483 - RNA, 22 nt, Human
cucucuggucccagauuccaga

SEQ ID NO: 652484 - RNA, 22 nt, Human
ucuguccaggcuuacuauauau

SEQ ID NO: 652485 - RNA, 23 nt, Human
ccugucugugcuggguggacaca

SEQ ID NO: 652486 - RNA, 22 nt, Human
ugcccuggaaaugagaggugug

SEQ ID NO: 652487 - RNA, 22 nt, Human
acacugacgcuugacagucacc

SEQ ID NO: 652488 - RNA, 22 nt, Human
ggagauagacuuggugagccac

SEQ ID NO: 652489 - RNA, 22 nt, Human
uuauuuguuuucugagaaguau

SEQ ID NO: 652490 - RNA, 22 nt, Human
acacaugaaagacauuaaggug

SEQ ID NO: 652491 - RNA, 22 nt, Human
uuuguaacaucccaacaaauuu

SEQ ID NO: 652492 - RNA, 22 nt, Human
gggcagccugcuuucugaucca

SEQ ID NO: 652493 - RNA, 22 nt, Human
caaguccuuagaugguucuuug

SEQ ID NO: 652494 - RNA, 20 nt, Human
aaaaauugauaucgcuuccu

SEQ ID NO: 652495 - RNA, 22 nt, Human
aaggaugugacucagucagcua

SEQ ID NO: 652496 - RNA, 21 nt, Human
ggaagggguccucccaacagu

SEQ ID NO: 652497 - RNA, 22 nt, Human
cccuccccagggucauauugaa

SEQ ID NO: 652498 - RNA, 22 nt, Human
uuauucaggaggugcucgaagg

SEQ ID NO: 652499 - RNA, 22 nt, Human
gacagucuggccuaaaggguua

SEQ ID NO: 652500 - RNA, 22 nt, Human
auuagagguacaaaccuucacu

SEQ ID NO: 652501 - RNA, 21 nt, Human
ugguuugcggccaaaguuaaa

SEQ ID NO: 652502 - RNA, 22 nt, Human
uugugugacuccuagaguagag

SEQ ID NO: 652503 - RNA, 22 nt, Human
ggaggccaagucacugaccugg

SEQ ID NO: 652504 - RNA, 22 nt, Human
gccaggugggagacagacagca

SEQ ID NO: 652505 - RNA, 22 nt, Human
ugauggaaauaaaagcauagcu

SEQ ID NO: 652506 - RNA, 22 nt, Human
acagaacugggaaaugcacaua

SEQ ID NO: 652507 - RNA, 22 nt, Human
aagugcaaaucuguggcugaaa

SEQ ID NO: 652508 - RNA, 22 nt, Human
ugcuguguuacugagauccggc

SEQ ID NO: 652509 - RNA, 22 nt, Human
uggaggccggacugagaggcau

SEQ ID NO: 652510 - RNA, 22 nt, Human
gcaggaggaucacuugagccca

SEQ ID NO: 652511 - RNA, 22 nt, Human
uucagcuugcuuagucuccuuc

SEQ ID NO: 652512 - RNA, 22 nt, Human
cuggcacaacuccaccucagcg

SEQ ID NO: 652513 - RNA, 22 nt, Human
agccuguggaucccugcacugg

SEQ ID NO: 652514 - RNA, 22 nt, Human
ggauauaugcauguuaucauuu

SEQ ID NO: 652515 - RNA, 22 nt, Human
cucucuuugauguauaaauaau

SEQ ID NO: 652516 - RNA, 22 nt, Human
ugaaaugagcauuuauucuuua

SEQ ID NO: 652517 - RNA, 22 nt, Human
ccagaagaggacacagugugga

SEQ ID NO: 652518 - RNA, 22 nt, Human
cagaccugggucccuggccugu

SEQ ID NO: 652519 - RNA, 22 nt, Human
uccaggcccacucgguggggcu

SEQ ID NO: 652520 - RNA, 22 nt, Human
uagaaagucaaaacacuguguu

SEQ ID NO: 652521 - RNA, 20 nt, Human
gcugucugacaguucccaga

SEQ ID NO: 652522 - RNA, 22 nt, Human
uggcccucagucuugcuccugc

SEQ ID NO: 652523 - RNA, 22 nt, Human
cagucagaaggaagaugcuuaa

SEQ ID NO: 652524 - RNA, 22 nt, Human
auuuacaccuucuucgauucuc

SEQ ID NO: 652525 - RNA, 22 nt, Human
ugcuuaaagcugcucaguugua

SEQ ID NO: 652526 - RNA, 22 nt, Human
cagcagcuaccugcucuugugg

SEQ ID NO: 652527 - RNA, 22 nt, Human
aaucuucauaaaaaucuaguag

SEQ ID NO: 652528 - RNA, 22 nt, Human
uauacagauaaugaagaccaag

SEQ ID NO: 652529 - RNA, 22 nt, Human
cugcuucacccaacuuugggau

SEQ ID NO: 652530 - RNA, 22 nt, Human
ugcaacucuggaucuucuggua

SEQ ID NO: 652531 - RNA, 22 nt, Human
gcacuagagcagcucucagaga

SEQ ID NO: 652532 - RNA, 22 nt, Human
acucagaagauguggguagaua

SEQ ID NO: 652533 - RNA, 20 nt, Human
uuauguguaccugugcuccc

SEQ ID NO: 652534 - RNA, 22 nt, Human
ugcccuguuaucuuggaagagu

SEQ ID NO: 652535 - RNA, 22 nt, Human
uggcuucaggcagaauuuagac

SEQ ID NO: 652536 - RNA, 22 nt, Human
ugaguaaauacaaaaucaccuc

SEQ ID NO: 652537 - RNA, 23 nt, Human
uccuggagaaaagaaacauuucu

SEQ ID NO: 652538 - RNA, 22 nt, Human
ggcagauguugcagugagcaga

SEQ ID NO: 652539 - RNA, 22 nt, Human
ggugggugcagggggcuucuua

SEQ ID NO: 652540 - RNA, 22 nt, Human
gcugggcaggccucgugagggc

SEQ ID NO: 652541 - RNA, 22 nt, Human
uuuauugagcacccguugugcg

SEQ ID NO: 652542 - RNA, 22 nt, Human
aauuaggaauaaaugaguacuu

SEQ ID NO: 652543 - RNA, 22 nt, Human
uucugagccucauucaugaggc

SEQ ID NO: 652544 - RNA, 22 nt, Human
gucauauugaagaagacuggca

SEQ ID NO: 652545 - RNA, 22 nt, Human
agacaauguuuggucuacacuu

SEQ ID NO: 652546 - RNA, 22 nt, Human
guucacagauccuugaagccag

SEQ ID NO: 652547 - RNA, 22 nt, Human
gugcaggagccagggguaggaa

SEQ ID NO: 652548 - RNA, 19 nt, Human
acaaaugauguugcacuga

SEQ ID NO: 652549 - RNA, 22 nt, Human
ucucuaauucaaccagacacuu

SEQ ID NO: 652550 - RNA, 22 nt, Human
uaggcuccucucacauucuauu

SEQ ID NO: 652551 - RNA, 22 nt, Human
uguguucuccaacuguagauuu

SEQ ID NO: 652552 - RNA, 22 nt, Human
cagucccaccaggaucgcucuu

SEQ ID NO: 652553 - RNA, 22 nt, Human
uggauaccugguuuuuauuuac

SEQ ID NO: 652554 - RNA, 22 nt, Human
uuccaacuuugucauauauuau

SEQ ID NO: 652555 - RNA, 22 nt, Human
auggacuuaagagucagaagcu

SEQ ID NO: 652556 - RNA, 21 nt, Human
auucacagguauccucucccu

SEQ ID NO: 652557 - RNA, 22 nt, Human
ucuucauuccguagauauuuau

SEQ ID NO: 652558 - RNA, 22 nt, Human
cuugcugucuugcauuuagagc

SEQ ID NO: 652559 - RNA, 22 nt, Human
gccugagcaggcguggaccaug

SEQ ID NO: 652560 - RNA, 22 nt, Human
gugggcaaggucccugccagcu

SEQ ID NO: 652561 - RNA, 22 nt, Human
auggcacuaagagggagcugga

SEQ ID NO: 652562 - RNA, 22 nt, Human
gcugccuggagaggcagggaug

SEQ ID NO: 652563 - RNA, 21 nt, Human
ccuggcuucagggugcacugg

SEQ ID NO: 652564 - RNA, 22 nt, Human
ugcuucugacuaagcugcauga

SEQ ID NO: 652565 - RNA, 23 nt, Human
cucucucuaccaugugaggacac

SEQ ID NO: 652566 - RNA, 22 nt, Human
auaugcuuacagcuuaaaaucc

SEQ ID NO: 652567 - RNA, 23 nt, Human
cacaugaccugaccuaggcuagg

SEQ ID NO: 652568 - RNA, 18 nt, Human
gagguccugcucuagccc

SEQ ID NO: 652569 - RNA, 22 nt, Human
guuuagaauggcaaaauuaagu

SEQ ID NO: 652570 - RNA, 22 nt, Human
auucacaacugauccuugcuca

SEQ ID NO: 652571 - RNA, 22 nt, Human
agccuccacagaugcaaagggc

SEQ ID NO: 652572 - RNA, 22 nt, Human
aauuagacuaauuuuacaaggg

SEQ ID NO: 652573 - RNA, 22 nt, Human
uauucuugacugcuuacuaugu

SEQ ID NO: 652574 - RNA, 22 nt, Human
uauucauggggguccagguacc

SEQ ID NO: 652575 - RNA, 22 nt, Human
agguaaaugaauguuuagucuu

SEQ ID NO: 652576 - RNA, 22 nt, Human
augcgugcagggguccuccugg

SEQ ID NO: 652577 - RNA, 22 nt, Human
caggaggaaaugugacccugcu

SEQ ID NO: 652578 - RNA, 22 nt, Human
ccagggaagauuagaagccacu

SEQ ID NO: 652579 - RNA, 22 nt, Human
accuagaaacugacagaauauu

SEQ ID NO: 652580 - RNA, 22 nt, Human
ccuggcugguugucugauucua

SEQ ID NO: 652581 - RNA, 22 nt, Human
ugaauaaauugagagcgaaugu

SEQ ID NO: 652582 - RNA, 22 nt, Human
uauugaaauccauuacguucuu

SEQ ID NO: 652583 - RNA, 22 nt, Human
gaggcacauauauacagagccc

SEQ ID NO: 652584 - RNA, 22 nt, Human
ucagcaggugaacaucaugcca

SEQ ID NO: 652585 - RNA, 22 nt, Human
agacucugguccucuugaauuu

SEQ ID NO: 652586 - RNA, 22 nt, Human
aaguucaaggcucuagaguucc

SEQ ID NO: 652587 - RNA, 22 nt, Human
ucagaacagugccuggcacuaa

SEQ ID NO: 652588 - RNA, 23 nt, Human
caggacaugggaggaaguauggc

SEQ ID NO: 652589 - RNA, 22 nt, Human
gcacacacuguuuuccucacau

SEQ ID NO: 652590 - RNA, 22 nt, Human
aggaugaggcuggcaggucuug

SEQ ID NO: 652591 - RNA, 22 nt, Human
uuuacaacguuccuggugcuaa

SEQ ID NO: 652592 - RNA, 22 nt, Human
uccagggucagaagucacauac

SEQ ID NO: 652593 - RNA, 22 nt, Human
ucuucccccgugcuccagugca

SEQ ID NO: 652594 - RNA, 22 nt, Human
aucaguuugagugcugugucaa

SEQ ID NO: 652595 - RNA, 22 nt, Human
cagcuucagggacagcuucuuu

SEQ ID NO: 652596 - RNA, 22 nt, Human
ccaagagguugugaggcaggca

SEQ ID NO: 652597 - RNA, 19 nt, Human
cuuucaugugguucuucuu

SEQ ID NO: 652598 - RNA, 19 nt, Human
ccuuuuuuaacuucagcaa

SEQ ID NO: 652599 - RNA, 22 nt, Human
ccggucccaggugccccgguga

SEQ ID NO: 652600 - RNA, 22 nt, Human
agcuguucccucacugcaguca

SEQ ID NO: 652601 - RNA, 22 nt, Human
cagcagaucaauguagaauauu

SEQ ID NO: 652602 - RNA, 22 nt, Human
augaacaugugacucagaccug

SEQ ID NO: 652603 - RNA, 22 nt, Human
ugcuggaaaaaucauuugcuuu

SEQ ID NO: 652604 - RNA, 22 nt, Human
cucaggucgcuauuucucuuac

SEQ ID NO: 652605 - RNA, 22 nt, Human
ucuucuuuggaugaaagaauau

SEQ ID NO: 652606 - RNA, 22 nt, Human
uacaacuuccagcuuucagccc

SEQ ID NO: 652607 - RNA, 22 nt, Human
ggcucuggcguccaauggagcg

SEQ ID NO: 652608 - RNA, 22 nt, Human
auaauccugcuuuuucacuauu

SEQ ID NO: 652609 - RNA, 22 nt, Human
aaaugguauaaugucauguauu

SEQ ID NO: 652610 - RNA, 22 nt, Human
uuugagauggagucuugcucug

SEQ ID NO: 652611 - RNA, 22 nt, Human
aaacagcaauggagaagccagg

SEQ ID NO: 652612 - RNA, 22 nt, Human
cuccugagaggaucucuguugu

SEQ ID NO: 652613 - RNA, 22 nt, Human
uacaggagagauuuaguaauca

SEQ ID NO: 652614 - RNA, 22 nt, Human
gugggccacaucccagggcucu

SEQ ID NO: 652615 - RNA, 22 nt, Human
auggcucucuccuuacugcugc

SEQ ID NO: 652616 - RNA, 22 nt, Human
gcucaugggcccagagcagccc

SEQ ID NO: 652617 - RNA, 22 nt, Human
gugagcaggauaggggcucccu

SEQ ID NO: 652618 - RNA, 22 nt, Human
uguuaacuuccuccuccucugc

SEQ ID NO: 652619 - RNA, 22 nt, Human
uuugcuuucuguugaacagagu

SEQ ID NO: 652620 - RNA, 19 nt, Human
gcuuccagcacugcaggag

SEQ ID NO: 652621 - RNA, 23 nt, Human
agcuaaugggacagauuccaugg

SEQ ID NO: 652622 - RNA, 22 nt, Human
gugcauuaggcuggaauguuga

SEQ ID NO: 652623 - RNA, 22 nt, Human
uagaucaucagugggcucuuau

SEQ ID NO: 652624 - RNA, 22 nt, Human
cuaguggaaacuaacuggaauu

SEQ ID NO: 652625 - RNA, 22 nt, Human
uaugcacacaggcuuaauucau

SEQ ID NO: 652626 - RNA, 22 nt, Human
gagaggccaagggauccgugag

SEQ ID NO: 652627 - RNA, 22 nt, Human
aacauuucugagaauaucaguu

SEQ ID NO: 652628 - RNA, 22 nt, Human
agagcagcguuuguggaacacu

SEQ ID NO: 652629 - RNA, 22 nt, Human
cacagggcuucucauggggugc

SEQ ID NO: 652630 - RNA, 22 nt, Human
uuaaagucccugccuuaauucc

SEQ ID NO: 652631 - RNA, 22 nt, Human
gguaggggaagacaagugaaaa

SEQ ID NO: 652632 - RNA, 21 nt, Human
ucagcagcaucugccuagagu

SEQ ID NO: 652633 - RNA, 22 nt, Human
auaaagaggauguauuuacagc

SEQ ID NO: 652634 - RNA, 22 nt, Human
caggcccuccugugaucugccu

SEQ ID NO: 652635 - RNA, 22 nt, Human
acauagaagugaugcuuaucca

SEQ ID NO: 652636 - RNA, 22 nt, Human
gcagagcuguuaauggagcuga

SEQ ID NO: 652637 - RNA, 22 nt, Human
aguggcagccuuguucauuaug

SEQ ID NO: 652638 - RNA, 21 nt, Human
uuucuaaggaggaagaaaaga

SEQ ID NO: 652639 - RNA, 22 nt, Human
guguaugaggggagaauguuuu

SEQ ID NO: 652640 - RNA, 22 nt, Human
aagcugaauuuucuaaaagaau

SEQ ID NO: 652641 - RNA, 22 nt, Human
gggucaggcucagcagggcagc

SEQ ID NO: 652642 - RNA, 22 nt, Human
uccugcacaccuugagcuugga

SEQ ID NO: 652643 - RNA, 23 nt, Human
ugucaaguauagcaggcccuccc

SEQ ID NO: 652644 - RNA, 22 nt, Human
ugccaggcccagcagggcggcc

SEQ ID NO: 652645 - RNA, 22 nt, Human
ucagaagucaugcucagucugu

SEQ ID NO: 652646 - RNA, 20 nt, Human
ggggcugcaugcagagaaga

SEQ ID NO: 652647 - RNA, 22 nt, Human
caggaggugcccucuaguggca

SEQ ID NO: 652648 - RNA, 22 nt, Human
gugcuuuaaaaauaggagauga

SEQ ID NO: 652649 - RNA, 22 nt, Human
gggagcuguaagggacagguag

SEQ ID NO: 652650 - RNA, 22 nt, Human
ucugggccagaucuagggaucu

SEQ ID NO: 652651 - RNA, 22 nt, Human
gcccacuccagcuucucccaca

SEQ ID NO: 652652 - RNA, 22 nt, Human
aaagaggcaaucaauguagcaa

SEQ ID NO: 652653 - RNA, 22 nt, Human
ugaaugauuucuuaggcaauug

SEQ ID NO: 652654 - RNA, 22 nt, Human
cagacugggcugguggaaagcu

SEQ ID NO: 652655 - RNA, 22 nt, Human
uucuaacuaaagucuuuguuuu

SEQ ID NO: 652656 - RNA, 22 nt, Human
gaagauaacuuuaaaaaguggc

SEQ ID NO: 652657 - RNA, 22 nt, Human
agguccaguuuucugacaaggg

SEQ ID NO: 652658 - RNA, 22 nt, Human
uaagauguacaaccacuucucu

SEQ ID NO: 652659 - RNA, 17 nt, Human
ggucuggggccauuggc

SEQ ID NO: 652660 - RNA, 22 nt, Human
guggcuucaugaacacugauga

SEQ ID NO: 652661 - RNA, 18 nt, Human
gcuccugguuggaaagaa

SEQ ID NO: 652662 - RNA, 22 nt, Human
ggaggagagagguugcaaacac

SEQ ID NO: 652663 - RNA, 22 nt, Human
agcugugugccaggggagaugu

SEQ ID NO: 652664 - RNA, 22 nt, Human
ucacuguuucaucccuagcacu

SEQ ID NO: 652665 - RNA, 22 nt, Human
guuguauagagggcaugaaucu

SEQ ID NO: 652666 - RNA, 22 nt, Human
aguggcaguuugggagcuacag

SEQ ID NO: 652667 - RNA, 22 nt, Human
uccagggguaccggccaggcag

SEQ ID NO: 652668 - RNA, 22 nt, Human
uucuguaugccaauggguuuuu

SEQ ID NO: 652669 - RNA, 20 nt, Human
uucauucacguagcuguuga

SEQ ID NO: 652670 - RNA, 22 nt, Human
uguuuacauauuuggucucaga

SEQ ID NO: 652671 - RNA, 22 nt, Human
ugucauuuucagcuuaugcuuc

SEQ ID NO: 652672 - RNA, 22 nt, Human
gcccugagcuagugugggcagg

SEQ ID NO: 652673 - RNA, 22 nt, Human
cacucugacuggcccugcagga

SEQ ID NO: 652674 - RNA, 22 nt, Human
acuuguuucaacuguacucucc

SEQ ID NO: 652675 - RNA, 22 nt, Human
uguggcugucuguucuccuagg

SEQ ID NO: 652676 - RNA, 22 nt, Human
agaacagcaacaucagacaaag

SEQ ID NO: 652677 - RNA, 22 nt, Human
uuggugugacuaaggcagugug

SEQ ID NO: 652678 - RNA, 22 nt, Human
ggcugcagcagagggacucacg

SEQ ID NO: 652679 - RNA, 22 nt, Human
gcugguccagggccucuguggg

SEQ ID NO: 652680 - RNA, 22 nt, Human
ucagugcaaaaaaugggcuaga

SEQ ID NO: 652681 - RNA, 22 nt, Human
cuuuacagccccacuuccgggc

SEQ ID NO: 652682 - RNA, 22 nt, Human
ccagagccccugagcuucccug

SEQ ID NO: 652683 - RNA, 22 nt, Human
uaaggcagguagaugacuacgg

SEQ ID NO: 652684 - RNA, 22 nt, Human
uacaugaagaugaauguauggc

SEQ ID NO: 652685 - RNA, 22 nt, Human
acucauuugacacuuuaaacug

SEQ ID NO: 652686 - RNA, 22 nt, Human
uugauucuacuuaaaacauaug

SEQ ID NO: 652687 - RNA, 22 nt, Human
aagugucuuuuagccacuuuua

SEQ ID NO: 652688 - RNA, 22 nt, Human
aguauauaguggcgcuguaugc

SEQ ID NO: 652689 - RNA, 22 nt, Human
cacaugggugugccuggaggaa

SEQ ID NO: 652690 - RNA, 22 nt, Human
ugaggccccgaagcugagguuu

SEQ ID NO: 652691 - RNA, 22 nt, Human
aggagcagcuucugaaccaugu

SEQ ID NO: 652692 - RNA, 22 nt, Human
ugugugaaucuauugaauauau

SEQ ID NO: 652693 - RNA, 22 nt, Human
gcaaggccugaggugggugcuc

SEQ ID NO: 652694 - RNA, 22 nt, Human
cuuauucuugucuuauugugcu

SEQ ID NO: 652695 - RNA, 22 nt, Human
aaacaauguuccuauauuagag

SEQ ID NO: 652696 - RNA, 22 nt, Human
aguccuuugggaaaaaugacua

SEQ ID NO: 652697 - RNA, 22 nt, Human
ucugcccuaauucagugcuuag

SEQ ID NO: 652698 - RNA, 22 nt, Human
cuccagccucagaugacgguac

SEQ ID NO: 652699 - RNA, 22 nt, Human
acauauuuugaaagcuuucuaa

SEQ ID NO: 652700 - RNA, 22 nt, Human
aaucuggaguuaauguuuucgc

SEQ ID NO: 652701 - RNA, 22 nt, Human
agcaaggcuaaauuucaguuau

SEQ ID NO: 652702 - RNA, 22 nt, Human
uugcauuugagaaaguucuccu

SEQ ID NO: 652703 - RNA, 22 nt, Human
gcuuccugagaaacaaucugau

SEQ ID NO: 652704 - RNA, 22 nt, Human
ugugaucugccuuggaucugca

SEQ ID NO: 652705 - RNA, 22 nt, Human
acacaguugauugucacucagg

SEQ ID NO: 652706 - RNA, 22 nt, Human
uacagcuuaaaagaugcauuua

SEQ ID NO: 652707 - RNA, 19 nt, Human
aggaggccaugccacuaga

SEQ ID NO: 652708 - RNA, 22 nt, Human
gucccuuccucauuccacuuua

SEQ ID NO: 652709 - RNA, 22 nt, Human
aggugccuaucuggucucugca

SEQ ID NO: 652710 - RNA, 22 nt, Human
uggugacaccccaucucuaaag

SEQ ID NO: 652711 - RNA, 22 nt, Human
acaggcaguugagguuugugug

SEQ ID NO: 652712 - RNA, 22 nt, Human
agaaaugggccuugggacacaa

SEQ ID NO: 652713 - RNA, 22 nt, Human
cagucagggacaccagcuagga

SEQ ID NO: 652714 - RNA, 22 nt, Human
augcacuacuuggcuuuacuga

SEQ ID NO: 652715 - RNA, 22 nt, Human
gccucaguugaucugugugagc

SEQ ID NO: 652716 - RNA, 22 nt, Human
gucaggauuaaugggaguaugc

SEQ ID NO: 652717 - RNA, 22 nt, Human
cagauguggaaugcagcaggcu

SEQ ID NO: 652718 - RNA, 22 nt, Human
uguccugggucaaccaggucga

SEQ ID NO: 652719 - RNA, 23 nt, Human
agguggucuuguggaugcugcaa

SEQ ID NO: 652720 - RNA, 22 nt, Human
ucuaaacuucacuuuaagugcu

SEQ ID NO: 652721 - RNA, 22 nt, Human
guuguacaauuguuucacaugc

SEQ ID NO: 652722 - RNA, 22 nt, Human
ucauguuuguuggaaauguggc

SEQ ID NO: 652723 - RNA, 22 nt, Human
ggcucuggugugaagcagccuc

SEQ ID NO: 652724 - RNA, 22 nt, Human
uucuuuccacagaggggaugau

SEQ ID NO: 652725 - RNA, 22 nt, Human
ugcacagagggaggcauaaaau

SEQ ID NO: 652726 - RNA, 22 nt, Human
cauagcaaggugcuuuccacau

SEQ ID NO: 652727 - RNA, 22 nt, Human
aucaguaaauauucauugugca

SEQ ID NO: 652728 - RNA, 22 nt, Human
agcaugaaagcauaggacaguc

SEQ ID NO: 652729 - RNA, 23 nt, Human
gagggcucugagugcuugggcca

SEQ ID NO: 652730 - RNA, 17 nt, Human
cugaggggagugcugug

SEQ ID NO: 652731 - RNA, 22 nt, Human
aggccuugugagaagcagagaa

SEQ ID NO: 652732 - RNA, 22 nt, Human
gacccugauaggaguagaagaa

SEQ ID NO: 652733 - RNA, 22 nt, Human
ucaucuugcugccauugcuuua

SEQ ID NO: 652734 - RNA, 22 nt, Human
gaggaacagagacgggaucgcu

SEQ ID NO: 652735 - RNA, 22 nt, Human
agucugugacucauuggaucuc

SEQ ID NO: 652736 - RNA, 22 nt, Human
aacagccugagagaacaaugau

SEQ ID NO: 652737 - RNA, 22 nt, Human
uagcagcaccuacacgucagag

SEQ ID NO: 652738 - RNA, 23 nt, Human
gcucuggcagcuugugucagcac

SEQ ID NO: 652739 - RNA, 22 nt, Human
augucuuggguuucaguuuacu

SEQ ID NO: 652740 - RNA, 22 nt, Human
aaugcauguauucauuguggaa

SEQ ID NO: 652741 - RNA, 23 nt, Human
cuuuuaacuugaucugagaccag

SEQ ID NO: 652742 - RNA, 22 nt, Human
cuucuggguguggagugaggac

SEQ ID NO: 652743 - RNA, 22 nt, Human
auucaauaagucacuguggaau

SEQ ID NO: 652744 - RNA, 22 nt, Human
ugucaguuaccuagcacaagaa

SEQ ID NO: 652745 - RNA, 22 nt, Human
uuccuucuuuuacaccauaaau

SEQ ID NO: 652746 - RNA, 22 nt, Human
gcagagugguuucagaguugag

SEQ ID NO: 652747 - RNA, 22 nt, Human
gcugagggaggcugaacugagu

SEQ ID NO: 652748 - RNA, 22 nt, Human
uagggcugcagaacaauggccu

SEQ ID NO: 652749 - RNA, 22 nt, Human
uguagcuucagucugaucucau

SEQ ID NO: 652750 - RNA, 22 nt, Human
gcuccuggccagcacagggccc

SEQ ID NO: 652751 - RNA, 22 nt, Human
ccagccagcugguuggacgccu

SEQ ID NO: 652752 - RNA, 22 nt, Human
ucugcccacagccuccugucca

SEQ ID NO: 652753 - RNA, 22 nt, Human
cucugcccacgucuugcccaga

SEQ ID NO: 652754 - RNA, 22 nt, Human
agugcuggauuacaggcgugag

SEQ ID NO: 652755 - RNA, 22 nt, Human
aaauugugcucacacugauauu

SEQ ID NO: 652756 - RNA, 22 nt, Human
gcagagguuggauuggugacuu

SEQ ID NO: 652757 - RNA, 22 nt, Human
aacacaaucuuccaguuugcug

SEQ ID NO: 652758 - RNA, 22 nt, Human
gaaaacacuuugaucugaaagu

SEQ ID NO: 652759 - RNA, 22 nt, Human
gggugagagucaggcagagauu

SEQ ID NO: 652760 - RNA, 22 nt, Human
uucuucaaaguaauagagacua

SEQ ID NO: 652761 - RNA, 22 nt, Human
aacuuaaacccacucauguaga

SEQ ID NO: 652762 - RNA, 22 nt, Human
aggccuagaggaauggccaggg

SEQ ID NO: 652763 - RNA, 22 nt, Human
cucucagauggagugugaaugg

SEQ ID NO: 652764 - RNA, 22 nt, Human
ccaggcugugcuuuucauaaau

SEQ ID NO: 652765 - RNA, 22 nt, Human
cagcucuuauuuucucuccuaa

SEQ ID NO: 652766 - RNA, 22 nt, Human
uuuacacugacagcacauaagg

SEQ ID NO: 652767 - RNA, 22 nt, Human
cuuccuggcucggugccucacc

SEQ ID NO: 652768 - RNA, 22 nt, Human
aauugcuuuugggggcaguuac

SEQ ID NO: 652769 - RNA, 22 nt, Human
uccagggagcaagucaggccgg

SEQ ID NO: 652770 - RNA, 22 nt, Human
guuuccagccuagagaugguga

SEQ ID NO: 652771 - RNA, 22 nt, Human
ccuuagagaguacugggcugcc

SEQ ID NO: 652772 - RNA, 22 nt, Human
cauuuagaagucuuagaacuau

SEQ ID NO: 652773 - RNA, 23 nt, Human
ucacuugaagcuagaaucugccc

SEQ ID NO: 652774 - RNA, 22 nt, Human
cagccuggauugcagaaugcua

SEQ ID NO: 652775 - RNA, 22 nt, Human
aggucuggagugggaucugaga

SEQ ID NO: 652776 - RNA, 22 nt, Human
cuucaauaccugcguugcuagu

SEQ ID NO: 652777 - RNA, 22 nt, Human
aagaccugccagccucauccug

SEQ ID NO: 652778 - RNA, 22 nt, Human
gagcuaaggucacaagaagcag

SEQ ID NO: 652779 - RNA, 22 nt, Human
ugcaggguagaugcaggcugug

SEQ ID NO: 652780 - RNA, 22 nt, Human
uuuauugacccaaagcgagagu

SEQ ID NO: 652781 - RNA, 22 nt, Human
gcugucugggaugucacugcug

SEQ ID NO: 652782 - RNA, 22 nt, Human
aagaucaugguuuaucugggag

SEQ ID NO: 652783 - RNA, 22 nt, Human
uccuuagacaaagagugggcuu

SEQ ID NO: 652784 - RNA, 22 nt, Human
agcugccaggccccugagaacc

SEQ ID NO: 652785 - RNA, 22 nt, Human
ucugucaucucuaaaauagaaa

SEQ ID NO: 652786 - RNA, 22 nt, Human
acugcagcaaagcccgugucuu

SEQ ID NO: 652787 - RNA, 22 nt, Human
cacucuccagcacaccccauuu

SEQ ID NO: 652788 - RNA, 22 nt, Human
cucugcuuucucaaacccugug

SEQ ID NO: 652789 - RNA, 22 nt, Human
ucaaagcuuagauaauuucuuu

SEQ ID NO: 652790 - RNA, 22 nt, Human
cuguuuucaaagagagagaaug

SEQ ID NO: 652791 - RNA, 22 nt, Human
augucacagcaggaguauucuu

SEQ ID NO: 652792 - RNA, 22 nt, Human
cagcuguggcugccacugcucc

SEQ ID NO: 652793 - RNA, 22 nt, Human
uaacuucugcacagaaaauuug

SEQ ID NO: 652794 - RNA, 22 nt, Human
uucuggaguugugaccucaggg

SEQ ID NO: 652795 - RNA, 22 nt, Human
gcaaacauaauaugaagacacu

SEQ ID NO: 652796 - RNA, 22 nt, Human
ugagccaaguucacaccauugc

SEQ ID NO: 652797 - RNA, 22 nt, Human
aaauagacaggcuuaaauagga

SEQ ID NO: 652798 - RNA, 22 nt, Human
ccaggaggaugguuguuaggug

SEQ ID NO: 652799 - RNA, 22 nt, Human
gcugccagcccucggggucuga

SEQ ID NO: 652800 - RNA, 22 nt, Human
gcuucugugguugucacgacua

SEQ ID NO: 652801 - RNA, 22 nt, Human
aguuaagagugugaaaauguua

SEQ ID NO: 652802 - RNA, 22 nt, Human
ucauucuccucuggaaaaggca

SEQ ID NO: 652803 - RNA, 22 nt, Human
caaugugucaggaaaagggcca

SEQ ID NO: 652804 - RNA, 22 nt, Human
ugagcugggaagagcagccaga

SEQ ID NO: 652805 - RNA, 20 nt, Human
ugcucugucuaaaacuuccc

SEQ ID NO: 652806 - RNA, 22 nt, Human
acgcaguuuguggacauuuuuu

SEQ ID NO: 652807 - RNA, 20 nt, Human
cauauauaccuagaagugga

SEQ ID NO: 652808 - RNA, 22 nt, Human
ugcaguuuugccaggcaaugga

SEQ ID NO: 652809 - RNA, 22 nt, Human
uuacacuuguaauuauauaacg

SEQ ID NO: 652810 - RNA, 19 nt, Human
gccagugugugguacagug

SEQ ID NO: 652811 - RNA, 22 nt, Human
gcagugaacauaacacagaagg

SEQ ID NO: 652812 - RNA, 22 nt, Human
uuguaacagcugcuuaauagag

SEQ ID NO: 652813 - RNA, 22 nt, Human
aaaaacagaaugugucuaacuc

SEQ ID NO: 652814 - RNA, 22 nt, Human
ccuggucagguaacugggcuga

SEQ ID NO: 652815 - RNA, 22 nt, Human
ucacauuucaagugcucaaaag

SEQ ID NO: 652816 - RNA, 22 nt, Human
uuacaugagguuaauuaagcau

SEQ ID NO: 652817 - RNA, 22 nt, Human
auaucacagguguuuaccugau

SEQ ID NO: 652818 - RNA, 22 nt, Human
caaguaauucugcaagaaacca

SEQ ID NO: 652819 - RNA, 22 nt, Human
acuuccugacuucuggguugga

SEQ ID NO: 652820 - RNA, 22 nt, Human
cagcaggguauacagggaauuu

SEQ ID NO: 652821 - RNA, 18 nt, Human
uccccugcucuggugcuc

SEQ ID NO: 652822 - RNA, 21 nt, Human
acaggcucuggggaugcuggg

SEQ ID NO: 652823 - RNA, 22 nt, Human
cuggacuuggggaggcuagauu

SEQ ID NO: 652824 - RNA, 22 nt, Human
uguguguguuuacaguuucuca

SEQ ID NO: 652825 - RNA, 22 nt, Human
cuugccugccacuacagcugaa

SEQ ID NO: 652826 - RNA, 22 nt, Human
cuggauuuaauuaacuguugcu

SEQ ID NO: 652827 - RNA, 22 nt, Human
cacagccuuacugagauccacu

SEQ ID NO: 652828 - RNA, 22 nt, Human
uguaaagguaggugcaaaauga

SEQ ID NO: 652829 - RNA, 22 nt, Human
ucuucaaauacagucauauuga

SEQ ID NO: 652830 - RNA, 22 nt, Human
accuuucauuaaagucuguagu

SEQ ID NO: 652831 - RNA, 22 nt, Human
agccuggugauaucagugguuu

SEQ ID NO: 652832 - RNA, 22 nt, Human
ggcagagcuaguggcuucucuu

SEQ ID NO: 652833 - RNA, 22 nt, Human
gcugaggucaggagcugugggg

SEQ ID NO: 652834 - RNA, 22 nt, Human
ggcucagaaaccucuggugucu

SEQ ID NO: 652835 - RNA, 22 nt, Human
cuucacauuugcgaaggccaaa

SEQ ID NO: 652836 - RNA, 21 nt, Human
caaauacuuagaaacuuaaga

SEQ ID NO: 652837 - RNA, 22 nt, Human
ugagaacaguuggaagcaguca

SEQ ID NO: 652838 - RNA, 22 nt, Human
ugagcaccuacuguauuccagg

SEQ ID NO: 652839 - RNA, 22 nt, Human
acauagauuuaagagcaauuag

SEQ ID NO: 652840 - RNA, 22 nt, Human
uggcagggugggcuucagcccc

SEQ ID NO: 652841 - RNA, 18 nt, Human
uucacaggaaaugucuuu

SEQ ID NO: 652842 - RNA, 22 nt, Human
acaggccuuggcaggcauguga

SEQ ID NO: 652843 - RNA, 22 nt, Human
gaaaugcaaauucucucucgcu

SEQ ID NO: 652844 - RNA, 22 nt, Human
cagccaucccagccugugguuc

SEQ ID NO: 652845 - RNA, 17 nt, Human
ugcuugacucucuuguu

SEQ ID NO: 652846 - RNA, 22 nt, Human
gaacagaguugaaacaaggcug

SEQ ID NO: 652847 - RNA, 22 nt, Human
ggcguggcagucaggaaaaggu

SEQ ID NO: 652848 - RNA, 22 nt, Human
ugugugaauuacgcguguccug

SEQ ID NO: 652849 - RNA, 22 nt, Human
cacuggcaaauggagagaaugu

SEQ ID NO: 652850 - RNA, 22 nt, Human
aggcuggagugcuggagugcug

SEQ ID NO: 652851 - RNA, 22 nt, Human
aaucaguuaggguguuaaugag

SEQ ID NO: 652852 - RNA, 22 nt, Human
auuccacaggacuaccaaugug

SEQ ID NO: 652853 - RNA, 23 nt, Human
aagaggaggcccugcucccgucc

SEQ ID NO: 652854 - RNA, 22 nt, Human
gcagcccacagcuggaggccua

SEQ ID NO: 652855 - RNA, 22 nt, Human
uggccaguuugcucaggcaguc

SEQ ID NO: 652856 - RNA, 22 nt, Human
ggcaggguaaaccgagguaagu

SEQ ID NO: 652857 - RNA, 22 nt, Human
uacaugaaguugucuaaacugg

SEQ ID NO: 652858 - RNA, 22 nt, Human
aaagaucauucucugguccaga

SEQ ID NO: 652859 - RNA, 22 nt, Human
cucccaggguagggagagacua

SEQ ID NO: 652860 - RNA, 22 nt, Human
ccagcagagucuaggaaggagg

SEQ ID NO: 652861 - RNA, 22 nt, Human
gaggaaugggugucucgugauu

SEQ ID NO: 652862 - RNA, 22 nt, Human
uauuucaccuuacuaagcugug

SEQ ID NO: 652863 - RNA, 22 nt, Human
uggagccaaaaagggaaggaga

SEQ ID NO: 652864 - RNA, 21 nt, Human
aggaggggucuuucccacuga

SEQ ID NO: 652865 - RNA, 22 nt, Human
acuuccaguuuuaauuaaauug

SEQ ID NO: 652866 - RNA, 22 nt, Human
aguguguacucauauacuucca

SEQ ID NO: 652867 - RNA, 22 nt, Human
gccaggagugucccacucauuu

SEQ ID NO: 652868 - RNA, 22 nt, Human
uggcacugggacagaugcucuc

SEQ ID NO: 652869 - RNA, 22 nt, Human
acccacaccuccguauaucacu

SEQ ID NO: 652870 - RNA, 17 nt, Human
ucugagaaugcuggagg

SEQ ID NO: 652871 - RNA, 17 nt, Human
ugucuuaucuguccugu

SEQ ID NO: 652872 - RNA, 22 nt, Human
gggcaggaggcuaauucugcau

SEQ ID NO: 652873 - RNA, 22 nt, Human
ucugagguuacugcuuuguaga

SEQ ID NO: 652874 - RNA, 22 nt, Human
uucauugaaggagggacuugcu

SEQ ID NO: 652875 - RNA, 22 nt, Human
gcagaggugagaagggccuccc

SEQ ID NO: 652876 - RNA, 22 nt, Human
augcauuggucagggucuuagg

SEQ ID NO: 652877 - RNA, 22 nt, Human
uggaguuccuuugaaaggcucu

SEQ ID NO: 652878 - RNA, 22 nt, Human
uccugccuugccugggacauca

SEQ ID NO: 652879 - RNA, 22 nt, Human
gcauugaauccuaucaggcaaa

SEQ ID NO: 652880 - RNA, 22 nt, Human
guggcagagagcaagugucuga

SEQ ID NO: 652881 - RNA, 22 nt, Human
ccgcaaggcagagguugcagug

SEQ ID NO: 652882 - RNA, 22 nt, Human
ucacgugagggaccugugucug

SEQ ID NO: 652883 - RNA, 22 nt, Human
agcaccaggcaccaaagggccu

SEQ ID NO: 652884 - RNA, 22 nt, Human
uguguguccuugaccucagugg

SEQ ID NO: 652885 - RNA, 22 nt, Human
aaaugccucccauucuacugac

SEQ ID NO: 652886 - RNA, 22 nt, Human
gcaggcauggucgcugccaggu

SEQ ID NO: 652887 - RNA, 22 nt, Human
aggaagcucaaagccaugaugu

SEQ ID NO: 652888 - RNA, 21 nt, Human
ucuggagcugcaggcugggca

SEQ ID NO: 652889 - RNA, 22 nt, Human
ccacaguaagagauaguuuaug

SEQ ID NO: 652890 - RNA, 22 nt, Human
uuuguguuuuagcuggugaggc

SEQ ID NO: 652891 - RNA, 22 nt, Human
uuccucaggcuucccuuugucc

SEQ ID NO: 652892 - RNA, 22 nt, Human
cuccagggcuaccagguuuuag

SEQ ID NO: 652893 - RNA, 22 nt, Human
aguaugaacggaaggccuggga

SEQ ID NO: 652894 - RNA, 22 nt, Human
cacccccaccugugggcuccug

SEQ ID NO: 652895 - RNA, 22 nt, Human
ucucaggcauucccacauagaa

SEQ ID NO: 652896 - RNA, 22 nt, Human
ucagucccuuaaagguggcagc

SEQ ID NO: 652897 - RNA, 19 nt, Human
ucugcuggcagaauucccu

SEQ ID NO: 652898 - RNA, 23 nt, Human
ugugggaauguuggagaggaaac

SEQ ID NO: 652899 - RNA, 17 nt, Human
aggcauggucuggggug

SEQ ID NO: 652900 - RNA, 22 nt, Human
accagcacggauuagaaugcuu

SEQ ID NO: 652901 - RNA, 18 nt, Human
ugggagugggaguggaua

SEQ ID NO: 652902 - RNA, 22 nt, Human
auagauacauuguuauauuugu

SEQ ID NO: 652903 - RNA, 22 nt, Human
auggaauugagcaucaguuguu

SEQ ID NO: 652904 - RNA, 22 nt, Human
cagggccuggagcugggccugc

SEQ ID NO: 652905 - RNA, 22 nt, Human
acaguagauugguaugauguca

SEQ ID NO: 652906 - RNA, 22 nt, Human
cauucauucagcaacuguuauu

SEQ ID NO: 652907 - RNA, 22 nt, Human
gggacauggaggcgcgcaggca

SEQ ID NO: 652908 - RNA, 17 nt, Human
ggacaccuggagucucc

SEQ ID NO: 652909 - RNA, 22 nt, Human
uccuggagccacggagcuuuca

SEQ ID NO: 652910 - RNA, 22 nt, Human
ugugggcacuaaugacaugcag

SEQ ID NO: 652911 - RNA, 20 nt, Human
cucaguguauucugggugcu

SEQ ID NO: 652912 - RNA, 22 nt, Human
aauuucaagucuugaagaagua

SEQ ID NO: 652913 - RNA, 22 nt, Human
ucaaagucauggcuaguaauga

SEQ ID NO: 652914 - RNA, 22 nt, Human
caacuucacugugccucuaguu

SEQ ID NO: 652915 - RNA, 22 nt, Human
gcagaugguggggcaggaaaau

SEQ ID NO: 652916 - RNA, 22 nt, Human
ugcaauuuuuuagcacaaggag

SEQ ID NO: 652917 - RNA, 22 nt, Human
uggcaguguugugccacauucc

SEQ ID NO: 652918 - RNA, 22 nt, Human
guaggcagggcuguggggagaa

SEQ ID NO: 652919 - RNA, 22 nt, Human
cgugucaucugagccuugggcg

SEQ ID NO: 652920 - RNA, 22 nt, Human
uccugaagagcccugcucugug

SEQ ID NO: 652921 - RNA, 22 nt, Human
aguguccaacucagcuugucaa

SEQ ID NO: 652922 - RNA, 22 nt, Human
uuucacauaaauauuaugccua

SEQ ID NO: 652923 - RNA, 22 nt, Human
cggcuucagucucaucaucgcc

SEQ ID NO: 652924 - RNA, 22 nt, Human
ugagguguguccccagggaggu

SEQ ID NO: 652925 - RNA, 17 nt, Human
uuucaucugggaccacc

SEQ ID NO: 652926 - RNA, 22 nt, Human
uugaggucugugauaaaaguca

SEQ ID NO: 652927 - RNA, 22 nt, Human
ggccuagggcuuggucauggca

SEQ ID NO: 652928 - RNA, 22 nt, Human
agugauguaacaaacagaguua

SEQ ID NO: 652929 - RNA, 20 nt, Human
agugucuggauuuuguaacc

SEQ ID NO: 652930 - RNA, 22 nt, Human
cccagagcauaacguaucuuga

SEQ ID NO: 652931 - RNA, 22 nt, Human
agggauggaagcucgucugcaa

SEQ ID NO: 652932 - RNA, 22 nt, Human
uacaguagcugagguucucagg

SEQ ID NO: 652933 - RNA, 22 nt, Human
cuuuuuccagcuucaggguggg

SEQ ID NO: 652934 - RNA, 22 nt, Human
uuguucaucguccuugcucugu

SEQ ID NO: 652935 - RNA, 22 nt, Human
agguaauaggguucagaauuau

SEQ ID NO: 652936 - RNA, 22 nt, Human
ugccucuguggaaauggugguc

SEQ ID NO: 652937 - RNA, 23 nt, Human
agucugugcuuggugggagggcc

SEQ ID NO: 652938 - RNA, 22 nt, Human
uacacauucuagggcacaguua

SEQ ID NO: 652939 - RNA, 22 nt, Human
uuguugguggaauugaugcuag

SEQ ID NO: 652940 - RNA, 22 nt, Human
gaaggccacggaauggagcugg

SEQ ID NO: 652941 - RNA, 22 nt, Human
ucagaagcagauauuucaaaau

SEQ ID NO: 652942 - RNA, 22 nt, Human
agcugagcacauucaaacaggu

SEQ ID NO: 652943 - RNA, 22 nt, Human
uggccacucagggaugcaggaa

SEQ ID NO: 652944 - RNA, 22 nt, Human
gaaguuuagaguguuguaauuu

SEQ ID NO: 652945 - RNA, 22 nt, Human
guacagcauuugaaauuacugg

SEQ ID NO: 652946 - RNA, 22 nt, Human
cuuguuauuggaaaugucaugc

SEQ ID NO: 652947 - RNA, 22 nt, Human
aaucagaccguucuggcugucc

SEQ ID NO: 652948 - RNA, 22 nt, Human
uauaauccauucauugauuucu

SEQ ID NO: 652949 - RNA, 22 nt, Human
auguccagggcacacagcagug

SEQ ID NO: 652950 - RNA, 22 nt, Human
gauuuuacaugucauaucuauu

SEQ ID NO: 652951 - RNA, 22 nt, Human
ccugggaccucgcgggaagcgg

SEQ ID NO: 652952 - RNA, 22 nt, Human
uccuuugacuucuugcagucca

SEQ ID NO: 652953 - RNA, 22 nt, Human
uccucagggguuucagguguac

SEQ ID NO: 652954 - RNA, 22 nt, Human
uuacaaaguguuaugauaaaca

SEQ ID NO: 652955 - RNA, 22 nt, Human
aggccccaucaggaaggaggcc

SEQ ID NO: 652956 - RNA, 22 nt, Human
auguggagaggaagugcaaacu

SEQ ID NO: 652957 - RNA, 22 nt, Human
cucuacuccaaaaggcuacaau

SEQ ID NO: 652958 - RNA, 22 nt, Human
ucuucucccaucuccaggcagg

SEQ ID NO: 652959 - RNA, 23 nt, Human
ugcccauugcaucuugguacugg

SEQ ID NO: 652960 - RNA, 22 nt, Human
gaaacguuguggaaaauccucu

SEQ ID NO: 652961 - RNA, 22 nt, Human
uugcauuuauagacugccauuu

SEQ ID NO: 652962 - RNA, 22 nt, Human
ggcaggugcuaagagagguaaa

SEQ ID NO: 652963 - RNA, 19 nt, Human
ggcugucucggcccagcca

SEQ ID NO: 652964 - RNA, 22 nt, Human
acugguggcuuucagacagaaa

SEQ ID NO: 652965 - RNA, 22 nt, Human
cguguacacgcacacguguccu

SEQ ID NO: 652966 - RNA, 22 nt, Human
aaauaguuguuuggaucaauaa

SEQ ID NO: 652967 - RNA, 22 nt, Human
acccugcuuggccccacuucua

SEQ ID NO: 652968 - RNA, 22 nt, Human
aguaugucagagugaaaauggu

SEQ ID NO: 652969 - RNA, 22 nt, Human
ggcuauggaaauggcaggacau

SEQ ID NO: 652970 - RNA, 20 nt, Human
gcuuccagaggaggccccgu

SEQ ID NO: 652971 - RNA, 22 nt, Human
uuugcauuuguuuagaaccuga

SEQ ID NO: 652972 - RNA, 22 nt, Human
aggcuggaguacaguggcuauu

SEQ ID NO: 652973 - RNA, 22 nt, Human
uauuugaugguucuaaaacagc

SEQ ID NO: 652974 - RNA, 22 nt, Human
ccagaggugccacagaaagagc

SEQ ID NO: 652975 - RNA, 22 nt, Human
aagcauuuuugaaaugguagga

SEQ ID NO: 652976 - RNA, 22 nt, Human
auuggcuuccuucuuauuguca

SEQ ID NO: 652977 - RNA, 22 nt, Human
acaguacaaaacccaccagagg

SEQ ID NO: 652978 - RNA, 22 nt, Human
auuccacaguguguggugagga

SEQ ID NO: 652979 - RNA, 22 nt, Human
cccagcaggucggugcugccug

SEQ ID NO: 652980 - RNA, 22 nt, Human
acucuggcaagcuuccacuucc

SEQ ID NO: 652981 - RNA, 22 nt, Human
uucuggaagccccagagucaga

SEQ ID NO: 652982 - RNA, 22 nt, Human
cagggugacugcccuggccacu

SEQ ID NO: 652983 - RNA, 22 nt, Human
acugcugauuauugaaguagag

SEQ ID NO: 652984 - RNA, 22 nt, Human
aggaaugacagauguccgcacc

SEQ ID NO: 652985 - RNA, 22 nt, Human
ccaggauaguaugaguagggau

SEQ ID NO: 652986 - RNA, 23 nt, Human
acagaaaguucugcuggacagag

SEQ ID NO: 652987 - RNA, 19 nt, Human
ggugugccaaaugggaaug

SEQ ID NO: 652988 - RNA, 22 nt, Human
gcugccugcccugggucaucug

SEQ ID NO: 652989 - RNA, 22 nt, Human
uugcuuccuccuagccacuugc

SEQ ID NO: 652990 - RNA, 22 nt, Human
uauacaguuugaguucuugcau

SEQ ID NO: 652991 - RNA, 22 nt, Human
gcacagagagcagugggggaca

SEQ ID NO: 652992 - RNA, 22 nt, Human
ccuggccucagccuagggcuga

SEQ ID NO: 652993 - RNA, 22 nt, Human
uguauuagaucugagaacuucu

SEQ ID NO: 652994 - RNA, 22 nt, Human
augaaacugggauaacuauagc

SEQ ID NO: 652995 - RNA, 22 nt, Human
ugggacagagugagcuuuggcc

SEQ ID NO: 652996 - RNA, 22 nt, Human
gggagagaauuauugccagacc

SEQ ID NO: 652997 - RNA, 22 nt, Human
agagcuggaagcugcucuuaga

SEQ ID NO: 652998 - RNA, 22 nt, Human
ugauaacucucaguuucucaug

SEQ ID NO: 652999 - RNA, 22 nt, Human
ccaugggagaugauggggagug

SEQ ID NO: 653000 - RNA, 20 nt, Human
agcaggccuuggggagagga

SEQ ID NO: 653001 - RNA, 22 nt, Human
uaauugucuuaggugugaugau

SEQ ID NO: 653002 - RNA, 22 nt, Human
uggagcugguucuggggaagcu

SEQ ID NO: 653003 - RNA, 22 nt, Human
uacaguuacgcugagaaacgaa

SEQ ID NO: 653004 - RNA, 22 nt, Human
gcccagcacuaaaagcuuugcu

SEQ ID NO: 653005 - RNA, 22 nt, Human
ucuuuggaucccaacuggcugg

SEQ ID NO: 653006 - RNA, 22 nt, Human
caucagcuaaacuuagugaaau

SEQ ID NO: 653007 - RNA, 22 nt, Human
gugccugggacuugcuccggau

SEQ ID NO: 653008 - RNA, 22 nt, Human
ggagagagagcucauuagcugc

SEQ ID NO: 653009 - RNA, 22 nt, Human
gggcugauucgauggggguaga

SEQ ID NO: 653010 - RNA, 22 nt, Human
gcacccagcccagggcgugaug

SEQ ID NO: 653011 - RNA, 22 nt, Human
gcaccugguuuauauaaucaua

SEQ ID NO: 653012 - RNA, 22 nt, Human
aaagccagaauucguccagccu

SEQ ID NO: 653013 - RNA, 22 nt, Human
uggcccagagcacugcugggca

SEQ ID NO: 653014 - RNA, 19 nt, Human
ucucuggggacacuuucac

SEQ ID NO: 653015 - RNA, 19 nt, Human
cuccaagugccaaggacag

SEQ ID NO: 653016 - RNA, 22 nt, Human
cucacagguuaguuguguggau

SEQ ID NO: 653017 - RNA, 22 nt, Human
aguggcagagugcacucaggca

SEQ ID NO: 653018 - RNA, 22 nt, Human
uccuggugucgccuggucaguu

SEQ ID NO: 653019 - RNA, 22 nt, Human
cacuuucucaugaauuuggccc

SEQ ID NO: 653020 - RNA, 22 nt, Human
cuuugccuccuagagcacguuc

SEQ ID NO: 653021 - RNA, 22 nt, Human
accuuuggaaauaaacacucug

SEQ ID NO: 653022 - RNA, 22 nt, Human
ggcaaggguugaagauaaggua

SEQ ID NO: 653023 - RNA, 22 nt, Human
gucucauugguucugccagagu

SEQ ID NO: 653024 - RNA, 22 nt, Human
aaacauuguuaugauaaauuac

SEQ ID NO: 653025 - RNA, 22 nt, Human
ucaggcugaaggaggccuaucu

SEQ ID NO: 653026 - RNA, 21 nt, Human
cugugcuucuuccuaagccag

SEQ ID NO: 653027 - RNA, 18 nt, Human
gucuggaggucaggagcu

SEQ ID NO: 653028 - RNA, 22 nt, Human
aaguucuuggaggaugaagagu

SEQ ID NO: 653029 - RNA, 22 nt, Human
aggugucuggacuugugaagca

SEQ ID NO: 653030 - RNA, 20 nt, Human
caguccugcaggcgggagaa

SEQ ID NO: 653031 - RNA, 22 nt, Human
aagcccugggauguucagcagu

SEQ ID NO: 653032 - RNA, 22 nt, Human
cacauuccuuacauucauagag

SEQ ID NO: 653033 - RNA, 17 nt, Human
aaggauauuauaguucu

SEQ ID NO: 653034 - RNA, 20 nt, Human
agcagcagauguuggaggug

SEQ ID NO: 653035 - RNA, 22 nt, Human
ccugggucuggucacuaaguca

SEQ ID NO: 653036 - RNA, 22 nt, Human
gcuucuccagaccuucaucccc

SEQ ID NO: 653037 - RNA, 22 nt, Human
uggugaauaguagcuucagacu

SEQ ID NO: 653038 - RNA, 22 nt, Human
ccaggaagguguuuaacuagag

SEQ ID NO: 653039 - RNA, 22 nt, Human
augcuuuaaaugucuuuugcuu

SEQ ID NO: 653040 - RNA, 22 nt, Human
aaaugcuacacaggaauucuca

SEQ ID NO: 653041 - RNA, 22 nt, Human
uuccaugaaauguguuaugcuu

SEQ ID NO: 653042 - RNA, 22 nt, Human
cauuagguauuuaagcacacag

SEQ ID NO: 653043 - RNA, 22 nt, Human
cuagagaagagguuaagcauga

SEQ ID NO: 653044 - RNA, 22 nt, Human
ucucuguaguugggcagcugcu

SEQ ID NO: 653045 - RNA, 23 nt, Human
caucaaguacuuuugacaagugu

SEQ ID NO: 653046 - RNA, 22 nt, Human
cagagccagcuguccuuggcau

SEQ ID NO: 653047 - RNA, 22 nt, Human
ggaagcuggcauauguaauccu

SEQ ID NO: 653048 - RNA, 22 nt, Human
gcucagcugagcgaaggacaug

SEQ ID NO: 653049 - RNA, 22 nt, Human
accagguaauguaaagcagggu

SEQ ID NO: 653050 - RNA, 22 nt, Human
cccagcacucagcaggcucaua

SEQ ID NO: 653051 - RNA, 22 nt, Human
agcuuuggagacugacuccauc

SEQ ID NO: 653052 - RNA, 22 nt, Human
ucucugggacacugggucaguu

SEQ ID NO: 653053 - RNA, 22 nt, Human
uggggacccggacuccuggguc

SEQ ID NO: 653054 - RNA, 22 nt, Human
uuucuagggcucuugucuucug

SEQ ID NO: 653055 - RNA, 22 nt, Human
auuuucauuuugcagggugaga

SEQ ID NO: 653056 - RNA, 22 nt, Human
uagcaacaugguuaucacauua

SEQ ID NO: 653057 - RNA, 22 nt, Human
ucauguguccuaguucauauaa

SEQ ID NO: 653058 - RNA, 17 nt, Human
cagugcagagcccuuuc

SEQ ID NO: 653059 - RNA, 22 nt, Human
gcuucucuuucuccccuggcgg

SEQ ID NO: 653060 - RNA, 22 nt, Human
ggcagggugccuggcuccuguu

SEQ ID NO: 653061 - RNA, 22 nt, Human
auuuuaauaagauucccaagua

SEQ ID NO: 653062 - RNA, 22 nt, Human
ggggcuccagucuucacauuuu

SEQ ID NO: 653063 - RNA, 18 nt, Human
aggcacuggaauuaaggg

SEQ ID NO: 653064 - RNA, 19 nt, Human
gccaggucuuggguccagg

SEQ ID NO: 653065 - RNA, 22 nt, Human
cugcccgucccuuugcucucgc

SEQ ID NO: 653066 - RNA, 22 nt, Human
ucugagaggcagaccuuccuaa

SEQ ID NO: 653067 - RNA, 22 nt, Human
auuguacagaugagguaaguga

SEQ ID NO: 653068 - RNA, 22 nt, Human
acaucucuuauaaacucucuga

SEQ ID NO: 653069 - RNA, 22 nt, Human
cucuccugggcugaccguccga

SEQ ID NO: 653070 - RNA, 22 nt, Human
guuuaaccaagagcauugugca

SEQ ID NO: 653071 - RNA, 22 nt, Human
aggcuuagaaauucagcugagu

SEQ ID NO: 653072 - RNA, 22 nt, Human
aaaguccugacugcaggggaug

SEQ ID NO: 653073 - RNA, 22 nt, Human
ggcagaagauaggacagggaau

SEQ ID NO: 653074 - RNA, 22 nt, Human
aaggcacuugcccagagcugca

SEQ ID NO: 653075 - RNA, 22 nt, Human
aauauuaucaaaagcuuuuuca

SEQ ID NO: 653076 - RNA, 22 nt, Human
auucacaacaaaaggauaugag

SEQ ID NO: 653077 - RNA, 23 nt, Human
cauuucaacgaauuuuccuucug

SEQ ID NO: 653078 - RNA, 22 nt, Human
agagccuggacuuuucugagcc

SEQ ID NO: 653079 - RNA, 22 nt, Human
ugugaagguuuuuaugggauau

SEQ ID NO: 653080 - RNA, 22 nt, Human
gggcugcaaugcuucaguuguu

SEQ ID NO: 653081 - RNA, 22 nt, Human
ugguccucagguucucugugcg

SEQ ID NO: 653082 - RNA, 22 nt, Human
uucuuacaaguaugacguagca

SEQ ID NO: 653083 - RNA, 22 nt, Human
aggaaggggagaaguuaaagcu

SEQ ID NO: 653084 - RNA, 22 nt, Human
ggagcagccgcgucucagggca

SEQ ID NO: 653085 - RNA, 22 nt, Human
uuauuauugugaccugagaaug

SEQ ID NO: 653086 - RNA, 22 nt, Human
uuugaugaaagcuacuauuuac

SEQ ID NO: 653087 - RNA, 22 nt, Human
ggaagagagaucccauagaugu

SEQ ID NO: 653088 - RNA, 22 nt, Human
aagagcuucccuguuguagagg

SEQ ID NO: 653089 - RNA, 22 nt, Human
gaagucuuuuagcaaaacgaac

SEQ ID NO: 653090 - RNA, 22 nt, Human
cucaggccaauaagcuccagcc

SEQ ID NO: 653091 - RNA, 22 nt, Human
gccagggugagggcugagaggu

SEQ ID NO: 653092 - RNA, 22 nt, Human
uuuccugguuggggacgugguu

SEQ ID NO: 653093 - RNA, 22 nt, Human
gcaggacauucagugaaugggc

SEQ ID NO: 653094 - RNA, 22 nt, Human
ugaaacuuauaagaauaugaau

SEQ ID NO: 653095 - RNA, 22 nt, Human
auaguaacuggcauguuuauga

SEQ ID NO: 653096 - RNA, 22 nt, Human
ggguguguuccuaaggaaacca

SEQ ID NO: 653097 - RNA, 22 nt, Human
cgcuguguuuacaucauugcug

SEQ ID NO: 653098 - RNA, 22 nt, Human
cugggcccugaagacagucagg

SEQ ID NO: 653099 - RNA, 22 nt, Human
ugaaauacacaaauuuaguaag

SEQ ID NO: 653100 - RNA, 22 nt, Human
gagucagaaacucacucuauag

SEQ ID NO: 653101 - RNA, 23 nt, Human
ucagggacaugaugugucauauc

SEQ ID NO: 653102 - RNA, 20 nt, Human
ccucaagcagacugacagcu

SEQ ID NO: 653103 - RNA, 22 nt, Human
agcugcagguucagcauuccac

SEQ ID NO: 653104 - RNA, 22 nt, Human
cucugacagccuucauuaugca

SEQ ID NO: 653105 - RNA, 21 nt, Human
gagcauggcuuacaucagcag

SEQ ID NO: 653106 - RNA, 22 nt, Human
gaauugcuugugaagugugucu

SEQ ID NO: 653107 - RNA, 22 nt, Human
uucacagugguagugcauuuag

SEQ ID NO: 653108 - RNA, 22 nt, Human
caggacagcugggccaccacca

SEQ ID NO: 653109 - RNA, 22 nt, Human
gcaccagcugcaggguggcuga

SEQ ID NO: 653110 - RNA, 22 nt, Human
guuauaaaggugauaaugguca

SEQ ID NO: 653111 - RNA, 22 nt, Human
uccucuucagagggaccucggg

SEQ ID NO: 653112 - RNA, 20 nt, Human
uacugcaggaaucagcuagc

SEQ ID NO: 653113 - RNA, 22 nt, Human
uagagcuuggggauuuaguagu

SEQ ID NO: 653114 - RNA, 22 nt, Human
uucacagaugccugaugugugg

SEQ ID NO: 653115 - RNA, 22 nt, Human
ugcagcugguuuagaacuagau

SEQ ID NO: 653116 - RNA, 22 nt, Human
cugccucuccccagaguggccc

SEQ ID NO: 653117 - RNA, 23 nt, Human
uuucucauccagagagucagucc

SEQ ID NO: 653118 - RNA, 19 nt, Human
acacagggcuagaguuaca

SEQ ID NO: 653119 - RNA, 22 nt, Human
gcuacugauugaccuuggagag

SEQ ID NO: 653120 - RNA, 22 nt, Human
uugcacagugguuuagagccug

SEQ ID NO: 653121 - RNA, 22 nt, Human
auguagaguagaauaguacaac

SEQ ID NO: 653122 - RNA, 22 nt, Human
agagugggcaggagccucgacu

SEQ ID NO: 653123 - RNA, 22 nt, Human
acugauaaguugcuugcucuca

SEQ ID NO: 653124 - RNA, 22 nt, Human
acuuccugaauggggcuaauua

SEQ ID NO: 653125 - RNA, 22 nt, Human
agagcacugcugauuuacaguc

SEQ ID NO: 653126 - RNA, 22 nt, Human
aacaguuugcuuuaagaggcac

SEQ ID NO: 653127 - RNA, 22 nt, Human
uuuuggggagaacgguugcuau

SEQ ID NO: 653128 - RNA, 22 nt, Human
gagaggccauggcugugcagug

SEQ ID NO: 653129 - RNA, 23 nt, Human
cucuggagauccucugccugggu

SEQ ID NO: 653130 - RNA, 20 nt, Human
cucugcugcccgccggcugc

SEQ ID NO: 653131 - RNA, 22 nt, Human
gcaggaugguggaaggccugcu

SEQ ID NO: 653132 - RNA, 18 nt, Human
agaggcuggacaggggau

SEQ ID NO: 653133 - RNA, 22 nt, Human
uuauacagcauugcuagugaug

SEQ ID NO: 653134 - RNA, 22 nt, Human
acuuucauguuggugaaggguu

SEQ ID NO: 653135 - RNA, 22 nt, Human
gcucagaaauggcagauggaga

SEQ ID NO: 653136 - RNA, 22 nt, Human
ugcuggcuccucgaggcuucgu

SEQ ID NO: 653137 - RNA, 22 nt, Human
agagcaagugacagaaacaggg

SEQ ID NO: 653138 - RNA, 22 nt, Human
cuguauuaaaggcagugaucuu

SEQ ID NO: 653139 - RNA, 22 nt, Human
ccacaagaugcaaacucuaaca

SEQ ID NO: 653140 - RNA, 22 nt, Human
uaacagucaugugcuacugcua

SEQ ID NO: 653141 - RNA, 22 nt, Human
uugacaaaggaauugaaucucu

SEQ ID NO: 653142 - RNA, 22 nt, Human
ucagagaacuggcauguuuaga

SEQ ID NO: 653143 - RNA, 22 nt, Human
cacuguaagaugagcuuuuuua

SEQ ID NO: 653144 - RNA, 22 nt, Human
aggcuggcugacuucugaagca

SEQ ID NO: 653145 - RNA, 22 nt, Human
ggggaggagccauguaacuagu

SEQ ID NO: 653146 - RNA, 22 nt, Human
gaccucaguauuguucaggaug

SEQ ID NO: 653147 - RNA, 22 nt, Human
uauauuaucauaaaaccauuca

SEQ ID NO: 653148 - RNA, 22 nt, Human
cuuaacagcaagaucuguguca

SEQ ID NO: 653149 - RNA, 22 nt, Human
ucauuccauuuccagcucugaa

SEQ ID NO: 653150 - RNA, 22 nt, Human
ggugggcaacauuuggccugag

SEQ ID NO: 653151 - RNA, 22 nt, Human
cuucugccccuguagccugagu

SEQ ID NO: 653152 - RNA, 22 nt, Human
cuguugcaucauggcucuuaau

SEQ ID NO: 653153 - RNA, 22 nt, Human
aguggcaguggcugggcagagc

SEQ ID NO: 653154 - RNA, 22 nt, Human
gagauugggucuugcucuguca

SEQ ID NO: 653155 - RNA, 22 nt, Human
gccugggagcacaucggggucc

SEQ ID NO: 653156 - RNA, 22 nt, Human
cccugagaugccucacccuagu

SEQ ID NO: 653157 - RNA, 18 nt, Human
uggcagugccaccuucuc

SEQ ID NO: 653158 - RNA, 22 nt, Human
uauaggaaauaggucuucugug

SEQ ID NO: 653159 - RNA, 22 nt, Human
ggcucuggggggaagucuguug

SEQ ID NO: 653160 - RNA, 22 nt, Human
uuuaaagugguccauuucagaa

SEQ ID NO: 653161 - RNA, 21 nt, Human
ggucagcucuauccacgccuu

SEQ ID NO: 653162 - RNA, 22 nt, Human
cuugaaagcacuuaguaaauua

SEQ ID NO: 653163 - RNA, 22 nt, Human
gcacauccaaugauuguuuuga

SEQ ID NO: 653164 - RNA, 19 nt, Human
uccaggcuccauuggcaga

SEQ ID NO: 653165 - RNA, 22 nt, Human
uacacaguaaaugguaaauaca

SEQ ID NO: 653166 - RNA, 22 nt, Human
ugggcaugaguggacagagaag

SEQ ID NO: 653167 - RNA, 20 nt, Human
gugcauuucaccuguacugu

SEQ ID NO: 653168 - RNA, 22 nt, Human
ggaggcucugccaucugucaca

SEQ ID NO: 653169 - RNA, 22 nt, Human
cgugaaaugaguugaauuauug

SEQ ID NO: 653170 - RNA, 18 nt, Human
ccuggcuuccaucuuggu

SEQ ID NO: 653171 - RNA, 22 nt, Human
augcucaguagcuggcugaccc

SEQ ID NO: 653172 - RNA, 22 nt, Human
aaccugagcgcguugcuuucua

SEQ ID NO: 653173 - RNA, 22 nt, Human
ugugucuuacauaauuacaugu

SEQ ID NO: 653174 - RNA, 22 nt, Human
agaucaguaagaggaagaaugg

SEQ ID NO: 653175 - RNA, 22 nt, Human
aauaaaggcaccauaaggcaaa

SEQ ID NO: 653176 - RNA, 22 nt, Human
ggacacaaaagugaauaaaaua

SEQ ID NO: 653177 - RNA, 22 nt, Human
ggagaggacauggcucccacag

SEQ ID NO: 653178 - RNA, 22 nt, Human
gcagggaagggaaacagagacc

SEQ ID NO: 653179 - RNA, 22 nt, Human
ggcagcaggcgacuucccuauu

SEQ ID NO: 653180 - RNA, 22 nt, Human
gcuuaauucuggcucaguuucc

SEQ ID NO: 653181 - RNA, 22 nt, Human
caaaauguucuggcaccuuuaa

SEQ ID NO: 653182 - RNA, 22 nt, Human
ucccuugguuaaauauguagga

SEQ ID NO: 653183 - RNA, 22 nt, Human
agaauuagaggccauguacuug

SEQ ID NO: 653184 - RNA, 19 nt, Human
ucaaugucuggccaauggu

SEQ ID NO: 653185 - RNA, 22 nt, Human
ucaggcucccugcugggcucug

SEQ ID NO: 653186 - RNA, 22 nt, Human
agaggcugauggaguagugucu

SEQ ID NO: 653187 - RNA, 22 nt, Human
aaugcacacauuugguacugaa

SEQ ID NO: 653188 - RNA, 22 nt, Human
aaaccucuuuuaaggaguuguu

SEQ ID NO: 653189 - RNA, 22 nt, Human
uucuacaucacuuaacaugcua

SEQ ID NO: 653190 - RNA, 22 nt, Human
uaagaggcaaaagauacucaga

SEQ ID NO: 653191 - RNA, 23 nt, Human
ccugacacaaaaggauucuugcu

SEQ ID NO: 653192 - RNA, 22 nt, Human
gggcugaccccaccccucacuc

SEQ ID NO: 653193 - RNA, 22 nt, Human
gaccuucaagcaccauauuuau

SEQ ID NO: 653194 - RNA, 22 nt, Human
augucccaagauacagcuagag

SEQ ID NO: 653195 - RNA, 22 nt, Human
gugucuuagaaagacugaaugc

SEQ ID NO: 653196 - RNA, 22 nt, Human
caaaucauggaauaacuagaga

SEQ ID NO: 653197 - RNA, 22 nt, Human
ccagggugaggaggcucccacg

SEQ ID NO: 653198 - RNA, 22 nt, Human
uucuauugggcagcauugcuuc

SEQ ID NO: 653199 - RNA, 22 nt, Human
gaggccaggacaugaaagcuga

SEQ ID NO: 653200 - RNA, 22 nt, Human
uuggcuguuuuauaggucaguu

SEQ ID NO: 653201 - RNA, 22 nt, Human
gccacagugggcuggggccaga

SEQ ID NO: 653202 - RNA, 22 nt, Human
caucccugcugguggaaggggu

SEQ ID NO: 653203 - RNA, 16 nt, Human
agaggcuguaauggaa

SEQ ID NO: 653204 - RNA, 22 nt, Human
agcuguggcaaccuugucagac

SEQ ID NO: 653205 - RNA, 22 nt, Human
ggcuucuuccuggcuccuauua

SEQ ID NO: 653206 - RNA, 20 nt, Human
ucagaggcugccagcugggg

SEQ ID NO: 653207 - RNA, 21 nt, Human
cuggucuggccaauaaggucc

SEQ ID NO: 653208 - RNA, 22 nt, Human
cugcagucuuccuuccuuaggc

SEQ ID NO: 653209 - RNA, 22 nt, Human
ugccucugugggcagagcugcc

SEQ ID NO: 653210 - RNA, 22 nt, Human
ucucugccaccaugagaugggc

SEQ ID NO: 653211 - RNA, 22 nt, Human
caggccacacggcggcucccug

SEQ ID NO: 653212 - RNA, 22 nt, Human
ccccagggaagcuuugcuuacu

SEQ ID NO: 653213 - RNA, 22 nt, Human
uagaugauuuucagucaaagca

SEQ ID NO: 653214 - RNA, 22 nt, Human
ccaggguaccccaagggcaggu

SEQ ID NO: 653215 - RNA, 22 nt, Human
uagagguagauggucagccaau

SEQ ID NO: 653216 - RNA, 22 nt, Human
gagacuuuuuaaucacuaggaa

SEQ ID NO: 653217 - RNA, 22 nt, Human
gaaagugccucaguccucuuau

SEQ ID NO: 653218 - RNA, 22 nt, Human
auucacagagugguuaguggua

SEQ ID NO: 653219 - RNA, 22 nt, Human
ucagcagaggggaaggcaucug

SEQ ID NO: 653220 - RNA, 22 nt, Human
gagcucugcggaaaacgugccg

SEQ ID NO: 653221 - RNA, 22 nt, Human
guacaguacuucagaaccagcc

SEQ ID NO: 653222 - RNA, 22 nt, Human
uccucacagaugggugcauagc

SEQ ID NO: 653223 - RNA, 22 nt, Human
ugcuuucauugccugcgguuuu

SEQ ID NO: 653224 - RNA, 22 nt, Human
uccauagugaauggguaaugca

SEQ ID NO: 653225 - RNA, 22 nt, Human
aaguacauauauuuaugauucu

SEQ ID NO: 653226 - RNA, 22 nt, Human
ugggaccucucuugagagagca

SEQ ID NO: 653227 - RNA, 22 nt, Human
uccagcuccacagccucccugu

SEQ ID NO: 653228 - RNA, 22 nt, Human
gcuggugugugaaccuagggac

SEQ ID NO: 653229 - RNA, 22 nt, Human
accaggaggcuacacuguccca

SEQ ID NO: 653230 - RNA, 22 nt, Human
cuauugaauuaacuauuaaagu

SEQ ID NO: 653231 - RNA, 22 nt, Human
aaaugguaaugucuuucuguuu

SEQ ID NO: 653232 - RNA, 22 nt, Human
ggggcagagcauagcuccaauu

SEQ ID NO: 653233 - RNA, 22 nt, Human
agguucaaaugcaagagaugcu

SEQ ID NO: 653234 - RNA, 23 nt, Human
uggcucucucagugcugcagagg

SEQ ID NO: 653235 - RNA, 22 nt, Human
gugugcagaagacacaagacau

SEQ ID NO: 653236 - RNA, 22 nt, Human
ucugggagagcacguggcugac

SEQ ID NO: 653237 - RNA, 22 nt, Human
uuuacuaagcccaguuauaugc

SEQ ID NO: 653238 - RNA, 22 nt, Human
agcagccaaaugaagauuuuac

SEQ ID NO: 653239 - RNA, 22 nt, Human
gagaaccucuccacaagucugg

SEQ ID NO: 653240 - RNA, 22 nt, Human
uuccauauguauauagcuguua

SEQ ID NO: 653241 - RNA, 22 nt, Human
uuauucuguagaaccuaguaca

SEQ ID NO: 653242 - RNA, 22 nt, Human
guaacacuagcucugucacuuu

SEQ ID NO: 653243 - RNA, 22 nt, Human
aggggcaguuccaaguuuugug

SEQ ID NO: 653244 - RNA, 21 nt, Human
agaugcaguuugcaggugggu

SEQ ID NO: 653245 - RNA, 22 nt, Human
auuucauggcagacuuuaaccc

SEQ ID NO: 653246 - RNA, 22 nt, Human
cugaggcuuugugugcaugccu

SEQ ID NO: 653247 - RNA, 19 nt, Human
acagggcuuggccugacau

SEQ ID NO: 653248 - RNA, 22 nt, Human
uuccaugagcucugaguucaca

SEQ ID NO: 653249 - RNA, 22 nt, Human
ucuugggagucccaggacauag

SEQ ID NO: 653250 - RNA, 22 nt, Human
agaaacugacaggaaaugaauu

SEQ ID NO: 653251 - RNA, 22 nt, Human
aacugcaaagccaaucucagga

SEQ ID NO: 653252 - RNA, 22 nt, Human
ucugggagcagcucagcagauu

SEQ ID NO: 653253 - RNA, 22 nt, Human
ccuggguggcagagguugcagu

SEQ ID NO: 653254 - RNA, 22 nt, Human
guagcuuauuagggauaauagu

SEQ ID NO: 653255 - RNA, 22 nt, Human
agauaugucccugucuaauauu

SEQ ID NO: 653256 - RNA, 22 nt, Human
gcccauggcuucccuaggcaca

SEQ ID NO: 653257 - RNA, 22 nt, Human
uguccuggugcuucuugggauu

SEQ ID NO: 653258 - RNA, 22 nt, Human
gaguuuaaauaacacauuucca

SEQ ID NO: 653259 - RNA, 22 nt, Human
aaccugaagaaaauauuugcug

SEQ ID NO: 653260 - RNA, 20 nt, Human
uaugaguauuacuuucagga

SEQ ID NO: 653261 - RNA, 21 nt, Human
ccucugugcuaaagggcuccc

SEQ ID NO: 653262 - RNA, 22 nt, Human
uacauguucaaauuugucuuuc

SEQ ID NO: 653263 - RNA, 22 nt, Human
caggcuuccgccagguuuccag

SEQ ID NO: 653264 - RNA, 22 nt, Human
cuccuccacuaggcaaaaugug

SEQ ID NO: 653265 - RNA, 22 nt, Human
cugcccugccuggccagugugg

SEQ ID NO: 653266 - RNA, 22 nt, Human
ucugacuugcaucuuaaaggag

SEQ ID NO: 653267 - RNA, 21 nt, Human
acagaaguggcuuggucucag

SEQ ID NO: 653268 - RNA, 22 nt, Human
uguacaaugccagggaacacca

SEQ ID NO: 653269 - RNA, 22 nt, Human
uuugcuuucuugauucagauua

SEQ ID NO: 653270 - RNA, 22 nt, Human
aggggugauuugggacaggaca

SEQ ID NO: 653271 - RNA, 22 nt, Human
auauuuucacugaaccaaagua

SEQ ID NO: 653272 - RNA, 22 nt, Human
ugauauuuaagcaaaaauaugg

SEQ ID NO: 653273 - RNA, 22 nt, Human
auauuacuuccugguauaaaau

SEQ ID NO: 653274 - RNA, 20 nt, Human
cgcagcaguggaaguggaau

SEQ ID NO: 653275 - RNA, 22 nt, Human
uucaugaauauauugaauuagc

SEQ ID NO: 653276 - RNA, 22 nt, Human
uacagucagagugccuuucuaa

SEQ ID NO: 653277 - RNA, 22 nt, Human
ugcuauaagaauuauauuacuc

SEQ ID NO: 653278 - RNA, 22 nt, Human
cugagcugaaacuugagaggcu

SEQ ID NO: 653279 - RNA, 19 nt, Human
uccaauuucuauucauguu

SEQ ID NO: 653280 - RNA, 22 nt, Human
gggguggaucaggcaggcccag

SEQ ID NO: 653281 - RNA, 20 nt, Human
gucuccacuggggguuaacc

SEQ ID NO: 653282 - RNA, 22 nt, Human
uuauucagcauuuagaggaagg

SEQ ID NO: 653283 - RNA, 22 nt, Human
ugagauaacauggaagaguagc

SEQ ID NO: 653284 - RNA, 22 nt, Human
ucacauuucucagcacugauga

SEQ ID NO: 653285 - RNA, 22 nt, Human
ugucauuuaugcuucuucagug

SEQ ID NO: 653286 - RNA, 22 nt, Human
acauuucagaaucacacagcuu

SEQ ID NO: 653287 - RNA, 22 nt, Human
uggcagagacuccuccugggag

SEQ ID NO: 653288 - RNA, 22 nt, Human
ugcuucuguuuguuucugucau

SEQ ID NO: 653289 - RNA, 22 nt, Human
cuccagccagagugccucuguu

SEQ ID NO: 653290 - RNA, 22 nt, Human
cugcagguugagcagccagguu

SEQ ID NO: 653291 - RNA, 22 nt, Human
uugagaaaacacagaguuuauu

SEQ ID NO: 653292 - RNA, 22 nt, Human
uccaggcaugguguaauuuugc

SEQ ID NO: 653293 - RNA, 22 nt, Human
ugugcugugggacucaggcucc

SEQ ID NO: 653294 - RNA, 22 nt, Human
gcuuuagauagauuuagucuuu

SEQ ID NO: 653295 - RNA, 22 nt, Human
auggcauuauagcaaugguuug

SEQ ID NO: 653296 - RNA, 22 nt, Human
uuauaugaacuggacuuuagga

SEQ ID NO: 653297 - RNA, 22 nt, Human
acaaaagaauaagaugagucau

SEQ ID NO: 653298 - RNA, 22 nt, Human
ggcuccagcuaaugguuucuau

SEQ ID NO: 653299 - RNA, 22 nt, Human
auuucugauacccggucacccu

SEQ ID NO: 653300 - RNA, 22 nt, Human
cugagccuugaugucccuuguc

SEQ ID NO: 653301 - RNA, 23 nt, Human
uggcugagauccuacuguuugcu

SEQ ID NO: 653302 - RNA, 22 nt, Human
ccagaggagggcucugaugagg

SEQ ID NO: 653303 - RNA, 22 nt, Human
aauguuuuuuggucugaugaau

SEQ ID NO: 653304 - RNA, 21 nt, Human
aagaagcaauuuauuggaagg

SEQ ID NO: 653305 - RNA, 22 nt, Human
gcccucugcucagcuccucagc

SEQ ID NO: 653306 - RNA, 20 nt, Human
gccuggcacccggggcuggc

SEQ ID NO: 653307 - RNA, 22 nt, Human
ucagguccucugggucccagcc

SEQ ID NO: 653308 - RNA, 21 nt, Human
auacacauacacauaaaugug

SEQ ID NO: 653309 - RNA, 22 nt, Human
ugauugcuucuuugcuaucugu

SEQ ID NO: 653310 - RNA, 22 nt, Human
auuucuguuugcuacuauaagu

SEQ ID NO: 653311 - RNA, 22 nt, Human
cagggaguuuuuguuccucuag

SEQ ID NO: 653312 - RNA, 22 nt, Human
ggcagaggaagcuggaaguggg

SEQ ID NO: 653313 - RNA, 22 nt, Human
cagggcuggcuuccaaguuguu

SEQ ID NO: 653314 - RNA, 22 nt, Human
uguauuaugauuguuguucaug

SEQ ID NO: 653315 - RNA, 22 nt, Human
uucugcuuuucucugucugagu

SEQ ID NO: 653316 - RNA, 22 nt, Human
uuucaguugcagugguugucua

SEQ ID NO: 653317 - RNA, 22 nt, Human
cacagaaucauauugucaguuu

SEQ ID NO: 653318 - RNA, 22 nt, Human
agaaggaaggauaacugcauua

SEQ ID NO: 653319 - RNA, 17 nt, Human
ccucccacaccgcccug

SEQ ID NO: 653320 - RNA, 22 nt, Human
guuuuauaggugaaauauuacu

SEQ ID NO: 653321 - RNA, 22 nt, Human
augcuguuaagauaauggguuc

SEQ ID NO: 653322 - RNA, 22 nt, Human
auuucucauuuugcuucaaagg

SEQ ID NO: 653323 - RNA, 22 nt, Human
cucucugggaauauuuuauucu

SEQ ID NO: 653324 - RNA, 22 nt, Human
gcuguguccucacacagccuuu

SEQ ID NO: 653325 - RNA, 22 nt, Human
cagggccuccccggcagucuuu

SEQ ID NO: 653326 - RNA, 22 nt, Human
acuuguuugccuaaaauuuuga

SEQ ID NO: 653327 - RNA, 22 nt, Human
ccaggaagcugucugauaugaa

SEQ ID NO: 653328 - RNA, 22 nt, Human
gcuuuacugagaugacacaggg

SEQ ID NO: 653329 - RNA, 22 nt, Human
uuguacauucugaaucuguccu

SEQ ID NO: 653330 - RNA, 22 nt, Human
uagggcuauucugaguaauaau

SEQ ID NO: 653331 - RNA, 22 nt, Human
uucauauugcuuccguggagug

SEQ ID NO: 653332 - RNA, 22 nt, Human
aaugucauuuaaaauaauucug

SEQ ID NO: 653333 - RNA, 22 nt, Human
guaaggcuaaugucuuuguggu

SEQ ID NO: 653334 - RNA, 22 nt, Human
uacacaguagaguauaaugcgu

SEQ ID NO: 653335 - RNA, 22 nt, Human
cuuagaaauaaugguuucaguu

SEQ ID NO: 653336 - RNA, 20 nt, Human
agcaccagugggggcagccc

SEQ ID NO: 653337 - RNA, 22 nt, Human
gacccuuagaaugugaucuuau

SEQ ID NO: 653338 - RNA, 22 nt, Human
ccugccugacagagaagguuca

SEQ ID NO: 653339 - RNA, 22 nt, Human
uccacugugcagcucugcugau

SEQ ID NO: 653340 - RNA, 22 nt, Human
uagaaucugaauauucuuauuu

SEQ ID NO: 653341 - RNA, 22 nt, Human
aacagcagggggaccugcuggu

SEQ ID NO: 653342 - RNA, 22 nt, Human
uguuaugaguccucauauacua

SEQ ID NO: 653343 - RNA, 22 nt, Human
uguuaauauacuaaaauccacu

SEQ ID NO: 653344 - RNA, 22 nt, Human
cacucugagaaguacaagcucc

SEQ ID NO: 653345 - RNA, 22 nt, Human
uuagggaaggacagugaagaaa

SEQ ID NO: 653346 - RNA, 22 nt, Human
auacaguaauugcauaggcuuc

SEQ ID NO: 653347 - RNA, 22 nt, Human
auguguccacaggugugagaga

SEQ ID NO: 653348 - RNA, 22 nt, Human
agacacugcggaggucgggugg

SEQ ID NO: 653349 - RNA, 22 nt, Human
uaaacaauuccucucuaggcau

SEQ ID NO: 653350 - RNA, 22 nt, Human
ccuguguuaguuaugggucucu

SEQ ID NO: 653351 - RNA, 22 nt, Human
guauuugucuuguuggucucca

SEQ ID NO: 653352 - RNA, 22 nt, Human
aucaguuugauaauaaggcuug

SEQ ID NO: 653353 - RNA, 22 nt, Human
auaauuuacaacugcuuuuaau

SEQ ID NO: 653354 - RNA, 22 nt, Human
aacaaaggccguuaauaaccac

SEQ ID NO: 653355 - RNA, 22 nt, Human
gcauuuagcuuuaaaauauuuc

SEQ ID NO: 653356 - RNA, 20 nt, Human
gucucaaguaucucacaguc

SEQ ID NO: 653357 - RNA, 22 nt, Human
uggcucaguuugggggauugaa

SEQ ID NO: 653358 - RNA, 22 nt, Human
augaggucuuauugcaguaguu

SEQ ID NO: 653359 - RNA, 22 nt, Human
aagaacaugauggccaugugca

SEQ ID NO: 653360 - RNA, 22 nt, Human
uauugcuucauaauuguugcca

SEQ ID NO: 653361 - RNA, 22 nt, Human
ugucugugaccucuuuggagcc

SEQ ID NO: 653362 - RNA, 23 nt, Human
cagaagacagucucaagacaagg

SEQ ID NO: 653363 - RNA, 21 nt, Human
agguuucucuuuuauggaggg

SEQ ID NO: 653364 - RNA, 22 nt, Human
cuggcucaggguggucuggguc

SEQ ID NO: 653365 - RNA, 22 nt, Human
ccaggacuuauuacaguauaac

SEQ ID NO: 653366 - RNA, 22 nt, Human
ucuuuacuuguguauuguauau

SEQ ID NO: 653367 - RNA, 22 nt, Human
uugcaaggugauaaaagaauga

SEQ ID NO: 653368 - RNA, 22 nt, Human
uuuuuguguauccugcuccaug

SEQ ID NO: 653369 - RNA, 22 nt, Human
uucacauuuacugguuuguccg

SEQ ID NO: 653370 - RNA, 22 nt, Human
ucucugagcccaauguagcaau

SEQ ID NO: 653371 - RNA, 22 nt, Human
acagacagggcaccugccuccu

SEQ ID NO: 653372 - RNA, 22 nt, Human
uccaguguggaccccugcaguc

SEQ ID NO: 653373 - RNA, 22 nt, Human
uuaggcuguucuuguguuguua

SEQ ID NO: 653374 - RNA, 22 nt, Human
ggcaguggcagagcuuggucua

SEQ ID NO: 653375 - RNA, 22 nt, Human
cugucuguuuuguauacaggcc

SEQ ID NO: 653376 - RNA, 19 nt, Human
aggaauuucucagggaggc

SEQ ID NO: 653377 - RNA, 22 nt, Human
cagaauuuagaaaacaacauaa

SEQ ID NO: 653378 - RNA, 22 nt, Human
uguauuugaguuaugaaagaga

SEQ ID NO: 653379 - RNA, 22 nt, Human
gugcaauuuugcaucuguaugc

SEQ ID NO: 653380 - RNA, 22 nt, Human
ucacagaaugucagaguugggg

SEQ ID NO: 653381 - RNA, 22 nt, Human
cacagcugcccuacuccaugug

SEQ ID NO: 653382 - RNA, 22 nt, Human
augugucugguuauugacaugc

SEQ ID NO: 653383 - RNA, 22 nt, Human
agcucccagagcucgagaguaa

SEQ ID NO: 653384 - RNA, 22 nt, Human
gcugggcaagugccuuggguuu

SEQ ID NO: 653385 - RNA, 22 nt, Human
cagcugccacuugcucucggcu

SEQ ID NO: 653386 - RNA, 22 nt, Human
ccagcucccugaagccuggucu

SEQ ID NO: 653387 - RNA, 22 nt, Human
aagcacaucauguuguucagac

SEQ ID NO: 653388 - RNA, 22 nt, Human
ggauggguuccgugggcaaaug

SEQ ID NO: 653389 - RNA, 22 nt, Human
gcagagccagaauggccaggac

SEQ ID NO: 653390 - RNA, 22 nt, Human
ugaaaucaauugcaauguuuau

SEQ ID NO: 653391 - RNA, 22 nt, Human
uugcuucauauuuguggcuugc

SEQ ID NO: 653392 - RNA, 22 nt, Human
gaauguuugugcagagucaucu

SEQ ID NO: 653393 - RNA, 22 nt, Human
acauuugacauuuaguaucagc

SEQ ID NO: 653394 - RNA, 22 nt, Human
gcagcucuuuucuuaaagagau

SEQ ID NO: 653395 - RNA, 22 nt, Human
agcucccagucuccucuccaug

SEQ ID NO: 653396 - RNA, 21 nt, Human
cuggcucuguugucacccggc

SEQ ID NO: 653397 - RNA, 22 nt, Human
ucaggucugaugccucauccau

SEQ ID NO: 653398 - RNA, 22 nt, Human
uagauccugagcccuaucuacu

SEQ ID NO: 653399 - RNA, 22 nt, Human
uggucugauuuuucaucuguug

SEQ ID NO: 653400 - RNA, 18 nt, Human
agcuugccucaagcuuuu

SEQ ID NO: 653401 - RNA, 22 nt, Human
cuugcuuuaucugguuucucau

SEQ ID NO: 653402 - RNA, 22 nt, Human
aagcugagccaguggcaagugc

SEQ ID NO: 653403 - RNA, 22 nt, Human
ccagcagcagcguccaaggaga

SEQ ID NO: 653404 - RNA, 22 nt, Human
gagaugguuggguuaacaacua

SEQ ID NO: 653405 - RNA, 22 nt, Human
aggaagaauguuuacauaucaa

SEQ ID NO: 653406 - RNA, 20 nt, Human
aguguaugaacagaugcggg

SEQ ID NO: 653407 - RNA, 20 nt, Human
uggaccugucucuuuaggga

SEQ ID NO: 653408 - RNA, 23 nt, Human
ggagagcuccucgugacucacug

SEQ ID NO: 653409 - RNA, 22 nt, Human
caagcagacaguaggccuagaa

SEQ ID NO: 653410 - RNA, 22 nt, Human
gggcagcccagaacugcugcag

SEQ ID NO: 653411 - RNA, 22 nt, Human
gccucaaaaguguuguagaggg

SEQ ID NO: 653412 - RNA, 22 nt, Human
guuauugacucucuuguggcuu

SEQ ID NO: 653413 - RNA, 22 nt, Human
acauuucucuugaugucucuau

SEQ ID NO: 653414 - RNA, 22 nt, Human
agucaaagaagaugguuccaaa

SEQ ID NO: 653415 - RNA, 22 nt, Human
cucagcucugucacuuacuagc

SEQ ID NO: 653416 - RNA, 20 nt, Human
aaacgagccaucauucuggu

SEQ ID NO: 653417 - RNA, 22 nt, Human
cagugcuccugauguacccuug

SEQ ID NO: 653418 - RNA, 22 nt, Human
ucucagagggaggauuacugcc

SEQ ID NO: 653419 - RNA, 22 nt, Human
cugucaccuguucacugcagca

SEQ ID NO: 653420 - RNA, 23 nt, Human
gaaucaguggcuaacaaggaaac

SEQ ID NO: 653421 - RNA, 22 nt, Human
ccaaaggccaggcacugagguu

SEQ ID NO: 653422 - RNA, 22 nt, Human
cagcacuaggauauacauuucc

SEQ ID NO: 653423 - RNA, 22 nt, Human
uucacaguggcccucucugagu

SEQ ID NO: 653424 - RNA, 22 nt, Human
uuuuaucuucauuccuaucuac

SEQ ID NO: 653425 - RNA, 22 nt, Human
ggaggccucaucuugccccgug

SEQ ID NO: 653426 - RNA, 21 nt, Human
agacugccauuguucuuuugg

SEQ ID NO: 653427 - RNA, 21 nt, Human
acucaggcaccaggggauggc

SEQ ID NO: 653428 - RNA, 22 nt, Human
guggcagaagaguaggaugggc

SEQ ID NO: 653429 - RNA, 22 nt, Human
aaagcuagaaggaaauuuuaug

SEQ ID NO: 653430 - RNA, 22 nt, Human
aggcuggccuauuucuuuaucg

SEQ ID NO: 653431 - RNA, 22 nt, Human
aacuuauuccauaggcucacug

SEQ ID NO: 653432 - RNA, 22 nt, Human
cuacuuuaacaauucgcaagaa

SEQ ID NO: 653433 - RNA, 22 nt, Human
cagguaggcagccggucucugg

SEQ ID NO: 653434 - RNA, 22 nt, Human
ccaggucuggaaccaccagggc

SEQ ID NO: 653435 - RNA, 22 nt, Human
aggcaacaugacucacuugcac

SEQ ID NO: 653436 - RNA, 22 nt, Human
gccccucuccuugugcaccugc

SEQ ID NO: 653437 - RNA, 22 nt, Human
ugcagaggcauuuauugaugua

SEQ ID NO: 653438 - RNA, 22 nt, Human
gaauugcugaaucauauguuua

SEQ ID NO: 653439 - RNA, 22 nt, Human
acccagaggcggagguugcagu

SEQ ID NO: 653440 - RNA, 22 nt, Human
cuugucagccaauuguggauuu

SEQ ID NO: 653441 - RNA, 22 nt, Human
caaauaguuuuucauguauuau

SEQ ID NO: 653442 - RNA, 22 nt, Human
ucacauuuucuacuacuguacg

SEQ ID NO: 653443 - RNA, 22 nt, Human
uaaacugugaaaggcuuaacau

SEQ ID NO: 653444 - RNA, 22 nt, Human
caggacagaccaagaucgugcu

SEQ ID NO: 653445 - RNA, 22 nt, Human
cccaggagguagagguugcagu

SEQ ID NO: 653446 - RNA, 22 nt, Human
ugauugccuacuaugugccaug

SEQ ID NO: 653447 - RNA, 19 nt, Human
aaaugugcacuguuuucca

SEQ ID NO: 653448 - RNA, 22 nt, Human
uuucacaggaauacccggcuuu

SEQ ID NO: 653449 - RNA, 22 nt, Human
uggaggccgcguagucugagca

SEQ ID NO: 653450 - RNA, 22 nt, Human
uaaaccaaguguccauauuagu

SEQ ID NO: 653451 - RNA, 22 nt, Human
gugaggagucugaagcacauaa

SEQ ID NO: 653452 - RNA, 22 nt, Human
aacccugggucggcaccauuuu

SEQ ID NO: 653453 - RNA, 22 nt, Human
ucugccuggguguggagcagag

SEQ ID NO: 653454 - RNA, 22 nt, Human
ugauggauguggcucuggagcu

SEQ ID NO: 653455 - RNA, 22 nt, Human
aaucacaguggguacuagauug

SEQ ID NO: 653456 - RNA, 22 nt, Human
gaaaggcaucuucagucucuga

SEQ ID NO: 653457 - RNA, 22 nt, Human
caaggcaggccaguuucaaggc

SEQ ID NO: 653458 - RNA, 19 nt, Human
ucucugcagcgcgcccggc

SEQ ID NO: 653459 - RNA, 19 nt, Human
gcaucauuugucucuucuu

SEQ ID NO: 653460 - RNA, 22 nt, Human
ucuguggagugaccugggcuuu

SEQ ID NO: 653461 - RNA, 22 nt, Human
caggaggugacuuccagggguu

SEQ ID NO: 653462 - RNA, 22 nt, Human
uuugauucuggccucugagaag

SEQ ID NO: 653463 - RNA, 22 nt, Human
ugaugcugcugggaguggugcu

SEQ ID NO: 653464 - RNA, 20 nt, Human
cucaggauugucuagccccu

SEQ ID NO: 653465 - RNA, 22 nt, Human
ggagacagugacuuagagacug

SEQ ID NO: 653466 - RNA, 18 nt, Human
uccucucuuuccccaggg

SEQ ID NO: 653467 - RNA, 22 nt, Human
cuguuaaagauaguuaagcuuc

SEQ ID NO: 653468 - RNA, 22 nt, Human
caggcucugcugcuacagcugu

SEQ ID NO: 653469 - RNA, 18 nt, Human
cagucccaaaccuuagga

SEQ ID NO: 653470 - RNA, 22 nt, Human
gccccaccgagggugcaguccu

SEQ ID NO: 653471 - RNA, 22 nt, Human
gagagugaaggcuucccagcaa

SEQ ID NO: 653472 - RNA, 22 nt, Human
aaucucuugggaggaaugaauu

SEQ ID NO: 653473 - RNA, 22 nt, Human
acauugcugcauucuccuuccc

SEQ ID NO: 653474 - RNA, 22 nt, Human
gaugcugggaccacagaguguu

SEQ ID NO: 653475 - RNA, 22 nt, Human
ucaguaaacagguuuaaguccu

SEQ ID NO: 653476 - RNA, 22 nt, Human
augugugccugagugauggacu

SEQ ID NO: 653477 - RNA, 22 nt, Human
cuggugcuggcaacagaguagg

SEQ ID NO: 653478 - RNA, 22 nt, Human
uacaagacgagggaaguucuuu

SEQ ID NO: 653479 - RNA, 22 nt, Human
agggaagcaggaauagcucuga

SEQ ID NO: 653480 - RNA, 22 nt, Human
ugagcagaagcccuccuggacu

SEQ ID NO: 653481 - RNA, 22 nt, Human
gcucaaagaauauucagaauga

SEQ ID NO: 653482 - RNA, 22 nt, Human
uuuacucaaguaugcauuuaug

SEQ ID NO: 653483 - RNA, 22 nt, Human
ugauacuuuggagacuugagua

SEQ ID NO: 653484 - RNA, 22 nt, Human
uaauuuacagagauacagucag

SEQ ID NO: 653485 - RNA, 20 nt, Human
ucucaggccccaguuuucuu

SEQ ID NO: 653486 - RNA, 18 nt, Human
uccagcucugccacuuac

SEQ ID NO: 653487 - RNA, 22 nt, Human
uuucagagcucuaggcucucag

SEQ ID NO: 653488 - RNA, 22 nt, Human
cacagugagcugggcaucaguu

SEQ ID NO: 653489 - RNA, 22 nt, Human
uguguauucagcaagcgaaaca

SEQ ID NO: 653490 - RNA, 22 nt, Human
augcugucaguauuaugugcag

SEQ ID NO: 653491 - RNA, 22 nt, Human
ugaaggagcugauguaaggggu

SEQ ID NO: 653492 - RNA, 22 nt, Human
agccucaguuucaggccuccuc

SEQ ID NO: 653493 - RNA, 22 nt, Human
ucaaugacauuguaucagaguu

SEQ ID NO: 653494 - RNA, 22 nt, Human
uguguucugaaggagaagagug

SEQ ID NO: 653495 - RNA, 22 nt, Human
ccaaagaaacccaagcucaggg

SEQ ID NO: 653496 - RNA, 21 nt, Human
uauacaugugugcauacgugu

SEQ ID NO: 653497 - RNA, 15 nt, Human
uguuuaagccacauu

SEQ ID NO: 653498 - RNA, 22 nt, Human
aggcagguagaaggaucuuuau

SEQ ID NO: 653499 - RNA, 22 nt, Human
gugugugcaagagguuuauuga

SEQ ID NO: 653500 - RNA, 23 nt, Human
agaugucuuagaaacugaagcug

SEQ ID NO: 653501 - RNA, 22 nt, Human
uagaaaucauuuagaaguauug

SEQ ID NO: 653502 - RNA, 22 nt, Human
aggcagaauguuggaaaggaag

SEQ ID NO: 653503 - RNA, 22 nt, Human
cucuggcucugacaguugaucc

SEQ ID NO: 653504 - RNA, 22 nt, Human
aaucuuucaaauuucuuugggu

SEQ ID NO: 653505 - RNA, 22 nt, Human
ggggccagagaggacccaggug

SEQ ID NO: 653506 - RNA, 22 nt, Human
aggcagcccacaggacacagga

SEQ ID NO: 653507 - RNA, 22 nt, Human
uggccugaauuauggcagaucu

SEQ ID NO: 653508 - RNA, 22 nt, Human
agugcuuugguauagaacuauu

SEQ ID NO: 653509 - RNA, 22 nt, Human
caguacugcuugugggagcaga

SEQ ID NO: 653510 - RNA, 23 nt, Human
acucagugaagcaaacagauagu

SEQ ID NO: 653511 - RNA, 22 nt, Human
uuguccugcaaccucacauggc

SEQ ID NO: 653512 - RNA, 19 nt, Human
ucaguaacuuuuaagagga

SEQ ID NO: 653513 - RNA, 22 nt, Human
acacugcucacuucuucccuug

SEQ ID NO: 653514 - RNA, 17 nt, Human
agcacuaaaaugcuucc

SEQ ID NO: 653515 - RNA, 22 nt, Human
uuugagcuuguagcauugcuau

SEQ ID NO: 653516 - RNA, 22 nt, Human
acacuucaaagggugacuugau

SEQ ID NO: 653517 - RNA, 22 nt, Human
aaauacuguagauaauagaguu

SEQ ID NO: 653518 - RNA, 17 nt, Human
uauacacagacagacug

SEQ ID NO: 653519 - RNA, 22 nt, Human
accuggaagugggugcuauggc

SEQ ID NO: 653520 - RNA, 22 nt, Human
uaagugcaauguuuuacuuaaa

SEQ ID NO: 653521 - RNA, 22 nt, Human
guaugaaaauuguaaaguucuu

SEQ ID NO: 653522 - RNA, 22 nt, Human
cacaugggcuuagcaggcaggg

SEQ ID NO: 653523 - RNA, 22 nt, Human
guuuauauucaacggaguaucu

SEQ ID NO: 653524 - RNA, 17 nt, Human
gcccaggaaggacggcc

SEQ ID NO: 653525 - RNA, 22 nt, Human
aauguuuuaaaagagauugaga

SEQ ID NO: 653526 - RNA, 22 nt, Human
agacacuuggcagagagcuguu

SEQ ID NO: 653527 - RNA, 23 nt, Human
agcuguguggccuugggcaaguu

SEQ ID NO: 653528 - RNA, 22 nt, Human
acaguguuuaaaauaauaugcu

SEQ ID NO: 653529 - RNA, 18 nt, Human
ugcuuucuagcuucagau

SEQ ID NO: 653530 - RNA, 21 nt, Human
guugaauauccauguaugugu

SEQ ID NO: 653531 - RNA, 22 nt, Human
gaaaggaaauugagggacgcau

SEQ ID NO: 653532 - RNA, 22 nt, Human
gaggcucaaaccuggacagagc

SEQ ID NO: 653533 - RNA, 22 nt, Human
uacauucaacaugucacuaugu

SEQ ID NO: 653534 - RNA, 17 nt, Human
agccgggcauggaccag

SEQ ID NO: 653535 - RNA, 22 nt, Human
acaaauuuggugagaguaaaua

SEQ ID NO: 653536 - RNA, 22 nt, Human
uaggagcuauaaugugaagucu

SEQ ID NO: 653537 - RNA, 22 nt, Human
ccugcuuugagaugggcagcag

SEQ ID NO: 653538 - RNA, 22 nt, Human
agauuucccaaauacuuguuau

SEQ ID NO: 653539 - RNA, 22 nt, Human
cacgggcuguuuccaugcaaaa

SEQ ID NO: 653540 - RNA, 22 nt, Human
cuucagaagaaaagcagugugu

SEQ ID NO: 653541 - RNA, 22 nt, Human
gauugaaacauaggcagucgag

SEQ ID NO: 653542 - RNA, 22 nt, Human
ccaggcacgguggcucaugccu

SEQ ID NO: 653543 - RNA, 23 nt, Human
ugguaauagggagcagaagguag

SEQ ID NO: 653544 - RNA, 22 nt, Human
ggaaagauuugucacaugaaug

SEQ ID NO: 653545 - RNA, 22 nt, Human
uucauugaugugguuuaaugua

SEQ ID NO: 653546 - RNA, 22 nt, Human
uugcauugaugucuauacgcug

SEQ ID NO: 653547 - RNA, 22 nt, Human
gguaauaaaauugugucaaaca

SEQ ID NO: 653548 - RNA, 22 nt, Human
acuuuugugcaggucucuccca

SEQ ID NO: 653549 - RNA, 18 nt, Human
uggagucagugacaccag

SEQ ID NO: 653550 - RNA, 22 nt, Human
aaauuguaaugacuucacuuga

SEQ ID NO: 653551 - RNA, 22 nt, Human
ccugugggagggagcggcugga

SEQ ID NO: 653552 - RNA, 22 nt, Human
agcauuuccgcccucuucugcc

SEQ ID NO: 653553 - RNA, 22 nt, Human
uggucaaaugccaaucuguagu

SEQ ID NO: 653554 - RNA, 22 nt, Human
uagacacuguaugagcugggug

SEQ ID NO: 653555 - RNA, 22 nt, Human
ucagaucaggaugcagcaacau

SEQ ID NO: 653556 - RNA, 22 nt, Human
cuccugcaugcucacauaugcc

SEQ ID NO: 653557 - RNA, 22 nt, Human
cuaggcagacugagcucuaggg

SEQ ID NO: 653558 - RNA, 22 nt, Human
uguauuuauucuucugguguuu

SEQ ID NO: 653559 - RNA, 22 nt, Human
uguuuucuguguagagaucaca

SEQ ID NO: 653560 - RNA, 22 nt, Human
auuuugaaucaccuuggaagaa

SEQ ID NO: 653561 - RNA, 22 nt, Human
agcugcugcgccucacccuggc

SEQ ID NO: 653562 - RNA, 22 nt, Human
gacuuugacgaaagagucauua

SEQ ID NO: 653563 - RNA, 22 nt, Human
ugccagcuacucuguaggcuga

SEQ ID NO: 653564 - RNA, 19 nt, Human
uccaaagaaguucacauuu

SEQ ID NO: 653565 - RNA, 23 nt, Human
cagaggcaucggauucaacauca

SEQ ID NO: 653566 - RNA, 20 nt, Human
ccagaggguagggccgcccc

SEQ ID NO: 653567 - RNA, 22 nt, Human
aacugcuucuuacugcugggca

SEQ ID NO: 653568 - RNA, 23 nt, Human
uaguguauaucaacauuuguccc

SEQ ID NO: 653569 - RNA, 22 nt, Human
agaagccagaggcaguggguac

SEQ ID NO: 653570 - RNA, 22 nt, Human
aaaguaagaccaagugaucauu

SEQ ID NO: 653571 - RNA, 22 nt, Human
agaaacauccugcuuuccauuu

SEQ ID NO: 653572 - RNA, 22 nt, Human
gugacucuacuuaagauuaagc

SEQ ID NO: 653573 - RNA, 22 nt, Human
uguggggaggcugcagugcugc

SEQ ID NO: 653574 - RNA, 22 nt, Human
ccuggcagcgugccgagcugcg

SEQ ID NO: 653575 - RNA, 22 nt, Human
ccagaugucugagccacacucc

SEQ ID NO: 653576 - RNA, 22 nt, Human
aagaaucaucugaacuuugagg

SEQ ID NO: 653577 - RNA, 22 nt, Human
uugaaaacauuuauauuagaau

SEQ ID NO: 653578 - RNA, 21 nt, Human
ugagggguuauaacagggugg

SEQ ID NO: 653579 - RNA, 22 nt, Human
cuagccagacucaagggccacc

SEQ ID NO: 653580 - RNA, 22 nt, Human
aggugccacucucaugggcuac

SEQ ID NO: 653581 - RNA, 22 nt, Human
uuaggaaucaaauuccgaaagg

SEQ ID NO: 653582 - RNA, 22 nt, Human
cggagcuggcgucuguguggac

SEQ ID NO: 653583 - RNA, 22 nt, Human
gucaucuucgcagagugauuuu

SEQ ID NO: 653584 - RNA, 22 nt, Human
ucacuggugugagaggagcaaa

SEQ ID NO: 653585 - RNA, 22 nt, Human
cuauuauuagauaaucuacuug

SEQ ID NO: 653586 - RNA, 22 nt, Human
ugcuucaggaagaaacgccagg

SEQ ID NO: 653587 - RNA, 22 nt, Human
uccagagcuaauucagcagcug

SEQ ID NO: 653588 - RNA, 22 nt, Human
uaacagagauagaaauguaaag

SEQ ID NO: 653589 - RNA, 22 nt, Human
aguguuugagacacauuucacu

SEQ ID NO: 653590 - RNA, 22 nt, Human
agugcauagggggaugcacagc

SEQ ID NO: 653591 - RNA, 22 nt, Human
uggaggcaggagacagggcaaa

SEQ ID NO: 653592 - RNA, 22 nt, Human
uggcuggaugugagaucaagag

SEQ ID NO: 653593 - RNA, 22 nt, Human
accaggcaacugugaaugggcu

SEQ ID NO: 653594 - RNA, 22 nt, Human
ggcagguacagcaagaggacaa

SEQ ID NO: 653595 - RNA, 22 nt, Human
ucagugcacaaugacgguggcu

SEQ ID NO: 653596 - RNA, 22 nt, Human
gaggaguggaguugcuggguug

SEQ ID NO: 653597 - RNA, 22 nt, Human
aauuuauuauauccuaggggaa

SEQ ID NO: 653598 - RNA, 22 nt, Human
cuagagggauguuaggauagca

SEQ ID NO: 653599 - RNA, 22 nt, Human
cccccaaaguuugcacggauaa

SEQ ID NO: 653600 - RNA, 22 nt, Human
aaagucauggaaaaucuuggaa

SEQ ID NO: 653601 - RNA, 22 nt, Human
uugauucugaugaaaguccauu

SEQ ID NO: 653602 - RNA, 22 nt, Human
ggcuucucucccccagcuccac

SEQ ID NO: 653603 - RNA, 22 nt, Human
cuccugagcugcagccuugugu

SEQ ID NO: 653604 - RNA, 22 nt, Human
gcucuguggcaggaggucuugu

SEQ ID NO: 653605 - RNA, 18 nt, Human
ucacucauagacaucuau

SEQ ID NO: 653606 - RNA, 22 nt, Human
uguuggcagauugucuaggguu

SEQ ID NO: 653607 - RNA, 22 nt, Human
ugcauuaaaaccaucgaccauc

SEQ ID NO: 653608 - RNA, 22 nt, Human
augcagaaggagccaugcuugc

SEQ ID NO: 653609 - RNA, 22 nt, Human
ugcuggcuuuuugguccuugcu

SEQ ID NO: 653610 - RNA, 22 nt, Human
uuaaacaccacagcagucccua

SEQ ID NO: 653611 - RNA, 22 nt, Human
gcugugcuugcaugagugucug

SEQ ID NO: 653612 - RNA, 21 nt, Human
uagcacuucgcuguaauuggg

SEQ ID NO: 653613 - RNA, 22 nt, Human
uagcugugagcacccaggcugu

SEQ ID NO: 653614 - RNA, 22 nt, Human
uuguuauuuacaacaauccuau

SEQ ID NO: 653615 - RNA, 22 nt, Human
ggggucaagcucagaauccuag

SEQ ID NO: 653616 - RNA, 19 nt, Human
uggaggagaggaaaaguca

SEQ ID NO: 653617 - RNA, 23 nt, Human
ugugucuguuuagggaggaugug

SEQ ID NO: 653618 - RNA, 22 nt, Human
ucacauuuguguuuuauuagag

SEQ ID NO: 653619 - RNA, 22 nt, Human
uuauuguuaggcuuuuggaauu

SEQ ID NO: 653620 - RNA, 22 nt, Human
aagcagcaugcuaugcuggugg

SEQ ID NO: 653621 - RNA, 22 nt, Human
cacaggcacgccucuggccagg

SEQ ID NO: 653622 - RNA, 22 nt, Human
cauuucuacagcuucuucagaa

SEQ ID NO: 653623 - RNA, 22 nt, Human
agggacaguuacaucaucagac

SEQ ID NO: 653624 - RNA, 22 nt, Human
ggggcgcucggagggauccccu

SEQ ID NO: 653625 - RNA, 22 nt, Human
ucauuuuucucuuacacguaga

SEQ ID NO: 653626 - RNA, 23 nt, Human
aaugcauuaauuugggagaguac

SEQ ID NO: 653627 - RNA, 22 nt, Human
ccuggacucaggcugugggcac

SEQ ID NO: 653628 - RNA, 22 nt, Human
ggaauucugcauguucaguugg

SEQ ID NO: 653629 - RNA, 22 nt, Human
auauuuaacuggucccaauaua

SEQ ID NO: 653630 - RNA, 22 nt, Human
cagcuuugucauuugauuuggg

SEQ ID NO: 653631 - RNA, 22 nt, Human
cugaaaaauauguuuuggagaa

SEQ ID NO: 653632 - RNA, 22 nt, Human
caucagucagucucuucaguau

SEQ ID NO: 653633 - RNA, 22 nt, Human
agaguggagagaaacaacucug

SEQ ID NO: 653634 - RNA, 22 nt, Human
auucuggacaaugagaaacugg

SEQ ID NO: 653635 - RNA, 22 nt, Human
gucaaacauagggacuuugugg

SEQ ID NO: 653636 - RNA, 22 nt, Human
augguuuguguggcccagauga

SEQ ID NO: 653637 - RNA, 22 nt, Human
ccaggcucacagcaucccagga

SEQ ID NO: 653638 - RNA, 22 nt, Human
acccacacaucucuaauucagu

SEQ ID NO: 653639 - RNA, 22 nt, Human
uucugucaugcucauguaauug

SEQ ID NO: 653640 - RNA, 22 nt, Human
ugaaagaagccucccuuuggag

SEQ ID NO: 653641 - RNA, 22 nt, Human
uuaaaagaauccuguuauccuc

SEQ ID NO: 653642 - RNA, 22 nt, Human
auaaaaugguaaacgaagcuga

SEQ ID NO: 653643 - RNA, 22 nt, Human
uguugauuugugggcugcaaaa

SEQ ID NO: 653644 - RNA, 22 nt, Human
aaugccuuggagagccuagagg

SEQ ID NO: 653645 - RNA, 23 nt, Human
ccagugugguagguccacaggug

SEQ ID NO: 653646 - RNA, 22 nt, Human
ugaggcaaagacaaagcagcau

SEQ ID NO: 653647 - RNA, 22 nt, Human
uuugauaguugauuaaauucca

SEQ ID NO: 653648 - RNA, 22 nt, Human
augggaagugaagucagggagg

SEQ ID NO: 653649 - RNA, 22 nt, Human
uauuguauuaaggauucaagua

SEQ ID NO: 653650 - RNA, 22 nt, Human
accuccccacaugguagugagu

SEQ ID NO: 653651 - RNA, 22 nt, Human
uguccucaggaccuggcacagu

SEQ ID NO: 653652 - RNA, 22 nt, Human
uacagucaauacuaggaccaua

SEQ ID NO: 653653 - RNA, 22 nt, Human
aagagaagaaagugucuacaca

SEQ ID NO: 653654 - RNA, 22 nt, Human
ccugccuggcuuccagaagaga

SEQ ID NO: 653655 - RNA, 22 nt, Human
ggccacacucugguagagguga

SEQ ID NO: 653656 - RNA, 22 nt, Human
uuagaacugaagaagauuaagg

SEQ ID NO: 653657 - RNA, 22 nt, Human
uccuccagucuuggugagguug

SEQ ID NO: 653658 - RNA, 22 nt, Human
ucacaguacugugacuauugac

SEQ ID NO: 653659 - RNA, 22 nt, Human
ugagcuucaaaguuggaucuga

SEQ ID NO: 653660 - RNA, 22 nt, Human
uuccugggacuggagcagccca

SEQ ID NO: 653661 - RNA, 23 nt, Human
agcacaucaaagcagggaggaga

SEQ ID NO: 653662 - RNA, 22 nt, Human
agacuacauaugccacaugaag

SEQ ID NO: 653663 - RNA, 22 nt, Human
agcucccauuaucuucugaaac

SEQ ID NO: 653664 - RNA, 22 nt, Human
ucucucugugacagcuuugcug

SEQ ID NO: 653665 - RNA, 22 nt, Human
ugagaaagccuuuagucccagg

SEQ ID NO: 653666 - RNA, 22 nt, Human
uugaaaaguuuugaaacacucu

SEQ ID NO: 653667 - RNA, 22 nt, Human
cacuccuguuccacuaaaugag

SEQ ID NO: 653668 - RNA, 22 nt, Human
auauuuuguaacuuggaauagg

SEQ ID NO: 653669 - RNA, 22 nt, Human
uagggaaauauagauuuagggc

SEQ ID NO: 653670 - RNA, 22 nt, Human
aaggcaguacuuuauguccaua

SEQ ID NO: 653671 - RNA, 22 nt, Human
ggcaaacagacuugaccaucuu

SEQ ID NO: 653672 - RNA, 22 nt, Human
auccugggaaugggagggucau

SEQ ID NO: 653673 - RNA, 22 nt, Human
aaucuguuuuaucauuuguuac

SEQ ID NO: 653674 - RNA, 22 nt, Human
uuuaaauguuuaaaacucguga

SEQ ID NO: 653675 - RNA, 17 nt, Human
ugaauucaaucugcacu

SEQ ID NO: 653676 - RNA, 20 nt, Human
ugccugggaaggcguggagg

SEQ ID NO: 653677 - RNA, 23 nt, Human
caaaaugcuaugugcccaaugca

SEQ ID NO: 653678 - RNA, 22 nt, Human
caggaggaaaguuccacucaac

SEQ ID NO: 653679 - RNA, 22 nt, Human
uucuggcuuaguuguuguauau

SEQ ID NO: 653680 - RNA, 22 nt, Human
ugcuucugucucuuaugccuug

SEQ ID NO: 653681 - RNA, 22 nt, Human
cugcuccuccccaucaggcagc

SEQ ID NO: 653682 - RNA, 22 nt, Human
uuacaugacugcccuugucagg

SEQ ID NO: 653683 - RNA, 22 nt, Human
ucaguuucuaaaucuuaccaau

SEQ ID NO: 653684 - RNA, 22 nt, Human
auuacaguggguaaacagaauu

SEQ ID NO: 653685 - RNA, 22 nt, Human
uugagcauuuguuuugaaagag

SEQ ID NO: 653686 - RNA, 22 nt, Human
uacaguaaccagucuacuuaga

SEQ ID NO: 653687 - RNA, 21 nt, Human
uucucuggcuucuguagcugg

SEQ ID NO: 653688 - RNA, 22 nt, Human
aucugcuucagugauaugugaa

SEQ ID NO: 653689 - RNA, 22 nt, Human
acuguccugaauacugcaugac

SEQ ID NO: 653690 - RNA, 22 nt, Human
acuuucuuggucccauguuuga

SEQ ID NO: 653691 - RNA, 22 nt, Human
uaacauuagguagacauaagcc

SEQ ID NO: 653692 - RNA, 22 nt, Human
caggagcuucugcccauggcca

SEQ ID NO: 653693 - RNA, 22 nt, Human
gcagcagugugggcugaaccua

SEQ ID NO: 653694 - RNA, 22 nt, Human
ggcccagugcuguucacccagu

SEQ ID NO: 653695 - RNA, 22 nt, Human
ugagcuagggcuggugaggagc

SEQ ID NO: 653696 - RNA, 22 nt, Human
cagcaaggcauucuguggauua

SEQ ID NO: 653697 - RNA, 22 nt, Human
caggcuugcugcuagagcacuu

SEQ ID NO: 653698 - RNA, 22 nt, Human
cuguggaauugaugcuuagugu

SEQ ID NO: 653699 - RNA, 22 nt, Human
ugugugaccuggggugagauag

SEQ ID NO: 653700 - RNA, 22 nt, Human
ucuugaauuguacucccauaag

SEQ ID NO: 653701 - RNA, 22 nt, Human
augucacauggccuguacuuug

SEQ ID NO: 653702 - RNA, 22 nt, Human
cuguuauuuagaacauggaauc

SEQ ID NO: 653703 - RNA, 22 nt, Human
aucuauuucugcuaauaacaau

SEQ ID NO: 653704 - RNA, 22 nt, Human
gggcggugccugucuccgaagc

SEQ ID NO: 653705 - RNA, 22 nt, Human
ucauccugaagaaccugcuucc

SEQ ID NO: 653706 - RNA, 22 nt, Human
ucugcacacaauuuaucuuucu

SEQ ID NO: 653707 - RNA, 22 nt, Human
agggagcuuuuucaugugucua

SEQ ID NO: 653708 - RNA, 19 nt, Human
cauauuuuugggcuggcau

SEQ ID NO: 653709 - RNA, 22 nt, Human
aagacauuuaugaaaagugcug

SEQ ID NO: 653710 - RNA, 22 nt, Human
aaggcuccgugacuggggcuga

SEQ ID NO: 653711 - RNA, 22 nt, Human
ucugagaagcgugucucuguuu

SEQ ID NO: 653712 - RNA, 22 nt, Human
acagccugagaguggagcuggc

SEQ ID NO: 653713 - RNA, 22 nt, Human
cagggccuuauccugccauuga

SEQ ID NO: 653714 - RNA, 22 nt, Human
agcaaugcaaucuuaaccuuga

SEQ ID NO: 653715 - RNA, 22 nt, Human
auucuuugcaucucuggguggc

SEQ ID NO: 653716 - RNA, 22 nt, Human
ucuguuccucaaggucugugug

SEQ ID NO: 653717 - RNA, 20 nt, Human
cuuagaaauuuuuacccugg

SEQ ID NO: 653718 - RNA, 22 nt, Human
acugagcugugacaaugcuuaa

SEQ ID NO: 653719 - RNA, 22 nt, Human
guguucauugcuagugaggugu

SEQ ID NO: 653720 - RNA, 22 nt, Human
caaacauuccgcuucucccagg

SEQ ID NO: 653721 - RNA, 22 nt, Human
gaauauauuggugaaaauaguu

SEQ ID NO: 653722 - RNA, 22 nt, Human
gggcacugcuggaggcucccug

SEQ ID NO: 653723 - RNA, 22 nt, Human
uuacauucuuggaaucuuguuu

SEQ ID NO: 653724 - RNA, 22 nt, Human
gccuggucucuuucaugucagu

SEQ ID NO: 653725 - RNA, 22 nt, Human
uccguugacagggcacuugaca

SEQ ID NO: 653726 - RNA, 22 nt, Human
cucagccaggagaguguucaca

SEQ ID NO: 653727 - RNA, 22 nt, Human
gcuucuggaagcugcuucugcc

SEQ ID NO: 653728 - RNA, 22 nt, Human
uccaggccuugacaggucaguu

SEQ ID NO: 653729 - RNA, 22 nt, Human
gcugucacaagcaucuggggca

SEQ ID NO: 653730 - RNA, 22 nt, Human
gccauuuagggaggcaagguga

SEQ ID NO: 653731 - RNA, 22 nt, Human
aggcccagagagccaguuagug

SEQ ID NO: 653732 - RNA, 22 nt, Human
ccugaggcuggcccuuccaucc

SEQ ID NO: 653733 - RNA, 21 nt, Human
gacaggcaaggagucacuuag

SEQ ID NO: 653734 - RNA, 22 nt, Human
cuauucagguguccauuaaucc

SEQ ID NO: 653735 - RNA, 22 nt, Human
aggcuucacucgacaugccaau

SEQ ID NO: 653736 - RNA, 22 nt, Human
augucuuucucacagccaguuc

SEQ ID NO: 653737 - RNA, 22 nt, Human
ugugucuuaaguuccaagacau

SEQ ID NO: 653738 - RNA, 22 nt, Human
gggggcaguaaccucaaagugu

SEQ ID NO: 653739 - RNA, 22 nt, Human
cuucagccucaacuacuauggu

SEQ ID NO: 653740 - RNA, 22 nt, Human
uauggcuuuucuuccuccccca

SEQ ID NO: 653741 - RNA, 19 nt, Human
agcugggcugucacaguga

SEQ ID NO: 653742 - RNA, 22 nt, Human
auguuacugugaucaugauacu

SEQ ID NO: 653743 - RNA, 21 nt, Human
cccuucuugggucaaaguaua

SEQ ID NO: 653744 - RNA, 22 nt, Human
uuguguacuacaguaugccaca

SEQ ID NO: 653745 - RNA, 22 nt, Human
uccaauguuccugcuuucagcu

SEQ ID NO: 653746 - RNA, 22 nt, Human
ggcagagucagaggugguucug

SEQ ID NO: 653747 - RNA, 22 nt, Human
cucuuaaagaauguuccagcug

SEQ ID NO: 653748 - RNA, 22 nt, Human
acuaaaugaacuauuaauacuu

SEQ ID NO: 653749 - RNA, 19 nt, Human
gaggaggaaaacuagugua

SEQ ID NO: 653750 - RNA, 22 nt, Human
gugccucagcaccgccugcagc

SEQ ID NO: 653751 - RNA, 22 nt, Human
aggccuuggaagccagggagcc

SEQ ID NO: 653752 - RNA, 22 nt, Human
uacaaagguaucuuuccuagau

SEQ ID NO: 653753 - RNA, 21 nt, Human
ugugucacuaacuagaggcua

SEQ ID NO: 653754 - RNA, 22 nt, Human
ucuggggugugaccugagcaug

SEQ ID NO: 653755 - RNA, 21 nt, Human
agucccaggggugagugaugu

SEQ ID NO: 653756 - RNA, 19 nt, Human
ucucagagcccuagaggcc

SEQ ID NO: 653757 - RNA, 22 nt, Human
ugggccauuuuuggaagacugg

SEQ ID NO: 653758 - RNA, 22 nt, Human
caaaguaucaacucccacacug

SEQ ID NO: 653759 - RNA, 22 nt, Human
aguggcagacagagacaguacc

SEQ ID NO: 653760 - RNA, 22 nt, Human
gacaaggguucugcagagccug

SEQ ID NO: 653761 - RNA, 22 nt, Human
ucaauaaaauuguuuuccuauc

SEQ ID NO: 653762 - RNA, 22 nt, Human
agagagagaaaugaaaugugcu

SEQ ID NO: 653763 - RNA, 22 nt, Human
cccagacucaucccugggagcu

SEQ ID NO: 653764 - RNA, 22 nt, Human
ucuacacugggggcuuugagca

SEQ ID NO: 653765 - RNA, 22 nt, Human
cuggagcucuccagagccccgu

SEQ ID NO: 653766 - RNA, 22 nt, Human
caggaccugaagacaggcaggu

SEQ ID NO: 653767 - RNA, 22 nt, Human
cuggauucuuucauaaaaguca

SEQ ID NO: 653768 - RNA, 22 nt, Human
aaagacauuagauuaacguaca

SEQ ID NO: 653769 - RNA, 22 nt, Human
aacauauuuggcugauauuccc

SEQ ID NO: 653770 - RNA, 19 nt, Human
ugcugaaguugucagucug

SEQ ID NO: 653771 - RNA, 22 nt, Human
uuuccugugacuaaucuggaca

SEQ ID NO: 653772 - RNA, 22 nt, Human
caguguuccaggcggcagugaa

SEQ ID NO: 653773 - RNA, 22 nt, Human
acuguacacagugguguacugu

SEQ ID NO: 653774 - RNA, 22 nt, Human
uuggcuucugauguauuccuga

SEQ ID NO: 653775 - RNA, 21 nt, Human
ccagcugucuguccuuaggca

SEQ ID NO: 653776 - RNA, 22 nt, Human
augauuuucugauaaagaacug

SEQ ID NO: 653777 - RNA, 22 nt, Human
augacugcucugggcucccaug

SEQ ID NO: 653778 - RNA, 22 nt, Human
uccuggagcuggugucuuuccc

SEQ ID NO: 653779 - RNA, 22 nt, Human
ugcuggcugcagugcugucaaa

SEQ ID NO: 653780 - RNA, 22 nt, Human
cugcagugaggauucuuaggug

SEQ ID NO: 653781 - RNA, 22 nt, Human
gccaaaucuugcacacucuugu

SEQ ID NO: 653782 - RNA, 22 nt, Human
auuuaugauagcugcauuaaag

SEQ ID NO: 653783 - RNA, 22 nt, Human
ggcuuuaacagcagcuuugcug

SEQ ID NO: 653784 - RNA, 22 nt, Human
uuuuuaugccuacgcugaaaag

SEQ ID NO: 653785 - RNA, 22 nt, Human
cccaggguggaugcaagcagca

SEQ ID NO: 653786 - RNA, 22 nt, Human
caaauguaauggcagguuuugc

SEQ ID NO: 653787 - RNA, 22 nt, Human
agauuguagaaacuguagcauu

SEQ ID NO: 653788 - RNA, 22 nt, Human
agggagcucuuuggucuugccg

SEQ ID NO: 653789 - RNA, 22 nt, Human
aaagcagcagaaagcuggcccc

SEQ ID NO: 653790 - RNA, 22 nt, Human
ggugagagucuuguggucccag

SEQ ID NO: 653791 - RNA, 22 nt, Human
agggccaguauuaagguaauua

SEQ ID NO: 653792 - RNA, 19 nt, Human
agaggccucagcagcuggc

SEQ ID NO: 653793 - RNA, 22 nt, Human
gacauuucaaucucauuauggg

SEQ ID NO: 653794 - RNA, 22 nt, Human
ugaaaucauugggguugaauaa

SEQ ID NO: 653795 - RNA, 22 nt, Human
cagcaggggaacugugggccag

SEQ ID NO: 653796 - RNA, 22 nt, Human
gggcuccagauugcagcgauca

SEQ ID NO: 653797 - RNA, 22 nt, Human
ucuggcucugacacuacuguua

SEQ ID NO: 653798 - RNA, 22 nt, Human
accaggaauauuuugcucauuu

SEQ ID NO: 653799 - RNA, 22 nt, Human
ggagccaggggaccuucacaga

SEQ ID NO: 653800 - RNA, 22 nt, Human
gacaacagcauauggacuguca

SEQ ID NO: 653801 - RNA, 22 nt, Human
uuucuaagaugugguuucaagg

SEQ ID NO: 653802 - RNA, 23 nt, Human
aagcuucuaucucugcagaagga

SEQ ID NO: 653803 - RNA, 22 nt, Human
aaucaagaguuguguaauauuu

SEQ ID NO: 653804 - RNA, 22 nt, Human
uuugaaagccuggcuuuucucu

SEQ ID NO: 653805 - RNA, 22 nt, Human
ucugugacugauggaggcuuuu

SEQ ID NO: 653806 - RNA, 22 nt, Human
gcagcucccaucagggcacaga

SEQ ID NO: 653807 - RNA, 22 nt, Human
auuagcaacauggugaauaugu

SEQ ID NO: 653808 - RNA, 22 nt, Human
gagggagggacuagcauucucu

SEQ ID NO: 653809 - RNA, 22 nt, Human
ugaggccugaagccuggagccu

SEQ ID NO: 653810 - RNA, 22 nt, Human
acccuggggucacccuucucug

SEQ ID NO: 653811 - RNA, 22 nt, Human
cuguuucaaaacuaguacaaca

SEQ ID NO: 653812 - RNA, 22 nt, Human
cagauggcagggcagcucugca

SEQ ID NO: 653813 - RNA, 22 nt, Human
agcccuggggcuggugcuuacc

SEQ ID NO: 653814 - RNA, 22 nt, Human
uccuuuugcugggaucaucagg

SEQ ID NO: 653815 - RNA, 22 nt, Human
ucuggagccuuggaugggaaag

SEQ ID NO: 653816 - RNA, 22 nt, Human
guauucuugguuaucaaaauac

SEQ ID NO: 653817 - RNA, 22 nt, Human
cucacugacgaggaagcugaga

SEQ ID NO: 653818 - RNA, 22 nt, Human
ugucuuuagccacuugccucuu

SEQ ID NO: 653819 - RNA, 22 nt, Human
uugggcagcauugcaguucccu

SEQ ID NO: 653820 - RNA, 22 nt, Human
agugugaguuacaaagugugaa

SEQ ID NO: 653821 - RNA, 22 nt, Human
uuucuacauguuuucuauugaa

SEQ ID NO: 653822 - RNA, 22 nt, Human
ggcaucuggaucugcuucuccc

SEQ ID NO: 653823 - RNA, 22 nt, Human
aguguggccaaugaggaugggc

SEQ ID NO: 653824 - RNA, 22 nt, Human
guuaucaugcuucaucaucacu

SEQ ID NO: 653825 - RNA, 22 nt, Human
gucacucaggcuggaguucagu

SEQ ID NO: 653826 - RNA, 22 nt, Human
agauacauagcugugagcacac

SEQ ID NO: 653827 - RNA, 22 nt, Human
aagcagugcgcucaucuaaggg

SEQ ID NO: 653828 - RNA, 21 nt, Human
ggcuguguucagggcaugcgg

SEQ ID NO: 653829 - RNA, 22 nt, Human
ucucaucuagacucugcccuug

SEQ ID NO: 653830 - RNA, 22 nt, Human
agcugcuguuuggugagucuug

SEQ ID NO: 653831 - RNA, 22 nt, Human
gccugcucuccggaucccugau

SEQ ID NO: 653832 - RNA, 21 nt, Human
accagcauuccacacuguccc

SEQ ID NO: 653833 - RNA, 22 nt, Human
agugagacaguggacucugcau

SEQ ID NO: 653834 - RNA, 22 nt, Human
gcugcaggcauuuuccugggca

SEQ ID NO: 653835 - RNA, 19 nt, Human
uccugcugugugaagggga

SEQ ID NO: 653836 - RNA, 19 nt, Human
gguccucagcagagcaugc

SEQ ID NO: 653837 - RNA, 22 nt, Human
aaaguacuuggauuacaggcau

SEQ ID NO: 653838 - RNA, 19 nt, Human
auuuauuguaugauuccau

SEQ ID NO: 653839 - RNA, 22 nt, Human
aacacugugcccacccuagucc

SEQ ID NO: 653840 - RNA, 22 nt, Human
acaauaaguauugggcuuuuga

SEQ ID NO: 653841 - RNA, 22 nt, Human
ggccuuccugcugcuccgggcc

SEQ ID NO: 653842 - RNA, 22 nt, Human
cuccuggcuuucccagaccagg

SEQ ID NO: 653843 - RNA, 22 nt, Human
ucuccaggaaccaucaugguaa

SEQ ID NO: 653844 - RNA, 20 nt, Human
uggcccagcacgacgaggac

SEQ ID NO: 653845 - RNA, 22 nt, Human
gcccagggcugcaaguggacgc

SEQ ID NO: 653846 - RNA, 22 nt, Human
agaaggaagccaggagggugca

SEQ ID NO: 653847 - RNA, 22 nt, Human
uugcuuuaucucuuaugccuca

SEQ ID NO: 653848 - RNA, 22 nt, Human
gaauuacauaauaaaaugagag

SEQ ID NO: 653849 - RNA, 22 nt, Human
uuagaaccacugaagacucaca

SEQ ID NO: 653850 - RNA, 22 nt, Human
ugccuggauacucauuaauuuc

SEQ ID NO: 653851 - RNA, 21 nt, Human
uugagggguauugcuuuucuc

SEQ ID NO: 653852 - RNA, 22 nt, Human
cugcuuugaggggcucuguaua

SEQ ID NO: 653853 - RNA, 22 nt, Human
guucacagcuuguguuuucucu

SEQ ID NO: 653854 - RNA, 22 nt, Human
ggagugaguggccuugucacug

SEQ ID NO: 653855 - RNA, 22 nt, Human
guuacaauguccuuacaugaaa

SEQ ID NO: 653856 - RNA, 22 nt, Human
ccuggaugauccaugucaugga

SEQ ID NO: 653857 - RNA, 22 nt, Human
uuucauaaugucacagucaaaa

SEQ ID NO: 653858 - RNA, 17 nt, Human
uuucuccuuccaucuca

SEQ ID NO: 653859 - RNA, 23 nt, Human
gcuuccagaagacucauugacau

SEQ ID NO: 653860 - RNA, 22 nt, Human
uccugaagucacaggcucugag

SEQ ID NO: 653861 - RNA, 22 nt, Human
aacauuuaugauugagguaaau

SEQ ID NO: 653862 - RNA, 22 nt, Human
ucuggcccagccccugagguca

SEQ ID NO: 653863 - RNA, 22 nt, Human
acauuaaaaaauguugcaugaa

SEQ ID NO: 653864 - RNA, 22 nt, Human
cacauguucuugaagccaacuc

SEQ ID NO: 653865 - RNA, 22 nt, Human
ucaggcagcuccaggaauggua

SEQ ID NO: 653866 - RNA, 22 nt, Human
cagcauuuucuuaauguaggug

SEQ ID NO: 653867 - RNA, 22 nt, Human
cucaaguuggcaugaacaaauu

SEQ ID NO: 653868 - RNA, 22 nt, Human
gaacauuuccagaaaggaacua

SEQ ID NO: 653869 - RNA, 23 nt, Human
uggcaccaggcauucuaggggua

SEQ ID NO: 653870 - RNA, 22 nt, Human
uuuggagaaguugcuaaagugu

SEQ ID NO: 653871 - RNA, 22 nt, Human
agacauggagaaggagccagug

SEQ ID NO: 653872 - RNA, 22 nt, Human
uacaggagcugcucugugauac

SEQ ID NO: 653873 - RNA, 22 nt, Human
ugagggcugacaggaggacagc

SEQ ID NO: 653874 - RNA, 22 nt, Human
ugaugcacaaagucagcauccu

SEQ ID NO: 653875 - RNA, 22 nt, Human
ggcucacuuuggggucagcugg

SEQ ID NO: 653876 - RNA, 22 nt, Human
gugccugcuaccugacuuguuu

SEQ ID NO: 653877 - RNA, 22 nt, Human
cagggcucgcucgcucgcucgc

SEQ ID NO: 653878 - RNA, 22 nt, Human
gcuggcuggagugagcuacccu

SEQ ID NO: 653879 - RNA, 22 nt, Human
agcagcauagaugcuauccgag

SEQ ID NO: 653880 - RNA, 22 nt, Human
aggcuagcugauugccuuagaa

SEQ ID NO: 653881 - RNA, 22 nt, Human
cauuagggucucucagcugaau

SEQ ID NO: 653882 - RNA, 22 nt, Human
agguacaucuauggggauagaa

SEQ ID NO: 653883 - RNA, 22 nt, Human
gcucuauuacuuucaauaaaaa

SEQ ID NO: 653884 - RNA, 22 nt, Human
uaauauauaccuuuguuaggaa

SEQ ID NO: 653885 - RNA, 22 nt, Human
gggcuggaucucacgugagacc

SEQ ID NO: 653886 - RNA, 22 nt, Human
ugggguccucucacuuggaggg

SEQ ID NO: 653887 - RNA, 22 nt, Human
ggcaccagcaggcaccgaugcc

SEQ ID NO: 653888 - RNA, 22 nt, Human
cccuggaggaccccaauguggc

SEQ ID NO: 653889 - RNA, 22 nt, Human
uacgaauccuguggaugaaugu

SEQ ID NO: 653890 - RNA, 22 nt, Human
acagaguagcucaagaagauug

SEQ ID NO: 653891 - RNA, 20 nt, Human
gauacacagcacagagggcc

SEQ ID NO: 653892 - RNA, 18 nt, Human
cacaggagaugaccugac

SEQ ID NO: 653893 - RNA, 22 nt, Human
gcuguuucuugaggcuacuccu

SEQ ID NO: 653894 - RNA, 22 nt, Human
gauuucuuuaugaaguacagaa

SEQ ID NO: 653895 - RNA, 22 nt, Human
ucugccuggauuuuggaaagcu

SEQ ID NO: 653896 - RNA, 22 nt, Human
uagcaaaggccuuggacacgcu

SEQ ID NO: 653897 - RNA, 18 nt, Human
uccaggcuccaggcuaac

SEQ ID NO: 653898 - RNA, 22 nt, Human
uaaaaugccagaccaguucacg

SEQ ID NO: 653899 - RNA, 22 nt, Human
uaagaugggggaaagaaauagu

SEQ ID NO: 653900 - RNA, 22 nt, Human
aaugcucuuugaauuugucaga

SEQ ID NO: 653901 - RNA, 22 nt, Human
uaguuuuacaucagccauuguu

SEQ ID NO: 653902 - RNA, 22 nt, Human
agcagccacccagcugcucauu

SEQ ID NO: 653903 - RNA, 17 nt, Human
ucagucucuguccugga

SEQ ID NO: 653904 - RNA, 22 nt, Human
guuacaaaggacugggggccac

SEQ ID NO: 653905 - RNA, 22 nt, Human
guuaguguauauugccuucaaa

SEQ ID NO: 653906 - RNA, 22 nt, Human
ccucagccuuggccccaggcag

SEQ ID NO: 653907 - RNA, 22 nt, Human
agagcuguggauaguccuggau

SEQ ID NO: 653908 - RNA, 22 nt, Human
agacaugacagauaguugcuag

SEQ ID NO: 653909 - RNA, 22 nt, Human
ggguggugggcacagaaucugg

SEQ ID NO: 653910 - RNA, 22 nt, Human
acaggauaguuuuuaaucuucc

SEQ ID NO: 653911 - RNA, 22 nt, Human
aguaccaugcuuccugacuggu

SEQ ID NO: 653912 - RNA, 22 nt, Human
ucugggaaguccucugucaugc

SEQ ID NO: 653913 - RNA, 22 nt, Human
cuguacaaaagaaaguuccuau

SEQ ID NO: 653914 - RNA, 20 nt, Human
guggaugaucaguguagugg

SEQ ID NO: 653915 - RNA, 22 nt, Human
ugggccugggagggcagacgcu

SEQ ID NO: 653916 - RNA, 22 nt, Human
ggaguggcagcgaggaucagau

SEQ ID NO: 653917 - RNA, 22 nt, Human
uaaaucacucuucucucaccac

SEQ ID NO: 653918 - RNA, 22 nt, Human
auaaaaacugacccauccuuug

SEQ ID NO: 653919 - RNA, 22 nt, Human
aagcagagaaaagcuuagguuc

SEQ ID NO: 653920 - RNA, 22 nt, Human
aucaguguuccuugagacugcc

SEQ ID NO: 653921 - RNA, 22 nt, Human
agaacagcaguuaugguucauu

SEQ ID NO: 653922 - RNA, 22 nt, Human
aguaacaaauauucauuggauu

SEQ ID NO: 653923 - RNA, 22 nt, Human
aaauuucuaagucaagaagaac

SEQ ID NO: 653924 - RNA, 22 nt, Human
aggucugucuggccccaugaau

SEQ ID NO: 653925 - RNA, 22 nt, Human
gaugaggcucaugcacccugcg

SEQ ID NO: 653926 - RNA, 22 nt, Human
gacagcuggacagacacugaug

SEQ ID NO: 653927 - RNA, 22 nt, Human
uagauuugauguaagcauaguc

SEQ ID NO: 653928 - RNA, 22 nt, Human
augggcuggccuuucccgcucu

SEQ ID NO: 653929 - RNA, 22 nt, Human
cucuuuaaaguaaaauuugucu

SEQ ID NO: 653930 - RNA, 21 nt, Human
cugucccucuuugcuucccuc

SEQ ID NO: 653931 - RNA, 22 nt, Human
cagggguggcugcagcagaggu

SEQ ID NO: 653932 - RNA, 22 nt, Human
cugggcuuguguuagcugacaa

SEQ ID NO: 653933 - RNA, 22 nt, Human
uggugucuuggaaguaggugcu

SEQ ID NO: 653934 - RNA, 22 nt, Human
uuccuguauucuaaagggaaag

SEQ ID NO: 653935 - RNA, 22 nt, Human
aggcacgagcaauggccgagga

SEQ ID NO: 653936 - RNA, 23 nt, Human
ggcuucagugagagucccugcug

SEQ ID NO: 653937 - RNA, 22 nt, Human
agcugagacacuugagagacua

SEQ ID NO: 653938 - RNA, 18 nt, Human
guucaaggucaagagaga

SEQ ID NO: 653939 - RNA, 22 nt, Human
uuauuugaaucuggcuagagaa

SEQ ID NO: 653940 - RNA, 22 nt, Human
cagcagcugggaaggaggcuga

SEQ ID NO: 653941 - RNA, 22 nt, Human
ccagggugggaggcugaaggcg

SEQ ID NO: 653942 - RNA, 22 nt, Human
uuuauauuucccaggauuggcc

SEQ ID NO: 653943 - RNA, 22 nt, Human
cucugcuggugaccacugggcc

SEQ ID NO: 653944 - RNA, 22 nt, Human
ugagcagaauguucagauaaau

SEQ ID NO: 653945 - RNA, 22 nt, Human
gggugggaacaggaugccagga

SEQ ID NO: 653946 - RNA, 22 nt, Human
ccucagaagacuuuagggaaga

SEQ ID NO: 653947 - RNA, 22 nt, Human
agagccuugaagaucuggaaaa

SEQ ID NO: 653948 - RNA, 22 nt, Human
gcucugcuugcaucaugacugc

SEQ ID NO: 653949 - RNA, 22 nt, Human
uaaagcaaugaaaguuuugcag

SEQ ID NO: 653950 - RNA, 17 nt, Human
ugcagcugcucccaggc

SEQ ID NO: 653951 - RNA, 22 nt, Human
uuuucuuuaaucugguggggug

SEQ ID NO: 653952 - RNA, 22 nt, Human
agggccugucagcgguguccug

SEQ ID NO: 653953 - RNA, 22 nt, Human
uauugcuucagcuuccugggcu

SEQ ID NO: 653954 - RNA, 22 nt, Human
uaggucuguacccuguccuucu

SEQ ID NO: 653955 - RNA, 22 nt, Human
uucuaccauugggaaaacagcc

SEQ ID NO: 653956 - RNA, 23 nt, Human
uacagcugcagaaucaggcuaag

SEQ ID NO: 653957 - RNA, 22 nt, Human
aggcuguguucugcccucuccc

SEQ ID NO: 653958 - RNA, 22 nt, Human
uccuggaacauggauaaagaau

SEQ ID NO: 653959 - RNA, 22 nt, Human
cucugcccucgcacaucugcca

SEQ ID NO: 653960 - RNA, 22 nt, Human
uuugcaaauuagccacccuguu

SEQ ID NO: 653961 - RNA, 22 nt, Human
ucacuugccuagcccaguucag

SEQ ID NO: 653962 - RNA, 22 nt, Human
aggcgcugugcuuggggcugga

SEQ ID NO: 653963 - RNA, 22 nt, Human
ccuuuccugccucaggaaguag

SEQ ID NO: 653964 - RNA, 22 nt, Human
acaaauuuauugaagggcauau

SEQ ID NO: 653965 - RNA, 22 nt, Human
ugacagcugagccccaggcaag

SEQ ID NO: 653966 - RNA, 22 nt, Human
aaauguuucuacuugugagcau

SEQ ID NO: 653967 - RNA, 22 nt, Human
caggaagcaagugauuuucuug

SEQ ID NO: 653968 - RNA, 22 nt, Human
agcuccaggaucugaaaguucg

SEQ ID NO: 653969 - RNA, 22 nt, Human
gaaccucuuuaaagaacagaau

SEQ ID NO: 653970 - RNA, 22 nt, Human
ccucagaugucuuaaggcacug

SEQ ID NO: 653971 - RNA, 22 nt, Human
uagggcuguggucaguccucua

SEQ ID NO: 653972 - RNA, 22 nt, Human
cuucuuaaugcauaaacugugu

SEQ ID NO: 653973 - RNA, 22 nt, Human
gucucagugucaccuccagcug

SEQ ID NO: 653974 - RNA, 20 nt, Human
gcuaggcuggugauugucaa

SEQ ID NO: 653975 - RNA, 21 nt, Human
auuuucucuggaugaugguca

SEQ ID NO: 653976 - RNA, 22 nt, Human
uuucugcuguguaaaaugaggg

SEQ ID NO: 653977 - RNA, 22 nt, Human
cuguggagaugcagaccaggcc

SEQ ID NO: 653978 - RNA, 22 nt, Human
uucauggcaggagucagaagcu

SEQ ID NO: 653979 - RNA, 22 nt, Human
ucugagguggacgauggagccu

SEQ ID NO: 653980 - RNA, 22 nt, Human
cuggccacugcaccucuuccuu

SEQ ID NO: 653981 - RNA, 22 nt, Human
cucaagauauuccagcucucaa

SEQ ID NO: 653982 - RNA, 22 nt, Human
gcucuugauuuccaggagcuag

SEQ ID NO: 653983 - RNA, 22 nt, Human
uucucaguuucauagcugagca

SEQ ID NO: 653984 - RNA, 22 nt, Human
ugccuguuauuguuggcuuagu

SEQ ID NO: 653985 - RNA, 22 nt, Human
ugaggcagugugagauaauaaa

SEQ ID NO: 653986 - RNA, 22 nt, Human
cucaggauugugccuagggaga

SEQ ID NO: 653987 - RNA, 22 nt, Human
uuugcacacauucuuagaaaug

SEQ ID NO: 653988 - RNA, 23 nt, Human
ugugaagguggguccaagggcug

SEQ ID NO: 653989 - RNA, 19 nt, Human
auggaagcugggaucaaug

SEQ ID NO: 653990 - RNA, 22 nt, Human
ugagaacauugggaaagcuaug

SEQ ID NO: 653991 - RNA, 22 nt, Human
caggugaguuugcuauuguaca

SEQ ID NO: 653992 - RNA, 22 nt, Human
aaauacauuagacggagaguua

SEQ ID NO: 653993 - RNA, 20 nt, Human
auuguuucauuuaauguaca

SEQ ID NO: 653994 - RNA, 22 nt, Human
acccugagggugcuggguuucu

SEQ ID NO: 653995 - RNA, 22 nt, Human
ugucuuaugcugcauagacuau

SEQ ID NO: 653996 - RNA, 22 nt, Human
ugccagcuuguggucagaggcu

SEQ ID NO: 653997 - RNA, 23 nt, Human
aaggucacagaacuuagcaagcc

SEQ ID NO: 653998 - RNA, 22 nt, Human
uaaagacaauuucgagcuguag

SEQ ID NO: 653999 - RNA, 22 nt, Human
guggagcauaacacacuagccu

SEQ ID NO: 654000 - RNA, 22 nt, Human
uccccaguaagccugcacugug

SEQ ID NO: 654001 - RNA, 20 nt, Human
uaaugucaaagucacaaggu

SEQ ID NO: 654002 - RNA, 22 nt, Human
aggugagggugccagugcaugg

SEQ ID NO: 654003 - RNA, 22 nt, Human
caguagcaugcuuaucuuuuga

SEQ ID NO: 654004 - RNA, 22 nt, Human
cagcuauuccaggaguagaauc

SEQ ID NO: 654005 - RNA, 22 nt, Human
ugcagaggcccagcgguucuuc

SEQ ID NO: 654006 - RNA, 21 nt, Human
uccuccuguagaggguccugg

SEQ ID NO: 654007 - RNA, 22 nt, Human
aaagacugcaaaaacgcacaga

SEQ ID NO: 654008 - RNA, 22 nt, Human
cagauauauuuuauuuggucaa

SEQ ID NO: 654009 - RNA, 22 nt, Human
uguacaguggaaaauggauucg

SEQ ID NO: 654010 - RNA, 22 nt, Human
guucugaggcaaaggcagcagc

SEQ ID NO: 654011 - RNA, 22 nt, Human
agaacacauagagaaguuuuau

SEQ ID NO: 654012 - RNA, 22 nt, Human
gguuuuauuaccccuuaaacac

SEQ ID NO: 654013 - RNA, 22 nt, Human
caggccccauuccucuugggac

SEQ ID NO: 654014 - RNA, 22 nt, Human
ggcucagcuuggugcgcagaaa

SEQ ID NO: 654015 - RNA, 20 nt, Human
ugcacauggcagccaucuag

SEQ ID NO: 654016 - RNA, 22 nt, Human
cccacagguggaagccucggaa

SEQ ID NO: 654017 - RNA, 23 nt, Human
acagcugcaccuggccgccuggc

SEQ ID NO: 654018 - RNA, 17 nt, Human
ucuuucccugggagaug

SEQ ID NO: 654019 - RNA, 22 nt, Human
aggcgcagacauacagggucug

SEQ ID NO: 654020 - RNA, 22 nt, Human
ccucugggaagccaguccugcu

SEQ ID NO: 654021 - RNA, 22 nt, Human
cacacauauugucccuagugug

SEQ ID NO: 654022 - RNA, 22 nt, Human
uaauaccuagagaugauacaaa

SEQ ID NO: 654023 - RNA, 22 nt, Human
ucuuugaccaaauuauccuguu

SEQ ID NO: 654024 - RNA, 22 nt, Human
ggccuuuaagcaauugaaaaga

SEQ ID NO: 654025 - RNA, 22 nt, Human
caggcucgguccaguggcaccc

SEQ ID NO: 654026 - RNA, 22 nt, Human
caauauucaguggaaaagccau

SEQ ID NO: 654027 - RNA, 22 nt, Human
uuaaugaccuagagcaguaauu

SEQ ID NO: 654028 - RNA, 22 nt, Human
uccagcagaaccagagaccugg

SEQ ID NO: 654029 - RNA, 22 nt, Human
ccucagaauaguccucagauca

SEQ ID NO: 654030 - RNA, 22 nt, Human
agcugaaacccaggccucagcu

SEQ ID NO: 654031 - RNA, 22 nt, Human
gagugcaucguggccauuuuaa

SEQ ID NO: 654032 - RNA, 22 nt, Human
gugaggugacuagcaggugggg

SEQ ID NO: 654033 - RNA, 22 nt, Human
uacaguggggagcucaggagag

SEQ ID NO: 654034 - RNA, 22 nt, Human
aggggagagaacauaaggaagu

SEQ ID NO: 654035 - RNA, 22 nt, Human
uucuuuccucccagccuuugga

SEQ ID NO: 654036 - RNA, 22 nt, Human
aagucaagauaaaggugcuggc

SEQ ID NO: 654037 - RNA, 22 nt, Human
ugcagggccaugguggcggcug

SEQ ID NO: 654038 - RNA, 22 nt, Human
aguuucuguuaccauauuugac

SEQ ID NO: 654039 - RNA, 22 nt, Human
ggaggcugagaggucgcagugg

SEQ ID NO: 654040 - RNA, 22 nt, Human
ugagcauuggaucaaaugacuu

SEQ ID NO: 654041 - RNA, 22 nt, Human
gaagaagacauggaacaauagu

SEQ ID NO: 654042 - RNA, 22 nt, Human
cugagcagugguucuugagcgc

SEQ ID NO: 654043 - RNA, 22 nt, Human
gggaggugaaaggucaugugug

SEQ ID NO: 654044 - RNA, 22 nt, Human
uuagucaggaccuuuugguuuc

SEQ ID NO: 654045 - RNA, 22 nt, Human
cagaguacugggagaacagaag

SEQ ID NO: 654046 - RNA, 18 nt, Human
aggugcucaaaugggaaa

SEQ ID NO: 654047 - RNA, 22 nt, Human
cacugagaccagagucccugac

SEQ ID NO: 654048 - RNA, 22 nt, Human
cuuccaaaauuuauauguugaa

SEQ ID NO: 654049 - RNA, 22 nt, Human
uccaggcauuggagagauaaug

SEQ ID NO: 654050 - RNA, 22 nt, Human
agguucagucuuuggaccccuc

SEQ ID NO: 654051 - RNA, 22 nt, Human
ccugaggccccugaggauagca

SEQ ID NO: 654052 - RNA, 22 nt, Human
acacaaauuguaggauaauugc

SEQ ID NO: 654053 - RNA, 22 nt, Human
gcuucugcuguugaagccacca

SEQ ID NO: 654054 - RNA, 22 nt, Human
gagagggcuggaaacuuccugg

SEQ ID NO: 654055 - RNA, 22 nt, Human
ucauuucuccuaagugaaauau

SEQ ID NO: 654056 - RNA, 22 nt, Human
gaucccugcccucagccuggac

SEQ ID NO: 654057 - RNA, 22 nt, Human
ugucauuuauuuugcugucugu

SEQ ID NO: 654058 - RNA, 22 nt, Human
cuucaugaggccggcuuuaucc

SEQ ID NO: 654059 - RNA, 22 nt, Human
ggccagcggcacagccuggccc

SEQ ID NO: 654060 - RNA, 22 nt, Human
ucauugaacgaagagcuccauu

SEQ ID NO: 654061 - RNA, 22 nt, Human
uagggaaaagacuucacuguuu

SEQ ID NO: 654062 - RNA, 22 nt, Human
ggacaguccaccucagugaaga

SEQ ID NO: 654063 - RNA, 22 nt, Human
uggccucugcaauggauucacc

SEQ ID NO: 654064 - RNA, 22 nt, Human
aggcuucaggaaauauacauuu

SEQ ID NO: 654065 - RNA, 22 nt, Human
gaguuagagccauagagcacgg

SEQ ID NO: 654066 - RNA, 22 nt, Human
cugcuuaaaaugcagauucugu

SEQ ID NO: 654067 - RNA, 22 nt, Human
uccaaagcaucugagugugcau

SEQ ID NO: 654068 - RNA, 21 nt, Human
uaggagcugauggggaaguag

SEQ ID NO: 654069 - RNA, 23 nt, Human
ggaggcucaaguaucacgggcag

SEQ ID NO: 654070 - RNA, 22 nt, Human
gccaaaucuggauuuagcaaga

SEQ ID NO: 654071 - RNA, 22 nt, Human
auuucagaauguccuaauuuag

SEQ ID NO: 654072 - RNA, 19 nt, Human
cacagugcagccauuucuc

SEQ ID NO: 654073 - RNA, 22 nt, Human
ccuggggagccgccugagcccc

SEQ ID NO: 654074 - RNA, 22 nt, Human
ugccaggcugaacagggucuua

SEQ ID NO: 654075 - RNA, 19 nt, Human
ccaggccuggcgucuccgc

SEQ ID NO: 654076 - RNA, 22 nt, Human
ucucuggggccuuucuacauca

SEQ ID NO: 654077 - RNA, 22 nt, Human
ucaggcuuauagguagugguua

SEQ ID NO: 654078 - RNA, 22 nt, Human
cuuccuggaugaagcccagcau

SEQ ID NO: 654079 - RNA, 22 nt, Human
uuuacagcagcaugauuuauaa

SEQ ID NO: 654080 - RNA, 22 nt, Human
auaaggcagucccuuaacaagg

SEQ ID NO: 654081 - RNA, 22 nt, Human
ucuguccaguggcucucaggga

SEQ ID NO: 654082 - RNA, 22 nt, Human
ucucucugaguugagcaggagu

SEQ ID NO: 654083 - RNA, 22 nt, Human
gaaagugcuaggaaguguuaga

SEQ ID NO: 654084 - RNA, 22 nt, Human
caauugucagugcuguuuaaau

SEQ ID NO: 654085 - RNA, 22 nt, Human
ugggauggagccugaguauagu

SEQ ID NO: 654086 - RNA, 22 nt, Human
cagacucugaugcagccuugug

SEQ ID NO: 654087 - RNA, 18 nt, Human
ccaggacaggcaaaaggu

SEQ ID NO: 654088 - RNA, 22 nt, Human
uauggcuuuuggcuucucucug

SEQ ID NO: 654089 - RNA, 21 nt, Human
cuuugguuuccuccugccuuc

SEQ ID NO: 654090 - RNA, 22 nt, Human
cugagcucuaaugucagccuug

SEQ ID NO: 654091 - RNA, 22 nt, Human
ggcccuuggagccuccacagug

SEQ ID NO: 654092 - RNA, 22 nt, Human
cuccugaggacuucuauugggu

SEQ ID NO: 654093 - RNA, 22 nt, Human
acuucacagaaauuuuaugagg

SEQ ID NO: 654094 - RNA, 22 nt, Human
aauaucagaauguaaugguccu

SEQ ID NO: 654095 - RNA, 22 nt, Human
ggugggagugggcacaguuacg

SEQ ID NO: 654096 - RNA, 22 nt, Human
agagcuguguccugugcacuag

SEQ ID NO: 654097 - RNA, 22 nt, Human
aaggcugggaaacaugcaggcc

SEQ ID NO: 654098 - RNA, 22 nt, Human
uacagugaccuagaauaaauac

SEQ ID NO: 654099 - RNA, 19 nt, Human
ugggaguggggaagguccu

SEQ ID NO: 654100 - RNA, 22 nt, Human
gcuagaaacuguuuaaucucuu

SEQ ID NO: 654101 - RNA, 22 nt, Human
uuacaaucugauugucucaucu

SEQ ID NO: 654102 - RNA, 22 nt, Human
uagaggggaaaaugcguauuaa

SEQ ID NO: 654103 - RNA, 22 nt, Human
gggguaggcaggugaucugauc

SEQ ID NO: 654104 - RNA, 22 nt, Human
ccucacccagucaccuaggugg

SEQ ID NO: 654105 - RNA, 20 nt, Human
aaggaauauuuguaucuggg

SEQ ID NO: 654106 - RNA, 22 nt, Human
gaaccuggaaucuauuacaagg

SEQ ID NO: 654107 - RNA, 20 nt, Human
agcccaggccugugugaguc

SEQ ID NO: 654108 - RNA, 22 nt, Human
gaacuuuguggggcugagagga

SEQ ID NO: 654109 - RNA, 22 nt, Human
ccucccaggcauugccauuuuc

SEQ ID NO: 654110 - RNA, 22 nt, Human
acauugaugaaaagguaucauu

SEQ ID NO: 654111 - RNA, 22 nt, Human
ccccugccauagucaaaucuaa

SEQ ID NO: 654112 - RNA, 22 nt, Human
caggaaugaaaggucaggguug

SEQ ID NO: 654113 - RNA, 22 nt, Human
aacaaauuuagcucugagugcu

SEQ ID NO: 654114 - RNA, 22 nt, Human
aucuuuguuuugaugcagaucu

SEQ ID NO: 654115 - RNA, 22 nt, Human
aauccauguugauguauauuuu

SEQ ID NO: 654116 - RNA, 22 nt, Human
uagauuugccugggaaagcuca

SEQ ID NO: 654117 - RNA, 22 nt, Human
aaugaacaaaauaugcuuugca

SEQ ID NO: 654118 - RNA, 22 nt, Human
ggggugagcugggccugugccu

SEQ ID NO: 654119 - RNA, 22 nt, Human
gccagccagaguggcugugugu

SEQ ID NO: 654120 - RNA, 22 nt, Human
cuauuucuaaaccuauaaguga

SEQ ID NO: 654121 - RNA, 22 nt, Human
acccccaaacaugaucauggug

SEQ ID NO: 654122 - RNA, 22 nt, Human
uuggaaaaacacgauagugguu

SEQ ID NO: 654123 - RNA, 22 nt, Human
aagcacagugccaaguucuauu

SEQ ID NO: 654124 - RNA, 22 nt, Human
cugcaguaucuuaaaauuugua

SEQ ID NO: 654125 - RNA, 22 nt, Human
aaauacauaaagguuguaccag

SEQ ID NO: 654126 - RNA, 22 nt, Human
ucacagugagccaugucagaga

SEQ ID NO: 654127 - RNA, 22 nt, Human
ccuuagugaaacagaggcaauu

SEQ ID NO: 654128 - RNA, 22 nt, Human
gccuggaggaauguagcugagg

SEQ ID NO: 654129 - RNA, 22 nt, Human
gugugucagagcucagagaagu

SEQ ID NO: 654130 - RNA, 19 nt, Human
gcccugaguaagcuaggag

SEQ ID NO: 654131 - RNA, 22 nt, Human
ccuggccacucagguguggggc

SEQ ID NO: 654132 - RNA, 22 nt, Human
uagggaggaggguuuucaaauc

SEQ ID NO: 654133 - RNA, 22 nt, Human
augcauauguacccauguucug

SEQ ID NO: 654134 - RNA, 22 nt, Human
gagauggggaauaggagcaagc

SEQ ID NO: 654135 - RNA, 22 nt, Human
aaaauauguauaacucuucugc

SEQ ID NO: 654136 - RNA, 22 nt, Human
cuacagaaguuucccuugcuua

SEQ ID NO: 654137 - RNA, 22 nt, Human
ucacaaagggagggauagcugg

SEQ ID NO: 654138 - RNA, 22 nt, Human
ugccagcacuucuggcugucug

SEQ ID NO: 654139 - RNA, 22 nt, Human
ccaucuccacugucccugucaa

SEQ ID NO: 654140 - RNA, 22 nt, Human
gccagcagguggagagaucaag

SEQ ID NO: 654141 - RNA, 22 nt, Human
acagggcuauauuccucagagu

SEQ ID NO: 654142 - RNA, 22 nt, Human
gauuuguggugugaggaagagc

SEQ ID NO: 654143 - RNA, 23 nt, Human
ugaaggccuggaggacgcguugu

SEQ ID NO: 654144 - RNA, 20 nt, Human
ccucaaauaagugccagcau

SEQ ID NO: 654145 - RNA, 20 nt, Human
uacagaaacaggacuuuugg

SEQ ID NO: 654146 - RNA, 22 nt, Human
ccagagucuaugaguccucauu

SEQ ID NO: 654147 - RNA, 18 nt, Human
gagucuuuguuacugcug

SEQ ID NO: 654148 - RNA, 22 nt, Human
aucucucuaugcacugaggacu

SEQ ID NO: 654149 - RNA, 22 nt, Human
uucuacaaauauuuacuguucc

SEQ ID NO: 654150 - RNA, 22 nt, Human
aggaggaacucagaaagaaggu

SEQ ID NO: 654151 - RNA, 22 nt, Human
ccuucaaacuuucauuaaccag

SEQ ID NO: 654152 - RNA, 22 nt, Human
acacugcagaugaaagcauaag

SEQ ID NO: 654153 - RNA, 22 nt, Human
acauuuaaugauccuacuguga

SEQ ID NO: 654154 - RNA, 22 nt, Human
ccccagcaggaauacagggguc

SEQ ID NO: 654155 - RNA, 22 nt, Human
aggucugaguuuguuguuggcu

SEQ ID NO: 654156 - RNA, 21 nt, Human
gcaaccagaccacagggcagu

SEQ ID NO: 654157 - RNA, 22 nt, Human
gagguauguaugcuacauucuu

SEQ ID NO: 654158 - RNA, 22 nt, Human
ucacuuagauggggaucaucac

SEQ ID NO: 654159 - RNA, 22 nt, Human
caguuuagcaaauuuguaucaa

SEQ ID NO: 654160 - RNA, 22 nt, Human
uccugggagaguuugauucauu

SEQ ID NO: 654161 - RNA, 22 nt, Human
acagauaaauuuauaggagugu

SEQ ID NO: 654162 - RNA, 22 nt, Human
gcugugcuggaaggggaccugc

SEQ ID NO: 654163 - RNA, 22 nt, Human
gguucacucucaagucugccua

SEQ ID NO: 654164 - RNA, 22 nt, Human
uucagcuccuuauuucugagca

SEQ ID NO: 654165 - RNA, 22 nt, Human
auuauuauuguugauguuaggg

SEQ ID NO: 654166 - RNA, 22 nt, Human
aggacagagccugugcagaccg

SEQ ID NO: 654167 - RNA, 23 nt, Human
ccuggaguacuaaggggauggaa

SEQ ID NO: 654168 - RNA, 22 nt, Human
auuauaaaccuuugaggguggg

SEQ ID NO: 654169 - RNA, 23 nt, Human
ucugagcugucuuuucagcagaa

SEQ ID NO: 654170 - RNA, 22 nt, Human
agugaacaaagguagugagcau

SEQ ID NO: 654171 - RNA, 22 nt, Human
aaaugacagagcugggacuagu

SEQ ID NO: 654172 - RNA, 22 nt, Human
uagcccagagagccaggggcuu

SEQ ID NO: 654173 - RNA, 22 nt, Human
caggcugggcagccuccccggc

SEQ ID NO: 654174 - RNA, 22 nt, Human
ugcacauucacuuagguauugu

SEQ ID NO: 654175 - RNA, 22 nt, Human
uaguuucugguucuugcucugg

SEQ ID NO: 654176 - RNA, 22 nt, Human
auaaagcuauuccucucuuuuu

SEQ ID NO: 654177 - RNA, 22 nt, Human
gauugaaagacuguuugggaga

SEQ ID NO: 654178 - RNA, 22 nt, Human
uuggaaggaccaggccuugauu

SEQ ID NO: 654179 - RNA, 22 nt, Human
ggccucucucccuggcuugcag

SEQ ID NO: 654180 - RNA, 22 nt, Human
auuaucuauguagaaugauuuu

SEQ ID NO: 654181 - RNA, 22 nt, Human
cagcccagagaaggggcccgug

SEQ ID NO: 654182 - RNA, 22 nt, Human
ugcauuauacuuuuagaaauuu

SEQ ID NO: 654183 - RNA, 22 nt, Human
agccacagccugacuuaacugu

SEQ ID NO: 654184 - RNA, 22 nt, Human
cacauggaagagauacagugag

SEQ ID NO: 654185 - RNA, 22 nt, Human
uaaauugaucguuugggaugaa

SEQ ID NO: 654186 - RNA, 22 nt, Human
uucacaauggcaaaccauuaaa

SEQ ID NO: 654187 - RNA, 22 nt, Human
agagccugguucaaauuuuacc

SEQ ID NO: 654188 - RNA, 22 nt, Human
ccugaguagcuggaauuaaagg

SEQ ID NO: 654189 - RNA, 22 nt, Human
aaagcuaccuuuguguucauag

SEQ ID NO: 654190 - RNA, 22 nt, Human
aauuagggaaaauuuacuugua

SEQ ID NO: 654191 - RNA, 21 nt, Human
ggcugcucaccuaggucccaa

SEQ ID NO: 654192 - RNA, 22 nt, Human
aggaaagauggaaggaggauaa

SEQ ID NO: 654193 - RNA, 22 nt, Human
gugcuuuuaaaggcaauuagua

SEQ ID NO: 654194 - RNA, 23 nt, Human
ucucuuaccugagacauuuccua

SEQ ID NO: 654195 - RNA, 22 nt, Human
augugcuuauggucucugguug

SEQ ID NO: 654196 - RNA, 22 nt, Human
aaauagaauuaacuagcuacug

SEQ ID NO: 654197 - RNA, 22 nt, Human
uuugggcaguagauguaucacu

SEQ ID NO: 654198 - RNA, 22 nt, Human
gaaguauaugucuuuaaucuau

SEQ ID NO: 654199 - RNA, 23 nt, Human
ggcagcucucaucugaugacuga

SEQ ID NO: 654200 - RNA, 22 nt, Human
uaugcacauucacacaaaaaug

SEQ ID NO: 654201 - RNA, 22 nt, Human
gccuucugauaucucuuggcau

SEQ ID NO: 654202 - RNA, 22 nt, Human
acagaauauuguaagugccacu

SEQ ID NO: 654203 - RNA, 22 nt, Human
ucuggagaaaguugaguuugug

SEQ ID NO: 654204 - RNA, 19 nt, Human
ugggcagcucccucugucc

SEQ ID NO: 654205 - RNA, 22 nt, Human
ccuccucugggaagauucagag

SEQ ID NO: 654206 - RNA, 22 nt, Human
ugguagugacucccccagggcu

SEQ ID NO: 654207 - RNA, 22 nt, Human
gguaggggcagggccaagcugu

SEQ ID NO: 654208 - RNA, 22 nt, Human
uucaagucuguuucauugcaug

SEQ ID NO: 654209 - RNA, 22 nt, Human
cagagacaggcuugcccuccac

SEQ ID NO: 654210 - RNA, 23 nt, Human
agcuucaucuugcugugucucag

SEQ ID NO: 654211 - RNA, 22 nt, Human
ggugagcaaagcuucaucugua

SEQ ID NO: 654212 - RNA, 22 nt, Human
uggaagcggacguuguggggug

SEQ ID NO: 654213 - RNA, 22 nt, Human
ggagaugccagaauugcaaauu

SEQ ID NO: 654214 - RNA, 22 nt, Human
cugaggaaggcugggggcaucc

SEQ ID NO: 654215 - RNA, 22 nt, Human
gaucacaguauuuuagaugugu

SEQ ID NO: 654216 - RNA, 22 nt, Human
agccaaagugguauauagggaa

SEQ ID NO: 654217 - RNA, 22 nt, Human
caaugcuuuuguucuuuacuca

SEQ ID NO: 654218 - RNA, 23 nt, Human
agcugaggugcagauccaaagaa

SEQ ID NO: 654219 - RNA, 22 nt, Human
agcuggggguuggauaagggua

SEQ ID NO: 654220 - RNA, 22 nt, Human
cuucagaauccagaaucagaau

SEQ ID NO: 654221 - RNA, 22 nt, Human
ucauuguuauguuuugcugucu

SEQ ID NO: 654222 - RNA, 22 nt, Human
ucagcaggcgguuccuuguggg

SEQ ID NO: 654223 - RNA, 22 nt, Human
gcuggcagggacagcugcgugu

SEQ ID NO: 654224 - RNA, 18 nt, Human
ucucucugaagaguuccc

SEQ ID NO: 654225 - RNA, 21 nt, Human
ccauaauuuuguuucagaagu

SEQ ID NO: 654226 - RNA, 22 nt, Human
acagugcagggcgggaagaagg

SEQ ID NO: 654227 - RNA, 22 nt, Human
acacagaagcuuuuucuauucc

SEQ ID NO: 654228 - RNA, 22 nt, Human
agcagcucauggaguaggcacu

SEQ ID NO: 654229 - RNA, 22 nt, Human
gagugguuagaaguaguguggc

SEQ ID NO: 654230 - RNA, 23 nt, Human
auuacaugagcaaauauagcuau

SEQ ID NO: 654231 - RNA, 22 nt, Human
uucugacauauccagucucagu

SEQ ID NO: 654232 - RNA, 22 nt, Human
gagagucugguagagcagcaag

SEQ ID NO: 654233 - RNA, 22 nt, Human
uggggccagagauggggcgcag

SEQ ID NO: 654234 - RNA, 22 nt, Human
ggugcauggaaagaguaaguaa

SEQ ID NO: 654235 - RNA, 19 nt, Human
cacaacuucgcuugauucc

SEQ ID NO: 654236 - RNA, 22 nt, Human
uugauucacaauuaccaagacu

SEQ ID NO: 654237 - RNA, 22 nt, Human
ugauuacagucugacagauguu

SEQ ID NO: 654238 - RNA, 22 nt, Human
aggcaugugacccuggacucag

SEQ ID NO: 654239 - RNA, 22 nt, Human
auggccacauuuaguaacuggu

SEQ ID NO: 654240 - RNA, 18 nt, Human
aguccuucuugguuuuac

SEQ ID NO: 654241 - RNA, 21 nt, Human
acacacugaguuuuccacugu

SEQ ID NO: 654242 - RNA, 22 nt, Human
uagcagcacaaauggacuauga

SEQ ID NO: 654243 - RNA, 22 nt, Human
gacuggggaaggacccgagacc

SEQ ID NO: 654244 - RNA, 22 nt, Human
gcuuuucuauaagaacuuucaa

SEQ ID NO: 654245 - RNA, 22 nt, Human
cauuuguaguaucuguuuauau

SEQ ID NO: 654246 - RNA, 22 nt, Human
cuuuagacauacagaauuucca

SEQ ID NO: 654247 - RNA, 22 nt, Human
ccagagccggauugugaagugc

SEQ ID NO: 654248 - RNA, 22 nt, Human
ucuuugcacacagcgauucuuc

SEQ ID NO: 654249 - RNA, 22 nt, Human
auuauucaacacuugagaaauu

SEQ ID NO: 654250 - RNA, 22 nt, Human
ucagaagcaaacaucacucuag

SEQ ID NO: 654251 - RNA, 22 nt, Human
agcauuugaaaacuauuuaauu

SEQ ID NO: 654252 - RNA, 22 nt, Human
ucaggaguaaagaagacuugac

SEQ ID NO: 654253 - RNA, 22 nt, Human
ucagagaacacagaggugaugu

SEQ ID NO: 654254 - RNA, 22 nt, Human
ucucuggcuccugccgggucca

SEQ ID NO: 654255 - RNA, 22 nt, Human
uugaaauggcagcagcugaccu

SEQ ID NO: 654256 - RNA, 22 nt, Human
accaggagggacccugguggcc

SEQ ID NO: 654257 - RNA, 22 nt, Human
cuguccuaugaguacucacuag

SEQ ID NO: 654258 - RNA, 22 nt, Human
cuggcuuucugaacaucaguga

SEQ ID NO: 654259 - RNA, 19 nt, Human
acagggcucuggacgccau

SEQ ID NO: 654260 - RNA, 22 nt, Human
cuucaaacccagauuaaaugca

SEQ ID NO: 654261 - RNA, 22 nt, Human
aagauguuuagguaaaaaguuu

SEQ ID NO: 654262 - RNA, 22 nt, Human
uccagggcuacaaggcaccaga

SEQ ID NO: 654263 - RNA, 22 nt, Human
uuauacgcucaauccuaucauc

SEQ ID NO: 654264 - RNA, 22 nt, Human
agcaggcagcaugggacccucc

SEQ ID NO: 654265 - RNA, 22 nt, Human
auaaagcuauuuuuaauucugu

SEQ ID NO: 654266 - RNA, 22 nt, Human
guuuuccuguugaguaguauuc

SEQ ID NO: 654267 - RNA, 22 nt, Human
aauuagcauuucccauauaaau

SEQ ID NO: 654268 - RNA, 22 nt, Human
uggaauuuaguuaauuccauuu

SEQ ID NO: 654269 - RNA, 22 nt, Human
ucugugccaucagucuccagag

SEQ ID NO: 654270 - RNA, 22 nt, Human
uacacauaggucugaauaaaaa

SEQ ID NO: 654271 - RNA, 22 nt, Human
ucugaaauuguuaguaaaaaug

SEQ ID NO: 654272 - RNA, 22 nt, Human
uggggaagggcacccuggagac

SEQ ID NO: 654273 - RNA, 22 nt, Human
uuauuugaaugauggcacaauu

SEQ ID NO: 654274 - RNA, 22 nt, Human
agggggcugccaaggaauguaa

SEQ ID NO: 654275 - RNA, 22 nt, Human
gccucuccgagccacugccucu

SEQ ID NO: 654276 - RNA, 22 nt, Human
ucuuuggaaugcuagcauucua

SEQ ID NO: 654277 - RNA, 22 nt, Human
auuuugaugcuaucuaaugaau

SEQ ID NO: 654278 - RNA, 21 nt, Human
aguuuuauauuauaagcuaaa

SEQ ID NO: 654279 - RNA, 22 nt, Human
agccugcuucccuuugugcccc

SEQ ID NO: 654280 - RNA, 22 nt, Human
gccuaggagacaagcgugaaag

SEQ ID NO: 654281 - RNA, 22 nt, Human
uguuuacuucaucgaguacuuc

SEQ ID NO: 654282 - RNA, 22 nt, Human
aaucuagucuccuuaagucuuu

SEQ ID NO: 654283 - RNA, 22 nt, Human
cccaggcagugugugcaugcgu

SEQ ID NO: 654284 - RNA, 22 nt, Human
uccagcagguuggucaggugca

SEQ ID NO: 654285 - RNA, 22 nt, Human
agucuuaacuaugcaaguacua

SEQ ID NO: 654286 - RNA, 22 nt, Human
ugucuucgcuacaaugaaaagg

SEQ ID NO: 654287 - RNA, 22 nt, Human
ggagucuggaguggggcccaag

SEQ ID NO: 654288 - RNA, 22 nt, Human
aaaccugaaguacguuacauaa

SEQ ID NO: 654289 - RNA, 22 nt, Human
aggucugacucuuugccacaua

SEQ ID NO: 654290 - RNA, 20 nt, Human
gggugaggauggagaauuug

SEQ ID NO: 654291 - RNA, 22 nt, Human
gugcuucucuucacacccaacu

SEQ ID NO: 654292 - RNA, 22 nt, Human
aaggggccucacagaugggcuu

SEQ ID NO: 654293 - RNA, 22 nt, Human
cuccguuuugugggacacggau

SEQ ID NO: 654294 - RNA, 22 nt, Human
agagccuguuuugugggagaug

SEQ ID NO: 654295 - RNA, 22 nt, Human
aagugugggaaguugcuaaaau

SEQ ID NO: 654296 - RNA, 22 nt, Human
cuuuacacuuggacccacacuu

SEQ ID NO: 654297 - RNA, 22 nt, Human
caagaaaucuagaagucagugg

SEQ ID NO: 654298 - RNA, 21 nt, Human
aaugaugaaagaugacagagu

SEQ ID NO: 654299 - RNA, 22 nt, Human
ggcaauauggugaaaccccauc

SEQ ID NO: 654300 - RNA, 22 nt, Human
aaauggcugacuuuucauggga

SEQ ID NO: 654301 - RNA, 22 nt, Human
ucugggccucaccugcugcuca

SEQ ID NO: 654302 - RNA, 22 nt, Human
uuuaguguaauucugccuuuug

SEQ ID NO: 654303 - RNA, 22 nt, Human
gugggcuggacccuccugcucc

SEQ ID NO: 654304 - RNA, 22 nt, Human
ccucuggcagccagccaguugu

SEQ ID NO: 654305 - RNA, 22 nt, Human
ccagugggugcugggcucugcc

SEQ ID NO: 654306 - RNA, 18 nt, Human
cagugaggaugaaggguu

SEQ ID NO: 654307 - RNA, 22 nt, Human
aggugacaggacaggagcuggu

SEQ ID NO: 654308 - RNA, 22 nt, Human
cugaaaggguuacauaguaagu

SEQ ID NO: 654309 - RNA, 22 nt, Human
uuugacaucuaagaauucuuac

SEQ ID NO: 654310 - RNA, 20 nt, Human
guuugaaaugauugguuggu

SEQ ID NO: 654311 - RNA, 22 nt, Human
gcccccucaaagaggaagcucu

SEQ ID NO: 654312 - RNA, 22 nt, Human
auucucuggcuaaaaccugaag

SEQ ID NO: 654313 - RNA, 22 nt, Human
cacaggccugucucuuucuaac

SEQ ID NO: 654314 - RNA, 22 nt, Human
aagaacuuuaaagcacuuauga

SEQ ID NO: 654315 - RNA, 22 nt, Human
uggcucaguggcagccgcagcu

SEQ ID NO: 654316 - RNA, 22 nt, Human
uuccugcaaaacuacuaguagc

SEQ ID NO: 654317 - RNA, 22 nt, Human
ucugagcagggcaguguccaug

SEQ ID NO: 654318 - RNA, 22 nt, Human
uuuccugccuggaccucugcuu

SEQ ID NO: 654319 - RNA, 23 nt, Human
cuguuaaauuccuuaagagcagg

SEQ ID NO: 654320 - RNA, 22 nt, Human
ggcuuugcaaacucauuccaca

SEQ ID NO: 654321 - RNA, 22 nt, Human
caggaagcugugaaggagacgg

SEQ ID NO: 654322 - RNA, 22 nt, Human
gaggacugaaacuuacaggaaa

SEQ ID NO: 654323 - RNA, 21 nt, Human
gccaagaacaagacagacaug

SEQ ID NO: 654324 - RNA, 22 nt, Human
aguucccuccacaacuucucac

SEQ ID NO: 654325 - RNA, 22 nt, Human
cuagagaauggcaaagauuaga

SEQ ID NO: 654326 - RNA, 22 nt, Human
cucagcuccaggugugcaucuu

SEQ ID NO: 654327 - RNA, 22 nt, Human
agcaguuaugugucucuugacu

SEQ ID NO: 654328 - RNA, 22 nt, Human
gucuucuuguuuugaaggaaau

SEQ ID NO: 654329 - RNA, 22 nt, Human
uagggcuucaggugugaggcag

SEQ ID NO: 654330 - RNA, 22 nt, Human
auggggagagaagggcugagcu

SEQ ID NO: 654331 - RNA, 22 nt, Human
cacuaggcgccggguggcugug

SEQ ID NO: 654332 - RNA, 22 nt, Human
ucagauagugauaauagcaugu

SEQ ID NO: 654333 - RNA, 22 nt, Human
guaggggugcugagaucuggaa

SEQ ID NO: 654334 - RNA, 22 nt, Human
uggcacaugguuaaucauaauu

SEQ ID NO: 654335 - RNA, 18 nt, Human
ugacccuuucucccugug

SEQ ID NO: 654336 - RNA, 22 nt, Human
gcuggaagggaggcccagccgg

SEQ ID NO: 654337 - RNA, 22 nt, Human
ggguccagcuacaucagggugg

SEQ ID NO: 654338 - RNA, 22 nt, Human
ccugggcauaaaucacuccaag

SEQ ID NO: 654339 - RNA, 22 nt, Human
cacuucaaggaauaucuagaaa

SEQ ID NO: 654340 - RNA, 22 nt, Human
aaccuaggacuauagauaucau

SEQ ID NO: 654341 - RNA, 22 nt, Human
acauaauagguaccugaauaau

SEQ ID NO: 654342 - RNA, 22 nt, Human
cauuugaaugagauugcuguaa

SEQ ID NO: 654343 - RNA, 22 nt, Human
uugugaauagugcugcaauaaa

SEQ ID NO: 654344 - RNA, 22 nt, Human
aaaaaggcuaagcaucuugugc

SEQ ID NO: 654345 - RNA, 22 nt, Human
uaugcacacauuagcacagggu

SEQ ID NO: 654346 - RNA, 22 nt, Human
ggaguggcacucugaggcgggg

SEQ ID NO: 654347 - RNA, 22 nt, Human
acacuguaaagugaugcuuaaa

SEQ ID NO: 654348 - RNA, 22 nt, Human
augcugugucaggaauuugaua

SEQ ID NO: 654349 - RNA, 22 nt, Human
uauacaauggcugaaucaucca

SEQ ID NO: 654350 - RNA, 22 nt, Human
ugucacaguuuguacuuuauag

SEQ ID NO: 654351 - RNA, 22 nt, Human
uuggcugucacugucaguucag

SEQ ID NO: 654352 - RNA, 22 nt, Human
ggcagggcagcgcugauuaggg

SEQ ID NO: 654353 - RNA, 22 nt, Human
auucaagagcuggcuuugaaau

SEQ ID NO: 654354 - RNA, 19 nt, Human
ugcuggaggguagugaguc

SEQ ID NO: 654355 - RNA, 23 nt, Human
acuuucccauagcauggcuuccu

SEQ ID NO: 654356 - RNA, 22 nt, Human
agcauguguggagaaauauuuu

SEQ ID NO: 654357 - RNA, 22 nt, Human
uuucuccugaguuccacgcuac

SEQ ID NO: 654358 - RNA, 22 nt, Human
ugcaauacucaucauuggagau

SEQ ID NO: 654359 - RNA, 23 nt, Human
ccucaugaaggucugcuuccugg

SEQ ID NO: 654360 - RNA, 22 nt, Human
ucugggcugugguuccacuccg

SEQ ID NO: 654361 - RNA, 22 nt, Human
aucuugaaugaaugacucuuua

SEQ ID NO: 654362 - RNA, 22 nt, Human
aaacagugcaggaaguuaagca

SEQ ID NO: 654363 - RNA, 22 nt, Human
uccaagaauacagauuugugaa

SEQ ID NO: 654364 - RNA, 22 nt, Human
uugcaaauuaaagaggauagca

SEQ ID NO: 654365 - RNA, 22 nt, Human
gggccagguggaccccagccuc

SEQ ID NO: 654366 - RNA, 22 nt, Human
uuaguuagucccugguaccuuu

SEQ ID NO: 654367 - RNA, 22 nt, Human
auggguggagggugacacggau

SEQ ID NO: 654368 - RNA, 22 nt, Human
ccucaggaaccacauugcugcu

SEQ ID NO: 654369 - RNA, 22 nt, Human
cccuuuaaaguuuuaccagcag

SEQ ID NO: 654370 - RNA, 16 nt, Human
gcuggaguccuggagc

SEQ ID NO: 654371 - RNA, 22 nt, Human
ugccuuuaaccagucuagacag

SEQ ID NO: 654372 - RNA, 19 nt, Human
ucacccaggcugcuggcuc

SEQ ID NO: 654373 - RNA, 22 nt, Human
gcaauacuaagugacuuuuggg

SEQ ID NO: 654374 - RNA, 20 nt, Human
cccagcccgggccgcgcucg

SEQ ID NO: 654375 - RNA, 22 nt, Human
agcugggcuccaagagggaucu

SEQ ID NO: 654376 - RNA, 22 nt, Human
ccaugcauggcacuggacuggg

SEQ ID NO: 654377 - RNA, 22 nt, Human
aaagacugguguguuacauaua

SEQ ID NO: 654378 - RNA, 22 nt, Human
cuacacuuguucgacugcagga

SEQ ID NO: 654379 - RNA, 20 nt, Human
uacaacaaguagagacauac

SEQ ID NO: 654380 - RNA, 22 nt, Human
gggucagcugcugggggcugac

SEQ ID NO: 654381 - RNA, 22 nt, Human
agcuuuggauuucuuauagccc

SEQ ID NO: 654382 - RNA, 22 nt, Human
cugccuuugcccuugacacugu

SEQ ID NO: 654383 - RNA, 22 nt, Human
auagaucacaaugguucacuuu

SEQ ID NO: 654384 - RNA, 22 nt, Human
uacauugcuuucuaauacaucu

SEQ ID NO: 654385 - RNA, 22 nt, Human
cuucaguuaguuucaugugagc

SEQ ID NO: 654386 - RNA, 22 nt, Human
uggagcugagagccaggcuggc

SEQ ID NO: 654387 - RNA, 22 nt, Human
gcuggaggaggaagugugaggg

SEQ ID NO: 654388 - RNA, 22 nt, Human
ugucugucagauauuaaguuuc

SEQ ID NO: 654389 - RNA, 22 nt, Human
uuaaaggcuauggcugccuggg

SEQ ID NO: 654390 - RNA, 22 nt, Human
agcuuucucccugacgcuuugg

SEQ ID NO: 654391 - RNA, 23 nt, Human
ggaguuggauuguacuugcugcu

SEQ ID NO: 654392 - RNA, 22 nt, Human
aacuggagccccucugccacug

SEQ ID NO: 654393 - RNA, 18 nt, Human
ggagggcuuuggggacug

SEQ ID NO: 654394 - RNA, 18 nt, Human
uuucuuucugccuggggc

SEQ ID NO: 654395 - RNA, 17 nt, Human
auguuaauuucacauuu

SEQ ID NO: 654396 - RNA, 19 nt, Human
cuggaaugauagagaccuc

SEQ ID NO: 654397 - RNA, 22 nt, Human
ugagcaccuaccuuguccagug

SEQ ID NO: 654398 - RNA, 22 nt, Human
ccuggcucugggaucuucgcuu

SEQ ID NO: 654399 - RNA, 22 nt, Human
ccacucugauuuuggcuccacu

SEQ ID NO: 654400 - RNA, 21 nt, Human
cccaggcugaauuaaaaauau

SEQ ID NO: 654401 - RNA, 22 nt, Human
gucaauaucuugguuguacuau

SEQ ID NO: 654402 - RNA, 22 nt, Human
agccugugugaagcccucagag

SEQ ID NO: 654403 - RNA, 22 nt, Human
aagggcugaucucacuuucuuu

SEQ ID NO: 654404 - RNA, 22 nt, Human
gcacaauaauucuuguuuugcu

SEQ ID NO: 654405 - RNA, 22 nt, Human
agaugcuuacuaugguuguaug

SEQ ID NO: 654406 - RNA, 22 nt, Human
auagauugcuaguuuuaaaauu

SEQ ID NO: 654407 - RNA, 22 nt, Human
uugccugggcuaguaagccaga

SEQ ID NO: 654408 - RNA, 22 nt, Human
aaggaagauauaucaagcuuaa

SEQ ID NO: 654409 - RNA, 22 nt, Human
auggcugugaaggucacacccu

SEQ ID NO: 654410 - RNA, 22 nt, Human
caggacuauguucaacagauag

SEQ ID NO: 654411 - RNA, 22 nt, Human
acccaggacucucuuccaguag

SEQ ID NO: 654412 - RNA, 19 nt, Human
agcacaguuuccacaugca

SEQ ID NO: 654413 - RNA, 22 nt, Human
uuccugaggugauucuaaugug

SEQ ID NO: 654414 - RNA, 22 nt, Human
ugaguauuccuuaucugaaaug

SEQ ID NO: 654415 - RNA, 22 nt, Human
guggcccaggcuuggcgcuggc

SEQ ID NO: 654416 - RNA, 19 nt, Human
caauauauagugaguggau

SEQ ID NO: 654417 - RNA, 22 nt, Human
uuacacaugaagguccaauguu

SEQ ID NO: 654418 - RNA, 22 nt, Human
gcacauaugcuguaagcacaug

SEQ ID NO: 654419 - RNA, 22 nt, Human
auuuuacuaaguggauaucugu

SEQ ID NO: 654420 - RNA, 22 nt, Human
agcaaggcagucagcuggcugg

SEQ ID NO: 654421 - RNA, 22 nt, Human
cuuuacagauggauaauuguuu

SEQ ID NO: 654422 - RNA, 22 nt, Human
aagaggaggacgguucccagaa

SEQ ID NO: 654423 - RNA, 22 nt, Human
uaucuuuaacuugcaguauuua

SEQ ID NO: 654424 - RNA, 22 nt, Human
ucuccuuucuggagccugcuca

SEQ ID NO: 654425 - RNA, 22 nt, Human
cacagaagaaucaugcuguguu

SEQ ID NO: 654426 - RNA, 22 nt, Human
uccuggggcugcaaggccuguc

SEQ ID NO: 654427 - RNA, 22 nt, Human
aaacaucuuucuauugcaaguu

SEQ ID NO: 654428 - RNA, 22 nt, Human
aauuugaugaguuuguaagucu

SEQ ID NO: 654429 - RNA, 22 nt, Human
gggcccuggccgaaucccucug

SEQ ID NO: 654430 - RNA, 22 nt, Human
augcacuaugaugagcuagucu

SEQ ID NO: 654431 - RNA, 19 nt, Human
acccagagcccuuugcagg

SEQ ID NO: 654432 - RNA, 22 nt, Human
caugcaaaugugcuaaucugaa

SEQ ID NO: 654433 - RNA, 22 nt, Human
uuggaggcaaugggaaggaggc

SEQ ID NO: 654434 - RNA, 22 nt, Human
agccagugucgugugacaugag

SEQ ID NO: 654435 - RNA, 22 nt, Human
uaggccagaggagcagcuuugg

SEQ ID NO: 654436 - RNA, 22 nt, Human
caccugagcaacccugugcggg

SEQ ID NO: 654437 - RNA, 20 nt, Human
acugacagggaacuaaggcu

SEQ ID NO: 654438 - RNA, 22 nt, Human
guagaggcagaaacugaaggac

SEQ ID NO: 654439 - RNA, 22 nt, Human
ggacucaggcugguguucggac

SEQ ID NO: 654440 - RNA, 18 nt, Human
ucaugagguagaggcugg

SEQ ID NO: 654441 - RNA, 22 nt, Human
auagcuuucuuaaauauauaaa

SEQ ID NO: 654442 - RNA, 22 nt, Human
cauugcacuccaucuugggcaa

SEQ ID NO: 654443 - RNA, 22 nt, Human
cugaaggagcauagucaguuuu

SEQ ID NO: 654444 - RNA, 22 nt, Human
aagagcaucuauuucacagugg

SEQ ID NO: 654445 - RNA, 23 nt, Human
augcaggacuuauaagguaaggu

SEQ ID NO: 654446 - RNA, 22 nt, Human
uguagaaccuguuuauuauaga

SEQ ID NO: 654447 - RNA, 22 nt, Human
guggcagagaacaaggagaggu

SEQ ID NO: 654448 - RNA, 19 nt, Human
ggcugcagagccccggcgc

SEQ ID NO: 654449 - RNA, 22 nt, Human
gacagugguuccaaggcagcuu

SEQ ID NO: 654450 - RNA, 22 nt, Human
aaaauuauggaguaucccaaag

SEQ ID NO: 654451 - RNA, 22 nt, Human
ucuuuugugauucuuuaguuac

SEQ ID NO: 654452 - RNA, 20 nt, Human
uccaguggccugaaucugga

SEQ ID NO: 654453 - RNA, 22 nt, Human
ccucagacuugauaauuggguu

SEQ ID NO: 654454 - RNA, 22 nt, Human
uccuggcccggccgggccugcu

SEQ ID NO: 654455 - RNA, 22 nt, Human
ggguaggaaauccagagguggc

SEQ ID NO: 654456 - RNA, 22 nt, Human
gguaacugcagaaugugccuca

SEQ ID NO: 654457 - RNA, 22 nt, Human
gucacaggccuggaugaggggc

SEQ ID NO: 654458 - RNA, 22 nt, Human
auaaacaucuguuucucuucug

SEQ ID NO: 654459 - RNA, 19 nt, Human
ccagcccacagugacuuuc

SEQ ID NO: 654460 - RNA, 22 nt, Human
ucaggggcagcugugcuuugug

SEQ ID NO: 654461 - RNA, 22 nt, Human
cuuauucagaaggagaaaugga

SEQ ID NO: 654462 - RNA, 22 nt, Human
cuaggccauauuuugagaacug

SEQ ID NO: 654463 - RNA, 19 nt, Human
ugagaacuuuuacuuaugc

SEQ ID NO: 654464 - RNA, 22 nt, Human
cacaaggacuggauggaguggg

SEQ ID NO: 654465 - RNA, 22 nt, Human
uucugugacuccucagagauuu

SEQ ID NO: 654466 - RNA, 22 nt, Human
agcuccagccgcugauggguuu

SEQ ID NO: 654467 - RNA, 22 nt, Human
uaacaguacauccuuuucucuu

SEQ ID NO: 654468 - RNA, 22 nt, Human
ugacauaauaauccaaacauac

SEQ ID NO: 654469 - RNA, 22 nt, Human
gauggcagcagcagccagggau

SEQ ID NO: 654470 - RNA, 22 nt, Human
gaaaugaugucugugcugccac

SEQ ID NO: 654471 - RNA, 22 nt, Human
cugcauuucacauuuaaacuuu

SEQ ID NO: 654472 - RNA, 18 nt, Human
ucugggcaaucucaguau

SEQ ID NO: 654473 - RNA, 22 nt, Human
acaguggaaaugugggagggga

SEQ ID NO: 654474 - RNA, 22 nt, Human
aggcagugugggccaagcuucc

SEQ ID NO: 654475 - RNA, 22 nt, Human
agcuucacuuuguacuuuguca

SEQ ID NO: 654476 - RNA, 22 nt, Human
gacacauugaugugaguacaua

SEQ ID NO: 654477 - RNA, 22 nt, Human
uugagucaguaauuccauuucu

SEQ ID NO: 654478 - RNA, 22 nt, Human
uugaggcagguccggguccuuc

SEQ ID NO: 654479 - RNA, 22 nt, Human
cacugucuugauuacuaugggu

SEQ ID NO: 654480 - RNA, 22 nt, Human
aaaggucaagcuggacucaggu

SEQ ID NO: 654481 - RNA, 22 nt, Human
cuguccuuacugcuucuggcuu

SEQ ID NO: 654482 - RNA, 20 nt, Human
uggcuccugcgguggaacca

SEQ ID NO: 654483 - RNA, 22 nt, Human
accaagcuguauauuauugguu

SEQ ID NO: 654484 - RNA, 20 nt, Human
guuaggagguuggacaugga

SEQ ID NO: 654485 - RNA, 22 nt, Human
aagcccagcucugccugcucug

SEQ ID NO: 654486 - RNA, 22 nt, Human
uguucauuuggcccuuuuguau

SEQ ID NO: 654487 - RNA, 22 nt, Human
gagauucucagaaguacuagga

SEQ ID NO: 654488 - RNA, 22 nt, Human
ggcuguguccuguaugauuauu

SEQ ID NO: 654489 - RNA, 22 nt, Human
ccugaggucaugguccaguguu

SEQ ID NO: 654490 - RNA, 22 nt, Human
aacaguguguacacaucauagg

SEQ ID NO: 654491 - RNA, 22 nt, Human
ucauggcacuuagcacaguccu

SEQ ID NO: 654492 - RNA, 22 nt, Human
aauauuucaaaaggaaacacag

SEQ ID NO: 654493 - RNA, 22 nt, Human
aagagguggguuggacagauac

SEQ ID NO: 654494 - RNA, 22 nt, Human
ugacugugcaagcagagagcau

SEQ ID NO: 654495 - RNA, 22 nt, Human
agacaaaugguaauuaugucua

SEQ ID NO: 654496 - RNA, 22 nt, Human
ucgaagguuauugucuuuacgu

SEQ ID NO: 654497 - RNA, 22 nt, Human
aaucauaauuguauacauucau

SEQ ID NO: 654498 - RNA, 22 nt, Human
uguaaacaaaugcauucuugcu

SEQ ID NO: 654499 - RNA, 22 nt, Human
gaguuguucaacgugugugaaa

SEQ ID NO: 654500 - RNA, 22 nt, Human
aagcauuuuagauaaagcauca

SEQ ID NO: 654501 - RNA, 22 nt, Human
ccagcuguuggaguuucacugc

SEQ ID NO: 654502 - RNA, 22 nt, Human
acugccugcauccuuaggguag

SEQ ID NO: 654503 - RNA, 22 nt, Human
aaucuggcucagaagaagauga

SEQ ID NO: 654504 - RNA, 18 nt, Human
gccagcugcacggcccuc

SEQ ID NO: 654505 - RNA, 22 nt, Human
aacaaaguuucaggaagauaga

SEQ ID NO: 654506 - RNA, 20 nt, Human
agcaggugacggggccugcu

SEQ ID NO: 654507 - RNA, 22 nt, Human
aagacauucaugaagaagggau

SEQ ID NO: 654508 - RNA, 22 nt, Human
ucaggaaggagcuggccugcca

SEQ ID NO: 654509 - RNA, 22 nt, Human
gaggaggccaguggaaggaagc

SEQ ID NO: 654510 - RNA, 22 nt, Human
ugggucagauugagccccuggu

SEQ ID NO: 654511 - RNA, 22 nt, Human
agucuucccugugccagagugu

SEQ ID NO: 654512 - RNA, 22 nt, Human
guuucagaaaugguuuaugcaa

SEQ ID NO: 654513 - RNA, 22 nt, Human
ugcaguguuuggaugcugaguc

SEQ ID NO: 654514 - RNA, 22 nt, Human
ucugugucuguuacuucacugc

SEQ ID NO: 654515 - RNA, 22 nt, Human
cccagagccgcuccccuacuuc

SEQ ID NO: 654516 - RNA, 22 nt, Human
cuggcagauuggggucagcagu

SEQ ID NO: 654517 - RNA, 22 nt, Human
ucauggcuggaagcucaguuag

SEQ ID NO: 654518 - RNA, 22 nt, Human
gcacccagagggcagggucucc

SEQ ID NO: 654519 - RNA, 22 nt, Human
ucuccagggacauguuucugga

SEQ ID NO: 654520 - RNA, 22 nt, Human
ugcagagcagcaacugcgugcg

SEQ ID NO: 654521 - RNA, 22 nt, Human
ugcuugaugauugcugucuccc

SEQ ID NO: 654522 - RNA, 22 nt, Human
ggcugugccucaaggcuacuca

SEQ ID NO: 654523 - RNA, 22 nt, Human
acacauucaugagugcaugcac

SEQ ID NO: 654524 - RNA, 22 nt, Human
caaagaaggaacuauaauccca

SEQ ID NO: 654525 - RNA, 22 nt, Human
gagucgagcagaaagccgucgg

SEQ ID NO: 654526 - RNA, 22 nt, Human
ugcucuggaguggcuugugcac

SEQ ID NO: 654527 - RNA, 22 nt, Human
acuggccaggcgaaccacacug

SEQ ID NO: 654528 - RNA, 21 nt, Human
ugcuggccaugugcugggcau

SEQ ID NO: 654529 - RNA, 21 nt, Human
acagaugggaugagcacacug

SEQ ID NO: 654530 - RNA, 22 nt, Human
gcuuuagaaauaucacugugga

SEQ ID NO: 654531 - RNA, 22 nt, Human
ccucuggccauucuuugaugga

SEQ ID NO: 654532 - RNA, 22 nt, Human
ugaguccugucuuugucacuua

SEQ ID NO: 654533 - RNA, 22 nt, Human
acauguuugccugcaggcuuag

SEQ ID NO: 654534 - RNA, 22 nt, Human
gaagaagcaggaguguguagca

SEQ ID NO: 654535 - RNA, 22 nt, Human
aauguacaucucaguguaguac

SEQ ID NO: 654536 - RNA, 22 nt, Human
cagagccccucagcucucuccc

SEQ ID NO: 654537 - RNA, 22 nt, Human
ugcacuuugcaggcauggaaac

SEQ ID NO: 654538 - RNA, 22 nt, Human
ggaaggguuuaagcaggagagu

SEQ ID NO: 654539 - RNA, 22 nt, Human
gcacugccugugagcccugguu

SEQ ID NO: 654540 - RNA, 22 nt, Human
ucuucaaagcauaugcaggcau

SEQ ID NO: 654541 - RNA, 22 nt, Human
aucuacucaguaacugcuuagg

SEQ ID NO: 654542 - RNA, 19 nt, Human
cugugagucuuguggccuc

SEQ ID NO: 654543 - RNA, 22 nt, Human
cuauucugcuugaaauuauucu

SEQ ID NO: 654544 - RNA, 22 nt, Human
ccucugggugacagacucuugg

SEQ ID NO: 654545 - RNA, 22 nt, Human
aagcugaaucugaaauagaauu

SEQ ID NO: 654546 - RNA, 22 nt, Human
aacuugaacugaugaguguuag

SEQ ID NO: 654547 - RNA, 22 nt, Human
ugucuuuggaauauuuagcuga

SEQ ID NO: 654548 - RNA, 20 nt, Human
ggcucaucuugucugcugac

SEQ ID NO: 654549 - RNA, 22 nt, Human
ugcccucauuauaagaggcuca

SEQ ID NO: 654550 - RNA, 22 nt, Human
cagauucugggcccagcuuguc

SEQ ID NO: 654551 - RNA, 22 nt, Human
uggcugaauaauauucuguugu

SEQ ID NO: 654552 - RNA, 22 nt, Human
uugcuucuggaacuuucuguuc

SEQ ID NO: 654553 - RNA, 22 nt, Human
agagcaggggcaauguguugca

SEQ ID NO: 654554 - RNA, 22 nt, Human
caggcugaucagggcugggaug

SEQ ID NO: 654555 - RNA, 22 nt, Human
gaauaucccgcuaugcaaagua

SEQ ID NO: 654556 - RNA, 23 nt, Human
ccuccccaccagacucuaacaua

SEQ ID NO: 654557 - RNA, 22 nt, Human
acaaggcacuuuaugaagagga

SEQ ID NO: 654558 - RNA, 22 nt, Human
ucagcucaucugagugucagcg

SEQ ID NO: 654559 - RNA, 22 nt, Human
uuuugaaagccagguuuguaug

SEQ ID NO: 654560 - RNA, 22 nt, Human
gggacaauggaggccucucucc

SEQ ID NO: 654561 - RNA, 22 nt, Human
ugaagagauagaaguacaugcu

SEQ ID NO: 654562 - RNA, 22 nt, Human
aggcuucaguuguaccuucuug

SEQ ID NO: 654563 - RNA, 22 nt, Human
ggcaggacauugacuacaguga

SEQ ID NO: 654564 - RNA, 22 nt, Human
uaggaacuaguagauguguaaa

SEQ ID NO: 654565 - RNA, 21 nt, Human
ugcaccugugccccauccuuc

SEQ ID NO: 654566 - RNA, 22 nt, Human
gagagggcugccuggugugagg

SEQ ID NO: 654567 - RNA, 22 nt, Human
acauuucagauguaaugugaug

SEQ ID NO: 654568 - RNA, 22 nt, Human
ucacugggcaucggagcugaaa

SEQ ID NO: 654569 - RNA, 23 nt, Human
gagguacagcaccagugaauagg

SEQ ID NO: 654570 - RNA, 22 nt, Human
gcagcugcucacauucucacaa

SEQ ID NO: 654571 - RNA, 22 nt, Human
uguggaaagucaaguuccagga

SEQ ID NO: 654572 - RNA, 22 nt, Human
ggaaaugugggcuguuucugua

SEQ ID NO: 654573 - RNA, 22 nt, Human
ugagcagaugucuaacuuuuac

SEQ ID NO: 654574 - RNA, 22 nt, Human
gcagugaagauggcagguuggg

SEQ ID NO: 654575 - RNA, 22 nt, Human
ucuggguaaucagggcugggag

SEQ ID NO: 654576 - RNA, 20 nt, Human
aucagaagugauauuaacca

SEQ ID NO: 654577 - RNA, 22 nt, Human
aguggggacaaugagagcaggu

SEQ ID NO: 654578 - RNA, 22 nt, Human
ccccuuccaggaagcagaaucg

SEQ ID NO: 654579 - RNA, 22 nt, Human
uaguuuuagcagcaaugggaug

SEQ ID NO: 654580 - RNA, 22 nt, Human
cugaucccauuggcaguccagu

SEQ ID NO: 654581 - RNA, 22 nt, Human
cuacaugaacucuuaagucaca

SEQ ID NO: 654582 - RNA, 22 nt, Human
ugcccagccuaaacuuggcaag

SEQ ID NO: 654583 - RNA, 22 nt, Human
caccugccugcaggggcuccac

SEQ ID NO: 654584 - RNA, 22 nt, Human
cuagagcuguucugugcacuca

SEQ ID NO: 654585 - RNA, 22 nt, Human
cuguuacauagcuuuucuuaac

SEQ ID NO: 654586 - RNA, 22 nt, Human
aauagcuuuggucaccaucugg

SEQ ID NO: 654587 - RNA, 22 nt, Human
cugagguguugaugaccuaugc

SEQ ID NO: 654588 - RNA, 22 nt, Human
ugugaaaucugaacucaaagau

SEQ ID NO: 654589 - RNA, 22 nt, Human
caaauagaagguacucagagaa

SEQ ID NO: 654590 - RNA, 22 nt, Human
uggcuucucgccugucaucccg

SEQ ID NO: 654591 - RNA, 22 nt, Human
ugucacauauauaauguucaau

SEQ ID NO: 654592 - RNA, 19 nt, Human
uuugccuugcagcugugug

SEQ ID NO: 654593 - RNA, 22 nt, Human
uuuacagucaccaaacuuugcu

SEQ ID NO: 654594 - RNA, 22 nt, Human
ucagcccugggcuuccucaugg

SEQ ID NO: 654595 - RNA, 22 nt, Human
cacccauuaaccaaagagugaa

SEQ ID NO: 654596 - RNA, 22 nt, Human
gagauggaaaacugcugguagu

SEQ ID NO: 654597 - RNA, 22 nt, Human
ucugucuuuagaggccugugcu

SEQ ID NO: 654598 - RNA, 22 nt, Human
uuuaucagaaguuagagaaaga

SEQ ID NO: 654599 - RNA, 22 nt, Human
uauuugaagauucuucugaugu

SEQ ID NO: 654600 - RNA, 22 nt, Human
agcccagggaaccaggaagugg

SEQ ID NO: 654601 - RNA, 22 nt, Human
auguccagaggugagucagagc

SEQ ID NO: 654602 - RNA, 23 nt, Human
uguaaauuuuguagucacauuuu

SEQ ID NO: 654603 - RNA, 22 nt, Human
aaguaaauguuggagcucaaau

SEQ ID NO: 654604 - RNA, 18 nt, Human
gcugcgugggaugugacc

SEQ ID NO: 654605 - RNA, 22 nt, Human
gaagcagcucagauugacugaa

SEQ ID NO: 654606 - RNA, 22 nt, Human
cuugaucuacauagugaaaccc

SEQ ID NO: 654607 - RNA, 22 nt, Human
cucuacagcugcugccccuggu

SEQ ID NO: 654608 - RNA, 22 nt, Human
aagcagucuuggcuggguucag

SEQ ID NO: 654609 - RNA, 22 nt, Human
cagugggugccaucgugcccuu

SEQ ID NO: 654610 - RNA, 22 nt, Human
ucagccagcaucagcuaagugc

SEQ ID NO: 654611 - RNA, 22 nt, Human
acaaauccagugaacuccagug

SEQ ID NO: 654612 - RNA, 22 nt, Human
ugaaggcuugacugaggcagga

SEQ ID NO: 654613 - RNA, 22 nt, Human
aagacugaguucaaaucacagc

SEQ ID NO: 654614 - RNA, 22 nt, Human
ugucaaagacagaaggaaaugg

SEQ ID NO: 654615 - RNA, 20 nt, Human
uuggcucugaucaguggagc

SEQ ID NO: 654616 - RNA, 22 nt, Human
uguccuccagcagcaugguaug

SEQ ID NO: 654617 - RNA, 22 nt, Human
ucaagaaacugugcuacagagu

SEQ ID NO: 654618 - RNA, 22 nt, Human
ugugccaugaggcucugauaug

SEQ ID NO: 654619 - RNA, 23 nt, Human
acagggaaaagucaucaguguga

SEQ ID NO: 654620 - RNA, 22 nt, Human
ucaggagcagggggaagcucug

SEQ ID NO: 654621 - RNA, 22 nt, Human
uggggggcacuucagcacaaug

SEQ ID NO: 654622 - RNA, 22 nt, Human
cuacauaaauauuuaugugucu

SEQ ID NO: 654623 - RNA, 22 nt, Human
ugaggcaggaguucaggcugcg

SEQ ID NO: 654624 - RNA, 22 nt, Human
gaagaacaccugcugcccagug

SEQ ID NO: 654625 - RNA, 22 nt, Human
uggcuagguagcuuucugcugu

SEQ ID NO: 654626 - RNA, 22 nt, Human
uuucuuagggacuguaaaauag

SEQ ID NO: 654627 - RNA, 22 nt, Human
cucuguguauccaaguucaggu

SEQ ID NO: 654628 - RNA, 22 nt, Human
ugcagcaugccaaacgaggagg

SEQ ID NO: 654629 - RNA, 22 nt, Human
cagagccugccaccuuucuccc

SEQ ID NO: 654630 - RNA, 22 nt, Human
cugugggaauacugcgagugua

SEQ ID NO: 654631 - RNA, 22 nt, Human
ggcugaguggcugggucuaguu

SEQ ID NO: 654632 - RNA, 22 nt, Human
acauaaaggugacuaacaucuu

SEQ ID NO: 654633 - RNA, 22 nt, Human
uccucaguuuucuaguauggca

SEQ ID NO: 654634 - RNA, 22 nt, Human
gccagcugcuggaacagcgcga

SEQ ID NO: 654635 - RNA, 22 nt, Human
ucauugaguugcacuuuuacua

SEQ ID NO: 654636 - RNA, 22 nt, Human
ugaggcucagagaacagugacu

SEQ ID NO: 654637 - RNA, 22 nt, Human
gcagcugcugggaucauuuagg

SEQ ID NO: 654638 - RNA, 22 nt, Human
gugagagaucccccacucaucu

SEQ ID NO: 654639 - RNA, 22 nt, Human
aaacucuggagauguuuaugca

SEQ ID NO: 654640 - RNA, 22 nt, Human
gccaggcaguucaaguacacca

SEQ ID NO: 654641 - RNA, 22 nt, Human
guuuaugaguuacguagggguu

SEQ ID NO: 654642 - RNA, 22 nt, Human
acaaucagcacugaguuuaucu

SEQ ID NO: 654643 - RNA, 22 nt, Human
gagaagcaauuuccaacugugc

SEQ ID NO: 654644 - RNA, 22 nt, Human
cacagcuucugucugacccaug

SEQ ID NO: 654645 - RNA, 22 nt, Human
cacagagaacugugggagugug

SEQ ID NO: 654646 - RNA, 22 nt, Human
aggcacaaagacagaaaagcac

SEQ ID NO: 654647 - RNA, 22 nt, Human
ugcauggacucaucagacaaga

SEQ ID NO: 654648 - RNA, 22 nt, Human
gagguagggcagaggcugaaug

SEQ ID NO: 654649 - RNA, 22 nt, Human
ugugaagauuaaguuacugggc

SEQ ID NO: 654650 - RNA, 19 nt, Human
uggucucugucucuuugca

SEQ ID NO: 654651 - RNA, 22 nt, Human
aagugagauuauauguacggga

SEQ ID NO: 654652 - RNA, 22 nt, Human
gagcucugauguuuaguggaga

SEQ ID NO: 654653 - RNA, 22 nt, Human
uggagguggcacaagggagguc

SEQ ID NO: 654654 - RNA, 22 nt, Human
ugagagagcgccugggaucauu

SEQ ID NO: 654655 - RNA, 22 nt, Human
aaagcacagagcucccacagga

SEQ ID NO: 654656 - RNA, 22 nt, Human
ucuugauuuguaaaagaaggau

SEQ ID NO: 654657 - RNA, 22 nt, Human
caaauagaacucacagacaaga

SEQ ID NO: 654658 - RNA, 22 nt, Human
uacagccacaggugacucucau

SEQ ID NO: 654659 - RNA, 22 nt, Human
uucaagaggcuuaauucuggau

SEQ ID NO: 654660 - RNA, 21 nt, Human
uaagccaccaugugaaaccag

SEQ ID NO: 654661 - RNA, 22 nt, Human
cccugaugacacgggcaucagg

SEQ ID NO: 654662 - RNA, 22 nt, Human
cacuggaaguucauucucagaa

SEQ ID NO: 654663 - RNA, 22 nt, Human
ugcaggaggauuuuguggagcu

SEQ ID NO: 654664 - RNA, 22 nt, Human
aggaaauaagggacaagacaaa

SEQ ID NO: 654665 - RNA, 22 nt, Human
auggcuggcauccaggugggcu

SEQ ID NO: 654666 - RNA, 22 nt, Human
cauugaauccuuccuucagaag

SEQ ID NO: 654667 - RNA, 23 nt, Human
auugaccagcugucucauuuuca

SEQ ID NO: 654668 - RNA, 22 nt, Human
gcuuuagacauaaaguucuuca

SEQ ID NO: 654669 - RNA, 22 nt, Human
gcagacagccagacugcacugg

SEQ ID NO: 654670 - RNA, 22 nt, Human
augcuuuacccacaccaggaug

SEQ ID NO: 654671 - RNA, 22 nt, Human
ucuggagagaucuuccacaaca

SEQ ID NO: 654672 - RNA, 22 nt, Human
aagcagaugccaagauuuacca

SEQ ID NO: 654673 - RNA, 22 nt, Human
acagaaauucaaacuggaauuu

SEQ ID NO: 654674 - RNA, 22 nt, Human
aggggcacuagaaugggagacu

SEQ ID NO: 654675 - RNA, 22 nt, Human
cuggagucuuagguuaugguga

SEQ ID NO: 654676 - RNA, 22 nt, Human
gcuaggagugggauggaagucg

SEQ ID NO: 654677 - RNA, 22 nt, Human
cuggggcaugggccccuagagg

SEQ ID NO: 654678 - RNA, 21 nt, Human
uuuagcauuuacauauuucca

SEQ ID NO: 654679 - RNA, 22 nt, Human
aaagaggcagguguuacuggaa

SEQ ID NO: 654680 - RNA, 22 nt, Human
aaguacaacgcauacagagaaa

SEQ ID NO: 654681 - RNA, 22 nt, Human
gguguguagcauguuuaagacc

SEQ ID NO: 654682 - RNA, 22 nt, Human
uguuuaaauagaacauacugca

SEQ ID NO: 654683 - RNA, 22 nt, Human
uuuucuuccuggauuuuggcau

SEQ ID NO: 654684 - RNA, 22 nt, Human
cugggcucuucccagauccaga

SEQ ID NO: 654685 - RNA, 22 nt, Human
agcuggugauguggucccucac

SEQ ID NO: 654686 - RNA, 22 nt, Human
uuucacauaugguuguugauug

SEQ ID NO: 654687 - RNA, 22 nt, Human
ugcauuuaauagaugcucccug

SEQ ID NO: 654688 - RNA, 22 nt, Human
acaaugcaauuguaaggugugu

SEQ ID NO: 654689 - RNA, 22 nt, Human
cuuuuguugcccuugucgcagg

SEQ ID NO: 654690 - RNA, 20 nt, Human
acaauauguagaugaauagc

SEQ ID NO: 654691 - RNA, 22 nt, Human
ucaccuaauugaagucaggagu

SEQ ID NO: 654692 - RNA, 22 nt, Human
ccacagggucagccacucugca

SEQ ID NO: 654693 - RNA, 22 nt, Human
ugggccugggcuggacagccug

SEQ ID NO: 654694 - RNA, 22 nt, Human
ggacagcugcuuucaggccaca

SEQ ID NO: 654695 - RNA, 22 nt, Human
aagaaugauuacaaagcaacga

SEQ ID NO: 654696 - RNA, 22 nt, Human
uguaucugugauguagggguuu

SEQ ID NO: 654697 - RNA, 22 nt, Human
acagccaggcccagcacgcagg

SEQ ID NO: 654698 - RNA, 21 nt, Human
ucuuccugacauaugcaaggc

SEQ ID NO: 654699 - RNA, 21 nt, Human
gggcaggucucugaugucaac

SEQ ID NO: 654700 - RNA, 18 nt, Human
ucuggcucaggacugaac

SEQ ID NO: 654701 - RNA, 22 nt, Human
ucagcuggcagguucugggaag

SEQ ID NO: 654702 - RNA, 22 nt, Human
aggaggccauucucucaguagc

SEQ ID NO: 654703 - RNA, 22 nt, Human
cuggccuggucuggccucucca

SEQ ID NO: 654704 - RNA, 22 nt, Human
uggcccugcuggacacgccugc

SEQ ID NO: 654705 - RNA, 22 nt, Human
uucagagguuagagcaguggga

SEQ ID NO: 654706 - RNA, 18 nt, Human
ucaggaguuuguggaugg

SEQ ID NO: 654707 - RNA, 22 nt, Human
caggaaagccgagugccauagg

SEQ ID NO: 654708 - RNA, 22 nt, Human
augcaucuauucccaagggcag

SEQ ID NO: 654709 - RNA, 22 nt, Human
acacuauaagacagauacagca

SEQ ID NO: 654710 - RNA, 22 nt, Human
cuggccagccugucgaugcccu

SEQ ID NO: 654711 - RNA, 22 nt, Human
auuaaggagguaaacuaugguu

SEQ ID NO: 654712 - RNA, 22 nt, Human
ucuacagagagucauagacuca

SEQ ID NO: 654713 - RNA, 22 nt, Human
gcaggcaggagcccaacugccu

SEQ ID NO: 654714 - RNA, 22 nt, Human
agacaaauggaguaugagcaac

SEQ ID NO: 654715 - RNA, 22 nt, Human
uccaggguugugggcuucagca

SEQ ID NO: 654716 - RNA, 22 nt, Human
gcaccugcuggggcugaugaga

SEQ ID NO: 654717 - RNA, 22 nt, Human
gcugaagggagugcugagucug

SEQ ID NO: 654718 - RNA, 18 nt, Human
agaaggagcuaugggcag

SEQ ID NO: 654719 - RNA, 22 nt, Human
cuggcucucgcugggaguacuu

SEQ ID NO: 654720 - RNA, 22 nt, Human
auaugcacacucugcccacaga

SEQ ID NO: 654721 - RNA, 22 nt, Human
aaguggcauguauaagaaagaa

SEQ ID NO: 654722 - RNA, 22 nt, Human
gggagagaugcugauugccaau

SEQ ID NO: 654723 - RNA, 20 nt, Human
caugccugcugguaucuggc

SEQ ID NO: 654724 - RNA, 22 nt, Human
ugaugggaaaaugaggccuggg

SEQ ID NO: 654725 - RNA, 22 nt, Human
aggcaggcagcugucaccacuc

SEQ ID NO: 654726 - RNA, 22 nt, Human
agaggggaaguaaugaaugaua

SEQ ID NO: 654727 - RNA, 22 nt, Human
guuauucucuuggccuaauuau

SEQ ID NO: 654728 - RNA, 22 nt, Human
uauuacugagguuuuauggagu

SEQ ID NO: 654729 - RNA, 19 nt, Human
ugcaucuugcaugggugag

SEQ ID NO: 654730 - RNA, 23 nt, Human
agccuuggagguugaggcugcag

SEQ ID NO: 654731 - RNA, 22 nt, Human
agugaauuguugccacagagac

SEQ ID NO: 654732 - RNA, 22 nt, Human
gccucagugauaugugggacaa

SEQ ID NO: 654733 - RNA, 22 nt, Human
gcagcaugagcuauacaaagua

SEQ ID NO: 654734 - RNA, 22 nt, Human
augcaguuuucaaagacuauuc

SEQ ID NO: 654735 - RNA, 22 nt, Human
gcugaauaauguguaaugucuc

SEQ ID NO: 654736 - RNA, 22 nt, Human
aagguagauguugucaugccca

SEQ ID NO: 654737 - RNA, 22 nt, Human
caggccagggagaauaugaagc

SEQ ID NO: 654738 - RNA, 22 nt, Human
ugcauauuauaaagagaauuag

SEQ ID NO: 654739 - RNA, 22 nt, Human
uccaccuccaugcugggcagag

SEQ ID NO: 654740 - RNA, 22 nt, Human
aucugucccuccucacagccuc

SEQ ID NO: 654741 - RNA, 18 nt, Human
ucaagacaucaugaaaua

SEQ ID NO: 654742 - RNA, 21 nt, Human
uaaagcuagaaccuuagcuuu

SEQ ID NO: 654743 - RNA, 22 nt, Human
uuucacaguagaaaucauuaug

SEQ ID NO: 654744 - RNA, 22 nt, Human
aggaggaaagaaggcccccagc

SEQ ID NO: 654745 - RNA, 22 nt, Human
uaagccugcaugaaccaugaga

SEQ ID NO: 654746 - RNA, 22 nt, Human
cagagacauguggccugcacgu

SEQ ID NO: 654747 - RNA, 22 nt, Human
cuucaugaguguacaaccugug

SEQ ID NO: 654748 - RNA, 22 nt, Human
agcuggaagcugaugagcacag

SEQ ID NO: 654749 - RNA, 22 nt, Human
aaaguguugauaugugacaucc

SEQ ID NO: 654750 - RNA, 22 nt, Human
uggcaggaucuuugagagugaa

SEQ ID NO: 654751 - RNA, 19 nt, Human
cauuuucccaucauccuuu

SEQ ID NO: 654752 - RNA, 22 nt, Human
ucuggccccgcaugcacuuuau

SEQ ID NO: 654753 - RNA, 22 nt, Human
cuaguauuaagugugaguaaaa

SEQ ID NO: 654754 - RNA, 22 nt, Human
cuggguuuagggucuccccuug

SEQ ID NO: 654755 - RNA, 22 nt, Human
cauccuucucaaagagugcaug

SEQ ID NO: 654756 - RNA, 22 nt, Human
gaggcacaguucuuccuccaga

SEQ ID NO: 654757 - RNA, 20 nt, Human
aucaucuuuacaaugucagu

SEQ ID NO: 654758 - RNA, 22 nt, Human
gcagggcuggggcugcuccuga

SEQ ID NO: 654759 - RNA, 21 nt, Human
augucaaaugcuuuauuuuau

SEQ ID NO: 654760 - RNA, 22 nt, Human
gcugccaguaguuggagcucca

SEQ ID NO: 654761 - RNA, 21 nt, Human
gccagccaugcuugccuaggc

SEQ ID NO: 654762 - RNA, 22 nt, Human
acucaggccccaucgcccaucu

SEQ ID NO: 654763 - RNA, 22 nt, Human
uagacaggagucaggcuagaau

SEQ ID NO: 654764 - RNA, 22 nt, Human
gaaggaagggcuggcugucuug

SEQ ID NO: 654765 - RNA, 22 nt, Human
gcagacagcauguugggcuauu

SEQ ID NO: 654766 - RNA, 22 nt, Human
ugggggacugcacuggcgucag

SEQ ID NO: 654767 - RNA, 22 nt, Human
caguccuugauccaauaguggg

SEQ ID NO: 654768 - RNA, 22 nt, Human
auuaaauguuggacguauacau

SEQ ID NO: 654769 - RNA, 22 nt, Human
cagcuaggaaguccuuggcgaa

SEQ ID NO: 654770 - RNA, 22 nt, Human
augacaaaagaagacaugaggu

SEQ ID NO: 654771 - RNA, 18 nt, Human
ccuagccuccaagcucau

SEQ ID NO: 654772 - RNA, 22 nt, Human
agcccagcuuucaccccucugg

SEQ ID NO: 654773 - RNA, 22 nt, Human
uaggguccucaucuguaaauga

SEQ ID NO: 654774 - RNA, 20 nt, Human
ggcauccuuuuggucacagc

SEQ ID NO: 654775 - RNA, 22 nt, Human
uuaaagagaacucaaugaauga

SEQ ID NO: 654776 - RNA, 22 nt, Human
gcacaagcacgagcagcgugcg

SEQ ID NO: 654777 - RNA, 22 nt, Human
uggagagagucgggauaguaca

SEQ ID NO: 654778 - RNA, 23 nt, Human
cagaaaguuugagaagauacauc

SEQ ID NO: 654779 - RNA, 22 nt, Human
aacagucaaaguuugguuccuu

SEQ ID NO: 654780 - RNA, 22 nt, Human
ccagagcuugacgugcaacgga

SEQ ID NO: 654781 - RNA, 22 nt, Human
agucagcagugaaagcacagcc

SEQ ID NO: 654782 - RNA, 22 nt, Human
ugaggggcggccugcagaggcc

SEQ ID NO: 654783 - RNA, 22 nt, Human
uaaagugucugccucagcucag

SEQ ID NO: 654784 - RNA, 22 nt, Human
guaaacaugcuguguacucagc

SEQ ID NO: 654785 - RNA, 22 nt, Human
uccaaaggcccuaauaagcuug

SEQ ID NO: 654786 - RNA, 22 nt, Human
uuuuuacagucauggucacuca

SEQ ID NO: 654787 - RNA, 22 nt, Human
ccaaagagcuagaauuauaggc

SEQ ID NO: 654788 - RNA, 22 nt, Human
aauugcuaaagauuauguuuuc

SEQ ID NO: 654789 - RNA, 22 nt, Human
ccagcagcuuuauuggcucucc

SEQ ID NO: 654790 - RNA, 22 nt, Human
agaaaacauaggagacaggaaa

SEQ ID NO: 654791 - RNA, 18 nt, Human
auugucagaagucaugug

SEQ ID NO: 654792 - RNA, 22 nt, Human
ucaggcuuauuacguuauuguc

SEQ ID NO: 654793 - RNA, 22 nt, Human
uuggggcagagaggauacggca

SEQ ID NO: 654794 - RNA, 22 nt, Human
gaaccuggcagcccuauaucug

SEQ ID NO: 654795 - RNA, 20 nt, Human
accugaggucccuauggucu

SEQ ID NO: 654796 - RNA, 22 nt, Human
auuuaaaugcuuaagaggguuu

SEQ ID NO: 654797 - RNA, 22 nt, Human
ccuuccagguuuuggcuccauu

SEQ ID NO: 654798 - RNA, 23 nt, Human
cuugccuggccucucugcccaga

SEQ ID NO: 654799 - RNA, 22 nt, Human
auauuguacuaggguuacaugu

SEQ ID NO: 654800 - RNA, 22 nt, Human
gacauuuauuagaaaacuauca

SEQ ID NO: 654801 - RNA, 22 nt, Human
gggcaggucugggucagccuga

SEQ ID NO: 654802 - RNA, 22 nt, Human
cugccagccaggccagguaggc

SEQ ID NO: 654803 - RNA, 22 nt, Human
aggcagcguagcaaggcuagua

SEQ ID NO: 654804 - RNA, 22 nt, Human
acaguuauuuucccagcauuua

SEQ ID NO: 654805 - RNA, 22 nt, Human
ugucuccucauacugucauauu

SEQ ID NO: 654806 - RNA, 22 nt, Human
gagaccucuugguaucgcuagg

SEQ ID NO: 654807 - RNA, 23 nt, Human
uuacagcuaacugcuguuauuag

SEQ ID NO: 654808 - RNA, 23 nt, Human
agcuuccuagugaccuggagucu

SEQ ID NO: 654809 - RNA, 22 nt, Human
cuuuguuaucuguaaaugguua

SEQ ID NO: 654810 - RNA, 19 nt, Human
ugccucagggcuuugagga

SEQ ID NO: 654811 - RNA, 22 nt, Human
aacagaauaguugauguacagu

SEQ ID NO: 654812 - RNA, 22 nt, Human
uacccaggaggaaacugaggcu

SEQ ID NO: 654813 - RNA, 22 nt, Human
acauucuaugaagauaauuuua

SEQ ID NO: 654814 - RNA, 22 nt, Human
uuguuucuccuggugccugaua

SEQ ID NO: 654815 - RNA, 22 nt, Human
acacaguaaauauguauugaau

SEQ ID NO: 654816 - RNA, 20 nt, Human
agccucugcccuucccacug

SEQ ID NO: 654817 - RNA, 22 nt, Human
acagagaugucagauuggcagc

SEQ ID NO: 654818 - RNA, 22 nt, Human
uucuaccagcuacucacugaua

SEQ ID NO: 654819 - RNA, 22 nt, Human
acuggcacaagaagagucgugg

SEQ ID NO: 654820 - RNA, 22 nt, Human
ucuggccaacaaaaacuaaguc

SEQ ID NO: 654821 - RNA, 22 nt, Human
gcaaugcaaucuuuauuauauu

SEQ ID NO: 654822 - RNA, 22 nt, Human
uuuuuauacuuugcucaagauu

SEQ ID NO: 654823 - RNA, 22 nt, Human
cuuugcaagggauuucaugucu

SEQ ID NO: 654824 - RNA, 22 nt, Human
uucacuauaaaguuucaacuuu

SEQ ID NO: 654825 - RNA, 22 nt, Human
uugaauucauuucucauugagu

SEQ ID NO: 654826 - RNA, 22 nt, Human
aagggcuguaguuuguugauca

SEQ ID NO: 654827 - RNA, 22 nt, Human
acaggggugcauggugcauggu

SEQ ID NO: 654828 - RNA, 22 nt, Human
uuaacauccuguuuaaauuugg

SEQ ID NO: 654829 - RNA, 22 nt, Human
cacacagggagaaagaaagccu

SEQ ID NO: 654830 - RNA, 22 nt, Human
uuucaacaccagagaccaugcg

SEQ ID NO: 654831 - RNA, 19 nt, Human
acagcagggauuuuuggag

SEQ ID NO: 654832 - RNA, 23 nt, Human
uucauucaaaaggaaaagucaug

SEQ ID NO: 654833 - RNA, 22 nt, Human
uggaaugucauaccauaaaaga

SEQ ID NO: 654834 - RNA, 22 nt, Human
gaggccucaugaggugagcauu

SEQ ID NO: 654835 - RNA, 22 nt, Human
ggucucagguagggccuaggaa

SEQ ID NO: 654836 - RNA, 22 nt, Human
gugcaauauugccauguucuug

SEQ ID NO: 654837 - RNA, 22 nt, Human
cugcucuggcuguguacuucag

SEQ ID NO: 654838 - RNA, 22 nt, Human
agcaaggcuucagagcugucug

SEQ ID NO: 654839 - RNA, 22 nt, Human
gcagccuuuggaauuagagacu

SEQ ID NO: 654840 - RNA, 22 nt, Human
agcugucuuuaagugagcuuug

SEQ ID NO: 654841 - RNA, 21 nt, Human
gggcucaguggaaaagagugu

SEQ ID NO: 654842 - RNA, 22 nt, Human
aguguacaguucuaugaauuuc

SEQ ID NO: 654843 - RNA, 22 nt, Human
aucuggaaaacacaguguagac

SEQ ID NO: 654844 - RNA, 22 nt, Human
guagcuucaaguacucucccug

SEQ ID NO: 654845 - RNA, 23 nt, Human
ucaauugaugauguucucuuuug

SEQ ID NO: 654846 - RNA, 22 nt, Human
gagcuuggugcacagugguuaa

SEQ ID NO: 654847 - RNA, 22 nt, Human
acaagaauaaggauaagagauu

SEQ ID NO: 654848 - RNA, 22 nt, Human
uucagcagugcagacacccagu

SEQ ID NO: 654849 - RNA, 22 nt, Human
gcccaggggaguagucaauuua

SEQ ID NO: 654850 - RNA, 22 nt, Human
ugagcagacuugaugaggcagc

SEQ ID NO: 654851 - RNA, 18 nt, Human
gggcugugagaugggaag

SEQ ID NO: 654852 - RNA, 22 nt, Human
gccuggcugcuuagccuacuuc

SEQ ID NO: 654853 - RNA, 22 nt, Human
guuggcuuugcucucuguccua

SEQ ID NO: 654854 - RNA, 22 nt, Human
caagcuuguuucuccugggggu

SEQ ID NO: 654855 - RNA, 22 nt, Human
uuccugccccugagagcuccca

SEQ ID NO: 654856 - RNA, 22 nt, Human
ucucuuccuagugaugggcuuu

SEQ ID NO: 654857 - RNA, 22 nt, Human
guuaauguuaucugaagacagu

SEQ ID NO: 654858 - RNA, 22 nt, Human
gcccuggccuggcgcguuguca

SEQ ID NO: 654859 - RNA, 22 nt, Human
auaacuuagaguaggcaaaagu

SEQ ID NO: 654860 - RNA, 21 nt, Human
uuacuaaacaaaacaugcagg

SEQ ID NO: 654861 - RNA, 22 nt, Human
agaaagauuuucaacaggaggu

SEQ ID NO: 654862 - RNA, 22 nt, Human
auguguauuaguuaguuuaaug

SEQ ID NO: 654863 - RNA, 22 nt, Human
ucucaccaaagccuugaccaua

SEQ ID NO: 654864 - RNA, 22 nt, Human
gccaggugcauggcugagucuc

SEQ ID NO: 654865 - RNA, 22 nt, Human
ggugcagccuuuguuucuacuu

SEQ ID NO: 654866 - RNA, 22 nt, Human
gguccuggcagcucugugucca

SEQ ID NO: 654867 - RNA, 22 nt, Human
aacagacagaaaaaugugaucu

SEQ ID NO: 654868 - RNA, 22 nt, Human
uaacuguauuuuucugagauuc

SEQ ID NO: 654869 - RNA, 22 nt, Human
uguuuacuuuccuucucacagg

SEQ ID NO: 654870 - RNA, 22 nt, Human
auaugaagaauuccaauuugga

SEQ ID NO: 654871 - RNA, 22 nt, Human
guuuauaaggcccaauauuucu

SEQ ID NO: 654872 - RNA, 22 nt, Human
gggcaggugcccagggccagag

SEQ ID NO: 654873 - RNA, 22 nt, Human
ugagcaggacucacugcagccu

SEQ ID NO: 654874 - RNA, 22 nt, Human
cauuuacauuuaagguuaauau

SEQ ID NO: 654875 - RNA, 22 nt, Human
uggcuguggguggaaggaaacc

SEQ ID NO: 654876 - RNA, 22 nt, Human
uaccagccucaguugugagccc

SEQ ID NO: 654877 - RNA, 22 nt, Human
uguuaacaucuuggacucguga

SEQ ID NO: 654878 - RNA, 22 nt, Human
agcaguauucuccuguggugga

SEQ ID NO: 654879 - RNA, 22 nt, Human
uuguuuuuaugaacauccagga

SEQ ID NO: 654880 - RNA, 22 nt, Human
gugauggagucaaggcuagaac

SEQ ID NO: 654881 - RNA, 22 nt, Human
gaugaagaggcacugacauauu

SEQ ID NO: 654882 - RNA, 22 nt, Human
ucugaagggcugaguggaggag

SEQ ID NO: 654883 - RNA, 22 nt, Human
gguuccccaggcggcccuugga

SEQ ID NO: 654884 - RNA, 22 nt, Human
aggcaagcagucagucuaugag

SEQ ID NO: 654885 - RNA, 21 nt, Human
guggcucugccaggacugaaa

SEQ ID NO: 654886 - RNA, 22 nt, Human
ggaggccuugaggccaggagcu

SEQ ID NO: 654887 - RNA, 22 nt, Human
cugcguguuugcacccugucug

SEQ ID NO: 654888 - RNA, 22 nt, Human
aagagguucuaauuuaacuauc

SEQ ID NO: 654889 - RNA, 22 nt, Human
guuuuaugagaccucaggaaua

SEQ ID NO: 654890 - RNA, 19 nt, Human
cuggaauguggcuggugca

SEQ ID NO: 654891 - RNA, 22 nt, Human
guccacucucugccgugccugu

SEQ ID NO: 654892 - RNA, 20 nt, Human
agaggaggauuauuuuauuc

SEQ ID NO: 654893 - RNA, 22 nt, Human
ggacuccucuagaaguugaggc

SEQ ID NO: 654894 - RNA, 22 nt, Human
agagaauuugagacuugcccaa

SEQ ID NO: 654895 - RNA, 22 nt, Human
uuggaacacagcagcugauuuu

SEQ ID NO: 654896 - RNA, 22 nt, Human
uccuggguggugguaggagcag

SEQ ID NO: 654897 - RNA, 22 nt, Human
uggagaaggccggccaggagug

SEQ ID NO: 654898 - RNA, 22 nt, Human
ggagguucugauuugucacaac

SEQ ID NO: 654899 - RNA, 22 nt, Human
aggauuuguauagcuuucuuuu

SEQ ID NO: 654900 - RNA, 22 nt, Human
cagcaucugaccaauaucuaca

SEQ ID NO: 654901 - RNA, 22 nt, Human
aagaguaaaugucuaauuagga

SEQ ID NO: 654902 - RNA, 22 nt, Human
agacacagguguaauuucugcu

SEQ ID NO: 654903 - RNA, 22 nt, Human
gaaaauaguucaucacaaugau

SEQ ID NO: 654904 - RNA, 19 nt, Human
uguguggguuuagaguagu

SEQ ID NO: 654905 - RNA, 22 nt, Human
uauaaucugguuuuauuaagag

SEQ ID NO: 654906 - RNA, 22 nt, Human
ugacuggagaccucaguagggu

SEQ ID NO: 654907 - RNA, 22 nt, Human
aacaugcuuugauaaauaaaag

SEQ ID NO: 654908 - RNA, 22 nt, Human
uucagcaagugucucuacuguc

SEQ ID NO: 654909 - RNA, 21 nt, Human
gggggaagaggaguugcuagu

SEQ ID NO: 654910 - RNA, 20 nt, Human
gccucagccaacccaugggg

SEQ ID NO: 654911 - RNA, 22 nt, Human
cugggacuuuguaggccaguug

SEQ ID NO: 654912 - RNA, 17 nt, Human
acacagagauuaacaca

SEQ ID NO: 654913 - RNA, 18 nt, Human
ucccucccugcuguggcc

SEQ ID NO: 654914 - RNA, 22 nt, Human
ggcaucuucaaaauugccaaau

SEQ ID NO: 654915 - RNA, 22 nt, Human
cuuggggaggacgcaguguccu

SEQ ID NO: 654916 - RNA, 22 nt, Human
agggggcauuaugaggcuuuuc

SEQ ID NO: 654917 - RNA, 22 nt, Human
aauugcuagacuauacuguaau

SEQ ID NO: 654918 - RNA, 22 nt, Human
acagaugaauuuauggauggaa

SEQ ID NO: 654919 - RNA, 22 nt, Human
uaaaucacauuuucuuuguguu

SEQ ID NO: 654920 - RNA, 22 nt, Human
ucaguccucacuugguucuaag

SEQ ID NO: 654921 - RNA, 22 nt, Human
cacagguuagguauuauacuau

SEQ ID NO: 654922 - RNA, 22 nt, Human
cagcuuuaccuuuaggaguaac

SEQ ID NO: 654923 - RNA, 22 nt, Human
uccaggcuugagaccaggcucu

SEQ ID NO: 654924 - RNA, 22 nt, Human
ccugugugucugucacugcaca

SEQ ID NO: 654925 - RNA, 22 nt, Human
ugcuccugaacacagcccuaug

SEQ ID NO: 654926 - RNA, 22 nt, Human
ccacaguacaggaaaucuuguu

SEQ ID NO: 654927 - RNA, 22 nt, Human
gagaaagcuucuuucccacagg

SEQ ID NO: 654928 - RNA, 22 nt, Human
agauggaguggagaugaguaaa

SEQ ID NO: 654929 - RNA, 22 nt, Human
aguucuuuugugaacauaugcu

SEQ ID NO: 654930 - RNA, 22 nt, Human
aaauagcacagcagcugaggcu

SEQ ID NO: 654931 - RNA, 22 nt, Human
ggggugaguuagcgucggcuug

SEQ ID NO: 654932 - RNA, 23 nt, Human
cccuucagcgagggcauuaaggu

SEQ ID NO: 654933 - RNA, 22 nt, Human
ugcugggcaccagugccugcag

SEQ ID NO: 654934 - RNA, 22 nt, Human
aaggcaaugacugauuuagaau

SEQ ID NO: 654935 - RNA, 22 nt, Human
aggagcagaacugauucugacu

SEQ ID NO: 654936 - RNA, 18 nt, Human
ugcugggcauuaggcuua

SEQ ID NO: 654937 - RNA, 19 nt, Human
auaaggcagugacuuuuuu

SEQ ID NO: 654938 - RNA, 22 nt, Human
ugggaagaggcgggaggcuguu

SEQ ID NO: 654939 - RNA, 22 nt, Human
gcuggagaguaguaagcaguua

SEQ ID NO: 654940 - RNA, 22 nt, Human
agggggcuccuccggugcuucc

SEQ ID NO: 654941 - RNA, 22 nt, Human
augcaccacaucacuucugcuc

SEQ ID NO: 654942 - RNA, 23 nt, Human
auuuccuaaaagauaaucauuac

SEQ ID NO: 654943 - RNA, 23 nt, Human
aguuucacauuuuacauguggcu

SEQ ID NO: 654944 - RNA, 22 nt, Human
gcuguccucugaucucuggagg

SEQ ID NO: 654945 - RNA, 22 nt, Human
cucugcuuggaacuggacagaa

SEQ ID NO: 654946 - RNA, 21 nt, Human
ggcuguggagccaugacucac

SEQ ID NO: 654947 - RNA, 22 nt, Human
ucaggacagaaggcugccaggg

SEQ ID NO: 654948 - RNA, 22 nt, Human
cguguguguaccugcgcauuua

SEQ ID NO: 654949 - RNA, 22 nt, Human
uggcugagcugcagcguggcuu

SEQ ID NO: 654950 - RNA, 22 nt, Human
cuggagccggcgagccccagcc

SEQ ID NO: 654951 - RNA, 22 nt, Human
gagcaaacaaaacugaugugac

SEQ ID NO: 654952 - RNA, 22 nt, Human
uccauacauacagauaugcauu

SEQ ID NO: 654953 - RNA, 22 nt, Human
ugaggggagacagaguggacuc

SEQ ID NO: 654954 - RNA, 23 nt, Human
ccacgucugcacuguagcuguug

SEQ ID NO: 654955 - RNA, 22 nt, Human
caggaaccugugcguagggaug

SEQ ID NO: 654956 - RNA, 22 nt, Human
ggaggguccacugugaggcaga

SEQ ID NO: 654957 - RNA, 17 nt, Human
ucauuuguugugacuag

SEQ ID NO: 654958 - RNA, 22 nt, Human
ggggucccugcaccagcauguc

SEQ ID NO: 654959 - RNA, 22 nt, Human
ugcagaguagcuauaccauuuu

SEQ ID NO: 654960 - RNA, 22 nt, Human
agggccagagucuguguagaua

SEQ ID NO: 654961 - RNA, 22 nt, Human
uauugacagaugcauuauguug

SEQ ID NO: 654962 - RNA, 22 nt, Human
gccuuuauaucccugauaucua

SEQ ID NO: 654963 - RNA, 22 nt, Human
aaugucauuuuuaaaugugaga

SEQ ID NO: 654964 - RNA, 22 nt, Human
uguccacaucacucacuuguca

SEQ ID NO: 654965 - RNA, 23 nt, Human
ucugcucugaaguucggcugagc

SEQ ID NO: 654966 - RNA, 22 nt, Human
gcuuuucuccuuagugucccug

SEQ ID NO: 654967 - RNA, 22 nt, Human
uuagugaaaagaaaaugagugg

SEQ ID NO: 654968 - RNA, 22 nt, Human
ccaggccuguguuguguggagg

SEQ ID NO: 654969 - RNA, 22 nt, Human
ucaaaggguccuuaacaugaga

SEQ ID NO: 654970 - RNA, 22 nt, Human
cuggacagugcugcuugagaug

SEQ ID NO: 654971 - RNA, 22 nt, Human
ccauccaugaacgaggaagugg

SEQ ID NO: 654972 - RNA, 22 nt, Human
auuuccaugaaguuuaguuaua

SEQ ID NO: 654973 - RNA, 22 nt, Human
ugugaugguucacugggcauga

SEQ ID NO: 654974 - RNA, 22 nt, Human
guuccccuuguguuguugccca

SEQ ID NO: 654975 - RNA, 22 nt, Human
cugugccuccaaguggucucug

SEQ ID NO: 654976 - RNA, 22 nt, Human
ggagaagggccaauuccaugua

SEQ ID NO: 654977 - RNA, 22 nt, Human
aaggccuggauuuagguuguga

SEQ ID NO: 654978 - RNA, 22 nt, Human
uggcagaggagaauuaagauua

SEQ ID NO: 654979 - RNA, 22 nt, Human
agcuuuggggguagguauagag

SEQ ID NO: 654980 - RNA, 22 nt, Human
cagggccuuucaggguaaaagg

SEQ ID NO: 654981 - RNA, 22 nt, Human
ugguugcauuaacugagagggg

SEQ ID NO: 654982 - RNA, 22 nt, Human
ucagacagcuugggauaacuga

SEQ ID NO: 654983 - RNA, 22 nt, Human
cagcucagucuggagagaugca

SEQ ID NO: 654984 - RNA, 21 nt, Human
acagccaggaacaugaggggc

SEQ ID NO: 654985 - RNA, 22 nt, Human
gagcugucucuauaugaaugcu

SEQ ID NO: 654986 - RNA, 20 nt, Human
acaaggaaccaggagguggc

SEQ ID NO: 654987 - RNA, 22 nt, Human
gccucagccggcggacgccagg

SEQ ID NO: 654988 - RNA, 22 nt, Human
uauauucuauuguaccucuccu

SEQ ID NO: 654989 - RNA, 21 nt, Human
ggagggcagcccagacuggcu

SEQ ID NO: 654990 - RNA, 22 nt, Human
guauuccuaagucaugacaaau

SEQ ID NO: 654991 - RNA, 22 nt, Human
agagcagugcugaagaguaggg

SEQ ID NO: 654992 - RNA, 22 nt, Human
agcucuggggccugucccacau

SEQ ID NO: 654993 - RNA, 22 nt, Human
caccaggaccccacgguggguu

SEQ ID NO: 654994 - RNA, 22 nt, Human
uuuagucauagauacccaaggu

SEQ ID NO: 654995 - RNA, 22 nt, Human
uuugacagacauuuacuacauu

SEQ ID NO: 654996 - RNA, 22 nt, Human
aucauuuugugacaaugccugu

SEQ ID NO: 654997 - RNA, 22 nt, Human
ucaguguucuggauuuggggca

SEQ ID NO: 654998 - RNA, 22 nt, Human
uaugcuuuuaaccuguaacuga

SEQ ID NO: 654999 - RNA, 22 nt, Human
uuucuaauucuaacuggcagag

SEQ ID NO: 655000 - RNA, 22 nt, Human
cacucugagaaacacuaaacca

SEQ ID NO: 655001 - RNA, 22 nt, Human
uacauauccaggcugagaagau

SEQ ID NO: 655002 - RNA, 22 nt, Human
aaguuaugaaauuuggacagcu

SEQ ID NO: 655003 - RNA, 22 nt, Human
ucacugucugaaagaaauggcc

SEQ ID NO: 655004 - RNA, 22 nt, Human
aagggcucgguagcaguccuga

SEQ ID NO: 655005 - RNA, 22 nt, Human
agaaauaagagcuuuccuuggg

SEQ ID NO: 655006 - RNA, 22 nt, Human
caguggcuuacaaugaacuaga

SEQ ID NO: 655007 - RNA, 22 nt, Human
agccuccaguagcugaagagac

SEQ ID NO: 655008 - RNA, 22 nt, Human
caguccugggcaggucaggcca

SEQ ID NO: 655009 - RNA, 19 nt, Human
gcucugugaugcugagggg

SEQ ID NO: 655010 - RNA, 22 nt, Human
uuuccauguuggugaaaugagg

SEQ ID NO: 655011 - RNA, 22 nt, Human
aagucucuuuucuuccuguauu

SEQ ID NO: 655012 - RNA, 22 nt, Human
ccaguggaguuuuuauacccag

SEQ ID NO: 655013 - RNA, 22 nt, Human
gacaaugugacagaccaaugau

SEQ ID NO: 655014 - RNA, 21 nt, Human
ucacaugcuuauuccuggaau

SEQ ID NO: 655015 - RNA, 22 nt, Human
gcuuccugggacaggcuaugug

SEQ ID NO: 655016 - RNA, 22 nt, Human
ccacucccuuccgguccagggc

SEQ ID NO: 655017 - RNA, 18 nt, Human
gccugcaggcacgggggu

SEQ ID NO: 655018 - RNA, 22 nt, Human
gccuggagagcacugugcgcuu

SEQ ID NO: 655019 - RNA, 22 nt, Human
gcuaaaucuccuacaaugcaca

SEQ ID NO: 655020 - RNA, 19 nt, Human
uccuguuauggagcuuagg

SEQ ID NO: 655021 - RNA, 19 nt, Human
ugcuugccugccuuuccca

SEQ ID NO: 655022 - RNA, 20 nt, Human
agcaguaggaccucugggcc

SEQ ID NO: 655023 - RNA, 22 nt, Human
auuuaauuuucucaacagugcu

SEQ ID NO: 655024 - RNA, 22 nt, Human
ggugagacuuuagaagagccag

SEQ ID NO: 655025 - RNA, 22 nt, Human
cugaagagcaaaccaacuggac

SEQ ID NO: 655026 - RNA, 22 nt, Human
aggagcuccagcccagggaagu

SEQ ID NO: 655027 - RNA, 22 nt, Human
cuggcccuugacuuacagcagg

SEQ ID NO: 655028 - RNA, 22 nt, Human
auuugccuuuuaaacucacaau

SEQ ID NO: 655029 - RNA, 22 nt, Human
ugcuggaaggguaguauuaacu

SEQ ID NO: 655030 - RNA, 22 nt, Human
cuaaagugccaggaauacaggu

SEQ ID NO: 655031 - RNA, 22 nt, Human
caaaccugagaacaugugcugu

SEQ ID NO: 655032 - RNA, 22 nt, Human
gagcuggugugugcccgagcac

SEQ ID NO: 655033 - RNA, 22 nt, Human
cauagugucugguaacauagua

SEQ ID NO: 655034 - RNA, 22 nt, Human
cugcuuggguccuggcaugggu

SEQ ID NO: 655035 - RNA, 22 nt, Human
uugucuguaaagacggccacca

SEQ ID NO: 655036 - RNA, 21 nt, Human
gggcuggacaugguggcucau

SEQ ID NO: 655037 - RNA, 22 nt, Human
agcuauguuccucgaugcucag

SEQ ID NO: 655038 - RNA, 22 nt, Human
aagucuggaagucucaguuuuc

SEQ ID NO: 655039 - RNA, 22 nt, Human
agaaauguauagugaauuuuuc

SEQ ID NO: 655040 - RNA, 22 nt, Human
gacuucucggcacccuuuggca

SEQ ID NO: 655041 - RNA, 22 nt, Human
gggcuggauguuugaugacgaa

SEQ ID NO: 655042 - RNA, 22 nt, Human
ggagcagcuugcaugcucaggg

SEQ ID NO: 655043 - RNA, 22 nt, Human
gccugagcccaggugugcagag

SEQ ID NO: 655044 - RNA, 21 nt, Human
uucucagagucuauuacaguu

SEQ ID NO: 655045 - RNA, 22 nt, Human
uguuuacuuaugugggucacau

SEQ ID NO: 655046 - RNA, 22 nt, Human
uacaguagaauuuuuaguaacu

SEQ ID NO: 655047 - RNA, 22 nt, Human
guuauauaagacaaaucagagu

SEQ ID NO: 655048 - RNA, 22 nt, Human
ucuuuguacaggaaggcacugu

SEQ ID NO: 655049 - RNA, 22 nt, Human
gaaaguauucucccugaauuuu

SEQ ID NO: 655050 - RNA, 22 nt, Human
ccugaagagugaauguggcagu

SEQ ID NO: 655051 - RNA, 22 nt, Human
aggccacaagaaaaugcuucau

SEQ ID NO: 655052 - RNA, 22 nt, Human
aauguguucacaggaaauacag

SEQ ID NO: 655053 - RNA, 22 nt, Human
cuuuguaaucauucccuugguu

SEQ ID NO: 655054 - RNA, 22 nt, Human
agacccugcauuuuccaggguu

SEQ ID NO: 655055 - RNA, 19 nt, Human
ggaacucacuuagagaaac

SEQ ID NO: 655056 - RNA, 22 nt, Human
ucugucucuuuguucugugagu

SEQ ID NO: 655057 - RNA, 18 nt, Human
ggagacuaaacuguugac

SEQ ID NO: 655058 - RNA, 22 nt, Human
ucugcugucuuuucugggugag

SEQ ID NO: 655059 - RNA, 22 nt, Human
ugauggaagguuucucggugau

SEQ ID NO: 655060 - RNA, 22 nt, Human
uauugucuucaacucuacuuuu

SEQ ID NO: 655061 - RNA, 22 nt, Human
uccagguaucuggcuuccacau

SEQ ID NO: 655062 - RNA, 22 nt, Human
accaggcaugauguggagcaca

SEQ ID NO: 655063 - RNA, 22 nt, Human
aagcugucaggagguuaccuuu

SEQ ID NO: 655064 - RNA, 22 nt, Human
ucucaacaccacuugcugaaga

SEQ ID NO: 655065 - RNA, 22 nt, Human
guauuuuacugcucaaagcucu

SEQ ID NO: 655066 - RNA, 22 nt, Human
aacagaaggggguauuuacauu

SEQ ID NO: 655067 - RNA, 22 nt, Human
guuuucucaggaugguguguac

SEQ ID NO: 655068 - RNA, 22 nt, Human
agacaauuucaaaguaauauua

SEQ ID NO: 655069 - RNA, 22 nt, Human
uuucccaaguguaaacauggca

SEQ ID NO: 655070 - RNA, 22 nt, Human
ucuagaccuggcacugcccugu

SEQ ID NO: 655071 - RNA, 22 nt, Human
cauggcagugauucagccuuug

SEQ ID NO: 655072 - RNA, 22 nt, Human
ugaaaugcuuuuacaggauauu

SEQ ID NO: 655073 - RNA, 21 nt, Human
ucaggaaacaccucuuaagga

SEQ ID NO: 655074 - RNA, 22 nt, Human
gcacuugauuacauuagugccu

SEQ ID NO: 655075 - RNA, 22 nt, Human
cagagcugcuucccaguuugug

SEQ ID NO: 655076 - RNA, 22 nt, Human
uaauguuugggaaggugcuuug

SEQ ID NO: 655077 - RNA, 22 nt, Human
uuaguugacccccaguccuggc

SEQ ID NO: 655078 - RNA, 22 nt, Human
gcaguauaaguggauuaugucc

SEQ ID NO: 655079 - RNA, 22 nt, Human
ugccagcuccgaggagcugcag

SEQ ID NO: 655080 - RNA, 22 nt, Human
uugucuaaugagcuccacuuca

SEQ ID NO: 655081 - RNA, 22 nt, Human
gccugaggaauugaggggguaa

SEQ ID NO: 655082 - RNA, 22 nt, Human
ucccagcuguguggaggagaug

SEQ ID NO: 655083 - RNA, 22 nt, Human
ucauguuugagacuaauuuuuc

SEQ ID NO: 655084 - RNA, 22 nt, Human
agcagcugggcucagagcuggg

SEQ ID NO: 655085 - RNA, 22 nt, Human
guccucagggagucccagucau

SEQ ID NO: 655086 - RNA, 22 nt, Human
ucagaacaauuccuuuauaaca

SEQ ID NO: 655087 - RNA, 23 nt, Human
agcuccaggugauuguaaugugu

SEQ ID NO: 655088 - RNA, 22 nt, Human
aaauggcugacuaaauuaaauu

SEQ ID NO: 655089 - RNA, 22 nt, Human
ugcagcagguuccaaaggguua

SEQ ID NO: 655090 - RNA, 22 nt, Human
aaaucguggaagacaccagugg

SEQ ID NO: 655091 - RNA, 22 nt, Human
accuucuuccaccaaaaacguc

SEQ ID NO: 655092 - RNA, 22 nt, Human
acacugugaucuugagaaaggu

SEQ ID NO: 655093 - RNA, 18 nt, Human
gacccagcagaugggcuu

SEQ ID NO: 655094 - RNA, 22 nt, Human
cuggcucugagugguaucuuga

SEQ ID NO: 655095 - RNA, 22 nt, Human
cucuggccccaguggccccuug

SEQ ID NO: 655096 - RNA, 22 nt, Human
gcaggcagagaaggaacauuua

SEQ ID NO: 655097 - RNA, 22 nt, Human
auagcuucagaauugagauauc

SEQ ID NO: 655098 - RNA, 22 nt, Human
aguaggacuagggguugaggca

SEQ ID NO: 655099 - RNA, 22 nt, Human
gcuggcagccaagugaagaggg

SEQ ID NO: 655100 - RNA, 22 nt, Human
gacaggcugugauggccgggag

SEQ ID NO: 655101 - RNA, 18 nt, Human
gugucuuauuacaguggg

SEQ ID NO: 655102 - RNA, 21 nt, Human
ucagagucucaggagcaaggg

SEQ ID NO: 655103 - RNA, 22 nt, Human
cugugccugcaggccacaucaa

SEQ ID NO: 655104 - RNA, 22 nt, Human
cccuugggcuucagcccuaccg

SEQ ID NO: 655105 - RNA, 22 nt, Human
uaagacacaaauaucuuuuaca

SEQ ID NO: 655106 - RNA, 18 nt, Human
aguaggcacugugggguu

SEQ ID NO: 655107 - RNA, 22 nt, Human
ccugaggcaaggacuugguggc

SEQ ID NO: 655108 - RNA, 22 nt, Human
agcccagcugccugccugcugu

SEQ ID NO: 655109 - RNA, 22 nt, Human
ccuugccucauugugcuucucc

SEQ ID NO: 655110 - RNA, 22 nt, Human
agcccagagacaaugcucagua

SEQ ID NO: 655111 - RNA, 22 nt, Human
aagguauuauuugcaaucauuu

SEQ ID NO: 655112 - RNA, 22 nt, Human
ggcagagcuugcagugagccga

SEQ ID NO: 655113 - RNA, 22 nt, Human
ggggaccuuuccauuucugaga

SEQ ID NO: 655114 - RNA, 22 nt, Human
ugcugccuaacagaacucuuuc

SEQ ID NO: 655115 - RNA, 22 nt, Human
agauugcuaaugaaguucuuga

SEQ ID NO: 655116 - RNA, 22 nt, Human
uuggcagagccccagccuugga

SEQ ID NO: 655117 - RNA, 22 nt, Human
ugcuggaaauaggcauuguagc

SEQ ID NO: 655118 - RNA, 22 nt, Human
augucugucuauagccaugaga

SEQ ID NO: 655119 - RNA, 22 nt, Human
aacccaggagacggaguuugug

SEQ ID NO: 655120 - RNA, 22 nt, Human
agugggaggcggcugacgggcg

SEQ ID NO: 655121 - RNA, 22 nt, Human
aggugccagugcuguggucccc

SEQ ID NO: 655122 - RNA, 22 nt, Human
ucccuccccacuucugagcuuu

SEQ ID NO: 655123 - RNA, 22 nt, Human
ucugggaggucacauuggucuu

SEQ ID NO: 655124 - RNA, 22 nt, Human
ucucagaggucuucagccucug

SEQ ID NO: 655125 - RNA, 22 nt, Human
aaggcuuuaugugaccaaaaga

SEQ ID NO: 655126 - RNA, 22 nt, Human
cauguucaccuguggcacuagu

SEQ ID NO: 655127 - RNA, 22 nt, Human
uccaggacugguucacacggug

SEQ ID NO: 655128 - RNA, 22 nt, Human
aggggcuucccuuccuggguag

SEQ ID NO: 655129 - RNA, 22 nt, Human
uuccaagagcuuuaauuguuga

SEQ ID NO: 655130 - RNA, 22 nt, Human
aagaaucauuguaaaguucugu

SEQ ID NO: 655131 - RNA, 22 nt, Human
cagcccagccgagggccuggcu

SEQ ID NO: 655132 - RNA, 22 nt, Human
ucuuuguaacugucuauugaga

SEQ ID NO: 655133 - RNA, 22 nt, Human
auucauucugaccucaagagaa

SEQ ID NO: 655134 - RNA, 22 nt, Human
ugaagccaucaggaagccagca

SEQ ID NO: 655135 - RNA, 20 nt, Human
uccagcucaguuuuuuuguc

SEQ ID NO: 655136 - RNA, 22 nt, Human
cccugcccugggcagaaguggg

SEQ ID NO: 655137 - RNA, 22 nt, Human
uauggcaguuacccuugaugau

SEQ ID NO: 655138 - RNA, 22 nt, Human
cuggcuuucauuucaagcacgu

SEQ ID NO: 655139 - RNA, 20 nt, Human
ugcauuaaguggcauugagc

SEQ ID NO: 655140 - RNA, 22 nt, Human
gaggcucagagacuuuaaguuu

SEQ ID NO: 655141 - RNA, 22 nt, Human
ccagaagacaagaauguucuua

SEQ ID NO: 655142 - RNA, 22 nt, Human
uggagaggaaagugcaguuuug

SEQ ID NO: 655143 - RNA, 22 nt, Human
agaauuacagcuuuuagaauag

SEQ ID NO: 655144 - RNA, 22 nt, Human
ccagagggcccuggucucagcu

SEQ ID NO: 655145 - RNA, 20 nt, Human
ggcuuaaggaauucuuuucu

SEQ ID NO: 655146 - RNA, 22 nt, Human
uuguccuguuacuuguuuggau

SEQ ID NO: 655147 - RNA, 22 nt, Human
aggaaugacuuguagcucugag

SEQ ID NO: 655148 - RNA, 22 nt, Human
cagagccucucagccccuuggg

SEQ ID NO: 655149 - RNA, 22 nt, Human
caggaaauaggcguuuguccuc

SEQ ID NO: 655150 - RNA, 22 nt, Human
aguagggaauacauugggguaa

SEQ ID NO: 655151 - RNA, 20 nt, Human
ugggcacagcuuuggagggc

SEQ ID NO: 655152 - RNA, 22 nt, Human
acacuugaggaauguggugauu

SEQ ID NO: 655153 - RNA, 22 nt, Human
gugggugucucaagaauggggg

SEQ ID NO: 655154 - RNA, 22 nt, Human
ccccaaagccucagccugccug

SEQ ID NO: 655155 - RNA, 19 nt, Human
auggaaaauuguacucaau

SEQ ID NO: 655156 - RNA, 22 nt, Human
acugagcugcuugaagugaacu

SEQ ID NO: 655157 - RNA, 22 nt, Human
ggugagaaagggauuccuguuc

SEQ ID NO: 655158 - RNA, 17 nt, Human
ugguccagguggagcca

SEQ ID NO: 655159 - RNA, 22 nt, Human
ucugucaucuguucagugcuca

SEQ ID NO: 655160 - RNA, 22 nt, Human
acauaaguuauggauaaaaugu

SEQ ID NO: 655161 - RNA, 22 nt, Human
uacuguuuucuuuauaguacag

SEQ ID NO: 655162 - RNA, 22 nt, Human
augacacaauuuuagagcugaa

SEQ ID NO: 655163 - RNA, 22 nt, Human
ggagcuaggcaaagcucacgga

SEQ ID NO: 655164 - RNA, 16 nt, Human
cuggcccuggcucugg

SEQ ID NO: 655165 - RNA, 22 nt, Human
ccuggagucugugacuuuccuc

SEQ ID NO: 655166 - RNA, 20 nt, Human
uauauuuucucuuuggccuu

SEQ ID NO: 655167 - RNA, 22 nt, Human
cagcccucucugggccccaagg

SEQ ID NO: 655168 - RNA, 22 nt, Human
ggcugggacgaugaggauuagu

SEQ ID NO: 655169 - RNA, 19 nt, Human
uuugaaaggauuguuauuu

SEQ ID NO: 655170 - RNA, 22 nt, Human
cucaugucuucacccauucuaa

SEQ ID NO: 655171 - RNA, 22 nt, Human
guccuggggauuauagaguguu

SEQ ID NO: 655172 - RNA, 22 nt, Human
agagccuggaccugggcucuga

SEQ ID NO: 655173 - RNA, 22 nt, Human
acagugcaaacuuuugucuccu

SEQ ID NO: 655174 - RNA, 22 nt, Human
uugcauugcuuggucuucaaga

SEQ ID NO: 655175 - RNA, 22 nt, Human
ggcuccugcuguccuuugaagc

SEQ ID NO: 655176 - RNA, 22 nt, Human
acaugaaaagacuaucugauua

SEQ ID NO: 655177 - RNA, 22 nt, Human
gcaggaugccagggcagcagcg

SEQ ID NO: 655178 - RNA, 22 nt, Human
aauaguaaaagauacagcuaau

SEQ ID NO: 655179 - RNA, 22 nt, Human
agacaauuuuugguuuugcaag

SEQ ID NO: 655180 - RNA, 22 nt, Human
gucccucacccagaugcuccca

SEQ ID NO: 655181 - RNA, 22 nt, Human
cugagcaugcuacaugcagcac

SEQ ID NO: 655182 - RNA, 22 nt, Human
ucuuuaaaguuggagcuugcaa

SEQ ID NO: 655183 - RNA, 22 nt, Human
caggaacauguuggaaagaaau

SEQ ID NO: 655184 - RNA, 22 nt, Human
caaaaccuaaacagacugucca

SEQ ID NO: 655185 - RNA, 22 nt, Human
ucuucauuuugaagaggcagaa

SEQ ID NO: 655186 - RNA, 22 nt, Human
ugcugcuucaccuguuguacag

SEQ ID NO: 655187 - RNA, 22 nt, Human
aaugucugccugaacuuuauau

SEQ ID NO: 655188 - RNA, 21 nt, Human
caggaaaucagugugaauuag

SEQ ID NO: 655189 - RNA, 23 nt, Human
cugcaacucagucuggagcaguu

SEQ ID NO: 655190 - RNA, 22 nt, Human
auucauagcucaguacagacuc

SEQ ID NO: 655191 - RNA, 22 nt, Human
ggcugccuucauagaccauggg

SEQ ID NO: 655192 - RNA, 22 nt, Human
gugugcagugagcaaaagaucu

SEQ ID NO: 655193 - RNA, 22 nt, Human
agacaggaugcauacucuuggu

SEQ ID NO: 655194 - RNA, 22 nt, Human
aggugucuuugcggcccgccgc

SEQ ID NO: 655195 - RNA, 22 nt, Human
uaccauuguaccaagguaauuu

SEQ ID NO: 655196 - RNA, 22 nt, Human
ugagggagucaugauuaaggaa

SEQ ID NO: 655197 - RNA, 22 nt, Human
aggauacacggggauuuaugua

SEQ ID NO: 655198 - RNA, 22 nt, Human
ggcacacauagaucugcacugg

SEQ ID NO: 655199 - RNA, 22 nt, Human
ugacucugauugccuuagcuug

SEQ ID NO: 655200 - RNA, 22 nt, Human
cagcagaguuuggcuucuaaug

SEQ ID NO: 655201 - RNA, 22 nt, Human
gagauucugugaaacggacauu

SEQ ID NO: 655202 - RNA, 22 nt, Human
agagcagauuucaaauauuggc

SEQ ID NO: 655203 - RNA, 22 nt, Human
ugaggcagguggauuacaaggu

SEQ ID NO: 655204 - RNA, 22 nt, Human
acuuuagaaaaggaacagagga

SEQ ID NO: 655205 - RNA, 22 nt, Human
aagagcugcaucuaagccauga

SEQ ID NO: 655206 - RNA, 22 nt, Human
ugcugccuggagccuuuuguuu

SEQ ID NO: 655207 - RNA, 22 nt, Human
accugccuaucagcugccugcu

SEQ ID NO: 655208 - RNA, 22 nt, Human
cugugucggacgugggcagcag

SEQ ID NO: 655209 - RNA, 22 nt, Human
gcuggcugcagauuuuagaggu

SEQ ID NO: 655210 - RNA, 22 nt, Human
cauccagcuccugggggccacc

SEQ ID NO: 655211 - RNA, 18 nt, Human
acucaggaaaugaugaca

SEQ ID NO: 655212 - RNA, 22 nt, Human
gcagcaguggcaguuaauauuu

SEQ ID NO: 655213 - RNA, 20 nt, Human
ugcaaacacagaguguauga

SEQ ID NO: 655214 - RNA, 21 nt, Human
ucagcauccugagcuguccuc

SEQ ID NO: 655215 - RNA, 22 nt, Human
uaaaggauaacuuucaagaauu

SEQ ID NO: 655216 - RNA, 22 nt, Human
uuguugucauuguagaggauuu

SEQ ID NO: 655217 - RNA, 22 nt, Human
aggccucacucucagagcuucu

SEQ ID NO: 655218 - RNA, 21 nt, Human
ugcaguccuuugacaugauuc

SEQ ID NO: 655219 - RNA, 22 nt, Human
uuuaaaguuuuugcacauucug

SEQ ID NO: 655220 - RNA, 22 nt, Human
aagugcaucacuacucauuaca

SEQ ID NO: 655221 - RNA, 22 nt, Human
cugggaggcagucucucuagaa

SEQ ID NO: 655222 - RNA, 23 nt, Human
ugcuuauucaaaaggugcuuuca

SEQ ID NO: 655223 - RNA, 22 nt, Human
caguuucucucauacauauuug

SEQ ID NO: 655224 - RNA, 20 nt, Human
cccugagaccagagagcagc

SEQ ID NO: 655225 - RNA, 22 nt, Human
ucugagcacaucacacagcuca

SEQ ID NO: 655226 - RNA, 22 nt, Human
ugguauguaaauuguaacucaa

SEQ ID NO: 655227 - RNA, 22 nt, Human
uuucaaagggaaguuaugaagu

SEQ ID NO: 655228 - RNA, 22 nt, Human
acaguguuuauguacagauugu

SEQ ID NO: 655229 - RNA, 22 nt, Human
agaaagcaucuccauuguaggu

SEQ ID NO: 655230 - RNA, 18 nt, Human
ccgggcuuuggugacaca

SEQ ID NO: 655231 - RNA, 22 nt, Human
auggccagagagagcacaccug

SEQ ID NO: 655232 - RNA, 22 nt, Human
ugcuccaucucucgugguucca

SEQ ID NO: 655233 - RNA, 22 nt, Human
cuuaaaguagaauacaagaccu

SEQ ID NO: 655234 - RNA, 22 nt, Human
uggccugggccggcagauauac

SEQ ID NO: 655235 - RNA, 22 nt, Human
aaugucauagcauuucuucaau

SEQ ID NO: 655236 - RNA, 22 nt, Human
gaggugggagggcagucccuaa

SEQ ID NO: 655237 - RNA, 22 nt, Human
cucuagcugaggucacugcuau

SEQ ID NO: 655238 - RNA, 22 nt, Human
augcuauuuaccacacaucauu

SEQ ID NO: 655239 - RNA, 20 nt, Human
acugcuucuuucucugaccu

SEQ ID NO: 655240 - RNA, 22 nt, Human
ucuuguauuugauuccuuccaa

SEQ ID NO: 655241 - RNA, 22 nt, Human
gccacauagaggaggauauuaa

SEQ ID NO: 655242 - RNA, 22 nt, Human
agccuggcacugaggcagggcg

SEQ ID NO: 655243 - RNA, 22 nt, Human
uuaccuguguguuugauacaua

SEQ ID NO: 655244 - RNA, 22 nt, Human
aguuuaugaaacacagauuuga

SEQ ID NO: 655245 - RNA, 22 nt, Human
gaauuuuaucuuauuacuugca

SEQ ID NO: 655246 - RNA, 22 nt, Human
agccuggcuaaauucucccaug

SEQ ID NO: 655247 - RNA, 22 nt, Human
ugcuccagcaacaggcuuagcu

SEQ ID NO: 655248 - RNA, 22 nt, Human
cauguguagugaaauaagcagu

SEQ ID NO: 655249 - RNA, 22 nt, Human
cuauaucauaaaucugaagagg

SEQ ID NO: 655250 - RNA, 22 nt, Human
uccaggccauugacugcauccu

SEQ ID NO: 655251 - RNA, 22 nt, Human
ucccugggaacaaaggaugaga

SEQ ID NO: 655252 - RNA, 22 nt, Human
agggagaagguccaugccuguc

SEQ ID NO: 655253 - RNA, 22 nt, Human
gacaugaaccuaccauaaugau

SEQ ID NO: 655254 - RNA, 22 nt, Human
aagcagcugaaggauucagggu

SEQ ID NO: 655255 - RNA, 22 nt, Human
gcuuuagagaagaaagguugcu

SEQ ID NO: 655256 - RNA, 22 nt, Human
cugcugacuuacacuguuuauu

SEQ ID NO: 655257 - RNA, 22 nt, Human
uagccucucuccuccacaaccu

SEQ ID NO: 655258 - RNA, 22 nt, Human
cuguaagaugggauaagacuuu

SEQ ID NO: 655259 - RNA, 20 nt, Human
gcacuuggcugcugcuucuc

SEQ ID NO: 655260 - RNA, 22 nt, Human
gccacuauuuucccaccuuucu

SEQ ID NO: 655261 - RNA, 22 nt, Human
gaggcugauucggggaacagca

SEQ ID NO: 655262 - RNA, 22 nt, Human
aagcuggcaugucaccugagaa

SEQ ID NO: 655263 - RNA, 22 nt, Human
uucugucauuuagcauugucau

SEQ ID NO: 655264 - RNA, 22 nt, Human
cauucaaacauuaauuuauuca

SEQ ID NO: 655265 - RNA, 19 nt, Human
cuguccuuggcugcacugu

SEQ ID NO: 655266 - RNA, 21 nt, Human
gacuuuaauuugagagcaaaa

SEQ ID NO: 655267 - RNA, 22 nt, Human
gucuggaagugucuuguuaagu

SEQ ID NO: 655268 - RNA, 22 nt, Human
ugcucccagcuccugcagcaac

SEQ ID NO: 655269 - RNA, 22 nt, Human
uccagccuugccacuuuucugu

SEQ ID NO: 655270 - RNA, 22 nt, Human
ucuuuagugaccaucucauucu

SEQ ID NO: 655271 - RNA, 22 nt, Human
ugucuuuagagucacaaaacca

SEQ ID NO: 655272 - RNA, 22 nt, Human
uggcuucuuuccacuguccugu

SEQ ID NO: 655273 - RNA, 22 nt, Human
ggaggcggagcuugcagugagc

SEQ ID NO: 655274 - RNA, 22 nt, Human
cuccagggaaaggggcguccgc

SEQ ID NO: 655275 - RNA, 22 nt, Human
aaaggucuucucaaacauccca

SEQ ID NO: 655276 - RNA, 19 nt, Human
acauuuaaauucagaucuc

SEQ ID NO: 655277 - RNA, 22 nt, Human
uuucacauuuguuuuaagaagu

SEQ ID NO: 655278 - RNA, 22 nt, Human
agaguuuguguccuuuaucagg

SEQ ID NO: 655279 - RNA, 22 nt, Human
ugaggccaggacccccagcagg

SEQ ID NO: 655280 - RNA, 22 nt, Human
aaacaauccaggaaccuguuua

SEQ ID NO: 655281 - RNA, 22 nt, Human
uucacauuucucugcuguuuga

SEQ ID NO: 655282 - RNA, 22 nt, Human
uucuguuuauuccuaggagcuc

SEQ ID NO: 655283 - RNA, 22 nt, Human
gcugugggccacacggcugagu

SEQ ID NO: 655284 - RNA, 22 nt, Human
ucugagguccugugauuucucu

SEQ ID NO: 655285 - RNA, 22 nt, Human
uguagcaguuuuucauuaucca

SEQ ID NO: 655286 - RNA, 20 nt, Human
ggcauuagauuuuaaauguc

SEQ ID NO: 655287 - RNA, 22 nt, Human
gacaguuaggacaacugacuuc

SEQ ID NO: 655288 - RNA, 22 nt, Human
auggccagcuuauaggggcuca

SEQ ID NO: 655289 - RNA, 21 nt, Human
ucaaagacuggggcugugugc

SEQ ID NO: 655290 - RNA, 22 nt, Human
uucuguuacuugcaaccacagg

SEQ ID NO: 655291 - RNA, 22 nt, Human
acugcuuccugagaaaucaaca

SEQ ID NO: 655292 - RNA, 22 nt, Human
ucugggcagcagcagcuaguag

SEQ ID NO: 655293 - RNA, 22 nt, Human
aagaguauagcuuuaggauuga

SEQ ID NO: 655294 - RNA, 22 nt, Human
gcaggcugcugagauccuuagg

SEQ ID NO: 655295 - RNA, 22 nt, Human
gacuucacaauaaugugacacu

SEQ ID NO: 655296 - RNA, 22 nt, Human
acucuggguccugccauucacu

SEQ ID NO: 655297 - RNA, 22 nt, Human
gauuuuacugucuguguaucuc

SEQ ID NO: 655298 - RNA, 22 nt, Human
ucauuuguaccauuuuuuaaga

SEQ ID NO: 655299 - RNA, 22 nt, Human
guuuuucuaaguagcgauauuu

SEQ ID NO: 655300 - RNA, 19 nt, Human
uguuaugacuuugccuuuu

SEQ ID NO: 655301 - RNA, 22 nt, Human
uugggggcauauugaguagugg

SEQ ID NO: 655302 - RNA, 22 nt, Human
aaaccaucagauaauucauacu

SEQ ID NO: 655303 - RNA, 22 nt, Human
uauuucuauuccccaggcaagu

SEQ ID NO: 655304 - RNA, 22 nt, Human
uccuggccuccguucucugcau

SEQ ID NO: 655305 - RNA, 22 nt, Human
agucaguggcuccgagccuggu

SEQ ID NO: 655306 - RNA, 22 nt, Human
caugcauuuggaguuuucaagu

SEQ ID NO: 655307 - RNA, 23 nt, Human
agucucagcuggaaacauguguc

SEQ ID NO: 655308 - RNA, 22 nt, Human
aguggggccggugaggccgagg

SEQ ID NO: 655309 - RNA, 22 nt, Human
ugaggcuggcaaggcugguauu

SEQ ID NO: 655310 - RNA, 22 nt, Human
ucaggagagaaagaauacaauu

SEQ ID NO: 655311 - RNA, 21 nt, Human
agagaagggacucuuccaguc

SEQ ID NO: 655312 - RNA, 22 nt, Human
uucuucuuaauguccugggaac

SEQ ID NO: 655313 - RNA, 20 nt, Human
ucauugcacauaauggaagc

SEQ ID NO: 655314 - RNA, 22 nt, Human
auggccuuucucaguggugcuu

SEQ ID NO: 655315 - RNA, 22 nt, Human
cacagcagagggagccauugaa

SEQ ID NO: 655316 - RNA, 22 nt, Human
cucaguaaggaugcuucagcgg

SEQ ID NO: 655317 - RNA, 22 nt, Human
ggccucucuggcauggcugccc

SEQ ID NO: 655318 - RNA, 22 nt, Human
agcucugauccauaauuuauac

SEQ ID NO: 655319 - RNA, 22 nt, Human
uagacacaucaaguauaguuaa

SEQ ID NO: 655320 - RNA, 22 nt, Human
gcuguuauaauauucuguuugu

SEQ ID NO: 655321 - RNA, 22 nt, Human
cuguggcugcgcccugggggag

SEQ ID NO: 655322 - RNA, 22 nt, Human
aggaggcucucagguccucccc

SEQ ID NO: 655323 - RNA, 22 nt, Human
cugcucuggucucuucauguuu

SEQ ID NO: 655324 - RNA, 22 nt, Human
uuccuucagcaaguccugagca

SEQ ID NO: 655325 - RNA, 22 nt, Human
aaauugcuaaggaucucaugug

SEQ ID NO: 655326 - RNA, 22 nt, Human
gcccuggacagugacggugacc

SEQ ID NO: 655327 - RNA, 22 nt, Human
agucaauucuuuucaacucaag

SEQ ID NO: 655328 - RNA, 20 nt, Human
auguagcagugugcugggaa

SEQ ID NO: 655329 - RNA, 22 nt, Human
ugguccuggggaucugcaguga

SEQ ID NO: 655330 - RNA, 22 nt, Human
gugcauaugguuacagcaccgc

SEQ ID NO: 655331 - RNA, 22 nt, Human
uucaguauuucaugacuuucuu

SEQ ID NO: 655332 - RNA, 22 nt, Human
caggaacaggggagugaaccug

SEQ ID NO: 655333 - RNA, 22 nt, Human
uuuaguagaaugauacagggca

SEQ ID NO: 655334 - RNA, 22 nt, Human
auuccacauaggccuucaugac

SEQ ID NO: 655335 - RNA, 22 nt, Human
cugccuccucacguccacagug

SEQ ID NO: 655336 - RNA, 22 nt, Human
aaugucucucuaaauaaacuuu

SEQ ID NO: 655337 - RNA, 22 nt, Human
gcagauggcagcccaggcuggg

SEQ ID NO: 655338 - RNA, 22 nt, Human
cuuaggaugaguuuuugcguuu

SEQ ID NO: 655339 - RNA, 22 nt, Human
ccagggcagccaacccagaugc

SEQ ID NO: 655340 - RNA, 22 nt, Human
guccagagcuggcacacuguca

SEQ ID NO: 655341 - RNA, 22 nt, Human
gccuuggacucggguggacuca

SEQ ID NO: 655342 - RNA, 22 nt, Human
ugugccuggagucccugaggag

SEQ ID NO: 655343 - RNA, 22 nt, Human
aaacugaaacaucaucauguug

SEQ ID NO: 655344 - RNA, 22 nt, Human
uauuaugaggggcagagggcau

SEQ ID NO: 655345 - RNA, 22 nt, Human
uggcauguuuaauguacuguau

SEQ ID NO: 655346 - RNA, 22 nt, Human
cagguacacucccuugugcuga

SEQ ID NO: 655347 - RNA, 22 nt, Human
aagcuuggaagucuuccuuuca

SEQ ID NO: 655348 - RNA, 22 nt, Human
ugcauauuuuauaaagauggaa

SEQ ID NO: 655349 - RNA, 22 nt, Human
acagggcagcaacuuugugccu

SEQ ID NO: 655350 - RNA, 22 nt, Human
gcccugagccaccaaugccauu

SEQ ID NO: 655351 - RNA, 23 nt, Human
cacaaagguuccauucucucacc

SEQ ID NO: 655352 - RNA, 22 nt, Human
guuuccacuuauaugguaccua

SEQ ID NO: 655353 - RNA, 22 nt, Human
ccacuguaguuaugaugaaguu

SEQ ID NO: 655354 - RNA, 22 nt, Human
cagcaucaacauucucagcucu

SEQ ID NO: 655355 - RNA, 22 nt, Human
gugaggauugcucuggagaauu

SEQ ID NO: 655356 - RNA, 23 nt, Human
ggguccagccaauuccaaggaaa

SEQ ID NO: 655357 - RNA, 22 nt, Human
gcaggauugggcugaaggagug

SEQ ID NO: 655358 - RNA, 21 nt, Human
agaggcaggcauuaaguacac

SEQ ID NO: 655359 - RNA, 22 nt, Human
agaaggaaaaccugucuuaugu

SEQ ID NO: 655360 - RNA, 22 nt, Human
agaaggguagggacuuauccaa

SEQ ID NO: 655361 - RNA, 22 nt, Human
gcugggagcccuggucugcucc

SEQ ID NO: 655362 - RNA, 22 nt, Human
auuucaugugaagaagagauaa

SEQ ID NO: 655363 - RNA, 22 nt, Human
ugcgggucccagggucacaggc

SEQ ID NO: 655364 - RNA, 23 nt, Human
cugaggccugcugcguucagguu

SEQ ID NO: 655365 - RNA, 22 nt, Human
cccagggguaaggcgcagcgug

SEQ ID NO: 655366 - RNA, 22 nt, Human
cagaguguggcaucuuccaacu

SEQ ID NO: 655367 - RNA, 22 nt, Human
gcuggcagcuggaaguugggcu

SEQ ID NO: 655368 - RNA, 22 nt, Human
uauguacaccaaggauugaaaa

SEQ ID NO: 655369 - RNA, 22 nt, Human
gguggggcuaggaccucaggau

SEQ ID NO: 655370 - RNA, 22 nt, Human
caaguccaggugggcaaauaaa

SEQ ID NO: 655371 - RNA, 19 nt, Human
agcagcagaagugugccuu

SEQ ID NO: 655372 - RNA, 22 nt, Human
aaucauguacugcuguggcuuu

SEQ ID NO: 655373 - RNA, 22 nt, Human
caacaccuugaucuuggacuuc

SEQ ID NO: 655374 - RNA, 22 nt, Human
ucagggcugccgggcagaccgu

SEQ ID NO: 655375 - RNA, 22 nt, Human
ccagaggugguggugucuagaa

SEQ ID NO: 655376 - RNA, 22 nt, Human
uagacauuuuaagacauauacc

SEQ ID NO: 655377 - RNA, 18 nt, Human
aggcaugguggugcgcac

SEQ ID NO: 655378 - RNA, 22 nt, Human
ugguuacagagauuuuuaagau

SEQ ID NO: 655379 - RNA, 22 nt, Human
ucugggcuauauggucucugcu

SEQ ID NO: 655380 - RNA, 22 nt, Human
cgagauccuucagagcgcggac

SEQ ID NO: 655381 - RNA, 22 nt, Human
ugguuuucuggugguggcagug

SEQ ID NO: 655382 - RNA, 22 nt, Human
auuucucuuagcaagacauuac

SEQ ID NO: 655383 - RNA, 22 nt, Human
ucccugcagccccugagccuuc

SEQ ID NO: 655384 - RNA, 22 nt, Human
gcuucauuacugacagucugug

SEQ ID NO: 655385 - RNA, 22 nt, Human
uuaugcaaggacuuauuacagu

SEQ ID NO: 655386 - RNA, 22 nt, Human
gcagcagcucccuauccaggcu

SEQ ID NO: 655387 - RNA, 22 nt, Human
ucauaaaguuacccaaauuuua

SEQ ID NO: 655388 - RNA, 22 nt, Human
guguggcccugcguccugaguc

SEQ ID NO: 655389 - RNA, 22 nt, Human
cagguccagaaaccaaaggauu

SEQ ID NO: 655390 - RNA, 22 nt, Human
cugcucugaguauuaacggagg

SEQ ID NO: 655391 - RNA, 22 nt, Human
ccuccagcauuacuggcccaug

SEQ ID NO: 655392 - RNA, 22 nt, Human
gcaauacucaacacuuuugcuu

SEQ ID NO: 655393 - RNA, 22 nt, Human
aaagcuguuguauggcccuugg

SEQ ID NO: 655394 - RNA, 22 nt, Human
ccagaugggccagggguuuguu

SEQ ID NO: 655395 - RNA, 22 nt, Human
uaaaagagaauggauaacagag

SEQ ID NO: 655396 - RNA, 22 nt, Human
gcagagcagaggugcagguugg

SEQ ID NO: 655397 - RNA, 22 nt, Human
gcaaacauguugugagauacca

SEQ ID NO: 655398 - RNA, 17 nt, Human
caucugcucugccccuu

SEQ ID NO: 655399 - RNA, 22 nt, Human
gcuggagauacugcucaguauc

SEQ ID NO: 655400 - RNA, 22 nt, Human
guuuucuaccagggaagagagu

SEQ ID NO: 655401 - RNA, 22 nt, Human
ugcaggugcugugucaagagag

SEQ ID NO: 655402 - RNA, 22 nt, Human
uccugucuuaaugaucucgugc

SEQ ID NO: 655403 - RNA, 22 nt, Human
ugacuugucucuuugggagaca

SEQ ID NO: 655404 - RNA, 22 nt, Human
acgugcaucuuuccauaugugg

SEQ ID NO: 655405 - RNA, 22 nt, Human
acacauaugccauuacagcaaa

SEQ ID NO: 655406 - RNA, 22 nt, Human
aaggcacauauuuuagagucac

SEQ ID NO: 655407 - RNA, 22 nt, Human
agauuuccugcacugccuuuga

SEQ ID NO: 655408 - RNA, 22 nt, Human
auuucugccauagccaggggau

SEQ ID NO: 655409 - RNA, 19 nt, Human
aaacucauagacucauauu

SEQ ID NO: 655410 - RNA, 20 nt, Human
uccucagaagacauuugggg

SEQ ID NO: 655411 - RNA, 22 nt, Human
gcuccuucaggugguagcuguu

SEQ ID NO: 655412 - RNA, 23 nt, Human
uccucgcaggagggagaugaugc

SEQ ID NO: 655413 - RNA, 22 nt, Human
acaguucuuaaaacuugaauua

SEQ ID NO: 655414 - RNA, 22 nt, Human
gcaggcucguuggaaguccccu

SEQ ID NO: 655415 - RNA, 19 nt, Human
aguccaugaauggaggaug

SEQ ID NO: 655416 - RNA, 20 nt, Human
cuguuaaaagguaugaauuc

SEQ ID NO: 655417 - RNA, 22 nt, Human
aggaaaaucgagucuggaggca

SEQ ID NO: 655418 - RNA, 22 nt, Human
uagaaagcaguaucuccauuuu

SEQ ID NO: 655419 - RNA, 22 nt, Human
uuauggcuaaauuucaauauua

SEQ ID NO: 655420 - RNA, 22 nt, Human
ugaggaauguuuugagugccga

SEQ ID NO: 655421 - RNA, 22 nt, Human
uccgauuagcucuuuauaaaac

SEQ ID NO: 655422 - RNA, 22 nt, Human
agcuucuuuuacagcucaugcu

SEQ ID NO: 655423 - RNA, 20 nt, Human
uauaacaguguugggugugu

SEQ ID NO: 655424 - RNA, 22 nt, Human
gggccagaccucuucucaggga

SEQ ID NO: 655425 - RNA, 22 nt, Human
ggcgccagcacugcagcgccuc

SEQ ID NO: 655426 - RNA, 22 nt, Human
gaagaggacuguggcauccuag

SEQ ID NO: 655427 - RNA, 22 nt, Human
uacaagcucacaaauuuuuaag

SEQ ID NO: 655428 - RNA, 22 nt, Human
ccugcuucagggaugauggcac

SEQ ID NO: 655429 - RNA, 22 nt, Human
gaacuauaucuucaagaaaaug

SEQ ID NO: 655430 - RNA, 22 nt, Human
ucauugccauggcauuugcaga

SEQ ID NO: 655431 - RNA, 22 nt, Human
aggcaugacuuuggcugaagaa

SEQ ID NO: 655432 - RNA, 22 nt, Human
guccacucuagggcagcucucg

SEQ ID NO: 655433 - RNA, 22 nt, Human
ugggaaauauaauuuagcugug

SEQ ID NO: 655434 - RNA, 22 nt, Human
gcucucuuugugccacuuaagg

SEQ ID NO: 655435 - RNA, 22 nt, Human
ucugaacuccagcccugcucuc

SEQ ID NO: 655436 - RNA, 20 nt, Human
ccagugggaagugauuaggu

SEQ ID NO: 655437 - RNA, 22 nt, Human
ggaacacucagaaaugcucguc

SEQ ID NO: 655438 - RNA, 22 nt, Human
aaacuucauuuucaacugcaaa

SEQ ID NO: 655439 - RNA, 22 nt, Human
agcacugauuuaaacuggauuu

SEQ ID NO: 655440 - RNA, 22 nt, Human
ggaggccaucuggcuggaggcu

SEQ ID NO: 655441 - RNA, 22 nt, Human
gacuggcucuaucuccuuggcg

SEQ ID NO: 655442 - RNA, 22 nt, Human
gcaccagggagggugugcuuca

SEQ ID NO: 655443 - RNA, 22 nt, Human
aucuccuuggucucguuccagg

SEQ ID NO: 655444 - RNA, 22 nt, Human
ggcccagagcucccuggcaccu

SEQ ID NO: 655445 - RNA, 22 nt, Human
uauuucccagggagcaacaagc

SEQ ID NO: 655446 - RNA, 22 nt, Human
aagucacuggaggaacucuacu

SEQ ID NO: 655447 - RNA, 22 nt, Human
agaaauguugaauacacaaaau

SEQ ID NO: 655448 - RNA, 22 nt, Human
ccacagggcucuaggcgcuucc

SEQ ID NO: 655449 - RNA, 22 nt, Human
cuuuacagcuuagugguaugga

SEQ ID NO: 655450 - RNA, 22 nt, Human
ggauggagguucucagaugcuc

SEQ ID NO: 655451 - RNA, 22 nt, Human
acacuucaaaugguuggaaaau

SEQ ID NO: 655452 - RNA, 22 nt, Human
ccugucuguuugcccauucuug

SEQ ID NO: 655453 - RNA, 22 nt, Human
auuacacagcgguuacuacuag

SEQ ID NO: 655454 - RNA, 22 nt, Human
cagaaguggccucagagggagu

SEQ ID NO: 655455 - RNA, 19 nt, Human
gcugugugaccuugggcaa

SEQ ID NO: 655456 - RNA, 22 nt, Human
uccuuagggauuuuuccaguca

SEQ ID NO: 655457 - RNA, 22 nt, Human
caggcccauuuguagccacuuu

SEQ ID NO: 655458 - RNA, 20 nt, Human
cagcaggaaaagugccucag

SEQ ID NO: 655459 - RNA, 22 nt, Human
cuacaaauauaaaacacagaua

SEQ ID NO: 655460 - RNA, 22 nt, Human
aagcauauuuuaauuagccaca

SEQ ID NO: 655461 - RNA, 22 nt, Human
ggcucagguugggucacaugac

SEQ ID NO: 655462 - RNA, 22 nt, Human
aggugcagugaaggaaaaggaa

SEQ ID NO: 655463 - RNA, 22 nt, Human
uguguacucaauugagccauuu

SEQ ID NO: 655464 - RNA, 19 nt, Human
gggcaucaaagugcuggug

SEQ ID NO: 655465 - RNA, 22 nt, Human
aggagagaauguuccaggcuug

SEQ ID NO: 655466 - RNA, 22 nt, Human
cccagaguuggucaggggaccc

SEQ ID NO: 655467 - RNA, 19 nt, Human
acagaaauguaagugagac

SEQ ID NO: 655468 - RNA, 22 nt, Human
agcaggugcauggcgagcgcgg

SEQ ID NO: 655469 - RNA, 21 nt, Human
agggccagaucaccaaggagc

SEQ ID NO: 655470 - RNA, 22 nt, Human
auagaucaaugagcaauuuaau

SEQ ID NO: 655471 - RNA, 22 nt, Human
ugucuuuguuauuguggacagg

SEQ ID NO: 655472 - RNA, 22 nt, Human
aaguucaagaucaagguuccag

SEQ ID NO: 655473 - RNA, 22 nt, Human
ugcuggaaaguuaaauuuugga

SEQ ID NO: 655474 - RNA, 22 nt, Human
gcccugaggauuugcauuuccu

SEQ ID NO: 655475 - RNA, 22 nt, Human
acauacuuaacauuaaagucau

SEQ ID NO: 655476 - RNA, 22 nt, Human
aaacacacagaaaugaaugagg

SEQ ID NO: 655477 - RNA, 22 nt, Human
aggccacaggcacccuguguuc

SEQ ID NO: 655478 - RNA, 22 nt, Human
gugcccucaugaaacgaaggau

SEQ ID NO: 655479 - RNA, 22 nt, Human
uucuuacuacauuugcaggcua

SEQ ID NO: 655480 - RNA, 22 nt, Human
ccccaccagcacccucucuauc

SEQ ID NO: 655481 - RNA, 22 nt, Human
aaauagauuuccuagcauugga

SEQ ID NO: 655482 - RNA, 22 nt, Human
ugcagcagcuccagguuacccu

SEQ ID NO: 655483 - RNA, 22 nt, Human
aacaugaaaacuaccugugauu

SEQ ID NO: 655484 - RNA, 22 nt, Human
ggaaucagaugaggggcagagc

SEQ ID NO: 655485 - RNA, 22 nt, Human
gguguggguccuugugcuugcu

SEQ ID NO: 655486 - RNA, 22 nt, Human
cagcaguaauuagugcugcaug

SEQ ID NO: 655487 - RNA, 22 nt, Human
aaguaacaucugaacaugaugu

SEQ ID NO: 655488 - RNA, 22 nt, Human
ggaauguagaaucucuggucuc

SEQ ID NO: 655489 - RNA, 22 nt, Human
aauaucacaggaggagaccaag

SEQ ID NO: 655490 - RNA, 22 nt, Human
cuuacauugucuuaguuuucaa

SEQ ID NO: 655491 - RNA, 22 nt, Human
auucauguucggggccacguug

SEQ ID NO: 655492 - RNA, 21 nt, Human
uaacacauuuugguacuuugg

SEQ ID NO: 655493 - RNA, 22 nt, Human
ucagcaaguggaccauccuggg

SEQ ID NO: 655494 - RNA, 21 nt, Human
ugcuggaaaaagugguucuag

SEQ ID NO: 655495 - RNA, 22 nt, Human
gccuggaggcgagaacccaaug

SEQ ID NO: 655496 - RNA, 22 nt, Human
acuugggucacaugaccuaccu

SEQ ID NO: 655497 - RNA, 22 nt, Human
gcucaggcccagcggcuggugu

SEQ ID NO: 655498 - RNA, 22 nt, Human
ugcuggaggaguuuacuguggc

SEQ ID NO: 655499 - RNA, 22 nt, Human
uaucacaggugugauuuacauu

SEQ ID NO: 655500 - RNA, 22 nt, Human
gggcagagguucaacuucaaca

SEQ ID NO: 655501 - RNA, 22 nt, Human
ucuaaacauuaugauaguagag

SEQ ID NO: 655502 - RNA, 22 nt, Human
uuguuuauguaauuggcacacu

SEQ ID NO: 655503 - RNA, 22 nt, Human
aaauaacagucagggacaacau

SEQ ID NO: 655504 - RNA, 22 nt, Human
uggcacacagagaagacacuug

SEQ ID NO: 655505 - RNA, 22 nt, Human
cugaaacauugcaauaacaaag

SEQ ID NO: 655506 - RNA, 20 nt, Human
uccuucagacgacaagcaag

SEQ ID NO: 655507 - RNA, 22 nt, Human
ggagugaaucacuagaugcaga

SEQ ID NO: 655508 - RNA, 22 nt, Human
cugggcacuugcucacagcucu

SEQ ID NO: 655509 - RNA, 22 nt, Human
uauguuuuaggaauuaauuguu

SEQ ID NO: 655510 - RNA, 20 nt, Human
uccuugaaagugggguauau

SEQ ID NO: 655511 - RNA, 22 nt, Human
aacagcagggaaauuccaaguc

SEQ ID NO: 655512 - RNA, 22 nt, Human
guggugcaggugucacugcaga

SEQ ID NO: 655513 - RNA, 22 nt, Human
uaggauuuuuuggauucuggau

SEQ ID NO: 655514 - RNA, 22 nt, Human
cuuccaauagcaacaaagauua

SEQ ID NO: 655515 - RNA, 22 nt, Human
agccaggacguugcucagcucc

SEQ ID NO: 655516 - RNA, 22 nt, Human
uccagcaguccaugugagacac

SEQ ID NO: 655517 - RNA, 22 nt, Human
gggcugaccaaugccuugcuuu

SEQ ID NO: 655518 - RNA, 22 nt, Human
ggagccuggcaaugcugcgucc

SEQ ID NO: 655519 - RNA, 22 nt, Human
gacuccugggccucugagaggc

SEQ ID NO: 655520 - RNA, 22 nt, Human
aggucaagguucacaggggauc

SEQ ID NO: 655521 - RNA, 22 nt, Human
acauugaugugaugcagaagug

SEQ ID NO: 655522 - RNA, 22 nt, Human
agggcucugggguggcagagau

SEQ ID NO: 655523 - RNA, 20 nt, Human
ggcaggugcuguccccuccu

SEQ ID NO: 655524 - RNA, 22 nt, Human
ugugucugaacuaguugcucuc

SEQ ID NO: 655525 - RNA, 22 nt, Human
uggcuucuugggaugggucauu

SEQ ID NO: 655526 - RNA, 22 nt, Human
cucugagguccuacagugaccc

SEQ ID NO: 655527 - RNA, 22 nt, Human
ccugugugauuggaagcugaga

SEQ ID NO: 655528 - RNA, 22 nt, Human
aauccauugcugugcugccagg

SEQ ID NO: 655529 - RNA, 22 nt, Human
ucccagcauaacaaacugcccg

SEQ ID NO: 655530 - RNA, 22 nt, Human
aauaauuauuugagagcagacc

SEQ ID NO: 655531 - RNA, 22 nt, Human
agaguguuauuugcucuguauu

SEQ ID NO: 655532 - RNA, 22 nt, Human
aguacacaagacacauuuaaaa

SEQ ID NO: 655533 - RNA, 22 nt, Human
gauuuucugagccuucaaauuu

SEQ ID NO: 655534 - RNA, 22 nt, Human
agggcccucuggcaggccaggc

SEQ ID NO: 655535 - RNA, 22 nt, Human
ucucuggguaaaguucucucau

SEQ ID NO: 655536 - RNA, 22 nt, Human
ucaggacaaccuguuuucagac

SEQ ID NO: 655537 - RNA, 22 nt, Human
uucugugaaacuaaagagagga

SEQ ID NO: 655538 - RNA, 22 nt, Human
ugggacaggaugaccagaaggu

SEQ ID NO: 655539 - RNA, 22 nt, Human
ugagaauagcagacugguaacu

SEQ ID NO: 655540 - RNA, 22 nt, Human
uuucuucuaugugugauauuuu

SEQ ID NO: 655541 - RNA, 22 nt, Human
aaauaagcacuuaacuguauca

SEQ ID NO: 655542 - RNA, 22 nt, Human
gucucacacagaguagauuuug

SEQ ID NO: 655543 - RNA, 22 nt, Human
cuugaaaugacaggagcacauc

SEQ ID NO: 655544 - RNA, 19 nt, Human
cuacuuuauaauaugccuc

SEQ ID NO: 655545 - RNA, 22 nt, Human
uugagcucagugacucgacuuu

SEQ ID NO: 655546 - RNA, 22 nt, Human
cagguucuggagaugcagagau

SEQ ID NO: 655547 - RNA, 22 nt, Human
ucuccaggcuuuuugugaauug

SEQ ID NO: 655548 - RNA, 21 nt, Human
ggggccucuccacacagccgg

SEQ ID NO: 655549 - RNA, 19 nt, Human
ucagaggauuuggcuauga

SEQ ID NO: 655550 - RNA, 22 nt, Human
gugaggucauauagcgaacucc

SEQ ID NO: 655551 - RNA, 22 nt, Human
ugaacacuguauauucuucuug

SEQ ID NO: 655552 - RNA, 22 nt, Human
acccuuuguccaauagaaauga

SEQ ID NO: 655553 - RNA, 22 nt, Human
ccagcugcgggcaucgagaguu

SEQ ID NO: 655554 - RNA, 22 nt, Human
uuucagaggaaaucucauugag

SEQ ID NO: 655555 - RNA, 22 nt, Human
acucuaaugcuaauaguauuuu

SEQ ID NO: 655556 - RNA, 22 nt, Human
cauugcucaggcccagcaggaa

SEQ ID NO: 655557 - RNA, 22 nt, Human
cuccccaagccuuggcuucucc

SEQ ID NO: 655558 - RNA, 21 nt, Human
ucucuccucaagcucgacccc

SEQ ID NO: 655559 - RNA, 22 nt, Human
cuccuggccccagaucccaauc

SEQ ID NO: 655560 - RNA, 22 nt, Human
auuucauauguaucaccuagcc

SEQ ID NO: 655561 - RNA, 22 nt, Human
uuacugauggaacagagauaga

SEQ ID NO: 655562 - RNA, 22 nt, Human
augaguucauugcauuugacag

SEQ ID NO: 655563 - RNA, 22 nt, Human
uuuagcaaauuacucacagggu

SEQ ID NO: 655564 - RNA, 22 nt, Human
gagagcccuuagguuuagaguu

SEQ ID NO: 655565 - RNA, 19 nt, Human
ucauggaucagguaguuua

SEQ ID NO: 655566 - RNA, 22 nt, Human
gcuaggaguggugggucaagga

SEQ ID NO: 655567 - RNA, 22 nt, Human
ccuggcugguggcagcgacaag

SEQ ID NO: 655568 - RNA, 22 nt, Human
uggcucagugcauucacaguaa

SEQ ID NO: 655569 - RNA, 22 nt, Human
gcagagcugucuaagucacuuc

SEQ ID NO: 655570 - RNA, 22 nt, Human
uggagcugagaaguggagcucu

SEQ ID NO: 655571 - RNA, 22 nt, Human
cagugguugguagauacuugag

SEQ ID NO: 655572 - RNA, 18 nt, Human
ucaguguagaucugugua

SEQ ID NO: 655573 - RNA, 22 nt, Human
agggagaaugaccaagguauau

SEQ ID NO: 655574 - RNA, 22 nt, Human
ccaggugcugaccggucagauu

SEQ ID NO: 655575 - RNA, 22 nt, Human
ggugaggguaaacuaaaacauc

SEQ ID NO: 655576 - RNA, 22 nt, Human
uuuccuaacucaucggauguac

SEQ ID NO: 655577 - RNA, 22 nt, Human
caugcagggagcagaggagaca

SEQ ID NO: 655578 - RNA, 22 nt, Human
aggugaguuacaggaggagguc

SEQ ID NO: 655579 - RNA, 22 nt, Human
guuguauucuucaauaucagag

SEQ ID NO: 655580 - RNA, 19 nt, Human
accaggagacagugagcuu

SEQ ID NO: 655581 - RNA, 22 nt, Human
uccagccuuccuuuucacucuc

SEQ ID NO: 655582 - RNA, 22 nt, Human
aagucuuuugcuaagaguaaug

SEQ ID NO: 655583 - RNA, 22 nt, Human
aaacugugaagcaaguacaagg

SEQ ID NO: 655584 - RNA, 22 nt, Human
uaguaucuuucuauauuuccca

SEQ ID NO: 655585 - RNA, 22 nt, Human
ugcagggcccuugggguugaac

SEQ ID NO: 655586 - RNA, 22 nt, Human
gcagggcuauuggaaggagaug

SEQ ID NO: 655587 - RNA, 22 nt, Human
cuccauggggaaaugaaggugg

SEQ ID NO: 655588 - RNA, 22 nt, Human
aauugcauaaaauucaacucug

SEQ ID NO: 655589 - RNA, 22 nt, Human
cccucucucaggcugacagccu

SEQ ID NO: 655590 - RNA, 22 nt, Human
acauagaguaucauacuggaug

SEQ ID NO: 655591 - RNA, 22 nt, Human
gcuuuggagccuguguucugcc

SEQ ID NO: 655592 - RNA, 22 nt, Human
ucacauuaggaaguaauguugu

SEQ ID NO: 655593 - RNA, 22 nt, Human
acagaugcgcuugguugccaga

SEQ ID NO: 655594 - RNA, 22 nt, Human
aaguucuacuguggguaaaaug

SEQ ID NO: 655595 - RNA, 22 nt, Human
ucuggcuuucucagcauggcau

SEQ ID NO: 655596 - RNA, 23 nt, Human
uggagcugggcucagacccuggg

SEQ ID NO: 655597 - RNA, 22 nt, Human
uuaaccuguaaaaugggagaag

SEQ ID NO: 655598 - RNA, 22 nt, Human
acuguaauuggauugucugacu

SEQ ID NO: 655599 - RNA, 22 nt, Human
aagaauuggucacaugcuacaa

SEQ ID NO: 655600 - RNA, 22 nt, Human
agaguacacuguacacacaauu

SEQ ID NO: 655601 - RNA, 22 nt, Human
gaggagggcuuuguugauguua

SEQ ID NO: 655602 - RNA, 22 nt, Human
aacuucagagcugugugguuug

SEQ ID NO: 655603 - RNA, 22 nt, Human
cuggcagaggauggggacccag

SEQ ID NO: 655604 - RNA, 21 nt, Human
aacacauccagaguauuugac

SEQ ID NO: 655605 - RNA, 21 nt, Human
cuuggaacggguagaacucac

SEQ ID NO: 655606 - RNA, 22 nt, Human
accagcugaacugcagcccagg

SEQ ID NO: 655607 - RNA, 20 nt, Human
ggacugaaaacacaaaccug

SEQ ID NO: 655608 - RNA, 22 nt, Human
gcucugcugauccgcagccauc

SEQ ID NO: 655609 - RNA, 22 nt, Human
agaauagagaaaaagguuauuu

SEQ ID NO: 655610 - RNA, 22 nt, Human
uuguauaagaaguuggcagaua

SEQ ID NO: 655611 - RNA, 22 nt, Human
ggguccagggacguuucugcag

SEQ ID NO: 655612 - RNA, 22 nt, Human
agugccuugugugugggcagcc

SEQ ID NO: 655613 - RNA, 22 nt, Human
uacagcauuuuguagaguacua

SEQ ID NO: 655614 - RNA, 22 nt, Human
agugcuuaaaacccugcacuag

SEQ ID NO: 655615 - RNA, 22 nt, Human
aaauccuaagcagaggaauuua

SEQ ID NO: 655616 - RNA, 19 nt, Human
ccagcuggccugggaccuc

SEQ ID NO: 655617 - RNA, 22 nt, Human
acagcuggagcccuauggcugg

SEQ ID NO: 655618 - RNA, 19 nt, Human
ugacaggcuguugccuuga

SEQ ID NO: 655619 - RNA, 22 nt, Human
agcaggcaggaaugguggaaca

SEQ ID NO: 655620 - RNA, 22 nt, Human
auugaaugcuugcuaacacuuu

SEQ ID NO: 655621 - RNA, 22 nt, Human
augaaacugaaggacaaccaga

SEQ ID NO: 655622 - RNA, 22 nt, Human
uucuggcaugagagaugggggu

SEQ ID NO: 655623 - RNA, 22 nt, Human
caccugccucauuugucccugc

SEQ ID NO: 655624 - RNA, 22 nt, Human
cuggguagaagauuccucagga

SEQ ID NO: 655625 - RNA, 23 nt, Human
gcuucugccauuugcuagcugug

SEQ ID NO: 655626 - RNA, 22 nt, Human
uguguuucucugaggggucccu

SEQ ID NO: 655627 - RNA, 22 nt, Human
uuagaaaucugcugccaugcaa

SEQ ID NO: 655628 - RNA, 22 nt, Human
ucuguucaucucaugggagaau

SEQ ID NO: 655629 - RNA, 22 nt, Human
ucuucaaaaacugcaccuugcu

SEQ ID NO: 655630 - RNA, 22 nt, Human
ucagcaaugugauacugugcaa

SEQ ID NO: 655631 - RNA, 22 nt, Human
uuccuucuucauuguguuacag

SEQ ID NO: 655632 - RNA, 21 nt, Human
ucucugagaggucugcuuaga

SEQ ID NO: 655633 - RNA, 22 nt, Human
uugcagggaaaucagugaggau

SEQ ID NO: 655634 - RNA, 22 nt, Human
agcaaaucuaugaauguauauu

SEQ ID NO: 655635 - RNA, 23 nt, Human
ccucaggggaccugugagccuga

SEQ ID NO: 655636 - RNA, 22 nt, Human
gaauuuaaauuuaaaucuacca

SEQ ID NO: 655637 - RNA, 22 nt, Human
uuuguacacaggucauucaggg

SEQ ID NO: 655638 - RNA, 22 nt, Human
acagagcauaaugucuagcaca

SEQ ID NO: 655639 - RNA, 22 nt, Human
aggugcaggagcugugcaggga

SEQ ID NO: 655640 - RNA, 22 nt, Human
ucagaaauaaugaaugaugggg

SEQ ID NO: 655641 - RNA, 22 nt, Human
gcugagugauugauauuuuagu

SEQ ID NO: 655642 - RNA, 22 nt, Human
acaguaaaacauuuuuauuagg

SEQ ID NO: 655643 - RNA, 23 nt, Human
acagccccaugcagguguguuug

SEQ ID NO: 655644 - RNA, 22 nt, Human
cagaggcauauaauugcugggg

SEQ ID NO: 655645 - RNA, 22 nt, Human
cagaaaccaaaugggaugggga

SEQ ID NO: 655646 - RNA, 22 nt, Human
cuggcucuaagugucagcuccc

SEQ ID NO: 655647 - RNA, 22 nt, Human
gcugcugcuggucuggggccac

SEQ ID NO: 655648 - RNA, 22 nt, Human
ugaaaauuguuguacuugauaa

SEQ ID NO: 655649 - RNA, 22 nt, Human
gccccagcagcaaugcgguuga

SEQ ID NO: 655650 - RNA, 22 nt, Human
ccauagcaagaggagcagaaau

SEQ ID NO: 655651 - RNA, 18 nt, Human
ggagagugagaucaaaca

SEQ ID NO: 655652 - RNA, 22 nt, Human
uuaauguaugggguugagauga

SEQ ID NO: 655653 - RNA, 22 nt, Human
aggcuucccuuccucugggggu

SEQ ID NO: 655654 - RNA, 22 nt, Human
caggcagcuagauuuauaacaa

SEQ ID NO: 655655 - RNA, 22 nt, Human
cccaggaguuggaggcuacggu

SEQ ID NO: 655656 - RNA, 22 nt, Human
ucacaggcuggucuccgaggac

SEQ ID NO: 655657 - RNA, 22 nt, Human
ugagccagugugguaaagcuga

SEQ ID NO: 655658 - RNA, 22 nt, Human
cuucccaagacuguauugcaag

SEQ ID NO: 655659 - RNA, 17 nt, Human
gaaggccugcacaggcc

SEQ ID NO: 655660 - RNA, 22 nt, Human
gggaagugaaguguagcugucu

SEQ ID NO: 655661 - RNA, 22 nt, Human
cccagcaguuguuggugcacau

SEQ ID NO: 655662 - RNA, 22 nt, Human
auauuuuggcaaaugucuagau

SEQ ID NO: 655663 - RNA, 22 nt, Human
acugcuagugagaaaauaacca

SEQ ID NO: 655664 - RNA, 22 nt, Human
cuggaaggagcccgggcggauc

SEQ ID NO: 655665 - RNA, 22 nt, Human
gcccaggaguucaaggcugcag

SEQ ID NO: 655666 - RNA, 23 nt, Human
agguccuggacauaugugcauca

SEQ ID NO: 655667 - RNA, 22 nt, Human
ccucugggccuggaagggcagu

SEQ ID NO: 655668 - RNA, 21 nt, Human
acaggcaauuucauaugguuc

SEQ ID NO: 655669 - RNA, 22 nt, Human
ugagguaggugucgagagaggu

SEQ ID NO: 655670 - RNA, 20 nt, Human
uauacuaacauauaucuguu

SEQ ID NO: 655671 - RNA, 22 nt, Human
cuacagugaagacuagcuauag

SEQ ID NO: 655672 - RNA, 21 nt, Human
ucaugcaggcagaguuuggua

SEQ ID NO: 655673 - RNA, 22 nt, Human
ugcauguguguguauuuauaaa

SEQ ID NO: 655674 - RNA, 22 nt, Human
ccauggagcgggugagugagug

SEQ ID NO: 655675 - RNA, 22 nt, Human
aaggcacuuuucuaaagaccuu

SEQ ID NO: 655676 - RNA, 18 nt, Human
guuucaugcaugugaaac

SEQ ID NO: 655677 - RNA, 22 nt, Human
uccugccaccugcacagcuccc

SEQ ID NO: 655678 - RNA, 22 nt, Human
uuccugagggacuuuugagauu

SEQ ID NO: 655679 - RNA, 22 nt, Human
aagucagagaucaaggugucua

SEQ ID NO: 655680 - RNA, 22 nt, Human
agcugucuuucauuaccucauu

SEQ ID NO: 655681 - RNA, 22 nt, Human
gugcuccuggccacaugaagcu

SEQ ID NO: 655682 - RNA, 22 nt, Human
acaaaagugagugugucucaga

SEQ ID NO: 655683 - RNA, 22 nt, Human
uccauacccagcuuucucacac

SEQ ID NO: 655684 - RNA, 22 nt, Human
ucucugugagccagguccuagu

SEQ ID NO: 655685 - RNA, 23 nt, Human
cagucugcagcccacuugggcag

SEQ ID NO: 655686 - RNA, 22 nt, Human
ucucagugacugcugggucccc

SEQ ID NO: 655687 - RNA, 21 nt, Human
uuuauuuauauaggacacaug

SEQ ID NO: 655688 - RNA, 22 nt, Human
ugcccagcugucaaaguagaua

SEQ ID NO: 655689 - RNA, 22 nt, Human
gcucaggaucagccaccucuuu

SEQ ID NO: 655690 - RNA, 22 nt, Human
gagguucagcugcugccuggua

SEQ ID NO: 655691 - RNA, 22 nt, Human
cagcccagguggcggagguugc

SEQ ID NO: 655692 - RNA, 22 nt, Human
aagcuucaguucuggggcaaug

SEQ ID NO: 655693 - RNA, 22 nt, Human
gggcuggaaaaacaacauacaa

SEQ ID NO: 655694 - RNA, 22 nt, Human
aguguuuagaggaggaaagaug

SEQ ID NO: 655695 - RNA, 22 nt, Human
cugcagggaacugaggcccaga

SEQ ID NO: 655696 - RNA, 22 nt, Human
cuggaagaguaauauaaauuag

SEQ ID NO: 655697 - RNA, 22 nt, Human
augagcuuccagacaaaggcau

SEQ ID NO: 655698 - RNA, 23 nt, Human
uggauaaaauacuuacauucaac

SEQ ID NO: 655699 - RNA, 22 nt, Human
gacauuuagaaguuagauucaa

SEQ ID NO: 655700 - RNA, 18 nt, Human
gggcucacacaggucauc

SEQ ID NO: 655701 - RNA, 22 nt, Human
caacauaugauuuuguauauaa

SEQ ID NO: 655702 - RNA, 22 nt, Human
ucccagccuccugacaguuuug

SEQ ID NO: 655703 - RNA, 22 nt, Human
gccuuauuaccugcacuuugaa

SEQ ID NO: 655704 - RNA, 22 nt, Human
caguggaagcuggcugugaaga

SEQ ID NO: 655705 - RNA, 22 nt, Human
gauuuacagaucuaagggucac

SEQ ID NO: 655706 - RNA, 22 nt, Human
ggugaaggucuacugugugcca

SEQ ID NO: 655707 - RNA, 22 nt, Human
ucacacuaggauguuguuucua

SEQ ID NO: 655708 - RNA, 22 nt, Human
aagaguuuaauuuugucuagac

SEQ ID NO: 655709 - RNA, 22 nt, Human
uagagcugggcagugcucugag

SEQ ID NO: 655710 - RNA, 22 nt, Human
uuuuugugauaugacacuguau

SEQ ID NO: 655711 - RNA, 22 nt, Human
aggccugccuggaucacacaga

SEQ ID NO: 655712 - RNA, 22 nt, Human
ucaggcccuucucccaggacuc

SEQ ID NO: 655713 - RNA, 22 nt, Human
aaaggccacuugaaggauuuuu

SEQ ID NO: 655714 - RNA, 22 nt, Human
ggcugcauaggcagaagcugug

SEQ ID NO: 655715 - RNA, 22 nt, Human
gccucugauggaggccagcgcu

SEQ ID NO: 655716 - RNA, 22 nt, Human
ucaggccacuucacaggugauu

SEQ ID NO: 655717 - RNA, 21 nt, Human
aggcagcucaggcccagagag

SEQ ID NO: 655718 - RNA, 22 nt, Human
auggcccaaacugcaauuacuu

SEQ ID NO: 655719 - RNA, 22 nt, Human
uauccaaaguggcauauuauag

SEQ ID NO: 655720 - RNA, 22 nt, Human
uauauacaagguagguuuaggu

SEQ ID NO: 655721 - RNA, 22 nt, Human
caguuuuaucaucugugaaaug

SEQ ID NO: 655722 - RNA, 22 nt, Human
ccuuuggccgcuuuauggagga

SEQ ID NO: 655723 - RNA, 22 nt, Human
ucugugucguucugugcucugg

SEQ ID NO: 655724 - RNA, 22 nt, Human
acaaugaaccaaauuuaccaau

SEQ ID NO: 655725 - RNA, 22 nt, Human
ucaaggcaaaguaaauauucaa

SEQ ID NO: 655726 - RNA, 22 nt, Human
acugcuuuugaucucuucugua

SEQ ID NO: 655727 - RNA, 22 nt, Human
auuugcauaaggaugcuacugu

SEQ ID NO: 655728 - RNA, 21 nt, Human
ucugcccuccaggagcucaua

SEQ ID NO: 655729 - RNA, 22 nt, Human
ucaggcuggagugcaguggcgc

SEQ ID NO: 655730 - RNA, 20 nt, Human
ucaaggaaugucauuuuguu

SEQ ID NO: 655731 - RNA, 22 nt, Human
uggcauccagccaugugauuuu

SEQ ID NO: 655732 - RNA, 22 nt, Human
acuuucauuugugaagacugua

SEQ ID NO: 655733 - RNA, 20 nt, Human
cugagccaacucucuucuug

SEQ ID NO: 655734 - RNA, 22 nt, Human
caggccuggguucaaaucccuu

SEQ ID NO: 655735 - RNA, 22 nt, Human
ucaugcacaugugucaccauca

SEQ ID NO: 655736 - RNA, 22 nt, Human
ccagcuggagcucgcagauagg

SEQ ID NO: 655737 - RNA, 22 nt, Human
augagauagacuaugucauaca

SEQ ID NO: 655738 - RNA, 22 nt, Human
gcucagagaugucugcugccuu

SEQ ID NO: 655739 - RNA, 22 nt, Human
cuggcaggcggcagagcccagg

SEQ ID NO: 655740 - RNA, 22 nt, Human
uggagcaggugcucaggguaau

SEQ ID NO: 655741 - RNA, 22 nt, Human
ccugggcugggcgucucauggg

SEQ ID NO: 655742 - RNA, 22 nt, Human
acuuuuaugauaaucaauguuc

SEQ ID NO: 655743 - RNA, 22 nt, Human
uuucccaauugagagguucugu

SEQ ID NO: 655744 - RNA, 22 nt, Human
acagucugucccccaggugcua

SEQ ID NO: 655745 - RNA, 22 nt, Human
aggaaacuuucuuuugcuucau

SEQ ID NO: 655746 - RNA, 22 nt, Human
aagaugcagcaaacuacuuuuu

SEQ ID NO: 655747 - RNA, 21 nt, Human
cagugggcugcugcgcuccag

SEQ ID NO: 655748 - RNA, 22 nt, Human
ggccagaguugauggcaucuug

SEQ ID NO: 655749 - RNA, 22 nt, Human
gaagggcugcaggucugggccc

SEQ ID NO: 655750 - RNA, 22 nt, Human
ggaaugggagcuauuaguggaa

SEQ ID NO: 655751 - RNA, 22 nt, Human
acaucucaaauuccaggcucca

SEQ ID NO: 655752 - RNA, 22 nt, Human
gcccacaccauuuauucuuugu

SEQ ID NO: 655753 - RNA, 22 nt, Human
caaauguguaaggaaguguuag

SEQ ID NO: 655754 - RNA, 21 nt, Human
gaggggcagcucuuagcauua

SEQ ID NO: 655755 - RNA, 22 nt, Human
cauaacuuuaaagacagugugg

SEQ ID NO: 655756 - RNA, 22 nt, Human
agcaggcacgcucccugcgcga

SEQ ID NO: 655757 - RNA, 22 nt, Human
cuaaacuuuuauaacauugaga

SEQ ID NO: 655758 - RNA, 22 nt, Human
ucuuuggcacuucuguuuuaag

SEQ ID NO: 655759 - RNA, 22 nt, Human
cauggccuugagugacugcacu

SEQ ID NO: 655760 - RNA, 22 nt, Human
cucagcucauuguggauccggu

SEQ ID NO: 655761 - RNA, 22 nt, Human
cauuucacuauucacuaaaagg

SEQ ID NO: 655762 - RNA, 22 nt, Human
uuugacuucugggcauuuuggu

SEQ ID NO: 655763 - RNA, 17 nt, Human
uguccauuugccuggag

SEQ ID NO: 655764 - RNA, 22 nt, Human
ggcguuucaccauguugaccag

SEQ ID NO: 655765 - RNA, 22 nt, Human
cagagcagggguuucccagguu

SEQ ID NO: 655766 - RNA, 22 nt, Human
gccagggaaacugcagaccagc

SEQ ID NO: 655767 - RNA, 22 nt, Human
uuguaacuugugauuauaaucu

SEQ ID NO: 655768 - RNA, 22 nt, Human
agaagccagcuucagcugcccg

SEQ ID NO: 655769 - RNA, 22 nt, Human
cugaauaucauuuacauuugga

SEQ ID NO: 655770 - RNA, 22 nt, Human
accaggagucuagccuagucaa

SEQ ID NO: 655771 - RNA, 22 nt, Human
uucaugccagcccuguguggua

SEQ ID NO: 655772 - RNA, 22 nt, Human
uuucaugcucauggaacacagc

SEQ ID NO: 655773 - RNA, 22 nt, Human
gggaaggccgguccagucaggu

SEQ ID NO: 655774 - RNA, 18 nt, Human
ggggagcagacugaacuc

SEQ ID NO: 655775 - RNA, 22 nt, Human
gagcaucacuguccucuccccg

SEQ ID NO: 655776 - RNA, 22 nt, Human
guuaguuugaacuugucuaugu

SEQ ID NO: 655777 - RNA, 22 nt, Human
acagagccaaaaggacauagua

SEQ ID NO: 655778 - RNA, 22 nt, Human
cccaggaguucgaggcuguagu

SEQ ID NO: 655779 - RNA, 22 nt, Human
aaugaagccacugaagacaauc

SEQ ID NO: 655780 - RNA, 22 nt, Human
aggcaggugggucacuugaguc

SEQ ID NO: 655781 - RNA, 22 nt, Human
aggcagcugcccucuccuuccu

SEQ ID NO: 655782 - RNA, 17 nt, Human
uguaacaacuccuauua

SEQ ID NO: 655783 - RNA, 22 nt, Human
cuccagagucaucgagcauucc

SEQ ID NO: 655784 - RNA, 22 nt, Human
aacagcuugaggaauaucauca

SEQ ID NO: 655785 - RNA, 22 nt, Human
uucccagaaugaauggauggag

SEQ ID NO: 655786 - RNA, 22 nt, Human
ggagcugggguuggcaucuucc

SEQ ID NO: 655787 - RNA, 22 nt, Human
cugagaaacauauuuccaucua

SEQ ID NO: 655788 - RNA, 22 nt, Human
aacacaggggguuacaaauugu

SEQ ID NO: 655789 - RNA, 22 nt, Human
auuucuauaggaggacaguauu

SEQ ID NO: 655790 - RNA, 22 nt, Human
uucaaguacuguagauuucagg

SEQ ID NO: 655791 - RNA, 22 nt, Human
gccugguggugugcucaagugg

SEQ ID NO: 655792 - RNA, 23 nt, Human
uuucaaagacuuucccuuagagu

SEQ ID NO: 655793 - RNA, 22 nt, Human
uaacaguagccuuauguggucu

SEQ ID NO: 655794 - RNA, 22 nt, Human
aaguugauuaaucuuucgagaa

SEQ ID NO: 655795 - RNA, 22 nt, Human
uuuugguagaaucaacaaugua

SEQ ID NO: 655796 - RNA, 22 nt, Human
aauguaugagcgugaaagcacu

SEQ ID NO: 655797 - RNA, 22 nt, Human
gggccagugggaccugggucuc

SEQ ID NO: 655798 - RNA, 22 nt, Human
cugucauuugucugcucccucu

SEQ ID NO: 655799 - RNA, 22 nt, Human
uucauggauguugguagaaaac

SEQ ID NO: 655800 - RNA, 22 nt, Human
ugugagaggagaaaugcauuaa

SEQ ID NO: 655801 - RNA, 22 nt, Human
cuggucuggcuacccagcgaau

SEQ ID NO: 655802 - RNA, 19 nt, Human
ucuuccagcaucugggggc

SEQ ID NO: 655803 - RNA, 22 nt, Human
gccugccacgcaugcagaguca

SEQ ID NO: 655804 - RNA, 22 nt, Human
cuggcugccuauagucucccuu

SEQ ID NO: 655805 - RNA, 22 nt, Human
gucccuggucuaccguggcuuc

SEQ ID NO: 655806 - RNA, 22 nt, Human
aaauaaaggaacuguuuuccca

SEQ ID NO: 655807 - RNA, 22 nt, Human
agauauggccucauacagacau

SEQ ID NO: 655808 - RNA, 22 nt, Human
cagaauguauucucauaaagcc

SEQ ID NO: 655809 - RNA, 22 nt, Human
ggugcauguagccaucaagaua

SEQ ID NO: 655810 - RNA, 22 nt, Human
auaaaggcuggcugcugugagc

SEQ ID NO: 655811 - RNA, 22 nt, Human
caucaucucuggcccuugaagu

SEQ ID NO: 655812 - RNA, 22 nt, Human
cggaggcaaacucaccuggcuc

SEQ ID NO: 655813 - RNA, 22 nt, Human
aaacuagauuaccacugcuaga

SEQ ID NO: 655814 - RNA, 22 nt, Human
cagaccagaaggaagccgacaa

SEQ ID NO: 655815 - RNA, 22 nt, Human
cuggcugugcagucuuccagaa

SEQ ID NO: 655816 - RNA, 22 nt, Human
uaaggcacccauguucauacag

SEQ ID NO: 655817 - RNA, 22 nt, Human
cccaggaucaccuggucaaggg

SEQ ID NO: 655818 - RNA, 22 nt, Human
uaucuguuugcucacagguguu

SEQ ID NO: 655819 - RNA, 22 nt, Human
gaggcuccgugcugcugcccug

SEQ ID NO: 655820 - RNA, 22 nt, Human
aaugcuauucauuaagccuacu

SEQ ID NO: 655821 - RNA, 22 nt, Human
ugagaggcagaauggugccugc

SEQ ID NO: 655822 - RNA, 22 nt, Human
ccucuggcauagcaaguggccu

SEQ ID NO: 655823 - RNA, 22 nt, Human
uccaggcuggaaaugucaaacu

SEQ ID NO: 655824 - RNA, 22 nt, Human
uauucaguggaaaauguguuga

SEQ ID NO: 655825 - RNA, 22 nt, Human
gggacaugaggccauagugauu

SEQ ID NO: 655826 - RNA, 22 nt, Human
uuuguuuagaaagagauuggug

SEQ ID NO: 655827 - RNA, 22 nt, Human
uaauuuuacuuccugagcaccu

SEQ ID NO: 655828 - RNA, 22 nt, Human
caugucuggguauaugcauaug

SEQ ID NO: 655829 - RNA, 22 nt, Human
uucacacuguuuuucauagugg

SEQ ID NO: 655830 - RNA, 22 nt, Human
uggcugcguuuuccgauguauu

SEQ ID NO: 655831 - RNA, 22 nt, Human
aggcucugaucagguggcugug

SEQ ID NO: 655832 - RNA, 22 nt, Human
ucuguucuugcuuuucuccaac

SEQ ID NO: 655833 - RNA, 19 nt, Human
ucugggcagggccagcacc

SEQ ID NO: 655834 - RNA, 22 nt, Human
gcaugaugaaggaggaggaguc

SEQ ID NO: 655835 - RNA, 22 nt, Human
aguaaacaguaucuuuaguguc

SEQ ID NO: 655836 - RNA, 18 nt, Human
guuuacacauucuagaaa

SEQ ID NO: 655837 - RNA, 21 nt, Human
uacaucaguuuucuuggcuca

SEQ ID NO: 655838 - RNA, 22 nt, Human
ccagcccaaacaagccgccuuc

SEQ ID NO: 655839 - RNA, 22 nt, Human
gcugagucagauugcagucuug

SEQ ID NO: 655840 - RNA, 22 nt, Human
cuggcaggaucuaaccagggaa

SEQ ID NO: 655841 - RNA, 22 nt, Human
ggcagguggaaguuggcagagc

SEQ ID NO: 655842 - RNA, 22 nt, Human
cucccuggcuuuguccugaggc

SEQ ID NO: 655843 - RNA, 22 nt, Human
cuaggaggcgggggcugcagua

SEQ ID NO: 655844 - RNA, 22 nt, Human
cuacaguagaguaggccucuga

SEQ ID NO: 655845 - RNA, 22 nt, Human
auaguuaugcucuagacaagaa

SEQ ID NO: 655846 - RNA, 23 nt, Human
uugcaaaaugcaauugaguuaga

SEQ ID NO: 655847 - RNA, 22 nt, Human
uauuugcaggacauagauaugg

SEQ ID NO: 655848 - RNA, 22 nt, Human
acagcauucccuuuggcugcuu

SEQ ID NO: 655849 - RNA, 22 nt, Human
uuauuccaccuccauuuuccua

SEQ ID NO: 655850 - RNA, 22 nt, Human
ggaaagcuuuguacuugaaaac

SEQ ID NO: 655851 - RNA, 22 nt, Human
uccaggcacgaggcccugugca

SEQ ID NO: 655852 - RNA, 18 nt, Human
aaaggcauauauagaagu

SEQ ID NO: 655853 - RNA, 18 nt, Human
uggauugaauugagaggu

SEQ ID NO: 655854 - RNA, 22 nt, Human
agaaacaucauuguuugguauu

SEQ ID NO: 655855 - RNA, 22 nt, Human
uagggggcuguccugugcauua

SEQ ID NO: 655856 - RNA, 22 nt, Human
augcugugucuagcaggaacac

SEQ ID NO: 655857 - RNA, 22 nt, Human
uaggagugcauaaaacuauauu

SEQ ID NO: 655858 - RNA, 22 nt, Human
uuucagcacuuuaggcagcagg

SEQ ID NO: 655859 - RNA, 21 nt, Human
cagagagcuagaacuucauga

SEQ ID NO: 655860 - RNA, 22 nt, Human
uuccccaggcuggagugcagug

SEQ ID NO: 655861 - RNA, 22 nt, Human
acacagaugcauuacacaucua

SEQ ID NO: 655862 - RNA, 22 nt, Human
caugagauuugggaggggccag

SEQ ID NO: 655863 - RNA, 22 nt, Human
gcuuggcuuugucuuguucacu

SEQ ID NO: 655864 - RNA, 22 nt, Human
uuuucagugggcaaugauguga

SEQ ID NO: 655865 - RNA, 22 nt, Human
uccagagggcgauggcuggggg

SEQ ID NO: 655866 - RNA, 22 nt, Human
uguugggaagcucugccagggg

SEQ ID NO: 655867 - RNA, 22 nt, Human
gccuucccucucauccugcugg

SEQ ID NO: 655868 - RNA, 22 nt, Human
auguccuuccauuuugaucugu

SEQ ID NO: 655869 - RNA, 22 nt, Human
uccugagagcagaguccaggug

SEQ ID NO: 655870 - RNA, 22 nt, Human
augggcugugggacccuggacc

SEQ ID NO: 655871 - RNA, 22 nt, Human
agcagccagaaagggcagucga

SEQ ID NO: 655872 - RNA, 22 nt, Human
auauuuauaagcaagcaggacu

SEQ ID NO: 655873 - RNA, 19 nt, Human
ccuguacauuauucucccc

SEQ ID NO: 655874 - RNA, 22 nt, Human
gccuuugcaccaucagugcaau

SEQ ID NO: 655875 - RNA, 22 nt, Human
uaguaaacaggcaagggaccac

SEQ ID NO: 655876 - RNA, 22 nt, Human
ggucucagacuggcaggcagug

SEQ ID NO: 655877 - RNA, 22 nt, Human
guggcagcagaggggugguaug

SEQ ID NO: 655878 - RNA, 20 nt, Human
agaaucugacccagagagac

SEQ ID NO: 655879 - RNA, 21 nt, Human
aggcacuguuugugguuuggg

SEQ ID NO: 655880 - RNA, 22 nt, Human
guacagaaugcuugguaaggca

SEQ ID NO: 655881 - RNA, 22 nt, Human
gcugggcaacgggcagaaagau

SEQ ID NO: 655882 - RNA, 22 nt, Human
uucaugcacuauuucuucuagc

SEQ ID NO: 655883 - RNA, 22 nt, Human
agguccugacgcccuuugaaau

SEQ ID NO: 655884 - RNA, 22 nt, Human
aguaauaaacucuuuuuaucuc

SEQ ID NO: 655885 - RNA, 22 nt, Human
ccagcacucugucccagcuucc

SEQ ID NO: 655886 - RNA, 22 nt, Human
caggucuccagcucagggucca

SEQ ID NO: 655887 - RNA, 23 nt, Human
gcauugucuccccacuucugggc

SEQ ID NO: 655888 - RNA, 22 nt, Human
uagcaucuguuucucuuuguga

SEQ ID NO: 655889 - RNA, 22 nt, Human
ugcagagauugaacaagaagga

SEQ ID NO: 655890 - RNA, 22 nt, Human
aggguguguucuccuaugagaa

SEQ ID NO: 655891 - RNA, 22 nt, Human
uuacaaggaggauagcauuucc

SEQ ID NO: 655892 - RNA, 22 nt, Human
ggaggcggggaaggcaucccau

SEQ ID NO: 655893 - RNA, 22 nt, Human
ugucaaauaguagaaagauggc

SEQ ID NO: 655894 - RNA, 22 nt, Human
cagagugaaauaggggaucaag

SEQ ID NO: 655895 - RNA, 20 nt, Human
agccccacccuuguccuggc

SEQ ID NO: 655896 - RNA, 22 nt, Human
ggucaguguacacaugugcagg

SEQ ID NO: 655897 - RNA, 22 nt, Human
acaaaugacuauuugguacagg

SEQ ID NO: 655898 - RNA, 22 nt, Human
uaacuucucugcuaucauagga

SEQ ID NO: 655899 - RNA, 21 nt, Human
ccagcccagccuccuucucuu

SEQ ID NO: 655900 - RNA, 22 nt, Human
gcaguguuuuucaaugcuucca

SEQ ID NO: 655901 - RNA, 22 nt, Human
ggcugccugaacuuuggggaaa

SEQ ID NO: 655902 - RNA, 23 nt, Human
auaaauuacuaucucccuagagc

SEQ ID NO: 655903 - RNA, 22 nt, Human
ugcauugguaaaauacauacac

SEQ ID NO: 655904 - RNA, 22 nt, Human
aagaaucuaugguacauccaag

SEQ ID NO: 655905 - RNA, 22 nt, Human
agguaggguuaauggagauaua

SEQ ID NO: 655906 - RNA, 22 nt, Human
ccagcagagcuggaagugugcu

SEQ ID NO: 655907 - RNA, 22 nt, Human
ucugcauuuggaucuugagcug

SEQ ID NO: 655908 - RNA, 22 nt, Human
cuaggcccaugagguuugcugg

SEQ ID NO: 655909 - RNA, 22 nt, Human
acaguguggggugagauggaac

SEQ ID NO: 655910 - RNA, 22 nt, Human
gucuuuauuugagauugucauu

SEQ ID NO: 655911 - RNA, 18 nt, Human
auccucuagcuucucaga

SEQ ID NO: 655912 - RNA, 22 nt, Human
guggcacaggguuguuggucau

SEQ ID NO: 655913 - RNA, 22 nt, Human
aggcuggucuguuggcauuuuu

SEQ ID NO: 655914 - RNA, 22 nt, Human
aaauguuuugcucccauguggu

SEQ ID NO: 655915 - RNA, 22 nt, Human
guuuccacuugagaggacuccu

SEQ ID NO: 655916 - RNA, 22 nt, Human
aguggcaucccuuuaacagggu

SEQ ID NO: 655917 - RNA, 21 nt, Human
agggucaggaaccaggguacc

SEQ ID NO: 655918 - RNA, 22 nt, Human
caaacugaacacgaaagucuuu

SEQ ID NO: 655919 - RNA, 22 nt, Human
ccagccacagcuuccagcuccu

SEQ ID NO: 655920 - RNA, 22 nt, Human
ucgagucauguucucccauuaa

SEQ ID NO: 655921 - RNA, 21 nt, Human
agcagcagcaguggggcuucu

SEQ ID NO: 655922 - RNA, 22 nt, Human
uucauucagugagacuaggacg

SEQ ID NO: 655923 - RNA, 22 nt, Human
cuuugcuucuccaaccugcuca

SEQ ID NO: 655924 - RNA, 22 nt, Human
uauuucaccucacccaggagaa

SEQ ID NO: 655925 - RNA, 22 nt, Human
uuguaagucacaccagggcagg

SEQ ID NO: 655926 - RNA, 22 nt, Human
uccagguccagagguucaacug

SEQ ID NO: 655927 - RNA, 22 nt, Human
agcuuaaacucuuugaaguuau

SEQ ID NO: 655928 - RNA, 22 nt, Human
uuucauugacaguugggggaaa

SEQ ID NO: 655929 - RNA, 22 nt, Human
ccaggagcagaguagguguuca

SEQ ID NO: 655930 - RNA, 22 nt, Human
agucaguggauuuaccaugcgu

SEQ ID NO: 655931 - RNA, 22 nt, Human
cagcaggguuaagugacucacc

SEQ ID NO: 655932 - RNA, 22 nt, Human
acaauagguguccaauuaacaa

SEQ ID NO: 655933 - RNA, 22 nt, Human
aaugcuaaaauggcacuaaagu

SEQ ID NO: 655934 - RNA, 22 nt, Human
ggagcccugaagcaagaaagua

SEQ ID NO: 655935 - RNA, 22 nt, Human
ucagcucuuccccccagccagg

SEQ ID NO: 655936 - RNA, 19 nt, Human
gcagccaggugcucuaccu

SEQ ID NO: 655937 - RNA, 18 nt, Human
gagggaguagcugagguu

SEQ ID NO: 655938 - RNA, 22 nt, Human
cauguuaacuaagauuaacuau

SEQ ID NO: 655939 - RNA, 22 nt, Human
gcccagcacauugcugaggacc

SEQ ID NO: 655940 - RNA, 22 nt, Human
uacauucugaaauaaaugguuu

SEQ ID NO: 655941 - RNA, 22 nt, Human
guuucccaggcuguggggcccu

SEQ ID NO: 655942 - RNA, 22 nt, Human
ucagggauugcaaaauucaucc

SEQ ID NO: 655943 - RNA, 22 nt, Human
gagacaggauuuaaccaaagcu

SEQ ID NO: 655944 - RNA, 22 nt, Human
uuuccacagcuguauaaaauaa

SEQ ID NO: 655945 - RNA, 22 nt, Human
cucucuggaagggggagcugau

SEQ ID NO: 655946 - RNA, 22 nt, Human
acuguucugccaagaucaacgu

SEQ ID NO: 655947 - RNA, 22 nt, Human
uggcaaaguaauuggguuucuc

SEQ ID NO: 655948 - RNA, 22 nt, Human
uaaguuuuaagcaaucugauaa

SEQ ID NO: 655949 - RNA, 22 nt, Human
aacuagaaaacaagaugcugau

SEQ ID NO: 655950 - RNA, 22 nt, Human
guccccucagccacccaugggg

SEQ ID NO: 655951 - RNA, 22 nt, Human
uuccugaaaauacagggagacc

SEQ ID NO: 655952 - RNA, 22 nt, Human
cagcuuggcgaauguagguaug

SEQ ID NO: 655953 - RNA, 21 nt, Human
ucucaucuccugaccugugcc

SEQ ID NO: 655954 - RNA, 19 nt, Human
uccagaacugcccuggccu

SEQ ID NO: 655955 - RNA, 22 nt, Human
acagaacuucaguaguauuccc

SEQ ID NO: 655956 - RNA, 22 nt, Human
cacagcuggggaagcugaggcc

SEQ ID NO: 655957 - RNA, 22 nt, Human
uugcaaggucaucaugcauugg

SEQ ID NO: 655958 - RNA, 20 nt, Human
acuuuacagagaagacugac

SEQ ID NO: 655959 - RNA, 22 nt, Human
uucuuuaccagugaaauguuau

SEQ ID NO: 655960 - RNA, 22 nt, Human
ucuggguucuugaugcuaccuu

SEQ ID NO: 655961 - RNA, 22 nt, Human
ucuggagagucacagugccaga

SEQ ID NO: 655962 - RNA, 22 nt, Human
cuacauucugggaaaucagaug

SEQ ID NO: 655963 - RNA, 22 nt, Human
uaugaagugaguuaugguugcu

SEQ ID NO: 655964 - RNA, 22 nt, Human
ugcuagugcaggguuuucaguu

SEQ ID NO: 655965 - RNA, 22 nt, Human
ccugaacagucugaaaggagac

SEQ ID NO: 655966 - RNA, 22 nt, Human
gccagagcagaauagaguggcc

SEQ ID NO: 655967 - RNA, 22 nt, Human
uccugaggacuaacaggaagga

SEQ ID NO: 655968 - RNA, 22 nt, Human
aaggcagcucagcucauggcag

SEQ ID NO: 655969 - RNA, 22 nt, Human
uggcuucuugaucuuggacuug

SEQ ID NO: 655970 - RNA, 22 nt, Human
aacaauaggagugaugcaguau

SEQ ID NO: 655971 - RNA, 22 nt, Human
agucugaaguagucuuuagugu

SEQ ID NO: 655972 - RNA, 19 nt, Human
uggaagaggaagggaaaua

SEQ ID NO: 655973 - RNA, 22 nt, Human
ucugggagggagccucagaauc

SEQ ID NO: 655974 - RNA, 22 nt, Human
cagguggcuuauuagggucagu

SEQ ID NO: 655975 - RNA, 22 nt, Human
ucaaagauagauguugagaaau

SEQ ID NO: 655976 - RNA, 22 nt, Human
agaaguuugaaauuaggagaaa

SEQ ID NO: 655977 - RNA, 22 nt, Human
caaaagcaguucuaucugaguu

SEQ ID NO: 655978 - RNA, 22 nt, Human
ccugugggucacaugggugacu

SEQ ID NO: 655979 - RNA, 22 nt, Human
ucccagagcucuggagguugga

SEQ ID NO: 655980 - RNA, 22 nt, Human
uacaguucacaguaucauaaau

SEQ ID NO: 655981 - RNA, 22 nt, Human
aucaucugccucaucacugcau

SEQ ID NO: 655982 - RNA, 22 nt, Human
aaagccaggggagggauuccca

SEQ ID NO: 655983 - RNA, 22 nt, Human
uuugacagauccuuaacucagc

SEQ ID NO: 655984 - RNA, 22 nt, Human
ccaggugccuccagucacagug

SEQ ID NO: 655985 - RNA, 22 nt, Human
uggaacacaucuaaggaagcag

SEQ ID NO: 655986 - RNA, 22 nt, Human
uucucugcauuguaaagagcca

SEQ ID NO: 655987 - RNA, 22 nt, Human
aaagugcugugggcuguaagug

SEQ ID NO: 655988 - RNA, 19 nt, Human
gguuugaagaaaaucuugc

SEQ ID NO: 655989 - RNA, 22 nt, Human
ggccucucaugcccagagccaa

SEQ ID NO: 655990 - RNA, 22 nt, Human
ccugauuauuguaaauauauuu

SEQ ID NO: 655991 - RNA, 22 nt, Human
ucagaagcauguggggagccug

SEQ ID NO: 655992 - RNA, 22 nt, Human
aaaggcaugcauggucugcucc

SEQ ID NO: 655993 - RNA, 22 nt, Human
gggcacugaguggaugaugcag

SEQ ID NO: 655994 - RNA, 22 nt, Human
caugaucagaaagagaagcuag

SEQ ID NO: 655995 - RNA, 23 nt, Human
aagguguuuguuuucagaaagca

SEQ ID NO: 655996 - RNA, 19 nt, Human
uggaggcaagacauggagg

SEQ ID NO: 655997 - RNA, 22 nt, Human
augauauagagaguagauuaaa

SEQ ID NO: 655998 - RNA, 22 nt, Human
aaaugcagauugucauucagga

SEQ ID NO: 655999 - RNA, 19 nt, Human
aauuagggagucgguuaag

SEQ ID NO: 656000 - RNA, 22 nt, Human
acaauuacucaacuuugcugcu

SEQ ID NO: 656001 - RNA, 22 nt, Human
agugggagggccauauggugaa

SEQ ID NO: 656002 - RNA, 23 nt, Human
auuacaguuaauuacaacaucuu

SEQ ID NO: 656003 - RNA, 22 nt, Human
aggaauaugagcugcugcagug

SEQ ID NO: 656004 - RNA, 22 nt, Human
gccugagcuacuagggagucug

SEQ ID NO: 656005 - RNA, 22 nt, Human
cugccucagcguuguggcccua

SEQ ID NO: 656006 - RNA, 22 nt, Human
agggcuccgggcaggcgaugga

SEQ ID NO: 656007 - RNA, 22 nt, Human
acaggaggagcuguuucaggga

SEQ ID NO: 656008 - RNA, 22 nt, Human
gcucucagcccacugaggggaa

SEQ ID NO: 656009 - RNA, 22 nt, Human
uauaacaggaaguauucaaaca

SEQ ID NO: 656010 - RNA, 22 nt, Human
ucaaagguuaacucuguuguuc

SEQ ID NO: 656011 - RNA, 22 nt, Human
acugggccagacacugauuccc

SEQ ID NO: 656012 - RNA, 22 nt, Human
gggcuugguggagagaaugcug

SEQ ID NO: 656013 - RNA, 22 nt, Human
gggcucuggggucagacagccu

SEQ ID NO: 656014 - RNA, 22 nt, Human
gacaguggagggcugauguuaa

SEQ ID NO: 656015 - RNA, 22 nt, Human
agccaggccagcugucuugagu

SEQ ID NO: 656016 - RNA, 22 nt, Human
cacuucaaauaagcucuucuca

SEQ ID NO: 656017 - RNA, 22 nt, Human
ugcuccuuccucauccugugca

SEQ ID NO: 656018 - RNA, 22 nt, Human
gaccacugaugacaugaggaga

SEQ ID NO: 656019 - RNA, 19 nt, Human
ugagggugagcuuuggaga

SEQ ID NO: 656020 - RNA, 22 nt, Human
aaucauucuuauuucacagcaa

SEQ ID NO: 656021 - RNA, 22 nt, Human
gauuucuucauucauuagaugg

SEQ ID NO: 656022 - RNA, 22 nt, Human
ucaauagcaaucaagccuucca

SEQ ID NO: 656023 - RNA, 22 nt, Human
gagcagggcuuguccuccucau

SEQ ID NO: 656024 - RNA, 22 nt, Human
ugcugaaggcaggggagguggc

SEQ ID NO: 656025 - RNA, 22 nt, Human
gccaggaaauucaugccagauc

SEQ ID NO: 656026 - RNA, 22 nt, Human
uucuccucuguuaccuugcaaa

SEQ ID NO: 656027 - RNA, 22 nt, Human
gugugcagggaugagugcaggu

SEQ ID NO: 656028 - RNA, 20 nt, Human
uuacaaguuucuaauaacca

SEQ ID NO: 656029 - RNA, 22 nt, Human
uucccucucacuuaaagcuugg

SEQ ID NO: 656030 - RNA, 21 nt, Human
acacugugucauaaugcuuaa

SEQ ID NO: 656031 - RNA, 19 nt, Human
acauauguggauauacaug

SEQ ID NO: 656032 - RNA, 18 nt, Human
cagggccccagaauuauc

SEQ ID NO: 656033 - RNA, 22 nt, Human
aagccuaaaugaugcuauuaug

SEQ ID NO: 656034 - RNA, 22 nt, Human
gaaugcagauggcugguguaug

SEQ ID NO: 656035 - RNA, 19 nt, Human
agcuuccauauucucuagu

SEQ ID NO: 656036 - RNA, 22 nt, Human
uuccugggaggcuguguacuug

SEQ ID NO: 656037 - RNA, 22 nt, Human
guagccauuggcaaugaagccu

SEQ ID NO: 656038 - RNA, 22 nt, Human
ugcuccaugcgcucggccggcg

SEQ ID NO: 656039 - RNA, 22 nt, Human
agcccagaggcugggcgugcau

SEQ ID NO: 656040 - RNA, 22 nt, Human
gauggggaugagaagugagcag

SEQ ID NO: 656041 - RNA, 20 nt, Human
gucagugucuucaguaguga

SEQ ID NO: 656042 - RNA, 22 nt, Human
ugagccaggcccagugggguca

SEQ ID NO: 656043 - RNA, 22 nt, Human
gcacuugauaaauguuaacuga

SEQ ID NO: 656044 - RNA, 22 nt, Human
guccccagcugugacgagagcc

SEQ ID NO: 656045 - RNA, 22 nt, Human
auugucagugggauuugucaac

SEQ ID NO: 656046 - RNA, 22 nt, Human
aaagguuuuucagcagggagau

SEQ ID NO: 656047 - RNA, 17 nt, Human
uggcaagaauggaaaug

SEQ ID NO: 656048 - RNA, 22 nt, Human
gggcugaggcuaccacuggucu

SEQ ID NO: 656049 - RNA, 22 nt, Human
auuuucucucaaaccuuaaaau

SEQ ID NO: 656050 - RNA, 22 nt, Human
augaagauaagaccaggcugga

SEQ ID NO: 656051 - RNA, 22 nt, Human
ugccccucagggaacggguauc

SEQ ID NO: 656052 - RNA, 22 nt, Human
acaaugaacgcuuuuuaacugu

SEQ ID NO: 656053 - RNA, 22 nt, Human
cacaugcauaaggauaauuacu

SEQ ID NO: 656054 - RNA, 22 nt, Human
agcugaggguucgguguccaca

SEQ ID NO: 656055 - RNA, 22 nt, Human
gagguccucucggaaccccuuu

SEQ ID NO: 656056 - RNA, 22 nt, Human
ggggaagaauggcagaaaacau

SEQ ID NO: 656057 - RNA, 22 nt, Human
ugcugcccguaccugugcacuu

SEQ ID NO: 656058 - RNA, 22 nt, Human
ucauaaagcucuuccaaaugua

SEQ ID NO: 656059 - RNA, 22 nt, Human
cuuuggcaugguccucacuaua

SEQ ID NO: 656060 - RNA, 22 nt, Human
ucagggcaaagggcagaguuug

SEQ ID NO: 656061 - RNA, 22 nt, Human
ucuggcuuggguagguaguuca

SEQ ID NO: 656062 - RNA, 22 nt, Human
ugagggaauauugauagauccg

SEQ ID NO: 656063 - RNA, 22 nt, Human
cuuguuuucuucugcagucuau

SEQ ID NO: 656064 - RNA, 22 nt, Human
auuuauuaugggauuuggcuca

SEQ ID NO: 656065 - RNA, 22 nt, Human
cuccacucaacaagcccagugu

SEQ ID NO: 656066 - RNA, 22 nt, Human
ucucagaauccuugcccaggug

SEQ ID NO: 656067 - RNA, 21 nt, Human
ucuuauacagcaauagaucug

SEQ ID NO: 656068 - RNA, 22 nt, Human
cugaagacugcugagaaguuac

SEQ ID NO: 656069 - RNA, 22 nt, Human
gaacucuagguaaaugagauau

SEQ ID NO: 656070 - RNA, 22 nt, Human
ugcugggcggugggcucauccc

SEQ ID NO: 656071 - RNA, 22 nt, Human
caggaggaagaacucugcaaca

SEQ ID NO: 656072 - RNA, 22 nt, Human
guguguauguagaacuauguau

SEQ ID NO: 656073 - RNA, 22 nt, Human
ugcgcgcuggcgucacuuagca

SEQ ID NO: 656074 - RNA, 22 nt, Human
gucacaaauccccucagcaacu

SEQ ID NO: 656075 - RNA, 22 nt, Human
acauggaagauaaaaauacuca

SEQ ID NO: 656076 - RNA, 20 nt, Human
aauuauauaacuccaacauu

SEQ ID NO: 656077 - RNA, 22 nt, Human
aggaggugagcggucauguggu

SEQ ID NO: 656078 - RNA, 22 nt, Human
auauauauugcccaggcugguu

SEQ ID NO: 656079 - RNA, 21 nt, Human
agccagauccauuuugcaugg

SEQ ID NO: 656080 - RNA, 23 nt, Human
acauuucauauaaaagggaucag

SEQ ID NO: 656081 - RNA, 22 nt, Human
gcaguguuuacauauuagaaac

SEQ ID NO: 656082 - RNA, 22 nt, Human
agguggcugguccaggcugcag

SEQ ID NO: 656083 - RNA, 22 nt, Human
ucucucagucagaugcuaaaga

SEQ ID NO: 656084 - RNA, 22 nt, Human
aaggggugcaaguuaaucagca

SEQ ID NO: 656085 - RNA, 22 nt, Human
uggagcaggccggaaguggcuu

SEQ ID NO: 656086 - RNA, 22 nt, Human
uucaauacaaagaaaggaauuu

SEQ ID NO: 656087 - RNA, 19 nt, Human
ugcucucuggugcuucaug

SEQ ID NO: 656088 - RNA, 22 nt, Human
agcucuggaauaaugaugugau

SEQ ID NO: 656089 - RNA, 22 nt, Human
ucucuggguaugguaacguugg

SEQ ID NO: 656090 - RNA, 22 nt, Human
acauuugugcacaugugcaugg

SEQ ID NO: 656091 - RNA, 22 nt, Human
gggguacuggcuggagccccac

SEQ ID NO: 656092 - RNA, 22 nt, Human
agagccuggcaaaagguccugc

SEQ ID NO: 656093 - RNA, 22 nt, Human
caagaucaaucaauacuccuua

SEQ ID NO: 656094 - RNA, 22 nt, Human
uucacaagucuggaauaugcua

SEQ ID NO: 656095 - RNA, 22 nt, Human
ggcaggugcccagagagcacga

SEQ ID NO: 656096 - RNA, 22 nt, Human
ucuaggagcaugaagggaaggc

SEQ ID NO: 656097 - RNA, 23 nt, Human
aacgacagcuacaggcaucccac

SEQ ID NO: 656098 - RNA, 22 nt, Human
auaauaaugaaagccacugugu

SEQ ID NO: 656099 - RNA, 22 nt, Human
uggccagacagagaggcuuugu

SEQ ID NO: 656100 - RNA, 21 nt, Human
agauucaggacagcagucacu

SEQ ID NO: 656101 - RNA, 21 nt, Human
uaucuacuggugucuuucaga

SEQ ID NO: 656102 - RNA, 19 nt, Human
gggcucuggccucaguggg

SEQ ID NO: 656103 - RNA, 22 nt, Human
ucaggcugguggucagauggcu

SEQ ID NO: 656104 - RNA, 22 nt, Human
ucugugccagcagccuccugga

SEQ ID NO: 656105 - RNA, 22 nt, Human
acagcuacucugcagauaaauc

SEQ ID NO: 656106 - RNA, 22 nt, Human
uuuaauauucugcauucuccuu

SEQ ID NO: 656107 - RNA, 22 nt, Human
agccaacuccagccccugcagc

SEQ ID NO: 656108 - RNA, 22 nt, Human
acugucaugaucgaagauguca

SEQ ID NO: 656109 - RNA, 22 nt, Human
cccucacucugccuccuggggu

SEQ ID NO: 656110 - RNA, 22 nt, Human
uuucaaauagaaucuuuccaaa

SEQ ID NO: 656111 - RNA, 22 nt, Human
acauguaaaaggaacaugcaug

SEQ ID NO: 656112 - RNA, 22 nt, Human
gucccucaguagugcacagugg

SEQ ID NO: 656113 - RNA, 22 nt, Human
aaagaucaauagauaaagcuac

SEQ ID NO: 656114 - RNA, 22 nt, Human
ugauucacagacuucacaaggc

SEQ ID NO: 656115 - RNA, 22 nt, Human
ccagaaagauaggaaaucaagu

SEQ ID NO: 656116 - RNA, 22 nt, Human
agcugcuuccucuuugauguca

SEQ ID NO: 656117 - RNA, 22 nt, Human
aaaauugguuccuuucugaggc

SEQ ID NO: 656118 - RNA, 22 nt, Human
aguuuaacuuuggaaaacuaua

SEQ ID NO: 656119 - RNA, 22 nt, Human
acaauaaggauuuuuaggggca

SEQ ID NO: 656120 - RNA, 22 nt, Human
gaaggcaucucuggacuuauuu

SEQ ID NO: 656121 - RNA, 23 nt, Human
guccuauuuuuugaaauacugag

SEQ ID NO: 656122 - RNA, 22 nt, Human
ucuccacuauuuucuagcucuu

SEQ ID NO: 656123 - RNA, 19 nt, Human
ucccaagauuucuguauca

SEQ ID NO: 656124 - RNA, 22 nt, Human
uucagugcagacgccgaagccc

SEQ ID NO: 656125 - RNA, 22 nt, Human
uauggcuucuuguguuacugug

SEQ ID NO: 656126 - RNA, 22 nt, Human
aaagaucugacuuagacacaga

SEQ ID NO: 656127 - RNA, 22 nt, Human
ggcacuagugacaaggggacau

SEQ ID NO: 656128 - RNA, 22 nt, Human
agccacugguaaacugguagga

SEQ ID NO: 656129 - RNA, 22 nt, Human
ccagcagaguugguuucuggua

SEQ ID NO: 656130 - RNA, 22 nt, Human
uguuuguaucucucucuguggc

SEQ ID NO: 656131 - RNA, 20 nt, Human
caguaucugaagccacacaa

SEQ ID NO: 656132 - RNA, 22 nt, Human
aaggcccuggccccagcuucuu

SEQ ID NO: 656133 - RNA, 22 nt, Human
ugcucugggcucaauggcagcu

SEQ ID NO: 656134 - RNA, 22 nt, Human
aagaccagaggauauaaccaga

SEQ ID NO: 656135 - RNA, 22 nt, Human
auuuaaugucgagcuauuguag

SEQ ID NO: 656136 - RNA, 22 nt, Human
gcuggcuuugucaagggcagca

SEQ ID NO: 656137 - RNA, 22 nt, Human
acugucucucuagcaguucagg

SEQ ID NO: 656138 - RNA, 22 nt, Human
ggcucaguguuuguggaacaua

SEQ ID NO: 656139 - RNA, 22 nt, Human
ugcagugugauuuucuggcuga

SEQ ID NO: 656140 - RNA, 22 nt, Human
caggggcucuaaugcaugauca

SEQ ID NO: 656141 - RNA, 22 nt, Human
guuucuccucugugucuuguuu

SEQ ID NO: 656142 - RNA, 22 nt, Human
aaguccaaggucaccauucaca

SEQ ID NO: 656143 - RNA, 22 nt, Human
aacaggcuuccaggagggacga

SEQ ID NO: 656144 - RNA, 22 nt, Human
agcaggagaacacuguggcucu

SEQ ID NO: 656145 - RNA, 19 nt, Human
aaggcuggagaaggccucu

SEQ ID NO: 656146 - RNA, 22 nt, Human
ugauugaagcuagaacaaccau

SEQ ID NO: 656147 - RNA, 22 nt, Human
ucccagagugugggcaucaagg

SEQ ID NO: 656148 - RNA, 22 nt, Human
gagcagcagcugggccagguuc

SEQ ID NO: 656149 - RNA, 22 nt, Human
uucaacagcuuccaaagugugu

SEQ ID NO: 656150 - RNA, 22 nt, Human
acauucuuggacuccacucuag

SEQ ID NO: 656151 - RNA, 22 nt, Human
gauucugagcugguguuuuacg

SEQ ID NO: 656152 - RNA, 22 nt, Human
guccuggaguggcauggcaugg

SEQ ID NO: 656153 - RNA, 22 nt, Human
uuguaacagcuguuuauauagu

SEQ ID NO: 656154 - RNA, 22 nt, Human
gcugccagaagaggagggguua

SEQ ID NO: 656155 - RNA, 22 nt, Human
ggguccagaguugaagagguua

SEQ ID NO: 656156 - RNA, 22 nt, Human
cugcagauuuggugucugguga

SEQ ID NO: 656157 - RNA, 22 nt, Human
gaggacacggccuuuuggaaaa

SEQ ID NO: 656158 - RNA, 21 nt, Human
cagcuuugucugucuucgggg

SEQ ID NO: 656159 - RNA, 22 nt, Human
cugagagccuccuguuggcuag

SEQ ID NO: 656160 - RNA, 22 nt, Human
acagagcaucagaugaaaucaa

SEQ ID NO: 656161 - RNA, 22 nt, Human
acccaggcuggagugcaguguc

SEQ ID NO: 656162 - RNA, 22 nt, Human
agccuucagcaguucaggugcc

SEQ ID NO: 656163 - RNA, 22 nt, Human
ugagaccuguagcuucacagag

SEQ ID NO: 656164 - RNA, 22 nt, Human
gugggccagcauuuugaagagu

SEQ ID NO: 656165 - RNA, 22 nt, Human
gguguuaacaaagauugaaaug

SEQ ID NO: 656166 - RNA, 22 nt, Human
ugucucugggugauucaguccu

SEQ ID NO: 656167 - RNA, 22 nt, Human
ugcauauaucuuauuuuucugu

SEQ ID NO: 656168 - RNA, 22 nt, Human
ggaaaagacagaauucuagaau

SEQ ID NO: 656169 - RNA, 22 nt, Human
gguggccugaauuagcucaggg

SEQ ID NO: 656170 - RNA, 22 nt, Human
aagagaugauggcagccagagg

SEQ ID NO: 656171 - RNA, 22 nt, Human
ucacugcuuaacucaagaucuc

SEQ ID NO: 656172 - RNA, 22 nt, Human
ggcucauguaugaaagggugug

SEQ ID NO: 656173 - RNA, 22 nt, Human
cagcacuucaaugagcauuuca

SEQ ID NO: 656174 - RNA, 22 nt, Human
aggaauuuaagggcucagagag

SEQ ID NO: 656175 - RNA, 22 nt, Human
ccacacagauaaguguuuucua

SEQ ID NO: 656176 - RNA, 22 nt, Human
ugaaggcauugaugaaggaauc

SEQ ID NO: 656177 - RNA, 22 nt, Human
gcccccagaagggccacagauu

SEQ ID NO: 656178 - RNA, 22 nt, Human
agugccauggaggaacagaugc

SEQ ID NO: 656179 - RNA, 22 nt, Human
caaaguauauuucauagucuca

SEQ ID NO: 656180 - RNA, 22 nt, Human
ccaggaccacacgacaggagag

SEQ ID NO: 656181 - RNA, 22 nt, Human
caggugggcuugggagaacacu

SEQ ID NO: 656182 - RNA, 22 nt, Human
cggggagggcagaggcucccuc

SEQ ID NO: 656183 - RNA, 22 nt, Human
ccagggaggguccuguggcuuc

SEQ ID NO: 656184 - RNA, 22 nt, Human
gaaggagcuaccaagacugaau

SEQ ID NO: 656185 - RNA, 22 nt, Human
uggcccugccgcacuauccuca

SEQ ID NO: 656186 - RNA, 22 nt, Human
ggaaaauuuccuucaaaaugug

SEQ ID NO: 656187 - RNA, 22 nt, Human
cugugccaccugagggacucua

SEQ ID NO: 656188 - RNA, 21 nt, Human
uaauaauuccacuacagagua

SEQ ID NO: 656189 - RNA, 22 nt, Human
ucauugcaguagggagagaccc

SEQ ID NO: 656190 - RNA, 22 nt, Human
ggagaggcuuccagagucgugc

SEQ ID NO: 656191 - RNA, 18 nt, Human
ucugucuguacaaguauc

SEQ ID NO: 656192 - RNA, 22 nt, Human
ucauuucaguggcacagaagau

SEQ ID NO: 656193 - RNA, 22 nt, Human
uaccaagguaguggagacagaa

SEQ ID NO: 656194 - RNA, 22 nt, Human
ucacccagguccaggcucuggc

SEQ ID NO: 656195 - RNA, 22 nt, Human
cuucccccaaaucaagagaccu

SEQ ID NO: 656196 - RNA, 19 nt, Human
uaaggcagcagugacaggc

SEQ ID NO: 656197 - RNA, 22 nt, Human
ucaugucucuaugugccuauua

SEQ ID NO: 656198 - RNA, 22 nt, Human
ucuuccagugcuguguagagcu

SEQ ID NO: 656199 - RNA, 21 nt, Human
acagagcauaaugguguggca

SEQ ID NO: 656200 - RNA, 22 nt, Human
gcucacaguacagugcuggcuc

SEQ ID NO: 656201 - RNA, 22 nt, Human
ugauuugagguacauaaaucca

SEQ ID NO: 656202 - RNA, 22 nt, Human
cagcccagagauguuaucuagu

SEQ ID NO: 656203 - RNA, 22 nt, Human
acaguauaccauugugacuuug

SEQ ID NO: 656204 - RNA, 22 nt, Human
aggucauugaaguuauuuucuu

SEQ ID NO: 656205 - RNA, 22 nt, Human
agugaauacaugucacucagca

SEQ ID NO: 656206 - RNA, 22 nt, Human
uaggacuuuggcgucagaacug

SEQ ID NO: 656207 - RNA, 22 nt, Human
ugguggcuaccagguccugggg

SEQ ID NO: 656208 - RNA, 22 nt, Human
uacacugaaagagaggauugaa

SEQ ID NO: 656209 - RNA, 22 nt, Human
gguggcucagugucaggcccug

SEQ ID NO: 656210 - RNA, 22 nt, Human
ggcaaagcugggauucaaaccc

SEQ ID NO: 656211 - RNA, 22 nt, Human
agaggccuccgaaaggugggcu

SEQ ID NO: 656212 - RNA, 22 nt, Human
aaaaaugucauuauggaacuga

SEQ ID NO: 656213 - RNA, 22 nt, Human
cagggggugguccaggcugcgc

SEQ ID NO: 656214 - RNA, 22 nt, Human
gcuuuacugucuggaaaguuug

SEQ ID NO: 656215 - RNA, 22 nt, Human
aaaguguaggcuucaaagaggg

SEQ ID NO: 656216 - RNA, 22 nt, Human
ugaaauauuuagagaguaaguu

SEQ ID NO: 656217 - RNA, 22 nt, Human
uaugcaacagcauuauuacaau

SEQ ID NO: 656218 - RNA, 22 nt, Human
cagcauuucaggaggcugaggu

SEQ ID NO: 656219 - RNA, 22 nt, Human
gccagggagucugggccacaga

SEQ ID NO: 656220 - RNA, 22 nt, Human
acaggccuuaggagagaugggg

SEQ ID NO: 656221 - RNA, 22 nt, Human
gccauuaaugagaucaagaauc

SEQ ID NO: 656222 - RNA, 22 nt, Human
ucugcuuugaccuucuugaugc

SEQ ID NO: 656223 - RNA, 22 nt, Human
agcagggcagcugaugcgcacg

SEQ ID NO: 656224 - RNA, 22 nt, Human
ucugggaacuauaucugguggu

SEQ ID NO: 656225 - RNA, 22 nt, Human
ggccacacagaugacugcuuuc

SEQ ID NO: 656226 - RNA, 22 nt, Human
ggcacagggugauguugcaguu

SEQ ID NO: 656227 - RNA, 22 nt, Human
caaaagcaaagucccugaaugu

SEQ ID NO: 656228 - RNA, 22 nt, Human
uuuacgagugcuaaugauauug

SEQ ID NO: 656229 - RNA, 22 nt, Human
ugucugaacccuggcccugccu

SEQ ID NO: 656230 - RNA, 22 nt, Human
acugggccaacuauuuguucua

SEQ ID NO: 656231 - RNA, 22 nt, Human
ugcaauauguugcauuguaugg

SEQ ID NO: 656232 - RNA, 22 nt, Human
uagauuguucuuaacuuuauaa

SEQ ID NO: 656233 - RNA, 22 nt, Human
uacuuuggauccuuacaauagc

SEQ ID NO: 656234 - RNA, 22 nt, Human
auugcuucauguccuuugccgg

SEQ ID NO: 656235 - RNA, 22 nt, Human
agggcugaugcaccauguagcc

SEQ ID NO: 656236 - RNA, 22 nt, Human
acaguugagaugcaacuuuggg

SEQ ID NO: 656237 - RNA, 22 nt, Human
uuguauuaaaauguguuucugu

SEQ ID NO: 656238 - RNA, 22 nt, Human
uaucagcucggaaucuguugaa

SEQ ID NO: 656239 - RNA, 22 nt, Human
ugcccuggcucuccacuaguuu

SEQ ID NO: 656240 - RNA, 22 nt, Human
agggcagcucucaccucuggcc

SEQ ID NO: 656241 - RNA, 22 nt, Human
gagcuguucaaggacaggcacg

SEQ ID NO: 656242 - RNA, 22 nt, Human
aucauccuauugugccccaggu

SEQ ID NO: 656243 - RNA, 22 nt, Human
aagcaggcaugggaggccaucc

SEQ ID NO: 656244 - RNA, 20 nt, Human
cugcccugcccuggguccug

SEQ ID NO: 656245 - RNA, 22 nt, Human
caguauguuuauuagaacugca

SEQ ID NO: 656246 - RNA, 22 nt, Human
ugggcucuagacuuuagugugg

SEQ ID NO: 656247 - RNA, 17 nt, Human
uuacacaggagagcucu

SEQ ID NO: 656248 - RNA, 22 nt, Human
uucaggauggaguaccuuuuau

SEQ ID NO: 656249 - RNA, 22 nt, Human
cuuggcugcuuuugugcacauu

SEQ ID NO: 656250 - RNA, 22 nt, Human
ugauuagcuuugaaugugcugc

SEQ ID NO: 656251 - RNA, 22 nt, Human
guggcaucgucugagguggggu

SEQ ID NO: 656252 - RNA, 22 nt, Human
uaggaagggaaaggcuucaacu

SEQ ID NO: 656253 - RNA, 22 nt, Human
caguuuaggucauccuugcuuu

SEQ ID NO: 656254 - RNA, 17 nt, Human
aggcaccucuuccugcu

SEQ ID NO: 656255 - RNA, 22 nt, Human
ggcucaggccuguaauccuagc

SEQ ID NO: 656256 - RNA, 22 nt, Human
ucucugagccccugccucuuuc

SEQ ID NO: 656257 - RNA, 22 nt, Human
ccagcuggggaaguggggcaua

SEQ ID NO: 656258 - RNA, 21 nt, Human
uccuguaagcuuggguggcuc

SEQ ID NO: 656259 - RNA, 22 nt, Human
gaggggagaggcuuauggauca

SEQ ID NO: 656260 - RNA, 22 nt, Human
ccuccaguacuccaguccagcg

SEQ ID NO: 656261 - RNA, 22 nt, Human
agccaggauggucucgaucggc

SEQ ID NO: 656262 - RNA, 20 nt, Human
ucuuauacagaaaacauuuu

SEQ ID NO: 656263 - RNA, 22 nt, Human
caggcuuggcagggaggcuggu

SEQ ID NO: 656264 - RNA, 22 nt, Human
uuuccuuugggcacccgagcuc

SEQ ID NO: 656265 - RNA, 22 nt, Human
aagucaucacuccucugaacuu

SEQ ID NO: 656266 - RNA, 22 nt, Human
auacagcuuucuuucacaugag

SEQ ID NO: 656267 - RNA, 22 nt, Human
uguguuuauaguguaucuucca

SEQ ID NO: 656268 - RNA, 22 nt, Human
ggccaccaguccucuggcaggg

SEQ ID NO: 656269 - RNA, 21 nt, Human
gucuuuuaagugaagagaggc

SEQ ID NO: 656270 - RNA, 22 nt, Human
aagaggcuggcauugaugguag

SEQ ID NO: 656271 - RNA, 22 nt, Human
ccuucucugcagguaguuggcu

SEQ ID NO: 656272 - RNA, 22 nt, Human
acauuaacacuggugcuggugu

SEQ ID NO: 656273 - RNA, 22 nt, Human
agcauccagaugccugauguca

SEQ ID NO: 656274 - RNA, 16 nt, Human
gcuuagugagagcaac

SEQ ID NO: 656275 - RNA, 22 nt, Human
uaguuauuauuguuacuaucag

SEQ ID NO: 656276 - RNA, 22 nt, Human
ggcaguuuuaacagagguagua

SEQ ID NO: 656277 - RNA, 22 nt, Human
aaguuccuguuacuccccagaa

SEQ ID NO: 656278 - RNA, 22 nt, Human
gaccacagcagugcaagaggag

SEQ ID NO: 656279 - RNA, 22 nt, Human
gagaagcagguuuagcagacaa

SEQ ID NO: 656280 - RNA, 22 nt, Human
uuccagagcuuugcgcuuggaa

SEQ ID NO: 656281 - RNA, 22 nt, Human
uucacagaauugucuugacugg

SEQ ID NO: 656282 - RNA, 22 nt, Human
gucaugccagcggagcucggga

SEQ ID NO: 656283 - RNA, 19 nt, Human
ucugaggguccagaugcau

SEQ ID NO: 656284 - RNA, 22 nt, Human
agaggaucuaagugaguccuca

SEQ ID NO: 656285 - RNA, 22 nt, Human
uacagaguuuuccugccaagaa

SEQ ID NO: 656286 - RNA, 22 nt, Human
cuggcuguguccacagaguaag

SEQ ID NO: 656287 - RNA, 22 nt, Human
acauucugaaugccugacagua

SEQ ID NO: 656288 - RNA, 22 nt, Human
cgcugccuucaucccacgccua

SEQ ID NO: 656289 - RNA, 18 nt, Human
ccacccagggggagagga

SEQ ID NO: 656290 - RNA, 18 nt, Human
guuuccugaggugaaggg

SEQ ID NO: 656291 - RNA, 22 nt, Human
uauugccaaaugucugcuggaa

SEQ ID NO: 656292 - RNA, 22 nt, Human
acaguacauaauccugagucug

SEQ ID NO: 656293 - RNA, 22 nt, Human
cacuguccaugcuugcuaaccc

SEQ ID NO: 656294 - RNA, 22 nt, Human
gucugcccuuggcucagccaua

SEQ ID NO: 656295 - RNA, 18 nt, Human
gugcugugggcaguggcc

SEQ ID NO: 656296 - RNA, 22 nt, Human
ugcuucacuggcuccacauagg

SEQ ID NO: 656297 - RNA, 22 nt, Human
cuggagagagaaaaagccuuaa

SEQ ID NO: 656298 - RNA, 22 nt, Human
uggaggacguguccaccaugaa

SEQ ID NO: 656299 - RNA, 22 nt, Human
uuacaucaugcuuaucccuuuc

SEQ ID NO: 656300 - RNA, 22 nt, Human
ucaggccuucagaccuggcccg

SEQ ID NO: 656301 - RNA, 22 nt, Human
ugggcagaucuuugguggcuag

SEQ ID NO: 656302 - RNA, 22 nt, Human
gccaccuguuucagaugugguu

SEQ ID NO: 656303 - RNA, 22 nt, Human
guuugcauuuauuagucuucug

SEQ ID NO: 656304 - RNA, 23 nt, Human
ccaguggcguaaacuagaggaua

SEQ ID NO: 656305 - RNA, 18 nt, Human
cugggccagaguuucugc

SEQ ID NO: 656306 - RNA, 23 nt, Human
ccucagcauggcaggagcccagc

SEQ ID NO: 656307 - RNA, 22 nt, Human
caaauguuucuugaacaccaac

SEQ ID NO: 656308 - RNA, 22 nt, Human
cguggcuggggaggucagccag

SEQ ID NO: 656309 - RNA, 20 nt, Human
cagcuagugguaggagucgg

SEQ ID NO: 656310 - RNA, 22 nt, Human
ggccagggggcuucagacucca

SEQ ID NO: 656311 - RNA, 19 nt, Human
gaggcaguagucaaagcuu

SEQ ID NO: 656312 - RNA, 22 nt, Human
gggagacaagaaguagccugcu

SEQ ID NO: 656313 - RNA, 22 nt, Human
agaaugcauuuuguguagcuau

SEQ ID NO: 656314 - RNA, 22 nt, Human
uugggcagucuggcugcagagu

SEQ ID NO: 656315 - RNA, 22 nt, Human
augcaguaaaauaggagguaau

SEQ ID NO: 656316 - RNA, 22 nt, Human
cuauccauauccugggcauggc

SEQ ID NO: 656317 - RNA, 22 nt, Human
ccucuguccccagugcaggccu

SEQ ID NO: 656318 - RNA, 22 nt, Human
agguuccagggauuaggaugug

SEQ ID NO: 656319 - RNA, 22 nt, Human
acugggagaaacugacaccuua

SEQ ID NO: 656320 - RNA, 22 nt, Human
ucccucagcuugucuccaugca

SEQ ID NO: 656321 - RNA, 22 nt, Human
aggaagagcccgggugacauaa

SEQ ID NO: 656322 - RNA, 22 nt, Human
gcaccaggcagcugagcaggcc

SEQ ID NO: 656323 - RNA, 22 nt, Human
acacaugugauucuaagacagc

SEQ ID NO: 656324 - RNA, 22 nt, Human
cagagucuuguguguucagccc

SEQ ID NO: 656325 - RNA, 22 nt, Human
auuaggauguuccuaugcacau

SEQ ID NO: 656326 - RNA, 18 nt, Human
ugauggaggagggcuggu

SEQ ID NO: 656327 - RNA, 22 nt, Human
ggcaccaggcugggcauaggcc

SEQ ID NO: 656328 - RNA, 22 nt, Human
uggccuuguguuuaagcaagaa

SEQ ID NO: 656329 - RNA, 22 nt, Human
uacacauacauugcuuacaagg

SEQ ID NO: 656330 - RNA, 22 nt, Human
gagaaauuuugaguggcuuucu

SEQ ID NO: 656331 - RNA, 22 nt, Human
ggcaguuucucaggcaggggua

SEQ ID NO: 656332 - RNA, 22 nt, Human
auuuggucuccauacugguuag

SEQ ID NO: 656333 - RNA, 22 nt, Human
uguauacaggauuacucauagc

SEQ ID NO: 656334 - RNA, 22 nt, Human
agucaaagcuacaggcauuuga

SEQ ID NO: 656335 - RNA, 22 nt, Human
ggcgcugucgugagcucgcccg

SEQ ID NO: 656336 - RNA, 22 nt, Human
uuuccuggaggguccccagcag

SEQ ID NO: 656337 - RNA, 22 nt, Human
cuggcccucgucaguuucacug

SEQ ID NO: 656338 - RNA, 22 nt, Human
gcaguguugguuugcucugcag

SEQ ID NO: 656339 - RNA, 22 nt, Human
cuugagcacagcggcuucagga

SEQ ID NO: 656340 - RNA, 22 nt, Human
auucaaacuguguuaggcagca

SEQ ID NO: 656341 - RNA, 22 nt, Human
uuuauguuccucuugagcuuuc

SEQ ID NO: 656342 - RNA, 22 nt, Human
gcaccugaggaggcaucuggag

SEQ ID NO: 656343 - RNA, 22 nt, Human
uuauucaguucccuucacucuc

SEQ ID NO: 656344 - RNA, 23 nt, Human
acagggcuggcagcugcaagacc

SEQ ID NO: 656345 - RNA, 22 nt, Human
aagcacuaggacuucagucucu

SEQ ID NO: 656346 - RNA, 22 nt, Human
aaguguuaaagacuugaacacu

SEQ ID NO: 656347 - RNA, 22 nt, Human
guuucuuaaguuacaaaaucuu

SEQ ID NO: 656348 - RNA, 22 nt, Human
auggcccaggccuccuguggcu

SEQ ID NO: 656349 - RNA, 22 nt, Human
ucaaaggguaauguaauagucu

SEQ ID NO: 656350 - RNA, 21 nt, Human
uuccuggggaaggagcugccu

SEQ ID NO: 656351 - RNA, 22 nt, Human
gguuuaauugguccaggauggg

SEQ ID NO: 656352 - RNA, 23 nt, Human
ggccauggagacuuagaaugggc

SEQ ID NO: 656353 - RNA, 22 nt, Human
cagaugucauuucccaugcagc

SEQ ID NO: 656354 - RNA, 22 nt, Human
acauccaucuuaugagauaggu

SEQ ID NO: 656355 - RNA, 22 nt, Human
uagcucuggcauucuuuccaaa

SEQ ID NO: 656356 - RNA, 22 nt, Human
gugacaguggucacuuguaguu

SEQ ID NO: 656357 - RNA, 22 nt, Human
agucuacaaagggaagcccuuu

SEQ ID NO: 656358 - RNA, 22 nt, Human
ucagguccagcuccugugccuc

SEQ ID NO: 656359 - RNA, 22 nt, Human
uuauagcaggugacuaaugagu

SEQ ID NO: 656360 - RNA, 20 nt, Human
ucaaagaagauucagcucaa

SEQ ID NO: 656361 - RNA, 22 nt, Human
aagacuuucccucaucagaacg

SEQ ID NO: 656362 - RNA, 22 nt, Human
agcuguuggcuggcugagcucu

SEQ ID NO: 656363 - RNA, 23 nt, Human
uaggggcuggcguggagccugcg

SEQ ID NO: 656364 - RNA, 22 nt, Human
agaaugauagcuaguauuuacu

SEQ ID NO: 656365 - RNA, 22 nt, Human
cccuggagaaggggacgcggag

SEQ ID NO: 656366 - RNA, 22 nt, Human
ugucaugucuguaaauacacca

SEQ ID NO: 656367 - RNA, 22 nt, Human
uacacuaaaucuucaucuuuua

SEQ ID NO: 656368 - RNA, 22 nt, Human
gggcugagggccaauuccuacu

SEQ ID NO: 656369 - RNA, 22 nt, Human
aucuguuauugaauaggugcua

SEQ ID NO: 656370 - RNA, 22 nt, Human
augggcaugauauuaguaccua

SEQ ID NO: 656371 - RNA, 22 nt, Human
ugcaaggcugccucugaggacc

SEQ ID NO: 656372 - RNA, 22 nt, Human
ggcacaaguuugaugugaguua

SEQ ID NO: 656373 - RNA, 22 nt, Human
gaacacaagcguaugucuuugu

SEQ ID NO: 656374 - RNA, 22 nt, Human
uuagaaaugauuucaccucuuu

SEQ ID NO: 656375 - RNA, 22 nt, Human
ucuauaauccuauuucaacugc

SEQ ID NO: 656376 - RNA, 22 nt, Human
uggcuccagcccugagcaagcu

SEQ ID NO: 656377 - RNA, 22 nt, Human
guccugugcaccgugggauguu

SEQ ID NO: 656378 - RNA, 22 nt, Human
guugcuuuacagcuggugacag

SEQ ID NO: 656379 - RNA, 22 nt, Human
cauagaauggauugacaagauu

SEQ ID NO: 656380 - RNA, 22 nt, Human
uaauggauuaacgucccugucg

SEQ ID NO: 656381 - RNA, 21 nt, Human
gccagggaguuaaagagucuu

SEQ ID NO: 656382 - RNA, 18 nt, Human
cacaggcaggugauaggu

SEQ ID NO: 656383 - RNA, 22 nt, Human
cugagaucuuuauacgaggcac

SEQ ID NO: 656384 - RNA, 22 nt, Human
ggguguccugugccaagcuggg

SEQ ID NO: 656385 - RNA, 22 nt, Human
uuucucaaauacuguuccagga

SEQ ID NO: 656386 - RNA, 22 nt, Human
uuauugcaacuuuagggauaga

SEQ ID NO: 656387 - RNA, 22 nt, Human
uccucagaugcucuuggacgcc

SEQ ID NO: 656388 - RNA, 22 nt, Human
uuuagcuugaaaguuuuggagg

SEQ ID NO: 656389 - RNA, 22 nt, Human
cacugaguucccugacauuuca

SEQ ID NO: 656390 - RNA, 22 nt, Human
aggagucauugagagggguccu

SEQ ID NO: 656391 - RNA, 22 nt, Human
uuccugggugguccugguagag

SEQ ID NO: 656392 - RNA, 22 nt, Human
uguauguguauguacauaugca

SEQ ID NO: 656393 - RNA, 22 nt, Human
agguccuguccuuggucucuga

SEQ ID NO: 656394 - RNA, 22 nt, Human
aguccugggugugcaaggcaga

SEQ ID NO: 656395 - RNA, 22 nt, Human
ugaaugcaagaaggaacaugaa

SEQ ID NO: 656396 - RNA, 22 nt, Human
guuuuucugugagcgguaaagg

SEQ ID NO: 656397 - RNA, 22 nt, Human
augagggaggcaaggagaugcu

SEQ ID NO: 656398 - RNA, 22 nt, Human
gcagccacugggagugcuuaua

SEQ ID NO: 656399 - RNA, 22 nt, Human
aggucuccucauauucugccuc

SEQ ID NO: 656400 - RNA, 22 nt, Human
uugacagaugugaaagugagca

SEQ ID NO: 656401 - RNA, 22 nt, Human
uggcucaggguccccaaauggu

SEQ ID NO: 656402 - RNA, 22 nt, Human
uucuacauauauuuuucucacu

SEQ ID NO: 656403 - RNA, 22 nt, Human
agaggacagagugcuggauuua

SEQ ID NO: 656404 - RNA, 22 nt, Human
uguguugguagaucugaggucu

SEQ ID NO: 656405 - RNA, 22 nt, Human
cacagcuucaguuucugacuug

SEQ ID NO: 656406 - RNA, 22 nt, Human
uagcccagcaugagcagagcug

SEQ ID NO: 656407 - RNA, 22 nt, Human
augugugccccuuuuacucuuu

SEQ ID NO: 656408 - RNA, 22 nt, Human
aagaauuauugcaauacuagau

SEQ ID NO: 656409 - RNA, 22 nt, Human
ggacacagguaaauaccacuga

SEQ ID NO: 656410 - RNA, 19 nt, Human
agugggcaaggaagaugac

SEQ ID NO: 656411 - RNA, 22 nt, Human
ucaugcucugguuuagcuguuu

SEQ ID NO: 656412 - RNA, 22 nt, Human
auacacaggugcuaggucaaua

SEQ ID NO: 656413 - RNA, 22 nt, Human
gcaucaagacgaugugaaaucg

SEQ ID NO: 656414 - RNA, 22 nt, Human
uugacaagaacaccgguuugag

SEQ ID NO: 656415 - RNA, 22 nt, Human
ggcaggggugaggccacucuga

SEQ ID NO: 656416 - RNA, 22 nt, Human
uuaugcauauagcagauacgag

SEQ ID NO: 656417 - RNA, 22 nt, Human
ugaaagguuauuuaggucugcu

SEQ ID NO: 656418 - RNA, 22 nt, Human
gugcugagcacagcugcccagg

SEQ ID NO: 656419 - RNA, 22 nt, Human
ccugggagcuguggaaaggcug

SEQ ID NO: 656420 - RNA, 23 nt, Human
gcccaugcuguugggcccgagca

SEQ ID NO: 656421 - RNA, 22 nt, Human
ucaagcaaacucugagaaauaa

SEQ ID NO: 656422 - RNA, 23 nt, Human
ugugcucccaaauguaggucuau

SEQ ID NO: 656423 - RNA, 22 nt, Human
aauucaaugguuuuuaggauau

SEQ ID NO: 656424 - RNA, 22 nt, Human
auguggcuauuuuaauguuaau

SEQ ID NO: 656425 - RNA, 22 nt, Human
agaaauagaggaaagguuugac

SEQ ID NO: 656426 - RNA, 23 nt, Human
agcuuuggugaugugacagauaa

SEQ ID NO: 656427 - RNA, 22 nt, Human
acacaauaaauuuauccuuuga

SEQ ID NO: 656428 - RNA, 22 nt, Human
ucuguaaagauguuuauaccuu

SEQ ID NO: 656429 - RNA, 22 nt, Human
ugauucaagccaccacauacug

SEQ ID NO: 656430 - RNA, 22 nt, Human
aacagggcuuuggaagucuccg

SEQ ID NO: 656431 - RNA, 22 nt, Human
ugugaggaacaggacuagagca

SEQ ID NO: 656432 - RNA, 22 nt, Human
agcucugggaguaguuccaccu

SEQ ID NO: 656433 - RNA, 22 nt, Human
gagauaaagcuaccauguugau

SEQ ID NO: 656434 - RNA, 22 nt, Human
auuaagaugugggaaaauuuaa

SEQ ID NO: 656435 - RNA, 22 nt, Human
ggcuauguguguccaguguauu

SEQ ID NO: 656436 - RNA, 22 nt, Human
gagucaacaagucagaucucac

SEQ ID NO: 656437 - RNA, 22 nt, Human
caggguggccagguagauaaua

SEQ ID NO: 656438 - RNA, 22 nt, Human
cuggagcccugaaugggcagga

SEQ ID NO: 656439 - RNA, 20 nt, Human
uagaaaucuuauaaaagacu

SEQ ID NO: 656440 - RNA, 22 nt, Human
uaauuauucuagucacauagca

SEQ ID NO: 656441 - RNA, 22 nt, Human
caccaugcuugauuuguaaugu

SEQ ID NO: 656442 - RNA, 22 nt, Human
uaucuucuugccaggcuggugu

SEQ ID NO: 656443 - RNA, 21 nt, Human
ugaggccucuccugggcuggc

SEQ ID NO: 656444 - RNA, 21 nt, Human
uuaagacacacagauuaagga

SEQ ID NO: 656445 - RNA, 22 nt, Human
ugacugaaggacuagauugauu

SEQ ID NO: 656446 - RNA, 22 nt, Human
cucugcuggccaugaagagaga

SEQ ID NO: 656447 - RNA, 22 nt, Human
ucaaaguaaaaguauagaguuu

SEQ ID NO: 656448 - RNA, 23 nt, Human
cucagggauagaaaggaagacag

SEQ ID NO: 656449 - RNA, 21 nt, Human
uuucggucccagaugccugug

SEQ ID NO: 656450 - RNA, 22 nt, Human
gcaguguuaaugcgaguguuca

SEQ ID NO: 656451 - RNA, 18 nt, Human
aacaugcauuagaacugc

SEQ ID NO: 656452 - RNA, 22 nt, Human
auuauaugugggauagaauuua

SEQ ID NO: 656453 - RNA, 22 nt, Human
ucagaagcuaaauuugauauuu

SEQ ID NO: 656454 - RNA, 20 nt, Human
aggaggccugcagauaguuc

SEQ ID NO: 656455 - RNA, 22 nt, Human
ccuggagugacagguguagccu

SEQ ID NO: 656456 - RNA, 22 nt, Human
gcccagguuggagagcaguggc

SEQ ID NO: 656457 - RNA, 22 nt, Human
gugaggggaguaaagccauguu

SEQ ID NO: 656458 - RNA, 22 nt, Human
gaaggaggugucaguuggacug

SEQ ID NO: 656459 - RNA, 22 nt, Human
acauguauugacauuauauucu

SEQ ID NO: 656460 - RNA, 22 nt, Human
ggaggggugcucagcugucacg

SEQ ID NO: 656461 - RNA, 22 nt, Human
cccuggaagguucucuggcuca

SEQ ID NO: 656462 - RNA, 22 nt, Human
uccaggccugcaaugacaaagc

SEQ ID NO: 656463 - RNA, 21 nt, Human
cugggcucaugguguuacaga

SEQ ID NO: 656464 - RNA, 22 nt, Human
guauccuuugcggaaauuucua

SEQ ID NO: 656465 - RNA, 22 nt, Human
ggggagugacgcagggccauag

SEQ ID NO: 656466 - RNA, 22 nt, Human
cagaugcugcuauuucacccug

SEQ ID NO: 656467 - RNA, 22 nt, Human
uuucauaaccucaagcuacagu

SEQ ID NO: 656468 - RNA, 23 nt, Human
uccaccccagcugaggcuuagcc

SEQ ID NO: 656469 - RNA, 22 nt, Human
cuuucaaugugccugccuuggg

SEQ ID NO: 656470 - RNA, 22 nt, Human
uguccuggaaaaauggagaguu

SEQ ID NO: 656471 - RNA, 22 nt, Human
gcuggcucuucaguggagauag

SEQ ID NO: 656472 - RNA, 22 nt, Human
acaagguuuaaauagccaucag

SEQ ID NO: 656473 - RNA, 22 nt, Human
ccuugggacccugcuggagguu

SEQ ID NO: 656474 - RNA, 23 nt, Human
auguccccuucuugaugccuggc

SEQ ID NO: 656475 - RNA, 22 nt, Human
uuccuguucaggaaaguugugu

SEQ ID NO: 656476 - RNA, 20 nt, Human
auguaaaauuauaaggcuga

SEQ ID NO: 656477 - RNA, 22 nt, Human
auuacagaaagcaauauugagu

SEQ ID NO: 656478 - RNA, 20 nt, Human
gaggaaccacugggaggaga

SEQ ID NO: 656479 - RNA, 22 nt, Human
cacuaaaacuacauuggaaaca

SEQ ID NO: 656480 - RNA, 22 nt, Human
ucagagaagguaagugaccugc

SEQ ID NO: 656481 - RNA, 22 nt, Human
acagugcaaacccucgggaaag

SEQ ID NO: 656482 - RNA, 21 nt, Human
uagggggcagugggaugcuua

SEQ ID NO: 656483 - RNA, 22 nt, Human
ggcagccucagguuuucuuuga

SEQ ID NO: 656484 - RNA, 22 nt, Human
gggucagagcaagacugggguc

SEQ ID NO: 656485 - RNA, 22 nt, Human
gucaggcagccuggagauucag

SEQ ID NO: 656486 - RNA, 22 nt, Human
auccacucucccauucaugcau

SEQ ID NO: 656487 - RNA, 22 nt, Human
gcugggcucaccaggccacuag

SEQ ID NO: 656488 - RNA, 22 nt, Human
aaccuggcccuaaucccaguag

SEQ ID NO: 656489 - RNA, 21 nt, Human
uuucccucauuguguuggcac

SEQ ID NO: 656490 - RNA, 22 nt, Human
cucucagacugaagggccugug

SEQ ID NO: 656491 - RNA, 22 nt, Human
cugggugagcuggccagagggu

SEQ ID NO: 656492 - RNA, 22 nt, Human
uccucugacuucugguugaguu

SEQ ID NO: 656493 - RNA, 22 nt, Human
ugaggcagcauucuucaagaca

SEQ ID NO: 656494 - RNA, 22 nt, Human
ucuccaaaucaaucaauaugaa

SEQ ID NO: 656495 - RNA, 22 nt, Human
cuaaccugcauggcagcuagaa

SEQ ID NO: 656496 - RNA, 22 nt, Human
acaguuucuccauuuacaccuu

SEQ ID NO: 656497 - RNA, 22 nt, Human
cggcuggguagaggugccgggu

SEQ ID NO: 656498 - RNA, 22 nt, Human
augcaguuuaucuccaaaucau

SEQ ID NO: 656499 - RNA, 17 nt, Human
aggcaugaggcaucacu

SEQ ID NO: 656500 - RNA, 22 nt, Human
uggcucuggggacaguaagucc

SEQ ID NO: 656501 - RNA, 22 nt, Human
ugcaguuuuccuucaacauugu

SEQ ID NO: 656502 - RNA, 22 nt, Human
agccacagugggcuaccagcuc

SEQ ID NO: 656503 - RNA, 22 nt, Human
cugcccuguaucuucucccaau

SEQ ID NO: 656504 - RNA, 22 nt, Human
ucaaucaaugguuuccaaauuu

SEQ ID NO: 656505 - RNA, 22 nt, Human
auucuucucccuuagggcccag

SEQ ID NO: 656506 - RNA, 22 nt, Human
guccuucaagguccuuggugug

SEQ ID NO: 656507 - RNA, 23 nt, Human
aguacauucgaaaaauucuguga

SEQ ID NO: 656508 - RNA, 19 nt, Human
agacucugugugagacuuu

SEQ ID NO: 656509 - RNA, 22 nt, Human
aauggcuuauguaaugcuguuu

SEQ ID NO: 656510 - RNA, 22 nt, Human
ugggagcccaagggagcugccg

SEQ ID NO: 656511 - RNA, 20 nt, Human
ugcccagcaagagugcaguu

SEQ ID NO: 656512 - RNA, 22 nt, Human
accagcagggcugggccaaugg

SEQ ID NO: 656513 - RNA, 22 nt, Human
cuggggaccagugucuguuugu

SEQ ID NO: 656514 - RNA, 22 nt, Human
agaucugaguaugauuugccug

SEQ ID NO: 656515 - RNA, 22 nt, Human
aggaggguggccucaugugagu

SEQ ID NO: 656516 - RNA, 22 nt, Human
uccuggagccucauucaaacac

SEQ ID NO: 656517 - RNA, 22 nt, Human
agccaggcucaaggccugcucc

SEQ ID NO: 656518 - RNA, 22 nt, Human
ggcuccugaggaccaggcacag

SEQ ID NO: 656519 - RNA, 22 nt, Human
ugcuuccuauccacacaaugcc

SEQ ID NO: 656520 - RNA, 22 nt, Human
uuugacaauucaugacauuuau

SEQ ID NO: 656521 - RNA, 22 nt, Human
uccaggcuggacaugaggcggg

SEQ ID NO: 656522 - RNA, 22 nt, Human
acauuucagcgugcaugacaug

SEQ ID NO: 656523 - RNA, 21 nt, Human
ccagugcuacagcugccugac

SEQ ID NO: 656524 - RNA, 20 nt, Human
ucuggcucuuugcuccuccc

SEQ ID NO: 656525 - RNA, 23 nt, Human
ccucuaauaaacuugaccuugug

SEQ ID NO: 656526 - RNA, 22 nt, Human
uagcacaagcaacuacugaagu

SEQ ID NO: 656527 - RNA, 22 nt, Human
agcuuuaucuucaccugggaau

SEQ ID NO: 656528 - RNA, 22 nt, Human
uguauguaaaggucuucauguu

SEQ ID NO: 656529 - RNA, 22 nt, Human
aagucccaucugccuccaugua

SEQ ID NO: 656530 - RNA, 22 nt, Human
ggaauucucuaugcucuguucc

SEQ ID NO: 656531 - RNA, 22 nt, Human
aguggcagagccaagauaugau

SEQ ID NO: 656532 - RNA, 22 nt, Human
uuaauacaagcauaugcacaca

SEQ ID NO: 656533 - RNA, 22 nt, Human
aagccagugugacaggaaacuu

SEQ ID NO: 656534 - RNA, 23 nt, Human
auauaaacaccagauagauugua

SEQ ID NO: 656535 - RNA, 19 nt, Human
aauucuguuucagcagauc

SEQ ID NO: 656536 - RNA, 22 nt, Human
uccagcuguuguuuuaucucag

SEQ ID NO: 656537 - RNA, 23 nt, Human
auagacccaagaguaaaggcauc

SEQ ID NO: 656538 - RNA, 22 nt, Human
auauauacuuugacacauucug

SEQ ID NO: 656539 - RNA, 22 nt, Human
uuuuguuuaaaauccuggaugg

SEQ ID NO: 656540 - RNA, 22 nt, Human
auaugccauuagcuagaaauaa

SEQ ID NO: 656541 - RNA, 22 nt, Human
augcaacauccaauuccuuuug

SEQ ID NO: 656542 - RNA, 22 nt, Human
ucaugugucugccaguguuuau

SEQ ID NO: 656543 - RNA, 22 nt, Human
auauuucucucagacauggaag

SEQ ID NO: 656544 - RNA, 22 nt, Human
cuauuaaacacuacugugcacu

SEQ ID NO: 656545 - RNA, 22 nt, Human
caugggcagaaguggcaucauu

SEQ ID NO: 656546 - RNA, 22 nt, Human
gcacuugaggacgacucagcug

SEQ ID NO: 656547 - RNA, 22 nt, Human
cacagggcaggccccaggccuc

SEQ ID NO: 656548 - RNA, 22 nt, Human
aucucaaagcauggagcagaau

SEQ ID NO: 656549 - RNA, 21 nt, Human
augugcuuagcugcugguagu

SEQ ID NO: 656550 - RNA, 22 nt, Human
cacaguggcaaaggggcuuggg

SEQ ID NO: 656551 - RNA, 20 nt, Human
gcaugaggaaucauugcagc

SEQ ID NO: 656552 - RNA, 22 nt, Human
gcuaauacuuuggaaagaaugu

SEQ ID NO: 656553 - RNA, 22 nt, Human
uccagucauuuccauuguuccc

SEQ ID NO: 656554 - RNA, 18 nt, Human
uggugaaggguggaggag

SEQ ID NO: 656555 - RNA, 22 nt, Human
cucaggauagauuguccucuca

SEQ ID NO: 656556 - RNA, 22 nt, Human
agcaggcuccuuccuucucugg

SEQ ID NO: 656557 - RNA, 22 nt, Human
ugcuggcccaugaagacgcagu

SEQ ID NO: 656558 - RNA, 22 nt, Human
ugauuucauaguauauacauga

SEQ ID NO: 656559 - RNA, 22 nt, Human
uaggcugagguugaugccaggg

SEQ ID NO: 656560 - RNA, 22 nt, Human
gacauacaagcugguaccuccu

SEQ ID NO: 656561 - RNA, 22 nt, Human
gcagaugcuguggugauagaag

SEQ ID NO: 656562 - RNA, 20 nt, Human
cuguacaucaccaaggugac

SEQ ID NO: 656563 - RNA, 22 nt, Human
aucauaagacccagccaguauu

SEQ ID NO: 656564 - RNA, 22 nt, Human
ccgggagaguggaaccaagagg

SEQ ID NO: 656565 - RNA, 22 nt, Human
auugugcagcucugcucuuauu

SEQ ID NO: 656566 - RNA, 22 nt, Human
augggcugaggaagcuccugag

SEQ ID NO: 656567 - RNA, 22 nt, Human
agcugcccaauccugcagggcg

SEQ ID NO: 656568 - RNA, 22 nt, Human
cucugcuuuguaaguugugagg

SEQ ID NO: 656569 - RNA, 22 nt, Human
ugcagcucugaacagucaugaa

SEQ ID NO: 656570 - RNA, 22 nt, Human
auaguuugugaaacacagcagu

SEQ ID NO: 656571 - RNA, 22 nt, Human
uucuugaauagggauugauaaa

SEQ ID NO: 656572 - RNA, 22 nt, Human
agccugagugcuuaggacuguu

SEQ ID NO: 656573 - RNA, 22 nt, Human
uuacuugauuugaaaaucauag

SEQ ID NO: 656574 - RNA, 22 nt, Human
cagcucccaguggcagcuccuu

SEQ ID NO: 656575 - RNA, 22 nt, Human
ugggcugagaguaccuuauaaa

SEQ ID NO: 656576 - RNA, 22 nt, Human
ugcuucugaacucagcaugugg

SEQ ID NO: 656577 - RNA, 22 nt, Human
acauucaaaauugugguuuaga

SEQ ID NO: 656578 - RNA, 20 nt, Human
cccagagcacuuuuucaugu

SEQ ID NO: 656579 - RNA, 22 nt, Human
ggugccuguauuuggggcacag

SEQ ID NO: 656580 - RNA, 22 nt, Human
uuuuauugucaaugaagacaga

SEQ ID NO: 656581 - RNA, 22 nt, Human
gggagcacugagaggcagguag

SEQ ID NO: 656582 - RNA, 22 nt, Human
uuuccacaucaccaugagguga

SEQ ID NO: 656583 - RNA, 21 nt, Human
agcagaacagucgagcacugc

SEQ ID NO: 656584 - RNA, 22 nt, Human
cagcacaggccccucucuccca

SEQ ID NO: 656585 - RNA, 21 nt, Human
gggcuuuuuauuuagcacugu

SEQ ID NO: 656586 - RNA, 22 nt, Human
uucccacagagauuacauugaa

SEQ ID NO: 656587 - RNA, 22 nt, Human
aaggcugguuccaucccuggug

SEQ ID NO: 656588 - RNA, 22 nt, Human
cuggcucagugccuucagaagu

SEQ ID NO: 656589 - RNA, 22 nt, Human
uucucugguaaacacaugcgua

SEQ ID NO: 656590 - RNA, 22 nt, Human
cacagagaucggaacagaagua

SEQ ID NO: 656591 - RNA, 23 nt, Human
ugagacacucauucauggaguau

SEQ ID NO: 656592 - RNA, 22 nt, Human
ccagggaaacuuuggaguggag

SEQ ID NO: 656593 - RNA, 23 nt, Human
aggaagcuaccaauuuuguaggc

SEQ ID NO: 656594 - RNA, 20 nt, Human
uccaagggcagcagaaucag

SEQ ID NO: 656595 - RNA, 22 nt, Human
uucaggagcuagggaugugaaa

SEQ ID NO: 656596 - RNA, 21 nt, Human
uacacaaagcgugguccagag

SEQ ID NO: 656597 - RNA, 22 nt, Human
gcccugcucuguuggucaccug

SEQ ID NO: 656598 - RNA, 22 nt, Human
uccguugacacugcauggagau

SEQ ID NO: 656599 - RNA, 22 nt, Human
uagaaaagaauuuuauuugaua

SEQ ID NO: 656600 - RNA, 22 nt, Human
cccagugucugggccugcaggg

SEQ ID NO: 656601 - RNA, 22 nt, Human
cccuggagcugcuugcauguug

SEQ ID NO: 656602 - RNA, 17 nt, Human
gcagacacuucuauuga

SEQ ID NO: 656603 - RNA, 22 nt, Human
ugugacuuagggcaggugagau

SEQ ID NO: 656604 - RNA, 22 nt, Human
guggccguguaacuugaguaca

SEQ ID NO: 656605 - RNA, 22 nt, Human
acguggcggccgccgugagcgg

SEQ ID NO: 656606 - RNA, 22 nt, Human
acacaagugaauauuuuaagga

SEQ ID NO: 656607 - RNA, 22 nt, Human
acagcugauaguuaccucuguc

SEQ ID NO: 656608 - RNA, 19 nt, Human
gcugggugggguccacagc

SEQ ID NO: 656609 - RNA, 21 nt, Human
uuccacaguccugaggauuca

SEQ ID NO: 656610 - RNA, 22 nt, Human
aucauucagucucugggacagu

SEQ ID NO: 656611 - RNA, 22 nt, Human
gugcuuaaccuaguuucuagua

SEQ ID NO: 656612 - RNA, 22 nt, Human
guccagccccugacucccaggc

SEQ ID NO: 656613 - RNA, 23 nt, Human
uuucucugagaagcaguucucua

SEQ ID NO: 656614 - RNA, 22 nt, Human
uuggggaguuaaugccaaagau

SEQ ID NO: 656615 - RNA, 22 nt, Human
auguccuguuuuggcuugcucu

SEQ ID NO: 656616 - RNA, 22 nt, Human
gaaaucaaggcuacauucaggu

SEQ ID NO: 656617 - RNA, 22 nt, Human
uauggcuuugggccaaaucuac

SEQ ID NO: 656618 - RNA, 22 nt, Human
aguuuuauaucuuccauugguu

SEQ ID NO: 656619 - RNA, 22 nt, Human
cuggaugauaacagcaauauuu

SEQ ID NO: 656620 - RNA, 22 nt, Human
gcaaagcaagcugucagccuca

SEQ ID NO: 656621 - RNA, 22 nt, Human
augaggauguuaguggacugga

SEQ ID NO: 656622 - RNA, 19 nt, Human
ucuccaggcaggugagcga

SEQ ID NO: 656623 - RNA, 22 nt, Human
uuucagacauaccaguuauuga

SEQ ID NO: 656624 - RNA, 23 nt, Human
aguuaggucaaguuaggucaauu

SEQ ID NO: 656625 - RNA, 22 nt, Human
ucugcauuuuuaacaagauccc

SEQ ID NO: 656626 - RNA, 22 nt, Human
caaaggcaacauauacuuguuu

SEQ ID NO: 656627 - RNA, 22 nt, Human
ggccuggacaaaugcaccaagg

SEQ ID NO: 656628 - RNA, 22 nt, Human
uucagaaggugcagccugggcc

SEQ ID NO: 656629 - RNA, 22 nt, Human
agaaagcacgggccccaggcuc

SEQ ID NO: 656630 - RNA, 22 nt, Human
gaaguuauuugcuaucuacuga

SEQ ID NO: 656631 - RNA, 22 nt, Human
ucaggccugagaaaaauccuuu

SEQ ID NO: 656632 - RNA, 22 nt, Human
ucauguguguuucauguaugga

SEQ ID NO: 656633 - RNA, 22 nt, Human
gccuucaggaggguuccagaca

SEQ ID NO: 656634 - RNA, 22 nt, Human
gcuaaugauagcaagauaaaca

SEQ ID NO: 656635 - RNA, 22 nt, Human
uucucugggaacauaaaugaag

SEQ ID NO: 656636 - RNA, 22 nt, Human
uaggauacaaauucuguaauuu

SEQ ID NO: 656637 - RNA, 21 nt, Human
uggcuucugccaauguuaaga

SEQ ID NO: 656638 - RNA, 22 nt, Human
cagacacuuauugagcaaguac

SEQ ID NO: 656639 - RNA, 22 nt, Human
cuugcuuuguccagaaauucag

SEQ ID NO: 656640 - RNA, 22 nt, Human
ucucauuugccucaucuauaaa

SEQ ID NO: 656641 - RNA, 22 nt, Human
auggaagaguccccauggauga

SEQ ID NO: 656642 - RNA, 22 nt, Human
cuggaccagaaaggacauggcu

SEQ ID NO: 656643 - RNA, 22 nt, Human
gcagaagcacaggugacgggcc

SEQ ID NO: 656644 - RNA, 22 nt, Human
gcaggucuugaaggugugauuu

SEQ ID NO: 656645 - RNA, 22 nt, Human
guauuuaauucugugcuucuag

SEQ ID NO: 656646 - RNA, 22 nt, Human
uuccaauauuuacaaugcauua

SEQ ID NO: 656647 - RNA, 22 nt, Human
uuagcucagaaaauuuaaacuu

SEQ ID NO: 656648 - RNA, 22 nt, Human
agaccuggaugugagggaagua

SEQ ID NO: 656649 - RNA, 22 nt, Human
ccagggccugccacuuagcaag

SEQ ID NO: 656650 - RNA, 22 nt, Human
aauucaguaaucauuaaugaug

SEQ ID NO: 656651 - RNA, 22 nt, Human
gagguggcuuagucucuggaca

SEQ ID NO: 656652 - RNA, 22 nt, Human
ugcccaaggauccauuggcugg

SEQ ID NO: 656653 - RNA, 22 nt, Human
uguggccagcagguggcugugu

SEQ ID NO: 656654 - RNA, 22 nt, Human
uccuuggggacgcugacaucgu

SEQ ID NO: 656655 - RNA, 22 nt, Human
gaagggaaggaaagaaccagca

SEQ ID NO: 656656 - RNA, 22 nt, Human
ucccaggagcaccuuuugagcc

SEQ ID NO: 656657 - RNA, 22 nt, Human
gcgaaaaauguguaaauauguu

SEQ ID NO: 656658 - RNA, 22 nt, Human
ugagguaguuuguuguacagua

SEQ ID NO: 656659 - RNA, 22 nt, Human
acucagaaugacugaugcugug

SEQ ID NO: 656660 - RNA, 22 nt, Human
agaucauaugaaaaauuucaag

SEQ ID NO: 656661 - RNA, 22 nt, Human
cuuucccacgcaguggaugaga

SEQ ID NO: 656662 - RNA, 22 nt, Human
uguacaguauugguguuaguag

SEQ ID NO: 656663 - RNA, 22 nt, Human
gaguaaggcugcugauggagug

SEQ ID NO: 656664 - RNA, 22 nt, Human
ucuuccaggcccugccacagcu

SEQ ID NO: 656665 - RNA, 22 nt, Human
ugcagggaagcaaggguggcuc

SEQ ID NO: 656666 - RNA, 22 nt, Human
uuugacauugaaagcagaaucg

SEQ ID NO: 656667 - RNA, 22 nt, Human
guugaauaucguguucuuguuu

SEQ ID NO: 656668 - RNA, 22 nt, Human
aacagauaauuucuaaguuacu

SEQ ID NO: 656669 - RNA, 22 nt, Human
uuacuuuccagcucuagcuuca

SEQ ID NO: 656670 - RNA, 23 nt, Human
gcuguacaggaaccaguuuggag

SEQ ID NO: 656671 - RNA, 22 nt, Human
auucccacuagcucuuuauaga

SEQ ID NO: 656672 - RNA, 22 nt, Human
cauguaauccuggggagaugaa

SEQ ID NO: 656673 - RNA, 22 nt, Human
agcugggacucaacugucuggg

SEQ ID NO: 656674 - RNA, 22 nt, Human
agcugcugugugcucaggcagg

SEQ ID NO: 656675 - RNA, 22 nt, Human
guguuuaauagguagcugaauc

SEQ ID NO: 656676 - RNA, 22 nt, Human
uccugggcuuaguggcuagguc

SEQ ID NO: 656677 - RNA, 20 nt, Human
cugggaggucuuccaaauca

SEQ ID NO: 656678 - RNA, 22 nt, Human
caggcacacccacuggugcaga

SEQ ID NO: 656679 - RNA, 22 nt, Human
gcuguauuuauuuucuaggguu

SEQ ID NO: 656680 - RNA, 22 nt, Human
aagaaaguggguaauaugauuu

SEQ ID NO: 656681 - RNA, 22 nt, Human
gaugucuuucugugugccuaga

SEQ ID NO: 656682 - RNA, 22 nt, Human
caguuucuacgaaggucaaccc

SEQ ID NO: 656683 - RNA, 19 nt, Human
cauggcugcugcuugggag

SEQ ID NO: 656684 - RNA, 18 nt, Human
ggacaggagacaugggug

SEQ ID NO: 656685 - RNA, 22 nt, Human
caugccauuuacuuggaggaga

SEQ ID NO: 656686 - RNA, 18 nt, Human
ucagcuggggcugcagcc

SEQ ID NO: 656687 - RNA, 22 nt, Human
ggaagaguaacaggagguggaa

SEQ ID NO: 656688 - RNA, 22 nt, Human
cuguggcucagcacggggucag

SEQ ID NO: 656689 - RNA, 22 nt, Human
uaacagaaacagauaaguguaa

SEQ ID NO: 656690 - RNA, 22 nt, Human
gcaggagcuuugcuuacugcug

SEQ ID NO: 656691 - RNA, 22 nt, Human
ccugugcucccauagcuucugu

SEQ ID NO: 656692 - RNA, 22 nt, Human
uuugcagcaaggagagagcauu

SEQ ID NO: 656693 - RNA, 22 nt, Human
ucaguggaacugucugggugag

SEQ ID NO: 656694 - RNA, 22 nt, Human
uggagggauacaaagaugaaaa

SEQ ID NO: 656695 - RNA, 22 nt, Human
auuguauuuccagcuugaaugu

SEQ ID NO: 656696 - RNA, 22 nt, Human
gcagcaucuguacauagacgcu

SEQ ID NO: 656697 - RNA, 22 nt, Human
caggcagaaugaccgaccucgc

SEQ ID NO: 656698 - RNA, 22 nt, Human
uccgggagcugaacgucuugcg

SEQ ID NO: 656699 - RNA, 22 nt, Human
aaagcugcccuacacggaagca

SEQ ID NO: 656700 - RNA, 22 nt, Human
ucugccagguggggagaggcca

SEQ ID NO: 656701 - RNA, 22 nt, Human
ugcaggugucuccagggcaggu

SEQ ID NO: 656702 - RNA, 22 nt, Human
guggcagucggaagucaggaga

SEQ ID NO: 656703 - RNA, 22 nt, Human
uauuauugacauuuacuuggug

SEQ ID NO: 656704 - RNA, 22 nt, Human
ugcuguggauucagagaugaaa

SEQ ID NO: 656705 - RNA, 22 nt, Human
ccugccagcugugggccagccu

SEQ ID NO: 656706 - RNA, 22 nt, Human
uuuacagaucuguugauuuguu

SEQ ID NO: 656707 - RNA, 19 nt, Human
aggaauggaauuaauucug

SEQ ID NO: 656708 - RNA, 22 nt, Human
uaaaacuuugaaggugcucagu

SEQ ID NO: 656709 - RNA, 22 nt, Human
agcagggcugcggccccaccac

SEQ ID NO: 656710 - RNA, 22 nt, Human
uuaaacaguguuucaugugggg

SEQ ID NO: 656711 - RNA, 21 nt, Human
uccuugggcagugcccagcuu

SEQ ID NO: 656712 - RNA, 22 nt, Human
ccagcaucccugggguuggcca

SEQ ID NO: 656713 - RNA, 22 nt, Human
uggaccgcagggaugcccggca

SEQ ID NO: 656714 - RNA, 20 nt, Human
auugugaauacugcauaugu

SEQ ID NO: 656715 - RNA, 22 nt, Human
augucaccaguuuccaaauuug

SEQ ID NO: 656716 - RNA, 20 nt, Human
uccaauuuaagaauuuagag

SEQ ID NO: 656717 - RNA, 22 nt, Human
uccuuccagguccagggaugug

SEQ ID NO: 656718 - RNA, 20 nt, Human
auugacagaaaguguucacc

SEQ ID NO: 656719 - RNA, 22 nt, Human
augucugauaaauaaugcauaa

SEQ ID NO: 656720 - RNA, 22 nt, Human
cauguacaguuuuucuguccug

SEQ ID NO: 656721 - RNA, 22 nt, Human
ggaaagaggauaguggguaggu

SEQ ID NO: 656722 - RNA, 22 nt, Human
ugcaggggcuugucugggccug

SEQ ID NO: 656723 - RNA, 22 nt, Human
gagcccugugaggaaagagggu

SEQ ID NO: 656724 - RNA, 22 nt, Human
uucagugucacaagagcaagcc

SEQ ID NO: 656725 - RNA, 22 nt, Human
gugcauauguguguauacaaac

SEQ ID NO: 656726 - RNA, 22 nt, Human
caauuuuuuccaugcucuuaca

SEQ ID NO: 656727 - RNA, 20 nt, Human
ugucugugccacggcacucc

SEQ ID NO: 656728 - RNA, 22 nt, Human
gugcuuccuccuuaaacuguca

SEQ ID NO: 656729 - RNA, 22 nt, Human
auggaaaaggcugauuucauua

SEQ ID NO: 656730 - RNA, 22 nt, Human
aaggcugagggcuguaccuggc

SEQ ID NO: 656731 - RNA, 21 nt, Human
ugauugauauuugcaaacaga

SEQ ID NO: 656732 - RNA, 22 nt, Human
cugcugccauuagggcacagac

SEQ ID NO: 656733 - RNA, 22 nt, Human
cuccacagguguacuguaccuu

SEQ ID NO: 656734 - RNA, 22 nt, Human
uaaauguauaggcacuaaaccu

SEQ ID NO: 656735 - RNA, 22 nt, Human
ugcccuggaaccaucuacaguc

SEQ ID NO: 656736 - RNA, 22 nt, Human
cuggcugcaggaugaggcugcc

SEQ ID NO: 656737 - RNA, 22 nt, Human
ggcuuccuuucacuacccucag

SEQ ID NO: 656738 - RNA, 22 nt, Human
ucugggcuuggguagaaaucac

SEQ ID NO: 656739 - RNA, 22 nt, Human
accaggcugugaagugagacua

SEQ ID NO: 656740 - RNA, 22 nt, Human
cuggcucugaccgcgcuggccu

SEQ ID NO: 656741 - RNA, 21 nt, Human
ccuucuccacagggucuccgg

SEQ ID NO: 656742 - RNA, 22 nt, Human
uuauuguuagugagacuguaga

SEQ ID NO: 656743 - RNA, 22 nt, Human
aaucacaggcauagauugcucc

SEQ ID NO: 656744 - RNA, 22 nt, Human
cugggcagcuccauaccaccca

SEQ ID NO: 656745 - RNA, 22 nt, Human
auuuauugagccuuuccuaugu

SEQ ID NO: 656746 - RNA, 23 nt, Human
acuuuauccuauaucuuuguucu

SEQ ID NO: 656747 - RNA, 20 nt, Human
gggaggcgagggcugagcag

SEQ ID NO: 656748 - RNA, 22 nt, Human
ucugcauggagaggagaugcua

SEQ ID NO: 656749 - RNA, 22 nt, Human
auagaauuugcacuaaaucugc

SEQ ID NO: 656750 - RNA, 22 nt, Human
aaaaaccauugucuucagucuc

SEQ ID NO: 656751 - RNA, 22 nt, Human
ccucuggggugagugggccacu

SEQ ID NO: 656752 - RNA, 22 nt, Human
uguauaagccuagugaaauuuc

SEQ ID NO: 656753 - RNA, 22 nt, Human
guacacuauuaaaccugcucau

SEQ ID NO: 656754 - RNA, 22 nt, Human
acauucugugagucauguuuua

SEQ ID NO: 656755 - RNA, 22 nt, Human
ucugaggcuauguucaggcuaa

SEQ ID NO: 656756 - RNA, 22 nt, Human
ucaguguuacauuauauagaac

SEQ ID NO: 656757 - RNA, 19 nt, Human
acauagcuggcuacacugu

SEQ ID NO: 656758 - RNA, 22 nt, Human
aagagucauagagacauugauu

SEQ ID NO: 656759 - RNA, 22 nt, Human
uuaauuuauacauaaucacagg

SEQ ID NO: 656760 - RNA, 22 nt, Human
ucuguuuaugugucuaaauaaa

SEQ ID NO: 656761 - RNA, 22 nt, Human
uccaggcauguugggaagauga

SEQ ID NO: 656762 - RNA, 22 nt, Human
guccugagcauuaagcaauugu

SEQ ID NO: 656763 - RNA, 22 nt, Human
gagguggaaggcaggaacaaau

SEQ ID NO: 656764 - RNA, 22 nt, Human
gcagaggacagggauuuagauu

SEQ ID NO: 656765 - RNA, 22 nt, Human
caugagaaugaagaagacuuaa

SEQ ID NO: 656766 - RNA, 22 nt, Human
gcagcaggcuuuucauaccuug

SEQ ID NO: 656767 - RNA, 22 nt, Human
cugaggcaugggaaguugggug

SEQ ID NO: 656768 - RNA, 22 nt, Human
ucauuucccuccuacaaagagg

SEQ ID NO: 656769 - RNA, 22 nt, Human
ccagcaggggaauauuuuuagg

SEQ ID NO: 656770 - RNA, 22 nt, Human
uuugaucagcaagauaaauaga

SEQ ID NO: 656771 - RNA, 22 nt, Human
guuauuagaagugaaggauugu

SEQ ID NO: 656772 - RNA, 20 nt, Human
aguaccuuuuguauguuacc

SEQ ID NO: 656773 - RNA, 22 nt, Human
ucacaggagaauguacuuacca

SEQ ID NO: 656774 - RNA, 22 nt, Human
cagcagcuuugccaagucagcc

SEQ ID NO: 656775 - RNA, 22 nt, Human
uguagugugacauaggugucca

SEQ ID NO: 656776 - RNA, 22 nt, Human
aaaaucugguaauuugaaugug

SEQ ID NO: 656777 - RNA, 21 nt, Human
aggcucccagaaaugggcauc

SEQ ID NO: 656778 - RNA, 20 nt, Human
ucucagcauaagaacccuuc

SEQ ID NO: 656779 - RNA, 22 nt, Human
gcucaggccuggcccaugggac

SEQ ID NO: 656780 - RNA, 22 nt, Human
uuguggcucuugaggcucucgu

SEQ ID NO: 656781 - RNA, 22 nt, Human
cccagccucuggauucugcccu

SEQ ID NO: 656782 - RNA, 22 nt, Human
uucaggagaaaguucaguacuu

SEQ ID NO: 656783 - RNA, 22 nt, Human
uucuccucacugcagccuuuca

SEQ ID NO: 656784 - RNA, 22 nt, Human
uuugagcuaugggcuuggauuu

SEQ ID NO: 656785 - RNA, 22 nt, Human
cagugccauauugaaagacauu

SEQ ID NO: 656786 - RNA, 21 nt, Human
guuauacauucuauggauuug

SEQ ID NO: 656787 - RNA, 22 nt, Human
ggcuggaaugcaacuguguguu

SEQ ID NO: 656788 - RNA, 23 nt, Human
uggacaggacccccuucggaccc

SEQ ID NO: 656789 - RNA, 22 nt, Human
aguccgccugcugccguggcag

SEQ ID NO: 656790 - RNA, 22 nt, Human
agccuccaaaugucaggucccg

SEQ ID NO: 656791 - RNA, 22 nt, Human
auauaaagaaguggaaaaugag

SEQ ID NO: 656792 - RNA, 22 nt, Human
gagguucaguccugcucuguca

SEQ ID NO: 656793 - RNA, 23 nt, Human
aacuugcuguaaaguucuaggca

SEQ ID NO: 656794 - RNA, 22 nt, Human
uuggaaggagucuuuggggaug

SEQ ID NO: 656795 - RNA, 22 nt, Human
ucugugccaagcuuauaucugu

SEQ ID NO: 656796 - RNA, 22 nt, Human
aaauggcaauuuaguuuauuua

SEQ ID NO: 656797 - RNA, 22 nt, Human
guuucucaaauuauuucagcuu

SEQ ID NO: 656798 - RNA, 22 nt, Human
cuguccauggugcuggacgguc

SEQ ID NO: 656799 - RNA, 22 nt, Human
guaaauauaaaugcuagcugcc

SEQ ID NO: 656800 - RNA, 22 nt, Human
accgugucugacacuuugggcg

SEQ ID NO: 656801 - RNA, 22 nt, Human
gggcggcgucggcgaggccauc

SEQ ID NO: 656802 - RNA, 22 nt, Human
gugcaaagugcauggggaaggg

SEQ ID NO: 656803 - RNA, 22 nt, Human
aagauggaguaguguaaugguu

SEQ ID NO: 656804 - RNA, 23 nt, Human
aaugauuucaugaugauagcagc

SEQ ID NO: 656805 - RNA, 22 nt, Human
aggauccuccuuagaaaagacc

SEQ ID NO: 656806 - RNA, 23 nt, Human
uggacagcagcagcagugucacc

SEQ ID NO: 656807 - RNA, 22 nt, Human
ggacaacauguuuuaauuaagg

SEQ ID NO: 656808 - RNA, 22 nt, Human
uaugaguucaguuaucuuaagu

SEQ ID NO: 656809 - RNA, 22 nt, Human
uucugcauccuaugaucgcaua

SEQ ID NO: 656810 - RNA, 22 nt, Human
aaaugauggaaaugaggcugaa

SEQ ID NO: 656811 - RNA, 22 nt, Human
gccuggggucucugacucacag

SEQ ID NO: 656812 - RNA, 22 nt, Human
caggcccuggcagggcugaguc

SEQ ID NO: 656813 - RNA, 19 nt, Human
uauauuugagugugcaugc

SEQ ID NO: 656814 - RNA, 22 nt, Human
gcaaaauuuacacuccuucuuc

SEQ ID NO: 656815 - RNA, 22 nt, Human
guaaacauuacugugcuguaua

SEQ ID NO: 656816 - RNA, 22 nt, Human
gcugccacuuggucaugucaug

SEQ ID NO: 656817 - RNA, 22 nt, Human
aucaguauauuccuuggucuuu

SEQ ID NO: 656818 - RNA, 22 nt, Human
uucacaggaggguggaugcaug

SEQ ID NO: 656819 - RNA, 20 nt, Human
aggcaguuagaaggagauga

SEQ ID NO: 656820 - RNA, 22 nt, Human
aguauuuagcugacucgcuaca

SEQ ID NO: 656821 - RNA, 22 nt, Human
aagaagguguggaaagaugcuc

SEQ ID NO: 656822 - RNA, 22 nt, Human
cccaggucuaugccagcucuga

SEQ ID NO: 656823 - RNA, 22 nt, Human
acccuggcccauugcugugccu

SEQ ID NO: 656824 - RNA, 22 nt, Human
aggcuggggaauugaauuugcu

SEQ ID NO: 656825 - RNA, 22 nt, Human
aaucccuacuagagcauaccgu

SEQ ID NO: 656826 - RNA, 22 nt, Human
agccagugccagucaugccugc

SEQ ID NO: 656827 - RNA, 22 nt, Human
acauucuauuucaucaugucua

SEQ ID NO: 656828 - RNA, 21 nt, Human
ggugggcacaggagagcagag

SEQ ID NO: 656829 - RNA, 22 nt, Human
augcacaugaggcaagcaaaau

SEQ ID NO: 656830 - RNA, 22 nt, Human
ggcacugggugagggucacugg

SEQ ID NO: 656831 - RNA, 22 nt, Human
uaaagucagggagauugaggcu

SEQ ID NO: 656832 - RNA, 22 nt, Human
uaauaauuaguuauugaucgug

SEQ ID NO: 656833 - RNA, 22 nt, Human
uucccaugccuggccccuaucc

SEQ ID NO: 656834 - RNA, 22 nt, Human
ccacaggacacaacugcugacc

SEQ ID NO: 656835 - RNA, 22 nt, Human
aggcagcuucugauuagcagcg

SEQ ID NO: 656836 - RNA, 22 nt, Human
aggucagaugggagaugggaug

SEQ ID NO: 656837 - RNA, 22 nt, Human
cacucucagcauaaugaaugug

SEQ ID NO: 656838 - RNA, 22 nt, Human
ucaggcuguggcuucaguucuu

SEQ ID NO: 656839 - RNA, 22 nt, Human
cuuggagagagccucagcuguu

SEQ ID NO: 656840 - RNA, 22 nt, Human
cuauuuguacagcauuaguaau

SEQ ID NO: 656841 - RNA, 22 nt, Human
acccucugagaggcacacuuug

SEQ ID NO: 656842 - RNA, 20 nt, Human
uggaggcagagccagaggga

SEQ ID NO: 656843 - RNA, 22 nt, Human
auuucccagggccugggauuug

SEQ ID NO: 656844 - RNA, 20 nt, Human
aauugaagcagaggagaggc

SEQ ID NO: 656845 - RNA, 23 nt, Human
agguucucuuaucaucucugccc

SEQ ID NO: 656846 - RNA, 22 nt, Human
gacccuggaguuaguccugugu

SEQ ID NO: 656847 - RNA, 22 nt, Human
gaggggcuggguagggcaaccc

SEQ ID NO: 656848 - RNA, 22 nt, Human
ugccuccaggaggggcagcucu

SEQ ID NO: 656849 - RNA, 22 nt, Human
caaagcaagggcugaagacucc

SEQ ID NO: 656850 - RNA, 19 nt, Human
augugcuugggccaugcua

SEQ ID NO: 656851 - RNA, 22 nt, Human
ggggcagccuccaggaaagcug

SEQ ID NO: 656852 - RNA, 22 nt, Human
agcauggacaguggcagcagug

SEQ ID NO: 656853 - RNA, 22 nt, Human
gacuguggcguagaugcuggga

SEQ ID NO: 656854 - RNA, 22 nt, Human
agaaaugaagagagucaagguu

SEQ ID NO: 656855 - RNA, 22 nt, Human
agucugcuuuugugaagagcug

SEQ ID NO: 656856 - RNA, 20 nt, Human
ccucucugaagaggucaucu

SEQ ID NO: 656857 - RNA, 22 nt, Human
agcugcccagcuaggaagaagg

SEQ ID NO: 656858 - RNA, 22 nt, Human
guguguccucaguaguggcaug

SEQ ID NO: 656859 - RNA, 20 nt, Human
aggucugaaugucagggcug

SEQ ID NO: 656860 - RNA, 22 nt, Human
guucuucaaagugacaacuaaa

SEQ ID NO: 656861 - RNA, 22 nt, Human
gcucccagcauugcuucccagg

SEQ ID NO: 656862 - RNA, 22 nt, Human
cuggugggagcagcaggcagcu

SEQ ID NO: 656863 - RNA, 22 nt, Human
ccagcugcagguguuccagaug

SEQ ID NO: 656864 - RNA, 22 nt, Human
cugccucacauuggcuguguga

SEQ ID NO: 656865 - RNA, 22 nt, Human
agacuguaauuuguggccuccu

SEQ ID NO: 656866 - RNA, 22 nt, Human
uucugcuuuuagcuaaacuaua

SEQ ID NO: 656867 - RNA, 22 nt, Human
ucaguggauauuucuguggcug

SEQ ID NO: 656868 - RNA, 22 nt, Human
uguuuuguuagcacucugggaa

SEQ ID NO: 656869 - RNA, 22 nt, Human
acuggcugaaguuuacuuuuug

SEQ ID NO: 656870 - RNA, 22 nt, Human
acagggcuuaguggaaauuuuu

SEQ ID NO: 656871 - RNA, 22 nt, Human
uuucuuuccaugagccuaugua

SEQ ID NO: 656872 - RNA, 22 nt, Human
cucugggaugaggccuaggcac

SEQ ID NO: 656873 - RNA, 22 nt, Human
gagagaagaacaaugucauuca

SEQ ID NO: 656874 - RNA, 22 nt, Human
ggaggccauaguuugggaguca

SEQ ID NO: 656875 - RNA, 22 nt, Human
gcaaauggagugaagagcugga

SEQ ID NO: 656876 - RNA, 17 nt, Human
gagagcccucagauguc

SEQ ID NO: 656877 - RNA, 22 nt, Human
gucccaggcuccauggcagcca

SEQ ID NO: 656878 - RNA, 22 nt, Human
augcacagauccccaggacccu

SEQ ID NO: 656879 - RNA, 22 nt, Human
aaaugucagaggaacauauuga

SEQ ID NO: 656880 - RNA, 22 nt, Human
uggcccuuuugugaaguggcca

SEQ ID NO: 656881 - RNA, 22 nt, Human
agaggccauggggcauuuuuca

SEQ ID NO: 656882 - RNA, 22 nt, Human
aauuccaggggguaccauucau

SEQ ID NO: 656883 - RNA, 22 nt, Human
cccagcauuucugggcugcacu

SEQ ID NO: 656884 - RNA, 20 nt, Human
gcacccagcuucuuguucua

SEQ ID NO: 656885 - RNA, 22 nt, Human
acaggaaaugaaaugguaucua

SEQ ID NO: 656886 - RNA, 22 nt, Human
gcauuccugagaaugcagagug

SEQ ID NO: 656887 - RNA, 22 nt, Human
uucuuggcaaugguauucaucc

SEQ ID NO: 656888 - RNA, 22 nt, Human
ggcuuucuaugaacucaaaggc

SEQ ID NO: 656889 - RNA, 22 nt, Human
gcuggcuuuaucgucagacucc

SEQ ID NO: 656890 - RNA, 22 nt, Human
caugcauaugucaaaaaagcua

SEQ ID NO: 656891 - RNA, 22 nt, Human
gagaaagaaagggaaguuuguu

SEQ ID NO: 656892 - RNA, 22 nt, Human
uuuaauggcaagaaggcugcag

SEQ ID NO: 656893 - RNA, 23 nt, Human
gcugucugucaucucugcgggag

SEQ ID NO: 656894 - RNA, 20 nt, Human
cucugggucgagacagacuu

SEQ ID NO: 656895 - RNA, 22 nt, Human
caccagcuacuccagggccgug

SEQ ID NO: 656896 - RNA, 22 nt, Human
gcagcagcagggagucugacuu

SEQ ID NO: 656897 - RNA, 22 nt, Human
uucagagucagggaucucagag

SEQ ID NO: 656898 - RNA, 18 nt, Human
uaagucauuugaaaugcc

SEQ ID NO: 656899 - RNA, 22 nt, Human
uuccagagaaaagguuuauuuc

SEQ ID NO: 656900 - RNA, 22 nt, Human
gcagggccuuagcagcggcugc

SEQ ID NO: 656901 - RNA, 22 nt, Human
caggaacaggguguccuggcag

SEQ ID NO: 656902 - RNA, 22 nt, Human
aaucccagcuacucaggaaguu

SEQ ID NO: 656903 - RNA, 22 nt, Human
acagucuggcagguguugaaag

SEQ ID NO: 656904 - RNA, 22 nt, Human
uacagcaugaucacaauggaaa

SEQ ID NO: 656905 - RNA, 22 nt, Human
guggcuugaccaucccugcuac

SEQ ID NO: 656906 - RNA, 22 nt, Human
cuguguagucagguggucccac

SEQ ID NO: 656907 - RNA, 22 nt, Human
gcugcccaaugguagugucuuu

SEQ ID NO: 656908 - RNA, 22 nt, Human
uaagaggcagcauuccucgccu

SEQ ID NO: 656909 - RNA, 22 nt, Human
agacaaggcccccuugggcucu

SEQ ID NO: 656910 - RNA, 22 nt, Human
ugaugagggggaacagagauuu

SEQ ID NO: 656911 - RNA, 22 nt, Human
acugagaaauuuccagacuugc

SEQ ID NO: 656912 - RNA, 22 nt, Human
uagaacaugcucauguauaaau

SEQ ID NO: 656913 - RNA, 22 nt, Human
gacagaggcuggagcaccuccu

SEQ ID NO: 656914 - RNA, 22 nt, Human
cugagaauaaagccagcaggag

SEQ ID NO: 656915 - RNA, 22 nt, Human
uuucaguuagcugagacccagg

SEQ ID NO: 656916 - RNA, 22 nt, Human
augaaugggucauuauuugauc

SEQ ID NO: 656917 - RNA, 21 nt, Human
uggcauggagguagcagugug

SEQ ID NO: 656918 - RNA, 22 nt, Human
uacacauguuuggcaaguaugu

SEQ ID NO: 656919 - RNA, 22 nt, Human
augugcaacuucagcagaaagg

SEQ ID NO: 656920 - RNA, 22 nt, Human
agggucuaucucucugccuuug

SEQ ID NO: 656921 - RNA, 22 nt, Human
acugagguuauugcaauaaaau

SEQ ID NO: 656922 - RNA, 16 nt, Human
ugggcagaugagaaga

SEQ ID NO: 656923 - RNA, 22 nt, Human
cacaggccaauacccucucucu

SEQ ID NO: 656924 - RNA, 22 nt, Human
ugcauuggguugacauacuaaa

SEQ ID NO: 656925 - RNA, 23 nt, Human
accagcugcccugaacuuugugc

SEQ ID NO: 656926 - RNA, 21 nt, Human
agaaaaaccagcauguuuuca

SEQ ID NO: 656927 - RNA, 22 nt, Human
gugccugggguugagcuaugaa

SEQ ID NO: 656928 - RNA, 22 nt, Human
augaggcagucuggccugaggg

SEQ ID NO: 656929 - RNA, 22 nt, Human
ccaggcucugugugggcuagag

SEQ ID NO: 656930 - RNA, 22 nt, Human
uugagaaaccuggcaguagaga

SEQ ID NO: 656931 - RNA, 22 nt, Human
ccugcugugaaacuggcauaug

SEQ ID NO: 656932 - RNA, 22 nt, Human
gcuccuguuuguuuguuccuga

SEQ ID NO: 656933 - RNA, 22 nt, Human
aaaucagaguagaauugagcca

SEQ ID NO: 656934 - RNA, 22 nt, Human
caagacauugauuuuguacaga

SEQ ID NO: 656935 - RNA, 22 nt, Human
agcugguggauuaugcuguaca

SEQ ID NO: 656936 - RNA, 22 nt, Human
uucuucugacacugaugcugua

SEQ ID NO: 656937 - RNA, 22 nt, Human
cacaauuuggacuucacugguu

SEQ ID NO: 656938 - RNA, 22 nt, Human
gugccuuccccgguggucuguu

SEQ ID NO: 656939 - RNA, 19 nt, Human
cuuccccuguuaccucacu

SEQ ID NO: 656940 - RNA, 21 nt, Human
uuguguuuccccagucacuuu

SEQ ID NO: 656941 - RNA, 22 nt, Human
ggcccucccugagccagguggg

SEQ ID NO: 656942 - RNA, 22 nt, Human
cauuuaugauaguaauaugaaa

SEQ ID NO: 656943 - RNA, 22 nt, Human
gagggugcagcugggccccacg

SEQ ID NO: 656944 - RNA, 23 nt, Human
caggaagcagaugggguagaaga

SEQ ID NO: 656945 - RNA, 22 nt, Human
uaacaguguggacuugagaucu

SEQ ID NO: 656946 - RNA, 19 nt, Human
ggagucugagcccagguau

SEQ ID NO: 656947 - RNA, 19 nt, Human
ggggccugugauggucaca

SEQ ID NO: 656948 - RNA, 22 nt, Human
auagaaacagggaagcaaagca

SEQ ID NO: 656949 - RNA, 22 nt, Human
ugaaaaggguagaucccuaagu

SEQ ID NO: 656950 - RNA, 22 nt, Human
cugaggcuaaccucgagagaca

SEQ ID NO: 656951 - RNA, 22 nt, Human
cugcuggugaugucugggcaug

SEQ ID NO: 656952 - RNA, 22 nt, Human
caucuucaggggcuacaucugu

SEQ ID NO: 656953 - RNA, 22 nt, Human
aauauaauuuuauuccuagagu

SEQ ID NO: 656954 - RNA, 22 nt, Human
uucaguguauauuuuuugagua

SEQ ID NO: 656955 - RNA, 22 nt, Human
aaguccaucucugccccacaca

SEQ ID NO: 656956 - RNA, 22 nt, Human
ugagcagaggaggcugccaacu

SEQ ID NO: 656957 - RNA, 22 nt, Human
ccugggcagugcuggaguugaa

SEQ ID NO: 656958 - RNA, 22 nt, Human
ccugggcucacagccaaggcuc

SEQ ID NO: 656959 - RNA, 22 nt, Human
ggaccaugaggagaugggccuc

SEQ ID NO: 656960 - RNA, 22 nt, Human
cugagccauaagggaggcuggg

SEQ ID NO: 656961 - RNA, 22 nt, Human
aauccuguagauucuaauuccu

SEQ ID NO: 656962 - RNA, 23 nt, Human
ccacuagcaccuguucaacuucu

SEQ ID NO: 656963 - RNA, 22 nt, Human
uuuauucagcagcagcaguggu

SEQ ID NO: 656964 - RNA, 22 nt, Human
gccucaguguccuccuccaugu

SEQ ID NO: 656965 - RNA, 22 nt, Human
cugaaauauuuuaaucucagga

SEQ ID NO: 656966 - RNA, 22 nt, Human
ggcuccuguccccucagcugcu

SEQ ID NO: 656967 - RNA, 22 nt, Human
cugacagcuguugcagugaaug

SEQ ID NO: 656968 - RNA, 22 nt, Human
gaaaguuuucucacacaguaau

SEQ ID NO: 656969 - RNA, 18 nt, Human
gacacauccccaggccuc

SEQ ID NO: 656970 - RNA, 22 nt, Human
cuccugcaagccuccccaagca

SEQ ID NO: 656971 - RNA, 22 nt, Human
cucccauugcuucaaagauccu

SEQ ID NO: 656972 - RNA, 22 nt, Human
uggccagugggguugagcagga

SEQ ID NO: 656973 - RNA, 22 nt, Human
ucacauuugauaaugcccauug

SEQ ID NO: 656974 - RNA, 22 nt, Human
agaugcaaccucugcuuaacaa

SEQ ID NO: 656975 - RNA, 22 nt, Human
uacacaugcauguacuccagga

SEQ ID NO: 656976 - RNA, 22 nt, Human
aauguguagcauuuaaugcagu

SEQ ID NO: 656977 - RNA, 22 nt, Human
ucagcaaccaggggcacagucc

SEQ ID NO: 656978 - RNA, 22 nt, Human
ugggggagagaggcauucuuuc

SEQ ID NO: 656979 - RNA, 20 nt, Human
uacauuguagaaauauucaa

SEQ ID NO: 656980 - RNA, 22 nt, Human
acugucaucuuguaagcaaugu

SEQ ID NO: 656981 - RNA, 22 nt, Human
aguggggaagagcaugggcccu

SEQ ID NO: 656982 - RNA, 22 nt, Human
cagaggcacaagaaagcaaggc

SEQ ID NO: 656983 - RNA, 22 nt, Human
ugccauuucucaggcuauuuca

SEQ ID NO: 656984 - RNA, 16 nt, Human
ggcuccagaauagcga

SEQ ID NO: 656985 - RNA, 21 nt, Human
uuucauugaaugagauaaggu

SEQ ID NO: 656986 - RNA, 22 nt, Human
ugagagcuugaguaucacuggc

SEQ ID NO: 656987 - RNA, 22 nt, Human
ggucucaucuuucagcgucgag

SEQ ID NO: 656988 - RNA, 22 nt, Human
uuggggucccacaggcugccug

SEQ ID NO: 656989 - RNA, 22 nt, Human
cacuugaaugaaagagacuccu

SEQ ID NO: 656990 - RNA, 22 nt, Human
ugaaaaaacaaguuggcccauu

SEQ ID NO: 656991 - RNA, 22 nt, Human
uucagaguacacagagaucuuc

SEQ ID NO: 656992 - RNA, 22 nt, Human
uugcugaaguuaaugcuugcaa

SEQ ID NO: 656993 - RNA, 22 nt, Human
auaguggggacaggaugguugg

SEQ ID NO: 656994 - RNA, 22 nt, Human
cagacagggaccucgcuccaga

SEQ ID NO: 656995 - RNA, 21 nt, Human
acucaggagacuaacuauguc

SEQ ID NO: 656996 - RNA, 22 nt, Human
cucgcaagucgcuccgguuacu

SEQ ID NO: 656997 - RNA, 22 nt, Human
uucuaacuuuugaggcaaugug

SEQ ID NO: 656998 - RNA, 22 nt, Human
auugucucugaauuuccagcug

SEQ ID NO: 656999 - RNA, 22 nt, Human
uucccacaguucagaacaaagg

SEQ ID NO: 657000 - RNA, 22 nt, Human
cucacagauacggcuauuccug

SEQ ID NO: 657001 - RNA, 22 nt, Human
uccaaguccauuaugguggucu

SEQ ID NO: 657002 - RNA, 22 nt, Human
ugaaaucauugccaaguauuga

SEQ ID NO: 657003 - RNA, 22 nt, Human
cauguacaaaaggcaaaugccu

SEQ ID NO: 657004 - RNA, 22 nt, Human
aucuuacauucccucaccauuu

SEQ ID NO: 657005 - RNA, 22 nt, Human
cagaggcugacccugcuguugu

SEQ ID NO: 657006 - RNA, 22 nt, Human
ugagacaauaaggcugagaagc

SEQ ID NO: 657007 - RNA, 22 nt, Human
uuauuuauuguguaccuacugu

SEQ ID NO: 657008 - RNA, 22 nt, Human
augugugcauguuagagagagu

SEQ ID NO: 657009 - RNA, 22 nt, Human
gcugugugacugagagccuggc

SEQ ID NO: 657010 - RNA, 22 nt, Human
cccuuagcuccaagggguuugg

SEQ ID NO: 657011 - RNA, 22 nt, Human
aauuuucugaugaugaagcacg

SEQ ID NO: 657012 - RNA, 19 nt, Human
acaguuugggaaaugagca

SEQ ID NO: 657013 - RNA, 22 nt, Human
gcagggcagugugucugugggg

SEQ ID NO: 657014 - RNA, 22 nt, Human
agcaguggugugaggagggcuc

SEQ ID NO: 657015 - RNA, 22 nt, Human
guccccucaaaauucauauguu

SEQ ID NO: 657016 - RNA, 22 nt, Human
gcugaauagaagucuucaaagg

SEQ ID NO: 657017 - RNA, 22 nt, Human
aggaggugacagccugcaucug

SEQ ID NO: 657018 - RNA, 22 nt, Human
acagcaaaggacgaacacucug

SEQ ID NO: 657019 - RNA, 22 nt, Human
ccagcucuaaacggcucugugg

SEQ ID NO: 657020 - RNA, 18 nt, Human
uccaggccugaagugucc

SEQ ID NO: 657021 - RNA, 22 nt, Human
cccacaggcuagggguagggca

SEQ ID NO: 657022 - RNA, 22 nt, Human
gccacacuuauucucaugcaca

SEQ ID NO: 657023 - RNA, 19 nt, Human
ucagcucuggggucagugg

SEQ ID NO: 657024 - RNA, 20 nt, Human
ggcagaccugcugagagccc

SEQ ID NO: 657025 - RNA, 22 nt, Human
uguuauuuaucugagcauuuau

SEQ ID NO: 657026 - RNA, 22 nt, Human
ccugggccuggcgggucggcuc

SEQ ID NO: 657027 - RNA, 22 nt, Human
auccaucuuuccugcugaacug

SEQ ID NO: 657028 - RNA, 22 nt, Human
uucugugaaucuuuuuucccac

SEQ ID NO: 657029 - RNA, 22 nt, Human
uugaaacugcuuauugaauuug

SEQ ID NO: 657030 - RNA, 20 nt, Human
aaacacagccucucuuuaca

SEQ ID NO: 657031 - RNA, 22 nt, Human
ucagaugagugcuuucagcugc

SEQ ID NO: 657032 - RNA, 22 nt, Human
gauaauuauaggcuaagccacu

SEQ ID NO: 657033 - RNA, 22 nt, Human
cuuucucuucgaaaaccugccc

SEQ ID NO: 657034 - RNA, 22 nt, Human
cagcauuuggugaucaucuuaa

SEQ ID NO: 657035 - RNA, 22 nt, Human
uuuguagaggguaauugacaga

SEQ ID NO: 657036 - RNA, 22 nt, Human
agagugaagguugacacuucac

SEQ ID NO: 657037 - RNA, 17 nt, Human
agguggcugcugcgccu

SEQ ID NO: 657038 - RNA, 22 nt, Human
agagcuuuuacuuacauucuau

SEQ ID NO: 657039 - RNA, 23 nt, Human
ccagcgcucacucagagcauguu

SEQ ID NO: 657040 - RNA, 22 nt, Human
uacuuuauucaggaaggcuggu

SEQ ID NO: 657041 - RNA, 22 nt, Human
guggugcauccuugaguaagcu

SEQ ID NO: 657042 - RNA, 22 nt, Human
guacauuucucccaacacuaaa

SEQ ID NO: 657043 - RNA, 22 nt, Human
gacaauaagaaaagaggaggca

SEQ ID NO: 657044 - RNA, 22 nt, Human
guccucuguguaggcugcagac

SEQ ID NO: 657045 - RNA, 22 nt, Human
ugcauuggucauuuagaaaaua

SEQ ID NO: 657046 - RNA, 22 nt, Human
uaggccaaggacaguaaggaca

SEQ ID NO: 657047 - RNA, 22 nt, Human
ccacaagugaaguacaccugcc

SEQ ID NO: 657048 - RNA, 22 nt, Human
ugcuugucucagauaaaacuau

SEQ ID NO: 657049 - RNA, 22 nt, Human
acaucauuguccguugucauga

SEQ ID NO: 657050 - RNA, 22 nt, Human
ggaggaagagguuguucucuca

SEQ ID NO: 657051 - RNA, 22 nt, Human
uuuuaagcaaaagaauggugug

SEQ ID NO: 657052 - RNA, 22 nt, Human
ggcucugggcauagaaggaagc

SEQ ID NO: 657053 - RNA, 22 nt, Human
gaugucuucucaacuguagacc

SEQ ID NO: 657054 - RNA, 22 nt, Human
uuuguagacuaccaguaauugu

SEQ ID NO: 657055 - RNA, 19 nt, Human
aaaagucuauucaauuaca

SEQ ID NO: 657056 - RNA, 22 nt, Human
ccucagagcagcacccagauga

SEQ ID NO: 657057 - RNA, 22 nt, Human
aggggucuugggaguccuggcu

SEQ ID NO: 657058 - RNA, 22 nt, Human
gcugcuccagcugugcugcaga

SEQ ID NO: 657059 - RNA, 22 nt, Human
guggauggacaugggcaagagg

SEQ ID NO: 657060 - RNA, 22 nt, Human
ugaguucagauccuggcucugc

SEQ ID NO: 657061 - RNA, 22 nt, Human
agggccagaggcaccuugcagc

SEQ ID NO: 657062 - RNA, 22 nt, Human
caaaggacccauaauuaaaacc

SEQ ID NO: 657063 - RNA, 22 nt, Human
cggggccuagcugcacacccuc

SEQ ID NO: 657064 - RNA, 22 nt, Human
uccaccugggcaacagugccuc

SEQ ID NO: 657065 - RNA, 22 nt, Human
gugcagaggucacaaaagugaa

SEQ ID NO: 657066 - RNA, 22 nt, Human
ugaaugaguggauucugaguag

SEQ ID NO: 657067 - RNA, 22 nt, Human
cauuagcaggcacuaagaaggu

SEQ ID NO: 657068 - RNA, 22 nt, Human
ucuaaacacgucucuuugaaua

SEQ ID NO: 657069 - RNA, 22 nt, Human
caaggcuuagucagagggugcu

SEQ ID NO: 657070 - RNA, 22 nt, Human
augaggcaaggaucagguaagg

SEQ ID NO: 657071 - RNA, 22 nt, Human
uggaucaucuuaagaagugauu

SEQ ID NO: 657072 - RNA, 22 nt, Human
ggcuccuggaggcaccacuggu

SEQ ID NO: 657073 - RNA, 22 nt, Human
uauguuguggggugcaucaaaa

SEQ ID NO: 657074 - RNA, 22 nt, Human
uggaaagucucuuuugacugua

SEQ ID NO: 657075 - RNA, 22 nt, Human
agggcagcaauuugguuccugg

SEQ ID NO: 657076 - RNA, 22 nt, Human
uugacuuuacaguuuucuuagg

SEQ ID NO: 657077 - RNA, 19 nt, Human
auauagcauuauucaauuu

SEQ ID NO: 657078 - RNA, 22 nt, Human
agaauuagucacaauuauagga

SEQ ID NO: 657079 - RNA, 22 nt, Human
uccagagccuauauguucaacu

SEQ ID NO: 657080 - RNA, 21 nt, Human
caggccccaggccuggggugc

SEQ ID NO: 657081 - RNA, 22 nt, Human
uaaauugcauaaguacaaauga

SEQ ID NO: 657082 - RNA, 22 nt, Human
uccacugcagcuucugauggaa

SEQ ID NO: 657083 - RNA, 22 nt, Human
ucacuugauccuucccugaaau

SEQ ID NO: 657084 - RNA, 22 nt, Human
ggagcaugcgcucugugaccga

SEQ ID NO: 657085 - RNA, 22 nt, Human
gcucagagauggggaaugaaaa

SEQ ID NO: 657086 - RNA, 22 nt, Human
uuacuuuaagggugucuuauua

SEQ ID NO: 657087 - RNA, 22 nt, Human
cagcagaagugcauuugugauu

SEQ ID NO: 657088 - RNA, 22 nt, Human
gauauuuucagucuccuuucaa

SEQ ID NO: 657089 - RNA, 22 nt, Human
gccagggcucgcggucccucgu

SEQ ID NO: 657090 - RNA, 22 nt, Human
cagagcucagagcagggcacuc

SEQ ID NO: 657091 - RNA, 22 nt, Human
acuguguguuugucuagcacag

SEQ ID NO: 657092 - RNA, 22 nt, Human
ggcucuccacuauggaugagaa

SEQ ID NO: 657093 - RNA, 22 nt, Human
acacagagggcagaagauacau

SEQ ID NO: 657094 - RNA, 23 nt, Human
ucacagggcacuggcugggguug

SEQ ID NO: 657095 - RNA, 22 nt, Human
uggcuggucacaugguaggucu

SEQ ID NO: 657096 - RNA, 22 nt, Human
gugcuuccuagguaaguaggua

SEQ ID NO: 657097 - RNA, 22 nt, Human
auaggcaagcacaaagucagga

SEQ ID NO: 657098 - RNA, 22 nt, Human
uguuuuuaaaauguccugguua

SEQ ID NO: 657099 - RNA, 22 nt, Human
aggaaaggccuuugcauuuggu

SEQ ID NO: 657100 - RNA, 22 nt, Human
ucuggcaguuccuuguugauau

SEQ ID NO: 657101 - RNA, 22 nt, Human
aguuuauguaaaauuaguaaug

SEQ ID NO: 657102 - RNA, 22 nt, Human
cuggaagggggacagccacaca

SEQ ID NO: 657103 - RNA, 22 nt, Human
ccugugugcugaugacgacaga

SEQ ID NO: 657104 - RNA, 22 nt, Human
ccaggcuuuguaccaggcuuuc

SEQ ID NO: 657105 - RNA, 21 nt, Human
ucucacaauaugaugccagau

SEQ ID NO: 657106 - RNA, 20 nt, Human
ggaggguggaagaaagcaag

SEQ ID NO: 657107 - RNA, 22 nt, Human
cacuggugaguccagaagucau

SEQ ID NO: 657108 - RNA, 22 nt, Human
uucauagagcagcucacugaau

SEQ ID NO: 657109 - RNA, 23 nt, Human
ugugucugaggauauaugugcau

SEQ ID NO: 657110 - RNA, 22 nt, Human
auacauauaugguacuuccugg

SEQ ID NO: 657111 - RNA, 22 nt, Human
aaugccucuuggaagaagacuu

SEQ ID NO: 657112 - RNA, 22 nt, Human
gcugcuaagcguuucuguucca

SEQ ID NO: 657113 - RNA, 22 nt, Human
ugaugguugauuauaaaucagu

SEQ ID NO: 657114 - RNA, 22 nt, Human
ccaaggaguagagcaggaagcu

SEQ ID NO: 657115 - RNA, 23 nt, Human
auccacauuacaguaucauacaa

SEQ ID NO: 657116 - RNA, 22 nt, Human
agauuaugcuggcugcuacaag

SEQ ID NO: 657117 - RNA, 22 nt, Human
gacaucaggaagacaugagagg

SEQ ID NO: 657118 - RNA, 22 nt, Human
gcaaguuuagcuaacuggccca

SEQ ID NO: 657119 - RNA, 22 nt, Human
acagagcacugcccugugccgc

SEQ ID NO: 657120 - RNA, 21 nt, Human
auuaacuuguuaaccuaaagu

SEQ ID NO: 657121 - RNA, 22 nt, Human
cacugagccuugccagcuuggu

SEQ ID NO: 657122 - RNA, 22 nt, Human
aaacugcaggucaugacccauu

SEQ ID NO: 657123 - RNA, 22 nt, Human
ucaucaaaggauugcaugauuu

SEQ ID NO: 657124 - RNA, 23 nt, Human
aaauggcuuuagacgugccuuau

SEQ ID NO: 657125 - RNA, 22 nt, Human
caggagcucuuaaggaugugau

SEQ ID NO: 657126 - RNA, 22 nt, Human
ucaguugcuaugagaaauaaau

SEQ ID NO: 657127 - RNA, 22 nt, Human
ugaggaagggugugacggcacc

SEQ ID NO: 657128 - RNA, 22 nt, Human
gcccaagaucaguggggcagau

SEQ ID NO: 657129 - RNA, 22 nt, Human
uuccugcauggauugaggcuau

SEQ ID NO: 657130 - RNA, 22 nt, Human
aacaucucauggacuacauucu

SEQ ID NO: 657131 - RNA, 22 nt, Human
gcugccuguggcccuucugggu

SEQ ID NO: 657132 - RNA, 22 nt, Human
cagcuauugauaaauguugggg

SEQ ID NO: 657133 - RNA, 22 nt, Human
cuuuuccuauugauucuguuac

SEQ ID NO: 657134 - RNA, 21 nt, Human
cccaggaggagcuccggcucc

SEQ ID NO: 657135 - RNA, 22 nt, Human
ugccuggcugggcugcucaugg

SEQ ID NO: 657136 - RNA, 21 nt, Human
uccuccuccacuaggcuagcc

SEQ ID NO: 657137 - RNA, 22 nt, Human
acuuuaugcuaaacuuuacucu

SEQ ID NO: 657138 - RNA, 15 nt, Human
aaagugcacccaaua

SEQ ID NO: 657139 - RNA, 22 nt, Human
cagcaagagaggcagggcaaau

SEQ ID NO: 657140 - RNA, 17 nt, Human
gaagguuucucuuaggu

SEQ ID NO: 657141 - RNA, 21 nt, Human
gaccccagaccagcagacaca

SEQ ID NO: 657142 - RNA, 22 nt, Human
uccaggccacugcagaggcucu

SEQ ID NO: 657143 - RNA, 19 nt, Human
uccaaaggacccaccucca

SEQ ID NO: 657144 - RNA, 22 nt, Human
uucuccacccacucuuuuguug

SEQ ID NO: 657145 - RNA, 22 nt, Human
cagccucucuguaucucaggau

SEQ ID NO: 657146 - RNA, 22 nt, Human
cagcugucugaagcaggagucc

SEQ ID NO: 657147 - RNA, 22 nt, Human
aauuauacauugaacaaucuag

SEQ ID NO: 657148 - RNA, 22 nt, Human
cagcugaguaugcauucaagca

SEQ ID NO: 657149 - RNA, 21 nt, Human
auacagaacauugauccaaga

SEQ ID NO: 657150 - RNA, 22 nt, Human
cagcagccuggccccuccucgg

SEQ ID NO: 657151 - RNA, 22 nt, Human
ugcccugcggcuaucuagauga

SEQ ID NO: 657152 - RNA, 21 nt, Human
ccugagccuguuuauccagaa

SEQ ID NO: 657153 - RNA, 20 nt, Human
acugagguuagauaacaggu

SEQ ID NO: 657154 - RNA, 22 nt, Human
uuccuugaaugagucauggaaa

SEQ ID NO: 657155 - RNA, 22 nt, Human
aacugcaagaguaaaugucuag

SEQ ID NO: 657156 - RNA, 22 nt, Human
aucuuacacuguuggguuucuc

SEQ ID NO: 657157 - RNA, 22 nt, Human
gagagucuaggaaccucauaua

SEQ ID NO: 657158 - RNA, 22 nt, Human
auguggcuuucaugauuaagca

SEQ ID NO: 657159 - RNA, 22 nt, Human
ccugagcuccaguagcagccag

SEQ ID NO: 657160 - RNA, 22 nt, Human
uuagaaauacaagugagguuga

SEQ ID NO: 657161 - RNA, 22 nt, Human
uugugucuaugguuugagcauc

SEQ ID NO: 657162 - RNA, 22 nt, Human
agagccagccuucucagcuuac

SEQ ID NO: 657163 - RNA, 18 nt, Human
gcucugguuccuucaacc

SEQ ID NO: 657164 - RNA, 22 nt, Human
acuaacuugcugagugaccaug

SEQ ID NO: 657165 - RNA, 22 nt, Human
cugcagguuaggagcacuccuu

SEQ ID NO: 657166 - RNA, 16 nt, Human
ucacauacuuccuugc

SEQ ID NO: 657167 - RNA, 22 nt, Human
gcucucuggguggugggcaaca

SEQ ID NO: 657168 - RNA, 22 nt, Human
ucagcucuaaguuuuaugcaaa

SEQ ID NO: 657169 - RNA, 22 nt, Human
ugagagugauugguucgaaugu

SEQ ID NO: 657170 - RNA, 22 nt, Human
ucaaugaaagagcaugcauuuu

SEQ ID NO: 657171 - RNA, 22 nt, Human
cgcgguggcggccuccagcgcc

SEQ ID NO: 657172 - RNA, 22 nt, Human
uauauucuuaccaguguaugua

SEQ ID NO: 657173 - RNA, 22 nt, Human
acugcccauuaaaggugcuuug

SEQ ID NO: 657174 - RNA, 22 nt, Human
gcagaggaucaggcucuggaaa

SEQ ID NO: 657175 - RNA, 22 nt, Human
gagagaccuugcuaagugccuu

SEQ ID NO: 657176 - RNA, 21 nt, Human
uuucuaaguaacuggcagcau

SEQ ID NO: 657177 - RNA, 20 nt, Human
ggggcaguggcucaugccug

SEQ ID NO: 657178 - RNA, 22 nt, Human
gcccugagaaugugugugucua

SEQ ID NO: 657179 - RNA, 22 nt, Human
uccuguguucuagguauggucu

SEQ ID NO: 657180 - RNA, 22 nt, Human
aaauggaauguguuuauaauuc

SEQ ID NO: 657181 - RNA, 22 nt, Human
uccaccagccaggcccaggcug

SEQ ID NO: 657182 - RNA, 22 nt, Human
agcuuuaucagaggagucucua

SEQ ID NO: 657183 - RNA, 22 nt, Human
gugggcagccuccuuuauuuuc

SEQ ID NO: 657184 - RNA, 22 nt, Human
uuuacuaacaccauacaugcug

SEQ ID NO: 657185 - RNA, 22 nt, Human
cuccuuccccuacucagcaucc

SEQ ID NO: 657186 - RNA, 22 nt, Human
gcauaauauacaugcuugaucc

SEQ ID NO: 657187 - RNA, 21 nt, Human
aagugguuuacauccagcugu

SEQ ID NO: 657188 - RNA, 22 nt, Human
cucccucauauacccagcgaga

SEQ ID NO: 657189 - RNA, 22 nt, Human
guccugugcucagacauggggg

SEQ ID NO: 657190 - RNA, 21 nt, Human
agcugcuuucagcuccuagag

SEQ ID NO: 657191 - RNA, 22 nt, Human
uggacaggggcugcuguuguca

SEQ ID NO: 657192 - RNA, 20 nt, Human
caucuccugccuccauguuc

SEQ ID NO: 657193 - RNA, 22 nt, Human
agggaggugguuccccagugga

SEQ ID NO: 657194 - RNA, 22 nt, Human
caugggcaccuuaaaaugaggc

SEQ ID NO: 657195 - RNA, 22 nt, Human
ucauucaauguaagcauauaua

SEQ ID NO: 657196 - RNA, 22 nt, Human
cuggagcccaggccuggugucu

SEQ ID NO: 657197 - RNA, 22 nt, Human
uacucucaggguuaguacagga

SEQ ID NO: 657198 - RNA, 22 nt, Human
guuugcaguugucauccuccug

SEQ ID NO: 657199 - RNA, 20 nt, Human
ggguaaaaggcaguguugca

SEQ ID NO: 657200 - RNA, 22 nt, Human
uccucccacauaggacaauggg

SEQ ID NO: 657201 - RNA, 22 nt, Human
cucuucuugccugaugaggcag

SEQ ID NO: 657202 - RNA, 22 nt, Human
acccaggagccgugagagguua

SEQ ID NO: 657203 - RNA, 22 nt, Human
uguccucuccaacagccucugu

SEQ ID NO: 657204 - RNA, 22 nt, Human
cuuaaauucuuaaugcccucau

SEQ ID NO: 657205 - RNA, 22 nt, Human
auagcaaacuggcagcuugugg

SEQ ID NO: 657206 - RNA, 19 nt, Human
agugugaguaauuggaguu

SEQ ID NO: 657207 - RNA, 22 nt, Human
aagcucagcagccaggcccugu

SEQ ID NO: 657208 - RNA, 17 nt, Human
ugcaggcuccugucccu

SEQ ID NO: 657209 - RNA, 17 nt, Human
gagcucuguggcacaag

SEQ ID NO: 657210 - RNA, 22 nt, Human
uaggaaauauuugaacauagga

SEQ ID NO: 657211 - RNA, 22 nt, Human
gcuccugaaggcucugcagggu

SEQ ID NO: 657212 - RNA, 22 nt, Human
ugcaauaaguauugcuuacaug

SEQ ID NO: 657213 - RNA, 21 nt, Human
ucucuuucuggaagcuucccu

SEQ ID NO: 657214 - RNA, 22 nt, Human
ggcagagugcucugggcagggg

SEQ ID NO: 657215 - RNA, 22 nt, Human
gaaugcuggcuuacaggcaguu

SEQ ID NO: 657216 - RNA, 22 nt, Human
gcuucugugagugcagaugcug

SEQ ID NO: 657217 - RNA, 22 nt, Human
gcaggcuccaggccggccccuu

SEQ ID NO: 657218 - RNA, 23 nt, Human
ccugcagcugccacgcccugcuc

SEQ ID NO: 657219 - RNA, 22 nt, Human
uccuagaaggaucauucuagug

SEQ ID NO: 657220 - RNA, 22 nt, Human
caccaggcugcccaggacaggg

SEQ ID NO: 657221 - RNA, 22 nt, Human
ugucucucugcccccauugcuc

SEQ ID NO: 657222 - RNA, 19 nt, Human
gaaggggaagguggguacc

SEQ ID NO: 657223 - RNA, 22 nt, Human
uggcaaagauuaccacaucuac

SEQ ID NO: 657224 - RNA, 22 nt, Human
uuaguuaaaauucugcugacau

SEQ ID NO: 657225 - RNA, 22 nt, Human
ugcagguaggccugacuuccag

SEQ ID NO: 657226 - RNA, 22 nt, Human
ccagcaucagcauugucuuagg

SEQ ID NO: 657227 - RNA, 22 nt, Human
cauguauauuuuauguggagag

SEQ ID NO: 657228 - RNA, 22 nt, Human
ugcacagacauacacauauaug

SEQ ID NO: 657229 - RNA, 22 nt, Human
cacagugcuuuaugagagaucu

SEQ ID NO: 657230 - RNA, 22 nt, Human
cucuccuggggagcacacacac

SEQ ID NO: 657231 - RNA, 22 nt, Human
uauacugauuugucuauacucu

SEQ ID NO: 657232 - RNA, 22 nt, Human
auaguaugagcucauacacuug

SEQ ID NO: 657233 - RNA, 22 nt, Human
gaaaauacaaauagccuugaaa

SEQ ID NO: 657234 - RNA, 22 nt, Human
ucuagagacaaaggaaggaggg

SEQ ID NO: 657235 - RNA, 21 nt, Human
ggccacaagcggaggagccgc

SEQ ID NO: 657236 - RNA, 22 nt, Human
ucugcugaggugguuuuagaga

SEQ ID NO: 657237 - RNA, 22 nt, Human
gggccccuuguaucucuggcuc

SEQ ID NO: 657238 - RNA, 22 nt, Human
caggagucccucuggccagcau

SEQ ID NO: 657239 - RNA, 22 nt, Human
agcagccuuugaucaucuggga

SEQ ID NO: 657240 - RNA, 22 nt, Human
uagcucaucuaggcuaccacag

SEQ ID NO: 657241 - RNA, 22 nt, Human
ggcugcugcuguguaggccugu

SEQ ID NO: 657242 - RNA, 22 nt, Human
ccuaggcccucaaagagcauaa

SEQ ID NO: 657243 - RNA, 22 nt, Human
acauuccugaaugggcacauuu

SEQ ID NO: 657244 - RNA, 22 nt, Human
agucugaaauaaugucacuaag

SEQ ID NO: 657245 - RNA, 21 nt, Human
ccagagagagggaaguggguu

SEQ ID NO: 657246 - RNA, 22 nt, Human
ccauuaaaauggaauguaguga

SEQ ID NO: 657247 - RNA, 22 nt, Human
gagccugggacugggggucaug

SEQ ID NO: 657248 - RNA, 22 nt, Human
ccuggcucugaaguccacauca

SEQ ID NO: 657249 - RNA, 22 nt, Human
ucuaaccuuugaaacugcuuuc

SEQ ID NO: 657250 - RNA, 22 nt, Human
aggagcugcuuuggugcgguuu

SEQ ID NO: 657251 - RNA, 22 nt, Human
accagagcuuacaugcuagaaa

SEQ ID NO: 657252 - RNA, 22 nt, Human
agucuauuucagucuuacuagu

SEQ ID NO: 657253 - RNA, 22 nt, Human
gcacagaggaagcacagacucu

SEQ ID NO: 657254 - RNA, 22 nt, Human
uuccuaacgccaguauuuucau

SEQ ID NO: 657255 - RNA, 22 nt, Human
acugcaugcuuuacaugacaug

SEQ ID NO: 657256 - RNA, 22 nt, Human
uugguacauguuaaggaagagu

SEQ ID NO: 657257 - RNA, 22 nt, Human
cugagcacagaaauaagauauu

SEQ ID NO: 657258 - RNA, 22 nt, Human
uguuuuaagcucuagaagggga

SEQ ID NO: 657259 - RNA, 22 nt, Human
cccucaccaggcuccaggcaug

SEQ ID NO: 657260 - RNA, 22 nt, Human
gaauuuuaauaaagguuuauca

SEQ ID NO: 657261 - RNA, 22 nt, Human
uccagucaggcugaauucaagg

SEQ ID NO: 657262 - RNA, 22 nt, Human
acuuuuaaaugaguuucaguug

SEQ ID NO: 657263 - RNA, 22 nt, Human
ucaggaguaaggguaacccaga

SEQ ID NO: 657264 - RNA, 22 nt, Human
gagcuuuagcugagaccugcuu

SEQ ID NO: 657265 - RNA, 22 nt, Human
guggcagagccaggcuuugaac

SEQ ID NO: 657266 - RNA, 18 nt, Human
ucuuccagcuucuggagg

SEQ ID NO: 657267 - RNA, 22 nt, Human
gccuccaccgaacgcucucuug

SEQ ID NO: 657268 - RNA, 22 nt, Human
uauccguuguuaccagauaaga

SEQ ID NO: 657269 - RNA, 22 nt, Human
gcccaagaucacacuggaaauc

SEQ ID NO: 657270 - RNA, 22 nt, Human
ucaggcagaguggaagcugcaa

SEQ ID NO: 657271 - RNA, 22 nt, Human
uuucacagucaauuuggaguca

SEQ ID NO: 657272 - RNA, 22 nt, Human
ggugggaggacuguuugaggca

SEQ ID NO: 657273 - RNA, 22 nt, Human
cacuauaucucuuucaucuuuu

SEQ ID NO: 657274 - RNA, 22 nt, Human
ucugagggaauagcuauuguag

SEQ ID NO: 657275 - RNA, 22 nt, Human
auucuacaacccaauaauaauu

SEQ ID NO: 657276 - RNA, 22 nt, Human
cuguguccugcgucaagccaau

SEQ ID NO: 657277 - RNA, 22 nt, Human
ucacaucuguugauacagcauc

SEQ ID NO: 657278 - RNA, 22 nt, Human
caggugguuguuuggauucuaa

SEQ ID NO: 657279 - RNA, 20 nt, Human
agagaauucccuuuggagau

SEQ ID NO: 657280 - RNA, 22 nt, Human
uuucucugugccauuuccauaa

SEQ ID NO: 657281 - RNA, 22 nt, Human
ccaggagaauaauggcagauua

SEQ ID NO: 657282 - RNA, 22 nt, Human
acaacaguaggaaaacaugucu

SEQ ID NO: 657283 - RNA, 22 nt, Human
cauuggucuucuaacagagaga

SEQ ID NO: 657284 - RNA, 22 nt, Human
cagacaucuguacccagccugu

SEQ ID NO: 657285 - RNA, 22 nt, Human
aaauugucauuucugugcccua

SEQ ID NO: 657286 - RNA, 22 nt, Human
aagcccuguaaauugcccuuaa

SEQ ID NO: 657287 - RNA, 22 nt, Human
uugaggucuuugagcaaacgca

SEQ ID NO: 657288 - RNA, 22 nt, Human
uucagcuucauuugucuuuaug

SEQ ID NO: 657289 - RNA, 22 nt, Human
caaagguuguugagagugcagg

SEQ ID NO: 657290 - RNA, 22 nt, Human
cacacugauagcacuaagucag

SEQ ID NO: 657291 - RNA, 22 nt, Human
ucuuuucugccagcugagcccu

SEQ ID NO: 657292 - RNA, 21 nt, Human
gcauguguggugugcuccaca

SEQ ID NO: 657293 - RNA, 22 nt, Human
agggcuguaccaucagguuccu

SEQ ID NO: 657294 - RNA, 22 nt, Human
aauuaaaaaaggagagcuugcu

SEQ ID NO: 657295 - RNA, 22 nt, Human
ggagucugggaauuggagagaa

SEQ ID NO: 657296 - RNA, 22 nt, Human
ugacuuuacagauauguuuccu

SEQ ID NO: 657297 - RNA, 22 nt, Human
aggggcaggugcugcacuuaga

SEQ ID NO: 657298 - RNA, 22 nt, Human
ucuagguucaugggauucagug

SEQ ID NO: 657299 - RNA, 22 nt, Human
ggugccaggcucccagcucagg

SEQ ID NO: 657300 - RNA, 19 nt, Human
ucucagugccgcugaccgc

SEQ ID NO: 657301 - RNA, 22 nt, Human
cagcccaggccgacaguuccuc

SEQ ID NO: 657302 - RNA, 22 nt, Human
gcuggccugucuagagccuuac

SEQ ID NO: 657303 - RNA, 22 nt, Human
cuuucuggaguggaaagguauu

SEQ ID NO: 657304 - RNA, 22 nt, Human
ccagguacauggagaagaacag

SEQ ID NO: 657305 - RNA, 22 nt, Human
acacaguaugaaaagucuaguu

SEQ ID NO: 657306 - RNA, 22 nt, Human
uuggcccagggucagcggcgcu

SEQ ID NO: 657307 - RNA, 22 nt, Human
uuccucagggcggaugggcagg

SEQ ID NO: 657308 - RNA, 18 nt, Human
gaagugaagugacucaau

SEQ ID NO: 657309 - RNA, 22 nt, Human
aguggccagcagccuagccuag

SEQ ID NO: 657310 - RNA, 22 nt, Human
uggcccuuugguuuaugacuga

SEQ ID NO: 657311 - RNA, 22 nt, Human
gagguagcgaguggacagugca

SEQ ID NO: 657312 - RNA, 22 nt, Human
agccaaggacucagugguaggc

SEQ ID NO: 657313 - RNA, 22 nt, Human
ugggugggagcacccugucugg

SEQ ID NO: 657314 - RNA, 22 nt, Human
ccagcagcugacaccaguccca

SEQ ID NO: 657315 - RNA, 22 nt, Human
uauaaagagucuaucugguggc

SEQ ID NO: 657316 - RNA, 21 nt, Human
ucaguugccaaagugauguca

SEQ ID NO: 657317 - RNA, 18 nt, Human
auuucuacuacuauaaag

SEQ ID NO: 657318 - RNA, 23 nt, Human
aaagacugcugagaauuuuagga

SEQ ID NO: 657319 - RNA, 17 nt, Human
ucaggcugggugcagug

SEQ ID NO: 657320 - RNA, 22 nt, Human
acaaaagcacugcagaguaagc

SEQ ID NO: 657321 - RNA, 22 nt, Human
caguagcacucugucagugaag

SEQ ID NO: 657322 - RNA, 22 nt, Human
ucagagaguuacacaaauuguu

SEQ ID NO: 657323 - RNA, 22 nt, Human
caggagagcccggguccgggcu

SEQ ID NO: 657324 - RNA, 22 nt, Human
ggcaugcaugcaagguggugua

SEQ ID NO: 657325 - RNA, 22 nt, Human
ugguccacagggaguccgugcu

SEQ ID NO: 657326 - RNA, 22 nt, Human
cugccuggaccggcagcccucc

SEQ ID NO: 657327 - RNA, 22 nt, Human
agcuccugugugaagccucccu

SEQ ID NO: 657328 - RNA, 22 nt, Human
ugcaggcaggggaugagcagcc

SEQ ID NO: 657329 - RNA, 22 nt, Human
ucaucacaauuuuaugacccuc

SEQ ID NO: 657330 - RNA, 22 nt, Human
cuaggaacaguucaacaguuua

SEQ ID NO: 657331 - RNA, 22 nt, Human
acaggcagcgucauugcugcuc

SEQ ID NO: 657332 - RNA, 22 nt, Human
guggagcaugugaggacugagu

SEQ ID NO: 657333 - RNA, 22 nt, Human
ucuccagggacugaggcuggag

SEQ ID NO: 657334 - RNA, 22 nt, Human
ugcacagcugccuccucucugc

SEQ ID NO: 657335 - RNA, 22 nt, Human
cuuuggauuuuuaucaggcaau

SEQ ID NO: 657336 - RNA, 21 nt, Human
cacuuuaauggauauuuguuu

SEQ ID NO: 657337 - RNA, 22 nt, Human
ucugaaagagaguacauacagu

SEQ ID NO: 657338 - RNA, 22 nt, Human
uggcaguggcacugcccccaua

SEQ ID NO: 657339 - RNA, 22 nt, Human
cuggcucagacagcugugcagu

SEQ ID NO: 657340 - RNA, 22 nt, Human
aagauccaugggaauguuuggc

SEQ ID NO: 657341 - RNA, 22 nt, Human
agcacuccugucuuuccccuuu

SEQ ID NO: 657342 - RNA, 22 nt, Human
guaguauuuucugugauguagg

SEQ ID NO: 657343 - RNA, 22 nt, Human
caacaaguguucguaaagugcc

SEQ ID NO: 657344 - RNA, 22 nt, Human
aacaacugcuaagguguguccu

SEQ ID NO: 657345 - RNA, 22 nt, Human
ccaaggagaaugacaccaugga

SEQ ID NO: 657346 - RNA, 22 nt, Human
ggcugccucaaagcucaagcuc

SEQ ID NO: 657347 - RNA, 22 nt, Human
cucacccauaucuccaugacuc

SEQ ID NO: 657348 - RNA, 22 nt, Human
aggccaagcucccagagaagcu

SEQ ID NO: 657349 - RNA, 22 nt, Human
aggucugguguugggccugaaa

SEQ ID NO: 657350 - RNA, 22 nt, Human
acaugagaucacaaagauaaau

SEQ ID NO: 657351 - RNA, 22 nt, Human
acagugaaaauaauaucuucaa

SEQ ID NO: 657352 - RNA, 22 nt, Human
aggccuggccuuuauguucaag

SEQ ID NO: 657353 - RNA, 22 nt, Human
agggaccugucaaugacaguua

SEQ ID NO: 657354 - RNA, 22 nt, Human
acuggcugaucaccugccucag

SEQ ID NO: 657355 - RNA, 22 nt, Human
aguuaaugagcauuuuggaaug

SEQ ID NO: 657356 - RNA, 20 nt, Human
gaacauuuggccauacugag

SEQ ID NO: 657357 - RNA, 22 nt, Human
cugaggcaccuacagucucggg

SEQ ID NO: 657358 - RNA, 22 nt, Human
cugccccagugccaggcaggug

SEQ ID NO: 657359 - RNA, 17 nt, Human
gguggccugcaguggcu

SEQ ID NO: 657360 - RNA, 22 nt, Human
ucucucagaaagcccaugucug

SEQ ID NO: 657361 - RNA, 22 nt, Human
cuguagcaaguuauucaauaaa

SEQ ID NO: 657362 - RNA, 22 nt, Human
ucuguaggacagagaaaugggg

SEQ ID NO: 657363 - RNA, 22 nt, Human
acacugugucuagcauuuuaca

SEQ ID NO: 657364 - RNA, 22 nt, Human
cuucacagcaugagcuuuggag

SEQ ID NO: 657365 - RNA, 22 nt, Human
gauggacaccuccugagguucu

SEQ ID NO: 657366 - RNA, 22 nt, Human
caggugcccaggggacaguggc

SEQ ID NO: 657367 - RNA, 22 nt, Human
auccugggcaaaguaugcuguc

SEQ ID NO: 657368 - RNA, 22 nt, Human
uguuauugauaucuaaugcucu

SEQ ID NO: 657369 - RNA, 22 nt, Human
cuggagggagauucaaaggagg

SEQ ID NO: 657370 - RNA, 22 nt, Human
uggcuucccauagcuugcuagu

SEQ ID NO: 657371 - RNA, 22 nt, Human
aagaguggagcuggaaaguggg

SEQ ID NO: 657372 - RNA, 22 nt, Human
guauucugggccgauuacaaaa

SEQ ID NO: 657373 - RNA, 23 nt, Human
auuauuaaggacauggacuuugu

SEQ ID NO: 657374 - RNA, 23 nt, Human
aggaaguuaaggcagacagacag

SEQ ID NO: 657375 - RNA, 22 nt, Human
guuugcauguguacuuaauugg

SEQ ID NO: 657376 - RNA, 22 nt, Human
ugcucaucaacaugaugaucau

SEQ ID NO: 657377 - RNA, 22 nt, Human
cacaggcuuuucugacauaggc

SEQ ID NO: 657378 - RNA, 22 nt, Human
agaucacaguucucuauucgua

SEQ ID NO: 657379 - RNA, 22 nt, Human
aggaucugugagugcugcagac

SEQ ID NO: 657380 - RNA, 22 nt, Human
aggacuuuagagccagaaagac

SEQ ID NO: 657381 - RNA, 22 nt, Human
ccaguguuuucauccucccuug

SEQ ID NO: 657382 - RNA, 22 nt, Human
gauagaaagagugguucuuuuu

SEQ ID NO: 657383 - RNA, 22 nt, Human
aaugacaugcuuuuuaauuaua

SEQ ID NO: 657384 - RNA, 22 nt, Human
uuuccuguugccaucaagaaug

SEQ ID NO: 657385 - RNA, 22 nt, Human
ggagcagagcucuucaucugca

SEQ ID NO: 657386 - RNA, 22 nt, Human
ugcugaaaaugcguaucuucca

SEQ ID NO: 657387 - RNA, 22 nt, Human
uuugcaaaugaagcucugagga

SEQ ID NO: 657388 - RNA, 22 nt, Human
cuuauucagcaaguuuggguac

SEQ ID NO: 657389 - RNA, 22 nt, Human
aucauagguauaaguaaauuag

SEQ ID NO: 657390 - RNA, 22 nt, Human
ugccugccaaugaugcuugugu

SEQ ID NO: 657391 - RNA, 23 nt, Human
ugauggccgcccuuugcccuguc

SEQ ID NO: 657392 - RNA, 22 nt, Human
cccaggcuccuagaggcccaga

SEQ ID NO: 657393 - RNA, 22 nt, Human
ucugagguugaacuuugcaaag

SEQ ID NO: 657394 - RNA, 21 nt, Human
cacauuccaugggucuauuua

SEQ ID NO: 657395 - RNA, 22 nt, Human
gcuccugcaggacccaggagac

SEQ ID NO: 657396 - RNA, 22 nt, Human
acaaaaucaaaggagugauuca

SEQ ID NO: 657397 - RNA, 22 nt, Human
gcaagcaguuguggcuucugag

SEQ ID NO: 657398 - RNA, 22 nt, Human
ccccuggguccaggcuucucug

SEQ ID NO: 657399 - RNA, 21 nt, Human
augcauauuuuaaguuguguc

SEQ ID NO: 657400 - RNA, 22 nt, Human
uugaaacauauacaaaguggug

SEQ ID NO: 657401 - RNA, 22 nt, Human
agaagagaaauagugccacugu

SEQ ID NO: 657402 - RNA, 22 nt, Human
ccagcccugccagagagagcug

SEQ ID NO: 657403 - RNA, 22 nt, Human
ccauggcuuucuuucauuguaa

SEQ ID NO: 657404 - RNA, 22 nt, Human
ugucacuuuggggagaguuuug

SEQ ID NO: 657405 - RNA, 22 nt, Human
cugugggaugggaccucagcug

SEQ ID NO: 657406 - RNA, 22 nt, Human
aauguccuaggcaugauuuugu

SEQ ID NO: 657407 - RNA, 22 nt, Human
gacagcuuagugaaaauguaaa

SEQ ID NO: 657408 - RNA, 23 nt, Human
auacaaaccuugcaggacauguu

SEQ ID NO: 657409 - RNA, 22 nt, Human
uggagggcaucuguggucaggc

SEQ ID NO: 657410 - RNA, 22 nt, Human
ggcacugacugugcagcgcacc

SEQ ID NO: 657411 - RNA, 22 nt, Human
agggggaggcugugcugcgucu

SEQ ID NO: 657412 - RNA, 22 nt, Human
ugcagagaguuagggcccguau

SEQ ID NO: 657413 - RNA, 22 nt, Human
cagcugcagaaagcaagcaggu

SEQ ID NO: 657414 - RNA, 22 nt, Human
auguuaaaaaccaguacaguug

SEQ ID NO: 657415 - RNA, 22 nt, Human
ggcugcugacaaacaugaucau

SEQ ID NO: 657416 - RNA, 22 nt, Human
uuauccugguggccccuaaauc

SEQ ID NO: 657417 - RNA, 22 nt, Human
gcuggccagggcugcucgcgga

SEQ ID NO: 657418 - RNA, 22 nt, Human
uuccaaaugcccaucuacacag

SEQ ID NO: 657419 - RNA, 22 nt, Human
uaugugcaaauuaauugcuaga

SEQ ID NO: 657420 - RNA, 22 nt, Human
cuuuacacauccuaaccagugu

SEQ ID NO: 657421 - RNA, 22 nt, Human
agcugggcgcaguggcugguga

SEQ ID NO: 657422 - RNA, 22 nt, Human
uggcucugggaaucuguugcuu

SEQ ID NO: 657423 - RNA, 20 nt, Human
gcugcuuucaaaugacacgu

SEQ ID NO: 657424 - RNA, 22 nt, Human
uacaguaaccuuauuugucauu

SEQ ID NO: 657425 - RNA, 22 nt, Human
gucccagggaagaaggcagcac

SEQ ID NO: 657426 - RNA, 22 nt, Human
gagcagcucgagaaggaagcag

SEQ ID NO: 657427 - RNA, 22 nt, Human
uuauuuccuagggaauuugccu

SEQ ID NO: 657428 - RNA, 22 nt, Human
auguacauaaaauguauaauga

SEQ ID NO: 657429 - RNA, 22 nt, Human
aacguuuuaucgugugcucuuc

SEQ ID NO: 657430 - RNA, 22 nt, Human
ggcagcuccuccuagucugccc

SEQ ID NO: 657431 - RNA, 19 nt, Human
uguggccuggggacaggcc

SEQ ID NO: 657432 - RNA, 22 nt, Human
acuugccccagaauugcugcug

SEQ ID NO: 657433 - RNA, 22 nt, Human
aaggcaaaagaggugucaucac

SEQ ID NO: 657434 - RNA, 21 nt, Human
cucaaaugccaguuuuauuua

SEQ ID NO: 657435 - RNA, 22 nt, Human
ggcugaguggagguagcccugu

SEQ ID NO: 657436 - RNA, 22 nt, Human
gcacacugcggugaugugaguc

SEQ ID NO: 657437 - RNA, 22 nt, Human
gcugggaggcagcaccuuuagc

SEQ ID NO: 657438 - RNA, 22 nt, Human
acacauuucucuuuuuguaagu

SEQ ID NO: 657439 - RNA, 22 nt, Human
acagugauaaaauuucacaugu

SEQ ID NO: 657440 - RNA, 22 nt, Human
ugcuguguuaaauacaagcaug

SEQ ID NO: 657441 - RNA, 22 nt, Human
uagcagaggcuacugcuccuug

SEQ ID NO: 657442 - RNA, 22 nt, Human
cuggcugugaaauggcaguguc

SEQ ID NO: 657443 - RNA, 22 nt, Human
aggcacaggaggugguaagaag

SEQ ID NO: 657444 - RNA, 22 nt, Human
gcuggcuguguuucaucucuga

SEQ ID NO: 657445 - RNA, 23 nt, Human
ggcaugcaauggacagagcugga

SEQ ID NO: 657446 - RNA, 22 nt, Human
acaggcuuuuuuagaaugacau

SEQ ID NO: 657447 - RNA, 22 nt, Human
gaccugaaagagauuaaaugac

SEQ ID NO: 657448 - RNA, 22 nt, Human
augaaaauguacauguguauaa

SEQ ID NO: 657449 - RNA, 22 nt, Human
ucucagaguuuagagcugagcc

SEQ ID NO: 657450 - RNA, 22 nt, Human
cucacaguuucacaguguagau

SEQ ID NO: 657451 - RNA, 22 nt, Human
guccagcuccagggaggcaggc

SEQ ID NO: 657452 - RNA, 22 nt, Human
ucucagagcaucauuuucuuag

SEQ ID NO: 657453 - RNA, 22 nt, Human
auuucccagcuuugaucaguuu

SEQ ID NO: 657454 - RNA, 22 nt, Human
cagaaaaggguguuuguucagg

SEQ ID NO: 657455 - RNA, 22 nt, Human
ggagcugucuguagggcacagg

SEQ ID NO: 657456 - RNA, 22 nt, Human
gcacaaggagcaguguaugaaa

SEQ ID NO: 657457 - RNA, 22 nt, Human
ugagguucaguucuuggccaca

SEQ ID NO: 657458 - RNA, 22 nt, Human
gcugggcucguucccacacgcg

SEQ ID NO: 657459 - RNA, 22 nt, Human
aaauauuauugcuuaaggggag

SEQ ID NO: 657460 - RNA, 22 nt, Human
ugugggcaggagcacaagucag

SEQ ID NO: 657461 - RNA, 20 nt, Human
agcuggcccacagguguggg

SEQ ID NO: 657462 - RNA, 22 nt, Human
uucagcaguuucugagaagcaa

SEQ ID NO: 657463 - RNA, 22 nt, Human
ugcaggcagggccagcgugagg

SEQ ID NO: 657464 - RNA, 22 nt, Human
uuuccucagaagugucuacuau

SEQ ID NO: 657465 - RNA, 22 nt, Human
acaguaaagccuucugguugac

SEQ ID NO: 657466 - RNA, 22 nt, Human
uagccaaagaagguauauuugu

SEQ ID NO: 657467 - RNA, 22 nt, Human
aggaaaugccgcggcucucuuu

SEQ ID NO: 657468 - RNA, 22 nt, Human
ccggcgggcgcggugacgucag

SEQ ID NO: 657469 - RNA, 22 nt, Human
ccagccugguucagaauuggcu

SEQ ID NO: 657470 - RNA, 22 nt, Human
auauaccucauucuuugagugc

SEQ ID NO: 657471 - RNA, 22 nt, Human
ugccugcugccacugcuguuac

SEQ ID NO: 657472 - RNA, 22 nt, Human
aguguuuaaguuacacacauau

SEQ ID NO: 657473 - RNA, 22 nt, Human
gcccagccagagcugugugaug

SEQ ID NO: 657474 - RNA, 22 nt, Human
guuaaagugagcuacuuuaggu

SEQ ID NO: 657475 - RNA, 22 nt, Human
cuggagcauccaugcccagggu

SEQ ID NO: 657476 - RNA, 22 nt, Human
guugaaauccuaacccccuagu

SEQ ID NO: 657477 - RNA, 22 nt, Human
ggaggaagugcaguucuacuac

SEQ ID NO: 657478 - RNA, 22 nt, Human
uguuugcaacaacuagauggag

SEQ ID NO: 657479 - RNA, 20 nt, Human
aggagcugaauuagaggguu

SEQ ID NO: 657480 - RNA, 22 nt, Human
aaacacucauguguuacucucc

SEQ ID NO: 657481 - RNA, 22 nt, Human
cacaguaucuuuugaguaagca

SEQ ID NO: 657482 - RNA, 22 nt, Human
uguuuacaugcauaagcuuaag

SEQ ID NO: 657483 - RNA, 19 nt, Human
ucacucucccugucugucc

SEQ ID NO: 657484 - RNA, 22 nt, Human
gggcuucugggcaccacucccu

SEQ ID NO: 657485 - RNA, 22 nt, Human
cuggggugugcucagagcaggg

SEQ ID NO: 657486 - RNA, 22 nt, Human
acacaggacagggauguguuuu

SEQ ID NO: 657487 - RNA, 22 nt, Human
agucagaguuuugaggugugac

SEQ ID NO: 657488 - RNA, 22 nt, Human
ugugaauagauugaagcuuugg

SEQ ID NO: 657489 - RNA, 20 nt, Human
cuccucaguuccaugggagg

SEQ ID NO: 657490 - RNA, 22 nt, Human
cuccuggaggcuccaagggaga

SEQ ID NO: 657491 - RNA, 22 nt, Human
aucugcauguccccauggaucc

SEQ ID NO: 657492 - RNA, 22 nt, Human
acauauuggcuuagcucuguga

SEQ ID NO: 657493 - RNA, 22 nt, Human
augaggaggccaguaagagccu

SEQ ID NO: 657494 - RNA, 22 nt, Human
gagcccagcuugcacauggagc

SEQ ID NO: 657495 - RNA, 22 nt, Human
gguuguaguuggagguuguaua

SEQ ID NO: 657496 - RNA, 22 nt, Human
ccuccuggugacaaggcaaagc

SEQ ID NO: 657497 - RNA, 17 nt, Human
aaggagcugagagaugg

SEQ ID NO: 657498 - RNA, 23 nt, Human
uagcagcauuuuuagccucuguc

SEQ ID NO: 657499 - RNA, 22 nt, Human
ccuugcauauauuauaucuuug

SEQ ID NO: 657500 - RNA, 22 nt, Human
uugucugaauucuucuaggcag

SEQ ID NO: 657501 - RNA, 22 nt, Human
uccugggugugauauucauaga

SEQ ID NO: 657502 - RNA, 22 nt, Human
cugggucugggccuccuggagu

SEQ ID NO: 657503 - RNA, 22 nt, Human
gaccugggguggaaggaaggca

SEQ ID NO: 657504 - RNA, 22 nt, Human
uggcucuggcgugaagcccaga

SEQ ID NO: 657505 - RNA, 21 nt, Human
ugggccucaggcagcugugac

SEQ ID NO: 657506 - RNA, 22 nt, Human
uuugcagaagaaaacaugaaca

SEQ ID NO: 657507 - RNA, 22 nt, Human
auuuuguuaucagggcuuugca

SEQ ID NO: 657508 - RNA, 22 nt, Human
uacugcugauuagagcugaggu

SEQ ID NO: 657509 - RNA, 22 nt, Human
aaaaugcuauuucauggaggag

SEQ ID NO: 657510 - RNA, 22 nt, Human
ugaaggcacguggguggauacu

SEQ ID NO: 657511 - RNA, 22 nt, Human
uccugagacaucucugcugguc

SEQ ID NO: 657512 - RNA, 22 nt, Human
uguaagaaaaguaaauagugac

SEQ ID NO: 657513 - RNA, 22 nt, Human
uagcugcugcagcacagggagg

SEQ ID NO: 657514 - RNA, 22 nt, Human
gaauaacauuuuuuccuuuaca

SEQ ID NO: 657515 - RNA, 22 nt, Human
gugaaggauaaggaucuaaauu

SEQ ID NO: 657516 - RNA, 22 nt, Human
aaaauugugaagguuucugaaa

SEQ ID NO: 657517 - RNA, 22 nt, Human
gggaagugugcagaguucucuu

SEQ ID NO: 657518 - RNA, 22 nt, Human
auguagaagcugacagugcugu

SEQ ID NO: 657519 - RNA, 22 nt, Human
aggccagggucccacacucgca

SEQ ID NO: 657520 - RNA, 22 nt, Human
cccagguggcagaagcugcagu

SEQ ID NO: 657521 - RNA, 19 nt, Human
aagcaauguugugaaucua

SEQ ID NO: 657522 - RNA, 22 nt, Human
guuuccuggaaacugcuccacu

SEQ ID NO: 657523 - RNA, 22 nt, Human
acccugagucagacagccugac

SEQ ID NO: 657524 - RNA, 22 nt, Human
ucacuuuacuuuguuaaucugg

SEQ ID NO: 657525 - RNA, 22 nt, Human
uuauguaaguggagucauauag

SEQ ID NO: 657526 - RNA, 22 nt, Human
acagugagcccacuccaggaga

SEQ ID NO: 657527 - RNA, 22 nt, Human
gcuuuucuucagcagccugaug

SEQ ID NO: 657528 - RNA, 22 nt, Human
gaaauuguaaaggauugcgcca

SEQ ID NO: 657529 - RNA, 22 nt, Human
uuguuucuccagucuaggaaaa

SEQ ID NO: 657530 - RNA, 22 nt, Human
accugggcauuuuggaugauua

SEQ ID NO: 657531 - RNA, 22 nt, Human
cugccagcucgccacaaugaca

SEQ ID NO: 657532 - RNA, 22 nt, Human
cagaaggcauagaugaaggccu

SEQ ID NO: 657533 - RNA, 22 nt, Human
agcuaggggaccaagguggccc

SEQ ID NO: 657534 - RNA, 22 nt, Human
uuggccacaauccaagccuugg

SEQ ID NO: 657535 - RNA, 22 nt, Human
cucacaggcaucucaucaggcu

SEQ ID NO: 657536 - RNA, 22 nt, Human
cagcugcuguucaguuuuguuu

SEQ ID NO: 657537 - RNA, 22 nt, Human
uuaagacacauuucucagacgg

SEQ ID NO: 657538 - RNA, 22 nt, Human
ugucccagaucacaggagggga

SEQ ID NO: 657539 - RNA, 22 nt, Human
cacagguggcuccaaguuagag

SEQ ID NO: 657540 - RNA, 22 nt, Human
cuucauuaaugucuauaaguuu

SEQ ID NO: 657541 - RNA, 22 nt, Human
uuuauuauucucuggagaaugu

SEQ ID NO: 657542 - RNA, 23 nt, Human
caugugugacaguaucacuguuu

SEQ ID NO: 657543 - RNA, 22 nt, Human
ccagagaauccggagaguccau

SEQ ID NO: 657544 - RNA, 22 nt, Human
agagaagcagggagucaucugu

SEQ ID NO: 657545 - RNA, 22 nt, Human
cagcaggcguugggagaaagac

SEQ ID NO: 657546 - RNA, 22 nt, Human
gcuuccuccaucuggggcuugc

SEQ ID NO: 657547 - RNA, 22 nt, Human
cggcugagcagugcugauggaa

SEQ ID NO: 657548 - RNA, 20 nt, Human
ucucuggguucucacucagc

SEQ ID NO: 657549 - RNA, 22 nt, Human
gaugcagggaacuuagugggcu

SEQ ID NO: 657550 - RNA, 22 nt, Human
uugaauguaggucuuggugagc

SEQ ID NO: 657551 - RNA, 22 nt, Human
ucugagaacuccggguuagauc

SEQ ID NO: 657552 - RNA, 22 nt, Human
gaaaugcauggaucuuggcaga

SEQ ID NO: 657553 - RNA, 19 nt, Human
gcuguacaguaaggagaca

SEQ ID NO: 657554 - RNA, 22 nt, Human
augugugcauauucugccaccu

SEQ ID NO: 657555 - RNA, 22 nt, Human
aaaugucagaaaacauggagug

SEQ ID NO: 657556 - RNA, 22 nt, Human
caucuuuaauuugugacaacua

SEQ ID NO: 657557 - RNA, 22 nt, Human
gcacagcuccgcuuccucacac

SEQ ID NO: 657558 - RNA, 22 nt, Human
cugacaguuuuugcuguauugu

SEQ ID NO: 657559 - RNA, 22 nt, Human
acucaugauaugccuauaagau

SEQ ID NO: 657560 - RNA, 22 nt, Human
gaggcaggcacuguuaucagca

SEQ ID NO: 657561 - RNA, 22 nt, Human
uauguaguguugagaaugcuug

SEQ ID NO: 657562 - RNA, 22 nt, Human
uugucugcuuguucagauggaa

SEQ ID NO: 657563 - RNA, 22 nt, Human
aaggcacuagcaagcugccugg

SEQ ID NO: 657564 - RNA, 22 nt, Human
aggagacccagaauguugcugu

SEQ ID NO: 657565 - RNA, 22 nt, Human
gugcagagcaagggcugagggc

SEQ ID NO: 657566 - RNA, 22 nt, Human
gcugagugaaaguuugcugugu

SEQ ID NO: 657567 - RNA, 22 nt, Human
cagcuuuaguaacccacugcuc

SEQ ID NO: 657568 - RNA, 22 nt, Human
uaauaucuacuucauagaguuu

SEQ ID NO: 657569 - RNA, 22 nt, Human
gacccagcuuaagucacauguu

SEQ ID NO: 657570 - RNA, 23 nt, Human
ugaggaaguaauuguaaaggucu

SEQ ID NO: 657571 - RNA, 22 nt, Human
auucuaacacaugcucuaagaa

SEQ ID NO: 657572 - RNA, 22 nt, Human
ggaggcagaauagagugugggu

SEQ ID NO: 657573 - RNA, 22 nt, Human
agauucauuaggagacauucag

SEQ ID NO: 657574 - RNA, 22 nt, Human
cuggaauguagagacagcuuag

SEQ ID NO: 657575 - RNA, 22 nt, Human
uggggaggaagucagauuucag

SEQ ID NO: 657576 - RNA, 22 nt, Human
uaccaguaauugcuugugcugu

SEQ ID NO: 657577 - RNA, 22 nt, Human
uuuuacaggugugagccaccau

SEQ ID NO: 657578 - RNA, 22 nt, Human
uaugcuuuaacauuaaacaaca

SEQ ID NO: 657579 - RNA, 22 nt, Human
gcucuguaaagaagagaaaugc

SEQ ID NO: 657580 - RNA, 22 nt, Human
aaaguguacuaugucaugaaca

SEQ ID NO: 657581 - RNA, 19 nt, Human
uuccugggguuccauugug

SEQ ID NO: 657582 - RNA, 22 nt, Human
uuggauccaucucaggcauagg

SEQ ID NO: 657583 - RNA, 22 nt, Human
gggcucaguucugcuucaugcu

SEQ ID NO: 657584 - RNA, 22 nt, Human
cucagaauuuagggcucugagg

SEQ ID NO: 657585 - RNA, 22 nt, Human
gaaucacagaggcaaauucuga

SEQ ID NO: 657586 - RNA, 22 nt, Human
ugcagccccugaaaauggcagc

SEQ ID NO: 657587 - RNA, 22 nt, Human
aaugacaauaaucauuaacuuu

SEQ ID NO: 657588 - RNA, 22 nt, Human
gcuggggagggcgucaaggcca

SEQ ID NO: 657589 - RNA, 22 nt, Human
uuauucuguauuucagguaugu

SEQ ID NO: 657590 - RNA, 22 nt, Human
ugugcacaaugugcagguuugu

SEQ ID NO: 657591 - RNA, 22 nt, Human
cuguuauuucugaaugccaucc

SEQ ID NO: 657592 - RNA, 22 nt, Human
uggcauguggcagcugguucag

SEQ ID NO: 657593 - RNA, 22 nt, Human
uugaaaggugacauuguuagag

SEQ ID NO: 657594 - RNA, 22 nt, Human
uugagacacaaggcacaguaag

SEQ ID NO: 657595 - RNA, 22 nt, Human
caugcagccugugaacaguguc

SEQ ID NO: 657596 - RNA, 23 nt, Human
ugcugguguuuuugggaccaggg

SEQ ID NO: 657597 - RNA, 22 nt, Human
aaaucaguaaauguucauuaac

SEQ ID NO: 657598 - RNA, 22 nt, Human
ccuccugcacuugcuuuccuuc

SEQ ID NO: 657599 - RNA, 22 nt, Human
gcuuuaagucucaguuuguuag

SEQ ID NO: 657600 - RNA, 22 nt, Human
uuucaacucaugcuaaaggaag

SEQ ID NO: 657601 - RNA, 22 nt, Human
aaaugguguuucuaaugcuaga

SEQ ID NO: 657602 - RNA, 22 nt, Human
aagagccaggacagauccagcu

SEQ ID NO: 657603 - RNA, 22 nt, Human
gugguccuggcaaccaugguga

SEQ ID NO: 657604 - RNA, 22 nt, Human
ucacccagcgggcgcacacucg

SEQ ID NO: 657605 - RNA, 22 nt, Human
ggagacacauauacagaaagag

SEQ ID NO: 657606 - RNA, 22 nt, Human
gaugccuguggugagcacacau

SEQ ID NO: 657607 - RNA, 22 nt, Human
accugggauggggccagguuua

SEQ ID NO: 657608 - RNA, 22 nt, Human
auuuucuauucugcugguuuag

SEQ ID NO: 657609 - RNA, 22 nt, Human
ggaacccaugauuaugguuagg

SEQ ID NO: 657610 - RNA, 22 nt, Human
gggccucugugcagaggggccu

SEQ ID NO: 657611 - RNA, 22 nt, Human
aguguuccuugcuuucccagag

SEQ ID NO: 657612 - RNA, 22 nt, Human
ccucucuuggccgcagucuucu

SEQ ID NO: 657613 - RNA, 22 nt, Human
cugccugugcaugcagucagaa

SEQ ID NO: 657614 - RNA, 22 nt, Human
ccaguguggacucucuccuuug

SEQ ID NO: 657615 - RNA, 22 nt, Human
uucuuuuagucauucagggaag

SEQ ID NO: 657616 - RNA, 23 nt, Human
ucagaagugggauacaaagcuga

SEQ ID NO: 657617 - RNA, 22 nt, Human
ucugccuuucccaggcuacugu

SEQ ID NO: 657618 - RNA, 20 nt, Human
cugcagggugagugggcgau

SEQ ID NO: 657619 - RNA, 22 nt, Human
gcucagagaguuucacaaguuu

SEQ ID NO: 657620 - RNA, 22 nt, Human
caggucuguuuucaaggucagu

SEQ ID NO: 657621 - RNA, 20 nt, Human
acccugaggcuccccagccu

SEQ ID NO: 657622 - RNA, 22 nt, Human
uucuccagaguuucucucacug

SEQ ID NO: 657623 - RNA, 19 nt, Human
aaauggcuuucuacuuaau

SEQ ID NO: 657624 - RNA, 22 nt, Human
gcuuccuguauccuccuguacc

SEQ ID NO: 657625 - RNA, 21 nt, Human
gcacaugagggagggcaugcc

SEQ ID NO: 657626 - RNA, 22 nt, Human
uaagugaaauaagucagauaca

SEQ ID NO: 657627 - RNA, 22 nt, Human
gucucugcucuagagucuguga

SEQ ID NO: 657628 - RNA, 22 nt, Human
guggacaugcauacauauguuu

SEQ ID NO: 657629 - RNA, 22 nt, Human
uuucaaauggaucccucagccu

SEQ ID NO: 657630 - RNA, 22 nt, Human
uggauuuauuagguuggugaaa

SEQ ID NO: 657631 - RNA, 22 nt, Human
ucagggcucaccagccucugcc

SEQ ID NO: 657632 - RNA, 21 nt, Human
acugcaucugaagucccagga

SEQ ID NO: 657633 - RNA, 22 nt, Human
uguuucuaggucaauaauuuuu

SEQ ID NO: 657634 - RNA, 22 nt, Human
gcauccauuguuuauguguuuc

SEQ ID NO: 657635 - RNA, 22 nt, Human
cccuucccuucugggagaucca

SEQ ID NO: 657636 - RNA, 22 nt, Human
uucaaaggcaggauagcagcug

SEQ ID NO: 657637 - RNA, 22 nt, Human
gcagggcuggguccugucucau

SEQ ID NO: 657638 - RNA, 17 nt, Human
gccaaaggguuccaauc

SEQ ID NO: 657639 - RNA, 22 nt, Human
aacuguugucauauggucuuaa

SEQ ID NO: 657640 - RNA, 22 nt, Human
uauuuugacuauuaaaccaaca

SEQ ID NO: 657641 - RNA, 22 nt, Human
ggagaagccaggugauaagcaa

SEQ ID NO: 657642 - RNA, 22 nt, Human
ucuggggagggagccacagguc

SEQ ID NO: 657643 - RNA, 22 nt, Human
caaaaguaauggcgguuuuuac

SEQ ID NO: 657644 - RNA, 22 nt, Human
gcaaauguuuuugaguguuuac

SEQ ID NO: 657645 - RNA, 22 nt, Human
uugauucagaaaaagauggaga

SEQ ID NO: 657646 - RNA, 22 nt, Human
ggucaguggcaggggguacuuc

SEQ ID NO: 657647 - RNA, 22 nt, Human
cagagugauggcaccugcuggg

SEQ ID NO: 657648 - RNA, 22 nt, Human
aguguaugaguuucaguucuuc

SEQ ID NO: 657649 - RNA, 22 nt, Human
aagacccuaccccuggagagga

SEQ ID NO: 657650 - RNA, 22 nt, Human
ucucaugguuugugauucaaau

SEQ ID NO: 657651 - RNA, 22 nt, Human
ccauggcuaaguaucuguagaa

SEQ ID NO: 657652 - RNA, 17 nt, Human
ggacacagcucauggcu

SEQ ID NO: 657653 - RNA, 22 nt, Human
cuggcugcgucugcucugacag

SEQ ID NO: 657654 - RNA, 22 nt, Human
gacccagugacucgucucugug

SEQ ID NO: 657655 - RNA, 19 nt, Human
ucucuucucccugguuuua

SEQ ID NO: 657656 - RNA, 20 nt, Human
ggcugaaaguagaaaguauu

SEQ ID NO: 657657 - RNA, 22 nt, Human
cucaggucuuaguucugucauc

SEQ ID NO: 657658 - RNA, 22 nt, Human
cagcgcugugggaacagggcua

SEQ ID NO: 657659 - RNA, 22 nt, Human
uacucuaacauuuguuagaugu

SEQ ID NO: 657660 - RNA, 22 nt, Human
aagaaaacguuuugaggaguuu

SEQ ID NO: 657661 - RNA, 22 nt, Human
caguacuuuucuggcuuucuac

SEQ ID NO: 657662 - RNA, 22 nt, Human
ugggcugaguggcagccagagu

SEQ ID NO: 657663 - RNA, 22 nt, Human
cacugucccuguuuccuggaaa

SEQ ID NO: 657664 - RNA, 22 nt, Human
ugcuucagugcucugagccugu

SEQ ID NO: 657665 - RNA, 22 nt, Human
ucaggcugcccguucagggcuc

SEQ ID NO: 657666 - RNA, 22 nt, Human
agggggugcuacuuccagaguu

SEQ ID NO: 657667 - RNA, 22 nt, Human
augaaacagaguacuuaauaua

SEQ ID NO: 657668 - RNA, 22 nt, Human
uaugcuguauucuguauguuag

SEQ ID NO: 657669 - RNA, 22 nt, Human
ggagagauggaaaaccucccag

SEQ ID NO: 657670 - RNA, 23 nt, Human
uuugcaaauuuuccugacuacuc

SEQ ID NO: 657671 - RNA, 22 nt, Human
aacauacuuauacuaaauaaug

SEQ ID NO: 657672 - RNA, 23 nt, Human
aagcuuccuucacgucuccuggg

SEQ ID NO: 657673 - RNA, 22 nt, Human
ucaggaaacuacaguugaacua

SEQ ID NO: 657674 - RNA, 22 nt, Human
ucagaggaaacaaucuuuagua

SEQ ID NO: 657675 - RNA, 22 nt, Human
aguggcugaauauauuuuacua

SEQ ID NO: 657676 - RNA, 22 nt, Human
ugcauggauaaaaguauauuau

SEQ ID NO: 657677 - RNA, 22 nt, Human
agccagaguugaaugugagucu

SEQ ID NO: 657678 - RNA, 22 nt, Human
aggacugacuuuugccaugaaa

SEQ ID NO: 657679 - RNA, 22 nt, Human
uccugggagacccagcugugga

SEQ ID NO: 657680 - RNA, 22 nt, Human
uuaaacacacugagauuuaugu

SEQ ID NO: 657681 - RNA, 22 nt, Human
aaaucuguaagcaauugcucag

SEQ ID NO: 657682 - RNA, 22 nt, Human
ugaacaaaugaaucaguguagc

SEQ ID NO: 657683 - RNA, 22 nt, Human
uaugacaagguggaguaugagu

SEQ ID NO: 657684 - RNA, 22 nt, Human
cuuggagauacaagugguaccu

SEQ ID NO: 657685 - RNA, 22 nt, Human
ccucuuccugcacugacauuuu

SEQ ID NO: 657686 - RNA, 19 nt, Human
ucacuucuguuagcaugga

SEQ ID NO: 657687 - RNA, 22 nt, Human
acugagcagaacaaugggagcc

SEQ ID NO: 657688 - RNA, 22 nt, Human
uuaaaugacgggacuggguuuu

SEQ ID NO: 657689 - RNA, 22 nt, Human
aaacacugcgugguggcaacuc

SEQ ID NO: 657690 - RNA, 22 nt, Human
agugugucuuauccugggagaa

SEQ ID NO: 657691 - RNA, 21 nt, Human
agugucucuggaagcacgugu

SEQ ID NO: 657692 - RNA, 22 nt, Human
aggaaacuucagaguuuugguc

SEQ ID NO: 657693 - RNA, 22 nt, Human
augcagggauuaaaugacugcc

SEQ ID NO: 657694 - RNA, 22 nt, Human
ugugcagaguugaagacaggag

SEQ ID NO: 657695 - RNA, 22 nt, Human
ugagguuagcugggauuucaug

SEQ ID NO: 657696 - RNA, 22 nt, Human
auacauagcagagucaauuaau

SEQ ID NO: 657697 - RNA, 17 nt, Human
cugagcauccgugcucu

SEQ ID NO: 657698 - RNA, 22 nt, Human
ucacuaagugccgaguuuaguu

SEQ ID NO: 657699 - RNA, 18 nt, Human
uucuuuucaugugaucuc

SEQ ID NO: 657700 - RNA, 22 nt, Human
caggccucccggugcacacuga

SEQ ID NO: 657701 - RNA, 22 nt, Human
ggaacauguagagggccuguag

SEQ ID NO: 657702 - RNA, 22 nt, Human
ugucacaauaucccaaucugcc

SEQ ID NO: 657703 - RNA, 22 nt, Human
gcuggcagggugguugagagag

SEQ ID NO: 657704 - RNA, 22 nt, Human
uuugucaucccuuuugaaacug

SEQ ID NO: 657705 - RNA, 22 nt, Human
aggaacacaacuuccugagagc

SEQ ID NO: 657706 - RNA, 22 nt, Human
uggcugugccucuuuccaggcc

SEQ ID NO: 657707 - RNA, 19 nt, Human
cuuuggaggaugaggcugg

SEQ ID NO: 657708 - RNA, 22 nt, Human
auguagaacagguuaaugacag

SEQ ID NO: 657709 - RNA, 22 nt, Human
ucaaaagucugcauucuucaca

SEQ ID NO: 657710 - RNA, 22 nt, Human
aacuaaaucuggcauuuagagc

SEQ ID NO: 657711 - RNA, 18 nt, Human
aaggccuagucccucucu

SEQ ID NO: 657712 - RNA, 22 nt, Human
uuucuccugcccagaugccugg

SEQ ID NO: 657713 - RNA, 22 nt, Human
aaccuagacagggccucuguua

SEQ ID NO: 657714 - RNA, 22 nt, Human
agagcccugcaguucuucagga

SEQ ID NO: 657715 - RNA, 22 nt, Human
guuuccuacacuguaguauuau

SEQ ID NO: 657716 - RNA, 22 nt, Human
aacugcaaguggggcuugucau

SEQ ID NO: 657717 - RNA, 23 nt, Human
cugucuccugggcuagguggaau

SEQ ID NO: 657718 - RNA, 22 nt, Human
uuacaguaccuguauggccacu

SEQ ID NO: 657719 - RNA, 22 nt, Human
cagauagcguuugagagcauaa

SEQ ID NO: 657720 - RNA, 20 nt, Human
uuauuugcucuuuaucugca

SEQ ID NO: 657721 - RNA, 22 nt, Human
augcugcagcugcaggaucaga

SEQ ID NO: 657722 - RNA, 22 nt, Human
ggcaggcuuucagcaucaaguc

SEQ ID NO: 657723 - RNA, 22 nt, Human
ccucugcugcuguugagcaccg

SEQ ID NO: 657724 - RNA, 21 nt, Human
uagcuuccagcucaagcugag

SEQ ID NO: 657725 - RNA, 22 nt, Human
gaagcggcaucaggaggcugcc

SEQ ID NO: 657726 - RNA, 22 nt, Human
cccagcccacgguccugggugg

SEQ ID NO: 657727 - RNA, 22 nt, Human
gcugggaugcgucuucccaggc

SEQ ID NO: 657728 - RNA, 22 nt, Human
cugauuaacugaacugaauuua

SEQ ID NO: 657729 - RNA, 22 nt, Human
cccugagccacacagagcaggu

SEQ ID NO: 657730 - RNA, 22 nt, Human
uuugauucucaauugcccucug

SEQ ID NO: 657731 - RNA, 22 nt, Human
ucauuuguugaacuuuagugcg

SEQ ID NO: 657732 - RNA, 22 nt, Human
gucugaaauggaggugggaacu

SEQ ID NO: 657733 - RNA, 22 nt, Human
agcacagagcucggggaaugga

SEQ ID NO: 657734 - RNA, 22 nt, Human
ugucccugcuguacuuagagca

SEQ ID NO: 657735 - RNA, 23 nt, Human
gcucauccacggagaggggcucc

SEQ ID NO: 657736 - RNA, 22 nt, Human
cccaaaggcauuuugcugacca

SEQ ID NO: 657737 - RNA, 22 nt, Human
agagcccuugcccucagucacc

SEQ ID NO: 657738 - RNA, 20 nt, Human
gggcaguggcgcuaucucag

SEQ ID NO: 657739 - RNA, 22 nt, Human
cauguaaagcauccuucuaggg

SEQ ID NO: 657740 - RNA, 22 nt, Human
ucuuauuugcaacuggcucaga

SEQ ID NO: 657741 - RNA, 22 nt, Human
cccaggguagcugagcuggcag

SEQ ID NO: 657742 - RNA, 20 nt, Human
gcccucagucuugucuuuau

SEQ ID NO: 657743 - RNA, 22 nt, Human
auugggcuuuauguaggggaag

SEQ ID NO: 657744 - RNA, 22 nt, Human
ugggagcaguugcaucuccagu

SEQ ID NO: 657745 - RNA, 22 nt, Human
cacacaggaugaagcagcagaa

SEQ ID NO: 657746 - RNA, 22 nt, Human
gcucucuggcuaguccaucggg

SEQ ID NO: 657747 - RNA, 22 nt, Human
aauguucauugauuaaaugaau

SEQ ID NO: 657748 - RNA, 22 nt, Human
agaugguaaucacauuuaucug

SEQ ID NO: 657749 - RNA, 22 nt, Human
cagcauauuacuuuaaaaaauc

SEQ ID NO: 657750 - RNA, 22 nt, Human
auuuaccauccugugaauggcc

SEQ ID NO: 657751 - RNA, 22 nt, Human
ugaaacuuauucaguuucuacc

SEQ ID NO: 657752 - RNA, 22 nt, Human
gugagacaagauuuguaggcag

SEQ ID NO: 657753 - RNA, 22 nt, Human
ucauaaugaccccagaguccgc

SEQ ID NO: 657754 - RNA, 22 nt, Human
acugggcccauauacucagucu

SEQ ID NO: 657755 - RNA, 22 nt, Human
cuuccugcauugugccagaguu

SEQ ID NO: 657756 - RNA, 22 nt, Human
gagcugcugguugcuggugccu

SEQ ID NO: 657757 - RNA, 22 nt, Human
ugcuuuaucaaagcuauaguga

SEQ ID NO: 657758 - RNA, 22 nt, Human
gcucagagcagaugguacucag

SEQ ID NO: 657759 - RNA, 22 nt, Human
agcacuagccuguuuugcugug

SEQ ID NO: 657760 - RNA, 22 nt, Human
acugagguugaaauagugaugu

SEQ ID NO: 657761 - RNA, 19 nt, Human
uucauucuuucuacuuacc

SEQ ID NO: 657762 - RNA, 22 nt, Human
ggagagcugaagcauggacagg

SEQ ID NO: 657763 - RNA, 22 nt, Human
uucacagggccacuggcaggag

SEQ ID NO: 657764 - RNA, 20 nt, Human
ggggcccaagcccucuugcc

SEQ ID NO: 657765 - RNA, 22 nt, Human
uuuagaguugaguauucauugg

SEQ ID NO: 657766 - RNA, 22 nt, Human
guuccucagcccuuacuuagcc

SEQ ID NO: 657767 - RNA, 22 nt, Human
uucugcugaagucacugggagc

SEQ ID NO: 657768 - RNA, 22 nt, Human
cucaggacagauuccagagaaa

SEQ ID NO: 657769 - RNA, 22 nt, Human
uugugcaauuuaaaaucuuccu

SEQ ID NO: 657770 - RNA, 22 nt, Human
guuuauacagugcaugguguua

SEQ ID NO: 657771 - RNA, 22 nt, Human
aacaauuaucauauacauugca

SEQ ID NO: 657772 - RNA, 22 nt, Human
cugggagcugucaggagcgugu

SEQ ID NO: 657773 - RNA, 21 nt, Human
gaugaagcaaucuuucuguug

SEQ ID NO: 657774 - RNA, 22 nt, Human
ccucagagccuccagaaggaau

SEQ ID NO: 657775 - RNA, 22 nt, Human
auugcaccuuggguuuugaaag

SEQ ID NO: 657776 - RNA, 22 nt, Human
uaguugcuaaaaagugccuaac

SEQ ID NO: 657777 - RNA, 22 nt, Human
ugauuuucaugggugaucuuug

SEQ ID NO: 657778 - RNA, 22 nt, Human
gcguuauuuccugucugauuuc

SEQ ID NO: 657779 - RNA, 22 nt, Human
auuguuuuccaaagaugcugcu

SEQ ID NO: 657780 - RNA, 22 nt, Human
ccuggacaaugagaugucaggg

SEQ ID NO: 657781 - RNA, 22 nt, Human
uuaaagcugagcccucagaagc

SEQ ID NO: 657782 - RNA, 22 nt, Human
cacauucuguccuugaacugca

SEQ ID NO: 657783 - RNA, 22 nt, Human
gugucaugggguuuguuauaca

SEQ ID NO: 657784 - RNA, 22 nt, Human
uugagcuguauaccuaugacug

SEQ ID NO: 657785 - RNA, 22 nt, Human
ucccuguguccaugccaggagg

SEQ ID NO: 657786 - RNA, 22 nt, Human
gcaagacaugucuaagguuuaa

SEQ ID NO: 657787 - RNA, 22 nt, Human
auuuaugacagaagauaugcug

SEQ ID NO: 657788 - RNA, 19 nt, Human
uaugugugcauuugugcau

SEQ ID NO: 657789 - RNA, 22 nt, Human
uaaagcagugguucucaaacuu

SEQ ID NO: 657790 - RNA, 22 nt, Human
cugugcuucagagucagugcug

SEQ ID NO: 657791 - RNA, 22 nt, Human
ugggagcucagaaagggagguc

SEQ ID NO: 657792 - RNA, 22 nt, Human
cauccugagaaaauaaaggaga

SEQ ID NO: 657793 - RNA, 22 nt, Human
gcugaggcaguccacccuugug

SEQ ID NO: 657794 - RNA, 22 nt, Human
ccaggguuuagcaagccuacaa

SEQ ID NO: 657795 - RNA, 22 nt, Human
gcugugugacccuagccaguag

SEQ ID NO: 657796 - RNA, 22 nt, Human
agucaacaaaaauguggagccu

SEQ ID NO: 657797 - RNA, 22 nt, Human
uuaaucacagauauuaaacaug

SEQ ID NO: 657798 - RNA, 22 nt, Human
cugcaauaguuuagaauaauug

SEQ ID NO: 657799 - RNA, 22 nt, Human
ggagaucugagagcuggaagug

SEQ ID NO: 657800 - RNA, 22 nt, Human
gggucugggcaggcgcuuccuc

SEQ ID NO: 657801 - RNA, 22 nt, Human
augcauuguaugaaaggaaaua

SEQ ID NO: 657802 - RNA, 22 nt, Human
acuccagguaggcacauugaca

SEQ ID NO: 657803 - RNA, 23 nt, Human
uaacuuacaucauucugcacaag

SEQ ID NO: 657804 - RNA, 22 nt, Human
agaagccaacagggcaggagag

SEQ ID NO: 657805 - RNA, 22 nt, Human
caggaaugcauucuagaauggc

SEQ ID NO: 657806 - RNA, 19 nt, Human
agugguagaugagcaggag

SEQ ID NO: 657807 - RNA, 19 nt, Human
ugucuggaagagcugcagg

SEQ ID NO: 657808 - RNA, 22 nt, Human
cauggacagugggacagugugu

SEQ ID NO: 657809 - RNA, 22 nt, Human
uucuucccuucauuccaccacc

SEQ ID NO: 657810 - RNA, 18 nt, Human
agcagggcauuuugccau

SEQ ID NO: 657811 - RNA, 22 nt, Human
ugccugggccucugaggaaggc

SEQ ID NO: 657812 - RNA, 22 nt, Human
uggcacaguccugggugccugc

SEQ ID NO: 657813 - RNA, 22 nt, Human
uaggcacaagaccaugcaaagg

SEQ ID NO: 657814 - RNA, 23 nt, Human
auuuaaugcugaguugaauguua

SEQ ID NO: 657815 - RNA, 18 nt, Human
uggagagcagcagugggg

SEQ ID NO: 657816 - RNA, 22 nt, Human
auaacauuuugacaacugguga

SEQ ID NO: 657817 - RNA, 22 nt, Human
agccacagcacauuguaagaaa

SEQ ID NO: 657818 - RNA, 22 nt, Human
aagucagaauaauguuucuuuu

SEQ ID NO: 657819 - RNA, 22 nt, Human
uaaggcagaaauaugagcaggg

SEQ ID NO: 657820 - RNA, 22 nt, Human
acuggggauuagggacucagug

SEQ ID NO: 657821 - RNA, 22 nt, Human
uuauuuaaaagugguaagauuc

SEQ ID NO: 657822 - RNA, 22 nt, Human
auguuuuaugcuucagaugagg

SEQ ID NO: 657823 - RNA, 22 nt, Human
caauacaauuaccaguuaauca

SEQ ID NO: 657824 - RNA, 22 nt, Human
ccauuauccacgggcuuccuga

SEQ ID NO: 657825 - RNA, 22 nt, Human
auauucguggucaaguaaggcc

SEQ ID NO: 657826 - RNA, 23 nt, Human
ugcuguccaacagacuggccaug

SEQ ID NO: 657827 - RNA, 22 nt, Human
cccaggcuggagggcaguguca

SEQ ID NO: 657828 - RNA, 22 nt, Human
ucucaaggacuuugggcacuaa

SEQ ID NO: 657829 - RNA, 22 nt, Human
agcauuuauagccccuaucauc

SEQ ID NO: 657830 - RNA, 22 nt, Human
gccugcuggauguggccaggcc

SEQ ID NO: 657831 - RNA, 20 nt, Human
cgaggccaaggggcugggcc

SEQ ID NO: 657832 - RNA, 22 nt, Human
ugggcugagcagugaagcucau

SEQ ID NO: 657833 - RNA, 22 nt, Human
uaaagauaagacaucaacugag

SEQ ID NO: 657834 - RNA, 22 nt, Human
gaagcacugccauaauucagac

SEQ ID NO: 657835 - RNA, 22 nt, Human
uccagaaaauucagaaauuguu

SEQ ID NO: 657836 - RNA, 22 nt, Human
aagcaacuguugaauuggacua

SEQ ID NO: 657837 - RNA, 22 nt, Human
guucucaguggggagcaggguu

SEQ ID NO: 657838 - RNA, 22 nt, Human
gcaccccugcgugccuucccuu

SEQ ID NO: 657839 - RNA, 22 nt, Human
acuuucaacuuggugggagagc

SEQ ID NO: 657840 - RNA, 22 nt, Human
cacugaaggacaguaggaaggg

SEQ ID NO: 657841 - RNA, 21 nt, Human
agagaagaggacuuucucaca

SEQ ID NO: 657842 - RNA, 22 nt, Human
ccagugcaccaagaggccuaga

SEQ ID NO: 657843 - RNA, 22 nt, Human
ccaccccuguagagggacagac

SEQ ID NO: 657844 - RNA, 22 nt, Human
ggcagugaaucugagagccugg

SEQ ID NO: 657845 - RNA, 22 nt, Human
uucuccaaggauacaguccugu

SEQ ID NO: 657846 - RNA, 22 nt, Human
ucccaaggauaagagagucuga

SEQ ID NO: 657847 - RNA, 20 nt, Human
aaaguguaagcauauaauua

SEQ ID NO: 657848 - RNA, 22 nt, Human
aggaccugccaggugcaaagca

SEQ ID NO: 657849 - RNA, 22 nt, Human
acccagcaaagauaaacuuaug

SEQ ID NO: 657850 - RNA, 22 nt, Human
cuggaggagaacuugaggaagg

SEQ ID NO: 657851 - RNA, 23 nt, Human
uuugaaaguaucaacucgccuga

SEQ ID NO: 657852 - RNA, 22 nt, Human
uuucucauggcccuuggcuuuu

SEQ ID NO: 657853 - RNA, 22 nt, Human
gugacugugagucgcugugaca

SEQ ID NO: 657854 - RNA, 22 nt, Human
gggagaugacucagugaccucg

SEQ ID NO: 657855 - RNA, 22 nt, Human
aggccugggucucgugccuacc

SEQ ID NO: 657856 - RNA, 22 nt, Human
aauuccacagaugucuaucugu

SEQ ID NO: 657857 - RNA, 22 nt, Human
ugagacagccucugcacucaug

SEQ ID NO: 657858 - RNA, 22 nt, Human
gcagcaggaauaggauaagcaa

SEQ ID NO: 657859 - RNA, 22 nt, Human
uggcuucauggcugugcaaucu

SEQ ID NO: 657860 - RNA, 18 nt, Human
ucuguggcagcagugcac

SEQ ID NO: 657861 - RNA, 22 nt, Human
agaaauacuaggaauauucaua

SEQ ID NO: 657862 - RNA, 22 nt, Human
ggcagaggugacagugucuuuu

SEQ ID NO: 657863 - RNA, 22 nt, Human
cuccaguggcaaguccgggcgg

SEQ ID NO: 657864 - RNA, 22 nt, Human
ucagagguggagauaguuggga

SEQ ID NO: 657865 - RNA, 22 nt, Human
aacucagucauaaagcgaaugc

SEQ ID NO: 657866 - RNA, 22 nt, Human
cucugggcuucaagucagauuu

SEQ ID NO: 657867 - RNA, 22 nt, Human
uugcccugucucacuauguuaa

SEQ ID NO: 657868 - RNA, 22 nt, Human
uugcagacagugagagugaaag

SEQ ID NO: 657869 - RNA, 23 nt, Human
ccugcagcugcuggggcuccacc

SEQ ID NO: 657870 - RNA, 22 nt, Human
uuuagcagcugguguuaccaua

SEQ ID NO: 657871 - RNA, 22 nt, Human
ccugauggagcccugcugcaug

SEQ ID NO: 657872 - RNA, 22 nt, Human
gcaacaguuggauuccagagga

SEQ ID NO: 657873 - RNA, 21 nt, Human
uucucuggauaggccaguccu

SEQ ID NO: 657874 - RNA, 22 nt, Human
gaccuccguguacaccucccag

SEQ ID NO: 657875 - RNA, 22 nt, Human
agagaagggguaaagaguccug

SEQ ID NO: 657876 - RNA, 22 nt, Human
gcugccuguugaagggucugug

SEQ ID NO: 657877 - RNA, 22 nt, Human
guucauuuuacuguaaauagca

SEQ ID NO: 657878 - RNA, 22 nt, Human
ucucuuaggagaaauucauaaa

SEQ ID NO: 657879 - RNA, 20 nt, Human
acacaugugcguguucagua

SEQ ID NO: 657880 - RNA, 22 nt, Human
cuucauuucaggcugaagaaua

SEQ ID NO: 657881 - RNA, 22 nt, Human
ucucuucucuagugagcaacug

SEQ ID NO: 657882 - RNA, 22 nt, Human
gagccauuguccaagccuguuu

SEQ ID NO: 657883 - RNA, 22 nt, Human
auccuucaguggaagacaguag

SEQ ID NO: 657884 - RNA, 22 nt, Human
augaacacauguacacauuucu

SEQ ID NO: 657885 - RNA, 22 nt, Human
augcaaaugcagccauugcaga

SEQ ID NO: 657886 - RNA, 22 nt, Human
gcccuguggacagugagaagug

SEQ ID NO: 657887 - RNA, 22 nt, Human
uguuucaugauugcugucauuu

SEQ ID NO: 657888 - RNA, 22 nt, Human
uggguccacuucugcacugugg

SEQ ID NO: 657889 - RNA, 22 nt, Human
gcgguagcucaagcuuguaauc

SEQ ID NO: 657890 - RNA, 22 nt, Human
cagacaggaauucuggcguggu

SEQ ID NO: 657891 - RNA, 22 nt, Human
uggagagaaaguugaauggagg

SEQ ID NO: 657892 - RNA, 22 nt, Human
cugcugccucgacauugggaca

SEQ ID NO: 657893 - RNA, 22 nt, Human
aacagaggauguuugaaauuca

SEQ ID NO: 657894 - RNA, 23 nt, Human
acuagaaaaugacuuucucccug

SEQ ID NO: 657895 - RNA, 22 nt, Human
auucugucagaucuuacuggau

SEQ ID NO: 657896 - RNA, 22 nt, Human
ccagguagccaaggggucuggg

SEQ ID NO: 657897 - RNA, 22 nt, Human
acccagagcacagaugcaacgu

SEQ ID NO: 657898 - RNA, 22 nt, Human
cauguucaucagaucaauugua

SEQ ID NO: 657899 - RNA, 22 nt, Human
aaugguuuggacuauucaauag

SEQ ID NO: 657900 - RNA, 22 nt, Human
ccucaggcuuacgggcaaugga

SEQ ID NO: 657901 - RNA, 22 nt, Human
aaaccuggaacauuugacuagg

SEQ ID NO: 657902 - RNA, 22 nt, Human
caggauguaugucuuauucuuc

SEQ ID NO: 657903 - RNA, 22 nt, Human
gcugagagcaaggacaaagcau

SEQ ID NO: 657904 - RNA, 22 nt, Human
agcccagcuccuccacagaaua

SEQ ID NO: 657905 - RNA, 22 nt, Human
acuccucagccagcaucaggga

SEQ ID NO: 657906 - RNA, 22 nt, Human
agggucagugaugagggagccc

SEQ ID NO: 657907 - RNA, 22 nt, Human
ggcacugggcaccggcugaggg

SEQ ID NO: 657908 - RNA, 20 nt, Human
aaacauaguggauaccacag

SEQ ID NO: 657909 - RNA, 21 nt, Human
agggaaagaaaaugagcuaau

SEQ ID NO: 657910 - RNA, 22 nt, Human
gaauuugucccuugauauaaaa

SEQ ID NO: 657911 - RNA, 17 nt, Human
gcuccagaauucuaguc

SEQ ID NO: 657912 - RNA, 22 nt, Human
agggucaguagugaugcgugaa

SEQ ID NO: 657913 - RNA, 22 nt, Human
cauuuggaccaaaauagccaac

SEQ ID NO: 657914 - RNA, 22 nt, Human
cuucuuccaagcuuaugcucaa

SEQ ID NO: 657915 - RNA, 22 nt, Human
uuaaaaccuagagaucagacag

SEQ ID NO: 657916 - RNA, 22 nt, Human
cacaggcuuccaguccccagcu

SEQ ID NO: 657917 - RNA, 20 nt, Human
uucaggaauaagauagcagc

SEQ ID NO: 657918 - RNA, 20 nt, Human
uuccucaggagaggauguua

SEQ ID NO: 657919 - RNA, 22 nt, Human
aaaacagacagccaguguagag

SEQ ID NO: 657920 - RNA, 22 nt, Human
ggcaagcauaaccuguacagcc

SEQ ID NO: 657921 - RNA, 22 nt, Human
gggcucuguguucuagcucucg

SEQ ID NO: 657922 - RNA, 18 nt, Human
aucaaggaggggaagguc

SEQ ID NO: 657923 - RNA, 22 nt, Human
uucugucuucucgguuguuuac

SEQ ID NO: 657924 - RNA, 22 nt, Human
uggcucaguuaggucagaaaca

SEQ ID NO: 657925 - RNA, 22 nt, Human
cuggacacaaacaucuccucug

SEQ ID NO: 657926 - RNA, 22 nt, Human
gggugaggcccauuugaggcca

SEQ ID NO: 657927 - RNA, 22 nt, Human
acugcauugagguuucauacuu

SEQ ID NO: 657928 - RNA, 22 nt, Human
uuacagaaguuucagcguuuua

SEQ ID NO: 657929 - RNA, 22 nt, Human
aucacacuuuuguaaccaucag

SEQ ID NO: 657930 - RNA, 22 nt, Human
gcugagcacaccuaggguagag

SEQ ID NO: 657931 - RNA, 22 nt, Human
uuguccuuggaugaagcuggga

SEQ ID NO: 657932 - RNA, 22 nt, Human
gcccaagcuccgccuccugucg

SEQ ID NO: 657933 - RNA, 22 nt, Human
aagcccuuggcgcacaccgggc

SEQ ID NO: 657934 - RNA, 22 nt, Human
guagaauauaugguuaguauug

SEQ ID NO: 657935 - RNA, 22 nt, Human
gcuaggaaaggaagaacuuuga

SEQ ID NO: 657936 - RNA, 22 nt, Human
gagguacagaguguuccaaugu

SEQ ID NO: 657937 - RNA, 22 nt, Human
cuuuagauguugcuuuaacuau

SEQ ID NO: 657938 - RNA, 22 nt, Human
aggcagcugugaggacuggauu

SEQ ID NO: 657939 - RNA, 22 nt, Human
ugagagcugcugagacuguccu

SEQ ID NO: 657940 - RNA, 22 nt, Human
gggggaagaggcaugaaguccu

SEQ ID NO: 657941 - RNA, 22 nt, Human
gaggguggguuucuugcacguc

SEQ ID NO: 657942 - RNA, 22 nt, Human
gaaguuauagcuaugaucuuaa

SEQ ID NO: 657943 - RNA, 22 nt, Human
ucccucuguguugggcaugccu

SEQ ID NO: 657944 - RNA, 22 nt, Human
cuuucucuguggugaggagggu

SEQ ID NO: 657945 - RNA, 22 nt, Human
ucugggaauaaaacuagggacu

SEQ ID NO: 657946 - RNA, 22 nt, Human
cuggguggcgucuggggccagu

SEQ ID NO: 657947 - RNA, 22 nt, Human
guucacagaaauuguguaccuc

SEQ ID NO: 657948 - RNA, 22 nt, Human
gucuuuggagaggugccauuuc

SEQ ID NO: 657949 - RNA, 22 nt, Human
guagaucugccuuaaccuggga

SEQ ID NO: 657950 - RNA, 22 nt, Human
ccugagcucugcacuuuuuaga

SEQ ID NO: 657951 - RNA, 22 nt, Human
augcaauaccuucugaaaauaa

SEQ ID NO: 657952 - RNA, 22 nt, Human
gaggcuucccgcccaugcugga

SEQ ID NO: 657953 - RNA, 22 nt, Human
cccagcccugaccuauuggaaa

SEQ ID NO: 657954 - RNA, 22 nt, Human
cugcagcuuaaaggaguucaau

SEQ ID NO: 657955 - RNA, 21 nt, Human
gauaaaaugggccuugguccu

SEQ ID NO: 657956 - RNA, 22 nt, Human
gggaaggcagugucugguugaa

SEQ ID NO: 657957 - RNA, 22 nt, Human
uauagacuugaugguauuaagu

SEQ ID NO: 657958 - RNA, 19 nt, Human
cccagagcauccugaacuu

SEQ ID NO: 657959 - RNA, 22 nt, Human
uuuggaaugguaccuucaguug

SEQ ID NO: 657960 - RNA, 22 nt, Human
ugcaagagguaaaaugaaagga

SEQ ID NO: 657961 - RNA, 22 nt, Human
caaacugagcaucagaaaguuu

SEQ ID NO: 657962 - RNA, 23 nt, Human
cuguggccaccccuagcuggagg

SEQ ID NO: 657963 - RNA, 22 nt, Human
cuuucccuuuugccuugcgugg

SEQ ID NO: 657964 - RNA, 22 nt, Human
gcuccagcuccggcuccgaagc

SEQ ID NO: 657965 - RNA, 22 nt, Human
cuacaguagagguugucaggga

SEQ ID NO: 657966 - RNA, 22 nt, Human
aaccauguacuuuauucuguuu

SEQ ID NO: 657967 - RNA, 22 nt, Human
cuggagggggaaauguucauug

SEQ ID NO: 657968 - RNA, 22 nt, Human
uccaacuaggcacacagcuggu

SEQ ID NO: 657969 - RNA, 22 nt, Human
acauuuaaccuuugaggaacug

SEQ ID NO: 657970 - RNA, 22 nt, Human
aacacaguuuuccaaaauagag

SEQ ID NO: 657971 - RNA, 22 nt, Human
uucugcauacacugaauguagu

SEQ ID NO: 657972 - RNA, 22 nt, Human
ggcugccucccaggagaaucug

SEQ ID NO: 657973 - RNA, 22 nt, Human
uaccugagaagaaacccguguu

SEQ ID NO: 657974 - RNA, 22 nt, Human
agcacugugauuuauaacauuu

SEQ ID NO: 657975 - RNA, 23 nt, Human
gugagucuugccuuugcugugga

SEQ ID NO: 657976 - RNA, 22 nt, Human
uaagguuugaagaagacugagc

SEQ ID NO: 657977 - RNA, 22 nt, Human
uggucugggcaaauccuucuga

SEQ ID NO: 657978 - RNA, 22 nt, Human
ucuugcaggcaugaaaggacuc

SEQ ID NO: 657979 - RNA, 22 nt, Human
cccagcuucugagggggccuug

SEQ ID NO: 657980 - RNA, 22 nt, Human
ggaacacaaaugggagagcugg

SEQ ID NO: 657981 - RNA, 18 nt, Human
agcugguggggagacagc

SEQ ID NO: 657982 - RNA, 22 nt, Human
gguggggcccuggcacugguau

SEQ ID NO: 657983 - RNA, 22 nt, Human
uccguguucuccagagauaauc

SEQ ID NO: 657984 - RNA, 22 nt, Human
cugugugccuccugugaucagg

SEQ ID NO: 657985 - RNA, 22 nt, Human
augagugauggguacauuggcu

SEQ ID NO: 657986 - RNA, 22 nt, Human
acucagaaccauuuacucugag

SEQ ID NO: 657987 - RNA, 22 nt, Human
cagcuuguuuuauuuggggacc

SEQ ID NO: 657988 - RNA, 22 nt, Human
auucuccaguagucauucuauc

SEQ ID NO: 657989 - RNA, 22 nt, Human
ugaaguuuucugguugauuaag

SEQ ID NO: 657990 - RNA, 22 nt, Human
guacagcuaagaauuucaucuu

SEQ ID NO: 657991 - RNA, 22 nt, Human
cacccuggcuggaggugcagug

SEQ ID NO: 657992 - RNA, 22 nt, Human
cuguggcuuucucugccuccuu

SEQ ID NO: 657993 - RNA, 22 nt, Human
auuuggaggccucuccugcuug

SEQ ID NO: 657994 - RNA, 22 nt, Human
cccaguaagaagcuggcaccag

SEQ ID NO: 657995 - RNA, 19 nt, Human
ucucagaauuggcaaucau

SEQ ID NO: 657996 - RNA, 22 nt, Human
gcacugcuuucugagucauugu

SEQ ID NO: 657997 - RNA, 22 nt, Human
gaacuguauaggagcaguguuu

SEQ ID NO: 657998 - RNA, 22 nt, Human
agugagcuaugaucauguuacu

SEQ ID NO: 657999 - RNA, 22 nt, Human
uuucuaaggccagagacugcug

SEQ ID NO: 658000 - RNA, 22 nt, Human
aucugccugcuuaugaugccug

SEQ ID NO: 658001 - RNA, 22 nt, Human
gggccccaguccucccacgugg

SEQ ID NO: 658002 - RNA, 22 nt, Human
cccuggagugccggaaucaaga

SEQ ID NO: 658003 - RNA, 22 nt, Human
ucaguuuucucauuuaugagau

SEQ ID NO: 658004 - RNA, 22 nt, Human
cacugacuaaguuugugaaggu

SEQ ID NO: 658005 - RNA, 22 nt, Human
uuuuaaguuaauauaauugagg

SEQ ID NO: 658006 - RNA, 22 nt, Human
agucuguguauauucacugccc

SEQ ID NO: 658007 - RNA, 22 nt, Human
auuaauguguagccaacuuaau

SEQ ID NO: 658008 - RNA, 22 nt, Human
ggucccaguccucucccugcua

SEQ ID NO: 658009 - RNA, 22 nt, Human
uuaagucacuuaucuaaagaca

SEQ ID NO: 658010 - RNA, 22 nt, Human
acccugcuuuaugccguccucu

SEQ ID NO: 658011 - RNA, 22 nt, Human
acaguguucucuuccuguauag

SEQ ID NO: 658012 - RNA, 22 nt, Human
gucuggccauuugcccauugug

SEQ ID NO: 658013 - RNA, 20 nt, Human
cagucccaauccagggccag

SEQ ID NO: 658014 - RNA, 22 nt, Human
uuaccacagugccugucuaaug

SEQ ID NO: 658015 - RNA, 22 nt, Human
cuggacagaaaccaguccuggg

SEQ ID NO: 658016 - RNA, 22 nt, Human
ggauggcauguugggcucuguu

SEQ ID NO: 658017 - RNA, 22 nt, Human
guccugguagggcucugugucu

SEQ ID NO: 658018 - RNA, 19 nt, Human
ucagugcuccuauguccuu

SEQ ID NO: 658019 - RNA, 22 nt, Human
uuucuccucuccagagugcagu

SEQ ID NO: 658020 - RNA, 22 nt, Human
gcucugugccagggcugggcca

SEQ ID NO: 658021 - RNA, 22 nt, Human
uaguacaguggagagcaaagaa

SEQ ID NO: 658022 - RNA, 22 nt, Human
acaaaguguuuucugaaggccu

SEQ ID NO: 658023 - RNA, 22 nt, Human
ccaauacacuuuauagaagaaa

SEQ ID NO: 658024 - RNA, 22 nt, Human
cagcccaaagccccaggcuaga

SEQ ID NO: 658025 - RNA, 22 nt, Human
uacugugacagaguacuuaaac

SEQ ID NO: 658026 - RNA, 22 nt, Human
guuuccaggcgauaucagcugc

SEQ ID NO: 658027 - RNA, 22 nt, Human
gcagauuucuaauaagcaaugu

SEQ ID NO: 658028 - RNA, 22 nt, Human
augcauauuucuugggcuuacc

SEQ ID NO: 658029 - RNA, 22 nt, Human
uuuuuaagagauucuccagucu

SEQ ID NO: 658030 - RNA, 22 nt, Human
acucuuguuuguagagcccacc

SEQ ID NO: 658031 - RNA, 22 nt, Human
ucaggcuuuuucucaaccucuu

SEQ ID NO: 658032 - RNA, 22 nt, Human
aaggaaggaauugaucaugcgc

SEQ ID NO: 658033 - RNA, 22 nt, Human
cuuauuuccugacauggaaaga

SEQ ID NO: 658034 - RNA, 22 nt, Human
cagugccaaggauggccuggga

SEQ ID NO: 658035 - RNA, 22 nt, Human
cugugggagaagcuagcacagg

SEQ ID NO: 658036 - RNA, 22 nt, Human
aaucuuucguuucuccugucug

SEQ ID NO: 658037 - RNA, 22 nt, Human
gccagugugcaagaaaacagaa

SEQ ID NO: 658038 - RNA, 20 nt, Human
cuggacuugcugcucaccug

SEQ ID NO: 658039 - RNA, 22 nt, Human
cuucuugcugggggccucagug

SEQ ID NO: 658040 - RNA, 22 nt, Human
agggccagaguacaucagggcu

SEQ ID NO: 658041 - RNA, 22 nt, Human
uuccugggagcuagccacaucu

SEQ ID NO: 658042 - RNA, 22 nt, Human
ugcugcucgccacggcccaggg

SEQ ID NO: 658043 - RNA, 22 nt, Human
agaacaggcaguugguuggauu

SEQ ID NO: 658044 - RNA, 22 nt, Human
augcauauagaacauuugacau

SEQ ID NO: 658045 - RNA, 22 nt, Human
cacugaaggcuaggauuagaug

SEQ ID NO: 658046 - RNA, 23 nt, Human
ucagcaucaccugggaacuuacu

SEQ ID NO: 658047 - RNA, 22 nt, Human
uucaauuucauaauaucuagcu

SEQ ID NO: 658048 - RNA, 22 nt, Human
cugcuguggaugcaggaccuca

SEQ ID NO: 658049 - RNA, 22 nt, Human
gcugccuucuggaggaagugaa

SEQ ID NO: 658050 - RNA, 22 nt, Human
caggaagcuggucagauccugu

SEQ ID NO: 658051 - RNA, 22 nt, Human
agcugacucuggccucuggucc

SEQ ID NO: 658052 - RNA, 22 nt, Human
acccaggggcagccuugcugug

SEQ ID NO: 658053 - RNA, 22 nt, Human
cuucucugacagucuguuucac

SEQ ID NO: 658054 - RNA, 22 nt, Human
agaaggcuaaagaaacagauug

SEQ ID NO: 658055 - RNA, 20 nt, Human
ggacacuguagauuucaaac

SEQ ID NO: 658056 - RNA, 22 nt, Human
augcaggggcagcagagccugg

SEQ ID NO: 658057 - RNA, 22 nt, Human
acauucccuuggcuugaagcag

SEQ ID NO: 658058 - RNA, 22 nt, Human
ucaauauauuccauguuuucuc

SEQ ID NO: 658059 - RNA, 22 nt, Human
gugcugcugccagcaggauccu

SEQ ID NO: 658060 - RNA, 21 nt, Human
acaaugucaaggucagacauu

SEQ ID NO: 658061 - RNA, 22 nt, Human
uauggcuuuaaauugaaggagu

SEQ ID NO: 658062 - RNA, 22 nt, Human
ggcucugguggcaauugacugg

SEQ ID NO: 658063 - RNA, 22 nt, Human
acagacaugggccgcucuugag

SEQ ID NO: 658064 - RNA, 22 nt, Human
uggaacacuuuguugaaaugca

SEQ ID NO: 658065 - RNA, 22 nt, Human
ucaguaucuacuaucuugauga

SEQ ID NO: 658066 - RNA, 18 nt, Human
ugcuggcaacuacuauug

SEQ ID NO: 658067 - RNA, 20 nt, Human
uauugccuaaauaccagaau

SEQ ID NO: 658068 - RNA, 22 nt, Human
agugacacggagagacagcaug

SEQ ID NO: 658069 - RNA, 19 nt, Human
ucaggaaguugaugaggug

SEQ ID NO: 658070 - RNA, 22 nt, Human
gcagugcauuacucacauguuu

SEQ ID NO: 658071 - RNA, 20 nt, Human
uuaugcaagcaucaauauug

SEQ ID NO: 658072 - RNA, 23 nt, Human
uauucagcagugggauuuguugu

SEQ ID NO: 658073 - RNA, 22 nt, Human
uggcuaagcaugcuccagcugc

SEQ ID NO: 658074 - RNA, 22 nt, Human
caagaugccccugguagggauc

SEQ ID NO: 658075 - RNA, 22 nt, Human
uucccagguaauucugaggcag

SEQ ID NO: 658076 - RNA, 20 nt, Human
uauuuugcaauuaugguuca

SEQ ID NO: 658077 - RNA, 22 nt, Human
uggggcagggaugggaaacuau

SEQ ID NO: 658078 - RNA, 22 nt, Human
cugaggucaccccacuggcugu

SEQ ID NO: 658079 - RNA, 22 nt, Human
cagagagaggccacugcuauua

SEQ ID NO: 658080 - RNA, 22 nt, Human
gcugggcaugugaccaacagaa

SEQ ID NO: 658081 - RNA, 22 nt, Human
aacagcuguucgcagauguagg

SEQ ID NO: 658082 - RNA, 22 nt, Human
cagucccaugagcccagaacau

SEQ ID NO: 658083 - RNA, 22 nt, Human
uccuggguagagaccugaugaa

SEQ ID NO: 658084 - RNA, 18 nt, Human
ccugucugggguccccac

SEQ ID NO: 658085 - RNA, 22 nt, Human
ggcgcucaguguugccccagag

SEQ ID NO: 658086 - RNA, 22 nt, Human
gccugugacucgucuugggcca

SEQ ID NO: 658087 - RNA, 22 nt, Human
acugagcaguagauuuucuguu

SEQ ID NO: 658088 - RNA, 22 nt, Human
ucagagccccuccgcuguccca

SEQ ID NO: 658089 - RNA, 22 nt, Human
uauacacaccuccaaagcagga

SEQ ID NO: 658090 - RNA, 22 nt, Human
acacauuaucucauuaaauacu

SEQ ID NO: 658091 - RNA, 22 nt, Human
aaguuuguucauucauucaucc

SEQ ID NO: 658092 - RNA, 22 nt, Human
accuggagggaaguucugacuu

SEQ ID NO: 658093 - RNA, 22 nt, Human
cccccagccagcagugcucagc

SEQ ID NO: 658094 - RNA, 19 nt, Human
agcugugcagacacuucgc

SEQ ID NO: 658095 - RNA, 22 nt, Human
cagcccugcugccuuagugccu

SEQ ID NO: 658096 - RNA, 22 nt, Human
gcaggggcugcugggaacucgg

SEQ ID NO: 658097 - RNA, 20 nt, Human
aagcaauauagugcaaaugu

SEQ ID NO: 658098 - RNA, 22 nt, Human
aaauugucuuuaaucaggucau

SEQ ID NO: 658099 - RNA, 22 nt, Human
agaagcaccugucagcuacaug

SEQ ID NO: 658100 - RNA, 22 nt, Human
aucagcaucuuuaacaauuacc

SEQ ID NO: 658101 - RNA, 22 nt, Human
uacaacauaacgggcauucagu

SEQ ID NO: 658102 - RNA, 22 nt, Human
caggcuagauuggggccaguag

SEQ ID NO: 658103 - RNA, 22 nt, Human
acacagauaaugcucauauagg

SEQ ID NO: 658104 - RNA, 22 nt, Human
ugaaacagaguggauacaguga

SEQ ID NO: 658105 - RNA, 22 nt, Human
auccacagugcagcaagggccc

SEQ ID NO: 658106 - RNA, 22 nt, Human
ccaggaagccuuuuucuuugac

SEQ ID NO: 658107 - RNA, 22 nt, Human
ucaaacuguucagaacuccuuu

SEQ ID NO: 658108 - RNA, 22 nt, Human
cuggcuguauuaguuugauccu

SEQ ID NO: 658109 - RNA, 19 nt, Human
ucacuugaaguucagaaau

SEQ ID NO: 658110 - RNA, 22 nt, Human
ccucugcaucuggcugcugcag

SEQ ID NO: 658111 - RNA, 22 nt, Human
gcggcgccugggacccgccagc

SEQ ID NO: 658112 - RNA, 22 nt, Human
uccaucuguuuacuauaaagau

SEQ ID NO: 658113 - RNA, 22 nt, Human
uauguagguaaacacagacaua

SEQ ID NO: 658114 - RNA, 22 nt, Human
gccuuggaaagcuggagcaguu

SEQ ID NO: 658115 - RNA, 22 nt, Human
gcucucugggugugucuagaua

SEQ ID NO: 658116 - RNA, 20 nt, Human
cugggcaccugucugcaguu

SEQ ID NO: 658117 - RNA, 22 nt, Human
agugcuccaaagguuggucauu

SEQ ID NO: 658118 - RNA, 22 nt, Human
uuagaaccagcauuuguccugg

SEQ ID NO: 658119 - RNA, 22 nt, Human
uauuuauaacagugagaacggg

SEQ ID NO: 658120 - RNA, 22 nt, Human
guugaacuauguuuuaucugac

SEQ ID NO: 658121 - RNA, 22 nt, Human
cugcaggcucgaagacacggau

SEQ ID NO: 658122 - RNA, 22 nt, Human
aaaauucucuugaucuugacag

SEQ ID NO: 658123 - RNA, 22 nt, Human
uggcuucauggcaagucuuagu

SEQ ID NO: 658124 - RNA, 22 nt, Human
gacaggguggcugauagggcuc

SEQ ID NO: 658125 - RNA, 22 nt, Human
ucugcagagcauuauagcaaaa

SEQ ID NO: 658126 - RNA, 22 nt, Human
uuucuaagugaacauucaaguu

SEQ ID NO: 658127 - RNA, 21 nt, Human
aggauggaaaggacuaggggu

SEQ ID NO: 658128 - RNA, 23 nt, Human
ggagaggggugugggcaucuuua

SEQ ID NO: 658129 - RNA, 21 nt, Human
guggcccugccgcagugucca

SEQ ID NO: 658130 - RNA, 22 nt, Human
cccagugucuccaacaucagau

SEQ ID NO: 658131 - RNA, 22 nt, Human
aauaagcaagccugugugcaag

SEQ ID NO: 658132 - RNA, 22 nt, Human
ugccaucuuccuuccucugcac

SEQ ID NO: 658133 - RNA, 21 nt, Human
gugcacaguccugcacacagg

SEQ ID NO: 658134 - RNA, 22 nt, Human
agacaguaugauauaugaauac

SEQ ID NO: 658135 - RNA, 16 nt, Human
aaggagggaagagaau

SEQ ID NO: 658136 - RNA, 22 nt, Human
caguguuuuguuacuugggcac

SEQ ID NO: 658137 - RNA, 22 nt, Human
agacaggcagaggcugcagagg

SEQ ID NO: 658138 - RNA, 23 nt, Human
ugcugggguaguuuguggcacag

SEQ ID NO: 658139 - RNA, 22 nt, Human
auuugucuaaugaguguguacu

SEQ ID NO: 658140 - RNA, 21 nt, Human
gcugugcacauaguagaagug

SEQ ID NO: 658141 - RNA, 22 nt, Human
uggcaggaaauacccugccuag

SEQ ID NO: 658142 - RNA, 22 nt, Human
ugugcguggauuccuguacuca

SEQ ID NO: 658143 - RNA, 21 nt, Human
gccagagcaguacaaugaggu

SEQ ID NO: 658144 - RNA, 22 nt, Human
acacacagaaggaagccccacu

SEQ ID NO: 658145 - RNA, 22 nt, Human
aacaugaugugaagcaugaacu

SEQ ID NO: 658146 - RNA, 22 nt, Human
cacaauuuguauuuugcaucca

SEQ ID NO: 658147 - RNA, 22 nt, Human
auucuuuuuuaaggaauagaac

SEQ ID NO: 658148 - RNA, 22 nt, Human
ucucugugcaggaugcugaguu

SEQ ID NO: 658149 - RNA, 22 nt, Human
aggcagcccugugcuggaugcu

SEQ ID NO: 658150 - RNA, 22 nt, Human
gagugucucacaguagcauuuu

SEQ ID NO: 658151 - RNA, 22 nt, Human
acuugauuuuuauaauaaaugg

SEQ ID NO: 658152 - RNA, 22 nt, Human
gacuccauccaaucuguguucu

SEQ ID NO: 658153 - RNA, 22 nt, Human
guggagagagauaagccugguc

SEQ ID NO: 658154 - RNA, 22 nt, Human
caggaaguuguguguucgaggc

SEQ ID NO: 658155 - RNA, 21 nt, Human
ggaagcuguguccaugcuccu

SEQ ID NO: 658156 - RNA, 22 nt, Human
uuggccaguggaaagaggagga

SEQ ID NO: 658157 - RNA, 22 nt, Human
ucacaugccuuuuacucugcac

SEQ ID NO: 658158 - RNA, 22 nt, Human
agcccuggcccggcugugcuuu

SEQ ID NO: 658159 - RNA, 22 nt, Human
ugucacauaggcaaaauguuuu

SEQ ID NO: 658160 - RNA, 22 nt, Human
agcacaggaacauggagauggg

SEQ ID NO: 658161 - RNA, 22 nt, Human
auuccugagacuuaucuguuuc

SEQ ID NO: 658162 - RNA, 22 nt, Human
cuaugcaucugaacaauagaga

SEQ ID NO: 658163 - RNA, 22 nt, Human
uucauaaucaccaaaaacugga

SEQ ID NO: 658164 - RNA, 22 nt, Human
gacaggguccaaaggcagggga

SEQ ID NO: 658165 - RNA, 22 nt, Human
guucauaauuugaaggaauagg

SEQ ID NO: 658166 - RNA, 22 nt, Human
agaagaacuuagcuuucuaucu

SEQ ID NO: 658167 - RNA, 22 nt, Human
augcuauacauaugacaucaca

SEQ ID NO: 658168 - RNA, 22 nt, Human
cacugcccuuacaugcccugca

SEQ ID NO: 658169 - RNA, 22 nt, Human
uccuguguugauagagaugguu

SEQ ID NO: 658170 - RNA, 22 nt, Human
aaacaagguacacaguaauggu

SEQ ID NO: 658171 - RNA, 22 nt, Human
gcagggcucugcuguaguccua

SEQ ID NO: 658172 - RNA, 22 nt, Human
cuucagccucaucucagcccgu

SEQ ID NO: 658173 - RNA, 22 nt, Human
aaacugcacaagggugcauagc

SEQ ID NO: 658174 - RNA, 22 nt, Human
cugaggugagaggaggccaugu

SEQ ID NO: 658175 - RNA, 22 nt, Human
auuugacagugaguuguggaug

SEQ ID NO: 658176 - RNA, 22 nt, Human
ccagaggaaaaauaucucccua

SEQ ID NO: 658177 - RNA, 21 nt, Human
auccauccaucuuggccuaac

SEQ ID NO: 658178 - RNA, 22 nt, Human
uaaaggcacugcgucccucaaa

SEQ ID NO: 658179 - RNA, 22 nt, Human
cuuggguguuuuaaaacuagau

SEQ ID NO: 658180 - RNA, 22 nt, Human
cuggagaguaaucucuguguua

SEQ ID NO: 658181 - RNA, 20 nt, Human
augugucuguaaacaacucu

SEQ ID NO: 658182 - RNA, 22 nt, Human
ugcugugcaucauaguguuugg

SEQ ID NO: 658183 - RNA, 22 nt, Human
uaccagccucuguugggggugg

SEQ ID NO: 658184 - RNA, 22 nt, Human
agcagccaauuggaggaugaag

SEQ ID NO: 658185 - RNA, 22 nt, Human
aaugcuuccaaaauaccaagcc

SEQ ID NO: 658186 - RNA, 22 nt, Human
ugccuugguuuccccaucugua

SEQ ID NO: 658187 - RNA, 22 nt, Human
auggccagagaggccagccugg

SEQ ID NO: 658188 - RNA, 22 nt, Human
gaggagccaagguauguguguu

SEQ ID NO: 658189 - RNA, 22 nt, Human
gaagccacguuaaauuggcugu

SEQ ID NO: 658190 - RNA, 22 nt, Human
cauaaauuguacccauuccaac

SEQ ID NO: 658191 - RNA, 22 nt, Human
aaugucuaugauccuuuaaguu

SEQ ID NO: 658192 - RNA, 21 nt, Human
ucccagggucuuaugggaugu

SEQ ID NO: 658193 - RNA, 22 nt, Human
caaagugcuggaauuacaggug

SEQ ID NO: 658194 - RNA, 22 nt, Human
cugagcaguagagggucucuuu

SEQ ID NO: 658195 - RNA, 22 nt, Human
agucuggagugauuauguggga

SEQ ID NO: 658196 - RNA, 22 nt, Human
ggugagcacugcccugggucuc

SEQ ID NO: 658197 - RNA, 20 nt, Human
ggugcagguaacgcugugcu

SEQ ID NO: 658198 - RNA, 22 nt, Human
ccugucugaaucaugauuuccu

SEQ ID NO: 658199 - RNA, 22 nt, Human
ccuggaggcucugggagggcag

SEQ ID NO: 658200 - RNA, 22 nt, Human
uuuaauguuugagucaguauau

SEQ ID NO: 658201 - RNA, 22 nt, Human
agggaucaaaaaauguacaugc

SEQ ID NO: 658202 - RNA, 22 nt, Human
uccagccaagggagguuacuag

SEQ ID NO: 658203 - RNA, 22 nt, Human
uccccagucccggcggugggug

SEQ ID NO: 658204 - RNA, 22 nt, Human
acaguuugcacuguucaucaaa

SEQ ID NO: 658205 - RNA, 22 nt, Human
gacaugcaugaaugcaggucuc

SEQ ID NO: 658206 - RNA, 22 nt, Human
cuuucagcaucccugggauuac

SEQ ID NO: 658207 - RNA, 22 nt, Human
gggcaggagagggccaccugga

SEQ ID NO: 658208 - RNA, 17 nt, Human
ucugccgacugccagcu

SEQ ID NO: 658209 - RNA, 22 nt, Human
ucaaaggaauuugauuuugaug

SEQ ID NO: 658210 - RNA, 22 nt, Human
aggcuuaaugaguuaaaucacu

SEQ ID NO: 658211 - RNA, 22 nt, Human
aaagcagcaacagcuguuagaa

SEQ ID NO: 658212 - RNA, 22 nt, Human
cugugcccucuuugcuggccuu

SEQ ID NO: 658213 - RNA, 22 nt, Human
agaguuuggagagggugaggca

SEQ ID NO: 658214 - RNA, 22 nt, Human
gagcugggaggacugggaacuu

SEQ ID NO: 658215 - RNA, 22 nt, Human
uaacagaguaacagguauguaa

SEQ ID NO: 658216 - RNA, 23 nt, Human
auguccaguuuacuucaggauga

SEQ ID NO: 658217 - RNA, 22 nt, Human
ugcuauuaaugaggcugcauuu

SEQ ID NO: 658218 - RNA, 22 nt, Human
cuuagaaaugcagauucucagg

SEQ ID NO: 658219 - RNA, 22 nt, Human
augugcuuggaaaagcaguggu

SEQ ID NO: 658220 - RNA, 22 nt, Human
ccuggcucagcagcucuuucuc

SEQ ID NO: 658221 - RNA, 22 nt, Human
aacuuuauuguuaggggcuaaa

SEQ ID NO: 658222 - RNA, 22 nt, Human
uuuuccuaguaggccuauuaga

SEQ ID NO: 658223 - RNA, 22 nt, Human
ccaggacaagccagagggacag

SEQ ID NO: 658224 - RNA, 22 nt, Human
aggcuucuugggcuucauucug

SEQ ID NO: 658225 - RNA, 22 nt, Human
gggaccugaggcccugcuccac

SEQ ID NO: 658226 - RNA, 22 nt, Human
acaguguuuaagagauggcauu

SEQ ID NO: 658227 - RNA, 22 nt, Human
acaugcauauacuuaaauaugu

SEQ ID NO: 658228 - RNA, 22 nt, Human
acauacauauguuuaaaugcau

SEQ ID NO: 658229 - RNA, 22 nt, Human
aaacaaguuuagaauaaugaau

SEQ ID NO: 658230 - RNA, 22 nt, Human
gucccugggaaaggagagggca

SEQ ID NO: 658231 - RNA, 22 nt, Human
auuccacagcuacaucaaucua

SEQ ID NO: 658232 - RNA, 22 nt, Human
ucauauuucaaaauggcuggag

SEQ ID NO: 658233 - RNA, 22 nt, Human
ugucauuuaucuuauaguaauc

SEQ ID NO: 658234 - RNA, 22 nt, Human
guuccuaaccagcagagaaaca

SEQ ID NO: 658235 - RNA, 22 nt, Human
aaggacaggcacagugguggag

SEQ ID NO: 658236 - RNA, 22 nt, Human
ugcagagggagugacgguucac

SEQ ID NO: 658237 - RNA, 22 nt, Human
ugauucugccacguacuggcug

SEQ ID NO: 658238 - RNA, 22 nt, Human
aagugcauuagauagaaugaug

SEQ ID NO: 658239 - RNA, 22 nt, Human
ggacacagccacuuaggguacc

SEQ ID NO: 658240 - RNA, 22 nt, Human
uuacacaaaagcaagugugugu

SEQ ID NO: 658241 - RNA, 22 nt, Human
uugacaaauacccauuagacca

SEQ ID NO: 658242 - RNA, 22 nt, Human
uggcauguuaaaguaguauuaa

SEQ ID NO: 658243 - RNA, 22 nt, Human
ggaggcccagaaggaagcccag

SEQ ID NO: 658244 - RNA, 22 nt, Human
cuuaucagauuaucugggcugu

SEQ ID NO: 658245 - RNA, 22 nt, Human
gcuguuuccccuucacaguggc

SEQ ID NO: 658246 - RNA, 22 nt, Human
cuugcuucugcugcacuauccu

SEQ ID NO: 658247 - RNA, 22 nt, Human
gauguacaaugucacuaugacc

SEQ ID NO: 658248 - RNA, 22 nt, Human
aucuggcucaccuggguaaaua

SEQ ID NO: 658249 - RNA, 22 nt, Human
ccaaggcacacucugcaagguu

SEQ ID NO: 658250 - RNA, 22 nt, Human
aaaagacaggugucugcggccc

SEQ ID NO: 658251 - RNA, 22 nt, Human
ggccugagaaccauggggccaa

SEQ ID NO: 658252 - RNA, 22 nt, Human
gugaaguugauuguuaucguca

SEQ ID NO: 658253 - RNA, 22 nt, Human
gacagccucaugaggagcaaaa

SEQ ID NO: 658254 - RNA, 22 nt, Human
caguuuauaguuguuaugugug

SEQ ID NO: 658255 - RNA, 22 nt, Human
aucaagcagugaaaaaugcuag

SEQ ID NO: 658256 - RNA, 22 nt, Human
auguggcuagugcagaugaaua

SEQ ID NO: 658257 - RNA, 22 nt, Human
ucaccaccagaagagcuauucu

SEQ ID NO: 658258 - RNA, 22 nt, Human
agaugugagaaucaagugacca

SEQ ID NO: 658259 - RNA, 22 nt, Human
ccucuugauugguuggaagcgg

SEQ ID NO: 658260 - RNA, 22 nt, Human
guggcacacaggagagagcuca

SEQ ID NO: 658261 - RNA, 22 nt, Human
auauuucuccaaauguuuucaa

SEQ ID NO: 658262 - RNA, 22 nt, Human
caaguuuguguucuaucauucu

SEQ ID NO: 658263 - RNA, 22 nt, Human
gcugacugauggacacagcacc

SEQ ID NO: 658264 - RNA, 22 nt, Human
acauggaagcaaaguucuauuu

SEQ ID NO: 658265 - RNA, 22 nt, Human
aaggcacuagcagaauuaguga

SEQ ID NO: 658266 - RNA, 22 nt, Human
aacauucaccucuaccuccuuc

SEQ ID NO: 658267 - RNA, 22 nt, Human
cccaggaggcgcagguugcggu

SEQ ID NO: 658268 - RNA, 22 nt, Human
ugcagccaucgcagagucugua

SEQ ID NO: 658269 - RNA, 22 nt, Human
ucucagcacguuguuuucauug

SEQ ID NO: 658270 - RNA, 22 nt, Human
uccugucagugaggcagaugaa

SEQ ID NO: 658271 - RNA, 22 nt, Human
agcagggccugagugaccuaac

SEQ ID NO: 658272 - RNA, 22 nt, Human
gcaggccugacuguagggggca

SEQ ID NO: 658273 - RNA, 22 nt, Human
aguguguagcaauaugcuggca

SEQ ID NO: 658274 - RNA, 22 nt, Human
aaaaaucuaugacugcuucucc

SEQ ID NO: 658275 - RNA, 22 nt, Human
gcugggucuggaugcucaggug

SEQ ID NO: 658276 - RNA, 22 nt, Human
ugagauugugugcuucagaaau

SEQ ID NO: 658277 - RNA, 22 nt, Human
ccugucugaaggcagggggaug

SEQ ID NO: 658278 - RNA, 22 nt, Human
ucaguguccggagccugagugc

SEQ ID NO: 658279 - RNA, 22 nt, Human
ucucuaagauaggaauacaguu

SEQ ID NO: 658280 - RNA, 22 nt, Human
guauguguugaauucagggguc

SEQ ID NO: 658281 - RNA, 22 nt, Human
ggagggcccugggugcagcucu

SEQ ID NO: 658282 - RNA, 22 nt, Human
uaagaauuccaucgcagaguau

SEQ ID NO: 658283 - RNA, 22 nt, Human
agccacagucugaugccugaga

SEQ ID NO: 658284 - RNA, 22 nt, Human
auauauucuuaaagaaucugac

SEQ ID NO: 658285 - RNA, 22 nt, Human
cagugagggcauucagugcugg

SEQ ID NO: 658286 - RNA, 22 nt, Human
ucuggcccuauggcauguaccu

SEQ ID NO: 658287 - RNA, 22 nt, Human
ccagcucugcagggccuggggu

SEQ ID NO: 658288 - RNA, 22 nt, Human
ugauucaauuaucugaugcuuu

SEQ ID NO: 658289 - RNA, 22 nt, Human
uagcugucaccagaaauggcca

SEQ ID NO: 658290 - RNA, 22 nt, Human
caccaugacugguugagagagg

SEQ ID NO: 658291 - RNA, 22 nt, Human
acaguuucccccuagggcagca

SEQ ID NO: 658292 - RNA, 22 nt, Human
cuucugugaaugaaguguggga

SEQ ID NO: 658293 - RNA, 22 nt, Human
gggacagcuguagugcuuggcu

SEQ ID NO: 658294 - RNA, 22 nt, Human
aagacuguacauuuuccagucu

SEQ ID NO: 658295 - RNA, 22 nt, Human
aguauacaguaaugacauaucu

SEQ ID NO: 658296 - RNA, 22 nt, Human
uuaugcagucgacaucugauca

SEQ ID NO: 658297 - RNA, 22 nt, Human
agagcuggguggacuuguaguu

SEQ ID NO: 658298 - RNA, 22 nt, Human
aacaacagcugcuaaagaguug

SEQ ID NO: 658299 - RNA, 22 nt, Human
uggaggugggagggacuguccu

SEQ ID NO: 658300 - RNA, 22 nt, Human
ucuggcccaugauccugcuaac

SEQ ID NO: 658301 - RNA, 22 nt, Human
aggucugagaacuaccuauagg

SEQ ID NO: 658302 - RNA, 22 nt, Human
agguuuauguuuggugcaggag

SEQ ID NO: 658303 - RNA, 22 nt, Human
ggaggcucuaaacuuuccuugg

SEQ ID NO: 658304 - RNA, 22 nt, Human
uucuguuuccugccuucccauu

SEQ ID NO: 658305 - RNA, 22 nt, Human
acagagaaacuaaggaguuugg

SEQ ID NO: 658306 - RNA, 18 nt, Human
gcaggccuagaacuuggu

SEQ ID NO: 658307 - RNA, 22 nt, Human
acucucugagcuaccaggugag

SEQ ID NO: 658308 - RNA, 22 nt, Human
caggcccagcccuuagccaggu

SEQ ID NO: 658309 - RNA, 17 nt, Human
acaguaacuauguuaug

SEQ ID NO: 658310 - RNA, 22 nt, Human
cuacagaguaucuaaagaggua

SEQ ID NO: 658311 - RNA, 22 nt, Human
cacuuugaagagcuuuuugaca

SEQ ID NO: 658312 - RNA, 22 nt, Human
ugccgcugucgccaccauggcu

SEQ ID NO: 658313 - RNA, 18 nt, Human
gagcccugggagaucucu

SEQ ID NO: 658314 - RNA, 22 nt, Human
aaucagagcccucugagcuuca

SEQ ID NO: 658315 - RNA, 22 nt, Human
uaauccaggguauucuaguuuc

SEQ ID NO: 658316 - RNA, 21 nt, Human
acagggcaugcagcuggcugu

SEQ ID NO: 658317 - RNA, 22 nt, Human
auaguaugaauuaaaucaugag

SEQ ID NO: 658318 - RNA, 22 nt, Human
gugacaaaggucaagcuuuuga

SEQ ID NO: 658319 - RNA, 22 nt, Human
auucagaauugugggcaguaca

SEQ ID NO: 658320 - RNA, 22 nt, Human
agggagcucugggggcacacgg

SEQ ID NO: 658321 - RNA, 22 nt, Human
aaggcugaccaguuuacacuuu

SEQ ID NO: 658322 - RNA, 22 nt, Human
uggugucucuuaguacauagau

SEQ ID NO: 658323 - RNA, 22 nt, Human
aacuuacaaggaugauagcugc

SEQ ID NO: 658324 - RNA, 22 nt, Human
gcauguuauguaucugcccagc

SEQ ID NO: 658325 - RNA, 22 nt, Human
acuguccaagcaugccuggcuu

SEQ ID NO: 658326 - RNA, 23 nt, Human
ugagacccuaauuuagcaagugu

SEQ ID NO: 658327 - RNA, 22 nt, Human
agaagagcccuuuaagggggaa

SEQ ID NO: 658328 - RNA, 20 nt, Human
ccaauaaagcucuauaggga

SEQ ID NO: 658329 - RNA, 20 nt, Human
agggcugagaagggacuagc

SEQ ID NO: 658330 - RNA, 22 nt, Human
acagggaaggauuuagugggaa

SEQ ID NO: 658331 - RNA, 18 nt, Human
ggagucucaggagaggaa

SEQ ID NO: 658332 - RNA, 22 nt, Human
uucuauguuaguaugggucucc

SEQ ID NO: 658333 - RNA, 20 nt, Human
cccaguguccagccuugcca

SEQ ID NO: 658334 - RNA, 22 nt, Human
auuuauuauugugguuacuucu

SEQ ID NO: 658335 - RNA, 22 nt, Human
uacacaucucugucaguaguga

SEQ ID NO: 658336 - RNA, 22 nt, Human
aaugucugaggcucaucugagg

SEQ ID NO: 658337 - RNA, 22 nt, Human
ucuucucucauguaggagggaa

SEQ ID NO: 658338 - RNA, 22 nt, Human
acagaugagguguuuggagagc

SEQ ID NO: 658339 - RNA, 22 nt, Human
ugcagaguagugaggggacaga

SEQ ID NO: 658340 - RNA, 22 nt, Human
uuuagcaacgaagcacucgaca

SEQ ID NO: 658341 - RNA, 22 nt, Human
auggucaggcaaggagggcugg

SEQ ID NO: 658342 - RNA, 22 nt, Human
uucauuuguaacucuguuaggg

SEQ ID NO: 658343 - RNA, 22 nt, Human
agcucugggucacggcugccga

SEQ ID NO: 658344 - RNA, 22 nt, Human
agggcaguguggugggacugac

SEQ ID NO: 658345 - RNA, 22 nt, Human
ugaggccugcauugaacuagaa

SEQ ID NO: 658346 - RNA, 17 nt, Human
acucaggaucugggagu

SEQ ID NO: 658347 - RNA, 22 nt, Human
cuggugagacgguugacaggag

SEQ ID NO: 658348 - RNA, 22 nt, Human
caggggcucugggugaugugag

SEQ ID NO: 658349 - RNA, 22 nt, Human
uagaaagugaagguuaauuaau

SEQ ID NO: 658350 - RNA, 22 nt, Human
cagcugcuuuaguuuuccaucc

SEQ ID NO: 658351 - RNA, 22 nt, Human
uggcugaggagggucuucuggu

SEQ ID NO: 658352 - RNA, 22 nt, Human
auucacaauagcagcuugcaug

SEQ ID NO: 658353 - RNA, 19 nt, Human
gcuuuggagggagguucua

SEQ ID NO: 658354 - RNA, 21 nt, Human
uauacaugugcacacacaugc

SEQ ID NO: 658355 - RNA, 22 nt, Human
uuggcugccuucaccccuggcc

SEQ ID NO: 658356 - RNA, 17 nt, Human
uucagcaguguuucucc

SEQ ID NO: 658357 - RNA, 22 nt, Human
cgugggaguggugggugcucag

SEQ ID NO: 658358 - RNA, 22 nt, Human
cauauauucugguuuucacugg

SEQ ID NO: 658359 - RNA, 22 nt, Human
uggaguccgcuccaaguucucu

SEQ ID NO: 658360 - RNA, 22 nt, Human
uggccccauuuuacagaugaaa

SEQ ID NO: 658361 - RNA, 22 nt, Human
ugaagcaauagagacaagacca

SEQ ID NO: 658362 - RNA, 22 nt, Human
uuggcuaaccuggguuaucagc

SEQ ID NO: 658363 - RNA, 23 nt, Human
gcaggacaacagagugggaaggc

SEQ ID NO: 658364 - RNA, 22 nt, Human
caggcagcagccacucugguau

SEQ ID NO: 658365 - RNA, 22 nt, Human
caguuugugcuaggcacuauuu

SEQ ID NO: 658366 - RNA, 22 nt, Human
uacaauguuaaggaaagagaga

SEQ ID NO: 658367 - RNA, 22 nt, Human
ucuucaucucagauuaacagga

SEQ ID NO: 658368 - RNA, 22 nt, Human
ggagaagggcaugguaguuuua

SEQ ID NO: 658369 - RNA, 19 nt, Human
ugcacguuggaaucaccug

SEQ ID NO: 658370 - RNA, 22 nt, Human
gucuggacagcagcaccucggc

SEQ ID NO: 658371 - RNA, 22 nt, Human
cuggcuggccggagcgaggcgg

SEQ ID NO: 658372 - RNA, 22 nt, Human
acagggugaaugugacauuauc

SEQ ID NO: 658373 - RNA, 22 nt, Human
guuuuccuucucagccauugcc

SEQ ID NO: 658374 - RNA, 22 nt, Human
uggcugaggagagggcggaagu

SEQ ID NO: 658375 - RNA, 22 nt, Human
gggccuggcaugcagccccguu

SEQ ID NO: 658376 - RNA, 22 nt, Human
augcuucuccugaacaucccug

SEQ ID NO: 658377 - RNA, 20 nt, Human
acuugcugggcuuuguuacc

SEQ ID NO: 658378 - RNA, 22 nt, Human
acugaaggcuuaacucuuucau

SEQ ID NO: 658379 - RNA, 22 nt, Human
ugaugaaauguugaggcaguga

SEQ ID NO: 658380 - RNA, 22 nt, Human
ucugucacccaggcuggagugc

SEQ ID NO: 658381 - RNA, 22 nt, Human
uucaaucauuuuuacauagucc

SEQ ID NO: 658382 - RNA, 22 nt, Human
gacagucacuuccaggagagga

SEQ ID NO: 658383 - RNA, 22 nt, Human
uaagaacaucuguccccagauu

SEQ ID NO: 658384 - RNA, 17 nt, Human
ggagccaggagcccacc

SEQ ID NO: 658385 - RNA, 20 nt, Human
caugacacuguuccucugcc

SEQ ID NO: 658386 - RNA, 22 nt, Human
gccaggagggaaaggacaauuu

SEQ ID NO: 658387 - RNA, 20 nt, Human
uaaggcuguuuuguauuccu

SEQ ID NO: 658388 - RNA, 22 nt, Human
gcaaagcauucuguggagucua

SEQ ID NO: 658389 - RNA, 22 nt, Human
cuggguggaucgcagccccagg

SEQ ID NO: 658390 - RNA, 22 nt, Human
uuccagccaugguuucccuaug

SEQ ID NO: 658391 - RNA, 22 nt, Human
aagcaggcgagggccuggagca

SEQ ID NO: 658392 - RNA, 22 nt, Human
agcuccagaggcagugaugaag

SEQ ID NO: 658393 - RNA, 17 nt, Human
acaggccugcuugcacu

SEQ ID NO: 658394 - RNA, 22 nt, Human
uugucuuuggaaauuuaauguu

SEQ ID NO: 658395 - RNA, 22 nt, Human
aagccaggaagagagccuucac

SEQ ID NO: 658396 - RNA, 22 nt, Human
aagacagugacagucacaauug

SEQ ID NO: 658397 - RNA, 22 nt, Human
uuggaaggugagucccuggguu

SEQ ID NO: 658398 - RNA, 22 nt, Human
caccaggcugaaccagagggga

SEQ ID NO: 658399 - RNA, 22 nt, Human
agaagggaacucagagaugauu

SEQ ID NO: 658400 - RNA, 20 nt, Human
cagaugcuggaucuuggucc

SEQ ID NO: 658401 - RNA, 22 nt, Human
ggccccuggcaccaggcugauu

SEQ ID NO: 658402 - RNA, 22 nt, Human
auaugcuugacucuuucacauc

SEQ ID NO: 658403 - RNA, 21 nt, Human
caugaacaugcuuauccucag

SEQ ID NO: 658404 - RNA, 22 nt, Human
ucuucuguuaccacagcgauga

SEQ ID NO: 658405 - RNA, 22 nt, Human
acugggcuuauuucuugugaac

SEQ ID NO: 658406 - RNA, 22 nt, Human
uucacaggauagcuauugcacg

SEQ ID NO: 658407 - RNA, 22 nt, Human
ccauggaguuccucuggucuau

SEQ ID NO: 658408 - RNA, 22 nt, Human
acagaauuaaugaaaauuacaa

SEQ ID NO: 658409 - RNA, 22 nt, Human
uggacaacugguuuuugacaaa

SEQ ID NO: 658410 - RNA, 22 nt, Human
agaggccagggacacugcucaa

SEQ ID NO: 658411 - RNA, 22 nt, Human
uuaucuuguagagauauuuucg

SEQ ID NO: 658412 - RNA, 22 nt, Human
gagaaacaggaauugagucgcu

SEQ ID NO: 658413 - RNA, 22 nt, Human
cucacugcccugaaguuggguu

SEQ ID NO: 658414 - RNA, 22 nt, Human
ggcccugugauggauguauuag

SEQ ID NO: 658415 - RNA, 22 nt, Human
aauccuggaaugaguuugcuga

SEQ ID NO: 658416 - RNA, 22 nt, Human
augaaaugaaguuggccuggcu

SEQ ID NO: 658417 - RNA, 22 nt, Human
uuguagaaucauuauuucuagu

SEQ ID NO: 658418 - RNA, 22 nt, Human
aggauaauaauaaucucguuua

SEQ ID NO: 658419 - RNA, 22 nt, Human
uucuaaagacucauggaagugg

SEQ ID NO: 658420 - RNA, 22 nt, Human
guggggggagcugcaagcugga

SEQ ID NO: 658421 - RNA, 22 nt, Human
agcugcucaggagagccagguc

SEQ ID NO: 658422 - RNA, 22 nt, Human
cugagcagcguggggagcuggc

SEQ ID NO: 658423 - RNA, 22 nt, Human
auuaaacugagcaaauuaacau

SEQ ID NO: 658424 - RNA, 22 nt, Human
cuugaaagucagcagaguggau

SEQ ID NO: 658425 - RNA, 22 nt, Human
augcuccagugugaugcuucau

SEQ ID NO: 658426 - RNA, 23 nt, Human
uagauguauuaagugcauuuuca

SEQ ID NO: 658427 - RNA, 22 nt, Human
ucccagggcacucacccucccu

SEQ ID NO: 658428 - RNA, 22 nt, Human
acaaauugccuagucuagcauc

SEQ ID NO: 658429 - RNA, 22 nt, Human
agagcugggugguggugacuca

SEQ ID NO: 658430 - RNA, 22 nt, Human
uuuauugggccuggaggaucua

SEQ ID NO: 658431 - RNA, 22 nt, Human
agcgcgcucuaggacaccgcgg

SEQ ID NO: 658432 - RNA, 22 nt, Human
ucagugcaggaaucucuagcca

SEQ ID NO: 658433 - RNA, 22 nt, Human
auccagaguaauacagaaugca

SEQ ID NO: 658434 - RNA, 22 nt, Human
cuggucccagcagagcucugag

SEQ ID NO: 658435 - RNA, 22 nt, Human
agguggcuucuggccaggugug

SEQ ID NO: 658436 - RNA, 22 nt, Human
ggcccagccucagacaugcccu

SEQ ID NO: 658437 - RNA, 22 nt, Human
caguaucuugcuuauagacaca

SEQ ID NO: 658438 - RNA, 22 nt, Human
auuagcaaguuuuccagcuaau

SEQ ID NO: 658439 - RNA, 22 nt, Human
gcuggacucaggggacucaggg

SEQ ID NO: 658440 - RNA, 22 nt, Human
aggcaaggugcucuugcucuau

SEQ ID NO: 658441 - RNA, 22 nt, Human
cuguuggaugugacacuguuag

SEQ ID NO: 658442 - RNA, 22 nt, Human
uuauuuagucuagaugaauuuu

SEQ ID NO: 658443 - RNA, 22 nt, Human
aucuugcauuugcuaaaaugca

SEQ ID NO: 658444 - RNA, 22 nt, Human
aggauccuuuuucugcuguuug

SEQ ID NO: 658445 - RNA, 22 nt, Human
gaggagcccuguuccccaggcc

SEQ ID NO: 658446 - RNA, 22 nt, Human
acaguugaggacuuaaacaaaa

SEQ ID NO: 658447 - RNA, 22 nt, Human
ucuucacagaugcauauacuuc

SEQ ID NO: 658448 - RNA, 20 nt, Human
aagcuuccaggaucuggugu

SEQ ID NO: 658449 - RNA, 23 nt, Human
acaucagaguuaguucaaucagg

SEQ ID NO: 658450 - RNA, 22 nt, Human
ucugggaagccuguaugcagaa

SEQ ID NO: 658451 - RNA, 22 nt, Human
gggaggagggugcuggcuaaac

SEQ ID NO: 658452 - RNA, 22 nt, Human
ccagggcauguaacuaauggug

SEQ ID NO: 658453 - RNA, 20 nt, Human
ugugacaaaggcauauuuua

SEQ ID NO: 658454 - RNA, 22 nt, Human
uggcaguguuucuaaggggcuc

SEQ ID NO: 658455 - RNA, 22 nt, Human
uguguuuugaacucaucuacug

SEQ ID NO: 658456 - RNA, 22 nt, Human
guccuggauugaacauaggcag

SEQ ID NO: 658457 - RNA, 22 nt, Human
cugacaggguagacagagggca

SEQ ID NO: 658458 - RNA, 22 nt, Human
cugggcauauacgugcaaguca

SEQ ID NO: 658459 - RNA, 22 nt, Human
uggagacucagaaggggaagca

SEQ ID NO: 658460 - RNA, 22 nt, Human
gagcacagcuggagguagcauu

SEQ ID NO: 658461 - RNA, 23 nt, Human
uauugcacacauagaaacauaga

SEQ ID NO: 658462 - RNA, 22 nt, Human
gauacaguauuuaaagagcaac

SEQ ID NO: 658463 - RNA, 22 nt, Human
uccaugaguuugaggaaaagag

SEQ ID NO: 658464 - RNA, 22 nt, Human
ucucucuuuuuaaucauguaau

SEQ ID NO: 658465 - RNA, 22 nt, Human
cagugagggcccccuuccaggu

SEQ ID NO: 658466 - RNA, 22 nt, Human
ucucacugauuugagaccaagg

SEQ ID NO: 658467 - RNA, 21 nt, Human
ucagucauugccuccuucugg

SEQ ID NO: 658468 - RNA, 22 nt, Human
uuuuaucagcagggauaacaag

SEQ ID NO: 658469 - RNA, 22 nt, Human
aagagagagugcgcucacagaa

SEQ ID NO: 658470 - RNA, 22 nt, Human
uguagaaguucuucaggagaau

SEQ ID NO: 658471 - RNA, 22 nt, Human
uaagacacgggcugaucuaaag

SEQ ID NO: 658472 - RNA, 22 nt, Human
ccaccaagucccacuauaauuu

SEQ ID NO: 658473 - RNA, 22 nt, Human
uggggucuggaguugcccauga

SEQ ID NO: 658474 - RNA, 22 nt, Human
uaaagugaaggucauaaugauu

SEQ ID NO: 658475 - RNA, 22 nt, Human
augugcuugacuacucucuauu

SEQ ID NO: 658476 - RNA, 23 nt, Human
augcucugggcugugggaccugc

SEQ ID NO: 658477 - RNA, 22 nt, Human
gugucccagccccacaggccug

SEQ ID NO: 658478 - RNA, 22 nt, Human
uuucuucuguuuguaguuacac

SEQ ID NO: 658479 - RNA, 22 nt, Human
uucuguauguacauauguguau

SEQ ID NO: 658480 - RNA, 22 nt, Human
acagcuguauucaaguugcaag

SEQ ID NO: 658481 - RNA, 22 nt, Human
ugaaaugaagggcuuguucugg

SEQ ID NO: 658482 - RNA, 20 nt, Human
guaggcauaugaccaauuac

SEQ ID NO: 658483 - RNA, 22 nt, Human
ugucucuuuggccucccauaug

SEQ ID NO: 658484 - RNA, 22 nt, Human
gcugauaaauaguugauguacc

SEQ ID NO: 658485 - RNA, 21 nt, Human
uuuaauuugcauguaugacgc

SEQ ID NO: 658486 - RNA, 22 nt, Human
ucaugcagguuuccagccagau

SEQ ID NO: 658487 - RNA, 22 nt, Human
ccuggcacaucuaacucacucu

SEQ ID NO: 658488 - RNA, 22 nt, Human
ggguccagcgacagcaggcuca

SEQ ID NO: 658489 - RNA, 22 nt, Human
uagagcagccuucagagcaguu

SEQ ID NO: 658490 - RNA, 19 nt, Human
uucuccagccugaccugag

SEQ ID NO: 658491 - RNA, 22 nt, Human
aacuugcuucaacuuauuucac

SEQ ID NO: 658492 - RNA, 22 nt, Human
auacagguguacacacaugcaa

SEQ ID NO: 658493 - RNA, 22 nt, Human
augcuguguccuagugaaagaa

SEQ ID NO: 658494 - RNA, 22 nt, Human
caaagguaguauauauauuguu

SEQ ID NO: 658495 - RNA, 22 nt, Human
aaguaaaagcaggugugcuggg

SEQ ID NO: 658496 - RNA, 20 nt, Human
uccagcuccguguucuuccu

SEQ ID NO: 658497 - RNA, 22 nt, Human
gugcagaggacguggcggccuc

SEQ ID NO: 658498 - RNA, 22 nt, Human
aagccaaguuggaagacugaau

SEQ ID NO: 658499 - RNA, 22 nt, Human
ggagaagggacagacucagcuu

SEQ ID NO: 658500 - RNA, 22 nt, Human
ugguccuguguucuuccugccu

SEQ ID NO: 658501 - RNA, 20 nt, Human
gcauggcauguagugaagug

SEQ ID NO: 658502 - RNA, 22 nt, Human
uuagucacuucuuccuucauca

SEQ ID NO: 658503 - RNA, 22 nt, Human
accaaggagccacauacaaccu

SEQ ID NO: 658504 - RNA, 22 nt, Human
ugugugcacaggaguguuugaa

SEQ ID NO: 658505 - RNA, 22 nt, Human
gcugcccagggcugaguguccu

SEQ ID NO: 658506 - RNA, 22 nt, Human
agcuucuguucaucuuccaggc

SEQ ID NO: 658507 - RNA, 22 nt, Human
uauuuucauucugugugacugu

SEQ ID NO: 658508 - RNA, 22 nt, Human
aauuggcuuccauuuucuguuu

SEQ ID NO: 658509 - RNA, 19 nt, Human
ggagaucccgcugcagaug

SEQ ID NO: 658510 - RNA, 22 nt, Human
uaauauacuucccauaguuuga

SEQ ID NO: 658511 - RNA, 22 nt, Human
uaaaggcaauucagcaagccac

SEQ ID NO: 658512 - RNA, 22 nt, Human
gggccugagacugagggugagg

SEQ ID NO: 658513 - RNA, 21 nt, Human
cccuaacucuaaaggauccau

SEQ ID NO: 658514 - RNA, 22 nt, Human
ugagacaggagaggccccuccu

SEQ ID NO: 658515 - RNA, 20 nt, Human
uuuuccuucugaguauguug

SEQ ID NO: 658516 - RNA, 20 nt, Human
gcuuagcaggcauaguagcu

SEQ ID NO: 658517 - RNA, 22 nt, Human
ucuccagguaaauggcauccug

SEQ ID NO: 658518 - RNA, 22 nt, Human
cuccagggaugagacagaguag

SEQ ID NO: 658519 - RNA, 22 nt, Human
gcuggaggaucacuugagccca

SEQ ID NO: 658520 - RNA, 22 nt, Human
aguggcagaucucuggucugga

SEQ ID NO: 658521 - RNA, 18 nt, Human
cugcuucugucugccagu

SEQ ID NO: 658522 - RNA, 22 nt, Human
guuagggagggugcauaugugu

SEQ ID NO: 658523 - RNA, 22 nt, Human
ccaucauuugauacagcugucu

SEQ ID NO: 658524 - RNA, 22 nt, Human
cccaggaggucgaagcugcagu

SEQ ID NO: 658525 - RNA, 22 nt, Human
cccagaaggucgaggcugcagu

SEQ ID NO: 658526 - RNA, 22 nt, Human
augggcagacagggagcucacg

SEQ ID NO: 658527 - RNA, 22 nt, Human
uuacagaguucgcaccuggugg

SEQ ID NO: 658528 - RNA, 22 nt, Human
agggccucgggcucaguggguc

SEQ ID NO: 658529 - RNA, 22 nt, Human
uguuuucagaugcagggacaca

SEQ ID NO: 658530 - RNA, 22 nt, Human
ugaugaaaauaugauucugagg

SEQ ID NO: 658531 - RNA, 22 nt, Human
caaaguuaugaaugauaagauu

SEQ ID NO: 658532 - RNA, 22 nt, Human
aguuuccugggagauucuuaca

SEQ ID NO: 658533 - RNA, 22 nt, Human
uggggucgaggguucucuggca

SEQ ID NO: 658534 - RNA, 22 nt, Human
cuuacacagucuggcacuucuu

SEQ ID NO: 658535 - RNA, 22 nt, Human
ggggagcuuagggucucugaau

SEQ ID NO: 658536 - RNA, 22 nt, Human
gagggaggcaucaugaauccag

SEQ ID NO: 658537 - RNA, 22 nt, Human
ccucggagaaaggcagcuccac

SEQ ID NO: 658538 - RNA, 23 nt, Human
cagaugugcaacucuaggcaaug

SEQ ID NO: 658539 - RNA, 22 nt, Human
ggguuaggucccucccuucugg

SEQ ID NO: 658540 - RNA, 22 nt, Human
ccuggacuguguccugugguca

SEQ ID NO: 658541 - RNA, 22 nt, Human
ccucaaauaaguuuuauuuauc

SEQ ID NO: 658542 - RNA, 22 nt, Human
ugggaugaguuguuaggacuga

SEQ ID NO: 658543 - RNA, 22 nt, Human
uccucagcauuagcacagacau

SEQ ID NO: 658544 - RNA, 22 nt, Human
agcauuccacacugaagucugc

SEQ ID NO: 658545 - RNA, 22 nt, Human
uagaaaauagggccuguggagc

SEQ ID NO: 658546 - RNA, 22 nt, Human
cuccaaguccgagggcucucaa

SEQ ID NO: 658547 - RNA, 22 nt, Human
cugggaaauggcuucgagcuca

SEQ ID NO: 658548 - RNA, 22 nt, Human
uaaagacaauaggaaaguuguu

SEQ ID NO: 658549 - RNA, 22 nt, Human
caaaucacaaugugagacugag

SEQ ID NO: 658550 - RNA, 22 nt, Human
acccacagccgcugugcguccc

SEQ ID NO: 658551 - RNA, 22 nt, Human
uuuguuuacucauucauugaug

SEQ ID NO: 658552 - RNA, 22 nt, Human
ugccugggacuguacuaaauuu

SEQ ID NO: 658553 - RNA, 22 nt, Human
ugucugaaggcagguggagaac

SEQ ID NO: 658554 - RNA, 22 nt, Human
ccagguggugccucuguucgca

SEQ ID NO: 658555 - RNA, 22 nt, Human
gccugagauucccggagccgug

SEQ ID NO: 658556 - RNA, 22 nt, Human
ugggcacuauggcucugugcac

SEQ ID NO: 658557 - RNA, 22 nt, Human
ucugcuuuuucauugacugaaa

SEQ ID NO: 658558 - RNA, 22 nt, Human
ggcaaagccuuccagcuguuac

SEQ ID NO: 658559 - RNA, 22 nt, Human
ggccagcucagucuccaucagg

SEQ ID NO: 658560 - RNA, 22 nt, Human
agugcuuugugcucucacugca

SEQ ID NO: 658561 - RNA, 19 nt, Human
agucaguucugaggaggaa

SEQ ID NO: 658562 - RNA, 22 nt, Human
caggugggccaugaaaaaugac

SEQ ID NO: 658563 - RNA, 22 nt, Human
aaaaugugaucuacaaaugcaa

SEQ ID NO: 658564 - RNA, 22 nt, Human
gcaaacuguuggaguagagucu

SEQ ID NO: 658565 - RNA, 22 nt, Human
cagguugggcugcgaggaggag

SEQ ID NO: 658566 - RNA, 22 nt, Human
uagcagaguaauacuuuggagc

SEQ ID NO: 658567 - RNA, 22 nt, Human
gcacccagauauugccuugacc

SEQ ID NO: 658568 - RNA, 22 nt, Human
uucacccacuagagaacucagg

SEQ ID NO: 658569 - RNA, 20 nt, Human
gaaccucucccagccccugg

SEQ ID NO: 658570 - RNA, 22 nt, Human
cagugagcacggccagagggga

SEQ ID NO: 658571 - RNA, 22 nt, Human
ucacuggcaacuugugcucccu

SEQ ID NO: 658572 - RNA, 22 nt, Human
ugagaggauauuuugggaggau

SEQ ID NO: 658573 - RNA, 22 nt, Human
ggcugccuccucgagacaggau

SEQ ID NO: 658574 - RNA, 17 nt, Human
agucugggaccugcgug

SEQ ID NO: 658575 - RNA, 22 nt, Human
uucauuacugcgguagucacac

SEQ ID NO: 658576 - RNA, 22 nt, Human
cccugcugugucccaccuggaa

SEQ ID NO: 658577 - RNA, 22 nt, Human
cagugauguuucugcaucagag

SEQ ID NO: 658578 - RNA, 22 nt, Human
gcagggacaucuucagaucacu

SEQ ID NO: 658579 - RNA, 22 nt, Human
ucgcauuugggcaggagaugcu

SEQ ID NO: 658580 - RNA, 22 nt, Human
accugaggcuguuagucuaggu

SEQ ID NO: 658581 - RNA, 22 nt, Human
uauguacauacaugugcauacg

SEQ ID NO: 658582 - RNA, 18 nt, Human
cgauguguaugugauuug

SEQ ID NO: 658583 - RNA, 22 nt, Human
cgugcaaauauaugugugauga

SEQ ID NO: 658584 - RNA, 22 nt, Human
auccuuaagaaaguuuucuaua

SEQ ID NO: 658585 - RNA, 22 nt, Human
caauuauauuuagaaugauaca

SEQ ID NO: 658586 - RNA, 22 nt, Human
uguauuuucagaguggcauuuc

SEQ ID NO: 658587 - RNA, 21 nt, Human
ucuggagcccuaagcugagaa

SEQ ID NO: 658588 - RNA, 18 nt, Human
cagugucuugguaaaaua

SEQ ID NO: 658589 - RNA, 22 nt, Human
agcagcauaucagagaaaguca

SEQ ID NO: 658590 - RNA, 22 nt, Human
uccuguaguugcuaaguuuguu

SEQ ID NO: 658591 - RNA, 22 nt, Human
uagaaagugguugagaguuuag

SEQ ID NO: 658592 - RNA, 22 nt, Human
cauuuacaauguacagguugug

SEQ ID NO: 658593 - RNA, 22 nt, Human
ucacugcaaccucugccuuccg

SEQ ID NO: 658594 - RNA, 22 nt, Human
uggcugcagacaccuauggcag

SEQ ID NO: 658595 - RNA, 21 nt, Human
gcuuuagauuuagugagccag

SEQ ID NO: 658596 - RNA, 22 nt, Human
gauucaauguugcagauggaau

SEQ ID NO: 658597 - RNA, 22 nt, Human
ugcugcacucaccaacagauaa

SEQ ID NO: 658598 - RNA, 22 nt, Human
ugauuaaagguggaaggcaggu

SEQ ID NO: 658599 - RNA, 22 nt, Human
ucucccucauuccugcuuccau

SEQ ID NO: 658600 - RNA, 22 nt, Human
gaguuauauuugcgauauugga

SEQ ID NO: 658601 - RNA, 22 nt, Human
auuuugacugcauuacagaaca

SEQ ID NO: 658602 - RNA, 22 nt, Human
cuccaaaggauaaaagcagagu

SEQ ID NO: 658603 - RNA, 22 nt, Human
aucuucaucaaguucacagugg

SEQ ID NO: 658604 - RNA, 22 nt, Human
agcuaggagauuuugugaggcu

SEQ ID NO: 658605 - RNA, 22 nt, Human
agcugucuuucugccuccugau

SEQ ID NO: 658606 - RNA, 22 nt, Human
cuaaggaauuggagcauguguu

SEQ ID NO: 658607 - RNA, 22 nt, Human
ccugacucuggccaggccagcu

SEQ ID NO: 658608 - RNA, 22 nt, Human
ggcagacuguaauaggagaauu

SEQ ID NO: 658609 - RNA, 22 nt, Human
aagaacugugcuccaggcucca

SEQ ID NO: 658610 - RNA, 22 nt, Human
aauugcuuaguugcaacuaugc

SEQ ID NO: 658611 - RNA, 22 nt, Human
uuaauaaguaguaguuauuguu

SEQ ID NO: 658612 - RNA, 22 nt, Human
aggcacuugcauugaugagguc

SEQ ID NO: 658613 - RNA, 22 nt, Human
agcagcaguugcugacguucua

SEQ ID NO: 658614 - RNA, 22 nt, Human
uuccccaggggcuccugccuuu

SEQ ID NO: 658615 - RNA, 22 nt, Human
ucugauuucucuuguggaugcu

SEQ ID NO: 658616 - RNA, 22 nt, Human
gacaggggcuuugcaugcuuua

SEQ ID NO: 658617 - RNA, 22 nt, Human
ugauucaacuuucauaacaaaa

SEQ ID NO: 658618 - RNA, 22 nt, Human
gacugugggcucuguuugucuu

SEQ ID NO: 658619 - RNA, 22 nt, Human
ugccauagcaaugguaagcuga

SEQ ID NO: 658620 - RNA, 22 nt, Human
aucuggaggcauuacucugucu

SEQ ID NO: 658621 - RNA, 22 nt, Human
acauucuuugaguuuuguuaaa

SEQ ID NO: 658622 - RNA, 22 nt, Human
ggagggagggcuagaccaaaga

SEQ ID NO: 658623 - RNA, 22 nt, Human
gagcacagcugucuugcaagcu

SEQ ID NO: 658624 - RNA, 20 nt, Human
ggcagcucuagucgaggccc

SEQ ID NO: 658625 - RNA, 22 nt, Human
ccggcgucucuuccacuuccua

SEQ ID NO: 658626 - RNA, 22 nt, Human
cuucccauauaacuaauuucug

SEQ ID NO: 658627 - RNA, 22 nt, Human
gagcuccaccaccuucaggcag

SEQ ID NO: 658628 - RNA, 22 nt, Human
uguacauuuucucagaguuuau

SEQ ID NO: 658629 - RNA, 22 nt, Human
ucaguggauugacaugaaaaag

SEQ ID NO: 658630 - RNA, 22 nt, Human
gucucaguuugaagugaugcca

SEQ ID NO: 658631 - RNA, 22 nt, Human
uggaacaaggguucauuuaaau

SEQ ID NO: 658632 - RNA, 22 nt, Human
ucagcagggccaugcucucucu

SEQ ID NO: 658633 - RNA, 22 nt, Human
auaucuucuuuauuuugugagg

SEQ ID NO: 658634 - RNA, 22 nt, Human
uuccagaaaacgcuuuauuuag

SEQ ID NO: 658635 - RNA, 17 nt, Human
acaugggcugagacucc

SEQ ID NO: 658636 - RNA, 22 nt, Human
gccugcuuccuuuucauagaug

SEQ ID NO: 658637 - RNA, 22 nt, Human
cuggucaauaaucauguaguac

SEQ ID NO: 658638 - RNA, 22 nt, Human
cauccagaguccaaggcugggc

SEQ ID NO: 658639 - RNA, 23 nt, Human
uuuccaggugaccgucagaauua

SEQ ID NO: 658640 - RNA, 21 nt, Human
agacacagggguugcuggggu

SEQ ID NO: 658641 - RNA, 22 nt, Human
ucacuucuucagcuuuccuuga

SEQ ID NO: 658642 - RNA, 18 nt, Human
ugucucuccuuucugugu

SEQ ID NO: 658643 - RNA, 22 nt, Human
ggcuuuaaggaguaaaaaugcc

SEQ ID NO: 658644 - RNA, 22 nt, Human
cuuuucuuauguggacguaccu

SEQ ID NO: 658645 - RNA, 22 nt, Human
uagcuguuuuuugugaggaaau

SEQ ID NO: 658646 - RNA, 22 nt, Human
ccuggagauuauuugguccaau

SEQ ID NO: 658647 - RNA, 22 nt, Human
acacagagauguaaaguuaggc

SEQ ID NO: 658648 - RNA, 22 nt, Human
uuuuucuggauaacuguaucuc

SEQ ID NO: 658649 - RNA, 22 nt, Human
gcaguuuacugucaauaacucu

SEQ ID NO: 658650 - RNA, 22 nt, Human
uucuggagagaaaccuuacaaa

SEQ ID NO: 658651 - RNA, 22 nt, Human
cuguccagcugaccagagcagc

SEQ ID NO: 658652 - RNA, 22 nt, Human
ccuggacacccauuccuuggcu

SEQ ID NO: 658653 - RNA, 22 nt, Human
uacuucauaccugcuagaaugg

SEQ ID NO: 658654 - RNA, 22 nt, Human
cuuauacacccucuucccaggc

SEQ ID NO: 658655 - RNA, 22 nt, Human
ucccugcccucagugcacccgg

SEQ ID NO: 658656 - RNA, 22 nt, Human
aauccaugcaugcaaggaaagg

SEQ ID NO: 658657 - RNA, 22 nt, Human
uaccuggauguuuagauuggca

SEQ ID NO: 658658 - RNA, 22 nt, Human
cugcccugggauggucugugcg

SEQ ID NO: 658659 - RNA, 18 nt, Human
auuucucuggggugauuc

SEQ ID NO: 658660 - RNA, 22 nt, Human
aagcacacaucucuggcugggu

SEQ ID NO: 658661 - RNA, 22 nt, Human
uccugagguggauugagcagag

SEQ ID NO: 658662 - RNA, 22 nt, Human
gcagugaagccagaucugaaau

SEQ ID NO: 658663 - RNA, 22 nt, Human
uaaauguaaauggcgucuugcg

SEQ ID NO: 658664 - RNA, 22 nt, Human
uaaaugugcacuuuacuuuuca

SEQ ID NO: 658665 - RNA, 22 nt, Human
aaaugcaggaaauuaugcuuuu

SEQ ID NO: 658666 - RNA, 22 nt, Human
agacauaagcgagcaucacagg

SEQ ID NO: 658667 - RNA, 22 nt, Human
ugaggccagagaguuugcauuu

SEQ ID NO: 658668 - RNA, 22 nt, Human
aacaaccaaaaagaugaaugua

SEQ ID NO: 658669 - RNA, 19 nt, Human
gcuggccacgccccaguug

SEQ ID NO: 658670 - RNA, 22 nt, Human
aagcacuuuagugagaauaagg

SEQ ID NO: 658671 - RNA, 21 nt, Human
aaggaaaagcuuggucucuga

SEQ ID NO: 658672 - RNA, 22 nt, Human
aauggccuguauggaaagugaa

SEQ ID NO: 658673 - RNA, 22 nt, Human
uaucuacauguagguauguaug

SEQ ID NO: 658674 - RNA, 22 nt, Human
ugggagaguuuguuuagaguga

SEQ ID NO: 658675 - RNA, 22 nt, Human
ggagggccaucuugggugugau

SEQ ID NO: 658676 - RNA, 22 nt, Human
uuaacuugucagaaaauacagu

SEQ ID NO: 658677 - RNA, 22 nt, Human
uuccuuggauacaaguaacuuu

SEQ ID NO: 658678 - RNA, 22 nt, Human
uucauuaguucugaagaugucu

SEQ ID NO: 658679 - RNA, 22 nt, Human
uggcuggcuggaccacaccugc

SEQ ID NO: 658680 - RNA, 22 nt, Human
ccagaggugagggggauucuug

SEQ ID NO: 658681 - RNA, 22 nt, Human
gcagcagaggcccuacucuuug

SEQ ID NO: 658682 - RNA, 22 nt, Human
gcuguguggcaaagggauuaca

SEQ ID NO: 658683 - RNA, 22 nt, Human
cugagcaauuucagcucucacu

SEQ ID NO: 658684 - RNA, 22 nt, Human
cuggcugggcagacagaaugcu

SEQ ID NO: 658685 - RNA, 18 nt, Human
uggcagugagguaggcau

SEQ ID NO: 658686 - RNA, 22 nt, Human
uacagccuucaucuuugccuug

SEQ ID NO: 658687 - RNA, 22 nt, Human
cagacaguggacuugauaaagg

SEQ ID NO: 658688 - RNA, 22 nt, Human
augacaaaauucacagguguga

SEQ ID NO: 658689 - RNA, 22 nt, Human
uuucagagaggcuucaaaucuu

SEQ ID NO: 658690 - RNA, 22 nt, Human
cagaaccaggaacugauggaga

SEQ ID NO: 658691 - RNA, 22 nt, Human
aauguuacgaucaacaacacau

SEQ ID NO: 658692 - RNA, 22 nt, Human
aauaacagauuuucaagcugug

SEQ ID NO: 658693 - RNA, 22 nt, Human
agggacacaugugauuauuuau

SEQ ID NO: 658694 - RNA, 22 nt, Human
aguaacaggguauuuguguggg

SEQ ID NO: 658695 - RNA, 22 nt, Human
gcugucugacuccaaguuggag

SEQ ID NO: 658696 - RNA, 22 nt, Human
uguguccacgcacuggcaugau

SEQ ID NO: 658697 - RNA, 22 nt, Human
cagaacagacuuaacagggcug

SEQ ID NO: 658698 - RNA, 22 nt, Human
ugcuccaggagcacuuuccauu

SEQ ID NO: 658699 - RNA, 22 nt, Human
gcccuggccuccuggaacaggc

SEQ ID NO: 658700 - RNA, 22 nt, Human
gccaggcaauguguuagaagcg

SEQ ID NO: 658701 - RNA, 20 nt, Human
aauuuuacuguccuauagag

SEQ ID NO: 658702 - RNA, 22 nt, Human
aauauuguuucaagaucacaga

SEQ ID NO: 658703 - RNA, 22 nt, Human
uccuccuucgggacugcuugac

SEQ ID NO: 658704 - RNA, 22 nt, Human
uggcagugucuugcuggggcag

SEQ ID NO: 658705 - RNA, 22 nt, Human
auccuggaggcuggaggcuugc

SEQ ID NO: 658706 - RNA, 22 nt, Human
uucuauuucuuaaucuuggcug

SEQ ID NO: 658707 - RNA, 22 nt, Human
uuacuguagcuugacauauguc

SEQ ID NO: 658708 - RNA, 22 nt, Human
cuuguugcuaacauaugcuucu

SEQ ID NO: 658709 - RNA, 22 nt, Human
aguguguaagggaucaaagagu

SEQ ID NO: 658710 - RNA, 22 nt, Human
uggcaggaaccuuaaccacaaa

SEQ ID NO: 658711 - RNA, 22 nt, Human
ccccauggcaacugcugggggu

SEQ ID NO: 658712 - RNA, 22 nt, Human
ggcuguccuuggccaaggcacu

SEQ ID NO: 658713 - RNA, 22 nt, Human
ccuggagaccagaggauacuuc

SEQ ID NO: 658714 - RNA, 22 nt, Human
gaaagaaugcuauagugacuuc

SEQ ID NO: 658715 - RNA, 22 nt, Human
uggagcugguaaacagugacau

SEQ ID NO: 658716 - RNA, 22 nt, Human
uacagugaaugaauggcugugc

SEQ ID NO: 658717 - RNA, 18 nt, Human
ucugagggugcgggagcu

SEQ ID NO: 658718 - RNA, 22 nt, Human
uggaggcagguggaggagugaa

SEQ ID NO: 658719 - RNA, 22 nt, Human
cacagauaaggauguuaauuuu

SEQ ID NO: 658720 - RNA, 20 nt, Human
aucaccuguagguucuuugu

SEQ ID NO: 658721 - RNA, 22 nt, Human
uggcacugaagcuggaaagccu

SEQ ID NO: 658722 - RNA, 22 nt, Human
gcacugugaucaaggcuaagca

SEQ ID NO: 658723 - RNA, 22 nt, Human
uaaaaccauaaggcuggaagga

SEQ ID NO: 658724 - RNA, 22 nt, Human
ucucagaguuccucuggagucc

SEQ ID NO: 658725 - RNA, 22 nt, Human
ucagaaagcuuuuacuuaaaca

SEQ ID NO: 658726 - RNA, 22 nt, Human
uggaggaaguggacaguugugu

SEQ ID NO: 658727 - RNA, 22 nt, Human
uucagugacuuaccuggagcca

SEQ ID NO: 658728 - RNA, 22 nt, Human
uuguaaacugcugcaggagugc

SEQ ID NO: 658729 - RNA, 22 nt, Human
auauaucugcaguacugaagaa

SEQ ID NO: 658730 - RNA, 19 nt, Human
gcuguuaaggacccucgga

SEQ ID NO: 658731 - RNA, 21 nt, Human
acagcaagccuucacaugagu

SEQ ID NO: 658732 - RNA, 22 nt, Human
aguggggagguccaggccaccc

SEQ ID NO: 658733 - RNA, 22 nt, Human
cggccgcagcagugucggccca

SEQ ID NO: 658734 - RNA, 22 nt, Human
cucuguguucagccuagcagaa

SEQ ID NO: 658735 - RNA, 18 nt, Human
agccucuggcagagagaa

SEQ ID NO: 658736 - RNA, 22 nt, Human
acuaaugauuauugucauugug

SEQ ID NO: 658737 - RNA, 22 nt, Human
uuuagcaauuauuaaggguuga

SEQ ID NO: 658738 - RNA, 22 nt, Human
agauuagguaugguuuaaguag

SEQ ID NO: 658739 - RNA, 22 nt, Human
gcagcuggucuggccuagagua

SEQ ID NO: 658740 - RNA, 21 nt, Human
cucaggauggcggccuggugg

SEQ ID NO: 658741 - RNA, 22 nt, Human
cuaggcugcagaugcauggaau

SEQ ID NO: 658742 - RNA, 22 nt, Human
cuggucugagggcucuugaggc

SEQ ID NO: 658743 - RNA, 22 nt, Human
cucaaaaugguuaauuuuaaua

SEQ ID NO: 658744 - RNA, 22 nt, Human
ugucaccuugcucauccucgga

SEQ ID NO: 658745 - RNA, 22 nt, Human
ugucuucuaccuugacagcauu

SEQ ID NO: 658746 - RNA, 22 nt, Human
gugcuucacugaccuguuuuca

SEQ ID NO: 658747 - RNA, 23 nt, Human
gcacagagcaguuaggggaagau

SEQ ID NO: 658748 - RNA, 22 nt, Human
acuuuguuccuuucacaaagaa

SEQ ID NO: 658749 - RNA, 22 nt, Human
gucaggauguuuauucuccagu

SEQ ID NO: 658750 - RNA, 22 nt, Human
agaaauacugccuaagacugua

SEQ ID NO: 658751 - RNA, 22 nt, Human
cagcugugucuaauuauggcug

SEQ ID NO: 658752 - RNA, 22 nt, Human
ucugccuuucacacagacggcc

SEQ ID NO: 658753 - RNA, 22 nt, Human
uaagauaauccauuauaauguu

SEQ ID NO: 658754 - RNA, 22 nt, Human
ccaugugcuugcucuggcaccu

SEQ ID NO: 658755 - RNA, 22 nt, Human
aggugggcggauucaugagguc

SEQ ID NO: 658756 - RNA, 22 nt, Human
acacauuugcuaaaaugagcuc

SEQ ID NO: 658757 - RNA, 22 nt, Human
cuugggaggggagcauuggccu

SEQ ID NO: 658758 - RNA, 22 nt, Human
gcaauaaagauuuuacugucag

SEQ ID NO: 658759 - RNA, 22 nt, Human
ucuuugcaggccaaauuguuaa

SEQ ID NO: 658760 - RNA, 22 nt, Human
cuucuggcguuggaggucugag

SEQ ID NO: 658761 - RNA, 22 nt, Human
cugagcaccuguuauagguuag

SEQ ID NO: 658762 - RNA, 22 nt, Human
uugcaucuagggcaacccagag

SEQ ID NO: 658763 - RNA, 22 nt, Human
gaauacuuuuguuaggaaaacg

SEQ ID NO: 658764 - RNA, 22 nt, Human
uuuagaaggacuacagugugau

SEQ ID NO: 658765 - RNA, 23 nt, Human
ucagugauguugaaccuagcagu

SEQ ID NO: 658766 - RNA, 22 nt, Human
cagaacagaaucguguggugag

SEQ ID NO: 658767 - RNA, 22 nt, Human
uugcaaaagccgaggcacucca

SEQ ID NO: 658768 - RNA, 22 nt, Human
gggccuggggacaccaccauga

SEQ ID NO: 658769 - RNA, 22 nt, Human
gccuggcuaguuagugucaggu

SEQ ID NO: 658770 - RNA, 22 nt, Human
gcaggaugggagcuucacucug

SEQ ID NO: 658771 - RNA, 22 nt, Human
ccagugugccaauuuacagcug

SEQ ID NO: 658772 - RNA, 19 nt, Human
aacuacagcgcacuguccu

SEQ ID NO: 658773 - RNA, 19 nt, Human
acagggaauuuccacagaa

SEQ ID NO: 658774 - RNA, 22 nt, Human
cugauggauggacagggguagu

SEQ ID NO: 658775 - RNA, 22 nt, Human
augaagcagcguuguagaguga

SEQ ID NO: 658776 - RNA, 22 nt, Human
ugguaaauauguccauucucuu

SEQ ID NO: 658777 - RNA, 22 nt, Human
uuccaagucuaaguuauaaauc

SEQ ID NO: 658778 - RNA, 22 nt, Human
acuauacaguauguacgugcac

SEQ ID NO: 658779 - RNA, 22 nt, Human
uauucagaaaauaaauuggauu

SEQ ID NO: 658780 - RNA, 22 nt, Human
acagagguguguguaggacagu

SEQ ID NO: 658781 - RNA, 22 nt, Human
caaagguuaugaaccacuugua

SEQ ID NO: 658782 - RNA, 22 nt, Human
ccagggcaauuauuuggagggu

SEQ ID NO: 658783 - RNA, 22 nt, Human
cacuuacacuucugaaagccua

SEQ ID NO: 658784 - RNA, 22 nt, Human
guuuucaauuauaagauggcuu

SEQ ID NO: 658785 - RNA, 22 nt, Human
ugccuggggauugcucugggcc

SEQ ID NO: 658786 - RNA, 22 nt, Human
uacugcuucauauagggaugua

SEQ ID NO: 658787 - RNA, 22 nt, Human
uugucaaggcuuuuaauauucu

SEQ ID NO: 658788 - RNA, 22 nt, Human
aacauucuucaaauaucacucu

SEQ ID NO: 658789 - RNA, 22 nt, Human
aguuaaggggguucaucuguaa

SEQ ID NO: 658790 - RNA, 22 nt, Human
cgggucaccuaucaauuuugug

SEQ ID NO: 658791 - RNA, 22 nt, Human
accgggaaguccugcacugggc

SEQ ID NO: 658792 - RNA, 22 nt, Human
uuuacagagagagaacuggacu

SEQ ID NO: 658793 - RNA, 22 nt, Human
gacaagacuauguagaaaguau

SEQ ID NO: 658794 - RNA, 22 nt, Human
aauucuucaagugcuuuggaga

SEQ ID NO: 658795 - RNA, 22 nt, Human
aacugcuuugugagcuuucugg

SEQ ID NO: 658796 - RNA, 22 nt, Human
auuugcauuuacauagcauaga

SEQ ID NO: 658797 - RNA, 18 nt, Human
ccagauggccagucugcu

SEQ ID NO: 658798 - RNA, 22 nt, Human
auacaugcgccauguuggugug

SEQ ID NO: 658799 - RNA, 22 nt, Human
gaaguuguaagccugggaaggu

SEQ ID NO: 658800 - RNA, 22 nt, Human
ucauuuacgcgccuccuuccuu

SEQ ID NO: 658801 - RNA, 22 nt, Human
gucugcucaugcuaccgcgggc

SEQ ID NO: 658802 - RNA, 22 nt, Human
cucuggaguuagugaucugggc

SEQ ID NO: 658803 - RNA, 22 nt, Human
agugcucucuccccagugcuac

SEQ ID NO: 658804 - RNA, 22 nt, Human
ucacuuuuggguuuccaguaga

SEQ ID NO: 658805 - RNA, 22 nt, Human
auuggagacagaugggcuccag

SEQ ID NO: 658806 - RNA, 22 nt, Human
uccagccaccaccuugauugcc

SEQ ID NO: 658807 - RNA, 22 nt, Human
uggcucaccuucagaauauacc

SEQ ID NO: 658808 - RNA, 23 nt, Human
uuuuuaguuacaccucugccacc

SEQ ID NO: 658809 - RNA, 22 nt, Human
gcaugcagucaaccaguaaggg

SEQ ID NO: 658810 - RNA, 22 nt, Human
gugcauuggugcgccacuucac

SEQ ID NO: 658811 - RNA, 22 nt, Human
cccguguggacagcgugccagu

SEQ ID NO: 658812 - RNA, 16 nt, Human
auucugcugccugcuc

SEQ ID NO: 658813 - RNA, 22 nt, Human
ggagacugaucugagugauaac

SEQ ID NO: 658814 - RNA, 22 nt, Human
agugucuuucauauccuccauc

SEQ ID NO: 658815 - RNA, 23 nt, Human
agacccagagacuggcucugcuc

SEQ ID NO: 658816 - RNA, 22 nt, Human
aagcuauacaaugcacaaauga

SEQ ID NO: 658817 - RNA, 22 nt, Human
ggugauucugugaggggcugac

SEQ ID NO: 658818 - RNA, 19 nt, Human
gggagcuuuccaucugucc

SEQ ID NO: 658819 - RNA, 18 nt, Human
ccagcaugccagaggcug

SEQ ID NO: 658820 - RNA, 22 nt, Human
uguguguaaggaagcuuuaugg

SEQ ID NO: 658821 - RNA, 22 nt, Human
gaggcugcggggaggagccugc

SEQ ID NO: 658822 - RNA, 22 nt, Human
ugcuuacaacuuuauugaggaa

SEQ ID NO: 658823 - RNA, 22 nt, Human
guuuugaagaagaccuugaaac

SEQ ID NO: 658824 - RNA, 22 nt, Human
ucuaaacuuguaaacaagcaua

SEQ ID NO: 658825 - RNA, 22 nt, Human
augagcugggccauccagugau

SEQ ID NO: 658826 - RNA, 22 nt, Human
cagacaaggccaucuuucauuu

SEQ ID NO: 658827 - RNA, 22 nt, Human
ucaggaagaagacggggcagga

SEQ ID NO: 658828 - RNA, 21 nt, Human
cauuuacaugacagauugguu

SEQ ID NO: 658829 - RNA, 22 nt, Human
uguaacauauagcauguucuug

SEQ ID NO: 658830 - RNA, 22 nt, Human
uucugccuuggcaggguggucc

SEQ ID NO: 658831 - RNA, 22 nt, Human
agcacagagguggaaguguaua

SEQ ID NO: 658832 - RNA, 22 nt, Human
aauuugauucagcaaauguuca

SEQ ID NO: 658833 - RNA, 22 nt, Human
aguauuuguggauuuguauugg

SEQ ID NO: 658834 - RNA, 22 nt, Human
cucuggguccuggggcuacaag

SEQ ID NO: 658835 - RNA, 22 nt, Human
agccucugguccucccucagcu

SEQ ID NO: 658836 - RNA, 22 nt, Human
ccaagcuggauuuagcugcaca

SEQ ID NO: 658837 - RNA, 20 nt, Human
cucugggcugcacccucgcc

SEQ ID NO: 658838 - RNA, 22 nt, Human
gaguguucccacaccccaguug

SEQ ID NO: 658839 - RNA, 22 nt, Human
caaucacugaccugcagaugca

SEQ ID NO: 658840 - RNA, 22 nt, Human
uuucugcuaaucuuuuacugag

SEQ ID NO: 658841 - RNA, 22 nt, Human
uauuccuguuccccaucaccac

SEQ ID NO: 658842 - RNA, 22 nt, Human
acccagguggcucugacggggg

SEQ ID NO: 658843 - RNA, 22 nt, Human
aguauuuagagacacaagaugg

SEQ ID NO: 658844 - RNA, 22 nt, Human
ugcagccugguggucacuggag

SEQ ID NO: 658845 - RNA, 22 nt, Human
aguggacccggaacagaggccc

SEQ ID NO: 658846 - RNA, 22 nt, Human
augcucacuucagagaagauga

SEQ ID NO: 658847 - RNA, 22 nt, Human
agacacagaaguugcuguuggg

SEQ ID NO: 658848 - RNA, 22 nt, Human
agguuuauuaaguaaauagagc

SEQ ID NO: 658849 - RNA, 22 nt, Human
agagcuguguuuaguaguuacg

SEQ ID NO: 658850 - RNA, 22 nt, Human
cagcuucauugccugaugucuu

SEQ ID NO: 658851 - RNA, 21 nt, Human
ggcaggauggcaguggacccc

SEQ ID NO: 658852 - RNA, 22 nt, Human
ucacagugacagccaauguuuu

SEQ ID NO: 658853 - RNA, 22 nt, Human
cagagaagaaagugacuauaau

SEQ ID NO: 658854 - RNA, 22 nt, Human
ugggaagcugcauuuuaacaag

SEQ ID NO: 658855 - RNA, 22 nt, Human
ggcugccugccuccaagccggg

SEQ ID NO: 658856 - RNA, 22 nt, Human
ugagucugcuccugguagcaga

SEQ ID NO: 658857 - RNA, 22 nt, Human
uuugaaaguucuucugacacua

SEQ ID NO: 658858 - RNA, 22 nt, Human
uuuucauuguaaaucaggaaac

SEQ ID NO: 658859 - RNA, 20 nt, Human
uucuuuacgaccuuucugca

SEQ ID NO: 658860 - RNA, 22 nt, Human
guuacaaacucaggugccaaaa

SEQ ID NO: 658861 - RNA, 22 nt, Human
acacaaacagucuauagcacca

SEQ ID NO: 658862 - RNA, 22 nt, Human
acaggagaauuaucuggaacaa

SEQ ID NO: 658863 - RNA, 22 nt, Human
auauauaauacuugcugugggc

SEQ ID NO: 658864 - RNA, 22 nt, Human
uuuccagguaucaagcuucagg

SEQ ID NO: 658865 - RNA, 22 nt, Human
cuugcuugccaugggcuugggc

SEQ ID NO: 658866 - RNA, 22 nt, Human
gugguguaggucacaguuagga

SEQ ID NO: 658867 - RNA, 22 nt, Human
uggggcacuuaugaugugccac

SEQ ID NO: 658868 - RNA, 22 nt, Human
gcuggaagaaugagugccucgu

SEQ ID NO: 658869 - RNA, 22 nt, Human
auguacaaaauguuuugaaaug

SEQ ID NO: 658870 - RNA, 22 nt, Human
acagugucugacacguaggaag

SEQ ID NO: 658871 - RNA, 22 nt, Human
aaggggcucuugucaggcgcag

SEQ ID NO: 658872 - RNA, 19 nt, Human
ugagacagaagaugagccu

SEQ ID NO: 658873 - RNA, 22 nt, Human
aggucucaaucucaggugguca

SEQ ID NO: 658874 - RNA, 22 nt, Human
acagggcaugugcaagagacau

SEQ ID NO: 658875 - RNA, 22 nt, Human
ugaaagaaacagguauauuggg

SEQ ID NO: 658876 - RNA, 22 nt, Human
uaaaucacuguacuuuauuccu

SEQ ID NO: 658877 - RNA, 22 nt, Human
uaucuauuauguucuauguguc

SEQ ID NO: 658878 - RNA, 22 nt, Human
uugccagggucaggaugagauc

SEQ ID NO: 658879 - RNA, 22 nt, Human
gucccaggaguugcugggccuu

SEQ ID NO: 658880 - RNA, 19 nt, Human
gccugggaugggcagaacu

SEQ ID NO: 658881 - RNA, 22 nt, Human
gcauccaucagcagauugacug

SEQ ID NO: 658882 - RNA, 17 nt, Human
agagggcucaaggcauc

SEQ ID NO: 658883 - RNA, 22 nt, Human
aagaacaugaacacaauguuua

SEQ ID NO: 658884 - RNA, 22 nt, Human
accgaaggaaacuggaaccguu

SEQ ID NO: 658885 - RNA, 22 nt, Human
aacagaauuguacaccagggag

SEQ ID NO: 658886 - RNA, 22 nt, Human
acagugugguuugagcacuggg

SEQ ID NO: 658887 - RNA, 18 nt, Human
aaugugaauauuuacuuc

SEQ ID NO: 658888 - RNA, 22 nt, Human
cauggcuucgcgcguccccgcu

SEQ ID NO: 658889 - RNA, 22 nt, Human
gugcugcuugggggcagagcag

SEQ ID NO: 658890 - RNA, 22 nt, Human
aggccucuugucuuccucacau

SEQ ID NO: 658891 - RNA, 22 nt, Human
cucugccaucucacuggguccu

SEQ ID NO: 658892 - RNA, 22 nt, Human
cugggacccacaccuggaaucu

SEQ ID NO: 658893 - RNA, 22 nt, Human
ugcuggcuuuuugugucaaaga

SEQ ID NO: 658894 - RNA, 22 nt, Human
aaaaguaauugcaguuuugcca

SEQ ID NO: 658895 - RNA, 22 nt, Human
acauugcaauaauaauucucuu

SEQ ID NO: 658896 - RNA, 22 nt, Human
gccugugucauguaguagcuuc

SEQ ID NO: 658897 - RNA, 22 nt, Human
gcucaaaugucauggggagccu

SEQ ID NO: 658898 - RNA, 22 nt, Human
gaguagacauuaaauuacacug

SEQ ID NO: 658899 - RNA, 22 nt, Human
uuuacacaaaauguuaguagau

SEQ ID NO: 658900 - RNA, 21 nt, Human
ucugaugguagaugagaugug

SEQ ID NO: 658901 - RNA, 22 nt, Human
ucaggagcuugguagugugauu

SEQ ID NO: 658902 - RNA, 22 nt, Human
ccagggcaucacauccaguguu

SEQ ID NO: 658903 - RNA, 22 nt, Human
uagaaaugucgucuccacauuu

SEQ ID NO: 658904 - RNA, 22 nt, Human
uauagguaugucgagaaaugaa

SEQ ID NO: 658905 - RNA, 22 nt, Human
aucacacuggacauuggauacu

SEQ ID NO: 658906 - RNA, 22 nt, Human
ggcaggcaggucuucauggccc

SEQ ID NO: 658907 - RNA, 22 nt, Human
uauuuguauuucaugcaguaaa

SEQ ID NO: 658908 - RNA, 22 nt, Human
ugucugaugauagugucucucc

SEQ ID NO: 658909 - RNA, 22 nt, Human
ccaggccaguguuugguccagg

SEQ ID NO: 658910 - RNA, 22 nt, Human
cuggcagcugugugaagaacug

SEQ ID NO: 658911 - RNA, 22 nt, Human
uaggggcagaagcggcggucca

SEQ ID NO: 658912 - RNA, 22 nt, Human
aggagguggcaacugucgacag

SEQ ID NO: 658913 - RNA, 22 nt, Human
uauuucaagaacuucuauccau

SEQ ID NO: 658914 - RNA, 22 nt, Human
gcugcagaauuuccuucucauu

SEQ ID NO: 658915 - RNA, 22 nt, Human
cacagggaguuacagaagcacu

SEQ ID NO: 658916 - RNA, 17 nt, Human
agugucagaagacaguu

SEQ ID NO: 658917 - RNA, 22 nt, Human
cuggaaagauuucuuuggaguc

SEQ ID NO: 658918 - RNA, 22 nt, Human
aaugcuucaaccucccacaugu

SEQ ID NO: 658919 - RNA, 22 nt, Human
gugugcgccgacacagccaggu

SEQ ID NO: 658920 - RNA, 22 nt, Human
cugugccacugggggccggcaa

SEQ ID NO: 658921 - RNA, 22 nt, Human
ugaggucuuuuauaguguguca

SEQ ID NO: 658922 - RNA, 22 nt, Human
auuguaucuugucauuaugcau

SEQ ID NO: 658923 - RNA, 22 nt, Human
uucugcauaggcuauauuuguu

SEQ ID NO: 658924 - RNA, 22 nt, Human
cuuuccagauuuguccaguuau

SEQ ID NO: 658925 - RNA, 22 nt, Human
uuccuagaaugguuagaaaaua

SEQ ID NO: 658926 - RNA, 22 nt, Human
cuggcuuucucugugguguuca

SEQ ID NO: 658927 - RNA, 22 nt, Human
ugccccugaccucaggcgaagg

SEQ ID NO: 658928 - RNA, 22 nt, Human
ccaggagucaauaaaggaagcu

SEQ ID NO: 658929 - RNA, 22 nt, Human
ccugugggagguucugugaguc

SEQ ID NO: 658930 - RNA, 22 nt, Human
acagcagcacuauugacauuuu

SEQ ID NO: 658931 - RNA, 22 nt, Human
aaaaggcagugcaagagagggu

SEQ ID NO: 658932 - RNA, 22 nt, Human
guauuuuuaguagagucggggu

SEQ ID NO: 658933 - RNA, 22 nt, Human
ugggccagagaguaagaaaggu

SEQ ID NO: 658934 - RNA, 22 nt, Human
ccagcagcugcuaugugguuuu

SEQ ID NO: 658935 - RNA, 22 nt, Human
gcuguggguuccuggcauuuga

SEQ ID NO: 658936 - RNA, 22 nt, Human
gaaggagaggauugugaggcug

SEQ ID NO: 658937 - RNA, 22 nt, Human
cugccugggccggccacccucu

SEQ ID NO: 658938 - RNA, 22 nt, Human
gccuggcaggccucaugagggg

SEQ ID NO: 658939 - RNA, 22 nt, Human
gccaggaauuucaagagccacu

SEQ ID NO: 658940 - RNA, 23 nt, Human
ggccuccuggucuaggcuagacu

SEQ ID NO: 658941 - RNA, 22 nt, Human
augucaacaggccuuuaaacau

SEQ ID NO: 658942 - RNA, 22 nt, Human
uugaaaggaauacagaggccua

SEQ ID NO: 658943 - RNA, 22 nt, Human
ggcugaguugagaggauuacuu

SEQ ID NO: 658944 - RNA, 22 nt, Human
ggccucugggguccugagccca

SEQ ID NO: 658945 - RNA, 22 nt, Human
ugugaggagaggcccagcuccc

SEQ ID NO: 658946 - RNA, 22 nt, Human
acuugaauuauauuucuagaga

SEQ ID NO: 658947 - RNA, 22 nt, Human
gccaggcuaagaaaggugugau

SEQ ID NO: 658948 - RNA, 22 nt, Human
gcucucuuuccauguggaggau

SEQ ID NO: 658949 - RNA, 22 nt, Human
ggcucaggaccugggauugcca

SEQ ID NO: 658950 - RNA, 22 nt, Human
ccagagucugugugugucaucc

SEQ ID NO: 658951 - RNA, 21 nt, Human
guucuugcaggauuuccuucc

SEQ ID NO: 658952 - RNA, 21 nt, Human
cucucugcuuaugaauaguga

SEQ ID NO: 658953 - RNA, 22 nt, Human
ucacaguuacuccuucagauga

SEQ ID NO: 658954 - RNA, 22 nt, Human
uauugauuccugcuuucugcuc

SEQ ID NO: 658955 - RNA, 22 nt, Human
cccucgcucuaggcagcccugu

SEQ ID NO: 658956 - RNA, 22 nt, Human
aaagcaauggaugagaaucugu

SEQ ID NO: 658957 - RNA, 22 nt, Human
uuaaauagucaaaucaguggca

SEQ ID NO: 658958 - RNA, 22 nt, Human
agagggugcuggagagacauug

SEQ ID NO: 658959 - RNA, 21 nt, Human
gccugggaagagaaagguaag

SEQ ID NO: 658960 - RNA, 22 nt, Human
uuuacuuugugucaagucaaga

SEQ ID NO: 658961 - RNA, 22 nt, Human
acaggcuguugggguccagggu

SEQ ID NO: 658962 - RNA, 20 nt, Human
ucacuaguaaccaucugcuu

SEQ ID NO: 658963 - RNA, 22 nt, Human
uaggcugaaaggagaggugaag

SEQ ID NO: 658964 - RNA, 22 nt, Human
uguauugaauuguguuauaucu

SEQ ID NO: 658965 - RNA, 22 nt, Human
auuuacagccuugccaucuaua

SEQ ID NO: 658966 - RNA, 22 nt, Human
uuaguguacuuagugcucuaag

SEQ ID NO: 658967 - RNA, 22 nt, Human
aucaucuuaaaucuagaaugug

SEQ ID NO: 658968 - RNA, 22 nt, Human
gcacacagggauuuuugaaugg

SEQ ID NO: 658969 - RNA, 22 nt, Human
ggccucuggugccugaagcgcc

SEQ ID NO: 658970 - RNA, 22 nt, Human
ccugcacagccuuggcugacac

SEQ ID NO: 658971 - RNA, 22 nt, Human
ugugaggaacccggaauguggg

SEQ ID NO: 658972 - RNA, 22 nt, Human
cucuggucaagcaaagagguuu

SEQ ID NO: 658973 - RNA, 22 nt, Human
caaugugugcuuacaggccagu

SEQ ID NO: 658974 - RNA, 22 nt, Human
uccaggugggcugcacccaggc

SEQ ID NO: 658975 - RNA, 22 nt, Human
agcuggucuuaaauguguccag

SEQ ID NO: 658976 - RNA, 22 nt, Human
caccuggacccugggaggaggg

SEQ ID NO: 658977 - RNA, 22 nt, Human
agaggcucuuugagcugggaga

SEQ ID NO: 658978 - RNA, 22 nt, Human
agcugugugcauuugggucuca

SEQ ID NO: 658979 - RNA, 22 nt, Human
cuaagaggaaguacucuguuau

SEQ ID NO: 658980 - RNA, 22 nt, Human
cuagagaaacgccgugggagga

SEQ ID NO: 658981 - RNA, 22 nt, Human
accaggcaaaaccacaggagca

SEQ ID NO: 658982 - RNA, 17 nt, Human
gcugcagcgguaggcag

SEQ ID NO: 658983 - RNA, 22 nt, Human
gcagcaacgcggcccuacugcu

SEQ ID NO: 658984 - RNA, 22 nt, Human
cccugcucuucugacucaagcu

SEQ ID NO: 658985 - RNA, 22 nt, Human
gcagagccugacgggauuuuuc

SEQ ID NO: 658986 - RNA, 22 nt, Human
auuauggacguuaauuuuggaa

SEQ ID NO: 658987 - RNA, 19 nt, Human
cagaacagcugggaagaga

SEQ ID NO: 658988 - RNA, 22 nt, Human
uucuuaacucaaauauauaucc

SEQ ID NO: 658989 - RNA, 22 nt, Human
uguccuggccuccagaaagucg

SEQ ID NO: 658990 - RNA, 22 nt, Human
aaagaugcauaaaugccaaugg

SEQ ID NO: 658991 - RNA, 22 nt, Human
aggaggcaggaagucuauggga

SEQ ID NO: 658992 - RNA, 23 nt, Human
cagcuuucagggcuuuagggaag

SEQ ID NO: 658993 - RNA, 22 nt, Human
aaaggcauggaacagauucucc

SEQ ID NO: 658994 - RNA, 22 nt, Human
uccugagcacagagacaaggaa

SEQ ID NO: 658995 - RNA, 22 nt, Human
agccaggaauuggacaacacau

SEQ ID NO: 658996 - RNA, 22 nt, Human
auucacaugcccaagcagcacc

SEQ ID NO: 658997 - RNA, 22 nt, Human
agagauguaugcauuugucaca

SEQ ID NO: 658998 - RNA, 22 nt, Human
guggaggcagugacacaguagc

SEQ ID NO: 658999 - RNA, 23 nt, Human
aggaacugcuucauuuuugaaag

SEQ ID NO: 659000 - RNA, 22 nt, Human
gcagaggggaagcugaggaauu

SEQ ID NO: 659001 - RNA, 22 nt, Human
acacaggagaaaagaucuccca

SEQ ID NO: 659002 - RNA, 22 nt, Human
augccuggacugacaugcacug

SEQ ID NO: 659003 - RNA, 22 nt, Human
uauuucucagcauuuuacaucc

SEQ ID NO: 659004 - RNA, 18 nt, Human
gcugaaauucuaaacaaa

SEQ ID NO: 659005 - RNA, 22 nt, Human
ucaccccuugugaaugcugcuc

SEQ ID NO: 659006 - RNA, 22 nt, Human
ggugaaauuccuuguggaaagu

SEQ ID NO: 659007 - RNA, 22 nt, Human
gcuggccugcugggcaccaccg

SEQ ID NO: 659008 - RNA, 22 nt, Human
uguguuguuuuaagcugcugca

SEQ ID NO: 659009 - RNA, 22 nt, Human
gggcaugagaggcaggcaagug

SEQ ID NO: 659010 - RNA, 22 nt, Human
uagaggugagacuucagugaca

SEQ ID NO: 659011 - RNA, 22 nt, Human
caggcuggcaaugcgucaagca

SEQ ID NO: 659012 - RNA, 22 nt, Human
uuuaccaaauagauuaugucag

SEQ ID NO: 659013 - RNA, 22 nt, Human
ggccacagagggcgggaugcug

SEQ ID NO: 659014 - RNA, 22 nt, Human
ugaggggcagagagguguccag

SEQ ID NO: 659015 - RNA, 22 nt, Human
cuacagcagagcuacacuaacu

SEQ ID NO: 659016 - RNA, 22 nt, Human
aaagacugggacugcagcaggc

SEQ ID NO: 659017 - RNA, 22 nt, Human
gcaguaagaaagucaagcaguu

SEQ ID NO: 659018 - RNA, 22 nt, Human
aggccuggguguucaccagaag

SEQ ID NO: 659019 - RNA, 22 nt, Human
ugugugugacaaccuaguucag

SEQ ID NO: 659020 - RNA, 22 nt, Human
ucaguaacuucaugaccaagca

SEQ ID NO: 659021 - RNA, 20 nt, Human
aggaggggauagaaucaaag

SEQ ID NO: 659022 - RNA, 22 nt, Human
guacagaaaguacccauagaag

SEQ ID NO: 659023 - RNA, 22 nt, Human
uugagggacagaggugcugucu

SEQ ID NO: 659024 - RNA, 22 nt, Human
gaaucacacucguaagugaguu

SEQ ID NO: 659025 - RNA, 22 nt, Human
cugggccaucuccuuugugugg

SEQ ID NO: 659026 - RNA, 22 nt, Human
caggaacagcugaccugacaau

SEQ ID NO: 659027 - RNA, 22 nt, Human
uggguagaggaauugggcuacc

SEQ ID NO: 659028 - RNA, 22 nt, Human
auuucccaggacuagaaauaua

SEQ ID NO: 659029 - RNA, 22 nt, Human
accuuaaaugugacauagucua

SEQ ID NO: 659030 - RNA, 22 nt, Human
gguggggccagggcuccaaccu

SEQ ID NO: 659031 - RNA, 22 nt, Human
uuggcugugcagaucuugccua

SEQ ID NO: 659032 - RNA, 22 nt, Human
gguaacugcaccuuuggccuga

SEQ ID NO: 659033 - RNA, 23 nt, Human
aguguuaaauuucgcaccuaaau

SEQ ID NO: 659034 - RNA, 20 nt, Human
aagauucauuguaauuaggg

SEQ ID NO: 659035 - RNA, 22 nt, Human
gcaugcagugcaauucaaugua

SEQ ID NO: 659036 - RNA, 21 nt, Human
ucagaagugcagcccaggaau

SEQ ID NO: 659037 - RNA, 20 nt, Human
uggcaucucucaauuguagg

SEQ ID NO: 659038 - RNA, 23 nt, Human
ggccuguguuuugucugaaguac

SEQ ID NO: 659039 - RNA, 22 nt, Human
acaggucugcaguaacugggaa

SEQ ID NO: 659040 - RNA, 22 nt, Human
accugcccggggacauuccuuu

SEQ ID NO: 659041 - RNA, 21 nt, Human
aucugaaaugucaaagcagau

SEQ ID NO: 659042 - RNA, 22 nt, Human
ccucugggugggaggccgggcg

SEQ ID NO: 659043 - RNA, 19 nt, Human
aacuguaaagaucuguagc

SEQ ID NO: 659044 - RNA, 22 nt, Human
uuuaaacuguugauuuuaugaa

SEQ ID NO: 659045 - RNA, 23 nt, Human
uuuuaauuuggacauaagaagau

SEQ ID NO: 659046 - RNA, 22 nt, Human
agucugggauguauaaacugaa

SEQ ID NO: 659047 - RNA, 22 nt, Human
uaguuuaggugggguagacaga

SEQ ID NO: 659048 - RNA, 22 nt, Human
uggaaucaguuacaugugguug

SEQ ID NO: 659049 - RNA, 22 nt, Human
cagaaacagacaugacgcagua

SEQ ID NO: 659050 - RNA, 22 nt, Human
acaguggagaagcaaaugcagu

SEQ ID NO: 659051 - RNA, 22 nt, Human
aauuugauucccugcaccuguu

SEQ ID NO: 659052 - RNA, 22 nt, Human
guuacagugcauguggcuucug

SEQ ID NO: 659053 - RNA, 22 nt, Human
uauguucaugucaaacaaaugc

SEQ ID NO: 659054 - RNA, 22 nt, Human
ucagaggaauaaugcugcauuu

SEQ ID NO: 659055 - RNA, 23 nt, Human
cacauggauuaaaugagaccaca

SEQ ID NO: 659056 - RNA, 22 nt, Human
gucuggaagaacuagggauguu

SEQ ID NO: 659057 - RNA, 22 nt, Human
uacaucugauuuaccuacugaa

SEQ ID NO: 659058 - RNA, 22 nt, Human
auauucaucguguagaaauacu

SEQ ID NO: 659059 - RNA, 22 nt, Human
aagcuggagugcagugcaaugg

SEQ ID NO: 659060 - RNA, 22 nt, Human
agagguugggucugaggugaga

SEQ ID NO: 659061 - RNA, 22 nt, Human
uuucuagucucgaucucuuaau

SEQ ID NO: 659062 - RNA, 22 nt, Human
ucucagggccucccucuguuuc

SEQ ID NO: 659063 - RNA, 22 nt, Human
gaagaugggaaugaugaguggg

SEQ ID NO: 659064 - RNA, 22 nt, Human
acucaaauagcugccccuagug

SEQ ID NO: 659065 - RNA, 22 nt, Human
uucuucauucccuuacuuccga

SEQ ID NO: 659066 - RNA, 22 nt, Human
uuaucuacguauuuaaacucuu

SEQ ID NO: 659067 - RNA, 22 nt, Human
uagagguacuccccucaaaguu

SEQ ID NO: 659068 - RNA, 22 nt, Human
cugcagagaauuguggggcuuc

SEQ ID NO: 659069 - RNA, 22 nt, Human
aucugucaggagcaaggacuac

SEQ ID NO: 659070 - RNA, 22 nt, Human
ucuuagaaauuccccaguggcu

SEQ ID NO: 659071 - RNA, 22 nt, Human
uacucucuggaaauuauaguga

SEQ ID NO: 659072 - RNA, 22 nt, Human
ugaaagucucuguuauagagaa

SEQ ID NO: 659073 - RNA, 22 nt, Human
cauuggcacaaguagcuucauc

SEQ ID NO: 659074 - RNA, 22 nt, Human
uuccaggaacagaugaagguug

SEQ ID NO: 659075 - RNA, 20 nt, Human
ugcagcugguuucacaggga

SEQ ID NO: 659076 - RNA, 22 nt, Human
ggugaccucaccuggucccacc

SEQ ID NO: 659077 - RNA, 22 nt, Human
ugggcccaucauugcugugggc

SEQ ID NO: 659078 - RNA, 22 nt, Human
ccuuuucuguuuccugucacug

SEQ ID NO: 659079 - RNA, 21 nt, Human
agggaaauccagucacuuuuc

SEQ ID NO: 659080 - RNA, 22 nt, Human
uuuuucucuaugccaggggccu

SEQ ID NO: 659081 - RNA, 22 nt, Human
gcucugcugucuucuugcaggc

SEQ ID NO: 659082 - RNA, 22 nt, Human
cuacagcuguguguuuaugugc

SEQ ID NO: 659083 - RNA, 22 nt, Human
uagaacuuagcacuagacuugu

SEQ ID NO: 659084 - RNA, 22 nt, Human
uaauuucuggagggagaaagag

SEQ ID NO: 659085 - RNA, 19 nt, Human
ugagcugcugcugcccauc

SEQ ID NO: 659086 - RNA, 22 nt, Human
cauuaaaauaucucaugguguu

SEQ ID NO: 659087 - RNA, 22 nt, Human
uggcuucaaggugauaauuuac

SEQ ID NO: 659088 - RNA, 17 nt, Human
aucugcauuucuaauga

SEQ ID NO: 659089 - RNA, 22 nt, Human
cugcuuuagguggaauguucua

SEQ ID NO: 659090 - RNA, 22 nt, Human
uucacacacagcuuccuauugu

SEQ ID NO: 659091 - RNA, 22 nt, Human
aaugucaugggaauuuauucau

SEQ ID NO: 659092 - RNA, 20 nt, Human
acaauagauuugagcaaagu

SEQ ID NO: 659093 - RNA, 22 nt, Human
ucccuguacacuaacuugagac

SEQ ID NO: 659094 - RNA, 22 nt, Human
ugacugccaugagggugagggc

SEQ ID NO: 659095 - RNA, 22 nt, Human
cauacauugaauuugcacgugu

SEQ ID NO: 659096 - RNA, 22 nt, Human
auguguagaacuguaaugccca

SEQ ID NO: 659097 - RNA, 22 nt, Human
uuugaauaucacaaacuuucaa

SEQ ID NO: 659098 - RNA, 19 nt, Human
gguuaauguuaggauacuu

SEQ ID NO: 659099 - RNA, 22 nt, Human
uuacauguuuauggggguacau

SEQ ID NO: 659100 - RNA, 22 nt, Human
ccuggggaauagagucaagggg

SEQ ID NO: 659101 - RNA, 22 nt, Human
ucuggggauaagacccagguau

SEQ ID NO: 659102 - RNA, 22 nt, Human
acagccagaagucaggguggga

SEQ ID NO: 659103 - RNA, 22 nt, Human
aucagagauggcuccagugcuc

SEQ ID NO: 659104 - RNA, 22 nt, Human
gcuguauuuaacaacuggcuca

SEQ ID NO: 659105 - RNA, 22 nt, Human
gaguauaugacuuucuuuugca

SEQ ID NO: 659106 - RNA, 22 nt, Human
gggaaauugucaacacucucaa

SEQ ID NO: 659107 - RNA, 20 nt, Human
ucagugcagauuguccaagu

SEQ ID NO: 659108 - RNA, 22 nt, Human
uguccugggucaaauccugguc

SEQ ID NO: 659109 - RNA, 22 nt, Human
ccagaagggcuauugcagugac

SEQ ID NO: 659110 - RNA, 22 nt, Human
gugugccucccauuagggugua

SEQ ID NO: 659111 - RNA, 20 nt, Human
uguugauuggugucaucuca

SEQ ID NO: 659112 - RNA, 22 nt, Human
ccagucuggcaggagggggaac

SEQ ID NO: 659113 - RNA, 22 nt, Human
ggucagcaucugguugagggca

SEQ ID NO: 659114 - RNA, 22 nt, Human
uucuugcucaaugucuguuuaa

SEQ ID NO: 659115 - RNA, 22 nt, Human
caggagcuacucagguuggguu

SEQ ID NO: 659116 - RNA, 22 nt, Human
augaaauauucuuugguaagaa

SEQ ID NO: 659117 - RNA, 20 nt, Human
gccagcccugacacaggagc

SEQ ID NO: 659118 - RNA, 22 nt, Human
cuaaggcagguccauuccagga

SEQ ID NO: 659119 - RNA, 23 nt, Human
gcaggaguuccuggacuccagga

SEQ ID NO: 659120 - RNA, 22 nt, Human
aggcuagaggcuucuggcuuca

SEQ ID NO: 659121 - RNA, 22 nt, Human
gccugaugagcuuccagcugag

SEQ ID NO: 659122 - RNA, 22 nt, Human
acagaauugaagcugaguaaau

SEQ ID NO: 659123 - RNA, 22 nt, Human
uugugaguagugccgcaauaaa

SEQ ID NO: 659124 - RNA, 22 nt, Human
ucuucuacuauaauaauuuucu

SEQ ID NO: 659125 - RNA, 22 nt, Human
caguggcucaugccuauaaucc

SEQ ID NO: 659126 - RNA, 22 nt, Human
guguacaugagaaaucaacuuu

SEQ ID NO: 659127 - RNA, 22 nt, Human
auucagcaugcaauuagguaau

SEQ ID NO: 659128 - RNA, 22 nt, Human
ucaagacaggguuuaagguuga

SEQ ID NO: 659129 - RNA, 22 nt, Human
uuaacuuuuauuucugcucgcc

SEQ ID NO: 659130 - RNA, 22 nt, Human
auaaaagaucccuucugagcuc

SEQ ID NO: 659131 - RNA, 22 nt, Human
cuuauucauaagucagacacac

SEQ ID NO: 659132 - RNA, 22 nt, Human
acggguggcugaggaggccucu

SEQ ID NO: 659133 - RNA, 22 nt, Human
aguggcugguaguuacugagca

SEQ ID NO: 659134 - RNA, 22 nt, Human
gagcacagggaauagacagaua

SEQ ID NO: 659135 - RNA, 22 nt, Human
aggcuuuggaaucagaguucug

SEQ ID NO: 659136 - RNA, 22 nt, Human
uuuaaugauagucuuacgaaaa

SEQ ID NO: 659137 - RNA, 22 nt, Human
aagagcugcacauauuuauauc

SEQ ID NO: 659138 - RNA, 22 nt, Human
uccauucauucauugaugaaca

SEQ ID NO: 659139 - RNA, 22 nt, Human
cuccucugucuaccacgagggu

SEQ ID NO: 659140 - RNA, 22 nt, Human
uggcuggagagggucccaugag

SEQ ID NO: 659141 - RNA, 22 nt, Human
aaguaaaagcuuuaccaugcgc

SEQ ID NO: 659142 - RNA, 22 nt, Human
augcauauaaggcacauguauu

SEQ ID NO: 659143 - RNA, 22 nt, Human
gaagcuucguggcucuucaaau

SEQ ID NO: 659144 - RNA, 22 nt, Human
aguggguguagucuuccuccug

SEQ ID NO: 659145 - RNA, 19 nt, Human
gacagugcaguuguaguac

SEQ ID NO: 659146 - RNA, 22 nt, Human
aaauggcaguagaaaagaaucc

SEQ ID NO: 659147 - RNA, 19 nt, Human
uggguuggaagggaaugaa

SEQ ID NO: 659148 - RNA, 22 nt, Human
uguccccagagccuguuccugc

SEQ ID NO: 659149 - RNA, 22 nt, Human
ggaggccacgguuuagcaccga

SEQ ID NO: 659150 - RNA, 22 nt, Human
ggcagcugauuagcaucaagga

SEQ ID NO: 659151 - RNA, 22 nt, Human
cuaaccuguugaaggaauugcu

SEQ ID NO: 659152 - RNA, 22 nt, Human
uaaguccuauuccaggucucuc

SEQ ID NO: 659153 - RNA, 23 nt, Human
gaacccagcucugccacuugcca

SEQ ID NO: 659154 - RNA, 22 nt, Human
gcgugggguagguagacaugga

SEQ ID NO: 659155 - RNA, 22 nt, Human
uccaggccccagaccguacugc

SEQ ID NO: 659156 - RNA, 22 nt, Human
aauauaugugguauugaccagc

SEQ ID NO: 659157 - RNA, 22 nt, Human
ccucaagaacaauccaccauua

SEQ ID NO: 659158 - RNA, 22 nt, Human
gggauggcugccugcaucagga

SEQ ID NO: 659159 - RNA, 22 nt, Human
uuugguccaaguuuuacucuuu

SEQ ID NO: 659160 - RNA, 22 nt, Human
aaugucauugagcuccaauccu

SEQ ID NO: 659161 - RNA, 22 nt, Human
uaaaauguguuucuguaugguu

SEQ ID NO: 659162 - RNA, 17 nt, Human
ggagagugggaauggcc

SEQ ID NO: 659163 - RNA, 22 nt, Human
ucauuucuuaacuagagugaac

SEQ ID NO: 659164 - RNA, 22 nt, Human
uuuaugacccaagaagauacca

SEQ ID NO: 659165 - RNA, 22 nt, Human
ccaaguacucucaccaaagcuu

SEQ ID NO: 659166 - RNA, 22 nt, Human
cuucucagaggccagaagcuau

SEQ ID NO: 659167 - RNA, 22 nt, Human
aggcaaauagauaguccauaca

SEQ ID NO: 659168 - RNA, 22 nt, Human
acauuccagguuggugcagggu

SEQ ID NO: 659169 - RNA, 22 nt, Human
uucauucuuugaaucugaggua

SEQ ID NO: 659170 - RNA, 22 nt, Human
aaagcaugugaauagaauaugg

SEQ ID NO: 659171 - RNA, 22 nt, Human
ggcucuggguucugcaaugcgu

SEQ ID NO: 659172 - RNA, 22 nt, Human
acaucucacuucuuugaaggcu

SEQ ID NO: 659173 - RNA, 22 nt, Human
aguuuauguguaagacagcugu

SEQ ID NO: 659174 - RNA, 22 nt, Human
augaggaugggaagggagccaa

SEQ ID NO: 659175 - RNA, 22 nt, Human
auucauucuugguaugaacagc

SEQ ID NO: 659176 - RNA, 20 nt, Human
ucagacuugauucuaugcua

SEQ ID NO: 659177 - RNA, 21 nt, Human
ucagcuuugcaacugcacauc

SEQ ID NO: 659178 - RNA, 22 nt, Human
ugucuuuuggagcaucuuucuu

SEQ ID NO: 659179 - RNA, 22 nt, Human
acagaugagaaggcugaccagu

SEQ ID NO: 659180 - RNA, 22 nt, Human
ggcuacagcgggguggagacgg

SEQ ID NO: 659181 - RNA, 22 nt, Human
ugggcugcagagcccggccuuc

SEQ ID NO: 659182 - RNA, 22 nt, Human
acugggccaggugugggugagu

SEQ ID NO: 659183 - RNA, 21 nt, Human
uuccacagugagaacugcaag

SEQ ID NO: 659184 - RNA, 22 nt, Human
aggcugccucugcaggaucccu

SEQ ID NO: 659185 - RNA, 22 nt, Human
ugggaagaagcagagaacugga

SEQ ID NO: 659186 - RNA, 22 nt, Human
uucuagcagagggcaucugcug

SEQ ID NO: 659187 - RNA, 22 nt, Human
uugaaaguuuauggagucugca

SEQ ID NO: 659188 - RNA, 22 nt, Human
cuggcuccauuacucagcaucu

SEQ ID NO: 659189 - RNA, 22 nt, Human
acagcaugagagaugaacauuc

SEQ ID NO: 659190 - RNA, 22 nt, Human
aaagaagagcuggaaggagucu

SEQ ID NO: 659191 - RNA, 22 nt, Human
ucucuggcugauauuccucugc

SEQ ID NO: 659192 - RNA, 22 nt, Human
uuucugaagguuaaggaauuag

SEQ ID NO: 659193 - RNA, 21 nt, Human
caauggcgagaucuuggcuca

SEQ ID NO: 659194 - RNA, 22 nt, Human
uaguacaguuuaaauauuaaua

SEQ ID NO: 659195 - RNA, 22 nt, Human
uacagaggaggggauuuuaaua

SEQ ID NO: 659196 - RNA, 22 nt, Human
agucaucucagguagcauuuac

SEQ ID NO: 659197 - RNA, 22 nt, Human
acaagaguaauuucaacagagu

SEQ ID NO: 659198 - RNA, 22 nt, Human
gcuuccuucuaccacaucaugc

SEQ ID NO: 659199 - RNA, 22 nt, Human
agagcagaggcauggccguggg

SEQ ID NO: 659200 - RNA, 22 nt, Human
ucuggagcaacagagcaggaca

SEQ ID NO: 659201 - RNA, 22 nt, Human
cagcauggagacaaagugggca

SEQ ID NO: 659202 - RNA, 22 nt, Human
ucccagggggaugaacacugcc

SEQ ID NO: 659203 - RNA, 22 nt, Human
ugucucuucugccuccagcugu

SEQ ID NO: 659204 - RNA, 20 nt, Human
uuugacaccuugggagagac

SEQ ID NO: 659205 - RNA, 22 nt, Human
aguguuuaccccaaucaguuua

SEQ ID NO: 659206 - RNA, 22 nt, Human
aucaggaaauacuuauuuauaa

SEQ ID NO: 659207 - RNA, 22 nt, Human
guaucuuuaucccucguuggag

SEQ ID NO: 659208 - RNA, 22 nt, Human
uggcugggugcuauccaguacu

SEQ ID NO: 659209 - RNA, 22 nt, Human
uuggaaggauuuagagaugucu

SEQ ID NO: 659210 - RNA, 17 nt, Human
agcugaaauugcugaag

SEQ ID NO: 659211 - RNA, 22 nt, Human
auacagaaguuuuccacuuauu

SEQ ID NO: 659212 - RNA, 22 nt, Human
uuauuccauuauuucacuuagg

SEQ ID NO: 659213 - RNA, 22 nt, Human
aaugucaaaauggaaugagacu

SEQ ID NO: 659214 - RNA, 22 nt, Human
gaaauauacaugaagucggcug

SEQ ID NO: 659215 - RNA, 22 nt, Human
ucaaugcaacuuccaccuccca

SEQ ID NO: 659216 - RNA, 22 nt, Human
ccucaggcuagcuacugucccu

SEQ ID NO: 659217 - RNA, 22 nt, Human
uuauucugacuaauguauaacu

SEQ ID NO: 659218 - RNA, 20 nt, Human
gcugaggucccugugguuuu

SEQ ID NO: 659219 - RNA, 19 nt, Human
augucucuguagcacauac

SEQ ID NO: 659220 - RNA, 22 nt, Human
cacuguggcuuaccaaagcuaa

SEQ ID NO: 659221 - RNA, 22 nt, Human
cugagcugcggcaggcaccugg

SEQ ID NO: 659222 - RNA, 22 nt, Human
ugccccugaugccuagaacaga

SEQ ID NO: 659223 - RNA, 22 nt, Human
agccugcaggaugggcagcacc

SEQ ID NO: 659224 - RNA, 22 nt, Human
cgcugggcgccgaccugcuggc

SEQ ID NO: 659225 - RNA, 22 nt, Human
gagggaguaacguacuacagug

SEQ ID NO: 659226 - RNA, 22 nt, Human
gacagcugcauccucagacaca

SEQ ID NO: 659227 - RNA, 22 nt, Human
uggguccucugagagggcagcg

SEQ ID NO: 659228 - RNA, 22 nt, Human
ggcaugcauacguagugauuuu

SEQ ID NO: 659229 - RNA, 22 nt, Human
uugaacaauuugguauacaaac

SEQ ID NO: 659230 - RNA, 22 nt, Human
gcacucaguaccaggucacugc

SEQ ID NO: 659231 - RNA, 22 nt, Human
cugccuggccugaucuccacgc

SEQ ID NO: 659232 - RNA, 21 nt, Human
ucagaggcugggggaaugccc

SEQ ID NO: 659233 - RNA, 22 nt, Human
cagcugcucugguggucucucc

SEQ ID NO: 659234 - RNA, 22 nt, Human
aaguguguauuguuuaugcugc

SEQ ID NO: 659235 - RNA, 22 nt, Human
aggauguguucauagcugacgc

SEQ ID NO: 659236 - RNA, 22 nt, Human
gaguccucaacggggagaggcg

SEQ ID NO: 659237 - RNA, 22 nt, Human
uuccuagggcagagccgcuggg

SEQ ID NO: 659238 - RNA, 22 nt, Human
agggccaccucucuggguuccc

SEQ ID NO: 659239 - RNA, 22 nt, Human
gaggauggaggugugagcuaug

SEQ ID NO: 659240 - RNA, 22 nt, Human
ugugucagcacaguaucaauua

SEQ ID NO: 659241 - RNA, 22 nt, Human
ccacaaguuucagcacccagag

SEQ ID NO: 659242 - RNA, 22 nt, Human
gaacauuacugcuugggagagg

SEQ ID NO: 659243 - RNA, 22 nt, Human
ucaggcugugucuuuaaacaau

SEQ ID NO: 659244 - RNA, 22 nt, Human
ucuggcugacauccuguaugag

SEQ ID NO: 659245 - RNA, 22 nt, Human
gucccagaggcuuuggccacag

SEQ ID NO: 659246 - RNA, 23 nt, Human
ccagcccuccaccagcucuaggc

SEQ ID NO: 659247 - RNA, 22 nt, Human
aaaaugcaugagaaugugcucg

SEQ ID NO: 659248 - RNA, 22 nt, Human
aaaccuuugugugucugugccu

SEQ ID NO: 659249 - RNA, 22 nt, Human
agguccuguuucuucccugggg

SEQ ID NO: 659250 - RNA, 20 nt, Human
gcuccuguccugguggaggg

SEQ ID NO: 659251 - RNA, 22 nt, Human
agaaacagaaccaggugucauu

SEQ ID NO: 659252 - RNA, 22 nt, Human
ugcaccagagcagggugcccaa

SEQ ID NO: 659253 - RNA, 22 nt, Human
aggcucagagaugaguaagcac

SEQ ID NO: 659254 - RNA, 22 nt, Human
ucucccaggugggugccuggag

SEQ ID NO: 659255 - RNA, 19 nt, Human
uuuucacauacuggauccu

SEQ ID NO: 659256 - RNA, 22 nt, Human
cucucuauggaugcaguuuuuc

SEQ ID NO: 659257 - RNA, 19 nt, Human
guauauuuauauggcugua

SEQ ID NO: 659258 - RNA, 22 nt, Human
uugcaggguugaccaauaggcu

SEQ ID NO: 659259 - RNA, 22 nt, Human
gaggggcaguugauugugcuau

SEQ ID NO: 659260 - RNA, 18 nt, Human
agcugcccugggcuggag

SEQ ID NO: 659261 - RNA, 22 nt, Human
aacuuaaacaagcucccaaguu

SEQ ID NO: 659262 - RNA, 22 nt, Human
aaucccuuuuucauuuaauaga

SEQ ID NO: 659263 - RNA, 22 nt, Human
ugcuggcucaguuugcagacuc

SEQ ID NO: 659264 - RNA, 20 nt, Human
aggaggaaaaaaugacgagc

SEQ ID NO: 659265 - RNA, 22 nt, Human
uggagucacuuucucuuccagu

SEQ ID NO: 659266 - RNA, 19 nt, Human
gcucagagucccccugcgg

SEQ ID NO: 659267 - RNA, 22 nt, Human
guucacaagaguuacagacaga

SEQ ID NO: 659268 - RNA, 22 nt, Human
auucuucauguugaagcuguca

SEQ ID NO: 659269 - RNA, 22 nt, Human
aguaauaauagcuguaaagugc

SEQ ID NO: 659270 - RNA, 22 nt, Human
ucucagugcagagaggcuaucu

SEQ ID NO: 659271 - RNA, 22 nt, Human
uaccuggauaucauucauucuc

SEQ ID NO: 659272 - RNA, 22 nt, Human
aaugcucaaaauguuucaucua

SEQ ID NO: 659273 - RNA, 22 nt, Human
acugaguguaggacuuugaguu

SEQ ID NO: 659274 - RNA, 22 nt, Human
ggcugagccaugggcacugcag

SEQ ID NO: 659275 - RNA, 22 nt, Human
ggagccugugggaugagaugug

SEQ ID NO: 659276 - RNA, 22 nt, Human
aauaaaugaacaaagcagguug

SEQ ID NO: 659277 - RNA, 22 nt, Human
agcucugaugacuuuacaacuu

SEQ ID NO: 659278 - RNA, 22 nt, Human
gcuuucuggagccugggggaac

SEQ ID NO: 659279 - RNA, 22 nt, Human
ucugucucucaagggccguccu

SEQ ID NO: 659280 - RNA, 22 nt, Human
uauuugaagggagaaagugcca

SEQ ID NO: 659281 - RNA, 23 nt, Human
cucuggguccgauguccugacag

SEQ ID NO: 659282 - RNA, 22 nt, Human
ggcuggcuggcuuagcagagga

SEQ ID NO: 659283 - RNA, 22 nt, Human
ucagcucugcacuccacugugg

SEQ ID NO: 659284 - RNA, 22 nt, Human
aaacacugauggauauuuuucc

SEQ ID NO: 659285 - RNA, 22 nt, Human
cagcaggaagguuuccccugca

SEQ ID NO: 659286 - RNA, 22 nt, Human
aacagcuuagaaauguugcuaa

SEQ ID NO: 659287 - RNA, 22 nt, Human
gagccccaggacagcucuaguu

SEQ ID NO: 659288 - RNA, 22 nt, Human
cuucaaaugugauuuuaauaac

SEQ ID NO: 659289 - RNA, 22 nt, Human
agaagccucauccucucuagug

SEQ ID NO: 659290 - RNA, 23 nt, Human
uugugggcagauuccauggggag

SEQ ID NO: 659291 - RNA, 22 nt, Human
ucuuuucuugcauuauugcacu

SEQ ID NO: 659292 - RNA, 22 nt, Human
ugagggugggcccugggcaucu

SEQ ID NO: 659293 - RNA, 22 nt, Human
auucagaagcaaucacagugag

SEQ ID NO: 659294 - RNA, 22 nt, Human
aaagucauuuuccagaccagua

SEQ ID NO: 659295 - RNA, 22 nt, Human
aggcaacaugggccaggcagaa

SEQ ID NO: 659296 - RNA, 22 nt, Human
gcuguguugggaaucauguggg

SEQ ID NO: 659297 - RNA, 22 nt, Human
aucuguguguugaguucucagc

SEQ ID NO: 659298 - RNA, 22 nt, Human
ucaggaaguugaggcguagaga

SEQ ID NO: 659299 - RNA, 22 nt, Human
ucagaagcugguguccuuugaa

SEQ ID NO: 659300 - RNA, 22 nt, Human
uauggcuuaggagaguuuaacu

SEQ ID NO: 659301 - RNA, 22 nt, Human
ggggaccuggccacccauccuu

SEQ ID NO: 659302 - RNA, 22 nt, Human
accgggcuaauuuuuguaucuu

SEQ ID NO: 659303 - RNA, 22 nt, Human
gagagcuguccggcugagcagc

SEQ ID NO: 659304 - RNA, 22 nt, Human
cauuggcaccucacaggauaga

SEQ ID NO: 659305 - RNA, 22 nt, Human
gcagcuccuccugggcuggaga

SEQ ID NO: 659306 - RNA, 21 nt, Human
ucacaggcucagggagagagu

SEQ ID NO: 659307 - RNA, 22 nt, Human
cugaagaggacuggguuggagg

SEQ ID NO: 659308 - RNA, 22 nt, Human
ucugggcuuuguaaugggaggu

SEQ ID NO: 659309 - RNA, 22 nt, Human
ucuggccaggauggcaagacca

SEQ ID NO: 659310 - RNA, 22 nt, Human
cucagauguagaaagauuguga

SEQ ID NO: 659311 - RNA, 22 nt, Human
uucaagauccagcacaacagug

SEQ ID NO: 659312 - RNA, 22 nt, Human
cuuaauuuuuguaguagaugga

SEQ ID NO: 659313 - RNA, 22 nt, Human
cuguuuauuacguaauuaauau

SEQ ID NO: 659314 - RNA, 22 nt, Human
agggccaguucagaggacaugg

SEQ ID NO: 659315 - RNA, 22 nt, Human
aggagagagguuuuaaaugggg

SEQ ID NO: 659316 - RNA, 22 nt, Human
cacacugucuuucagaaugguu

SEQ ID NO: 659317 - RNA, 21 nt, Human
ucccagggccaggugccauca

SEQ ID NO: 659318 - RNA, 22 nt, Human
aagacucuaucuuuagagauca

SEQ ID NO: 659319 - RNA, 22 nt, Human
auacaguauaacuaauaaaccc

SEQ ID NO: 659320 - RNA, 22 nt, Human
uuuccuuguucauuugcccuau

SEQ ID NO: 659321 - RNA, 22 nt, Human
ugucuccagaaagcaccaggag

SEQ ID NO: 659322 - RNA, 22 nt, Human
auucuuauuaaauagccagaag

SEQ ID NO: 659323 - RNA, 19 nt, Human
gauuuaaacguggcucuau

SEQ ID NO: 659324 - RNA, 18 nt, Human
cuccagguaauucugaua

SEQ ID NO: 659325 - RNA, 20 nt, Human
gccugccucagcuagcugag

SEQ ID NO: 659326 - RNA, 18 nt, Human
ugaggcccgcagaggugg

SEQ ID NO: 659327 - RNA, 22 nt, Human
augcauugcuugaggguaggaa

SEQ ID NO: 659328 - RNA, 22 nt, Human
cacccaggacaaaauauggaau

SEQ ID NO: 659329 - RNA, 22 nt, Human
acaaguuuauuugauuagaaca

SEQ ID NO: 659330 - RNA, 22 nt, Human
uugcacuagucucagaggcaaa

SEQ ID NO: 659331 - RNA, 22 nt, Human
uuucaaggcuaguuuuaauuag

SEQ ID NO: 659332 - RNA, 22 nt, Human
augacagugggucuugcaaaga

SEQ ID NO: 659333 - RNA, 22 nt, Human
cugggagucuaagcuagcaccg

SEQ ID NO: 659334 - RNA, 22 nt, Human
aagagguugucugugaugaguu

SEQ ID NO: 659335 - RNA, 22 nt, Human
uucugugugcuuacugguguuc

SEQ ID NO: 659336 - RNA, 22 nt, Human
ugcuuuauaaccauuucugugg

SEQ ID NO: 659337 - RNA, 19 nt, Human
ggcaccuuucugcuguguc

SEQ ID NO: 659338 - RNA, 22 nt, Human
gcugccugccuugccuggagga

SEQ ID NO: 659339 - RNA, 22 nt, Human
agcagauguuucagagcaggcu

SEQ ID NO: 659340 - RNA, 22 nt, Human
ucuggggguuaagugaggacaa

SEQ ID NO: 659341 - RNA, 22 nt, Human
uaauuccaaguugagacaugca

SEQ ID NO: 659342 - RNA, 22 nt, Human
uuucugaauaacucuaugauau

SEQ ID NO: 659343 - RNA, 22 nt, Human
cuuccaguaguaucauucucau

SEQ ID NO: 659344 - RNA, 22 nt, Human
gccacaggugggcucugggaaa

SEQ ID NO: 659345 - RNA, 22 nt, Human
agaauaaaucaaauguccugag

SEQ ID NO: 659346 - RNA, 22 nt, Human
cagcagugucuccagcaucaca

SEQ ID NO: 659347 - RNA, 22 nt, Human
auucaaaagaccaugcagacuc

SEQ ID NO: 659348 - RNA, 22 nt, Human
ucacaguuuuagcuguuaaaua

SEQ ID NO: 659349 - RNA, 22 nt, Human
auaaagauuuuuaggcauuucu

SEQ ID NO: 659350 - RNA, 22 nt, Human
gggggcuggacuuucccacaca

SEQ ID NO: 659351 - RNA, 22 nt, Human
guccuggcccacuggcaggcug

SEQ ID NO: 659352 - RNA, 22 nt, Human
gugugggugggacaucaucuuu

SEQ ID NO: 659353 - RNA, 18 nt, Human
auuguucugugacauguc

SEQ ID NO: 659354 - RNA, 22 nt, Human
cugaaaggcaguggguagugug

SEQ ID NO: 659355 - RNA, 22 nt, Human
ucagaaucucuggaggcuuggc

SEQ ID NO: 659356 - RNA, 22 nt, Human
uguguauguaagcaugugcaua

SEQ ID NO: 659357 - RNA, 22 nt, Human
acaaaaauuagcugggcauggu

SEQ ID NO: 659358 - RNA, 22 nt, Human
gugcaaaaguacuugcggauuu

SEQ ID NO: 659359 - RNA, 22 nt, Human
uuucagagucagcuccucucua

SEQ ID NO: 659360 - RNA, 22 nt, Human
uggucaggauucucagcccuuc

SEQ ID NO: 659361 - RNA, 22 nt, Human
ggcagcacugcagcuuguuggg

SEQ ID NO: 659362 - RNA, 22 nt, Human
uauguuauauuuugucaauugu

SEQ ID NO: 659363 - RNA, 22 nt, Human
aaggcaccauaggcaaauccag

SEQ ID NO: 659364 - RNA, 22 nt, Human
uccuggcauugugcagggugug

SEQ ID NO: 659365 - RNA, 22 nt, Human
cagcccacugccucugugguag

SEQ ID NO: 659366 - RNA, 22 nt, Human
gaggggcagaaugugaucaggg

SEQ ID NO: 659367 - RNA, 22 nt, Human
acauuuaaauaugccuuauauu

SEQ ID NO: 659368 - RNA, 22 nt, Human
cuacaguagagaggauguagaa

SEQ ID NO: 659369 - RNA, 20 nt, Human
gggugagauguaggagaggg

SEQ ID NO: 659370 - RNA, 22 nt, Human
ucaaauaaugccauucaucauc

SEQ ID NO: 659371 - RNA, 17 nt, Human
auacaaagccauaaacc

SEQ ID NO: 659372 - RNA, 22 nt, Human
cucaggagacaguguccacaug

SEQ ID NO: 659373 - RNA, 22 nt, Human
ggcuggcucagggcuugagaga

SEQ ID NO: 659374 - RNA, 22 nt, Human
ccgggagcaggcgccaccgcca

SEQ ID NO: 659375 - RNA, 22 nt, Human
uuuaaugaauaauucaaaucug

SEQ ID NO: 659376 - RNA, 22 nt, Human
caguggauuagccagagcugga

SEQ ID NO: 659377 - RNA, 22 nt, Human
acuguggggggcuuugcucagu

SEQ ID NO: 659378 - RNA, 22 nt, Human
gccaggugcuaucccugcgcug

SEQ ID NO: 659379 - RNA, 20 nt, Human
ucagugauuuugaagaggaa

SEQ ID NO: 659380 - RNA, 18 nt, Human
ugaggcugaauauggggc

SEQ ID NO: 659381 - RNA, 22 nt, Human
ucucaggcuaccuugcacaagg

SEQ ID NO: 659382 - RNA, 21 nt, Human
cccaggucguggucuucccag

SEQ ID NO: 659383 - RNA, 22 nt, Human
uccaagaagcuuacaaucuaau

SEQ ID NO: 659384 - RNA, 22 nt, Human
agugugugaccuuuuaauuuaa

SEQ ID NO: 659385 - RNA, 22 nt, Human
agcaggaaggggaugaugggca

SEQ ID NO: 659386 - RNA, 22 nt, Human
gccugcaagauggcuggucacu

SEQ ID NO: 659387 - RNA, 22 nt, Human
agcauccugccucuccucccaa

SEQ ID NO: 659388 - RNA, 17 nt, Human
cucagagaggguaagua

SEQ ID NO: 659389 - RNA, 22 nt, Human
uaugaagacaaugauagcauga

SEQ ID NO: 659390 - RNA, 22 nt, Human
cuucaagucgccaaaugcugaa

SEQ ID NO: 659391 - RNA, 22 nt, Human
agcaggcuuaugguugaaggga

SEQ ID NO: 659392 - RNA, 22 nt, Human
ggcacacagcuuggcaggagau

SEQ ID NO: 659393 - RNA, 19 nt, Human
acuuccugcccgcuccuuu

SEQ ID NO: 659394 - RNA, 20 nt, Human
auaugcugagugaaggcaga

SEQ ID NO: 659395 - RNA, 22 nt, Human
uauaucugggaaccaaaggggg

SEQ ID NO: 659396 - RNA, 22 nt, Human
aaagugcucggauuacagguau

SEQ ID NO: 659397 - RNA, 22 nt, Human
gccauuuucugucuuguuuauu

SEQ ID NO: 659398 - RNA, 22 nt, Human
uagucacaugaucacaggaucg

SEQ ID NO: 659399 - RNA, 22 nt, Human
acugggguuuaggccugggcaa

SEQ ID NO: 659400 - RNA, 22 nt, Human
auucuuuuaaauggcaguagua

SEQ ID NO: 659401 - RNA, 22 nt, Human
uuucuaguaaucaauauaaagu

SEQ ID NO: 659402 - RNA, 22 nt, Human
accuggcacuacaggcaccugu

SEQ ID NO: 659403 - RNA, 22 nt, Human
uguccuggccaaggccuugcuu

SEQ ID NO: 659404 - RNA, 22 nt, Human
gcuugguuacugauggaaagga

SEQ ID NO: 659405 - RNA, 22 nt, Human
ugggcugcugcggugcucuugg

SEQ ID NO: 659406 - RNA, 22 nt, Human
agacaauggaccaagcaccuuc

SEQ ID NO: 659407 - RNA, 22 nt, Human
uugaauaguuuuggauagcaua

SEQ ID NO: 659408 - RNA, 22 nt, Human
aagcucagugaugccuccaggg

SEQ ID NO: 659409 - RNA, 22 nt, Human
aggauccuuuggccacuucuua

SEQ ID NO: 659410 - RNA, 22 nt, Human
cacccuggaaagaaggucuggg

SEQ ID NO: 659411 - RNA, 22 nt, Human
caggaagauuagaccaagagcu

SEQ ID NO: 659412 - RNA, 23 nt, Human
uuaaacacuaguucgaguagcau

SEQ ID NO: 659413 - RNA, 22 nt, Human
cagggccucuccuccaggaacu

SEQ ID NO: 659414 - RNA, 22 nt, Human
auaugcaugcaugcuugugaga

SEQ ID NO: 659415 - RNA, 22 nt, Human
ucagguccuuacugugcucccu

SEQ ID NO: 659416 - RNA, 22 nt, Human
caggagcuuucuucccaaacuu

SEQ ID NO: 659417 - RNA, 22 nt, Human
augcaacagaaaauugccuggg

SEQ ID NO: 659418 - RNA, 22 nt, Human
cuuguacauagagaagaagccu

SEQ ID NO: 659419 - RNA, 22 nt, Human
aguauacauauauuagccuucg

SEQ ID NO: 659420 - RNA, 21 nt, Human
ggcugggucaugcagcuggcc

SEQ ID NO: 659421 - RNA, 22 nt, Human
ccaguuuagguacuaggcucua

SEQ ID NO: 659422 - RNA, 22 nt, Human
gagucaguaauggauaugucau

SEQ ID NO: 659423 - RNA, 22 nt, Human
cagagcugucauuugccaguga

SEQ ID NO: 659424 - RNA, 22 nt, Human
uacaucauguaagcagaaucau

SEQ ID NO: 659425 - RNA, 22 nt, Human
aauauuuaugacaggaaguagc

SEQ ID NO: 659426 - RNA, 22 nt, Human
ucacaaagagaauugugggugu

SEQ ID NO: 659427 - RNA, 22 nt, Human
cauuagagcagauaauaugugu

SEQ ID NO: 659428 - RNA, 22 nt, Human
gcagucauccagccuuuccacu

SEQ ID NO: 659429 - RNA, 22 nt, Human
gccaggcagcaggaagccagug

SEQ ID NO: 659430 - RNA, 22 nt, Human
aucugccuccaaguccaugugu

SEQ ID NO: 659431 - RNA, 22 nt, Human
gaaaacugugauuagaaugccu

SEQ ID NO: 659432 - RNA, 22 nt, Human
augcacagaaaaauugcuuacu

SEQ ID NO: 659433 - RNA, 19 nt, Human
gugauuucuuuccacaagc

SEQ ID NO: 659434 - RNA, 22 nt, Human
cgcaggcaaugcuccgcggggg

SEQ ID NO: 659435 - RNA, 22 nt, Human
cagaguuucgguaagcauagaa

SEQ ID NO: 659436 - RNA, 22 nt, Human
cgggcacacacuugacagguuc

SEQ ID NO: 659437 - RNA, 22 nt, Human
cugggagagaagcgaagcuggg

SEQ ID NO: 659438 - RNA, 22 nt, Human
uccccucucugcgcucccaggu

SEQ ID NO: 659439 - RNA, 22 nt, Human
ggugacgaauccauagcaucga

SEQ ID NO: 659440 - RNA, 22 nt, Human
gaagauugaaggcugggaauua

SEQ ID NO: 659441 - RNA, 22 nt, Human
ggcagggguggccuuccuuugg

SEQ ID NO: 659442 - RNA, 22 nt, Human
cugggcugucccagggcggcag

SEQ ID NO: 659443 - RNA, 22 nt, Human
ucugucaggagauuggcagcug

SEQ ID NO: 659444 - RNA, 22 nt, Human
ggaacauuuccuggcagagagg

SEQ ID NO: 659445 - RNA, 22 nt, Human
cucuggcucuguugagauuugu

SEQ ID NO: 659446 - RNA, 22 nt, Human
uauaaccuuuucuuuauccucc

SEQ ID NO: 659447 - RNA, 20 nt, Human
aguguauuuggguagagugu

SEQ ID NO: 659448 - RNA, 22 nt, Human
acauccauuugcuuuauuugcu

SEQ ID NO: 659449 - RNA, 20 nt, Human
ucauccaggacaggaguggc

SEQ ID NO: 659450 - RNA, 22 nt, Human
ggagucugcucccagacaugau

SEQ ID NO: 659451 - RNA, 22 nt, Human
cuuguacauugauuucugcauu

SEQ ID NO: 659452 - RNA, 22 nt, Human
aguuucccccuucacagcuuaa

SEQ ID NO: 659453 - RNA, 22 nt, Human
ucuguuccauguuuuguuccau

SEQ ID NO: 659454 - RNA, 22 nt, Human
auaugaaaagaagucaccauug

SEQ ID NO: 659455 - RNA, 22 nt, Human
augcagaaugaguucacgaucu

SEQ ID NO: 659456 - RNA, 22 nt, Human
augcaaaaguaacugugauuuu

SEQ ID NO: 659457 - RNA, 22 nt, Human
auuuuguuauagaacucuguga

SEQ ID NO: 659458 - RNA, 22 nt, Human
uacacauaggaggguaauaaaa

SEQ ID NO: 659459 - RNA, 22 nt, Human
uugaaaagcaaaugauggguag

SEQ ID NO: 659460 - RNA, 22 nt, Human
caguacuugggggguucuaagu

SEQ ID NO: 659461 - RNA, 22 nt, Human
uuucucaacagaguaugcccuu

SEQ ID NO: 659462 - RNA, 22 nt, Human
ugguacaaucacagcucacugu

SEQ ID NO: 659463 - RNA, 20 nt, Human
gccucuggagccaaggacca

SEQ ID NO: 659464 - RNA, 22 nt, Human
auagauguuuuaguaauacugu

SEQ ID NO: 659465 - RNA, 22 nt, Human
uagaucauaaauacuauggugc

SEQ ID NO: 659466 - RNA, 18 nt, Human
gagcagaggaggguuuuu

SEQ ID NO: 659467 - RNA, 22 nt, Human
aaggauuuguccaaagucacac

SEQ ID NO: 659468 - RNA, 22 nt, Human
cagagcagauuucuaaguauug

SEQ ID NO: 659469 - RNA, 22 nt, Human
ugaucccuggacuugaguaagu

SEQ ID NO: 659470 - RNA, 22 nt, Human
auguggaggaaaugaguguaca

SEQ ID NO: 659471 - RNA, 22 nt, Human
auaaaaaugagggcgguagcua

SEQ ID NO: 659472 - RNA, 22 nt, Human
gacuggcuuauuucacuuagca

SEQ ID NO: 659473 - RNA, 22 nt, Human
cucaagucccgcaguguuccuc

SEQ ID NO: 659474 - RNA, 22 nt, Human
auuagacaucauaugauucagc

SEQ ID NO: 659475 - RNA, 22 nt, Human
cagccaggacucccauuuagga

SEQ ID NO: 659476 - RNA, 22 nt, Human
ugugugggcgaagacagccuuu

SEQ ID NO: 659477 - RNA, 22 nt, Human
uaguccagaaacugagcuuaua

SEQ ID NO: 659478 - RNA, 22 nt, Human
ccuucacaccaucuuuaccagg

SEQ ID NO: 659479 - RNA, 22 nt, Human
agucccagagaggucggggcca

SEQ ID NO: 659480 - RNA, 18 nt, Human
uguuaaaugaagauuugc

SEQ ID NO: 659481 - RNA, 22 nt, Human
acacagguacacauauguaccu

SEQ ID NO: 659482 - RNA, 22 nt, Human
acuguaaaacugcuuuggaaac

SEQ ID NO: 659483 - RNA, 20 nt, Human
agucacauugagcuuuugga

SEQ ID NO: 659484 - RNA, 21 nt, Human
cuccugggcuaagauauagug

SEQ ID NO: 659485 - RNA, 22 nt, Human
gccagucugcucccacaaguuc

SEQ ID NO: 659486 - RNA, 22 nt, Human
gauaaugaugacaaugacaacc

SEQ ID NO: 659487 - RNA, 22 nt, Human
caggcucagaagccaguggagc

SEQ ID NO: 659488 - RNA, 22 nt, Human
acagaaagaccuuguaacacuu

SEQ ID NO: 659489 - RNA, 19 nt, Human
cuguccacacacucgcuuc

SEQ ID NO: 659490 - RNA, 20 nt, Human
uuaucugucaaucugucuca

SEQ ID NO: 659491 - RNA, 22 nt, Human
uagcugcuucucacaugggcaa

SEQ ID NO: 659492 - RNA, 22 nt, Human
aucugugaucaagacagacagu

SEQ ID NO: 659493 - RNA, 22 nt, Human
gggucuggcaugcugagaugga

SEQ ID NO: 659494 - RNA, 22 nt, Human
cuguaaauaaugacaguugacu

SEQ ID NO: 659495 - RNA, 22 nt, Human
cagggggcucaaaggagagugc

SEQ ID NO: 659496 - RNA, 22 nt, Human
aggaggagcagcuuuuugucuc

SEQ ID NO: 659497 - RNA, 22 nt, Human
agcagccagagaaugaugcagu

SEQ ID NO: 659498 - RNA, 22 nt, Human
aacucaguucuuuccacaaugc

SEQ ID NO: 659499 - RNA, 22 nt, Human
gaguggcagaacuggggguccu

SEQ ID NO: 659500 - RNA, 22 nt, Human
ucacaggguguacaucaccuau

SEQ ID NO: 659501 - RNA, 22 nt, Human
cccugugcagauggcagcuggg

SEQ ID NO: 659502 - RNA, 22 nt, Human
auguguacaaccaagcacuaaa

SEQ ID NO: 659503 - RNA, 22 nt, Human
uacacugucagauuucgauugc

SEQ ID NO: 659504 - RNA, 23 nt, Human
aggcuccacucccugggaugugg

SEQ ID NO: 659505 - RNA, 22 nt, Human
acucagugggcuugaugucgaa

SEQ ID NO: 659506 - RNA, 22 nt, Human
cugcuguguggauucaauggcu

SEQ ID NO: 659507 - RNA, 22 nt, Human
cccugggauugccuuggccuug

SEQ ID NO: 659508 - RNA, 22 nt, Human
aaucaucuccgaaaaaagagua

SEQ ID NO: 659509 - RNA, 22 nt, Human
ggagcuguaacgagccauugcu

SEQ ID NO: 659510 - RNA, 22 nt, Human
cuauuaggcuuccauuucaugc

SEQ ID NO: 659511 - RNA, 22 nt, Human
gugugccaccacugacaggauu

SEQ ID NO: 659512 - RNA, 22 nt, Human
uacaaaugaccauagccacuua

SEQ ID NO: 659513 - RNA, 22 nt, Human
aaacagcugggagguagaggcg

SEQ ID NO: 659514 - RNA, 22 nt, Human
acagaaguguguguguaggaau

SEQ ID NO: 659515 - RNA, 20 nt, Human
ucucuggccagaaacaacag

SEQ ID NO: 659516 - RNA, 22 nt, Human
uguggcugggaagaagguaacu

SEQ ID NO: 659517 - RNA, 22 nt, Human
aaggucugugaggcuguuuguc

SEQ ID NO: 659518 - RNA, 22 nt, Human
agcugcuucaaaaugggcuccu

SEQ ID NO: 659519 - RNA, 22 nt, Human
gcgugcauggccguguguaugc

SEQ ID NO: 659520 - RNA, 22 nt, Human
caagggugaaggcagaggacau

SEQ ID NO: 659521 - RNA, 22 nt, Human
uagcacuauuuuucacuauccu

SEQ ID NO: 659522 - RNA, 22 nt, Human
cagauggauuuuguaggcugau

SEQ ID NO: 659523 - RNA, 22 nt, Human
cgucacuucuuagucuauuuuc

SEQ ID NO: 659524 - RNA, 22 nt, Human
aucugcuggcaucucuagccca

SEQ ID NO: 659525 - RNA, 22 nt, Human
ucugcguuauugaaaagcagcc

SEQ ID NO: 659526 - RNA, 20 nt, Human
uugcaaauaucuauugauug

SEQ ID NO: 659527 - RNA, 22 nt, Human
agcucagggcuccaggaccgcu

SEQ ID NO: 659528 - RNA, 22 nt, Human
uagcuccuggcugcagggccuc

SEQ ID NO: 659529 - RNA, 22 nt, Human
ugcaaauaaauuucuguucauu

SEQ ID NO: 659530 - RNA, 22 nt, Human
gcuuugcuaugacucaccagca

SEQ ID NO: 659531 - RNA, 22 nt, Human
cagcaagauggugaaugagacg

SEQ ID NO: 659532 - RNA, 22 nt, Human
cauuuaauccucacaagccuau

SEQ ID NO: 659533 - RNA, 22 nt, Human
gaaggcugcugggaaguguggu

SEQ ID NO: 659534 - RNA, 22 nt, Human
ggcaagucaggaaguugacauu

SEQ ID NO: 659535 - RNA, 22 nt, Human
gagagguacggaaagagcgugg

SEQ ID NO: 659536 - RNA, 21 nt, Human
cacacagugaucuauccacau

SEQ ID NO: 659537 - RNA, 22 nt, Human
augaaaagcauaaacgcugaag

SEQ ID NO: 659538 - RNA, 22 nt, Human
aauaacuuaagaaauuucccca

SEQ ID NO: 659539 - RNA, 22 nt, Human
ugauucaaauauuguguaugau

SEQ ID NO: 659540 - RNA, 22 nt, Human
aaagauuugaaauuaggcauca

SEQ ID NO: 659541 - RNA, 22 nt, Human
aaacagcugcaguacacggccu

SEQ ID NO: 659542 - RNA, 22 nt, Human
gcugggagucgcgucuguggcc

SEQ ID NO: 659543 - RNA, 22 nt, Human
augcuaaauucagacaggguua

SEQ ID NO: 659544 - RNA, 22 nt, Human
aaaguucagauuagacucaaga

SEQ ID NO: 659545 - RNA, 22 nt, Human
uaauaauuuuaaagaaggcuag

SEQ ID NO: 659546 - RNA, 22 nt, Human
uccugcagucugcacucugccu

SEQ ID NO: 659547 - RNA, 22 nt, Human
uguuuacuugagguggaaacaa

SEQ ID NO: 659548 - RNA, 22 nt, Human
caggcuccacaggggaauccgg

SEQ ID NO: 659549 - RNA, 22 nt, Human
aacaugucuuacuuugcuuucu

SEQ ID NO: 659550 - RNA, 22 nt, Human
ucacuuuggaagauagcacauc

SEQ ID NO: 659551 - RNA, 21 nt, Human
ugggcccaguucccgcugggc

SEQ ID NO: 659552 - RNA, 22 nt, Human
gaggccaacuuuggagaacagg

SEQ ID NO: 659553 - RNA, 22 nt, Human
uggcccugcccucuucaucuuu

SEQ ID NO: 659554 - RNA, 22 nt, Human
agccccaggcccggacgccucu

SEQ ID NO: 659555 - RNA, 22 nt, Human
cugaaugaggaaaagagugagg

SEQ ID NO: 659556 - RNA, 22 nt, Human
uuaagagguggucgugucugug

SEQ ID NO: 659557 - RNA, 22 nt, Human
uauugacuuuuaaagugauaua

SEQ ID NO: 659558 - RNA, 22 nt, Human
uacaccugggacccauccaaga

SEQ ID NO: 659559 - RNA, 22 nt, Human
acagaugcuuacuggugguucc

SEQ ID NO: 659560 - RNA, 22 nt, Human
agcagggggaguuagacuagau

SEQ ID NO: 659561 - RNA, 22 nt, Human
cagcacauagcaugcuugucag

SEQ ID NO: 659562 - RNA, 22 nt, Human
acgcagaagggccuggcgugcc

SEQ ID NO: 659563 - RNA, 22 nt, Human
gcccuccuuugcuucuccuagu

SEQ ID NO: 659564 - RNA, 22 nt, Human
uguggcugugguuuucauaaau

SEQ ID NO: 659565 - RNA, 22 nt, Human
ucugagcugccccuuuacuuug

SEQ ID NO: 659566 - RNA, 22 nt, Human
gcucaguuauccgugugugacu

SEQ ID NO: 659567 - RNA, 21 nt, Human
ggcagcugugguuaauugaac

SEQ ID NO: 659568 - RNA, 22 nt, Human
gggcuggagucuucugaaagcc

SEQ ID NO: 659569 - RNA, 22 nt, Human
ccaggcuccucaugaucuuguu

SEQ ID NO: 659570 - RNA, 22 nt, Human
uccagugguaguaaagaggucu

SEQ ID NO: 659571 - RNA, 22 nt, Human
gcaggaugaaggcagaggcuga

SEQ ID NO: 659572 - RNA, 22 nt, Human
gcaggaguuaaaauauguaaug

SEQ ID NO: 659573 - RNA, 22 nt, Human
uuguuaaaacuccauugguuug

SEQ ID NO: 659574 - RNA, 22 nt, Human
ugacagggugauuaugagagcu

SEQ ID NO: 659575 - RNA, 18 nt, Human
agcucacagaucuguuuu

SEQ ID NO: 659576 - RNA, 18 nt, Human
uucaccagugugaugggu

SEQ ID NO: 659577 - RNA, 22 nt, Human
cugaggcucugagaaagccaaa

SEQ ID NO: 659578 - RNA, 22 nt, Human
ccauccauuuucuugcuugccu

SEQ ID NO: 659579 - RNA, 21 nt, Human
uucaggguuucacaauacuaa

SEQ ID NO: 659580 - RNA, 22 nt, Human
ugucacauucugaugugaggug

SEQ ID NO: 659581 - RNA, 22 nt, Human
gccaugggcaaaugcagagcug

SEQ ID NO: 659582 - RNA, 22 nt, Human
acucaggcuacaacgcguggcu

SEQ ID NO: 659583 - RNA, 23 nt, Human
uggagguuuuacugaguugagga

SEQ ID NO: 659584 - RNA, 22 nt, Human
ccccugaagacaauggagaggu

SEQ ID NO: 659585 - RNA, 22 nt, Human
cagcauggggcuuggagucagc

SEQ ID NO: 659586 - RNA, 17 nt, Human
ccugccugagccauagc

SEQ ID NO: 659587 - RNA, 22 nt, Human
ccaagggcuauuuacagaacag

SEQ ID NO: 659588 - RNA, 22 nt, Human
cuuucacucgagcuccugcagc

SEQ ID NO: 659589 - RNA, 22 nt, Human
uugagaagguggucauuugcaa

SEQ ID NO: 659590 - RNA, 22 nt, Human
aggggagaaaaaugccuucugu

SEQ ID NO: 659591 - RNA, 22 nt, Human
ugcucccacacuacucggaggc

SEQ ID NO: 659592 - RNA, 22 nt, Human
gcacaugagcugcugggauggg

SEQ ID NO: 659593 - RNA, 22 nt, Human
ucuucaugaaauugauugcuua

SEQ ID NO: 659594 - RNA, 19 nt, Human
gcagcugugggaagagcca

SEQ ID NO: 659595 - RNA, 22 nt, Human
cauuguuuugagaacaaccuga

SEQ ID NO: 659596 - RNA, 22 nt, Human
guguugcucuguuuggggguug

SEQ ID NO: 659597 - RNA, 22 nt, Human
ggaaggagggcggcaaugauga

SEQ ID NO: 659598 - RNA, 22 nt, Human
aaauuuuagacuccugggucua

SEQ ID NO: 659599 - RNA, 22 nt, Human
agcuguuuucuaaugcauuuga

SEQ ID NO: 659600 - RNA, 22 nt, Human
guugaaagagcauggacuugaa

SEQ ID NO: 659601 - RNA, 22 nt, Human
gccagcugcaucuccugggcug

SEQ ID NO: 659602 - RNA, 22 nt, Human
cuccaucagcuguugguugagg

SEQ ID NO: 659603 - RNA, 22 nt, Human
uuuccauguguacuggccagaa

SEQ ID NO: 659604 - RNA, 22 nt, Human
cuguaugaaauuaaguaaacag

SEQ ID NO: 659605 - RNA, 22 nt, Human
uguccuggaucaugccucugaa

SEQ ID NO: 659606 - RNA, 22 nt, Human
gucacaggaaaggguguaaggg

SEQ ID NO: 659607 - RNA, 22 nt, Human
aguaugaaucucuuuauucugc

SEQ ID NO: 659608 - RNA, 22 nt, Human
cuauuagaaagcaucuucuaua

SEQ ID NO: 659609 - RNA, 22 nt, Human
cacugagguaucugucucuccu

SEQ ID NO: 659610 - RNA, 22 nt, Human
uucuguacccucgcgauucucc

SEQ ID NO: 659611 - RNA, 22 nt, Human
auguggcucauuguuugcuuac

SEQ ID NO: 659612 - RNA, 17 nt, Human
auuccacagggaaucug

SEQ ID NO: 659613 - RNA, 22 nt, Human
uguacaugugucuguauaucuu

SEQ ID NO: 659614 - RNA, 22 nt, Human
gagguggccagagucaagagcc

SEQ ID NO: 659615 - RNA, 22 nt, Human
uccugaauaaauuagcugucac

SEQ ID NO: 659616 - RNA, 22 nt, Human
ugaaguggacccuggacagacc

SEQ ID NO: 659617 - RNA, 22 nt, Human
ugcaggugaaaauuaugaggau

SEQ ID NO: 659618 - RNA, 22 nt, Human
gcugauuuugagaagcacaguc

SEQ ID NO: 659619 - RNA, 22 nt, Human
agggccugaggcugacggggag

SEQ ID NO: 659620 - RNA, 22 nt, Human
gcccacuggcuggagugcuggu

SEQ ID NO: 659621 - RNA, 22 nt, Human
ucaugccacuuacaaaauaaug

SEQ ID NO: 659622 - RNA, 22 nt, Human
ugauuuccccagucuugcugcu

SEQ ID NO: 659623 - RNA, 22 nt, Human
guuucacagguuggagccagca

SEQ ID NO: 659624 - RNA, 20 nt, Human
cuuuaguuauuaacagcacu

SEQ ID NO: 659625 - RNA, 22 nt, Human
uacuguuuuuuagacucauggu

SEQ ID NO: 659626 - RNA, 22 nt, Human
ugcccaaguguuuggcugaguc

SEQ ID NO: 659627 - RNA, 22 nt, Human
gccuuuggagaugucauaggau

SEQ ID NO: 659628 - RNA, 22 nt, Human
agaggcugucccuugcuauucc

SEQ ID NO: 659629 - RNA, 22 nt, Human
cccagcagccuugucccuucuc

SEQ ID NO: 659630 - RNA, 22 nt, Human
cucagggagagccaagaguucc

SEQ ID NO: 659631 - RNA, 22 nt, Human
ccacauuuacuggaugcucagg

SEQ ID NO: 659632 - RNA, 22 nt, Human
uggggugagauucagauauuca

SEQ ID NO: 659633 - RNA, 22 nt, Human
gcuugaaaauucauagguauuu

SEQ ID NO: 659634 - RNA, 22 nt, Human
caaggcaugaaaggagugagug

SEQ ID NO: 659635 - RNA, 22 nt, Human
acccaggagagagcuauaaaau

SEQ ID NO: 659636 - RNA, 22 nt, Human
auagaauucuuugaaauuuaug

SEQ ID NO: 659637 - RNA, 22 nt, Human
uaggcuggggguaggaauugag

SEQ ID NO: 659638 - RNA, 22 nt, Human
uggcuccaggggacacgcagua

SEQ ID NO: 659639 - RNA, 22 nt, Human
ugucugaagcacugggcguugc

SEQ ID NO: 659640 - RNA, 23 nt, Human
ggagccuccggugugugagaggc

SEQ ID NO: 659641 - RNA, 22 nt, Human
uuccaggaggagguacuagagg

SEQ ID NO: 659642 - RNA, 22 nt, Human
ugccugggccuucccaccucug

SEQ ID NO: 659643 - RNA, 19 nt, Human
ucuaaacacagggacaagc

SEQ ID NO: 659644 - RNA, 22 nt, Human
auucugcuccacacugauucau

SEQ ID NO: 659645 - RNA, 22 nt, Human
agucugucuaauauuauucagg

SEQ ID NO: 659646 - RNA, 20 nt, Human
gagccuuccccucaccacug

SEQ ID NO: 659647 - RNA, 22 nt, Human
gcguccagggaaggcccagcug

SEQ ID NO: 659648 - RNA, 22 nt, Human
ucugcugcagcaggauucucug

SEQ ID NO: 659649 - RNA, 22 nt, Human
cugaccaggguagaggugagag

SEQ ID NO: 659650 - RNA, 22 nt, Human
cagcccuggcgcccccagaucu

SEQ ID NO: 659651 - RNA, 22 nt, Human
aucuuuguugcucucauuucug

SEQ ID NO: 659652 - RNA, 22 nt, Human
gaaaggaaauauucuaagcacu

SEQ ID NO: 659653 - RNA, 22 nt, Human
cuacaucaaguaaucuucaaaa

SEQ ID NO: 659654 - RNA, 22 nt, Human
cuccagagggucagacucugag

SEQ ID NO: 659655 - RNA, 22 nt, Human
agugggaccggugcuauuccag

SEQ ID NO: 659656 - RNA, 22 nt, Human
cuccucuucugaguaccaggga

SEQ ID NO: 659657 - RNA, 22 nt, Human
cauaacauuaagccucuauuuc

SEQ ID NO: 659658 - RNA, 22 nt, Human
cccacauuuuugagucuucauc

SEQ ID NO: 659659 - RNA, 22 nt, Human
uccaucaccauuucugcgagcu

SEQ ID NO: 659660 - RNA, 22 nt, Human
gcuccuguuuucuuccagaaau

SEQ ID NO: 659661 - RNA, 22 nt, Human
ucucugugugccuucaucugcc

SEQ ID NO: 659662 - RNA, 19 nt, Human
ucugaauuauuuauguacc

SEQ ID NO: 659663 - RNA, 22 nt, Human
ccagagcuccagggcuacagaa

SEQ ID NO: 659664 - RNA, 22 nt, Human
uauuggugggggcagagagaga

SEQ ID NO: 659665 - RNA, 22 nt, Human
uuaauuuuuauguauagugugu

SEQ ID NO: 659666 - RNA, 22 nt, Human
uauggaugaguuccugaggagu

SEQ ID NO: 659667 - RNA, 15 nt, Human
cacacagacagcuug

SEQ ID NO: 659668 - RNA, 22 nt, Human
ugcuugaugagugugccaagca

SEQ ID NO: 659669 - RNA, 22 nt, Human
cacaauuuccaagucauguuau

SEQ ID NO: 659670 - RNA, 22 nt, Human
gaaacagucaacuuucuuuccc

SEQ ID NO: 659671 - RNA, 17 nt, Human
gggcuggauggccaugg

SEQ ID NO: 659672 - RNA, 22 nt, Human
ugugcugagugaucccauuccu

SEQ ID NO: 659673 - RNA, 18 nt, Human
uguguaugucucagggaa

SEQ ID NO: 659674 - RNA, 22 nt, Human
uugcauauauuucuaaggaggu

SEQ ID NO: 659675 - RNA, 22 nt, Human
guggucaggggcuguggcuaug

SEQ ID NO: 659676 - RNA, 18 nt, Human
acucaaggguggagagaa

SEQ ID NO: 659677 - RNA, 22 nt, Human
ugaguccuggcuuugggaugua

SEQ ID NO: 659678 - RNA, 22 nt, Human
cucugagcuccuggaagcgugc

SEQ ID NO: 659679 - RNA, 22 nt, Human
agaauaaacugcuuuagggcag

SEQ ID NO: 659680 - RNA, 23 nt, Human
ugagcagcuaaaggugaugcggg

SEQ ID NO: 659681 - RNA, 22 nt, Human
ccuccugggccuugcucuguga

SEQ ID NO: 659682 - RNA, 22 nt, Human
uugcauguuauuuaaucuguau

SEQ ID NO: 659683 - RNA, 22 nt, Human
gcagagugaagggagaggugug

SEQ ID NO: 659684 - RNA, 22 nt, Human
cccagcugcaccucuauggccu

SEQ ID NO: 659685 - RNA, 22 nt, Human
acuggccaggagcuggaaauac

SEQ ID NO: 659686 - RNA, 22 nt, Human
agugugugccuuuggauaccug

SEQ ID NO: 659687 - RNA, 19 nt, Human
ccucuccgcccaccagccc

SEQ ID NO: 659688 - RNA, 22 nt, Human
ugaggccaugcccgugccggcc

SEQ ID NO: 659689 - RNA, 21 nt, Human
uucuuucugaaucugaaguau

SEQ ID NO: 659690 - RNA, 22 nt, Human
uucaacaaugcacuugaguaua

SEQ ID NO: 659691 - RNA, 22 nt, Human
ccaggcaagagaggcucuggca

SEQ ID NO: 659692 - RNA, 22 nt, Human
uaaaugagggcugacaugauug

SEQ ID NO: 659693 - RNA, 22 nt, Human
uuuccuuugugcaggccuuggg

SEQ ID NO: 659694 - RNA, 22 nt, Human
uggagagcaagucgcagacaug

SEQ ID NO: 659695 - RNA, 22 nt, Human
aaggcugagagucacaguccua

SEQ ID NO: 659696 - RNA, 22 nt, Human
uaguguucuaagaacauccaug

SEQ ID NO: 659697 - RNA, 22 nt, Human
cugcuuucugcaccccaggucg

SEQ ID NO: 659698 - RNA, 22 nt, Human
aacauacagugagcaguggacu

SEQ ID NO: 659699 - RNA, 22 nt, Human
acacuaauuaagcugcuuuacu

SEQ ID NO: 659700 - RNA, 23 nt, Human
uucauuuaggaguucauaagagc

SEQ ID NO: 659701 - RNA, 22 nt, Human
ucagauauucaauuaaguuaaa

SEQ ID NO: 659702 - RNA, 22 nt, Human
cauauucuguuggucacauaga

SEQ ID NO: 659703 - RNA, 22 nt, Human
augugcuuggacauucuaggaa

SEQ ID NO: 659704 - RNA, 22 nt, Human
cugcugcaggaugggcacucug

SEQ ID NO: 659705 - RNA, 22 nt, Human
ggccugugggaggacagcuggg

SEQ ID NO: 659706 - RNA, 22 nt, Human
ugcagagacuugugugcauuug

SEQ ID NO: 659707 - RNA, 22 nt, Human
uaaaaggagguugaagcuguca

SEQ ID NO: 659708 - RNA, 22 nt, Human
uguauacauucucuuggguuug

SEQ ID NO: 659709 - RNA, 22 nt, Human
acaggcaccugccaccacaucu

SEQ ID NO: 659710 - RNA, 22 nt, Human
ucagaggcaucauucauaguua

SEQ ID NO: 659711 - RNA, 22 nt, Human
uuaauuaagagauacugcagua

SEQ ID NO: 659712 - RNA, 22 nt, Human
caccucugcuguccacaggaug

SEQ ID NO: 659713 - RNA, 22 nt, Human
ucuucagauggccaguuguccc

SEQ ID NO: 659714 - RNA, 22 nt, Human
aggcuguguuuccccuggagcu

SEQ ID NO: 659715 - RNA, 22 nt, Human
agauguggauccuaggguagaa

SEQ ID NO: 659716 - RNA, 22 nt, Human
agaggccaugcuagaggccugg

SEQ ID NO: 659717 - RNA, 22 nt, Human
ugagcaaggagcagucuuucuu

SEQ ID NO: 659718 - RNA, 22 nt, Human
aaaaguaauugcaauuuuguag

SEQ ID NO: 659719 - RNA, 22 nt, Human
auugaagaaacccaaauaaugg

SEQ ID NO: 659720 - RNA, 22 nt, Human
gcugagagugugagaucagauu

SEQ ID NO: 659721 - RNA, 22 nt, Human
gggcuggucuggcuuagucagg

SEQ ID NO: 659722 - RNA, 19 nt, Human
gcccugagagcuuggguuc

SEQ ID NO: 659723 - RNA, 22 nt, Human
aaacuacugauuugugaauuga

SEQ ID NO: 659724 - RNA, 22 nt, Human
ucaggaagacaaucuuuggcuc

SEQ ID NO: 659725 - RNA, 22 nt, Human
agucaggacacagcaugaacau

SEQ ID NO: 659726 - RNA, 22 nt, Human
uagcugccuaugugauaagaga

SEQ ID NO: 659727 - RNA, 22 nt, Human
cucccaggacucagaggagaag

SEQ ID NO: 659728 - RNA, 22 nt, Human
ggcacauguaugugggagugug

SEQ ID NO: 659729 - RNA, 20 nt, Human
ggggaagaaaaggaugugau

SEQ ID NO: 659730 - RNA, 22 nt, Human
aggacauguaaauggagaggga

SEQ ID NO: 659731 - RNA, 22 nt, Human
cugggagucuggaauuuuggua

SEQ ID NO: 659732 - RNA, 22 nt, Human
uagaggcagaagaaauugacaa

SEQ ID NO: 659733 - RNA, 22 nt, Human
gaaggcugaugacagauucugc

SEQ ID NO: 659734 - RNA, 22 nt, Human
auggcagagaaagcgagccaca

SEQ ID NO: 659735 - RNA, 19 nt, Human
cacuguuguccuaguacuu

SEQ ID NO: 659736 - RNA, 20 nt, Human
gcucugggagggaugugaug

SEQ ID NO: 659737 - RNA, 23 nt, Human
uagauacugcauauagguggaau

SEQ ID NO: 659738 - RNA, 22 nt, Human
gucuccuguccugcaggaugga

SEQ ID NO: 659739 - RNA, 22 nt, Human
aaggcacuuaacgugggaggau

SEQ ID NO: 659740 - RNA, 22 nt, Human
ccuguguggccgcacugcuccc

SEQ ID NO: 659741 - RNA, 22 nt, Human
gugcccagcuccaccucacaga

SEQ ID NO: 659742 - RNA, 17 nt, Human
ggcaggugcggggccgc

SEQ ID NO: 659743 - RNA, 22 nt, Human
cccuggaggaaaaucugaggcu

SEQ ID NO: 659744 - RNA, 23 nt, Human
uguaacuucuuaaauucuucacu

SEQ ID NO: 659745 - RNA, 22 nt, Human
cuguugcugagguucaaggguc

SEQ ID NO: 659746 - RNA, 22 nt, Human
aagagauuccucacucagaaug

SEQ ID NO: 659747 - RNA, 20 nt, Human
uuggcaguuaagaaucuuac

SEQ ID NO: 659748 - RNA, 22 nt, Human
ugcauuaaauauaaucuguuga

SEQ ID NO: 659749 - RNA, 22 nt, Human
aauagauggguuaaacagcaaa

SEQ ID NO: 659750 - RNA, 22 nt, Human
uucucauagagacaugauuaua

SEQ ID NO: 659751 - RNA, 22 nt, Human
aauguggggaagccauggcuga

SEQ ID NO: 659752 - RNA, 22 nt, Human
ccugggcuuugagggcaggaug

SEQ ID NO: 659753 - RNA, 22 nt, Human
augcauugaggaugacaugagu

SEQ ID NO: 659754 - RNA, 22 nt, Human
ugucacaaaaaucaguaauugc

SEQ ID NO: 659755 - RNA, 21 nt, Human
auggaaaaacagguagagcau

SEQ ID NO: 659756 - RNA, 22 nt, Human
ugcauuugucuugucucaugaa

SEQ ID NO: 659757 - RNA, 19 nt, Human
aaccaggaacuaaagcaga

SEQ ID NO: 659758 - RNA, 22 nt, Human
auagaugucauugucauccauc

SEQ ID NO: 659759 - RNA, 19 nt, Human
uccaugcccaggcaccaag

SEQ ID NO: 659760 - RNA, 22 nt, Human
guugacagcuggugagcugcua

SEQ ID NO: 659761 - RNA, 22 nt, Human
cugcugggauagaaguaucuca

SEQ ID NO: 659762 - RNA, 22 nt, Human
gguggagagcuggaugagaggu

SEQ ID NO: 659763 - RNA, 22 nt, Human
cacaaaguggguggaaaacuaa

SEQ ID NO: 659764 - RNA, 22 nt, Human
acauacacaugaauauauuuuu

SEQ ID NO: 659765 - RNA, 22 nt, Human
auuucaggagcaguuucagugg

SEQ ID NO: 659766 - RNA, 22 nt, Human
agugcauguccaguaguuuaug

SEQ ID NO: 659767 - RNA, 22 nt, Human
agcuucucccuuuccuauuggu

SEQ ID NO: 659768 - RNA, 22 nt, Human
agguggggccaaaugcuacagu

SEQ ID NO: 659769 - RNA, 22 nt, Human
cuacauacuguguguaaagaau

SEQ ID NO: 659770 - RNA, 22 nt, Human
uagauucuuaguuucauagaau

SEQ ID NO: 659771 - RNA, 22 nt, Human
agauauaguuguugagaagaac

SEQ ID NO: 659772 - RNA, 22 nt, Human
uacagguagggucuauguuaga

SEQ ID NO: 659773 - RNA, 22 nt, Human
acauuucuucccuuuagcagaa

SEQ ID NO: 659774 - RNA, 22 nt, Human
uacuuaaugccacugaauugua

SEQ ID NO: 659775 - RNA, 22 nt, Human
agauccaucaucauauuuucua

SEQ ID NO: 659776 - RNA, 22 nt, Human
ugcaauacauacuuagacccag

SEQ ID NO: 659777 - RNA, 22 nt, Human
ccugucaggguuugccucagaa

SEQ ID NO: 659778 - RNA, 22 nt, Human
aggcugugagaaguccuucagu

SEQ ID NO: 659779 - RNA, 22 nt, Human
cuacccagcaccuaggcugccu

SEQ ID NO: 659780 - RNA, 22 nt, Human
gagcugcagcggcugacgcaac

SEQ ID NO: 659781 - RNA, 22 nt, Human
uuucagaggugcuuggaaugcu

SEQ ID NO: 659782 - RNA, 22 nt, Human
agaguggccucagagaaauaca

SEQ ID NO: 659783 - RNA, 22 nt, Human
guaaaucauggucagaauaaau

SEQ ID NO: 659784 - RNA, 22 nt, Human
gagagaagaaagccaugguccu

SEQ ID NO: 659785 - RNA, 23 nt, Human
cucaacccuaguaagggaguagg

SEQ ID NO: 659786 - RNA, 22 nt, Human
auucaagguuggcucaggaauu

SEQ ID NO: 659787 - RNA, 22 nt, Human
guucucuggagucccugggccc

SEQ ID NO: 659788 - RNA, 22 nt, Human
uuucccucucaucucuauuauu

SEQ ID NO: 659789 - RNA, 22 nt, Human
acuucagccaagaaaacucagu

SEQ ID NO: 659790 - RNA, 22 nt, Human
cucuccagccaggggcuuccug

SEQ ID NO: 659791 - RNA, 21 nt, Human
uguaacaaguucccuagguga

SEQ ID NO: 659792 - RNA, 22 nt, Human
ccugaagcucuuaagaccuuua

SEQ ID NO: 659793 - RNA, 22 nt, Human
aagaaacuguugcgugacagcg

SEQ ID NO: 659794 - RNA, 22 nt, Human
gagugcaggccugagcaccauc

SEQ ID NO: 659795 - RNA, 22 nt, Human
cuauuagguaugcagccuauuu

SEQ ID NO: 659796 - RNA, 22 nt, Human
ggcucuggagcacagacgucug

SEQ ID NO: 659797 - RNA, 22 nt, Human
gggaaagagugcuuguccagag

SEQ ID NO: 659798 - RNA, 21 nt, Human
ucuccaguugacagugucucc

SEQ ID NO: 659799 - RNA, 22 nt, Human
gagggcagagucuaaugaugca

SEQ ID NO: 659800 - RNA, 20 nt, Human
auacaaagagauugauguau

SEQ ID NO: 659801 - RNA, 22 nt, Human
ugcauuaucgucuugauccucu

SEQ ID NO: 659802 - RNA, 22 nt, Human
uuugauacugagaaaaacaaau

SEQ ID NO: 659803 - RNA, 22 nt, Human
uacucaaacucacuaagacaga

SEQ ID NO: 659804 - RNA, 22 nt, Human
uguuagaaguuaaucacuaauu

SEQ ID NO: 659805 - RNA, 22 nt, Human
gggcacagucugcagcccccca

SEQ ID NO: 659806 - RNA, 22 nt, Human
auugugcuuugcaucuuguucc

SEQ ID NO: 659807 - RNA, 22 nt, Human
uagcauuuggacauugucaccu

SEQ ID NO: 659808 - RNA, 22 nt, Human
guccuuggcuucuuguugacug

SEQ ID NO: 659809 - RNA, 22 nt, Human
ucucagggugaggaaagaauuu

SEQ ID NO: 659810 - RNA, 22 nt, Human
agcugugugacucuaagcaagu

SEQ ID NO: 659811 - RNA, 22 nt, Human
agaggggcgggaacucaaccuc

SEQ ID NO: 659812 - RNA, 22 nt, Human
cucacaggagaaagucaugguc

SEQ ID NO: 659813 - RNA, 22 nt, Human
ucugucuuagcaucuuugcuca

SEQ ID NO: 659814 - RNA, 22 nt, Human
acagucugcuugucuccauggu

SEQ ID NO: 659815 - RNA, 22 nt, Human
ucaggagguugaccacggggca

SEQ ID NO: 659816 - RNA, 22 nt, Human
uucaguuuuauuguacugcuau

SEQ ID NO: 659817 - RNA, 22 nt, Human
agggcuuuugagcgcacgucug

SEQ ID NO: 659818 - RNA, 22 nt, Human
gaggagcaugggaaggcucugg

SEQ ID NO: 659819 - RNA, 22 nt, Human
uccucugcuguucugguucuuu

SEQ ID NO: 659820 - RNA, 22 nt, Human
auuauuugaguuccucucuacc

SEQ ID NO: 659821 - RNA, 22 nt, Human
gcuucagaaaugaacacugucu

SEQ ID NO: 659822 - RNA, 22 nt, Human
ccuucuucuguguggcccaaga

SEQ ID NO: 659823 - RNA, 22 nt, Human
uccaugaggcagggaggcuggc

SEQ ID NO: 659824 - RNA, 22 nt, Human
uaacagaauuugcuaaacuccg

SEQ ID NO: 659825 - RNA, 22 nt, Human
gcagcaggagaguaauagcggu

SEQ ID NO: 659826 - RNA, 22 nt, Human
aucugcuucgcgccaauuucau

SEQ ID NO: 659827 - RNA, 22 nt, Human
gagcaggacgugggaaugggaa

SEQ ID NO: 659828 - RNA, 22 nt, Human
gcuacaggugacagccucugca

SEQ ID NO: 659829 - RNA, 22 nt, Human
cagagagaggggcugccuggcc

SEQ ID NO: 659830 - RNA, 22 nt, Human
uacccuggagcaaguuuccuca

SEQ ID NO: 659831 - RNA, 22 nt, Human
acugagcaggguuccgcaugga

SEQ ID NO: 659832 - RNA, 22 nt, Human
uucccgucuuugcuaugccugc

SEQ ID NO: 659833 - RNA, 22 nt, Human
ucacugcagguuuuucaggagg

SEQ ID NO: 659834 - RNA, 22 nt, Human
ccuggggcucugcacagagcag

SEQ ID NO: 659835 - RNA, 22 nt, Human
gagacaggccaggugguacuua

SEQ ID NO: 659836 - RNA, 21 nt, Human
uacaugaagcugguguuuguc

SEQ ID NO: 659837 - RNA, 22 nt, Human
cagaaguggauauuagaguaau

SEQ ID NO: 659838 - RNA, 22 nt, Human
caaugcuuuuagcuucagcuug

SEQ ID NO: 659839 - RNA, 22 nt, Human
acuaaguaguuucacauauaau

SEQ ID NO: 659840 - RNA, 23 nt, Human
uuguccagcugguuugggccaca

SEQ ID NO: 659841 - RNA, 22 nt, Human
uugauuaaaaugagacaucauu

SEQ ID NO: 659842 - RNA, 22 nt, Human
gcauggcagaacaccucgcccg

SEQ ID NO: 659843 - RNA, 22 nt, Human
uugcuuuuuaauuaggaggcag

SEQ ID NO: 659844 - RNA, 22 nt, Human
agaacaauguuaaauuauuaag

SEQ ID NO: 659845 - RNA, 22 nt, Human
cagugauuuuaaacuauggaug

SEQ ID NO: 659846 - RNA, 22 nt, Human
gugagcagccucaccugagggu

SEQ ID NO: 659847 - RNA, 22 nt, Human
accagagggagacuuccucuuc

SEQ ID NO: 659848 - RNA, 22 nt, Human
ggggcagaguagcuggggugug

SEQ ID NO: 659849 - RNA, 22 nt, Human
aaucuucuacuugacaguucuc

SEQ ID NO: 659850 - RNA, 22 nt, Human
uucagacuucuugacuggcuuu

SEQ ID NO: 659851 - RNA, 22 nt, Human
uccucugguccugcagcagauc

SEQ ID NO: 659852 - RNA, 22 nt, Human
cccagugugccccuccugcagc

SEQ ID NO: 659853 - RNA, 22 nt, Human
acccagagcccuuagcacagac

SEQ ID NO: 659854 - RNA, 22 nt, Human
guuuuccauggaggucugaccu

SEQ ID NO: 659855 - RNA, 22 nt, Human
gggcuugcugauuugggcagga

SEQ ID NO: 659856 - RNA, 22 nt, Human
gccccuucucugaggaaccugc

SEQ ID NO: 659857 - RNA, 22 nt, Human
aguggcaggaucucgguucacu

SEQ ID NO: 659858 - RNA, 22 nt, Human
gauuauggagaaauaauuagaa

SEQ ID NO: 659859 - RNA, 22 nt, Human
gcagaggcacagccccagauga

SEQ ID NO: 659860 - RNA, 22 nt, Human
agccagagagccccagguucua

SEQ ID NO: 659861 - RNA, 22 nt, Human
uggcucauucuacucucccugg

SEQ ID NO: 659862 - RNA, 20 nt, Human
agugagauugcugcucuagc

SEQ ID NO: 659863 - RNA, 22 nt, Human
aggcuuccuggaggaagaggua

SEQ ID NO: 659864 - RNA, 22 nt, Human
acacaaaguuggaugacaaaau

SEQ ID NO: 659865 - RNA, 22 nt, Human
aggucuccuugugggucuugcc

SEQ ID NO: 659866 - RNA, 22 nt, Human
gacucugugggaggaggcucag

SEQ ID NO: 659867 - RNA, 22 nt, Human
cagagcuggccugugauuuuug

SEQ ID NO: 659868 - RNA, 22 nt, Human
uccaggagaggccugaccaggu

SEQ ID NO: 659869 - RNA, 22 nt, Human
ccucagcugcugcacagcuuuu

SEQ ID NO: 659870 - RNA, 22 nt, Human
cugacccuugcucgggcccugu

SEQ ID NO: 659871 - RNA, 19 nt, Human
uucugggcagcacaugaau

SEQ ID NO: 659872 - RNA, 22 nt, Human
auaugcauuuaccuggcauaua

SEQ ID NO: 659873 - RNA, 19 nt, Human
ccacacagugugcaauuua

SEQ ID NO: 659874 - RNA, 22 nt, Human
agagcugggacuuggacucaau

SEQ ID NO: 659875 - RNA, 22 nt, Human
caggauggucagaugcauuguc

SEQ ID NO: 659876 - RNA, 22 nt, Human
guccucagaagccugcuuagcu

SEQ ID NO: 659877 - RNA, 18 nt, Human
aggcaggauccuggccuc

SEQ ID NO: 659878 - RNA, 22 nt, Human
gggcuggcucugucuagaaagg

SEQ ID NO: 659879 - RNA, 22 nt, Human
cagacacugcagcagucuccca

SEQ ID NO: 659880 - RNA, 22 nt, Human
uuuguaaaauuagggaauucaa

SEQ ID NO: 659881 - RNA, 22 nt, Human
gcuggcugccaauuucagagcu

SEQ ID NO: 659882 - RNA, 22 nt, Human
uacaugaacaaaauagcagaaa

SEQ ID NO: 659883 - RNA, 17 nt, Human
uuccagcauguuacuaa

SEQ ID NO: 659884 - RNA, 22 nt, Human
aguagcauaaauagugguagua

SEQ ID NO: 659885 - RNA, 22 nt, Human
gacuuuauuacuaacccuguga

SEQ ID NO: 659886 - RNA, 22 nt, Human
uucuuaaguuuagcaacuugug

SEQ ID NO: 659887 - RNA, 22 nt, Human
cuccaggcuucaagggccggcc

SEQ ID NO: 659888 - RNA, 22 nt, Human
uggauuugcuaccuucugauau

SEQ ID NO: 659889 - RNA, 22 nt, Human
agcaggggucucugcuaaugaa

SEQ ID NO: 659890 - RNA, 22 nt, Human
cuggccuagcucucugcuugaa

SEQ ID NO: 659891 - RNA, 22 nt, Human
cuggcaugaaauggcaucucau

SEQ ID NO: 659892 - RNA, 22 nt, Human
uccaauaaccacaaucagauag

SEQ ID NO: 659893 - RNA, 22 nt, Human
cugcccuguagcuguucuagca

SEQ ID NO: 659894 - RNA, 22 nt, Human
gagauucucgagggcuuccagc

SEQ ID NO: 659895 - RNA, 22 nt, Human
cugggaaggggaagguccucuc

SEQ ID NO: 659896 - RNA, 22 nt, Human
gcaggcaguugcaguuuucuag

SEQ ID NO: 659897 - RNA, 22 nt, Human
ucugccuguugagccuaaggcc

SEQ ID NO: 659898 - RNA, 21 nt, Human
agagucugagugugcaagggc

SEQ ID NO: 659899 - RNA, 22 nt, Human
cacaucuucuuaacuccaaagu

SEQ ID NO: 659900 - RNA, 22 nt, Human
gcuuugaagucugugucuuuug

SEQ ID NO: 659901 - RNA, 22 nt, Human
cacccaggcuggagugcauugg

SEQ ID NO: 659902 - RNA, 22 nt, Human
cugcuuuggacaacuauucuug

SEQ ID NO: 659903 - RNA, 22 nt, Human
guuauucuacagucauugaagu

SEQ ID NO: 659904 - RNA, 22 nt, Human
ucacauugaagaaauuuuaagu

SEQ ID NO: 659905 - RNA, 22 nt, Human
ucacagaaguguguuucaggag

SEQ ID NO: 659906 - RNA, 22 nt, Human
gugcauuccaccgugcagguug

SEQ ID NO: 659907 - RNA, 22 nt, Human
aaguucaaguaguguuacaugg

SEQ ID NO: 659908 - RNA, 22 nt, Human
gcaaaugcucuccuuggucagg

SEQ ID NO: 659909 - RNA, 23 nt, Human
uaaauuucuugauucuuauguga

SEQ ID NO: 659910 - RNA, 22 nt, Human
uucuggaaguuggaaauagcag

SEQ ID NO: 659911 - RNA, 22 nt, Human
ucuagacaaugcacuguaagga

SEQ ID NO: 659912 - RNA, 21 nt, Human
ucucugggcccuccugugggg

SEQ ID NO: 659913 - RNA, 22 nt, Human
ucacuugaauucauucugcgaa

SEQ ID NO: 659914 - RNA, 22 nt, Human
cacagagcugaaccugggucau

SEQ ID NO: 659915 - RNA, 22 nt, Human
gcagccaggaagcccaggacac

SEQ ID NO: 659916 - RNA, 22 nt, Human
ucaggagggcuaagacuguagc

SEQ ID NO: 659917 - RNA, 23 nt, Human
gagauucuccuguugucaagucu

SEQ ID NO: 659918 - RNA, 23 nt, Human
aggcagagccaaggucaaaaccc

SEQ ID NO: 659919 - RNA, 22 nt, Human
caaugucagagaagcucauauc

SEQ ID NO: 659920 - RNA, 22 nt, Human
gagaaggaggcgaagcgugugc

SEQ ID NO: 659921 - RNA, 20 nt, Human
ugggauuguuuuuuagcuuc

SEQ ID NO: 659922 - RNA, 22 nt, Human
uccaguggagugugggggugaa

SEQ ID NO: 659923 - RNA, 17 nt, Human
acagggcagaaacagcu

SEQ ID NO: 659924 - RNA, 22 nt, Human
aaauccaucaaaucuucuagaa

SEQ ID NO: 659925 - RNA, 22 nt, Human
ggaacugauuaagucaugagaa

SEQ ID NO: 659926 - RNA, 22 nt, Human
cucccuggaggugagcuggcac

SEQ ID NO: 659927 - RNA, 22 nt, Human
agagcacacugacgucagucug

SEQ ID NO: 659928 - RNA, 22 nt, Human
uggcucagccagcccuaggaac

SEQ ID NO: 659929 - RNA, 21 nt, Human
ccuucuccauuacaguaagcu

SEQ ID NO: 659930 - RNA, 22 nt, Human
cacugaaaauuagcuuuccuga

SEQ ID NO: 659931 - RNA, 22 nt, Human
gucugcuggcacgucacagaua

SEQ ID NO: 659932 - RNA, 22 nt, Human
ccaccagcagugugcaaggauu

SEQ ID NO: 659933 - RNA, 22 nt, Human
gacaucugaggcccucagagcc

SEQ ID NO: 659934 - RNA, 22 nt, Human
uaacugaagcuggaagcgcugg

SEQ ID NO: 659935 - RNA, 22 nt, Human
auuuguuccacacauauuuacu

SEQ ID NO: 659936 - RNA, 22 nt, Human
gaugcacaugugaguauagaag

SEQ ID NO: 659937 - RNA, 22 nt, Human
guguuuauuuagaguaggccau

SEQ ID NO: 659938 - RNA, 22 nt, Human
auucagaauuuuggggagcuaa

SEQ ID NO: 659939 - RNA, 22 nt, Human
uacaguuaaaaaguucaauggu

SEQ ID NO: 659940 - RNA, 22 nt, Human
cccagcucuuuuagcggcaucu

SEQ ID NO: 659941 - RNA, 22 nt, Human
ugcugcagguguguucagugag

SEQ ID NO: 659942 - RNA, 22 nt, Human
ugaaagcaggcgggcuacuuua

SEQ ID NO: 659943 - RNA, 22 nt, Human
uucuggaaagauuugcguguaa

SEQ ID NO: 659944 - RNA, 22 nt, Human
aaaggcuuguuugaggacuggu

SEQ ID NO: 659945 - RNA, 22 nt, Human
cuggaaggcucugcugccuguc

SEQ ID NO: 659946 - RNA, 22 nt, Human
ugugggaagauguugcaggaga

SEQ ID NO: 659947 - RNA, 22 nt, Human
gaggaggaaacccuguuccucu

SEQ ID NO: 659948 - RNA, 22 nt, Human
uuugaaagcaccauuugaguag

SEQ ID NO: 659949 - RNA, 22 nt, Human
gggaugauaaugccagaguuaa

SEQ ID NO: 659950 - RNA, 22 nt, Human
acugaccagauaugucauaccu

SEQ ID NO: 659951 - RNA, 22 nt, Human
cgaggcucagagagggugacuu

SEQ ID NO: 659952 - RNA, 22 nt, Human
aagaggagaaaggcuggcuuug

SEQ ID NO: 659953 - RNA, 23 nt, Human
acaagauagggauaaaaagauaa

SEQ ID NO: 659954 - RNA, 22 nt, Human
uuuauguacauauccacaagga

SEQ ID NO: 659955 - RNA, 22 nt, Human
aagugguuugauucaguuuaug

SEQ ID NO: 659956 - RNA, 22 nt, Human
caaagacugcauaacacaugaa

SEQ ID NO: 659957 - RNA, 22 nt, Human
ucuccccaaccauggcacucac

SEQ ID NO: 659958 - RNA, 22 nt, Human
guacauuggcaacucucuuaga

SEQ ID NO: 659959 - RNA, 22 nt, Human
uggaaaaaacccagacucuaga

SEQ ID NO: 659960 - RNA, 22 nt, Human
agagccagguguagucucggag

SEQ ID NO: 659961 - RNA, 22 nt, Human
aggaagaggguggcagauaauc

SEQ ID NO: 659962 - RNA, 22 nt, Human
gcagcuggaagugacacucugu

SEQ ID NO: 659963 - RNA, 19 nt, Human
ccagcagcuuugauucucu

SEQ ID NO: 659964 - RNA, 22 nt, Human
uccugucugucuuuggucccuu

SEQ ID NO: 659965 - RNA, 22 nt, Human
cauuugcagagggugacacucu

SEQ ID NO: 659966 - RNA, 22 nt, Human
ucugcagcuuuuugguggggug

SEQ ID NO: 659967 - RNA, 22 nt, Human
agccaggugcaguggcacacac

SEQ ID NO: 659968 - RNA, 22 nt, Human
gccauggcccauaccaggugca

SEQ ID NO: 659969 - RNA, 22 nt, Human
cugcuuuauauugagcuugaaa

SEQ ID NO: 659970 - RNA, 22 nt, Human
ucucugcugagaagggcuggca

SEQ ID NO: 659971 - RNA, 22 nt, Human
uucagaaagguaaauggauuuc

SEQ ID NO: 659972 - RNA, 22 nt, Human
ggaggguuagcaaaggcacaga

SEQ ID NO: 659973 - RNA, 22 nt, Human
ugacagagcugggauuugaagc

SEQ ID NO: 659974 - RNA, 22 nt, Human
ugggcagagaguagaggcaacg

SEQ ID NO: 659975 - RNA, 22 nt, Human
gcuuccugaguacacccucauc

SEQ ID NO: 659976 - RNA, 22 nt, Human
aucuucuacuuugccaaucagg

SEQ ID NO: 659977 - RNA, 22 nt, Human
ggcuauauccucacaagaugga

SEQ ID NO: 659978 - RNA, 22 nt, Human
aaaaugaauaaguuaacccagg

SEQ ID NO: 659979 - RNA, 22 nt, Human
accuacugcuccacagugacua

SEQ ID NO: 659980 - RNA, 22 nt, Human
cuguguuuggacaacuuuucag

SEQ ID NO: 659981 - RNA, 22 nt, Human
ggccuaagugguuaaauggcuu

SEQ ID NO: 659982 - RNA, 22 nt, Human
acaaugcaccagcaucuucacc

SEQ ID NO: 659983 - RNA, 22 nt, Human
uaggccuucggugugugcuugg

SEQ ID NO: 659984 - RNA, 23 nt, Human
agagaaagggauaacacguugaa

SEQ ID NO: 659985 - RNA, 19 nt, Human
ccuggcugcugugggaugc

SEQ ID NO: 659986 - RNA, 21 nt, Human
gcagagccggggcgagaaggc

SEQ ID NO: 659987 - RNA, 22 nt, Human
uauggauguuuaucuacaggcu

SEQ ID NO: 659988 - RNA, 22 nt, Human
cagaaccugagagcacaauccu

SEQ ID NO: 659989 - RNA, 22 nt, Human
cagcuuggaggaggaucuaaga

SEQ ID NO: 659990 - RNA, 22 nt, Human
cacauuuacauauaaaacuuuc

SEQ ID NO: 659991 - RNA, 22 nt, Human
guagaauuuuaauaauggagau

SEQ ID NO: 659992 - RNA, 21 nt, Human
uggcugaguggaugcaugaau

SEQ ID NO: 659993 - RNA, 22 nt, Human
ugacaguuaagguauacauuca

SEQ ID NO: 659994 - RNA, 22 nt, Human
gcuguccaugucuggccucagu

SEQ ID NO: 659995 - RNA, 22 nt, Human
aguaccauuauccaguaaagga

SEQ ID NO: 659996 - RNA, 22 nt, Human
uucuguuacauggggcacagug

SEQ ID NO: 659997 - RNA, 22 nt, Human
uacaugucuggguuuuguuucc

SEQ ID NO: 659998 - RNA, 22 nt, Human
auguaugaugcuaggcucucag

SEQ ID NO: 659999 - RNA, 22 nt, Human
ucugaggaauaagaaggaagug

SEQ ID NO: 660000 - RNA, 22 nt, Human
gcuggcugcacaggggcucacu

SEQ ID NO: 660001 - RNA, 22 nt, Human
agagccugcagcugugaagaaa

SEQ ID NO: 660002 - RNA, 22 nt, Human
ccaguuuaagacuuaucucaau

SEQ ID NO: 660003 - RNA, 22 nt, Human
ucuuaagaaagugacaaauagg

SEQ ID NO: 660004 - RNA, 22 nt, Human
uggguaggaaucgaguguaugg

SEQ ID NO: 660005 - RNA, 22 nt, Human
aagggcuggucuagaaagggag

SEQ ID NO: 660006 - RNA, 22 nt, Human
uuagaguuuuaucauugccuua

SEQ ID NO: 660007 - RNA, 22 nt, Human
gcuggguuuucuuccgggccua

SEQ ID NO: 660008 - RNA, 22 nt, Human
ucugggcagagggucuuaguca

SEQ ID NO: 660009 - RNA, 22 nt, Human
ucuggcuucuaugaauguccuu

SEQ ID NO: 660010 - RNA, 22 nt, Human
acuuaacagacauuauuuaccu

SEQ ID NO: 660011 - RNA, 22 nt, Human
ucuggccacuaauaggucucac

SEQ ID NO: 660012 - RNA, 23 nt, Human
cuucucagaagucugugccagga

SEQ ID NO: 660013 - RNA, 22 nt, Human
augcucucuguccugcucagag

SEQ ID NO: 660014 - RNA, 22 nt, Human
cauaucuuaugguuuucuaagu

SEQ ID NO: 660015 - RNA, 22 nt, Human
uuuacaguuaagaaauguuacc

SEQ ID NO: 660016 - RNA, 22 nt, Human
auucacaaaugcugccccauuc

SEQ ID NO: 660017 - RNA, 21 nt, Human
ccucaaagaugaugggguuuc

SEQ ID NO: 660018 - RNA, 22 nt, Human
gcuggguccuaugcugguagag

SEQ ID NO: 660019 - RNA, 22 nt, Human
acugccugaugugguucuaaau

SEQ ID NO: 660020 - RNA, 22 nt, Human
uggagcugggauuugaacugca

SEQ ID NO: 660021 - RNA, 20 nt, Human
ugcauuuguuauuuguacuc

SEQ ID NO: 660022 - RNA, 22 nt, Human
caaggcagaauucagacucagg

SEQ ID NO: 660023 - RNA, 22 nt, Human
ugaagcaguucucagaaguggg

SEQ ID NO: 660024 - RNA, 22 nt, Human
ggguggcaggauuggcaggagu

SEQ ID NO: 660025 - RNA, 22 nt, Human
uguucccauuuucugcauaauc

SEQ ID NO: 660026 - RNA, 22 nt, Human
gcugccacauuuucaggacuaa

SEQ ID NO: 660027 - RNA, 22 nt, Human
guuuaaaguagcuuccuuuugg

SEQ ID NO: 660028 - RNA, 22 nt, Human
aucagaaaguucaucauguuug

SEQ ID NO: 660029 - RNA, 22 nt, Human
auggccuuggcugcagagacau

SEQ ID NO: 660030 - RNA, 22 nt, Human
uuuuuucagccugucugugcca

SEQ ID NO: 660031 - RNA, 22 nt, Human
acagaguuuauguguguacaaa

SEQ ID NO: 660032 - RNA, 21 nt, Human
uaggcagaggagcagguaucu

SEQ ID NO: 660033 - RNA, 18 nt, Human
agcaaagcaagagaucac

SEQ ID NO: 660034 - RNA, 22 nt, Human
uucuuucugucaugguguacug

SEQ ID NO: 660035 - RNA, 23 nt, Human
ucuggcucuaugugacagcucuc

SEQ ID NO: 660036 - RNA, 22 nt, Human
acaugaaauucuagcugaaccc

SEQ ID NO: 660037 - RNA, 22 nt, Human
gaccuccagcggcccugcagag

SEQ ID NO: 660038 - RNA, 20 nt, Human
ggcaccaggcuaggauugga

SEQ ID NO: 660039 - RNA, 22 nt, Human
ugcuuucaaugaauuguauacu

SEQ ID NO: 660040 - RNA, 22 nt, Human
uuugaacugauaaucuucuguu

SEQ ID NO: 660041 - RNA, 22 nt, Human
ucuggcuugucucagggucuga

SEQ ID NO: 660042 - RNA, 22 nt, Human
ucucuuugucugcucuuaguug

SEQ ID NO: 660043 - RNA, 22 nt, Human
uccugggacccugggugcagag

SEQ ID NO: 660044 - RNA, 22 nt, Human
agcuuguuguuacugaugcauu

SEQ ID NO: 660045 - RNA, 22 nt, Human
uuccagucuggccugugcuuag

SEQ ID NO: 660046 - RNA, 22 nt, Human
augcugugagugugccgcagag

SEQ ID NO: 660047 - RNA, 22 nt, Human
gaaaccagcuagaggcagaggg

SEQ ID NO: 660048 - RNA, 22 nt, Human
guaggaaaguaaaugaaauaca

SEQ ID NO: 660049 - RNA, 22 nt, Human
agucucuggggaggaguggaaa

SEQ ID NO: 660050 - RNA, 22 nt, Human
ugucaccucuuuggcugcagcu

SEQ ID NO: 660051 - RNA, 22 nt, Human
cucugcaugccuugcucagaca

SEQ ID NO: 660052 - RNA, 22 nt, Human
ccagagaaaagaggccaaggau

SEQ ID NO: 660053 - RNA, 22 nt, Human
uagauauaucugucauacuggu

SEQ ID NO: 660054 - RNA, 22 nt, Human
aauucaguuggcaaacaugcug

SEQ ID NO: 660055 - RNA, 23 nt, Human
ucuaaaauucaucauuuacguuc

SEQ ID NO: 660056 - RNA, 22 nt, Human
uucacagugugaucuaugggca

SEQ ID NO: 660057 - RNA, 22 nt, Human
uuugcauaaaggagcauuucuc

SEQ ID NO: 660058 - RNA, 22 nt, Human
ucaaugcacacaggacuuggug

SEQ ID NO: 660059 - RNA, 18 nt, Human
gaagggagcuggaaugca

SEQ ID NO: 660060 - RNA, 22 nt, Human
gcagagccaugggagguuuuug

SEQ ID NO: 660061 - RNA, 23 nt, Human
uugaagucucaguuuucucauag

SEQ ID NO: 660062 - RNA, 22 nt, Human
gagggaugguaguugacacuga

SEQ ID NO: 660063 - RNA, 22 nt, Human
ugucuguuauugguguauaaga

SEQ ID NO: 660064 - RNA, 22 nt, Human
uggaggcaucagagugcuuggc

SEQ ID NO: 660065 - RNA, 22 nt, Human
agcucccagcuccuuugagaga

SEQ ID NO: 660066 - RNA, 22 nt, Human
ggugagugccuggccuggccac

SEQ ID NO: 660067 - RNA, 22 nt, Human
ucagggcauucaagaggccugg

SEQ ID NO: 660068 - RNA, 20 nt, Human
gcagugcuggugccucugcu

SEQ ID NO: 660069 - RNA, 22 nt, Human
uauguuuaaauguauguguaug

SEQ ID NO: 660070 - RNA, 21 nt, Human
acaguauauuagauauuugaa

SEQ ID NO: 660071 - RNA, 22 nt, Human
uugcaaaugaccauugccacau

SEQ ID NO: 660072 - RNA, 22 nt, Human
guauuuuucaguuaggagcuua

SEQ ID NO: 660073 - RNA, 22 nt, Human
cugcuuuagacaacugcuggga

SEQ ID NO: 660074 - RNA, 22 nt, Human
cagggaagaauaguuagcaaag

SEQ ID NO: 660075 - RNA, 22 nt, Human
cacagacuccccgccauagugg

SEQ ID NO: 660076 - RNA, 22 nt, Human
auuuauuaccucggaguuucug

SEQ ID NO: 660077 - RNA, 22 nt, Human
cacccuagcugucauuucaguu

SEQ ID NO: 660078 - RNA, 22 nt, Human
ccagugugaaaggucauuuauc

SEQ ID NO: 660079 - RNA, 22 nt, Human
guggccagaggauuuguucagu

SEQ ID NO: 660080 - RNA, 20 nt, Human
ggcaggacccgguagggagc

SEQ ID NO: 660081 - RNA, 22 nt, Human
accaagcucucuucccggcucu

SEQ ID NO: 660082 - RNA, 22 nt, Human
uucuggaagcugcagguggccg

SEQ ID NO: 660083 - RNA, 22 nt, Human
uuggcaggaggcuucaguuccu

SEQ ID NO: 660084 - RNA, 22 nt, Human
ugaggccuggagggaggaguuu

SEQ ID NO: 660085 - RNA, 22 nt, Human
aggcucucagaucagccacauu

SEQ ID NO: 660086 - RNA, 22 nt, Human
aguuggcauuccugcauccuau

SEQ ID NO: 660087 - RNA, 22 nt, Human
aaggugucacugggacaggaaa

SEQ ID NO: 660088 - RNA, 22 nt, Human
ucuauuacuuaccacuaauuca

SEQ ID NO: 660089 - RNA, 22 nt, Human
augcugcacaagccacauguag

SEQ ID NO: 660090 - RNA, 22 nt, Human
cuucaggaaaaucucuaaggau

SEQ ID NO: 660091 - RNA, 22 nt, Human
uuacaacaccaggcaguauccu

SEQ ID NO: 660092 - RNA, 22 nt, Human
cugaggccuguguuggggcagu

SEQ ID NO: 660093 - RNA, 22 nt, Human
agccuggccaggccugcccagg

SEQ ID NO: 660094 - RNA, 22 nt, Human
auuuggaaggcguuucucugua

SEQ ID NO: 660095 - RNA, 22 nt, Human
cuguauaaccccaugcgacugu

SEQ ID NO: 660096 - RNA, 22 nt, Human
cuguuuaaugagguguaacaac

SEQ ID NO: 660097 - RNA, 22 nt, Human
cacaggagcccugaggccuccc

SEQ ID NO: 660098 - RNA, 22 nt, Human
uuuggguucagacaugauuaca

SEQ ID NO: 660099 - RNA, 22 nt, Human
uauggcaauauguaucaagauc

SEQ ID NO: 660100 - RNA, 22 nt, Human
acacaccaugauuuauuuaccc

SEQ ID NO: 660101 - RNA, 22 nt, Human
agcaauguaaacccugaaguug

SEQ ID NO: 660102 - RNA, 20 nt, Human
agaagcugagacuggguuuu

SEQ ID NO: 660103 - RNA, 22 nt, Human
gugacaaaaacacugauuauuu

SEQ ID NO: 660104 - RNA, 22 nt, Human
ggagguggcagagggacauucu

SEQ ID NO: 660105 - RNA, 22 nt, Human
aucuguggcgcaaacaaaggcu

SEQ ID NO: 660106 - RNA, 22 nt, Human
agguuccucuuccucuggccug

SEQ ID NO: 660107 - RNA, 22 nt, Human
aaaugauugucaaaguucuguu

SEQ ID NO: 660108 - RNA, 22 nt, Human
gagcuuccugaugccgaccagu

SEQ ID NO: 660109 - RNA, 20 nt, Human
uguauuuaaugaaggcuuuu

SEQ ID NO: 660110 - RNA, 22 nt, Human
ggcuccugggagauagagguca

SEQ ID NO: 660111 - RNA, 22 nt, Human
gggcugagucaucuggggccuc

SEQ ID NO: 660112 - RNA, 22 nt, Human
agcagaaaauuggaaaugacaa

SEQ ID NO: 660113 - RNA, 22 nt, Human
auucaguuccuugaggguauag

SEQ ID NO: 660114 - RNA, 22 nt, Human
guaugcuuauuccuuguuguga

SEQ ID NO: 660115 - RNA, 22 nt, Human
acugucaugacguuugucaccc

SEQ ID NO: 660116 - RNA, 22 nt, Human
gaggcuucuguaacccuguccu

SEQ ID NO: 660117 - RNA, 22 nt, Human
aaagcagaggugauaugacuua

SEQ ID NO: 660118 - RNA, 22 nt, Human
ccaggucuucacuuuacugaag

SEQ ID NO: 660119 - RNA, 22 nt, Human
agagacaggaauggcauuaaga

SEQ ID NO: 660120 - RNA, 22 nt, Human
ugagaguuuugacgcuuguaac

SEQ ID NO: 660121 - RNA, 22 nt, Human
guuauauugccaaguauauugu

SEQ ID NO: 660122 - RNA, 22 nt, Human
guuuguuuguagggaagccgug

SEQ ID NO: 660123 - RNA, 22 nt, Human
aaucuuacuuaugauuuuucgg

SEQ ID NO: 660124 - RNA, 22 nt, Human
cccuccagggagccaugcuggg

SEQ ID NO: 660125 - RNA, 22 nt, Human
guuucagauauauuuguacuua

SEQ ID NO: 660126 - RNA, 19 nt, Human
ggcccaaguacugagugcc

SEQ ID NO: 660127 - RNA, 22 nt, Human
uaauugcuuuauccuguuagaa

SEQ ID NO: 660128 - RNA, 22 nt, Human
ucagaccauccugcuguuagug

SEQ ID NO: 660129 - RNA, 22 nt, Human
ucagaagaaagauguuauuacu

SEQ ID NO: 660130 - RNA, 22 nt, Human
cauggccagggcagauggcagg

SEQ ID NO: 660131 - RNA, 19 nt, Human
caucucugcaaggagcugc

SEQ ID NO: 660132 - RNA, 22 nt, Human
gauauagguucauaguguuaca

SEQ ID NO: 660133 - RNA, 22 nt, Human
cuucugugaccaccagcagccc

SEQ ID NO: 660134 - RNA, 22 nt, Human
uauaaagaaaugauuuccagaa

SEQ ID NO: 660135 - RNA, 22 nt, Human
uucaaagcagagggucaauaca

SEQ ID NO: 660136 - RNA, 22 nt, Human
ugacagaccacugcaacucugu

SEQ ID NO: 660137 - RNA, 22 nt, Human
agugacagauuaccggcagagc

SEQ ID NO: 660138 - RNA, 17 nt, Human
accaggcaacacgccca

SEQ ID NO: 660139 - RNA, 22 nt, Human
aaaaauagcuucucuugucccu

SEQ ID NO: 660140 - RNA, 22 nt, Human
ugugcgcgugcagcggaguguu

SEQ ID NO: 660141 - RNA, 22 nt, Human
caagcucugggauagcagagag

SEQ ID NO: 660142 - RNA, 20 nt, Human
uguggaugagguaaggauag

SEQ ID NO: 660143 - RNA, 22 nt, Human
uuaaacagagucugaaauguaa

SEQ ID NO: 660144 - RNA, 22 nt, Human
cugcuuuaacucugggaagcca

SEQ ID NO: 660145 - RNA, 22 nt, Human
gauugagucugaggaugcugca

SEQ ID NO: 660146 - RNA, 22 nt, Human
ccugagcucaagaaggugacca

SEQ ID NO: 660147 - RNA, 23 nt, Human
ugcucccaggugacgcugcuguu

SEQ ID NO: 660148 - RNA, 22 nt, Human
gagcugaguuaccuccagauca

SEQ ID NO: 660149 - RNA, 22 nt, Human
gagagagagcuaauauuaagcu

SEQ ID NO: 660150 - RNA, 22 nt, Human
ggcuuuauuauguggccaugug

SEQ ID NO: 660151 - RNA, 22 nt, Human
uccaggaggugaggggaccaaa

SEQ ID NO: 660152 - RNA, 22 nt, Human
aggcacugauucucagaguuac

SEQ ID NO: 660153 - RNA, 22 nt, Human
ggccuugggcgagucccucagu

SEQ ID NO: 660154 - RNA, 22 nt, Human
uguguucuggaaagcucacuga

SEQ ID NO: 660155 - RNA, 21 nt, Human
uucaaaaugguguguuugucu

SEQ ID NO: 660156 - RNA, 22 nt, Human
ucagcuuuccuugcuuuagauu

SEQ ID NO: 660157 - RNA, 22 nt, Human
aaagcagugcaccuuaauugau

SEQ ID NO: 660158 - RNA, 22 nt, Human
ccuuggagaagacagugccagg

SEQ ID NO: 660159 - RNA, 20 nt, Human
acaguuuauuuuacuugguu

SEQ ID NO: 660160 - RNA, 22 nt, Human
gccuucaguaacugagacggaa

SEQ ID NO: 660161 - RNA, 23 nt, Human
gcaugcaacuugcaguaguauuc

SEQ ID NO: 660162 - RNA, 22 nt, Human
agcagcacgaguccacaaaucc

SEQ ID NO: 660163 - RNA, 22 nt, Human
uagagagccaguugucauaguu

SEQ ID NO: 660164 - RNA, 22 nt, Human
uauuauuauauuggaugagacu

SEQ ID NO: 660165 - RNA, 21 nt, Human
agagcugguagguagguaggu

SEQ ID NO: 660166 - RNA, 22 nt, Human
uguguccuucugggagucccag

SEQ ID NO: 660167 - RNA, 22 nt, Human
ggguggcuccuaugggcauagc

SEQ ID NO: 660168 - RNA, 22 nt, Human
uccuuuuuaagucguuguggua

SEQ ID NO: 660169 - RNA, 22 nt, Human
uuuuuagccaagccauaggucu

SEQ ID NO: 660170 - RNA, 22 nt, Human
gcagaggugaccagcagcaggg

SEQ ID NO: 660171 - RNA, 22 nt, Human
uagcagcuuaaguaauuagaau

SEQ ID NO: 660172 - RNA, 20 nt, Human
gccuguccugagugucaugg

SEQ ID NO: 660173 - RNA, 22 nt, Human
aucuacaggauaguuuaauauu

SEQ ID NO: 660174 - RNA, 22 nt, Human
auuuaugacaaccaaagaguga

SEQ ID NO: 660175 - RNA, 22 nt, Human
caggccugauacacugaacucu

SEQ ID NO: 660176 - RNA, 23 nt, Human
agggcaugaagcagaggacgugg

SEQ ID NO: 660177 - RNA, 22 nt, Human
acagaaauaacuuuuuauguuu

SEQ ID NO: 660178 - RNA, 22 nt, Human
aacuccagacuacuaauuuagu

SEQ ID NO: 660179 - RNA, 22 nt, Human
gaaauguuuuacaaggcauacu

SEQ ID NO: 660180 - RNA, 22 nt, Human
uacaccugcugagccuguccuc

SEQ ID NO: 660181 - RNA, 22 nt, Human
ugcugugauaauucaaugagcu

SEQ ID NO: 660182 - RNA, 22 nt, Human
uuuccuugggucucuuaguggc

SEQ ID NO: 660183 - RNA, 22 nt, Human
uuuuccugccugucucuagagg

SEQ ID NO: 660184 - RNA, 22 nt, Human
ggacagggcucuuggcacuccu

SEQ ID NO: 660185 - RNA, 16 nt, Human
uccuggccccuaugga

SEQ ID NO: 660186 - RNA, 22 nt, Human
aacaggacacugggauggcuac

SEQ ID NO: 660187 - RNA, 20 nt, Human
cccaggagugagcagcuuua

SEQ ID NO: 660188 - RNA, 22 nt, Human
gucaaaacaaaguuaagaauuc

SEQ ID NO: 660189 - RNA, 22 nt, Human
gcuggugagcaaaggagaagga

SEQ ID NO: 660190 - RNA, 22 nt, Human
cuuaaaggagguuuuguuucca

SEQ ID NO: 660191 - RNA, 22 nt, Human
aaggucucaaguuuuccaaagu

SEQ ID NO: 660192 - RNA, 22 nt, Human
ucugggcucacgagucuggaca

SEQ ID NO: 660193 - RNA, 23 nt, Human
agcagccagagauccucggcccu

SEQ ID NO: 660194 - RNA, 22 nt, Human
aagaaagggcuauuguucucca

SEQ ID NO: 660195 - RNA, 22 nt, Human
ccuccagacuuuggccauccuc

SEQ ID NO: 660196 - RNA, 22 nt, Human
cuucuugugcugggccagcuuc

SEQ ID NO: 660197 - RNA, 22 nt, Human
ugguggcuucugaggauggcga

SEQ ID NO: 660198 - RNA, 19 nt, Human
ugcucuggagccagcucuc

SEQ ID NO: 660199 - RNA, 22 nt, Human
uuuaagcacagggauaaaguua

SEQ ID NO: 660200 - RNA, 22 nt, Human
ugcuggaggauuaaacaaguca

SEQ ID NO: 660201 - RNA, 22 nt, Human
auuguuaauguugcacuaaggu

SEQ ID NO: 660202 - RNA, 20 nt, Human
aaguuuucuccaaauacagu

SEQ ID NO: 660203 - RNA, 22 nt, Human
uaggaaggaagagccucagauu

SEQ ID NO: 660204 - RNA, 22 nt, Human
gagcuccacuuagcaaggccac

SEQ ID NO: 660205 - RNA, 22 nt, Human
auuacaauaagguuuauuugua

SEQ ID NO: 660206 - RNA, 22 nt, Human
uacagaagcugagacacugaga

SEQ ID NO: 660207 - RNA, 22 nt, Human
agagggcaugcuugguggccug

SEQ ID NO: 660208 - RNA, 22 nt, Human
ugagcaggagauaaacagguag

SEQ ID NO: 660209 - RNA, 17 nt, Human
gcacugagccacaguuu

SEQ ID NO: 660210 - RNA, 22 nt, Human
uacuagcuaacauucucaccaa

SEQ ID NO: 660211 - RNA, 22 nt, Human
cuggaggaaucacagaaggcuu

SEQ ID NO: 660212 - RNA, 22 nt, Human
caugcaaacacguaaacauuca

SEQ ID NO: 660213 - RNA, 22 nt, Human
cagugaacuugaguacuucauu

SEQ ID NO: 660214 - RNA, 22 nt, Human
uagacauuuggaguuuuaugac

SEQ ID NO: 660215 - RNA, 22 nt, Human
agaaauucuaagcaucaauagc

SEQ ID NO: 660216 - RNA, 22 nt, Human
aggaacuggugggaggugauug

SEQ ID NO: 660217 - RNA, 22 nt, Human
gagugaggcuggaaucauggcu

SEQ ID NO: 660218 - RNA, 22 nt, Human
ggucacauucugagguauuagg

SEQ ID NO: 660219 - RNA, 22 nt, Human
gaaucaauuauccaggcuguug

SEQ ID NO: 660220 - RNA, 22 nt, Human
uuccuauuuccaugaaacacaa

SEQ ID NO: 660221 - RNA, 20 nt, Human
cagggccacgcuccaaggca

SEQ ID NO: 660222 - RNA, 22 nt, Human
uaaggcaggcuuucauccagag

SEQ ID NO: 660223 - RNA, 22 nt, Human
ggccucaguuucuucaacugua

SEQ ID NO: 660224 - RNA, 22 nt, Human
aaggccagagcguguccugccu

SEQ ID NO: 660225 - RNA, 21 nt, Human
gccaccucgucucggagcagc

SEQ ID NO: 660226 - RNA, 22 nt, Human
cucugugggccagagaggcccc

SEQ ID NO: 660227 - RNA, 22 nt, Human
agcugcagcacuccaguagccg

SEQ ID NO: 660228 - RNA, 22 nt, Human
uugcaucuaccauaucaaagau

SEQ ID NO: 660229 - RNA, 22 nt, Human
aggcuggauuuauggggacuuc

SEQ ID NO: 660230 - RNA, 22 nt, Human
uggcaugggccagggagagcug

SEQ ID NO: 660231 - RNA, 22 nt, Human
ugcggguugguggcauaugcag

SEQ ID NO: 660232 - RNA, 22 nt, Human
cuguagcuccagccugucuaca

SEQ ID NO: 660233 - RNA, 22 nt, Human
auucugaugccuggguacugcc

SEQ ID NO: 660234 - RNA, 22 nt, Human
gagccccagcccugcuucuaua

SEQ ID NO: 660235 - RNA, 21 nt, Human
acaguuuuaaggagcacaugg

SEQ ID NO: 660236 - RNA, 22 nt, Human
aguuguauuagagaacacaaac

SEQ ID NO: 660237 - RNA, 22 nt, Human
ugucucuggcugcagccuguuc

SEQ ID NO: 660238 - RNA, 22 nt, Human
aucuggcuuggguguggguagc

SEQ ID NO: 660239 - RNA, 22 nt, Human
uagcaucugaacuguugaaaag

SEQ ID NO: 660240 - RNA, 22 nt, Human
uagacauacagugcaguacaua

SEQ ID NO: 660241 - RNA, 22 nt, Human
gggcugcuuuuuucuuagcaga

SEQ ID NO: 660242 - RNA, 23 nt, Human
ucugauguucucuuaugcuguag

SEQ ID NO: 660243 - RNA, 22 nt, Human
ugagggcaaaguggugcugagg

SEQ ID NO: 660244 - RNA, 22 nt, Human
aaaucaguuagugguaggauug

SEQ ID NO: 660245 - RNA, 21 nt, Human
cuuuucuguguuccucccugu

SEQ ID NO: 660246 - RNA, 22 nt, Human
caguauuucauucagaauuguu

SEQ ID NO: 660247 - RNA, 21 nt, Human
ccuccaggugauuccgugcuc

SEQ ID NO: 660248 - RNA, 22 nt, Human
ccagggccaguaagauuggcau

SEQ ID NO: 660249 - RNA, 22 nt, Human
cagucacuccagccugccucag

SEQ ID NO: 660250 - RNA, 22 nt, Human
agaggcuccuagccacuggcuu

SEQ ID NO: 660251 - RNA, 22 nt, Human
uucucuggggacugucucuauu

SEQ ID NO: 660252 - RNA, 22 nt, Human
uaaucuguuucccaaggugaua

SEQ ID NO: 660253 - RNA, 22 nt, Human
gcagcuuucugcaaugucaucc

SEQ ID NO: 660254 - RNA, 22 nt, Human
gagcaugagggaaggcagcaga

SEQ ID NO: 660255 - RNA, 22 nt, Human
ucuaguucuagaucccugagga

SEQ ID NO: 660256 - RNA, 22 nt, Human
gcgcagaguagcagagugcuga

SEQ ID NO: 660257 - RNA, 20 nt, Human
agggccugcucugugguguc

SEQ ID NO: 660258 - RNA, 22 nt, Human
ccauaaggagccagacauucca

SEQ ID NO: 660259 - RNA, 22 nt, Human
agggaagcugcuggguccaccu

SEQ ID NO: 660260 - RNA, 22 nt, Human
cagcucuggcuauugaggacca

SEQ ID NO: 660261 - RNA, 22 nt, Human
ggcuggcuccaccuagguagcu

SEQ ID NO: 660262 - RNA, 20 nt, Human
gggagacagggccagugucc

SEQ ID NO: 660263 - RNA, 22 nt, Human
uaaauaugcauguauccuuauc

SEQ ID NO: 660264 - RNA, 22 nt, Human
ucuuaauugagaacaguguagg

SEQ ID NO: 660265 - RNA, 21 nt, Human
ugucucaaucagaagucauua

SEQ ID NO: 660266 - RNA, 22 nt, Human
cggccaagccggggccccgaag

SEQ ID NO: 660267 - RNA, 20 nt, Human
uaaauuagccuugaagauua

SEQ ID NO: 660268 - RNA, 22 nt, Human
uccugggagagugggacuguau

SEQ ID NO: 660269 - RNA, 22 nt, Human
acuucuugaugaaaaugguacu

SEQ ID NO: 660270 - RNA, 22 nt, Human
ccugcagguugcagaggcggaa

SEQ ID NO: 660271 - RNA, 22 nt, Human
cuugccucugcuaaugguuucu

SEQ ID NO: 660272 - RNA, 17 nt, Human
aggcuccuccuaagguc

SEQ ID NO: 660273 - RNA, 22 nt, Human
gagagcccuacaaggcguuuug

SEQ ID NO: 660274 - RNA, 22 nt, Human
acacagggcaaugcuuugaccu

SEQ ID NO: 660275 - RNA, 22 nt, Human
ucacuggggccuuuggucagga

SEQ ID NO: 660276 - RNA, 22 nt, Human
uggccucucuaccaggcagccu

SEQ ID NO: 660277 - RNA, 22 nt, Human
aggcaggauugcugacaacaau

SEQ ID NO: 660278 - RNA, 22 nt, Human
gugcauuucucauacacuaaau

SEQ ID NO: 660279 - RNA, 19 nt, Human
aagcuuucccauuaacccc

SEQ ID NO: 660280 - RNA, 23 nt, Human
cugcauugucuccugggagcaug

SEQ ID NO: 660281 - RNA, 22 nt, Human
ucuuuagccaguaucauaauga

SEQ ID NO: 660282 - RNA, 22 nt, Human
uuaacauacaucaugaacaaug

SEQ ID NO: 660283 - RNA, 22 nt, Human
agggagcuaggauccugaaggu

SEQ ID NO: 660284 - RNA, 22 nt, Human
uauauacuaugcgauuccugcc

SEQ ID NO: 660285 - RNA, 22 nt, Human
uagagcagaacuuguuaacacc

SEQ ID NO: 660286 - RNA, 22 nt, Human
ccaggcaucacgggcauguggc

SEQ ID NO: 660287 - RNA, 22 nt, Human
uuugaaaggugucgagaugugu

SEQ ID NO: 660288 - RNA, 22 nt, Human
ggcuuccagugaugccucuuug

SEQ ID NO: 660289 - RNA, 22 nt, Human
agcugcuugggaaccaucaauu

SEQ ID NO: 660290 - RNA, 22 nt, Human
ccugcaggcugcaggccaguuc

SEQ ID NO: 660291 - RNA, 22 nt, Human
cccuaggcugaggccagggugc

SEQ ID NO: 660292 - RNA, 22 nt, Human
uccaggagguuuggaggaagca

SEQ ID NO: 660293 - RNA, 22 nt, Human
caggagucuguuccucauuugu

SEQ ID NO: 660294 - RNA, 22 nt, Human
ccugggagguggagguugcagc

SEQ ID NO: 660295 - RNA, 22 nt, Human
uccagccucauuucuccugcuu

SEQ ID NO: 660296 - RNA, 22 nt, Human
cugaggcaucauggagaacagu

SEQ ID NO: 660297 - RNA, 22 nt, Human
ugagcacacuccuggugagcga

SEQ ID NO: 660298 - RNA, 22 nt, Human
gcauuucauguagauugagaac

SEQ ID NO: 660299 - RNA, 20 nt, Human
auacaguaggugcucaauau

SEQ ID NO: 660300 - RNA, 22 nt, Human
aucuacaggcugaggugggagg

SEQ ID NO: 660301 - RNA, 22 nt, Human
gucugucaucugagauggagug

SEQ ID NO: 660302 - RNA, 23 nt, Human
cagggcugggcuugguguuaggc

SEQ ID NO: 660303 - RNA, 22 nt, Human
aggcuuuccugucacucaugcu

SEQ ID NO: 660304 - RNA, 22 nt, Human
uuacagcuuacauuuuaccuug

SEQ ID NO: 660305 - RNA, 22 nt, Human
ugucccauggauaccaggcuau

SEQ ID NO: 660306 - RNA, 22 nt, Human
guccuucaaaggcacgcaguua

SEQ ID NO: 660307 - RNA, 22 nt, Human
agacaaggcaaggcggccagau

SEQ ID NO: 660308 - RNA, 22 nt, Human
agggaauggaugauggcagguu

SEQ ID NO: 660309 - RNA, 22 nt, Human
cugucugugaccucugcauguc

SEQ ID NO: 660310 - RNA, 22 nt, Human
aaauaggaaugugguccuggga

SEQ ID NO: 660311 - RNA, 22 nt, Human
acaggaagcuggagacccuuga

SEQ ID NO: 660312 - RNA, 22 nt, Human
agcuccaggugcaagucauggu

SEQ ID NO: 660313 - RNA, 22 nt, Human
cucagagaggcaguggaaguca

SEQ ID NO: 660314 - RNA, 22 nt, Human
ccuuacaaugcaguuuacuuag

SEQ ID NO: 660315 - RNA, 22 nt, Human
auggcucucuagggcccagguu

SEQ ID NO: 660316 - RNA, 22 nt, Human
auggccaagcuuacucuguugu

SEQ ID NO: 660317 - RNA, 22 nt, Human
auuuucugugugcagauaaaua

SEQ ID NO: 660318 - RNA, 22 nt, Human
gcuggcugcgucaucacagggc

SEQ ID NO: 660319 - RNA, 22 nt, Human
uggcagggaguugcaggauuuc

SEQ ID NO: 660320 - RNA, 22 nt, Human
caggguggaacaggcaauacuu

SEQ ID NO: 660321 - RNA, 22 nt, Human
gacagugacagcuuggaaagca

SEQ ID NO: 660322 - RNA, 22 nt, Human
gccuucagaguaccauguccuc

SEQ ID NO: 660323 - RNA, 22 nt, Human
ucucagggaguugaggcugccu

SEQ ID NO: 660324 - RNA, 22 nt, Human
cauuuuacgacauagggcaggc

SEQ ID NO: 660325 - RNA, 20 nt, Human
caauagaauguggagauaag

SEQ ID NO: 660326 - RNA, 22 nt, Human
uguacaauagcuauuaucucca

SEQ ID NO: 660327 - RNA, 22 nt, Human
cuguucuaucauuaaaagcuau

SEQ ID NO: 660328 - RNA, 22 nt, Human
cugagccauccauaccagcuua

SEQ ID NO: 660329 - RNA, 22 nt, Human
ggguggcacaggugcagagggu

SEQ ID NO: 660330 - RNA, 18 nt, Human
agaggggagguaagucug

SEQ ID NO: 660331 - RNA, 22 nt, Human
ggcagcccuuucuggccagcuc

SEQ ID NO: 660332 - RNA, 22 nt, Human
aaaaauugcugagaacggaauu

SEQ ID NO: 660333 - RNA, 22 nt, Human
uccaggaugcccgcuuuugcuu

SEQ ID NO: 660334 - RNA, 22 nt, Human
gugcauuuauauuugccuuugg

SEQ ID NO: 660335 - RNA, 22 nt, Human
uauguguauaucuguaugugca

SEQ ID NO: 660336 - RNA, 22 nt, Human
uaaugcaauuuagcaaaguuuu

SEQ ID NO: 660337 - RNA, 22 nt, Human
cugcagcaggaggcuccugcag

SEQ ID NO: 660338 - RNA, 22 nt, Human
uuuggcacuguucuaggugcaa

SEQ ID NO: 660339 - RNA, 22 nt, Human
aagggcagcugacagaugcuua

SEQ ID NO: 660340 - RNA, 22 nt, Human
ggugacagcgggucaagaggag

SEQ ID NO: 660341 - RNA, 22 nt, Human
guguggcuaccucagaggagca

SEQ ID NO: 660342 - RNA, 22 nt, Human
ugcaggcuccaugaggacaggc

SEQ ID NO: 660343 - RNA, 22 nt, Human
ccagcccucgguagucccauag

SEQ ID NO: 660344 - RNA, 22 nt, Human
auacuacacauugacuauauuu

SEQ ID NO: 660345 - RNA, 22 nt, Human
cuccucccacggucucaggaag

SEQ ID NO: 660346 - RNA, 22 nt, Human
aaggcuggggugcagacggccu

SEQ ID NO: 660347 - RNA, 22 nt, Human
ucugucugcaccuaagcacagu

SEQ ID NO: 660348 - RNA, 22 nt, Human
gagcucagcccaaagagcagug

SEQ ID NO: 660349 - RNA, 22 nt, Human
uuucucaaauugcaugaguagc

SEQ ID NO: 660350 - RNA, 22 nt, Human
acuugaauuaggccuugagaga

SEQ ID NO: 660351 - RNA, 22 nt, Human
cccaacuacucucaggcagcuu

SEQ ID NO: 660352 - RNA, 22 nt, Human
ugcuguccugcugagggaugug

SEQ ID NO: 660353 - RNA, 23 nt, Human
ucugagguggcucuugcuuugaa

SEQ ID NO: 660354 - RNA, 23 nt, Human
aagcacagaaugguuuaggaguu

SEQ ID NO: 660355 - RNA, 21 nt, Human
uguuuuccaccuugaggcaag

SEQ ID NO: 660356 - RNA, 22 nt, Human
gcaaagaaaugucagugagagg

SEQ ID NO: 660357 - RNA, 22 nt, Human
ucauuuuuugcauaccuguguc

SEQ ID NO: 660358 - RNA, 22 nt, Human
ugcaggcugcuggcaguagcuu

SEQ ID NO: 660359 - RNA, 21 nt, Human
agaugaggauacugaggccua

SEQ ID NO: 660360 - RNA, 22 nt, Human
acuggccaggcacagcuguggg

SEQ ID NO: 660361 - RNA, 22 nt, Human
guccaggcucaaaagguuguua

SEQ ID NO: 660362 - RNA, 22 nt, Human
caggaaauggcugaauaaauuc

SEQ ID NO: 660363 - RNA, 22 nt, Human
gacagguauuugagagcuggga

SEQ ID NO: 660364 - RNA, 22 nt, Human
uuuccucauuuaucugcuggga

SEQ ID NO: 660365 - RNA, 22 nt, Human
guucagggagggacagaugaag

SEQ ID NO: 660366 - RNA, 22 nt, Human
ugacagggucagagcugagcug

SEQ ID NO: 660367 - RNA, 22 nt, Human
ugaggccugacagaccaagccu

SEQ ID NO: 660368 - RNA, 22 nt, Human
acauucauugccaggguggaag

SEQ ID NO: 660369 - RNA, 22 nt, Human
cugggccugugacucccauccu

SEQ ID NO: 660370 - RNA, 22 nt, Human
uccuggauuuaacccuggcucu

SEQ ID NO: 660371 - RNA, 23 nt, Human
cuuuucauugccuuagcgcagag

SEQ ID NO: 660372 - RNA, 19 nt, Human
agccagggugagaaggagc

SEQ ID NO: 660373 - RNA, 22 nt, Human
gggggcagaauguacucuuguc

SEQ ID NO: 660374 - RNA, 22 nt, Human
gcugaggcuccucgggaggaca

SEQ ID NO: 660375 - RNA, 22 nt, Human
guuugcugcccucuccuguccg

SEQ ID NO: 660376 - RNA, 22 nt, Human
ucaaagcagcacauucgcaagc

SEQ ID NO: 660377 - RNA, 20 nt, Human
gggcuuggaggacucgaggg

SEQ ID NO: 660378 - RNA, 22 nt, Human
gcuuuguguagaaggaggaugg

SEQ ID NO: 660379 - RNA, 22 nt, Human
ucaguguggguaagcaugcugu

SEQ ID NO: 660380 - RNA, 22 nt, Human
acauuuauuuuggcacggcaca

SEQ ID NO: 660381 - RNA, 23 nt, Human
uaugugugggucuacuagaaguc

SEQ ID NO: 660382 - RNA, 22 nt, Human
cccaggaggccaagguugcagu

SEQ ID NO: 660383 - RNA, 22 nt, Human
aaucacaguuaguaagggagaa

SEQ ID NO: 660384 - RNA, 22 nt, Human
uuggcauaccuuagugguggag

SEQ ID NO: 660385 - RNA, 22 nt, Human
gccaauuuauagccaaaaauca

SEQ ID NO: 660386 - RNA, 22 nt, Human
ucccugggaaaugucaguuuca

SEQ ID NO: 660387 - RNA, 22 nt, Human
agagggccauaggugcauaguu

SEQ ID NO: 660388 - RNA, 22 nt, Human
aaaguuacacaucuaguaagug

SEQ ID NO: 660389 - RNA, 22 nt, Human
ucugcaggcuuggaguggcagc

SEQ ID NO: 660390 - RNA, 20 nt, Human
uuauuuguuuacuuuggucc

SEQ ID NO: 660391 - RNA, 22 nt, Human
cuguaaauaugaagaauauaug

SEQ ID NO: 660392 - RNA, 22 nt, Human
caaaggaggugauaggcccucu

SEQ ID NO: 660393 - RNA, 22 nt, Human
aagugcuuucauauagucuuaa

SEQ ID NO: 660394 - RNA, 22 nt, Human
gagaaagauggaaucuuacagg

SEQ ID NO: 660395 - RNA, 21 nt, Human
uguggcugccucuggcccugg

SEQ ID NO: 660396 - RNA, 22 nt, Human
uguaggucucagugucugagcu

SEQ ID NO: 660397 - RNA, 23 nt, Human
gugugccaagcacugugccagga

SEQ ID NO: 660398 - RNA, 22 nt, Human
gcguuuaaagauagcuaauaag

SEQ ID NO: 660399 - RNA, 22 nt, Human
uugucugauguucccucaugau

SEQ ID NO: 660400 - RNA, 22 nt, Human
ugcccaagcagaggagugauuc

SEQ ID NO: 660401 - RNA, 22 nt, Human
ucugcuguguccccugugcggg

SEQ ID NO: 660402 - RNA, 22 nt, Human
uaaacagccuccccuuucacuc

SEQ ID NO: 660403 - RNA, 22 nt, Human
auggaaauacagccagagcaga

SEQ ID NO: 660404 - RNA, 22 nt, Human
ggggcagagaauaaaaaccuaa

SEQ ID NO: 660405 - RNA, 23 nt, Human
ucacauuuaaccccucagaccuc

SEQ ID NO: 660406 - RNA, 22 nt, Human
gccuguucugcccugagagccu

SEQ ID NO: 660407 - RNA, 22 nt, Human
cugugagggccagagucagggc

SEQ ID NO: 660408 - RNA, 22 nt, Human
ucaacacuggcuacaguuaugc

SEQ ID NO: 660409 - RNA, 22 nt, Human
gcucacaggggcagacgaguug

SEQ ID NO: 660410 - RNA, 21 nt, Human
uugaccaagggugcgugcucc

SEQ ID NO: 660411 - RNA, 22 nt, Human
ugauuucucuccguuauuucag

SEQ ID NO: 660412 - RNA, 22 nt, Human
agcuucucagcuucagaacugu

SEQ ID NO: 660413 - RNA, 22 nt, Human
uaaucuuagcaaccuccagugu

SEQ ID NO: 660414 - RNA, 22 nt, Human
agcuggcuggccccuuccugcc

SEQ ID NO: 660415 - RNA, 22 nt, Human
cagcccugccauggagccuccu

SEQ ID NO: 660416 - RNA, 22 nt, Human
ccagcucuuggugcacuuacau

SEQ ID NO: 660417 - RNA, 22 nt, Human
uccugggucccgcacaucuguc

SEQ ID NO: 660418 - RNA, 22 nt, Human
cuuauguauauuuggaacguac

SEQ ID NO: 660419 - RNA, 21 nt, Human
aucagaaaauguaauggagca

SEQ ID NO: 660420 - RNA, 22 nt, Human
caguagcaggauuugggauuau

SEQ ID NO: 660421 - RNA, 22 nt, Human
uauacucugagaaacgugucac

SEQ ID NO: 660422 - RNA, 19 nt, Human
uaguacaaaagcagccaua

SEQ ID NO: 660423 - RNA, 20 nt, Human
guugcuuuagucugguuugg

SEQ ID NO: 660424 - RNA, 20 nt, Human
uggcucucucuaguaagugg

SEQ ID NO: 660425 - RNA, 22 nt, Human
gccuccaguuuuuuucugaacu

SEQ ID NO: 660426 - RNA, 19 nt, Human
ucacauucagccuugcuga

SEQ ID NO: 660427 - RNA, 22 nt, Human
caggagccacauuccaccuuga

SEQ ID NO: 660428 - RNA, 22 nt, Human
ugggagagucuaaaaccgaggu

SEQ ID NO: 660429 - RNA, 22 nt, Human
acaaggcuucacacaguaugaa

SEQ ID NO: 660430 - RNA, 22 nt, Human
uuacucugaauguuucuacuga

SEQ ID NO: 660431 - RNA, 22 nt, Human
cgcaggcuggcgcggaguggca

SEQ ID NO: 660432 - RNA, 22 nt, Human
cagaaacuauguaagaaaguga

SEQ ID NO: 660433 - RNA, 22 nt, Human
agcagggcagugcuucagcucu

SEQ ID NO: 660434 - RNA, 22 nt, Human
ugcugucuuccaggauggugaa

SEQ ID NO: 660435 - RNA, 20 nt, Human
uauugaguaccuacuguaua

SEQ ID NO: 660436 - RNA, 22 nt, Human
gaauucugggagagaucugaca

SEQ ID NO: 660437 - RNA, 22 nt, Human
cuguggccagucccacaccucc

SEQ ID NO: 660438 - RNA, 22 nt, Human
guuuucugccugaaggugacca

SEQ ID NO: 660439 - RNA, 22 nt, Human
ccaaaguccauaguuuacuuua

SEQ ID NO: 660440 - RNA, 20 nt, Human
auauuucuuaagaacuuuca

SEQ ID NO: 660441 - RNA, 22 nt, Human
ugccauugggcagucauugaag

SEQ ID NO: 660442 - RNA, 22 nt, Human
ggucccagcuggucacugucag

SEQ ID NO: 660443 - RNA, 22 nt, Human
guaacauucuagaaacuuaaca

SEQ ID NO: 660444 - RNA, 22 nt, Human
ccugggaaggugaggcccugga

SEQ ID NO: 660445 - RNA, 22 nt, Human
uugucucuaagugugaucuuca

SEQ ID NO: 660446 - RNA, 22 nt, Human
aaaguauuuuugacaggcauua

SEQ ID NO: 660447 - RNA, 22 nt, Human
aggacacacccagcucacgggg

SEQ ID NO: 660448 - RNA, 22 nt, Human
guuaauaaagguauagaaucag

SEQ ID NO: 660449 - RNA, 20 nt, Human
gcuucuuuucuggcccauga

SEQ ID NO: 660450 - RNA, 22 nt, Human
acuuuauguuugauaucuaugg

SEQ ID NO: 660451 - RNA, 22 nt, Human
ugggugugaagucuguuggccu

SEQ ID NO: 660452 - RNA, 22 nt, Human
uaacagaaauauuuccagguga

SEQ ID NO: 660453 - RNA, 22 nt, Human
gaccugaaaugggggccugucc

SEQ ID NO: 660454 - RNA, 23 nt, Human
caguggucagaacgugggagggu

SEQ ID NO: 660455 - RNA, 22 nt, Human
uuucacauauaggggaagcuac

SEQ ID NO: 660456 - RNA, 22 nt, Human
ucuuacagccacucugugaagc

SEQ ID NO: 660457 - RNA, 22 nt, Human
uuuaauguuaaauuuguagaug

SEQ ID NO: 660458 - RNA, 22 nt, Human
uucuagauagagugcaaauuau

SEQ ID NO: 660459 - RNA, 20 nt, Human
cucuggcaaaggaugccuau

SEQ ID NO: 660460 - RNA, 17 nt, Human
aaacugaaaaauucacu

SEQ ID NO: 660461 - RNA, 22 nt, Human
uagaaagcugaguaauacauuu

SEQ ID NO: 660462 - RNA, 20 nt, Human
guggcaggcagugaaggagc

SEQ ID NO: 660463 - RNA, 22 nt, Human
cuggaagaacuccaguucugug

SEQ ID NO: 660464 - RNA, 20 nt, Human
aggcugccaggucucacauc

SEQ ID NO: 660465 - RNA, 22 nt, Human
cuacaugaauggguguauuacu

SEQ ID NO: 660466 - RNA, 22 nt, Human
uccuucagaggacggcagccag

SEQ ID NO: 660467 - RNA, 22 nt, Human
uccagcuggggcaguggcuggg

SEQ ID NO: 660468 - RNA, 22 nt, Human
cagcauggugccagugagucca

SEQ ID NO: 660469 - RNA, 22 nt, Human
uagucucuggagacucuagggg

SEQ ID NO: 660470 - RNA, 22 nt, Human
uagagguuggccuuagaaagau

SEQ ID NO: 660471 - RNA, 22 nt, Human
ugggcagcaaagacugugugcu

SEQ ID NO: 660472 - RNA, 22 nt, Human
cauuugaaauucuuagaacaaa

SEQ ID NO: 660473 - RNA, 22 nt, Human
aaggcacuguacuaguuaguua

SEQ ID NO: 660474 - RNA, 22 nt, Human
ucaaggaauuuaguuuaguaaa

SEQ ID NO: 660475 - RNA, 22 nt, Human
uggcagccucagacaaggaccu

SEQ ID NO: 660476 - RNA, 22 nt, Human
ugggccacagcucacacaucca

SEQ ID NO: 660477 - RNA, 22 nt, Human
ucugacauuagauuaauuggaa

SEQ ID NO: 660478 - RNA, 22 nt, Human
cagauggagucccguggaguuc

SEQ ID NO: 660479 - RNA, 19 nt, Human
gcagguagagacagcagcc

SEQ ID NO: 660480 - RNA, 22 nt, Human
ucccauguguuccucuagucua

SEQ ID NO: 660481 - RNA, 22 nt, Human
uggcagagcuggcugcggauga

SEQ ID NO: 660482 - RNA, 22 nt, Human
gcauucauucaggcucccaggg

SEQ ID NO: 660483 - RNA, 22 nt, Human
uaaguaaaacauucaagaaguc

SEQ ID NO: 660484 - RNA, 22 nt, Human
aggagccaagauggggcaagua

SEQ ID NO: 660485 - RNA, 22 nt, Human
gauuucaaagguucugcaugcc

SEQ ID NO: 660486 - RNA, 22 nt, Human
cucuuacaagcucccgauauaa

SEQ ID NO: 660487 - RNA, 22 nt, Human
uuucagguaagaaaacuaagaa

SEQ ID NO: 660488 - RNA, 22 nt, Human
uaucuguucauguuuauauguc

SEQ ID NO: 660489 - RNA, 22 nt, Human
agggauggaagacuugaagacc

SEQ ID NO: 660490 - RNA, 22 nt, Human
uacuuauuguugaacugaauca

SEQ ID NO: 660491 - RNA, 22 nt, Human
caugcacagagcuuggucauug

SEQ ID NO: 660492 - RNA, 19 nt, Human
cuggaaugagaacaugccc

SEQ ID NO: 660493 - RNA, 22 nt, Human
ccaggaagauuuauuuuggcuu

SEQ ID NO: 660494 - RNA, 22 nt, Human
aggguccuaagccucagauaag

SEQ ID NO: 660495 - RNA, 22 nt, Human
gagcaggcuugcagagaagggg

SEQ ID NO: 660496 - RNA, 22 nt, Human
acagcaggcaugaaugacacug

SEQ ID NO: 660497 - RNA, 20 nt, Human
agguccacugaggcugccuc

SEQ ID NO: 660498 - RNA, 22 nt, Human
uucacauuaucaggauuguuuc

SEQ ID NO: 660499 - RNA, 22 nt, Human
uuuagcuaagacauagauucuu

SEQ ID NO: 660500 - RNA, 23 nt, Human
aaguucuuuuagaugucuucgug

SEQ ID NO: 660501 - RNA, 22 nt, Human
cuuccaggacaccaggguagua

SEQ ID NO: 660502 - RNA, 19 nt, Human
ccugaguguuucagagaca

SEQ ID NO: 660503 - RNA, 20 nt, Human
ucucgcacucggagcagccg

SEQ ID NO: 660504 - RNA, 22 nt, Human
ccugccaggcgagucuaggcca

SEQ ID NO: 660505 - RNA, 19 nt, Human
ucuguaacacucuagccuu

SEQ ID NO: 660506 - RNA, 22 nt, Human
ggugagaggcagaggacagcuu

SEQ ID NO: 660507 - RNA, 22 nt, Human
cugugugucauuugucaauccu

SEQ ID NO: 660508 - RNA, 22 nt, Human
ugggacagguuggagagaagca

SEQ ID NO: 660509 - RNA, 22 nt, Human
uagggcucagagaaguggggcc

SEQ ID NO: 660510 - RNA, 20 nt, Human
aagaggcuguggauccuacu

SEQ ID NO: 660511 - RNA, 18 nt, Human
ucccaucauccucuccag

SEQ ID NO: 660512 - RNA, 22 nt, Human
cugccucugcgucccacagagu

SEQ ID NO: 660513 - RNA, 22 nt, Human
aauaguccugauuuaaucuggg

SEQ ID NO: 660514 - RNA, 22 nt, Human
ccugaggcucuccugaauaaug

SEQ ID NO: 660515 - RNA, 22 nt, Human
gcagcacugauccuaaacuuag

SEQ ID NO: 660516 - RNA, 22 nt, Human
ucagcacugucuuuuauuugaa

SEQ ID NO: 660517 - RNA, 22 nt, Human
uggaagagaaaggaguggaucu

SEQ ID NO: 660518 - RNA, 22 nt, Human
guggccuuuuagaauaaacucu

SEQ ID NO: 660519 - RNA, 17 nt, Human
uguuaauuccaaugaua

SEQ ID NO: 660520 - RNA, 22 nt, Human
ccacacuaaacugcucaaacca

SEQ ID NO: 660521 - RNA, 22 nt, Human
agcagggcaguuaaaggguccu

SEQ ID NO: 660522 - RNA, 22 nt, Human
agugcugucaguuuuauagaua

SEQ ID NO: 660523 - RNA, 22 nt, Human
agaggucucaguuauguuuaaa

SEQ ID NO: 660524 - RNA, 22 nt, Human
aggcagcaugggccccagcucc

SEQ ID NO: 660525 - RNA, 22 nt, Human
uugacuauacucuggcggaaaa

SEQ ID NO: 660526 - RNA, 22 nt, Human
cuggcugcaguagcaagagacu

SEQ ID NO: 660527 - RNA, 22 nt, Human
ugaagacaagugugcugguguu

SEQ ID NO: 660528 - RNA, 22 nt, Human
gcuggggagaauuggguuaucu

SEQ ID NO: 660529 - RNA, 22 nt, Human
ugagcugcauuacagccucugu

SEQ ID NO: 660530 - RNA, 18 nt, Human
gaggcacauaguuggggc

SEQ ID NO: 660531 - RNA, 22 nt, Human
uauugcuuauucuugagaguca

SEQ ID NO: 660532 - RNA, 22 nt, Human
ccuguguccuuggcagauaucc

SEQ ID NO: 660533 - RNA, 22 nt, Human
cccagcucccauguucuccaau

SEQ ID NO: 660534 - RNA, 23 nt, Human
uccugagaugagacagugcugcc

SEQ ID NO: 660535 - RNA, 22 nt, Human
agggaaagguagugaggucaca

SEQ ID NO: 660536 - RNA, 22 nt, Human
ccucucuccuuccuuugccaaa

SEQ ID NO: 660537 - RNA, 22 nt, Human
uguacacauaucauuuguggga

SEQ ID NO: 660538 - RNA, 22 nt, Human
ugggaaggcguggaaguagaag

SEQ ID NO: 660539 - RNA, 22 nt, Human
cagcaauauacacagucuaugg

SEQ ID NO: 660540 - RNA, 22 nt, Human
uuauucugaacuagacucucau

SEQ ID NO: 660541 - RNA, 22 nt, Human
ugcuugagacacauaugaauuu

SEQ ID NO: 660542 - RNA, 22 nt, Human
acccagagucauguuuauuccc

SEQ ID NO: 660543 - RNA, 22 nt, Human
ggaaacaugccugcuggacagu

SEQ ID NO: 660544 - RNA, 22 nt, Human
cuggcagccaagugggauacuc

SEQ ID NO: 660545 - RNA, 22 nt, Human
ugcccacauucaaaaggugaug

SEQ ID NO: 660546 - RNA, 22 nt, Human
agaggugggagccuggucacau

SEQ ID NO: 660547 - RNA, 22 nt, Human
ggagucugauacugaguuccuc

SEQ ID NO: 660548 - RNA, 22 nt, Human
uccaggagggguaggcaguaug

SEQ ID NO: 660549 - RNA, 22 nt, Human
uaaagcaauuugagcaaguucu

SEQ ID NO: 660550 - RNA, 23 nt, Human
cgugucugugggcgauccggccu

SEQ ID NO: 660551 - RNA, 22 nt, Human
auggcuggcacuggccuggguu

SEQ ID NO: 660552 - RNA, 22 nt, Human
ccauuguaguaucuguuuuagu

SEQ ID NO: 660553 - RNA, 23 nt, Human
agaaaguuugugccuugugacac

SEQ ID NO: 660554 - RNA, 17 nt, Human
gcuggcugacccaugcc

SEQ ID NO: 660555 - RNA, 21 nt, Human
cucuguguugaggguguugag

SEQ ID NO: 660556 - RNA, 22 nt, Human
aguugugaauagaucugauugg

SEQ ID NO: 660557 - RNA, 22 nt, Human
accaucuuagcagacugcagug

SEQ ID NO: 660558 - RNA, 22 nt, Human
caagauuuccaacccuggguaa

SEQ ID NO: 660559 - RNA, 22 nt, Human
uuguauauauucuuaaagaugu

SEQ ID NO: 660560 - RNA, 22 nt, Human
cuggaaguuuccuuccugguca

SEQ ID NO: 660561 - RNA, 22 nt, Human
ucucuguccccucagcuggggu

SEQ ID NO: 660562 - RNA, 22 nt, Human
ucuagaauuuugccauauagcu

SEQ ID NO: 660563 - RNA, 21 nt, Human
uguucacauggagcagaaugu

SEQ ID NO: 660564 - RNA, 22 nt, Human
acaaucuuauuaguaguauaga

SEQ ID NO: 660565 - RNA, 22 nt, Human
cuggcaggagcauucacagagg

SEQ ID NO: 660566 - RNA, 22 nt, Human
gugggugcugucaggcagggaa

SEQ ID NO: 660567 - RNA, 22 nt, Human
uauuuccagcaguaagaagaca

SEQ ID NO: 660568 - RNA, 22 nt, Human
ccaggguggaggcuggauggag

SEQ ID NO: 660569 - RNA, 22 nt, Human
uuuggcucugguucuggcucca

SEQ ID NO: 660570 - RNA, 22 nt, Human
acucucugggcaugccccacca

SEQ ID NO: 660571 - RNA, 22 nt, Human
cuguuucaccacuggcucuuug

SEQ ID NO: 660572 - RNA, 22 nt, Human
ugguccagacauuucugaggua

SEQ ID NO: 660573 - RNA, 22 nt, Human
gcuucuauccuaccaugucuug

SEQ ID NO: 660574 - RNA, 22 nt, Human
agucacaugaggaaggggaagg

SEQ ID NO: 660575 - RNA, 21 nt, Human
ugcauauucuucugguggcug

SEQ ID NO: 660576 - RNA, 22 nt, Human
gaggucaggggagaggcugaug

SEQ ID NO: 660577 - RNA, 22 nt, Human
gagggaccccaggcuggcccuu

SEQ ID NO: 660578 - RNA, 22 nt, Human
auucagcaaacauuuauuaucu

SEQ ID NO: 660579 - RNA, 22 nt, Human
cagcaagaggguaagguugaag

SEQ ID NO: 660580 - RNA, 22 nt, Human
uuuguucuuaguaucugugugc

SEQ ID NO: 660581 - RNA, 20 nt, Human
ugagacaaggcuggagagac

SEQ ID NO: 660582 - RNA, 19 nt, Human
cucuuaaauugucucuugc

SEQ ID NO: 660583 - RNA, 22 nt, Human
acauacacgggaaaccucuuuu

SEQ ID NO: 660584 - RNA, 22 nt, Human
gagccugugagccccaacucca

SEQ ID NO: 660585 - RNA, 22 nt, Human
caggacaauuuugagccaccug

SEQ ID NO: 660586 - RNA, 22 nt, Human
aauauucaaguuauucuuucuu

SEQ ID NO: 660587 - RNA, 22 nt, Human
cacugucugcuucgacucuuca

SEQ ID NO: 660588 - RNA, 19 nt, Human
ccaggagcaguggugagcu

SEQ ID NO: 660589 - RNA, 22 nt, Human
aggaauuugggguuacaugaug

SEQ ID NO: 660590 - RNA, 22 nt, Human
agguuucuggauuuauuauggc

SEQ ID NO: 660591 - RNA, 22 nt, Human
cacuggucagcaugguagacca

SEQ ID NO: 660592 - RNA, 22 nt, Human
gcugagguggugaugguucauc

SEQ ID NO: 660593 - RNA, 22 nt, Human
ugucauguguucuuaaauacau

SEQ ID NO: 660594 - RNA, 22 nt, Human
guuuccagcuuucugaugcuug

SEQ ID NO: 660595 - RNA, 22 nt, Human
uuauuuaaaauguagguuggga

SEQ ID NO: 660596 - RNA, 22 nt, Human
guucuucaguaaaauuaaaugu

SEQ ID NO: 660597 - RNA, 22 nt, Human
gguaaaaugcagauucuuagcc

SEQ ID NO: 660598 - RNA, 22 nt, Human
ucagucaucccagcuuucaucu

SEQ ID NO: 660599 - RNA, 20 nt, Human
caguccugucccugcugccc

SEQ ID NO: 660600 - RNA, 22 nt, Human
ugucuucagauaggcauucuuc

SEQ ID NO: 660601 - RNA, 23 nt, Human
acuuccaguugcuucagcauaug

SEQ ID NO: 660602 - RNA, 22 nt, Human
cagcaucccucaggggccucug

SEQ ID NO: 660603 - RNA, 22 nt, Human
auuaugcugguuuacacauuuu

SEQ ID NO: 660604 - RNA, 22 nt, Human
acaucuguucuucucuuguccc

SEQ ID NO: 660605 - RNA, 22 nt, Human
auacagauguuaaagcaauuuc

SEQ ID NO: 660606 - RNA, 22 nt, Human
ccuuggcaagacaguggagggu

SEQ ID NO: 660607 - RNA, 22 nt, Human
ggcagccacccugggaggcaga

SEQ ID NO: 660608 - RNA, 22 nt, Human
aagcuugggaaccacgguaauc

SEQ ID NO: 660609 - RNA, 22 nt, Human
uaauccugaucaauuuuagcuu

SEQ ID NO: 660610 - RNA, 22 nt, Human
agcugccugcuuaugagcucca

SEQ ID NO: 660611 - RNA, 22 nt, Human
ccagcagcccacaggcgucccu

SEQ ID NO: 660612 - RNA, 22 nt, Human
acauuuacauuuucucuggccu

SEQ ID NO: 660613 - RNA, 22 nt, Human
ggcugcaggcagaggcugucug

SEQ ID NO: 660614 - RNA, 22 nt, Human
gccuggggaacuugauccuguc

SEQ ID NO: 660615 - RNA, 22 nt, Human
ugugcccucagaagaguacauc

SEQ ID NO: 660616 - RNA, 22 nt, Human
aaacagcuacuucuguauaaug

SEQ ID NO: 660617 - RNA, 22 nt, Human
uguccuggugcuccagguggcu

SEQ ID NO: 660618 - RNA, 17 nt, Human
acagugagaagucaucu

SEQ ID NO: 660619 - RNA, 22 nt, Human
acugugugcccugacgccaggg

SEQ ID NO: 660620 - RNA, 22 nt, Human
agugugggugagggaggcccuc

SEQ ID NO: 660621 - RNA, 18 nt, Human
ugacauuuccagagugua

SEQ ID NO: 660622 - RNA, 22 nt, Human
ccuccagccuuccugaagagcc

SEQ ID NO: 660623 - RNA, 22 nt, Human
gcuguguuggugaagcuguagc

SEQ ID NO: 660624 - RNA, 22 nt, Human
augcagggagguaagaggugcc

SEQ ID NO: 660625 - RNA, 22 nt, Human
aaggcaguaaaaucuaccuugc

SEQ ID NO: 660626 - RNA, 20 nt, Human
cuguggcucaugcaucugcc

SEQ ID NO: 660627 - RNA, 22 nt, Human
gcucugggcugcccucuggaca

SEQ ID NO: 660628 - RNA, 19 nt, Human
ucugcccaguugucugccc

SEQ ID NO: 660629 - RNA, 22 nt, Human
aacuacagaaucauagaaaaua

SEQ ID NO: 660630 - RNA, 22 nt, Human
agcaauguuggccuauauaccu

SEQ ID NO: 660631 - RNA, 22 nt, Human
cagugggguuucugugggugcu

SEQ ID NO: 660632 - RNA, 22 nt, Human
ccacugcuagagaugcaucccc

SEQ ID NO: 660633 - RNA, 22 nt, Human
uagcaaggacguccaaagaacu

SEQ ID NO: 660634 - RNA, 22 nt, Human
aggcaggcuggucugaagagug

SEQ ID NO: 660635 - RNA, 22 nt, Human
acaugcauaaacuacuucuuau

SEQ ID NO: 660636 - RNA, 22 nt, Human
ucagagguuccggccauaacca

SEQ ID NO: 660637 - RNA, 22 nt, Human
gccagccccuccauccuguuca

SEQ ID NO: 660638 - RNA, 22 nt, Human
auguacaguuucuagacucaaa

SEQ ID NO: 660639 - RNA, 22 nt, Human
ugaggccugcuuggaauugaau

SEQ ID NO: 660640 - RNA, 22 nt, Human
cucuccagcagauguagucugu

SEQ ID NO: 660641 - RNA, 22 nt, Human
uacaaagucaccagcuucuugc

SEQ ID NO: 660642 - RNA, 22 nt, Human
uuggaaggccagcaccuugagu

SEQ ID NO: 660643 - RNA, 22 nt, Human
agaauucuguucuucgggugug

SEQ ID NO: 660644 - RNA, 22 nt, Human
agggaagcuuguuacugagaag

SEQ ID NO: 660645 - RNA, 22 nt, Human
ccuggcuccugccucugcaggg

SEQ ID NO: 660646 - RNA, 22 nt, Human
acuguacaaauauugcaaaaua

SEQ ID NO: 660647 - RNA, 22 nt, Human
uuacauuuuaguuaaccuguga

SEQ ID NO: 660648 - RNA, 22 nt, Human
aaaccuguuaauagagcgaugc

SEQ ID NO: 660649 - RNA, 18 nt, Human
cugacccuuuuacauucc

SEQ ID NO: 660650 - RNA, 22 nt, Human
aauucauagcaacaaagaccca

SEQ ID NO: 660651 - RNA, 22 nt, Human
ucugagguccuacuauaagugg

SEQ ID NO: 660652 - RNA, 22 nt, Human
ugagaauauuugaagauguuag

SEQ ID NO: 660653 - RNA, 22 nt, Human
gacaucaggccugcagucuggg

SEQ ID NO: 660654 - RNA, 21 nt, Human
agagcucaaggcaaaaauaau

SEQ ID NO: 660655 - RNA, 22 nt, Human
gccuuaggggucagacagagcu

SEQ ID NO: 660656 - RNA, 20 nt, Human
agcaugcagccagagccaac

SEQ ID NO: 660657 - RNA, 22 nt, Human
cugagacaugguuugacuggca

SEQ ID NO: 660658 - RNA, 22 nt, Human
gagaaggacuacacaucuggcc

SEQ ID NO: 660659 - RNA, 22 nt, Human
gcugcagggaauguauggauuu

SEQ ID NO: 660660 - RNA, 22 nt, Human
uuucugaacaaagccauuauca

SEQ ID NO: 660661 - RNA, 22 nt, Human
gcugauguuuaguugauguuac

SEQ ID NO: 660662 - RNA, 22 nt, Human
guaggcagauaggagugcagcc

SEQ ID NO: 660663 - RNA, 22 nt, Human
guuuccugggccccaacccaga

SEQ ID NO: 660664 - RNA, 22 nt, Human
uugcagggcuuggggauuacag

SEQ ID NO: 660665 - RNA, 22 nt, Human
ucaggcaaucugacagcuggag

SEQ ID NO: 660666 - RNA, 22 nt, Human
aagacagccuuucccuggugcc

SEQ ID NO: 660667 - RNA, 22 nt, Human
ggacugaggacaugugaggcau

SEQ ID NO: 660668 - RNA, 22 nt, Human
gaaaaguauguuuauuuugacu

SEQ ID NO: 660669 - RNA, 22 nt, Human
ugccaagugcuuacuuggcccu

SEQ ID NO: 660670 - RNA, 23 nt, Human
gggcccagcacaggaccuggcag

SEQ ID NO: 660671 - RNA, 22 nt, Human
agacagcauuucccggaaccgc

SEQ ID NO: 660672 - RNA, 21 nt, Human
ggugcuccuccaugcugcucu

SEQ ID NO: 660673 - RNA, 22 nt, Human
uccagcucaucugucuccauua

SEQ ID NO: 660674 - RNA, 22 nt, Human
agcuucuuugugggcuccagaa

SEQ ID NO: 660675 - RNA, 22 nt, Human
cgggcuccgggucuuugcaguc

SEQ ID NO: 660676 - RNA, 22 nt, Human
agauucauuguggauauuuucu

SEQ ID NO: 660677 - RNA, 22 nt, Human
agaggucuuaagaucuagacug

SEQ ID NO: 660678 - RNA, 22 nt, Human
gcaugcagggagggucuggcug

SEQ ID NO: 660679 - RNA, 22 nt, Human
auauauagagcuagauguuaaa

SEQ ID NO: 660680 - RNA, 22 nt, Human
aggcuguguaaagugcuuuccc

SEQ ID NO: 660681 - RNA, 22 nt, Human
accagcagcugccagaguggag

SEQ ID NO: 660682 - RNA, 22 nt, Human
cuuuaugugcugggcauuaagg

SEQ ID NO: 660683 - RNA, 22 nt, Human
agggaagaggcaagguuuaugg

SEQ ID NO: 660684 - RNA, 22 nt, Human
ugcuuccuucccguucuucucc

SEQ ID NO: 660685 - RNA, 22 nt, Human
ugacaggcuaggaggcugaagg

SEQ ID NO: 660686 - RNA, 22 nt, Human
gcuguggaugcuauggaucauc

SEQ ID NO: 660687 - RNA, 22 nt, Human
uguccuuuaugaaaugguguuu

SEQ ID NO: 660688 - RNA, 22 nt, Human
gcaggccuaagagaaggcauug

SEQ ID NO: 660689 - RNA, 22 nt, Human
agagaaacccuucaguguuuug

SEQ ID NO: 660690 - RNA, 22 nt, Human
ccagcagcccucuuccaagacu

SEQ ID NO: 660691 - RNA, 22 nt, Human
ugggccacugcugcggaaggcg

SEQ ID NO: 660692 - RNA, 23 nt, Human
cuucacagguucaggggauuaag

SEQ ID NO: 660693 - RNA, 22 nt, Human
ucuacccagagcuaugaccuga

SEQ ID NO: 660694 - RNA, 22 nt, Human
aauuaacagagggcuuauuacu

SEQ ID NO: 660695 - RNA, 22 nt, Human
ucagcccaccuucaggggaguu

SEQ ID NO: 660696 - RNA, 23 nt, Human
cccuguagcccaggacaggcuuu

SEQ ID NO: 660697 - RNA, 22 nt, Human
gauugaaucauaugaaauugug

SEQ ID NO: 660698 - RNA, 22 nt, Human
agauaucaccaguuuuacauac

SEQ ID NO: 660699 - RNA, 22 nt, Human
guccagugacaaguagcuggcc

SEQ ID NO: 660700 - RNA, 22 nt, Human
acuggcaguagagggagcgcau

SEQ ID NO: 660701 - RNA, 22 nt, Human
aacaugaaaagcccagagaggu

SEQ ID NO: 660702 - RNA, 22 nt, Human
aggggaaaugccuuggugguac

SEQ ID NO: 660703 - RNA, 22 nt, Human
cccacccacucugaccagaagc

SEQ ID NO: 660704 - RNA, 22 nt, Human
uuuccuuuaugacaucaccacu

SEQ ID NO: 660705 - RNA, 22 nt, Human
gaauaguucuauggcugcaggg

SEQ ID NO: 660706 - RNA, 22 nt, Human
ggugcaggacgaaguggggguu

SEQ ID NO: 660707 - RNA, 22 nt, Human
cagacccugggccacagaggag

SEQ ID NO: 660708 - RNA, 22 nt, Human
caugaaaauaacauuguuguga

SEQ ID NO: 660709 - RNA, 22 nt, Human
ggcuguguuccaagugucagga

SEQ ID NO: 660710 - RNA, 22 nt, Human
caauguuuuguugaaugaauag

SEQ ID NO: 660711 - RNA, 22 nt, Human
uucucuagguuuuagaugaaga

SEQ ID NO: 660712 - RNA, 22 nt, Human
gcaguggaagccucuuuaagca

SEQ ID NO: 660713 - RNA, 22 nt, Human
agaggacagacggaaagugcca

SEQ ID NO: 660714 - RNA, 22 nt, Human
gagaugggcgagaagguggacu

SEQ ID NO: 660715 - RNA, 22 nt, Human
uagcuucccugcuggaucauaa

SEQ ID NO: 660716 - RNA, 22 nt, Human
ucugugugcccuaaagccugcu

SEQ ID NO: 660717 - RNA, 22 nt, Human
ucugggaacgaaggcuaauaug

SEQ ID NO: 660718 - RNA, 22 nt, Human
gcagggaccuugcccacccucc

SEQ ID NO: 660719 - RNA, 22 nt, Human
ccucagggccaucucugucccu

SEQ ID NO: 660720 - RNA, 22 nt, Human
gacuucaacuucuggggagcaa

SEQ ID NO: 660721 - RNA, 22 nt, Human
aagcagggugucuugacccaug

SEQ ID NO: 660722 - RNA, 22 nt, Human
gcagugcuaaguagcuggccca

SEQ ID NO: 660723 - RNA, 22 nt, Human
uuguguuaaggugcaucuagug

SEQ ID NO: 660724 - RNA, 22 nt, Human
ucugggagagcugcugucagag

SEQ ID NO: 660725 - RNA, 22 nt, Human
acucuguagccuguaagagagc

SEQ ID NO: 660726 - RNA, 22 nt, Human
uucuguacucuuugagaagaau

SEQ ID NO: 660727 - RNA, 22 nt, Human
ucaguguuuacaugcauccuug

SEQ ID NO: 660728 - RNA, 22 nt, Human
uucccugaucacgugucaggag

SEQ ID NO: 660729 - RNA, 22 nt, Human
uggcugcugagaaggcagcugu

SEQ ID NO: 660730 - RNA, 22 nt, Human
uuucuacucauccuuuggagaa

SEQ ID NO: 660731 - RNA, 22 nt, Human
uguguguagaaagggcccuggu

SEQ ID NO: 660732 - RNA, 22 nt, Human
aucaacaugucauaaagugaaa

SEQ ID NO: 660733 - RNA, 22 nt, Human
ucuaaaaugcagaucuacuggu

SEQ ID NO: 660734 - RNA, 22 nt, Human
uuugcaaaguccauugaaguua

SEQ ID NO: 660735 - RNA, 22 nt, Human
ggucccaaucuaaucacaugag

SEQ ID NO: 660736 - RNA, 22 nt, Human
uauucuacaguguuaguguuag

SEQ ID NO: 660737 - RNA, 22 nt, Human
agcacagugcugggcacacagu

SEQ ID NO: 660738 - RNA, 22 nt, Human
cuguggcacucaagaagccucc

SEQ ID NO: 660739 - RNA, 21 nt, Human
cacagaauauacauuuuaguu

SEQ ID NO: 660740 - RNA, 23 nt, Human
acacuuucaaauaugcacagagc

SEQ ID NO: 660741 - RNA, 22 nt, Human
cacaagucauuuucagcaggcu

SEQ ID NO: 660742 - RNA, 22 nt, Human
auguagauguucacuugauuuu

SEQ ID NO: 660743 - RNA, 22 nt, Human
caguucuaauuaauaggaguaa

SEQ ID NO: 660744 - RNA, 22 nt, Human
ggucagcaauuuggacugggcu

SEQ ID NO: 660745 - RNA, 22 nt, Human
aggcuucugugagcucauacaa

SEQ ID NO: 660746 - RNA, 22 nt, Human
caggaacaggcugaugggcagg

SEQ ID NO: 660747 - RNA, 22 nt, Human
gcuggcaaugguguggucuggu

SEQ ID NO: 660748 - RNA, 22 nt, Human
agaaaggagcaccgugggggau

SEQ ID NO: 660749 - RNA, 22 nt, Human
aaauccauucuguuuuaaaagu

SEQ ID NO: 660750 - RNA, 22 nt, Human
ugcauuuaguuaugagaaaaac

SEQ ID NO: 660751 - RNA, 22 nt, Human
gcacuguucucagagcauuaga

SEQ ID NO: 660752 - RNA, 22 nt, Human
cagcagagcauuugguaggagg

SEQ ID NO: 660753 - RNA, 22 nt, Human
acuuucuccagaaaaccaagga

SEQ ID NO: 660754 - RNA, 22 nt, Human
uuguucuuggagcaggcagaga

SEQ ID NO: 660755 - RNA, 22 nt, Human
accuucaacucaaaguguccca

SEQ ID NO: 660756 - RNA, 22 nt, Human
ccugagcuggagacauuacaua

SEQ ID NO: 660757 - RNA, 22 nt, Human
agcauagauacauugagccaca

SEQ ID NO: 660758 - RNA, 22 nt, Human
ucccugcugagagugcucuccc

SEQ ID NO: 660759 - RNA, 22 nt, Human
uugaagcauuugcuauagcauu

SEQ ID NO: 660760 - RNA, 22 nt, Human
gaagagagagcccugggguccg

SEQ ID NO: 660761 - RNA, 22 nt, Human
cuggcuggagcaggcaucuugu

SEQ ID NO: 660762 - RNA, 22 nt, Human
uucaggcauggaaacuggauua

SEQ ID NO: 660763 - RNA, 22 nt, Human
uuucucugcuguguuggcagcu

SEQ ID NO: 660764 - RNA, 20 nt, Human
gcagagccucacugcaaggg

SEQ ID NO: 660765 - RNA, 22 nt, Human
uagcuguugcaauaaacaguuc

SEQ ID NO: 660766 - RNA, 22 nt, Human
uuucuccugcuagaacaaggag

SEQ ID NO: 660767 - RNA, 22 nt, Human
uaaugacauuguauccacagag

SEQ ID NO: 660768 - RNA, 22 nt, Human
acagccacucaaagggccgaag

SEQ ID NO: 660769 - RNA, 21 nt, Human
gcaggaugcaucuuggugucu

SEQ ID NO: 660770 - RNA, 22 nt, Human
uuuauccauucaccaguugaac

SEQ ID NO: 660771 - RNA, 22 nt, Human
agaggaauggagacuaaacgcu

SEQ ID NO: 660772 - RNA, 22 nt, Human
uauugacaggugccugcagaca

SEQ ID NO: 660773 - RNA, 22 nt, Human
ugucugccaaagcuuccuccug

SEQ ID NO: 660774 - RNA, 22 nt, Human
gaggggccggcaugugccucuc

SEQ ID NO: 660775 - RNA, 22 nt, Human
gugccagggaguggaggagcuu

SEQ ID NO: 660776 - RNA, 22 nt, Human
aagugucuuuauauuugagaaa

SEQ ID NO: 660777 - RNA, 22 nt, Human
auguaugcauagugaguaaaug

SEQ ID NO: 660778 - RNA, 22 nt, Human
uccagccuucucaaggcuggcu

SEQ ID NO: 660779 - RNA, 22 nt, Human
uaccaugucuucaauaagucua

SEQ ID NO: 660780 - RNA, 22 nt, Human
agccuaggucugggucuagcag

SEQ ID NO: 660781 - RNA, 22 nt, Human
acaaaccagcuuaagcaagaug

SEQ ID NO: 660782 - RNA, 22 nt, Human
uuucagaaccaagagagacauc

SEQ ID NO: 660783 - RNA, 22 nt, Human
uuacagugagggugacauuuac

SEQ ID NO: 660784 - RNA, 22 nt, Human
uguaugccuuuuucuguuguaa

SEQ ID NO: 660785 - RNA, 22 nt, Human
cucuucaguaaaugacacuguu

SEQ ID NO: 660786 - RNA, 22 nt, Human
cccuggaggucagaggccuggg

SEQ ID NO: 660787 - RNA, 18 nt, Human
cugugcagcaaacugagc

SEQ ID NO: 660788 - RNA, 22 nt, Human
uggauuuaacagaauaccaggu

SEQ ID NO: 660789 - RNA, 22 nt, Human
aguaucuucaaguuucuucuag

SEQ ID NO: 660790 - RNA, 22 nt, Human
agccagggaugcagcacaguga

SEQ ID NO: 660791 - RNA, 22 nt, Human
ccacuguauaagcaaaaugaaa

SEQ ID NO: 660792 - RNA, 22 nt, Human
gaucucuguggacucuuagcac

SEQ ID NO: 660793 - RNA, 22 nt, Human
acuggacuccccaagggccagg

SEQ ID NO: 660794 - RNA, 23 nt, Human
ucagucuuggcuucugauuuucc

SEQ ID NO: 660795 - RNA, 22 nt, Human
ugaggcuccagccaggccagca

SEQ ID NO: 660796 - RNA, 22 nt, Human
gagcccugcuuccaagggggca

SEQ ID NO: 660797 - RNA, 22 nt, Human
gcagagaagaugcccaggcuuc

SEQ ID NO: 660798 - RNA, 22 nt, Human
cuuuacauuaauuucuacugau

SEQ ID NO: 660799 - RNA, 22 nt, Human
gaggccucugucccgccaggga

SEQ ID NO: 660800 - RNA, 22 nt, Human
cggcuggagcuuugaaccugau

SEQ ID NO: 660801 - RNA, 22 nt, Human
uaaauguguguagccaucugug

SEQ ID NO: 660802 - RNA, 22 nt, Human
agaggcacaaacuggaaaggac

SEQ ID NO: 660803 - RNA, 22 nt, Human
caggaggcaucauggagcggac

SEQ ID NO: 660804 - RNA, 22 nt, Human
ucugagcugggcacagaaggcg

SEQ ID NO: 660805 - RNA, 22 nt, Human
ucugccaguuuauagacaagcc

SEQ ID NO: 660806 - RNA, 19 nt, Human
ugcuucuggaaccaugauc

SEQ ID NO: 660807 - RNA, 22 nt, Human
uaaaugugaccuucauuuuaua

SEQ ID NO: 660808 - RNA, 22 nt, Human
uagauucuuugcuagaucauug

SEQ ID NO: 660809 - RNA, 22 nt, Human
augaggcagcacaugggauugu

SEQ ID NO: 660810 - RNA, 22 nt, Human
gacauuuagaagucuaauggcc

SEQ ID NO: 660811 - RNA, 22 nt, Human
uaacaagucauuuuaaauuaug

SEQ ID NO: 660812 - RNA, 22 nt, Human
gaggcaaggccgcacgucucag

SEQ ID NO: 660813 - RNA, 22 nt, Human
uuugugcagugguuaagaccau

SEQ ID NO: 660814 - RNA, 19 nt, Human
ccaaaggaaguuucccucc

SEQ ID NO: 660815 - RNA, 22 nt, Human
cuccagagucacacugccuggg

SEQ ID NO: 660816 - RNA, 22 nt, Human
ucagugucuugaccugggugug

SEQ ID NO: 660817 - RNA, 18 nt, Human
agcucucccccacaugcc

SEQ ID NO: 660818 - RNA, 22 nt, Human
gacugugacuucugaagcaaua

SEQ ID NO: 660819 - RNA, 22 nt, Human
acuguuuaggaggcuuauaugc

SEQ ID NO: 660820 - RNA, 22 nt, Human
ggcgagggagcagugcgguggg

SEQ ID NO: 660821 - RNA, 22 nt, Human
ugcuggaagcuccugcaugucu

SEQ ID NO: 660822 - RNA, 22 nt, Human
acuggaugaggggaaagagaca

SEQ ID NO: 660823 - RNA, 22 nt, Human
uaauaguugugacuuuguaaag

SEQ ID NO: 660824 - RNA, 22 nt, Human
uguggcagaacugggacucaaa

SEQ ID NO: 660825 - RNA, 22 nt, Human
uacugcaugguggaguggagcu

SEQ ID NO: 660826 - RNA, 22 nt, Human
auuuugacagaagaggcccuaa

SEQ ID NO: 660827 - RNA, 20 nt, Human
agacagaaucagagauaaag

SEQ ID NO: 660828 - RNA, 22 nt, Human
aacacuuuccugccuuucugau

SEQ ID NO: 660829 - RNA, 22 nt, Human
ggaaggaagugcagacuuuaaa

SEQ ID NO: 660830 - RNA, 22 nt, Human
aagcagugaugcauacagcugu

SEQ ID NO: 660831 - RNA, 22 nt, Human
cggcuucaaagggagcgagauc

SEQ ID NO: 660832 - RNA, 22 nt, Human
ucuaugcuugagacagaugggg

SEQ ID NO: 660833 - RNA, 22 nt, Human
aacagcuaguggucuagacuuu

SEQ ID NO: 660834 - RNA, 22 nt, Human
acaaugcaccuauuuuaaaacu

SEQ ID NO: 660835 - RNA, 22 nt, Human
uguccuggguggaugcuucauu

SEQ ID NO: 660836 - RNA, 22 nt, Human
cagcuucuggcguggagccuga

SEQ ID NO: 660837 - RNA, 21 nt, Human
ucacuuauaauguauuugcug

SEQ ID NO: 660838 - RNA, 22 nt, Human
gcuuuuucaaaugaaagcuggu

SEQ ID NO: 660839 - RNA, 22 nt, Human
acaugauuaaaagauuuuaaag

SEQ ID NO: 660840 - RNA, 20 nt, Human
ugcugucguguuuucugcuu

SEQ ID NO: 660841 - RNA, 22 nt, Human
aggcauggcauggggcagaugu

SEQ ID NO: 660842 - RNA, 22 nt, Human
uccugagugagagcugggaggu

SEQ ID NO: 660843 - RNA, 22 nt, Human
ccaagcaugggguucaguagga

SEQ ID NO: 660844 - RNA, 22 nt, Human
uuuugugaauaguuuaucuaag

SEQ ID NO: 660845 - RNA, 22 nt, Human
ggcaggagggcggacaaugacc

SEQ ID NO: 660846 - RNA, 22 nt, Human
caagggaauugugugugagagg

SEQ ID NO: 660847 - RNA, 22 nt, Human
ugcuggccaauggcagaggcgg

SEQ ID NO: 660848 - RNA, 22 nt, Human
uucaaaggaaaggcagugucaa

SEQ ID NO: 660849 - RNA, 22 nt, Human
cagugaggaagcugucuggacc

SEQ ID NO: 660850 - RNA, 22 nt, Human
aggaaaggccucagcagaaacc

SEQ ID NO: 660851 - RNA, 22 nt, Human
uauacuuuccugcaacuuugau

SEQ ID NO: 660852 - RNA, 22 nt, Human
gauggcuuugaggaauuugaau

SEQ ID NO: 660853 - RNA, 22 nt, Human
ccuggaccaaacacuggccugg

SEQ ID NO: 660854 - RNA, 22 nt, Human
aggcagcuuuaacugguaguag

SEQ ID NO: 660855 - RNA, 23 nt, Human
auggaaauagcaugugucauuua

SEQ ID NO: 660856 - RNA, 22 nt, Human
cuccagucucuuucggagacac

SEQ ID NO: 660857 - RNA, 21 nt, Human
ugcagccauucagcccuaugc

SEQ ID NO: 660858 - RNA, 22 nt, Human
cugucuguggagcuucugaugu

SEQ ID NO: 660859 - RNA, 22 nt, Human
cugaagccaguuugcugcccuu

SEQ ID NO: 660860 - RNA, 21 nt, Human
ucugugcuuuuuuggcuccua

SEQ ID NO: 660861 - RNA, 22 nt, Human
uagugcuugguggagauggaga

SEQ ID NO: 660862 - RNA, 22 nt, Human
caugcucuccauuggacacaga

SEQ ID NO: 660863 - RNA, 22 nt, Human
uaguguaaugacauuuagacga

SEQ ID NO: 660864 - RNA, 20 nt, Human
agcagcuguguuuucauccu

SEQ ID NO: 660865 - RNA, 22 nt, Human
uugcugagagcgugucaacaag

SEQ ID NO: 660866 - RNA, 22 nt, Human
acauuuagcuguacaaucuaug

SEQ ID NO: 660867 - RNA, 22 nt, Human
aaggcacugacugugcagggga

SEQ ID NO: 660868 - RNA, 22 nt, Human
agcgcaggaacacgucugccuu

SEQ ID NO: 660869 - RNA, 22 nt, Human
uuucauaugggcauuggcaaua

SEQ ID NO: 660870 - RNA, 22 nt, Human
gcugggucccaagccuggggag

SEQ ID NO: 660871 - RNA, 22 nt, Human
cacugaagccugggaguaagac

SEQ ID NO: 660872 - RNA, 22 nt, Human
agagcuguuuauugaugucaca

SEQ ID NO: 660873 - RNA, 22 nt, Human
auucacugucagcuugcauggg

SEQ ID NO: 660874 - RNA, 22 nt, Human
gaugauggacaaagcauuggug

SEQ ID NO: 660875 - RNA, 22 nt, Human
gcagcugggucugugugggcug

SEQ ID NO: 660876 - RNA, 22 nt, Human
ugcuuucuuuagcuccugaguc

SEQ ID NO: 660877 - RNA, 22 nt, Human
gagauucuauguuguugauuau

SEQ ID NO: 660878 - RNA, 22 nt, Human
gggcuucucuuaugcuaacugg

SEQ ID NO: 660879 - RNA, 22 nt, Human
aguucucuggcuccuuuccaga

SEQ ID NO: 660880 - RNA, 22 nt, Human
uggagcauacuaacccacucug

SEQ ID NO: 660881 - RNA, 22 nt, Human
uguuuugcuucucuguuuccca

SEQ ID NO: 660882 - RNA, 22 nt, Human
uccaggcccacucagcugaaau

SEQ ID NO: 660883 - RNA, 22 nt, Human
uucacugugaacucauauucag

SEQ ID NO: 660884 - RNA, 22 nt, Human
cagaugaaguaggugacgagca

SEQ ID NO: 660885 - RNA, 21 nt, Human
uugcauuuuaaguuuacugcu

SEQ ID NO: 660886 - RNA, 22 nt, Human
acagagcaugauggaagaucga

SEQ ID NO: 660887 - RNA, 22 nt, Human
acaguguucuugauauuacagu

SEQ ID NO: 660888 - RNA, 22 nt, Human
uuucuaagaaaguaaugguuau

SEQ ID NO: 660889 - RNA, 22 nt, Human
caaaugaagaaccuucucaccu

SEQ ID NO: 660890 - RNA, 22 nt, Human
aguuugauuguauggguuuuaa

SEQ ID NO: 660891 - RNA, 22 nt, Human
aucaaaguaauuaacacugaga

SEQ ID NO: 660892 - RNA, 22 nt, Human
uacuguacugucuuuuuugcug

SEQ ID NO: 660893 - RNA, 22 nt, Human
ggaaggagucuuuaacacccau

SEQ ID NO: 660894 - RNA, 22 nt, Human
auucuaagcacgcugaagucuu

SEQ ID NO: 660895 - RNA, 22 nt, Human
caugaauauacauccugauggc

SEQ ID NO: 660896 - RNA, 22 nt, Human
uuuacaaggaucaagggaucuc

SEQ ID NO: 660897 - RNA, 22 nt, Human
caggaaauaaaaaguaucuucu

SEQ ID NO: 660898 - RNA, 18 nt, Human
auggcuccagugucuucc

SEQ ID NO: 660899 - RNA, 22 nt, Human
gaauacaaagcagaacucauac

SEQ ID NO: 660900 - RNA, 22 nt, Human
aucugguuuggggauccuugug

SEQ ID NO: 660901 - RNA, 22 nt, Human
uccugcagacauuuacaccuuu

SEQ ID NO: 660902 - RNA, 20 nt, Human
ggggggcuucagggccugug

SEQ ID NO: 660903 - RNA, 22 nt, Human
uggcugaguuucaugcaucaug

SEQ ID NO: 660904 - RNA, 22 nt, Human
ggucagaggucacaagcuggca

SEQ ID NO: 660905 - RNA, 22 nt, Human
gcugucuccauagcuguguguc

SEQ ID NO: 660906 - RNA, 22 nt, Human
cagcuucugagcaagccagggg

SEQ ID NO: 660907 - RNA, 22 nt, Human
uaagacacauuggaguagauga

SEQ ID NO: 660908 - RNA, 22 nt, Human
uugcaaaucagaaguauagauu

SEQ ID NO: 660909 - RNA, 22 nt, Human
aagaggaguagaugugguuggu

SEQ ID NO: 660910 - RNA, 22 nt, Human
uagagacaccaguaccauucug

SEQ ID NO: 660911 - RNA, 22 nt, Human
uccaguggugguuugaagggca

SEQ ID NO: 660912 - RNA, 22 nt, Human
auugacaaauggauguugacau

SEQ ID NO: 660913 - RNA, 22 nt, Human
uguuuaauaauucuaugauagu

SEQ ID NO: 660914 - RNA, 22 nt, Human
cagggcugaaaucaagguguag

SEQ ID NO: 660915 - RNA, 22 nt, Human
augcauauggcuugagggaaua

SEQ ID NO: 660916 - RNA, 22 nt, Human
aaggaggccuggcagaugaaga

SEQ ID NO: 660917 - RNA, 22 nt, Human
gaagaacacuucaugauucauu

SEQ ID NO: 660918 - RNA, 22 nt, Human
cauggaggacccucagggagcu

SEQ ID NO: 660919 - RNA, 22 nt, Human
guuucucuuaacacauaaagua

SEQ ID NO: 660920 - RNA, 22 nt, Human
agguucuuggugagcauuuggu

SEQ ID NO: 660921 - RNA, 22 nt, Human
aaguacuucuagauggauaauc

SEQ ID NO: 660922 - RNA, 22 nt, Human
ucaaugaugcugaagguagcgu

SEQ ID NO: 660923 - RNA, 22 nt, Human
ccugaggggcugcaggccagcu

SEQ ID NO: 660924 - RNA, 22 nt, Human
uucuucuucaagugcugcauuc

SEQ ID NO: 660925 - RNA, 22 nt, Human
cucccaggcagggcugcccacu

SEQ ID NO: 660926 - RNA, 22 nt, Human
cuugagaagcauuaagagguag

SEQ ID NO: 660927 - RNA, 23 nt, Human
cugcuguguuggucucgauggga

SEQ ID NO: 660928 - RNA, 22 nt, Human
ugauacagucagcucacaauug

SEQ ID NO: 660929 - RNA, 22 nt, Human
aaaauucauuccucagacugcc

SEQ ID NO: 660930 - RNA, 22 nt, Human
acugggcucauaaugucauaga

SEQ ID NO: 660931 - RNA, 22 nt, Human
agcagcagcucaguucucagcu

SEQ ID NO: 660932 - RNA, 22 nt, Human
ugggccucaugcccagccaccc

SEQ ID NO: 660933 - RNA, 22 nt, Human
ugggauagauugauggauagag

SEQ ID NO: 660934 - RNA, 22 nt, Human
ccuggagcaucaggaggaaggg

SEQ ID NO: 660935 - RNA, 22 nt, Human
guaaauauuaaaggcugcuaga

SEQ ID NO: 660936 - RNA, 21 nt, Human
uagggcucuauuuuuauuuca

SEQ ID NO: 660937 - RNA, 22 nt, Human
agaugugguaguugaagggaag

SEQ ID NO: 660938 - RNA, 20 nt, Human
guauaagauuucacacauua

SEQ ID NO: 660939 - RNA, 22 nt, Human
uuuucuaagggaaacguccucc

SEQ ID NO: 660940 - RNA, 22 nt, Human
caugcaaagcguuuugaccagc

SEQ ID NO: 660941 - RNA, 22 nt, Human
ugccagugcuugugucugagca

SEQ ID NO: 660942 - RNA, 22 nt, Human
gucuuauugcguauguauacaa

SEQ ID NO: 660943 - RNA, 22 nt, Human
agugagggaugaagaacugcgg

SEQ ID NO: 660944 - RNA, 20 nt, Human
ucuucagaugcuuuuggagu

SEQ ID NO: 660945 - RNA, 20 nt, Human
agcccuguuuccuggagaga

SEQ ID NO: 660946 - RNA, 22 nt, Human
gcaagaccuaucuaguugcugu

SEQ ID NO: 660947 - RNA, 22 nt, Human
aaggucuguauuagaguuucau

SEQ ID NO: 660948 - RNA, 23 nt, Human
accugcuccaugucaccuucacu

SEQ ID NO: 660949 - RNA, 22 nt, Human
uaacuuuaguguaugagguaag

SEQ ID NO: 660950 - RNA, 22 nt, Human
acaguuuaggaugagagaacac

SEQ ID NO: 660951 - RNA, 22 nt, Human
agccucugaugaucacaggggg

SEQ ID NO: 660952 - RNA, 22 nt, Human
aggaggggcauagaaauguaau

SEQ ID NO: 660953 - RNA, 22 nt, Human
caggaacccccacucucagcuc

SEQ ID NO: 660954 - RNA, 22 nt, Human
uaggguccugccuacagagaca

SEQ ID NO: 660955 - RNA, 22 nt, Human
cugcaggacagggaggagcaag

SEQ ID NO: 660956 - RNA, 22 nt, Human
uagcagggagggccagugucaa

SEQ ID NO: 660957 - RNA, 22 nt, Human
gugcauuuggugacucucaccc

SEQ ID NO: 660958 - RNA, 22 nt, Human
cagagaaagacuugcccuuagu

SEQ ID NO: 660959 - RNA, 22 nt, Human
gcuucucgggccugaugucguc

SEQ ID NO: 660960 - RNA, 22 nt, Human
agccugucugucuccaaagcug

SEQ ID NO: 660961 - RNA, 22 nt, Human
ggcagccauggacacuggcuag

SEQ ID NO: 660962 - RNA, 22 nt, Human
uuaguucacugcuauaucauca

SEQ ID NO: 660963 - RNA, 17 nt, Human
cgggcauggagggcagg

SEQ ID NO: 660964 - RNA, 22 nt, Human
gucacaguguaucucuucagcu

SEQ ID NO: 660965 - RNA, 22 nt, Human
ggcuccagaaaucauagagcag

SEQ ID NO: 660966 - RNA, 22 nt, Human
ugucacaccucguuuagcauuc

SEQ ID NO: 660967 - RNA, 22 nt, Human
uugcagcauauugaucuccugu

SEQ ID NO: 660968 - RNA, 22 nt, Human
uaccuugggcuauuaucuuuga

SEQ ID NO: 660969 - RNA, 22 nt, Human
gcugaagauaagugaagaggcu

SEQ ID NO: 660970 - RNA, 22 nt, Human
ggcagguggacgugcuaaagcu

SEQ ID NO: 660971 - RNA, 22 nt, Human
cagaggaagggugcugcgaaag

SEQ ID NO: 660972 - RNA, 22 nt, Human
guucaaaucucaggacuucaga

SEQ ID NO: 660973 - RNA, 22 nt, Human
agcccaagcuaugaggugaccu

SEQ ID NO: 660974 - RNA, 22 nt, Human
cucagacuugcuuuuuauggaa

SEQ ID NO: 660975 - RNA, 22 nt, Human
ucuguaguagguuguaguucuu

SEQ ID NO: 660976 - RNA, 21 nt, Human
ucccuugggaaacuuucuuga

SEQ ID NO: 660977 - RNA, 22 nt, Human
acucaggcuagggaaaaagugg

SEQ ID NO: 660978 - RNA, 22 nt, Human
caggagguugguagcaguagau

SEQ ID NO: 660979 - RNA, 22 nt, Human
ggagggagagugacccuaccaa

SEQ ID NO: 660980 - RNA, 22 nt, Human
cuggccagcauggcugaaguac

SEQ ID NO: 660981 - RNA, 22 nt, Human
caguagaauuauuauaaaacau

SEQ ID NO: 660982 - RNA, 21 nt, Human
ucuuccugcuccacacucccc

SEQ ID NO: 660983 - RNA, 22 nt, Human
ccacuggcaguuggcuagccuu

SEQ ID NO: 660984 - RNA, 18 nt, Human
ucuguccuuccauucuuc

SEQ ID NO: 660985 - RNA, 22 nt, Human
uaauugcuguauagauugucau

SEQ ID NO: 660986 - RNA, 22 nt, Human
auguuucuaguuguaugucacu

SEQ ID NO: 660987 - RNA, 17 nt, Human
uauguguguuugcagca

SEQ ID NO: 660988 - RNA, 22 nt, Human
uuucuaaucugauucuccuacc

SEQ ID NO: 660989 - RNA, 22 nt, Human
cugaaggaagcagguggccugu

SEQ ID NO: 660990 - RNA, 22 nt, Human
uucuuacaaguauuccaggucc

SEQ ID NO: 660991 - RNA, 21 nt, Human
uucuaacugggugggccuuga

SEQ ID NO: 660992 - RNA, 22 nt, Human
ucuggagaggggccuagaauuu

SEQ ID NO: 660993 - RNA, 22 nt, Human
uuacauguauuuuggaaaaagu

SEQ ID NO: 660994 - RNA, 22 nt, Human
gguggcugaaucaaaucaggcc

SEQ ID NO: 660995 - RNA, 22 nt, Human
ucuguugcaaugugcaugguga

SEQ ID NO: 660996 - RNA, 22 nt, Human
aacucaguuacauauuagaaua

SEQ ID NO: 660997 - RNA, 22 nt, Human
gucaggacaggcucuggacuga

SEQ ID NO: 660998 - RNA, 22 nt, Human
aaaggcuggauucagagaggug

SEQ ID NO: 660999 - RNA, 23 nt, Human
uauuccugguaagccugucacug

SEQ ID NO: 661000 - RNA, 22 nt, Human
guggccaggccgacugccaggc

SEQ ID NO: 661001 - RNA, 22 nt, Human
aagagguuauuguucccagcuu

SEQ ID NO: 661002 - RNA, 21 nt, Human
agacaacugugacuauucccu

SEQ ID NO: 661003 - RNA, 22 nt, Human
uccuggaguaggccuuagccau

SEQ ID NO: 661004 - RNA, 22 nt, Human
gcagggcugggauuugagccca

SEQ ID NO: 661005 - RNA, 19 nt, Human
agcucaggcccaucguccc

SEQ ID NO: 661006 - RNA, 22 nt, Human
uuauucuuuucuccagaauccc

SEQ ID NO: 661007 - RNA, 22 nt, Human
gauauuuucgcagggagaauuc

SEQ ID NO: 661008 - RNA, 22 nt, Human
agcugaaaggguguuggagugu

SEQ ID NO: 661009 - RNA, 22 nt, Human
ccuggcugccgagugugcagcg

SEQ ID NO: 661010 - RNA, 22 nt, Human
uucaguauucaaauaugucuua

SEQ ID NO: 661011 - RNA, 22 nt, Human
cuccccacacacuaggccugau

SEQ ID NO: 661012 - RNA, 18 nt, Human
cugccccuucucugagau

SEQ ID NO: 661013 - RNA, 22 nt, Human
ucauccauccucgccuuugcuu

SEQ ID NO: 661014 - RNA, 22 nt, Human
auacagcagugaauaagauaaa

SEQ ID NO: 661015 - RNA, 22 nt, Human
gaaguuaccgaaccucuccaug

SEQ ID NO: 661016 - RNA, 22 nt, Human
ugucaccacuggcugaaacacc

SEQ ID NO: 661017 - RNA, 19 nt, Human
uugaaauuguuugauaugg

SEQ ID NO: 661018 - RNA, 22 nt, Human
gccagcauccugguggugguug

SEQ ID NO: 661019 - RNA, 22 nt, Human
caagggaaggcuaagggcaaca

SEQ ID NO: 661020 - RNA, 22 nt, Human
augacacuguccuaguaaggaa

SEQ ID NO: 661021 - RNA, 22 nt, Human
ccagcuuuuagugggcuuauua

SEQ ID NO: 661022 - RNA, 22 nt, Human
gaauuuuagaauaugugggcuu

SEQ ID NO: 661023 - RNA, 22 nt, Human
uugaaacagacaaguaaauguc

SEQ ID NO: 661024 - RNA, 22 nt, Human
cagagagggcggcccuggcuuc

SEQ ID NO: 661025 - RNA, 22 nt, Human
auucaguuaaaaacuguacuuc

SEQ ID NO: 661026 - RNA, 22 nt, Human
uacaaugauuagcuaacuugcc

SEQ ID NO: 661027 - RNA, 22 nt, Human
gacauaaaugaaguuugacuau

SEQ ID NO: 661028 - RNA, 22 nt, Human
gaagggcuuucugggagaagag

SEQ ID NO: 661029 - RNA, 22 nt, Human
aucucuucccaacuccacauuc

SEQ ID NO: 661030 - RNA, 22 nt, Human
ucugagagccucuagccuaagu

SEQ ID NO: 661031 - RNA, 18 nt, Human
cugggucuccaggcugcc

SEQ ID NO: 661032 - RNA, 22 nt, Human
ggcccaguguggguggauguug

SEQ ID NO: 661033 - RNA, 22 nt, Human
ugcuugcaagagaugcaaugac

SEQ ID NO: 661034 - RNA, 22 nt, Human
uuuacuucugcauuuccccuag

SEQ ID NO: 661035 - RNA, 22 nt, Human
ugcaggcauuggugagagaagc

SEQ ID NO: 661036 - RNA, 19 nt, Human
auacaugcauuuacaugcu

SEQ ID NO: 661037 - RNA, 22 nt, Human
gaaagugcagucagacaaggca

SEQ ID NO: 661038 - RNA, 22 nt, Human
uauuucugaggcccaggaagug

SEQ ID NO: 661039 - RNA, 22 nt, Human
ucaaacaggacuacauucucau

SEQ ID NO: 661040 - RNA, 22 nt, Human
caaugauucugcaacugugugc

SEQ ID NO: 661041 - RNA, 22 nt, Human
cagccacuugugaugcugggga

SEQ ID NO: 661042 - RNA, 20 nt, Human
uccugcuuccaccagagcac

SEQ ID NO: 661043 - RNA, 22 nt, Human
ccugccuggggacaaaggaggg

SEQ ID NO: 661044 - RNA, 22 nt, Human
uucacaacugccauagccagug

SEQ ID NO: 661045 - RNA, 22 nt, Human
cccugcuaguccuuccuuggcu

SEQ ID NO: 661046 - RNA, 22 nt, Human
gcagcagcaggcgcucggccgu

SEQ ID NO: 661047 - RNA, 22 nt, Human
gagugucuguauuuugggcaag

SEQ ID NO: 661048 - RNA, 22 nt, Human
ucuccucuacugggucugcaga

SEQ ID NO: 661049 - RNA, 20 nt, Human
uuucacaaugaacaugucuc

SEQ ID NO: 661050 - RNA, 22 nt, Human
cacaagauggucacauaagugc

SEQ ID NO: 661051 - RNA, 22 nt, Human
cugagccagcuggcaugugcua

SEQ ID NO: 661052 - RNA, 22 nt, Human
uaguacaguuuuggcacaugga

SEQ ID NO: 661053 - RNA, 22 nt, Human
ucaggcaguagaauugcuugaa

SEQ ID NO: 661054 - RNA, 22 nt, Human
uagaugcuguagaaauacuuau

SEQ ID NO: 661055 - RNA, 22 nt, Human
uaaaugaguaauauagcuguuu

SEQ ID NO: 661056 - RNA, 22 nt, Human
uucagcucugcuagcucugugc

SEQ ID NO: 661057 - RNA, 22 nt, Human
agauacuaagcauuuccagcac

SEQ ID NO: 661058 - RNA, 22 nt, Human
uacauuagcucaucuauuuauu

SEQ ID NO: 661059 - RNA, 22 nt, Human
uaggaaaucagagaaagaggug

SEQ ID NO: 661060 - RNA, 22 nt, Human
ccacagggauaggaauggggcu

SEQ ID NO: 661061 - RNA, 22 nt, Human
gcuccucccugugcagacccag

SEQ ID NO: 661062 - RNA, 22 nt, Human
aggcugugauuccaccacucuc

SEQ ID NO: 661063 - RNA, 22 nt, Human
acuucaguaggugauaugugca

SEQ ID NO: 661064 - RNA, 23 nt, Human
aagaguuuagagucuugcagagu

SEQ ID NO: 661065 - RNA, 22 nt, Human
gcuccagggacccaagagaaaa

SEQ ID NO: 661066 - RNA, 21 nt, Human
uuugaaagcuacaucuauagc

SEQ ID NO: 661067 - RNA, 22 nt, Human
guggaugaugagugacuacaga

SEQ ID NO: 661068 - RNA, 22 nt, Human
cauucacaucuuguuccaucac

SEQ ID NO: 661069 - RNA, 22 nt, Human
cagcugaguuuccaagucugcc

SEQ ID NO: 661070 - RNA, 22 nt, Human
cacuguacccauuuaaauaaau

SEQ ID NO: 661071 - RNA, 22 nt, Human
gucagcuaugucuguuguugag

SEQ ID NO: 661072 - RNA, 22 nt, Human
gcuguggucccucuguccucau

SEQ ID NO: 661073 - RNA, 22 nt, Human
aaaaucaguacacuuuauuuug

SEQ ID NO: 661074 - RNA, 22 nt, Human
agaggaggcuggguccagauaa

SEQ ID NO: 661075 - RNA, 22 nt, Human
cacugcuuucacaguuuguucc

SEQ ID NO: 661076 - RNA, 22 nt, Human
gccacccccaaguagguggucu

SEQ ID NO: 661077 - RNA, 22 nt, Human
ccuucucucugaagaccccaaa

SEQ ID NO: 661078 - RNA, 22 nt, Human
auuugcauaauagugauuugua

SEQ ID NO: 661079 - RNA, 22 nt, Human
gggccugacugagagcuccuca

SEQ ID NO: 661080 - RNA, 22 nt, Human
agggaaggaggccauguguccc

SEQ ID NO: 661081 - RNA, 22 nt, Human
aguggggucuccuccagccccc

SEQ ID NO: 661082 - RNA, 23 nt, Human
agguucaggagauggaggaacaa

SEQ ID NO: 661083 - RNA, 19 nt, Human
uuacaucugcaacacuggu

SEQ ID NO: 661084 - RNA, 22 nt, Human
cgacccuacagacagugcugag

SEQ ID NO: 661085 - RNA, 22 nt, Human
uaaacucuucuguagaaucaga

SEQ ID NO: 661086 - RNA, 22 nt, Human
uguggggguacacguacacaug

SEQ ID NO: 661087 - RNA, 22 nt, Human
aaagacucuuaacucccuagcg

SEQ ID NO: 661088 - RNA, 22 nt, Human
uggccacuuggcaugugugcca

SEQ ID NO: 661089 - RNA, 22 nt, Human
aaucacaaauuuagacagagcu

SEQ ID NO: 661090 - RNA, 22 nt, Human
uugucugacuucuuuaguuacu

SEQ ID NO: 661091 - RNA, 22 nt, Human
gggcagcuggccagguauucug

SEQ ID NO: 661092 - RNA, 22 nt, Human
auguggcuuucugcguuuucuc

SEQ ID NO: 661093 - RNA, 22 nt, Human
cugcccaaauccuucuuccucu

SEQ ID NO: 661094 - RNA, 23 nt, Human
uuggaagccagacagcugugcag

SEQ ID NO: 661095 - RNA, 22 nt, Human
aagcugccuuccaugugaggaa

SEQ ID NO: 661096 - RNA, 22 nt, Human
uuuaucaaacaaauuauccagc

SEQ ID NO: 661097 - RNA, 22 nt, Human
gcccaugggccugaggcccuag

SEQ ID NO: 661098 - RNA, 22 nt, Human
gaauaagugaaguuggcagcuu

SEQ ID NO: 661099 - RNA, 22 nt, Human
uauccuuguacuauaguauuua

SEQ ID NO: 661100 - RNA, 22 nt, Human
accuagaauuuaaaacauugcu

SEQ ID NO: 661101 - RNA, 22 nt, Human
acaguagaguaaaugguuagau

SEQ ID NO: 661102 - RNA, 22 nt, Human
gcagcugucacuuucacaaugc

SEQ ID NO: 661103 - RNA, 22 nt, Human
gucuggaaccaagacguguagc

SEQ ID NO: 661104 - RNA, 22 nt, Human
gcccaagcuggacugcaguggc

SEQ ID NO: 661105 - RNA, 22 nt, Human
ccuucagccuagaacuugagag

SEQ ID NO: 661106 - RNA, 22 nt, Human
agggcucauugacauggaaaag

SEQ ID NO: 661107 - RNA, 22 nt, Human
ccugucugaggaggugcucuuu

SEQ ID NO: 661108 - RNA, 22 nt, Human
cuggagguaauguuauuuuugu

SEQ ID NO: 661109 - RNA, 22 nt, Human
ggccucuguuuggagccaggau

SEQ ID NO: 661110 - RNA, 22 nt, Human
uccaggagggauugggcugugg

SEQ ID NO: 661111 - RNA, 22 nt, Human
uaagugaauauuuucuucugua

SEQ ID NO: 661112 - RNA, 22 nt, Human
ugguggggccagacuucagcuc

SEQ ID NO: 661113 - RNA, 22 nt, Human
cccagacuccucuggcuggugg

SEQ ID NO: 661114 - RNA, 22 nt, Human
aggcagguguuaccucugguuu

SEQ ID NO: 661115 - RNA, 22 nt, Human
acucacuucuuuuacuauaaaa

SEQ ID NO: 661116 - RNA, 22 nt, Human
cgggggaguugaggcacauggg

SEQ ID NO: 661117 - RNA, 22 nt, Human
caugggcuuuggaggcuggagg

SEQ ID NO: 661118 - RNA, 21 nt, Human
cccagggaagccgcagucacc

SEQ ID NO: 661119 - RNA, 22 nt, Human
uugauucauuuauugagugccu

SEQ ID NO: 661120 - RNA, 23 nt, Human
cuguggcaaguccugcaccugcc

SEQ ID NO: 661121 - RNA, 22 nt, Human
caugcauagcuuuggagcuagg

SEQ ID NO: 661122 - RNA, 22 nt, Human
uuuggaguuuaacaacuugaag

SEQ ID NO: 661123 - RNA, 22 nt, Human
acaaggcugcugugauugggaa

SEQ ID NO: 661124 - RNA, 22 nt, Human
gggcuuuaaucuuguuaacuag

SEQ ID NO: 661125 - RNA, 22 nt, Human
uguagcacagagcuuugacacu

SEQ ID NO: 661126 - RNA, 22 nt, Human
acacuaaugagaaaggaauuaa

SEQ ID NO: 661127 - RNA, 22 nt, Human
ugcauaaaauaugagaaaugua

SEQ ID NO: 661128 - RNA, 22 nt, Human
caggcucccacccuccugcagc

SEQ ID NO: 661129 - RNA, 22 nt, Human
ugagguggccgaggagcaggac

SEQ ID NO: 661130 - RNA, 22 nt, Human
aucuaggauuugaaugcacagu

SEQ ID NO: 661131 - RNA, 22 nt, Human
ccugggcuugcaucugugcugg

SEQ ID NO: 661132 - RNA, 22 nt, Human
aggcuggcuuggcucuccugug

SEQ ID NO: 661133 - RNA, 22 nt, Human
acacagcaacuugcaguaugga

SEQ ID NO: 661134 - RNA, 18 nt, Human
ggaaggugcuggagugca

SEQ ID NO: 661135 - RNA, 22 nt, Human
cagggucugaugguccucacuu

SEQ ID NO: 661136 - RNA, 22 nt, Human
aaauuguccuuuuaagaaacag

SEQ ID NO: 661137 - RNA, 22 nt, Human
cauguacaugccuacuaucaau

SEQ ID NO: 661138 - RNA, 22 nt, Human
uagguucaaguucaggcucuau

SEQ ID NO: 661139 - RNA, 22 nt, Human
aaguaggaauccgaaugaguag

SEQ ID NO: 661140 - RNA, 22 nt, Human
uuauaucagaaggugagauuga

SEQ ID NO: 661141 - RNA, 22 nt, Human
cugcuccacaccguccauacuc

SEQ ID NO: 661142 - RNA, 22 nt, Human
gaaccuguaaguauagaugugg

SEQ ID NO: 661143 - RNA, 22 nt, Human
cucuaggcugcccaggagcuga

SEQ ID NO: 661144 - RNA, 22 nt, Human
uccacagcacaaagccagugug

SEQ ID NO: 661145 - RNA, 22 nt, Human
ugagcugugauuaacucugaga

SEQ ID NO: 661146 - RNA, 22 nt, Human
ucaugucagcuguugaugugca

SEQ ID NO: 661147 - RNA, 22 nt, Human
aaacucuguugagauaauauuu

SEQ ID NO: 661148 - RNA, 22 nt, Human
gcugcucugggucugcccagcu

SEQ ID NO: 661149 - RNA, 22 nt, Human
uaggccaguggcagguugugug

SEQ ID NO: 661150 - RNA, 22 nt, Human
ugggaagggagaguguccugga

SEQ ID NO: 661151 - RNA, 22 nt, Human
agccaaggcagcuagagcucug

SEQ ID NO: 661152 - RNA, 18 nt, Human
gucauugcaacauacugu

SEQ ID NO: 661153 - RNA, 22 nt, Human
ugaaugugaugcuaaacauaug

SEQ ID NO: 661154 - RNA, 22 nt, Human
gagguggucgaggagggguacc

SEQ ID NO: 661155 - RNA, 22 nt, Human
uggcuacagauuugcugacaau

SEQ ID NO: 661156 - RNA, 22 nt, Human
ugucuccugggucccuuccacc

SEQ ID NO: 661157 - RNA, 22 nt, Human
uugagguccaggugugggcagg

SEQ ID NO: 661158 - RNA, 20 nt, Human
uuggcucaugcaacaccuac

SEQ ID NO: 661159 - RNA, 22 nt, Human
caguuaacuucauaugaucauu

SEQ ID NO: 661160 - RNA, 22 nt, Human
uaacaggcaaggucacaccuug

SEQ ID NO: 661161 - RNA, 22 nt, Human
ucacaauucagaaaccaaguag

SEQ ID NO: 661162 - RNA, 22 nt, Human
aggucugggauugaagacauca

SEQ ID NO: 661163 - RNA, 21 nt, Human
gacaggggccauggguuucua

SEQ ID NO: 661164 - RNA, 22 nt, Human
uccagcauauauagagaaugag

SEQ ID NO: 661165 - RNA, 22 nt, Human
caggcagagaacucauccguga

SEQ ID NO: 661166 - RNA, 22 nt, Human
guggcaguguggagggaggagu

SEQ ID NO: 661167 - RNA, 22 nt, Human
uacaguaucuucuggcaagcau

SEQ ID NO: 661168 - RNA, 22 nt, Human
aggcccugcccagagcuccucg

SEQ ID NO: 661169 - RNA, 22 nt, Human
gucuacuuuuuaaucuuggcag

SEQ ID NO: 661170 - RNA, 22 nt, Human
ucugauaaugugcuucgugacc

SEQ ID NO: 661171 - RNA, 22 nt, Human
cuuuuucugauguuccaugauu

SEQ ID NO: 661172 - RNA, 22 nt, Human
caguaugagaguugaaucaagg

SEQ ID NO: 661173 - RNA, 22 nt, Human
cagggagccugaauguuccagg

SEQ ID NO: 661174 - RNA, 21 nt, Human
cagcagaagcaucuauggaag

SEQ ID NO: 661175 - RNA, 22 nt, Human
uuucacagcugggaagagauau

SEQ ID NO: 661176 - RNA, 22 nt, Human
uuaguuaguggggcugucaguc

SEQ ID NO: 661177 - RNA, 22 nt, Human
uccugccugcaaucccagcacu

SEQ ID NO: 661178 - RNA, 22 nt, Human
ccagaugugagcagagccuuga

SEQ ID NO: 661179 - RNA, 20 nt, Human
cccagagguugcggcaggag

SEQ ID NO: 661180 - RNA, 18 nt, Human
ccucuggguuuuguuccc

SEQ ID NO: 661181 - RNA, 22 nt, Human
ugcugccuuugggaccuggccu

SEQ ID NO: 661182 - RNA, 22 nt, Human
caggacuggcucgcagugggug

SEQ ID NO: 661183 - RNA, 22 nt, Human
agaugacaaaucaggggacggg

SEQ ID NO: 661184 - RNA, 20 nt, Human
acaggagaucugaggaaagg

SEQ ID NO: 661185 - RNA, 22 nt, Human
ggaugggcccgggacggcgcug

SEQ ID NO: 661186 - RNA, 22 nt, Human
acagaggucaccuuuguaucuu

SEQ ID NO: 661187 - RNA, 22 nt, Human
aaucaggcacagcgacugcagc

SEQ ID NO: 661188 - RNA, 21 nt, Human
augggccagggauacagagag

SEQ ID NO: 661189 - RNA, 22 nt, Human
aaugaguucugacacuucacga

SEQ ID NO: 661190 - RNA, 19 nt, Human
uggcaugaugauggauggg

SEQ ID NO: 661191 - RNA, 22 nt, Human
aggcccaguagugcugccuuua

SEQ ID NO: 661192 - RNA, 17 nt, Human
ugaguuaaguuuagauc

SEQ ID NO: 661193 - RNA, 17 nt, Human
uccuccccgcaguugca

SEQ ID NO: 661194 - RNA, 22 nt, Human
ucccaggcuggcaggcagcagu

SEQ ID NO: 661195 - RNA, 22 nt, Human
cccucugccugggaccaagucc

SEQ ID NO: 661196 - RNA, 22 nt, Human
ggggaggcaagaugaagugagg

SEQ ID NO: 661197 - RNA, 22 nt, Human
ccaggagagcucuaaauggcug

SEQ ID NO: 661198 - RNA, 21 nt, Human
uaugugucuguggaaaacuag

SEQ ID NO: 661199 - RNA, 22 nt, Human
ggcuucgcagcucggcagccgc

SEQ ID NO: 661200 - RNA, 22 nt, Human
auccaaagcccuaaguuaacug

SEQ ID NO: 661201 - RNA, 22 nt, Human
cuuguauuaugguucgcuuagu

SEQ ID NO: 661202 - RNA, 22 nt, Human
uggugcaagucucugaggaggg

SEQ ID NO: 661203 - RNA, 22 nt, Human
ugccuuggauugcagggaaccu

SEQ ID NO: 661204 - RNA, 22 nt, Human
acuuuugaggacuuuauuguau

SEQ ID NO: 661205 - RNA, 19 nt, Human
agcagggacauggaacuuu

SEQ ID NO: 661206 - RNA, 22 nt, Human
aacuaaaggcuguugcagggaa

SEQ ID NO: 661207 - RNA, 22 nt, Human
ccuggagacgaggcuggaccau

SEQ ID NO: 661208 - RNA, 22 nt, Human
auguggcuuggcagggaauaug

SEQ ID NO: 661209 - RNA, 22 nt, Human
aaguccaguuucauuugagguc

SEQ ID NO: 661210 - RNA, 22 nt, Human
gaagagcuggaauccagucugg

SEQ ID NO: 661211 - RNA, 22 nt, Human
cucagacaucugaaauggguua

SEQ ID NO: 661212 - RNA, 23 nt, Human
gaggcagcuccugcagugcccug

SEQ ID NO: 661213 - RNA, 22 nt, Human
uuugggcaauucagugggaccu

SEQ ID NO: 661214 - RNA, 22 nt, Human
uguguauagguugugcuaauag

SEQ ID NO: 661215 - RNA, 22 nt, Human
guuucuguguuagaugagucuu

SEQ ID NO: 661216 - RNA, 23 nt, Human
ucucuguacagaugaggacacac

SEQ ID NO: 661217 - RNA, 22 nt, Human
cacagggcagguacucucagag

SEQ ID NO: 661218 - RNA, 23 nt, Human
agcaaugcugggagacucuguaa

SEQ ID NO: 661219 - RNA, 22 nt, Human
uuccaaaacaauauucugugaa

SEQ ID NO: 661220 - RNA, 22 nt, Human
uacaguagacaauguuaguaug

SEQ ID NO: 661221 - RNA, 22 nt, Human
cucugagaagccuugaugggga

SEQ ID NO: 661222 - RNA, 22 nt, Human
aauaacaggcucaucagaugcu

SEQ ID NO: 661223 - RNA, 22 nt, Human
uccuguggaagacaguguuggg

SEQ ID NO: 661224 - RNA, 22 nt, Human
ucaacacuauccaggcaaucuu

SEQ ID NO: 661225 - RNA, 22 nt, Human
auucuauuaauauuucuaggaa

SEQ ID NO: 661226 - RNA, 22 nt, Human
ugcaguggugguaaagaugcuc

SEQ ID NO: 661227 - RNA, 22 nt, Human
ccagagacaaggagcuggaguc

SEQ ID NO: 661228 - RNA, 22 nt, Human
ucagagucaacuguugccuguu

SEQ ID NO: 661229 - RNA, 22 nt, Human
guuuuguugcugcagagcucaa

SEQ ID NO: 661230 - RNA, 22 nt, Human
aguggguggcgcagaggaggaa

SEQ ID NO: 661231 - RNA, 22 nt, Human
caaacuuugcaaaacuuacagu

SEQ ID NO: 661232 - RNA, 22 nt, Human
gcauguggugcugaggcugucg

SEQ ID NO: 661233 - RNA, 22 nt, Human
uucaacaucuuggagcuggaac

SEQ ID NO: 661234 - RNA, 22 nt, Human
uuauggaagugcaaauugugug

SEQ ID NO: 661235 - RNA, 21 nt, Human
auguagugacuucauuccuuc

SEQ ID NO: 661236 - RNA, 22 nt, Human
ugacauuugagagagauauaca

SEQ ID NO: 661237 - RNA, 22 nt, Human
cauggacucugguuuggggagc

SEQ ID NO: 661238 - RNA, 22 nt, Human
cuauacaucccaauuucagaga

SEQ ID NO: 661239 - RNA, 22 nt, Human
gcucugugccccugccguggac

SEQ ID NO: 661240 - RNA, 22 nt, Human
ugggggucaggaugaggccuug

SEQ ID NO: 661241 - RNA, 22 nt, Human
gggcuggagccuggcggugguu

SEQ ID NO: 661242 - RNA, 21 nt, Human
aagggagauaggaaucaggcc

SEQ ID NO: 661243 - RNA, 22 nt, Human
gacuuuauuauaguggcaauag

SEQ ID NO: 661244 - RNA, 22 nt, Human
aaagucaugcaguugaacuuuu

SEQ ID NO: 661245 - RNA, 22 nt, Human
cuuuggcaaggguuuuaauugu

SEQ ID NO: 661246 - RNA, 22 nt, Human
gacccaggagugcagagagugg

SEQ ID NO: 661247 - RNA, 22 nt, Human
caggcucccacuuggcuuaaag

SEQ ID NO: 661248 - RNA, 22 nt, Human
uuccagauuucuacacaagacc

SEQ ID NO: 661249 - RNA, 22 nt, Human
gagcucuggcagggcaggucug

SEQ ID NO: 661250 - RNA, 22 nt, Human
gaacaacucuucuugagagaug

SEQ ID NO: 661251 - RNA, 22 nt, Human
auggccagcccuucccgcagcu

SEQ ID NO: 661252 - RNA, 22 nt, Human
gagcaacuucaauaguacuauu

SEQ ID NO: 661253 - RNA, 22 nt, Human
auucaaacaggaagaaaucauu

SEQ ID NO: 661254 - RNA, 22 nt, Human
uccuggccgcuggccccugaga

SEQ ID NO: 661255 - RNA, 22 nt, Human
cugagcuuggcuuaucuccagc

SEQ ID NO: 661256 - RNA, 22 nt, Human
acaaagcuuagaccuaagagau

SEQ ID NO: 661257 - RNA, 22 nt, Human
gagaccuggaggauguggaugg

SEQ ID NO: 661258 - RNA, 22 nt, Human
aaaugugacagaugcaguacag

SEQ ID NO: 661259 - RNA, 22 nt, Human
acaggaguucagaggacacccc

SEQ ID NO: 661260 - RNA, 22 nt, Human
accccuuuuauagaagaacaga

SEQ ID NO: 661261 - RNA, 22 nt, Human
acagugaugagccggcugaggc

SEQ ID NO: 661262 - RNA, 22 nt, Human
guuuaugaaugugucagacaua

SEQ ID NO: 661263 - RNA, 22 nt, Human
gccuuuggauauauucagggau

SEQ ID NO: 661264 - RNA, 22 nt, Human
aaaguguugggauuacaggugu

SEQ ID NO: 661265 - RNA, 17 nt, Human
gcccugccugcugcccu

SEQ ID NO: 661266 - RNA, 23 nt, Human
agggaagaaacaugaagggcugu

SEQ ID NO: 661267 - RNA, 21 nt, Human
ugaaugaucugguugccuuuu

SEQ ID NO: 661268 - RNA, 22 nt, Human
cccuguacagucucuguggcac

SEQ ID NO: 661269 - RNA, 22 nt, Human
aacacuuagauuuuuaagguuu

SEQ ID NO: 661270 - RNA, 22 nt, Human
ucucuguggcaagcaugcugcu

SEQ ID NO: 661271 - RNA, 22 nt, Human
uauguauagagucuuuuaaauu

SEQ ID NO: 661272 - RNA, 22 nt, Human
ggaggcucuugagaggggagua

SEQ ID NO: 661273 - RNA, 22 nt, Human
acagauaaggcaguuaagaguu

SEQ ID NO: 661274 - RNA, 22 nt, Human
uaccuuggguugaguucauucu

SEQ ID NO: 661275 - RNA, 22 nt, Human
gauuacauucuccuuguauuag

SEQ ID NO: 661276 - RNA, 22 nt, Human
aaggcaguuaauuuggcuagaa

SEQ ID NO: 661277 - RNA, 22 nt, Human
ggccugagucccaccuggcugu

SEQ ID NO: 661278 - RNA, 22 nt, Human
cucuggcuaucuguuucuaugu

SEQ ID NO: 661279 - RNA, 22 nt, Human
augugucauuauccagaauaac

SEQ ID NO: 661280 - RNA, 22 nt, Human
agggcccacaguuccuauggcc

SEQ ID NO: 661281 - RNA, 22 nt, Human
auuucuuaaaacuucagggaga

SEQ ID NO: 661282 - RNA, 22 nt, Human
gauacaaaauauaaauggagag

SEQ ID NO: 661283 - RNA, 21 nt, Human
aggaaaauugaggguuguugu

SEQ ID NO: 661284 - RNA, 20 nt, Human
ucagaacaguagaggagcua

SEQ ID NO: 661285 - RNA, 22 nt, Human
cugggagucaccaggagcaagg

SEQ ID NO: 661286 - RNA, 22 nt, Human
agacugaaauagugcacaccaa

SEQ ID NO: 661287 - RNA, 17 nt, Human
uggagcugcguguguuc

SEQ ID NO: 661288 - RNA, 22 nt, Human
acugaacagaccauuuuguccu

SEQ ID NO: 661289 - RNA, 22 nt, Human
augccaguaagucucagcuagg

SEQ ID NO: 661290 - RNA, 22 nt, Human
uugauaucucugcuguguuagg

SEQ ID NO: 661291 - RNA, 22 nt, Human
aagaggagacuucagcaacuug

SEQ ID NO: 661292 - RNA, 22 nt, Human
ucagccugcuccaagugcugcc

SEQ ID NO: 661293 - RNA, 22 nt, Human
gcugcuguuaugauguuacuuu

SEQ ID NO: 661294 - RNA, 22 nt, Human
cagcuuuggagugugagugcug

SEQ ID NO: 661295 - RNA, 22 nt, Human
uuucagaugcaauuaauuuuca

SEQ ID NO: 661296 - RNA, 22 nt, Human
guucugaguccuccuuugaagg

SEQ ID NO: 661297 - RNA, 22 nt, Human
ucuuugaauacaggaagcauga

SEQ ID NO: 661298 - RNA, 22 nt, Human
uguauuuuuaggaaugcgcuau

SEQ ID NO: 661299 - RNA, 22 nt, Human
uucagugugcuucaggacguua

SEQ ID NO: 661300 - RNA, 22 nt, Human
gaaguuaucaggauuaaaguug

SEQ ID NO: 661301 - RNA, 22 nt, Human
ggagccuuccagacugcccaca

SEQ ID NO: 661302 - RNA, 22 nt, Human
auuagaauuaugcuugcuaaug

SEQ ID NO: 661303 - RNA, 22 nt, Human
ucaaggaaugacuauaugagga

SEQ ID NO: 661304 - RNA, 22 nt, Human
gcaccugggacccagaggcacc

SEQ ID NO: 661305 - RNA, 22 nt, Human
aaacaguuuugccaaaaggaca

SEQ ID NO: 661306 - RNA, 22 nt, Human
uagaucauggguacugcauaug

SEQ ID NO: 661307 - RNA, 22 nt, Human
agccacaggccaugagauacca

SEQ ID NO: 661308 - RNA, 22 nt, Human
auguagaagugggcauuauaga

SEQ ID NO: 661309 - RNA, 22 nt, Human
uucacaguuugcugggacagga

SEQ ID NO: 661310 - RNA, 22 nt, Human
gagggggaaagucccuggaguc

SEQ ID NO: 661311 - RNA, 22 nt, Human
uaacauguguauugguuuccua

SEQ ID NO: 661312 - RNA, 22 nt, Human
cccagaggguggagguugcagu

SEQ ID NO: 661313 - RNA, 22 nt, Human
acagccagugacugcagacccu

SEQ ID NO: 661314 - RNA, 18 nt, Human
aggagaaagggaccaggg

SEQ ID NO: 661315 - RNA, 22 nt, Human
ucacugauuaugaaaaugaagg

SEQ ID NO: 661316 - RNA, 22 nt, Human
uagugaaaguauuaaacagcug

SEQ ID NO: 661317 - RNA, 22 nt, Human
uuaauugucugugaguaccuga

SEQ ID NO: 661318 - RNA, 22 nt, Human
ugcauguuucuguauguuaaug

SEQ ID NO: 661319 - RNA, 22 nt, Human
agcuggugugcucuggaauccu

SEQ ID NO: 661320 - RNA, 22 nt, Human
uucuggggacauaacaguaagc

SEQ ID NO: 661321 - RNA, 22 nt, Human
ggacagugaauguggggaugca

SEQ ID NO: 661322 - RNA, 17 nt, Human
gacaggcucagugacga

SEQ ID NO: 661323 - RNA, 22 nt, Human
uuggcucaccuggagccuguug

SEQ ID NO: 661324 - RNA, 20 nt, Human
acuuaguguaggguuccuag

SEQ ID NO: 661325 - RNA, 22 nt, Human
augaaaugagucaaugcgacua

SEQ ID NO: 661326 - RNA, 22 nt, Human
agugucauuuuguccaucuucu

SEQ ID NO: 661327 - RNA, 20 nt, Human
aggcacuguugucuguaucc

SEQ ID NO: 661328 - RNA, 22 nt, Human
gcccugugccagucacgcugug

SEQ ID NO: 661329 - RNA, 22 nt, Human
cugccaaucugaagagcuucuu

SEQ ID NO: 661330 - RNA, 22 nt, Human
guggccaaacaccaguuuagga

SEQ ID NO: 661331 - RNA, 22 nt, Human
gagagcccucacuccuucccug

SEQ ID NO: 661332 - RNA, 23 nt, Human
uggggcucuggcaggccugaggu

SEQ ID NO: 661333 - RNA, 22 nt, Human
aaggcuuugauuccauugcccu

SEQ ID NO: 661334 - RNA, 22 nt, Human
uagaauucauguuacuguuagc

SEQ ID NO: 661335 - RNA, 22 nt, Human
augaagacaaacuggguagaaa

SEQ ID NO: 661336 - RNA, 22 nt, Human
uugcuuuuaaucuuuguacauc

SEQ ID NO: 661337 - RNA, 22 nt, Human
cugcugggccuggucucugagg

SEQ ID NO: 661338 - RNA, 22 nt, Human
gaggggaguguccuccgggccc

SEQ ID NO: 661339 - RNA, 22 nt, Human
caggcuucagggaacgcagucu

SEQ ID NO: 661340 - RNA, 22 nt, Human
aaagugacaaccagcaggacuu

SEQ ID NO: 661341 - RNA, 22 nt, Human
cucagaguccccacaucugggu

SEQ ID NO: 661342 - RNA, 22 nt, Human
ugcuggagcaucugagagcauc

SEQ ID NO: 661343 - RNA, 22 nt, Human
ucucucauagagaaaaauauau

SEQ ID NO: 661344 - RNA, 22 nt, Human
ugguaauuuacgcauuucugua

SEQ ID NO: 661345 - RNA, 22 nt, Human
uugcuuuauuggguuuacugcc

SEQ ID NO: 661346 - RNA, 22 nt, Human
ccaagggcugagauacaucuag

SEQ ID NO: 661347 - RNA, 22 nt, Human
ccugccugcagaaaguaucucc

SEQ ID NO: 661348 - RNA, 22 nt, Human
gcugagcugaggcagggcuggg

SEQ ID NO: 661349 - RNA, 22 nt, Human
uacugcaucgaaaugcuuuuau

SEQ ID NO: 661350 - RNA, 22 nt, Human
gcccagcagcugguggagaagg

SEQ ID NO: 661351 - RNA, 22 nt, Human
ugugaacuuuggaugguucuga

SEQ ID NO: 661352 - RNA, 22 nt, Human
uaagugucccuauugugauuuu

SEQ ID NO: 661353 - RNA, 22 nt, Human
gguguugggcucacugguccuu

SEQ ID NO: 661354 - RNA, 22 nt, Human
uacugcugagcuggguagaagg

SEQ ID NO: 661355 - RNA, 22 nt, Human
ugccugggggacuaaggccaaa

SEQ ID NO: 661356 - RNA, 22 nt, Human
gagcggaggcuuggaggccagc

SEQ ID NO: 661357 - RNA, 22 nt, Human
agcagagcgccugcucagaggg

SEQ ID NO: 661358 - RNA, 22 nt, Human
auggcuuccucuggauuggauu

SEQ ID NO: 661359 - RNA, 22 nt, Human
uguauuugggucacaagauggg

SEQ ID NO: 661360 - RNA, 22 nt, Human
guuacaguggguuuggggccca

SEQ ID NO: 661361 - RNA, 22 nt, Human
uugcagcaugcauagacacugc

SEQ ID NO: 661362 - RNA, 22 nt, Human
accuucaccuccacaccuuggg

SEQ ID NO: 661363 - RNA, 22 nt, Human
acagugcagggugggaagaagg

SEQ ID NO: 661364 - RNA, 22 nt, Human
uugcagagugguugugaggauu

SEQ ID NO: 661365 - RNA, 22 nt, Human
guauauuuugaucacccucuau

SEQ ID NO: 661366 - RNA, 22 nt, Human
gggcagaggcucuggcccaucc

SEQ ID NO: 661367 - RNA, 22 nt, Human
gagagcugggggacuguggaug

SEQ ID NO: 661368 - RNA, 22 nt, Human
gccaccagcagaaaaggggcca

SEQ ID NO: 661369 - RNA, 22 nt, Human
cuguacaaauggcaguugaguu

SEQ ID NO: 661370 - RNA, 22 nt, Human
ggaccaggcugagcaccugccu

SEQ ID NO: 661371 - RNA, 22 nt, Human
cugcgugucuccuuggggcaga

SEQ ID NO: 661372 - RNA, 22 nt, Human
ggcuagggagacagagggcaug

SEQ ID NO: 661373 - RNA, 22 nt, Human
ccauggcagccaugggagccac

SEQ ID NO: 661374 - RNA, 22 nt, Human
uuuccuuugcccaauacauguc

SEQ ID NO: 661375 - RNA, 22 nt, Human
gcccagggugcuuagaacccau

SEQ ID NO: 661376 - RNA, 22 nt, Human
cuacagaagccguggucaggaa

SEQ ID NO: 661377 - RNA, 22 nt, Human
auuagggaaggauuuggccuga

SEQ ID NO: 661378 - RNA, 22 nt, Human
augaaaugugaaugcuuuucau

SEQ ID NO: 661379 - RNA, 22 nt, Human
uaaagucaucuuuaaacaugcc

SEQ ID NO: 661380 - RNA, 22 nt, Human
gucuguggcaggggagaaguuu

SEQ ID NO: 661381 - RNA, 22 nt, Human
ugcaggagcaccagcucacccu

SEQ ID NO: 661382 - RNA, 16 nt, Human
gagcagccugggccuu

SEQ ID NO: 661383 - RNA, 22 nt, Human
ggaagcuguugugagugcagca

SEQ ID NO: 661384 - RNA, 22 nt, Human
agacacuggugaagaaaucagg

SEQ ID NO: 661385 - RNA, 22 nt, Human
gggcuccacgcacgcgagaggu

SEQ ID NO: 661386 - RNA, 19 nt, Human
aagcaucuuugaaacuggg

SEQ ID NO: 661387 - RNA, 20 nt, Human
ccucugccuuucuagucuga

SEQ ID NO: 661388 - RNA, 22 nt, Human
uuucacauucuucugaaucuac

SEQ ID NO: 661389 - RNA, 22 nt, Human
ccuggagcacucucccuggcug

SEQ ID NO: 661390 - RNA, 22 nt, Human
agcuggucugcugcauggagug

SEQ ID NO: 661391 - RNA, 22 nt, Human
gggguccuggaggccagcugga

SEQ ID NO: 661392 - RNA, 22 nt, Human
gcugugucagaaacucugggga

SEQ ID NO: 661393 - RNA, 22 nt, Human
cuguuggacuuuucaaggucug

SEQ ID NO: 661394 - RNA, 21 nt, Human
cagaggucauccugaggacaa

SEQ ID NO: 661395 - RNA, 22 nt, Human
cugggccaugggccagcgaggc

SEQ ID NO: 661396 - RNA, 22 nt, Human
uaggcagggauuaggguugauu

SEQ ID NO: 661397 - RNA, 22 nt, Human
gccaggcugguuauuuaaugag

SEQ ID NO: 661398 - RNA, 22 nt, Human
ccuuagcaacugucauagagca

SEQ ID NO: 661399 - RNA, 22 nt, Human
ugggccugaaggagcugcgccc

SEQ ID NO: 661400 - RNA, 22 nt, Human
cuggcucauccagguguugcuc

SEQ ID NO: 661401 - RNA, 22 nt, Human
agcuggcugggugccagucucc

SEQ ID NO: 661402 - RNA, 22 nt, Human
cacucaggguacaauggagggc

SEQ ID NO: 661403 - RNA, 22 nt, Human
cuguggcuuuuccggggagccu

SEQ ID NO: 661404 - RNA, 23 nt, Human
uugggcucaguggcaggaagagu

SEQ ID NO: 661405 - RNA, 19 nt, Human
acauggcaucccaggaggu

SEQ ID NO: 661406 - RNA, 22 nt, Human
auaaggcagaaaugauucuagu

SEQ ID NO: 661407 - RNA, 22 nt, Human
ucauugcucuagguuccuugga

SEQ ID NO: 661408 - RNA, 22 nt, Human
auacauguuugcuggauaaaca

SEQ ID NO: 661409 - RNA, 22 nt, Human
ggcaaaaaccgcaauaacuucu

SEQ ID NO: 661410 - RNA, 22 nt, Human
ugugaggaguaggcugagggug

SEQ ID NO: 661411 - RNA, 22 nt, Human
uagggcugcuuuguauucugcu

SEQ ID NO: 661412 - RNA, 22 nt, Human
uuuagcagugaagugaagugaa

SEQ ID NO: 661413 - RNA, 22 nt, Human
cagggcuugguuggaaccaccc

SEQ ID NO: 661414 - RNA, 22 nt, Human
gcugcagcaagcccuccagggg

SEQ ID NO: 661415 - RNA, 22 nt, Human
cugagucauugcagauguggag

SEQ ID NO: 661416 - RNA, 19 nt, Human
acagccuguugguggggcu

SEQ ID NO: 661417 - RNA, 18 nt, Human
ccugaggugggaggaagg

SEQ ID NO: 661418 - RNA, 22 nt, Human
cuagcuucaaguccuggcugug

SEQ ID NO: 661419 - RNA, 17 nt, Human
aucucucuaaggcaggc

SEQ ID NO: 661420 - RNA, 22 nt, Human
cucuuuggauagaauuacaaag

SEQ ID NO: 661421 - RNA, 22 nt, Human
uucaggaagccuuucuuggucu

SEQ ID NO: 661422 - RNA, 22 nt, Human
aagacucaaggaacaacacagu

SEQ ID NO: 661423 - RNA, 22 nt, Human
ggucugaaaauggugaccacca

SEQ ID NO: 661424 - RNA, 22 nt, Human
aguuuucauuaccaugcugcaa

SEQ ID NO: 661425 - RNA, 22 nt, Human
ggcucuggcaaggggaggcuac

SEQ ID NO: 661426 - RNA, 19 nt, Human
ucaggcaguuauucacaaa

SEQ ID NO: 661427 - RNA, 22 nt, Human
uggagacugugcuaagggaguu

SEQ ID NO: 661428 - RNA, 22 nt, Human
aggcuggugucucuguccuguc

SEQ ID NO: 661429 - RNA, 22 nt, Human
cuucacagaugcugagagggcu

SEQ ID NO: 661430 - RNA, 22 nt, Human
cuuggagaccagugacauugcu

SEQ ID NO: 661431 - RNA, 22 nt, Human
aaguaugacauuuaagacaauu

SEQ ID NO: 661432 - RNA, 22 nt, Human
cucccucuguccgaggccggcu

SEQ ID NO: 661433 - RNA, 22 nt, Human
uucugcauugacuuuuauuucc

SEQ ID NO: 661434 - RNA, 22 nt, Human
ucacaggcucuagggauuaaga

SEQ ID NO: 661435 - RNA, 22 nt, Human
agcagggcuuugcagacuuggg

SEQ ID NO: 661436 - RNA, 22 nt, Human
gcucuggcucaaaccaccggcu

SEQ ID NO: 661437 - RNA, 22 nt, Human
ucauuugugugagugauuugac

SEQ ID NO: 661438 - RNA, 22 nt, Human
auccccacugcugcugguguag

SEQ ID NO: 661439 - RNA, 22 nt, Human
cuggcaccaggcaugcugggag

SEQ ID NO: 661440 - RNA, 22 nt, Human
caguggcaaugggacagagcac

SEQ ID NO: 661441 - RNA, 22 nt, Human
aggaaccagagguugagcaacu

SEQ ID NO: 661442 - RNA, 22 nt, Human
aagucagaaauuauucaggaau

SEQ ID NO: 661443 - RNA, 22 nt, Human
uggaauagaggugcugauauua

SEQ ID NO: 661444 - RNA, 22 nt, Human
acagugugacaauugugucaga

SEQ ID NO: 661445 - RNA, 20 nt, Human
uggggucuaguuggccuggg

SEQ ID NO: 661446 - RNA, 22 nt, Human
agaaaagaggcuuucuaagcau

SEQ ID NO: 661447 - RNA, 22 nt, Human
uuuguuaaaaugcagauucugu

SEQ ID NO: 661448 - RNA, 22 nt, Human
uuccauaacugaccgaaugcau

SEQ ID NO: 661449 - RNA, 22 nt, Human
cugaacucuuuaugacagcuug

SEQ ID NO: 661450 - RNA, 22 nt, Human
acagaauagucagcuguaggcc

SEQ ID NO: 661451 - RNA, 22 nt, Human
cuugggaggagaacaaagcucc

SEQ ID NO: 661452 - RNA, 22 nt, Human
gccuuccuuuuaccaccagcca

SEQ ID NO: 661453 - RNA, 22 nt, Human
ugggccaccugcucuguuucua

SEQ ID NO: 661454 - RNA, 22 nt, Human
auggaaauguuaagucaguccg

SEQ ID NO: 661455 - RNA, 22 nt, Human
uuugaaaacuuaauuuggucgu

SEQ ID NO: 661456 - RNA, 22 nt, Human
cugaggggauaaagguuugggu

SEQ ID NO: 661457 - RNA, 22 nt, Human
ucccagccacaguuuccaccug

SEQ ID NO: 661458 - RNA, 22 nt, Human
agagucaguuaugucaagugcu

SEQ ID NO: 661459 - RNA, 22 nt, Human
gcugccuucccaggccuuugcu

SEQ ID NO: 661460 - RNA, 23 nt, Human
acugugggcaccacagagagugu

SEQ ID NO: 661461 - RNA, 22 nt, Human
guggaacagccugugcaaaccu

SEQ ID NO: 661462 - RNA, 22 nt, Human
ggaggagacccugugucaguuu

SEQ ID NO: 661463 - RNA, 22 nt, Human
uucccuggcaugaguguaagau

SEQ ID NO: 661464 - RNA, 22 nt, Human
uuauaaagguuugugcauauuu

SEQ ID NO: 661465 - RNA, 22 nt, Human
gcucccugguauugcugccacu

SEQ ID NO: 661466 - RNA, 22 nt, Human
uggggacugacagccaggccuc

SEQ ID NO: 661467 - RNA, 22 nt, Human
cucucuccuuagcugcagacca

SEQ ID NO: 661468 - RNA, 22 nt, Human
uaagcauaacuaaaaaugauuu

SEQ ID NO: 661469 - RNA, 22 nt, Human
gguggcagcauggucccagugu

SEQ ID NO: 661470 - RNA, 22 nt, Human
acagcacaggaguugaaugggc

SEQ ID NO: 661471 - RNA, 22 nt, Human
agucacugaauaccuuaauguu

SEQ ID NO: 661472 - RNA, 22 nt, Human
cugcagaccucugagguccaug

SEQ ID NO: 661473 - RNA, 22 nt, Human
ugagguaauguguacguuaauu

SEQ ID NO: 661474 - RNA, 22 nt, Human
caggggcucugagauugucuaa

SEQ ID NO: 661475 - RNA, 22 nt, Human
ugcuggcaucuuaauguucugu

SEQ ID NO: 661476 - RNA, 22 nt, Human
gacccaggaagcuacuucuggu

SEQ ID NO: 661477 - RNA, 22 nt, Human
agccagcucccuccccugcagg

SEQ ID NO: 661478 - RNA, 22 nt, Human
cagagcacacaugcauagagug

SEQ ID NO: 661479 - RNA, 22 nt, Human
ggagcucaguggggggacugug

SEQ ID NO: 661480 - RNA, 22 nt, Human
auggccaguuagaaaucaaaaa

SEQ ID NO: 661481 - RNA, 22 nt, Human
agcugggcuggagcuccaagcg

SEQ ID NO: 661482 - RNA, 22 nt, Human
uuugugaacacugcgcagaacu

SEQ ID NO: 661483 - RNA, 22 nt, Human
aacauucuuuagcucuuccugc

SEQ ID NO: 661484 - RNA, 22 nt, Human
uuauacacugcagaaccagcau

SEQ ID NO: 661485 - RNA, 22 nt, Human
ucaguuuugauuccugguucuc

SEQ ID NO: 661486 - RNA, 22 nt, Human
gcugggaagagaugcacaugau

SEQ ID NO: 661487 - RNA, 22 nt, Human
acacacuugcagagaggaggga

SEQ ID NO: 661488 - RNA, 22 nt, Human
auaugagaguaaaugccgaucu

SEQ ID NO: 661489 - RNA, 17 nt, Human
uccaugagacaugaaga

SEQ ID NO: 661490 - RNA, 20 nt, Human
acaaagacuggaaaagcaag

SEQ ID NO: 661491 - RNA, 22 nt, Human
gaggaggaguauauauuagaau

SEQ ID NO: 661492 - RNA, 19 nt, Human
ugugggcaagggauggcag

SEQ ID NO: 661493 - RNA, 22 nt, Human
cucuccaggagagcacuuugag

SEQ ID NO: 661494 - RNA, 22 nt, Human
aaacaccagcacuguuuacaaa

SEQ ID NO: 661495 - RNA, 19 nt, Human
cagaggccagaagcacagg

SEQ ID NO: 661496 - RNA, 22 nt, Human
cauggcuugcuaguggcccaag

SEQ ID NO: 661497 - RNA, 22 nt, Human
ggcacacagcggaauuugcucu

SEQ ID NO: 661498 - RNA, 22 nt, Human
uuuagagaggcucuguaaaaug

SEQ ID NO: 661499 - RNA, 22 nt, Human
ugaggcaggaguuaaugugcuc

SEQ ID NO: 661500 - RNA, 22 nt, Human
ccaaggcaacguuggugucagg

SEQ ID NO: 661501 - RNA, 22 nt, Human
aagcaucuguaaagacccuuau

SEQ ID NO: 661502 - RNA, 20 nt, Human
cuucuucagccuaugcuuca

SEQ ID NO: 661503 - RNA, 22 nt, Human
agaggguugaaccuauaaacua

SEQ ID NO: 661504 - RNA, 21 nt, Human
cacacagcugcccuuagguag

SEQ ID NO: 661505 - RNA, 22 nt, Human
ggagucugucaccuguuucucu

SEQ ID NO: 661506 - RNA, 22 nt, Human
aagccaguggcuucucccugcu

SEQ ID NO: 661507 - RNA, 22 nt, Human
ucagcagggcugugguguggcu

SEQ ID NO: 661508 - RNA, 22 nt, Human
uuccaguuggagccugccuuua

SEQ ID NO: 661509 - RNA, 22 nt, Human
aaagcaugauuagauagaugau

SEQ ID NO: 661510 - RNA, 22 nt, Human
acacuguuccugaaauuguuau

SEQ ID NO: 661511 - RNA, 22 nt, Human
agucaauuaucucuaggucauc

SEQ ID NO: 661512 - RNA, 22 nt, Human
cucuucuugaaagaggaauuca

SEQ ID NO: 661513 - RNA, 20 nt, Human
uaggugagggcagauagagg

SEQ ID NO: 661514 - RNA, 22 nt, Human
gugugcaggugucagugcagcu

SEQ ID NO: 661515 - RNA, 22 nt, Human
aagaggccuuggucugaccuga

SEQ ID NO: 661516 - RNA, 22 nt, Human
auuccauuguguaaggauaucg

SEQ ID NO: 661517 - RNA, 22 nt, Human
gccagcugcucgcguaggguag

SEQ ID NO: 661518 - RNA, 22 nt, Human
gcucuggaagcaucugagagga

SEQ ID NO: 661519 - RNA, 22 nt, Human
acugugcuuucucuggaggcau

SEQ ID NO: 661520 - RNA, 22 nt, Human
aaacuaaaccuggcuuaguaag

SEQ ID NO: 661521 - RNA, 22 nt, Human
ugucauguuucauguuuguagg

SEQ ID NO: 661522 - RNA, 22 nt, Human
cacagggcagugauuguccaca

SEQ ID NO: 661523 - RNA, 22 nt, Human
aucucuggccuuccuuuuccaa

SEQ ID NO: 661524 - RNA, 22 nt, Human
cagagcuucugacagcugcugc

SEQ ID NO: 661525 - RNA, 22 nt, Human
agaacagucguggugagagaaa

SEQ ID NO: 661526 - RNA, 22 nt, Human
ccaggcacaggugggccucaga

SEQ ID NO: 661527 - RNA, 22 nt, Human
uaaaguucagugcaugaaugug

SEQ ID NO: 661528 - RNA, 17 nt, Human
caggucugaggccaggc

SEQ ID NO: 661529 - RNA, 22 nt, Human
aagcagcugcagguucaaagga

SEQ ID NO: 661530 - RNA, 22 nt, Human
ccuucccaggcuagaccaacau

SEQ ID NO: 661531 - RNA, 22 nt, Human
uuaacugugacaguuucucaga

SEQ ID NO: 661532 - RNA, 22 nt, Human
ggcuucaaauggagcaaccaga

SEQ ID NO: 661533 - RNA, 22 nt, Human
uaucuauaaguacuaacauggu

SEQ ID NO: 661534 - RNA, 19 nt, Human
uguggcugagcacuccuua

SEQ ID NO: 661535 - RNA, 22 nt, Human
uagaggaaccaggcaggcugag

SEQ ID NO: 661536 - RNA, 23 nt, Human
aguggcuggacagacuuuccugg

SEQ ID NO: 661537 - RNA, 21 nt, Human
cagggcaaccaaguccagaga

SEQ ID NO: 661538 - RNA, 22 nt, Human
cugagaggcggagguugcagug

SEQ ID NO: 661539 - RNA, 22 nt, Human
agcaagcuaccuagauagucua

SEQ ID NO: 661540 - RNA, 22 nt, Human
gugccucucauuggcugagccc

SEQ ID NO: 661541 - RNA, 22 nt, Human
acucugcuaaauguaaguuggu

SEQ ID NO: 661542 - RNA, 22 nt, Human
acuccacaccacgggggccgcc

SEQ ID NO: 661543 - RNA, 22 nt, Human
ugguuggauggcucuuguggcu

SEQ ID NO: 661544 - RNA, 22 nt, Human
uccagaaaugcaagccaggugu

SEQ ID NO: 661545 - RNA, 22 nt, Human
agggggugaaugucugucuaca

SEQ ID NO: 661546 - RNA, 22 nt, Human
caucaauaggguuugaaagcaa

SEQ ID NO: 661547 - RNA, 22 nt, Human
uagaauaaguugaugauauaug

SEQ ID NO: 661548 - RNA, 22 nt, Human
acaggggcaagggcucacggcc

SEQ ID NO: 661549 - RNA, 22 nt, Human
ugggccaguagcuacucgcaag

SEQ ID NO: 661550 - RNA, 22 nt, Human
uuuguucugaaaaucuucccuu

SEQ ID NO: 661551 - RNA, 22 nt, Human
gccugggugcccaaugaugaga

SEQ ID NO: 661552 - RNA, 22 nt, Human
aguauauuuaccauuggguggg

SEQ ID NO: 661553 - RNA, 18 nt, Human
ggcaggauuucaacuuuc

SEQ ID NO: 661554 - RNA, 22 nt, Human
ccuggcacugaccaggcacuga

SEQ ID NO: 661555 - RNA, 22 nt, Human
ugagcccaggaguuggaggcug

SEQ ID NO: 661556 - RNA, 22 nt, Human
agugaaaucagguuuugacugc

SEQ ID NO: 661557 - RNA, 22 nt, Human
aaauuauuuucagaauggagaa

SEQ ID NO: 661558 - RNA, 22 nt, Human
ggagcugagacccaguggcuga

SEQ ID NO: 661559 - RNA, 22 nt, Human
auacacacauaugugaguuuug

SEQ ID NO: 661560 - RNA, 22 nt, Human
ugcccucaagcaacagagagga

SEQ ID NO: 661561 - RNA, 22 nt, Human
agccaccaccacugaaagguua

SEQ ID NO: 661562 - RNA, 22 nt, Human
ucccagccuggacccugccagu

SEQ ID NO: 661563 - RNA, 22 nt, Human
ugcagugguguccagguguacu

SEQ ID NO: 661564 - RNA, 17 nt, Human
acugucuuuuacacccu

SEQ ID NO: 661565 - RNA, 22 nt, Human
ugcaggugugggcaggggagca

SEQ ID NO: 661566 - RNA, 22 nt, Human
ucagggccaucuuuugccucaa

SEQ ID NO: 661567 - RNA, 22 nt, Human
gcuacaguagauaaggacgguc

SEQ ID NO: 661568 - RNA, 22 nt, Human
uaugcuuugguagagaguugug

SEQ ID NO: 661569 - RNA, 22 nt, Human
cacuguuauuacuacuauacau

SEQ ID NO: 661570 - RNA, 22 nt, Human
aagcagaggccacagagugggc

SEQ ID NO: 661571 - RNA, 22 nt, Human
agugcccggacaacuggacaga

SEQ ID NO: 661572 - RNA, 17 nt, Human
cuucuagaaggcaaacu

SEQ ID NO: 661573 - RNA, 22 nt, Human
ucagugcagggugggagagaga

SEQ ID NO: 661574 - RNA, 22 nt, Human
uauaucaccaaaaacaguucug

SEQ ID NO: 661575 - RNA, 22 nt, Human
agcugcuguuucuugcacguau

SEQ ID NO: 661576 - RNA, 22 nt, Human
agguagcuggugcugggcuccu

SEQ ID NO: 661577 - RNA, 22 nt, Human
aggccagguggucaugcuugcu

SEQ ID NO: 661578 - RNA, 22 nt, Human
cugggacccccacugcguagcu

SEQ ID NO: 661579 - RNA, 22 nt, Human
augcccugcaucaagugacacu

SEQ ID NO: 661580 - RNA, 22 nt, Human
cacagucccauucgagaguaau

SEQ ID NO: 661581 - RNA, 22 nt, Human
gccugggacccuuagcucuugg

SEQ ID NO: 661582 - RNA, 22 nt, Human
uggugguuaugcgcuuuguggg

SEQ ID NO: 661583 - RNA, 22 nt, Human
aagccagggucaggggccuccu

SEQ ID NO: 661584 - RNA, 22 nt, Human
gcugaggcucaagucauggguc

SEQ ID NO: 661585 - RNA, 21 nt, Human
gcugucuccuccuugcaccag

SEQ ID NO: 661586 - RNA, 22 nt, Human
aggagaggcucuaacucugugu

SEQ ID NO: 661587 - RNA, 22 nt, Human
auaacuucaguuucuguguccu

SEQ ID NO: 661588 - RNA, 22 nt, Human
gcagaaggucuggcacuucagg

SEQ ID NO: 661589 - RNA, 22 nt, Human
aggcucagccccugggaggaga

SEQ ID NO: 661590 - RNA, 22 nt, Human
uaugagaagguauggugacuug

SEQ ID NO: 661591 - RNA, 22 nt, Human
uucagugcuuacagguuucuuu

SEQ ID NO: 661592 - RNA, 22 nt, Human
ucacauacacuaggauauuuuu

SEQ ID NO: 661593 - RNA, 22 nt, Human
auccacagucagaacgggccua

SEQ ID NO: 661594 - RNA, 22 nt, Human
agaggccacuuugccugugaug

SEQ ID NO: 661595 - RNA, 23 nt, Human
auugaugacuugauuacacuuuu

SEQ ID NO: 661596 - RNA, 22 nt, Human
cugauggagacuccacugugau

SEQ ID NO: 661597 - RNA, 22 nt, Human
uuauucuguuugccgaccagua

SEQ ID NO: 661598 - RNA, 22 nt, Human
ucacauuucugauuauaccaaa

SEQ ID NO: 661599 - RNA, 22 nt, Human
cagcuuauucaguaagcacaua

SEQ ID NO: 661600 - RNA, 22 nt, Human
auuugcuucugugaaaucaagu

SEQ ID NO: 661601 - RNA, 21 nt, Human
gccugggauaguggccuccgg

SEQ ID NO: 661602 - RNA, 22 nt, Human
ggcuugaagacuaugacauuuc

SEQ ID NO: 661603 - RNA, 22 nt, Human
gcagcugcaggcaggcuugcug

SEQ ID NO: 661604 - RNA, 20 nt, Human
gaaauucucguauuaguuua

SEQ ID NO: 661605 - RNA, 22 nt, Human
uuuguguuuaugaaguuauucu

SEQ ID NO: 661606 - RNA, 22 nt, Human
uucuacagguacugaaguacau

SEQ ID NO: 661607 - RNA, 19 nt, Human
uagaaagccagaaaacaga

SEQ ID NO: 661608 - RNA, 22 nt, Human
ccucccugcgcuccugcggcgg

SEQ ID NO: 661609 - RNA, 22 nt, Human
gccaccucucucuugacucgag

SEQ ID NO: 661610 - RNA, 22 nt, Human
ccucagagacugcaucuucccu

SEQ ID NO: 661611 - RNA, 22 nt, Human
agaggcucuugcccuucccaca

SEQ ID NO: 661612 - RNA, 23 nt, Human
aucaagauaauccagaugaccua

SEQ ID NO: 661613 - RNA, 22 nt, Human
aaagugcagcugaaaacauccu

SEQ ID NO: 661614 - RNA, 22 nt, Human
acuuacaaguucccuuucucag

SEQ ID NO: 661615 - RNA, 22 nt, Human
uagagcuggaauuugcagcaag

SEQ ID NO: 661616 - RNA, 22 nt, Human
uacaagaaggaaaacuagcaau

SEQ ID NO: 661617 - RNA, 22 nt, Human
uggcagcagacaaaaggccauu

SEQ ID NO: 661618 - RNA, 22 nt, Human
uuauuuguaaggcagggccagu

SEQ ID NO: 661619 - RNA, 22 nt, Human
ugugguagagggcagaugggca

SEQ ID NO: 661620 - RNA, 22 nt, Human
aauuuguguuaguccacguuca

SEQ ID NO: 661621 - RNA, 22 nt, Human
aucaggaugacaacugcugggu

SEQ ID NO: 661622 - RNA, 22 nt, Human
uuuggagauggagagagggcau

SEQ ID NO: 661623 - RNA, 22 nt, Human
gcaaaacagucgaugccuccca

SEQ ID NO: 661624 - RNA, 22 nt, Human
aucuuuuaugagcguucugaca

SEQ ID NO: 661625 - RNA, 22 nt, Human
ccuacaguuauauucuugauug

SEQ ID NO: 661626 - RNA, 20 nt, Human
gauucugggcagucaguguc

SEQ ID NO: 661627 - RNA, 16 nt, Human
uggagcaggcaggaug

SEQ ID NO: 661628 - RNA, 22 nt, Human
ugggucagagcagaccucugga

SEQ ID NO: 661629 - RNA, 19 nt, Human
ggcuuuaacucuuguagcu

SEQ ID NO: 661630 - RNA, 22 nt, Human
aaaauuauucauggcuuuugga

SEQ ID NO: 661631 - RNA, 22 nt, Human
acucuucaccgcuacugaaaua

SEQ ID NO: 661632 - RNA, 22 nt, Human
ucugagcccagugagucucgca

SEQ ID NO: 661633 - RNA, 22 nt, Human
uauggcuuuaaacuuuucauuu

SEQ ID NO: 661634 - RNA, 22 nt, Human
acaugaaaguuauucugaguug

SEQ ID NO: 661635 - RNA, 22 nt, Human
aacagugaguugaugacugaau

SEQ ID NO: 661636 - RNA, 22 nt, Human
gccagagcuugguuuuuauuua

SEQ ID NO: 661637 - RNA, 22 nt, Human
aagacagaccacgugacagggc

SEQ ID NO: 661638 - RNA, 22 nt, Human
cacaugcaggagccaauguaca

SEQ ID NO: 661639 - RNA, 18 nt, Human
gaaaauacucugggcuca

SEQ ID NO: 661640 - RNA, 22 nt, Human
ccaucagcuccaguaucuucug

SEQ ID NO: 661641 - RNA, 22 nt, Human
ccagcuuucugggugguuucug

SEQ ID NO: 661642 - RNA, 22 nt, Human
uuccuggggggauagauuucac

SEQ ID NO: 661643 - RNA, 22 nt, Human
agggcucuguccccagaggccc

SEQ ID NO: 661644 - RNA, 22 nt, Human
gaucuuuucagguuucucuagu

SEQ ID NO: 661645 - RNA, 19 nt, Human
uagaagcacuaggcaaacu

SEQ ID NO: 661646 - RNA, 22 nt, Human
ccaggcuuuuagcugcauggca

SEQ ID NO: 661647 - RNA, 22 nt, Human
uaagaugagguagguaagacuu

SEQ ID NO: 661648 - RNA, 22 nt, Human
ugguccugaggcuuguuuccac

SEQ ID NO: 661649 - RNA, 16 nt, Human
uugcaaggcguuuaua

SEQ ID NO: 661650 - RNA, 19 nt, Human
gccucugagggcaggacac

SEQ ID NO: 661651 - RNA, 22 nt, Human
ugcuucugggccugguguuccc

SEQ ID NO: 661652 - RNA, 21 nt, Human
cugggcucaagcaauccuuuc

SEQ ID NO: 661653 - RNA, 22 nt, Human
uucacaauaggagcaugcaaau

SEQ ID NO: 661654 - RNA, 22 nt, Human
aggcuguggcauuaaacguuug

SEQ ID NO: 661655 - RNA, 22 nt, Human
gaaaaggccacuccuaggagcu

SEQ ID NO: 661656 - RNA, 22 nt, Human
caaggccuaaucauacugcuaa

SEQ ID NO: 661657 - RNA, 22 nt, Human
agauggcuccaguguccagagg

SEQ ID NO: 661658 - RNA, 22 nt, Human
ucuuggagaauggcagagaagc

SEQ ID NO: 661659 - RNA, 19 nt, Human
uagcuucacguggucuaga

SEQ ID NO: 661660 - RNA, 22 nt, Human
gcaguggggcaaucauagcuca

SEQ ID NO: 661661 - RNA, 22 nt, Human
uaguuucuucaccuguaaaaug

SEQ ID NO: 661662 - RNA, 22 nt, Human
gaaugucccugcaguugcugcc

SEQ ID NO: 661663 - RNA, 22 nt, Human
aggccaguguggcuggagcaca

SEQ ID NO: 661664 - RNA, 22 nt, Human
ccagucagagaaaauguccacu

SEQ ID NO: 661665 - RNA, 22 nt, Human
gggcagggguagcauuccaagu

SEQ ID NO: 661666 - RNA, 22 nt, Human
auugucuucugucuuauaguuc

SEQ ID NO: 661667 - RNA, 22 nt, Human
uuccagagucagccacugggag

SEQ ID NO: 661668 - RNA, 22 nt, Human
gggcuuggaguaggcugaugaa

SEQ ID NO: 661669 - RNA, 22 nt, Human
gucugaaaauaugauuuugccu

SEQ ID NO: 661670 - RNA, 22 nt, Human
ggguccaguuucaucugagguu

SEQ ID NO: 661671 - RNA, 22 nt, Human
ggagagcugguagcuggcucca

SEQ ID NO: 661672 - RNA, 22 nt, Human
ugugagacguguuagaacagug

SEQ ID NO: 661673 - RNA, 22 nt, Human
aaagcaauaguaaugguaauag

SEQ ID NO: 661674 - RNA, 22 nt, Human
aagacaauguuucugauagaua

SEQ ID NO: 661675 - RNA, 22 nt, Human
acaugcaauauugagacuuucu

SEQ ID NO: 661676 - RNA, 22 nt, Human
uccagaccauggauggcugcaa

SEQ ID NO: 661677 - RNA, 22 nt, Human
cauugagaggcugccugccuga

SEQ ID NO: 661678 - RNA, 19 nt, Human
aggcagcaggccagggaug

SEQ ID NO: 661679 - RNA, 22 nt, Human
uuccuuaauaucccuuuuggaa

SEQ ID NO: 661680 - RNA, 22 nt, Human
ucccagagucagagguggggcc

SEQ ID NO: 661681 - RNA, 21 nt, Human
agcugagguaaggcaagagag

SEQ ID NO: 661682 - RNA, 22 nt, Human
ucuguuggagccuaggaugaca

SEQ ID NO: 661683 - RNA, 22 nt, Human
ugccucuuggagccuuuccucu

SEQ ID NO: 661684 - RNA, 22 nt, Human
ggcagugacuguucagacgucc

SEQ ID NO: 661685 - RNA, 22 nt, Human
aaauuagugcaccagguugaag

SEQ ID NO: 661686 - RNA, 22 nt, Human
uguguguguuuauaaaucuaaa

SEQ ID NO: 661687 - RNA, 22 nt, Human
ucuucaugucuugccugauaua

SEQ ID NO: 661688 - RNA, 19 nt, Human
cagaggcacuuucucuuag

SEQ ID NO: 661689 - RNA, 21 nt, Human
guuuuucagcccugaggugag

SEQ ID NO: 661690 - RNA, 22 nt, Human
ggucagaggucccagaagaagc

SEQ ID NO: 661691 - RNA, 22 nt, Human
ccuuggugcucugcugggaugg

SEQ ID NO: 661692 - RNA, 22 nt, Human
auagugugacugaggaguugaa

SEQ ID NO: 661693 - RNA, 22 nt, Human
ugcugcuuuaaaaagugcugau

SEQ ID NO: 661694 - RNA, 22 nt, Human
ucaggguugcugugaucagucc

SEQ ID NO: 661695 - RNA, 22 nt, Human
ucccaagugucuuggaccaggg

SEQ ID NO: 661696 - RNA, 22 nt, Human
uggcucagauuuuuguaggcuu

SEQ ID NO: 661697 - RNA, 22 nt, Human
gccaucucggagcuaucaaagg

SEQ ID NO: 661698 - RNA, 22 nt, Human
ucugugcugucucagagaaagc

SEQ ID NO: 661699 - RNA, 22 nt, Human
uuugaaagggaaauaaacuccu

SEQ ID NO: 661700 - RNA, 22 nt, Human
cuucucugcccauaggaaaugc

SEQ ID NO: 661701 - RNA, 22 nt, Human
cucaaauagaacugaucuauaa

SEQ ID NO: 661702 - RNA, 21 nt, Human
gccaccucaaucuucuagcgc

SEQ ID NO: 661703 - RNA, 22 nt, Human
agaaguuucacaauggguuuua

SEQ ID NO: 661704 - RNA, 22 nt, Human
agccacacagcuuaaugacaga

SEQ ID NO: 661705 - RNA, 22 nt, Human
uuuauuggauauuuacaagaua

SEQ ID NO: 661706 - RNA, 22 nt, Human
aagcagaaagaacaacugagug

SEQ ID NO: 661707 - RNA, 21 nt, Human
gcaaggcaaugccaugauuuc

SEQ ID NO: 661708 - RNA, 22 nt, Human
ucacugcucugaaaguacaggg

SEQ ID NO: 661709 - RNA, 22 nt, Human
uauuccaugccagaguuuauug

SEQ ID NO: 661710 - RNA, 22 nt, Human
uccucagugcuagccaacugcc

SEQ ID NO: 661711 - RNA, 23 nt, Human
uuauuuugucagaagggacuuuu

SEQ ID NO: 661712 - RNA, 22 nt, Human
aaaugcauggcuguuuuaaagc

SEQ ID NO: 661713 - RNA, 22 nt, Human
uagccagugagacccagaaaua

SEQ ID NO: 661714 - RNA, 18 nt, Human
uccuagugaaaugccugu

SEQ ID NO: 661715 - RNA, 22 nt, Human
aaauccuaccaagaaauucccu

SEQ ID NO: 661716 - RNA, 22 nt, Human
uggccucaaucuguccuccagc

SEQ ID NO: 661717 - RNA, 22 nt, Human
cagacaacuggacuaagaucac

SEQ ID NO: 661718 - RNA, 22 nt, Human
uaugcccuuacaaugagcacaa

SEQ ID NO: 661719 - RNA, 22 nt, Human
gagggaggggagcuccacccuc

SEQ ID NO: 661720 - RNA, 22 nt, Human
ugaguggacaccugcuucuuua

SEQ ID NO: 661721 - RNA, 22 nt, Human
gcacagaaguaaaauacaaguc

SEQ ID NO: 661722 - RNA, 22 nt, Human
ugggcacagggguaggaaugag

SEQ ID NO: 661723 - RNA, 23 nt, Human
ucaggauauugugugccaaggug

SEQ ID NO: 661724 - RNA, 22 nt, Human
gcaggugguuaaggucccaugu

SEQ ID NO: 661725 - RNA, 23 nt, Human
acugucugauauguuuuccauca

SEQ ID NO: 661726 - RNA, 22 nt, Human
cagcacccuuuccacugccuug

SEQ ID NO: 661727 - RNA, 22 nt, Human
ugcucuccugcuccucagccca

SEQ ID NO: 661728 - RNA, 22 nt, Human
cacagccuccuucagagagcau

SEQ ID NO: 661729 - RNA, 22 nt, Human
auacagguaauuugaauaauag

SEQ ID NO: 661730 - RNA, 22 nt, Human
cuguggaaggccuguccugaaa

SEQ ID NO: 661731 - RNA, 22 nt, Human
guucuucagaggggaaagaacc

SEQ ID NO: 661732 - RNA, 22 nt, Human
gaugcuuuccaagaaauccuca

SEQ ID NO: 661733 - RNA, 22 nt, Human
ucagggcauggcugcacuuggc

SEQ ID NO: 661734 - RNA, 22 nt, Human
agagccuggagguucugcugaa

SEQ ID NO: 661735 - RNA, 22 nt, Human
ugccugccaugcagaaagcuga

SEQ ID NO: 661736 - RNA, 22 nt, Human
agagugcccaagccuggcaggg

SEQ ID NO: 661737 - RNA, 22 nt, Human
gcuggccagcccucuuccucca

SEQ ID NO: 661738 - RNA, 18 nt, Human
ugcaggcuguugaaacug

SEQ ID NO: 661739 - RNA, 22 nt, Human
ggggacugccuuccacagacac

SEQ ID NO: 661740 - RNA, 23 nt, Human
cagggccaggcagcagcugucac

SEQ ID NO: 661741 - RNA, 22 nt, Human
augcaaaucuuaaguaugugug

SEQ ID NO: 661742 - RNA, 22 nt, Human
gaggguggcuccucccugggcc

SEQ ID NO: 661743 - RNA, 17 nt, Human
uggcaugaggguguggg

SEQ ID NO: 661744 - RNA, 23 nt, Human
uguuaauacaucugccacucauu

SEQ ID NO: 661745 - RNA, 22 nt, Human
aaguauacugaagguauccagg

SEQ ID NO: 661746 - RNA, 22 nt, Human
cuagagaggugguguugggugg

SEQ ID NO: 661747 - RNA, 22 nt, Human
auggacaggaacucccuuggca

SEQ ID NO: 661748 - RNA, 19 nt, Human
cagugcccgacgcaggucu

SEQ ID NO: 661749 - RNA, 22 nt, Human
uucuguacccaacauuuuuacu

SEQ ID NO: 661750 - RNA, 22 nt, Human
aaaaugaagcaaaggcauucag

SEQ ID NO: 661751 - RNA, 22 nt, Human
uguucuaaguguuuuguucaug

SEQ ID NO: 661752 - RNA, 22 nt, Human
gaagcagcuagcccacuaguca

SEQ ID NO: 661753 - RNA, 22 nt, Human
caucuuuaacagaauggauuug

SEQ ID NO: 661754 - RNA, 22 nt, Human
agugggaggaaguggugauauu

SEQ ID NO: 661755 - RNA, 22 nt, Human
gcgagaaacuaagugcccuuug

SEQ ID NO: 661756 - RNA, 18 nt, Human
augcuccuaucucugagc

SEQ ID NO: 661757 - RNA, 22 nt, Human
cccaggagacauauagaaggac

SEQ ID NO: 661758 - RNA, 22 nt, Human
cugccccaggccucgggaggag

SEQ ID NO: 661759 - RNA, 22 nt, Human
cuucuucagcacaauauugaug

SEQ ID NO: 661760 - RNA, 22 nt, Human
aauuuucugguguguaaugaag

SEQ ID NO: 661761 - RNA, 22 nt, Human
gcuggggagcuagaccucagca

SEQ ID NO: 661762 - RNA, 22 nt, Human
agucucugcacaguaagaagca

SEQ ID NO: 661763 - RNA, 22 nt, Human
gggcuguguacuaugaggaggg

SEQ ID NO: 661764 - RNA, 22 nt, Human
uguccccagguccucugccguc

SEQ ID NO: 661765 - RNA, 22 nt, Human
cuucuuugaaaaaggcagucag

SEQ ID NO: 661766 - RNA, 22 nt, Human
gaaauugucagcuucuuucagu

SEQ ID NO: 661767 - RNA, 22 nt, Human
uggcagaguggaccauacucaa

SEQ ID NO: 661768 - RNA, 20 nt, Human
gacaggugcuaaagaggggc

SEQ ID NO: 661769 - RNA, 22 nt, Human
aacugcaauuacuuuugcacca

SEQ ID NO: 661770 - RNA, 22 nt, Human
accugcuagaagcaaaugucug

SEQ ID NO: 661771 - RNA, 22 nt, Human
gcgucucaaggcccccaggcca

SEQ ID NO: 661772 - RNA, 22 nt, Human
acagcaaucugagagacauagu

SEQ ID NO: 661773 - RNA, 22 nt, Human
ucugggaagugagaugcugugu

SEQ ID NO: 661774 - RNA, 21 nt, Human
augucuguucugauuggugcg

SEQ ID NO: 661775 - RNA, 19 nt, Human
caggucuucuuggaggacu

SEQ ID NO: 661776 - RNA, 22 nt, Human
uauuucacauaccacagagugu

SEQ ID NO: 661777 - RNA, 22 nt, Human
aauccauagguuuuuccaagag

SEQ ID NO: 661778 - RNA, 22 nt, Human
ccagcaucagcacccaaggagc

SEQ ID NO: 661779 - RNA, 22 nt, Human
ccugggugacagagugagaccu

SEQ ID NO: 661780 - RNA, 22 nt, Human
uggagaauucuauguugagggg

SEQ ID NO: 661781 - RNA, 22 nt, Human
uagaggguuauuaggacagaag

SEQ ID NO: 661782 - RNA, 22 nt, Human
ugcaggcagcuaaaccauguaa

SEQ ID NO: 661783 - RNA, 22 nt, Human
cugaacaucccgcagugcacga

SEQ ID NO: 661784 - RNA, 22 nt, Human
cuggaagggagcacuguagaga

SEQ ID NO: 661785 - RNA, 22 nt, Human
gggugggccugucuggccaugu

SEQ ID NO: 661786 - RNA, 22 nt, Human
uuuucccagagcuguccucaag

SEQ ID NO: 661787 - RNA, 22 nt, Human
acuguaauuaucugaacgugca

SEQ ID NO: 661788 - RNA, 22 nt, Human
cccuucagugcgugagaaugag

SEQ ID NO: 661789 - RNA, 22 nt, Human
augaaaguggcuugauuaaaug

SEQ ID NO: 661790 - RNA, 22 nt, Human
augcuuggcagaguucuuuuuc

SEQ ID NO: 661791 - RNA, 22 nt, Human
uggggcugucccgguuuggcga

SEQ ID NO: 661792 - RNA, 22 nt, Human
agugguccugcaaacccgugug

SEQ ID NO: 661793 - RNA, 22 nt, Human
ggcacagcacaguggacccagg

SEQ ID NO: 661794 - RNA, 22 nt, Human
acguguguuuaacaaaccugca

SEQ ID NO: 661795 - RNA, 19 nt, Human
gggaucagcccagggcucu

SEQ ID NO: 661796 - RNA, 20 nt, Human
agcauacaucauaagaaacc

SEQ ID NO: 661797 - RNA, 21 nt, Human
cugugggaccaagcacuggga

SEQ ID NO: 661798 - RNA, 22 nt, Human
gagagaauguacaugcuagggg

SEQ ID NO: 661799 - RNA, 19 nt, Human
aggcaaccaaugaggcaaa

SEQ ID NO: 661800 - RNA, 22 nt, Human
cgaaaucagcaucuugaggcaa

SEQ ID NO: 661801 - RNA, 22 nt, Human
ugaaagcaaccuguaacaguga

SEQ ID NO: 661802 - RNA, 22 nt, Human
cacauuaaaauccuaacuucca

SEQ ID NO: 661803 - RNA, 22 nt, Human
ggaggggcuccuguucgccccc

SEQ ID NO: 661804 - RNA, 22 nt, Human
ccucaggcucugggugccuacc

SEQ ID NO: 661805 - RNA, 22 nt, Human
auucugggacuccuuccucccc

SEQ ID NO: 661806 - RNA, 22 nt, Human
ugcuuaaaguguuaacccuguu

SEQ ID NO: 661807 - RNA, 22 nt, Human
gcaggcucacucuguuuggcuc

SEQ ID NO: 661808 - RNA, 22 nt, Human
cuuagaaauuguuacucauuca

SEQ ID NO: 661809 - RNA, 22 nt, Human
gcuguuagucaguggaugcccc

SEQ ID NO: 661810 - RNA, 22 nt, Human
ugcugggggcuuucuggauacc

SEQ ID NO: 661811 - RNA, 22 nt, Human
cacuuuauaaaauuggugugag

SEQ ID NO: 661812 - RNA, 22 nt, Human
ggacccagaggggagucuggca

SEQ ID NO: 661813 - RNA, 22 nt, Human
gucccagaugucuggaacuccc

SEQ ID NO: 661814 - RNA, 21 nt, Human
gccagccuguuuaccuguggu

SEQ ID NO: 661815 - RNA, 22 nt, Human
guagaaaaagcaguaagucuca

SEQ ID NO: 661816 - RNA, 22 nt, Human
cccagcuguggcagaggccggg

SEQ ID NO: 661817 - RNA, 22 nt, Human
aagcauuuuguuuuaagaauga

SEQ ID NO: 661818 - RNA, 22 nt, Human
ccugccccucaaggccuggugc

SEQ ID NO: 661819 - RNA, 22 nt, Human
ugguaaaguguacugaauauga

SEQ ID NO: 661820 - RNA, 22 nt, Human
gaggaaagaaccccagucaaua

SEQ ID NO: 661821 - RNA, 20 nt, Human
cucugcuuuaggagagucag

SEQ ID NO: 661822 - RNA, 22 nt, Human
gcaagcaaaaugggagauuccc

SEQ ID NO: 661823 - RNA, 22 nt, Human
acaggugaccugcucauaugaa

SEQ ID NO: 661824 - RNA, 22 nt, Human
cugggagaauuuguugaaggau

SEQ ID NO: 661825 - RNA, 22 nt, Human
cuggguccccucagugacacug

SEQ ID NO: 661826 - RNA, 22 nt, Human
caagucaacucaaauuguuauc

SEQ ID NO: 661827 - RNA, 22 nt, Human
ucagauuuugcacgagguuuug

SEQ ID NO: 661828 - RNA, 22 nt, Human
agagccccugguggagugagaa

SEQ ID NO: 661829 - RNA, 22 nt, Human
ccugagucccauaauguugcca

SEQ ID NO: 661830 - RNA, 22 nt, Human
uguagaugagucagggugcacc

SEQ ID NO: 661831 - RNA, 22 nt, Human
uccuuuccaugcuucuagaggc

SEQ ID NO: 661832 - RNA, 19 nt, Human
gcuugcuuuaugaaggggg

SEQ ID NO: 661833 - RNA, 17 nt, Human
uuuauaauuggccucuu

SEQ ID NO: 661834 - RNA, 23 nt, Human
ucugugcucgggggagcucucug

SEQ ID NO: 661835 - RNA, 22 nt, Human
cacggguggaaucagggacucc

SEQ ID NO: 661836 - RNA, 22 nt, Human
gaaauacaggaaugccacacag

SEQ ID NO: 661837 - RNA, 22 nt, Human
guuucauaugcaguuaacagca

SEQ ID NO: 661838 - RNA, 22 nt, Human
cuuguagcugacuaucuuguuc

SEQ ID NO: 661839 - RNA, 22 nt, Human
acacuuuagaaaaaagaauggu

SEQ ID NO: 661840 - RNA, 22 nt, Human
ugugccucauguaucuggauga

SEQ ID NO: 661841 - RNA, 22 nt, Human
uggggagacuggccgagauccu

SEQ ID NO: 661842 - RNA, 22 nt, Human
auguggcugguaguugacaacu

SEQ ID NO: 661843 - RNA, 22 nt, Human
aaaugguauuuacucuguauua

SEQ ID NO: 661844 - RNA, 22 nt, Human
auggacagcaacuggaagcuuc

SEQ ID NO: 661845 - RNA, 22 nt, Human
cuagagaaacagugcucugaac

SEQ ID NO: 661846 - RNA, 22 nt, Human
gcaggccagcugugcagauggg

SEQ ID NO: 661847 - RNA, 22 nt, Human
ugugucugcacugaguccucac

SEQ ID NO: 661848 - RNA, 22 nt, Human
gaggaguggguuagugcuuauu

SEQ ID NO: 661849 - RNA, 22 nt, Human
ggcagguacuggggagugaaga

SEQ ID NO: 661850 - RNA, 22 nt, Human
gggcucuuuucugagcuucacu

SEQ ID NO: 661851 - RNA, 22 nt, Human
ucagagugugacuuggucauga

SEQ ID NO: 661852 - RNA, 22 nt, Human
aacuagucagugauucucagaa

SEQ ID NO: 661853 - RNA, 22 nt, Human
gugagaauaccagcagugagaa

SEQ ID NO: 661854 - RNA, 22 nt, Human
ccaggccuggaccaugccaggg

SEQ ID NO: 661855 - RNA, 22 nt, Human
aagauaaugugucugucuuugc

SEQ ID NO: 661856 - RNA, 22 nt, Human
gcugagugagguccagagcuug

SEQ ID NO: 661857 - RNA, 17 nt, Human
agugaaauuuacauugc

SEQ ID NO: 661858 - RNA, 22 nt, Human
cuggcuggccaugcagcgccag

SEQ ID NO: 661859 - RNA, 22 nt, Human
gagcccuggcagucugggaugg

SEQ ID NO: 661860 - RNA, 22 nt, Human
aucauuuuauggcugagaggac

SEQ ID NO: 661861 - RNA, 22 nt, Human
ugagaaaagguugagaugauaa

SEQ ID NO: 661862 - RNA, 22 nt, Human
auauguuucaguauucaaguca

SEQ ID NO: 661863 - RNA, 22 nt, Human
uucaccccaaauucccagugga

SEQ ID NO: 661864 - RNA, 22 nt, Human
uuugauaauuaaaaauuguagu

SEQ ID NO: 661865 - RNA, 23 nt, Human
caggaaaucaauucuuccagcau

SEQ ID NO: 661866 - RNA, 22 nt, Human
acuaguguccuuauauaagagg

SEQ ID NO: 661867 - RNA, 22 nt, Human
ggaggggucucuagcgaggaga

SEQ ID NO: 661868 - RNA, 22 nt, Human
ugguuucucugaacucuacgac

SEQ ID NO: 661869 - RNA, 22 nt, Human
gcucaggauuucauccaugugu

SEQ ID NO: 661870 - RNA, 22 nt, Human
cucugaaagaguuuaguauuau

SEQ ID NO: 661871 - RNA, 22 nt, Human
caagauaagaucauuuacacua

SEQ ID NO: 661872 - RNA, 22 nt, Human
uucuaugaagguaagauguacg

SEQ ID NO: 661873 - RNA, 16 nt, Human
gcaggcagaucacaug

SEQ ID NO: 661874 - RNA, 22 nt, Human
uaggaagcauuuaaagagaugg

SEQ ID NO: 661875 - RNA, 22 nt, Human
agaagcuguugcauuccuggcg

SEQ ID NO: 661876 - RNA, 22 nt, Human
ugcugccagagagacagggacu

SEQ ID NO: 661877 - RNA, 22 nt, Human
gacaggaacauaaauguaggag

SEQ ID NO: 661878 - RNA, 22 nt, Human
agcagcaaaagagaauaguuug

SEQ ID NO: 661879 - RNA, 22 nt, Human
accacaguuuaguccaaugaca

SEQ ID NO: 661880 - RNA, 22 nt, Human
ucugggcuuuaagaacucuguu

SEQ ID NO: 661881 - RNA, 22 nt, Human
uuugcugugggauauccaugug

SEQ ID NO: 661882 - RNA, 22 nt, Human
aguggcggggauuagcaguguu

SEQ ID NO: 661883 - RNA, 22 nt, Human
gucuuuuuuacaccuuacauca

SEQ ID NO: 661884 - RNA, 22 nt, Human
ucagguggcuucggggaguggc

SEQ ID NO: 661885 - RNA, 23 nt, Human
ccuggcucaccccuuauguccag

SEQ ID NO: 661886 - RNA, 22 nt, Human
cccaggcaguagaaagaagagg

SEQ ID NO: 661887 - RNA, 22 nt, Human
cagaggcagaggucaucucugg

SEQ ID NO: 661888 - RNA, 22 nt, Human
gcugaggugucaccuugcuggg

SEQ ID NO: 661889 - RNA, 22 nt, Human
ucccuggcacaagaaggcuguc

SEQ ID NO: 661890 - RNA, 22 nt, Human
gaauagcuguaggcuagugucu

SEQ ID NO: 661891 - RNA, 22 nt, Human
caccagggcucugagcucugaa

SEQ ID NO: 661892 - RNA, 22 nt, Human
uacugacacaaagccaaucccu

SEQ ID NO: 661893 - RNA, 22 nt, Human
acagagagaauuggguuuacag

SEQ ID NO: 661894 - RNA, 22 nt, Human
agaaggccaagaagaagccuau

SEQ ID NO: 661895 - RNA, 22 nt, Human
ugauuaaaauuuaacuuaguua

SEQ ID NO: 661896 - RNA, 22 nt, Human
auaugcuauugcuguaauuuaa

SEQ ID NO: 661897 - RNA, 17 nt, Human
gcacaaaucaauuacua

SEQ ID NO: 661898 - RNA, 22 nt, Human
uuacagauguuucaggaauacu

SEQ ID NO: 661899 - RNA, 19 nt, Human
aggcaggugcagagguccc

SEQ ID NO: 661900 - RNA, 22 nt, Human
aaaagcaucucaaaggagcuuc

SEQ ID NO: 661901 - RNA, 22 nt, Human
uucuucagacuacugaugauug

SEQ ID NO: 661902 - RNA, 22 nt, Human
uacagcacugugcauagugguu

SEQ ID NO: 661903 - RNA, 22 nt, Human
gccuuggcugaugugcgaauga

SEQ ID NO: 661904 - RNA, 22 nt, Human
aauguguauacuggcaauuaag

SEQ ID NO: 661905 - RNA, 22 nt, Human
auacaugacucacacauucugc

SEQ ID NO: 661906 - RNA, 22 nt, Human
uucagcaaauggcuugagauaa

SEQ ID NO: 661907 - RNA, 22 nt, Human
ggcugagcuuauauaugugcug

SEQ ID NO: 661908 - RNA, 22 nt, Human
uccccugcagaugagggcagug

SEQ ID NO: 661909 - RNA, 22 nt, Human
cagcugagaguagaaauggagg

SEQ ID NO: 661910 - RNA, 22 nt, Human
cuguucuggagacacugaugaa

SEQ ID NO: 661911 - RNA, 22 nt, Human
ugauauuuuucacuggccucug

SEQ ID NO: 661912 - RNA, 22 nt, Human
ucaccagaugauuuuucuucag

SEQ ID NO: 661913 - RNA, 22 nt, Human
gggugguggcggaggcuccagg

SEQ ID NO: 661914 - RNA, 22 nt, Human
agaaacugaauuauuucugagg

SEQ ID NO: 661915 - RNA, 22 nt, Human
ucagcuggugccacucagucaa

SEQ ID NO: 661916 - RNA, 22 nt, Human
uuugaaugacaugauucaggca

SEQ ID NO: 661917 - RNA, 22 nt, Human
ugcuguuauacuuagcugguua

SEQ ID NO: 661918 - RNA, 22 nt, Human
uagcacagacagaauggucaua

SEQ ID NO: 661919 - RNA, 20 nt, Human
caguagcaauaauuagaagc

SEQ ID NO: 661920 - RNA, 22 nt, Human
cacagcugaaguagccaugugg

SEQ ID NO: 661921 - RNA, 22 nt, Human
uuacuuuguucucaagauaugu

SEQ ID NO: 661922 - RNA, 20 nt, Human
guauucuguauucugcucag

SEQ ID NO: 661923 - RNA, 20 nt, Human
accugggguugccugugcuc

SEQ ID NO: 661924 - RNA, 22 nt, Human
gcuuccagaucccaugcucuua

SEQ ID NO: 661925 - RNA, 22 nt, Human
ggcagguguuuuuauauuaaag

SEQ ID NO: 661926 - RNA, 22 nt, Human
cugcaucaguggauaugauggu

SEQ ID NO: 661927 - RNA, 22 nt, Human
uucccuaaugucuaacgcuauu

SEQ ID NO: 661928 - RNA, 22 nt, Human
ugcagcaggugacaacgagugg

SEQ ID NO: 661929 - RNA, 22 nt, Human
ugaaagcagcaccaauaccauu

SEQ ID NO: 661930 - RNA, 22 nt, Human
cugagagguaagcagcgcagug

SEQ ID NO: 661931 - RNA, 22 nt, Human
uugaaguucuaagccccaguac

SEQ ID NO: 661932 - RNA, 22 nt, Human
uguagaaagaauauguuucaua

SEQ ID NO: 661933 - RNA, 22 nt, Human
guggggaguguucugugauugg

SEQ ID NO: 661934 - RNA, 22 nt, Human
aggagaaguaaggcuagaugau

SEQ ID NO: 661935 - RNA, 22 nt, Human
acuuuacaagcuuauagccuag

SEQ ID NO: 661936 - RNA, 22 nt, Human
uucucagugaaguuuagaacau

SEQ ID NO: 661937 - RNA, 20 nt, Human
aacacugaggccuacucuuc

SEQ ID NO: 661938 - RNA, 22 nt, Human
ccaggaggaucauccuguuuuc

SEQ ID NO: 661939 - RNA, 22 nt, Human
caaauuccucagaaucagaaaa

SEQ ID NO: 661940 - RNA, 22 nt, Human
uaaccucuauuuuuauaaaagu

SEQ ID NO: 661941 - RNA, 22 nt, Human
uacagagauuuauugcuaaggc

SEQ ID NO: 661942 - RNA, 22 nt, Human
aaacuuuuccugcucuuguccu

SEQ ID NO: 661943 - RNA, 19 nt, Human
ggacaucacucuaagccuu

SEQ ID NO: 661944 - RNA, 22 nt, Human
gggcagguggccucuuguacua

SEQ ID NO: 661945 - RNA, 18 nt, Human
uuuauuccugcccccagc

SEQ ID NO: 661946 - RNA, 18 nt, Human
cuagagaagguuacuaug

SEQ ID NO: 661947 - RNA, 22 nt, Human
cugaguucuaggcugccaccuu

SEQ ID NO: 661948 - RNA, 22 nt, Human
auuguugagugcuucagcugua

SEQ ID NO: 661949 - RNA, 22 nt, Human
uaugggucuggaaaauggcuug

SEQ ID NO: 661950 - RNA, 22 nt, Human
agucucagaaaauaugcuuuuu

SEQ ID NO: 661951 - RNA, 22 nt, Human
gcaacaaguguaaacaugcauu

SEQ ID NO: 661952 - RNA, 22 nt, Human
aauauuuauauuucucuucccu

SEQ ID NO: 661953 - RNA, 22 nt, Human
uaaugucaaggucauucuagag

SEQ ID NO: 661954 - RNA, 19 nt, Human
gcaggcaguggcauucgga

SEQ ID NO: 661955 - RNA, 22 nt, Human
cagauggcugccuucuugcugu

SEQ ID NO: 661956 - RNA, 22 nt, Human
agcagcucuggcacuguagcau

SEQ ID NO: 661957 - RNA, 22 nt, Human
caugcagugacucagacacagg

SEQ ID NO: 661958 - RNA, 17 nt, Human
gaccaggagaaaccagg

SEQ ID NO: 661959 - RNA, 22 nt, Human
gcuuguuucuauuuaucaagua

SEQ ID NO: 661960 - RNA, 22 nt, Human
uucucuucaucucaguaaaugu

SEQ ID NO: 661961 - RNA, 22 nt, Human
ucugguccucucugugaugcua

SEQ ID NO: 661962 - RNA, 22 nt, Human
aaguucuugauaaguccacugu

SEQ ID NO: 661963 - RNA, 22 nt, Human
aaagauugaucaugaauugaca

SEQ ID NO: 661964 - RNA, 22 nt, Human
aggggccauuguucugcccgcu

SEQ ID NO: 661965 - RNA, 20 nt, Human
agugucugggccucaggccc

SEQ ID NO: 661966 - RNA, 22 nt, Human
uuauuuacaacucuucucuucc

SEQ ID NO: 661967 - RNA, 22 nt, Human
uacagugugaauaagcaggcau

SEQ ID NO: 661968 - RNA, 22 nt, Human
caugcuuucuguccaaauguua

SEQ ID NO: 661969 - RNA, 22 nt, Human
ucugagccaauuucugugucca

SEQ ID NO: 661970 - RNA, 22 nt, Human
ugugggacagggacagcaagag

SEQ ID NO: 661971 - RNA, 22 nt, Human
acacucuguaaugucacacucc

SEQ ID NO: 661972 - RNA, 22 nt, Human
aggaagggagcaguuuguuguu

SEQ ID NO: 661973 - RNA, 22 nt, Human
cugaggccagagugggccucuu

SEQ ID NO: 661974 - RNA, 22 nt, Human
agacauuuuacauucuuccauu

SEQ ID NO: 661975 - RNA, 23 nt, Human
ugagagccuggcagccuggguuc

SEQ ID NO: 661976 - RNA, 20 nt, Human
cugcuguguuauuguagaac

SEQ ID NO: 661977 - RNA, 22 nt, Human
cccauuuaaacacaagcuuuca

SEQ ID NO: 661978 - RNA, 22 nt, Human
caggaugcuucuggggccaggc

SEQ ID NO: 661979 - RNA, 22 nt, Human
auguaauuugcccucaaguuaa

SEQ ID NO: 661980 - RNA, 22 nt, Human
ggcuuccuggggccuccugcaa

SEQ ID NO: 661981 - RNA, 22 nt, Human
ccacuggaagaugcugagguca

SEQ ID NO: 661982 - RNA, 18 nt, Human
uggcuggcucugucaucu

SEQ ID NO: 661983 - RNA, 22 nt, Human
ggugugaaauguucaguguuac

SEQ ID NO: 661984 - RNA, 22 nt, Human
aaauucaguuuuaauaaucacu

SEQ ID NO: 661985 - RNA, 22 nt, Human
gcagccugaggcccuuucuggc

SEQ ID NO: 661986 - RNA, 22 nt, Human
caucagaagauggcucuggaaa

SEQ ID NO: 661987 - RNA, 22 nt, Human
agggaugaucaggguagaggcu

SEQ ID NO: 661988 - RNA, 22 nt, Human
cacauuaagaauaaugagacua

SEQ ID NO: 661989 - RNA, 22 nt, Human
agagugggacacgggcgcuguc

SEQ ID NO: 661990 - RNA, 22 nt, Human
uguccugcaagcccuaaugaau

SEQ ID NO: 661991 - RNA, 22 nt, Human
cuggcagauagccacgccuguc

SEQ ID NO: 661992 - RNA, 22 nt, Human
cagaggaagagauacaagcccu

SEQ ID NO: 661993 - RNA, 22 nt, Human
ugggccuggacaucuguauuuu

SEQ ID NO: 661994 - RNA, 22 nt, Human
aaaaucuugacuguuuuuagaa

SEQ ID NO: 661995 - RNA, 22 nt, Human
gcaguguugagccagcuggggg

SEQ ID NO: 661996 - RNA, 22 nt, Human
aaguuauuuuucaagauccuuu

SEQ ID NO: 661997 - RNA, 22 nt, Human
gacagggcugugggaggagcag

SEQ ID NO: 661998 - RNA, 22 nt, Human
aucuagcaguguuauaauugga

SEQ ID NO: 661999 - RNA, 22 nt, Human
ucuauacaaguuucacuuugac

SEQ ID NO: 662000 - RNA, 22 nt, Human
gugggcaggccccaaagcaggg

SEQ ID NO: 662001 - RNA, 22 nt, Human
ccauagugccaagucuucagca

SEQ ID NO: 662002 - RNA, 22 nt, Human
ugggcuagcagggaagagagac

SEQ ID NO: 662003 - RNA, 22 nt, Human
agugucuuugucucucaagcac

SEQ ID NO: 662004 - RNA, 22 nt, Human
agcccuaaauuaucuuuauuuu

SEQ ID NO: 662005 - RNA, 22 nt, Human
ccggcgaccgcugucggaggcg

SEQ ID NO: 662006 - RNA, 22 nt, Human
ggacugggaaucagggagaugc

SEQ ID NO: 662007 - RNA, 22 nt, Human
agugaugugggagaguauagcu

SEQ ID NO: 662008 - RNA, 22 nt, Human
uggucaggcugcucugcggcgu

SEQ ID NO: 662009 - RNA, 22 nt, Human
uuaagacauucagauauuucua

SEQ ID NO: 662010 - RNA, 20 nt, Human
uccaagcccuccuuccauuc

SEQ ID NO: 662011 - RNA, 22 nt, Human
uagaugaauuagcaauuaucuu

SEQ ID NO: 662012 - RNA, 20 nt, Human
uggcuccucuuggcuguggc

SEQ ID NO: 662013 - RNA, 22 nt, Human
ucugcgugaauuugcauugugg

SEQ ID NO: 662014 - RNA, 22 nt, Human
ggcugccaggagaagcucagug

SEQ ID NO: 662015 - RNA, 18 nt, Human
agacaaacuucuucugcc

SEQ ID NO: 662016 - RNA, 23 nt, Human
uuuaaugaccaauagaaggaaca

SEQ ID NO: 662017 - RNA, 22 nt, Human
uccugggcagcgggacgcucag

SEQ ID NO: 662018 - RNA, 22 nt, Human
uugcaaaugugguuagggcuuu

SEQ ID NO: 662019 - RNA, 22 nt, Human
uccagggcagugacuacagcgg

SEQ ID NO: 662020 - RNA, 22 nt, Human
uaccaaguguauuaugcuuugu

SEQ ID NO: 662021 - RNA, 22 nt, Human
cuccaggcccacggccgcggcc

SEQ ID NO: 662022 - RNA, 22 nt, Human
uucugcaugauauuaaauguaa

SEQ ID NO: 662023 - RNA, 22 nt, Human
ucucucacuggugccucuguug

SEQ ID NO: 662024 - RNA, 22 nt, Human
gagucuggaaugaugaagaccu

SEQ ID NO: 662025 - RNA, 22 nt, Human
uaugugcaaaaugcuagacuag

SEQ ID NO: 662026 - RNA, 22 nt, Human
guguggcuugggugaggcgccu

SEQ ID NO: 662027 - RNA, 22 nt, Human
ucaaaugcugccuuugugugcc

SEQ ID NO: 662028 - RNA, 17 nt, Human
cugggauguggacucuu

SEQ ID NO: 662029 - RNA, 22 nt, Human
caggcacaaauuucuagauaag

SEQ ID NO: 662030 - RNA, 22 nt, Human
caaagucauggggaugcagguc

SEQ ID NO: 662031 - RNA, 22 nt, Human
ugcagaagcugcaggucagugg

SEQ ID NO: 662032 - RNA, 22 nt, Human
augcaugugcauggcucuaucu

SEQ ID NO: 662033 - RNA, 22 nt, Human
auggaucuaccuucaggcucug

SEQ ID NO: 662034 - RNA, 22 nt, Human
gaacauucuuggaggaaauaac

SEQ ID NO: 662035 - RNA, 22 nt, Human
cugucugccaauaaucuauggc

SEQ ID NO: 662036 - RNA, 18 nt, Human
augagaggugucagaaga

SEQ ID NO: 662037 - RNA, 22 nt, Human
uagaaauguuagauguauugag

SEQ ID NO: 662038 - RNA, 22 nt, Human
uuacauaacuuuaaaaugccgu

SEQ ID NO: 662039 - RNA, 22 nt, Human
uggcacuggaaucguagccuug

SEQ ID NO: 662040 - RNA, 22 nt, Human
uggggcaagaagugcccugaag

SEQ ID NO: 662041 - RNA, 22 nt, Human
ccuaagauuggugugcacugug

SEQ ID NO: 662042 - RNA, 22 nt, Human
cagaaguaagauuacugugagu

SEQ ID NO: 662043 - RNA, 22 nt, Human
aggcugugcacagggcaccugc

SEQ ID NO: 662044 - RNA, 22 nt, Human
ggaguucacugugcaggcucug

SEQ ID NO: 662045 - RNA, 22 nt, Human
aggcuccuugcucacaggcuca

SEQ ID NO: 662046 - RNA, 22 nt, Human
cuuggaaagguuuuacaaagcg

SEQ ID NO: 662047 - RNA, 22 nt, Human
acagcaguuaacgaucagacuc

SEQ ID NO: 662048 - RNA, 22 nt, Human
agcucugggguggagcccagga

SEQ ID NO: 662049 - RNA, 22 nt, Human
agacucaagcagauaggaauua

SEQ ID NO: 662050 - RNA, 22 nt, Human
gcucugcuggaaguucucugga

SEQ ID NO: 662051 - RNA, 22 nt, Human
ugaauaguucuacuacuugaca

SEQ ID NO: 662052 - RNA, 22 nt, Human
uaaaagacauauaacuguagga

SEQ ID NO: 662053 - RNA, 22 nt, Human
agcuucuuaguucacuuuuaau

SEQ ID NO: 662054 - RNA, 22 nt, Human
ucccaggauguuggcggcaggu

SEQ ID NO: 662055 - RNA, 22 nt, Human
agcugccagcaucccggaaggg

SEQ ID NO: 662056 - RNA, 22 nt, Human
ugccccucuccugugauccaag

SEQ ID NO: 662057 - RNA, 22 nt, Human
augaagacuaaugugaauggga

SEQ ID NO: 662058 - RNA, 22 nt, Human
cuggcuguaacauuuugccaua

SEQ ID NO: 662059 - RNA, 22 nt, Human
agggcuguuuuucaguguguga

SEQ ID NO: 662060 - RNA, 22 nt, Human
guggcaugacagugaaugggca

SEQ ID NO: 662061 - RNA, 22 nt, Human
cagcugcugccucauccacuuu

SEQ ID NO: 662062 - RNA, 22 nt, Human
gccacagcaacaauaaugcagc

SEQ ID NO: 662063 - RNA, 17 nt, Human
ugagcaguagaagaugc

SEQ ID NO: 662064 - RNA, 22 nt, Human
uuuacacuuuccugggaacauc

SEQ ID NO: 662065 - RNA, 22 nt, Human
aacauuucagcaaauaagaaca

SEQ ID NO: 662066 - RNA, 22 nt, Human
uccagcaugacuaguuccccau

SEQ ID NO: 662067 - RNA, 22 nt, Human
ucccagcccagacuucuccagu

SEQ ID NO: 662068 - RNA, 22 nt, Human
caccaggcuggagugcagaggu

SEQ ID NO: 662069 - RNA, 23 nt, Human
aagacuaauucuuaauugcuuag

SEQ ID NO: 662070 - RNA, 22 nt, Human
gggugcaggcagcccaggcagg

SEQ ID NO: 662071 - RNA, 22 nt, Human
acagccagaggagccaggcugg

SEQ ID NO: 662072 - RNA, 22 nt, Human
gccagcagcucuugggcgggca

SEQ ID NO: 662073 - RNA, 22 nt, Human
gacaguuuugcugaaauugagc

SEQ ID NO: 662074 - RNA, 22 nt, Human
gcuggaguuggcaaggcaugua

SEQ ID NO: 662075 - RNA, 22 nt, Human
agaaaguuuguuuuuauccaua

SEQ ID NO: 662076 - RNA, 22 nt, Human
ucagugcuugacagcucuggga

SEQ ID NO: 662077 - RNA, 22 nt, Human
aaagcacuauagccaaauagcc

SEQ ID NO: 662078 - RNA, 19 nt, Human
agucucaguguacagaggc

SEQ ID NO: 662079 - RNA, 22 nt, Human
gaucuguuuuuucuuagacagu

SEQ ID NO: 662080 - RNA, 22 nt, Human
auuacaacuacauaaucucaga

SEQ ID NO: 662081 - RNA, 22 nt, Human
cauggcuuggagcaggaugaga

SEQ ID NO: 662082 - RNA, 22 nt, Human
ccugggccucacccagcucuug

SEQ ID NO: 662083 - RNA, 22 nt, Human
cugacucagcagcugaugaucc

SEQ ID NO: 662084 - RNA, 20 nt, Human
gcaggcccucucucuagucu

SEQ ID NO: 662085 - RNA, 22 nt, Human
ucagagugguagccuauuuucu

SEQ ID NO: 662086 - RNA, 22 nt, Human
uuaacauuucuuuuccacucau

SEQ ID NO: 662087 - RNA, 22 nt, Human
gccaguggcaugcggcagggac

SEQ ID NO: 662088 - RNA, 22 nt, Human
uuuguacagugaaagcgagguu

SEQ ID NO: 662089 - RNA, 22 nt, Human
auagucuuuacugcugaauuga

SEQ ID NO: 662090 - RNA, 22 nt, Human
ccagugcacaauggaacaacuc

SEQ ID NO: 662091 - RNA, 22 nt, Human
ucaacacuuuugucuuuguccc

SEQ ID NO: 662092 - RNA, 18 nt, Human
uuacuacagcacuuucuu

SEQ ID NO: 662093 - RNA, 22 nt, Human
uguuuauaauaugcagugagca

SEQ ID NO: 662094 - RNA, 22 nt, Human
ucaguucuuaguaaugcagucu

SEQ ID NO: 662095 - RNA, 22 nt, Human
cugugcccaggcuggagugcag

SEQ ID NO: 662096 - RNA, 22 nt, Human
cuggcuccaggucaugcacuca

SEQ ID NO: 662097 - RNA, 19 nt, Human
ugucucagugucccuuccu

SEQ ID NO: 662098 - RNA, 19 nt, Human
ugucaggggugugcugugc

SEQ ID NO: 662099 - RNA, 22 nt, Human
uucaauuuugcagaggaaugca

SEQ ID NO: 662100 - RNA, 22 nt, Human
auggccaggguggcacuguggu

SEQ ID NO: 662101 - RNA, 22 nt, Human
ggucuucagcuuugcaugucuu

SEQ ID NO: 662102 - RNA, 22 nt, Human
gaauaauauugacuuugcaggc

SEQ ID NO: 662103 - RNA, 22 nt, Human
agggcuggcuccguuaccuuga

SEQ ID NO: 662104 - RNA, 22 nt, Human
ugggagauauugcuguggcugu

SEQ ID NO: 662105 - RNA, 22 nt, Human
ucuguggcaugguaucuggagg

SEQ ID NO: 662106 - RNA, 22 nt, Human
acugcacacacagaauuuaggg

SEQ ID NO: 662107 - RNA, 22 nt, Human
aaugucugccagaacugaucau

SEQ ID NO: 662108 - RNA, 22 nt, Human
uacuuuuccagggcuggcugag

SEQ ID NO: 662109 - RNA, 22 nt, Human
aagagaaggcccugacccaccc

SEQ ID NO: 662110 - RNA, 22 nt, Human
caaacuuuuccuggaaaagauu

SEQ ID NO: 662111 - RNA, 22 nt, Human
uucuuuucugcagcugguauuu

SEQ ID NO: 662112 - RNA, 22 nt, Human
gaagauuuauaaggaccuuauu

SEQ ID NO: 662113 - RNA, 22 nt, Human
cagcagcugacuccaagagagc

SEQ ID NO: 662114 - RNA, 22 nt, Human
gugaacagauaauagaaaugaa

SEQ ID NO: 662115 - RNA, 22 nt, Human
agggacugagcuaggaucuagu

SEQ ID NO: 662116 - RNA, 22 nt, Human
aaaggauuaaauaaaugugcug

SEQ ID NO: 662117 - RNA, 22 nt, Human
aggcacagagaaguaaaguauc

SEQ ID NO: 662118 - RNA, 19 nt, Human
ucuucugacuucaagaaac

SEQ ID NO: 662119 - RNA, 22 nt, Human
agacagaauuugucagauaaau

SEQ ID NO: 662120 - RNA, 22 nt, Human
aggaggcugguucaggccauau

SEQ ID NO: 662121 - RNA, 22 nt, Human
acucccuuuucccguaaucuau

SEQ ID NO: 662122 - RNA, 22 nt, Human
ugaagacacauacaagggaaug

SEQ ID NO: 662123 - RNA, 22 nt, Human
agccaugggagacugugggaga

SEQ ID NO: 662124 - RNA, 22 nt, Human
ugcugcagcuaaggugaggugc

SEQ ID NO: 662125 - RNA, 19 nt, Human
aucuuacagagcagaguac

SEQ ID NO: 662126 - RNA, 22 nt, Human
cacuacagggguccacagcuga

SEQ ID NO: 662127 - RNA, 22 nt, Human
uuugaaugugugaguuaacuuu

SEQ ID NO: 662128 - RNA, 22 nt, Human
cccaggaggcagagguuggagc

SEQ ID NO: 662129 - RNA, 22 nt, Human
aggaaugauucaagacuuggcu

SEQ ID NO: 662130 - RNA, 17 nt, Human
agcacuugaaaauuucu

SEQ ID NO: 662131 - RNA, 22 nt, Human
uuucuuguuucauggugucuca

SEQ ID NO: 662132 - RNA, 18 nt, Human
caugagcugccccuagac

SEQ ID NO: 662133 - RNA, 22 nt, Human
uggccugguccuugucaaggca

SEQ ID NO: 662134 - RNA, 22 nt, Human
cugugcauuguugaguguuuag

SEQ ID NO: 662135 - RNA, 22 nt, Human
uuuggcagagucauuucagaaa

SEQ ID NO: 662136 - RNA, 22 nt, Human
gccaaggccucugcaggaugag

SEQ ID NO: 662137 - RNA, 22 nt, Human
agggccagcugaugagaaugag

SEQ ID NO: 662138 - RNA, 19 nt, Human
ucaggaguuaguugugcuc

SEQ ID NO: 662139 - RNA, 22 nt, Human
gagagggcaagguagaugcuac

SEQ ID NO: 662140 - RNA, 22 nt, Human
aacaggagaguaaauauaugau

SEQ ID NO: 662141 - RNA, 22 nt, Human
agaaaucucaguaucucaggga

SEQ ID NO: 662142 - RNA, 22 nt, Human
augggaucuugcccugagggcu

SEQ ID NO: 662143 - RNA, 22 nt, Human
ucugagagauacaaggaggcaa

SEQ ID NO: 662144 - RNA, 23 nt, Human
cccaggaguuucacugcaaaggu

SEQ ID NO: 662145 - RNA, 20 nt, Human
uauucaacuuuaaaaacuua

SEQ ID NO: 662146 - RNA, 22 nt, Human
ucugagaaggugcaucagcugc

SEQ ID NO: 662147 - RNA, 22 nt, Human
gucauucaacugcacauuaggu

SEQ ID NO: 662148 - RNA, 19 nt, Human
cagauguuuucaguucauu

SEQ ID NO: 662149 - RNA, 20 nt, Human
ucuuccagcuucugguagaa

SEQ ID NO: 662150 - RNA, 18 nt, Human
cugcccagagcacuugug

SEQ ID NO: 662151 - RNA, 22 nt, Human
caggaaggggcucacucuggcc

SEQ ID NO: 662152 - RNA, 22 nt, Human
aggcccuggccugacucaaugu

SEQ ID NO: 662153 - RNA, 22 nt, Human
uccugcagagucccacugauuu

SEQ ID NO: 662154 - RNA, 22 nt, Human
ggcucugcugcacccuuggcuc

SEQ ID NO: 662155 - RNA, 22 nt, Human
acucccuccaaaucugcacagu

SEQ ID NO: 662156 - RNA, 22 nt, Human
ucacugugguauauauguauca

SEQ ID NO: 662157 - RNA, 22 nt, Human
ccaaaguuuuuauaguuagcau

SEQ ID NO: 662158 - RNA, 22 nt, Human
aggcuaaggagugugaugcuca

SEQ ID NO: 662159 - RNA, 20 nt, Human
agggccuggaguacagcagg

SEQ ID NO: 662160 - RNA, 21 nt, Human
gaaaagcaagggaguagaaca

SEQ ID NO: 662161 - RNA, 22 nt, Human
gcaggaguucaauugcccauga

SEQ ID NO: 662162 - RNA, 22 nt, Human
ucuggagaccugcauuuauauu

SEQ ID NO: 662163 - RNA, 22 nt, Human
agauacaaguuaagagaaagga

SEQ ID NO: 662164 - RNA, 22 nt, Human
accccacagcauacaaaggcac

SEQ ID NO: 662165 - RNA, 22 nt, Human
gugauggguaacuguuuaggga

SEQ ID NO: 662166 - RNA, 22 nt, Human
uggagcuugggacucuugguag

SEQ ID NO: 662167 - RNA, 22 nt, Human
gagcagugacuggagcaugaga

SEQ ID NO: 662168 - RNA, 22 nt, Human
cggcaggaccucauuuccuucu

SEQ ID NO: 662169 - RNA, 22 nt, Human
ucccagcaagaaaggggguggc

SEQ ID NO: 662170 - RNA, 22 nt, Human
ggcagguggcacugcugcuccc

SEQ ID NO: 662171 - RNA, 22 nt, Human
ugaaggccagggauuugcagcc

SEQ ID NO: 662172 - RNA, 21 nt, Human
ucuauaacuauagugacagau

SEQ ID NO: 662173 - RNA, 18 nt, Human
auaaagugcuaauaaugg

SEQ ID NO: 662174 - RNA, 22 nt, Human
acaacauuuaaggaggcacuga

SEQ ID NO: 662175 - RNA, 22 nt, Human
ugcuggaauuuuucuaggauuu

SEQ ID NO: 662176 - RNA, 22 nt, Human
gggcacuggugcugccaucuug

SEQ ID NO: 662177 - RNA, 22 nt, Human
cccacccagcugagccgcucac

SEQ ID NO: 662178 - RNA, 21 nt, Human
gcccccuggacuccucaucca

SEQ ID NO: 662179 - RNA, 22 nt, Human
gccugcagccagggaguucucu

SEQ ID NO: 662180 - RNA, 22 nt, Human
uuuccucuucuggcaggcaggg

SEQ ID NO: 662181 - RNA, 22 nt, Human
uuacaagcagcuacauaucaca

SEQ ID NO: 662182 - RNA, 21 nt, Human
uguuuauggaaaagagacaaa

SEQ ID NO: 662183 - RNA, 22 nt, Human
acucagcuugcacacaucaaug

SEQ ID NO: 662184 - RNA, 22 nt, Human
gggagucugggcuagacuccuu

SEQ ID NO: 662185 - RNA, 22 nt, Human
uucccuccgaaccucagugcug

SEQ ID NO: 662186 - RNA, 22 nt, Human
cugcagcugcucauguuacuug

SEQ ID NO: 662187 - RNA, 19 nt, Human
uaagauggcaagugucucu

SEQ ID NO: 662188 - RNA, 19 nt, Human
gggcauggaugagcuuacc

SEQ ID NO: 662189 - RNA, 22 nt, Human
aaucagaaaggcuaaggaagca

SEQ ID NO: 662190 - RNA, 22 nt, Human
uucuuuuaauguucugaaguuu

SEQ ID NO: 662191 - RNA, 22 nt, Human
uucuuacaaacaagaucauuga

SEQ ID NO: 662192 - RNA, 22 nt, Human
agucucagcuacuugggaggcu

SEQ ID NO: 662193 - RNA, 22 nt, Human
uauuuauauucugccuucugcu

SEQ ID NO: 662194 - RNA, 22 nt, Human
gagauucuaagucguugguuag

SEQ ID NO: 662195 - RNA, 22 nt, Human
cacugagaaagugaccugccaa

SEQ ID NO: 662196 - RNA, 22 nt, Human
cacauucagcucauuaaugguc

SEQ ID NO: 662197 - RNA, 22 nt, Human
cugaauaauguucucuuguaug

SEQ ID NO: 662198 - RNA, 22 nt, Human
uaaucacaucaggguaaauggg

SEQ ID NO: 662199 - RNA, 22 nt, Human
acauucaaaauuagguuaguug

SEQ ID NO: 662200 - RNA, 22 nt, Human
uaugagaaagucguaugucucc

SEQ ID NO: 662201 - RNA, 22 nt, Human
uugcugaauugaauccuuuggu

SEQ ID NO: 662202 - RNA, 22 nt, Human
ugcguugcgcuccugcagcagg

SEQ ID NO: 662203 - RNA, 22 nt, Human
cacuguggugccaaaccuggag

SEQ ID NO: 662204 - RNA, 22 nt, Human
gucaggacucugacccgucccg

SEQ ID NO: 662205 - RNA, 21 nt, Human
cucugcugucuaccagcuguu

SEQ ID NO: 662206 - RNA, 22 nt, Human
caggccagugggaaauagggau

SEQ ID NO: 662207 - RNA, 22 nt, Human
ugagcccaggaguuggagaccg

SEQ ID NO: 662208 - RNA, 22 nt, Human
uagaaacagagcagguggccca

SEQ ID NO: 662209 - RNA, 22 nt, Human
ccagccaguccagcauuggugu

SEQ ID NO: 662210 - RNA, 22 nt, Human
aacuguaaagguugagugguaa

SEQ ID NO: 662211 - RNA, 22 nt, Human
agacagugugaguucagggugg

SEQ ID NO: 662212 - RNA, 22 nt, Human
uuucuaacagcaaauguuuauc

SEQ ID NO: 662213 - RNA, 22 nt, Human
acaucauucagggccucguugg

SEQ ID NO: 662214 - RNA, 22 nt, Human
aggcacagggaugcggagccag

SEQ ID NO: 662215 - RNA, 22 nt, Human
uguacauacauagauauacaca

SEQ ID NO: 662216 - RNA, 22 nt, Human
ccucucucuuguagucccugcc

SEQ ID NO: 662217 - RNA, 22 nt, Human
gcugggagugggcaagaugaga

SEQ ID NO: 662218 - RNA, 20 nt, Human
cugcuugggacacugccaga

SEQ ID NO: 662219 - RNA, 22 nt, Human
agccugagcugccugccgccuc

SEQ ID NO: 662220 - RNA, 22 nt, Human
aaacuuuucuuggggaccugcc

SEQ ID NO: 662221 - RNA, 22 nt, Human
gauuuucauuugcacucuagaa

SEQ ID NO: 662222 - RNA, 22 nt, Human
ggaguagcugcauuccgagcac

SEQ ID NO: 662223 - RNA, 22 nt, Human
uccugcuucuucgagcuucugg

SEQ ID NO: 662224 - RNA, 22 nt, Human
uuucaaagguggaagagugaau

SEQ ID NO: 662225 - RNA, 22 nt, Human
ucuggcucccagccugcucuca

SEQ ID NO: 662226 - RNA, 22 nt, Human
uuguacaaguauuaugugaaca

SEQ ID NO: 662227 - RNA, 22 nt, Human
aaugauuuccccuacacagaag

SEQ ID NO: 662228 - RNA, 22 nt, Human
gccaggcagagccccgugcagc

SEQ ID NO: 662229 - RNA, 22 nt, Human
agggcucagagcaaaagggcac

SEQ ID NO: 662230 - RNA, 22 nt, Human
aauuucaauuacuuuugcacca

SEQ ID NO: 662231 - RNA, 22 nt, Human
gauggcagguaguggucucauc

SEQ ID NO: 662232 - RNA, 22 nt, Human
cacacaucuuaucccaguuauu

SEQ ID NO: 662233 - RNA, 22 nt, Human
ccacaguagcauccaaacagua

SEQ ID NO: 662234 - RNA, 22 nt, Human
uuuauugcugagaaggauucca

SEQ ID NO: 662235 - RNA, 20 nt, Human
auauaggcauaguaaaauga

SEQ ID NO: 662236 - RNA, 22 nt, Human
gaaaguaacauuucuugaauua

SEQ ID NO: 662237 - RNA, 22 nt, Human
gucacacagguugaaaugcagu

SEQ ID NO: 662238 - RNA, 22 nt, Human
caugcucugcagcagaccugug

SEQ ID NO: 662239 - RNA, 22 nt, Human
aguguauggaauuagcucccuu

SEQ ID NO: 662240 - RNA, 22 nt, Human
ggaucaggcgccaugggaagug

SEQ ID NO: 662241 - RNA, 22 nt, Human
uguuuacaaaaccgugguacug

SEQ ID NO: 662242 - RNA, 22 nt, Human
ugucaagugauuagccauaaug

SEQ ID NO: 662243 - RNA, 22 nt, Human
caugaacagcuaacauuuuggg

SEQ ID NO: 662244 - RNA, 22 nt, Human
aucacgugcugagaguguuauu

SEQ ID NO: 662245 - RNA, 22 nt, Human
cuggagcauuuucugcuucugc

SEQ ID NO: 662246 - RNA, 22 nt, Human
gucuggggguccgggugccugc

SEQ ID NO: 662247 - RNA, 22 nt, Human
uacaaaggcagguuucccagga

SEQ ID NO: 662248 - RNA, 22 nt, Human
caucacaaaaugauuauucccu

SEQ ID NO: 662249 - RNA, 22 nt, Human
ugcugggcuugaaagcugcuaa

SEQ ID NO: 662250 - RNA, 22 nt, Human
acaagagugagauuaucaugua

SEQ ID NO: 662251 - RNA, 22 nt, Human
aggugggaacccagcagggccc

SEQ ID NO: 662252 - RNA, 22 nt, Human
gggcucagccccauugaaccag

SEQ ID NO: 662253 - RNA, 22 nt, Human
agcugccuaguagauugauugg

SEQ ID NO: 662254 - RNA, 22 nt, Human
uuggacugguuuacauuucaag

SEQ ID NO: 662255 - RNA, 22 nt, Human
cugggucaguggcaagcugggu

SEQ ID NO: 662256 - RNA, 22 nt, Human
acugaggcgcaguccggcuguc

SEQ ID NO: 662257 - RNA, 22 nt, Human
uccagggcagggugcgcauggg

SEQ ID NO: 662258 - RNA, 22 nt, Human
agggucaaaugggcaggaagag

SEQ ID NO: 662259 - RNA, 22 nt, Human
uaaacuguggaauguucucuuu

SEQ ID NO: 662260 - RNA, 22 nt, Human
aagauguuaaaucuguagaauu

SEQ ID NO: 662261 - RNA, 22 nt, Human
cacuggaaccaagacccagggc

SEQ ID NO: 662262 - RNA, 22 nt, Human
gauggugcaggugaagugcugg

SEQ ID NO: 662263 - RNA, 22 nt, Human
ucucuguaaaauguggaugaua

SEQ ID NO: 662264 - RNA, 22 nt, Human
acaguagagcauuuguuuugau

SEQ ID NO: 662265 - RNA, 22 nt, Human
aaucaugaaauaucaguucuuu

SEQ ID NO: 662266 - RNA, 22 nt, Human
cuguagcugacaggaucacuua

SEQ ID NO: 662267 - RNA, 23 nt, Human
uggggagggaagucauuucugua

SEQ ID NO: 662268 - RNA, 22 nt, Human
auuuacauaauagacuuuaggu

SEQ ID NO: 662269 - RNA, 22 nt, Human
caggcccugggcaggcacagag

SEQ ID NO: 662270 - RNA, 22 nt, Human
ugagcaucuucgugaaagcuuc

SEQ ID NO: 662271 - RNA, 22 nt, Human
uucuuaaucuguguggguucga

SEQ ID NO: 662272 - RNA, 22 nt, Human
uggucagugugacauuuuuuaa

SEQ ID NO: 662273 - RNA, 22 nt, Human
uuuucaugugaugugacauuuc

SEQ ID NO: 662274 - RNA, 22 nt, Human
caggaauguccuugucauuuca

SEQ ID NO: 662275 - RNA, 22 nt, Human
gugcauuugacgaauacucacu

SEQ ID NO: 662276 - RNA, 22 nt, Human
aaccaugaauggguucuggugu

SEQ ID NO: 662277 - RNA, 22 nt, Human
ggcagcugcacguugucccguc

SEQ ID NO: 662278 - RNA, 22 nt, Human
agcugaugccauguggaacagu

SEQ ID NO: 662279 - RNA, 22 nt, Human
aaagaacuaaugugcaagguuu

SEQ ID NO: 662280 - RNA, 22 nt, Human
gcccaggggcagcgcauagugg

SEQ ID NO: 662281 - RNA, 22 nt, Human
cagagguagaaggcaugcagug

SEQ ID NO: 662282 - RNA, 22 nt, Human
uacacagugaguccucucugcc

SEQ ID NO: 662283 - RNA, 22 nt, Human
caggagcccguugcuccggcgg

SEQ ID NO: 662284 - RNA, 22 nt, Human
augaucauacagagcccuggua

SEQ ID NO: 662285 - RNA, 22 nt, Human
auuucucauguacaaaaacacu

SEQ ID NO: 662286 - RNA, 22 nt, Human
agaauucuuggugguuagaaua

SEQ ID NO: 662287 - RNA, 22 nt, Human
ugaggcccggguggaggaaugc

SEQ ID NO: 662288 - RNA, 22 nt, Human
ucagugcauggacagauuuaga

SEQ ID NO: 662289 - RNA, 22 nt, Human
uguaggaauuccagugacuuca

SEQ ID NO: 662290 - RNA, 20 nt, Human
aacacugugcgugguaggug

SEQ ID NO: 662291 - RNA, 22 nt, Human
uccagcugacacuuaaggggag

SEQ ID NO: 662292 - RNA, 22 nt, Human
cccugaguuaguacaguugagu

SEQ ID NO: 662293 - RNA, 23 nt, Human
gcaguggaaugucucuguuugga

SEQ ID NO: 662294 - RNA, 22 nt, Human
uagaaacccaggauuuguauuu

SEQ ID NO: 662295 - RNA, 22 nt, Human
gcuagaaaucgacuucagaauu

SEQ ID NO: 662296 - RNA, 22 nt, Human
ugaagcuuuccuguggucagga

SEQ ID NO: 662297 - RNA, 22 nt, Human
gauugaaaggaaaaccagagug

SEQ ID NO: 662298 - RNA, 22 nt, Human
aagaugcuggcaggaauagcua

SEQ ID NO: 662299 - RNA, 19 nt, Human
ugagugggccccugcagac

SEQ ID NO: 662300 - RNA, 22 nt, Human
ugguauuucagcuuuuguaucu

SEQ ID NO: 662301 - RNA, 22 nt, Human
agagcacagcagaucucugaug

SEQ ID NO: 662302 - RNA, 22 nt, Human
gccacccugcaaaugcccagga

SEQ ID NO: 662303 - RNA, 19 nt, Human
cauuuuaagcauccccagu

SEQ ID NO: 662304 - RNA, 22 nt, Human
acuggcaggcugcuggccggcg

SEQ ID NO: 662305 - RNA, 22 nt, Human
ggcucuucacacagugauguca

SEQ ID NO: 662306 - RNA, 22 nt, Human
aggucucuaaaauagucaaacu

SEQ ID NO: 662307 - RNA, 22 nt, Human
guggcuuuauaggaagaggaac

SEQ ID NO: 662308 - RNA, 22 nt, Human
ccacacagucaguuuccaagaa

SEQ ID NO: 662309 - RNA, 22 nt, Human
uccugggucucuuccuuaguuc

SEQ ID NO: 662310 - RNA, 22 nt, Human
aggugcugaacuggugaggucu

SEQ ID NO: 662311 - RNA, 22 nt, Human
auacaaugauugguucucaccc

SEQ ID NO: 662312 - RNA, 22 nt, Human
gauucuuuggccuuuauugaca

SEQ ID NO: 662313 - RNA, 22 nt, Human
agcauccacucacugggagagg

SEQ ID NO: 662314 - RNA, 22 nt, Human
caugaaggaccauuucacgguc

SEQ ID NO: 662315 - RNA, 23 nt, Human
cuaggcaggauuguaggcgggua

SEQ ID NO: 662316 - RNA, 22 nt, Human
accauuugacucucuaaggaua

SEQ ID NO: 662317 - RNA, 22 nt, Human
uuacuucuuuggccuucagcca

SEQ ID NO: 662318 - RNA, 22 nt, Human
acauugaugaucccacuuacag

SEQ ID NO: 662319 - RNA, 22 nt, Human
aaguuacaguuauuauuuaaaa

SEQ ID NO: 662320 - RNA, 22 nt, Human
aaacuguaaguuugaggggaaa

SEQ ID NO: 662321 - RNA, 22 nt, Human
gagaggcaggcgcugcaauggu

SEQ ID NO: 662322 - RNA, 22 nt, Human
aaagguuaauguugucauguua

SEQ ID NO: 662323 - RNA, 22 nt, Human
agucauaugacccuucacaaac

SEQ ID NO: 662324 - RNA, 16 nt, Human
uggagguguuucuagu

SEQ ID NO: 662325 - RNA, 22 nt, Human
ccuggaguaccguggccaucca

SEQ ID NO: 662326 - RNA, 22 nt, Human
uagcagcauguaagugaguaga

SEQ ID NO: 662327 - RNA, 21 nt, Human
ugguuaaaguugugucauccc

SEQ ID NO: 662328 - RNA, 22 nt, Human
cucacagcagccagucugccuu

SEQ ID NO: 662329 - RNA, 20 nt, Human
cuguuccugucccaugaagc

SEQ ID NO: 662330 - RNA, 22 nt, Human
uauugcuuauaauuuguugcaa

SEQ ID NO: 662331 - RNA, 22 nt, Human
agggcugaccuaagcuccacuu

SEQ ID NO: 662332 - RNA, 22 nt, Human
gccuccuggccuuugcuccuca

SEQ ID NO: 662333 - RNA, 22 nt, Human
aauacagauggcaugugaagau

SEQ ID NO: 662334 - RNA, 22 nt, Human
ggacagagcccugguggccuaa

SEQ ID NO: 662335 - RNA, 22 nt, Human
uaaagauggagaugaccuagga

SEQ ID NO: 662336 - RNA, 23 nt, Human
uuugaaguugacugccuuccaga

SEQ ID NO: 662337 - RNA, 22 nt, Human
auccaggcauucugacuucaag

SEQ ID NO: 662338 - RNA, 22 nt, Human
cugagcaccccaggaccugcgc

SEQ ID NO: 662339 - RNA, 22 nt, Human
ggcucuuguucguaccauggcu

SEQ ID NO: 662340 - RNA, 22 nt, Human
gguagaaggggaagagguccau

SEQ ID NO: 662341 - RNA, 22 nt, Human
guggcccuugaagcagcuucau

SEQ ID NO: 662342 - RNA, 22 nt, Human
auugucuuuccacugagaaguu

SEQ ID NO: 662343 - RNA, 22 nt, Human
gucagcuagaggaugugacauu

SEQ ID NO: 662344 - RNA, 22 nt, Human
acugggcugcuugagugccuuc

SEQ ID NO: 662345 - RNA, 22 nt, Human
gaauuauaaacuagugacuuca

SEQ ID NO: 662346 - RNA, 22 nt, Human
aaaucucaauuugaauuguagc

SEQ ID NO: 662347 - RNA, 22 nt, Human
cugcugaaaacaauaaugauga

SEQ ID NO: 662348 - RNA, 22 nt, Human
aggccagcacgacagccgcagg

SEQ ID NO: 662349 - RNA, 22 nt, Human
gcaggcccuuagccuugguggg

SEQ ID NO: 662350 - RNA, 22 nt, Human
uuguuuccauugcagacugugu

SEQ ID NO: 662351 - RNA, 22 nt, Human
aauucccacuauaugccaagca

SEQ ID NO: 662352 - RNA, 22 nt, Human
aacaucuuguccuuagauuaaa

SEQ ID NO: 662353 - RNA, 22 nt, Human
acacaguaaauauugucuccuc

SEQ ID NO: 662354 - RNA, 22 nt, Human
uuccacagaugaaaauuaaguu

SEQ ID NO: 662355 - RNA, 22 nt, Human
gagcucuuccccaucuuacauc

SEQ ID NO: 662356 - RNA, 22 nt, Human
acacagggucuagaguuaggcc

SEQ ID NO: 662357 - RNA, 22 nt, Human
gaguccuuuucauagcaguggg

SEQ ID NO: 662358 - RNA, 22 nt, Human
cuccagggaggagcacggguuc

SEQ ID NO: 662359 - RNA, 20 nt, Human
cugagcugagcuccaugggu

SEQ ID NO: 662360 - RNA, 22 nt, Human
ugucaugccaggaaauaguccc

SEQ ID NO: 662361 - RNA, 20 nt, Human
caggccagagguuugauggc

SEQ ID NO: 662362 - RNA, 22 nt, Human
ggggcaggagcccuucuucagc

SEQ ID NO: 662363 - RNA, 22 nt, Human
aaauauagcaauuaugccuacu

SEQ ID NO: 662364 - RNA, 22 nt, Human
ucugccaggagccaugagcaag

SEQ ID NO: 662365 - RNA, 22 nt, Human
auucauuuagagggauuaagca

SEQ ID NO: 662366 - RNA, 22 nt, Human
cuuuauguguacuuuccauuuu

SEQ ID NO: 662367 - RNA, 22 nt, Human
ggggccccuguggcuugaugcc

SEQ ID NO: 662368 - RNA, 23 nt, Human
ugaggaccucucaggggccaggc

SEQ ID NO: 662369 - RNA, 22 nt, Human
caaaaugaugugauuuuauugu

SEQ ID NO: 662370 - RNA, 22 nt, Human
agcccugcaggaggugggagag

SEQ ID NO: 662371 - RNA, 22 nt, Human
uggccuggccacauccagcagg

SEQ ID NO: 662372 - RNA, 22 nt, Human
uagaacauaagucauucauuug

SEQ ID NO: 662373 - RNA, 22 nt, Human
aaaacaguuuuugcuaacugcu

SEQ ID NO: 662374 - RNA, 21 nt, Human
acagagaaagagcagccuccu

SEQ ID NO: 662375 - RNA, 20 nt, Human
uggagccaaggugugucugg

SEQ ID NO: 662376 - RNA, 22 nt, Human
uuuccuaagauagauacuucag

SEQ ID NO: 662377 - RNA, 22 nt, Human
ggugcaugguggaggugacccu

SEQ ID NO: 662378 - RNA, 22 nt, Human
ggucagguggcuucuguccucu

SEQ ID NO: 662379 - RNA, 22 nt, Human
agagggggcagcggaccaguga

SEQ ID NO: 662380 - RNA, 22 nt, Human
uccgcuggagagggggcugcca

SEQ ID NO: 662381 - RNA, 22 nt, Human
acaguacagcugaaacuuuagu

SEQ ID NO: 662382 - RNA, 22 nt, Human
ugggcacagagucccaucugcc

SEQ ID NO: 662383 - RNA, 22 nt, Human
acauuaacaccauaaguguguu

SEQ ID NO: 662384 - RNA, 22 nt, Human
ggagcucagaagugagugaguu

SEQ ID NO: 662385 - RNA, 22 nt, Human
ugggaggaaugucacugagcca

SEQ ID NO: 662386 - RNA, 22 nt, Human
ugggacuuaauaugcccuugau

SEQ ID NO: 662387 - RNA, 22 nt, Human
cuuauucagauacagacucuug

SEQ ID NO: 662388 - RNA, 17 nt, Human
acagagcacaucaagau

SEQ ID NO: 662389 - RNA, 22 nt, Human
ugcauuauaacugaauguuguu

SEQ ID NO: 662390 - RNA, 22 nt, Human
cagggccuccuaaggcaucuaa

SEQ ID NO: 662391 - RNA, 22 nt, Human
auucuucagaauaucuggcacu

SEQ ID NO: 662392 - RNA, 22 nt, Human
uuuauauuaccuggaauagcuu

SEQ ID NO: 662393 - RNA, 22 nt, Human
aaacauguaauucugcuuaaga

SEQ ID NO: 662394 - RNA, 22 nt, Human
cccagugccaggcacaggcagc

SEQ ID NO: 662395 - RNA, 22 nt, Human
cuuuuucuucuaggugugccug

SEQ ID NO: 662396 - RNA, 22 nt, Human
gagcccagggugaaauagcagc

SEQ ID NO: 662397 - RNA, 22 nt, Human
ugaagcaggguggccagauugu

SEQ ID NO: 662398 - RNA, 22 nt, Human
acauuucucccugcaugccugc

SEQ ID NO: 662399 - RNA, 22 nt, Human
ugagcuggucuugaguguagcu

SEQ ID NO: 662400 - RNA, 22 nt, Human
gaggcugaacagguucucauga

SEQ ID NO: 662401 - RNA, 23 nt, Human
gccaucugguauuuccugacuuc

SEQ ID NO: 662402 - RNA, 22 nt, Human
ccugagcuuuaaaagccaugua

SEQ ID NO: 662403 - RNA, 22 nt, Human
acugccugcuccuggcuccaca

SEQ ID NO: 662404 - RNA, 22 nt, Human
uguuucagucccuguguucaau

SEQ ID NO: 662405 - RNA, 22 nt, Human
uauaucauggagauuaacauuc

SEQ ID NO: 662406 - RNA, 22 nt, Human
agggccuggcuucacuuucuca

SEQ ID NO: 662407 - RNA, 22 nt, Human
cuguacauaaaggaauaggugu

SEQ ID NO: 662408 - RNA, 22 nt, Human
aaagucauacauggugcuuacu

SEQ ID NO: 662409 - RNA, 22 nt, Human
ugauucauauguaacaucccug

SEQ ID NO: 662410 - RNA, 22 nt, Human
cagagcaguagaaaacagccuu

SEQ ID NO: 662411 - RNA, 22 nt, Human
ugggagcacccugaggagcuuc

SEQ ID NO: 662412 - RNA, 22 nt, Human
auuucucugcaguguucggaau

SEQ ID NO: 662413 - RNA, 22 nt, Human
gccugcccacggggcuggcaua

SEQ ID NO: 662414 - RNA, 22 nt, Human
uuuaaggauguaaaggaagaag

SEQ ID NO: 662415 - RNA, 22 nt, Human
gcaccugggguacacagcuaca

SEQ ID NO: 662416 - RNA, 22 nt, Human
auuucuuccucugucaguaacu

SEQ ID NO: 662417 - RNA, 20 nt, Human
agucacaguaucagucuuag

SEQ ID NO: 662418 - RNA, 22 nt, Human
cucugugauuuugugagccaga

SEQ ID NO: 662419 - RNA, 22 nt, Human
uguuuaauugggccaacagcgg

SEQ ID NO: 662420 - RNA, 22 nt, Human
uggagaaucuggaaacuguuga

SEQ ID NO: 662421 - RNA, 22 nt, Human
ccugagucuguguuuuccuaag

SEQ ID NO: 662422 - RNA, 22 nt, Human
uucucucaguuaaacuuuguga

SEQ ID NO: 662423 - RNA, 22 nt, Human
uggacaggaucugagacugaga

SEQ ID NO: 662424 - RNA, 22 nt, Human
ggcucauguuucagaaagugga

SEQ ID NO: 662425 - RNA, 22 nt, Human
ggcaccugcucaucuggacuca

SEQ ID NO: 662426 - RNA, 22 nt, Human
agagggcuaacugggaagcagg

SEQ ID NO: 662427 - RNA, 22 nt, Human
cucugggcugaauggcugaacc

SEQ ID NO: 662428 - RNA, 22 nt, Human
gugggcagagcaagggaacuca

SEQ ID NO: 662429 - RNA, 22 nt, Human
agugauaaugugguaauuauuu

SEQ ID NO: 662430 - RNA, 22 nt, Human
gugcagagagguggagggacuu

SEQ ID NO: 662431 - RNA, 22 nt, Human
cagcuuuuaggacugugagaaa

SEQ ID NO: 662432 - RNA, 22 nt, Human
gaagucucacagacagaucaga

SEQ ID NO: 662433 - RNA, 22 nt, Human
cuuuacagauaggaacuacuca

SEQ ID NO: 662434 - RNA, 22 nt, Human
caaggacacucccugcugggca

SEQ ID NO: 662435 - RNA, 22 nt, Human
acccuucauagaggagaagcug

SEQ ID NO: 662436 - RNA, 22 nt, Human
gaaggagcuaaagggagcccug

SEQ ID NO: 662437 - RNA, 22 nt, Human
ugggccccagcacgucugggga

SEQ ID NO: 662438 - RNA, 22 nt, Human
ccugucuggaacauggccuguu

SEQ ID NO: 662439 - RNA, 19 nt, Human
ccucugccagcccgccucu

SEQ ID NO: 662440 - RNA, 17 nt, Human
uacagaaggcaccacaa

SEQ ID NO: 662441 - RNA, 22 nt, Human
ucccagaauccucacucuauca

SEQ ID NO: 662442 - RNA, 17 nt, Human
ugggguccccgauggug

SEQ ID NO: 662443 - RNA, 22 nt, Human
gcuuuucuagcuagaacauccg

SEQ ID NO: 662444 - RNA, 22 nt, Human
guggcagucucaucuguggcuc

SEQ ID NO: 662445 - RNA, 22 nt, Human
agggcuuuaaugauuauuuucu

SEQ ID NO: 662446 - RNA, 22 nt, Human
ucuagaaauuuugccuuguauu

SEQ ID NO: 662447 - RNA, 22 nt, Human
agcaguggaccucagugcuauu

SEQ ID NO: 662448 - RNA, 20 nt, Human
auguccagugacuggaccau

SEQ ID NO: 662449 - RNA, 22 nt, Human
ugucaacacaccuaucucaauu

SEQ ID NO: 662450 - RNA, 20 nt, Human
uagcaagcaggaggugcaga

SEQ ID NO: 662451 - RNA, 22 nt, Human
aaaccugaaggaugauacaaca

SEQ ID NO: 662452 - RNA, 22 nt, Human
aucuuugggcaaugaugaggga

SEQ ID NO: 662453 - RNA, 20 nt, Human
ucccaucacgccugugccag

SEQ ID NO: 662454 - RNA, 22 nt, Human
caugcacacacaguucuaauua

SEQ ID NO: 662455 - RNA, 22 nt, Human
gcagagaaggauugaaaccaga

SEQ ID NO: 662456 - RNA, 22 nt, Human
gaaugcugagucuuaucucuua

SEQ ID NO: 662457 - RNA, 22 nt, Human
cugggccucaugcacagagaug

SEQ ID NO: 662458 - RNA, 22 nt, Human
guggcagaaacuggcagaggag

SEQ ID NO: 662459 - RNA, 22 nt, Human
agaagaaaugugaaggccacug

SEQ ID NO: 662460 - RNA, 22 nt, Human
augagggcagcuauguaagugu

SEQ ID NO: 662461 - RNA, 22 nt, Human
ucuucaaagaauuuuaguaauu

SEQ ID NO: 662462 - RNA, 21 nt, Human
aguggggucucuguggaggcc

SEQ ID NO: 662463 - RNA, 22 nt, Human
ucuuucaaagcuguaguagauu

SEQ ID NO: 662464 - RNA, 22 nt, Human
gccugguggacacugggcauca

SEQ ID NO: 662465 - RNA, 22 nt, Human
caaggagauaaaauguugagcu

SEQ ID NO: 662466 - RNA, 22 nt, Human
auggaaauguaacuucugauuc

SEQ ID NO: 662467 - RNA, 22 nt, Human
auguggggacaaaaugauggcc

SEQ ID NO: 662468 - RNA, 22 nt, Human
ugcagccauuuucugccaaugc

SEQ ID NO: 662469 - RNA, 20 nt, Human
ccacagaggacagggcugug

SEQ ID NO: 662470 - RNA, 19 nt, Human
auuguacauugaguuuggc

SEQ ID NO: 662471 - RNA, 22 nt, Human
aauagcuuggacccauugcuuu

SEQ ID NO: 662472 - RNA, 22 nt, Human
gccuccuggaagucacauguuu

SEQ ID NO: 662473 - RNA, 22 nt, Human
ugcccuguuccugccuccagcu

SEQ ID NO: 662474 - RNA, 22 nt, Human
cuucuuauuaauccuucucugu

SEQ ID NO: 662475 - RNA, 22 nt, Human
gcuuuacauaaacauuuauuau

SEQ ID NO: 662476 - RNA, 22 nt, Human
uggagccauaacccuuucguac

SEQ ID NO: 662477 - RNA, 22 nt, Human
cuggcuggaaguuagagaacuu

SEQ ID NO: 662478 - RNA, 22 nt, Human
agcccuggguuagggugggagc

SEQ ID NO: 662479 - RNA, 22 nt, Human
cuggucaaaaauuaugcuuacu

SEQ ID NO: 662480 - RNA, 22 nt, Human
aguggcagaacuaccuuuuuau

SEQ ID NO: 662481 - RNA, 22 nt, Human
ggcugggcuccgggagcaugcg

SEQ ID NO: 662482 - RNA, 22 nt, Human
aguagaaaguugcaggaggaau

SEQ ID NO: 662483 - RNA, 22 nt, Human
ugggcuccaauuuguccuuuca

SEQ ID NO: 662484 - RNA, 22 nt, Human
ggcuuauguuugucaagcaauc

SEQ ID NO: 662485 - RNA, 22 nt, Human
aaauccgucauuggccugguug

SEQ ID NO: 662486 - RNA, 22 nt, Human
agagcaauuagcuuagguaaaa

SEQ ID NO: 662487 - RNA, 22 nt, Human
aauucauccaugaacaauucca

SEQ ID NO: 662488 - RNA, 22 nt, Human
cuuuagauuucuauguaucacu

SEQ ID NO: 662489 - RNA, 18 nt, Human
uccagcgugcuccagggc

SEQ ID NO: 662490 - RNA, 22 nt, Human
ccaguguuuccccagaagagag

SEQ ID NO: 662491 - RNA, 22 nt, Human
ucucaguggcuuccucacuuuu

SEQ ID NO: 662492 - RNA, 22 nt, Human
cauacuuuugcccugacauucu

SEQ ID NO: 662493 - RNA, 22 nt, Human
ugcuucagugugucauuauuua

SEQ ID NO: 662494 - RNA, 22 nt, Human
auaugcuauguauguaaaugag

SEQ ID NO: 662495 - RNA, 22 nt, Human
gcagagcagugcuugcccagcg

SEQ ID NO: 662496 - RNA, 22 nt, Human
uucacauuguuuuaaugugaau

SEQ ID NO: 662497 - RNA, 22 nt, Human
augcuuccaugaacguucuugu

SEQ ID NO: 662498 - RNA, 19 nt, Human
cagagcagugguuccugaa

SEQ ID NO: 662499 - RNA, 22 nt, Human
uucuuacagaguuuacagagcc

SEQ ID NO: 662500 - RNA, 22 nt, Human
gagccuggauugaagugggugg

SEQ ID NO: 662501 - RNA, 22 nt, Human
cucagugugaaugcucaguaaa

SEQ ID NO: 662502 - RNA, 22 nt, Human
aagcccagaugugagaacugag

SEQ ID NO: 662503 - RNA, 22 nt, Human
ugugccugucccgcauucuggu

SEQ ID NO: 662504 - RNA, 22 nt, Human
ucugccuggcggacucccggaa

SEQ ID NO: 662505 - RNA, 22 nt, Human
ggcagagaguucuccaccucuc

SEQ ID NO: 662506 - RNA, 21 nt, Human
cagggccaauccugaccucua

SEQ ID NO: 662507 - RNA, 22 nt, Human
aaggccaaggcugcagugagcc

SEQ ID NO: 662508 - RNA, 22 nt, Human
ucuagcagggaaagcagagaau

SEQ ID NO: 662509 - RNA, 22 nt, Human
cuuguugggucgugaauucugu

SEQ ID NO: 662510 - RNA, 22 nt, Human
aagacacuuucuaaauagaagu

SEQ ID NO: 662511 - RNA, 22 nt, Human
cuuuggcacagucucauuugau

SEQ ID NO: 662512 - RNA, 22 nt, Human
ccaguguauuauuugagaaauu

SEQ ID NO: 662513 - RNA, 22 nt, Human
caugaaauguuagaauuagaca

SEQ ID NO: 662514 - RNA, 22 nt, Human
auuguccuaucucagugccaug

SEQ ID NO: 662515 - RNA, 22 nt, Human
aagccaagguuuuggucacagc

SEQ ID NO: 662516 - RNA, 22 nt, Human
ucucuucccggauaaaguaagu

SEQ ID NO: 662517 - RNA, 22 nt, Human
uccagcuggggccgaaguggau

SEQ ID NO: 662518 - RNA, 22 nt, Human
acaguguucacuaagguuagcu

SEQ ID NO: 662519 - RNA, 22 nt, Human
gcaugauaccauagguuuugcc

SEQ ID NO: 662520 - RNA, 22 nt, Human
gcacacuggagccuggaagauu

SEQ ID NO: 662521 - RNA, 21 nt, Human
ugagagccuccaaccggcuac

SEQ ID NO: 662522 - RNA, 22 nt, Human
ugcacagugaccccuggugacu

SEQ ID NO: 662523 - RNA, 22 nt, Human
cuuuacaauucaagggaacucu

SEQ ID NO: 662524 - RNA, 22 nt, Human
cucauauugcugguggucuaag

SEQ ID NO: 662525 - RNA, 22 nt, Human
ucuuuaauaucugccccagagc

SEQ ID NO: 662526 - RNA, 22 nt, Human
ucaaauacauggucaaucaacu

SEQ ID NO: 662527 - RNA, 22 nt, Human
gcaugggcuuucucagaguucu

SEQ ID NO: 662528 - RNA, 22 nt, Human
uucugaaagccaauucauugaa

SEQ ID NO: 662529 - RNA, 22 nt, Human
auagucuuagaaucuugagugu

SEQ ID NO: 662530 - RNA, 22 nt, Human
cuguggccccacccucuuggcc

SEQ ID NO: 662531 - RNA, 22 nt, Human
gcagugggccugaggaagggug

SEQ ID NO: 662532 - RNA, 22 nt, Human
uauuucaggcuauauuucuugu

SEQ ID NO: 662533 - RNA, 22 nt, Human
agagcugcaggguggacccagg

SEQ ID NO: 662534 - RNA, 22 nt, Human
aaugcugcucucauaauuauag

SEQ ID NO: 662535 - RNA, 22 nt, Human
aauagcuuucucaugacuucac

SEQ ID NO: 662536 - RNA, 22 nt, Human
caggacaggaguggggucaaag

SEQ ID NO: 662537 - RNA, 22 nt, Human
aagcacagggacuuuaggaaua

SEQ ID NO: 662538 - RNA, 22 nt, Human
gcacaaagguggaaggaggaag

SEQ ID NO: 662539 - RNA, 22 nt, Human
cagaguccugcaccagcuccag

SEQ ID NO: 662540 - RNA, 22 nt, Human
caaugucuaguuucccaaaucc

SEQ ID NO: 662541 - RNA, 22 nt, Human
gagaggcuaugagguucugugu

SEQ ID NO: 662542 - RNA, 22 nt, Human
uagcauuucccaaaugcauuug

SEQ ID NO: 662543 - RNA, 22 nt, Human
aggcacaggccucagcacccag

SEQ ID NO: 662544 - RNA, 22 nt, Human
uucaagaucuggguuuucagcu

SEQ ID NO: 662545 - RNA, 17 nt, Human
ugaaagaaucagggaga

SEQ ID NO: 662546 - RNA, 22 nt, Human
guugucagguaaaacaguaugg

SEQ ID NO: 662547 - RNA, 22 nt, Human
acauguuaaacaucauggaaug

SEQ ID NO: 662548 - RNA, 22 nt, Human
ccuucuugagguagcacauucu

SEQ ID NO: 662549 - RNA, 20 nt, Human
auucuaaagcucugcucuuu

SEQ ID NO: 662550 - RNA, 22 nt, Human
ucaggagaguguucaguggagg

SEQ ID NO: 662551 - RNA, 22 nt, Human
agguucuuuuggccaaccucau

SEQ ID NO: 662552 - RNA, 22 nt, Human
cucggguaccaugcuaggcacu

SEQ ID NO: 662553 - RNA, 22 nt, Human
aggcucugguuggcaaguaaag

SEQ ID NO: 662554 - RNA, 22 nt, Human
auuaacuuuugaucaguguggu

SEQ ID NO: 662555 - RNA, 18 nt, Human
uaagucauuuugccagca

SEQ ID NO: 662556 - RNA, 22 nt, Human
ugaaauguuugaagaccacuga

SEQ ID NO: 662557 - RNA, 22 nt, Human
gucccuggaauggacucugcgc

SEQ ID NO: 662558 - RNA, 22 nt, Human
ucacauuucuuuauguagucuu

SEQ ID NO: 662559 - RNA, 22 nt, Human
ucagcccaggucacguaaucaa

SEQ ID NO: 662560 - RNA, 22 nt, Human
ugagggacuugcuaguucucug

SEQ ID NO: 662561 - RNA, 22 nt, Human
uauagaaguaagcauugugaug

SEQ ID NO: 662562 - RNA, 22 nt, Human
ucagaggcuuucaauguguuuu

SEQ ID NO: 662563 - RNA, 22 nt, Human
uagggacccucccugcucuaac

SEQ ID NO: 662564 - RNA, 22 nt, Human
auaguguguaaagugcagugau

SEQ ID NO: 662565 - RNA, 22 nt, Human
aaagaagguagggcuggugacu

SEQ ID NO: 662566 - RNA, 22 nt, Human
aaaguguaaaagcauguuaggg

SEQ ID NO: 662567 - RNA, 22 nt, Human
caggcagcugggucaccguccc

SEQ ID NO: 662568 - RNA, 22 nt, Human
agagaacaaauuaaaggugguu

SEQ ID NO: 662569 - RNA, 22 nt, Human
ucagcacuuugaagcagaagga

SEQ ID NO: 662570 - RNA, 22 nt, Human
guggggacgggauggcucacug

SEQ ID NO: 662571 - RNA, 22 nt, Human
uuucaagagaaaacuaaccuau

SEQ ID NO: 662572 - RNA, 22 nt, Human
ucugugugguaguuucagugaa

SEQ ID NO: 662573 - RNA, 22 nt, Human
ucaggaaauuaaacacuugaaa

SEQ ID NO: 662574 - RNA, 22 nt, Human
gucucaguuacucucccuggua

SEQ ID NO: 662575 - RNA, 22 nt, Human
cugaaccacuaauauuuugauu

SEQ ID NO: 662576 - RNA, 22 nt, Human
aaggcugugguucuauacagaa

SEQ ID NO: 662577 - RNA, 22 nt, Human
agcagcagccguagccuuauua

SEQ ID NO: 662578 - RNA, 22 nt, Human
uuuaugucacuuugaaagagag

SEQ ID NO: 662579 - RNA, 22 nt, Human
gugugagugaaaguaguuugau

SEQ ID NO: 662580 - RNA, 22 nt, Human
uuggcucaggcuuucauuguaa

SEQ ID NO: 662581 - RNA, 19 nt, Human
ccagggcuuuaaguugagg

SEQ ID NO: 662582 - RNA, 22 nt, Human
cugcaucauuuucagacaaugg

SEQ ID NO: 662583 - RNA, 22 nt, Human
aggaaaaaccuguuaaugguag

SEQ ID NO: 662584 - RNA, 22 nt, Human
guucauauuuaacuaagauagg

SEQ ID NO: 662585 - RNA, 22 nt, Human
agguaaggcuguaagcuaagcc

SEQ ID NO: 662586 - RNA, 22 nt, Human
agguggcagcagaaucagggag

SEQ ID NO: 662587 - RNA, 22 nt, Human
ucugagccguauggcuuggcua

SEQ ID NO: 662588 - RNA, 22 nt, Human
agaggccaccagagguggugcc

SEQ ID NO: 662589 - RNA, 22 nt, Human
agcagccagugggagugauaca

SEQ ID NO: 662590 - RNA, 22 nt, Human
uuucuagcaagaaagaggugga

SEQ ID NO: 662591 - RNA, 22 nt, Human
uccagagcugagggucaguaga

SEQ ID NO: 662592 - RNA, 22 nt, Human
agccucugcacgggcacgggug

SEQ ID NO: 662593 - RNA, 22 nt, Human
cacaguguaguuaaugugacau

SEQ ID NO: 662594 - RNA, 22 nt, Human
agcacagagagcucuagguaaa

SEQ ID NO: 662595 - RNA, 22 nt, Human
ugucuccuauuuccugcuaagg

SEQ ID NO: 662596 - RNA, 22 nt, Human
gaccacacuuuggaaaucacga

SEQ ID NO: 662597 - RNA, 22 nt, Human
uccugccuaccuugcggaggug

SEQ ID NO: 662598 - RNA, 22 nt, Human
cagcccuggccucuucgcuuuc

SEQ ID NO: 662599 - RNA, 22 nt, Human
cgguuaguuauuuuucagauau

SEQ ID NO: 662600 - RNA, 22 nt, Human
ccauuuuucacaagacucacuu

SEQ ID NO: 662601 - RNA, 22 nt, Human
cugccagcacugccuccugagg

SEQ ID NO: 662602 - RNA, 22 nt, Human
uuugagcagagaaaggacauga

SEQ ID NO: 662603 - RNA, 23 nt, Human
cagagcuggcucagagcugccug

SEQ ID NO: 662604 - RNA, 22 nt, Human
uaaagcauguguuagaagugca

SEQ ID NO: 662605 - RNA, 22 nt, Human
uuugaaguggaaaaggauuuaa

SEQ ID NO: 662606 - RNA, 22 nt, Human
gauaaaguagauuuguucuaga

SEQ ID NO: 662607 - RNA, 22 nt, Human
uggcauguuugcuugugcauau

SEQ ID NO: 662608 - RNA, 20 nt, Human
uaugcuuuuuauaagauuga

SEQ ID NO: 662609 - RNA, 22 nt, Human
cacccagcauuggcuaagagag

SEQ ID NO: 662610 - RNA, 21 nt, Human
auucaguuugacaucuagcag

SEQ ID NO: 662611 - RNA, 22 nt, Human
gaaggauuugagauuauccuag

SEQ ID NO: 662612 - RNA, 22 nt, Human
acacaguaguuugucauugcua

SEQ ID NO: 662613 - RNA, 22 nt, Human
aggcuaggcugaugccucuucc

SEQ ID NO: 662614 - RNA, 22 nt, Human
uguagauauagaaaaagacuga

SEQ ID NO: 662615 - RNA, 22 nt, Human
agggcugacaguaaaaguauga

SEQ ID NO: 662616 - RNA, 22 nt, Human
ccugcagcuccggauuucuggg

SEQ ID NO: 662617 - RNA, 22 nt, Human
aguuagcagcuuauuagaaaca

SEQ ID NO: 662618 - RNA, 22 nt, Human
ucugagcuuucuugugcucaag

SEQ ID NO: 662619 - RNA, 22 nt, Human
ucuggccugggccugccggugc

SEQ ID NO: 662620 - RNA, 22 nt, Human
uuggaauugugaacuaagugau

SEQ ID NO: 662621 - RNA, 22 nt, Human
aagcugcccucauucccagugc

SEQ ID NO: 662622 - RNA, 22 nt, Human
agucuguggauggacuggcaga

SEQ ID NO: 662623 - RNA, 22 nt, Human
aagauacauaaagguagagucu

SEQ ID NO: 662624 - RNA, 22 nt, Human
cagcugagaagugauagcugca

SEQ ID NO: 662625 - RNA, 22 nt, Human
uuucacaaugcaauccuacuuc

SEQ ID NO: 662626 - RNA, 22 nt, Human
agguaagggucacaguucauau

SEQ ID NO: 662627 - RNA, 22 nt, Human
gugaagcauaugcuucucugcc

SEQ ID NO: 662628 - RNA, 16 nt, Human
ccacagggcaaggggc

SEQ ID NO: 662629 - RNA, 22 nt, Human
gaucucugaaucugaagccuuc

SEQ ID NO: 662630 - RNA, 22 nt, Human
cagagcugcucaugguggccag

SEQ ID NO: 662631 - RNA, 22 nt, Human
uuuguacaccuaccuaauacag

SEQ ID NO: 662632 - RNA, 22 nt, Human
gagcuuuaccuuagguucuguu

SEQ ID NO: 662633 - RNA, 22 nt, Human
aagccaguccucuacugggcac

SEQ ID NO: 662634 - RNA, 22 nt, Human
uuguuucugaguuuucauguau

SEQ ID NO: 662635 - RNA, 22 nt, Human
aggcagguguugggagacacca

SEQ ID NO: 662636 - RNA, 22 nt, Human
uucauauaaauggaaucagaau

SEQ ID NO: 662637 - RNA, 19 nt, Human
gggugaggaagagcguugc

SEQ ID NO: 662638 - RNA, 20 nt, Human
auaggaaagggaggggcuuu

SEQ ID NO: 662639 - RNA, 20 nt, Human
augcuuccagggugugucug

SEQ ID NO: 662640 - RNA, 22 nt, Human
aaagugcugggauuacaagcgu

SEQ ID NO: 662641 - RNA, 22 nt, Human
accguuuacaccacuaccgcuu

SEQ ID NO: 662642 - RNA, 22 nt, Human
gggagcugugggauugguugag

SEQ ID NO: 662643 - RNA, 22 nt, Human
uucccacacccauauugugauu

SEQ ID NO: 662644 - RNA, 19 nt, Human
aggcagaggcuuggcuagc

SEQ ID NO: 662645 - RNA, 22 nt, Human
ucagauuugaauauuccuuucg

SEQ ID NO: 662646 - RNA, 22 nt, Human
agggguagagauugcuggugua

SEQ ID NO: 662647 - RNA, 22 nt, Human
ugggcuccucgucacucgcugu

SEQ ID NO: 662648 - RNA, 22 nt, Human
auuuucucacaaugcagaagga

SEQ ID NO: 662649 - RNA, 22 nt, Human
caggcagaguuagugauuuagg

SEQ ID NO: 662650 - RNA, 22 nt, Human
uuuucuaacuuuacacucgaaa

SEQ ID NO: 662651 - RNA, 22 nt, Human
ugaaugcagagacugugggaaa

SEQ ID NO: 662652 - RNA, 22 nt, Human
gagcugagauuugaagcaaguu

SEQ ID NO: 662653 - RNA, 22 nt, Human
uggcugcagaucaagggcaggc

SEQ ID NO: 662654 - RNA, 22 nt, Human
aguggcugaagcaucaaaggca

SEQ ID NO: 662655 - RNA, 23 nt, Human
cuggaagugcuuuuauagcuuug

SEQ ID NO: 662656 - RNA, 22 nt, Human
cuggggggcuacugacagagga

SEQ ID NO: 662657 - RNA, 22 nt, Human
ucacaugacuuuuugguggccu

SEQ ID NO: 662658 - RNA, 22 nt, Human
accaucuuuuccucugccuccu

SEQ ID NO: 662659 - RNA, 22 nt, Human
gucugugugcacagagcuuugg

SEQ ID NO: 662660 - RNA, 22 nt, Human
ccagccuggacugggucuugug

SEQ ID NO: 662661 - RNA, 22 nt, Human
uuuauuguugggucuuaagcug

SEQ ID NO: 662662 - RNA, 22 nt, Human
uuguacaaaggauuuggaagag

SEQ ID NO: 662663 - RNA, 22 nt, Human
agaugaaauuuguguugaguug

SEQ ID NO: 662664 - RNA, 17 nt, Human
agagagaaaagggccau

SEQ ID NO: 662665 - RNA, 22 nt, Human
cugcaggaaucugugcuaggug

SEQ ID NO: 662666 - RNA, 22 nt, Human
acugagcucuagguuuugaacc

SEQ ID NO: 662667 - RNA, 22 nt, Human
ugcaugcagcuggugauaagaa

SEQ ID NO: 662668 - RNA, 22 nt, Human
ucagaggcuucugcucaccuca

SEQ ID NO: 662669 - RNA, 22 nt, Human
gugucaugggagucagaaguga

SEQ ID NO: 662670 - RNA, 22 nt, Human
uccaggagugauaaggccacug

SEQ ID NO: 662671 - RNA, 22 nt, Human
aggucauuguuaagucaccaua

SEQ ID NO: 662672 - RNA, 22 nt, Human
gcugucaggaacaugccuuggu

SEQ ID NO: 662673 - RNA, 22 nt, Human
ucccaaggccaggcaucuagaa

SEQ ID NO: 662674 - RNA, 22 nt, Human
cucagggacggaggcuugcgga

SEQ ID NO: 662675 - RNA, 22 nt, Human
gaucuuuauacuguaauaauga

SEQ ID NO: 662676 - RNA, 22 nt, Human
cagcugaggaauacuagaugua

SEQ ID NO: 662677 - RNA, 22 nt, Human
gcucugggcugaaucauuuauc

SEQ ID NO: 662678 - RNA, 22 nt, Human
ucagagcuaaggggagagcaaa

SEQ ID NO: 662679 - RNA, 22 nt, Human
cucugcugcaggaaggcgugca

SEQ ID NO: 662680 - RNA, 22 nt, Human
cugggccacaucagaugaagac

SEQ ID NO: 662681 - RNA, 22 nt, Human
cugggccucauccccagaguuu

SEQ ID NO: 662682 - RNA, 22 nt, Human
cuguggucaucucagaguggcc

SEQ ID NO: 662683 - RNA, 22 nt, Human
auuaaggaauguaggcaagaag

SEQ ID NO: 662684 - RNA, 22 nt, Human
uaggaacaguccuagaaaucug

SEQ ID NO: 662685 - RNA, 22 nt, Human
gguuuaauuaccugcaucucaa

SEQ ID NO: 662686 - RNA, 22 nt, Human
cccaguaaucggagaguacuua

SEQ ID NO: 662687 - RNA, 22 nt, Human
aaaaguucccugguuagaaaag

SEQ ID NO: 662688 - RNA, 22 nt, Human
augcauauguacuugcauaugu

SEQ ID NO: 662689 - RNA, 18 nt, Human
guuggcugcuguggcugg

SEQ ID NO: 662690 - RNA, 22 nt, Human
aaauaaguaguuuaguguugug

SEQ ID NO: 662691 - RNA, 22 nt, Human
cauuugucaucacugagcugcc

SEQ ID NO: 662692 - RNA, 22 nt, Human
caggguaguaauuuaauacaag

SEQ ID NO: 662693 - RNA, 22 nt, Human
uagcagcuaccuggcuaagagu

SEQ ID NO: 662694 - RNA, 22 nt, Human
agugaguggacccugcaaggaa

SEQ ID NO: 662695 - RNA, 22 nt, Human
ugagacaaccuaauuaaacacc

SEQ ID NO: 662696 - RNA, 22 nt, Human
caggcacucauucagagaggug

SEQ ID NO: 662697 - RNA, 22 nt, Human
ccagggcuuugccaaaguccag

SEQ ID NO: 662698 - RNA, 22 nt, Human
uuccaaguguugagauuagagg

SEQ ID NO: 662699 - RNA, 22 nt, Human
gucuugaucuccugaccuugug

SEQ ID NO: 662700 - RNA, 22 nt, Human
cagguggagcugacugagggca

SEQ ID NO: 662701 - RNA, 22 nt, Human
gugcuuaauacaugucaauaac

SEQ ID NO: 662702 - RNA, 22 nt, Human
cagcacuuugagggcucuuaau

SEQ ID NO: 662703 - RNA, 22 nt, Human
ucacaaaugaggaaaucgagca

SEQ ID NO: 662704 - RNA, 22 nt, Human
cuguggcuaauaauuaguauuu

SEQ ID NO: 662705 - RNA, 22 nt, Human
cagggagcugacaaccaaggag

SEQ ID NO: 662706 - RNA, 22 nt, Human
gcgcgcuaccgccagggcugca

SEQ ID NO: 662707 - RNA, 22 nt, Human
gugcccucacaaaguggaaaga

SEQ ID NO: 662708 - RNA, 22 nt, Human
uucaugugauaaaugugugacu

SEQ ID NO: 662709 - RNA, 22 nt, Human
ggggaaggaaaguuauuagcag

SEQ ID NO: 662710 - RNA, 22 nt, Human
caggaagccacaggacagguag

SEQ ID NO: 662711 - RNA, 22 nt, Human
aagcuggagaguuaggugaaua

SEQ ID NO: 662712 - RNA, 21 nt, Human
aauggcugggcaaggucucuc

SEQ ID NO: 662713 - RNA, 22 nt, Human
aggcuucaauuccuuacccagu

SEQ ID NO: 662714 - RNA, 22 nt, Human
acuuuugguucuguaacuguga

SEQ ID NO: 662715 - RNA, 22 nt, Human
guguuccauguuugagguaguu

SEQ ID NO: 662716 - RNA, 22 nt, Human
uacuaggcaauuauguaaauaa

SEQ ID NO: 662717 - RNA, 22 nt, Human
uagaccauuuuacaauagugug

SEQ ID NO: 662718 - RNA, 19 nt, Human
acucaggcaaugagaaaca

SEQ ID NO: 662719 - RNA, 19 nt, Human
ugaggccaaggucacagau

SEQ ID NO: 662720 - RNA, 22 nt, Human
ugggcuggagcuuguugcuucc

SEQ ID NO: 662721 - RNA, 23 nt, Human
gcaauacaagacuggucaugagc

SEQ ID NO: 662722 - RNA, 22 nt, Human
uauggcuucucagucaugaaaa

SEQ ID NO: 662723 - RNA, 22 nt, Human
uagaaacagagagauaugcccc

SEQ ID NO: 662724 - RNA, 22 nt, Human
ucugagcauaugcagcaccugg

SEQ ID NO: 662725 - RNA, 22 nt, Human
cccgaggaaccagagguagcuc

SEQ ID NO: 662726 - RNA, 22 nt, Human
uuagcacugucugguuaucuug

SEQ ID NO: 662727 - RNA, 22 nt, Human
cacuauaauccuguuuuagaac

SEQ ID NO: 662728 - RNA, 22 nt, Human
ccagggcaacgcugucucagag

SEQ ID NO: 662729 - RNA, 16 nt, Human
ucucccuugucaccug

SEQ ID NO: 662730 - RNA, 22 nt, Human
gcugccuggaauaacggcuggc

SEQ ID NO: 662731 - RNA, 22 nt, Human
gcaggcagagucaauuugaucc

SEQ ID NO: 662732 - RNA, 22 nt, Human
auaucacagaugcagaaagaga

SEQ ID NO: 662733 - RNA, 22 nt, Human
uauuauuaugcauagcaugaaa

SEQ ID NO: 662734 - RNA, 22 nt, Human
ccucccuccauugccaucgucu

SEQ ID NO: 662735 - RNA, 22 nt, Human
ccaggagggugguuacucaauc

SEQ ID NO: 662736 - RNA, 22 nt, Human
ugugucauugccaugaaaaggc

SEQ ID NO: 662737 - RNA, 21 nt, Human
auuuucauuuccaggggagga

SEQ ID NO: 662738 - RNA, 22 nt, Human
guccugacggcugauuggccug

SEQ ID NO: 662739 - RNA, 22 nt, Human
gagcugccaagauuacaaucag

SEQ ID NO: 662740 - RNA, 22 nt, Human
cccugagcccauaguugacauu

SEQ ID NO: 662741 - RNA, 22 nt, Human
aaauauaauuucugccucaaua

SEQ ID NO: 662742 - RNA, 22 nt, Human
uucaaacaguguagaauauaug

SEQ ID NO: 662743 - RNA, 19 nt, Human
gcagcaguggaaggaaaaa

SEQ ID NO: 662744 - RNA, 22 nt, Human
augaguaaaaccacuauuuaca

SEQ ID NO: 662745 - RNA, 22 nt, Human
gguuugguuuuggccaucuucc

SEQ ID NO: 662746 - RNA, 22 nt, Human
ggagacuaccuagcaggcuguu

SEQ ID NO: 662747 - RNA, 22 nt, Human
gugccgcgacgcagucggugcc

SEQ ID NO: 662748 - RNA, 22 nt, Human
gagaguuccaguaaguggauuc

SEQ ID NO: 662749 - RNA, 20 nt, Human
acagcagauaccacaacuau

SEQ ID NO: 662750 - RNA, 22 nt, Human
gccaaggccugcagcaccucau

SEQ ID NO: 662751 - RNA, 22 nt, Human
gucuggacaggacuauuucuaa

SEQ ID NO: 662752 - RNA, 20 nt, Human
guccugggagccacagcaca

SEQ ID NO: 662753 - RNA, 22 nt, Human
aggaaggaagagacaccauuug

SEQ ID NO: 662754 - RNA, 22 nt, Human
aagagaaggauucugagccugg

SEQ ID NO: 662755 - RNA, 22 nt, Human
gaacccaguccaggugcagccu

SEQ ID NO: 662756 - RNA, 22 nt, Human
gccugggauuguguaagugaau

SEQ ID NO: 662757 - RNA, 22 nt, Human
cuccucagggcugguuacaugg

SEQ ID NO: 662758 - RNA, 22 nt, Human
ugggaagggucaguuucuucau

SEQ ID NO: 662759 - RNA, 22 nt, Human
uuagacuagaagcuuccacuuu

SEQ ID NO: 662760 - RNA, 22 nt, Human
caguucaggccggcugacucag

SEQ ID NO: 662761 - RNA, 22 nt, Human
ucaggaagaaagaagggagugu

SEQ ID NO: 662762 - RNA, 22 nt, Human
uggugugggcguggcaggcaag

SEQ ID NO: 662763 - RNA, 22 nt, Human
cagccugcucucagauguugag

SEQ ID NO: 662764 - RNA, 22 nt, Human
aaaaggauguuuucaugaaaca

SEQ ID NO: 662765 - RNA, 22 nt, Human
uggcucagcaagacauugaccu

SEQ ID NO: 662766 - RNA, 22 nt, Human
guuuacaacaugccaacugggc

SEQ ID NO: 662767 - RNA, 22 nt, Human
agaugacaaugaaggaaaaugu

SEQ ID NO: 662768 - RNA, 22 nt, Human
ugcucccuugccagaggggaag

SEQ ID NO: 662769 - RNA, 22 nt, Human
gcuucagcccaucccaguacau

SEQ ID NO: 662770 - RNA, 22 nt, Human
auguucuuuggaauuuaugaaa

SEQ ID NO: 662771 - RNA, 22 nt, Human
gcaaacagccaggcgcagaagu

SEQ ID NO: 662772 - RNA, 22 nt, Human
ggagcuguuauggcauaagcau

SEQ ID NO: 662773 - RNA, 22 nt, Human
cugccucaugcugccugcagcc

SEQ ID NO: 662774 - RNA, 22 nt, Human
ucuguucuuuagccugcuugag

SEQ ID NO: 662775 - RNA, 22 nt, Human
accuucugaccaguuaucuuga

SEQ ID NO: 662776 - RNA, 22 nt, Human
cauuggaaaaugcaugcuuuuu

SEQ ID NO: 662777 - RNA, 22 nt, Human
ugugaacuuaagauuccuuauc

SEQ ID NO: 662778 - RNA, 22 nt, Human
cuggccuggggccucagcugcu

SEQ ID NO: 662779 - RNA, 17 nt, Human
uagagcugguucaggag

SEQ ID NO: 662780 - RNA, 18 nt, Human
acaaaggaucaugaggga

SEQ ID NO: 662781 - RNA, 22 nt, Human
acagagcauuugggacagagag

SEQ ID NO: 662782 - RNA, 22 nt, Human
aagucacuucuuaggaaaggag

SEQ ID NO: 662783 - RNA, 21 nt, Human
ugggcacugagggugcugcuc

SEQ ID NO: 662784 - RNA, 18 nt, Human
acacaguggaugccuggu

SEQ ID NO: 662785 - RNA, 22 nt, Human
gccugggauucucaaaggggug

SEQ ID NO: 662786 - RNA, 22 nt, Human
accagggcagccgagguguguc

SEQ ID NO: 662787 - RNA, 22 nt, Human
gggcugggcaugguguucccuc

SEQ ID NO: 662788 - RNA, 22 nt, Human
uuggcagacuggguccugggga

SEQ ID NO: 662789 - RNA, 22 nt, Human
ccccuccuggccacacugucag

SEQ ID NO: 662790 - RNA, 22 nt, Human
acucucagggcuccagggaaag

SEQ ID NO: 662791 - RNA, 22 nt, Human
acuggcagcuguaggaugcaug

SEQ ID NO: 662792 - RNA, 22 nt, Human
gcucugggugaaggguaccauu

SEQ ID NO: 662793 - RNA, 22 nt, Human
ggacggggagcuggaaagggga

SEQ ID NO: 662794 - RNA, 22 nt, Human
ccacucugauuggucaccucug

SEQ ID NO: 662795 - RNA, 22 nt, Human
ugucgauucagcucuucagaga

SEQ ID NO: 662796 - RNA, 22 nt, Human
gacugagggauagaggugcuuc

SEQ ID NO: 662797 - RNA, 22 nt, Human
gccucugcugacaagauggaca

SEQ ID NO: 662798 - RNA, 22 nt, Human
aaguuuagggaagucugagcgc

SEQ ID NO: 662799 - RNA, 21 nt, Human
cuacagaagcucuccuaucca

SEQ ID NO: 662800 - RNA, 22 nt, Human
cuggugugauugagcccaggug

SEQ ID NO: 662801 - RNA, 22 nt, Human
agcacauuaagugaguucaugu

SEQ ID NO: 662802 - RNA, 22 nt, Human
cuuuggagaagaaugcauccuu

SEQ ID NO: 662803 - RNA, 22 nt, Human
auuaaggagggcugggcaugau

SEQ ID NO: 662804 - RNA, 23 nt, Human
gccucagagaaacagcugcacac

SEQ ID NO: 662805 - RNA, 22 nt, Human
gccaggcuggaaagaacagaca

SEQ ID NO: 662806 - RNA, 22 nt, Human
uguacaauguggccaguguuaa

SEQ ID NO: 662807 - RNA, 22 nt, Human
uuuccucaacugucaaaugggg

SEQ ID NO: 662808 - RNA, 22 nt, Human
cagagccaaaugcugugguuau

SEQ ID NO: 662809 - RNA, 22 nt, Human
acaguggcucaugccugucauc

SEQ ID NO: 662810 - RNA, 22 nt, Human
ugcuuuaaaguauuucucgcaa

SEQ ID NO: 662811 - RNA, 22 nt, Human
aaagcucuuggauuuuagacuc

SEQ ID NO: 662812 - RNA, 22 nt, Human
cugggcaggagaggugguugga

SEQ ID NO: 662813 - RNA, 22 nt, Human
acuacaauacucuuaguaaaag

SEQ ID NO: 662814 - RNA, 22 nt, Human
aggccaggaccauuagcccaga

SEQ ID NO: 662815 - RNA, 20 nt, Human
cucugcagcaaggccugggu

SEQ ID NO: 662816 - RNA, 22 nt, Human
gucuuguuugggauguggaugg

SEQ ID NO: 662817 - RNA, 22 nt, Human
ugucugaaucucgguuuccuca

SEQ ID NO: 662818 - RNA, 22 nt, Human
aaacucuguagcuaaacauaau

SEQ ID NO: 662819 - RNA, 22 nt, Human
guuucuuauuucaacuggaaca

SEQ ID NO: 662820 - RNA, 22 nt, Human
ccuacucugagcgccuccgcau

SEQ ID NO: 662821 - RNA, 22 nt, Human
aagaggcagcccgcugaggcug

SEQ ID NO: 662822 - RNA, 20 nt, Human
aggguggggacguucugacu

SEQ ID NO: 662823 - RNA, 19 nt, Human
caguggccuggaggucucu

SEQ ID NO: 662824 - RNA, 22 nt, Human
ucaggaggccgugugcucagug

SEQ ID NO: 662825 - RNA, 22 nt, Human
uaugccugauaacugugucucu

SEQ ID NO: 662826 - RNA, 22 nt, Human
agucccagcucagaaccacuag

SEQ ID NO: 662827 - RNA, 22 nt, Human
cacagagacagaagcacuuaug

SEQ ID NO: 662828 - RNA, 22 nt, Human
gcucuguguauguggcaggugc

SEQ ID NO: 662829 - RNA, 22 nt, Human
uaguggauguucagagauuuga

SEQ ID NO: 662830 - RNA, 22 nt, Human
cuuguccagauguuuguuaggu

SEQ ID NO: 662831 - RNA, 22 nt, Human
uggugcaguccaaagggagcag

SEQ ID NO: 662832 - RNA, 22 nt, Human
ccagcccuguuuaugugucacu

SEQ ID NO: 662833 - RNA, 22 nt, Human
gcacagggccuggcacauaaga

SEQ ID NO: 662834 - RNA, 21 nt, Human
uuuaguucaaguacagaacca

SEQ ID NO: 662835 - RNA, 22 nt, Human
agucacccuccaacucuccacu

SEQ ID NO: 662836 - RNA, 22 nt, Human
ugcccugugcuggaaucuuccc

SEQ ID NO: 662837 - RNA, 22 nt, Human
agcuuucucuucuuuagaaagu

SEQ ID NO: 662838 - RNA, 22 nt, Human
gugucccaaagauuagaaauca

SEQ ID NO: 662839 - RNA, 22 nt, Human
gaagacgagauaaaaugguguc

SEQ ID NO: 662840 - RNA, 22 nt, Human
uguagaacugacauuuuggacu

SEQ ID NO: 662841 - RNA, 22 nt, Human
ugagagcacacagaaauauuuu

SEQ ID NO: 662842 - RNA, 22 nt, Human
cagggccacccucugcugggug

SEQ ID NO: 662843 - RNA, 22 nt, Human
auucugcacuuccuuugcuucc

SEQ ID NO: 662844 - RNA, 19 nt, Human
agggcugcucuggccuggg

SEQ ID NO: 662845 - RNA, 22 nt, Human
gugaaguucaagcuugccaucu

SEQ ID NO: 662846 - RNA, 22 nt, Human
gccuagguaccagcagagagcc

SEQ ID NO: 662847 - RNA, 22 nt, Human
gauuugucacgguugagagcca

SEQ ID NO: 662848 - RNA, 22 nt, Human
gugcacacucuuggggcacuuu

SEQ ID NO: 662849 - RNA, 22 nt, Human
acagucaaugagugagugaaug

SEQ ID NO: 662850 - RNA, 22 nt, Human
cacccugcucugcugugcggcc

SEQ ID NO: 662851 - RNA, 22 nt, Human
ucucaagagggaggcaaucaug

SEQ ID NO: 662852 - RNA, 22 nt, Human
ucuuccuuucauucauguguua

SEQ ID NO: 662853 - RNA, 22 nt, Human
aggugagguuugggagguguca

SEQ ID NO: 662854 - RNA, 22 nt, Human
uucaaguuuugacuuaguccuu

SEQ ID NO: 662855 - RNA, 22 nt, Human
agcaauaaccacucuaauuuau

SEQ ID NO: 662856 - RNA, 22 nt, Human
ugggcacuggaagccugcugug

SEQ ID NO: 662857 - RNA, 22 nt, Human
uuauucugugaacaugguuaau

SEQ ID NO: 662858 - RNA, 22 nt, Human
acugagagucaagauagcaugg

SEQ ID NO: 662859 - RNA, 22 nt, Human
caugaaugcuggguucauguaa

SEQ ID NO: 662860 - RNA, 22 nt, Human
acucacaggacucugcauauag

SEQ ID NO: 662861 - RNA, 22 nt, Human
ugggccagauccauggcaauaa

SEQ ID NO: 662862 - RNA, 22 nt, Human
cuuccaaguugcucugcugacc

SEQ ID NO: 662863 - RNA, 22 nt, Human
ccucaggcugucuuccuucugg

SEQ ID NO: 662864 - RNA, 22 nt, Human
aggcagauauuucaguucacau

SEQ ID NO: 662865 - RNA, 22 nt, Human
gcagaugccagaucaugcaggg

SEQ ID NO: 662866 - RNA, 22 nt, Human
agcuucuggaagccuggcagca

SEQ ID NO: 662867 - RNA, 22 nt, Human
ggggccagcaauguugaggaau

SEQ ID NO: 662868 - RNA, 22 nt, Human
gcaguuuuagagcuuuaagaug

SEQ ID NO: 662869 - RNA, 22 nt, Human
cccaggaaaugggcucuugccu

SEQ ID NO: 662870 - RNA, 22 nt, Human
uugaucucauuguucuccucag

SEQ ID NO: 662871 - RNA, 22 nt, Human
ccuguguggaaaccgcaugacg

SEQ ID NO: 662872 - RNA, 22 nt, Human
cuaggccagagagaccucauga

SEQ ID NO: 662873 - RNA, 22 nt, Human
accagcuggcccaugagcacgu

SEQ ID NO: 662874 - RNA, 22 nt, Human
agcacagauggauguauucauu

SEQ ID NO: 662875 - RNA, 22 nt, Human
aaaugacuaaugauccugggca

SEQ ID NO: 662876 - RNA, 22 nt, Human
uggcagaauuucuagcagauuc

SEQ ID NO: 662877 - RNA, 22 nt, Human
agagggcugggaugugcugugu

SEQ ID NO: 662878 - RNA, 22 nt, Human
auucugcugccuaguuuaugaa

SEQ ID NO: 662879 - RNA, 22 nt, Human
cuuuccuccacucccuaggcuu

SEQ ID NO: 662880 - RNA, 22 nt, Human
gggagggucugagagcugcacc

SEQ ID NO: 662881 - RNA, 22 nt, Human
uuuaauugcauuuaaagaugga

SEQ ID NO: 662882 - RNA, 19 nt, Human
gcagagugggguggagggu

SEQ ID NO: 662883 - RNA, 23 nt, Human
acugaagaugucuuaguggcccu

SEQ ID NO: 662884 - RNA, 22 nt, Human
gugaauauucuuugugcaguau

SEQ ID NO: 662885 - RNA, 22 nt, Human
auucagaaaggguugccugguu

SEQ ID NO: 662886 - RNA, 22 nt, Human
ugucugaaaggcuuuuucucac

SEQ ID NO: 662887 - RNA, 22 nt, Human
guagggacuguucucaccugag

SEQ ID NO: 662888 - RNA, 22 nt, Human
gcagugacauaccuggagggca

SEQ ID NO: 662889 - RNA, 22 nt, Human
cuugccagcacuuggccagcug

SEQ ID NO: 662890 - RNA, 20 nt, Human
cagcuucaaugucagcuuga

SEQ ID NO: 662891 - RNA, 22 nt, Human
acuuuggaucugauguaaucag

SEQ ID NO: 662892 - RNA, 22 nt, Human
caaggccaguccauuuuggaag

SEQ ID NO: 662893 - RNA, 22 nt, Human
cugauacaaugucugcuuuaua

SEQ ID NO: 662894 - RNA, 22 nt, Human
aaguuucugauauuguuaaagc

SEQ ID NO: 662895 - RNA, 22 nt, Human
uguccagcggccuggcugcuga

SEQ ID NO: 662896 - RNA, 23 nt, Human
uauccuaaaggcaacaggaaguc

SEQ ID NO: 662897 - RNA, 22 nt, Human
aauuuuacuaaucugaguguga

SEQ ID NO: 662898 - RNA, 22 nt, Human
ucuuacauauacgucauuuagu

SEQ ID NO: 662899 - RNA, 22 nt, Human
ucccagggcagcuguccagaag

SEQ ID NO: 662900 - RNA, 22 nt, Human
guuucaaagcacagcucacauu

SEQ ID NO: 662901 - RNA, 21 nt, Human
auguccuggcuaccagcgcag

SEQ ID NO: 662902 - RNA, 22 nt, Human
uggucugauucuugcuccccaa

SEQ ID NO: 662903 - RNA, 22 nt, Human
cagucccuaguggagcucacag

SEQ ID NO: 662904 - RNA, 22 nt, Human
ugcaauuuuaauacauuagagg

SEQ ID NO: 662905 - RNA, 22 nt, Human
aaggcugcuuuuaacaugcaua

SEQ ID NO: 662906 - RNA, 22 nt, Human
caaaggcaggugcugaauauuc

SEQ ID NO: 662907 - RNA, 22 nt, Human
auacagaucccacagcauguga

SEQ ID NO: 662908 - RNA, 22 nt, Human
aguaaagcagaguugcaguaca

SEQ ID NO: 662909 - RNA, 22 nt, Human
caggggccaaggguccagaccu

SEQ ID NO: 662910 - RNA, 22 nt, Human
ggccucagugggccgcugcagg

SEQ ID NO: 662911 - RNA, 22 nt, Human
uggcuccaucauccaugcaaga

SEQ ID NO: 662912 - RNA, 22 nt, Human
ugggugguuuaugaguggguuu

SEQ ID NO: 662913 - RNA, 22 nt, Human
gcuucaugggugugcaaccugu

SEQ ID NO: 662914 - RNA, 22 nt, Human
acagauauuuggggaaagacgu

SEQ ID NO: 662915 - RNA, 22 nt, Human
gagauuagaguuguuucauugu

SEQ ID NO: 662916 - RNA, 20 nt, Human
cagauaaacgggaaagaagc

SEQ ID NO: 662917 - RNA, 22 nt, Human
ucucaaauggcaaauguggguc

SEQ ID NO: 662918 - RNA, 22 nt, Human
gcagguguggaguggggugagc

SEQ ID NO: 662919 - RNA, 22 nt, Human
ugaguaggugguuaagcaugga

SEQ ID NO: 662920 - RNA, 22 nt, Human
gaggcuaaguaacuguccaugg

SEQ ID NO: 662921 - RNA, 22 nt, Human
uagucauucuccuuacaaagcc

SEQ ID NO: 662922 - RNA, 22 nt, Human
gaauaauagcagaaauuagcag

SEQ ID NO: 662923 - RNA, 22 nt, Human
aggcaggcugcuauggaguaga

SEQ ID NO: 662924 - RNA, 22 nt, Human
uuuauugaacacuugcacuggc

SEQ ID NO: 662925 - RNA, 22 nt, Human
gcacacccucucaccagcacug

SEQ ID NO: 662926 - RNA, 22 nt, Human
acaaguuucauuguuuagaacc

SEQ ID NO: 662927 - RNA, 22 nt, Human
uauuuauaccaggugaucggag

SEQ ID NO: 662928 - RNA, 22 nt, Human
uugugcuugcccuggaggugcg

SEQ ID NO: 662929 - RNA, 22 nt, Human
acacacacaagcagguugugga

SEQ ID NO: 662930 - RNA, 22 nt, Human
guagcugauauuagcaaugagu

SEQ ID NO: 662931 - RNA, 22 nt, Human
gaaaugaacugauuaucauugc

SEQ ID NO: 662932 - RNA, 22 nt, Human
uuuaauacuauggggaugaaca

SEQ ID NO: 662933 - RNA, 22 nt, Human
gaagagcuccaaaaacagugag

SEQ ID NO: 662934 - RNA, 18 nt, Human
gagcagcaggaucaagaa

SEQ ID NO: 662935 - RNA, 22 nt, Human
ugagcaccaucuguuugugugc

SEQ ID NO: 662936 - RNA, 22 nt, Human
agggggcccuugcaggugagcg

SEQ ID NO: 662937 - RNA, 22 nt, Human
cccuuucuucuugacugaaaac

SEQ ID NO: 662938 - RNA, 22 nt, Human
aggcuggagacccgccaagaaa

SEQ ID NO: 662939 - RNA, 22 nt, Human
uaaugcacaugacugaacuauu

SEQ ID NO: 662940 - RNA, 22 nt, Human
acugucaugugcuaacugucca

SEQ ID NO: 662941 - RNA, 22 nt, Human
gcuuugcugaggucugaggauu

SEQ ID NO: 662942 - RNA, 22 nt, Human
uccaccacuuccugcagccauu

SEQ ID NO: 662943 - RNA, 22 nt, Human
gacugggcuccaagagggagag

SEQ ID NO: 662944 - RNA, 22 nt, Human
ugcagggauuauguagggguug

SEQ ID NO: 662945 - RNA, 22 nt, Human
gcagugugucucuuggcuuccu

SEQ ID NO: 662946 - RNA, 22 nt, Human
uccuggucuacacugcauuggg

SEQ ID NO: 662947 - RNA, 22 nt, Human
aucugaauaaauuucuuuuagu

SEQ ID NO: 662948 - RNA, 22 nt, Human
cuugccuucagugucccuuugc

SEQ ID NO: 662949 - RNA, 22 nt, Human
agcagagaggagguggcccugu

SEQ ID NO: 662950 - RNA, 22 nt, Human
uuggcugcuggucuuuggauau

SEQ ID NO: 662951 - RNA, 22 nt, Human
uccuuucuucuucugcccaugg

SEQ ID NO: 662952 - RNA, 22 nt, Human
ugggcagaaugugggauccaga

SEQ ID NO: 662953 - RNA, 22 nt, Human
gauuuucauuauagcuaguuuc

SEQ ID NO: 662954 - RNA, 22 nt, Human
gucuccacagcccagcugccac

SEQ ID NO: 662955 - RNA, 22 nt, Human
gacagggaggagcagagcuucu

SEQ ID NO: 662956 - RNA, 22 nt, Human
cccuggaggcuggaggcaguag

SEQ ID NO: 662957 - RNA, 23 nt, Human
gccauggcugccccacaggccuc

SEQ ID NO: 662958 - RNA, 22 nt, Human
uagcaaaguuuuguggugauua

SEQ ID NO: 662959 - RNA, 22 nt, Human
uggcgucucucauaaguaugug

SEQ ID NO: 662960 - RNA, 22 nt, Human
ggaaggggugucgcccauggau

SEQ ID NO: 662961 - RNA, 22 nt, Human
aauaccagagacaguguuuacc

SEQ ID NO: 662962 - RNA, 22 nt, Human
ugggccugccccaggcuucagc

SEQ ID NO: 662963 - RNA, 22 nt, Human
auuauuugcuuggcucaucuaa

SEQ ID NO: 662964 - RNA, 22 nt, Human
ucuuauaugcacauacauuggg

SEQ ID NO: 662965 - RNA, 22 nt, Human
acugggcuguggacacccagcg

SEQ ID NO: 662966 - RNA, 22 nt, Human
agaucugaaucucauccgagga

SEQ ID NO: 662967 - RNA, 22 nt, Human
uggccgggccgggcgccuccac

SEQ ID NO: 662968 - RNA, 22 nt, Human
cccaagaucuuucgugcacuaa

SEQ ID NO: 662969 - RNA, 22 nt, Human
augggcaguuaggaggccagga

SEQ ID NO: 662970 - RNA, 19 nt, Human
augaaugagcugugagguu

SEQ ID NO: 662971 - RNA, 22 nt, Human
acaauguucugucugacuuguc

SEQ ID NO: 662972 - RNA, 22 nt, Human
cucaagucuauugauaagugca

SEQ ID NO: 662973 - RNA, 22 nt, Human
uucuuaacuggaaaaugucaga

SEQ ID NO: 662974 - RNA, 22 nt, Human
ggaugucgaggaugggguagca

SEQ ID NO: 662975 - RNA, 19 nt, Human
aaauaucagagagaugaua

SEQ ID NO: 662976 - RNA, 22 nt, Human
gagccaggcccguacuugcugu

SEQ ID NO: 662977 - RNA, 22 nt, Human
uagggcucgggcacaggacagg

SEQ ID NO: 662978 - RNA, 22 nt, Human
ggagggagguuagauucaagcu

SEQ ID NO: 662979 - RNA, 22 nt, Human
accagagaaaacacagcaggcu

SEQ ID NO: 662980 - RNA, 22 nt, Human
auacacuuguacauuuuuuaau

SEQ ID NO: 662981 - RNA, 22 nt, Human
aagcacauacauaauaaagucc

SEQ ID NO: 662982 - RNA, 22 nt, Human
gaauucuagucacacacauuca

SEQ ID NO: 662983 - RNA, 22 nt, Human
ugacaacagccaucacuuuuag

SEQ ID NO: 662984 - RNA, 22 nt, Human
agggucaccugcuugccagggc

SEQ ID NO: 662985 - RNA, 22 nt, Human
cauagcaagaucacauucugua

SEQ ID NO: 662986 - RNA, 22 nt, Human
cuguguuucugagaagugggga

SEQ ID NO: 662987 - RNA, 22 nt, Human
uuccccagggaagcuccugcgc

SEQ ID NO: 662988 - RNA, 19 nt, Human
aggucccucccucgaggcu

SEQ ID NO: 662989 - RNA, 22 nt, Human
uggcuggcaguaggcuaguggc

SEQ ID NO: 662990 - RNA, 22 nt, Human
ccagaugguuugcaugggaggg

SEQ ID NO: 662991 - RNA, 22 nt, Human
ccugagggcucagcccccagcc

SEQ ID NO: 662992 - RNA, 22 nt, Human
gagcacaguaaagcagugucac

SEQ ID NO: 662993 - RNA, 22 nt, Human
ugggcccagguccugggagaag

SEQ ID NO: 662994 - RNA, 22 nt, Human
uaucagcaccgcggacagcauc

SEQ ID NO: 662995 - RNA, 22 nt, Human
cucccaggggaacuaucaagua

SEQ ID NO: 662996 - RNA, 22 nt, Human
acuaacauguuaaucaaaagaa

SEQ ID NO: 662997 - RNA, 23 nt, Human
cccuggagcuagucugagcgggg

SEQ ID NO: 662998 - RNA, 22 nt, Human
acugaucacagauauguauauu

SEQ ID NO: 662999 - RNA, 22 nt, Human
ugcacagcuggcucuccuuuuc

SEQ ID NO: 663000 - RNA, 22 nt, Human
cuuaagagucuuucuguguuua

SEQ ID NO: 663001 - RNA, 22 nt, Human
gaaguucaggugggaauugagc

SEQ ID NO: 663002 - RNA, 22 nt, Human
gcaaagaaugcagauuugccuc

SEQ ID NO: 663003 - RNA, 22 nt, Human
aggcuucacauuuucuaggccu

SEQ ID NO: 663004 - RNA, 19 nt, Human
uucacauuggaagaaguag

SEQ ID NO: 663005 - RNA, 22 nt, Human
ugcucuguaggggaaagagagc

SEQ ID NO: 663006 - RNA, 22 nt, Human
uguacuugaacuugacuguaga

SEQ ID NO: 663007 - RNA, 22 nt, Human
aaggcgacacaggcagcaggcc

SEQ ID NO: 663008 - RNA, 22 nt, Human
acacaagauuguguauugaauu

SEQ ID NO: 663009 - RNA, 22 nt, Human
acaauagaguucucauaggaca

SEQ ID NO: 663010 - RNA, 22 nt, Human
acuugggauuucagaugcugug

SEQ ID NO: 663011 - RNA, 22 nt, Human
aggaagugggguucucucacug

SEQ ID NO: 663012 - RNA, 22 nt, Human
agauacagccugccagguucuu

SEQ ID NO: 663013 - RNA, 22 nt, Human
agcagcaaggaacagaauggac

SEQ ID NO: 663014 - RNA, 22 nt, Human
uaacuuucacaucacacugacu

SEQ ID NO: 663015 - RNA, 22 nt, Human
auugggaagauuuagauccacu

SEQ ID NO: 663016 - RNA, 22 nt, Human
cugggccugguagggcuugaaa

SEQ ID NO: 663017 - RNA, 22 nt, Human
agagcuggccagggaucacucu

SEQ ID NO: 663018 - RNA, 22 nt, Human
cucugugugguccucuguauug

SEQ ID NO: 663019 - RNA, 22 nt, Human
aaaugcauguagaauaauagag

SEQ ID NO: 663020 - RNA, 22 nt, Human
cuguaacuuagcaugguuacua

SEQ ID NO: 663021 - RNA, 22 nt, Human
uucuuacagcccuauuacuaaa

SEQ ID NO: 663022 - RNA, 22 nt, Human
gggcccugccccguggcucuga

SEQ ID NO: 663023 - RNA, 22 nt, Human
caucagcuuuggcgcugagcau

SEQ ID NO: 663024 - RNA, 22 nt, Human
uggcagcaauuugugauguuga

SEQ ID NO: 663025 - RNA, 22 nt, Human
uggcauuuaguugcguauugca

SEQ ID NO: 663026 - RNA, 21 nt, Human
ugcucaugcaaugcaugucca

SEQ ID NO: 663027 - RNA, 22 nt, Human
acagaugaggaagagucagcca

SEQ ID NO: 663028 - RNA, 22 nt, Human
gaagccuugaacugcaaacccc

SEQ ID NO: 663029 - RNA, 22 nt, Human
uuaaacauuuuugaugaucgau

SEQ ID NO: 663030 - RNA, 20 nt, Human
ugcuggaaauuguucuagga

SEQ ID NO: 663031 - RNA, 20 nt, Human
ucuaaacaguuggcaugggg

SEQ ID NO: 663032 - RNA, 22 nt, Human
agggagcaaagguuucaggguu

SEQ ID NO: 663033 - RNA, 22 nt, Human
acauuucucauucuccccuaac

SEQ ID NO: 663034 - RNA, 22 nt, Human
aagccaagaguuaacuauuugu

SEQ ID NO: 663035 - RNA, 22 nt, Human
gcauucuucacaguauuccucc

SEQ ID NO: 663036 - RNA, 22 nt, Human
uuuucagaauuagcauaccauu

SEQ ID NO: 663037 - RNA, 22 nt, Human
uggcaggcauugaugcgaguuc

SEQ ID NO: 663038 - RNA, 22 nt, Human
acaauugcuaaugcuucuguug

SEQ ID NO: 663039 - RNA, 20 nt, Human
uucuuaguagagcauguauu

SEQ ID NO: 663040 - RNA, 22 nt, Human
ucccagaaaaaggaggcuauga

SEQ ID NO: 663041 - RNA, 23 nt, Human
aaacuacaacgccaggcacugag

SEQ ID NO: 663042 - RNA, 21 nt, Human
auucugaguugucagucuuca

SEQ ID NO: 663043 - RNA, 22 nt, Human
caucuguuuccuaaucuguagc

SEQ ID NO: 663044 - RNA, 22 nt, Human
cagggccacugcaugagguuca

SEQ ID NO: 663045 - RNA, 21 nt, Human
uuugccuucacgaagcauccu

SEQ ID NO: 663046 - RNA, 20 nt, Human
gcauccagacacccagcugc

SEQ ID NO: 663047 - RNA, 22 nt, Human
uuccuuucccucacagccucgg

SEQ ID NO: 663048 - RNA, 22 nt, Human
auuuaauuguucuucuggcuau

SEQ ID NO: 663049 - RNA, 18 nt, Human
gcuggcugcacuucugcu

SEQ ID NO: 663050 - RNA, 22 nt, Human
auuauuaggacuacugggguug

SEQ ID NO: 663051 - RNA, 19 nt, Human
gcuggggaauggauauuga

SEQ ID NO: 663052 - RNA, 22 nt, Human
ugugaggauguuaaggggauga

SEQ ID NO: 663053 - RNA, 22 nt, Human
uuuccuuuuauaaggcuugagg

SEQ ID NO: 663054 - RNA, 22 nt, Human
ugauugaauauucccuugggcc

SEQ ID NO: 663055 - RNA, 22 nt, Human
uagcaaccagaacagcacucua

SEQ ID NO: 663056 - RNA, 22 nt, Human
uaugagaauaaucugguaaaua

SEQ ID NO: 663057 - RNA, 22 nt, Human
auuauguagguuaggugguugu

SEQ ID NO: 663058 - RNA, 22 nt, Human
aauguguacaugacagauagaa

SEQ ID NO: 663059 - RNA, 22 nt, Human
ugucuccaacucacuguauacu

SEQ ID NO: 663060 - RNA, 22 nt, Human
aaggcccuucggcuuccucagc

SEQ ID NO: 663061 - RNA, 18 nt, Human
gucuuuggaguggaggua

SEQ ID NO: 663062 - RNA, 20 nt, Human
augugucugccucuguguuc

SEQ ID NO: 663063 - RNA, 23 nt, Human
ucugggcugagcucgaguguaga

SEQ ID NO: 663064 - RNA, 22 nt, Human
agacagcuaauaaaugagugug

SEQ ID NO: 663065 - RNA, 22 nt, Human
aucagacucugcauugcagucu

SEQ ID NO: 663066 - RNA, 22 nt, Human
ugucacaaacauacauuauaga

SEQ ID NO: 663067 - RNA, 22 nt, Human
gcauucaucuuccuccaugcag

SEQ ID NO: 663068 - RNA, 22 nt, Human
aagcuucaucugaugccgaacu

SEQ ID NO: 663069 - RNA, 22 nt, Human
ugcugagggcagaugaauuaga

SEQ ID NO: 663070 - RNA, 20 nt, Human
acaguggaaauugaugucug

SEQ ID NO: 663071 - RNA, 22 nt, Human
ugaggcugagauaucagggagg

SEQ ID NO: 663072 - RNA, 22 nt, Human
gauuucuaguucauuaucuauu

SEQ ID NO: 663073 - RNA, 23 nt, Human
uugaauuucucuugcaauauuua

SEQ ID NO: 663074 - RNA, 21 nt, Human
uauuuauuaauuuguaaggcu

SEQ ID NO: 663075 - RNA, 22 nt, Human
cacauacuuguguguacauaug

SEQ ID NO: 663076 - RNA, 22 nt, Human
ggaagggaauccaucugguuag

SEQ ID NO: 663077 - RNA, 22 nt, Human
cugugaauuuaaagcacacauc

SEQ ID NO: 663078 - RNA, 22 nt, Human
cugugccauccuagggcugcug

SEQ ID NO: 663079 - RNA, 22 nt, Human
acaugcuacacagagcuccucg

SEQ ID NO: 663080 - RNA, 22 nt, Human
auuccaaagcacaucagaacua

SEQ ID NO: 663081 - RNA, 22 nt, Human
acacaguaugcaucuagaaauu

SEQ ID NO: 663082 - RNA, 22 nt, Human
ucaguaacuuacuuauucaccu

SEQ ID NO: 663083 - RNA, 22 nt, Human
gcagagaugggccagugacgca

SEQ ID NO: 663084 - RNA, 22 nt, Human
aggcucauucuugccucugagc

SEQ ID NO: 663085 - RNA, 19 nt, Human
auuugaaagcugugcuugc

SEQ ID NO: 663086 - RNA, 22 nt, Human
ugacagaaagaauaugucaauc

SEQ ID NO: 663087 - RNA, 22 nt, Human
cauuuauugguuaggccagcag

SEQ ID NO: 663088 - RNA, 22 nt, Human
uccaggucagacuucugugccc

SEQ ID NO: 663089 - RNA, 20 nt, Human
gagggcacauuguuccgugc

SEQ ID NO: 663090 - RNA, 22 nt, Human
ccucagugcguacugaacagug

SEQ ID NO: 663091 - RNA, 22 nt, Human
gaggucuggaccaagucgcccc

SEQ ID NO: 663092 - RNA, 22 nt, Human
uagcugagagcucacuugagga

SEQ ID NO: 663093 - RNA, 22 nt, Human
ugugcuauuugacuguuugcua

SEQ ID NO: 663094 - RNA, 19 nt, Human
uucauucucuuauuguugu

SEQ ID NO: 663095 - RNA, 22 nt, Human
gaagcuuuauugcaagugaggc

SEQ ID NO: 663096 - RNA, 22 nt, Human
uugcaaauaauagccugaaacu

SEQ ID NO: 663097 - RNA, 22 nt, Human
ugggaccaagucauuucuuuag

SEQ ID NO: 663098 - RNA, 22 nt, Human
gccuggcaggccuguuggggcu

SEQ ID NO: 663099 - RNA, 22 nt, Human
ucccaggcaaaggcagcucauu

SEQ ID NO: 663100 - RNA, 22 nt, Human
ucagagguaguagcagaguuga

SEQ ID NO: 663101 - RNA, 22 nt, Human
ccaggcuggauuuugcaguuca

SEQ ID NO: 663102 - RNA, 22 nt, Human
ggcagugugcaucuguguggcc

SEQ ID NO: 663103 - RNA, 22 nt, Human
ggagcucauaacaagguagcca

SEQ ID NO: 663104 - RNA, 20 nt, Human
cagagccaagagcagcaucu

SEQ ID NO: 663105 - RNA, 22 nt, Human
gaagaacuuauaggaaugucau

SEQ ID NO: 663106 - RNA, 22 nt, Human
ucuggccauggcaagccgagug

SEQ ID NO: 663107 - RNA, 22 nt, Human
auggucauaugcuaauucagga

SEQ ID NO: 663108 - RNA, 22 nt, Human
ucacuugaaccugggaggcaga

SEQ ID NO: 663109 - RNA, 22 nt, Human
cagcugccugcaacacaagcuu

SEQ ID NO: 663110 - RNA, 22 nt, Human
aagggagcuuaggagaucaggc

SEQ ID NO: 663111 - RNA, 22 nt, Human
cacacaugacccacuuuuaccg

SEQ ID NO: 663112 - RNA, 22 nt, Human
ggguuuuaugguucacuugcaa

SEQ ID NO: 663113 - RNA, 21 nt, Human
caggaaacugaggccaugggg

SEQ ID NO: 663114 - RNA, 22 nt, Human
auacagguucucuagggaacag

SEQ ID NO: 663115 - RNA, 22 nt, Human
acauuaaaauggagaauuuuga

SEQ ID NO: 663116 - RNA, 22 nt, Human
uuggcucacaugauuauggagg

SEQ ID NO: 663117 - RNA, 22 nt, Human
agaggcccugggcuggugugcu

SEQ ID NO: 663118 - RNA, 23 nt, Human
acugagcaauguuuacauacuug

SEQ ID NO: 663119 - RNA, 22 nt, Human
uaucuuuugaguucucaagaug

SEQ ID NO: 663120 - RNA, 22 nt, Human
accagagcagacuacuggaggu

SEQ ID NO: 663121 - RNA, 22 nt, Human
caaaacuaucaggcucaaagcu

SEQ ID NO: 663122 - RNA, 22 nt, Human
gaucuucucuuuaguagaaaca

SEQ ID NO: 663123 - RNA, 22 nt, Human
agaguucagcuacugcaaaugu

SEQ ID NO: 663124 - RNA, 22 nt, Human
aggagccaagcagaacuaagga

SEQ ID NO: 663125 - RNA, 22 nt, Human
acacugaguauugaguagggua

SEQ ID NO: 663126 - RNA, 22 nt, Human
augcccgauaccuaguuaacuc

SEQ ID NO: 663127 - RNA, 22 nt, Human
gagggguggcguuggcauuuag

SEQ ID NO: 663128 - RNA, 21 nt, Human
acagcuggaaauuacuugccc

SEQ ID NO: 663129 - RNA, 22 nt, Human
aaagcaggguccaaggagaugu

SEQ ID NO: 663130 - RNA, 19 nt, Human
gcuggggccugaccagaca

SEQ ID NO: 663131 - RNA, 22 nt, Human
ugcccugggaacacagaugcca

SEQ ID NO: 663132 - RNA, 22 nt, Human
agaacacugcuaguauaaucac

SEQ ID NO: 663133 - RNA, 22 nt, Human
gauucuggauugucugcuugaa

SEQ ID NO: 663134 - RNA, 22 nt, Human
agcugccugccaugccgcuggu

SEQ ID NO: 663135 - RNA, 23 nt, Human
agcuccagaacauagcacaggaa

SEQ ID NO: 663136 - RNA, 22 nt, Human
guguguguguaaaaauccagag

SEQ ID NO: 663137 - RNA, 22 nt, Human
ugcucaggccagccggacagag

SEQ ID NO: 663138 - RNA, 22 nt, Human
uuuuguguugccauguuaagca

SEQ ID NO: 663139 - RNA, 22 nt, Human
acugagaagauucucacucuua

SEQ ID NO: 663140 - RNA, 22 nt, Human
ucuucuccauaaucaacacucu

SEQ ID NO: 663141 - RNA, 22 nt, Human
caaauguauucucacuucaggg

SEQ ID NO: 663142 - RNA, 22 nt, Human
ucagcuucacccagaguuguag

SEQ ID NO: 663143 - RNA, 22 nt, Human
ccagaugagaccacacugcugg

SEQ ID NO: 663144 - RNA, 22 nt, Human
aagcacaugagcuauucaugcu

SEQ ID NO: 663145 - RNA, 22 nt, Human
cuccucuagaagcugaccugga

SEQ ID NO: 663146 - RNA, 22 nt, Human
aucacauuguuagcauagacug

SEQ ID NO: 663147 - RNA, 21 nt, Human
aacaugauauguguauggauu

SEQ ID NO: 663148 - RNA, 22 nt, Human
agagugacagccacugcaguaa

SEQ ID NO: 663149 - RNA, 22 nt, Human
cagaaagaccugauuggcaguu

SEQ ID NO: 663150 - RNA, 22 nt, Human
auccaugauugcccagaggugu

SEQ ID NO: 663151 - RNA, 22 nt, Human
ugcaggagaaaguacggagcgu

SEQ ID NO: 663152 - RNA, 22 nt, Human
auucuucacauggauaggaucu

SEQ ID NO: 663153 - RNA, 22 nt, Human
ggcuggcuacauuggaggaagg

SEQ ID NO: 663154 - RNA, 22 nt, Human
ucugcaacauuccucuccccac

SEQ ID NO: 663155 - RNA, 22 nt, Human
augaggaacagacuugcuggau

SEQ ID NO: 663156 - RNA, 22 nt, Human
cauccugacuggguaaagcuua

SEQ ID NO: 663157 - RNA, 22 nt, Human
uggcugcugcuuggucuucuuc

SEQ ID NO: 663158 - RNA, 20 nt, Human
ccaggccugggccugcucua

SEQ ID NO: 663159 - RNA, 22 nt, Human
gagaggcugacuggcuguccug

SEQ ID NO: 663160 - RNA, 20 nt, Human
cucuccuugccgacuuggca

SEQ ID NO: 663161 - RNA, 22 nt, Human
gaacagcucugaagcaguaaau

SEQ ID NO: 663162 - RNA, 22 nt, Human
cuagauaaggauuucucaacuu

SEQ ID NO: 663163 - RNA, 22 nt, Human
cuuaggaaauauauacuaaacu

SEQ ID NO: 663164 - RNA, 22 nt, Human
gggcacagcccagugggguccc

SEQ ID NO: 663165 - RNA, 22 nt, Human
cugauggagagugugauuuggg

SEQ ID NO: 663166 - RNA, 22 nt, Human
uacuuuaauauaugugaaguuc

SEQ ID NO: 663167 - RNA, 22 nt, Human
ugccacuggacccagaacucuu

SEQ ID NO: 663168 - RNA, 22 nt, Human
aaaguugcuggcuuugguucau

SEQ ID NO: 663169 - RNA, 22 nt, Human
acccugggugagaggcaaacag

SEQ ID NO: 663170 - RNA, 22 nt, Human
uuccuguauuuugcgaauuuuc

SEQ ID NO: 663171 - RNA, 22 nt, Human
aaaugcuauuugggaacaacau

SEQ ID NO: 663172 - RNA, 22 nt, Human
acacccagauuaugcacacaaa

SEQ ID NO: 663173 - RNA, 22 nt, Human
ugcaucuuuagucuuaugucug

SEQ ID NO: 663174 - RNA, 22 nt, Human
acagcacaaucugagucccaga

SEQ ID NO: 663175 - RNA, 22 nt, Human
guaaaacauguuuuaacuagga

SEQ ID NO: 663176 - RNA, 22 nt, Human
ucugcccucaggguaaugauca

SEQ ID NO: 663177 - RNA, 22 nt, Human
uggaugaguucaaugaggcaga

SEQ ID NO: 663178 - RNA, 22 nt, Human
aggguagcuacccaacuccaga

SEQ ID NO: 663179 - RNA, 22 nt, Human
acugucacuaacuaagucuagu

SEQ ID NO: 663180 - RNA, 22 nt, Human
ucugugcucuucucaguaucac

SEQ ID NO: 663181 - RNA, 22 nt, Human
gacacuuuaggauuuaaaaguc

SEQ ID NO: 663182 - RNA, 22 nt, Human
gccugagcagcuauacacacag

SEQ ID NO: 663183 - RNA, 22 nt, Human
auggcucuugaauugauacucu

SEQ ID NO: 663184 - RNA, 22 nt, Human
cucaggauggaagccuacagga

SEQ ID NO: 663185 - RNA, 22 nt, Human
guccagggcuaaaucagguucc

SEQ ID NO: 663186 - RNA, 22 nt, Human
cugugucuucacauuugugugc

SEQ ID NO: 663187 - RNA, 22 nt, Human
ugcuucuaaucuacugcauuag

SEQ ID NO: 663188 - RNA, 22 nt, Human
auauaggcuucaugacagaggg

SEQ ID NO: 663189 - RNA, 22 nt, Human
agccuuggccguaagguaugcu

SEQ ID NO: 663190 - RNA, 22 nt, Human
uacaaagauaguguuagaguaa

SEQ ID NO: 663191 - RNA, 22 nt, Human
uuccugugugacucaagugguu

SEQ ID NO: 663192 - RNA, 22 nt, Human
ugucuuuguguacaggaucgcc

SEQ ID NO: 663193 - RNA, 22 nt, Human
ucaagcaaagauacaaauggaa

SEQ ID NO: 663194 - RNA, 22 nt, Human
gaaaugcaggcuuggauucagc

SEQ ID NO: 663195 - RNA, 22 nt, Human
ucuuagaaguucauguuccagc

SEQ ID NO: 663196 - RNA, 22 nt, Human
uggcagaguaggauggcccugu

SEQ ID NO: 663197 - RNA, 22 nt, Human
aauguggacucuuguauuuuuc

SEQ ID NO: 663198 - RNA, 22 nt, Human
uccugggaagcgccggccugcg

SEQ ID NO: 663199 - RNA, 22 nt, Human
uuuucugcggugugaauggccu

SEQ ID NO: 663200 - RNA, 22 nt, Human
cucucugggggccaugccaaga

SEQ ID NO: 663201 - RNA, 22 nt, Human
ccugagguuuuuggauaguugu

SEQ ID NO: 663202 - RNA, 19 nt, Human
ugcagccacgugagagacu

SEQ ID NO: 663203 - RNA, 22 nt, Human
uuugauaauacacaagagaaag

SEQ ID NO: 663204 - RNA, 22 nt, Human
aagaauauagauuuuuugaagu

SEQ ID NO: 663205 - RNA, 22 nt, Human
caggaaggaccguccagaucag

SEQ ID NO: 663206 - RNA, 22 nt, Human
acaucaguaacuguaaaacagg

SEQ ID NO: 663207 - RNA, 22 nt, Human
aguagcaguuuggcugaauuua

SEQ ID NO: 663208 - RNA, 21 nt, Human
agagcacagguggacaaugcu

SEQ ID NO: 663209 - RNA, 23 nt, Human
auaauaacgucugucuugucucu

SEQ ID NO: 663210 - RNA, 22 nt, Human
caggcugcuguccacaaagcau

SEQ ID NO: 663211 - RNA, 22 nt, Human
gugauuucuaaucaucugaaug

SEQ ID NO: 663212 - RNA, 22 nt, Human
auuucucucauuguuagcuagg

SEQ ID NO: 663213 - RNA, 22 nt, Human
auguaacuguuauauuuuguug

SEQ ID NO: 663214 - RNA, 22 nt, Human
ccugccuuccagccuugggcuc

SEQ ID NO: 663215 - RNA, 22 nt, Human
acucuggcuauucacuauaaua

SEQ ID NO: 663216 - RNA, 19 nt, Human
aauugccugucucugccag

SEQ ID NO: 663217 - RNA, 19 nt, Human
uacauccggguuacuuaag

SEQ ID NO: 663218 - RNA, 22 nt, Human
ucagaguggugguuuugccuuc

SEQ ID NO: 663219 - RNA, 22 nt, Human
agcuuccugacuggugcucuua

SEQ ID NO: 663220 - RNA, 22 nt, Human
ugcugagguuucugacuaugga

SEQ ID NO: 663221 - RNA, 22 nt, Human
ugauuaaguucaaaauauagaa

SEQ ID NO: 663222 - RNA, 22 nt, Human
acaaaaagcuccauuacugucc

SEQ ID NO: 663223 - RNA, 21 nt, Human
uaaaagaugacaagacagcuc

SEQ ID NO: 663224 - RNA, 22 nt, Human
cugucuguuaucucaccagucc

SEQ ID NO: 663225 - RNA, 22 nt, Human
ugucugagucaugcagagauau

SEQ ID NO: 663226 - RNA, 22 nt, Human
uaaugccacggcagggaacagc

SEQ ID NO: 663227 - RNA, 22 nt, Human
uaguacagagacacuggaggaa

SEQ ID NO: 663228 - RNA, 22 nt, Human
agauuuuaguuuggggaggugc

SEQ ID NO: 663229 - RNA, 22 nt, Human
aggcuccaaauuaccaagcucu

SEQ ID NO: 663230 - RNA, 22 nt, Human
uugccugugaacgcugaguccu

SEQ ID NO: 663231 - RNA, 22 nt, Human
guucuaauauuuuaaaagccaa

SEQ ID NO: 663232 - RNA, 22 nt, Human
agcugucuuuggagagggagag

SEQ ID NO: 663233 - RNA, 22 nt, Human
gcucaggcaccauaugaugugu

SEQ ID NO: 663234 - RNA, 22 nt, Human
ccaggagaugggaaaguagcag

SEQ ID NO: 663235 - RNA, 22 nt, Human
cuggcucugggcuaagcuccca

SEQ ID NO: 663236 - RNA, 22 nt, Human
gagaguccuuaguuugcaggua

SEQ ID NO: 663237 - RNA, 22 nt, Human
aggcugaggggcgagggacccu

SEQ ID NO: 663238 - RNA, 22 nt, Human
ugucugcuaaauuacuauuaca

SEQ ID NO: 663239 - RNA, 22 nt, Human
cugcagcuuuggaaaccuguuu

SEQ ID NO: 663240 - RNA, 22 nt, Human
uaaguacauuugggaccaccug

SEQ ID NO: 663241 - RNA, 21 nt, Human
acugucauuugcuuagggagg

SEQ ID NO: 663242 - RNA, 22 nt, Human
gauccguuccaccagucuuuau

SEQ ID NO: 663243 - RNA, 22 nt, Human
cagcagugacaagacuaagaag

SEQ ID NO: 663244 - RNA, 22 nt, Human
ccucuguggccuuggaccagcu

SEQ ID NO: 663245 - RNA, 22 nt, Human
acuggcuugaaguagauucaaa

SEQ ID NO: 663246 - RNA, 22 nt, Human
gugugauaacagggcaugacgg

SEQ ID NO: 663247 - RNA, 22 nt, Human
acuucuuucacaauguuucuag

SEQ ID NO: 663248 - RNA, 22 nt, Human
aaacuuuuucuuagguaugucu

SEQ ID NO: 663249 - RNA, 22 nt, Human
gaucagugaacuauacugccuc

SEQ ID NO: 663250 - RNA, 22 nt, Human
aaucauuguugucguuccuaga

SEQ ID NO: 663251 - RNA, 22 nt, Human
gcuccuggucuggagcuucaag

SEQ ID NO: 663252 - RNA, 22 nt, Human
ucccggcgcugggagguggguc

SEQ ID NO: 663253 - RNA, 22 nt, Human
aggaagcugggguguucuucau

SEQ ID NO: 663254 - RNA, 22 nt, Human
ucuguuagagagguaguucuug

SEQ ID NO: 663255 - RNA, 22 nt, Human
agggagcugacuggcugccauu

SEQ ID NO: 663256 - RNA, 22 nt, Human
cacccacugagcucauguccca

SEQ ID NO: 663257 - RNA, 22 nt, Human
acauucaugcaccuuccuaucc

SEQ ID NO: 663258 - RNA, 22 nt, Human
uuacaaucaucuaggauaaaga

SEQ ID NO: 663259 - RNA, 22 nt, Human
gccaccuccuuauuccaccugu

SEQ ID NO: 663260 - RNA, 22 nt, Human
caauaauauccugugcuguuug

SEQ ID NO: 663261 - RNA, 22 nt, Human
cugguggagggacaggcuuagc

SEQ ID NO: 663262 - RNA, 22 nt, Human
ucucagggcaauucucagcgac

SEQ ID NO: 663263 - RNA, 22 nt, Human
cuccagugagcgcggggcaugg

SEQ ID NO: 663264 - RNA, 22 nt, Human
ccagcccuuagauaaaccuggc

SEQ ID NO: 663265 - RNA, 19 nt, Human
uggcuuccugacucucauc

SEQ ID NO: 663266 - RNA, 22 nt, Human
cacacaugugagcagagaggcg

SEQ ID NO: 663267 - RNA, 22 nt, Human
ugcagguaaauuuguggaggau

SEQ ID NO: 663268 - RNA, 22 nt, Human
ugcucacugaacucuugcuguc

SEQ ID NO: 663269 - RNA, 22 nt, Human
cuauuuauuguggguauccagg

SEQ ID NO: 663270 - RNA, 22 nt, Human
ccuuggcuguguugccugcccu

SEQ ID NO: 663271 - RNA, 22 nt, Human
uccagcugacaucuccugaggg

SEQ ID NO: 663272 - RNA, 22 nt, Human
acacaagucccuccauacucuc

SEQ ID NO: 663273 - RNA, 22 nt, Human
uuucaaagcaacugaaaaggaa

SEQ ID NO: 663274 - RNA, 22 nt, Human
cugucaguaggcucccaucauu

SEQ ID NO: 663275 - RNA, 22 nt, Human
uucaacuagauuuauacaauuc

SEQ ID NO: 663276 - RNA, 19 nt, Human
uuuagacauugucugguau

SEQ ID NO: 663277 - RNA, 22 nt, Human
cacauuguauuguggaaaguua

SEQ ID NO: 663278 - RNA, 22 nt, Human
uggcugccuucccugcuggagg

SEQ ID NO: 663279 - RNA, 22 nt, Human
uaggaugugccaggaaagaaag

SEQ ID NO: 663280 - RNA, 22 nt, Human
gugcaaaaugauauccugaagc

SEQ ID NO: 663281 - RNA, 22 nt, Human
ucagcucucacagaucucaacc

SEQ ID NO: 663282 - RNA, 22 nt, Human
aaagagcucuuacucuagugua

SEQ ID NO: 663283 - RNA, 22 nt, Human
aggaaugucauagaauaaucau

SEQ ID NO: 663284 - RNA, 22 nt, Human
uggcagcugaggggaggcuuug

SEQ ID NO: 663285 - RNA, 22 nt, Human
gacuggaaucccaggcucugug

SEQ ID NO: 663286 - RNA, 22 nt, Human
aaugcuuuuugcgaaaugugca

SEQ ID NO: 663287 - RNA, 22 nt, Human
uaaaugauaauaaugcuagugu

SEQ ID NO: 663288 - RNA, 22 nt, Human
gccuggagaauuaaaaggaagg

SEQ ID NO: 663289 - RNA, 22 nt, Human
ggcuccaggaaccuccucuccu

SEQ ID NO: 663290 - RNA, 22 nt, Human
auucagcauucauuaugcgcca

SEQ ID NO: 663291 - RNA, 21 nt, Human
aggaggagagcuuggccuacc

SEQ ID NO: 663292 - RNA, 22 nt, Human
aagaaucauccugcaagagucu

SEQ ID NO: 663293 - RNA, 22 nt, Human
cuguccagucagaacgucauua

SEQ ID NO: 663294 - RNA, 22 nt, Human
ucagccagcauuaccccugacu

SEQ ID NO: 663295 - RNA, 22 nt, Human
gcuuucuugguucugcaggggc

SEQ ID NO: 663296 - RNA, 22 nt, Human
gccuucaggugcugccaggcua

SEQ ID NO: 663297 - RNA, 22 nt, Human
aauggcuuuggcaggaauuuca

SEQ ID NO: 663298 - RNA, 19 nt, Human
ggcucuggcggcuguagcc

SEQ ID NO: 663299 - RNA, 22 nt, Human
cucagucaugacgcucaggacc

SEQ ID NO: 663300 - RNA, 22 nt, Human
cagugugacuucugagcugcca

SEQ ID NO: 663301 - RNA, 22 nt, Human
gauuucaaguaucuugggcgag

SEQ ID NO: 663302 - RNA, 22 nt, Human
cagcucucuaaggucuugcuuu

SEQ ID NO: 663303 - RNA, 22 nt, Human
ucagggcaaugucccucagaag

SEQ ID NO: 663304 - RNA, 22 nt, Human
ccugagagugcgugccuccuua

SEQ ID NO: 663305 - RNA, 22 nt, Human
uggcuggagggacccacucaga

SEQ ID NO: 663306 - RNA, 22 nt, Human
cuucugggagagcuuuugcuuc

SEQ ID NO: 663307 - RNA, 22 nt, Human
aaggcuuuuguuccuauuuagu

SEQ ID NO: 663308 - RNA, 22 nt, Human
ggaggaccugcuggcccugcaa

SEQ ID NO: 663309 - RNA, 22 nt, Human
acugccugcucauaacauugcu

SEQ ID NO: 663310 - RNA, 22 nt, Human
gagguggcccuugcucagccuu

SEQ ID NO: 663311 - RNA, 22 nt, Human
guggcagucaucaaggacagau

SEQ ID NO: 663312 - RNA, 21 nt, Human
cucuccagugguuccugauuc

SEQ ID NO: 663313 - RNA, 22 nt, Human
ccugagugcuuccagagucaug

SEQ ID NO: 663314 - RNA, 22 nt, Human
aggcuuguggauuggagcgagu

SEQ ID NO: 663315 - RNA, 22 nt, Human
cugggacuggguccucaggaca

SEQ ID NO: 663316 - RNA, 22 nt, Human
gaagcugaggucaggugggugg

SEQ ID NO: 663317 - RNA, 22 nt, Human
aggacccugagcgggcaugccg

SEQ ID NO: 663318 - RNA, 22 nt, Human
cccucacuucacgcucugcaga

SEQ ID NO: 663319 - RNA, 22 nt, Human
uuccugcuccauuugcugagcu

SEQ ID NO: 663320 - RNA, 19 nt, Human
aaaaagaggcuauaauauu

SEQ ID NO: 663321 - RNA, 22 nt, Human
cagcucugugcaggccugggga

SEQ ID NO: 663322 - RNA, 22 nt, Human
agggaaauuaaugugagcaaug

SEQ ID NO: 663323 - RNA, 22 nt, Human
gccuggcucugagggagcuccu

SEQ ID NO: 663324 - RNA, 22 nt, Human
auguccaauuucagagucucau

SEQ ID NO: 663325 - RNA, 22 nt, Human
ugcagggaaucuguggcuggac

SEQ ID NO: 663326 - RNA, 22 nt, Human
gcagcccacaccacucugcuca

SEQ ID NO: 663327 - RNA, 18 nt, Human
cuuccucaucgcucuccc

SEQ ID NO: 663328 - RNA, 22 nt, Human
agcagaagugccuuagcaauca

SEQ ID NO: 663329 - RNA, 22 nt, Human
aagguacagaaauuaacaagga

SEQ ID NO: 663330 - RNA, 22 nt, Human
uaguagugagucuuuauaaaua

SEQ ID NO: 663331 - RNA, 22 nt, Human
uuagcuuucuuuggcagacgug

SEQ ID NO: 663332 - RNA, 19 nt, Human
agcuacagcauggcgaggu

SEQ ID NO: 663333 - RNA, 22 nt, Human
agcuguuuucuucuaggaagac

SEQ ID NO: 663334 - RNA, 21 nt, Human
ucacugcaaugcuaggagaaa

SEQ ID NO: 663335 - RNA, 22 nt, Human
auguacauacugcauuuucaaa

SEQ ID NO: 663336 - RNA, 23 nt, Human
acucagcuuugggagaugacuca

SEQ ID NO: 663337 - RNA, 22 nt, Human
cuccucuuuggggauuuacaca

SEQ ID NO: 663338 - RNA, 22 nt, Human
ggucucagcccucgccagcagc

SEQ ID NO: 663339 - RNA, 22 nt, Human
gcugcaggcagaaucucccaau

SEQ ID NO: 663340 - RNA, 22 nt, Human
gacaugcaguucucaaggguag

SEQ ID NO: 663341 - RNA, 22 nt, Human
ugaggaggucagagucuggcug

SEQ ID NO: 663342 - RNA, 22 nt, Human
cagauguaauuacucaagucaa

SEQ ID NO: 663343 - RNA, 21 nt, Human
uuuacugagcacuuacuaugu

SEQ ID NO: 663344 - RNA, 22 nt, Human
ggacugaaaucuuuccauguca

SEQ ID NO: 663345 - RNA, 22 nt, Human
caguggccucuggcuuugcugu

SEQ ID NO: 663346 - RNA, 21 nt, Human
gugcugggacacagccaggcu

SEQ ID NO: 663347 - RNA, 22 nt, Human
gagaggagaagccugcgcuuca

SEQ ID NO: 663348 - RNA, 18 nt, Human
ucuguguucugucauugc

SEQ ID NO: 663349 - RNA, 22 nt, Human
ucaggaagcugaauuacaaaaa

SEQ ID NO: 663350 - RNA, 22 nt, Human
augaugcuguuuaucauauacu

SEQ ID NO: 663351 - RNA, 22 nt, Human
gaaugaaagauuugcauucuau

SEQ ID NO: 663352 - RNA, 22 nt, Human
aucaccauugaaaaacagguuu

SEQ ID NO: 663353 - RNA, 22 nt, Human
ucuagaaucuaaacuauaguuu

SEQ ID NO: 663354 - RNA, 22 nt, Human
ucauggcuaaccaaggccugau

SEQ ID NO: 663355 - RNA, 22 nt, Human
ucccacacagcccgcucaccgg

SEQ ID NO: 663356 - RNA, 22 nt, Human
ugcuucugcugauauuuuguga

SEQ ID NO: 663357 - RNA, 22 nt, Human
gcacaguuaaagggucauguga

SEQ ID NO: 663358 - RNA, 22 nt, Human
guuugaaaugucugcaagggaa

SEQ ID NO: 663359 - RNA, 22 nt, Human
ugaggcacauccaggccagcuc

SEQ ID NO: 663360 - RNA, 22 nt, Human
cacaaauaccaguuuccuaaca

SEQ ID NO: 663361 - RNA, 22 nt, Human
uaaacagaauucaggcaagaua

SEQ ID NO: 663362 - RNA, 22 nt, Human
ucugagauuaagcagagaugga

SEQ ID NO: 663363 - RNA, 20 nt, Human
caggccucugggggcccugg

SEQ ID NO: 663364 - RNA, 22 nt, Human
aggaguuauggcagaaucaaau

SEQ ID NO: 663365 - RNA, 19 nt, Human
ccuggagucgcgcugccuc

SEQ ID NO: 663366 - RNA, 22 nt, Human
uaagcuaacguccauggaaaug

SEQ ID NO: 663367 - RNA, 22 nt, Human
aacuacagcucuugucuuucug

SEQ ID NO: 663368 - RNA, 21 nt, Human
aaaaggaggcaggugaacagc

SEQ ID NO: 663369 - RNA, 22 nt, Human
uacuuucaugucuauacauauu

SEQ ID NO: 663370 - RNA, 22 nt, Human
agucacauagaaguggguuuaa

SEQ ID NO: 663371 - RNA, 22 nt, Human
auggaagguccuacagagcgca

SEQ ID NO: 663372 - RNA, 22 nt, Human
gugugguggcccuccuucaggc

SEQ ID NO: 663373 - RNA, 22 nt, Human
agugcuuugaacgaaaggcuga

SEQ ID NO: 663374 - RNA, 18 nt, Human
ggucuuuaggucaguguc

SEQ ID NO: 663375 - RNA, 22 nt, Human
aggccuggccccaguugcuagg

SEQ ID NO: 663376 - RNA, 22 nt, Human
gauaaacacaaggugauuucau

SEQ ID NO: 663377 - RNA, 22 nt, Human
aaauuaucaugauuauugugua

SEQ ID NO: 663378 - RNA, 22 nt, Human
gcugguuuccuuaucuauaaag

SEQ ID NO: 663379 - RNA, 22 nt, Human
gguccaaggcucgguggcgggg

SEQ ID NO: 663380 - RNA, 22 nt, Human
aaggcagauaagaauucagcaa

SEQ ID NO: 663381 - RNA, 23 nt, Human
cauaaaauauuaguaugguagca

SEQ ID NO: 663382 - RNA, 22 nt, Human
ucucucucagccauuacagaac

SEQ ID NO: 663383 - RNA, 19 nt, Human
gcagaugaugaggcugguc

SEQ ID NO: 663384 - RNA, 22 nt, Human
ucuccucuccuuucauguuguu

SEQ ID NO: 663385 - RNA, 22 nt, Human
gugagcuggaauaguggagaaa

SEQ ID NO: 663386 - RNA, 22 nt, Human
uugauucuaaaauaggaggaaa

SEQ ID NO: 663387 - RNA, 22 nt, Human
gccagcagggcccaaaugcugg

SEQ ID NO: 663388 - RNA, 22 nt, Human
uggcagacacugucgaagccua

SEQ ID NO: 663389 - RNA, 23 nt, Human
auguggcuagugagaccaagaaa

SEQ ID NO: 663390 - RNA, 18 nt, Human
cucugaaagacacaccag

SEQ ID NO: 663391 - RNA, 22 nt, Human
cuuuaugaaccuguucagcuug

SEQ ID NO: 663392 - RNA, 22 nt, Human
gccuuucagugccuucuguuca

SEQ ID NO: 663393 - RNA, 22 nt, Human
uucugagauuguuaggcacuaa

SEQ ID NO: 663394 - RNA, 22 nt, Human
uuccugguuuauaccuguauca

SEQ ID NO: 663395 - RNA, 22 nt, Human
uacacacugugauaaugaagca

SEQ ID NO: 663396 - RNA, 22 nt, Human
gugccuccuuaaauucugcacc

SEQ ID NO: 663397 - RNA, 22 nt, Human
ccagcaucgacuuccugccuga

SEQ ID NO: 663398 - RNA, 22 nt, Human
cccagagcucagugugcaaggu

SEQ ID NO: 663399 - RNA, 22 nt, Human
uggguggagcuccacaaccugu

SEQ ID NO: 663400 - RNA, 21 nt, Human
auuuagaaggaaauuuugcaa

SEQ ID NO: 663401 - RNA, 22 nt, Human
ucaucacucauuggacaacaga

SEQ ID NO: 663402 - RNA, 22 nt, Human
ggcucuggagauguccgaccug

SEQ ID NO: 663403 - RNA, 20 nt, Human
auagauaucaucuuuagaag

SEQ ID NO: 663404 - RNA, 22 nt, Human
aguguuuaaacugaagugauga

SEQ ID NO: 663405 - RNA, 22 nt, Human
cucagaaaaccucuuucuugau

SEQ ID NO: 663406 - RNA, 22 nt, Human
ucagcugccuuucccaugcuag

SEQ ID NO: 663407 - RNA, 22 nt, Human
acaguaaugcauacaaguuagu

SEQ ID NO: 663408 - RNA, 22 nt, Human
ugugugugaguccuggcuuucc

SEQ ID NO: 663409 - RNA, 22 nt, Human
ccugggguauauaggugaauau

SEQ ID NO: 663410 - RNA, 22 nt, Human
acacaugaguucucaucuugug

SEQ ID NO: 663411 - RNA, 22 nt, Human
acagagcuucccagccugagca

SEQ ID NO: 663412 - RNA, 22 nt, Human
gugcuuuucugcaggguccuau

SEQ ID NO: 663413 - RNA, 22 nt, Human
acugucaggauggcagcuuguu

SEQ ID NO: 663414 - RNA, 21 nt, Human
ugcaagcagcagagauauggg

SEQ ID NO: 663415 - RNA, 22 nt, Human
agggcugacaaauggcagugac

SEQ ID NO: 663416 - RNA, 22 nt, Human
ugggaguguucuuggcuugcuu

SEQ ID NO: 663417 - RNA, 18 nt, Human
auggcucaggaauggcuu

SEQ ID NO: 663418 - RNA, 22 nt, Human
acagccugacuuuuguugucac

SEQ ID NO: 663419 - RNA, 22 nt, Human
agcuuacaccccccaagauucu

SEQ ID NO: 663420 - RNA, 22 nt, Human
gguuuauuaaugugaacuguau

SEQ ID NO: 663421 - RNA, 22 nt, Human
cagggucaagagacuccagcag

SEQ ID NO: 663422 - RNA, 22 nt, Human
ucucugccacagcuucugccuu

SEQ ID NO: 663423 - RNA, 22 nt, Human
aucuuaaucgaguccaugaaaa

SEQ ID NO: 663424 - RNA, 22 nt, Human
ggcagcugugaagugccucaca

SEQ ID NO: 663425 - RNA, 22 nt, Human
aaaugguccauccuaaagaagu

SEQ ID NO: 663426 - RNA, 22 nt, Human
gcagugacagggcugcugccuu

SEQ ID NO: 663427 - RNA, 21 nt, Human
auuauuauuucuguguccagc

SEQ ID NO: 663428 - RNA, 22 nt, Human
aaguguaaauucacagacuuca

SEQ ID NO: 663429 - RNA, 22 nt, Human
aguuuuccuuuauugaguacca

SEQ ID NO: 663430 - RNA, 22 nt, Human
gaacaugaaaagucuuacacgc

SEQ ID NO: 663431 - RNA, 22 nt, Human
auccuugaacuuagacacuagg

SEQ ID NO: 663432 - RNA, 22 nt, Human
cucaagucagaaauaaaagcau

SEQ ID NO: 663433 - RNA, 22 nt, Human
uaucaacaaaggccuuguguuu

SEQ ID NO: 663434 - RNA, 22 nt, Human
aacaugauaguauuuugaggug

SEQ ID NO: 663435 - RNA, 22 nt, Human
aggggaugccuaguggagucuc

SEQ ID NO: 663436 - RNA, 22 nt, Human
gugcuuuauauguggguaucca

SEQ ID NO: 663437 - RNA, 20 nt, Human
cuacacaggguucgcugggc

SEQ ID NO: 663438 - RNA, 22 nt, Human
agccugccuugggcugcuugag

SEQ ID NO: 663439 - RNA, 19 nt, Human
acuugaaagcagagaguuu

SEQ ID NO: 663440 - RNA, 22 nt, Human
ugacugagagagaacucagcuu

SEQ ID NO: 663441 - RNA, 22 nt, Human
ucaugcccagagcaguaaauua

SEQ ID NO: 663442 - RNA, 22 nt, Human
uuugcauuuccagaguagcaga

SEQ ID NO: 663443 - RNA, 22 nt, Human
auuccuuggaacagaugcgaag

SEQ ID NO: 663444 - RNA, 22 nt, Human
gguggcucucugucagugacag

SEQ ID NO: 663445 - RNA, 22 nt, Human
augcaaauugccauaaaguggg

SEQ ID NO: 663446 - RNA, 22 nt, Human
aagaauuuuccagcaugucagu

SEQ ID NO: 663447 - RNA, 22 nt, Human
aaaaaagauugaugguggaugc

SEQ ID NO: 663448 - RNA, 22 nt, Human
gugguuguuuaggucguggauc

SEQ ID NO: 663449 - RNA, 22 nt, Human
cuccugacuugugagccccucc

SEQ ID NO: 663450 - RNA, 22 nt, Human
aguuucacaugcauggaugugu

SEQ ID NO: 663451 - RNA, 22 nt, Human
aggaggccugcagcugccauuc

SEQ ID NO: 663452 - RNA, 22 nt, Human
cugccuccugccgugcagcuuc

SEQ ID NO: 663453 - RNA, 22 nt, Human
gaggcccugaagacagcugggg

SEQ ID NO: 663454 - RNA, 22 nt, Human
uggcaucuccgacagucuugau

SEQ ID NO: 663455 - RNA, 22 nt, Human
aacaugugucuugcauuucuug

SEQ ID NO: 663456 - RNA, 22 nt, Human
aggagaccuuuugagugugaga

SEQ ID NO: 663457 - RNA, 22 nt, Human
uguccucuuccagugcuccuuc

SEQ ID NO: 663458 - RNA, 21 nt, Human
uggaaaacauuuaaauagcaa

SEQ ID NO: 663459 - RNA, 22 nt, Human
ucauauuuggggguguguguuu

SEQ ID NO: 663460 - RNA, 22 nt, Human
ugaggugguuuguaucacuggg

SEQ ID NO: 663461 - RNA, 22 nt, Human
uguggagacuauagccauaaca

SEQ ID NO: 663462 - RNA, 22 nt, Human
ugagcccucuucccauuuuauu

SEQ ID NO: 663463 - RNA, 22 nt, Human
acuguccauaauauuggugaac

SEQ ID NO: 663464 - RNA, 22 nt, Human
cagaaguggcaucauucaagag

SEQ ID NO: 663465 - RNA, 22 nt, Human
uuggcaucaguguaggaccugu

SEQ ID NO: 663466 - RNA, 22 nt, Human
gagcccugagaguugugaggcc

SEQ ID NO: 663467 - RNA, 22 nt, Human
uucuaaagccuguccuaucaga

SEQ ID NO: 663468 - RNA, 22 nt, Human
uguaaggugcucauguauuucu

SEQ ID NO: 663469 - RNA, 22 nt, Human
ggaggacugagacacuccuggc

SEQ ID NO: 663470 - RNA, 22 nt, Human
gcccagcuccucugcagacccu

SEQ ID NO: 663471 - RNA, 22 nt, Human
aguaugaauacagauuuucucu

SEQ ID NO: 663472 - RNA, 22 nt, Human
agcuaagguguccuggaggccc

SEQ ID NO: 663473 - RNA, 22 nt, Human
acuuucaagcccucuagagaca

SEQ ID NO: 663474 - RNA, 22 nt, Human
ccaggcacucagagacugggac

SEQ ID NO: 663475 - RNA, 23 nt, Human
cagcugguugugggaguggcugc

SEQ ID NO: 663476 - RNA, 23 nt, Human
uuacaacaguguccauauuugua

SEQ ID NO: 663477 - RNA, 22 nt, Human
cccaagggagugccuggucaac

SEQ ID NO: 663478 - RNA, 20 nt, Human
ugggagcuggugaggucuca

SEQ ID NO: 663479 - RNA, 22 nt, Human
agggcaauggacuacaaaaggu

SEQ ID NO: 663480 - RNA, 22 nt, Human
uagugggugauuugaugaggaa

SEQ ID NO: 663481 - RNA, 22 nt, Human
cauaacauguacauauaaaugc

SEQ ID NO: 663482 - RNA, 20 nt, Human
cuucaggacccauccucccc

SEQ ID NO: 663483 - RNA, 22 nt, Human
ucaggccuccagguuaccauuu

SEQ ID NO: 663484 - RNA, 18 nt, Human
uccagagcuacuguggug

SEQ ID NO: 663485 - RNA, 19 nt, Human
ucugucagugcaucaccuc

SEQ ID NO: 663486 - RNA, 22 nt, Human
gcccuccauggugauccaggcc

SEQ ID NO: 663487 - RNA, 22 nt, Human
uuucugauaauuuugugaaauc

SEQ ID NO: 663488 - RNA, 22 nt, Human
uccccacagcagaagaucugag

SEQ ID NO: 663489 - RNA, 22 nt, Human
acacaguaugacauuggcagag

SEQ ID NO: 663490 - RNA, 20 nt, Human
cucauguggcaccaggcacu

SEQ ID NO: 663491 - RNA, 22 nt, Human
ugcuggaagaauuccaugcugg

SEQ ID NO: 663492 - RNA, 22 nt, Human
cugggggugagcagcagcgacg

SEQ ID NO: 663493 - RNA, 22 nt, Human
uaggguccauauggaugaaugg

SEQ ID NO: 663494 - RNA, 22 nt, Human
gaaccacaaugugaagaaggag

SEQ ID NO: 663495 - RNA, 22 nt, Human
gugucugugucauuacuaauag

SEQ ID NO: 663496 - RNA, 22 nt, Human
ggacaagccucagacaaaacuc

SEQ ID NO: 663497 - RNA, 22 nt, Human
aggccaggggugagcacuucug

SEQ ID NO: 663498 - RNA, 22 nt, Human
cacauuuaggagguggggaagc

SEQ ID NO: 663499 - RNA, 22 nt, Human
ggcaugggagugagcaaccuua

SEQ ID NO: 663500 - RNA, 22 nt, Human
caaagucagcugccagucccaa

SEQ ID NO: 663501 - RNA, 22 nt, Human
cuggcuucccugucuuauggaa

SEQ ID NO: 663502 - RNA, 22 nt, Human
agggccuggcgcguggccgccg

SEQ ID NO: 663503 - RNA, 22 nt, Human
cacagaggaugcccaagcgauc

SEQ ID NO: 663504 - RNA, 22 nt, Human
ucuccugucuucucagcacccc

SEQ ID NO: 663505 - RNA, 22 nt, Human
gaaacguuggcauaaguuuaug

SEQ ID NO: 663506 - RNA, 22 nt, Human
caggcaaggagcuggcucaagu

SEQ ID NO: 663507 - RNA, 22 nt, Human
cuaaagcaacugagacacauag

SEQ ID NO: 663508 - RNA, 22 nt, Human
acaaaauuguguuaaacuuuau

SEQ ID NO: 663509 - RNA, 22 nt, Human
cccagugucaccaacaggacac

SEQ ID NO: 663510 - RNA, 22 nt, Human
aacccaggucuuuggcuuccag

SEQ ID NO: 663511 - RNA, 19 nt, Human
caggaaacaccuacugcua

SEQ ID NO: 663512 - RNA, 22 nt, Human
agugauggugagugagaagcuc

SEQ ID NO: 663513 - RNA, 16 nt, Human
acuuccaggggagccc

SEQ ID NO: 663514 - RNA, 22 nt, Human
uaggaauugcccgugggguccu

SEQ ID NO: 663515 - RNA, 22 nt, Human
gcuggccucuggagaagggcuu

SEQ ID NO: 663516 - RNA, 22 nt, Human
guggccaggagaccuugggcau

SEQ ID NO: 663517 - RNA, 22 nt, Human
uaugaguguguguagaagguac

SEQ ID NO: 663518 - RNA, 22 nt, Human
uacugugguaacauuuuaaauu

SEQ ID NO: 663519 - RNA, 22 nt, Human
uuagccagugaaauggagaaau

SEQ ID NO: 663520 - RNA, 22 nt, Human
uuagggaaacaaacauuuucuu

SEQ ID NO: 663521 - RNA, 22 nt, Human
cuuuggaggucauagccaagag

SEQ ID NO: 663522 - RNA, 22 nt, Human
uucugcauggagaaacugaguc

SEQ ID NO: 663523 - RNA, 22 nt, Human
auagaagcuuuuaaauaacagg

SEQ ID NO: 663524 - RNA, 22 nt, Human
cuucucagcaugguuacuguga

SEQ ID NO: 663525 - RNA, 22 nt, Human
gcaaugauugcauuagaagaug

SEQ ID NO: 663526 - RNA, 22 nt, Human
uaacacuugggggcauccuuag

SEQ ID NO: 663527 - RNA, 22 nt, Human
uucugaaagucuuuuuaaguua

SEQ ID NO: 663528 - RNA, 22 nt, Human
aaaugcacagaggccagagagg

SEQ ID NO: 663529 - RNA, 22 nt, Human
guuuuauaugucucugcugaca

SEQ ID NO: 663530 - RNA, 22 nt, Human
acagggaccuuggaagcuggaa

SEQ ID NO: 663531 - RNA, 22 nt, Human
ccaggaggcagagguuacagug

SEQ ID NO: 663532 - RNA, 22 nt, Human
ucugccugagcagagggaggcc

SEQ ID NO: 663533 - RNA, 22 nt, Human
acacuggagcuucuagcccacg

SEQ ID NO: 663534 - RNA, 22 nt, Human
uccuucaaucacccagugggga

SEQ ID NO: 663535 - RNA, 22 nt, Human
uuucuagacucaaagaggauau

SEQ ID NO: 663536 - RNA, 22 nt, Human
cuuuagguuuugccugagaucu

SEQ ID NO: 663537 - RNA, 22 nt, Human
auaagguuaacaucaucaguga

SEQ ID NO: 663538 - RNA, 22 nt, Human
ugcaagaggaauucuagaagca

SEQ ID NO: 663539 - RNA, 17 nt, Human
acacugacaugccacac

SEQ ID NO: 663540 - RNA, 22 nt, Human
agcauaaaggcacuagaaagag

SEQ ID NO: 663541 - RNA, 23 nt, Human
agcugaggcagaggggcauucuc

SEQ ID NO: 663542 - RNA, 22 nt, Human
aagggcaggcagagaucauaua

SEQ ID NO: 663543 - RNA, 22 nt, Human
aaguaaauaucuguuuauagca

SEQ ID NO: 663544 - RNA, 22 nt, Human
uuuauaguagcaugauuuauag

SEQ ID NO: 663545 - RNA, 22 nt, Human
ggugggcagcucuuggcaggca

SEQ ID NO: 663546 - RNA, 23 nt, Human
gcugucaguuguuuuugucucua

SEQ ID NO: 663547 - RNA, 22 nt, Human
cuagggacugggaccuuaguua

SEQ ID NO: 663548 - RNA, 22 nt, Human
aauuccagucucugcucuauuu

SEQ ID NO: 663549 - RNA, 22 nt, Human
cucccuggggcuccuccuauuu

SEQ ID NO: 663550 - RNA, 21 nt, Human
guccacagggguuuguccugg

SEQ ID NO: 663551 - RNA, 22 nt, Human
caagagcucaccggagagcauu

SEQ ID NO: 663552 - RNA, 22 nt, Human
ccugccucaggacucugcauau

SEQ ID NO: 663553 - RNA, 22 nt, Human
uccaggacagcggcaggcagau

SEQ ID NO: 663554 - RNA, 22 nt, Human
cccaugcacccucuaagaagga

SEQ ID NO: 663555 - RNA, 22 nt, Human
guucuaauuuggggcuccuuag

SEQ ID NO: 663556 - RNA, 22 nt, Human
acaggaaguuuggaaagccuca

SEQ ID NO: 663557 - RNA, 22 nt, Human
agcuggggguagugagaaauaa

SEQ ID NO: 663558 - RNA, 22 nt, Human
uuuguucauaauggcaaagaga

SEQ ID NO: 663559 - RNA, 22 nt, Human
gugcugaagugaaauucaucaa

SEQ ID NO: 663560 - RNA, 22 nt, Human
uguuucaugaagucuggauauc

SEQ ID NO: 663561 - RNA, 22 nt, Human
cagcuucaacugcacagucaac

SEQ ID NO: 663562 - RNA, 22 nt, Human
aggcucugagucuggugucugc

SEQ ID NO: 663563 - RNA, 22 nt, Human
augugaagcuugugcuaacaua

SEQ ID NO: 663564 - RNA, 22 nt, Human
ugggagaugguucugagacuuu

SEQ ID NO: 663565 - RNA, 22 nt, Human
gcuuuggaaggggcugguggag

SEQ ID NO: 663566 - RNA, 22 nt, Human
ugaaagcauuagucuaagguag

SEQ ID NO: 663567 - RNA, 22 nt, Human
auuguagcccaugcauaaaccg

SEQ ID NO: 663568 - RNA, 23 nt, Human
agaucacaugcugauggaaaaug

SEQ ID NO: 663569 - RNA, 22 nt, Human
ucccucucuggcuggggugcgg

SEQ ID NO: 663570 - RNA, 22 nt, Human
uguccccugcccagggauggga

SEQ ID NO: 663571 - RNA, 18 nt, Human
gagguggcugggccaucu

SEQ ID NO: 663572 - RNA, 22 nt, Human
uccauccacauuaacagauacg

SEQ ID NO: 663573 - RNA, 22 nt, Human
ugcagcauuugcugaagcagga

SEQ ID NO: 663574 - RNA, 22 nt, Human
gagguccucuguguccgcgggc

SEQ ID NO: 663575 - RNA, 22 nt, Human
uaaagguagcaugaaacugcaa

SEQ ID NO: 663576 - RNA, 22 nt, Human
gcagaaacuuggagaagccagg

SEQ ID NO: 663577 - RNA, 22 nt, Human
uguccaccgguccugugauggg

SEQ ID NO: 663578 - RNA, 18 nt, Human
uacaguauuuucucgccu

SEQ ID NO: 663579 - RNA, 22 nt, Human
acagauuuuugguaaauaauuu

SEQ ID NO: 663580 - RNA, 22 nt, Human
uggccugccugggagcagcagg

SEQ ID NO: 663581 - RNA, 22 nt, Human
ugccaggccaauucuauuugac

SEQ ID NO: 663582 - RNA, 22 nt, Human
ucagagagugcaaaauauagcu

SEQ ID NO: 663583 - RNA, 22 nt, Human
aacccauguuggaagcuuauca

SEQ ID NO: 663584 - RNA, 22 nt, Human
ucauuuccucaaauucaagguu

SEQ ID NO: 663585 - RNA, 22 nt, Human
uuuaacaugugaauuuuggaag

SEQ ID NO: 663586 - RNA, 22 nt, Human
gcuggagcgugauccuugaucu

SEQ ID NO: 663587 - RNA, 22 nt, Human
ccugaagaaaauuccacgagaa

SEQ ID NO: 663588 - RNA, 22 nt, Human
cagcagguccugggcguggccu

SEQ ID NO: 663589 - RNA, 18 nt, Human
guguaaacagccauugag

SEQ ID NO: 663590 - RNA, 22 nt, Human
uccugggaaguggcuggcugag

SEQ ID NO: 663591 - RNA, 22 nt, Human
gaagacacucugcagaguuauc

SEQ ID NO: 663592 - RNA, 22 nt, Human
aguccuggguucugguguuuug

SEQ ID NO: 663593 - RNA, 17 nt, Human
cagugaggccuuuccuc

SEQ ID NO: 663594 - RNA, 19 nt, Human
cccuggaggaguguuggcu

SEQ ID NO: 663595 - RNA, 22 nt, Human
acagugcuggcuacaacccugg

SEQ ID NO: 663596 - RNA, 22 nt, Human
uccagccaagccuugguagcug

SEQ ID NO: 663597 - RNA, 21 nt, Human
uccaaaaaggagcguccuucu

SEQ ID NO: 663598 - RNA, 22 nt, Human
gugaagagcuguugcagagauu

SEQ ID NO: 663599 - RNA, 22 nt, Human
cccagcucugcagaccugcccu

SEQ ID NO: 663600 - RNA, 22 nt, Human
cgaggcaggcaggcggaggaua

SEQ ID NO: 663601 - RNA, 22 nt, Human
augcagagcuuccaguggccug

SEQ ID NO: 663602 - RNA, 22 nt, Human
gcaaaaguacagccggauuucu

SEQ ID NO: 663603 - RNA, 22 nt, Human
ucaaagucauggcaggcucaga

SEQ ID NO: 663604 - RNA, 22 nt, Human
ccaguccauauuuauacugccg

SEQ ID NO: 663605 - RNA, 22 nt, Human
cugccugccuggagacagaugg

SEQ ID NO: 663606 - RNA, 22 nt, Human
ggccaggaagggaagaucagca

SEQ ID NO: 663607 - RNA, 22 nt, Human
ggcaaggccuugcccagcauuc

SEQ ID NO: 663608 - RNA, 22 nt, Human
ucauuuauauuguauucuguag

SEQ ID NO: 663609 - RNA, 22 nt, Human
uggcagcacauugacccgggcu

SEQ ID NO: 663610 - RNA, 22 nt, Human
uccuccagggggaucuucagcc

SEQ ID NO: 663611 - RNA, 22 nt, Human
guucugcugugucucagcaggu

SEQ ID NO: 663612 - RNA, 16 nt, Human
uagagagggcagggag

SEQ ID NO: 663613 - RNA, 22 nt, Human
agccuggauccauguggcuacc

SEQ ID NO: 663614 - RNA, 22 nt, Human
agcuguaauauaagcaaugaaa

SEQ ID NO: 663615 - RNA, 22 nt, Human
uaccuggaauuuauauagcuau

SEQ ID NO: 663616 - RNA, 22 nt, Human
caucacaugccuaucaugagcu

SEQ ID NO: 663617 - RNA, 23 nt, Human
uuuaugcugugauucacccagcc

SEQ ID NO: 663618 - RNA, 19 nt, Human
acuagauacaacaugcaga

SEQ ID NO: 663619 - RNA, 22 nt, Human
aaacuguaaauacuaguaagug

SEQ ID NO: 663620 - RNA, 20 nt, Human
agccaggccucaaguuaagu

SEQ ID NO: 663621 - RNA, 22 nt, Human
aaguccauucuuccagccagcu

SEQ ID NO: 663622 - RNA, 22 nt, Human
gcagugcaggaacauagcuucu

SEQ ID NO: 663623 - RNA, 22 nt, Human
cacagcaaaggcuucggcugau

SEQ ID NO: 663624 - RNA, 20 nt, Human
aguuuauuccaggagaacug

SEQ ID NO: 663625 - RNA, 22 nt, Human
cugcagagcuuucugaaugaag

SEQ ID NO: 663626 - RNA, 21 nt, Human
aaguggagaagaaaagcugga

SEQ ID NO: 663627 - RNA, 22 nt, Human
ugcuguguuccucaguuucaug

SEQ ID NO: 663628 - RNA, 20 nt, Human
caucauuuuaaaaucucucc

SEQ ID NO: 663629 - RNA, 22 nt, Human
ggcucagguuuccuucccagcu

SEQ ID NO: 663630 - RNA, 22 nt, Human
ggaugcaggacggcauggaugu

SEQ ID NO: 663631 - RNA, 22 nt, Human
uggagcuggaauuucugggccu

SEQ ID NO: 663632 - RNA, 23 nt, Human
ggucccaguggagaggccucacc

SEQ ID NO: 663633 - RNA, 22 nt, Human
ugggcagaggcucugaagucca

SEQ ID NO: 663634 - RNA, 22 nt, Human
uguuugguuccagagggccucu

SEQ ID NO: 663635 - RNA, 22 nt, Human
ugcaucaaccuaauaucagcuc

SEQ ID NO: 663636 - RNA, 22 nt, Human
cuuauggaagaaaccucagaga

SEQ ID NO: 663637 - RNA, 22 nt, Human
gacaagacugguuuauuuaagg

SEQ ID NO: 663638 - RNA, 22 nt, Human
uucagcuugaaucuggcuuuga

SEQ ID NO: 663639 - RNA, 22 nt, Human
uagagucuaguguauacaaagu

SEQ ID NO: 663640 - RNA, 20 nt, Human
uccuggagucugguuuggcu

SEQ ID NO: 663641 - RNA, 22 nt, Human
gcuguguuuuauguuagguuaa

SEQ ID NO: 663642 - RNA, 22 nt, Human
uuccagagucugguuccauggu

SEQ ID NO: 663643 - RNA, 22 nt, Human
uaaacagcuacugugucaaagg

SEQ ID NO: 663644 - RNA, 22 nt, Human
auuucacucuuaauugcuuccu

SEQ ID NO: 663645 - RNA, 22 nt, Human
cccaggucuccugcuucccagg

SEQ ID NO: 663646 - RNA, 20 nt, Human
aaugaucagcauagcaagga

SEQ ID NO: 663647 - RNA, 22 nt, Human
uggagacugacugccuguauuu

SEQ ID NO: 663648 - RNA, 22 nt, Human
gagguggcuggcucagagccag

SEQ ID NO: 663649 - RNA, 22 nt, Human
caacauucuuaucacuauaagc

SEQ ID NO: 663650 - RNA, 22 nt, Human
agugucuuucucucuccaagug

SEQ ID NO: 663651 - RNA, 22 nt, Human
ucagcugcucuguugagcugaa

SEQ ID NO: 663652 - RNA, 22 nt, Human
cccagcaggaggagguugcagu

SEQ ID NO: 663653 - RNA, 20 nt, Human
ucugccacugcacucugccc

SEQ ID NO: 663654 - RNA, 22 nt, Human
uugagcuugaggaguuauuuga

SEQ ID NO: 663655 - RNA, 22 nt, Human
uugacaaaggaccuugcuauuu

SEQ ID NO: 663656 - RNA, 22 nt, Human
ucugcgugaugagggugcagca

SEQ ID NO: 663657 - RNA, 22 nt, Human
uugcuuuugugugcucucugga

SEQ ID NO: 663658 - RNA, 22 nt, Human
aagauuuaccacuuuauucaag

SEQ ID NO: 663659 - RNA, 22 nt, Human
cuuguggccaauguuuguuaua

SEQ ID NO: 663660 - RNA, 22 nt, Human
auggaguggggacugcagugga

SEQ ID NO: 663661 - RNA, 22 nt, Human
auuugcuaguggaauuuuccug

SEQ ID NO: 663662 - RNA, 22 nt, Human
acauagcacgucucaauuugga

SEQ ID NO: 663663 - RNA, 22 nt, Human
guguggcuaggauggcuuugcu

SEQ ID NO: 663664 - RNA, 22 nt, Human
uuuagaaguucacacauuuaaa

SEQ ID NO: 663665 - RNA, 20 nt, Human
uagauccuggggauuuauug

SEQ ID NO: 663666 - RNA, 22 nt, Human
cuguugucuucauugucauauc

SEQ ID NO: 663667 - RNA, 22 nt, Human
ugcaauaauguaugucacuccc

SEQ ID NO: 663668 - RNA, 22 nt, Human
ugcuggaagagauuggagccuc

SEQ ID NO: 663669 - RNA, 22 nt, Human
gccaggcuggugucacaacucu

SEQ ID NO: 663670 - RNA, 22 nt, Human
cacgaggccaucuccuucugga

SEQ ID NO: 663671 - RNA, 20 nt, Human
uccaggccuuguucucagau

SEQ ID NO: 663672 - RNA, 22 nt, Human
ggagaugcuauguaguuugguu

SEQ ID NO: 663673 - RNA, 22 nt, Human
uagguagauacauguguuggcu

SEQ ID NO: 663674 - RNA, 22 nt, Human
gcaauacagaagaguggcaagg

SEQ ID NO: 663675 - RNA, 22 nt, Human
agcaccugcuuaaugugcagug

SEQ ID NO: 663676 - RNA, 22 nt, Human
acauaucugugagguuuuguug

SEQ ID NO: 663677 - RNA, 22 nt, Human
agaucuggaacugagguuuauu

SEQ ID NO: 663678 - RNA, 22 nt, Human
agggcugacaguggcguggcgu

SEQ ID NO: 663679 - RNA, 23 nt, Human
cugcuguuuucuguaccugaagc

SEQ ID NO: 663680 - RNA, 22 nt, Human
uguuaaacagauauugcccaca

SEQ ID NO: 663681 - RNA, 22 nt, Human
cgagcagaagccugguggucug

SEQ ID NO: 663682 - RNA, 20 nt, Human
aagauucugauuuguagcgu

SEQ ID NO: 663683 - RNA, 22 nt, Human
acugcacacauguuuaagugga

SEQ ID NO: 663684 - RNA, 17 nt, Human
gaacagcagaggggaca

SEQ ID NO: 663685 - RNA, 22 nt, Human
agaucauuuggcagaagcaacg

SEQ ID NO: 663686 - RNA, 22 nt, Human
ugaggccugaagccugaaguga

SEQ ID NO: 663687 - RNA, 22 nt, Human
ugcugugcuccauugucuucac

SEQ ID NO: 663688 - RNA, 22 nt, Human
acagauggagcuacuagguaaa

SEQ ID NO: 663689 - RNA, 22 nt, Human
cacauuuaaaaaauccacgauc

SEQ ID NO: 663690 - RNA, 22 nt, Human
ugggucuccugugccugggagg

SEQ ID NO: 663691 - RNA, 22 nt, Human
agaggccaguggcugugcuguc

SEQ ID NO: 663692 - RNA, 22 nt, Human
agcuacaguugcccucagcagg

SEQ ID NO: 663693 - RNA, 22 nt, Human
gagucuccaauccaugccuguc

SEQ ID NO: 663694 - RNA, 22 nt, Human
cagcagcucaggcuccuuccca

SEQ ID NO: 663695 - RNA, 22 nt, Human
ugugcaaaguguacaaauuaau

SEQ ID NO: 663696 - RNA, 22 nt, Human
auccacucggagggaauguuua

SEQ ID NO: 663697 - RNA, 22 nt, Human
agccccaguaagggagggccug

SEQ ID NO: 663698 - RNA, 22 nt, Human
aagaaaugcagaaaugugcugg

SEQ ID NO: 663699 - RNA, 22 nt, Human
uggcucaucuaucagaaagucc

SEQ ID NO: 663700 - RNA, 18 nt, Human
auguuucucuuggcucug

SEQ ID NO: 663701 - RNA, 22 nt, Human
cuuccuccgaagaaguugcugg

SEQ ID NO: 663702 - RNA, 22 nt, Human
auacaagugauauaauuguuuc

SEQ ID NO: 663703 - RNA, 22 nt, Human
aguauuuccuggcuuaucugcu

SEQ ID NO: 663704 - RNA, 22 nt, Human
uccucccuaaauccuagacugu

SEQ ID NO: 663705 - RNA, 22 nt, Human
ggucuggaguagaugagucaug

SEQ ID NO: 663706 - RNA, 16 nt, Human
aucuuccaaaguuauu

SEQ ID NO: 663707 - RNA, 22 nt, Human
uagcacaugccgggagugaucu

SEQ ID NO: 663708 - RNA, 23 nt, Human
gcucagaugcccuaggagguggc

SEQ ID NO: 663709 - RNA, 22 nt, Human
gacaggcuuccuaagugccaga

SEQ ID NO: 663710 - RNA, 22 nt, Human
ccuggggaaaagcaggcauuua

SEQ ID NO: 663711 - RNA, 21 nt, Human
ucugaacaacauacgaaucuu

SEQ ID NO: 663712 - RNA, 22 nt, Human
agcucuuaucucuaagcacagc

SEQ ID NO: 663713 - RNA, 22 nt, Human
ucuuccagcaaugugaaaucac

SEQ ID NO: 663714 - RNA, 22 nt, Human
gcccuguucuggacaggcacaa

SEQ ID NO: 663715 - RNA, 22 nt, Human
uuggcucugauggggaucagga

SEQ ID NO: 663716 - RNA, 22 nt, Human
ggacgcagcgagggaagcagcc

SEQ ID NO: 663717 - RNA, 22 nt, Human
ggcuggcugauaaaggguugag

SEQ ID NO: 663718 - RNA, 22 nt, Human
agaaucaggaagacagccuggc

SEQ ID NO: 663719 - RNA, 22 nt, Human
guucuucagucacaucacagaa

SEQ ID NO: 663720 - RNA, 22 nt, Human
acacaucaugccaaguuucacc

SEQ ID NO: 663721 - RNA, 22 nt, Human
augaauaaacaggugccucuuc

SEQ ID NO: 663722 - RNA, 20 nt, Human
uccagcccagguccugccug

SEQ ID NO: 663723 - RNA, 22 nt, Human
agcugggcaccccgcugcgucu

SEQ ID NO: 663724 - RNA, 22 nt, Human
ugucugucugcaagccagaaag

SEQ ID NO: 663725 - RNA, 22 nt, Human
agucaaauaagacugucauaag

SEQ ID NO: 663726 - RNA, 22 nt, Human
cuugagaaucuucucugaagag

SEQ ID NO: 663727 - RNA, 22 nt, Human
uauauugggacuucaggacuuu

SEQ ID NO: 663728 - RNA, 22 nt, Human
cugacccuuaaugagcaaguaa

SEQ ID NO: 663729 - RNA, 22 nt, Human
gaaagguuuaaguaggauuugu

SEQ ID NO: 663730 - RNA, 21 nt, Human
agcagccuugugugccaggca

SEQ ID NO: 663731 - RNA, 22 nt, Human
uggcauguauuuguggugaauu

SEQ ID NO: 663732 - RNA, 22 nt, Human
cagauuccggucaucucuccuu

SEQ ID NO: 663733 - RNA, 21 nt, Human
ucagcccaggugucuuugccc

SEQ ID NO: 663734 - RNA, 22 nt, Human
cuggcucugugggaccuggccu

SEQ ID NO: 663735 - RNA, 22 nt, Human
uccaggagcauccaggugaagc

SEQ ID NO: 663736 - RNA, 20 nt, Human
uuuccuaagugguuugcuga

SEQ ID NO: 663737 - RNA, 22 nt, Human
gcugcuuuagaauugaaacaga

SEQ ID NO: 663738 - RNA, 22 nt, Human
ugcagcagacugaguaugagaa

SEQ ID NO: 663739 - RNA, 22 nt, Human
cugagggaacuugggcaagucu

SEQ ID NO: 663740 - RNA, 22 nt, Human
augcaacaggguugggaggcgg

SEQ ID NO: 663741 - RNA, 22 nt, Human
acauaacaugucaaucacccga

SEQ ID NO: 663742 - RNA, 22 nt, Human
ggucacaugguugagcuugauc

SEQ ID NO: 663743 - RNA, 22 nt, Human
cuucucagcauuuugucagucu

SEQ ID NO: 663744 - RNA, 22 nt, Human
augaacaaucuguugacuucug

SEQ ID NO: 663745 - RNA, 22 nt, Human
cagagcagugaggaguugugua

SEQ ID NO: 663746 - RNA, 22 nt, Human
uuucuaguccucaugcaucauu

SEQ ID NO: 663747 - RNA, 22 nt, Human
uaggucuccuggccuagagauu

SEQ ID NO: 663748 - RNA, 22 nt, Human
aguguuuagcaugaaguucauu

SEQ ID NO: 663749 - RNA, 22 nt, Human
ggcggguggcgaggcuucucgg

SEQ ID NO: 663750 - RNA, 19 nt, Human
ugggugugaccaucucugc

SEQ ID NO: 663751 - RNA, 22 nt, Human
uuuucaucucugcuuuguaccu

SEQ ID NO: 663752 - RNA, 22 nt, Human
gcagagccaggcuggggcaggu

SEQ ID NO: 663753 - RNA, 19 nt, Human
uccaggggcuccaccuccu

SEQ ID NO: 663754 - RNA, 22 nt, Human
ccugugggaggggccuggcgcg

SEQ ID NO: 663755 - RNA, 23 nt, Human
ucacaguaucucuggagccauag

SEQ ID NO: 663756 - RNA, 22 nt, Human
gauggcuuugccugcugugagg

SEQ ID NO: 663757 - RNA, 22 nt, Human
agucuucuugaucuuuucagug

SEQ ID NO: 663758 - RNA, 22 nt, Human
acuucauauuguuuccacuaga

SEQ ID NO: 663759 - RNA, 22 nt, Human
uaugaacauguucauugacuua

SEQ ID NO: 663760 - RNA, 22 nt, Human
aaugucuuuauuucagguuuac

SEQ ID NO: 663761 - RNA, 22 nt, Human
auggagggugguaagacagaga

SEQ ID NO: 663762 - RNA, 19 nt, Human
acucaggcuuccucugagg

SEQ ID NO: 663763 - RNA, 22 nt, Human
ugccucugguuaucugguaccu

SEQ ID NO: 663764 - RNA, 22 nt, Human
auccuuuaucuuuccuaggaau

SEQ ID NO: 663765 - RNA, 22 nt, Human
cuuugaaaaaugguuuccuaga

SEQ ID NO: 663766 - RNA, 22 nt, Human
auguguauguguauacacacag

SEQ ID NO: 663767 - RNA, 22 nt, Human
aagccaaucgugugaacuuagu

SEQ ID NO: 663768 - RNA, 22 nt, Human
uuaacaaagcucuguuccuuuu

SEQ ID NO: 663769 - RNA, 22 nt, Human
ggagugggcagcacugcccugu

SEQ ID NO: 663770 - RNA, 22 nt, Human
accacugcccauggugaaaacu

SEQ ID NO: 663771 - RNA, 22 nt, Human
cugguccuccuugccuucagau

SEQ ID NO: 663772 - RNA, 22 nt, Human
uuucacagagaaauauaacagg

SEQ ID NO: 663773 - RNA, 22 nt, Human
ugcaggcugaggcuggcucaac

SEQ ID NO: 663774 - RNA, 22 nt, Human
augugucaauuuucaaaugcuu

SEQ ID NO: 663775 - RNA, 22 nt, Human
ucugcugugauucuacuagugu

SEQ ID NO: 663776 - RNA, 22 nt, Human
aagaaagcauuagacaggcauu

SEQ ID NO: 663777 - RNA, 22 nt, Human
uggcagucuuguaggcaucucc

SEQ ID NO: 663778 - RNA, 22 nt, Human
uguguacacaaugauugcagag

SEQ ID NO: 663779 - RNA, 22 nt, Human
ucacuguaugucuuuuuuugau

SEQ ID NO: 663780 - RNA, 22 nt, Human
uuacacaggcacuuaaaaugca

SEQ ID NO: 663781 - RNA, 22 nt, Human
agcuugggugugccugcgagcu

SEQ ID NO: 663782 - RNA, 22 nt, Human
cuggguaaaggcugcuuuucua

SEQ ID NO: 663783 - RNA, 22 nt, Human
agccugagagccaagcugugca

SEQ ID NO: 663784 - RNA, 22 nt, Human
gccagcuggagacuggcagggg

SEQ ID NO: 663785 - RNA, 22 nt, Human
ugagggaauccucacaucaauc

SEQ ID NO: 663786 - RNA, 22 nt, Human
ugccuguccugaggaugagggu

SEQ ID NO: 663787 - RNA, 22 nt, Human
ugccacccagccaggaguggga

SEQ ID NO: 663788 - RNA, 21 nt, Human
aauuacagauggaauuacaga

SEQ ID NO: 663789 - RNA, 22 nt, Human
cuuaacuugaugucucucugcu

SEQ ID NO: 663790 - RNA, 22 nt, Human
caggagguuguaagagcaggcc

SEQ ID NO: 663791 - RNA, 19 nt, Human
ggcugcugguuacagaggc

SEQ ID NO: 663792 - RNA, 22 nt, Human
ucacuaaguuacauuuaguauu

SEQ ID NO: 663793 - RNA, 22 nt, Human
agaauaguggcaaugacugcac

SEQ ID NO: 663794 - RNA, 22 nt, Human
auuucagagugagagugcucaa

SEQ ID NO: 663795 - RNA, 22 nt, Human
ucauaaaucauacuccauuugc

SEQ ID NO: 663796 - RNA, 22 nt, Human
ccccaaaguguuggauaauuga

SEQ ID NO: 663797 - RNA, 22 nt, Human
uugcagcuucuaccacuguuuc

SEQ ID NO: 663798 - RNA, 22 nt, Human
cugagggcagugaugaagguga

SEQ ID NO: 663799 - RNA, 22 nt, Human
cugccuguuuucugauagauuu

SEQ ID NO: 663800 - RNA, 17 nt, Human
uuuaaacuacuacaagg

SEQ ID NO: 663801 - RNA, 22 nt, Human
aggugcaugaugcagagugcag

SEQ ID NO: 663802 - RNA, 21 nt, Human
agggccugugcucuccagguc

SEQ ID NO: 663803 - RNA, 22 nt, Human
caggaaccaggagagucccuga

SEQ ID NO: 663804 - RNA, 19 nt, Human
gucucugcuccagggucuc

SEQ ID NO: 663805 - RNA, 22 nt, Human
ggucucugcucagaugccacuu

SEQ ID NO: 663806 - RNA, 20 nt, Human
cgcuccagucgcuggugugu

SEQ ID NO: 663807 - RNA, 22 nt, Human
aagugcaauuugaaauucugca

SEQ ID NO: 663808 - RNA, 20 nt, Human
gugaccagaagacagugggu

SEQ ID NO: 663809 - RNA, 22 nt, Human
gcugcccuaauaucacauguua

SEQ ID NO: 663810 - RNA, 22 nt, Human
gucacugccucuuaacuuuuuc

SEQ ID NO: 663811 - RNA, 22 nt, Human
ugcuuucacauguaugcacaaa

SEQ ID NO: 663812 - RNA, 22 nt, Human
gauacuuucucauuuacccaag

SEQ ID NO: 663813 - RNA, 22 nt, Human
uuggcuuccugcacuugaguuu

SEQ ID NO: 663814 - RNA, 22 nt, Human
acucaggagggaucagcuauca

SEQ ID NO: 663815 - RNA, 22 nt, Human
uggagaagucaaagugaacagg

SEQ ID NO: 663816 - RNA, 22 nt, Human
uguguauauguaaauauaguug

SEQ ID NO: 663817 - RNA, 22 nt, Human
uccaccccugggaaugucaaua

SEQ ID NO: 663818 - RNA, 22 nt, Human
cagggccucauggccggggugc

SEQ ID NO: 663819 - RNA, 22 nt, Human
ugcaauuuaugugcaagugguu

SEQ ID NO: 663820 - RNA, 22 nt, Human
caagaacaguuugccaaauugg

SEQ ID NO: 663821 - RNA, 23 nt, Human
uaugagaauuaagugcgagugcc

SEQ ID NO: 663822 - RNA, 20 nt, Human
ucacaugagcuggggcaggc

SEQ ID NO: 663823 - RNA, 22 nt, Human
uucugaaaacacacuuugcagc

SEQ ID NO: 663824 - RNA, 22 nt, Human
ugugaaagagucuuauaguuuc

SEQ ID NO: 663825 - RNA, 22 nt, Human
acucugccuuaguccuggggcu

SEQ ID NO: 663826 - RNA, 22 nt, Human
auuaaaacuaaaaugccugauu

SEQ ID NO: 663827 - RNA, 22 nt, Human
acauuuaacccucagguuucug

SEQ ID NO: 663828 - RNA, 22 nt, Human
uucugggcuaccuucccggcag

SEQ ID NO: 663829 - RNA, 22 nt, Human
auuuauuaugggauuuggcaca

SEQ ID NO: 663830 - RNA, 22 nt, Human
ucuuuaagaguaauuauuuugg

SEQ ID NO: 663831 - RNA, 22 nt, Human
ucuacagacuccuauguaacac

SEQ ID NO: 663832 - RNA, 22 nt, Human
ggaauugucuaguacucacggc

SEQ ID NO: 663833 - RNA, 19 nt, Human
cacagcgaagacaaggugg

SEQ ID NO: 663834 - RNA, 22 nt, Human
aaaagagagcugaggagcucca

SEQ ID NO: 663835 - RNA, 22 nt, Human
ccaguccucagauggucugugc

SEQ ID NO: 663836 - RNA, 18 nt, Human
uggcaggaaaugcacuuu

SEQ ID NO: 663837 - RNA, 22 nt, Human
ccacuuccugcagguaaggagc

SEQ ID NO: 663838 - RNA, 22 nt, Human
cugccaggcacgugcagcauca

SEQ ID NO: 663839 - RNA, 22 nt, Human
gccaccaguagcuaacaacagu

SEQ ID NO: 663840 - RNA, 22 nt, Human
cagcagccuacaaugcacagaa

SEQ ID NO: 663841 - RNA, 22 nt, Human
aagcugcagcacagagaggugg

SEQ ID NO: 663842 - RNA, 22 nt, Human
cuauuugggguagaagauggau

SEQ ID NO: 663843 - RNA, 22 nt, Human
ggucacaugcggggcuguagcc

SEQ ID NO: 663844 - RNA, 22 nt, Human
caggccucaccagcggagcugc

SEQ ID NO: 663845 - RNA, 19 nt, Human
accucugcagagauguuua

SEQ ID NO: 663846 - RNA, 22 nt, Human
cacugaggcuuccuuaggcaau

SEQ ID NO: 663847 - RNA, 22 nt, Human
uaaaggaaucaguuuuagagau

SEQ ID NO: 663848 - RNA, 16 nt, Human
cgccucccucccucgc

SEQ ID NO: 663849 - RNA, 22 nt, Human
aguuucuaacauauagcauugg

SEQ ID NO: 663850 - RNA, 22 nt, Human
agggagaagguuuagcugugag

SEQ ID NO: 663851 - RNA, 22 nt, Human
cacugaaggaaggacuacugca

SEQ ID NO: 663852 - RNA, 22 nt, Human
guucuacaugacacucaacauu

SEQ ID NO: 663853 - RNA, 22 nt, Human
uauuacagaaucaggcauaacu

SEQ ID NO: 663854 - RNA, 22 nt, Human
cggcugagacggccauagacac

SEQ ID NO: 663855 - RNA, 22 nt, Human
gcaauguuguguuggcauucua

SEQ ID NO: 663856 - RNA, 22 nt, Human
ucccacccccuccaaggaggaa

SEQ ID NO: 663857 - RNA, 22 nt, Human
ucucucccuuuccuuaucaguu

SEQ ID NO: 663858 - RNA, 22 nt, Human
uuucucugcagagccccaagga

SEQ ID NO: 663859 - RNA, 22 nt, Human
ccuuagcaacacuuagcaacug

SEQ ID NO: 663860 - RNA, 22 nt, Human
ugugauauuugaguauugucaa

SEQ ID NO: 663861 - RNA, 22 nt, Human
cagcccaggucucucuuccagu

SEQ ID NO: 663862 - RNA, 22 nt, Human
cucagccagugaucuuuccuuu

SEQ ID NO: 663863 - RNA, 22 nt, Human
ucaggcugcuguacugugaaug

SEQ ID NO: 663864 - RNA, 22 nt, Human
caugugggaagaggccagcugg

SEQ ID NO: 663865 - RNA, 22 nt, Human
gagccugccucuagucucuaga

SEQ ID NO: 663866 - RNA, 22 nt, Human
ggugcugccuauagucugaaac

SEQ ID NO: 663867 - RNA, 21 nt, Human
aguaucauaaugaauaguucu

SEQ ID NO: 663868 - RNA, 22 nt, Human
ugaugaaacugagguuccaaga

SEQ ID NO: 663869 - RNA, 22 nt, Human
agacacagcagugccugccuca

SEQ ID NO: 663870 - RNA, 22 nt, Human
cuguuacaagagagagacauga

SEQ ID NO: 663871 - RNA, 20 nt, Human
ucugaggcugagcucuacuu

SEQ ID NO: 663872 - RNA, 22 nt, Human
acaugcuuuucccacaauuaua

SEQ ID NO: 663873 - RNA, 22 nt, Human
gggaaccagccgcuuccgccuc

SEQ ID NO: 663874 - RNA, 23 nt, Human
ugcagacuucgaggagggggaua

SEQ ID NO: 663875 - RNA, 22 nt, Human
uuauucuuuaaacauauauguu

SEQ ID NO: 663876 - RNA, 21 nt, Human
ccagauccugcuuccucaccc

SEQ ID NO: 663877 - RNA, 21 nt, Human
gccuggcagguggaagggcuc

SEQ ID NO: 663878 - RNA, 22 nt, Human
cuugcugugugccaucagggcu

SEQ ID NO: 663879 - RNA, 22 nt, Human
augcacagauccuggcacuuag

SEQ ID NO: 663880 - RNA, 22 nt, Human
agaaguuguagguuugcauauu

SEQ ID NO: 663881 - RNA, 22 nt, Human
auacaacagaaaaugauuauuc

SEQ ID NO: 663882 - RNA, 22 nt, Human
acauuaagaaacgagagagcaa

SEQ ID NO: 663883 - RNA, 19 nt, Human
auucauuuuugccuucuaa

SEQ ID NO: 663884 - RNA, 22 nt, Human
gcaccaggcuuagagccccagg

SEQ ID NO: 663885 - RNA, 22 nt, Human
cugcugcauuacucuucucaag

SEQ ID NO: 663886 - RNA, 20 nt, Human
agcccaucucccacagcuac

SEQ ID NO: 663887 - RNA, 22 nt, Human
cauaauuuuuuuaagucagaac

SEQ ID NO: 663888 - RNA, 22 nt, Human
uggauaaaugugcagaugacau

SEQ ID NO: 663889 - RNA, 22 nt, Human
guugcagacggggugcacugaa

SEQ ID NO: 663890 - RNA, 22 nt, Human
augcuguuaagaaucucuuccu

SEQ ID NO: 663891 - RNA, 22 nt, Human
acaucgauggucagccgaggag

SEQ ID NO: 663892 - RNA, 22 nt, Human
ugcccaggguggagugcagcgg

SEQ ID NO: 663893 - RNA, 22 nt, Human
ucugagagucucugaggcagau

SEQ ID NO: 663894 - RNA, 22 nt, Human
ugaacaacugcaaaaaucucca

SEQ ID NO: 663895 - RNA, 22 nt, Human
acccgcccucagccuuaccgug

SEQ ID NO: 663896 - RNA, 22 nt, Human
uauggcuuucuccauagggcag

SEQ ID NO: 663897 - RNA, 22 nt, Human
ucugcagaaacugugacuaugu

SEQ ID NO: 663898 - RNA, 22 nt, Human
cugccugcuucugagccagagg

SEQ ID NO: 663899 - RNA, 22 nt, Human
ccugccagggccagaggccagc

SEQ ID NO: 663900 - RNA, 22 nt, Human
augaagucugcacaugcaugug

SEQ ID NO: 663901 - RNA, 22 nt, Human
ggcuuaaaaggaaaaugagagu

SEQ ID NO: 663902 - RNA, 22 nt, Human
uaacacaugucugggaugugaa

SEQ ID NO: 663903 - RNA, 22 nt, Human
cuacauuucauccagggagagc

SEQ ID NO: 663904 - RNA, 22 nt, Human
ugagccuggggccugggcagcg

SEQ ID NO: 663905 - RNA, 22 nt, Human
uccuggagggaggcggugcuac

SEQ ID NO: 663906 - RNA, 22 nt, Human
uauuuccagaggaguauagaag

SEQ ID NO: 663907 - RNA, 22 nt, Human
auguguaugauaccuuugcuga

SEQ ID NO: 663908 - RNA, 22 nt, Human
ugcacagggagggggccagcuc

SEQ ID NO: 663909 - RNA, 22 nt, Human
auucaguuguaaucuuuguuag

SEQ ID NO: 663910 - RNA, 22 nt, Human
ggugaaauauuuuugauauguu

SEQ ID NO: 663911 - RNA, 22 nt, Human
ugaaggccagcucuuuaucagc

SEQ ID NO: 663912 - RNA, 22 nt, Human
aaacuguaggagggaaaggaag

SEQ ID NO: 663913 - RNA, 22 nt, Human
uaaagcaaaaaugaacugccau

SEQ ID NO: 663914 - RNA, 22 nt, Human
uugugauacugagcuuggcauu

SEQ ID NO: 663915 - RNA, 22 nt, Human
augugaaaccugugaguagagu

SEQ ID NO: 663916 - RNA, 19 nt, Human
ucaacaguggugcugugga

SEQ ID NO: 663917 - RNA, 22 nt, Human
ccagccagcaagcucccaguuc

SEQ ID NO: 663918 - RNA, 22 nt, Human
acaagggauuguugaguagucu

SEQ ID NO: 663919 - RNA, 22 nt, Human
acccugagggguauagcagaag

SEQ ID NO: 663920 - RNA, 22 nt, Human
aaaaggaucagauuuugagcag

SEQ ID NO: 663921 - RNA, 22 nt, Human
gcuuuaaaccucuacucugucc

SEQ ID NO: 663922 - RNA, 22 nt, Human
cagaaacuguggauucauuaaa

SEQ ID NO: 663923 - RNA, 22 nt, Human
uuaaugcuugucuagaucuucu

SEQ ID NO: 663924 - RNA, 22 nt, Human
acucagagugcaucuccuauuu

SEQ ID NO: 663925 - RNA, 22 nt, Human
ucaaugcaugugacaaagagua

SEQ ID NO: 663926 - RNA, 23 nt, Human
gaauacaaagcagaugguccagc

SEQ ID NO: 663927 - RNA, 22 nt, Human
gugauauuucaagaguggggca

SEQ ID NO: 663928 - RNA, 22 nt, Human
ggaagaggcugaggccaugcug

SEQ ID NO: 663929 - RNA, 22 nt, Human
auucucugaagucuuucagggc

SEQ ID NO: 663930 - RNA, 22 nt, Human
uauguguacaucugguugagca

SEQ ID NO: 663931 - RNA, 22 nt, Human
cagcuccuguuggucuugagga

SEQ ID NO: 663932 - RNA, 22 nt, Human
cauuuauuaguuaguucgaugu

SEQ ID NO: 663933 - RNA, 22 nt, Human
ugauugcugaauuuuaggaacu

SEQ ID NO: 663934 - RNA, 22 nt, Human
accugcccacauauauauguau

SEQ ID NO: 663935 - RNA, 22 nt, Human
caguuucucucaauaagcaucg

SEQ ID NO: 663936 - RNA, 22 nt, Human
uuauuaugccauuaccucccug

SEQ ID NO: 663937 - RNA, 22 nt, Human
ccugcacagccggaccccugcu

SEQ ID NO: 663938 - RNA, 22 nt, Human
uaauuauagcauuggaguggcc

SEQ ID NO: 663939 - RNA, 16 nt, Human
aggagcuggguaggag

SEQ ID NO: 663940 - RNA, 22 nt, Human
gcuuggcccugccgccuggguc

SEQ ID NO: 663941 - RNA, 22 nt, Human
gaggagcuggcugucgggaggc

SEQ ID NO: 663942 - RNA, 22 nt, Human
aagcaaagugaauuuugccaag

SEQ ID NO: 663943 - RNA, 22 nt, Human
acaugcuuucuagguccuucug

SEQ ID NO: 663944 - RNA, 22 nt, Human
uccagcuggcuucggaagugga

SEQ ID NO: 663945 - RNA, 22 nt, Human
auguggcuugucgauauuagca

SEQ ID NO: 663946 - RNA, 22 nt, Human
uuacagauuaaaaugcugaggu

SEQ ID NO: 663947 - RNA, 22 nt, Human
uucuaagugauucuagcuggac

SEQ ID NO: 663948 - RNA, 22 nt, Human
gccccagguugccugucccagg

SEQ ID NO: 663949 - RNA, 22 nt, Human
ggucugggcuugaguccuuuug

SEQ ID NO: 663950 - RNA, 21 nt, Human
uaucacaguagaauaggaucu

SEQ ID NO: 663951 - RNA, 22 nt, Human
acuugcugguggcauuuacagu

SEQ ID NO: 663952 - RNA, 22 nt, Human
auuuucaagggagaggccucug

SEQ ID NO: 663953 - RNA, 22 nt, Human
ugcaccauacccauuccccucu

SEQ ID NO: 663954 - RNA, 22 nt, Human
uaugcaguguacgauguuuagu

SEQ ID NO: 663955 - RNA, 22 nt, Human
ccagugcagucccccugaacug

SEQ ID NO: 663956 - RNA, 20 nt, Human
agucacaggccuggaacaug

SEQ ID NO: 663957 - RNA, 22 nt, Human
gugggcuuuugacagugccugg

SEQ ID NO: 663958 - RNA, 22 nt, Human
uuccauccaugucccguuucug

SEQ ID NO: 663959 - RNA, 22 nt, Human
aggcuucuaggguuggcagcgg

SEQ ID NO: 663960 - RNA, 22 nt, Human
uucagauguggcuuugucaggc

SEQ ID NO: 663961 - RNA, 22 nt, Human
gaacaaagacauggaggaggau

SEQ ID NO: 663962 - RNA, 22 nt, Human
gagaccugcagcuguagucugc

SEQ ID NO: 663963 - RNA, 22 nt, Human
uuucacaacugcuuauuugaga

SEQ ID NO: 663964 - RNA, 22 nt, Human
cacagucaccuuaucaggaugu

SEQ ID NO: 663965 - RNA, 22 nt, Human
gcuuugugugaaguccauggcg

SEQ ID NO: 663966 - RNA, 19 nt, Human
auagucuuuccaauuauac

SEQ ID NO: 663967 - RNA, 22 nt, Human
ucugcuugugucuguccagccu

SEQ ID NO: 663968 - RNA, 22 nt, Human
aaggcugaauucaaggguaggc

SEQ ID NO: 663969 - RNA, 22 nt, Human
uucaaacagaugacucugcucu

SEQ ID NO: 663970 - RNA, 22 nt, Human
uucaggauaugugauaucugaa

SEQ ID NO: 663971 - RNA, 22 nt, Human
uugcucugucagggccucaguc

SEQ ID NO: 663972 - RNA, 22 nt, Human
gaucugagaucuaaaccagagg

SEQ ID NO: 663973 - RNA, 22 nt, Human
cagggacugagauccagacugu

SEQ ID NO: 663974 - RNA, 22 nt, Human
uacuuguguucuacuagagaaa

SEQ ID NO: 663975 - RNA, 19 nt, Human
ugcuuugccuugauuagcu

SEQ ID NO: 663976 - RNA, 22 nt, Human
gagaaggaugaggaaaugguau

SEQ ID NO: 663977 - RNA, 22 nt, Human
cuuacauacugagaaaauaucc

SEQ ID NO: 663978 - RNA, 22 nt, Human
cauuaaaucuuccagaccucac

SEQ ID NO: 663979 - RNA, 22 nt, Human
uguacaguacauguguagugau

SEQ ID NO: 663980 - RNA, 22 nt, Human
gccagagguaucaaagauagua

SEQ ID NO: 663981 - RNA, 22 nt, Human
agaaacuauuaugguaaacaaa

SEQ ID NO: 663982 - RNA, 22 nt, Human
cugguuggugccacaugguggc

SEQ ID NO: 663983 - RNA, 22 nt, Human
ugacaugcuuguuuuccuugaa

SEQ ID NO: 663984 - RNA, 22 nt, Human
ccucucugucacaccaguggcc

SEQ ID NO: 663985 - RNA, 22 nt, Human
cugucuguuuuaccuucuccag

SEQ ID NO: 663986 - RNA, 22 nt, Human
aagccacuauuaaauaaugauu

SEQ ID NO: 663987 - RNA, 22 nt, Human
cagaggagaauugcgggaucau

SEQ ID NO: 663988 - RNA, 21 nt, Human
ccccagcaccuugccagccug

SEQ ID NO: 663989 - RNA, 22 nt, Human
gggcuuuaacacccagucaggg

SEQ ID NO: 663990 - RNA, 22 nt, Human
ucaauacacaugccgcuguucu

SEQ ID NO: 663991 - RNA, 22 nt, Human
gucugaaugaugagugggacuc

SEQ ID NO: 663992 - RNA, 22 nt, Human
uaaugcuugcaaauuaugggac

SEQ ID NO: 663993 - RNA, 22 nt, Human
cccaggagacugagcuguaacc

SEQ ID NO: 663994 - RNA, 22 nt, Human
gcugggcugagcuagacuuggc

SEQ ID NO: 663995 - RNA, 21 nt, Human
gcacccagccgguucucccag

SEQ ID NO: 663996 - RNA, 22 nt, Human
agucaguauuuauuacuuagcu

SEQ ID NO: 663997 - RNA, 22 nt, Human
ucuggaaggaacccuuagagga

SEQ ID NO: 663998 - RNA, 22 nt, Human
auucuuuacauuggcuucuucc

SEQ ID NO: 663999 - RNA, 22 nt, Human
gccacuggacccagaaagggaa

SEQ ID NO: 664000 - RNA, 19 nt, Human
uuucuguuugcuucugguu

SEQ ID NO: 664001 - RNA, 22 nt, Human
acagugcauuauugcugaaugc

SEQ ID NO: 664002 - RNA, 22 nt, Human
uaggaacuuagaugaacacaug

SEQ ID NO: 664003 - RNA, 23 nt, Human
caaaccuguucuccccacaugca

SEQ ID NO: 664004 - RNA, 22 nt, Human
ugucuguggcaauuguggguaa

SEQ ID NO: 664005 - RNA, 22 nt, Human
uugagcaaaucagaaguuuaga

SEQ ID NO: 664006 - RNA, 22 nt, Human
ucagcauauguuuggagugucc

SEQ ID NO: 664007 - RNA, 22 nt, Human
cagugaggugcccagccugccc

SEQ ID NO: 664008 - RNA, 22 nt, Human
agcacuuuaagcaacagaucaa

SEQ ID NO: 664009 - RNA, 22 nt, Human
gggcucuggaguucuagaaaga

SEQ ID NO: 664010 - RNA, 22 nt, Human
ggcugaggggcccagaggaaca

SEQ ID NO: 664011 - RNA, 22 nt, Human
ucuuugaacucuguguauuaac

SEQ ID NO: 664012 - RNA, 22 nt, Human
gccuuguuucauuacacguggu

SEQ ID NO: 664013 - RNA, 22 nt, Human
aagccaguguuuuugagaguug

SEQ ID NO: 664014 - RNA, 22 nt, Human
uguguacaagaguguuuacugu

SEQ ID NO: 664015 - RNA, 22 nt, Human
aggcaguggagcuggaauaggc

SEQ ID NO: 664016 - RNA, 22 nt, Human
auguucuucuaucuuuauuaaa

SEQ ID NO: 664017 - RNA, 22 nt, Human
uuuauuauucuguucucucuac

SEQ ID NO: 664018 - RNA, 22 nt, Human
cuguaugaacccauauacuuau

SEQ ID NO: 664019 - RNA, 21 nt, Human
gcaggguuugugcugugaguu

SEQ ID NO: 664020 - RNA, 22 nt, Human
gugaauaaucacccuucuggau

SEQ ID NO: 664021 - RNA, 22 nt, Human
gaggaagaauugguuauuggag

SEQ ID NO: 664022 - RNA, 22 nt, Human
cacugugggguuuggcuggaac

SEQ ID NO: 664023 - RNA, 22 nt, Human
caaggcugcuucagacuaguga

SEQ ID NO: 664024 - RNA, 22 nt, Human
guggagggugauugccggcugu

SEQ ID NO: 664025 - RNA, 22 nt, Human
auuuccaugaaggcagauuuua

SEQ ID NO: 664026 - RNA, 22 nt, Human
uuuguaaaggccugaauuucag

SEQ ID NO: 664027 - RNA, 20 nt, Human
cugggucacuuggcugcucu

SEQ ID NO: 664028 - RNA, 22 nt, Human
aaaugcacaaagauuuugcacu

SEQ ID NO: 664029 - RNA, 22 nt, Human
ugccuacccaugguuagacaua

SEQ ID NO: 664030 - RNA, 22 nt, Human
ccaggcagagggauccccaucc

SEQ ID NO: 664031 - RNA, 22 nt, Human
augcauaugccguagaauaagu

SEQ ID NO: 664032 - RNA, 22 nt, Human
aucauucagugaccacuuccca

SEQ ID NO: 664033 - RNA, 22 nt, Human
gaggcugaguagcuuugugcuc

SEQ ID NO: 664034 - RNA, 21 nt, Human
uuuucccacugaaagcuccca

SEQ ID NO: 664035 - RNA, 22 nt, Human
caggaccccauauucacugaac

SEQ ID NO: 664036 - RNA, 22 nt, Human
gugggccaggccggagugcaga

SEQ ID NO: 664037 - RNA, 21 nt, Human
guugugguuggggcugcagcu

SEQ ID NO: 664038 - RNA, 19 nt, Human
uuagccauccacagugaaa

SEQ ID NO: 664039 - RNA, 22 nt, Human
ucagcagugugcccagaggcug

SEQ ID NO: 664040 - RNA, 22 nt, Human
uuucacagcugucuuccgucuc

SEQ ID NO: 664041 - RNA, 22 nt, Human
cucacugugaccucagcagaca

SEQ ID NO: 664042 - RNA, 22 nt, Human
gagagaagggacuucuacacuu

SEQ ID NO: 664043 - RNA, 22 nt, Human
cuaaaggcucagcauucuuuuc

SEQ ID NO: 664044 - RNA, 22 nt, Human
ucauuuugccugccauuugagu

SEQ ID NO: 664045 - RNA, 22 nt, Human
uagaaaugcccagauucugcua

SEQ ID NO: 664046 - RNA, 23 nt, Human
aggcagguuugggcucuucuugu

SEQ ID NO: 664047 - RNA, 22 nt, Human
gaauacaagccugccaccugga

SEQ ID NO: 664048 - RNA, 22 nt, Human
uaggauuuggcuuuagucaggu

SEQ ID NO: 664049 - RNA, 22 nt, Human
ucacccaggcuggacugcagug

SEQ ID NO: 664050 - RNA, 23 nt, Human
gacaucuguuuugucccugugcu

SEQ ID NO: 664051 - RNA, 22 nt, Human
aaagacuagcauuuauauguac

SEQ ID NO: 664052 - RNA, 22 nt, Human
uuuacaacuuucuguucuguau

SEQ ID NO: 664053 - RNA, 22 nt, Human
uauguucaugcuuaugcagaau

SEQ ID NO: 664054 - RNA, 22 nt, Human
guacaacaugauuuuacucucu

SEQ ID NO: 664055 - RNA, 22 nt, Human
ggaggaggggcgcuuugucuau

SEQ ID NO: 664056 - RNA, 22 nt, Human
aaagcugcaagcuccugaggaa

SEQ ID NO: 664057 - RNA, 22 nt, Human
cagggagcagccccuagaagua

SEQ ID NO: 664058 - RNA, 22 nt, Human
uugaaguugguguggaaaguag

SEQ ID NO: 664059 - RNA, 22 nt, Human
cuucccacagaauucaaucagu

SEQ ID NO: 664060 - RNA, 22 nt, Human
agcagcugaccagugaguccug

SEQ ID NO: 664061 - RNA, 22 nt, Human
ggccagagcucaaacagucgca

SEQ ID NO: 664062 - RNA, 22 nt, Human
uaauuuugucacagugacaugc

SEQ ID NO: 664063 - RNA, 22 nt, Human
uaaaucuccuguuuuucaucua

SEQ ID NO: 664064 - RNA, 22 nt, Human
ggaggccucaguaccuugcuuu

SEQ ID NO: 664065 - RNA, 22 nt, Human
ugcugucugcaacaguacuaca

SEQ ID NO: 664066 - RNA, 22 nt, Human
ggggaagauggcccuccaugug

SEQ ID NO: 664067 - RNA, 22 nt, Human
agcuugccucccccucuuagga

SEQ ID NO: 664068 - RNA, 22 nt, Human
cuuuuagcuguuuccauggcaa

SEQ ID NO: 664069 - RNA, 22 nt, Human
uauuagcaguuguaugugucug

SEQ ID NO: 664070 - RNA, 22 nt, Human
aggggagacuggaaucuaacau

SEQ ID NO: 664071 - RNA, 22 nt, Human
aacaauuacuaccaaggccugu

SEQ ID NO: 664072 - RNA, 22 nt, Human
gcagggacaucuuugucuagua

SEQ ID NO: 664073 - RNA, 22 nt, Human
uuagugaucaaaaucaaaauug

SEQ ID NO: 664074 - RNA, 22 nt, Human
aaggacaaguaguauuugcauc

SEQ ID NO: 664075 - RNA, 22 nt, Human
cauuaugugagugauuaauuca

SEQ ID NO: 664076 - RNA, 22 nt, Human
aaagagaaaaugaucuguacau

SEQ ID NO: 664077 - RNA, 21 nt, Human
uguuuaaguacuccuuucugg

SEQ ID NO: 664078 - RNA, 22 nt, Human
ccaggaggcucugacuggaccc

SEQ ID NO: 664079 - RNA, 22 nt, Human
guccugagucaagugugggcag

SEQ ID NO: 664080 - RNA, 22 nt, Human
auuaccacuuaaucaacauaug

SEQ ID NO: 664081 - RNA, 21 nt, Human
uacaagauagagguaauauau

SEQ ID NO: 664082 - RNA, 22 nt, Human
ccugcucuuauagcuguuucca

SEQ ID NO: 664083 - RNA, 22 nt, Human
cuuuacagaauaagaauacugg

SEQ ID NO: 664084 - RNA, 22 nt, Human
uucagagacagcaaccaggaca

SEQ ID NO: 664085 - RNA, 22 nt, Human
gcugagggcuguaacagcagag

SEQ ID NO: 664086 - RNA, 22 nt, Human
ugaaaucuucacuaagucucuu

SEQ ID NO: 664087 - RNA, 20 nt, Human
cugaacacagaauaagcaca

SEQ ID NO: 664088 - RNA, 22 nt, Human
acagaggccaugagcugccacc

SEQ ID NO: 664089 - RNA, 23 nt, Human
uuccuuaacuguuaagauugucu

SEQ ID NO: 664090 - RNA, 22 nt, Human
ccugggaagaccggcagugggg

SEQ ID NO: 664091 - RNA, 22 nt, Human
acaguaguccuuuauuuugguu

SEQ ID NO: 664092 - RNA, 22 nt, Human
guuucacagggccauggaggaa

SEQ ID NO: 664093 - RNA, 22 nt, Human
cuguaugauauccaaauugaua

SEQ ID NO: 664094 - RNA, 22 nt, Human
agaagugagacucaguugauga

SEQ ID NO: 664095 - RNA, 22 nt, Human
agucugucugucacuucugcag

SEQ ID NO: 664096 - RNA, 22 nt, Human
acagagguguuccagaccuagg

SEQ ID NO: 664097 - RNA, 22 nt, Human
uaugacauuuucccagauuuau

SEQ ID NO: 664098 - RNA, 22 nt, Human
aacaaugauauagggauuggca

SEQ ID NO: 664099 - RNA, 22 nt, Human
agcauguaaagcucuuagcacc

SEQ ID NO: 664100 - RNA, 22 nt, Human
gagguuccccauuguacuggcu

SEQ ID NO: 664101 - RNA, 22 nt, Human
guuuccugaugugggagaucuu

SEQ ID NO: 664102 - RNA, 22 nt, Human
gagagacugggcagggccggca

SEQ ID NO: 664103 - RNA, 22 nt, Human
uggcuggaagucagaaauggga

SEQ ID NO: 664104 - RNA, 22 nt, Human
uagggugguuagaaggaguaug

SEQ ID NO: 664105 - RNA, 22 nt, Human
uuggcuucuucgcacagcagua

SEQ ID NO: 664106 - RNA, 22 nt, Human
gaguccaguucuuuccagcagu

SEQ ID NO: 664107 - RNA, 21 nt, Human
ugauuucugccaaguucacua

SEQ ID NO: 664108 - RNA, 22 nt, Human
aacucacuuuguggcuucugaa

SEQ ID NO: 664109 - RNA, 22 nt, Human
acauccagaucucagcauggcu

SEQ ID NO: 664110 - RNA, 22 nt, Human
ugugauuagcugaauacacugg

SEQ ID NO: 664111 - RNA, 22 nt, Human
ugcuuaaaaagcuccaucaaua

SEQ ID NO: 664112 - RNA, 22 nt, Human
uuggaaucugcaauuuaacaaa

SEQ ID NO: 664113 - RNA, 22 nt, Human
aggacagggauucaaacuccca

SEQ ID NO: 664114 - RNA, 22 nt, Human
ugucuucaggaguaaauaucau

SEQ ID NO: 664115 - RNA, 21 nt, Human
gcugccaccgcgugcuccagg

SEQ ID NO: 664116 - RNA, 22 nt, Human
aacagguagggacucuaacuug

SEQ ID NO: 664117 - RNA, 22 nt, Human
ggucagaagugcaaaaucaguu

SEQ ID NO: 664118 - RNA, 19 nt, Human
ggccuggauuuagggcucc

SEQ ID NO: 664119 - RNA, 22 nt, Human
ggcuuugcaaaaucggcuucug

SEQ ID NO: 664120 - RNA, 18 nt, Human
cauccuuauagcugagaa

SEQ ID NO: 664121 - RNA, 22 nt, Human
uggcuuccuguuucccagaaag

SEQ ID NO: 664122 - RNA, 22 nt, Human
auucuacagaugaaagcggcug

SEQ ID NO: 664123 - RNA, 22 nt, Human
agugaaauuccuggucuuuguu

SEQ ID NO: 664124 - RNA, 22 nt, Human
uccaguaucaaaguccuagucc

SEQ ID NO: 664125 - RNA, 22 nt, Human
augugggagauuucaggaggug

SEQ ID NO: 664126 - RNA, 22 nt, Human
agaaacaagguguagguugacc

SEQ ID NO: 664127 - RNA, 22 nt, Human
ugggacuugccucgagggcugc

SEQ ID NO: 664128 - RNA, 22 nt, Human
guucucagggauaacuuccccc

SEQ ID NO: 664129 - RNA, 22 nt, Human
cuguuauuaaaaagcucaggcu

SEQ ID NO: 664130 - RNA, 22 nt, Human
uacuagaaccucacaacaaucc

SEQ ID NO: 664131 - RNA, 22 nt, Human
aaccacauggcucaguggacau

SEQ ID NO: 664132 - RNA, 22 nt, Human
uaaccuguuaagggcugaccca

SEQ ID NO: 664133 - RNA, 22 nt, Human
acagaggcugaucuucaagccc

SEQ ID NO: 664134 - RNA, 22 nt, Human
agacaaagacagcaucucaggu

SEQ ID NO: 664135 - RNA, 22 nt, Human
cugaggucaauuaaucaacaac

SEQ ID NO: 664136 - RNA, 21 nt, Human
accagcaggagaucagaagga

SEQ ID NO: 664137 - RNA, 23 nt, Human
ugacagaccuucccagacaguca

SEQ ID NO: 664138 - RNA, 22 nt, Human
ugccugggcucgguagccaucg

SEQ ID NO: 664139 - RNA, 22 nt, Human
augggcugcuucuccagcaccu

SEQ ID NO: 664140 - RNA, 22 nt, Human
gaaauugccagaucuaguagau

SEQ ID NO: 664141 - RNA, 22 nt, Human
gagagugaggcaucaggggcag

SEQ ID NO: 664142 - RNA, 22 nt, Human
ugcugcuguugacggcugucca

SEQ ID NO: 664143 - RNA, 22 nt, Human
ccuguggcugccccgcuguugg

SEQ ID NO: 664144 - RNA, 22 nt, Human
acagccuuauugcgagcaaggc

SEQ ID NO: 664145 - RNA, 22 nt, Human
cuugggaacugccuugccuuug

SEQ ID NO: 664146 - RNA, 21 nt, Human
gcugcugccccuagugaggcc

SEQ ID NO: 664147 - RNA, 23 nt, Human
gcucccugugcuccaggagaugc

SEQ ID NO: 664148 - RNA, 22 nt, Human
cccuccaccaagcagggcgcca

SEQ ID NO: 664149 - RNA, 22 nt, Human
gggccagugaacaaugagggaa

SEQ ID NO: 664150 - RNA, 22 nt, Human
augcauaugugugcacacgugu

SEQ ID NO: 664151 - RNA, 22 nt, Human
uuaauuuuaaccuguuuguguc

SEQ ID NO: 664152 - RNA, 22 nt, Human
ucaggagggugacaggcccugg

SEQ ID NO: 664153 - RNA, 22 nt, Human
uguuucuuacguuuuuagaggc

SEQ ID NO: 664154 - RNA, 18 nt, Human
gugccaggaggcgcagcc

SEQ ID NO: 664155 - RNA, 22 nt, Human
uuccuuggaguuaagacccugg

SEQ ID NO: 664156 - RNA, 22 nt, Human
cauaacaguggcuucagcaagu

SEQ ID NO: 664157 - RNA, 22 nt, Human
uaucuacaggugucagguaaga

SEQ ID NO: 664158 - RNA, 22 nt, Human
ugcccacuucaaaaucuucauu

SEQ ID NO: 664159 - RNA, 22 nt, Human
ugcuucugaaaugcaggucuuc

SEQ ID NO: 664160 - RNA, 22 nt, Human
uccagagccccaauucaccucu

SEQ ID NO: 664161 - RNA, 23 nt, Human
aauuuccccugucucugauuugg

SEQ ID NO: 664162 - RNA, 22 nt, Human
cagcagcugcgugcccaggccg

SEQ ID NO: 664163 - RNA, 22 nt, Human
gcagcuuugucacggagugucg

SEQ ID NO: 664164 - RNA, 22 nt, Human
ucuaugaaaagucuauucauuc

SEQ ID NO: 664165 - RNA, 22 nt, Human
agucagcuacaaguucauucac

SEQ ID NO: 664166 - RNA, 20 nt, Human
uccaggagaacugggagccg

SEQ ID NO: 664167 - RNA, 22 nt, Human
agcagccacacgccuccuucuc

SEQ ID NO: 664168 - RNA, 22 nt, Human
caggaguccagagugucauuuu

SEQ ID NO: 664169 - RNA, 22 nt, Human
cugaaagguauaaauaagacuu

SEQ ID NO: 664170 - RNA, 22 nt, Human
auauuaugcuaagggaaauaag

SEQ ID NO: 664171 - RNA, 22 nt, Human
agcaaagccgagacagccagug

SEQ ID NO: 664172 - RNA, 22 nt, Human
cagguuuaguuccacacagcuc

SEQ ID NO: 664173 - RNA, 22 nt, Human
ggggaagggaguccaaguguua

SEQ ID NO: 664174 - RNA, 22 nt, Human
ggcgcacaaugugcagguuugu

SEQ ID NO: 664175 - RNA, 22 nt, Human
gggcuggauuacugaacugagu

SEQ ID NO: 664176 - RNA, 22 nt, Human
augcaugauccugagcaaccca

SEQ ID NO: 664177 - RNA, 22 nt, Human
aagcacaguaaaagcagauuuu

SEQ ID NO: 664178 - RNA, 22 nt, Human
guggggugcagcaguacugugu

SEQ ID NO: 664179 - RNA, 22 nt, Human
agcauuaauaagaaauggcucc

SEQ ID NO: 664180 - RNA, 22 nt, Human
gcagaggaggacccaggaauua

SEQ ID NO: 664181 - RNA, 17 nt, Human
gccucugcuugugucau

SEQ ID NO: 664182 - RNA, 22 nt, Human
gaaaucuuuauggaaauaacaa

SEQ ID NO: 664183 - RNA, 23 nt, Human
agggugagcaagcuauggagacc

SEQ ID NO: 664184 - RNA, 22 nt, Human
uagugaaaugauaacagagcag

SEQ ID NO: 664185 - RNA, 22 nt, Human
uuuggaaaguguacaaauuuga

SEQ ID NO: 664186 - RNA, 22 nt, Human
caggccugagacaucugagaua

SEQ ID NO: 664187 - RNA, 22 nt, Human
augugaaagagguguucagugg

SEQ ID NO: 664188 - RNA, 22 nt, Human
gcucagucuuugugggguacgg

SEQ ID NO: 664189 - RNA, 22 nt, Human
ugacauuuaagccucugauuuc

SEQ ID NO: 664190 - RNA, 22 nt, Human
cucugguguccuuuagaauuua

SEQ ID NO: 664191 - RNA, 22 nt, Human
acaggcagggaccucuugaguu

SEQ ID NO: 664192 - RNA, 22 nt, Human
cacagaaucugugacuccaaga

SEQ ID NO: 664193 - RNA, 22 nt, Human
ccuuggcccuagccucaggcaa

SEQ ID NO: 664194 - RNA, 22 nt, Human
ugccugcaagaguuggggcuac

SEQ ID NO: 664195 - RNA, 22 nt, Human
ucacuuugcccuguaccuuggg

SEQ ID NO: 664196 - RNA, 22 nt, Human
uacaguauuugaagaauaugag

SEQ ID NO: 664197 - RNA, 22 nt, Human
aucauguuguauguaaucuuuu

SEQ ID NO: 664198 - RNA, 22 nt, Human
aauuuguuuucaagucacugga

SEQ ID NO: 664199 - RNA, 22 nt, Human
gcuggcuuccaucagaggguga

SEQ ID NO: 664200 - RNA, 22 nt, Human
cuuacaaauacacuuaggagag

SEQ ID NO: 664201 - RNA, 22 nt, Human
acugaauagcccuucugucucc

SEQ ID NO: 664202 - RNA, 22 nt, Human
uaauugcuuguaaagcccugaa

SEQ ID NO: 664203 - RNA, 22 nt, Human
auuccacuuauaugaaguaacg

SEQ ID NO: 664204 - RNA, 22 nt, Human
ugcccaggauugugaggucagg

SEQ ID NO: 664205 - RNA, 22 nt, Human
aggagggagcuuaagccaggca

SEQ ID NO: 664206 - RNA, 22 nt, Human
ugaugaauuaguaacaaaugag

SEQ ID NO: 664207 - RNA, 22 nt, Human
uaggauuuaggcuuuaacaucu

SEQ ID NO: 664208 - RNA, 22 nt, Human
caucauaauaacccagacacag

SEQ ID NO: 664209 - RNA, 22 nt, Human
uucuccucuguuggccuucccu

SEQ ID NO: 664210 - RNA, 22 nt, Human
ugacauuugagcauacauguaa

SEQ ID NO: 664211 - RNA, 22 nt, Human
agauaaaguccaaacuguguag

SEQ ID NO: 664212 - RNA, 22 nt, Human
cagaugugagcuggggagagug

SEQ ID NO: 664213 - RNA, 22 nt, Human
agguaugugcuauuguuauauu

SEQ ID NO: 664214 - RNA, 22 nt, Human
auuuagcaagaguacaaaauaa

SEQ ID NO: 664215 - RNA, 22 nt, Human
aagcucauuaauuagaagcuaa

SEQ ID NO: 664216 - RNA, 22 nt, Human
uaugcagcaccacucacugcag

SEQ ID NO: 664217 - RNA, 22 nt, Human
aaugugguuaacccauuuaaga

SEQ ID NO: 664218 - RNA, 22 nt, Human
uagcuugacuauucuaugaugu

SEQ ID NO: 664219 - RNA, 19 nt, Human
cccaggagucuggcugguu

SEQ ID NO: 664220 - RNA, 22 nt, Human
uauguauucucagauuuacuaa

SEQ ID NO: 664221 - RNA, 22 nt, Human
ggauggcaggacaaggacccag

SEQ ID NO: 664222 - RNA, 22 nt, Human
cguauacaugaagacauugcug

SEQ ID NO: 664223 - RNA, 22 nt, Human
cugccagugaaauugugucagu

SEQ ID NO: 664224 - RNA, 22 nt, Human
uauugaccagacugacacacau

SEQ ID NO: 664225 - RNA, 22 nt, Human
cuuuucaugccagcccaucaca

SEQ ID NO: 664226 - RNA, 22 nt, Human
guuuacaaauauuuuaaauggu

SEQ ID NO: 664227 - RNA, 23 nt, Human
gccaucacguucaaccaaagccu

SEQ ID NO: 664228 - RNA, 22 nt, Human
uucagcacaagacuagacaggu

SEQ ID NO: 664229 - RNA, 22 nt, Human
aaguuucaaauguugauuaugc

SEQ ID NO: 664230 - RNA, 22 nt, Human
uagcacuguucuagcauguuuu

SEQ ID NO: 664231 - RNA, 22 nt, Human
auaaggcaucucucaguuagca

SEQ ID NO: 664232 - RNA, 22 nt, Human
ccagugcauugccgugucuagg

SEQ ID NO: 664233 - RNA, 22 nt, Human
ucuuggccacuaccaccuggag

SEQ ID NO: 664234 - RNA, 19 nt, Human
agccagugagccucugggu

SEQ ID NO: 664235 - RNA, 22 nt, Human
acugagcaucagggcugggaac

SEQ ID NO: 664236 - RNA, 22 nt, Human
cccuggcagugcuccuuuagac

SEQ ID NO: 664237 - RNA, 22 nt, Human
ccuggcugcucugaugagcgcc

SEQ ID NO: 664238 - RNA, 20 nt, Human
uauuucacucuccagauggc

SEQ ID NO: 664239 - RNA, 22 nt, Human
aggaccagaccgaacuagcuaa

SEQ ID NO: 664240 - RNA, 22 nt, Human
auaaacacuucuagggcacaca

SEQ ID NO: 664241 - RNA, 22 nt, Human
acagcagagcaccagggccacu

SEQ ID NO: 664242 - RNA, 22 nt, Human
cuccccauccaggcagcaggug

SEQ ID NO: 664243 - RNA, 22 nt, Human
agcaccaucacagcuguauguc

SEQ ID NO: 664244 - RNA, 22 nt, Human
uguuugaaacuuugaucacuaa

SEQ ID NO: 664245 - RNA, 22 nt, Human
cuguccugugucagccugaaau

SEQ ID NO: 664246 - RNA, 22 nt, Human
acuaaauacacacauuuguuca

SEQ ID NO: 664247 - RNA, 19 nt, Human
cuuauacagauuuucucau

SEQ ID NO: 664248 - RNA, 22 nt, Human
uucuuauuuuccugaggaagaa

SEQ ID NO: 664249 - RNA, 21 nt, Human
aguucauacugaguaacaaaa

SEQ ID NO: 664250 - RNA, 22 nt, Human
cacaggcucuccagggccugga

SEQ ID NO: 664251 - RNA, 22 nt, Human
uuguccugauuuugcaacuucu

SEQ ID NO: 664252 - RNA, 22 nt, Human
ucccacagcaugaguaacucuc

SEQ ID NO: 664253 - RNA, 22 nt, Human
ucuugauuuuguuaaaauuaga

SEQ ID NO: 664254 - RNA, 22 nt, Human
uggaaggcauuucacacaggau

SEQ ID NO: 664255 - RNA, 22 nt, Human
uucuacagaauaaauguuuaca

SEQ ID NO: 664256 - RNA, 22 nt, Human
ucgccagggaugcuguaaggaa

SEQ ID NO: 664257 - RNA, 22 nt, Human
uucugaagggcuaagugucuau

SEQ ID NO: 664258 - RNA, 22 nt, Human
ccagggacuuugcauuguuuau

SEQ ID NO: 664259 - RNA, 22 nt, Human
ccauggccaggaaagccaaggu

SEQ ID NO: 664260 - RNA, 22 nt, Human
uugcuauuuugagagucauagu

SEQ ID NO: 664261 - RNA, 22 nt, Human
ucuggcuguuaggccugaccuu

SEQ ID NO: 664262 - RNA, 22 nt, Human
uagggcaggggaggaaucugaa

SEQ ID NO: 664263 - RNA, 22 nt, Human
cagaccugaggagcacugagcc

SEQ ID NO: 664264 - RNA, 22 nt, Human
gugcuacagacugaguacacuu

SEQ ID NO: 664265 - RNA, 22 nt, Human
aggcagugagcagggugucaug

SEQ ID NO: 664266 - RNA, 22 nt, Human
uaggccuauuguauucuuaucu

SEQ ID NO: 664267 - RNA, 22 nt, Human
gaggccacccuaugggucccag

SEQ ID NO: 664268 - RNA, 23 nt, Human
uggccucuccccaccuggcagaa

SEQ ID NO: 664269 - RNA, 22 nt, Human
agguccagcuguugcagccucc

SEQ ID NO: 664270 - RNA, 22 nt, Human
gcuguagauggacuggcaucca

SEQ ID NO: 664271 - RNA, 22 nt, Human
aggcugagucgggaggaucacu

SEQ ID NO: 664272 - RNA, 22 nt, Human
ucccuuugaucacuaacagaac

SEQ ID NO: 664273 - RNA, 22 nt, Human
aaacccauggcugauaucacua

SEQ ID NO: 664274 - RNA, 22 nt, Human
aggaccuggaucacagagaucu

SEQ ID NO: 664275 - RNA, 22 nt, Human
acugugggggagccagucccau

SEQ ID NO: 664276 - RNA, 22 nt, Human
uucuauuuuuguggaacuguag

SEQ ID NO: 664277 - RNA, 22 nt, Human
uauaggcagaucugagaauauu

SEQ ID NO: 664278 - RNA, 22 nt, Human
accuccccgggagcagccuccu

SEQ ID NO: 664279 - RNA, 22 nt, Human
caggugucaaaauacuaagugg

SEQ ID NO: 664280 - RNA, 22 nt, Human
cucugucccagacccaccucuc

SEQ ID NO: 664281 - RNA, 22 nt, Human
uguguucagaauuugcugcuuu

SEQ ID NO: 664282 - RNA, 22 nt, Human
ucuggcuucaagucccagcucu

SEQ ID NO: 664283 - RNA, 22 nt, Human
ggcaggcaagucugcucuguga

SEQ ID NO: 664284 - RNA, 22 nt, Human
agguaucugguaagaggcagac

SEQ ID NO: 664285 - RNA, 22 nt, Human
uaccucagauugcugccuuggg

SEQ ID NO: 664286 - RNA, 22 nt, Human
uccaagcuacugaagguuuggg

SEQ ID NO: 664287 - RNA, 19 nt, Human
ucuguggagcucagaguag

SEQ ID NO: 664288 - RNA, 22 nt, Human
gacuuugaacaguguaucagua

SEQ ID NO: 664289 - RNA, 22 nt, Human
ccaggccuuccaguacgcagaa

SEQ ID NO: 664290 - RNA, 22 nt, Human
cuguacagcaaguucaccuugg

SEQ ID NO: 664291 - RNA, 22 nt, Human
gagucaggaguuaugcuccacc

SEQ ID NO: 664292 - RNA, 23 nt, Human
acacugucucauggauagacugc

SEQ ID NO: 664293 - RNA, 22 nt, Human
agccaugauuuucucauuuuca

SEQ ID NO: 664294 - RNA, 22 nt, Human
cauaucauuugcuuauaaaucu

SEQ ID NO: 664295 - RNA, 22 nt, Human
agagccugaggaugucccagcu

SEQ ID NO: 664296 - RNA, 22 nt, Human
gcacaugaguuaagcuggggca

SEQ ID NO: 664297 - RNA, 22 nt, Human
aaacaugagcauuucuguuuaa

SEQ ID NO: 664298 - RNA, 22 nt, Human
ggcacagagcuuugucccaguu

SEQ ID NO: 664299 - RNA, 22 nt, Human
ucagaagagcuggugcugccug

SEQ ID NO: 664300 - RNA, 22 nt, Human
aaggcccuagaaucuauauugc

SEQ ID NO: 664301 - RNA, 22 nt, Human
ucagugcaaucaagguauguuu

SEQ ID NO: 664302 - RNA, 22 nt, Human
caggcucccgaaaucacccaug

SEQ ID NO: 664303 - RNA, 22 nt, Human
acacagcaaggucugacuuugg

SEQ ID NO: 664304 - RNA, 22 nt, Human
uccagcucugcuucacagucuc

SEQ ID NO: 664305 - RNA, 22 nt, Human
gagcacaguguguugugauuuc

SEQ ID NO: 664306 - RNA, 22 nt, Human
acagcugggaaucagcugggga

SEQ ID NO: 664307 - RNA, 22 nt, Human
agugcagacugaaaugaccuuc

SEQ ID NO: 664308 - RNA, 22 nt, Human
cucagcuaguaacguacauguc

SEQ ID NO: 664309 - RNA, 22 nt, Human
uuuguagaauaauaucuuucug

SEQ ID NO: 664310 - RNA, 22 nt, Human
cuggcuuuuagugugaagacuu

SEQ ID NO: 664311 - RNA, 22 nt, Human
agcaaagaaggguucuucauua

SEQ ID NO: 664312 - RNA, 22 nt, Human
gcagaggcauuucugacgcugc

SEQ ID NO: 664313 - RNA, 21 nt, Human
cacuuuaaaaauaucuuuaua

SEQ ID NO: 664314 - RNA, 22 nt, Human
cagcagagaaauuaaacuucug

SEQ ID NO: 664315 - RNA, 22 nt, Human
gggcagguggcaaagccagagg

SEQ ID NO: 664316 - RNA, 22 nt, Human
ucugcaaacccccaucuaucau

SEQ ID NO: 664317 - RNA, 22 nt, Human
agguaaaugucagagccuuuaa

SEQ ID NO: 664318 - RNA, 17 nt, Human
uuauugcagugcugaag

SEQ ID NO: 664319 - RNA, 22 nt, Human
uuacacuuggguguggauuuua

SEQ ID NO: 664320 - RNA, 20 nt, Human
ucaaaggcaaaggugggugu

SEQ ID NO: 664321 - RNA, 22 nt, Human
uccaagaaguuucguuaaaugu

SEQ ID NO: 664322 - RNA, 22 nt, Human
uacugccuggagcauuggugcu

SEQ ID NO: 664323 - RNA, 22 nt, Human
cuggaucuucagagaucaccag

SEQ ID NO: 664324 - RNA, 22 nt, Human
auacauuagaaucugguacuca

SEQ ID NO: 664325 - RNA, 22 nt, Human
aauguuguuuuucugcaugucu

SEQ ID NO: 664326 - RNA, 22 nt, Human
ccagcugguguuccuuaggacc

SEQ ID NO: 664327 - RNA, 22 nt, Human
acucaaauuugucaacugaagc

SEQ ID NO: 664328 - RNA, 22 nt, Human
uuuccuuccagguuccuaaggc

SEQ ID NO: 664329 - RNA, 22 nt, Human
uuccuaacaaacuucagugaau

SEQ ID NO: 664330 - RNA, 22 nt, Human
uguacucagcucagaucucagg

SEQ ID NO: 664331 - RNA, 22 nt, Human
cuuuuuacaaagccugucuucu

SEQ ID NO: 664332 - RNA, 22 nt, Human
ccaggccugauugggaaucuug

SEQ ID NO: 664333 - RNA, 22 nt, Human
agggggugggaagucuagaauc

SEQ ID NO: 664334 - RNA, 22 nt, Human
ccagccuucugggacucucauc

SEQ ID NO: 664335 - RNA, 22 nt, Human
ucugggcuuuuccaugccugug

SEQ ID NO: 664336 - RNA, 22 nt, Human
auugcugugaugauguucugag

SEQ ID NO: 664337 - RNA, 23 nt, Human
cccaggagccugaguccucucug

SEQ ID NO: 664338 - RNA, 22 nt, Human
gaguccagcucauugucuggga

SEQ ID NO: 664339 - RNA, 22 nt, Human
auugcacuccagcccugcugac

SEQ ID NO: 664340 - RNA, 22 nt, Human
uuguggauucuauuucccagaa

SEQ ID NO: 664341 - RNA, 22 nt, Human
guucccacuagacugcuacuua

SEQ ID NO: 664342 - RNA, 22 nt, Human
uuuccuucaucaucugagagcu

SEQ ID NO: 664343 - RNA, 22 nt, Human
cacaggcuugucagcaugaggc

SEQ ID NO: 664344 - RNA, 22 nt, Human
agucccagaugacccagcuacu

SEQ ID NO: 664345 - RNA, 22 nt, Human
guacauguaugagauaugugua

SEQ ID NO: 664346 - RNA, 22 nt, Human
ugaggccagcuucagcagugga

SEQ ID NO: 664347 - RNA, 22 nt, Human
auguguauuuccaucgaucagc

SEQ ID NO: 664348 - RNA, 22 nt, Human
gccugccuuugugaggaagcgg

SEQ ID NO: 664349 - RNA, 22 nt, Human
gggggugguucuaaguccuaua

SEQ ID NO: 664350 - RNA, 22 nt, Human
uuuucucccgcuggcugcucuu

SEQ ID NO: 664351 - RNA, 22 nt, Human
uccagcccaucccuagccuggg

SEQ ID NO: 664352 - RNA, 22 nt, Human
ugcuggaauaauuucauguuaa

SEQ ID NO: 664353 - RNA, 22 nt, Human
uauguacaccggggaagguggg

SEQ ID NO: 664354 - RNA, 22 nt, Human
aggccucauaguagaccugccc

SEQ ID NO: 664355 - RNA, 22 nt, Human
ucucuugggaggaaagagagaa

SEQ ID NO: 664356 - RNA, 22 nt, Human
aaaggcaugauuaauucugugu

SEQ ID NO: 664357 - RNA, 22 nt, Human
ucuucacaccgggcagcaggaa

SEQ ID NO: 664358 - RNA, 22 nt, Human
acauuucugcuagaauagguga

SEQ ID NO: 664359 - RNA, 22 nt, Human
gcaggagaacaaagcaagcugc

SEQ ID NO: 664360 - RNA, 22 nt, Human
gguguccucaugauuuucuaga

SEQ ID NO: 664361 - RNA, 22 nt, Human
uucaucuggaaguucccaaggc

SEQ ID NO: 664362 - RNA, 22 nt, Human
uuugaagagccacagugaaauu

SEQ ID NO: 664363 - RNA, 22 nt, Human
ugaaacuuuugagguucuucca

SEQ ID NO: 664364 - RNA, 22 nt, Human
uuuauuacaccagguuaacuca

SEQ ID NO: 664365 - RNA, 22 nt, Human
aaugaacuggagaacaaugacc

SEQ ID NO: 664366 - RNA, 22 nt, Human
uuuuauagcugaauaguauucc

SEQ ID NO: 664367 - RNA, 22 nt, Human
uccucuggggucagggcacuac

SEQ ID NO: 664368 - RNA, 22 nt, Human
caaagugcugggauuauaggca

SEQ ID NO: 664369 - RNA, 22 nt, Human
cauaauuagagaauucauguua

SEQ ID NO: 664370 - RNA, 22 nt, Human
cuuguccuuuacuugagacuca

SEQ ID NO: 664371 - RNA, 22 nt, Human
uccuguuaguguuagacuuccc

SEQ ID NO: 664372 - RNA, 22 nt, Human
cugcccagauuuuaccaccugc

SEQ ID NO: 664373 - RNA, 22 nt, Human
aguaaaaucaccaucucuuugu

SEQ ID NO: 664374 - RNA, 21 nt, Human
ucuaaugacauccucugacaa

SEQ ID NO: 664375 - RNA, 22 nt, Human
ccugccucaucaacuugucgug

SEQ ID NO: 664376 - RNA, 22 nt, Human
uuagcugagauuaagugaacuu

SEQ ID NO: 664377 - RNA, 22 nt, Human
ugucacauguuuaauguggacu

SEQ ID NO: 664378 - RNA, 22 nt, Human
gaggagcugucaccgugacuca

SEQ ID NO: 664379 - RNA, 22 nt, Human
cuuggcugucauaagguccugg

SEQ ID NO: 664380 - RNA, 22 nt, Human
uaauuauaacaugcuuucuggc

SEQ ID NO: 664381 - RNA, 22 nt, Human
agagcccucucauuggcuuauu

SEQ ID NO: 664382 - RNA, 22 nt, Human
ucaggaugaccacgagccucua

SEQ ID NO: 664383 - RNA, 22 nt, Human
uagggcagcugcaucaggcacu

SEQ ID NO: 664384 - RNA, 22 nt, Human
uaguacaguacugggcucuagu

SEQ ID NO: 664385 - RNA, 22 nt, Human
aauugcuuacuguuuuucaccu

SEQ ID NO: 664386 - RNA, 22 nt, Human
aacaaagucguugccuagaaga

SEQ ID NO: 664387 - RNA, 22 nt, Human
ggcugccucuauuuaggaucaa

SEQ ID NO: 664388 - RNA, 22 nt, Human
uucuaaagugcaaucugacaga

SEQ ID NO: 664389 - RNA, 22 nt, Human
cacacacugacaccuuaucuug

SEQ ID NO: 664390 - RNA, 22 nt, Human
uuuccacuccuauugcaucuca

SEQ ID NO: 664391 - RNA, 22 nt, Human
cucagagaaaaggagcaagggu

SEQ ID NO: 664392 - RNA, 22 nt, Human
cacagagacaugaugucauugc

SEQ ID NO: 664393 - RNA, 22 nt, Human
acuuagcaauuugauuaaaaga

SEQ ID NO: 664394 - RNA, 22 nt, Human
acagaggggucacagccugaag

SEQ ID NO: 664395 - RNA, 22 nt, Human
ucucaguuuccucauauguaaa

SEQ ID NO: 664396 - RNA, 22 nt, Human
uuccuacaucaccagggggagu

SEQ ID NO: 664397 - RNA, 22 nt, Human
guauuuauaggggaaugagagu

SEQ ID NO: 664398 - RNA, 22 nt, Human
acacuuuuguuugaagucucca

SEQ ID NO: 664399 - RNA, 22 nt, Human
gaaacugaguaggcuagagcac

SEQ ID NO: 664400 - RNA, 22 nt, Human
auguuuuacccuuugcacaaac

SEQ ID NO: 664401 - RNA, 22 nt, Human
ccugcccauacugaccucuaau

SEQ ID NO: 664402 - RNA, 22 nt, Human
ccagaaagaaugaacugaaccc

SEQ ID NO: 664403 - RNA, 22 nt, Human
ucacagaaacagaauggcacag

SEQ ID NO: 664404 - RNA, 22 nt, Human
gacagggcgagacucagucuca

SEQ ID NO: 664405 - RNA, 22 nt, Human
gccaccccaaccucccuaaguu

SEQ ID NO: 664406 - RNA, 22 nt, Human
agugacauuugcaccagcugcu

SEQ ID NO: 664407 - RNA, 22 nt, Human
cagaagucacccucagaauaac

SEQ ID NO: 664408 - RNA, 22 nt, Human
ucuccaggccuuucccaucuua

SEQ ID NO: 664409 - RNA, 22 nt, Human
cuggcuccaaauucugauguuc

SEQ ID NO: 664410 - RNA, 22 nt, Human
acuguggcgucaggaagaaauu

SEQ ID NO: 664411 - RNA, 22 nt, Human
ucugaagguugagaagggcuga

SEQ ID NO: 664412 - RNA, 22 nt, Human
uggagccugagucagcggaggc

SEQ ID NO: 664413 - RNA, 22 nt, Human
gccugggagauuaauuaggaag

SEQ ID NO: 664414 - RNA, 22 nt, Human
uccugccucuuuucuuauucca

SEQ ID NO: 664415 - RNA, 22 nt, Human
cuggaagacguuugaagccaug

SEQ ID NO: 664416 - RNA, 22 nt, Human
uugcaacaucugaacauuuauc

SEQ ID NO: 664417 - RNA, 22 nt, Human
ggucugugcucuggagccucug

SEQ ID NO: 664418 - RNA, 22 nt, Human
gcccagcugucuggcagggaug

SEQ ID NO: 664419 - RNA, 22 nt, Human
aggcccugcaggaagcaggaug

SEQ ID NO: 664420 - RNA, 22 nt, Human
ggcuggcgggugggugaaagac

SEQ ID NO: 664421 - RNA, 22 nt, Human
ucuuugcaacucccauuuccau

SEQ ID NO: 664422 - RNA, 22 nt, Human
uauguacauaacaugaaaugca

SEQ ID NO: 664423 - RNA, 22 nt, Human
gaggcagcaucuauggugggaa

SEQ ID NO: 664424 - RNA, 22 nt, Human
gcccaggcuggagugcaguagc

SEQ ID NO: 664425 - RNA, 19 nt, Human
uaccauguugacuuuccug

SEQ ID NO: 664426 - RNA, 22 nt, Human
gaaaugucuuugacaagagagg

SEQ ID NO: 664427 - RNA, 22 nt, Human
ugugugccagccuacgaggagc

SEQ ID NO: 664428 - RNA, 22 nt, Human
gacaagacauugguaaagauau

SEQ ID NO: 664429 - RNA, 22 nt, Human
uuucacagaacucacuaaggag

SEQ ID NO: 664430 - RNA, 22 nt, Human
cuauucagccucuaagacaagu

SEQ ID NO: 664431 - RNA, 22 nt, Human
uggcuggauuauuggcuaguac

SEQ ID NO: 664432 - RNA, 22 nt, Human
cugaggcagaaaaagcaagggu

SEQ ID NO: 664433 - RNA, 22 nt, Human
augcaccugaacuccaucagcu

SEQ ID NO: 664434 - RNA, 22 nt, Human
uccaugagagguaacuuuacaa

SEQ ID NO: 664435 - RNA, 22 nt, Human
ugagcacuuuaaaauauuccca

SEQ ID NO: 664436 - RNA, 22 nt, Human
cucacagagccucugugucuuc

SEQ ID NO: 664437 - RNA, 22 nt, Human
caucucaguguacagggagucu

SEQ ID NO: 664438 - RNA, 22 nt, Human
uugcuucauuuccucaggcuuu

SEQ ID NO: 664439 - RNA, 22 nt, Human
uccugaauuccucuuugcaucc

SEQ ID NO: 664440 - RNA, 22 nt, Human
cuguaguugaugauuucugaua

SEQ ID NO: 664441 - RNA, 23 nt, Human
agugcaugcuugacuuagcaagc

SEQ ID NO: 664442 - RNA, 22 nt, Human
aucuucaaagcacaucguuugu

SEQ ID NO: 664443 - RNA, 22 nt, Human
aacaaucaaguuucuaaaugac

SEQ ID NO: 664444 - RNA, 21 nt, Human
agacaggucagggagagguga

SEQ ID NO: 664445 - RNA, 22 nt, Human
ucugggagauccaagcagaacu

SEQ ID NO: 664446 - RNA, 22 nt, Human
aaugaccugggugucauuucau

SEQ ID NO: 664447 - RNA, 22 nt, Human
ucaggaacauaaugugagucag

SEQ ID NO: 664448 - RNA, 22 nt, Human
ugcuucucaaagaagcauaaug

SEQ ID NO: 664449 - RNA, 22 nt, Human
gccuguucuccagcauccaggu

SEQ ID NO: 664450 - RNA, 22 nt, Human
aaaggauuagagauaccaugcc

SEQ ID NO: 664451 - RNA, 17 nt, Human
cuucucuggcagaagau

SEQ ID NO: 664452 - RNA, 22 nt, Human
auaguguuacccuucuuaaagu

SEQ ID NO: 664453 - RNA, 22 nt, Human
cauccacuagaaugacagaguu

SEQ ID NO: 664454 - RNA, 21 nt, Human
cagccugcugcuccagggcca

SEQ ID NO: 664455 - RNA, 22 nt, Human
cuggccuuggugcuugcagaca

SEQ ID NO: 664456 - RNA, 22 nt, Human
cucccagacaugugccuccuug

SEQ ID NO: 664457 - RNA, 22 nt, Human
uuugugcagguauaggcggaga

SEQ ID NO: 664458 - RNA, 22 nt, Human
ccccuucuggucuucaauggug

SEQ ID NO: 664459 - RNA, 22 nt, Human
uucucaaggacaaaaugacaug

SEQ ID NO: 664460 - RNA, 22 nt, Human
guccuucaaguaaccugggacc

SEQ ID NO: 664461 - RNA, 19 nt, Human
cuggccaggccaggggccc

SEQ ID NO: 664462 - RNA, 19 nt, Human
agcugccugugcgcgcccg

SEQ ID NO: 664463 - RNA, 22 nt, Human
agggcucccgugaggugacugc

SEQ ID NO: 664464 - RNA, 22 nt, Human
uuugaacuucuaccugucauau

SEQ ID NO: 664465 - RNA, 22 nt, Human
ggacccagguagggaggaagau

SEQ ID NO: 664466 - RNA, 22 nt, Human
ugcuucuggggacaggcugccu

SEQ ID NO: 664467 - RNA, 22 nt, Human
cauggccaaggaugcucaacca

SEQ ID NO: 664468 - RNA, 22 nt, Human
ccagggucuuggagaggagugc

SEQ ID NO: 664469 - RNA, 22 nt, Human
gaggggcucuugggcaugaagg

SEQ ID NO: 664470 - RNA, 22 nt, Human
cuguaaaacugcuuaaguaugc

SEQ ID NO: 664471 - RNA, 22 nt, Human
accaggcagcugggggugaugu

SEQ ID NO: 664472 - RNA, 22 nt, Human
aauucuaaauguaauuuagaau

SEQ ID NO: 664473 - RNA, 22 nt, Human
acuucacauuagcuaaaaggga

SEQ ID NO: 664474 - RNA, 22 nt, Human
accacugggcgggcagccugcu

SEQ ID NO: 664475 - RNA, 22 nt, Human
aaagauaugucuccaaagagau

SEQ ID NO: 664476 - RNA, 22 nt, Human
caguccuuaaggaaacauuugu

SEQ ID NO: 664477 - RNA, 19 nt, Human
ugcugacugagcugcaaaa

SEQ ID NO: 664478 - RNA, 22 nt, Human
gcauucaucuaguaucacucug

SEQ ID NO: 664479 - RNA, 22 nt, Human
auuaaggcugcacuggccuuaa

SEQ ID NO: 664480 - RNA, 22 nt, Human
uuuuaaugugcucugcaaugau

SEQ ID NO: 664481 - RNA, 22 nt, Human
agcagcaggcuguguggacuga

SEQ ID NO: 664482 - RNA, 22 nt, Human
gcggggggcagcagucgcucag

SEQ ID NO: 664483 - RNA, 22 nt, Human
cccaggagagaggccaguuggc

SEQ ID NO: 664484 - RNA, 22 nt, Human
ucaaagucacaacucucuaauu

SEQ ID NO: 664485 - RNA, 23 nt, Human
ucugcagacgcuguucuauuguc

SEQ ID NO: 664486 - RNA, 22 nt, Human
ucaggaagugguaaaggauguu

SEQ ID NO: 664487 - RNA, 19 nt, Human
ggagaggcuggagggaugc

SEQ ID NO: 664488 - RNA, 22 nt, Human
uccuagaauaaguaacaggaca

SEQ ID NO: 664489 - RNA, 17 nt, Human
uguauuuaucaugucag

SEQ ID NO: 664490 - RNA, 22 nt, Human
ugcugggcuucacccccacagu

SEQ ID NO: 664491 - RNA, 22 nt, Human
gcacauacauauuagugucaca

SEQ ID NO: 664492 - RNA, 22 nt, Human
ucuucagauaaagggagaguau

SEQ ID NO: 664493 - RNA, 22 nt, Human
cuacauaaucuggauuugucug

SEQ ID NO: 664494 - RNA, 22 nt, Human
uuccuucuaauuuuacaccuga

SEQ ID NO: 664495 - RNA, 20 nt, Human
cccucugcuacacugggagc

SEQ ID NO: 664496 - RNA, 22 nt, Human
uaagcaaauagcuagaucagag

SEQ ID NO: 664497 - RNA, 22 nt, Human
aaaaaugaauucuucaguggca

SEQ ID NO: 664498 - RNA, 22 nt, Human
aauaaugaacauuuaaaaccug

SEQ ID NO: 664499 - RNA, 22 nt, Human
cccaguggcuguccccaugggc

SEQ ID NO: 664500 - RNA, 22 nt, Human
gaggagaaauuauccuuggugu

SEQ ID NO: 664501 - RNA, 22 nt, Human
uggcagauggccuggaaccaaa

SEQ ID NO: 664502 - RNA, 22 nt, Human
cugcccugugcacaggaaacug

SEQ ID NO: 664503 - RNA, 22 nt, Human
agagccugcaucuagccucaga

SEQ ID NO: 664504 - RNA, 22 nt, Human
uggccugccccgagauccuggc

SEQ ID NO: 664505 - RNA, 22 nt, Human
gugugcagaggcaggaggugcu

SEQ ID NO: 664506 - RNA, 22 nt, Human
uguaaacagccccauggagagc

SEQ ID NO: 664507 - RNA, 22 nt, Human
cagagugagggccugcaccugc

SEQ ID NO: 664508 - RNA, 22 nt, Human
cgucacuggcgugaagugagga

SEQ ID NO: 664509 - RNA, 22 nt, Human
ugacauuuuuaaaaccacuagu

SEQ ID NO: 664510 - RNA, 22 nt, Human
uccuagaaugcaccucugcugu

SEQ ID NO: 664511 - RNA, 22 nt, Human
uagcuguuucagugcagcagaa

SEQ ID NO: 664512 - RNA, 22 nt, Human
gccuggugaaaggcagagagcg

SEQ ID NO: 664513 - RNA, 22 nt, Human
gcccggcagucacacacccagg

SEQ ID NO: 664514 - RNA, 22 nt, Human
ucacagcauucgcaauggacag

SEQ ID NO: 664515 - RNA, 22 nt, Human
gccagcagcgagaguuuaaccu

SEQ ID NO: 664516 - RNA, 22 nt, Human
guucuguccuccuaccaggcau

SEQ ID NO: 664517 - RNA, 22 nt, Human
aaaggccauuacuugcuuuuag

SEQ ID NO: 664518 - RNA, 22 nt, Human
gagcugccuacauugccaagag

SEQ ID NO: 664519 - RNA, 22 nt, Human
accaaagggcagaacaugagca

SEQ ID NO: 664520 - RNA, 22 nt, Human
ggccaguccccuaauccagggc

SEQ ID NO: 664521 - RNA, 22 nt, Human
aaugaaguucuauucauuuucu

SEQ ID NO: 664522 - RNA, 22 nt, Human
ugggagacacuggugggagcuu

SEQ ID NO: 664523 - RNA, 18 nt, Human
gcuuucuguagaaaaggg

SEQ ID NO: 664524 - RNA, 22 nt, Human
uuuuagauaguuuaacugcacu

SEQ ID NO: 664525 - RNA, 22 nt, Human
aaaguuagaaugauaucaacga

SEQ ID NO: 664526 - RNA, 22 nt, Human
cagcugagaaauggggaaaggg

SEQ ID NO: 664527 - RNA, 22 nt, Human
ucuuugaaaagauauuccuccu

SEQ ID NO: 664528 - RNA, 22 nt, Human
aagcugcccuguguuagaguuc

SEQ ID NO: 664529 - RNA, 22 nt, Human
ucagggacugcagagggaagcu

SEQ ID NO: 664530 - RNA, 22 nt, Human
aguguggagccacugaguggcu

SEQ ID NO: 664531 - RNA, 22 nt, Human
ucuggcucauaggaaggccauu

SEQ ID NO: 664532 - RNA, 22 nt, Human
auccaggcuuaaugggagccac

SEQ ID NO: 664533 - RNA, 19 nt, Human
ugugccucuauagcaugug

SEQ ID NO: 664534 - RNA, 22 nt, Human
agugaacuguggcccgugaacu

SEQ ID NO: 664535 - RNA, 22 nt, Human
guccagcaggaugcaagugcca

SEQ ID NO: 664536 - RNA, 22 nt, Human
ugaaggcagcaugcacacuagu

SEQ ID NO: 664537 - RNA, 22 nt, Human
gcuguguguucaauaaugugau

SEQ ID NO: 664538 - RNA, 22 nt, Human
uauacaguuaaguuucuucagu

SEQ ID NO: 664539 - RNA, 22 nt, Human
ggccacuccgcugcuacuggaa

SEQ ID NO: 664540 - RNA, 22 nt, Human
uuguuucagcuguaugcuaugu

SEQ ID NO: 664541 - RNA, 22 nt, Human
uuagacauagaauauugucuag

SEQ ID NO: 664542 - RNA, 17 nt, Human
agccccucagcgucacc

SEQ ID NO: 664543 - RNA, 22 nt, Human
ucucauuuugagucagacacua

SEQ ID NO: 664544 - RNA, 22 nt, Human
ucuccaagcagggcugcaaggc

SEQ ID NO: 664545 - RNA, 23 nt, Human
ugauuuuaaaaaguaaguuauca

SEQ ID NO: 664546 - RNA, 22 nt, Human
ggaaggaagaggaccgagcugg

SEQ ID NO: 664547 - RNA, 22 nt, Human
aaggaucauaguaaacauugau

SEQ ID NO: 664548 - RNA, 22 nt, Human
agccucagcacgcagcucugug

SEQ ID NO: 664549 - RNA, 22 nt, Human
uuauuuguggcauccauguugg

SEQ ID NO: 664550 - RNA, 22 nt, Human
ucugccugcggcugcagguggc

SEQ ID NO: 664551 - RNA, 22 nt, Human
agugucuuuauagacugacaau

SEQ ID NO: 664552 - RNA, 22 nt, Human
gaaaugcauaaucuuaguagau

SEQ ID NO: 664553 - RNA, 22 nt, Human
aagccgggccugagaaaugaca

SEQ ID NO: 664554 - RNA, 22 nt, Human
gaacaguauuuccaggaauccc

SEQ ID NO: 664555 - RNA, 23 nt, Human
ugaggagcauagcugacugacag

SEQ ID NO: 664556 - RNA, 22 nt, Human
gcaggagcaaacugcagugugg

SEQ ID NO: 664557 - RNA, 22 nt, Human
gccaggcuggggggagaugucu

SEQ ID NO: 664558 - RNA, 22 nt, Human
uggggugggguuacucauucug

SEQ ID NO: 664559 - RNA, 22 nt, Human
ccugggaaggggaagagaauuc

SEQ ID NO: 664560 - RNA, 22 nt, Human
aguguuuauggaaucuuaguua

SEQ ID NO: 664561 - RNA, 22 nt, Human
uuagucucuuugcauugccaua

SEQ ID NO: 664562 - RNA, 22 nt, Human
ccaguugguuucaaugggacag

SEQ ID NO: 664563 - RNA, 22 nt, Human
uggaaagagaaacucuugcuaa

SEQ ID NO: 664564 - RNA, 22 nt, Human
ugggccucggggaagcccgugu

SEQ ID NO: 664565 - RNA, 22 nt, Human
guacaggaccgcggcccccugg

SEQ ID NO: 664566 - RNA, 22 nt, Human
uggguccacggaagacuuaggg

SEQ ID NO: 664567 - RNA, 22 nt, Human
agggcagagagaugaaugggau

SEQ ID NO: 664568 - RNA, 22 nt, Human
ccuggcaggcaagaggaaggga

SEQ ID NO: 664569 - RNA, 22 nt, Human
uuaaaucaguaggcuacuccuu

SEQ ID NO: 664570 - RNA, 18 nt, Human
acauugauggcuuuaagc

SEQ ID NO: 664571 - RNA, 22 nt, Human
acuucuucuucagcugggggau

SEQ ID NO: 664572 - RNA, 22 nt, Human
aacgugcauuaggaccucucca

SEQ ID NO: 664573 - RNA, 22 nt, Human
uccaauaacaucuaaaaacuua

SEQ ID NO: 664574 - RNA, 22 nt, Human
gaugauuuuguuggugauucaa

SEQ ID NO: 664575 - RNA, 22 nt, Human
aagugcaugguauggucuccau

SEQ ID NO: 664576 - RNA, 22 nt, Human
agcuccagccucuucuggaggu

SEQ ID NO: 664577 - RNA, 22 nt, Human
cauuaaguauuucaguuacugu

SEQ ID NO: 664578 - RNA, 20 nt, Human
gaugacauacucacuuaggg

SEQ ID NO: 664579 - RNA, 22 nt, Human
uccucugaauguacuucauaau

SEQ ID NO: 664580 - RNA, 22 nt, Human
uacaacauguaaagugguuuaa

SEQ ID NO: 664581 - RNA, 22 nt, Human
gccagcugcccucugcuggucc

SEQ ID NO: 664582 - RNA, 22 nt, Human
accucucugggccugcuuccug

SEQ ID NO: 664583 - RNA, 20 nt, Human
ccacuccaggugauucugau

SEQ ID NO: 664584 - RNA, 19 nt, Human
augcuuuauguuauuucuu

SEQ ID NO: 664585 - RNA, 22 nt, Human
uguacaaagaguauagcuuuga

SEQ ID NO: 664586 - RNA, 18 nt, Human
cagaaguccuucaaggcc

SEQ ID NO: 664587 - RNA, 22 nt, Human
ugagcacauuucacaugacagg

SEQ ID NO: 664588 - RNA, 22 nt, Human
aucucccacaggcugcuacuuc

SEQ ID NO: 664589 - RNA, 22 nt, Human
uuucuacagcuggugcaacuuu

SEQ ID NO: 664590 - RNA, 22 nt, Human
guccugggagaugggacccuga

SEQ ID NO: 664591 - RNA, 22 nt, Human
cuuuauguucaguacaaugcuu

SEQ ID NO: 664592 - RNA, 22 nt, Human
uucauucugggcucuaaggaac

SEQ ID NO: 664593 - RNA, 22 nt, Human
cacauacaaugguguuauuugg

SEQ ID NO: 664594 - RNA, 22 nt, Human
uggcuggaggaaggaacugagg

SEQ ID NO: 664595 - RNA, 20 nt, Human
cacagacuguaugggcacca

SEQ ID NO: 664596 - RNA, 22 nt, Human
gcucagagcaucccagugaaug

SEQ ID NO: 664597 - RNA, 18 nt, Human
ccucaggggaccuggcag

SEQ ID NO: 664598 - RNA, 22 nt, Human
uaacagaaaagaacugaguuug

SEQ ID NO: 664599 - RNA, 22 nt, Human
gaagaagggagugacaaaugca

SEQ ID NO: 664600 - RNA, 20 nt, Human
guggccuguccuguuguggg

SEQ ID NO: 664601 - RNA, 22 nt, Human
acugaauauauuccauugcaug

SEQ ID NO: 664602 - RNA, 21 nt, Human
uuuagggaccaggucauaggc

SEQ ID NO: 664603 - RNA, 22 nt, Human
acugggaaccugugcuaggagg

SEQ ID NO: 664604 - RNA, 18 nt, Human
ugcuccaggcccaugggc

SEQ ID NO: 664605 - RNA, 22 nt, Human
cugcugugagugguucuugccu

SEQ ID NO: 664606 - RNA, 22 nt, Human
agcccugagccagccuggucag

SEQ ID NO: 664607 - RNA, 22 nt, Human
uguaggaauguuuuuaaguugg

SEQ ID NO: 664608 - RNA, 22 nt, Human
ggagcugagcagcgauggcgga

SEQ ID NO: 664609 - RNA, 22 nt, Human
ugggcagucaucagcacaccgg

SEQ ID NO: 664610 - RNA, 22 nt, Human
cagggcuccaugcagggacucc

SEQ ID NO: 664611 - RNA, 22 nt, Human
cugggacuugaugaaaugacug

SEQ ID NO: 664612 - RNA, 22 nt, Human
ugggaagaugauaauucacagu

SEQ ID NO: 664613 - RNA, 19 nt, Human
ccugggccuccaucacccc

SEQ ID NO: 664614 - RNA, 23 nt, Human
gggagaugggaaaugaaggcucu

SEQ ID NO: 664615 - RNA, 22 nt, Human
uaaagauguucucauuucauag

SEQ ID NO: 664616 - RNA, 22 nt, Human
gaugucuuggcuugcucucugu

SEQ ID NO: 664617 - RNA, 22 nt, Human
acacauguauguuuuguauuug

SEQ ID NO: 664618 - RNA, 22 nt, Human
ucuguggccuguguccaagugc

SEQ ID NO: 664619 - RNA, 22 nt, Human
gggcauggugcugguguucaug

SEQ ID NO: 664620 - RNA, 22 nt, Human
aaguuuuaugggaagaugugca

SEQ ID NO: 664621 - RNA, 22 nt, Human
gggcagcacucauaccuauauu

SEQ ID NO: 664622 - RNA, 22 nt, Human
uucuuuguuguacuuuccuaca

SEQ ID NO: 664623 - RNA, 22 nt, Human
ugcccuggcgcugucucuaugg

SEQ ID NO: 664624 - RNA, 22 nt, Human
gacccuggugggcacuggcacc

SEQ ID NO: 664625 - RNA, 22 nt, Human
accuuuaugauucacaauguau

SEQ ID NO: 664626 - RNA, 22 nt, Human
ccaaauaauauuucagaaccau

SEQ ID NO: 664627 - RNA, 22 nt, Human
acucucccugagagggaggcau

SEQ ID NO: 664628 - RNA, 22 nt, Human
ucacuacugacagagaugugua

SEQ ID NO: 664629 - RNA, 22 nt, Human
ucuguucaucaucuggacacau

SEQ ID NO: 664630 - RNA, 19 nt, Human
uagagcugcuuccuggcag

SEQ ID NO: 664631 - RNA, 22 nt, Human
cugggcaggauacuucauggga

SEQ ID NO: 664632 - RNA, 22 nt, Human
caguagggaaugugggaggcug

SEQ ID NO: 664633 - RNA, 22 nt, Human
gaagcaguauccugacagcacc

SEQ ID NO: 664634 - RNA, 22 nt, Human
gaggcuguaaguguggagccua

SEQ ID NO: 664635 - RNA, 22 nt, Human
uguucacaagcagauguugcuu

SEQ ID NO: 664636 - RNA, 22 nt, Human
uagcagcucuuuacuaaccagu

SEQ ID NO: 664637 - RNA, 22 nt, Human
uuacaaacugucauauaguauu

SEQ ID NO: 664638 - RNA, 22 nt, Human
ggcuggaagguagaagaugagg

SEQ ID NO: 664639 - RNA, 22 nt, Human
ugcaacuaggagguucuuagcu

SEQ ID NO: 664640 - RNA, 22 nt, Human
uuucuugauuagcuguggcuca

SEQ ID NO: 664641 - RNA, 22 nt, Human
ggcugcggaucuaaggcuggga

SEQ ID NO: 664642 - RNA, 20 nt, Human
agcuggagaagggcccuucc

SEQ ID NO: 664643 - RNA, 21 nt, Human
caguagugcgucgcagaggac

SEQ ID NO: 664644 - RNA, 22 nt, Human
uaggaagagcuauaggucccca

SEQ ID NO: 664645 - RNA, 22 nt, Human
gcacagagccugguaccgagaa

SEQ ID NO: 664646 - RNA, 22 nt, Human
acauccaugcaugucugugcac

SEQ ID NO: 664647 - RNA, 22 nt, Human
uaaguuaucggaguguguuuca

SEQ ID NO: 664648 - RNA, 22 nt, Human
agucugucucugcuaaucacua

SEQ ID NO: 664649 - RNA, 19 nt, Human
uccuuugaauaucaguuga

SEQ ID NO: 664650 - RNA, 22 nt, Human
ugugcuccaucauccauaaucu

SEQ ID NO: 664651 - RNA, 22 nt, Human
acuuggauauguucacuagacc

SEQ ID NO: 664652 - RNA, 22 nt, Human
gucaggauuauuuuauuaaaag

SEQ ID NO: 664653 - RNA, 18 nt, Human
aucuuaacuugauggagu

SEQ ID NO: 664654 - RNA, 22 nt, Human
uucagcaccuggaauagcaccu

SEQ ID NO: 664655 - RNA, 17 nt, Human
aggcaaugacugugguu

SEQ ID NO: 664656 - RNA, 22 nt, Human
gagcucccaggccccagcaagg

SEQ ID NO: 664657 - RNA, 22 nt, Human
uaagcaguuuuucuuguauuaa

SEQ ID NO: 664658 - RNA, 22 nt, Human
acauucaaaauauuucugaugu

SEQ ID NO: 664659 - RNA, 22 nt, Human
auaaugcgaggagaaaaugaag

SEQ ID NO: 664660 - RNA, 22 nt, Human
uugaauaauuaauuacacucag

SEQ ID NO: 664661 - RNA, 22 nt, Human
gucagcagaaacgccacaugca

SEQ ID NO: 664662 - RNA, 22 nt, Human
cucccugaggacaggcccuguc

SEQ ID NO: 664663 - RNA, 22 nt, Human
acaggcugaggaugauugcauc

SEQ ID NO: 664664 - RNA, 21 nt, Human
acaugggaccugcgaaaggaa

SEQ ID NO: 664665 - RNA, 22 nt, Human
ucaguguguacacugagcauuu

SEQ ID NO: 664666 - RNA, 22 nt, Human
ucagugcaggaauuuccuuaga

SEQ ID NO: 664667 - RNA, 22 nt, Human
uggggcuguggauucucacgaa

SEQ ID NO: 664668 - RNA, 20 nt, Human
cuggcaggagcgagucuacc

SEQ ID NO: 664669 - RNA, 22 nt, Human
uugaaaggguuaaagugguaaa

SEQ ID NO: 664670 - RNA, 22 nt, Human
gggcugagagugacuguucugu

SEQ ID NO: 664671 - RNA, 22 nt, Human
guggcagagggugagcuggacu

SEQ ID NO: 664672 - RNA, 22 nt, Human
uuccucaggcugcuuucacaua

SEQ ID NO: 664673 - RNA, 22 nt, Human
aggaggugcuguuuguccugga

SEQ ID NO: 664674 - RNA, 22 nt, Human
gagacacagcagauauucaauc

SEQ ID NO: 664675 - RNA, 22 nt, Human
gccaggcuggucuugaacuccu

SEQ ID NO: 664676 - RNA, 22 nt, Human
cucuggccugcuuccucaggua

SEQ ID NO: 664677 - RNA, 22 nt, Human
agaggguggugaggccugguuc

SEQ ID NO: 664678 - RNA, 22 nt, Human
ucaaagucucugcuucuguaac

SEQ ID NO: 664679 - RNA, 22 nt, Human
gugcaaaaguaaaugugguuuu

SEQ ID NO: 664680 - RNA, 22 nt, Human
ugcacacauucuauggggcuga

SEQ ID NO: 664681 - RNA, 22 nt, Human
uaauacagaaguguauuaaaau

SEQ ID NO: 664682 - RNA, 22 nt, Human
uucucagaggagucgggagcug

SEQ ID NO: 664683 - RNA, 22 nt, Human
ucugggcagaagcagugcaaag

SEQ ID NO: 664684 - RNA, 23 nt, Human
acauccaugaaucaucugcuuuc

SEQ ID NO: 664685 - RNA, 22 nt, Human
ggaaagcuuuguuuuccucacc

SEQ ID NO: 664686 - RNA, 22 nt, Human
ugggcugcacccucagccucug

SEQ ID NO: 664687 - RNA, 22 nt, Human
auaaaacuuauuagaauugugu

SEQ ID NO: 664688 - RNA, 22 nt, Human
uccagguaugacaggccacucc

SEQ ID NO: 664689 - RNA, 22 nt, Human
caggaaauaucuccuggcagag

SEQ ID NO: 664690 - RNA, 22 nt, Human
acauugaauguaugugaugaaa

SEQ ID NO: 664691 - RNA, 22 nt, Human
aaccaagcucaauggucugagu

SEQ ID NO: 664692 - RNA, 22 nt, Human
aagagcacuaacagagcugaua

SEQ ID NO: 664693 - RNA, 22 nt, Human
ugcauugagucauuucaguaug

SEQ ID NO: 664694 - RNA, 22 nt, Human
gugauuaagcauuucagaauuu

SEQ ID NO: 664695 - RNA, 22 nt, Human
uaaguucugaguaaauacuguu

SEQ ID NO: 664696 - RNA, 22 nt, Human
ucagggcugcauacaggagaua

SEQ ID NO: 664697 - RNA, 22 nt, Human
ccagugccuaucuccucuggga

SEQ ID NO: 664698 - RNA, 22 nt, Human
uuuagugauaagaauuaugaaa

SEQ ID NO: 664699 - RNA, 22 nt, Human
aggcauauacucucagaaaaaa

SEQ ID NO: 664700 - RNA, 22 nt, Human
uuccuggccucucucugagcag

SEQ ID NO: 664701 - RNA, 22 nt, Human
agaggcucuaauaccagcaugg

SEQ ID NO: 664702 - RNA, 22 nt, Human
cagugggaagggcagaggcuuu

SEQ ID NO: 664703 - RNA, 22 nt, Human
agaccauggccauccuaggaaa

SEQ ID NO: 664704 - RNA, 22 nt, Human
cagggcagggagcuuagaauga

SEQ ID NO: 664705 - RNA, 22 nt, Human
cucuucccagcuccacgagagg

SEQ ID NO: 664706 - RNA, 22 nt, Human
ggcucuguucuaaauuaauaag

SEQ ID NO: 664707 - RNA, 22 nt, Human
auggcuguuuagcuucucugcu

SEQ ID NO: 664708 - RNA, 22 nt, Human
ugcauauuauguguaucugucu

SEQ ID NO: 664709 - RNA, 22 nt, Human
aggcuccuaucgcuuucagcaa

SEQ ID NO: 664710 - RNA, 22 nt, Human
agaucacagcccccagaugcca

SEQ ID NO: 664711 - RNA, 22 nt, Human
uaggaaaugcugucuuauugua

SEQ ID NO: 664712 - RNA, 22 nt, Human
gaugaaaugcugagccugaguu

SEQ ID NO: 664713 - RNA, 18 nt, Human
cagagcaguaugaauguu

SEQ ID NO: 664714 - RNA, 22 nt, Human
aggccacagagagugcaugugc

SEQ ID NO: 664715 - RNA, 22 nt, Human
gauuuagagaauguuuuguaag

SEQ ID NO: 664716 - RNA, 21 nt, Human
ugaagggguggcagugugcuu

SEQ ID NO: 664717 - RNA, 22 nt, Human
ucuguguuugccauccuugcuc

SEQ ID NO: 664718 - RNA, 22 nt, Human
uuucuuguaaaagcugugggaa

SEQ ID NO: 664719 - RNA, 22 nt, Human
caguaaguauucgagucuccau

SEQ ID NO: 664720 - RNA, 22 nt, Human
ucuggaaugaaugagguucugu

SEQ ID NO: 664721 - RNA, 22 nt, Human
uugaagcaaauucugugcagua

SEQ ID NO: 664722 - RNA, 22 nt, Human
cucuggaguucuucaagcuacu

SEQ ID NO: 664723 - RNA, 22 nt, Human
caguggccuuuccugcugcuca

SEQ ID NO: 664724 - RNA, 22 nt, Human
ccugcaagagcggagaagccag

SEQ ID NO: 664725 - RNA, 22 nt, Human
ccaggguugcuguauggcacuu

SEQ ID NO: 664726 - RNA, 20 nt, Human
uacagccccugcuucuguug

SEQ ID NO: 664727 - RNA, 22 nt, Human
aggaacccggucugucacugug

SEQ ID NO: 664728 - RNA, 22 nt, Human
accaaaggcagagcugaacacu

SEQ ID NO: 664729 - RNA, 22 nt, Human
ggagcucuccugaugugaagau

SEQ ID NO: 664730 - RNA, 22 nt, Human
cuguguagagcggcugcgagcg

SEQ ID NO: 664731 - RNA, 22 nt, Human
aaacauguuuagaaagcagcug

SEQ ID NO: 664732 - RNA, 22 nt, Human
uccuggaggggacagcaugggc

SEQ ID NO: 664733 - RNA, 22 nt, Human
aagauuuccauuucuagcucau

SEQ ID NO: 664734 - RNA, 22 nt, Human
cccaggcuggauuucgguggca

SEQ ID NO: 664735 - RNA, 22 nt, Human
agagggggugucagcacugcag

SEQ ID NO: 664736 - RNA, 22 nt, Human
aaacaguggccaauucuggaga

SEQ ID NO: 664737 - RNA, 22 nt, Human
ucaggcaggcagagggcaaaug

SEQ ID NO: 664738 - RNA, 22 nt, Human
ggagaggggaacuuguugcuug

SEQ ID NO: 664739 - RNA, 22 nt, Human
aucugaguguuggauuuauugu

SEQ ID NO: 664740 - RNA, 22 nt, Human
gcccugggcucccugcuccaca

SEQ ID NO: 664741 - RNA, 22 nt, Human
aggaaggugcaguagggugugc

SEQ ID NO: 664742 - RNA, 22 nt, Human
uguguccugcagacagacucag

SEQ ID NO: 664743 - RNA, 22 nt, Human
aggacccugaggucuccuguga

SEQ ID NO: 664744 - RNA, 22 nt, Human
guggaugauugacucuguagac

SEQ ID NO: 664745 - RNA, 22 nt, Human
uaggcagaauucauugugcugc

SEQ ID NO: 664746 - RNA, 22 nt, Human
cagaggggcugacacccuuggc

SEQ ID NO: 664747 - RNA, 22 nt, Human
cugaggcauguuacaggacaua

SEQ ID NO: 664748 - RNA, 22 nt, Human
cuggaauaaacgaucuucagca

SEQ ID NO: 664749 - RNA, 22 nt, Human
cugggcuguaauguggcacuga

SEQ ID NO: 664750 - RNA, 17 nt, Human
uuacagcagcaauagag

SEQ ID NO: 664751 - RNA, 22 nt, Human
ucgcugugaaaaccuuggacaa

SEQ ID NO: 664752 - RNA, 22 nt, Human
uugauuugauuguaauggcucu

SEQ ID NO: 664753 - RNA, 22 nt, Human
cacagaaucggccgauggugcu

SEQ ID NO: 664754 - RNA, 22 nt, Human
auggaguuuggggucaaauacu

SEQ ID NO: 664755 - RNA, 22 nt, Human
agaaaaguuuucugagacugac

SEQ ID NO: 664756 - RNA, 22 nt, Human
aggcagguccccuggaaggcac

SEQ ID NO: 664757 - RNA, 22 nt, Human
cagccucuaagcacagccucuc

SEQ ID NO: 664758 - RNA, 18 nt, Human
aggcaggugcuggaaguc

SEQ ID NO: 664759 - RNA, 22 nt, Human
ucaguuuuuacggucacaggga

SEQ ID NO: 664760 - RNA, 22 nt, Human
agacccccuuuaauggaagugc

SEQ ID NO: 664761 - RNA, 21 nt, Human
aggccucuucauggccaugau

SEQ ID NO: 664762 - RNA, 22 nt, Human
auacaucuaugccuuucugaca

SEQ ID NO: 664763 - RNA, 22 nt, Human
gauaacauuuugaagugcuagu

SEQ ID NO: 664764 - RNA, 22 nt, Human
agcuuuauuaacucuccaggug

SEQ ID NO: 664765 - RNA, 22 nt, Human
caguuaaaaugugcuauaagaa

SEQ ID NO: 664766 - RNA, 22 nt, Human
gcuggggugugguggauaagcu

SEQ ID NO: 664767 - RNA, 22 nt, Human
acauacauggugcuuucuuggu

SEQ ID NO: 664768 - RNA, 21 nt, Human
aagucagucaguucuauacua

SEQ ID NO: 664769 - RNA, 22 nt, Human
ugcagggcacggugcgcguggg

SEQ ID NO: 664770 - RNA, 22 nt, Human
auuuccauuuucagccauuacu

SEQ ID NO: 664771 - RNA, 22 nt, Human
aaacaucauaggcaugcaugau

SEQ ID NO: 664772 - RNA, 22 nt, Human
agcagcuguggggacaagggua

SEQ ID NO: 664773 - RNA, 22 nt, Human
ugcaggacucaaggguagcagg

SEQ ID NO: 664774 - RNA, 22 nt, Human
agccccccaagggccuucucuu

SEQ ID NO: 664775 - RNA, 22 nt, Human
uuacuguguuuggcuuuagaug

SEQ ID NO: 664776 - RNA, 22 nt, Human
agggccaggaacaccugaaggg

SEQ ID NO: 664777 - RNA, 22 nt, Human
uuuccucuaaacgcauuugcuu

SEQ ID NO: 664778 - RNA, 22 nt, Human
uccucaggaucuaggagugcuu

SEQ ID NO: 664779 - RNA, 22 nt, Human
cuucaauugccaccagcuagca

SEQ ID NO: 664780 - RNA, 22 nt, Human
auguucuauaucauuauuguga

SEQ ID NO: 664781 - RNA, 22 nt, Human
uuuacauggaauauugucuugu

SEQ ID NO: 664782 - RNA, 22 nt, Human
gucuggaagggagugcauuuuc

SEQ ID NO: 664783 - RNA, 22 nt, Human
ugacacauuaaaugcucacaaa

SEQ ID NO: 664784 - RNA, 22 nt, Human
auguguuuauaauuacucaauc

SEQ ID NO: 664785 - RNA, 22 nt, Human
guggccuuucuugggcuacaga

SEQ ID NO: 664786 - RNA, 21 nt, Human
ugcauuuaacagaaacaggaa

SEQ ID NO: 664787 - RNA, 22 nt, Human
ugugggaggauucagaauuggg

SEQ ID NO: 664788 - RNA, 22 nt, Human
ccauuguaaauucuguggaagu

SEQ ID NO: 664789 - RNA, 22 nt, Human
uccaggagguugagugaguucc

SEQ ID NO: 664790 - RNA, 22 nt, Human
aaagguuuucuaggguugaggg

SEQ ID NO: 664791 - RNA, 22 nt, Human
gcauuuguguggcggaaggauu

SEQ ID NO: 664792 - RNA, 22 nt, Human
gcaaauugggaaauuucucuag

SEQ ID NO: 664793 - RNA, 22 nt, Human
cucagcuucuaccuccugagug

SEQ ID NO: 664794 - RNA, 22 nt, Human
ucuguccagaacguacaucuug

SEQ ID NO: 664795 - RNA, 22 nt, Human
cugggcuggcgcauccgacacg

SEQ ID NO: 664796 - RNA, 22 nt, Human
augcaguacauacaaacacuga

SEQ ID NO: 664797 - RNA, 22 nt, Human
gucaguucauuagcacuuccaa

SEQ ID NO: 664798 - RNA, 19 nt, Human
cacaugagggcugagggac

SEQ ID NO: 664799 - RNA, 22 nt, Human
uucucuuuuagaggcuccauga

SEQ ID NO: 664800 - RNA, 19 nt, Human
uguggggagucagggggcu

SEQ ID NO: 664801 - RNA, 22 nt, Human
ugaaugaucuccgauuaguccu

SEQ ID NO: 664802 - RNA, 22 nt, Human
uacacuguguaaaaugcacuuu

SEQ ID NO: 664803 - RNA, 22 nt, Human
cagcgaggugaaggguacaagc

SEQ ID NO: 664804 - RNA, 22 nt, Human
uucucaguaguuagcauuugug

SEQ ID NO: 664805 - RNA, 22 nt, Human
cauggcuuguaauaaauuuaua

SEQ ID NO: 664806 - RNA, 22 nt, Human
aauguuuucccagugcagacga

SEQ ID NO: 664807 - RNA, 22 nt, Human
cagccuccugggacacucaccg

SEQ ID NO: 664808 - RNA, 22 nt, Human
agagggcuggacgcagguugga

SEQ ID NO: 664809 - RNA, 22 nt, Human
uugguuuagagagugugguuac

SEQ ID NO: 664810 - RNA, 22 nt, Human
ugucuucauucuguauguccag

SEQ ID NO: 664811 - RNA, 22 nt, Human
uucaaaaguaaucaguauuaga

SEQ ID NO: 664812 - RNA, 22 nt, Human
auguaugcaugcuacaguuuuc

SEQ ID NO: 664813 - RNA, 18 nt, Human
auccauuuaaugccugga

SEQ ID NO: 664814 - RNA, 22 nt, Human
uaaagaugcuauagugaaggag

SEQ ID NO: 664815 - RNA, 22 nt, Human
gacauucacaguuuccgauggu

SEQ ID NO: 664816 - RNA, 22 nt, Human
gaauuccacuuuggcuuuuggg

SEQ ID NO: 664817 - RNA, 22 nt, Human
uauauucacuuguguccaacca

SEQ ID NO: 664818 - RNA, 22 nt, Human
cuccgcagcgggccaauccgga

SEQ ID NO: 664819 - RNA, 22 nt, Human
caggagcaugcugaugccagaa

SEQ ID NO: 664820 - RNA, 22 nt, Human
accaucagagcacaguccgugc

SEQ ID NO: 664821 - RNA, 22 nt, Human
gcagcugccgugagcucacgcc

SEQ ID NO: 664822 - RNA, 22 nt, Human
cguggcuggggcgacuccacgg

SEQ ID NO: 664823 - RNA, 22 nt, Human
uugggcuuuaauuccagagagg

SEQ ID NO: 664824 - RNA, 22 nt, Human
gcccagggcgauggucggggcc

SEQ ID NO: 664825 - RNA, 22 nt, Human
augcauuuguaaaauauaaucg

SEQ ID NO: 664826 - RNA, 22 nt, Human
ggcuuugcuucuccagaugcuu

SEQ ID NO: 664827 - RNA, 22 nt, Human
ggccuggacaccugaggucuua

SEQ ID NO: 664828 - RNA, 22 nt, Human
auuacuccuuuucuagcaggug

SEQ ID NO: 664829 - RNA, 22 nt, Human
agcugaagcagucaguucagcu

SEQ ID NO: 664830 - RNA, 22 nt, Human
ggccugaggcgucccagcugug

SEQ ID NO: 664831 - RNA, 22 nt, Human
acaggcacaccuuccugcaggc

SEQ ID NO: 664832 - RNA, 22 nt, Human
gcugccaauccagcugugggag

SEQ ID NO: 664833 - RNA, 22 nt, Human
uccccacacuuucacuccuggc

SEQ ID NO: 664834 - RNA, 22 nt, Human
cucuccagagcccuuccggccc

SEQ ID NO: 664835 - RNA, 22 nt, Human
gcaguggcagcugaggggguau

SEQ ID NO: 664836 - RNA, 23 nt, Human
gugcuuuaugaucugcugucccu

SEQ ID NO: 664837 - RNA, 20 nt, Human
auagaaguauuauguaaugu

SEQ ID NO: 664838 - RNA, 16 nt, Human
uucucugggguugugc

SEQ ID NO: 664839 - RNA, 17 nt, Human
gagccacccugugcgag

SEQ ID NO: 664840 - RNA, 22 nt, Human
guacucucuugaaggccuuucu

SEQ ID NO: 664841 - RNA, 19 nt, Human
ugagccagggaggccaugc

SEQ ID NO: 664842 - RNA, 22 nt, Human
cuaacuuugucaucuucccuuu

SEQ ID NO: 664843 - RNA, 22 nt, Human
aggcucugggaagcagugaguu

SEQ ID NO: 664844 - RNA, 22 nt, Human
uagcagcuguggaggggcugug

SEQ ID NO: 664845 - RNA, 22 nt, Human
ggaucaggcugaagcuaggacu

SEQ ID NO: 664846 - RNA, 23 nt, Human
gucagggcuggggucagagugac

SEQ ID NO: 664847 - RNA, 20 nt, Human
agaguuuggggucauuuugg

SEQ ID NO: 664848 - RNA, 22 nt, Human
uuuagcaaauuagcaccucuaa

SEQ ID NO: 664849 - RNA, 22 nt, Human
acagugucugacacauuguagc

SEQ ID NO: 664850 - RNA, 23 nt, Human
ggacacaggccuugucugcgccu

SEQ ID NO: 664851 - RNA, 22 nt, Human
ucucugaagaaucgaugauucu

SEQ ID NO: 664852 - RNA, 22 nt, Human
uugcugaucugugaaucagcca

SEQ ID NO: 664853 - RNA, 22 nt, Human
agccuggacagcuacggagaac

SEQ ID NO: 664854 - RNA, 22 nt, Human
cucugugcccuacugcucagcu

SEQ ID NO: 664855 - RNA, 22 nt, Human
cuuaacauccugcauuuuucuu

SEQ ID NO: 664856 - RNA, 22 nt, Human
uagcaaagaagauauuauugca

SEQ ID NO: 664857 - RNA, 22 nt, Human
ugcagggaaaguguuggcagca

SEQ ID NO: 664858 - RNA, 22 nt, Human
cugcccaccccgaggcaggaag

SEQ ID NO: 664859 - RNA, 22 nt, Human
cugggguggauggguccaaguu

SEQ ID NO: 664860 - RNA, 22 nt, Human
uggccuggcucacagugagauu

SEQ ID NO: 664861 - RNA, 22 nt, Human
ucacagugacuuacagagauug

SEQ ID NO: 664862 - RNA, 22 nt, Human
aggcuguggaugcuuaacaaau

SEQ ID NO: 664863 - RNA, 22 nt, Human
ugcuggcccaguauggacugca

SEQ ID NO: 664864 - RNA, 22 nt, Human
aguacaauuuaaugaagauagc

SEQ ID NO: 664865 - RNA, 22 nt, Human
cugcagggcagaagggcauaga

SEQ ID NO: 664866 - RNA, 22 nt, Human
cucccguggauguucuucaguc

SEQ ID NO: 664867 - RNA, 22 nt, Human
uagaaaucuacuuagacuuucu

SEQ ID NO: 664868 - RNA, 22 nt, Human
cauguaaaccauugugagcauc

SEQ ID NO: 664869 - RNA, 22 nt, Human
ccacuuugaaccacugaggugg

SEQ ID NO: 664870 - RNA, 19 nt, Human
agccaggguccagacaugu

SEQ ID NO: 664871 - RNA, 22 nt, Human
caggacacaggguguggcugau

SEQ ID NO: 664872 - RNA, 22 nt, Human
ccugaccauuugccacaugggu

SEQ ID NO: 664873 - RNA, 22 nt, Human
auggcccuggcccagaccccac

SEQ ID NO: 664874 - RNA, 22 nt, Human
gaucaucuuuuccugcuuccag

SEQ ID NO: 664875 - RNA, 22 nt, Human
uaauggcagagucaugcuuucu

SEQ ID NO: 664876 - RNA, 22 nt, Human
guggagacuucuacuagagacc

SEQ ID NO: 664877 - RNA, 21 nt, Human
ggugucaguuuuggucauuag

SEQ ID NO: 664878 - RNA, 22 nt, Human
ucagggagagugacccauccac

SEQ ID NO: 664879 - RNA, 22 nt, Human
cagggcugaacugagcuuguga

SEQ ID NO: 664880 - RNA, 22 nt, Human
cagcuguguaugagagcaugcu

SEQ ID NO: 664881 - RNA, 20 nt, Human
acugggccuaggggaggcau

SEQ ID NO: 664882 - RNA, 22 nt, Human
gaagucuggcugacgagaguua

SEQ ID NO: 664883 - RNA, 18 nt, Human
ucuccuuccaaaucuuca

SEQ ID NO: 664884 - RNA, 22 nt, Human
uggaaauauacaaugugucucu

SEQ ID NO: 664885 - RNA, 21 nt, Human
cugcuguggcccccgacaugc

SEQ ID NO: 664886 - RNA, 22 nt, Human
aaagucaaaaugcucuccuguc

SEQ ID NO: 664887 - RNA, 21 nt, Human
agucacauuggggguuuaggg

SEQ ID NO: 664888 - RNA, 22 nt, Human
cagcugccugucuggaggcaau

SEQ ID NO: 664889 - RNA, 22 nt, Human
agugauggggcccugcacugau

SEQ ID NO: 664890 - RNA, 22 nt, Human
uucucucuuccaguucccacuu

SEQ ID NO: 664891 - RNA, 22 nt, Human
uuguguggauaauauuacuuga

SEQ ID NO: 664892 - RNA, 19 nt, Human
auucuucucaaauauccau

SEQ ID NO: 664893 - RNA, 19 nt, Human
ugcuuucuaaacacaugca

SEQ ID NO: 664894 - RNA, 22 nt, Human
agcugguggggaagcugcaggu

SEQ ID NO: 664895 - RNA, 22 nt, Human
uuguaacuuugcauacuccugu

SEQ ID NO: 664896 - RNA, 22 nt, Human
gcugcuucucugauggagucca

SEQ ID NO: 664897 - RNA, 22 nt, Human
ggcccaaggugccaaggccucc

SEQ ID NO: 664898 - RNA, 22 nt, Human
aggacacuuggcuauuguucca

SEQ ID NO: 664899 - RNA, 21 nt, Human
ucugggaaauugggaaagaag

SEQ ID NO: 664900 - RNA, 22 nt, Human
gccagcucuugaugggugggua

SEQ ID NO: 664901 - RNA, 22 nt, Human
cggggaagcgguucuggcggua

SEQ ID NO: 664902 - RNA, 22 nt, Human
aacaguuugagcuuugaauuuc

SEQ ID NO: 664903 - RNA, 22 nt, Human
augcuucucagcucaaggcaaa

SEQ ID NO: 664904 - RNA, 22 nt, Human
ucagccaggcagcccccugguc

SEQ ID NO: 664905 - RNA, 22 nt, Human
uaaacacugccuugguggguca

SEQ ID NO: 664906 - RNA, 22 nt, Human
uuaggaggucuauggacauccu

SEQ ID NO: 664907 - RNA, 20 nt, Human
uucugggaauuggguagcug

SEQ ID NO: 664908 - RNA, 22 nt, Human
aagaggcuuauagucuuccugu

SEQ ID NO: 664909 - RNA, 22 nt, Human
cagugcaauuacaagcuaauuc

SEQ ID NO: 664910 - RNA, 22 nt, Human
gaggggccuggcacugagcugg

SEQ ID NO: 664911 - RNA, 22 nt, Human
cugcuggugcagaguggggcug

SEQ ID NO: 664912 - RNA, 22 nt, Human
ccaggcucaggccugcucguug

SEQ ID NO: 664913 - RNA, 22 nt, Human
guaguucugcagugucaccuga

SEQ ID NO: 664914 - RNA, 22 nt, Human
ucuccagggugagcuaggccag

SEQ ID NO: 664915 - RNA, 22 nt, Human
aacuuuaaagaggaggcuuggg

SEQ ID NO: 664916 - RNA, 22 nt, Human
acauccaucuucugccugugaa

SEQ ID NO: 664917 - RNA, 22 nt, Human
acagcuguauccccagagcuca

SEQ ID NO: 664918 - RNA, 22 nt, Human
ucaggagugauaccauuuguca

SEQ ID NO: 664919 - RNA, 18 nt, Human
uccugccugugccccagg

SEQ ID NO: 664920 - RNA, 22 nt, Human
uugagaagaggcuuuguaggaa

SEQ ID NO: 664921 - RNA, 22 nt, Human
ucuccaggagcaagucacccag

SEQ ID NO: 664922 - RNA, 22 nt, Human
aggagcucagccugcagggagc

SEQ ID NO: 664923 - RNA, 21 nt, Human
gagcuguuacucucucuggag

SEQ ID NO: 664924 - RNA, 22 nt, Human
agcucuuuugcucuccaaguuu

SEQ ID NO: 664925 - RNA, 22 nt, Human
ugcaauaaagugcuauaaaucc

SEQ ID NO: 664926 - RNA, 22 nt, Human
cuggcuuucuauuuggugcuau

SEQ ID NO: 664927 - RNA, 22 nt, Human
auagcaauggcaacaacuaagc

SEQ ID NO: 664928 - RNA, 22 nt, Human
gaccacagacuggaaagagggc

SEQ ID NO: 664929 - RNA, 22 nt, Human
aggaaaugcugaugcuccugga

SEQ ID NO: 664930 - RNA, 22 nt, Human
ccaggcuguuuucaaacuuggg

SEQ ID NO: 664931 - RNA, 22 nt, Human
agaagcagaaggaagcagggcc

SEQ ID NO: 664932 - RNA, 22 nt, Human
uguaaaucacugaacuaaauga

SEQ ID NO: 664933 - RNA, 22 nt, Human
ugaaggugucuuugugaacauc

SEQ ID NO: 664934 - RNA, 22 nt, Human
cucaggagaugacagaagguau

SEQ ID NO: 664935 - RNA, 22 nt, Human
ugauggucaggaugcauggaga

SEQ ID NO: 664936 - RNA, 22 nt, Human
gauaaagggggaccaaaugacu

SEQ ID NO: 664937 - RNA, 22 nt, Human
gcucagggcgcgagggacgugg

SEQ ID NO: 664938 - RNA, 23 nt, Human
ggcuagaguggaggggaacugca

SEQ ID NO: 664939 - RNA, 18 nt, Human
aggggcagcuugugugga

SEQ ID NO: 664940 - RNA, 22 nt, Human
gcugggcagcugaggccucuca

SEQ ID NO: 664941 - RNA, 22 nt, Human
agagguggccaugggcgcugga

SEQ ID NO: 664942 - RNA, 22 nt, Human
gcagggcagcuuagucccuguc

SEQ ID NO: 664943 - RNA, 22 nt, Human
cagaguguaucuguguaagcau

SEQ ID NO: 664944 - RNA, 22 nt, Human
cauguguguccaugugacuaag

SEQ ID NO: 664945 - RNA, 22 nt, Human
gugcugaggugggugggcagcc

SEQ ID NO: 664946 - RNA, 22 nt, Human
ggcucccuagggagagugggag

SEQ ID NO: 664947 - RNA, 22 nt, Human
cacagcuucuccccgcugcggc

SEQ ID NO: 664948 - RNA, 22 nt, Human
acaguccuguacaggccauauc

SEQ ID NO: 664949 - RNA, 22 nt, Human
uggcucaguagcagugugguca

SEQ ID NO: 664950 - RNA, 21 nt, Human
ggauuuuaaaaacugcaccug

SEQ ID NO: 664951 - RNA, 22 nt, Human
gccucccugagucacccaagca

SEQ ID NO: 664952 - RNA, 22 nt, Human
gugaaauauuuuguuuauguca

SEQ ID NO: 664953 - RNA, 22 nt, Human
uggaacaccuugcuccagaaag

SEQ ID NO: 664954 - RNA, 22 nt, Human
gagcuacugaaauauugauuuu

SEQ ID NO: 664955 - RNA, 22 nt, Human
guaaccugucggaaagccuugu

SEQ ID NO: 664956 - RNA, 22 nt, Human
gaugccucuuuuggcugaauua

SEQ ID NO: 664957 - RNA, 22 nt, Human
aauggcuugcaaauggguccau

SEQ ID NO: 664958 - RNA, 22 nt, Human
agauuuguaugucuaaauguaa

SEQ ID NO: 664959 - RNA, 22 nt, Human
gcucuggccagacccucagugg

SEQ ID NO: 664960 - RNA, 22 nt, Human
gugaaacugcuuuguaaacugu

SEQ ID NO: 664961 - RNA, 22 nt, Human
uuucuuaugugcagagugagua

SEQ ID NO: 664962 - RNA, 22 nt, Human
augugucuucuguggguuugaa

SEQ ID NO: 664963 - RNA, 22 nt, Human
agcugggucuugggccaggaga

SEQ ID NO: 664964 - RNA, 22 nt, Human
uuauagcagcaugauuuacaau

SEQ ID NO: 664965 - RNA, 22 nt, Human
guuuuucuagaaaucuccuccu

SEQ ID NO: 664966 - RNA, 22 nt, Human
ugugccuggcccagugguguca

SEQ ID NO: 664967 - RNA, 20 nt, Human
uacaggaaucaagacugcau

SEQ ID NO: 664968 - RNA, 22 nt, Human
ggcuucuuaaucaugagaguga

SEQ ID NO: 664969 - RNA, 22 nt, Human
aaaagagugacugauaaguaua

SEQ ID NO: 664970 - RNA, 18 nt, Human
ugguggugacagggucau

SEQ ID NO: 664971 - RNA, 19 nt, Human
uggaacaaacugcaaugac

SEQ ID NO: 664972 - RNA, 22 nt, Human
guuuacaguggcuucauuggau

SEQ ID NO: 664973 - RNA, 22 nt, Human
agaaaacucuacaucuguaugu

SEQ ID NO: 664974 - RNA, 22 nt, Human
ccucccaccauuuagagagagc

SEQ ID NO: 664975 - RNA, 22 nt, Human
aaacuccugcauacucagaagc

SEQ ID NO: 664976 - RNA, 22 nt, Human
uacaguuuuuauucaugacaag

SEQ ID NO: 664977 - RNA, 22 nt, Human
ugaaaucaugagauagugucac

SEQ ID NO: 664978 - RNA, 22 nt, Human
cuggccgguauuugccucuggg

SEQ ID NO: 664979 - RNA, 22 nt, Human
aaauaacuuucuguguauaguc

SEQ ID NO: 664980 - RNA, 22 nt, Human
uucaggaucaaguugccaguag

SEQ ID NO: 664981 - RNA, 22 nt, Human
aaggacugacaaaugucuuccu

SEQ ID NO: 664982 - RNA, 22 nt, Human
ugcauuaugcuugugcuguaua

SEQ ID NO: 664983 - RNA, 22 nt, Human
aagagucuauuggaacuagaca

SEQ ID NO: 664984 - RNA, 23 nt, Human
cugggcuguccugaggucaccuc

SEQ ID NO: 664985 - RNA, 22 nt, Human
uuguucagaaguuuaaagaauu

SEQ ID NO: 664986 - RNA, 22 nt, Human
uguccuuuuggcugucuauggu

SEQ ID NO: 664987 - RNA, 20 nt, Human
ucaaagcacugccugucauc

SEQ ID NO: 664988 - RNA, 22 nt, Human
ucagaaguauuaugcuaaagga

SEQ ID NO: 664989 - RNA, 22 nt, Human
gcacagcagcugcucaguugcu

SEQ ID NO: 664990 - RNA, 22 nt, Human
ucucugugguacugagagucua

SEQ ID NO: 664991 - RNA, 22 nt, Human
ucuggcaguugccgcuucaguc

SEQ ID NO: 664992 - RNA, 22 nt, Human
uggggaaggcggagcuugcagc

SEQ ID NO: 664993 - RNA, 22 nt, Human
ucuuauuuuguuagaugcugua

SEQ ID NO: 664994 - RNA, 22 nt, Human
uccugggaggaacauuuaccua

SEQ ID NO: 664995 - RNA, 22 nt, Human
ggagagagaugccgccuugcuc

SEQ ID NO: 664996 - RNA, 22 nt, Human
ugugcauguaccuuauucugga

SEQ ID NO: 664997 - RNA, 22 nt, Human
auucacagaauaguuuuaccag

SEQ ID NO: 664998 - RNA, 22 nt, Human
guucuucaucuuaaccaucugu

SEQ ID NO: 664999 - RNA, 22 nt, Human
gcugauuauuacaugucugugg

SEQ ID NO: 665000 - RNA, 23 nt, Human
agcuucugguucaggucaagcag

SEQ ID NO: 665001 - RNA, 22 nt, Human
uaaauuguccucccccugguau

SEQ ID NO: 665002 - RNA, 22 nt, Human
aucuuauugcuguugccagaua

SEQ ID NO: 665003 - RNA, 22 nt, Human
aguaaaauuucugcugaggaga

SEQ ID NO: 665004 - RNA, 22 nt, Human
ucuggcagaagugcugucagua

SEQ ID NO: 665005 - RNA, 23 nt, Human
uggggcugauggagacggaccag

SEQ ID NO: 665006 - RNA, 22 nt, Human
gucauugauuuucaguuugucc

SEQ ID NO: 665007 - RNA, 22 nt, Human
auuucaugaguuauuauagugg

SEQ ID NO: 665008 - RNA, 23 nt, Human
guauuucagcauucucaguuaaa

SEQ ID NO: 665009 - RNA, 22 nt, Human
ugacuuugugcaagugaauuau

SEQ ID NO: 665010 - RNA, 22 nt, Human
uccaguggcaggcggugagguc

SEQ ID NO: 665011 - RNA, 22 nt, Human
auuaggauguguauauuguguu

SEQ ID NO: 665012 - RNA, 22 nt, Human
auggcaguuuuagaacuuuuca

SEQ ID NO: 665013 - RNA, 22 nt, Human
caugauuuacuaaaauuuguuu

SEQ ID NO: 665014 - RNA, 22 nt, Human
uauuuaauaaaacuauggcaug

SEQ ID NO: 665015 - RNA, 22 nt, Human
ucugcccugcagggagcaguaa

SEQ ID NO: 665016 - RNA, 22 nt, Human
ugugaauagucagcauuuuguu

SEQ ID NO: 665017 - RNA, 22 nt, Human
agcaggugaauuccuggaugug

SEQ ID NO: 665018 - RNA, 22 nt, Human
aaaucagucccucuuggaauuu

SEQ ID NO: 665019 - RNA, 22 nt, Human
aggggcgucuguaggcaguggg

SEQ ID NO: 665020 - RNA, 22 nt, Human
cccagagucacaugggguguuc

SEQ ID NO: 665021 - RNA, 22 nt, Human
agugauucccagacuuccuggg

SEQ ID NO: 665022 - RNA, 22 nt, Human
uucuggaagcuggaaaaggcaa

SEQ ID NO: 665023 - RNA, 22 nt, Human
cugggccuuggauugacacugu

SEQ ID NO: 665024 - RNA, 22 nt, Human
ucuauaaaacucaagagcaauu

SEQ ID NO: 665025 - RNA, 22 nt, Human
uuucugcauuuacaaaaugagg

SEQ ID NO: 665026 - RNA, 22 nt, Human
cccuggcugcuaccagguagcu

SEQ ID NO: 665027 - RNA, 22 nt, Human
gcagagaggaaugaagccaucc

SEQ ID NO: 665028 - RNA, 22 nt, Human
cagcagaguaggugcuacuucu

SEQ ID NO: 665029 - RNA, 19 nt, Human
uuagaaacuguugacacug

SEQ ID NO: 665030 - RNA, 22 nt, Human
ugaaagcaugcuugccaagcuu

SEQ ID NO: 665031 - RNA, 22 nt, Human
cuguguuuuuggucugaucuau

SEQ ID NO: 665032 - RNA, 22 nt, Human
uccccugagaccccucagcacu

SEQ ID NO: 665033 - RNA, 22 nt, Human
ucacaugagucacuaucuuaau

SEQ ID NO: 665034 - RNA, 22 nt, Human
ucagaacagaagcuggcuauaa

SEQ ID NO: 665035 - RNA, 22 nt, Human
gcagggcuguuuagugaauagg

SEQ ID NO: 665036 - RNA, 22 nt, Human
ugcauggagauauacuauuuga

SEQ ID NO: 665037 - RNA, 22 nt, Human
uguggccagggggccauguccc

SEQ ID NO: 665038 - RNA, 22 nt, Human
uggcagcagacaucugaggucu

SEQ ID NO: 665039 - RNA, 22 nt, Human
ccagccagccuugaucugagua

SEQ ID NO: 665040 - RNA, 22 nt, Human
gcaauaguauuuauuaaaguag

SEQ ID NO: 665041 - RNA, 22 nt, Human
ggguggucuggcaggcuggaaa

SEQ ID NO: 665042 - RNA, 22 nt, Human
uaaacuguagcucucguaauuc

SEQ ID NO: 665043 - RNA, 22 nt, Human
ugugaagaauuaaugugaauca

SEQ ID NO: 665044 - RNA, 22 nt, Human
gugggggcuggcucguccugug

SEQ ID NO: 665045 - RNA, 22 nt, Human
agcugccuucccucucauuagg

SEQ ID NO: 665046 - RNA, 22 nt, Human
ugacagcagcauagugagcaau

SEQ ID NO: 665047 - RNA, 22 nt, Human
uggcagugugggaggaagguac

SEQ ID NO: 665048 - RNA, 22 nt, Human
agggaugggucuaacccagaac

SEQ ID NO: 665049 - RNA, 22 nt, Human
cacaugcuccauacagaauggg

SEQ ID NO: 665050 - RNA, 22 nt, Human
uuucacaaaugucuuuaacuug

SEQ ID NO: 665051 - RNA, 22 nt, Human
uggagcagggcaucacugugcg

SEQ ID NO: 665052 - RNA, 22 nt, Human
agacauagggaggcauauaaau

SEQ ID NO: 665053 - RNA, 22 nt, Human
cagccagcuggugcggcagagc

SEQ ID NO: 665054 - RNA, 21 nt, Human
auccuugaucagaagagugcu

SEQ ID NO: 665055 - RNA, 22 nt, Human
aaaucgguugguucaagguaau

SEQ ID NO: 665056 - RNA, 22 nt, Human
ugucuacuugggcucuacagca

SEQ ID NO: 665057 - RNA, 22 nt, Human
guucaaccccuugaugguacag

SEQ ID NO: 665058 - RNA, 22 nt, Human
ccugcccagagccccuuucacu

SEQ ID NO: 665059 - RNA, 22 nt, Human
cagcauucuacuuugugaacug

SEQ ID NO: 665060 - RNA, 22 nt, Human
acucuucaguacaauaauaucu

SEQ ID NO: 665061 - RNA, 18 nt, Human
cucaguguuugcugaaaa

SEQ ID NO: 665062 - RNA, 22 nt, Human
auuaauacauuauagggauugu

SEQ ID NO: 665063 - RNA, 22 nt, Human
uauacacauauacguuugugug

SEQ ID NO: 665064 - RNA, 22 nt, Human
ugucacaugacacaaauaucua

SEQ ID NO: 665065 - RNA, 22 nt, Human
ggugcccagagccaggaaugag

SEQ ID NO: 665066 - RNA, 22 nt, Human
uggcagcuauggucuaagggcc

SEQ ID NO: 665067 - RNA, 22 nt, Human
caaauguuugguggcauuuugu

SEQ ID NO: 665068 - RNA, 22 nt, Human
gcagaugcaacugcaggugagu

SEQ ID NO: 665069 - RNA, 22 nt, Human
ugauuuccaaaaggcuucuaag

SEQ ID NO: 665070 - RNA, 22 nt, Human
acagcuaacuuaaacuaaccua

SEQ ID NO: 665071 - RNA, 22 nt, Human
auggguaaggcugaaggaaagu

SEQ ID NO: 665072 - RNA, 22 nt, Human
ugggccuguuucccuucagggc

SEQ ID NO: 665073 - RNA, 22 nt, Human
cugauguguuuuaguuugguaa

SEQ ID NO: 665074 - RNA, 22 nt, Human
gaaauagacacuuucuaugaau

SEQ ID NO: 665075 - RNA, 22 nt, Human
aaucacaucucauucaacagcc

SEQ ID NO: 665076 - RNA, 22 nt, Human
uacagcuuuagcaaauuaccua

SEQ ID NO: 665077 - RNA, 22 nt, Human
uuacugaaaauucuucaggauu

SEQ ID NO: 665078 - RNA, 22 nt, Human
guggaaggugcuagaacaagga

SEQ ID NO: 665079 - RNA, 18 nt, Human
ggcaggcucucuggguca

SEQ ID NO: 665080 - RNA, 19 nt, Human
ucaagauggauggcuccca

SEQ ID NO: 665081 - RNA, 22 nt, Human
uauguguuugacacccugcaag

SEQ ID NO: 665082 - RNA, 22 nt, Human
auucuacauuuggagugauguc

SEQ ID NO: 665083 - RNA, 22 nt, Human
ugaaaugauuauaugguguuug

SEQ ID NO: 665084 - RNA, 22 nt, Human
aguggagugaguggcagaagga

SEQ ID NO: 665085 - RNA, 22 nt, Human
ccaggccugcaucugcugcgca

SEQ ID NO: 665086 - RNA, 22 nt, Human
uaaggcaguuuugccugagaua

SEQ ID NO: 665087 - RNA, 22 nt, Human
uuuacacugccauucugaauac

SEQ ID NO: 665088 - RNA, 22 nt, Human
caaagcugauacucagcaagua

SEQ ID NO: 665089 - RNA, 22 nt, Human
ucccaaggcacagggcagggac

SEQ ID NO: 665090 - RNA, 22 nt, Human
guuacaaagcacuucaagugaa

SEQ ID NO: 665091 - RNA, 22 nt, Human
ucaaaucccagcucagccucuc

SEQ ID NO: 665092 - RNA, 22 nt, Human
ucaugcaaaagacuugaacuuu

SEQ ID NO: 665093 - RNA, 22 nt, Human
ccagggcuucaguuagugguga

SEQ ID NO: 665094 - RNA, 22 nt, Human
cauuaacaaugacugcuugacu

SEQ ID NO: 665095 - RNA, 21 nt, Human
ugcuugggggcuucaggagcu

SEQ ID NO: 665096 - RNA, 22 nt, Human
ucugugcccucggugcugggcc

SEQ ID NO: 665097 - RNA, 22 nt, Human
agcaaucagcuucuuuguguuu

SEQ ID NO: 665098 - RNA, 22 nt, Human
accuuuggauaauuugaguuug

SEQ ID NO: 665099 - RNA, 22 nt, Human
cugaggcugggcugaggguaua

SEQ ID NO: 665100 - RNA, 22 nt, Human
uuauuauaaugagggauaaaaa

SEQ ID NO: 665101 - RNA, 22 nt, Human
gucuaaacuuuggcccagauuu

SEQ ID NO: 665102 - RNA, 22 nt, Human
caccacugcuuccugccaucug

SEQ ID NO: 665103 - RNA, 22 nt, Human
aucugcuugcaggcuggcccuu

SEQ ID NO: 665104 - RNA, 22 nt, Human
uagauucaugcaguaugcuagu

SEQ ID NO: 665105 - RNA, 22 nt, Human
cccugaggagagcgcuucccga

SEQ ID NO: 665106 - RNA, 22 nt, Human
gcaugcugcaccagagccucuc

SEQ ID NO: 665107 - RNA, 22 nt, Human
aagauugccccauuuacacugc

SEQ ID NO: 665108 - RNA, 22 nt, Human
uguuuaaugaagaugguuuuuc

SEQ ID NO: 665109 - RNA, 22 nt, Human
uuggaagaguagaguugaauaa

SEQ ID NO: 665110 - RNA, 22 nt, Human
cuccugaguaguagcauuguca

SEQ ID NO: 665111 - RNA, 23 nt, Human
ucagaacaaugccuuaggggcau

SEQ ID NO: 665112 - RNA, 22 nt, Human
uguaucuuagugugaaaauauu

SEQ ID NO: 665113 - RNA, 22 nt, Human
gguucugaaguggucccauucc

SEQ ID NO: 665114 - RNA, 22 nt, Human
aguguccccuccaagggccugg

SEQ ID NO: 665115 - RNA, 22 nt, Human
acagcuugcaauggcuuucaac

SEQ ID NO: 665116 - RNA, 22 nt, Human
gcccaggauaaugcugucccug

SEQ ID NO: 665117 - RNA, 22 nt, Human
auguuuacaaaaaggaggcuug

SEQ ID NO: 665118 - RNA, 22 nt, Human
cuucuucuucccccuucagggg

SEQ ID NO: 665119 - RNA, 22 nt, Human
aguggcagguguuucguggugc

SEQ ID NO: 665120 - RNA, 22 nt, Human
ccugcccuucuuuccccagcau

SEQ ID NO: 665121 - RNA, 23 nt, Human
aguucucaaaaccagcuugacaa

SEQ ID NO: 665122 - RNA, 22 nt, Human
aacaaacaguuaaguguggaug

SEQ ID NO: 665123 - RNA, 22 nt, Human
aguuuuaaaugauggugguggu

SEQ ID NO: 665124 - RNA, 22 nt, Human
uuuuccugccuuugcucaggga

SEQ ID NO: 665125 - RNA, 22 nt, Human
uacagauuuugugaagaagugu

SEQ ID NO: 665126 - RNA, 22 nt, Human
cacucugagcccaagcaggcug

SEQ ID NO: 665127 - RNA, 22 nt, Human
ccaggagagcaaaggucacucu

SEQ ID NO: 665128 - RNA, 22 nt, Human
ucuuggcugugcaugcaucuuc

SEQ ID NO: 665129 - RNA, 20 nt, Human
cucugggcugcguugcaaac

SEQ ID NO: 665130 - RNA, 22 nt, Human
auguuuaaucggcugccuuucc

SEQ ID NO: 665131 - RNA, 22 nt, Human
cugaggucagaguuuagucugg

SEQ ID NO: 665132 - RNA, 22 nt, Human
ugcauauuuucugauucagaag

SEQ ID NO: 665133 - RNA, 22 nt, Human
auuguucuaaggguuuaauuaa

SEQ ID NO: 665134 - RNA, 20 nt, Human
auugucagccuucagaggag

SEQ ID NO: 665135 - RNA, 20 nt, Human
aacauuguuuguaaaagcag

SEQ ID NO: 665136 - RNA, 22 nt, Human
aaaguuuuuaagcaagacccuu

SEQ ID NO: 665137 - RNA, 21 nt, Human
gccuggcuagaagcuccuagc

SEQ ID NO: 665138 - RNA, 22 nt, Human
acuggcuuugagggaauagcua

SEQ ID NO: 665139 - RNA, 22 nt, Human
uacaggcaugaaugaaaucugu

SEQ ID NO: 665140 - RNA, 22 nt, Human
uucugccuuacgauauuuucaa

SEQ ID NO: 665141 - RNA, 22 nt, Human
ggcagcucugaugaugcucugg

SEQ ID NO: 665142 - RNA, 22 nt, Human
guaguuagaguugugcuggaga

SEQ ID NO: 665143 - RNA, 20 nt, Human
aggcucugccauugucccug

SEQ ID NO: 665144 - RNA, 22 nt, Human
uucucugggaucuggcaaaagg

SEQ ID NO: 665145 - RNA, 22 nt, Human
cgugaguggguagcuuauucuu

SEQ ID NO: 665146 - RNA, 22 nt, Human
aaagcagcugaucucagagccu

SEQ ID NO: 665147 - RNA, 22 nt, Human
ugcaggcuccaggugcacauau

SEQ ID NO: 665148 - RNA, 22 nt, Human
aauuccucuaucuuucuucaag

SEQ ID NO: 665149 - RNA, 22 nt, Human
aagauucugaaagggguggggc

SEQ ID NO: 665150 - RNA, 22 nt, Human
cuggcugugucuuggaggagcu

SEQ ID NO: 665151 - RNA, 20 nt, Human
cugaaaggagucgggauguc

SEQ ID NO: 665152 - RNA, 22 nt, Human
cucucagaaguagcacgugggc

SEQ ID NO: 665153 - RNA, 22 nt, Human
ugcaaagaugaaauauuaaagg

SEQ ID NO: 665154 - RNA, 22 nt, Human
gcccuagggcuuuugggccugu

SEQ ID NO: 665155 - RNA, 22 nt, Human
uucaugugaucacagauuguaa

SEQ ID NO: 665156 - RNA, 23 nt, Human
caucauuguuaugggugcuacua

SEQ ID NO: 665157 - RNA, 22 nt, Human
ggcugagccacugcgccuggcu

SEQ ID NO: 665158 - RNA, 22 nt, Human
cuuuauuagauguagacuuucu

SEQ ID NO: 665159 - RNA, 22 nt, Human
ucagccagcucuuggacucuga

SEQ ID NO: 665160 - RNA, 22 nt, Human
cacugagcugauagaauuccag

SEQ ID NO: 665161 - RNA, 22 nt, Human
gaaccucucagcagccaugauc

SEQ ID NO: 665162 - RNA, 22 nt, Human
agcagaaccacagcacuguuga

SEQ ID NO: 665163 - RNA, 22 nt, Human
agcucagaagggaggaaaugag

SEQ ID NO: 665164 - RNA, 22 nt, Human
uucaacuuuaggcaaagaaaac

SEQ ID NO: 665165 - RNA, 22 nt, Human
uggcagcuggagggcaauggcc

SEQ ID NO: 665166 - RNA, 22 nt, Human
ccagccacugggccacugccag

SEQ ID NO: 665167 - RNA, 22 nt, Human
aacagauauaggcagaacuuug

SEQ ID NO: 665168 - RNA, 22 nt, Human
agauucaugggaaagcuuuagg

SEQ ID NO: 665169 - RNA, 20 nt, Human
accagagaccugaaucaguu

SEQ ID NO: 665170 - RNA, 22 nt, Human
acagaacaggcugagaaaaaca

SEQ ID NO: 665171 - RNA, 22 nt, Human
cagggccaagccccuuuggcug

SEQ ID NO: 665172 - RNA, 22 nt, Human
acuuugaaauguguaagagaga

SEQ ID NO: 665173 - RNA, 22 nt, Human
aucaggauagugguuaccuggg

SEQ ID NO: 665174 - RNA, 22 nt, Human
acugggcuagaguggaagcugg

SEQ ID NO: 665175 - RNA, 21 nt, Human
ucuuggcucugccacuuauua

SEQ ID NO: 665176 - RNA, 22 nt, Human
uaaagucaucuuuacaucuuug

SEQ ID NO: 665177 - RNA, 22 nt, Human
cagcucccgccaucgggaggca

SEQ ID NO: 665178 - RNA, 22 nt, Human
cuguggagcuuguggcaguggg

SEQ ID NO: 665179 - RNA, 22 nt, Human
acauugaagggcuauccaauag

SEQ ID NO: 665180 - RNA, 22 nt, Human
gagggcagugaauuuugaagcu

SEQ ID NO: 665181 - RNA, 20 nt, Human
agcugggcaauuaugacuau

SEQ ID NO: 665182 - RNA, 22 nt, Human
uuaauaacauuguguaucaccc

SEQ ID NO: 665183 - RNA, 22 nt, Human
ucuguuuccucuuguguaaagu

SEQ ID NO: 665184 - RNA, 22 nt, Human
ucuggccacuugcuucacacug

SEQ ID NO: 665185 - RNA, 22 nt, Human
caucagcugagggugagcagaa

SEQ ID NO: 665186 - RNA, 23 nt, Human
auugauucccucuuggaagggau

SEQ ID NO: 665187 - RNA, 22 nt, Human
aguggcagcugucaugcccuag

SEQ ID NO: 665188 - RNA, 22 nt, Human
agcugugugaccuagggcaagc

SEQ ID NO: 665189 - RNA, 22 nt, Human
ugcuguguaaaaggugauugaa

SEQ ID NO: 665190 - RNA, 23 nt, Human
agcccugcugagacccagcuccc

SEQ ID NO: 665191 - RNA, 22 nt, Human
ccuagcaauaaagauaucauuu

SEQ ID NO: 665192 - RNA, 22 nt, Human
uguggcagacaagauucuaugu

SEQ ID NO: 665193 - RNA, 22 nt, Human
ucaccagggagcuuguccucug

SEQ ID NO: 665194 - RNA, 22 nt, Human
agugcauucuccaucaucuagg

SEQ ID NO: 665195 - RNA, 22 nt, Human
acccagaggugucuagcaagcu

SEQ ID NO: 665196 - RNA, 22 nt, Human
aaucagucauuagcucugaccu

SEQ ID NO: 665197 - RNA, 22 nt, Human
ugucuuaaguagauuacagccu

SEQ ID NO: 665198 - RNA, 22 nt, Human
uggcgagccccgacugaguguu

SEQ ID NO: 665199 - RNA, 22 nt, Human
aauccaucucuccgagaaguuu

SEQ ID NO: 665200 - RNA, 22 nt, Human
uccccagggucccugcuuccau

SEQ ID NO: 665201 - RNA, 22 nt, Human
gagcuuaaauggcuaaauauaa

SEQ ID NO: 665202 - RNA, 22 nt, Human
cagagguauuuugauaaacgcc

SEQ ID NO: 665203 - RNA, 20 nt, Human
uacagucagggcacaggcag

SEQ ID NO: 665204 - RNA, 22 nt, Human
cagaauguagaucaucaucaag

SEQ ID NO: 665205 - RNA, 22 nt, Human
gagguucacaggcuaucacagu

SEQ ID NO: 665206 - RNA, 22 nt, Human
gcugaauaggcacagagggcau

SEQ ID NO: 665207 - RNA, 22 nt, Human
cuccucuuuacccgcauggucu

SEQ ID NO: 665208 - RNA, 20 nt, Human
gcuuucaagcuugucauugu

SEQ ID NO: 665209 - RNA, 22 nt, Human
aggaaugaacucgagugaucug

SEQ ID NO: 665210 - RNA, 22 nt, Human
uggguccuugcugauugcugag

SEQ ID NO: 665211 - RNA, 22 nt, Human
aggauguggguuuucacauugu

SEQ ID NO: 665212 - RNA, 22 nt, Human
cugagaaggaagccuccacucu

SEQ ID NO: 665213 - RNA, 22 nt, Human
gccuggaggggacagucucugg

SEQ ID NO: 665214 - RNA, 22 nt, Human
gugaggugggcuggccagagac

SEQ ID NO: 665215 - RNA, 22 nt, Human
ucaugugucugcugcagcuguu

SEQ ID NO: 665216 - RNA, 22 nt, Human
uuaguguuagggccuguuaccu

SEQ ID NO: 665217 - RNA, 22 nt, Human
ggcuccaggagggccuuggcca

SEQ ID NO: 665218 - RNA, 22 nt, Human
uagaacuagaacaaggauuuga

SEQ ID NO: 665219 - RNA, 19 nt, Human
ucacagcaucugucugaac

SEQ ID NO: 665220 - RNA, 22 nt, Human
cuaggaaucaccaagauucuag

SEQ ID NO: 665221 - RNA, 22 nt, Human
gccucaaauguggagcacuauu

SEQ ID NO: 665222 - RNA, 22 nt, Human
aguaaacagaaagcaagaugau

SEQ ID NO: 665223 - RNA, 22 nt, Human
agaccagcugccucccagggcc

SEQ ID NO: 665224 - RNA, 22 nt, Human
aaaucucugcaggcaaauguga

SEQ ID NO: 665225 - RNA, 23 nt, Human
ucccugagcuggagagacugcac

SEQ ID NO: 665226 - RNA, 22 nt, Human
guacuucccugggaggcaagca

SEQ ID NO: 665227 - RNA, 22 nt, Human
ugaggauggucccgaggacacu

SEQ ID NO: 665228 - RNA, 22 nt, Human
uaccaccucaaccucaucugac

SEQ ID NO: 665229 - RNA, 22 nt, Human
cccagcuccuuggaugggcagg

SEQ ID NO: 665230 - RNA, 22 nt, Human
ugccuguguggucugcgcauua

SEQ ID NO: 665231 - RNA, 22 nt, Human
gucauuuaucuucagaauuucu

SEQ ID NO: 665232 - RNA, 22 nt, Human
gaguccaguuguucacagaggc

SEQ ID NO: 665233 - RNA, 22 nt, Human
cuaguauuacauuuuugugugu

SEQ ID NO: 665234 - RNA, 22 nt, Human
cagccucugagccuuggcagau

SEQ ID NO: 665235 - RNA, 22 nt, Human
uaccuggacaucagagagacac

SEQ ID NO: 665236 - RNA, 22 nt, Human
cuuuacuucagcaagcuuuccu

SEQ ID NO: 665237 - RNA, 22 nt, Human
ccagcccugauuagagaauguc

SEQ ID NO: 665238 - RNA, 18 nt, Human
uuguuuuaagacucuguc

SEQ ID NO: 665239 - RNA, 22 nt, Human
ucagcuggagaugagaaccgaa

SEQ ID NO: 665240 - RNA, 22 nt, Human
augaagacaggucucaucacca

SEQ ID NO: 665241 - RNA, 22 nt, Human
gaaucaaaucaaguucuuuuga

SEQ ID NO: 665242 - RNA, 22 nt, Human
ggugcaggagcggggugcucgg

SEQ ID NO: 665243 - RNA, 22 nt, Human
gacaaugcauugugauugugac

SEQ ID NO: 665244 - RNA, 22 nt, Human
uugauaaaaugaugaaaucacu

SEQ ID NO: 665245 - RNA, 17 nt, Human
ucugagaaaggagaauc

SEQ ID NO: 665246 - RNA, 20 nt, Human
gggcagccucgggagugggu

SEQ ID NO: 665247 - RNA, 22 nt, Human
aaguccuuaggaagcagucguu

SEQ ID NO: 665248 - RNA, 22 nt, Human
gaggaugccugggucggggaag

SEQ ID NO: 665249 - RNA, 22 nt, Human
ucagcuuugcaaguuagaaaau

SEQ ID NO: 665250 - RNA, 22 nt, Human
auuaaagaaacccagcauguga

SEQ ID NO: 665251 - RNA, 22 nt, Human
agcuuuaccugccuuggggcac

SEQ ID NO: 665252 - RNA, 22 nt, Human
gcaggggaguggcaggcccgga

SEQ ID NO: 665253 - RNA, 22 nt, Human
agcccugggaggccagcuugua

SEQ ID NO: 665254 - RNA, 22 nt, Human
agcagauggagaauggagucag

SEQ ID NO: 665255 - RNA, 22 nt, Human
cucuggaccucagcuacagacu

SEQ ID NO: 665256 - RNA, 20 nt, Human
aagcacauuucuacaauaau

SEQ ID NO: 665257 - RNA, 22 nt, Human
agcuggccuucggugucacugg

SEQ ID NO: 665258 - RNA, 22 nt, Human
gcuguggaguacagagcugguu

SEQ ID NO: 665259 - RNA, 22 nt, Human
guaguacaugaagcacuuggca

SEQ ID NO: 665260 - RNA, 21 nt, Human
aucacauuggcuguuauuauu

SEQ ID NO: 665261 - RNA, 22 nt, Human
ccuggcucuguccucgcgcaaa

SEQ ID NO: 665262 - RNA, 22 nt, Human
aaaugcauaucaaagacuugaa

SEQ ID NO: 665263 - RNA, 22 nt, Human
auuucucaaccaggucaaaaag

SEQ ID NO: 665264 - RNA, 22 nt, Human
gaagaauauucuugaucuuaga

SEQ ID NO: 665265 - RNA, 22 nt, Human
ucuuaaugcuagccaauagaga

SEQ ID NO: 665266 - RNA, 22 nt, Human
gcagauggaucaccugaggucg

SEQ ID NO: 665267 - RNA, 22 nt, Human
uucuucuucuggcugcaccugg

SEQ ID NO: 665268 - RNA, 22 nt, Human
aaacaaugaaauucauucuuca

SEQ ID NO: 665269 - RNA, 22 nt, Human
ucaguuuuucuauacuuuguag

SEQ ID NO: 665270 - RNA, 22 nt, Human
ugagauaauaaauagcuuucuu

SEQ ID NO: 665271 - RNA, 22 nt, Human
augcacagacccaaaggccauc

SEQ ID NO: 665272 - RNA, 22 nt, Human
agucugaguuaguggaaaugua

SEQ ID NO: 665273 - RNA, 22 nt, Human
agcuucaaagcuaggaagaucu

SEQ ID NO: 665274 - RNA, 22 nt, Human
aagauaugaggucaccugcugg

SEQ ID NO: 665275 - RNA, 22 nt, Human
uuugacaugcaaagcacuuuag

SEQ ID NO: 665276 - RNA, 22 nt, Human
cuuugucauuuugucucucagu

SEQ ID NO: 665277 - RNA, 22 nt, Human
gcaguguugacuaugguaugag

SEQ ID NO: 665278 - RNA, 22 nt, Human
caguucuggaggauagaagucu

SEQ ID NO: 665279 - RNA, 23 nt, Human
ugggauagaauuucauggcugcu

SEQ ID NO: 665280 - RNA, 21 nt, Human
gcacagugccaggcacacagu

SEQ ID NO: 665281 - RNA, 21 nt, Human
aagugguuuagguuaccgggg

SEQ ID NO: 665282 - RNA, 20 nt, Human
ccuggcaggcggguuacuua

SEQ ID NO: 665283 - RNA, 22 nt, Human
uagcucugaggccaucuccggu

SEQ ID NO: 665284 - RNA, 22 nt, Human
uaucaacauuaauauuuucugg

SEQ ID NO: 665285 - RNA, 19 nt, Human
gugagacccugcauagggc

SEQ ID NO: 665286 - RNA, 22 nt, Human
gcugaggaaaggcuggaaggga

SEQ ID NO: 665287 - RNA, 22 nt, Human
ccucaguguguggauguuagag

SEQ ID NO: 665288 - RNA, 22 nt, Human
aaucagcaaaugcuuacucagg

SEQ ID NO: 665289 - RNA, 22 nt, Human
ugggggugguucuugccuccag

SEQ ID NO: 665290 - RNA, 22 nt, Human
cagcacuggggccacuggaguu

SEQ ID NO: 665291 - RNA, 22 nt, Human
cagagccaggugguguuggggc

SEQ ID NO: 665292 - RNA, 22 nt, Human
agcaccagcgugggggccguug

SEQ ID NO: 665293 - RNA, 22 nt, Human
aucagaacaaaagaacaguuua

SEQ ID NO: 665294 - RNA, 22 nt, Human
acauggcucagucucaugacag

SEQ ID NO: 665295 - RNA, 22 nt, Human
uuucucucuacaguacuuucau

SEQ ID NO: 665296 - RNA, 22 nt, Human
ucugucccugagagcucaggag

SEQ ID NO: 665297 - RNA, 22 nt, Human
ugggauauaguaaaacaugaau

SEQ ID NO: 665298 - RNA, 22 nt, Human
agggagcuuccgaacuacagcu

SEQ ID NO: 665299 - RNA, 23 nt, Human
gccagagcugccugcccuugcug

SEQ ID NO: 665300 - RNA, 22 nt, Human
aaaccauggaguaaguucacau

SEQ ID NO: 665301 - RNA, 22 nt, Human
ucagagcagacuuugaaggagg

SEQ ID NO: 665302 - RNA, 22 nt, Human
cuuuucaaacgcugaugucagu

SEQ ID NO: 665303 - RNA, 22 nt, Human
ccugagguugaaguauaaauug

SEQ ID NO: 665304 - RNA, 22 nt, Human
acuugucuuuguaaaauagaaa

SEQ ID NO: 665305 - RNA, 22 nt, Human
ggcuguggcauuaggugaggcc

SEQ ID NO: 665306 - RNA, 22 nt, Human
auuccuuguauaucuacaugca

SEQ ID NO: 665307 - RNA, 22 nt, Human
cagccaccauacagcagaagcu

SEQ ID NO: 665308 - RNA, 22 nt, Human
aaacagaaggguagguaaacau

SEQ ID NO: 665309 - RNA, 22 nt, Human
auggaacaugaauuaauauggu

SEQ ID NO: 665310 - RNA, 22 nt, Human
acaugcauguuguguagggggg

SEQ ID NO: 665311 - RNA, 22 nt, Human
cugggccaaaagaaguguucuu

SEQ ID NO: 665312 - RNA, 22 nt, Human
aagaaggaaguguggacaucac

SEQ ID NO: 665313 - RNA, 22 nt, Human
uaacacaugaaagcaccuucuu

SEQ ID NO: 665314 - RNA, 22 nt, Human
ucauuuacacuucacaaaugga

SEQ ID NO: 665315 - RNA, 21 nt, Human
ucacguggucacaugagcuuu

SEQ ID NO: 665316 - RNA, 17 nt, Human
uacauguguaucugauu

SEQ ID NO: 665317 - RNA, 22 nt, Human
cagacuuuugacauuaauacag

SEQ ID NO: 665318 - RNA, 22 nt, Human
gcacuugaaaagaucaggugca

SEQ ID NO: 665319 - RNA, 22 nt, Human
ugccaagagguccaggugggaa

SEQ ID NO: 665320 - RNA, 22 nt, Human
uugaaagaacucuucagagaua

SEQ ID NO: 665321 - RNA, 23 nt, Human
acucaaauuucgcuuggaguuca

SEQ ID NO: 665322 - RNA, 22 nt, Human
ggcccagcuuucauuccuugcu

SEQ ID NO: 665323 - RNA, 21 nt, Human
acucugccagucuccugcacu

SEQ ID NO: 665324 - RNA, 22 nt, Human
gacaucauguucugcuaauagu

SEQ ID NO: 665325 - RNA, 22 nt, Human
agcaacuucuacagauauagca

SEQ ID NO: 665326 - RNA, 22 nt, Human
aaugcaaauuaucaggcuucuc

SEQ ID NO: 665327 - RNA, 23 nt, Human
ggaugggcaagccuagugccuac

SEQ ID NO: 665328 - RNA, 22 nt, Human
gugggccaggacccgcuguccg

SEQ ID NO: 665329 - RNA, 22 nt, Human
gggaaggacauucugggcucag

SEQ ID NO: 665330 - RNA, 22 nt, Human
aucuuuuacauuacugcccaga

SEQ ID NO: 665331 - RNA, 22 nt, Human
cauuaagauuuuuuucuacugg

SEQ ID NO: 665332 - RNA, 20 nt, Human
uagauucugucuguccaaac

SEQ ID NO: 665333 - RNA, 22 nt, Human
acagauaguauguaaauuaagc

SEQ ID NO: 665334 - RNA, 22 nt, Human
gagcagcuggacaggccucccu

SEQ ID NO: 665335 - RNA, 22 nt, Human
accagagcuggcucugagcacc

SEQ ID NO: 665336 - RNA, 22 nt, Human
uucauuguagcuugacuaauua

SEQ ID NO: 665337 - RNA, 22 nt, Human
agcuccuugaaggcaguagcug

SEQ ID NO: 665338 - RNA, 22 nt, Human
acccaggacacagagaugaccc

SEQ ID NO: 665339 - RNA, 22 nt, Human
aagcugucagugucaggcuaaa

SEQ ID NO: 665340 - RNA, 22 nt, Human
ugcuuuuauuuaauaucuugca

SEQ ID NO: 665341 - RNA, 22 nt, Human
ucuaaguuuggugauuaccaau

SEQ ID NO: 665342 - RNA, 22 nt, Human
cccaggcuggggcuccuccagc

SEQ ID NO: 665343 - RNA, 22 nt, Human
uucuuuuacauuaagauuucag

SEQ ID NO: 665344 - RNA, 22 nt, Human
ggcucuggcggcucuuucaaua

SEQ ID NO: 665345 - RNA, 22 nt, Human
agugaaccaggcugcgucccug

SEQ ID NO: 665346 - RNA, 22 nt, Human
ucugccugagggagcugaggaa

SEQ ID NO: 665347 - RNA, 22 nt, Human
gacuuggggauuuaucucacag

SEQ ID NO: 665348 - RNA, 22 nt, Human
aaggcucuugaguggugauagu

SEQ ID NO: 665349 - RNA, 22 nt, Human
ugcaggaauauugaugaacuua

SEQ ID NO: 665350 - RNA, 22 nt, Human
agagacuguaaugagagguaca

SEQ ID NO: 665351 - RNA, 22 nt, Human
aaucuuuuucacaagaaagcac

SEQ ID NO: 665352 - RNA, 22 nt, Human
caaaguauauuggauugaaugg

SEQ ID NO: 665353 - RNA, 22 nt, Human
gcugaaggucucuggagagguc

SEQ ID NO: 665354 - RNA, 22 nt, Human
gaggggagaaggcacuaaccag

SEQ ID NO: 665355 - RNA, 22 nt, Human
cagcccagcacuaaguagauuu

SEQ ID NO: 665356 - RNA, 22 nt, Human
cuugcaggcccagccuuacaag

SEQ ID NO: 665357 - RNA, 23 nt, Human
agaggcacuaauuauucagagau

SEQ ID NO: 665358 - RNA, 22 nt, Human
gccuccuggauuuuagugccau

SEQ ID NO: 665359 - RNA, 22 nt, Human
agauguguuucuaguuccugca

SEQ ID NO: 665360 - RNA, 22 nt, Human
acuaggaacgggguuugcacuc

SEQ ID NO: 665361 - RNA, 22 nt, Human
uggagcagccaugaugacagag

SEQ ID NO: 665362 - RNA, 22 nt, Human
aagagcauaugguucucaaagc

SEQ ID NO: 665363 - RNA, 22 nt, Human
gcuuccugagacaacauugagu

SEQ ID NO: 665364 - RNA, 22 nt, Human
agggcccuggggugcacugaca

SEQ ID NO: 665365 - RNA, 22 nt, Human
caggcaugcuucugucugggca

SEQ ID NO: 665366 - RNA, 22 nt, Human
gucauuuuucacugcauauaga

SEQ ID NO: 665367 - RNA, 21 nt, Human
cagcccagcuucuuccccagu

SEQ ID NO: 665368 - RNA, 22 nt, Human
ugaggcaauguccuucauccuu

SEQ ID NO: 665369 - RNA, 22 nt, Human
caccccuguggagcaugguggc

SEQ ID NO: 665370 - RNA, 22 nt, Human
cugcagcaaauguuaagugacu

SEQ ID NO: 665371 - RNA, 22 nt, Human
ugugggaggaacacagccagaa

SEQ ID NO: 665372 - RNA, 22 nt, Human
aguguuucaagugaugcuuugg

SEQ ID NO: 665373 - RNA, 22 nt, Human
aggggcagccucacaauccucu

SEQ ID NO: 665374 - RNA, 22 nt, Human
aauggcugggaguguauuuugg

SEQ ID NO: 665375 - RNA, 22 nt, Human
aaagguuuccgagcuuuaauuu

SEQ ID NO: 665376 - RNA, 22 nt, Human
gcucaggaaacagcagggcuug

SEQ ID NO: 665377 - RNA, 22 nt, Human
aacuaguuuagcuuuuuaagac

SEQ ID NO: 665378 - RNA, 16 nt, Human
accuccagucaagggu

SEQ ID NO: 665379 - RNA, 22 nt, Human
caauagaaggcacagauaggua

SEQ ID NO: 665380 - RNA, 22 nt, Human
cagauuuagaguggggcuugga

SEQ ID NO: 665381 - RNA, 22 nt, Human
aagagggaagucaccuggaggu

SEQ ID NO: 665382 - RNA, 22 nt, Human
acagauugaucuugagaauuau

SEQ ID NO: 665383 - RNA, 17 nt, Human
cugggccuccccugucc

SEQ ID NO: 665384 - RNA, 22 nt, Human
uucauuccuucuguaccuugcc

SEQ ID NO: 665385 - RNA, 17 nt, Human
gcuacugguuaccucua

SEQ ID NO: 665386 - RNA, 22 nt, Human
acaugggggcugcugccagcga

SEQ ID NO: 665387 - RNA, 22 nt, Human
ccaguguuuccgucaguacacg

SEQ ID NO: 665388 - RNA, 22 nt, Human
ggacagggaucauuaucugagc

SEQ ID NO: 665389 - RNA, 22 nt, Human
agcuuuagagagccaagacuca

SEQ ID NO: 665390 - RNA, 22 nt, Human
cucuuaauguuuuauagauuga

SEQ ID NO: 665391 - RNA, 22 nt, Human
gguuuaaaagccaugcaugggg

SEQ ID NO: 665392 - RNA, 22 nt, Human
aggccucuucagggagcaugga

SEQ ID NO: 665393 - RNA, 22 nt, Human
ugaaggagcucaggagauaguc

SEQ ID NO: 665394 - RNA, 22 nt, Human
uuugaaauuaagauauugucca

SEQ ID NO: 665395 - RNA, 22 nt, Human
agaugggccuucgagcaugccc

SEQ ID NO: 665396 - RNA, 22 nt, Human
uggugcaguucccagggccggg

SEQ ID NO: 665397 - RNA, 22 nt, Human
gccagaggcccaaggacagcug

SEQ ID NO: 665398 - RNA, 22 nt, Human
ucacacagugguaaaacccuga

SEQ ID NO: 665399 - RNA, 17 nt, Human
aggcuggcucacaggga

SEQ ID NO: 665400 - RNA, 22 nt, Human
augaaauguaugagucuggguu

SEQ ID NO: 665401 - RNA, 22 nt, Human
uggggaaggaucaccacaaucu

SEQ ID NO: 665402 - RNA, 17 nt, Human
ggaggcaacagacaggg

SEQ ID NO: 665403 - RNA, 22 nt, Human
uagcugggagugucugaugggu

SEQ ID NO: 665404 - RNA, 22 nt, Human
ucaggcuacacucuuuucaugg

SEQ ID NO: 665405 - RNA, 22 nt, Human
uauauugagauuugagcauugu

SEQ ID NO: 665406 - RNA, 22 nt, Human
cugagguggcgccucucuuuaa

SEQ ID NO: 665407 - RNA, 22 nt, Human
cagaggcuaagaugagugggug

SEQ ID NO: 665408 - RNA, 22 nt, Human
agacagacguagugugagagua

SEQ ID NO: 665409 - RNA, 22 nt, Human
ucuucucccaucggccgcaggg

SEQ ID NO: 665410 - RNA, 19 nt, Human
augggaagcggccagcgga

SEQ ID NO: 665411 - RNA, 22 nt, Human
aaaagcagguacucagcuuggg

SEQ ID NO: 665412 - RNA, 22 nt, Human
agcuccagcggauggucuuaua

SEQ ID NO: 665413 - RNA, 22 nt, Human
acagaacugagaauucucuauc

SEQ ID NO: 665414 - RNA, 22 nt, Human
auggacaggcuuauaacagcaa

SEQ ID NO: 665415 - RNA, 22 nt, Human
cacaggaaguggucagugccag

SEQ ID NO: 665416 - RNA, 22 nt, Human
ugcagagaaaacuccuggguac

SEQ ID NO: 665417 - RNA, 22 nt, Human
aggagucuguugaaaugucuau

SEQ ID NO: 665418 - RNA, 22 nt, Human
agagccuggggauuggcaaggg

SEQ ID NO: 665419 - RNA, 22 nt, Human
caccagcuccaccagggcaggu

SEQ ID NO: 665420 - RNA, 22 nt, Human
aaggcagcaccgccuccugaaa

SEQ ID NO: 665421 - RNA, 22 nt, Human
gacagugugaacaucuaauagu

SEQ ID NO: 665422 - RNA, 22 nt, Human
aaauugcuguugggugacucuu

SEQ ID NO: 665423 - RNA, 22 nt, Human
uuuggcacucacuuaucauugg

SEQ ID NO: 665424 - RNA, 20 nt, Human
uaggcagagcugugcagccu

SEQ ID NO: 665425 - RNA, 22 nt, Human
uagcucugucacauacacugca

SEQ ID NO: 665426 - RNA, 22 nt, Human
cagaggguugucaggcgccuug

SEQ ID NO: 665427 - RNA, 20 nt, Human
uuccagagaucugcauuuua

SEQ ID NO: 665428 - RNA, 22 nt, Human
agagacuucugccuuagcaaga

SEQ ID NO: 665429 - RNA, 22 nt, Human
cgcauccagggcgcaggaucug

SEQ ID NO: 665430 - RNA, 19 nt, Human
aaauuggcaugcugaccuc

SEQ ID NO: 665431 - RNA, 22 nt, Human
aauauucuaauaaaugcccauc

SEQ ID NO: 665432 - RNA, 22 nt, Human
aagcuucauauaugugugaguc

SEQ ID NO: 665433 - RNA, 22 nt, Human
aauugcuuaucuuguugaauag

SEQ ID NO: 665434 - RNA, 22 nt, Human
uguacaaugcugagguuugggg

SEQ ID NO: 665435 - RNA, 22 nt, Human
cggucugaucuggaaauagggc

SEQ ID NO: 665436 - RNA, 22 nt, Human
ugugaagcauagauucuguaga

SEQ ID NO: 665437 - RNA, 22 nt, Human
auuuuugcccugcaguacauaa

SEQ ID NO: 665438 - RNA, 22 nt, Human
uucauagcagucccuuucuggg

SEQ ID NO: 665439 - RNA, 22 nt, Human
agcuguguaggaucauaacacg

SEQ ID NO: 665440 - RNA, 22 nt, Human
caacugcugacaccaucacucc

SEQ ID NO: 665441 - RNA, 22 nt, Human
ugucuuuuaccuaaugagcugg

SEQ ID NO: 665442 - RNA, 22 nt, Human
aaucuucaacagaaugguagga

SEQ ID NO: 665443 - RNA, 22 nt, Human
auauaggcuaacaacuauugag

SEQ ID NO: 665444 - RNA, 22 nt, Human
uggagccacucacuaucugagu

SEQ ID NO: 665445 - RNA, 22 nt, Human
ucuuuuagagcauuucugauuc

SEQ ID NO: 665446 - RNA, 22 nt, Human
guguucucuagagcuguacaaa

SEQ ID NO: 665447 - RNA, 22 nt, Human
caccacagcauccacuagaagg

SEQ ID NO: 665448 - RNA, 22 nt, Human
ccagagagguagcuuacccucu

SEQ ID NO: 665449 - RNA, 22 nt, Human
agccaagguaucaugagaggca

SEQ ID NO: 665450 - RNA, 22 nt, Human
uugauucauggacaggccaggu

SEQ ID NO: 665451 - RNA, 22 nt, Human
uuuauuggaacacagccaugac

SEQ ID NO: 665452 - RNA, 22 nt, Human
acucauuugcaugaugugcuau

SEQ ID NO: 665453 - RNA, 22 nt, Human
uccagagaucacacugggcagg

SEQ ID NO: 665454 - RNA, 22 nt, Human
uuucuccugugaggucagaagu

SEQ ID NO: 665455 - RNA, 22 nt, Human
uaggagaagagucagggccuaa

SEQ ID NO: 665456 - RNA, 19 nt, Human
ggcauccacgaaugcagag

SEQ ID NO: 665457 - RNA, 22 nt, Human
agcccuggagcaaaggugucuu

SEQ ID NO: 665458 - RNA, 18 nt, Human
acagacaaaauggaaaug

SEQ ID NO: 665459 - RNA, 22 nt, Human
guuuucucuguguuuggaugau

SEQ ID NO: 665460 - RNA, 22 nt, Human
cccuccagagccuggacauucu

SEQ ID NO: 665461 - RNA, 22 nt, Human
gagaggagucccuaucacaguu

SEQ ID NO: 665462 - RNA, 18 nt, Human
gccugcucugcucucccc

SEQ ID NO: 665463 - RNA, 22 nt, Human
gccugccugaaggcuguaccag

SEQ ID NO: 665464 - RNA, 22 nt, Human
auacagagaagggguagaggau

SEQ ID NO: 665465 - RNA, 22 nt, Human
caguguggugugcacagcuuag

SEQ ID NO: 665466 - RNA, 22 nt, Human
agucccagccuguaggauuggg

SEQ ID NO: 665467 - RNA, 22 nt, Human
ccaggcacuucaucauuagggu

SEQ ID NO: 665468 - RNA, 22 nt, Human
agaagaauacuugauguucaug

SEQ ID NO: 665469 - RNA, 22 nt, Human
uauuucuucgggauucaagcua

SEQ ID NO: 665470 - RNA, 22 nt, Human
uugaggcacacacagguugcau

SEQ ID NO: 665471 - RNA, 22 nt, Human
auacuuuagagcuagauugccu

SEQ ID NO: 665472 - RNA, 22 nt, Human
acaaaugcaaguuuuaugucaa

SEQ ID NO: 665473 - RNA, 22 nt, Human
ucagccaguuaagucaagaaau

SEQ ID NO: 665474 - RNA, 22 nt, Human
gccugugaugcccccauaagua

SEQ ID NO: 665475 - RNA, 22 nt, Human
acagauuuggcccagccaaugc

SEQ ID NO: 665476 - RNA, 23 nt, Human
cccagaggagcagggcgugagau

SEQ ID NO: 665477 - RNA, 22 nt, Human
agagugggugaucucuguuguc

SEQ ID NO: 665478 - RNA, 22 nt, Human
ccaguguuuaggaauaaaaugu

SEQ ID NO: 665479 - RNA, 22 nt, Human
gucugcugugccuuggggaaaa

SEQ ID NO: 665480 - RNA, 22 nt, Human
ggucacuggucucugcuuccau

SEQ ID NO: 665481 - RNA, 21 nt, Human
gcuuuuuguauggcccaggaa

SEQ ID NO: 665482 - RNA, 23 nt, Human
ugaaacauuuaggguagaauuuc

SEQ ID NO: 665483 - RNA, 22 nt, Human
uuuaccauccucuuuuagaauu

SEQ ID NO: 665484 - RNA, 22 nt, Human
ccaagggcucuggacagagugg

SEQ ID NO: 665485 - RNA, 22 nt, Human
ugggccucggagcacaggagac

SEQ ID NO: 665486 - RNA, 22 nt, Human
aaacuucaagauucaagccugg

SEQ ID NO: 665487 - RNA, 22 nt, Human
gaaguuuuuguagagacagggu

SEQ ID NO: 665488 - RNA, 22 nt, Human
augcugacuucucucugcagug

SEQ ID NO: 665489 - RNA, 22 nt, Human
ugagaagcagcuuacagguguc

SEQ ID NO: 665490 - RNA, 22 nt, Human
uuucacuguuaggaguaugcua

SEQ ID NO: 665491 - RNA, 22 nt, Human
caagcccaggauuccccaguua

SEQ ID NO: 665492 - RNA, 22 nt, Human
uaucuguuaaaacaagcuuuaa

SEQ ID NO: 665493 - RNA, 17 nt, Human
uacaggagagcaggaac

SEQ ID NO: 665494 - RNA, 22 nt, Human
uguaacaauuucuuacuauugu

SEQ ID NO: 665495 - RNA, 20 nt, Human
uggaggcaccuguggagauc

SEQ ID NO: 665496 - RNA, 22 nt, Human
ugaaugagugaguucagaccuc

SEQ ID NO: 665497 - RNA, 22 nt, Human
agaugguugguccauaggccua

SEQ ID NO: 665498 - RNA, 22 nt, Human
agaauuguaagcaauuugauua

SEQ ID NO: 665499 - RNA, 19 nt, Human
ucugugcugggaggcagca

SEQ ID NO: 665500 - RNA, 22 nt, Human
ggcugccugaggcugaggcccg

SEQ ID NO: 665501 - RNA, 22 nt, Human
ucagauauucucuaagaacaau

SEQ ID NO: 665502 - RNA, 22 nt, Human
gagagggguuugccauccuaug

SEQ ID NO: 665503 - RNA, 22 nt, Human
augugcuuuagguuuguuuaca

SEQ ID NO: 665504 - RNA, 22 nt, Human
ugggcagauguggcucuccuug

SEQ ID NO: 665505 - RNA, 22 nt, Human
ccaucccugggccauguccccu

SEQ ID NO: 665506 - RNA, 22 nt, Human
gcugccuugaacuuggccuggg

SEQ ID NO: 665507 - RNA, 22 nt, Human
ggugggagagcucugucuccag

SEQ ID NO: 665508 - RNA, 21 nt, Human
ugggccaguagaaaggaaggc

SEQ ID NO: 665509 - RNA, 22 nt, Human
uugcucaggcuuagagcuacua

SEQ ID NO: 665510 - RNA, 22 nt, Human
ugcagccauuugaaaagcaguu

SEQ ID NO: 665511 - RNA, 22 nt, Human
ucagguguuagaagaaauuuca

SEQ ID NO: 665512 - RNA, 22 nt, Human
gucacaaagcgcgguggucggu

SEQ ID NO: 665513 - RNA, 22 nt, Human
uuacagagauaaacuguaagug

SEQ ID NO: 665514 - RNA, 22 nt, Human
caguuuccuuguuuaccuacug

SEQ ID NO: 665515 - RNA, 23 nt, Human
accuuggacuucccagcuuccag

SEQ ID NO: 665516 - RNA, 22 nt, Human
aaguacacaucguuggccccga

SEQ ID NO: 665517 - RNA, 22 nt, Human
aguggcagggcuggcugcugca

SEQ ID NO: 665518 - RNA, 22 nt, Human
cacaugcaguuuacgucacuga

SEQ ID NO: 665519 - RNA, 22 nt, Human
uccuuuaacuaguuaccauguu

SEQ ID NO: 665520 - RNA, 22 nt, Human
aggacccacgcacaggaacccc

SEQ ID NO: 665521 - RNA, 22 nt, Human
caggaccuggaaugcuugugaa

SEQ ID NO: 665522 - RNA, 22 nt, Human
uggcuuccuaggagcccgugcu

SEQ ID NO: 665523 - RNA, 22 nt, Human
aggccacaggauugcacagcau

SEQ ID NO: 665524 - RNA, 22 nt, Human
aguccaguguguucuggcagca

SEQ ID NO: 665525 - RNA, 20 nt, Human
ucccuccugcagauagagaa

SEQ ID NO: 665526 - RNA, 20 nt, Human
caggaggcaaggucaagguc

SEQ ID NO: 665527 - RNA, 22 nt, Human
gcuggcucugcacccaggccuc

SEQ ID NO: 665528 - RNA, 22 nt, Human
aaaggucaaaaucgugacauug

SEQ ID NO: 665529 - RNA, 22 nt, Human
guugaaaauacagauuccuagg

SEQ ID NO: 665530 - RNA, 21 nt, Human
ucaagacagcauauuuaagaa

SEQ ID NO: 665531 - RNA, 22 nt, Human
cuggagggaggaggcugcuauu

SEQ ID NO: 665532 - RNA, 22 nt, Human
gagggugacaguucuggucucu

SEQ ID NO: 665533 - RNA, 22 nt, Human
gaggaugguaugaggcaagcaa

SEQ ID NO: 665534 - RNA, 22 nt, Human
uugggggaagaggauagacagu

SEQ ID NO: 665535 - RNA, 22 nt, Human
uuuguaacugagugcucagagc

SEQ ID NO: 665536 - RNA, 22 nt, Human
cagcuggaucugccucgagcca

SEQ ID NO: 665537 - RNA, 22 nt, Human
gcuuuaaugcuucguggggcca

SEQ ID NO: 665538 - RNA, 22 nt, Human
acaggacauggcuucugugacg

SEQ ID NO: 665539 - RNA, 22 nt, Human
accugcccacacuuccuuccca

SEQ ID NO: 665540 - RNA, 22 nt, Human
ucugggaaaugcuguuccuugu

SEQ ID NO: 665541 - RNA, 18 nt, Human
uuccuucugauguauaug

SEQ ID NO: 665542 - RNA, 22 nt, Human
agcauugccugccuauugcuaa

SEQ ID NO: 665543 - RNA, 22 nt, Human
aggguggcaguuacuggagcaa

SEQ ID NO: 665544 - RNA, 22 nt, Human
agguggcaaggggcgccucucu

SEQ ID NO: 665545 - RNA, 22 nt, Human
gagcugaguagaggcugcuccc

SEQ ID NO: 665546 - RNA, 22 nt, Human
uuuccucuccggggccuccagg

SEQ ID NO: 665547 - RNA, 22 nt, Human
uucugcuauacuuaugaauaca

SEQ ID NO: 665548 - RNA, 19 nt, Human
agucacagggaagaggaac

SEQ ID NO: 665549 - RNA, 23 nt, Human
aguucaaaaucaaccaggacacu

SEQ ID NO: 665550 - RNA, 22 nt, Human
caucagagucagagcucuuucu

SEQ ID NO: 665551 - RNA, 22 nt, Human
uucugcaugaaaagaacugaac

SEQ ID NO: 665552 - RNA, 22 nt, Human
uauucucagcaacacacaugga

SEQ ID NO: 665553 - RNA, 22 nt, Human
gcaaucaaugauuuauauuugu

SEQ ID NO: 665554 - RNA, 22 nt, Human
aaacuuuaggaaggaauuuaca

SEQ ID NO: 665555 - RNA, 22 nt, Human
acuucaaacaauuaacagagaa

SEQ ID NO: 665556 - RNA, 22 nt, Human
ugguggcacaagggagagaauc

SEQ ID NO: 665557 - RNA, 22 nt, Human
agugccucuugucuacgguuuu

SEQ ID NO: 665558 - RNA, 22 nt, Human
uuucuacuaagaaaguugauua

SEQ ID NO: 665559 - RNA, 22 nt, Human
ucucagucaguuuggacugugu

SEQ ID NO: 665560 - RNA, 22 nt, Human
aucuuuuuacuaacacugcuua

SEQ ID NO: 665561 - RNA, 22 nt, Human
cauaucauaggucuuggauaau

SEQ ID NO: 665562 - RNA, 22 nt, Human
uaagguuucuucagauacuagu

SEQ ID NO: 665563 - RNA, 22 nt, Human
caaaccuuguaaaugccaaacu

SEQ ID NO: 665564 - RNA, 22 nt, Human
cugaaggauguguggugggagu

SEQ ID NO: 665565 - RNA, 22 nt, Human
ugccuugggagccagcaugcca

SEQ ID NO: 665566 - RNA, 22 nt, Human
cauacaguuuucccuagaugug

SEQ ID NO: 665567 - RNA, 19 nt, Human
auggcucugggaucacugc

SEQ ID NO: 665568 - RNA, 22 nt, Human
auacagaacaagccucaccucc

SEQ ID NO: 665569 - RNA, 22 nt, Human
aagggcagagggaaucccacau

SEQ ID NO: 665570 - RNA, 22 nt, Human
agugucugaaccaccggggcau

SEQ ID NO: 665571 - RNA, 22 nt, Human
caccaucuauagagguauuugg

SEQ ID NO: 665572 - RNA, 22 nt, Human
cauucaaaagcuccauguuugu

SEQ ID NO: 665573 - RNA, 22 nt, Human
ggucagugcgauuucccacucc

SEQ ID NO: 665574 - RNA, 22 nt, Human
guguccacggcugagaaugauu

SEQ ID NO: 665575 - RNA, 22 nt, Human
aucugcuugaguuugaagucag

SEQ ID NO: 665576 - RNA, 22 nt, Human
acagagcaugcucaguguguga

SEQ ID NO: 665577 - RNA, 22 nt, Human
uaauugcagaacuuugggaggc

SEQ ID NO: 665578 - RNA, 22 nt, Human
agcuaacacauuccagcuauuu

SEQ ID NO: 665579 - RNA, 22 nt, Human
aggugaguccugggcacaggua

SEQ ID NO: 665580 - RNA, 22 nt, Human
ugaaugaccuuugaggauggaa

SEQ ID NO: 665581 - RNA, 22 nt, Human
agaugguugucgcaaaugaaug

SEQ ID NO: 665582 - RNA, 22 nt, Human
uucugacaugugagauuuuguu

SEQ ID NO: 665583 - RNA, 22 nt, Human
gugaagacuuggagaaguuaag

SEQ ID NO: 665584 - RNA, 22 nt, Human
cugaaauucugccucugcacaa

SEQ ID NO: 665585 - RNA, 22 nt, Human
ucuccuggcucaccaggcugga

SEQ ID NO: 665586 - RNA, 22 nt, Human
ucaguccagcuccucauuuccc

SEQ ID NO: 665587 - RNA, 22 nt, Human
uuuguucauuaguacaguugua

SEQ ID NO: 665588 - RNA, 22 nt, Human
ucucccuggagcccugaagcau

SEQ ID NO: 665589 - RNA, 22 nt, Human
ugcagaguccucuggagggacu

SEQ ID NO: 665590 - RNA, 22 nt, Human
aucuccaguuagcaguacugau

SEQ ID NO: 665591 - RNA, 22 nt, Human
gccacaggcuuaggagggaggu

SEQ ID NO: 665592 - RNA, 22 nt, Human
agucuguguacuggguuucugu

SEQ ID NO: 665593 - RNA, 22 nt, Human
cugaggaaggaguuaggcaguu

SEQ ID NO: 665594 - RNA, 22 nt, Human
caguggcgugaucucugcucac

SEQ ID NO: 665595 - RNA, 22 nt, Human
cuccugucagaagcauccugag

SEQ ID NO: 665596 - RNA, 22 nt, Human
ggccccaguucacuccuggccg

SEQ ID NO: 665597 - RNA, 22 nt, Human
aucuuugaaucaaugaaucagu

SEQ ID NO: 665598 - RNA, 22 nt, Human
cucugagaauauaagacuauuu

SEQ ID NO: 665599 - RNA, 22 nt, Human
caaggaauauuuaagaacguca

SEQ ID NO: 665600 - RNA, 22 nt, Human
ccagagguccugcucacuggug

SEQ ID NO: 665601 - RNA, 20 nt, Human
aggguggcaaguuagugaca

SEQ ID NO: 665602 - RNA, 22 nt, Human
caauagcaggucuacagagaga

SEQ ID NO: 665603 - RNA, 22 nt, Human
ucuuagcagacuuggcuacugu

SEQ ID NO: 665604 - RNA, 22 nt, Human
ucuuacagaaaauagauaacau

SEQ ID NO: 665605 - RNA, 22 nt, Human
acccugggcacaccauuucccc

SEQ ID NO: 665606 - RNA, 22 nt, Human
aaaauagcauauugcuuucuuu

SEQ ID NO: 665607 - RNA, 22 nt, Human
uuggagagugauauucagaugc

SEQ ID NO: 665608 - RNA, 22 nt, Human
gcuucaugaaaaucacugguca

SEQ ID NO: 665609 - RNA, 22 nt, Human
cugcccugcuggagaucacagu

SEQ ID NO: 665610 - RNA, 22 nt, Human
uuucuuucucguaaacuuaguu

SEQ ID NO: 665611 - RNA, 22 nt, Human
aggcuggcucggcuuuucuguc

SEQ ID NO: 665612 - RNA, 22 nt, Human
aaucuucuuucuuaacaguaca

SEQ ID NO: 665613 - RNA, 19 nt, Human
cccuugguagacagcugca

SEQ ID NO: 665614 - RNA, 22 nt, Human
cugcuuccacacaagcaaagcu

SEQ ID NO: 665615 - RNA, 22 nt, Human
aaaagcacuacaauuucgcuuc

SEQ ID NO: 665616 - RNA, 22 nt, Human
uggcccagcaguucugccccag

SEQ ID NO: 665617 - RNA, 22 nt, Human
cccagcuccuuguuugcaucuc

SEQ ID NO: 665618 - RNA, 22 nt, Human
uugaaaguccuucuugaguuac

SEQ ID NO: 665619 - RNA, 22 nt, Human
gguuuaaugggugaaggcauga

SEQ ID NO: 665620 - RNA, 22 nt, Human
gaacuucuucuuuaagagacuc

SEQ ID NO: 665621 - RNA, 22 nt, Human
cugcuucagcaaagcuauuugc

SEQ ID NO: 665622 - RNA, 22 nt, Human
uccuggaagaucucugugagau

SEQ ID NO: 665623 - RNA, 22 nt, Human
caggccugugaguugaggcccc

SEQ ID NO: 665624 - RNA, 22 nt, Human
ucucuuucuauaugugagucuu

SEQ ID NO: 665625 - RNA, 22 nt, Human
uguucucaguaauucuauuuua

SEQ ID NO: 665626 - RNA, 22 nt, Human
uguucuuacggaacuuaucuuu

SEQ ID NO: 665627 - RNA, 17 nt, Human
aauguggaaguacaugc

SEQ ID NO: 665628 - RNA, 22 nt, Human
uagcugacgcuaaauaaauguu

SEQ ID NO: 665629 - RNA, 18 nt, Human
aguccuggagaucaccaa

SEQ ID NO: 665630 - RNA, 22 nt, Human
caggaggcagcgcucucaggac

SEQ ID NO: 665631 - RNA, 21 nt, Human
cugcaggaugcugaagccagg

SEQ ID NO: 665632 - RNA, 22 nt, Human
agucacuguucugucaugucaa

SEQ ID NO: 665633 - RNA, 22 nt, Human
auguagcagauauuugugcaca

SEQ ID NO: 665634 - RNA, 20 nt, Human
uuucuuguacuuggagaagg

SEQ ID NO: 665635 - RNA, 22 nt, Human
auagucuucagcacuuugauca

SEQ ID NO: 665636 - RNA, 22 nt, Human
aggagccagaauccagacucgg

SEQ ID NO: 665637 - RNA, 22 nt, Human
ccucccucuuucagucccacag

SEQ ID NO: 665638 - RNA, 22 nt, Human
gguuucaaauuaaagucuuaag

SEQ ID NO: 665639 - RNA, 22 nt, Human
aaaacauuuuacugccaucuca

SEQ ID NO: 665640 - RNA, 22 nt, Human
accaaggagaaggugcaagcuu

SEQ ID NO: 665641 - RNA, 21 nt, Human
gggugggaggacacagcaggc

SEQ ID NO: 665642 - RNA, 21 nt, Human
uggauaaaggcacuuuucauc

SEQ ID NO: 665643 - RNA, 22 nt, Human
ggcagucaagagggagucugaa

SEQ ID NO: 665644 - RNA, 21 nt, Human
ggcagagaagcuggaaguugg

SEQ ID NO: 665645 - RNA, 22 nt, Human
caaauguaucagcccagggauu

SEQ ID NO: 665646 - RNA, 22 nt, Human
gcagcuuggauuucuguaguuu

SEQ ID NO: 665647 - RNA, 22 nt, Human
uggaaugaaggagauggccuuu

SEQ ID NO: 665648 - RNA, 22 nt, Human
ccacaggcggaguggcgggcag

SEQ ID NO: 665649 - RNA, 22 nt, Human
uggcagcugucuguggggucuc

SEQ ID NO: 665650 - RNA, 22 nt, Human
uuugcugcuguauauggagccc

SEQ ID NO: 665651 - RNA, 22 nt, Human
agcuccuguggcugaaagagga

SEQ ID NO: 665652 - RNA, 22 nt, Human
aaggcaguaggaucuuccacag

SEQ ID NO: 665653 - RNA, 22 nt, Human
agauacacagcccugccaucac

SEQ ID NO: 665654 - RNA, 22 nt, Human
cucugagcucgugcaguacuuc

SEQ ID NO: 665655 - RNA, 22 nt, Human
ucuuuauuuuaugcuugugcaa

SEQ ID NO: 665656 - RNA, 22 nt, Human
ugcugccuuuguggggucacug

SEQ ID NO: 665657 - RNA, 23 nt, Human
uugugucuacuuccuaucuaggg

SEQ ID NO: 665658 - RNA, 22 nt, Human
agaagcacuacgauaggugguc

SEQ ID NO: 665659 - RNA, 18 nt, Human
augugagagaaucuucuu

SEQ ID NO: 665660 - RNA, 22 nt, Human
aggauagaagccccauguucuu

SEQ ID NO: 665661 - RNA, 22 nt, Human
agggaggauaguagucaguuua

SEQ ID NO: 665662 - RNA, 22 nt, Human
agugcccaguuagguuggagca

SEQ ID NO: 665663 - RNA, 22 nt, Human
gcauugguuaagagcuuugggg

SEQ ID NO: 665664 - RNA, 22 nt, Human
ccucacagagcccagaugucua

SEQ ID NO: 665665 - RNA, 22 nt, Human
uccaggccccagcaccuuggga

SEQ ID NO: 665666 - RNA, 22 nt, Human
ugcacgugugagcauucacaug

SEQ ID NO: 665667 - RNA, 22 nt, Human
acaggcuuacaggcugcaagua

SEQ ID NO: 665668 - RNA, 22 nt, Human
ucuccagguagauaugucagga

SEQ ID NO: 665669 - RNA, 23 nt, Human
ggggacaguucccacuggggucu

SEQ ID NO: 665670 - RNA, 22 nt, Human
gcugagggcauguguggcgacu

SEQ ID NO: 665671 - RNA, 22 nt, Human
ucaauucaacacaugcacauug

SEQ ID NO: 665672 - RNA, 23 nt, Human
agcuguuucauuauuacaacacc

SEQ ID NO: 665673 - RNA, 22 nt, Human
ucacccagauagugagcauagu

SEQ ID NO: 665674 - RNA, 22 nt, Human
auuuggauucuuauuuagcacu

SEQ ID NO: 665675 - RNA, 22 nt, Human
aaacucuguauuugcugugggu

SEQ ID NO: 665676 - RNA, 22 nt, Human
cugaagaugucugagaugcuca

SEQ ID NO: 665677 - RNA, 22 nt, Human
gccgugcgugcgcaggugcugu

SEQ ID NO: 665678 - RNA, 22 nt, Human
gcugcagccaaauucauuguca

SEQ ID NO: 665679 - RNA, 22 nt, Human
ucugagcugggucuugacagcu

SEQ ID NO: 665680 - RNA, 22 nt, Human
ugggucagaggaccucguggcc

SEQ ID NO: 665681 - RNA, 22 nt, Human
uggaagacagugacugguugug

SEQ ID NO: 665682 - RNA, 22 nt, Human
aaacuucaacuggaaugggcua

SEQ ID NO: 665683 - RNA, 22 nt, Human
ucugcuuuagaauccaguagcu

SEQ ID NO: 665684 - RNA, 22 nt, Human
cucaggauguacuacagaaggc

SEQ ID NO: 665685 - RNA, 22 nt, Human
uuccugagacccucacagugau

SEQ ID NO: 665686 - RNA, 19 nt, Human
gaggaacuggcuugguucc

SEQ ID NO: 665687 - RNA, 18 nt, Human
gcugccugcauuccucac

SEQ ID NO: 665688 - RNA, 22 nt, Human
auugaaguccuaaucuccagua

SEQ ID NO: 665689 - RNA, 22 nt, Human
gagcaaggaugggucuauagua

SEQ ID NO: 665690 - RNA, 20 nt, Human
uuugcuaugcauaucugacc

SEQ ID NO: 665691 - RNA, 22 nt, Human
ugggugguccaggcucagcaga

SEQ ID NO: 665692 - RNA, 22 nt, Human
acuuccagugucugcugcuagc

SEQ ID NO: 665693 - RNA, 22 nt, Human
ugauauuuuaugagcuuucaua

SEQ ID NO: 665694 - RNA, 22 nt, Human
uagcuguuggcuuacaucuguu

SEQ ID NO: 665695 - RNA, 22 nt, Human
cucaggaaaggccaugcaaggg

SEQ ID NO: 665696 - RNA, 22 nt, Human
uaggcuccaguguguggcgagu

SEQ ID NO: 665697 - RNA, 22 nt, Human
uggcacuggcgcaggauggcgg

SEQ ID NO: 665698 - RNA, 22 nt, Human
ggcauagauuucuuuagguuua

SEQ ID NO: 665699 - RNA, 22 nt, Human
cgcugggcgcgcuccgaacccg

SEQ ID NO: 665700 - RNA, 22 nt, Human
uaucagcaagauggcaguauag

SEQ ID NO: 665701 - RNA, 18 nt, Human
cuguccaguagacucugc

SEQ ID NO: 665702 - RNA, 22 nt, Human
cucuggccgcagcucagcucug

SEQ ID NO: 665703 - RNA, 22 nt, Human
gggagggccagugcucucuaga

SEQ ID NO: 665704 - RNA, 22 nt, Human
gcagcuggcucagagagguggg

SEQ ID NO: 665705 - RNA, 22 nt, Human
caggugcugcagggcuggcguc

SEQ ID NO: 665706 - RNA, 22 nt, Human
agggggucguccggaagaccug

SEQ ID NO: 665707 - RNA, 22 nt, Human
cuuggagacauugaucuuuugc

SEQ ID NO: 665708 - RNA, 22 nt, Human
agggccuggugaccuggguccu

SEQ ID NO: 665709 - RNA, 22 nt, Human
gcuguacaguuuacuagguggg

SEQ ID NO: 665710 - RNA, 22 nt, Human
uuucaaaccacugagguucuga

SEQ ID NO: 665711 - RNA, 22 nt, Human
aaggauacuuuuagagccugag

SEQ ID NO: 665712 - RNA, 22 nt, Human
ucacuagucaucaacuuccauu

SEQ ID NO: 665713 - RNA, 22 nt, Human
uccaaagggaagcgcuuucugu

SEQ ID NO: 665714 - RNA, 22 nt, Human
uaaguguuauuauucucacuuu

SEQ ID NO: 665715 - RNA, 22 nt, Human
uggaaaauauuuaggugaauga

SEQ ID NO: 665716 - RNA, 22 nt, Human
agagugcucagaugcaugucuu

SEQ ID NO: 665717 - RNA, 22 nt, Human
aguccuucccaucugacacccu

SEQ ID NO: 665718 - RNA, 22 nt, Human
aaagaggcucaaggugggccag

SEQ ID NO: 665719 - RNA, 22 nt, Human
uggcuuuaagaagacugacagc

SEQ ID NO: 665720 - RNA, 22 nt, Human
gccaggggugcccacccaagga

SEQ ID NO: 665721 - RNA, 22 nt, Human
caggggccuggcugucuaggaa

SEQ ID NO: 665722 - RNA, 22 nt, Human
aaguuuagucuugucuuaguaa

SEQ ID NO: 665723 - RNA, 22 nt, Human
uaaagcaaggaauagaguaguc

SEQ ID NO: 665724 - RNA, 22 nt, Human
uguguuuuacaaauucucuuaa

SEQ ID NO: 665725 - RNA, 22 nt, Human
cagaggcccagugagagggcug

SEQ ID NO: 665726 - RNA, 20 nt, Human
ugcaggcuucgcucuaggag

SEQ ID NO: 665727 - RNA, 22 nt, Human
uucucauguaaaugccaucauc

SEQ ID NO: 665728 - RNA, 20 nt, Human
uguguguguacuucuaaaua

SEQ ID NO: 665729 - RNA, 21 nt, Human
ugaaacauuugaucaaagcac

SEQ ID NO: 665730 - RNA, 22 nt, Human
gcuucucucucagacugcaagc

SEQ ID NO: 665731 - RNA, 22 nt, Human
cucuggaaaaccacuagcagga

SEQ ID NO: 665732 - RNA, 22 nt, Human
aaguagaaaaccgcacuggacu

SEQ ID NO: 665733 - RNA, 22 nt, Human
uccagguaucuuuaugaaacuu

SEQ ID NO: 665734 - RNA, 22 nt, Human
gauuuccucacuaacauccauc

SEQ ID NO: 665735 - RNA, 22 nt, Human
gaacaucugggaucauugcugu

SEQ ID NO: 665736 - RNA, 22 nt, Human
uggcugggggugcuauagcugc

SEQ ID NO: 665737 - RNA, 22 nt, Human
aauguuugucaucacacagaua

SEQ ID NO: 665738 - RNA, 22 nt, Human
gugggccacugggaggcaaggg

SEQ ID NO: 665739 - RNA, 22 nt, Human
aaguccaguuuuuccagguggu

SEQ ID NO: 665740 - RNA, 22 nt, Human
aauguguuauuucagaauccag

SEQ ID NO: 665741 - RNA, 22 nt, Human
gccuggagaagauggaacuagc

SEQ ID NO: 665742 - RNA, 22 nt, Human
caugcuuacuugucucagcaga

SEQ ID NO: 665743 - RNA, 22 nt, Human
uuauaguuaugaaagacugagg

SEQ ID NO: 665744 - RNA, 22 nt, Human
ugccuggcaaugccagaagcca

SEQ ID NO: 665745 - RNA, 22 nt, Human
uggcuggauaauauucuguugu

SEQ ID NO: 665746 - RNA, 22 nt, Human
aagccagauuccuuaagcacag

SEQ ID NO: 665747 - RNA, 22 nt, Human
cagcaguuaugaguagaauagu

SEQ ID NO: 665748 - RNA, 22 nt, Human
cagugguuuugagauucagggu

SEQ ID NO: 665749 - RNA, 22 nt, Human
auacuucaugcuucaugucugu

SEQ ID NO: 665750 - RNA, 22 nt, Human
uuaaagcaguuuguauacaugg

SEQ ID NO: 665751 - RNA, 22 nt, Human
cagcccugcacgcugccuccgc

SEQ ID NO: 665752 - RNA, 22 nt, Human
cccucugcugccuggcuggguc

SEQ ID NO: 665753 - RNA, 22 nt, Human
acugccaggauggcacuagagg

SEQ ID NO: 665754 - RNA, 22 nt, Human
auuagaaugaaguauaggauuu

SEQ ID NO: 665755 - RNA, 22 nt, Human
gagggagggccaggucccaacc

SEQ ID NO: 665756 - RNA, 22 nt, Human
aaccagcuaacauguggaauga

SEQ ID NO: 665757 - RNA, 22 nt, Human
uuuccucugaugcugacuugga

SEQ ID NO: 665758 - RNA, 22 nt, Human
agacugggccauuuccccagcu

SEQ ID NO: 665759 - RNA, 22 nt, Human
agcaguguuuugauucugggag

SEQ ID NO: 665760 - RNA, 22 nt, Human
cagucuaaucuguuacucauua

SEQ ID NO: 665761 - RNA, 22 nt, Human
uugccugugaggauucugguug

SEQ ID NO: 665762 - RNA, 22 nt, Human
gggcugcuacgagaacugaaua

SEQ ID NO: 665763 - RNA, 22 nt, Human
cuggccuggcagggagggcaug

SEQ ID NO: 665764 - RNA, 19 nt, Human
ccacauggcuggaugacag

SEQ ID NO: 665765 - RNA, 22 nt, Human
aagagcuggaagugaagauaac

SEQ ID NO: 665766 - RNA, 22 nt, Human
uucucagguagugcugaugcug

SEQ ID NO: 665767 - RNA, 22 nt, Human
gcaguguugugauccaggucuu

SEQ ID NO: 665768 - RNA, 22 nt, Human
auguguaaaaggcauguuuuau

SEQ ID NO: 665769 - RNA, 22 nt, Human
acacaugauaagaaaguuuaaa

SEQ ID NO: 665770 - RNA, 22 nt, Human
ucaguccaggggcugugauguc

SEQ ID NO: 665771 - RNA, 22 nt, Human
uaaagugcaugcggggccagau

SEQ ID NO: 665772 - RNA, 22 nt, Human
aauggcucugauguuguuguga

SEQ ID NO: 665773 - RNA, 22 nt, Human
aaauaaucaauuuuuguagaua

SEQ ID NO: 665774 - RNA, 22 nt, Human
ccaguacaccucacuucccuuu

SEQ ID NO: 665775 - RNA, 22 nt, Human
augcacaaacccacaauuaguc

SEQ ID NO: 665776 - RNA, 22 nt, Human
uuuuccuuuggaagaugcauau

SEQ ID NO: 665777 - RNA, 19 nt, Human
ggucagcugggcuagaggc

SEQ ID NO: 665778 - RNA, 22 nt, Human
uggaaaauuaguagugaaaggc

SEQ ID NO: 665779 - RNA, 22 nt, Human
ugcccucccacauuauggcugu

SEQ ID NO: 665780 - RNA, 22 nt, Human
ggcaccuggauguagcagugaa

SEQ ID NO: 665781 - RNA, 22 nt, Human
caucauaaaauugagauaacug

SEQ ID NO: 665782 - RNA, 22 nt, Human
ugugucagaaggcaauggggau

SEQ ID NO: 665783 - RNA, 22 nt, Human
gauggaggaaaaguuggaaugc

SEQ ID NO: 665784 - RNA, 20 nt, Human
augcauugugauucuguuuu

SEQ ID NO: 665785 - RNA, 22 nt, Human
uuuaacuuaaucugcuugauga

SEQ ID NO: 665786 - RNA, 23 nt, Human
uccucaguauauaaaggcagaug

SEQ ID NO: 665787 - RNA, 22 nt, Human
cucaggcuccagacuuccgucc

SEQ ID NO: 665788 - RNA, 22 nt, Human
uuaagucauuucugauuauaga

SEQ ID NO: 665789 - RNA, 22 nt, Human
ggagcugugcagugacuacaga

SEQ ID NO: 665790 - RNA, 22 nt, Human
cuuguuaaaaugccgauucuga

SEQ ID NO: 665791 - RNA, 22 nt, Human
uucugcauguguuucaaauacu

SEQ ID NO: 665792 - RNA, 22 nt, Human
gaccucugaaggcagagcaggg

SEQ ID NO: 665793 - RNA, 22 nt, Human
aagggcucugggcuacgcacug

SEQ ID NO: 665794 - RNA, 22 nt, Human
cugaacaguacuuggccaguuu

SEQ ID NO: 665795 - RNA, 22 nt, Human
uugaagaucuuugcauugcagg

SEQ ID NO: 665796 - RNA, 22 nt, Human
ccaggccucuggcugcuuaguc

SEQ ID NO: 665797 - RNA, 22 nt, Human
agcagugggugguuuuugagca

SEQ ID NO: 665798 - RNA, 22 nt, Human
ggagagaacuggcuccuucuag

SEQ ID NO: 665799 - RNA, 22 nt, Human
cauuccaaguauauacaugaua

SEQ ID NO: 665800 - RNA, 22 nt, Human
aggacaggauugagcugaacug

SEQ ID NO: 665801 - RNA, 22 nt, Human
gcucaggccucggacacacaau

SEQ ID NO: 665802 - RNA, 22 nt, Human
accugucuauaaaagugaauac

SEQ ID NO: 665803 - RNA, 22 nt, Human
ucacacuuagagcgaauuguuu

SEQ ID NO: 665804 - RNA, 22 nt, Human
gugguuuucuccaacccagaac

SEQ ID NO: 665805 - RNA, 22 nt, Human
agucccagccuaggcugugcug

SEQ ID NO: 665806 - RNA, 22 nt, Human
ucacuuuagaggaaacauugag

SEQ ID NO: 665807 - RNA, 22 nt, Human
uacauuauuucaucagucaucu

SEQ ID NO: 665808 - RNA, 23 nt, Human
acagccuucuggggcuucugggc

SEQ ID NO: 665809 - RNA, 22 nt, Human
ugagcuggagucuguggcuccu

SEQ ID NO: 665810 - RNA, 22 nt, Human
ggguccuggaaucugcauuuua

SEQ ID NO: 665811 - RNA, 22 nt, Human
aaaggcuuuaaaauguacauau

SEQ ID NO: 665812 - RNA, 22 nt, Human
ggucauugaaaucagaaggguu

SEQ ID NO: 665813 - RNA, 22 nt, Human
agcaggugaugugagucuggaa

SEQ ID NO: 665814 - RNA, 22 nt, Human
aggccaggcgagacacccggcu

SEQ ID NO: 665815 - RNA, 22 nt, Human
caucugcuguuccuuggacuca

SEQ ID NO: 665816 - RNA, 22 nt, Human
agcuguguguuuccacugagcu

SEQ ID NO: 665817 - RNA, 22 nt, Human
auagcaaaacccacugcauuac

SEQ ID NO: 665818 - RNA, 18 nt, Human
aagggcuggccuuuggag

SEQ ID NO: 665819 - RNA, 22 nt, Human
ccagacugagggucccugagcu

SEQ ID NO: 665820 - RNA, 22 nt, Human
uacugaaacucuuguaaauauc

SEQ ID NO: 665821 - RNA, 22 nt, Human
agcaacaguguauaucauaggc

SEQ ID NO: 665822 - RNA, 19 nt, Human
aggcagucauuggaauaua

SEQ ID NO: 665823 - RNA, 22 nt, Human
uauguguaaccuugugauuuau

SEQ ID NO: 665824 - RNA, 22 nt, Human
cagucagaggucuucuaaaaca

SEQ ID NO: 665825 - RNA, 22 nt, Human
auggaaaagggucuuucauuuc

SEQ ID NO: 665826 - RNA, 22 nt, Human
uuagauauguuuuugcuaaugc

SEQ ID NO: 665827 - RNA, 22 nt, Human
gccaaaggauucuauggagaua

SEQ ID NO: 665828 - RNA, 22 nt, Human
uuucauucagcacccugaggug

SEQ ID NO: 665829 - RNA, 22 nt, Human
agcagcagcucauucuuccugu

SEQ ID NO: 665830 - RNA, 22 nt, Human
uuauucaggcucucuuuggcua

SEQ ID NO: 665831 - RNA, 22 nt, Human
agaagcacaccugaccucuagc

SEQ ID NO: 665832 - RNA, 22 nt, Human
ugcugucuuuucccaauccugg

SEQ ID NO: 665833 - RNA, 22 nt, Human
auguccuuaaucugaauguuag

SEQ ID NO: 665834 - RNA, 22 nt, Human
acaaauagagauucaaauaaag

SEQ ID NO: 665835 - RNA, 22 nt, Human
ugggaagauggagugacaggca

SEQ ID NO: 665836 - RNA, 22 nt, Human
ccugaaauuugaagaccugaau

SEQ ID NO: 665837 - RNA, 22 nt, Human
ucugacuuggugcuaccagcca

SEQ ID NO: 665838 - RNA, 22 nt, Human
uccuccacgauggcacaccugg

SEQ ID NO: 665839 - RNA, 22 nt, Human
aguucacaagugcauuucagga

SEQ ID NO: 665840 - RNA, 22 nt, Human
guauuaggagguggagccuuug

SEQ ID NO: 665841 - RNA, 22 nt, Human
gcucaggcuucuucuauaaaga

SEQ ID NO: 665842 - RNA, 22 nt, Human
uaaucacuuuucauuaguaccu

SEQ ID NO: 665843 - RNA, 22 nt, Human
uacauuccacuagugacuggcg

SEQ ID NO: 665844 - RNA, 22 nt, Human
acagccuggacuggcucucugc

SEQ ID NO: 665845 - RNA, 22 nt, Human
uucagagcaucucuaaagccag

SEQ ID NO: 665846 - RNA, 22 nt, Human
agcuggcagcucucagggguac

SEQ ID NO: 665847 - RNA, 22 nt, Human
cucucccccacagcagccuucu

SEQ ID NO: 665848 - RNA, 22 nt, Human
aggcccugauccgaauccagau

SEQ ID NO: 665849 - RNA, 22 nt, Human
agccuggccacucagggccuga

SEQ ID NO: 665850 - RNA, 22 nt, Human
uggcaggagacacauggcauag

SEQ ID NO: 665851 - RNA, 22 nt, Human
ucagugguaugcgugggagcug

SEQ ID NO: 665852 - RNA, 22 nt, Human
cuuccugggacaccuaacucua

SEQ ID NO: 665853 - RNA, 22 nt, Human
acaaagagggaccagugacuug

SEQ ID NO: 665854 - RNA, 22 nt, Human
uagaaagcaguugugggggcuc

SEQ ID NO: 665855 - RNA, 19 nt, Human
aaucagaaauaucgaggcc

SEQ ID NO: 665856 - RNA, 22 nt, Human
caaccugaugaauugaauuuaa

SEQ ID NO: 665857 - RNA, 18 nt, Human
uggaggcagaguucuggc

SEQ ID NO: 665858 - RNA, 22 nt, Human
agugggcugagcuugcugggug

SEQ ID NO: 665859 - RNA, 22 nt, Human
cugucugugccucuucucccag

SEQ ID NO: 665860 - RNA, 22 nt, Human
uggcaaaguaucugucccagcu

SEQ ID NO: 665861 - RNA, 22 nt, Human
agcuagccauguggcuccugug

SEQ ID NO: 665862 - RNA, 22 nt, Human
ugugaaggagaugaagggagug

SEQ ID NO: 665863 - RNA, 22 nt, Human
cucaggccugaguggcaguccc

SEQ ID NO: 665864 - RNA, 22 nt, Human
aguuacuugagacguuuaugaa

SEQ ID NO: 665865 - RNA, 22 nt, Human
uuccaaagcugcuuuauuuagu

SEQ ID NO: 665866 - RNA, 22 nt, Human
gcucugggccauccuggccggg

SEQ ID NO: 665867 - RNA, 22 nt, Human
aguucacuauagaagacagugu

SEQ ID NO: 665868 - RNA, 22 nt, Human
accuuggaaaugcccauugccu

SEQ ID NO: 665869 - RNA, 22 nt, Human
ucccaaauauaaugcaagagac

SEQ ID NO: 665870 - RNA, 22 nt, Human
uguggcuguggaugcuuuccag

SEQ ID NO: 665871 - RNA, 22 nt, Human
uuuuaacacucagcacuaucuc

SEQ ID NO: 665872 - RNA, 22 nt, Human
uacacuguagguggcaggcagc

SEQ ID NO: 665873 - RNA, 22 nt, Human
ucugucacuuauuaagauggau

SEQ ID NO: 665874 - RNA, 20 nt, Human
auguuguuuacucauagcau

SEQ ID NO: 665875 - RNA, 19 nt, Human
accuucagaguggcacaaa

SEQ ID NO: 665876 - RNA, 22 nt, Human
agcuggcuccagaaggagucgu

SEQ ID NO: 665877 - RNA, 22 nt, Human
caggaagucuuugcccaggcca

SEQ ID NO: 665878 - RNA, 22 nt, Human
uaagauuacagugagaaauaaa

SEQ ID NO: 665879 - RNA, 22 nt, Human
ggaaggguucaggugggccugc

SEQ ID NO: 665880 - RNA, 22 nt, Human
aggaccugcuaaugugccaagu

SEQ ID NO: 665881 - RNA, 23 nt, Human
ugaagguauuaccugagaugcuc

SEQ ID NO: 665882 - RNA, 22 nt, Human
cuucuaugaggagagacaugca

SEQ ID NO: 665883 - RNA, 22 nt, Human
acaguaaaaagccuuagaauuu

SEQ ID NO: 665884 - RNA, 22 nt, Human
aauuucucacucucuugaucac

SEQ ID NO: 665885 - RNA, 22 nt, Human
cagcuuggcuucacauucugua

SEQ ID NO: 665886 - RNA, 22 nt, Human
uuuucucuacaaaauaaccagc

SEQ ID NO: 665887 - RNA, 22 nt, Human
agggcuuuguuuaggugaccac

SEQ ID NO: 665888 - RNA, 19 nt, Human
ccagcccugucacuucuug

SEQ ID NO: 665889 - RNA, 22 nt, Human
agacacagcugcaggagguggg

SEQ ID NO: 665890 - RNA, 22 nt, Human
uuccagagaguuauuccccugg

SEQ ID NO: 665891 - RNA, 22 nt, Human
gcuguguaucagaugccacggg

SEQ ID NO: 665892 - RNA, 22 nt, Human
uggaauuaauaggggauauaca

SEQ ID NO: 665893 - RNA, 20 nt, Human
gcuccccuucucugggccuc

SEQ ID NO: 665894 - RNA, 22 nt, Human
guuauuuuaacuucucaguaau

SEQ ID NO: 665895 - RNA, 22 nt, Human
agguuucugcaauguguguaca

SEQ ID NO: 665896 - RNA, 22 nt, Human
aggagagaauuacuggguguca

SEQ ID NO: 665897 - RNA, 22 nt, Human
agcuccugugugcccaccugcu

SEQ ID NO: 665898 - RNA, 22 nt, Human
acacuuggagcaacacuuaugg

SEQ ID NO: 665899 - RNA, 22 nt, Human
acauguaaaaauuaagguaaga

SEQ ID NO: 665900 - RNA, 20 nt, Human
gagcacaguaaugacugcua

SEQ ID NO: 665901 - RNA, 20 nt, Human
cacagcuugccuuuuaugac

SEQ ID NO: 665902 - RNA, 22 nt, Human
ugucuccauagaagagacugca

SEQ ID NO: 665903 - RNA, 22 nt, Human
ugcugguaccgcgccuccgcca

SEQ ID NO: 665904 - RNA, 22 nt, Human
ucuccugggaggacaaggaagg

SEQ ID NO: 665905 - RNA, 22 nt, Human
uacauuuucuaggggaccaaga

SEQ ID NO: 665906 - RNA, 22 nt, Human
gcugauagacugaauguuggga

SEQ ID NO: 665907 - RNA, 22 nt, Human
aggggcuguggaaaccaacucu

SEQ ID NO: 665908 - RNA, 22 nt, Human
agguccaggcauuuggguuggg

SEQ ID NO: 665909 - RNA, 22 nt, Human
cacagcauugccuuccaaaagg

SEQ ID NO: 665910 - RNA, 22 nt, Human
acucugggcccacccucagagu

SEQ ID NO: 665911 - RNA, 22 nt, Human
ugaaaugcuguagagacuguau

SEQ ID NO: 665912 - RNA, 22 nt, Human
ccaaggugggcagaucacgagg

SEQ ID NO: 665913 - RNA, 22 nt, Human
uuuaccaagauagcaucugguu

SEQ ID NO: 665914 - RNA, 22 nt, Human
ucggggucuuugacacgcucug

SEQ ID NO: 665915 - RNA, 21 nt, Human
ucuaagaacaugauucucccu

SEQ ID NO: 665916 - RNA, 23 nt, Human
aucucucugguggucacagucag

SEQ ID NO: 665917 - RNA, 22 nt, Human
gccacugauuauucagcagaca

SEQ ID NO: 665918 - RNA, 22 nt, Human
ggcuggacugccucccagaguc

SEQ ID NO: 665919 - RNA, 22 nt, Human
ccugcaagacuauuuaguucca

SEQ ID NO: 665920 - RNA, 22 nt, Human
uaugucuuuuccaaugcugucu

SEQ ID NO: 665921 - RNA, 22 nt, Human
agcuaccuggcuuaucacuguc

SEQ ID NO: 665922 - RNA, 22 nt, Human
ucucugagguuguuuccagcac

SEQ ID NO: 665923 - RNA, 22 nt, Human
gaaugcacacgugugugcaugc

SEQ ID NO: 665924 - RNA, 22 nt, Human
ucuguguugauaauuuuggaga

SEQ ID NO: 665925 - RNA, 21 nt, Human
cucaggaucuuauauauuagu

SEQ ID NO: 665926 - RNA, 22 nt, Human
ucuggguguagggccuggcaac

SEQ ID NO: 665927 - RNA, 22 nt, Human
uacagagaguacagcauccaca

SEQ ID NO: 665928 - RNA, 18 nt, Human
uguaaugcagcggguggc

SEQ ID NO: 665929 - RNA, 22 nt, Human
cagaccaucuugaagcaaacug

SEQ ID NO: 665930 - RNA, 21 nt, Human
ucauuuauugagaaaugacug

SEQ ID NO: 665931 - RNA, 22 nt, Human
cuugaaauccagauuucagagg

SEQ ID NO: 665932 - RNA, 23 nt, Human
ccuguugggacagcuuuaccaga

SEQ ID NO: 665933 - RNA, 18 nt, Human
acuguuaucugauaaggc

SEQ ID NO: 665934 - RNA, 22 nt, Human
ucacuucugaagguaguuggca

SEQ ID NO: 665935 - RNA, 22 nt, Human
uuggcucaugcuguuuugugca

SEQ ID NO: 665936 - RNA, 18 nt, Human
uaucacugcugaacaaga

SEQ ID NO: 665937 - RNA, 19 nt, Human
ugucucugaaagaugagcu

SEQ ID NO: 665938 - RNA, 22 nt, Human
gcuuccuccagggaggggccug

SEQ ID NO: 665939 - RNA, 22 nt, Human
gggcugaaagcucucacagucu

SEQ ID NO: 665940 - RNA, 22 nt, Human
acaguucccgucuugcacagcu

SEQ ID NO: 665941 - RNA, 22 nt, Human
agggugccuggaagccacucac

SEQ ID NO: 665942 - RNA, 22 nt, Human
acaugcauacguguguuuaaaa

SEQ ID NO: 665943 - RNA, 22 nt, Human
cuuaagauuugcgauaccuaau

SEQ ID NO: 665944 - RNA, 22 nt, Human
uugccaucccuuaccucaguca

SEQ ID NO: 665945 - RNA, 22 nt, Human
uuuagugugacaguccccagua

SEQ ID NO: 665946 - RNA, 22 nt, Human
uaaugaacaucuuaaucugaaa

SEQ ID NO: 665947 - RNA, 22 nt, Human
gagcucugccauggcucccacc

SEQ ID NO: 665948 - RNA, 22 nt, Human
cuagucacucagcacugacaaa

SEQ ID NO: 665949 - RNA, 22 nt, Human
uagcaucuggagaaacaagucc

SEQ ID NO: 665950 - RNA, 22 nt, Human
aacuaaaagugugucucuugua

SEQ ID NO: 665951 - RNA, 22 nt, Human
uaucaauacauguuaucagugu

SEQ ID NO: 665952 - RNA, 22 nt, Human
uacagccaucauguauguauau

SEQ ID NO: 665953 - RNA, 20 nt, Human
acuuuggggucuuucucaga

SEQ ID NO: 665954 - RNA, 22 nt, Human
gaagguagcugcugagaugaca

SEQ ID NO: 665955 - RNA, 22 nt, Human
agaaaucaauaucuauauguug

SEQ ID NO: 665956 - RNA, 22 nt, Human
ccugccugcaaaaugggacaag

SEQ ID NO: 665957 - RNA, 22 nt, Human
caaagacacgggaaacaacguu

SEQ ID NO: 665958 - RNA, 22 nt, Human
uaugaugggaggaauggaauuu

SEQ ID NO: 665959 - RNA, 22 nt, Human
auagagugauguaagguaugug

SEQ ID NO: 665960 - RNA, 22 nt, Human
ccaagagguaucuugccauaaa

SEQ ID NO: 665961 - RNA, 22 nt, Human
gaguguccgugcagccccagac

SEQ ID NO: 665962 - RNA, 22 nt, Human
aggccacaaccacccugugccc

SEQ ID NO: 665963 - RNA, 22 nt, Human
uucccacagugacuccagagaa

SEQ ID NO: 665964 - RNA, 22 nt, Human
gugcuuuccauccucccugcug

SEQ ID NO: 665965 - RNA, 19 nt, Human
uuagggguaugaaguggua

SEQ ID NO: 665966 - RNA, 22 nt, Human
gccucugcaggugcgguuaucc

SEQ ID NO: 665967 - RNA, 22 nt, Human
uaugccuggggugcucaggcca

SEQ ID NO: 665968 - RNA, 22 nt, Human
aguggcuggacgacaaggguga

SEQ ID NO: 665969 - RNA, 22 nt, Human
augggcaggcacuggcucucag

SEQ ID NO: 665970 - RNA, 22 nt, Human
ugaaaucaucugccaauaaguu

SEQ ID NO: 665971 - RNA, 23 nt, Human
ucauugugacugugccacauaac

SEQ ID NO: 665972 - RNA, 22 nt, Human
agcaaauacuugaauaaaaaga

SEQ ID NO: 665973 - RNA, 22 nt, Human
acuauaaaaggauaaaccagaa

SEQ ID NO: 665974 - RNA, 22 nt, Human
aagggggcacagucacuguaau

SEQ ID NO: 665975 - RNA, 22 nt, Human
auucuucacaccuguuccuguu

SEQ ID NO: 665976 - RNA, 20 nt, Human
gucaggauuaguaaacucug

SEQ ID NO: 665977 - RNA, 22 nt, Human
cugggccaguuaugucucaucu

SEQ ID NO: 665978 - RNA, 22 nt, Human
agaccuggaguggggccucagg

SEQ ID NO: 665979 - RNA, 22 nt, Human
uagcagcaagaaugggaugugu

SEQ ID NO: 665980 - RNA, 22 nt, Human
gaaguucuuuauagcaguguga

SEQ ID NO: 665981 - RNA, 23 nt, Human
ccucucucccuguuuggcaaaua

SEQ ID NO: 665982 - RNA, 22 nt, Human
ucaggaaaguguucucagagga

SEQ ID NO: 665983 - RNA, 22 nt, Human
uggcuucccaggaaaggagaag

SEQ ID NO: 665984 - RNA, 22 nt, Human
agagguucagagaaggcgaucu

SEQ ID NO: 665985 - RNA, 22 nt, Human
ugucuucacucaagucucuugg

SEQ ID NO: 665986 - RNA, 22 nt, Human
ugucucugucuuccagggcugu

SEQ ID NO: 665987 - RNA, 22 nt, Human
uggucucuguaggcuaccccau

SEQ ID NO: 665988 - RNA, 22 nt, Human
ugagcugguucuugaggcauga

SEQ ID NO: 665989 - RNA, 22 nt, Human
ugcagcugaugauacccccaug

SEQ ID NO: 665990 - RNA, 22 nt, Human
acauuacagcaaguuuacguua

SEQ ID NO: 665991 - RNA, 22 nt, Human
gcagcucccuugaacuucuccu

SEQ ID NO: 665992 - RNA, 22 nt, Human
ugucaccaugcgaggcuaauuu

SEQ ID NO: 665993 - RNA, 22 nt, Human
auguauuugcuuguuauggauu

SEQ ID NO: 665994 - RNA, 22 nt, Human
acaguguuuugucuggcagggc

SEQ ID NO: 665995 - RNA, 22 nt, Human
ugggcacauaguuuuaugguca

SEQ ID NO: 665996 - RNA, 22 nt, Human
agagaaacaggucagcugggag

SEQ ID NO: 665997 - RNA, 22 nt, Human
caagaugacaaggcuggaggcu

SEQ ID NO: 665998 - RNA, 22 nt, Human
ucugcucagccgaucugcuccg

SEQ ID NO: 665999 - RNA, 22 nt, Human
auugcaaagcauugugagcgca

SEQ ID NO: 666000 - RNA, 22 nt, Human
ucacaggcaaagaagauuggug

SEQ ID NO: 666001 - RNA, 22 nt, Human
ugaagcaaugauagcagaauga

SEQ ID NO: 666002 - RNA, 22 nt, Human
gacagcagcauaauacaugaac

SEQ ID NO: 666003 - RNA, 22 nt, Human
augaauccagcaaacagugagg

SEQ ID NO: 666004 - RNA, 22 nt, Human
gucccagggcaaggcuguuucu

SEQ ID NO: 666005 - RNA, 22 nt, Human
cucccucugucuuguccagaaa

SEQ ID NO: 666006 - RNA, 22 nt, Human
uggaggauuaaucuggaaagau

SEQ ID NO: 666007 - RNA, 22 nt, Human
agguccugaugaucucugagag

SEQ ID NO: 666008 - RNA, 22 nt, Human
aggaaagccaaucucucuugac

SEQ ID NO: 666009 - RNA, 22 nt, Human
acauuggucacugaagaaugag

SEQ ID NO: 666010 - RNA, 22 nt, Human
uauguucaucuggugcaucagu

SEQ ID NO: 666011 - RNA, 22 nt, Human
uccugagaugagacagugcugc

SEQ ID NO: 666012 - RNA, 22 nt, Human
aaugacagagauagaagggaug

SEQ ID NO: 666013 - RNA, 22 nt, Human
agcugagagccccugcccugug

SEQ ID NO: 666014 - RNA, 22 nt, Human
aaguaaugguuaaauaauucua

SEQ ID NO: 666015 - RNA, 22 nt, Human
aggucugggcaccacuggcugc

SEQ ID NO: 666016 - RNA, 22 nt, Human
gaaugacauugaaaagacauug

SEQ ID NO: 666017 - RNA, 21 nt, Human
aagagcuggaucaaggauaag

SEQ ID NO: 666018 - RNA, 21 nt, Human
cacagaggcgcuguauggcug

SEQ ID NO: 666019 - RNA, 22 nt, Human
acucuuuacuuaaacucuaagu

SEQ ID NO: 666020 - RNA, 22 nt, Human
auauacacauguguauacauuu

SEQ ID NO: 666021 - RNA, 22 nt, Human
agaaaugaauauguagugguua

SEQ ID NO: 666022 - RNA, 22 nt, Human
uagauucugugagagucaaagu

SEQ ID NO: 666023 - RNA, 22 nt, Human
cugcacguauaaucagucuguu

SEQ ID NO: 666024 - RNA, 22 nt, Human
accaggcuugaugauuugcuua

SEQ ID NO: 666025 - RNA, 22 nt, Human
ucucuggguauucacugccuuc

SEQ ID NO: 666026 - RNA, 22 nt, Human
uccaguccuaucugcccuugga

SEQ ID NO: 666027 - RNA, 22 nt, Human
uccuggagagaggccuggaaga

SEQ ID NO: 666028 - RNA, 22 nt, Human
ggaacauacuguguagacuuug

SEQ ID NO: 666029 - RNA, 22 nt, Human
aauaaugagacagcuuauuuaa

SEQ ID NO: 666030 - RNA, 22 nt, Human
agcucccugcacgacccugccc

SEQ ID NO: 666031 - RNA, 22 nt, Human
cuaggcagauggagaaguggcu

SEQ ID NO: 666032 - RNA, 18 nt, Human
uccuggccacacuaccuu

SEQ ID NO: 666033 - RNA, 22 nt, Human
ugcaaggcacccacucugcuuu

SEQ ID NO: 666034 - RNA, 22 nt, Human
aagugugucuugggaagggagg

SEQ ID NO: 666035 - RNA, 22 nt, Human
gauucccauccucagcagcagc

SEQ ID NO: 666036 - RNA, 22 nt, Human
cuuggaauggggcagaaaaugg

SEQ ID NO: 666037 - RNA, 22 nt, Human
ucagccccacggggucagccaa

SEQ ID NO: 666038 - RNA, 18 nt, Human
uggcuuccugcgggcugc

SEQ ID NO: 666039 - RNA, 22 nt, Human
gcuccacuugcagcuaggcuug

SEQ ID NO: 666040 - RNA, 22 nt, Human
ucugggucuggcugcuggugca

SEQ ID NO: 666041 - RNA, 22 nt, Human
cuccagaaauuuggaugcagca

SEQ ID NO: 666042 - RNA, 22 nt, Human
cucaacagcucugccauacucc

SEQ ID NO: 666043 - RNA, 21 nt, Human
aggcagcgugagggccacuca

SEQ ID NO: 666044 - RNA, 20 nt, Human
cagcagagacccauggggag

SEQ ID NO: 666045 - RNA, 22 nt, Human
gacccugccaugagugacaggg

SEQ ID NO: 666046 - RNA, 22 nt, Human
cccuggagcaucucugcugucu

SEQ ID NO: 666047 - RNA, 22 nt, Human
gcugcugggggaacaguuaaaa

SEQ ID NO: 666048 - RNA, 22 nt, Human
uggaaaaaaauuggcuagcuuc

SEQ ID NO: 666049 - RNA, 22 nt, Human
agcaggaaguagucuguaagca

SEQ ID NO: 666050 - RNA, 22 nt, Human
cuggcacagccacugcaggcag

SEQ ID NO: 666051 - RNA, 22 nt, Human
gcacagggagcaggucucuggu

SEQ ID NO: 666052 - RNA, 22 nt, Human
uuucagacaguggguccaucca

SEQ ID NO: 666053 - RNA, 22 nt, Human
aggaaacagagugaagcuuggg

SEQ ID NO: 666054 - RNA, 22 nt, Human
auuuauugguuugcauggugaa

SEQ ID NO: 666055 - RNA, 21 nt, Human
gucugaugcuugaugcaguug

SEQ ID NO: 666056 - RNA, 22 nt, Human
uucccacaaucugcguguguau

SEQ ID NO: 666057 - RNA, 22 nt, Human
cacacacuggagcaaggagaug

SEQ ID NO: 666058 - RNA, 22 nt, Human
aaguucuuucuggaaggucugc

SEQ ID NO: 666059 - RNA, 16 nt, Human
uuuuauugugacagcc

SEQ ID NO: 666060 - RNA, 22 nt, Human
gagcugggagcugggauuugga

SEQ ID NO: 666061 - RNA, 22 nt, Human
guuauugacauguauuaagcac

SEQ ID NO: 666062 - RNA, 22 nt, Human
uacagccugauuuggagccacu

SEQ ID NO: 666063 - RNA, 22 nt, Human
agccacccauucccgagcccua

SEQ ID NO: 666064 - RNA, 22 nt, Human
uauguggccuuuuaugucugac

SEQ ID NO: 666065 - RNA, 23 nt, Human
agagagcucacuauauagcauug

SEQ ID NO: 666066 - RNA, 22 nt, Human
agacauuuuggaaaguauuacu

SEQ ID NO: 666067 - RNA, 22 nt, Human
guuucuuucuauugacugaaca

SEQ ID NO: 666068 - RNA, 22 nt, Human
aggcuccauaccaucuccggag

SEQ ID NO: 666069 - RNA, 22 nt, Human
uacaauguugguaaaguaucau

SEQ ID NO: 666070 - RNA, 22 nt, Human
cagugggaagaaugcagccucc

SEQ ID NO: 666071 - RNA, 22 nt, Human
uagcccaggagaauugucuuuc

SEQ ID NO: 666072 - RNA, 22 nt, Human
gcauuuuucuaaucauuggcau

SEQ ID NO: 666073 - RNA, 22 nt, Human
ucaauguucaaguaugacaaug

SEQ ID NO: 666074 - RNA, 22 nt, Human
caggugaggcugaacagaugaa

SEQ ID NO: 666075 - RNA, 22 nt, Human
aguuucuuauucuuaguuaugu

SEQ ID NO: 666076 - RNA, 20 nt, Human
cacugcccuccagccugagc

SEQ ID NO: 666077 - RNA, 22 nt, Human
cagaagguuuacacuggacugu

SEQ ID NO: 666078 - RNA, 22 nt, Human
uccucagauaccuggcagauca

SEQ ID NO: 666079 - RNA, 22 nt, Human
cagaggcaggauaagaacugcg

SEQ ID NO: 666080 - RNA, 22 nt, Human
ugacagggggcagagguggcug

SEQ ID NO: 666081 - RNA, 22 nt, Human
ggguaugauagggaggugaaau

SEQ ID NO: 666082 - RNA, 22 nt, Human
ccagcucuggcuucuugcuggg

SEQ ID NO: 666083 - RNA, 22 nt, Human
aucaagucugccugucuggagg

SEQ ID NO: 666084 - RNA, 22 nt, Human
uaaauguggagacucaggaguc

SEQ ID NO: 666085 - RNA, 22 nt, Human
ccuuugcauucuagauguuuag

SEQ ID NO: 666086 - RNA, 22 nt, Human
uccugagauccuuuuagggauc

SEQ ID NO: 666087 - RNA, 22 nt, Human
ggaagggcaauaaaaucucagg

SEQ ID NO: 666088 - RNA, 22 nt, Human
ccugcuggcugguagaguuccg

SEQ ID NO: 666089 - RNA, 22 nt, Human
caugcacauuauucaaagccca

SEQ ID NO: 666090 - RNA, 22 nt, Human
uacaguaaaugugguagaaacu

SEQ ID NO: 666091 - RNA, 22 nt, Human
aguuuuaucuguaagcuguuca

SEQ ID NO: 666092 - RNA, 22 nt, Human
ugcuggcuuauuuaguaaaugu

SEQ ID NO: 666093 - RNA, 22 nt, Human
gaaucauuggaaccacauccaa

SEQ ID NO: 666094 - RNA, 22 nt, Human
uggccaauggcuccggccucau

SEQ ID NO: 666095 - RNA, 22 nt, Human
ugccaaguuucucucagggacu

SEQ ID NO: 666096 - RNA, 22 nt, Human
caggaaugccuucuucagccau

SEQ ID NO: 666097 - RNA, 22 nt, Human
cauauacuuuucuauagcuuuc

SEQ ID NO: 666098 - RNA, 22 nt, Human
ccaggaggaaauucuaaaggua

SEQ ID NO: 666099 - RNA, 22 nt, Human
caguuuuaugaaugcuuauuag

SEQ ID NO: 666100 - RNA, 22 nt, Human
ccccaccugugcgucugccgca

SEQ ID NO: 666101 - RNA, 22 nt, Human
uucggaguauugacaugugaag

SEQ ID NO: 666102 - RNA, 15 nt, Human
ucccugggagauggu

SEQ ID NO: 666103 - RNA, 22 nt, Human
aauauugagaaccagcauguuu

SEQ ID NO: 666104 - RNA, 22 nt, Human
uguggagcccccaggagugggg

SEQ ID NO: 666105 - RNA, 22 nt, Human
ccucacuggccagccaggggug

SEQ ID NO: 666106 - RNA, 22 nt, Human
caccaggagccaucaggagucc

SEQ ID NO: 666107 - RNA, 22 nt, Human
uuccuaaucacgaacauuauuu

SEQ ID NO: 666108 - RNA, 22 nt, Human
aguuuaugucuuuacuucagcu

SEQ ID NO: 666109 - RNA, 19 nt, Human
uccauaagcuuguguucau

SEQ ID NO: 666110 - RNA, 21 nt, Human
gggguuggcaagagcagagac

SEQ ID NO: 666111 - RNA, 22 nt, Human
uuagucccauuauaugacuucu

SEQ ID NO: 666112 - RNA, 22 nt, Human
agcugacuucuugauccaauga

SEQ ID NO: 666113 - RNA, 16 nt, Human
agggccagaagcauca

SEQ ID NO: 666114 - RNA, 21 nt, Human
ucucacugucugcuuuguuua

SEQ ID NO: 666115 - RNA, 22 nt, Human
cagaggauuauggagauggucu

SEQ ID NO: 666116 - RNA, 22 nt, Human
gcaucuaaacuugcaucauugu

SEQ ID NO: 666117 - RNA, 22 nt, Human
aucuggcucacuuagucuagga

SEQ ID NO: 666118 - RNA, 22 nt, Human
ccagcucugcauguuucccuug

SEQ ID NO: 666119 - RNA, 22 nt, Human
gagccuucaucgcagccuuguu

SEQ ID NO: 666120 - RNA, 22 nt, Human
uccuucuacacugccucugaga

SEQ ID NO: 666121 - RNA, 22 nt, Human
cgagagauggguuggcaggggc

SEQ ID NO: 666122 - RNA, 22 nt, Human
aaagcaaucagauucagauguc

SEQ ID NO: 666123 - RNA, 22 nt, Human
ucucuuaauucagaggcaguua

SEQ ID NO: 666124 - RNA, 22 nt, Human
gcucuguccagcgugcacagaa

SEQ ID NO: 666125 - RNA, 22 nt, Human
uccuggaguauuucuguggugu

SEQ ID NO: 666126 - RNA, 22 nt, Human
cacauuccccagagcuggggcu

SEQ ID NO: 666127 - RNA, 23 nt, Human
ugagaagccauuagagcaggugg

SEQ ID NO: 666128 - RNA, 22 nt, Human
cagggugcuuccguggagcugu

SEQ ID NO: 666129 - RNA, 22 nt, Human
agcuagaaguccuagauaaagg

SEQ ID NO: 666130 - RNA, 22 nt, Human
caggcugauaggguccaaaguu

SEQ ID NO: 666131 - RNA, 22 nt, Human
acaugcagacgggauccuggca

SEQ ID NO: 666132 - RNA, 22 nt, Human
ucauuucucugagucugauaau

SEQ ID NO: 666133 - RNA, 22 nt, Human
agucacaguucugcugucugag

SEQ ID NO: 666134 - RNA, 22 nt, Human
uuuauugcccuguaguacagga

SEQ ID NO: 666135 - RNA, 22 nt, Human
guacuucuggccaggcuggcca

SEQ ID NO: 666136 - RNA, 22 nt, Human
acucccagguugccuggcaggc

SEQ ID NO: 666137 - RNA, 22 nt, Human
ggugugccuggggcuuagcugc

SEQ ID NO: 666138 - RNA, 22 nt, Human
acagaaauugggcaaauggaag

SEQ ID NO: 666139 - RNA, 22 nt, Human
cccaggcacacugaagugacau

SEQ ID NO: 666140 - RNA, 22 nt, Human
ucacaguuaauuguuggaaugu

SEQ ID NO: 666141 - RNA, 22 nt, Human
uuccaggagccacacaggggcg

SEQ ID NO: 666142 - RNA, 22 nt, Human
gcuggagaaacaggaggaggaa

SEQ ID NO: 666143 - RNA, 22 nt, Human
ggccuuugcguccacgccgcuu

SEQ ID NO: 666144 - RNA, 22 nt, Human
aggacagcauuuucagcaucuc

SEQ ID NO: 666145 - RNA, 22 nt, Human
aggccaggaauccuugucccag

SEQ ID NO: 666146 - RNA, 22 nt, Human
caggcagcugcuggguucagcc

SEQ ID NO: 666147 - RNA, 22 nt, Human
augcauaucacagucuccaugu

SEQ ID NO: 666148 - RNA, 22 nt, Human
ugggagaaucuugcucugcuac

SEQ ID NO: 666149 - RNA, 22 nt, Human
cagaggcuaaggguagcuuggg

SEQ ID NO: 666150 - RNA, 23 nt, Human
acaugggagggacauggaggcug

SEQ ID NO: 666151 - RNA, 22 nt, Human
cuccuaggugcucacugggguc

SEQ ID NO: 666152 - RNA, 22 nt, Human
accaggcuguugggcccagugu

SEQ ID NO: 666153 - RNA, 22 nt, Human
ggagcgugcacuccaggcccuu

SEQ ID NO: 666154 - RNA, 22 nt, Human
uguggcuuaagaaugccuuuaa

SEQ ID NO: 666155 - RNA, 22 nt, Human
acacaauggcgugugccacaga

SEQ ID NO: 666156 - RNA, 22 nt, Human
gaguacaucuuaauuugacuaa

SEQ ID NO: 666157 - RNA, 22 nt, Human
uuugcuugacccuugugcugaa

SEQ ID NO: 666158 - RNA, 22 nt, Human
ugugggugaugaauuuguucuu

SEQ ID NO: 666159 - RNA, 22 nt, Human
uggcucagucauggaugaguaa

SEQ ID NO: 666160 - RNA, 22 nt, Human
gaggcuggucagcccuaagauc

SEQ ID NO: 666161 - RNA, 22 nt, Human
ugcugccugguuucuucuugcu

SEQ ID NO: 666162 - RNA, 22 nt, Human
cuggcucacaggugagaugcau

SEQ ID NO: 666163 - RNA, 22 nt, Human
gcucccagacugaccagaggug

SEQ ID NO: 666164 - RNA, 22 nt, Human
ucuuucuuauuagccauuguuc

SEQ ID NO: 666165 - RNA, 22 nt, Human
ugaaagaugcucaaugaauggu

SEQ ID NO: 666166 - RNA, 22 nt, Human
acaauguuuugaaacaucuagg

SEQ ID NO: 666167 - RNA, 22 nt, Human
uuccuaauggcaaaacauguuu

SEQ ID NO: 666168 - RNA, 22 nt, Human
auggauaaugucucuguuuccc

SEQ ID NO: 666169 - RNA, 22 nt, Human
aagauguuuagauuuauacaau

SEQ ID NO: 666170 - RNA, 22 nt, Human
ugccuuccuggagcugaaggcu

SEQ ID NO: 666171 - RNA, 22 nt, Human
aggcucugugcagccugcaucu

SEQ ID NO: 666172 - RNA, 22 nt, Human
uacuauuuugacaugaaauuga

SEQ ID NO: 666173 - RNA, 22 nt, Human
caucugaauaucccaggcauau

SEQ ID NO: 666174 - RNA, 22 nt, Human
ugaugagggaacugguucauac

SEQ ID NO: 666175 - RNA, 22 nt, Human
agagaaaguccugaucucucua

SEQ ID NO: 666176 - RNA, 22 nt, Human
agucugccuuuccaaucccgug

SEQ ID NO: 666177 - RNA, 22 nt, Human
ugagguaugcugaacucuguuu

SEQ ID NO: 666178 - RNA, 22 nt, Human
cagguaggaggcucccuagucc

SEQ ID NO: 666179 - RNA, 22 nt, Human
ugugaggaggcggccagaagag

SEQ ID NO: 666180 - RNA, 22 nt, Human
agcagccuauucuucucuugga

SEQ ID NO: 666181 - RNA, 22 nt, Human
acauguguacuuuuaaggaugu

SEQ ID NO: 666182 - RNA, 20 nt, Human
guggcccuuaaagagggaag

SEQ ID NO: 666183 - RNA, 22 nt, Human
gcucaggccuccagaggggcaa

SEQ ID NO: 666184 - RNA, 22 nt, Human
acagagauggcacagagaaggu

SEQ ID NO: 666185 - RNA, 22 nt, Human
caugugugacaaacugccugca

SEQ ID NO: 666186 - RNA, 22 nt, Human
aaaccuguagcaguuuguuaca

SEQ ID NO: 666187 - RNA, 18 nt, Human
uuggggugaggccaggaa

SEQ ID NO: 666188 - RNA, 22 nt, Human
agggaagaaucacugggauguu

SEQ ID NO: 666189 - RNA, 22 nt, Human
uggcuccuucauucuccugcca

SEQ ID NO: 666190 - RNA, 22 nt, Human
agggcaugcuggaggagagaca

SEQ ID NO: 666191 - RNA, 22 nt, Human
aaauauguaagauuagcacuag

SEQ ID NO: 666192 - RNA, 21 nt, Human
augugaaaccuuccacgcuga

SEQ ID NO: 666193 - RNA, 22 nt, Human
guaaugaauagaugguggcagg

SEQ ID NO: 666194 - RNA, 20 nt, Human
gcaaaauaggcucuguuggu

SEQ ID NO: 666195 - RNA, 22 nt, Human
ggaagcugaauccagagacagg

SEQ ID NO: 666196 - RNA, 22 nt, Human
agggugcauguuugcaagagug

SEQ ID NO: 666197 - RNA, 22 nt, Human
cuucagaaccagccagaagagg

SEQ ID NO: 666198 - RNA, 22 nt, Human
caagaauauaaauacuuucaaa

SEQ ID NO: 666199 - RNA, 22 nt, Human
aggaccuuuggcaaggcugcuc

SEQ ID NO: 666200 - RNA, 22 nt, Human
cugggaagauggugacagaauu

SEQ ID NO: 666201 - RNA, 22 nt, Human
caggugcucccagagaagugcu

SEQ ID NO: 666202 - RNA, 23 nt, Human
ggcuccuggauucaaauccugcc

SEQ ID NO: 666203 - RNA, 22 nt, Human
ucccugccucucagacuuccuu

SEQ ID NO: 666204 - RNA, 22 nt, Human
ucagcugcugugguauguacau

SEQ ID NO: 666205 - RNA, 22 nt, Human
acaugcuaauggagaugccaag

SEQ ID NO: 666206 - RNA, 19 nt, Human
aggguccaggcccugugga

SEQ ID NO: 666207 - RNA, 22 nt, Human
ggcgcaggccuuggauccuggu

SEQ ID NO: 666208 - RNA, 22 nt, Human
auguggcugucacagcauaaug

SEQ ID NO: 666209 - RNA, 18 nt, Human
ucuggcuuuguuccuugu

SEQ ID NO: 666210 - RNA, 22 nt, Human
ugauuacaauugucuuagauuu

SEQ ID NO: 666211 - RNA, 22 nt, Human
agucauaaagccagugggaggc

SEQ ID NO: 666212 - RNA, 22 nt, Human
gugggaguggggaagcagagug

SEQ ID NO: 666213 - RNA, 22 nt, Human
gcuuugcugggugcuucaugua

SEQ ID NO: 666214 - RNA, 22 nt, Human
cuuuuucauuggcuuuaggaca

SEQ ID NO: 666215 - RNA, 22 nt, Human
cacauugauaauuaaggccucc

SEQ ID NO: 666216 - RNA, 22 nt, Human
gccaccagccccaugcgcugug

SEQ ID NO: 666217 - RNA, 22 nt, Human
gcaguguucuaaauugggugug

SEQ ID NO: 666218 - RNA, 22 nt, Human
gggagagguuacccgagcaacu

SEQ ID NO: 666219 - RNA, 22 nt, Human
aaagucaguuggccagaucacu

SEQ ID NO: 666220 - RNA, 22 nt, Human
uggaaaggacaguugcugauag

SEQ ID NO: 666221 - RNA, 22 nt, Human
cuuccaggguccaggaagagcc

SEQ ID NO: 666222 - RNA, 21 nt, Human
uagcauuuuuguauugcugaa

SEQ ID NO: 666223 - RNA, 19 nt, Human
gccaggagggcucuggcug

SEQ ID NO: 666224 - RNA, 22 nt, Human
cauacaaucaaguucuuuauua

SEQ ID NO: 666225 - RNA, 22 nt, Human
uuacagaugggguugcaauaaa

SEQ ID NO: 666226 - RNA, 22 nt, Human
cgccaggcuugguagcucaugc

SEQ ID NO: 666227 - RNA, 22 nt, Human
ucuuguauguguauuuugcugu

SEQ ID NO: 666228 - RNA, 22 nt, Human
agugcccggggugccagacaca

SEQ ID NO: 666229 - RNA, 22 nt, Human
cagagccaaaaccguaacagcc

SEQ ID NO: 666230 - RNA, 22 nt, Human
aaacacuaauaacaguggcugg

SEQ ID NO: 666231 - RNA, 22 nt, Human
ucaggacagccagggugcagac

SEQ ID NO: 666232 - RNA, 22 nt, Human
aaaaagcuuaaaugagcaguuc

SEQ ID NO: 666233 - RNA, 22 nt, Human
cacuguaauagcauuauaagug

SEQ ID NO: 666234 - RNA, 23 nt, Human
gccaauuuaguaaaggcaguggg

SEQ ID NO: 666235 - RNA, 22 nt, Human
uuggaggaugcaaugagggagu

SEQ ID NO: 666236 - RNA, 22 nt, Human
aaagguuuauuuguugcucaca

SEQ ID NO: 666237 - RNA, 22 nt, Human
caaauacuaaacauaagauuuu

SEQ ID NO: 666238 - RNA, 22 nt, Human
gccagcugucuaagagaguaaa

SEQ ID NO: 666239 - RNA, 22 nt, Human
agcacagaauggcuuggaagcc

SEQ ID NO: 666240 - RNA, 22 nt, Human
cuuuccuagauggccaucuuuc

SEQ ID NO: 666241 - RNA, 23 nt, Human
agcuuugugaaagcagacauggg

SEQ ID NO: 666242 - RNA, 20 nt, Human
acuggcacugguaggugugg

SEQ ID NO: 666243 - RNA, 22 nt, Human
agccagcagggcuuagaggaca

SEQ ID NO: 666244 - RNA, 22 nt, Human
aacaugucuggguauucacaag

SEQ ID NO: 666245 - RNA, 22 nt, Human
cugucuguugaccauaguuugc

SEQ ID NO: 666246 - RNA, 22 nt, Human
cauguuaaugaauuuuugcagu

SEQ ID NO: 666247 - RNA, 22 nt, Human
aaaagcaagaggcuggauuaaa

SEQ ID NO: 666248 - RNA, 22 nt, Human
cagaugaggacagaugacuggg

SEQ ID NO: 666249 - RNA, 22 nt, Human
acagugaugagggaauuuugug

SEQ ID NO: 666250 - RNA, 22 nt, Human
cugcaggggcuggaguuggcuu

SEQ ID NO: 666251 - RNA, 22 nt, Human
uuuguagacgucagaaguuacu

SEQ ID NO: 666252 - RNA, 22 nt, Human
ucuguaaaacuucuuuguaaau

SEQ ID NO: 666253 - RNA, 22 nt, Human
cugacagauuagaugugcauau

SEQ ID NO: 666254 - RNA, 22 nt, Human
cagaggauauaugguuuguaug

SEQ ID NO: 666255 - RNA, 22 nt, Human
cugugaggcccugggugcugga

SEQ ID NO: 666256 - RNA, 22 nt, Human
auggcuuggcaccaucuccuug

SEQ ID NO: 666257 - RNA, 22 nt, Human
agcaggugggcaugaaagcuga

SEQ ID NO: 666258 - RNA, 22 nt, Human
ugcucccagggacucuggcugg

SEQ ID NO: 666259 - RNA, 22 nt, Human
acagaacugcaggaggaaaagc

SEQ ID NO: 666260 - RNA, 22 nt, Human
uguaaaauaccauuccuuguca

SEQ ID NO: 666261 - RNA, 22 nt, Human
gucugccucuauugccuaccug

SEQ ID NO: 666262 - RNA, 22 nt, Human
ucaauguucuugguauauccuu

SEQ ID NO: 666263 - RNA, 22 nt, Human
uuucucucuuaaggaguuuaaa

SEQ ID NO: 666264 - RNA, 19 nt, Human
ccagugccggcgcugggga

SEQ ID NO: 666265 - RNA, 22 nt, Human
aaugucuucaguguauacaugg

SEQ ID NO: 666266 - RNA, 22 nt, Human
agcuguugaaaaugguguccua

SEQ ID NO: 666267 - RNA, 22 nt, Human
guuuccagagugagggcacuug

SEQ ID NO: 666268 - RNA, 22 nt, Human
agccaguuuccagauauuaacu

SEQ ID NO: 666269 - RNA, 22 nt, Human
auuucuuccuucuccuagaaga

SEQ ID NO: 666270 - RNA, 22 nt, Human
ucuccuggccgggcuguccccu

SEQ ID NO: 666271 - RNA, 22 nt, Human
uggcuuggcuaagaucuaagcu

SEQ ID NO: 666272 - RNA, 22 nt, Human
ugucauguggcaauuaaagcag

SEQ ID NO: 666273 - RNA, 22 nt, Human
uaccuggggcugggcuuugauu

SEQ ID NO: 666274 - RNA, 22 nt, Human
aagcauuucagguagagauauu

SEQ ID NO: 666275 - RNA, 22 nt, Human
ugcaggugagugcaggggcuca

SEQ ID NO: 666276 - RNA, 22 nt, Human
cucuggcggccaugcucguggu

SEQ ID NO: 666277 - RNA, 21 nt, Human
cugggcuuucucucaaagaca

SEQ ID NO: 666278 - RNA, 19 nt, Human
cccugcccuggugacuggg

SEQ ID NO: 666279 - RNA, 22 nt, Human
uuucaaggauguuauauaaaug

SEQ ID NO: 666280 - RNA, 22 nt, Human
augguacaaaauguauaaaguc

SEQ ID NO: 666281 - RNA, 22 nt, Human
uuuguacagugauguuguaugc

SEQ ID NO: 666282 - RNA, 22 nt, Human
aagcacaggaucuugaggagcg

SEQ ID NO: 666283 - RNA, 22 nt, Human
uaauugcucgagaaauaaccuc

SEQ ID NO: 666284 - RNA, 22 nt, Human
uaauuucaauagcuugcauaau

SEQ ID NO: 666285 - RNA, 17 nt, Human
ucugaagccagucugcu

SEQ ID NO: 666286 - RNA, 22 nt, Human
gauuuuacaaacugcaggaccc

SEQ ID NO: 666287 - RNA, 22 nt, Human
uugggcccauggggcuaagcua

SEQ ID NO: 666288 - RNA, 22 nt, Human
cucugcaccuuguaggaggcaa

SEQ ID NO: 666289 - RNA, 20 nt, Human
gaaccuggggaaggaguagg

SEQ ID NO: 666290 - RNA, 22 nt, Human
aggccagcccucaccuguguuc

SEQ ID NO: 666291 - RNA, 22 nt, Human
gugaggaucaaaugaaauagca

SEQ ID NO: 666292 - RNA, 22 nt, Human
cccugauggcacaguggcaggc

SEQ ID NO: 666293 - RNA, 22 nt, Human
agaggcuuccugccaccugaga

SEQ ID NO: 666294 - RNA, 22 nt, Human
agaaguuugguccuuuucaagg

SEQ ID NO: 666295 - RNA, 22 nt, Human
auauuuugaaguuaauaaugug

SEQ ID NO: 666296 - RNA, 22 nt, Human
uugauacagcagccugugaucc

SEQ ID NO: 666297 - RNA, 21 nt, Human
ggcccugguuacgccuccucu

SEQ ID NO: 666298 - RNA, 22 nt, Human
caugagaagguuuuggcauaua

SEQ ID NO: 666299 - RNA, 22 nt, Human
ccaggagauuuuuccauagcac

SEQ ID NO: 666300 - RNA, 22 nt, Human
cacaguuugguuuugcuguaau

SEQ ID NO: 666301 - RNA, 21 nt, Human
caguucucuuagauuuccagu

SEQ ID NO: 666302 - RNA, 23 nt, Human
caggagauggcugcugugucagc

SEQ ID NO: 666303 - RNA, 22 nt, Human
ucugugcaaguauuugacauuu

SEQ ID NO: 666304 - RNA, 22 nt, Human
aggcagcaaagaaaugaugcug

SEQ ID NO: 666305 - RNA, 22 nt, Human
agggcuuuugcaauccaagucu

SEQ ID NO: 666306 - RNA, 22 nt, Human
uggcucaguaaucgagucuccu

SEQ ID NO: 666307 - RNA, 22 nt, Human
gaggccaaucaauagggcaaua

SEQ ID NO: 666308 - RNA, 19 nt, Human
ugcucauggggacuucucc

SEQ ID NO: 666309 - RNA, 22 nt, Human
gaaggaggcuccccaaagucug

SEQ ID NO: 666310 - RNA, 22 nt, Human
ucggagaguucaugaagacccg

SEQ ID NO: 666311 - RNA, 20 nt, Human
cugggucuccuucugcuuaa

SEQ ID NO: 666312 - RNA, 22 nt, Human
uuuccaggagaaagagagccuu

SEQ ID NO: 666313 - RNA, 22 nt, Human
aguaaggcauuuuucauguuua

SEQ ID NO: 666314 - RNA, 22 nt, Human
uuugaaacucugaacauguuuc

SEQ ID NO: 666315 - RNA, 22 nt, Human
ugugccuggucccugagucgag

SEQ ID NO: 666316 - RNA, 22 nt, Human
gaaucccaaucuguuauugaca

SEQ ID NO: 666317 - RNA, 22 nt, Human
ccagggcauguccaagacuuag

SEQ ID NO: 666318 - RNA, 22 nt, Human
ccagggcuucccacgugcccug

SEQ ID NO: 666319 - RNA, 23 nt, Human
ugcuggaguuuacucaggccagc

SEQ ID NO: 666320 - RNA, 22 nt, Human
aaagaacuuauccuagaauuug

SEQ ID NO: 666321 - RNA, 22 nt, Human
aggcuggaugugccucaccgag

SEQ ID NO: 666322 - RNA, 22 nt, Human
gcagggcuuagaaaugguggcu

SEQ ID NO: 666323 - RNA, 22 nt, Human
acuuuccuagacuucagugaca

SEQ ID NO: 666324 - RNA, 22 nt, Human
ccucgcggcacucgggccggau

SEQ ID NO: 666325 - RNA, 22 nt, Human
aagacauuuauuugaaucaauu

SEQ ID NO: 666326 - RNA, 22 nt, Human
uauaugcaauuuuuuagugcaa

SEQ ID NO: 666327 - RNA, 22 nt, Human
cugcaucucugcuagucaguca

SEQ ID NO: 666328 - RNA, 22 nt, Human
cagcccugggucccugcccugg

SEQ ID NO: 666329 - RNA, 22 nt, Human
ugugaaggagcaugcagagggg

SEQ ID NO: 666330 - RNA, 22 nt, Human
uugccagggccagugggggugu

SEQ ID NO: 666331 - RNA, 22 nt, Human
acugucaccaucagagcgggaa

SEQ ID NO: 666332 - RNA, 20 nt, Human
agugaggcaguucagugggc

SEQ ID NO: 666333 - RNA, 22 nt, Human
uuucuaagaauauugcucuuaa

SEQ ID NO: 666334 - RNA, 22 nt, Human
agcugggugaaggcagauggcu

SEQ ID NO: 666335 - RNA, 22 nt, Human
ccuuaaaagaacuaucucuucu

SEQ ID NO: 666336 - RNA, 22 nt, Human
auggcugggauuuccuuugcgu

SEQ ID NO: 666337 - RNA, 22 nt, Human
acacauguaaaacacuuagcaa

SEQ ID NO: 666338 - RNA, 22 nt, Human
gccuggcccagggcucuuguug

SEQ ID NO: 666339 - RNA, 22 nt, Human
ugcaguggaaucuggagagcag

SEQ ID NO: 666340 - RNA, 22 nt, Human
aauugcuugucuucuucccuac

SEQ ID NO: 666341 - RNA, 22 nt, Human
cacuugcagacuuugccugguu

SEQ ID NO: 666342 - RNA, 22 nt, Human
augcauucagcggaaugcuuag

SEQ ID NO: 666343 - RNA, 22 nt, Human
aguguuuacauugaagcuugua

SEQ ID NO: 666344 - RNA, 22 nt, Human
cuucuuaaugacagauuaaaau

SEQ ID NO: 666345 - RNA, 22 nt, Human
uuguucauaaagacaguucaga

SEQ ID NO: 666346 - RNA, 22 nt, Human
gggacgugagugaagaaggucu

SEQ ID NO: 666347 - RNA, 21 nt, Human
guguuggcauauggugguuga

SEQ ID NO: 666348 - RNA, 22 nt, Human
gcuggcaggauaacuucuaagc

SEQ ID NO: 666349 - RNA, 22 nt, Human
uccugaggcucacuuugaaugu

SEQ ID NO: 666350 - RNA, 22 nt, Human
cugagccuuauucaccagcccu

SEQ ID NO: 666351 - RNA, 22 nt, Human
uucuucagugccccucuaguag

SEQ ID NO: 666352 - RNA, 22 nt, Human
auucugcauaauuuccuggcag

SEQ ID NO: 666353 - RNA, 22 nt, Human
cucugaccauucccuugauuuu

SEQ ID NO: 666354 - RNA, 22 nt, Human
ggcucaggaugagccuucucau

SEQ ID NO: 666355 - RNA, 22 nt, Human
auugcaaauaacuguacugaau

SEQ ID NO: 666356 - RNA, 22 nt, Human
gcugagagcaguguggccuuaa

SEQ ID NO: 666357 - RNA, 22 nt, Human
gugugcaggcuugaggauuagg

SEQ ID NO: 666358 - RNA, 22 nt, Human
ucugacaauuagccuaguccug

SEQ ID NO: 666359 - RNA, 22 nt, Human
uucuuuccaaccagauauuggu

SEQ ID NO: 666360 - RNA, 22 nt, Human
caggagcaguuagaagcccacu

SEQ ID NO: 666361 - RNA, 22 nt, Human
uuucacagagaauauugccuug

SEQ ID NO: 666362 - RNA, 18 nt, Human
gugcugaauaacuacuuu

SEQ ID NO: 666363 - RNA, 22 nt, Human
gacuucaaagcgugauaaagau

SEQ ID NO: 666364 - RNA, 20 nt, Human
gacagcuuggggugucaccu

SEQ ID NO: 666365 - RNA, 22 nt, Human
acuagaaagcaaaagccauuuc

SEQ ID NO: 666366 - RNA, 22 nt, Human
auguaaguauucaaaauauuuc

SEQ ID NO: 666367 - RNA, 22 nt, Human
aucaggaaugaauacuuuugga

SEQ ID NO: 666368 - RNA, 22 nt, Human
uggggagguucgggaaucuugu

SEQ ID NO: 666369 - RNA, 22 nt, Human
uccacugguauccacagugggg

SEQ ID NO: 666370 - RNA, 22 nt, Human
acugccuggccuggccucacug

SEQ ID NO: 666371 - RNA, 20 nt, Human
aguuugugugucuaugcgcu

SEQ ID NO: 666372 - RNA, 22 nt, Human
uugagauagguggaaucucuuu

SEQ ID NO: 666373 - RNA, 22 nt, Human
gauuucaaccuaacaguaugac

SEQ ID NO: 666374 - RNA, 22 nt, Human
gaaaaguucaucauauauucag

SEQ ID NO: 666375 - RNA, 22 nt, Human
uuccucaugggguuccuucaga

SEQ ID NO: 666376 - RNA, 22 nt, Human
ccaccaugggaagagagacuaa

SEQ ID NO: 666377 - RNA, 22 nt, Human
gcugagguggagauugcaguga

SEQ ID NO: 666378 - RNA, 20 nt, Human
ucugcagauaagggaaagac

SEQ ID NO: 666379 - RNA, 22 nt, Human
gcccuuggaacagccuccugcu

SEQ ID NO: 666380 - RNA, 22 nt, Human
gacaggaaauauggggguuguu

SEQ ID NO: 666381 - RNA, 20 nt, Human
ugcguguguauuuauuuucu

SEQ ID NO: 666382 - RNA, 22 nt, Human
cuggccuuggaagggagcccgu

SEQ ID NO: 666383 - RNA, 22 nt, Human
agcagaugcgucugagugggag

SEQ ID NO: 666384 - RNA, 22 nt, Human
cugucuggaugugagucaccua

SEQ ID NO: 666385 - RNA, 22 nt, Human
gugagacacgugugugaccugg

SEQ ID NO: 666386 - RNA, 22 nt, Human
gaacaaacauuuuuggcaguau

SEQ ID NO: 666387 - RNA, 22 nt, Human
uccagcucaggguuggcucaag

SEQ ID NO: 666388 - RNA, 22 nt, Human
uuacaaagguaguuuugucuau

SEQ ID NO: 666389 - RNA, 22 nt, Human
auuaaggauuauacucuccuuu

SEQ ID NO: 666390 - RNA, 22 nt, Human
uucacagugccagggggcaggc

SEQ ID NO: 666391 - RNA, 22 nt, Human
caagggcagaggcagggccccg

SEQ ID NO: 666392 - RNA, 22 nt, Human
gggcuucaauagcagaggcgug

SEQ ID NO: 666393 - RNA, 22 nt, Human
aaaguguggagauugaacuaaa

SEQ ID NO: 666394 - RNA, 22 nt, Human
ugcuggaagagaauacuggugg

SEQ ID NO: 666395 - RNA, 23 nt, Human
ggcucccuccuagcuuucccaau

SEQ ID NO: 666396 - RNA, 22 nt, Human
uaacacauuaguucuccuagau

SEQ ID NO: 666397 - RNA, 22 nt, Human
gccagccauaggccagcacugg

SEQ ID NO: 666398 - RNA, 23 nt, Human
cagcacaguacauuuccugucuc

SEQ ID NO: 666399 - RNA, 22 nt, Human
ggcuucucccauucuucagggg

SEQ ID NO: 666400 - RNA, 22 nt, Human
aggagcugagggagcgcccuug

SEQ ID NO: 666401 - RNA, 22 nt, Human
ccagugcaccauuucccucugu

SEQ ID NO: 666402 - RNA, 22 nt, Human
uuucacaagacagcuacuguug

SEQ ID NO: 666403 - RNA, 22 nt, Human
uaggcugagcuaagagagcuua

SEQ ID NO: 666404 - RNA, 22 nt, Human
uggcauccucucuucugagugc

SEQ ID NO: 666405 - RNA, 22 nt, Human
gggaggagcuuggagauucacu

SEQ ID NO: 666406 - RNA, 22 nt, Human
cugagccagagggagucggguc

SEQ ID NO: 666407 - RNA, 21 nt, Human
guucuacaguuuuagaauucc

SEQ ID NO: 666408 - RNA, 22 nt, Human
agaucugguuggaguccugaca

SEQ ID NO: 666409 - RNA, 22 nt, Human
ucugaagcuggaggaagcuuug

SEQ ID NO: 666410 - RNA, 22 nt, Human
gacagaggagaagaugcugugg

SEQ ID NO: 666411 - RNA, 22 nt, Human
ggagagaauuccauggacaugu

SEQ ID NO: 666412 - RNA, 22 nt, Human
cuagggaaauaaacugaguggu

SEQ ID NO: 666413 - RNA, 22 nt, Human
uugcaggugagggaaaugacug

SEQ ID NO: 666414 - RNA, 22 nt, Human
gaacagugccagcacacaauaa

SEQ ID NO: 666415 - RNA, 22 nt, Human
gcacagcucaguacucccucug

SEQ ID NO: 666416 - RNA, 22 nt, Human
ucuccugaugaugguacuggca

SEQ ID NO: 666417 - RNA, 22 nt, Human
ugaccacagacccaaugacuac

SEQ ID NO: 666418 - RNA, 22 nt, Human
uaauuuaauuccauggauucua

SEQ ID NO: 666419 - RNA, 22 nt, Human
auucucaauggcuacuuucaua

SEQ ID NO: 666420 - RNA, 22 nt, Human
caacagucucuauagcuccuug

SEQ ID NO: 666421 - RNA, 22 nt, Human
gaaggccuaggaaggaagccuu

SEQ ID NO: 666422 - RNA, 22 nt, Human
ggcugcagauagccagccacca

SEQ ID NO: 666423 - RNA, 22 nt, Human
uucacaucuauaacuuagauaa

SEQ ID NO: 666424 - RNA, 22 nt, Human
auacagaauuugcccuuuucau

SEQ ID NO: 666425 - RNA, 22 nt, Human
gcucccugaagagauuuggucu

SEQ ID NO: 666426 - RNA, 22 nt, Human
ugguaaaaaccgcaauuacauu

SEQ ID NO: 666427 - RNA, 22 nt, Human
aggaggguacaauggguggaaa

SEQ ID NO: 666428 - RNA, 22 nt, Human
aaucaggacccacucuacaguu

SEQ ID NO: 666429 - RNA, 22 nt, Human
uaugugcaugcugacuugagga

SEQ ID NO: 666430 - RNA, 23 nt, Human
ugggcccuggagucgccagucug

SEQ ID NO: 666431 - RNA, 22 nt, Human
agagccugcuguguaagucaca

SEQ ID NO: 666432 - RNA, 22 nt, Human
gagaggcucagggacuugcuga

SEQ ID NO: 666433 - RNA, 23 nt, Human
uugggcuggcucucgaugccucu

SEQ ID NO: 666434 - RNA, 22 nt, Human
uuucacagguauccacgggucu

SEQ ID NO: 666435 - RNA, 23 nt, Human
ggugguggugagucacgggcuca

SEQ ID NO: 666436 - RNA, 22 nt, Human
uacaguauggaaaauguauagu

SEQ ID NO: 666437 - RNA, 22 nt, Human
gauuucuugaccccugucucag

SEQ ID NO: 666438 - RNA, 22 nt, Human
gcacuuaggguauguacugggc

SEQ ID NO: 666439 - RNA, 22 nt, Human
ugcuucugcauucaauguugga

SEQ ID NO: 666440 - RNA, 22 nt, Human
cugcuucuccaaaguaggacuu

SEQ ID NO: 666441 - RNA, 22 nt, Human
auagacgcggccgcugaugcag

SEQ ID NO: 666442 - RNA, 22 nt, Human
ggaggggccggcugccugccac

SEQ ID NO: 666443 - RNA, 21 nt, Human
uggguggaagcgggaggccgc

SEQ ID NO: 666444 - RNA, 22 nt, Human
aaaugcagauuuugaugcagca

SEQ ID NO: 666445 - RNA, 22 nt, Human
cauuuaguuauacuaaaacauu

SEQ ID NO: 666446 - RNA, 22 nt, Human
ugaccuuucucugggugcuugg

SEQ ID NO: 666447 - RNA, 21 nt, Human
uguggcaucauugaucuguga

SEQ ID NO: 666448 - RNA, 22 nt, Human
agcccuagagaaccagccugug

SEQ ID NO: 666449 - RNA, 20 nt, Human
ucccaggcuccacccuagac

SEQ ID NO: 666450 - RNA, 22 nt, Human
cugcaccuacagccacauuuac

SEQ ID NO: 666451 - RNA, 22 nt, Human
cugaggcuggcguuugaggaag

SEQ ID NO: 666452 - RNA, 22 nt, Human
uuuuuugucccagagagccugg

SEQ ID NO: 666453 - RNA, 22 nt, Human
cccugcagagccagcccugacc

SEQ ID NO: 666454 - RNA, 22 nt, Human
uuggcauucaugggacaacaaa

SEQ ID NO: 666455 - RNA, 22 nt, Human
ugccugugguuccaguuuuuuc

SEQ ID NO: 666456 - RNA, 22 nt, Human
auggugaagcuucauggguguu

SEQ ID NO: 666457 - RNA, 22 nt, Human
ccuggggcuccagagcagcgga

SEQ ID NO: 666458 - RNA, 22 nt, Human
uccaguuuauuuuuggcagggu

SEQ ID NO: 666459 - RNA, 23 nt, Human
ggacacauuuauuucagaauuca

SEQ ID NO: 666460 - RNA, 22 nt, Human
auuuucuagauagaugaugcau

SEQ ID NO: 666461 - RNA, 22 nt, Human
ucacauuuuauaucucugguuu

SEQ ID NO: 666462 - RNA, 22 nt, Human
acaagauguguuuauacaagcu

SEQ ID NO: 666463 - RNA, 22 nt, Human
ggccaugguuggggaagacaug

SEQ ID NO: 666464 - RNA, 22 nt, Human
guuaaagugaucuugucagguu

SEQ ID NO: 666465 - RNA, 22 nt, Human
gaucuucuagcagaaguaauuu

SEQ ID NO: 666466 - RNA, 22 nt, Human
cagaggccauauuucuucacuc

SEQ ID NO: 666467 - RNA, 22 nt, Human
uacaauuuaguggugugugguu

SEQ ID NO: 666468 - RNA, 22 nt, Human
uccaggauugcaggugcacaac

SEQ ID NO: 666469 - RNA, 22 nt, Human
gcccuguguauccccugugcuu

SEQ ID NO: 666470 - RNA, 22 nt, Human
ggggcagcuaccggaaguaggg

SEQ ID NO: 666471 - RNA, 22 nt, Human
aggcuucccaagcagcugcaaa

SEQ ID NO: 666472 - RNA, 19 nt, Human
agcauuuggaauucuacac

SEQ ID NO: 666473 - RNA, 22 nt, Human
uuuacauguaauguuauacaaa

SEQ ID NO: 666474 - RNA, 23 nt, Human
accccaggcaucgcauuccucuu

SEQ ID NO: 666475 - RNA, 22 nt, Human
aauaucuuggcccaacuccaga

SEQ ID NO: 666476 - RNA, 22 nt, Human
cuuauuugcccauguuucuuua

SEQ ID NO: 666477 - RNA, 22 nt, Human
gucagacacauuucuuucagug

SEQ ID NO: 666478 - RNA, 22 nt, Human
acagcugugaaaauccacagga

SEQ ID NO: 666479 - RNA, 22 nt, Human
guuuugugaggcacccacaggu

SEQ ID NO: 666480 - RNA, 22 nt, Human
gccuguccuauacaggcggcug

SEQ ID NO: 666481 - RNA, 22 nt, Human
uuuauuucuuaguuugccacag

SEQ ID NO: 666482 - RNA, 22 nt, Human
ucaggaagccacuccacagaga

SEQ ID NO: 666483 - RNA, 22 nt, Human
ggcuagggaaaaugauuggaua

SEQ ID NO: 666484 - RNA, 22 nt, Human
uuugcauuguuucaaaagugaa

SEQ ID NO: 666485 - RNA, 22 nt, Human
ccauuuuauuagugacauuuag

SEQ ID NO: 666486 - RNA, 22 nt, Human
ugcuugcuggaggcagacagaa

SEQ ID NO: 666487 - RNA, 22 nt, Human
uacacacaugcauuugccuuau

SEQ ID NO: 666488 - RNA, 23 nt, Human
cugcagucgccggccugggugcc

SEQ ID NO: 666489 - RNA, 22 nt, Human
auucuggguucaugagugagcu

SEQ ID NO: 666490 - RNA, 22 nt, Human
uccagccacuugcacaguuaaa

SEQ ID NO: 666491 - RNA, 22 nt, Human
aagggcugagcacagugagcca

SEQ ID NO: 666492 - RNA, 22 nt, Human
gccaggaaugcauaaaugaccu

SEQ ID NO: 666493 - RNA, 22 nt, Human
aagggcugaaugaaggguugaa

SEQ ID NO: 666494 - RNA, 22 nt, Human
agaaggggcccaaggaugucag

SEQ ID NO: 666495 - RNA, 22 nt, Human
cagagguagcaugcuguggcuu

SEQ ID NO: 666496 - RNA, 22 nt, Human
cugagacacggagaggcugugu

SEQ ID NO: 666497 - RNA, 22 nt, Human
auuucucaguuccuacuguuua

SEQ ID NO: 666498 - RNA, 22 nt, Human
caaaugugguuucucagcauuc

SEQ ID NO: 666499 - RNA, 22 nt, Human
cagguccucgggggaggccggc

SEQ ID NO: 666500 - RNA, 22 nt, Human
uuuauagaugucuguauuauaa

SEQ ID NO: 666501 - RNA, 22 nt, Human
uccugagauucugcauuucuaa

SEQ ID NO: 666502 - RNA, 22 nt, Human
gccugagagucugcauuucuaa

SEQ ID NO: 666503 - RNA, 22 nt, Human
acugugccacaauucaccaggg

SEQ ID NO: 666504 - RNA, 22 nt, Human
uuuugugagcuccuuggaggua

SEQ ID NO: 666505 - RNA, 19 nt, Human
uaguggagugacaaguucu

SEQ ID NO: 666506 - RNA, 22 nt, Human
ggcagcaacucggagagaagag

SEQ ID NO: 666507 - RNA, 22 nt, Human
uggagaagcuguagguggacuc

SEQ ID NO: 666508 - RNA, 22 nt, Human
gaaauauuguacuggagauguu

SEQ ID NO: 666509 - RNA, 22 nt, Human
uuguauuagcuguaaauuuucu

SEQ ID NO: 666510 - RNA, 22 nt, Human
cauccaaagcaaauaucuuaaa

SEQ ID NO: 666511 - RNA, 20 nt, Human
acacaugucaagcuaaaggc

SEQ ID NO: 666512 - RNA, 22 nt, Human
aaguacauuuuuaacuuacagc

SEQ ID NO: 666513 - RNA, 22 nt, Human
aaauuacuuuacacuuucaucu

SEQ ID NO: 666514 - RNA, 19 nt, Human
agagaaggauccuaugguu

SEQ ID NO: 666515 - RNA, 20 nt, Human
acaggcuuucugaggcuggc

SEQ ID NO: 666516 - RNA, 20 nt, Human
uggagugcuguguugagaag

SEQ ID NO: 666517 - RNA, 22 nt, Human
gaggcugagacucugaauuuuu

SEQ ID NO: 666518 - RNA, 22 nt, Human
gugagagcugcuagacuguuau

SEQ ID NO: 666519 - RNA, 22 nt, Human
gcaggcuuguugaaguaaaaua

SEQ ID NO: 666520 - RNA, 22 nt, Human
aauguuugaccaaaaaacugca

SEQ ID NO: 666521 - RNA, 21 nt, Human
uuaaucagucucccugucucc

SEQ ID NO: 666522 - RNA, 22 nt, Human
acuugaaacaucuuuaaaugua

SEQ ID NO: 666523 - RNA, 22 nt, Human
gacccuggcagauaccgucaca

SEQ ID NO: 666524 - RNA, 22 nt, Human
gcuuugccuguagcauuggccu

SEQ ID NO: 666525 - RNA, 22 nt, Human
gacuuuauuuccuuauuuguga

SEQ ID NO: 666526 - RNA, 22 nt, Human
cuugaaugguaugagaguaauu

SEQ ID NO: 666527 - RNA, 22 nt, Human
gcaggauggguguagcccagca

SEQ ID NO: 666528 - RNA, 21 nt, Human
ccacuguagacucauucugag

SEQ ID NO: 666529 - RNA, 17 nt, Human
agcaaaaguaucaaagc

SEQ ID NO: 666530 - RNA, 22 nt, Human
augaacucauuuauuuuccucu

SEQ ID NO: 666531 - RNA, 22 nt, Human
ucagcaagaagcugugggcuuc

SEQ ID NO: 666532 - RNA, 22 nt, Human
ggaucugggguagagcaguggg

SEQ ID NO: 666533 - RNA, 22 nt, Human
ugaccugacaugaauuaaaaac

SEQ ID NO: 666534 - RNA, 22 nt, Human
aggaauuuuaauaugcuugucu

SEQ ID NO: 666535 - RNA, 23 nt, Human
ccagcugugccuggcccaggagc

SEQ ID NO: 666536 - RNA, 22 nt, Human
agcuggguacugaugucuucag

SEQ ID NO: 666537 - RNA, 22 nt, Human
uggaagggaacagguggguguu

SEQ ID NO: 666538 - RNA, 22 nt, Human
gaggucccccauggcugugacu

SEQ ID NO: 666539 - RNA, 22 nt, Human
aaaugugcuugugaucagcugu

SEQ ID NO: 666540 - RNA, 21 nt, Human
aggugggcagguggaguggcc

SEQ ID NO: 666541 - RNA, 22 nt, Human
gauuaugguaacaaugauuaaa

SEQ ID NO: 666542 - RNA, 21 nt, Human
aucugaaguuugagaggaaag

SEQ ID NO: 666543 - RNA, 22 nt, Human
ucugugugauuucagggaaguc

SEQ ID NO: 666544 - RNA, 22 nt, Human
uguggccaggccccugauggug

SEQ ID NO: 666545 - RNA, 22 nt, Human
gcaggcagucaucuuucauauu

SEQ ID NO: 666546 - RNA, 22 nt, Human
ucugugcuuaacuacucacccc

SEQ ID NO: 666547 - RNA, 22 nt, Human
aggcagaugguaacugugauau

SEQ ID NO: 666548 - RNA, 22 nt, Human
agcaccagcucaaggugcaccu

SEQ ID NO: 666549 - RNA, 21 nt, Human
gaugauggcaggcagcacugg

SEQ ID NO: 666550 - RNA, 23 nt, Human
uagagcagggaaaucugucagag

SEQ ID NO: 666551 - RNA, 19 nt, Human
uugcauuucauguuugauu

SEQ ID NO: 666552 - RNA, 22 nt, Human
cuaaaugauauuuugguuuccu

SEQ ID NO: 666553 - RNA, 22 nt, Human
agggacagaugaaugacugagu

SEQ ID NO: 666554 - RNA, 22 nt, Human
gagucuggacuauucuggucuu

SEQ ID NO: 666555 - RNA, 22 nt, Human
uggagcaggaaacaucuagagg

SEQ ID NO: 666556 - RNA, 22 nt, Human
ggucccaagugcuuuuccugca

SEQ ID NO: 666557 - RNA, 22 nt, Human
accacagaggaauuugaagagg

SEQ ID NO: 666558 - RNA, 17 nt, Human
uggaagugaggacacug

SEQ ID NO: 666559 - RNA, 22 nt, Human
ccacaguaaagaaacaacuucg

SEQ ID NO: 666560 - RNA, 22 nt, Human
cagguaggauggaagggcucaa

SEQ ID NO: 666561 - RNA, 22 nt, Human
uugaaaugcucuuuggaaucua

SEQ ID NO: 666562 - RNA, 22 nt, Human
uuugcucaguucucuguauuuu

SEQ ID NO: 666563 - RNA, 22 nt, Human
uccaggcaguuuuccagguugu

SEQ ID NO: 666564 - RNA, 20 nt, Human
gggcuagguagccauuuggc

SEQ ID NO: 666565 - RNA, 22 nt, Human
gcugcucucagagcucaugcug

SEQ ID NO: 666566 - RNA, 22 nt, Human
acgugcgugugcgcacacauac

SEQ ID NO: 666567 - RNA, 22 nt, Human
uggcagccaucagagcaggggu

SEQ ID NO: 666568 - RNA, 22 nt, Human
cuucucucccuggcacucagac

SEQ ID NO: 666569 - RNA, 22 nt, Human
ccagcuccuucugucuguggag

SEQ ID NO: 666570 - RNA, 22 nt, Human
ugagaacugccuguauuuaucu

SEQ ID NO: 666571 - RNA, 22 nt, Human
gucaggcccuggcagccgugac

SEQ ID NO: 666572 - RNA, 22 nt, Human
ccaggguuauaaaugcaucugu

SEQ ID NO: 666573 - RNA, 22 nt, Human
caauauauaggaacaacuuagg

SEQ ID NO: 666574 - RNA, 18 nt, Human
ggaaggaguggaccccag

SEQ ID NO: 666575 - RNA, 22 nt, Human
augccaagcucuaucccugacc

SEQ ID NO: 666576 - RNA, 22 nt, Human
uguuaaucaaucaacaguauua

SEQ ID NO: 666577 - RNA, 22 nt, Human
aaauauaccaguugccugcauc

SEQ ID NO: 666578 - RNA, 22 nt, Human
auaacucuguuuuuuucaugca

SEQ ID NO: 666579 - RNA, 22 nt, Human
ugucuauucaauauccauuucu

SEQ ID NO: 666580 - RNA, 20 nt, Human
uucauuugggaaaaucugcg

SEQ ID NO: 666581 - RNA, 22 nt, Human
gccccagcguggcuguguuagg

SEQ ID NO: 666582 - RNA, 22 nt, Human
augaaucaaaguucauuugauc

SEQ ID NO: 666583 - RNA, 22 nt, Human
ggagugguggucaggccauggc

SEQ ID NO: 666584 - RNA, 22 nt, Human
caauagcagaccuagaaagcaa

SEQ ID NO: 666585 - RNA, 22 nt, Human
agagccugucaauuguaaagag

SEQ ID NO: 666586 - RNA, 22 nt, Human
ugaaaacagaauccuuguuuuc

SEQ ID NO: 666587 - RNA, 22 nt, Human
cucuccuacauuucauucacaa

SEQ ID NO: 666588 - RNA, 22 nt, Human
caguguggcugagacagaggcu

SEQ ID NO: 666589 - RNA, 22 nt, Human
caccagcuuugcccacugccca

SEQ ID NO: 666590 - RNA, 22 nt, Human
ucacagacaccuuggccacagu

SEQ ID NO: 666591 - RNA, 22 nt, Human
uucuuuguuugauaaguaugcu

SEQ ID NO: 666592 - RNA, 23 nt, Human
cuguggcccugcuucaugcagcc

SEQ ID NO: 666593 - RNA, 22 nt, Human
ucaggaugagcucauaacuaug

SEQ ID NO: 666594 - RNA, 22 nt, Human
gucuccuggcugcagcuaagac

SEQ ID NO: 666595 - RNA, 22 nt, Human
ucuggggagucaaagagaccug

SEQ ID NO: 666596 - RNA, 22 nt, Human
cagcagaagcaacauucaggcu

SEQ ID NO: 666597 - RNA, 22 nt, Human
gcucuguguaaauguagggucc

SEQ ID NO: 666598 - RNA, 22 nt, Human
ccuugggcuugggcauagcuuu

SEQ ID NO: 666599 - RNA, 22 nt, Human
ucacugucccuguccucuuauc

SEQ ID NO: 666600 - RNA, 21 nt, Human
uguguuugagacuauguuucc

SEQ ID NO: 666601 - RNA, 22 nt, Human
gccagagacacuuggagguaga

SEQ ID NO: 666602 - RNA, 22 nt, Human
guucuguccucacugcaggccu

SEQ ID NO: 666603 - RNA, 22 nt, Human
cuccaugggggcuggccugugu

SEQ ID NO: 666604 - RNA, 22 nt, Human
ugcagcucugggcaagugccuu

SEQ ID NO: 666605 - RNA, 22 nt, Human
caggcacugugcugagcucugc

SEQ ID NO: 666606 - RNA, 22 nt, Human
uaauuauuugaagacauuagag

SEQ ID NO: 666607 - RNA, 22 nt, Human
gccugcccugaaagaggugaag

SEQ ID NO: 666608 - RNA, 22 nt, Human
ucagcuucgccugagguauggg

SEQ ID NO: 666609 - RNA, 22 nt, Human
gcauugauuuaaacaucucucu

SEQ ID NO: 666610 - RNA, 18 nt, Human
uugcuuuguaagcuugca

SEQ ID NO: 666611 - RNA, 22 nt, Human
agugaccaaucacugaaugauu

SEQ ID NO: 666612 - RNA, 22 nt, Human
aacuuucuugugacauuugggg

SEQ ID NO: 666613 - RNA, 22 nt, Human
uacaugcauuggauggcaauag

SEQ ID NO: 666614 - RNA, 22 nt, Human
acuucauguacuguucaaggcc

SEQ ID NO: 666615 - RNA, 22 nt, Human
uaaagguacgaagugagggauu

SEQ ID NO: 666616 - RNA, 22 nt, Human
augcugggaaacugaaaggaau

SEQ ID NO: 666617 - RNA, 22 nt, Human
aagaugugcugucuugccacuc

SEQ ID NO: 666618 - RNA, 22 nt, Human
uccuuuggaacugacuccguua

SEQ ID NO: 666619 - RNA, 22 nt, Human
ggagccuguggccgucacgacu

SEQ ID NO: 666620 - RNA, 22 nt, Human
uuaugaaguuccuguuacagug

SEQ ID NO: 666621 - RNA, 22 nt, Human
acaaagauaagucagaaaguca

SEQ ID NO: 666622 - RNA, 22 nt, Human
acugucugcaaaacucauacuc

SEQ ID NO: 666623 - RNA, 22 nt, Human
uccaagaguucaaggcuacagu

SEQ ID NO: 666624 - RNA, 22 nt, Human
aauaaucuugacuacugaauca

SEQ ID NO: 666625 - RNA, 22 nt, Human
ggagucagccugucagagugua

SEQ ID NO: 666626 - RNA, 22 nt, Human
gauuaacauuucuaagaugcca

SEQ ID NO: 666627 - RNA, 22 nt, Human
uugcuuuccgucaugugcuaau

SEQ ID NO: 666628 - RNA, 22 nt, Human
ccagcugcugugaggaccacag

SEQ ID NO: 666629 - RNA, 22 nt, Human
aagagacuaagaaagggcaaua

SEQ ID NO: 666630 - RNA, 22 nt, Human
aacaucagcacacaauagcaag

SEQ ID NO: 666631 - RNA, 22 nt, Human
guaaugcuuuugauacagggac

SEQ ID NO: 666632 - RNA, 22 nt, Human
auuccuugggaauuauugaaug

SEQ ID NO: 666633 - RNA, 22 nt, Human
ugugacaugugucaucuuuucu

SEQ ID NO: 666634 - RNA, 22 nt, Human
aaaugacagaguaagcuguuua

SEQ ID NO: 666635 - RNA, 22 nt, Human
uccaggccugacuauaaaugua

SEQ ID NO: 666636 - RNA, 22 nt, Human
agcuuacaguucaaugacaaag

SEQ ID NO: 666637 - RNA, 22 nt, Human
uucuuuaucaguuacucauagg

SEQ ID NO: 666638 - RNA, 22 nt, Human
ggacugugaggucugggugagg

SEQ ID NO: 666639 - RNA, 22 nt, Human
uacagauauuguacaguuauag

SEQ ID NO: 666640 - RNA, 22 nt, Human
aucagaggaccuaguugggcag

SEQ ID NO: 666641 - RNA, 22 nt, Human
uccaggaccucccaggcuagag

SEQ ID NO: 666642 - RNA, 17 nt, Human
uuaaaggaugcucucuc

SEQ ID NO: 666643 - RNA, 22 nt, Human
ucaaagagcuauucaguugugg

SEQ ID NO: 666644 - RNA, 22 nt, Human
aguauuucugcucaugaaagag

SEQ ID NO: 666645 - RNA, 22 nt, Human
cuccugggagcuguggcagagc

SEQ ID NO: 666646 - RNA, 22 nt, Human
uggccuugggcagguggccugc

SEQ ID NO: 666647 - RNA, 22 nt, Human
gcugccuuugugagccaagggg

SEQ ID NO: 666648 - RNA, 22 nt, Human
gcugaggcaaauaguuuuaagu

SEQ ID NO: 666649 - RNA, 22 nt, Human
caugucuguguacacaugcaca

SEQ ID NO: 666650 - RNA, 22 nt, Human
uugucaagauugagagaugacu

SEQ ID NO: 666651 - RNA, 18 nt, Human
uagcagcacuggccgcuu

SEQ ID NO: 666652 - RNA, 22 nt, Human
acuggggccuccuccaugcucu

SEQ ID NO: 666653 - RNA, 22 nt, Human
uccagagacuugcaugugcuug

SEQ ID NO: 666654 - RNA, 22 nt, Human
ggugggugaaaucuaggugugu

SEQ ID NO: 666655 - RNA, 22 nt, Human
ucugcagauuuaucagcagcug

SEQ ID NO: 666656 - RNA, 22 nt, Human
gagcaacacuccacauugcuag

SEQ ID NO: 666657 - RNA, 21 nt, Human
uuuaggaaguuuaaggcaggu

SEQ ID NO: 666658 - RNA, 22 nt, Human
cucaaauauguggucagaaagc

SEQ ID NO: 666659 - RNA, 22 nt, Human
caggcugcggucggcucugguc

SEQ ID NO: 666660 - RNA, 22 nt, Human
aggguccauguuuccaguuaau

SEQ ID NO: 666661 - RNA, 22 nt, Human
cagcugccacaggacuuucuga

SEQ ID NO: 666662 - RNA, 22 nt, Human
cagcacagcugaggggcugucu

SEQ ID NO: 666663 - RNA, 22 nt, Human
guuucccagucugcagaguucu

SEQ ID NO: 666664 - RNA, 22 nt, Human
uaagauagaacucugaggcuac

SEQ ID NO: 666665 - RNA, 22 nt, Human
acacauauaugucgaaguccuc

SEQ ID NO: 666666 - RNA, 22 nt, Human
cauugcaacuucaaacuccugg

SEQ ID NO: 666667 - RNA, 19 nt, Human
ccugggaggcggagguugc

SEQ ID NO: 666668 - RNA, 22 nt, Human
gugcuuuagguguuuggcugaa

SEQ ID NO: 666669 - RNA, 22 nt, Human
aggacuaaaaagaugcucuccc

SEQ ID NO: 666670 - RNA, 22 nt, Human
aagccaggggcugcuuaggaga

SEQ ID NO: 666671 - RNA, 21 nt, Human
agauuugucccuucccauuua

SEQ ID NO: 666672 - RNA, 22 nt, Human
gcugagcuagcuaucucagucu

SEQ ID NO: 666673 - RNA, 22 nt, Human
ucuucucaguuucucuaggaug

SEQ ID NO: 666674 - RNA, 22 nt, Human
gcuuugauucuuggcuuaucag

SEQ ID NO: 666675 - RNA, 22 nt, Human
cuuuuauuuugaauuaagggcu

SEQ ID NO: 666676 - RNA, 22 nt, Human
uuucuaaggcuaggucuuaagg

SEQ ID NO: 666677 - RNA, 22 nt, Human
gggcugucaugugucagugacc

SEQ ID NO: 666678 - RNA, 22 nt, Human
ugcuuaaaaugaugauuauuuu

SEQ ID NO: 666679 - RNA, 22 nt, Human
uucagcacuuuguuuugcucau

SEQ ID NO: 666680 - RNA, 22 nt, Human
accuucagacaucaacuaucuc

SEQ ID NO: 666681 - RNA, 22 nt, Human
cagaaauuggaauagagaaaua

SEQ ID NO: 666682 - RNA, 22 nt, Human
ccugcucugguuuagucagucu

SEQ ID NO: 666683 - RNA, 22 nt, Human
cccagcucugccaucuacccac

SEQ ID NO: 666684 - RNA, 22 nt, Human
uagaaacaugagagaaacucuu

SEQ ID NO: 666685 - RNA, 22 nt, Human
ucacugcagagaccucuaguca

SEQ ID NO: 666686 - RNA, 22 nt, Human
aauaauguuaugucauucuucu

SEQ ID NO: 666687 - RNA, 22 nt, Human
acuggcaucccacugguacagg

SEQ ID NO: 666688 - RNA, 22 nt, Human
caacauguguuagacaauagac

SEQ ID NO: 666689 - RNA, 22 nt, Human
caagcaaugcuauacucauuau

SEQ ID NO: 666690 - RNA, 22 nt, Human
agaacacacugggggaaacaag

SEQ ID NO: 666691 - RNA, 22 nt, Human
uguuuguucccucucuuuccug

SEQ ID NO: 666692 - RNA, 22 nt, Human
uugaauaauaugcuucguucuc

SEQ ID NO: 666693 - RNA, 22 nt, Human
uacagagagagggguuaccagg

SEQ ID NO: 666694 - RNA, 22 nt, Human
cacagggaacaacuagaacaaa

SEQ ID NO: 666695 - RNA, 22 nt, Human
gauuucuguaacacuucagaua

SEQ ID NO: 666696 - RNA, 20 nt, Human
agaaacauuucuugagaacu

SEQ ID NO: 666697 - RNA, 22 nt, Human
agaaauguugaauacaucagga

SEQ ID NO: 666698 - RNA, 22 nt, Human
aaguuacauuuuggucuaauug

SEQ ID NO: 666699 - RNA, 22 nt, Human
ucugcagagccucaggagaaca

SEQ ID NO: 666700 - RNA, 22 nt, Human
gagcaccaaggcucugccaugg

SEQ ID NO: 666701 - RNA, 22 nt, Human
uccucccaacuuuuccaucuca

SEQ ID NO: 666702 - RNA, 22 nt, Human
acaacaucagcugagaccuuca

SEQ ID NO: 666703 - RNA, 22 nt, Human
agacagacagagaauuuaaaua

SEQ ID NO: 666704 - RNA, 22 nt, Human
agcaggcuaaauaauaauacau

SEQ ID NO: 666705 - RNA, 22 nt, Human
ggagccaguauuuaguggucuu

SEQ ID NO: 666706 - RNA, 22 nt, Human
cagcuucaauaauggcugaugg

SEQ ID NO: 666707 - RNA, 22 nt, Human
uuguuaacggaaaacuguuuuc

SEQ ID NO: 666708 - RNA, 23 nt, Human
cccaggucaaaauucacaggccu

SEQ ID NO: 666709 - RNA, 22 nt, Human
auuucagcuaaaauucuuaauu

SEQ ID NO: 666710 - RNA, 22 nt, Human
cuguuuauagcagagcaagccu

SEQ ID NO: 666711 - RNA, 22 nt, Human
cccagugucucuugugccuuuc

SEQ ID NO: 666712 - RNA, 22 nt, Human
ccagcuggucugugcucauguu

SEQ ID NO: 666713 - RNA, 22 nt, Human
gacuuuauccugccugaccacg

SEQ ID NO: 666714 - RNA, 22 nt, Human
accauucuuuacaucagcacag

SEQ ID NO: 666715 - RNA, 22 nt, Human
aaggagagguuguccguguugu

SEQ ID NO: 666716 - RNA, 19 nt, Human
uguuuucaagugggauuau

SEQ ID NO: 666717 - RNA, 22 nt, Human
gcugccccgagccauccuucag

SEQ ID NO: 666718 - RNA, 22 nt, Human
cagagccuggcgaugucaugga

SEQ ID NO: 666719 - RNA, 22 nt, Human
uccagccuccuauuuacccuaa

SEQ ID NO: 666720 - RNA, 23 nt, Human
cugugcccggggcuccaccugau

SEQ ID NO: 666721 - RNA, 21 nt, Human
ccaggcaugacugcagagagc

SEQ ID NO: 666722 - RNA, 22 nt, Human
gcaguguugagugguggcugaa

SEQ ID NO: 666723 - RNA, 22 nt, Human
uuucuucucgacaccuuauccc

SEQ ID NO: 666724 - RNA, 22 nt, Human
gucacuggggccacaugcagaa

SEQ ID NO: 666725 - RNA, 22 nt, Human
aucuacagugcacaggacagcc

SEQ ID NO: 666726 - RNA, 22 nt, Human
caggagugucgggucacuaggu

SEQ ID NO: 666727 - RNA, 22 nt, Human
auuaagacuauugauauuuaca

SEQ ID NO: 666728 - RNA, 22 nt, Human
ugggaaguuaggaugccaggga

SEQ ID NO: 666729 - RNA, 22 nt, Human
gauccguuuuaacaaugggagu

SEQ ID NO: 666730 - RNA, 22 nt, Human
uuucaagacucauugaguauug

SEQ ID NO: 666731 - RNA, 22 nt, Human
acaggcaaggccagugagaaau

SEQ ID NO: 666732 - RNA, 22 nt, Human
uguuauccucagcucaccucua

SEQ ID NO: 666733 - RNA, 22 nt, Human
ucuacuucuccuucauuuccca

SEQ ID NO: 666734 - RNA, 22 nt, Human
gaaaugugugacaaguuucaau

SEQ ID NO: 666735 - RNA, 22 nt, Human
uuggccuuaaccucucugugcc

SEQ ID NO: 666736 - RNA, 22 nt, Human
acucugggagaggacaaacaaa

SEQ ID NO: 666737 - RNA, 22 nt, Human
acuuuagaaguaaggaugaguu

SEQ ID NO: 666738 - RNA, 22 nt, Human
ucccaguguggcaggccaugga

SEQ ID NO: 666739 - RNA, 23 nt, Human
ggcuccugcuucaugucccaccu

SEQ ID NO: 666740 - RNA, 22 nt, Human
ccaggccucccuuuuccagcca

SEQ ID NO: 666741 - RNA, 22 nt, Human
ggcuccaagucucagagugaag

SEQ ID NO: 666742 - RNA, 19 nt, Human
uuaugaaggcuggggggag

SEQ ID NO: 666743 - RNA, 22 nt, Human
cugugugugaacacagcccagc

SEQ ID NO: 666744 - RNA, 22 nt, Human
aaauguguuugauaggaauauu

SEQ ID NO: 666745 - RNA, 22 nt, Human
gucccuggagcugagcagugcu

SEQ ID NO: 666746 - RNA, 22 nt, Human
cuuaggaacacuuacugguacu

SEQ ID NO: 666747 - RNA, 22 nt, Human
uuccaaacugccaauucagaag

SEQ ID NO: 666748 - RNA, 22 nt, Human
gcagcuggagccagccagacac

SEQ ID NO: 666749 - RNA, 22 nt, Human
auaacagagagcuacugaacug

SEQ ID NO: 666750 - RNA, 22 nt, Human
caggccucaggggcucaggcug

SEQ ID NO: 666751 - RNA, 22 nt, Human
uucaagaugucuucacaauagu

SEQ ID NO: 666752 - RNA, 22 nt, Human
aagcacauuguacauuugugcu

SEQ ID NO: 666753 - RNA, 22 nt, Human
uuucaagaagcaaauuaaaguc

SEQ ID NO: 666754 - RNA, 22 nt, Human
aggaaaggugagagcggccgcg

SEQ ID NO: 666755 - RNA, 22 nt, Human
gagauggcuugcucucacgugg

SEQ ID NO: 666756 - RNA, 22 nt, Human
uaaggcagugaaacuauucugu

SEQ ID NO: 666757 - RNA, 22 nt, Human
agccauccucccaccucagccu

SEQ ID NO: 666758 - RNA, 23 nt, Human
cugccccaauuauaaaagaagau

SEQ ID NO: 666759 - RNA, 22 nt, Human
agcaguuaucgaagaaucaggu

SEQ ID NO: 666760 - RNA, 22 nt, Human
uucucauucugacucaguguag

SEQ ID NO: 666761 - RNA, 22 nt, Human
aaacuuggccgcauccaccggg

SEQ ID NO: 666762 - RNA, 22 nt, Human
ucaauucaauugaacaguuacu

SEQ ID NO: 666763 - RNA, 22 nt, Human
caucugaauaaagacuugcaga

SEQ ID NO: 666764 - RNA, 22 nt, Human
augaauuguccgauguugugca

SEQ ID NO: 666765 - RNA, 22 nt, Human
augcaacagagaaaauauugag

SEQ ID NO: 666766 - RNA, 23 nt, Human
cuggcccuggcucugugaucaug

SEQ ID NO: 666767 - RNA, 22 nt, Human
acagugauugguuuggggguga

SEQ ID NO: 666768 - RNA, 22 nt, Human
cuguauauggcuuacuuuauau

SEQ ID NO: 666769 - RNA, 22 nt, Human
agucugggaggcuuauaaacag

SEQ ID NO: 666770 - RNA, 22 nt, Human
aaguuuagauauagguauucug

SEQ ID NO: 666771 - RNA, 22 nt, Human
auguagcaucuauccugauaaa

SEQ ID NO: 666772 - RNA, 22 nt, Human
cugguuccagaauugccugugg

SEQ ID NO: 666773 - RNA, 22 nt, Human
guucugcuccuguggcaaucua

SEQ ID NO: 666774 - RNA, 21 nt, Human
gaggcugucugcugcuggccu

SEQ ID NO: 666775 - RNA, 22 nt, Human
acaggcucucagccaguuggca

SEQ ID NO: 666776 - RNA, 22 nt, Human
gccuuauuuuacuuggauucug

SEQ ID NO: 666777 - RNA, 22 nt, Human
uguguacauaucuauccuagau

SEQ ID NO: 666778 - RNA, 22 nt, Human
agaaaugugaauuucauuuccu

SEQ ID NO: 666779 - RNA, 22 nt, Human
cugcuuuagcuagugcucuuag

SEQ ID NO: 666780 - RNA, 22 nt, Human
aaugcuuugccaacagcuauug

SEQ ID NO: 666781 - RNA, 22 nt, Human
acagguggagugguuagcaggc

SEQ ID NO: 666782 - RNA, 22 nt, Human
guuccacaaagauugucucucu

SEQ ID NO: 666783 - RNA, 22 nt, Human
aaucuugaguguuacucucauu

SEQ ID NO: 666784 - RNA, 21 nt, Human
auuucagagcacacaaguaaa

SEQ ID NO: 666785 - RNA, 22 nt, Human
ggcacugacacuagcauggcac

SEQ ID NO: 666786 - RNA, 22 nt, Human
uccuugaauauaauaacaguag

SEQ ID NO: 666787 - RNA, 22 nt, Human
cuggcucaguucuugguuuuca

SEQ ID NO: 666788 - RNA, 22 nt, Human
ugaugacuauauaugacuagug

SEQ ID NO: 666789 - RNA, 22 nt, Human
ugggccguggagcacucugaga

SEQ ID NO: 666790 - RNA, 22 nt, Human
gaugcauuacaaaagugauuau

SEQ ID NO: 666791 - RNA, 22 nt, Human
ccaguguucauaauuuuacacu

SEQ ID NO: 666792 - RNA, 22 nt, Human
gggacuggaacuacuggugcag

SEQ ID NO: 666793 - RNA, 22 nt, Human
ugagucucccaaguaguuggaa

SEQ ID NO: 666794 - RNA, 23 nt, Human
agaaagucauggccagguuugau

SEQ ID NO: 666795 - RNA, 22 nt, Human
ccacaugaugaggaagcugaac

SEQ ID NO: 666796 - RNA, 22 nt, Human
uuuccuuguuauuauuuguccu

SEQ ID NO: 666797 - RNA, 22 nt, Human
cugugacuguguuggaugcaca

SEQ ID NO: 666798 - RNA, 22 nt, Human
cagacagguugcaaaacuucaa

SEQ ID NO: 666799 - RNA, 22 nt, Human
auggcugugguaucagacgcag

SEQ ID NO: 666800 - RNA, 22 nt, Human
ucagguucagacuagucccagu

SEQ ID NO: 666801 - RNA, 21 nt, Human
auguuuacacugacuacugug

SEQ ID NO: 666802 - RNA, 22 nt, Human
agaugcugucacacacacuguu

SEQ ID NO: 666803 - RNA, 22 nt, Human
uccaggcuagaagucacaggcc

SEQ ID NO: 666804 - RNA, 22 nt, Human
uggcugagcucccuguguguug

SEQ ID NO: 666805 - RNA, 22 nt, Human
cuguggcauugccgaggcuggc

SEQ ID NO: 666806 - RNA, 18 nt, Human
caguggugcugggaugug

SEQ ID NO: 666807 - RNA, 22 nt, Human
aaugauuggcacuagauacaca

SEQ ID NO: 666808 - RNA, 22 nt, Human
aagacauuagaaucagccuguu

SEQ ID NO: 666809 - RNA, 22 nt, Human
agagucaaguagggcaugggcu

SEQ ID NO: 666810 - RNA, 22 nt, Human
aauauauuugaaucaggaacaa

SEQ ID NO: 666811 - RNA, 23 nt, Human
uggacccugcacaccagcucuac

SEQ ID NO: 666812 - RNA, 22 nt, Human
uagucaacuagugagcauaugg

SEQ ID NO: 666813 - RNA, 22 nt, Human
augcaguggcagcuccuggugu

SEQ ID NO: 666814 - RNA, 20 nt, Human
uaucaaucagaaagaagacu

SEQ ID NO: 666815 - RNA, 22 nt, Human
ucagguggccaaaugggagcgc

SEQ ID NO: 666816 - RNA, 22 nt, Human
ugauggaaaauaaaucuuauuc

SEQ ID NO: 666817 - RNA, 22 nt, Human
uaagguuuaacgcccugucucg

SEQ ID NO: 666818 - RNA, 22 nt, Human
gagugcuguaggacugagcccu

SEQ ID NO: 666819 - RNA, 22 nt, Human
cuugacuucuucuagaaauaag

SEQ ID NO: 666820 - RNA, 22 nt, Human
ugguuaaaugggaagagcaaca

SEQ ID NO: 666821 - RNA, 22 nt, Human
gcucugggaaggaucguaguga

SEQ ID NO: 666822 - RNA, 22 nt, Human
auuccacagaggacuccgauug

SEQ ID NO: 666823 - RNA, 22 nt, Human
ccagaggagcaggcuggcucca

SEQ ID NO: 666824 - RNA, 22 nt, Human
gagaaacuaacaucugaaggug

SEQ ID NO: 666825 - RNA, 19 nt, Human
ugagcuggcugagccucuc

SEQ ID NO: 666826 - RNA, 22 nt, Human
augacuuauuacaagucauauu

SEQ ID NO: 666827 - RNA, 22 nt, Human
ugggcagaaggaagagccaccu

SEQ ID NO: 666828 - RNA, 22 nt, Human
guuucucugucuguuacauugg

SEQ ID NO: 666829 - RNA, 22 nt, Human
ucaggcucuggguacaccugac

SEQ ID NO: 666830 - RNA, 22 nt, Human
auuuguaccauacuguuuauua

SEQ ID NO: 666831 - RNA, 22 nt, Human
auccaacacguauuugcuggcc

SEQ ID NO: 666832 - RNA, 22 nt, Human
uauuaagagauguaugaagaga

SEQ ID NO: 666833 - RNA, 22 nt, Human
cagccaggggcuggcguguuga

SEQ ID NO: 666834 - RNA, 22 nt, Human
uggcuucuccagaaaucuuggu

SEQ ID NO: 666835 - RNA, 18 nt, Human
cuggucagggcaaugggc

SEQ ID NO: 666836 - RNA, 22 nt, Human
uguuccugaaugccuggcuggc

SEQ ID NO: 666837 - RNA, 22 nt, Human
aauaccuuuucagugcacaaaa

SEQ ID NO: 666838 - RNA, 21 nt, Human
uccugggagucugagauccug

SEQ ID NO: 666839 - RNA, 22 nt, Human
ggugaggggcaccucugcccgg

SEQ ID NO: 666840 - RNA, 22 nt, Human
accacuggcucaggagcuggga

SEQ ID NO: 666841 - RNA, 22 nt, Human
augaacaaguauuugcaugagc

SEQ ID NO: 666842 - RNA, 22 nt, Human
ccuggacuugauauucucuuuc

SEQ ID NO: 666843 - RNA, 23 nt, Human
gaaaucuagucauuuuuagucug

SEQ ID NO: 666844 - RNA, 18 nt, Human
cagcagagacauucaaaa

SEQ ID NO: 666845 - RNA, 22 nt, Human
caguccuugcucugggaugaug

SEQ ID NO: 666846 - RNA, 22 nt, Human
augcaacaguucauaguuuuau

SEQ ID NO: 666847 - RNA, 19 nt, Human
gguggcagaacgugggucc

SEQ ID NO: 666848 - RNA, 22 nt, Human
uucucaagaacauauguagggu

SEQ ID NO: 666849 - RNA, 22 nt, Human
uuacaguuagguguguaguggu

SEQ ID NO: 666850 - RNA, 22 nt, Human
uaugugauagaguuacuuuaua

SEQ ID NO: 666851 - RNA, 22 nt, Human
ugggcagacugagcccuguccc

SEQ ID NO: 666852 - RNA, 22 nt, Human
ucccagagacagagccuccucc

SEQ ID NO: 666853 - RNA, 22 nt, Human
agaggcggagguugcagugagc

SEQ ID NO: 666854 - RNA, 22 nt, Human
caaagcaggaagcuccugacag

SEQ ID NO: 666855 - RNA, 22 nt, Human
ucuguucuuggugcagcuggga

SEQ ID NO: 666856 - RNA, 22 nt, Human
gcuccucuuauuucaucagggc

SEQ ID NO: 666857 - RNA, 22 nt, Human
ucugaguuuucugagaagcuua

SEQ ID NO: 666858 - RNA, 20 nt, Human
aauauaauucucugaauuua

SEQ ID NO: 666859 - RNA, 22 nt, Human
cugccugcugacauucuuuaua

SEQ ID NO: 666860 - RNA, 22 nt, Human
acacugaaugcuguuuagaaau

SEQ ID NO: 666861 - RNA, 22 nt, Human
uacagagaacucauagaaagaa

SEQ ID NO: 666862 - RNA, 22 nt, Human
gcacagaacacuggugaguccc

SEQ ID NO: 666863 - RNA, 22 nt, Human
acugugcagguagaugccuggg

SEQ ID NO: 666864 - RNA, 19 nt, Human
cauaauacaguggaucuga

SEQ ID NO: 666865 - RNA, 22 nt, Human
caggccagugugcuucccaggc

SEQ ID NO: 666866 - RNA, 18 nt, Human
acuaugcugaauaaaugg

SEQ ID NO: 666867 - RNA, 22 nt, Human
uacuuacagagcuuauaaguua

SEQ ID NO: 666868 - RNA, 22 nt, Human
gauuggagaguggaacaugcug

SEQ ID NO: 666869 - RNA, 22 nt, Human
gcaaaggccacuggggcgaugg

SEQ ID NO: 666870 - RNA, 21 nt, Human
caggaaaagcggaagucuagc

SEQ ID NO: 666871 - RNA, 21 nt, Human
ucccacucuaaauggacugaa

SEQ ID NO: 666872 - RNA, 23 nt, Human
aaaggcacagcauugucuagcag

SEQ ID NO: 666873 - RNA, 22 nt, Human
gccaaggcugaggcccugggcu

SEQ ID NO: 666874 - RNA, 22 nt, Human
acagcaacuccugcuucugagu

SEQ ID NO: 666875 - RNA, 16 nt, Human
gcuaggcaacaggcug

SEQ ID NO: 666876 - RNA, 22 nt, Human
cauuccuauuaugucccuagug

SEQ ID NO: 666877 - RNA, 22 nt, Human
accagcucauaauuuucaaaac

SEQ ID NO: 666878 - RNA, 22 nt, Human
aaguuacuaugacucuucuuuu

SEQ ID NO: 666879 - RNA, 19 nt, Human
ugugacaucacugggcagc

SEQ ID NO: 666880 - RNA, 22 nt, Human
cacagcuuccauuagaaugaga

SEQ ID NO: 666881 - RNA, 22 nt, Human
agucaugacuccauuggucaag

SEQ ID NO: 666882 - RNA, 23 nt, Human
augguuuaugucacacuuuugau

SEQ ID NO: 666883 - RNA, 22 nt, Human
ucaucugucauccacaaagcug

SEQ ID NO: 666884 - RNA, 17 nt, Human
uccaggcagcaacugag

SEQ ID NO: 666885 - RNA, 22 nt, Human
ucccagaaucuccagugcuaca

SEQ ID NO: 666886 - RNA, 22 nt, Human
auggcuguccaguuucuagaga

SEQ ID NO: 666887 - RNA, 22 nt, Human
gaugucugugagaucaaacuaa

SEQ ID NO: 666888 - RNA, 22 nt, Human
acuugguggcgaacgaggguca

SEQ ID NO: 666889 - RNA, 22 nt, Human
ccaggucugucuucuuagcuca

SEQ ID NO: 666890 - RNA, 22 nt, Human
ugagaagauugggcagagugga

SEQ ID NO: 666891 - RNA, 22 nt, Human
ccuccccacccacggcuggugg

SEQ ID NO: 666892 - RNA, 22 nt, Human
caugcagcaggaucucauuccc

SEQ ID NO: 666893 - RNA, 21 nt, Human
ucucuggaguuagcagagaga

SEQ ID NO: 666894 - RNA, 22 nt, Human
auugaacagaaaaacucagaga

SEQ ID NO: 666895 - RNA, 22 nt, Human
guuuggcucugggugccugugc

SEQ ID NO: 666896 - RNA, 22 nt, Human
cacucaggcugugucaggagga

SEQ ID NO: 666897 - RNA, 22 nt, Human
cugaguguuuucagccacggcc

SEQ ID NO: 666898 - RNA, 22 nt, Human
ucuuaaaggcacauagugucua

SEQ ID NO: 666899 - RNA, 22 nt, Human
gauuuucuugggaaacaaugag

SEQ ID NO: 666900 - RNA, 22 nt, Human
ugagacaguucugcagcugggu

SEQ ID NO: 666901 - RNA, 17 nt, Human
ggaaagguagaguaauc

SEQ ID NO: 666902 - RNA, 22 nt, Human
cagcccugggaucuuagugccu

SEQ ID NO: 666903 - RNA, 22 nt, Human
agcagcucugagaggccagcac

SEQ ID NO: 666904 - RNA, 22 nt, Human
gcuggcaccugcaccaagcagg

SEQ ID NO: 666905 - RNA, 22 nt, Human
auacaguaagugucccugaaac

SEQ ID NO: 666906 - RNA, 22 nt, Human
ugcuggccugguuagaaagggg

SEQ ID NO: 666907 - RNA, 22 nt, Human
auccugagcuacaccugcuccu

SEQ ID NO: 666908 - RNA, 22 nt, Human
gcaguggauccaaugguaucuu

SEQ ID NO: 666909 - RNA, 22 nt, Human
uaauacuuaccuugcagagucu

SEQ ID NO: 666910 - RNA, 22 nt, Human
guuacacagcuaagcuucuccu

SEQ ID NO: 666911 - RNA, 21 nt, Human
auuccaguauaagccucuuug

SEQ ID NO: 666912 - RNA, 22 nt, Human
aggcuuccucgugccuuagaua

SEQ ID NO: 666913 - RNA, 21 nt, Human
ucuggcaggcacgggcccagc

SEQ ID NO: 666914 - RNA, 22 nt, Human
uguguguguuucugcucauaca

SEQ ID NO: 666915 - RNA, 22 nt, Human
uaagaaacugucacaguacuau

SEQ ID NO: 666916 - RNA, 22 nt, Human
ugugccugagucucggcccacc

SEQ ID NO: 666917 - RNA, 22 nt, Human
uccucagcaaacacuucacucu

SEQ ID NO: 666918 - RNA, 22 nt, Human
ugggagaagcagugggacagua

SEQ ID NO: 666919 - RNA, 22 nt, Human
cucaggaaggaagcagggagcc

SEQ ID NO: 666920 - RNA, 22 nt, Human
cucccugcuuguuucccuucag

SEQ ID NO: 666921 - RNA, 22 nt, Human
uggguuuaaacucaacucuaaa

SEQ ID NO: 666922 - RNA, 22 nt, Human
uggcauccacaaaugcuuagau

SEQ ID NO: 666923 - RNA, 22 nt, Human
acagcaagaccccuagcauggu

SEQ ID NO: 666924 - RNA, 20 nt, Human
ccuggcuuugcaucugugau

SEQ ID NO: 666925 - RNA, 22 nt, Human
cauucauucacauuuugucuau

SEQ ID NO: 666926 - RNA, 22 nt, Human
cugcaguucuucuccucaaggc

SEQ ID NO: 666927 - RNA, 22 nt, Human
ugucccaguuggguauugaauu

SEQ ID NO: 666928 - RNA, 22 nt, Human
uuucucucuauuuagacaggua

SEQ ID NO: 666929 - RNA, 22 nt, Human
uauuccuauuucuaaacauaug

SEQ ID NO: 666930 - RNA, 22 nt, Human
ugaggaagggcacacggacccu

SEQ ID NO: 666931 - RNA, 22 nt, Human
ccagccuuacugcccuucagug

SEQ ID NO: 666932 - RNA, 22 nt, Human
ugggcuccggcggccucaggcu

SEQ ID NO: 666933 - RNA, 22 nt, Human
caguucucuuuccacuggaggc

SEQ ID NO: 666934 - RNA, 22 nt, Human
aagauucuacaguagguacauu

SEQ ID NO: 666935 - RNA, 22 nt, Human
aguaguggcuuccuggagugcu

SEQ ID NO: 666936 - RNA, 22 nt, Human
ugcaggcuggggaggcagacuu

SEQ ID NO: 666937 - RNA, 22 nt, Human
ucucuaaaguagaaaagacccc

SEQ ID NO: 666938 - RNA, 17 nt, Human
cccagcugcgucugagg

SEQ ID NO: 666939 - RNA, 22 nt, Human
ccacagugguuguggcaugugg

SEQ ID NO: 666940 - RNA, 22 nt, Human
gucaccagucccagcuccugaa

SEQ ID NO: 666941 - RNA, 22 nt, Human
acaggcacucucauuaaaauag

SEQ ID NO: 666942 - RNA, 22 nt, Human
ggcaguuuggcaggauggaggg

SEQ ID NO: 666943 - RNA, 22 nt, Human
agccaaagaucagugugcaagu

SEQ ID NO: 666944 - RNA, 22 nt, Human
auggcagcuggcuugggcaccu

SEQ ID NO: 666945 - RNA, 22 nt, Human
cacaggggcaaacuguagggga

SEQ ID NO: 666946 - RNA, 22 nt, Human
ucugaggaccuacugaagaguu

SEQ ID NO: 666947 - RNA, 23 nt, Human
ugggccagggaguccgguuucuu

SEQ ID NO: 666948 - RNA, 22 nt, Human
ugcugggccuuuaccuccaggg

SEQ ID NO: 666949 - RNA, 22 nt, Human
aaagugaugccaggagucuggu

SEQ ID NO: 666950 - RNA, 20 nt, Human
gucuccucuuugcauuccua

SEQ ID NO: 666951 - RNA, 22 nt, Human
ugcagaggugaaagacuagcaa

SEQ ID NO: 666952 - RNA, 22 nt, Human
ucaggcuguauaucuugcacuc

SEQ ID NO: 666953 - RNA, 22 nt, Human
aaucauguuuacgugacauguc

SEQ ID NO: 666954 - RNA, 22 nt, Human
uugacacuaagauuuccaaaca

SEQ ID NO: 666955 - RNA, 23 nt, Human
agaaaaguucauaccuuuuuaac

SEQ ID NO: 666956 - RNA, 22 nt, Human
acccugggucucaaucauccua

SEQ ID NO: 666957 - RNA, 22 nt, Human
uuuacaucucaccagauucaua

SEQ ID NO: 666958 - RNA, 22 nt, Human
ccugcucuccauacacuuucua

SEQ ID NO: 666959 - RNA, 15 nt, Human
aacaggcauuuauau

SEQ ID NO: 666960 - RNA, 17 nt, Human
aggcugcugggccaggg

SEQ ID NO: 666961 - RNA, 22 nt, Human
aguccguggccagacucaagag

SEQ ID NO: 666962 - RNA, 22 nt, Human
ugucucugagaugacucccacc

SEQ ID NO: 666963 - RNA, 22 nt, Human
gcaggccaggcuaggggcuguc

SEQ ID NO: 666964 - RNA, 22 nt, Human
ugagaugaugggauaagagggc

SEQ ID NO: 666965 - RNA, 21 nt, Human
acccugcuuuaugccguccuc

SEQ ID NO: 666966 - RNA, 22 nt, Human
ucucucuacuggggcacuagga

SEQ ID NO: 666967 - RNA, 22 nt, Human
cucugaagggagggccaagccc

SEQ ID NO: 666968 - RNA, 22 nt, Human
ucuaaggagccaggacuauuag

SEQ ID NO: 666969 - RNA, 22 nt, Human
ccagcagggaaaaacccaccaa

SEQ ID NO: 666970 - RNA, 22 nt, Human
uccaggcuccccugcgugcucc

SEQ ID NO: 666971 - RNA, 22 nt, Human
agccuggggcacuucuccaaac

SEQ ID NO: 666972 - RNA, 22 nt, Human
uaucuguucugcuugauuuuga

SEQ ID NO: 666973 - RNA, 22 nt, Human
uaaugguuuuuuggagacugcu

SEQ ID NO: 666974 - RNA, 22 nt, Human
ugaacauuggcacaaggcagca

SEQ ID NO: 666975 - RNA, 22 nt, Human
cuuuggaaggaacaggauucuc

SEQ ID NO: 666976 - RNA, 22 nt, Human
gacagacacuguguccucacuu

SEQ ID NO: 666977 - RNA, 22 nt, Human
auuucacaaagaacagaugcag

SEQ ID NO: 666978 - RNA, 17 nt, Human
uuagcaaaauagcacuu

SEQ ID NO: 666979 - RNA, 22 nt, Human
uggcuccuuccgcagcaugccu

SEQ ID NO: 666980 - RNA, 22 nt, Human
ggaggggugagaauggcugccu

SEQ ID NO: 666981 - RNA, 22 nt, Human
uuugcauuacuugacuuuaguu

SEQ ID NO: 666982 - RNA, 22 nt, Human
acagugauugggguaucugcag

SEQ ID NO: 666983 - RNA, 22 nt, Human
gcucuggggcccagggaucaca

SEQ ID NO: 666984 - RNA, 22 nt, Human
agcuucuugaccaagccuguaa

SEQ ID NO: 666985 - RNA, 22 nt, Human
gaguaggguuuccagguuagag

SEQ ID NO: 666986 - RNA, 19 nt, Human
ggaguggguaguuaguggu

SEQ ID NO: 666987 - RNA, 22 nt, Human
aagaacaacugcuuuaaaagca

SEQ ID NO: 666988 - RNA, 22 nt, Human
ccaugcaugccugaaauugcug

SEQ ID NO: 666989 - RNA, 22 nt, Human
agggacaguauccaucucacag

SEQ ID NO: 666990 - RNA, 21 nt, Human
uucacagaugggaaaacugag

SEQ ID NO: 666991 - RNA, 22 nt, Human
uuuucuguuuacagagggaccu

SEQ ID NO: 666992 - RNA, 22 nt, Human
ggggagaauaaaucagauuuua

SEQ ID NO: 666993 - RNA, 22 nt, Human
aggcaggcuagucgcuugagcc

SEQ ID NO: 666994 - RNA, 22 nt, Human
aaucagaaauugagggucuggu

SEQ ID NO: 666995 - RNA, 22 nt, Human
uacagauauagagauuuauaga

SEQ ID NO: 666996 - RNA, 22 nt, Human
gagaggugaaaggauaguuuga

SEQ ID NO: 666997 - RNA, 22 nt, Human
ggagagcugguauaugaagaca

SEQ ID NO: 666998 - RNA, 22 nt, Human
cacagcccugcgccccaguuug

SEQ ID NO: 666999 - RNA, 22 nt, Human
accaggcagcaccaaagccggu

SEQ ID NO: 667000 - RNA, 22 nt, Human
aguggcuaauaacagcuaaaca

SEQ ID NO: 667001 - RNA, 22 nt, Human
ccccagggacugguuucaugga

SEQ ID NO: 667002 - RNA, 21 nt, Human
guggagagugauuuugaugca

SEQ ID NO: 667003 - RNA, 22 nt, Human
aaggcagcccuggcucagccug

SEQ ID NO: 667004 - RNA, 22 nt, Human
uucuguccacugcuggggccuc

SEQ ID NO: 667005 - RNA, 22 nt, Human
ugggagcaguugugaagcucag

SEQ ID NO: 667006 - RNA, 20 nt, Human
guucacaggcuuccuuucag

SEQ ID NO: 667007 - RNA, 20 nt, Human
cagagcugggauuugaacac

SEQ ID NO: 667008 - RNA, 20 nt, Human
uucacagaggacucagguca

SEQ ID NO: 667009 - RNA, 22 nt, Human
aaacugcagccuugaguucagg

SEQ ID NO: 667010 - RNA, 19 nt, Human
agauggcaaaaugcaaaga

SEQ ID NO: 667011 - RNA, 22 nt, Human
auaaaccagaaguaaaagcuac

SEQ ID NO: 667012 - RNA, 22 nt, Human
aagaggcagaaauaucgcugaa

SEQ ID NO: 667013 - RNA, 22 nt, Human
acagcagucagugaauauuuaa

SEQ ID NO: 667014 - RNA, 22 nt, Human
ucucugggcucaggagcccggc

SEQ ID NO: 667015 - RNA, 22 nt, Human
uucagcaagaccaccauguacc

SEQ ID NO: 667016 - RNA, 22 nt, Human
gggugcaacuaagaagagguga

SEQ ID NO: 667017 - RNA, 22 nt, Human
ucagggucaggacccagcuguu

SEQ ID NO: 667018 - RNA, 22 nt, Human
ucagacuuuaaaggcuaacagg

SEQ ID NO: 667019 - RNA, 22 nt, Human
gagagcacaugaacauggagga

SEQ ID NO: 667020 - RNA, 22 nt, Human
gaggugucaugagggccugcuc

SEQ ID NO: 667021 - RNA, 22 nt, Human
uuaaacagucccagaggcugac

SEQ ID NO: 667022 - RNA, 22 nt, Human
cuggcaguuugccaggagcucg

SEQ ID NO: 667023 - RNA, 22 nt, Human
ugaguuauugagaaauaacugc

SEQ ID NO: 667024 - RNA, 22 nt, Human
cuggcagguggauggggacucc

SEQ ID NO: 667025 - RNA, 22 nt, Human
guggcagcuguguugcaguuuu

SEQ ID NO: 667026 - RNA, 22 nt, Human
uccucuugggaauaccuuucua

SEQ ID NO: 667027 - RNA, 22 nt, Human
uuuacagauucuggguauuagg

SEQ ID NO: 667028 - RNA, 22 nt, Human
cggagcagaaggcgccgccggc

SEQ ID NO: 667029 - RNA, 22 nt, Human
auggguggaggagaaaggcauc

SEQ ID NO: 667030 - RNA, 22 nt, Human
aaggcuguccaggagaaaauag

SEQ ID NO: 667031 - RNA, 22 nt, Human
cccagacugcagagcgggcaga

SEQ ID NO: 667032 - RNA, 22 nt, Human
agaggccaauaguagguggcau

SEQ ID NO: 667033 - RNA, 21 nt, Human
ucucugagacacucuggagcc

SEQ ID NO: 667034 - RNA, 22 nt, Human
cagggcaggaauuugacauugc

SEQ ID NO: 667035 - RNA, 22 nt, Human
agagaccaagggaauagucuca

SEQ ID NO: 667036 - RNA, 22 nt, Human
uuagauaccuuuguguuguaga

SEQ ID NO: 667037 - RNA, 22 nt, Human
gaucaauucaaacuauuuuccu

SEQ ID NO: 667038 - RNA, 22 nt, Human
aacauuuacaaauccuucugca

SEQ ID NO: 667039 - RNA, 22 nt, Human
cucugggaauucugagcaagca

SEQ ID NO: 667040 - RNA, 20 nt, Human
agacaugguagugauucagg

SEQ ID NO: 667041 - RNA, 22 nt, Human
gcuacaggagcugucacaugcu

SEQ ID NO: 667042 - RNA, 22 nt, Human
gagagcaggcucucgggggcca

SEQ ID NO: 667043 - RNA, 22 nt, Human
cucugagagagcuggugagcac

SEQ ID NO: 667044 - RNA, 22 nt, Human
cuggcagcauggagccugugcu

SEQ ID NO: 667045 - RNA, 22 nt, Human
ggguugggacugucaucuggag

SEQ ID NO: 667046 - RNA, 22 nt, Human
ccagguggcuucugcccgaugu

SEQ ID NO: 667047 - RNA, 22 nt, Human
cagggccucgaagccucugggc

SEQ ID NO: 667048 - RNA, 22 nt, Human
ucccuccagaauggugaggaag

SEQ ID NO: 667049 - RNA, 22 nt, Human
cugucauuucuauuauagagga

SEQ ID NO: 667050 - RNA, 22 nt, Human
ccaggcugcagucaaggggcau

SEQ ID NO: 667051 - RNA, 22 nt, Human
uuaccugcaacucccaugguga

SEQ ID NO: 667052 - RNA, 22 nt, Human
auuagaaugcaggguucauugu

SEQ ID NO: 667053 - RNA, 23 nt, Human
ugaaucaauuaugggauucaaug

SEQ ID NO: 667054 - RNA, 22 nt, Human
uccagucuucuugcagcuacau

SEQ ID NO: 667055 - RNA, 22 nt, Human
cauuuguuaauuacuauuaucu

SEQ ID NO: 667056 - RNA, 22 nt, Human
uacaguaaagcugcuaugaauu

SEQ ID NO: 667057 - RNA, 22 nt, Human
aauguguauaagggagagcuaa

SEQ ID NO: 667058 - RNA, 22 nt, Human
caggcugggcuccggagauaaa

SEQ ID NO: 667059 - RNA, 22 nt, Human
uggaaggcuuggaauacuucca

SEQ ID NO: 667060 - RNA, 22 nt, Human
ugcugucagacagcagugguaa

SEQ ID NO: 667061 - RNA, 23 nt, Human
uccaugagaugugggcuucuagu

SEQ ID NO: 667062 - RNA, 22 nt, Human
gacuuucuugcagaaauauucc

SEQ ID NO: 667063 - RNA, 22 nt, Human
ugcuuuauguggcugauacuca

SEQ ID NO: 667064 - RNA, 22 nt, Human
ugggccgggcacuguacugggc

SEQ ID NO: 667065 - RNA, 22 nt, Human
agguauaagucucauuucuguu

SEQ ID NO: 667066 - RNA, 20 nt, Human
acuggcagccugccugcugu

SEQ ID NO: 667067 - RNA, 22 nt, Human
accuggagucauuugaggagua

SEQ ID NO: 667068 - RNA, 22 nt, Human
uuauuuguaucaaggacgguug

SEQ ID NO: 667069 - RNA, 22 nt, Human
uaccugagccccugcuggugua

SEQ ID NO: 667070 - RNA, 22 nt, Human
uaggagggcccugaaaauggca

SEQ ID NO: 667071 - RNA, 22 nt, Human
ggcccagcuguauauuacaguu

SEQ ID NO: 667072 - RNA, 22 nt, Human
uagacaaacugauacuuggcga

SEQ ID NO: 667073 - RNA, 23 nt, Human
acagugugguggacaaggagcag

SEQ ID NO: 667074 - RNA, 22 nt, Human
uggccugauuuugcuaagagaa

SEQ ID NO: 667075 - RNA, 21 nt, Human
ccagagccugcugagcccccu

SEQ ID NO: 667076 - RNA, 22 nt, Human
cacucugcgcugggcgccagcg

SEQ ID NO: 667077 - RNA, 22 nt, Human
ucaggagguaggacauacuggu

SEQ ID NO: 667078 - RNA, 22 nt, Human
uaauccaauggcacaauguaug

SEQ ID NO: 667079 - RNA, 22 nt, Human
agagccuggaccugagcuacaa

SEQ ID NO: 667080 - RNA, 22 nt, Human
agcaccaggaaagaaggggcca

SEQ ID NO: 667081 - RNA, 22 nt, Human
auucagaaagcaagugcugggu

SEQ ID NO: 667082 - RNA, 22 nt, Human
aaugcauucucgguuugugugu

SEQ ID NO: 667083 - RNA, 22 nt, Human
gcccugaauuccucaggcugug

SEQ ID NO: 667084 - RNA, 22 nt, Human
ugucugccugcgggccggcaca

SEQ ID NO: 667085 - RNA, 22 nt, Human
gccuccagcuggggcauuucag

SEQ ID NO: 667086 - RNA, 22 nt, Human
uuccuggcugucaugcccuagu

SEQ ID NO: 667087 - RNA, 21 nt, Human
ggacagcugcgcgcagggcuc

SEQ ID NO: 667088 - RNA, 22 nt, Human
uuucacagauauaagauuucac

SEQ ID NO: 667089 - RNA, 22 nt, Human
uuaaaccacuuuguugcaagua

SEQ ID NO: 667090 - RNA, 22 nt, Human
cagcagcuucuguugaucagaa

SEQ ID NO: 667091 - RNA, 20 nt, Human
ugacacaaauugcuuucuca

SEQ ID NO: 667092 - RNA, 22 nt, Human
gauaauguggauuuauugugau

SEQ ID NO: 667093 - RNA, 22 nt, Human
auuacaguaggauuggaaagga

SEQ ID NO: 667094 - RNA, 22 nt, Human
cggggcaggagucccuguagag

SEQ ID NO: 667095 - RNA, 22 nt, Human
uuuuauucauagggauggagag

SEQ ID NO: 667096 - RNA, 22 nt, Human
aggggagaggugagcaacuucu

SEQ ID NO: 667097 - RNA, 22 nt, Human
uuuuauaagcaagaaagggaaa

SEQ ID NO: 667098 - RNA, 22 nt, Human
caucaaaauuagacauuguuga

SEQ ID NO: 667099 - RNA, 22 nt, Human
agcaggccugccaccucggggu

SEQ ID NO: 667100 - RNA, 22 nt, Human
uuccagaggcucuaggggagaa

SEQ ID NO: 667101 - RNA, 22 nt, Human
uucuuuauugagacuucauugu

SEQ ID NO: 667102 - RNA, 22 nt, Human
acccagcuguuucccgugucau

SEQ ID NO: 667103 - RNA, 22 nt, Human
ucaggcucugccaccuagauua

SEQ ID NO: 667104 - RNA, 22 nt, Human
cuggcuuucugcaaaucuccau

SEQ ID NO: 667105 - RNA, 22 nt, Human
uuugugaauagguuggcuucca

SEQ ID NO: 667106 - RNA, 22 nt, Human
gcccagucucuucuggcccugu

SEQ ID NO: 667107 - RNA, 21 nt, Human
acaucagaguugugaagguag

SEQ ID NO: 667108 - RNA, 22 nt, Human
aggcuacuucuagagggacaau

SEQ ID NO: 667109 - RNA, 22 nt, Human
ugaggcaguauucuccauucca

SEQ ID NO: 667110 - RNA, 22 nt, Human
cugugccuaagaugcaugucuc

SEQ ID NO: 667111 - RNA, 22 nt, Human
uccagacuggggccaugucugc

SEQ ID NO: 667112 - RNA, 22 nt, Human
uugggcugaaguagagggcaga

SEQ ID NO: 667113 - RNA, 22 nt, Human
gugcugccugccagcuucuggg

SEQ ID NO: 667114 - RNA, 22 nt, Human
cacacaugugggauccgcaggg

SEQ ID NO: 667115 - RNA, 22 nt, Human
ggcuggguuugacuccuggcuu

SEQ ID NO: 667116 - RNA, 22 nt, Human
caauaacugcugaggagaagca

SEQ ID NO: 667117 - RNA, 22 nt, Human
uguuaucacuuagacaugcuag

SEQ ID NO: 667118 - RNA, 22 nt, Human
ugaaaugagauagauaaucagg

SEQ ID NO: 667119 - RNA, 19 nt, Human
acugucacauaaaggaagg

SEQ ID NO: 667120 - RNA, 22 nt, Human
caaggcugcugcgggucgcacc

SEQ ID NO: 667121 - RNA, 22 nt, Human
ucuagcauuucuuuccugagga

SEQ ID NO: 667122 - RNA, 22 nt, Human
gugugucugaaguugaguagac

SEQ ID NO: 667123 - RNA, 22 nt, Human
gcuuacaaggguaggaagucua

SEQ ID NO: 667124 - RNA, 22 nt, Human
agugcuuaauagauguccagca

SEQ ID NO: 667125 - RNA, 22 nt, Human
cagagguguuggugaauggaga

SEQ ID NO: 667126 - RNA, 22 nt, Human
cucuuauugaugaaggugcuaa

SEQ ID NO: 667127 - RNA, 22 nt, Human
ggccagcucugcacagcagcug

SEQ ID NO: 667128 - RNA, 22 nt, Human
uccugguggcucuuugggaagg

SEQ ID NO: 667129 - RNA, 22 nt, Human
uuccuguguguugguggcagaa

SEQ ID NO: 667130 - RNA, 20 nt, Human
uucauucauuccacaacuuc

SEQ ID NO: 667131 - RNA, 22 nt, Human
gcugagcugggacaguccuggg

SEQ ID NO: 667132 - RNA, 22 nt, Human
aguggcuuuuuaguggcagaug

SEQ ID NO: 667133 - RNA, 22 nt, Human
auugcucugcaauccuccccaa

SEQ ID NO: 667134 - RNA, 22 nt, Human
acccagagcagagcuuggcuuc

SEQ ID NO: 667135 - RNA, 22 nt, Human
cagugccugggacccggcugug

SEQ ID NO: 667136 - RNA, 22 nt, Human
gcugagagcaaagcaugucuag

SEQ ID NO: 667137 - RNA, 22 nt, Human
gcccagagugaguccugggccc

SEQ ID NO: 667138 - RNA, 22 nt, Human
ggccaggagaggagggcacuga

SEQ ID NO: 667139 - RNA, 22 nt, Human
uguaugugcuugagaagguggg

SEQ ID NO: 667140 - RNA, 19 nt, Human
acagucagggaauaaagac

SEQ ID NO: 667141 - RNA, 22 nt, Human
acugggcaauaaauucagagaa

SEQ ID NO: 667142 - RNA, 22 nt, Human
gccaugcaauggaauaaaauca

SEQ ID NO: 667143 - RNA, 22 nt, Human
gugcugggcccugagaccaggg

SEQ ID NO: 667144 - RNA, 22 nt, Human
agguggcagcagccuggugaaa

SEQ ID NO: 667145 - RNA, 19 nt, Human
guggcagcagauuuggugu

SEQ ID NO: 667146 - RNA, 22 nt, Human
guggaauguccuugaucauaag

SEQ ID NO: 667147 - RNA, 22 nt, Human
uauuuguuucuaguggcagcaa

SEQ ID NO: 667148 - RNA, 22 nt, Human
uaagguuuugagaccagaacgu

SEQ ID NO: 667149 - RNA, 22 nt, Human
uauacacauuacaguuucagga

SEQ ID NO: 667150 - RNA, 22 nt, Human
agucccagacuccaguuuucug

SEQ ID NO: 667151 - RNA, 22 nt, Human
ucuauuuuguuuccagcucuac

SEQ ID NO: 667152 - RNA, 22 nt, Human
agcaggaguuugaugcuuuuau

SEQ ID NO: 667153 - RNA, 22 nt, Human
auuaaacaauguaaaguucuug

SEQ ID NO: 667154 - RNA, 22 nt, Human
gaguccagugauguuccugguc

SEQ ID NO: 667155 - RNA, 22 nt, Human
uuucuacacuucgugguguuuu

SEQ ID NO: 667156 - RNA, 22 nt, Human
cccugguggggccagacuugcu

SEQ ID NO: 667157 - RNA, 22 nt, Human
caucuuuagggaccauuauucu

SEQ ID NO: 667158 - RNA, 22 nt, Human
caacacauugaagcuaugauga

SEQ ID NO: 667159 - RNA, 22 nt, Human
cuacuuuaccuccaucagacug

SEQ ID NO: 667160 - RNA, 22 nt, Human
ucagucucaucaacucuauucc

SEQ ID NO: 667161 - RNA, 22 nt, Human
gcugcagagggucuuagagagg

SEQ ID NO: 667162 - RNA, 20 nt, Human
cagcagaaauggggugggaa

SEQ ID NO: 667163 - RNA, 22 nt, Human
caaccucuuugggccuugguuu

SEQ ID NO: 667164 - RNA, 22 nt, Human
cugggcaguaugaauauucaaa

SEQ ID NO: 667165 - RNA, 22 nt, Human
guggccugccgugugguauggg

SEQ ID NO: 667166 - RNA, 19 nt, Human
uccugaaaacuucuggaau

SEQ ID NO: 667167 - RNA, 22 nt, Human
uauuccaaugucaguuauauca

SEQ ID NO: 667168 - RNA, 17 nt, Human
ucuguccagggagugug

SEQ ID NO: 667169 - RNA, 22 nt, Human
aggguccugagccuggggcgca

SEQ ID NO: 667170 - RNA, 22 nt, Human
ugccaggcgugguggugcgcac

SEQ ID NO: 667171 - RNA, 22 nt, Human
ggauguagugcaaggagugaau

SEQ ID NO: 667172 - RNA, 17 nt, Human
uguuccauuugaccacc

SEQ ID NO: 667173 - RNA, 22 nt, Human
ggcuccagcccuggcucuucac

SEQ ID NO: 667174 - RNA, 22 nt, Human
uucugcaguguuaacaauguca

SEQ ID NO: 667175 - RNA, 22 nt, Human
agcugagagcugugucaagaua

SEQ ID NO: 667176 - RNA, 22 nt, Human
aacugauuguuggaugauagug

SEQ ID NO: 667177 - RNA, 22 nt, Human
gugcaggaguaggagagggcuu

SEQ ID NO: 667178 - RNA, 22 nt, Human
ugacacaugcaccagucuuuaa

SEQ ID NO: 667179 - RNA, 22 nt, Human
uuccuuccgggcaccaggcacu

SEQ ID NO: 667180 - RNA, 22 nt, Human
caguucugacuuucauaauguc

SEQ ID NO: 667181 - RNA, 21 nt, Human
cucccagggugacuguucaac

SEQ ID NO: 667182 - RNA, 22 nt, Human
agaauuagguaaguucaucuga

SEQ ID NO: 667183 - RNA, 22 nt, Human
uucuucaaaauccagcaugauu

SEQ ID NO: 667184 - RNA, 22 nt, Human
cagcagugaugugugaggguuc

SEQ ID NO: 667185 - RNA, 22 nt, Human
ugucagagagcaggcaguagaa

SEQ ID NO: 667186 - RNA, 22 nt, Human
guccugggaaggaagccaggga

SEQ ID NO: 667187 - RNA, 22 nt, Human
accagagcucuucagcacagga

SEQ ID NO: 667188 - RNA, 22 nt, Human
uuccucagagagacagaaacua

SEQ ID NO: 667189 - RNA, 22 nt, Human
gacagcaacacucaauucugca

SEQ ID NO: 667190 - RNA, 22 nt, Human
uaugaaaugguaguaggaaggg

SEQ ID NO: 667191 - RNA, 22 nt, Human
uggcucugugucucccagcagc

SEQ ID NO: 667192 - RNA, 22 nt, Human
uuucuuccuaaauaugauuucc

SEQ ID NO: 667193 - RNA, 22 nt, Human
gcccagaguggccacuuggcuc

SEQ ID NO: 667194 - RNA, 22 nt, Human
augugcuuucuuuguuucauaa

SEQ ID NO: 667195 - RNA, 22 nt, Human
caauuuuuguacuuauaguacu

SEQ ID NO: 667196 - RNA, 22 nt, Human
acagcuuuuaugggaccagcca

SEQ ID NO: 667197 - RNA, 22 nt, Human
uguacacguggccaucuuuaca

SEQ ID NO: 667198 - RNA, 22 nt, Human
agaggccugugugcuccagugg

SEQ ID NO: 667199 - RNA, 22 nt, Human
uauacagaaagaauucaagucu

SEQ ID NO: 667200 - RNA, 22 nt, Human
gacaggcaugcuuucaggacua

SEQ ID NO: 667201 - RNA, 18 nt, Human
gaugucucgaggagacua

SEQ ID NO: 667202 - RNA, 21 nt, Human
uucugagcacucaucacuguc

SEQ ID NO: 667203 - RNA, 22 nt, Human
cuccugugguacucccagggcc

SEQ ID NO: 667204 - RNA, 22 nt, Human
uagcccaugaugguggaaggca

SEQ ID NO: 667205 - RNA, 22 nt, Human
gcacuugaagaauugaacugga

SEQ ID NO: 667206 - RNA, 22 nt, Human
ucugagccagacaagacagcca

SEQ ID NO: 667207 - RNA, 22 nt, Human
ugaggcuccuuguagagagugg

SEQ ID NO: 667208 - RNA, 22 nt, Human
guacaguaaauguaaauggauu

SEQ ID NO: 667209 - RNA, 22 nt, Human
auccacccugugguggcuuucu

SEQ ID NO: 667210 - RNA, 22 nt, Human
gcugcccaggaagccugggguu

SEQ ID NO: 667211 - RNA, 19 nt, Human
agucugucugcuuucccuc

SEQ ID NO: 667212 - RNA, 22 nt, Human
auccaaacuaugacuaguguuc

SEQ ID NO: 667213 - RNA, 22 nt, Human
agggaaauaaucuauucugagg

SEQ ID NO: 667214 - RNA, 22 nt, Human
guguguauuuaaaggauaguug

SEQ ID NO: 667215 - RNA, 22 nt, Human
gggcuggcaucgguugcugaga

SEQ ID NO: 667216 - RNA, 22 nt, Human
uucugggguuaugggugauucu

SEQ ID NO: 667217 - RNA, 22 nt, Human
gauggaagaaaaaugcaugucu

SEQ ID NO: 667218 - RNA, 22 nt, Human
acaaagaucuugcuuuccuacu

SEQ ID NO: 667219 - RNA, 22 nt, Human
gcaagcaauggacggugacuuu

SEQ ID NO: 667220 - RNA, 23 nt, Human
gguccacccgagccugcagcuuc

SEQ ID NO: 667221 - RNA, 22 nt, Human
gcacaguggguggucauguaca

SEQ ID NO: 667222 - RNA, 22 nt, Human
ccagaauagaaggcagcuguca

SEQ ID NO: 667223 - RNA, 22 nt, Human
agccuucaguaaauccacugug

SEQ ID NO: 667224 - RNA, 22 nt, Human
cuggguaccucaccgcugcugc

SEQ ID NO: 667225 - RNA, 22 nt, Human
uuauugcaacuccuaaauagag

SEQ ID NO: 667226 - RNA, 22 nt, Human
agcagcaagcagugcacggguu

SEQ ID NO: 667227 - RNA, 22 nt, Human
aauaaagacucagaggcccagg

SEQ ID NO: 667228 - RNA, 22 nt, Human
aggcaggggagcuggaagggua

SEQ ID NO: 667229 - RNA, 22 nt, Human
gaacaucaugaagaaaacauau

SEQ ID NO: 667230 - RNA, 22 nt, Human
acccagggaccccgcugacgcc

SEQ ID NO: 667231 - RNA, 22 nt, Human
uaugcuuuacuuuucauuguga

SEQ ID NO: 667232 - RNA, 22 nt, Human
ugcucagugagucugugacagg

SEQ ID NO: 667233 - RNA, 22 nt, Human
agggccccaguaagauuacaug

SEQ ID NO: 667234 - RNA, 22 nt, Human
gagcacccuuugcacaucaguc

SEQ ID NO: 667235 - RNA, 22 nt, Human
aaggaagaugaaaguacugcua

SEQ ID NO: 667236 - RNA, 22 nt, Human
uauuaugguuguagguuaacaa

SEQ ID NO: 667237 - RNA, 22 nt, Human
uuucacaauuuuaaggagcaaa

SEQ ID NO: 667238 - RNA, 22 nt, Human
uaaggaaaauggacaucaaaca

SEQ ID NO: 667239 - RNA, 22 nt, Human
agucccaacagcuuacaaggaa

SEQ ID NO: 667240 - RNA, 22 nt, Human
uuuuguuguaauauaccuaucc

SEQ ID NO: 667241 - RNA, 22 nt, Human
aucuaacuuauguuuuaccaaa

SEQ ID NO: 667242 - RNA, 22 nt, Human
aucagcaagauugugucuugua

SEQ ID NO: 667243 - RNA, 22 nt, Human
aguucugaaugaggaaucuggg

SEQ ID NO: 667244 - RNA, 22 nt, Human
uauagacuagcagcagaauuua

SEQ ID NO: 667245 - RNA, 22 nt, Human
cucugggcaaagaugccucauc

SEQ ID NO: 667246 - RNA, 22 nt, Human
uucucugccucuagcuauauuc

SEQ ID NO: 667247 - RNA, 22 nt, Human
uacuuuaaagagguguaaugag

SEQ ID NO: 667248 - RNA, 22 nt, Human
ugcugagaggaaagaaugcaca

SEQ ID NO: 667249 - RNA, 22 nt, Human
cccagugcuaugccuauuacau

SEQ ID NO: 667250 - RNA, 22 nt, Human
cacagagcaggugcugggaaga

SEQ ID NO: 667251 - RNA, 19 nt, Human
uauucaggaugauggcaca

SEQ ID NO: 667252 - RNA, 22 nt, Human
ugacaauggggcacauggaaag

SEQ ID NO: 667253 - RNA, 22 nt, Human
gaguuuuaaccucagcucucug

SEQ ID NO: 667254 - RNA, 22 nt, Human
gcccagcaaggaccaagggccg

SEQ ID NO: 667255 - RNA, 22 nt, Human
aucuguuccccuaugcucucua

SEQ ID NO: 667256 - RNA, 22 nt, Human
agaagccauucccuguaggcuc

SEQ ID NO: 667257 - RNA, 22 nt, Human
ggaaaaggccacagggacacau

SEQ ID NO: 667258 - RNA, 17 nt, Human
cugccuggagucccauc

SEQ ID NO: 667259 - RNA, 22 nt, Human
uucccugaagaccucaugugac

SEQ ID NO: 667260 - RNA, 22 nt, Human
auguguaaaguuagaugucuga

SEQ ID NO: 667261 - RNA, 22 nt, Human
cucccacauggaauagcaggga

SEQ ID NO: 667262 - RNA, 20 nt, Human
caauaauuuacuucccuauu

SEQ ID NO: 667263 - RNA, 17 nt, Human
acagaggcaggagugga

SEQ ID NO: 667264 - RNA, 22 nt, Human
gugcuuucugcugcauuccucu

SEQ ID NO: 667265 - RNA, 22 nt, Human
uaauuucacugauaugaaguca

SEQ ID NO: 667266 - RNA, 22 nt, Human
uucagaaaucccucuucuaccc

SEQ ID NO: 667267 - RNA, 22 nt, Human
aaucauguuucagaugaguuuu

SEQ ID NO: 667268 - RNA, 22 nt, Human
uucacagaagaggucacauuuc

SEQ ID NO: 667269 - RNA, 22 nt, Human
augaggcaaucaugguccaguu

SEQ ID NO: 667270 - RNA, 22 nt, Human
cagcugagaccagaaugcaggu

SEQ ID NO: 667271 - RNA, 22 nt, Human
aagcauggcugagugcaauggu

SEQ ID NO: 667272 - RNA, 22 nt, Human
caggaagaaagaggugaggugu

SEQ ID NO: 667273 - RNA, 17 nt, Human
gguuuaauccuuaccug

SEQ ID NO: 667274 - RNA, 22 nt, Human
cagagaugggucgcagagaugg

SEQ ID NO: 667275 - RNA, 22 nt, Human
aacuuuucauaagggcaaauuu

SEQ ID NO: 667276 - RNA, 22 nt, Human
cagccaggacagggaaacuagu

SEQ ID NO: 667277 - RNA, 22 nt, Human
cagcugugggccugacguggca

SEQ ID NO: 667278 - RNA, 22 nt, Human
gccaucacauccaggcuaccuc

SEQ ID NO: 667279 - RNA, 22 nt, Human
ugugcaaucauauuuuaaaaug

SEQ ID NO: 667280 - RNA, 22 nt, Human
ccuuugugaauaugcagaaaau

SEQ ID NO: 667281 - RNA, 22 nt, Human
gagucaggcuagggugacaggc

SEQ ID NO: 667282 - RNA, 22 nt, Human
agguucagaguuguugauguuu

SEQ ID NO: 667283 - RNA, 22 nt, Human
cauggcagggcugugggcaggu

SEQ ID NO: 667284 - RNA, 22 nt, Human
cagggcuguggcuuugugcugu

SEQ ID NO: 667285 - RNA, 22 nt, Human
uaagcucacuguaagaacugau

SEQ ID NO: 667286 - RNA, 22 nt, Human
ggaugacaaggaaagcaaacca

SEQ ID NO: 667287 - RNA, 22 nt, Human
uucuauaagacucauauuucuu

SEQ ID NO: 667288 - RNA, 22 nt, Human
aaaucuggccccuugccuauuu

SEQ ID NO: 667289 - RNA, 21 nt, Human
ugucuucauaugagauggugu

SEQ ID NO: 667290 - RNA, 22 nt, Human
gcuggguuuccagcaggcagga

SEQ ID NO: 667291 - RNA, 22 nt, Human
ucagcuucccuaucugaccaua

SEQ ID NO: 667292 - RNA, 22 nt, Human
uccaggucaucuuggagagcug

SEQ ID NO: 667293 - RNA, 22 nt, Human
ucaaaggcuugugguucuggga

SEQ ID NO: 667294 - RNA, 22 nt, Human
ggguucagagucaggugugaua

SEQ ID NO: 667295 - RNA, 22 nt, Human
cacugcccagcgucuuaggcac

SEQ ID NO: 667296 - RNA, 22 nt, Human
gaaagacauaguugcaagaugg

SEQ ID NO: 667297 - RNA, 22 nt, Human
gcaguguguggugagggcugcc

SEQ ID NO: 667298 - RNA, 22 nt, Human
agccugagccccauccagcuga

SEQ ID NO: 667299 - RNA, 22 nt, Human
aggggcugcuggguccgccccu

SEQ ID NO: 667300 - RNA, 21 nt, Human
guucaaauggguagauucaca

SEQ ID NO: 667301 - RNA, 22 nt, Human
gagaggcaggaauccuggguga

SEQ ID NO: 667302 - RNA, 22 nt, Human
caaauggcuggcauccuucuac

SEQ ID NO: 667303 - RNA, 22 nt, Human
aagggcucccugccugaggugg

SEQ ID NO: 667304 - RNA, 22 nt, Human
gcccugguuuuagaggagcagg

SEQ ID NO: 667305 - RNA, 22 nt, Human
ugccugucuuaauaucuggaaa

SEQ ID NO: 667306 - RNA, 22 nt, Human
augaggcaucugcagucacuag

SEQ ID NO: 667307 - RNA, 22 nt, Human
auuaguugggguggagaaggau

SEQ ID NO: 667308 - RNA, 22 nt, Human
aguucuuuucuagauucuggau

SEQ ID NO: 667309 - RNA, 22 nt, Human
uaccauuuugaaacauuucauc

SEQ ID NO: 667310 - RNA, 22 nt, Human
gauacauuuuaucuccuaacag

SEQ ID NO: 667311 - RNA, 22 nt, Human
guuuauuagaguuuucugucug

SEQ ID NO: 667312 - RNA, 22 nt, Human
cuggcagcccaaccuagagucu

SEQ ID NO: 667313 - RNA, 22 nt, Human
ucugccuuggcaaccacagcuu

SEQ ID NO: 667314 - RNA, 22 nt, Human
uggguaaauauccuuugugaaa

SEQ ID NO: 667315 - RNA, 22 nt, Human
uccuccucacgcuguugcuugu

SEQ ID NO: 667316 - RNA, 22 nt, Human
ugcagcccaggcgucagguggu

SEQ ID NO: 667317 - RNA, 22 nt, Human
uugaaagauagugaagccagcc

SEQ ID NO: 667318 - RNA, 22 nt, Human
cuugcagcauccgguccucucu

SEQ ID NO: 667319 - RNA, 22 nt, Human
cuugccugcuggagcagggcuc

SEQ ID NO: 667320 - RNA, 22 nt, Human
ggagccugcgggagcucccauu

SEQ ID NO: 667321 - RNA, 22 nt, Human
ugggggaguauagucuggccuc

SEQ ID NO: 667322 - RNA, 22 nt, Human
aagagguuuaacugacucacag

SEQ ID NO: 667323 - RNA, 22 nt, Human
acaggugggcuuaagagucggc

SEQ ID NO: 667324 - RNA, 22 nt, Human
gugggacagucagaagugagca

SEQ ID NO: 667325 - RNA, 22 nt, Human
aggagcugaagucucugcacuc

SEQ ID NO: 667326 - RNA, 22 nt, Human
ucucuguggugggaggcugagu

SEQ ID NO: 667327 - RNA, 22 nt, Human
ugagauaauuaaaucaaaaccu

SEQ ID NO: 667328 - RNA, 22 nt, Human
auuauucuugagguguuuauug

SEQ ID NO: 667329 - RNA, 22 nt, Human
cccucaugccagacagcaugca

SEQ ID NO: 667330 - RNA, 22 nt, Human
acaaguggguccuacauaaagc

SEQ ID NO: 667331 - RNA, 22 nt, Human
ugcaggugcuacaagaacucac

SEQ ID NO: 667332 - RNA, 22 nt, Human
ccacuguggaaagcaguucaga

SEQ ID NO: 667333 - RNA, 22 nt, Human
ugcugccugugccaggaggguc

SEQ ID NO: 667334 - RNA, 22 nt, Human
aaugucuuuugauacaaguuac

SEQ ID NO: 667335 - RNA, 22 nt, Human
auagaauaugacuuuuagaucc

SEQ ID NO: 667336 - RNA, 22 nt, Human
aggaaacauccuuaucuauucu

SEQ ID NO: 667337 - RNA, 22 nt, Human
aaaggcacaaauucagcauuuu

SEQ ID NO: 667338 - RNA, 22 nt, Human
cagguggcagugccugcauucu

SEQ ID NO: 667339 - RNA, 22 nt, Human
aucauugaauauaagugcuauu

SEQ ID NO: 667340 - RNA, 22 nt, Human
ucaugaacuuccuagccagacu

SEQ ID NO: 667341 - RNA, 22 nt, Human
ccuccaggaggaaauggaacac

SEQ ID NO: 667342 - RNA, 22 nt, Human
cccugcagacgucuugaugccu

SEQ ID NO: 667343 - RNA, 22 nt, Human
agcaggcugccuuccaaagccu

SEQ ID NO: 667344 - RNA, 22 nt, Human
acagucuuaugcauacacuauu

SEQ ID NO: 667345 - RNA, 22 nt, Human
agagcagccugugaugaugcac

SEQ ID NO: 667346 - RNA, 20 nt, Human
agaggcuuccuugggaggag

SEQ ID NO: 667347 - RNA, 22 nt, Human
guccagccugaagagugggggc

SEQ ID NO: 667348 - RNA, 22 nt, Human
cuucaucuuucugagccucagu

SEQ ID NO: 667349 - RNA, 22 nt, Human
uauggguaagaucuuuuguauu

SEQ ID NO: 667350 - RNA, 22 nt, Human
gccaccagguuagauccagccu

SEQ ID NO: 667351 - RNA, 22 nt, Human
cuguuucaugucuuccgcagcu

SEQ ID NO: 667352 - RNA, 22 nt, Human
aggagcugggagaaggacuaaa

SEQ ID NO: 667353 - RNA, 22 nt, Human
uggcugcaguucacaggagcaa

SEQ ID NO: 667354 - RNA, 22 nt, Human
aacaguuuaugauaaauucuua

SEQ ID NO: 667355 - RNA, 22 nt, Human
uggcccugagggcucggagcca

SEQ ID NO: 667356 - RNA, 21 nt, Human
ugaaacaaucagacagagucu

SEQ ID NO: 667357 - RNA, 22 nt, Human
uggcaccagcaccuagaugggg

SEQ ID NO: 667358 - RNA, 22 nt, Human
auccuucaaaaggaauagcagg

SEQ ID NO: 667359 - RNA, 22 nt, Human
gcagccaggaaagcuggacccu

SEQ ID NO: 667360 - RNA, 17 nt, Human
ccugcccagagacagau

SEQ ID NO: 667361 - RNA, 22 nt, Human
agucauuuugccagucuucagg

SEQ ID NO: 667362 - RNA, 20 nt, Human
ucccaagggcugagaggauc

SEQ ID NO: 667363 - RNA, 22 nt, Human
gauaaauugcacuuuuucuuac

SEQ ID NO: 667364 - RNA, 22 nt, Human
ugcagggacacgaagacaaaua

SEQ ID NO: 667365 - RNA, 22 nt, Human
caggaaauugcaacagucugag

SEQ ID NO: 667366 - RNA, 22 nt, Human
uucugggacauugcagguauuc

SEQ ID NO: 667367 - RNA, 22 nt, Human
uuuagucagguaagaugcaggg

SEQ ID NO: 667368 - RNA, 22 nt, Human
uggaguuaaaaacaggaugcac

SEQ ID NO: 667369 - RNA, 22 nt, Human
aucugcugcccagccacuugcu

SEQ ID NO: 667370 - RNA, 22 nt, Human
cacugaaaggaaaccagagcau

SEQ ID NO: 667371 - RNA, 19 nt, Human
ucaguggaugaacauguuu

SEQ ID NO: 667372 - RNA, 22 nt, Human
gacaaugcagaaguacuuguuc

SEQ ID NO: 667373 - RNA, 22 nt, Human
aggccagggcacugcucuuuag

SEQ ID NO: 667374 - RNA, 22 nt, Human
ccagcugauucgguggugguug

SEQ ID NO: 667375 - RNA, 22 nt, Human
gacuucaaaggucaaacaucgc

SEQ ID NO: 667376 - RNA, 22 nt, Human
gagaggcccuguggucccagcu

SEQ ID NO: 667377 - RNA, 22 nt, Human
ucccuccuggccgucaccgcug

SEQ ID NO: 667378 - RNA, 22 nt, Human
augaggcagagggcugugccag

SEQ ID NO: 667379 - RNA, 22 nt, Human
caguguuugcuuaaguuauaug

SEQ ID NO: 667380 - RNA, 22 nt, Human
acacugguuguuaauaguaaca

SEQ ID NO: 667381 - RNA, 22 nt, Human
ggcaaggggucaggcugagaca

SEQ ID NO: 667382 - RNA, 22 nt, Human
aagauuuccuggauguaauucc

SEQ ID NO: 667383 - RNA, 22 nt, Human
uucaacauuuaucaguuuauca

SEQ ID NO: 667384 - RNA, 20 nt, Human
uuccagccgccacuuccgcc

SEQ ID NO: 667385 - RNA, 22 nt, Human
ugcaggaagacuucccaagcca

SEQ ID NO: 667386 - RNA, 22 nt, Human
ccagaggggcacaaaaguagaa

SEQ ID NO: 667387 - RNA, 22 nt, Human
accagggcccgggagagcucuc

SEQ ID NO: 667388 - RNA, 22 nt, Human
gggcaggggucaguggccccaa

SEQ ID NO: 667389 - RNA, 22 nt, Human
aaagguaacugggguuuugcca

SEQ ID NO: 667390 - RNA, 22 nt, Human
agggggagcuuggcuacuccug

SEQ ID NO: 667391 - RNA, 22 nt, Human
ggaaagccaggugcucuggugu

SEQ ID NO: 667392 - RNA, 22 nt, Human
acagaugcucugaugucugggu

SEQ ID NO: 667393 - RNA, 22 nt, Human
cuccugagaaauaagcaaguaa

SEQ ID NO: 667394 - RNA, 22 nt, Human
guaaaggcccauucaaacagcu

SEQ ID NO: 667395 - RNA, 21 nt, Human
agauaguugggcaugcagcug

SEQ ID NO: 667396 - RNA, 22 nt, Human
guggcucaucuuugggaaguaa

SEQ ID NO: 667397 - RNA, 22 nt, Human
ugaaacuucuaauaugaauagu

SEQ ID NO: 667398 - RNA, 22 nt, Human
ggucuggaagcgucccaaaggu

SEQ ID NO: 667399 - RNA, 22 nt, Human
ucccuggccauuccucuaggcc

SEQ ID NO: 667400 - RNA, 22 nt, Human
gggccucagguucuggagaagg

SEQ ID NO: 667401 - RNA, 22 nt, Human
gacagcaagagacagagcaucc

SEQ ID NO: 667402 - RNA, 22 nt, Human
gcaggugguccccguggagugg

SEQ ID NO: 667403 - RNA, 22 nt, Human
uggcuucucccgacacccuggc

SEQ ID NO: 667404 - RNA, 22 nt, Human
ucgagcucuggagccaaggaug

SEQ ID NO: 667405 - RNA, 22 nt, Human
aggggaagagcccuuuacaugg

SEQ ID NO: 667406 - RNA, 22 nt, Human
uauuaguagcuugaaauuggug

SEQ ID NO: 667407 - RNA, 22 nt, Human
aaacaguguguuucagagaggc

SEQ ID NO: 667408 - RNA, 22 nt, Human
gaaccucagugaaacuggaggu

SEQ ID NO: 667409 - RNA, 22 nt, Human
caaaguuuggcucucaugacau

SEQ ID NO: 667410 - RNA, 22 nt, Human
uacaguuucuguccuuguggag

SEQ ID NO: 667411 - RNA, 22 nt, Human
aauguuaaaaccuucagugcuu

SEQ ID NO: 667412 - RNA, 22 nt, Human
gcuuuugagguccugcucagcc

SEQ ID NO: 667413 - RNA, 22 nt, Human
ucacaagaguaaguucaugccu

SEQ ID NO: 667414 - RNA, 22 nt, Human
uagagguguucauucucuccau

SEQ ID NO: 667415 - RNA, 22 nt, Human
uagcaacauaagaaacauuuug

SEQ ID NO: 667416 - RNA, 22 nt, Human
uucuuacaucaguuuauuuugu

SEQ ID NO: 667417 - RNA, 22 nt, Human
ccaggaggcggaagguacagug

SEQ ID NO: 667418 - RNA, 22 nt, Human
uucugagaaauggguucacaua

SEQ ID NO: 667419 - RNA, 22 nt, Human
gcagaaguggauucuacaauuu

SEQ ID NO: 667420 - RNA, 22 nt, Human
aggcacugggggaugagcaagg

SEQ ID NO: 667421 - RNA, 22 nt, Human
ggccucugccucaucugggcac

SEQ ID NO: 667422 - RNA, 22 nt, Human
gcugccaccguggagaugagug

SEQ ID NO: 667423 - RNA, 22 nt, Human
uggcaccaccagacaccaggag

SEQ ID NO: 667424 - RNA, 22 nt, Human
cacaugagugagaacaugcagu

SEQ ID NO: 667425 - RNA, 22 nt, Human
cuggccaggcuugggacagaca

SEQ ID NO: 667426 - RNA, 22 nt, Human
agcagauaugauacuuaauuua

SEQ ID NO: 667427 - RNA, 22 nt, Human
ucuccuacucacucaaggcuug

SEQ ID NO: 667428 - RNA, 22 nt, Human
uuagucuucuuccuuauauguu

SEQ ID NO: 667429 - RNA, 22 nt, Human
ugucauuucacaauaucacuca

SEQ ID NO: 667430 - RNA, 22 nt, Human
acagcaucauauaguggaagaa

SEQ ID NO: 667431 - RNA, 22 nt, Human
gugcagggagcccagaaggucc

SEQ ID NO: 667432 - RNA, 22 nt, Human
ugcuggaaccaggaauuugaag

SEQ ID NO: 667433 - RNA, 22 nt, Human
agcacaauauaaagugaacgca

SEQ ID NO: 667434 - RNA, 22 nt, Human
aauguucauuguuuuccauaug

SEQ ID NO: 667435 - RNA, 22 nt, Human
aaguacaugcuuuauucagagu

SEQ ID NO: 667436 - RNA, 22 nt, Human
ggcccagcgaggccaccuacag

SEQ ID NO: 667437 - RNA, 22 nt, Human
caucucacuucccugcagcauc

SEQ ID NO: 667438 - RNA, 22 nt, Human
agcugaagggaggauauguaca

SEQ ID NO: 667439 - RNA, 22 nt, Human
gucccugcaucugcaggccaug

SEQ ID NO: 667440 - RNA, 23 nt, Human
ccugagaucuguaagggaccuug

SEQ ID NO: 667441 - RNA, 22 nt, Human
acccugggcuuggccugcucag

SEQ ID NO: 667442 - RNA, 22 nt, Human
auuauucagucuuguaaggagu

SEQ ID NO: 667443 - RNA, 22 nt, Human
acacacaugcaugcuugccauu

SEQ ID NO: 667444 - RNA, 22 nt, Human
caggcgggcaggugcggccccu

SEQ ID NO: 667445 - RNA, 22 nt, Human
agugucacaaaccugccuugua

SEQ ID NO: 667446 - RNA, 22 nt, Human
uaugcacaauaugaucuauuug

SEQ ID NO: 667447 - RNA, 22 nt, Human
uugaaacucaucuuagugaugu

SEQ ID NO: 667448 - RNA, 22 nt, Human
agugauguugauuuuaccacuu

SEQ ID NO: 667449 - RNA, 22 nt, Human
uuucauguuacaguguaaaagu

SEQ ID NO: 667450 - RNA, 22 nt, Human
ugguaaaguggcuucacagugu

SEQ ID NO: 667451 - RNA, 22 nt, Human
ccugucccccaggccuguacca

SEQ ID NO: 667452 - RNA, 22 nt, Human
aagucguggcaggcuugcacga

SEQ ID NO: 667453 - RNA, 22 nt, Human
ucuggccuguguugguggcccc

SEQ ID NO: 667454 - RNA, 22 nt, Human
ucagugccuacuuugaucaauu

SEQ ID NO: 667455 - RNA, 16 nt, Human
agaggccacagacaga

SEQ ID NO: 667456 - RNA, 22 nt, Human
uauacaagaggugagaugagca

SEQ ID NO: 667457 - RNA, 19 nt, Human
uguacauauagagcucagu

SEQ ID NO: 667458 - RNA, 22 nt, Human
uucuguggcugggagccuggcu

SEQ ID NO: 667459 - RNA, 22 nt, Human
uaaacauggauucugaucacag

SEQ ID NO: 667460 - RNA, 22 nt, Human
acaaaugucuacauugagaaua

SEQ ID NO: 667461 - RNA, 22 nt, Human
ugugagacaauugcaucagggc

SEQ ID NO: 667462 - RNA, 15 nt, Human
ggaggccaggcugug

SEQ ID NO: 667463 - RNA, 22 nt, Human
ugaacuguacaucccuaaccua

SEQ ID NO: 667464 - RNA, 22 nt, Human
uucuauguaccuagcguuguau

SEQ ID NO: 667465 - RNA, 22 nt, Human
ccagguguggggaggacucaca

SEQ ID NO: 667466 - RNA, 22 nt, Human
caaauucagaaaauugguagag

SEQ ID NO: 667467 - RNA, 22 nt, Human
caucucuugccaaaguuugacc

SEQ ID NO: 667468 - RNA, 22 nt, Human
ugucacaaguaacuggcaaugc

SEQ ID NO: 667469 - RNA, 22 nt, Human
caucccugauuccuaguacagu

SEQ ID NO: 667470 - RNA, 22 nt, Human
cucagggauggugaagcaccca

SEQ ID NO: 667471 - RNA, 22 nt, Human
acugucaaaugcaaugaacuca

SEQ ID NO: 667472 - RNA, 22 nt, Human
uagcacaucuggcgcuuauagg

SEQ ID NO: 667473 - RNA, 22 nt, Human
ugcucauuaggacugcaaauuc

SEQ ID NO: 667474 - RNA, 22 nt, Human
aaaaguaauugcaguuuuugcc

SEQ ID NO: 667475 - RNA, 22 nt, Human
aggcaggccccugagaauagac

SEQ ID NO: 667476 - RNA, 22 nt, Human
ggcuuugggauucagcaugaga

SEQ ID NO: 667477 - RNA, 22 nt, Human
aggcugucucagccugcuugca

SEQ ID NO: 667478 - RNA, 22 nt, Human
ucaugacaacuauauuauucca

SEQ ID NO: 667479 - RNA, 22 nt, Human
cacagaggagugcacacucucu

SEQ ID NO: 667480 - RNA, 22 nt, Human
uucuucagucccacuagccaca

SEQ ID NO: 667481 - RNA, 22 nt, Human
ccaggcugcuuuauuacucugu

SEQ ID NO: 667482 - RNA, 21 nt, Human
uaugagaaaacugaggugcau

SEQ ID NO: 667483 - RNA, 22 nt, Human
ccagcugggauuaagggaaaau

SEQ ID NO: 667484 - RNA, 22 nt, Human
ugaaguaggcagcaugcugaga

SEQ ID NO: 667485 - RNA, 22 nt, Human
cugagggcuuccuugucccggg

SEQ ID NO: 667486 - RNA, 22 nt, Human
aaugcacuuaguaugaaugccu

SEQ ID NO: 667487 - RNA, 22 nt, Human
gcccagggucuacaaaaauauu

SEQ ID NO: 667488 - RNA, 22 nt, Human
cuuacacuucaucucauccagg

SEQ ID NO: 667489 - RNA, 22 nt, Human
uugcccugucaguagaagugca

SEQ ID NO: 667490 - RNA, 22 nt, Human
agaggggacagccaccugcccg

SEQ ID NO: 667491 - RNA, 22 nt, Human
ccacuggagacuggucucugug

SEQ ID NO: 667492 - RNA, 22 nt, Human
cucaucugauaaaucacucuua

SEQ ID NO: 667493 - RNA, 22 nt, Human
acagaauucucucugcagaggc

SEQ ID NO: 667494 - RNA, 22 nt, Human
agugugcauuccucuccucagg

SEQ ID NO: 667495 - RNA, 22 nt, Human
gcacuuuguggauuguauuucc

SEQ ID NO: 667496 - RNA, 23 nt, Human
aaauggcuugcccucucguuugg

SEQ ID NO: 667497 - RNA, 22 nt, Human
cuguuuauacgacagguggagg

SEQ ID NO: 667498 - RNA, 22 nt, Human
aucauccaucuagcgcgggggg

SEQ ID NO: 667499 - RNA, 22 nt, Human
ucccucucccuauugccuggag

SEQ ID NO: 667500 - RNA, 22 nt, Human
auaaucugacaaagacuuaagc

SEQ ID NO: 667501 - RNA, 22 nt, Human
auguuuagucauucagcuccuu

SEQ ID NO: 667502 - RNA, 22 nt, Human
ccugauguccauaauccuguaa

SEQ ID NO: 667503 - RNA, 22 nt, Human
gaaagguucuugggaguucaca

SEQ ID NO: 667504 - RNA, 22 nt, Human
ggaaagggcauggccuuuucac

SEQ ID NO: 667505 - RNA, 22 nt, Human
gcucugagacaguagagauggc

SEQ ID NO: 667506 - RNA, 22 nt, Human
uggagcaggaagucuauggcug

SEQ ID NO: 667507 - RNA, 22 nt, Human
cagcaucuccugugcagaggga

SEQ ID NO: 667508 - RNA, 22 nt, Human
ugaagccacagagcaucugccu

SEQ ID NO: 667509 - RNA, 22 nt, Human
ggaaccaggaguuacacgaguu

SEQ ID NO: 667510 - RNA, 22 nt, Human
gcacagaagagcuuuggaauga

SEQ ID NO: 667511 - RNA, 22 nt, Human
ccucucuccaagggaaauccua

SEQ ID NO: 667512 - RNA, 22 nt, Human
gcacagagacaguccugagauc

SEQ ID NO: 667513 - RNA, 17 nt, Human
gcugagaggcagcacag

SEQ ID NO: 667514 - RNA, 22 nt, Human
cugagaggugcugguggcugca

SEQ ID NO: 667515 - RNA, 22 nt, Human
gaagugaagguuacucuagauu

SEQ ID NO: 667516 - RNA, 22 nt, Human
agcaagcuaacauaggagauug

SEQ ID NO: 667517 - RNA, 17 nt, Human
cucagcugaaccccaga

SEQ ID NO: 667518 - RNA, 22 nt, Human
ugaggggaaggcaugauaaaua

SEQ ID NO: 667519 - RNA, 19 nt, Human
caggccagugucagggggc

SEQ ID NO: 667520 - RNA, 22 nt, Human
accauuaagaaucugguuuccu

SEQ ID NO: 667521 - RNA, 22 nt, Human
cugccugaguacaagucccaga

SEQ ID NO: 667522 - RNA, 22 nt, Human
uaccuagaccaguuacaaugca

SEQ ID NO: 667523 - RNA, 20 nt, Human
caggucuucauguggcuguc

SEQ ID NO: 667524 - RNA, 22 nt, Human
gucccuggggguuuaggacuca

SEQ ID NO: 667525 - RNA, 22 nt, Human
uuucucagcucagcaucugggu

SEQ ID NO: 667526 - RNA, 22 nt, Human
aagaacagguucuagaaccauu

SEQ ID NO: 667527 - RNA, 22 nt, Human
uuuaacuugaucaguagagcau

SEQ ID NO: 667528 - RNA, 22 nt, Human
gcucccuccaugaggcagaccg

SEQ ID NO: 667529 - RNA, 22 nt, Human
guagacaagcacaggacucaga

SEQ ID NO: 667530 - RNA, 22 nt, Human
agucaguuguggagauuuaacu

SEQ ID NO: 667531 - RNA, 18 nt, Human
ccucugccauagccagca

SEQ ID NO: 667532 - RNA, 22 nt, Human
ugggcaccuagcaacccuucuc

SEQ ID NO: 667533 - RNA, 22 nt, Human
aaauucucaagugauccuguug

SEQ ID NO: 667534 - RNA, 22 nt, Human
caugaaauugcuccuuuggugc

SEQ ID NO: 667535 - RNA, 22 nt, Human
cgcaggcucgguucacagagca

SEQ ID NO: 667536 - RNA, 23 nt, Human
uauuuuccaaaugaugacuacau

SEQ ID NO: 667537 - RNA, 22 nt, Human
gucuuaaaaucagaggauauag

SEQ ID NO: 667538 - RNA, 22 nt, Human
aucaggauuauuaaaucuggau

SEQ ID NO: 667539 - RNA, 22 nt, Human
aaaccuagaaggaagggucucu

SEQ ID NO: 667540 - RNA, 22 nt, Human
auuuucucuuuguauaugcuag

SEQ ID NO: 667541 - RNA, 20 nt, Human
auucugcuuugaaaauaagg

SEQ ID NO: 667542 - RNA, 22 nt, Human
uaaccaugcaugucucuaguuu

SEQ ID NO: 667543 - RNA, 22 nt, Human
uaaugaggaaauagagggaaug

SEQ ID NO: 667544 - RNA, 22 nt, Human
gccucaggacuggcauacucau

SEQ ID NO: 667545 - RNA, 18 nt, Human
acauuuaggagagucaau

SEQ ID NO: 667546 - RNA, 22 nt, Human
uucuccaggcuugggccagguc

SEQ ID NO: 667547 - RNA, 22 nt, Human
acuguacacauucgucaagacu

SEQ ID NO: 667548 - RNA, 22 nt, Human
gcacagagcuggcccuccaggc

SEQ ID NO: 667549 - RNA, 22 nt, Human
ucucaguguuuaaaaagauuuc

SEQ ID NO: 667550 - RNA, 22 nt, Human
ugaggggguuaauuaggagagu

SEQ ID NO: 667551 - RNA, 22 nt, Human
augugagggaaaucagucagaa

SEQ ID NO: 667552 - RNA, 22 nt, Human
gagggccaggcagcaagaaggc

SEQ ID NO: 667553 - RNA, 22 nt, Human
ucacagacacagggagaagcau

SEQ ID NO: 667554 - RNA, 22 nt, Human
ugccugcgaggcaugggugaga

SEQ ID NO: 667555 - RNA, 22 nt, Human
acauuugacuguagauacuugc

SEQ ID NO: 667556 - RNA, 22 nt, Human
agccccaguucccuggaagucu

SEQ ID NO: 667557 - RNA, 22 nt, Human
gcagagccaggagagacccuug

SEQ ID NO: 667558 - RNA, 22 nt, Human
aagccacuauggugauucucaa

SEQ ID NO: 667559 - RNA, 22 nt, Human
ugggguacuuguaucaaagcac

SEQ ID NO: 667560 - RNA, 19 nt, Human
ccacagagacuagaagaca

SEQ ID NO: 667561 - RNA, 20 nt, Human
aucaggauucuugcuuuguu

SEQ ID NO: 667562 - RNA, 19 nt, Human
gaucuuugccaauuuaagc

SEQ ID NO: 667563 - RNA, 22 nt, Human
ccagcgcuucccaucagggagg

SEQ ID NO: 667564 - RNA, 22 nt, Human
uaugcacuggauuacaaagcaa

SEQ ID NO: 667565 - RNA, 22 nt, Human
gcucagggccauggaccagcag

SEQ ID NO: 667566 - RNA, 22 nt, Human
acaucgauggauagagcuugcu

SEQ ID NO: 667567 - RNA, 22 nt, Human
agcaugcacaugacuggcuuaa

SEQ ID NO: 667568 - RNA, 22 nt, Human
ucuggccaggggucccugaagg

SEQ ID NO: 667569 - RNA, 22 nt, Human
agccuuuaacacuucacauuga

SEQ ID NO: 667570 - RNA, 18 nt, Human
acugucucugagaguggu

SEQ ID NO: 667571 - RNA, 17 nt, Human
ugacuuuauuugcuugg

SEQ ID NO: 667572 - RNA, 22 nt, Human
aaaggaagaugccaggacucug

SEQ ID NO: 667573 - RNA, 22 nt, Human
ccacuucaucagugcuccauuu

SEQ ID NO: 667574 - RNA, 22 nt, Human
ucauugcagugauguuguaugu

SEQ ID NO: 667575 - RNA, 20 nt, Human
ugagggcuaaccagacucug

SEQ ID NO: 667576 - RNA, 22 nt, Human
cuccuggaucuuagccagauuc

SEQ ID NO: 667577 - RNA, 22 nt, Human
aagcagugacucucagaggcag

SEQ ID NO: 667578 - RNA, 22 nt, Human
uccaggucugugagcuaaaugg

SEQ ID NO: 667579 - RNA, 22 nt, Human
aaagaauagccuuuguccaaau

SEQ ID NO: 667580 - RNA, 23 nt, Human
agcagccauagggaagcaauaca

SEQ ID NO: 667581 - RNA, 22 nt, Human
aucuagaggagggcugcuggau

SEQ ID NO: 667582 - RNA, 22 nt, Human
uuagcacuggauuaaucaaagu

SEQ ID NO: 667583 - RNA, 18 nt, Human
gccucccuggcuacacuu

SEQ ID NO: 667584 - RNA, 22 nt, Human
ugcuggagaagcuccugggacu

SEQ ID NO: 667585 - RNA, 22 nt, Human
uaauguuugagauguuggauuu

SEQ ID NO: 667586 - RNA, 22 nt, Human
agcauccagcauccuauagaaa

SEQ ID NO: 667587 - RNA, 22 nt, Human
ggucugagagccacugaauccc

SEQ ID NO: 667588 - RNA, 22 nt, Human
aagcaauaaucccaaagugcug

SEQ ID NO: 667589 - RNA, 22 nt, Human
gugaggcagcaggagccucugu

SEQ ID NO: 667590 - RNA, 22 nt, Human
uugggguggaagugaggaucau

SEQ ID NO: 667591 - RNA, 20 nt, Human
caccaggcgcucugagaaca

SEQ ID NO: 667592 - RNA, 22 nt, Human
agccagggaagaggccuaccuc

SEQ ID NO: 667593 - RNA, 22 nt, Human
aguguuuaguuaagauuucaaa

SEQ ID NO: 667594 - RNA, 22 nt, Human
aggcuccaugcaaaggcuguuu

SEQ ID NO: 667595 - RNA, 22 nt, Human
aagagcuccaggcaaugcgguc

SEQ ID NO: 667596 - RNA, 21 nt, Human
cuuggcugcagugacaggcau

SEQ ID NO: 667597 - RNA, 22 nt, Human
uuucaucuauuugcuuugugaa

SEQ ID NO: 667598 - RNA, 22 nt, Human
agcagcauucucugguaugggg

SEQ ID NO: 667599 - RNA, 22 nt, Human
ugagccagguuuuccaucauuc

SEQ ID NO: 667600 - RNA, 22 nt, Human
gagcacagugcaguuucugcua

SEQ ID NO: 667601 - RNA, 18 nt, Human
cuucauuuguagaguucc

SEQ ID NO: 667602 - RNA, 22 nt, Human
aaaaucuugugacuuaggaagg

SEQ ID NO: 667603 - RNA, 22 nt, Human
acugugcacaauucuaaguccu

SEQ ID NO: 667604 - RNA, 22 nt, Human
aaccuggccccagauuccccau

SEQ ID NO: 667605 - RNA, 19 nt, Human
agaagcccagaucccagcc

SEQ ID NO: 667606 - RNA, 22 nt, Human
uauucagaggguugaauuuuua

SEQ ID NO: 667607 - RNA, 22 nt, Human
aguggcugucuuccaaaaucug

SEQ ID NO: 667608 - RNA, 22 nt, Human
guacccuguggccagccagcca

SEQ ID NO: 667609 - RNA, 22 nt, Human
uguguuugggggagaugcauuu

SEQ ID NO: 667610 - RNA, 22 nt, Human
cuggcagaguugggucucaaau

SEQ ID NO: 667611 - RNA, 22 nt, Human
ggaggcacuucccgucucagcc

SEQ ID NO: 667612 - RNA, 22 nt, Human
acaguacagugcagaggaagau

SEQ ID NO: 667613 - RNA, 22 nt, Human
aaagauacuuaauaguugucug

SEQ ID NO: 667614 - RNA, 20 nt, Human
accuggagagauuauuacca

SEQ ID NO: 667615 - RNA, 22 nt, Human
uucauuguacuuuaagagaugc

SEQ ID NO: 667616 - RNA, 22 nt, Human
cagugggggugaggccgaggua

SEQ ID NO: 667617 - RNA, 22 nt, Human
auguguauuacccuuucauucc

SEQ ID NO: 667618 - RNA, 22 nt, Human
uauuuccaggccccacucuaga

SEQ ID NO: 667619 - RNA, 22 nt, Human
caagucaaugauuauaagaguc

SEQ ID NO: 667620 - RNA, 22 nt, Human
auagguacagcagauauucuua

SEQ ID NO: 667621 - RNA, 22 nt, Human
uuacaaagauuauauucaguua

SEQ ID NO: 667622 - RNA, 21 nt, Human
agcucuggagcagcaaucaag

SEQ ID NO: 667623 - RNA, 23 nt, Human
ugcucugggaggcccuggagagc

SEQ ID NO: 667624 - RNA, 22 nt, Human
uuuacaguaagguggaugguac

SEQ ID NO: 667625 - RNA, 19 nt, Human
uuugggaagcccagagugu

SEQ ID NO: 667626 - RNA, 22 nt, Human
gagcuuggugcugccuguuguc

SEQ ID NO: 667627 - RNA, 22 nt, Human
auggggagcucaccaccuguuu

SEQ ID NO: 667628 - RNA, 22 nt, Human
ucagcuuggacagcuugguuga

SEQ ID NO: 667629 - RNA, 22 nt, Human
agugucuguuacgcuugcagaa

SEQ ID NO: 667630 - RNA, 22 nt, Human
ucauauuuaggccuuuaauuca

SEQ ID NO: 667631 - RNA, 22 nt, Human
gaccagaaucuggacucugauu

SEQ ID NO: 667632 - RNA, 22 nt, Human
acugugaacggacugaagccca

SEQ ID NO: 667633 - RNA, 22 nt, Human
aaauucauuuuucuuagugugc

SEQ ID NO: 667634 - RNA, 22 nt, Human
ucagaauuuaaaauguguagau

SEQ ID NO: 667635 - RNA, 22 nt, Human
acagcagagccaguggcucuag

SEQ ID NO: 667636 - RNA, 22 nt, Human
cugucuguccugaguucaacca

SEQ ID NO: 667637 - RNA, 20 nt, Human
aaggcagaguggguuggagc

SEQ ID NO: 667638 - RNA, 22 nt, Human
aaauugcuggcagccuuuauuc

SEQ ID NO: 667639 - RNA, 22 nt, Human
auuuacacauucauaagauuuc

SEQ ID NO: 667640 - RNA, 22 nt, Human
augagcaagagcuauguacaga

SEQ ID NO: 667641 - RNA, 22 nt, Human
cuuagggaaucuuagagcugga

SEQ ID NO: 667642 - RNA, 22 nt, Human
uaaccuuugaccuugcuugugc

SEQ ID NO: 667643 - RNA, 22 nt, Human
gaugaaaaucuugagaugucga

SEQ ID NO: 667644 - RNA, 22 nt, Human
gacaguguuuguauaauuccug

SEQ ID NO: 667645 - RNA, 22 nt, Human
ucccacaggcccagggcggaaa

SEQ ID NO: 667646 - RNA, 22 nt, Human
cugagcagugcuuugcaguggg

SEQ ID NO: 667647 - RNA, 22 nt, Human
aaacacaccuuuggaacuguga

SEQ ID NO: 667648 - RNA, 19 nt, Human
uggcucuguuucucuggag

SEQ ID NO: 667649 - RNA, 22 nt, Human
agucaggauuuaaacucagaca

SEQ ID NO: 667650 - RNA, 22 nt, Human
gauauuuacaaauuugccaaua

SEQ ID NO: 667651 - RNA, 21 nt, Human
caaaagagacugauucuugga

SEQ ID NO: 667652 - RNA, 22 nt, Human
gcagggguggaggcuguccugu

SEQ ID NO: 667653 - RNA, 21 nt, Human
agccuguugguuuacugcuca

SEQ ID NO: 667654 - RNA, 22 nt, Human
gaagccuggagaccagauguug

SEQ ID NO: 667655 - RNA, 22 nt, Human
ugcaguggaaagacucagacuu

SEQ ID NO: 667656 - RNA, 22 nt, Human
auugaagaucagggaaagauuc

SEQ ID NO: 667657 - RNA, 22 nt, Human
agcaguggagcgagauguuuaa

SEQ ID NO: 667658 - RNA, 22 nt, Human
gaagcugaguggacucuggcca

SEQ ID NO: 667659 - RNA, 22 nt, Human
uccuugaagcuuguaucuaaua

SEQ ID NO: 667660 - RNA, 22 nt, Human
uacacagauuucaguaucauca

SEQ ID NO: 667661 - RNA, 18 nt, Human
uccugguucuguggccac

SEQ ID NO: 667662 - RNA, 22 nt, Human
ugggggcagccaggcugucaag

SEQ ID NO: 667663 - RNA, 22 nt, Human
agccauaucaagcauucuucac

SEQ ID NO: 667664 - RNA, 22 nt, Human
ccccacccucgcuccauuucgg

SEQ ID NO: 667665 - RNA, 18 nt, Human
ggcugcucgcucuccccg

SEQ ID NO: 667666 - RNA, 22 nt, Human
ucuguacaugaguugagaauca

SEQ ID NO: 667667 - RNA, 22 nt, Human
ucuuuacaaucuaagcauaguu

SEQ ID NO: 667668 - RNA, 21 nt, Human
acagugagaaauaaauggaaa

SEQ ID NO: 667669 - RNA, 22 nt, Human
uuggagaggcagucuugcucug

SEQ ID NO: 667670 - RNA, 22 nt, Human
uggugcugauaauggcaggauu

SEQ ID NO: 667671 - RNA, 22 nt, Human
gacugaggugcccagaggugac

SEQ ID NO: 667672 - RNA, 22 nt, Human
cucuggagguugagcccagcaa

SEQ ID NO: 667673 - RNA, 22 nt, Human
uccaggacuuggcaggagauga

SEQ ID NO: 667674 - RNA, 22 nt, Human
ggaaggaucuggcugaaaucca

SEQ ID NO: 667675 - RNA, 22 nt, Human
uuccagauauuuuuauguggaa

SEQ ID NO: 667676 - RNA, 22 nt, Human
aaaagagccacuuaugaccuca

SEQ ID NO: 667677 - RNA, 22 nt, Human
ccacaguccgggcuggcaggac

SEQ ID NO: 667678 - RNA, 21 nt, Human
aggacaggaacuggcugaaua

SEQ ID NO: 667679 - RNA, 22 nt, Human
uuugguuuuuaauacaaaguac

SEQ ID NO: 667680 - RNA, 22 nt, Human
gauucaaaguuaaugaagaugc

SEQ ID NO: 667681 - RNA, 19 nt, Human
uucucagagcuugcagcac

SEQ ID NO: 667682 - RNA, 22 nt, Human
aauuauggugugugguuaaggg

SEQ ID NO: 667683 - RNA, 22 nt, Human
cuagaucagauugcuguuucua

SEQ ID NO: 667684 - RNA, 22 nt, Human
ucuuuguaaguuauauguagua

SEQ ID NO: 667685 - RNA, 22 nt, Human
gaguuuggguggaaggagggua

SEQ ID NO: 667686 - RNA, 22 nt, Human
uggcucuggagcuccugggccc

SEQ ID NO: 667687 - RNA, 22 nt, Human
ggcugggcugcugggucagagc

SEQ ID NO: 667688 - RNA, 22 nt, Human
ucacuucacacccacuaucaug

SEQ ID NO: 667689 - RNA, 22 nt, Human
aguucacauuccgagguacugg

SEQ ID NO: 667690 - RNA, 22 nt, Human
ccagaugaggucaugcuggguu

SEQ ID NO: 667691 - RNA, 22 nt, Human
gcuuggcuggagaaaguuaccu

SEQ ID NO: 667692 - RNA, 22 nt, Human
uaggccagcccuuaguccuguc

SEQ ID NO: 667693 - RNA, 22 nt, Human
auuucugugcaguaaaugguga

SEQ ID NO: 667694 - RNA, 22 nt, Human
uauguguuauuugguauacauu

SEQ ID NO: 667695 - RNA, 22 nt, Human
cccaggcugggaacgauucuag

SEQ ID NO: 667696 - RNA, 22 nt, Human
acaguauaaacuccuaaaagcc

SEQ ID NO: 667697 - RNA, 22 nt, Human
uaaaaucagccgaccauggugg

SEQ ID NO: 667698 - RNA, 22 nt, Human
agcagcagauucagcaggaaug

SEQ ID NO: 667699 - RNA, 22 nt, Human
aaguuuuucacauugcuguugu

SEQ ID NO: 667700 - RNA, 22 nt, Human
gcaggaccucuggaugcaaugc

SEQ ID NO: 667701 - RNA, 22 nt, Human
gacacuuuuuuaaagcucauua

SEQ ID NO: 667702 - RNA, 22 nt, Human
ggaagccaggcccagagaugcu

SEQ ID NO: 667703 - RNA, 22 nt, Human
uggagcccacggaugucgcuuu

SEQ ID NO: 667704 - RNA, 20 nt, Human
ggcugugcccuuccguggcc

SEQ ID NO: 667705 - RNA, 22 nt, Human
agcccagcuuccuucugucucu

SEQ ID NO: 667706 - RNA, 22 nt, Human
acagagcaguucuggagcuggc

SEQ ID NO: 667707 - RNA, 22 nt, Human
aagcccuggcggguggagggcc

SEQ ID NO: 667708 - RNA, 21 nt, Human
uggccagcuggagucuccaca

SEQ ID NO: 667709 - RNA, 22 nt, Human
caagauggagaagcagcaaggg

SEQ ID NO: 667710 - RNA, 22 nt, Human
aacagcuugcugcaccuuaaua

SEQ ID NO: 667711 - RNA, 22 nt, Human
ucaccaggauugggcuguaggc

SEQ ID NO: 667712 - RNA, 22 nt, Human
gcucacuggccugaagaggacg

SEQ ID NO: 667713 - RNA, 22 nt, Human
aguggcuguuuauaggugggua

SEQ ID NO: 667714 - RNA, 22 nt, Human
guuccuuguauuucagacauga

SEQ ID NO: 667715 - RNA, 22 nt, Human
ggcuuuauuaagcaggguaagu

SEQ ID NO: 667716 - RNA, 22 nt, Human
ugaaauuaugcauuguuguacc

SEQ ID NO: 667717 - RNA, 22 nt, Human
acagaauuuacacaucucuaaa

SEQ ID NO: 667718 - RNA, 22 nt, Human
auuccacagcuacguuuugagc

SEQ ID NO: 667719 - RNA, 22 nt, Human
ugguggcuguaagggagagaag

SEQ ID NO: 667720 - RNA, 22 nt, Human
gcugucuggcauggcguggcug

SEQ ID NO: 667721 - RNA, 18 nt, Human
cacaggcucccagugagg

SEQ ID NO: 667722 - RNA, 22 nt, Human
caugaagcccucaucagucuga

SEQ ID NO: 667723 - RNA, 22 nt, Human
agcugaaggcuagaacagcugg

SEQ ID NO: 667724 - RNA, 23 nt, Human
ugggggugcacgggccacaucuu

SEQ ID NO: 667725 - RNA, 22 nt, Human
cagaacaguaccuagcacauag

SEQ ID NO: 667726 - RNA, 22 nt, Human
ucccucgaagagcuuauucuuu

SEQ ID NO: 667727 - RNA, 22 nt, Human
gcaaaaaaugcuuguugcuuag

SEQ ID NO: 667728 - RNA, 22 nt, Human
caagugacugugcuggcaacau

SEQ ID NO: 667729 - RNA, 22 nt, Human
aagcacauugccuggcacauag

SEQ ID NO: 667730 - RNA, 22 nt, Human
aggaauuuuguauggauacugu

SEQ ID NO: 667731 - RNA, 22 nt, Human
cagaaaccucccugaauauuuu

SEQ ID NO: 667732 - RNA, 22 nt, Human
ucaggauggagggaagcacaga

SEQ ID NO: 667733 - RNA, 22 nt, Human
uggugcuguggaggggcagaag

SEQ ID NO: 667734 - RNA, 22 nt, Human
aggaaacaggcagccuuugaac

SEQ ID NO: 667735 - RNA, 22 nt, Human
uaaagugccucagguccugggu

SEQ ID NO: 667736 - RNA, 22 nt, Human
cucccagguuacaucugagccu

SEQ ID NO: 667737 - RNA, 22 nt, Human
cgaggccagcucuaagcccuac

SEQ ID NO: 667738 - RNA, 22 nt, Human
uuuggaaacugccucagcucuu

SEQ ID NO: 667739 - RNA, 22 nt, Human
aguugcugguaaauguuaucaa

SEQ ID NO: 667740 - RNA, 22 nt, Human
aggugacuacuauuuuaaaaua

SEQ ID NO: 667741 - RNA, 22 nt, Human
cugcagcagccuccagccuugg

SEQ ID NO: 667742 - RNA, 22 nt, Human
augcuaaagcuuugcuuucauu

SEQ ID NO: 667743 - RNA, 22 nt, Human
gugcuuccucagagguucccau

SEQ ID NO: 667744 - RNA, 22 nt, Human
agaucggcuuugcagaccucau

SEQ ID NO: 667745 - RNA, 22 nt, Human
ucauucauaaaaauuaguuggc

SEQ ID NO: 667746 - RNA, 22 nt, Human
uuuaucugcuaucugcugugcu

SEQ ID NO: 667747 - RNA, 22 nt, Human
aaggccacacuugcuggccagc

SEQ ID NO: 667748 - RNA, 22 nt, Human
aacauguauuuuccuuggcaac

SEQ ID NO: 667749 - RNA, 22 nt, Human
ggagugacucucggggccacua

SEQ ID NO: 667750 - RNA, 19 nt, Human
cucaccuggaggugcugau

SEQ ID NO: 667751 - RNA, 23 nt, Human
ggcugagaagucccaugauaggu

SEQ ID NO: 667752 - RNA, 22 nt, Human
ugggccugacacuuacuaggga

SEQ ID NO: 667753 - RNA, 16 nt, Human
gggcugggggauucug

SEQ ID NO: 667754 - RNA, 21 nt, Human
ucuuuuaacaccaggaauucc

SEQ ID NO: 667755 - RNA, 17 nt, Human
ucugcucugccaaucca

SEQ ID NO: 667756 - RNA, 22 nt, Human
acccagagucagacagccaugg

SEQ ID NO: 667757 - RNA, 22 nt, Human
ugucaacagaucucaaagcugg

SEQ ID NO: 667758 - RNA, 22 nt, Human
gaaagugcuuagagugugguau

SEQ ID NO: 667759 - RNA, 22 nt, Human
aaaaugagcauauugauccuuu

SEQ ID NO: 667760 - RNA, 22 nt, Human
uaaauugaaaaucuacagaaca

SEQ ID NO: 667761 - RNA, 22 nt, Human
cuucauaucucuguagaguuuu

SEQ ID NO: 667762 - RNA, 22 nt, Human
gaaaucuuccuucagugaagaa

SEQ ID NO: 667763 - RNA, 22 nt, Human
uagaauugggccuaacuuccau

SEQ ID NO: 667764 - RNA, 22 nt, Human
auuugcugaaucaaugaauuuu

SEQ ID NO: 667765 - RNA, 22 nt, Human
acagcccaggacuccagugggc

SEQ ID NO: 667766 - RNA, 22 nt, Human
uccugagggcgauucagcaggu

SEQ ID NO: 667767 - RNA, 22 nt, Human
agcaaagcuuccauaaagcagc

SEQ ID NO: 667768 - RNA, 22 nt, Human
auuuccuaggugcucgagugcu

SEQ ID NO: 667769 - RNA, 22 nt, Human
acaggaaagagcuaggcauagg

SEQ ID NO: 667770 - RNA, 18 nt, Human
aggaaagaaaggcaggug

SEQ ID NO: 667771 - RNA, 22 nt, Human
augaggcauuccacucaaacuc

SEQ ID NO: 667772 - RNA, 19 nt, Human
uaacuuguagauaugaagu

SEQ ID NO: 667773 - RNA, 22 nt, Human
aggcagagcuggguuuugaaau

SEQ ID NO: 667774 - RNA, 22 nt, Human
uucuucaauuuuccauauacug

SEQ ID NO: 667775 - RNA, 22 nt, Human
agaugcuggggccccucggaug

SEQ ID NO: 667776 - RNA, 22 nt, Human
ugugaggaugugagcgugaacc

SEQ ID NO: 667777 - RNA, 22 nt, Human
uugaaauaucaaguuauuagug

SEQ ID NO: 667778 - RNA, 22 nt, Human
caccucucagcuaggaguaagu

SEQ ID NO: 667779 - RNA, 22 nt, Human
ccugggaagcccauagcagcuu

SEQ ID NO: 667780 - RNA, 22 nt, Human
ccaggcugccgaggaaagaaag

SEQ ID NO: 667781 - RNA, 22 nt, Human
uccagcacucgcccagggcuug

SEQ ID NO: 667782 - RNA, 22 nt, Human
gcccugaguugagccuuccaaa

SEQ ID NO: 667783 - RNA, 22 nt, Human
gaugaaauccagaucacaggug

SEQ ID NO: 667784 - RNA, 22 nt, Human
cagcuguggggagcuugggcca

SEQ ID NO: 667785 - RNA, 22 nt, Human
ggaagaggcucucauugagggc

SEQ ID NO: 667786 - RNA, 22 nt, Human
accagcucuucugcucuaguug

SEQ ID NO: 667787 - RNA, 22 nt, Human
uggcagagcccagacuccaguc

SEQ ID NO: 667788 - RNA, 22 nt, Human
ccaauguuuuauacagaaguac

SEQ ID NO: 667789 - RNA, 22 nt, Human
aaauacagauucugacucagag

SEQ ID NO: 667790 - RNA, 22 nt, Human
ugcucugaaggggaagggaugg

SEQ ID NO: 667791 - RNA, 22 nt, Human
agaaacagcauuagcaucaauu

SEQ ID NO: 667792 - RNA, 22 nt, Human
gcaggcagagagggguuuccag

SEQ ID NO: 667793 - RNA, 23 nt, Human
ggcagauuugguuuguuuuaaua

SEQ ID NO: 667794 - RNA, 22 nt, Human
cagugcugacagggaggaaccu

SEQ ID NO: 667795 - RNA, 22 nt, Human
uggcccugcuuaugucucucuu

SEQ ID NO: 667796 - RNA, 22 nt, Human
augccagccucuaagcacuuua

SEQ ID NO: 667797 - RNA, 21 nt, Human
aaggcagaagcauggaaugag

SEQ ID NO: 667798 - RNA, 22 nt, Human
uuuguacuggaagaacaugcaa

SEQ ID NO: 667799 - RNA, 22 nt, Human
acugugagagagguucuuggua

SEQ ID NO: 667800 - RNA, 22 nt, Human
uuuuccuacugauaaacaguua

SEQ ID NO: 667801 - RNA, 22 nt, Human
agucugugagugauguaccugc

SEQ ID NO: 667802 - RNA, 22 nt, Human
uggccugggccugccggugcaa

SEQ ID NO: 667803 - RNA, 22 nt, Human
uccugggcgaguggugguacac

SEQ ID NO: 667804 - RNA, 22 nt, Human
aggagacauggaauagugaggc

SEQ ID NO: 667805 - RNA, 22 nt, Human
ugacucugcugugaaagcauuu

SEQ ID NO: 667806 - RNA, 22 nt, Human
uaaaaguggauaagcuguagga

SEQ ID NO: 667807 - RNA, 22 nt, Human
ggcagucacuuuugcuugugcc

SEQ ID NO: 667808 - RNA, 22 nt, Human
aagagguucuccuuggaguggg

SEQ ID NO: 667809 - RNA, 22 nt, Human
cacagguguuuguuauacucag

SEQ ID NO: 667810 - RNA, 22 nt, Human
acauaugcgaucauaggaugca

SEQ ID NO: 667811 - RNA, 18 nt, Human
ccagcccugcagcaccug

SEQ ID NO: 667812 - RNA, 20 nt, Human
ucacagaaacaaauagagaa

SEQ ID NO: 667813 - RNA, 22 nt, Human
gcagcaggagaguuuguccugc

SEQ ID NO: 667814 - RNA, 22 nt, Human
uuucucagccuccuugcuggag

SEQ ID NO: 667815 - RNA, 17 nt, Human
ucaggauccaggguucu

SEQ ID NO: 667816 - RNA, 22 nt, Human
aaaggcuucuuugcuccauguc

SEQ ID NO: 667817 - RNA, 22 nt, Human
agggcagaaauauugauacugu

SEQ ID NO: 667818 - RNA, 22 nt, Human
uuaaggcauugauauggugcua

SEQ ID NO: 667819 - RNA, 22 nt, Human
agaacuuaggaacaacagcuua

SEQ ID NO: 667820 - RNA, 22 nt, Human
aggcuugaaaugaaaucuguaa

SEQ ID NO: 667821 - RNA, 22 nt, Human
ugagcucuucuaacuaauugug

SEQ ID NO: 667822 - RNA, 22 nt, Human
gacauugaacaaguuuccugac

SEQ ID NO: 667823 - RNA, 22 nt, Human
cucugaaacuccagccccaggu

SEQ ID NO: 667824 - RNA, 22 nt, Human
uucuggagauugagaaggcauu

SEQ ID NO: 667825 - RNA, 22 nt, Human
aacaugagugauaaaauuaccu

SEQ ID NO: 667826 - RNA, 22 nt, Human
auugcuuuagaaagaaaaauau

SEQ ID NO: 667827 - RNA, 22 nt, Human
ccagcucugauuuugaccucca

SEQ ID NO: 667828 - RNA, 22 nt, Human
uuuggcuuaacuuacaugauau

SEQ ID NO: 667829 - RNA, 22 nt, Human
aucaaauaaagguaccuagcuu

SEQ ID NO: 667830 - RNA, 22 nt, Human
guccuucauuuccugaucucua

SEQ ID NO: 667831 - RNA, 22 nt, Human
caaaccuguuagaggucaucgu

SEQ ID NO: 667832 - RNA, 22 nt, Human
cugcagaguggagccucggcug

SEQ ID NO: 667833 - RNA, 22 nt, Human
accagaggaggaauuaccuucc

SEQ ID NO: 667834 - RNA, 22 nt, Human
cauccugacccaugggagggga

SEQ ID NO: 667835 - RNA, 22 nt, Human
gaguuuagauggcauuaaggua

SEQ ID NO: 667836 - RNA, 22 nt, Human
uccugaggaaugugaagagaac

SEQ ID NO: 667837 - RNA, 22 nt, Human
ccugggggccaggaagguguga

SEQ ID NO: 667838 - RNA, 18 nt, Human
uuugcugaugagcaucau

SEQ ID NO: 667839 - RNA, 22 nt, Human
gcugggccgaccugggcugcag

SEQ ID NO: 667840 - RNA, 22 nt, Human
gcagggguagugucuuccugag

SEQ ID NO: 667841 - RNA, 22 nt, Human
auuaauuuccaggcacugugcu

SEQ ID NO: 667842 - RNA, 22 nt, Human
cagagguagaacuggcccucac

SEQ ID NO: 667843 - RNA, 22 nt, Human
augcacacugaaugcuuacuuu

SEQ ID NO: 667844 - RNA, 22 nt, Human
cuccuuccugcagaucugagau

SEQ ID NO: 667845 - RNA, 22 nt, Human
ugaggccaggaucccaggcucu

SEQ ID NO: 667846 - RNA, 22 nt, Human
uccuggcaggguggcagcgggu

SEQ ID NO: 667847 - RNA, 22 nt, Human
gaauaaucaugaaauucaguga

SEQ ID NO: 667848 - RNA, 22 nt, Human
caggggacauuaaagcuccaua

SEQ ID NO: 667849 - RNA, 23 nt, Human
aguuuccacccaggguagaaggg

SEQ ID NO: 667850 - RNA, 22 nt, Human
ugcagcucauauuagagagaag

SEQ ID NO: 667851 - RNA, 22 nt, Human
ucacugaacucucauagagaaa

SEQ ID NO: 667852 - RNA, 22 nt, Human
uauuugcaggcuuuugucaugg

SEQ ID NO: 667853 - RNA, 22 nt, Human
uuacaaguauuuaagaugcugu

SEQ ID NO: 667854 - RNA, 22 nt, Human
aaaaguugcaaaauugcucuuc

SEQ ID NO: 667855 - RNA, 22 nt, Human
uauauucuuucaccuucuuccu

SEQ ID NO: 667856 - RNA, 22 nt, Human
aguauuguaaacuuccuaagga

SEQ ID NO: 667857 - RNA, 22 nt, Human
gugucugccuuuggacuaacug

SEQ ID NO: 667858 - RNA, 20 nt, Human
cugaagagacuggaggggca

SEQ ID NO: 667859 - RNA, 22 nt, Human
gaaguuaugaaauuuggacagc

SEQ ID NO: 667860 - RNA, 22 nt, Human
ccacauacaaauggggugcugu

SEQ ID NO: 667861 - RNA, 22 nt, Human
cagucuccaaaucagucugaau

SEQ ID NO: 667862 - RNA, 18 nt, Human
gcagugcaggaagaagag

SEQ ID NO: 667863 - RNA, 22 nt, Human
ugaggugggcuuguggauuugc

SEQ ID NO: 667864 - RNA, 22 nt, Human
gugccuuugugucuaaaacagc

SEQ ID NO: 667865 - RNA, 22 nt, Human
gaggccagaagugccucgggcu

SEQ ID NO: 667866 - RNA, 19 nt, Human
cugcuuccuucccucacug

SEQ ID NO: 667867 - RNA, 21 nt, Human
agcugccacccuagcuucuga

SEQ ID NO: 667868 - RNA, 22 nt, Human
gagcuuuggggaagaauacaga

SEQ ID NO: 667869 - RNA, 22 nt, Human
ccuucugcuggucaucccagug

SEQ ID NO: 667870 - RNA, 22 nt, Human
augacauugaauauguuaacua

SEQ ID NO: 667871 - RNA, 22 nt, Human
ucagaaguugauaaaguaguug

SEQ ID NO: 667872 - RNA, 22 nt, Human
aguuacaaccaugacacaagca

SEQ ID NO: 667873 - RNA, 22 nt, Human
uuccgagggcucggcggccgcc

SEQ ID NO: 667874 - RNA, 22 nt, Human
uucuccauuuaacuuccuuaug

SEQ ID NO: 667875 - RNA, 22 nt, Human
cagcauaucugaguugaaagag

SEQ ID NO: 667876 - RNA, 22 nt, Human
ugcaguggaggccgugagacag

SEQ ID NO: 667877 - RNA, 22 nt, Human
aguuauauaacuaucuagaugc

SEQ ID NO: 667878 - RNA, 22 nt, Human
uaauccagcgggugauugcaca

SEQ ID NO: 667879 - RNA, 22 nt, Human
gcucucuuucacagagguagga

SEQ ID NO: 667880 - RNA, 22 nt, Human
auacauacauguacacauaaau

SEQ ID NO: 667881 - RNA, 22 nt, Human
caaaaguaauugugguuuucac

SEQ ID NO: 667882 - RNA, 22 nt, Human
agguggcuaugaggaugcaguc

SEQ ID NO: 667883 - RNA, 22 nt, Human
uuucacaaucaaauggugaaau

SEQ ID NO: 667884 - RNA, 22 nt, Human
uguacaggagaacaaugagaaa

SEQ ID NO: 667885 - RNA, 22 nt, Human
auguuaaaugguuuauuauuaa

SEQ ID NO: 667886 - RNA, 22 nt, Human
ggugaggaauuggggacugacc

SEQ ID NO: 667887 - RNA, 22 nt, Human
augaaggcaguuaaacgucauc

SEQ ID NO: 667888 - RNA, 22 nt, Human
gaggccacuuccuacuggagga

SEQ ID NO: 667889 - RNA, 22 nt, Human
uucaaagcaagacacaauuccu

SEQ ID NO: 667890 - RNA, 20 nt, Human
agcucuuaagaagaagauga

SEQ ID NO: 667891 - RNA, 22 nt, Human
cagcaagauuaagggcagaaaa

SEQ ID NO: 667892 - RNA, 20 nt, Human
uacaggagugaguggguggg

SEQ ID NO: 667893 - RNA, 22 nt, Human
aaaugcacagaaaggaugugga

SEQ ID NO: 667894 - RNA, 22 nt, Human
ucugaggaauucugcagugaga

SEQ ID NO: 667895 - RNA, 19 nt, Human
gaaggcugaaaugaagcac

SEQ ID NO: 667896 - RNA, 22 nt, Human
ccaguucuucuugacacgaaag

SEQ ID NO: 667897 - RNA, 22 nt, Human
cugugguggcacagcgggcugg

SEQ ID NO: 667898 - RNA, 22 nt, Human
gaacaguaaauuuaugcagcac

SEQ ID NO: 667899 - RNA, 22 nt, Human
ggagguccaugugaauguggcc

SEQ ID NO: 667900 - RNA, 22 nt, Human
caagaggcuaaacugggcuauu

SEQ ID NO: 667901 - RNA, 22 nt, Human
cugccccuggugauggacgcca

SEQ ID NO: 667902 - RNA, 22 nt, Human
ugucucuugaguuuguuuuaau

SEQ ID NO: 667903 - RNA, 22 nt, Human
cauuccuuaacguggggagucu

SEQ ID NO: 667904 - RNA, 22 nt, Human
gaggcagcauucgcauagacag

SEQ ID NO: 667905 - RNA, 22 nt, Human
ucuucagacccuuagcugugau

SEQ ID NO: 667906 - RNA, 22 nt, Human
cuucacagucacccugcugugu

SEQ ID NO: 667907 - RNA, 22 nt, Human
cucaggcaaggcccgcauucuc

SEQ ID NO: 667908 - RNA, 22 nt, Human
caggcacuagcagaaugaggcu

SEQ ID NO: 667909 - RNA, 17 nt, Human
ggccacagagcuugggg

SEQ ID NO: 667910 - RNA, 22 nt, Human
uguacacaauucuuaacauaca

SEQ ID NO: 667911 - RNA, 22 nt, Human
gugcugauugggagcugggauu

SEQ ID NO: 667912 - RNA, 22 nt, Human
caugcagcagaauaaugacuau

SEQ ID NO: 667913 - RNA, 22 nt, Human
uggaacacacuucaaggagaaa

SEQ ID NO: 667914 - RNA, 22 nt, Human
cugggcuaauuaagcacagcug

SEQ ID NO: 667915 - RNA, 22 nt, Human
uucucuucccacuuucuguauu

SEQ ID NO: 667916 - RNA, 22 nt, Human
cuuugggauuucaugagagcua

SEQ ID NO: 667917 - RNA, 22 nt, Human
aaugagaaccuugaaaggaacu

SEQ ID NO: 667918 - RNA, 22 nt, Human
cuuuacuucucaaaauaaagca

SEQ ID NO: 667919 - RNA, 22 nt, Human
gcuggcucugaugggcuccagg

SEQ ID NO: 667920 - RNA, 22 nt, Human
aauguacaaaccuucuuuguag

SEQ ID NO: 667921 - RNA, 20 nt, Human
gcaauguugguuccugucac

SEQ ID NO: 667922 - RNA, 22 nt, Human
gaaaaggccuccccauaggaau

SEQ ID NO: 667923 - RNA, 22 nt, Human
caaguauuuccugauggccugu

SEQ ID NO: 667924 - RNA, 22 nt, Human
ugacaggggcugguggauaaau

SEQ ID NO: 667925 - RNA, 22 nt, Human
ugcugcagcagugcgggcagcu

SEQ ID NO: 667926 - RNA, 22 nt, Human
auagucuuacuuuucucugcua

SEQ ID NO: 667927 - RNA, 19 nt, Human
cuggccuguguccugugcu

SEQ ID NO: 667928 - RNA, 21 nt, Human
uggaaagauucaaagaccagg

SEQ ID NO: 667929 - RNA, 22 nt, Human
aaaguacaaggaaaggaucuga

SEQ ID NO: 667930 - RNA, 18 nt, Human
auuugcaggcaugcaggc

SEQ ID NO: 667931 - RNA, 22 nt, Human
aaagugcuaggauuacaagcgu

SEQ ID NO: 667932 - RNA, 22 nt, Human
ccacauuucuucacuuguccca

SEQ ID NO: 667933 - RNA, 22 nt, Human
gagcagcuugcgcugucuucac

SEQ ID NO: 667934 - RNA, 22 nt, Human
agauugugucaauuucucuuua

SEQ ID NO: 667935 - RNA, 22 nt, Human
auugguuaagacgcaucaugcu

SEQ ID NO: 667936 - RNA, 22 nt, Human
gcaggccacaguggagucucug

SEQ ID NO: 667937 - RNA, 22 nt, Human
ccaggcuugguguguggucagg

SEQ ID NO: 667938 - RNA, 22 nt, Human
acagauuugacugguaccuggc

SEQ ID NO: 667939 - RNA, 22 nt, Human
agcagaaaacuuucaugcucug

SEQ ID NO: 667940 - RNA, 22 nt, Human
ugaguucuuuccguuagguaug

SEQ ID NO: 667941 - RNA, 22 nt, Human
uugucaucaagaugcauugguc

SEQ ID NO: 667942 - RNA, 22 nt, Human
cuggagugauacucagaaugug

SEQ ID NO: 667943 - RNA, 22 nt, Human
agugaagugauaguuugccuag

SEQ ID NO: 667944 - RNA, 22 nt, Human
auguccaguuucuacacacaua

SEQ ID NO: 667945 - RNA, 22 nt, Human
cugaucuguccuccucagagcc

SEQ ID NO: 667946 - RNA, 22 nt, Human
cugggccacaagccugugugau

SEQ ID NO: 667947 - RNA, 22 nt, Human
ugcauugaggggcucucuuccu

SEQ ID NO: 667948 - RNA, 22 nt, Human
agcagguguauauaaggcugag

SEQ ID NO: 667949 - RNA, 22 nt, Human
aggcaccuggccaguugucuug

SEQ ID NO: 667950 - RNA, 22 nt, Human
ucacaugcugugggaucuguau

SEQ ID NO: 667951 - RNA, 22 nt, Human
uacugcauaacuggcauguggg

SEQ ID NO: 667952 - RNA, 22 nt, Human
gugcuggcuggacauggagcac

SEQ ID NO: 667953 - RNA, 22 nt, Human
cuccugguucagagagcugaga

SEQ ID NO: 667954 - RNA, 22 nt, Human
ggcccacacugacagcugagcu

SEQ ID NO: 667955 - RNA, 22 nt, Human
aucauguugcucaaaauuaaac

SEQ ID NO: 667956 - RNA, 22 nt, Human
uuucuucauagaccuugucuug

SEQ ID NO: 667957 - RNA, 22 nt, Human
gcuggaauuggacccagggcuc

SEQ ID NO: 667958 - RNA, 22 nt, Human
gggcucugggauucagagcaag

SEQ ID NO: 667959 - RNA, 22 nt, Human
acuuuccuuauggauggggaaa

SEQ ID NO: 667960 - RNA, 20 nt, Human
ugguccucacaugccaucuu

SEQ ID NO: 667961 - RNA, 22 nt, Human
caagaguuuaaaucaauggcca

SEQ ID NO: 667962 - RNA, 22 nt, Human
uugaggacagugcuuggggccc

SEQ ID NO: 667963 - RNA, 22 nt, Human
gucccagggaugcagacaugag

SEQ ID NO: 667964 - RNA, 22 nt, Human
auuauaaagaacaugugugugg

SEQ ID NO: 667965 - RNA, 22 nt, Human
cuguguccaauggccuuagcag

SEQ ID NO: 667966 - RNA, 22 nt, Human
agggaaaucuuucaacacuuca

SEQ ID NO: 667967 - RNA, 21 nt, Human
cagaccauugcaugagcaggu

SEQ ID NO: 667968 - RNA, 22 nt, Human
gcccaggaaagauagggccuca

SEQ ID NO: 667969 - RNA, 22 nt, Human
uggcagggaauacagauguuua

SEQ ID NO: 667970 - RNA, 22 nt, Human
agaggcucuaauccccuccaca

SEQ ID NO: 667971 - RNA, 19 nt, Human
ccagaugagcagcugagau

SEQ ID NO: 667972 - RNA, 22 nt, Human
augcacauguaugucaauauuu

SEQ ID NO: 667973 - RNA, 22 nt, Human
gcuggcaucacuggcuucggug

SEQ ID NO: 667974 - RNA, 22 nt, Human
uccaugucuucaugugucuaac

SEQ ID NO: 667975 - RNA, 22 nt, Human
gcagugugucuggaguacaugg

SEQ ID NO: 667976 - RNA, 23 nt, Human
ugcugcccgcuuggcacgcuccc

SEQ ID NO: 667977 - RNA, 22 nt, Human
ucacuguaaaguaauacuguca

SEQ ID NO: 667978 - RNA, 22 nt, Human
uuagcaaauaucuugaaacagg

SEQ ID NO: 667979 - RNA, 22 nt, Human
cucuuaauuaagcugagaucug

SEQ ID NO: 667980 - RNA, 22 nt, Human
gagugguaggcaguguuaggaa

SEQ ID NO: 667981 - RNA, 22 nt, Human
uagauucuacagcucagcuguc

SEQ ID NO: 667982 - RNA, 22 nt, Human
gcucugugccacaugcaguguu

SEQ ID NO: 667983 - RNA, 22 nt, Human
uuucauugcagagucugugugc

SEQ ID NO: 667984 - RNA, 19 nt, Human
aauacaguguuauagaauu

SEQ ID NO: 667985 - RNA, 22 nt, Human
cccaggucccgccccagcucua

SEQ ID NO: 667986 - RNA, 17 nt, Human
acagucugccugacagu

SEQ ID NO: 667987 - RNA, 22 nt, Human
guggcagcugugggacacuggu

SEQ ID NO: 667988 - RNA, 22 nt, Human
aauagcucacugauuucucuuu

SEQ ID NO: 667989 - RNA, 22 nt, Human
ggcuccacugcugaccacucca

SEQ ID NO: 667990 - RNA, 22 nt, Human
gggagcugaucagguggauuca

SEQ ID NO: 667991 - RNA, 22 nt, Human
cagagccugccucuggcugugg

SEQ ID NO: 667992 - RNA, 22 nt, Human
aaauaugagaguaggaguuugg

SEQ ID NO: 667993 - RNA, 22 nt, Human
ggaggagcacuucugagcucag

SEQ ID NO: 667994 - RNA, 22 nt, Human
agaaaacuggagccugggguug

SEQ ID NO: 667995 - RNA, 22 nt, Human
uguguucaguaugacauucaca

SEQ ID NO: 667996 - RNA, 23 nt, Human
cauuccugauauggccacaagag

SEQ ID NO: 667997 - RNA, 22 nt, Human
aguaguggggccaggguuugaa

SEQ ID NO: 667998 - RNA, 22 nt, Human
cuccaaggcucuggugcugagg

SEQ ID NO: 667999 - RNA, 22 nt, Human
acacacugaauuuuguggaaac

SEQ ID NO: 668000 - RNA, 22 nt, Human
uagacaggaaacauuaggaugg

SEQ ID NO: 668001 - RNA, 22 nt, Human
aagagagucagucugagcacca

SEQ ID NO: 668002 - RNA, 22 nt, Human
uguguacacaugacaggcaccc

SEQ ID NO: 668003 - RNA, 23 nt, Human
uuucacauuuacuguuagauggc

SEQ ID NO: 668004 - RNA, 17 nt, Human
ccagagcuacugagacu

SEQ ID NO: 668005 - RNA, 22 nt, Human
gaaaacauccagagauagaccu

SEQ ID NO: 668006 - RNA, 22 nt, Human
guuucccauaucuagggagagg

SEQ ID NO: 668007 - RNA, 22 nt, Human
auuugcuucuagucaguuccau

SEQ ID NO: 668008 - RNA, 22 nt, Human
guuacaaaggaagcuucacugc

SEQ ID NO: 668009 - RNA, 23 nt, Human
aggaacugaggccuagggaggua

SEQ ID NO: 668010 - RNA, 22 nt, Human
gcuggagaaacugcagcugagg

SEQ ID NO: 668011 - RNA, 22 nt, Human
gagcagcucaggcacuuagcca

SEQ ID NO: 668012 - RNA, 22 nt, Human
ucacugcuuugagccacugagc

SEQ ID NO: 668013 - RNA, 22 nt, Human
gcucugucauuuugcagacacu

SEQ ID NO: 668014 - RNA, 22 nt, Human
auauugaucuuggaacugauuu

SEQ ID NO: 668015 - RNA, 21 nt, Human
aaugucuuuguccaugcucug

SEQ ID NO: 668016 - RNA, 22 nt, Human
uuggggagaaaugaaaugaagu

SEQ ID NO: 668017 - RNA, 22 nt, Human
guggcagguggagccuccugca

SEQ ID NO: 668018 - RNA, 22 nt, Human
ccaggggcuggugcugagcugg

SEQ ID NO: 668019 - RNA, 22 nt, Human
acauucacuauguccaaacucu

SEQ ID NO: 668020 - RNA, 22 nt, Human
auggguaaggguguuugguuag

SEQ ID NO: 668021 - RNA, 22 nt, Human
uuuacaaguuuacagaaugaug

SEQ ID NO: 668022 - RNA, 22 nt, Human
uggccacacccaccuagaggag

SEQ ID NO: 668023 - RNA, 22 nt, Human
gcugcuugauuagguugacacu

SEQ ID NO: 668024 - RNA, 22 nt, Human
gggugcagggucuccagcagcu

SEQ ID NO: 668025 - RNA, 22 nt, Human
ccagccuugacugccccagcac

SEQ ID NO: 668026 - RNA, 22 nt, Human
cagcccaguaccaagcaguugg

SEQ ID NO: 668027 - RNA, 22 nt, Human
aagguggauguaagcggcaaug

SEQ ID NO: 668028 - RNA, 22 nt, Human
uccuuugguucucuaagaugcu

SEQ ID NO: 668029 - RNA, 22 nt, Human
uugaagcagagaaauacuugaa

SEQ ID NO: 668030 - RNA, 22 nt, Human
aaacuguauagggaaaaguaga

SEQ ID NO: 668031 - RNA, 16 nt, Human
ugcagagagcauggug

SEQ ID NO: 668032 - RNA, 22 nt, Human
uguauuuucugaagauaaucaa

SEQ ID NO: 668033 - RNA, 22 nt, Human
gggcuggugaggcugcccugca

SEQ ID NO: 668034 - RNA, 22 nt, Human
uccugcuguuuaccuacaaugg

SEQ ID NO: 668035 - RNA, 22 nt, Human
gucuggaggcccgucagcccua

SEQ ID NO: 668036 - RNA, 22 nt, Human
acacugucucauaugaggggac

SEQ ID NO: 668037 - RNA, 22 nt, Human
uuagaacuuaaacuucagaaag

SEQ ID NO: 668038 - RNA, 22 nt, Human
uuucagacauuaagugauggga

SEQ ID NO: 668039 - RNA, 22 nt, Human
cucuggguucacugaggcucug

SEQ ID NO: 668040 - RNA, 22 nt, Human
gcccaggaguugaagggcugac

SEQ ID NO: 668041 - RNA, 22 nt, Human
acugggcaucccauggcagagc

SEQ ID NO: 668042 - RNA, 22 nt, Human
gagaggggaccugugugucuag

SEQ ID NO: 668043 - RNA, 22 nt, Human
augcacaggugcugaugcacgc

SEQ ID NO: 668044 - RNA, 22 nt, Human
cuagaauaucauaugaagagac

SEQ ID NO: 668045 - RNA, 22 nt, Human
gcucuguguucccuccaggcuc

SEQ ID NO: 668046 - RNA, 22 nt, Human
uauacaggaaauuuuggaacag

SEQ ID NO: 668047 - RNA, 22 nt, Human
ucucugagcugcuucuugcaua

SEQ ID NO: 668048 - RNA, 22 nt, Human
ugucuuauuaagaccagugacu

SEQ ID NO: 668049 - RNA, 21 nt, Human
cacuauuuauauaugccagcu

SEQ ID NO: 668050 - RNA, 20 nt, Human
augauucugggcuacacugg

SEQ ID NO: 668051 - RNA, 22 nt, Human
cacugugguuauuaucacuguu

SEQ ID NO: 668052 - RNA, 22 nt, Human
uauuuggauacaaucauuugcu

SEQ ID NO: 668053 - RNA, 22 nt, Human
uucaaggagauuggagucuacu

SEQ ID NO: 668054 - RNA, 22 nt, Human
uuucacacccacuaggacuguu

SEQ ID NO: 668055 - RNA, 22 nt, Human
gcagagauccaggguauagguu

SEQ ID NO: 668056 - RNA, 22 nt, Human
gacaugcaacaauuuggcauuu

SEQ ID NO: 668057 - RNA, 20 nt, Human
ugcagagcuggcuggcuccu

SEQ ID NO: 668058 - RNA, 22 nt, Human
cuccuggcucgcccccagcuga

SEQ ID NO: 668059 - RNA, 23 nt, Human
agagccugaaagacuucuggcac

SEQ ID NO: 668060 - RNA, 22 nt, Human
cugaagcagauguggcugagau

SEQ ID NO: 668061 - RNA, 22 nt, Human
gagugcuggggugcagagaggu

SEQ ID NO: 668062 - RNA, 22 nt, Human
acagcucagacaucacugcucu

SEQ ID NO: 668063 - RNA, 22 nt, Human
ucucuguggagcaguguguuca

SEQ ID NO: 668064 - RNA, 22 nt, Human
cacagcauucacagaaagacau

SEQ ID NO: 668065 - RNA, 23 nt, Human
cucugcaggagagugggcagggc

SEQ ID NO: 668066 - RNA, 22 nt, Human
cagacagaaggcuccuugaggu

SEQ ID NO: 668067 - RNA, 22 nt, Human
aaugggagguaguaugggaggu

SEQ ID NO: 668068 - RNA, 22 nt, Human
ucuuugcaggagcccuuugaac

SEQ ID NO: 668069 - RNA, 22 nt, Human
cauuucuagacaaguccuggag

SEQ ID NO: 668070 - RNA, 22 nt, Human
ucccugcugcacucacaccuac

SEQ ID NO: 668071 - RNA, 22 nt, Human
auuagaaaauacaugggcuguc

SEQ ID NO: 668072 - RNA, 21 nt, Human
acuggaagugggucaggaagu

SEQ ID NO: 668073 - RNA, 22 nt, Human
uuccuuuucuuaaacauaugug

SEQ ID NO: 668074 - RNA, 22 nt, Human
cacaggugcaagaaguugcagu

SEQ ID NO: 668075 - RNA, 22 nt, Human
gagggccagaguccugggguca

SEQ ID NO: 668076 - RNA, 18 nt, Human
uucaccagguagauaggg

SEQ ID NO: 668077 - RNA, 22 nt, Human
ggacaggcccggggagccugga

SEQ ID NO: 668078 - RNA, 22 nt, Human
ucagauuuagggugauuaccuu

SEQ ID NO: 668079 - RNA, 22 nt, Human
ugguccaagugagguggccucu

SEQ ID NO: 668080 - RNA, 22 nt, Human
uaggagcuuuuggaguccugug

SEQ ID NO: 668081 - RNA, 22 nt, Human
aagaaaucagaaaagcauucgu

SEQ ID NO: 668082 - RNA, 22 nt, Human
aaacagucaugguugcuguuca

SEQ ID NO: 668083 - RNA, 21 nt, Human
cugagcuggggugaagguugc

SEQ ID NO: 668084 - RNA, 19 nt, Human
gguaaaagugagcuucagg

SEQ ID NO: 668085 - RNA, 22 nt, Human
aaggcagagauauucuugaucu

SEQ ID NO: 668086 - RNA, 22 nt, Human
caggcugagcucuggccugggc

SEQ ID NO: 668087 - RNA, 22 nt, Human
ucugugcaggaagucauuauga

SEQ ID NO: 668088 - RNA, 22 nt, Human
acacuugauaggucaaaucagu

SEQ ID NO: 668089 - RNA, 22 nt, Human
ccuuccagauguaagagcugau

SEQ ID NO: 668090 - RNA, 22 nt, Human
ucacagagagguuaagcaguug

SEQ ID NO: 668091 - RNA, 22 nt, Human
uccugggcuuaagugauccucc

SEQ ID NO: 668092 - RNA, 22 nt, Human
cugggccagucucggccgcucu

SEQ ID NO: 668093 - RNA, 22 nt, Human
auccaguucuuggaagcacagg

SEQ ID NO: 668094 - RNA, 22 nt, Human
auucuuggcaaggagauuuaaa

SEQ ID NO: 668095 - RNA, 22 nt, Human
ggccuugguggcuuugcugaug

SEQ ID NO: 668096 - RNA, 22 nt, Human
acacaaacugcuagaaaauugg

SEQ ID NO: 668097 - RNA, 22 nt, Human
uggaaauguauuugggcaugcc

SEQ ID NO: 668098 - RNA, 18 nt, Human
gcacagagcccaggcucu

SEQ ID NO: 668099 - RNA, 22 nt, Human
accagaaaggaauaauagaauu

SEQ ID NO: 668100 - RNA, 22 nt, Human
ugcugggggugucucaccaggc

SEQ ID NO: 668101 - RNA, 22 nt, Human
aggcuguguucugguucuuagc

SEQ ID NO: 668102 - RNA, 22 nt, Human
ccacagugaaaucuugauggag

SEQ ID NO: 668103 - RNA, 22 nt, Human
uggccaggcauucagauaagac

SEQ ID NO: 668104 - RNA, 22 nt, Human
agcuguuuaugcacuccugccu

SEQ ID NO: 668105 - RNA, 22 nt, Human
uuuccaaaggaggaaccaguuu

SEQ ID NO: 668106 - RNA, 20 nt, Human
cccugagacaaaggaggggc

SEQ ID NO: 668107 - RNA, 17 nt, Human
cucagaguugcuuuguc

SEQ ID NO: 668108 - RNA, 22 nt, Human
cugcugucaaaaaucacuccau

SEQ ID NO: 668109 - RNA, 22 nt, Human
ucagaaaagguagcugugacaa

SEQ ID NO: 668110 - RNA, 22 nt, Human
auaauaacuccuguugaagaac

SEQ ID NO: 668111 - RNA, 22 nt, Human
gccugcagauauauaggauggu

SEQ ID NO: 668112 - RNA, 22 nt, Human
uggcucauggaauuagcuauua

SEQ ID NO: 668113 - RNA, 22 nt, Human
ucaggcagaugcagggauggau

SEQ ID NO: 668114 - RNA, 20 nt, Human
auacaaucaugaggaaaaag

SEQ ID NO: 668115 - RNA, 22 nt, Human
gccaggaugacuauacaacagc

SEQ ID NO: 668116 - RNA, 22 nt, Human
uugaagcauuucuuugagcuuc

SEQ ID NO: 668117 - RNA, 22 nt, Human
guuuagaugagauuuuagaaca

SEQ ID NO: 668118 - RNA, 22 nt, Human
acaucacaguaguuaagccaga

SEQ ID NO: 668119 - RNA, 22 nt, Human
cagcccacuucccagcaccuac

SEQ ID NO: 668120 - RNA, 22 nt, Human
cuucuaauucuuauguaagcuu

SEQ ID NO: 668121 - RNA, 22 nt, Human
gccagguucuggggagguacaa

SEQ ID NO: 668122 - RNA, 22 nt, Human
aauugcuuagagaauccaggua

SEQ ID NO: 668123 - RNA, 22 nt, Human
cacagcagcguuccuccgugug

SEQ ID NO: 668124 - RNA, 22 nt, Human
uucugcaaucgcucugaccauu

SEQ ID NO: 668125 - RNA, 22 nt, Human
agaaaggguucucugaggugcu

SEQ ID NO: 668126 - RNA, 22 nt, Human
aaacacuggcaauuucaugcac

SEQ ID NO: 668127 - RNA, 22 nt, Human
uggcaaagugacuccuuggggc

SEQ ID NO: 668128 - RNA, 22 nt, Human
auucauccuuaccaguccccgg

SEQ ID NO: 668129 - RNA, 22 nt, Human
uccugagccccagggagguugg

SEQ ID NO: 668130 - RNA, 17 nt, Human
ccucagcuucuuuccuc

SEQ ID NO: 668131 - RNA, 22 nt, Human
ccucccuggccagagcagcagc

SEQ ID NO: 668132 - RNA, 21 nt, Human
ucagagaauggccuacucuca

SEQ ID NO: 668133 - RNA, 22 nt, Human
gagggccuacuggacaugucag

SEQ ID NO: 668134 - RNA, 22 nt, Human
cugugucucuccuuacaagacu

SEQ ID NO: 668135 - RNA, 22 nt, Human
ugcuuugcucugucucuagcua

SEQ ID NO: 668136 - RNA, 22 nt, Human
ucuggacuccaugcugccugga

SEQ ID NO: 668137 - RNA, 22 nt, Human
aaacugcaugaagcugauuuua

SEQ ID NO: 668138 - RNA, 22 nt, Human
ccuaaguauuuucaguguuaac

SEQ ID NO: 668139 - RNA, 21 nt, Human
aacuacaguuguuccuucauu

SEQ ID NO: 668140 - RNA, 22 nt, Human
uggagagcaggggaugcgggcg

SEQ ID NO: 668141 - RNA, 19 nt, Human
auggcugcugauuggggau

SEQ ID NO: 668142 - RNA, 22 nt, Human
cauaacuggggacacuucucua

SEQ ID NO: 668143 - RNA, 22 nt, Human
guccuguguguugccggcugaa

SEQ ID NO: 668144 - RNA, 22 nt, Human
gaaacacauaugaacaguugau

SEQ ID NO: 668145 - RNA, 22 nt, Human
uccuggcaggucagcaggagca

SEQ ID NO: 668146 - RNA, 22 nt, Human
cucugggcaaguuucuucauga

SEQ ID NO: 668147 - RNA, 22 nt, Human
ugcagggaaagggcacugggcu

SEQ ID NO: 668148 - RNA, 22 nt, Human
agagucugugcuuucaucagga

SEQ ID NO: 668149 - RNA, 22 nt, Human
agccaguuuaagcaggaggggu

SEQ ID NO: 668150 - RNA, 22 nt, Human
uaggcugagcuuguagaucgua

SEQ ID NO: 668151 - RNA, 22 nt, Human
uaucauuguguuugccagucac

SEQ ID NO: 668152 - RNA, 22 nt, Human
auuuagugaccugaacugaaac

SEQ ID NO: 668153 - RNA, 22 nt, Human
agcuaucaguaggaccauguuc

SEQ ID NO: 668154 - RNA, 22 nt, Human
cagcucugggugacaggagggc

SEQ ID NO: 668155 - RNA, 22 nt, Human
agcuggccauugugaguggccu

SEQ ID NO: 668156 - RNA, 22 nt, Human
ggcaaagagacaugcaucgggg

SEQ ID NO: 668157 - RNA, 22 nt, Human
ggcaucguccugggcauaggga

SEQ ID NO: 668158 - RNA, 22 nt, Human
uggcugaguguuccaaggagca

SEQ ID NO: 668159 - RNA, 22 nt, Human
gcucagggaaggccacgugaga

SEQ ID NO: 668160 - RNA, 22 nt, Human
gaauccgugugauguggacuag

SEQ ID NO: 668161 - RNA, 22 nt, Human
ugagagucuguuccucuugcag

SEQ ID NO: 668162 - RNA, 22 nt, Human
uaaagugcaggcuacucagaag

SEQ ID NO: 668163 - RNA, 23 nt, Human
agaauuguuguuagggaaaagua

SEQ ID NO: 668164 - RNA, 22 nt, Human
auaaagucauggcagcuagaau

SEQ ID NO: 668165 - RNA, 22 nt, Human
cugaggagaaagaugguccaag

SEQ ID NO: 668166 - RNA, 22 nt, Human
agucuucagcagccuucucagg

SEQ ID NO: 668167 - RNA, 22 nt, Human
gcucugcuguguuuguucagca

SEQ ID NO: 668168 - RNA, 22 nt, Human
auguuucaccagcaaauuaccu

SEQ ID NO: 668169 - RNA, 23 nt, Human
ggcacagaugcugagcaugugca

SEQ ID NO: 668170 - RNA, 22 nt, Human
uugcaggaaacugagugugagc

SEQ ID NO: 668171 - RNA, 22 nt, Human
uggaaagaggaagugcccagca

SEQ ID NO: 668172 - RNA, 22 nt, Human
agagaaaagaguucaggcuuug

SEQ ID NO: 668173 - RNA, 22 nt, Human
ugcacacaaguuggagaaugaa

SEQ ID NO: 668174 - RNA, 22 nt, Human
auuccacaugaaaggagcugaa

SEQ ID NO: 668175 - RNA, 22 nt, Human
aaugcauacguguuuguggcaa

SEQ ID NO: 668176 - RNA, 22 nt, Human
ugggccugacucaccugccucc

SEQ ID NO: 668177 - RNA, 20 nt, Human
caaugcacacagcugcuucu

SEQ ID NO: 668178 - RNA, 22 nt, Human
agaaauugccagaaugucaggc

SEQ ID NO: 668179 - RNA, 20 nt, Human
ugcuguguggcccagcauga

SEQ ID NO: 668180 - RNA, 22 nt, Human
agaaaaggcuugaagagguuuu

SEQ ID NO: 668181 - RNA, 22 nt, Human
agucccagugacuuggccagaa

SEQ ID NO: 668182 - RNA, 22 nt, Human
gaacccaggcuuuugaggcugu

SEQ ID NO: 668183 - RNA, 20 nt, Human
cagcaacuuuggacugaguu

SEQ ID NO: 668184 - RNA, 22 nt, Human
aaugucuugagaagagaaaucu

SEQ ID NO: 668185 - RNA, 20 nt, Human
ucaucugauuaaccucgaag

SEQ ID NO: 668186 - RNA, 22 nt, Human
uuagcuguggaagcuucagcca

SEQ ID NO: 668187 - RNA, 23 nt, Human
ccacauggcaagaugaugcauuc

SEQ ID NO: 668188 - RNA, 22 nt, Human
cacauauaaccuagacaaggcc

SEQ ID NO: 668189 - RNA, 22 nt, Human
ucuguuggcuuuuuaaaguugu

SEQ ID NO: 668190 - RNA, 22 nt, Human
gugugugcuccccaggagagcu

SEQ ID NO: 668191 - RNA, 22 nt, Human
gcacuguagugggggagaaaug

SEQ ID NO: 668192 - RNA, 22 nt, Human
guagaacucccagugguauugu

SEQ ID NO: 668193 - RNA, 22 nt, Human
ugguaccauuucccaggagugu

SEQ ID NO: 668194 - RNA, 22 nt, Human
ucaggggacuuaggagagaagu

SEQ ID NO: 668195 - RNA, 19 nt, Human
ucucucaauugcuucaauu

SEQ ID NO: 668196 - RNA, 22 nt, Human
gccuugggcacaggcagggccc

SEQ ID NO: 668197 - RNA, 22 nt, Human
cucagaaagugacaggggggug

SEQ ID NO: 668198 - RNA, 22 nt, Human
guaucuguggauuuugguaucc

SEQ ID NO: 668199 - RNA, 22 nt, Human
cuccugggcugucggcgcucug

SEQ ID NO: 668200 - RNA, 22 nt, Human
acuacagaagucuuauuagaga

SEQ ID NO: 668201 - RNA, 22 nt, Human
gugcuucccauuagaacuguga

SEQ ID NO: 668202 - RNA, 22 nt, Human
caucaguguucacuauuccuuc

SEQ ID NO: 668203 - RNA, 22 nt, Human
aaauauaguaaaugcauaguuc

SEQ ID NO: 668204 - RNA, 22 nt, Human
ggagggguggaaggagugccug

SEQ ID NO: 668205 - RNA, 22 nt, Human
ucuaugucuccaccuucgcaga

SEQ ID NO: 668206 - RNA, 22 nt, Human
ggguacuuaauauuuacggggu

SEQ ID NO: 668207 - RNA, 20 nt, Human
ucaagaugaggucauacugg

SEQ ID NO: 668208 - RNA, 22 nt, Human
uagcauuaucugucuuaucauu

SEQ ID NO: 668209 - RNA, 22 nt, Human
gcuccagguauuugcccuuuua

SEQ ID NO: 668210 - RNA, 22 nt, Human
uacauugaaagucauuuaaucc

SEQ ID NO: 668211 - RNA, 22 nt, Human
caauuucaauacaaaauacauu

SEQ ID NO: 668212 - RNA, 22 nt, Human
uucugagaagggugggucuggc

SEQ ID NO: 668213 - RNA, 22 nt, Human
ccuccagcugccucagucucuu

SEQ ID NO: 668214 - RNA, 22 nt, Human
gcaggagcucguuuccaggcug

SEQ ID NO: 668215 - RNA, 22 nt, Human
aggccagcuuccagaggggcag

SEQ ID NO: 668216 - RNA, 22 nt, Human
uugugugucuucuucacugccc

SEQ ID NO: 668217 - RNA, 22 nt, Human
auggaauuuggacuggaagucc

SEQ ID NO: 668218 - RNA, 22 nt, Human
uuacaagacagugugguaaaua

SEQ ID NO: 668219 - RNA, 22 nt, Human
ggagagccugugcagccggguu

SEQ ID NO: 668220 - RNA, 22 nt, Human
ugagccaaggccucaagaauuu

SEQ ID NO: 668221 - RNA, 22 nt, Human
aagaccucugaaguaccuggug

SEQ ID NO: 668222 - RNA, 22 nt, Human
ucccuggacaacagacuucacu

SEQ ID NO: 668223 - RNA, 22 nt, Human
ggaggggcugagcaacuuucag

SEQ ID NO: 668224 - RNA, 22 nt, Human
gcagggucugaggccacagagg

SEQ ID NO: 668225 - RNA, 22 nt, Human
gcaggaccaggcacgagggcca

SEQ ID NO: 668226 - RNA, 22 nt, Human
auccaugaagguacuucucagg

SEQ ID NO: 668227 - RNA, 22 nt, Human
uuaaagaguuuauuacuuguaa

SEQ ID NO: 668228 - RNA, 22 nt, Human
ccuuggcugaggagggagcuga

SEQ ID NO: 668229 - RNA, 22 nt, Human
uuucucucagccuguagaaacu

SEQ ID NO: 668230 - RNA, 22 nt, Human
cauccugcggggagcagagggc

SEQ ID NO: 668231 - RNA, 22 nt, Human
ucugggcuuuaguuuguuaucu

SEQ ID NO: 668232 - RNA, 22 nt, Human
gggguggauuucaggcgguguc

SEQ ID NO: 668233 - RNA, 22 nt, Human
caggccuccuaugagcacuagc

SEQ ID NO: 668234 - RNA, 18 nt, Human
uacuguggaucagggguu

SEQ ID NO: 668235 - RNA, 22 nt, Human
gugucaugcacacucaguguug

SEQ ID NO: 668236 - RNA, 22 nt, Human
ucugcugccaugcagagcagua

SEQ ID NO: 668237 - RNA, 22 nt, Human
uuucacaugguacugccuguuu

SEQ ID NO: 668238 - RNA, 22 nt, Human
uauuccagaugaaaucauucag

SEQ ID NO: 668239 - RNA, 22 nt, Human
cagcugugauaugccugccuga

SEQ ID NO: 668240 - RNA, 22 nt, Human
uucuuuuaauagagauccugug

SEQ ID NO: 668241 - RNA, 22 nt, Human
uuugguuugccugaguacccuc

SEQ ID NO: 668242 - RNA, 22 nt, Human
gugccugguauguagguagcgg

SEQ ID NO: 668243 - RNA, 22 nt, Human
gaaggcuguuucugguagugau

SEQ ID NO: 668244 - RNA, 22 nt, Human
uggagucacuuccauaugggaa

SEQ ID NO: 668245 - RNA, 22 nt, Human
ucuggagcuugaagcuuugguu

SEQ ID NO: 668246 - RNA, 22 nt, Human
ccaggcugugguuuagauagag

SEQ ID NO: 668247 - RNA, 22 nt, Human
cugccugcugcccuccagagcc

SEQ ID NO: 668248 - RNA, 22 nt, Human
ccagcaagugcagauggccaag

SEQ ID NO: 668249 - RNA, 22 nt, Human
uucucaggaacucagugucagc

SEQ ID NO: 668250 - RNA, 22 nt, Human
acagugaaugcccaagaaaagu

SEQ ID NO: 668251 - RNA, 22 nt, Human
ucccucuaaacuguaagauucu

SEQ ID NO: 668252 - RNA, 22 nt, Human
acagauuuuaaaugacacuccc

SEQ ID NO: 668253 - RNA, 22 nt, Human
cuggguguucacccgaggcgcu

SEQ ID NO: 668254 - RNA, 22 nt, Human
cagucccaguuugagacucugg

SEQ ID NO: 668255 - RNA, 22 nt, Human
gagagcaauggggacgggcagg

SEQ ID NO: 668256 - RNA, 22 nt, Human
ugacauucuguuaagucucaua

SEQ ID NO: 668257 - RNA, 22 nt, Human
ugagauaguauguagcaccuga

SEQ ID NO: 668258 - RNA, 22 nt, Human
ggcccaaggcccaggucgagcu

SEQ ID NO: 668259 - RNA, 22 nt, Human
ucuccugcucagaacagccuca

SEQ ID NO: 668260 - RNA, 22 nt, Human
gaaucucaaauuaagaauuuua

SEQ ID NO: 668261 - RNA, 22 nt, Human
gccuggaguuguggugaagcca

SEQ ID NO: 668262 - RNA, 22 nt, Human
gcagagcugggucuguauccaa

SEQ ID NO: 668263 - RNA, 22 nt, Human
uaagguuuguggggagcaaaag

SEQ ID NO: 668264 - RNA, 22 nt, Human
gccaggcuccaggcccuccuga

SEQ ID NO: 668265 - RNA, 22 nt, Human
cagacaucacacucagauugca

SEQ ID NO: 668266 - RNA, 22 nt, Human
aaaguuuucugccuucauuaga

SEQ ID NO: 668267 - RNA, 22 nt, Human
ccaguuuauaagaaagaaaacc

SEQ ID NO: 668268 - RNA, 22 nt, Human
auacuguaauaccuaaaugaac

SEQ ID NO: 668269 - RNA, 22 nt, Human
ucacagaacaagccugguggag

SEQ ID NO: 668270 - RNA, 22 nt, Human
aggaaacuaacuuaucuuuaua

SEQ ID NO: 668271 - RNA, 22 nt, Human
ucaugcagcuuuuccauucagc

SEQ ID NO: 668272 - RNA, 20 nt, Human
uccuccagaagggcagggug

SEQ ID NO: 668273 - RNA, 22 nt, Human
auuugucuuuggaccugugaga

SEQ ID NO: 668274 - RNA, 22 nt, Human
ccugggagagcugcccggguga

SEQ ID NO: 668275 - RNA, 22 nt, Human
aaugucuacaccguauguuguu

SEQ ID NO: 668276 - RNA, 22 nt, Human
cuuugcauacaauuuuuagaaa

SEQ ID NO: 668277 - RNA, 22 nt, Human
ccuuggcuggaauuacucuggg

SEQ ID NO: 668278 - RNA, 22 nt, Human
ugcagcugggucugcccuggcu

SEQ ID NO: 668279 - RNA, 22 nt, Human
gagccuggacaucucaggccca

SEQ ID NO: 668280 - RNA, 22 nt, Human
ucuugcaugauauucuguauuu

SEQ ID NO: 668281 - RNA, 22 nt, Human
caggcagaaaguauucugugua

SEQ ID NO: 668282 - RNA, 22 nt, Human
cacuacagaaucaaauacgggc

SEQ ID NO: 668283 - RNA, 22 nt, Human
auuaaagcuauccagucaugaa

SEQ ID NO: 668284 - RNA, 22 nt, Human
gucagcaugagcaagggcugac

SEQ ID NO: 668285 - RNA, 22 nt, Human
gccgugggugucauggcccaua

SEQ ID NO: 668286 - RNA, 22 nt, Human
augaugcaccauuauaagaguu

SEQ ID NO: 668287 - RNA, 20 nt, Human
gucgaaaaagauaaacaggc

SEQ ID NO: 668288 - RNA, 22 nt, Human
agaacuguccuuggaggagagu

SEQ ID NO: 668289 - RNA, 22 nt, Human
cccacagguccccaugaacucg

SEQ ID NO: 668290 - RNA, 22 nt, Human
gcagccagugggaugagaaaga

SEQ ID NO: 668291 - RNA, 22 nt, Human
aaaugcuuuggugcugguacag

SEQ ID NO: 668292 - RNA, 22 nt, Human
uccagagcagguggucagaagg

SEQ ID NO: 668293 - RNA, 22 nt, Human
guguuuuaucagacaaaguaua

SEQ ID NO: 668294 - RNA, 22 nt, Human
gcaaagggaaaguggcaggguc

SEQ ID NO: 668295 - RNA, 22 nt, Human
guaaaacugucuaaugguauau

SEQ ID NO: 668296 - RNA, 22 nt, Human
aagcaccucuaugauugcuuuu

SEQ ID NO: 668297 - RNA, 22 nt, Human
gccagagcaucgcacccuccau

SEQ ID NO: 668298 - RNA, 22 nt, Human
uuccuggccaagcagaguggaa

SEQ ID NO: 668299 - RNA, 22 nt, Human
cucuucagguuucugcucugga

SEQ ID NO: 668300 - RNA, 22 nt, Human
ccguggaguugugcugaguaug

SEQ ID NO: 668301 - RNA, 22 nt, Human
ggcccaggaugcaagaacugaa

SEQ ID NO: 668302 - RNA, 22 nt, Human
caguccugggugcagcaggaaa

SEQ ID NO: 668303 - RNA, 22 nt, Human
auucucuggguuccaguaaaug

SEQ ID NO: 668304 - RNA, 22 nt, Human
ggcuccaggugcaugccaggcu

SEQ ID NO: 668305 - RNA, 22 nt, Human
agcugcuuauaagauuugggag

SEQ ID NO: 668306 - RNA, 23 nt, Human
ucaaacuguuauauugccagagu

SEQ ID NO: 668307 - RNA, 22 nt, Human
uugggcagaggcugugcagagg

SEQ ID NO: 668308 - RNA, 22 nt, Human
agaguagccucauagacacuca

SEQ ID NO: 668309 - RNA, 22 nt, Human
ggaggacucaggucuggccaug

SEQ ID NO: 668310 - RNA, 22 nt, Human
aagcccugaccugagaguccgu

SEQ ID NO: 668311 - RNA, 22 nt, Human
uagcuucccuagcuaaagaggu

SEQ ID NO: 668312 - RNA, 22 nt, Human
uacaggaagucucaguacagua

SEQ ID NO: 668313 - RNA, 22 nt, Human
agaaaucaugucuuauuucuau

SEQ ID NO: 668314 - RNA, 22 nt, Human
augacagaggauuguaaagagg

SEQ ID NO: 668315 - RNA, 22 nt, Human
gcuucugaugucagacuucugg

SEQ ID NO: 668316 - RNA, 22 nt, Human
aguccaggcggguauagaggcu

SEQ ID NO: 668317 - RNA, 22 nt, Human
ugcaggugucucugucuagcgu

SEQ ID NO: 668318 - RNA, 22 nt, Human
aagagguuucaugauuuucuua

SEQ ID NO: 668319 - RNA, 22 nt, Human
uauuuauucuuuguacugccuu

SEQ ID NO: 668320 - RNA, 22 nt, Human
uccuuguaaaggagcucuaaca

SEQ ID NO: 668321 - RNA, 22 nt, Human
auacaagugagaaaacugaaga

SEQ ID NO: 668322 - RNA, 22 nt, Human
aagcccugagcacugcagagaa

SEQ ID NO: 668323 - RNA, 21 nt, Human
cuaagcaaggagcagggguag

SEQ ID NO: 668324 - RNA, 22 nt, Human
aguccaagaucaaggugucagg

SEQ ID NO: 668325 - RNA, 22 nt, Human
uuugucauguccuuaacugucu

SEQ ID NO: 668326 - RNA, 22 nt, Human
acaaaugaaccugaaaucucag

SEQ ID NO: 668327 - RNA, 22 nt, Human
aaucacauuagugaaacacuga

SEQ ID NO: 668328 - RNA, 23 nt, Human
uaacucugugaagggugacuggg

SEQ ID NO: 668329 - RNA, 22 nt, Human
cugcuuggcuuauaaccucagg

SEQ ID NO: 668330 - RNA, 22 nt, Human
agcuauagcuggaucuuaagug

SEQ ID NO: 668331 - RNA, 22 nt, Human
cuacaagauuuuuaaaacugua

SEQ ID NO: 668332 - RNA, 22 nt, Human
aaugcuuugacuauaucuauaa

SEQ ID NO: 668333 - RNA, 22 nt, Human
ugugugugcaggagagcaggug

SEQ ID NO: 668334 - RNA, 22 nt, Human
aaaggaagauugagcuuuucca

SEQ ID NO: 668335 - RNA, 22 nt, Human
aguuccaaagccuguauucuua

SEQ ID NO: 668336 - RNA, 22 nt, Human
auuugccuugugauuuguaagu

SEQ ID NO: 668337 - RNA, 19 nt, Human
ccugaguugggugaagaga

SEQ ID NO: 668338 - RNA, 22 nt, Human
aaaccacuccugauucacuuca

SEQ ID NO: 668339 - RNA, 22 nt, Human
ucaagcaacugaauucuaaaag

SEQ ID NO: 668340 - RNA, 22 nt, Human
uuacaaagagugccagagugug

SEQ ID NO: 668341 - RNA, 22 nt, Human
gagaaaaucuugggucaagaau

SEQ ID NO: 668342 - RNA, 22 nt, Human
ggcagcaggagccaucugguag

SEQ ID NO: 668343 - RNA, 23 nt, Human
gagagcccauuggcagggguacc

SEQ ID NO: 668344 - RNA, 22 nt, Human
gaaaaaugcuccaaaucugugg

SEQ ID NO: 668345 - RNA, 22 nt, Human
acaggaacagcuugauggcauc

SEQ ID NO: 668346 - RNA, 22 nt, Human
cugggccuggggcuguugagag

SEQ ID NO: 668347 - RNA, 22 nt, Human
cugaggccuggccccaccacag

SEQ ID NO: 668348 - RNA, 22 nt, Human
agcacagugcucuggacagagu

SEQ ID NO: 668349 - RNA, 22 nt, Human
agacacagucugucuggaggag

SEQ ID NO: 668350 - RNA, 22 nt, Human
cuguuaaaauguggucuuaaaa

SEQ ID NO: 668351 - RNA, 22 nt, Human
ugucauuuaauagauaugaugg

SEQ ID NO: 668352 - RNA, 22 nt, Human
ucugagcaccuuauauucuuga

SEQ ID NO: 668353 - RNA, 22 nt, Human
gaaggggaaaguugagcaaaua

SEQ ID NO: 668354 - RNA, 22 nt, Human
cugggggucgcgccucugggca

SEQ ID NO: 668355 - RNA, 22 nt, Human
uagagaaauaagcuuugccuug

SEQ ID NO: 668356 - RNA, 22 nt, Human
aauccaauccuacucagaaagu

SEQ ID NO: 668357 - RNA, 18 nt, Human
ucacagaauauugagugg

SEQ ID NO: 668358 - RNA, 22 nt, Human
gaaccucuaguuuguucuuuga

SEQ ID NO: 668359 - RNA, 22 nt, Human
ucuggcucggauuugucuagca

SEQ ID NO: 668360 - RNA, 22 nt, Human
cuguaugaaauugucauuuuua

SEQ ID NO: 668361 - RNA, 22 nt, Human
uacaaagcuguauagccugguc

SEQ ID NO: 668362 - RNA, 22 nt, Human
aggagcuagccaggcauaugca

SEQ ID NO: 668363 - RNA, 22 nt, Human
auacaguaaccacauucuauag

SEQ ID NO: 668364 - RNA, 22 nt, Human
ucagauuugaugugguuuucua

SEQ ID NO: 668365 - RNA, 22 nt, Human
ugaaauacugagugaaagaauu

SEQ ID NO: 668366 - RNA, 22 nt, Human
gugugucuugaccaggaucgga

SEQ ID NO: 668367 - RNA, 22 nt, Human
cagaaggcuuuguggaguagac

SEQ ID NO: 668368 - RNA, 22 nt, Human
uuccucuggaggcucuaggaga

SEQ ID NO: 668369 - RNA, 22 nt, Human
ugcaaacaggagaguaaguaua

SEQ ID NO: 668370 - RNA, 22 nt, Human
cacugaggcugggggagaaggu

SEQ ID NO: 668371 - RNA, 22 nt, Human
ccuggggagagaaagcccagcc

SEQ ID NO: 668372 - RNA, 22 nt, Human
ggaggugcugaucccagucaac

SEQ ID NO: 668373 - RNA, 22 nt, Human
caugucugaguagagugugauu

SEQ ID NO: 668374 - RNA, 22 nt, Human
cuccagaggaaagcacauagug

SEQ ID NO: 668375 - RNA, 22 nt, Human
acugggcugccugguucuucua

SEQ ID NO: 668376 - RNA, 22 nt, Human
agggcagcagcggcccaggccu

SEQ ID NO: 668377 - RNA, 22 nt, Human
cugcugcaaucuggcuuccaug

SEQ ID NO: 668378 - RNA, 22 nt, Human
ccacuguaaguuugaaaauaac

SEQ ID NO: 668379 - RNA, 18 nt, Human
uucaggucagaaagaugg

SEQ ID NO: 668380 - RNA, 22 nt, Human
aagaggaacugggggcugaguc

SEQ ID NO: 668381 - RNA, 22 nt, Human
guacauauuacagacaaagcuu

SEQ ID NO: 668382 - RNA, 22 nt, Human
agguucucacacgucuacaccc

SEQ ID NO: 668383 - RNA, 20 nt, Human
cuccaggggaagagccuucc

SEQ ID NO: 668384 - RNA, 22 nt, Human
gcagcagcucugaaugggcccc

SEQ ID NO: 668385 - RNA, 20 nt, Human
ucccugccuuuuacugcugg

SEQ ID NO: 668386 - RNA, 22 nt, Human
cuggcucuuucagccgcuggag

SEQ ID NO: 668387 - RNA, 20 nt, Human
cucuggcuccgcgugaccgc

SEQ ID NO: 668388 - RNA, 22 nt, Human
aagucucugacucacacaaugu

SEQ ID NO: 668389 - RNA, 22 nt, Human
auauucuugaagggagauuaua

SEQ ID NO: 668390 - RNA, 22 nt, Human
gagcagggagacaacucuggug

SEQ ID NO: 668391 - RNA, 22 nt, Human
gaccacagauuccuaaguggca

SEQ ID NO: 668392 - RNA, 22 nt, Human
aagaauaaguagaugggagaag

SEQ ID NO: 668393 - RNA, 22 nt, Human
cgcccuccacacagccccuggc

SEQ ID NO: 668394 - RNA, 22 nt, Human
ucugggcuugccugguugugca

SEQ ID NO: 668395 - RNA, 22 nt, Human
uucuaaucccagcucuacuacu

SEQ ID NO: 668396 - RNA, 22 nt, Human
guuauuuucauuggcucagacu

SEQ ID NO: 668397 - RNA, 20 nt, Human
gagauccucaucuguaaagu

SEQ ID NO: 668398 - RNA, 22 nt, Human
ucuucaugaaugaaucuuugac

SEQ ID NO: 668399 - RNA, 22 nt, Human
acaguaacucuuuuacccuccu

SEQ ID NO: 668400 - RNA, 22 nt, Human
cuuuauguccuugaagaguugu

SEQ ID NO: 668401 - RNA, 22 nt, Human
augucuuugccauaguucauau

SEQ ID NO: 668402 - RNA, 22 nt, Human
ucgaacucauagucguagcugu

SEQ ID NO: 668403 - RNA, 22 nt, Human
cuggcacauuguaauauauaca

SEQ ID NO: 668404 - RNA, 22 nt, Human
ugcugaguauuuguuugaauaa

SEQ ID NO: 668405 - RNA, 22 nt, Human
gaugaggucuacauuguuaaaa

SEQ ID NO: 668406 - RNA, 22 nt, Human
gcugccucccccauggcuggaa

SEQ ID NO: 668407 - RNA, 22 nt, Human
ccaacacagauguguuaguguu

SEQ ID NO: 668408 - RNA, 22 nt, Human
cacaggaaucagcauuaauggc

SEQ ID NO: 668409 - RNA, 22 nt, Human
ucagcuuucuauguugcuaaac

SEQ ID NO: 668410 - RNA, 22 nt, Human
caggcagagcaacugguccaga

SEQ ID NO: 668411 - RNA, 22 nt, Human
aauuauggaauuuuuagagaag

SEQ ID NO: 668412 - RNA, 22 nt, Human
uagaaauguaggcuuccugaca

SEQ ID NO: 668413 - RNA, 22 nt, Human
ugacccaucaggccacaugagg

SEQ ID NO: 668414 - RNA, 22 nt, Human
ucagacccaggugccaagcugu

SEQ ID NO: 668415 - RNA, 22 nt, Human
cucauuagacagguauacuuua

SEQ ID NO: 668416 - RNA, 22 nt, Human
aaucacauagccaucucuuuga

SEQ ID NO: 668417 - RNA, 22 nt, Human
ucaggcuggggugcuaaggugu

SEQ ID NO: 668418 - RNA, 22 nt, Human
acagauguaccuuagugauggg

SEQ ID NO: 668419 - RNA, 22 nt, Human
gaauagcuuagauuccuuagug

SEQ ID NO: 668420 - RNA, 21 nt, Human
agugaaaugaaguguaugcuc

SEQ ID NO: 668421 - RNA, 22 nt, Human
ggagccagggaagcugcuuccu

SEQ ID NO: 668422 - RNA, 22 nt, Human
gcuagagaccagaggccuugaa

SEQ ID NO: 668423 - RNA, 22 nt, Human
caucaugccccgcuacagugca

SEQ ID NO: 668424 - RNA, 22 nt, Human
ucuacagucaaguuauauugcu

SEQ ID NO: 668425 - RNA, 22 nt, Human
cucugggcccacuuaaaucugg

SEQ ID NO: 668426 - RNA, 22 nt, Human
auucuuucauauaaaggcucag

SEQ ID NO: 668427 - RNA, 22 nt, Human
aaucuggcauguaagcuuagag

SEQ ID NO: 668428 - RNA, 22 nt, Human
ugagccaguucuucagauccau

SEQ ID NO: 668429 - RNA, 22 nt, Human
ugggcaggauaauaucucaugu

SEQ ID NO: 668430 - RNA, 22 nt, Human
ggugagggaguggaacgaggug

SEQ ID NO: 668431 - RNA, 22 nt, Human
uucagcacuggacagcgagucu

SEQ ID NO: 668432 - RNA, 22 nt, Human
auucaguaggugugaacuuauu

SEQ ID NO: 668433 - RNA, 22 nt, Human
cugcuugccuggacagcguuag

SEQ ID NO: 668434 - RNA, 22 nt, Human
uauuauugaaucaguucuuuga

SEQ ID NO: 668435 - RNA, 22 nt, Human
acaugccuccauugagcugugg

SEQ ID NO: 668436 - RNA, 22 nt, Human
ucacaaaucgaagccuuauaau

SEQ ID NO: 668437 - RNA, 22 nt, Human
ucggagaguuggaaguagcaga

SEQ ID NO: 668438 - RNA, 22 nt, Human
agaagcguuccauuugaugggu

SEQ ID NO: 668439 - RNA, 22 nt, Human
aaggagaagucuguugagauug

SEQ ID NO: 668440 - RNA, 22 nt, Human
cagguagguauggugcagucuu

SEQ ID NO: 668441 - RNA, 22 nt, Human
ucaggaaagaguaauguauaca

SEQ ID NO: 668442 - RNA, 22 nt, Human
ucauuuguacuugugugcuugu

SEQ ID NO: 668443 - RNA, 22 nt, Human
gcagaagcuguucgaaggccgc

SEQ ID NO: 668444 - RNA, 22 nt, Human
uggagacugauaaaggcuauug

SEQ ID NO: 668445 - RNA, 22 nt, Human
uuucagaguugucuucuugacc

SEQ ID NO: 668446 - RNA, 22 nt, Human
ugggcugccggcaggcucugcc

SEQ ID NO: 668447 - RNA, 22 nt, Human
ugcacauggcaaugcugcuccc

SEQ ID NO: 668448 - RNA, 22 nt, Human
caccuucagaaugcuccaggca

SEQ ID NO: 668449 - RNA, 22 nt, Human
agggaagagcuugcaagaaacc

SEQ ID NO: 668450 - RNA, 22 nt, Human
gccugcagcugcuuccacacac

SEQ ID NO: 668451 - RNA, 21 nt, Human
uucaguuucuuccucaucuau

SEQ ID NO: 668452 - RNA, 22 nt, Human
agcucuuccugcaccuguggcu

SEQ ID NO: 668453 - RNA, 22 nt, Human
uucauugaguauagggguauac

SEQ ID NO: 668454 - RNA, 22 nt, Human
cuaggaaaugaauacaguacac

SEQ ID NO: 668455 - RNA, 20 nt, Human
aagcugucagagguggacag

SEQ ID NO: 668456 - RNA, 22 nt, Human
uuauuccaguaaucucuguaau

SEQ ID NO: 668457 - RNA, 22 nt, Human
aaccuuccugaggaaagucuaa

SEQ ID NO: 668458 - RNA, 22 nt, Human
agcagcugaaaggcaaacuucu

SEQ ID NO: 668459 - RNA, 22 nt, Human
uggcugaaggaagauucuucua

SEQ ID NO: 668460 - RNA, 22 nt, Human
auauaucaugaguaaaacuuga

SEQ ID NO: 668461 - RNA, 23 nt, Human
gggaaguggggauuugaagucau

SEQ ID NO: 668462 - RNA, 23 nt, Human
aaacuacauuuauaguuuuucuc

SEQ ID NO: 668463 - RNA, 22 nt, Human
ugggugaguggagggcauucua

SEQ ID NO: 668464 - RNA, 22 nt, Human
ccagcuucucucugaugcagcu

SEQ ID NO: 668465 - RNA, 22 nt, Human
uccaugcaaacaguggcuagcu

SEQ ID NO: 668466 - RNA, 22 nt, Human
uuggcucuggaacuauuucuga

SEQ ID NO: 668467 - RNA, 22 nt, Human
ggagcccugcugacaugggugu

SEQ ID NO: 668468 - RNA, 22 nt, Human
cagaguguugaccauaagccca

SEQ ID NO: 668469 - RNA, 22 nt, Human
gcugcccucucuggccccacac

SEQ ID NO: 668470 - RNA, 22 nt, Human
cuccagggaggucugcaggacu

SEQ ID NO: 668471 - RNA, 22 nt, Human
cagcuggcccuuugguagccuu

SEQ ID NO: 668472 - RNA, 20 nt, Human
ugcaguguggaagacugaga

SEQ ID NO: 668473 - RNA, 22 nt, Human
aagaauguggguggauaugaug

SEQ ID NO: 668474 - RNA, 22 nt, Human
aacccaggaggcagaggcugca

SEQ ID NO: 668475 - RNA, 22 nt, Human
aguguuuuggagugggaaggca

SEQ ID NO: 668476 - RNA, 22 nt, Human
agccagagcugaugucauucuc

SEQ ID NO: 668477 - RNA, 22 nt, Human
gcucaggaaggcucaaccagga

SEQ ID NO: 668478 - RNA, 22 nt, Human
acaguggauauauuaaaugaga

SEQ ID NO: 668479 - RNA, 22 nt, Human
uauggguagagauggggguuag

SEQ ID NO: 668480 - RNA, 22 nt, Human
cagcucuguugccaaagugggc

SEQ ID NO: 668481 - RNA, 22 nt, Human
uuccaaaggaauggggagcuau

SEQ ID NO: 668482 - RNA, 22 nt, Human
caaauacuacgauucuugcagu

SEQ ID NO: 668483 - RNA, 22 nt, Human
ucccagaguauuagcaauugcu

SEQ ID NO: 668484 - RNA, 22 nt, Human
aucugggcagggcagcaaggcg

SEQ ID NO: 668485 - RNA, 22 nt, Human
ugugugaagcacauguucaagg

SEQ ID NO: 668486 - RNA, 22 nt, Human
guggaaauuuuaggaucaucuu

SEQ ID NO: 668487 - RNA, 22 nt, Human
ugugaaaucugaugaauugacc

SEQ ID NO: 668488 - RNA, 22 nt, Human
ucacaucaacauuauagcauga

SEQ ID NO: 668489 - RNA, 21 nt, Human
gagugucuaauccaggcuguc

SEQ ID NO: 668490 - RNA, 22 nt, Human
ggcucaggggccaggccugucc

SEQ ID NO: 668491 - RNA, 22 nt, Human
auacuuuaacguggcgaaccuu

SEQ ID NO: 668492 - RNA, 22 nt, Human
cuuuugauggaguucaagaagc

SEQ ID NO: 668493 - RNA, 22 nt, Human
aaggaucaaguggauuuucuua

SEQ ID NO: 668494 - RNA, 22 nt, Human
aauucugcauaagguggcucug

SEQ ID NO: 668495 - RNA, 22 nt, Human
ccugccugggcucacuugccag

SEQ ID NO: 668496 - RNA, 22 nt, Human
ucaugggguuuggcuggauguc

SEQ ID NO: 668497 - RNA, 22 nt, Human
cauaaucccaggcuugcauuca

SEQ ID NO: 668498 - RNA, 22 nt, Human
ucauuauuuuggacuggagugu

SEQ ID NO: 668499 - RNA, 22 nt, Human
uauuacagggcuaguuaugagu

SEQ ID NO: 668500 - RNA, 22 nt, Human
auuucaaguguugagcucauaa

SEQ ID NO: 668501 - RNA, 22 nt, Human
agugcauugcaucucugcuuca

SEQ ID NO: 668502 - RNA, 22 nt, Human
auguguauccaucugucuauuu

SEQ ID NO: 668503 - RNA, 22 nt, Human
cagagcacccaaggagcauuug

SEQ ID NO: 668504 - RNA, 22 nt, Human
aagcagcaaguuuauuucuauc

SEQ ID NO: 668505 - RNA, 22 nt, Human
ucuaaugaaagauguaggaacu

SEQ ID NO: 668506 - RNA, 22 nt, Human
ucccugggagaugaugaugagg

SEQ ID NO: 668507 - RNA, 22 nt, Human
uucugccuggcaggaggacugu

SEQ ID NO: 668508 - RNA, 22 nt, Human
aaacagaguuugguaaauagcc

SEQ ID NO: 668509 - RNA, 22 nt, Human
uucaggauggcggauguugggg

SEQ ID NO: 668510 - RNA, 22 nt, Human
aagauauaauaacuguugucau

SEQ ID NO: 668511 - RNA, 22 nt, Human
gagucacaaaagaugcccaggg

SEQ ID NO: 668512 - RNA, 22 nt, Human
uccaggcccugggaugggagca

SEQ ID NO: 668513 - RNA, 22 nt, Human
caugggcuugcucucugagcuc

SEQ ID NO: 668514 - RNA, 22 nt, Human
ggcucacaaaauguugcuuaau

SEQ ID NO: 668515 - RNA, 22 nt, Human
gaagcagaagguuuggacgugc

SEQ ID NO: 668516 - RNA, 22 nt, Human
uugaaugaauuugagcagagau

SEQ ID NO: 668517 - RNA, 22 nt, Human
gccugagaguugaaguucagug

SEQ ID NO: 668518 - RNA, 22 nt, Human
cccaaagggcuuccuguucuca

SEQ ID NO: 668519 - RNA, 22 nt, Human
gacagucccccagcagcaaacc

SEQ ID NO: 668520 - RNA, 22 nt, Human
aggauuuaaucaguuggcauuu

SEQ ID NO: 668521 - RNA, 22 nt, Human
augcccugcugcuggggcagug

SEQ ID NO: 668522 - RNA, 22 nt, Human
cacugcccuggggguugccauc

SEQ ID NO: 668523 - RNA, 22 nt, Human
guccucaggaaggcuuucugac

SEQ ID NO: 668524 - RNA, 22 nt, Human
aggucagaagugccagggaauu

SEQ ID NO: 668525 - RNA, 21 nt, Human
uuugcuucaauuccagaagcu

SEQ ID NO: 668526 - RNA, 22 nt, Human
aguaugaagcugaaugauuuua

SEQ ID NO: 668527 - RNA, 22 nt, Human
ucaaggaagauagcuauuauga

SEQ ID NO: 668528 - RNA, 22 nt, Human
cuaggcacucacguggcuuuag

SEQ ID NO: 668529 - RNA, 22 nt, Human
gcugccucaggcaccuccuggc

SEQ ID NO: 668530 - RNA, 22 nt, Human
aaauuggcaguucagggaauua

SEQ ID NO: 668531 - RNA, 22 nt, Human
auuuacacuaaaggaaggagga

SEQ ID NO: 668532 - RNA, 18 nt, Human
cagaugcuaggccuccag

SEQ ID NO: 668533 - RNA, 22 nt, Human
ugagaaagacagacauuccuaa

SEQ ID NO: 668534 - RNA, 22 nt, Human
acacuguugcuggcacagacag

SEQ ID NO: 668535 - RNA, 22 nt, Human
uuguggaagcccuaugagagac

SEQ ID NO: 668536 - RNA, 22 nt, Human
cuagccaacaccuuauuuucug

SEQ ID NO: 668537 - RNA, 22 nt, Human
gugauaaaauagaaacaguggu

SEQ ID NO: 668538 - RNA, 22 nt, Human
uugaaaugagacuaauugauug

SEQ ID NO: 668539 - RNA, 22 nt, Human
uuuagcaaauauuucuguugau

SEQ ID NO: 668540 - RNA, 22 nt, Human
acugagaacuuggggacagagg

SEQ ID NO: 668541 - RNA, 21 nt, Human
gagcugggcgaggcuccgggg

SEQ ID NO: 668542 - RNA, 22 nt, Human
aguguccucuauuaugacuuua

SEQ ID NO: 668543 - RNA, 22 nt, Human
auugucacuuaaaagugcaugu

SEQ ID NO: 668544 - RNA, 22 nt, Human
uagaucauuugaauugagguag

SEQ ID NO: 668545 - RNA, 22 nt, Human
uucuacacuuuucauuagcuag

SEQ ID NO: 668546 - RNA, 21 nt, Human
ccaaagaacugccauuuguca

SEQ ID NO: 668547 - RNA, 22 nt, Human
aauacuguaugagcuaugguag

SEQ ID NO: 668548 - RNA, 22 nt, Human
ggguguagaaagaacccucugg

SEQ ID NO: 668549 - RNA, 22 nt, Human
agugucugagcuaucauuaggg

SEQ ID NO: 668550 - RNA, 22 nt, Human
cagggccaagcugcagcaucug

SEQ ID NO: 668551 - RNA, 23 nt, Human
cccuggccuuggggcacaggcug

SEQ ID NO: 668552 - RNA, 22 nt, Human
auaugaauuuggcuggaaaggu

SEQ ID NO: 668553 - RNA, 22 nt, Human
auuuuaucugcuuacuuucagg

SEQ ID NO: 668554 - RNA, 22 nt, Human
ucuguccagcucuggggcucac

SEQ ID NO: 668555 - RNA, 23 nt, Human
augacacuccugugcgcacccug

SEQ ID NO: 668556 - RNA, 22 nt, Human
agugaugucuaacuugaucccu

SEQ ID NO: 668557 - RNA, 22 nt, Human
ugccugucucugacugccauua

SEQ ID NO: 668558 - RNA, 22 nt, Human
ggggcuucuuucugccaccgac

SEQ ID NO: 668559 - RNA, 22 nt, Human
ggugaaggucagagcaggaaaa

SEQ ID NO: 668560 - RNA, 20 nt, Human
augcuuaaguguucauuauu

SEQ ID NO: 668561 - RNA, 22 nt, Human
ugcauccuccuuuguccucuug

SEQ ID NO: 668562 - RNA, 22 nt, Human
gaaggccaagaggcuccaagau

SEQ ID NO: 668563 - RNA, 22 nt, Human
auugaagagaagcuaaauagag

SEQ ID NO: 668564 - RNA, 23 nt, Human
uguguucucacacagaugcagua

SEQ ID NO: 668565 - RNA, 18 nt, Human
gggguagaguguccuauu

SEQ ID NO: 668566 - RNA, 22 nt, Human
ugggcauggacuguggagccgc

SEQ ID NO: 668567 - RNA, 22 nt, Human
acaaaugauuuuccaagccagu

SEQ ID NO: 668568 - RNA, 22 nt, Human
aacaggcacuaagcaugugggg

SEQ ID NO: 668569 - RNA, 22 nt, Human
cugcaguagcaccuguggcuuu

SEQ ID NO: 668570 - RNA, 22 nt, Human
guuaaugccuacauauuaagca

SEQ ID NO: 668571 - RNA, 22 nt, Human
auucuagaugcuguaaguagca

SEQ ID NO: 668572 - RNA, 22 nt, Human
gagcuggaggaccaggacuggg

SEQ ID NO: 668573 - RNA, 22 nt, Human
uuggaugagagggugugguaca

SEQ ID NO: 668574 - RNA, 22 nt, Human
ugcccucuaggcuacaguucca

SEQ ID NO: 668575 - RNA, 22 nt, Human
uugggcugaggagggcguggcc

SEQ ID NO: 668576 - RNA, 22 nt, Human
acucagcuaaacucagucuaug

SEQ ID NO: 668577 - RNA, 22 nt, Human
aggagccagcguuccucaggau

SEQ ID NO: 668578 - RNA, 22 nt, Human
aagcugcccaagacugaagcau

SEQ ID NO: 668579 - RNA, 22 nt, Human
uaagaguuagggcuagcaauau

SEQ ID NO: 668580 - RNA, 22 nt, Human
ugucagcucccagucagagaga

SEQ ID NO: 668581 - RNA, 23 nt, Human
uucuaaccuuaaagcccuuugga

SEQ ID NO: 668582 - RNA, 22 nt, Human
uggcagcacaagguggcccaug

SEQ ID NO: 668583 - RNA, 21 nt, Human
ugaaugaggaggauggcauuu

SEQ ID NO: 668584 - RNA, 22 nt, Human
gcagggcauagaggcacggagg

SEQ ID NO: 668585 - RNA, 22 nt, Human
cagcaugaauguguucguaggg

SEQ ID NO: 668586 - RNA, 22 nt, Human
gcagggcaaacccagguguuca

SEQ ID NO: 668587 - RNA, 22 nt, Human
ggcugagacaaccugggaccca

SEQ ID NO: 668588 - RNA, 23 nt, Human
ucaguacucugcuggguauagag

SEQ ID NO: 668589 - RNA, 22 nt, Human
aaagcuauuuguuaugagagaa

SEQ ID NO: 668590 - RNA, 22 nt, Human
aggaagauguguuuagcagguu

SEQ ID NO: 668591 - RNA, 21 nt, Human
uagaaucacuaauaagaugua

SEQ ID NO: 668592 - RNA, 22 nt, Human
ugaggggcgcuggcagguuccu

SEQ ID NO: 668593 - RNA, 22 nt, Human
agaaaggagaccagcucugccc

SEQ ID NO: 668594 - RNA, 22 nt, Human
cuuuucucugcaccauguguga

SEQ ID NO: 668595 - RNA, 22 nt, Human
uggagccagcccaggccccucu

SEQ ID NO: 668596 - RNA, 22 nt, Human
cauaccuuucucaagcacaugu

SEQ ID NO: 668597 - RNA, 22 nt, Human
gucuggaggggagauuuggguu

SEQ ID NO: 668598 - RNA, 22 nt, Human
gaaaucuugcucauugugacaa

SEQ ID NO: 668599 - RNA, 22 nt, Human
cccaaggcauggcaugguggca

SEQ ID NO: 668600 - RNA, 22 nt, Human
acagggucaagggugcuacaag

SEQ ID NO: 668601 - RNA, 22 nt, Human
agacaaauugggacauuguguu

SEQ ID NO: 668602 - RNA, 22 nt, Human
uacagaaagaccucucgggaaa

SEQ ID NO: 668603 - RNA, 22 nt, Human
uaguccauuuucacacugcuga

SEQ ID NO: 668604 - RNA, 22 nt, Human
agucuccacuugacaucagcag

SEQ ID NO: 668605 - RNA, 22 nt, Human
gaggccacagugucugggggcc

SEQ ID NO: 668606 - RNA, 22 nt, Human
cagggucauggcaccugcacgg

SEQ ID NO: 668607 - RNA, 22 nt, Human
uucuucaaccaucuacauaaac

SEQ ID NO: 668608 - RNA, 22 nt, Human
uaagcaaugcuguaguucaguc

SEQ ID NO: 668609 - RNA, 22 nt, Human
accucugcaaugcaaugucaug

SEQ ID NO: 668610 - RNA, 22 nt, Human
ugccauccaacaguuccaucuu

SEQ ID NO: 668611 - RNA, 22 nt, Human
ucaccagggcuccagccagccu

SEQ ID NO: 668612 - RNA, 22 nt, Human
ucaagucuggagaucuggaacu

SEQ ID NO: 668613 - RNA, 22 nt, Human
accccuucuccuggcuguucca

SEQ ID NO: 668614 - RNA, 22 nt, Human
agggaaggaaaagcugucgcuu

SEQ ID NO: 668615 - RNA, 22 nt, Human
ugcugugacagagucucaugga

SEQ ID NO: 668616 - RNA, 22 nt, Human
caguagcaggcacucagcacgu

SEQ ID NO: 668617 - RNA, 22 nt, Human
agggagagaaguuauacaagau

SEQ ID NO: 668618 - RNA, 22 nt, Human
uaggcuguaagagagggcagag

SEQ ID NO: 668619 - RNA, 22 nt, Human
agugaaauaugcccauugcugu

SEQ ID NO: 668620 - RNA, 22 nt, Human
gcacagggagacagccguggcc

SEQ ID NO: 668621 - RNA, 22 nt, Human
ugauaaauccauguaaauggua

SEQ ID NO: 668622 - RNA, 22 nt, Human
cagucccagcugcucagaaggc

SEQ ID NO: 668623 - RNA, 22 nt, Human
ugacagagugacacucuugucu

SEQ ID NO: 668624 - RNA, 22 nt, Human
uuucuuggaugugaaacuaggg

SEQ ID NO: 668625 - RNA, 22 nt, Human
cuuuuccacugagccucacaaa

SEQ ID NO: 668626 - RNA, 22 nt, Human
aauaauacuucguaaaguuguu

SEQ ID NO: 668627 - RNA, 22 nt, Human
ucugagguuaauccugcugcau

SEQ ID NO: 668628 - RNA, 23 nt, Human
gccugggacugguagugugaccu

SEQ ID NO: 668629 - RNA, 22 nt, Human
cagcagcugguugaauccuucu

SEQ ID NO: 668630 - RNA, 22 nt, Human
gucucugccuggggggaucaga

SEQ ID NO: 668631 - RNA, 22 nt, Human
uuagccuuagaagcuuagcaaa

SEQ ID NO: 668632 - RNA, 22 nt, Human
ucauaacagcuaagucccuuuc

SEQ ID NO: 668633 - RNA, 22 nt, Human
auuuuacuuugugaauauugac

SEQ ID NO: 668634 - RNA, 21 nt, Human
ucccugugagcagcucuuccu

SEQ ID NO: 668635 - RNA, 22 nt, Human
uccuugggguaacuccagccug

SEQ ID NO: 668636 - RNA, 22 nt, Human
gcuguauuggaacacauccaug

SEQ ID NO: 668637 - RNA, 22 nt, Human
ugcaugcacguaucugcgugug

SEQ ID NO: 668638 - RNA, 22 nt, Human
agggcuuguggucguggcugug

SEQ ID NO: 668639 - RNA, 22 nt, Human
ccuccuggugggcgcuucuggc

SEQ ID NO: 668640 - RNA, 22 nt, Human
cucucuucccgugaguguugca

SEQ ID NO: 668641 - RNA, 22 nt, Human
auacacauauauacacguuuaa

SEQ ID NO: 668642 - RNA, 22 nt, Human
cccagcagauggcuaugugcua

SEQ ID NO: 668643 - RNA, 22 nt, Human
uuggccagcgacgaccuucuua

SEQ ID NO: 668644 - RNA, 22 nt, Human
ugugacagucguuaggagcuca

SEQ ID NO: 668645 - RNA, 22 nt, Human
uggagcugagaguuaauaagga

SEQ ID NO: 668646 - RNA, 22 nt, Human
cguauuucaucuccuuucugcu

SEQ ID NO: 668647 - RNA, 22 nt, Human
uggggcaguggcuuuucacccu

SEQ ID NO: 668648 - RNA, 22 nt, Human
cugggucuggugucaggcgacg

SEQ ID NO: 668649 - RNA, 22 nt, Human
ucacagcuccagacugcaacuc

SEQ ID NO: 668650 - RNA, 21 nt, Human
cacuggaauuuucugugacau

SEQ ID NO: 668651 - RNA, 21 nt, Human
cacaugugaauuacugaacug

SEQ ID NO: 668652 - RNA, 22 nt, Human
augaauccaaaguuuacuauua

SEQ ID NO: 668653 - RNA, 16 nt, Human
cuucacagaggagagu

SEQ ID NO: 668654 - RNA, 20 nt, Human
cucugcuuuccaccuuucag

SEQ ID NO: 668655 - RNA, 22 nt, Human
uugcuugucuucccuuuaccuc

SEQ ID NO: 668656 - RNA, 22 nt, Human
agauaaugauucugcauuucua

SEQ ID NO: 668657 - RNA, 22 nt, Human
gcucaggacccaggugugaccu

SEQ ID NO: 668658 - RNA, 22 nt, Human
uaacauuaaaagagauaauuga

SEQ ID NO: 668659 - RNA, 22 nt, Human
uauggaaacuaauucauuuuuc

SEQ ID NO: 668660 - RNA, 22 nt, Human
agggaguguaaauggugcucag

SEQ ID NO: 668661 - RNA, 22 nt, Human
agccuggagaagauguguauug

SEQ ID NO: 668662 - RNA, 22 nt, Human
aaaucucagcccuuauuuuaga

SEQ ID NO: 668663 - RNA, 18 nt, Human
uagaagugugcuauacaa

SEQ ID NO: 668664 - RNA, 20 nt, Human
ugccuuuccuguuucaucuu

SEQ ID NO: 668665 - RNA, 22 nt, Human
aagauacauauuuguucuagug

SEQ ID NO: 668666 - RNA, 22 nt, Human
auaagugauauuuagcuauaga

SEQ ID NO: 668667 - RNA, 20 nt, Human
ccaggcuggcaaaugggggc

SEQ ID NO: 668668 - RNA, 22 nt, Human
agggcugcuuugcuaaauaugg

SEQ ID NO: 668669 - RNA, 22 nt, Human
uugagaaaggggucaauaucuc

SEQ ID NO: 668670 - RNA, 22 nt, Human
auuagcagcuuucuggucucua

SEQ ID NO: 668671 - RNA, 22 nt, Human
aagcaagaguuggagugauguu

SEQ ID NO: 668672 - RNA, 22 nt, Human
ugaggugguuacuguggugcuc

SEQ ID NO: 668673 - RNA, 22 nt, Human
ccccuguguuguucaaggguca

SEQ ID NO: 668674 - RNA, 22 nt, Human
uuuaacagaugugaaauuuuca

SEQ ID NO: 668675 - RNA, 14 nt, Human
gcaggcggaucacu

SEQ ID NO: 668676 - RNA, 22 nt, Human
acaauguuuuuguucaaagagu

SEQ ID NO: 668677 - RNA, 19 nt, Human
uccagccccucugugugug

SEQ ID NO: 668678 - RNA, 22 nt, Human
aagagcaggacagaaucagaac

SEQ ID NO: 668679 - RNA, 22 nt, Human
uggaguugcagcuaccagacau

SEQ ID NO: 668680 - RNA, 19 nt, Human
uccuggggaggggcauggc

SEQ ID NO: 668681 - RNA, 22 nt, Human
uuuguguuguacuucugugcau

SEQ ID NO: 668682 - RNA, 22 nt, Human
ucagaugccuguggggucuagg

SEQ ID NO: 668683 - RNA, 22 nt, Human
aauguucaaaagcaucagugaa

SEQ ID NO: 668684 - RNA, 20 nt, Human
ccugugcuuaucacuugcug

SEQ ID NO: 668685 - RNA, 23 nt, Human
cagugugacgaggugaggcaggc

SEQ ID NO: 668686 - RNA, 22 nt, Human
cuggcaggcagacuucugcaag

SEQ ID NO: 668687 - RNA, 22 nt, Human
guagaacuaggacuucagguau

SEQ ID NO: 668688 - RNA, 22 nt, Human
uccacaucaagggcagagaggu

SEQ ID NO: 668689 - RNA, 22 nt, Human
uccugggguccugacugcuucc

SEQ ID NO: 668690 - RNA, 22 nt, Human
aggagccaggccccauggggcu

SEQ ID NO: 668691 - RNA, 22 nt, Human
agauggguaacuggagucugcu

SEQ ID NO: 668692 - RNA, 22 nt, Human
aagcagaggguauggccagguu

SEQ ID NO: 668693 - RNA, 22 nt, Human
aggcuucagccuagagcuggag

SEQ ID NO: 668694 - RNA, 22 nt, Human
aaauguacgggaguagaauuag

SEQ ID NO: 668695 - RNA, 22 nt, Human
caugcuaaaccagaacauagga

SEQ ID NO: 668696 - RNA, 20 nt, Human
uucagaggugaaguuguggu

SEQ ID NO: 668697 - RNA, 22 nt, Human
uccagacugcccugcacaugug

SEQ ID NO: 668698 - RNA, 22 nt, Human
gguggccucucaugcaagguag

SEQ ID NO: 668699 - RNA, 22 nt, Human
augugucugugggcacacacac

SEQ ID NO: 668700 - RNA, 22 nt, Human
gagcugggacuuggaauccaca

SEQ ID NO: 668701 - RNA, 22 nt, Human
uuggaagaaauaucaauagugu

SEQ ID NO: 668702 - RNA, 23 nt, Human
ggccuggcccagggcccugauga

SEQ ID NO: 668703 - RNA, 22 nt, Human
ccagcccugccucucagggccc

SEQ ID NO: 668704 - RNA, 22 nt, Human
accugaaaccaacuuguguacu

SEQ ID NO: 668705 - RNA, 23 nt, Human
ccagggcuacgggcaccguccug

SEQ ID NO: 668706 - RNA, 22 nt, Human
auagaauagcauagaaaauuga

SEQ ID NO: 668707 - RNA, 22 nt, Human
aacuuauugaacauucucgaau

SEQ ID NO: 668708 - RNA, 22 nt, Human
gauauucaaagauuacugauau

SEQ ID NO: 668709 - RNA, 22 nt, Human
ucuucagagugaaagucuguga

SEQ ID NO: 668710 - RNA, 18 nt, Human
ccagcugugcagcaucug

SEQ ID NO: 668711 - RNA, 22 nt, Human
cuggaagguaacaaggccauua

SEQ ID NO: 668712 - RNA, 18 nt, Human
ggcagaugacaggagaga

SEQ ID NO: 668713 - RNA, 22 nt, Human
uucuuaagcaguuuggcauguu

SEQ ID NO: 668714 - RNA, 22 nt, Human
auugcuguaaauuaucuuauua

SEQ ID NO: 668715 - RNA, 22 nt, Human
gaggaggcuggcgccgccugcc

SEQ ID NO: 668716 - RNA, 22 nt, Human
agcucugcaggcacagcugagg

SEQ ID NO: 668717 - RNA, 22 nt, Human
cuuugugaugaggccuaagaca

SEQ ID NO: 668718 - RNA, 22 nt, Human
aguacacacaguagaauagagu

SEQ ID NO: 668719 - RNA, 22 nt, Human
gccagcucagugccaggccccu

SEQ ID NO: 668720 - RNA, 22 nt, Human
cuggaagggucagagugaugag

SEQ ID NO: 668721 - RNA, 22 nt, Human
agccagagaguguuggagaugu

SEQ ID NO: 668722 - RNA, 22 nt, Human
gcauuuuucucuccuauaggag

SEQ ID NO: 668723 - RNA, 22 nt, Human
cugggucuucagcagcaggcgg

SEQ ID NO: 668724 - RNA, 22 nt, Human
cggcaggguugguuuucucuga

SEQ ID NO: 668725 - RNA, 22 nt, Human
ggcucaggacugcagcguagag

SEQ ID NO: 668726 - RNA, 22 nt, Human
aacaucuuguacugcacauuuu

SEQ ID NO: 668727 - RNA, 22 nt, Human
aagcagcuuuugaagagugagg

SEQ ID NO: 668728 - RNA, 22 nt, Human
cuaaacauggcuuagaacacuc

SEQ ID NO: 668729 - RNA, 22 nt, Human
ucccacucccaggcaggccucu

SEQ ID NO: 668730 - RNA, 22 nt, Human
uucugucacagugcugguauca

SEQ ID NO: 668731 - RNA, 22 nt, Human
agcaccuggucuccuggcgcug

SEQ ID NO: 668732 - RNA, 22 nt, Human
agagugucugguagcugcucug

SEQ ID NO: 668733 - RNA, 22 nt, Human
uuuguagcagcaugauuuauaa

SEQ ID NO: 668734 - RNA, 22 nt, Human
aguacacaguagacuuucucau

SEQ ID NO: 668735 - RNA, 22 nt, Human
acccgggaggcaggagucauag

SEQ ID NO: 668736 - RNA, 22 nt, Human
uauggaaagggaguuuaauuug

SEQ ID NO: 668737 - RNA, 22 nt, Human
ugaauaaaucaaagacugcccu

SEQ ID NO: 668738 - RNA, 22 nt, Human
aguggacaaccaugcugagauu

SEQ ID NO: 668739 - RNA, 22 nt, Human
cucugccucagugauuucuuua

SEQ ID NO: 668740 - RNA, 22 nt, Human
guuauugcuggauagauacauc

SEQ ID NO: 668741 - RNA, 22 nt, Human
auuuccaggcuguuuugugaau

SEQ ID NO: 668742 - RNA, 22 nt, Human
ucuaggagcuuaaaggaggcca

SEQ ID NO: 668743 - RNA, 22 nt, Human
cguguacagucuaucuuuuuuc

SEQ ID NO: 668744 - RNA, 22 nt, Human
caggcugauuaggccucgucca

SEQ ID NO: 668745 - RNA, 22 nt, Human
aagacacucauuaucacugguu

SEQ ID NO: 668746 - RNA, 22 nt, Human
uucugcauuuaaaauauuacua

SEQ ID NO: 668747 - RNA, 22 nt, Human
gcagaacauuucacaguaucuu

SEQ ID NO: 668748 - RNA, 22 nt, Human
gaagugaagagauuagaaauca

SEQ ID NO: 668749 - RNA, 22 nt, Human
caggaugcagugggacccaggg

SEQ ID NO: 668750 - RNA, 22 nt, Human
uugaaucuuagcucugccacuu

SEQ ID NO: 668751 - RNA, 22 nt, Human
ugggcucuccuggaggacaaca

SEQ ID NO: 668752 - RNA, 22 nt, Human
uggcuuuauaccuuugccuugg

SEQ ID NO: 668753 - RNA, 22 nt, Human
aggcugagguaggaggaucgcu

SEQ ID NO: 668754 - RNA, 22 nt, Human
ugucugggagggacagggcuac

SEQ ID NO: 668755 - RNA, 22 nt, Human
gagccaggucgggccgcggcga

SEQ ID NO: 668756 - RNA, 22 nt, Human
aaagucauccaaauuuuuaugu

SEQ ID NO: 668757 - RNA, 22 nt, Human
gcuccuggugcaaaguuucuuc

SEQ ID NO: 668758 - RNA, 22 nt, Human
gggcguggauggucagugcagg

SEQ ID NO: 668759 - RNA, 22 nt, Human
agacaaggaauguagcuuacuc

SEQ ID NO: 668760 - RNA, 22 nt, Human
gaggggcacaguaaaggguccc

SEQ ID NO: 668761 - RNA, 22 nt, Human
uauacagauggaaagauacaca

SEQ ID NO: 668762 - RNA, 23 nt, Human
guuaauaaugaacacuuucuccc

SEQ ID NO: 668763 - RNA, 22 nt, Human
cuuuggaaaaauaccuggcaua

SEQ ID NO: 668764 - RNA, 19 nt, Human
ugccagagauacucccaga

SEQ ID NO: 668765 - RNA, 22 nt, Human
ccuuuucuacaagcaaaugugc

SEQ ID NO: 668766 - RNA, 22 nt, Human
ccaaaugugccuguuucaacaa

SEQ ID NO: 668767 - RNA, 22 nt, Human
ccacagaaucgcuaguggagca

SEQ ID NO: 668768 - RNA, 22 nt, Human
ucacuguuagagcaaacguaug

SEQ ID NO: 668769 - RNA, 17 nt, Human
ggccagaggcggggcug

SEQ ID NO: 668770 - RNA, 22 nt, Human
uucuggaaagcauuugaggccc

SEQ ID NO: 668771 - RNA, 22 nt, Human
cauucucuacacuccugcccug

SEQ ID NO: 668772 - RNA, 19 nt, Human
cccaguccuuguccugggc

SEQ ID NO: 668773 - RNA, 22 nt, Human
gucagcaggguccccuugagug

SEQ ID NO: 668774 - RNA, 22 nt, Human
cagugccacaggaauggccaau

SEQ ID NO: 668775 - RNA, 22 nt, Human
gauuacacguuuuuaaucacau

SEQ ID NO: 668776 - RNA, 22 nt, Human
uacagggacauggaacaggcuc

SEQ ID NO: 668777 - RNA, 22 nt, Human
cagggacccgcacagguagcau

SEQ ID NO: 668778 - RNA, 22 nt, Human
cagagaacauucagagcuguag

SEQ ID NO: 668779 - RNA, 22 nt, Human
cagugcaggaagugagaugccu

SEQ ID NO: 668780 - RNA, 22 nt, Human
cugggccacuccagaugcccac

SEQ ID NO: 668781 - RNA, 22 nt, Human
aagugauaccuaggaaaucaag

SEQ ID NO: 668782 - RNA, 22 nt, Human
ucucaaguuuucucauaaucuc

SEQ ID NO: 668783 - RNA, 22 nt, Human
ugcuggguguuccgcacuugac

SEQ ID NO: 668784 - RNA, 22 nt, Human
ucuguuauacaacaaguaacag

SEQ ID NO: 668785 - RNA, 22 nt, Human
cagaggaagcuggguguggagu

SEQ ID NO: 668786 - RNA, 22 nt, Human
guuccuaaaucuggaggaccuc

SEQ ID NO: 668787 - RNA, 22 nt, Human
ggguaggcugcuccuggggccc

SEQ ID NO: 668788 - RNA, 22 nt, Human
uaugcacagaaguuugcugaau

SEQ ID NO: 668789 - RNA, 22 nt, Human
uacaacacugguucgacaugug

SEQ ID NO: 668790 - RNA, 22 nt, Human
ucugucacuuuuauuuacugaa

SEQ ID NO: 668791 - RNA, 22 nt, Human
cuggguguucaggagcugggcu

SEQ ID NO: 668792 - RNA, 22 nt, Human
agcagcuggguccggcggagca

SEQ ID NO: 668793 - RNA, 22 nt, Human
cucugaggucuaggaccauggc

SEQ ID NO: 668794 - RNA, 22 nt, Human
cacagcaggugcuuaaugauua

SEQ ID NO: 668795 - RNA, 22 nt, Human
agaacaucugaagauacaaagu

SEQ ID NO: 668796 - RNA, 18 nt, Human
cagcugugcccuguuugg

SEQ ID NO: 668797 - RNA, 22 nt, Human
augacauaaagcuaugcuaggu

SEQ ID NO: 668798 - RNA, 22 nt, Human
aacaguacuggacaaggaguca

SEQ ID NO: 668799 - RNA, 22 nt, Human
cugcagcugcaguucugagaga

SEQ ID NO: 668800 - RNA, 22 nt, Human
ugccugagggaguaagaguccu

SEQ ID NO: 668801 - RNA, 22 nt, Human
caacaggcuuuauguuuaaagu

SEQ ID NO: 668802 - RNA, 22 nt, Human
cuucugcuggcauacugcccca

SEQ ID NO: 668803 - RNA, 22 nt, Human
aaacucagaagguacagaaggg

SEQ ID NO: 668804 - RNA, 22 nt, Human
cuguggucaccaggcuggggcc

SEQ ID NO: 668805 - RNA, 22 nt, Human
ggccauggcgggagccggcguc

SEQ ID NO: 668806 - RNA, 22 nt, Human
guucuucaucauuuuagauagg

SEQ ID NO: 668807 - RNA, 22 nt, Human
aguucuuugucaucucuggagu

SEQ ID NO: 668808 - RNA, 22 nt, Human
cagggccucucaucccacgggc

SEQ ID NO: 668809 - RNA, 22 nt, Human
guccacugcugugugcuucacc

SEQ ID NO: 668810 - RNA, 22 nt, Human
ccuggcauguccuccuggcaug

SEQ ID NO: 668811 - RNA, 22 nt, Human
uugaacauaaaucacuggucag

SEQ ID NO: 668812 - RNA, 22 nt, Human
cuggcagcagcuucuggaucga

SEQ ID NO: 668813 - RNA, 22 nt, Human
aaauguaccuugauaguuuggu

SEQ ID NO: 668814 - RNA, 22 nt, Human
ucuuguuaaagugaagauacug

SEQ ID NO: 668815 - RNA, 22 nt, Human
acuuuagaccaucuuccacagu

SEQ ID NO: 668816 - RNA, 22 nt, Human
ucuauauuccagauacagauua

SEQ ID NO: 668817 - RNA, 21 nt, Human
ggacacugauaaucuuguugc

SEQ ID NO: 668818 - RNA, 22 nt, Human
gggggccuuauucaucugccag

SEQ ID NO: 668819 - RNA, 22 nt, Human
acugggaagauggaggcaagca

SEQ ID NO: 668820 - RNA, 22 nt, Human
uccuggagaaacucagagaucu

SEQ ID NO: 668821 - RNA, 22 nt, Human
caucuugagacaugaaaggugu

SEQ ID NO: 668822 - RNA, 22 nt, Human
aagugaagaaauacaugagaau

SEQ ID NO: 668823 - RNA, 22 nt, Human
ccuguuuagugaggugaggagu

SEQ ID NO: 668824 - RNA, 22 nt, Human
uagcaaagaggagaccuaggca

SEQ ID NO: 668825 - RNA, 22 nt, Human
uauuuaguuaucuuucauaaaa

SEQ ID NO: 668826 - RNA, 22 nt, Human
uuugggaauuguagcugucuug

SEQ ID NO: 668827 - RNA, 22 nt, Human
aagaagcaggucacagacaggg

SEQ ID NO: 668828 - RNA, 22 nt, Human
aguccagggcuuagucagcggg

SEQ ID NO: 668829 - RNA, 20 nt, Human
ggccuuggguuucgccuguu

SEQ ID NO: 668830 - RNA, 22 nt, Human
ccugggcaaauuauguuacuca

SEQ ID NO: 668831 - RNA, 22 nt, Human
acaugaguacagauggauguaa

SEQ ID NO: 668832 - RNA, 22 nt, Human
gccugagacagugugguccaau

SEQ ID NO: 668833 - RNA, 22 nt, Human
uggaggcccccaggcaacagca

SEQ ID NO: 668834 - RNA, 22 nt, Human
gucaauaauuuuauggagagaa

SEQ ID NO: 668835 - RNA, 22 nt, Human
cagacuugaaagagacucaguu

SEQ ID NO: 668836 - RNA, 22 nt, Human
cuguggcaggugucuggggcag

SEQ ID NO: 668837 - RNA, 22 nt, Human
gcacugccaucaaugcaugaca

SEQ ID NO: 668838 - RNA, 22 nt, Human
gccuggcccagggcuccgcagg

SEQ ID NO: 668839 - RNA, 22 nt, Human
cagagugggcugucagccacca

SEQ ID NO: 668840 - RNA, 22 nt, Human
caucacuuuuaaaggugaucga

SEQ ID NO: 668841 - RNA, 21 nt, Human
ccuggccaaucugauaggguu

SEQ ID NO: 668842 - RNA, 22 nt, Human
cuuccuuggcuucuggggugug

SEQ ID NO: 668843 - RNA, 22 nt, Human
ggagagcagggaggcugcucug

SEQ ID NO: 668844 - RNA, 22 nt, Human
aacacuaaaggucaguuagaag

SEQ ID NO: 668845 - RNA, 22 nt, Human
gccuucccacccugcgaggcug

SEQ ID NO: 668846 - RNA, 22 nt, Human
ucccaguuuuucuccacuaagg

SEQ ID NO: 668847 - RNA, 22 nt, Human
gaaagguuuggcuuuucaguag

SEQ ID NO: 668848 - RNA, 22 nt, Human
cuuucagaagaggaccuuucca

SEQ ID NO: 668849 - RNA, 22 nt, Human
cuggggcugcggacgggagccc

SEQ ID NO: 668850 - RNA, 22 nt, Human
uggaucugacuggcuuuucuuc

SEQ ID NO: 668851 - RNA, 22 nt, Human
gggugggagaaaugaguaucua

SEQ ID NO: 668852 - RNA, 22 nt, Human
cuuacaguguugagggaauuaa

SEQ ID NO: 668853 - RNA, 22 nt, Human
augggaggguggaaaggcucug

SEQ ID NO: 668854 - RNA, 22 nt, Human
ggaaagaccugagauaggaaua

SEQ ID NO: 668855 - RNA, 22 nt, Human
uuuugccugagauccgagucug

SEQ ID NO: 668856 - RNA, 22 nt, Human
uuucagaaauuauauuagaugc

SEQ ID NO: 668857 - RNA, 22 nt, Human
ucuggcucuguguccucaccca

SEQ ID NO: 668858 - RNA, 22 nt, Human
ggcacagaguuggcagagcugc

SEQ ID NO: 668859 - RNA, 22 nt, Human
acuguguccuauuuccuugaca

SEQ ID NO: 668860 - RNA, 22 nt, Human
cucugcugcccaggccugcuag

SEQ ID NO: 668861 - RNA, 22 nt, Human
gcaccugccugggacugaagau

SEQ ID NO: 668862 - RNA, 22 nt, Human
ugccgugucccauugugcucug

SEQ ID NO: 668863 - RNA, 22 nt, Human
aacauuugcaugcuuuauuaga

SEQ ID NO: 668864 - RNA, 22 nt, Human
ccagcucucagcgggagacuca

SEQ ID NO: 668865 - RNA, 22 nt, Human
uugacaguugcaauggugaucu

SEQ ID NO: 668866 - RNA, 22 nt, Human
cauuuguguccgucccaguucu

SEQ ID NO: 668867 - RNA, 22 nt, Human
aaauauacggucccuaacaguc

SEQ ID NO: 668868 - RNA, 22 nt, Human
gcugccaugguccaggcuccag

SEQ ID NO: 668869 - RNA, 17 nt, Human
gagccccuuuccaaguu

SEQ ID NO: 668870 - RNA, 22 nt, Human
gcuacaggagauaaaggccucu

SEQ ID NO: 668871 - RNA, 22 nt, Human
caucuaccuccacccuauauau

SEQ ID NO: 668872 - RNA, 22 nt, Human
guccuguggaaagcuagccgcu

SEQ ID NO: 668873 - RNA, 22 nt, Human
augggagugacagggccacugg

SEQ ID NO: 668874 - RNA, 22 nt, Human
gagagucuagugcaccuaguuu

SEQ ID NO: 668875 - RNA, 22 nt, Human
ccugucuggggacucccugggu

SEQ ID NO: 668876 - RNA, 22 nt, Human
uacaacaugugguccuuuauga

SEQ ID NO: 668877 - RNA, 22 nt, Human
uucauucauuacgugccaggca

SEQ ID NO: 668878 - RNA, 22 nt, Human
ccagaaucaucaucugaagccu

SEQ ID NO: 668879 - RNA, 19 nt, Human
cagcaucugagccgugucc

SEQ ID NO: 668880 - RNA, 22 nt, Human
cugcugccaagggugccacagg

SEQ ID NO: 668881 - RNA, 22 nt, Human
acagagcuguacaugugccaug

SEQ ID NO: 668882 - RNA, 20 nt, Human
ucugggagggacaagucucc

SEQ ID NO: 668883 - RNA, 22 nt, Human
agucaggaaccucagcaagucu

SEQ ID NO: 668884 - RNA, 20 nt, Human
gcuuuaagccaaaaugugaa

SEQ ID NO: 668885 - RNA, 22 nt, Human
uggcauguuuaaauggcaauaa

SEQ ID NO: 668886 - RNA, 20 nt, Human
cccagaagcuuaacagagca

SEQ ID NO: 668887 - RNA, 20 nt, Human
acagaaagagagaaugucag

SEQ ID NO: 668888 - RNA, 22 nt, Human
uugggcugaacccugcagcuga

SEQ ID NO: 668889 - RNA, 22 nt, Human
auccuguuuuagauaagcuuau

SEQ ID NO: 668890 - RNA, 22 nt, Human
cacugcccucacugugguucuc

SEQ ID NO: 668891 - RNA, 22 nt, Human
gccagcuguaggugguggguug

SEQ ID NO: 668892 - RNA, 22 nt, Human
gggaagcugcguggucuagggc

SEQ ID NO: 668893 - RNA, 22 nt, Human
aggaggcagaugcuuggcugua

SEQ ID NO: 668894 - RNA, 20 nt, Human
agucacaugcauacacaagu

SEQ ID NO: 668895 - RNA, 23 nt, Human
auagucugcgcaacugagagagg

SEQ ID NO: 668896 - RNA, 22 nt, Human
ugagaaaaguacauggagaagc

SEQ ID NO: 668897 - RNA, 22 nt, Human
gggcuugcuuaaggucacccgg

SEQ ID NO: 668898 - RNA, 22 nt, Human
cagagcuguuacuauucaugaa

SEQ ID NO: 668899 - RNA, 22 nt, Human
gguggggauuccugaucacugu

SEQ ID NO: 668900 - RNA, 20 nt, Human
auuuuguuuauguuccucuc

SEQ ID NO: 668901 - RNA, 22 nt, Human
caaaauugauuguggugauggu

SEQ ID NO: 668902 - RNA, 22 nt, Human
ucaggccccuugucagcucugu

SEQ ID NO: 668903 - RNA, 22 nt, Human
aacauucuauuuugcuaaaaca

SEQ ID NO: 668904 - RNA, 22 nt, Human
agcaaugcuaccgggugauucg

SEQ ID NO: 668905 - RNA, 22 nt, Human
cuggggaacgcagcgagcagcg

SEQ ID NO: 668906 - RNA, 22 nt, Human
acguuauaucugaaaaaaguga

SEQ ID NO: 668907 - RNA, 16 nt, Human
cuacccagugagaagg

SEQ ID NO: 668908 - RNA, 22 nt, Human
caggcaccacacuaggggcuga

SEQ ID NO: 668909 - RNA, 22 nt, Human
uuauaugauugaagugcauaag

SEQ ID NO: 668910 - RNA, 22 nt, Human
uccugcuucagguagagggggu

SEQ ID NO: 668911 - RNA, 22 nt, Human
guacacauauauuaaaaauugu

SEQ ID NO: 668912 - RNA, 22 nt, Human
ucacgagaggcacagaauagag

SEQ ID NO: 668913 - RNA, 22 nt, Human
ugccuugcacauaauauacauu

SEQ ID NO: 668914 - RNA, 22 nt, Human
cccuggggagcaggcgaaggag

SEQ ID NO: 668915 - RNA, 22 nt, Human
gucacaaaggugagggacauga

SEQ ID NO: 668916 - RNA, 22 nt, Human
ccaugcuccuuaccacucacuu

SEQ ID NO: 668917 - RNA, 22 nt, Human
gcccuuaggcaagcagaagccc

SEQ ID NO: 668918 - RNA, 21 nt, Human
augauacugaagcacaacuau

SEQ ID NO: 668919 - RNA, 17 nt, Human
cagcuuuaugcuacugu

SEQ ID NO: 668920 - RNA, 22 nt, Human
caguccuguuccuggaguaguu

SEQ ID NO: 668921 - RNA, 22 nt, Human
caguacauaaugcgcaaaaccg

SEQ ID NO: 668922 - RNA, 22 nt, Human
uucucauggugucuuuauacau

SEQ ID NO: 668923 - RNA, 22 nt, Human
ucacaucuuauuagaguaucuc

SEQ ID NO: 668924 - RNA, 22 nt, Human
uggagagguuuaaacaaaaguu

SEQ ID NO: 668925 - RNA, 22 nt, Human
aucuuucaucucuauuauuuga

SEQ ID NO: 668926 - RNA, 22 nt, Human
cuggcuuccaugcuguaguggc

SEQ ID NO: 668927 - RNA, 22 nt, Human
uacagcuuuauacccaucaaaa

SEQ ID NO: 668928 - RNA, 22 nt, Human
gggcagcacguuucaggaggau

SEQ ID NO: 668929 - RNA, 22 nt, Human
uuucuaaguaaacacagcauac

SEQ ID NO: 668930 - RNA, 19 nt, Human
agacacuggauggaaaaug

SEQ ID NO: 668931 - RNA, 22 nt, Human
uuauucugcacuuuuaaaauau

SEQ ID NO: 668932 - RNA, 22 nt, Human
gugccugcugcagcugagcagu

SEQ ID NO: 668933 - RNA, 22 nt, Human
ucaaagucuaucuguaauuacu

SEQ ID NO: 668934 - RNA, 22 nt, Human
gucugcccucacaugcacucuu

SEQ ID NO: 668935 - RNA, 22 nt, Human
uuccucuguaguugcugaugaa

SEQ ID NO: 668936 - RNA, 22 nt, Human
ggaggggcauaguucaccauca

SEQ ID NO: 668937 - RNA, 22 nt, Human
guaacauuuugagcaguaggcu

SEQ ID NO: 668938 - RNA, 22 nt, Human
uccuuaauucugugcaauaugu

SEQ ID NO: 668939 - RNA, 22 nt, Human
aagauggagcacgagcagaagc

SEQ ID NO: 668940 - RNA, 22 nt, Human
uggcugagaccuucccaaauuc

SEQ ID NO: 668941 - RNA, 22 nt, Human
gaggguggagcuccagaaucug

SEQ ID NO: 668942 - RNA, 17 nt, Human
ccuguuguugccuuugc

SEQ ID NO: 668943 - RNA, 22 nt, Human
aaggcucuuggagugaaugcag

SEQ ID NO: 668944 - RNA, 22 nt, Human
uccaaaggaagaggcugucagu

SEQ ID NO: 668945 - RNA, 22 nt, Human
ggcagcaguaggagcuaaucuu

SEQ ID NO: 668946 - RNA, 22 nt, Human
ucuguccuccacacuguaaguu

SEQ ID NO: 668947 - RNA, 22 nt, Human
agaguuuguugaauuuacuugg

SEQ ID NO: 668948 - RNA, 22 nt, Human
acuuagcagguggugacucgaa

SEQ ID NO: 668949 - RNA, 22 nt, Human
aacugaggccaagugaggaaag

SEQ ID NO: 668950 - RNA, 22 nt, Human
gcuggcuccaaaagcaggggcu

SEQ ID NO: 668951 - RNA, 22 nt, Human
ucaggaggaugucggcaaauuu

SEQ ID NO: 668952 - RNA, 22 nt, Human
auugucuuacauacuguggagg

SEQ ID NO: 668953 - RNA, 22 nt, Human
ccccuggggaucagcuggaauu

SEQ ID NO: 668954 - RNA, 22 nt, Human
aaggcagaaagggaugugagug

SEQ ID NO: 668955 - RNA, 19 nt, Human
uugaaagauuagcuuucua

SEQ ID NO: 668956 - RNA, 22 nt, Human
auguuucuacagcguccacuga

SEQ ID NO: 668957 - RNA, 22 nt, Human
auacauguuguaccauauguuu

SEQ ID NO: 668958 - RNA, 22 nt, Human
cuggagaaaauccauguguaug

SEQ ID NO: 668959 - RNA, 22 nt, Human
ccaggacacgauuuuuagucug

SEQ ID NO: 668960 - RNA, 22 nt, Human
uccuggugaggcuagaaguguc

SEQ ID NO: 668961 - RNA, 15 nt, Human
cuguggcuaaccuaa

SEQ ID NO: 668962 - RNA, 21 nt, Human
aguguguguggaaugagaaua

SEQ ID NO: 668963 - RNA, 22 nt, Human
uuuguauuuuucccagcuagcu

SEQ ID NO: 668964 - RNA, 22 nt, Human
uguguguauaugcauuuaucua

SEQ ID NO: 668965 - RNA, 22 nt, Human
ugaaaugagauaauuuaagugc

SEQ ID NO: 668966 - RNA, 22 nt, Human
gcugccaggcccuggggcuaug

SEQ ID NO: 668967 - RNA, 22 nt, Human
aaggcuccuuuguaguucuuuu

SEQ ID NO: 668968 - RNA, 22 nt, Human
aggcccagcuugaagugggaag

SEQ ID NO: 668969 - RNA, 22 nt, Human
uggcaccagggaacaagcauuu

SEQ ID NO: 668970 - RNA, 21 nt, Human
agcugggccucagccugcagu

SEQ ID NO: 668971 - RNA, 22 nt, Human
ugaaacauugcacuguaugaau

SEQ ID NO: 668972 - RNA, 22 nt, Human
uuaccauagaaacuuccuuuuu

SEQ ID NO: 668973 - RNA, 22 nt, Human
guuucauucggcagcucauaag

SEQ ID NO: 668974 - RNA, 22 nt, Human
aggggccuccucauuggagugu

SEQ ID NO: 668975 - RNA, 22 nt, Human
agaaucaggaccuguggcuguc

SEQ ID NO: 668976 - RNA, 22 nt, Human
ccucaggcaagucacuuaacau

SEQ ID NO: 668977 - RNA, 22 nt, Human
ucaaaaggacagaagaccuaaa

SEQ ID NO: 668978 - RNA, 22 nt, Human
agguauuauuagcaucucuauu

SEQ ID NO: 668979 - RNA, 22 nt, Human
cucccuucugagccuuuuguua

SEQ ID NO: 668980 - RNA, 22 nt, Human
uuuaaaaggcagcuucuuuugu

SEQ ID NO: 668981 - RNA, 22 nt, Human
ucagcugcagcaggcaccauuu

SEQ ID NO: 668982 - RNA, 22 nt, Human
aagcaaaugugggugcagaauu

SEQ ID NO: 668983 - RNA, 22 nt, Human
gcaggagcaauggccuaucaga

SEQ ID NO: 668984 - RNA, 22 nt, Human
auuagauuguaaauguuuucac

SEQ ID NO: 668985 - RNA, 22 nt, Human
ucuggucaagacauccuaacau

SEQ ID NO: 668986 - RNA, 22 nt, Human
ggcacugauaauguccucucuc

SEQ ID NO: 668987 - RNA, 22 nt, Human
uuccacucuccagucaauuuca

SEQ ID NO: 668988 - RNA, 22 nt, Human
cuggccacaacuagcccaggac

SEQ ID NO: 668989 - RNA, 22 nt, Human
gugguccucauaauucagugag

SEQ ID NO: 668990 - RNA, 22 nt, Human
cagggcccaggccacuggguug

SEQ ID NO: 668991 - RNA, 22 nt, Human
gaagaaucugaggacagucauu

SEQ ID NO: 668992 - RNA, 21 nt, Human
guacacagugguucugaggga

SEQ ID NO: 668993 - RNA, 22 nt, Human
gccugugaccccuccaucugcu

SEQ ID NO: 668994 - RNA, 22 nt, Human
uauuucugaauccaaaagguca

SEQ ID NO: 668995 - RNA, 22 nt, Human
uccucaucuguaccuuggggua

SEQ ID NO: 668996 - RNA, 22 nt, Human
aggcagaucacuugaggccagg

SEQ ID NO: 668997 - RNA, 22 nt, Human
cagcaacggaaaauacacauag

SEQ ID NO: 668998 - RNA, 22 nt, Human
cuuuagaaggguaacggaauua

SEQ ID NO: 668999 - RNA, 22 nt, Human
ugcaguggaacaauuucaacag

SEQ ID NO: 669000 - RNA, 22 nt, Human
gcugggagaggcccugaaguga

SEQ ID NO: 669001 - RNA, 22 nt, Human
ucagagaacugcagcccuuccu

SEQ ID NO: 669002 - RNA, 22 nt, Human
acagcaguucaggccgcagagg

SEQ ID NO: 669003 - RNA, 22 nt, Human
uagcaauguaagauguuaacac

SEQ ID NO: 669004 - RNA, 22 nt, Human
ccaggagcaccaggccugugcc

SEQ ID NO: 669005 - RNA, 22 nt, Human
acccugaagcaggcacucagcu

SEQ ID NO: 669006 - RNA, 22 nt, Human
agauaaguacuguuauuauugc

SEQ ID NO: 669007 - RNA, 22 nt, Human
guccacucacucuuagucacuc

SEQ ID NO: 669008 - RNA, 22 nt, Human
cagcucugccacuuccuagcua

SEQ ID NO: 669009 - RNA, 22 nt, Human
accaggaagaacaggcaaggca

SEQ ID NO: 669010 - RNA, 22 nt, Human
uuguuuuuagagaagcccugaa

SEQ ID NO: 669011 - RNA, 22 nt, Human
uacauauguaaacauguauaaa

SEQ ID NO: 669012 - RNA, 22 nt, Human
aggccagcaugcaguucuaagg

SEQ ID NO: 669013 - RNA, 22 nt, Human
augccuggacuguaucccagau

SEQ ID NO: 669014 - RNA, 21 nt, Human
ugcucaguaaaugcugaguga

SEQ ID NO: 669015 - RNA, 22 nt, Human
ucaaauaccagcaauuucaugu

SEQ ID NO: 669016 - RNA, 22 nt, Human
auugagaaucugagagccuagg

SEQ ID NO: 669017 - RNA, 22 nt, Human
ugcugucuuuuucccuuccuaa

SEQ ID NO: 669018 - RNA, 22 nt, Human
cagugcaauuagaacuuauuua

SEQ ID NO: 669019 - RNA, 19 nt, Human
gguggguuggugguucccu

SEQ ID NO: 669020 - RNA, 20 nt, Human
ucagauuaaauguucugucu

SEQ ID NO: 669021 - RNA, 22 nt, Human
ugcuucugcaggagcuccugau

SEQ ID NO: 669022 - RNA, 22 nt, Human
gccaggcauuauuccgaucccu

SEQ ID NO: 669023 - RNA, 22 nt, Human
cgcugccaggauccccugccgg

SEQ ID NO: 669024 - RNA, 22 nt, Human
caguggcugguuagggacagga

SEQ ID NO: 669025 - RNA, 22 nt, Human
uguguauaaacaagagucugug

SEQ ID NO: 669026 - RNA, 22 nt, Human
uaccagcaaugcuagucaacuc

SEQ ID NO: 669027 - RNA, 22 nt, Human
gaagugaugacgcuguguuuuu

SEQ ID NO: 669028 - RNA, 22 nt, Human
uugaaagucacaauggcauuaa

SEQ ID NO: 669029 - RNA, 18 nt, Human
agugugugcccuuucagg

SEQ ID NO: 669030 - RNA, 22 nt, Human
auggccuggggagcaugggaag

SEQ ID NO: 669031 - RNA, 22 nt, Human
ccaggcccguucccuucuccag

SEQ ID NO: 669032 - RNA, 22 nt, Human
agcugggagcugaaggcugauu

SEQ ID NO: 669033 - RNA, 22 nt, Human
uguuuaaguagucucagggccu

SEQ ID NO: 669034 - RNA, 22 nt, Human
uggaacacaagucauugagggg

SEQ ID NO: 669035 - RNA, 22 nt, Human
uuguucuagccuccuguuuuga

SEQ ID NO: 669036 - RNA, 22 nt, Human
gaagcugaugaggaccagauug

SEQ ID NO: 669037 - RNA, 22 nt, Human
acagaaugcguagugcauguug

SEQ ID NO: 669038 - RNA, 22 nt, Human
ugccugggcucaccgccucuuu

SEQ ID NO: 669039 - RNA, 22 nt, Human
uuccuccuacgcuuaucacuuu

SEQ ID NO: 669040 - RNA, 20 nt, Human
uggcagaguugucccaccca

SEQ ID NO: 669041 - RNA, 20 nt, Human
aggcaugggaugcccagauu

SEQ ID NO: 669042 - RNA, 19 nt, Human
aucuuuagcaacuuucaaa

SEQ ID NO: 669043 - RNA, 22 nt, Human
ucuuugaaguugaaguaguugg

SEQ ID NO: 669044 - RNA, 22 nt, Human
acagcagcuugucuguucuuua

SEQ ID NO: 669045 - RNA, 15 nt, Human
ggaacauuucuguuu

SEQ ID NO: 669046 - RNA, 22 nt, Human
cugucccuucccaagcccagcc

SEQ ID NO: 669047 - RNA, 22 nt, Human
ggcugccacgucgaggguccaa

SEQ ID NO: 669048 - RNA, 22 nt, Human
cccuguggaggaggagagcagu

SEQ ID NO: 669049 - RNA, 22 nt, Human
augacaguucuuuagagaugua

SEQ ID NO: 669050 - RNA, 22 nt, Human
aguuucacagaggguuagacgc

SEQ ID NO: 669051 - RNA, 22 nt, Human
agcagugaugcaugacagccua

SEQ ID NO: 669052 - RNA, 22 nt, Human
uucugcuuugguuccauggaug

SEQ ID NO: 669053 - RNA, 22 nt, Human
acaguuuacuggccuugccguu

SEQ ID NO: 669054 - RNA, 22 nt, Human
aaugagaaaacacagaggaggu

SEQ ID NO: 669055 - RNA, 22 nt, Human
ugugaacauuucugguuauuug

SEQ ID NO: 669056 - RNA, 19 nt, Human
ucuucccuggcugucaguc

SEQ ID NO: 669057 - RNA, 23 nt, Human
agacaguggccgagagguacuag

SEQ ID NO: 669058 - RNA, 22 nt, Human
gaguggcauaugugccugugaa

SEQ ID NO: 669059 - RNA, 20 nt, Human
cccucugcacauggcugugg

SEQ ID NO: 669060 - RNA, 22 nt, Human
cuggcucuaucuccaaggcugg

SEQ ID NO: 669061 - RNA, 23 nt, Human
acaugggaaaugcaaagagaagu

SEQ ID NO: 669062 - RNA, 22 nt, Human
auguggcuguggacaccuuuca

SEQ ID NO: 669063 - RNA, 22 nt, Human
auaaucugagcuauuucaugag

SEQ ID NO: 669064 - RNA, 22 nt, Human
cacauauaccagccgcgguacg

SEQ ID NO: 669065 - RNA, 22 nt, Human
aucuggcuuucuuaaugacuua

SEQ ID NO: 669066 - RNA, 22 nt, Human
ccugcccuguguuuggggacua

SEQ ID NO: 669067 - RNA, 19 nt, Human
aaaguucugacuguagagc

SEQ ID NO: 669068 - RNA, 22 nt, Human
gccugggagugcacagugaggu

SEQ ID NO: 669069 - RNA, 22 nt, Human
ugaggcuguucuaccagggcca

SEQ ID NO: 669070 - RNA, 22 nt, Human
gcacaugaggcugucuuugucu

SEQ ID NO: 669071 - RNA, 22 nt, Human
gcugccugcuucaugugggaga

SEQ ID NO: 669072 - RNA, 22 nt, Human
gacacuuugggacucagcccua

SEQ ID NO: 669073 - RNA, 22 nt, Human
ccugagcauuagacauccauca

SEQ ID NO: 669074 - RNA, 20 nt, Human
aggaaaaggguggugguaga

SEQ ID NO: 669075 - RNA, 21 nt, Human
uuagacuuggguuuuuccugg

SEQ ID NO: 669076 - RNA, 22 nt, Human
ucucaguggguuaaaagagaag

SEQ ID NO: 669077 - RNA, 22 nt, Human
caccuuuugugucugcguuugu

SEQ ID NO: 669078 - RNA, 23 nt, Human
ucuguucuuuuagcugaucauuu

SEQ ID NO: 669079 - RNA, 22 nt, Human
gcggugggggaaaggagcgguu

SEQ ID NO: 669080 - RNA, 22 nt, Human
ccuggaguugaaggaagguggg

SEQ ID NO: 669081 - RNA, 22 nt, Human
aaaauuguaggaacugaaucaa

SEQ ID NO: 669082 - RNA, 22 nt, Human
ucagaacuauaguaguuucaug

SEQ ID NO: 669083 - RNA, 19 nt, Human
aggcuuggauuguggccaa

SEQ ID NO: 669084 - RNA, 22 nt, Human
aagugugauuuguagaaugccu

SEQ ID NO: 669085 - RNA, 21 nt, Human
ugcauaaagaaauacaaauac

SEQ ID NO: 669086 - RNA, 22 nt, Human
augugagaauaacucaaaacaa

SEQ ID NO: 669087 - RNA, 22 nt, Human
caaaaacugcaauuacuuuuac

SEQ ID NO: 669088 - RNA, 22 nt, Human
aaagugcugagacagacuggga

SEQ ID NO: 669089 - RNA, 20 nt, Human
gccuggaguuaguuuuccuu

SEQ ID NO: 669090 - RNA, 22 nt, Human
gucuuuagagcuccuggcaucu

SEQ ID NO: 669091 - RNA, 22 nt, Human
gucugggcaucagacugcgggc

SEQ ID NO: 669092 - RNA, 22 nt, Human
ucaacugcaaguuugcuuaguu

SEQ ID NO: 669093 - RNA, 22 nt, Human
ggaaggucgagcugcaucuggc

SEQ ID NO: 669094 - RNA, 22 nt, Human
ucauucaagauuucaauagauu

SEQ ID NO: 669095 - RNA, 22 nt, Human
cagggacagagacugcaccuug

SEQ ID NO: 669096 - RNA, 22 nt, Human
uauggcuucuauaaggaagcuu

SEQ ID NO: 669097 - RNA, 22 nt, Human
cagaugaacugugacugaaaau

SEQ ID NO: 669098 - RNA, 22 nt, Human
uuggugacuccccaccaugaug

SEQ ID NO: 669099 - RNA, 22 nt, Human
cugggaugugaggagcgccucu

SEQ ID NO: 669100 - RNA, 22 nt, Human
ugguggggauucccucccuggc

SEQ ID NO: 669101 - RNA, 22 nt, Human
uaccagggaacagggauauuaa

SEQ ID NO: 669102 - RNA, 20 nt, Human
aaaugaugggaauaaucuau

SEQ ID NO: 669103 - RNA, 22 nt, Human
agcaggcugggcaauaugggca

SEQ ID NO: 669104 - RNA, 22 nt, Human
gcugccacucugagcuugcuuc

SEQ ID NO: 669105 - RNA, 22 nt, Human
acaaguguugcauuuugccauu

SEQ ID NO: 669106 - RNA, 22 nt, Human
uuggaacugauggccuucaucc

SEQ ID NO: 669107 - RNA, 22 nt, Human
uggcuuccaaaggaaugggccu

SEQ ID NO: 669108 - RNA, 22 nt, Human
aucaggaugcugucaguuacca

SEQ ID NO: 669109 - RNA, 23 nt, Human
cugcccugaucuugaucuauugu

SEQ ID NO: 669110 - RNA, 22 nt, Human
ggguaggccgugggucaccagg

SEQ ID NO: 669111 - RNA, 22 nt, Human
ugcuuuaccuucccagaaacca

SEQ ID NO: 669112 - RNA, 21 nt, Human
cauauuaaaucggugccuuua

SEQ ID NO: 669113 - RNA, 22 nt, Human
agggccagaugaagccacaagc

SEQ ID NO: 669114 - RNA, 22 nt, Human
aaagucacuuccuucugucagc

SEQ ID NO: 669115 - RNA, 22 nt, Human
gagaaaauagcauguguaguau

SEQ ID NO: 669116 - RNA, 22 nt, Human
uuccaugaaggagacugagaag

SEQ ID NO: 669117 - RNA, 22 nt, Human
ugggcucuuccuauaguuuaua

SEQ ID NO: 669118 - RNA, 22 nt, Human
uccugaaugaguugaucacaau

SEQ ID NO: 669119 - RNA, 20 nt, Human
auuuggcaugaaguauugau

SEQ ID NO: 669120 - RNA, 22 nt, Human
aaacccaggguuuugucuuccc

SEQ ID NO: 669121 - RNA, 22 nt, Human
agaccagggucccacagagucu

SEQ ID NO: 669122 - RNA, 21 nt, Human
ccacucaugacuccacucacc

SEQ ID NO: 669123 - RNA, 22 nt, Human
cugaggcuuggaggggucuggu

SEQ ID NO: 669124 - RNA, 22 nt, Human
cucuggguucagaacagcaagc

SEQ ID NO: 669125 - RNA, 22 nt, Human
ucaggcacugcuuucugauaug

SEQ ID NO: 669126 - RNA, 22 nt, Human
cuguucuuuaguuccacugcaa

SEQ ID NO: 669127 - RNA, 22 nt, Human
gugcaggggaucagguugcagc

SEQ ID NO: 669128 - RNA, 22 nt, Human
ucacuggauucucuuuuguucc

SEQ ID NO: 669129 - RNA, 22 nt, Human
gugcguccugggggcugggucg

SEQ ID NO: 669130 - RNA, 19 nt, Human
ccaaaagcaauuccaagua

SEQ ID NO: 669131 - RNA, 22 nt, Human
gccagccacuucagcuauggcu

SEQ ID NO: 669132 - RNA, 22 nt, Human
uggcccagggaguucauggugu

SEQ ID NO: 669133 - RNA, 22 nt, Human
ucaugagucugcaaauuaugga

SEQ ID NO: 669134 - RNA, 22 nt, Human
gcucaagggaugggagugggug

SEQ ID NO: 669135 - RNA, 22 nt, Human
gcugggacugagacagugaccu

SEQ ID NO: 669136 - RNA, 22 nt, Human
uuacagagccucauuuuagaga

SEQ ID NO: 669137 - RNA, 22 nt, Human
ccugggagagucuguggucucc

SEQ ID NO: 669138 - RNA, 23 nt, Human
aucaaaguggaaaucaauuaucu

SEQ ID NO: 669139 - RNA, 22 nt, Human
auucagaucauauuuauagcuu

SEQ ID NO: 669140 - RNA, 22 nt, Human
uagcaaugcuucauuauuuaaa

SEQ ID NO: 669141 - RNA, 22 nt, Human
ggcaaccugagcuuguggagaa

SEQ ID NO: 669142 - RNA, 22 nt, Human
uuccauuuauucuuguccagau

SEQ ID NO: 669143 - RNA, 22 nt, Human
cgcuccuugagcgugucggccu

SEQ ID NO: 669144 - RNA, 22 nt, Human
cuugcaguuuagguccucugug

SEQ ID NO: 669145 - RNA, 22 nt, Human
ccaggcugggcggggaaccugg

SEQ ID NO: 669146 - RNA, 22 nt, Human
ugcacauggccugagugccuga

SEQ ID NO: 669147 - RNA, 22 nt, Human
agcaacaggaauauuauggcaa

SEQ ID NO: 669148 - RNA, 23 nt, Human
cagaccuggcagucauccucaac

SEQ ID NO: 669149 - RNA, 22 nt, Human
ugucugggucaccccuccuggc

SEQ ID NO: 669150 - RNA, 22 nt, Human
aaagacauugaagaaggacuua

SEQ ID NO: 669151 - RNA, 22 nt, Human
ggagcacccugcucagccaagc

SEQ ID NO: 669152 - RNA, 22 nt, Human
cauuucugucacguucuuuuau

SEQ ID NO: 669153 - RNA, 22 nt, Human
aaaucagagucugauuuuaagg

SEQ ID NO: 669154 - RNA, 22 nt, Human
uacuuuguggagauuaaaaaua

SEQ ID NO: 669155 - RNA, 22 nt, Human
ggcagaagaaaggcuaagucuc

SEQ ID NO: 669156 - RNA, 22 nt, Human
aaauugcaaccaggucucuguc

SEQ ID NO: 669157 - RNA, 22 nt, Human
aacaggaggccuuccaguccag

SEQ ID NO: 669158 - RNA, 22 nt, Human
ugauuacaguauuugagaucca

SEQ ID NO: 669159 - RNA, 22 nt, Human
gcaaggaagcagaguugcuauc

SEQ ID NO: 669160 - RNA, 22 nt, Human
gugaggugggcugggcucuaug

SEQ ID NO: 669161 - RNA, 22 nt, Human
aagcacugggaggaggcugaga

SEQ ID NO: 669162 - RNA, 22 nt, Human
cccaccacgugcuuugcuggag

SEQ ID NO: 669163 - RNA, 22 nt, Human
gguucccggaucuccgaguccc

SEQ ID NO: 669164 - RNA, 22 nt, Human
uauuauauuuaguaauguggag

SEQ ID NO: 669165 - RNA, 22 nt, Human
gggcuguggagccgcgagggcu

SEQ ID NO: 669166 - RNA, 22 nt, Human
aaaauccugcugacucgagaug

SEQ ID NO: 669167 - RNA, 22 nt, Human
accuggagcuuccaacucaacu

SEQ ID NO: 669168 - RNA, 22 nt, Human
aaacaucuaucagcauuuuuua

SEQ ID NO: 669169 - RNA, 19 nt, Human
ccagagagcuagguacaga

SEQ ID NO: 669170 - RNA, 22 nt, Human
acauucuaaagcaugcucagga

SEQ ID NO: 669171 - RNA, 22 nt, Human
accuuggaacugaaguguuuuu

SEQ ID NO: 669172 - RNA, 22 nt, Human
aggaagagcauucacaugguag

SEQ ID NO: 669173 - RNA, 22 nt, Human
cuguguuggcuuuucucuugua

SEQ ID NO: 669174 - RNA, 22 nt, Human
aagcaacuaaggcaaggaaaug

SEQ ID NO: 669175 - RNA, 21 nt, Human
uuucuucccuuggcuucugag

SEQ ID NO: 669176 - RNA, 22 nt, Human
acagaacaacaagguggaccag

SEQ ID NO: 669177 - RNA, 22 nt, Human
aauguugaggauaucagaaaau

SEQ ID NO: 669178 - RNA, 22 nt, Human
ugacagugcaugugacaaagga

SEQ ID NO: 669179 - RNA, 22 nt, Human
ugggugcuucgucagcucugag

SEQ ID NO: 669180 - RNA, 18 nt, Human
cuugcugagggccucauu

SEQ ID NO: 669181 - RNA, 20 nt, Human
acugagcugcauggagagga

SEQ ID NO: 669182 - RNA, 22 nt, Human
aggacagcccuugagagcacau

SEQ ID NO: 669183 - RNA, 22 nt, Human
agaaauguauucuguauguuuu

SEQ ID NO: 669184 - RNA, 22 nt, Human
gggagcugagggaccucugugg

SEQ ID NO: 669185 - RNA, 22 nt, Human
ggacagcacagcucuugacaac

SEQ ID NO: 669186 - RNA, 22 nt, Human
aggaguggaauuacuggguucu

SEQ ID NO: 669187 - RNA, 22 nt, Human
uuucaucaucaaaauagugagg

SEQ ID NO: 669188 - RNA, 22 nt, Human
gcaggccauucaggagaugugc

SEQ ID NO: 669189 - RNA, 22 nt, Human
uauuuccugcauggugauguaa

SEQ ID NO: 669190 - RNA, 22 nt, Human
cuggcucccagcuuucagggag

SEQ ID NO: 669191 - RNA, 22 nt, Human
uaccuucaggcugcccuuugau

SEQ ID NO: 669192 - RNA, 22 nt, Human
cagcuuugaaacauggcucuag

SEQ ID NO: 669193 - RNA, 22 nt, Human
aagggcaggcacccacccucac

SEQ ID NO: 669194 - RNA, 22 nt, Human
ugaaucuggaucuaugaucaau

SEQ ID NO: 669195 - RNA, 22 nt, Human
caagggaagaggacagggaccu

SEQ ID NO: 669196 - RNA, 22 nt, Human
uuguucaugguuguaaguuuga

SEQ ID NO: 669197 - RNA, 22 nt, Human
aagccaggaccaaacucauccu

SEQ ID NO: 669198 - RNA, 22 nt, Human
ucccugugagaaaugaagcagg

SEQ ID NO: 669199 - RNA, 22 nt, Human
agcaaauaauugucuuugaggg

SEQ ID NO: 669200 - RNA, 22 nt, Human
ugcacagaaucauuuucagcug

SEQ ID NO: 669201 - RNA, 22 nt, Human
gacugucauucuagugcccaug

SEQ ID NO: 669202 - RNA, 22 nt, Human
aggcuccaggccucccugcaug

SEQ ID NO: 669203 - RNA, 22 nt, Human
ugcugggcuggggccucagacc

SEQ ID NO: 669204 - RNA, 22 nt, Human
cccaagagaucgcauguaguug

SEQ ID NO: 669205 - RNA, 23 nt, Human
uaucucagaggaauguaguuacu

SEQ ID NO: 669206 - RNA, 22 nt, Human
ugcugggcuucaacugccugag

SEQ ID NO: 669207 - RNA, 22 nt, Human
auucuuuucccaacugcuuuaa

SEQ ID NO: 669208 - RNA, 22 nt, Human
uauugacagugacuauugguag

SEQ ID NO: 669209 - RNA, 22 nt, Human
caucucugguucagucucugug

SEQ ID NO: 669210 - RNA, 22 nt, Human
aaaugucugucucaugaggaaa

SEQ ID NO: 669211 - RNA, 22 nt, Human
gggcucuggaaggugcaccaug

SEQ ID NO: 669212 - RNA, 22 nt, Human
cuguggcucauaucuguaaucu

SEQ ID NO: 669213 - RNA, 22 nt, Human
caguaauuccaagugcuuauac

SEQ ID NO: 669214 - RNA, 22 nt, Human
agcuggaggauaacucacuucu

SEQ ID NO: 669215 - RNA, 22 nt, Human
gcccagcagcuccacuuggcuu

SEQ ID NO: 669216 - RNA, 22 nt, Human
cggggcagaaaguugucuuuug

SEQ ID NO: 669217 - RNA, 22 nt, Human
uauugacauuuuuauagcuuga

SEQ ID NO: 669218 - RNA, 22 nt, Human
uuuuacaggugaaaaaugaaga

SEQ ID NO: 669219 - RNA, 22 nt, Human
ccauccugucuguggccucagg

SEQ ID NO: 669220 - RNA, 22 nt, Human
uuuauguaguuacggacuauca

SEQ ID NO: 669221 - RNA, 22 nt, Human
gagacacacccaagguuaugag

SEQ ID NO: 669222 - RNA, 22 nt, Human
uucuaaagagaaugcguuucug

SEQ ID NO: 669223 - RNA, 22 nt, Human
auugaagauuaaaugcuuccuu

SEQ ID NO: 669224 - RNA, 22 nt, Human
ucuaagaggcaucaagacaagc

SEQ ID NO: 669225 - RNA, 22 nt, Human
ggacaggagugaggcggguucc

SEQ ID NO: 669226 - RNA, 22 nt, Human
caguuuuuagauuaguuggugg

SEQ ID NO: 669227 - RNA, 22 nt, Human
caccagcccccucacgcuguca

SEQ ID NO: 669228 - RNA, 22 nt, Human
ucagaacauguuugaguaagac

SEQ ID NO: 669229 - RNA, 20 nt, Human
ccacaggaguccagucgacc

SEQ ID NO: 669230 - RNA, 22 nt, Human
cagaggagugggccguuauggu

SEQ ID NO: 669231 - RNA, 22 nt, Human
cuccuccagcuuccaguggcuc

SEQ ID NO: 669232 - RNA, 22 nt, Human
ggcuggagacaacguccugccc

SEQ ID NO: 669233 - RNA, 22 nt, Human
guaaccuggaaguuuagggaag

SEQ ID NO: 669234 - RNA, 22 nt, Human
uucuguacaaguuguggcugcu

SEQ ID NO: 669235 - RNA, 22 nt, Human
auggcuggauuugauccauggg

SEQ ID NO: 669236 - RNA, 22 nt, Human
ucauugaguucaaauccuucau

SEQ ID NO: 669237 - RNA, 23 nt, Human
ggggaaagaccaugcuugaggac

SEQ ID NO: 669238 - RNA, 22 nt, Human
acagagaaagugggcugaagau

SEQ ID NO: 669239 - RNA, 22 nt, Human
cuccucuggcuuccuggaggca

SEQ ID NO: 669240 - RNA, 22 nt, Human
ggaagccacccagcuuugauag

SEQ ID NO: 669241 - RNA, 20 nt, Human
aguacaauguaugauucaga

SEQ ID NO: 669242 - RNA, 22 nt, Human
cuacccaggcuuagagggcugg

SEQ ID NO: 669243 - RNA, 22 nt, Human
cugaaaagcuuugaaccguuaa

SEQ ID NO: 669244 - RNA, 22 nt, Human
caccagcuuacagucucacccc

SEQ ID NO: 669245 - RNA, 22 nt, Human
aggcuucagaggaagugcggcc

SEQ ID NO: 669246 - RNA, 22 nt, Human
acauaauaggugccugaauauu

SEQ ID NO: 669247 - RNA, 22 nt, Human
ucuacuuuucccuauacaguuu

SEQ ID NO: 669248 - RNA, 22 nt, Human
ucccugggguaacauuagaggg

SEQ ID NO: 669249 - RNA, 22 nt, Human
ugggacagauuauaagucugca

SEQ ID NO: 669250 - RNA, 22 nt, Human
cagucucuaaaucaaucugaau

SEQ ID NO: 669251 - RNA, 23 nt, Human
ugcugguucaaaaaggaaggagg

SEQ ID NO: 669252 - RNA, 22 nt, Human
gagucagaugaagauaaaaggg

SEQ ID NO: 669253 - RNA, 22 nt, Human
cagagggcacucggagugacau

SEQ ID NO: 669254 - RNA, 22 nt, Human
gcacagagagucccgggugccc

SEQ ID NO: 669255 - RNA, 22 nt, Human
uuaugaaaacaaucaguaggca

SEQ ID NO: 669256 - RNA, 22 nt, Human
acacagcugugcaguuuuuuca

SEQ ID NO: 669257 - RNA, 22 nt, Human
ugugugugcacgugcgcgcgag

SEQ ID NO: 669258 - RNA, 22 nt, Human
gcuggcaggauagaagucuaau

SEQ ID NO: 669259 - RNA, 21 nt, Human
cucugggccauuuucuuccac

SEQ ID NO: 669260 - RNA, 22 nt, Human
uuugacuccuguguuucuggaa

SEQ ID NO: 669261 - RNA, 22 nt, Human
aucacaguuacucaaauaauga

SEQ ID NO: 669262 - RNA, 22 nt, Human
cucuggacagcccuccaggaag

SEQ ID NO: 669263 - RNA, 22 nt, Human
aaugugucauuucccacaggug

SEQ ID NO: 669264 - RNA, 22 nt, Human
uggugaggaagaccugcuccug

SEQ ID NO: 669265 - RNA, 22 nt, Human
uuacaaugaugaauaaauggca

SEQ ID NO: 669266 - RNA, 22 nt, Human
uguaugaaaaggaauagauuga

SEQ ID NO: 669267 - RNA, 22 nt, Human
aagcaauaagccagauuuggau

SEQ ID NO: 669268 - RNA, 22 nt, Human
uggcucucuacaggucaagacc

SEQ ID NO: 669269 - RNA, 20 nt, Human
aggcacuggggauagguaag

SEQ ID NO: 669270 - RNA, 22 nt, Human
uaccuagacaugaacacagaug

SEQ ID NO: 669271 - RNA, 22 nt, Human
ugugucagagguagagauggca

SEQ ID NO: 669272 - RNA, 22 nt, Human
ucauugaauacauauuugggau

SEQ ID NO: 669273 - RNA, 22 nt, Human
ccaaaguccacaguuuacauua

SEQ ID NO: 669274 - RNA, 22 nt, Human
agagccagauggagccgugugu

SEQ ID NO: 669275 - RNA, 22 nt, Human
accuucaagauugugggucaau

SEQ ID NO: 669276 - RNA, 22 nt, Human
guccaggcugaccccuagagga

SEQ ID NO: 669277 - RNA, 22 nt, Human
gcuggagauagaauggccacug

SEQ ID NO: 669278 - RNA, 22 nt, Human
uagcaguggaaucuuuugucca

SEQ ID NO: 669279 - RNA, 22 nt, Human
cugggcuccuaaccauccaggu

SEQ ID NO: 669280 - RNA, 22 nt, Human
aggaggccaggcccucaagccu

SEQ ID NO: 669281 - RNA, 22 nt, Human
ggaggugggaguuuaguucuug

SEQ ID NO: 669282 - RNA, 22 nt, Human
acauuuaaauaccuauguuucu

SEQ ID NO: 669283 - RNA, 22 nt, Human
acugugggcagcuucugggaac

SEQ ID NO: 669284 - RNA, 22 nt, Human
aaccuuucaauuauccucaucu

SEQ ID NO: 669285 - RNA, 22 nt, Human
cuggccuggagccucugggugg

SEQ ID NO: 669286 - RNA, 22 nt, Human
ucugcaggccucgacaaggcca

SEQ ID NO: 669287 - RNA, 17 nt, Human
caguggucugagguaug

SEQ ID NO: 669288 - RNA, 22 nt, Human
gugagggcaaauuagaaucaaa

SEQ ID NO: 669289 - RNA, 22 nt, Human
aagaggcuagccggcucacuaa

SEQ ID NO: 669290 - RNA, 22 nt, Human
gccuggugguauccuggcaaga

SEQ ID NO: 669291 - RNA, 22 nt, Human
uccucagucagcuccguucuug

SEQ ID NO: 669292 - RNA, 22 nt, Human
accucccuggccuucugauucc

SEQ ID NO: 669293 - RNA, 22 nt, Human
uggacuccagugucuguguucu

SEQ ID NO: 669294 - RNA, 22 nt, Human
agcuacaacuuuuccaugagca

SEQ ID NO: 669295 - RNA, 22 nt, Human
ugcucuggagggugaagcuuuu

SEQ ID NO: 669296 - RNA, 22 nt, Human
ccuggcugaggggccaaggacc

SEQ ID NO: 669297 - RNA, 22 nt, Human
acauuguauaaugauuaucaca

SEQ ID NO: 669298 - RNA, 22 nt, Human
gggcuuuaugagauugagaucu

SEQ ID NO: 669299 - RNA, 22 nt, Human
uuggcaguccaggauuaauaua

SEQ ID NO: 669300 - RNA, 22 nt, Human
aagagagaagucucucugguuc

SEQ ID NO: 669301 - RNA, 22 nt, Human
ggguggagugugaaaucuggcu

SEQ ID NO: 669302 - RNA, 22 nt, Human
ggguggcauagggugauggcuu

SEQ ID NO: 669303 - RNA, 19 nt, Human
gcuaggcuggccuugaggg

SEQ ID NO: 669304 - RNA, 22 nt, Human
ugguuuuauuuauguugaguca

SEQ ID NO: 669305 - RNA, 22 nt, Human
guccccagcuaaucucuuugcc

SEQ ID NO: 669306 - RNA, 22 nt, Human
uccagcuguuccaucagcucuu

SEQ ID NO: 669307 - RNA, 22 nt, Human
cuccagugcgcaggacagcccc

SEQ ID NO: 669308 - RNA, 22 nt, Human
guagaaauuccauuuacuuuga

SEQ ID NO: 669309 - RNA, 22 nt, Human
gggcuugcuaagaagagcgcau

SEQ ID NO: 669310 - RNA, 22 nt, Human
uauggguagaaguggcccaagc

SEQ ID NO: 669311 - RNA, 22 nt, Human
gcugccugucuguuucuuuuau

SEQ ID NO: 669312 - RNA, 22 nt, Human
uuggaagauucugugucuggug

SEQ ID NO: 669313 - RNA, 18 nt, Human
cugucuuuuuucucucca

SEQ ID NO: 669314 - RNA, 22 nt, Human
gcccucucuucugcagccucca

SEQ ID NO: 669315 - RNA, 17 nt, Human
cuguggccaccuggaug

SEQ ID NO: 669316 - RNA, 22 nt, Human
uaaaccugcaacuauagccacc

SEQ ID NO: 669317 - RNA, 22 nt, Human
caguguggcuuagggaauaggc

SEQ ID NO: 669318 - RNA, 23 nt, Human
ugugucauaaaauuaaaacuuca

SEQ ID NO: 669319 - RNA, 22 nt, Human
auucugcucauuuuauuuccag

SEQ ID NO: 669320 - RNA, 22 nt, Human
guguaugaacgaaagaauggau

SEQ ID NO: 669321 - RNA, 22 nt, Human
ucucagcuugaguggaugagcu

SEQ ID NO: 669322 - RNA, 22 nt, Human
ugagcaggacugaccggccuua

SEQ ID NO: 669323 - RNA, 22 nt, Human
ucugcugcugcagcuacacuau

SEQ ID NO: 669324 - RNA, 22 nt, Human
caggaaacauaugugcuugagg

SEQ ID NO: 669325 - RNA, 21 nt, Human
uggaccaggaaggugguggug

SEQ ID NO: 669326 - RNA, 22 nt, Human
acccaugaguguaucuuuaaaa

SEQ ID NO: 669327 - RNA, 22 nt, Human
aaaccggguccagaucuucagg

SEQ ID NO: 669328 - RNA, 23 nt, Human
uggaaacauucugaauguccauc

SEQ ID NO: 669329 - RNA, 22 nt, Human
uccagcccugcuuccugccuca

SEQ ID NO: 669330 - RNA, 22 nt, Human
uguuuugucuaaucuaaauucu

SEQ ID NO: 669331 - RNA, 22 nt, Human
acauuuaccuaguuaagucaau

SEQ ID NO: 669332 - RNA, 22 nt, Human
aggcuccauuccaggagcuaga

SEQ ID NO: 669333 - RNA, 22 nt, Human
cucaugucaggggugucaaugu

SEQ ID NO: 669334 - RNA, 22 nt, Human
cacaugagacaauuaaagacuu

SEQ ID NO: 669335 - RNA, 22 nt, Human
gggcugcaucagcaggacccgg

SEQ ID NO: 669336 - RNA, 22 nt, Human
cuggccccuguggcuaaaauca

SEQ ID NO: 669337 - RNA, 22 nt, Human
gucuugcacuuaccuaagaacu

SEQ ID NO: 669338 - RNA, 22 nt, Human
auuccacuguuauaaaaugucc

SEQ ID NO: 669339 - RNA, 22 nt, Human
ucuccagguggcuugggcuucu

SEQ ID NO: 669340 - RNA, 22 nt, Human
uacauuccacaagcauugcuuu

SEQ ID NO: 669341 - RNA, 22 nt, Human
guauuagguuggugcaaaagua

SEQ ID NO: 669342 - RNA, 22 nt, Human
ccuggccaggcucucagcacug

SEQ ID NO: 669343 - RNA, 22 nt, Human
auuugaaaaccugagccucccg

SEQ ID NO: 669344 - RNA, 22 nt, Human
acaguggaggccauaugguccu

SEQ ID NO: 669345 - RNA, 22 nt, Human
uuaguguauuuucaaauguaga

SEQ ID NO: 669346 - RNA, 22 nt, Human
uugagaagaauguguugaguuu

SEQ ID NO: 669347 - RNA, 22 nt, Human
uaaaggcuuuauuuuccaguca

SEQ ID NO: 669348 - RNA, 22 nt, Human
aggauguguuuugagcugacua

SEQ ID NO: 669349 - RNA, 22 nt, Human
cuuuacagccuccagaaggaac

SEQ ID NO: 669350 - RNA, 22 nt, Human
gaaaagggcaagagagagggca

SEQ ID NO: 669351 - RNA, 22 nt, Human
uuuagaggggaaaguggcuggu

SEQ ID NO: 669352 - RNA, 22 nt, Human
cguaugaaauuuuugacauuug

SEQ ID NO: 669353 - RNA, 22 nt, Human
ugugugauuccacuuauauggg

SEQ ID NO: 669354 - RNA, 22 nt, Human
ucaaauaguugacauuaacuug

SEQ ID NO: 669355 - RNA, 22 nt, Human
ugguuugcccacucgagugauu

SEQ ID NO: 669356 - RNA, 22 nt, Human
cagagggcccccuggccacagu

SEQ ID NO: 669357 - RNA, 22 nt, Human
gcaggggcuacucugagcuucc

SEQ ID NO: 669358 - RNA, 22 nt, Human
aggucccaguguuagggugaca

SEQ ID NO: 669359 - RNA, 21 nt, Human
gcucaggcucuugacagagca

SEQ ID NO: 669360 - RNA, 22 nt, Human
uagcccagaagagggaagcaac

SEQ ID NO: 669361 - RNA, 22 nt, Human
gccucucugggcugccgaggcu

SEQ ID NO: 669362 - RNA, 22 nt, Human
uuugccugauucuaagagcuca

SEQ ID NO: 669363 - RNA, 22 nt, Human
uucuccuugguuuaugggacau

SEQ ID NO: 669364 - RNA, 22 nt, Human
uuggcccuggggccagcuucga

SEQ ID NO: 669365 - RNA, 22 nt, Human
ccccuucucugcaagccugcuc

SEQ ID NO: 669366 - RNA, 22 nt, Human
agaugcauggaaaucucauuac

SEQ ID NO: 669367 - RNA, 22 nt, Human
aacuuuaaggcuauaaauuaug

SEQ ID NO: 669368 - RNA, 22 nt, Human
augagaaaguuaaucaucauga

SEQ ID NO: 669369 - RNA, 22 nt, Human
caccugcagggggagucaagag

SEQ ID NO: 669370 - RNA, 22 nt, Human
gcauuauuaauagcugcaugag

SEQ ID NO: 669371 - RNA, 22 nt, Human
ucaguuuuaagguuugagaauu

SEQ ID NO: 669372 - RNA, 22 nt, Human
gcaggagacuggcugugguagu

SEQ ID NO: 669373 - RNA, 21 nt, Human
accucaagcaacaaccaaggu

SEQ ID NO: 669374 - RNA, 22 nt, Human
uagcacauuguugaccagaagg

SEQ ID NO: 669375 - RNA, 22 nt, Human
agcagcaauuuucacugucaau

SEQ ID NO: 669376 - RNA, 22 nt, Human
uucaggaauaauuaucauauga

SEQ ID NO: 669377 - RNA, 22 nt, Human
cuuuucuuguauuggaugcccc

SEQ ID NO: 669378 - RNA, 19 nt, Human
auaacuacauuggcucagu

SEQ ID NO: 669379 - RNA, 22 nt, Human
aggacacagcucuucaguaaga

SEQ ID NO: 669380 - RNA, 22 nt, Human
gcagcuguggguuccaagucua

SEQ ID NO: 669381 - RNA, 22 nt, Human
uauuugucacuagaaaggguaa

SEQ ID NO: 669382 - RNA, 22 nt, Human
uuuccuucucagggagcuucaa

SEQ ID NO: 669383 - RNA, 22 nt, Human
aacaggcaaacugugggauccc

SEQ ID NO: 669384 - RNA, 23 nt, Human
augguuuauguuguugugaagca

SEQ ID NO: 669385 - RNA, 22 nt, Human
cacacagguauauauauguaca

SEQ ID NO: 669386 - RNA, 22 nt, Human
agcugaguuaauucaucacuua

SEQ ID NO: 669387 - RNA, 22 nt, Human
ugcuggaauuugccuucuggaa

SEQ ID NO: 669388 - RNA, 22 nt, Human
gaucaauacuauuaagaucaua

SEQ ID NO: 669389 - RNA, 22 nt, Human
uggggacagggcucagcaauuu

SEQ ID NO: 669390 - RNA, 22 nt, Human
gcagggcuccccaggcccgagg

SEQ ID NO: 669391 - RNA, 22 nt, Human
ugagcccuaagggucaagcagg

SEQ ID NO: 669392 - RNA, 18 nt, Human
agucuucugauccauuuu

SEQ ID NO: 669393 - RNA, 22 nt, Human
cacuguucaucaaaacugcucu

SEQ ID NO: 669394 - RNA, 22 nt, Human
ugaauaagaauuauuauaauga

SEQ ID NO: 669395 - RNA, 22 nt, Human
acacaggaagucagcacugaug

SEQ ID NO: 669396 - RNA, 22 nt, Human
uggcaauguaggcaagaacauu

SEQ ID NO: 669397 - RNA, 22 nt, Human
gccuuuggaugguuuuucuauu

SEQ ID NO: 669398 - RNA, 22 nt, Human
cucugagaggauccugcccggg

SEQ ID NO: 669399 - RNA, 22 nt, Human
cagugcaguuucccagaugcug

SEQ ID NO: 669400 - RNA, 22 nt, Human
auugcuguacacuucuagaucu

SEQ ID NO: 669401 - RNA, 18 nt, Human
uggcuucuugagcuaaca

SEQ ID NO: 669402 - RNA, 22 nt, Human
gugcccuccugaagccaucaca

SEQ ID NO: 669403 - RNA, 22 nt, Human
agcacccuucagcccagccugg

SEQ ID NO: 669404 - RNA, 22 nt, Human
gcgggcggggguucccaggucu

SEQ ID NO: 669405 - RNA, 22 nt, Human
uugcuguaaguaucuuucuacc

SEQ ID NO: 669406 - RNA, 22 nt, Human
ccccugccagcuaucccugaac

SEQ ID NO: 669407 - RNA, 22 nt, Human
gggcuccaaaguaagcuuuagu

SEQ ID NO: 669408 - RNA, 22 nt, Human
uuugaaugagggaaccacaguu

SEQ ID NO: 669409 - RNA, 21 nt, Human
aucuuaaaaggucuuaacuuu

SEQ ID NO: 669410 - RNA, 22 nt, Human
gaccuggaggcuuuucccaaga

SEQ ID NO: 669411 - RNA, 22 nt, Human
uugcuuaauucugaaaauauag

SEQ ID NO: 669412 - RNA, 22 nt, Human
uuccuccagccuggagcacuuc

SEQ ID NO: 669413 - RNA, 22 nt, Human
aagucacuaagugaaccacugg

SEQ ID NO: 669414 - RNA, 22 nt, Human
ggcuucugaaaucucugugcgu

SEQ ID NO: 669415 - RNA, 21 nt, Human
uguggcagagacaaugcuagu

SEQ ID NO: 669416 - RNA, 22 nt, Human
ugucccagggaaggcccagcac

SEQ ID NO: 669417 - RNA, 22 nt, Human
uuuuggaauuuauacaguaaug

SEQ ID NO: 669418 - RNA, 22 nt, Human
gacauaaaauggaauucuguug

SEQ ID NO: 669419 - RNA, 22 nt, Human
uuacacaugcuuuguguguaug

SEQ ID NO: 669420 - RNA, 22 nt, Human
ccagcuccucuucccaguguca

SEQ ID NO: 669421 - RNA, 22 nt, Human
uucacauuccgcggcuauuuuc

SEQ ID NO: 669422 - RNA, 22 nt, Human
gcaggccaagcccucgcagaga

SEQ ID NO: 669423 - RNA, 22 nt, Human
accagccugucugagucguggg

SEQ ID NO: 669424 - RNA, 22 nt, Human
gccucugaguuuggagaagagc

SEQ ID NO: 669425 - RNA, 22 nt, Human
auuucucauuaagaucuuccaa

SEQ ID NO: 669426 - RNA, 19 nt, Human
gggcuucugggaucaagag

SEQ ID NO: 669427 - RNA, 22 nt, Human
uugcaagacacuuggaagcaca

SEQ ID NO: 669428 - RNA, 19 nt, Human
cacuuugcugaacucuucu

SEQ ID NO: 669429 - RNA, 17 nt, Human
uucugcugucguccucu

SEQ ID NO: 669430 - RNA, 22 nt, Human
acauugaagcugugaaaucaaa

SEQ ID NO: 669431 - RNA, 22 nt, Human
agagccagcauuugggcccugc

SEQ ID NO: 669432 - RNA, 22 nt, Human
uugaagaacauaauagcuacuu

SEQ ID NO: 669433 - RNA, 22 nt, Human
uuuuccucugcaauaaaagcag

SEQ ID NO: 669434 - RNA, 22 nt, Human
guuaaauucgaugauggauaaa

SEQ ID NO: 669435 - RNA, 22 nt, Human
acaacugucuucuucaugcucc

SEQ ID NO: 669436 - RNA, 22 nt, Human
cgcugccaggucaccaggggua

SEQ ID NO: 669437 - RNA, 22 nt, Human
cucaggaguaguucagcagcug

SEQ ID NO: 669438 - RNA, 22 nt, Human
ugaagcuggaaguuagguagac

SEQ ID NO: 669439 - RNA, 23 nt, Human
ugcaggcuaggaagagagccuuc

SEQ ID NO: 669440 - RNA, 22 nt, Human
caucaucuggcuuuuagaaaaa

SEQ ID NO: 669441 - RNA, 22 nt, Human
uacuugcuguuaguauuuuaca

SEQ ID NO: 669442 - RNA, 22 nt, Human
gaggcugcccacaccugcgccg

SEQ ID NO: 669443 - RNA, 22 nt, Human
ggacagagagugaauaugacau

SEQ ID NO: 669444 - RNA, 22 nt, Human
aguauaucugcuucuggguccc

SEQ ID NO: 669445 - RNA, 22 nt, Human
guuuuaguggguggccacugau

SEQ ID NO: 669446 - RNA, 22 nt, Human
ucuuccagccaauagcguccuu

SEQ ID NO: 669447 - RNA, 22 nt, Human
gcucuggcacuggcgcgggaug

SEQ ID NO: 669448 - RNA, 22 nt, Human
uugauuuauagaauguucaagc

SEQ ID NO: 669449 - RNA, 22 nt, Human
acagaaggcggggacaaggcgg

SEQ ID NO: 669450 - RNA, 22 nt, Human
agacaucauguuacagauuaag

SEQ ID NO: 669451 - RNA, 22 nt, Human
caaggccaagucucugugaaga

SEQ ID NO: 669452 - RNA, 22 nt, Human
acauccuugauuauguaaggau

SEQ ID NO: 669453 - RNA, 22 nt, Human
ugcuagugugugagauguucaa

SEQ ID NO: 669454 - RNA, 22 nt, Human
ucucaucuauucacauuaacug

SEQ ID NO: 669455 - RNA, 22 nt, Human
acuuucucaggaauucacagac

SEQ ID NO: 669456 - RNA, 22 nt, Human
ccuugaaauguucucacugggg

SEQ ID NO: 669457 - RNA, 22 nt, Human
ugccuguggaaaggcuggugcu

SEQ ID NO: 669458 - RNA, 22 nt, Human
uuagaaaugcacccaagaccua

SEQ ID NO: 669459 - RNA, 22 nt, Human
uuuccucuuuguaccuugacua

SEQ ID NO: 669460 - RNA, 22 nt, Human
agggccugggguagcuuacugc

SEQ ID NO: 669461 - RNA, 21 nt, Human
ucuguuggaggccucucuucc

SEQ ID NO: 669462 - RNA, 22 nt, Human
uuggaacagaaacagacaaaua

SEQ ID NO: 669463 - RNA, 22 nt, Human
augcugaagagugcacaggcua

SEQ ID NO: 669464 - RNA, 22 nt, Human
uaucuguuggcuccuaguugua

SEQ ID NO: 669465 - RNA, 22 nt, Human
aauggcuuuaggaauccagugc

SEQ ID NO: 669466 - RNA, 22 nt, Human
gacuggagcccccaaggacacc

SEQ ID NO: 669467 - RNA, 22 nt, Human
aacuuguuucuuccauucaaca

SEQ ID NO: 669468 - RNA, 22 nt, Human
cugcuuccugcugggauacuga

SEQ ID NO: 669469 - RNA, 22 nt, Human
cccagagcaugugcugccuuug

SEQ ID NO: 669470 - RNA, 18 nt, Human
ugcaggagugaccccggc

SEQ ID NO: 669471 - RNA, 22 nt, Human
agguggccggugccagccgggc

SEQ ID NO: 669472 - RNA, 22 nt, Human
aggcuccuuguucaucauccau

SEQ ID NO: 669473 - RNA, 22 nt, Human
ugucugaauuccacaucguucu

SEQ ID NO: 669474 - RNA, 22 nt, Human
aaacagcuaauggccaggaaua

SEQ ID NO: 669475 - RNA, 22 nt, Human
ugggcucauggcccagcacugg

SEQ ID NO: 669476 - RNA, 22 nt, Human
uauguagacaggcugcuuuucc

SEQ ID NO: 669477 - RNA, 20 nt, Human
aaauuguguuugugagcucc

SEQ ID NO: 669478 - RNA, 22 nt, Human
ugacccucuuccccaugcgcuc

SEQ ID NO: 669479 - RNA, 22 nt, Human
uaccugcacagccagccaugug

SEQ ID NO: 669480 - RNA, 22 nt, Human
ucacuuuugaucccuaugcagu

SEQ ID NO: 669481 - RNA, 20 nt, Human
uuuuccugugguuugauaug

SEQ ID NO: 669482 - RNA, 22 nt, Human
ccuggggccccgagccagaagc

SEQ ID NO: 669483 - RNA, 16 nt, Human
ucugccagggacaggc

SEQ ID NO: 669484 - RNA, 19 nt, Human
aaaaggagagaucagaguu

SEQ ID NO: 669485 - RNA, 22 nt, Human
auacacagcuacauugaacaau

SEQ ID NO: 669486 - RNA, 22 nt, Human
ucagcucucugggcucgaaccu

SEQ ID NO: 669487 - RNA, 22 nt, Human
cacugcuucuggaggaauuugg

SEQ ID NO: 669488 - RNA, 22 nt, Human
cucuggagucaggcagcccugg

SEQ ID NO: 669489 - RNA, 20 nt, Human
cuagaagcagaauugcugau

SEQ ID NO: 669490 - RNA, 22 nt, Human
gaccagcugauaaggcauauaa

SEQ ID NO: 669491 - RNA, 21 nt, Human
ugcagcagaguaagcagggga

SEQ ID NO: 669492 - RNA, 22 nt, Human
gucaggagauagggcaagcuuc

SEQ ID NO: 669493 - RNA, 21 nt, Human
uuucaauguguucuuuguagu

SEQ ID NO: 669494 - RNA, 22 nt, Human
acagacuggccugucucgcacc

SEQ ID NO: 669495 - RNA, 22 nt, Human
ugcuuuauguuaucagaagggu

SEQ ID NO: 669496 - RNA, 22 nt, Human
cagcuaggaaaccagagggcag

SEQ ID NO: 669497 - RNA, 22 nt, Human
ggucacauauccucgguuugga

SEQ ID NO: 669498 - RNA, 22 nt, Human
ucaguuucacagucugugcaga

SEQ ID NO: 669499 - RNA, 22 nt, Human
gcacuucaugacuuugucaaau

SEQ ID NO: 669500 - RNA, 22 nt, Human
gaaaggagggcucacaaaagug

SEQ ID NO: 669501 - RNA, 22 nt, Human
gaaguucuuagucucauuugca

SEQ ID NO: 669502 - RNA, 22 nt, Human
cucugcuguucuuauguguccu

SEQ ID NO: 669503 - RNA, 22 nt, Human
cugagaaaggaccucaaacagg

SEQ ID NO: 669504 - RNA, 17 nt, Human
cguggcugagccauaga

SEQ ID NO: 669505 - RNA, 22 nt, Human
uucagcagagaaauuacauaau

SEQ ID NO: 669506 - RNA, 22 nt, Human
guuuaauucccacaccugcccu

SEQ ID NO: 669507 - RNA, 22 nt, Human
augagcuucccagacaggaugg

SEQ ID NO: 669508 - RNA, 19 nt, Human
ccagcagguucauuucagg

SEQ ID NO: 669509 - RNA, 22 nt, Human
uuaauagauaugccucuagagu

SEQ ID NO: 669510 - RNA, 22 nt, Human
gugggcagaggagagaacauua

SEQ ID NO: 669511 - RNA, 22 nt, Human
cuccagagacacuucucaugau

SEQ ID NO: 669512 - RNA, 22 nt, Human
uuuaucuguauaucucaagugu

SEQ ID NO: 669513 - RNA, 22 nt, Human
augcaagauguauagaagacuu

SEQ ID NO: 669514 - RNA, 22 nt, Human
auggcuuucagauuucuauguu

SEQ ID NO: 669515 - RNA, 22 nt, Human
aaagcagucucagacuuaagca

SEQ ID NO: 669516 - RNA, 23 nt, Human
ucuggcuuccaguggguucaacc

SEQ ID NO: 669517 - RNA, 22 nt, Human
auguauaguggugaugauuaca

SEQ ID NO: 669518 - RNA, 18 nt, Human
ccucugccuuuguagagc

SEQ ID NO: 669519 - RNA, 22 nt, Human
ucauauauuuaguugugcaaca

SEQ ID NO: 669520 - RNA, 22 nt, Human
uuccuggcacauaguuagugcu

SEQ ID NO: 669521 - RNA, 22 nt, Human
uuuaggauauuaauguucagag

SEQ ID NO: 669522 - RNA, 22 nt, Human
gggccuguguguucaggagccu

SEQ ID NO: 669523 - RNA, 22 nt, Human
agugcauuauauguuucaaugg

SEQ ID NO: 669524 - RNA, 17 nt, Human
ugcagcaguucccaucu

SEQ ID NO: 669525 - RNA, 22 nt, Human
cuucaaggccuuccagguugaa

SEQ ID NO: 669526 - RNA, 22 nt, Human
agcaccagcaacuaugggcugc

SEQ ID NO: 669527 - RNA, 22 nt, Human
agugaaacagagcacagcaugc

SEQ ID NO: 669528 - RNA, 19 nt, Human
ugaccccacgcuccagagc

SEQ ID NO: 669529 - RNA, 22 nt, Human
aaugcagaguaaauauuuaauu

SEQ ID NO: 669530 - RNA, 22 nt, Human
ccugggucuccuccugcuggcu

SEQ ID NO: 669531 - RNA, 22 nt, Human
uuuccacaauuugagcagcaga

SEQ ID NO: 669532 - RNA, 19 nt, Human
ucagugugugggagguggu

SEQ ID NO: 669533 - RNA, 22 nt, Human
auccugcuuguuacuuauagag

SEQ ID NO: 669534 - RNA, 22 nt, Human
guauucagggcuagucagagga

SEQ ID NO: 669535 - RNA, 22 nt, Human
uacacagaggcugaugucuuag

SEQ ID NO: 669536 - RNA, 21 nt, Human
ucucuacaaauuauguuaggu

SEQ ID NO: 669537 - RNA, 22 nt, Human
cugugggcuccugcagcucagg

SEQ ID NO: 669538 - RNA, 22 nt, Human
caguuauuaugaggucauuagg

SEQ ID NO: 669539 - RNA, 22 nt, Human
uuuguacacaaccugugguagu

SEQ ID NO: 669540 - RNA, 22 nt, Human
ugcccucucaaguugagucaga

SEQ ID NO: 669541 - RNA, 20 nt, Human
uaggaaauauguuuuuaccc

SEQ ID NO: 669542 - RNA, 22 nt, Human
auaggcaaauuaauaagucaua

SEQ ID NO: 669543 - RNA, 22 nt, Human
aacagcaguggcaggagaaggc

SEQ ID NO: 669544 - RNA, 22 nt, Human
uaaguuacacuuaacuuacuag

SEQ ID NO: 669545 - RNA, 22 nt, Human
gggcaguguugcucucaaaguc

SEQ ID NO: 669546 - RNA, 22 nt, Human
uccggguuuuacacucacauca

SEQ ID NO: 669547 - RNA, 21 nt, Human
uccuggccagggcacuaggca

SEQ ID NO: 669548 - RNA, 22 nt, Human
aaccugcauguuucuaaaagca

SEQ ID NO: 669549 - RNA, 22 nt, Human
cacccaggcuagagugcagugg

SEQ ID NO: 669550 - RNA, 22 nt, Human
gcagagcaggggcugaaccugg

SEQ ID NO: 669551 - RNA, 22 nt, Human
guguacaggaugacuguacuua

SEQ ID NO: 669552 - RNA, 22 nt, Human
cacagagaauucccauauguga

SEQ ID NO: 669553 - RNA, 22 nt, Human
uuugaagucagacacugcuuug

SEQ ID NO: 669554 - RNA, 22 nt, Human
uucagucucaauuuaaguuuaa

SEQ ID NO: 669555 - RNA, 17 nt, Human
agaguuuuaagaaauuu

SEQ ID NO: 669556 - RNA, 22 nt, Human
aaagcuauuugugaguuauaga

SEQ ID NO: 669557 - RNA, 22 nt, Human
uggcacagacugggccaaggaa

SEQ ID NO: 669558 - RNA, 22 nt, Human
agcccuggggugcagaaccaug

SEQ ID NO: 669559 - RNA, 18 nt, Human
uggacaggguggagaaaa

SEQ ID NO: 669560 - RNA, 22 nt, Human
agugcuuucuugcuccaucagu

SEQ ID NO: 669561 - RNA, 20 nt, Human
uauugugauagguguuaauc

SEQ ID NO: 669562 - RNA, 22 nt, Human
agagaacaugacguaauagugg

SEQ ID NO: 669563 - RNA, 22 nt, Human
acuguuuuccuaaugagcaaga

SEQ ID NO: 669564 - RNA, 22 nt, Human
aggcuaauauuuaugaaaccaa

SEQ ID NO: 669565 - RNA, 21 nt, Human
ggcuggacaucccaggagacu

SEQ ID NO: 669566 - RNA, 22 nt, Human
guucccauacaguaucagugcu

SEQ ID NO: 669567 - RNA, 22 nt, Human
ccuguacagugaaugaauguga

SEQ ID NO: 669568 - RNA, 22 nt, Human
guuuuggagucaggcuuagaug

SEQ ID NO: 669569 - RNA, 22 nt, Human
uaaagccacuucauucuagucu

SEQ ID NO: 669570 - RNA, 22 nt, Human
gcagugugaccgagcuugcuuc

SEQ ID NO: 669571 - RNA, 22 nt, Human
cugucuucuccuuuguuucagg

SEQ ID NO: 669572 - RNA, 22 nt, Human
aguguuuauugugugccacaca

SEQ ID NO: 669573 - RNA, 22 nt, Human
acccagccuacaaagcucaccu

SEQ ID NO: 669574 - RNA, 22 nt, Human
uccagcucagaugcagggauca

SEQ ID NO: 669575 - RNA, 22 nt, Human
ugccagggacccugucggcccu

SEQ ID NO: 669576 - RNA, 22 nt, Human
guugcaggaagcacacacaugu

SEQ ID NO: 669577 - RNA, 22 nt, Human
agugcaaagaaaucagcuuugu

SEQ ID NO: 669578 - RNA, 22 nt, Human
cucugggauagagccucggucu

SEQ ID NO: 669579 - RNA, 22 nt, Human
acaucugaccauuacaagacau

SEQ ID NO: 669580 - RNA, 22 nt, Human
caggagcuggaucuccuugcgg

SEQ ID NO: 669581 - RNA, 22 nt, Human
gcauggcuucugccaggcaccu

SEQ ID NO: 669582 - RNA, 22 nt, Human
agccucucuccagcuuggcaga

SEQ ID NO: 669583 - RNA, 22 nt, Human
aacaguaaagacagaauuuauc

SEQ ID NO: 669584 - RNA, 22 nt, Human
ugauuuccacagucaggggugc

SEQ ID NO: 669585 - RNA, 22 nt, Human
ugcagcugguaucccauggauu

SEQ ID NO: 669586 - RNA, 19 nt, Human
cuuuucaucaacagccaau

SEQ ID NO: 669587 - RNA, 22 nt, Human
gggcuggcugauuuuccucucu

SEQ ID NO: 669588 - RNA, 22 nt, Human
ccaggggcucucagggugugug

SEQ ID NO: 669589 - RNA, 17 nt, Human
cugcagcuggagggcca

SEQ ID NO: 669590 - RNA, 22 nt, Human
cccuuuccugaagaauauuuuu

SEQ ID NO: 669591 - RNA, 22 nt, Human
cauuguuugagcaucugggauc

SEQ ID NO: 669592 - RNA, 19 nt, Human
ugagaaggcaguggggagc

SEQ ID NO: 669593 - RNA, 22 nt, Human
ccagcuuuggaguguuguugcu

SEQ ID NO: 669594 - RNA, 22 nt, Human
ucugcguccaucugccugcuug

SEQ ID NO: 669595 - RNA, 22 nt, Human
caucauuucacuuagaugaagu

SEQ ID NO: 669596 - RNA, 22 nt, Human
ugaagaauaaaugguugagacu

SEQ ID NO: 669597 - RNA, 22 nt, Human
aaaguuuccaaguuacaccauu

SEQ ID NO: 669598 - RNA, 22 nt, Human
ucucugaguuguaaaaaauagu

SEQ ID NO: 669599 - RNA, 22 nt, Human
agaaaccuccauuuauucacuc

SEQ ID NO: 669600 - RNA, 22 nt, Human
gcagacugcgagcgugcuggug

SEQ ID NO: 669601 - RNA, 21 nt, Human
gccucugcugucuuauuguga

SEQ ID NO: 669602 - RNA, 17 nt, Human
agguauaaaaugguagc

SEQ ID NO: 669603 - RNA, 22 nt, Human
cuggaagaguccuaaacagaua

SEQ ID NO: 669604 - RNA, 23 nt, Human
ugaagugaaauuucacaagggac

SEQ ID NO: 669605 - RNA, 22 nt, Human
acauuuguaugcguuuuuacug

SEQ ID NO: 669606 - RNA, 22 nt, Human
agaaguaguccaguggaaagua

SEQ ID NO: 669607 - RNA, 22 nt, Human
agggcucugagcuggaccaccu

SEQ ID NO: 669608 - RNA, 22 nt, Human
ugcacacauguuuacaagcauc

SEQ ID NO: 669609 - RNA, 22 nt, Human
aacuaaaguaaccaaggauauc

SEQ ID NO: 669610 - RNA, 22 nt, Human
gcucccucugcucaggcacuug

SEQ ID NO: 669611 - RNA, 22 nt, Human
uggcagcacuugaacuugagcc

SEQ ID NO: 669612 - RNA, 22 nt, Human
augggugugaaaauggucaucu

SEQ ID NO: 669613 - RNA, 22 nt, Human
ggcacuggccuggggccaagag

SEQ ID NO: 669614 - RNA, 22 nt, Human
ggacagagcagacgagcagcgg

SEQ ID NO: 669615 - RNA, 22 nt, Human
aguaaugugccugaaauacuug

SEQ ID NO: 669616 - RNA, 22 nt, Human
ccaaaguccauaguuuacauua

SEQ ID NO: 669617 - RNA, 22 nt, Human
ccuguccccucacaaugccacu

SEQ ID NO: 669618 - RNA, 19 nt, Human
uuucucucccucaucccga

SEQ ID NO: 669619 - RNA, 18 nt, Human
cuuccucuucuggagaaa

SEQ ID NO: 669620 - RNA, 22 nt, Human
cagugauggauauggagaaguc

SEQ ID NO: 669621 - RNA, 22 nt, Human
cagcucccagaacugaccaugu

SEQ ID NO: 669622 - RNA, 22 nt, Human
cugggccuccucugcccaagcu

SEQ ID NO: 669623 - RNA, 18 nt, Human
uuugaaggauggccugga

SEQ ID NO: 669624 - RNA, 22 nt, Human
guguaauugaaauugagaacca

SEQ ID NO: 669625 - RNA, 19 nt, Human
ggcucagggcgcugccgcc

SEQ ID NO: 669626 - RNA, 22 nt, Human
aaauugcuuauaaagaugaaug

SEQ ID NO: 669627 - RNA, 22 nt, Human
gaacagcagcuuccugggaauu

SEQ ID NO: 669628 - RNA, 22 nt, Human
ggucccugguucccucugagcu

SEQ ID NO: 669629 - RNA, 22 nt, Human
guacaugcagauuauagcuaau

SEQ ID NO: 669630 - RNA, 22 nt, Human
cagggcauccgugcuccaugcu

SEQ ID NO: 669631 - RNA, 22 nt, Human
aaguucaaggugauaguggcag

SEQ ID NO: 669632 - RNA, 22 nt, Human
cugaggcuuguccucucagcuu

SEQ ID NO: 669633 - RNA, 22 nt, Human
uugauuacuauguguugaaagc

SEQ ID NO: 669634 - RNA, 23 nt, Human
uggcucagcuaguuuuccauuuc

SEQ ID NO: 669635 - RNA, 22 nt, Human
acccaggagacagguugcagug

SEQ ID NO: 669636 - RNA, 22 nt, Human
aaccugagucuuuugauuugcu

SEQ ID NO: 669637 - RNA, 22 nt, Human
cagcagccagacaagauacauc

SEQ ID NO: 669638 - RNA, 22 nt, Human
uuccaagagccuuucuucuaga

SEQ ID NO: 669639 - RNA, 22 nt, Human
ugguccugguagcggugugcuu

SEQ ID NO: 669640 - RNA, 21 nt, Human
cugcccauuugugaugucccc

SEQ ID NO: 669641 - RNA, 22 nt, Human
ugcucaggaggaggcugugagg

SEQ ID NO: 669642 - RNA, 22 nt, Human
cugggaugauagugcuaguauu

SEQ ID NO: 669643 - RNA, 22 nt, Human
cagucucuuuauccaccaagcc

SEQ ID NO: 669644 - RNA, 22 nt, Human
aggggagccgaggggcaucugu

SEQ ID NO: 669645 - RNA, 22 nt, Human
gcugagguuuucugccugcuca

SEQ ID NO: 669646 - RNA, 22 nt, Human
agggaugcuuugcugacagauu

SEQ ID NO: 669647 - RNA, 19 nt, Human
agccagcaggccucugagc

SEQ ID NO: 669648 - RNA, 22 nt, Human
ucaaaguuacuugugguuuucu

SEQ ID NO: 669649 - RNA, 22 nt, Human
gggcaggugugcagagcuguug

SEQ ID NO: 669650 - RNA, 22 nt, Human
uggaacacuguggaugagaaga

SEQ ID NO: 669651 - RNA, 22 nt, Human
ggggcagggagguuaucgccga

SEQ ID NO: 669652 - RNA, 22 nt, Human
aaggaaccauuugugugcaugg

SEQ ID NO: 669653 - RNA, 22 nt, Human
aguguccuggcaaggguuucag

SEQ ID NO: 669654 - RNA, 22 nt, Human
agcaaguguaagaaugcagaau

SEQ ID NO: 669655 - RNA, 22 nt, Human
guccuuugaaggcaaaaggaga

SEQ ID NO: 669656 - RNA, 22 nt, Human
uuugugaacaaacaugaagaug

SEQ ID NO: 669657 - RNA, 22 nt, Human
cacaauuuguuugcucuuaguc

SEQ ID NO: 669658 - RNA, 22 nt, Human
uucuuucuucucaggcugggua

SEQ ID NO: 669659 - RNA, 22 nt, Human
gggguugguuuaaaugcuugag

SEQ ID NO: 669660 - RNA, 22 nt, Human
acccugggaccuggagguggau

SEQ ID NO: 669661 - RNA, 22 nt, Human
ugcauuggaaacucagcagcac

SEQ ID NO: 669662 - RNA, 22 nt, Human
uggcagggagccaccggucaug

SEQ ID NO: 669663 - RNA, 22 nt, Human
agcuuuaaaucaauccagugag

SEQ ID NO: 669664 - RNA, 22 nt, Human
uuucaaugacacaaaagagaaa

SEQ ID NO: 669665 - RNA, 22 nt, Human
acauucuuucaccuugugucca

SEQ ID NO: 669666 - RNA, 22 nt, Human
augaggucauccuggaguaagg

SEQ ID NO: 669667 - RNA, 21 nt, Human
uuuuacagaugaggggaaggg

SEQ ID NO: 669668 - RNA, 20 nt, Human
agcggcagcuuccugcuucg

SEQ ID NO: 669669 - RNA, 22 nt, Human
gacauaauaaucugaccuagau

SEQ ID NO: 669670 - RNA, 22 nt, Human
ucagcugccccaguggccccag

SEQ ID NO: 669671 - RNA, 20 nt, Human
ggaaacauuuuuauuuccau

SEQ ID NO: 669672 - RNA, 22 nt, Human
uuaagauuuucuucaguauuau

SEQ ID NO: 669673 - RNA, 22 nt, Human
caugaagcauguuuugucauga

SEQ ID NO: 669674 - RNA, 22 nt, Human
aucauucuaguccuuauggucu

SEQ ID NO: 669675 - RNA, 22 nt, Human
agcagcaacuuauuuuucuuau

SEQ ID NO: 669676 - RNA, 22 nt, Human
gcucuccaggucucaugcacug

SEQ ID NO: 669677 - RNA, 22 nt, Human
ucugaggguuguagagagggac

SEQ ID NO: 669678 - RNA, 22 nt, Human
gacuacucaaacuuucucuaua

SEQ ID NO: 669679 - RNA, 22 nt, Human
auuaaauuggaucugcauaguu

SEQ ID NO: 669680 - RNA, 22 nt, Human
cugguucugauuuugcugcauu

SEQ ID NO: 669681 - RNA, 19 nt, Human
ucugccucuggucaggcuc

SEQ ID NO: 669682 - RNA, 22 nt, Human
aaagacuggaaggugaggcugu

SEQ ID NO: 669683 - RNA, 22 nt, Human
auuucuguauccugcugucaga

SEQ ID NO: 669684 - RNA, 23 nt, Human
ccuggggcacuugaguccucauc

SEQ ID NO: 669685 - RNA, 22 nt, Human
ugcucuguucaguguaucuugu

SEQ ID NO: 669686 - RNA, 22 nt, Human
gucugcccuuggccugggacuu

SEQ ID NO: 669687 - RNA, 22 nt, Human
agagucugaaugcucagaguug

SEQ ID NO: 669688 - RNA, 20 nt, Human
acagaaagcugccuuguccc

SEQ ID NO: 669689 - RNA, 22 nt, Human
accauuuuggguauuuucagag

SEQ ID NO: 669690 - RNA, 22 nt, Human
guaaacaacacaaaucauuuga

SEQ ID NO: 669691 - RNA, 22 nt, Human
uuacacaaacacauuccagaua

SEQ ID NO: 669692 - RNA, 22 nt, Human
aacaggcagcagacugaaucug

SEQ ID NO: 669693 - RNA, 22 nt, Human
uccuggggaggucgaggcugag

SEQ ID NO: 669694 - RNA, 22 nt, Human
acucugcuauugcagugcaaaa

SEQ ID NO: 669695 - RNA, 21 nt, Human
guuugcaugaacaagucagcc

SEQ ID NO: 669696 - RNA, 22 nt, Human
ugcaauuucaaauaucagaaag

SEQ ID NO: 669697 - RNA, 23 nt, Human
ugggucagcugccuccaggacaa

SEQ ID NO: 669698 - RNA, 22 nt, Human
aggcccuuggacucaugcucga

SEQ ID NO: 669699 - RNA, 22 nt, Human
cuguuucagcuacuguuccaug

SEQ ID NO: 669700 - RNA, 22 nt, Human
accaguggaauuauucuguggu

SEQ ID NO: 669701 - RNA, 22 nt, Human
uacaaauguauuuuauuuuggu

SEQ ID NO: 669702 - RNA, 22 nt, Human
cuacugaugcuauacuucucag

SEQ ID NO: 669703 - RNA, 22 nt, Human
auaaugcugggagaaauuguua

SEQ ID NO: 669704 - RNA, 22 nt, Human
aaaggcaugugcaacuacaaau

SEQ ID NO: 669705 - RNA, 22 nt, Human
gcagcauacagggagaguacuc

SEQ ID NO: 669706 - RNA, 22 nt, Human
ucacaucugugugauugucauu

SEQ ID NO: 669707 - RNA, 22 nt, Human
aggcugcagaacagucaggugc

SEQ ID NO: 669708 - RNA, 22 nt, Human
gcucccagauuucagccuugug

SEQ ID NO: 669709 - RNA, 22 nt, Human
guccucaggcuugaguguuuau

SEQ ID NO: 669710 - RNA, 22 nt, Human
gcacugagcaccagccacagau

SEQ ID NO: 669711 - RNA, 22 nt, Human
ucacagcauuuuuagaaagauu

SEQ ID NO: 669712 - RNA, 22 nt, Human
aacuucaguugagaaaggcaug

SEQ ID NO: 669713 - RNA, 22 nt, Human
gcaguauauggauuuuaaacau

SEQ ID NO: 669714 - RNA, 22 nt, Human
gagcuccagcaucucugccaaa

SEQ ID NO: 669715 - RNA, 22 nt, Human
ucacaugcccuaccuaaucuua

SEQ ID NO: 669716 - RNA, 22 nt, Human
gguguccuugcagaaggcggcg

SEQ ID NO: 669717 - RNA, 22 nt, Human
ccucccagugccggggccggcu

SEQ ID NO: 669718 - RNA, 23 nt, Human
aaaugcacaguauugauuuuuaa

SEQ ID NO: 669719 - RNA, 22 nt, Human
ugucagccuugcuuuagcgguu

SEQ ID NO: 669720 - RNA, 15 nt, Human
agucaaaucuguuuu

SEQ ID NO: 669721 - RNA, 23 nt, Human
cucuccugaaggacaagcugccg

SEQ ID NO: 669722 - RNA, 22 nt, Human
ucucagagauuuuguuucccuu

SEQ ID NO: 669723 - RNA, 20 nt, Human
caguccugccccuuggggac

SEQ ID NO: 669724 - RNA, 22 nt, Human
acauguguggccgcuguagaca

SEQ ID NO: 669725 - RNA, 22 nt, Human
gcacaugucuuauucacuguua

SEQ ID NO: 669726 - RNA, 22 nt, Human
uccaggagguagugcuuaauuu

SEQ ID NO: 669727 - RNA, 22 nt, Human
uuaaaagggauguuaucuguaa

SEQ ID NO: 669728 - RNA, 22 nt, Human
ugguccugggcacaguauaugc

SEQ ID NO: 669729 - RNA, 22 nt, Human
ucucugaguuuuaaggaugaug

SEQ ID NO: 669730 - RNA, 22 nt, Human
agaaaauuuauucauguuaguu

SEQ ID NO: 669731 - RNA, 22 nt, Human
aggggaauggguagacuguuga

SEQ ID NO: 669732 - RNA, 22 nt, Human
aaugaguucugguucauuuuau

SEQ ID NO: 669733 - RNA, 22 nt, Human
uagucagcaugaaauaagcagc

SEQ ID NO: 669734 - RNA, 22 nt, Human
aagugugggaaguagguggcga

SEQ ID NO: 669735 - RNA, 22 nt, Human
ugauuguauagggguuauuaau

SEQ ID NO: 669736 - RNA, 22 nt, Human
ucaagacagugugauacuggcc

SEQ ID NO: 669737 - RNA, 22 nt, Human
gcagggacugugaucucacaga

SEQ ID NO: 669738 - RNA, 19 nt, Human
gcccugcaggagguggggc

SEQ ID NO: 669739 - RNA, 22 nt, Human
uuguaacaucaccaucaaaauc

SEQ ID NO: 669740 - RNA, 22 nt, Human
acaaacuaaaauucuuuauuga

SEQ ID NO: 669741 - RNA, 22 nt, Human
cuuguauuaagcuuagagaggc

SEQ ID NO: 669742 - RNA, 22 nt, Human
agucugugcuguuggugaggau

SEQ ID NO: 669743 - RNA, 22 nt, Human
agcaaagcuaccaauuauugag

SEQ ID NO: 669744 - RNA, 22 nt, Human
aggagcugggcugcugcuggga

SEQ ID NO: 669745 - RNA, 22 nt, Human
gcucagggucccuuggugcugg

SEQ ID NO: 669746 - RNA, 22 nt, Human
acagaccaaguuuccagcaggu

SEQ ID NO: 669747 - RNA, 22 nt, Human
auggccagggccaaaagagaug

SEQ ID NO: 669748 - RNA, 22 nt, Human
cccuggagggauuucucaauca

SEQ ID NO: 669749 - RNA, 22 nt, Human
aaaucaucucugcauccuuagc

SEQ ID NO: 669750 - RNA, 22 nt, Human
ugccaggcauuugacagacacu

SEQ ID NO: 669751 - RNA, 22 nt, Human
ccaucccuccuccaccagcuag

SEQ ID NO: 669752 - RNA, 22 nt, Human
ucacuugagauguaccacaaac

SEQ ID NO: 669753 - RNA, 22 nt, Human
agcucagggcaaagacucaaau

SEQ ID NO: 669754 - RNA, 20 nt, Human
ucugaacaaaauguaauguc

SEQ ID NO: 669755 - RNA, 22 nt, Human
ucugcuguuuacugugugauau

SEQ ID NO: 669756 - RNA, 22 nt, Human
ugacuugucaaagaaaugugug

SEQ ID NO: 669757 - RNA, 22 nt, Human
ugugccagucauccagaugugu

SEQ ID NO: 669758 - RNA, 22 nt, Human
uguauuuccugguuuagaucaa

SEQ ID NO: 669759 - RNA, 22 nt, Human
agugcuuuagcauccaacuguc

SEQ ID NO: 669760 - RNA, 22 nt, Human
agagccaggaucuguuuugggg

SEQ ID NO: 669761 - RNA, 22 nt, Human
cuucagugaauguugaguaagg

SEQ ID NO: 669762 - RNA, 22 nt, Human
ucugggucacugugggagggca

SEQ ID NO: 669763 - RNA, 22 nt, Human
aauagcugggaggcacauucau

SEQ ID NO: 669764 - RNA, 22 nt, Human
uacuauuuggaauuuuaaauug

SEQ ID NO: 669765 - RNA, 22 nt, Human
cuggagcugucuucacaggccu

SEQ ID NO: 669766 - RNA, 22 nt, Human
cagggcuguggaaaacuggugc

SEQ ID NO: 669767 - RNA, 23 nt, Human
agucaguguaaguuuggaaugca

SEQ ID NO: 669768 - RNA, 22 nt, Human
gcuggaaaucauauuuuguugu

SEQ ID NO: 669769 - RNA, 22 nt, Human
gaugcacuugccccuccucaga

SEQ ID NO: 669770 - RNA, 22 nt, Human
cugaggcucagcgugaggaaag

SEQ ID NO: 669771 - RNA, 22 nt, Human
agguucacacacacaaaaagau

SEQ ID NO: 669772 - RNA, 22 nt, Human
uuaggucauucccugagcagau

SEQ ID NO: 669773 - RNA, 22 nt, Human
uggaauguuuccccagccugca

SEQ ID NO: 669774 - RNA, 22 nt, Human
gagauucuguagucaggcaucu

SEQ ID NO: 669775 - RNA, 22 nt, Human
guauuucuagaaaaugcagauu

SEQ ID NO: 669776 - RNA, 22 nt, Human
guguaaggccccagguucuuua

SEQ ID NO: 669777 - RNA, 22 nt, Human
ugaacaaacugcauucuucacu

SEQ ID NO: 669778 - RNA, 22 nt, Human
cugcuguguuggcauuggauag

SEQ ID NO: 669779 - RNA, 22 nt, Human
gaacaucaaggucugugucuag

SEQ ID NO: 669780 - RNA, 22 nt, Human
ccugccuauguaagugguuucu

SEQ ID NO: 669781 - RNA, 22 nt, Human
aagauaauauucauuaacuaga

SEQ ID NO: 669782 - RNA, 22 nt, Human
acugcugauuuagcuuuguggg

SEQ ID NO: 669783 - RNA, 22 nt, Human
aaggggugggcauuagagcagu

SEQ ID NO: 669784 - RNA, 22 nt, Human
ggaaggaaauuggggcaguugu

SEQ ID NO: 669785 - RNA, 22 nt, Human
uaauacuugcuuuggauguaug

SEQ ID NO: 669786 - RNA, 22 nt, Human
auggguaaagcaggaagagagu

SEQ ID NO: 669787 - RNA, 22 nt, Human
agucacaugcauuuucuucaau

SEQ ID NO: 669788 - RNA, 22 nt, Human
uacuucaauuuguauaugugaa

SEQ ID NO: 669789 - RNA, 22 nt, Human
agauuucccucuuguauuugca

SEQ ID NO: 669790 - RNA, 22 nt, Human
ucagaauaugcuaaugacauuu

SEQ ID NO: 669791 - RNA, 22 nt, Human
gagcucccuggagguucagaua

SEQ ID NO: 669792 - RNA, 18 nt, Human
acugggccagcaggcagg

SEQ ID NO: 669793 - RNA, 20 nt, Human
gagcugaguguggucauggg

SEQ ID NO: 669794 - RNA, 22 nt, Human
agacauuuauucacacauuuau

SEQ ID NO: 669795 - RNA, 22 nt, Human
aaguaaucuggaauuugguuuu

SEQ ID NO: 669796 - RNA, 22 nt, Human
cugcuguguggugaaacucagu

SEQ ID NO: 669797 - RNA, 22 nt, Human
aaacuguauauuuauggcaugu

SEQ ID NO: 669798 - RNA, 22 nt, Human
uccucuggggcgugguccugga

SEQ ID NO: 669799 - RNA, 22 nt, Human
uuugaacaagagcuucacauua

SEQ ID NO: 669800 - RNA, 17 nt, Human
gguggaaguuucuaguu

SEQ ID NO: 669801 - RNA, 22 nt, Human
ggcucagaaggccaugcucugc

SEQ ID NO: 669802 - RNA, 20 nt, Human
gauuucaaagcagaguggcc

SEQ ID NO: 669803 - RNA, 22 nt, Human
aaagugcauucgaaaguccauc

SEQ ID NO: 669804 - RNA, 22 nt, Human
augcauauugauuauagauuca

SEQ ID NO: 669805 - RNA, 22 nt, Human
cccagcucaagcagagagcuaa

SEQ ID NO: 669806 - RNA, 22 nt, Human
uucaauucuaaacuaauauucu

SEQ ID NO: 669807 - RNA, 22 nt, Human
caugcugauucuuccugagcuu

SEQ ID NO: 669808 - RNA, 22 nt, Human
acagauauuuaagagcuuuugu

SEQ ID NO: 669809 - RNA, 22 nt, Human
aggcuaggggaacacuagaauc

SEQ ID NO: 669810 - RNA, 22 nt, Human
gugggcaguucaauucugggag

SEQ ID NO: 669811 - RNA, 22 nt, Human
gugucagauguccagggcagca

SEQ ID NO: 669812 - RNA, 22 nt, Human
aauagcaucuucccugguaacc

SEQ ID NO: 669813 - RNA, 22 nt, Human
agaggcucagaggccugguccu

SEQ ID NO: 669814 - RNA, 22 nt, Human
ucuggcucacuucaggcuucac

SEQ ID NO: 669815 - RNA, 22 nt, Human
gcuucugcgcacgcuucuuccc

SEQ ID NO: 669816 - RNA, 22 nt, Human
aagauguaaaggcaauauaaag

SEQ ID NO: 669817 - RNA, 22 nt, Human
cagcaugacagucugcagcaga

SEQ ID NO: 669818 - RNA, 22 nt, Human
agcccagccugauucuacaccc

SEQ ID NO: 669819 - RNA, 22 nt, Human
agauggugauagagcugggauu

SEQ ID NO: 669820 - RNA, 22 nt, Human
agagugauucuaguuagggaau

SEQ ID NO: 669821 - RNA, 22 nt, Human
ucuuuuaaaagcccugcugucu

SEQ ID NO: 669822 - RNA, 23 nt, Human
gcacauacuacacagaaaauggc

SEQ ID NO: 669823 - RNA, 22 nt, Human
caugagugucaucucagcagcu

SEQ ID NO: 669824 - RNA, 22 nt, Human
aagcugccuagaguugaauguc

SEQ ID NO: 669825 - RNA, 22 nt, Human
uuccacaagugauaucuagcug

SEQ ID NO: 669826 - RNA, 22 nt, Human
uggcucugugaacagacgacug

SEQ ID NO: 669827 - RNA, 22 nt, Human
agagugcaaccgaaacaagcag

SEQ ID NO: 669828 - RNA, 22 nt, Human
gagguccagccaagcggcaagg

SEQ ID NO: 669829 - RNA, 22 nt, Human
gccaauuuaucuuacucgugcu

SEQ ID NO: 669830 - RNA, 18 nt, Human
ucacagugcucuugccua

SEQ ID NO: 669831 - RNA, 17 nt, Human
gggcgcggguagagccc

SEQ ID NO: 669832 - RNA, 22 nt, Human
acaacaaaaucacuagucuucc

SEQ ID NO: 669833 - RNA, 22 nt, Human
gcagggucgcucuaggagauca

SEQ ID NO: 669834 - RNA, 22 nt, Human
gauguguuuccaggauuuguuu

SEQ ID NO: 669835 - RNA, 17 nt, Human
cuaaauacuugcguuuc

SEQ ID NO: 669836 - RNA, 22 nt, Human
agccaggggauucaucagggac

SEQ ID NO: 669837 - RNA, 22 nt, Human
gauuccacggcucagccucaac

SEQ ID NO: 669838 - RNA, 22 nt, Human
cugcagaucuuguguacuuguc

SEQ ID NO: 669839 - RNA, 22 nt, Human
gugcuguuuugagugcuacccc

SEQ ID NO: 669840 - RNA, 22 nt, Human
uuaaagauucugaggcugauua

SEQ ID NO: 669841 - RNA, 22 nt, Human
ugugaggagggucaaacugagu

SEQ ID NO: 669842 - RNA, 22 nt, Human
ucucuaguauaauauagcaaaa

SEQ ID NO: 669843 - RNA, 22 nt, Human
aaagcugcuuuaaacaucuaug

SEQ ID NO: 669844 - RNA, 22 nt, Human
gcagagaccccgcagugaggcc

SEQ ID NO: 669845 - RNA, 22 nt, Human
aguaaaauuguauuggaaaaca

SEQ ID NO: 669846 - RNA, 22 nt, Human
gcugucucgccugacacuggcu

SEQ ID NO: 669847 - RNA, 22 nt, Human
auauuccuguuuuuaacacuuu

SEQ ID NO: 669848 - RNA, 22 nt, Human
cucuuuucaaaauuucacugca

SEQ ID NO: 669849 - RNA, 22 nt, Human
gcuguggccuaguuuguuauau

SEQ ID NO: 669850 - RNA, 22 nt, Human
aagucaaucacaugcacacuga

SEQ ID NO: 669851 - RNA, 22 nt, Human
accuuugguaaguuuccaaaac

SEQ ID NO: 669852 - RNA, 22 nt, Human
agggcaauccagccagcugauc

SEQ ID NO: 669853 - RNA, 22 nt, Human
cuaaggguugaaacagcaagaa

SEQ ID NO: 669854 - RNA, 22 nt, Human
uuuuauugcaauaaagugugua

SEQ ID NO: 669855 - RNA, 22 nt, Human
ucucccaaggcacagaaagagu

SEQ ID NO: 669856 - RNA, 22 nt, Human
aaagcaaucuaguuccaauucu

SEQ ID NO: 669857 - RNA, 17 nt, Human
cucuguacaggaaagag

SEQ ID NO: 669858 - RNA, 22 nt, Human
cagaacugggcagggagcagag

SEQ ID NO: 669859 - RNA, 22 nt, Human
ucccaaaguauuagcauuucaa

SEQ ID NO: 669860 - RNA, 22 nt, Human
ugcaugcacuuggcuggcacgu

SEQ ID NO: 669861 - RNA, 22 nt, Human
ccagugcauaaucaauacagcc

SEQ ID NO: 669862 - RNA, 22 nt, Human
uccuguuucuccugcaaaaucc

SEQ ID NO: 669863 - RNA, 22 nt, Human
cccaggagguggagguugcagc

SEQ ID NO: 669864 - RNA, 22 nt, Human
ugacuuuaaagcucacucuuuu

SEQ ID NO: 669865 - RNA, 22 nt, Human
ugcggcagccaccgcguggccc

SEQ ID NO: 669866 - RNA, 22 nt, Human
cagguccuggcaucaggcaggu

SEQ ID NO: 669867 - RNA, 22 nt, Human
cuggcuugggucuaccugccuu

SEQ ID NO: 669868 - RNA, 22 nt, Human
gacagcagaauccauucccagu

SEQ ID NO: 669869 - RNA, 22 nt, Human
cugggggcaauggucagagugu

SEQ ID NO: 669870 - RNA, 22 nt, Human
gugacagucaaagacaugacuu

SEQ ID NO: 669871 - RNA, 22 nt, Human
gagagggcaaacuuguagcuaa

SEQ ID NO: 669872 - RNA, 22 nt, Human
aguuaacuaaacugugaguaaa

SEQ ID NO: 669873 - RNA, 22 nt, Human
uuguaugaccacaaucugacgu

SEQ ID NO: 669874 - RNA, 19 nt, Human
aacaucauggcucuuucca

SEQ ID NO: 669875 - RNA, 22 nt, Human
cacaguguggcaaauuucaacu

SEQ ID NO: 669876 - RNA, 22 nt, Human
agaaaccagggcuuaccagugc

SEQ ID NO: 669877 - RNA, 22 nt, Human
gugcauuugugcaugcacaugu

SEQ ID NO: 669878 - RNA, 16 nt, Human
ccucuggcaauuagau

SEQ ID NO: 669879 - RNA, 22 nt, Human
ugguccuucguggugcaguucu

SEQ ID NO: 669880 - RNA, 22 nt, Human
uaaagcacauaucuuacaauaa

SEQ ID NO: 669881 - RNA, 23 nt, Human
aauuaaauugcuagauccagggc

SEQ ID NO: 669882 - RNA, 22 nt, Human
agggcugccccaguccagccgg

SEQ ID NO: 669883 - RNA, 22 nt, Human
ggcacugcagguaagugcuguc

SEQ ID NO: 669884 - RNA, 22 nt, Human
ccagugugaccaucuguuagcu

SEQ ID NO: 669885 - RNA, 22 nt, Human
augaaacagugaauuagucaag

SEQ ID NO: 669886 - RNA, 22 nt, Human
uggcuggaccugggcuggaauu

SEQ ID NO: 669887 - RNA, 22 nt, Human
ggcugaggcucaugccaucuug

SEQ ID NO: 669888 - RNA, 22 nt, Human
acagagguggaccucagcaggc

SEQ ID NO: 669889 - RNA, 20 nt, Human
agaggccaguuaggagucua

SEQ ID NO: 669890 - RNA, 22 nt, Human
aaguggugguaugaaccgaggg

SEQ ID NO: 669891 - RNA, 22 nt, Human
auuguauuuaggagaaaagggu

SEQ ID NO: 669892 - RNA, 22 nt, Human
auuauuaggugcucucugacaa

SEQ ID NO: 669893 - RNA, 22 nt, Human
acaaggaacaagcauguaguuu

SEQ ID NO: 669894 - RNA, 22 nt, Human
uagcuguugggagagggcuaga

SEQ ID NO: 669895 - RNA, 22 nt, Human
cucuuaaaaacuugauauauuu

SEQ ID NO: 669896 - RNA, 18 nt, Human
aaacuguauuucuuucua

SEQ ID NO: 669897 - RNA, 22 nt, Human
ccccagcacuaccagaagccag

SEQ ID NO: 669898 - RNA, 22 nt, Human
aacugcauucagaaagcucacu

SEQ ID NO: 669899 - RNA, 22 nt, Human
ccaucccugccauuauagccca

SEQ ID NO: 669900 - RNA, 22 nt, Human
acguggagccacagauggagca

SEQ ID NO: 669901 - RNA, 22 nt, Human
accagcuguuaucuguaguauc

SEQ ID NO: 669902 - RNA, 17 nt, Human
auggaggcagacagguc

SEQ ID NO: 669903 - RNA, 22 nt, Human
agaggccagcccaggccaccga

SEQ ID NO: 669904 - RNA, 22 nt, Human
cccaaaguacaaguaaacaugu

SEQ ID NO: 669905 - RNA, 22 nt, Human
auguagagcuccuugauccucc

SEQ ID NO: 669906 - RNA, 22 nt, Human
gcuggggucugugaggagggcu

SEQ ID NO: 669907 - RNA, 22 nt, Human
ucuggggaccauggcaucuaaa

SEQ ID NO: 669908 - RNA, 22 nt, Human
cagcaaaagccagcauaagcuc

SEQ ID NO: 669909 - RNA, 22 nt, Human
ucauugaagacuuacuggcuuc

SEQ ID NO: 669910 - RNA, 22 nt, Human
augcuauuccagaauguaaauu

SEQ ID NO: 669911 - RNA, 22 nt, Human
ccuccagguguuacauaugacu

SEQ ID NO: 669912 - RNA, 22 nt, Human
cugauucuuugaagaugcaccc

SEQ ID NO: 669913 - RNA, 22 nt, Human
guccugggggcagcugugucca

SEQ ID NO: 669914 - RNA, 22 nt, Human
cuuggaacaaauuaaacaauac

SEQ ID NO: 669915 - RNA, 22 nt, Human
gcugucugagaacaugguggaa

SEQ ID NO: 669916 - RNA, 22 nt, Human
agcagacauggcuuggaugugg

SEQ ID NO: 669917 - RNA, 22 nt, Human
acuggggcaggaaaguaugcug

SEQ ID NO: 669918 - RNA, 22 nt, Human
uucaguucacauguaucauggc

SEQ ID NO: 669919 - RNA, 22 nt, Human
cacugcuuuaaggcugaguaac

SEQ ID NO: 669920 - RNA, 17 nt, Human
gugcagggaugaaggau

SEQ ID NO: 669921 - RNA, 22 nt, Human
gucuggaagagcaggaauaaac

SEQ ID NO: 669922 - RNA, 16 nt, Human
aggcagagauuuaccc

SEQ ID NO: 669923 - RNA, 22 nt, Human
cucagcuacuugggaagcuuag

SEQ ID NO: 669924 - RNA, 22 nt, Human
augugagggcucaggcugacug

SEQ ID NO: 669925 - RNA, 22 nt, Human
aagaagcagcugccaggccagu

SEQ ID NO: 669926 - RNA, 22 nt, Human
ucucuucuauuugagacuauuu

SEQ ID NO: 669927 - RNA, 20 nt, Human
gcuugcuuugucugaugggc

SEQ ID NO: 669928 - RNA, 22 nt, Human
agugcucacucuccacagugcc

SEQ ID NO: 669929 - RNA, 22 nt, Human
uucagcgauauuauucaugagc

SEQ ID NO: 669930 - RNA, 22 nt, Human
uuuccuucccuggaugagaagu

SEQ ID NO: 669931 - RNA, 23 nt, Human
agagaaaaauaucugggcacauu

SEQ ID NO: 669932 - RNA, 22 nt, Human
gaaaccugugcugauuuguuag

SEQ ID NO: 669933 - RNA, 22 nt, Human
gagcugagucugcagucgccau

SEQ ID NO: 669934 - RNA, 22 nt, Human
cuggcugggguaccaguugaac

SEQ ID NO: 669935 - RNA, 22 nt, Human
ugcuaaauaacuuacauagugg

SEQ ID NO: 669936 - RNA, 22 nt, Human
ugaggccagucucaucacaggc

SEQ ID NO: 669937 - RNA, 22 nt, Human
gggcuuggcacaugggcucagc

SEQ ID NO: 669938 - RNA, 22 nt, Human
gugucugcuuucagcuaguagg

SEQ ID NO: 669939 - RNA, 23 nt, Human
acucagagaccccgggaagugac

SEQ ID NO: 669940 - RNA, 20 nt, Human
ucugggcagggcacauggaa

SEQ ID NO: 669941 - RNA, 22 nt, Human
guuauucuauuaaugugauugu

SEQ ID NO: 669942 - RNA, 22 nt, Human
gcucaccuucguccagcagccg

SEQ ID NO: 669943 - RNA, 22 nt, Human
uaggaaacuaauacagucugga

SEQ ID NO: 669944 - RNA, 22 nt, Human
ccacagaaagccugggaagugg

SEQ ID NO: 669945 - RNA, 22 nt, Human
gggagcuggaguuguguugccu

SEQ ID NO: 669946 - RNA, 23 nt, Human
gagcucagguagggcucgcccgc

SEQ ID NO: 669947 - RNA, 22 nt, Human
ugugaucucuauaggauucaau

SEQ ID NO: 669948 - RNA, 22 nt, Human
gucuguccaucagcaaaggcuu

SEQ ID NO: 669949 - RNA, 22 nt, Human
acaggcugcugggcuccgugcu

SEQ ID NO: 669950 - RNA, 22 nt, Human
ccugaggacagugugaccaugg

SEQ ID NO: 669951 - RNA, 18 nt, Human
aagaggaggagcagguug

SEQ ID NO: 669952 - RNA, 22 nt, Human
gacaauguaaaucaggauagca

SEQ ID NO: 669953 - RNA, 22 nt, Human
caaauaagaaccacaggggagu

SEQ ID NO: 669954 - RNA, 19 nt, Human
aguauagaguauugaggag

SEQ ID NO: 669955 - RNA, 22 nt, Human
agaaauacugugagagcagccu

SEQ ID NO: 669956 - RNA, 22 nt, Human
aacugaacauaaugaaagccaa

SEQ ID NO: 669957 - RNA, 22 nt, Human
uuggagggacagauggcuaggc

SEQ ID NO: 669958 - RNA, 22 nt, Human
guuaaacaagcuggacacugaa

SEQ ID NO: 669959 - RNA, 22 nt, Human
augauuuaaagucauugugaac

SEQ ID NO: 669960 - RNA, 22 nt, Human
caggcagcucaaccuugggagc

SEQ ID NO: 669961 - RNA, 22 nt, Human
ccaaggaggccccaggucagcu

SEQ ID NO: 669962 - RNA, 22 nt, Human
acacucucagcuuuucaacuua

SEQ ID NO: 669963 - RNA, 22 nt, Human
uacagagagcuccggacauuca

SEQ ID NO: 669964 - RNA, 22 nt, Human
uuuguucauuuugagcucauca

SEQ ID NO: 669965 - RNA, 18 nt, Human
ugcauuuaguacaucuag

SEQ ID NO: 669966 - RNA, 22 nt, Human
auucagucaaaccacuggucau

SEQ ID NO: 669967 - RNA, 22 nt, Human
aaacacuugcaaaaugguuccu

SEQ ID NO: 669968 - RNA, 22 nt, Human
gucaauauauucugucucuuug

SEQ ID NO: 669969 - RNA, 22 nt, Human
gaggaaaaugggacaggcugua

SEQ ID NO: 669970 - RNA, 22 nt, Human
ucacccaggcuggugcgcagug

SEQ ID NO: 669971 - RNA, 22 nt, Human
gggcugagacgauggggucuuc

SEQ ID NO: 669972 - RNA, 22 nt, Human
uggcuccacuacuggguguguu

SEQ ID NO: 669973 - RNA, 22 nt, Human
gcugccagccagggugggaucc

SEQ ID NO: 669974 - RNA, 22 nt, Human
uucccuuuguuaaauuggaaga

SEQ ID NO: 669975 - RNA, 22 nt, Human
auguaguguagagauuagucuc

SEQ ID NO: 669976 - RNA, 22 nt, Human
caggcagccugagggaucuggg

SEQ ID NO: 669977 - RNA, 22 nt, Human
cacccagcacagagggaggcga

SEQ ID NO: 669978 - RNA, 22 nt, Human
cucacagguucugcagcucaca

SEQ ID NO: 669979 - RNA, 22 nt, Human
uugaugagaccauugccgcguc

SEQ ID NO: 669980 - RNA, 22 nt, Human
uagcaccauacccggcagcucg

SEQ ID NO: 669981 - RNA, 22 nt, Human
uccuugaauugugccacuuacc

SEQ ID NO: 669982 - RNA, 22 nt, Human
uccaggagacacaagguacaua

SEQ ID NO: 669983 - RNA, 22 nt, Human
uaucauuuagaguauuucuuca

SEQ ID NO: 669984 - RNA, 22 nt, Human
ccaguggaaauguggucaggau

SEQ ID NO: 669985 - RNA, 22 nt, Human
acaggcugagcguccaucuuca

SEQ ID NO: 669986 - RNA, 22 nt, Human
aacaaaugauaccaguucucaa

SEQ ID NO: 669987 - RNA, 17 nt, Human
cgugagcagcaggugcc

SEQ ID NO: 669988 - RNA, 23 nt, Human
ucucaaauaugaucugggucauc

SEQ ID NO: 669989 - RNA, 22 nt, Human
ucuuccuucuuugaugacaagg

SEQ ID NO: 669990 - RNA, 22 nt, Human
aaccuuuugcaagugccuugac

SEQ ID NO: 669991 - RNA, 22 nt, Human
uguggguccuccugugugcccg

SEQ ID NO: 669992 - RNA, 22 nt, Human
ucuucuccagugcuucugcaca

SEQ ID NO: 669993 - RNA, 22 nt, Human
acagccagugcuccgugaggac

SEQ ID NO: 669994 - RNA, 22 nt, Human
gccugucucuuggaacuuggua

SEQ ID NO: 669995 - RNA, 22 nt, Human
uuaaaaugcagauucugauuca

SEQ ID NO: 669996 - RNA, 22 nt, Human
caguuucuauggcugggcucug

SEQ ID NO: 669997 - RNA, 22 nt, Human
cggcagagcuuccugcucagcg

SEQ ID NO: 669998 - RNA, 22 nt, Human
uuucagaaaacuuaucaucagu

SEQ ID NO: 669999 - RNA, 22 nt, Human
acagccugcagccccaggucgc

SEQ ID NO: 670000 - RNA, 22 nt, Human
caggcacagcuaagacuggcca

SEQ ID NO: 670001 - RNA, 22 nt, Human
agagccaggugcugcuguuuga

SEQ ID NO: 670002 - RNA, 21 nt, Human
auacuuugaauuacagccuug

SEQ ID NO: 670003 - RNA, 22 nt, Human
agcugggccugagcuggaagcu

SEQ ID NO: 670004 - RNA, 22 nt, Human
acaaagugaauugcaucgaguu

SEQ ID NO: 670005 - RNA, 21 nt, Human
acuucccaggaccuacucaga

SEQ ID NO: 670006 - RNA, 22 nt, Human
ggacaacacuucauuccagcua

SEQ ID NO: 670007 - RNA, 20 nt, Human
ugugugaacacggacucugu

SEQ ID NO: 670008 - RNA, 22 nt, Human
cugggacugccauucacagcca

SEQ ID NO: 670009 - RNA, 22 nt, Human
ucucagagaggggccgggccuu

SEQ ID NO: 670010 - RNA, 22 nt, Human
uuucauaaacaguagaagacua

SEQ ID NO: 670011 - RNA, 22 nt, Human
caguucaaaguuaagcagcagu

SEQ ID NO: 670012 - RNA, 22 nt, Human
gugggagcauggucccagugcc

SEQ ID NO: 670013 - RNA, 21 nt, Human
uuuuuucuugcgugaggccug

SEQ ID NO: 670014 - RNA, 22 nt, Human
auauuauagacagagucuucug

SEQ ID NO: 670015 - RNA, 20 nt, Human
gggcucuuagguagcagggg

SEQ ID NO: 670016 - RNA, 23 nt, Human
cugugucuaugcagccauaucca

SEQ ID NO: 670017 - RNA, 22 nt, Human
augggcuggcagccugaacagc

SEQ ID NO: 670018 - RNA, 22 nt, Human
acuaauugagugcaugaucuuu

SEQ ID NO: 670019 - RNA, 22 nt, Human
cuuucuuauaccugucagggcc

SEQ ID NO: 670020 - RNA, 19 nt, Human
ucaaagcaagcauguucug

SEQ ID NO: 670021 - RNA, 22 nt, Human
aguggcagagcaggugcuggaa

SEQ ID NO: 670022 - RNA, 23 nt, Human
gcauugaacaaaagaggggagua

SEQ ID NO: 670023 - RNA, 22 nt, Human
ucacagggauggaauagaaaua

SEQ ID NO: 670024 - RNA, 22 nt, Human
aacagccucagugagauuagga

SEQ ID NO: 670025 - RNA, 22 nt, Human
ucccugaaacaucucuguggau

SEQ ID NO: 670026 - RNA, 22 nt, Human
cauuuguagcuauuuacuguau

SEQ ID NO: 670027 - RNA, 22 nt, Human
acugugaguuuauuuaucugau

SEQ ID NO: 670028 - RNA, 22 nt, Human
cugcucucuguuccccuggauc

SEQ ID NO: 670029 - RNA, 22 nt, Human
aauggcuuuugcacuuaaaucg

SEQ ID NO: 670030 - RNA, 22 nt, Human
guggggagggagaugcugaagu

SEQ ID NO: 670031 - RNA, 22 nt, Human
auuugugaucgugcgugaugaa

SEQ ID NO: 670032 - RNA, 22 nt, Human
ugacuuuggcuuaagcagcagu

SEQ ID NO: 670033 - RNA, 20 nt, Human
ucccaggcugggcuccagcu

SEQ ID NO: 670034 - RNA, 22 nt, Human
aagcacagaccagaucuccagg

SEQ ID NO: 670035 - RNA, 22 nt, Human
acucugcuaucuuagcaaaagg

SEQ ID NO: 670036 - RNA, 22 nt, Human
gggccacauugaagggugggua

SEQ ID NO: 670037 - RNA, 22 nt, Human
cagaagacugcagggaagggac

SEQ ID NO: 670038 - RNA, 22 nt, Human
cccuggcucuucaccaccugcc

SEQ ID NO: 670039 - RNA, 22 nt, Human
gaauucugguuuugaaaugaau

SEQ ID NO: 670040 - RNA, 22 nt, Human
aaggaaaugugccugacacugc

SEQ ID NO: 670041 - RNA, 22 nt, Human
uuucaguugauugcuuggguua

SEQ ID NO: 670042 - RNA, 22 nt, Human
agcagcccagauaaagcucagg

SEQ ID NO: 670043 - RNA, 22 nt, Human
acugaacacaccugcagcacgu

SEQ ID NO: 670044 - RNA, 22 nt, Human
cuuuacaaauagggagggagug

SEQ ID NO: 670045 - RNA, 22 nt, Human
caaagggcauggccugagcacu

SEQ ID NO: 670046 - RNA, 22 nt, Human
ucacugaaggaagacacuguca

SEQ ID NO: 670047 - RNA, 22 nt, Human
cuacauuuguucaaauaagcug

SEQ ID NO: 670048 - RNA, 22 nt, Human
agcuacucagaguuccacucua

SEQ ID NO: 670049 - RNA, 22 nt, Human
uuccacagcccaagcugguggc

SEQ ID NO: 670050 - RNA, 22 nt, Human
guuucuuagguaaauucuuuga

SEQ ID NO: 670051 - RNA, 22 nt, Human
agcucuaaauggaauuuugccu

SEQ ID NO: 670052 - RNA, 22 nt, Human
auuugcauuuagaaagaucacu

SEQ ID NO: 670053 - RNA, 22 nt, Human
uaaaaguaggaaugaaacgcau

SEQ ID NO: 670054 - RNA, 22 nt, Human
cuugggagacacaagaagacau

SEQ ID NO: 670055 - RNA, 20 nt, Human
ugucugcucauaauaaaccc

SEQ ID NO: 670056 - RNA, 22 nt, Human
uggcuucugagucuccugacau

SEQ ID NO: 670057 - RNA, 22 nt, Human
ucuucuuccuccacagggccca

SEQ ID NO: 670058 - RNA, 22 nt, Human
cauucaaaaugggcugaccugu

SEQ ID NO: 670059 - RNA, 22 nt, Human
uuucccuuguuccuuccucuga

SEQ ID NO: 670060 - RNA, 22 nt, Human
cuguuauuugcuggaagaguuu

SEQ ID NO: 670061 - RNA, 22 nt, Human
acacugugauuucuggguucca

SEQ ID NO: 670062 - RNA, 22 nt, Human
gcuguguggcugugccgucacg

SEQ ID NO: 670063 - RNA, 22 nt, Human
cagaggcucaccagccuuucac

SEQ ID NO: 670064 - RNA, 22 nt, Human
cugcagcaguacucagcagcca

SEQ ID NO: 670065 - RNA, 22 nt, Human
ggagggggaaacuuuggcugcc

SEQ ID NO: 670066 - RNA, 22 nt, Human
ucuggauggucagcucuuccug

SEQ ID NO: 670067 - RNA, 22 nt, Human
ugcuuaaacacauacauacaua

SEQ ID NO: 670068 - RNA, 22 nt, Human
cucuucucugcagccuuugaag

SEQ ID NO: 670069 - RNA, 22 nt, Human
auuccaaaaggauguuagaaug

SEQ ID NO: 670070 - RNA, 22 nt, Human
ucucugagacaguagccucugc

SEQ ID NO: 670071 - RNA, 19 nt, Human
gcuaggguugguggcgugc

SEQ ID NO: 670072 - RNA, 20 nt, Human
guccaggacccagcaggagg

SEQ ID NO: 670073 - RNA, 22 nt, Human
gacuucaugacauucaggucag

SEQ ID NO: 670074 - RNA, 19 nt, Human
agcuuugccaaaaacuuag

SEQ ID NO: 670075 - RNA, 22 nt, Human
gggagacacgcugcaggcauaa

SEQ ID NO: 670076 - RNA, 22 nt, Human
acugcagccuugaacucugggc

SEQ ID NO: 670077 - RNA, 22 nt, Human
uaaggaaaguacauguuuugac

SEQ ID NO: 670078 - RNA, 22 nt, Human
uaggaagccuaaauuaaguggu

SEQ ID NO: 670079 - RNA, 22 nt, Human
aagaugauaggacuugcuuaag

SEQ ID NO: 670080 - RNA, 22 nt, Human
cagcaucucauuugacuucugc

SEQ ID NO: 670081 - RNA, 22 nt, Human
ucaaugucucuuucuaaaaugu

SEQ ID NO: 670082 - RNA, 22 nt, Human
ucugacagucacaguggaggau

SEQ ID NO: 670083 - RNA, 22 nt, Human
ucauuucacuucucuagggaga

SEQ ID NO: 670084 - RNA, 22 nt, Human
ggggggcuguucuggacaggaa

SEQ ID NO: 670085 - RNA, 22 nt, Human
gacaaugugcaauugcagcuag

SEQ ID NO: 670086 - RNA, 22 nt, Human
uugcaauagccuuauuuccaaa

SEQ ID NO: 670087 - RNA, 22 nt, Human
ucagggaccccucugaguggag

SEQ ID NO: 670088 - RNA, 22 nt, Human
cauucccaugacuccugcucag

SEQ ID NO: 670089 - RNA, 22 nt, Human
gggugggguucaggaaucuuca

SEQ ID NO: 670090 - RNA, 22 nt, Human
cuuuguuguuaauuggcgcuua

SEQ ID NO: 670091 - RNA, 22 nt, Human
uggaggcauuuuagguugucac

SEQ ID NO: 670092 - RNA, 22 nt, Human
aagcagcauguggguuaucggg

SEQ ID NO: 670093 - RNA, 22 nt, Human
aucagaaauugcuaccagugga

SEQ ID NO: 670094 - RNA, 22 nt, Human
uccagacccaugacccugggga

SEQ ID NO: 670095 - RNA, 22 nt, Human
cuggugggaggcaagguggaag

SEQ ID NO: 670096 - RNA, 22 nt, Human
agugcaugccuuccuguggaug

SEQ ID NO: 670097 - RNA, 22 nt, Human
aauguucaaacagaucacuuag

SEQ ID NO: 670098 - RNA, 22 nt, Human
ggaguuaaggccuaagaaauag

SEQ ID NO: 670099 - RNA, 22 nt, Human
uacagaauuagauuauuagaga

SEQ ID NO: 670100 - RNA, 22 nt, Human
agagggugggcacgugauggau

SEQ ID NO: 670101 - RNA, 22 nt, Human
ggcuccucucuggccgcucccg

SEQ ID NO: 670102 - RNA, 22 nt, Human
agcagaacagucuucuaguucu

SEQ ID NO: 670103 - RNA, 22 nt, Human
uuuauugaauuguaacccuauu

SEQ ID NO: 670104 - RNA, 22 nt, Human
ucaggugucaagcagggagcug

SEQ ID NO: 670105 - RNA, 21 nt, Human
aggcuguccuuugccagcccu

SEQ ID NO: 670106 - RNA, 21 nt, Human
ugugagaagaguacugagguc

SEQ ID NO: 670107 - RNA, 18 nt, Human
cccagcuggugggucagu

SEQ ID NO: 670108 - RNA, 20 nt, Human
uauaaauucagagcuuuggu

SEQ ID NO: 670109 - RNA, 22 nt, Human
ugaguuacugccuaguaacuug

SEQ ID NO: 670110 - RNA, 22 nt, Human
ggggcacuuccaggcugaggcu

SEQ ID NO: 670111 - RNA, 19 nt, Human
ugcuuccucaccaucuccc

SEQ ID NO: 670112 - RNA, 22 nt, Human
ucugaaaguaucuggaucuuuu

SEQ ID NO: 670113 - RNA, 22 nt, Human
ucucuucccuuuaugguaugug

SEQ ID NO: 670114 - RNA, 22 nt, Human
augcagguccaaacgcuagugu

SEQ ID NO: 670115 - RNA, 22 nt, Human
agggaaauggagaguguaguuu

SEQ ID NO: 670116 - RNA, 22 nt, Human
caccugggucauugcugguguu

SEQ ID NO: 670117 - RNA, 22 nt, Human
caugaaauguguuaaucucuug

SEQ ID NO: 670118 - RNA, 22 nt, Human
cccucacagucuaggagcagcu

SEQ ID NO: 670119 - RNA, 22 nt, Human
ggaggagauuccccucucacuu

SEQ ID NO: 670120 - RNA, 22 nt, Human
aggccugagccccagguuuguu

SEQ ID NO: 670121 - RNA, 22 nt, Human
aaaaguuagcuauuaguaggug

SEQ ID NO: 670122 - RNA, 22 nt, Human
aagcaucuuaaaaaguaucaga

SEQ ID NO: 670123 - RNA, 22 nt, Human
agcuucuugacggauguucugg

SEQ ID NO: 670124 - RNA, 22 nt, Human
ggcuuccuggagaaggucugag

SEQ ID NO: 670125 - RNA, 22 nt, Human
uguaaacauaucagacuuucuu

SEQ ID NO: 670126 - RNA, 18 nt, Human
gccaggcaggguggggaa

SEQ ID NO: 670127 - RNA, 19 nt, Human
ugccugcuccuggcuucca

SEQ ID NO: 670128 - RNA, 22 nt, Human
uuuggaauauuaaaaugucuca

SEQ ID NO: 670129 - RNA, 22 nt, Human
agugagggacuagugcugggga

SEQ ID NO: 670130 - RNA, 22 nt, Human
uguguggcaagcuguaugcuag

SEQ ID NO: 670131 - RNA, 22 nt, Human
agaauugcuggaauuugcuuua

SEQ ID NO: 670132 - RNA, 22 nt, Human
aauugcuuaugccaggugagag

SEQ ID NO: 670133 - RNA, 22 nt, Human
uccuggguucauguccuggugc

SEQ ID NO: 670134 - RNA, 23 nt, Human
auaucacacccaguacagucucc

SEQ ID NO: 670135 - RNA, 22 nt, Human
auggcccugcugguuugaucgu

SEQ ID NO: 670136 - RNA, 22 nt, Human
ggaggccaaagugugggcggcu

SEQ ID NO: 670137 - RNA, 22 nt, Human
ggagcugcucagagccaguccc

SEQ ID NO: 670138 - RNA, 22 nt, Human
ugcuuuauucaggguuuacccc

SEQ ID NO: 670139 - RNA, 22 nt, Human
uccaggcugccacagugcaacg

SEQ ID NO: 670140 - RNA, 22 nt, Human
aggcaguggaaggagaaagcaa

SEQ ID NO: 670141 - RNA, 22 nt, Human
gcaccaggugcagccgggcccc

SEQ ID NO: 670142 - RNA, 22 nt, Human
ccccagcagacucagggcaggu

SEQ ID NO: 670143 - RNA, 22 nt, Human
uggccagaacucagacaugugg

SEQ ID NO: 670144 - RNA, 22 nt, Human
gaggccaaguuggagaccaggu

SEQ ID NO: 670145 - RNA, 22 nt, Human
ucuguuuucucuguauuuugac

SEQ ID NO: 670146 - RNA, 22 nt, Human
aaggcuuguagauuugggcuuu

SEQ ID NO: 670147 - RNA, 22 nt, Human
gcuaggaggaagaaugugaauu

SEQ ID NO: 670148 - RNA, 22 nt, Human
aguauguggcacagaauuucuu

SEQ ID NO: 670149 - RNA, 22 nt, Human
ucuaggguugaggccacaggga

SEQ ID NO: 670150 - RNA, 22 nt, Human
uuuggaauggaauagagauugc

SEQ ID NO: 670151 - RNA, 22 nt, Human
ggaagcugccaguccaccagcu

SEQ ID NO: 670152 - RNA, 22 nt, Human
aucaagaguuauauuucauagu

SEQ ID NO: 670153 - RNA, 22 nt, Human
aagugucuagcaccuggaugca

SEQ ID NO: 670154 - RNA, 22 nt, Human
cagggccagcgucucgggcuau

SEQ ID NO: 670155 - RNA, 21 nt, Human
ugacuaauugugauaaagugc

SEQ ID NO: 670156 - RNA, 22 nt, Human
agcaaagaguaauuuuguuuug

SEQ ID NO: 670157 - RNA, 22 nt, Human
cagcuuuuggcaggaugaccag

SEQ ID NO: 670158 - RNA, 22 nt, Human
auaaucagaauucaugaaagau

SEQ ID NO: 670159 - RNA, 22 nt, Human
ucugcugagaugcccaugguua

SEQ ID NO: 670160 - RNA, 22 nt, Human
acaggaugggcgcacagagcua

SEQ ID NO: 670161 - RNA, 22 nt, Human
gacccuggcagguagccucaca

SEQ ID NO: 670162 - RNA, 22 nt, Human
gcauuuccugugcuuggcauau

SEQ ID NO: 670163 - RNA, 22 nt, Human
ugcugagauaagcuaugaccag

SEQ ID NO: 670164 - RNA, 16 nt, Human
gcuggagggagggguu

SEQ ID NO: 670165 - RNA, 22 nt, Human
aauguuuugcauuaguuuucua

SEQ ID NO: 670166 - RNA, 22 nt, Human
uguaaaccagggucauccuuag

SEQ ID NO: 670167 - RNA, 22 nt, Human
aaucuguugaugcaaaccuccc

SEQ ID NO: 670168 - RNA, 22 nt, Human
agcuggagaaaccugggagggu

SEQ ID NO: 670169 - RNA, 22 nt, Human
uugaggcaaaaucaacgggaag

SEQ ID NO: 670170 - RNA, 22 nt, Human
agaaagcuggagucaagcagag

SEQ ID NO: 670171 - RNA, 23 nt, Human
agaugaggcuucuccauguuggu

SEQ ID NO: 670172 - RNA, 23 nt, Human
uccagcagagccuuccaggaggg

SEQ ID NO: 670173 - RNA, 22 nt, Human
gacugugggcuccuugagggca

SEQ ID NO: 670174 - RNA, 22 nt, Human
cauuuauucucagauccuuguc

SEQ ID NO: 670175 - RNA, 22 nt, Human
ugaggaaagaaaggcaugcaug

SEQ ID NO: 670176 - RNA, 22 nt, Human
gagcacagccaaaguaagaagg

SEQ ID NO: 670177 - RNA, 22 nt, Human
auccccagacuuuagauuucuc

SEQ ID NO: 670178 - RNA, 22 nt, Human
uaucacacuguuuuaauuacuu

SEQ ID NO: 670179 - RNA, 22 nt, Human
cuauuuuaacuugauuaccucu

SEQ ID NO: 670180 - RNA, 22 nt, Human
uuuaguguaagcauaaagaaca

SEQ ID NO: 670181 - RNA, 22 nt, Human
gccaggcugcuggcugcugucc

SEQ ID NO: 670182 - RNA, 22 nt, Human
uacuauacucuccauuuuauag

SEQ ID NO: 670183 - RNA, 18 nt, Human
uaggaagcuuaauguuuu

SEQ ID NO: 670184 - RNA, 22 nt, Human
cuguuucaauuugaggaucagc

SEQ ID NO: 670185 - RNA, 22 nt, Human
ggagggccccuccagugggcag

SEQ ID NO: 670186 - RNA, 22 nt, Human
aagacaacagagaugacagacu

SEQ ID NO: 670187 - RNA, 22 nt, Human
ggcagaugacagaccaguaugu

SEQ ID NO: 670188 - RNA, 20 nt, Human
aauuccagcaugauauuuau

SEQ ID NO: 670189 - RNA, 22 nt, Human
cuuccccaaguagagaggggag

SEQ ID NO: 670190 - RNA, 22 nt, Human
ucaucccucugccaggcccagg

SEQ ID NO: 670191 - RNA, 22 nt, Human
cagcaugaaaaguguugcuauc

SEQ ID NO: 670192 - RNA, 22 nt, Human
ccuaggcccuaggcuuccauca

SEQ ID NO: 670193 - RNA, 22 nt, Human
uugcuuugguagcagcuauaga

SEQ ID NO: 670194 - RNA, 22 nt, Human
auuuagacuucccagcacugug

SEQ ID NO: 670195 - RNA, 22 nt, Human
uuugcauuaguuuagauuucaa

SEQ ID NO: 670196 - RNA, 22 nt, Human
ccagcaggguugguuucuucug

SEQ ID NO: 670197 - RNA, 22 nt, Human
ucagaggcuggaagagccuccu

SEQ ID NO: 670198 - RNA, 19 nt, Human
aaggcuuggcugagcuggg

SEQ ID NO: 670199 - RNA, 22 nt, Human
agcuggugaaccugaggcacag

SEQ ID NO: 670200 - RNA, 17 nt, Human
acagagguuauacagac

SEQ ID NO: 670201 - RNA, 22 nt, Human
gaugucuuugcuguuauccacu

SEQ ID NO: 670202 - RNA, 22 nt, Human
uggggcucaugccugcuggaac

SEQ ID NO: 670203 - RNA, 21 nt, Human
uggcucuguucaauauaugga

SEQ ID NO: 670204 - RNA, 22 nt, Human
uggcuggaggguuagugagaua

SEQ ID NO: 670205 - RNA, 22 nt, Human
cuguauuuuuuaagaauaucuc

SEQ ID NO: 670206 - RNA, 22 nt, Human
ugguggcaauucaaagacagca

SEQ ID NO: 670207 - RNA, 22 nt, Human
cugauggagugauggagaaauu

SEQ ID NO: 670208 - RNA, 22 nt, Human
uuuguacuaugguuuuucacua

SEQ ID NO: 670209 - RNA, 22 nt, Human
cacagcagggcauggcuguugu

SEQ ID NO: 670210 - RNA, 22 nt, Human
gcugagagugggugcagugcuu

SEQ ID NO: 670211 - RNA, 22 nt, Human
uuuggacauguugagucugaua

SEQ ID NO: 670212 - RNA, 22 nt, Human
aggcccuguccauggugcugaa

SEQ ID NO: 670213 - RNA, 22 nt, Human
caaccugacaagguuaaugaau

SEQ ID NO: 670214 - RNA, 22 nt, Human
aaaugaacucuuccugcauccc

SEQ ID NO: 670215 - RNA, 22 nt, Human
ugcagauucaaaugaaaugcaa

SEQ ID NO: 670216 - RNA, 22 nt, Human
cacaguauucacugggcagauu

SEQ ID NO: 670217 - RNA, 22 nt, Human
uacaaacuccgaaguuuguacc

SEQ ID NO: 670218 - RNA, 22 nt, Human
gcucccaccuuugcuaucagua

SEQ ID NO: 670219 - RNA, 22 nt, Human
gcaggcagaucaccugucagga

SEQ ID NO: 670220 - RNA, 22 nt, Human
uccugggcugcagggaagagca

SEQ ID NO: 670221 - RNA, 22 nt, Human
cagcuuccacagacuuggcucg

SEQ ID NO: 670222 - RNA, 22 nt, Human
aauaugcacucugauuuagcag

SEQ ID NO: 670223 - RNA, 22 nt, Human
gcuuccaggucauucucacccu

SEQ ID NO: 670224 - RNA, 22 nt, Human
ggagucaggauccuggggaugg

SEQ ID NO: 670225 - RNA, 22 nt, Human
cugaagucagauggcacaaggu

SEQ ID NO: 670226 - RNA, 22 nt, Human
cacaaggacauguauauuuaug

SEQ ID NO: 670227 - RNA, 22 nt, Human
guggcagaaauauucuugcucu

SEQ ID NO: 670228 - RNA, 22 nt, Human
ucuggcuguguaagguagcacc

SEQ ID NO: 670229 - RNA, 19 nt, Human
ucuuuucacgcauuuugaa

SEQ ID NO: 670230 - RNA, 22 nt, Human
ugaguccacuuuaaaaugucag

SEQ ID NO: 670231 - RNA, 19 nt, Human
guguauguaaguugugagg

SEQ ID NO: 670232 - RNA, 22 nt, Human
guccagcccucugccuccaggu

SEQ ID NO: 670233 - RNA, 22 nt, Human
aacaagauguuuugauauaugu

SEQ ID NO: 670234 - RNA, 22 nt, Human
acugggcuguuuuuugagugga

SEQ ID NO: 670235 - RNA, 22 nt, Human
cccaugagguggagguugcagu

SEQ ID NO: 670236 - RNA, 22 nt, Human
cuggguccugcucucccuaaga

SEQ ID NO: 670237 - RNA, 22 nt, Human
auggaggaugugcagcaugggc

SEQ ID NO: 670238 - RNA, 22 nt, Human
ucugggcucuuaguguacccuc

SEQ ID NO: 670239 - RNA, 23 nt, Human
acaaaugcccauacaucuaguuc

SEQ ID NO: 670240 - RNA, 22 nt, Human
gaagauuuucuccuuuaaauga

SEQ ID NO: 670241 - RNA, 22 nt, Human
auggucuuaggguaggcagcug

SEQ ID NO: 670242 - RNA, 22 nt, Human
ucuguaucacccguucccagaa

SEQ ID NO: 670243 - RNA, 22 nt, Human
cucaguuuccucaacugcaaaa

SEQ ID NO: 670244 - RNA, 22 nt, Human
gcagcacacgguggugcccugg

SEQ ID NO: 670245 - RNA, 22 nt, Human
caggcucuuccauccugcugag

SEQ ID NO: 670246 - RNA, 22 nt, Human
uggagcagcuaagccucugaga

SEQ ID NO: 670247 - RNA, 22 nt, Human
aggcagguguuaacccucugag

SEQ ID NO: 670248 - RNA, 22 nt, Human
gccacagggcgagcggaggcca

SEQ ID NO: 670249 - RNA, 22 nt, Human
cagaggcucuuccucacugccc

SEQ ID NO: 670250 - RNA, 22 nt, Human
gcugcuggaacaaaucacccca

SEQ ID NO: 670251 - RNA, 22 nt, Human
augucacauuggagcugcugga

SEQ ID NO: 670252 - RNA, 22 nt, Human
ggcuuuauuuugcaugaaugcu

SEQ ID NO: 670253 - RNA, 22 nt, Human
aagcccagaugagaucccugga

SEQ ID NO: 670254 - RNA, 22 nt, Human
acaguauauaugguuaucugau

SEQ ID NO: 670255 - RNA, 22 nt, Human
gaaggcccugguauucuugagg

SEQ ID NO: 670256 - RNA, 22 nt, Human
gccaggcuggccagcaccuucu

SEQ ID NO: 670257 - RNA, 22 nt, Human
ucugacuuccuccacaucuguu

SEQ ID NO: 670258 - RNA, 22 nt, Human
uucuuccucuguaaaaggugac

SEQ ID NO: 670259 - RNA, 22 nt, Human
gcauggcauuaacaagauggaa

SEQ ID NO: 670260 - RNA, 22 nt, Human
ccauuacuuagaaaggaacuga

SEQ ID NO: 670261 - RNA, 22 nt, Human
ggaggggcaggucccaaguugu

SEQ ID NO: 670262 - RNA, 22 nt, Human
uuauauguaugcuuauaaacca

SEQ ID NO: 670263 - RNA, 22 nt, Human
acccaggaggugacacagggcu

SEQ ID NO: 670264 - RNA, 22 nt, Human
uucugucuggaaaaggacauag

SEQ ID NO: 670265 - RNA, 19 nt, Human
uucacaauuaugaaauuag

SEQ ID NO: 670266 - RNA, 22 nt, Human
cccaggguaaucaugugaagcc

SEQ ID NO: 670267 - RNA, 22 nt, Human
gcacacagacuaaccauauuuc

SEQ ID NO: 670268 - RNA, 22 nt, Human
aagagauugguuauaagagauu

SEQ ID NO: 670269 - RNA, 22 nt, Human
accucugcuucccggguucaag

SEQ ID NO: 670270 - RNA, 22 nt, Human
caagaugugccuaaucagaccu

SEQ ID NO: 670271 - RNA, 22 nt, Human
cagcaaaauuugaggauugccu

SEQ ID NO: 670272 - RNA, 22 nt, Human
cagcggccggugaggaagggga

SEQ ID NO: 670273 - RNA, 22 nt, Human
ccuggcagcuaagugcuuugag

SEQ ID NO: 670274 - RNA, 20 nt, Human
ucagcaugcuccucagacau

SEQ ID NO: 670275 - RNA, 22 nt, Human
cuuuacuaucaggaauaaacaa

SEQ ID NO: 670276 - RNA, 23 nt, Human
aauucaaauucagugugacuagg

SEQ ID NO: 670277 - RNA, 22 nt, Human
ggcgaggccgggacaggcugga

SEQ ID NO: 670278 - RNA, 22 nt, Human
acuuaaaaagaaucuuuucacg

SEQ ID NO: 670279 - RNA, 22 nt, Human
gucucuggguuaagcagugcau

SEQ ID NO: 670280 - RNA, 22 nt, Human
cccagccucugggcucacccaa

SEQ ID NO: 670281 - RNA, 22 nt, Human
gguggcaccuugaucuuggacu

SEQ ID NO: 670282 - RNA, 22 nt, Human
gcuuccugucccucagccauga

SEQ ID NO: 670283 - RNA, 22 nt, Human
uggacucuaagcagaggaucua

SEQ ID NO: 670284 - RNA, 22 nt, Human
auuguacagguuggaggaagug

SEQ ID NO: 670285 - RNA, 22 nt, Human
aggcugagggcuccugagggca

SEQ ID NO: 670286 - RNA, 22 nt, Human
ccugggcaggaugggcccggug

SEQ ID NO: 670287 - RNA, 22 nt, Human
aaaaagauagcauugugcuccu

SEQ ID NO: 670288 - RNA, 22 nt, Human
uaauaacaauuguaggacauga

SEQ ID NO: 670289 - RNA, 22 nt, Human
cagcagccuaggguuccaucau

SEQ ID NO: 670290 - RNA, 22 nt, Human
ugcagaguugcuuugauagucc

SEQ ID NO: 670291 - RNA, 22 nt, Human
ggugggaugccucuggagaagu

SEQ ID NO: 670292 - RNA, 22 nt, Human
gcuggcucuacauuugagguca

SEQ ID NO: 670293 - RNA, 22 nt, Human
gaaacuuuuaaaccucaugagu

SEQ ID NO: 670294 - RNA, 22 nt, Human
gcauugaucuguaugcauuaag

SEQ ID NO: 670295 - RNA, 21 nt, Human
aggaggcugucucuuucagcu

SEQ ID NO: 670296 - RNA, 22 nt, Human
ucugauguguuuaagaaagaag

SEQ ID NO: 670297 - RNA, 22 nt, Human
uagaucaggcugcuuagauaga

SEQ ID NO: 670298 - RNA, 23 nt, Human
cccagaccuugugcugcccuugg

SEQ ID NO: 670299 - RNA, 22 nt, Human
uuucagagaacugaguccuugc

SEQ ID NO: 670300 - RNA, 22 nt, Human
ugccuggguguaaagggccaac

SEQ ID NO: 670301 - RNA, 20 nt, Human
ccaguccaccugagacaugu

SEQ ID NO: 670302 - RNA, 16 nt, Human
cagccugcagugguca

SEQ ID NO: 670303 - RNA, 22 nt, Human
acaaugaagggagacacuugcu

SEQ ID NO: 670304 - RNA, 22 nt, Human
gauucuugggccuucugaaguu

SEQ ID NO: 670305 - RNA, 21 nt, Human
ugucuccuguuggcacauggc

SEQ ID NO: 670306 - RNA, 22 nt, Human
uuuuauauugagugagaguucc

SEQ ID NO: 670307 - RNA, 22 nt, Human
uuguaaaugaccuuuucuaauu

SEQ ID NO: 670308 - RNA, 22 nt, Human
acaucuuuauacuaguccuuga

SEQ ID NO: 670309 - RNA, 22 nt, Human
uuggaauagggaggcuggcaua

SEQ ID NO: 670310 - RNA, 22 nt, Human
uggaaagugcucuagacuuucu

SEQ ID NO: 670311 - RNA, 22 nt, Human
uucuggaggagaaagggugggc

SEQ ID NO: 670312 - RNA, 22 nt, Human
uuucaugaggcugcauaaggag

SEQ ID NO: 670313 - RNA, 22 nt, Human
ucuuuaagccaagauauauuua

SEQ ID NO: 670314 - RNA, 22 nt, Human
agucucacuucuugagcuaugc

SEQ ID NO: 670315 - RNA, 22 nt, Human
gcugggccagacuuucaauguc

SEQ ID NO: 670316 - RNA, 18 nt, Human
aaacccacucagcgcuga

SEQ ID NO: 670317 - RNA, 22 nt, Human
aaagcucagucagugguguaug

SEQ ID NO: 670318 - RNA, 16 nt, Human
ggaggaaggcauagug

SEQ ID NO: 670319 - RNA, 22 nt, Human
ucugaggcuaagagacagaggc

SEQ ID NO: 670320 - RNA, 23 nt, Human
caaaaguuagcccuucccaucuc

SEQ ID NO: 670321 - RNA, 22 nt, Human
uuauucacuucuuggucccuca

SEQ ID NO: 670322 - RNA, 22 nt, Human
cugggcagcuaccaccacugcu

SEQ ID NO: 670323 - RNA, 22 nt, Human
gcugauggcuugcuggcugaca

SEQ ID NO: 670324 - RNA, 22 nt, Human
agcaggguccugaggugaguca

SEQ ID NO: 670325 - RNA, 23 nt, Human
ugagcccaggaggucaaggcugc

SEQ ID NO: 670326 - RNA, 22 nt, Human
ugccuuuuccagcuuccaggag

SEQ ID NO: 670327 - RNA, 22 nt, Human
gcauaucaugacuucuaucuua

SEQ ID NO: 670328 - RNA, 22 nt, Human
ccagauguuccccuggaggccu

SEQ ID NO: 670329 - RNA, 22 nt, Human
aggagccaccuaggagcuguuu

SEQ ID NO: 670330 - RNA, 22 nt, Human
caaacuguucucugugggauuc

SEQ ID NO: 670331 - RNA, 22 nt, Human
caugcagucaauaaacaugugu

SEQ ID NO: 670332 - RNA, 22 nt, Human
ugaagcagcuucuuucugucaa

SEQ ID NO: 670333 - RNA, 22 nt, Human
uuuguuagagugugggaggcug

SEQ ID NO: 670334 - RNA, 19 nt, Human
gcgaggaagucacuguggc

SEQ ID NO: 670335 - RNA, 23 nt, Human
uuucagaagugguccuaggaagc

SEQ ID NO: 670336 - RNA, 22 nt, Human
uauuuaucgagugucuacuaug

SEQ ID NO: 670337 - RNA, 22 nt, Human
caggcacuuugcugggggcgca

SEQ ID NO: 670338 - RNA, 22 nt, Human
cuggcccagagagcagagcuua

SEQ ID NO: 670339 - RNA, 22 nt, Human
agaugcauguuuaugucuuucc

SEQ ID NO: 670340 - RNA, 22 nt, Human
ugucaugaguuauuucauagga

SEQ ID NO: 670341 - RNA, 22 nt, Human
aaagcagcaaauacuuuugcac

SEQ ID NO: 670342 - RNA, 23 nt, Human
gccugccugaccugugcaaaguc

SEQ ID NO: 670343 - RNA, 22 nt, Human
aaaauuuuacugguguuuccuu

SEQ ID NO: 670344 - RNA, 22 nt, Human
cacagaggcggaaaauucugaa

SEQ ID NO: 670345 - RNA, 19 nt, Human
ggagacucagcccaugccu

SEQ ID NO: 670346 - RNA, 22 nt, Human
cucuccaggcugggacaggacc

SEQ ID NO: 670347 - RNA, 21 nt, Human
uagugucuuaagagccuugca

SEQ ID NO: 670348 - RNA, 21 nt, Human
guucaaauccugacacuacac

SEQ ID NO: 670349 - RNA, 17 nt, Human
ugaggcucggugaggag

SEQ ID NO: 670350 - RNA, 22 nt, Human
ugucaggaggguccagagaaaa

SEQ ID NO: 670351 - RNA, 22 nt, Human
ugggucagaaucagagaguugc

SEQ ID NO: 670352 - RNA, 22 nt, Human
ccucaggggcuuuucguuguug

SEQ ID NO: 670353 - RNA, 22 nt, Human
aacugauaauggacacauaaaa

SEQ ID NO: 670354 - RNA, 23 nt, Human
uccugaggaauggcaucucacau

SEQ ID NO: 670355 - RNA, 22 nt, Human
uuggccagguccauuucuccau

SEQ ID NO: 670356 - RNA, 22 nt, Human
acagguggggaggcugagguuc

SEQ ID NO: 670357 - RNA, 22 nt, Human
auucaaguccagcuucucuaca

SEQ ID NO: 670358 - RNA, 22 nt, Human
aggacuaaggaacagcugauuc

SEQ ID NO: 670359 - RNA, 19 nt, Human
ccaggccuccugggagguc

SEQ ID NO: 670360 - RNA, 19 nt, Human
uugaauuguuuugaguagg

SEQ ID NO: 670361 - RNA, 21 nt, Human
auaaauucugagaggcucugc

SEQ ID NO: 670362 - RNA, 22 nt, Human
ucagggaaaggggagagucauu

SEQ ID NO: 670363 - RNA, 22 nt, Human
aagcacagcuggaacagcagga

SEQ ID NO: 670364 - RNA, 22 nt, Human
cauuucuaccaaaugugacugg

SEQ ID NO: 670365 - RNA, 20 nt, Human
ucucugcuguccacauuugc

SEQ ID NO: 670366 - RNA, 22 nt, Human
cacacacaguuuuguauucugu

SEQ ID NO: 670367 - RNA, 22 nt, Human
uuuaggcauacuuuugggagaa

SEQ ID NO: 670368 - RNA, 22 nt, Human
uguauauaagcauuuacuuguu

SEQ ID NO: 670369 - RNA, 22 nt, Human
gcagcccagagcgcaggacccc

SEQ ID NO: 670370 - RNA, 22 nt, Human
cuaagaaauguugugaaugcca

SEQ ID NO: 670371 - RNA, 22 nt, Human
gacacaggauuccuggcucugc

SEQ ID NO: 670372 - RNA, 19 nt, Human
agguggguaagcaguucuc

SEQ ID NO: 670373 - RNA, 22 nt, Human
gccugggaaagaguagggaaau

SEQ ID NO: 670374 - RNA, 22 nt, Human
aaugcaauaccuuuuuaugcug

SEQ ID NO: 670375 - RNA, 22 nt, Human
augcuaaggcccaggagaaaau

SEQ ID NO: 670376 - RNA, 22 nt, Human
acugucugugccagaugcuggg

SEQ ID NO: 670377 - RNA, 22 nt, Human
uauacugaguguguuaaugaug

SEQ ID NO: 670378 - RNA, 22 nt, Human
cucagggaauuauuucuguccu

SEQ ID NO: 670379 - RNA, 22 nt, Human
ucuggcagcgaagcguguacuu

SEQ ID NO: 670380 - RNA, 22 nt, Human
ccuuggauuuugugcccacgcc

SEQ ID NO: 670381 - RNA, 22 nt, Human
uguuuauugagugccuacuaua

SEQ ID NO: 670382 - RNA, 22 nt, Human
auuguuaaaaagguggaaaugc

SEQ ID NO: 670383 - RNA, 22 nt, Human
gaaggagagggucaaggauaau

SEQ ID NO: 670384 - RNA, 22 nt, Human
cacaaaugacugaaacgacugu

SEQ ID NO: 670385 - RNA, 22 nt, Human
cagguucccagguccagggcuu

SEQ ID NO: 670386 - RNA, 22 nt, Human
agcaguggcuggauggugugcu

SEQ ID NO: 670387 - RNA, 20 nt, Human
auguccugcuucuccucacc

SEQ ID NO: 670388 - RNA, 20 nt, Human
augaggccagcagggcucag

SEQ ID NO: 670389 - RNA, 22 nt, Human
agcacagguaauacagaguaac

SEQ ID NO: 670390 - RNA, 22 nt, Human
ucuguguuuaaaagauaugucc

SEQ ID NO: 670391 - RNA, 22 nt, Human
agccaagcaccacuggcacucg

SEQ ID NO: 670392 - RNA, 22 nt, Human
gggagcaguuaaaaugauuccu

SEQ ID NO: 670393 - RNA, 22 nt, Human
ucuugagucuaaucugaacuuu

SEQ ID NO: 670394 - RNA, 22 nt, Human
aaaaguaaucgcaguuuuugcc

SEQ ID NO: 670395 - RNA, 22 nt, Human
ggugacggggcccagguuuccu

SEQ ID NO: 670396 - RNA, 22 nt, Human
agagcagagggcucugggacaa

SEQ ID NO: 670397 - RNA, 22 nt, Human
ugaaacaauuagaauguaauga

SEQ ID NO: 670398 - RNA, 22 nt, Human
gggagacaaggagaaccaaaga

SEQ ID NO: 670399 - RNA, 22 nt, Human
gcacacagaaucagugggcaua

SEQ ID NO: 670400 - RNA, 22 nt, Human
cuccuucaugucauguguccgg

SEQ ID NO: 670401 - RNA, 21 nt, Human
ucaaaucauguacugaccaca

SEQ ID NO: 670402 - RNA, 22 nt, Human
aagcaccuggguuauaucuuag

SEQ ID NO: 670403 - RNA, 22 nt, Human
agggcagcuaaggugcugacug

SEQ ID NO: 670404 - RNA, 22 nt, Human
uguuucuuuguagauauucuuu

SEQ ID NO: 670405 - RNA, 22 nt, Human
auccugaguuccugccucuaaa

SEQ ID NO: 670406 - RNA, 22 nt, Human
cugaggccucuguucaccagaa

SEQ ID NO: 670407 - RNA, 22 nt, Human
aagcccuggcccaaccuugauu

SEQ ID NO: 670408 - RNA, 22 nt, Human
ggcaccaucagcugugcagggg

SEQ ID NO: 670409 - RNA, 21 nt, Human
ggacaauuguucauuuucuuu

SEQ ID NO: 670410 - RNA, 22 nt, Human
cucuuagcugcuguucuuugag

SEQ ID NO: 670411 - RNA, 22 nt, Human
ucaggcccuuugcugcugcccc

SEQ ID NO: 670412 - RNA, 22 nt, Human
ggcugcaggaugcccagccgug

SEQ ID NO: 670413 - RNA, 21 nt, Human
ggaggucccuucugguuucag

SEQ ID NO: 670414 - RNA, 22 nt, Human
cacucugaugguuucuguucaa

SEQ ID NO: 670415 - RNA, 22 nt, Human
uacaggagcauggggaagggau

SEQ ID NO: 670416 - RNA, 22 nt, Human
gaaagcacccaagauuuccuuc

SEQ ID NO: 670417 - RNA, 22 nt, Human
uuugacaaauauuuauuggcac

SEQ ID NO: 670418 - RNA, 22 nt, Human
uaggccauugauuuuuauaagu

SEQ ID NO: 670419 - RNA, 21 nt, Human
ggcaguaagauuuacuuuaag

SEQ ID NO: 670420 - RNA, 22 nt, Human
gaaauaauacagugcucuucuc

SEQ ID NO: 670421 - RNA, 22 nt, Human
guuugccugccgacgcucucau

SEQ ID NO: 670422 - RNA, 22 nt, Human
aacaccagucccaagagaggcu

SEQ ID NO: 670423 - RNA, 22 nt, Human
acaaaaagggagaugagguaga

SEQ ID NO: 670424 - RNA, 20 nt, Human
cagcccuuuauccuccuaug

SEQ ID NO: 670425 - RNA, 22 nt, Human
ggcuccagggaguggagagaag

SEQ ID NO: 670426 - RNA, 22 nt, Human
aaaaaugugaccacaggguguu

SEQ ID NO: 670427 - RNA, 22 nt, Human
caggcugggacugaccccugcu

SEQ ID NO: 670428 - RNA, 22 nt, Human
aagugacaaaaggguauccaaa

SEQ ID NO: 670429 - RNA, 22 nt, Human
uccaagaaucagucucuuuugg

SEQ ID NO: 670430 - RNA, 22 nt, Human
cauggcaggaaaaugaacaggc

SEQ ID NO: 670431 - RNA, 22 nt, Human
accccaggaaguggaggucaug

SEQ ID NO: 670432 - RNA, 22 nt, Human
gugugagccaugauguguccag

SEQ ID NO: 670433 - RNA, 22 nt, Human
uccaagaagagccuuucuccuc

SEQ ID NO: 670434 - RNA, 22 nt, Human
aaacuucagggaauaaaagagu

SEQ ID NO: 670435 - RNA, 22 nt, Human
auugugcagaauuggaauugca

SEQ ID NO: 670436 - RNA, 22 nt, Human
aucauuuggggaauuguggaca

SEQ ID NO: 670437 - RNA, 22 nt, Human
cagcugugcuagaagccacgaa

SEQ ID NO: 670438 - RNA, 22 nt, Human
cccaaggaagacgcuugugaua

SEQ ID NO: 670439 - RNA, 22 nt, Human
cugcugagcccuggcacaggug

SEQ ID NO: 670440 - RNA, 22 nt, Human
auucaaaccccauagacaacuu

SEQ ID NO: 670441 - RNA, 22 nt, Human
auugauaucaguuugcugauug

SEQ ID NO: 670442 - RNA, 23 nt, Human
gccuggauuaaggcagugacuuc

SEQ ID NO: 670443 - RNA, 22 nt, Human
ccaucuguaucugacaaauucu

SEQ ID NO: 670444 - RNA, 22 nt, Human
ucccuggcagcuaagggugguc

SEQ ID NO: 670445 - RNA, 22 nt, Human
agccccuugcacuuccccacgc

SEQ ID NO: 670446 - RNA, 22 nt, Human
augaaugauuugucagucacag

SEQ ID NO: 670447 - RNA, 22 nt, Human
augugcaaauccaaugugaaug

SEQ ID NO: 670448 - RNA, 18 nt, Human
ugcugggguagaauccac

SEQ ID NO: 670449 - RNA, 22 nt, Human
ugaccccacugugcucagaggu

SEQ ID NO: 670450 - RNA, 22 nt, Human
guaacaaaguuucuaggugcug

SEQ ID NO: 670451 - RNA, 21 nt, Human
auggcugguggcucagccucc

SEQ ID NO: 670452 - RNA, 22 nt, Human
guauuucccccagacucccugg

SEQ ID NO: 670453 - RNA, 22 nt, Human
cagcuucccuuggcugagcaga

SEQ ID NO: 670454 - RNA, 22 nt, Human
uguauaaauuuaaauuccugcu

SEQ ID NO: 670455 - RNA, 22 nt, Human
guggggcuuccuggggcaaguu

SEQ ID NO: 670456 - RNA, 22 nt, Human
gaaggggacuggcagcugcaga

SEQ ID NO: 670457 - RNA, 22 nt, Human
uuuguucaauccagacaauagc

SEQ ID NO: 670458 - RNA, 22 nt, Human
uggcuuuauaaauccacugguu

SEQ ID NO: 670459 - RNA, 22 nt, Human
uuagccauguugaagauuuaga

SEQ ID NO: 670460 - RNA, 22 nt, Human
caugcauauuacuagcacagca

SEQ ID NO: 670461 - RNA, 22 nt, Human
guaugcaucgacucaagucuga

SEQ ID NO: 670462 - RNA, 22 nt, Human
ccaggcucugacauagauggga

SEQ ID NO: 670463 - RNA, 23 nt, Human
aguguucagcauguaguaaauac

SEQ ID NO: 670464 - RNA, 22 nt, Human
ucaguuaauauggguaaagcau

SEQ ID NO: 670465 - RNA, 22 nt, Human
cacaggaagcaagccuggggcc

SEQ ID NO: 670466 - RNA, 22 nt, Human
uugugaaaucguguuuggaagc

SEQ ID NO: 670467 - RNA, 22 nt, Human
ggagugaguacuggaguagcug

SEQ ID NO: 670468 - RNA, 22 nt, Human
uucuggaagccaugggaacagg

SEQ ID NO: 670469 - RNA, 22 nt, Human
ugcuggcuguucuagggaggcc

SEQ ID NO: 670470 - RNA, 22 nt, Human
ccugccuguaagauggguacaa

SEQ ID NO: 670471 - RNA, 22 nt, Human
auagaucaauauuuagaaacuu

SEQ ID NO: 670472 - RNA, 22 nt, Human
uggaggagugugauugucugcc

SEQ ID NO: 670473 - RNA, 22 nt, Human
agagagcauggcacagaggggu

SEQ ID NO: 670474 - RNA, 22 nt, Human
auagauguguguaaguacauaa

SEQ ID NO: 670475 - RNA, 22 nt, Human
ccaccuggggccucugagucuc

SEQ ID NO: 670476 - RNA, 22 nt, Human
guucacagcugggacaagacug

SEQ ID NO: 670477 - RNA, 22 nt, Human
aaugaugacaggauaaagaaca

SEQ ID NO: 670478 - RNA, 22 nt, Human
cacaugguggugcuugauaagc

SEQ ID NO: 670479 - RNA, 22 nt, Human
uccagggcucauucccucugca

SEQ ID NO: 670480 - RNA, 22 nt, Human
uggguucuuucacuucucaguu

SEQ ID NO: 670481 - RNA, 18 nt, Human
aagccagagaccacugcc

SEQ ID NO: 670482 - RNA, 22 nt, Human
acaaugcauaccuagcagcuca

SEQ ID NO: 670483 - RNA, 22 nt, Human
agcugugaccuucaagagcuac

SEQ ID NO: 670484 - RNA, 22 nt, Human
augaaagugaagguuuacuaag

SEQ ID NO: 670485 - RNA, 22 nt, Human
uggggccugagguggagcugca

SEQ ID NO: 670486 - RNA, 22 nt, Human
ccagcugucacucagaaaggcc

SEQ ID NO: 670487 - RNA, 21 nt, Human
gcuggcucucugacgugcuuu

SEQ ID NO: 670488 - RNA, 22 nt, Human
gauugaaaggucuuuaaauugg

SEQ ID NO: 670489 - RNA, 22 nt, Human
ugacauuuaauuaacgaaugcu

SEQ ID NO: 670490 - RNA, 22 nt, Human
uucugcuuauucuguagccuuu

SEQ ID NO: 670491 - RNA, 22 nt, Human
cagggcuggguuaaaagcaggg

SEQ ID NO: 670492 - RNA, 22 nt, Human
auauucuauaagcaguuggaag

SEQ ID NO: 670493 - RNA, 22 nt, Human
ugucucugaggugagggucagc

SEQ ID NO: 670494 - RNA, 22 nt, Human
auuaaaugguggucauucauuu

SEQ ID NO: 670495 - RNA, 22 nt, Human
cuggcucccggggaucgagcac

SEQ ID NO: 670496 - RNA, 22 nt, Human
aagcuuaaucagucugguugca

SEQ ID NO: 670497 - RNA, 20 nt, Human
aacauugaaagucuagaaga

SEQ ID NO: 670498 - RNA, 22 nt, Human
uaccuuggaaaugcuagaguaa

SEQ ID NO: 670499 - RNA, 22 nt, Human
accuuuggagcaugcauuuucu

SEQ ID NO: 670500 - RNA, 21 nt, Human
auggagucaggggaaugggcc

SEQ ID NO: 670501 - RNA, 22 nt, Human
aagaaugucaagcagaaggucu

SEQ ID NO: 670502 - RNA, 22 nt, Human
ggccagaggugguacauagcuu

SEQ ID NO: 670503 - RNA, 22 nt, Human
gaaggcacagauggcaguccac

SEQ ID NO: 670504 - RNA, 22 nt, Human
auaugaaaguaagcaugugugu

SEQ ID NO: 670505 - RNA, 22 nt, Human
ugaggccaagaaaagcugggug

SEQ ID NO: 670506 - RNA, 22 nt, Human
aauuuacaguugcugaugguac

SEQ ID NO: 670507 - RNA, 22 nt, Human
ggguggccuucauagcucaggg

SEQ ID NO: 670508 - RNA, 22 nt, Human
cccucacuguccuugggcccuu

SEQ ID NO: 670509 - RNA, 22 nt, Human
ccugcagguccccggaugcgca

SEQ ID NO: 670510 - RNA, 22 nt, Human
aggcacuugaauugaugauguu

SEQ ID NO: 670511 - RNA, 22 nt, Human
uaugacagugaaaaaaaucaga

SEQ ID NO: 670512 - RNA, 18 nt, Human
guuaauuuugaaguucau

SEQ ID NO: 670513 - RNA, 22 nt, Human
uuuccuuucucaagagccggca

SEQ ID NO: 670514 - RNA, 22 nt, Human
cuuccucugccucccgugcuca

SEQ ID NO: 670515 - RNA, 22 nt, Human
aggcuuuaaguggccuacagcu

SEQ ID NO: 670516 - RNA, 22 nt, Human
gcucaagagagaugcaguucuu

SEQ ID NO: 670517 - RNA, 22 nt, Human
uuuugcuuaucugagugcagcc

SEQ ID NO: 670518 - RNA, 22 nt, Human
gggagcuggagcuggaagacuc

SEQ ID NO: 670519 - RNA, 22 nt, Human
ucccaggccauaaaacucagag

SEQ ID NO: 670520 - RNA, 22 nt, Human
gccaggcacugcucuaagcccu

SEQ ID NO: 670521 - RNA, 22 nt, Human
gacagccaggucugaugaccca

SEQ ID NO: 670522 - RNA, 22 nt, Human
uguggcagucucacuggagggc

SEQ ID NO: 670523 - RNA, 22 nt, Human
gcuggagauaguaggauccaua

SEQ ID NO: 670524 - RNA, 22 nt, Human
ggaagccuaaagcccaggucuc

SEQ ID NO: 670525 - RNA, 22 nt, Human
uucugaaauucgacuauccaau

SEQ ID NO: 670526 - RNA, 21 nt, Human
ggcagcccgcccucuccuggc

SEQ ID NO: 670527 - RNA, 22 nt, Human
uaaguucaaaucaucccaacuu

SEQ ID NO: 670528 - RNA, 22 nt, Human
uauuaucuaguaacugauagug

SEQ ID NO: 670529 - RNA, 22 nt, Human
ugaggcugccuugggaagaggg

SEQ ID NO: 670530 - RNA, 22 nt, Human
uggcuuuaggguuccuucuacc

SEQ ID NO: 670531 - RNA, 22 nt, Human
uguaugcagggcuuguaugcag

SEQ ID NO: 670532 - RNA, 22 nt, Human
auuacagugccaccucgugguc

SEQ ID NO: 670533 - RNA, 22 nt, Human
gcugcugcuugaaggcucggag

SEQ ID NO: 670534 - RNA, 20 nt, Human
uuucaagucagcaauucuca

SEQ ID NO: 670535 - RNA, 22 nt, Human
aucaguuauuuuuaagcuauaa

SEQ ID NO: 670536 - RNA, 19 nt, Human
ucuccaguugcuuucaggg

SEQ ID NO: 670537 - RNA, 22 nt, Human
cuccuucccuucaaguguuccu

SEQ ID NO: 670538 - RNA, 22 nt, Human
ucagagcacuuggcucauggca

SEQ ID NO: 670539 - RNA, 22 nt, Human
agaucagacuuugugacuagga

SEQ ID NO: 670540 - RNA, 22 nt, Human
uagcuucuugagaaagggugcc

SEQ ID NO: 670541 - RNA, 22 nt, Human
aucuaauuuucacucauuugcu

SEQ ID NO: 670542 - RNA, 22 nt, Human
uguucaauccccagguccugaa

SEQ ID NO: 670543 - RNA, 22 nt, Human
gcuuuuauugucuuuacgacga

SEQ ID NO: 670544 - RNA, 22 nt, Human
cccagggaagggcuaccugagg

SEQ ID NO: 670545 - RNA, 22 nt, Human
aggaguguggccagggcucugg

SEQ ID NO: 670546 - RNA, 16 nt, Human
ccugggcucuguugga

SEQ ID NO: 670547 - RNA, 22 nt, Human
cucuggggaagcagccagcugg

SEQ ID NO: 670548 - RNA, 22 nt, Human
gcagagcauuucgguugcuucc

SEQ ID NO: 670549 - RNA, 22 nt, Human
gcuggcuuuugaagucuagcua

SEQ ID NO: 670550 - RNA, 22 nt, Human
aaguugcuaaugauguguuugc

SEQ ID NO: 670551 - RNA, 22 nt, Human
cuccaggacugaggacagagcu

SEQ ID NO: 670552 - RNA, 22 nt, Human
cccuuccucaaggagcuguguu

SEQ ID NO: 670553 - RNA, 22 nt, Human
agcuccugcacccagccuugag

SEQ ID NO: 670554 - RNA, 22 nt, Human
cuucagaggggacucaaaguca

SEQ ID NO: 670555 - RNA, 22 nt, Human
gccugcuguuaacugcaggaau

SEQ ID NO: 670556 - RNA, 22 nt, Human
acuggggcagugggcagugguu

SEQ ID NO: 670557 - RNA, 22 nt, Human
uuugacaccaggagagaaaaca

SEQ ID NO: 670558 - RNA, 22 nt, Human
gacccuguuucuacaaauaauu

SEQ ID NO: 670559 - RNA, 22 nt, Human
aaauuccaguucuuuuaccugc

SEQ ID NO: 670560 - RNA, 22 nt, Human
uaaauuuuuguuaacagccucu

SEQ ID NO: 670561 - RNA, 22 nt, Human
cuggccaggagguaaccagaug

SEQ ID NO: 670562 - RNA, 22 nt, Human
cagugucugggacagaaaguca

SEQ ID NO: 670563 - RNA, 22 nt, Human
caagagcucagaaacccuugcu

SEQ ID NO: 670564 - RNA, 22 nt, Human
gucugagcgcuggagcuugugu

SEQ ID NO: 670565 - RNA, 17 nt, Human
ccuuagggcaguguggu

SEQ ID NO: 670566 - RNA, 22 nt, Human
uuucagagguaugcugcuuauc

SEQ ID NO: 670567 - RNA, 22 nt, Human
ugcuggaaaaagauuguguuuu

SEQ ID NO: 670568 - RNA, 19 nt, Human
aggaaacugucuuuuccag

SEQ ID NO: 670569 - RNA, 22 nt, Human
cuguguuuugagauauuauuaa

SEQ ID NO: 670570 - RNA, 22 nt, Human
gaggcccaaggacucugucccg

SEQ ID NO: 670571 - RNA, 22 nt, Human
ccagggcucgggugcuuaguca

SEQ ID NO: 670572 - RNA, 22 nt, Human
gcacagggcaacaggucuguua

SEQ ID NO: 670573 - RNA, 22 nt, Human
cacugaagaugcgacuagugcu

SEQ ID NO: 670574 - RNA, 22 nt, Human
gacagaauuuuccaucaugugg

SEQ ID NO: 670575 - RNA, 22 nt, Human
ggguuaaagcaggaagcaucuu

SEQ ID NO: 670576 - RNA, 21 nt, Human
aaagugguaaggauuauuuug

SEQ ID NO: 670577 - RNA, 22 nt, Human
gcugggcaaggcugaagcuacc

SEQ ID NO: 670578 - RNA, 22 nt, Human
ccagcugugcuguuggcuuguc

SEQ ID NO: 670579 - RNA, 17 nt, Human
ccuuucuucccagaggg

SEQ ID NO: 670580 - RNA, 22 nt, Human
ccagcugcuuuuugucacaugg

SEQ ID NO: 670581 - RNA, 22 nt, Human
auggagggaaaaguggagagcc

SEQ ID NO: 670582 - RNA, 22 nt, Human
ugaggaaggaauugagguuuua

SEQ ID NO: 670583 - RNA, 22 nt, Human
aguaaacacugucuuuauauau

SEQ ID NO: 670584 - RNA, 22 nt, Human
uggaagacauuuuggaccuugg

SEQ ID NO: 670585 - RNA, 22 nt, Human
gcauuuuaaugagguuuaugag

SEQ ID NO: 670586 - RNA, 22 nt, Human
ggaagagagggcugggccucaa

SEQ ID NO: 670587 - RNA, 22 nt, Human
ucucuggguccuggcaagcuca

SEQ ID NO: 670588 - RNA, 22 nt, Human
uuguacuuuggggaaauguuga

SEQ ID NO: 670589 - RNA, 18 nt, Human
gagcuucaggcuaaccug

SEQ ID NO: 670590 - RNA, 22 nt, Human
cugacaguaacuaauguggaga

SEQ ID NO: 670591 - RNA, 22 nt, Human
aggacagcaguuggugagguuc

SEQ ID NO: 670592 - RNA, 22 nt, Human
auucaagguuuauucaguuuag

SEQ ID NO: 670593 - RNA, 22 nt, Human
aguggaagagccauguuccaac

SEQ ID NO: 670594 - RNA, 22 nt, Human
aagaugccuguagcaggaagau

SEQ ID NO: 670595 - RNA, 22 nt, Human
agggcagaaaucgauuacaccu

SEQ ID NO: 670596 - RNA, 22 nt, Human
uuuauucauuguuucgucgcag

SEQ ID NO: 670597 - RNA, 22 nt, Human
acucugggaauccucaccuucc

SEQ ID NO: 670598 - RNA, 22 nt, Human
ucuccucucuuaccugguacaa

SEQ ID NO: 670599 - RNA, 22 nt, Human
ugacagugacagccaaaggcuu

SEQ ID NO: 670600 - RNA, 22 nt, Human
gguguccgcgcuguagaagguc

SEQ ID NO: 670601 - RNA, 22 nt, Human
uguggccucaaggcugcccuca

SEQ ID NO: 670602 - RNA, 21 nt, Human
caguguggugaccagggucuc

SEQ ID NO: 670603 - RNA, 22 nt, Human
uuucaguguaagguuuccagga

SEQ ID NO: 670604 - RNA, 22 nt, Human
gagcuuggggcauauggugcua

SEQ ID NO: 670605 - RNA, 22 nt, Human
aagggacuuugucagcuuucca

SEQ ID NO: 670606 - RNA, 22 nt, Human
cccuuucccuucuggcucaggg

SEQ ID NO: 670607 - RNA, 22 nt, Human
ugcaguaggcacguggcuguga

SEQ ID NO: 670608 - RNA, 22 nt, Human
uguccuugaugaauaugaaauu

SEQ ID NO: 670609 - RNA, 22 nt, Human
aauuaccaggauuuuucaguau

SEQ ID NO: 670610 - RNA, 22 nt, Human
guuaaugugguagugcauaucu

SEQ ID NO: 670611 - RNA, 22 nt, Human
gaggggcugggcagucccugga

SEQ ID NO: 670612 - RNA, 22 nt, Human
cauuugaucuccugaauaaaca

SEQ ID NO: 670613 - RNA, 19 nt, Human
cugcagggaugugcagagu

SEQ ID NO: 670614 - RNA, 22 nt, Human
gaagggcuuggcugggaggcca

SEQ ID NO: 670615 - RNA, 22 nt, Human
uugcuuuauuuggcaugccacu

SEQ ID NO: 670616 - RNA, 22 nt, Human
agcacagauaacauggagugga

SEQ ID NO: 670617 - RNA, 22 nt, Human
acauagaacuucgaugucuuuu

SEQ ID NO: 670618 - RNA, 22 nt, Human
uccagggaguuggcuggauagu

SEQ ID NO: 670619 - RNA, 23 nt, Human
ugagaaauuuugauucaguagga

SEQ ID NO: 670620 - RNA, 22 nt, Human
gcucaggcauguaugugguugc

SEQ ID NO: 670621 - RNA, 22 nt, Human
acagauccugguuacagccauu

SEQ ID NO: 670622 - RNA, 22 nt, Human
guggcccuggaguugugacacu

SEQ ID NO: 670623 - RNA, 22 nt, Human
uacagcuguugguguuuccucu

SEQ ID NO: 670624 - RNA, 22 nt, Human
aggagacauaacuaugaugaga

SEQ ID NO: 670625 - RNA, 22 nt, Human
uaaacaucuguagccuucaguc

SEQ ID NO: 670626 - RNA, 22 nt, Human
aauuguaacuacauugagaaca

SEQ ID NO: 670627 - RNA, 22 nt, Human
ccugggagggcaagugcugaug

SEQ ID NO: 670628 - RNA, 22 nt, Human
aaugucacucuguuuccucugc

SEQ ID NO: 670629 - RNA, 22 nt, Human
caguacuuggucaaggaagcag

SEQ ID NO: 670630 - RNA, 22 nt, Human
guguguuucagaagccaggugu

SEQ ID NO: 670631 - RNA, 22 nt, Human
cucugugccucaguuuucuucu

SEQ ID NO: 670632 - RNA, 22 nt, Human
ugucaaauuauguaaugggaag

SEQ ID NO: 670633 - RNA, 22 nt, Human
uagggcugugucuccaggacca

SEQ ID NO: 670634 - RNA, 22 nt, Human
ggaauacaaaucuuuguucucu

SEQ ID NO: 670635 - RNA, 21 nt, Human
agcacagcauauccaauguca

SEQ ID NO: 670636 - RNA, 22 nt, Human
guguggggucuucucuuggccu

SEQ ID NO: 670637 - RNA, 22 nt, Human
uugcugagcuuuggcaaggaag

SEQ ID NO: 670638 - RNA, 23 nt, Human
uuauaaauauuuucagguguguu

SEQ ID NO: 670639 - RNA, 22 nt, Human
aucuguccugugacagugggag

SEQ ID NO: 670640 - RNA, 22 nt, Human
ugggccaguccagccccaggga

SEQ ID NO: 670641 - RNA, 22 nt, Human
cuccaggagguugcugcuuccu

SEQ ID NO: 670642 - RNA, 22 nt, Human
gagggcugauaacaggaauaca

SEQ ID NO: 670643 - RNA, 22 nt, Human
gaaaucacuuuuuucauaguug

SEQ ID NO: 670644 - RNA, 22 nt, Human
ugauuuccuggcuuuggaguuc

SEQ ID NO: 670645 - RNA, 22 nt, Human
gaucauugcugccuuuuucuau

SEQ ID NO: 670646 - RNA, 22 nt, Human
aagauauauuuuggugauuuca

SEQ ID NO: 670647 - RNA, 22 nt, Human
ugcuuuauuuauaaaauagcaa

SEQ ID NO: 670648 - RNA, 22 nt, Human
gggccugcuccccaucgcugcu

SEQ ID NO: 670649 - RNA, 21 nt, Human
ugacugaggcuucuucacaca

SEQ ID NO: 670650 - RNA, 23 nt, Human
ggagccagccuguggggagcggg

SEQ ID NO: 670651 - RNA, 22 nt, Human
agaguggggacagggccugucc

SEQ ID NO: 670652 - RNA, 23 nt, Human
ugacacaggucaaaaauaagaug

SEQ ID NO: 670653 - RNA, 22 nt, Human
aucuaacugggcuauuuuauug

SEQ ID NO: 670654 - RNA, 22 nt, Human
uuuaaauuuguguuuagagggu

SEQ ID NO: 670655 - RNA, 22 nt, Human
ggcagugcaaggcuggcacagu

SEQ ID NO: 670656 - RNA, 17 nt, Human
ccucacagggaccagac

SEQ ID NO: 670657 - RNA, 22 nt, Human
gcugggcucagaccuagugaac

SEQ ID NO: 670658 - RNA, 22 nt, Human
agguauaugcuauuacuucugc

SEQ ID NO: 670659 - RNA, 22 nt, Human
aggcucugacccaugggaccca

SEQ ID NO: 670660 - RNA, 17 nt, Human
uauggcuguguuugugc

SEQ ID NO: 670661 - RNA, 22 nt, Human
gcuuagcagugugugcuuuuga

SEQ ID NO: 670662 - RNA, 22 nt, Human
ccaugcagugcuggagcugauu

SEQ ID NO: 670663 - RNA, 22 nt, Human
cagagagagcaggaaaccuccg

SEQ ID NO: 670664 - RNA, 22 nt, Human
uaagcauuguuucugaggaugg

SEQ ID NO: 670665 - RNA, 22 nt, Human
ucuucucuacaccagcagcccc

SEQ ID NO: 670666 - RNA, 22 nt, Human
gagcuggucaguuucaggagag

SEQ ID NO: 670667 - RNA, 22 nt, Human
uaaauggcaaccccuagagcug

SEQ ID NO: 670668 - RNA, 22 nt, Human
cagcacaauuuucaggagucca

SEQ ID NO: 670669 - RNA, 22 nt, Human
auccugaguucucagagucucc

SEQ ID NO: 670670 - RNA, 22 nt, Human
ccugagagugagggccuccuua

SEQ ID NO: 670671 - RNA, 22 nt, Human
guagaaaauuaggaugaggcuu

SEQ ID NO: 670672 - RNA, 22 nt, Human
aaguagcauuccaugguauaga

SEQ ID NO: 670673 - RNA, 22 nt, Human
augauuucuauauaaacuuaaa

SEQ ID NO: 670674 - RNA, 17 nt, Human
ccagugccuguggcaac

SEQ ID NO: 670675 - RNA, 22 nt, Human
aaugauaagacaugaguagagg

SEQ ID NO: 670676 - RNA, 22 nt, Human
auggccaagaauauuucucaac

SEQ ID NO: 670677 - RNA, 22 nt, Human
cucaaauaccucuccaugugac

SEQ ID NO: 670678 - RNA, 22 nt, Human
uagaaguuaugauaauaauagu

SEQ ID NO: 670679 - RNA, 22 nt, Human
uucagcaacucaaaccuauuag

SEQ ID NO: 670680 - RNA, 22 nt, Human
ccucacaguguucgugucagau

SEQ ID NO: 670681 - RNA, 22 nt, Human
ugggaauggaugcuaagugcua

SEQ ID NO: 670682 - RNA, 22 nt, Human
cccaguguuacgugacagccug

SEQ ID NO: 670683 - RNA, 22 nt, Human
uuuguucaccuagcaaacuuuu

SEQ ID NO: 670684 - RNA, 20 nt, Human
ugagucagcugcaugggugg

SEQ ID NO: 670685 - RNA, 22 nt, Human
ccagggugagugucauggguua

SEQ ID NO: 670686 - RNA, 23 nt, Human
ccaagcuugucccugccugcuuu

SEQ ID NO: 670687 - RNA, 22 nt, Human
gcuggccuugugucugaggaag

SEQ ID NO: 670688 - RNA, 22 nt, Human
aaugaacaucaaaugccuacca

SEQ ID NO: 670689 - RNA, 23 nt, Human
uuguaaaacagugugacgguucc

SEQ ID NO: 670690 - RNA, 22 nt, Human
agcuuagugguuguaugaguua

SEQ ID NO: 670691 - RNA, 22 nt, Human
ugcauuccuuugucuguuaaag

SEQ ID NO: 670692 - RNA, 22 nt, Human
uccuggagagugggcgagcaca

SEQ ID NO: 670693 - RNA, 22 nt, Human
uuguaacacuuuucuauuaaua

SEQ ID NO: 670694 - RNA, 22 nt, Human
ucagggcagaauccaaagaauu

SEQ ID NO: 670695 - RNA, 22 nt, Human
gcuuagcaaacaucuguagucc

SEQ ID NO: 670696 - RNA, 22 nt, Human
gaggagacugacagcagauucu

SEQ ID NO: 670697 - RNA, 22 nt, Human
caaaugcaaaauauaacccugu

SEQ ID NO: 670698 - RNA, 19 nt, Human
acacaugaggagggacccc

SEQ ID NO: 670699 - RNA, 22 nt, Human
aaugaggugaggaaggccucag

SEQ ID NO: 670700 - RNA, 22 nt, Human
ucuggaaauuucaguuuuagag

SEQ ID NO: 670701 - RNA, 18 nt, Human
ccuaggaaagggaggcaa

SEQ ID NO: 670702 - RNA, 22 nt, Human
cagcagaaacccagcaaagcca

SEQ ID NO: 670703 - RNA, 22 nt, Human
caguuucugggcguucacaggu

SEQ ID NO: 670704 - RNA, 22 nt, Human
uagaaacauauguuugagacau

SEQ ID NO: 670705 - RNA, 22 nt, Human
guggccaaaaggaagaagguua

SEQ ID NO: 670706 - RNA, 22 nt, Human
uaugcacaguuacaagaauauc

SEQ ID NO: 670707 - RNA, 22 nt, Human
agcugccuggagucauuuccug

SEQ ID NO: 670708 - RNA, 22 nt, Human
uucagaaugugaccuuauuugg

SEQ ID NO: 670709 - RNA, 22 nt, Human
cagguggggcgcccucaggcag

SEQ ID NO: 670710 - RNA, 22 nt, Human
accucgaguucuuucaauucac

SEQ ID NO: 670711 - RNA, 20 nt, Human
gccagcugcccuuccacccu

SEQ ID NO: 670712 - RNA, 22 nt, Human
cccuuuggcauuuccaggauau

SEQ ID NO: 670713 - RNA, 22 nt, Human
ugugaagaguagacauguggug

SEQ ID NO: 670714 - RNA, 22 nt, Human
uggcuaccugauuucuuuucag

SEQ ID NO: 670715 - RNA, 22 nt, Human
cagugugggugaaauacaaagu

SEQ ID NO: 670716 - RNA, 22 nt, Human
cuggauaaauguuugcuuuaga

SEQ ID NO: 670717 - RNA, 22 nt, Human
guggauggauugaggcaguggg

SEQ ID NO: 670718 - RNA, 22 nt, Human
gagcaaggaggguggggccuuu

SEQ ID NO: 670719 - RNA, 23 nt, Human
gccaggcacaugguggacacgca

SEQ ID NO: 670720 - RNA, 22 nt, Human
uccagggagucaaaugaacuac

SEQ ID NO: 670721 - RNA, 22 nt, Human
ccuugcagacaucaguaguggc

SEQ ID NO: 670722 - RNA, 22 nt, Human
uggccugguaccacauagauuu

SEQ ID NO: 670723 - RNA, 22 nt, Human
ugagguggugcuaaucucugcu

SEQ ID NO: 670724 - RNA, 22 nt, Human
cucuccccgguacgagcggccg

SEQ ID NO: 670725 - RNA, 22 nt, Human
auggcccuuuauuccuucuucc

SEQ ID NO: 670726 - RNA, 22 nt, Human
caggccucuccuuagucuggca

SEQ ID NO: 670727 - RNA, 22 nt, Human
ggcgccccauauaguucuuaau

SEQ ID NO: 670728 - RNA, 22 nt, Human
uaauuuauauggaauuguugcu

SEQ ID NO: 670729 - RNA, 22 nt, Human
agauacauuguucuaagcauug

SEQ ID NO: 670730 - RNA, 22 nt, Human
gcagcagaaguagaaguacagg

SEQ ID NO: 670731 - RNA, 22 nt, Human
ugucacuacaucauaaauauau

SEQ ID NO: 670732 - RNA, 22 nt, Human
acauuaaagaguaagguuaguu

SEQ ID NO: 670733 - RNA, 22 nt, Human
uauauuuaauuaguugcuggau

SEQ ID NO: 670734 - RNA, 22 nt, Human
ugagcagaguuguuucuccuga

SEQ ID NO: 670735 - RNA, 22 nt, Human
ugcuggcauuucaggacucacc

SEQ ID NO: 670736 - RNA, 22 nt, Human
gguggccauaggaccagccugg

SEQ ID NO: 670737 - RNA, 22 nt, Human
uuuagagguuagaggcugauag

SEQ ID NO: 670738 - RNA, 22 nt, Human
uuucuaaguaagauuaacuucu

SEQ ID NO: 670739 - RNA, 22 nt, Human
ggcccagcaucuugugaaguuu

SEQ ID NO: 670740 - RNA, 22 nt, Human
gcaugcaggauagguugagcuc

SEQ ID NO: 670741 - RNA, 22 nt, Human
ugauacaaucaugagagaggac

SEQ ID NO: 670742 - RNA, 22 nt, Human
auuguauacaagcuuaauuguu

SEQ ID NO: 670743 - RNA, 22 nt, Human
ucaggaaagaguuagaugauua

SEQ ID NO: 670744 - RNA, 22 nt, Human
ggacauuuaguuucauugggca

SEQ ID NO: 670745 - RNA, 21 nt, Human
caaguguggauguggaaggua

SEQ ID NO: 670746 - RNA, 22 nt, Human
ugugugaaggagccacuguuca

SEQ ID NO: 670747 - RNA, 22 nt, Human
uggaaucuguauguauguauaa

SEQ ID NO: 670748 - RNA, 22 nt, Human
accuggaggcagagguugcagu

SEQ ID NO: 670749 - RNA, 22 nt, Human
accucuggacacugcauccuuc

SEQ ID NO: 670750 - RNA, 22 nt, Human
ugguccugccccgugcacagag

SEQ ID NO: 670751 - RNA, 22 nt, Human
cauuaaauuccuuguucucaaa

SEQ ID NO: 670752 - RNA, 22 nt, Human
guagauuccaguggucuguguc

SEQ ID NO: 670753 - RNA, 22 nt, Human
aucugcauuuacauugcuugua

SEQ ID NO: 670754 - RNA, 22 nt, Human
cccguguggaugcgcuggugcu

SEQ ID NO: 670755 - RNA, 22 nt, Human
uacagcauguccuuagcaaggc

SEQ ID NO: 670756 - RNA, 22 nt, Human
ucaaacuggcagacuucuacuu

SEQ ID NO: 670757 - RNA, 23 nt, Human
agacagaggcugaggcuggccgc

SEQ ID NO: 670758 - RNA, 22 nt, Human
ugcuucaaaaaguuguuagagg

SEQ ID NO: 670759 - RNA, 22 nt, Human
aggcuucuuagauuggcuggag

SEQ ID NO: 670760 - RNA, 20 nt, Human
gagggugggacuuccuaggc

SEQ ID NO: 670761 - RNA, 22 nt, Human
gaggacaaggccuugcaauucu

SEQ ID NO: 670762 - RNA, 22 nt, Human
agcuaagacuuagugacuuagu

SEQ ID NO: 670763 - RNA, 22 nt, Human
gcacugggaaugugagcagcug

SEQ ID NO: 670764 - RNA, 22 nt, Human
uggagccaggagccugggaguc

SEQ ID NO: 670765 - RNA, 22 nt, Human
gccaguggcuugccaggcagga

SEQ ID NO: 670766 - RNA, 22 nt, Human
caguagucuuuuuccuccuaga

SEQ ID NO: 670767 - RNA, 22 nt, Human
ccucccagaugugcccaaugga

SEQ ID NO: 670768 - RNA, 22 nt, Human
cugugagggcagggaccagagg

SEQ ID NO: 670769 - RNA, 22 nt, Human
acuguacacacuucucugucuu

SEQ ID NO: 670770 - RNA, 19 nt, Human
caguccuuuccgcuuucuc

SEQ ID NO: 670771 - RNA, 22 nt, Human
uucccucucuagcuuuccccaa

SEQ ID NO: 670772 - RNA, 22 nt, Human
gaacccaggagguugcagugag

SEQ ID NO: 670773 - RNA, 22 nt, Human
ugugaaagucaaauuaauugaa

SEQ ID NO: 670774 - RNA, 22 nt, Human
cacuugauggaagagcagaaga

SEQ ID NO: 670775 - RNA, 22 nt, Human
agcuucuccugguacagaacug

SEQ ID NO: 670776 - RNA, 22 nt, Human
aggcugccuagguucaacaccu

SEQ ID NO: 670777 - RNA, 22 nt, Human
cagcuguucacauuuccaaaac

SEQ ID NO: 670778 - RNA, 22 nt, Human
guccacagcuggccagggccuc

SEQ ID NO: 670779 - RNA, 22 nt, Human
agcaagagcaugucggccuggu

SEQ ID NO: 670780 - RNA, 22 nt, Human
uuaguuuucccaucuuuauggu

SEQ ID NO: 670781 - RNA, 22 nt, Human
augcuacauuuugguuuauaaa

SEQ ID NO: 670782 - RNA, 22 nt, Human
agaugggcgcgcugcucugaug

SEQ ID NO: 670783 - RNA, 22 nt, Human
gagcaauggaagauagauaaca

SEQ ID NO: 670784 - RNA, 19 nt, Human
uggucuaaaugugugcccc

SEQ ID NO: 670785 - RNA, 22 nt, Human
uuuacagaugaggaaacugaga

SEQ ID NO: 670786 - RNA, 22 nt, Human
ggcaggcagauggcugcaccaa

SEQ ID NO: 670787 - RNA, 22 nt, Human
caugugcagacggugggcugga

SEQ ID NO: 670788 - RNA, 22 nt, Human
guccucuggugaaagcauuccc

SEQ ID NO: 670789 - RNA, 22 nt, Human
ucugagaauggagcuaaaaauc

SEQ ID NO: 670790 - RNA, 22 nt, Human
acuuucugccuuacaggagucc

SEQ ID NO: 670791 - RNA, 22 nt, Human
auugacacaaugggauguaagg

SEQ ID NO: 670792 - RNA, 22 nt, Human
cucuggcuuaguaugcuccaaa

SEQ ID NO: 670793 - RNA, 22 nt, Human
aaguugguaggagacagaaggu

SEQ ID NO: 670794 - RNA, 22 nt, Human
cacugaacuggucuuaggaggu

SEQ ID NO: 670795 - RNA, 22 nt, Human
ucaccuguuggauguauacugu

SEQ ID NO: 670796 - RNA, 22 nt, Human
auaacacuaaauguauguaaca

SEQ ID NO: 670797 - RNA, 22 nt, Human
ucuucagagacucugagccccu

SEQ ID NO: 670798 - RNA, 22 nt, Human
agguccaggccucaugauggcc

SEQ ID NO: 670799 - RNA, 22 nt, Human
augccugcuuacuccaggugcu

SEQ ID NO: 670800 - RNA, 22 nt, Human
ugaguggacgugaggcugagua

SEQ ID NO: 670801 - RNA, 22 nt, Human
guguggggccaggaucagggcu

SEQ ID NO: 670802 - RNA, 22 nt, Human
caggcagagacccucuccuaaa

SEQ ID NO: 670803 - RNA, 22 nt, Human
uaucaucacuguaauccguuga

SEQ ID NO: 670804 - RNA, 22 nt, Human
aaggagagagcuuugcuggaac

SEQ ID NO: 670805 - RNA, 22 nt, Human
gagggcuggggcuuaggcuuag

SEQ ID NO: 670806 - RNA, 22 nt, Human
gggcuccaaggaggccagccug

SEQ ID NO: 670807 - RNA, 22 nt, Human
ugcaaggguagaagugauggca

SEQ ID NO: 670808 - RNA, 22 nt, Human
uuaugacauaugaguacaagua

SEQ ID NO: 670809 - RNA, 22 nt, Human
uacacugugagguuuccaaggg

SEQ ID NO: 670810 - RNA, 22 nt, Human
aguuuguaucaauuugcuuuau

SEQ ID NO: 670811 - RNA, 22 nt, Human
ugaaggugaccugacaguggcu

SEQ ID NO: 670812 - RNA, 22 nt, Human
aaaagagguuaaccaggugugu

SEQ ID NO: 670813 - RNA, 22 nt, Human
guguuuccucacuucucugacu

SEQ ID NO: 670814 - RNA, 22 nt, Human
cacauucaauuacacagauagg

SEQ ID NO: 670815 - RNA, 22 nt, Human
uacagaaaaacuggcauugaag

SEQ ID NO: 670816 - RNA, 22 nt, Human
gcuccuggcucuggccaaggga

SEQ ID NO: 670817 - RNA, 22 nt, Human
cucaggagguuuccugucuagg

SEQ ID NO: 670818 - RNA, 22 nt, Human
ucuuucauguauaugcaaccua

SEQ ID NO: 670819 - RNA, 22 nt, Human
ugaugucugccaggguccuggg

SEQ ID NO: 670820 - RNA, 22 nt, Human
guccugagaugucacaagguuu

SEQ ID NO: 670821 - RNA, 22 nt, Human
ugagcuggcaggggcucaggga

SEQ ID NO: 670822 - RNA, 22 nt, Human
uaugcacauauaaccugcacug

SEQ ID NO: 670823 - RNA, 22 nt, Human
gugagguccucccugcugggag

SEQ ID NO: 670824 - RNA, 22 nt, Human
uaugcaaaugacugguauguuu

SEQ ID NO: 670825 - RNA, 22 nt, Human
gaguuuagccaauuuggucccc

SEQ ID NO: 670826 - RNA, 21 nt, Human
aagccagcccacagugguuug

SEQ ID NO: 670827 - RNA, 22 nt, Human
agccaacagccagcaucaacca

SEQ ID NO: 670828 - RNA, 22 nt, Human
cucuagcuuuugauaccagugu

SEQ ID NO: 670829 - RNA, 22 nt, Human
aauuuuaaucaguggugcugag

SEQ ID NO: 670830 - RNA, 23 nt, Human
ucucucuggcaaauuucacauau

SEQ ID NO: 670831 - RNA, 20 nt, Human
ugcuuguaauaccugcuuca

SEQ ID NO: 670832 - RNA, 23 nt, Human
gcugggcuuacucuuucagugag

SEQ ID NO: 670833 - RNA, 17 nt, Human
ucucuuguucacugcug

SEQ ID NO: 670834 - RNA, 22 nt, Human
uuagcauuucaguacacauguu

SEQ ID NO: 670835 - RNA, 22 nt, Human
ucaaaucaccaaacucacuggc

SEQ ID NO: 670836 - RNA, 22 nt, Human
uuccaagugggggaagcugagu

SEQ ID NO: 670837 - RNA, 22 nt, Human
cguguaugugccugcauucaca

SEQ ID NO: 670838 - RNA, 21 nt, Human
agcauucuuggccaguccacc

SEQ ID NO: 670839 - RNA, 22 nt, Human
gucuggagacuugggucaucaa

SEQ ID NO: 670840 - RNA, 22 nt, Human
auguucuuagcaaaguacuugc

SEQ ID NO: 670841 - RNA, 22 nt, Human
ucucccaagccuggcaggggca

SEQ ID NO: 670842 - RNA, 22 nt, Human
ugcucuaguggguagagcauug

SEQ ID NO: 670843 - RNA, 22 nt, Human
uaaugucuucuuuuaauuuggc

SEQ ID NO: 670844 - RNA, 22 nt, Human
cucaggaaccgcggcagcagcc

SEQ ID NO: 670845 - RNA, 22 nt, Human
accaagcacaaagaugaguaaa

SEQ ID NO: 670846 - RNA, 22 nt, Human
gcucacagcccaggccagcgug

SEQ ID NO: 670847 - RNA, 22 nt, Human
uauuuccauguuagaacuaagu

SEQ ID NO: 670848 - RNA, 22 nt, Human
aacaucugugaacuccgaaaau

SEQ ID NO: 670849 - RNA, 22 nt, Human
uuugaaagaauuuauguacuuu

SEQ ID NO: 670850 - RNA, 22 nt, Human
agugaaaugacugaaucagaua

SEQ ID NO: 670851 - RNA, 22 nt, Human
ugcuugucucucugugcccacu

SEQ ID NO: 670852 - RNA, 22 nt, Human
ccuuggguguuuaauagauaua

SEQ ID NO: 670853 - RNA, 18 nt, Human
ccugugcuccagcaucug

SEQ ID NO: 670854 - RNA, 23 nt, Human
gagauggcugguuguccucugaa

SEQ ID NO: 670855 - RNA, 22 nt, Human
cugggcucuaagggagcaccgu

SEQ ID NO: 670856 - RNA, 22 nt, Human
guuucuuuugugaucaccaacc

SEQ ID NO: 670857 - RNA, 21 nt, Human
ucaaacaugaucugggucauc

SEQ ID NO: 670858 - RNA, 22 nt, Human
acauuucucaucuaguagagua

SEQ ID NO: 670859 - RNA, 22 nt, Human
uuauucugagaguugaaguaau

SEQ ID NO: 670860 - RNA, 22 nt, Human
accucccagcucugagcuuggg

SEQ ID NO: 670861 - RNA, 22 nt, Human
auuuacagacguggauuagugc

SEQ ID NO: 670862 - RNA, 22 nt, Human
gggagugguugauggugaaaau

SEQ ID NO: 670863 - RNA, 22 nt, Human
ucuucauuuuauagcaucugug

SEQ ID NO: 670864 - RNA, 22 nt, Human
acagcagauuucccugggcucc

SEQ ID NO: 670865 - RNA, 22 nt, Human
uuggcgucuuuuccauggaaag

SEQ ID NO: 670866 - RNA, 22 nt, Human
ugcauucaaauccugauccugc

SEQ ID NO: 670867 - RNA, 22 nt, Human
acgauguggccugaaucaggca

SEQ ID NO: 670868 - RNA, 22 nt, Human
uaggcucagggcugggugacgg

SEQ ID NO: 670869 - RNA, 22 nt, Human
gcaggcucaaaagcugguagga

SEQ ID NO: 670870 - RNA, 22 nt, Human
cagugagguagacagcuuuuuc

SEQ ID NO: 670871 - RNA, 22 nt, Human
ugcuugacuuaguuucucauuu

SEQ ID NO: 670872 - RNA, 22 nt, Human
ccugggcuuucaaaaccagccu

SEQ ID NO: 670873 - RNA, 22 nt, Human
uagaaaccucagggaaaucuuu

SEQ ID NO: 670874 - RNA, 22 nt, Human
acaaagaaggaauuggucuuua

SEQ ID NO: 670875 - RNA, 22 nt, Human
guuaaacaguuacaugugcugg

SEQ ID NO: 670876 - RNA, 20 nt, Human
aguggggagucaggagugcc

SEQ ID NO: 670877 - RNA, 22 nt, Human
cuguuuauuacacuggauagca

SEQ ID NO: 670878 - RNA, 22 nt, Human
ucuuagaaguuuauggcacgga

SEQ ID NO: 670879 - RNA, 22 nt, Human
ugacagaacagguugggagcaa

SEQ ID NO: 670880 - RNA, 22 nt, Human
gagccagagcuacaagugucug

SEQ ID NO: 670881 - RNA, 22 nt, Human
ucuugcuagaaucauuuggaga

SEQ ID NO: 670882 - RNA, 22 nt, Human
cagcuggaggagcagcuuccag

SEQ ID NO: 670883 - RNA, 19 nt, Human
ucugaaguccagggcauac

SEQ ID NO: 670884 - RNA, 22 nt, Human
uuggcucauuaaagaugauaau

SEQ ID NO: 670885 - RNA, 22 nt, Human
aaacuugaacccagcucaggcu

SEQ ID NO: 670886 - RNA, 22 nt, Human
cucaagaaggaugagcuauugc

SEQ ID NO: 670887 - RNA, 22 nt, Human
ucagagcacuggugcuaccuug

SEQ ID NO: 670888 - RNA, 22 nt, Human
uccucagaaaccccugugaggu

SEQ ID NO: 670889 - RNA, 22 nt, Human
uuauucaccgcaggugcuuccc

SEQ ID NO: 670890 - RNA, 22 nt, Human
uaauaaaugaaagugcuggcau

SEQ ID NO: 670891 - RNA, 22 nt, Human
cagagcuggagcuugaauggag

SEQ ID NO: 670892 - RNA, 17 nt, Human
uauugaccuuuguaugu

SEQ ID NO: 670893 - RNA, 22 nt, Human
ucccaggguauccuguaguaaa

SEQ ID NO: 670894 - RNA, 17 nt, Human
uccuggcucugccacug

SEQ ID NO: 670895 - RNA, 22 nt, Human
uuagccauuaauguccugugca

SEQ ID NO: 670896 - RNA, 22 nt, Human
gaagagcugcucagaacaugau

SEQ ID NO: 670897 - RNA, 22 nt, Human
cuggccugcugggugagguccu

SEQ ID NO: 670898 - RNA, 22 nt, Human
agugugggccacgcagcugagc

SEQ ID NO: 670899 - RNA, 22 nt, Human
cacagacccagaagggaugaag

SEQ ID NO: 670900 - RNA, 22 nt, Human
acuguguccucauguggcagaa

SEQ ID NO: 670901 - RNA, 22 nt, Human
cagcugugaauugucuuaucua

SEQ ID NO: 670902 - RNA, 22 nt, Human
gcuugaguuuugggacaaagcc

SEQ ID NO: 670903 - RNA, 22 nt, Human
augaagauucuauuuaucacuu

SEQ ID NO: 670904 - RNA, 22 nt, Human
guagugggugaggaaggaagga

SEQ ID NO: 670905 - RNA, 22 nt, Human
uauggcuugaguuucagacuau

SEQ ID NO: 670906 - RNA, 22 nt, Human
gccuuuggacugagguagucag

SEQ ID NO: 670907 - RNA, 22 nt, Human
accagcuccaggccccugcuga

SEQ ID NO: 670908 - RNA, 22 nt, Human
uacaguuccaggaucauagggu

SEQ ID NO: 670909 - RNA, 22 nt, Human
uauguucugacucuacauggga

SEQ ID NO: 670910 - RNA, 22 nt, Human
gagggcugcaaugagacagaga

SEQ ID NO: 670911 - RNA, 22 nt, Human
gaagguggcgagcggauugcug

SEQ ID NO: 670912 - RNA, 22 nt, Human
auucuggguuugcuguacaaag

SEQ ID NO: 670913 - RNA, 22 nt, Human
cccucccaggaguggccagaga

SEQ ID NO: 670914 - RNA, 22 nt, Human
ucacaauauuuaucuuccaauu

SEQ ID NO: 670915 - RNA, 22 nt, Human
auggauuggauuuuuauggacc

SEQ ID NO: 670916 - RNA, 22 nt, Human
cccagcuugcaaauggguugcu

SEQ ID NO: 670917 - RNA, 22 nt, Human
cugaagagcucuccuguccccu

SEQ ID NO: 670918 - RNA, 22 nt, Human
cgaggccaccgugguuuccgag

SEQ ID NO: 670919 - RNA, 22 nt, Human
uaaaggaacagaggacucauuu

SEQ ID NO: 670920 - RNA, 22 nt, Human
ucaccaguuaaaauaacaguaa

SEQ ID NO: 670921 - RNA, 22 nt, Human
agcucugacugaagagaugcaa

SEQ ID NO: 670922 - RNA, 22 nt, Human
gcagggcgcguuugagcgggcu

SEQ ID NO: 670923 - RNA, 22 nt, Human
auggcagacacaggcaggcaga

SEQ ID NO: 670924 - RNA, 22 nt, Human
ucugcccaguuugugcucaggu

SEQ ID NO: 670925 - RNA, 22 nt, Human
uggcaggguggcaacuuuuggu

SEQ ID NO: 670926 - RNA, 22 nt, Human
aagcuuuggaagggcaggguug

SEQ ID NO: 670927 - RNA, 22 nt, Human
cccugcagaccaaugccauaga

SEQ ID NO: 670928 - RNA, 20 nt, Human
gucuuauuuaacacaugacu

SEQ ID NO: 670929 - RNA, 22 nt, Human
cuuucaguuacaguuacacaca

SEQ ID NO: 670930 - RNA, 22 nt, Human
cagagcugagaauguugaugcu

SEQ ID NO: 670931 - RNA, 22 nt, Human
auggggugcaugcagauuggga

SEQ ID NO: 670932 - RNA, 22 nt, Human
agauggauuucuuccagugaga

SEQ ID NO: 670933 - RNA, 22 nt, Human
uucuucuuuccuauaauuaauu

SEQ ID NO: 670934 - RNA, 22 nt, Human
gggcaugagcgagcugcuuuga

SEQ ID NO: 670935 - RNA, 22 nt, Human
aguaucuuuacuuaaauaguca

SEQ ID NO: 670936 - RNA, 22 nt, Human
cccuuuccauggcucuccuagg

SEQ ID NO: 670937 - RNA, 22 nt, Human
cagccaggauggagaacuguug

SEQ ID NO: 670938 - RNA, 22 nt, Human
acagguggcauaggcaguuuga

SEQ ID NO: 670939 - RNA, 22 nt, Human
cagcaggguagguuguaucagu

SEQ ID NO: 670940 - RNA, 22 nt, Human
cacagcugggaaaauuuguaca

SEQ ID NO: 670941 - RNA, 22 nt, Human
aaaucucuggucacagaacuua

SEQ ID NO: 670942 - RNA, 19 nt, Human
ugaaauggcaguugcuaaa

SEQ ID NO: 670943 - RNA, 22 nt, Human
ggcuccauccaaggccuucuag

SEQ ID NO: 670944 - RNA, 22 nt, Human
ggccuggcucuugcccagccug

SEQ ID NO: 670945 - RNA, 22 nt, Human
agaauucuccuucagggcagga

SEQ ID NO: 670946 - RNA, 22 nt, Human
cccuuuggaagaggcucacuga

SEQ ID NO: 670947 - RNA, 22 nt, Human
agggccacgugcaccgcggucu

SEQ ID NO: 670948 - RNA, 20 nt, Human
cuguagggugcagcaggcuc

SEQ ID NO: 670949 - RNA, 22 nt, Human
guggcagaguugcugacuagaa

SEQ ID NO: 670950 - RNA, 22 nt, Human
cccugaggaugucuccuuccug

SEQ ID NO: 670951 - RNA, 19 nt, Human
gcccaggggcccgaugcug

SEQ ID NO: 670952 - RNA, 22 nt, Human
ggucacaggggagaagagugau

SEQ ID NO: 670953 - RNA, 22 nt, Human
aggcugucugaccccagagccc

SEQ ID NO: 670954 - RNA, 22 nt, Human
cuugccugaggaacagagggua

SEQ ID NO: 670955 - RNA, 22 nt, Human
uuguuucuuugaaguuucuaga

SEQ ID NO: 670956 - RNA, 22 nt, Human
aaugcacaugucuuggccucac

SEQ ID NO: 670957 - RNA, 22 nt, Human
aguccucuggaguaugccuuau

SEQ ID NO: 670958 - RNA, 22 nt, Human
uagaaaugauuuugaugcuuca

SEQ ID NO: 670959 - RNA, 22 nt, Human
guguacaaaaugucuccaugga

SEQ ID NO: 670960 - RNA, 22 nt, Human
caagauggaguccgggaaugug

SEQ ID NO: 670961 - RNA, 22 nt, Human
augcuguggccagaguucaacu

SEQ ID NO: 670962 - RNA, 22 nt, Human
ugccaggcccugugcuggaugc

SEQ ID NO: 670963 - RNA, 22 nt, Human
aacuuaguuuaggguauugauu

SEQ ID NO: 670964 - RNA, 22 nt, Human
gcagcccaggaggcgggagccc

SEQ ID NO: 670965 - RNA, 22 nt, Human
cuuggcagauccaaaaaugaca

SEQ ID NO: 670966 - RNA, 22 nt, Human
agggcagcuagcuguagaaaga

SEQ ID NO: 670967 - RNA, 20 nt, Human
uggcaggagccacuggaagc

SEQ ID NO: 670968 - RNA, 22 nt, Human
cugcugguuagucuuaguggga

SEQ ID NO: 670969 - RNA, 22 nt, Human
caggugccauagacgggccugg

SEQ ID NO: 670970 - RNA, 22 nt, Human
acccaggggcgaagcuggccac

SEQ ID NO: 670971 - RNA, 22 nt, Human
gcguggggcagcccagggcuuc

SEQ ID NO: 670972 - RNA, 22 nt, Human
cacagaggcaaccuucuggggu

SEQ ID NO: 670973 - RNA, 22 nt, Human
uuagaacauuccaucacugggu

SEQ ID NO: 670974 - RNA, 22 nt, Human
cugugugcuguuagggagcugc

SEQ ID NO: 670975 - RNA, 22 nt, Human
ucagcuuucucagaggccuaac

SEQ ID NO: 670976 - RNA, 22 nt, Human
aagcccuggauagagagaacug

SEQ ID NO: 670977 - RNA, 22 nt, Human
acugagcauaaauaugugucca

SEQ ID NO: 670978 - RNA, 22 nt, Human
ucaccugggagggcugugguag

SEQ ID NO: 670979 - RNA, 22 nt, Human
uggggagaaaugucuuuguucc

SEQ ID NO: 670980 - RNA, 22 nt, Human
aagaugugcaguucauggcagg

SEQ ID NO: 670981 - RNA, 22 nt, Human
uggaggcccacacuggguagau

SEQ ID NO: 670982 - RNA, 22 nt, Human
caugcaugccuggcucacagag

SEQ ID NO: 670983 - RNA, 22 nt, Human
uggacccccucaaggcagagcu

SEQ ID NO: 670984 - RNA, 22 nt, Human
auauaacucuuguucuuauagu

SEQ ID NO: 670985 - RNA, 22 nt, Human
cugggagcggcugucacugguu

SEQ ID NO: 670986 - RNA, 22 nt, Human
ggaggcuccacugcucuuccug

SEQ ID NO: 670987 - RNA, 22 nt, Human
gaguucaguaguuauagucuag

SEQ ID NO: 670988 - RNA, 22 nt, Human
acuuagcaguuuagaauauguc

SEQ ID NO: 670989 - RNA, 22 nt, Human
gaccacagguaugggcuuggca

SEQ ID NO: 670990 - RNA, 22 nt, Human
ccugggcugcucauggggauga

SEQ ID NO: 670991 - RNA, 22 nt, Human
auuugaggauaguuggguacuc

SEQ ID NO: 670992 - RNA, 22 nt, Human
uagagcuuggacugcauuuucg

SEQ ID NO: 670993 - RNA, 22 nt, Human
cucuucagauauacaguacucu

SEQ ID NO: 670994 - RNA, 22 nt, Human
uggucucuccaugcccuccacc

SEQ ID NO: 670995 - RNA, 22 nt, Human
ucaucuccauacggucucgcag

SEQ ID NO: 670996 - RNA, 22 nt, Human
ggagccagcucccuccuuguga

SEQ ID NO: 670997 - RNA, 22 nt, Human
aucuuucaggccuaguguuuaa

SEQ ID NO: 670998 - RNA, 22 nt, Human
aagggcaggaaaagauggaugu

SEQ ID NO: 670999 - RNA, 22 nt, Human
ucucaggucucaugccaggccu

SEQ ID NO: 671000 - RNA, 22 nt, Human
cugggcacuuuggggagccuac

SEQ ID NO: 671001 - RNA, 22 nt, Human
augagaaauuuauuacaagcua

SEQ ID NO: 671002 - RNA, 20 nt, Human
uccagagaguggcaaagcuc

SEQ ID NO: 671003 - RNA, 22 nt, Human
gagcccagcuaaauuuauauaa

SEQ ID NO: 671004 - RNA, 22 nt, Human
ggcugcuggaagacugaacaag

SEQ ID NO: 671005 - RNA, 22 nt, Human
uccuguuucaacccuuacacug

SEQ ID NO: 671006 - RNA, 22 nt, Human
cucagagucccuucccucgugg

SEQ ID NO: 671007 - RNA, 22 nt, Human
uguuucauuaguacugacaaua

SEQ ID NO: 671008 - RNA, 22 nt, Human
ccuucaugauggaaaggguuca

SEQ ID NO: 671009 - RNA, 22 nt, Human
ccugagagcgaguggccucaug

SEQ ID NO: 671010 - RNA, 22 nt, Human
agaacagccaauaaaagagggg

SEQ ID NO: 671011 - RNA, 22 nt, Human
uguguacaucucuucucacauu

SEQ ID NO: 671012 - RNA, 22 nt, Human
aaaggugacacucugccagcug

SEQ ID NO: 671013 - RNA, 22 nt, Human
uuuauccaucaucugcugaagg

SEQ ID NO: 671014 - RNA, 22 nt, Human
aggcaggccuacacaaugggag

SEQ ID NO: 671015 - RNA, 22 nt, Human
gcaaagcacacuggagaugucg

SEQ ID NO: 671016 - RNA, 22 nt, Human
ucaaacuagccugacugguauu

SEQ ID NO: 671017 - RNA, 22 nt, Human
aaggcuggagaugguuggaaug

SEQ ID NO: 671018 - RNA, 22 nt, Human
guauggaaguauaaguuuugaa

SEQ ID NO: 671019 - RNA, 22 nt, Human
ucuggagucuaaagaaccaaaa

SEQ ID NO: 671020 - RNA, 22 nt, Human
cccagggacucgggauucuagg

SEQ ID NO: 671021 - RNA, 22 nt, Human
agcugggaagacuggaagacag

SEQ ID NO: 671022 - RNA, 22 nt, Human
caucuuugaacucuguauaaac

SEQ ID NO: 671023 - RNA, 20 nt, Human
cagcaucuagugagauuugc

SEQ ID NO: 671024 - RNA, 22 nt, Human
uuguuuaucgcuugcucacaua

SEQ ID NO: 671025 - RNA, 22 nt, Human
guuucaugguuguuugauggca

SEQ ID NO: 671026 - RNA, 22 nt, Human
agcuggaggaguuucuccuagc

SEQ ID NO: 671027 - RNA, 22 nt, Human
ucauacauaacuuguacaguga

SEQ ID NO: 671028 - RNA, 22 nt, Human
ggaagacaucugcuugcaccag

SEQ ID NO: 671029 - RNA, 19 nt, Human
cugggagguguucagagaa

SEQ ID NO: 671030 - RNA, 20 nt, Human
uccccagggcaucaggagca

SEQ ID NO: 671031 - RNA, 22 nt, Human
cuggaggaaaacaacugcagac

SEQ ID NO: 671032 - RNA, 23 nt, Human
acagaggcuuaaaugaguggcag

SEQ ID NO: 671033 - RNA, 18 nt, Human
gcuuuuuagugcaucuuc

SEQ ID NO: 671034 - RNA, 22 nt, Human
acagagaugggaacauucaggu

SEQ ID NO: 671035 - RNA, 23 nt, Human
cugacucaucccaccaccuccuc

SEQ ID NO: 671036 - RNA, 22 nt, Human
cuagaaaucucuguuuacauca

SEQ ID NO: 671037 - RNA, 22 nt, Human
uucuuguuuauuaagauauaaa

SEQ ID NO: 671038 - RNA, 22 nt, Human
uuccagaacaauguggacguau

SEQ ID NO: 671039 - RNA, 22 nt, Human
augacaaaauaaauggucucug

SEQ ID NO: 671040 - RNA, 22 nt, Human
aagacgggagucaggugagcuc

SEQ ID NO: 671041 - RNA, 23 nt, Human
agcugggaauuuucugaagcuuu

SEQ ID NO: 671042 - RNA, 22 nt, Human
aggcucagauucacauuugguu

SEQ ID NO: 671043 - RNA, 22 nt, Human
ccuuuugcucucccauccagaa

SEQ ID NO: 671044 - RNA, 22 nt, Human
cuggccacugauuccuccccug

SEQ ID NO: 671045 - RNA, 22 nt, Human
cugggacucagaccaguucugu

SEQ ID NO: 671046 - RNA, 22 nt, Human
ggccaagauggaaggagagaug

SEQ ID NO: 671047 - RNA, 22 nt, Human
guguguggaaaguuuuccaugg

SEQ ID NO: 671048 - RNA, 22 nt, Human
gcuggcugccuuacuuugugga

SEQ ID NO: 671049 - RNA, 22 nt, Human
cagcaucuuuauaaaaaguaaa

SEQ ID NO: 671050 - RNA, 22 nt, Human
ucaggcagaggauggggagcgu

SEQ ID NO: 671051 - RNA, 20 nt, Human
caggaaccaaagaggacucc

SEQ ID NO: 671052 - RNA, 22 nt, Human
cacauuguagagauuagaaaga

SEQ ID NO: 671053 - RNA, 22 nt, Human
cugggggccuuacggaacucca

SEQ ID NO: 671054 - RNA, 22 nt, Human
agaagcauuauuuaauuuuacu

SEQ ID NO: 671055 - RNA, 22 nt, Human
guggcagagccaaggcuggagc

SEQ ID NO: 671056 - RNA, 22 nt, Human
uuugagaaacagacgaaagaca

SEQ ID NO: 671057 - RNA, 22 nt, Human
caugcacacacgugcauguacg

SEQ ID NO: 671058 - RNA, 22 nt, Human
cagucuggaggucagcuggcuu

SEQ ID NO: 671059 - RNA, 19 nt, Human
gccacaggaugaaguuugg

SEQ ID NO: 671060 - RNA, 21 nt, Human
gggugggguuccagccuuuuc

SEQ ID NO: 671061 - RNA, 22 nt, Human
ucaggagcagcuguaggaaggg

SEQ ID NO: 671062 - RNA, 22 nt, Human
uauuuaacuggaaacacaauga

SEQ ID NO: 671063 - RNA, 22 nt, Human
cugagagaucaagccacaggau

SEQ ID NO: 671064 - RNA, 22 nt, Human
gaguggggaaagccaggacaga

SEQ ID NO: 671065 - RNA, 22 nt, Human
acaguagugcucaaucaguguu

SEQ ID NO: 671066 - RNA, 22 nt, Human
gaaguauagcagauguuauuua

SEQ ID NO: 671067 - RNA, 22 nt, Human
aagucagauaggugaguccaaa

SEQ ID NO: 671068 - RNA, 22 nt, Human
aggugcagcaugaguccaacgg

SEQ ID NO: 671069 - RNA, 19 nt, Human
gcacugaagaguuggucac

SEQ ID NO: 671070 - RNA, 22 nt, Human
auggccugggcccgcuucagau

SEQ ID NO: 671071 - RNA, 22 nt, Human
ugaauaugugacuuugauuuca

SEQ ID NO: 671072 - RNA, 22 nt, Human
uaauuauagccgcuauuuugcu

SEQ ID NO: 671073 - RNA, 22 nt, Human
ugucugaaagaggacgagcugg

SEQ ID NO: 671074 - RNA, 22 nt, Human
aaucacaaacgaauugauggaa

SEQ ID NO: 671075 - RNA, 22 nt, Human
aaggcaccaugagaugcugguu

SEQ ID NO: 671076 - RNA, 22 nt, Human
ccagggcagcagaauuggggca

SEQ ID NO: 671077 - RNA, 19 nt, Human
aggagcacugccagcacca

SEQ ID NO: 671078 - RNA, 22 nt, Human
caggagguggagcucaaguggu

SEQ ID NO: 671079 - RNA, 22 nt, Human
gaaugauagagcugccuucgga

SEQ ID NO: 671080 - RNA, 22 nt, Human
augaugguggguaauguguaaa

SEQ ID NO: 671081 - RNA, 22 nt, Human
uuacaaugcacucaccuuuaga

SEQ ID NO: 671082 - RNA, 19 nt, Human
ggccacuccuggugacugg

SEQ ID NO: 671083 - RNA, 22 nt, Human
uccaucauguucacagcuauau

SEQ ID NO: 671084 - RNA, 22 nt, Human
uuucuaggcacagugucuuccc

SEQ ID NO: 671085 - RNA, 22 nt, Human
aaagaccauguuuacagcuagg

SEQ ID NO: 671086 - RNA, 22 nt, Human
agcuccugggcaccucuuucac

SEQ ID NO: 671087 - RNA, 22 nt, Human
agcagcauauugugucuucaua

SEQ ID NO: 671088 - RNA, 22 nt, Human
accaggcuuaauccuuugcuau

SEQ ID NO: 671089 - RNA, 22 nt, Human
uggcuugcuacugaggugucag

SEQ ID NO: 671090 - RNA, 22 nt, Human
agaagccaccagcugaggaaga

SEQ ID NO: 671091 - RNA, 22 nt, Human
cagcagcaaaucuagaagagga

SEQ ID NO: 671092 - RNA, 22 nt, Human
uaugaaagaaucucagagcaca

SEQ ID NO: 671093 - RNA, 22 nt, Human
ccuguacacggucuaugccucc

SEQ ID NO: 671094 - RNA, 22 nt, Human
agcaauaugacauugcuacauc

SEQ ID NO: 671095 - RNA, 22 nt, Human
aagaagugguccuuuucuuucu

SEQ ID NO: 671096 - RNA, 22 nt, Human
caggaaauuggcuauuugggau

SEQ ID NO: 671097 - RNA, 22 nt, Human
ugcuucuggguaggccucagga

SEQ ID NO: 671098 - RNA, 22 nt, Human
acagcuuuucaauucugcugag

SEQ ID NO: 671099 - RNA, 22 nt, Human
ucugucuacagggagaaugaua

SEQ ID NO: 671100 - RNA, 22 nt, Human
agcugguucacuaagcauaaua

SEQ ID NO: 671101 - RNA, 22 nt, Human
uggggagaagcaauagacucua

SEQ ID NO: 671102 - RNA, 22 nt, Human
ccuguggaccaggaggcagccc

SEQ ID NO: 671103 - RNA, 22 nt, Human
uuaaagcaggcaucauuccuca

SEQ ID NO: 671104 - RNA, 22 nt, Human
ggcaccaggacaugacucccag

SEQ ID NO: 671105 - RNA, 22 nt, Human
ucagcauguacuucuccuccau

SEQ ID NO: 671106 - RNA, 22 nt, Human
uuugguuuagggucauuuaaca

SEQ ID NO: 671107 - RNA, 22 nt, Human
ucugugcucauucagucauuca

SEQ ID NO: 671108 - RNA, 22 nt, Human
acaguggaauuuguagaugugu

SEQ ID NO: 671109 - RNA, 22 nt, Human
cuguacucaagguaaaccagga

SEQ ID NO: 671110 - RNA, 22 nt, Human
uuguuacagcagcaauagaaaa

SEQ ID NO: 671111 - RNA, 22 nt, Human
augcaguaaauguuaagaaaaa

SEQ ID NO: 671112 - RNA, 22 nt, Human
gucucugggugugugaugccaa

SEQ ID NO: 671113 - RNA, 22 nt, Human
cugccagcuggagaccaaggaa

SEQ ID NO: 671114 - RNA, 22 nt, Human
gcauugaaggcauuuuaucuac

SEQ ID NO: 671115 - RNA, 23 nt, Human
aagucagagccaagucaaugaga

SEQ ID NO: 671116 - RNA, 22 nt, Human
gaaugcagcugacagucguuuu

SEQ ID NO: 671117 - RNA, 22 nt, Human
ucuccuggccuuuagguuaagg

SEQ ID NO: 671118 - RNA, 22 nt, Human
uggcacuuuacacccauuuggc

SEQ ID NO: 671119 - RNA, 22 nt, Human
gaaggaagacugguuuaaaugu

SEQ ID NO: 671120 - RNA, 22 nt, Human
agcaggacacgaugcggcagga

SEQ ID NO: 671121 - RNA, 22 nt, Human
ucucugcccaaguuucucaagu

SEQ ID NO: 671122 - RNA, 22 nt, Human
uucugugauugacauguggcuu

SEQ ID NO: 671123 - RNA, 22 nt, Human
cauauuagccuccacugggaca

SEQ ID NO: 671124 - RNA, 22 nt, Human
aaguccuuggagaauagaaagg

SEQ ID NO: 671125 - RNA, 22 nt, Human
auguagaggaguuucuggucug

SEQ ID NO: 671126 - RNA, 22 nt, Human
gccugggacuggauguguuugu

SEQ ID NO: 671127 - RNA, 22 nt, Human
uccucaguuauaaauaggaaac

SEQ ID NO: 671128 - RNA, 22 nt, Human
uagggaugagccaguggguagu

SEQ ID NO: 671129 - RNA, 20 nt, Human
uccugagaccugggaagguu

SEQ ID NO: 671130 - RNA, 22 nt, Human
ugcauuaagugucugcauaugg

SEQ ID NO: 671131 - RNA, 22 nt, Human
uggccugggcaugaagcaucgu

SEQ ID NO: 671132 - RNA, 19 nt, Human
gaaugggaaugggaaagcu

SEQ ID NO: 671133 - RNA, 22 nt, Human
gaacauuuggauuuguaaauuu

SEQ ID NO: 671134 - RNA, 19 nt, Human
ccuagagggaaggcaggac

SEQ ID NO: 671135 - RNA, 22 nt, Human
ucgucugugaaauugggauaag

SEQ ID NO: 671136 - RNA, 22 nt, Human
uccauucauucagguauuuagu

SEQ ID NO: 671137 - RNA, 22 nt, Human
ggcaggcuccguguuccauucc

SEQ ID NO: 671138 - RNA, 22 nt, Human
guaguuaguuaagaugaguuua

SEQ ID NO: 671139 - RNA, 22 nt, Human
augucacauggucaccucuagc

SEQ ID NO: 671140 - RNA, 22 nt, Human
gcagagccuugcgucaugugcc

SEQ ID NO: 671141 - RNA, 22 nt, Human
uggcugaguuacgaacagagca

SEQ ID NO: 671142 - RNA, 22 nt, Human
acugagcagaagagaucuguga

SEQ ID NO: 671143 - RNA, 21 nt, Human
aaacugaagagacaggaacuu

SEQ ID NO: 671144 - RNA, 22 nt, Human
aaggcuaaauucuguacugcau

SEQ ID NO: 671145 - RNA, 20 nt, Human
ugggccucuggugccucugg

SEQ ID NO: 671146 - RNA, 22 nt, Human
auggcccuggaaagagcuugag

SEQ ID NO: 671147 - RNA, 22 nt, Human
ggcagagacaccgaaugacucu

SEQ ID NO: 671148 - RNA, 21 nt, Human
uuagcuuucuagaaucuuugu

SEQ ID NO: 671149 - RNA, 22 nt, Human
ucaaaaguggccuguaaaaucu

SEQ ID NO: 671150 - RNA, 23 nt, Human
uggcucuguggaucccucaggag

SEQ ID NO: 671151 - RNA, 22 nt, Human
acucaaauagcaacggugagaa

SEQ ID NO: 671152 - RNA, 22 nt, Human
auaauguagguauguguauuua

SEQ ID NO: 671153 - RNA, 22 nt, Human
cagauucuucauucauucuaca

SEQ ID NO: 671154 - RNA, 22 nt, Human
gacagcugaaaaauguaaggua

SEQ ID NO: 671155 - RNA, 22 nt, Human
uggagagcuguugaaaugcaga

SEQ ID NO: 671156 - RNA, 22 nt, Human
aggggcugggacagagccaagc

SEQ ID NO: 671157 - RNA, 22 nt, Human
uuccaagagucagcugauccca

SEQ ID NO: 671158 - RNA, 22 nt, Human
uuucagaacagggauugggccu

SEQ ID NO: 671159 - RNA, 22 nt, Human
caggaagcugagcugcacugca

SEQ ID NO: 671160 - RNA, 22 nt, Human
uugauguacagaauuguucaca

SEQ ID NO: 671161 - RNA, 19 nt, Human
aucaggaacaaggcugauc

SEQ ID NO: 671162 - RNA, 18 nt, Human
ugagcccuuaucuuuggc

SEQ ID NO: 671163 - RNA, 22 nt, Human
uaaauucccaacucugcucuuc

SEQ ID NO: 671164 - RNA, 21 nt, Human
aaauugccacacauuucuucc

SEQ ID NO: 671165 - RNA, 22 nt, Human
uauggaaagcucuuuuugauug

SEQ ID NO: 671166 - RNA, 22 nt, Human
cccugcaggcucagacuggagu

SEQ ID NO: 671167 - RNA, 22 nt, Human
aguccuggacuuggagucaggg

SEQ ID NO: 671168 - RNA, 22 nt, Human
uagcuucucuuuucaacaucuu

SEQ ID NO: 671169 - RNA, 22 nt, Human
uccuccuuguuuugucucugcu

SEQ ID NO: 671170 - RNA, 22 nt, Human
ucccugcccugccuucaugguu

SEQ ID NO: 671171 - RNA, 22 nt, Human
ugugacaucgcugugucuguuu

SEQ ID NO: 671172 - RNA, 22 nt, Human
agaacugguggugaucaguuau

SEQ ID NO: 671173 - RNA, 22 nt, Human
auucuggaauucuaagauucug

SEQ ID NO: 671174 - RNA, 22 nt, Human
uggcagagucugggcuugggca

SEQ ID NO: 671175 - RNA, 22 nt, Human
ccaccagcuuuggcggugacag

SEQ ID NO: 671176 - RNA, 22 nt, Human
agaucacaguggcaacucccuu

SEQ ID NO: 671177 - RNA, 22 nt, Human
aaagggaauguguaggacaugu

SEQ ID NO: 671178 - RNA, 22 nt, Human
ugcuugcugggccaauggcaau

SEQ ID NO: 671179 - RNA, 22 nt, Human
ucuguccucuuugaagcugcuc

SEQ ID NO: 671180 - RNA, 22 nt, Human
ucuuugaauucaaacuguucaa

SEQ ID NO: 671181 - RNA, 22 nt, Human
cuaucucuuguuuuccugaagc

SEQ ID NO: 671182 - RNA, 22 nt, Human
aagcugaggcccauggcaaggu

SEQ ID NO: 671183 - RNA, 22 nt, Human
caccuaggguuucgccuuucuu

SEQ ID NO: 671184 - RNA, 22 nt, Human
uucacauugaaggugcuuucuu

SEQ ID NO: 671185 - RNA, 22 nt, Human
cuggugcuggagccuagucccu

SEQ ID NO: 671186 - RNA, 22 nt, Human
auauaugaagaagucuugauua

SEQ ID NO: 671187 - RNA, 22 nt, Human
gaaaccugagccagagugggga

SEQ ID NO: 671188 - RNA, 22 nt, Human
cagaaauucccauuucagauuc

SEQ ID NO: 671189 - RNA, 22 nt, Human
agcugcccugguaagauugaug

SEQ ID NO: 671190 - RNA, 22 nt, Human
ucuggcuccaggaccgggcaca

SEQ ID NO: 671191 - RNA, 22 nt, Human
cagagaggauggauuccauagc

SEQ ID NO: 671192 - RNA, 22 nt, Human
ugguuccaaucgcacuggcuca

SEQ ID NO: 671193 - RNA, 22 nt, Human
ucagcaacuauuuaucaaauuc

SEQ ID NO: 671194 - RNA, 22 nt, Human
guuauugagacauagaguuaug

SEQ ID NO: 671195 - RNA, 22 nt, Human
gggaggcacgaggcgcgcagug

SEQ ID NO: 671196 - RNA, 22 nt, Human
ucacugaauacuugucucaucc

SEQ ID NO: 671197 - RNA, 22 nt, Human
cuaagcuuuucaaaaacauguu

SEQ ID NO: 671198 - RNA, 22 nt, Human
auagcuuuuugucauagagucu

SEQ ID NO: 671199 - RNA, 22 nt, Human
gacaggcaccuugucugucuug

SEQ ID NO: 671200 - RNA, 22 nt, Human
gacuccagagugacuauuuguc

SEQ ID NO: 671201 - RNA, 22 nt, Human
agggcugagaaugacagggccg

SEQ ID NO: 671202 - RNA, 22 nt, Human
gcaaugucugcaaugggugugg

SEQ ID NO: 671203 - RNA, 20 nt, Human
cugccaugauugauagagug

SEQ ID NO: 671204 - RNA, 16 nt, Human
uccuggggauacugga

SEQ ID NO: 671205 - RNA, 22 nt, Human
acugggccuacccagauuggca

SEQ ID NO: 671206 - RNA, 22 nt, Human
cugcagggugacguugcccacc

SEQ ID NO: 671207 - RNA, 22 nt, Human
aaguuuacuggggagaucaccu

SEQ ID NO: 671208 - RNA, 22 nt, Human
aaaggcucacgcaguuagugau

SEQ ID NO: 671209 - RNA, 22 nt, Human
agggggugcccagaugaaggau

SEQ ID NO: 671210 - RNA, 22 nt, Human
aaauauugguaggaugcuuguu

SEQ ID NO: 671211 - RNA, 22 nt, Human
gaacagacuuugccaauuacag

SEQ ID NO: 671212 - RNA, 22 nt, Human
aggaugaggcuggacacuucuu

SEQ ID NO: 671213 - RNA, 22 nt, Human
acaguucugccuguuugagaag

SEQ ID NO: 671214 - RNA, 22 nt, Human
ccauaaaguaggaaacacuaca

SEQ ID NO: 671215 - RNA, 22 nt, Human
gggagcucgugcgcccaggugc

SEQ ID NO: 671216 - RNA, 22 nt, Human
agcgagggaggucugaggacag

SEQ ID NO: 671217 - RNA, 22 nt, Human
gucugagauuagggaagauuuu

SEQ ID NO: 671218 - RNA, 22 nt, Human
cacaugcauuggcaaaagugua

SEQ ID NO: 671219 - RNA, 22 nt, Human
uuccaagugcugaggacaguag

SEQ ID NO: 671220 - RNA, 22 nt, Human
agcaggcaagcgugaguucucu

SEQ ID NO: 671221 - RNA, 22 nt, Human
ugcauguuauagaauuuuaacu

SEQ ID NO: 671222 - RNA, 22 nt, Human
ucugaaauaggagccauguaga

SEQ ID NO: 671223 - RNA, 22 nt, Human
uucagaaaugucagccaucaga

SEQ ID NO: 671224 - RNA, 22 nt, Human
uccagcauguuugugcugcuga

SEQ ID NO: 671225 - RNA, 22 nt, Human
gcaagcuggcuguuagaggaug

SEQ ID NO: 671226 - RNA, 22 nt, Human
gcaguaggggcuggagggcugu

SEQ ID NO: 671227 - RNA, 22 nt, Human
auuagcugaccucuaaggagcc

SEQ ID NO: 671228 - RNA, 22 nt, Human
cugcugcuuagcauagcagagg

SEQ ID NO: 671229 - RNA, 22 nt, Human
uuacauguggagucugauugca

SEQ ID NO: 671230 - RNA, 22 nt, Human
acacagagccagggaauacagu

SEQ ID NO: 671231 - RNA, 22 nt, Human
ugaagaagccaauugguaggcu

SEQ ID NO: 671232 - RNA, 22 nt, Human
acacugaagagcacuuucaaag

SEQ ID NO: 671233 - RNA, 22 nt, Human
ugcucaguccuaccuuggcucc

SEQ ID NO: 671234 - RNA, 22 nt, Human
aggcuuuguaccuggggucuua

SEQ ID NO: 671235 - RNA, 19 nt, Human
uguguguuuauauauguau

SEQ ID NO: 671236 - RNA, 22 nt, Human
aagaacauguuaaaagauucac

SEQ ID NO: 671237 - RNA, 22 nt, Human
caggcucccgcuccacugggca

SEQ ID NO: 671238 - RNA, 22 nt, Human
cuuuguuagcagccaauuuguu

SEQ ID NO: 671239 - RNA, 22 nt, Human
auuucucaucaagugccaacuc

SEQ ID NO: 671240 - RNA, 22 nt, Human
ucagagugggagaaugugccaa

SEQ ID NO: 671241 - RNA, 20 nt, Human
aaaguguaaggcaaaguugu

SEQ ID NO: 671242 - RNA, 22 nt, Human
uacuuugguaucaaacuaaaac

SEQ ID NO: 671243 - RNA, 22 nt, Human
uccagcuugccuggucuuuugg

SEQ ID NO: 671244 - RNA, 22 nt, Human
aagauucucacugcucaacuuu

SEQ ID NO: 671245 - RNA, 22 nt, Human
ccagagagggcgccaccuggag

SEQ ID NO: 671246 - RNA, 22 nt, Human
agacaauacauuuauucccuuu

SEQ ID NO: 671247 - RNA, 22 nt, Human
acauucaaggccuucugacaca

SEQ ID NO: 671248 - RNA, 22 nt, Human
gauaaacuuguggaguuuuggu

SEQ ID NO: 671249 - RNA, 22 nt, Human
ucaggcugcuuucaugcuuaga

SEQ ID NO: 671250 - RNA, 22 nt, Human
uuguagcaucaaucaguacuuu

SEQ ID NO: 671251 - RNA, 20 nt, Human
aaacagcuaaaccagcucuc

SEQ ID NO: 671252 - RNA, 18 nt, Human
uacaggaaaaguguuaca

SEQ ID NO: 671253 - RNA, 22 nt, Human
ucuggagaucauguggggugga

SEQ ID NO: 671254 - RNA, 20 nt, Human
auaugggugaugaugucugu

SEQ ID NO: 671255 - RNA, 22 nt, Human
cugcucugaagccaggauucug

SEQ ID NO: 671256 - RNA, 22 nt, Human
gcaggcugaaacucggggucua

SEQ ID NO: 671257 - RNA, 22 nt, Human
aggcacugaaggaagcuugcgc

SEQ ID NO: 671258 - RNA, 22 nt, Human
ucucugaguucuccuccagccc

SEQ ID NO: 671259 - RNA, 21 nt, Human
cuggagucuggggguggcagu

SEQ ID NO: 671260 - RNA, 20 nt, Human
gcucuaaaccacaaagccca

SEQ ID NO: 671261 - RNA, 21 nt, Human
uuugaacuagagguaaauucc

SEQ ID NO: 671262 - RNA, 22 nt, Human
gcacuugggcagagacgcacag

SEQ ID NO: 671263 - RNA, 22 nt, Human
acacuugagguuuuuaggugcg

SEQ ID NO: 671264 - RNA, 22 nt, Human
agaguggcuucuuugacaugcu

SEQ ID NO: 671265 - RNA, 21 nt, Human
uguucaaacguacacauuucu

SEQ ID NO: 671266 - RNA, 22 nt, Human
ucagcucuuaacccucuggccu

SEQ ID NO: 671267 - RNA, 22 nt, Human
cgcaacagcguggcgcccagcu

SEQ ID NO: 671268 - RNA, 22 nt, Human
agcuccugcagacuccugcuca

SEQ ID NO: 671269 - RNA, 22 nt, Human
ucagugugacugauggcuuuau

SEQ ID NO: 671270 - RNA, 22 nt, Human
gcagagccugugucugagcaaa

SEQ ID NO: 671271 - RNA, 22 nt, Human
agauuucagguuggggcagaag

SEQ ID NO: 671272 - RNA, 22 nt, Human
uagcuuggaauaaaaugagaau

SEQ ID NO: 671273 - RNA, 22 nt, Human
uauuggaguauggggcuggagu

SEQ ID NO: 671274 - RNA, 19 nt, Human
gguguuucuucauuuucca

SEQ ID NO: 671275 - RNA, 22 nt, Human
caggcugugggagucaggaccc

SEQ ID NO: 671276 - RNA, 22 nt, Human
uucuccuuccugguuuucaggc

SEQ ID NO: 671277 - RNA, 22 nt, Human
gugagggguggcugagcaguuu

SEQ ID NO: 671278 - RNA, 22 nt, Human
uggcugagggggcaguucagga

SEQ ID NO: 671279 - RNA, 22 nt, Human
agccuggaagaaccugaagucu

SEQ ID NO: 671280 - RNA, 22 nt, Human
aaaucagacuugaauuuucauc

SEQ ID NO: 671281 - RNA, 23 nt, Human
ucacauaauccuucauccacagg

SEQ ID NO: 671282 - RNA, 22 nt, Human
gaggcuguguuucagugaggcc

SEQ ID NO: 671283 - RNA, 22 nt, Human
ggcuccugaaagacuaugggaa

SEQ ID NO: 671284 - RNA, 22 nt, Human
ccacaugaaucuuggaagcagg

SEQ ID NO: 671285 - RNA, 22 nt, Human
gggcugagccauuugaaccuug

SEQ ID NO: 671286 - RNA, 22 nt, Human
aaaagggaaagcagaaugacuu

SEQ ID NO: 671287 - RNA, 22 nt, Human
acagcuggacaggggagaguuu

SEQ ID NO: 671288 - RNA, 22 nt, Human
ccuuccagugacuaaggaggaa

SEQ ID NO: 671289 - RNA, 22 nt, Human
guggcuggaguaugaggaaagg

SEQ ID NO: 671290 - RNA, 22 nt, Human
aaagcccauguggaaguacagg

SEQ ID NO: 671291 - RNA, 22 nt, Human
auauguguguauuucuuacuag

SEQ ID NO: 671292 - RNA, 22 nt, Human
ccuuccagccccaucucaucgu

SEQ ID NO: 671293 - RNA, 22 nt, Human
ugggcagguuguuauuugacau

SEQ ID NO: 671294 - RNA, 22 nt, Human
aaguccagcagugcuuguugau

SEQ ID NO: 671295 - RNA, 22 nt, Human
auggagagagaaggcuugcugu

SEQ ID NO: 671296 - RNA, 22 nt, Human
gaggccuggcugucagucccca

SEQ ID NO: 671297 - RNA, 22 nt, Human
cccaggagaccugugaaaggac

SEQ ID NO: 671298 - RNA, 22 nt, Human
ccacugaggggucaugguggga

SEQ ID NO: 671299 - RNA, 19 nt, Human
cucucuccaguggcuggcu

SEQ ID NO: 671300 - RNA, 22 nt, Human
cagcuugugcaaagguccuggg

SEQ ID NO: 671301 - RNA, 22 nt, Human
uuuuguuggcuuaagaaauaca

SEQ ID NO: 671302 - RNA, 22 nt, Human
agugaaauugcuguaagaggaa

SEQ ID NO: 671303 - RNA, 20 nt, Human
ccuggcuuugcagcaugaga

SEQ ID NO: 671304 - RNA, 22 nt, Human
cugcugugccuuaaaaugcaag

SEQ ID NO: 671305 - RNA, 22 nt, Human
agggccugggaagaggaacccu

SEQ ID NO: 671306 - RNA, 22 nt, Human
acuucauguugcucuuggcuau

SEQ ID NO: 671307 - RNA, 22 nt, Human
ugcaacaggagaguucagggca

SEQ ID NO: 671308 - RNA, 23 nt, Human
ccacagagcugccaauuccugug

SEQ ID NO: 671309 - RNA, 22 nt, Human
ccagagagaguacugggcucug

SEQ ID NO: 671310 - RNA, 22 nt, Human
cucucucuucuuuguaggggcc

SEQ ID NO: 671311 - RNA, 22 nt, Human
cugcacugagcucucccagccc

SEQ ID NO: 671312 - RNA, 22 nt, Human
ugaacagauggcccagcagagg

SEQ ID NO: 671313 - RNA, 22 nt, Human
aguggaggcacuaauuggauuu

SEQ ID NO: 671314 - RNA, 22 nt, Human
ccuucacacuuucacuuggaua

SEQ ID NO: 671315 - RNA, 22 nt, Human
guuauguaucuugauugggugg

SEQ ID NO: 671316 - RNA, 22 nt, Human
ugagccuggcggaagcagcgug

SEQ ID NO: 671317 - RNA, 20 nt, Human
cuuggccuacuuagcuuugu

SEQ ID NO: 671318 - RNA, 20 nt, Human
auggcucuguuuggcaguga

SEQ ID NO: 671319 - RNA, 22 nt, Human
cuggagaguuggaagauggacu

SEQ ID NO: 671320 - RNA, 22 nt, Human
ggaguggcaggccacagugcug

SEQ ID NO: 671321 - RNA, 22 nt, Human
auggcagggacuguggcccuug

SEQ ID NO: 671322 - RNA, 22 nt, Human
ccuuucugacagugaugggggg

SEQ ID NO: 671323 - RNA, 22 nt, Human
gacccaggcucgugggacggcu

SEQ ID NO: 671324 - RNA, 22 nt, Human
gaaggaaguuuauuuuagaaga

SEQ ID NO: 671325 - RNA, 22 nt, Human
guuuccuauggcugcugcagga

SEQ ID NO: 671326 - RNA, 22 nt, Human
cagugcugguguaggcugacca

SEQ ID NO: 671327 - RNA, 22 nt, Human
gaggugagaagggggucagaug

SEQ ID NO: 671328 - RNA, 22 nt, Human
auguucuuucagccagugcauc

SEQ ID NO: 671329 - RNA, 22 nt, Human
ggugcagggagaggcaggcccc

SEQ ID NO: 671330 - RNA, 22 nt, Human
auuuuccucaagccucuggaag

SEQ ID NO: 671331 - RNA, 22 nt, Human
acacauuugcauaauaccucau

SEQ ID NO: 671332 - RNA, 22 nt, Human
uugauucugggcucauuucuuu

SEQ ID NO: 671333 - RNA, 22 nt, Human
gcaugcaucuagauaugcagac

SEQ ID NO: 671334 - RNA, 22 nt, Human
cuggaggggccauccacagucu

SEQ ID NO: 671335 - RNA, 22 nt, Human
agaaggcccuguguggucugag

SEQ ID NO: 671336 - RNA, 22 nt, Human
uugaauuggcaaaacugcagcu

SEQ ID NO: 671337 - RNA, 22 nt, Human
cacugggaguacaaagaauggg

SEQ ID NO: 671338 - RNA, 22 nt, Human
ucuguacauuuguguugugaau

SEQ ID NO: 671339 - RNA, 20 nt, Human
uccuccuugcagagcccaga

SEQ ID NO: 671340 - RNA, 22 nt, Human
uaaugaacucuuuacuuuggga

SEQ ID NO: 671341 - RNA, 22 nt, Human
agggcucauaauuccugacuuc

SEQ ID NO: 671342 - RNA, 22 nt, Human
agucucuggacugggagauggc

SEQ ID NO: 671343 - RNA, 22 nt, Human
acuuguucauugaguacauaug

SEQ ID NO: 671344 - RNA, 22 nt, Human
acaaaaccagaaaaucucuacc

SEQ ID NO: 671345 - RNA, 22 nt, Human
agcaggcugaugggcaugcuug

SEQ ID NO: 671346 - RNA, 22 nt, Human
agggcucccgcgguguccggga

SEQ ID NO: 671347 - RNA, 22 nt, Human
agggcagcauugccuuucucca

SEQ ID NO: 671348 - RNA, 22 nt, Human
agcugccuuugcaucacuuuaa

SEQ ID NO: 671349 - RNA, 22 nt, Human
aaaccugucugauuauggagac

SEQ ID NO: 671350 - RNA, 22 nt, Human
agaagggccagcuggacaccug

SEQ ID NO: 671351 - RNA, 22 nt, Human
ucucugaauuguuuaaguuauu

SEQ ID NO: 671352 - RNA, 22 nt, Human
uacaaugacucucaguuuggcu

SEQ ID NO: 671353 - RNA, 22 nt, Human
acugcuuuaucugagaaguccu

SEQ ID NO: 671354 - RNA, 22 nt, Human
uucauacuguguuuccaaguuu

SEQ ID NO: 671355 - RNA, 22 nt, Human
accugcagcugagaaaaugacu

SEQ ID NO: 671356 - RNA, 22 nt, Human
accaggaagugugggccaacgu

SEQ ID NO: 671357 - RNA, 22 nt, Human
cuugggcuuagaagguaaguga

SEQ ID NO: 671358 - RNA, 22 nt, Human
uuuggaauuaugcuuaaaguuu

SEQ ID NO: 671359 - RNA, 22 nt, Human
aggagucaggaccaaauggaaa

SEQ ID NO: 671360 - RNA, 22 nt, Human
gguggcaccuuacccugcgcag

SEQ ID NO: 671361 - RNA, 22 nt, Human
acugccuugucucuugccuguu

SEQ ID NO: 671362 - RNA, 22 nt, Human
cuggcagcuuagcacucugguu

SEQ ID NO: 671363 - RNA, 22 nt, Human
uaugagguauuacaggaaauau

SEQ ID NO: 671364 - RNA, 22 nt, Human
ucugugcacuaacauuccuggu

SEQ ID NO: 671365 - RNA, 22 nt, Human
gucuuuaguugaaacauguggu

SEQ ID NO: 671366 - RNA, 22 nt, Human
aucagaaaaacauaauguuauu

SEQ ID NO: 671367 - RNA, 22 nt, Human
auuggcagggccagcaucuccc

SEQ ID NO: 671368 - RNA, 21 nt, Human
ugucacagauucucagcuugc

SEQ ID NO: 671369 - RNA, 22 nt, Human
cugccaucugagccaaaagugc

SEQ ID NO: 671370 - RNA, 22 nt, Human
caaccuggcccuagcccuggga

SEQ ID NO: 671371 - RNA, 22 nt, Human
auacaucucauguaagagauaa

SEQ ID NO: 671372 - RNA, 22 nt, Human
ucccacauuacccugacugaca

SEQ ID NO: 671373 - RNA, 19 nt, Human
uggcugggcgugccuccgu

SEQ ID NO: 671374 - RNA, 18 nt, Human
agggcugaugaguuuggg

SEQ ID NO: 671375 - RNA, 22 nt, Human
agcuccaggccuugggccccgg

SEQ ID NO: 671376 - RNA, 22 nt, Human
cauuauggaagacaguguggug

SEQ ID NO: 671377 - RNA, 17 nt, Human
ucucuuucccuuucugc

SEQ ID NO: 671378 - RNA, 22 nt, Human
ugagucugauuuuucuagcauu

SEQ ID NO: 671379 - RNA, 22 nt, Human
cagcacaggaagugggccuuca

SEQ ID NO: 671380 - RNA, 22 nt, Human
cgcccagcugaaaucuccaggc

SEQ ID NO: 671381 - RNA, 22 nt, Human
auggcugucacgccacugugag

SEQ ID NO: 671382 - RNA, 21 nt, Human
uucaugagauaaccagcugua

SEQ ID NO: 671383 - RNA, 22 nt, Human
gucagauuaauagcaauaauaa

SEQ ID NO: 671384 - RNA, 22 nt, Human
ucagcugccucucccuggaaga

SEQ ID NO: 671385 - RNA, 22 nt, Human
acacaggcauagccauacaugu

SEQ ID NO: 671386 - RNA, 22 nt, Human
uuucacauuuuauacuuaagcc

SEQ ID NO: 671387 - RNA, 22 nt, Human
ugcuguggcaguuuauguauag

SEQ ID NO: 671388 - RNA, 22 nt, Human
ucugaaagggcuaaauaauuug

SEQ ID NO: 671389 - RNA, 22 nt, Human
cauuugaugacucaacucauaa

SEQ ID NO: 671390 - RNA, 18 nt, Human
uccugggaaaggcauaca

SEQ ID NO: 671391 - RNA, 22 nt, Human
cagaagaguagcugaacaaguu

SEQ ID NO: 671392 - RNA, 22 nt, Human
cgaugguucuggcugcuuguau

SEQ ID NO: 671393 - RNA, 22 nt, Human
aagcccuggaacuuuccuagcc

SEQ ID NO: 671394 - RNA, 22 nt, Human
uaggcaggcugaauguagauuu

SEQ ID NO: 671395 - RNA, 22 nt, Human
guguaucaguaacuguggacag

SEQ ID NO: 671396 - RNA, 22 nt, Human
ucugaacauggcuuccucuuca

SEQ ID NO: 671397 - RNA, 22 nt, Human
cagagcuuccugcugggcuucu

SEQ ID NO: 671398 - RNA, 21 nt, Human
ugcugacaucaggucugcuau

SEQ ID NO: 671399 - RNA, 22 nt, Human
auguggcuagggaauaaaauau

SEQ ID NO: 671400 - RNA, 22 nt, Human
uccuggaguugucuguacucau

SEQ ID NO: 671401 - RNA, 22 nt, Human
gaaggagggagcggcgcggauu

SEQ ID NO: 671402 - RNA, 22 nt, Human
uuggaugaagucuagcuuuagu

SEQ ID NO: 671403 - RNA, 22 nt, Human
aauaaguugccuguugaaucau

SEQ ID NO: 671404 - RNA, 19 nt, Human
ucagaaggcaggagaggcc

SEQ ID NO: 671405 - RNA, 22 nt, Human
gcaaugcauauguggguagcau

SEQ ID NO: 671406 - RNA, 22 nt, Human
aggagccauccccaugagaggu

SEQ ID NO: 671407 - RNA, 22 nt, Human
guuccuaagcuguggcccugga

SEQ ID NO: 671408 - RNA, 22 nt, Human
uuauccaacaugacuuaugucc

SEQ ID NO: 671409 - RNA, 22 nt, Human
auguuacacauaggcauaaaug

SEQ ID NO: 671410 - RNA, 22 nt, Human
guuccacaaaaggucuaguuua

SEQ ID NO: 671411 - RNA, 22 nt, Human
agugggggccaacgagggcagc

SEQ ID NO: 671412 - RNA, 22 nt, Human
uauagcaagcucuuuguaacca

SEQ ID NO: 671413 - RNA, 22 nt, Human
acacagaaccucauagccucuc

SEQ ID NO: 671414 - RNA, 22 nt, Human
uuggcucaccugucuacccaga

SEQ ID NO: 671415 - RNA, 22 nt, Human
aagacaagcaucaaaucaggca

SEQ ID NO: 671416 - RNA, 22 nt, Human
agagacugauggagcucacucu

SEQ ID NO: 671417 - RNA, 22 nt, Human
ggccacagucucuggaaggaug

SEQ ID NO: 671418 - RNA, 22 nt, Human
uguuugaauaacuuggauauau

SEQ ID NO: 671419 - RNA, 22 nt, Human
uacuuuuuaugauaagaacuga

SEQ ID NO: 671420 - RNA, 22 nt, Human
aaauuagauaugugugagacuc

SEQ ID NO: 671421 - RNA, 22 nt, Human
aggagccauugcaggauggcag

SEQ ID NO: 671422 - RNA, 22 nt, Human
uacugugggauguugugauuag

SEQ ID NO: 671423 - RNA, 22 nt, Human
cccucccucugcuggguguaga

SEQ ID NO: 671424 - RNA, 22 nt, Human
cagcccucugaagaggcgcuug

SEQ ID NO: 671425 - RNA, 22 nt, Human
uuauugucaaaaacaggacacu

SEQ ID NO: 671426 - RNA, 22 nt, Human
cucugucacuucuccagcugag

SEQ ID NO: 671427 - RNA, 22 nt, Human
ggcacagggggcugaggacuag

SEQ ID NO: 671428 - RNA, 22 nt, Human
ucugcaucucaggauucccuuc

SEQ ID NO: 671429 - RNA, 22 nt, Human
gcaggaacuggagcuggauguu

SEQ ID NO: 671430 - RNA, 22 nt, Human
ccagcucuguaagcugugaaau

SEQ ID NO: 671431 - RNA, 22 nt, Human
aguguuuuuggguagggugagu

SEQ ID NO: 671432 - RNA, 20 nt, Human
aucaggaagagagacugacc

SEQ ID NO: 671433 - RNA, 22 nt, Human
uugaccuauguuucuucaucug

SEQ ID NO: 671434 - RNA, 22 nt, Human
gugucccacucuggaggugaag

SEQ ID NO: 671435 - RNA, 22 nt, Human
caaauaguaugagcaaugauuc

SEQ ID NO: 671436 - RNA, 22 nt, Human
gagcucagaggcgucuuugucc

SEQ ID NO: 671437 - RNA, 22 nt, Human
ccagcuuuaucaagucugagcu

SEQ ID NO: 671438 - RNA, 17 nt, Human
ucucagugacugauagc

SEQ ID NO: 671439 - RNA, 22 nt, Human
cauuuaaugcacggauguagcc

SEQ ID NO: 671440 - RNA, 22 nt, Human
aagaagaaguguuauuuuuaga

SEQ ID NO: 671441 - RNA, 18 nt, Human
gccucuguugcuugccug

SEQ ID NO: 671442 - RNA, 22 nt, Human
gaaaguauucacaaaguucuug

SEQ ID NO: 671443 - RNA, 22 nt, Human
gcagcaguaggaaauaacacag

SEQ ID NO: 671444 - RNA, 22 nt, Human
uucauacaaugggauauuauga

SEQ ID NO: 671445 - RNA, 22 nt, Human
aaguuuagcuugagauggaaag

SEQ ID NO: 671446 - RNA, 22 nt, Human
cugucauuuaagacauucugga

SEQ ID NO: 671447 - RNA, 22 nt, Human
aggggacacggcuucuccaggg

SEQ ID NO: 671448 - RNA, 22 nt, Human
gaggggcugggguugacuccaa

SEQ ID NO: 671449 - RNA, 22 nt, Human
ucagaaggaaacgaugccagcu

SEQ ID NO: 671450 - RNA, 22 nt, Human
guuugucuuaauuaggcaucga

SEQ ID NO: 671451 - RNA, 20 nt, Human
uauuuagauucaaguaugga

SEQ ID NO: 671452 - RNA, 22 nt, Human
aagaucauaauauuuaucucau

SEQ ID NO: 671453 - RNA, 18 nt, Human
ucagagguacagaaaagu

SEQ ID NO: 671454 - RNA, 22 nt, Human
aagagggaggugcgggugcaga

SEQ ID NO: 671455 - RNA, 22 nt, Human
uccugggaacucggaaagcucu

SEQ ID NO: 671456 - RNA, 22 nt, Human
agaagccacaggaaagcagcuu

SEQ ID NO: 671457 - RNA, 22 nt, Human
ucaggagugcagcaguuuggag

SEQ ID NO: 671458 - RNA, 22 nt, Human
gucuggggugaggcccgggauu

SEQ ID NO: 671459 - RNA, 22 nt, Human
augcauuuauguguguacauug

SEQ ID NO: 671460 - RNA, 22 nt, Human
ugugaagauagcuguuacaucu

SEQ ID NO: 671461 - RNA, 22 nt, Human
agccccuuccaguucucagauc

SEQ ID NO: 671462 - RNA, 22 nt, Human
uucuguucuuuauuuaccauau

SEQ ID NO: 671463 - RNA, 22 nt, Human
ggcaucaggaucugucuugcuu

SEQ ID NO: 671464 - RNA, 22 nt, Human
cugugaaacuggacagcacuug

SEQ ID NO: 671465 - RNA, 22 nt, Human
guauuaggaggaacacaggccu

SEQ ID NO: 671466 - RNA, 18 nt, Human
cugggcucgagagauccu

SEQ ID NO: 671467 - RNA, 22 nt, Human
ccuucaggucauauaugucaga

SEQ ID NO: 671468 - RNA, 22 nt, Human
uuacaaagaguguucuuuucca

SEQ ID NO: 671469 - RNA, 22 nt, Human
ccagaaaaggagcugcaggaug

SEQ ID NO: 671470 - RNA, 22 nt, Human
ugcccagggauaagccuagaga

SEQ ID NO: 671471 - RNA, 22 nt, Human
ucuaacuuagggaauacuuuag

SEQ ID NO: 671472 - RNA, 22 nt, Human
gguuccagaccacggguguucu

SEQ ID NO: 671473 - RNA, 22 nt, Human
uuuauucaagaugagguucaug

SEQ ID NO: 671474 - RNA, 22 nt, Human
agggcccuccccgcucagggca

SEQ ID NO: 671475 - RNA, 22 nt, Human
augagguuuuacugccauuuuc

SEQ ID NO: 671476 - RNA, 22 nt, Human
gagcagugaugggaggacguca

SEQ ID NO: 671477 - RNA, 22 nt, Human
uauauguagauuguaccaaugu

SEQ ID NO: 671478 - RNA, 19 nt, Human
ucaaagucugagucacuuu

SEQ ID NO: 671479 - RNA, 22 nt, Human
ccugagagagaagcgaccuggu

SEQ ID NO: 671480 - RNA, 22 nt, Human
uggagaguaaauggcagaauca

SEQ ID NO: 671481 - RNA, 22 nt, Human
agggccagcacuccuggcagga

SEQ ID NO: 671482 - RNA, 22 nt, Human
guuucuggcgccggggcaggcc

SEQ ID NO: 671483 - RNA, 23 nt, Human
uggcuggcagaaacugaagcaug

SEQ ID NO: 671484 - RNA, 22 nt, Human
ucuggaguggcagucaucugaa

SEQ ID NO: 671485 - RNA, 22 nt, Human
ucauagaaauaucacgucuuuu

SEQ ID NO: 671486 - RNA, 22 nt, Human
ggcucagaaacuaaaggcgcug

SEQ ID NO: 671487 - RNA, 19 nt, Human
aguuauuucuaaauuuacc

SEQ ID NO: 671488 - RNA, 22 nt, Human
cucuuuggcguuggcagagcca

SEQ ID NO: 671489 - RNA, 22 nt, Human
uaaauguuguaaguacaucuaa

SEQ ID NO: 671490 - RNA, 22 nt, Human
aucacaaucuucaaaucgauuc

SEQ ID NO: 671491 - RNA, 22 nt, Human
gcaguggccacauggaggagga

SEQ ID NO: 671492 - RNA, 22 nt, Human
ugaaacauuugaugaucuuugg

SEQ ID NO: 671493 - RNA, 22 nt, Human
aagucuaguauccuucuugacu

SEQ ID NO: 671494 - RNA, 22 nt, Human
cguuuaaccagcacgcuuggcc

SEQ ID NO: 671495 - RNA, 22 nt, Human
agcugcuuugcugggcaggccc

SEQ ID NO: 671496 - RNA, 22 nt, Human
ucuuuguuauugugaauagggu

SEQ ID NO: 671497 - RNA, 22 nt, Human
cuucauaaacucagaaggcagc

SEQ ID NO: 671498 - RNA, 22 nt, Human
agcuggcccucgagagccaauu

SEQ ID NO: 671499 - RNA, 22 nt, Human
ccagacaggaacacacaucucc

SEQ ID NO: 671500 - RNA, 19 nt, Human
agcagagcagggccguggg

SEQ ID NO: 671501 - RNA, 22 nt, Human
uccagggcuggguuggcucagc

SEQ ID NO: 671502 - RNA, 22 nt, Human
cugggacagcugagacaggaga

SEQ ID NO: 671503 - RNA, 22 nt, Human
ugcuucugggcaaaugugugug

SEQ ID NO: 671504 - RNA, 19 nt, Human
ugcuauuuagaacgccugg

SEQ ID NO: 671505 - RNA, 20 nt, Human
agcuccagugcugacgcuuc

SEQ ID NO: 671506 - RNA, 22 nt, Human
aguccaaagcagaugagggcca

SEQ ID NO: 671507 - RNA, 22 nt, Human
cagcuucaugacaaacaguuuu

SEQ ID NO: 671508 - RNA, 22 nt, Human
aacaucuccaaccuacauccac

SEQ ID NO: 671509 - RNA, 22 nt, Human
augacauugacagaccugcugc

SEQ ID NO: 671510 - RNA, 22 nt, Human
ucacuggauuaguuugaacugu

SEQ ID NO: 671511 - RNA, 22 nt, Human
agcagcucaaagccugcaagga

SEQ ID NO: 671512 - RNA, 22 nt, Human
aggcagcaaaugucuggaacag

SEQ ID NO: 671513 - RNA, 22 nt, Human
gcgagugccgagagggcagggc

SEQ ID NO: 671514 - RNA, 22 nt, Human
aaagguuauuauuacuauuguc

SEQ ID NO: 671515 - RNA, 22 nt, Human
gaguaacauaccaaaauucaca

SEQ ID NO: 671516 - RNA, 22 nt, Human
gucccagcuucccacuagcagc

SEQ ID NO: 671517 - RNA, 22 nt, Human
ucaguggaguauggaugaaguc

SEQ ID NO: 671518 - RNA, 23 nt, Human
agagcuuucuaaaauguaaaucu

SEQ ID NO: 671519 - RNA, 17 nt, Human
guaaggcuugcagaugc

SEQ ID NO: 671520 - RNA, 22 nt, Human
cacugccugugagcugugugcc

SEQ ID NO: 671521 - RNA, 22 nt, Human
gugggagcuuuggcaucaggcu

SEQ ID NO: 671522 - RNA, 22 nt, Human
ucuccagggagguagcccagug

SEQ ID NO: 671523 - RNA, 22 nt, Human
uugaaugauuaaagucaucuga

SEQ ID NO: 671524 - RNA, 22 nt, Human
gaggcucagagagguccacaua

SEQ ID NO: 671525 - RNA, 22 nt, Human
ugggcuacucugggagccuaac

SEQ ID NO: 671526 - RNA, 22 nt, Human
cacagcuucccaaaguggaccu

SEQ ID NO: 671527 - RNA, 22 nt, Human
uugaggccaaaaaguccuauga

SEQ ID NO: 671528 - RNA, 22 nt, Human
uggggaaaggagagcauuauuu

SEQ ID NO: 671529 - RNA, 22 nt, Human
guccucagggaauguggcgggu

SEQ ID NO: 671530 - RNA, 23 nt, Human
aggcagugggggccacuuugcuu

SEQ ID NO: 671531 - RNA, 22 nt, Human
cagacagggguaaccuuccuca

SEQ ID NO: 671532 - RNA, 22 nt, Human
agugucaucgugaaaacauagc

SEQ ID NO: 671533 - RNA, 22 nt, Human
ucucugagcuuaagguguuuca

SEQ ID NO: 671534 - RNA, 22 nt, Human
guccagaaggaggucaaguugg

SEQ ID NO: 671535 - RNA, 22 nt, Human
agcaucugcuuaauggcuuaac

SEQ ID NO: 671536 - RNA, 22 nt, Human
ucccagagccaagcuauggaug

SEQ ID NO: 671537 - RNA, 17 nt, Human
cgggcccgcggccgcuc

SEQ ID NO: 671538 - RNA, 22 nt, Human
aaaagagaauccuguacagaga

SEQ ID NO: 671539 - RNA, 22 nt, Human
ggccagcuucucugcugccugu

SEQ ID NO: 671540 - RNA, 22 nt, Human
gacuuuaaaaugcuagaacagg

SEQ ID NO: 671541 - RNA, 22 nt, Human
cauuuauugaguggccacagug

SEQ ID NO: 671542 - RNA, 22 nt, Human
gugcaugugucuuuauaguaga

SEQ ID NO: 671543 - RNA, 22 nt, Human
acaauuuuaagccagagugggu

SEQ ID NO: 671544 - RNA, 22 nt, Human
caugcuaauucccaggccccaa

SEQ ID NO: 671545 - RNA, 22 nt, Human
aguacagaccugucucuuccug

SEQ ID NO: 671546 - RNA, 22 nt, Human
ccucucagcgauuccucuugga

SEQ ID NO: 671547 - RNA, 22 nt, Human
uugguuuacuaggauucaaauu

SEQ ID NO: 671548 - RNA, 22 nt, Human
ugagcagagacuucaagggcag

SEQ ID NO: 671549 - RNA, 22 nt, Human
ugguuucccauuaucugcagga

SEQ ID NO: 671550 - RNA, 22 nt, Human
uagagcauucuaucuccaacag

SEQ ID NO: 671551 - RNA, 22 nt, Human
guguuuggucagacguccgggg

SEQ ID NO: 671552 - RNA, 22 nt, Human
gugagaagauaaguauugcaaa

SEQ ID NO: 671553 - RNA, 19 nt, Human
gaagaagcuugagaaguag

SEQ ID NO: 671554 - RNA, 22 nt, Human
aguguccuuguuauuacugcuc

SEQ ID NO: 671555 - RNA, 22 nt, Human
ggcuugaacucccaaucauuua

SEQ ID NO: 671556 - RNA, 22 nt, Human
ggugugugaggagucacuuagu

SEQ ID NO: 671557 - RNA, 22 nt, Human
uugauauuagaguauuuguuug

SEQ ID NO: 671558 - RNA, 22 nt, Human
acuccagggguugcuauuuaca

SEQ ID NO: 671559 - RNA, 22 nt, Human
aacccagggugaggggagucua

SEQ ID NO: 671560 - RNA, 22 nt, Human
aggacaagacaaggaccagaga

SEQ ID NO: 671561 - RNA, 22 nt, Human
acccagagcugggcuuggcaaa

SEQ ID NO: 671562 - RNA, 22 nt, Human
cugccuggaaugccagcuucuc

SEQ ID NO: 671563 - RNA, 22 nt, Human
cucugagaugcuugaagaggau

SEQ ID NO: 671564 - RNA, 22 nt, Human
ccccuuucucccgcgucuggcc

SEQ ID NO: 671565 - RNA, 22 nt, Human
uuccacuggcuuucagugaucu

SEQ ID NO: 671566 - RNA, 22 nt, Human
cuggagaagccaaacuagucac

SEQ ID NO: 671567 - RNA, 22 nt, Human
auaaaacuuggguaugaucccu

SEQ ID NO: 671568 - RNA, 21 nt, Human
aaaauguagacuuuucccuga

SEQ ID NO: 671569 - RNA, 22 nt, Human
ggcuccaguuugugccuucagc

SEQ ID NO: 671570 - RNA, 22 nt, Human
aucuuugcccagagacucagcc

SEQ ID NO: 671571 - RNA, 22 nt, Human
gcuauacacauuucuugguagu

SEQ ID NO: 671572 - RNA, 22 nt, Human
augaaugugaugauucuguuac

SEQ ID NO: 671573 - RNA, 22 nt, Human
uucucuaauggugaugauuaga

SEQ ID NO: 671574 - RNA, 22 nt, Human
cugagcauccagcagguacugc

SEQ ID NO: 671575 - RNA, 20 nt, Human
ucccuggaggugguggcauc

SEQ ID NO: 671576 - RNA, 22 nt, Human
guggaaguagauuugagaaggu

SEQ ID NO: 671577 - RNA, 22 nt, Human
ccuuuucuggccaccaagcgcu

SEQ ID NO: 671578 - RNA, 22 nt, Human
ccugguguggcugucacagagg

SEQ ID NO: 671579 - RNA, 22 nt, Human
aaauggauguugaguuaaaugu

SEQ ID NO: 671580 - RNA, 17 nt, Human
aagaaucauuagagaag

SEQ ID NO: 671581 - RNA, 22 nt, Human
caggagccccaggcugacaaua

SEQ ID NO: 671582 - RNA, 19 nt, Human
ucccuuccugucgggcucc

SEQ ID NO: 671583 - RNA, 22 nt, Human
ugcugggcccccagugaccuuc

SEQ ID NO: 671584 - RNA, 22 nt, Human
aagaaggcuucagagcccagga

SEQ ID NO: 671585 - RNA, 19 nt, Human
uacaugcucuugguucagg

SEQ ID NO: 671586 - RNA, 22 nt, Human
uguuagcagagcagcugacaga

SEQ ID NO: 671587 - RNA, 22 nt, Human
uacucugccccagccaauaaug

SEQ ID NO: 671588 - RNA, 22 nt, Human
uuacuucuugucucaugccuau

SEQ ID NO: 671589 - RNA, 22 nt, Human
aagcaggcaucuuggaggucaa

SEQ ID NO: 671590 - RNA, 22 nt, Human
agagccacuccaggacucaggg

SEQ ID NO: 671591 - RNA, 22 nt, Human
gggcuggagacaagugagccgc

SEQ ID NO: 671592 - RNA, 20 nt, Human
uggcaggacuggcuccaccc

SEQ ID NO: 671593 - RNA, 22 nt, Human
gauguucuuauaccauuguggg

SEQ ID NO: 671594 - RNA, 22 nt, Human
agauuacagcaugggaauggga

SEQ ID NO: 671595 - RNA, 22 nt, Human
ucccaagcccuggaugccucag

SEQ ID NO: 671596 - RNA, 22 nt, Human
cuguggugagcaacugacugaa

SEQ ID NO: 671597 - RNA, 22 nt, Human
uauggguaaagggcuaggguuu

SEQ ID NO: 671598 - RNA, 22 nt, Human
ggcugagcguggcugccguggg

SEQ ID NO: 671599 - RNA, 22 nt, Human
ugaaauaauaucuggaucaauc

SEQ ID NO: 671600 - RNA, 22 nt, Human
aggcccagcuggacaaacugcu

SEQ ID NO: 671601 - RNA, 22 nt, Human
ggcuccugcaccugucccucug

SEQ ID NO: 671602 - RNA, 22 nt, Human
guuuuauaggcuguugcuauau

SEQ ID NO: 671603 - RNA, 22 nt, Human
uuauauacugugguaguacugu

SEQ ID NO: 671604 - RNA, 22 nt, Human
aaggccacuuuaccuuaaaucc

SEQ ID NO: 671605 - RNA, 23 nt, Human
acaaggcaacauagaucagggca

SEQ ID NO: 671606 - RNA, 22 nt, Human
gccaagcucaccuucugaugga

SEQ ID NO: 671607 - RNA, 22 nt, Human
cuuuguggcuccugcaggccau

SEQ ID NO: 671608 - RNA, 22 nt, Human
aaggcugugucagaagcucccu

SEQ ID NO: 671609 - RNA, 22 nt, Human
ccagcucuagccccauguggcu

SEQ ID NO: 671610 - RNA, 22 nt, Human
ggccuugggcuggcugcaguau

SEQ ID NO: 671611 - RNA, 22 nt, Human
ucugaggcauaaccuguucugc

SEQ ID NO: 671612 - RNA, 22 nt, Human
cagauccuuaggacaaccaucc

SEQ ID NO: 671613 - RNA, 22 nt, Human
cuccucucaggcuggauggcgc

SEQ ID NO: 671614 - RNA, 22 nt, Human
cuggcccuauuccaggccuucc

SEQ ID NO: 671615 - RNA, 22 nt, Human
aggugaggauagguggccaagg

SEQ ID NO: 671616 - RNA, 22 nt, Human
acaggcagagaacucagccaga

SEQ ID NO: 671617 - RNA, 22 nt, Human
aaggaagaggcagguuuugcug

SEQ ID NO: 671618 - RNA, 22 nt, Human
ugucuauuugaauuauccuaau

SEQ ID NO: 671619 - RNA, 22 nt, Human
aggcuguguuucuugcguuuuc

SEQ ID NO: 671620 - RNA, 22 nt, Human
ucucaggaguagugggauccau

SEQ ID NO: 671621 - RNA, 22 nt, Human
uucaugagguaccugugaucau

SEQ ID NO: 671622 - RNA, 22 nt, Human
aaggaagcagcaaugcaugauu

SEQ ID NO: 671623 - RNA, 22 nt, Human
agaaauguuacaguuguuauuu

SEQ ID NO: 671624 - RNA, 22 nt, Human
uagggacaaagagcugaggccu

SEQ ID NO: 671625 - RNA, 22 nt, Human
gagaggagacuuauccagauug

SEQ ID NO: 671626 - RNA, 22 nt, Human
agacauaagccagucacucacu

SEQ ID NO: 671627 - RNA, 22 nt, Human
gccaggcucagcagucaaccug

SEQ ID NO: 671628 - RNA, 23 nt, Human
ugucaucuccagacucccagugc

SEQ ID NO: 671629 - RNA, 22 nt, Human
gaaaauuauugaaaauggcucu

SEQ ID NO: 671630 - RNA, 22 nt, Human
uguuaacuaauggucuaacauu

SEQ ID NO: 671631 - RNA, 22 nt, Human
auuaagagccuacuaugugccg

SEQ ID NO: 671632 - RNA, 22 nt, Human
uguccuggacaacagccccuag

SEQ ID NO: 671633 - RNA, 22 nt, Human
cuuccuuugcuguucggagguu

SEQ ID NO: 671634 - RNA, 22 nt, Human
uccuggagggcucacaggcggc

SEQ ID NO: 671635 - RNA, 22 nt, Human
gcuguggccaacaaaccacuuu

SEQ ID NO: 671636 - RNA, 22 nt, Human
gcugcaggggggucuggacuug

SEQ ID NO: 671637 - RNA, 22 nt, Human
ugaggacuuuccauguuaaugu

SEQ ID NO: 671638 - RNA, 22 nt, Human
uacaagagguauauagaaacag

SEQ ID NO: 671639 - RNA, 22 nt, Human
acucugcucuguauuucacugu

SEQ ID NO: 671640 - RNA, 22 nt, Human
ugcauucugacuuaguuaauau

SEQ ID NO: 671641 - RNA, 22 nt, Human
cagacccucgggugaguuggcc

SEQ ID NO: 671642 - RNA, 22 nt, Human
ucuccaucugucauucuugucc

SEQ ID NO: 671643 - RNA, 22 nt, Human
uuuguucagcucucauugauua

SEQ ID NO: 671644 - RNA, 22 nt, Human
uuuggaucacuguuccucuggg

SEQ ID NO: 671645 - RNA, 22 nt, Human
ucugcccacaguccaauaguug

SEQ ID NO: 671646 - RNA, 22 nt, Human
ccaguguugcauaggaugggga

SEQ ID NO: 671647 - RNA, 22 nt, Human
cauuuguuaaugcugcuuuuaa

SEQ ID NO: 671648 - RNA, 22 nt, Human
cuaucuuuuguucauuuugagu

SEQ ID NO: 671649 - RNA, 22 nt, Human
ccagaaaacucuacaugcuugu

SEQ ID NO: 671650 - RNA, 22 nt, Human
agccaagaaucaugagcuaaua

SEQ ID NO: 671651 - RNA, 22 nt, Human
ccauugaauccucagcugcuag

SEQ ID NO: 671652 - RNA, 22 nt, Human
uccauaaaccagaaaaucaaga

SEQ ID NO: 671653 - RNA, 22 nt, Human
gauuaguauccuuauuaagaga

SEQ ID NO: 671654 - RNA, 19 nt, Human
ucaugcacuuugauguaac

SEQ ID NO: 671655 - RNA, 19 nt, Human
agcagagcaaaguggcuga

SEQ ID NO: 671656 - RNA, 16 nt, Human
guaacauucuguagcc

SEQ ID NO: 671657 - RNA, 22 nt, Human
agaagccaagaacagacagugc

SEQ ID NO: 671658 - RNA, 22 nt, Human
cacaugaggugacuuccaagcu

SEQ ID NO: 671659 - RNA, 22 nt, Human
uauguagauuucucuguuuuuc

SEQ ID NO: 671660 - RNA, 22 nt, Human
uucaucaggcaucaugcucaag

SEQ ID NO: 671661 - RNA, 23 nt, Human
ugaacaguaugugggacauugag

SEQ ID NO: 671662 - RNA, 22 nt, Human
cacuaagucaacagccucucuu

SEQ ID NO: 671663 - RNA, 22 nt, Human
ccuggcucugcgugcagcuccg

SEQ ID NO: 671664 - RNA, 22 nt, Human
guauuugcaaaucuaaaagaga

SEQ ID NO: 671665 - RNA, 22 nt, Human
auaaaagucugcuuauuugggc

SEQ ID NO: 671666 - RNA, 22 nt, Human
ccuuuuggccaggucagugcag

SEQ ID NO: 671667 - RNA, 22 nt, Human
gguuuucucccccucuucucag

SEQ ID NO: 671668 - RNA, 22 nt, Human
auaguuuuauagauauugugua

SEQ ID NO: 671669 - RNA, 22 nt, Human
ggccucucauucucccuggucc

SEQ ID NO: 671670 - RNA, 22 nt, Human
uaggaagcugagcagcauuccu

SEQ ID NO: 671671 - RNA, 22 nt, Human
uacuucaacaccauaugguccu

SEQ ID NO: 671672 - RNA, 22 nt, Human
agaucuuuagaagauagaauca

SEQ ID NO: 671673 - RNA, 21 nt, Human
ucugacaaucucauuucaaac

SEQ ID NO: 671674 - RNA, 22 nt, Human
aggcuagucaagucaagcagug

SEQ ID NO: 671675 - RNA, 19 nt, Human
ccagggcuccaagcugagu

SEQ ID NO: 671676 - RNA, 22 nt, Human
guccugugugagugcaccaccu

SEQ ID NO: 671677 - RNA, 22 nt, Human
uggaggaauaacagcaaccuua

SEQ ID NO: 671678 - RNA, 22 nt, Human
uaaagcuuguauugcaauauuu

SEQ ID NO: 671679 - RNA, 22 nt, Human
ugugugaaggaauauauacuca

SEQ ID NO: 671680 - RNA, 22 nt, Human
gugacauuucgugacgugagaa

SEQ ID NO: 671681 - RNA, 22 nt, Human
uguggccucuaagcucacgaag

SEQ ID NO: 671682 - RNA, 22 nt, Human
uccaugcagaguccaggccuca

SEQ ID NO: 671683 - RNA, 22 nt, Human
auguacacaugcaugcaugugc

SEQ ID NO: 671684 - RNA, 22 nt, Human
gugaggaugcagaugagggccu

SEQ ID NO: 671685 - RNA, 21 nt, Human
gggcuggauauuggaaagagg

SEQ ID NO: 671686 - RNA, 22 nt, Human
uccucacacccauaccacugac

SEQ ID NO: 671687 - RNA, 22 nt, Human
ggagacaggguugaaccacgca

SEQ ID NO: 671688 - RNA, 22 nt, Human
agcuggaagauccugguuuugu

SEQ ID NO: 671689 - RNA, 22 nt, Human
ggggcugacgggcauguggcuu

SEQ ID NO: 671690 - RNA, 23 nt, Human
uggcuuuauucacauaucugacc

SEQ ID NO: 671691 - RNA, 22 nt, Human
agaaagguggaugcucuggaau

SEQ ID NO: 671692 - RNA, 19 nt, Human
ccagaggcagcuucuguaa

SEQ ID NO: 671693 - RNA, 22 nt, Human
auaaauggcuuucauuccuagg

SEQ ID NO: 671694 - RNA, 22 nt, Human
caguccuuucaauggugaccuu

SEQ ID NO: 671695 - RNA, 22 nt, Human
gcuggccacacugcugauggag

SEQ ID NO: 671696 - RNA, 22 nt, Human
ucaaugauaguacaaucagccu

SEQ ID NO: 671697 - RNA, 22 nt, Human
uuacaucagaaggaaacagcgu

SEQ ID NO: 671698 - RNA, 18 nt, Human
ucauucaaagucuacuga

SEQ ID NO: 671699 - RNA, 22 nt, Human
aagugccugggcaacauagcaa

SEQ ID NO: 671700 - RNA, 23 nt, Human
cugcuuccuugcuucauugcugg

SEQ ID NO: 671701 - RNA, 22 nt, Human
uucucuuccagccgggcuugca

SEQ ID NO: 671702 - RNA, 22 nt, Human
auccuguuagcaccuucaaacu

SEQ ID NO: 671703 - RNA, 22 nt, Human
uaucacacgccuugcuucauuu

SEQ ID NO: 671704 - RNA, 22 nt, Human
ggugcccuguaaaagccaugca

SEQ ID NO: 671705 - RNA, 22 nt, Human
ggaggcugaggccccucacagg

SEQ ID NO: 671706 - RNA, 22 nt, Human
agucugaaggauggaagguacc

SEQ ID NO: 671707 - RNA, 22 nt, Human
aggcaacauaacacgaaagucu

SEQ ID NO: 671708 - RNA, 22 nt, Human
uccuacagauacuaaggagauc

SEQ ID NO: 671709 - RNA, 22 nt, Human
aggcucugugcauccuccccaa

SEQ ID NO: 671710 - RNA, 22 nt, Human
ugcauuggaaaacuauggcuca

SEQ ID NO: 671711 - RNA, 22 nt, Human
cuucugugcaauuguggaggag

SEQ ID NO: 671712 - RNA, 22 nt, Human
ugccuaggaaaccucaugcuuc

SEQ ID NO: 671713 - RNA, 22 nt, Human
cuucucuuggguguggugucuu

SEQ ID NO: 671714 - RNA, 20 nt, Human
cccucccagaugcuucccaa

SEQ ID NO: 671715 - RNA, 22 nt, Human
guuauacaguuuugggucugcu

SEQ ID NO: 671716 - RNA, 22 nt, Human
uacuguggggauauugauugua

SEQ ID NO: 671717 - RNA, 20 nt, Human
uggcuucauaaugguuucug

SEQ ID NO: 671718 - RNA, 21 nt, Human
ggcaugagggcagugagcaga

SEQ ID NO: 671719 - RNA, 22 nt, Human
cagcaagucauccaggaugaug

SEQ ID NO: 671720 - RNA, 22 nt, Human
augcccaggcccauaccuagau

SEQ ID NO: 671721 - RNA, 22 nt, Human
cuggguucuauuuuuggcuuca

SEQ ID NO: 671722 - RNA, 22 nt, Human
gcccaucuucuagcagcuguua

SEQ ID NO: 671723 - RNA, 22 nt, Human
cuggcagauaguaagugaucaa

SEQ ID NO: 671724 - RNA, 22 nt, Human
uuuuucaucugauugauaacuc

SEQ ID NO: 671725 - RNA, 22 nt, Human
cuccagagauacacggucuugc

SEQ ID NO: 671726 - RNA, 22 nt, Human
ggggccuuuucugaauguggaa

SEQ ID NO: 671727 - RNA, 22 nt, Human
gccucaggccgcccugcugcuc

SEQ ID NO: 671728 - RNA, 22 nt, Human
acagaugaguuaaagcagagug

SEQ ID NO: 671729 - RNA, 22 nt, Human
uuccacucuucucuggacuuau

SEQ ID NO: 671730 - RNA, 18 nt, Human
auguucauauuuuuaggg

SEQ ID NO: 671731 - RNA, 20 nt, Human
cugcuuccaggcucaccccc

SEQ ID NO: 671732 - RNA, 22 nt, Human
cagaggccaccuguggccacug

SEQ ID NO: 671733 - RNA, 20 nt, Human
agagagagguaaauugagca

SEQ ID NO: 671734 - RNA, 22 nt, Human
gaggaggcuuccgggaggcacg

SEQ ID NO: 671735 - RNA, 22 nt, Human
ugggccacucuucccugggucu

SEQ ID NO: 671736 - RNA, 22 nt, Human
cucucagggacccagccagccu

SEQ ID NO: 671737 - RNA, 22 nt, Human
uaauuuuuccacguacacuggg

SEQ ID NO: 671738 - RNA, 22 nt, Human
gaaauguauaagcuggucuuuu

SEQ ID NO: 671739 - RNA, 19 nt, Human
cagucccaaauucuuguca

SEQ ID NO: 671740 - RNA, 22 nt, Human
gcugccugugcgggucgcuagg

SEQ ID NO: 671741 - RNA, 22 nt, Human
ggcaggcugcuugggucauguc

SEQ ID NO: 671742 - RNA, 22 nt, Human
aauaagaugugcuugaguuugg

SEQ ID NO: 671743 - RNA, 19 nt, Human
acucuacaguguguacaac

SEQ ID NO: 671744 - RNA, 22 nt, Human
gggaugagagcugggacagaag

SEQ ID NO: 671745 - RNA, 22 nt, Human
uggggcuaacgagagagcagag

SEQ ID NO: 671746 - RNA, 22 nt, Human
uuuagacuaauuccuaaagggc

SEQ ID NO: 671747 - RNA, 22 nt, Human
ucuuauucagugggcucugcca

SEQ ID NO: 671748 - RNA, 22 nt, Human
uuacaggaggugcuagguguuu

SEQ ID NO: 671749 - RNA, 22 nt, Human
aacacuucaagcagaagguugg

SEQ ID NO: 671750 - RNA, 22 nt, Human
agcucugggauucucaggccac

SEQ ID NO: 671751 - RNA, 22 nt, Human
cuccagauucuggaugacuggg

SEQ ID NO: 671752 - RNA, 22 nt, Human
acagaccaaaaaaggauauugg

SEQ ID NO: 671753 - RNA, 22 nt, Human
gagacagccuacuccagucuca

SEQ ID NO: 671754 - RNA, 21 nt, Human
uuuuaacaaggauuucccuag

SEQ ID NO: 671755 - RNA, 23 nt, Human
uggcugagcccacuaucuuggcc

SEQ ID NO: 671756 - RNA, 22 nt, Human
uauggcuuguggagaguuguag

SEQ ID NO: 671757 - RNA, 22 nt, Human
ugcaggcucugguuuauagugc

SEQ ID NO: 671758 - RNA, 22 nt, Human
acagcagcagaccagcauaugu

SEQ ID NO: 671759 - RNA, 17 nt, Human
agcuccugcccauggcu

SEQ ID NO: 671760 - RNA, 22 nt, Human
ccuugcugcgugcuagcacaga

SEQ ID NO: 671761 - RNA, 22 nt, Human
ugugccugacuaggugaaucaa

SEQ ID NO: 671762 - RNA, 22 nt, Human
acagcacuuggguuuuccuguu

SEQ ID NO: 671763 - RNA, 22 nt, Human
cugugcccuguggcuggcaccu

SEQ ID NO: 671764 - RNA, 21 nt, Human
gacacaaaggguaguaauggu

SEQ ID NO: 671765 - RNA, 23 nt, Human
ggaggaguucccagcccuccugg

SEQ ID NO: 671766 - RNA, 22 nt, Human
gagacacacacaggagguggca

SEQ ID NO: 671767 - RNA, 22 nt, Human
ggccaccuuccuguggucucug

SEQ ID NO: 671768 - RNA, 22 nt, Human
acacugaauguuuaagaacuug

SEQ ID NO: 671769 - RNA, 17 nt, Human
uucuccucuguguccuu

SEQ ID NO: 671770 - RNA, 22 nt, Human
aucuguaauuuugaaugcaaau

SEQ ID NO: 671771 - RNA, 22 nt, Human
cagugcuuuuuuaccuuccaac

SEQ ID NO: 671772 - RNA, 22 nt, Human
accugauauguuugaucacccu

SEQ ID NO: 671773 - RNA, 22 nt, Human
cagcagcauugcucuggauucc

SEQ ID NO: 671774 - RNA, 22 nt, Human
cugccccugccaggcagcuguc

SEQ ID NO: 671775 - RNA, 22 nt, Human
cagcagaggugguucacauugu

SEQ ID NO: 671776 - RNA, 22 nt, Human
ugaagauuuuguagcuuucagc

SEQ ID NO: 671777 - RNA, 22 nt, Human
cagcagggcccccgggugcgcc

SEQ ID NO: 671778 - RNA, 22 nt, Human
acaggaguggcucuaccagacc

SEQ ID NO: 671779 - RNA, 22 nt, Human
uuucacagugcucuguaaguau

SEQ ID NO: 671780 - RNA, 22 nt, Human
caaagguuggaaauguuuacca

SEQ ID NO: 671781 - RNA, 20 nt, Human
gcccugugaugucuugaccu

SEQ ID NO: 671782 - RNA, 22 nt, Human
augaagaugguucaacuggccu

SEQ ID NO: 671783 - RNA, 22 nt, Human
ucacaaaugaccaugguuacua

SEQ ID NO: 671784 - RNA, 22 nt, Human
ggucuggauuucugcuucuuuc

SEQ ID NO: 671785 - RNA, 22 nt, Human
cagcagaacaggcagggaagcu

SEQ ID NO: 671786 - RNA, 22 nt, Human
aaguuaguggauaaacagcaaa

SEQ ID NO: 671787 - RNA, 22 nt, Human
uccagccccgaggccggcgacg

SEQ ID NO: 671788 - RNA, 22 nt, Human
ccuggcucucugcagauccugg

SEQ ID NO: 671789 - RNA, 22 nt, Human
ggacagcucugccaggagcuca

SEQ ID NO: 671790 - RNA, 23 nt, Human
gcuguccuccugggcccagcagc

SEQ ID NO: 671791 - RNA, 22 nt, Human
gcagaggcagggcccuccucca

SEQ ID NO: 671792 - RNA, 22 nt, Human
ccucuuccuucucacuguggaa

SEQ ID NO: 671793 - RNA, 22 nt, Human
cccccagaugcgagccauagcc

SEQ ID NO: 671794 - RNA, 22 nt, Human
cacucugggggcugccgcugcc

SEQ ID NO: 671795 - RNA, 22 nt, Human
uggcucuuaaggucccugugcu

SEQ ID NO: 671796 - RNA, 22 nt, Human
cuacauuuggagaguauaggaa

SEQ ID NO: 671797 - RNA, 22 nt, Human
ccuccagucaccuggaugagaa

SEQ ID NO: 671798 - RNA, 22 nt, Human
augguuuaagggagaauauuga

SEQ ID NO: 671799 - RNA, 22 nt, Human
caggaggaggguacaccaucag

SEQ ID NO: 671800 - RNA, 20 nt, Human
gugggcagaugugugcaugg

SEQ ID NO: 671801 - RNA, 22 nt, Human
gaaucagauacugauuucaguc

SEQ ID NO: 671802 - RNA, 22 nt, Human
auacaauccagccauugccaca

SEQ ID NO: 671803 - RNA, 22 nt, Human
guggcagggguauuccagcuga

SEQ ID NO: 671804 - RNA, 22 nt, Human
ugcagggcccucauuccugucc

SEQ ID NO: 671805 - RNA, 22 nt, Human
ucauggggcucuucaaguggag

SEQ ID NO: 671806 - RNA, 22 nt, Human
agaaagagaugaaugcuuuaag

SEQ ID NO: 671807 - RNA, 22 nt, Human
agaaaucacaggaggcagaagg

SEQ ID NO: 671808 - RNA, 22 nt, Human
uggacagggcagagaccgaguc

SEQ ID NO: 671809 - RNA, 22 nt, Human
uuccaaggccagacagggcagu

SEQ ID NO: 671810 - RNA, 22 nt, Human
ccugucuggccaccagggcgau

SEQ ID NO: 671811 - RNA, 22 nt, Human
uccaggagagguagaggguucc

SEQ ID NO: 671812 - RNA, 22 nt, Human
ugccuggcugaggugacagguu

SEQ ID NO: 671813 - RNA, 22 nt, Human
uuucauugucuacauaugacau

SEQ ID NO: 671814 - RNA, 22 nt, Human
gccaggcugaggcucuggaaga

SEQ ID NO: 671815 - RNA, 22 nt, Human
gagcaggcauucuaguggcuga

SEQ ID NO: 671816 - RNA, 22 nt, Human
cugcugugacagcugccguguu

SEQ ID NO: 671817 - RNA, 22 nt, Human
aauuauggucacuguuccuggg

SEQ ID NO: 671818 - RNA, 22 nt, Human
ucacugaaugcagauacgugac

SEQ ID NO: 671819 - RNA, 22 nt, Human
ugccugcuagauauccagguga

SEQ ID NO: 671820 - RNA, 22 nt, Human
uggaagacggaaaucuguagau

SEQ ID NO: 671821 - RNA, 22 nt, Human
gcaggauggugcccuuucugcc

SEQ ID NO: 671822 - RNA, 22 nt, Human
accacccucagcagagcugaaa

SEQ ID NO: 671823 - RNA, 22 nt, Human
acaauagauacugggcacauau

SEQ ID NO: 671824 - RNA, 22 nt, Human
ccaggaagcauaauguaguggg

SEQ ID NO: 671825 - RNA, 22 nt, Human
cauuucacgcacacucauuacu

SEQ ID NO: 671826 - RNA, 19 nt, Human
uggcagggagugauauuag

SEQ ID NO: 671827 - RNA, 21 nt, Human
uucugggccggagaaggggcg

SEQ ID NO: 671828 - RNA, 22 nt, Human
cccagggguucuagaccagcuu

SEQ ID NO: 671829 - RNA, 20 nt, Human
ggguggaguugcggucugug

SEQ ID NO: 671830 - RNA, 22 nt, Human
cgugcucuggacucguggcaca

SEQ ID NO: 671831 - RNA, 22 nt, Human
acuccuggggauccauuccuuu

SEQ ID NO: 671832 - RNA, 22 nt, Human
ggcauagaaugugcugugacaa

SEQ ID NO: 671833 - RNA, 22 nt, Human
uaaagguuuauucaacaaaaua

SEQ ID NO: 671834 - RNA, 22 nt, Human
cacauaauaaauguuccugaug

SEQ ID NO: 671835 - RNA, 22 nt, Human
auccaggcgaaugcagaaggcc

SEQ ID NO: 671836 - RNA, 20 nt, Human
uuucugcagauguuuacaug

SEQ ID NO: 671837 - RNA, 22 nt, Human
ccacugccaugggcuaggcaug

SEQ ID NO: 671838 - RNA, 22 nt, Human
ggccugcugcuaugacuuccug

SEQ ID NO: 671839 - RNA, 22 nt, Human
gauggaaugaauggcagauaca

SEQ ID NO: 671840 - RNA, 22 nt, Human
cuggacucugcagagaaaagua

SEQ ID NO: 671841 - RNA, 22 nt, Human
ugaaagcauaugcuaaagacca

SEQ ID NO: 671842 - RNA, 20 nt, Human
ucuguaaagacuccagaagc

SEQ ID NO: 671843 - RNA, 22 nt, Human
uguacaagcaaauagaccuuca

SEQ ID NO: 671844 - RNA, 22 nt, Human
augugcagcuuuucuagagaag

SEQ ID NO: 671845 - RNA, 22 nt, Human
ggaggaaaggcucccucccucu

SEQ ID NO: 671846 - RNA, 22 nt, Human
aauuucuucagcucuaaaaugg

SEQ ID NO: 671847 - RNA, 22 nt, Human
ucagacagggagucagaaaaua

SEQ ID NO: 671848 - RNA, 22 nt, Human
agucacaugggauuagaaccca

SEQ ID NO: 671849 - RNA, 21 nt, Human
caucuuaauugaaagcagaga

SEQ ID NO: 671850 - RNA, 22 nt, Human
uucagcucuaguaagcagacac

SEQ ID NO: 671851 - RNA, 19 nt, Human
auagaaaggguuaaagaca

SEQ ID NO: 671852 - RNA, 22 nt, Human
uuacaaagugcugcaccauuuu

SEQ ID NO: 671853 - RNA, 22 nt, Human
uacuuuucaagcagcugguuau

SEQ ID NO: 671854 - RNA, 22 nt, Human
acuuccaggguagaggggaaga

SEQ ID NO: 671855 - RNA, 22 nt, Human
acacauauauuugcauauacac

SEQ ID NO: 671856 - RNA, 22 nt, Human
cacauucuugaguuacagucua

SEQ ID NO: 671857 - RNA, 22 nt, Human
acucucccagcuauauguggug

SEQ ID NO: 671858 - RNA, 22 nt, Human
gcauucaucaaaaauguuccuc

SEQ ID NO: 671859 - RNA, 22 nt, Human
aaaagacaucuauuucaggcag

SEQ ID NO: 671860 - RNA, 22 nt, Human
uagucaaauggcagggauauuu

SEQ ID NO: 671861 - RNA, 22 nt, Human
ccuggcaccuguguuuucugga

SEQ ID NO: 671862 - RNA, 22 nt, Human
uggcaagggauuguggagaacu

SEQ ID NO: 671863 - RNA, 22 nt, Human
ucuguauaaggacaaacauuua

SEQ ID NO: 671864 - RNA, 20 nt, Human
aguuagugaguaauugagcu

SEQ ID NO: 671865 - RNA, 22 nt, Human
cacagcugcacagaggaggugc

SEQ ID NO: 671866 - RNA, 22 nt, Human
uugaggucaauucuguuuccug

SEQ ID NO: 671867 - RNA, 22 nt, Human
ggaccugcccuggcucagaugc

SEQ ID NO: 671868 - RNA, 20 nt, Human
gugcagaggcagccuguggg

SEQ ID NO: 671869 - RNA, 22 nt, Human
ccuguucaccauggucacgugc

SEQ ID NO: 671870 - RNA, 19 nt, Human
cagcccagggugcuaccaa

SEQ ID NO: 671871 - RNA, 22 nt, Human
ucagcuggaagauggugcagaa

SEQ ID NO: 671872 - RNA, 22 nt, Human
cucuuuuaauugucauaacaac

SEQ ID NO: 671873 - RNA, 22 nt, Human
accugucaaguccagcgcaaca

SEQ ID NO: 671874 - RNA, 22 nt, Human
cuucauuaaccaaaaugcaaua

SEQ ID NO: 671875 - RNA, 22 nt, Human
gccugggagaaugaccuccaac

SEQ ID NO: 671876 - RNA, 22 nt, Human
cuggagcaggcuugucccagcu

SEQ ID NO: 671877 - RNA, 22 nt, Human
uccagguguauuuacugaagua

SEQ ID NO: 671878 - RNA, 22 nt, Human
cuggaaagugcuuuucugagag

SEQ ID NO: 671879 - RNA, 22 nt, Human
acaguauauuuucuugauuguu

SEQ ID NO: 671880 - RNA, 22 nt, Human
guggcuuucauuucaggaugug

SEQ ID NO: 671881 - RNA, 22 nt, Human
uuucccaacagucucucucaaa

SEQ ID NO: 671882 - RNA, 22 nt, Human
acacuguaaauugagugcguga

SEQ ID NO: 671883 - RNA, 22 nt, Human
ggcagaguggagugcggccucc

SEQ ID NO: 671884 - RNA, 20 nt, Human
gcccaugaggacugcagcug

SEQ ID NO: 671885 - RNA, 22 nt, Human
cuguggcagaggugacaccucu

SEQ ID NO: 671886 - RNA, 22 nt, Human
ugcuuggcuagcuuggcagcuc

SEQ ID NO: 671887 - RNA, 22 nt, Human
agcaacagaagauagagugaau

SEQ ID NO: 671888 - RNA, 22 nt, Human
uucaaaaagguauguucaaguc

SEQ ID NO: 671889 - RNA, 22 nt, Human
ggaagaggaggagccaggcuuu

SEQ ID NO: 671890 - RNA, 22 nt, Human
gccaggaggucagccccucaac

SEQ ID NO: 671891 - RNA, 22 nt, Human
uuagggagcucaguccucagau

SEQ ID NO: 671892 - RNA, 22 nt, Human
agggucagcuggcugucagggg

SEQ ID NO: 671893 - RNA, 22 nt, Human
auggcuguaaauucagagaugg

SEQ ID NO: 671894 - RNA, 22 nt, Human
gaaguacaguuuuaucuagcca

SEQ ID NO: 671895 - RNA, 22 nt, Human
uguaacagagcuuuuuuauagc

SEQ ID NO: 671896 - RNA, 23 nt, Human
cugauuugagcagaauaaaauag

SEQ ID NO: 671897 - RNA, 22 nt, Human
agagcacaguaucugcacauca

SEQ ID NO: 671898 - RNA, 20 nt, Human
ucacaggggaccaggagcag

SEQ ID NO: 671899 - RNA, 22 nt, Human
uagugugucccuggggaguguu

SEQ ID NO: 671900 - RNA, 22 nt, Human
agcagcaaguguaacugaauau

SEQ ID NO: 671901 - RNA, 23 nt, Human
agcauucucuccaacauuuaaca

SEQ ID NO: 671902 - RNA, 22 nt, Human
aucauacagccuuuguuagugu

SEQ ID NO: 671903 - RNA, 22 nt, Human
agaaauguuuacucacccccuu

SEQ ID NO: 671904 - RNA, 22 nt, Human
agucucuuccuucaaggcuggu

SEQ ID NO: 671905 - RNA, 22 nt, Human
agagauaugaguaguugugaca

SEQ ID NO: 671906 - RNA, 22 nt, Human
agucccagcuucccccaugcag

SEQ ID NO: 671907 - RNA, 22 nt, Human
acuccaguuaccuuggcugagg

SEQ ID NO: 671908 - RNA, 23 nt, Human
uuacaaggaagugcacagauggg

SEQ ID NO: 671909 - RNA, 22 nt, Human
aaauuuucagagcacuagagaa

SEQ ID NO: 671910 - RNA, 22 nt, Human
cuguggugggcccugggcuuca

SEQ ID NO: 671911 - RNA, 22 nt, Human
gccuggcucugaguuucucucc

SEQ ID NO: 671912 - RNA, 22 nt, Human
cugcacagcuggccagggagag

SEQ ID NO: 671913 - RNA, 21 nt, Human
cauuucuaagccuggcuauag

SEQ ID NO: 671914 - RNA, 22 nt, Human
aagggcuccauccuuauaaaug

SEQ ID NO: 671915 - RNA, 20 nt, Human
gcccacucuaauccacuguc

SEQ ID NO: 671916 - RNA, 22 nt, Human
ucagcuuuggucacauugaguu

SEQ ID NO: 671917 - RNA, 22 nt, Human
gaggcugaaguguacaugggug

SEQ ID NO: 671918 - RNA, 22 nt, Human
cugucuucccgaggcccuggag

SEQ ID NO: 671919 - RNA, 22 nt, Human
cgcggagcuccgcccggugccc

SEQ ID NO: 671920 - RNA, 21 nt, Human
ccugggagaucagcugccuuc

SEQ ID NO: 671921 - RNA, 21 nt, Human
agccaggguggacacuguaug

SEQ ID NO: 671922 - RNA, 22 nt, Human
gcacagugcaccacuuugaaaa

SEQ ID NO: 671923 - RNA, 22 nt, Human
aaccagaaggaaucugagcuga

SEQ ID NO: 671924 - RNA, 22 nt, Human
agcaggaacugacaccaagcca

SEQ ID NO: 671925 - RNA, 21 nt, Human
agacagagugcagucuacaua

SEQ ID NO: 671926 - RNA, 22 nt, Human
ucauaauguaguucauggcugg

SEQ ID NO: 671927 - RNA, 22 nt, Human
aaugcuaucggcucuaagcaug

SEQ ID NO: 671928 - RNA, 20 nt, Human
ccacaguggagacuggagac

SEQ ID NO: 671929 - RNA, 22 nt, Human
uggcuacaucacagagaauucc

SEQ ID NO: 671930 - RNA, 22 nt, Human
aaagguuugccgaccucugcuu

SEQ ID NO: 671931 - RNA, 22 nt, Human
cucugggcaaguaugauagaaa

SEQ ID NO: 671932 - RNA, 22 nt, Human
ucacaggagggagagacaccca

SEQ ID NO: 671933 - RNA, 22 nt, Human
uggaggcaguuuaagucugaga

SEQ ID NO: 671934 - RNA, 22 nt, Human
ugaaauagacuugcacuauaug

SEQ ID NO: 671935 - RNA, 20 nt, Human
caucuugaaggucuuccaca

SEQ ID NO: 671936 - RNA, 22 nt, Human
uuuuaaugggcgacuauuaugg

SEQ ID NO: 671937 - RNA, 22 nt, Human
ggucucuguugccuccaucaag

SEQ ID NO: 671938 - RNA, 18 nt, Human
cggcagagugcuucuagc

SEQ ID NO: 671939 - RNA, 22 nt, Human
uauucacauuaauaagucuuca

SEQ ID NO: 671940 - RNA, 16 nt, Human
aggcgaagguucauuu

SEQ ID NO: 671941 - RNA, 22 nt, Human
caggcuguggaucaggagccuu

SEQ ID NO: 671942 - RNA, 22 nt, Human
uugaaacugucagcuuuuacgc

SEQ ID NO: 671943 - RNA, 22 nt, Human
gaggcaguuugccaugccagga

SEQ ID NO: 671944 - RNA, 22 nt, Human
cuggcucugacuccgcauauuu

SEQ ID NO: 671945 - RNA, 22 nt, Human
aggcacugacagauucuguguc

SEQ ID NO: 671946 - RNA, 22 nt, Human
cugugugugcuacaggcuucca

SEQ ID NO: 671947 - RNA, 20 nt, Human
uuccuguauacaaagaguuc

SEQ ID NO: 671948 - RNA, 22 nt, Human
ugcagcuucuccaaauauuaca

SEQ ID NO: 671949 - RNA, 22 nt, Human
ggcagggcccugauuccugggg

SEQ ID NO: 671950 - RNA, 22 nt, Human
uuauuuauggcccucaccugau

SEQ ID NO: 671951 - RNA, 22 nt, Human
ggccucuucugcucauacuuuc

SEQ ID NO: 671952 - RNA, 22 nt, Human
auacuuccugcuucccugaucu

SEQ ID NO: 671953 - RNA, 22 nt, Human
gccaggcuguuuuuauuacugu

SEQ ID NO: 671954 - RNA, 22 nt, Human
uuaaugaauaugacaggagagg

SEQ ID NO: 671955 - RNA, 18 nt, Human
ugucauugccagggaagc

SEQ ID NO: 671956 - RNA, 22 nt, Human
ccaucccuucaccacagcagua

SEQ ID NO: 671957 - RNA, 22 nt, Human
guguuaauggcuaugaacugau

SEQ ID NO: 671958 - RNA, 22 nt, Human
uccuggguccauggcagccgaa

SEQ ID NO: 671959 - RNA, 22 nt, Human
acagauuugaucugagaacaaa

SEQ ID NO: 671960 - RNA, 22 nt, Human
ucagagaagcugccaggcgagc

SEQ ID NO: 671961 - RNA, 22 nt, Human
acagcuggagugaggauggagu

SEQ ID NO: 671962 - RNA, 22 nt, Human
gucguggagcucacagugugcc

SEQ ID NO: 671963 - RNA, 22 nt, Human
ugguggagccuaggcuaagucu

SEQ ID NO: 671964 - RNA, 22 nt, Human
caaagugcuggaauuauagggg

SEQ ID NO: 671965 - RNA, 22 nt, Human
cucaguuuuugcugucugguuc

SEQ ID NO: 671966 - RNA, 22 nt, Human
ucccagccuuucuuucuccagc

SEQ ID NO: 671967 - RNA, 22 nt, Human
ugugcuaaguauuuucuuauuu

SEQ ID NO: 671968 - RNA, 22 nt, Human
cuugaagacaauggcagauucc

SEQ ID NO: 671969 - RNA, 22 nt, Human
ugcuacagagccaggaagagug

SEQ ID NO: 671970 - RNA, 22 nt, Human
cuggccugcagaucccaggguc

SEQ ID NO: 671971 - RNA, 22 nt, Human
ccuggccugugaaucugagagc

SEQ ID NO: 671972 - RNA, 18 nt, Human
ucucucagggaaacagaa

SEQ ID NO: 671973 - RNA, 22 nt, Human
ugauuuccuagcugacaugaaa

SEQ ID NO: 671974 - RNA, 22 nt, Human
cuuguauuaggaagaaugcuuu

SEQ ID NO: 671975 - RNA, 22 nt, Human
cagaagcagugagagaugugca

SEQ ID NO: 671976 - RNA, 22 nt, Human
uucaaacuaguuaaaagucaga

SEQ ID NO: 671977 - RNA, 22 nt, Human
cauaagaaauaaugaugaugac

SEQ ID NO: 671978 - RNA, 22 nt, Human
uacuaugugaaaauacuauagu

SEQ ID NO: 671979 - RNA, 22 nt, Human
acaugauuggacuccuuccccu

SEQ ID NO: 671980 - RNA, 22 nt, Human
caaugucaaggagaccaaaacg

SEQ ID NO: 671981 - RNA, 22 nt, Human
aacagcuuacucaauggugauu

SEQ ID NO: 671982 - RNA, 22 nt, Human
uuugaauagcauaggauuacau

SEQ ID NO: 671983 - RNA, 22 nt, Human
gcagacagaugagggugcuggg

SEQ ID NO: 671984 - RNA, 17 nt, Human
uaucucuucaaguuuca

SEQ ID NO: 671985 - RNA, 22 nt, Human
ggccuuggauuuuacccuaaag

SEQ ID NO: 671986 - RNA, 22 nt, Human
ugcuuaaauuucagcagcuuaa

SEQ ID NO: 671987 - RNA, 22 nt, Human
ucuggcuccguguccgcuccca

SEQ ID NO: 671988 - RNA, 22 nt, Human
ccucagcugcuucccuggagcc

SEQ ID NO: 671989 - RNA, 22 nt, Human
ucugcagaaggaaucagcugag

SEQ ID NO: 671990 - RNA, 22 nt, Human
ccagcuuuucuuaucauuauaa

SEQ ID NO: 671991 - RNA, 22 nt, Human
auagugugugguauagguagag

SEQ ID NO: 671992 - RNA, 22 nt, Human
uggggcucuccacagugucuca

SEQ ID NO: 671993 - RNA, 22 nt, Human
uugauuugggaauggucuggca

SEQ ID NO: 671994 - RNA, 22 nt, Human
cugcagggcccgccugagcccu

SEQ ID NO: 671995 - RNA, 22 nt, Human
uaauuacagguccaaaacaauc

SEQ ID NO: 671996 - RNA, 22 nt, Human
uuagcuuuucacuugcauuauc

SEQ ID NO: 671997 - RNA, 22 nt, Human
ugugaauauccauuuguuucag

SEQ ID NO: 671998 - RNA, 22 nt, Human
ggcaguggcuccucucuacucc

SEQ ID NO: 671999 - RNA, 21 nt, Human
cagagcagcguucugcugugg

SEQ ID NO: 672000 - RNA, 22 nt, Human
gcaggcaccggguugcuccccu

SEQ ID NO: 672001 - RNA, 22 nt, Human
gcagcagcucucaaaguggucu

SEQ ID NO: 672002 - RNA, 22 nt, Human
ucaggccuuguccugaccuccu

SEQ ID NO: 672003 - RNA, 22 nt, Human
acaggcaauauauaaauuauga

SEQ ID NO: 672004 - RNA, 22 nt, Human
cuuggagcccagcaggccugga

SEQ ID NO: 672005 - RNA, 22 nt, Human
gaguuuaguuuggcuuaaacug

SEQ ID NO: 672006 - RNA, 22 nt, Human
gcaauuguacuagaaaacaaua

SEQ ID NO: 672007 - RNA, 22 nt, Human
uggaaaggaggcuuguggaaua

SEQ ID NO: 672008 - RNA, 22 nt, Human
cugugcaagcccaagauaaaac

SEQ ID NO: 672009 - RNA, 22 nt, Human
agauccauuuuggugucaacuc

SEQ ID NO: 672010 - RNA, 22 nt, Human
gauuuacaaagcucucuagugu

SEQ ID NO: 672011 - RNA, 22 nt, Human
aaaaccacuuccuugcuauugg

SEQ ID NO: 672012 - RNA, 22 nt, Human
cagggauggccuggcgggccac

SEQ ID NO: 672013 - RNA, 22 nt, Human
uaugaagcugauaaucacugau

SEQ ID NO: 672014 - RNA, 22 nt, Human
gggcaaguccggugcccagagc

SEQ ID NO: 672015 - RNA, 22 nt, Human
uucuaagucugcugucuucauc

SEQ ID NO: 672016 - RNA, 22 nt, Human
ugugagacaggaccuguugacu

SEQ ID NO: 672017 - RNA, 22 nt, Human
gcagcaggaauuuaaauuuaua

SEQ ID NO: 672018 - RNA, 22 nt, Human
cugcugucuuuauuucacugcu

SEQ ID NO: 672019 - RNA, 22 nt, Human
cagucuucuaaccuagcagccu

SEQ ID NO: 672020 - RNA, 22 nt, Human
aaguacauccuagucucuuuca

SEQ ID NO: 672021 - RNA, 22 nt, Human
ucacaugcacauacuuccugug

SEQ ID NO: 672022 - RNA, 22 nt, Human
ugggcagcagcaaagccagacu

SEQ ID NO: 672023 - RNA, 19 nt, Human
ccagagacauuggcaucuu

SEQ ID NO: 672024 - RNA, 22 nt, Human
agguaggcccugagugcuguug

SEQ ID NO: 672025 - RNA, 23 nt, Human
auccaugcuuaaguaaucauuug

SEQ ID NO: 672026 - RNA, 22 nt, Human
cuguucacagaauccuccccug

SEQ ID NO: 672027 - RNA, 22 nt, Human
uucugagcugcaacacuaacau

SEQ ID NO: 672028 - RNA, 22 nt, Human
uccugagagccuuggcuucaga

SEQ ID NO: 672029 - RNA, 22 nt, Human
aaggcugucuuuuccucuuccc

SEQ ID NO: 672030 - RNA, 22 nt, Human
cucugugugguagauuccauua

SEQ ID NO: 672031 - RNA, 22 nt, Human
ggcaggugccaguuggcuuggg

SEQ ID NO: 672032 - RNA, 22 nt, Human
ccuccugggacaggcuggcaca

SEQ ID NO: 672033 - RNA, 22 nt, Human
gaccuggaggauccucuucuug

SEQ ID NO: 672034 - RNA, 22 nt, Human
ggaggccaaggcagguggaucg

SEQ ID NO: 672035 - RNA, 22 nt, Human
gaggccacgugcuuauguuucu

SEQ ID NO: 672036 - RNA, 22 nt, Human
cacugagcaagucaguacagca

SEQ ID NO: 672037 - RNA, 22 nt, Human
uuucacagcauauagguguacu

SEQ ID NO: 672038 - RNA, 22 nt, Human
uguuuuucaaauauugcucugu

SEQ ID NO: 672039 - RNA, 22 nt, Human
aaaaguaauugaugcaaucgua

SEQ ID NO: 672040 - RNA, 22 nt, Human
gugcuuccucugccaacacucu

SEQ ID NO: 672041 - RNA, 22 nt, Human
cauugaaauauggaaacugaug

SEQ ID NO: 672042 - RNA, 21 nt, Human
aagcagcuuaauaaaguaugu

SEQ ID NO: 672043 - RNA, 22 nt, Human
aacagaaugcaggggaugcugc

SEQ ID NO: 672044 - RNA, 22 nt, Human
cucuuuuacaccaaaaggccua

SEQ ID NO: 672045 - RNA, 22 nt, Human
ucugccuuguugcaggcgcuau

SEQ ID NO: 672046 - RNA, 22 nt, Human
aagaauaacacuuagguuuugc

SEQ ID NO: 672047 - RNA, 22 nt, Human
agagcccucuucacugccccuu

SEQ ID NO: 672048 - RNA, 22 nt, Human
uguguuuacuucuaugcaguuu

SEQ ID NO: 672049 - RNA, 21 nt, Human
gggaggaagcugcuucucucu

SEQ ID NO: 672050 - RNA, 22 nt, Human
cauauuuuaguugcugaacagc

SEQ ID NO: 672051 - RNA, 22 nt, Human
uucacuuaacauuuaccaagga

SEQ ID NO: 672052 - RNA, 22 nt, Human
ggaggccuagccagcuccaguu

SEQ ID NO: 672053 - RNA, 22 nt, Human
gcugcaugacagacaggccugg

SEQ ID NO: 672054 - RNA, 22 nt, Human
guaugcugccuacgaacaugca

SEQ ID NO: 672055 - RNA, 22 nt, Human
uggcccagcucagggugggcgg

SEQ ID NO: 672056 - RNA, 22 nt, Human
acaugcauaagccuagccauca

SEQ ID NO: 672057 - RNA, 22 nt, Human
aggagugagcuuuggggucaga

SEQ ID NO: 672058 - RNA, 22 nt, Human
acaaggcuuuggaggguucuua

SEQ ID NO: 672059 - RNA, 22 nt, Human
gaggccagcuaguccaggaagu

SEQ ID NO: 672060 - RNA, 22 nt, Human
uucuauugacauucacuguaac

SEQ ID NO: 672061 - RNA, 22 nt, Human
uaacauugucaguucaacugcu

SEQ ID NO: 672062 - RNA, 22 nt, Human
ucagggaacaucguuaaacuag

SEQ ID NO: 672063 - RNA, 22 nt, Human
gaugagaaauggacaggagugg

SEQ ID NO: 672064 - RNA, 22 nt, Human
cuucuucaguugcauguauugg

SEQ ID NO: 672065 - RNA, 22 nt, Human
gagaaaccuguaaggaaggaag

SEQ ID NO: 672066 - RNA, 22 nt, Human
cuggcuccaccccaggaggaug

SEQ ID NO: 672067 - RNA, 22 nt, Human
ugcagggaauccagucuagggu

SEQ ID NO: 672068 - RNA, 22 nt, Human
uguauuaucaaguaaauacaug

SEQ ID NO: 672069 - RNA, 22 nt, Human
accagccuccuagcugcuccug

SEQ ID NO: 672070 - RNA, 21 nt, Human
aaacugaggcuucaagcagug

SEQ ID NO: 672071 - RNA, 22 nt, Human
cugcuugaccuguuguucucac

SEQ ID NO: 672072 - RNA, 18 nt, Human
gcgggcggugcagugggc

SEQ ID NO: 672073 - RNA, 19 nt, Human
gcuuuuuguugucaaaggu

SEQ ID NO: 672074 - RNA, 22 nt, Human
uccagccuaggggaacagcugc

SEQ ID NO: 672075 - RNA, 18 nt, Human
aguaguggguuuagcuuc

SEQ ID NO: 672076 - RNA, 22 nt, Human
ucucccagaaguccucaguaca

SEQ ID NO: 672077 - RNA, 22 nt, Human
ucuaaaguaugcuaauauguga

SEQ ID NO: 672078 - RNA, 22 nt, Human
ucaaagcaugguuuugaaagac

SEQ ID NO: 672079 - RNA, 22 nt, Human
guauuugauagauuucaaagga

SEQ ID NO: 672080 - RNA, 22 nt, Human
acccaggcugcuucucaguggc

SEQ ID NO: 672081 - RNA, 22 nt, Human
uagagucagagaaucauuacag

SEQ ID NO: 672082 - RNA, 23 nt, Human
gggaucuguaaguugaagacaaa

SEQ ID NO: 672083 - RNA, 22 nt, Human
ucagagguggcaggggugucca

SEQ ID NO: 672084 - RNA, 22 nt, Human
uuugugugcgucuggccugggg

SEQ ID NO: 672085 - RNA, 21 nt, Human
cagaggccuaucacagacucc

SEQ ID NO: 672086 - RNA, 22 nt, Human
acucuuuuauaaagcaucuuga

SEQ ID NO: 672087 - RNA, 22 nt, Human
ccugggaagucagccaaggacg

SEQ ID NO: 672088 - RNA, 22 nt, Human
aguccuucaagaaaucuggaaa

SEQ ID NO: 672089 - RNA, 22 nt, Human
ccuggccagcagccccuuccuc

SEQ ID NO: 672090 - RNA, 23 nt, Human
uaucuuuuucaauguuggaaaua

SEQ ID NO: 672091 - RNA, 22 nt, Human
ucgcaccuguccucugauuaug

SEQ ID NO: 672092 - RNA, 19 nt, Human
uuacaauggugauuagguu

SEQ ID NO: 672093 - RNA, 22 nt, Human
uuccugggcuuuccccucuggu

SEQ ID NO: 672094 - RNA, 22 nt, Human
gccucugggcucugccccuggc

SEQ ID NO: 672095 - RNA, 23 nt, Human
ugccagaggcagucacaguggug

SEQ ID NO: 672096 - RNA, 22 nt, Human
gcuucaagcuguucagaacuau

SEQ ID NO: 672097 - RNA, 22 nt, Human
aacuagaacgucuaguugcugg

SEQ ID NO: 672098 - RNA, 17 nt, Human
cuccucucuggguuacu

SEQ ID NO: 672099 - RNA, 22 nt, Human
agcugccacugagggugcacag

SEQ ID NO: 672100 - RNA, 22 nt, Human
aggagcugcuuaaaugguuggu

SEQ ID NO: 672101 - RNA, 22 nt, Human
accugcaggggugcucucuggg

SEQ ID NO: 672102 - RNA, 22 nt, Human
uagcuguguaagcuugguaaga

SEQ ID NO: 672103 - RNA, 22 nt, Human
guuucauauaccaagcacuuga

SEQ ID NO: 672104 - RNA, 22 nt, Human
ucugaagugaucaucauuucuc

SEQ ID NO: 672105 - RNA, 22 nt, Human
ggugcugguucaggguggcugu

SEQ ID NO: 672106 - RNA, 22 nt, Human
uagcuucuaauacuuaccaauu

SEQ ID NO: 672107 - RNA, 22 nt, Human
aauaacuucaucuucaggauag

SEQ ID NO: 672108 - RNA, 22 nt, Human
cagauguacaugaagggcaaug

SEQ ID NO: 672109 - RNA, 22 nt, Human
agcugcuuugccaaugcguucc

SEQ ID NO: 672110 - RNA, 22 nt, Human
cucagggcaguauggcugagag

SEQ ID NO: 672111 - RNA, 22 nt, Human
auuagcaauugcccugugcaau

SEQ ID NO: 672112 - RNA, 22 nt, Human
agggaggcauuagcuacugcga

SEQ ID NO: 672113 - RNA, 22 nt, Human
acagaauugaaaguauaaucug

SEQ ID NO: 672114 - RNA, 22 nt, Human
augcuucaugauuuggccaugu

SEQ ID NO: 672115 - RNA, 22 nt, Human
aacuucuugguccugagcuguu

SEQ ID NO: 672116 - RNA, 22 nt, Human
gucuccugagccuugacugcaa

SEQ ID NO: 672117 - RNA, 22 nt, Human
ucuuucuacaucauuugcuucu

SEQ ID NO: 672118 - RNA, 22 nt, Human
gagcagugaagacagaaguaca

SEQ ID NO: 672119 - RNA, 22 nt, Human
caaaugcauaguuuauaagaag

SEQ ID NO: 672120 - RNA, 22 nt, Human
agcccaagcauaggagggaggc

SEQ ID NO: 672121 - RNA, 22 nt, Human
cucugucaggcugcagaugcuc

SEQ ID NO: 672122 - RNA, 19 nt, Human
gcuggcagauguggccgug

SEQ ID NO: 672123 - RNA, 22 nt, Human
ugugggcucccccucacucugu

SEQ ID NO: 672124 - RNA, 22 nt, Human
aauuuagaauucgcuagcuaau

SEQ ID NO: 672125 - RNA, 19 nt, Human
ccagagguuugcugggccu

SEQ ID NO: 672126 - RNA, 22 nt, Human
caauagcagcuucugaaugcaa

SEQ ID NO: 672127 - RNA, 22 nt, Human
uaugcauaugaccccaagcuug

SEQ ID NO: 672128 - RNA, 22 nt, Human
guccugucccccaaggcugugg

SEQ ID NO: 672129 - RNA, 22 nt, Human
ggagcugggaauuggaucaucu

SEQ ID NO: 672130 - RNA, 23 nt, Human
ucaugcccaggcuccagauguca

SEQ ID NO: 672131 - RNA, 17 nt, Human
augaggucauuaagaua

SEQ ID NO: 672132 - RNA, 20 nt, Human
ucagauuuugggucacugau

SEQ ID NO: 672133 - RNA, 22 nt, Human
uccuucuuucaccucauaguca

SEQ ID NO: 672134 - RNA, 22 nt, Human
ugggguucuuuguuuccugccu

SEQ ID NO: 672135 - RNA, 22 nt, Human
cagggcucccucuggcucccag

SEQ ID NO: 672136 - RNA, 18 nt, Human
cgggcgggcgccuggccc

SEQ ID NO: 672137 - RNA, 22 nt, Human
gugcaugucggggugcauguca

SEQ ID NO: 672138 - RNA, 21 nt, Human
aagagcugucaggaaggcugc

SEQ ID NO: 672139 - RNA, 21 nt, Human
agcagcugcaguuucuaucug

SEQ ID NO: 672140 - RNA, 22 nt, Human
ccagggagccuggugugucagc

SEQ ID NO: 672141 - RNA, 22 nt, Human
gagcagcacuugaggcauguca

SEQ ID NO: 672142 - RNA, 23 nt, Human
cuggacucaggggaugugaagga

SEQ ID NO: 672143 - RNA, 22 nt, Human
auagacauuauaacacagagcu

SEQ ID NO: 672144 - RNA, 22 nt, Human
gucaggagagaucaggacagca

SEQ ID NO: 672145 - RNA, 22 nt, Human
aagaggugagaagcuacacuua

SEQ ID NO: 672146 - RNA, 22 nt, Human
agauauuguuuguuucaccaau

SEQ ID NO: 672147 - RNA, 22 nt, Human
ugagcagcccuuccuccggcca

SEQ ID NO: 672148 - RNA, 22 nt, Human
agagacagaggcaauauagcuu

SEQ ID NO: 672149 - RNA, 22 nt, Human
uccuuggcaugccgucuucucc

SEQ ID NO: 672150 - RNA, 18 nt, Human
uccucagccucaccuagc

SEQ ID NO: 672151 - RNA, 22 nt, Human
aaagaucaugcuguuuugugau

SEQ ID NO: 672152 - RNA, 22 nt, Human
ccacagggaacaugacagccuu

SEQ ID NO: 672153 - RNA, 22 nt, Human
agaagcacgguuuugucuagca

SEQ ID NO: 672154 - RNA, 22 nt, Human
uaaagcuacacauuauuaaucc

SEQ ID NO: 672155 - RNA, 22 nt, Human
cauggcaggcuucuucagccuu

SEQ ID NO: 672156 - RNA, 22 nt, Human
gaggagguggagucaugcagag

SEQ ID NO: 672157 - RNA, 22 nt, Human
agcugucagugcugugccugua

SEQ ID NO: 672158 - RNA, 22 nt, Human
gauacauuccgggagggcuacc

SEQ ID NO: 672159 - RNA, 22 nt, Human
uaucuguugucuuuuacaugua

SEQ ID NO: 672160 - RNA, 22 nt, Human
cuaggcugagcugggcugagcu

SEQ ID NO: 672161 - RNA, 22 nt, Human
cucaggagagucuuauaucucc

SEQ ID NO: 672162 - RNA, 22 nt, Human
cucacagcagcucugcgagaua

SEQ ID NO: 672163 - RNA, 22 nt, Human
uuguauuuggguaguauagaga

SEQ ID NO: 672164 - RNA, 22 nt, Human
cuuaucuguaaaauggauacaa

SEQ ID NO: 672165 - RNA, 22 nt, Human
gggaugacaaagugucuguccc

SEQ ID NO: 672166 - RNA, 22 nt, Human
cucaaguccauagaaucaggaa

SEQ ID NO: 672167 - RNA, 22 nt, Human
uaaugaggcaagagucauggcu

SEQ ID NO: 672168 - RNA, 22 nt, Human
gaggauggaggcaguuagggcc

SEQ ID NO: 672169 - RNA, 22 nt, Human
gcagcuuucuacuuccuacagc

SEQ ID NO: 672170 - RNA, 22 nt, Human
cucaggcacuuuugucacagac

SEQ ID NO: 672171 - RNA, 22 nt, Human
cugcccaguuugggagccuuuc

SEQ ID NO: 672172 - RNA, 22 nt, Human
guaaaugugaaugucauuuagc

SEQ ID NO: 672173 - RNA, 22 nt, Human
aggacuggcggucgguggggau

SEQ ID NO: 672174 - RNA, 20 nt, Human
agcagauagcgggagaguuu

SEQ ID NO: 672175 - RNA, 22 nt, Human
cagggguguuuuuggccaggag

SEQ ID NO: 672176 - RNA, 22 nt, Human
guggucagaaaucucaguggca

SEQ ID NO: 672177 - RNA, 20 nt, Human
ugcucaggauggagaggugu

SEQ ID NO: 672178 - RNA, 22 nt, Human
uggcucacaaucucccaugaag

SEQ ID NO: 672179 - RNA, 22 nt, Human
agauauaauaauuuacaagugu

SEQ ID NO: 672180 - RNA, 17 nt, Human
cauaaaacaguucuauu

SEQ ID NO: 672181 - RNA, 22 nt, Human
guguuauuugagugggagcgug

SEQ ID NO: 672182 - RNA, 22 nt, Human
uguuugugguuauaauaaguau

SEQ ID NO: 672183 - RNA, 22 nt, Human
agaaauuccuaagguacacaag

SEQ ID NO: 672184 - RNA, 22 nt, Human
aggcauguauaugugcacaugu

SEQ ID NO: 672185 - RNA, 22 nt, Human
augcaguacagauaauucuaca

SEQ ID NO: 672186 - RNA, 22 nt, Human
uccacgugagcuucgugugcag

SEQ ID NO: 672187 - RNA, 22 nt, Human
uuuuaccugaaccacacaguau

SEQ ID NO: 672188 - RNA, 22 nt, Human
cuucacuuuaagccaaucauga

SEQ ID NO: 672189 - RNA, 22 nt, Human
cccagggaaggcagauggagga

SEQ ID NO: 672190 - RNA, 22 nt, Human
aggagcugguagucucauuggg

SEQ ID NO: 672191 - RNA, 22 nt, Human
cuaugaaaggauuuggaguugu

SEQ ID NO: 672192 - RNA, 22 nt, Human
aagucaucuugagucuaagauu

SEQ ID NO: 672193 - RNA, 20 nt, Human
acagaugaggaaaaugaagu

SEQ ID NO: 672194 - RNA, 22 nt, Human
auaaaggcagauuuuggaccuc

SEQ ID NO: 672195 - RNA, 22 nt, Human
augcaggggccgccuggccagg

SEQ ID NO: 672196 - RNA, 22 nt, Human
uacaguuuguuacauuguuagu

SEQ ID NO: 672197 - RNA, 22 nt, Human
gacaaggaaauuacuagcugga

SEQ ID NO: 672198 - RNA, 22 nt, Human
ucucaggcuguguguggaggac

SEQ ID NO: 672199 - RNA, 22 nt, Human
ccuggcucaaggcgaggacucc

SEQ ID NO: 672200 - RNA, 17 nt, Human
ucagcucagagcaccug

SEQ ID NO: 672201 - RNA, 22 nt, Human
ugcagccuugaccuccagugcu

SEQ ID NO: 672202 - RNA, 22 nt, Human
uugaacaguccuaagagacccu

SEQ ID NO: 672203 - RNA, 22 nt, Human
ugcuuaaaggauaguuuaaacu

SEQ ID NO: 672204 - RNA, 22 nt, Human
uccaggcccauagacacuucuc

SEQ ID NO: 672205 - RNA, 22 nt, Human
caccugccugguccuuagggcu

SEQ ID NO: 672206 - RNA, 22 nt, Human
uuacuuucaaaaacuacguggg

SEQ ID NO: 672207 - RNA, 22 nt, Human
agucaggaagcuggagcugggg

SEQ ID NO: 672208 - RNA, 22 nt, Human
auacacuucauguuuucaucug

SEQ ID NO: 672209 - RNA, 22 nt, Human
aggcgcaggguuuggacccagg

SEQ ID NO: 672210 - RNA, 22 nt, Human
ugccagaacagcucaucuggcc

SEQ ID NO: 672211 - RNA, 22 nt, Human
cagguccacggcgcccaggggu

SEQ ID NO: 672212 - RNA, 22 nt, Human
ccccagcccacaagcauauuaa

SEQ ID NO: 672213 - RNA, 23 nt, Human
aguacaauaaguauaauucuuuc

SEQ ID NO: 672214 - RNA, 22 nt, Human
aagagagggacuuauuaaaguc

SEQ ID NO: 672215 - RNA, 22 nt, Human
gaguuaaaggcaguugaggaaa

SEQ ID NO: 672216 - RNA, 22 nt, Human
uaaggcagugagaagaaacagg

SEQ ID NO: 672217 - RNA, 22 nt, Human
ugcacagugaccacugagcaag

SEQ ID NO: 672218 - RNA, 22 nt, Human
ugcaggcagcugaaaggugccu

SEQ ID NO: 672219 - RNA, 22 nt, Human
ucuuuaucaagucuguucuuug

SEQ ID NO: 672220 - RNA, 22 nt, Human
uguacaaugccgagacuaacuc

SEQ ID NO: 672221 - RNA, 22 nt, Human
aacuguuuggaacucuuccaca

SEQ ID NO: 672222 - RNA, 22 nt, Human
gcuccuggcucucugagggcug

SEQ ID NO: 672223 - RNA, 22 nt, Human
uucuggagucauuggggcugau

SEQ ID NO: 672224 - RNA, 22 nt, Human
uucaaguuaacucuccuuguac

SEQ ID NO: 672225 - RNA, 22 nt, Human
gagcaaggcggcaucucucuga

SEQ ID NO: 672226 - RNA, 18 nt, Human
cagauccaggcagcuauu

SEQ ID NO: 672227 - RNA, 22 nt, Human
ggcaggaagcucauguggacug

SEQ ID NO: 672228 - RNA, 22 nt, Human
uucacaauuaacuuuauacuua

SEQ ID NO: 672229 - RNA, 17 nt, Human
uggggaagcucagauuu

SEQ ID NO: 672230 - RNA, 22 nt, Human
cugccagaagguuccugcugca

SEQ ID NO: 672231 - RNA, 22 nt, Human
uccucacagaguggcaggcaau

SEQ ID NO: 672232 - RNA, 22 nt, Human
cuguggcucaauugccuacuga

SEQ ID NO: 672233 - RNA, 22 nt, Human
auaaaugaacauucacagagcu

SEQ ID NO: 672234 - RNA, 22 nt, Human
ucugucuuggccagccaucugg

SEQ ID NO: 672235 - RNA, 22 nt, Human
cccugggauggauuggcaggaa

SEQ ID NO: 672236 - RNA, 22 nt, Human
accacacuggcuagugaagaag

SEQ ID NO: 672237 - RNA, 22 nt, Human
uuucaagcugugguaacugaga

SEQ ID NO: 672238 - RNA, 22 nt, Human
gacaaaacacauuaguuuaaaa

SEQ ID NO: 672239 - RNA, 22 nt, Human
uuacauauugucuauuguucaa

SEQ ID NO: 672240 - RNA, 22 nt, Human
gagacacaauuuccccauccua

SEQ ID NO: 672241 - RNA, 22 nt, Human
cugcaauaugaugucugagaaa

SEQ ID NO: 672242 - RNA, 22 nt, Human
cuaggguggauuugugcagagu

SEQ ID NO: 672243 - RNA, 22 nt, Human
aaaaucuaaguagcgaguaagg

SEQ ID NO: 672244 - RNA, 22 nt, Human
gagaaaaugucagacuuggucg

SEQ ID NO: 672245 - RNA, 22 nt, Human
aagaguuuuagacaaacugauu

SEQ ID NO: 672246 - RNA, 22 nt, Human
ucuuuuauuaggcugaaauggg

SEQ ID NO: 672247 - RNA, 22 nt, Human
ugccugggaucugugcccuuug

SEQ ID NO: 672248 - RNA, 22 nt, Human
caggcaugaucauaggaguuua

SEQ ID NO: 672249 - RNA, 22 nt, Human
cucugugggaggaggaguaggc

SEQ ID NO: 672250 - RNA, 22 nt, Human
uucacaauaauguccauccucu

SEQ ID NO: 672251 - RNA, 22 nt, Human
gcuuuauguaaguccaaaggca

SEQ ID NO: 672252 - RNA, 22 nt, Human
auuuccuauggauacaggcaga

SEQ ID NO: 672253 - RNA, 22 nt, Human
cuuacagugacccugcagauuu

SEQ ID NO: 672254 - RNA, 22 nt, Human
aggugcagaaaaaaguccuuua

SEQ ID NO: 672255 - RNA, 22 nt, Human
uuucacagcaacacugucugca

SEQ ID NO: 672256 - RNA, 22 nt, Human
ucacaacuugaagcugauuuaa

SEQ ID NO: 672257 - RNA, 22 nt, Human
uggcagcugauuagauggugcc

SEQ ID NO: 672258 - RNA, 22 nt, Human
uguuugaaaaguggagauuuau

SEQ ID NO: 672259 - RNA, 22 nt, Human
aagcacccaauuuacagcaguu

SEQ ID NO: 672260 - RNA, 22 nt, Human
cugccugcuaccugaaaugcca

SEQ ID NO: 672261 - RNA, 22 nt, Human
acacauaucuaagauagaugac

SEQ ID NO: 672262 - RNA, 22 nt, Human
aauucucuccaggguaacauca

SEQ ID NO: 672263 - RNA, 22 nt, Human
gcaggcuggucugaccaucccu

SEQ ID NO: 672264 - RNA, 22 nt, Human
gguucacacuuucaugauuuca

SEQ ID NO: 672265 - RNA, 22 nt, Human
ugcccacauucugaagcucccu

SEQ ID NO: 672266 - RNA, 19 nt, Human
ugggagaggcaacagagua

SEQ ID NO: 672267 - RNA, 22 nt, Human
acgacagcacaacagcauccuc

SEQ ID NO: 672268 - RNA, 22 nt, Human
ugacagaguucggauugaguuu

SEQ ID NO: 672269 - RNA, 21 nt, Human
agagaauugccuuagauguuc

SEQ ID NO: 672270 - RNA, 22 nt, Human
ucagggcaucucuuaaguggug

SEQ ID NO: 672271 - RNA, 22 nt, Human
augucuuuauaaauguauaaug

SEQ ID NO: 672272 - RNA, 22 nt, Human
cugaggcagagaaugaguuugu

SEQ ID NO: 672273 - RNA, 22 nt, Human
agaaaaagucaaggaauuggac

SEQ ID NO: 672274 - RNA, 22 nt, Human
ccagugugaaccucaccacccu

SEQ ID NO: 672275 - RNA, 22 nt, Human
uagaugauagggccagaauuug

SEQ ID NO: 672276 - RNA, 22 nt, Human
augcuguguuugagaaccuagg

SEQ ID NO: 672277 - RNA, 22 nt, Human
uaacauguuaagaaauuagaua

SEQ ID NO: 672278 - RNA, 22 nt, Human
auacaucaccuauauauucaca

SEQ ID NO: 672279 - RNA, 22 nt, Human
guacaacaggauugauguacca

SEQ ID NO: 672280 - RNA, 22 nt, Human
ugucaugcccaggagcaaggua

SEQ ID NO: 672281 - RNA, 22 nt, Human
ugaggccucauaaugagauuuc

SEQ ID NO: 672282 - RNA, 22 nt, Human
acucucugguguagaaagaccu

SEQ ID NO: 672283 - RNA, 22 nt, Human
cauuuacacacagaggugugcu

SEQ ID NO: 672284 - RNA, 22 nt, Human
gugcaaaagcaguuggauuuuu

SEQ ID NO: 672285 - RNA, 22 nt, Human
uagcugccaaaagggugggcua

SEQ ID NO: 672286 - RNA, 22 nt, Human
aggaccugagaguuggaaaucc

SEQ ID NO: 672287 - RNA, 21 nt, Human
gcagcaugagaaagccccaaa

SEQ ID NO: 672288 - RNA, 22 nt, Human
guucacaguucagccuguaaca

SEQ ID NO: 672289 - RNA, 20 nt, Human
aagguccaaacucuguguuc

SEQ ID NO: 672290 - RNA, 22 nt, Human
uucccacagucacugggagaag

SEQ ID NO: 672291 - RNA, 22 nt, Human
cugccugaguggaggucgaggg

SEQ ID NO: 672292 - RNA, 22 nt, Human
aauggcuuuggucuggguccca

SEQ ID NO: 672293 - RNA, 22 nt, Human
uaaccucugagcuccagcuucu

SEQ ID NO: 672294 - RNA, 22 nt, Human
cugugagggucacagccaugcc

SEQ ID NO: 672295 - RNA, 22 nt, Human
acucagagccucgagggacugc

SEQ ID NO: 672296 - RNA, 22 nt, Human
ucaaaggaguuuaaguuacugg

SEQ ID NO: 672297 - RNA, 22 nt, Human
gauuucaaggauguuagaggug

SEQ ID NO: 672298 - RNA, 22 nt, Human
aaguuguauauaccgcuuuaag

SEQ ID NO: 672299 - RNA, 22 nt, Human
uaaauugagauuauuaggguaa

SEQ ID NO: 672300 - RNA, 22 nt, Human
agggcucagggcacgucaucca

SEQ ID NO: 672301 - RNA, 22 nt, Human
acagaguuaaaguggaguuuaa

SEQ ID NO: 672302 - RNA, 22 nt, Human
auaaucuggcuuguuugcuuaa

SEQ ID NO: 672303 - RNA, 22 nt, Human
aucacuguggcccaaaaccuca

SEQ ID NO: 672304 - RNA, 22 nt, Human
auguagcagaagauguuuuccu

SEQ ID NO: 672305 - RNA, 22 nt, Human
aaagugcauuguuuguguuccu

SEQ ID NO: 672306 - RNA, 22 nt, Human
cucagggaggcccugggacccu

SEQ ID NO: 672307 - RNA, 22 nt, Human
uuuguuaaggaguauugcuucu

SEQ ID NO: 672308 - RNA, 22 nt, Human
ugcuccuuucauccaauucuca

SEQ ID NO: 672309 - RNA, 22 nt, Human
ucugggaaguuggcagccagcu

SEQ ID NO: 672310 - RNA, 22 nt, Human
cuccaacgaggcugggguacaa

SEQ ID NO: 672311 - RNA, 22 nt, Human
uccaggagggggagccgugccg

SEQ ID NO: 672312 - RNA, 22 nt, Human
uccacuuuagcaaugauugaau

SEQ ID NO: 672313 - RNA, 23 nt, Human
cuguuauuccaggcugaugggug

SEQ ID NO: 672314 - RNA, 22 nt, Human
agccugguguggggcugcagag

SEQ ID NO: 672315 - RNA, 22 nt, Human
uuuuuuaucuaugguaguacca

SEQ ID NO: 672316 - RNA, 22 nt, Human
auuugcuugugcuaugaaaguu

SEQ ID NO: 672317 - RNA, 19 nt, Human
agcuccuguucagcagcuc

SEQ ID NO: 672318 - RNA, 22 nt, Human
cuggucaccuccuucccagcua

SEQ ID NO: 672319 - RNA, 22 nt, Human
acauagaaggaagaguaguagg

SEQ ID NO: 672320 - RNA, 22 nt, Human
guguguccaggcgggagucaag

SEQ ID NO: 672321 - RNA, 22 nt, Human
guggacuggcagugaccuuggu

SEQ ID NO: 672322 - RNA, 22 nt, Human
cacaaaguauaacuugauggaa

SEQ ID NO: 672323 - RNA, 22 nt, Human
uuuuaugaagauaauuuucuga

SEQ ID NO: 672324 - RNA, 22 nt, Human
uucaagaucgaguuuaaaguga

SEQ ID NO: 672325 - RNA, 22 nt, Human
gccuccaccccuggggagugga

SEQ ID NO: 672326 - RNA, 22 nt, Human
ccugcugugaagccaggccugu

SEQ ID NO: 672327 - RNA, 22 nt, Human
uugccucaagauuuuuuauuga

SEQ ID NO: 672328 - RNA, 22 nt, Human
aguaucugcaugauuuugagaa

SEQ ID NO: 672329 - RNA, 22 nt, Human
caggcacuucggcagcguggua

SEQ ID NO: 672330 - RNA, 22 nt, Human
cacuuaaaucuguugagaaaaa

SEQ ID NO: 672331 - RNA, 22 nt, Human
gcauggccuucagggacagcug

SEQ ID NO: 672332 - RNA, 22 nt, Human
cagugcauagauccugaggccu

SEQ ID NO: 672333 - RNA, 18 nt, Human
gggcccuggcguccgccc

SEQ ID NO: 672334 - RNA, 22 nt, Human
gaagaauugaggauguuuaccu

SEQ ID NO: 672335 - RNA, 22 nt, Human
ucugauaacaaccaugucuggc

SEQ ID NO: 672336 - RNA, 22 nt, Human
aaguucugccaggcuguggcag

SEQ ID NO: 672337 - RNA, 22 nt, Human
guauaaacauggagugcauucu

SEQ ID NO: 672338 - RNA, 21 nt, Human
ugcagaaaugguuuuucuaag

SEQ ID NO: 672339 - RNA, 22 nt, Human
gucaggauuauaauccccaugg

SEQ ID NO: 672340 - RNA, 19 nt, Human
aaugucucuaucuguucuc

SEQ ID NO: 672341 - RNA, 22 nt, Human
aucugggcguauaggugcaagu

SEQ ID NO: 672342 - RNA, 22 nt, Human
ccuagccccagauaucucacac

SEQ ID NO: 672343 - RNA, 22 nt, Human
agcgugaauuaguugguacaca

SEQ ID NO: 672344 - RNA, 22 nt, Human
caggcacaggggaaugucuuuu

SEQ ID NO: 672345 - RNA, 22 nt, Human
cggagcugcgccgggacacggg

SEQ ID NO: 672346 - RNA, 22 nt, Human
ccaggagcaaagaucacuggga

SEQ ID NO: 672347 - RNA, 21 nt, Human
gcccagugauuucuucacagu

SEQ ID NO: 672348 - RNA, 20 nt, Human
acauggaucaaaugucaguu

SEQ ID NO: 672349 - RNA, 22 nt, Human
uugcagcuuagugauguuaucu

SEQ ID NO: 672350 - RNA, 22 nt, Human
ggccagccuggggcucccagac

SEQ ID NO: 672351 - RNA, 22 nt, Human
agauguaaacucucaugucauu

SEQ ID NO: 672352 - RNA, 22 nt, Human
auacauaguaccacauuugaca

SEQ ID NO: 672353 - RNA, 22 nt, Human
caacagucagaaugaagcugag

SEQ ID NO: 672354 - RNA, 22 nt, Human
aauagguagccagauauauaaa

SEQ ID NO: 672355 - RNA, 22 nt, Human
gccucuggcuucugcaucagug

SEQ ID NO: 672356 - RNA, 17 nt, Human
uuucccuccuuccacuc

SEQ ID NO: 672357 - RNA, 22 nt, Human
aagaucagcucccgagucugag

SEQ ID NO: 672358 - RNA, 22 nt, Human
aaaauuuccaccaucuuugugu

SEQ ID NO: 672359 - RNA, 22 nt, Human
aggggcucugagugggccagga

SEQ ID NO: 672360 - RNA, 22 nt, Human
aggcugagcuggcccuugaaau

SEQ ID NO: 672361 - RNA, 21 nt, Human
ugcaagaaucaggaagcugcc

SEQ ID NO: 672362 - RNA, 22 nt, Human
cuaaaggcuaggucugaacuca

SEQ ID NO: 672363 - RNA, 22 nt, Human
ucuuuuagaaaaguugaaugua

SEQ ID NO: 672364 - RNA, 22 nt, Human
ccuguacaagagccaucuggau

SEQ ID NO: 672365 - RNA, 22 nt, Human
guuuauucuucagcaacaucug

SEQ ID NO: 672366 - RNA, 22 nt, Human
acuucagagacuuuauggucca

SEQ ID NO: 672367 - RNA, 22 nt, Human
aggaagcccuugucauuucugu

SEQ ID NO: 672368 - RNA, 22 nt, Human
ugcucgcgcuguuccagcagcu

SEQ ID NO: 672369 - RNA, 22 nt, Human
cagcagcuagaggaagggcaga

SEQ ID NO: 672370 - RNA, 22 nt, Human
aauuaacaaauguagcugugau

SEQ ID NO: 672371 - RNA, 22 nt, Human
aacacauggguguuuauuguac

SEQ ID NO: 672372 - RNA, 22 nt, Human
ugcguggcuggucccugugacc

SEQ ID NO: 672373 - RNA, 22 nt, Human
aguuggcgggacauguggaaag

SEQ ID NO: 672374 - RNA, 22 nt, Human
ccugccugauuccaggauggcu

SEQ ID NO: 672375 - RNA, 22 nt, Human
gccuggaucccagggagucagg

SEQ ID NO: 672376 - RNA, 17 nt, Human
gacuuuggaguuucaua

SEQ ID NO: 672377 - RNA, 22 nt, Human
ucaggagccugaaagaggucua

SEQ ID NO: 672378 - RNA, 22 nt, Human
auccaaaucaugucagaagaac

SEQ ID NO: 672379 - RNA, 22 nt, Human
agaucuuuugguuauuauaaga

SEQ ID NO: 672380 - RNA, 22 nt, Human
gggauaggagauugggaguguu

SEQ ID NO: 672381 - RNA, 22 nt, Human
cccuucaggguuaaguagaggg

SEQ ID NO: 672382 - RNA, 22 nt, Human
aaguaacaaugcuguugaauug

SEQ ID NO: 672383 - RNA, 22 nt, Human
agaaugcuuccuuugaaacuga

SEQ ID NO: 672384 - RNA, 22 nt, Human
ccaguguguuaguggauuuccc

SEQ ID NO: 672385 - RNA, 22 nt, Human
ucuggaaagaucauuaaaucca

SEQ ID NO: 672386 - RNA, 20 nt, Human
auguggcuuuuugaccugcu

SEQ ID NO: 672387 - RNA, 22 nt, Human
agaggucuuuuggucugcagaa

SEQ ID NO: 672388 - RNA, 22 nt, Human
augauacaucuucaugucagug

SEQ ID NO: 672389 - RNA, 22 nt, Human
uucacagugagcuaugucuugu

SEQ ID NO: 672390 - RNA, 22 nt, Human
uguaagaauaaugauuucuaag

SEQ ID NO: 672391 - RNA, 19 nt, Human
agugaacuccauaucaggu

SEQ ID NO: 672392 - RNA, 22 nt, Human
uuauuuccucucuaauagggua

SEQ ID NO: 672393 - RNA, 22 nt, Human
agagccagcauuugacacuggc

SEQ ID NO: 672394 - RNA, 19 nt, Human
gcuccuggaugaccugugg

SEQ ID NO: 672395 - RNA, 21 nt, Human
uaucuacaguguccauucagu

SEQ ID NO: 672396 - RNA, 22 nt, Human
cagggugccaaagaacaaauau

SEQ ID NO: 672397 - RNA, 22 nt, Human
agugugcuguuuccagaagggc

SEQ ID NO: 672398 - RNA, 22 nt, Human
cuuccuguuguauuugugagcc

SEQ ID NO: 672399 - RNA, 22 nt, Human
ugacaaaacugcaauuacuuuu

SEQ ID NO: 672400 - RNA, 22 nt, Human
agaucacugguuacuuaaugaa

SEQ ID NO: 672401 - RNA, 19 nt, Human
gguagaagggaaguguuuu

SEQ ID NO: 672402 - RNA, 22 nt, Human
uccccagccgugaaggagagga

SEQ ID NO: 672403 - RNA, 22 nt, Human
agcugcuaugacaacaccagcc

SEQ ID NO: 672404 - RNA, 22 nt, Human
gcaguauauacucuuugagggg

SEQ ID NO: 672405 - RNA, 22 nt, Human
aaauugcauucaggaugcagga

SEQ ID NO: 672406 - RNA, 22 nt, Human
aucugccuggcuccaggugagc

SEQ ID NO: 672407 - RNA, 22 nt, Human
ugaagcagaggggucuugagcu

SEQ ID NO: 672408 - RNA, 22 nt, Human
uuacuuuugcaccaaacuaaua

SEQ ID NO: 672409 - RNA, 22 nt, Human
aggcuucuuuuagaggggaugg

SEQ ID NO: 672410 - RNA, 22 nt, Human
acacacucaauugcauaagcac

SEQ ID NO: 672411 - RNA, 22 nt, Human
ugggcaagcucuggguggacac

SEQ ID NO: 672412 - RNA, 22 nt, Human
cuccuacaguguuugaguccag

SEQ ID NO: 672413 - RNA, 22 nt, Human
aaaugcaucagcucauaagaga

SEQ ID NO: 672414 - RNA, 22 nt, Human
acuuaaagguuagcuauucuac

SEQ ID NO: 672415 - RNA, 22 nt, Human
aggagaccuucaccacuuccac

SEQ ID NO: 672416 - RNA, 20 nt, Human
ggcacugcaccaguuaguag

SEQ ID NO: 672417 - RNA, 22 nt, Human
guguuguggagcuugucagggg

SEQ ID NO: 672418 - RNA, 22 nt, Human
aauguguguauuucuaggcgag

SEQ ID NO: 672419 - RNA, 22 nt, Human
gugggccaggcgucuaggcccu

SEQ ID NO: 672420 - RNA, 22 nt, Human
ccagagccucuuaugaagaucg

SEQ ID NO: 672421 - RNA, 21 nt, Human
agggagcuauuuauaguaagc

SEQ ID NO: 672422 - RNA, 22 nt, Human
augcuguggggagugaggguag

SEQ ID NO: 672423 - RNA, 22 nt, Human
agguuccagguucgaaucccau

SEQ ID NO: 672424 - RNA, 22 nt, Human
aagaggaggaugcuuuacagcu

SEQ ID NO: 672425 - RNA, 22 nt, Human
ugggcacaggggaauggaugaa

SEQ ID NO: 672426 - RNA, 22 nt, Human
ucagggcacguuucugcaaugc

SEQ ID NO: 672427 - RNA, 22 nt, Human
gacagugucccucuggggugga

SEQ ID NO: 672428 - RNA, 20 nt, Human
gcccaagcgccggccgcaga

SEQ ID NO: 672429 - RNA, 22 nt, Human
acugcacugauuuaucauccca

SEQ ID NO: 672430 - RNA, 22 nt, Human
gggaauguaaucauggaaugcu

SEQ ID NO: 672431 - RNA, 22 nt, Human
uuucagugcacguaguuuauuu

SEQ ID NO: 672432 - RNA, 22 nt, Human
ucugggugccacugucuguaca

SEQ ID NO: 672433 - RNA, 22 nt, Human
gcaaacuggcaaaccugucugu

SEQ ID NO: 672434 - RNA, 22 nt, Human
auacagugaauacuuacagugu

SEQ ID NO: 672435 - RNA, 22 nt, Human
ugguccugagcaccagccugac

SEQ ID NO: 672436 - RNA, 22 nt, Human
uuagaaaaaggcuguggucuua

SEQ ID NO: 672437 - RNA, 22 nt, Human
gcuugacuaggcucuggcgaca

SEQ ID NO: 672438 - RNA, 22 nt, Human
ccuguacaagcucuuggugaca

SEQ ID NO: 672439 - RNA, 22 nt, Human
aagggcucugugugccucccca

SEQ ID NO: 672440 - RNA, 22 nt, Human
gcaggagguugagccaggacug

SEQ ID NO: 672441 - RNA, 22 nt, Human
gacagugguguuuuccauugca

SEQ ID NO: 672442 - RNA, 22 nt, Human
ggaauucuguagcucuuccucu

SEQ ID NO: 672443 - RNA, 22 nt, Human
cuccaccccgugccggugcugg

SEQ ID NO: 672444 - RNA, 22 nt, Human
ggcacagugauuaagagccagu

SEQ ID NO: 672445 - RNA, 22 nt, Human
ccagggcuggaccagugcuugg

SEQ ID NO: 672446 - RNA, 22 nt, Human
uagcagggaagaugaucagaau

SEQ ID NO: 672447 - RNA, 22 nt, Human
uuaagauuuguagagaaaaagc

SEQ ID NO: 672448 - RNA, 22 nt, Human
agcucaggccggagcuacaggc

SEQ ID NO: 672449 - RNA, 22 nt, Human
uacauuuacagagccuucucug

SEQ ID NO: 672450 - RNA, 22 nt, Human
ccugccuggagcugagugugga

SEQ ID NO: 672451 - RNA, 22 nt, Human
uguguccauucaggcacugacc

SEQ ID NO: 672452 - RNA, 22 nt, Human
agcuuugaaugagugcauugca

SEQ ID NO: 672453 - RNA, 22 nt, Human
gaugggguuuugccaggcuggu

SEQ ID NO: 672454 - RNA, 22 nt, Human
gcccccagaccucagugggcug

SEQ ID NO: 672455 - RNA, 22 nt, Human
uguggacuuuaguaggugagag

SEQ ID NO: 672456 - RNA, 22 nt, Human
uacuucauuccuuuguaaaaug

SEQ ID NO: 672457 - RNA, 22 nt, Human
aauaacuucauguaacauuuaa

SEQ ID NO: 672458 - RNA, 22 nt, Human
uggggugaaucuuuguuguccg

SEQ ID NO: 672459 - RNA, 22 nt, Human
uugauuuuaaaauagugacacu

SEQ ID NO: 672460 - RNA, 22 nt, Human
ggugaguugggguucacagguc

SEQ ID NO: 672461 - RNA, 22 nt, Human
ucuccuggauggaccuucucuu

SEQ ID NO: 672462 - RNA, 22 nt, Human
gcccuggauguacaggcauguu

SEQ ID NO: 672463 - RNA, 22 nt, Human
uuuccucugagugagcugggag

SEQ ID NO: 672464 - RNA, 22 nt, Human
uacaagaaauuucugcauauau

SEQ ID NO: 672465 - RNA, 21 nt, Human
ugaggauaaguaaagcugaag

SEQ ID NO: 672466 - RNA, 22 nt, Human
cagugucaccaggcgagucucc

SEQ ID NO: 672467 - RNA, 22 nt, Human
uaacacauauuugcaguaagca

SEQ ID NO: 672468 - RNA, 22 nt, Human
uguuuuaaagccauugccuuuc

SEQ ID NO: 672469 - RNA, 22 nt, Human
auggcagaccugggcuggagaa

SEQ ID NO: 672470 - RNA, 22 nt, Human
ucuuuuggguucuuaugauuua

SEQ ID NO: 672471 - RNA, 22 nt, Human
gagugugugacuucacuuuagc

SEQ ID NO: 672472 - RNA, 22 nt, Human
cuggucugcaaggccauauaga

SEQ ID NO: 672473 - RNA, 22 nt, Human
gguguguguggauuagcaugcc

SEQ ID NO: 672474 - RNA, 22 nt, Human
gcugguuaggugagggugcgcc

SEQ ID NO: 672475 - RNA, 20 nt, Human
gaguccaggggccuguagca

SEQ ID NO: 672476 - RNA, 21 nt, Human
gauauuuaugacucauuccuu

SEQ ID NO: 672477 - RNA, 22 nt, Human
auaauugugggcagugugauau

SEQ ID NO: 672478 - RNA, 21 nt, Human
ugcuccuuagcugccccugcc

SEQ ID NO: 672479 - RNA, 19 nt, Human
uggaaggcuaagacacuug

SEQ ID NO: 672480 - RNA, 22 nt, Human
uccuggacaagcccuucacccu

SEQ ID NO: 672481 - RNA, 22 nt, Human
uucuggaaggguggaguagcuu

SEQ ID NO: 672482 - RNA, 22 nt, Human
cugagaaaauuucaggaagugu

SEQ ID NO: 672483 - RNA, 22 nt, Human
ugcagaugagggaugaaaauga

SEQ ID NO: 672484 - RNA, 22 nt, Human
auauuuaaacaggguaccaaua

SEQ ID NO: 672485 - RNA, 19 nt, Human
ggaugagggucaggcauag

SEQ ID NO: 672486 - RNA, 22 nt, Human
caaagucagggaagaguggcug

SEQ ID NO: 672487 - RNA, 22 nt, Human
ggaggcucagacuccauccuca

SEQ ID NO: 672488 - RNA, 22 nt, Human
ucacucaaugguaucaggaggu

SEQ ID NO: 672489 - RNA, 22 nt, Human
acuuggaaaauucaaaauggca

SEQ ID NO: 672490 - RNA, 20 nt, Human
gaugggaaucggagcuggua

SEQ ID NO: 672491 - RNA, 22 nt, Human
uagugcuucuacccuaggcagg

SEQ ID NO: 672492 - RNA, 21 nt, Human
uauuaauuuuucuucccacua

SEQ ID NO: 672493 - RNA, 22 nt, Human
uccuggaggcaaaugagcacau

SEQ ID NO: 672494 - RNA, 22 nt, Human
cugggggucuugaaagggagag

SEQ ID NO: 672495 - RNA, 18 nt, Human
ucacacuuccuuuggguc

SEQ ID NO: 672496 - RNA, 22 nt, Human
caauguuuguuagagcucuaga

SEQ ID NO: 672497 - RNA, 22 nt, Human
acauccugaagucagucauuug

SEQ ID NO: 672498 - RNA, 22 nt, Human
ugaugggacugccagcugcuga

SEQ ID NO: 672499 - RNA, 22 nt, Human
uggcucagauaauucaaggggc

SEQ ID NO: 672500 - RNA, 22 nt, Human
cucuuaguaaugccaugaagca

SEQ ID NO: 672501 - RNA, 22 nt, Human
cuggaggcugaguugggucucc

SEQ ID NO: 672502 - RNA, 22 nt, Human
ucagggcugcagaagaggcagg

SEQ ID NO: 672503 - RNA, 22 nt, Human
ccaggagcccugccacaauggu

SEQ ID NO: 672504 - RNA, 17 nt, Human
cugcuuggccucugggg

SEQ ID NO: 672505 - RNA, 22 nt, Human
gagaacugauuagcauuugcca

SEQ ID NO: 672506 - RNA, 22 nt, Human
cugagacuuucaugugcuuuua

SEQ ID NO: 672507 - RNA, 20 nt, Human
uaaaugcaugaauguaaggc

SEQ ID NO: 672508 - RNA, 22 nt, Human
gcccugcugucuucagaguaua

SEQ ID NO: 672509 - RNA, 22 nt, Human
auggaauaauuguuucacagaa

SEQ ID NO: 672510 - RNA, 18 nt, Human
gagacacaagggccugga

SEQ ID NO: 672511 - RNA, 22 nt, Human
gauaauuuuagucugaaaauug

SEQ ID NO: 672512 - RNA, 22 nt, Human
aacucucuugggaguaccugga

SEQ ID NO: 672513 - RNA, 22 nt, Human
ucccagcauuaaugccugucag

SEQ ID NO: 672514 - RNA, 22 nt, Human
cuucaaauucgaggaguagaug

SEQ ID NO: 672515 - RNA, 21 nt, Human
ugggggugaggccuaggaauc

SEQ ID NO: 672516 - RNA, 22 nt, Human
augaaguucuagugagaaaugc

SEQ ID NO: 672517 - RNA, 20 nt, Human
gccugcagguuggaugggau

SEQ ID NO: 672518 - RNA, 22 nt, Human
uacaacuuacuugaauggcuuu

SEQ ID NO: 672519 - RNA, 22 nt, Human
uaacaaugguuuugcugauaau

SEQ ID NO: 672520 - RNA, 22 nt, Human
uagucccauuuugagguauuug

SEQ ID NO: 672521 - RNA, 22 nt, Human
guuguacaggcagggaaacuga

SEQ ID NO: 672522 - RNA, 22 nt, Human
gggacuccauaagcacauggau

SEQ ID NO: 672523 - RNA, 22 nt, Human
aggccagcccugggcugagaga

SEQ ID NO: 672524 - RNA, 22 nt, Human
aagguguucagguuuucccauu

SEQ ID NO: 672525 - RNA, 22 nt, Human
ccaggugucuguggccagcccu

SEQ ID NO: 672526 - RNA, 22 nt, Human
ccagggcaggggcuggaguuca

SEQ ID NO: 672527 - RNA, 22 nt, Human
cugccucuguugggcauggucu

SEQ ID NO: 672528 - RNA, 22 nt, Human
ugcuggagaggaaggugggguc

SEQ ID NO: 672529 - RNA, 22 nt, Human
ccacaggacggaggucuggccg

SEQ ID NO: 672530 - RNA, 22 nt, Human
aagaaacucacuuugggaggca

SEQ ID NO: 672531 - RNA, 22 nt, Human
aggcaagaacagacaugggagu

SEQ ID NO: 672532 - RNA, 22 nt, Human
ugacaagagaccccuccgcagg

SEQ ID NO: 672533 - RNA, 22 nt, Human
aacaucagaaguagaagacuca

SEQ ID NO: 672534 - RNA, 22 nt, Human
agggcuuugauguccaugagga

SEQ ID NO: 672535 - RNA, 22 nt, Human
aggggagguggcagaaaugugc

SEQ ID NO: 672536 - RNA, 22 nt, Human
uuccacauuccuuacauucaua

SEQ ID NO: 672537 - RNA, 22 nt, Human
uccauggagauggaugacugua

SEQ ID NO: 672538 - RNA, 22 nt, Human
ggcccugggaugcucagcagug

SEQ ID NO: 672539 - RNA, 22 nt, Human
cugguuggaagugcagacucuc

SEQ ID NO: 672540 - RNA, 22 nt, Human
acaggccuggaaaggaaggagu

SEQ ID NO: 672541 - RNA, 22 nt, Human
ggcuucugguaaagaccacacc

SEQ ID NO: 672542 - RNA, 22 nt, Human
cccccucugccgggguccuuca

SEQ ID NO: 672543 - RNA, 22 nt, Human
uugccuuuaaguauaacugcug

SEQ ID NO: 672544 - RNA, 21 nt, Human
cccaagggaggcaggauaagg

SEQ ID NO: 672545 - RNA, 22 nt, Human
uuuagcaaguucucugagagaa

SEQ ID NO: 672546 - RNA, 22 nt, Human
auuguucagaguagggcucugu

SEQ ID NO: 672547 - RNA, 22 nt, Human
agcagccucccagggagcagcc

SEQ ID NO: 672548 - RNA, 22 nt, Human
uucccucuuuuccaacaguugu

SEQ ID NO: 672549 - RNA, 22 nt, Human
agcagcuccugccaugagugcu

SEQ ID NO: 672550 - RNA, 22 nt, Human
uugugucuaaauaaggagaccu

SEQ ID NO: 672551 - RNA, 20 nt, Human
ugcucuggaaauggucugag

SEQ ID NO: 672552 - RNA, 22 nt, Human
uugucuguccaggcaccccaag

SEQ ID NO: 672553 - RNA, 22 nt, Human
uuaagggccauuauggaugggu

SEQ ID NO: 672554 - RNA, 22 nt, Human
caccuguccacgcagucugccu

SEQ ID NO: 672555 - RNA, 22 nt, Human
uacagccuggcacuacccuggg

SEQ ID NO: 672556 - RNA, 22 nt, Human
cagagccagagaccugcugugc

SEQ ID NO: 672557 - RNA, 22 nt, Human
aagagacaugaauacucgaagg

SEQ ID NO: 672558 - RNA, 19 nt, Human
ccaggagugguggggugag

SEQ ID NO: 672559 - RNA, 22 nt, Human
gugcugagcaucaugaggcacu

SEQ ID NO: 672560 - RNA, 22 nt, Human
aacugcauaauauaucaugcag

SEQ ID NO: 672561 - RNA, 22 nt, Human
gacugaacaguaagaggcuuua

SEQ ID NO: 672562 - RNA, 22 nt, Human
uuccuggguucccucucauucu

SEQ ID NO: 672563 - RNA, 20 nt, Human
agauuaggggcuuucuucuu

SEQ ID NO: 672564 - RNA, 22 nt, Human
gaggggcuggcuguggucccau

SEQ ID NO: 672565 - RNA, 22 nt, Human
ccucugugugaugcgcaaagua

SEQ ID NO: 672566 - RNA, 22 nt, Human
cacuuuacuaucuauaaaauaa

SEQ ID NO: 672567 - RNA, 22 nt, Human
gggcagccucggugccugcugc

SEQ ID NO: 672568 - RNA, 22 nt, Human
aucaacaugaauuucucugaag

SEQ ID NO: 672569 - RNA, 22 nt, Human
cugcaaaaguaauugcagguuu

SEQ ID NO: 672570 - RNA, 22 nt, Human
ugcacagagcaggcaccagcgg

SEQ ID NO: 672571 - RNA, 20 nt, Human
accuucaggaacuuaucagc

SEQ ID NO: 672572 - RNA, 22 nt, Human
ugaaaucaugaacaagguaggu

SEQ ID NO: 672573 - RNA, 20 nt, Human
uaaugcuuaacacauccccu

SEQ ID NO: 672574 - RNA, 22 nt, Human
uaggaaauuuuacuggucuggg

SEQ ID NO: 672575 - RNA, 22 nt, Human
agucucuccacauuguuauaaa

SEQ ID NO: 672576 - RNA, 22 nt, Human
agugcaaacuuuauugugaccu

SEQ ID NO: 672577 - RNA, 22 nt, Human
ccagugcccagucucccugguc

SEQ ID NO: 672578 - RNA, 22 nt, Human
aaaguucuggagaaaauaauga

SEQ ID NO: 672579 - RNA, 19 nt, Human
ugacacagcuagguuugcu

SEQ ID NO: 672580 - RNA, 22 nt, Human
gcauucauauggaaggaaacua

SEQ ID NO: 672581 - RNA, 22 nt, Human
aauuagcuaauuaauuguagcc

SEQ ID NO: 672582 - RNA, 22 nt, Human
acacccaggcuggcgugcagug

SEQ ID NO: 672583 - RNA, 22 nt, Human
gcugagcagccuaagcaaauuu

SEQ ID NO: 672584 - RNA, 22 nt, Human
caugcauuccuccucugccuua

SEQ ID NO: 672585 - RNA, 22 nt, Human
aaugcaaacagcccagaaucca

SEQ ID NO: 672586 - RNA, 22 nt, Human
agggaaggagguuagaacccac

SEQ ID NO: 672587 - RNA, 17 nt, Human
ccugggaggaguuauga

SEQ ID NO: 672588 - RNA, 22 nt, Human
aaaauguaugauggaggugcua

SEQ ID NO: 672589 - RNA, 22 nt, Human
uuuauugggugcagugcccaca

SEQ ID NO: 672590 - RNA, 22 nt, Human
ucuuugaaaagggagauagaaa

SEQ ID NO: 672591 - RNA, 22 nt, Human
aucagcaagacuaggggaauac

SEQ ID NO: 672592 - RNA, 22 nt, Human
auuuagacucucaccuccaccu

SEQ ID NO: 672593 - RNA, 22 nt, Human
guucuauuccccuuaucuguga

SEQ ID NO: 672594 - RNA, 22 nt, Human
cugaagcaaaggaucgagcuaa

SEQ ID NO: 672595 - RNA, 22 nt, Human
uguggcugcagacacuggagcc

SEQ ID NO: 672596 - RNA, 22 nt, Human
cgagugucugcuaugggcugag

SEQ ID NO: 672597 - RNA, 22 nt, Human
ucuuuggcauuuaggagcagga

SEQ ID NO: 672598 - RNA, 22 nt, Human
ugguggcaucaauugacuucuc

SEQ ID NO: 672599 - RNA, 22 nt, Human
gacagcuucgaggaggugagcu

SEQ ID NO: 672600 - RNA, 22 nt, Human
caaaauuagggagugagcugga

SEQ ID NO: 672601 - RNA, 22 nt, Human
aaguuuuaacaaguacuuacua

SEQ ID NO: 672602 - RNA, 22 nt, Human
ugaaugauuugggugcauucag

SEQ ID NO: 672603 - RNA, 22 nt, Human
cugccugccuuggccuccagga

SEQ ID NO: 672604 - RNA, 22 nt, Human
uggcaauguuagcaaagcauuu

SEQ ID NO: 672605 - RNA, 23 nt, Human
agguuacaguuguuaaguugcaa

SEQ ID NO: 672606 - RNA, 22 nt, Human
gcuucuuuggcaacccugacau

SEQ ID NO: 672607 - RNA, 22 nt, Human
uuucagacaugggggcaaacag

SEQ ID NO: 672608 - RNA, 22 nt, Human
cuucuuuucauggcuugggaag

SEQ ID NO: 672609 - RNA, 22 nt, Human
uaaacagccuaaaacuuucuuu

SEQ ID NO: 672610 - RNA, 22 nt, Human
auacaaucuagucugucagcaa

SEQ ID NO: 672611 - RNA, 22 nt, Human
gugcuguaucagaaucugcucu

SEQ ID NO: 672612 - RNA, 22 nt, Human
gaccccaucuggcugccccagg

SEQ ID NO: 672613 - RNA, 22 nt, Human
agugugagccuacaggccaaag

SEQ ID NO: 672614 - RNA, 22 nt, Human
gccuggaguguugguauuucuc

SEQ ID NO: 672615 - RNA, 22 nt, Human
aggccugcugucuugaggccaa

SEQ ID NO: 672616 - RNA, 22 nt, Human
ccacugagaagggguugggguc

SEQ ID NO: 672617 - RNA, 22 nt, Human
gcagguggcagaggugggaucu

SEQ ID NO: 672618 - RNA, 19 nt, Human
gccaugggcuggcagcaga

SEQ ID NO: 672619 - RNA, 22 nt, Human
aagaguggagaauaaaauagga

SEQ ID NO: 672620 - RNA, 22 nt, Human
cuggcucuuggcuagggagagu

SEQ ID NO: 672621 - RNA, 22 nt, Human
acuccaggcaucugcuucugcu

SEQ ID NO: 672622 - RNA, 22 nt, Human
ugcauagaggauccaguguggu

SEQ ID NO: 672623 - RNA, 22 nt, Human
ucaaguccugcuguggaccaca

SEQ ID NO: 672624 - RNA, 22 nt, Human
guauuccuucagaagacguuua

SEQ ID NO: 672625 - RNA, 22 nt, Human
augcacaggcugugggcugguu

SEQ ID NO: 672626 - RNA, 22 nt, Human
gggucaaaugauaauugcuucu

SEQ ID NO: 672627 - RNA, 22 nt, Human
caaugucagaauuacaguugau

SEQ ID NO: 672628 - RNA, 22 nt, Human
ggcagcugguucuuuccauuaa

SEQ ID NO: 672629 - RNA, 22 nt, Human
ccaaacaaauccccauucuuag

SEQ ID NO: 672630 - RNA, 22 nt, Human
augucuucauagcuuauaucca

SEQ ID NO: 672631 - RNA, 22 nt, Human
uacagaggagaccaaggcucag

SEQ ID NO: 672632 - RNA, 22 nt, Human
aucagucuguguuagaaaagag

SEQ ID NO: 672633 - RNA, 22 nt, Human
uucagccuguucaugcuguugc

SEQ ID NO: 672634 - RNA, 22 nt, Human
aacacuguaacagcaucauuuu

SEQ ID NO: 672635 - RNA, 22 nt, Human
cccaggcacauccacucuguga

SEQ ID NO: 672636 - RNA, 18 nt, Human
gacccaggaaagaguccu

SEQ ID NO: 672637 - RNA, 22 nt, Human
aaaaugaggaacggaucauggc

SEQ ID NO: 672638 - RNA, 22 nt, Human
ugauauuugcugacugcauugu

SEQ ID NO: 672639 - RNA, 22 nt, Human
caagauuuagccugcugccugu

SEQ ID NO: 672640 - RNA, 22 nt, Human
gagcaggugccuguagcucucu

SEQ ID NO: 672641 - RNA, 22 nt, Human
aacaggagucauugucauuauu

SEQ ID NO: 672642 - RNA, 22 nt, Human
gcaaaggcuagagacacaggga

SEQ ID NO: 672643 - RNA, 22 nt, Human
ccuuuaaauggauguucaacug

SEQ ID NO: 672644 - RNA, 22 nt, Human
auggcuaaaccugaacuggucu

SEQ ID NO: 672645 - RNA, 22 nt, Human
ugucaaugcuggucuugaauga

SEQ ID NO: 672646 - RNA, 22 nt, Human
ugugccagccucuggcuguguc

SEQ ID NO: 672647 - RNA, 22 nt, Human
uggcugaaucugcagcaggaag

SEQ ID NO: 672648 - RNA, 22 nt, Human
aacaaagaugggugggaaagag

SEQ ID NO: 672649 - RNA, 22 nt, Human
augauugaaaaugacauugcca

SEQ ID NO: 672650 - RNA, 22 nt, Human
gaguuauaaccuaguuuaacug

SEQ ID NO: 672651 - RNA, 22 nt, Human
ccuucucccucugagaggaacc

SEQ ID NO: 672652 - RNA, 22 nt, Human
cagcauguaucuuucaggugug

SEQ ID NO: 672653 - RNA, 22 nt, Human
cacacaauuaugugugcacaau

SEQ ID NO: 672654 - RNA, 22 nt, Human
ggaagccagaaagugagaauau

SEQ ID NO: 672655 - RNA, 22 nt, Human
caggccucagagaguggcgggg

SEQ ID NO: 672656 - RNA, 22 nt, Human
ggugggaaggggccagugugcg

SEQ ID NO: 672657 - RNA, 22 nt, Human
gaggcucaguuauuuuagccug

SEQ ID NO: 672658 - RNA, 22 nt, Human
agugcagccgagaucaggugcu

SEQ ID NO: 672659 - RNA, 22 nt, Human
uguggucucguuauguugccca

SEQ ID NO: 672660 - RNA, 22 nt, Human
gagcuguccuaccaggaguccu

SEQ ID NO: 672661 - RNA, 21 nt, Human
ugccuggccuuugcuuuuccu

SEQ ID NO: 672662 - RNA, 22 nt, Human
uaauacuugucauaaaggcauu

SEQ ID NO: 672663 - RNA, 22 nt, Human
cugcuucuaagaaccugcagcu

SEQ ID NO: 672664 - RNA, 22 nt, Human
uaacuuuggggacacuucucuu

SEQ ID NO: 672665 - RNA, 22 nt, Human
uguccaggucagcagcagggac

SEQ ID NO: 672666 - RNA, 22 nt, Human
uggccucugcacugggcucccc

SEQ ID NO: 672667 - RNA, 22 nt, Human
uuggcacaaauuucugaaauaa

SEQ ID NO: 672668 - RNA, 22 nt, Human
gggugguguauuagagcugcag

SEQ ID NO: 672669 - RNA, 22 nt, Human
cagaguucaaagccugcuggga

SEQ ID NO: 672670 - RNA, 22 nt, Human
aggguugccucugagugcuccg

SEQ ID NO: 672671 - RNA, 22 nt, Human
cuccugggagucuuccuggaug

SEQ ID NO: 672672 - RNA, 22 nt, Human
gcaggugaaugauggacuagga

SEQ ID NO: 672673 - RNA, 22 nt, Human
aauaauuagugggacagagaac

SEQ ID NO: 672674 - RNA, 22 nt, Human
cagcauguaagccacugcccug

SEQ ID NO: 672675 - RNA, 23 nt, Human
uuugaagaagugaauaucauaua

SEQ ID NO: 672676 - RNA, 22 nt, Human
agcugcugaagugagagaauug

SEQ ID NO: 672677 - RNA, 22 nt, Human
ggcuaggggaauaaucuguggu

SEQ ID NO: 672678 - RNA, 22 nt, Human
agggcuuuacuucucaguucua

SEQ ID NO: 672679 - RNA, 19 nt, Human
acauucccaucagcaaugu

SEQ ID NO: 672680 - RNA, 22 nt, Human
cccagcugaacuugcauuccaa

SEQ ID NO: 672681 - RNA, 22 nt, Human
ucucugcucaggcaccagcccu

SEQ ID NO: 672682 - RNA, 22 nt, Human
aaagcuaucaucaaugcaacuu

SEQ ID NO: 672683 - RNA, 22 nt, Human
uguuauuuauuucaccuccaga

SEQ ID NO: 672684 - RNA, 22 nt, Human
ucaggcaggaagggaggacuug

SEQ ID NO: 672685 - RNA, 22 nt, Human
gauagcugcugggauauuuuua

SEQ ID NO: 672686 - RNA, 22 nt, Human
ucaccucucuggccgucuaccu

SEQ ID NO: 672687 - RNA, 22 nt, Human
gccacccuuaucccaugcuucu

SEQ ID NO: 672688 - RNA, 22 nt, Human
aucuggcuccuacacuugaaga

SEQ ID NO: 672689 - RNA, 22 nt, Human
guggccaggcguccgcgcggcu

SEQ ID NO: 672690 - RNA, 22 nt, Human
gccuggagcagacgugucccgg

SEQ ID NO: 672691 - RNA, 22 nt, Human
auguacaaccugcaugacaguc

SEQ ID NO: 672692 - RNA, 22 nt, Human
augacagaugcuguggggaggu

SEQ ID NO: 672693 - RNA, 22 nt, Human
ugcucgagguccccaccggcuc

SEQ ID NO: 672694 - RNA, 22 nt, Human
caugucaacaggcccagaaaau

SEQ ID NO: 672695 - RNA, 22 nt, Human
ccauuauccauuuugagucuua

SEQ ID NO: 672696 - RNA, 22 nt, Human
uugaucuuacaguguucuucca

SEQ ID NO: 672697 - RNA, 22 nt, Human
cauuucuagagucccaagaggu

SEQ ID NO: 672698 - RNA, 22 nt, Human
cuggcuggcaaguagaacacaa

SEQ ID NO: 672699 - RNA, 22 nt, Human
gccaccucuuugucucugccgc

SEQ ID NO: 672700 - RNA, 23 nt, Human
cauggggagcagugcuccugacc

SEQ ID NO: 672701 - RNA, 22 nt, Human
aagaagagaaaugugcugcugg

SEQ ID NO: 672702 - RNA, 22 nt, Human
auguauuuuaagauuugccuca

SEQ ID NO: 672703 - RNA, 23 nt, Human
cagugcagggcaacucagacucc

SEQ ID NO: 672704 - RNA, 22 nt, Human
uguucagagacagaaauucuaa

SEQ ID NO: 672705 - RNA, 22 nt, Human
gcccucucggcauagcaggggc

SEQ ID NO: 672706 - RNA, 22 nt, Human
ucagaagggaaacacaagugac

SEQ ID NO: 672707 - RNA, 22 nt, Human
ccugggcaacauagugagaccc

SEQ ID NO: 672708 - RNA, 22 nt, Human
auguacaagcuguuuuacugca

SEQ ID NO: 672709 - RNA, 22 nt, Human
agauggcugauggcaggagcca

SEQ ID NO: 672710 - RNA, 22 nt, Human
accccagguccagguuacagag

SEQ ID NO: 672711 - RNA, 22 nt, Human
uggcuggaauauguggagacca

SEQ ID NO: 672712 - RNA, 22 nt, Human
gggugccugaguuagggcagaa

SEQ ID NO: 672713 - RNA, 22 nt, Human
gagacagaguuucacucuuguu

SEQ ID NO: 672714 - RNA, 22 nt, Human
cagugucucaaaacaaguugcu

SEQ ID NO: 672715 - RNA, 22 nt, Human
guacauauuaaaggucuauaaa

SEQ ID NO: 672716 - RNA, 22 nt, Human
aaagagcuaacauugccgagau

SEQ ID NO: 672717 - RNA, 20 nt, Human
uccagaggccacauccagug

SEQ ID NO: 672718 - RNA, 21 nt, Human
cacucaggguaugugccaggc

SEQ ID NO: 672719 - RNA, 22 nt, Human
ccuuuagagcaaacgccaccua

SEQ ID NO: 672720 - RNA, 22 nt, Human
ucaggaucaggggccuuuccuu

SEQ ID NO: 672721 - RNA, 22 nt, Human
uggaagagacacuuacauucag

SEQ ID NO: 672722 - RNA, 19 nt, Human
guuuugcaggcagagggga

SEQ ID NO: 672723 - RNA, 22 nt, Human
augcuucccucacauauccugg

SEQ ID NO: 672724 - RNA, 22 nt, Human
ucugguggcacgugucuugcau

SEQ ID NO: 672725 - RNA, 22 nt, Human
gccugcuuuaagucuguugccu

SEQ ID NO: 672726 - RNA, 22 nt, Human
ccuggcuuuagcugccuucccu

SEQ ID NO: 672727 - RNA, 22 nt, Human
agggaucacgguggacuuggau

SEQ ID NO: 672728 - RNA, 22 nt, Human
uuuaguauauaaaaagagaagu

SEQ ID NO: 672729 - RNA, 22 nt, Human
acagaaaaugccagaagggugg

SEQ ID NO: 672730 - RNA, 22 nt, Human
agauaacucauuuuguauaucc

SEQ ID NO: 672731 - RNA, 22 nt, Human
uccuguccugaggcuccaggcc

SEQ ID NO: 672732 - RNA, 22 nt, Human
uccacauuagaauguuuucuca

SEQ ID NO: 672733 - RNA, 22 nt, Human
cacaaaaucuuucucgauuauu

SEQ ID NO: 672734 - RNA, 22 nt, Human
uuuguuuucuguaggccuuucc

SEQ ID NO: 672735 - RNA, 22 nt, Human
augucuaaaagauaaaguuuaa

SEQ ID NO: 672736 - RNA, 22 nt, Human
cugugcguaaguagccaaaaua

SEQ ID NO: 672737 - RNA, 22 nt, Human
agucaggugguucugcuccacu

SEQ ID NO: 672738 - RNA, 22 nt, Human
ucagaggaggcauuuaaacaga

SEQ ID NO: 672739 - RNA, 22 nt, Human
cuggcucccguuguccuugaag

SEQ ID NO: 672740 - RNA, 22 nt, Human
cccuucaagcucucuggguuuu

SEQ ID NO: 672741 - RNA, 22 nt, Human
uucuccugcgcaggcccaggga

SEQ ID NO: 672742 - RNA, 22 nt, Human
acuuucuucuacuacuuggaga

SEQ ID NO: 672743 - RNA, 22 nt, Human
caguauuuucaggauuuggaag

SEQ ID NO: 672744 - RNA, 22 nt, Human
aagcauaaaacguuacaacaug

SEQ ID NO: 672745 - RNA, 22 nt, Human
uaagccacuagucuguuaugaa

SEQ ID NO: 672746 - RNA, 22 nt, Human
cauguguuucgagacuguugag

SEQ ID NO: 672747 - RNA, 22 nt, Human
cagaagacagcuguuucacucg

SEQ ID NO: 672748 - RNA, 22 nt, Human
ggccacagugggaaauccuggg

SEQ ID NO: 672749 - RNA, 22 nt, Human
agcucugggggaaagucugcuc

SEQ ID NO: 672750 - RNA, 22 nt, Human
auguucaaacuuuuuacacacc

SEQ ID NO: 672751 - RNA, 22 nt, Human
gcugaugggagcuggcucaccc

SEQ ID NO: 672752 - RNA, 22 nt, Human
uucucaaagugugcucccugga

SEQ ID NO: 672753 - RNA, 22 nt, Human
aagacccuauacucagugaccc

SEQ ID NO: 672754 - RNA, 22 nt, Human
ugcagggauuagaggccgggga

SEQ ID NO: 672755 - RNA, 19 nt, Human
ugucccagacuccgugucu

SEQ ID NO: 672756 - RNA, 22 nt, Human
ucuagaaagccaaauuaggaau

SEQ ID NO: 672757 - RNA, 22 nt, Human
ucuggcaggaccaugaagcgua

SEQ ID NO: 672758 - RNA, 22 nt, Human
ucauuuaugcaggaauggcaua

SEQ ID NO: 672759 - RNA, 22 nt, Human
ucaucugaaauuguauauguag

SEQ ID NO: 672760 - RNA, 18 nt, Human
uaacaucggcuaugcauc

SEQ ID NO: 672761 - RNA, 22 nt, Human
uuaaucucuuagcaaauuaaug

SEQ ID NO: 672762 - RNA, 22 nt, Human
ugaggggaacugaugcccauug

SEQ ID NO: 672763 - RNA, 22 nt, Human
caguagcauguaauaaagacag

SEQ ID NO: 672764 - RNA, 22 nt, Human
ccaguguuauuuuagaguguga

SEQ ID NO: 672765 - RNA, 22 nt, Human
uagucacaggaaguuucaaugu

SEQ ID NO: 672766 - RNA, 22 nt, Human
cuucaaauccuguguagggcua

SEQ ID NO: 672767 - RNA, 22 nt, Human
cucagugguggucacuuggugg

SEQ ID NO: 672768 - RNA, 22 nt, Human
gggaccugcgccacucacuguc

SEQ ID NO: 672769 - RNA, 22 nt, Human
cccuggagguggagguugcagg

SEQ ID NO: 672770 - RNA, 21 nt, Human
aagccucaagcagaagacaga

SEQ ID NO: 672771 - RNA, 18 nt, Human
uauauuucacacauauuc

SEQ ID NO: 672772 - RNA, 22 nt, Human
ugacauuuuuguacaaagucag

SEQ ID NO: 672773 - RNA, 22 nt, Human
agcuuccucaccucagaggucu

SEQ ID NO: 672774 - RNA, 22 nt, Human
ugucucuugagcugccugaugc

SEQ ID NO: 672775 - RNA, 22 nt, Human
gacccaggagagaggguugcau

SEQ ID NO: 672776 - RNA, 22 nt, Human
uauugucuaggaauuguuuaaa

SEQ ID NO: 672777 - RNA, 22 nt, Human
guguuuccucuagaagccaugg

SEQ ID NO: 672778 - RNA, 22 nt, Human
aagggcacagggaaagagugca

SEQ ID NO: 672779 - RNA, 22 nt, Human
aacccaggaguuggaggcugug

SEQ ID NO: 672780 - RNA, 22 nt, Human
aacauucuaugugcauucagaa

SEQ ID NO: 672781 - RNA, 22 nt, Human
auauauuacaaaagaggaagga

SEQ ID NO: 672782 - RNA, 22 nt, Human
acagguguugacucacaggccc

SEQ ID NO: 672783 - RNA, 22 nt, Human
ucagcacuuuuacucucuuugc

SEQ ID NO: 672784 - RNA, 22 nt, Human
aaugaggccaguagaaggaagu

SEQ ID NO: 672785 - RNA, 22 nt, Human
aagaugaaaauuuacugugaug

SEQ ID NO: 672786 - RNA, 22 nt, Human
gcugccuuagagggagugguuc

SEQ ID NO: 672787 - RNA, 22 nt, Human
guucuuuaaguggagaaggaaa

SEQ ID NO: 672788 - RNA, 22 nt, Human
ggucucaggagacuggagagca

SEQ ID NO: 672789 - RNA, 22 nt, Human
uuucacaacacaaucucguuaa

SEQ ID NO: 672790 - RNA, 22 nt, Human
uuggcucaaaacuuagauucca

SEQ ID NO: 672791 - RNA, 22 nt, Human
aaccugcaguuuuuauucugag

SEQ ID NO: 672792 - RNA, 22 nt, Human
uggcauguacccaggaauggac

SEQ ID NO: 672793 - RNA, 22 nt, Human
uuccugagaacauggcagcuua

SEQ ID NO: 672794 - RNA, 22 nt, Human
agugcugaggccauacuccaua

SEQ ID NO: 672795 - RNA, 22 nt, Human
agcagccuggacuuggaugugg

SEQ ID NO: 672796 - RNA, 22 nt, Human
cugucccagccccguacucuaa

SEQ ID NO: 672797 - RNA, 22 nt, Human
aucaaaguggaaguuuacuagg

SEQ ID NO: 672798 - RNA, 21 nt, Human
uucuccaggcaaccauuucag

SEQ ID NO: 672799 - RNA, 22 nt, Human
uucucagauccaucagaagucc

SEQ ID NO: 672800 - RNA, 22 nt, Human
aaccugaauuacuuuugcacca

SEQ ID NO: 672801 - RNA, 22 nt, Human
gugaaugccgcagucuguugcu

SEQ ID NO: 672802 - RNA, 22 nt, Human
gcagaggagcaagcuggacacc

SEQ ID NO: 672803 - RNA, 22 nt, Human
gugagcuguuuuggacccaucu

SEQ ID NO: 672804 - RNA, 22 nt, Human
gcagcagugucucccaucuugc

SEQ ID NO: 672805 - RNA, 22 nt, Human
caggaaauuuaagaguguacaa

SEQ ID NO: 672806 - RNA, 22 nt, Human
ccuucacacagguagaagcaga

SEQ ID NO: 672807 - RNA, 22 nt, Human
cagggccacuguagaugaggag

SEQ ID NO: 672808 - RNA, 22 nt, Human
cuggggagaagcgacucggcug

SEQ ID NO: 672809 - RNA, 22 nt, Human
cugagcgcgggaccugaggcug

SEQ ID NO: 672810 - RNA, 21 nt, Human
uccaggggccagcacccaagc

SEQ ID NO: 672811 - RNA, 22 nt, Human
ggcuccugauuugagggggcug

SEQ ID NO: 672812 - RNA, 23 nt, Human
agccccucauaucugcuuucucu

SEQ ID NO: 672813 - RNA, 22 nt, Human
agugaaauaaagcugccuaugg

SEQ ID NO: 672814 - RNA, 21 nt, Human
ugauggaaaggauuuuggguc

SEQ ID NO: 672815 - RNA, 22 nt, Human
cucagacacagccccacgaagu

SEQ ID NO: 672816 - RNA, 22 nt, Human
aaucuggcauuugagaguagga

SEQ ID NO: 672817 - RNA, 21 nt, Human
uagagaaaagaagcuguuccu

SEQ ID NO: 672818 - RNA, 22 nt, Human
agcagcugccagagagaguucc

SEQ ID NO: 672819 - RNA, 22 nt, Human
aaucuguugucaggaauccaca

SEQ ID NO: 672820 - RNA, 22 nt, Human
ucagccauggugagagugagag

SEQ ID NO: 672821 - RNA, 22 nt, Human
uuaagaggagaucauacuggag

SEQ ID NO: 672822 - RNA, 22 nt, Human
cuaugagaagaaaacaagauua

SEQ ID NO: 672823 - RNA, 23 nt, Human
gcacucaucugaagcuauggugc

SEQ ID NO: 672824 - RNA, 22 nt, Human
cugggcuuaggaccuggugcgg

SEQ ID NO: 672825 - RNA, 22 nt, Human
auucaaacaggccaauugaccu

SEQ ID NO: 672826 - RNA, 22 nt, Human
guuucuaagggagagcugccag

SEQ ID NO: 672827 - RNA, 22 nt, Human
gagcccugugauucuguugugu

SEQ ID NO: 672828 - RNA, 22 nt, Human
uggagucaugauggcugcugau

SEQ ID NO: 672829 - RNA, 22 nt, Human
gagggugggcuccuaucugggu

SEQ ID NO: 672830 - RNA, 22 nt, Human
guggccagccccauggacaguu

SEQ ID NO: 672831 - RNA, 22 nt, Human
uugaguguaaggaauguggggc

SEQ ID NO: 672832 - RNA, 22 nt, Human
gagaauaaaucuaaaguuucuu

SEQ ID NO: 672833 - RNA, 22 nt, Human
aaaggcagagugcucagcuggc

SEQ ID NO: 672834 - RNA, 22 nt, Human
aaaguagcuuuguagguacagu

SEQ ID NO: 672835 - RNA, 22 nt, Human
uuuguuugaaagucucuacagc

SEQ ID NO: 672836 - RNA, 22 nt, Human
uaaagucauaagaguggauccg

SEQ ID NO: 672837 - RNA, 22 nt, Human
ucuggguccgggacuguggaug

SEQ ID NO: 672838 - RNA, 22 nt, Human
aaacaucugacuugcuuuuuca

SEQ ID NO: 672839 - RNA, 22 nt, Human
cugcaguguucuggaaugcauu

SEQ ID NO: 672840 - RNA, 22 nt, Human
ucacuccucauugcugcccauu

SEQ ID NO: 672841 - RNA, 19 nt, Human
aaugaguuccaugaaaaga

SEQ ID NO: 672842 - RNA, 18 nt, Human
ucuuuuguccccugcugc

SEQ ID NO: 672843 - RNA, 22 nt, Human
auuauuggacacuucuucugca

SEQ ID NO: 672844 - RNA, 22 nt, Human
cauggaaugugaguuguuuagu

SEQ ID NO: 672845 - RNA, 22 nt, Human
uagaaacagcauauauuagccc

SEQ ID NO: 672846 - RNA, 22 nt, Human
auuccuaaggaaggcuggcaag

SEQ ID NO: 672847 - RNA, 22 nt, Human
gugccaccucugccccagaggg

SEQ ID NO: 672848 - RNA, 22 nt, Human
gagggguccaggaggcacuuac

SEQ ID NO: 672849 - RNA, 22 nt, Human
cagagccauccaggugccuguu

SEQ ID NO: 672850 - RNA, 22 nt, Human
ugucuucuguauucaagucuau

SEQ ID NO: 672851 - RNA, 22 nt, Human
cagaagccugccucagaugcac

SEQ ID NO: 672852 - RNA, 22 nt, Human
cuggaguuuguggcuugcucaa

SEQ ID NO: 672853 - RNA, 22 nt, Human
uagugucugacauuuaagagca

SEQ ID NO: 672854 - RNA, 22 nt, Human
aucaggaauuaggugagaugga

SEQ ID NO: 672855 - RNA, 22 nt, Human
acagugauuucauccuucuggg

SEQ ID NO: 672856 - RNA, 19 nt, Human
ucuugaugagguuucucca

SEQ ID NO: 672857 - RNA, 22 nt, Human
ccuggcacaagagcagcauugg

SEQ ID NO: 672858 - RNA, 22 nt, Human
uauauguaagcuauguaagagu

SEQ ID NO: 672859 - RNA, 22 nt, Human
guagaauuaccucucuaugucc

SEQ ID NO: 672860 - RNA, 22 nt, Human
gccaagcuggaugaagagguug

SEQ ID NO: 672861 - RNA, 22 nt, Human
uggagcaggugccaggugugug

SEQ ID NO: 672862 - RNA, 22 nt, Human
aguucaugugguuuaacuuaau

SEQ ID NO: 672863 - RNA, 22 nt, Human
ccucacagccucaugcccagcc

SEQ ID NO: 672864 - RNA, 23 nt, Human
acagaucaucucgaaacaacuau

SEQ ID NO: 672865 - RNA, 22 nt, Human
caggccggggcggcgccaucuu

SEQ ID NO: 672866 - RNA, 22 nt, Human
gggagcugaaggagccggcggg

SEQ ID NO: 672867 - RNA, 22 nt, Human
agaagauguugcaguugaugcg

SEQ ID NO: 672868 - RNA, 22 nt, Human
acaaauuggguaugagcuaaga

SEQ ID NO: 672869 - RNA, 22 nt, Human
accuccccauuaggucacccac

SEQ ID NO: 672870 - RNA, 22 nt, Human
aaacaucaccauuuuaccuaau

SEQ ID NO: 672871 - RNA, 22 nt, Human
gcauccauggagagcacucuga

SEQ ID NO: 672872 - RNA, 21 nt, Human
ugcuggccucaagggugacuu

SEQ ID NO: 672873 - RNA, 22 nt, Human
cugggacuugggcuaugcucug

SEQ ID NO: 672874 - RNA, 22 nt, Human
uguuaaaaaugcagauuccuau

SEQ ID NO: 672875 - RNA, 22 nt, Human
ucuucuuuaugucauaugccag

SEQ ID NO: 672876 - RNA, 22 nt, Human
uggcuggcugucaguaggcugu

SEQ ID NO: 672877 - RNA, 22 nt, Human
aaagguaguacuucuagaaggg

SEQ ID NO: 672878 - RNA, 22 nt, Human
uugccuugauucuucucaugug

SEQ ID NO: 672879 - RNA, 22 nt, Human
uaagaacauaaauucauacggg

SEQ ID NO: 672880 - RNA, 22 nt, Human
uggagagccuggagucccugau

SEQ ID NO: 672881 - RNA, 22 nt, Human
uagauucucccaucaugagaug

SEQ ID NO: 672882 - RNA, 22 nt, Human
cuggaagaggggaaaugccaug

SEQ ID NO: 672883 - RNA, 23 nt, Human
ucagaggaucaucaaacguuuuc

SEQ ID NO: 672884 - RNA, 22 nt, Human
gcgcaggagccgcggagggccg

SEQ ID NO: 672885 - RNA, 22 nt, Human
acugugugccaggcgcuggucu

SEQ ID NO: 672886 - RNA, 22 nt, Human
uguggaaaaaccacaaguuugg

SEQ ID NO: 672887 - RNA, 23 nt, Human
agcaggcugcuucuccacagcug

SEQ ID NO: 672888 - RNA, 22 nt, Human
auggggcuagacaaccagugcc

SEQ ID NO: 672889 - RNA, 22 nt, Human
augccuuugccacagauuagga

SEQ ID NO: 672890 - RNA, 22 nt, Human
aggagaaagacuggacagccaa

SEQ ID NO: 672891 - RNA, 22 nt, Human
auucugacuuucaucugccuuu

SEQ ID NO: 672892 - RNA, 22 nt, Human
cagacccaggauccaaauguug

SEQ ID NO: 672893 - RNA, 22 nt, Human
aaacauucacucucaauuuuag

SEQ ID NO: 672894 - RNA, 22 nt, Human
gccccaccuugagagcagaaac

SEQ ID NO: 672895 - RNA, 22 nt, Human
gaugcauucgggauguuuacuu

SEQ ID NO: 672896 - RNA, 22 nt, Human
agcccagugggccgaggcgggg

SEQ ID NO: 672897 - RNA, 22 nt, Human
caggggccggcuguccgugccc

SEQ ID NO: 672898 - RNA, 22 nt, Human
ucugugacuugcgggaggagaa

SEQ ID NO: 672899 - RNA, 22 nt, Human
augcaaagcaccacacuaagau

SEQ ID NO: 672900 - RNA, 22 nt, Human
gaaagaaugagcaucaugacuu

SEQ ID NO: 672901 - RNA, 22 nt, Human
aucucuggccccugggguccga

SEQ ID NO: 672902 - RNA, 22 nt, Human
gaccccaggcagaucagggggu

SEQ ID NO: 672903 - RNA, 17 nt, Human
auuugugauguaacguc

SEQ ID NO: 672904 - RNA, 22 nt, Human
acaaucacacaugcaauuauac

SEQ ID NO: 672905 - RNA, 20 nt, Human
acugugaaugcugaauuagc

SEQ ID NO: 672906 - RNA, 22 nt, Human
ccugccaggccagugagcuucc

SEQ ID NO: 672907 - RNA, 22 nt, Human
uagcuuuagaaauauucucaga

SEQ ID NO: 672908 - RNA, 17 nt, Human
ccaaggcuauuuguagu

SEQ ID NO: 672909 - RNA, 20 nt, Human
aggggccuggaacaggccuu

SEQ ID NO: 672910 - RNA, 22 nt, Human
ugcauuaaaaugugccucucuu

SEQ ID NO: 672911 - RNA, 22 nt, Human
aagaguuagcucaauaacuuga

SEQ ID NO: 672912 - RNA, 22 nt, Human
uccugagcaccuaugccauggc

SEQ ID NO: 672913 - RNA, 22 nt, Human
ucugccacaugagggcacagca

SEQ ID NO: 672914 - RNA, 22 nt, Human
agugcauucucuaauuacaggu

SEQ ID NO: 672915 - RNA, 22 nt, Human
gcaggaguuagagguuuaaucu

SEQ ID NO: 672916 - RNA, 22 nt, Human
cccaggcacucuuggucauuuu

SEQ ID NO: 672917 - RNA, 22 nt, Human
uuccucagaaaauacuguccaa

SEQ ID NO: 672918 - RNA, 19 nt, Human
acaggggcuagcggaagca

SEQ ID NO: 672919 - RNA, 22 nt, Human
auuucucuaagcauccguuugc

SEQ ID NO: 672920 - RNA, 22 nt, Human
ccagcccucacugaggccucuc

SEQ ID NO: 672921 - RNA, 20 nt, Human
agccaggcucaagcuccccc

SEQ ID NO: 672922 - RNA, 22 nt, Human
aucuggcuuacgaagcacuggu

SEQ ID NO: 672923 - RNA, 23 nt, Human
uggucucacuugguaagaugaag

SEQ ID NO: 672924 - RNA, 20 nt, Human
cagcccugugaccuggcccu

SEQ ID NO: 672925 - RNA, 22 nt, Human
cauccugagaggucucucuacc

SEQ ID NO: 672926 - RNA, 22 nt, Human
gccaggagaaugcuagcagagg

SEQ ID NO: 672927 - RNA, 22 nt, Human
uggccaggccucuuggugccca

SEQ ID NO: 672928 - RNA, 22 nt, Human
agacaauuaaaaaauuaugcuu

SEQ ID NO: 672929 - RNA, 22 nt, Human
aggcuggcuucccaagcguccu

SEQ ID NO: 672930 - RNA, 22 nt, Human
uugcugugucugauggcugaga

SEQ ID NO: 672931 - RNA, 22 nt, Human
ccaaggcauauggcugaaacca

SEQ ID NO: 672932 - RNA, 22 nt, Human
agugugagugcucauguccauc

SEQ ID NO: 672933 - RNA, 22 nt, Human
acuaaauaguuuugacagaaca

SEQ ID NO: 672934 - RNA, 22 nt, Human
ggaaguguuuccuugggcagca

SEQ ID NO: 672935 - RNA, 22 nt, Human
aaggggaagagaccgcagaguc

SEQ ID NO: 672936 - RNA, 22 nt, Human
uuacacagugcacaagcagagu

SEQ ID NO: 672937 - RNA, 23 nt, Human
agaugagccaacaccuccaugcc

SEQ ID NO: 672938 - RNA, 22 nt, Human
cucccuggcacagcgagagguu

SEQ ID NO: 672939 - RNA, 23 nt, Human
agcugugugcgcguccggguucu

SEQ ID NO: 672940 - RNA, 22 nt, Human
uucaaacauucaaauaaaccgg

SEQ ID NO: 672941 - RNA, 22 nt, Human
gcugagggggaaggaaagcuga

SEQ ID NO: 672942 - RNA, 22 nt, Human
gcucuccaggggcucccaggau

SEQ ID NO: 672943 - RNA, 22 nt, Human
cccugaaauccugugcucugug

SEQ ID NO: 672944 - RNA, 22 nt, Human
cgcaggcuccggggugcccugg

SEQ ID NO: 672945 - RNA, 22 nt, Human
auugaguaauaauugaucuugg

SEQ ID NO: 672946 - RNA, 22 nt, Human
uucucuccaguccuggauucug

SEQ ID NO: 672947 - RNA, 22 nt, Human
ugcuagaaaucugaaacuagca

SEQ ID NO: 672948 - RNA, 20 nt, Human
uuugauuucacaaggccagu

SEQ ID NO: 672949 - RNA, 22 nt, Human
ggcuuccugggcauguguucua

SEQ ID NO: 672950 - RNA, 20 nt, Human
ccucaguguccuggacuggg

SEQ ID NO: 672951 - RNA, 22 nt, Human
gcucauccagcaagccagggcc

SEQ ID NO: 672952 - RNA, 20 nt, Human
uguuucuuuuaaugagcggc

SEQ ID NO: 672953 - RNA, 22 nt, Human
aaaagcaguuaucugggaggaa

SEQ ID NO: 672954 - RNA, 22 nt, Human
cugagguggcauccuagcucua

SEQ ID NO: 672955 - RNA, 22 nt, Human
ggaucuucagccagcaggugcc

SEQ ID NO: 672956 - RNA, 22 nt, Human
auuaauauccugcuggcuaaau

SEQ ID NO: 672957 - RNA, 22 nt, Human
gcccugugugaucacaugaaca

SEQ ID NO: 672958 - RNA, 22 nt, Human
cagcccagcagacuguuaccac

SEQ ID NO: 672959 - RNA, 22 nt, Human
acugaggcuuacaaagguaaag

SEQ ID NO: 672960 - RNA, 22 nt, Human
ccagagccuggcaucugcauaa

SEQ ID NO: 672961 - RNA, 22 nt, Human
gauucaaagacagacucauuuc

SEQ ID NO: 672962 - RNA, 22 nt, Human
uuuuauguaauaaacuguacac

SEQ ID NO: 672963 - RNA, 17 nt, Human
cugagccccgggcagcu

SEQ ID NO: 672964 - RNA, 22 nt, Human
gggaucugacuugcuggugggu

SEQ ID NO: 672965 - RNA, 22 nt, Human
accagcugccaagggcuacacu

SEQ ID NO: 672966 - RNA, 18 nt, Human
cucagagaugcccuuauu

SEQ ID NO: 672967 - RNA, 22 nt, Human
aauaugaauuauuguuacaagu

SEQ ID NO: 672968 - RNA, 22 nt, Human
auagcacuuauuguaugcugag

SEQ ID NO: 672969 - RNA, 22 nt, Human
gggaagguauuuagcugcugaa

SEQ ID NO: 672970 - RNA, 22 nt, Human
ccacugucagaggggcugugcc

SEQ ID NO: 672971 - RNA, 22 nt, Human
ccauuuuuaaagagcuuaagua

SEQ ID NO: 672972 - RNA, 22 nt, Human
ugcccccuuuucuuguuacacu

SEQ ID NO: 672973 - RNA, 22 nt, Human
gcagggaggaagagaugcuucc

SEQ ID NO: 672974 - RNA, 23 nt, Human
agccacuucuaucuugcuccugg

SEQ ID NO: 672975 - RNA, 22 nt, Human
uauguauaugguagaaguaugu

SEQ ID NO: 672976 - RNA, 22 nt, Human
uuuccuacccuuccaggcagag

SEQ ID NO: 672977 - RNA, 22 nt, Human
aggagacagaauuuaaauuugg

SEQ ID NO: 672978 - RNA, 17 nt, Human
gucaauauuguugacag

SEQ ID NO: 672979 - RNA, 22 nt, Human
aguuaaacuuugccagauggga

SEQ ID NO: 672980 - RNA, 22 nt, Human
cuauuagguaugugguugcuau

SEQ ID NO: 672981 - RNA, 22 nt, Human
uugagaaacaucuaaucuuugu

SEQ ID NO: 672982 - RNA, 22 nt, Human
acacauuauagagaguauaaua

SEQ ID NO: 672983 - RNA, 21 nt, Human
gcuuucuguggacucugcacc

SEQ ID NO: 672984 - RNA, 19 nt, Human
ucaugucucucaucuguga

SEQ ID NO: 672985 - RNA, 22 nt, Human
cugcagcaagagaagugcugac

SEQ ID NO: 672986 - RNA, 17 nt, Human
augugucuagugcaacc

SEQ ID NO: 672987 - RNA, 22 nt, Human
uggaggaaguugcuggaaguca

SEQ ID NO: 672988 - RNA, 22 nt, Human
acuagaaaguuuccagaguuau

SEQ ID NO: 672989 - RNA, 22 nt, Human
caggggaaggagccuugaaacu

SEQ ID NO: 672990 - RNA, 22 nt, Human
cucuggcacacuccuuccaggu

SEQ ID NO: 672991 - RNA, 22 nt, Human
gacaucauggagaggauaaaua

SEQ ID NO: 672992 - RNA, 22 nt, Human
ccacaucauggauacaguuaug

SEQ ID NO: 672993 - RNA, 22 nt, Human
gauucaaaaguuugagcuccaa

SEQ ID NO: 672994 - RNA, 22 nt, Human
guuugauucaagaacaaagagu

SEQ ID NO: 672995 - RNA, 23 nt, Human
ccaagacuguuaggaguggggag

SEQ ID NO: 672996 - RNA, 22 nt, Human
gugguccaaggaguuuccagca

SEQ ID NO: 672997 - RNA, 22 nt, Human
caagcuggagguuggagcuacu

SEQ ID NO: 672998 - RNA, 22 nt, Human
gcagcagugcuuuggaauccug

SEQ ID NO: 672999 - RNA, 22 nt, Human
gaguagaacuagaauucuucaa

SEQ ID NO: 673000 - RNA, 22 nt, Human
ucagcccaucacucacguauua

SEQ ID NO: 673001 - RNA, 22 nt, Human
agcugccucccugugcuugucc

SEQ ID NO: 673002 - RNA, 22 nt, Human
gcacauuucucaaagaauuguc

SEQ ID NO: 673003 - RNA, 23 nt, Human
agccucagccgguggcagaagug

SEQ ID NO: 673004 - RNA, 21 nt, Human
uaaauaauaaguugcugagau

SEQ ID NO: 673005 - RNA, 22 nt, Human
gccaagggggcagugcaugggu

SEQ ID NO: 673006 - RNA, 22 nt, Human
gagcucugacugcugggugaca

SEQ ID NO: 673007 - RNA, 20 nt, Human
uacaaagagccccucucuuc

SEQ ID NO: 673008 - RNA, 22 nt, Human
uggaggcagucaccugaaguca

SEQ ID NO: 673009 - RNA, 22 nt, Human
gucugaaaaugcccuacgauug

SEQ ID NO: 673010 - RNA, 22 nt, Human
gcccuggggaaggugucuccaa

SEQ ID NO: 673011 - RNA, 22 nt, Human
ggagauguagugucacuggacu

SEQ ID NO: 673012 - RNA, 22 nt, Human
agccaaaucuaaagugaauauu

SEQ ID NO: 673013 - RNA, 22 nt, Human
cccagcaguaaccaguggaaau

SEQ ID NO: 673014 - RNA, 22 nt, Human
ucaaagaacaucaucugaaaug

SEQ ID NO: 673015 - RNA, 22 nt, Human
gcugaauaggggucccaaagau

SEQ ID NO: 673016 - RNA, 22 nt, Human
gugcacagaaacauacaaugug

SEQ ID NO: 673017 - RNA, 22 nt, Human
gcaugucaugucauguaggaau

SEQ ID NO: 673018 - RNA, 22 nt, Human
agcacuagagccaaaauuuggg

SEQ ID NO: 673019 - RNA, 22 nt, Human
ugccagugaaacguggucucau

SEQ ID NO: 673020 - RNA, 22 nt, Human
acucugcuuauugcugcaggca

SEQ ID NO: 673021 - RNA, 20 nt, Human
ggaaggcuguuuuuccacca

SEQ ID NO: 673022 - RNA, 22 nt, Human
ggcaugggccgaggugccuccu

SEQ ID NO: 673023 - RNA, 22 nt, Human
ucaaauaugugauagaagcuaa

SEQ ID NO: 673024 - RNA, 22 nt, Human
ugcagaagcagagccgguggcc

SEQ ID NO: 673025 - RNA, 22 nt, Human
cucuggaagaauacacuuagaa

SEQ ID NO: 673026 - RNA, 22 nt, Human
gggucgggcaggcgcccucguc

SEQ ID NO: 673027 - RNA, 22 nt, Human
aaaauuauagaucuagugccug

SEQ ID NO: 673028 - RNA, 22 nt, Human
ucugcaggucacgcuccagccu

SEQ ID NO: 673029 - RNA, 22 nt, Human
caguggaaaucagagugagagu

SEQ ID NO: 673030 - RNA, 22 nt, Human
ccuggaaagcugcccugugaca

SEQ ID NO: 673031 - RNA, 22 nt, Human
ugaguucaaauuuuggcucugc

SEQ ID NO: 673032 - RNA, 21 nt, Human
gcaugccugcaucuuaguguu

SEQ ID NO: 673033 - RNA, 22 nt, Human
accucccagaaaguuuugcagg

SEQ ID NO: 673034 - RNA, 22 nt, Human
acagauaauuuaauuaaugcau

SEQ ID NO: 673035 - RNA, 22 nt, Human
uaguuucauaugcaaaauagua

SEQ ID NO: 673036 - RNA, 22 nt, Human
aaguaugcuaauuaacuagcac

SEQ ID NO: 673037 - RNA, 22 nt, Human
ucucuagagcaugugcugggca

SEQ ID NO: 673038 - RNA, 22 nt, Human
caaauagacuucaaucucuuga

SEQ ID NO: 673039 - RNA, 22 nt, Human
uuuccauauucugcgucugcca

SEQ ID NO: 673040 - RNA, 22 nt, Human
gcucucaaguccuuuugcucag

SEQ ID NO: 673041 - RNA, 22 nt, Human
cugucccauccuuacucuaccc

SEQ ID NO: 673042 - RNA, 22 nt, Human
cuguggcugcguaggucuggca

SEQ ID NO: 673043 - RNA, 22 nt, Human
auaugcauaugucaaaacuuau

SEQ ID NO: 673044 - RNA, 22 nt, Human
aaagaguucuaugaucuuucca

SEQ ID NO: 673045 - RNA, 22 nt, Human
uuucuguuuagcauaaaguggc

SEQ ID NO: 673046 - RNA, 22 nt, Human
aacaguuucaguuacugaugag

SEQ ID NO: 673047 - RNA, 22 nt, Human
cccagggcugcagauggaggcu

SEQ ID NO: 673048 - RNA, 22 nt, Human
auuuacuaaugucauaucgcgu

SEQ ID NO: 673049 - RNA, 22 nt, Human
auucugcaacuguuguuggugg

SEQ ID NO: 673050 - RNA, 22 nt, Human
ugcauuaagggccuggagauac

SEQ ID NO: 673051 - RNA, 22 nt, Human
gagguuuuaaguugaaggggga

SEQ ID NO: 673052 - RNA, 22 nt, Human
ucacagcuguuuuguccauuaa

SEQ ID NO: 673053 - RNA, 22 nt, Human
cagaaaggacuuugguuggcuu

SEQ ID NO: 673054 - RNA, 22 nt, Human
agucuggggucugguagaacga

SEQ ID NO: 673055 - RNA, 22 nt, Human
uaaggcacuucaauguuuagaa

SEQ ID NO: 673056 - RNA, 22 nt, Human
ucuuccagucuguaggacuagg

SEQ ID NO: 673057 - RNA, 22 nt, Human
cugagaaaaguaugagcucugg

SEQ ID NO: 673058 - RNA, 22 nt, Human
aguggcuggaauugcaggugcg

SEQ ID NO: 673059 - RNA, 22 nt, Human
auuucucacaaaguugcuuauc

SEQ ID NO: 673060 - RNA, 22 nt, Human
gcagagcuucuguccuucagga

SEQ ID NO: 673061 - RNA, 22 nt, Human
uauggcuugucccuggucaguc

SEQ ID NO: 673062 - RNA, 22 nt, Human
ggaagccaguugcuuggugugg

SEQ ID NO: 673063 - RNA, 22 nt, Human
ugagaaagugggugccuagcaa

SEQ ID NO: 673064 - RNA, 17 nt, Human
gcaucacagauaacacg

SEQ ID NO: 673065 - RNA, 22 nt, Human
agugugagaugauugaggagca

SEQ ID NO: 673066 - RNA, 22 nt, Human
uuauuccacagcucagaauuuu

SEQ ID NO: 673067 - RNA, 22 nt, Human
ugaagguggcauaggagagaug

SEQ ID NO: 673068 - RNA, 22 nt, Human
uggggccacagccuccuagcuu

SEQ ID NO: 673069 - RNA, 22 nt, Human
cuuauuuaaugaggguuagaau

SEQ ID NO: 673070 - RNA, 22 nt, Human
uguggaauguccucagcauccu

SEQ ID NO: 673071 - RNA, 22 nt, Human
cagucuccgccagcuccucaca

SEQ ID NO: 673072 - RNA, 22 nt, Human
gcacuugaucauuguuacagau

SEQ ID NO: 673073 - RNA, 22 nt, Human
auagaaauggcagcuggugcua

SEQ ID NO: 673074 - RNA, 22 nt, Human
cuggcauucuuguuucuggaaa

SEQ ID NO: 673075 - RNA, 22 nt, Human
uugcuugcccugcagcauacuu

SEQ ID NO: 673076 - RNA, 22 nt, Human
aacugaaacuuaggaaguaauc

SEQ ID NO: 673077 - RNA, 22 nt, Human
uccagauagaguccuguuagua

SEQ ID NO: 673078 - RNA, 22 nt, Human
caggugcuucuguaagaaagac

SEQ ID NO: 673079 - RNA, 22 nt, Human
gagcaagguagcucucuggggc

SEQ ID NO: 673080 - RNA, 22 nt, Human
gaggagcugaggcugaggccuc

SEQ ID NO: 673081 - RNA, 22 nt, Human
agcugauacauuucuuguagcc

SEQ ID NO: 673082 - RNA, 22 nt, Human
ugggccugauuuaucaucuuca

SEQ ID NO: 673083 - RNA, 18 nt, Human
agcagcugucagaaugcc

SEQ ID NO: 673084 - RNA, 22 nt, Human
ucuucaaguuccaaagugcagg

SEQ ID NO: 673085 - RNA, 22 nt, Human
gccagcccauuaaccccugucc

SEQ ID NO: 673086 - RNA, 22 nt, Human
gaaaaugccucuggcauuaaac

SEQ ID NO: 673087 - RNA, 22 nt, Human
ggcagacuuuuucucugaaggg

SEQ ID NO: 673088 - RNA, 22 nt, Human
aaccccaggcuggaggagucuc

SEQ ID NO: 673089 - RNA, 22 nt, Human
guuuccugacccuggcccagca

SEQ ID NO: 673090 - RNA, 22 nt, Human
gguaacacaggugcaguuuuaa

SEQ ID NO: 673091 - RNA, 22 nt, Human
ugugugcacuuaaugcaaucau

SEQ ID NO: 673092 - RNA, 22 nt, Human
ucagcuucuccaagugacaugg

SEQ ID NO: 673093 - RNA, 22 nt, Human
acauuucucagguaagucauuu

SEQ ID NO: 673094 - RNA, 22 nt, Human
acccaaagcaauauucaucagu

SEQ ID NO: 673095 - RNA, 22 nt, Human
agcagguggacagaggaagaaa

SEQ ID NO: 673096 - RNA, 22 nt, Human
gaguccugcccuuguguagucc

SEQ ID NO: 673097 - RNA, 22 nt, Human
uuucagaagucaacuagguaaa

SEQ ID NO: 673098 - RNA, 22 nt, Human
aguggcaggcagaagcuucuca

SEQ ID NO: 673099 - RNA, 22 nt, Human
cuggaaaaugaagaagcagagg

SEQ ID NO: 673100 - RNA, 17 nt, Human
ccuuccucaucuccuuc

SEQ ID NO: 673101 - RNA, 22 nt, Human
ugcauuuuacuuaccuguuagu

SEQ ID NO: 673102 - RNA, 22 nt, Human
agucacauggcagagagaaguu

SEQ ID NO: 673103 - RNA, 21 nt, Human
ugaggcucuguugugccugca

SEQ ID NO: 673104 - RNA, 22 nt, Human
gugcuugggggaaguaacagac

SEQ ID NO: 673105 - RNA, 20 nt, Human
uaugauaauuacaaaauagu

SEQ ID NO: 673106 - RNA, 21 nt, Human
cucugcugagcuccauuuuca

SEQ ID NO: 673107 - RNA, 22 nt, Human
gagcccaggaugguguauggcu

SEQ ID NO: 673108 - RNA, 22 nt, Human
gccagcuguucagacauucuuu

SEQ ID NO: 673109 - RNA, 22 nt, Human
gaggguccccaugcagagcuca

SEQ ID NO: 673110 - RNA, 22 nt, Human
cacaauuuuucuuagguccugg

SEQ ID NO: 673111 - RNA, 22 nt, Human
ggaugggagcagaggacgacca

SEQ ID NO: 673112 - RNA, 22 nt, Human
ugugaccucaucuuaacuggaa

SEQ ID NO: 673113 - RNA, 22 nt, Human
cacagucucuguugcugggacc

SEQ ID NO: 673114 - RNA, 22 nt, Human
uuugguuaaacgagagaacaua

SEQ ID NO: 673115 - RNA, 21 nt, Human
ugcuuugcucguucccagagu

SEQ ID NO: 673116 - RNA, 22 nt, Human
accugaaaauuauuauuuccgc

SEQ ID NO: 673117 - RNA, 20 nt, Human
ucucuauucccacgaggaaa

SEQ ID NO: 673118 - RNA, 22 nt, Human
aauggcaagagccacagaggcg

SEQ ID NO: 673119 - RNA, 22 nt, Human
aagcagaaaaacugagcuccaa

SEQ ID NO: 673120 - RNA, 22 nt, Human
ugugcagggaagggcaugcuau

SEQ ID NO: 673121 - RNA, 20 nt, Human
agguuccagccacaaccagc

SEQ ID NO: 673122 - RNA, 22 nt, Human
agaggcuccucggugccucgug

SEQ ID NO: 673123 - RNA, 22 nt, Human
cagcuuuagagaaaacauauuu

SEQ ID NO: 673124 - RNA, 22 nt, Human
auuguuuuaauuccauugugaa

SEQ ID NO: 673125 - RNA, 22 nt, Human
cuggccaggcauccccugaucc

SEQ ID NO: 673126 - RNA, 22 nt, Human
acccucaacaaauucacucuau

SEQ ID NO: 673127 - RNA, 22 nt, Human
guuauucuuuguaugguacauc

SEQ ID NO: 673128 - RNA, 22 nt, Human
gaugcacugcaguauauacugu

SEQ ID NO: 673129 - RNA, 22 nt, Human
gggcaggugaccucuuguccug

SEQ ID NO: 673130 - RNA, 22 nt, Human
gaaguuuagguucuuauguuua

SEQ ID NO: 673131 - RNA, 22 nt, Human
gggucaaggcuacauggagacc

SEQ ID NO: 673132 - RNA, 22 nt, Human
aacaaaccuggguggagaaagg

SEQ ID NO: 673133 - RNA, 22 nt, Human
gagauuggccuggcuugccaac

SEQ ID NO: 673134 - RNA, 22 nt, Human
aagccuuccugagugcaaggcc

SEQ ID NO: 673135 - RNA, 22 nt, Human
gacccaggggcagggagaaagu

SEQ ID NO: 673136 - RNA, 22 nt, Human
ugugccuucucaguccugcuca

SEQ ID NO: 673137 - RNA, 22 nt, Human
guccugugccgaggugggaagc

SEQ ID NO: 673138 - RNA, 22 nt, Human
uuccaaguuaggcgagcuggug

SEQ ID NO: 673139 - RNA, 22 nt, Human
ugugggccucagcaggacucca

SEQ ID NO: 673140 - RNA, 22 nt, Human
gaucuucuauguaaugaagugu

SEQ ID NO: 673141 - RNA, 22 nt, Human
agucuuaauagagaaaaacugu

SEQ ID NO: 673142 - RNA, 22 nt, Human
cagugcuguuguaagcucauug

SEQ ID NO: 673143 - RNA, 22 nt, Human
uugaaauagaugcgucagagau

SEQ ID NO: 673144 - RNA, 22 nt, Human
agagcuguauccccuuaccagu

SEQ ID NO: 673145 - RNA, 22 nt, Human
gcuugucucucagccccaguca

SEQ ID NO: 673146 - RNA, 22 nt, Human
aagauuucugcuccugagagaa

SEQ ID NO: 673147 - RNA, 22 nt, Human
cuuguaauggcagagaccuguc

SEQ ID NO: 673148 - RNA, 22 nt, Human
ucccaaagguccgagcgggaau

SEQ ID NO: 673149 - RNA, 22 nt, Human
auagcuuacaggugauaucagc

SEQ ID NO: 673150 - RNA, 21 nt, Human
ucucugugucuuuaagcugga

SEQ ID NO: 673151 - RNA, 22 nt, Human
agagucugugcuggggccagcu

SEQ ID NO: 673152 - RNA, 22 nt, Human
cagcuccccaugguuccugaag

SEQ ID NO: 673153 - RNA, 22 nt, Human
cccugcagcuuuugcauaguca

SEQ ID NO: 673154 - RNA, 22 nt, Human
ugaguccaccuuaguauauggg

SEQ ID NO: 673155 - RNA, 22 nt, Human
uguuuacacaauagucucucuc

SEQ ID NO: 673156 - RNA, 22 nt, Human
caguucuuaauaccaugugguu

SEQ ID NO: 673157 - RNA, 22 nt, Human
aaaaguuugugcaaacacucag

SEQ ID NO: 673158 - RNA, 22 nt, Human
caaugcacgcucagauuugacc

SEQ ID NO: 673159 - RNA, 22 nt, Human
ggcucagguuaccagucccucc

SEQ ID NO: 673160 - RNA, 22 nt, Human
gucugcuguggguccccaggag

SEQ ID NO: 673161 - RNA, 22 nt, Human
auggcucucuugaccuaggcac

SEQ ID NO: 673162 - RNA, 22 nt, Human
ucucaggcaugguuuguucauc

SEQ ID NO: 673163 - RNA, 22 nt, Human
acuccagguuuucucucaaguu

SEQ ID NO: 673164 - RNA, 22 nt, Human
gaagauuuggauuccaugucac

SEQ ID NO: 673165 - RNA, 23 nt, Human
aagcaugguucacaguuaguacu

SEQ ID NO: 673166 - RNA, 22 nt, Human
ucaguuuaagaugacuaacaau

SEQ ID NO: 673167 - RNA, 22 nt, Human
gacaagcaggcuccugaagaaa

SEQ ID NO: 673168 - RNA, 23 nt, Human
uuuagcaugaagcagcuggagaa

SEQ ID NO: 673169 - RNA, 22 nt, Human
aagccagauuucacucuuaauu

SEQ ID NO: 673170 - RNA, 22 nt, Human
agugucauaugccacugcaucc

SEQ ID NO: 673171 - RNA, 22 nt, Human
acuaacuucugagaaccaauug

SEQ ID NO: 673172 - RNA, 22 nt, Human
agaaagcagcauuuaugaucuc

SEQ ID NO: 673173 - RNA, 22 nt, Human
caugucuuauauccugucuuca

SEQ ID NO: 673174 - RNA, 22 nt, Human
aucaccuggccauuggguuaac

SEQ ID NO: 673175 - RNA, 22 nt, Human
ccugagcugcggggcagugcuc

SEQ ID NO: 673176 - RNA, 22 nt, Human
agacacaguauaagcacaacaa

SEQ ID NO: 673177 - RNA, 22 nt, Human
agcaucucuaaauccaguaagu

SEQ ID NO: 673178 - RNA, 22 nt, Human
aacuagaaagaacauauuucca

SEQ ID NO: 673179 - RNA, 22 nt, Human
guccucugcuucaugcccugau

SEQ ID NO: 673180 - RNA, 21 nt, Human
ggccuaggggcagauggugcu

SEQ ID NO: 673181 - RNA, 22 nt, Human
aucugcuguucuucacagcuug

SEQ ID NO: 673182 - RNA, 22 nt, Human
auuaguguguaggcuggaaaaa

SEQ ID NO: 673183 - RNA, 22 nt, Human
gcuggcucccagaggccccagc

SEQ ID NO: 673184 - RNA, 22 nt, Human
aggcuucaccagacucuuaauc

SEQ ID NO: 673185 - RNA, 22 nt, Human
gccagaaagaggaggaccuggg

SEQ ID NO: 673186 - RNA, 22 nt, Human
ccuuuggguucaaucucggucu

SEQ ID NO: 673187 - RNA, 21 nt, Human
gcucagaguauugcacuguuu

SEQ ID NO: 673188 - RNA, 21 nt, Human
aguuuucugaguuauaaaaua

SEQ ID NO: 673189 - RNA, 22 nt, Human
cuccagugcugucaucccuucc

SEQ ID NO: 673190 - RNA, 22 nt, Human
ugagggcuaaauuguggcaggu

SEQ ID NO: 673191 - RNA, 22 nt, Human
gcccuguguguuugcacugauu

SEQ ID NO: 673192 - RNA, 22 nt, Human
cuaauacucauuucuguaacuc

SEQ ID NO: 673193 - RNA, 22 nt, Human
cacauacauacguauguauaca

SEQ ID NO: 673194 - RNA, 18 nt, Human
uggaggaaaaaucucaug

SEQ ID NO: 673195 - RNA, 22 nt, Human
cagcaggaggcauggcuucccu

SEQ ID NO: 673196 - RNA, 22 nt, Human
agguggggcugggaaagauucc

SEQ ID NO: 673197 - RNA, 22 nt, Human
uuucagucuguaaaggugagga

SEQ ID NO: 673198 - RNA, 22 nt, Human
ugcagaugaaugcugagacacu

SEQ ID NO: 673199 - RNA, 22 nt, Human
cugcaaggcuggggugagcugg

SEQ ID NO: 673200 - RNA, 22 nt, Human
agaggccccaggugagcaugcc

SEQ ID NO: 673201 - RNA, 22 nt, Human
ucugggaacagccuggcugugu

SEQ ID NO: 673202 - RNA, 20 nt, Human
acuggacacugaggugagcu

SEQ ID NO: 673203 - RNA, 19 nt, Human
uuuggcacucugaaguguu

SEQ ID NO: 673204 - RNA, 22 nt, Human
aggggugaaggcccgauaggag

SEQ ID NO: 673205 - RNA, 22 nt, Human
agaugaaaagauaagcagcaau

SEQ ID NO: 673206 - RNA, 22 nt, Human
uauggcuuugaaagggcuuuuc

SEQ ID NO: 673207 - RNA, 22 nt, Human
ucagugacuggguauuaaauca

SEQ ID NO: 673208 - RNA, 22 nt, Human
uuuauaucuuaugucauuucaa

SEQ ID NO: 673209 - RNA, 22 nt, Human
ugggcucucaaagugcggcuug

SEQ ID NO: 673210 - RNA, 22 nt, Human
uguucaaaucuuuugcuuauuu

SEQ ID NO: 673211 - RNA, 22 nt, Human
gguuaaaaauaauuuacuuggc

SEQ ID NO: 673212 - RNA, 22 nt, Human
ugucugcucgggguucccaccu

SEQ ID NO: 673213 - RNA, 22 nt, Human
agccagcaggugcagaauucca

SEQ ID NO: 673214 - RNA, 22 nt, Human
cccaugagauucugaauuuggc

SEQ ID NO: 673215 - RNA, 22 nt, Human
agcagagguuuguuggaaaccu

SEQ ID NO: 673216 - RNA, 22 nt, Human
ugagccaggucucacucaccuu

SEQ ID NO: 673217 - RNA, 22 nt, Human
uagugcuuaauaaauuucagaa

SEQ ID NO: 673218 - RNA, 22 nt, Human
caucacaguuugucagaaauca

SEQ ID NO: 673219 - RNA, 22 nt, Human
ugucuuucugcaccaccucaca

SEQ ID NO: 673220 - RNA, 22 nt, Human
ccacagagacaggguccuugcu

SEQ ID NO: 673221 - RNA, 17 nt, Human
ugaaggaaggaugaugu

SEQ ID NO: 673222 - RNA, 22 nt, Human
guggcccuaacaccguuucuca

SEQ ID NO: 673223 - RNA, 22 nt, Human
gccuggagcucaugugggcauu

SEQ ID NO: 673224 - RNA, 22 nt, Human
caucuuuaguuauugaauauag

SEQ ID NO: 673225 - RNA, 22 nt, Human
uccagccaacugccuagggagc

SEQ ID NO: 673226 - RNA, 22 nt, Human
cucagcauggagggagaacaag

SEQ ID NO: 673227 - RNA, 22 nt, Human
cuacagacccaccuuggaagaa

SEQ ID NO: 673228 - RNA, 22 nt, Human
uagugcuugagucucuccguac

SEQ ID NO: 673229 - RNA, 22 nt, Human
cuucuuucccaggcauguuuua

SEQ ID NO: 673230 - RNA, 22 nt, Human
uagcuacacugaggcugcuuaa

SEQ ID NO: 673231 - RNA, 22 nt, Human
agagauccuucaaucuaguuuu

SEQ ID NO: 673232 - RNA, 22 nt, Human
caaccugaauucugcuuuggca

SEQ ID NO: 673233 - RNA, 22 nt, Human
cuuauguaaacuacagauaaua

SEQ ID NO: 673234 - RNA, 22 nt, Human
agcugcugggauacaguaguga

SEQ ID NO: 673235 - RNA, 22 nt, Human
ugcagugccucggcagugcagc

SEQ ID NO: 673236 - RNA, 22 nt, Human
gucacuuugaagcuguuuuuag

SEQ ID NO: 673237 - RNA, 22 nt, Human
uuuucuaauuuaguuacccucc

SEQ ID NO: 673238 - RNA, 22 nt, Human
ucuucaaagaagccuuggauua

SEQ ID NO: 673239 - RNA, 22 nt, Human
agcuggaauuacaggcacgcac

SEQ ID NO: 673240 - RNA, 22 nt, Human
gugaccagagcgggagauuggg

SEQ ID NO: 673241 - RNA, 22 nt, Human
acucacauuucaucaggccaag

SEQ ID NO: 673242 - RNA, 22 nt, Human
gcauuaauguaagacccacucc

SEQ ID NO: 673243 - RNA, 22 nt, Human
ccucuggggguccucagagucu

SEQ ID NO: 673244 - RNA, 22 nt, Human
gaguuagaagacagaauguaaa

SEQ ID NO: 673245 - RNA, 18 nt, Human
ucagagagaauaguaauu

SEQ ID NO: 673246 - RNA, 22 nt, Human
gcauucuuuccacgaggaggua

SEQ ID NO: 673247 - RNA, 22 nt, Human
uuaguaaauaaagucuacuuuc

SEQ ID NO: 673248 - RNA, 22 nt, Human
uggcauguuucauggcugcaaa

SEQ ID NO: 673249 - RNA, 22 nt, Human
cugcuuccaagaaagagauagg

SEQ ID NO: 673250 - RNA, 22 nt, Human
acugaggcagaaggguaagugg

SEQ ID NO: 673251 - RNA, 22 nt, Human
ccaggcguggcuucagcagccc

SEQ ID NO: 673252 - RNA, 22 nt, Human
aagcagcuuaaauuagagccug

SEQ ID NO: 673253 - RNA, 20 nt, Human
aggccccaggaaacucucag

SEQ ID NO: 673254 - RNA, 22 nt, Human
caaaugauaccuauuacuaggc

SEQ ID NO: 673255 - RNA, 22 nt, Human
uucugcagugugcagggccugu

SEQ ID NO: 673256 - RNA, 22 nt, Human
auccuggacaguuuccccuauu

SEQ ID NO: 673257 - RNA, 22 nt, Human
uugagaaauaagcaugucuaga

SEQ ID NO: 673258 - RNA, 22 nt, Human
uugcuugcagacuuagcaaauu

SEQ ID NO: 673259 - RNA, 22 nt, Human
auccaaauauauuuuauucacu

SEQ ID NO: 673260 - RNA, 22 nt, Human
uagggaugauggagccuaugua

SEQ ID NO: 673261 - RNA, 20 nt, Human
ucaggcuccgcauuaacuua

SEQ ID NO: 673262 - RNA, 22 nt, Human
uuccuggcucacagcagugggg

SEQ ID NO: 673263 - RNA, 22 nt, Human
uuccuucaaacgccuccugcac

SEQ ID NO: 673264 - RNA, 22 nt, Human
gguuaaaacugauauuaugggu

SEQ ID NO: 673265 - RNA, 22 nt, Human
aguagaaagaaggcacugggcc

SEQ ID NO: 673266 - RNA, 22 nt, Human
acagagcaaugcguguucucua

SEQ ID NO: 673267 - RNA, 22 nt, Human
cugggcgcguccccugaggcgg

SEQ ID NO: 673268 - RNA, 22 nt, Human
cccagcuugcccaggacugagg

SEQ ID NO: 673269 - RNA, 22 nt, Human
uuuucuucuaccugcuguccaa

SEQ ID NO: 673270 - RNA, 19 nt, Human
uucuuugaguucuucugag

SEQ ID NO: 673271 - RNA, 22 nt, Human
ggaaauguaaucacagaggguu

SEQ ID NO: 673272 - RNA, 22 nt, Human
ggaucuguuuugccucugaggg

SEQ ID NO: 673273 - RNA, 20 nt, Human
gcuggugggggcuugacaug

SEQ ID NO: 673274 - RNA, 22 nt, Human
cauuuguaauacugacuugcag

SEQ ID NO: 673275 - RNA, 22 nt, Human
uaggcacaaaaugaaaauggca

SEQ ID NO: 673276 - RNA, 22 nt, Human
agagcccuggagggcagucccg

SEQ ID NO: 673277 - RNA, 22 nt, Human
gcugcaccagcuccaccagggc

SEQ ID NO: 673278 - RNA, 22 nt, Human
augucugguggucgaugcuaca

SEQ ID NO: 673279 - RNA, 22 nt, Human
ccuggcagcaggugggcccgug

SEQ ID NO: 673280 - RNA, 22 nt, Human
uugaguucuguguauccuuugu

SEQ ID NO: 673281 - RNA, 22 nt, Human
ucagguggcuuggagggggacg

SEQ ID NO: 673282 - RNA, 22 nt, Human
agcaaugaccagugaucuugua

SEQ ID NO: 673283 - RNA, 22 nt, Human
gcaccuggcugcccagguggag

SEQ ID NO: 673284 - RNA, 22 nt, Human
aagugugucuggcggcccagug

SEQ ID NO: 673285 - RNA, 22 nt, Human
ucaguguucuuauuuaauuagg

SEQ ID NO: 673286 - RNA, 23 nt, Human
agccagggcacugguggagauug

SEQ ID NO: 673287 - RNA, 22 nt, Human
ccagccuccauguagauagcug

SEQ ID NO: 673288 - RNA, 22 nt, Human
cuuccccaaccccgacugugug

SEQ ID NO: 673289 - RNA, 22 nt, Human
ucacauugccgucugugcacuu

SEQ ID NO: 673290 - RNA, 22 nt, Human
uggcucagaaggcugccuucac

SEQ ID NO: 673291 - RNA, 22 nt, Human
gaggcuguuaggagggacucug

SEQ ID NO: 673292 - RNA, 22 nt, Human
aggcugugaguaguucuuguug

SEQ ID NO: 673293 - RNA, 22 nt, Human
ccuggccagcgccggcugcucg

SEQ ID NO: 673294 - RNA, 22 nt, Human
uugggcaaaguguuucuggagc

SEQ ID NO: 673295 - RNA, 17 nt, Human
ugccagccugucccagg

SEQ ID NO: 673296 - RNA, 22 nt, Human
ggcacagucccuggcacagagu

SEQ ID NO: 673297 - RNA, 22 nt, Human
aaaauuuugcccuauccuucau

SEQ ID NO: 673298 - RNA, 22 nt, Human
uguucugccagcacuucucagc

SEQ ID NO: 673299 - RNA, 23 nt, Human
cuugcaggaagcagauggcacac

SEQ ID NO: 673300 - RNA, 22 nt, Human
acacagugucagggcaggggcc

SEQ ID NO: 673301 - RNA, 21 nt, Human
ugaggcucaucuuauguggcu

SEQ ID NO: 673302 - RNA, 22 nt, Human
auucugggccccaucccagacc

SEQ ID NO: 673303 - RNA, 22 nt, Human
gcaagcugcuuaagcucauugu

SEQ ID NO: 673304 - RNA, 22 nt, Human
uguuuacuaugauguaaccuau

SEQ ID NO: 673305 - RNA, 22 nt, Human
caguuuaguaggugauaucaau

SEQ ID NO: 673306 - RNA, 22 nt, Human
cugggucugugcccagggaccu

SEQ ID NO: 673307 - RNA, 22 nt, Human
ccucucagccggacugucaggc

SEQ ID NO: 673308 - RNA, 19 nt, Human
agggaauccggcugaggga

SEQ ID NO: 673309 - RNA, 22 nt, Human
ugcuccagcgcugccaccaguu

SEQ ID NO: 673310 - RNA, 22 nt, Human
cuccaggaaagccugaggcccg

SEQ ID NO: 673311 - RNA, 22 nt, Human
gugggagaagauuuggucaucu

SEQ ID NO: 673312 - RNA, 21 nt, Human
gaaugucugccuucacaauga

SEQ ID NO: 673313 - RNA, 22 nt, Human
caggaaagagcugccaggcagg

SEQ ID NO: 673314 - RNA, 22 nt, Human
uacacuauuuuacugauacaaa

SEQ ID NO: 673315 - RNA, 22 nt, Human
ugaacauauucaccucuaaaua

SEQ ID NO: 673316 - RNA, 22 nt, Human
ggcuucaagucguauauuuggg

SEQ ID NO: 673317 - RNA, 22 nt, Human
aggcugccucuuuugagagggu

SEQ ID NO: 673318 - RNA, 22 nt, Human
aauucuauaggcaagcuauuuu

SEQ ID NO: 673319 - RNA, 22 nt, Human
gggagcugccaccaccccuggg

SEQ ID NO: 673320 - RNA, 22 nt, Human
uuuuccucuguuauuaguguga

SEQ ID NO: 673321 - RNA, 22 nt, Human
aguuacacaacuuaucacaucu

SEQ ID NO: 673322 - RNA, 22 nt, Human
ugaaagaaggguggaaaaugua

SEQ ID NO: 673323 - RNA, 22 nt, Human
agagaggcugggcguagggcuu

SEQ ID NO: 673324 - RNA, 22 nt, Human
uacuuguuaucaucuuuuccuu

SEQ ID NO: 673325 - RNA, 22 nt, Human
uggaaugaauuuggcuuccucc

SEQ ID NO: 673326 - RNA, 20 nt, Human
acacugugcuaaggauuuuc

SEQ ID NO: 673327 - RNA, 22 nt, Human
aagagcuggaguuugcagcccu

SEQ ID NO: 673328 - RNA, 22 nt, Human
gguauuuauaguggugcuuagu

SEQ ID NO: 673329 - RNA, 22 nt, Human
gugagaguaccaccucaacauc

SEQ ID NO: 673330 - RNA, 15 nt, Human
aggcacugugggacc

SEQ ID NO: 673331 - RNA, 22 nt, Human
aggcuugacugcugauuuugcc

SEQ ID NO: 673332 - RNA, 22 nt, Human
ugcugcucuguaaagugaugag

SEQ ID NO: 673333 - RNA, 22 nt, Human
aguucaaacucuauaagaacuu

SEQ ID NO: 673334 - RNA, 22 nt, Human
uuccagaguauugguagcuaua

SEQ ID NO: 673335 - RNA, 22 nt, Human
ucacagaaaaguggagagccua

SEQ ID NO: 673336 - RNA, 22 nt, Human
uaggaagaucaaguuuaucuca

SEQ ID NO: 673337 - RNA, 17 nt, Human
uuacaacaauucaugag

SEQ ID NO: 673338 - RNA, 20 nt, Human
agcaguuuccuaacucagcu

SEQ ID NO: 673339 - RNA, 22 nt, Human
ccucucccgggugccgcugggc

SEQ ID NO: 673340 - RNA, 22 nt, Human
ugauggaaauauugacaccaca

SEQ ID NO: 673341 - RNA, 22 nt, Human
ggcucugaacauggggaggagu

SEQ ID NO: 673342 - RNA, 22 nt, Human
uuggagccaugcccagcucucu

SEQ ID NO: 673343 - RNA, 20 nt, Human
gcuguguagcagugugcagu

SEQ ID NO: 673344 - RNA, 22 nt, Human
gucccucacuggaccauaugaa

SEQ ID NO: 673345 - RNA, 22 nt, Human
uggggaaaagcguuaggaguuc

SEQ ID NO: 673346 - RNA, 22 nt, Human
aguguauguccugaggggagaa

SEQ ID NO: 673347 - RNA, 22 nt, Human
ggucaugagggagcagugcagg

SEQ ID NO: 673348 - RNA, 20 nt, Human
uuucacuggcuugauaaggu

SEQ ID NO: 673349 - RNA, 22 nt, Human
agaaacaucauuggaacacaag

SEQ ID NO: 673350 - RNA, 22 nt, Human
ucauugaauauggggccauaca

SEQ ID NO: 673351 - RNA, 22 nt, Human
cagcucaguuucaauaccaggu

SEQ ID NO: 673352 - RNA, 22 nt, Human
cugcagagcaaguucucuguug

SEQ ID NO: 673353 - RNA, 22 nt, Human
cagaaacuuucuuuacugagca

SEQ ID NO: 673354 - RNA, 22 nt, Human
gucuuucuaugcauagagcaga

SEQ ID NO: 673355 - RNA, 22 nt, Human
gccacugcacuccagcccaggc

SEQ ID NO: 673356 - RNA, 22 nt, Human
ccaguguggccaggugcuggua

SEQ ID NO: 673357 - RNA, 22 nt, Human
cuccuggcacucaguguggaag

SEQ ID NO: 673358 - RNA, 22 nt, Human
cugccucuggccucaggcccag

SEQ ID NO: 673359 - RNA, 22 nt, Human
uguaacugcuuagaagguuuua

SEQ ID NO: 673360 - RNA, 22 nt, Human
gcacacagccagcugagggcua

SEQ ID NO: 673361 - RNA, 22 nt, Human
caggcugcaagaaaggcauuca

SEQ ID NO: 673362 - RNA, 22 nt, Human
uucuggaagauaccucuccuaa

SEQ ID NO: 673363 - RNA, 22 nt, Human
ccacuguagagauuugaaugcc

SEQ ID NO: 673364 - RNA, 22 nt, Human
aagucaaaccuugcucacagga

SEQ ID NO: 673365 - RNA, 22 nt, Human
cuggacuuuggcccaucugcca

SEQ ID NO: 673366 - RNA, 22 nt, Human
gaugauuuucuguguuagaaga

SEQ ID NO: 673367 - RNA, 21 nt, Human
acagcuggugcagggcgggga

SEQ ID NO: 673368 - RNA, 22 nt, Human
ccacugugcccagccucauggg

SEQ ID NO: 673369 - RNA, 22 nt, Human
aacacaggggcguggcucuuac

SEQ ID NO: 673370 - RNA, 22 nt, Human
cagcuugcuaauuuugacuuca

SEQ ID NO: 673371 - RNA, 22 nt, Human
uucauaggaaauaguguucuuu

SEQ ID NO: 673372 - RNA, 22 nt, Human
uccugcagcugcagaccugggg

SEQ ID NO: 673373 - RNA, 21 nt, Human
uuucuggguggcugcauagug

SEQ ID NO: 673374 - RNA, 22 nt, Human
ucuccugguuuguuaaauaauu

SEQ ID NO: 673375 - RNA, 22 nt, Human
gcuccaggauaauaaaguuguu

SEQ ID NO: 673376 - RNA, 22 nt, Human
aggcuuaaaugcucauaucagu

SEQ ID NO: 673377 - RNA, 22 nt, Human
gugaaugcaaacuguuucugau

SEQ ID NO: 673378 - RNA, 22 nt, Human
augauggagguguccuggauuu

SEQ ID NO: 673379 - RNA, 21 nt, Human
gucagggauucaagugcucac

SEQ ID NO: 673380 - RNA, 22 nt, Human
cuucaugacccauaaaaauuua

SEQ ID NO: 673381 - RNA, 22 nt, Human
cauuucaauuauuugcucuucu

SEQ ID NO: 673382 - RNA, 22 nt, Human
ugcuaggagaggcagcacagcg

SEQ ID NO: 673383 - RNA, 22 nt, Human
cugccaccaaauagcugcauga

SEQ ID NO: 673384 - RNA, 22 nt, Human
aggaggccuacgcacaugucua

SEQ ID NO: 673385 - RNA, 22 nt, Human
gucaguaggaaccuagggucaa

SEQ ID NO: 673386 - RNA, 22 nt, Human
aaugcaccuuggcagggauuca

SEQ ID NO: 673387 - RNA, 22 nt, Human
acauuucuuccuaauuaucccu

SEQ ID NO: 673388 - RNA, 22 nt, Human
gguggcagagacauaggacaua

SEQ ID NO: 673389 - RNA, 22 nt, Human
cauguaaaaagaagaaucugga

SEQ ID NO: 673390 - RNA, 22 nt, Human
ucaggagauguaaccuuagcug

SEQ ID NO: 673391 - RNA, 22 nt, Human
cuggccuggggggacacauccc

SEQ ID NO: 673392 - RNA, 22 nt, Human
cuuccaaacccaggguaugggc

SEQ ID NO: 673393 - RNA, 22 nt, Human
ucucauuuggcuuuguuuuaaa

SEQ ID NO: 673394 - RNA, 22 nt, Human
uagugcuuuaggccugaguguc

SEQ ID NO: 673395 - RNA, 23 nt, Human
ggccucagcgcacagaaacugcu

SEQ ID NO: 673396 - RNA, 22 nt, Human
aauaugcaaagcguguuaucug

SEQ ID NO: 673397 - RNA, 22 nt, Human
aaggaagguacucagugauucu

SEQ ID NO: 673398 - RNA, 22 nt, Human
ugagaaucagcugcacagaggu

SEQ ID NO: 673399 - RNA, 22 nt, Human
ucacugggcccugaggugggac

SEQ ID NO: 673400 - RNA, 22 nt, Human
agcaaagaaauggaggcucaga

SEQ ID NO: 673401 - RNA, 22 nt, Human
gaggcuggagauauuccaaucu

SEQ ID NO: 673402 - RNA, 22 nt, Human
aucuuuacuuucagugcugagc

SEQ ID NO: 673403 - RNA, 19 nt, Human
uccaggagcaaagccaguu

SEQ ID NO: 673404 - RNA, 22 nt, Human
uaacuucaaaauugccacaugu

SEQ ID NO: 673405 - RNA, 22 nt, Human
aaagaacagauguguggugcau

SEQ ID NO: 673406 - RNA, 22 nt, Human
cucugggcuccuucagcccuuu

SEQ ID NO: 673407 - RNA, 22 nt, Human
agcaagcugucaagagagcuga

SEQ ID NO: 673408 - RNA, 22 nt, Human
acauugaagggaaugcaaagau

SEQ ID NO: 673409 - RNA, 22 nt, Human
ccagggaaacagcccaguguga

SEQ ID NO: 673410 - RNA, 22 nt, Human
ucacaaauauagugagaaccag

SEQ ID NO: 673411 - RNA, 22 nt, Human
uccugggauuugcccuuuucuc

SEQ ID NO: 673412 - RNA, 20 nt, Human
aacagggcagaagcggagac

SEQ ID NO: 673413 - RNA, 22 nt, Human
ucagggcaagauugguuaauaa

SEQ ID NO: 673414 - RNA, 22 nt, Human
ugccugugugaccacgggcaag

SEQ ID NO: 673415 - RNA, 22 nt, Human
cagugggcugugauggauucac

SEQ ID NO: 673416 - RNA, 22 nt, Human
acuaggggcucaggcccaggga

SEQ ID NO: 673417 - RNA, 22 nt, Human
uuucagugcuucuguuuaccgg

SEQ ID NO: 673418 - RNA, 22 nt, Human
ggguggggccaggcaauuugca

SEQ ID NO: 673419 - RNA, 22 nt, Human
ggaguugguggcccggaaucuc

SEQ ID NO: 673420 - RNA, 22 nt, Human
ccagucugcugugguaggaaga

SEQ ID NO: 673421 - RNA, 22 nt, Human
uauucaagauugaacuggcaga

SEQ ID NO: 673422 - RNA, 22 nt, Human
uggcugagagucauccugugug

SEQ ID NO: 673423 - RNA, 22 nt, Human
uucucucauucaaauuaaagug

SEQ ID NO: 673424 - RNA, 22 nt, Human
ccagauagcaggucagaagugc

SEQ ID NO: 673425 - RNA, 22 nt, Human
ugcagagcuucauugcauaggc

SEQ ID NO: 673426 - RNA, 22 nt, Human
gaaaggggcauguagggaucac

SEQ ID NO: 673427 - RNA, 22 nt, Human
gggugggacucuuuggccugag

SEQ ID NO: 673428 - RNA, 20 nt, Human
uuucugugauagagaggugu

SEQ ID NO: 673429 - RNA, 22 nt, Human
ccuguugcucugcaugaguuua

SEQ ID NO: 673430 - RNA, 22 nt, Human
auauuaggcaaggagauuauuu

SEQ ID NO: 673431 - RNA, 22 nt, Human
aagaacaugaaccucuucuaac

SEQ ID NO: 673432 - RNA, 23 nt, Human
aucauucuccaaucuggagcagg

SEQ ID NO: 673433 - RNA, 22 nt, Human
ucacagaaugucuagcauaauu

SEQ ID NO: 673434 - RNA, 18 nt, Human
gagagggaucccucagga

SEQ ID NO: 673435 - RNA, 22 nt, Human
gggcuucaggguacuuccuccu

SEQ ID NO: 673436 - RNA, 22 nt, Human
gggucugagcugaggggaaauc

SEQ ID NO: 673437 - RNA, 23 nt, Human
gaacagacauuagugagccaggc

SEQ ID NO: 673438 - RNA, 22 nt, Human
ggccugcuucucagugagcuug

SEQ ID NO: 673439 - RNA, 22 nt, Human
ugggagaagcauggggugcaga

SEQ ID NO: 673440 - RNA, 21 nt, Human
auucagaguaauucaucuuua

SEQ ID NO: 673441 - RNA, 22 nt, Human
agccacagucaaccuguccaua

SEQ ID NO: 673442 - RNA, 22 nt, Human
cugguggggaguccuggucucc

SEQ ID NO: 673443 - RNA, 22 nt, Human
cagacuggccacaucugcacug

SEQ ID NO: 673444 - RNA, 21 nt, Human
acagccuugugauggagacag

SEQ ID NO: 673445 - RNA, 16 nt, Human
cucagcuaaggagagg

SEQ ID NO: 673446 - RNA, 22 nt, Human
uucagaaaaagaccauugcaau

SEQ ID NO: 673447 - RNA, 22 nt, Human
auucaaguggcugcuauguuaa

SEQ ID NO: 673448 - RNA, 22 nt, Human
uuguuuucacagcuuugcccgg

SEQ ID NO: 673449 - RNA, 22 nt, Human
agguggccaagacuguuugaca

SEQ ID NO: 673450 - RNA, 22 nt, Human
ucauggggugaauuaguaugcu

SEQ ID NO: 673451 - RNA, 22 nt, Human
caucaucuugaaugacugugau

SEQ ID NO: 673452 - RNA, 22 nt, Human
agcagaaauagaagucaaugau

SEQ ID NO: 673453 - RNA, 23 nt, Human
gguggcaggaguggaugcugagc

SEQ ID NO: 673454 - RNA, 22 nt, Human
ucagaggucagcagcuugccca

SEQ ID NO: 673455 - RNA, 22 nt, Human
uggcucaggugugagcugaaga

SEQ ID NO: 673456 - RNA, 22 nt, Human
ucauggaaacagcaaugcuaau

SEQ ID NO: 673457 - RNA, 22 nt, Human
ggugaauaagcugaacacuugg

SEQ ID NO: 673458 - RNA, 22 nt, Human
aauguuugaacuuugcauauuu

SEQ ID NO: 673459 - RNA, 22 nt, Human
aucuguguguucaggaaguccu

SEQ ID NO: 673460 - RNA, 22 nt, Human
agugucuguguuuucuauugcu

SEQ ID NO: 673461 - RNA, 22 nt, Human
aaggcugacucaacagggggcc

SEQ ID NO: 673462 - RNA, 22 nt, Human
uaguaaguagcuaauauuuacu

SEQ ID NO: 673463 - RNA, 22 nt, Human
cucuggagggaggcugagcugg

SEQ ID NO: 673464 - RNA, 22 nt, Human
auagaauuuguacuuguagaac

SEQ ID NO: 673465 - RNA, 22 nt, Human
auugacaacccugguaugagca

SEQ ID NO: 673466 - RNA, 22 nt, Human
agugcuccugaagcuugaggca

SEQ ID NO: 673467 - RNA, 22 nt, Human
ugugccugauggucacguggcc

SEQ ID NO: 673468 - RNA, 22 nt, Human
uguauagaguuggaagaugacu

SEQ ID NO: 673469 - RNA, 22 nt, Human
uguuuaugugugugcauauaua

SEQ ID NO: 673470 - RNA, 22 nt, Human
aagaacauaacagaagcugugu

SEQ ID NO: 673471 - RNA, 22 nt, Human
cuucucagucaccugugagucu

SEQ ID NO: 673472 - RNA, 22 nt, Human
agcccaugcaacaggccuagcg

SEQ ID NO: 673473 - RNA, 22 nt, Human
gagagguacacccuuuaaacuu

SEQ ID NO: 673474 - RNA, 22 nt, Human
gggggacaggaugaauaucugu

SEQ ID NO: 673475 - RNA, 20 nt, Human
cagcucugggaaagaggcca

SEQ ID NO: 673476 - RNA, 19 nt, Human
uuuuccuucuccucuuaau

SEQ ID NO: 673477 - RNA, 22 nt, Human
ucugggcugcugugcagugacc

SEQ ID NO: 673478 - RNA, 20 nt, Human
acuuucucgguuucucaccu

SEQ ID NO: 673479 - RNA, 22 nt, Human
gccaaccauuggcuucuuguca

SEQ ID NO: 673480 - RNA, 22 nt, Human
uucugggcuugaaaguuuaaua

SEQ ID NO: 673481 - RNA, 22 nt, Human
uaggucucucuucuugauggga

SEQ ID NO: 673482 - RNA, 19 nt, Human
ugagauuucuuaggugauu

SEQ ID NO: 673483 - RNA, 22 nt, Human
cugcagagaccuaggucagguu

SEQ ID NO: 673484 - RNA, 22 nt, Human
uagcccagcucaaaugaccggu

SEQ ID NO: 673485 - RNA, 22 nt, Human
ugcccugguuacacuggagucc

SEQ ID NO: 673486 - RNA, 22 nt, Human
aaaguucagugccuucuauaca

SEQ ID NO: 673487 - RNA, 22 nt, Human
cuuauuuaugucugucucuaau

SEQ ID NO: 673488 - RNA, 23 nt, Human
aggccagcgcagacaccgagcac

SEQ ID NO: 673489 - RNA, 22 nt, Human
uaagaucaguucaaacaugugu

SEQ ID NO: 673490 - RNA, 22 nt, Human
uacugugucuuaggauguggaa

SEQ ID NO: 673491 - RNA, 22 nt, Human
uuauuccagguacuugguuucu

SEQ ID NO: 673492 - RNA, 22 nt, Human
ggauccuucuuugaccucacag

SEQ ID NO: 673493 - RNA, 19 nt, Human
aaggggugagggaagcaga

SEQ ID NO: 673494 - RNA, 22 nt, Human
ucuaaagagaaccuuuucucau

SEQ ID NO: 673495 - RNA, 22 nt, Human
aaacugugagcuaguaaauagg

SEQ ID NO: 673496 - RNA, 22 nt, Human
cagcugcaggagcugagcacuu

SEQ ID NO: 673497 - RNA, 22 nt, Human
aagagcagauuccuaguggagc

SEQ ID NO: 673498 - RNA, 22 nt, Human
agcuggguguguaucagauaaa

SEQ ID NO: 673499 - RNA, 22 nt, Human
uaguauauuuuguugcaauuca

SEQ ID NO: 673500 - RNA, 22 nt, Human
aguggaaggucaggggacagug

SEQ ID NO: 673501 - RNA, 22 nt, Human
auggcuggugauacuggaguga

SEQ ID NO: 673502 - RNA, 22 nt, Human
ugaucaaauucaggagucugga

SEQ ID NO: 673503 - RNA, 22 nt, Human
cagcaguacuucucagagguau

SEQ ID NO: 673504 - RNA, 22 nt, Human
accaggccuggcugggcagcca

SEQ ID NO: 673505 - RNA, 22 nt, Human
gcuccucuucucccacugaaug

SEQ ID NO: 673506 - RNA, 22 nt, Human
uugcauuucacuuucaguaggc

SEQ ID NO: 673507 - RNA, 22 nt, Human
acagggccaggugagaggugcu

SEQ ID NO: 673508 - RNA, 22 nt, Human
aucaguuucuaccauguggaau

SEQ ID NO: 673509 - RNA, 22 nt, Human
agcgugaaggcgggcagucggc

SEQ ID NO: 673510 - RNA, 22 nt, Human
uuuaagacuuaggaaagaggau

SEQ ID NO: 673511 - RNA, 22 nt, Human
ucugcaggagagugcccuagag

SEQ ID NO: 673512 - RNA, 22 nt, Human
cucagggaggagcuucugggcc

SEQ ID NO: 673513 - RNA, 22 nt, Human
cagagcuugaauguccaugguu

SEQ ID NO: 673514 - RNA, 22 nt, Human
cagguuggggacuuaggaugac

SEQ ID NO: 673515 - RNA, 22 nt, Human
cuccaggacacuaacccaggcu

SEQ ID NO: 673516 - RNA, 22 nt, Human
cagugaaauaguggacaucaaa

SEQ ID NO: 673517 - RNA, 21 nt, Human
ggcugagauggcagaaucacc

SEQ ID NO: 673518 - RNA, 22 nt, Human
aaccaggacaauuugaauagaa

SEQ ID NO: 673519 - RNA, 22 nt, Human
ccagcccugucaccaacuggag

SEQ ID NO: 673520 - RNA, 21 nt, Human
acaggcuuuagaaaaugacuc

SEQ ID NO: 673521 - RNA, 23 nt, Human
uucuccugaggaagcagggacug

SEQ ID NO: 673522 - RNA, 22 nt, Human
agaccuggauuccaauccuacc

SEQ ID NO: 673523 - RNA, 22 nt, Human
auucucuguagauggcuugaga

SEQ ID NO: 673524 - RNA, 22 nt, Human
agacauagauaggcacugauug

SEQ ID NO: 673525 - RNA, 22 nt, Human
uggcaguggauaggggagcggu

SEQ ID NO: 673526 - RNA, 22 nt, Human
uguuuccauggugacagcagcu

SEQ ID NO: 673527 - RNA, 22 nt, Human
caccagagugaguggacugucg

SEQ ID NO: 673528 - RNA, 22 nt, Human
ccaggggaaacagggagcacuc

SEQ ID NO: 673529 - RNA, 22 nt, Human
uauggguaucaaugacaaacau

SEQ ID NO: 673530 - RNA, 22 nt, Human
uccacagcuguccuguaacagg

SEQ ID NO: 673531 - RNA, 22 nt, Human
acagccugcugccugcuucuug

SEQ ID NO: 673532 - RNA, 22 nt, Human
cuccugggaaaugaaggggcag

SEQ ID NO: 673533 - RNA, 22 nt, Human
cacaugaguccugccagguaug

SEQ ID NO: 673534 - RNA, 22 nt, Human
caggaucccuggccuccgccca

SEQ ID NO: 673535 - RNA, 22 nt, Human
gggcccaguacccucugccaag

SEQ ID NO: 673536 - RNA, 22 nt, Human
aggcagcuuaagcccuggccca

SEQ ID NO: 673537 - RNA, 22 nt, Human
uuccaaaguuaguuauuagaaa

SEQ ID NO: 673538 - RNA, 22 nt, Human
ucuggagaccuagcccuguugu

SEQ ID NO: 673539 - RNA, 22 nt, Human
acugucuguacuucuugcaagg

SEQ ID NO: 673540 - RNA, 22 nt, Human
aggcugugggugauuuacugug

SEQ ID NO: 673541 - RNA, 22 nt, Human
guuuacuuuucauggagcauau

SEQ ID NO: 673542 - RNA, 22 nt, Human
cugagauggaguuucgcucuuc

SEQ ID NO: 673543 - RNA, 22 nt, Human
uagcagaguuugguaccugggg

SEQ ID NO: 673544 - RNA, 22 nt, Human
ucaggcugcagcugucagcagc

SEQ ID NO: 673545 - RNA, 22 nt, Human
acacacuucagauguaauuugu

SEQ ID NO: 673546 - RNA, 23 nt, Human
agugccagggagaucaggacgga

SEQ ID NO: 673547 - RNA, 18 nt, Human
ugaggcugaggguagagg

SEQ ID NO: 673548 - RNA, 22 nt, Human
aagugcauaaguaugauuauuu

SEQ ID NO: 673549 - RNA, 22 nt, Human
acagaaauucugggacagaaaa

SEQ ID NO: 673550 - RNA, 22 nt, Human
cuguggcugcgccaucgaaaac

SEQ ID NO: 673551 - RNA, 22 nt, Human
ggcagcagaccccuaagucuac

SEQ ID NO: 673552 - RNA, 22 nt, Human
agaacauuaaugcgagguauua

SEQ ID NO: 673553 - RNA, 22 nt, Human
gaaguucucagcuaggugaugu

SEQ ID NO: 673554 - RNA, 22 nt, Human
gggcugcuuauacugaugauaa

SEQ ID NO: 673555 - RNA, 22 nt, Human
auaaguguuagguaaacaucuu

SEQ ID NO: 673556 - RNA, 22 nt, Human
ucuagaaaaccaauauuacaug

SEQ ID NO: 673557 - RNA, 22 nt, Human
auuuuccuagucaugugcuucu

SEQ ID NO: 673558 - RNA, 22 nt, Human
gaagccagauuuggggcauauc

SEQ ID NO: 673559 - RNA, 22 nt, Human
aaugaauaccguuucacucagu

SEQ ID NO: 673560 - RNA, 22 nt, Human
uucuucaauaaauucccauaag

SEQ ID NO: 673561 - RNA, 22 nt, Human
cacaaauggccguguucaaaga

SEQ ID NO: 673562 - RNA, 22 nt, Human
uacagcaaugccugaaauagua

SEQ ID NO: 673563 - RNA, 22 nt, Human
uuacaaugggagcccuuggacu

SEQ ID NO: 673564 - RNA, 22 nt, Human
cagggugccuguccucagcaaa

SEQ ID NO: 673565 - RNA, 22 nt, Human
uggcaguccagacccuggacuc

SEQ ID NO: 673566 - RNA, 22 nt, Human
gacagcuuaggaaguuucuauu

SEQ ID NO: 673567 - RNA, 22 nt, Human
ugauucugcuuugauccuugug

SEQ ID NO: 673568 - RNA, 22 nt, Human
augcacagcagugaguucagug

SEQ ID NO: 673569 - RNA, 22 nt, Human
augcauuguaacgaugugcaca

SEQ ID NO: 673570 - RNA, 22 nt, Human
uggcugagccacuuguucagau

SEQ ID NO: 673571 - RNA, 22 nt, Human
uuuguaagagcauauguaaagg

SEQ ID NO: 673572 - RNA, 22 nt, Human
agggagcuucuacuucaaggca

SEQ ID NO: 673573 - RNA, 22 nt, Human
uaccuggagcaggaggcagaau

SEQ ID NO: 673574 - RNA, 22 nt, Human
ggcuggguuauuuauggccaag

SEQ ID NO: 673575 - RNA, 22 nt, Human
uugcagggcaucgcguacuucu

SEQ ID NO: 673576 - RNA, 23 nt, Human
agcacuuguaucuuacuaaaaug

SEQ ID NO: 673577 - RNA, 22 nt, Human
ugcugaaagaccguauuuaucu

SEQ ID NO: 673578 - RNA, 22 nt, Human
uugaucugccucauucuuguuc

SEQ ID NO: 673579 - RNA, 22 nt, Human
gaggcccagagagguugcauga

SEQ ID NO: 673580 - RNA, 22 nt, Human
aggcaccaguaagaguagaacu

SEQ ID NO: 673581 - RNA, 22 nt, Human
uagacuauuucuuuugcauagg

SEQ ID NO: 673582 - RNA, 22 nt, Human
caggguugggcuccaaggaugg

SEQ ID NO: 673583 - RNA, 17 nt, Human
ugccuccagcaggguga

SEQ ID NO: 673584 - RNA, 22 nt, Human
ggcugcugggucaugaugcaga

SEQ ID NO: 673585 - RNA, 22 nt, Human
agcugccccgaggcggcgggaa

SEQ ID NO: 673586 - RNA, 22 nt, Human
agacugggguucuggcaaggag

SEQ ID NO: 673587 - RNA, 22 nt, Human
guuuccuauguccauugaggga

SEQ ID NO: 673588 - RNA, 22 nt, Human
gaacacauguccuccuuggauu

SEQ ID NO: 673589 - RNA, 22 nt, Human
gaaggccauugcguccugggau

SEQ ID NO: 673590 - RNA, 22 nt, Human
ucacagagaaauguggcacaaa

SEQ ID NO: 673591 - RNA, 22 nt, Human
guuuacaguacucacuugcauu

SEQ ID NO: 673592 - RNA, 22 nt, Human
gaugcugugguaagccccaccg

SEQ ID NO: 673593 - RNA, 22 nt, Human
cuuuaguuugcuguccccuggg

SEQ ID NO: 673594 - RNA, 22 nt, Human
uacauacacaaauauacuguuu

SEQ ID NO: 673595 - RNA, 22 nt, Human
acccagggcagccagcggggag

SEQ ID NO: 673596 - RNA, 22 nt, Human
uggaagcacuuggguuuuguug

SEQ ID NO: 673597 - RNA, 22 nt, Human
ugguccugagaauccuguccuc

SEQ ID NO: 673598 - RNA, 22 nt, Human
cacacaggaaaauuggaauuaa

SEQ ID NO: 673599 - RNA, 22 nt, Human
caggucuggugagagaacaguu

SEQ ID NO: 673600 - RNA, 22 nt, Human
cggcuucagcucaggccccucg

SEQ ID NO: 673601 - RNA, 22 nt, Human
ccugaaaauauccucuccuuug

SEQ ID NO: 673602 - RNA, 21 nt, Human
uuuguucauagcucacucuuu

SEQ ID NO: 673603 - RNA, 22 nt, Human
ugauggaauauaccuucgggag

SEQ ID NO: 673604 - RNA, 22 nt, Human
gugacagaaacagggcuagaau

SEQ ID NO: 673605 - RNA, 19 nt, Human
ccugcagggaugagagguu

SEQ ID NO: 673606 - RNA, 22 nt, Human
ugcacacagaugguacaugcau

SEQ ID NO: 673607 - RNA, 22 nt, Human
acucuucacacuugucuccagg

SEQ ID NO: 673608 - RNA, 20 nt, Human
agcaguguuucuugacucua

SEQ ID NO: 673609 - RNA, 22 nt, Human
agccacagcuccuugguggaga

SEQ ID NO: 673610 - RNA, 22 nt, Human
auucuucauuuacuguuacuug

SEQ ID NO: 673611 - RNA, 22 nt, Human
ucauccaucuuugauuucauag

SEQ ID NO: 673612 - RNA, 22 nt, Human
uaaagaacacagggaauagcac

SEQ ID NO: 673613 - RNA, 22 nt, Human
gccacucaugggaggugugcaa

SEQ ID NO: 673614 - RNA, 22 nt, Human
uggcuccuaggauggugccugg

SEQ ID NO: 673615 - RNA, 22 nt, Human
agcugaggcucugagagggaag

SEQ ID NO: 673616 - RNA, 22 nt, Human
ucagagugugagacauauugga

SEQ ID NO: 673617 - RNA, 22 nt, Human
uuuauguuauggguaggaucaa

SEQ ID NO: 673618 - RNA, 22 nt, Human
auucaguauucugcugcauaau

SEQ ID NO: 673619 - RNA, 22 nt, Human
ccucuccaguuuuaacgugacc

SEQ ID NO: 673620 - RNA, 22 nt, Human
uuucugucugacaucccugccu

SEQ ID NO: 673621 - RNA, 22 nt, Human
aggagagagcugagcuuugcug

SEQ ID NO: 673622 - RNA, 22 nt, Human
agaggcccuggcuagagcagcu

SEQ ID NO: 673623 - RNA, 22 nt, Human
ccacaucucgguccccucuuug

SEQ ID NO: 673624 - RNA, 22 nt, Human
auuuaguuuaggaaaaguaggu

SEQ ID NO: 673625 - RNA, 22 nt, Human
cugccugccacguucagcugua

SEQ ID NO: 673626 - RNA, 22 nt, Human
ccaucagugaaggagacagauu

SEQ ID NO: 673627 - RNA, 22 nt, Human
guuuuggcucuggcauguggaa

SEQ ID NO: 673628 - RNA, 22 nt, Human
ugcuggagagccuuggccaagg

SEQ ID NO: 673629 - RNA, 22 nt, Human
agcuggcuuuaugguuggcuaa

SEQ ID NO: 673630 - RNA, 22 nt, Human
ugucugaaacuugguccuaugc

SEQ ID NO: 673631 - RNA, 23 nt, Human
acuauaaaguuguucugauuuac

SEQ ID NO: 673632 - RNA, 22 nt, Human
uccagccaugacucggacagug

SEQ ID NO: 673633 - RNA, 22 nt, Human
gcaggaaucuaacccaaggaga

SEQ ID NO: 673634 - RNA, 22 nt, Human
cagcucugagacugaggcuaug

SEQ ID NO: 673635 - RNA, 22 nt, Human
gcuuccuacaugugucugcgag

SEQ ID NO: 673636 - RNA, 22 nt, Human
gaaauguagaauugcuuaacug

SEQ ID NO: 673637 - RNA, 22 nt, Human
gucugccccacaggcucaguug

SEQ ID NO: 673638 - RNA, 22 nt, Human
caugacagaugcaaaggauugg

SEQ ID NO: 673639 - RNA, 22 nt, Human
uuauucagggauaacauccagg

SEQ ID NO: 673640 - RNA, 22 nt, Human
agaugcugggaggcugagugca

SEQ ID NO: 673641 - RNA, 22 nt, Human
gagggagagugauggaccauug

SEQ ID NO: 673642 - RNA, 22 nt, Human
ucacacagcugacagagccuuu

SEQ ID NO: 673643 - RNA, 22 nt, Human
uggcuucugggguggccugcau

SEQ ID NO: 673644 - RNA, 22 nt, Human
agguuauaugucauacugaagu

SEQ ID NO: 673645 - RNA, 22 nt, Human
cucaggaggccauucucaaggu

SEQ ID NO: 673646 - RNA, 22 nt, Human
cacauguguauaugugaggggg

SEQ ID NO: 673647 - RNA, 22 nt, Human
aaguauugugggaaagcagaaa

SEQ ID NO: 673648 - RNA, 22 nt, Human
uuggaauccugagaugagaauu

SEQ ID NO: 673649 - RNA, 22 nt, Human
uuacugauacacauaagaauuu

SEQ ID NO: 673650 - RNA, 22 nt, Human
aguggcagagcugugucuugaa

SEQ ID NO: 673651 - RNA, 22 nt, Human
augcaacacauuugaugagcga

SEQ ID NO: 673652 - RNA, 22 nt, Human
acacugaauauacaaugaauau

SEQ ID NO: 673653 - RNA, 22 nt, Human
uggaauguugauaaacauaggc

SEQ ID NO: 673654 - RNA, 22 nt, Human
ggaacuggagaaugcccucuuu

SEQ ID NO: 673655 - RNA, 22 nt, Human
ugcucccagcuguaggaauguu

SEQ ID NO: 673656 - RNA, 22 nt, Human
ugaggcaggagaaucaccggaa

SEQ ID NO: 673657 - RNA, 22 nt, Human
ggcugcagaggcccccaguggg

SEQ ID NO: 673658 - RNA, 22 nt, Human
cuggagugaagucuggcagcuu

SEQ ID NO: 673659 - RNA, 22 nt, Human
uugcaaauuccaauccaauauu

SEQ ID NO: 673660 - RNA, 22 nt, Human
aaccuggagugcugguuucacu

SEQ ID NO: 673661 - RNA, 22 nt, Human
guucugcuuccuugcuugcgca

SEQ ID NO: 673662 - RNA, 21 nt, Human
uucuucaguuuaauauaaaau

SEQ ID NO: 673663 - RNA, 22 nt, Human
acuuauaagagugcuaugggga

SEQ ID NO: 673664 - RNA, 22 nt, Human
uuauauuucugguagccuucag

SEQ ID NO: 673665 - RNA, 22 nt, Human
gaugucaucaggcuaagacacu

SEQ ID NO: 673666 - RNA, 23 nt, Human
ggcucagaaaaaguccuggccuc

SEQ ID NO: 673667 - RNA, 22 nt, Human
ccagacaugugcccuugaggaa

SEQ ID NO: 673668 - RNA, 22 nt, Human
gcugcucuugaggggcucacug

SEQ ID NO: 673669 - RNA, 20 nt, Human
cuccaaggcuugcaggaggc

SEQ ID NO: 673670 - RNA, 22 nt, Human
cugaggagagaucacguggugu

SEQ ID NO: 673671 - RNA, 22 nt, Human
ucucagguggcccccaugagug

SEQ ID NO: 673672 - RNA, 22 nt, Human
ugguuuuagaguauauucaggg

SEQ ID NO: 673673 - RNA, 22 nt, Human
uggucaaaccaguuaucuguaa

SEQ ID NO: 673674 - RNA, 22 nt, Human
ggccagaggccauccuccugcu

SEQ ID NO: 673675 - RNA, 22 nt, Human
uuuguacacugucuacuaugaa

SEQ ID NO: 673676 - RNA, 22 nt, Human
aaaauaugaaguugucaguaug

SEQ ID NO: 673677 - RNA, 22 nt, Human
agacucugauucccucauguca

SEQ ID NO: 673678 - RNA, 21 nt, Human
aggugccaaggagaagcaggc

SEQ ID NO: 673679 - RNA, 22 nt, Human
gugugaaaguaauugcgguuuu

SEQ ID NO: 673680 - RNA, 20 nt, Human
uccagccacuuccgcugguc

SEQ ID NO: 673681 - RNA, 22 nt, Human
ucuuuaauuguggaagagcagc

SEQ ID NO: 673682 - RNA, 22 nt, Human
cccaggagaucuggaucucguc

SEQ ID NO: 673683 - RNA, 20 nt, Human
agccaggguucuggaugcac

SEQ ID NO: 673684 - RNA, 22 nt, Human
uggcaugauaggaggugcagaa

SEQ ID NO: 673685 - RNA, 22 nt, Human
ggucggggauggccaggcuccc

SEQ ID NO: 673686 - RNA, 22 nt, Human
uuauaauucuggcauaggcugu

SEQ ID NO: 673687 - RNA, 22 nt, Human
agguggggaguauauguaauug

SEQ ID NO: 673688 - RNA, 22 nt, Human
guguggcuuucuggguuuaauu

SEQ ID NO: 673689 - RNA, 22 nt, Human
acuagacugggccagucaaauu

SEQ ID NO: 673690 - RNA, 22 nt, Human
aaguuacuuuaccucuuuagcu

SEQ ID NO: 673691 - RNA, 22 nt, Human
auaaggcagucacuggaauguu

SEQ ID NO: 673692 - RNA, 22 nt, Human
caccagcucuccaccagguuuc

SEQ ID NO: 673693 - RNA, 22 nt, Human
uuagcagcaauggcaucaacua

SEQ ID NO: 673694 - RNA, 22 nt, Human
gcagagccccucaagccagccu

SEQ ID NO: 673695 - RNA, 17 nt, Human
agcuuggagcagcauga

SEQ ID NO: 673696 - RNA, 22 nt, Human
aauaggcaguuggauaugcaag

SEQ ID NO: 673697 - RNA, 22 nt, Human
gaaggagggugcggaucugagc

SEQ ID NO: 673698 - RNA, 22 nt, Human
cagagucauaucagagaauaug

SEQ ID NO: 673699 - RNA, 22 nt, Human
ugcaagugccaugugcacagug

SEQ ID NO: 673700 - RNA, 22 nt, Human
aaauauguaaccaaggugaagu

SEQ ID NO: 673701 - RNA, 22 nt, Human
cuagcacaguaugguaucagau

SEQ ID NO: 673702 - RNA, 20 nt, Human
gaguuccccauuucuccugg

SEQ ID NO: 673703 - RNA, 22 nt, Human
uucaagucuggagaucuggaac

SEQ ID NO: 673704 - RNA, 22 nt, Human
auuuccugguugcauuggcuuu

SEQ ID NO: 673705 - RNA, 22 nt, Human
agagaugcaggguacauggaau

SEQ ID NO: 673706 - RNA, 22 nt, Human
agacauaagugcuaugacauug

SEQ ID NO: 673707 - RNA, 22 nt, Human
aggcacagccucccuucacaug

SEQ ID NO: 673708 - RNA, 22 nt, Human
aaguucaaggcagguccugagg

SEQ ID NO: 673709 - RNA, 22 nt, Human
gcagcuuuuuggaugucaguua

SEQ ID NO: 673710 - RNA, 22 nt, Human
cccagccaaggugcugguguug

SEQ ID NO: 673711 - RNA, 22 nt, Human
acucuugucucaacuuuuguau

SEQ ID NO: 673712 - RNA, 22 nt, Human
aguuuuuccugauuuuacagaa

SEQ ID NO: 673713 - RNA, 20 nt, Human
uuuuuccuucucuacaggca

SEQ ID NO: 673714 - RNA, 22 nt, Human
cuugaaaauaagaaagacuuuc

SEQ ID NO: 673715 - RNA, 22 nt, Human
ggacacugaagaaucucagaug

SEQ ID NO: 673716 - RNA, 18 nt, Human
agcuucccucugagaggg

SEQ ID NO: 673717 - RNA, 22 nt, Human
uacugcaugggugcaugcugcu

SEQ ID NO: 673718 - RNA, 22 nt, Human
agggcagcacagcugugcuccu

SEQ ID NO: 673719 - RNA, 22 nt, Human
gcacugggcuccaggaaggagg

SEQ ID NO: 673720 - RNA, 19 nt, Human
ugccagcucacaggagcuc

SEQ ID NO: 673721 - RNA, 22 nt, Human
gcccuccagcuguugcgcgucg

SEQ ID NO: 673722 - RNA, 22 nt, Human
cugcacagcccucaagagccug

SEQ ID NO: 673723 - RNA, 22 nt, Human
uuucuaaggugauccuuucuua

SEQ ID NO: 673724 - RNA, 21 nt, Human
gcucugucccugcuguguguc

SEQ ID NO: 673725 - RNA, 22 nt, Human
caugcagaugucaugaggcaug

SEQ ID NO: 673726 - RNA, 22 nt, Human
uucaguguacagugaagggauu

SEQ ID NO: 673727 - RNA, 22 nt, Human
aaagauguuaauagcaccauuu

SEQ ID NO: 673728 - RNA, 22 nt, Human
agcagaaucuguccuuggaaga

SEQ ID NO: 673729 - RNA, 22 nt, Human
gcaguccuggaggaagguguga

SEQ ID NO: 673730 - RNA, 23 nt, Human
guaaaauacgcagugcaguguga

SEQ ID NO: 673731 - RNA, 19 nt, Human
aggcuaaagagucuugcgu

SEQ ID NO: 673732 - RNA, 22 nt, Human
auucugcugcacaccuuccccc

SEQ ID NO: 673733 - RNA, 22 nt, Human
gcuggagaggaucccaaagcca

SEQ ID NO: 673734 - RNA, 22 nt, Human
cagggcucgcucuugcccuucg

SEQ ID NO: 673735 - RNA, 22 nt, Human
acagggcagugucuugaaaaau

SEQ ID NO: 673736 - RNA, 22 nt, Human
cccagcucuggaagguggggga

SEQ ID NO: 673737 - RNA, 22 nt, Human
uugagcuguaaggugggaugug

SEQ ID NO: 673738 - RNA, 22 nt, Human
gagccacagcaaccucaaagga

SEQ ID NO: 673739 - RNA, 22 nt, Human
cugcuguggugucaagcaucuc

SEQ ID NO: 673740 - RNA, 22 nt, Human
aauaucagcacuuuugugguau

SEQ ID NO: 673741 - RNA, 22 nt, Human
agaugaguagguagcauuagua

SEQ ID NO: 673742 - RNA, 22 nt, Human
ugaggagcaggguggcuuacuc

SEQ ID NO: 673743 - RNA, 22 nt, Human
uucugcagcccaacaguaguuu

SEQ ID NO: 673744 - RNA, 22 nt, Human
ucacagaacaauguuuaguucu

SEQ ID NO: 673745 - RNA, 22 nt, Human
ugccugcauuuuguggcuggcu

SEQ ID NO: 673746 - RNA, 22 nt, Human
cucugugucugaagcccuauuu

SEQ ID NO: 673747 - RNA, 22 nt, Human
aacacuuucuuccuugcucagg

SEQ ID NO: 673748 - RNA, 22 nt, Human
ucacauaaauuuaccagaugau

SEQ ID NO: 673749 - RNA, 22 nt, Human
uaacauuguuaugaaucagguc

SEQ ID NO: 673750 - RNA, 22 nt, Human
aggaaaaucaaugucuuuuuaa

SEQ ID NO: 673751 - RNA, 22 nt, Human
cuucaaguugucugaggguggg

SEQ ID NO: 673752 - RNA, 22 nt, Human
ugccgcagugcggggagggccc

SEQ ID NO: 673753 - RNA, 22 nt, Human
auguguuuuuauucuggcaugu

SEQ ID NO: 673754 - RNA, 22 nt, Human
guaugaaggcgagagcccacua

SEQ ID NO: 673755 - RNA, 22 nt, Human
auggaaaucgaugucuaaguua

SEQ ID NO: 673756 - RNA, 22 nt, Human
gccaauuuccugagguaaagcu

SEQ ID NO: 673757 - RNA, 22 nt, Human
cugcuggccuagcccauccucu

SEQ ID NO: 673758 - RNA, 22 nt, Human
agagggagcccagucauagcug

SEQ ID NO: 673759 - RNA, 22 nt, Human
acuccacauuugaacacaguuc

SEQ ID NO: 673760 - RNA, 22 nt, Human
gcaugguggccuuaggguagcc

SEQ ID NO: 673761 - RNA, 22 nt, Human
guuugcauuccaauuuagggga

SEQ ID NO: 673762 - RNA, 17 nt, Human
gagguaggaagugaguc

SEQ ID NO: 673763 - RNA, 22 nt, Human
uuuauucuagcucagaauaguu

SEQ ID NO: 673764 - RNA, 22 nt, Human
ggcggcuuauucacucugggga

SEQ ID NO: 673765 - RNA, 22 nt, Human
cuuguaauuauaauguacuguu

SEQ ID NO: 673766 - RNA, 22 nt, Human
ccaguggaauuaaaaauaagug

SEQ ID NO: 673767 - RNA, 22 nt, Human
uuuucucuauauugucugugaa

SEQ ID NO: 673768 - RNA, 18 nt, Human
ugacucacccugucagug

SEQ ID NO: 673769 - RNA, 22 nt, Human
acagcuauagacgauguauaga

SEQ ID NO: 673770 - RNA, 22 nt, Human
ccugugggccaaggaccugcca

SEQ ID NO: 673771 - RNA, 22 nt, Human
ugcuggcauaccaccuaguuca

SEQ ID NO: 673772 - RNA, 22 nt, Human
gcagcaaggaugaagcacuugg

SEQ ID NO: 673773 - RNA, 22 nt, Human
auaccaccaucuaugaaaggua

SEQ ID NO: 673774 - RNA, 22 nt, Human
aaagugcacuagaauccagauu

SEQ ID NO: 673775 - RNA, 22 nt, Human
aucauuuaugccccaauuagau

SEQ ID NO: 673776 - RNA, 22 nt, Human
ugggcucagccaugaccuccac

SEQ ID NO: 673777 - RNA, 22 nt, Human
ugccuucaccaggccuucagcc

SEQ ID NO: 673778 - RNA, 22 nt, Human
ccaaggcaggggaucaaaguuu

SEQ ID NO: 673779 - RNA, 22 nt, Human
ucuccaggcacuaccuggguaa

SEQ ID NO: 673780 - RNA, 22 nt, Human
aaggccaugaccacuugcugug

SEQ ID NO: 673781 - RNA, 22 nt, Human
uauuuuaucugccagaguggag

SEQ ID NO: 673782 - RNA, 22 nt, Human
gccuuggagaucacugcucaug

SEQ ID NO: 673783 - RNA, 22 nt, Human
auuaguguacaucucacacgca

SEQ ID NO: 673784 - RNA, 22 nt, Human
aauccuggccuagcugggcuca

SEQ ID NO: 673785 - RNA, 22 nt, Human
auccaagucagggauaguuuga

SEQ ID NO: 673786 - RNA, 22 nt, Human
ugaugagggcaguucuuguugc

SEQ ID NO: 673787 - RNA, 22 nt, Human
agagggaaugugauugcaccau

SEQ ID NO: 673788 - RNA, 22 nt, Human
gaaggucaccuccccucucugg

SEQ ID NO: 673789 - RNA, 22 nt, Human
cuguggcuccauagaaguugca

SEQ ID NO: 673790 - RNA, 22 nt, Human
ccugggcuuuggaacaguacuu

SEQ ID NO: 673791 - RNA, 23 nt, Human
augauaaugccauuaacuuugau

SEQ ID NO: 673792 - RNA, 22 nt, Human
aucuagauuagguauaagagcu

SEQ ID NO: 673793 - RNA, 22 nt, Human
cugaagcuuaguuuacgcucca

SEQ ID NO: 673794 - RNA, 22 nt, Human
aaaagcaguuuauagucaguug

SEQ ID NO: 673795 - RNA, 22 nt, Human
ucugaaauggcagcgggaauga

SEQ ID NO: 673796 - RNA, 22 nt, Human
uuuagggacaagggucuggggu

SEQ ID NO: 673797 - RNA, 22 nt, Human
uguggcucucagauccuccaau

SEQ ID NO: 673798 - RNA, 22 nt, Human
gagagggcucuguguggguacu

SEQ ID NO: 673799 - RNA, 22 nt, Human
gggcaguguugugguucucuau

SEQ ID NO: 673800 - RNA, 22 nt, Human
gugccaucauucaauaaauuca

SEQ ID NO: 673801 - RNA, 22 nt, Human
caaugucagucaagcagcaaau

SEQ ID NO: 673802 - RNA, 20 nt, Human
acguggccaccaguggcuua

SEQ ID NO: 673803 - RNA, 22 nt, Human
gcagugcaugucggaacucauu

SEQ ID NO: 673804 - RNA, 22 nt, Human
uccugaggcccuguuagggucu

SEQ ID NO: 673805 - RNA, 20 nt, Human
uucugagauuagguuacaaa

SEQ ID NO: 673806 - RNA, 22 nt, Human
ucagggaaccucuccuguuucu

SEQ ID NO: 673807 - RNA, 22 nt, Human
aggggugacacauaucagugca

SEQ ID NO: 673808 - RNA, 22 nt, Human
ucccacagggcuucucuguaca

SEQ ID NO: 673809 - RNA, 22 nt, Human
ccacaggaaguuaugaguacua

SEQ ID NO: 673810 - RNA, 22 nt, Human
aucucagaucuacagaucuaca

SEQ ID NO: 673811 - RNA, 22 nt, Human
aaagcuuagcauuuucaaaaug

SEQ ID NO: 673812 - RNA, 19 nt, Human
ugagacagggauucaggug

SEQ ID NO: 673813 - RNA, 20 nt, Human
auacacaugcagacagaugc

SEQ ID NO: 673814 - RNA, 22 nt, Human
cagguucagcaggaggcauccc

SEQ ID NO: 673815 - RNA, 22 nt, Human
ucacagaagcaucauacccgga

SEQ ID NO: 673816 - RNA, 22 nt, Human
uguccucagauaugucuacucu

SEQ ID NO: 673817 - RNA, 20 nt, Human
aaguuacauuguauuguacc

SEQ ID NO: 673818 - RNA, 22 nt, Human
aucuuugucacucuacugucua

SEQ ID NO: 673819 - RNA, 22 nt, Human
aaauuguugaucuacaguaagg

SEQ ID NO: 673820 - RNA, 22 nt, Human
ucuucugagacuucucuuuggu

SEQ ID NO: 673821 - RNA, 22 nt, Human
agagcaauggcauccagcugau

SEQ ID NO: 673822 - RNA, 22 nt, Human
uacguuuagcuuuaugagacau

SEQ ID NO: 673823 - RNA, 22 nt, Human
ccugcccuagagaugacacaau

SEQ ID NO: 673824 - RNA, 22 nt, Human
acacuucaggacucuggggcaa

SEQ ID NO: 673825 - RNA, 22 nt, Human
ucugagugucuuaauaggcucu

SEQ ID NO: 673826 - RNA, 22 nt, Human
gcugucugucucugugacuuaa

SEQ ID NO: 673827 - RNA, 22 nt, Human
aucuguuguuuguuugcuaaag

SEQ ID NO: 673828 - RNA, 22 nt, Human
ccucccugcuccucaacuggca

SEQ ID NO: 673829 - RNA, 22 nt, Human
ggcaaaaaccauaauuacuuuu

SEQ ID NO: 673830 - RNA, 23 nt, Human
uacuauaacgcugugucagcucc

SEQ ID NO: 673831 - RNA, 22 nt, Human
ucaccucuuuuuuaacaggcuu

SEQ ID NO: 673832 - RNA, 22 nt, Human
cucuggagaacgcuauggaucu

SEQ ID NO: 673833 - RNA, 19 nt, Human
ucccgcccacugagcgugc

SEQ ID NO: 673834 - RNA, 22 nt, Human
uguguauagaugcaugcauaua

SEQ ID NO: 673835 - RNA, 22 nt, Human
uuguccugugucuguuuggauu

SEQ ID NO: 673836 - RNA, 22 nt, Human
ugugugggcaugcuuuuaauuu

SEQ ID NO: 673837 - RNA, 20 nt, Human
uccuggaggcuucauccaua

SEQ ID NO: 673838 - RNA, 22 nt, Human
ugguuuugcuaaaauagaaaga

SEQ ID NO: 673839 - RNA, 22 nt, Human
ugaaaacuugacaagugaggua

SEQ ID NO: 673840 - RNA, 22 nt, Human
uucaaagauuuucccaaagcuc

SEQ ID NO: 673841 - RNA, 22 nt, Human
ucaggaugaagucagagggguc

SEQ ID NO: 673842 - RNA, 20 nt, Human
ugagugcuccauucugccca

SEQ ID NO: 673843 - RNA, 22 nt, Human
aggaccauccuaagguaggcaa

SEQ ID NO: 673844 - RNA, 22 nt, Human
cucaggauccaucuccugcccu

SEQ ID NO: 673845 - RNA, 22 nt, Human
uuuauugucuaugaacugcuug

SEQ ID NO: 673846 - RNA, 22 nt, Human
augacaagaguguucagggaga

SEQ ID NO: 673847 - RNA, 22 nt, Human
gagagcugauagaugagcuacu

SEQ ID NO: 673848 - RNA, 22 nt, Human
ugagaggaacaggcaguagguu

SEQ ID NO: 673849 - RNA, 22 nt, Human
guuagugugacugaggaaugca

SEQ ID NO: 673850 - RNA, 15 nt, Human
uugcuuuaagacaug

SEQ ID NO: 673851 - RNA, 22 nt, Human
cugagagaguaaaguagaauua

SEQ ID NO: 673852 - RNA, 22 nt, Human
augcuugcccauguuucugaag

SEQ ID NO: 673853 - RNA, 22 nt, Human
cuucuauuuucaugccuggguc

SEQ ID NO: 673854 - RNA, 22 nt, Human
guuacucuuccccggggucugg

SEQ ID NO: 673855 - RNA, 22 nt, Human
acaggagcucuagggacagcac

SEQ ID NO: 673856 - RNA, 22 nt, Human
uucuggagaucugccuauggga

SEQ ID NO: 673857 - RNA, 22 nt, Human
ggcucagaccucccagcuccag

SEQ ID NO: 673858 - RNA, 22 nt, Human
ucagggcauacucuucaagguc

SEQ ID NO: 673859 - RNA, 22 nt, Human
ggcuguaguuaccugaugaaau

SEQ ID NO: 673860 - RNA, 22 nt, Human
gacuugggugucggggcagucu

SEQ ID NO: 673861 - RNA, 20 nt, Human
gggcugugccuccucguggu

SEQ ID NO: 673862 - RNA, 22 nt, Human
agaauaaauguuggacuuagga

SEQ ID NO: 673863 - RNA, 20 nt, Human
cuggggacagcaauggcugu

SEQ ID NO: 673864 - RNA, 22 nt, Human
cagauguuguuccugccuguag

SEQ ID NO: 673865 - RNA, 22 nt, Human
aaaaguaauugcgguuuuugcu

SEQ ID NO: 673866 - RNA, 22 nt, Human
acagcuuuugaaaaauuacugg

SEQ ID NO: 673867 - RNA, 22 nt, Human
auuacaucaguugacaugugag

SEQ ID NO: 673868 - RNA, 22 nt, Human
uccuggccuuauccccaaacug

SEQ ID NO: 673869 - RNA, 22 nt, Human
ggcuggcacucuguccaguguc

SEQ ID NO: 673870 - RNA, 22 nt, Human
aucucaaaugauuacaccaagc

SEQ ID NO: 673871 - RNA, 22 nt, Human
aaauugcaaaaguacuuuuagg

SEQ ID NO: 673872 - RNA, 19 nt, Human
gcacacauacacccuuugg

SEQ ID NO: 673873 - RNA, 22 nt, Human
gugcccaguaaaugaaagcuuu

SEQ ID NO: 673874 - RNA, 22 nt, Human
ucuuaaaccacaaaauucagag

SEQ ID NO: 673875 - RNA, 22 nt, Human
ucuuccagauacuuccugacuu

SEQ ID NO: 673876 - RNA, 22 nt, Human
aauauccacacugugucccugc

SEQ ID NO: 673877 - RNA, 22 nt, Human
cuggccucagagggucauggug

SEQ ID NO: 673878 - RNA, 21 nt, Human
aauaaccacuaauauaguggc

SEQ ID NO: 673879 - RNA, 22 nt, Human
cugccuugaggagguuguggga

SEQ ID NO: 673880 - RNA, 22 nt, Human
gagagagaaccccgugcccuuc

SEQ ID NO: 673881 - RNA, 22 nt, Human
aggagcuguuuuguucagcaaa

SEQ ID NO: 673882 - RNA, 22 nt, Human
gcugugugcugggcauggcacu

SEQ ID NO: 673883 - RNA, 22 nt, Human
auagaacagggcacugucauga

SEQ ID NO: 673884 - RNA, 22 nt, Human
uguauucagggacauauaugua

SEQ ID NO: 673885 - RNA, 22 nt, Human
uucuaccagaccccagacuugu

SEQ ID NO: 673886 - RNA, 22 nt, Human
agugguggagccaggaaaugug

SEQ ID NO: 673887 - RNA, 22 nt, Human
ccaggaggcuucguccguggag

SEQ ID NO: 673888 - RNA, 22 nt, Human
acaggcugaaaguuaaguucug

SEQ ID NO: 673889 - RNA, 22 nt, Human
aaguuguagucagaugucaguu

SEQ ID NO: 673890 - RNA, 22 nt, Human
ugcacgugggcucucugcucuu

SEQ ID NO: 673891 - RNA, 22 nt, Human
aaggccaggccuagcacggagg

SEQ ID NO: 673892 - RNA, 22 nt, Human
agaacauggauugucaaaggua

SEQ ID NO: 673893 - RNA, 22 nt, Human
augcauaauguauguauugacu

SEQ ID NO: 673894 - RNA, 22 nt, Human
agagcagauggagcuggaagag

SEQ ID NO: 673895 - RNA, 22 nt, Human
acugcauuugucugucucaauu

SEQ ID NO: 673896 - RNA, 22 nt, Human
acagaggcugcgcuugggaacg

SEQ ID NO: 673897 - RNA, 22 nt, Human
uucaggaggugagcaagaaggg

SEQ ID NO: 673898 - RNA, 22 nt, Human
cagcaucuucuccaaagcugcc

SEQ ID NO: 673899 - RNA, 22 nt, Human
uagaggugagauauuuuauuuu

SEQ ID NO: 673900 - RNA, 20 nt, Human
aggcaagguagaugucugcu

SEQ ID NO: 673901 - RNA, 22 nt, Human
acuuucugcaguguuggaaaug

SEQ ID NO: 673902 - RNA, 22 nt, Human
aagccucuggggccucaucugu

SEQ ID NO: 673903 - RNA, 22 nt, Human
acuccagaggcagcugugcuga

SEQ ID NO: 673904 - RNA, 15 nt, Human
cagucccagggaccc

SEQ ID NO: 673905 - RNA, 23 nt, Human
cuaguaaauccugaauagcaggc

SEQ ID NO: 673906 - RNA, 22 nt, Human
uuuacaccaaaaugacacagag

SEQ ID NO: 673907 - RNA, 22 nt, Human
guuucauaggcaugugaccuau

SEQ ID NO: 673908 - RNA, 22 nt, Human
cauucucaauaguagaugagua

SEQ ID NO: 673909 - RNA, 20 nt, Human
uaauuugauaucuauaaguu

SEQ ID NO: 673910 - RNA, 22 nt, Human
uagauggaggcuagaugcaggg

SEQ ID NO: 673911 - RNA, 22 nt, Human
cugcccaggaaccagaggggca

SEQ ID NO: 673912 - RNA, 20 nt, Human
gagucacagaagaagcugaa

SEQ ID NO: 673913 - RNA, 22 nt, Human
cucauuuacucaucugcaaaac

SEQ ID NO: 673914 - RNA, 22 nt, Human
uacauugauucaggauauaggc

SEQ ID NO: 673915 - RNA, 22 nt, Human
ccuggccucgugcucacggcuc

SEQ ID NO: 673916 - RNA, 22 nt, Human
cugcucuguauaugagcaggaa

SEQ ID NO: 673917 - RNA, 22 nt, Human
cuucugcaagagcaucaguugu

SEQ ID NO: 673918 - RNA, 22 nt, Human
caaauguauaaauguacuuucu

SEQ ID NO: 673919 - RNA, 20 nt, Human
uuucaaacugcaccuuugcu

SEQ ID NO: 673920 - RNA, 22 nt, Human
ucagcaggcugucagcaggggc

SEQ ID NO: 673921 - RNA, 19 nt, Human
guuaucaaggggcuacuuu

SEQ ID NO: 673922 - RNA, 22 nt, Human
ggagcugaaggggugggcucag

SEQ ID NO: 673923 - RNA, 22 nt, Human
acaggcagguccugucccagcu

SEQ ID NO: 673924 - RNA, 22 nt, Human
guguaaggugaaaucaacaaau

SEQ ID NO: 673925 - RNA, 22 nt, Human
caaaguauaguguaggauggca

SEQ ID NO: 673926 - RNA, 22 nt, Human
caaauuuuguguguucucuagu

SEQ ID NO: 673927 - RNA, 22 nt, Human
cuggagucuucagcuugcugcc

SEQ ID NO: 673928 - RNA, 22 nt, Human
ucucuaaagauauuuauggcaa

SEQ ID NO: 673929 - RNA, 22 nt, Human
cugcuccagacaccugcagggg

SEQ ID NO: 673930 - RNA, 18 nt, Human
uggagcugagugcugugc

SEQ ID NO: 673931 - RNA, 22 nt, Human
auacuuuggggguuaguguaga

SEQ ID NO: 673932 - RNA, 22 nt, Human
gaaacauauuaauccagugaaa

SEQ ID NO: 673933 - RNA, 22 nt, Human
ucacagcuauucucauguauuu

SEQ ID NO: 673934 - RNA, 22 nt, Human
aacugcuguggccuaguacuua

SEQ ID NO: 673935 - RNA, 22 nt, Human
aucacacuguuauuuuaguuaa

SEQ ID NO: 673936 - RNA, 22 nt, Human
uuaagaucaagauaagcaauaa

SEQ ID NO: 673937 - RNA, 22 nt, Human
agggucugacaaugugacuuag

SEQ ID NO: 673938 - RNA, 22 nt, Human
ugcugaggacuaaaggagauga

SEQ ID NO: 673939 - RNA, 22 nt, Human
uacauuccauguguguguauuc

SEQ ID NO: 673940 - RNA, 22 nt, Human
ucaguuuucauuucaugagcag

SEQ ID NO: 673941 - RNA, 22 nt, Human
ggacagcccauacacaugucug

SEQ ID NO: 673942 - RNA, 22 nt, Human
cagcaaagguagaagcacagga

SEQ ID NO: 673943 - RNA, 22 nt, Human
uugaauugaaacauacccuggu

SEQ ID NO: 673944 - RNA, 22 nt, Human
agcuggccuuagugagcaccug

SEQ ID NO: 673945 - RNA, 22 nt, Human
gagaggugaaggcugcccuggg

SEQ ID NO: 673946 - RNA, 16 nt, Human
ucacacauuuguuggu

SEQ ID NO: 673947 - RNA, 22 nt, Human
ggaaacaaaccacucauggugg

SEQ ID NO: 673948 - RNA, 22 nt, Human
uccagcagacucaucagcaagg

SEQ ID NO: 673949 - RNA, 22 nt, Human
gagagugcugaacggcaagggu

SEQ ID NO: 673950 - RNA, 22 nt, Human
acugccuggcagagguuugcaa

SEQ ID NO: 673951 - RNA, 22 nt, Human
uggccagaaccugcaguaggcc

SEQ ID NO: 673952 - RNA, 22 nt, Human
uaacaaugggaaggacugauga

SEQ ID NO: 673953 - RNA, 22 nt, Human
agccaggcgcaguggcuuaugc

SEQ ID NO: 673954 - RNA, 22 nt, Human
aauuacuuaacucucugggccu

SEQ ID NO: 673955 - RNA, 22 nt, Human
uauucccacccuaaguaguagg

SEQ ID NO: 673956 - RNA, 22 nt, Human
gggaugucacugugccuggcac

SEQ ID NO: 673957 - RNA, 22 nt, Human
uacacaaugacuuaagauguca

SEQ ID NO: 673958 - RNA, 22 nt, Human
ugauacuuuucuuuuagacuaa

SEQ ID NO: 673959 - RNA, 22 nt, Human
uccagagagguuucuccaugcu

SEQ ID NO: 673960 - RNA, 22 nt, Human
uggcagugaaagacaauugggc

SEQ ID NO: 673961 - RNA, 22 nt, Human
uccuggcugucacucggguuga

SEQ ID NO: 673962 - RNA, 22 nt, Human
aggcagccagauggcagccugc

SEQ ID NO: 673963 - RNA, 22 nt, Human
uggaagccaggcccgcuccuaa

SEQ ID NO: 673964 - RNA, 22 nt, Human
agcagcauagaagcugggagga

SEQ ID NO: 673965 - RNA, 22 nt, Human
uuuggacugcaugaugaucugg

SEQ ID NO: 673966 - RNA, 22 nt, Human
gugcugggugcugcagacaggu

SEQ ID NO: 673967 - RNA, 22 nt, Human
ucucugaagagucagacauaac

SEQ ID NO: 673968 - RNA, 22 nt, Human
agcagagcuuuuuggacucaga

SEQ ID NO: 673969 - RNA, 22 nt, Human
gccaacagcugggugcaugucc

SEQ ID NO: 673970 - RNA, 22 nt, Human
agaccuggguucgaguccuaac

SEQ ID NO: 673971 - RNA, 22 nt, Human
ucacaacugggugucuucauca

SEQ ID NO: 673972 - RNA, 22 nt, Human
augggguggaguccgggcagcg

SEQ ID NO: 673973 - RNA, 22 nt, Human
ccucaggguggcaucagaucuu

SEQ ID NO: 673974 - RNA, 22 nt, Human
cugcugugauugggagaaaccg

SEQ ID NO: 673975 - RNA, 22 nt, Human
gagcugggcacacgccacuuga

SEQ ID NO: 673976 - RNA, 22 nt, Human
gugaagucaagaaugcaauuug

SEQ ID NO: 673977 - RNA, 23 nt, Human
gcuuccauucuaguuugcugugc

SEQ ID NO: 673978 - RNA, 22 nt, Human
uacugugaauacaaaauaaauu

SEQ ID NO: 673979 - RNA, 22 nt, Human
uguuuacucacuguauccacaa

SEQ ID NO: 673980 - RNA, 22 nt, Human
gcugcagacugggaggcaggug

SEQ ID NO: 673981 - RNA, 18 nt, Human
gagaggcccggcugugcc

SEQ ID NO: 673982 - RNA, 22 nt, Human
ucuggcuccuggcuccacugcc

SEQ ID NO: 673983 - RNA, 22 nt, Human
agaugcagaguuugcuguggac

SEQ ID NO: 673984 - RNA, 22 nt, Human
gaacaaugagucauucagguga

SEQ ID NO: 673985 - RNA, 22 nt, Human
auaaugcauuuagaauaauuca

SEQ ID NO: 673986 - RNA, 22 nt, Human
gguggaugcugacuguucugcu

SEQ ID NO: 673987 - RNA, 22 nt, Human
ugcauuccuccaccuccugcac

SEQ ID NO: 673988 - RNA, 22 nt, Human
ugccugaacaugaauaguuuau

SEQ ID NO: 673989 - RNA, 19 nt, Human
uggcaggcccaggauggac

SEQ ID NO: 673990 - RNA, 22 nt, Human
cugugccacugcccugccacgc

SEQ ID NO: 673991 - RNA, 22 nt, Human
cagcaagccaaauguggcccga

SEQ ID NO: 673992 - RNA, 22 nt, Human
accaguggaugaaugcuggacc

SEQ ID NO: 673993 - RNA, 18 nt, Human
acccuggcaugcucuucc

SEQ ID NO: 673994 - RNA, 22 nt, Human
aauugcuuugaagaagggagcg

SEQ ID NO: 673995 - RNA, 22 nt, Human
uauggcuucauugugcuccgca

SEQ ID NO: 673996 - RNA, 22 nt, Human
acugcaggccuuggugccagca

SEQ ID NO: 673997 - RNA, 22 nt, Human
ugagcacaaguuugcaugugug

SEQ ID NO: 673998 - RNA, 22 nt, Human
aacagauuugugaagcuacuca

SEQ ID NO: 673999 - RNA, 22 nt, Human
aaugauaccaaacauguagaua

SEQ ID NO: 674000 - RNA, 22 nt, Human
uugaggccugcuggaagguguu

SEQ ID NO: 674001 - RNA, 22 nt, Human
cucagauaaucuuugagucuuc

SEQ ID NO: 674002 - RNA, 22 nt, Human
agaguccugaguggaaaaaugg

SEQ ID NO: 674003 - RNA, 22 nt, Human
uccugcagccuugggcuggagc

SEQ ID NO: 674004 - RNA, 22 nt, Human
uagugcuuaaaaguggaagaga

SEQ ID NO: 674005 - RNA, 22 nt, Human
ccuucagaaugaaauucuaaug

SEQ ID NO: 674006 - RNA, 22 nt, Human
aauauccagguagaugucuucu

SEQ ID NO: 674007 - RNA, 22 nt, Human
ggagcuaguaguuucaugaguu

SEQ ID NO: 674008 - RNA, 22 nt, Human
uggccuggaaccuggcagggac

SEQ ID NO: 674009 - RNA, 22 nt, Human
agagaagauucuuauaugucuu

SEQ ID NO: 674010 - RNA, 22 nt, Human
uggcucugucgccguuuggaau

SEQ ID NO: 674011 - RNA, 22 nt, Human
gagccagccuccgccucucucc

SEQ ID NO: 674012 - RNA, 22 nt, Human
aagugaugcuacgacuuugaca

SEQ ID NO: 674013 - RNA, 20 nt, Human
ucagagucaucaaagauggu

SEQ ID NO: 674014 - RNA, 22 nt, Human
cuggaaggagaaggaggcugug

SEQ ID NO: 674015 - RNA, 20 nt, Human
uauuaugaccuguguucugg

SEQ ID NO: 674016 - RNA, 22 nt, Human
cacagcuuugcuuuccuuaaua

SEQ ID NO: 674017 - RNA, 18 nt, Human
ggcuuugcugggguuucu

SEQ ID NO: 674018 - RNA, 22 nt, Human
augaugaagaguaacaggcuga

SEQ ID NO: 674019 - RNA, 22 nt, Human
aagagcauuuccacuggcacug

SEQ ID NO: 674020 - RNA, 21 nt, Human
ccaggcuggccaugguauuga

SEQ ID NO: 674021 - RNA, 22 nt, Human
gccccuucguggaagugcauuc

SEQ ID NO: 674022 - RNA, 22 nt, Human
uacacaggggagcaugguugac

SEQ ID NO: 674023 - RNA, 22 nt, Human
agcauuaagagagacugaacug

SEQ ID NO: 674024 - RNA, 18 nt, Human
gcucaguguguuaacacu

SEQ ID NO: 674025 - RNA, 22 nt, Human
agcccaggagccuuuggagggu

SEQ ID NO: 674026 - RNA, 22 nt, Human
gggaccuggcaccuuugcucug

SEQ ID NO: 674027 - RNA, 22 nt, Human
aggacagagcccuaguuucaua

SEQ ID NO: 674028 - RNA, 22 nt, Human
gugugagagaagcugccaugga

SEQ ID NO: 674029 - RNA, 22 nt, Human
gaaaauugaaucaguagcugau

SEQ ID NO: 674030 - RNA, 21 nt, Human
gcccacagugaggaggauccc

SEQ ID NO: 674031 - RNA, 22 nt, Human
gggcuccaacuacaucagccuu

SEQ ID NO: 674032 - RNA, 22 nt, Human
caauuucuaacauuccauggau

SEQ ID NO: 674033 - RNA, 22 nt, Human
aagcacagaugcaagggggacc

SEQ ID NO: 674034 - RNA, 22 nt, Human
agcagcaggaggccauugucuu

SEQ ID NO: 674035 - RNA, 22 nt, Human
agaaggccaauagggugcacug

SEQ ID NO: 674036 - RNA, 22 nt, Human
gcucacuuaauuucaugcuaca

SEQ ID NO: 674037 - RNA, 22 nt, Human
aagagccagcuagugaagaggc

SEQ ID NO: 674038 - RNA, 22 nt, Human
uccagggaagagcagaggcuac

SEQ ID NO: 674039 - RNA, 18 nt, Human
gaguuuagguuguagaau

SEQ ID NO: 674040 - RNA, 22 nt, Human
gagcuuccacucuagaaggagu

SEQ ID NO: 674041 - RNA, 22 nt, Human
acuguaaaagaaggucuuugca

SEQ ID NO: 674042 - RNA, 16 nt, Human
gcacacacaucaauga

SEQ ID NO: 674043 - RNA, 22 nt, Human
uuugucuuauccaaucucucag

SEQ ID NO: 674044 - RNA, 22 nt, Human
uugaucaucuaagaguaauagu

SEQ ID NO: 674045 - RNA, 22 nt, Human
ugaaaacuccaaguuucaucag

SEQ ID NO: 674046 - RNA, 22 nt, Human
uucacaaacaccagaauggcua

SEQ ID NO: 674047 - RNA, 22 nt, Human
auauguguacgugcaguauaua

SEQ ID NO: 674048 - RNA, 22 nt, Human
gcagcugguuaaugggagaauu

SEQ ID NO: 674049 - RNA, 22 nt, Human
ggugggagggcugcguuccucu

SEQ ID NO: 674050 - RNA, 22 nt, Human
aaaggcagaguuguuggaggca

SEQ ID NO: 674051 - RNA, 19 nt, Human
ccaggccugcgggcguugg

SEQ ID NO: 674052 - RNA, 23 nt, Human
gcagagguuuuucaguaugguuu

SEQ ID NO: 674053 - RNA, 22 nt, Human
agauacaccggaaccugaggcu

SEQ ID NO: 674054 - RNA, 23 nt, Human
aaucuauacuuaggcugguaaua

SEQ ID NO: 674055 - RNA, 22 nt, Human
uugggcagguguggcucuccuu

SEQ ID NO: 674056 - RNA, 22 nt, Human
gaagucugagugggggccaggc

SEQ ID NO: 674057 - RNA, 22 nt, Human
agugacaaggccugaagcuccu

SEQ ID NO: 674058 - RNA, 22 nt, Human
ugagcugugugacauugagcca

SEQ ID NO: 674059 - RNA, 22 nt, Human
uuacacacucugcccugcuguu

SEQ ID NO: 674060 - RNA, 22 nt, Human
uucauucuuauuugugaucugg

SEQ ID NO: 674061 - RNA, 22 nt, Human
gcugccagcacaguucagcugu

SEQ ID NO: 674062 - RNA, 18 nt, Human
gcagagcagaagcucaag

SEQ ID NO: 674063 - RNA, 20 nt, Human
uagaggggacaaucauugcc

SEQ ID NO: 674064 - RNA, 20 nt, Human
gcugaggggucuauggcaua

SEQ ID NO: 674065 - RNA, 22 nt, Human
gaaauguagaguaucugaggau

SEQ ID NO: 674066 - RNA, 22 nt, Human
uagaacagaguuccagugauca

SEQ ID NO: 674067 - RNA, 17 nt, Human
aggccucccuccaggcc

SEQ ID NO: 674068 - RNA, 18 nt, Human
gcagugaagaaagagcuu

SEQ ID NO: 674069 - RNA, 22 nt, Human
ggugggaggcaggcugcuccca

SEQ ID NO: 674070 - RNA, 22 nt, Human
acuugggaaagaaguuucaccg

SEQ ID NO: 674071 - RNA, 22 nt, Human
uugcccuggggcuggccuggca

SEQ ID NO: 674072 - RNA, 22 nt, Human
ucacccagacugucugacucuu

SEQ ID NO: 674073 - RNA, 22 nt, Human
uuauauccaaaggcaaggagga

SEQ ID NO: 674074 - RNA, 22 nt, Human
aacaucauuauguccauuaaug

SEQ ID NO: 674075 - RNA, 22 nt, Human
auguuucucacuguuucucuau

SEQ ID NO: 674076 - RNA, 22 nt, Human
ugagggugugcggcccagacag

SEQ ID NO: 674077 - RNA, 22 nt, Human
aaaugcuagaacauuuuaaagg

SEQ ID NO: 674078 - RNA, 22 nt, Human
cagaggcugacaaaauauugcu

SEQ ID NO: 674079 - RNA, 22 nt, Human
gggcggggggagcuggaaugaa

SEQ ID NO: 674080 - RNA, 22 nt, Human
augaaggauggcuggcugcccu

SEQ ID NO: 674081 - RNA, 19 nt, Human
ccauggcaaugaucugaug

SEQ ID NO: 674082 - RNA, 22 nt, Human
gcugucucggggcuuucuccug

SEQ ID NO: 674083 - RNA, 22 nt, Human
gaaugaagcaggucacacaguu

SEQ ID NO: 674084 - RNA, 22 nt, Human
aaaugccucuggguuauucuag

SEQ ID NO: 674085 - RNA, 22 nt, Human
uuggccuuguacaucauauuaa

SEQ ID NO: 674086 - RNA, 21 nt, Human
gccugccugcgugacccucuu

SEQ ID NO: 674087 - RNA, 22 nt, Human
ccagccccgggaaccuggccgu

SEQ ID NO: 674088 - RNA, 22 nt, Human
gagaagguggaccugaaggagc

SEQ ID NO: 674089 - RNA, 22 nt, Human
gugcucugaucugucugacauc

SEQ ID NO: 674090 - RNA, 22 nt, Human
gaaacacuaugccaagacaggg

SEQ ID NO: 674091 - RNA, 22 nt, Human
uccugagaggugugaggugcag

SEQ ID NO: 674092 - RNA, 22 nt, Human
uuucacacaacgugaauauacu

SEQ ID NO: 674093 - RNA, 22 nt, Human
ggccaccaaaguccuguggcuu

SEQ ID NO: 674094 - RNA, 22 nt, Human
aaacaaagccagggaaguuaug

SEQ ID NO: 674095 - RNA, 22 nt, Human
agagcuuauaucuuggccaucc

SEQ ID NO: 674096 - RNA, 22 nt, Human
ucuccagguggggucaccuuuu

SEQ ID NO: 674097 - RNA, 22 nt, Human
agaaauuaggaaaguaacacuu

SEQ ID NO: 674098 - RNA, 17 nt, Human
agaggcagauacuugga

SEQ ID NO: 674099 - RNA, 22 nt, Human
gucugggguacuuucaucugau

SEQ ID NO: 674100 - RNA, 22 nt, Human
aagaggcuuucagugaacuugu

SEQ ID NO: 674101 - RNA, 22 nt, Human
ugaggaugacgauggcaauggc

SEQ ID NO: 674102 - RNA, 22 nt, Human
caaguuuuagcaaguggaaagg

SEQ ID NO: 674103 - RNA, 22 nt, Human
uacuagaaaaacacaugcucug

SEQ ID NO: 674104 - RNA, 22 nt, Human
ugcugccaucucaacugcccuu

SEQ ID NO: 674105 - RNA, 22 nt, Human
auugucuguacuuuaaaaaugu

SEQ ID NO: 674106 - RNA, 22 nt, Human
aagcagacagagaauggguuug

SEQ ID NO: 674107 - RNA, 22 nt, Human
ccacugggggcugcaggcacuc

SEQ ID NO: 674108 - RNA, 22 nt, Human
aagauauacuauuaaguaccau

SEQ ID NO: 674109 - RNA, 22 nt, Human
acaggccagagguggggcagcc

SEQ ID NO: 674110 - RNA, 22 nt, Human
gaguauauauagacaugucaca

SEQ ID NO: 674111 - RNA, 21 nt, Human
caguagugagguauuugccaa

SEQ ID NO: 674112 - RNA, 22 nt, Human
uuggcagaggggccaccugccc

SEQ ID NO: 674113 - RNA, 22 nt, Human
caccagccagagugacagcucc

SEQ ID NO: 674114 - RNA, 22 nt, Human
gagcagcacugaguuagcagcu

SEQ ID NO: 674115 - RNA, 22 nt, Human
uccagacucuuuaaguucauuu

SEQ ID NO: 674116 - RNA, 22 nt, Human
ccuggacuuucauuuccccuug

SEQ ID NO: 674117 - RNA, 22 nt, Human
uagaaacuagauugauagcgga

SEQ ID NO: 674118 - RNA, 22 nt, Human
ggcauccaguucugaucaacaa

SEQ ID NO: 674119 - RNA, 22 nt, Human
auauaauaguuucauaaaggcu

SEQ ID NO: 674120 - RNA, 22 nt, Human
cagagagagucugucccugaag

SEQ ID NO: 674121 - RNA, 20 nt, Human
ucugugugccaucaccuaac

SEQ ID NO: 674122 - RNA, 22 nt, Human
cugagcagcuguuacagagugu

SEQ ID NO: 674123 - RNA, 22 nt, Human
gggcuucuagaccagcagugag

SEQ ID NO: 674124 - RNA, 20 nt, Human
acaaaugcauucugugacau

SEQ ID NO: 674125 - RNA, 22 nt, Human
gagguuggcgcccugccuggcc

SEQ ID NO: 674126 - RNA, 22 nt, Human
cuggacagaaagggcugcugug

SEQ ID NO: 674127 - RNA, 22 nt, Human
cucuuuccucagccacagucua

SEQ ID NO: 674128 - RNA, 22 nt, Human
gucuccagaauucuugggaggg

SEQ ID NO: 674129 - RNA, 20 nt, Human
uuguuuauuauguucugauc

SEQ ID NO: 674130 - RNA, 21 nt, Human
aggaaguggccagauugggaa

SEQ ID NO: 674131 - RNA, 22 nt, Human
aguggcuguaucagucaacccu

SEQ ID NO: 674132 - RNA, 22 nt, Human
uagcagagaggggacaguggca

SEQ ID NO: 674133 - RNA, 22 nt, Human
uccuggccucacaguccugggu

SEQ ID NO: 674134 - RNA, 22 nt, Human
cugugggccuagucuggccuag

SEQ ID NO: 674135 - RNA, 22 nt, Human
caucugagggaaaacauguagu

SEQ ID NO: 674136 - RNA, 22 nt, Human
ucccagcagaugagcugaccua

SEQ ID NO: 674137 - RNA, 22 nt, Human
uggcuggcuagaauggaaaugu

SEQ ID NO: 674138 - RNA, 22 nt, Human
auucacacuuuacuucuuucca

SEQ ID NO: 674139 - RNA, 22 nt, Human
uuggcagcagaguguggugcuc

SEQ ID NO: 674140 - RNA, 22 nt, Human
aauuguacauauuuaugagcga

SEQ ID NO: 674141 - RNA, 22 nt, Human
caugaacagauucuucauuucu

SEQ ID NO: 674142 - RNA, 22 nt, Human
gcaaggcugaccucucuagacu

SEQ ID NO: 674143 - RNA, 22 nt, Human
cuguaugaguugggaauagaau

SEQ ID NO: 674144 - RNA, 22 nt, Human
gcuucugcgccuagccucaggu

SEQ ID NO: 674145 - RNA, 22 nt, Human
auguaagguucagaguauguga

SEQ ID NO: 674146 - RNA, 21 nt, Human
acccuuuguuuaugaaucagc

SEQ ID NO: 674147 - RNA, 22 nt, Human
cuggauuaaguaaaauagagga

SEQ ID NO: 674148 - RNA, 22 nt, Human
uugucugaggguuugagagaau

SEQ ID NO: 674149 - RNA, 22 nt, Human
cagcaaaugaguggcagggcag

SEQ ID NO: 674150 - RNA, 22 nt, Human
gcagaacaacguaggaguggag

SEQ ID NO: 674151 - RNA, 22 nt, Human
gcacacagcuagauuaccauuc

SEQ ID NO: 674152 - RNA, 22 nt, Human
gagcaacagggcgaggagaacu

SEQ ID NO: 674153 - RNA, 22 nt, Human
ggagaagccacacauugggugu

SEQ ID NO: 674154 - RNA, 22 nt, Human
aggcagauuacuugaggccagg

SEQ ID NO: 674155 - RNA, 22 nt, Human
cacaggcugggaagccuaggcc

SEQ ID NO: 674156 - RNA, 22 nt, Human
ugguguugaaccucagcagggg

SEQ ID NO: 674157 - RNA, 22 nt, Human
guauauaagguaaagcgauugu

SEQ ID NO: 674158 - RNA, 21 nt, Human
gccugccccauguuucuguug

SEQ ID NO: 674159 - RNA, 22 nt, Human
cucuggcuggcaccugaucuga

SEQ ID NO: 674160 - RNA, 22 nt, Human
agagcugguuuacucaggaauu

SEQ ID NO: 674161 - RNA, 22 nt, Human
caugcugugugguuagaacugu

SEQ ID NO: 674162 - RNA, 22 nt, Human
cagcuggcagcccuggcccugc

SEQ ID NO: 674163 - RNA, 22 nt, Human
ucaggagacaaagggugcggag

SEQ ID NO: 674164 - RNA, 18 nt, Human
auacaagcagcagagauu

SEQ ID NO: 674165 - RNA, 22 nt, Human
cugaacaaagaaauagucaugg

SEQ ID NO: 674166 - RNA, 20 nt, Human
accugggaaaaccuuuuccu

SEQ ID NO: 674167 - RNA, 22 nt, Human
aaaggcacacacuccuuguuau

SEQ ID NO: 674168 - RNA, 22 nt, Human
gccuccccugcaauuguccuug

SEQ ID NO: 674169 - RNA, 23 nt, Human
auguuaccaauggaggaaauugg

SEQ ID NO: 674170 - RNA, 22 nt, Human
agcuggcuauacuugaaaaguc

SEQ ID NO: 674171 - RNA, 22 nt, Human
uagcaacagaaaauaggagugc

SEQ ID NO: 674172 - RNA, 22 nt, Human
uguuaacauguguauuguauga

SEQ ID NO: 674173 - RNA, 21 nt, Human
uaggacagccccccugcccuc

SEQ ID NO: 674174 - RNA, 22 nt, Human
cagaaauggaauuuuccaucac

SEQ ID NO: 674175 - RNA, 22 nt, Human
ugaguagcggcuauguguaacu

SEQ ID NO: 674176 - RNA, 22 nt, Human
ugauucugucuccuucacuccg

SEQ ID NO: 674177 - RNA, 22 nt, Human
uucagggucuagaguaucuacc

SEQ ID NO: 674178 - RNA, 21 nt, Human
aaggagccuaggaggcucagg

SEQ ID NO: 674179 - RNA, 22 nt, Human
aaaguacugaugccaucagcac

SEQ ID NO: 674180 - RNA, 22 nt, Human
guuuuggcagccguguucacau

SEQ ID NO: 674181 - RNA, 22 nt, Human
cauccugguuaccccauaguca

SEQ ID NO: 674182 - RNA, 22 nt, Human
auucuguuacuuggugaucuuc

SEQ ID NO: 674183 - RNA, 22 nt, Human
auggcccaggccaggauccagc

SEQ ID NO: 674184 - RNA, 22 nt, Human
acaggcuuacuguuucauaggg

SEQ ID NO: 674185 - RNA, 22 nt, Human
uccucagacacccugcuggcuu

SEQ ID NO: 674186 - RNA, 22 nt, Human
aggccacagccugggaggugac

SEQ ID NO: 674187 - RNA, 22 nt, Human
aucacuguguauguauaugcag

SEQ ID NO: 674188 - RNA, 22 nt, Human
ugagaaccucgaagauuuugcc

SEQ ID NO: 674189 - RNA, 22 nt, Human
aggaggccccuccuggguugcu

SEQ ID NO: 674190 - RNA, 22 nt, Human
cuauuagacacaauuagugauu

SEQ ID NO: 674191 - RNA, 22 nt, Human
cagggcaugaggugugcuucuc

SEQ ID NO: 674192 - RNA, 22 nt, Human
agacaauggagagcagaguacu

SEQ ID NO: 674193 - RNA, 22 nt, Human
ugcaagacgugaaauugagaca

SEQ ID NO: 674194 - RNA, 20 nt, Human
gcuaccagaacaaggccauu

SEQ ID NO: 674195 - RNA, 22 nt, Human
uugcucugacuggagugcagug

SEQ ID NO: 674196 - RNA, 22 nt, Human
cuuccugaaaguaguagguuga

SEQ ID NO: 674197 - RNA, 17 nt, Human
gcugagugcagggaguc

SEQ ID NO: 674198 - RNA, 23 nt, Human
acccugggcaagucaccuaaccu

SEQ ID NO: 674199 - RNA, 22 nt, Human
ggacauagaggcccugcauggc

SEQ ID NO: 674200 - RNA, 22 nt, Human
uguggaaaagaauaagggagau

SEQ ID NO: 674201 - RNA, 22 nt, Human
gagcugggcgagccggggaagu

SEQ ID NO: 674202 - RNA, 22 nt, Human
cugggcucuucucacccuguuu

SEQ ID NO: 674203 - RNA, 22 nt, Human
cuggggccagugaggaggcuuu

SEQ ID NO: 674204 - RNA, 22 nt, Human
uaugagaaauuauaccuagguu

SEQ ID NO: 674205 - RNA, 20 nt, Human
gugugaagcccucaggagga

SEQ ID NO: 674206 - RNA, 22 nt, Human
agagccacaguggauaggagcc

SEQ ID NO: 674207 - RNA, 22 nt, Human
gcucagcacuuucuccaaccac

SEQ ID NO: 674208 - RNA, 18 nt, Human
ugcuggguaacuguaugg

SEQ ID NO: 674209 - RNA, 22 nt, Human
ucucugcuugguguaugugagu

SEQ ID NO: 674210 - RNA, 22 nt, Human
cgaggcagggaagcugcaaaag

SEQ ID NO: 674211 - RNA, 22 nt, Human
cagguucucagaaggcagucac

SEQ ID NO: 674212 - RNA, 22 nt, Human
gucauuuugcugcauauuuaga

SEQ ID NO: 674213 - RNA, 22 nt, Human
ucacaguaucagguggagugga

SEQ ID NO: 674214 - RNA, 22 nt, Human
acacacagguaaaggagccugg

SEQ ID NO: 674215 - RNA, 22 nt, Human
uuuuaauacugcuauuguagga

SEQ ID NO: 674216 - RNA, 22 nt, Human
uuucaucucucuaaaagacagu

SEQ ID NO: 674217 - RNA, 22 nt, Human
caaaugaagggagcugaagucu

SEQ ID NO: 674218 - RNA, 22 nt, Human
cuguggcuucagcauucagagc

SEQ ID NO: 674219 - RNA, 22 nt, Human
uuuaauuugaaaugaguaaccc

SEQ ID NO: 674220 - RNA, 16 nt, Human
ucucugcuucauaggu

SEQ ID NO: 674221 - RNA, 22 nt, Human
uuauaguaugugcauaugugug

SEQ ID NO: 674222 - RNA, 22 nt, Human
aucaggaucaugcuggguggga

SEQ ID NO: 674223 - RNA, 22 nt, Human
aagggcuggagaggaaagguug

SEQ ID NO: 674224 - RNA, 20 nt, Human
acugccuugguucaguaggu

SEQ ID NO: 674225 - RNA, 22 nt, Human
uuaaaagagacuuccuuuguuu

SEQ ID NO: 674226 - RNA, 22 nt, Human
gcccugcuguuuagagagcuac

SEQ ID NO: 674227 - RNA, 22 nt, Human
ucugaggccccugggcaggaug

SEQ ID NO: 674228 - RNA, 22 nt, Human
caauucaaguugaguacagcuu

SEQ ID NO: 674229 - RNA, 22 nt, Human
ucucauucauacccuacaugcu

SEQ ID NO: 674230 - RNA, 22 nt, Human
ccagagcugauuccugggacuu

SEQ ID NO: 674231 - RNA, 22 nt, Human
aaucuaaggacuuagcauugcu

SEQ ID NO: 674232 - RNA, 22 nt, Human
ucucuggguuuuuguccuguac

SEQ ID NO: 674233 - RNA, 22 nt, Human
ugucugaggaagucagcccuuu

SEQ ID NO: 674234 - RNA, 22 nt, Human
uggcaggcauccggcaccuucu

SEQ ID NO: 674235 - RNA, 22 nt, Human
uggguccuggaaggcgacaggu

SEQ ID NO: 674236 - RNA, 22 nt, Human
cauauuucagucuaagaugugu

SEQ ID NO: 674237 - RNA, 22 nt, Human
ucacugcucucuaagcaucgcc

SEQ ID NO: 674238 - RNA, 22 nt, Human
uuucuuuguuguuaucacauca

SEQ ID NO: 674239 - RNA, 22 nt, Human
agauggaguuaguaccagaguc

SEQ ID NO: 674240 - RNA, 22 nt, Human
aucacuguuaucuagaagcaca

SEQ ID NO: 674241 - RNA, 22 nt, Human
ggucucagugaaggagugugcu

SEQ ID NO: 674242 - RNA, 21 nt, Human
gagugcaggucugaugccauc

SEQ ID NO: 674243 - RNA, 22 nt, Human
agaaaugcucuuccugaccaga

SEQ ID NO: 674244 - RNA, 22 nt, Human
ugcagaagugagucaugaggaa

SEQ ID NO: 674245 - RNA, 22 nt, Human
caucaggaggagaugaagaaaa

SEQ ID NO: 674246 - RNA, 22 nt, Human
uggucugagcaacugcccuauc

SEQ ID NO: 674247 - RNA, 22 nt, Human
uguucagcccucuauuaaucag

SEQ ID NO: 674248 - RNA, 22 nt, Human
ugaguuuuuucaacauaugaag

SEQ ID NO: 674249 - RNA, 22 nt, Human
aguacuuugcacuuugcucaga

SEQ ID NO: 674250 - RNA, 20 nt, Human
gccaguaccauucugccacu

SEQ ID NO: 674251 - RNA, 22 nt, Human
gcagagugauggaaugugggug

SEQ ID NO: 674252 - RNA, 22 nt, Human
ugggccuggacaaggccacuag

SEQ ID NO: 674253 - RNA, 22 nt, Human
aguugcuucccuauucuuagca

SEQ ID NO: 674254 - RNA, 22 nt, Human
uccuggcugcaccagugacccu

SEQ ID NO: 674255 - RNA, 22 nt, Human
accagggcugacaaucugaugg

SEQ ID NO: 674256 - RNA, 22 nt, Human
agagcugcucagaugucacugc

SEQ ID NO: 674257 - RNA, 22 nt, Human
agcagcaggaggcuguccacca

SEQ ID NO: 674258 - RNA, 22 nt, Human
ggaacaggaaaggagggaugcu

SEQ ID NO: 674259 - RNA, 22 nt, Human
cagucaaacuuauaggcacauu

SEQ ID NO: 674260 - RNA, 22 nt, Human
aggguggagggagucccugagc

SEQ ID NO: 674261 - RNA, 20 nt, Human
ugaagcagccuugauucugu

SEQ ID NO: 674262 - RNA, 22 nt, Human
ugucagcaugucagccaaagau

SEQ ID NO: 674263 - RNA, 22 nt, Human
ucuccgaucacagguuuucaau

SEQ ID NO: 674264 - RNA, 22 nt, Human
caugagaaccaggucuguguuu

SEQ ID NO: 674265 - RNA, 22 nt, Human
caguaacuaggacaaggaggaa

SEQ ID NO: 674266 - RNA, 22 nt, Human
uuacuguugguguauccauagc

SEQ ID NO: 674267 - RNA, 23 nt, Human
cccugcucaggggucugauucuc

SEQ ID NO: 674268 - RNA, 22 nt, Human
cugcuuugacuguuaagaacca

SEQ ID NO: 674269 - RNA, 22 nt, Human
gacugccagaaugugaggccug

SEQ ID NO: 674270 - RNA, 22 nt, Human
ggcuucuaaggaguauccuuug

SEQ ID NO: 674271 - RNA, 22 nt, Human
uuuuccucuguauuugaaaugc

SEQ ID NO: 674272 - RNA, 22 nt, Human
cucaugugcaaaaguccaaauu

SEQ ID NO: 674273 - RNA, 22 nt, Human
agggcugucagacugaggaggc

SEQ ID NO: 674274 - RNA, 22 nt, Human
ccaggaggaaagaccagcccau

SEQ ID NO: 674275 - RNA, 22 nt, Human
ggucaggauccaagucugugcu

SEQ ID NO: 674276 - RNA, 22 nt, Human
ucugggcaguaccccucuccua

SEQ ID NO: 674277 - RNA, 22 nt, Human
ugggcugcacuccauuuucugc

SEQ ID NO: 674278 - RNA, 22 nt, Human
cugaggccucuuuccuuggcuu

SEQ ID NO: 674279 - RNA, 20 nt, Human
acgcacacgcgggggcgugc

SEQ ID NO: 674280 - RNA, 22 nt, Human
gcucugacacauuuguucuacc

SEQ ID NO: 674281 - RNA, 22 nt, Human
aacugaacagaacucagagauu

SEQ ID NO: 674282 - RNA, 22 nt, Human
caugaacuccaagcuuccuucc

SEQ ID NO: 674283 - RNA, 22 nt, Human
gcugccuccugagauuugggca

SEQ ID NO: 674284 - RNA, 22 nt, Human
uuagaaccaggguuacgauucu

SEQ ID NO: 674285 - RNA, 22 nt, Human
ugagcagauggaggcuucugca

SEQ ID NO: 674286 - RNA, 22 nt, Human
ugucucugauaaguaguucagu

SEQ ID NO: 674287 - RNA, 22 nt, Human
cagcacauaguagguauucacu

SEQ ID NO: 674288 - RNA, 22 nt, Human
uaguaucuauuaguaacaagag

SEQ ID NO: 674289 - RNA, 22 nt, Human
gcccaggaggucaaguagcuau

SEQ ID NO: 674290 - RNA, 22 nt, Human
ugaagcaagauagaaagcugcu

SEQ ID NO: 674291 - RNA, 22 nt, Human
uuggagaauguuuuccugcagu

SEQ ID NO: 674292 - RNA, 22 nt, Human
cuggggcucucuggaaugcuug

SEQ ID NO: 674293 - RNA, 22 nt, Human
gacuggagugccuccaggaaag

SEQ ID NO: 674294 - RNA, 22 nt, Human
ccacccuuggguucggaggccg

SEQ ID NO: 674295 - RNA, 20 nt, Human
uauggcuuggcaaagcuuca

SEQ ID NO: 674296 - RNA, 22 nt, Human
aagaugguggccagaguggaaa

SEQ ID NO: 674297 - RNA, 22 nt, Human
augcagaagaaaccauggcuuc

SEQ ID NO: 674298 - RNA, 22 nt, Human
ucacugcuuuguuuacaacuau

SEQ ID NO: 674299 - RNA, 22 nt, Human
ccagcagacacacaggcguggg

SEQ ID NO: 674300 - RNA, 22 nt, Human
gaacaggguugggugagagagg

SEQ ID NO: 674301 - RNA, 22 nt, Human
aaaagacauaugugggcauucu

SEQ ID NO: 674302 - RNA, 22 nt, Human
guucaaauugagaugguauaaa

SEQ ID NO: 674303 - RNA, 23 nt, Human
gaauacagagauaaauagaacac

SEQ ID NO: 674304 - RNA, 22 nt, Human
gagagccagcucacuccagggc

SEQ ID NO: 674305 - RNA, 21 nt, Human
ugggccagaucugaguuucua

SEQ ID NO: 674306 - RNA, 22 nt, Human
ucuguuuaggcaaaauagcuac

SEQ ID NO: 674307 - RNA, 22 nt, Human
uuugugaaaugaagucacaacu

SEQ ID NO: 674308 - RNA, 22 nt, Human
guuuacaugcagaaaaucaaug

SEQ ID NO: 674309 - RNA, 22 nt, Human
ucccagugcugcuaaagaggua

SEQ ID NO: 674310 - RNA, 22 nt, Human
ccucacagaggggcagccaucu

SEQ ID NO: 674311 - RNA, 22 nt, Human
cugugggagaaguugcuggagu

SEQ ID NO: 674312 - RNA, 22 nt, Human
gauaauauuagaagauacaaau

SEQ ID NO: 674313 - RNA, 22 nt, Human
agcuucauaauuccuugacuca

SEQ ID NO: 674314 - RNA, 22 nt, Human
ggggcugaaccuggaggugguc

SEQ ID NO: 674315 - RNA, 22 nt, Human
uuguaacaaucugucauaaaug

SEQ ID NO: 674316 - RNA, 22 nt, Human
ugugacaggaacuauguggaug

SEQ ID NO: 674317 - RNA, 22 nt, Human
cccugagagugagugccaccuu

SEQ ID NO: 674318 - RNA, 22 nt, Human
uggcuggcguuggggccaguga

SEQ ID NO: 674319 - RNA, 22 nt, Human
gacuuuaaguccuaucugugcg

SEQ ID NO: 674320 - RNA, 22 nt, Human
cugcccugugguuguggguucu

SEQ ID NO: 674321 - RNA, 18 nt, Human
agcuggggccucuggucc

SEQ ID NO: 674322 - RNA, 22 nt, Human
guaauagucucaaacuccugga

SEQ ID NO: 674323 - RNA, 22 nt, Human
cugagcgcaugguugcugggga

SEQ ID NO: 674324 - RNA, 22 nt, Human
cugggaagccacaggguguggg

SEQ ID NO: 674325 - RNA, 22 nt, Human
agacagcugcucgcagagcuau

SEQ ID NO: 674326 - RNA, 17 nt, Human
uguauuuguaccacagc

SEQ ID NO: 674327 - RNA, 22 nt, Human
uacaguauguucuugaauuugg

SEQ ID NO: 674328 - RNA, 22 nt, Human
cugggaggcccacguugggaag

SEQ ID NO: 674329 - RNA, 23 nt, Human
cccauuuucauguuaacuccugg

SEQ ID NO: 674330 - RNA, 22 nt, Human
cagacugaaaaucccugguagu

SEQ ID NO: 674331 - RNA, 22 nt, Human
uucagagaacuucauggaagag

SEQ ID NO: 674332 - RNA, 22 nt, Human
acugaucaaggguuuaauuuua

SEQ ID NO: 674333 - RNA, 18 nt, Human
ccagcugcgcugaaccga

SEQ ID NO: 674334 - RNA, 22 nt, Human
uucuccagagggcucugcagga

SEQ ID NO: 674335 - RNA, 22 nt, Human
cuggcuggucaucagcaguacg

SEQ ID NO: 674336 - RNA, 22 nt, Human
gagaucauggcuucugcugaua

SEQ ID NO: 674337 - RNA, 21 nt, Human
ucucuacacuuucacuaggcu

SEQ ID NO: 674338 - RNA, 22 nt, Human
acaagacugugcucuaagagug

SEQ ID NO: 674339 - RNA, 22 nt, Human
ggcucuggucagugaggggccu

SEQ ID NO: 674340 - RNA, 22 nt, Human
aaaacauguccauacagaaacu

SEQ ID NO: 674341 - RNA, 22 nt, Human
ucuuuccacauucucuguuuag

SEQ ID NO: 674342 - RNA, 19 nt, Human
uuucugcagcccagcagca

SEQ ID NO: 674343 - RNA, 22 nt, Human
cuucugaccccuggucuacagc

SEQ ID NO: 674344 - RNA, 22 nt, Human
gaagagcuguagccugcucuuu

SEQ ID NO: 674345 - RNA, 22 nt, Human
gacagacauuuccugauccaau

SEQ ID NO: 674346 - RNA, 22 nt, Human
uaaauugcugauuuuagaugcu

SEQ ID NO: 674347 - RNA, 22 nt, Human
ugggcagaauugugguaguuaa

SEQ ID NO: 674348 - RNA, 20 nt, Human
cagagacccaggcuucagcu

SEQ ID NO: 674349 - RNA, 23 nt, Human
ugcaguaggauggggcugggccu

SEQ ID NO: 674350 - RNA, 22 nt, Human
ugcauuaaggccauugaaauuu

SEQ ID NO: 674351 - RNA, 22 nt, Human
uacacauaaaaugcucauggua

SEQ ID NO: 674352 - RNA, 22 nt, Human
gcaaacaagcugccugaagauu

SEQ ID NO: 674353 - RNA, 21 nt, Human
ucacacacguuuccaagggca

SEQ ID NO: 674354 - RNA, 22 nt, Human
gagguuuuaggcugccauuauu

SEQ ID NO: 674355 - RNA, 22 nt, Human
acuaaaacaguggcuaguagac

SEQ ID NO: 674356 - RNA, 22 nt, Human
ccacagaagauggggagagugg

SEQ ID NO: 674357 - RNA, 22 nt, Human
guggggcaugcacgcugcuccu

SEQ ID NO: 674358 - RNA, 22 nt, Human
gaaucugcauuuuaacaagauc

SEQ ID NO: 674359 - RNA, 22 nt, Human
uuucugcagguauugcauaagu

SEQ ID NO: 674360 - RNA, 22 nt, Human
cauuugaaauaguucauucuug

SEQ ID NO: 674361 - RNA, 22 nt, Human
ccuggcugaacaaagucccucc

SEQ ID NO: 674362 - RNA, 22 nt, Human
uaaagugaaguucagaauggcu

SEQ ID NO: 674363 - RNA, 22 nt, Human
ugcuugacuuugucacagcaug

SEQ ID NO: 674364 - RNA, 22 nt, Human
ugagaccuguaaugagaaauug

SEQ ID NO: 674365 - RNA, 22 nt, Human
aauuuguuaaaagugagugaca

SEQ ID NO: 674366 - RNA, 22 nt, Human
cagagcauaauugacaugaggu

SEQ ID NO: 674367 - RNA, 22 nt, Human
ccugggcaucucaugcaccugc

SEQ ID NO: 674368 - RNA, 22 nt, Human
cugcuguguaucauuuuagaug

SEQ ID NO: 674369 - RNA, 22 nt, Human
auauaggcagaaaggaaggcaa

SEQ ID NO: 674370 - RNA, 22 nt, Human
ggcucugcccagaugaagagga

SEQ ID NO: 674371 - RNA, 22 nt, Human
ccugcuuccuucaaguuuaucu

SEQ ID NO: 674372 - RNA, 22 nt, Human
gcugcuuccuagaaggcccagu

SEQ ID NO: 674373 - RNA, 22 nt, Human
caugucagggaagagagucagu

SEQ ID NO: 674374 - RNA, 22 nt, Human
augcacauguggcuuuauguau

SEQ ID NO: 674375 - RNA, 22 nt, Human
gagggcucacugagaaagcagu

SEQ ID NO: 674376 - RNA, 21 nt, Human
auagaacaccaggcauauaua

SEQ ID NO: 674377 - RNA, 22 nt, Human
auuucuugugggaaaugcagca

SEQ ID NO: 674378 - RNA, 22 nt, Human
gagggacagcuaaagagaaauu

SEQ ID NO: 674379 - RNA, 19 nt, Human
ggcuaaugucuuugaaaua

SEQ ID NO: 674380 - RNA, 22 nt, Human
auucuuauuauaguaaaacagu

SEQ ID NO: 674381 - RNA, 22 nt, Human
caucuucaccagagacaagcaa

SEQ ID NO: 674382 - RNA, 22 nt, Human
uaaauccuuaucuucuuugaau

SEQ ID NO: 674383 - RNA, 22 nt, Human
aagagcugcccaaggugaacag

SEQ ID NO: 674384 - RNA, 22 nt, Human
cagucaggcugcgcuucucuga

SEQ ID NO: 674385 - RNA, 22 nt, Human
caguggggggacugaggccuga

SEQ ID NO: 674386 - RNA, 22 nt, Human
ucccuggcugggggcugccuug

SEQ ID NO: 674387 - RNA, 22 nt, Human
acaggcaagucacacaacuugu

SEQ ID NO: 674388 - RNA, 22 nt, Human
accugagacuugggaugggaau

SEQ ID NO: 674389 - RNA, 22 nt, Human
ccagcauccucagcucacuucu

SEQ ID NO: 674390 - RNA, 22 nt, Human
caugcaaaggucaagaucagga

SEQ ID NO: 674391 - RNA, 22 nt, Human
caugcagugccucuggauucuu

SEQ ID NO: 674392 - RNA, 22 nt, Human
cugguuuuauguuauagaugga

SEQ ID NO: 674393 - RNA, 22 nt, Human
ugugugccagauacaagcacug

SEQ ID NO: 674394 - RNA, 22 nt, Human
uguuugugagaugugagguacg

SEQ ID NO: 674395 - RNA, 22 nt, Human
acugggaaggaaaggaauguaa

SEQ ID NO: 674396 - RNA, 22 nt, Human
cacaauuuguuuuaucaguauu

SEQ ID NO: 674397 - RNA, 22 nt, Human
gcucccagucugauggaggaga

SEQ ID NO: 674398 - RNA, 22 nt, Human
aguuucucuuaaucuaguaucu

SEQ ID NO: 674399 - RNA, 22 nt, Human
caguaauaagcuggagggugug

SEQ ID NO: 674400 - RNA, 22 nt, Human
ggcucugccugcccagcagcac

SEQ ID NO: 674401 - RNA, 22 nt, Human
gaccacugaaugcacuucuaau

SEQ ID NO: 674402 - RNA, 22 nt, Human
uaauccuuuagguuaaaagagg

SEQ ID NO: 674403 - RNA, 22 nt, Human
ucuaacuugugaguauagauga

SEQ ID NO: 674404 - RNA, 22 nt, Human
ucccucagucccuggacaggca

SEQ ID NO: 674405 - RNA, 22 nt, Human
cugccccaggaccucuucugga

SEQ ID NO: 674406 - RNA, 22 nt, Human
aaaauagcuauggaaugucacu

SEQ ID NO: 674407 - RNA, 22 nt, Human
ggcugcucggagccuccuguga

SEQ ID NO: 674408 - RNA, 21 nt, Human
gagugggcugagauggggcug

SEQ ID NO: 674409 - RNA, 22 nt, Human
aauagcaaacagacaugcacaa

SEQ ID NO: 674410 - RNA, 22 nt, Human
aaugguuuugucucaucaaugu

SEQ ID NO: 674411 - RNA, 22 nt, Human
gcacagcagcugggggcccugg

SEQ ID NO: 674412 - RNA, 22 nt, Human
uauguguguaugacagacagag

SEQ ID NO: 674413 - RNA, 22 nt, Human
ugucaguuuaguugaagaaaga

SEQ ID NO: 674414 - RNA, 20 nt, Human
ggccaccugcuucagacccc

SEQ ID NO: 674415 - RNA, 22 nt, Human
ugccauauugcaaagugucugc

SEQ ID NO: 674416 - RNA, 22 nt, Human
cuuaaacaggaaagagccaggu

SEQ ID NO: 674417 - RNA, 22 nt, Human
ccaggcagggagcuguuuggcc

SEQ ID NO: 674418 - RNA, 22 nt, Human
ggcaaggaagaagccaugaugu

SEQ ID NO: 674419 - RNA, 22 nt, Human
ugaguagaccucacgugucaga

SEQ ID NO: 674420 - RNA, 22 nt, Human
uguaaaauaauucuccauguuu

SEQ ID NO: 674421 - RNA, 22 nt, Human
acccagccacagcauugaggga

SEQ ID NO: 674422 - RNA, 22 nt, Human
gccucuggguuggugacaggcu

SEQ ID NO: 674423 - RNA, 22 nt, Human
gagaaagacguaggcugggagg

SEQ ID NO: 674424 - RNA, 22 nt, Human
acauaaugagcucuuuauaaau

SEQ ID NO: 674425 - RNA, 22 nt, Human
ggaggaggggugacugaaugcu

SEQ ID NO: 674426 - RNA, 22 nt, Human
cuagggcucgcaagggcuggag

SEQ ID NO: 674427 - RNA, 21 nt, Human
ugccagggauuuacagagccu

SEQ ID NO: 674428 - RNA, 22 nt, Human
caggaggcccaaagggcgcaga

SEQ ID NO: 674429 - RNA, 22 nt, Human
aggcuucauguguccuggguga

SEQ ID NO: 674430 - RNA, 22 nt, Human
gaggaacagagggcaaggccag

SEQ ID NO: 674431 - RNA, 17 nt, Human
caggcacaugaagccag

SEQ ID NO: 674432 - RNA, 23 nt, Human
gccaaguagggggaaagcccgug

SEQ ID NO: 674433 - RNA, 22 nt, Human
gggagcugaggagccccgucgg

SEQ ID NO: 674434 - RNA, 22 nt, Human
uccaggcaaagccuuguagacg

SEQ ID NO: 674435 - RNA, 22 nt, Human
ccgggggaggcaagagacaugc

SEQ ID NO: 674436 - RNA, 22 nt, Human
uuacagauacauuucuuuuguu

SEQ ID NO: 674437 - RNA, 23 nt, Human
ugauucagcaaguccacuucugg

SEQ ID NO: 674438 - RNA, 22 nt, Human
gcacagccacugagugagaacc

SEQ ID NO: 674439 - RNA, 22 nt, Human
uaggugugggcucaggaaugug

SEQ ID NO: 674440 - RNA, 22 nt, Human
agcacagggcccagccuaggcc

SEQ ID NO: 674441 - RNA, 22 nt, Human
uccucaguaaggcauggcuuug

SEQ ID NO: 674442 - RNA, 22 nt, Human
caggcacaaaaggaccccagca

SEQ ID NO: 674443 - RNA, 22 nt, Human
aggcccuggcacugccugggag

SEQ ID NO: 674444 - RNA, 22 nt, Human
uccuggguagccuguccaagau

SEQ ID NO: 674445 - RNA, 22 nt, Human
aaacauugaugggaaguuuaau

SEQ ID NO: 674446 - RNA, 22 nt, Human
cauagaaugcagcaggaaaguu

SEQ ID NO: 674447 - RNA, 22 nt, Human
ugggaagggucaacagcuggaa

SEQ ID NO: 674448 - RNA, 22 nt, Human
cuucugugagucaguguuucug

SEQ ID NO: 674449 - RNA, 22 nt, Human
uccagagccuuucugcuugaca

SEQ ID NO: 674450 - RNA, 22 nt, Human
caugcaggccuauggagcagug

SEQ ID NO: 674451 - RNA, 21 nt, Human
acauguaagagaguuucaaga

SEQ ID NO: 674452 - RNA, 22 nt, Human
cuuucaguuaguaccuaguggc

SEQ ID NO: 674453 - RNA, 22 nt, Human
caccugcaaggagcuuucauuu

SEQ ID NO: 674454 - RNA, 22 nt, Human
gggucagggcuggcugucguca

SEQ ID NO: 674455 - RNA, 22 nt, Human
gcuucauuaauagaauuaguau

SEQ ID NO: 674456 - RNA, 22 nt, Human
agcaggcauagaguagcacuca

SEQ ID NO: 674457 - RNA, 22 nt, Human
uuuuacacuucgguugugugca

SEQ ID NO: 674458 - RNA, 22 nt, Human
gcugccaggggcagcugucuca

SEQ ID NO: 674459 - RNA, 22 nt, Human
acagaggucauggagaguucuc

SEQ ID NO: 674460 - RNA, 22 nt, Human
uccaucuggugagugaggagcc

SEQ ID NO: 674461 - RNA, 22 nt, Human
gauccugggacugaaugggugc

SEQ ID NO: 674462 - RNA, 23 nt, Human
agaguccacaagauuuuccagug

SEQ ID NO: 674463 - RNA, 22 nt, Human
ugcugggccucuucccuggaua

SEQ ID NO: 674464 - RNA, 22 nt, Human
uaacaucaaacauguuuuaaag

SEQ ID NO: 674465 - RNA, 22 nt, Human
gaguuggcuacucucugaggcu

SEQ ID NO: 674466 - RNA, 22 nt, Human
ucugggaagcugguccuguucu

SEQ ID NO: 674467 - RNA, 19 nt, Human
ugcaggaggacugagcaga

SEQ ID NO: 674468 - RNA, 22 nt, Human
uauugaggaucuccugcuaauu

SEQ ID NO: 674469 - RNA, 22 nt, Human
ugagaacggauacuaagggcug

SEQ ID NO: 674470 - RNA, 22 nt, Human
ggcaggugguaaggauuucaua

SEQ ID NO: 674471 - RNA, 20 nt, Human
uucagaaauaaggaaugagg

SEQ ID NO: 674472 - RNA, 22 nt, Human
aggcugucucaccucaggaggg

SEQ ID NO: 674473 - RNA, 22 nt, Human
auagaagauagcuuuuguuucu

SEQ ID NO: 674474 - RNA, 19 nt, Human
ugaagagcugucaaaagug

SEQ ID NO: 674475 - RNA, 22 nt, Human
gaggcagagugcaccccaggag

SEQ ID NO: 674476 - RNA, 22 nt, Human
augucacaucugggauggcccu

SEQ ID NO: 674477 - RNA, 22 nt, Human
gaucugggagccucauggagac

SEQ ID NO: 674478 - RNA, 22 nt, Human
cacaauuguaucagaaaauagu

SEQ ID NO: 674479 - RNA, 21 nt, Human
uggagacucugguucuuugug

SEQ ID NO: 674480 - RNA, 22 nt, Human
gauucccaugucugaggaggug

SEQ ID NO: 674481 - RNA, 22 nt, Human
uuucucaaguacugcacaugaa

SEQ ID NO: 674482 - RNA, 22 nt, Human
auuugaauggcuuaacacaacg

SEQ ID NO: 674483 - RNA, 22 nt, Human
aggacuucuccgauaagucaga

SEQ ID NO: 674484 - RNA, 22 nt, Human
cuccagugcacccagaggauuu

SEQ ID NO: 674485 - RNA, 21 nt, Human
uagggcucucugugucaggug

SEQ ID NO: 674486 - RNA, 22 nt, Human
ucuguuuuguaccagauacagc

SEQ ID NO: 674487 - RNA, 22 nt, Human
ugugccuacugauagagccaag

SEQ ID NO: 674488 - RNA, 22 nt, Human
cagugccucuuaagugucaccc

SEQ ID NO: 674489 - RNA, 22 nt, Human
gggaagagauuuccacaucauu

SEQ ID NO: 674490 - RNA, 22 nt, Human
caggcuggagugaguguagugg

SEQ ID NO: 674491 - RNA, 20 nt, Human
cccuccagcaaccaggacuu

SEQ ID NO: 674492 - RNA, 22 nt, Human
auucuuaaauuuaggucuguga

SEQ ID NO: 674493 - RNA, 22 nt, Human
gaguggagcaaaagagguagau

SEQ ID NO: 674494 - RNA, 18 nt, Human
caaauacuguugucuuau

SEQ ID NO: 674495 - RNA, 17 nt, Human
cuggccaguguacuugg

SEQ ID NO: 674496 - RNA, 22 nt, Human
cuguggaagguuuagauaggua

SEQ ID NO: 674497 - RNA, 21 nt, Human
uucauugaacuauuuguggag

SEQ ID NO: 674498 - RNA, 19 nt, Human
ucuggguauuuggaagaug

SEQ ID NO: 674499 - RNA, 22 nt, Human
ugacaaguacauaauuucaugu

SEQ ID NO: 674500 - RNA, 21 nt, Human
uuguuacauucuuauggcaua

SEQ ID NO: 674501 - RNA, 22 nt, Human
cucugaacucuugggcagcaug

SEQ ID NO: 674502 - RNA, 22 nt, Human
ccuuuaaagacugcauaacuuc

SEQ ID NO: 674503 - RNA, 22 nt, Human
auaaagcaaauaggacuauugc

SEQ ID NO: 674504 - RNA, 21 nt, Human
ccuugggaugcaagugagacu

SEQ ID NO: 674505 - RNA, 22 nt, Human
ggggccacuggcaggaccuugg

SEQ ID NO: 674506 - RNA, 22 nt, Human
caguucaaaauuuugaagaagg

SEQ ID NO: 674507 - RNA, 22 nt, Human
cuguggcugcagaccuuaaaca

SEQ ID NO: 674508 - RNA, 22 nt, Human
uggaacacagugauugauagcg

SEQ ID NO: 674509 - RNA, 22 nt, Human
augcaugagucacucagugcag

SEQ ID NO: 674510 - RNA, 22 nt, Human
gagucagaccgacugggcucau

SEQ ID NO: 674511 - RNA, 22 nt, Human
gccaugggucugcuggcucagc

SEQ ID NO: 674512 - RNA, 22 nt, Human
ucucuggcagaggcccuauccc

SEQ ID NO: 674513 - RNA, 22 nt, Human
aaguuucaugauguaauuauug

SEQ ID NO: 674514 - RNA, 22 nt, Human
cuucuuaaaguugucacagcug

SEQ ID NO: 674515 - RNA, 22 nt, Human
uuccuguggccuuacaucugug

SEQ ID NO: 674516 - RNA, 22 nt, Human
caugaugguucuuacaaaggug

SEQ ID NO: 674517 - RNA, 22 nt, Human
agcaaccuggaucauggugaaa

SEQ ID NO: 674518 - RNA, 22 nt, Human
ucugccuggaugauggcagggc

SEQ ID NO: 674519 - RNA, 22 nt, Human
ucaggccaaagaaacagcauga

SEQ ID NO: 674520 - RNA, 22 nt, Human
uuauugggucccaacaaguugc

SEQ ID NO: 674521 - RNA, 22 nt, Human
gcagggcaugggcccugucugc

SEQ ID NO: 674522 - RNA, 23 nt, Human
uguaggcuguaguuuguaggucc

SEQ ID NO: 674523 - RNA, 22 nt, Human
uucucagaauugacugggagca

SEQ ID NO: 674524 - RNA, 22 nt, Human
gcuguggcugaagaugcaggga

SEQ ID NO: 674525 - RNA, 22 nt, Human
ucacugcagacaaccucaguca

SEQ ID NO: 674526 - RNA, 21 nt, Human
ugcuucccugggccacacuga

SEQ ID NO: 674527 - RNA, 22 nt, Human
acugaaaugaaaucuaucaucu

SEQ ID NO: 674528 - RNA, 22 nt, Human
aauggcuuacccuggauugugu

SEQ ID NO: 674529 - RNA, 22 nt, Human
gcaggccugucuugcucgcccu

SEQ ID NO: 674530 - RNA, 19 nt, Human
ucugagguggaacuggggg

SEQ ID NO: 674531 - RNA, 22 nt, Human
acuuuguuguuccuugucuaaa

SEQ ID NO: 674532 - RNA, 22 nt, Human
caggaugagguagaggcagaua

SEQ ID NO: 674533 - RNA, 22 nt, Human
gcucuguggcauucaugggcag

SEQ ID NO: 674534 - RNA, 22 nt, Human
ggcagagacuggguuggcagag

SEQ ID NO: 674535 - RNA, 22 nt, Human
agaggcugggaaggguccccgg

SEQ ID NO: 674536 - RNA, 17 nt, Human
cccugccaccaggaagc

SEQ ID NO: 674537 - RNA, 19 nt, Human
ggcauccacagcuggagag

SEQ ID NO: 674538 - RNA, 22 nt, Human
ugggccagaggcauggagcuau

SEQ ID NO: 674539 - RNA, 22 nt, Human
cugaggcugcccagggccaggu

SEQ ID NO: 674540 - RNA, 22 nt, Human
cucugagcccgcugcagcccca

SEQ ID NO: 674541 - RNA, 22 nt, Human
caaaagggaguucucuggaagg

SEQ ID NO: 674542 - RNA, 20 nt, Human
agaagccaagugacauguuu

SEQ ID NO: 674543 - RNA, 22 nt, Human
augcuuucuucuuuccuguaag

SEQ ID NO: 674544 - RNA, 22 nt, Human
agagcccucugcaaugccucag

SEQ ID NO: 674545 - RNA, 19 nt, Human
aggcugcaagguggugggc

SEQ ID NO: 674546 - RNA, 22 nt, Human
acacaugcugauaagaauauaa

SEQ ID NO: 674547 - RNA, 17 nt, Human
cauccgugagcucggca

SEQ ID NO: 674548 - RNA, 22 nt, Human
caagucaagcaugcccuuauuu

SEQ ID NO: 674549 - RNA, 22 nt, Human
aaagcugcccuugugaaacaag

SEQ ID NO: 674550 - RNA, 22 nt, Human
augggcaggccucucauuucug

SEQ ID NO: 674551 - RNA, 22 nt, Human
ugucacagggauaccauggggc

SEQ ID NO: 674552 - RNA, 22 nt, Human
gucccagaaacauauugcuggu

SEQ ID NO: 674553 - RNA, 22 nt, Human
gccucugggguggagcccagca

SEQ ID NO: 674554 - RNA, 22 nt, Human
ucagcagggcugggagcuguga

SEQ ID NO: 674555 - RNA, 22 nt, Human
uuguguguacugguuaugggca

SEQ ID NO: 674556 - RNA, 22 nt, Human
gggaagcaucugaggguccacu

SEQ ID NO: 674557 - RNA, 22 nt, Human
aaaauucugucauuaaauugug

SEQ ID NO: 674558 - RNA, 19 nt, Human
acuucuuuucaacacagga

SEQ ID NO: 674559 - RNA, 22 nt, Human
ugucaguagauuauuacaauaa

SEQ ID NO: 674560 - RNA, 22 nt, Human
uaaagacaugguguaggugaac

SEQ ID NO: 674561 - RNA, 22 nt, Human
ugccugcaucuuggaggcccca

SEQ ID NO: 674562 - RNA, 23 nt, Human
gguuccaggaacacagccugaug

SEQ ID NO: 674563 - RNA, 21 nt, Human
uuacuuuagaaauugccuuuu

SEQ ID NO: 674564 - RNA, 22 nt, Human
uuuccuccuagccuccagccgc

SEQ ID NO: 674565 - RNA, 22 nt, Human
ccaguguuuuccaguuugccca

SEQ ID NO: 674566 - RNA, 22 nt, Human
gguuucaacuuuugugaggaau

SEQ ID NO: 674567 - RNA, 22 nt, Human
aagcaauaaauaauuuuuagua

SEQ ID NO: 674568 - RNA, 22 nt, Human
uggcauggguggagagagcaca

SEQ ID NO: 674569 - RNA, 22 nt, Human
uuaaggaaugugcaguuuauau

SEQ ID NO: 674570 - RNA, 22 nt, Human
uuuuccucaggaaugcuaagcu

SEQ ID NO: 674571 - RNA, 22 nt, Human
cccagcuaccucugcuaggaga

SEQ ID NO: 674572 - RNA, 21 nt, Human
cucuugucuuugcucaguagc

SEQ ID NO: 674573 - RNA, 22 nt, Human
caugcaggugaccagguguggg

SEQ ID NO: 674574 - RNA, 22 nt, Human
uaaaugcuuucuaugaaagagg

SEQ ID NO: 674575 - RNA, 20 nt, Human
gagccugggaagucuaaggu

SEQ ID NO: 674576 - RNA, 22 nt, Human
uauggcuuaaaauuucagcaug

SEQ ID NO: 674577 - RNA, 22 nt, Human
aggaguccucaugucugugcga

SEQ ID NO: 674578 - RNA, 22 nt, Human
ggccauggggacagagggugaa

SEQ ID NO: 674579 - RNA, 22 nt, Human
gacaggcacgaaauugggcugg

SEQ ID NO: 674580 - RNA, 22 nt, Human
ccugugugcacacgaggccaug

SEQ ID NO: 674581 - RNA, 22 nt, Human
cuggcccuguggccuaaggacu

SEQ ID NO: 674582 - RNA, 22 nt, Human
agcagcaauggaaagcaacaca

SEQ ID NO: 674583 - RNA, 22 nt, Human
gugaggagcugacacuggggug

SEQ ID NO: 674584 - RNA, 22 nt, Human
ccaugggaccuaccuccugugc

SEQ ID NO: 674585 - RNA, 22 nt, Human
gccagcuggagugagagugggc

SEQ ID NO: 674586 - RNA, 19 nt, Human
gcaggccaggaggcggagg

SEQ ID NO: 674587 - RNA, 21 nt, Human
cuggaggcagguggugccagg

SEQ ID NO: 674588 - RNA, 22 nt, Human
ugagaaaaguguggaggucaau

SEQ ID NO: 674589 - RNA, 22 nt, Human
gccucugcucggacuuugccuc

SEQ ID NO: 674590 - RNA, 22 nt, Human
aaguucaucaaagaguaaauau

SEQ ID NO: 674591 - RNA, 22 nt, Human
ucugggccugucucagagcugg

SEQ ID NO: 674592 - RNA, 22 nt, Human
aggcuguguggaugagucuuac

SEQ ID NO: 674593 - RNA, 22 nt, Human
ggggaaggauaugauuagacua

SEQ ID NO: 674594 - RNA, 21 nt, Human
uggcuggauagaugggaacug

SEQ ID NO: 674595 - RNA, 21 nt, Human
ccuuuagauuucuaugcaguu

SEQ ID NO: 674596 - RNA, 22 nt, Human
acugugagugauuuccuucugg

SEQ ID NO: 674597 - RNA, 23 nt, Human
cuugcagggcuggaggcuuagaa

SEQ ID NO: 674598 - RNA, 22 nt, Human
agagcauccaucggccaggacc

SEQ ID NO: 674599 - RNA, 22 nt, Human
uguaacacucaaucuguuuaac

SEQ ID NO: 674600 - RNA, 22 nt, Human
uuuuccucugagcuuugaauaa

SEQ ID NO: 674601 - RNA, 22 nt, Human
agacagcuguuccuucauguuu

SEQ ID NO: 674602 - RNA, 22 nt, Human
uuaaauuaggacucuaguucug

SEQ ID NO: 674603 - RNA, 22 nt, Human
ggucauugucagagccuguacu

SEQ ID NO: 674604 - RNA, 22 nt, Human
gcuuuaugcuacgauuucuagu

SEQ ID NO: 674605 - RNA, 18 nt, Human
ugaacagaugaguugaag

SEQ ID NO: 674606 - RNA, 17 nt, Human
ccagggaggggccgcgc

SEQ ID NO: 674607 - RNA, 19 nt, Human
ccagugcaagguaagauag

SEQ ID NO: 674608 - RNA, 22 nt, Human
gcaggaguuaggguaaaaauga

SEQ ID NO: 674609 - RNA, 22 nt, Human
aaacaguuucuaaucauggaga

SEQ ID NO: 674610 - RNA, 22 nt, Human
ucacagaagaaguagauugcau

SEQ ID NO: 674611 - RNA, 22 nt, Human
aggaauuguguuguaguggaga

SEQ ID NO: 674612 - RNA, 22 nt, Human
ccuggccuccuggccuucucau

SEQ ID NO: 674613 - RNA, 22 nt, Human
aaugacauggagcaucuuuuca

SEQ ID NO: 674614 - RNA, 23 nt, Human
aaaguuugaagcaacaguaguug

SEQ ID NO: 674615 - RNA, 22 nt, Human
uuaaagggccgauuuccaggcc

SEQ ID NO: 674616 - RNA, 21 nt, Human
uagaucaugguauucuuuggc

SEQ ID NO: 674617 - RNA, 22 nt, Human
aauauuaauagaagggguucua

SEQ ID NO: 674618 - RNA, 18 nt, Human
gccacccuccucgucucc

SEQ ID NO: 674619 - RNA, 22 nt, Human
aaguuugagaagcuuauagaua

SEQ ID NO: 674620 - RNA, 19 nt, Human
uccuuucuguuccugagau

SEQ ID NO: 674621 - RNA, 19 nt, Human
agcagcuggagguggagug

SEQ ID NO: 674622 - RNA, 22 nt, Human
ucacagccuggucacucugccc

SEQ ID NO: 674623 - RNA, 22 nt, Human
cucagcagcagggaagagguca

SEQ ID NO: 674624 - RNA, 22 nt, Human
cuagagaggcagauguccugug

SEQ ID NO: 674625 - RNA, 22 nt, Human
uggaguucauccaugacagcuu

SEQ ID NO: 674626 - RNA, 22 nt, Human
acuggcagaacgugaugcgggu

SEQ ID NO: 674627 - RNA, 22 nt, Human
cuuuggcuuuuagauauccauu

SEQ ID NO: 674628 - RNA, 22 nt, Human
augaaagcacgugggaagauaa

SEQ ID NO: 674629 - RNA, 17 nt, Human
cuggagccaagagggcc

SEQ ID NO: 674630 - RNA, 18 nt, Human
gcuccuggaccaggucac

SEQ ID NO: 674631 - RNA, 21 nt, Human
uaagugcaaagagacagauac

SEQ ID NO: 674632 - RNA, 21 nt, Human
ugcaauauauauuugccugaa

SEQ ID NO: 674633 - RNA, 22 nt, Human
acucuucauucaaguaugcaaa

SEQ ID NO: 674634 - RNA, 22 nt, Human
gugagagaaauuggagggaaug

SEQ ID NO: 674635 - RNA, 22 nt, Human
auguuuuugagauacaaacaga

SEQ ID NO: 674636 - RNA, 19 nt, Human
agacauaaagaguuugcaa

SEQ ID NO: 674637 - RNA, 22 nt, Human
uaguccaguaaaacagcuaacg

SEQ ID NO: 674638 - RNA, 21 nt, Human
caugaagccgguucccuguuu

SEQ ID NO: 674639 - RNA, 22 nt, Human
uguuaaaccuaguacagguccu

SEQ ID NO: 674640 - RNA, 22 nt, Human
guugaaagcuuuucauuuaguu

SEQ ID NO: 674641 - RNA, 22 nt, Human
ugagcugugaggguacagauau

SEQ ID NO: 674642 - RNA, 20 nt, Human
cucaucucugagccuccugg

SEQ ID NO: 674643 - RNA, 22 nt, Human
acucuaccaugccacuccauag

SEQ ID NO: 674644 - RNA, 22 nt, Human
uucucuaagccuuaguuucuuc

SEQ ID NO: 674645 - RNA, 22 nt, Human
acacauaugcagaucccccaca

SEQ ID NO: 674646 - RNA, 22 nt, Human
aucugucugggugcagcagucc

SEQ ID NO: 674647 - RNA, 22 nt, Human
uacuuuagaaggaaauaaguuc

SEQ ID NO: 674648 - RNA, 22 nt, Human
aagagcauuuggugagauuuga

SEQ ID NO: 674649 - RNA, 22 nt, Human
ucuggccagugaaaugcagaau

SEQ ID NO: 674650 - RNA, 22 nt, Human
uccuuuuugguccaaggugacc

SEQ ID NO: 674651 - RNA, 22 nt, Human
uuggaaggagucaaccagcuga

SEQ ID NO: 674652 - RNA, 22 nt, Human
agcauuccagugcacaguagaa

SEQ ID NO: 674653 - RNA, 22 nt, Human
acuguauuggaaauauagcaaa

SEQ ID NO: 674654 - RNA, 22 nt, Human
gauucugcgaugaggacgagcu

SEQ ID NO: 674655 - RNA, 22 nt, Human
agcaggcacuaugccaggaucu

SEQ ID NO: 674656 - RNA, 22 nt, Human
uuagggaaauauuuauauacuu

SEQ ID NO: 674657 - RNA, 22 nt, Human
ucccaggaagaucccagggacc

SEQ ID NO: 674658 - RNA, 22 nt, Human
uuaauaaaguaugaauuggaaa

SEQ ID NO: 674659 - RNA, 22 nt, Human
ggucugagcucuaaaacuaacu

SEQ ID NO: 674660 - RNA, 22 nt, Human
ugauucugccccuuggcucugg

SEQ ID NO: 674661 - RNA, 23 nt, Human
cuguggagcccuuuguugggaga

SEQ ID NO: 674662 - RNA, 22 nt, Human
agacaagacuaggcaguuguug

SEQ ID NO: 674663 - RNA, 22 nt, Human
cauggaggaguuaggugugagu

SEQ ID NO: 674664 - RNA, 22 nt, Human
cucccaggccaugcucuagcca

SEQ ID NO: 674665 - RNA, 22 nt, Human
cuuggucuacuagagaaaaaga

SEQ ID NO: 674666 - RNA, 22 nt, Human
aaugaaaucugcuggguaaaga

SEQ ID NO: 674667 - RNA, 22 nt, Human
ggugggcaggcgaggcccaggu

SEQ ID NO: 674668 - RNA, 20 nt, Human
uguggcaggaugagggcgga

SEQ ID NO: 674669 - RNA, 22 nt, Human
uuucagagaauuagaagcugau

SEQ ID NO: 674670 - RNA, 22 nt, Human
aaagauuugaguucugcuuaua

SEQ ID NO: 674671 - RNA, 22 nt, Human
gaaucaggauucaagaucagcu

SEQ ID NO: 674672 - RNA, 20 nt, Human
ugaggcucagagagguugag

SEQ ID NO: 674673 - RNA, 22 nt, Human
gcauucaucuucaugaaagcac

SEQ ID NO: 674674 - RNA, 22 nt, Human
ucacauuuuaguaccaugauuu

SEQ ID NO: 674675 - RNA, 22 nt, Human
cugggcacacagugacucugca

SEQ ID NO: 674676 - RNA, 22 nt, Human
uuuacaauucuggugccagcua

SEQ ID NO: 674677 - RNA, 22 nt, Human
uguuuacuggcuccugugguuc

SEQ ID NO: 674678 - RNA, 22 nt, Human
uuucuuuauccuccuuugcaca

SEQ ID NO: 674679 - RNA, 22 nt, Human
gcuggccagugucccagggauc

SEQ ID NO: 674680 - RNA, 22 nt, Human
auggcaguggaaugggaugagu

SEQ ID NO: 674681 - RNA, 22 nt, Human
gggacacucaaugagaccugca

SEQ ID NO: 674682 - RNA, 22 nt, Human
gggagacccccaaugccagguc

SEQ ID NO: 674683 - RNA, 22 nt, Human
uaugcauauguguucauuggag

SEQ ID NO: 674684 - RNA, 22 nt, Human
ccuggcuuccuggagcucacaa

SEQ ID NO: 674685 - RNA, 22 nt, Human
agguaacauugccuccaucuga

SEQ ID NO: 674686 - RNA, 22 nt, Human
caggcagugugacgcuaggguu

SEQ ID NO: 674687 - RNA, 22 nt, Human
auuguggcuagacagucacaau

SEQ ID NO: 674688 - RNA, 22 nt, Human
uacaagaaacuacaugaaugca

SEQ ID NO: 674689 - RNA, 22 nt, Human
ccuggagacccacuucugccaa

SEQ ID NO: 674690 - RNA, 22 nt, Human
agcaggugacagggcuguggug

SEQ ID NO: 674691 - RNA, 22 nt, Human
aauguuuuagauuacugcuggg

SEQ ID NO: 674692 - RNA, 22 nt, Human
uccugacuuaacuacucucugg

SEQ ID NO: 674693 - RNA, 22 nt, Human
cccagcucaucaggagccgccc

SEQ ID NO: 674694 - RNA, 22 nt, Human
gauugcgucugugucaccuuca

SEQ ID NO: 674695 - RNA, 22 nt, Human
uugaggucaucugaaguacuag

SEQ ID NO: 674696 - RNA, 22 nt, Human
aaaagaugaaauggugucuugg

SEQ ID NO: 674697 - RNA, 22 nt, Human
aaugguuuucuagaacaugaaa

SEQ ID NO: 674698 - RNA, 22 nt, Human
agaggauccuaagaagauauga

SEQ ID NO: 674699 - RNA, 22 nt, Human
gagggcuccauuccccgugccc

SEQ ID NO: 674700 - RNA, 22 nt, Human
augcuuccuuaccagaagauga

SEQ ID NO: 674701 - RNA, 22 nt, Human
uuuaaauaggacuccugggggu

SEQ ID NO: 674702 - RNA, 22 nt, Human
ucucuuaaaggucuucagcuga

SEQ ID NO: 674703 - RNA, 22 nt, Human
agcuccuggcuuuccucucacc

SEQ ID NO: 674704 - RNA, 22 nt, Human
gugaaaucugaggcccaugaug

SEQ ID NO: 674705 - RNA, 22 nt, Human
cagcagaaguccgacuccaguc

SEQ ID NO: 674706 - RNA, 20 nt, Human
ugguccucacagguccuccc

SEQ ID NO: 674707 - RNA, 22 nt, Human
cauucauuuaugaaauaucuau

SEQ ID NO: 674708 - RNA, 22 nt, Human
ugcucccaggcauucucuguug

SEQ ID NO: 674709 - RNA, 22 nt, Human
ugggggaagagcuuguuaaagu

SEQ ID NO: 674710 - RNA, 22 nt, Human
cuuugaagaucacauguugcuc

SEQ ID NO: 674711 - RNA, 22 nt, Human
aaugggaaagagacuagaugcu

SEQ ID NO: 674712 - RNA, 22 nt, Human
ucucagcucauggcagccuuga

SEQ ID NO: 674713 - RNA, 21 nt, Human
cugugcuuuuuaagugugaug

SEQ ID NO: 674714 - RNA, 22 nt, Human
agcuggguucagaggcacaugg

SEQ ID NO: 674715 - RNA, 20 nt, Human
gaggcugaaguguuuuugcu

SEQ ID NO: 674716 - RNA, 22 nt, Human
uuuguucacugagcaaugauua

SEQ ID NO: 674717 - RNA, 22 nt, Human
aaagagcuugcuugcuuuauau

SEQ ID NO: 674718 - RNA, 22 nt, Human
cugaagagguuguugaggaaua

SEQ ID NO: 674719 - RNA, 22 nt, Human
gguuucaacuaaaucaagaagg

SEQ ID NO: 674720 - RNA, 22 nt, Human
ccauuuguauuacugccccagg

SEQ ID NO: 674721 - RNA, 22 nt, Human
aaaucuguuucagguauauuug

SEQ ID NO: 674722 - RNA, 22 nt, Human
aagcagcuucccuggcuccugg

SEQ ID NO: 674723 - RNA, 22 nt, Human
ccccagguggauggcucgcaua

SEQ ID NO: 674724 - RNA, 22 nt, Human
agguaaagacagugaaagaggg

SEQ ID NO: 674725 - RNA, 22 nt, Human
gcucacagagggugcuuaauac

SEQ ID NO: 674726 - RNA, 23 nt, Human
auucaguugugagagaagacaca

SEQ ID NO: 674727 - RNA, 22 nt, Human
ggaggucacgacugggaugccu

SEQ ID NO: 674728 - RNA, 22 nt, Human
aucgcaauguuuagaauuuugu

SEQ ID NO: 674729 - RNA, 22 nt, Human
gucacuguuuccuauuauauuu

SEQ ID NO: 674730 - RNA, 22 nt, Human
ucaggucuauagaagaggaggg

SEQ ID NO: 674731 - RNA, 22 nt, Human
uugauacacaauggaacaaugu

SEQ ID NO: 674732 - RNA, 22 nt, Human
gaugugaggugguaaacaggga

SEQ ID NO: 674733 - RNA, 22 nt, Human
uuaaaaucuaaagcaguugucu

SEQ ID NO: 674734 - RNA, 20 nt, Human
ugcacagcugugaauaggau

SEQ ID NO: 674735 - RNA, 21 nt, Human
ucucuguguucaaggugccag

SEQ ID NO: 674736 - RNA, 22 nt, Human
cuauggaaacucaacauuuguu

SEQ ID NO: 674737 - RNA, 22 nt, Human
gacaugaauguuauacuuuauu

SEQ ID NO: 674738 - RNA, 22 nt, Human
guuuaaauaauuaggggccugu

SEQ ID NO: 674739 - RNA, 22 nt, Human
cuagagaaucuuuuaagaagug

SEQ ID NO: 674740 - RNA, 22 nt, Human
uaggaggguuagagggaaauau

SEQ ID NO: 674741 - RNA, 22 nt, Human
cacaugcaucacgacuuccuuu

SEQ ID NO: 674742 - RNA, 20 nt, Human
agugugguuuucaggaauau

SEQ ID NO: 674743 - RNA, 22 nt, Human
gucaggaugagggaugaggagu

SEQ ID NO: 674744 - RNA, 22 nt, Human
uccugaaauucugguugucacu

SEQ ID NO: 674745 - RNA, 22 nt, Human
ucaguucuuuauuucacaguga

SEQ ID NO: 674746 - RNA, 22 nt, Human
cacacauuagagccaaugucag

SEQ ID NO: 674747 - RNA, 22 nt, Human
uuugauucaauguuuauauaaa

SEQ ID NO: 674748 - RNA, 22 nt, Human
ggcugccugaggcagugagaga

SEQ ID NO: 674749 - RNA, 22 nt, Human
gcuucugcagccaaagaagccg

SEQ ID NO: 674750 - RNA, 22 nt, Human
uugaaugaauaguugcuagaag

SEQ ID NO: 674751 - RNA, 22 nt, Human
uagacaaucucagcaaacacac

SEQ ID NO: 674752 - RNA, 22 nt, Human
uucuggaaaugcacaacuaauu

SEQ ID NO: 674753 - RNA, 22 nt, Human
agggccugagcucuccuccagu

SEQ ID NO: 674754 - RNA, 22 nt, Human
gggcacuggaaggcucucaggc

SEQ ID NO: 674755 - RNA, 22 nt, Human
cacuggcaucuaguggguugag

SEQ ID NO: 674756 - RNA, 21 nt, Human
cucagagaaaugucugggagc

SEQ ID NO: 674757 - RNA, 22 nt, Human
acaucagagggcucacaugauc

SEQ ID NO: 674758 - RNA, 22 nt, Human
aggucugccucacucacuucug

SEQ ID NO: 674759 - RNA, 22 nt, Human
agaggccagcaaccacaguaaa

SEQ ID NO: 674760 - RNA, 21 nt, Human
uccugggaagcacuggggugg

SEQ ID NO: 674761 - RNA, 22 nt, Human
uucauagugacaugcauucugg

SEQ ID NO: 674762 - RNA, 22 nt, Human
aacuacagaaaagguaagcucu

SEQ ID NO: 674763 - RNA, 22 nt, Human
cagcagagguuggaacaguucu

SEQ ID NO: 674764 - RNA, 22 nt, Human
aaagacuacacgggaaagagcu

SEQ ID NO: 674765 - RNA, 22 nt, Human
gcacugugcuagaagccagggg

SEQ ID NO: 674766 - RNA, 22 nt, Human
acagggcuggcguugggacaga

SEQ ID NO: 674767 - RNA, 22 nt, Human
cugugucuucaauguacuggga

SEQ ID NO: 674768 - RNA, 16 nt, Human
ccagaggccuggccuc

SEQ ID NO: 674769 - RNA, 22 nt, Human
cacaggaagagguauacaauuc

SEQ ID NO: 674770 - RNA, 22 nt, Human
uaugaaaagguggccaauguag

SEQ ID NO: 674771 - RNA, 22 nt, Human
uuuaauuuuccucuuccuggag

SEQ ID NO: 674772 - RNA, 22 nt, Human
agugaauucugcacuacugaag

SEQ ID NO: 674773 - RNA, 22 nt, Human
ucagugaucuaaggguauggcc

SEQ ID NO: 674774 - RNA, 22 nt, Human
aggcugugacuacgcagggaag

SEQ ID NO: 674775 - RNA, 22 nt, Human
uugagcaaugcugcaaagagau

SEQ ID NO: 674776 - RNA, 22 nt, Human
auuugaagaaaguuuucuagau

SEQ ID NO: 674777 - RNA, 22 nt, Human
agcaucuggauggaaagcaagg

SEQ ID NO: 674778 - RNA, 22 nt, Human
acaacacagcaaaaccccaucu

SEQ ID NO: 674779 - RNA, 22 nt, Human
ccaggcaguggaagcuaaaauu

SEQ ID NO: 674780 - RNA, 22 nt, Human
ugguggagcuguggccacgacc

SEQ ID NO: 674781 - RNA, 22 nt, Human
cugggccaggaccaggguugaa

SEQ ID NO: 674782 - RNA, 22 nt, Human
ggagaugcuuuccaguggggau

SEQ ID NO: 674783 - RNA, 23 nt, Human
gggcauggaguguagguggaagg

SEQ ID NO: 674784 - RNA, 22 nt, Human
gaaggaagccguuucucuccag

SEQ ID NO: 674785 - RNA, 18 nt, Human
cgaggcaggcggaucacg

SEQ ID NO: 674786 - RNA, 22 nt, Human
ggcagugacuggggacccccaa

SEQ ID NO: 674787 - RNA, 22 nt, Human
acagauaauacauugugcuaca

SEQ ID NO: 674788 - RNA, 22 nt, Human
uagauucucccaccugccaggc

SEQ ID NO: 674789 - RNA, 22 nt, Human
ggcagcucacugauuagcaauu

SEQ ID NO: 674790 - RNA, 22 nt, Human
ugggccacagagugagaaaugu

SEQ ID NO: 674791 - RNA, 22 nt, Human
agaguuuguauuuuucagugaa

SEQ ID NO: 674792 - RNA, 22 nt, Human
augauucagggaguuuucagga

SEQ ID NO: 674793 - RNA, 22 nt, Human
aaaagguagauucuccuucuau

SEQ ID NO: 674794 - RNA, 22 nt, Human
uuuaaucucccacucucagccu

SEQ ID NO: 674795 - RNA, 18 nt, Human
agagacagcagcaaaaga

SEQ ID NO: 674796 - RNA, 23 nt, Human
ugugcacaucugacgggugaagg

SEQ ID NO: 674797 - RNA, 22 nt, Human
cccaggagguguagcugcgugg

SEQ ID NO: 674798 - RNA, 22 nt, Human
cagagcuggagaaguggauuua

SEQ ID NO: 674799 - RNA, 22 nt, Human
ggcucugggugugaccuugggu

SEQ ID NO: 674800 - RNA, 22 nt, Human
uuuggucuuuuauuuaaagcag

SEQ ID NO: 674801 - RNA, 20 nt, Human
ggcaggcuuuauauggaggg

SEQ ID NO: 674802 - RNA, 22 nt, Human
ucaggaacauuuaaccacaggg

SEQ ID NO: 674803 - RNA, 18 nt, Human
uuauggcugugaaagagu

SEQ ID NO: 674804 - RNA, 22 nt, Human
guuucuguaagacugaauugac

SEQ ID NO: 674805 - RNA, 22 nt, Human
caauuuuauugguccaaauaca

SEQ ID NO: 674806 - RNA, 22 nt, Human
uucugaaauuucuguagaucuu

SEQ ID NO: 674807 - RNA, 22 nt, Human
aauguguguucggggcccagag

SEQ ID NO: 674808 - RNA, 22 nt, Human
agguggagaagagaugggcagu

SEQ ID NO: 674809 - RNA, 22 nt, Human
cauucagucaugcugguuuuga

SEQ ID NO: 674810 - RNA, 22 nt, Human
uucaaaucagaccgaaggcaac

SEQ ID NO: 674811 - RNA, 22 nt, Human
guggaugagauaacuguagaag

SEQ ID NO: 674812 - RNA, 22 nt, Human
ugcuauaaguagacauucaaca

SEQ ID NO: 674813 - RNA, 22 nt, Human
uuuuucugccauucaaagagga

SEQ ID NO: 674814 - RNA, 22 nt, Human
ugcuauuuuuaucuugaucaaa

SEQ ID NO: 674815 - RNA, 22 nt, Human
augauuuuuucuaacacagucg

SEQ ID NO: 674816 - RNA, 22 nt, Human
aaauuucuaagcagccacuucc

SEQ ID NO: 674817 - RNA, 23 nt, Human
agggccucaggagggcugcaugg

SEQ ID NO: 674818 - RNA, 22 nt, Human
gacuucuauuaauaccucuacu

SEQ ID NO: 674819 - RNA, 22 nt, Human
aauggcagagacuguugaaaua

SEQ ID NO: 674820 - RNA, 22 nt, Human
agcuuucaggauaaugaaaaag

SEQ ID NO: 674821 - RNA, 22 nt, Human
uccugcagccaagggucaucga

SEQ ID NO: 674822 - RNA, 22 nt, Human
uggccucugugggagcugagca

SEQ ID NO: 674823 - RNA, 22 nt, Human
uuaucuguuuaacaaaguaucu

SEQ ID NO: 674824 - RNA, 22 nt, Human
uaccaaagauuaaauagcaaca

SEQ ID NO: 674825 - RNA, 22 nt, Human
guggcauggagaaggaggcagu

SEQ ID NO: 674826 - RNA, 22 nt, Human
ccucuggccacaugggacauag

SEQ ID NO: 674827 - RNA, 22 nt, Human
ugagcccugaccuagccuggcc

SEQ ID NO: 674828 - RNA, 22 nt, Human
aaugcuuuuacgacauguaccu

SEQ ID NO: 674829 - RNA, 19 nt, Human
gcugcucugggucucaucu

SEQ ID NO: 674830 - RNA, 22 nt, Human
cagucucuugcuucauuaguug

SEQ ID NO: 674831 - RNA, 22 nt, Human
acagugugaugggccugccuga

SEQ ID NO: 674832 - RNA, 22 nt, Human
aagaacaugaguuaugaugauu

SEQ ID NO: 674833 - RNA, 21 nt, Human
uuugauucuuccucuccccag

SEQ ID NO: 674834 - RNA, 22 nt, Human
agggcagcggugcuuguguuau

SEQ ID NO: 674835 - RNA, 19 nt, Human
uaggcccuagcucugcagu

SEQ ID NO: 674836 - RNA, 22 nt, Human
aauaacagaaacuugagcauca

SEQ ID NO: 674837 - RNA, 21 nt, Human
uucuuuccccagaggacuaaa

SEQ ID NO: 674838 - RNA, 22 nt, Human
uugauucuuugagaccgugaua

SEQ ID NO: 674839 - RNA, 22 nt, Human
aauguaaaauaucuuguacuug

SEQ ID NO: 674840 - RNA, 16 nt, Human
aaagaaacaggugucc

SEQ ID NO: 674841 - RNA, 22 nt, Human
ugaggccacuuccccacagccc

SEQ ID NO: 674842 - RNA, 22 nt, Human
aaugaacacagcccucuacuuu

SEQ ID NO: 674843 - RNA, 22 nt, Human
ugcccuggcauuggguuggaua

SEQ ID NO: 674844 - RNA, 22 nt, Human
cagcuucuguuucuagccccug

SEQ ID NO: 674845 - RNA, 22 nt, Human
agguucauucccaaauuuggag

SEQ ID NO: 674846 - RNA, 19 nt, Human
acacaaugacacauauaua

SEQ ID NO: 674847 - RNA, 22 nt, Human
ugucgcagcugaaaaucucaau

SEQ ID NO: 674848 - RNA, 22 nt, Human
cucuuuuucagccuuaccaaag

SEQ ID NO: 674849 - RNA, 22 nt, Human
uugcauguguauaaaaguugga

SEQ ID NO: 674850 - RNA, 22 nt, Human
aaagucauuuguauauacccuu

SEQ ID NO: 674851 - RNA, 22 nt, Human
gauuuuauuagcccaaacuuug

SEQ ID NO: 674852 - RNA, 21 nt, Human
ccccugggagcccugucagua

SEQ ID NO: 674853 - RNA, 22 nt, Human
ugccuacuaguacuauuuugug

SEQ ID NO: 674854 - RNA, 22 nt, Human
uuucugcagcagacucagugug

SEQ ID NO: 674855 - RNA, 22 nt, Human
uuuuggucaacaguacaugcgg

SEQ ID NO: 674856 - RNA, 21 nt, Human
gucagagaugcccaacugccu

SEQ ID NO: 674857 - RNA, 22 nt, Human
aggcagagaaaaaccagauaug

SEQ ID NO: 674858 - RNA, 22 nt, Human
acacaucucaggggacacucuc

SEQ ID NO: 674859 - RNA, 20 nt, Human
cugcccagccacugagggau

SEQ ID NO: 674860 - RNA, 22 nt, Human
uucagacugcuggugcuucccu

SEQ ID NO: 674861 - RNA, 22 nt, Human
gauuucuuugcaagcuguguuc

SEQ ID NO: 674862 - RNA, 22 nt, Human
uuggaauuugagaccaagaaaa

SEQ ID NO: 674863 - RNA, 22 nt, Human
cuggcacagagacagaaggauu

SEQ ID NO: 674864 - RNA, 22 nt, Human
gaaagauaaucaauuacuccuu

SEQ ID NO: 674865 - RNA, 22 nt, Human
aagccaguggugagaagauagc

SEQ ID NO: 674866 - RNA, 22 nt, Human
gagaagcaaucagcagccaccc

SEQ ID NO: 674867 - RNA, 22 nt, Human
cagucaacagagagcccgucag

SEQ ID NO: 674868 - RNA, 22 nt, Human
aaaaacugguaacuauucccca

SEQ ID NO: 674869 - RNA, 22 nt, Human
gugccuggcacacagaaggcaa

SEQ ID NO: 674870 - RNA, 22 nt, Human
uuucugagaaauuaaacacuuu

SEQ ID NO: 674871 - RNA, 22 nt, Human
uuucagacucagaacuuagcaa

SEQ ID NO: 674872 - RNA, 22 nt, Human
gagcugaaauaugaagccaauu

SEQ ID NO: 674873 - RNA, 22 nt, Human
acaaacuucccagacaagcucc

SEQ ID NO: 674874 - RNA, 22 nt, Human
gcaguccaaaguggcucucacc

SEQ ID NO: 674875 - RNA, 22 nt, Human
auggcaaaaauuaacagaucaa

SEQ ID NO: 674876 - RNA, 22 nt, Human
uuaaaauguacaggggaaagug

SEQ ID NO: 674877 - RNA, 22 nt, Human
guuuucaaggggauuuaacuga

SEQ ID NO: 674878 - RNA, 22 nt, Human
acugagaacuugccaaggacug

SEQ ID NO: 674879 - RNA, 22 nt, Human
gucagugugagauaaucuugga

SEQ ID NO: 674880 - RNA, 22 nt, Human
gcugcugggguggagaaacgcu

SEQ ID NO: 674881 - RNA, 22 nt, Human
uguucuaaauugcuagcuggaa

SEQ ID NO: 674882 - RNA, 22 nt, Human
aagcagcauucagugaaaugug

SEQ ID NO: 674883 - RNA, 22 nt, Human
auaaauuuucuugcuguacuua

SEQ ID NO: 674884 - RNA, 22 nt, Human
aaagaauuuguacacccuacua

SEQ ID NO: 674885 - RNA, 22 nt, Human
uggcaaagaccgcaauuacuuu

SEQ ID NO: 674886 - RNA, 22 nt, Human
gaaggccauuagagccugugcc

SEQ ID NO: 674887 - RNA, 22 nt, Human
cugccccaggccuccuuuucuu

SEQ ID NO: 674888 - RNA, 22 nt, Human
cuugggugcuggaggcugccgc

SEQ ID NO: 674889 - RNA, 22 nt, Human
agagcuggcugguagcccugau

SEQ ID NO: 674890 - RNA, 22 nt, Human
aaggucauuuuuuccucuguug

SEQ ID NO: 674891 - RNA, 22 nt, Human
uuggaaaacuuacacagagcug

SEQ ID NO: 674892 - RNA, 22 nt, Human
aggcucaguuugguuuccauug

SEQ ID NO: 674893 - RNA, 22 nt, Human
ggccagagaauaugccuuacgu

SEQ ID NO: 674894 - RNA, 22 nt, Human
cagccagagaggaaggaaugca

SEQ ID NO: 674895 - RNA, 22 nt, Human
guuaaaugcacuauugaaagcu

SEQ ID NO: 674896 - RNA, 22 nt, Human
uuucuuuaauucucacagcaau

SEQ ID NO: 674897 - RNA, 22 nt, Human
gcagcugggacacugaggccag

SEQ ID NO: 674898 - RNA, 22 nt, Human
ugucccagucaaggcugucauc

SEQ ID NO: 674899 - RNA, 22 nt, Human
acuuuacaggcacuucaaguau

SEQ ID NO: 674900 - RNA, 22 nt, Human
cagagcagugggguuggucaga

SEQ ID NO: 674901 - RNA, 21 nt, Human
auaugaacuguggacuuugga

SEQ ID NO: 674902 - RNA, 22 nt, Human
caucaucaaaagugacagagaa

SEQ ID NO: 674903 - RNA, 22 nt, Human
cagggacauugguggccagguu

SEQ ID NO: 674904 - RNA, 22 nt, Human
gguggcagaauaauugaagguc

SEQ ID NO: 674905 - RNA, 22 nt, Human
gucuccaguuacagcagccagg

SEQ ID NO: 674906 - RNA, 22 nt, Human
aagcucagagucucggagggaa

SEQ ID NO: 674907 - RNA, 22 nt, Human
cuugggcucagacuugaggaca

SEQ ID NO: 674908 - RNA, 22 nt, Human
aacuccaggcagggaggccacu

SEQ ID NO: 674909 - RNA, 22 nt, Human
aaaggcucuaacaaggagagag

SEQ ID NO: 674910 - RNA, 22 nt, Human
agugaaaagaugcauuucucug

SEQ ID NO: 674911 - RNA, 22 nt, Human
ugccaggcugucaauucaccca

SEQ ID NO: 674912 - RNA, 18 nt, Human
acauacauucugucugca

SEQ ID NO: 674913 - RNA, 22 nt, Human
acugagaaagaccacauggaga

SEQ ID NO: 674914 - RNA, 22 nt, Human
cugucuuugguccugucuguua

SEQ ID NO: 674915 - RNA, 22 nt, Human
agacauagaaaaucauuaggaa

SEQ ID NO: 674916 - RNA, 22 nt, Human
accuggacaccugcugucaucu

SEQ ID NO: 674917 - RNA, 22 nt, Human
auucagugggugcucagcacaa

SEQ ID NO: 674918 - RNA, 22 nt, Human
acacaggcaagagugcaggucu

SEQ ID NO: 674919 - RNA, 22 nt, Human
ggccucaucacagugcauuagu

SEQ ID NO: 674920 - RNA, 22 nt, Human
caacuccuccccagcaugccaa

SEQ ID NO: 674921 - RNA, 22 nt, Human
gcaaggagacuguagggccaag

SEQ ID NO: 674922 - RNA, 22 nt, Human
auucugcuuuugcugaccuacc

SEQ ID NO: 674923 - RNA, 22 nt, Human
uccagcaaagugauaggauuuc

SEQ ID NO: 674924 - RNA, 22 nt, Human
cucagagagacaaugugggaca

SEQ ID NO: 674925 - RNA, 18 nt, Human
agcugaggggacugaaga

SEQ ID NO: 674926 - RNA, 22 nt, Human
aaggcuuguguguucagugagg

SEQ ID NO: 674927 - RNA, 22 nt, Human
ggcccuuccucuugugcuggca

SEQ ID NO: 674928 - RNA, 22 nt, Human
gaggcaugucuggccuguccca

SEQ ID NO: 674929 - RNA, 22 nt, Human
ggcacauggagacuuggcauca

SEQ ID NO: 674930 - RNA, 22 nt, Human
auauucacuggguacuaaaaag

SEQ ID NO: 674931 - RNA, 22 nt, Human
ccugagggaaggaugcuaccca

SEQ ID NO: 674932 - RNA, 22 nt, Human
uuacaacauaugauaggagucu

SEQ ID NO: 674933 - RNA, 22 nt, Human
cagcaggcuggacuucaguccc

SEQ ID NO: 674934 - RNA, 19 nt, Human
uugugugucagucagaguu

SEQ ID NO: 674935 - RNA, 22 nt, Human
ucuacagacagagcagguggga

SEQ ID NO: 674936 - RNA, 22 nt, Human
cugcugcaacucuuuagagggu

SEQ ID NO: 674937 - RNA, 22 nt, Human
ugaaaucugucccacuuuagcu

SEQ ID NO: 674938 - RNA, 22 nt, Human
cacaaaggagaaugucagcaua

SEQ ID NO: 674939 - RNA, 22 nt, Human
ucaaagcaauuucaccagugcc

SEQ ID NO: 674940 - RNA, 22 nt, Human
agugcaugaaagcauacaaggc

SEQ ID NO: 674941 - RNA, 22 nt, Human
gagcaggaacagaucccuugga

SEQ ID NO: 674942 - RNA, 22 nt, Human
uucucuccuccuagaggcuuuu

SEQ ID NO: 674943 - RNA, 22 nt, Human
gaauaauugugaugcuugaagu

SEQ ID NO: 674944 - RNA, 22 nt, Human
aggagguggccugagcgugccc

SEQ ID NO: 674945 - RNA, 22 nt, Human
gcagcugaaagggaucucuaca

SEQ ID NO: 674946 - RNA, 22 nt, Human
ucugccuagguuuccaaugugc

SEQ ID NO: 674947 - RNA, 22 nt, Human
uuuccacaauguuuuugcagga

SEQ ID NO: 674948 - RNA, 22 nt, Human
gugagaaaugacaaaugugucg

SEQ ID NO: 674949 - RNA, 22 nt, Human
aggcugugaucucaugauuugu

SEQ ID NO: 674950 - RNA, 22 nt, Human
augauggugggagaugacccag

SEQ ID NO: 674951 - RNA, 22 nt, Human
uggcugccagcuccucgccuug

SEQ ID NO: 674952 - RNA, 22 nt, Human
agaggccggccgagcccauggg

SEQ ID NO: 674953 - RNA, 22 nt, Human
uccagaguacggaagagucauc

SEQ ID NO: 674954 - RNA, 22 nt, Human
ggcuggcaggcacaguaugcaa

SEQ ID NO: 674955 - RNA, 22 nt, Human
cugaggcuucucuaguucagcu

SEQ ID NO: 674956 - RNA, 22 nt, Human
aucuuuacaagaaauucuuuua

SEQ ID NO: 674957 - RNA, 22 nt, Human
guugcuuguuaguggugagguu

SEQ ID NO: 674958 - RNA, 22 nt, Human
acaguuuagagcaugaugacca

SEQ ID NO: 674959 - RNA, 21 nt, Human
uagaggcaggagggacugcag

SEQ ID NO: 674960 - RNA, 22 nt, Human
gauuuccuaauguggaucucug

SEQ ID NO: 674961 - RNA, 22 nt, Human
cuucugagggccuuugcuucca

SEQ ID NO: 674962 - RNA, 22 nt, Human
gguggccuuuuaugagcagggu

SEQ ID NO: 674963 - RNA, 22 nt, Human
uguuuuaugagccauauaaccu

SEQ ID NO: 674964 - RNA, 22 nt, Human
cagggcugucuccaaaggcccc

SEQ ID NO: 674965 - RNA, 22 nt, Human
uuacauuuugcacagauguccc

SEQ ID NO: 674966 - RNA, 22 nt, Human
cucuuugucacucauacaguca

SEQ ID NO: 674967 - RNA, 22 nt, Human
gacauucagguguucaaugcca

SEQ ID NO: 674968 - RNA, 21 nt, Human
guauugcagaguuaugugcuc

SEQ ID NO: 674969 - RNA, 22 nt, Human
cucugggcaccaaagagcagcu

SEQ ID NO: 674970 - RNA, 22 nt, Human
auaacagauacucucugugagg

SEQ ID NO: 674971 - RNA, 22 nt, Human
uuauuuuguagcucugaucuuu

SEQ ID NO: 674972 - RNA, 20 nt, Human
agggaggugcugggccugag

SEQ ID NO: 674973 - RNA, 22 nt, Human
agcugccuccuggugccccauc

SEQ ID NO: 674974 - RNA, 22 nt, Human
cuaguucugccauucaguguca

SEQ ID NO: 674975 - RNA, 22 nt, Human
uaacuguacaacugguuaguca

SEQ ID NO: 674976 - RNA, 20 nt, Human
ugcuuuuauaccuauaauga

SEQ ID NO: 674977 - RNA, 22 nt, Human
caaauuaaugugucucaaaaua

SEQ ID NO: 674978 - RNA, 21 nt, Human
uacauagaggugauaucuguu

SEQ ID NO: 674979 - RNA, 22 nt, Human
cggcuggguucggcugcaggcc

SEQ ID NO: 674980 - RNA, 22 nt, Human
agggccugcucuaucacucuca

SEQ ID NO: 674981 - RNA, 22 nt, Human
gcugcccaggguggagccggcu

SEQ ID NO: 674982 - RNA, 22 nt, Human
auucuguauuucuaauaagauc

SEQ ID NO: 674983 - RNA, 22 nt, Human
ccugggagugugccaucucugu

SEQ ID NO: 674984 - RNA, 22 nt, Human
cuacugccauugucucugccau

SEQ ID NO: 674985 - RNA, 22 nt, Human
caucugaagugaauugcuuuuu

SEQ ID NO: 674986 - RNA, 22 nt, Human
aagaguuugaccugugccaucc

SEQ ID NO: 674987 - RNA, 22 nt, Human
agcuccuggaggugcgcacucg

SEQ ID NO: 674988 - RNA, 22 nt, Human
ccacugagguuuugugguuaug

SEQ ID NO: 674989 - RNA, 22 nt, Human
uagcucucuuuaucuuucuaua

SEQ ID NO: 674990 - RNA, 21 nt, Human
ggauaaauggucugguuucuc

SEQ ID NO: 674991 - RNA, 21 nt, Human
agguccaguucugucuuggac

SEQ ID NO: 674992 - RNA, 22 nt, Human
gaaaaaggauaaauacaguguu

SEQ ID NO: 674993 - RNA, 22 nt, Human
aagaagcauucuuucauugguu

SEQ ID NO: 674994 - RNA, 22 nt, Human
cacaugugcaguuacaugaauu

SEQ ID NO: 674995 - RNA, 22 nt, Human
uucaguguucuuuucuguuagc

SEQ ID NO: 674996 - RNA, 22 nt, Human
agcagcuugaggcuggauucca

SEQ ID NO: 674997 - RNA, 22 nt, Human
gggcucugguacuuccuggcuc

SEQ ID NO: 674998 - RNA, 22 nt, Human
cagcugcaugucuguggugguc

SEQ ID NO: 674999 - RNA, 22 nt, Human
cucugcugagccagagucccca

SEQ ID NO: 675000 - RNA, 22 nt, Human
gccagcuguuucagagcccagu

SEQ ID NO: 675001 - RNA, 22 nt, Human
gggcaguggcucacgccuguaa

SEQ ID NO: 675002 - RNA, 22 nt, Human
cuguuauucaagacaaaggcag

SEQ ID NO: 675003 - RNA, 22 nt, Human
ggcucugccgugugcucacaug

SEQ ID NO: 675004 - RNA, 22 nt, Human
aaguugcuagugcuuuucugag

SEQ ID NO: 675005 - RNA, 22 nt, Human
aacuugcagacaccugucucaa

SEQ ID NO: 675006 - RNA, 22 nt, Human
accugcagccacuucucuccuu

SEQ ID NO: 675007 - RNA, 22 nt, Human
gcagugaagcaguccuuguuga

SEQ ID NO: 675008 - RNA, 22 nt, Human
aaacacuguacaaucugcaggg

SEQ ID NO: 675009 - RNA, 22 nt, Human
gaucaaaagcuggguucuaaaa

SEQ ID NO: 675010 - RNA, 22 nt, Human
cuuagacauggcagcuccaagu

SEQ ID NO: 675011 - RNA, 22 nt, Human
ugaagcaggaaccagcagcauu

SEQ ID NO: 675012 - RNA, 22 nt, Human
ugcagggcaguggagguugagu

SEQ ID NO: 675013 - RNA, 22 nt, Human
uuuuaucugcuucauuaguuga

SEQ ID NO: 675014 - RNA, 22 nt, Human
gucucuucuuugccgguccugc

SEQ ID NO: 675015 - RNA, 22 nt, Human
agguggcaguuguggaaccauc

SEQ ID NO: 675016 - RNA, 22 nt, Human
cuuggagauacagaggacauuu

SEQ ID NO: 675017 - RNA, 22 nt, Human
uugccuuauagugcucugcauu

SEQ ID NO: 675018 - RNA, 20 nt, Human
ugccaggcugcacgccugcc

SEQ ID NO: 675019 - RNA, 23 nt, Human
gcagauggccccagagugcugcc

SEQ ID NO: 675020 - RNA, 22 nt, Human
cucaguuucugacauuaaaauc

SEQ ID NO: 675021 - RNA, 17 nt, Human
caguggccuauggcuuu

SEQ ID NO: 675022 - RNA, 22 nt, Human
cucccaguguuguuuucugaug

SEQ ID NO: 675023 - RNA, 22 nt, Human
ugucaauaacuggagucauuau

SEQ ID NO: 675024 - RNA, 22 nt, Human
uuguuuuaucuuucuacagacu

SEQ ID NO: 675025 - RNA, 22 nt, Human
aagggagcaaauggacagacgg

SEQ ID NO: 675026 - RNA, 22 nt, Human
agaggcuuggccucaguucugu

SEQ ID NO: 675027 - RNA, 22 nt, Human
gaagacacaauuggugggucca

SEQ ID NO: 675028 - RNA, 22 nt, Human
uggcucagcuuacuuuugaggg

SEQ ID NO: 675029 - RNA, 21 nt, Human
aaguugucucuuuugguuccu

SEQ ID NO: 675030 - RNA, 22 nt, Human
aaacaugagcaucucuucaagc

SEQ ID NO: 675031 - RNA, 22 nt, Human
gcaugugucccucagucugugc

SEQ ID NO: 675032 - RNA, 22 nt, Human
aacagcuaguaccaauccacua

SEQ ID NO: 675033 - RNA, 22 nt, Human
aggcaccaggaucaguuagaga

SEQ ID NO: 675034 - RNA, 22 nt, Human
accccagaaucuaugcuuuaca

SEQ ID NO: 675035 - RNA, 22 nt, Human
ggagagaggagcccacugcugu

SEQ ID NO: 675036 - RNA, 22 nt, Human
agacagcagaaacuagagcacu

SEQ ID NO: 675037 - RNA, 22 nt, Human
agacccugcaccucucgugggc

SEQ ID NO: 675038 - RNA, 22 nt, Human
acagcucugcauuuuggguuaa

SEQ ID NO: 675039 - RNA, 22 nt, Human
acaguaauuaaacauucugauu

SEQ ID NO: 675040 - RNA, 22 nt, Human
uagcaaugcucuaugaugaaaa

SEQ ID NO: 675041 - RNA, 22 nt, Human
uccaggcuggccucgcgugaca

SEQ ID NO: 675042 - RNA, 22 nt, Human
uaaauguguuagucaugguuuu

SEQ ID NO: 675043 - RNA, 22 nt, Human
cugggcaguuuauucaguucug

SEQ ID NO: 675044 - RNA, 21 nt, Human
guguggauaugugacaggugg

SEQ ID NO: 675045 - RNA, 22 nt, Human
guagaugagcucacaugaccuu

SEQ ID NO: 675046 - RNA, 22 nt, Human
uuuaucuguagagcuucaccua

SEQ ID NO: 675047 - RNA, 22 nt, Human
gcuccagaugaaaggccagagg

SEQ ID NO: 675048 - RNA, 22 nt, Human
aaguggacuaauacaaggacua

SEQ ID NO: 675049 - RNA, 22 nt, Human
auucucaaaacauaacuucacu

SEQ ID NO: 675050 - RNA, 22 nt, Human
gcacuggaggguguaguugcug

SEQ ID NO: 675051 - RNA, 22 nt, Human
augcagggaccuuugcuuuggu

SEQ ID NO: 675052 - RNA, 22 nt, Human
uaauugcuauuggaaugcuuug

SEQ ID NO: 675053 - RNA, 16 nt, Human
cuuccucuucacuggc

SEQ ID NO: 675054 - RNA, 22 nt, Human
ugcuccuguuucaucagcuaua

SEQ ID NO: 675055 - RNA, 22 nt, Human
ucacaaauguuugcaugugucu

SEQ ID NO: 675056 - RNA, 22 nt, Human
cagcuauuuaucuuucaugaua

SEQ ID NO: 675057 - RNA, 22 nt, Human
uuggaaagcaagcuggacauac

SEQ ID NO: 675058 - RNA, 19 nt, Human
cugugcuuuaaacuccuau

SEQ ID NO: 675059 - RNA, 22 nt, Human
gaccucagcuguggggaugcug

SEQ ID NO: 675060 - RNA, 22 nt, Human
uuucuucacaggguauugggug

SEQ ID NO: 675061 - RNA, 22 nt, Human
ggcuggaagagacugaggacac

SEQ ID NO: 675062 - RNA, 22 nt, Human
guauuucugguaacugcugcua

SEQ ID NO: 675063 - RNA, 22 nt, Human
ccagagccuaagaucugauccu

SEQ ID NO: 675064 - RNA, 22 nt, Human
uacagguagcaaaaccuuuccu

SEQ ID NO: 675065 - RNA, 22 nt, Human
ggaaggaggggcaaagcaguuc

SEQ ID NO: 675066 - RNA, 22 nt, Human
ugcugccucaacugucaggaac

SEQ ID NO: 675067 - RNA, 22 nt, Human
auaacuuucuucacccuugcug

SEQ ID NO: 675068 - RNA, 22 nt, Human
cuuauuucagcccugggcaccc

SEQ ID NO: 675069 - RNA, 22 nt, Human
cugagagaaucaugcugcaggu

SEQ ID NO: 675070 - RNA, 22 nt, Human
uggugacacgaaguuugcuauc

SEQ ID NO: 675071 - RNA, 22 nt, Human
ugcuucucaaaaggagguaggu

SEQ ID NO: 675072 - RNA, 22 nt, Human
gagaaaugcaugcaugucauca

SEQ ID NO: 675073 - RNA, 20 nt, Human
gugggcagagcaccaccugg

SEQ ID NO: 675074 - RNA, 20 nt, Human
ugaguggccacugggucgca

SEQ ID NO: 675075 - RNA, 22 nt, Human
ggccuccuguuggcuaguguga

SEQ ID NO: 675076 - RNA, 20 nt, Human
acugggcauaccuguccugu

SEQ ID NO: 675077 - RNA, 22 nt, Human
uuaaggaaccacagcauguuag

SEQ ID NO: 675078 - RNA, 22 nt, Human
uucuuuuaauuucugucugcag

SEQ ID NO: 675079 - RNA, 17 nt, Human
agcaggcacgucagcac

SEQ ID NO: 675080 - RNA, 22 nt, Human
ggagggugcagacccuuugcaa

SEQ ID NO: 675081 - RNA, 22 nt, Human
agacuucucaguuuuauuagua

SEQ ID NO: 675082 - RNA, 22 nt, Human
acugcacagaaccuuagaauau

SEQ ID NO: 675083 - RNA, 19 nt, Human
agggccacggggagguauu

SEQ ID NO: 675084 - RNA, 22 nt, Human
gacaggugcuaagggaccuggc

SEQ ID NO: 675085 - RNA, 22 nt, Human
cacacuaauuuuucaagaguuu

SEQ ID NO: 675086 - RNA, 23 nt, Human
aauuggacuugcugucaaacuuc

SEQ ID NO: 675087 - RNA, 22 nt, Human
cugcccucuagggaugcacugg

SEQ ID NO: 675088 - RNA, 22 nt, Human
cugugcauugucuugucuguag

SEQ ID NO: 675089 - RNA, 19 nt, Human
auguucuauccuccaaguu

SEQ ID NO: 675090 - RNA, 22 nt, Human
uucaaauccuagcccuguggcc

SEQ ID NO: 675091 - RNA, 22 nt, Human
guauuucccugaguucugugag

SEQ ID NO: 675092 - RNA, 22 nt, Human
aaaauuuucagcuugacuugau

SEQ ID NO: 675093 - RNA, 22 nt, Human
ugggcuguggagcaccuuugca

SEQ ID NO: 675094 - RNA, 22 nt, Human
aucuuuagcauuacuuuauuca

SEQ ID NO: 675095 - RNA, 22 nt, Human
aagucagacagcugagcugccu

SEQ ID NO: 675096 - RNA, 22 nt, Human
uuguucuuuauccuggaagccu

SEQ ID NO: 675097 - RNA, 22 nt, Human
agcuugccucuuaaucaccuca

SEQ ID NO: 675098 - RNA, 22 nt, Human
ugagaggagugauuguaaaauu

SEQ ID NO: 675099 - RNA, 22 nt, Human
ggcaggcuuugagaaagagcau

SEQ ID NO: 675100 - RNA, 22 nt, Human
aauagcaaacacugguaaaguu

SEQ ID NO: 675101 - RNA, 22 nt, Human
agagucugauauuuguaccaga

SEQ ID NO: 675102 - RNA, 22 nt, Human
agccagagggaucuuucuaaga

SEQ ID NO: 675103 - RNA, 22 nt, Human
gaugcacaaagcagagggaauc

SEQ ID NO: 675104 - RNA, 22 nt, Human
agagagcuguccugggacaccc

SEQ ID NO: 675105 - RNA, 22 nt, Human
ugugugcuaauguaugcucuaa

SEQ ID NO: 675106 - RNA, 22 nt, Human
ggugcagaggagccagcugggg

SEQ ID NO: 675107 - RNA, 22 nt, Human
ucugcacauguaguaaauauua

SEQ ID NO: 675108 - RNA, 22 nt, Human
uacagaaagggaugauugaucu

SEQ ID NO: 675109 - RNA, 22 nt, Human
ggaaccaguggaaugauaugcu

SEQ ID NO: 675110 - RNA, 22 nt, Human
ugugcacauucuaggacuagua

SEQ ID NO: 675111 - RNA, 22 nt, Human
cuggugaccuugccccagguca

SEQ ID NO: 675112 - RNA, 22 nt, Human
ucaagaaagggcuucaccagga

SEQ ID NO: 675113 - RNA, 22 nt, Human
aggucaaaaucaggcagggaag

SEQ ID NO: 675114 - RNA, 22 nt, Human
augcacgccccacacuggugug

SEQ ID NO: 675115 - RNA, 22 nt, Human
ugccuggcauguuauagacaca

SEQ ID NO: 675116 - RNA, 22 nt, Human
uuugcauuuuagauuuaggccu

SEQ ID NO: 675117 - RNA, 22 nt, Human
uaagugaauccuugagaagaaa

SEQ ID NO: 675118 - RNA, 22 nt, Human
auguuuaagaaagucuuccaua

SEQ ID NO: 675119 - RNA, 21 nt, Human
uuccucugcaacugaugcuca

SEQ ID NO: 675120 - RNA, 22 nt, Human
ggaagcugaacuuagcaaggaa

SEQ ID NO: 675121 - RNA, 20 nt, Human
ugaggcccagcagagucggg

SEQ ID NO: 675122 - RNA, 22 nt, Human
uucugcaugguuggggagaagc

SEQ ID NO: 675123 - RNA, 19 nt, Human
ugcccugcacgcuguccug

SEQ ID NO: 675124 - RNA, 22 nt, Human
ugcuuuaaaccauggaugugag

SEQ ID NO: 675125 - RNA, 22 nt, Human
ugguaauuaauuugauagguuc

SEQ ID NO: 675126 - RNA, 22 nt, Human
uuuacagauguggaaagugagc

SEQ ID NO: 675127 - RNA, 22 nt, Human
cuucuaggcuucucagggggca

SEQ ID NO: 675128 - RNA, 22 nt, Human
augcagagacagauguggcaug

SEQ ID NO: 675129 - RNA, 22 nt, Human
cacagugacagcuauacagaga

SEQ ID NO: 675130 - RNA, 22 nt, Human
guuaagaacuuguugaaggucu

SEQ ID NO: 675131 - RNA, 22 nt, Human
ugugcacauaaaacaguacuag

SEQ ID NO: 675132 - RNA, 22 nt, Human
agggccagaaucccucagucua

SEQ ID NO: 675133 - RNA, 22 nt, Human
ccagcccaaagucaccccggga

SEQ ID NO: 675134 - RNA, 22 nt, Human
agaggucagaacaggaaagugu

SEQ ID NO: 675135 - RNA, 22 nt, Human
gcagacagacugcagugauuuu

SEQ ID NO: 675136 - RNA, 22 nt, Human
ucuuuacauaguguggacuacu

SEQ ID NO: 675137 - RNA, 22 nt, Human
acuuggcaaguaucuauaaagu

SEQ ID NO: 675138 - RNA, 22 nt, Human
ggucuccaaagcuuaggacuac

SEQ ID NO: 675139 - RNA, 22 nt, Human
gaucccauguaggagaauguua

SEQ ID NO: 675140 - RNA, 22 nt, Human
cugcucuggggaagccagaugu

SEQ ID NO: 675141 - RNA, 22 nt, Human
aagacauuuugaaauuggaagc

SEQ ID NO: 675142 - RNA, 22 nt, Human
aaagucuccacugggaaccaaa

SEQ ID NO: 675143 - RNA, 22 nt, Human
ucugcugcugagcacacuccua

SEQ ID NO: 675144 - RNA, 22 nt, Human
cuguguggacugguugaggccc

SEQ ID NO: 675145 - RNA, 22 nt, Human
ucucuggaguauaaccagggau

SEQ ID NO: 675146 - RNA, 22 nt, Human
acagagcccuuccuugcaccau

SEQ ID NO: 675147 - RNA, 22 nt, Human
gucuugucaguguuggcagcuu

SEQ ID NO: 675148 - RNA, 22 nt, Human
gaaaccuuugccgauggggucc

SEQ ID NO: 675149 - RNA, 22 nt, Human
augacauaagugaaaaacauca

SEQ ID NO: 675150 - RNA, 22 nt, Human
gaugguuugguaaaaguauguu

SEQ ID NO: 675151 - RNA, 22 nt, Human
aaggcaggaugggaaaagauuu

SEQ ID NO: 675152 - RNA, 22 nt, Human
caguaacaugaagagacaugga

SEQ ID NO: 675153 - RNA, 23 nt, Human
uugcaaauuucaguuaguucaug

SEQ ID NO: 675154 - RNA, 22 nt, Human
ccacagcaccgcugccaguccc

SEQ ID NO: 675155 - RNA, 20 nt, Human
auauguguacguguauacau

SEQ ID NO: 675156 - RNA, 22 nt, Human
uuuguacauauauaaaaucugu

SEQ ID NO: 675157 - RNA, 22 nt, Human
uggcuucaccucagcaugaagg

SEQ ID NO: 675158 - RNA, 22 nt, Human
ccagggcagcgccccuccacgc

SEQ ID NO: 675159 - RNA, 22 nt, Human
gaaaaggaaauuuauagagauc

SEQ ID NO: 675160 - RNA, 18 nt, Human
ggcaccucucuugccuua

SEQ ID NO: 675161 - RNA, 22 nt, Human
gaggccaggguaccaucaacau

SEQ ID NO: 675162 - RNA, 22 nt, Human
agagaacacgugcaucugcaau

SEQ ID NO: 675163 - RNA, 22 nt, Human
gcucugagucucagcuaccaca

SEQ ID NO: 675164 - RNA, 22 nt, Human
auggcaguacguugaaaauuuu

SEQ ID NO: 675165 - RNA, 22 nt, Human
ggugcugacuucacagucuuac

SEQ ID NO: 675166 - RNA, 22 nt, Human
cccaccccuggacaggugagug

SEQ ID NO: 675167 - RNA, 22 nt, Human
auugcucagcacaagcagcaga

SEQ ID NO: 675168 - RNA, 22 nt, Human
auaauuuacuaagcucuaccuu

SEQ ID NO: 675169 - RNA, 22 nt, Human
uacauugaggcaguagcuggag

SEQ ID NO: 675170 - RNA, 22 nt, Human
guagugcgcauggccuguuugu

SEQ ID NO: 675171 - RNA, 22 nt, Human
acugccaaugguaguuugaugg

SEQ ID NO: 675172 - RNA, 20 nt, Human
acugugugaucuggaaagcu

SEQ ID NO: 675173 - RNA, 19 nt, Human
cuucacaucugugagggga

SEQ ID NO: 675174 - RNA, 20 nt, Human
cccagggaccugagcuccau

SEQ ID NO: 675175 - RNA, 22 nt, Human
ucagaacagcacagggugauuu

SEQ ID NO: 675176 - RNA, 22 nt, Human
cauuuguaucugggcugcugug

SEQ ID NO: 675177 - RNA, 22 nt, Human
cucccagagagcaggugggccg

SEQ ID NO: 675178 - RNA, 22 nt, Human
gagucauuugggggcuucuuga

SEQ ID NO: 675179 - RNA, 22 nt, Human
aggagggaauaagaaagaguca

SEQ ID NO: 675180 - RNA, 22 nt, Human
ugucaugccauuuaaaauguuu

SEQ ID NO: 675181 - RNA, 22 nt, Human
cccaggagaauauaauguucuu

SEQ ID NO: 675182 - RNA, 22 nt, Human
ugguaggagauauggucuccga

SEQ ID NO: 675183 - RNA, 22 nt, Human
ugcugcuccugccuggcuccca

SEQ ID NO: 675184 - RNA, 22 nt, Human
gggcagcagagcccugccgagu

SEQ ID NO: 675185 - RNA, 22 nt, Human
agcauuuaguuaguaaauguuu

SEQ ID NO: 675186 - RNA, 22 nt, Human
acagcuguggggacucuugccc

SEQ ID NO: 675187 - RNA, 22 nt, Human
gagguaacaacugaaaugagaa

SEQ ID NO: 675188 - RNA, 22 nt, Human
acuuugaaacuaaaauucauua

SEQ ID NO: 675189 - RNA, 22 nt, Human
auugaacuuaacaguaaguggc

SEQ ID NO: 675190 - RNA, 22 nt, Human
gugacaggccacugcggcucug

SEQ ID NO: 675191 - RNA, 22 nt, Human
gugcucuccuggcugcccugac

SEQ ID NO: 675192 - RNA, 22 nt, Human
aauagcauguucaugauaaaau

SEQ ID NO: 675193 - RNA, 22 nt, Human
ucucaaauuuauacagaguuca

SEQ ID NO: 675194 - RNA, 22 nt, Human
aagauguucuauuuucacuuuu

SEQ ID NO: 675195 - RNA, 22 nt, Human
aagugacauaccuuacauaugu

SEQ ID NO: 675196 - RNA, 22 nt, Human
uguucuuagguauuugacaguc

SEQ ID NO: 675197 - RNA, 21 nt, Human
agagcuggccugccaggcccu

SEQ ID NO: 675198 - RNA, 18 nt, Human
gagaagcugauugaaugc

SEQ ID NO: 675199 - RNA, 22 nt, Human
cuggaagguggauggcgaggcc

SEQ ID NO: 675200 - RNA, 17 nt, Human
acacagggagagggagc

SEQ ID NO: 675201 - RNA, 22 nt, Human
acacacuuuugcuaaaaauugu

SEQ ID NO: 675202 - RNA, 22 nt, Human
guaaaguaaacccacuuuguag

SEQ ID NO: 675203 - RNA, 22 nt, Human
cuccaugaauuugagcuuugug

SEQ ID NO: 675204 - RNA, 22 nt, Human
guugaguggguuaggaugcuga

SEQ ID NO: 675205 - RNA, 22 nt, Human
gguggcugggauuaguagccca

SEQ ID NO: 675206 - RNA, 22 nt, Human
caaggaggcagugggacuugaa

SEQ ID NO: 675207 - RNA, 22 nt, Human
caugcaugccgggcugacagag

SEQ ID NO: 675208 - RNA, 22 nt, Human
cacaccuguaauaccagcuacu

SEQ ID NO: 675209 - RNA, 22 nt, Human
uguccucacaggaaugaacuuu

SEQ ID NO: 675210 - RNA, 22 nt, Human
ucaaaugcggucauggcuuuua

SEQ ID NO: 675211 - RNA, 22 nt, Human
caggggcugagaaggaacgucc

SEQ ID NO: 675212 - RNA, 22 nt, Human
uacaugcuggugacuguagaca

SEQ ID NO: 675213 - RNA, 22 nt, Human
uuugcugugaauccauuacugu

SEQ ID NO: 675214 - RNA, 22 nt, Human
auaguacacauccuacaauguu

SEQ ID NO: 675215 - RNA, 22 nt, Human
ccuggccaggcauggagucaca

SEQ ID NO: 675216 - RNA, 22 nt, Human
acaagucaguggaauuaauauu

SEQ ID NO: 675217 - RNA, 22 nt, Human
gggcuccacagcagugagugga

SEQ ID NO: 675218 - RNA, 22 nt, Human
gagggggagaugugcacacacu

SEQ ID NO: 675219 - RNA, 22 nt, Human
ugggaaaguaauugucauccuu

SEQ ID NO: 675220 - RNA, 22 nt, Human
uguguaugcauacacacauaga

SEQ ID NO: 675221 - RNA, 22 nt, Human
aauuuccagaccccauccacag

SEQ ID NO: 675222 - RNA, 22 nt, Human
ucccagaggaaauggcagcuga

SEQ ID NO: 675223 - RNA, 21 nt, Human
auuguuaucauugugcugugu

SEQ ID NO: 675224 - RNA, 22 nt, Human
uuauuauguggaugaaagaugu

SEQ ID NO: 675225 - RNA, 22 nt, Human
uccagagagauaguggcuaaua

SEQ ID NO: 675226 - RNA, 22 nt, Human
uuucacaaacugaggagacaau

SEQ ID NO: 675227 - RNA, 22 nt, Human
caucacaucuacuauaagugau

SEQ ID NO: 675228 - RNA, 22 nt, Human
ggcauuugacucagugacuggg

SEQ ID NO: 675229 - RNA, 22 nt, Human
cucugggguuagaucugaugcu

SEQ ID NO: 675230 - RNA, 22 nt, Human
cugggaagggagucaagauacu

SEQ ID NO: 675231 - RNA, 22 nt, Human
aagggcagcuauuaucgucauc

SEQ ID NO: 675232 - RNA, 22 nt, Human
uugaagagucuagauugguuau

SEQ ID NO: 675233 - RNA, 22 nt, Human
uuaaagaggcaugggaauguau

SEQ ID NO: 675234 - RNA, 19 nt, Human
uccagacuguccaggcuau

SEQ ID NO: 675235 - RNA, 22 nt, Human
uugcaaaugugaguuuagacug

SEQ ID NO: 675236 - RNA, 22 nt, Human
guuucuuuuaaaauauguagac

SEQ ID NO: 675237 - RNA, 23 nt, Human
agacaaacuuccuucacugcacc

SEQ ID NO: 675238 - RNA, 22 nt, Human
uuggcucaggaccccugugacu

SEQ ID NO: 675239 - RNA, 22 nt, Human
uagcccaggcuggagggcagug

SEQ ID NO: 675240 - RNA, 20 nt, Human
agugaauagagacauugccc

SEQ ID NO: 675241 - RNA, 22 nt, Human
aauucaaagacuagaauuuugc

SEQ ID NO: 675242 - RNA, 22 nt, Human
cauguguggucuguggcuaucu

SEQ ID NO: 675243 - RNA, 22 nt, Human
aacacugaaaugucuuaagauu

SEQ ID NO: 675244 - RNA, 23 nt, Human
agcuuuuagguggaaauggcacu

SEQ ID NO: 675245 - RNA, 22 nt, Human
uuauaaagugagaagugcuaug

SEQ ID NO: 675246 - RNA, 22 nt, Human
agucuucuggguguuuccagag

SEQ ID NO: 675247 - RNA, 22 nt, Human
gcccagugcugagggugcugcu

SEQ ID NO: 675248 - RNA, 20 nt, Human
ugccaugguaacagagugug

SEQ ID NO: 675249 - RNA, 22 nt, Human
cugcccagaagcuuagagcuua

SEQ ID NO: 675250 - RNA, 22 nt, Human
cucaggggaccuggcuccgagu

SEQ ID NO: 675251 - RNA, 22 nt, Human
guggcaguuuugacaucacaaa

SEQ ID NO: 675252 - RNA, 22 nt, Human
ggaauagggagagaaucguuug

SEQ ID NO: 675253 - RNA, 22 nt, Human
cccagagcugauuguuggagcc

SEQ ID NO: 675254 - RNA, 22 nt, Human
ucugccugcuucuucauagucu

SEQ ID NO: 675255 - RNA, 22 nt, Human
ugcagcaccacaccuggcuaau

SEQ ID NO: 675256 - RNA, 22 nt, Human
ccagggcagaaaaagagggaau

SEQ ID NO: 675257 - RNA, 22 nt, Human
agguggccaauaaauguuggag

SEQ ID NO: 675258 - RNA, 22 nt, Human
uguguauguguauacacuauau

SEQ ID NO: 675259 - RNA, 22 nt, Human
ucaguuuuuaagaguuaugcga

SEQ ID NO: 675260 - RNA, 22 nt, Human
gguuuguugggguccaggccca

SEQ ID NO: 675261 - RNA, 21 nt, Human
ugugaaauagcuaugcuacau

SEQ ID NO: 675262 - RNA, 22 nt, Human
aauggcuuaaugauaccuuauc

SEQ ID NO: 675263 - RNA, 17 nt, Human
uucugcaugugaagaug

SEQ ID NO: 675264 - RNA, 22 nt, Human
gggcugaugugacagaacucuc

SEQ ID NO: 675265 - RNA, 22 nt, Human
ccucucuccaauuuucaccuca

SEQ ID NO: 675266 - RNA, 22 nt, Human
uugugguuaaccgcacauuuuu

SEQ ID NO: 675267 - RNA, 22 nt, Human
uccuggggccaggcaccucugg

SEQ ID NO: 675268 - RNA, 19 nt, Human
gaggucagcaagaaguauu

SEQ ID NO: 675269 - RNA, 22 nt, Human
acagaacauauugcuucucuca

SEQ ID NO: 675270 - RNA, 22 nt, Human
gauauucauaggcagguauuua

SEQ ID NO: 675271 - RNA, 22 nt, Human
cuacacaguucugccuaauggc

SEQ ID NO: 675272 - RNA, 22 nt, Human
uuucuagugguuaagauuuaca

SEQ ID NO: 675273 - RNA, 22 nt, Human
guuaugaaauaaauauagauca

SEQ ID NO: 675274 - RNA, 22 nt, Human
uuucagaaacgauuaugaacac

SEQ ID NO: 675275 - RNA, 22 nt, Human
caguaaauaguggagauguggg

SEQ ID NO: 675276 - RNA, 22 nt, Human
augucccagacacuuuaucuua

SEQ ID NO: 675277 - RNA, 22 nt, Human
aaaauccuuagccgagugaggu

SEQ ID NO: 675278 - RNA, 22 nt, Human
uggucucugcugcagcuucuca

SEQ ID NO: 675279 - RNA, 22 nt, Human
ucugagcugggggccuggcaug

SEQ ID NO: 675280 - RNA, 22 nt, Human
ucuuccuuuuguaccuucugaa

SEQ ID NO: 675281 - RNA, 22 nt, Human
uggcagaugagccgcgcuccaa

SEQ ID NO: 675282 - RNA, 22 nt, Human
ucugccuugagguccucagcuc

SEQ ID NO: 675283 - RNA, 22 nt, Human
uuuccugcacccgcugaugcca

SEQ ID NO: 675284 - RNA, 22 nt, Human
cuccucuguauugauugggacu

SEQ ID NO: 675285 - RNA, 22 nt, Human
aggucauuggggacuaucuccg

SEQ ID NO: 675286 - RNA, 22 nt, Human
gagauguuauucuucagugugu

SEQ ID NO: 675287 - RNA, 22 nt, Human
auauuugagggcaauagggugg

SEQ ID NO: 675288 - RNA, 22 nt, Human
uaacacuuuggauuaaaauucu

SEQ ID NO: 675289 - RNA, 22 nt, Human
gcacugugcuuaguucacuauu

SEQ ID NO: 675290 - RNA, 22 nt, Human
ggggugggagugccauccuuga

SEQ ID NO: 675291 - RNA, 22 nt, Human
aauuuuacaagaaggccucgua

SEQ ID NO: 675292 - RNA, 22 nt, Human
ucaugcaaucucuuguucagga

SEQ ID NO: 675293 - RNA, 22 nt, Human
ucaauagagccuucuuucaggu

SEQ ID NO: 675294 - RNA, 22 nt, Human
ucucagagaagugaugagcaau

SEQ ID NO: 675295 - RNA, 22 nt, Human
guggucauuugucugagcucca

SEQ ID NO: 675296 - RNA, 22 nt, Human
uccugcccagagcucuccacuc

SEQ ID NO: 675297 - RNA, 22 nt, Human
auggcuccauccuguugcuagu

SEQ ID NO: 675298 - RNA, 22 nt, Human
ucugggcugggcuuaggaaccc

SEQ ID NO: 675299 - RNA, 22 nt, Human
auccuuggcacaguggaauuca

SEQ ID NO: 675300 - RNA, 22 nt, Human
gcauccuggcucuaggugucau

SEQ ID NO: 675301 - RNA, 22 nt, Human
uaacuugaccuguauaaaacac

SEQ ID NO: 675302 - RNA, 22 nt, Human
acauuuugcccuuauuugcuga

SEQ ID NO: 675303 - RNA, 22 nt, Human
cuuauuaauggaauccuaauga

SEQ ID NO: 675304 - RNA, 22 nt, Human
gaaagcugaaccaggaaccaug

SEQ ID NO: 675305 - RNA, 17 nt, Human
agcaacuucucccacag

SEQ ID NO: 675306 - RNA, 22 nt, Human
uacacaugugcacgcguguccu

SEQ ID NO: 675307 - RNA, 22 nt, Human
gcuauguuagacauucucauuu

SEQ ID NO: 675308 - RNA, 22 nt, Human
ggcuuccuaauacucccuacac

SEQ ID NO: 675309 - RNA, 22 nt, Human
uucauuccuucccuaagcaacu

SEQ ID NO: 675310 - RNA, 22 nt, Human
auccugagguacugcagggccg

SEQ ID NO: 675311 - RNA, 23 nt, Human
ugaguucucaucuuggcuucuau

SEQ ID NO: 675312 - RNA, 22 nt, Human
gggcagcagaauuggacagaaa

SEQ ID NO: 675313 - RNA, 22 nt, Human
ucugcacaauugaucauggcaa

SEQ ID NO: 675314 - RNA, 22 nt, Human
uugguuccuucugaaaguauug

SEQ ID NO: 675315 - RNA, 22 nt, Human
caaauaucuuuggcaaagagaa

SEQ ID NO: 675316 - RNA, 22 nt, Human
ucacagaaauaagauaguuauu

SEQ ID NO: 675317 - RNA, 22 nt, Human
aggcgcacaggguguugaugug

SEQ ID NO: 675318 - RNA, 23 nt, Human
agauugaaguauugaccagagcu

SEQ ID NO: 675319 - RNA, 22 nt, Human
uggacagguugaguaggaggag

SEQ ID NO: 675320 - RNA, 22 nt, Human
uacagacagacuucccacccuc

SEQ ID NO: 675321 - RNA, 19 nt, Human
auccuaaauccaguuucua

SEQ ID NO: 675322 - RNA, 22 nt, Human
gugugcaugugcuugcacagau

SEQ ID NO: 675323 - RNA, 22 nt, Human
aaggaagaagggaaguuacuua

SEQ ID NO: 675324 - RNA, 22 nt, Human
cggcuuccagcaggugcugcgc

SEQ ID NO: 675325 - RNA, 22 nt, Human
ccuggcucccuggaccucauua

SEQ ID NO: 675326 - RNA, 22 nt, Human
acuucuguauguccugcauuca

SEQ ID NO: 675327 - RNA, 22 nt, Human
uucucuggaaggcucuacggga

SEQ ID NO: 675328 - RNA, 22 nt, Human
ccagagucccuguucucggccu

SEQ ID NO: 675329 - RNA, 22 nt, Human
aggugggcacuccgcucgaggu

SEQ ID NO: 675330 - RNA, 22 nt, Human
ggcacaggaaucugugaagugc

SEQ ID NO: 675331 - RNA, 17 nt, Human
ccugaaggcacuuccag

SEQ ID NO: 675332 - RNA, 22 nt, Human
gcccucugcuggccucaccucg

SEQ ID NO: 675333 - RNA, 22 nt, Human
cagcccuguugcgcuuccggcg

SEQ ID NO: 675334 - RNA, 22 nt, Human
aauggcaugacuugcccaaggc

SEQ ID NO: 675335 - RNA, 22 nt, Human
ccagggcagggaccacgugucu

SEQ ID NO: 675336 - RNA, 21 nt, Human
ggaacauuguuaauagucucu

SEQ ID NO: 675337 - RNA, 22 nt, Human
ugcagccuugccuccucccagc

SEQ ID NO: 675338 - RNA, 22 nt, Human
agcagcugcuccacuugcuuaa

SEQ ID NO: 675339 - RNA, 22 nt, Human
ggccuaggaaggggauguaacu

SEQ ID NO: 675340 - RNA, 22 nt, Human
agccauugaguuuuaugugcua

SEQ ID NO: 675341 - RNA, 22 nt, Human
ccaagaguaaauucaugaugcc

SEQ ID NO: 675342 - RNA, 15 nt, Human
ccaaugucagaugcu

SEQ ID NO: 675343 - RNA, 22 nt, Human
uuggauuacaugaaaugcagaa

SEQ ID NO: 675344 - RNA, 22 nt, Human
uccagaauacucugaaaucauu

SEQ ID NO: 675345 - RNA, 22 nt, Human
cagccagggagggcaaaugaga

SEQ ID NO: 675346 - RNA, 22 nt, Human
guuuuuauauccuguggagugu

SEQ ID NO: 675347 - RNA, 22 nt, Human
ugucuguaagguguuuauguua

SEQ ID NO: 675348 - RNA, 22 nt, Human
agcuccugggccaucacaacca

SEQ ID NO: 675349 - RNA, 22 nt, Human
agcaauaagggauccucuauaa

SEQ ID NO: 675350 - RNA, 22 nt, Human
uggaaugcagugggagcuuacc

SEQ ID NO: 675351 - RNA, 22 nt, Human
aaccaagaggguuuuccuugaa

SEQ ID NO: 675352 - RNA, 22 nt, Human
cuggagcaaaagugacuccucu

SEQ ID NO: 675353 - RNA, 22 nt, Human
uucuucucggcugucagauagu

SEQ ID NO: 675354 - RNA, 22 nt, Human
aguguaugucaaguauauacac

SEQ ID NO: 675355 - RNA, 22 nt, Human
gacagcaaagcagagccaaggc

SEQ ID NO: 675356 - RNA, 22 nt, Human
aggccaggauagcauggaucag

SEQ ID NO: 675357 - RNA, 22 nt, Human
agacugugagaagauggcugcg

SEQ ID NO: 675358 - RNA, 22 nt, Human
ggcuucuuccugugaacauguu

SEQ ID NO: 675359 - RNA, 19 nt, Human
uccaauuuguauguuuuca

SEQ ID NO: 675360 - RNA, 20 nt, Human
cagaacaugagcaucgagcc

SEQ ID NO: 675361 - RNA, 22 nt, Human
uuucuauuuuaaaggcauaugg

SEQ ID NO: 675362 - RNA, 22 nt, Human
caucuguugcuuccuaacaagu

SEQ ID NO: 675363 - RNA, 22 nt, Human
uacuucauuauucuaguuuuga

SEQ ID NO: 675364 - RNA, 22 nt, Human
cccuaaggcagcccagucugug

SEQ ID NO: 675365 - RNA, 22 nt, Human
aaaagucagucucuccuagcuc

SEQ ID NO: 675366 - RNA, 22 nt, Human
cugggagauugaggccauggug

SEQ ID NO: 675367 - RNA, 22 nt, Human
caugcuauuuuccaauaaugua

SEQ ID NO: 675368 - RNA, 22 nt, Human
cugcccugagggccuguguguu

SEQ ID NO: 675369 - RNA, 22 nt, Human
ucuguuuauauuucaaaccuuc

SEQ ID NO: 675370 - RNA, 22 nt, Human
gugcaggaggaugacaacugca

SEQ ID NO: 675371 - RNA, 22 nt, Human
uagacauuggccauuccugugg

SEQ ID NO: 675372 - RNA, 22 nt, Human
cauguccacaguucugagaggc

SEQ ID NO: 675373 - RNA, 22 nt, Human
acuuaguauuuuucagcuuuga

SEQ ID NO: 675374 - RNA, 22 nt, Human
aggaggccuggcuggggagauc

SEQ ID NO: 675375 - RNA, 22 nt, Human
aagagagagcauucuucuguua

SEQ ID NO: 675376 - RNA, 22 nt, Human
agguaaaauagauaguauuucu

SEQ ID NO: 675377 - RNA, 22 nt, Human
cugagcuguggaauaaacacug

SEQ ID NO: 675378 - RNA, 22 nt, Human
acaggaucgcccuguugcccag

SEQ ID NO: 675379 - RNA, 22 nt, Human
caucaguaaggcaacauagcuu

SEQ ID NO: 675380 - RNA, 22 nt, Human
aaaugaucauguaauuucagaa

SEQ ID NO: 675381 - RNA, 22 nt, Human
auuguacacuaguggcagcagu

SEQ ID NO: 675382 - RNA, 22 nt, Human
gaaaccacaguacccaggaaaa

SEQ ID NO: 675383 - RNA, 22 nt, Human
ccuucgagauuuaaacacugau

SEQ ID NO: 675384 - RNA, 22 nt, Human
aguaaaaaguucagaaugguug

SEQ ID NO: 675385 - RNA, 22 nt, Human
acuguguggaaauuugugaggg

SEQ ID NO: 675386 - RNA, 22 nt, Human
cuggccucaccucagacuuacu

SEQ ID NO: 675387 - RNA, 22 nt, Human
ucugccacugugaugcaugaua

SEQ ID NO: 675388 - RNA, 22 nt, Human
agcagcaggguguaauugggca

SEQ ID NO: 675389 - RNA, 22 nt, Human
aaaccucugaauacuguuggca

SEQ ID NO: 675390 - RNA, 22 nt, Human
ugacagugaacagguuaccacu

SEQ ID NO: 675391 - RNA, 22 nt, Human
agggaagaggaccagagucucu

SEQ ID NO: 675392 - RNA, 22 nt, Human
cagcagagacgguaagcagaac

SEQ ID NO: 675393 - RNA, 22 nt, Human
auguguguauauauagucauuu

SEQ ID NO: 675394 - RNA, 22 nt, Human
aaagauuuaagaauaauuugug

SEQ ID NO: 675395 - RNA, 22 nt, Human
gugcuuuagcugaguuggucaa

SEQ ID NO: 675396 - RNA, 22 nt, Human
guagacagaaagcggaaucaua

SEQ ID NO: 675397 - RNA, 22 nt, Human
auaaaccuaugcuaagcugugg

SEQ ID NO: 675398 - RNA, 22 nt, Human
uccagcccaggcuggaguguag

SEQ ID NO: 675399 - RNA, 22 nt, Human
cugcagcuguagaggacagugg

SEQ ID NO: 675400 - RNA, 18 nt, Human
uugccccugggugaggau

SEQ ID NO: 675401 - RNA, 22 nt, Human
aguggcuucauuucugccagaa

SEQ ID NO: 675402 - RNA, 22 nt, Human
ucuggaguccagauccauuugg

SEQ ID NO: 675403 - RNA, 22 nt, Human
ucugggaaggcucugcagauau

SEQ ID NO: 675404 - RNA, 22 nt, Human
ucucugggccucaguuuucuca

SEQ ID NO: 675405 - RNA, 22 nt, Human
caugugugaaucuugugaucau

SEQ ID NO: 675406 - RNA, 22 nt, Human
ccuuagcaaauuggcaucuucu

SEQ ID NO: 675407 - RNA, 22 nt, Human
gggcugugcugaguaggaggug

SEQ ID NO: 675408 - RNA, 16 nt, Human
ucccaggaggcggaac

SEQ ID NO: 675409 - RNA, 22 nt, Human
cacugaaaucgaaaaauguagg

SEQ ID NO: 675410 - RNA, 19 nt, Human
cuuuuucaccuucuagaag

SEQ ID NO: 675411 - RNA, 22 nt, Human
uucuuaggacuaguauagcaug

SEQ ID NO: 675412 - RNA, 22 nt, Human
aggccuggcuuugguuugcuga

SEQ ID NO: 675413 - RNA, 22 nt, Human
gagcuagagggagaagggcacu

SEQ ID NO: 675414 - RNA, 22 nt, Human
uggcuuaguucuagaaauuugg

SEQ ID NO: 675415 - RNA, 22 nt, Human
acagagauguggaugagggauu

SEQ ID NO: 675416 - RNA, 23 nt, Human
guggagccacaucacaggcuccu

SEQ ID NO: 675417 - RNA, 22 nt, Human
ccauccauauggugacaaggug

SEQ ID NO: 675418 - RNA, 22 nt, Human
uaaucuguugacuaacuuggga

SEQ ID NO: 675419 - RNA, 22 nt, Human
ccaacagguugagagucugaau

SEQ ID NO: 675420 - RNA, 20 nt, Human
ccagcauguacacaugugga

SEQ ID NO: 675421 - RNA, 22 nt, Human
aauaacuuuuaaaagacccugg

SEQ ID NO: 675422 - RNA, 22 nt, Human
uaugccagggacuguuucacca

SEQ ID NO: 675423 - RNA, 22 nt, Human
uauaaaucuuuguuccuagaau

SEQ ID NO: 675424 - RNA, 21 nt, Human
agggaaaaggcugagugaggg

SEQ ID NO: 675425 - RNA, 22 nt, Human
ccagcagagcauggggaggaag

SEQ ID NO: 675426 - RNA, 22 nt, Human
cucugcugaucucagcugggcu

SEQ ID NO: 675427 - RNA, 22 nt, Human
ucuuagcauuucauaacaacug

SEQ ID NO: 675428 - RNA, 22 nt, Human
ucucagaauuguguccacuggg

SEQ ID NO: 675429 - RNA, 23 nt, Human
uauuagcaauucccacagagcag

SEQ ID NO: 675430 - RNA, 22 nt, Human
uucucagcuuuccuugcaguua

SEQ ID NO: 675431 - RNA, 22 nt, Human
auggcaguugcccagccaaucc

SEQ ID NO: 675432 - RNA, 22 nt, Human
uuggccaagggcucuuuaggcu

SEQ ID NO: 675433 - RNA, 22 nt, Human
uaggcacuggggaggcagcaug

SEQ ID NO: 675434 - RNA, 22 nt, Human
cagugguuucugaacagugugc

SEQ ID NO: 675435 - RNA, 22 nt, Human
auucacaguuuccucauauucu

SEQ ID NO: 675436 - RNA, 20 nt, Human
agacaaaaugacuucaugca

SEQ ID NO: 675437 - RNA, 16 nt, Human
aauugcuucuugcugc

SEQ ID NO: 675438 - RNA, 22 nt, Human
acuuuggacgccaugcuguuug

SEQ ID NO: 675439 - RNA, 22 nt, Human
acaguucaagucuuagacaaca

SEQ ID NO: 675440 - RNA, 22 nt, Human
agcaaacauucagcagauuggc

SEQ ID NO: 675441 - RNA, 21 nt, Human
guggccugauuaugaaugggu

SEQ ID NO: 675442 - RNA, 22 nt, Human
aacagcuaccuucucacugugc

SEQ ID NO: 675443 - RNA, 22 nt, Human
augucagucuuucugucucaga

SEQ ID NO: 675444 - RNA, 22 nt, Human
uggagcucaaaggccuguggga

SEQ ID NO: 675445 - RNA, 22 nt, Human
ugcuuccagcucucuguaaggu

SEQ ID NO: 675446 - RNA, 21 nt, Human
ccugagguuucuggccucugu

SEQ ID NO: 675447 - RNA, 22 nt, Human
acugucuucauaucugugucuc

SEQ ID NO: 675448 - RNA, 22 nt, Human
uuaacagguuauauuguacagg

SEQ ID NO: 675449 - RNA, 22 nt, Human
acaaauuugaauccugacuucu

SEQ ID NO: 675450 - RNA, 22 nt, Human
ucccagcccagguaugaugaua

SEQ ID NO: 675451 - RNA, 22 nt, Human
ugaggcagugcugggaagccug

SEQ ID NO: 675452 - RNA, 22 nt, Human
cugaggcucaagggcagguggg

SEQ ID NO: 675453 - RNA, 22 nt, Human
gaacaacuuugaaacaugaaga

SEQ ID NO: 675454 - RNA, 22 nt, Human
uaaggcagcauaauuaggccac

SEQ ID NO: 675455 - RNA, 22 nt, Human
uggugcagguguugaugcagga

SEQ ID NO: 675456 - RNA, 22 nt, Human
ccagacuuuuaguagugaguua

SEQ ID NO: 675457 - RNA, 18 nt, Human
auuuugaacugggaauau

SEQ ID NO: 675458 - RNA, 19 nt, Human
aucccaaggagcugggacu

SEQ ID NO: 675459 - RNA, 22 nt, Human
gaaccuuaugguaaaucuagag

SEQ ID NO: 675460 - RNA, 22 nt, Human
ucuaaucuacaaaaggaaauuc

SEQ ID NO: 675461 - RNA, 22 nt, Human
ugcuucauuuugacuuagccag

SEQ ID NO: 675462 - RNA, 22 nt, Human
acucuuuagagguacaucucuu

SEQ ID NO: 675463 - RNA, 22 nt, Human
uuguucauuagcgcuugggcac

SEQ ID NO: 675464 - RNA, 22 nt, Human
cagcucuuaacacagcuuguau

SEQ ID NO: 675465 - RNA, 22 nt, Human
uuucuaaguguauugagcuugg

SEQ ID NO: 675466 - RNA, 22 nt, Human
ucucaaauggacaauauugugg

SEQ ID NO: 675467 - RNA, 22 nt, Human
acugaagaacgcaucagugguu

SEQ ID NO: 675468 - RNA, 22 nt, Human
uugagggauuuacagagguggg

SEQ ID NO: 675469 - RNA, 22 nt, Human
caccuuguggcccagucagguu

SEQ ID NO: 675470 - RNA, 22 nt, Human
auacagaagaacuauagccacu

SEQ ID NO: 675471 - RNA, 22 nt, Human
uaaggaauagugcuaugaaaaa

SEQ ID NO: 675472 - RNA, 23 nt, Human
uagacacuccuuugucuguccuu

SEQ ID NO: 675473 - RNA, 22 nt, Human
cuccuccagcucucccuggggg

SEQ ID NO: 675474 - RNA, 22 nt, Human
cacaagggagcuuagaaaacau

SEQ ID NO: 675475 - RNA, 22 nt, Human
uggcucugccacuaacuuggua

SEQ ID NO: 675476 - RNA, 19 nt, Human
auacagauguauccaugau

SEQ ID NO: 675477 - RNA, 22 nt, Human
ucaguguuggcauucagaaaug

SEQ ID NO: 675478 - RNA, 22 nt, Human
acuuucaaauaucaugauucua

SEQ ID NO: 675479 - RNA, 22 nt, Human
aagucauagucgggaaagacau

SEQ ID NO: 675480 - RNA, 22 nt, Human
ucucagagugguggucccucug

SEQ ID NO: 675481 - RNA, 22 nt, Human
gagcacauguggagagucuggg

SEQ ID NO: 675482 - RNA, 22 nt, Human
guuaucuuaggguacaaaggac

SEQ ID NO: 675483 - RNA, 22 nt, Human
gcagaauacugagagcugauug

SEQ ID NO: 675484 - RNA, 22 nt, Human
ucugaaauaggcuucuuuuggu

SEQ ID NO: 675485 - RNA, 22 nt, Human
ggcaggugagagcucuuugaaa

SEQ ID NO: 675486 - RNA, 22 nt, Human
cgagcagagcagagacgucugg

SEQ ID NO: 675487 - RNA, 22 nt, Human
uacauacauuaccucauuuagu

SEQ ID NO: 675488 - RNA, 22 nt, Human
guuggccugaauggucaagagg

SEQ ID NO: 675489 - RNA, 22 nt, Human
ucugaagagcuuuggaaguaug

SEQ ID NO: 675490 - RNA, 22 nt, Human
cccugagccgcugcuccaaccu

SEQ ID NO: 675491 - RNA, 22 nt, Human
aggcugugagagguggcuccca

SEQ ID NO: 675492 - RNA, 22 nt, Human
agucagagaauguuuucaugga

SEQ ID NO: 675493 - RNA, 23 nt, Human
aaaaaaccauguaggcacucagu

SEQ ID NO: 675494 - RNA, 22 nt, Human
agcccaguugcuccacgcugca

SEQ ID NO: 675495 - RNA, 22 nt, Human
augaggagucaaggagucggag

SEQ ID NO: 675496 - RNA, 22 nt, Human
cucugggcuuccuuuguggguu

SEQ ID NO: 675497 - RNA, 22 nt, Human
uggcagcugcaggccuccugag

SEQ ID NO: 675498 - RNA, 22 nt, Human
aggaauguaguuugaguagaaa

SEQ ID NO: 675499 - RNA, 22 nt, Human
ggguggaguagaaagaugaauu

SEQ ID NO: 675500 - RNA, 22 nt, Human
gucuagaaaugccauacgugcc

SEQ ID NO: 675501 - RNA, 22 nt, Human
agcuccuggcaaggucauggug

SEQ ID NO: 675502 - RNA, 22 nt, Human
cucaaggacuuauucaugccug

SEQ ID NO: 675503 - RNA, 22 nt, Human
guggcagugaggcaggagcagu

SEQ ID NO: 675504 - RNA, 22 nt, Human
ucagggcugacugcuacucucc

SEQ ID NO: 675505 - RNA, 22 nt, Human
ucaucaguguccuuaucacuua

SEQ ID NO: 675506 - RNA, 22 nt, Human
ucucuugaagauugaagacaaa

SEQ ID NO: 675507 - RNA, 22 nt, Human
aaugaggcuugcauugugaacu

SEQ ID NO: 675508 - RNA, 22 nt, Human
cuggcccuuaggaaaacaaagu

SEQ ID NO: 675509 - RNA, 22 nt, Human
gcaagcuguccuuuugcauggc

SEQ ID NO: 675510 - RNA, 22 nt, Human
agaagccaaucagcucucugcu

SEQ ID NO: 675511 - RNA, 22 nt, Human
uauggguacuuugauuuagaaa

SEQ ID NO: 675512 - RNA, 22 nt, Human
uuuguagaacuauacuuacauu

SEQ ID NO: 675513 - RNA, 22 nt, Human
uguguuggaaauagggucuuug

SEQ ID NO: 675514 - RNA, 22 nt, Human
acuucuguaaagggaagacagu

SEQ ID NO: 675515 - RNA, 18 nt, Human
ucugaauauuaugcagug

SEQ ID NO: 675516 - RNA, 20 nt, Human
cacccucccagcaccuaugc

SEQ ID NO: 675517 - RNA, 22 nt, Human
gagaggucggggacacugcaaa

SEQ ID NO: 675518 - RNA, 22 nt, Human
ucacaucacaugacaguaggcc

SEQ ID NO: 675519 - RNA, 22 nt, Human
aauacauaauaaguuuugucug

SEQ ID NO: 675520 - RNA, 22 nt, Human
uuuugcaucuggugaagaccag

SEQ ID NO: 675521 - RNA, 22 nt, Human
cugauugagaaggaaggggauc

SEQ ID NO: 675522 - RNA, 22 nt, Human
uggcacaguuaaaguuguagaa

SEQ ID NO: 675523 - RNA, 22 nt, Human
cauuuagaaacuguuuuuaaca

SEQ ID NO: 675524 - RNA, 22 nt, Human
auagucuuagaucagauaaagu

SEQ ID NO: 675525 - RNA, 22 nt, Human
aaaugaacaucaagaauagccu

SEQ ID NO: 675526 - RNA, 22 nt, Human
ucagaacauauauuuugugaug

SEQ ID NO: 675527 - RNA, 17 nt, Human
ucuucucuuccagucuu

SEQ ID NO: 675528 - RNA, 22 nt, Human
ucccaucuccaacauuuuucuu

SEQ ID NO: 675529 - RNA, 22 nt, Human
acaugcacagcaagggugagag

SEQ ID NO: 675530 - RNA, 22 nt, Human
uuuuauugucuguauugccuau

SEQ ID NO: 675531 - RNA, 22 nt, Human
gaucuauuuacucuuuuccuag

SEQ ID NO: 675532 - RNA, 22 nt, Human
ugacauuucuuguugauauaaa

SEQ ID NO: 675533 - RNA, 17 nt, Human
ccaggugggaggugggg

SEQ ID NO: 675534 - RNA, 22 nt, Human
uaaaggcaaacucuccaaggau

SEQ ID NO: 675535 - RNA, 22 nt, Human
cauugucugguaggaagugggc

SEQ ID NO: 675536 - RNA, 22 nt, Human
uguccugggucccugcuagaag

SEQ ID NO: 675537 - RNA, 22 nt, Human
ucuacaugauguaccaucuaag

SEQ ID NO: 675538 - RNA, 22 nt, Human
uucugaaaauugggucauacuu

SEQ ID NO: 675539 - RNA, 22 nt, Human
agagcacagugcaggauccccg

SEQ ID NO: 675540 - RNA, 22 nt, Human
gggaaaauauuaagcaggacuu

SEQ ID NO: 675541 - RNA, 22 nt, Human
ggacaggcccucuggucagcuu

SEQ ID NO: 675542 - RNA, 22 nt, Human
ugucugaaucgcuuccuagagg

SEQ ID NO: 675543 - RNA, 22 nt, Human
aucaaguucugucacauuuguc

SEQ ID NO: 675544 - RNA, 22 nt, Human
ucuguucuaagcauucuaugug

SEQ ID NO: 675545 - RNA, 22 nt, Human
aauacauauggaauuccauguu

SEQ ID NO: 675546 - RNA, 22 nt, Human
caguugcuacaguucaagugug

SEQ ID NO: 675547 - RNA, 22 nt, Human
aagguggcccugagcaugacaa

SEQ ID NO: 675548 - RNA, 22 nt, Human
ucuugccucuuccccuuuccau

SEQ ID NO: 675549 - RNA, 22 nt, Human
guguucuuuugcuucacagaaa

SEQ ID NO: 675550 - RNA, 22 nt, Human
cucagcucacucuuuugugcuu

SEQ ID NO: 675551 - RNA, 22 nt, Human
auuugcagagcucugaauuuug

SEQ ID NO: 675552 - RNA, 22 nt, Human
ggugaugaaaagugccuuuauc

SEQ ID NO: 675553 - RNA, 22 nt, Human
ggcuggaaguccaagaucaaga

SEQ ID NO: 675554 - RNA, 22 nt, Human
aagguuucuccgaggcuauuuu

SEQ ID NO: 675555 - RNA, 22 nt, Human
caaagugccuguaccacuuugc

SEQ ID NO: 675556 - RNA, 22 nt, Human
cagaagugauguugagcuaguc

SEQ ID NO: 675557 - RNA, 22 nt, Human
cugcugggcuccucaugugacu

SEQ ID NO: 675558 - RNA, 18 nt, Human
acuugggacuuuugcauu

SEQ ID NO: 675559 - RNA, 22 nt, Human
ucucuaaagcacuuuaaccaca

SEQ ID NO: 675560 - RNA, 22 nt, Human
aucucccagccacagcauucuu

SEQ ID NO: 675561 - RNA, 22 nt, Human
ucuucuccaguucauccuacca

SEQ ID NO: 675562 - RNA, 22 nt, Human
uugaggcagggcaugguggccc

SEQ ID NO: 675563 - RNA, 22 nt, Human
auucugcucccaggugaugcug

SEQ ID NO: 675564 - RNA, 22 nt, Human
uacaagaugacaggugcaugau

SEQ ID NO: 675565 - RNA, 22 nt, Human
uguaugaaucucauuuguuuaa

SEQ ID NO: 675566 - RNA, 22 nt, Human
uaacagaagaugaaacuucuuu

SEQ ID NO: 675567 - RNA, 22 nt, Human
uacagccucuucccuggagugg

SEQ ID NO: 675568 - RNA, 22 nt, Human
auuacaguagcaaaagaccgga

SEQ ID NO: 675569 - RNA, 22 nt, Human
cagcaccuaggacaguagucag

SEQ ID NO: 675570 - RNA, 22 nt, Human
uguuagaaauuauuaguaauau

SEQ ID NO: 675571 - RNA, 22 nt, Human
ucaccccuggcccagucuugga

SEQ ID NO: 675572 - RNA, 22 nt, Human
agcucugcuacucuguggggug

SEQ ID NO: 675573 - RNA, 22 nt, Human
ccagguucaaauagcuguguga

SEQ ID NO: 675574 - RNA, 23 nt, Human
uggcucagggucucuuaugaagu

SEQ ID NO: 675575 - RNA, 22 nt, Human
uccuugaggaggugacacugga

SEQ ID NO: 675576 - RNA, 22 nt, Human
uccucaggagagcuccuaugcc

SEQ ID NO: 675577 - RNA, 22 nt, Human
ucuuaaaugacugauaagagga

SEQ ID NO: 675578 - RNA, 22 nt, Human
ucuucuccuuugccauguguuu

SEQ ID NO: 675579 - RNA, 22 nt, Human
gggcaagcagugaggacagcac

SEQ ID NO: 675580 - RNA, 22 nt, Human
aggcuggcugagcugcagccug

SEQ ID NO: 675581 - RNA, 22 nt, Human
gacagacaugggacuucauacu

SEQ ID NO: 675582 - RNA, 22 nt, Human
acaggcuucucacagaaaaggg

SEQ ID NO: 675583 - RNA, 21 nt, Human
ugccagcugcugcaucugucu

SEQ ID NO: 675584 - RNA, 22 nt, Human
aaauuguagagaucgcuuugug

SEQ ID NO: 675585 - RNA, 22 nt, Human
auaaacugugcuggaugaugag

SEQ ID NO: 675586 - RNA, 22 nt, Human
agaaaauaaauugaugguggaa

SEQ ID NO: 675587 - RNA, 22 nt, Human
cucaggccauuccuaccaaggg

SEQ ID NO: 675588 - RNA, 22 nt, Human
cagggacagggaucauuugcuu

SEQ ID NO: 675589 - RNA, 22 nt, Human
gaaacugugaucguguucuggg

SEQ ID NO: 675590 - RNA, 22 nt, Human
aggccaaauugaucaucuuuag

SEQ ID NO: 675591 - RNA, 22 nt, Human
uugaucagguugcuguggugua

SEQ ID NO: 675592 - RNA, 19 nt, Human
uccaguuuggcaggaagac

SEQ ID NO: 675593 - RNA, 22 nt, Human
uagaaagcccuguguucacugc

SEQ ID NO: 675594 - RNA, 22 nt, Human
aggcugugcucagccaauggga

SEQ ID NO: 675595 - RNA, 22 nt, Human
gagcccugcccacuugucugag

SEQ ID NO: 675596 - RNA, 22 nt, Human
cugggagcccgcguccuggugg

SEQ ID NO: 675597 - RNA, 22 nt, Human
aaaugucuuugaguauuucugc

SEQ ID NO: 675598 - RNA, 21 nt, Human
uguuccuguucucuaggaucc

SEQ ID NO: 675599 - RNA, 21 nt, Human
acagggcuucagggaggguua

SEQ ID NO: 675600 - RNA, 22 nt, Human
ucccuagaggucuucacaagau

SEQ ID NO: 675601 - RNA, 22 nt, Human
ucaggacagacuagacuagcgu

SEQ ID NO: 675602 - RNA, 22 nt, Human
uucucaggucaccagggugcca

SEQ ID NO: 675603 - RNA, 22 nt, Human
cacagugacuggcacauaguaa

SEQ ID NO: 675604 - RNA, 22 nt, Human
aauuaagagagaguugaagcaa

SEQ ID NO: 675605 - RNA, 20 nt, Human
cuaaccuuaaccaucaccag

SEQ ID NO: 675606 - RNA, 22 nt, Human
ggguguugauuuuacacuaaaa

SEQ ID NO: 675607 - RNA, 17 nt, Human
agcugagcuggccaggg

SEQ ID NO: 675608 - RNA, 19 nt, Human
cucugccucuggcuguggc

SEQ ID NO: 675609 - RNA, 22 nt, Human
aacauuuauucuaauucuggga

SEQ ID NO: 675610 - RNA, 22 nt, Human
ugcuggaggccgagaagcagca

SEQ ID NO: 675611 - RNA, 22 nt, Human
caaguccaacaguuuuucagac

SEQ ID NO: 675612 - RNA, 19 nt, Human
agcugcuggcccagggacc

SEQ ID NO: 675613 - RNA, 22 nt, Human
cucuggucauuuggaagagcau

SEQ ID NO: 675614 - RNA, 22 nt, Human
uggcucugccccauaccccugc

SEQ ID NO: 675615 - RNA, 22 nt, Human
ggaucagaaucucugagaguuu

SEQ ID NO: 675616 - RNA, 22 nt, Human
gagaaggaaguugagccagcau

SEQ ID NO: 675617 - RNA, 22 nt, Human
ccaggugugauuuggcaguguc

SEQ ID NO: 675618 - RNA, 22 nt, Human
uguauuuucugaggagcauuag

SEQ ID NO: 675619 - RNA, 22 nt, Human
cuuauacagaucaagggaaaag

SEQ ID NO: 675620 - RNA, 22 nt, Human
gaucacauaauuuggaaacagc

SEQ ID NO: 675621 - RNA, 22 nt, Human
caauuucagguggauagguuuu

SEQ ID NO: 675622 - RNA, 22 nt, Human
ucuuugauggagagauagauau

SEQ ID NO: 675623 - RNA, 22 nt, Human
gaaaucuacgauuagugaaaau

SEQ ID NO: 675624 - RNA, 22 nt, Human
ccugagaaaccuggugcaauua

SEQ ID NO: 675625 - RNA, 22 nt, Human
uuauaucuuuuuacaucucucc

SEQ ID NO: 675626 - RNA, 22 nt, Human
cagggacaugacuggucucugu

SEQ ID NO: 675627 - RNA, 22 nt, Human
uucucucuguuauggauuuuac

SEQ ID NO: 675628 - RNA, 22 nt, Human
ugccagugggugugcagagacu

SEQ ID NO: 675629 - RNA, 22 nt, Human
auuaguguggacccuaauuuaa

SEQ ID NO: 675630 - RNA, 22 nt, Human
aggcugggaaauguauuccagc

SEQ ID NO: 675631 - RNA, 22 nt, Human
acuuugaaggggaacauuuuaa

SEQ ID NO: 675632 - RNA, 22 nt, Human
uggcaggagccugcggggaggu

SEQ ID NO: 675633 - RNA, 22 nt, Human
agcaauuucccaucucuucugc

SEQ ID NO: 675634 - RNA, 22 nt, Human
cagagguagccgagugcaaucg

SEQ ID NO: 675635 - RNA, 22 nt, Human
uucuaugucagugugcucugug

SEQ ID NO: 675636 - RNA, 22 nt, Human
agagauucugugucaaaacgaa

SEQ ID NO: 675637 - RNA, 22 nt, Human
caaauuacccucaacaucuaga

SEQ ID NO: 675638 - RNA, 22 nt, Human
augcauauugucauuuaguccu

SEQ ID NO: 675639 - RNA, 23 nt, Human
aucagucuugguagcugugccca

SEQ ID NO: 675640 - RNA, 22 nt, Human
auguuuuccugggagagcacuc

SEQ ID NO: 675641 - RNA, 20 nt, Human
uagagcaugaaguccuaucc

SEQ ID NO: 675642 - RNA, 22 nt, Human
uagaaauguugguauuaacauu

SEQ ID NO: 675643 - RNA, 19 nt, Human
cagcucaggacucagcccc

SEQ ID NO: 675644 - RNA, 22 nt, Human
agggcuggccacaugauuuggu

SEQ ID NO: 675645 - RNA, 22 nt, Human
ugggccugauucuugaauccug

SEQ ID NO: 675646 - RNA, 22 nt, Human
ugggggcacuucgaggucgccu

SEQ ID NO: 675647 - RNA, 22 nt, Human
cuccuccaguccuccaaggaca

SEQ ID NO: 675648 - RNA, 22 nt, Human
ugaaucaaagcugaaguuuuca

SEQ ID NO: 675649 - RNA, 22 nt, Human
ucucacaguaugaauuguucac

SEQ ID NO: 675650 - RNA, 22 nt, Human
agaaauacaaaguacuaagaua

SEQ ID NO: 675651 - RNA, 22 nt, Human
acagaggccgccucucucacgg

SEQ ID NO: 675652 - RNA, 22 nt, Human
uggccugguuguugcugccguu

SEQ ID NO: 675653 - RNA, 22 nt, Human
ugcaggucuccauuggcagacu

SEQ ID NO: 675654 - RNA, 22 nt, Human
ucucaaauauuuggagagagga

SEQ ID NO: 675655 - RNA, 19 nt, Human
ccucccacggauuccuucc

SEQ ID NO: 675656 - RNA, 21 nt, Human
aucugaaagguuaguguugag

SEQ ID NO: 675657 - RNA, 22 nt, Human
ccugaaaugaguucugcucacu

SEQ ID NO: 675658 - RNA, 22 nt, Human
acauucacgcucucaaagcuga

SEQ ID NO: 675659 - RNA, 22 nt, Human
uugcuguuuuacaucugguggg

SEQ ID NO: 675660 - RNA, 22 nt, Human
aacaguguucuaggguguggcu

SEQ ID NO: 675661 - RNA, 22 nt, Human
cuuauaguaugauguugagaau

SEQ ID NO: 675662 - RNA, 22 nt, Human
acaguggaugacauccuuuugc

SEQ ID NO: 675663 - RNA, 22 nt, Human
gcaugcaggagagaaagacggc

SEQ ID NO: 675664 - RNA, 22 nt, Human
ugugcuucucacaucacuguug

SEQ ID NO: 675665 - RNA, 22 nt, Human
aauaauuuccagccaacuggaa

SEQ ID NO: 675666 - RNA, 22 nt, Human
uugauucuucugaauuugcaga

SEQ ID NO: 675667 - RNA, 22 nt, Human
uggcacuguggauuucacaagu

SEQ ID NO: 675668 - RNA, 22 nt, Human
aaucuauaugcuuuucacauac

SEQ ID NO: 675669 - RNA, 22 nt, Human
aucagaaaggugggcaagcaga

SEQ ID NO: 675670 - RNA, 22 nt, Human
aggggcaaaugugagccuggaa

SEQ ID NO: 675671 - RNA, 22 nt, Human
cugaggaccccacaggaggccc

SEQ ID NO: 675672 - RNA, 22 nt, Human
augucuuucucauacaagccca

SEQ ID NO: 675673 - RNA, 22 nt, Human
ggaacuuuaggauccuggcuca

SEQ ID NO: 675674 - RNA, 20 nt, Human
aggaacuuuguagaauacaa

SEQ ID NO: 675675 - RNA, 22 nt, Human
gauuucuaguaagucaugaagg

SEQ ID NO: 675676 - RNA, 23 nt, Human
agcaacagugggugaguguugcu

SEQ ID NO: 675677 - RNA, 19 nt, Human
cccaggguuuccucucucc

SEQ ID NO: 675678 - RNA, 22 nt, Human
cagaguggcgacccccucagcu

SEQ ID NO: 675679 - RNA, 22 nt, Human
ucaggcugauuucuuuugaggg

SEQ ID NO: 675680 - RNA, 22 nt, Human
acagauguaaucuauucacauu

SEQ ID NO: 675681 - RNA, 22 nt, Human
uuucuauaucuuaccuauugua

SEQ ID NO: 675682 - RNA, 22 nt, Human
uuaaaugacuuuuauuauucuc

SEQ ID NO: 675683 - RNA, 22 nt, Human
ugccugcuaggcccugcugggu

SEQ ID NO: 675684 - RNA, 23 nt, Human
agucaagaugcaucugugaggaa

SEQ ID NO: 675685 - RNA, 22 nt, Human
ugaggcagggagaguggauaug

SEQ ID NO: 675686 - RNA, 18 nt, Human
uggcucugccacucaccg

SEQ ID NO: 675687 - RNA, 22 nt, Human
gagcuuccugcaggucacugug

SEQ ID NO: 675688 - RNA, 22 nt, Human
cuuuacaaagcaauuuugucuc

SEQ ID NO: 675689 - RNA, 22 nt, Human
uguaaagaaagacgcagaguua

SEQ ID NO: 675690 - RNA, 22 nt, Human
guguccugggcauuaggcuuag

SEQ ID NO: 675691 - RNA, 22 nt, Human
gucugcccaucuccgggcgggg

SEQ ID NO: 675692 - RNA, 22 nt, Human
gaggggcacagcagcuguugca

SEQ ID NO: 675693 - RNA, 22 nt, Human
auucuuuuguccuagcuugaua

SEQ ID NO: 675694 - RNA, 23 nt, Human
uccugcugaaagcuccagcuggc

SEQ ID NO: 675695 - RNA, 22 nt, Human
ucccagaggcaguugguaacuu

SEQ ID NO: 675696 - RNA, 22 nt, Human
auacuguuucucuucuacauga

SEQ ID NO: 675697 - RNA, 22 nt, Human
ugaaggccuaacuuccagugcu

SEQ ID NO: 675698 - RNA, 22 nt, Human
ccagagguggucauagaaagca

SEQ ID NO: 675699 - RNA, 22 nt, Human
cuucugugcuucacaguugcca

SEQ ID NO: 675700 - RNA, 22 nt, Human
agcaucagccucuguccuggag

SEQ ID NO: 675701 - RNA, 22 nt, Human
uucuacaugguugcucagaggg

SEQ ID NO: 675702 - RNA, 22 nt, Human
uauugcagacaaaaugagcuac

SEQ ID NO: 675703 - RNA, 23 nt, Human
agaauuguaaauagaauauaccu

SEQ ID NO: 675704 - RNA, 22 nt, Human
gucuuucuuaauucaagugcuu

SEQ ID NO: 675705 - RNA, 17 nt, Human
gccuuccagcauguggg

SEQ ID NO: 675706 - RNA, 21 nt, Human
ggacagaggagaaggcacccu

SEQ ID NO: 675707 - RNA, 22 nt, Human
aggggccugguuggccucuguu

SEQ ID NO: 675708 - RNA, 22 nt, Human
ccaaaauguuugaaugcaugug

SEQ ID NO: 675709 - RNA, 22 nt, Human
cugggcuccacuacuugcuaac

SEQ ID NO: 675710 - RNA, 22 nt, Human
auuccucaaagguagcccauua

SEQ ID NO: 675711 - RNA, 22 nt, Human
ucuggagcuuguuucagauggu

SEQ ID NO: 675712 - RNA, 21 nt, Human
uaaaacuguaacuuuguccug

SEQ ID NO: 675713 - RNA, 22 nt, Human
aaagguaucauguccauacagu

SEQ ID NO: 675714 - RNA, 22 nt, Human
agaggcaguauacaauccgagc

SEQ ID NO: 675715 - RNA, 22 nt, Human
acauuuauuuucagcugggaaa

SEQ ID NO: 675716 - RNA, 22 nt, Human
aaaccucuggguuccgugguuu

SEQ ID NO: 675717 - RNA, 22 nt, Human
uucagcauuucuguuguuggcu

SEQ ID NO: 675718 - RNA, 18 nt, Human
uggcucagauggcuuuaa

SEQ ID NO: 675719 - RNA, 22 nt, Human
cauuuauuggcauguaguaggu

SEQ ID NO: 675720 - RNA, 22 nt, Human
ucccuggggaagggcaagcaag

SEQ ID NO: 675721 - RNA, 22 nt, Human
ucaagcucauuccucuaaccuc

SEQ ID NO: 675722 - RNA, 20 nt, Human
uggcugugggcaucuguuuc

SEQ ID NO: 675723 - RNA, 22 nt, Human
gagcugagcagggagccucacu

SEQ ID NO: 675724 - RNA, 22 nt, Human
cacccaggcauggguugagaug

SEQ ID NO: 675725 - RNA, 22 nt, Human
ggcagagguagcuggaaccagg

SEQ ID NO: 675726 - RNA, 17 nt, Human
aguguuuccuuaucauu

SEQ ID NO: 675727 - RNA, 22 nt, Human
agccccuguuuuuccagucaga

SEQ ID NO: 675728 - RNA, 22 nt, Human
uccagggcaugcucagacucag

SEQ ID NO: 675729 - RNA, 22 nt, Human
auaucuuuuagagcaagcuugu

SEQ ID NO: 675730 - RNA, 23 nt, Human
uggcuccaggagaagccagaagc

SEQ ID NO: 675731 - RNA, 22 nt, Human
ucagugguuaaguucuguccac

SEQ ID NO: 675732 - RNA, 22 nt, Human
uuagaaguaaggucagauuucu

SEQ ID NO: 675733 - RNA, 22 nt, Human
aguuuguaugccaacagcaaag

SEQ ID NO: 675734 - RNA, 22 nt, Human
gggagcugggcugguuuugcug

SEQ ID NO: 675735 - RNA, 22 nt, Human
cugggcugagccugggcugugu

SEQ ID NO: 675736 - RNA, 19 nt, Human
uggcccagaugguccuggg

SEQ ID NO: 675737 - RNA, 22 nt, Human
ggugucugcuucccuccagcug

SEQ ID NO: 675738 - RNA, 20 nt, Human
gcucuaaagccacagauuga

SEQ ID NO: 675739 - RNA, 22 nt, Human
ggcuucagaagacuggacaggu

SEQ ID NO: 675740 - RNA, 20 nt, Human
ucucccaggcucagggaaga

SEQ ID NO: 675741 - RNA, 22 nt, Human
aauaaacuuccacuguguuuuu

SEQ ID NO: 675742 - RNA, 22 nt, Human
gagggcuuguaaguggguggag

SEQ ID NO: 675743 - RNA, 22 nt, Human
cuuuggcugggcaaagggaggu

SEQ ID NO: 675744 - RNA, 22 nt, Human
aaggcagagggcuggaucagag

SEQ ID NO: 675745 - RNA, 22 nt, Human
uagaucauauacuugccaugac

SEQ ID NO: 675746 - RNA, 22 nt, Human
agccaggaaccagcuacagucu

SEQ ID NO: 675747 - RNA, 22 nt, Human
ucagccaggcccuaagagauug

SEQ ID NO: 675748 - RNA, 22 nt, Human
guguguguauauauacacacac

SEQ ID NO: 675749 - RNA, 22 nt, Human
cacauagauaggcagaagaaca

SEQ ID NO: 675750 - RNA, 22 nt, Human
auguuggagucguaaggcaugg

SEQ ID NO: 675751 - RNA, 22 nt, Human
uacauucuggaaaggcacagac

SEQ ID NO: 675752 - RNA, 22 nt, Human
gggaaggagccugcuugcuaga

SEQ ID NO: 675753 - RNA, 22 nt, Human
agggcucacugggaggcuauaa

SEQ ID NO: 675754 - RNA, 22 nt, Human
uggccuccucgggcugacccug

SEQ ID NO: 675755 - RNA, 22 nt, Human
auguaucacagcaauguaguca

SEQ ID NO: 675756 - RNA, 22 nt, Human
agcugcugcaaguggugcuaac

SEQ ID NO: 675757 - RNA, 22 nt, Human
aauauuuguuaguguuuuaaug

SEQ ID NO: 675758 - RNA, 20 nt, Human
cuguaucagguuacaaagua

SEQ ID NO: 675759 - RNA, 22 nt, Human
guggcagugccagcuccgacaa

SEQ ID NO: 675760 - RNA, 22 nt, Human
ggaacacagugccuuacaaacu

SEQ ID NO: 675761 - RNA, 22 nt, Human
aaagucugaaagaugcuaacau

SEQ ID NO: 675762 - RNA, 22 nt, Human
ugacaucuaguagguagagacc

SEQ ID NO: 675763 - RNA, 22 nt, Human
auaagcauuucacagguguguu

SEQ ID NO: 675764 - RNA, 22 nt, Human
uuacaguuuaguccaagccaga

SEQ ID NO: 675765 - RNA, 22 nt, Human
ugcacuccaggcugggugacag

SEQ ID NO: 675766 - RNA, 22 nt, Human
gcugccuggagcucagccugcc

SEQ ID NO: 675767 - RNA, 22 nt, Human
caucagcacuaugauuaaagua

SEQ ID NO: 675768 - RNA, 22 nt, Human
uagcuguucauguggcuuuaug

SEQ ID NO: 675769 - RNA, 22 nt, Human
ucucaaaucaaacuuugagcuu

SEQ ID NO: 675770 - RNA, 22 nt, Human
cuggaguaaguuaagauguucc

SEQ ID NO: 675771 - RNA, 22 nt, Human
auggcugcagagaccugaagaa

SEQ ID NO: 675772 - RNA, 22 nt, Human
uguaugcuuuccuucuuucugg

SEQ ID NO: 675773 - RNA, 22 nt, Human
ggcaggcaguguggugugaaac

SEQ ID NO: 675774 - RNA, 22 nt, Human
gcgguggggaaaggaggugcug

SEQ ID NO: 675775 - RNA, 22 nt, Human
gacuccagcauauacuuuuagu

SEQ ID NO: 675776 - RNA, 22 nt, Human
ucccagaguucaaugggaaggu

SEQ ID NO: 675777 - RNA, 22 nt, Human
uauguuuccugagcuuacacca

SEQ ID NO: 675778 - RNA, 22 nt, Human
uaguuuaggucguacaagcaaa

SEQ ID NO: 675779 - RNA, 22 nt, Human
gggagggguugcauguuugagu

SEQ ID NO: 675780 - RNA, 22 nt, Human
gcuguccagagcaugggagcaa

SEQ ID NO: 675781 - RNA, 22 nt, Human
aaagcauggcaugaagaacaug

SEQ ID NO: 675782 - RNA, 22 nt, Human
ugggcugcagggguugagagcu

SEQ ID NO: 675783 - RNA, 22 nt, Human
cagauacagguuuuuguuagau

SEQ ID NO: 675784 - RNA, 22 nt, Human
uauuacaaauuauaaugggaga

SEQ ID NO: 675785 - RNA, 22 nt, Human
guuaauuuaguagaguccagau

SEQ ID NO: 675786 - RNA, 22 nt, Human
uugacaauguccuuugaauuuc

SEQ ID NO: 675787 - RNA, 22 nt, Human
uggcauguugagaggcaagauu

SEQ ID NO: 675788 - RNA, 22 nt, Human
auuaaauuaaguggcuaauuua

SEQ ID NO: 675789 - RNA, 22 nt, Human
uguuaaaaccacaggugaggac

SEQ ID NO: 675790 - RNA, 22 nt, Human
cuggucuguccgcaggucaccu

SEQ ID NO: 675791 - RNA, 22 nt, Human
gggcucagcuccuuccuuccua

SEQ ID NO: 675792 - RNA, 22 nt, Human
agggagugguuaagaaggugca

SEQ ID NO: 675793 - RNA, 22 nt, Human
uuuaaagugcugcuccuauccu

SEQ ID NO: 675794 - RNA, 22 nt, Human
uugcauuguugcaaugaaguau

SEQ ID NO: 675795 - RNA, 21 nt, Human
uccagaccucccucuccuagc

SEQ ID NO: 675796 - RNA, 22 nt, Human
ucucuuggugacuuaaaauguu

SEQ ID NO: 675797 - RNA, 22 nt, Human
cacaugcuucuuuugauuauga

SEQ ID NO: 675798 - RNA, 22 nt, Human
ggggaggaguguacagguuuau

SEQ ID NO: 675799 - RNA, 22 nt, Human
ugaaaaugcacgcuggaaagca

SEQ ID NO: 675800 - RNA, 22 nt, Human
cuuagaugaagucacagaaccc

SEQ ID NO: 675801 - RNA, 22 nt, Human
aagagucccaaaaugauucuua

SEQ ID NO: 675802 - RNA, 22 nt, Human
aagcuguucucuaaguuucaug

SEQ ID NO: 675803 - RNA, 22 nt, Human
caguuuugguccuuucuaggua

SEQ ID NO: 675804 - RNA, 22 nt, Human
gaaaguauuagccuagaaguca

SEQ ID NO: 675805 - RNA, 22 nt, Human
agggcacccucucugcaguacc

SEQ ID NO: 675806 - RNA, 20 nt, Human
uccagggcccuggcuccucu

SEQ ID NO: 675807 - RNA, 19 nt, Human
agaggcugucaccuguagc

SEQ ID NO: 675808 - RNA, 22 nt, Human
uucuacagugacugcagccaua

SEQ ID NO: 675809 - RNA, 22 nt, Human
aauuuaacugagaguacuuuua

SEQ ID NO: 675810 - RNA, 22 nt, Human
uguguuugaggcauguugcaga

SEQ ID NO: 675811 - RNA, 22 nt, Human
uguggaggauucugaugccagc

SEQ ID NO: 675812 - RNA, 22 nt, Human
cagaaauguacugacaugcagu

SEQ ID NO: 675813 - RNA, 22 nt, Human
uuagugugcauggaucugugga

SEQ ID NO: 675814 - RNA, 22 nt, Human
ugggguggaacccuucugcugg

SEQ ID NO: 675815 - RNA, 23 nt, Human
aggagacagggaagugccuggcu

SEQ ID NO: 675816 - RNA, 22 nt, Human
uggcagaguucgcuccuauuca

SEQ ID NO: 675817 - RNA, 22 nt, Human
uaaugucuuaguaccuuaauuu

SEQ ID NO: 675818 - RNA, 22 nt, Human
aagacuguaugagacaauauaa

SEQ ID NO: 675819 - RNA, 22 nt, Human
uucagggagagcgggacgggug

SEQ ID NO: 675820 - RNA, 22 nt, Human
ucaggcuguggcuuugaccgca

SEQ ID NO: 675821 - RNA, 22 nt, Human
gggucucucaugcaguugcugu

SEQ ID NO: 675822 - RNA, 22 nt, Human
ccuuuucuauccuucuagguuc

SEQ ID NO: 675823 - RNA, 22 nt, Human
aagaugcuugcaaauuucugaa

SEQ ID NO: 675824 - RNA, 22 nt, Human
gcucugucaacagcuagcugug

SEQ ID NO: 675825 - RNA, 22 nt, Human
acaguguggugauggcacuugc

SEQ ID NO: 675826 - RNA, 22 nt, Human
aauucauuaagaaagagcuaaa

SEQ ID NO: 675827 - RNA, 22 nt, Human
uuuuucuugugcuggaucuaau

SEQ ID NO: 675828 - RNA, 22 nt, Human
agcaaauacuuuucacugagcc

SEQ ID NO: 675829 - RNA, 22 nt, Human
uaguaugggaagaacuuuguag

SEQ ID NO: 675830 - RNA, 22 nt, Human
gcaagcagcccagaacagcucu

SEQ ID NO: 675831 - RNA, 19 nt, Human
agaauuguuuugagacccc

SEQ ID NO: 675832 - RNA, 22 nt, Human
cuuuguuuauauuucuccucga

SEQ ID NO: 675833 - RNA, 22 nt, Human
aacacauuuugccuaggcaaua

SEQ ID NO: 675834 - RNA, 22 nt, Human
cuuggcagcuuuuggaggagcc

SEQ ID NO: 675835 - RNA, 22 nt, Human
gggaguggguuuggccuaggcc

SEQ ID NO: 675836 - RNA, 22 nt, Human
gcagcagcccagggcucucaga

SEQ ID NO: 675837 - RNA, 21 nt, Human
ugcagccucugcccagcagug

SEQ ID NO: 675838 - RNA, 22 nt, Human
gaagaacugugacagaagcagu

SEQ ID NO: 675839 - RNA, 22 nt, Human
auucuuuaguuggcuucuugcc

SEQ ID NO: 675840 - RNA, 22 nt, Human
aauaaccuuacuuauuacaugg

SEQ ID NO: 675841 - RNA, 22 nt, Human
uucaaauuaccacauuugcuua

SEQ ID NO: 675842 - RNA, 22 nt, Human
acaccuuugugaagugaugaug

SEQ ID NO: 675843 - RNA, 22 nt, Human
uuugucuuaaaucuuguuacug

SEQ ID NO: 675844 - RNA, 22 nt, Human
ugcuugaaagggguuucccagu

SEQ ID NO: 675845 - RNA, 22 nt, Human
agcccugcacaguucgggagga

SEQ ID NO: 675846 - RNA, 22 nt, Human
caugagaucugcagggaugggc

SEQ ID NO: 675847 - RNA, 22 nt, Human
ggccuuggccuagcccuccagg

SEQ ID NO: 675848 - RNA, 23 nt, Human
cacaggcagaaaucaagacggua

SEQ ID NO: 675849 - RNA, 19 nt, Human
ugaguuuaaugcaaaacug

SEQ ID NO: 675850 - RNA, 22 nt, Human
ucaggaaagccuagaagagaac

SEQ ID NO: 675851 - RNA, 22 nt, Human
acccaggacaaaauaaccaggu

SEQ ID NO: 675852 - RNA, 22 nt, Human
uuccacucaugcaaagguccca

SEQ ID NO: 675853 - RNA, 22 nt, Human
gccagccuucuguggccugcaa

SEQ ID NO: 675854 - RNA, 22 nt, Human
gauuucuaaggaggcugaacuu

SEQ ID NO: 675855 - RNA, 22 nt, Human
uccaguacaggucucucauuuc

SEQ ID NO: 675856 - RNA, 22 nt, Human
ccugcuguaaugugucuuuauu

SEQ ID NO: 675857 - RNA, 22 nt, Human
ccucugcaccauagccuucagc

SEQ ID NO: 675858 - RNA, 22 nt, Human
gacaggccaggggcugaggugg

SEQ ID NO: 675859 - RNA, 22 nt, Human
ugguggcaauguccuggagaag

SEQ ID NO: 675860 - RNA, 20 nt, Human
gucaagucccuggggcagcu

SEQ ID NO: 675861 - RNA, 22 nt, Human
agcugaaguucaguccagagaa

SEQ ID NO: 675862 - RNA, 18 nt, Human
uguagcuggaggccaggc

SEQ ID NO: 675863 - RNA, 22 nt, Human
agcuccugcgcacggugcacac

SEQ ID NO: 675864 - RNA, 23 nt, Human
cacauggaggaccguucuuauaa

SEQ ID NO: 675865 - RNA, 22 nt, Human
uauuacaguucgaguuucuagg

SEQ ID NO: 675866 - RNA, 19 nt, Human
ugccuguggcgagcaucuu

SEQ ID NO: 675867 - RNA, 22 nt, Human
guggcaggagacuggaagaugg

SEQ ID NO: 675868 - RNA, 22 nt, Human
acagcagaguugaguaguugca

SEQ ID NO: 675869 - RNA, 22 nt, Human
ugccgugcccauauugugggug

SEQ ID NO: 675870 - RNA, 22 nt, Human
gcaaguuauuuccauuuaaagc

SEQ ID NO: 675871 - RNA, 22 nt, Human
caaguuuaaggcacugauaagu

SEQ ID NO: 675872 - RNA, 22 nt, Human
acagggccucagcugauucugg

SEQ ID NO: 675873 - RNA, 22 nt, Human
agcugcucucacuggacgccug

SEQ ID NO: 675874 - RNA, 20 nt, Human
ccagaagguuugccacuuuc

SEQ ID NO: 675875 - RNA, 22 nt, Human
acagcaugagaguagcaaaagg

SEQ ID NO: 675876 - RNA, 22 nt, Human
cagggcugagaauuuagagaca

SEQ ID NO: 675877 - RNA, 22 nt, Human
agagcagcugcauucagcaccu

SEQ ID NO: 675878 - RNA, 22 nt, Human
acugaacacuuuugaaagauua

SEQ ID NO: 675879 - RNA, 18 nt, Human
gcagcugcaguuguagcu

SEQ ID NO: 675880 - RNA, 22 nt, Human
uuuucauuguuccucgagcauu

SEQ ID NO: 675881 - RNA, 22 nt, Human
gagauuuauugacuuaacagua

SEQ ID NO: 675882 - RNA, 22 nt, Human
agaggggaguccuaaucugauu

SEQ ID NO: 675883 - RNA, 19 nt, Human
cgcucuggguuucguguca

SEQ ID NO: 675884 - RNA, 22 nt, Human
aggaggaauacaauccagcagc

SEQ ID NO: 675885 - RNA, 19 nt, Human
caguuuaugcuuuggggac

SEQ ID NO: 675886 - RNA, 22 nt, Human
aaagugcaguaacuugcccaag

SEQ ID NO: 675887 - RNA, 22 nt, Human
ugacacugcauauauugaaguu

SEQ ID NO: 675888 - RNA, 18 nt, Human
ggcucaggcuauccuaac

SEQ ID NO: 675889 - RNA, 22 nt, Human
aagagauguugaaguuuauuag

SEQ ID NO: 675890 - RNA, 22 nt, Human
ucucugggccuguuuucucauc

SEQ ID NO: 675891 - RNA, 22 nt, Human
uggauugauaagagacaaguga

SEQ ID NO: 675892 - RNA, 22 nt, Human
auagcacugguuuuucuugguu

SEQ ID NO: 675893 - RNA, 22 nt, Human
cccugcccuggagacacuuaaa

SEQ ID NO: 675894 - RNA, 22 nt, Human
ugucucuuggagggucuaguga

SEQ ID NO: 675895 - RNA, 22 nt, Human
agagcuauaacagcacuguaca

SEQ ID NO: 675896 - RNA, 22 nt, Human
agaaugugugauugaagcucuu

SEQ ID NO: 675897 - RNA, 22 nt, Human
gacagacaggaggcauucaggg

SEQ ID NO: 675898 - RNA, 22 nt, Human
ggagucccagcaaagccuuccc

SEQ ID NO: 675899 - RNA, 22 nt, Human
aacuucaagcuucgucccuucg

SEQ ID NO: 675900 - RNA, 22 nt, Human
auacagaugagaucaggcauaa

SEQ ID NO: 675901 - RNA, 20 nt, Human
gggaugagaguccuagcucu

SEQ ID NO: 675902 - RNA, 17 nt, Human
gagcagggaugcgguuc

SEQ ID NO: 675903 - RNA, 22 nt, Human
aaaugucuacuccuguguuuau

SEQ ID NO: 675904 - RNA, 22 nt, Human
caaagagcuguucagugucgcu

SEQ ID NO: 675905 - RNA, 22 nt, Human
uugggguacgcaggucugggag

SEQ ID NO: 675906 - RNA, 23 nt, Human
agugaauucaguuuaaaacagag

SEQ ID NO: 675907 - RNA, 22 nt, Human
cagaagcacuaggaggaaacgu

SEQ ID NO: 675908 - RNA, 22 nt, Human
ggcuucucccuucuucugauug

SEQ ID NO: 675909 - RNA, 22 nt, Human
gcugcuggggucacaugguaag

SEQ ID NO: 675910 - RNA, 23 nt, Human
aaguacauauauuuagauaguga

SEQ ID NO: 675911 - RNA, 20 nt, Human
uccaccaggaaggguaggga

SEQ ID NO: 675912 - RNA, 22 nt, Human
cagcuucugucugauuagcaag

SEQ ID NO: 675913 - RNA, 22 nt, Human
uaggaaagaaaugaguagugau

SEQ ID NO: 675914 - RNA, 22 nt, Human
uggaacaagaagcaggucgcuu

SEQ ID NO: 675915 - RNA, 22 nt, Human
agccaggaagagaggccucacc

SEQ ID NO: 675916 - RNA, 22 nt, Human
agcugugguucugggcagcgac

SEQ ID NO: 675917 - RNA, 22 nt, Human
uuauguguguacaugcauaugu

SEQ ID NO: 675918 - RNA, 19 nt, Human
cucuccaccuaacagguau

SEQ ID NO: 675919 - RNA, 22 nt, Human
caggcaccccaggugagcacug

SEQ ID NO: 675920 - RNA, 22 nt, Human
gagcugcagaguaaccuuugca

SEQ ID NO: 675921 - RNA, 22 nt, Human
caccauaaccaacaugucaguu

SEQ ID NO: 675922 - RNA, 22 nt, Human
uuucacagaaagaagcuaguuu

SEQ ID NO: 675923 - RNA, 22 nt, Human
agaucuuuaaaaguuauuauua

SEQ ID NO: 675924 - RNA, 21 nt, Human
cagugaggcccuccuguuccc

SEQ ID NO: 675925 - RNA, 22 nt, Human
gcucagaagauauuugaugcug

SEQ ID NO: 675926 - RNA, 22 nt, Human
cucugugguuagacuauggcug

SEQ ID NO: 675927 - RNA, 22 nt, Human
gccaggcugcuccagggaggcc

SEQ ID NO: 675928 - RNA, 22 nt, Human
uaggacagagcugguuacaaug

SEQ ID NO: 675929 - RNA, 22 nt, Human
augggcagcagcugccauucau

SEQ ID NO: 675930 - RNA, 22 nt, Human
ucccuuggaaaguagccucaca

SEQ ID NO: 675931 - RNA, 21 nt, Human
agaggaagaagaguguauuau

SEQ ID NO: 675932 - RNA, 22 nt, Human
uauagcaauucagaauacaugu

SEQ ID NO: 675933 - RNA, 22 nt, Human
aaauggcuacaagaugugcucu

SEQ ID NO: 675934 - RNA, 18 nt, Human
ucuagaaacccagacucu

SEQ ID NO: 675935 - RNA, 22 nt, Human
ucugugugcccaccugacaccu

SEQ ID NO: 675936 - RNA, 22 nt, Human
acaagagauuaucuacagauga

SEQ ID NO: 675937 - RNA, 21 nt, Human
aguggcugucaagggggccuu

SEQ ID NO: 675938 - RNA, 22 nt, Human
agaacagaugugggcagaccug

SEQ ID NO: 675939 - RNA, 23 nt, Human
agcaggaaaccgagggugauguu

SEQ ID NO: 675940 - RNA, 22 nt, Human
gucccucugggccaucaggucc

SEQ ID NO: 675941 - RNA, 22 nt, Human
cuggccagaguuggagggugug

SEQ ID NO: 675942 - RNA, 22 nt, Human
aucucuccuuaugaagcauuau

SEQ ID NO: 675943 - RNA, 22 nt, Human
uuaaauugucauuugagcaaug

SEQ ID NO: 675944 - RNA, 22 nt, Human
aaaaacacugggcugggaguca

SEQ ID NO: 675945 - RNA, 19 nt, Human
gaauuuuaggacuucagca

SEQ ID NO: 675946 - RNA, 22 nt, Human
gucuucugaucugguuagccau

SEQ ID NO: 675947 - RNA, 22 nt, Human
auaaaaucuuuaugugcucugc

SEQ ID NO: 675948 - RNA, 22 nt, Human
aggcuucaagguucuuggcagg

SEQ ID NO: 675949 - RNA, 22 nt, Human
caaugaaaauuuaaguugcagc

SEQ ID NO: 675950 - RNA, 22 nt, Human
gcacagagucacuagcuaagca

SEQ ID NO: 675951 - RNA, 22 nt, Human
ugcuuaauagugcacugguuuc

SEQ ID NO: 675952 - RNA, 22 nt, Human
cacagagauggccagggcacau

SEQ ID NO: 675953 - RNA, 22 nt, Human
cuucuugggcugccaguuucag

SEQ ID NO: 675954 - RNA, 22 nt, Human
cuauucaguugugggcaacaau

SEQ ID NO: 675955 - RNA, 22 nt, Human
auacauguucguguacauguuc

SEQ ID NO: 675956 - RNA, 22 nt, Human
ucaacaauaggauauagcaggu

SEQ ID NO: 675957 - RNA, 22 nt, Human
ucuguguauuugugaccuguau

SEQ ID NO: 675958 - RNA, 22 nt, Human
gggagggcuuggacccagaugu

SEQ ID NO: 675959 - RNA, 22 nt, Human
ucagcuuucucucgccaucagg

SEQ ID NO: 675960 - RNA, 22 nt, Human
ggcccaguguugccagaccuga

SEQ ID NO: 675961 - RNA, 22 nt, Human
ucccagcccagauuugugugac

SEQ ID NO: 675962 - RNA, 22 nt, Human
aucccucucugcaugacugugu

SEQ ID NO: 675963 - RNA, 22 nt, Human
uguucuaagcugccaaaaugcu

SEQ ID NO: 675964 - RNA, 22 nt, Human
ccaugggcacuggguggaggua

SEQ ID NO: 675965 - RNA, 22 nt, Human
agcagggaauagcggaaagaau

SEQ ID NO: 675966 - RNA, 22 nt, Human
aggugucugugaugggagcgau

SEQ ID NO: 675967 - RNA, 22 nt, Human
agagaaaguaaagauucuaccu

SEQ ID NO: 675968 - RNA, 22 nt, Human
uugcuuuagaaucugcuucugg

SEQ ID NO: 675969 - RNA, 22 nt, Human
cuaauacacccuauugcuuguu

SEQ ID NO: 675970 - RNA, 23 nt, Human
auccagccuggggguuuaaccac

SEQ ID NO: 675971 - RNA, 17 nt, Human
ucuacuccugaaggaag

SEQ ID NO: 675972 - RNA, 21 nt, Human
gcuucagcaaggcuugcuggu

SEQ ID NO: 675973 - RNA, 22 nt, Human
ugguaaagaaggcuagaucuga

SEQ ID NO: 675974 - RNA, 22 nt, Human
uucaugugaauauauuugucuu

SEQ ID NO: 675975 - RNA, 22 nt, Human
ucagagguuacccaugggacag

SEQ ID NO: 675976 - RNA, 22 nt, Human
ucaaagaagauuacccucccau

SEQ ID NO: 675977 - RNA, 22 nt, Human
auggcagaaagaauagaggcua

SEQ ID NO: 675978 - RNA, 21 nt, Human
aggucccagguuugggcagca

SEQ ID NO: 675979 - RNA, 22 nt, Human
ucugguggugggccacaagcau

SEQ ID NO: 675980 - RNA, 22 nt, Human
gcuucagcuuugucuccuuggg

SEQ ID NO: 675981 - RNA, 22 nt, Human
uggcuggggccacaguuuuccu

SEQ ID NO: 675982 - RNA, 22 nt, Human
ugcacacagccagugaguggca

SEQ ID NO: 675983 - RNA, 20 nt, Human
agagagcacaggcaggaaag

SEQ ID NO: 675984 - RNA, 20 nt, Human
cauuugggaucaugagguuu

SEQ ID NO: 675985 - RNA, 22 nt, Human
uucuaacuuaacacuccuguga

SEQ ID NO: 675986 - RNA, 22 nt, Human
ugcauguggaucauauguccua

SEQ ID NO: 675987 - RNA, 18 nt, Human
auacagagaccucaagga

SEQ ID NO: 675988 - RNA, 18 nt, Human
ucucagaggccauccuag

SEQ ID NO: 675989 - RNA, 23 nt, Human
uucaugagauuaucugcaugugu

SEQ ID NO: 675990 - RNA, 22 nt, Human
ucugaagaggcucuugauaaga

SEQ ID NO: 675991 - RNA, 22 nt, Human
uagagguguuguugauauagaa

SEQ ID NO: 675992 - RNA, 22 nt, Human
uuacuggcugggccugagggcu

SEQ ID NO: 675993 - RNA, 22 nt, Human
uggggcagaguaggauuuuggc

SEQ ID NO: 675994 - RNA, 22 nt, Human
uaaagcauguacugugugcuag

SEQ ID NO: 675995 - RNA, 22 nt, Human
cacaguuuugcccagggcuucu

SEQ ID NO: 675996 - RNA, 22 nt, Human
ggacuggacucucaggcucaca

SEQ ID NO: 675997 - RNA, 22 nt, Human
augugcguguguacauauauau

SEQ ID NO: 675998 - RNA, 22 nt, Human
aguaaaaauaugcuuguggcua

SEQ ID NO: 675999 - RNA, 22 nt, Human
uccauccacccugcauuauauu

SEQ ID NO: 676000 - RNA, 22 nt, Human
uggccaggccggggacagaacu

SEQ ID NO: 676001 - RNA, 22 nt, Human
gcuuuagaagacacucuguuuu

SEQ ID NO: 676002 - RNA, 22 nt, Human
agcaagcacacuucaugugaac

SEQ ID NO: 676003 - RNA, 22 nt, Human
cugcuuugaaaauaaacuuguc

SEQ ID NO: 676004 - RNA, 22 nt, Human
gaaacuuuggcuaaaagccaga

SEQ ID NO: 676005 - RNA, 22 nt, Human
ucagccaguugccccaguuagu

SEQ ID NO: 676006 - RNA, 23 nt, Human
gaagccacacaaaggucgccaag

SEQ ID NO: 676007 - RNA, 22 nt, Human
cuaugaccccagcaugaauaag

SEQ ID NO: 676008 - RNA, 22 nt, Human
auucuuuggacaauaaguggug

SEQ ID NO: 676009 - RNA, 22 nt, Human
cagggucccaggagcugcuuuc

SEQ ID NO: 676010 - RNA, 22 nt, Human
gcaggagcccuggcauguucuu

SEQ ID NO: 676011 - RNA, 22 nt, Human
agucuucucauuucacaugcuu

SEQ ID NO: 676012 - RNA, 22 nt, Human
uccagugguacauggagacacu

SEQ ID NO: 676013 - RNA, 22 nt, Human
acugggaaagugcugccugcag

SEQ ID NO: 676014 - RNA, 22 nt, Human
caguacuuugaagauauuuuag

SEQ ID NO: 676015 - RNA, 22 nt, Human
guucucaguucaggaaggacau

SEQ ID NO: 676016 - RNA, 22 nt, Human
uauuugucacugcacuugaaau

SEQ ID NO: 676017 - RNA, 22 nt, Human
cuagggagcacuagcugccuug

SEQ ID NO: 676018 - RNA, 22 nt, Human
guggccagcugucagcacccuu

SEQ ID NO: 676019 - RNA, 22 nt, Human
ucuugaauaaguuucaugagcu

SEQ ID NO: 676020 - RNA, 22 nt, Human
auugagaaaauaaguauggaua

SEQ ID NO: 676021 - RNA, 22 nt, Human
ggacacuggccacauuucaaaa

SEQ ID NO: 676022 - RNA, 22 nt, Human
cacacuuuguugaaguuuucau

SEQ ID NO: 676023 - RNA, 22 nt, Human
gcugaggaagucagguggccca

SEQ ID NO: 676024 - RNA, 22 nt, Human
agacagugauggacaggcagac

SEQ ID NO: 676025 - RNA, 20 nt, Human
agcuguuuacauggauuucu

SEQ ID NO: 676026 - RNA, 20 nt, Human
accagaggaaagagcaguga

SEQ ID NO: 676027 - RNA, 22 nt, Human
cacagagagcuacgugcagcgu

SEQ ID NO: 676028 - RNA, 22 nt, Human
aggcacugugcagucccaagca

SEQ ID NO: 676029 - RNA, 22 nt, Human
agcaacauauaucaaugccuga

SEQ ID NO: 676030 - RNA, 22 nt, Human
uauauuuaaauccagguugaaa

SEQ ID NO: 676031 - RNA, 22 nt, Human
uaauuagaguuugguaaacaau

SEQ ID NO: 676032 - RNA, 20 nt, Human
agaagcaucauucugauguc

SEQ ID NO: 676033 - RNA, 20 nt, Human
ucuuccagguacagucugca

SEQ ID NO: 676034 - RNA, 22 nt, Human
ggaaaugacuuggugcuucguu

SEQ ID NO: 676035 - RNA, 22 nt, Human
ggucagaaggauucugggaaau

SEQ ID NO: 676036 - RNA, 22 nt, Human
ccuucagaccuagacaggaauc

SEQ ID NO: 676037 - RNA, 22 nt, Human
acugccuguuuggcauggcccc

SEQ ID NO: 676038 - RNA, 22 nt, Human
uucuggaguauuccuggcaccu

SEQ ID NO: 676039 - RNA, 22 nt, Human
accauugccuagaaaaauuccu

SEQ ID NO: 676040 - RNA, 22 nt, Human
uucagcuugcugacugcggcag

SEQ ID NO: 676041 - RNA, 22 nt, Human
ugcauguggaccccuggugccu

SEQ ID NO: 676042 - RNA, 22 nt, Human
acagaauacucauaagaagggg

SEQ ID NO: 676043 - RNA, 22 nt, Human
agguauggcauaaaucacaggg

SEQ ID NO: 676044 - RNA, 20 nt, Human
augauuuugcacuaacuuca

SEQ ID NO: 676045 - RNA, 22 nt, Human
caggagcaaggagcagugggau

SEQ ID NO: 676046 - RNA, 22 nt, Human
cuacagaggacacaaagaucuu

SEQ ID NO: 676047 - RNA, 22 nt, Human
uggagcaggacugcugcccuca

SEQ ID NO: 676048 - RNA, 22 nt, Human
uacaacaauuuccacauuagaa

SEQ ID NO: 676049 - RNA, 19 nt, Human
caucacauggucugaugaa

SEQ ID NO: 676050 - RNA, 22 nt, Human
ucagggagagccugucugacgu

SEQ ID NO: 676051 - RNA, 22 nt, Human
ggcucuggugggaagguuagau

SEQ ID NO: 676052 - RNA, 22 nt, Human
aaagcaguaguuuucaaauagu

SEQ ID NO: 676053 - RNA, 22 nt, Human
cugggccuugccaggggugucu

SEQ ID NO: 676054 - RNA, 22 nt, Human
gucagugucuuaacagagauua

SEQ ID NO: 676055 - RNA, 22 nt, Human
gccugggauucccagaggggca

SEQ ID NO: 676056 - RNA, 18 nt, Human
acauuucucucugcguga

SEQ ID NO: 676057 - RNA, 22 nt, Human
ucuacauuuucacaaggucucc

SEQ ID NO: 676058 - RNA, 22 nt, Human
uucagcaugaaaggauuugagu

SEQ ID NO: 676059 - RNA, 22 nt, Human
gcauggcuuccaaaagugcuaa

SEQ ID NO: 676060 - RNA, 21 nt, Human
ccagacuggccuaugugguag

SEQ ID NO: 676061 - RNA, 22 nt, Human
uuugcuucacaaguaugguucu

SEQ ID NO: 676062 - RNA, 22 nt, Human
uuucagauuaucucaacuuugg

SEQ ID NO: 676063 - RNA, 22 nt, Human
gagaaagcuucagaaauggccu

SEQ ID NO: 676064 - RNA, 22 nt, Human
uuuaaauguguucuuaguagcu

SEQ ID NO: 676065 - RNA, 22 nt, Human
aucuuacacgauaacuguuagu

SEQ ID NO: 676066 - RNA, 20 nt, Human
aggcugagggugauuguguc

SEQ ID NO: 676067 - RNA, 16 nt, Human
uaugugugugggagug

SEQ ID NO: 676068 - RNA, 22 nt, Human
uuuagaguaaaaacugugaccu

SEQ ID NO: 676069 - RNA, 22 nt, Human
augcugaggacaaagagaucaa

SEQ ID NO: 676070 - RNA, 22 nt, Human
uacugugugauuccauuuacgu

SEQ ID NO: 676071 - RNA, 22 nt, Human
ggcugccugggagcccuccucu

SEQ ID NO: 676072 - RNA, 22 nt, Human
uuaaacugcagacucaguguuc

SEQ ID NO: 676073 - RNA, 22 nt, Human
aggaaagacuggggccccagaa

SEQ ID NO: 676074 - RNA, 22 nt, Human
ucugccugagaaguggggugcc

SEQ ID NO: 676075 - RNA, 22 nt, Human
caucucuccacggcagcucucg

SEQ ID NO: 676076 - RNA, 22 nt, Human
caugcaguugaagcacagagag

SEQ ID NO: 676077 - RNA, 22 nt, Human
acccucugccuugagcagugcc

SEQ ID NO: 676078 - RNA, 22 nt, Human
ugugaaaugcuauugugacaaa

SEQ ID NO: 676079 - RNA, 22 nt, Human
aaagguuaguucuuagaagugc

SEQ ID NO: 676080 - RNA, 20 nt, Human
agagcugggaagcucccuau

SEQ ID NO: 676081 - RNA, 22 nt, Human
ccuugcguuuuacagcuucuag

SEQ ID NO: 676082 - RNA, 22 nt, Human
agaaauagucacauuggaggaa

SEQ ID NO: 676083 - RNA, 22 nt, Human
ccugggcuugguuguugagaac

SEQ ID NO: 676084 - RNA, 22 nt, Human
gugggcagcaccagggaagugu

SEQ ID NO: 676085 - RNA, 22 nt, Human
ugucacuucaggaaugcaggga

SEQ ID NO: 676086 - RNA, 22 nt, Human
uauuaugagccaggugcugucu

SEQ ID NO: 676087 - RNA, 22 nt, Human
ucucuuaaauacuucacaucuc

SEQ ID NO: 676088 - RNA, 22 nt, Human
uaacuuuuacauuuggcucacu

SEQ ID NO: 676089 - RNA, 22 nt, Human
uuagggaaagcagcauucccuu

SEQ ID NO: 676090 - RNA, 22 nt, Human
cacauuucuaggaaauuaaaug

SEQ ID NO: 676091 - RNA, 22 nt, Human
cagaaaauaaaguuucuacgca

SEQ ID NO: 676092 - RNA, 22 nt, Human
aucagugcuucauagcccuggu

SEQ ID NO: 676093 - RNA, 22 nt, Human
ucccuuaaaacucauguguugu

SEQ ID NO: 676094 - RNA, 22 nt, Human
gaagaugugggaacugcugaaa

SEQ ID NO: 676095 - RNA, 17 nt, Human
uguuugguugauuggug

SEQ ID NO: 676096 - RNA, 22 nt, Human
auacuguacgucccagauagga

SEQ ID NO: 676097 - RNA, 22 nt, Human
aggucugauauuuguuguauga

SEQ ID NO: 676098 - RNA, 22 nt, Human
agcauauugucuuuggugucuc

SEQ ID NO: 676099 - RNA, 22 nt, Human
acugaaauacugcucuuggauu

SEQ ID NO: 676100 - RNA, 22 nt, Human
caguccaggccuggaggagcca

SEQ ID NO: 676101 - RNA, 22 nt, Human
guuucuuaauagcaggggccaa

SEQ ID NO: 676102 - RNA, 22 nt, Human
ugagcagaggccagcaccuggg

SEQ ID NO: 676103 - RNA, 22 nt, Human
gcugccuggcugaugaaaauuc

SEQ ID NO: 676104 - RNA, 22 nt, Human
aacacuuucuauuauuaugguu

SEQ ID NO: 676105 - RNA, 22 nt, Human
aauggcuucugaagcacacuuu

SEQ ID NO: 676106 - RNA, 22 nt, Human
aagggggcggcagccaguggaa

SEQ ID NO: 676107 - RNA, 22 nt, Human
ucagacagucaucagagcuugu

SEQ ID NO: 676108 - RNA, 19 nt, Human
cugggaguucacugcugcc

SEQ ID NO: 676109 - RNA, 23 nt, Human
ugacagagcaagacuuggucuca

SEQ ID NO: 676110 - RNA, 19 nt, Human
agcuggggcgguguguguu

SEQ ID NO: 676111 - RNA, 22 nt, Human
ugucuucagcagucaucugggg

SEQ ID NO: 676112 - RNA, 19 nt, Human
cagcccucuuaccacugug

SEQ ID NO: 676113 - RNA, 22 nt, Human
uggcagcacuagguacugagcu

SEQ ID NO: 676114 - RNA, 22 nt, Human
ucugaauuuuaacuacacaaag

SEQ ID NO: 676115 - RNA, 22 nt, Human
uauagcaacuccaaagagacuu

SEQ ID NO: 676116 - RNA, 22 nt, Human
gcaggcugauagaggauuccau

SEQ ID NO: 676117 - RNA, 22 nt, Human
cuucuuaaagauuacacaauga

SEQ ID NO: 676118 - RNA, 22 nt, Human
caggagacaauggcuguggggc

SEQ ID NO: 676119 - RNA, 22 nt, Human
aagcauuugugaaauucagaug

SEQ ID NO: 676120 - RNA, 22 nt, Human
uguuacagucauuguuuucuga

SEQ ID NO: 676121 - RNA, 22 nt, Human
uuacagagcuggguggagagag

SEQ ID NO: 676122 - RNA, 22 nt, Human
ugcagguucugaccagccaacu

SEQ ID NO: 676123 - RNA, 22 nt, Human
uuucagacauagccugauucug

SEQ ID NO: 676124 - RNA, 22 nt, Human
gcacugaacuuuaaucauuucu

SEQ ID NO: 676125 - RNA, 22 nt, Human
ccucccuuuuggugucugcaua

SEQ ID NO: 676126 - RNA, 23 nt, Human
ugcugcccacucuuccagcccuc

SEQ ID NO: 676127 - RNA, 22 nt, Human
ugcaccccauuuuacauuuaca

SEQ ID NO: 676128 - RNA, 22 nt, Human
cagaagcaaguagugauucuuu

SEQ ID NO: 676129 - RNA, 22 nt, Human
cugagagguaaucacacaaaau

SEQ ID NO: 676130 - RNA, 21 nt, Human
uucuucaaagaagaaggcaca

SEQ ID NO: 676131 - RNA, 19 nt, Human
acccucucuguagaaagau

SEQ ID NO: 676132 - RNA, 22 nt, Human
uuccuuaaugaaucaggccauu

SEQ ID NO: 676133 - RNA, 22 nt, Human
aaaggagaaaacauacaggacu

SEQ ID NO: 676134 - RNA, 22 nt, Human
cacacauugaauucauucuugu

SEQ ID NO: 676135 - RNA, 22 nt, Human
caaagaauagugagaagaugua

SEQ ID NO: 676136 - RNA, 17 nt, Human
ugauaguucauuuuaag

SEQ ID NO: 676137 - RNA, 22 nt, Human
ucauggauggccgggaggugau

SEQ ID NO: 676138 - RNA, 22 nt, Human
ggacacuguucauggggagggg

SEQ ID NO: 676139 - RNA, 22 nt, Human
aaagagccgcugaugucagccc

SEQ ID NO: 676140 - RNA, 22 nt, Human
uggaaauacuugccauaaaacu

SEQ ID NO: 676141 - RNA, 22 nt, Human
ggaaauauuuugucuaauuugu

SEQ ID NO: 676142 - RNA, 22 nt, Human
gggcagugucggggcccaggga

SEQ ID NO: 676143 - RNA, 22 nt, Human
ugacagucugcaguuuuaaaaa

SEQ ID NO: 676144 - RNA, 22 nt, Human
uccugggaagagaccugagcau

SEQ ID NO: 676145 - RNA, 22 nt, Human
uucuccaggggaggguucucca

SEQ ID NO: 676146 - RNA, 22 nt, Human
uugcauuuugguuguaaauaug

SEQ ID NO: 676147 - RNA, 22 nt, Human
aaggcagauauaaagacuagag

SEQ ID NO: 676148 - RNA, 22 nt, Human
aaauuugauaagccauuguuac

SEQ ID NO: 676149 - RNA, 22 nt, Human
uagggagaaacaccaauuuauu

SEQ ID NO: 676150 - RNA, 22 nt, Human
gccccugggagcagagccacca

SEQ ID NO: 676151 - RNA, 22 nt, Human
cagagcugacccaaggauugaa

SEQ ID NO: 676152 - RNA, 22 nt, Human
cagagggaucaucuuccugaag

SEQ ID NO: 676153 - RNA, 22 nt, Human
gagauuuucagcuugacuggga

SEQ ID NO: 676154 - RNA, 22 nt, Human
cccuggugguacggcacuggca

SEQ ID NO: 676155 - RNA, 22 nt, Human
cugaaguuaguuaugccuaaaa

SEQ ID NO: 676156 - RNA, 22 nt, Human
gggaagcaggugcagcucgccu

SEQ ID NO: 676157 - RNA, 22 nt, Human
aaagcuauucaacacgaacaug

SEQ ID NO: 676158 - RNA, 21 nt, Human
uugaaggaucacuucuguacc

SEQ ID NO: 676159 - RNA, 22 nt, Human
acaacugaugggucauguggga

SEQ ID NO: 676160 - RNA, 22 nt, Human
auccagcacuuguucaugugaa

SEQ ID NO: 676161 - RNA, 22 nt, Human
aggauucgggcauaaagccauu

SEQ ID NO: 676162 - RNA, 22 nt, Human
uuggacugagaguuccaccauu

SEQ ID NO: 676163 - RNA, 22 nt, Human
ugugucuguguauacacggcau

SEQ ID NO: 676164 - RNA, 22 nt, Human
cggggccuagucuaccucggca

SEQ ID NO: 676165 - RNA, 22 nt, Human
acagccauagaugcuuauguaa

SEQ ID NO: 676166 - RNA, 20 nt, Human
aguucacaggccaaauuucu

SEQ ID NO: 676167 - RNA, 22 nt, Human
uaagaaugacaaccauaccauu

SEQ ID NO: 676168 - RNA, 22 nt, Human
cacagaggacuguagcggggag

SEQ ID NO: 676169 - RNA, 22 nt, Human
gcuuucugugcagugaacacua

SEQ ID NO: 676170 - RNA, 22 nt, Human
ggaggccaaggcgggcggauca

SEQ ID NO: 676171 - RNA, 22 nt, Human
auugaauagaugcauuauacua

SEQ ID NO: 676172 - RNA, 22 nt, Human
cuguggaguccuggggaaugga

SEQ ID NO: 676173 - RNA, 22 nt, Human
auacagcugccuucuaacuaug

SEQ ID NO: 676174 - RNA, 22 nt, Human
auguagagcaguguuguccaau

SEQ ID NO: 676175 - RNA, 22 nt, Human
ggccggggccuccccgcgucgc

SEQ ID NO: 676176 - RNA, 22 nt, Human
guccacagggauggccacacau

SEQ ID NO: 676177 - RNA, 18 nt, Human
ggcuccgacgggccgugc

SEQ ID NO: 676178 - RNA, 22 nt, Human
aaguauuucguucugaaaaagu

SEQ ID NO: 676179 - RNA, 22 nt, Human
gagagacugauguggcuaugua

SEQ ID NO: 676180 - RNA, 23 nt, Human
agguggccuuugccucuuucucu

SEQ ID NO: 676181 - RNA, 22 nt, Human
uacagacaguuuuucagauauu

SEQ ID NO: 676182 - RNA, 22 nt, Human
ucuucuggaugagagcggaggc

SEQ ID NO: 676183 - RNA, 22 nt, Human
ucugugcuagaggaguuggcca

SEQ ID NO: 676184 - RNA, 22 nt, Human
uuauacaggagauuccuuacuu

SEQ ID NO: 676185 - RNA, 22 nt, Human
agaggggagagcuaagcaauuc

SEQ ID NO: 676186 - RNA, 22 nt, Human
cauguauagcaaauauuuguuc

SEQ ID NO: 676187 - RNA, 20 nt, Human
aacacacugguggcaucagg

SEQ ID NO: 676188 - RNA, 23 nt, Human
uuacaacuauuugccauguuguu

SEQ ID NO: 676189 - RNA, 22 nt, Human
ccaggcccugccugugguuccu

SEQ ID NO: 676190 - RNA, 22 nt, Human
cuguguacccacgugggcaccc

SEQ ID NO: 676191 - RNA, 22 nt, Human
agcugagcauuugauccaccuc

SEQ ID NO: 676192 - RNA, 18 nt, Human
ugucaguaaagugacaga

SEQ ID NO: 676193 - RNA, 22 nt, Human
agacaagagcugaggacauauu

SEQ ID NO: 676194 - RNA, 22 nt, Human
aagcagaguccccuucccaugg

SEQ ID NO: 676195 - RNA, 22 nt, Human
ugggcucaggaccccagaggcc

SEQ ID NO: 676196 - RNA, 22 nt, Human
cuguuaucuguuauugccaguu

SEQ ID NO: 676197 - RNA, 22 nt, Human
ggcaggcacuguguuuuguguu

SEQ ID NO: 676198 - RNA, 23 nt, Human
cuggcucuguagguggcauccuu

SEQ ID NO: 676199 - RNA, 20 nt, Human
uaggacaggcagccgagggg

SEQ ID NO: 676200 - RNA, 22 nt, Human
aaagaagacagacauuucuuuc

SEQ ID NO: 676201 - RNA, 22 nt, Human
agugaaagguugagaauauucu

SEQ ID NO: 676202 - RNA, 22 nt, Human
gagguccaacacaauggguguu

SEQ ID NO: 676203 - RNA, 22 nt, Human
aaagacuuggcuuaugauuugc

SEQ ID NO: 676204 - RNA, 22 nt, Human
uggcaagaauauuggaccagaa

SEQ ID NO: 676205 - RNA, 22 nt, Human
aaagaguugaggcaguuaucca

SEQ ID NO: 676206 - RNA, 19 nt, Human
gauagcugaugaccaucau

SEQ ID NO: 676207 - RNA, 22 nt, Human
cagugguggaaugaggaauugu

SEQ ID NO: 676208 - RNA, 22 nt, Human
uggcagugcugcagugcccuua

SEQ ID NO: 676209 - RNA, 22 nt, Human
ucuuugaucagccuuucacuga

SEQ ID NO: 676210 - RNA, 22 nt, Human
ggcuucagaggggagguagugc

SEQ ID NO: 676211 - RNA, 18 nt, Human
ucccuggggcugccaccc

SEQ ID NO: 676212 - RNA, 22 nt, Human
ucagaacagcgagaauauucac

SEQ ID NO: 676213 - RNA, 22 nt, Human
ucagaggugcaagaaguucuga

SEQ ID NO: 676214 - RNA, 22 nt, Human
ccugguggccuucagcccacaa

SEQ ID NO: 676215 - RNA, 22 nt, Human
gacaugcaaugcagugguaagu

SEQ ID NO: 676216 - RNA, 18 nt, Human
aucugcuggcaggucugg

SEQ ID NO: 676217 - RNA, 23 nt, Human
uaauugcuugaguuaguaauaca

SEQ ID NO: 676218 - RNA, 22 nt, Human
agauguggcugcacccaccgcu

SEQ ID NO: 676219 - RNA, 22 nt, Human
auggaaugugaacaugauggca

SEQ ID NO: 676220 - RNA, 19 nt, Human
uggagggguuugaaugugg

SEQ ID NO: 676221 - RNA, 22 nt, Human
acaguguuguauuuaguuugau

SEQ ID NO: 676222 - RNA, 22 nt, Human
uugaaaacuuucuagaccaaga

SEQ ID NO: 676223 - RNA, 22 nt, Human
gagauguuuugcugagaauggg

SEQ ID NO: 676224 - RNA, 22 nt, Human
augucucugccccagagagcuu

SEQ ID NO: 676225 - RNA, 22 nt, Human
accacuggauaucagagaugua

SEQ ID NO: 676226 - RNA, 22 nt, Human
cuggcugugcuggaguugagga

SEQ ID NO: 676227 - RNA, 22 nt, Human
ucagcaaaauguggcuagugcu

SEQ ID NO: 676228 - RNA, 22 nt, Human
auucaguuuuuauuggaccagc

SEQ ID NO: 676229 - RNA, 22 nt, Human
cagcuguugcagcacugagaga

SEQ ID NO: 676230 - RNA, 22 nt, Human
aggggagcuaacaccagagccc

SEQ ID NO: 676231 - RNA, 22 nt, Human
aggaugagagauacauggagca

SEQ ID NO: 676232 - RNA, 22 nt, Human
cccagcaggugccaucacucug

SEQ ID NO: 676233 - RNA, 22 nt, Human
cuucucccuggcuucugcacac

SEQ ID NO: 676234 - RNA, 22 nt, Human
uaaggcaccuguccaggcuggg

SEQ ID NO: 676235 - RNA, 19 nt, Human
gcaggucauuaggcuaggu

SEQ ID NO: 676236 - RNA, 22 nt, Human
gguuuucaaagaggcauuucau

SEQ ID NO: 676237 - RNA, 22 nt, Human
aucuggcuauugacauguuaua

SEQ ID NO: 676238 - RNA, 22 nt, Human
augcauguuaagcucuuaaaau

SEQ ID NO: 676239 - RNA, 22 nt, Human
cuuugcaaacgauuaccacaug

SEQ ID NO: 676240 - RNA, 22 nt, Human
caugcucacaaaagauggcaaa

SEQ ID NO: 676241 - RNA, 22 nt, Human
aggcacaguggcucacaccugu

SEQ ID NO: 676242 - RNA, 22 nt, Human
ccaggcuucccugagaggcugc

SEQ ID NO: 676243 - RNA, 22 nt, Human
acacaugcauaagccuucccuu

SEQ ID NO: 676244 - RNA, 22 nt, Human
gaaaucugucuuuguuugaaua

SEQ ID NO: 676245 - RNA, 16 nt, Human
agccaggcugccucgg

SEQ ID NO: 676246 - RNA, 22 nt, Human
uuagagaaauucugguaaugua

SEQ ID NO: 676247 - RNA, 22 nt, Human
cugagcugguggaagcaugcag

SEQ ID NO: 676248 - RNA, 22 nt, Human
aaaaccacaguuacuuuugcac

SEQ ID NO: 676249 - RNA, 22 nt, Human
aaaggccaagcaugagguggac

SEQ ID NO: 676250 - RNA, 22 nt, Human
ccugaccuccaaguggcucugg

SEQ ID NO: 676251 - RNA, 22 nt, Human
aguguaagugaucauugauagu

SEQ ID NO: 676252 - RNA, 22 nt, Human
aguaccauuacucacuuauuuu

SEQ ID NO: 676253 - RNA, 22 nt, Human
ugagcugucuaugguccugucu

SEQ ID NO: 676254 - RNA, 22 nt, Human
cauuucaaugccuucaacauag

SEQ ID NO: 676255 - RNA, 22 nt, Human
uggucaguugugacuagaacac

SEQ ID NO: 676256 - RNA, 22 nt, Human
uacaguuucucauuaugcucuc

SEQ ID NO: 676257 - RNA, 22 nt, Human
uauaaaugccaggacuuuagau

SEQ ID NO: 676258 - RNA, 22 nt, Human
aggcagcagcuugcugguugcc

SEQ ID NO: 676259 - RNA, 22 nt, Human
gccauguuuugguaaauaccau

SEQ ID NO: 676260 - RNA, 22 nt, Human
uaaugccaauuuaaugauccau

SEQ ID NO: 676261 - RNA, 22 nt, Human
uggaggucugcaaggcgcugga

SEQ ID NO: 676262 - RNA, 22 nt, Human
uugaaauggaagugaaaauucu

SEQ ID NO: 676263 - RNA, 22 nt, Human
cauggcuuaccccaggagcagc

SEQ ID NO: 676264 - RNA, 22 nt, Human
cacaccagcauggucucagugu

SEQ ID NO: 676265 - RNA, 22 nt, Human
aggauucagaauguaugcagug

SEQ ID NO: 676266 - RNA, 22 nt, Human
ccuuugggguccugccugggcu

SEQ ID NO: 676267 - RNA, 15 nt, Human
ugcagagguaccugg

SEQ ID NO: 676268 - RNA, 22 nt, Human
cagcaagauuuuuaaagcaagg

SEQ ID NO: 676269 - RNA, 18 nt, Human
aagugacuggcaggccaa

SEQ ID NO: 676270 - RNA, 22 nt, Human
augaggcauagcagggaucgga

SEQ ID NO: 676271 - RNA, 22 nt, Human
aaggccagauucacuuuacaau

SEQ ID NO: 676272 - RNA, 22 nt, Human
uauguacaucuugagcaaugaa

SEQ ID NO: 676273 - RNA, 22 nt, Human
gguggcugaagcagucuucggg

SEQ ID NO: 676274 - RNA, 22 nt, Human
uaggaaauugccaauauaugac

SEQ ID NO: 676275 - RNA, 22 nt, Human
caggcacaagaucggcuagaua

SEQ ID NO: 676276 - RNA, 22 nt, Human
gccacugauuccaagucaauuu

SEQ ID NO: 676277 - RNA, 22 nt, Human
gagccuggagcuggaacgaagc

SEQ ID NO: 676278 - RNA, 22 nt, Human
aaagagcuuuagaaaucucaga

SEQ ID NO: 676279 - RNA, 22 nt, Human
ggugugggggcagcucugauau

SEQ ID NO: 676280 - RNA, 20 nt, Human
acgugugugugcacgcgcgc

SEQ ID NO: 676281 - RNA, 22 nt, Human
aucuggagagaucuucacaaaa

SEQ ID NO: 676282 - RNA, 22 nt, Human
gaugggcguggcgcguuuggug

SEQ ID NO: 676283 - RNA, 20 nt, Human
ugcugcugugagcgucccug

SEQ ID NO: 676284 - RNA, 22 nt, Human
aauggagacccuaaggaagagg

SEQ ID NO: 676285 - RNA, 22 nt, Human
gcugggcaacggaagagagaaa

SEQ ID NO: 676286 - RNA, 22 nt, Human
gagcauggaucaugugcugggu

SEQ ID NO: 676287 - RNA, 22 nt, Human
augaauaaaacauuuuaaucag

SEQ ID NO: 676288 - RNA, 22 nt, Human
ugcuucugaguugcaggacuug

SEQ ID NO: 676289 - RNA, 21 nt, Human
ugccaggccugagcugggguc

SEQ ID NO: 676290 - RNA, 22 nt, Human
uaaguucaaugaacucaguucu

SEQ ID NO: 676291 - RNA, 22 nt, Human
ccagaagaccccguccaccucc

SEQ ID NO: 676292 - RNA, 22 nt, Human
auguagcaugaggcacugugcc

SEQ ID NO: 676293 - RNA, 22 nt, Human
aaaugugucaguuucauucucu

SEQ ID NO: 676294 - RNA, 22 nt, Human
cagaaagugauuugcuauucca

SEQ ID NO: 676295 - RNA, 18 nt, Human
ucccugggauauaauuac

SEQ ID NO: 676296 - RNA, 22 nt, Human
ucacauuuuaucugagauugac

SEQ ID NO: 676297 - RNA, 22 nt, Human
gcagccucaaacuccccagcuc

SEQ ID NO: 676298 - RNA, 22 nt, Human
ucaauucauagaguugacacag

SEQ ID NO: 676299 - RNA, 22 nt, Human
ccacugcccccugaagaccagg

SEQ ID NO: 676300 - RNA, 22 nt, Human
ugcccugccaagaccaaguggu

SEQ ID NO: 676301 - RNA, 19 nt, Human
acagcagguguggggauaa

SEQ ID NO: 676302 - RNA, 22 nt, Human
aagccaguuagcacaucauugc

SEQ ID NO: 676303 - RNA, 22 nt, Human
ugugcagagaagccacuggggg

SEQ ID NO: 676304 - RNA, 22 nt, Human
uaguauuuuagaaaaccaugaa

SEQ ID NO: 676305 - RNA, 22 nt, Human
uagcuuuaggcacguuugaauu

SEQ ID NO: 676306 - RNA, 22 nt, Human
gucuuuuugucuggcagagguc

SEQ ID NO: 676307 - RNA, 22 nt, Human
aaaaguauccacagcucaggag

SEQ ID NO: 676308 - RNA, 22 nt, Human
aguauaauuuacauuugguauu

SEQ ID NO: 676309 - RNA, 22 nt, Human
cuauggcucaauucuagugguu

SEQ ID NO: 676310 - RNA, 22 nt, Human
ccagaggagcauggccuugaga

SEQ ID NO: 676311 - RNA, 22 nt, Human
aacaauguccugugagaugaua

SEQ ID NO: 676312 - RNA, 22 nt, Human
acccuugguuuugcagagcugu

SEQ ID NO: 676313 - RNA, 22 nt, Human
ccaggugugccagcagggacug

SEQ ID NO: 676314 - RNA, 20 nt, Human
ucaggugacacacguggcac

SEQ ID NO: 676315 - RNA, 22 nt, Human
ucuguucuuguccccacuucag

SEQ ID NO: 676316 - RNA, 22 nt, Human
auccucaguguuucugacaucu

SEQ ID NO: 676317 - RNA, 22 nt, Human
uccuggauucugcccugaaggc

SEQ ID NO: 676318 - RNA, 22 nt, Human
uagagguguugacgccaaggua

SEQ ID NO: 676319 - RNA, 22 nt, Human
cucaguuuugcuagcuggaguu

SEQ ID NO: 676320 - RNA, 22 nt, Human
auaagguuaggauuauaguguu

SEQ ID NO: 676321 - RNA, 22 nt, Human
guugaguguugugcaugcacca

SEQ ID NO: 676322 - RNA, 22 nt, Human
ugaguguauaucaggagagagc

SEQ ID NO: 676323 - RNA, 23 nt, Human
uagaaucuguauuucugcaguuc

SEQ ID NO: 676324 - RNA, 22 nt, Human
cagaacuuggcaaagccgacug

SEQ ID NO: 676325 - RNA, 22 nt, Human
uuuucaguuacuguuuauguga

SEQ ID NO: 676326 - RNA, 22 nt, Human
gaggcagcggcucacagagaaa

SEQ ID NO: 676327 - RNA, 22 nt, Human
aacagcauauuucauauauuga

SEQ ID NO: 676328 - RNA, 22 nt, Human
ucugcuguugagcacaagugaa

SEQ ID NO: 676329 - RNA, 22 nt, Human
cugugucuaaucuuauacauca

SEQ ID NO: 676330 - RNA, 22 nt, Human
cugucugucccgucaccgcccc

SEQ ID NO: 676331 - RNA, 22 nt, Human
ccuggcugugcauugccggccc

SEQ ID NO: 676332 - RNA, 22 nt, Human
gaggcccagcauucagggcagg

SEQ ID NO: 676333 - RNA, 22 nt, Human
acagcccagaaagccuaagggg

SEQ ID NO: 676334 - RNA, 22 nt, Human
cauucauuuacuuucaacagcu

SEQ ID NO: 676335 - RNA, 19 nt, Human
cagagagaccaaggcgcca

SEQ ID NO: 676336 - RNA, 22 nt, Human
uuuaauauccaguggauacaaa

SEQ ID NO: 676337 - RNA, 22 nt, Human
ggucuggcaggugaggacucag

SEQ ID NO: 676338 - RNA, 22 nt, Human
aauuccauaucugugauuauua

SEQ ID NO: 676339 - RNA, 22 nt, Human
cuucuggcaaaacaggcagaaa

SEQ ID NO: 676340 - RNA, 22 nt, Human
uugaagacacagacauauagag

SEQ ID NO: 676341 - RNA, 22 nt, Human
uuccagccacuuuauacugcua

SEQ ID NO: 676342 - RNA, 23 nt, Human
aggugcagcccuggaccugcccc

SEQ ID NO: 676343 - RNA, 22 nt, Human
acaugucuuguggcuuugaucu

SEQ ID NO: 676344 - RNA, 22 nt, Human
gugcccuggcucacagugucuc

SEQ ID NO: 676345 - RNA, 19 nt, Human
agguggucuaggcuggaga

SEQ ID NO: 676346 - RNA, 22 nt, Human
guuucuaugguuuauauuacug

SEQ ID NO: 676347 - RNA, 16 nt, Human
uagggcugggaaggag

SEQ ID NO: 676348 - RNA, 22 nt, Human
guucuucaguucaggcuguuca

SEQ ID NO: 676349 - RNA, 22 nt, Human
uuacaaacaacagacauuuauu

SEQ ID NO: 676350 - RNA, 22 nt, Human
gccuucagcggccgcucgcugc

SEQ ID NO: 676351 - RNA, 19 nt, Human
cuggggcuuugguacugcc

SEQ ID NO: 676352 - RNA, 19 nt, Human
agucucacccaagcagucu

SEQ ID NO: 676353 - RNA, 22 nt, Human
uacauugauggaguaccuagcu

SEQ ID NO: 676354 - RNA, 18 nt, Human
uggggucucucagguaag

SEQ ID NO: 676355 - RNA, 23 nt, Human
acaccugugcuguagucacuaca

SEQ ID NO: 676356 - RNA, 22 nt, Human
cagcucuucagugccugagaua

SEQ ID NO: 676357 - RNA, 22 nt, Human
aacuccaugguucucagauucu

SEQ ID NO: 676358 - RNA, 22 nt, Human
ccacagggcacaagggagguug

SEQ ID NO: 676359 - RNA, 23 nt, Human
aaauuauugcucuucaauugccu

SEQ ID NO: 676360 - RNA, 22 nt, Human
agggucagagaucggccaugug

SEQ ID NO: 676361 - RNA, 22 nt, Human
uuuaauauuucuuuccugaagc

SEQ ID NO: 676362 - RNA, 22 nt, Human
agaaagaggaugcagaucucau

SEQ ID NO: 676363 - RNA, 22 nt, Human
cuggcacauagucagcacucaa

SEQ ID NO: 676364 - RNA, 22 nt, Human
uagcugucagcaaucaaguggu

SEQ ID NO: 676365 - RNA, 22 nt, Human
ggccaggagauggacaccacau

SEQ ID NO: 676366 - RNA, 22 nt, Human
uuucacagcugauaccucuucc

SEQ ID NO: 676367 - RNA, 18 nt, Human
ucugccugcagggcaucu

SEQ ID NO: 676368 - RNA, 22 nt, Human
gucugccugucuggaugacaga

SEQ ID NO: 676369 - RNA, 22 nt, Human
aagugagugguaaggagcaugg

SEQ ID NO: 676370 - RNA, 22 nt, Human
uuaggaaguguguccagaagcg

SEQ ID NO: 676371 - RNA, 22 nt, Human
ugccaggcauauggccucuuug

SEQ ID NO: 676372 - RNA, 22 nt, Human
ucacaugcuacugagccagacc

SEQ ID NO: 676373 - RNA, 22 nt, Human
caggagaagguuuggagugcag

SEQ ID NO: 676374 - RNA, 22 nt, Human
auuuucagcccccacucguggc

SEQ ID NO: 676375 - RNA, 22 nt, Human
cagugguuccuguucuucuggg

SEQ ID NO: 676376 - RNA, 22 nt, Human
gaaagcaauuuguguaaucugu

SEQ ID NO: 676377 - RNA, 21 nt, Human
agaugcugugcuccaggagca

SEQ ID NO: 676378 - RNA, 22 nt, Human
gggcugggauugcuugcuguga

SEQ ID NO: 676379 - RNA, 22 nt, Human
uugagggucuggaucugcugcu

SEQ ID NO: 676380 - RNA, 22 nt, Human
cugcagagcaaguaacauccuc

SEQ ID NO: 676381 - RNA, 22 nt, Human
ucugcagaagaauuaaggacag

SEQ ID NO: 676382 - RNA, 22 nt, Human
gccuggcugcuagccagaggca

SEQ ID NO: 676383 - RNA, 22 nt, Human
uuaacacagggggagacaaagu

SEQ ID NO: 676384 - RNA, 22 nt, Human
auugcugguagucagugucccu

SEQ ID NO: 676385 - RNA, 22 nt, Human
uuacagaaggaacacuacucag

SEQ ID NO: 676386 - RNA, 22 nt, Human
uugacaggauauaaagacauaa

SEQ ID NO: 676387 - RNA, 22 nt, Human
aaacaaugaaauauuuuuaugg

SEQ ID NO: 676388 - RNA, 22 nt, Human
uggcagcauuaauuauucaggu

SEQ ID NO: 676389 - RNA, 22 nt, Human
uuuccucuucgauuaaguuugg

SEQ ID NO: 676390 - RNA, 22 nt, Human
aggccaggccuuucuccauucc

SEQ ID NO: 676391 - RNA, 22 nt, Human
ggcugccuugacccuggcuccg

SEQ ID NO: 676392 - RNA, 22 nt, Human
caggugaccuuuguccuaaguu

SEQ ID NO: 676393 - RNA, 22 nt, Human
uacaucauaauaauacuuagaa

SEQ ID NO: 676394 - RNA, 22 nt, Human
agaguucugaaauuaucuuuac

SEQ ID NO: 676395 - RNA, 22 nt, Human
gagcuggaggcagugcugaggu

SEQ ID NO: 676396 - RNA, 22 nt, Human
cucagagaagauggaugaggua

SEQ ID NO: 676397 - RNA, 22 nt, Human
uucagauaaacuacaaauaauu

SEQ ID NO: 676398 - RNA, 22 nt, Human
cauguguggagggcaugcaugg

SEQ ID NO: 676399 - RNA, 22 nt, Human
gcaauaaaauguaaugauuggg

SEQ ID NO: 676400 - RNA, 22 nt, Human
uccuugaagcaacgugcagaca

SEQ ID NO: 676401 - RNA, 16 nt, Human
aagccaguucagcauu

SEQ ID NO: 676402 - RNA, 22 nt, Human
uacaagugugcaccaccauguc

SEQ ID NO: 676403 - RNA, 22 nt, Human
cacagacagugucccuuuguug

SEQ ID NO: 676404 - RNA, 22 nt, Human
acacauuuacauguuuacguau

SEQ ID NO: 676405 - RNA, 22 nt, Human
ugcuugauggcucuucuuucua

SEQ ID NO: 676406 - RNA, 22 nt, Human
ggguggguggcagcaccgaggc

SEQ ID NO: 676407 - RNA, 22 nt, Human
gcuccaggaagggaaaucucca

SEQ ID NO: 676408 - RNA, 22 nt, Human
agagcuggagaugcagguuucg

SEQ ID NO: 676409 - RNA, 22 nt, Human
uuacagaucaucaagguauaau

SEQ ID NO: 676410 - RNA, 22 nt, Human
uucagcauagcagcuucaggac

SEQ ID NO: 676411 - RNA, 22 nt, Human
cauuccagaugaggccaggccc

SEQ ID NO: 676412 - RNA, 22 nt, Human
uucucuguaguugccuggugga

SEQ ID NO: 676413 - RNA, 22 nt, Human
guucacagucuacauaguaaag

SEQ ID NO: 676414 - RNA, 22 nt, Human
cccaggcucuuaugugacuugc

SEQ ID NO: 676415 - RNA, 22 nt, Human
ggagccuggccuggcucugugu

SEQ ID NO: 676416 - RNA, 22 nt, Human
cagucacacaaguggacuuggg

SEQ ID NO: 676417 - RNA, 22 nt, Human
uggugggagugagggcaugcca

SEQ ID NO: 676418 - RNA, 22 nt, Human
ucuggcucaggucagacaggga

SEQ ID NO: 676419 - RNA, 22 nt, Human
aggaagcuggugugaggaugaa

SEQ ID NO: 676420 - RNA, 23 nt, Human
ucucucuuagcuaugcuuauggc

SEQ ID NO: 676421 - RNA, 22 nt, Human
gaauguuuuuauaaguguuaca

SEQ ID NO: 676422 - RNA, 22 nt, Human
ccagucaaaaggaagucaaugu

SEQ ID NO: 676423 - RNA, 22 nt, Human
gcaggggcuaaggacacagaga

SEQ ID NO: 676424 - RNA, 22 nt, Human
gucauauuauaaauguucuguu

SEQ ID NO: 676425 - RNA, 22 nt, Human
uguagaaacuacacaugcaaca

SEQ ID NO: 676426 - RNA, 22 nt, Human
ggggucugcugcggagcagaga

SEQ ID NO: 676427 - RNA, 22 nt, Human
augcauaugcauggacacucag

SEQ ID NO: 676428 - RNA, 22 nt, Human
ucacauuuucauauucucugag

SEQ ID NO: 676429 - RNA, 22 nt, Human
augcuuuaaaacguauguguaa

SEQ ID NO: 676430 - RNA, 22 nt, Human
uuccuaacaagggguauucauc

SEQ ID NO: 676431 - RNA, 20 nt, Human
auguucuucauuuaauguuc

SEQ ID NO: 676432 - RNA, 22 nt, Human
uuuagcauuaagcuuuucaaau

SEQ ID NO: 676433 - RNA, 22 nt, Human
uucacauuucauaccacagcuu

SEQ ID NO: 676434 - RNA, 22 nt, Human
uggaaagcaguucuuagaaucg

SEQ ID NO: 676435 - RNA, 22 nt, Human
aacauuaauuacagucaaacau

SEQ ID NO: 676436 - RNA, 22 nt, Human
gccugcaguucugugcuaggca

SEQ ID NO: 676437 - RNA, 22 nt, Human
acaguguggaaagucaacuuga

SEQ ID NO: 676438 - RNA, 22 nt, Human
ccuucagcguccccuuuacccg

SEQ ID NO: 676439 - RNA, 22 nt, Human
uugcauugauguuccuucuugc

SEQ ID NO: 676440 - RNA, 22 nt, Human
aaagugcagaacuguucucacu

SEQ ID NO: 676441 - RNA, 22 nt, Human
gcuuuacacagcugguucuugu

SEQ ID NO: 676442 - RNA, 22 nt, Human
cugugauguuagcucuguguua

SEQ ID NO: 676443 - RNA, 22 nt, Human
uucacaagucauuagcugcaua

SEQ ID NO: 676444 - RNA, 22 nt, Human
cagaauguuaccaguuagucug

SEQ ID NO: 676445 - RNA, 22 nt, Human
ggggccccucggacacgugcgg

SEQ ID NO: 676446 - RNA, 22 nt, Human
aggcugccgcagccaaugguug

SEQ ID NO: 676447 - RNA, 20 nt, Human
ucauauugauguagagcagc

SEQ ID NO: 676448 - RNA, 22 nt, Human
caugggcaguuggcagggcuca

SEQ ID NO: 676449 - RNA, 22 nt, Human
aggcuccaccccgccagaccuu

SEQ ID NO: 676450 - RNA, 22 nt, Human
cccuggaggagcuuagagcuug

SEQ ID NO: 676451 - RNA, 22 nt, Human
ucaggggacagccagcuggagg

SEQ ID NO: 676452 - RNA, 22 nt, Human
ggcuggacauagacauagccau

SEQ ID NO: 676453 - RNA, 22 nt, Human
acugggacuguaugugcuggac

SEQ ID NO: 676454 - RNA, 22 nt, Human
uggaccugggguggccuccucu

SEQ ID NO: 676455 - RNA, 22 nt, Human
auacuugagguuguauaaauau

SEQ ID NO: 676456 - RNA, 17 nt, Human
gugagggcagaggaugg

SEQ ID NO: 676457 - RNA, 22 nt, Human
ucagagucucccccaguuuggg

SEQ ID NO: 676458 - RNA, 22 nt, Human
cgcugggcauggugccuuauuu

SEQ ID NO: 676459 - RNA, 22 nt, Human
uaggaacauaugcagugcuuuu

SEQ ID NO: 676460 - RNA, 22 nt, Human
gccuucucugugagcuccuagg

SEQ ID NO: 676461 - RNA, 22 nt, Human
uucccaggcugugcuaccagag

SEQ ID NO: 676462 - RNA, 22 nt, Human
cuucuggauuuauucauuccuu

SEQ ID NO: 676463 - RNA, 22 nt, Human
ugaaccacaugcaaagugaaua

SEQ ID NO: 676464 - RNA, 22 nt, Human
uuccagcuuagagcaucauguu

SEQ ID NO: 676465 - RNA, 22 nt, Human
agcagggccaacaguaaacacc

SEQ ID NO: 676466 - RNA, 22 nt, Human
ugccucugcugcuguggcauca

SEQ ID NO: 676467 - RNA, 22 nt, Human
aguuuuauugucccagagguga

SEQ ID NO: 676468 - RNA, 20 nt, Human
aaaaugaugggcagggcagg

SEQ ID NO: 676469 - RNA, 22 nt, Human
uaaacagagaagacuuugagca

SEQ ID NO: 676470 - RNA, 22 nt, Human
cccacaggcaggugcaugggcu

SEQ ID NO: 676471 - RNA, 22 nt, Human
ucccagggacccagccugauac

SEQ ID NO: 676472 - RNA, 22 nt, Human
uuccuugaccacugcauaauga

SEQ ID NO: 676473 - RNA, 22 nt, Human
agggcagccugagugcuggccc

SEQ ID NO: 676474 - RNA, 22 nt, Human
aaggguugcaaggucagaggaa

SEQ ID NO: 676475 - RNA, 22 nt, Human
gccuaggaguacagaaugguuu

SEQ ID NO: 676476 - RNA, 22 nt, Human
gcuguccugggaacaggcacua

SEQ ID NO: 676477 - RNA, 19 nt, Human
cuggaaggagggacuguuc

SEQ ID NO: 676478 - RNA, 22 nt, Human
gagagaggccuccauguacuga

SEQ ID NO: 676479 - RNA, 22 nt, Human
aggcagcugaccacaguaugau

SEQ ID NO: 676480 - RNA, 20 nt, Human
ugcuuugauggaaauacagc

SEQ ID NO: 676481 - RNA, 22 nt, Human
augagguaucucauuuccugaa

SEQ ID NO: 676482 - RNA, 22 nt, Human
accaggcuccccuuggauccug

SEQ ID NO: 676483 - RNA, 22 nt, Human
agcugggccugauuugcagggg

SEQ ID NO: 676484 - RNA, 22 nt, Human
uccaggcuucacgucugcccuc

SEQ ID NO: 676485 - RNA, 22 nt, Human
ggcccagaagccagaagccucc

SEQ ID NO: 676486 - RNA, 22 nt, Human
aguucugcugcugccuagggug

SEQ ID NO: 676487 - RNA, 21 nt, Human
cuguuuauuucaccugggugc

SEQ ID NO: 676488 - RNA, 20 nt, Human
cugcuccacccggcucucag

SEQ ID NO: 676489 - RNA, 22 nt, Human
ucagcaggcacggacaggcugc

SEQ ID NO: 676490 - RNA, 22 nt, Human
ugagagagggaugcacccuccu

SEQ ID NO: 676491 - RNA, 22 nt, Human
uugcauugaucccagcuugggc

SEQ ID NO: 676492 - RNA, 22 nt, Human
gagcaaagcuuuuagggccuuu

SEQ ID NO: 676493 - RNA, 22 nt, Human
uuugaaaagaaccaucgccuua

SEQ ID NO: 676494 - RNA, 22 nt, Human
augaccaagaguccaggucaag

SEQ ID NO: 676495 - RNA, 22 nt, Human
ucacagacucuugauugucuaa

SEQ ID NO: 676496 - RNA, 22 nt, Human
ugagguaugguaagguaaaauc

SEQ ID NO: 676497 - RNA, 23 nt, Human
agggccaggugcggaaacagcuc

SEQ ID NO: 676498 - RNA, 22 nt, Human
ucagccuggugauuccucuguc

SEQ ID NO: 676499 - RNA, 22 nt, Human
uugagagaaaaaauuuauuggu

SEQ ID NO: 676500 - RNA, 23 nt, Human
uuguccugccgaucucugagaau

SEQ ID NO: 676501 - RNA, 22 nt, Human
caaagugcagaaggaacugggu

SEQ ID NO: 676502 - RNA, 22 nt, Human
ccugaggcccuggcugugcuga

SEQ ID NO: 676503 - RNA, 19 nt, Human
gcccugaccuuggcugcuc

SEQ ID NO: 676504 - RNA, 22 nt, Human
cacagcagacagggaggcggcu

SEQ ID NO: 676505 - RNA, 22 nt, Human
ggugaaguaauaccagguguac

SEQ ID NO: 676506 - RNA, 22 nt, Human
gaaucccuugcaaguuguugua

SEQ ID NO: 676507 - RNA, 22 nt, Human
uggagcuggaauuugagcugga

SEQ ID NO: 676508 - RNA, 22 nt, Human
ugcaaacaguuaagaugcaggc

SEQ ID NO: 676509 - RNA, 22 nt, Human
gaugaggggucauuggcuggga

SEQ ID NO: 676510 - RNA, 22 nt, Human
ucuuggccagaugcacuuccuc

SEQ ID NO: 676511 - RNA, 22 nt, Human
ggcuucagugagcugagcucac

SEQ ID NO: 676512 - RNA, 22 nt, Human
auuuagcaaaaaaugaugaagc

SEQ ID NO: 676513 - RNA, 22 nt, Human
cacuuggaggaaggccuauuca

SEQ ID NO: 676514 - RNA, 22 nt, Human
cacauaagaaaugaauaugaga

SEQ ID NO: 676515 - RNA, 22 nt, Human
augucagagcuuccacaauagu

SEQ ID NO: 676516 - RNA, 22 nt, Human
ccaccccugggugcagggagcg

SEQ ID NO: 676517 - RNA, 22 nt, Human
uggguccacaaacaucagauau

SEQ ID NO: 676518 - RNA, 22 nt, Human
aagacauugucauuuuauaauu

SEQ ID NO: 676519 - RNA, 22 nt, Human
cagcuugcaguacuuguuuuug

SEQ ID NO: 676520 - RNA, 22 nt, Human
uagcagagcacaucuucauucu

SEQ ID NO: 676521 - RNA, 22 nt, Human
cagacagcugcuuucuugcugu

SEQ ID NO: 676522 - RNA, 22 nt, Human
cuuucccugcuuagaaggauuu

SEQ ID NO: 676523 - RNA, 22 nt, Human
cauagauucuuauuuccaucuu

SEQ ID NO: 676524 - RNA, 22 nt, Human
aacaggaaacaaguuguuagga

SEQ ID NO: 676525 - RNA, 22 nt, Human
agacaacaugaucagcaguccu

SEQ ID NO: 676526 - RNA, 21 nt, Human
agagaagggauuccaggcccu

SEQ ID NO: 676527 - RNA, 22 nt, Human
uuggcugugaaagcuucucaaa

SEQ ID NO: 676528 - RNA, 22 nt, Human
ucuguggcugucuuuccagagg

SEQ ID NO: 676529 - RNA, 22 nt, Human
cccaggcugucuguccuuugcu

SEQ ID NO: 676530 - RNA, 22 nt, Human
auacaauaguguuuguuuugag

SEQ ID NO: 676531 - RNA, 22 nt, Human
aacaaauggggccuuguaugaa

SEQ ID NO: 676532 - RNA, 22 nt, Human
gaaaccuguccccucuuccuca

SEQ ID NO: 676533 - RNA, 22 nt, Human
uucuugcaggucacucacugag

SEQ ID NO: 676534 - RNA, 22 nt, Human
cagauucaaccuaagacaaucu

SEQ ID NO: 676535 - RNA, 22 nt, Human
ugaaaauucucaggcucacccc

SEQ ID NO: 676536 - RNA, 22 nt, Human
uucuucaaauagcagggaguca

SEQ ID NO: 676537 - RNA, 22 nt, Human
ucucuucugaaaccugucuuua

SEQ ID NO: 676538 - RNA, 22 nt, Human
augcuuaacucuguacauaguu

SEQ ID NO: 676539 - RNA, 21 nt, Human
cauuucuauugaugagaaaag

SEQ ID NO: 676540 - RNA, 21 nt, Human
gcagccacagccaccaagcua

SEQ ID NO: 676541 - RNA, 22 nt, Human
uuuaaaagggguauuaagucca

SEQ ID NO: 676542 - RNA, 22 nt, Human
guauuuuucauuccaagugaga

SEQ ID NO: 676543 - RNA, 22 nt, Human
gucuucuuuaaccuacuaaagc

SEQ ID NO: 676544 - RNA, 22 nt, Human
gugagggcagcuuggucagugu

SEQ ID NO: 676545 - RNA, 22 nt, Human
uuugcaaagaaauuauugcugu

SEQ ID NO: 676546 - RNA, 22 nt, Human
gugucacaagagcccaggaaac

SEQ ID NO: 676547 - RNA, 22 nt, Human
uggucuaagagccuaacugcug

SEQ ID NO: 676548 - RNA, 22 nt, Human
uggagagaacagugucugaaag

SEQ ID NO: 676549 - RNA, 22 nt, Human
ucucacacuauuucaggugacu

SEQ ID NO: 676550 - RNA, 20 nt, Human
gcauccauauaugcaugugu

SEQ ID NO: 676551 - RNA, 22 nt, Human
uuaaaugucuguagaugugcug

SEQ ID NO: 676552 - RNA, 22 nt, Human
uaaaguuuguagcaauugauau

SEQ ID NO: 676553 - RNA, 22 nt, Human
uaguaaguucucgcauuguuau

SEQ ID NO: 676554 - RNA, 22 nt, Human
agacuucacucccagagauucu

SEQ ID NO: 676555 - RNA, 19 nt, Human
aggagaaguagcagaaauu

SEQ ID NO: 676556 - RNA, 22 nt, Human
ccaggccucaccugcccaccua

SEQ ID NO: 676557 - RNA, 22 nt, Human
uugguggagucauuggcauaug

SEQ ID NO: 676558 - RNA, 22 nt, Human
caggacugauguuccuccagcc

SEQ ID NO: 676559 - RNA, 22 nt, Human
uuccaggaacacucuguguccc

SEQ ID NO: 676560 - RNA, 22 nt, Human
ucaguauagcuaaaaguuuguc

SEQ ID NO: 676561 - RNA, 22 nt, Human
gaccacagaagccuugauaggg

SEQ ID NO: 676562 - RNA, 21 nt, Human
uccuggcuuuaugcuaccucu

SEQ ID NO: 676563 - RNA, 22 nt, Human
cccugcacagccuggcucucuu

SEQ ID NO: 676564 - RNA, 22 nt, Human
caaucccaucaccaucugcucu

SEQ ID NO: 676565 - RNA, 22 nt, Human
ucugcauauuguuaauggaaug

SEQ ID NO: 676566 - RNA, 22 nt, Human
cuguccccugugcuuucacuug

SEQ ID NO: 676567 - RNA, 22 nt, Human
acuuccuuuucaaccauacagc

SEQ ID NO: 676568 - RNA, 22 nt, Human
aguacugucagcaggguguuga

SEQ ID NO: 676569 - RNA, 21 nt, Human
agguggggcugcaccucugcu

SEQ ID NO: 676570 - RNA, 22 nt, Human
gagucaggaguccugugugaga

SEQ ID NO: 676571 - RNA, 22 nt, Human
gcaaaaacugcaauuacuuuug

SEQ ID NO: 676572 - RNA, 22 nt, Human
agggccagggaaacgaucagca

SEQ ID NO: 676573 - RNA, 22 nt, Human
ggcuuggcagaggugggugcuu

SEQ ID NO: 676574 - RNA, 22 nt, Human
cacauauaugaaaugaggaauu

SEQ ID NO: 676575 - RNA, 22 nt, Human
agugaguggagagcucuagguu

SEQ ID NO: 676576 - RNA, 22 nt, Human
uagucacaaccuucaaguuguc

SEQ ID NO: 676577 - RNA, 22 nt, Human
ucuucagagcauuucugaggua

SEQ ID NO: 676578 - RNA, 21 nt, Human
uccaggaguucuaauaggugu

SEQ ID NO: 676579 - RNA, 22 nt, Human
uacauaugaacuuuauaacuug

SEQ ID NO: 676580 - RNA, 21 nt, Human
uacagaugaggagaccaaggc

SEQ ID NO: 676581 - RNA, 22 nt, Human
guggcccugagcccuuugacag

SEQ ID NO: 676582 - RNA, 22 nt, Human
agaguucaguuguagccauauu

SEQ ID NO: 676583 - RNA, 22 nt, Human
gacccggcuccaggcccagcag

SEQ ID NO: 676584 - RNA, 22 nt, Human
uucuguuagaauuuugaaaaua

SEQ ID NO: 676585 - RNA, 22 nt, Human
gagaaggaguagcugaccuggg

SEQ ID NO: 676586 - RNA, 22 nt, Human
gguuggaggugggaauagcuag

SEQ ID NO: 676587 - RNA, 21 nt, Human
gcuaugaauguagaaaauuau

SEQ ID NO: 676588 - RNA, 23 nt, Human
acauacauggagauaaagugaug

SEQ ID NO: 676589 - RNA, 22 nt, Human
aacaucacaauuucauuuaugc

SEQ ID NO: 676590 - RNA, 22 nt, Human
uugaaaguuaggauuuagcugg

SEQ ID NO: 676591 - RNA, 22 nt, Human
acuaagaugcaggaaaugcuag

SEQ ID NO: 676592 - RNA, 22 nt, Human
uuucaaggccuucugguucagu

SEQ ID NO: 676593 - RNA, 22 nt, Human
ucauucugcaucacucuugcuc

SEQ ID NO: 676594 - RNA, 22 nt, Human
agugggcccuugucacacugau

SEQ ID NO: 676595 - RNA, 22 nt, Human
auugggaugccggcugauaaga

SEQ ID NO: 676596 - RNA, 20 nt, Human
ucuggcaggugaacgagcug

SEQ ID NO: 676597 - RNA, 22 nt, Human
uaaaaaguugaaaggacuuauc

SEQ ID NO: 676598 - RNA, 22 nt, Human
aggugggguguuggauguuuau

SEQ ID NO: 676599 - RNA, 21 nt, Human
cccaggaguccuauuuaaaug

SEQ ID NO: 676600 - RNA, 22 nt, Human
aagguuaaauagguauuuucca

SEQ ID NO: 676601 - RNA, 22 nt, Human
ugcuucagaggaaaggcaaaag

SEQ ID NO: 676602 - RNA, 22 nt, Human
guggccugaugccagcccugug

SEQ ID NO: 676603 - RNA, 21 nt, Human
ugcagcugacacugguaugcc

SEQ ID NO: 676604 - RNA, 22 nt, Human
ggaacauucuagaguguuguga

SEQ ID NO: 676605 - RNA, 22 nt, Human
gcucccacaaccuucuugcucc

SEQ ID NO: 676606 - RNA, 22 nt, Human
uagaaaagaagucuggccggga

SEQ ID NO: 676607 - RNA, 22 nt, Human
agucugggagaaggugagauua

SEQ ID NO: 676608 - RNA, 22 nt, Human
uucucacauucagaacuuuuau

SEQ ID NO: 676609 - RNA, 21 nt, Human
acacaagcacucguacauacg

SEQ ID NO: 676610 - RNA, 22 nt, Human
uccuggaggcaaaugaagacuc

SEQ ID NO: 676611 - RNA, 20 nt, Human
uaaucacuuauaagacaaug

SEQ ID NO: 676612 - RNA, 20 nt, Human
ucugugcauugccugcuggu

SEQ ID NO: 676613 - RNA, 22 nt, Human
cccagaggugacaucccauucu

SEQ ID NO: 676614 - RNA, 22 nt, Human
uuucuugagcuaggaaccuggg

SEQ ID NO: 676615 - RNA, 22 nt, Human
guuucuuaaaagaggaguuaga

SEQ ID NO: 676616 - RNA, 22 nt, Human
uaugucuuuaguaucuuuugga

SEQ ID NO: 676617 - RNA, 22 nt, Human
gggacccagguaauccugugcu

SEQ ID NO: 676618 - RNA, 22 nt, Human
ugauuuccugugcgcccuuagg

SEQ ID NO: 676619 - RNA, 22 nt, Human
gugguccaucaugcagagcucc

SEQ ID NO: 676620 - RNA, 22 nt, Human
uuucugauauacuguagaaucc

SEQ ID NO: 676621 - RNA, 22 nt, Human
gcagggcagagggagaaucucu

SEQ ID NO: 676622 - RNA, 22 nt, Human
uuccauaauaaccugagagaaa

SEQ ID NO: 676623 - RNA, 22 nt, Human
gaggggcuugaggcccugaugg

SEQ ID NO: 676624 - RNA, 22 nt, Human
ugauucaagagaguugggguau

SEQ ID NO: 676625 - RNA, 22 nt, Human
uaaguaaauuuauaaugugauu

SEQ ID NO: 676626 - RNA, 22 nt, Human
ucccaaggccucuaguugauua

SEQ ID NO: 676627 - RNA, 20 nt, Human
uguaaacaauaguguucuug

SEQ ID NO: 676628 - RNA, 22 nt, Human
aucuggagugggacacagaaau

SEQ ID NO: 676629 - RNA, 22 nt, Human
ucugugaaaucacccagguuua

SEQ ID NO: 676630 - RNA, 22 nt, Human
cagcagcccacgcgugcugucc

SEQ ID NO: 676631 - RNA, 22 nt, Human
cccugggagaaguugagggcug

SEQ ID NO: 676632 - RNA, 22 nt, Human
gccugccuuuuggaggcacauu

SEQ ID NO: 676633 - RNA, 22 nt, Human
gcuggagcugaguucccugggc

SEQ ID NO: 676634 - RNA, 22 nt, Human
cacagaggugauaguggucaag

SEQ ID NO: 676635 - RNA, 20 nt, Human
uuggaugugcauggccgugc

SEQ ID NO: 676636 - RNA, 22 nt, Human
uugccaggagcucaucugaggg

SEQ ID NO: 676637 - RNA, 22 nt, Human
agaaaucuauguuuugguuaga

SEQ ID NO: 676638 - RNA, 22 nt, Human
auaugcuagugugcuuauacuu

SEQ ID NO: 676639 - RNA, 22 nt, Human
ugggaugauagguaaguaauua

SEQ ID NO: 676640 - RNA, 22 nt, Human
aguuuauuguauaugguaguuu

SEQ ID NO: 676641 - RNA, 22 nt, Human
gagagcacggucuugggcaugg

SEQ ID NO: 676642 - RNA, 22 nt, Human
auuguguccucauugaccuuca

SEQ ID NO: 676643 - RNA, 16 nt, Human
gcacacagccagccuu

SEQ ID NO: 676644 - RNA, 22 nt, Human
cuucauuacuugcucguagcac

SEQ ID NO: 676645 - RNA, 22 nt, Human
gcagcuggccccuuuccuuguu

SEQ ID NO: 676646 - RNA, 22 nt, Human
gcuuccagggcucagucacugc

SEQ ID NO: 676647 - RNA, 22 nt, Human
cuacugucuuccuugguaacaa

SEQ ID NO: 676648 - RNA, 22 nt, Human
uuaaccuguuaugcccccagag

SEQ ID NO: 676649 - RNA, 22 nt, Human
uggcacugacagggugcucaag

SEQ ID NO: 676650 - RNA, 18 nt, Human
ggguucaccugccuuugg

SEQ ID NO: 676651 - RNA, 22 nt, Human
gucugccugcuaguggcugccu

SEQ ID NO: 676652 - RNA, 20 nt, Human
gcucugaccauaucaagaca

SEQ ID NO: 676653 - RNA, 19 nt, Human
agagccagacagcauagga

SEQ ID NO: 676654 - RNA, 22 nt, Human
uggaagugcucuucugaccaac

SEQ ID NO: 676655 - RNA, 22 nt, Human
uccaggcauagaaggcacgcac

SEQ ID NO: 676656 - RNA, 22 nt, Human
ugaagcccugucuuauggaaga

SEQ ID NO: 676657 - RNA, 23 nt, Human
cccugcagucagggugagauggu

SEQ ID NO: 676658 - RNA, 23 nt, Human
ugacaacagcucucagccauguc

SEQ ID NO: 676659 - RNA, 22 nt, Human
ucucacucauuuccuaggucuu

SEQ ID NO: 676660 - RNA, 22 nt, Human
ccuuuguggggcgguggguaau

SEQ ID NO: 676661 - RNA, 22 nt, Human
uccaggcaaaaggaacugcuug

SEQ ID NO: 676662 - RNA, 22 nt, Human
gacacugucccacagaauucga

SEQ ID NO: 676663 - RNA, 22 nt, Human
ugcucagacaagcugaacagua

SEQ ID NO: 676664 - RNA, 22 nt, Human
cagggccacacggaagggaaca

SEQ ID NO: 676665 - RNA, 22 nt, Human
auguacagccacuucacaguua

SEQ ID NO: 676666 - RNA, 22 nt, Human
agaccacuaaaacuuucucuau

SEQ ID NO: 676667 - RNA, 22 nt, Human
uucugccuucaguccucugacu

SEQ ID NO: 676668 - RNA, 22 nt, Human
acagucuaggugugugauuuaa

SEQ ID NO: 676669 - RNA, 20 nt, Human
gcccucugccucccucagcg

SEQ ID NO: 676670 - RNA, 22 nt, Human
aagucacauucugagguauugg

SEQ ID NO: 676671 - RNA, 22 nt, Human
cagugcccucaucuaugaaauc

SEQ ID NO: 676672 - RNA, 22 nt, Human
auucauggcagugguaacguuu

SEQ ID NO: 676673 - RNA, 22 nt, Human
gcaaagaaaguuuuaaugaggu

SEQ ID NO: 676674 - RNA, 22 nt, Human
agagaaucuagaauguuuauac

SEQ ID NO: 676675 - RNA, 22 nt, Human
guggggaaaggaguggggcuca

SEQ ID NO: 676676 - RNA, 20 nt, Human
aacuugucuuccuguuuggc

SEQ ID NO: 676677 - RNA, 22 nt, Human
cccagagggaagggaaugaggu

SEQ ID NO: 676678 - RNA, 22 nt, Human
augacccuuacugcaucauaca

SEQ ID NO: 676679 - RNA, 22 nt, Human
gacccugagcaaaagcaguucu

SEQ ID NO: 676680 - RNA, 22 nt, Human
uuguaaaguucuuaggaagcuc

SEQ ID NO: 676681 - RNA, 22 nt, Human
caggcauuucgcaaaggcugag

SEQ ID NO: 676682 - RNA, 22 nt, Human
cccugaggaccaggaaggaggg

SEQ ID NO: 676683 - RNA, 21 nt, Human
ucacuagugccuucugucauu

SEQ ID NO: 676684 - RNA, 22 nt, Human
aacucuuuggucucaggaaagg

SEQ ID NO: 676685 - RNA, 22 nt, Human
agaaaaaucuuggcgcuugucu

SEQ ID NO: 676686 - RNA, 22 nt, Human
agcuauugugugcccagcagga

SEQ ID NO: 676687 - RNA, 22 nt, Human
ucauccauauagaaagaugauu

SEQ ID NO: 676688 - RNA, 22 nt, Human
gguucacauauugagaguauuc

SEQ ID NO: 676689 - RNA, 22 nt, Human
aacuacaguaguuugcccuucu

SEQ ID NO: 676690 - RNA, 22 nt, Human
cuauuuaucuauuucugaauga

SEQ ID NO: 676691 - RNA, 22 nt, Human
acagcucugcauggcaguuauu

SEQ ID NO: 676692 - RNA, 22 nt, Human
uuucugcuuccuugagaaggag

SEQ ID NO: 676693 - RNA, 22 nt, Human
agaagggagagaaaguugguua

SEQ ID NO: 676694 - RNA, 22 nt, Human
cccaggcagcccuucugacgca

SEQ ID NO: 676695 - RNA, 22 nt, Human
ucccucacugguucugcauccc

SEQ ID NO: 676696 - RNA, 22 nt, Human
gaacauugcuuuauuucuucua

SEQ ID NO: 676697 - RNA, 22 nt, Human
ucaauauuuuuaugagcauaga

SEQ ID NO: 676698 - RNA, 22 nt, Human
aacacauugccagagaucagca

SEQ ID NO: 676699 - RNA, 22 nt, Human
aucaucuuaucugacucauuuu

SEQ ID NO: 676700 - RNA, 22 nt, Human
gucugaggccugaggcccuggg

SEQ ID NO: 676701 - RNA, 22 nt, Human
gaaaauacuucaguguucuggc

SEQ ID NO: 676702 - RNA, 22 nt, Human
auaucuuuguuuuugccaagau

SEQ ID NO: 676703 - RNA, 22 nt, Human
ccaggcucugccaggcccuuga

SEQ ID NO: 676704 - RNA, 22 nt, Human
gaaaauaggcagaugcauugua

SEQ ID NO: 676705 - RNA, 22 nt, Human
cuggcucucugauuucacauuc

SEQ ID NO: 676706 - RNA, 22 nt, Human
agaguguguggggcugagguca

SEQ ID NO: 676707 - RNA, 22 nt, Human
aaacacagauuucuuuguccca

SEQ ID NO: 676708 - RNA, 22 nt, Human
acucuguguuuugguggcagca

SEQ ID NO: 676709 - RNA, 22 nt, Human
gaagcacagggcucgaucucag

SEQ ID NO: 676710 - RNA, 23 nt, Human
acauauugaaugcugagaauuuu

SEQ ID NO: 676711 - RNA, 22 nt, Human
ggcaggcgugguggccucagaa

SEQ ID NO: 676712 - RNA, 21 nt, Human
ccugugugugucccuuuaaga

SEQ ID NO: 676713 - RNA, 22 nt, Human
ucugggucuaugaucucacuuc

SEQ ID NO: 676714 - RNA, 20 nt, Human
cauauggaaagauauuguuc

SEQ ID NO: 676715 - RNA, 22 nt, Human
gaggagaaugcgcaccacauau

SEQ ID NO: 676716 - RNA, 23 nt, Human
acagggcuagcugacagugguau

SEQ ID NO: 676717 - RNA, 21 nt, Human
uuucugucucugccacuaguu

SEQ ID NO: 676718 - RNA, 22 nt, Human
ucuuuucacagacaaauggaga

SEQ ID NO: 676719 - RNA, 22 nt, Human
guuguauauguagagaaugguc

SEQ ID NO: 676720 - RNA, 22 nt, Human
ugaggaacucaccaggcagaga

SEQ ID NO: 676721 - RNA, 22 nt, Human
agcaucuggucaugagugagaa

SEQ ID NO: 676722 - RNA, 22 nt, Human
ggccagagagccgcuguuagga

SEQ ID NO: 676723 - RNA, 22 nt, Human
ggucuucuggaaagcagacugu

SEQ ID NO: 676724 - RNA, 22 nt, Human
ggagaggaaaugccagcacuuc

SEQ ID NO: 676725 - RNA, 19 nt, Human
uccucagugacaaccucag

SEQ ID NO: 676726 - RNA, 22 nt, Human
augugugcucuugagccuucac

SEQ ID NO: 676727 - RNA, 22 nt, Human
caguuuaguguugcauuuggag

SEQ ID NO: 676728 - RNA, 20 nt, Human
caagcccucuuuagccugcc

SEQ ID NO: 676729 - RNA, 22 nt, Human
ucuuuaaggugauuucugcuac

SEQ ID NO: 676730 - RNA, 22 nt, Human
uucucucugugucauuauggac

SEQ ID NO: 676731 - RNA, 23 nt, Human
uggcccugaaucuguccuggagg

SEQ ID NO: 676732 - RNA, 22 nt, Human
guguagguaagcaugcagcuga

SEQ ID NO: 676733 - RNA, 22 nt, Human
ugggccuccuuuccauucagag

SEQ ID NO: 676734 - RNA, 22 nt, Human
ccucaggcugcucacacuuguc

SEQ ID NO: 676735 - RNA, 22 nt, Human
ggacaggugacugcccagagug

SEQ ID NO: 676736 - RNA, 22 nt, Human
agcagcugguaggaguggccac

SEQ ID NO: 676737 - RNA, 22 nt, Human
acacuguuccacacuaagaagg

SEQ ID NO: 676738 - RNA, 22 nt, Human
ggcagaccucuccagccccaca

SEQ ID NO: 676739 - RNA, 22 nt, Human
ugacaguauacuugugauggga

SEQ ID NO: 676740 - RNA, 22 nt, Human
ccaggcucugagccucacucuu

SEQ ID NO: 676741 - RNA, 22 nt, Human
gaaacauucauaugagaaaccu

SEQ ID NO: 676742 - RNA, 22 nt, Human
cagaaauguuuaugcuuuugaa

SEQ ID NO: 676743 - RNA, 22 nt, Human
gugggagaaauuagcucuaguu

SEQ ID NO: 676744 - RNA, 22 nt, Human
auguccagagccggccugcuga

SEQ ID NO: 676745 - RNA, 22 nt, Human
gugcuucuuucuccucaagccu

SEQ ID NO: 676746 - RNA, 22 nt, Human
augggaggcagacacuaaguuc

SEQ ID NO: 676747 - RNA, 22 nt, Human
uuccuccacgugacaggagcca

SEQ ID NO: 676748 - RNA, 20 nt, Human
uccagcugggaacagcugau

SEQ ID NO: 676749 - RNA, 20 nt, Human
agggccuguugcaagcguuu

SEQ ID NO: 676750 - RNA, 22 nt, Human
gguguucuuaguggcacuggca

SEQ ID NO: 676751 - RNA, 19 nt, Human
ucuggcuccugccaggcug

SEQ ID NO: 676752 - RNA, 20 nt, Human
guuuccuauuuaccuccuca

SEQ ID NO: 676753 - RNA, 19 nt, Human
cuucagggaggggccaggc

SEQ ID NO: 676754 - RNA, 22 nt, Human
accaucaguacuggaugcugac

SEQ ID NO: 676755 - RNA, 22 nt, Human
ugauacagagcaagcaucuuuu

SEQ ID NO: 676756 - RNA, 22 nt, Human
cauggccacauuggaccgaagc

SEQ ID NO: 676757 - RNA, 21 nt, Human
cuacccucacucccauuccuc

SEQ ID NO: 676758 - RNA, 22 nt, Human
gcuaggaagaagggugcuugaa

SEQ ID NO: 676759 - RNA, 18 nt, Human
agauuuugagaaauacaa

SEQ ID NO: 676760 - RNA, 22 nt, Human
uauauguugauacuaauucugg

SEQ ID NO: 676761 - RNA, 22 nt, Human
agacauuuugauaccccuaccg

SEQ ID NO: 676762 - RNA, 22 nt, Human
ugaacucuaauggugcuuuucu

SEQ ID NO: 676763 - RNA, 22 nt, Human
guucaaauucuaugaaauaugu

SEQ ID NO: 676764 - RNA, 21 nt, Human
ugcaggaaguauggugccuau

SEQ ID NO: 676765 - RNA, 19 nt, Human
gggguggcuggggcuccag

SEQ ID NO: 676766 - RNA, 22 nt, Human
uggagcauauucuggagcuugg

SEQ ID NO: 676767 - RNA, 22 nt, Human
ucacauuuguuccucugcacuu

SEQ ID NO: 676768 - RNA, 22 nt, Human
uuugaauguuuuagguacuuaa

SEQ ID NO: 676769 - RNA, 22 nt, Human
aagcaggcauuccagagacaau

SEQ ID NO: 676770 - RNA, 22 nt, Human
acaaggaccaugaggcagaccc

SEQ ID NO: 676771 - RNA, 22 nt, Human
acuucuaaucagaaggucuggu

SEQ ID NO: 676772 - RNA, 22 nt, Human
uaauaauuggcuaacccuggga

SEQ ID NO: 676773 - RNA, 22 nt, Human
aacagucacauuguucaacuuu

SEQ ID NO: 676774 - RNA, 22 nt, Human
uguauuuaauuguaucaucaca

SEQ ID NO: 676775 - RNA, 22 nt, Human
uaagagaauguuguggcuaggu

SEQ ID NO: 676776 - RNA, 22 nt, Human
uaugcuuuaacccucuuauauu

SEQ ID NO: 676777 - RNA, 22 nt, Human
caugcagggacuagagaacagg

SEQ ID NO: 676778 - RNA, 22 nt, Human
ggaacuccugcuccaagcagcu

SEQ ID NO: 676779 - RNA, 22 nt, Human
gagagcccugcuccuaucccag

SEQ ID NO: 676780 - RNA, 22 nt, Human
gggcagcugcagggauggugac

SEQ ID NO: 676781 - RNA, 22 nt, Human
acaggucagauaaaggcuggug

SEQ ID NO: 676782 - RNA, 22 nt, Human
ugcuuuggaucuauuugcugag

SEQ ID NO: 676783 - RNA, 22 nt, Human
cccaguggugcuggcaucugug

SEQ ID NO: 676784 - RNA, 22 nt, Human
gccucugcccuccugggacugc

SEQ ID NO: 676785 - RNA, 22 nt, Human
uccugggacaagccguggaagu

SEQ ID NO: 676786 - RNA, 22 nt, Human
uguucugcaagcccugccaccu

SEQ ID NO: 676787 - RNA, 22 nt, Human
uccuuaauaaguacuucauugu

SEQ ID NO: 676788 - RNA, 22 nt, Human
agauaucaccucuaggcuggug

SEQ ID NO: 676789 - RNA, 22 nt, Human
cuucucuaucuuuggcacauca

SEQ ID NO: 676790 - RNA, 22 nt, Human
uuggacuccucuuuccucuugg

SEQ ID NO: 676791 - RNA, 22 nt, Human
ucuuuagcuagaaauacucuaa

SEQ ID NO: 676792 - RNA, 20 nt, Human
aacacagauaccaaagguug

SEQ ID NO: 676793 - RNA, 22 nt, Human
cagugcuauuuggacacaggga

SEQ ID NO: 676794 - RNA, 22 nt, Human
uucugcugguguuuugugaggc

SEQ ID NO: 676795 - RNA, 22 nt, Human
uggcuucaucacucgggcugcc

SEQ ID NO: 676796 - RNA, 22 nt, Human
gauccugucuguggagucagca

SEQ ID NO: 676797 - RNA, 22 nt, Human
ugagagaaacguuccuuacauc

SEQ ID NO: 676798 - RNA, 22 nt, Human
aguuggagugaacaugagauug

SEQ ID NO: 676799 - RNA, 21 nt, Human
acagcuggccgcgcgggucgg

SEQ ID NO: 676800 - RNA, 22 nt, Human
uauuuacuguauuugaaguuga

SEQ ID NO: 676801 - RNA, 22 nt, Human
uacaaacuguccagcccagagg

SEQ ID NO: 676802 - RNA, 22 nt, Human
aggcaagggggcgccaccuucc

SEQ ID NO: 676803 - RNA, 22 nt, Human
gaauaacagcaaguuugcaggc

SEQ ID NO: 676804 - RNA, 22 nt, Human
auggagacgcaagggaccuagg

SEQ ID NO: 676805 - RNA, 22 nt, Human
guuauugagguggagucucacu

SEQ ID NO: 676806 - RNA, 21 nt, Human
aauggcuuauacagaaguaag

SEQ ID NO: 676807 - RNA, 22 nt, Human
ccuuggagacagguuugcuuuc

SEQ ID NO: 676808 - RNA, 22 nt, Human
uaugagcuuccaguguugcaug

SEQ ID NO: 676809 - RNA, 22 nt, Human
gaaauuuacaacuuucucaugg

SEQ ID NO: 676810 - RNA, 20 nt, Human
cugggcucgguggcccuggc

SEQ ID NO: 676811 - RNA, 22 nt, Human
gccaggcugccuuaucucuagc

SEQ ID NO: 676812 - RNA, 22 nt, Human
ccaggccuggccaggggaugcc

SEQ ID NO: 676813 - RNA, 19 nt, Human
uccuuccccccagcacaga

SEQ ID NO: 676814 - RNA, 22 nt, Human
ugugcucuugggcaauagcugc

SEQ ID NO: 676815 - RNA, 19 nt, Human
gcugagguggaggaaggag

SEQ ID NO: 676816 - RNA, 22 nt, Human
uagggcagauucgguggaguuu

SEQ ID NO: 676817 - RNA, 22 nt, Human
caagcagagaagucucuaggcu

SEQ ID NO: 676818 - RNA, 22 nt, Human
ugcugcaggcagccccucuacu

SEQ ID NO: 676819 - RNA, 22 nt, Human
uucaagcaccaaauuaguaggc

SEQ ID NO: 676820 - RNA, 22 nt, Human
aaacuguagugcuucgaucuga

SEQ ID NO: 676821 - RNA, 22 nt, Human
uuugaacagggaauguuccaca

SEQ ID NO: 676822 - RNA, 22 nt, Human
aacauucuuuggaggauuauuc

SEQ ID NO: 676823 - RNA, 22 nt, Human
ucugcguggcgugguucugugc

SEQ ID NO: 676824 - RNA, 18 nt, Human
guucaucuuuuucuaaag

SEQ ID NO: 676825 - RNA, 22 nt, Human
agcacugauuuuguugcacuua

SEQ ID NO: 676826 - RNA, 22 nt, Human
ucucccauucagcuugcaguca

SEQ ID NO: 676827 - RNA, 22 nt, Human
agcaaggcucggucagggugau

SEQ ID NO: 676828 - RNA, 22 nt, Human
aggugauaaguguuaaauaaag

SEQ ID NO: 676829 - RNA, 19 nt, Human
gcaugcuugguggcuucug

SEQ ID NO: 676830 - RNA, 22 nt, Human
ugugguggggucugguauucca

SEQ ID NO: 676831 - RNA, 22 nt, Human
ucauugcauuuauucacuggca

SEQ ID NO: 676832 - RNA, 22 nt, Human
ucaagauaccaccauuauaugu

SEQ ID NO: 676833 - RNA, 22 nt, Human
uccuccaggucuaggguggcuu

SEQ ID NO: 676834 - RNA, 22 nt, Human
aucaagaauugggagcuauuga

SEQ ID NO: 676835 - RNA, 22 nt, Human
aagccauuuguuguccuucagg

SEQ ID NO: 676836 - RNA, 22 nt, Human
aaaguuggauuucauccucaug

SEQ ID NO: 676837 - RNA, 22 nt, Human
ugggccacgugacccuuacccu

SEQ ID NO: 676838 - RNA, 22 nt, Human
uagcaacgguaugcaaucuguc

SEQ ID NO: 676839 - RNA, 18 nt, Human
ggaugcugugugcuccuu

SEQ ID NO: 676840 - RNA, 22 nt, Human
uaucucuugucuguuuugcaaa

SEQ ID NO: 676841 - RNA, 22 nt, Human
gugguaggcacagagaacaaga

SEQ ID NO: 676842 - RNA, 22 nt, Human
augugacaguguuugacagaug

SEQ ID NO: 676843 - RNA, 22 nt, Human
ucuggagaaucugucagugugg

SEQ ID NO: 676844 - RNA, 22 nt, Human
uaggugagguuacaagaguuca

SEQ ID NO: 676845 - RNA, 22 nt, Human
caguggugaagagcaggggcuc

SEQ ID NO: 676846 - RNA, 20 nt, Human
uccuaauaaccugaagaaau

SEQ ID NO: 676847 - RNA, 19 nt, Human
agcagccaucgaccaugga

SEQ ID NO: 676848 - RNA, 22 nt, Human
aagccgaggccacacagcagga

SEQ ID NO: 676849 - RNA, 22 nt, Human
uggcuucucccuccccaucuag

SEQ ID NO: 676850 - RNA, 22 nt, Human
agcugcuccuuggcugugguuc

SEQ ID NO: 676851 - RNA, 22 nt, Human
gguccguuuuugaagacagugg

SEQ ID NO: 676852 - RNA, 22 nt, Human
uggcugaguuccuggcacacgg

SEQ ID NO: 676853 - RNA, 22 nt, Human
augcaaaaacugcacuuacgcu

SEQ ID NO: 676854 - RNA, 22 nt, Human
guuaacaaauguaaagcaauua

SEQ ID NO: 676855 - RNA, 22 nt, Human
uaggcuuccgagucuugguauc

SEQ ID NO: 676856 - RNA, 22 nt, Human
cugggucuggaggccaagggug

SEQ ID NO: 676857 - RNA, 22 nt, Human
caaacuauuuacaauggaauca

SEQ ID NO: 676858 - RNA, 22 nt, Human
ucccaucaucuguucuggcuac

SEQ ID NO: 676859 - RNA, 20 nt, Human
ccccacacuauugagcacuu

SEQ ID NO: 676860 - RNA, 22 nt, Human
uuaccugguguuuaugguccau

SEQ ID NO: 676861 - RNA, 22 nt, Human
ccaggccugcauucccucucag

SEQ ID NO: 676862 - RNA, 22 nt, Human
caggcucuagguuaguaggaga

SEQ ID NO: 676863 - RNA, 22 nt, Human
agucuccuuaaauauuucccag

SEQ ID NO: 676864 - RNA, 22 nt, Human
uucagagaguuugugaguccuu

SEQ ID NO: 676865 - RNA, 22 nt, Human
uuucacagcgucuuucucuugc

SEQ ID NO: 676866 - RNA, 22 nt, Human
ugugaggccucugcaggagcag

SEQ ID NO: 676867 - RNA, 22 nt, Human
uaaaacuagaccgugagucuaa

SEQ ID NO: 676868 - RNA, 22 nt, Human
cagagacacuuaacaggaaugg

SEQ ID NO: 676869 - RNA, 22 nt, Human
gcuuacaggugaggcagcaaga

SEQ ID NO: 676870 - RNA, 22 nt, Human
aaggugcucguuauggccagug

SEQ ID NO: 676871 - RNA, 22 nt, Human
aggugcuguuggcagcgggcag

SEQ ID NO: 676872 - RNA, 22 nt, Human
gguccagguauguggugugaau

SEQ ID NO: 676873 - RNA, 21 nt, Human
gaucuuuacuuuccuacuuac

SEQ ID NO: 676874 - RNA, 22 nt, Human
cugugcaagacuuacuuuaaua

SEQ ID NO: 676875 - RNA, 22 nt, Human
cugccuggugcggugcccaccc

SEQ ID NO: 676876 - RNA, 22 nt, Human
gccacagguaggaaccuaccuc

SEQ ID NO: 676877 - RNA, 22 nt, Human
gacagcaguuuuucucuagggu

SEQ ID NO: 676878 - RNA, 22 nt, Human
uuaacauuaaaagcagcauuuu

SEQ ID NO: 676879 - RNA, 22 nt, Human
cagauggcugccaagaugggcu

SEQ ID NO: 676880 - RNA, 22 nt, Human
cuucauuggcuuccauagaugc

SEQ ID NO: 676881 - RNA, 22 nt, Human
agguccaggauuuguggggucu

SEQ ID NO: 676882 - RNA, 22 nt, Human
uuuaaugauagcuguuucacau

SEQ ID NO: 676883 - RNA, 20 nt, Human
cugugccuaaaccuccgggu

SEQ ID NO: 676884 - RNA, 19 nt, Human
agcuguggggccuagcacc

SEQ ID NO: 676885 - RNA, 20 nt, Human
agugggagagggcagacugc

SEQ ID NO: 676886 - RNA, 22 nt, Human
aggcacugaaagguggccagag

SEQ ID NO: 676887 - RNA, 22 nt, Human
ugcaggaacugggagggauagu

SEQ ID NO: 676888 - RNA, 22 nt, Human
augggggccugaacaggcaaaa

SEQ ID NO: 676889 - RNA, 22 nt, Human
auuucuucaggucagaaauaga

SEQ ID NO: 676890 - RNA, 22 nt, Human
gacuguuaccuauauuuaugug

SEQ ID NO: 676891 - RNA, 20 nt, Human
gcugaggucauuaugccuca

SEQ ID NO: 676892 - RNA, 22 nt, Human
uuacagaguagggaauugaagu

SEQ ID NO: 676893 - RNA, 22 nt, Human
aggaacugaugagcagccaggg

SEQ ID NO: 676894 - RNA, 23 nt, Human
ugccguguuagaaauguuuuaca

SEQ ID NO: 676895 - RNA, 22 nt, Human
cggggcagagggucuucuccag

SEQ ID NO: 676896 - RNA, 22 nt, Human
augagagacuguguguugggag

SEQ ID NO: 676897 - RNA, 22 nt, Human
ugaggauggcagugugcucagc

SEQ ID NO: 676898 - RNA, 22 nt, Human
ggggagaguccuuuccaguucc

SEQ ID NO: 676899 - RNA, 22 nt, Human
ucuggcuuggcgcugcccucug

SEQ ID NO: 676900 - RNA, 22 nt, Human
agccucucugaugugacagcua

SEQ ID NO: 676901 - RNA, 22 nt, Human
acucaguggcacuuuggaauuu

SEQ ID NO: 676902 - RNA, 22 nt, Human
cagaggguugaugugaggcuua

SEQ ID NO: 676903 - RNA, 22 nt, Human
uggcccugguggcacagccugc

SEQ ID NO: 676904 - RNA, 22 nt, Human
cugaagaggacgcagcagcaag

SEQ ID NO: 676905 - RNA, 22 nt, Human
uuggcuuccaggaucucagcag

SEQ ID NO: 676906 - RNA, 22 nt, Human
ucaagggaggagacacagcccu

SEQ ID NO: 676907 - RNA, 22 nt, Human
gugcugagaacaaaaguggaca

SEQ ID NO: 676908 - RNA, 22 nt, Human
cacagcaggcagaacgugggca

SEQ ID NO: 676909 - RNA, 21 nt, Human
uagaaagucaaagcuaucagc

SEQ ID NO: 676910 - RNA, 22 nt, Human
ggucucuguuuggggcuggcaa

SEQ ID NO: 676911 - RNA, 22 nt, Human
aucauguucaucguauuuaggc

SEQ ID NO: 676912 - RNA, 22 nt, Human
acugugggacaucccucccuau

SEQ ID NO: 676913 - RNA, 22 nt, Human
aggaauuuuucuagccggaguu

SEQ ID NO: 676914 - RNA, 22 nt, Human
uggcugugugccaggcugucug

SEQ ID NO: 676915 - RNA, 22 nt, Human
uggcaauuguccacugucugcc

SEQ ID NO: 676916 - RNA, 22 nt, Human
aggauucuguaaucugugaaau

SEQ ID NO: 676917 - RNA, 22 nt, Human
ccucaaagcgguaugcagacgg

SEQ ID NO: 676918 - RNA, 22 nt, Human
uauacagugccucuuccauuag

SEQ ID NO: 676919 - RNA, 22 nt, Human
uggguccuggcuuugucagggu

SEQ ID NO: 676920 - RNA, 22 nt, Human
gggggaagacugggcuagugau

SEQ ID NO: 676921 - RNA, 22 nt, Human
acagaaaaaugagggagcugga

SEQ ID NO: 676922 - RNA, 22 nt, Human
caggcacuucugcugcuugucu

SEQ ID NO: 676923 - RNA, 22 nt, Human
ggguccaccugagcagcagccu

SEQ ID NO: 676924 - RNA, 22 nt, Human
gguuucaaaguggacaguuagu

SEQ ID NO: 676925 - RNA, 22 nt, Human
agugagacaguauacugagcag

SEQ ID NO: 676926 - RNA, 22 nt, Human
ugauuugcgucucauuugaaau

SEQ ID NO: 676927 - RNA, 22 nt, Human
cgcuuuaacgugagaagaaggg

SEQ ID NO: 676928 - RNA, 22 nt, Human
agcugucuaccugcagaguccu

SEQ ID NO: 676929 - RNA, 22 nt, Human
uguccugugccaccuuccugag

SEQ ID NO: 676930 - RNA, 22 nt, Human
cuuggugcauuacucaaucugu

SEQ ID NO: 676931 - RNA, 22 nt, Human
gauggcuugcuuagugacagca

SEQ ID NO: 676932 - RNA, 22 nt, Human
gucuccagggcugcuggcgccu

SEQ ID NO: 676933 - RNA, 22 nt, Human
uaaaggauuuuguauaauauaa

SEQ ID NO: 676934 - RNA, 22 nt, Human
ugucagugucuaugaagaauuu

SEQ ID NO: 676935 - RNA, 22 nt, Human
ggaccugccagaacucaggcua

SEQ ID NO: 676936 - RNA, 22 nt, Human
acuugccauaaaugaaaauacu

SEQ ID NO: 676937 - RNA, 22 nt, Human
ugugaguucuuagaaagucagu

SEQ ID NO: 676938 - RNA, 22 nt, Human
acaccagggccuagccagggcg

SEQ ID NO: 676939 - RNA, 22 nt, Human
acaagccaauuacugugccagg

SEQ ID NO: 676940 - RNA, 22 nt, Human
cugggcaguuuacauuccuacc

SEQ ID NO: 676941 - RNA, 22 nt, Human
cuuuguuuuacucagaggcaug

SEQ ID NO: 676942 - RNA, 19 nt, Human
gcaggguguugacuguccc

SEQ ID NO: 676943 - RNA, 22 nt, Human
agaggccagguccagaguuugu

SEQ ID NO: 676944 - RNA, 22 nt, Human
uccaggccucuagccccuaucu

SEQ ID NO: 676945 - RNA, 22 nt, Human
uagagcauuuagaggggcagga

SEQ ID NO: 676946 - RNA, 22 nt, Human
gagagcugcagccgagaggggg

SEQ ID NO: 676947 - RNA, 22 nt, Human
agauuuacaaaggauuugcuuu

SEQ ID NO: 676948 - RNA, 23 nt, Human
augaaacaucacaaugguaccau

SEQ ID NO: 676949 - RNA, 22 nt, Human
cauggccucucuccuggaaugg

SEQ ID NO: 676950 - RNA, 22 nt, Human
acagcauuuaaagaaaaugaac

SEQ ID NO: 676951 - RNA, 21 nt, Human
uggcucugagccucauggcug

SEQ ID NO: 676952 - RNA, 22 nt, Human
uccaucuggagacuuccugguc

SEQ ID NO: 676953 - RNA, 22 nt, Human
uguggggcuuacaaaggcagau

SEQ ID NO: 676954 - RNA, 22 nt, Human
aggcagugcucaagacagcagc

SEQ ID NO: 676955 - RNA, 22 nt, Human
aaugcuguugaguuguuccugu

SEQ ID NO: 676956 - RNA, 22 nt, Human
uaaaaaucuuaugaauggcaag

SEQ ID NO: 676957 - RNA, 22 nt, Human
ccuucugcucccuggccagggc

SEQ ID NO: 676958 - RNA, 22 nt, Human
ucauguuuuaguaaagugaagg

SEQ ID NO: 676959 - RNA, 22 nt, Human
caggguugggguagauaagaaa

SEQ ID NO: 676960 - RNA, 21 nt, Human
agaauucuuaaguauucuaau

SEQ ID NO: 676961 - RNA, 22 nt, Human
cugccugcuuaccaugcaucag

SEQ ID NO: 676962 - RNA, 22 nt, Human
uagacuuuccagccugcugcuu

SEQ ID NO: 676963 - RNA, 22 nt, Human
aaaccuuucucagugcuaaaau

SEQ ID NO: 676964 - RNA, 22 nt, Human
uauagcaaaguacuaccaacuc

SEQ ID NO: 676965 - RNA, 22 nt, Human
cuggcccuucucuugcuuccug

SEQ ID NO: 676966 - RNA, 22 nt, Human
acaggcuggugguccuggccau

SEQ ID NO: 676967 - RNA, 22 nt, Human
auugucugaauccaaagcucug

SEQ ID NO: 676968 - RNA, 22 nt, Human
uacacuaauguuuuugcaaagc

SEQ ID NO: 676969 - RNA, 22 nt, Human
acucauuuaaacauuuacugaa

SEQ ID NO: 676970 - RNA, 22 nt, Human
uuauuagaucuguuagggaucc

SEQ ID NO: 676971 - RNA, 22 nt, Human
cugggaccagugaagcaacuca

SEQ ID NO: 676972 - RNA, 22 nt, Human
uuuuugucaucuauuucuggug

SEQ ID NO: 676973 - RNA, 22 nt, Human
augauaacaacagcagugcugg

SEQ ID NO: 676974 - RNA, 22 nt, Human
ggugagaggcagugcuguggaa

SEQ ID NO: 676975 - RNA, 22 nt, Human
ugcagcucauugguguccuggu

SEQ ID NO: 676976 - RNA, 22 nt, Human
ugccaaauuagaguucccaggc

SEQ ID NO: 676977 - RNA, 22 nt, Human
gccucagguaaaacuugaguuu

SEQ ID NO: 676978 - RNA, 22 nt, Human
cagcuucuagcaucggcuuuga

SEQ ID NO: 676979 - RNA, 21 nt, Human
cagcuccacuaaagcagcugu

SEQ ID NO: 676980 - RNA, 22 nt, Human
ggagccaggcauaucggggcac

SEQ ID NO: 676981 - RNA, 19 nt, Human
gagcacagcggcauuuggu

SEQ ID NO: 676982 - RNA, 22 nt, Human
ucccuccauaacagaggugagc

SEQ ID NO: 676983 - RNA, 17 nt, Human
agacugaggacacagga

SEQ ID NO: 676984 - RNA, 22 nt, Human
auaaccuggauauaaacagaug

SEQ ID NO: 676985 - RNA, 22 nt, Human
gggcugagcacauacugacagc

SEQ ID NO: 676986 - RNA, 22 nt, Human
guguuuccuaguuuaaugaaug

SEQ ID NO: 676987 - RNA, 22 nt, Human
cuucucucugcauaggcauggg

SEQ ID NO: 676988 - RNA, 22 nt, Human
gugcauuaacaacccagaacuc

SEQ ID NO: 676989 - RNA, 22 nt, Human
cacaagagagugcgcguugcaa

SEQ ID NO: 676990 - RNA, 22 nt, Human
acaauuuauccauuguauaguu

SEQ ID NO: 676991 - RNA, 18 nt, Human
uccuucacagcaggaagg

SEQ ID NO: 676992 - RNA, 22 nt, Human
ugguggcagucuccuggcugug

SEQ ID NO: 676993 - RNA, 22 nt, Human
guaggaaagggagugaagggaa

SEQ ID NO: 676994 - RNA, 22 nt, Human
augugagaacucaggaaauacu

SEQ ID NO: 676995 - RNA, 22 nt, Human
gggaugaggaucaaucagggag

SEQ ID NO: 676996 - RNA, 22 nt, Human
gaggcagcugggcuggugguuu

SEQ ID NO: 676997 - RNA, 22 nt, Human
uauguguauugagcauuguuac

SEQ ID NO: 676998 - RNA, 22 nt, Human
ccugaguaacauggugagaacc

SEQ ID NO: 676999 - RNA, 17 nt, Human
ugcauuguuggaaauuu

SEQ ID NO: 677000 - RNA, 22 nt, Human
uacagagggauuaucuaagggu

SEQ ID NO: 677001 - RNA, 22 nt, Human
auugcuuucuuuggggaacugu

SEQ ID NO: 677002 - RNA, 21 nt, Human
cucacaggaugcaguguuacu

SEQ ID NO: 677003 - RNA, 22 nt, Human
aagugcuugaucauaguucuca

SEQ ID NO: 677004 - RNA, 22 nt, Human
uggcuucaaagguagcauacaa

SEQ ID NO: 677005 - RNA, 22 nt, Human
cucugggguggaggaggcugac

SEQ ID NO: 677006 - RNA, 22 nt, Human
guuagggaucaggaacaagagc

SEQ ID NO: 677007 - RNA, 20 nt, Human
aguggccacugcagagaugc

SEQ ID NO: 677008 - RNA, 22 nt, Human
uacaaagauggaagguuauguu

SEQ ID NO: 677009 - RNA, 22 nt, Human
cuucagcugcaguuauguuuag

SEQ ID NO: 677010 - RNA, 22 nt, Human
uagugcuuuaaguuuacagaga

SEQ ID NO: 677011 - RNA, 22 nt, Human
ucccaggguccucuucuggaau

SEQ ID NO: 677012 - RNA, 22 nt, Human
uuggaaggguuucaguuagucu

SEQ ID NO: 677013 - RNA, 22 nt, Human
gaaauuauugcuagagacugca

SEQ ID NO: 677014 - RNA, 17 nt, Human
gacugagguaaggugag

SEQ ID NO: 677015 - RNA, 22 nt, Human
aacacugguucugacuacacag

SEQ ID NO: 677016 - RNA, 22 nt, Human
ugaagcaggaaacuucuuguuu

SEQ ID NO: 677017 - RNA, 21 nt, Human
gauuaaauuuaagcuacaugc

SEQ ID NO: 677018 - RNA, 22 nt, Human
cacagggaaccaaggcugggcc

SEQ ID NO: 677019 - RNA, 22 nt, Human
aacagaauaucaaaagauuaug

SEQ ID NO: 677020 - RNA, 22 nt, Human
acaggaagugcuggcacuuaca

SEQ ID NO: 677021 - RNA, 22 nt, Human
ugucuuuacuuaauaaauauac

SEQ ID NO: 677022 - RNA, 22 nt, Human
aagccaugguagaaaacucagu

SEQ ID NO: 677023 - RNA, 22 nt, Human
uguuaaaaauucagcucuagau

SEQ ID NO: 677024 - RNA, 21 nt, Human
ccuggacuaaaaccaggccac

SEQ ID NO: 677025 - RNA, 22 nt, Human
gguuggugagugcaggguguua

SEQ ID NO: 677026 - RNA, 22 nt, Human
acccucagacauauuccaucau

SEQ ID NO: 677027 - RNA, 22 nt, Human
gcugccugcacagagcugcuuu

SEQ ID NO: 677028 - RNA, 22 nt, Human
gugccagggggcacugaacaga

SEQ ID NO: 677029 - RNA, 22 nt, Human
uauaauccugcuucacauugaa

SEQ ID NO: 677030 - RNA, 21 nt, Human
uucugcuguucaccaccaccc

SEQ ID NO: 677031 - RNA, 22 nt, Human
acugucuuguuccaagacuaaa

SEQ ID NO: 677032 - RNA, 22 nt, Human
cuaggccacagggcaaaaagga

SEQ ID NO: 677033 - RNA, 22 nt, Human
uuuguacacaggauguuauaau

SEQ ID NO: 677034 - RNA, 22 nt, Human
uggauauccuuguuaacuuucu

SEQ ID NO: 677035 - RNA, 22 nt, Human
cagcacaggucaguuuuuuaag

SEQ ID NO: 677036 - RNA, 22 nt, Human
ggcugccugguuuagugcugac

SEQ ID NO: 677037 - RNA, 22 nt, Human
gucucuaucauagcugaacccu

SEQ ID NO: 677038 - RNA, 20 nt, Human
ggccggggagcucuccaggg

SEQ ID NO: 677039 - RNA, 22 nt, Human
uucuggcuuuacuucccaucca

SEQ ID NO: 677040 - RNA, 22 nt, Human
agucccagcucugccacuuacu

SEQ ID NO: 677041 - RNA, 22 nt, Human
uggaacaagggcguggcggucg

SEQ ID NO: 677042 - RNA, 22 nt, Human
uugcaaauucauggaucugaau

SEQ ID NO: 677043 - RNA, 22 nt, Human
agacaauuguucuaaguaaaaa

SEQ ID NO: 677044 - RNA, 22 nt, Human
auucaaguacaguuuucuucuu

SEQ ID NO: 677045 - RNA, 22 nt, Human
uuagggacaaauuugcagaacc

SEQ ID NO: 677046 - RNA, 22 nt, Human
gcuggagaccucagagaaccca

SEQ ID NO: 677047 - RNA, 22 nt, Human
augcacacaagcuuauguauua

SEQ ID NO: 677048 - RNA, 22 nt, Human
gagagccaugguggagaugggg

SEQ ID NO: 677049 - RNA, 22 nt, Human
ucccuccugcaugaggcucggc

SEQ ID NO: 677050 - RNA, 22 nt, Human
ggagaggauguuuuaguaacuu

SEQ ID NO: 677051 - RNA, 22 nt, Human
auuucucuuccuccuaggguug

SEQ ID NO: 677052 - RNA, 22 nt, Human
ugcuucuagacacugcaauuga

SEQ ID NO: 677053 - RNA, 22 nt, Human
cagagcugcacauucuaugaug

SEQ ID NO: 677054 - RNA, 22 nt, Human
ggaguggccacgacugggagau

SEQ ID NO: 677055 - RNA, 22 nt, Human
ucagcugggaaguucucgcuug

SEQ ID NO: 677056 - RNA, 23 nt, Human
ucacugugcccauugagguagag

SEQ ID NO: 677057 - RNA, 22 nt, Human
acucacuuuccauucaagcacc

SEQ ID NO: 677058 - RNA, 22 nt, Human
agcaggaaagaaaaaucugugu

SEQ ID NO: 677059 - RNA, 22 nt, Human
gcuccuggagagauugagaaag

SEQ ID NO: 677060 - RNA, 22 nt, Human
caagcuggcugggagaggcacg

SEQ ID NO: 677061 - RNA, 22 nt, Human
gaucuuuucagucuugguaguu

SEQ ID NO: 677062 - RNA, 22 nt, Human
agcccuuaguacauuucucaag

SEQ ID NO: 677063 - RNA, 22 nt, Human
ucccuguggcuaagacaugaca

SEQ ID NO: 677064 - RNA, 20 nt, Human
ucaggaugugcugagugaag

SEQ ID NO: 677065 - RNA, 22 nt, Human
ugguagcaacaucucaguggcu

SEQ ID NO: 677066 - RNA, 19 nt, Human
uccugggcugcgucuugcc

SEQ ID NO: 677067 - RNA, 22 nt, Human
uccuccagaaacugaggcagaa

SEQ ID NO: 677068 - RNA, 22 nt, Human
ucugggcagccucaggccaggg

SEQ ID NO: 677069 - RNA, 22 nt, Human
cagggccagccgcagcauccac

SEQ ID NO: 677070 - RNA, 22 nt, Human
agugaauuuaaaacacugagga

SEQ ID NO: 677071 - RNA, 22 nt, Human
agaccugugaucacauggaaug

SEQ ID NO: 677072 - RNA, 22 nt, Human
aacuguaagacaaaugacuucu

SEQ ID NO: 677073 - RNA, 22 nt, Human
gaaggagacccugaagaugcug

SEQ ID NO: 677074 - RNA, 22 nt, Human
ucugggugcuacaaacaguauu

SEQ ID NO: 677075 - RNA, 22 nt, Human
gugucccaggccucuggaauua

SEQ ID NO: 677076 - RNA, 22 nt, Human
aauugacaaaucauacuuguau

SEQ ID NO: 677077 - RNA, 22 nt, Human
cagugcaaacucccugaggugg

SEQ ID NO: 677078 - RNA, 22 nt, Human
ugcuggaauuuugcucuugcaa

SEQ ID NO: 677079 - RNA, 22 nt, Human
uagaaucauugagaauaacagg

SEQ ID NO: 677080 - RNA, 22 nt, Human
acaaugucaaaauaggaaacau

SEQ ID NO: 677081 - RNA, 22 nt, Human
gaggggaaagugugaggcugcg

SEQ ID NO: 677082 - RNA, 19 nt, Human
gcauaaaaugucaaugugu

SEQ ID NO: 677083 - RNA, 22 nt, Human
uacauagcaaggaaaugacaga

SEQ ID NO: 677084 - RNA, 22 nt, Human
ugggggugaaagucuggacagu

SEQ ID NO: 677085 - RNA, 22 nt, Human
aggaaggcaugagguguucaca

SEQ ID NO: 677086 - RNA, 20 nt, Human
uuugcuguggguguaagaau

SEQ ID NO: 677087 - RNA, 22 nt, Human
gcugccugaaugaaccuuguuc

SEQ ID NO: 677088 - RNA, 22 nt, Human
uggcauggcaacccugcaggga

SEQ ID NO: 677089 - RNA, 19 nt, Human
ccuuccccuucagccucug

SEQ ID NO: 677090 - RNA, 19 nt, Human
acuguguggaagugugauu

SEQ ID NO: 677091 - RNA, 23 nt, Human
ggagaucagagacuagggcaguu

SEQ ID NO: 677092 - RNA, 22 nt, Human
ccauugaaggcacuugagcaga

SEQ ID NO: 677093 - RNA, 22 nt, Human
uacccaggagaaacagcagggc

SEQ ID NO: 677094 - RNA, 22 nt, Human
auguacaaaaugccacugaauu

SEQ ID NO: 677095 - RNA, 22 nt, Human
uuucauugaacuaaagaaucug

SEQ ID NO: 677096 - RNA, 22 nt, Human
agagguuucuuaggggcuuccu

SEQ ID NO: 677097 - RNA, 22 nt, Human
cuuguacaucacuggcagaugg

SEQ ID NO: 677098 - RNA, 22 nt, Human
agugaauauuuuuagacaccca

SEQ ID NO: 677099 - RNA, 22 nt, Human
uuguagacaucuguaucauuuu

SEQ ID NO: 677100 - RNA, 22 nt, Human
gccacagcuuuuaaccucgggg

SEQ ID NO: 677101 - RNA, 22 nt, Human
cuguuuauugagcaaucugcca

SEQ ID NO: 677102 - RNA, 22 nt, Human
uuucugcugugcuuucuugcgu

SEQ ID NO: 677103 - RNA, 23 nt, Human
gaagucagcccuacagagagcag

SEQ ID NO: 677104 - RNA, 22 nt, Human
ucugcugccugcagggcagaga

SEQ ID NO: 677105 - RNA, 22 nt, Human
aggagccaguuccaccccagga

SEQ ID NO: 677106 - RNA, 20 nt, Human
aggcucagauacccagggaa

SEQ ID NO: 677107 - RNA, 22 nt, Human
auuccagugugcuuccuugcua

SEQ ID NO: 677108 - RNA, 22 nt, Human
cugcccaccgugugcacgugcg

SEQ ID NO: 677109 - RNA, 22 nt, Human
gcagcugauggaaguccuauug

SEQ ID NO: 677110 - RNA, 20 nt, Human
guaaaauauggucuuugggu

SEQ ID NO: 677111 - RNA, 22 nt, Human
agaccacagucaggcuccuggu

SEQ ID NO: 677112 - RNA, 22 nt, Human
uugcucaggcuggugugcagug

SEQ ID NO: 677113 - RNA, 22 nt, Human
cugugacaguuucucagacuuu

SEQ ID NO: 677114 - RNA, 22 nt, Human
cugucacuuaaauucaggcuga

SEQ ID NO: 677115 - RNA, 20 nt, Human
acaauuuccucacuauaugc

SEQ ID NO: 677116 - RNA, 22 nt, Human
ccccuucuguguccugucagcc

SEQ ID NO: 677117 - RNA, 22 nt, Human
gugaacaaaauagcacauauua

SEQ ID NO: 677118 - RNA, 22 nt, Human
gucucccacuuucuggccucuu

SEQ ID NO: 677119 - RNA, 22 nt, Human
guggucagccccggugagcccu

SEQ ID NO: 677120 - RNA, 22 nt, Human
aggcuuuacugccucaggacuc

SEQ ID NO: 677121 - RNA, 22 nt, Human
ucugaagaacugucuagagaac

SEQ ID NO: 677122 - RNA, 22 nt, Human
ccugacgaaaggcgugcuggag

SEQ ID NO: 677123 - RNA, 20 nt, Human
agugacagagacuguguggc

SEQ ID NO: 677124 - RNA, 22 nt, Human
ugucuugucugugagggcauug

SEQ ID NO: 677125 - RNA, 22 nt, Human
aggacaauuagucuggcuuggc

SEQ ID NO: 677126 - RNA, 22 nt, Human
caguggcuguuucuggaaggca

SEQ ID NO: 677127 - RNA, 22 nt, Human
gguggccuccagggcauaggug

SEQ ID NO: 677128 - RNA, 22 nt, Human
agggugcaaaagcaaggacagu

SEQ ID NO: 677129 - RNA, 22 nt, Human
ggagggcuguagaggagaccug

SEQ ID NO: 677130 - RNA, 22 nt, Human
cuuucagucaguuaacucagaa

SEQ ID NO: 677131 - RNA, 22 nt, Human
gcaaggacucccugggucauuc

SEQ ID NO: 677132 - RNA, 22 nt, Human
ucaaaguuuuugagaauuacau

SEQ ID NO: 677133 - RNA, 22 nt, Human
cagcacagaguauuuuauugau

SEQ ID NO: 677134 - RNA, 19 nt, Human
gcugcuggcucuggcugga

SEQ ID NO: 677135 - RNA, 22 nt, Human
guacagauuaauaauauacuga

SEQ ID NO: 677136 - RNA, 22 nt, Human
cuguuggagucauuccuuccag

SEQ ID NO: 677137 - RNA, 19 nt, Human
agagaccacagagcugccu

SEQ ID NO: 677138 - RNA, 22 nt, Human
aaauagcugaaaguuccuagau

SEQ ID NO: 677139 - RNA, 22 nt, Human
aguguuccacacaucuggggaa

SEQ ID NO: 677140 - RNA, 22 nt, Human
uacauuuauaaggcuucucugu

SEQ ID NO: 677141 - RNA, 22 nt, Human
guguguggcaaacugggccugc

SEQ ID NO: 677142 - RNA, 22 nt, Human
gugggcuucccuuaagccagag

SEQ ID NO: 677143 - RNA, 22 nt, Human
aauaaauguuuguuggauguuu

SEQ ID NO: 677144 - RNA, 22 nt, Human
uuagagucaaaauggcauguua

SEQ ID NO: 677145 - RNA, 21 nt, Human
ucagcaaaauaagcaaaugga

SEQ ID NO: 677146 - RNA, 22 nt, Human
ugaggccagacugaaaccaaca

SEQ ID NO: 677147 - RNA, 22 nt, Human
cagcaugguggagcugcucuuu

SEQ ID NO: 677148 - RNA, 22 nt, Human
cuugacaacuggcagauauaua

SEQ ID NO: 677149 - RNA, 22 nt, Human
cucucaaaugucauuccucuau

SEQ ID NO: 677150 - RNA, 22 nt, Human
ugcucuguaacaaauugacaug

SEQ ID NO: 677151 - RNA, 22 nt, Human
ccuggcuucugggucugugaga

SEQ ID NO: 677152 - RNA, 22 nt, Human
ccucauggaccucagacugucc

SEQ ID NO: 677153 - RNA, 22 nt, Human
cggggcugcgcucuuccugccg

SEQ ID NO: 677154 - RNA, 22 nt, Human
gaauucugguccuguccaaggu

SEQ ID NO: 677155 - RNA, 22 nt, Human
ucugccgugcgaggucccacca

SEQ ID NO: 677156 - RNA, 22 nt, Human
uggaguuagauaaaccugggua

SEQ ID NO: 677157 - RNA, 21 nt, Human
gacaaagugaagcaggcagga

SEQ ID NO: 677158 - RNA, 19 nt, Human
ggcggguggacuggagccc

SEQ ID NO: 677159 - RNA, 22 nt, Human
agccccucuguagcuaauagua

SEQ ID NO: 677160 - RNA, 22 nt, Human
aaguauauuuuuugaagcauau

SEQ ID NO: 677161 - RNA, 22 nt, Human
guguggcugccagccaagaggc

SEQ ID NO: 677162 - RNA, 22 nt, Human
ucaaacagaggaacaauuguuu

SEQ ID NO: 677163 - RNA, 20 nt, Human
aggcucagagcaguaguaca

SEQ ID NO: 677164 - RNA, 22 nt, Human
guucccaccccugagcuccgau

SEQ ID NO: 677165 - RNA, 22 nt, Human
gcaguaaaaaaggauaugugca

SEQ ID NO: 677166 - RNA, 21 nt, Human
acaggcaaauuuuagacaaug

SEQ ID NO: 677167 - RNA, 22 nt, Human
aaaggucauugaaaaggaggaa

SEQ ID NO: 677168 - RNA, 22 nt, Human
aagaauucacugguagagucaa

SEQ ID NO: 677169 - RNA, 22 nt, Human
aacuuucuuugcaucuaaguuu

SEQ ID NO: 677170 - RNA, 23 nt, Human
gagagagauugcuaaaccacucc

SEQ ID NO: 677171 - RNA, 22 nt, Human
cuggcuggcagaugcucuugcu

SEQ ID NO: 677172 - RNA, 22 nt, Human
ggacacuguauaaguuagagua

SEQ ID NO: 677173 - RNA, 22 nt, Human
cugugacuuccacuacugauca

SEQ ID NO: 677174 - RNA, 22 nt, Human
aguugaagguuggcugauccau

SEQ ID NO: 677175 - RNA, 22 nt, Human
gaagccaagccagcugauggag

SEQ ID NO: 677176 - RNA, 22 nt, Human
uugggaaacaguauagcuaaca

SEQ ID NO: 677177 - RNA, 22 nt, Human
ugaaugauaugugaaaaggaac

SEQ ID NO: 677178 - RNA, 20 nt, Human
acuggagccaucucagccua

SEQ ID NO: 677179 - RNA, 22 nt, Human
agccuucucugaaauucuguuu

SEQ ID NO: 677180 - RNA, 22 nt, Human
ucucuucuaauuaggguccaug

SEQ ID NO: 677181 - RNA, 22 nt, Human
caggaacaccugcagcuagugg

SEQ ID NO: 677182 - RNA, 22 nt, Human
uuaaagccaucuagauuuugag

SEQ ID NO: 677183 - RNA, 20 nt, Human
ugaauagagagcacauaugc

SEQ ID NO: 677184 - RNA, 22 nt, Human
ucucuuuaaagacucagagauu

SEQ ID NO: 677185 - RNA, 22 nt, Human
uuccagaggagugauucagagg

SEQ ID NO: 677186 - RNA, 22 nt, Human
aggagccauuuuccaagggcga

SEQ ID NO: 677187 - RNA, 21 nt, Human
uacaugaguguaugagcauau

SEQ ID NO: 677188 - RNA, 22 nt, Human
augugucuagauugcuguaccg

SEQ ID NO: 677189 - RNA, 22 nt, Human
ugcuuauugcuuucaagacugu

SEQ ID NO: 677190 - RNA, 22 nt, Human
gaaggcugaguggguacggagg

SEQ ID NO: 677191 - RNA, 22 nt, Human
gaauuuaucuacguuaaguaug

SEQ ID NO: 677192 - RNA, 19 nt, Human
gcugcagcagagaaacugg

SEQ ID NO: 677193 - RNA, 22 nt, Human
uugacaaagauauauucaugcu

SEQ ID NO: 677194 - RNA, 22 nt, Human
acauagcucagcauaaucgugg

SEQ ID NO: 677195 - RNA, 22 nt, Human
cuauuuaugugcuauuuuguau

SEQ ID NO: 677196 - RNA, 22 nt, Human
agucacugcuuugucccugugu

SEQ ID NO: 677197 - RNA, 22 nt, Human
agggucuguauuucuggcaagc

SEQ ID NO: 677198 - RNA, 22 nt, Human
gguguuaacuuguuuaugacaa

SEQ ID NO: 677199 - RNA, 21 nt, Human
gggccacaccuucugcagacc

SEQ ID NO: 677200 - RNA, 21 nt, Human
uuccuggaggcagaaacguga

SEQ ID NO: 677201 - RNA, 22 nt, Human
ccucagaacggaaaugguuuug

SEQ ID NO: 677202 - RNA, 22 nt, Human
auucagcaaugagcuuggauuu

SEQ ID NO: 677203 - RNA, 22 nt, Human
auguuuaugaccuccauaagga

SEQ ID NO: 677204 - RNA, 17 nt, Human
uugagucuggggucuac

SEQ ID NO: 677205 - RNA, 18 nt, Human
agggagcaucugguugcc

SEQ ID NO: 677206 - RNA, 22 nt, Human
ugucaauaguuuugaguucucu

SEQ ID NO: 677207 - RNA, 23 nt, Human
ugauucugcuuugagaaucaugg

SEQ ID NO: 677208 - RNA, 22 nt, Human
agucacauuugggggugucaaa

SEQ ID NO: 677209 - RNA, 19 nt, Human
uucuaccuuacuguaggcu

SEQ ID NO: 677210 - RNA, 22 nt, Human
cuucccuucugugcagggcaga

SEQ ID NO: 677211 - RNA, 22 nt, Human
acaccaugaugagugauguagc

SEQ ID NO: 677212 - RNA, 22 nt, Human
gagaaggcuggucuuaagucga

SEQ ID NO: 677213 - RNA, 22 nt, Human
gagccaggagauaccuaagggg

SEQ ID NO: 677214 - RNA, 22 nt, Human
ucuggaguggagcugaucauuu

SEQ ID NO: 677215 - RNA, 22 nt, Human
gcgcucagaaaagauuuucuuc

SEQ ID NO: 677216 - RNA, 22 nt, Human
aagggccauugcugagagcagu

SEQ ID NO: 677217 - RNA, 22 nt, Human
acaugugaggugugagugauac

SEQ ID NO: 677218 - RNA, 23 nt, Human
caacacugccuucaggugaagaa

SEQ ID NO: 677219 - RNA, 22 nt, Human
gacuuuauucguuaacuguuaa

SEQ ID NO: 677220 - RNA, 22 nt, Human
ugagcaggcgcagcaggagguc

SEQ ID NO: 677221 - RNA, 22 nt, Human
uuugauucuguaaaauaacagg

SEQ ID NO: 677222 - RNA, 22 nt, Human
auucuucacaaauauauagaag

SEQ ID NO: 677223 - RNA, 22 nt, Human
uuaguacaagagauuaauuacu

SEQ ID NO: 677224 - RNA, 22 nt, Human
uccagcuucuugacuugguggu

SEQ ID NO: 677225 - RNA, 22 nt, Human
cuucaagauauuucuagaauca

SEQ ID NO: 677226 - RNA, 22 nt, Human
gugccagagaugacaggccugc

SEQ ID NO: 677227 - RNA, 22 nt, Human
uacaucaugaaagcauacauca

SEQ ID NO: 677228 - RNA, 22 nt, Human
cugccugcucaccagggcucug

SEQ ID NO: 677229 - RNA, 22 nt, Human
cuuguacacucaguacuucuag

SEQ ID NO: 677230 - RNA, 22 nt, Human
uagugccaccuuccaaguauca

SEQ ID NO: 677231 - RNA, 22 nt, Human
ucucccacugcaagcccaggcu

SEQ ID NO: 677232 - RNA, 22 nt, Human
cagaggaaggcucugggaaugu

SEQ ID NO: 677233 - RNA, 22 nt, Human
ccuguuuacaucaucaaggacu

SEQ ID NO: 677234 - RNA, 22 nt, Human
uuaguuuucucaucuaucucac

SEQ ID NO: 677235 - RNA, 22 nt, Human
ugcuggggguucagaugaguaa

SEQ ID NO: 677236 - RNA, 22 nt, Human
ccaggcccugcuccucacacca

SEQ ID NO: 677237 - RNA, 22 nt, Human
aaaugcuguguuuuaacauaga

SEQ ID NO: 677238 - RNA, 22 nt, Human
ccugccacuucuugcuauggag

SEQ ID NO: 677239 - RNA, 22 nt, Human
uaguagcaggaaucugaaggua

SEQ ID NO: 677240 - RNA, 22 nt, Human
gguggcaguggucucugacaga

SEQ ID NO: 677241 - RNA, 22 nt, Human
gaggggauuggaaggaacaccc

SEQ ID NO: 677242 - RNA, 22 nt, Human
ugacagcauaacacuggucuug

SEQ ID NO: 677243 - RNA, 21 nt, Human
cucuuuauauaguaaagauau

SEQ ID NO: 677244 - RNA, 23 nt, Human
cagcagagagcagaccuuugugu

SEQ ID NO: 677245 - RNA, 22 nt, Human
uggaaauguuucuugagcucag

SEQ ID NO: 677246 - RNA, 22 nt, Human
aggacaugugccuccagggcag

SEQ ID NO: 677247 - RNA, 17 nt, Human
cucuguggagguguuua

SEQ ID NO: 677248 - RNA, 22 nt, Human
cugggauccacgggcucccaag

SEQ ID NO: 677249 - RNA, 22 nt, Human
gaaaccugagugcagaucagga

SEQ ID NO: 677250 - RNA, 22 nt, Human
gggaacuguuuaacagggguuu

SEQ ID NO: 677251 - RNA, 22 nt, Human
aguaacagaaggccugacuuaa

SEQ ID NO: 677252 - RNA, 22 nt, Human
gaaagaguaugggagcuuuacu

SEQ ID NO: 677253 - RNA, 22 nt, Human
aacaaacucaaauggaagagug

SEQ ID NO: 677254 - RNA, 22 nt, Human
acaaaggcagccaaucaucugc

SEQ ID NO: 677255 - RNA, 22 nt, Human
ggcagcaaauauugucagcugu

SEQ ID NO: 677256 - RNA, 18 nt, Human
uucagcagcagacacacu

SEQ ID NO: 677257 - RNA, 22 nt, Human
ugugggaaguuuggagggaaag

SEQ ID NO: 677258 - RNA, 22 nt, Human
uauuucagguauggugugaaau

SEQ ID NO: 677259 - RNA, 22 nt, Human
auuugucacugagagaguuaga

SEQ ID NO: 677260 - RNA, 22 nt, Human
ucagagauucacgucaguccca

SEQ ID NO: 677261 - RNA, 22 nt, Human
ucuguagcuucuugagaggcca

SEQ ID NO: 677262 - RNA, 22 nt, Human
agcagguggccacgaggaggag

SEQ ID NO: 677263 - RNA, 20 nt, Human
ccagaggcugacagacuuug

SEQ ID NO: 677264 - RNA, 22 nt, Human
augggaggaaggaggcccuuga

SEQ ID NO: 677265 - RNA, 22 nt, Human
agagccugaggccaggaaaaug

SEQ ID NO: 677266 - RNA, 22 nt, Human
ucccacauaugcaauccugaau

SEQ ID NO: 677267 - RNA, 22 nt, Human
aacagcagaggagcgauggcug

SEQ ID NO: 677268 - RNA, 22 nt, Human
ccuggcacagagcgguggucac

SEQ ID NO: 677269 - RNA, 22 nt, Human
uuaauaaacaggugcagcugaa

SEQ ID NO: 677270 - RNA, 22 nt, Human
ucugauucauucaugugcacca

SEQ ID NO: 677271 - RNA, 22 nt, Human
cugagguaugugggacuagccu

SEQ ID NO: 677272 - RNA, 22 nt, Human
gcucacugcaaccucugcuucc

SEQ ID NO: 677273 - RNA, 22 nt, Human
gagcugguggugagaaagcucu

SEQ ID NO: 677274 - RNA, 22 nt, Human
acugggcucaagugauuguccu

SEQ ID NO: 677275 - RNA, 22 nt, Human
auguaaauuguacugacacacg

SEQ ID NO: 677276 - RNA, 22 nt, Human
uuuugguucugggauacagaga

SEQ ID NO: 677277 - RNA, 22 nt, Human
ugugugcauuagcauucuaggg

SEQ ID NO: 677278 - RNA, 22 nt, Human
ggggccagguccagcuuccaaa

SEQ ID NO: 677279 - RNA, 22 nt, Human
aggaccuuggaauaacaaauuc

SEQ ID NO: 677280 - RNA, 22 nt, Human
gauguuuucuggaaaaugaaug

SEQ ID NO: 677281 - RNA, 22 nt, Human
cauuuuaaaugauuuaagccaa

SEQ ID NO: 677282 - RNA, 22 nt, Human
gaggcuguuagggccugaggua

SEQ ID NO: 677283 - RNA, 21 nt, Human
gacagcaacuguaguccucuu

SEQ ID NO: 677284 - RNA, 22 nt, Human
gcaauaaacucucucaagccac

SEQ ID NO: 677285 - RNA, 22 nt, Human
gccugccuggagcuugagguga

SEQ ID NO: 677286 - RNA, 21 nt, Human
ugcaccuguucacugcaguuc

SEQ ID NO: 677287 - RNA, 22 nt, Human
auggcagucagagacaggcaga

SEQ ID NO: 677288 - RNA, 22 nt, Human
gcauugguuuacacagggugaa

SEQ ID NO: 677289 - RNA, 22 nt, Human
ugcagucuggauguccucagau

SEQ ID NO: 677290 - RNA, 22 nt, Human
ucagggaacaauguuauggcuu

SEQ ID NO: 677291 - RNA, 22 nt, Human
uuuuauuaucuuugaaugggac

SEQ ID NO: 677292 - RNA, 22 nt, Human
ugggaacauuuugagcugagag

SEQ ID NO: 677293 - RNA, 22 nt, Human
aaaugcacugaacacauguugu

SEQ ID NO: 677294 - RNA, 22 nt, Human
uggucauaacaugauuaguagg

SEQ ID NO: 677295 - RNA, 19 nt, Human
cuugguuaugguaugaugc

SEQ ID NO: 677296 - RNA, 23 nt, Human
auagaagauuauugcaacagucc

SEQ ID NO: 677297 - RNA, 22 nt, Human
guccagaguagucgaguauucu

SEQ ID NO: 677298 - RNA, 22 nt, Human
ugaugucucucuauacucuaac

SEQ ID NO: 677299 - RNA, 22 nt, Human
cagaugcugccugggaaugucu

SEQ ID NO: 677300 - RNA, 22 nt, Human
uuucucaguuacuagcuguggu

SEQ ID NO: 677301 - RNA, 22 nt, Human
uuccccugucacagugguucuc

SEQ ID NO: 677302 - RNA, 21 nt, Human
ugaauuucgguauggcuauaa

SEQ ID NO: 677303 - RNA, 22 nt, Human
aaucacaugaaaacuguguguu

SEQ ID NO: 677304 - RNA, 22 nt, Human
cugccccucgaccaagcgcguc

SEQ ID NO: 677305 - RNA, 22 nt, Human
caacugaacugauaucaacuau

SEQ ID NO: 677306 - RNA, 22 nt, Human
aaaaggcauggagguugauagu

SEQ ID NO: 677307 - RNA, 22 nt, Human
uagcugccagaccauucuuacu

SEQ ID NO: 677308 - RNA, 22 nt, Human
cucaggaggaggaaguucauug

SEQ ID NO: 677309 - RNA, 23 nt, Human
ucugaguuauguccuuacauuug

SEQ ID NO: 677310 - RNA, 22 nt, Human
cuccaggggccagaagccuggc

SEQ ID NO: 677311 - RNA, 22 nt, Human
uacuuuuaugugaugaaaucug

SEQ ID NO: 677312 - RNA, 22 nt, Human
uuacaauggguauacuuccauu

SEQ ID NO: 677313 - RNA, 22 nt, Human
uauacuauuauugucaguuuau

SEQ ID NO: 677314 - RNA, 22 nt, Human
gaggaagggcugccugccgggc

SEQ ID NO: 677315 - RNA, 22 nt, Human
caaauccuggagccaugguaac

SEQ ID NO: 677316 - RNA, 22 nt, Human
uuuagcaaaaaagcucugcgua

SEQ ID NO: 677317 - RNA, 22 nt, Human
acagaagcagcgcggcucuucu

SEQ ID NO: 677318 - RNA, 22 nt, Human
gcugccagcccagcaaggugug

SEQ ID NO: 677319 - RNA, 22 nt, Human
uuugaaaauuagacacaggcua

SEQ ID NO: 677320 - RNA, 22 nt, Human
caggaggaacaagagguucugg

SEQ ID NO: 677321 - RNA, 22 nt, Human
aagauacacggucaacucucaa

SEQ ID NO: 677322 - RNA, 22 nt, Human
cuagaacagaaaguacaggaaa

SEQ ID NO: 677323 - RNA, 22 nt, Human
aagcacaauuucaccuucuugu

SEQ ID NO: 677324 - RNA, 22 nt, Human
aaugcucugucucugacagugg

SEQ ID NO: 677325 - RNA, 22 nt, Human
ucugggaaugaauaagaccugu

SEQ ID NO: 677326 - RNA, 19 nt, Human
gggagagccaggcucaccc

SEQ ID NO: 677327 - RNA, 22 nt, Human
ucuuaaagccaagcauaaacca

SEQ ID NO: 677328 - RNA, 22 nt, Human
acuguguuaaauacagagaugg

SEQ ID NO: 677329 - RNA, 22 nt, Human
auacuuucugaccaauuaauug

SEQ ID NO: 677330 - RNA, 22 nt, Human
uugucugaauauguauguaucc

SEQ ID NO: 677331 - RNA, 22 nt, Human
aguguacaucagaacauaucaa

SEQ ID NO: 677332 - RNA, 22 nt, Human
acauacauaugacaacuuuccu

SEQ ID NO: 677333 - RNA, 22 nt, Human
uucauuuaaucagaaucucuaa

SEQ ID NO: 677334 - RNA, 22 nt, Human
uuaauucagucaaagaaaccau

SEQ ID NO: 677335 - RNA, 22 nt, Human
acaaauuguugggacucagccc

SEQ ID NO: 677336 - RNA, 20 nt, Human
cugugcuuuggaaccuggaa

SEQ ID NO: 677337 - RNA, 22 nt, Human
guaacacagaaaugaaauucca

SEQ ID NO: 677338 - RNA, 22 nt, Human
acacaggaacucugagaggugg

SEQ ID NO: 677339 - RNA, 22 nt, Human
guugaggaggcacucacuguca

SEQ ID NO: 677340 - RNA, 22 nt, Human
uuuuaguuuggauuucuaaagc

SEQ ID NO: 677341 - RNA, 22 nt, Human
uccuucuuucccccuagucauu

SEQ ID NO: 677342 - RNA, 22 nt, Human
auugcaagugcuagcuaaaaua

SEQ ID NO: 677343 - RNA, 22 nt, Human
gaggaaaucauuccagaaaagg

SEQ ID NO: 677344 - RNA, 22 nt, Human
aacauuuaggaaggaccuccuc

SEQ ID NO: 677345 - RNA, 22 nt, Human
ccugcucaugggucccuggcag

SEQ ID NO: 677346 - RNA, 22 nt, Human
aaggucacugaucaguugagua

SEQ ID NO: 677347 - RNA, 22 nt, Human
augacuuuccuggcaaaaguug

SEQ ID NO: 677348 - RNA, 18 nt, Human
ucucucugauaacauuuu

SEQ ID NO: 677349 - RNA, 22 nt, Human
gcagcucacagucuccgccauc

SEQ ID NO: 677350 - RNA, 22 nt, Human
guggcagggagaagccauuggg

SEQ ID NO: 677351 - RNA, 22 nt, Human
auggccauagccuuauagcagg

SEQ ID NO: 677352 - RNA, 22 nt, Human
uaggcaccaccuagggugaccc

SEQ ID NO: 677353 - RNA, 22 nt, Human
ucauaaauucuggugcugugag

SEQ ID NO: 677354 - RNA, 22 nt, Human
caauaacuaguaauuauuccgg

SEQ ID NO: 677355 - RNA, 22 nt, Human
aacuacuaccaguaguaguagu

SEQ ID NO: 677356 - RNA, 22 nt, Human
ggcuggaaccagagugaggcag

SEQ ID NO: 677357 - RNA, 22 nt, Human
auacacauaucagguguauaca

SEQ ID NO: 677358 - RNA, 22 nt, Human
cuucccacuaguaucacagagc

SEQ ID NO: 677359 - RNA, 22 nt, Human
ucauggcauuguuaaggguuuu

SEQ ID NO: 677360 - RNA, 22 nt, Human
uacuuuaaaaacugauaauuca

SEQ ID NO: 677361 - RNA, 22 nt, Human
ccugcagaaaggguccccagga

SEQ ID NO: 677362 - RNA, 22 nt, Human
cccagcucccugguauuugugc

SEQ ID NO: 677363 - RNA, 22 nt, Human
aaacacuucuuaggucuuaagu

SEQ ID NO: 677364 - RNA, 22 nt, Human
cuggagcuuauugggagcagaa

SEQ ID NO: 677365 - RNA, 22 nt, Human
uggcuaagcuggggaggccugg

SEQ ID NO: 677366 - RNA, 22 nt, Human
auucuuuccagacacugauugc

SEQ ID NO: 677367 - RNA, 22 nt, Human
uuggaagacagugaaacagcac

SEQ ID NO: 677368 - RNA, 20 nt, Human
cuagucucacaucccuggca

SEQ ID NO: 677369 - RNA, 22 nt, Human
aaggcagccauagcaccaucca

SEQ ID NO: 677370 - RNA, 22 nt, Human
ggcuuugacaugcugaauuaaa

SEQ ID NO: 677371 - RNA, 22 nt, Human
aggcagugcagaguccucuucu

SEQ ID NO: 677372 - RNA, 22 nt, Human
uugcuuuguggugguucuucca

SEQ ID NO: 677373 - RNA, 22 nt, Human
ggcagaggaaggaugaauucac

SEQ ID NO: 677374 - RNA, 19 nt, Human
aaggcagaaguuggauaug

SEQ ID NO: 677375 - RNA, 22 nt, Human
uaucacuugcguuuuggcagag

SEQ ID NO: 677376 - RNA, 23 nt, Human
ucaauaacucggguuaaaauaga

SEQ ID NO: 677377 - RNA, 22 nt, Human
ugccuacccugcccgcagacac

SEQ ID NO: 677378 - RNA, 17 nt, Human
ucugaggugaggaugca

SEQ ID NO: 677379 - RNA, 17 nt, Human
ggagcagauccaccauu

SEQ ID NO: 677380 - RNA, 22 nt, Human
agguaugccaauuaggucaagu

SEQ ID NO: 677381 - RNA, 17 nt, Human
agucagaggaguaucug

SEQ ID NO: 677382 - RNA, 22 nt, Human
agugcuuugaauguucugggca

SEQ ID NO: 677383 - RNA, 22 nt, Human
aaacaagucacuuuaucuugaa

SEQ ID NO: 677384 - RNA, 22 nt, Human
auguuugacugaguuuggcaga

SEQ ID NO: 677385 - RNA, 22 nt, Human
uuuggaauuggaaagugcugug

SEQ ID NO: 677386 - RNA, 21 nt, Human
ugucagcucccuguccugugu

SEQ ID NO: 677387 - RNA, 22 nt, Human
cagggcucagggacugcagaaa

SEQ ID NO: 677388 - RNA, 22 nt, Human
aggcucucacccucugaccaga

SEQ ID NO: 677389 - RNA, 22 nt, Human
cuggcuggaacgccgaggcggc

SEQ ID NO: 677390 - RNA, 22 nt, Human
gggcgaggacugacucugggca

SEQ ID NO: 677391 - RNA, 22 nt, Human
acacuagagagcaggcauuccc

SEQ ID NO: 677392 - RNA, 22 nt, Human
ugcuggggucucuccggugccc

SEQ ID NO: 677393 - RNA, 22 nt, Human
cugcagcugccagugauuucag

SEQ ID NO: 677394 - RNA, 22 nt, Human
gagcugccaguguaugaauucu

SEQ ID NO: 677395 - RNA, 22 nt, Human
uguaaccugacugcuuugcucu

SEQ ID NO: 677396 - RNA, 22 nt, Human
augucugugugaucuuggauaa

SEQ ID NO: 677397 - RNA, 22 nt, Human
ggucucagcaguugcuuugacu

SEQ ID NO: 677398 - RNA, 22 nt, Human
cccagggacagaugggcagcua

SEQ ID NO: 677399 - RNA, 22 nt, Human
ccaggcugagcaugauuggagc

SEQ ID NO: 677400 - RNA, 22 nt, Human
ggcaccaggggauguaaugucc

SEQ ID NO: 677401 - RNA, 22 nt, Human
gucaauaauugauagauauugg

SEQ ID NO: 677402 - RNA, 22 nt, Human
auucugaugcuucacaaaggua

SEQ ID NO: 677403 - RNA, 22 nt, Human
cucggagaugcuggcugagauc

SEQ ID NO: 677404 - RNA, 22 nt, Human
aggcaacaggaaaccacaugau

SEQ ID NO: 677405 - RNA, 22 nt, Human
cagaugaggcaaccucauugcu

SEQ ID NO: 677406 - RNA, 18 nt, Human
ucagaggagauaccuaaa

SEQ ID NO: 677407 - RNA, 22 nt, Human
uguacagagacuaccauuaaua

SEQ ID NO: 677408 - RNA, 22 nt, Human
caagcuccuuacauccacaggg

SEQ ID NO: 677409 - RNA, 22 nt, Human
guggcucacagcaauguuuccu

SEQ ID NO: 677410 - RNA, 22 nt, Human
guccagaguauucaaguaacuu

SEQ ID NO: 677411 - RNA, 22 nt, Human
gauuacaaaacucaucuaugac

SEQ ID NO: 677412 - RNA, 22 nt, Human
ugcuggaaagugaggugaauga

SEQ ID NO: 677413 - RNA, 22 nt, Human
uagggcuggguacacucuugcc

SEQ ID NO: 677414 - RNA, 22 nt, Human
cacagugugggcauggugccug

SEQ ID NO: 677415 - RNA, 22 nt, Human
aagcaccugcaccggucgccuu

SEQ ID NO: 677416 - RNA, 22 nt, Human
ccccuuccgucucuugaguguc

SEQ ID NO: 677417 - RNA, 18 nt, Human
ggccucagccuggccgga

SEQ ID NO: 677418 - RNA, 22 nt, Human
ggccugugcugagaaccuggcu

SEQ ID NO: 677419 - RNA, 22 nt, Human
acaucacacgccuuccaggagg

SEQ ID NO: 677420 - RNA, 22 nt, Human
uccugaauccaggagaguaggg

SEQ ID NO: 677421 - RNA, 22 nt, Human
ugguccuuuaagucuuucucug

SEQ ID NO: 677422 - RNA, 22 nt, Human
agaggaaucugucuagacacaa

SEQ ID NO: 677423 - RNA, 22 nt, Human
uccaggccugccugguguuugc

SEQ ID NO: 677424 - RNA, 22 nt, Human
aauuuuaugccuugcacguugg

SEQ ID NO: 677425 - RNA, 22 nt, Human
cucucaaaguaagguguauaca

SEQ ID NO: 677426 - RNA, 22 nt, Human
gccuuggacuaccacucccaca

SEQ ID NO: 677427 - RNA, 23 nt, Human
cgcccagccucagugaccugggc

SEQ ID NO: 677428 - RNA, 22 nt, Human
uaugaagaaaccuauccucuag

SEQ ID NO: 677429 - RNA, 22 nt, Human
caucaagauggaagagcaaaua

SEQ ID NO: 677430 - RNA, 22 nt, Human
cagugcuguugggcccagagag

SEQ ID NO: 677431 - RNA, 22 nt, Human
ugggagagugcucaaugugcaa

SEQ ID NO: 677432 - RNA, 18 nt, Human
gcugcaggcgccugcggu

SEQ ID NO: 677433 - RNA, 22 nt, Human
ugaagccagucaauguuaaguu

SEQ ID NO: 677434 - RNA, 22 nt, Human
ccugagcacacaucagaaucac

SEQ ID NO: 677435 - RNA, 22 nt, Human
gagaggcuccaugaccccggca

SEQ ID NO: 677436 - RNA, 22 nt, Human
aaccucuacauccaggaaagga

SEQ ID NO: 677437 - RNA, 22 nt, Human
aacagcuuuagaggauaauagu

SEQ ID NO: 677438 - RNA, 21 nt, Human
cccaacccauuuccaguucau

SEQ ID NO: 677439 - RNA, 22 nt, Human
agauaauuaugucaauuucuug

SEQ ID NO: 677440 - RNA, 22 nt, Human
uccugguguaaugguaagcaug

SEQ ID NO: 677441 - RNA, 22 nt, Human
agcagugagugggaggaccaug

SEQ ID NO: 677442 - RNA, 22 nt, Human
gcugagguggaggaaggagacc

SEQ ID NO: 677443 - RNA, 19 nt, Human
uccugcccaccagccaggg

SEQ ID NO: 677444 - RNA, 18 nt, Human
ggucugagaucguuuuuc

SEQ ID NO: 677445 - RNA, 22 nt, Human
uugcuuccuggcagggcgagcg

SEQ ID NO: 677446 - RNA, 22 nt, Human
ccagaggugggagugaucuggu

SEQ ID NO: 677447 - RNA, 22 nt, Human
cacuaauuccaucuccuuuucc

SEQ ID NO: 677448 - RNA, 22 nt, Human
auucccagguaaaaguagagcu

SEQ ID NO: 677449 - RNA, 18 nt, Human
agagagaauuccaguagg

SEQ ID NO: 677450 - RNA, 22 nt, Human
cuuuacuguuuggugcucuauu

SEQ ID NO: 677451 - RNA, 22 nt, Human
uacaguaacuggaauucuucuu

SEQ ID NO: 677452 - RNA, 22 nt, Human
cucagaagaacccaggguccca

SEQ ID NO: 677453 - RNA, 22 nt, Human
aaucuacauagagaucaaauga

SEQ ID NO: 677454 - RNA, 22 nt, Human
cgaacacacuugggaguucuga

SEQ ID NO: 677455 - RNA, 22 nt, Human
ucauuuaucgcugccuuuuaaa

SEQ ID NO: 677456 - RNA, 22 nt, Human
ggucugugaucuuauggauucu

SEQ ID NO: 677457 - RNA, 22 nt, Human
cugagccaaccacagcaggagc

SEQ ID NO: 677458 - RNA, 22 nt, Human
gagauuucuuuugaugccuguc

SEQ ID NO: 677459 - RNA, 22 nt, Human
cacacugaccugaacuuagcau

SEQ ID NO: 677460 - RNA, 22 nt, Human
ugggagugauacaguauggaau

SEQ ID NO: 677461 - RNA, 22 nt, Human
uacagucaagcauaagaaguca

SEQ ID NO: 677462 - RNA, 22 nt, Human
acuuugcacuaaguuacucauu

SEQ ID NO: 677463 - RNA, 19 nt, Human
uguguccuagcagccaguc

SEQ ID NO: 677464 - RNA, 22 nt, Human
aguuauuacucuuuaacauauu

SEQ ID NO: 677465 - RNA, 22 nt, Human
auguguguguauauacacacau

SEQ ID NO: 677466 - RNA, 22 nt, Human
cuggccucauagccaagcugug

SEQ ID NO: 677467 - RNA, 22 nt, Human
ugggaagggccgauggagccuc

SEQ ID NO: 677468 - RNA, 22 nt, Human
uuuaucagaggcuauguuucau

SEQ ID NO: 677469 - RNA, 22 nt, Human
gaggauggugagcaggacccag

SEQ ID NO: 677470 - RNA, 22 nt, Human
aacaggcuucuucugggcuccu

SEQ ID NO: 677471 - RNA, 22 nt, Human
uggccucugggaaagcagauuc

SEQ ID NO: 677472 - RNA, 22 nt, Human
agagucaccuuuuccucaggau

SEQ ID NO: 677473 - RNA, 22 nt, Human
agcugggaagaguuuucugcag

SEQ ID NO: 677474 - RNA, 22 nt, Human
cugcauugaucaggcagaaucu

SEQ ID NO: 677475 - RNA, 22 nt, Human
gaacagagcugacuacaaggca

SEQ ID NO: 677476 - RNA, 22 nt, Human
ucuauuuaccaaauguaguucc

SEQ ID NO: 677477 - RNA, 22 nt, Human
aucugcaguuuguuuucucuug

SEQ ID NO: 677478 - RNA, 22 nt, Human
ucauccuguauccucagaccau

SEQ ID NO: 677479 - RNA, 22 nt, Human
ugaagcaggcauugacugauga

SEQ ID NO: 677480 - RNA, 22 nt, Human
gcugacugguugcacagagggu

SEQ ID NO: 677481 - RNA, 22 nt, Human
ucauuuauagaagugggcagua

SEQ ID NO: 677482 - RNA, 22 nt, Human
agaggccaccacugucagggac

SEQ ID NO: 677483 - RNA, 22 nt, Human
augugcuuucuuuccaaggggc

SEQ ID NO: 677484 - RNA, 22 nt, Human
ucugcugagucagaccucuggg

SEQ ID NO: 677485 - RNA, 22 nt, Human
ucaguuuauaaauuguauuuag

SEQ ID NO: 677486 - RNA, 22 nt, Human
acuucacagauauuuauuuggu

SEQ ID NO: 677487 - RNA, 18 nt, Human
cccugaagggcaagauaa

SEQ ID NO: 677488 - RNA, 22 nt, Human
guacuucuuaaauuaggaucaa

SEQ ID NO: 677489 - RNA, 22 nt, Human
gcucagcugggaccaauguguu

SEQ ID NO: 677490 - RNA, 20 nt, Human
uuucaguugguuaauggcau

SEQ ID NO: 677491 - RNA, 22 nt, Human
ggcagcagggcugucucccuac

SEQ ID NO: 677492 - RNA, 22 nt, Human
ucagaggaucaugucccuacuc

SEQ ID NO: 677493 - RNA, 22 nt, Human
uguggcuggucuccgagcgucg

SEQ ID NO: 677494 - RNA, 22 nt, Human
ccauccaugguguugguuguau

SEQ ID NO: 677495 - RNA, 22 nt, Human
acucuucacuuccccugccagc

SEQ ID NO: 677496 - RNA, 22 nt, Human
ucacagaagagauauugacaga

SEQ ID NO: 677497 - RNA, 22 nt, Human
gcaggagucagcccuaccuuga

SEQ ID NO: 677498 - RNA, 22 nt, Human
ggcagugccugaugcugcagga

SEQ ID NO: 677499 - RNA, 22 nt, Human
gcuaggcuucaaaaucucccug

SEQ ID NO: 677500 - RNA, 22 nt, Human
gucuccuccauggagaugguau

SEQ ID NO: 677501 - RNA, 23 nt, Human
ugccaggguuuguuugugguuca

SEQ ID NO: 677502 - RNA, 22 nt, Human
acugagcucuugacugggaguu

SEQ ID NO: 677503 - RNA, 22 nt, Human
uauggaaaaauguaucuuguca

SEQ ID NO: 677504 - RNA, 22 nt, Human
ucaugugacaggcacuguucug

SEQ ID NO: 677505 - RNA, 22 nt, Human
ucccacaggaggaguuggaaau

SEQ ID NO: 677506 - RNA, 22 nt, Human
agggccacaguggggccugaga

SEQ ID NO: 677507 - RNA, 22 nt, Human
uucccuuccucacucuacuugu

SEQ ID NO: 677508 - RNA, 23 nt, Human
uugauuuagcugggauugcaugc

SEQ ID NO: 677509 - RNA, 22 nt, Human
ggcacugggaaugcagugauga

SEQ ID NO: 677510 - RNA, 22 nt, Human
cccaggugggcaccucgaggaa

SEQ ID NO: 677511 - RNA, 17 nt, Human
ugagcuucaaucaggug

SEQ ID NO: 677512 - RNA, 22 nt, Human
ucagauggcacacagagccugc

SEQ ID NO: 677513 - RNA, 22 nt, Human
aucuagaaaguguugaagauca

SEQ ID NO: 677514 - RNA, 22 nt, Human
caguaguaguuaaacuguguau

SEQ ID NO: 677515 - RNA, 22 nt, Human
uuacagauggaucuagcaaaau

SEQ ID NO: 677516 - RNA, 22 nt, Human
uuauuuaggaggaaacugaggu

SEQ ID NO: 677517 - RNA, 19 nt, Human
uccuggggauguggucacc

SEQ ID NO: 677518 - RNA, 22 nt, Human
cagggcuuacuggaggcugcuu

SEQ ID NO: 677519 - RNA, 22 nt, Human
ugcaugugcccacucuggcuua

SEQ ID NO: 677520 - RNA, 22 nt, Human
gggcagaugucuggacaccuca

SEQ ID NO: 677521 - RNA, 22 nt, Human
gagcucauacccucuucucuuu

SEQ ID NO: 677522 - RNA, 22 nt, Human
gugcugucaauugcuuucagua

SEQ ID NO: 677523 - RNA, 23 nt, Human
aaaguguagccagguuaagaacc

SEQ ID NO: 677524 - RNA, 20 nt, Human
ugugcccaauguccagguuc

SEQ ID NO: 677525 - RNA, 22 nt, Human
caaaggagguaaugggugugag

SEQ ID NO: 677526 - RNA, 18 nt, Human
uagaggggaagaccuuua

SEQ ID NO: 677527 - RNA, 19 nt, Human
ggauccagaggaucugcca

SEQ ID NO: 677528 - RNA, 22 nt, Human
uauggcuaauucuuuacugacc

SEQ ID NO: 677529 - RNA, 22 nt, Human
aaggaggaauuucagggugaau

SEQ ID NO: 677530 - RNA, 22 nt, Human
ugucaguuuggcucuaaaguuu

SEQ ID NO: 677531 - RNA, 22 nt, Human
uagcucauguaauccgaacaua

SEQ ID NO: 677532 - RNA, 22 nt, Human
uagauucuccacauguagcaau

SEQ ID NO: 677533 - RNA, 22 nt, Human
aggcacugaccugcuuccuuga

SEQ ID NO: 677534 - RNA, 22 nt, Human
gccugcucagaccuagcaggcc

SEQ ID NO: 677535 - RNA, 22 nt, Human
uguccucuaauuggccucuugc

SEQ ID NO: 677536 - RNA, 22 nt, Human
caugggcucuucuggacugcac

SEQ ID NO: 677537 - RNA, 22 nt, Human
ccugagauggggauuauuccaa

SEQ ID NO: 677538 - RNA, 22 nt, Human
uccucugccaaagggaguugcc

SEQ ID NO: 677539 - RNA, 22 nt, Human
cauaauuucccaagagauugaa

SEQ ID NO: 677540 - RNA, 19 nt, Human
agucauauuguucaucuug

SEQ ID NO: 677541 - RNA, 20 nt, Human
ucucauuauauccaagaggc

SEQ ID NO: 677542 - RNA, 22 nt, Human
ucucacacuauuuauucugcuu

SEQ ID NO: 677543 - RNA, 22 nt, Human
cuggccaauccauuaauuuguu

SEQ ID NO: 677544 - RNA, 22 nt, Human
caacagagggaauggaucucau

SEQ ID NO: 677545 - RNA, 22 nt, Human
ucaguguagcagacuuguagcc

SEQ ID NO: 677546 - RNA, 22 nt, Human
acucccuugugaacucauucuu

SEQ ID NO: 677547 - RNA, 20 nt, Human
uuauuuccaguccagguccu

SEQ ID NO: 677548 - RNA, 22 nt, Human
ucuuccucucuaauugaucaga

SEQ ID NO: 677549 - RNA, 23 nt, Human
ccaggcaguagcuauugaaguga

SEQ ID NO: 677550 - RNA, 22 nt, Human
agcacagaguugcagagagcgu

SEQ ID NO: 677551 - RNA, 22 nt, Human
agaggggguguuccagaagcau

SEQ ID NO: 677552 - RNA, 22 nt, Human
gcagcccugcaggcagcuccag

SEQ ID NO: 677553 - RNA, 22 nt, Human
uaauaauuaacagugauggguc

SEQ ID NO: 677554 - RNA, 22 nt, Human
uuaaggcauucuccuacuaaua

SEQ ID NO: 677555 - RNA, 22 nt, Human
cccugaggcaaaggcuagaguu

SEQ ID NO: 677556 - RNA, 22 nt, Human
cuggcugggagcucgccugcgg

SEQ ID NO: 677557 - RNA, 20 nt, Human
gcugggcuuugacugacaca

SEQ ID NO: 677558 - RNA, 21 nt, Human
guuuucaugauagagucugua

SEQ ID NO: 677559 - RNA, 22 nt, Human
ggucagggcucuuccaguggcu

SEQ ID NO: 677560 - RNA, 22 nt, Human
aguccccucuaacccaacuuua

SEQ ID NO: 677561 - RNA, 20 nt, Human
uguggaaaaacagaagcaga

SEQ ID NO: 677562 - RNA, 22 nt, Human
aucuacaacggguggaguaggg

SEQ ID NO: 677563 - RNA, 22 nt, Human
gaaagcuuccauuuuguacauu

SEQ ID NO: 677564 - RNA, 17 nt, Human
ucaaagaaugcaugcag

SEQ ID NO: 677565 - RNA, 22 nt, Human
cacuugaagugaauugcucacc

SEQ ID NO: 677566 - RNA, 22 nt, Human
caggugcugcguggcggagcug

SEQ ID NO: 677567 - RNA, 22 nt, Human
gacagcaaugacggggcagcug

SEQ ID NO: 677568 - RNA, 22 nt, Human
ccugcuguagggccccuggggc

SEQ ID NO: 677569 - RNA, 22 nt, Human
aggcuacauguugggguggaag

SEQ ID NO: 677570 - RNA, 23 nt, Human
uccuggguuugaauucuagucuu

SEQ ID NO: 677571 - RNA, 22 nt, Human
ggcaacaacuggacauagcugg

SEQ ID NO: 677572 - RNA, 22 nt, Human
caguaaugggcaagacaauaug

SEQ ID NO: 677573 - RNA, 22 nt, Human
cuguccucaccuuggcaggggg

SEQ ID NO: 677574 - RNA, 22 nt, Human
cucugcaggccuugaguguggu

SEQ ID NO: 677575 - RNA, 22 nt, Human
uauuacauccacuuuuauugca

SEQ ID NO: 677576 - RNA, 22 nt, Human
cggggagaacacuguguccuuc

SEQ ID NO: 677577 - RNA, 22 nt, Human
cugaggggaaaagucaggauga

SEQ ID NO: 677578 - RNA, 22 nt, Human
gcuggcuggaggagggagguug

SEQ ID NO: 677579 - RNA, 22 nt, Human
cuggaguccugcauuugcucuu

SEQ ID NO: 677580 - RNA, 22 nt, Human
uggcaaagacgcuagcuaagau

SEQ ID NO: 677581 - RNA, 20 nt, Human
ggaaaaguacuccuccuuaa

SEQ ID NO: 677582 - RNA, 22 nt, Human
uguguauuaauguuuguauaug

SEQ ID NO: 677583 - RNA, 22 nt, Human
ccacccuggacucgaggcccga

SEQ ID NO: 677584 - RNA, 22 nt, Human
agaguuuggagguguuccugga

SEQ ID NO: 677585 - RNA, 22 nt, Human
ccaaggcugucauucaguagcu

SEQ ID NO: 677586 - RNA, 22 nt, Human
gagaacacuaaugguuucuuaa

SEQ ID NO: 677587 - RNA, 17 nt, Human
cagaaggaagcauggca

SEQ ID NO: 677588 - RNA, 22 nt, Human
ucagaggcugcauuuuuaucca

SEQ ID NO: 677589 - RNA, 22 nt, Human
gcuauucaucaauuguucuagc

SEQ ID NO: 677590 - RNA, 22 nt, Human
gagccagccgcaagagcuguga

SEQ ID NO: 677591 - RNA, 22 nt, Human
ugucuuacaugagucaccccaa

SEQ ID NO: 677592 - RNA, 22 nt, Human
gcgggcgcucaggcugcagcug

SEQ ID NO: 677593 - RNA, 22 nt, Human
uuuauguaauuucauaggugug

SEQ ID NO: 677594 - RNA, 22 nt, Human
gaugagacagaauagcccaagg

SEQ ID NO: 677595 - RNA, 22 nt, Human
agaguucugucugccacacgaa

SEQ ID NO: 677596 - RNA, 20 nt, Human
auccuuaaagagaauuucua

SEQ ID NO: 677597 - RNA, 22 nt, Human
uguguguucucaauuauugaug

SEQ ID NO: 677598 - RNA, 22 nt, Human
uugguuuaggaacuggcuugga

SEQ ID NO: 677599 - RNA, 22 nt, Human
agcaacauuuuucaauuaacau

SEQ ID NO: 677600 - RNA, 22 nt, Human
gcugcucugcuguguaagcagg

SEQ ID NO: 677601 - RNA, 22 nt, Human
ccugggagagccaucuguggcc

SEQ ID NO: 677602 - RNA, 22 nt, Human
ugauucuagguccauuauuugc

SEQ ID NO: 677603 - RNA, 22 nt, Human
ugguguguacauuuuugcuucu

SEQ ID NO: 677604 - RNA, 22 nt, Human
accuuaaaggccgaaguaaaga

SEQ ID NO: 677605 - RNA, 20 nt, Human
gcuuccaggagggcugauau

SEQ ID NO: 677606 - RNA, 22 nt, Human
cuccagcucgcgagcucugcuc

SEQ ID NO: 677607 - RNA, 22 nt, Human
ucaaguucacagucuggucgcu

SEQ ID NO: 677608 - RNA, 22 nt, Human
aggcccuggucaggucuggcug

SEQ ID NO: 677609 - RNA, 22 nt, Human
gccucgaggcugagaaggcaca

SEQ ID NO: 677610 - RNA, 22 nt, Human
uauuugcaacauaaaacucuga

SEQ ID NO: 677611 - RNA, 17 nt, Human
aauugcuuguacuccca

SEQ ID NO: 677612 - RNA, 21 nt, Human
gagcaucuccuuccuccugcu

SEQ ID NO: 677613 - RNA, 17 nt, Human
uccuucagugccucugc

SEQ ID NO: 677614 - RNA, 16 nt, Human
aguggcagauaauacc

SEQ ID NO: 677615 - RNA, 22 nt, Human
gcacagggcccugugcguaggu

SEQ ID NO: 677616 - RNA, 22 nt, Human
cuggcugccacuucagggucuu

SEQ ID NO: 677617 - RNA, 22 nt, Human
uucaaaacagcuagauauugga

SEQ ID NO: 677618 - RNA, 22 nt, Human
ugggagcagcugggaacacagc

SEQ ID NO: 677619 - RNA, 22 nt, Human
ucgggguagacgccagcucgga

SEQ ID NO: 677620 - RNA, 22 nt, Human
cagggcucugccuugagggaug

SEQ ID NO: 677621 - RNA, 22 nt, Human
cuuccucucaauaagaugagaa

SEQ ID NO: 677622 - RNA, 23 nt, Human
gggggagcuggacuccuagaucc

SEQ ID NO: 677623 - RNA, 22 nt, Human
cagagggcuguguaaggauguu

SEQ ID NO: 677624 - RNA, 22 nt, Human
ggucccaagcaaugcccuuggc

SEQ ID NO: 677625 - RNA, 22 nt, Human
aaagcuaugaggcaugcauuuc

SEQ ID NO: 677626 - RNA, 22 nt, Human
aagcacuaggucacacaaguua

SEQ ID NO: 677627 - RNA, 22 nt, Human
uaauccguacauuauucugaac

SEQ ID NO: 677628 - RNA, 21 nt, Human
agaaaaacacgauauaagccc

SEQ ID NO: 677629 - RNA, 22 nt, Human
agaggccagcagugccuaucug

SEQ ID NO: 677630 - RNA, 22 nt, Human
caugcuaaccagagacauaaag

SEQ ID NO: 677631 - RNA, 22 nt, Human
ucucugggccucccuuuccaag

SEQ ID NO: 677632 - RNA, 22 nt, Human
auuuucugaguccagaauuuac

SEQ ID NO: 677633 - RNA, 22 nt, Human
gugaugucagcaagaauaggaa

SEQ ID NO: 677634 - RNA, 22 nt, Human
acaggucugugugcacagugcu

SEQ ID NO: 677635 - RNA, 23 nt, Human
ucuccaggccuuacuccaggccu

SEQ ID NO: 677636 - RNA, 22 nt, Human
auacaugucaucauauguuugu

SEQ ID NO: 677637 - RNA, 22 nt, Human
auucuacacaacaugaugaugg

SEQ ID NO: 677638 - RNA, 22 nt, Human
uagaaucauaccucuaggaaca

SEQ ID NO: 677639 - RNA, 22 nt, Human
gguaccaugagaugccacuaau

SEQ ID NO: 677640 - RNA, 22 nt, Human
uucaagaguccaggagagucug

SEQ ID NO: 677641 - RNA, 22 nt, Human
aagcuccccgaaacccaccucu

SEQ ID NO: 677642 - RNA, 22 nt, Human
cuggccuucagacucggacuga

SEQ ID NO: 677643 - RNA, 22 nt, Human
uggagagguugaauaacuuguc

SEQ ID NO: 677644 - RNA, 22 nt, Human
cugacccuuuaggguauguuua

SEQ ID NO: 677645 - RNA, 22 nt, Human
guaaaacaagcuuuaugguucc

SEQ ID NO: 677646 - RNA, 22 nt, Human
aggcacagauuuggggaaagca

SEQ ID NO: 677647 - RNA, 17 nt, Human
gccagggagaggaagcc

SEQ ID NO: 677648 - RNA, 22 nt, Human
uuccuuccucuuucacaacagc

SEQ ID NO: 677649 - RNA, 22 nt, Human
uuuaggucuucuuaagagucaa

SEQ ID NO: 677650 - RNA, 22 nt, Human
ccuucaaauuuagaacaaguga

SEQ ID NO: 677651 - RNA, 22 nt, Human
guggaacauguccauauacauu

SEQ ID NO: 677652 - RNA, 22 nt, Human
aaguguccucauucaacaugca

SEQ ID NO: 677653 - RNA, 22 nt, Human
ucaaucaaagcacugggcuuug

SEQ ID NO: 677654 - RNA, 22 nt, Human
caugaacaccaggcaugaacaa

SEQ ID NO: 677655 - RNA, 22 nt, Human
uuacacucauauugcacuuacc

SEQ ID NO: 677656 - RNA, 22 nt, Human
gccaguggguaguuggagcugg

SEQ ID NO: 677657 - RNA, 22 nt, Human
gcaccacuagaguagagauggu

SEQ ID NO: 677658 - RNA, 22 nt, Human
cugucauuucuuuagcaauggg

SEQ ID NO: 677659 - RNA, 22 nt, Human
agaccacuggccuccugcagac

SEQ ID NO: 677660 - RNA, 22 nt, Human
ugcuccgggaaagagcagccgc

SEQ ID NO: 677661 - RNA, 22 nt, Human
ugaguccagaugggccagcagg

SEQ ID NO: 677662 - RNA, 22 nt, Human
uaccaaauguaaucauucuaau

SEQ ID NO: 677663 - RNA, 22 nt, Human
cuccuccagugggucccucagg

SEQ ID NO: 677664 - RNA, 22 nt, Human
guagcccaccuggggagggcga

SEQ ID NO: 677665 - RNA, 22 nt, Human
uggguacuccuauuaguucagu

SEQ ID NO: 677666 - RNA, 22 nt, Human
cagaaagcucuuucaaucuugc

SEQ ID NO: 677667 - RNA, 22 nt, Human
agaagugcuccagugaguuggg

SEQ ID NO: 677668 - RNA, 22 nt, Human
ugaucuuuccucuuguuugucu

SEQ ID NO: 677669 - RNA, 22 nt, Human
cuccaggcuggauccaagucaa

SEQ ID NO: 677670 - RNA, 22 nt, Human
cauuugcauaugaagaaguaag

SEQ ID NO: 677671 - RNA, 22 nt, Human
uggauccagcugcuccuaugag

SEQ ID NO: 677672 - RNA, 22 nt, Human
caguauaugcucuuucaucaaa

SEQ ID NO: 677673 - RNA, 22 nt, Human
agccugggcaugggacgggagg

SEQ ID NO: 677674 - RNA, 22 nt, Human
cagcuucugcucauggaggggu

SEQ ID NO: 677675 - RNA, 22 nt, Human
uagaaacaaaaucugaugacuc

SEQ ID NO: 677676 - RNA, 22 nt, Human
ucacacaugcuaagccagagau

SEQ ID NO: 677677 - RNA, 19 nt, Human
uggcugagcuggacugagg

SEQ ID NO: 677678 - RNA, 22 nt, Human
ggucccuagagugggaugacuu

SEQ ID NO: 677679 - RNA, 22 nt, Human
cugcugugcauauuuaucuagg

SEQ ID NO: 677680 - RNA, 22 nt, Human
cagugaggaguccagggcagag

SEQ ID NO: 677681 - RNA, 22 nt, Human
uuaguugaugcuaagggauccc

SEQ ID NO: 677682 - RNA, 22 nt, Human
caagguuuacauugggcuauca

SEQ ID NO: 677683 - RNA, 22 nt, Human
agagggugaaugagauagaaaa

SEQ ID NO: 677684 - RNA, 22 nt, Human
cagggcaguaacgggaacaucu

SEQ ID NO: 677685 - RNA, 22 nt, Human
ugcugcaguguuugcugaaguu

SEQ ID NO: 677686 - RNA, 22 nt, Human
auucuucauuguugauucaugu

SEQ ID NO: 677687 - RNA, 22 nt, Human
ucauuuucccacugaagcuguc

SEQ ID NO: 677688 - RNA, 22 nt, Human
ucauguauuugugauagaugac

SEQ ID NO: 677689 - RNA, 22 nt, Human
gacagagauugaaucaggaaau

SEQ ID NO: 677690 - RNA, 22 nt, Human
guccuugaguaagucauggugg

SEQ ID NO: 677691 - RNA, 22 nt, Human
ccacugcucugccaggagcugg

SEQ ID NO: 677692 - RNA, 22 nt, Human
gccaccagggggugcaaggucc

SEQ ID NO: 677693 - RNA, 19 nt, Human
acccucucagugccugagg

SEQ ID NO: 677694 - RNA, 22 nt, Human
aacuuguauauguuauucagag

SEQ ID NO: 677695 - RNA, 22 nt, Human
ccaggaugacccccacuuuccu

SEQ ID NO: 677696 - RNA, 22 nt, Human
cugaggagcccccucucagcau

SEQ ID NO: 677697 - RNA, 22 nt, Human
uggauuauuguaagacaaagua

SEQ ID NO: 677698 - RNA, 22 nt, Human
cagaagggacaggguuuguaga

SEQ ID NO: 677699 - RNA, 22 nt, Human
uuggcuucaaugucagagacag

SEQ ID NO: 677700 - RNA, 19 nt, Human
cugggccagagcuguccuc

SEQ ID NO: 677701 - RNA, 22 nt, Human
aaaugcauuucacuaauguuuc

SEQ ID NO: 677702 - RNA, 20 nt, Human
gccuggaggcaaugggaaga

SEQ ID NO: 677703 - RNA, 22 nt, Human
ucuggcccagccccugauccca

SEQ ID NO: 677704 - RNA, 22 nt, Human
gacaaacugaaguauauuuaga

SEQ ID NO: 677705 - RNA, 22 nt, Human
cuguagcagacagacccuaggu

SEQ ID NO: 677706 - RNA, 22 nt, Human
ucuuccugcuuuggugaggcuu

SEQ ID NO: 677707 - RNA, 20 nt, Human
ugcugcugccuccgccucug

SEQ ID NO: 677708 - RNA, 17 nt, Human
ucagcaggggccaagcu

SEQ ID NO: 677709 - RNA, 22 nt, Human
ccaggcaauguucuaagugauu

SEQ ID NO: 677710 - RNA, 22 nt, Human
gcuucgcugcuagcuaguuggu

SEQ ID NO: 677711 - RNA, 22 nt, Human
uuauuuucagcuaggaaagcca

SEQ ID NO: 677712 - RNA, 22 nt, Human
gguccucuccagcgccacagug

SEQ ID NO: 677713 - RNA, 22 nt, Human
ggcugggagcuggacaggccgg

SEQ ID NO: 677714 - RNA, 22 nt, Human
ugaauucuuaaugaaaucuacu

SEQ ID NO: 677715 - RNA, 22 nt, Human
agcccuggggcuggucuuggaa

SEQ ID NO: 677716 - RNA, 22 nt, Human
aggcuccauuuuccugcagcug

SEQ ID NO: 677717 - RNA, 22 nt, Human
uuauguacaauguuaauguaaa

SEQ ID NO: 677718 - RNA, 22 nt, Human
ucccagccuuccuuguggugaa

SEQ ID NO: 677719 - RNA, 22 nt, Human
aggauccuguauggagaagcug

SEQ ID NO: 677720 - RNA, 22 nt, Human
uucccugagucucccugagucu

SEQ ID NO: 677721 - RNA, 22 nt, Human
gagcaggaugggagcuggggcc

SEQ ID NO: 677722 - RNA, 22 nt, Human
cuucugcugccgccucggcaca

SEQ ID NO: 677723 - RNA, 22 nt, Human
aggcacagugccuggaaucaaa

SEQ ID NO: 677724 - RNA, 22 nt, Human
cuccagccucaucuccuggcug

SEQ ID NO: 677725 - RNA, 22 nt, Human
aucuaagagagagagcaugucu

SEQ ID NO: 677726 - RNA, 22 nt, Human
acucuggcgggcgggcgagcca

SEQ ID NO: 677727 - RNA, 22 nt, Human
uuucagaaagcugaacauauga

SEQ ID NO: 677728 - RNA, 22 nt, Human
cugcuggcuucuagucauucaa

SEQ ID NO: 677729 - RNA, 22 nt, Human
uguggcagaggaggcagcgucc

SEQ ID NO: 677730 - RNA, 23 nt, Human
acuuuauugaccccaggucaguu

SEQ ID NO: 677731 - RNA, 22 nt, Human
ugaggugaagaguggagcucag

SEQ ID NO: 677732 - RNA, 22 nt, Human
ggggugagguuuauguucuggg

SEQ ID NO: 677733 - RNA, 22 nt, Human
uuuagcaucgaaguaaauuuag

SEQ ID NO: 677734 - RNA, 22 nt, Human
ccuggugcuuaccagagcuuuu

SEQ ID NO: 677735 - RNA, 20 nt, Human
augaagacaaauccgacuug

SEQ ID NO: 677736 - RNA, 23 nt, Human
acagccaggaugggagcagaagc

SEQ ID NO: 677737 - RNA, 22 nt, Human
cuucaguuagaguuuacaaagu

SEQ ID NO: 677738 - RNA, 22 nt, Human
auucaagaggaacaaugaagau

SEQ ID NO: 677739 - RNA, 22 nt, Human
uguccuggggacaagaggcccu

SEQ ID NO: 677740 - RNA, 22 nt, Human
uuauuguuuaaagccauguaaa

SEQ ID NO: 677741 - RNA, 22 nt, Human
gggaagggagggaccucagucu

SEQ ID NO: 677742 - RNA, 21 nt, Human
cugccaggauagcaugcaggc

SEQ ID NO: 677743 - RNA, 22 nt, Human
aggucucugaguacugcuggac

SEQ ID NO: 677744 - RNA, 22 nt, Human
gggcacuggcagucggggacgc

SEQ ID NO: 677745 - RNA, 18 nt, Human
gugcaugcaugcucugcc

SEQ ID NO: 677746 - RNA, 22 nt, Human
caguaguggggagcccaguguc

SEQ ID NO: 677747 - RNA, 22 nt, Human
ggaggccaccugaccugcuguu

SEQ ID NO: 677748 - RNA, 22 nt, Human
guccuucagggagucaaacacu

SEQ ID NO: 677749 - RNA, 22 nt, Human
caccagcuugggcuguggaaau

SEQ ID NO: 677750 - RNA, 22 nt, Human
uuugaaagcaggugugggaggg

SEQ ID NO: 677751 - RNA, 22 nt, Human
gcaggaugggagcuucacuuug

SEQ ID NO: 677752 - RNA, 22 nt, Human
acaggccucaagacacccaggu

SEQ ID NO: 677753 - RNA, 22 nt, Human
caggugaaaaagcaaccauauu

SEQ ID NO: 677754 - RNA, 22 nt, Human
ggcaggugccuucugugcuagc

SEQ ID NO: 677755 - RNA, 22 nt, Human
agaggucauaucucagaagaga

SEQ ID NO: 677756 - RNA, 22 nt, Human
gccuccggagucacagugucuu

SEQ ID NO: 677757 - RNA, 22 nt, Human
uacauaauuaaucuuuaaguuc

SEQ ID NO: 677758 - RNA, 22 nt, Human
aggcugugggguucugcuuuca

SEQ ID NO: 677759 - RNA, 22 nt, Human
agcacuggaguuuagugggauu

SEQ ID NO: 677760 - RNA, 22 nt, Human
cucuaaauccacgguauaguug

SEQ ID NO: 677761 - RNA, 22 nt, Human
uaauuuuccacucuguuuaucu

SEQ ID NO: 677762 - RNA, 22 nt, Human
aaggccagauucucucuagggg

SEQ ID NO: 677763 - RNA, 22 nt, Human
gaggcaccagccccgcuagccu

SEQ ID NO: 677764 - RNA, 19 nt, Human
gugucugccuuugugccac

SEQ ID NO: 677765 - RNA, 22 nt, Human
ugagccugcaauaagcacagcc

SEQ ID NO: 677766 - RNA, 23 nt, Human
auggagcugguacuagcuaccuc

SEQ ID NO: 677767 - RNA, 22 nt, Human
cuucccuuggugaacagagcau

SEQ ID NO: 677768 - RNA, 22 nt, Human
agaggccagcacugcagggaag

SEQ ID NO: 677769 - RNA, 22 nt, Human
ugcucaguuccaugaguggagu

SEQ ID NO: 677770 - RNA, 22 nt, Human
augcuauacucaaagaaauuca

SEQ ID NO: 677771 - RNA, 22 nt, Human
uuggcagaaauguggcugggag

SEQ ID NO: 677772 - RNA, 23 nt, Human
ucuuggcuggacaagucacucac

SEQ ID NO: 677773 - RNA, 22 nt, Human
cuucucagaucucagcuuugag

SEQ ID NO: 677774 - RNA, 22 nt, Human
gccacaugcaauugcagcacgu

SEQ ID NO: 677775 - RNA, 22 nt, Human
aucaggugaagucacugagugg

SEQ ID NO: 677776 - RNA, 22 nt, Human
acagggaaagggacagcagcag

SEQ ID NO: 677777 - RNA, 22 nt, Human
ugcccuggcuccucccacgcug

SEQ ID NO: 677778 - RNA, 22 nt, Human
ggguccagaaugagaaugggcu

SEQ ID NO: 677779 - RNA, 22 nt, Human
augucugagucugcuccaguug

SEQ ID NO: 677780 - RNA, 22 nt, Human
cacaggaaucgucacuuagcgc

SEQ ID NO: 677781 - RNA, 22 nt, Human
ucagugcuuccuggaggaagcc

SEQ ID NO: 677782 - RNA, 22 nt, Human
gagggugcugugccaagaugac

SEQ ID NO: 677783 - RNA, 22 nt, Human
uuuucuccuuucaagauagcau

SEQ ID NO: 677784 - RNA, 22 nt, Human
acaguugacagggagaggguua

SEQ ID NO: 677785 - RNA, 22 nt, Human
uauugacaauuugugaaacuau

SEQ ID NO: 677786 - RNA, 22 nt, Human
ugagccugaguucaaggcugca

SEQ ID NO: 677787 - RNA, 22 nt, Human
guuuccugaaauagaguacugg

SEQ ID NO: 677788 - RNA, 22 nt, Human
ucuucagugcaccugaugucuu

SEQ ID NO: 677789 - RNA, 22 nt, Human
acucucugucuaaaugcaguuu

SEQ ID NO: 677790 - RNA, 22 nt, Human
gcucccagguucuugggccuug

SEQ ID NO: 677791 - RNA, 22 nt, Human
guacuuuagaguaaaauagacc

SEQ ID NO: 677792 - RNA, 22 nt, Human
caugugucaaaugauguagcug

SEQ ID NO: 677793 - RNA, 20 nt, Human
agggucuggcccuguuccuu

SEQ ID NO: 677794 - RNA, 22 nt, Human
cucgcaggacagugcuaggacu

SEQ ID NO: 677795 - RNA, 23 nt, Human
ccugaagggucaggguccucagc

SEQ ID NO: 677796 - RNA, 19 nt, Human
uucucaguucaggagaaga

SEQ ID NO: 677797 - RNA, 22 nt, Human
agaggacacaucuuuccucaaa

SEQ ID NO: 677798 - RNA, 22 nt, Human
uauuuuacaugacagguguuua

SEQ ID NO: 677799 - RNA, 22 nt, Human
uuccagagcaguuuucagauca

SEQ ID NO: 677800 - RNA, 22 nt, Human
ccucccucuguuagagcugucu

SEQ ID NO: 677801 - RNA, 22 nt, Human
uuggaaggaauuaaggucauga

SEQ ID NO: 677802 - RNA, 18 nt, Human
uuaauguggcuuacuaug

SEQ ID NO: 677803 - RNA, 22 nt, Human
ugcaauaaggaguaauaguaaa

SEQ ID NO: 677804 - RNA, 22 nt, Human
ucugggcaguucggauccucug

SEQ ID NO: 677805 - RNA, 19 nt, Human
guacagugguaagcuauga

SEQ ID NO: 677806 - RNA, 22 nt, Human
gcuaggugcagcagacagcuua

SEQ ID NO: 677807 - RNA, 22 nt, Human
aagccagggguugguaugcuau

SEQ ID NO: 677808 - RNA, 22 nt, Human
ggccugagaauguaccagaucu

SEQ ID NO: 677809 - RNA, 22 nt, Human
acagauuuuauuauucagguau

SEQ ID NO: 677810 - RNA, 22 nt, Human
ucagaagcaggagugugcacaa

SEQ ID NO: 677811 - RNA, 22 nt, Human
cagaaacaggcaacgugugcac

SEQ ID NO: 677812 - RNA, 22 nt, Human
ggcuggacuuucugcugggcuc

SEQ ID NO: 677813 - RNA, 18 nt, Human
uggagccagcucuaggau

SEQ ID NO: 677814 - RNA, 22 nt, Human
ucauuaaauguuuguugugcca

SEQ ID NO: 677815 - RNA, 22 nt, Human
guccugugaccugcauccugag

SEQ ID NO: 677816 - RNA, 22 nt, Human
aaguucaaggaagccuccaguu

SEQ ID NO: 677817 - RNA, 22 nt, Human
cugggaggcggagguuguagug

SEQ ID NO: 677818 - RNA, 21 nt, Human
gcauuaaaagcaguuguuggu

SEQ ID NO: 677819 - RNA, 22 nt, Human
agggugugcuguugggucuuuc

SEQ ID NO: 677820 - RNA, 23 nt, Human
cguuuuuuccucagauguucugg

SEQ ID NO: 677821 - RNA, 22 nt, Human
agacacauaggaccacacugug

SEQ ID NO: 677822 - RNA, 22 nt, Human
uacuuuuccuggaaccacugcu

SEQ ID NO: 677823 - RNA, 22 nt, Human
aguccucugcugugcgucuuug

SEQ ID NO: 677824 - RNA, 22 nt, Human
uggaaagaaaguaaaggcguau

SEQ ID NO: 677825 - RNA, 22 nt, Human
aaagaggauggaguagucagcu

SEQ ID NO: 677826 - RNA, 22 nt, Human
auacauuccuacugacuagcua

SEQ ID NO: 677827 - RNA, 22 nt, Human
gcauuucagagaaaaucugcuu

SEQ ID NO: 677828 - RNA, 22 nt, Human
aguuuauuuuugauaagucuug

SEQ ID NO: 677829 - RNA, 22 nt, Human
ucucccaguccucugugcuuac

SEQ ID NO: 677830 - RNA, 20 nt, Human
accucccucuguggguggga

SEQ ID NO: 677831 - RNA, 22 nt, Human
ucugcuuugcugccuccugauc

SEQ ID NO: 677832 - RNA, 22 nt, Human
uucaggaagugcugccuggugu

SEQ ID NO: 677833 - RNA, 22 nt, Human
ccugcacaugugugcgccugua

SEQ ID NO: 677834 - RNA, 22 nt, Human
ccugcacuucucacagcugcug

SEQ ID NO: 677835 - RNA, 20 nt, Human
ucagggcaugggacagcccc

SEQ ID NO: 677836 - RNA, 22 nt, Human
ggcagcagaacuggcccuguau

SEQ ID NO: 677837 - RNA, 22 nt, Human
gaugcaaagaggaccuucagua

SEQ ID NO: 677838 - RNA, 20 nt, Human
auuaacacugagcuaugggu

SEQ ID NO: 677839 - RNA, 22 nt, Human
gccaccccauagguguuaggug

SEQ ID NO: 677840 - RNA, 22 nt, Human
cauccuucaaaggcuacaauua

SEQ ID NO: 677841 - RNA, 20 nt, Human
cuggcccaggaugauggcgc

SEQ ID NO: 677842 - RNA, 22 nt, Human
gugucugcuugcugagcauuua

SEQ ID NO: 677843 - RNA, 22 nt, Human
ugcugagagccagggcuggcau

SEQ ID NO: 677844 - RNA, 22 nt, Human
uuuucacaaggguccaacuagu

SEQ ID NO: 677845 - RNA, 22 nt, Human
gucccagggagguucagggcuu

SEQ ID NO: 677846 - RNA, 22 nt, Human
gcuguacaaggccucugccauc

SEQ ID NO: 677847 - RNA, 22 nt, Human
gaacuacaggugcagcaaguga

SEQ ID NO: 677848 - RNA, 22 nt, Human
uucucaaagaaagcugucauua

SEQ ID NO: 677849 - RNA, 22 nt, Human
gguccuggaaauugacggaaag

SEQ ID NO: 677850 - RNA, 22 nt, Human
aucccuggacggcgccucccca

SEQ ID NO: 677851 - RNA, 22 nt, Human
agaaugcaguuugaaauaaggu

SEQ ID NO: 677852 - RNA, 22 nt, Human
uugcugaugcccuuguccaggc

SEQ ID NO: 677853 - RNA, 22 nt, Human
augugugguacagucccguuua

SEQ ID NO: 677854 - RNA, 22 nt, Human
uacaaaguauauuucuagcugu

SEQ ID NO: 677855 - RNA, 22 nt, Human
uuccuguaugucagugaagagc

SEQ ID NO: 677856 - RNA, 22 nt, Human
aaaacaggaguuuugguaggcu

SEQ ID NO: 677857 - RNA, 22 nt, Human
agucagaugaugugaggagugg

SEQ ID NO: 677858 - RNA, 22 nt, Human
uauguauaaaugcaugugugga

SEQ ID NO: 677859 - RNA, 22 nt, Human
caguggguggcuaaguggcuga

SEQ ID NO: 677860 - RNA, 22 nt, Human
agcaggcuaggaaccucacugc

SEQ ID NO: 677861 - RNA, 22 nt, Human
caguaggagguucugagguucu

SEQ ID NO: 677862 - RNA, 22 nt, Human
ugugcagauagugauuucagaa

SEQ ID NO: 677863 - RNA, 22 nt, Human
ucuagucauauuuuuucaguau

SEQ ID NO: 677864 - RNA, 22 nt, Human
agcugcaggaaguagaagcgga

SEQ ID NO: 677865 - RNA, 22 nt, Human
caggacugaagggcacagggaa

SEQ ID NO: 677866 - RNA, 22 nt, Human
gacccaggguuucugcacaggg

SEQ ID NO: 677867 - RNA, 22 nt, Human
auuugaaugcagguagcugagu

SEQ ID NO: 677868 - RNA, 23 nt, Human
acaugauacacaauuagcaaacc

SEQ ID NO: 677869 - RNA, 22 nt, Human
gaggcugggaaguccaagacca

SEQ ID NO: 677870 - RNA, 22 nt, Human
ggggagaccaucugaaggugau

SEQ ID NO: 677871 - RNA, 22 nt, Human
ucuaugaaccucugcaaugaca

SEQ ID NO: 677872 - RNA, 22 nt, Human
auggaacaagaacucagauuua

SEQ ID NO: 677873 - RNA, 22 nt, Human
caauaguucgguccugaaggcc

SEQ ID NO: 677874 - RNA, 22 nt, Human
aucauuacuccuguaaaauugu

SEQ ID NO: 677875 - RNA, 22 nt, Human
ccagagccagagaggugccugc

SEQ ID NO: 677876 - RNA, 22 nt, Human
cagucaccuugaggacucagac

SEQ ID NO: 677877 - RNA, 22 nt, Human
augcagcagccccuugaggugc

SEQ ID NO: 677878 - RNA, 22 nt, Human
agaggcaggagguugacuugag

SEQ ID NO: 677879 - RNA, 22 nt, Human
ugcagauagcgucauucuugcu

SEQ ID NO: 677880 - RNA, 18 nt, Human
accacaugauaucuugcc

SEQ ID NO: 677881 - RNA, 22 nt, Human
cucauccaccgcagccccucag

SEQ ID NO: 677882 - RNA, 22 nt, Human
uguucacaggggagccauuuau

SEQ ID NO: 677883 - RNA, 22 nt, Human
ucaucucuccccagugucuuua

SEQ ID NO: 677884 - RNA, 22 nt, Human
uucagcuauggagucuuaguua

SEQ ID NO: 677885 - RNA, 22 nt, Human
cuauugaaaguguacaauucaa

SEQ ID NO: 677886 - RNA, 22 nt, Human
cuucuuucuuuugaucacaggu

SEQ ID NO: 677887 - RNA, 22 nt, Human
uucaaacaggggucagggagau

SEQ ID NO: 677888 - RNA, 22 nt, Human
agagaagcugacaggggcgugc

SEQ ID NO: 677889 - RNA, 18 nt, Human
guguccuggcugcggcgc

SEQ ID NO: 677890 - RNA, 22 nt, Human
ccucaggccagggggcggccag

SEQ ID NO: 677891 - RNA, 22 nt, Human
auuugcuuugggacagcuuaaa

SEQ ID NO: 677892 - RNA, 22 nt, Human
gaaaucugaacucuguauccuu

SEQ ID NO: 677893 - RNA, 22 nt, Human
agagaccuuuguuauucuagga

SEQ ID NO: 677894 - RNA, 22 nt, Human
ggaugcugauuccagucuccag

SEQ ID NO: 677895 - RNA, 22 nt, Human
ccaggacuuuaaguccagcacu

SEQ ID NO: 677896 - RNA, 21 nt, Human
gaaaggucuuaacuuacagag

SEQ ID NO: 677897 - RNA, 22 nt, Human
caggcacuggccagucagcaca

SEQ ID NO: 677898 - RNA, 22 nt, Human
gacauuaauuucuuugguaauu

SEQ ID NO: 677899 - RNA, 22 nt, Human
cugagggagaagucacgggcag

SEQ ID NO: 677900 - RNA, 22 nt, Human
ugcaggcugugucauuuaguga

SEQ ID NO: 677901 - RNA, 22 nt, Human
cacuuaucucauuuaaucacca

SEQ ID NO: 677902 - RNA, 22 nt, Human
aaguaaggcagugaaugagauu

SEQ ID NO: 677903 - RNA, 22 nt, Human
aacagcuuuuuuggucagcauu

SEQ ID NO: 677904 - RNA, 20 nt, Human
uuuccuuucauuuuaguacc

SEQ ID NO: 677905 - RNA, 22 nt, Human
cauaauccuguccuggauucuu

SEQ ID NO: 677906 - RNA, 22 nt, Human
ugaaucuuuuuggaaauaaaga

SEQ ID NO: 677907 - RNA, 22 nt, Human
cuauuuggccagaagaggguca

SEQ ID NO: 677908 - RNA, 22 nt, Human
uucagcaaugggauggugcagg

SEQ ID NO: 677909 - RNA, 18 nt, Human
uuauuuguuacagcacau

SEQ ID NO: 677910 - RNA, 22 nt, Human
caguacuuugcaucauuccacu

SEQ ID NO: 677911 - RNA, 22 nt, Human
uuuacaguccccaggugaggau

SEQ ID NO: 677912 - RNA, 22 nt, Human
acauguaagacuagcuuaaagu

SEQ ID NO: 677913 - RNA, 22 nt, Human
cccagcagaaucugaugagggc

SEQ ID NO: 677914 - RNA, 22 nt, Human
augccagucaaagaagaugaca

SEQ ID NO: 677915 - RNA, 22 nt, Human
cauggccaggcccagggcccag

SEQ ID NO: 677916 - RNA, 23 nt, Human
gggcagguuuuuauaggcuucag

SEQ ID NO: 677917 - RNA, 22 nt, Human
ccuggacucagaggugcuggug

SEQ ID NO: 677918 - RNA, 22 nt, Human
augauacauugcaaaauuuuaa

SEQ ID NO: 677919 - RNA, 22 nt, Human
uuugaaguguuauuucuaucac

SEQ ID NO: 677920 - RNA, 22 nt, Human
uucuagaugcuuauaggcauau

SEQ ID NO: 677921 - RNA, 22 nt, Human
auggcuugauagaaagcuaguu

SEQ ID NO: 677922 - RNA, 20 nt, Human
cucuccucacccgugucagg

SEQ ID NO: 677923 - RNA, 21 nt, Human
agcuuguguguaucacagugu

SEQ ID NO: 677924 - RNA, 19 nt, Human
uauauauuuugggguugug

SEQ ID NO: 677925 - RNA, 22 nt, Human
ucgcagaggcacgagugcagaa

SEQ ID NO: 677926 - RNA, 23 nt, Human
ugcuggcuuccagcugcucccuc

SEQ ID NO: 677927 - RNA, 22 nt, Human
ugcuucuuuacuauaggcaauu

SEQ ID NO: 677928 - RNA, 22 nt, Human
ucccagcagagccagcaagccg

SEQ ID NO: 677929 - RNA, 22 nt, Human
agcaggcuaaucuugcugaaca

SEQ ID NO: 677930 - RNA, 22 nt, Human
ugcaaggguguuugagcugccc

SEQ ID NO: 677931 - RNA, 22 nt, Human
gcucacugccugggcaacaaga

SEQ ID NO: 677932 - RNA, 22 nt, Human
cccaggaguaagugacauuguu

SEQ ID NO: 677933 - RNA, 22 nt, Human
aagugguaggaagagagcacug

SEQ ID NO: 677934 - RNA, 22 nt, Human
agggccagccaggcccuacaaa

SEQ ID NO: 677935 - RNA, 22 nt, Human
gaugcagggcuggcaggagcuu

SEQ ID NO: 677936 - RNA, 22 nt, Human
cagcaagaaaauucacaugcuc

SEQ ID NO: 677937 - RNA, 22 nt, Human
cgucauccuuuggaugaaucac

SEQ ID NO: 677938 - RNA, 22 nt, Human
ccccacaccugccgggcagcag

SEQ ID NO: 677939 - RNA, 22 nt, Human
uucucugggcuuuucggauccg

SEQ ID NO: 677940 - RNA, 22 nt, Human
uaaacagaaagcagauguacuu

SEQ ID NO: 677941 - RNA, 22 nt, Human
cuuuuugucucuguccugauga

SEQ ID NO: 677942 - RNA, 22 nt, Human
agaagcagggcagggaaaagca

SEQ ID NO: 677943 - RNA, 22 nt, Human
auccugaagcaugaaugucaaa

SEQ ID NO: 677944 - RNA, 22 nt, Human
ccagacagcaguuaaaggacau

SEQ ID NO: 677945 - RNA, 22 nt, Human
aaugaagcaagcugcuguguuu

SEQ ID NO: 677946 - RNA, 22 nt, Human
cuuccucccccacacacucacu

SEQ ID NO: 677947 - RNA, 22 nt, Human
cagagccccccuucugaucaca

SEQ ID NO: 677948 - RNA, 22 nt, Human
ugagaugcuaaagggcugcuca

SEQ ID NO: 677949 - RNA, 22 nt, Human
ccucaggcaggaaacugucccg

SEQ ID NO: 677950 - RNA, 22 nt, Human
aggcuucaaggacagcagccac

SEQ ID NO: 677951 - RNA, 22 nt, Human
auguaaguuuaagcacaacaag

SEQ ID NO: 677952 - RNA, 22 nt, Human
ucugcagacuugauaaccacug

SEQ ID NO: 677953 - RNA, 18 nt, Human
agggagagaccgcggguc

SEQ ID NO: 677954 - RNA, 22 nt, Human
cucuuggccagacacagaggca

SEQ ID NO: 677955 - RNA, 22 nt, Human
agcccagccggauucccaguuc

SEQ ID NO: 677956 - RNA, 22 nt, Human
ucagaacaggacuggcugccau

SEQ ID NO: 677957 - RNA, 22 nt, Human
uguuuuaucaagauggcauguc

SEQ ID NO: 677958 - RNA, 22 nt, Human
gcuuggagaugggggaugagcc

SEQ ID NO: 677959 - RNA, 22 nt, Human
ugagcuggaggacaggagggua

SEQ ID NO: 677960 - RNA, 22 nt, Human
guucucauaguggaaaauaggu

SEQ ID NO: 677961 - RNA, 22 nt, Human
agaguccagaaaacagugugcu

SEQ ID NO: 677962 - RNA, 21 nt, Human
uuugcauuuuacaugugggga

SEQ ID NO: 677963 - RNA, 22 nt, Human
uuuaauuuucugggcccagcag

SEQ ID NO: 677964 - RNA, 22 nt, Human
ucccacaggagccugaguccca

SEQ ID NO: 677965 - RNA, 19 nt, Human
ucccaggaaccuuuuauuu

SEQ ID NO: 677966 - RNA, 22 nt, Human
ccuccacucuggccucucaggu

SEQ ID NO: 677967 - RNA, 22 nt, Human
agcugagcucaggcugauguaa

SEQ ID NO: 677968 - RNA, 22 nt, Human
ccuggaaggcaggcauggauug

SEQ ID NO: 677969 - RNA, 22 nt, Human
gagauggagaaggaagcuguuu

SEQ ID NO: 677970 - RNA, 22 nt, Human
caaucacucugcaacauuccug

SEQ ID NO: 677971 - RNA, 22 nt, Human
aggagacccaaugccagaaaga

SEQ ID NO: 677972 - RNA, 22 nt, Human
ggaugggcagacaggacggcac

SEQ ID NO: 677973 - RNA, 22 nt, Human
uuccugaggcucaucggagucg

SEQ ID NO: 677974 - RNA, 22 nt, Human
ccaguguuggaggauggcuugc

SEQ ID NO: 677975 - RNA, 22 nt, Human
uucuuugguguuacccagcuca

SEQ ID NO: 677976 - RNA, 22 nt, Human
acacugacaccugcccucaggu

SEQ ID NO: 677977 - RNA, 22 nt, Human
cuguucauggaaaaauaguugg

SEQ ID NO: 677978 - RNA, 22 nt, Human
ccugccugccugcuggccggga

SEQ ID NO: 677979 - RNA, 22 nt, Human
agagcagaguggcuguagcuug

SEQ ID NO: 677980 - RNA, 22 nt, Human
aaacuucagugaaugacuuaug

SEQ ID NO: 677981 - RNA, 22 nt, Human
uuuugccugcacuguauauaua

SEQ ID NO: 677982 - RNA, 20 nt, Human
ccugggaaggcagccccagc

SEQ ID NO: 677983 - RNA, 22 nt, Human
gacauuuagcuguuuugcauuu

SEQ ID NO: 677984 - RNA, 22 nt, Human
ugugaaauuacuuaaaggaaau

SEQ ID NO: 677985 - RNA, 22 nt, Human
aguaggcagaaguggcauucgg

SEQ ID NO: 677986 - RNA, 22 nt, Human
ucuaaacugcgagcaugccccc

SEQ ID NO: 677987 - RNA, 22 nt, Human
ugcuucugggucccagccuggc

SEQ ID NO: 677988 - RNA, 22 nt, Human
ucucacaucugcccugugcugg

SEQ ID NO: 677989 - RNA, 22 nt, Human
uugggcccugcucugaguugcu

SEQ ID NO: 677990 - RNA, 22 nt, Human
ggaggaaaugaaaggaggguuu

SEQ ID NO: 677991 - RNA, 20 nt, Human
gccugcagagaaggucagag

SEQ ID NO: 677992 - RNA, 17 nt, Human
cugugcucgagugaugg

SEQ ID NO: 677993 - RNA, 22 nt, Human
gacagggacgaggcuucaggca

SEQ ID NO: 677994 - RNA, 18 nt, Human
cugccugcucuccagcuu

SEQ ID NO: 677995 - RNA, 21 nt, Human
uuaguucuaccacuugcauuc

SEQ ID NO: 677996 - RNA, 22 nt, Human
ucucagaaccucaguuugcucu

SEQ ID NO: 677997 - RNA, 22 nt, Human
cuggccagguuuugaacaguug

SEQ ID NO: 677998 - RNA, 22 nt, Human
aaaggauaagguuaucaauuuu

SEQ ID NO: 677999 - RNA, 22 nt, Human
cccagggcuuuucucacuagac

SEQ ID NO: 678000 - RNA, 22 nt, Human
agcuagagaaugacagagucug

SEQ ID NO: 678001 - RNA, 22 nt, Human
gguguccaucaggcugugcuuc

SEQ ID NO: 678002 - RNA, 22 nt, Human
ggugcccugccaggaugugcca

SEQ ID NO: 678003 - RNA, 22 nt, Human
gucacuggaauuacaggcaugc

SEQ ID NO: 678004 - RNA, 22 nt, Human
guggucaggcagugggagagaa

SEQ ID NO: 678005 - RNA, 22 nt, Human
guucacaguuuuauaccugaga

SEQ ID NO: 678006 - RNA, 22 nt, Human
ugcuuaaaauuuuccaaggauu

SEQ ID NO: 678007 - RNA, 22 nt, Human
aaaacucugcaguuaguuucua

SEQ ID NO: 678008 - RNA, 22 nt, Human
gugcacagagcccagggccgcg

SEQ ID NO: 678009 - RNA, 22 nt, Human
uucugucacuuaggaggucaua

SEQ ID NO: 678010 - RNA, 22 nt, Human
aggccuccuggcuccaggccuu

SEQ ID NO: 678011 - RNA, 22 nt, Human
guccaggucuggacccugagcc

SEQ ID NO: 678012 - RNA, 22 nt, Human
uuauucaccaguguaaaacacu

SEQ ID NO: 678013 - RNA, 22 nt, Human
cugugauuguuaguuccuauac

SEQ ID NO: 678014 - RNA, 22 nt, Human
ucuaaagauuuggauucauuug

SEQ ID NO: 678015 - RNA, 20 nt, Human
acauguacuaaugaauacag

SEQ ID NO: 678016 - RNA, 22 nt, Human
uggcccuguggaggucagugag

SEQ ID NO: 678017 - RNA, 20 nt, Human
ggccugagcauggcuggcag

SEQ ID NO: 678018 - RNA, 21 nt, Human
ugcaggcuguuuaagaggcaa

SEQ ID NO: 678019 - RNA, 22 nt, Human
caaugcuucucauuagccaaug

SEQ ID NO: 678020 - RNA, 22 nt, Human
cccugugccuaguuggccuaaa

SEQ ID NO: 678021 - RNA, 22 nt, Human
guggauggauuuugaggaaugg

SEQ ID NO: 678022 - RNA, 22 nt, Human
ucauugaauucuggggguugag

SEQ ID NO: 678023 - RNA, 22 nt, Human
cagcagcaucaggucugugguu

SEQ ID NO: 678024 - RNA, 22 nt, Human
aauguauggauucaugucugug

SEQ ID NO: 678025 - RNA, 22 nt, Human
augcuuccacuguucugcucuc

SEQ ID NO: 678026 - RNA, 20 nt, Human
ccuuuagaaacucauaugua

SEQ ID NO: 678027 - RNA, 22 nt, Human
uccaaguugauguuucuuaaau

SEQ ID NO: 678028 - RNA, 22 nt, Human
aagucugaucauuucuucuaua

SEQ ID NO: 678029 - RNA, 22 nt, Human
agagccagagaccuggguucac

SEQ ID NO: 678030 - RNA, 22 nt, Human
cugagccaccggcagggacauc

SEQ ID NO: 678031 - RNA, 22 nt, Human
ccagagucaggagcucauguga

SEQ ID NO: 678032 - RNA, 22 nt, Human
uacauaauugucuuuguccuca

SEQ ID NO: 678033 - RNA, 22 nt, Human
aagugcuuuaaaauuuccugag

SEQ ID NO: 678034 - RNA, 22 nt, Human
gagcugagaucgugccauugca

SEQ ID NO: 678035 - RNA, 22 nt, Human
ggccuccucacccugcucaggc

SEQ ID NO: 678036 - RNA, 22 nt, Human
ucacagggcauuauggcuccag

SEQ ID NO: 678037 - RNA, 22 nt, Human
acugagaacucaagagaaaagg

SEQ ID NO: 678038 - RNA, 22 nt, Human
uacaaucaggauaauaauagug

SEQ ID NO: 678039 - RNA, 22 nt, Human
caaauacuggguaaguuaauuu

SEQ ID NO: 678040 - RNA, 22 nt, Human
aaagccuggguuccucacuauc

SEQ ID NO: 678041 - RNA, 22 nt, Human
ggacaaagggcuagccacaacu

SEQ ID NO: 678042 - RNA, 22 nt, Human
uuggaaagaagggcugagcaag

SEQ ID NO: 678043 - RNA, 22 nt, Human
ugucuuauuccuucuguucagc

SEQ ID NO: 678044 - RNA, 22 nt, Human
aagugauucuagucaugauucu

SEQ ID NO: 678045 - RNA, 22 nt, Human
guccuggguccccgcaggucag

SEQ ID NO: 678046 - RNA, 22 nt, Human
aacugcauuuaacaaauacucu

SEQ ID NO: 678047 - RNA, 22 nt, Human
uguucccaagauaagauuauga

SEQ ID NO: 678048 - RNA, 19 nt, Human
gcaccccaucuuccuccug

SEQ ID NO: 678049 - RNA, 22 nt, Human
aagguuaguaauauuucuauau

SEQ ID NO: 678050 - RNA, 22 nt, Human
ugcuccagugagcuggccaucc

SEQ ID NO: 678051 - RNA, 22 nt, Human
cucagcagagaccagggaggaa

SEQ ID NO: 678052 - RNA, 22 nt, Human
uaguccagccuuggguguagcc

SEQ ID NO: 678053 - RNA, 22 nt, Human
agaaggccagauggacggggcu

SEQ ID NO: 678054 - RNA, 22 nt, Human
gaaggcaggcuucugauuaggu

SEQ ID NO: 678055 - RNA, 22 nt, Human
uuuccaggaaguaaggauaauc

SEQ ID NO: 678056 - RNA, 22 nt, Human
ggaaaaaugacacauaucucaa

SEQ ID NO: 678057 - RNA, 22 nt, Human
acauugcaauuagguaccuaug

SEQ ID NO: 678058 - RNA, 20 nt, Human
ucucuggcaagaagcugcag

SEQ ID NO: 678059 - RNA, 22 nt, Human
gcuuccuagaucugugguacuc

SEQ ID NO: 678060 - RNA, 22 nt, Human
aggcagcuggaggcagagacua

SEQ ID NO: 678061 - RNA, 22 nt, Human
gauuucaauccagcuuucuucu

SEQ ID NO: 678062 - RNA, 22 nt, Human
acauucuauucugcaggacaag

SEQ ID NO: 678063 - RNA, 22 nt, Human
agggcuuucuuuguaaaagaag

SEQ ID NO: 678064 - RNA, 22 nt, Human
gcacagcccuggucggggcccc

SEQ ID NO: 678065 - RNA, 22 nt, Human
gaggcugcuuuccuccuauccu

SEQ ID NO: 678066 - RNA, 22 nt, Human
aaggguugaagauaaauaaggu

SEQ ID NO: 678067 - RNA, 22 nt, Human
uccuggcccgaucccugugaag

SEQ ID NO: 678068 - RNA, 22 nt, Human
ucaggccaggagaucagauuga

SEQ ID NO: 678069 - RNA, 22 nt, Human
cugggcucagaugagaggaagg

SEQ ID NO: 678070 - RNA, 22 nt, Human
aaugggagagaacacaaagucc

SEQ ID NO: 678071 - RNA, 22 nt, Human
cagcccaccuggcacguguguu

SEQ ID NO: 678072 - RNA, 22 nt, Human
uaacaacuugcuuuuaucuuag

SEQ ID NO: 678073 - RNA, 22 nt, Human
acuuauuagacaucuucauugu

SEQ ID NO: 678074 - RNA, 22 nt, Human
uuucuugagugaugcuuagugu

SEQ ID NO: 678075 - RNA, 23 nt, Human
ugcuuggacaagacucuauuaag

SEQ ID NO: 678076 - RNA, 23 nt, Human
aggcaaggguguaaaggaaauga

SEQ ID NO: 678077 - RNA, 22 nt, Human
aacaguguguuuuguuauuaag

SEQ ID NO: 678078 - RNA, 22 nt, Human
ccauggccgccgcugcucagga

SEQ ID NO: 678079 - RNA, 22 nt, Human
auuuacagaaacuuaaucauag

SEQ ID NO: 678080 - RNA, 22 nt, Human
accuuaaaacugacacauggag

SEQ ID NO: 678081 - RNA, 22 nt, Human
cagaggcgaggcagcugaaccu

SEQ ID NO: 678082 - RNA, 22 nt, Human
ggacccuggagacccacuggga

SEQ ID NO: 678083 - RNA, 22 nt, Human
cuggcucuugcgacucagcuug

SEQ ID NO: 678084 - RNA, 22 nt, Human
ugagugggauuaaaugagguga

SEQ ID NO: 678085 - RNA, 22 nt, Human
auauauaaccuggauaaggcuu

SEQ ID NO: 678086 - RNA, 22 nt, Human
cuccuguggucaagggugggac

SEQ ID NO: 678087 - RNA, 22 nt, Human
ccuggcacauaguaaguacuag

SEQ ID NO: 678088 - RNA, 22 nt, Human
uuagcuaaacuguaacuagaau

SEQ ID NO: 678089 - RNA, 22 nt, Human
uuuucuuacugucugugauccu

SEQ ID NO: 678090 - RNA, 22 nt, Human
cuuacacuuuccgaaagcuugu

SEQ ID NO: 678091 - RNA, 22 nt, Human
cccaggaggcggagguuguggu

SEQ ID NO: 678092 - RNA, 22 nt, Human
ccugggaggcggagguugcagu

SEQ ID NO: 678093 - RNA, 22 nt, Human
cuuuuucacuguguccucacac

SEQ ID NO: 678094 - RNA, 22 nt, Human
agauaagauaguccagcacaau

SEQ ID NO: 678095 - RNA, 22 nt, Human
ugggaauacaaguuauucaccu

SEQ ID NO: 678096 - RNA, 22 nt, Human
augugcuuuuacuccccagagu

SEQ ID NO: 678097 - RNA, 22 nt, Human
ggagagaggcuggccgugauga

SEQ ID NO: 678098 - RNA, 22 nt, Human
acacauucuuuaaaugucuguu

SEQ ID NO: 678099 - RNA, 22 nt, Human
ggcuucauggaggaggugaguc

SEQ ID NO: 678100 - RNA, 22 nt, Human
gccaggcugacucccccggccu

SEQ ID NO: 678101 - RNA, 22 nt, Human
uacuauaaagucuuaaugaguc

SEQ ID NO: 678102 - RNA, 19 nt, Human
agucagguggcuggugcca

SEQ ID NO: 678103 - RNA, 22 nt, Human
uggggccagguggcugcagguc

SEQ ID NO: 678104 - RNA, 21 nt, Human
uucucuccauaugcccagccc

SEQ ID NO: 678105 - RNA, 22 nt, Human
uccaggcuccugacuuuuuggg

SEQ ID NO: 678106 - RNA, 22 nt, Human
cacagaauaauucacauggcuc

SEQ ID NO: 678107 - RNA, 22 nt, Human
ucuugaaagcaugagauggaca

SEQ ID NO: 678108 - RNA, 22 nt, Human
uugagaaaagcuguguaaggau

SEQ ID NO: 678109 - RNA, 22 nt, Human
auguggauuugggagugaucag

SEQ ID NO: 678110 - RNA, 22 nt, Human
gaggcacaguguuuggucagug

SEQ ID NO: 678111 - RNA, 21 nt, Human
uggcugccuacaugcugcagg

SEQ ID NO: 678112 - RNA, 22 nt, Human
gggcuuggguauugugagaggu

SEQ ID NO: 678113 - RNA, 19 nt, Human
aggugaugugacucuagaa

SEQ ID NO: 678114 - RNA, 22 nt, Human
aucucuaauuuaaaaaguaaca

SEQ ID NO: 678115 - RNA, 22 nt, Human
cucugcugguagcucauuccau

SEQ ID NO: 678116 - RNA, 20 nt, Human
cuccaguguucaggggagug

SEQ ID NO: 678117 - RNA, 22 nt, Human
uugcuuggcaggcuuccagucu

SEQ ID NO: 678118 - RNA, 22 nt, Human
gaucggguggguucugccauca

SEQ ID NO: 678119 - RNA, 22 nt, Human
aggaaaaagaguugcugccuuc

SEQ ID NO: 678120 - RNA, 22 nt, Human
caagcuacuuagaaagcacagu

SEQ ID NO: 678121 - RNA, 22 nt, Human
aggaagaaaacuaauuagaugg

SEQ ID NO: 678122 - RNA, 22 nt, Human
cucuccucagaacaggcccucu

SEQ ID NO: 678123 - RNA, 22 nt, Human
acaggcugguuuguaaaagaug

SEQ ID NO: 678124 - RNA, 22 nt, Human
gaggagaaauuuggggaccuga

SEQ ID NO: 678125 - RNA, 22 nt, Human
ucccucaggacccaacuuguaa

SEQ ID NO: 678126 - RNA, 22 nt, Human
uguguacacaaguauauauaca

SEQ ID NO: 678127 - RNA, 22 nt, Human
ugcaugcauaaauguacacaca

SEQ ID NO: 678128 - RNA, 22 nt, Human
ccagagguccugugaugcugca

SEQ ID NO: 678129 - RNA, 20 nt, Human
uucuccacaggguggaggag

SEQ ID NO: 678130 - RNA, 22 nt, Human
cauucacaauggauugcuucaa

SEQ ID NO: 678131 - RNA, 17 nt, Human
agcagggagucaaggga

SEQ ID NO: 678132 - RNA, 22 nt, Human
aaauuagaccagggcuccugga

SEQ ID NO: 678133 - RNA, 22 nt, Human
cagauuucaaggaggcacucca

SEQ ID NO: 678134 - RNA, 22 nt, Human
ccccaggagcuuguuuuagaga

SEQ ID NO: 678135 - RNA, 22 nt, Human
uucauuuguugacagagacaug

SEQ ID NO: 678136 - RNA, 22 nt, Human
uugaagaggacuuugcagcugu

SEQ ID NO: 678137 - RNA, 20 nt, Human
ggcagcaauucacccuaucc

SEQ ID NO: 678138 - RNA, 22 nt, Human
aaagccaggaggagggcgcucg

SEQ ID NO: 678139 - RNA, 22 nt, Human
ugaaacaggcaaaacugcagau

SEQ ID NO: 678140 - RNA, 22 nt, Human
ucaggucuauacuaugagaggc

SEQ ID NO: 678141 - RNA, 22 nt, Human
ucccacugcuuugcucugcuca

SEQ ID NO: 678142 - RNA, 22 nt, Human
aagugucugauggagcgaaaug

SEQ ID NO: 678143 - RNA, 22 nt, Human
uggaguccuaguauuggaaaca

SEQ ID NO: 678144 - RNA, 22 nt, Human
cagccuggacagcgaccagagu

SEQ ID NO: 678145 - RNA, 20 nt, Human
ugugaggagcauggccgcug

SEQ ID NO: 678146 - RNA, 22 nt, Human
aaagagccagcuaccucaguuu

SEQ ID NO: 678147 - RNA, 22 nt, Human
aagggccauaacuugcaguguu

SEQ ID NO: 678148 - RNA, 22 nt, Human
ggagauuuauagcacacuucag

SEQ ID NO: 678149 - RNA, 22 nt, Human
uugccuuugacggugcagcagu

SEQ ID NO: 678150 - RNA, 22 nt, Human
guguccuuuuaugugacugguu

SEQ ID NO: 678151 - RNA, 22 nt, Human
gaauuguaugcaguuacuugga

SEQ ID NO: 678152 - RNA, 22 nt, Human
ugcaggagggaggguuacaguu

SEQ ID NO: 678153 - RNA, 23 nt, Human
agcccaccuuguuaguccugugg

SEQ ID NO: 678154 - RNA, 23 nt, Human
uggggccaagugaggaagggucu

SEQ ID NO: 678155 - RNA, 20 nt, Human
ggcucuggaaucuggugggc

SEQ ID NO: 678156 - RNA, 22 nt, Human
ucuguggccugccuccucauuu

SEQ ID NO: 678157 - RNA, 22 nt, Human
cuggagucuccccaggagcgug

SEQ ID NO: 678158 - RNA, 22 nt, Human
uguggcagaaccagaauucaaa

SEQ ID NO: 678159 - RNA, 22 nt, Human
uuuuacaccucagaugagcaga

SEQ ID NO: 678160 - RNA, 22 nt, Human
uuggaacuggaggaacaugcua

SEQ ID NO: 678161 - RNA, 22 nt, Human
ucacaacucacagccaccggug

SEQ ID NO: 678162 - RNA, 22 nt, Human
uaaagagccauuguaugguuuu

SEQ ID NO: 678163 - RNA, 22 nt, Human
ucuggcuugagcuucgaccagu

SEQ ID NO: 678164 - RNA, 22 nt, Human
acaucccuugcucggggccccu

SEQ ID NO: 678165 - RNA, 21 nt, Human
cucaggcuggcagcaggcuag

SEQ ID NO: 678166 - RNA, 22 nt, Human
aggcagaagccagccagggucc

SEQ ID NO: 678167 - RNA, 22 nt, Human
agcacaugcacagugcuacacu

SEQ ID NO: 678168 - RNA, 22 nt, Human
guggcagggcuuugcuguucuu

SEQ ID NO: 678169 - RNA, 22 nt, Human
uuggaucacucugaagccuuac

SEQ ID NO: 678170 - RNA, 22 nt, Human
ggucacugcucuaaacaaaagu

SEQ ID NO: 678171 - RNA, 22 nt, Human
uggggacauucaugcagguugu

SEQ ID NO: 678172 - RNA, 22 nt, Human
guuccuugggaacaacgcugaa

SEQ ID NO: 678173 - RNA, 18 nt, Human
aguguucucguuuuauaa

SEQ ID NO: 678174 - RNA, 22 nt, Human
accaggcccauguggauuacua

SEQ ID NO: 678175 - RNA, 22 nt, Human
cagcucuggcuuuggggagcuu

SEQ ID NO: 678176 - RNA, 17 nt, Human
agcagcuggcacaggag

SEQ ID NO: 678177 - RNA, 22 nt, Human
uccagggaccucccugagagcu

SEQ ID NO: 678178 - RNA, 22 nt, Human
ggcagugguuagaaacaugagc

SEQ ID NO: 678179 - RNA, 22 nt, Human
acagcagcuuccugacuguacu

SEQ ID NO: 678180 - RNA, 22 nt, Human
ugcuuaaaauaguucauuuuug

SEQ ID NO: 678181 - RNA, 22 nt, Human
ucagaggaauuugcuuuucaug

SEQ ID NO: 678182 - RNA, 22 nt, Human
uggagccagcaggacucagagg

SEQ ID NO: 678183 - RNA, 22 nt, Human
augcagaauugcuaaguaucug

SEQ ID NO: 678184 - RNA, 22 nt, Human
acuaggagaaaacuuacacuga

SEQ ID NO: 678185 - RNA, 22 nt, Human
aggacagagggaccagagccca

SEQ ID NO: 678186 - RNA, 22 nt, Human
gccuuugcugugacaaugcugg

SEQ ID NO: 678187 - RNA, 17 nt, Human
uaucaagaagucuggcc

SEQ ID NO: 678188 - RNA, 22 nt, Human
ucagcuggauguggaagugcua

SEQ ID NO: 678189 - RNA, 22 nt, Human
ggcuucaccgcgggguugcagg

SEQ ID NO: 678190 - RNA, 22 nt, Human
uucugggcuuggcuguuuccau

SEQ ID NO: 678191 - RNA, 22 nt, Human
acaguuuagaaugccacauagu

SEQ ID NO: 678192 - RNA, 22 nt, Human
gguauuuacugagagccacucu

SEQ ID NO: 678193 - RNA, 22 nt, Human
uuaagagacaggagaaugaugu

SEQ ID NO: 678194 - RNA, 22 nt, Human
agaauuguucuguagcuuggcu

SEQ ID NO: 678195 - RNA, 22 nt, Human
uagcaauguguguguauaaauu

SEQ ID NO: 678196 - RNA, 22 nt, Human
aagugcuuagaaguugcauuag

SEQ ID NO: 678197 - RNA, 22 nt, Human
aggcccagcugggccaggaaca

SEQ ID NO: 678198 - RNA, 22 nt, Human
caaggccuaugcacaccuagga

SEQ ID NO: 678199 - RNA, 22 nt, Human
caguuuuaaauuuugaaugucu

SEQ ID NO: 678200 - RNA, 20 nt, Human
ugucuucauuauggugcccu

SEQ ID NO: 678201 - RNA, 22 nt, Human
guggcagaaaugggacuuugag

SEQ ID NO: 678202 - RNA, 22 nt, Human
ggaucuggggcucugcugcuca

SEQ ID NO: 678203 - RNA, 22 nt, Human
uuucauugccuuuggaaggucu

SEQ ID NO: 678204 - RNA, 22 nt, Human
auauuucaugggguuccauacu

SEQ ID NO: 678205 - RNA, 22 nt, Human
ucuguacaaaggcuauuuggag

SEQ ID NO: 678206 - RNA, 22 nt, Human
ugggcagacgggagcuugccuu

SEQ ID NO: 678207 - RNA, 23 nt, Human
uuucugaaguugagauggacuuu

SEQ ID NO: 678208 - RNA, 22 nt, Human
ugcaaaaacagccuugaggccu

SEQ ID NO: 678209 - RNA, 22 nt, Human
uuaaaaugaauauugauuagca

SEQ ID NO: 678210 - RNA, 22 nt, Human
ucuguccuccggagcucccagu

SEQ ID NO: 678211 - RNA, 22 nt, Human
uacuuuuagccuauuugauucu

SEQ ID NO: 678212 - RNA, 22 nt, Human
uugcauaaagauuuuauugcau

SEQ ID NO: 678213 - RNA, 22 nt, Human
cugaggagcugaaggcccucca

SEQ ID NO: 678214 - RNA, 22 nt, Human
auuguacauaugauguauguaa

SEQ ID NO: 678215 - RNA, 22 nt, Human
agcacccuggggaagcacaaag

SEQ ID NO: 678216 - RNA, 22 nt, Human
ccaggugguucaggucaccaua

SEQ ID NO: 678217 - RNA, 22 nt, Human
augcgcuuugugugaagcagug

SEQ ID NO: 678218 - RNA, 22 nt, Human
uucuuuguggcagugagcuggg

SEQ ID NO: 678219 - RNA, 22 nt, Human
uggaaggaaagguagcagagaa

SEQ ID NO: 678220 - RNA, 22 nt, Human
cucccuggucuuucccaucauu

SEQ ID NO: 678221 - RNA, 22 nt, Human
agugucauuccagggacccucg

SEQ ID NO: 678222 - RNA, 22 nt, Human
cugugagaaaggugauggaggu

SEQ ID NO: 678223 - RNA, 22 nt, Human
uuuggaaaauauugaacugguu

SEQ ID NO: 678224 - RNA, 22 nt, Human
gggguagggcgauugcugcuuu

SEQ ID NO: 678225 - RNA, 22 nt, Human
acaguggaaagaaacgaauuag

SEQ ID NO: 678226 - RNA, 22 nt, Human
gucaggaucucccaguacauau

SEQ ID NO: 678227 - RNA, 22 nt, Human
ucuagaaacaugacauugaucu

SEQ ID NO: 678228 - RNA, 22 nt, Human
ucuucagagauguaacauaugg

SEQ ID NO: 678229 - RNA, 22 nt, Human
uguuuccuuucuggugagcaua

SEQ ID NO: 678230 - RNA, 22 nt, Human
cacacaucaaccuagacauugu

SEQ ID NO: 678231 - RNA, 22 nt, Human
gccuggcuuggggcucaguggu

SEQ ID NO: 678232 - RNA, 22 nt, Human
aaaguucucuaugguguaaaaa

SEQ ID NO: 678233 - RNA, 22 nt, Human
guuuccaggcuuugguaugguu

SEQ ID NO: 678234 - RNA, 22 nt, Human
ucagcuuucucuucuaucgaua

SEQ ID NO: 678235 - RNA, 22 nt, Human
aaaugcuguaacugauauucug

SEQ ID NO: 678236 - RNA, 22 nt, Human
agguggcagacuaacagaagga

SEQ ID NO: 678237 - RNA, 22 nt, Human
ugcauauuugauugagauaccu

SEQ ID NO: 678238 - RNA, 22 nt, Human
ggccugggcccacugucaagag

SEQ ID NO: 678239 - RNA, 22 nt, Human
uuguuaaaauuggagccgagag

SEQ ID NO: 678240 - RNA, 22 nt, Human
gcggagggagauaggccuugcu

SEQ ID NO: 678241 - RNA, 22 nt, Human
ugucaucucacugauauagaug

SEQ ID NO: 678242 - RNA, 22 nt, Human
acaggcugauagaccauaaaua

SEQ ID NO: 678243 - RNA, 22 nt, Human
gagucaggcaugaagguaauua

SEQ ID NO: 678244 - RNA, 20 nt, Human
ugggcucugcuuccuggagu

SEQ ID NO: 678245 - RNA, 22 nt, Human
gacuggaaagccuguccucaga

SEQ ID NO: 678246 - RNA, 22 nt, Human
ggcacagggaggcccuggugug

SEQ ID NO: 678247 - RNA, 22 nt, Human
uaguggagguggucugugaacu

SEQ ID NO: 678248 - RNA, 23 nt, Human
ucagccucuuaggacuucucacc

SEQ ID NO: 678249 - RNA, 22 nt, Human
cucuuuggauguuuaugauaag

SEQ ID NO: 678250 - RNA, 22 nt, Human
gcugugcacuaccuauacaucc

SEQ ID NO: 678251 - RNA, 22 nt, Human
ggcucugugagaacaaaggcua

SEQ ID NO: 678252 - RNA, 22 nt, Human
ugcugucugauucagggugauu

SEQ ID NO: 678253 - RNA, 22 nt, Human
gacaguccuugcccaguaucua

SEQ ID NO: 678254 - RNA, 22 nt, Human
agggcagcagcuccuccuagcu

SEQ ID NO: 678255 - RNA, 22 nt, Human
gccuggccugaacuaggaggug

SEQ ID NO: 678256 - RNA, 17 nt, Human
gaauaaguggauggcac

SEQ ID NO: 678257 - RNA, 22 nt, Human
ccaggaagaaacagucuuuaua

SEQ ID NO: 678258 - RNA, 22 nt, Human
caggugggagccacagcguaca

SEQ ID NO: 678259 - RNA, 22 nt, Human
cuggaucaugcauugcuugucc

SEQ ID NO: 678260 - RNA, 22 nt, Human
ggaggccuggacuuccugaugg

SEQ ID NO: 678261 - RNA, 22 nt, Human
ccagcuuuccugcgaguugauu

SEQ ID NO: 678262 - RNA, 21 nt, Human
ugcuuuaugggaaaaauguca

SEQ ID NO: 678263 - RNA, 22 nt, Human
ucugcccuggggucagccucca

SEQ ID NO: 678264 - RNA, 22 nt, Human
aggcucagggacggggccccuu

SEQ ID NO: 678265 - RNA, 22 nt, Human
uaacacuguccaaagaauucca

SEQ ID NO: 678266 - RNA, 22 nt, Human
cccugaggcacaggccacguau

SEQ ID NO: 678267 - RNA, 22 nt, Human
cuggagauacugcucuccauau

SEQ ID NO: 678268 - RNA, 22 nt, Human
ggacaaagcucugcugccuccc

SEQ ID NO: 678269 - RNA, 22 nt, Human
gagcuucagcgugugcuaaggg

SEQ ID NO: 678270 - RNA, 22 nt, Human
uggcucugcugaaccuagugca

SEQ ID NO: 678271 - RNA, 20 nt, Human
uggaauggguccuugaaaaa

SEQ ID NO: 678272 - RNA, 22 nt, Human
cugugucugccugggauccauu

SEQ ID NO: 678273 - RNA, 22 nt, Human
auuucuccuccagauggugguu

SEQ ID NO: 678274 - RNA, 22 nt, Human
cacacacuguuaauguaggagu

SEQ ID NO: 678275 - RNA, 22 nt, Human
ugcuacacuuaaaucagucacc

SEQ ID NO: 678276 - RNA, 23 nt, Human
uggacaggguaacuggugguuuu

SEQ ID NO: 678277 - RNA, 22 nt, Human
aguucucuuuagcucauauggu

SEQ ID NO: 678278 - RNA, 22 nt, Human
ucagaaaccagcucucucaauu

SEQ ID NO: 678279 - RNA, 22 nt, Human
cagugacagguuccaugccgca

SEQ ID NO: 678280 - RNA, 22 nt, Human
accaucuuaaggggacuucuua

SEQ ID NO: 678281 - RNA, 22 nt, Human
uaauugcuaaaugaaggagaag

SEQ ID NO: 678282 - RNA, 22 nt, Human
uggcugcaguugggcccucaga

SEQ ID NO: 678283 - RNA, 22 nt, Human
acagacacaggcguggagucgc

SEQ ID NO: 678284 - RNA, 22 nt, Human
gcaagcugaugugauagugaaa

SEQ ID NO: 678285 - RNA, 23 nt, Human
uucuucucaauuaguugauucag

SEQ ID NO: 678286 - RNA, 21 nt, Human
acaaaggaagucucuuuuaag

SEQ ID NO: 678287 - RNA, 22 nt, Human
uugggguaaguuugucaagcug

SEQ ID NO: 678288 - RNA, 22 nt, Human
aaaggagacuucagaucuccuu

SEQ ID NO: 678289 - RNA, 22 nt, Human
ugccucuguugagccuuggcug

SEQ ID NO: 678290 - RNA, 22 nt, Human
cagccacuacaauugguuccau

SEQ ID NO: 678291 - RNA, 22 nt, Human
ccugacuuaagucuccuguugg

SEQ ID NO: 678292 - RNA, 22 nt, Human
acauauuaacugcacuacacua

SEQ ID NO: 678293 - RNA, 22 nt, Human
uuuagacauagcugaaaucauu

SEQ ID NO: 678294 - RNA, 22 nt, Human
uccacuucauccagggucacca

SEQ ID NO: 678295 - RNA, 22 nt, Human
uccacauccauugcuugacuuu

SEQ ID NO: 678296 - RNA, 22 nt, Human
uuggagguuauuaacacuggcc

SEQ ID NO: 678297 - RNA, 22 nt, Human
agccagggugggugaaugcuau

SEQ ID NO: 678298 - RNA, 22 nt, Human
ccuggcugugugaccuuggcaa

SEQ ID NO: 678299 - RNA, 22 nt, Human
ucagccagggcucuggccucag

SEQ ID NO: 678300 - RNA, 22 nt, Human
cagcagcuccucugcggcuaug

SEQ ID NO: 678301 - RNA, 22 nt, Human
aggcaggcaaguucauaugagg

SEQ ID NO: 678302 - RNA, 22 nt, Human
uuuauacauggagaauuuuugc

SEQ ID NO: 678303 - RNA, 22 nt, Human
gaacaaauuggagaaaucagga

SEQ ID NO: 678304 - RNA, 22 nt, Human
ggcaguagccagggacuggcag

SEQ ID NO: 678305 - RNA, 22 nt, Human
ccuacaggaaauuguaucaaaa

SEQ ID NO: 678306 - RNA, 22 nt, Human
aaugaaaugaagauaugaucag

SEQ ID NO: 678307 - RNA, 23 nt, Human
uccaggcacgcauuucuucuagc

SEQ ID NO: 678308 - RNA, 22 nt, Human
uguuugcucugacuaucuugcg

SEQ ID NO: 678309 - RNA, 22 nt, Human
aaggaagagucuagaacaggca

SEQ ID NO: 678310 - RNA, 22 nt, Human
agccagcacuuuuucucugggc

SEQ ID NO: 678311 - RNA, 22 nt, Human
uguuuaugcaucguuaauacca

SEQ ID NO: 678312 - RNA, 22 nt, Human
uggguccauggaacagaggugc

SEQ ID NO: 678313 - RNA, 22 nt, Human
aacagugcugauuauuuuaccu

SEQ ID NO: 678314 - RNA, 22 nt, Human
ugggauauaaucugaaaaguau

SEQ ID NO: 678315 - RNA, 22 nt, Human
gcagugaaucuggcaagaauuu

SEQ ID NO: 678316 - RNA, 22 nt, Human
ccugaagagcacucuagaguug

SEQ ID NO: 678317 - RNA, 22 nt, Human
auacaacuuuacaugcaauucc

SEQ ID NO: 678318 - RNA, 22 nt, Human
cuuauucuacuccacaagcucu

SEQ ID NO: 678319 - RNA, 22 nt, Human
ucaguguuagacaaguuuggaa

SEQ ID NO: 678320 - RNA, 22 nt, Human
gcaguacacacauauguauucg

SEQ ID NO: 678321 - RNA, 22 nt, Human
caguaagucaacaaacaugggg

SEQ ID NO: 678322 - RNA, 22 nt, Human
ucagccagguaauguggagaug

SEQ ID NO: 678323 - RNA, 22 nt, Human
uugagacacuuugggcaucacu

SEQ ID NO: 678324 - RNA, 21 nt, Human
uucauucauggcauaauauag

SEQ ID NO: 678325 - RNA, 22 nt, Human
acuccugccacacagaugcugu

SEQ ID NO: 678326 - RNA, 22 nt, Human
gucugauaucagaaaaaguaaa

SEQ ID NO: 678327 - RNA, 22 nt, Human
cuaaacuuuguuuauacucuga

SEQ ID NO: 678328 - RNA, 23 nt, Human
cagcuccagugcacucagguagc

SEQ ID NO: 678329 - RNA, 21 nt, Human
gcagaaaggaaucuuaggucc

SEQ ID NO: 678330 - RNA, 22 nt, Human
gcugccaguguggcaugaugca

SEQ ID NO: 678331 - RNA, 22 nt, Human
ccuccuggggugaaggauggga

SEQ ID NO: 678332 - RNA, 22 nt, Human
cuaauuauguuguuauaaucaa

SEQ ID NO: 678333 - RNA, 22 nt, Human
agcaggcuuacuuucugauuag

SEQ ID NO: 678334 - RNA, 22 nt, Human
ucucucugccaacucacagcca

SEQ ID NO: 678335 - RNA, 22 nt, Human
agaggccaggcagcccaaggug

SEQ ID NO: 678336 - RNA, 22 nt, Human
uuuacaauugguuuucucuaau

SEQ ID NO: 678337 - RNA, 22 nt, Human
caucuugacugggauaagggau

SEQ ID NO: 678338 - RNA, 22 nt, Human
uauguucugucuguacagauuu

SEQ ID NO: 678339 - RNA, 22 nt, Human
caugugugaagacugcgggcca

SEQ ID NO: 678340 - RNA, 22 nt, Human
gggaguggagagcaauggauga

SEQ ID NO: 678341 - RNA, 22 nt, Human
uaguuuagcuuagccuucuggu

SEQ ID NO: 678342 - RNA, 22 nt, Human
aguguguacauuuggugcaguu

SEQ ID NO: 678343 - RNA, 22 nt, Human
ucuggcuuucugacucuacaac

SEQ ID NO: 678344 - RNA, 22 nt, Human
ugcaacagacuuuauuaacucu

SEQ ID NO: 678345 - RNA, 22 nt, Human
ucagggacauuuagacacugau

SEQ ID NO: 678346 - RNA, 22 nt, Human
cuauauuucuuggcuuuaaaca

SEQ ID NO: 678347 - RNA, 22 nt, Human
aaaccuuucugcucucagcgua

SEQ ID NO: 678348 - RNA, 22 nt, Human
aacaugaaguuuucuauaguga

SEQ ID NO: 678349 - RNA, 22 nt, Human
agaauucucuuccauugaaaca

SEQ ID NO: 678350 - RNA, 22 nt, Human
uuugauauccuauacaaguaaa

SEQ ID NO: 678351 - RNA, 22 nt, Human
auauucuucuuguucagacuau

SEQ ID NO: 678352 - RNA, 19 nt, Human
guugaaaguaggugagggu

SEQ ID NO: 678353 - RNA, 22 nt, Human
agaaucaauuagauucuaugag

SEQ ID NO: 678354 - RNA, 22 nt, Human
aagcuuguagaguuugacuucc

SEQ ID NO: 678355 - RNA, 22 nt, Human
ucuuuccagaggaauuuuuaga

SEQ ID NO: 678356 - RNA, 22 nt, Human
aaaacacugccugcuugacuga

SEQ ID NO: 678357 - RNA, 22 nt, Human
uggccuuguguuuuagagaaag

SEQ ID NO: 678358 - RNA, 20 nt, Human
gggagucuggaugaaagaug

SEQ ID NO: 678359 - RNA, 22 nt, Human
gugcccaguugaggccaggacu

SEQ ID NO: 678360 - RNA, 22 nt, Human
agucuugcauuuucugaagaug

SEQ ID NO: 678361 - RNA, 22 nt, Human
gcuggagcugcagccugggccu

SEQ ID NO: 678362 - RNA, 22 nt, Human
augaguucauacuuucaguacc

SEQ ID NO: 678363 - RNA, 22 nt, Human
acccaggagcucugggguccuc

SEQ ID NO: 678364 - RNA, 22 nt, Human
gugauaaaggggaggaagugug

SEQ ID NO: 678365 - RNA, 21 nt, Human
aauuuugaaggaagauuaagg

SEQ ID NO: 678366 - RNA, 22 nt, Human
ggucugaaaugugacuuuugaa

SEQ ID NO: 678367 - RNA, 22 nt, Human
agagacauggagaggcaaaguu

SEQ ID NO: 678368 - RNA, 22 nt, Human
uuugcuuaaaguucuuucuggu

SEQ ID NO: 678369 - RNA, 22 nt, Human
ggugucuguugccuccugguua

SEQ ID NO: 678370 - RNA, 22 nt, Human
ccucauggccuugagcugaggg

SEQ ID NO: 678371 - RNA, 22 nt, Human
aaaauacuacugucuucuuccc

SEQ ID NO: 678372 - RNA, 21 nt, Human
ugaggccaauagccccuggac

SEQ ID NO: 678373 - RNA, 22 nt, Human
acucccuugguggagaaugcaa

SEQ ID NO: 678374 - RNA, 22 nt, Human
agggcagcagcccauggcucug

SEQ ID NO: 678375 - RNA, 18 nt, Human
aaaauaacaaaguuggcu

SEQ ID NO: 678376 - RNA, 20 nt, Human
aacagggggcugcagagggc

SEQ ID NO: 678377 - RNA, 22 nt, Human
auggcagacgaggcagcagggg

SEQ ID NO: 678378 - RNA, 22 nt, Human
agguucuugguguccagauuuc

SEQ ID NO: 678379 - RNA, 22 nt, Human
cugccuguauugucugcuuggg

SEQ ID NO: 678380 - RNA, 22 nt, Human
ugcagaaauaaagauauuauca

SEQ ID NO: 678381 - RNA, 22 nt, Human
gaaagccagagagaaagggcuc

SEQ ID NO: 678382 - RNA, 22 nt, Human
gcagcagaugcuuucauggaca

SEQ ID NO: 678383 - RNA, 19 nt, Human
gaggugucuuuccugagua

SEQ ID NO: 678384 - RNA, 22 nt, Human
aagcucugggguacacaucugc

SEQ ID NO: 678385 - RNA, 22 nt, Human
ucauuucuguugugcaucacug

SEQ ID NO: 678386 - RNA, 22 nt, Human
ccucaggcccugucccugcgcc

SEQ ID NO: 678387 - RNA, 22 nt, Human
ugggcgggcaggagcgcaccug

SEQ ID NO: 678388 - RNA, 22 nt, Human
agaacacacgucagaguuuccu

SEQ ID NO: 678389 - RNA, 23 nt, Human
acagucguagguauccuuuuccu

SEQ ID NO: 678390 - RNA, 17 nt, Human
gcagccucuugguagug

SEQ ID NO: 678391 - RNA, 22 nt, Human
uguuuaaguucugcuccuuauu

SEQ ID NO: 678392 - RNA, 22 nt, Human
ucacacugugaagagacaagca

SEQ ID NO: 678393 - RNA, 22 nt, Human
cauuaucugagaguguccuaca

SEQ ID NO: 678394 - RNA, 22 nt, Human
cuggcuccacucccugccugac

SEQ ID NO: 678395 - RNA, 22 nt, Human
gggcacuguguucagagugcag

SEQ ID NO: 678396 - RNA, 22 nt, Human
auacuuaacuguggagucauug

SEQ ID NO: 678397 - RNA, 22 nt, Human
aggcuguguggucaugguggcu

SEQ ID NO: 678398 - RNA, 22 nt, Human
ucagaaagguugagucaugugc

SEQ ID NO: 678399 - RNA, 22 nt, Human
cugauagacaaucaccauggga

SEQ ID NO: 678400 - RNA, 22 nt, Human
aucacaaaggucucagagcaca

SEQ ID NO: 678401 - RNA, 22 nt, Human
caaccucuaucggucaggaagc

SEQ ID NO: 678402 - RNA, 22 nt, Human
aguuaaacuugccuuuauuccu

SEQ ID NO: 678403 - RNA, 22 nt, Human
cagugaaguuuaaaguguagau

SEQ ID NO: 678404 - RNA, 22 nt, Human
agguccuggacugcucuuguua

SEQ ID NO: 678405 - RNA, 20 nt, Human
uugagcuuuuaguacagaca

SEQ ID NO: 678406 - RNA, 22 nt, Human
aggcacugggaauaugcugagg

SEQ ID NO: 678407 - RNA, 22 nt, Human
aagauguugggugccuccggaa

SEQ ID NO: 678408 - RNA, 22 nt, Human
ggguuaaacaugcuauaugagu

SEQ ID NO: 678409 - RNA, 20 nt, Human
ugucugaaaaggaagcuauc

SEQ ID NO: 678410 - RNA, 22 nt, Human
gaggaagucucucuacaagaaa

SEQ ID NO: 678411 - RNA, 22 nt, Human
aucugcuuagaauucauugucc

SEQ ID NO: 678412 - RNA, 22 nt, Human
auagcuguuagauuggggucga

SEQ ID NO: 678413 - RNA, 22 nt, Human
uacagcuugacccauaaugucu

SEQ ID NO: 678414 - RNA, 22 nt, Human
ugaaauguagauuaggcauucu

SEQ ID NO: 678415 - RNA, 22 nt, Human
uuuggccuuaguccagaagaag

SEQ ID NO: 678416 - RNA, 22 nt, Human
agacccuggggaaagucacuuc

SEQ ID NO: 678417 - RNA, 22 nt, Human
agcugcugagccauguccugcu

SEQ ID NO: 678418 - RNA, 22 nt, Human
uguccugggaaaucccuuaggc

SEQ ID NO: 678419 - RNA, 22 nt, Human
gcauuucuuccuggugugagcc

SEQ ID NO: 678420 - RNA, 21 nt, Human
ccagguacauggagaaugugg

SEQ ID NO: 678421 - RNA, 22 nt, Human
augacaguagguaaaugauagc

SEQ ID NO: 678422 - RNA, 22 nt, Human
guggccaauaggagcagcuauc

SEQ ID NO: 678423 - RNA, 20 nt, Human
uucaggauucuagaccacac

SEQ ID NO: 678424 - RNA, 19 nt, Human
uuucucugugcaccuuuuc

SEQ ID NO: 678425 - RNA, 18 nt, Human
uuaucugcugcaaagggu

SEQ ID NO: 678426 - RNA, 22 nt, Human
ucagcaucagguugucugaauu

SEQ ID NO: 678427 - RNA, 22 nt, Human
gccagcaguauguccuggcagu

SEQ ID NO: 678428 - RNA, 22 nt, Human
caggcuuaggagucagccugcu

SEQ ID NO: 678429 - RNA, 22 nt, Human
gcaaguacaaacgcaucggcug

SEQ ID NO: 678430 - RNA, 22 nt, Human
uguggcugcaggcgauggagga

SEQ ID NO: 678431 - RNA, 22 nt, Human
aagugucuacauuugcuaacca

SEQ ID NO: 678432 - RNA, 22 nt, Human
auucuauuuuuuaagaaguagu

SEQ ID NO: 678433 - RNA, 22 nt, Human
cugcugugcaggugccuaugau

SEQ ID NO: 678434 - RNA, 22 nt, Human
gugggcuucuguuagggaggcu

SEQ ID NO: 678435 - RNA, 22 nt, Human
uguccuuauaagaaaaggaaau

SEQ ID NO: 678436 - RNA, 22 nt, Human
ugucccugauccacuggacccc

SEQ ID NO: 678437 - RNA, 18 nt, Human
cccugaggcuagcaugcu

SEQ ID NO: 678438 - RNA, 22 nt, Human
caggcccucgcccgcagcgacc

SEQ ID NO: 678439 - RNA, 20 nt, Human
agacccuguguccuguggcc

SEQ ID NO: 678440 - RNA, 22 nt, Human
ucacagaacacaaaugccacuu

SEQ ID NO: 678441 - RNA, 18 nt, Human
uggacacauggccugggu

SEQ ID NO: 678442 - RNA, 22 nt, Human
ucucugggaucguuuugggcuc

SEQ ID NO: 678443 - RNA, 22 nt, Human
uuuaccaucugccacagauaug

SEQ ID NO: 678444 - RNA, 22 nt, Human
gcuguucauagaaauggucuca

SEQ ID NO: 678445 - RNA, 22 nt, Human
cugugaucauucuugauuuaag

SEQ ID NO: 678446 - RNA, 22 nt, Human
uucaaagugcauguuccucaga

SEQ ID NO: 678447 - RNA, 22 nt, Human
ugagaauucuacaauagaucaa

SEQ ID NO: 678448 - RNA, 22 nt, Human
auccaguuaagaugaggucaua

SEQ ID NO: 678449 - RNA, 19 nt, Human
augcacagucauuuguaag

SEQ ID NO: 678450 - RNA, 22 nt, Human
uucuggaaauggguauagagca

SEQ ID NO: 678451 - RNA, 21 nt, Human
ugcuggcugaaaggcacagag

SEQ ID NO: 678452 - RNA, 22 nt, Human
acaugagaagcugcaacaugac

SEQ ID NO: 678453 - RNA, 22 nt, Human
aaugugauuuucccaguagaau

SEQ ID NO: 678454 - RNA, 22 nt, Human
uuuaggagucaaauguuuuagg

SEQ ID NO: 678455 - RNA, 22 nt, Human
auggccaguguugagaucaggc

SEQ ID NO: 678456 - RNA, 22 nt, Human
acugagcacucacuuuuguuau

SEQ ID NO: 678457 - RNA, 22 nt, Human
gccucugcggggcccgagcccg

SEQ ID NO: 678458 - RNA, 22 nt, Human
cugugagcuggguggccaggac

SEQ ID NO: 678459 - RNA, 21 nt, Human
cagcagugugucugagcuaga

SEQ ID NO: 678460 - RNA, 22 nt, Human
acucccacuccagaguagaagc

SEQ ID NO: 678461 - RNA, 21 nt, Human
uucugccuucgaggucucagg

SEQ ID NO: 678462 - RNA, 22 nt, Human
uuucucuaaauagggaggcuua

SEQ ID NO: 678463 - RNA, 22 nt, Human
agcugagagguggcaagcugua

SEQ ID NO: 678464 - RNA, 22 nt, Human
acauuucuuagccuaguuccag

SEQ ID NO: 678465 - RNA, 22 nt, Human
aaaugccuguguaaauucuagc

SEQ ID NO: 678466 - RNA, 22 nt, Human
gcucaggagcucuugguggcgc

SEQ ID NO: 678467 - RNA, 22 nt, Human
cugucauugagccugucagggc

SEQ ID NO: 678468 - RNA, 18 nt, Human
ucagccuguugucugccu

SEQ ID NO: 678469 - RNA, 21 nt, Human
ccuggcugcacaguugcuggu

SEQ ID NO: 678470 - RNA, 22 nt, Human
aaagugcuuuaggauauuugga

SEQ ID NO: 678471 - RNA, 22 nt, Human
uuugauccguugcuggugagga

SEQ ID NO: 678472 - RNA, 22 nt, Human
gggagccaaggagagaggccuu

SEQ ID NO: 678473 - RNA, 22 nt, Human
gaugaagccugacuucucggug

SEQ ID NO: 678474 - RNA, 23 nt, Human
gguagagccgcgcccugggggaa

SEQ ID NO: 678475 - RNA, 22 nt, Human
aucuuugcuauuguaaaucacg

SEQ ID NO: 678476 - RNA, 22 nt, Human
ccauuugugguuuauuugcucu

SEQ ID NO: 678477 - RNA, 22 nt, Human
caggagaccugguaagccaagu

SEQ ID NO: 678478 - RNA, 20 nt, Human
agcugccccugggcacugcc

SEQ ID NO: 678479 - RNA, 22 nt, Human
cccagcagggucucugugucua

SEQ ID NO: 678480 - RNA, 22 nt, Human
auggggcucugcggcugcuccc

SEQ ID NO: 678481 - RNA, 22 nt, Human
ugggcucagccuucauguggcc

SEQ ID NO: 678482 - RNA, 22 nt, Human
aaauuagucauguuguauuacu

SEQ ID NO: 678483 - RNA, 22 nt, Human
uucauucuguuuggaaaggugg

SEQ ID NO: 678484 - RNA, 22 nt, Human
gugcaaccaucaccacugacuc

SEQ ID NO: 678485 - RNA, 22 nt, Human
acaacacagcuuuccucaaguu

SEQ ID NO: 678486 - RNA, 22 nt, Human
cuggcccugccuaauguacuug

SEQ ID NO: 678487 - RNA, 22 nt, Human
aaacagauaaugcuauaaaugg

SEQ ID NO: 678488 - RNA, 22 nt, Human
aaugcaccuaccuugauucugc

SEQ ID NO: 678489 - RNA, 22 nt, Human
uucacuguaugagagggcuuga

SEQ ID NO: 678490 - RNA, 22 nt, Human
acacaguucuuagcaggugucu

SEQ ID NO: 678491 - RNA, 22 nt, Human
gucagcuaauaggguguguguc

SEQ ID NO: 678492 - RNA, 22 nt, Human
aggcgcugcaugugaaggaguu

SEQ ID NO: 678493 - RNA, 22 nt, Human
caggcuuggagggcaguggcau

SEQ ID NO: 678494 - RNA, 22 nt, Human
gcucugacuggugggccacagu

SEQ ID NO: 678495 - RNA, 22 nt, Human
ugaggacaugagugggacagag

SEQ ID NO: 678496 - RNA, 22 nt, Human
uaacacaaaagaauaugugugu

SEQ ID NO: 678497 - RNA, 22 nt, Human
ugaggggagcuagcaugccuug

SEQ ID NO: 678498 - RNA, 22 nt, Human
uuuucuccagggaacaagguga

SEQ ID NO: 678499 - RNA, 22 nt, Human
uauaauaugaggcaggagugau

SEQ ID NO: 678500 - RNA, 22 nt, Human
caguccugugucccuugguggg

SEQ ID NO: 678501 - RNA, 22 nt, Human
gaaggagagagacaucgucccu

SEQ ID NO: 678502 - RNA, 22 nt, Human
ccuccuggccugugcagagccc

SEQ ID NO: 678503 - RNA, 22 nt, Human
ggaagugguagagccaugagug

SEQ ID NO: 678504 - RNA, 22 nt, Human
cagaguguuagcgcugguuggg

SEQ ID NO: 678505 - RNA, 22 nt, Human
ccaguggguaggccauggugag

SEQ ID NO: 678506 - RNA, 22 nt, Human
uaaaugagauuuguucuuuugu

SEQ ID NO: 678507 - RNA, 22 nt, Human
aacaagcagaugcaaugcacuu

SEQ ID NO: 678508 - RNA, 22 nt, Human
ggucuccagcugggacccugca

SEQ ID NO: 678509 - RNA, 22 nt, Human
cugggccuugccuugcccacag

SEQ ID NO: 678510 - RNA, 22 nt, Human
auugaacucugcaggagcugcc

SEQ ID NO: 678511 - RNA, 22 nt, Human
uggggagagguaucauugagau

SEQ ID NO: 678512 - RNA, 22 nt, Human
auaggaaaucgcuauuaaccua

SEQ ID NO: 678513 - RNA, 19 nt, Human
gagaaaccccgucuuuagg

SEQ ID NO: 678514 - RNA, 22 nt, Human
ucaauacauacaauguauagug

SEQ ID NO: 678515 - RNA, 22 nt, Human
ccuggcucauuaugugccccca

SEQ ID NO: 678516 - RNA, 22 nt, Human
aaucuguuuccauuagagucau

SEQ ID NO: 678517 - RNA, 22 nt, Human
uucuucugauugccuucugcaa

SEQ ID NO: 678518 - RNA, 22 nt, Human
gagcugugacacgcagcccagg

SEQ ID NO: 678519 - RNA, 22 nt, Human
ugucuuuucuacuguaagcaua

SEQ ID NO: 678520 - RNA, 22 nt, Human
gagcacagaaucuucccaugca

SEQ ID NO: 678521 - RNA, 22 nt, Human
uggcaguagagcuggaacuuga

SEQ ID NO: 678522 - RNA, 19 nt, Human
cacuaagaugagauauagc

SEQ ID NO: 678523 - RNA, 22 nt, Human
gcuuuacagagaaaguuugccu

SEQ ID NO: 678524 - RNA, 22 nt, Human
uauuagaaagcuuaauaucgug

SEQ ID NO: 678525 - RNA, 22 nt, Human
uuuuggcucugucuguaucuuu

SEQ ID NO: 678526 - RNA, 22 nt, Human
ggucccaggcugcgggcuggug

SEQ ID NO: 678527 - RNA, 22 nt, Human
cugggccuugcaucccagagcc

SEQ ID NO: 678528 - RNA, 22 nt, Human
gcauuguccugcuucugagugu

SEQ ID NO: 678529 - RNA, 22 nt, Human
aaggcuggguaaccuguccacu

SEQ ID NO: 678530 - RNA, 22 nt, Human
cccugagaugugaauuucagag

SEQ ID NO: 678531 - RNA, 22 nt, Human
agaccuggagugaagaguuccc

SEQ ID NO: 678532 - RNA, 22 nt, Human
ucugcaggugggccccuagaau

SEQ ID NO: 678533 - RNA, 22 nt, Human
augcuuuauugcuucugggcac

SEQ ID NO: 678534 - RNA, 22 nt, Human
ucuugcuaaagaccaacacauu

SEQ ID NO: 678535 - RNA, 22 nt, Human
ggauaagaaaauuguaauaacu

SEQ ID NO: 678536 - RNA, 22 nt, Human
aacaucuacagugagauguuag

SEQ ID NO: 678537 - RNA, 21 nt, Human
acacaaaccuccucagccugg

SEQ ID NO: 678538 - RNA, 22 nt, Human
uugauucaaaggggacaagugg

SEQ ID NO: 678539 - RNA, 22 nt, Human
auaugcagagagcaugaauagg

SEQ ID NO: 678540 - RNA, 22 nt, Human
ccacaucagaaauguuuacuca

SEQ ID NO: 678541 - RNA, 22 nt, Human
uggaaaacaugcacauuggauu

SEQ ID NO: 678542 - RNA, 22 nt, Human
cuugggugcucagggaaagcuu

SEQ ID NO: 678543 - RNA, 22 nt, Human
gauauuuacauuaagcacauug

SEQ ID NO: 678544 - RNA, 22 nt, Human
aauaaagcaggguccuugcacu

SEQ ID NO: 678545 - RNA, 22 nt, Human
uguaugaauauguuggggaggu

SEQ ID NO: 678546 - RNA, 21 nt, Human
agcugcuccagggagcucagg

SEQ ID NO: 678547 - RNA, 22 nt, Human
cacagagaauacugcucuugcu

SEQ ID NO: 678548 - RNA, 22 nt, Human
cacauaaauggugccauguuuu

SEQ ID NO: 678549 - RNA, 22 nt, Human
aucucuuugauggcuccuguga

SEQ ID NO: 678550 - RNA, 22 nt, Human
agugcugacucugggcacagug

SEQ ID NO: 678551 - RNA, 22 nt, Human
ugcaggcuuuagccccauggcu

SEQ ID NO: 678552 - RNA, 17 nt, Human
gccuucucugcccucac

SEQ ID NO: 678553 - RNA, 22 nt, Human
acugcuuuuagaaaucuauaga

SEQ ID NO: 678554 - RNA, 22 nt, Human
acauaugugucugcacaugccc

SEQ ID NO: 678555 - RNA, 22 nt, Human
uugcagggcuggaacauggaau

SEQ ID NO: 678556 - RNA, 22 nt, Human
cagauuucuuuagcaagcuaag

SEQ ID NO: 678557 - RNA, 22 nt, Human
ugucaaaaccagcaauuuuguu

SEQ ID NO: 678558 - RNA, 22 nt, Human
agccaguuggcuaugaggagga

SEQ ID NO: 678559 - RNA, 22 nt, Human
uacucacauucuguuucuugcu

SEQ ID NO: 678560 - RNA, 22 nt, Human
gugauaagacaguaggcacaag

SEQ ID NO: 678561 - RNA, 20 nt, Human
aggcagcuggccaggcaggu

SEQ ID NO: 678562 - RNA, 22 nt, Human
ucauugaaugcucugcagguug

SEQ ID NO: 678563 - RNA, 22 nt, Human
ucagugcugaguagcgugcacc

SEQ ID NO: 678564 - RNA, 22 nt, Human
uggcucaguuucaguccugguu

SEQ ID NO: 678565 - RNA, 22 nt, Human
acaauaauguauugccaaaagu

SEQ ID NO: 678566 - RNA, 22 nt, Human
gggugaggagcugccagucaug

SEQ ID NO: 678567 - RNA, 22 nt, Human
ggcaguggaggacccugugucu

SEQ ID NO: 678568 - RNA, 22 nt, Human
uuagugucuucuucauccucug

SEQ ID NO: 678569 - RNA, 22 nt, Human
agggcucugugacuaucacugc

SEQ ID NO: 678570 - RNA, 23 nt, Human
acugggucuaucuccagagaaga

SEQ ID NO: 678571 - RNA, 22 nt, Human
aagaaaagaaaccugaggcuuu

SEQ ID NO: 678572 - RNA, 22 nt, Human
uuaagacaguguauuuguuuuc

SEQ ID NO: 678573 - RNA, 22 nt, Human
augagucacucagcagaaaagg

SEQ ID NO: 678574 - RNA, 22 nt, Human
aggaccuguguuuuccuugaau

SEQ ID NO: 678575 - RNA, 18 nt, Human
gcuuugcacucauguugu

SEQ ID NO: 678576 - RNA, 22 nt, Human
agccaggcggggcagguuuccu

SEQ ID NO: 678577 - RNA, 22 nt, Human
aagaagcuguagggauuaacuc

SEQ ID NO: 678578 - RNA, 22 nt, Human
augcacacguacccuacaaggc

SEQ ID NO: 678579 - RNA, 22 nt, Human
aacaauguaaucuacucugcuc

SEQ ID NO: 678580 - RNA, 18 nt, Human
auccuuggggcugcugcu

SEQ ID NO: 678581 - RNA, 22 nt, Human
uuuccuucuuagcgguguucuu

SEQ ID NO: 678582 - RNA, 22 nt, Human
uuauggaauggagaaagucugc

SEQ ID NO: 678583 - RNA, 22 nt, Human
gaggaagccccauugaagccag

SEQ ID NO: 678584 - RNA, 22 nt, Human
cauuucuccugggugauaaauu

SEQ ID NO: 678585 - RNA, 22 nt, Human
uccucacaagcaagcacaggua

SEQ ID NO: 678586 - RNA, 23 nt, Human
ugcccagugggugcaggggguau

SEQ ID NO: 678587 - RNA, 22 nt, Human
aucaagcacuucuacaugacau

SEQ ID NO: 678588 - RNA, 22 nt, Human
agugaacaguuuggaacacaug

SEQ ID NO: 678589 - RNA, 22 nt, Human
uguacacauuuuuauguuaaca

SEQ ID NO: 678590 - RNA, 22 nt, Human
uugcuaaucauauuucaucacu

SEQ ID NO: 678591 - RNA, 22 nt, Human
aagggaaauccucagcccagga

SEQ ID NO: 678592 - RNA, 22 nt, Human
cugggaggcacuauucaggagg

SEQ ID NO: 678593 - RNA, 22 nt, Human
augugugcuacaggugugggaa

SEQ ID NO: 678594 - RNA, 22 nt, Human
auacauucagcagugcucauga

SEQ ID NO: 678595 - RNA, 22 nt, Human
aggacaguggcaaggcaggaca

SEQ ID NO: 678596 - RNA, 22 nt, Human
caccugcccagcaccugggauc

SEQ ID NO: 678597 - RNA, 20 nt, Human
uacaauacacaugcauauga

SEQ ID NO: 678598 - RNA, 22 nt, Human
agcugcugggaccccagaucca

SEQ ID NO: 678599 - RNA, 22 nt, Human
agccagggugagagggcuuugu

SEQ ID NO: 678600 - RNA, 22 nt, Human
aggaacaacugauucagucaac

SEQ ID NO: 678601 - RNA, 22 nt, Human
cauggcugcgagaagagugggu

SEQ ID NO: 678602 - RNA, 22 nt, Human
cugcagaggucuugcugauggu

SEQ ID NO: 678603 - RNA, 21 nt, Human
ucucccaaggagguccugagg

SEQ ID NO: 678604 - RNA, 22 nt, Human
gcagacacagggaaggcaagga

SEQ ID NO: 678605 - RNA, 22 nt, Human
gaagcacaaaguguaguuccga

SEQ ID NO: 678606 - RNA, 21 nt, Human
caggaacauucuuuacauuua

SEQ ID NO: 678607 - RNA, 22 nt, Human
cugugccaucuuuuugcuaccu

SEQ ID NO: 678608 - RNA, 22 nt, Human
aagaaguuaauaauggugagaa

SEQ ID NO: 678609 - RNA, 22 nt, Human
ccagucccgcaugguccagaau

SEQ ID NO: 678610 - RNA, 22 nt, Human
ucagagucugugcauucugcua

SEQ ID NO: 678611 - RNA, 22 nt, Human
agcuuuauggugccucacuuga

SEQ ID NO: 678612 - RNA, 22 nt, Human
aguguggguuuuauggagcccu

SEQ ID NO: 678613 - RNA, 22 nt, Human
uggcucuguucgccaucaggag

SEQ ID NO: 678614 - RNA, 20 nt, Human
cuguguagugcucagguaag

SEQ ID NO: 678615 - RNA, 22 nt, Human
aggaagggugucaugagcccuu

SEQ ID NO: 678616 - RNA, 22 nt, Human
agcugguucagaaauuagaugg

SEQ ID NO: 678617 - RNA, 22 nt, Human
uggcuucaggagcaccuggcuu

SEQ ID NO: 678618 - RNA, 22 nt, Human
guuuucaugucuauugggcaua

SEQ ID NO: 678619 - RNA, 22 nt, Human
caaauguaauaaggaguuuccc

SEQ ID NO: 678620 - RNA, 22 nt, Human
cacaguccagacuccuggaguu

SEQ ID NO: 678621 - RNA, 22 nt, Human
ccagccucaucauauuccugcu

SEQ ID NO: 678622 - RNA, 22 nt, Human
ggcucagaggagcuggaacggu

SEQ ID NO: 678623 - RNA, 22 nt, Human
aggcagugcaugcaaaggucgg

SEQ ID NO: 678624 - RNA, 22 nt, Human
agaucaaaaacuuaauggcuuu

SEQ ID NO: 678625 - RNA, 22 nt, Human
cuuccaagaugaacagcaagcg

SEQ ID NO: 678626 - RNA, 19 nt, Human
agacagagacugaaauaga

SEQ ID NO: 678627 - RNA, 22 nt, Human
acaauucucucauaucuuauua

SEQ ID NO: 678628 - RNA, 22 nt, Human
cccuuccugggugucccggagu

SEQ ID NO: 678629 - RNA, 22 nt, Human
cugugaaugcuaguaagagugc

SEQ ID NO: 678630 - RNA, 21 nt, Human
cuguggaagggaacuagaggg

SEQ ID NO: 678631 - RNA, 22 nt, Human
ugucugguggguugacaggcag

SEQ ID NO: 678632 - RNA, 20 nt, Human
gacauucauaguuauuacca

SEQ ID NO: 678633 - RNA, 22 nt, Human
aguaacacuauuuucauaugua

SEQ ID NO: 678634 - RNA, 22 nt, Human
ugaaugaguuuggcugcuguuc

SEQ ID NO: 678635 - RNA, 22 nt, Human
aucauguuuuaauuagcaaacu

SEQ ID NO: 678636 - RNA, 22 nt, Human
cccuucagugcuaggcugccug

SEQ ID NO: 678637 - RNA, 22 nt, Human
uucuuauaaguuaauauuucca

SEQ ID NO: 678638 - RNA, 22 nt, Human
aucaggugaugcucugguuccc

SEQ ID NO: 678639 - RNA, 20 nt, Human
agagugggugucacaggcug

SEQ ID NO: 678640 - RNA, 18 nt, Human
ggauaggaccuuaggcag

SEQ ID NO: 678641 - RNA, 22 nt, Human
ggaauacuaugacacacaggug

SEQ ID NO: 678642 - RNA, 22 nt, Human
uugcuucagagggagacacuuu

SEQ ID NO: 678643 - RNA, 22 nt, Human
aaucuagaguucccagcauaaa

SEQ ID NO: 678644 - RNA, 22 nt, Human
agggucucuggagagcugagga

SEQ ID NO: 678645 - RNA, 22 nt, Human
ugcaaagauaugagaagcugua

SEQ ID NO: 678646 - RNA, 22 nt, Human
uacaagucacuuccuuucuaaa

SEQ ID NO: 678647 - RNA, 22 nt, Human
uggcuucaguuccuguguuguu

SEQ ID NO: 678648 - RNA, 18 nt, Human
uugaauucuucuacaugu

SEQ ID NO: 678649 - RNA, 22 nt, Human
ucccaggaugaagacaguguug

SEQ ID NO: 678650 - RNA, 22 nt, Human
uagcuauuguugguaguuaccc

SEQ ID NO: 678651 - RNA, 22 nt, Human
agugcaggagccuggccagagc

SEQ ID NO: 678652 - RNA, 22 nt, Human
uuccagaguugggggagugguu

SEQ ID NO: 678653 - RNA, 22 nt, Human
gccacuguacuccagccugcga

SEQ ID NO: 678654 - RNA, 22 nt, Human
caucuuauuuucuucuagugcu

SEQ ID NO: 678655 - RNA, 22 nt, Human
cagagcggccacuagagggcgc

SEQ ID NO: 678656 - RNA, 22 nt, Human
uauuuucuggacagucuugcuu

SEQ ID NO: 678657 - RNA, 22 nt, Human
guugggguccaaugaagcgagc

SEQ ID NO: 678658 - RNA, 22 nt, Human
auuugccaugaagaguguuuga

SEQ ID NO: 678659 - RNA, 22 nt, Human
agagaagggggaaagaucucac

SEQ ID NO: 678660 - RNA, 22 nt, Human
uagaaauggagaacagauuaau

SEQ ID NO: 678661 - RNA, 23 nt, Human
ugggcaucuccucugugccaggc

SEQ ID NO: 678662 - RNA, 22 nt, Human
aaauguguuuagaugguuuauu

SEQ ID NO: 678663 - RNA, 22 nt, Human
agaguuauggacuuaaugcagg

SEQ ID NO: 678664 - RNA, 22 nt, Human
cagucccacuagugccaauacc

SEQ ID NO: 678665 - RNA, 22 nt, Human
gaggccagaaugagucucuggg

SEQ ID NO: 678666 - RNA, 22 nt, Human
uaaugcaacgugagauaauuaa

SEQ ID NO: 678667 - RNA, 21 nt, Human
ugguaauguucaguauccacu

SEQ ID NO: 678668 - RNA, 22 nt, Human
gaaugcagugacggaggcuuac

SEQ ID NO: 678669 - RNA, 22 nt, Human
agcauuugauauguuuaaaaag

SEQ ID NO: 678670 - RNA, 22 nt, Human
ugggaauagaacaagauagaga

SEQ ID NO: 678671 - RNA, 22 nt, Human
ucaaagaauguuaugaggguag

SEQ ID NO: 678672 - RNA, 22 nt, Human
gugcuucaaguucuuaauguuu

SEQ ID NO: 678673 - RNA, 22 nt, Human
uuacacagcuucuauccuugaa

SEQ ID NO: 678674 - RNA, 22 nt, Human
aagaauguucuuguagucauga

SEQ ID NO: 678675 - RNA, 22 nt, Human
cucuguggguauuuauauguau

SEQ ID NO: 678676 - RNA, 18 nt, Human
aacuguugaaauagcuug

SEQ ID NO: 678677 - RNA, 22 nt, Human
auugacaauguauuuguaucug

SEQ ID NO: 678678 - RNA, 22 nt, Human
cacaauuccauggcauucuuug

SEQ ID NO: 678679 - RNA, 22 nt, Human
uacauacacaaaugcugaaugg

SEQ ID NO: 678680 - RNA, 21 nt, Human
caguuuaauaacaaagaagga

SEQ ID NO: 678681 - RNA, 22 nt, Human
uguaauugcuuguuuaccugcu

SEQ ID NO: 678682 - RNA, 22 nt, Human
ucacauuuguucuugaaucuaa

SEQ ID NO: 678683 - RNA, 22 nt, Human
aacauguugcuuuaauaauauu

SEQ ID NO: 678684 - RNA, 22 nt, Human
ccagcugcccaagaggcauccu

SEQ ID NO: 678685 - RNA, 22 nt, Human
accaugcacagcuguucuauua

SEQ ID NO: 678686 - RNA, 22 nt, Human
gccuggaaugcaaugugacgaa

SEQ ID NO: 678687 - RNA, 22 nt, Human
ccugucagcugauggcuaugua

SEQ ID NO: 678688 - RNA, 22 nt, Human
acaguuugaauaauuuagauag

SEQ ID NO: 678689 - RNA, 22 nt, Human
cugcagagggguugaagggucc

SEQ ID NO: 678690 - RNA, 22 nt, Human
ucuuaacagugcuacagagcag

SEQ ID NO: 678691 - RNA, 19 nt, Human
cucuggagcagacacugga

SEQ ID NO: 678692 - RNA, 22 nt, Human
cugcucagcggaaggaagagcg

SEQ ID NO: 678693 - RNA, 22 nt, Human
caaagcugacgaggucagcauc

SEQ ID NO: 678694 - RNA, 22 nt, Human
augcucuggaguacgugaaauu

SEQ ID NO: 678695 - RNA, 22 nt, Human
gaaagggucuuugauuucccuc

SEQ ID NO: 678696 - RNA, 22 nt, Human
cagaggaggcgguauacacugc

SEQ ID NO: 678697 - RNA, 22 nt, Human
agcuuuauauuuaaugaauucu

SEQ ID NO: 678698 - RNA, 22 nt, Human
ucugccaucuuaauucucuuuu

SEQ ID NO: 678699 - RNA, 23 nt, Human
ucauucaaggcugguaucuuuca

SEQ ID NO: 678700 - RNA, 22 nt, Human
gugacauuuacgaaucuuaucc

SEQ ID NO: 678701 - RNA, 20 nt, Human
ucugauaacugguugugauu

SEQ ID NO: 678702 - RNA, 22 nt, Human
ucaaaguagggguaagccaggc

SEQ ID NO: 678703 - RNA, 21 nt, Human
cuguccuggucuagaggcaca

SEQ ID NO: 678704 - RNA, 22 nt, Human
uuauagugcauaauuaacaugg

SEQ ID NO: 678705 - RNA, 22 nt, Human
guuuucucugagaugccuuucu

SEQ ID NO: 678706 - RNA, 22 nt, Human
cucuugccagagaugagacucu

SEQ ID NO: 678707 - RNA, 22 nt, Human
ucucucuugucaccccaucugc

SEQ ID NO: 678708 - RNA, 22 nt, Human
uucaaaguccugucagguagcc

SEQ ID NO: 678709 - RNA, 22 nt, Human
aguaaagcggugucacagaaug

SEQ ID NO: 678710 - RNA, 22 nt, Human
uguuuagaugcaaagucucaca

SEQ ID NO: 678711 - RNA, 22 nt, Human
ugcccacaucugcuuauuucau

SEQ ID NO: 678712 - RNA, 22 nt, Human
auugacaaaaacaggugguuga

SEQ ID NO: 678713 - RNA, 22 nt, Human
ucuucaugucucugcuugaguc

SEQ ID NO: 678714 - RNA, 22 nt, Human
cacacuuucagguccucuuugc

SEQ ID NO: 678715 - RNA, 19 nt, Human
gagcugagaguagcacugg

SEQ ID NO: 678716 - RNA, 20 nt, Human
uguaaauaggcauuguaguu

SEQ ID NO: 678717 - RNA, 22 nt, Human
ucuuacauauagcaugaguaca

SEQ ID NO: 678718 - RNA, 22 nt, Human
gggcucucaugaguguguggua

SEQ ID NO: 678719 - RNA, 22 nt, Human
cuuucuugguccugaagauggc

SEQ ID NO: 678720 - RNA, 22 nt, Human
gccugccuagaauugcagcuuu

SEQ ID NO: 678721 - RNA, 22 nt, Human
guucagcuaggaauggagaugc

SEQ ID NO: 678722 - RNA, 22 nt, Human
uuggaauucagcuugcuuauaa

SEQ ID NO: 678723 - RNA, 22 nt, Human
acauugaccugauuuugaagac

SEQ ID NO: 678724 - RNA, 22 nt, Human
cuggccugagcacagcggcugc

SEQ ID NO: 678725 - RNA, 22 nt, Human
ucagugcucaggggagccgagg

SEQ ID NO: 678726 - RNA, 22 nt, Human
cagaauugagagaggcuguucu

SEQ ID NO: 678727 - RNA, 22 nt, Human
ggucuggagcuaaucuuguugg

SEQ ID NO: 678728 - RNA, 22 nt, Human
ugucagcaucauuuguugaagg

SEQ ID NO: 678729 - RNA, 22 nt, Human
ccugggaguggcacucacagca

SEQ ID NO: 678730 - RNA, 22 nt, Human
aaaacacacuggaccaauuuaa

SEQ ID NO: 678731 - RNA, 22 nt, Human
cagaggugacccauaguaccuc

SEQ ID NO: 678732 - RNA, 22 nt, Human
uacugcaaaccauuuacaguag

SEQ ID NO: 678733 - RNA, 22 nt, Human
ugaaaugucaguguuuuauaag

SEQ ID NO: 678734 - RNA, 22 nt, Human
gugggacucuucuuuggcagug

SEQ ID NO: 678735 - RNA, 22 nt, Human
uccaaauugacaguagugauua

SEQ ID NO: 678736 - RNA, 22 nt, Human
uagguuuuccuaaaauucuggu

SEQ ID NO: 678737 - RNA, 22 nt, Human
uucucucuuuuggguaggaggu

SEQ ID NO: 678738 - RNA, 22 nt, Human
agcugcugagagucugccgggc

SEQ ID NO: 678739 - RNA, 22 nt, Human
cuuuccucuggcacugucuggu

SEQ ID NO: 678740 - RNA, 22 nt, Human
acgaauaagagauaaagcaagg

SEQ ID NO: 678741 - RNA, 23 nt, Human
cagaaauaaacugguuuguagau

SEQ ID NO: 678742 - RNA, 22 nt, Human
aguaugaagauuauaauuuuuc

SEQ ID NO: 678743 - RNA, 22 nt, Human
aauagugcuuacauuaucauga

SEQ ID NO: 678744 - RNA, 22 nt, Human
ggucuuccgagaggccugugcu

SEQ ID NO: 678745 - RNA, 22 nt, Human
ggagguggcagggaacauaauu

SEQ ID NO: 678746 - RNA, 22 nt, Human
guuuagaaaauagugaagcaag

SEQ ID NO: 678747 - RNA, 22 nt, Human
cuuggcaccaccaaguggccau

SEQ ID NO: 678748 - RNA, 22 nt, Human
agauuucacaugcugcucuauu

SEQ ID NO: 678749 - RNA, 22 nt, Human
uuuaaggaaaaaauguacuuag

SEQ ID NO: 678750 - RNA, 21 nt, Human
gggacaccaacuccagggcuu

SEQ ID NO: 678751 - RNA, 22 nt, Human
uaggcuccugaguccacagcac

SEQ ID NO: 678752 - RNA, 22 nt, Human
cacuuuuaacaggagaauuccc

SEQ ID NO: 678753 - RNA, 22 nt, Human
aaaccucuuaauggccuguaau

SEQ ID NO: 678754 - RNA, 19 nt, Human
gaacacuuacuauauuucu

SEQ ID NO: 678755 - RNA, 22 nt, Human
agcuggagaguuuccaggaagg

SEQ ID NO: 678756 - RNA, 22 nt, Human
ucacaugagguuaugacaaagc

SEQ ID NO: 678757 - RNA, 22 nt, Human
cauuucacacauaaacuugggu

SEQ ID NO: 678758 - RNA, 20 nt, Human
guugaaaguaauaugaugcu

SEQ ID NO: 678759 - RNA, 22 nt, Human
uccaggcaggguuaaggguccu

SEQ ID NO: 678760 - RNA, 22 nt, Human
aggccugccuggagccuggcug

SEQ ID NO: 678761 - RNA, 22 nt, Human
uggagucagcuagaccuguguu

SEQ ID NO: 678762 - RNA, 22 nt, Human
ucuggcccaaguuuucggugag

SEQ ID NO: 678763 - RNA, 22 nt, Human
gaggacucugcaggcugcuccu

SEQ ID NO: 678764 - RNA, 19 nt, Human
ugaggccagcuggcauuuu

SEQ ID NO: 678765 - RNA, 22 nt, Human
cugcccauaaacuuuccaccug

SEQ ID NO: 678766 - RNA, 22 nt, Human
cacaguuucugaacacuuugca

SEQ ID NO: 678767 - RNA, 22 nt, Human
uggugcagaugcaggucacugg

SEQ ID NO: 678768 - RNA, 22 nt, Human
cauccugaagaagccgcacugu

SEQ ID NO: 678769 - RNA, 22 nt, Human
ucuccagggcccccgagcguug

SEQ ID NO: 678770 - RNA, 22 nt, Human
augcugaauauuagccucauga

SEQ ID NO: 678771 - RNA, 22 nt, Human
ugauaaacauuuuaggaacuaa

SEQ ID NO: 678772 - RNA, 22 nt, Human
uggcaccaaaagcagacguauu

SEQ ID NO: 678773 - RNA, 22 nt, Human
ugaguuaaaugagaacaugaaa

SEQ ID NO: 678774 - RNA, 22 nt, Human
auccguuuuuaugaaaugucca

SEQ ID NO: 678775 - RNA, 22 nt, Human
gcugagccacaggcagugcacu

SEQ ID NO: 678776 - RNA, 22 nt, Human
uaacaacucaguuuguuccuug

SEQ ID NO: 678777 - RNA, 22 nt, Human
caaaccuugcagaacugggcag

SEQ ID NO: 678778 - RNA, 21 nt, Human
agaaauguaucauucuuuucc

SEQ ID NO: 678779 - RNA, 22 nt, Human
uuggaaaugauuucuauuauua

SEQ ID NO: 678780 - RNA, 22 nt, Human
uucuugaguaucugcacagugc

SEQ ID NO: 678781 - RNA, 22 nt, Human
cuucuccuaaggucagaauugc

SEQ ID NO: 678782 - RNA, 22 nt, Human
uggucccuaaagaugucuacau

SEQ ID NO: 678783 - RNA, 22 nt, Human
uguccuuguuccuaauguaaaa

SEQ ID NO: 678784 - RNA, 22 nt, Human
auuagaaugacagaaaugaggc

SEQ ID NO: 678785 - RNA, 20 nt, Human
gaggcucugggcauggcgcc

SEQ ID NO: 678786 - RNA, 22 nt, Human
caaggcagcuguagggauuugg

SEQ ID NO: 678787 - RNA, 22 nt, Human
gcaggucuaucaggcugcaggu

SEQ ID NO: 678788 - RNA, 22 nt, Human
gggaggaggaauguuuugugua

SEQ ID NO: 678789 - RNA, 22 nt, Human
cagaccucaguccucaguagga

SEQ ID NO: 678790 - RNA, 22 nt, Human
gggggugaggacaggagcacug

SEQ ID NO: 678791 - RNA, 22 nt, Human
ggagugagagaguuuaagguca

SEQ ID NO: 678792 - RNA, 22 nt, Human
acccacgaagaugagcggcaug

SEQ ID NO: 678793 - RNA, 22 nt, Human
ucaguguuuaccguauguuguu

SEQ ID NO: 678794 - RNA, 22 nt, Human
auguccuuuuaaaaugugagaa

SEQ ID NO: 678795 - RNA, 21 nt, Human
gacauccaugugaguggcagu

SEQ ID NO: 678796 - RNA, 22 nt, Human
gcagacaauuuauuagcagauu

SEQ ID NO: 678797 - RNA, 22 nt, Human
agccuaggguucugaugucacu

SEQ ID NO: 678798 - RNA, 22 nt, Human
uucucuggacagugaagagagg

SEQ ID NO: 678799 - RNA, 22 nt, Human
aacuucauguaauuuaaaacag
